United States Patent Application Publication US 2008/0113351 A1 - sequence listing, part 16

SEQ ID NO: 378648 - DNA, 19 bp, Homo sapiens
  siRNA target sequence for KIAA1318 (NM_020769.1,2741-2759).
catccatgccacaagtgaa

SEQ ID NO: 378649 - DNA, 19 bp, Homo sapiens
  siRNA target sequence for KIAA1318 (NM_020769.1,2935-2953).
gtgtcctcaccactagtaa

SEQ ID NO: 378650 - DNA, 19 bp, Homo sapiens
  siRNA target sequence for KIAA1318 (NM_020769.1,3171-3189).
gtctatgccgctaatggaa

SEQ ID NO: 378651 - DNA, 19 bp, Homo sapiens
  siRNA target sequence for KIAA1318 (NM_020769.1,3229-3247).
gttgcgaactctagatcta

SEQ ID NO: 378652 - DNA, 19 bp, Homo sapiens
  siRNA target sequence for KIAA1318 (NM_020769.1,3232-3250).
gcgaactctagatctatgt

SEQ ID NO: 378653 - DNA, 19 bp, Homo sapiens
  siRNA target sequence for KIAA1318 (NM_020769.1,3252-3270).
cttgtcacaaacaacatat

SEQ ID NO: 378654 - DNA, 19 bp, Homo sapiens
  siRNA target sequence for KIAA1318 (NM_020769.1,3288-3306).
ggccacagcgccaattaga

SEQ ID NO: 378655 - DNA, 19 bp, Homo sapiens
  siRNA target sequence for KIAA1318 (NM_020769.1,3323-3341).
caaggtccacatcatttat

SEQ ID NO: 378656 - DNA, 19 bp, Homo sapiens
  siRNA target sequence for KIAA1318 (NM_020769.1,3522-3540).
gtccactccggaaatcaaa

SEQ ID NO: 378657 - DNA, 19 bp, Homo sapiens
  siRNA target sequence for KIAA1318 (NM_020769.1,3558-3576).
ggcatccacctctcacatt

SEQ ID NO: 378658 - DNA, 19 bp, Homo sapiens
  siRNA target sequence for KIAA1318 (NM_020769.1,3559-3577).
gcatccacctctcacatta

SEQ ID NO: 378659 - DNA, 19 bp, Homo sapiens
  siRNA target sequence for KIAA1318 (NM_020769.1,3686-3704).
cactctgctacctcttaga

SEQ ID NO: 378660 - DNA, 19 bp, Homo sapiens
  siRNA target sequence for KIAA1318 (NM_020769.1,3779-3797).
ggtttttggacgattcaga

SEQ ID NO: 378661 - DNA, 19 bp, Homo sapiens
  siRNA target sequence for KIAA1318 (NM_020769.1,3804-3822).
ggcatttctggtatctctt

SEQ ID NO: 378662 - DNA, 19 bp, Homo sapiens
  siRNA target sequence for KIAA1318 (NM_020769.1,3836-3854).
cagagaggtggttcatctt

SEQ ID NO: 378663 - DNA, 19 bp, Homo sapiens
  siRNA target sequence for KIAA1318 (NM_020769.1,3842-3860).
ggtggttcatcttgcaaat

SEQ ID NO: 378664 - DNA, 19 bp, Homo sapiens
  siRNA target sequence for KIAA1318 (NM_020769.1,3905-3923).
gaagatcccagggcatata

SEQ ID NO: 378665 - DNA, 19 bp, Homo sapiens
  siRNA target sequence for KIAA1318 (NM_020769.1,3908-3926).
gatcccagggcatatatga

SEQ ID NO: 378666 - DNA, 19 bp, Homo sapiens
  siRNA target sequence for KIAA1318 (NM_020769.1,3929-3947).
ccctatctgagatagacat

SEQ ID NO: 378667 - DNA, 19 bp, Homo sapiens
  siRNA target sequence for KIAA1318 (NM_020769.1,3970-3988).
cccaaacagggccaaaagt

SEQ ID NO: 378668 - DNA, 19 bp, Homo sapiens
  siRNA target sequence for KIAA1318 (NM_020769.1,4018-4036).
ctgctggcccgacatttgt

SEQ ID NO: 378669 - DNA, 19 bp, Homo sapiens
  siRNA target sequence for KIAA1318 (NM_020769.1,4020-4038).
gctggcccgacatttgtct

SEQ ID NO: 378670 - DNA, 19 bp, Homo sapiens
  siRNA target sequence for KIAA1318 (NM_020769.1,4021-4039).
ctggcccgacatttgtctt

SEQ ID NO: 378671 - DNA, 19 bp, Homo sapiens
  siRNA target sequence for KIAA1318 (NM_020769.1,4226-4244).
cagcctgtaagcggaataa

SEQ ID NO: 378672 - DNA, 19 bp, Homo sapiens
  siRNA target sequence for KIAA1318 (NM_020769.1,4229-4247).
cctgtaagcggaataatga

SEQ ID NO: 378673 - DNA, 19 bp, Homo sapiens
  siRNA target sequence for KIAA1318 (NM_020769.1,4303-4321).
gtttccaaacgctgttact

SEQ ID NO: 378674 - DNA, 19 bp, Homo sapiens
  siRNA target sequence for KIAA1318 (NM_020769.1,4313-4331).
gctgttactacctgaaaga

SEQ ID NO: 378675 - DNA, 19 bp, Homo sapiens
  siRNA target sequence for KIAA1318 (NM_020769.1,4343-4361).
cccaagaaggtcttcatga

SEQ ID NO: 378676 - DNA, 19 bp, Homo sapiens
  siRNA target sequence for 182-FIP (NM_020772.1,97-115).
caccaccattattatttct

SEQ ID NO: 378677 - DNA, 19 bp, Homo sapiens
  siRNA target sequence for 182-FIP (NM_020772.1,207-225).
gccaaagccgctgaaacat

SEQ ID NO: 378678 - DNA, 19 bp, Homo sapiens
  siRNA target sequence for 182-FIP (NM_020772.1,327-345).
gaacctgagttctgatgaa

SEQ ID NO: 378679 - DNA, 19 bp, Homo sapiens
  siRNA target sequence for 182-FIP (NM_020772.1,544-562).
gatactataccaattccaa

SEQ ID NO: 378680 - DNA, 19 bp, Homo sapiens
  siRNA target sequence for 182-FIP (NM_020772.1,559-577).
ccaaatggtgtggtaacaa

SEQ ID NO: 378681 - DNA, 19 bp, Homo sapiens
  siRNA target sequence for 182-FIP (NM_020772.1,587-605).
gttatattactaatggtta

SEQ ID NO: 378682 - DNA, 19 bp, Homo sapiens
  siRNA target sequence for 182-FIP (NM_020772.1,611-629).
gtaaaggagcagataatga

SEQ ID NO: 378683 - DNA, 19 bp, Homo sapiens
  siRNA target sequence for 182-FIP (NM_020772.1,637-655).
ggatctgagagcggatata

SEQ ID NO: 378684 - DNA, 19 bp, Homo sapiens
  siRNA target sequence for 182-FIP (NM_020772.1,672-690).
gaaagctaggcgcaatagt

SEQ ID NO: 378685 - DNA, 19 bp, Homo sapiens
  siRNA target sequence for 182-FIP (NM_020772.1,692-710).
ccaagggttgtgaaaacct

SEQ ID NO: 378686 - DNA, 19 bp, Homo sapiens
  siRNA target sequence for 182-FIP (NM_020772.1,693-711).
caagggttgtgaaaacctt

SEQ ID NO: 378687 - DNA, 19 bp, Homo sapiens
  siRNA target sequence for 182-FIP (NM_020772.1,697-715).
ggttgtgaaaaccttaata

SEQ ID NO: 378688 - DNA, 19 bp, Homo sapiens
  siRNA target sequence for 182-FIP (NM_020772.1,698-716).
gttgtgaaaaccttaatat

SEQ ID NO: 378689 - DNA, 19 bp, Homo sapiens
  siRNA target sequence for 182-FIP (NM_020772.1,744-762).
gaccagtgtcccaacctta

SEQ ID NO: 378690 - DNA, 19 bp, Homo sapiens
  siRNA target sequence for 182-FIP (NM_020772.1,766-784).
cagggacttgaaactttca

SEQ ID NO: 378691 - DNA, 19 bp, Homo sapiens
  siRNA target sequence for 182-FIP (NM_020772.1,783-801).
caagcctgactatagtgaa

SEQ ID NO: 378692 - DNA, 19 bp, Homo sapiens
  siRNA target sequence for 182-FIP (NM_020772.1,787-805).
cctgactatagtgaacaaa

SEQ ID NO: 378693 - DNA, 19 bp, Homo sapiens
  siRNA target sequence for 182-FIP (NM_020772.1,788-806).
ctgactatagtgaacaaaa

SEQ ID NO: 378694 - DNA, 19 bp, Homo sapiens
  siRNA target sequence for 182-FIP (NM_020772.1,831-849).
gcccatttggaagtatgaa

SEQ ID NO: 378695 - DNA, 19 bp, Homo sapiens
  siRNA target sequence for 182-FIP (NM_020772.1,922-940).
cctggtgtgagcagcaaaa

SEQ ID NO: 378696 - DNA, 19 bp, Homo sapiens
  siRNA target sequence for 182-FIP (NM_020772.1,993-1011).
ggactcgtggaccctattt

SEQ ID NO: 378697 - DNA, 19 bp, Homo sapiens
  siRNA target sequence for 182-FIP (NM_020772.1,996-1014).
ctcgtggaccctatttaaa

SEQ ID NO: 378698 - DNA, 19 bp, Homo sapiens
  siRNA target sequence for 182-FIP (NM_020772.1,999-1017).
gtggaccctatttaaacca

SEQ ID NO: 378699 - DNA, 19 bp, Homo sapiens
  siRNA target sequence for 182-FIP (NM_020772.1,1035-1053).
ggacaatagcagtgctaaa

SEQ ID NO: 378700 - DNA, 19 bp, Homo sapiens
  siRNA target sequence for 182-FIP (NM_020772.1,1036-1054).
gacaatagcagtgctaaaa

SEQ ID NO: 378701 - DNA, 19 bp, Homo sapiens
  siRNA target sequence for 182-FIP (NM_020772.1,1046-1064).
gtgctaaaatagttcctaa

SEQ ID NO: 378702 - DNA, 19 bp, Homo sapiens
  siRNA target sequence for 182-FIP (NM_020772.1,1060-1078).
cctaaaataagttatgcaa

SEQ ID NO: 378703 - DNA, 19 bp, Homo sapiens
  siRNA target sequence for 182-FIP (NM_020772.1,1089-1107).
ggaaaacctcaacaaaact

SEQ ID NO: 378704 - DNA, 19 bp, Homo sapiens
  siRNA target sequence for 182-FIP (NM_020772.1,1096-1114).
ctcaacaaaactatacaga

SEQ ID NO: 378705 - DNA, 19 bp, Homo sapiens
  siRNA target sequence for 182-FIP (NM_020772.1,1204-1222).
cctatgtcagcgctgaaat

SEQ ID NO: 378706 - DNA, 19 bp, Homo sapiens
  siRNA target sequence for 182-FIP (NM_020772.1,1213-1231).
gcgctgaaatctgttactt

SEQ ID NO: 378707 - DNA, 19 bp, Homo sapiens
  siRNA target sequence for 182-FIP (NM_020772.1,1225-1243).
gttacttctgccaactttt

SEQ ID NO: 378708 - DNA, 19 bp, Homo sapiens
  siRNA target sequence for 182-FIP (NM_020772.1,1294-1312).
ggtcagccactgctaacta

SEQ ID NO: 378709 - DNA, 19 bp, Homo sapiens
  siRNA target sequence for 182-FIP (NM_020772.1,1305-1323).
gctaactactgctgctaat

SEQ ID NO: 378710 - DNA, 19 bp, Homo sapiens
  siRNA target sequence for 182-FIP (NM_020772.1,1338-1356).
ctcttctgggacagattca

SEQ ID NO: 378711 - DNA, 19 bp, Homo sapiens
  siRNA target sequence for 182-FIP (NM_020772.1,1362-1380).
ccaggacatgagtctaact

SEQ ID NO: 378712 - DNA, 19 bp, Homo sapiens
  siRNA target sequence for 182-FIP (NM_020772.1,1365-1383).
ggacatgagtctaacttca

SEQ ID NO: 378713 - DNA, 19 bp, Homo sapiens
  siRNA target sequence for 182-FIP (NM_020772.1,1387-1405).
gctgttgaacaaattaaga

SEQ ID NO: 378714 - DNA, 19 bp, Homo sapiens
  siRNA target sequence for 182-FIP (NM_020772.1,1390-1408).
gttgaacaaattaagacta

SEQ ID NO: 378715 - DNA, 19 bp, Homo sapiens
  siRNA target sequence for 182-FIP (NM_020772.1,1404-1422).
gactagcctttttatctat

SEQ ID NO: 378716 - DNA, 19 bp, Homo sapiens
  siRNA target sequence for 182-FIP (NM_020772.1,1489-1507).
caaaacctgggggatatct

SEQ ID NO: 378717 - DNA, 19 bp, Homo sapiens
  siRNA target sequence for 182-FIP (NM_020772.1,1501-1519).
gatatcttccagaatcagt

SEQ ID NO: 378718 - DNA, 19 bp, Homo sapiens
  siRNA target sequence for 182-FIP (NM_020772.1,1510-1528).
cagaatcagtggggtttat

SEQ ID NO: 378719 - DNA, 19 bp, Homo sapiens
  siRNA target sequence for 182-FIP (NM_020772.1,1549-1567).
gctggccctgagactgtta

SEQ ID NO: 378720 - DNA, 19 bp, Homo sapiens
  siRNA target sequence for 182-FIP (NM_020772.1,1577-1595).
catcagagcataaagtgat

SEQ ID NO: 378721 - DNA, 19 bp, Homo sapiens
  siRNA target sequence for 182-FIP (NM_020772.1,1613-1631).
gagaatatcctgctacttt

SEQ ID NO: 378722 - DNA, 19 bp, Homo sapiens
  siRNA target sequence for 182-FIP (NM_020772.1,1709-1727).
ggactagtcctcaagttct

SEQ ID NO: 378723 - DNA, 19 bp, Homo sapiens
  siRNA target sequence for 182-FIP (NM_020772.1,1728-1746).
gggtagcattctaaaatct

SEQ ID NO: 378724 - DNA, 19 bp, Homo sapiens
  siRNA target sequence for 182-FIP (NM_020772.1,1775-1793).
ccttggaacccagtcatat

SEQ ID NO: 378725 - DNA, 19 bp, Homo sapiens
  siRNA target sequence for 182-FIP (NM_020772.1,1776-1794).
cttggaacccagtcatata

SEQ ID NO: 378726 - DNA, 19 bp, Homo sapiens
  siRNA target sequence for 182-FIP (NM_020772.1,1779-1797).
ggaacccagtcatataggt

SEQ ID NO: 378727 - DNA, 19 bp, Homo sapiens
  siRNA target sequence for 182-FIP (NM_020772.1,1818-1836).
cagtagtcaaggtgcttta

SEQ ID NO: 378728 - DNA, 19 bp, Homo sapiens
  siRNA target sequence for 182-FIP (NM_020772.1,1823-1841).
gtcaaggtgctttagtgtt

SEQ ID NO: 378729 - DNA, 19 bp, Homo sapiens
  siRNA target sequence for 182-FIP (NM_020772.1,1828-1846).
ggtgctttagtgtttctct

SEQ ID NO: 378730 - DNA, 19 bp, Homo sapiens
  siRNA target sequence for 182-FIP (NM_020772.1,1851-1869).
ggactacgagatagaaagt

SEQ ID NO: 378731 - DNA, 19 bp, Homo sapiens
  siRNA target sequence for 182-FIP (NM_020772.1,1854-1872).
ctacgagatagaaagtcaa

SEQ ID NO: 378732 - DNA, 19 bp, Homo sapiens
  siRNA target sequence for 182-FIP (NM_020772.1,1886-1904).
ctcctacgaacactttgtt

SEQ ID NO: 378733 - DNA, 19 bp, Homo sapiens
  siRNA target sequence for 182-FIP (NM_020772.1,1936-1954).
ggcctagaaaggaatgata

SEQ ID NO: 378734 - DNA, 19 bp, Homo sapiens
  siRNA target sequence for 182-FIP (NM_020772.1,1971-1989).
cctgagggctgctattgta

SEQ ID NO: 378735 - DNA, 19 bp, Homo sapiens
  siRNA target sequence for 182-FIP (NM_020772.1,1978-1996).
gctgctattgtatatcaca

SEQ ID NO: 378736 - DNA, 19 bp, Homo sapiens
  siRNA target sequence for 182-FIP (NM_020772.1,1982-2000).
ctattgtatatcacactaa

SEQ ID NO: 378737 - DNA, 19 bp, Homo sapiens
  siRNA target sequence for 182-FIP (NM_020772.1,2039-2057).
ccaaaaggataatcactta

SEQ ID NO: 378738 - DNA, 19 bp, Homo sapiens
  siRNA target sequence for KIAA1322 (NM_020773.1,212-230).
ctgcaacacgtcaatctca

SEQ ID NO: 378739 - DNA, 19 bp, Homo sapiens
  siRNA target sequence for KIAA1322 (NM_020773.1,314-332).
gtggactcggggattccta

SEQ ID NO: 378740 - DNA, 19 bp, Homo sapiens
  siRNA target sequence for KIAA1322 (NM_020773.1,488-506).
cagagcgtgcgcaaatcct

SEQ ID NO: 378741 - DNA, 19 bp, Homo sapiens
  siRNA target sequence for KIAA1322 (NM_020773.1,515-533).
cccaggacaggctatgact

SEQ ID NO: 378742 - DNA, 19 bp, Homo sapiens
  siRNA target sequence for KIAA1322 (NM_020773.1,525-543).
gctatgactcggtaaagct

SEQ ID NO: 378743 - DNA, 19 bp, Homo sapiens
  siRNA target sequence for KIAA1322 (NM_020773.1,530-548).
gactcggtaaagctctata

SEQ ID NO: 378744 - DNA, 19 bp, Homo sapiens
  siRNA target sequence for KIAA1322 (NM_020773.1,707-725).
gacgatgacccacagttta

SEQ ID NO: 378745 - DNA, 19 bp, Homo sapiens
  siRNA target sequence for KIAA1322 (NM_020773.1,710-728).
gatgacccacagtttacca

SEQ ID NO: 378746 - DNA, 19 bp, Homo sapiens
  siRNA target sequence for KIAA1322 (NM_020773.1,791-809).
gctgaggaggggagtaaat

SEQ ID NO: 378747 - DNA, 19 bp, Homo sapiens
  siRNA target sequence for KIAA1322 (NM_020773.1,794-812).
gaggaggggagtaaattga

SEQ ID NO: 378748 - DNA, 19 bp, Homo sapiens
  siRNA target sequence for KIAA1322 (NM_020773.1,796-814).
ggaggggagtaaattgaaa

SEQ ID NO: 378749 - DNA, 19 bp, Homo sapiens
  siRNA target sequence for KIAA1322 (NM_020773.1,823-841).
gccatttagtaacttcttt

SEQ ID NO: 378750 - DNA, 19 bp, Homo sapiens
  siRNA target sequence for KIAA1322 (NM_020773.1,846-864).
ggaacttgcttgctagaaa

SEQ ID NO: 378751 - DNA, 19 bp, Homo sapiens
  siRNA target sequence for KIAA1322 (NM_020773.1,847-865).
gaacttgcttgctagaaaa

SEQ ID NO: 378752 - DNA, 19 bp, Homo sapiens
  siRNA target sequence for KIAA1322 (NM_020773.1,853-871).
gcttgctagaaaacaaagt

SEQ ID NO: 378753 - DNA, 19 bp, Homo sapiens
  siRNA target sequence for KIAA1322 (NM_020773.1,878-896).
cttgacaaacacaatgact

SEQ ID NO: 378754 - DNA, 19 bp, Homo sapiens
  siRNA target sequence for KIAA1322 (NM_020773.1,893-911).
gacttgggatggaagttat

SEQ ID NO: 378755 - DNA, 19 bp, Homo sapiens
  siRNA target sequence for KIAA1322 (NM_020773.1,1271-1289).
cctaactgggaaacaatgt

SEQ ID NO: 378756 - DNA, 19 bp, Homo sapiens
  siRNA target sequence for KIAA1322 (NM_020773.1,1364-1382).
gccattggcaacgagttaa

SEQ ID NO: 378757 - DNA, 19 bp, Homo sapiens
  siRNA target sequence for KIAA1322 (NM_020773.1,1365-1383).
ccattggcaacgagttaaa

SEQ ID NO: 378758 - DNA, 19 bp, Homo sapiens
  siRNA target sequence for KIAA1322 (NM_020773.1,1370-1388).
ggcaacgagttaaatatca

SEQ ID NO: 378759 - DNA, 19 bp, Homo sapiens
  siRNA target sequence for KIAA1322 (NM_020773.1,1389-1407).
cccacgagctctttgacat

SEQ ID NO: 378760 - DNA, 19 bp, Homo sapiens
  siRNA target sequence for KIAA1322 (NM_020773.1,1505-1523).
gccagtctggagcttatta

SEQ ID NO: 378761 - DNA, 19 bp, Homo sapiens
  siRNA target sequence for KIAA1322 (NM_020773.1,1536-1554).
ctagaacatttcctaatct

SEQ ID NO: 378762 - DNA, 19 bp, Homo sapiens
  siRNA target sequence for KIAA1322 (NM_020773.1,1564-1582).
ccagcaaggtggtccatat

SEQ ID NO: 378763 - DNA, 19 bp, Homo sapiens
  siRNA target sequence for KIAA1322 (NM_020773.1,1645-1663).
ccagggcatgtccttcata

SEQ ID NO: 378764 - DNA, 19 bp, Homo sapiens
  siRNA target sequence for KIAA1322 (NM_020773.1,1672-1690).
gttgatcttgaacttagat

SEQ ID NO: 378765 - DNA, 19 bp, Homo sapiens
  siRNA target sequence for KIAA1322 (NM_020773.1,1675-1693).
gatcttgaacttagatact

SEQ ID NO: 378766 - DNA, 19 bp, Homo sapiens
  siRNA target sequence for KIAA1322 (NM_020773.1,1734-1752).
cctgtcaaatggcgttttt

SEQ ID NO: 378767 - DNA, 19 bp, Homo sapiens
  siRNA target sequence for KIAA1322 (NM_020773.1,1757-1775).
gtggaccatggccttatgt

SEQ ID NO: 378768 - DNA, 19 bp, Homo sapiens
  siRNA target sequence for KIAA1322 (NM_020773.1,1763-1781).
catggccttatgttgactt

SEQ ID NO: 378769 - DNA, 19 bp, Homo sapiens
  siRNA target sequence for KIAA1322 (NM_020773.1,1766-1784).
ggccttatgttgacttatt

SEQ ID NO: 378770 - DNA, 19 bp, Homo sapiens
  siRNA target sequence for KIAA1322 (NM_020773.1,1779-1797).
cttattttgctgcatttga

SEQ ID NO: 378771 - DNA, 19 bp, Homo sapiens
  siRNA target sequence for KIAA1322 (NM_020773.1,1862-1880).
gatatctacctaattgatt

SEQ ID NO: 378772 - DNA, 19 bp, Homo sapiens
  siRNA target sequence for KIAA1322 (NM_020773.1,1870-1888).
cctaattgattggatcttt

SEQ ID NO: 378773 - DNA, 19 bp, Homo sapiens
  siRNA target sequence for KIAA1322 (NM_020773.1,1871-1889).
ctaattgattggatcttta

SEQ ID NO: 378774 - DNA, 19 bp, Homo sapiens
  siRNA target sequence for KIAA1322 (NM_020773.1,1882-1900).
gatctttaccttatatagt

SEQ ID NO: 378775 - DNA, 19 bp, Homo sapiens
  siRNA target sequence for KIAA1322 (NM_020773.1,1947-1965).
gtcgcgatggggaagagtt

SEQ ID NO: 378776 - DNA, 19 bp, Homo sapiens
  siRNA target sequence for MIB (NM_020774.1,263-281).
gccgccagcaaccaatcat

SEQ ID NO: 378777 - DNA, 19 bp, Homo sapiens
  siRNA target sequence for MIB (NM_020774.1,264-282).
ccgccagcaaccaatcatt

SEQ ID NO: 378778 - DNA, 19 bp, Homo sapiens
  siRNA target sequence for MIB (NM_020774.1,274-292).
ccaatcattggcattcgat

SEQ ID NO: 378779 - DNA, 19 bp, Homo sapiens
  siRNA target sequence for MIB (NM_020774.1,333-351).
gtgttatcatggagataaa

SEQ ID NO: 378780 - DNA, 19 bp, Homo sapiens
  siRNA target sequence for MIB (NM_020774.1,364-382).
catcgcttttaccgaatta

SEQ ID NO: 378781 - DNA, 19 bp, Homo sapiens
  siRNA target sequence for MIB (NM_020774.1,367-385).
cgcttttaccgaattacta

SEQ ID NO: 378782 - DNA, 19 bp, Homo sapiens
  siRNA target sequence for MIB (NM_020774.1,395-413).
gtgagagggttctgttaga

SEQ ID NO: 378783 - DNA, 19 bp, Homo sapiens
  siRNA target sequence for MIB (NM_020774.1,397-415).
gagagggttctgttagagt

SEQ ID NO: 378784 - DNA, 19 bp, Homo sapiens
  siRNA target sequence for MIB (NM_020774.1,408-426).
gttagagtctcgtaggaaa

SEQ ID NO: 378785 - DNA, 19 bp, Homo sapiens
  siRNA target sequence for MIB (NM_020774.1,521-539).
gtaggggaaaggtaacaga

SEQ ID NO: 378786 - DNA, 19 bp, Homo sapiens
  siRNA target sequence for MIB (NM_020774.1,564-582).
cccacatagcgcagcatat

SEQ ID NO: 378787 - DNA, 19 bp, Homo sapiens
  siRNA target sequence for MIB (NM_020774.1,590-608).
gggataatggtgctaagaa

SEQ ID NO: 378788 - DNA, 19 bp, Homo sapiens
  siRNA target sequence for MIB (NM_020774.1,598-616).
ggtgctaagaacctttaca

SEQ ID NO: 378789 - DNA, 19 bp, Homo sapiens
  siRNA target sequence for MIB (NM_020774.1,631-649).
ggcatgtctgatctgaaat

SEQ ID NO: 378790 - DNA, 19 bp, Homo sapiens
  siRNA target sequence for MIB (NM_020774.1,741-759).
gattggtgacctggtaaat

SEQ ID NO: 378791 - DNA, 19 bp, Homo sapiens
  siRNA target sequence for MIB (NM_020774.1,746-764).
gtgacctggtaaatataga

SEQ ID NO: 378792 - DNA, 19 bp, Homo sapiens
  siRNA target sequence for MIB (NM_020774.1,806-824).
gaggatggactgatggaat

SEQ ID NO: 378793 - DNA, 19 bp, Homo sapiens
  siRNA target sequence for MIB (NM_020774.1,825-843).
gtttgagactttaactaca

SEQ ID NO: 378794 - DNA, 19 bp, Homo sapiens
  siRNA target sequence for MIB (NM_020774.1,986-1004).
gcacctcgcagtttcaagt

SEQ ID NO: 378795 - DNA, 19 bp, Homo sapiens
  siRNA target sequence for MIB (NM_020774.1,996-1014).
gtttcaagtgggtgatctt

SEQ ID NO: 378796 - DNA, 19 bp, Homo sapiens
  siRNA target sequence for MIB (NM_020774.1,1025-1043).
gttatgacctggaacgaat

SEQ ID NO: 378797 - DNA, 19 bp, Homo sapiens
  siRNA target sequence for MIB (NM_020774.1,1035-1053).
ggaacgaattaaacttcta

SEQ ID NO: 378798 - DNA, 19 bp, Homo sapiens
  siRNA target sequence for MIB (NM_020774.1,1039-1057).
cgaattaaacttctacaaa

SEQ ID NO: 378799 - DNA, 19 bp, Homo sapiens
  siRNA target sequence for MIB (NM_020774.1,1083-1101).
gatgcttccaactttaggt

SEQ ID NO: 378800 - DNA, 19 bp, Homo sapiens
  siRNA target sequence for MIB (NM_020774.1,1086-1104).
gcttccaactttaggtaaa

SEQ ID NO: 378801 - DNA, 19 bp, Homo sapiens
  siRNA target sequence for MIB (NM_020774.1,1108-1126).
ggccgagtacaacagattt

SEQ ID NO: 378802 - DNA, 19 bp, Homo sapiens
  siRNA target sequence for MIB (NM_020774.1,1109-1127).
gccgagtacaacagattta

SEQ ID NO: 378803 - DNA, 19 bp, Homo sapiens
  siRNA target sequence for MIB (NM_020774.1,1111-1129).
cgagtacaacagatttatt

SEQ ID NO: 378804 - DNA, 19 bp, Homo sapiens
  siRNA target sequence for MIB (NM_020774.1,1138-1156).
gatttaaaggtggaagttt

SEQ ID NO: 378805 - DNA, 19 bp, Homo sapiens
  siRNA target sequence for MIB (NM_020774.1,1207-1225).
gcaggatcagccattagca

SEQ ID NO: 378806 - DNA, 19 bp, Homo sapiens
  siRNA target sequence for MIB (NM_020774.1,1208-1226).
caggatcagccattagcaa

SEQ ID NO: 378807 - DNA, 19 bp, Homo sapiens
  siRNA target sequence for MIB (NM_020774.1,1245-1263).
ctcacaactcctgaagaaa

SEQ ID NO: 378808 - DNA, 19 bp, Homo sapiens
  siRNA target sequence for MIB (NM_020774.1,1283-1301).
ctggtgacctcaatgaaga

SEQ ID NO: 378809 - DNA, 19 bp, Homo sapiens
  siRNA target sequence for MIB (NM_020774.1,1290-1308).
cctcaatgaagaattagtt

SEQ ID NO: 378810 - DNA, 19 bp, Homo sapiens
  siRNA target sequence for MIB (NM_020774.1,1330-1348).
gttgctaaagtggaagatt

SEQ ID NO: 378811 - DNA, 19 bp, Homo sapiens
  siRNA target sequence for MIB (NM_020774.1,1358-1376).
gaccagatgtggatgtaaa

SEQ ID NO: 378812 - DNA, 19 bp, Homo sapiens
  siRNA target sequence for MIB (NM_020774.1,1404-1422).
gcaagctgctagtcagaat

SEQ ID NO: 378813 - DNA, 19 bp, Homo sapiens
  siRNA target sequence for MIB (NM_020774.1,1470-1488).
cgaagcagaggataaagat

SEQ ID NO: 378814 - DNA, 19 bp, Homo sapiens
  siRNA target sequence for MIB (NM_020774.1,1520-1538).
gagatgaaggcgctgttat

SEQ ID NO: 378815 - DNA, 19 bp, Homo sapiens
  siRNA target sequence for MIB (NM_020774.1,1552-1570).
cgaggtagtgctgatttga

SEQ ID NO: 378816 - DNA, 19 bp, Homo sapiens
  siRNA target sequence for MIB (NM_020774.1,1587-1605).
ccgacagacaccacttcat

SEQ ID NO: 378817 - DNA, 19 bp, Homo sapiens
  siRNA target sequence for MIB (NM_020774.1,1588-1606).
cgacagacaccacttcata

SEQ ID NO: 378818 - DNA, 19 bp, Homo sapiens
  siRNA target sequence for MIB (NM_020774.1,1589-1607).
gacagacaccacttcatat

SEQ ID NO: 378819 - DNA, 19 bp, Homo sapiens
  siRNA target sequence for MIB (NM_020774.1,1593-1611).
gacaccacttcatattgct

SEQ ID NO: 378820 - DNA, 19 bp, Homo sapiens
  siRNA target sequence for MIB (NM_020774.1,1627-1645).
cttcaagttgtgaagactt

SEQ ID NO: 378821 - DNA, 19 bp, Homo sapiens
  siRNA target sequence for MIB (NM_020774.1,1688-1706).
gtgatacccctcttcatga

SEQ ID NO: 378822 - DNA, 19 bp, Homo sapiens
  siRNA target sequence for MIB (NM_020774.1,1694-1712).
cccctcttcatgatgcaat

SEQ ID NO: 378823 - DNA, 19 bp, Homo sapiens
  siRNA target sequence for MIB (NM_020774.1,1695-1713).
ccctcttcatgatgcaata

SEQ ID NO: 378824 - DNA, 19 bp, Homo sapiens
  siRNA target sequence for MIB (NM_020774.1,1696-1714).
cctcttcatgatgcaataa

SEQ ID NO: 378825 - DNA, 19 bp, Homo sapiens
  siRNA target sequence for MIB (NM_020774.1,1715-1733).
gtaagaaacgtgatgatat

SEQ ID NO: 378826 - DNA, 19 bp, Homo sapiens
  siRNA target sequence for MIB (NM_020774.1,1719-1737).
gaaacgtgatgatatccta

SEQ ID NO: 378827 - DNA, 19 bp, Homo sapiens
  siRNA target sequence for MIB (NM_020774.1,1826-1844).
ccagtgcaatgcgtgtttt

SEQ ID NO: 378828 - DNA, 19 bp, Homo sapiens
  siRNA target sequence for MIB (NM_020774.1,1836-1854).
gcgtgttttactatctaaa

SEQ ID NO: 378829 - DNA, 19 bp, Homo sapiens
  siRNA target sequence for MIB (NM_020774.1,1837-1855).
cgtgttttactatctaaat

SEQ ID NO: 378830 - DNA, 19 bp, Homo sapiens
  siRNA target sequence for MIB (NM_020774.1,1943-1961).
ctgaactgttggtacatca

SEQ ID NO: 378831 - DNA, 19 bp, Homo sapiens
  siRNA target sequence for MIB (NM_020774.1,1953-1971).
ggtacatcagggtaatgca

SEQ ID NO: 378832 - DNA, 19 bp, Homo sapiens
  siRNA target sequence for MIB (NM_020774.1,1954-1972).
gtacatcagggtaatgcaa

SEQ ID NO: 378833 - DNA, 19 bp, Homo sapiens
  siRNA target sequence for MIB (NM_020774.1,2027-2045).
gacagcatacccagattgt

SEQ ID NO: 378834 - DNA, 19 bp, Homo sapiens
  siRNA target sequence for MIB (NM_020774.1,2117-2135).
ctctaaggcatcacacttt

SEQ ID NO: 378835 - DNA, 19 bp, Homo sapiens
  siRNA target sequence for MIB (NM_020774.1,2143-2161).
ctacgtcagctccaagata

SEQ ID NO: 378836 - DNA, 19 bp, Homo sapiens
  siRNA target sequence for MIB (NM_020774.1,2198-2216).
catccaaaaacacgttaat

SEQ ID NO: 378837 - DNA, 19 bp, Homo sapiens
  siRNA target sequence for MIB (NM_020774.1,2247-2265).
gaagagtgcagcatctatt

SEQ ID NO: 378838 - DNA, 19 bp, Homo sapiens
  siRNA target sequence for MIB (NM_020774.1,2257-2275).
gcatctattgcctgtttct

SEQ ID NO: 378839 - DNA, 19 bp, Homo sapiens
  siRNA target sequence for MIB (NM_020774.1,2290-2308).
gctgacctgagcattcgaa

SEQ ID NO: 378840 - DNA, 19 bp, Homo sapiens
  siRNA target sequence for MIB (NM_020774.1,2293-2311).
gacctgagcattcgaaata

SEQ ID NO: 378841 - DNA, 19 bp, Homo sapiens
  siRNA target sequence for MIB (NM_020774.1,2316-2334).
gggtcaatcgccacttgat

SEQ ID NO: 378842 - DNA, 19 bp, Homo sapiens
  siRNA target sequence for MIB (NM_020774.1,2318-2336).
gtcaatcgccacttgatct

SEQ ID NO: 378843 - DNA, 19 bp, Homo sapiens
  siRNA target sequence for MIB (NM_020774.1,2405-2423).
gttctcggagtccttctat

SEQ ID NO: 378844 - DNA, 19 bp, Homo sapiens
  siRNA target sequence for MIB (NM_020774.1,2408-2426).
ctcggagtccttctatgat

SEQ ID NO: 378845 - DNA, 19 bp, Homo sapiens
  siRNA target sequence for MIB (NM_020774.1,2410-2428).
cggagtccttctatgatta

SEQ ID NO: 378846 - DNA, 19 bp, Homo sapiens
  siRNA target sequence for MIB (NM_020774.1,2414-2432).
gtccttctatgattagtaa

SEQ ID NO: 378847 - DNA, 19 bp, Homo sapiens
  siRNA target sequence for MIB (NM_020774.1,2429-2447).
gtaatgattctgaaacctt

SEQ ID NO: 378848 - DNA, 19 bp, Homo sapiens
  siRNA target sequence for MIB (NM_020774.1,2569-2587).
gttcaatccaggacaaaga

SEQ ID NO: 378849 - DNA, 19 bp, Homo sapiens
  siRNA target sequence for MIB (NM_020774.1,2582-2600).
caaagattgaagaatgtgt

SEQ ID NO: 378850 - DNA, 19 bp, Homo sapiens
  siRNA target sequence for MIB (NM_020774.1,2671-2689).
gctaacctgatgaaaaagt

SEQ ID NO: 378851 - DNA, 19 bp, Homo sapiens
  siRNA target sequence for MIB (NM_020774.1,2694-2712).
gcagtgtcgagcagtagtt

SEQ ID NO: 378852 - DNA, 19 bp, Homo sapiens
  siRNA target sequence for MIB (NM_020774.1,2697-2715).
gtgtcgagcagtagttgaa

SEQ ID NO: 378853 - DNA, 19 bp, Homo sapiens
  siRNA target sequence for MIB (NM_020774.1,2716-2734).
cgaagagtgcctttcatta

SEQ ID NO: 378854 - DNA, 19 bp, Homo sapiens
  siRNA target sequence for MIB (NM_020774.1,2761-2779).
gatgccactgatgatatct

SEQ ID NO: 378855 - DNA, 19 bp, Homo sapiens
  siRNA target sequence for MIB (NM_020774.1,2808-2826).
ggacaaggataataccaat

SEQ ID NO: 378856 - DNA, 19 bp, Homo sapiens
  siRNA target sequence for MIB (NM_020774.1,2854-2872).
caacagttacaagacatta

SEQ ID NO: 378857 - DNA, 19 bp, Homo sapiens
  siRNA target sequence for MIB (NM_020774.1,2899-2917).
ctagatcgtctgaagaata

SEQ ID NO: 378858 - DNA, 19 bp, Homo sapiens
  siRNA target sequence for MIB (NM_020774.1,2905-2923).
cgtctgaagaatatgattt

SEQ ID NO: 378859 - DNA, 19 bp, Homo sapiens
  siRNA target sequence for MIB (NM_020774.1,2956-2974).
ggagaccgcatgagtgaat

SEQ ID NO: 378860 - DNA, 19 bp, Homo sapiens
  siRNA target sequence for MIB (NM_020774.1,2982-3000).
ctgtcgcaaggctattgaa

SEQ ID NO: 378861 - DNA, 19 bp, Homo sapiens
  siRNA target sequence for KIAA1324 (NM_020775.2,291-309).
ctgagtaccactatgagta

SEQ ID NO: 378862 - DNA, 19 bp, Homo sapiens
  siRNA target sequence for KIAA1324 (NM_020775.2,429-447).
gggagtttctggatatgaa

SEQ ID NO: 378863 - DNA, 19 bp, Homo sapiens
  siRNA target sequence for KIAA1324 (NM_020775.2,493-511).
cacaggcattcggtttgat

SEQ ID NO: 378864 - DNA, 19 bp, Homo sapiens
  siRNA target sequence for KIAA1324 (NM_020775.2,495-513).
caggcattcggtttgatga

SEQ ID NO: 378865 - DNA, 19 bp, Homo sapiens
  siRNA target sequence for KIAA1324 (NM_020775.2,581-599).
gagtccaccgggaactgta

SEQ ID NO: 378866 - DNA, 19 bp, Homo sapiens
  siRNA target sequence for KIAA1324 (NM_020775.2,654-672).
gcacagccacactgatgta

SEQ ID NO: 378867 - DNA, 19 bp, Homo sapiens
  siRNA target sequence for KIAA1324 (NM_020775.2,674-692).
gccgtcaacctgaagcaat

SEQ ID NO: 378868 - DNA, 19 bp, Homo sapiens
  siRNA target sequence for KIAA1324 (NM_020775.2,695-713).
ggcaccgttaacttcgaat

SEQ ID NO: 378869 - DNA, 19 bp, Homo sapiens
  siRNA target sequence for KIAA1324 (NM_020775.2,699-717).
ccgttaacttcgaatacta

SEQ ID NO: 378870 - DNA, 19 bp, Homo sapiens
  siRNA target sequence for KIAA1324 (NM_020775.2,701-719).
gttaacttcgaatactact

SEQ ID NO: 378871 - DNA, 19 bp, Homo sapiens
  siRNA target sequence for KIAA1324 (NM_020775.2,826-844).
ccacagtgtggagctaaat

SEQ ID NO: 378872 - DNA, 19 bp, Homo sapiens
  siRNA target sequence for KIAA1324 (NM_020775.2,829-847).
cagtgtggagctaaatcga

SEQ ID NO: 378873 - DNA, 19 bp, Homo sapiens
  siRNA target sequence for KIAA1324 (NM_020775.2,838-856).
gctaaatcgaggcaataat

SEQ ID NO: 378874 - DNA, 19 bp, Homo sapiens
  siRNA target sequence for KIAA1324 (NM_020775.2,848-866).
ggcaataatgtcctctatt

SEQ ID NO: 378875 - DNA, 19 bp, Homo sapiens
  siRNA target sequence for KIAA1324 (NM_020775.2,883-901).
ctcagtatggaccaaagta

SEQ ID NO: 378876 - DNA, 19 bp, Homo sapiens
  siRNA target sequence for KIAA1324 (NM_020775.2,945-963).
cctacacttcagaatgctt

SEQ ID NO: 378877 - DNA, 19 bp, Homo sapiens
  siRNA target sequence for KIAA1324 (NM_020775.2,1021-1039).
cccagccaactcttattca

SEQ ID NO: 378878 - DNA, 19 bp, Homo sapiens
  siRNA target sequence for KIAA1324 (NM_020775.2,1022-1040).
ccagccaactcttattcaa

SEQ ID NO: 378879 - DNA, 19 bp, Homo sapiens
  siRNA target sequence for KIAA1324 (NM_020775.2,1026-1044).
ccaactcttattcaaataa

SEQ ID NO: 378880 - DNA, 19 bp, Homo sapiens
  siRNA target sequence for KIAA1324 (NM_020775.2,1064-1082).
cagtgtgaccctgacaaat

SEQ ID NO: 378881 - DNA, 19 bp, Homo sapiens
  siRNA target sequence for KIAA1324 (NM_020775.2,1119-1137).
cagcttgcacagacaaaga

SEQ ID NO: 378882 - DNA, 19 bp, Homo sapiens
  siRNA target sequence for KIAA1324 (NM_020775.2,1173-1191).
gagagacacaactcatgta

SEQ ID NO: 378883 - DNA, 19 bp, Homo sapiens
  siRNA target sequence for KIAA1324 (NM_020775.2,1198-1216).
ggccaagccgaaaatctgt

SEQ ID NO: 378884 - DNA, 19 bp, Homo sapiens
  siRNA target sequence for KIAA1324 (NM_020775.2,1199-1217).
gccaagccgaaaatctgta

SEQ ID NO: 378885 - DNA, 19 bp, Homo sapiens
  siRNA target sequence for KIAA1324 (NM_020775.2,1287-1305).
caggcttcttcaaaaccaa

SEQ ID NO: 378886 - DNA, 19 bp, Homo sapiens
  siRNA target sequence for KIAA1324 (NM_020775.2,1385-1403).
cctgctgtgggatttgaat

SEQ ID NO: 378887 - DNA, 19 bp, Homo sapiens
  siRNA target sequence for KIAA1324 (NM_020775.2,1558-1576).
ggttgtgccaggatttaga

SEQ ID NO: 378888 - DNA, 19 bp, Homo sapiens
  siRNA target sequence for KIAA1324 (NM_020775.2,1619-1637).
gccagaatcacatttgtct

SEQ ID NO: 378889 - DNA, 19 bp, Homo sapiens
  siRNA target sequence for KIAA1324 (NM_020775.2,1675-1693).
catggtgggtgtgaattct

SEQ ID NO: 378890 - DNA, 19 bp, Homo sapiens
  siRNA target sequence for KIAA1324 (NM_020775.2,1734-1752).
gcaaacagtcctataccta

SEQ ID NO: 378891 - DNA, 19 bp, Homo sapiens
  siRNA target sequence for KIAA1324 (NM_020775.2,1814-1832).
gaggcaagcaggaagtaca

SEQ ID NO: 378892 - DNA, 19 bp, Homo sapiens
  siRNA target sequence for KIAA1324 (NM_020775.2,1950-1968).
gtcctgctggttactatat

SEQ ID NO: 378893 - DNA, 19 bp, Homo sapiens
  siRNA target sequence for KIAA1324 (NM_020775.2,1995-2013).
cctgccccactaacacaat

SEQ ID NO: 378894 - DNA, 19 bp, Homo sapiens
  siRNA target sequence for KIAA1324 (NM_020775.2,1996-2014).
ctgccccactaacacaatt

SEQ ID NO: 378895 - DNA, 19 bp, Homo sapiens
  siRNA target sequence for KIAA1324 (NM_020775.2,1998-2016).
gccccactaacacaattct

SEQ ID NO: 378896 - DNA, 19 bp, Homo sapiens
  siRNA target sequence for KIAA1324 (NM_020775.2,2127-2145).
ctccgaccaggactttcaa

SEQ ID NO: 378897 - DNA, 19 bp, Homo sapiens
  siRNA target sequence for KIAA1324 (NM_020775.2,2129-2147).
ccgaccaggactttcaact

SEQ ID NO: 378898 - DNA, 19 bp, Homo sapiens
  siRNA target sequence for KIAA1324 (NM_020775.2,2136-2154).
ggactttcaactacaactt

SEQ ID NO: 378899 - DNA, 19 bp, Homo sapiens
  siRNA target sequence for KIAA1324 (NM_020775.2,2186-2204).
ggagggccaagcttcactt

SEQ ID NO: 378900 - DNA, 19 bp, Homo sapiens
  siRNA target sequence for KIAA1324 (NM_020775.2,2205-2223).
ccaaagggctgaaatactt

SEQ ID NO: 378901 - DNA, 19 bp, Homo sapiens
  siRNA target sequence for KIAA1324 (NM_020775.2,2249-2267).
ggaaaccagggtaggaaaa

SEQ ID NO: 378902 - DNA, 19 bp, Homo sapiens
  siRNA target sequence for KIAA1324 (NM_020775.2,2250-2268).
gaaaccagggtaggaaaat

SEQ ID NO: 378903 - DNA, 19 bp, Homo sapiens
  siRNA target sequence for KIAA1324 (NM_020775.2,2273-2291).
gtgtgcaccgacaatgtca

SEQ ID NO: 378904 - DNA, 19 bp, Homo sapiens
  siRNA target sequence for KIAA1324 (NM_020775.2,2317-2335).
gtcagggttctccaaatct

SEQ ID NO: 378905 - DNA, 19 bp, Homo sapiens
  siRNA target sequence for KIAA1324 (NM_020775.2,2319-2337).
cagggttctccaaatctat

SEQ ID NO: 378906 - DNA, 19 bp, Homo sapiens
  siRNA target sequence for KIAA1324 (NM_020775.2,2418-2436).
gccttgctgatcgacttat

SEQ ID NO: 378907 - DNA, 19 bp, Homo sapiens
  siRNA target sequence for KIAA1324 (NM_020775.2,2419-2437).
ccttgctgatcgacttatt

SEQ ID NO: 378908 - DNA, 19 bp, Homo sapiens
  siRNA target sequence for KIAA1324 (NM_020775.2,2438-2456).
ggggtgacaacagatatga

SEQ ID NO: 378909 - DNA, 19 bp, Homo sapiens
  siRNA target sequence for KIAA1324 (NM_020775.2,2440-2458).
ggtgacaacagatatgact

SEQ ID NO: 378910 - DNA, 19 bp, Homo sapiens
  siRNA target sequence for KIAA1324 (NM_020775.2,2508-2526).
gaataccggacgtgatctt

SEQ ID NO: 378911 - DNA, 19 bp, Homo sapiens
  siRNA target sequence for KIAA1324 (NM_020775.2,2513-2531).
ccggacgtgatcttctttt

SEQ ID NO: 378912 - DNA, 19 bp, Homo sapiens
  siRNA target sequence for KIAA1324 (NM_020775.2,2514-2532).
cggacgtgatcttctttta

SEQ ID NO: 378913 - DNA, 19 bp, Homo sapiens
  siRNA target sequence for KIAA1324 (NM_020775.2,2515-2533).
ggacgtgatcttcttttat

SEQ ID NO: 378914 - DNA, 19 bp, Homo sapiens
  siRNA target sequence for KIAA1324 (NM_020775.2,2516-2534).
gacgtgatcttcttttata

SEQ ID NO: 378915 - DNA, 19 bp, Homo sapiens
  siRNA target sequence for KIAA1324 (NM_020775.2,2527-2545).
cttttataggtccaatgat

SEQ ID NO: 378916 - DNA, 19 bp, Homo sapiens
  siRNA target sequence for KIAA1324 (NM_020775.2,2590-2608).
caggtgcagtccacagaaa

SEQ ID NO: 378917 - DNA, 19 bp, Homo sapiens
  siRNA target sequence for KIAA1324 (NM_020775.2,2757-2775).
ggatccagaagactactta

SEQ ID NO: 378918 - DNA, 19 bp, Homo sapiens
  siRNA target sequence for KIAA1324 (NM_020775.2,2908-2926).
cgtcttgacctgctacttt

SEQ ID NO: 378919 - DNA, 19 bp, Homo sapiens
  siRNA target sequence for KIAA1324 (NM_020775.2,3075-3093).
cactctttgggaagatcaa

SEQ ID NO: 378920 - DNA, 19 bp, Homo sapiens
  siRNA target sequence for KIAA1324 (NM_020775.2,3109-3127).
gaggactcctgatggattt

SEQ ID NO: 378921 - DNA, 19 bp, Homo sapiens
  siRNA target sequence for KIAA1336 (NM_020779.2,176-194).
caaggaacaagggttcata

SEQ ID NO: 378922 - DNA, 19 bp, Homo sapiens
  siRNA target sequence for KIAA1336 (NM_020779.2,180-198).
gaacaagggttcatagcat

SEQ ID NO: 378923 - DNA, 19 bp, Homo sapiens
  siRNA target sequence for KIAA1336 (NM_020779.2,200-218).
cggtggtgaagatggatta

SEQ ID NO: 378924 - DNA, 19 bp, Homo sapiens
  siRNA target sequence for KIAA1336 (NM_020779.2,202-220).
gtggtgaagatggattact

SEQ ID NO: 378925 - DNA, 19 bp, Homo sapiens
  siRNA target sequence for KIAA1336 (NM_020779.2,213-231).
ggattactgaaagttttga

SEQ ID NO: 378926 - DNA, 19 bp, Homo sapiens
  siRNA target sequence for KIAA1336 (NM_020779.2,276-294).
gcccccagtaacctttcta

SEQ ID NO: 378927 - DNA, 19 bp, Homo sapiens
  siRNA target sequence for KIAA1336 (NM_020779.2,277-295).
cccccagtaacctttctat

SEQ ID NO: 378928 - DNA, 19 bp, Homo sapiens
  siRNA target sequence for KIAA1336 (NM_020779.2,279-297).
cccagtaacctttctatga

SEQ ID NO: 378929 - DNA, 19 bp, Homo sapiens
  siRNA target sequence for KIAA1336 (NM_020779.2,280-298).
ccagtaacctttctatgaa

SEQ ID NO: 378930 - DNA, 19 bp, Homo sapiens
  siRNA target sequence for KIAA1336 (NM_020779.2,281-299).
cagtaacctttctatgaat

SEQ ID NO: 378931 - DNA, 19 bp, Homo sapiens
  siRNA target sequence for KIAA1336 (NM_020779.2,283-301).
gtaacctttctatgaatca

SEQ ID NO: 378932 - DNA, 19 bp, Homo sapiens
  siRNA target sequence for KIAA1336 (NM_020779.2,302-320).
gactcttgaaggtcatagt

SEQ ID NO: 378933 - DNA, 19 bp, Homo sapiens
  siRNA target sequence for KIAA1336 (NM_020779.2,348-366).
gagcagtatcagaagttga

SEQ ID NO: 378934 - DNA, 19 bp, Homo sapiens
  siRNA target sequence for KIAA1336 (NM_020779.2,351-369).
cagtatcagaagttgacta

SEQ ID NO: 378935 - DNA, 19 bp, Homo sapiens
  siRNA target sequence for KIAA1336 (NM_020779.2,392-410).
cattgtgtggatgttatat

SEQ ID NO: 378936 - DNA, 19 bp, Homo sapiens
  siRNA target sequence for KIAA1336 (NM_020779.2,431-449).
gatgatcaacaatcgaaat

SEQ ID NO: 378937 - DNA, 19 bp, Homo sapiens
  siRNA target sequence for KIAA1336 (NM_020779.2,437-455).
caacaatcgaaataaatca

SEQ ID NO: 378938 - DNA, 19 bp, Homo sapiens
  siRNA target sequence for KIAA1336 (NM_020779.2,535-553).
cagtggatggcaatcgtat

SEQ ID NO: 378939 - DNA, 19 bp, Homo sapiens
  siRNA target sequence for KIAA1336 (NM_020779.2,579-597).
cagctatcccatgtaacat

SEQ ID NO: 378940 - DNA, 19 bp, Homo sapiens
  siRNA target sequence for KIAA1336 (NM_020779.2,595-613).
catggtctgcggacagtaa

SEQ ID NO: 378941 - DNA, 19 bp, Homo sapiens
  siRNA target sequence for KIAA1336 (NM_020779.2,598-616).
ggtctgcggacagtaaagt

SEQ ID NO: 378942 - DNA, 19 bp, Homo sapiens
  siRNA target sequence for KIAA1336 (NM_020779.2,601-619).
ctgcggacagtaaagtctt

SEQ ID NO: 378943 - DNA, 19 bp, Homo sapiens
  siRNA target sequence for KIAA1336 (NM_020779.2,604-622).
cggacagtaaagtcttact

SEQ ID NO: 378944 - DNA, 19 bp, Homo sapiens
  siRNA target sequence for KIAA1336 (NM_020779.2,605-623).
ggacagtaaagtcttactt

SEQ ID NO: 378945 - DNA, 19 bp, Homo sapiens
  siRNA target sequence for KIAA1336 (NM_020779.2,606-624).
gacagtaaagtcttacttt

SEQ ID NO: 378946 - DNA, 19 bp, Homo sapiens
  siRNA target sequence for KIAA1336 (NM_020779.2,640-658).
gggaaatacacatttacga

SEQ ID NO: 378947 - DNA, 19 bp, Homo sapiens
  siRNA target sequence for KIAA1336 (NM_020779.2,663-681).
caaggaaattttatgataa

SEQ ID NO: 378948 - DNA, 19 bp, Homo sapiens
  siRNA target sequence for KIAA1336 (NM_020779.2,722-740).
cagcattgctggaattcat

SEQ ID NO: 378949 - DNA, 19 bp, Homo sapiens
  siRNA target sequence for KIAA1336 (NM_020779.2,792-810).
gtttgctttgataatggaa

SEQ ID NO: 378950 - DNA, 19 bp, Homo sapiens
  siRNA target sequence for KIAA1336 (NM_020779.2,807-825).
ggaagatgccaaataatga

SEQ ID NO: 378951 - DNA, 19 bp, Homo sapiens
  siRNA target sequence for KIAA1336 (NM_020779.2,837-855).
gaccaaaatcccgttttga

SEQ ID NO: 378952 - DNA, 19 bp, Homo sapiens
  siRNA target sequence for KIAA1336 (NM_020779.2,839-857).
ccaaaatcccgttttgatt

SEQ ID NO: 378953 - DNA, 19 bp, Homo sapiens
  siRNA target sequence for KIAA1336 (NM_020779.2,944-962).
ggacaaagatgtgaacatt

SEQ ID NO: 378954 - DNA, 19 bp, Homo sapiens
  siRNA target sequence for KIAA1336 (NM_020779.2,985-1003).
gtgagcatctgggtacttt

SEQ ID NO: 378955 - DNA, 19 bp, Homo sapiens
  siRNA target sequence for KIAA1336 (NM_020779.2,989-1007).
gcatctgggtactttgaaa

SEQ ID NO: 378956 - DNA, 19 bp, Homo sapiens
  siRNA target sequence for KIAA1336 (NM_020779.2,1092-1110).
gcaaacattcgacctaatt

SEQ ID NO: 378957 - DNA, 19 bp, Homo sapiens
  siRNA target sequence for KIAA1336 (NM_020779.2,1093-1111).
caaacattcgacctaatta

SEQ ID NO: 378958 - DNA, 19 bp, Homo sapiens
  siRNA target sequence for KIAA1336 (NM_020779.2,1126-1144).
gctcaaacactgtagttta

SEQ ID NO: 378959 - DNA, 19 bp, Homo sapiens
  siRNA target sequence for KIAA1336 (NM_020779.2,1127-1145).
ctcaaacactgtagtttat

SEQ ID NO: 378960 - DNA, 19 bp, Homo sapiens
  siRNA target sequence for KIAA1336 (NM_020779.2,1156-1174).
gacctgatcgtccagaata

SEQ ID NO: 378961 - DNA, 19 bp, Homo sapiens
  siRNA target sequence for KIAA1336 (NM_020779.2,1226-1244).
gaagggtctcatttctatt

SEQ ID NO: 378962 - DNA, 19 bp, Homo sapiens
  siRNA target sequence for KIAA1336 (NM_020779.2,1230-1248).
ggtctcatttctattacta

SEQ ID NO: 378963 - DNA, 19 bp, Homo sapiens
  siRNA target sequence for KIAA1336 (NM_020779.2,1333-1351).
cacccttggatcccaaata

SEQ ID NO: 378964 - DNA, 19 bp, Homo sapiens
  siRNA target sequence for KIAA1336 (NM_020779.2,1382-1400).
gaccaaaacccatgtgata

SEQ ID NO: 378965 - DNA, 19 bp, Homo sapiens
  siRNA target sequence for KIAA1336 (NM_020779.2,1397-1415).
gatagcagcctcgaaagaa

SEQ ID NO: 378966 - DNA, 19 bp, Homo sapiens
  siRNA target sequence for KIAA1336 (NM_020779.2,1475-1493).
gatcacacggtctcgaaaa

SEQ ID NO: 378967 - DNA, 19 bp, Homo sapiens
  siRNA target sequence for KIAA1336 (NM_020779.2,1478-1496).
cacacggtctcgaaaagaa

SEQ ID NO: 378968 - DNA, 19 bp, Homo sapiens
  siRNA target sequence for KIAA1336 (NM_020779.2,1544-1562).
ggatggtgtgcttgattat

SEQ ID NO: 378969 - DNA, 19 bp, Homo sapiens
  siRNA target sequence for KIAA1336 (NM_020779.2,1545-1563).
gatggtgtgcttgattata

SEQ ID NO: 378970 - DNA, 19 bp, Homo sapiens
  siRNA target sequence for KIAA1336 (NM_020779.2,1599-1617).
gccataactgcatcagata

SEQ ID NO: 378971 - DNA, 19 bp, Homo sapiens
  siRNA target sequence for KIAA1336 (NM_020779.2,1600-1618).
ccataactgcatcagataa

SEQ ID NO: 378972 - DNA, 19 bp, Homo sapiens
  siRNA target sequence for KIAA1336 (NM_020779.2,1625-1643).
gattgtgggtcgtgaatct

SEQ ID NO: 378973 - DNA, 19 bp, Homo sapiens
  siRNA target sequence for KIAA1336 (NM_020779.2,1642-1660).
ctggcaccattcagagata

SEQ ID NO: 378974 - DNA, 19 bp, Homo sapiens
  siRNA target sequence for KIAA1336 (NM_020779.2,1644-1662).
ggcaccattcagagataca

SEQ ID NO: 378975 - DNA, 19 bp, Homo sapiens
  siRNA target sequence for KIAA1336 (NM_020779.2,1655-1673).
gagatacagtctacctaat

SEQ ID NO: 378976 - DNA, 19 bp, Homo sapiens
  siRNA target sequence for KIAA1336 (NM_020779.2,1657-1675).
gatacagtctacctaatgt

SEQ ID NO: 378977 - DNA, 19 bp, Homo sapiens
  siRNA target sequence for KIAA1336 (NM_020779.2,1707-1725).
cgagcctaccagttatcct

SEQ ID NO: 378978 - DNA, 19 bp, Homo sapiens
  siRNA target sequence for KIAA1336 (NM_020779.2,1708-1726).
gagcctaccagttatcctt

SEQ ID NO: 378979 - DNA, 19 bp, Homo sapiens
  siRNA target sequence for KIAA1336 (NM_020779.2,1716-1734).
cagttatccttgaattgca

SEQ ID NO: 378980 - DNA, 19 bp, Homo sapiens
  siRNA target sequence for KIAA1336 (NM_020779.2,1738-1756).
ctagccgtcttgctatcat

SEQ ID NO: 378981 - DNA, 19 bp, Homo sapiens
  siRNA target sequence for KIAA1336 (NM_020779.2,1741-1759).
gccgtcttgctatcataga

SEQ ID NO: 378982 - DNA, 19 bp, Homo sapiens
  siRNA target sequence for KIAA1336 (NM_020779.2,1743-1761).
cgtcttgctatcatagaca

SEQ ID NO: 378983 - DNA, 19 bp, Homo sapiens
  siRNA target sequence for KIAA1336 (NM_020779.2,1810-1828).
gtacgggacagcaagtagt

SEQ ID NO: 378984 - DNA, 19 bp, Homo sapiens
  siRNA target sequence for KIAA1336 (NM_020779.2,1831-1849).
gagagttgttaaaattgga

SEQ ID NO: 378985 - DNA, 19 bp, Homo sapiens
  siRNA target sequence for KIAA1336 (NM_020779.2,1871-1889).
gaagtgggccaaagataat

SEQ ID NO: 378986 - DNA, 19 bp, Homo sapiens
  siRNA target sequence for KIAA1336 (NM_020779.2,1874-1892).
gtgggccaaagataatcct

SEQ ID NO: 378987 - DNA, 19 bp, Homo sapiens
  siRNA target sequence for KIAA1336 (NM_020779.2,1964-1982).
gacctctggatatatttgt

SEQ ID NO: 378988 - DNA, 19 bp, Homo sapiens
  siRNA target sequence for KIAA1336 (NM_020779.2,2054-2072).
ggattacctaattaacttt

SEQ ID NO: 378989 - DNA, 19 bp, Homo sapiens
  siRNA target sequence for KIAA1336 (NM_020779.2,2060-2078).
cctaattaactttgagatt

SEQ ID NO: 378990 - DNA, 19 bp, Homo sapiens
  siRNA target sequence for KIAA1336 (NM_020779.2,2234-2252).
gcgctgcaaagattaccaa

SEQ ID NO: 378991 - DNA, 19 bp, Homo sapiens
  siRNA target sequence for KIAA1336 (NM_020779.2,2267-2285).
gaagcgcttgggcaaacta

SEQ ID NO: 378992 - DNA, 19 bp, Homo sapiens
  siRNA target sequence for KIAA1336 (NM_020779.2,2321-2339).
ctacttcggcaggtttgaa

SEQ ID NO: 378993 - DNA, 19 bp, Homo sapiens
  siRNA target sequence for KIAA1336 (NM_020779.2,2405-2423).
gggggattggtttagagta

SEQ ID NO: 378994 - DNA, 19 bp, Homo sapiens
  siRNA target sequence for KIAA1336 (NM_020779.2,2421-2439).
gtactccagctcctgaaaa

SEQ ID NO: 378995 - DNA, 19 bp, Homo sapiens
  siRNA target sequence for KIAA1336 (NM_020779.2,2521-2539).
ggttgaatgctgtacaata

SEQ ID NO: 378996 - DNA, 19 bp, Homo sapiens
  siRNA target sequence for KIAA1336 (NM_020779.2,2525-2543).
gaatgctgtacaatattat

SEQ ID NO: 378997 - DNA, 19 bp, Homo sapiens
  siRNA target sequence for KIAA1336 (NM_020779.2,2565-2583).
cgcttagctgaatgttact

SEQ ID NO: 378998 - DNA, 19 bp, Homo sapiens
  siRNA target sequence for KIAA1336 (NM_020779.2,2566-2584).
gcttagctgaatgttacta

SEQ ID NO: 378999 - DNA, 19 bp, Homo sapiens
  siRNA target sequence for KIAA1336 (NM_020779.2,2567-2585).
cttagctgaatgttactat

SEQ ID NO: 379000 - DNA, 19 bp, Homo sapiens
  siRNA target sequence for KIAA1336 (NM_020779.2,2595-2613).
gattatgaagggttagaga

SEQ ID NO: 379001 - DNA, 19 bp, Homo sapiens
  siRNA target sequence for KIAA1336 (NM_020779.2,2612-2630).
gaaccttgccatttcactt

SEQ ID NO: 379002 - DNA, 19 bp, Homo sapiens
  siRNA target sequence for KIAA1336 (NM_020779.2,2642-2660).
caagttacttccagaaata

SEQ ID NO: 379003 - DNA, 19 bp, Homo sapiens
  siRNA target sequence for KIAA1336 (NM_020779.2,2820-2838).
ctgttagctaggtatgcat

SEQ ID NO: 379004 - DNA, 19 bp, Homo sapiens
  siRNA target sequence for KIAA1336 (NM_020779.2,2913-2931).
gctaaactgatgtttaaga

SEQ ID NO: 379005 - DNA, 19 bp, Homo sapiens
  siRNA target sequence for KIAA1336 (NM_020779.2,2971-2989).
gtgtcaagaagctctatgt

SEQ ID NO: 379006 - DNA, 19 bp, Homo sapiens
  siRNA target sequence for KIAA1336 (NM_020779.2,2988-3006).
gtactgtcagccttactta

SEQ ID NO: 379007 - DNA, 19 bp, Homo sapiens
  siRNA target sequence for KIAA1336 (NM_020779.2,3032-3050).
gaatgcccagcgaggaaaa

SEQ ID NO: 379008 - DNA, 19 bp, Homo sapiens
  siRNA target sequence for KIAA1336 (NM_020779.2,3037-3055).
cccagcgaggaaaagttaa

SEQ ID NO: 379009 - DNA, 19 bp, Homo sapiens
  siRNA target sequence for KIAA1336 (NM_020779.2,3126-3144).
cgtttcacagataatgcat

SEQ ID NO: 379010 - DNA, 19 bp, Homo sapiens
  siRNA target sequence for KIAA1336 (NM_020779.2,3156-3174).
gaggcttaccacttcttta

SEQ ID NO: 379011 - DNA, 19 bp, Homo sapiens
  siRNA target sequence for KIAA1336 (NM_020779.2,3158-3176).
ggcttaccacttctttata

SEQ ID NO: 379012 - DNA, 19 bp, Homo sapiens
  siRNA target sequence for KIAA1336 (NM_020779.2,3160-3178).
cttaccacttctttatact

SEQ ID NO: 379013 - DNA, 19 bp, Homo sapiens
  siRNA target sequence for KIAA1336 (NM_020779.2,3261-3279).
cctcctgtggagatctact

SEQ ID NO: 379014 - DNA, 19 bp, Homo sapiens
  siRNA target sequence for KIAA1336 (NM_020779.2,3333-3351).
gctttcattaaacttaaat

SEQ ID NO: 379015 - DNA, 19 bp, Homo sapiens
  siRNA target sequence for KIAA1336 (NM_020779.2,3405-3423).
gaaatcttcaccaaacata

SEQ ID NO: 379016 - DNA, 19 bp, Homo sapiens
  siRNA target sequence for KIAA1336 (NM_020779.2,3416-3434).
caaacatacttcaaaagat

SEQ ID NO: 379017 - DNA, 19 bp, Homo sapiens
  siRNA target sequence for KIAA1336 (NM_020779.2,3500-3518).
cacaggaagcccaatcact

SEQ ID NO: 379018 - DNA, 19 bp, Homo sapiens
  siRNA target sequence for KIAA1336 (NM_020779.2,3508-3526).
gcccaatcactgagtatca

SEQ ID NO: 379019 - DNA, 19 bp, Homo sapiens
  siRNA target sequence for KIAA1336 (NM_020779.2,3509-3527).
cccaatcactgagtatcaa

SEQ ID NO: 379020 - DNA, 19 bp, Homo sapiens
  siRNA target sequence for KIAA1336 (NM_020779.2,3510-3528).
ccaatcactgagtatcaat

SEQ ID NO: 379021 - DNA, 19 bp, Homo sapiens
  siRNA target sequence for KIAA1336 (NM_020779.2,3511-3529).
caatcactgagtatcaatt

SEQ ID NO: 379022 - DNA, 19 bp, Homo sapiens
  siRNA target sequence for KIAA1336 (NM_020779.2,3532-3550).
ggatgtgcagtgtatgcaa

SEQ ID NO: 379023 - DNA, 19 bp, Homo sapiens
  siRNA target sequence for KIAA1336 (NM_020779.2,3533-3551).
gatgtgcagtgtatgcaaa

SEQ ID NO: 379024 - DNA, 19 bp, Homo sapiens
  siRNA target sequence for KIAA1336 (NM_020779.2,3558-3576).
gtccttgctcaggaaataa

SEQ ID NO: 379025 - DNA, 19 bp, Homo sapiens
  siRNA target sequence for IGSF9 (NM_020789.2,422-440).
cccgaattgaccctgatta

SEQ ID NO: 379026 - DNA, 19 bp, Homo sapiens
  siRNA target sequence for IGSF9 (NM_020789.2,550-568).
cctgaagacgattttgcta

SEQ ID NO: 379027 - DNA, 19 bp, Homo sapiens
  siRNA target sequence for IGSF9 (NM_020789.2,579-597).
ggtgcatctgacagtcaat

SEQ ID NO: 379028 - DNA, 19 bp, Homo sapiens
  siRNA target sequence for IGSF9 (NM_020789.2,580-598).
gtgcatctgacagtcaatt

SEQ ID NO: 379029 - DNA, 19 bp, Homo sapiens
  siRNA target sequence for IGSF9 (NM_020789.2,916-934).
gcctcccaggatgtttcat

SEQ ID NO: 379030 - DNA, 19 bp, Homo sapiens
  siRNA target sequence for IGSF9 (NM_020789.2,917-935).
cctcccaggatgtttcatt

SEQ ID NO: 379031 - DNA, 19 bp, Homo sapiens
  siRNA target sequence for IGSF9 (NM_020789.2,985-1003).
caggacaacatcaatgtct

SEQ ID NO: 379032 - DNA, 19 bp, Homo sapiens
  siRNA target sequence for IGSF9 (NM_020789.2,1312-1330).
gatgccctgggagaatact

SEQ ID NO: 379033 - DNA, 19 bp, Homo sapiens
  siRNA target sequence for IGSF9 (NM_020789.2,1739-1757).
gctttgatggtggttatct

SEQ ID NO: 379034 - DNA, 19 bp, Homo sapiens
  siRNA target sequence for IGSF9 (NM_020789.2,1898-1916).
gcgtgctagctcagaacaa

SEQ ID NO: 379035 - DNA, 19 bp, Homo sapiens
  siRNA target sequence for IGSF9 (NM_020789.2,1928-1946).
gtcccttcagcgaaatcgt

SEQ ID NO: 379036 - DNA, 19 bp, Homo sapiens
  siRNA target sequence for IGSF9 (NM_020789.2,2471-2489).
gccaagatccacctcttat

SEQ ID NO: 379037 - DNA, 19 bp, Homo sapiens
  siRNA target sequence for IGSF9 (NM_020789.2,2940-2958).
cttcttccgagagatgaat

SEQ ID NO: 379038 - DNA, 19 bp, Homo sapiens
  siRNA target sequence for IGSF9 (NM_020789.2,2999-3017).
ctgcacccccagattacat

SEQ ID NO: 379039 - DNA, 19 bp, Homo sapiens
  siRNA target sequence for IGSF9 (NM_020789.2,3004-3022).
cccccagattacatggata

SEQ ID NO: 379040 - DNA, 19 bp, Homo sapiens
  siRNA target sequence for IGSF9 (NM_020789.2,3389-3407).
catctgtggacgagaacta

SEQ ID NO: 379041 - DNA, 19 bp, Homo sapiens
  siRNA target sequence for IGSF9 (NM_020789.2,3394-3412).
gtggacgagaactatgagt

SEQ ID NO: 379042 - DNA, 19 bp, Homo sapiens
  siRNA target sequence for IGSF9 (NM_020789.2,3540-3558).
gaacactgcccatgttact

SEQ ID NO: 379043 - DNA, 19 bp, Homo sapiens
  siRNA target sequence for IGSF9 (NM_020789.2,3578-3596).
ctgcccttcgggaggaatt

SEQ ID NO: 379044 - DNA, 19 bp, Homo sapiens
  siRNA target sequence for IGSF9 (NM_020789.2,3581-3599).
cccttcgggaggaattcct

SEQ ID NO: 379045 - DNA, 19 bp, Homo sapiens
  siRNA target sequence for AMSH-LP (NM_020799.1,77-95).
ctatgcctgaccatacaga

SEQ ID NO: 379046 - DNA, 19 bp, Homo sapiens
  siRNA target sequence for AMSH-LP (NM_020799.1,81-99).
gcctgaccatacagatgtt

SEQ ID NO: 379047 - DNA, 19 bp, Homo sapiens
  siRNA target sequence for AMSH-LP (NM_020799.1,119-137).
gagtccgtgccctaagcaa

SEQ ID NO: 379048 - DNA, 19 bp, Homo sapiens
  siRNA target sequence for AMSH-LP (NM_020799.1,134-152).
gcaagcttggttgtaatat

SEQ ID NO: 379049 - DNA, 19 bp, Homo sapiens
  siRNA target sequence for AMSH-LP (NM_020799.1,175-193).
ccacgacgttactttaggt

SEQ ID NO: 379050 - DNA, 19 bp, Homo sapiens
  siRNA target sequence for AMSH-LP (NM_020799.1,212-230).
ggatggcgtctgtgtattt

SEQ ID NO: 379051 - DNA, 19 bp, Homo sapiens
  siRNA target sequence for AMSH-LP (NM_020799.1,216-234).
ggcgtctgtgtatttggaa

SEQ ID NO: 379052 - DNA, 19 bp, Homo sapiens
  siRNA target sequence for AMSH-LP (NM_020799.1,302-320).
ctaaccatcgagattacca

SEQ ID NO: 379053 - DNA, 19 bp, Homo sapiens
  siRNA target sequence for AMSH-LP (NM_020799.1,334-352).
cctgaaaagcaggatatta

SEQ ID NO: 379054 - DNA, 19 bp, Homo sapiens
  siRNA target sequence for AMSH-LP (NM_020799.1,335-353).
ctgaaaagcaggatattat

SEQ ID NO: 379055 - DNA, 19 bp, Homo sapiens
  siRNA target sequence for AMSH-LP (NM_020799.1,423-441).
cgtagaataccaagaatat

SEQ ID NO: 379056 - DNA, 19 bp, Homo sapiens
  siRNA target sequence for AMSH-LP (NM_020799.1,486-504).
ggagcatcagagattgata

SEQ ID NO: 379057 - DNA, 19 bp, Homo sapiens
  siRNA target sequence for AMSH-LP (NM_020799.1,550-568).
gaatcggagcagtttctgt

SEQ ID NO: 379058 - DNA, 19 bp, Homo sapiens
  siRNA target sequence for AMSH-LP (NM_020799.1,635-653).
ggctgtcagagcagattga

SEQ ID NO: 379059 - DNA, 19 bp, Homo sapiens
  siRNA target sequence for AMSH-LP (NM_020799.1,636-654).
gctgtcagagcagattgat

SEQ ID NO: 379060 - DNA, 19 bp, Homo sapiens
  siRNA target sequence for AMSH-LP (NM_020799.1,733-751).
gatgcaaccaattatgcta

SEQ ID NO: 379061 - DNA, 19 bp, Homo sapiens
  siRNA target sequence for AMSH-LP (NM_020799.1,752-770).
gccactctcctcctgtaaa

SEQ ID NO: 379062 - DNA, 19 bp, Homo sapiens
  siRNA target sequence for AMSH-LP (NM_020799.1,754-772).
cactctcctcctgtaaaca

SEQ ID NO: 379063 - DNA, 19 bp, Homo sapiens
  siRNA target sequence for AMSH-LP (NM_020799.1,783-801).
gccagctgctactctaagt

SEQ ID NO: 379064 - DNA, 19 bp, Homo sapiens
  siRNA target sequence for AMSH-LP (NM_020799.1,800-818).
gtgctgttcagaatttagt

SEQ ID NO: 379065 - DNA, 19 bp, Homo sapiens
  siRNA target sequence for AMSH-LP (NM_020799.1,826-844).
ggactgcgatgtgtagttt

SEQ ID NO: 379066 - DNA, 19 bp, Homo sapiens
  siRNA target sequence for AMSH-LP (NM_020799.1,873-891).
gcaactggcagaatctaat

SEQ ID NO: 379067 - DNA, 19 bp, Homo sapiens
  siRNA target sequence for AMSH-LP (NM_020799.1,981-999).
gtctgcgggaccagactat

SEQ ID NO: 379068 - DNA, 19 bp, Homo sapiens
  siRNA target sequence for AMSH-LP (NM_020799.1,986-1004).
cgggaccagactattgtga

SEQ ID NO: 379069 - DNA, 19 bp, Homo sapiens
  siRNA target sequence for AMSH-LP (NM_020799.1,1072-1090).
catacacatcccactcaaa

SEQ ID NO: 379070 - DNA, 19 bp, Homo sapiens
  siRNA target sequence for AMSH-LP (NM_020799.1,1127-1145).
gttcctatcaactcatgtt

SEQ ID NO: 379071 - DNA, 19 bp, Homo sapiens
  siRNA target sequence for AMSH-LP (NM_020799.1,1165-1183).
gtttgctcaccaaagcata

SEQ ID NO: 379072 - DNA, 19 bp, Homo sapiens
  siRNA target sequence for AMSH-LP (NM_020799.1,1272-1290).
gcccaggctgttcagtata

SEQ ID NO: 379073 - DNA, 19 bp, Homo sapiens
  siRNA target sequence for AMSH-LP (NM_020799.1,1277-1295).
ggctgttcagtatatgcaa

SEQ ID NO: 379074 - DNA, 19 bp, Homo sapiens
  siRNA target sequence for AMSH-LP (NM_020799.1,1281-1299).
gttcagtatatgcaaacat

SEQ ID NO: 379075 - DNA, 19 bp, Homo sapiens
  siRNA target sequence for AMSH-LP (NM_020799.1,1297-1315).
catgtgttggtaaaagaca

SEQ ID NO: 379076 - DNA, 19 bp, Homo sapiens
  siRNA target sequence for DOCK6 (NM_020812.1,34-52).
gccttcgcgcacaagatca

SEQ ID NO: 379077 - DNA, 19 bp, Homo sapiens
  siRNA target sequence for DOCK6 (NM_020812.1,35-53).
ccttcgcgcacaagatcaa

SEQ ID NO: 379078 - DNA, 19 bp, Homo sapiens
  siRNA target sequence for DOCK6 (NM_020812.1,144-162).
ggtcccactgactgaagtt

SEQ ID NO: 379079 - DNA, 19 bp, Homo sapiens
  siRNA target sequence for DOCK6 (NM_020812.1,347-365).
cggtggagatgtatattga

SEQ ID NO: 379080 - DNA, 19 bp, Homo sapiens
  siRNA target sequence for DOCK6 (NM_020812.1,379-397).
gtccacagaaggtatcagt

SEQ ID NO: 379081 - DNA, 19 bp, Homo sapiens
  siRNA target sequence for DOCK6 (NM_020812.1,813-831).
gctcaagttcgagattgaa

SEQ ID NO: 379082 - DNA, 19 bp, Homo sapiens
  siRNA target sequence for DOCK6 (NM_020812.1,848-866).
ggatcttggctctgtatga

SEQ ID NO: 379083 - DNA, 19 bp, Homo sapiens
  siRNA target sequence for DOCK6 (NM_020812.1,1104-1122).
ggacacagccaagaacaaa

SEQ ID NO: 379084 - DNA, 19 bp, Homo sapiens
  siRNA target sequence for DOCK6 (NM_020812.1,1367-1385).
ccacgctaactgtcacaaa

SEQ ID NO: 379085 - DNA, 19 bp, Homo sapiens
  siRNA target sequence for DOCK6 (NM_020812.1,1370-1388).
cgctaactgtcacaaactt

SEQ ID NO: 379086 - DNA, 19 bp, Homo sapiens
  siRNA target sequence for DOCK6 (NM_020812.1,1372-1390).
ctaactgtcacaaacttct

SEQ ID NO: 379087 - DNA, 19 bp, Homo sapiens
  siRNA target sequence for DOCK6 (NM_020812.1,1495-1513).
cagctcaagatcgacattt

SEQ ID NO: 379088 - DNA, 19 bp, Homo sapiens
  siRNA target sequence for DOCK6 (NM_020812.1,1497-1515).
gctcaagatcgacatttct

SEQ ID NO: 379089 - DNA, 19 bp, Homo sapiens
  siRNA target sequence for DOCK6 (NM_020812.1,1724-1742).
ctgtgcgagtgcagtacat

SEQ ID NO: 379090 - DNA, 19 bp, Homo sapiens
  siRNA target sequence for DOCK6 (NM_020812.1,1726-1744).
gtgcgagtgcagtacatga

SEQ ID NO: 379091 - DNA, 19 bp, Homo sapiens
  siRNA target sequence for DOCK6 (NM_020812.1,1764-1782).
ggctctgccggtcatcttt

SEQ ID NO: 379092 - DNA, 19 bp, Homo sapiens
  siRNA target sequence for DOCK6 (NM_020812.1,1788-1806).
gtccagctgcagtgaattt

SEQ ID NO: 379093 - DNA, 19 bp, Homo sapiens
  siRNA target sequence for DOCK6 (NM_020812.1,1825-1843).
ccggtggtctaccataaca

SEQ ID NO: 379094 - DNA, 19 bp, Homo sapiens
  siRNA target sequence for DOCK6 (NM_020812.1,1826-1844).
cggtggtctaccataacaa

SEQ ID NO: 379095 - DNA, 19 bp, Homo sapiens
  siRNA target sequence for DOCK6 (NM_020812.1,1828-1846).
gtggtctaccataacaagt

SEQ ID NO: 379096 - DNA, 19 bp, Homo sapiens
  siRNA target sequence for DOCK6 (NM_020812.1,2176-2194).
ccctacctggacaaattct

SEQ ID NO: 379097 - DNA, 19 bp, Homo sapiens
  siRNA target sequence for DOCK6 (NM_020812.1,2818-2836).
cagctcatggtgaagagta

SEQ ID NO: 379098 - DNA, 19 bp, Homo sapiens
  siRNA target sequence for DOCK6 (NM_020812.1,3096-3114).
ccagtcgtcccctaatcca

SEQ ID NO: 379099 - DNA, 19 bp, Homo sapiens
  siRNA target sequence for DOCK6 (NM_020812.1,3395-3413).
cattcctgttgcacaagaa

SEQ ID NO: 379100 - DNA, 19 bp, Homo sapiens
  siRNA target sequence for DOCK6 (NM_020812.1,3521-3539).
cgattgcacgggatacctt

SEQ ID NO: 379101 - DNA, 19 bp, Homo sapiens
  siRNA target sequence for DOCK6 (NM_020812.1,3926-3944).
gcatcaacagcctcacatt

SEQ ID NO: 379102 - DNA, 19 bp, Homo sapiens
  siRNA target sequence for DOCK6 (NM_020812.1,4001-4019).
gagctcgacaagaaatggt

SEQ ID NO: 379103 - DNA, 19 bp, Homo sapiens
  siRNA target sequence for DOCK6 (NM_020812.1,4215-4233).
gacggtgatgctttcagaa

SEQ ID NO: 379104 - DNA, 19 bp, Homo sapiens
  siRNA target sequence for DOCK6 (NM_020812.1,4555-4573).
gggacgacgcagaacttca

SEQ ID NO: 379105 - DNA, 19 bp, Homo sapiens
  siRNA target sequence for DOCK6 (NM_020812.1,4584-4602).
cctgcgacgttcactcaaa

SEQ ID NO: 379106 - DNA, 19 bp, Homo sapiens
  siRNA target sequence for DOCK6 (NM_020812.1,4588-4606).
cgacgttcactcaaaacca

SEQ ID NO: 379107 - DNA, 19 bp, Homo sapiens
  siRNA target sequence for DOCK6 (NM_020812.1,4589-4607).
gacgttcactcaaaaccat

SEQ ID NO: 379108 - DNA, 19 bp, Homo sapiens
  siRNA target sequence for DOCK6 (NM_020812.1,4943-4961).
gcgtttccttccagaacat

SEQ ID NO: 379109 - DNA, 19 bp, Homo sapiens
  siRNA target sequence for DOCK6 (NM_020812.1,5077-5095).
caggcagccggctacttca

SEQ ID NO: 379110 - DNA, 19 bp, Homo sapiens
  siRNA target sequence for DOCK6 (NM_020812.1,5248-5266).
cgcgtgttcgggacgtatt

SEQ ID NO: 379111 - DNA, 19 bp, Homo sapiens
  siRNA target sequence for DOCK6 (NM_020812.1,5249-5267).
gcgtgttcgggacgtattt

SEQ ID NO: 379112 - DNA, 19 bp, Homo sapiens
  siRNA target sequence for DOCK6 (NM_020812.1,5376-5394).
gttctacacggagagattt

SEQ ID NO: 379113 - DNA, 19 bp, Homo sapiens
  siRNA target sequence for DOCK6 (NM_020812.1,5396-5414).
gcgacgacgtcgttgagat

SEQ ID NO: 379114 - DNA, 19 bp, Homo sapiens
  siRNA target sequence for DOCK6 (NM_020812.1,5397-5415).
cgacgacgtcgttgagatt

SEQ ID NO: 379115 - DNA, 19 bp, Homo sapiens
  siRNA target sequence for DOCK6 (NM_020812.1,5398-5416).
gacgacgtcgttgagatta

SEQ ID NO: 379116 - DNA, 19 bp, Homo sapiens
  siRNA target sequence for DOCK6 (NM_020812.1,5401-5419).
gacgtcgttgagattatca

SEQ ID NO: 379117 - DNA, 19 bp, Homo sapiens
  siRNA target sequence for DOCK6 (NM_020812.1,5403-5421).
cgtcgttgagattatcaaa

SEQ ID NO: 379118 - DNA, 19 bp, Homo sapiens
  siRNA target sequence for DOCK6 (NM_020812.1,5485-5503).
gtggaaccgtactttgata

SEQ ID NO: 379119 - DNA, 19 bp, Homo sapiens
  siRNA target sequence for DOCK6 (NM_020812.1,5901-5919).
cttccggcatcacaacaaa

SEQ ID NO: 379120 - DNA, 19 bp, Homo sapiens
  siRNA target sequence for DOCK6 (NM_020812.1,5958-5976).
ggatgcgctgcggaaaaat

SEQ ID NO: 379121 - DNA, 19 bp, Homo sapiens
  siRNA target sequence for DOCK6 (NM_020812.1,5959-5977).
gatgcgctgcggaaaaata

SEQ ID NO: 379122 - DNA, 19 bp, Homo sapiens
  siRNA target sequence for DOCK6 (NM_020812.1,6119-6137).
ccttgaacagagcaagttt

SEQ ID NO: 379123 - DNA, 19 bp, Homo sapiens
  siRNA target sequence for KIF17 (NM_020816.1,497-515).
gtcaccgagcagatctaca

SEQ ID NO: 379124 - DNA, 19 bp, Homo sapiens
  siRNA target sequence for KIF17 (NM_020816.1,544-562).
cgtcactgagggctacaat

SEQ ID NO: 379125 - DNA, 19 bp, Homo sapiens
  siRNA target sequence for KIF17 (NM_020816.1,690-708).
gtgcagagaacactaagtt

SEQ ID NO: 379126 - DNA, 19 bp, Homo sapiens
  siRNA target sequence for KIF17 (NM_020816.1,858-876).
cccagtgtgagcacatcat

SEQ ID NO: 379127 - DNA, 19 bp, Homo sapiens
  siRNA target sequence for KIF17 (NM_020816.1,905-923).
ggctacacgctgatgaaca

SEQ ID NO: 379128 - DNA, 19 bp, Homo sapiens
  siRNA target sequence for KIF17 (NM_020816.1,906-924).
gctacacgctgatgaacaa

SEQ ID NO: 379129 - DNA, 19 bp, Homo sapiens
  siRNA target sequence for KIF17 (NM_020816.1,1534-1552).
gatccgggaggagtatgaa

SEQ ID NO: 379130 - DNA, 19 bp, Homo sapiens
  siRNA target sequence for KIF17 (NM_020816.1,1565-1583).
cggctgaaagccgactata

SEQ ID NO: 379131 - DNA, 19 bp, Homo sapiens
  siRNA target sequence for KIF17 (NM_020816.1,1566-1584).
ggctgaaagccgactataa

SEQ ID NO: 379132 - DNA, 19 bp, Homo sapiens
  siRNA target sequence for KIF17 (NM_020816.1,1626-1644).
ctgccatgcgcaactcata

SEQ ID NO: 379133 - DNA, 19 bp, Homo sapiens
  siRNA target sequence for KIF17 (NM_020816.1,1629-1647).
ccatgcgcaactcatatga

SEQ ID NO: 379134 - DNA, 19 bp, Homo sapiens
  siRNA target sequence for KIF17 (NM_020816.1,1768-1786).
cccgcctgcttttcagtat

SEQ ID NO: 379135 - DNA, 19 bp, Homo sapiens
  siRNA target sequence for KIF17 (NM_020816.1,1770-1788).
cgcctgcttttcagtatga

SEQ ID NO: 379136 - DNA, 19 bp, Homo sapiens
  siRNA target sequence for KIF17 (NM_020816.1,1772-1790).
cctgcttttcagtatgaga

SEQ ID NO: 379137 - DNA, 19 bp, Homo sapiens
  siRNA target sequence for KIF17 (NM_020816.1,1895-1913).
ccctccaaatctgagattt

SEQ ID NO: 379138 - DNA, 19 bp, Homo sapiens
  siRNA target sequence for KIF17 (NM_020816.1,2018-2036).
gagtccaggagcagatact

SEQ ID NO: 379139 - DNA, 19 bp, Homo sapiens
  siRNA target sequence for KIF17 (NM_020816.1,2322-2340).
ccaggcctgaggtagatct

SEQ ID NO: 379140 - DNA, 19 bp, Homo sapiens
  siRNA target sequence for KIF17 (NM_020816.1,2688-2706).
gggactgggtgctgcttaa

SEQ ID NO: 379141 - DNA, 19 bp, Homo sapiens
  siRNA target sequence for KIF17 (NM_020816.1,2996-3014).
ccacatcccgtcatcacaa

SEQ ID NO: 379142 - DNA, 19 bp, Homo sapiens
  siRNA target sequence for KIF17 (NM_020816.1,2997-3015).
cacatcccgtcatcacaaa

SEQ ID NO: 379143 - DNA, 19 bp, Homo sapiens
  siRNA target sequence for KIF17 (NM_020816.1,3002-3020).
cccgtcatcacaaaaacca

SEQ ID NO: 379144 - DNA, 19 bp, Homo sapiens
  siRNA target sequence for KIF17 (NM_020816.1,3159-3177).
gcaactacttccgatctaa

SEQ ID NO: 379145 - DNA, 19 bp, Homo sapiens
  siRNA target sequence for KIF17 (NM_020816.1,3353-3371).
gccaagcgtaagaaaagca

SEQ ID NO: 379146 - DNA, 19 bp, Homo sapiens
  siRNA target sequence for KIF17 (NM_020816.1,3354-3372).
ccaagcgtaagaaaagcaa

SEQ ID NO: 379147 - DNA, 19 bp, Homo sapiens
  siRNA target sequence for KIAA1407 (NM_020817.1,202-220).
cgctggaaacggttcacaa

SEQ ID NO: 379148 - DNA, 19 bp, Homo sapiens
  siRNA target sequence for KIAA1407 (NM_020817.1,227-245).
cgagtcccaagcctacttt

SEQ ID NO: 379149 - DNA, 19 bp, Homo sapiens
  siRNA target sequence for KIAA1407 (NM_020817.1,353-371).
ggggccaaatcacagattt

SEQ ID NO: 379150 - DNA, 19 bp, Homo sapiens
  siRNA target sequence for KIAA1407 (NM_020817.1,356-374).
gccaaatcacagatttgaa

SEQ ID NO: 379151 - DNA, 19 bp, Homo sapiens
  siRNA target sequence for KIAA1407 (NM_020817.1,430-448).
gtcaatgactggttagaca

SEQ ID NO: 379152 - DNA, 19 bp, Homo sapiens
  siRNA target sequence for KIAA1407 (NM_020817.1,438-456).
ctggttagacaccaaactt

SEQ ID NO: 379153 - DNA, 19 bp, Homo sapiens
  siRNA target sequence for KIAA1407 (NM_020817.1,440-458).
ggttagacaccaaacttaa

SEQ ID NO: 379154 - DNA, 19 bp, Homo sapiens
  siRNA target sequence for KIAA1407 (NM_020817.1,500-518).
ctgtgtcaagtgtcactat

SEQ ID NO: 379155 - DNA, 19 bp, Homo sapiens
  siRNA target sequence for KIAA1407 (NM_020817.1,502-520).
gtgtcaagtgtcactatta

SEQ ID NO: 379156 - DNA, 19 bp, Homo sapiens
  siRNA target sequence for KIAA1407 (NM_020817.1,530-548).
ccaatggccatttgaaata

SEQ ID NO: 379157 - DNA, 19 bp, Homo sapiens
  siRNA target sequence for KIAA1407 (NM_020817.1,592-610).
gaaagtaccaccgttcaaa

SEQ ID NO: 379158 - DNA, 19 bp, Homo sapiens
  siRNA target sequence for KIAA1407 (NM_020817.1,599-617).
ccaccgttcaaaaatttat

SEQ ID NO: 379159 - DNA, 19 bp, Homo sapiens
  siRNA target sequence for KIAA1407 (NM_020817.1,602-620).
ccgttcaaaaatttataga

SEQ ID NO: 379160 - DNA, 19 bp, Homo sapiens
  siRNA target sequence for KIAA1407 (NM_020817.1,619-637).
gaccatctgctccataaaa

SEQ ID NO: 379161 - DNA, 19 bp, Homo sapiens
  siRNA target sequence for KIAA1407 (NM_020817.1,621-639).
ccatctgctccataaaaat

SEQ ID NO: 379162 - DNA, 19 bp, Homo sapiens
  siRNA target sequence for KIAA1407 (NM_020817.1,1145-1163).
ggcacaagctgattcttga

SEQ ID NO: 379163 - DNA, 19 bp, Homo sapiens
  siRNA target sequence for KIAA1407 (NM_020817.1,1272-1290).
gactcaagccttggaaaat

SEQ ID NO: 379164 - DNA, 19 bp, Homo sapiens
  siRNA target sequence for KIAA1407 (NM_020817.1,1353-1371).
ccgacactgctttacagaa

SEQ ID NO: 379165 - DNA, 19 bp, Homo sapiens
  siRNA target sequence for KIAA1407 (NM_020817.1,1406-1424).
gagagctggctctcacaaa

SEQ ID NO: 379166 - DNA, 19 bp, Homo sapiens
  siRNA target sequence for KIAA1407 (NM_020817.1,1533-1551).
ggtgggtccaccagtaaaa

SEQ ID NO: 379167 - DNA, 19 bp, Homo sapiens
  siRNA target sequence for KIAA1407 (NM_020817.1,1534-1552).
gtgggtccaccagtaaaaa

SEQ ID NO: 379168 - DNA, 19 bp, Homo sapiens
  siRNA target sequence for KIAA1407 (NM_020817.1,1536-1554).
gggtccaccagtaaaaaat

SEQ ID NO: 379169 - DNA, 19 bp, Homo sapiens
  siRNA target sequence for KIAA1407 (NM_020817.1,1627-1645).
cccctgggaagaacaacaa

SEQ ID NO: 379170 - DNA, 19 bp, Homo sapiens
  siRNA target sequence for KIAA1407 (NM_020817.1,1685-1703).
gtgcacctggcaataagca

SEQ ID NO: 379171 - DNA, 19 bp, Homo sapiens
  siRNA target sequence for KIAA1407 (NM_020817.1,2051-2069).
gtgactcccgaaattctct

SEQ ID NO: 379172 - DNA, 19 bp, Homo sapiens
  siRNA target sequence for KIAA1407 (NM_020817.1,2053-2071).
gactcccgaaattctcttt

SEQ ID NO: 379173 - DNA, 19 bp, Homo sapiens
  siRNA target sequence for KIAA1407 (NM_020817.1,2103-2121).
gacaccgcatcccatacta

SEQ ID NO: 379174 - DNA, 19 bp, Homo sapiens
  siRNA target sequence for KIAA1407 (NM_020817.1,2105-2123).
caccgcatcccatactaaa

SEQ ID NO: 379175 - DNA, 19 bp, Homo sapiens
  siRNA target sequence for KIAA1407 (NM_020817.1,2115-2133).
catactaaaagctatggaa

SEQ ID NO: 379176 - DNA, 19 bp, Homo sapiens
  siRNA target sequence for KIAA1407 (NM_020817.1,2360-2378).
caatagccaaagaacatta

SEQ ID NO: 379177 - DNA, 19 bp, Homo sapiens
  siRNA target sequence for KIAA1407 (NM_020817.1,2451-2469).
ccaggtggcagaagaacat

SEQ ID NO: 379178 - DNA, 19 bp, Homo sapiens
  siRNA target sequence for KIAA1407 (NM_020817.1,2455-2473).
gtggcagaagaacattact

SEQ ID NO: 379179 - DNA, 19 bp, Homo sapiens
  siRNA target sequence for KIAA1407 (NM_020817.1,2461-2479).
gaagaacattactctttgt

SEQ ID NO: 379180 - DNA, 19 bp, Homo sapiens
  siRNA target sequence for KIAA1407 (NM_020817.1,2544-2562).
ggcccaggctgatcaattt

SEQ ID NO: 379181 - DNA, 19 bp, Homo sapiens
  siRNA target sequence for KIAA1407 (NM_020817.1,2545-2563).
gcccaggctgatcaatttt

SEQ ID NO: 379182 - DNA, 19 bp, Homo sapiens
  siRNA target sequence for KIAA1407 (NM_020817.1,2600-2618).
ggctacagtacgtgattga

SEQ ID NO: 379183 - DNA, 19 bp, Homo sapiens
  siRNA target sequence for KIAA1407 (NM_020817.1,2601-2619).
gctacagtacgtgattgat

SEQ ID NO: 379184 - DNA, 19 bp, Homo sapiens
  siRNA target sequence for KIAA1407 (NM_020817.1,2773-2791).
cttcggacatggaagaagt

SEQ ID NO: 379185 - DNA, 19 bp, Homo sapiens
  siRNA target sequence for KIAA1407 (NM_020817.1,2888-2906).
gaaggtaccacgagctata

SEQ ID NO: 379186 - DNA, 19 bp, Homo sapiens
  siRNA target sequence for KIAA1407 (NM_020817.1,2891-2909).
ggtaccacgagctatatca

SEQ ID NO: 379187 - DNA, 19 bp, Homo sapiens
  siRNA target sequence for KIAA1407 (NM_020817.1,2902-2920).
ctatatcagcaatcagata

SEQ ID NO: 379188 - DNA, 19 bp, Homo sapiens
  siRNA target sequence for KIAA1409 (NM_020818.1,670-688).
ggctacctttcctccattt

SEQ ID NO: 379189 - DNA, 19 bp, Homo sapiens
  siRNA target sequence for KIAA1409 (NM_020818.1,764-782).
ggtgtacctgcccatgtta

SEQ ID NO: 379190 - DNA, 19 bp, Homo sapiens
  siRNA target sequence for KIAA1409 (NM_020818.1,765-783).
gtgtacctgcccatgttaa

SEQ ID NO: 379191 - DNA, 19 bp, Homo sapiens
  siRNA target sequence for KIAA1409 (NM_020818.1,791-809).
gcatcatccatgctaatga

SEQ ID NO: 379192 - DNA, 19 bp, Homo sapiens
  siRNA target sequence for KIAA1409 (NM_020818.1,792-810).
catcatccatgctaatgat

SEQ ID NO: 379193 - DNA, 19 bp, Homo sapiens
  siRNA target sequence for KIAA1409 (NM_020818.1,825-843).
catccaatccagtgtatca

SEQ ID NO: 379194 - DNA, 19 bp, Homo sapiens
  siRNA target sequence for KIAA1409 (NM_020818.1,833-851).
ccagtgtatcattgtcaat

SEQ ID NO: 379195 - DNA, 19 bp, Homo sapiens
  siRNA target sequence for KIAA1409 (NM_020818.1,834-852).
cagtgtatcattgtcaatt

SEQ ID NO: 379196 - DNA, 19 bp, Homo sapiens
  siRNA target sequence for KIAA1409 (NM_020818.1,856-874).
ggaatgcctcatgaaatat

SEQ ID NO: 379197 - DNA, 19 bp, Homo sapiens
  siRNA target sequence for KIAA1409 (NM_020818.1,886-904).
ctggaaagatcttttgtat

SEQ ID NO: 379198 - DNA, 19 bp, Homo sapiens
  siRNA target sequence for KIAA1409 (NM_020818.1,938-956).
ccagctgtgcaaatgcttt

SEQ ID NO: 379199 - DNA, 19 bp, Homo sapiens
  siRNA target sequence for KIAA1409 (NM_020818.1,959-977).
cactactggcccaatttaa

SEQ ID NO: 379200 - DNA, 19 bp, Homo sapiens
  siRNA target sequence for KIAA1409 (NM_020818.1,961-979).
ctactggcccaatttaaaa

SEQ ID NO: 379201 - DNA, 19 bp, Homo sapiens
  siRNA target sequence for KIAA1409 (NM_020818.1,964-982).
ctggcccaatttaaaacct

SEQ ID NO: 379202 - DNA, 19 bp, Homo sapiens
  siRNA target sequence for KIAA1409 (NM_020818.1,1036-1054).
ccactgccagcacattgaa

SEQ ID NO: 379203 - DNA, 19 bp, Homo sapiens
  siRNA target sequence for KIAA1409 (NM_020818.1,1037-1055).
cactgccagcacattgaat

SEQ ID NO: 379204 - DNA, 19 bp, Homo sapiens
  siRNA target sequence for KIAA1409 (NM_020818.1,1056-1074).
gccacaatgcaattaacaa

SEQ ID NO: 379205 - DNA, 19 bp, Homo sapiens
  siRNA target sequence for KIAA1409 (NM_020818.1,1077-1095).
cagctgtgaagatgtgtat

SEQ ID NO: 379206 - DNA, 19 bp, Homo sapiens
  siRNA target sequence for KIAA1409 (NM_020818.1,1183-1201).
cagtgagtggctgattgat

SEQ ID NO: 379207 - DNA, 19 bp, Homo sapiens
  siRNA target sequence for KIAA1409 (NM_020818.1,1185-1203).
gtgagtggctgattgatgt

SEQ ID NO: 379208 - DNA, 19 bp, Homo sapiens
  siRNA target sequence for KIAA1409 (NM_020818.1,1189-1207).
gtggctgattgatgttctt

SEQ ID NO: 379209 - DNA, 19 bp, Homo sapiens
  siRNA target sequence for KIAA1409 (NM_020818.1,1191-1209).
ggctgattgatgttcttct

SEQ ID NO: 379210 - DNA, 19 bp, Homo sapiens
  siRNA target sequence for KIAA1409 (NM_020818.1,1252-1270).
cagttcccacgttagaaga

SEQ ID NO: 379211 - DNA, 19 bp, Homo sapiens
  siRNA target sequence for KIAA1409 (NM_020818.1,1339-1357).
gaggtgccactcaaatcat

SEQ ID NO: 379212 - DNA, 19 bp, Homo sapiens
  siRNA target sequence for KIAA1409 (NM_020818.1,1341-1359).
ggtgccactcaaatcatca

SEQ ID NO: 379213 - DNA, 19 bp, Homo sapiens
  siRNA target sequence for KIAA1409 (NM_020818.1,1383-1401).
cggagactcacctctatca

SEQ ID NO: 379214 - DNA, 19 bp, Homo sapiens
  siRNA target sequence for KIAA1409 (NM_020818.1,1468-1486).
cgtgatcagcttgttgaaa

SEQ ID NO: 379215 - DNA, 19 bp, Homo sapiens
  siRNA target sequence for KIAA1409 (NM_020818.1,1471-1489).
gatcagcttgttgaaagaa

SEQ ID NO: 379216 - DNA, 19 bp, Homo sapiens
  siRNA target sequence for KIAA1409 (NM_020818.1,1626-1644).
gtcaattcggaatatggtt

SEQ ID NO: 379217 - DNA, 19 bp, Homo sapiens
  siRNA target sequence for KIAA1409 (NM_020818.1,1670-1688).
gagaacacgcctacagaaa

SEQ ID NO: 379218 - DNA, 19 bp, Homo sapiens
  siRNA target sequence for KIAA1409 (NM_020818.1,1703-1721).
gtggccatggtgtttcagt

SEQ ID NO: 379219 - DNA, 19 bp, Homo sapiens
  siRNA target sequence for KIAA1409 (NM_020818.1,1727-1745).
cactccactgcgtatatga

SEQ ID NO: 379220 - DNA, 19 bp, Homo sapiens
  siRNA target sequence for KIAA1409 (NM_020818.1,1761-1779).
gaagtctggtggaaaagct

SEQ ID NO: 379221 - DNA, 19 bp, Homo sapiens
  siRNA target sequence for KIAA1409 (NM_020818.1,1803-1821).
ggctgaagaccgtatgtga

SEQ ID NO: 379222 - DNA, 19 bp, Homo sapiens
  siRNA target sequence for KIAA1409 (NM_020818.1,1804-1822).
gctgaagaccgtatgtgat

SEQ ID NO: 379223 - DNA, 19 bp, Homo sapiens
  siRNA target sequence for KIAA1409 (NM_020818.1,1807-1825).
gaagaccgtatgtgatgtt

SEQ ID NO: 379224 - DNA, 19 bp, Homo sapiens
  siRNA target sequence for KIAA1409 (NM_020818.1,1853-1871).
cttcctaaacccatggaat

SEQ ID NO: 379225 - DNA, 19 bp, Homo sapiens
  siRNA target sequence for KIAA1409 (NM_020818.1,1883-1901).
ggtggctactgggataagt

SEQ ID NO: 379226 - DNA, 19 bp, Homo sapiens
  siRNA target sequence for KIAA1409 (NM_020818.1,1948-1966).
ctgcctgatcccctataat

SEQ ID NO: 379227 - DNA, 19 bp, Homo sapiens
  siRNA target sequence for KIAA1409 (NM_020818.1,1957-1975).
cccctataatgtgatcaat

SEQ ID NO: 379228 - DNA, 19 bp, Homo sapiens
  siRNA target sequence for KIAA1409 (NM_020818.1,1960-1978).
ctataatgtgatcaatcaa

SEQ ID NO: 379229 - DNA, 19 bp, Homo sapiens
  siRNA target sequence for KIAA1409 (NM_020818.1,1980-1998).
ctgtctgggagtgtattat

SEQ ID NO: 379230 - DNA, 19 bp, Homo sapiens
  siRNA target sequence for KIAA1409 (NM_020818.1,2056-2074).
cagggaagtattaagcaaa

SEQ ID NO: 379231 - DNA, 19 bp, Homo sapiens
  siRNA target sequence for KIAA1409 (NM_020818.1,2058-2076).
gggaagtattaagcaaaat

SEQ ID NO: 379232 - DNA, 19 bp, Homo sapiens
  siRNA target sequence for KIAA1409 (NM_020818.1,2168-2186).
caggagcaagctttactgt

SEQ ID NO: 379233 - DNA, 19 bp, Homo sapiens
  siRNA target sequence for KIAA1409 (NM_020818.1,2183-2201).
ctgtggcttcatgtattat

SEQ ID NO: 379234 - DNA, 19 bp, Homo sapiens
  siRNA target sequence for KIAA1409 (NM_020818.1,2195-2213).
gtattatcggagttagata

SEQ ID NO: 379235 - DNA, 19 bp, Homo sapiens
  siRNA target sequence for KIAA1409 (NM_020818.1,2218-2236).
ggttccacttcaactacta

SEQ ID NO: 379236 - DNA, 19 bp, Homo sapiens
  siRNA target sequence for KIAA1409 (NM_020818.1,2219-2237).
gttccacttcaactactaa

SEQ ID NO: 379237 - DNA, 19 bp, Homo sapiens
  siRNA target sequence for KIAA1409 (NM_020818.1,2222-2240).
ccacttcaactactaataa

SEQ ID NO: 379238 - DNA, 19 bp, Homo sapiens
  siRNA target sequence for KIAA1409 (NM_020818.1,2256-2274).
gagttaattcagtcaaaga

SEQ ID NO: 379239 - DNA, 19 bp, Homo sapiens
  siRNA target sequence for KIAA1409 (NM_020818.1,2269-2287).
caaagagctggcaaatcaa

SEQ ID NO: 379240 - DNA, 19 bp, Homo sapiens
  siRNA target sequence for KIAA1409 (NM_020818.1,2275-2293).
gctggcaaatcaaagaaaa

SEQ ID NO: 379241 - DNA, 19 bp, Homo sapiens
  siRNA target sequence for KIAA1409 (NM_020818.1,2360-2378).
cgacgagttcagcacaata

SEQ ID NO: 379242 - DNA, 19 bp, Homo sapiens
  siRNA target sequence for KIAA1409 (NM_020818.1,2361-2379).
gacgagttcagcacaatat

SEQ ID NO: 379243 - DNA, 19 bp, Homo sapiens
  siRNA target sequence for KIAA1409 (NM_020818.1,2364-2382).
gagttcagcacaatatgct

SEQ ID NO: 379244 - DNA, 19 bp, Homo sapiens
  siRNA target sequence for KIAA1409 (NM_020818.1,2366-2384).
gttcagcacaatatgctta

SEQ ID NO: 379245 - DNA, 19 bp, Homo sapiens
  siRNA target sequence for KIAA1409 (NM_020818.1,2374-2392).
caatatgcttagtccattt

SEQ ID NO: 379246 - DNA, 19 bp, Homo sapiens
  siRNA target sequence for KIAA1409 (NM_020818.1,2436-2454).
cgtttcgtagccctttcaa

SEQ ID NO: 379247 - DNA, 19 bp, Homo sapiens
  siRNA target sequence for KIAA1409 (NM_020818.1,2441-2459).
cgtagccctttcaagaatt

SEQ ID NO: 379248 - DNA, 19 bp, Homo sapiens
  siRNA target sequence for KIAA1409 (NM_020818.1,2446-2464).
ccctttcaagaattttgga

SEQ ID NO: 379249 - DNA, 19 bp, Homo sapiens
  siRNA target sequence for KIAA1409 (NM_020818.1,2475-2493).
gaaggactattgactttga

SEQ ID NO: 379250 - DNA, 19 bp, Homo sapiens
  siRNA target sequence for KIAA1409 (NM_020818.1,2479-2497).
gactattgactttgattgt

SEQ ID NO: 379251 - DNA, 19 bp, Homo sapiens
  siRNA target sequence for KIAA1409 (NM_020818.1,2501-2519).
gatgatgaaatgaatctaa

SEQ ID NO: 379252 - DNA, 19 bp, Homo sapiens
  siRNA target sequence for KIAA1409 (NM_020818.1,2504-2522).
gatgaaatgaatctaaatt

SEQ ID NO: 379253 - DNA, 19 bp, Homo sapiens
  siRNA target sequence for KIAA1409 (NM_020818.1,2527-2545).
catcctcatgtttgatctt

SEQ ID NO: 379254 - DNA, 19 bp, Homo sapiens
  siRNA target sequence for KIAA1409 (NM_020818.1,2554-2572).
gcagatggagttacaagat

SEQ ID NO: 379255 - DNA, 19 bp, Homo sapiens
  siRNA target sequence for KIAA1409 (NM_020818.1,2577-2595).
gaatcacgatgggtttaga

SEQ ID NO: 379256 - DNA, 19 bp, Homo sapiens
  siRNA target sequence for KIAA1409 (NM_020818.1,2588-2606).
ggtttagagcacagcttat

SEQ ID NO: 379257 - DNA, 19 bp, Homo sapiens
  siRNA target sequence for KIAA1409 (NM_020818.1,2601-2619).
gcttatcaaaggacattat

SEQ ID NO: 379258 - DNA, 19 bp, Homo sapiens
  siRNA target sequence for KIAA1409 (NM_020818.1,2622-2640).
ctattataaacaatgtctt

SEQ ID NO: 379259 - DNA, 19 bp, Homo sapiens
  siRNA target sequence for KIAA1409 (NM_020818.1,2687-2705).
gcaatcgagtgcaacttat

SEQ ID NO: 379260 - DNA, 19 bp, Homo sapiens
  siRNA target sequence for KIAA1409 (NM_020818.1,2725-2743).
ctatcagcttgcttgtgaa

SEQ ID NO: 379261 - DNA, 19 bp, Homo sapiens
  siRNA target sequence for KIAA1409 (NM_020818.1,2754-2772).
gactagctcctaaagaaga

SEQ ID NO: 379262 - DNA, 19 bp, Homo sapiens
  siRNA target sequence for KIAA1409 (NM_020818.1,2756-2774).
ctagctcctaaagaagaaa

SEQ ID NO: 379263 - DNA, 19 bp, Homo sapiens
  siRNA target sequence for KIAA1409 (NM_020818.1,2943-2961).
ccgaaagaaaattttgcta

SEQ ID NO: 379264 - DNA, 19 bp, Homo sapiens
  siRNA target sequence for KIAA1409 (NM_020818.1,2966-2984).
cagcttccggtaacattga

SEQ ID NO: 379265 - DNA, 19 bp, Homo sapiens
  siRNA target sequence for KIAA1409 (NM_020818.1,2968-2986).
gcttccggtaacattgaga

SEQ ID NO: 379266 - DNA, 19 bp, Homo sapiens
  siRNA target sequence for KIAA1409 (NM_020818.1,2972-2990).
ccggtaacattgagactaa

SEQ ID NO: 379267 - DNA, 19 bp, Homo sapiens
  siRNA target sequence for KIAA1409 (NM_020818.1,2973-2991).
cggtaacattgagactaat

SEQ ID NO: 379268 - DNA, 19 bp, Homo sapiens
  siRNA target sequence for KIAA1409 (NM_020818.1,2974-2992).
ggtaacattgagactaata

SEQ ID NO: 379269 - DNA, 19 bp, Homo sapiens
  siRNA target sequence for KIAA1409 (NM_020818.1,3023-3041).
gaagagccagacattcttt

SEQ ID NO: 379270 - DNA, 19 bp, Homo sapiens
  siRNA target sequence for KIAA1409 (NM_020818.1,3137-3155).
gaccacatgttgattgcaa

SEQ ID NO: 379271 - DNA, 19 bp, Homo sapiens
  siRNA target sequence for KIAA1409 (NM_020818.1,3158-3176).
ctgtggagggtcgtcaaat

SEQ ID NO: 379272 - DNA, 19 bp, Homo sapiens
  siRNA target sequence for KIAA1409 (NM_020818.1,3253-3271).
cttctggacaatcataaat

SEQ ID NO: 379273 - DNA, 19 bp, Homo sapiens
  siRNA target sequence for KIAA1409 (NM_020818.1,3336-3354).
gtagatttctggatattca

SEQ ID NO: 379274 - DNA, 19 bp, Homo sapiens
  siRNA target sequence for KIAA1409 (NM_020818.1,3417-3435).
cagcagtggaggatgtcaa

SEQ ID NO: 379275 - DNA, 19 bp, Homo sapiens
  siRNA target sequence for KIAA1409 (NM_020818.1,3489-3507).
cattgcagggtctatgtct

SEQ ID NO: 379276 - DNA, 19 bp, Homo sapiens
  siRNA target sequence for KIAA1409 (NM_020818.1,3493-3511).
gcagggtctatgtctttgt

SEQ ID NO: 379277 - DNA, 19 bp, Homo sapiens
  siRNA target sequence for KIAA1409 (NM_020818.1,3512-3530).
cttgacttccagtttgata

SEQ ID NO: 379278 - DNA, 19 bp, Homo sapiens
  siRNA target sequence for KIAA1409 (NM_020818.1,3542-3560).
gacagacccacaattttga

SEQ ID NO: 379279 - DNA, 19 bp, Homo sapiens
  siRNA target sequence for KIAA1409 (NM_020818.1,3609-3627).
gctgggagttctttgtcaa

SEQ ID NO: 379280 - DNA, 19 bp, Homo sapiens
  siRNA target sequence for KIAA1409 (NM_020818.1,3656-3674).
cagctacatttggattgta

SEQ ID NO: 379281 - DNA, 19 bp, Homo sapiens
  siRNA target sequence for KIAA1409 (NM_020818.1,3672-3690).
gtaacaaggaatttccttt

SEQ ID NO: 379282 - DNA, 19 bp, Homo sapiens
  siRNA target sequence for KIAA1409 (NM_020818.1,3741-3759).
cagccttatggaagatcaa

SEQ ID NO: 379283 - DNA, 19 bp, Homo sapiens
  siRNA target sequence for KIAA1409 (NM_020818.1,3868-3886).
ctccaaaattcgacaacaa

SEQ ID NO: 379284 - DNA, 19 bp, Homo sapiens
  siRNA target sequence for KIAA1409 (NM_020818.1,4053-4071).
gacacctgtacgtcttact

SEQ ID NO: 379285 - DNA, 19 bp, Homo sapiens
  siRNA target sequence for KIAA1409 (NM_020818.1,4120-4138).
gcgcctgtcaacttgcttt

SEQ ID NO: 379286 - DNA, 19 bp, Homo sapiens
  siRNA target sequence for KIAA1409 (NM_020818.1,4123-4141).
cctgtcaacttgctttaat

SEQ ID NO: 379287 - DNA, 19 bp, Homo sapiens
  siRNA target sequence for KIAA1409 (NM_020818.1,4126-4144).
gtcaacttgctttaatgca

SEQ ID NO: 379288 - DNA, 19 bp, Homo sapiens
  siRNA target sequence for KIAA1409 (NM_020818.1,4160-4178).
gcccaagttatggactata

SEQ ID NO: 379289 - DNA, 19 bp, Homo sapiens
  siRNA target sequence for KIAA1409 (NM_020818.1,4161-4179).
cccaagttatggactataa

SEQ ID NO: 379290 - DNA, 19 bp, Homo sapiens
  siRNA target sequence for KIAA1409 (NM_020818.1,4325-4343).
gccttgcttgtcatccttt

SEQ ID NO: 379291 - DNA, 19 bp, Homo sapiens
  siRNA target sequence for KIAA1409 (NM_020818.1,4326-4344).
ccttgcttgtcatccttta

SEQ ID NO: 379292 - DNA, 19 bp, Homo sapiens
  siRNA target sequence for KIAA1409 (NM_020818.1,4352-4370).
ccataccgagactgtgata

SEQ ID NO: 379293 - DNA, 19 bp, Homo sapiens
  siRNA target sequence for KIAA1409 (NM_020818.1,4385-4403).
ctgcatctgattcacataa

SEQ ID NO: 379294 - DNA, 19 bp, Homo sapiens
  siRNA target sequence for KIAA1409 (NM_020818.1,4393-4411).
gattcacataacagtcaat

SEQ ID NO: 379295 - DNA, 19 bp, Homo sapiens
  siRNA target sequence for KIAA1409 (NM_020818.1,4413-4431).
cactcaatgcgcagtatca

SEQ ID NO: 379296 - DNA, 19 bp, Homo sapiens
  siRNA target sequence for KIAA1409 (NM_020818.1,4415-4433).
ctcaatgcgcagtatcata

SEQ ID NO: 379297 - DNA, 19 bp, Homo sapiens
  siRNA target sequence for KIAA1409 (NM_020818.1,4523-4541).
gtttttgatgaatctgata

SEQ ID NO: 379298 - DNA, 19 bp, Homo sapiens
  siRNA target sequence for KIAA1409 (NM_020818.1,4532-4550).
gaatctgatattcatgata

SEQ ID NO: 379299 - DNA, 19 bp, Homo sapiens
  siRNA target sequence for KIAA1409 (NM_020818.1,4554-4572).
ctactggaccctgcaataa

SEQ ID NO: 379300 - DNA, 19 bp, Homo sapiens
  siRNA target sequence for KIAA1409 (NM_020818.1,4605-4623).
gaataggcggcagcaaaat

SEQ ID NO: 379301 - DNA, 19 bp, Homo sapiens
  siRNA target sequence for KIAA1409 (NM_020818.1,4636-4654).
gccggttgagatgaatgtt

SEQ ID NO: 379302 - DNA, 19 bp, Homo sapiens
  siRNA target sequence for KIAA1409 (NM_020818.1,4638-4656).
cggttgagatgaatgttca

SEQ ID NO: 379303 - DNA, 19 bp, Homo sapiens
  siRNA target sequence for KIAA1409 (NM_020818.1,4686-4704).
gagagacgggtgcattaca

SEQ ID NO: 379304 - DNA, 19 bp, Homo sapiens
  siRNA target sequence for KIAA1409 (NM_020818.1,4737-4755).
gcattccgaaaaaaaagct

SEQ ID NO: 379305 - DNA, 19 bp, Homo sapiens
  siRNA target sequence for KIAA1409 (NM_020818.1,4738-4756).
cattccgaaaaaaaagcta

SEQ ID NO: 379306 - DNA, 19 bp, Homo sapiens
  siRNA target sequence for KIAA1409 (NM_020818.1,4754-4772).
ctacgctctttcaaacaaa

SEQ ID NO: 379307 - DNA, 19 bp, Homo sapiens
  siRNA target sequence for KIAA1409 (NM_020818.1,4793-4811).
gcagactcgcttttgttta

SEQ ID NO: 379308 - DNA, 19 bp, Homo sapiens
  siRNA target sequence for KIAA1409 (NM_020818.1,4796-4814).
gactcgcttttgtttacat

SEQ ID NO: 379309 - DNA, 19 bp, Homo sapiens
  siRNA target sequence for KIAA1409 (NM_020818.1,4840-4858).
catagatcggtgtgacata

SEQ ID NO: 379310 - DNA, 19 bp, Homo sapiens
  siRNA target sequence for KIAA1409 (NM_020818.1,4844-4862).
gatcggtgtgacatagaga

SEQ ID NO: 379311 - DNA, 19 bp, Homo sapiens
  siRNA target sequence for KIAA1409 (NM_020818.1,4869-4887).
cgacccaagctgcgtatat

SEQ ID NO: 379312 - DNA, 19 bp, Homo sapiens
  siRNA target sequence for KIAA1409 (NM_020818.1,4931-4949).
gctacgaggcctgacaata

SEQ ID NO: 379313 - DNA, 19 bp, Homo sapiens
  siRNA target sequence for KIAA1409 (NM_020818.1,4936-4954).
gaggcctgacaatagtgaa

SEQ ID NO: 379314 - DNA, 19 bp, Homo sapiens
  siRNA target sequence for KIAA1409 (NM_020818.1,4938-4956).
ggcctgacaatagtgaaat

SEQ ID NO: 379315 - DNA, 19 bp, Homo sapiens
  siRNA target sequence for KIAA1409 (NM_020818.1,4960-4978).
cgagaacccagctatggaa

SEQ ID NO: 379316 - DNA, 19 bp, Homo sapiens
  siRNA target sequence for KIAA1409 (NM_020818.1,5005-5023).
cataccagaggttaggtta

SEQ ID NO: 379317 - DNA, 19 bp, Homo sapiens
  siRNA target sequence for KIAA1409 (NM_020818.1,5009-5027).
ccagaggttaggttaaact

SEQ ID NO: 379318 - DNA, 19 bp, Homo sapiens
  siRNA target sequence for KIAA1409 (NM_020818.1,5062-5080).
ggtaaagcctgctcctaaa

SEQ ID NO: 379319 - DNA, 19 bp, Homo sapiens
  siRNA target sequence for KIAA1409 (NM_020818.1,5070-5088).
ctgctcctaaagaggattt

SEQ ID NO: 379320 - DNA, 19 bp, Homo sapiens
  siRNA target sequence for KIAA1409 (NM_020818.1,5124-5142).
ggcctgaaaaacactctat

SEQ ID NO: 379321 - DNA, 19 bp, Homo sapiens
  siRNA target sequence for KIAA1409 (NM_020818.1,5125-5143).
gcctgaaaaacactctata

SEQ ID NO: 379322 - DNA, 19 bp, Homo sapiens
  siRNA target sequence for KIAA1409 (NM_020818.1,5155-5173).
cgacagcgactctcttgta

SEQ ID NO: 379323 - DNA, 19 bp, Homo sapiens
  siRNA target sequence for KIAA1409 (NM_020818.1,5156-5174).
gacagcgactctcttgtat

SEQ ID NO: 379324 - DNA, 19 bp, Homo sapiens
  siRNA target sequence for KIAA1409 (NM_020818.1,5318-5336).
gctccgcttgtacaagtaa

SEQ ID NO: 379325 - DNA, 19 bp, Homo sapiens
  siRNA target sequence for KIAA1409 (NM_020818.1,5322-5340).
cgcttgtacaagtaagtgt

SEQ ID NO: 379326 - DNA, 19 bp, Homo sapiens
  siRNA target sequence for KIAA1409 (NM_020818.1,5333-5351).
gtaagtgtggaggattgtt

SEQ ID NO: 379327 - DNA, 19 bp, Homo sapiens
  siRNA target sequence for KIAA1409 (NM_020818.1,5345-5363).
gattgttccaaagactttt

SEQ ID NO: 379328 - DNA, 19 bp, Homo sapiens
  siRNA target sequence for KIAA1409 (NM_020818.1,5367-5385).
ctaaggactcaggaaataa

SEQ ID NO: 379329 - DNA, 19 bp, Homo sapiens
  siRNA target sequence for KIAA1409 (NM_020818.1,5609-5627).
ccaagttcaggggcaaaaa

SEQ ID NO: 379330 - DNA, 19 bp, Homo sapiens
  siRNA target sequence for KIAA1409 (NM_020818.1,5744-5762).
gctgaggaatccgaattta

SEQ ID NO: 379331 - DNA, 19 bp, Homo sapiens
  siRNA target sequence for KIAA1409 (NM_020818.1,5833-5851).
cgacatctccttcaacatt

SEQ ID NO: 379332 - DNA, 19 bp, Homo sapiens
  siRNA target sequence for KIAA1409 (NM_020818.1,5876-5894).
gatccagatccttctacta

SEQ ID NO: 379333 - DNA, 19 bp, Homo sapiens
  siRNA target sequence for KIAA1409 (NM_020818.1,5917-5935).
gccacgagaatcttcatct

SEQ ID NO: 379334 - DNA, 19 bp, Homo sapiens
  siRNA target sequence for KIAA1409 (NM_020818.1,5951-5969).
gcaggtgtgccggaaacaa

SEQ ID NO: 379335 - DNA, 19 bp, Homo sapiens
  siRNA target sequence for KIAA1409 (NM_020818.1,5991-6009).
ctcagtataggcagatgaa

SEQ ID NO: 379336 - DNA, 19 bp, Homo sapiens
  siRNA target sequence for KIAA1409 (NM_020818.1,6018-6036).
ccctgggagttctgacaat

SEQ ID NO: 379337 - DNA, 19 bp, Homo sapiens
  siRNA target sequence for KIAA1409 (NM_020818.1,6029-6047).
ctgacaatgagccagttaa

SEQ ID NO: 379338 - DNA, 19 bp, Homo sapiens
  siRNA target sequence for KIAA1409 (NM_020818.1,6033-6051).
caatgagccagttaatgaa

SEQ ID NO: 379339 - DNA, 19 bp, Homo sapiens
  siRNA target sequence for KIAA1409 (NM_020818.1,6221-6239).
ccaagcatagtcagtatgt

SEQ ID NO: 379340 - DNA, 19 bp, Homo sapiens
  siRNA target sequence for KIAA1409 (NM_020818.1,6222-6240).
caagcatagtcagtatgtt

SEQ ID NO: 379341 - DNA, 19 bp, Homo sapiens
  siRNA target sequence for KIAA1409 (NM_020818.1,6313-6331).
cattcttgaagaatacgat

SEQ ID NO: 379342 - DNA, 19 bp, Homo sapiens
  siRNA target sequence for KIAA1409 (NM_020818.1,6358-6376).
ggtcctctccacattcatt

SEQ ID NO: 379343 - DNA, 19 bp, Homo sapiens
  siRNA target sequence for KIAA1409 (NM_020818.1,6439-6457).
ggcatccagtactaccttt

SEQ ID NO: 379344 - DNA, 19 bp, Homo sapiens
  siRNA target sequence for KIAA1409 (NM_020818.1,6447-6465).
gtactaccttttctaatca

SEQ ID NO: 379345 - DNA, 19 bp, Homo sapiens
  siRNA target sequence for KIAA1409 (NM_020818.1,6571-6589).
ccaaagcacgatcaaagat

SEQ ID NO: 379346 - DNA, 19 bp, Homo sapiens
  siRNA target sequence for KIAA1409 (NM_020818.1,6615-6633).
cgtctctgatggacttcaa

SEQ ID NO: 379347 - DNA, 19 bp, Homo sapiens
  siRNA target sequence for KIAA1409 (NM_020818.1,6664-6682).
gctcctagagggtctaaat

SEQ ID NO: 379348 - DNA, 19 bp, Homo sapiens
  siRNA target sequence for KIAA1409 (NM_020818.1,6665-6683).
ctcctagagggtctaaata

SEQ ID NO: 379349 - DNA, 19 bp, Homo sapiens
  siRNA target sequence for KIAA1409 (NM_020818.1,6789-6807).
caattagcaaccagtttca

SEQ ID NO: 379350 - DNA, 19 bp, Homo sapiens
  siRNA target sequence for KIAA1409 (NM_020818.1,6818-6836).
gccaagctgccttgtgttt

SEQ ID NO: 379351 - DNA, 19 bp, Homo sapiens
  siRNA target sequence for KIAA1409 (NM_020818.1,6819-6837).
ccaagctgccttgtgtttt

SEQ ID NO: 379352 - DNA, 19 bp, Homo sapiens
  siRNA target sequence for KIAA1409 (NM_020818.1,7008-7026).
gttaccgagctttcactaa

SEQ ID NO: 379353 - DNA, 19 bp, Homo sapiens
  siRNA target sequence for KIAA1409 (NM_020818.1,7012-7030).
ccgagctttcactaaggaa

SEQ ID NO: 379354 - DNA, 19 bp, Homo sapiens
  siRNA target sequence for KIAA1409 (NM_020818.1,7021-7039).
cactaaggaacgagataaa

SEQ ID NO: 379355 - DNA, 19 bp, Homo sapiens
  siRNA target sequence for KIAA1409 (NM_020818.1,7031-7049).
cgagataaattctacttgt

SEQ ID NO: 379356 - DNA, 19 bp, Homo sapiens
  siRNA target sequence for KIAA1409 (NM_020818.1,7042-7060).
ctacttgtctcgtagtgtt

SEQ ID NO: 379357 - DNA, 19 bp, Homo sapiens
  siRNA target sequence for KIAA1409 (NM_020818.1,7048-7066).
gtctcgtagtgttgttcta

SEQ ID NO: 379358 - DNA, 19 bp, Homo sapiens
  siRNA target sequence for KIAA1409 (NM_020818.1,7050-7068).
ctcgtagtgttgttctaga

SEQ ID NO: 379359 - DNA, 19 bp, Homo sapiens
  siRNA target sequence for KIAA1409 (NM_020818.1,7053-7071).
gtagtgttgttctagaact

SEQ ID NO: 379360 - DNA, 19 bp, Homo sapiens
  siRNA target sequence for KIAA1409 (NM_020818.1,7076-7094).
caggccctaaagctcaaat

SEQ ID NO: 379361 - DNA, 19 bp, Homo sapiens
  siRNA target sequence for KIAA1409 (NM_020818.1,7233-7251).
gtgtgaggcagtacatcaa

SEQ ID NO: 379362 - DNA, 19 bp, Homo sapiens
  siRNA target sequence for KIAA1409 (NM_020818.1,7341-7359).
cctttgggggacatctcaa

SEQ ID NO: 379363 - DNA, 19 bp, Homo sapiens
  siRNA target sequence for KIAA1409 (NM_020818.1,7398-7416).
ggggcaaccacagagataa

SEQ ID NO: 379364 - DNA, 19 bp, Homo sapiens
  siRNA target sequence for KIAA1409 (NM_020818.1,7432-7450).
ctatctgccttggctttat

SEQ ID NO: 379365 - DNA, 19 bp, Homo sapiens
  siRNA target sequence for KIAA1409 (NM_020818.1,7476-7494).
gacctaaagaattcattga

SEQ ID NO: 379366 - DNA, 19 bp, Homo sapiens
  siRNA target sequence for KIAA1409 (NM_020818.1,7534-7552).
gggttccctcactcacaat

SEQ ID NO: 379367 - DNA, 19 bp, Homo sapiens
  siRNA target sequence for KIAA1409 (NM_020818.1,7616-7634).
gcagaccatcttattgtta

SEQ ID NO: 379368 - DNA, 19 bp, Homo sapiens
  siRNA target sequence for KIAA1409 (NM_020818.1,7617-7635).
cagaccatcttattgttat

SEQ ID NO: 379369 - DNA, 19 bp, Homo sapiens
  siRNA target sequence for KIAA1409 (NM_020818.1,7688-7706).
ctcttccacgcgttcatct

SEQ ID NO: 379370 - DNA, 19 bp, Homo sapiens
  siRNA target sequence for KIAA1409 (NM_020818.1,7740-7758).
gtgccgtcgctacaaatct

SEQ ID NO: 379371 - DNA, 19 bp, Homo sapiens
  siRNA target sequence for KIAA1409 (NM_020818.1,7789-7807).
gatactgacagcactagaa

SEQ ID NO: 379372 - DNA, 19 bp, Homo sapiens
  siRNA target sequence for KIAA1409 (NM_020818.1,7838-7856).
cagctaatggcccataaca

SEQ ID NO: 379373 - DNA, 19 bp, Homo sapiens
  siRNA target sequence for KIAA1409 (NM_020818.1,7840-7858).
gctaatggcccataacaaa

SEQ ID NO: 379374 - DNA, 19 bp, Homo sapiens
  siRNA target sequence for KIAA1409 (NM_020818.1,7880-7898).
ctccatgtgattagtttaa

SEQ ID NO: 379375 - DNA, 19 bp, Homo sapiens
  siRNA target sequence for KIAA1409 (NM_020818.1,7904-7922).
gcattgcaggaatgcaatt

SEQ ID NO: 379376 - DNA, 19 bp, Homo sapiens
  siRNA target sequence for KIAA1409 (NM_020818.1,7913-7931).
gaatgcaattcgaccattt

SEQ ID NO: 379377 - DNA, 19 bp, Homo sapiens
  siRNA target sequence for KIAA1409 (NM_020818.1,7917-7935).
gcaattcgaccatttttgt

SEQ ID NO: 379378 - DNA, 19 bp, Homo sapiens
  siRNA target sequence for KIAA1409 (NM_020818.1,7959-7977).
caatgattcagtcaaatat

SEQ ID NO: 379379 - DNA, 19 bp, Homo sapiens
  siRNA target sequence for KIAA1409 (NM_020818.1,8006-8024).
cgcctccaggctattcaga

SEQ ID NO: 379380 - DNA, 19 bp, Homo sapiens
  siRNA target sequence for KIAA1409 (NM_020818.1,8007-8025).
gcctccaggctattcagaa

SEQ ID NO: 379381 - DNA, 19 bp, Homo sapiens
  siRNA target sequence for KIAA1409 (NM_020818.1,8107-8125).
gcagtgcactcagttcaaa

SEQ ID NO: 379382 - DNA, 19 bp, Homo sapiens
  siRNA target sequence for KIAA1446 (NM_020836.2,248-266).
ggattcagagcaactacat

SEQ ID NO: 379383 - DNA, 19 bp, Homo sapiens
  siRNA target sequence for KIAA1446 (NM_020836.2,418-436).
gacaacgagctctatagga

SEQ ID NO: 379384 - DNA, 19 bp, Homo sapiens
  siRNA target sequence for KIAA1449 (NM_020839.2,48-66).
ggaaagtgcaggtttccta

SEQ ID NO: 379385 - DNA, 19 bp, Homo sapiens
  siRNA target sequence for KIAA1449 (NM_020839.2,55-73).
gcaggtttcctatgttatt

SEQ ID NO: 379386 - DNA, 19 bp, Homo sapiens
  siRNA target sequence for KIAA1449 (NM_020839.2,121-139).
gctggatccagcactaaat

SEQ ID NO: 379387 - DNA, 19 bp, Homo sapiens
  siRNA target sequence for KIAA1449 (NM_020839.2,124-142).
ggatccagcactaaataga

SEQ ID NO: 379388 - DNA, 19 bp, Homo sapiens
  siRNA target sequence for KIAA1449 (NM_020839.2,128-146).
ccagcactaaatagacttt

SEQ ID NO: 379389 - DNA, 19 bp, Homo sapiens
  siRNA target sequence for KIAA1449 (NM_020839.2,129-147).
cagcactaaatagactttt

SEQ ID NO: 379390 - DNA, 19 bp, Homo sapiens
  siRNA target sequence for KIAA1449 (NM_020839.2,131-149).
gcactaaatagacttttca

SEQ ID NO: 379391 - DNA, 19 bp, Homo sapiens
  siRNA target sequence for KIAA1449 (NM_020839.2,152-170).
gccggtcgagactctatca

SEQ ID NO: 379392 - DNA, 19 bp, Homo sapiens
  siRNA target sequence for KIAA1449 (NM_020839.2,153-171).
ccggtcgagactctatcat

SEQ ID NO: 379393 - DNA, 19 bp, Homo sapiens
  siRNA target sequence for KIAA1449 (NM_020839.2,154-172).
cggtcgagactctatcata

SEQ ID NO: 379394 - DNA, 19 bp, Homo sapiens
  siRNA target sequence for KIAA1449 (NM_020839.2,155-173).
ggtcgagactctatcataa

SEQ ID NO: 379395 - DNA, 19 bp, Homo sapiens
  siRNA target sequence for KIAA1449 (NM_020839.2,161-179).
gactctatcataagaatat

SEQ ID NO: 379396 - DNA, 19 bp, Homo sapiens
  siRNA target sequence for KIAA1449 (NM_020839.2,240-258).
gggtaaacgacattgtact

SEQ ID NO: 379397 - DNA, 19 bp, Homo sapiens
  siRNA target sequence for KIAA1449 (NM_020839.2,261-279).
gttgtaatgggaaaacatt

SEQ ID NO: 379398 - DNA, 19 bp, Homo sapiens
  siRNA target sequence for KIAA1449 (NM_020839.2,291-309).
cttctgacacgacagtaaa

SEQ ID NO: 379399 - DNA, 19 bp, Homo sapiens
  siRNA target sequence for KIAA1449 (NM_020839.2,294-312).
ctgacacgacagtaaaagt

SEQ ID NO: 379400 - DNA, 19 bp, Homo sapiens
  siRNA target sequence for KIAA1449 (NM_020839.2,300-318).
cgacagtaaaagtatggaa

SEQ ID NO: 379401 - DNA, 19 bp, Homo sapiens
  siRNA target sequence for KIAA1449 (NM_020839.2,320-338).
gcacacaagggattttgca

SEQ ID NO: 379402 - DNA, 19 bp, Homo sapiens
  siRNA target sequence for KIAA1449 (NM_020839.2,342-360).
caacattaaggacacataa

SEQ ID NO: 379403 - DNA, 19 bp, Homo sapiens
  siRNA target sequence for KIAA1449 (NM_020839.2,351-369).
ggacacataaggattacgt

SEQ ID NO: 379404 - DNA, 19 bp, Homo sapiens
  siRNA target sequence for KIAA1449 (NM_020839.2,352-370).
gacacataaggattacgta

SEQ ID NO: 379405 - DNA, 19 bp, Homo sapiens
  siRNA target sequence for KIAA1449 (NM_020839.2,367-385).
cgtaaaggccttagcatat

SEQ ID NO: 379406 - DNA, 19 bp, Homo sapiens
  siRNA target sequence for KIAA1449 (NM_020839.2,442-460).
ggatgtgaatactctaaca

SEQ ID NO: 379407 - DNA, 19 bp, Homo sapiens
  siRNA target sequence for KIAA1449 (NM_020839.2,462-480).
cattgactgcctcaaataa

SEQ ID NO: 379408 - DNA, 19 bp, Homo sapiens
  siRNA target sequence for KIAA1449 (NM_020839.2,485-503).
gtcacaacttcttctttaa

SEQ ID NO: 379409 - DNA, 19 bp, Homo sapiens
  siRNA target sequence for KIAA1449 (NM_020839.2,547-565).
gggaacaatcattgtatca

SEQ ID NO: 379410 - DNA, 19 bp, Homo sapiens
  siRNA target sequence for KIAA1449 (NM_020839.2,564-582).
cagggtccactgaaaaggt

SEQ ID NO: 379411 - DNA, 19 bp, Homo sapiens
  siRNA target sequence for KIAA1449 (NM_020839.2,590-608).
gtatgggatccaagaacat

SEQ ID NO: 379412 - DNA, 19 bp, Homo sapiens
  siRNA target sequence for KIAA1449 (NM_020839.2,600-618).
caagaacatgtgcaaaact

SEQ ID NO: 379413 - DNA, 19 bp, Homo sapiens
  siRNA target sequence for KIAA1449 (NM_020839.2,632-650).
gggcacacggataatgtga

SEQ ID NO: 379414 - DNA, 19 bp, Homo sapiens
  siRNA target sequence for KIAA1449 (NM_020839.2,633-651).
ggcacacggataatgtgaa

SEQ ID NO: 379415 - DNA, 19 bp, Homo sapiens
  siRNA target sequence for KIAA1449 (NM_020839.2,694-712).
cagttctgatgggacaatt

SEQ ID NO: 379416 - DNA, 19 bp, Homo sapiens
  siRNA target sequence for KIAA1449 (NM_020839.2,725-743).
cttggccagcagagatgta

SEQ ID NO: 379417 - DNA, 19 bp, Homo sapiens
  siRNA target sequence for KIAA1449 (NM_020839.2,750-768).
cataccgagtccatgatga

SEQ ID NO: 379418 - DNA, 19 bp, Homo sapiens
  siRNA target sequence for KIAA1449 (NM_020839.2,777-795).
gggcgctgcaagtcaatga

SEQ ID NO: 379419 - DNA, 19 bp, Homo sapiens
  siRNA target sequence for KIAA1449 (NM_020839.2,778-796).
ggcgctgcaagtcaatgat

SEQ ID NO: 379420 - DNA, 19 bp, Homo sapiens
  siRNA target sequence for KIAA1449 (NM_020839.2,797-815).
gccttcacacatgtgtatt

SEQ ID NO: 379421 - DNA, 19 bp, Homo sapiens
  siRNA target sequence for KIAA1449 (NM_020839.2,822-840).
gaagggacaggaagattta

SEQ ID NO: 379422 - DNA, 19 bp, Homo sapiens
  siRNA target sequence for KIAA1449 (NM_020839.2,861-879).
ctgacattcgggtgctaat

SEQ ID NO: 379423 - DNA, 19 bp, Homo sapiens
  siRNA target sequence for KIAA1449 (NM_020839.2,863-881).
gacattcgggtgctaattt

SEQ ID NO: 379424 - DNA, 19 bp, Homo sapiens
  siRNA target sequence for KIAA1449 (NM_020839.2,865-883).
cattcgggtgctaatttgt

SEQ ID NO: 379425 - DNA, 19 bp, Homo sapiens
  siRNA target sequence for KIAA1449 (NM_020839.2,871-889).
ggtgctaatttgtgaagaa

SEQ ID NO: 379426 - DNA, 19 bp, Homo sapiens
  siRNA target sequence for KIAA1449 (NM_020839.2,902-920).
ctcaagatggagcttgata

SEQ ID NO: 379427 - DNA, 19 bp, Homo sapiens
  siRNA target sequence for KIAA1449 (NM_020839.2,904-922).
caagatggagcttgataga

SEQ ID NO: 379428 - DNA, 19 bp, Homo sapiens
  siRNA target sequence for KIAA1449 (NM_020839.2,950-968).
gttgcaacaactaagtcta

SEQ ID NO: 379429 - DNA, 19 bp, Homo sapiens
  siRNA target sequence for KIAA1449 (NM_020839.2,957-975).
caactaagtctacagtaaa

SEQ ID NO: 379430 - DNA, 19 bp, Homo sapiens
  siRNA target sequence for KIAA1449 (NM_020839.2,1027-1045).
caatgactgtacaaatcct

SEQ ID NO: 379431 - DNA, 19 bp, Homo sapiens
  siRNA target sequence for KIAA1449 (NM_020839.2,1031-1049).
gactgtacaaatcctataa

SEQ ID NO: 379432 - DNA, 19 bp, Homo sapiens
  siRNA target sequence for KIAA1449 (NM_020839.2,1062-1080).
cacaacctgaccaggttat

SEQ ID NO: 379433 - DNA, 19 bp, Homo sapiens
  siRNA target sequence for KIAA1449 (NM_020839.2,1064-1082).
caacctgaccaggttatta

SEQ ID NO: 379434 - DNA, 19 bp, Homo sapiens
  siRNA target sequence for KIAA1449 (NM_020839.2,1086-1104).
ggggtgctagtattattca

SEQ ID NO: 379435 - DNA, 19 bp, Homo sapiens
  siRNA target sequence for KIAA1449 (NM_020839.2,1163-1181).
gcatattgggatgtattga

SEQ ID NO: 379436 - DNA, 19 bp, Homo sapiens
  siRNA target sequence for KIAA1449 (NM_020839.2,1164-1182).
catattgggatgtattgaa

SEQ ID NO: 379437 - DNA, 19 bp, Homo sapiens
  siRNA target sequence for KIAA1449 (NM_020839.2,1185-1203).
catgtaaagttgaagatct

SEQ ID NO: 379438 - DNA, 19 bp, Homo sapiens
  siRNA target sequence for KIAA1449 (NM_020839.2,1250-1268).
gtgtatgtgccaaattggt

SEQ ID NO: 379439 - DNA, 19 bp, Homo sapiens
  siRNA target sequence for KIAA1449 (NM_020839.2,1266-1284).
ggttctcagtagacttaaa

SEQ ID NO: 379440 - DNA, 19 bp, Homo sapiens
  siRNA target sequence for KIAA1449 (NM_020839.2,1267-1285).
gttctcagtagacttaaaa

SEQ ID NO: 379441 - DNA, 19 bp, Homo sapiens
  siRNA target sequence for KIAA1449 (NM_020839.2,1279-1297).
cttaaaaacagggatgtta

SEQ ID NO: 379442 - DNA, 19 bp, Homo sapiens
  siRNA target sequence for KIAA1449 (NM_020839.2,1290-1308).
ggatgttaactattacttt

SEQ ID NO: 379443 - DNA, 19 bp, Homo sapiens
  siRNA target sequence for KIAA1449 (NM_020839.2,1294-1312).
gttaactattactttggat

SEQ ID NO: 379444 - DNA, 19 bp, Homo sapiens
  siRNA target sequence for KIAA1449 (NM_020839.2,1368-1386).
ctgatgggtcagatccaaa

SEQ ID NO: 379445 - DNA, 19 bp, Homo sapiens
  siRNA target sequence for KIAA1449 (NM_020839.2,1370-1388).
gatgggtcagatccaaaat

SEQ ID NO: 379446 - DNA, 19 bp, Homo sapiens
  siRNA target sequence for KIAA1449 (NM_020839.2,1373-1391).
gggtcagatccaaaattga

SEQ ID NO: 379447 - DNA, 19 bp, Homo sapiens
  siRNA target sequence for KIAA1449 (NM_020839.2,1375-1393).
gtcagatccaaaattgaat

SEQ ID NO: 379448 - DNA, 19 bp, Homo sapiens
  siRNA target sequence for KIAA1449 (NM_020839.2,1390-1408).
gaatttaggaggactttta

SEQ ID NO: 379449 - DNA, 19 bp, Homo sapiens
  siRNA target sequence for KIAA1449 (NM_020839.2,1431-1449).
ggcctagaacacatgtgaa

SEQ ID NO: 379450 - DNA, 19 bp, Homo sapiens
  siRNA target sequence for KIAA1449 (NM_020839.2,1611-1629).
ggggtgagactgagtctat

SEQ ID NO: 379451 - DNA, 19 bp, Homo sapiens
  siRNA target sequence for KIAA1449 (NM_020839.2,1664-1682).
gacatcactgtggataaaa

SEQ ID NO: 379452 - DNA, 19 bp, Homo sapiens
  siRNA target sequence for KIAA1449 (NM_020839.2,1687-1705).
gcccaaattcaacaaaatt

SEQ ID NO: 379453 - DNA, 19 bp, Homo sapiens
  siRNA target sequence for KIAA1449 (NM_020839.2,1844-1862).
caaaccactagctcttcta

SEQ ID NO: 379454 - DNA, 19 bp, Homo sapiens
  siRNA target sequence for KIAA1449 (NM_020839.2,1848-1866).
ccactagctcttctaataa

SEQ ID NO: 379455 - DNA, 19 bp, Homo sapiens
  siRNA target sequence for KIAA1449 (NM_020839.2,1849-1867).
cactagctcttctaataat

SEQ ID NO: 379456 - DNA, 19 bp, Homo sapiens
  siRNA target sequence for KIAA1449 (NM_020839.2,1907-1925).
gtgttggcagaggagaaaa

SEQ ID NO: 379457 - DNA, 19 bp, Homo sapiens
  siRNA target sequence for KIAA1449 (NM_020839.2,1970-1988).
cttcgaacagtgaaacact

SEQ ID NO: 379458 - DNA, 19 bp, Homo sapiens
  siRNA target sequence for KIAA1449 (NM_020839.2,1979-1997).
gtgaaacacttcatatgga

SEQ ID NO: 379459 - DNA, 19 bp, Homo sapiens
  siRNA target sequence for ZNF291 (NM_020843.1,49-67).
ccagcgctccaatagtcat

SEQ ID NO: 379460 - DNA, 19 bp, Homo sapiens
  siRNA target sequence for ZNF291 (NM_020843.1,58-76).
caatagtcatgacaaagta

SEQ ID NO: 379461 - DNA, 19 bp, Homo sapiens
  siRNA target sequence for ZNF291 (NM_020843.1,198-216).
ccattcaaggcactcataa

SEQ ID NO: 379462 - DNA, 19 bp, Homo sapiens
  siRNA target sequence for ZNF291 (NM_020843.1,207-225).
gcactcataaaactactaa

SEQ ID NO: 379463 - DNA, 19 bp, Homo sapiens
  siRNA target sequence for ZNF291 (NM_020843.1,208-226).
cactcataaaactactaaa

SEQ ID NO: 379464 - DNA, 19 bp, Homo sapiens
  siRNA target sequence for ZNF291 (NM_020843.1,210-228).
ctcataaaactactaaaca

SEQ ID NO: 379465 - DNA, 19 bp, Homo sapiens
  siRNA target sequence for ZNF291 (NM_020843.1,231-249).
gtactgcagtggactgtaa

SEQ ID NO: 379466 - DNA, 19 bp, Homo sapiens
  siRNA target sequence for ZNF291 (NM_020843.1,234-252).
ctgcagtggactgtaaaat

SEQ ID NO: 379467 - DNA, 19 bp, Homo sapiens
  siRNA target sequence for ZNF291 (NM_020843.1,236-254).
gcagtggactgtaaaataa

SEQ ID NO: 379468 - DNA, 19 bp, Homo sapiens
  siRNA target sequence for ZNF291 (NM_020843.1,239-257).
gtggactgtaaaataacat

SEQ ID NO: 379469 - DNA, 19 bp, Homo sapiens
  siRNA target sequence for ZNF291 (NM_020843.1,258-276).
cgtctacgactggagataa

SEQ ID NO: 379470 - DNA, 19 bp, Homo sapiens
  siRNA target sequence for ZNF291 (NM_020843.1,259-277).
gtctacgactggagataaa

SEQ ID NO: 379471 - DNA, 19 bp, Homo sapiens
  siRNA target sequence for ZNF291 (NM_020843.1,261-279).
ctacgactggagataaaca

SEQ ID NO: 379472 - DNA, 19 bp, Homo sapiens
  siRNA target sequence for ZNF291 (NM_020843.1,264-282).
cgactggagataaacactt

SEQ ID NO: 379473 - DNA, 19 bp, Homo sapiens
  siRNA target sequence for ZNF291 (NM_020843.1,303-321).
caaggcaccctcggaaaat

SEQ ID NO: 379474 - DNA, 19 bp, Homo sapiens
  siRNA target sequence for ZNF291 (NM_020843.1,306-324).
ggcaccctcggaaaattga

SEQ ID NO: 379475 - DNA, 19 bp, Homo sapiens
  siRNA target sequence for ZNF291 (NM_020843.1,310-328).
ccctcggaaaattgatcta

SEQ ID NO: 379476 - DNA, 19 bp, Homo sapiens
  siRNA target sequence for ZNF291 (NM_020843.1,311-329).
cctcggaaaattgatctaa

SEQ ID NO: 379477 - DNA, 19 bp, Homo sapiens
  siRNA target sequence for ZNF291 (NM_020843.1,335-353).
cgatactgggcatttcttt

SEQ ID NO: 379478 - DNA, 19 bp, Homo sapiens
  siRNA target sequence for ZNF291 (NM_020843.1,365-383).
cgccgagcagtagatgaaa

SEQ ID NO: 379479 - DNA, 19 bp, Homo sapiens
  siRNA target sequence for ZNF291 (NM_020843.1,366-384).
gccgagcagtagatgaaat

SEQ ID NO: 379480 - DNA, 19 bp, Homo sapiens
  siRNA target sequence for ZNF291 (NM_020843.1,368-386).
cgagcagtagatgaaatct

SEQ ID NO: 379481 - DNA, 19 bp, Homo sapiens
  siRNA target sequence for ZNF291 (NM_020843.1,374-392).
gtagatgaaatctatgtaa

SEQ ID NO: 379482 - DNA, 19 bp, Homo sapiens
  siRNA target sequence for ZNF291 (NM_020843.1,407-425).
cagagtgtggtcgaatgta

SEQ ID NO: 379483 - DNA, 19 bp, Homo sapiens
  siRNA target sequence for ZNF291 (NM_020843.1,439-457).
gatgctggataactatgta

SEQ ID NO: 379484 - DNA, 19 bp, Homo sapiens
  siRNA target sequence for ZNF291 (NM_020843.1,442-460).
gctggataactatgtaaga

SEQ ID NO: 379485 - DNA, 19 bp, Homo sapiens
  siRNA target sequence for ZNF291 (NM_020843.1,564-582).
ctccgggacgccatgtgat

SEQ ID NO: 379486 - DNA, 19 bp, Homo sapiens
  siRNA target sequence for ZNF291 (NM_020843.1,599-617).
gatagaataaatgtaacat

SEQ ID NO: 379487 - DNA, 19 bp, Homo sapiens
  siRNA target sequence for ZNF291 (NM_020843.1,706-724).
caaggtaaaggctcatcat

SEQ ID NO: 379488 - DNA, 19 bp, Homo sapiens
  siRNA target sequence for ZNF291 (NM_020843.1,709-727).
ggtaaaggctcatcataca

SEQ ID NO: 379489 - DNA, 19 bp, Homo sapiens
  siRNA target sequence for ZNF291 (NM_020843.1,763-781).
gtcttgcccaccaatgaca

SEQ ID NO: 379490 - DNA, 19 bp, Homo sapiens
  siRNA target sequence for ZNF291 (NM_020843.1,787-805).
gaaggcctcacgcaaaaat

SEQ ID NO: 379491 - DNA, 19 bp, Homo sapiens
  siRNA target sequence for ZNF291 (NM_020843.1,790-808).
ggcctcacgcaaaaatgaa

SEQ ID NO: 379492 - DNA, 19 bp, Homo sapiens
  siRNA target sequence for ZNF291 (NM_020843.1,900-918).
cagaagccacaagatcaaa

SEQ ID NO: 379493 - DNA, 19 bp, Homo sapiens
  siRNA target sequence for ZNF291 (NM_020843.1,963-981).
gcatacagaaaggtcaatt

SEQ ID NO: 379494 - DNA, 19 bp, Homo sapiens
  siRNA target sequence for ZNF291 (NM_020843.1,964-982).
catacagaaaggtcaattt

SEQ ID NO: 379495 - DNA, 19 bp, Homo sapiens
  siRNA target sequence for ZNF291 (NM_020843.1,993-1011).
gaacttctaatactataga

SEQ ID NO: 379496 - DNA, 19 bp, Homo sapiens
  siRNA target sequence for ZNF291 (NM_020843.1,999-1017).
ctaatactatagaatctca

SEQ ID NO: 379497 - DNA, 19 bp, Homo sapiens
  siRNA target sequence for ZNF291 (NM_020843.1,1019-1037).
cccaaagactcattacact

SEQ ID NO: 379498 - DNA, 19 bp, Homo sapiens
  siRNA target sequence for ZNF291 (NM_020843.1,1072-1090).
cacagtgagtacattggat

SEQ ID NO: 379499 - DNA, 19 bp, Homo sapiens
  siRNA target sequence for ZNF291 (NM_020843.1,1099-1117).
gaattctggcagtattcga

SEQ ID NO: 379500 - DNA, 19 bp, Homo sapiens
  siRNA target sequence for ZNF291 (NM_020843.1,1106-1124).
ggcagtattcgagacaatt

SEQ ID NO: 379501 - DNA, 19 bp, Homo sapiens
  siRNA target sequence for ZNF291 (NM_020843.1,1107-1125).
gcagtattcgagacaatta

SEQ ID NO: 379502 - DNA, 19 bp, Homo sapiens
  siRNA target sequence for ZNF291 (NM_020843.1,1108-1126).
cagtattcgagacaattat

SEQ ID NO: 379503 - DNA, 19 bp, Homo sapiens
  siRNA target sequence for ZNF291 (NM_020843.1,1110-1128).
gtattcgagacaattatgt

SEQ ID NO: 379504 - DNA, 19 bp, Homo sapiens
  siRNA target sequence for ZNF291 (NM_020843.1,1120-1138).
caattatgttcgaacttct

SEQ ID NO: 379505 - DNA, 19 bp, Homo sapiens
  siRNA target sequence for ZNF291 (NM_020843.1,1127-1145).
gttcgaacttctgaaatat

SEQ ID NO: 379506 - DNA, 19 bp, Homo sapiens
  siRNA target sequence for ZNF291 (NM_020843.1,1194-1212).
gtacacctcctttacaagt

SEQ ID NO: 379507 - DNA, 19 bp, Homo sapiens
  siRNA target sequence for ZNF291 (NM_020843.1,1197-1215).
cacctcctttacaagtaaa

SEQ ID NO: 379508 - DNA, 19 bp, Homo sapiens
  siRNA target sequence for ZNF291 (NM_020843.1,1261-1279).
ggacccttcagatatttca

SEQ ID NO: 379509 - DNA, 19 bp, Homo sapiens
  siRNA target sequence for ZNF291 (NM_020843.1,1265-1283).
ccttcagatatttcaaatt

SEQ ID NO: 379510 - DNA, 19 bp, Homo sapiens
  siRNA target sequence for ZNF291 (NM_020843.1,1315-1333).
gctagcagatcgtctagaa

SEQ ID NO: 379511 - DNA, 19 bp, Homo sapiens
  siRNA target sequence for ZNF291 (NM_020843.1,1316-1334).
ctagcagatcgtctagaaa

SEQ ID NO: 379512 - DNA, 19 bp, Homo sapiens
  siRNA target sequence for ZNF291 (NM_020843.1,1376-1394).
gaacagttaactagagaaa

SEQ ID NO: 379513 - DNA, 19 bp, Homo sapiens
  siRNA target sequence for ZNF291 (NM_020843.1,1431-1449).
ctgacaacgacagtgattt

SEQ ID NO: 379514 - DNA, 19 bp, Homo sapiens
  siRNA target sequence for ZNF291 (NM_020843.1,1433-1451).
gacaacgacagtgattttt

SEQ ID NO: 379515 - DNA, 19 bp, Homo sapiens
  siRNA target sequence for ZNF291 (NM_020843.1,1435-1453).
caacgacagtgatttttct

SEQ ID NO: 379516 - DNA, 19 bp, Homo sapiens
  siRNA target sequence for ZNF291 (NM_020843.1,1535-1553).
gagtcttggcgccaaaata

SEQ ID NO: 379517 - DNA, 19 bp, Homo sapiens
  siRNA target sequence for ZNF291 (NM_020843.1,1593-1611).
ctccagggcatggaattca

SEQ ID NO: 379518 - DNA, 19 bp, Homo sapiens
  siRNA target sequence for ZNF291 (NM_020843.1,1634-1652).
ccctctcgtaaaagaacaa

SEQ ID NO: 379519 - DNA, 19 bp, Homo sapiens
  siRNA target sequence for ZNF291 (NM_020843.1,1735-1753).
gaagcttcagaaattgtta

SEQ ID NO: 379520 - DNA, 19 bp, Homo sapiens
  siRNA target sequence for ZNF291 (NM_020843.1,1856-1874).
cagttacaagcaattgtga

SEQ ID NO: 379521 - DNA, 19 bp, Homo sapiens
  siRNA target sequence for ZNF291 (NM_020843.1,1936-1954).
ccagaataaacgtcatgat

SEQ ID NO: 379522 - DNA, 19 bp, Homo sapiens
  siRNA target sequence for ZNF291 (NM_020843.1,1939-1957).
gaataaacgtcatgatgtt

SEQ ID NO: 379523 - DNA, 19 bp, Homo sapiens
  siRNA target sequence for ZNF291 (NM_020843.1,1946-1964).
cgtcatgatgttttatcaa

SEQ ID NO: 379524 - DNA, 19 bp, Homo sapiens
  siRNA target sequence for ZNF291 (NM_020843.1,1947-1965).
gtcatgatgttttatcaaa

SEQ ID NO: 379525 - DNA, 19 bp, Homo sapiens
  siRNA target sequence for ZNF291 (NM_020843.1,2083-2101).
gcggcaggcccgtgtagaa

SEQ ID NO: 379526 - DNA, 19 bp, Homo sapiens
  siRNA target sequence for ZNF291 (NM_020843.1,2085-2103).
ggcaggcccgtgtagaaga

SEQ ID NO: 379527 - DNA, 19 bp, Homo sapiens
  siRNA target sequence for ZNF291 (NM_020843.1,2087-2105).
caggcccgtgtagaagaat

SEQ ID NO: 379528 - DNA, 19 bp, Homo sapiens
  siRNA target sequence for ZNF291 (NM_020843.1,2092-2110).
ccgtgtagaagaattgtta

SEQ ID NO: 379529 - DNA, 19 bp, Homo sapiens
  siRNA target sequence for ZNF291 (NM_020843.1,2093-2111).
cgtgtagaagaattgttaa

SEQ ID NO: 379530 - DNA, 19 bp, Homo sapiens
  siRNA target sequence for ZNF291 (NM_020843.1,2199-2217).
gagacagggaagaacgatt

SEQ ID NO: 379531 - DNA, 19 bp, Homo sapiens
  siRNA target sequence for ZNF291 (NM_020843.1,2275-2293).
gctcaagcatgatgaaagt

SEQ ID NO: 379532 - DNA, 19 bp, Homo sapiens
  siRNA target sequence for ZNF291 (NM_020843.1,2276-2294).
ctcaagcatgatgaaagta

SEQ ID NO: 379533 - DNA, 19 bp, Homo sapiens
  siRNA target sequence for ZNF291 (NM_020843.1,2301-2319).
ggcacatggaacagattga

SEQ ID NO: 379534 - DNA, 19 bp, Homo sapiens
  siRNA target sequence for ZNF291 (NM_020843.1,2350-2368).
cagtgggcgacatgcaaat

SEQ ID NO: 379535 - DNA, 19 bp, Homo sapiens
  siRNA target sequence for ZNF291 (NM_020843.1,2355-2373).
ggcgacatgcaaatactga

SEQ ID NO: 379536 - DNA, 19 bp, Homo sapiens
  siRNA target sequence for ZNF291 (NM_020843.1,2356-2374).
gcgacatgcaaatactgat

SEQ ID NO: 379537 - DNA, 19 bp, Homo sapiens
  siRNA target sequence for ZNF291 (NM_020843.1,2357-2375).
cgacatgcaaatactgatt

SEQ ID NO: 379538 - DNA, 19 bp, Homo sapiens
  siRNA target sequence for ZNF291 (NM_020843.1,2358-2376).
gacatgcaaatactgatta

SEQ ID NO: 379539 - DNA, 19 bp, Homo sapiens
  siRNA target sequence for ZNF291 (NM_020843.1,2391-2409).
ccccttatgaaagaaagaa

SEQ ID NO: 379540 - DNA, 19 bp, Homo sapiens
  siRNA target sequence for ZNF291 (NM_020843.1,2434-2452).
gatctcttcagaggtatat

SEQ ID NO: 379541 - DNA, 19 bp, Homo sapiens
  siRNA target sequence for ZNF291 (NM_020843.1,2485-2503).
gcaagccgtgagagagaat

SEQ ID NO: 379542 - DNA, 19 bp, Homo sapiens
  siRNA target sequence for ZNF291 (NM_020843.1,2489-2507).
gccgtgagagagaatacca

SEQ ID NO: 379543 - DNA, 19 bp, Homo sapiens
  siRNA target sequence for ZNF291 (NM_020843.1,2518-2536).
gcgtgaactgtcagatgaa

SEQ ID NO: 379544 - DNA, 19 bp, Homo sapiens
  siRNA target sequence for ZNF291 (NM_020843.1,2573-2591).
gacattgtggttgaaagta

SEQ ID NO: 379545 - DNA, 19 bp, Homo sapiens
  siRNA target sequence for ZNF291 (NM_020843.1,2575-2593).
cattgtggttgaaagtaca

SEQ ID NO: 379546 - DNA, 19 bp, Homo sapiens
  siRNA target sequence for ZNF291 (NM_020843.1,2674-2692).
cttcagggctaaggaatat

SEQ ID NO: 379547 - DNA, 19 bp, Homo sapiens
  siRNA target sequence for ZNF291 (NM_020843.1,2682-2700).
ctaaggaatatgagagttt

SEQ ID NO: 379548 - DNA, 19 bp, Homo sapiens
  siRNA target sequence for ZNF291 (NM_020843.1,2695-2713).
gagtttaatggaaaccaaa

SEQ ID NO: 379549 - DNA, 19 bp, Homo sapiens
  siRNA target sequence for ZNF291 (NM_020843.1,2720-2738).
ggctctgattcaccttata

SEQ ID NO: 379550 - DNA, 19 bp, Homo sapiens
  siRNA target sequence for ZNF291 (NM_020843.1,2721-2739).
gctctgattcaccttataa

SEQ ID NO: 379551 - DNA, 19 bp, Homo sapiens
  siRNA target sequence for ZNF291 (NM_020843.1,2802-2820).
catgggcaaacaataaagt

SEQ ID NO: 379552 - DNA, 19 bp, Homo sapiens
  siRNA target sequence for ZNF291 (NM_020843.1,2876-2894).
gtggcagatcagattgcat

SEQ ID NO: 379553 - DNA, 19 bp, Homo sapiens
  siRNA target sequence for ZNF291 (NM_020843.1,2910-2928).
gattaacagcccttgaaca

SEQ ID NO: 379554 - DNA, 19 bp, Homo sapiens
  siRNA target sequence for ZNF291 (NM_020843.1,2960-2978).
gtgaacacagttttaagaa

SEQ ID NO: 379555 - DNA, 19 bp, Homo sapiens
  siRNA target sequence for ZNF291 (NM_020843.1,3019-3037).
cctcacctgcaataactgt

SEQ ID NO: 379556 - DNA, 19 bp, Homo sapiens
  siRNA target sequence for ZNF291 (NM_020843.1,3020-3038).
ctcacctgcaataactgtt

SEQ ID NO: 379557 - DNA, 19 bp, Homo sapiens
  siRNA target sequence for ZNF291 (NM_020843.1,3056-3074).
gttctgtttagtaacaaga

SEQ ID NO: 379558 - DNA, 19 bp, Homo sapiens
  siRNA target sequence for ZNF291 (NM_020843.1,3103-3121).
ccagttgacggtttatgtt

SEQ ID NO: 379559 - DNA, 19 bp, Homo sapiens
  siRNA target sequence for ZNF291 (NM_020843.1,3181-3199).
gacaactggacttctcaaa

SEQ ID NO: 379560 - DNA, 19 bp, Homo sapiens
  siRNA target sequence for ZNF291 (NM_020843.1,3231-3249).
ccaatcgaccagatggaaa

SEQ ID NO: 379561 - DNA, 19 bp, Homo sapiens
  siRNA target sequence for ZNF291 (NM_020843.1,3254-3272).
cagccagctaccccaaaaa

SEQ ID NO: 379562 - DNA, 19 bp, Homo sapiens
  siRNA target sequence for ZNF291 (NM_020843.1,3256-3274).
gccagctaccccaaaaata

SEQ ID NO: 379563 - DNA, 19 bp, Homo sapiens
  siRNA target sequence for ZNF291 (NM_020843.1,3303-3321).
cacaaggtgatccttttaa

SEQ ID NO: 379564 - DNA, 19 bp, Homo sapiens
  siRNA target sequence for ZNF291 (NM_020843.1,3305-3323).
caaggtgatccttttaaca

SEQ ID NO: 379565 - DNA, 19 bp, Homo sapiens
  siRNA target sequence for ZNF291 (NM_020843.1,3352-3370).
ggtgaacatgggtctgatt

SEQ ID NO: 379566 - DNA, 19 bp, Homo sapiens
  siRNA target sequence for ZNF291 (NM_020843.1,3358-3376).
catgggtctgattgacaaa

SEQ ID NO: 379567 - DNA, 19 bp, Homo sapiens
  siRNA target sequence for ZNF291 (NM_020843.1,3445-3463).
gcatgccgcaggactctta

SEQ ID NO: 379568 - DNA, 19 bp, Homo sapiens
  siRNA target sequence for ZNF291 (NM_020843.1,3453-3471).
caggactcttacatgcaat

SEQ ID NO: 379569 - DNA, 19 bp, Homo sapiens
  siRNA target sequence for ZNF291 (NM_020843.1,3458-3476).
ctcttacatgcaatgtgta

SEQ ID NO: 379570 - DNA, 19 bp, Homo sapiens
  siRNA target sequence for ZNF291 (NM_020843.1,3491-3509).
gtcactggaaggtcataca

SEQ ID NO: 379571 - DNA, 19 bp, Homo sapiens
  siRNA target sequence for ZNF291 (NM_020843.1,3497-3515).
ggaaggtcatacagcatat

SEQ ID NO: 379572 - DNA, 19 bp, Homo sapiens
  siRNA target sequence for ZNF291 (NM_020843.1,3498-3516).
gaaggtcatacagcatatt

SEQ ID NO: 379573 - DNA, 19 bp, Homo sapiens
  siRNA target sequence for ZNF291 (NM_020843.1,3501-3519).
ggtcatacagcatatttga

SEQ ID NO: 379574 - DNA, 19 bp, Homo sapiens
  siRNA target sequence for ZNF291 (NM_020843.1,3508-3526).
cagcatatttgacaataat

SEQ ID NO: 379575 - DNA, 19 bp, Homo sapiens
  siRNA target sequence for ZNF291 (NM_020843.1,3568-3586).
cgacctggctggagttctt

SEQ ID NO: 379576 - DNA, 19 bp, Homo sapiens
  siRNA target sequence for ZNF291 (NM_020843.1,3571-3589).
cctggctggagttcttcat

SEQ ID NO: 379577 - DNA, 19 bp, Homo sapiens
  siRNA target sequence for ZNF291 (NM_020843.1,3572-3590).
ctggctggagttcttcata

SEQ ID NO: 379578 - DNA, 19 bp, Homo sapiens
  siRNA target sequence for ZNF291 (NM_020843.1,3727-3745).
gcctgcttttcagtctatt

SEQ ID NO: 379579 - DNA, 19 bp, Homo sapiens
  siRNA target sequence for ZNF291 (NM_020843.1,3822-3840).
gtgaaagcctccttcatga

SEQ ID NO: 379580 - DNA, 19 bp, Homo sapiens
  siRNA target sequence for ZNF291 (NM_020843.1,3848-3866).
gtctgtgtgggctacttca

SEQ ID NO: 379581 - DNA, 19 bp, Homo sapiens
  siRNA target sequence for ZNF291 (NM_020843.1,3964-3982).
cccacggctgatcaaagta

SEQ ID NO: 379582 - DNA, 19 bp, Homo sapiens
  siRNA target sequence for ZNF291 (NM_020843.1,3969-3987).
ggctgatcaaagtactgtt

SEQ ID NO: 379583 - DNA, 19 bp, Homo sapiens
  siRNA target sequence for ZNF291 (NM_020843.1,4008-4026).
gttacaacaaccatcagaa

SEQ ID NO: 379584 - DNA, 19 bp, Homo sapiens
  siRNA target sequence for ZNF291 (NM_020843.1,4058-4076).
gttttactggccactttca

SEQ ID NO: 379585 - DNA, 19 bp, Homo sapiens
  siRNA target sequence for ZNF291 (NM_020843.1,4098-4116).
caggtcaagcggaaaacca

SEQ ID NO: 379586 - DNA, 19 bp, Homo sapiens
  siRNA target sequence for ZNF291 (NM_020843.1,4160-4178).
cttgagctggctaacagat

SEQ ID NO: 379587 - DNA, 19 bp, Homo sapiens
  siRNA target sequence for ZNF291 (NM_020843.1,4202-4220).
gctcgacagtttttcttga

SEQ ID NO: 379588 - DNA, 19 bp, Homo sapiens
  siRNA target sequence for RANBP10 (NM_020850.1,286-304).
ggagccccaaggacaaata

SEQ ID NO: 379589 - DNA, 19 bp, Homo sapiens
  siRNA target sequence for RANBP10 (NM_020850.1,296-314).
ggacaaatacaactacatt

SEQ ID NO: 379590 - DNA, 19 bp, Homo sapiens
  siRNA target sequence for RANBP10 (NM_020850.1,484-502).
cggctcaaggcgtcaacat

SEQ ID NO: 379591 - DNA, 19 bp, Homo sapiens
  siRNA target sequence for RANBP10 (NM_020850.1,489-507).
caaggcgtcaacatgaaca

SEQ ID NO: 379592 - DNA, 19 bp, Homo sapiens
  siRNA target sequence for RANBP10 (NM_020850.1,513-531).
cctggttgggacaaacatt

SEQ ID NO: 379593 - DNA, 19 bp, Homo sapiens
  siRNA target sequence for RANBP10 (NM_020850.1,517-535).
gttgggacaaacattccta

SEQ ID NO: 379594 - DNA, 19 bp, Homo sapiens
  siRNA target sequence for RANBP10 (NM_020850.1,749-767).
gattgtggacgccaacttt

SEQ ID NO: 379595 - DNA, 19 bp, Homo sapiens
  siRNA target sequence for RANBP10 (NM_020850.1,911-929).
cgtgcatcatgggtattgt

SEQ ID NO: 379596 - DNA, 19 bp, Homo sapiens
  siRNA target sequence for RANBP10 (NM_020850.1,932-950).
cacagccacggcttttgct

SEQ ID NO: 379597 - DNA, 19 bp, Homo sapiens
  siRNA target sequence for RANBP10 (NM_020850.1,941-959).
ggcttttgctcgaatgact

SEQ ID NO: 379598 - DNA, 19 bp, Homo sapiens
  siRNA target sequence for RANBP10 (NM_020850.1,975-993).
gaagaacaggcgtccataa

SEQ ID NO: 379599 - DNA, 19 bp, Homo sapiens
  siRNA target sequence for RANBP10 (NM_020850.1,978-996).
gaacaggcgtccataaaga

SEQ ID NO: 379600 - DNA, 19 bp, Homo sapiens
  siRNA target sequence for RANBP10 (NM_020850.1,981-999).
caggcgtccataaagaaca

SEQ ID NO: 379601 - DNA, 19 bp, Homo sapiens
  siRNA target sequence for RANBP10 (NM_020850.1,1309-1327).
gcaaacagaaccacagtaa

SEQ ID NO: 379602 - DNA, 19 bp, Homo sapiens
  siRNA target sequence for RANBP10 (NM_020850.1,1381-1399).
ccccatcctccgtcaatta

SEQ ID NO: 379603 - DNA, 19 bp, Homo sapiens
  siRNA target sequence for RANBP10 (NM_020850.1,1383-1401).
ccatcctccgtcaattact

SEQ ID NO: 379604 - DNA, 19 bp, Homo sapiens
  siRNA target sequence for RANBP10 (NM_020850.1,1526-1544).
gtccacacgcattgttaat

SEQ ID NO: 379605 - DNA, 19 bp, Homo sapiens
  siRNA target sequence for RANBP10 (NM_020850.1,1529-1547).
cacacgcattgttaatggt

SEQ ID NO: 379606 - DNA, 19 bp, Homo sapiens
  siRNA target sequence for RANBP10 (NM_020850.1,1664-1682).
cgagttgcaggcattgagt

SEQ ID NO: 379607 - DNA, 19 bp, Homo sapiens
  siRNA target sequence for RANBP10 (NM_020850.1,1695-1713).
cgggagtacggcaagaatt

SEQ ID NO: 379608 - DNA, 19 bp, Homo sapiens
  siRNA target sequence for RANBP10 (NM_020850.1,1745-1763).
cagcctgctggcatactca

SEQ ID NO: 379609 - DNA, 19 bp, Homo sapiens
  siRNA target sequence for KIAA1465 (NM_020851.1,207-225).
gcgcctgcgtggacaagta

SEQ ID NO: 379610 - DNA, 19 bp, Homo sapiens
  siRNA target sequence for KIAA1465 (NM_020851.1,238-256).
cgcggactgcgcttacaaa

SEQ ID NO: 379611 - DNA, 19 bp, Homo sapiens
  siRNA target sequence for KIAA1465 (NM_020851.1,240-258).
cggactgcgcttacaaaga

SEQ ID NO: 379612 - DNA, 19 bp, Homo sapiens
  siRNA target sequence for KIAA1465 (NM_020851.1,242-260).
gactgcgcttacaaagagt

SEQ ID NO: 379613 - DNA, 19 bp, Homo sapiens
  siRNA target sequence for KIAA1465 (NM_020851.1,306-324).
gtctgtccgcgaacaagat

SEQ ID NO: 379614 - DNA, 19 bp, Homo sapiens
  siRNA target sequence for KIAA1465 (NM_020851.1,449-467).
gatctgagccacaacttca

SEQ ID NO: 379615 - DNA, 19 bp, Homo sapiens
  siRNA target sequence for KIAA1465 (NM_020851.1,507-525).
cgctgcagctgctcaaaat

SEQ ID NO: 379616 - DNA, 19 bp, Homo sapiens
  siRNA target sequence for KIAA1465 (NM_020851.1,659-677).
cacttgcaactctatcaca

SEQ ID NO: 379617 - DNA, 19 bp, Homo sapiens
  siRNA target sequence for KIAA1465 (NM_020851.1,661-679).
cttgcaactctatcacaat

SEQ ID NO: 379618 - DNA, 19 bp, Homo sapiens
  siRNA target sequence for KIAA1465 (NM_020851.1,894-912).
gactggcgttcgtgttaca

SEQ ID NO: 379619 - DNA, 19 bp, Homo sapiens
  siRNA target sequence for KIAA1465 (NM_020851.1,942-960).
gcctgcaatggcaacttca

SEQ ID NO: 379620 - DNA, 19 bp, Homo sapiens
  siRNA target sequence for KIAA1465 (NM_020851.1,966-984).
ccggtggcaccgtagtctt

SEQ ID NO: 379621 - DNA, 19 bp, Homo sapiens
  siRNA target sequence for KIAA1465 (NM_020851.1,967-985).
cggtggcaccgtagtctta

SEQ ID NO: 379622 - DNA, 19 bp, Homo sapiens
  siRNA target sequence for KIAA1465 (NM_020851.1,1197-1215).
cttgccgtgcacacaatga

SEQ ID NO: 379623 - DNA, 19 bp, Homo sapiens
  siRNA target sequence for KIAA1465 (NM_020851.1,1222-1240).
cgccaactctacgtcaata

SEQ ID NO: 379624 - DNA, 19 bp, Homo sapiens
  siRNA target sequence for KIAA1465 (NM_020851.1,1368-1386).
ccaaacccgagggcaaaat

SEQ ID NO: 379625 - DNA, 19 bp, Homo sapiens
  siRNA target sequence for KIAA1465 (NM_020851.1,1523-1541).
gacccctctcggtacgttt

SEQ ID NO: 379626 - DNA, 19 bp, Homo sapiens
  siRNA target sequence for KIAA1465 (NM_020851.1,1526-1544).
ccctctcggtacgtttcta

SEQ ID NO: 379627 - DNA, 19 bp, Homo sapiens
  siRNA target sequence for KIAA1465 (NM_020851.1,1527-1545).
cctctcggtacgtttctaa

SEQ ID NO: 379628 - DNA, 19 bp, Homo sapiens
  siRNA target sequence for KIAA1465 (NM_020851.1,1710-1728).
gacccctgcgcctactcta

SEQ ID NO: 379629 - DNA, 19 bp, Homo sapiens
  siRNA target sequence for KIAA1465 (NM_020851.1,1713-1731).
ccctgcgcctactctatct

SEQ ID NO: 379630 - DNA, 19 bp, Homo sapiens
  siRNA target sequence for KIAA1465 (NM_020851.1,1715-1733).
ctgcgcctactctatctgt

SEQ ID NO: 379631 - DNA, 19 bp, Homo sapiens
  siRNA target sequence for KIAA1465 (NM_020851.1,1862-1880).
cacgtgcaagtggtgtttt

SEQ ID NO: 379632 - DNA, 19 bp, Homo sapiens
  siRNA target sequence for KIAA1465 (NM_020851.1,1865-1883).
gtgcaagtggtgttttcca

SEQ ID NO: 379633 - DNA, 19 bp, Homo sapiens
  siRNA target sequence for KIAA1465 (NM_020851.1,1899-1917).
catcgctgctggtcatagt

SEQ ID NO: 379634 - DNA, 19 bp, Homo sapiens
  siRNA target sequence for KIAA1465 (NM_020851.1,1977-1995).
gccatctgctggctaaaca

SEQ ID NO: 379635 - DNA, 19 bp, Homo sapiens
  siRNA target sequence for KIAA1465 (NM_020851.1,2090-2108).
ctcgagtccgagaaaagct

SEQ ID NO: 379636 - DNA, 19 bp, Homo sapiens
  siRNA target sequence for KIAA1465 (NM_020851.1,2155-2173).
gggggagggccttgatgaa

SEQ ID NO: 379637 - DNA, 19 bp, Homo sapiens
  siRNA target sequence for KIAA1465 (NM_020851.1,2329-2347).
catcgcccaggagattaat

SEQ ID NO: 379638 - DNA, 19 bp, Homo sapiens
  siRNA target sequence for KIAA1465 (NM_020851.1,2339-2357).
gagattaatggcaactaca

SEQ ID NO: 379639 - DNA, 19 bp, Homo sapiens
  siRNA target sequence for KIAA1468 (NM_020854.2,574-592).
ggacagcatccagatgtaa

SEQ ID NO: 379640 - DNA, 19 bp, Homo sapiens
  siRNA target sequence for KIAA1468 (NM_020854.2,575-593).
gacagcatccagatgtaaa

SEQ ID NO: 379641 - DNA, 19 bp, Homo sapiens
  siRNA target sequence for KIAA1468 (NM_020854.2,579-597).
gcatccagatgtaaatagt

SEQ ID NO: 379642 - DNA, 19 bp, Homo sapiens
  siRNA target sequence for KIAA1468 (NM_020854.2,580-598).
catccagatgtaaatagtt

SEQ ID NO: 379643 - DNA, 19 bp, Homo sapiens
  siRNA target sequence for KIAA1468 (NM_020854.2,617-635).
cagacatccatctttcaat

SEQ ID NO: 379644 - DNA, 19 bp, Homo sapiens
  siRNA target sequence for KIAA1468 (NM_020854.2,619-637).
gacatccatctttcaatat

SEQ ID NO: 379645 - DNA, 19 bp, Homo sapiens
  siRNA target sequence for KIAA1468 (NM_020854.2,653-671).
ccactattcctaaagagaa

SEQ ID NO: 379646 - DNA, 19 bp, Homo sapiens
  siRNA target sequence for KIAA1468 (NM_020854.2,716-734).
cttcttctctatcaagtaa

SEQ ID NO: 379647 - DNA, 19 bp, Homo sapiens
  siRNA target sequence for KIAA1468 (NM_020854.2,745-763).
cattttgataaacctaata

SEQ ID NO: 379648 - DNA, 19 bp, Homo sapiens
  siRNA target sequence for KIAA1468 (NM_020854.2,813-831).
gtcagcagatagtcgttta

SEQ ID NO: 379649 - DNA, 19 bp, Homo sapiens
  siRNA target sequence for KIAA1468 (NM_020854.2,837-855).
cgaggtgtctcgtattgca

SEQ ID NO: 379650 - DNA, 19 bp, Homo sapiens
  siRNA target sequence for KIAA1468 (NM_020854.2,942-960).
gatccccctcatattgtgt

SEQ ID NO: 379651 - DNA, 19 bp, Homo sapiens
  siRNA target sequence for KIAA1468 (NM_020854.2,957-975).
gtgtacagcatgtctacat

SEQ ID NO: 379652 - DNA, 19 bp, Homo sapiens
  siRNA target sequence for KIAA1468 (NM_020854.2,1102-1120).
cgtgtagaagctgaacttt

SEQ ID NO: 379653 - DNA, 19 bp, Homo sapiens
  siRNA target sequence for KIAA1468 (NM_020854.2,1103-1121).
gtgtagaagctgaactttt

SEQ ID NO: 379654 - DNA, 19 bp, Homo sapiens
  siRNA target sequence for KIAA1468 (NM_020854.2,1124-1142).
cacagtgttgggaacagat

SEQ ID NO: 379655 - DNA, 19 bp, Homo sapiens
  siRNA target sequence for KIAA1468 (NM_020854.2,1126-1144).
cagtgttgggaacagatta

SEQ ID NO: 379656 - DNA, 19 bp, Homo sapiens
  siRNA target sequence for KIAA1468 (NM_020854.2,1128-1146).
gtgttgggaacagattaat

SEQ ID NO: 379657 - DNA, 19 bp, Homo sapiens
  siRNA target sequence for KIAA1468 (NM_020854.2,1130-1148).
gttgggaacagattaatca

SEQ ID NO: 379658 - DNA, 19 bp, Homo sapiens
  siRNA target sequence for KIAA1468 (NM_020854.2,1222-1240).
cgtagctccttggttcttt

SEQ ID NO: 379659 - DNA, 19 bp, Homo sapiens
  siRNA target sequence for KIAA1468 (NM_020854.2,1229-1247).
ccttggttctttcaatgtt

SEQ ID NO: 379660 - DNA, 19 bp, Homo sapiens
  siRNA target sequence for KIAA1468 (NM_020854.2,1282-1300).
gtaagagaagctgttatca

SEQ ID NO: 379661 - DNA, 19 bp, Homo sapiens
  siRNA target sequence for KIAA1468 (NM_020854.2,1310-1328).
gtatcattatgggatacat

SEQ ID NO: 379662 - DNA, 19 bp, Homo sapiens
  siRNA target sequence for KIAA1468 (NM_020854.2,1314-1332).
cattatgggatacattgat

SEQ ID NO: 379663 - DNA, 19 bp, Homo sapiens
  siRNA target sequence for KIAA1468 (NM_020854.2,1326-1344).
cattgatgatccagacaaa

SEQ ID NO: 379664 - DNA, 19 bp, Homo sapiens
  siRNA target sequence for KIAA1468 (NM_020854.2,1348-1366).
catcagggttttgaattgt

SEQ ID NO: 379665 - DNA, 19 bp, Homo sapiens
  siRNA target sequence for KIAA1468 (NM_020854.2,1387-1405).
ccctcagaaagagtagtta

SEQ ID NO: 379666 - DNA, 19 bp, Homo sapiens
  siRNA target sequence for KIAA1468 (NM_020854.2,1389-1407).
ctcagaaagagtagttagt

SEQ ID NO: 379667 - DNA, 19 bp, Homo sapiens
  siRNA target sequence for KIAA1468 (NM_020854.2,1437-1455).
cgctgcgtggactacagaa

SEQ ID NO: 379668 - DNA, 19 bp, Homo sapiens
  siRNA target sequence for KIAA1468 (NM_020854.2,1448-1466).
ctacagaacttggaaattt

SEQ ID NO: 379669 - DNA, 19 bp, Homo sapiens
  siRNA target sequence for KIAA1468 (NM_020854.2,1451-1469).
cagaacttggaaatttaca

SEQ ID NO: 379670 - DNA, 19 bp, Homo sapiens
  siRNA target sequence for KIAA1468 (NM_020854.2,1468-1486).
cagtctcatcttatactta

SEQ ID NO: 379671 - DNA, 19 bp, Homo sapiens
  siRNA target sequence for KIAA1468 (NM_020854.2,1470-1488).
gtctcatcttatacttaca

SEQ ID NO: 379672 - DNA, 19 bp, Homo sapiens
  siRNA target sequence for KIAA1468 (NM_020854.2,1483-1501).
cttacactactgaacaaga

SEQ ID NO: 379673 - DNA, 19 bp, Homo sapiens
  siRNA target sequence for KIAA1468 (NM_020854.2,1683-1701).
gcctatgtcgcctcttcaa

SEQ ID NO: 379674 - DNA, 19 bp, Homo sapiens
  siRNA target sequence for KIAA1468 (NM_020854.2,1789-1807).
ggctgggagagtttactgt

SEQ ID NO: 379675 - DNA, 19 bp, Homo sapiens
  siRNA target sequence for KIAA1468 (NM_020854.2,1799-1817).
gtttactgtgggttgtcaa

SEQ ID NO: 379676 - DNA, 19 bp, Homo sapiens
  siRNA target sequence for KIAA1468 (NM_020854.2,1804-1822).
ctgtgggttgtcaatcaat

SEQ ID NO: 379677 - DNA, 19 bp, Homo sapiens
  siRNA target sequence for KIAA1468 (NM_020854.2,1808-1826).
gggttgtcaatcaattgtt

SEQ ID NO: 379678 - DNA, 19 bp, Homo sapiens
  siRNA target sequence for KIAA1468 (NM_020854.2,1819-1837).
caattgttgccacaactta

SEQ ID NO: 379679 - DNA, 19 bp, Homo sapiens
  siRNA target sequence for KIAA1468 (NM_020854.2,1827-1845).
gccacaacttatagaaata

SEQ ID NO: 379680 - DNA, 19 bp, Homo sapiens
  siRNA target sequence for KIAA1468 (NM_020854.2,1905-1923).
gcgcctttgccggacattt

SEQ ID NO: 379681 - DNA, 19 bp, Homo sapiens
  siRNA target sequence for KIAA1468 (NM_020854.2,1957-1975).
cagttccaggagattttaa

SEQ ID NO: 379682 - DNA, 19 bp, Homo sapiens
  siRNA target sequence for KIAA1468 (NM_020854.2,1963-1981).
caggagattttaagactat

SEQ ID NO: 379683 - DNA, 19 bp, Homo sapiens
  siRNA target sequence for KIAA1468 (NM_020854.2,1965-1983).
ggagattttaagactatct

SEQ ID NO: 379684 - DNA, 19 bp, Homo sapiens
  siRNA target sequence for KIAA1468 (NM_020854.2,2009-2027).
gaaatggggtcctcactaa

SEQ ID NO: 379685 - DNA, 19 bp, Homo sapiens
  siRNA target sequence for KIAA1468 (NM_020854.2,2014-2032).
ggggtcctcactaaagcta

SEQ ID NO: 379686 - DNA, 19 bp, Homo sapiens
  siRNA target sequence for KIAA1468 (NM_020854.2,2053-2071).
ggagtccttacgtgttata

SEQ ID NO: 379687 - DNA, 19 bp, Homo sapiens
  siRNA target sequence for KIAA1468 (NM_020854.2,2054-2072).
gagtccttacgtgttatat

SEQ ID NO: 379688 - DNA, 19 bp, Homo sapiens
  siRNA target sequence for KIAA1468 (NM_020854.2,2094-2112).
gttagttggattcttagaa

SEQ ID NO: 379689 - DNA, 19 bp, Homo sapiens
  siRNA target sequence for KIAA1468 (NM_020854.2,2116-2134).
gtaatgacgctgctttcat

SEQ ID NO: 379690 - DNA, 19 bp, Homo sapiens
  siRNA target sequence for KIAA1468 (NM_020854.2,2121-2139).
gacgctgctttcattatct

SEQ ID NO: 379691 - DNA, 19 bp, Homo sapiens
  siRNA target sequence for KIAA1468 (NM_020854.2,2190-2208).
cccagcctaccatgagtta

SEQ ID NO: 379692 - DNA, 19 bp, Homo sapiens
  siRNA target sequence for KIAA1468 (NM_020854.2,2192-2210).
cagcctaccatgagttact

SEQ ID NO: 379693 - DNA, 19 bp, Homo sapiens
  siRNA target sequence for KIAA1468 (NM_020854.2,2194-2212).
gcctaccatgagttactat

SEQ ID NO: 379694 - DNA, 19 bp, Homo sapiens
  siRNA target sequence for KIAA1468 (NM_020854.2,2195-2213).
cctaccatgagttactatt

SEQ ID NO: 379695 - DNA, 19 bp, Homo sapiens
  siRNA target sequence for KIAA1468 (NM_020854.2,2199-2217).
ccatgagttactattaact

SEQ ID NO: 379696 - DNA, 19 bp, Homo sapiens
  siRNA target sequence for KIAA1468 (NM_020854.2,2258-2276).
ggtgtactgctgctagaat

SEQ ID NO: 379697 - DNA, 19 bp, Homo sapiens
  siRNA target sequence for KIAA1468 (NM_020854.2,2261-2279).
gtactgctgctagaatgtt

SEQ ID NO: 379698 - DNA, 19 bp, Homo sapiens
  siRNA target sequence for KIAA1468 (NM_020854.2,2264-2282).
ctgctgctagaatgtttga

SEQ ID NO: 379699 - DNA, 19 bp, Homo sapiens
  siRNA target sequence for KIAA1468 (NM_020854.2,2298-2316).
catgagtgaagcgttagtt

SEQ ID NO: 379700 - DNA, 19 bp, Homo sapiens
  siRNA target sequence for KIAA1468 (NM_020854.2,2373-2391).
caggattgccacaattcca

SEQ ID NO: 379701 - DNA, 19 bp, Homo sapiens
  siRNA target sequence for KIAA1468 (NM_020854.2,2389-2407).
ccagcctttggcactatta

SEQ ID NO: 379702 - DNA, 19 bp, Homo sapiens
  siRNA target sequence for KIAA1468 (NM_020854.2,2393-2411).
cctttggcactattatgga

SEQ ID NO: 379703 - DNA, 19 bp, Homo sapiens
  siRNA target sequence for KIAA1468 (NM_020854.2,2394-2412).
ctttggcactattatggaa

SEQ ID NO: 379704 - DNA, 19 bp, Homo sapiens
  siRNA target sequence for KIAA1468 (NM_020854.2,2511-2529).
gatcataaaaacatttggt

SEQ ID NO: 379705 - DNA, 19 bp, Homo sapiens
  siRNA target sequence for KIAA1468 (NM_020854.2,2552-2570).
ccaggttccgagatgagtt

SEQ ID NO: 379706 - DNA, 19 bp, Homo sapiens
  siRNA target sequence for KIAA1468 (NM_020854.2,2553-2571).
caggttccgagatgagttt

SEQ ID NO: 379707 - DNA, 19 bp, Homo sapiens
  siRNA target sequence for KIAA1468 (NM_020854.2,2559-2577).
ccgagatgagtttgttata

SEQ ID NO: 379708 - DNA, 19 bp, Homo sapiens
  siRNA target sequence for KIAA1468 (NM_020854.2,2638-2656).
gacattgctacgcatcttt

SEQ ID NO: 379709 - DNA, 19 bp, Homo sapiens
  siRNA target sequence for KIAA1468 (NM_020854.2,2678-2696).
cctgttgtttcatttcaga

SEQ ID NO: 379710 - DNA, 19 bp, Homo sapiens
  siRNA target sequence for KIAA1468 (NM_020854.2,2741-2759).
ggactgacatggaacatct

SEQ ID NO: 379711 - DNA, 19 bp, Homo sapiens
  siRNA target sequence for KIAA1468 (NM_020854.2,2836-2854).
gagcctcaaggctcaatgt

SEQ ID NO: 379712 - DNA, 19 bp, Homo sapiens
  siRNA target sequence for KIAA1468 (NM_020854.2,2853-2871).
gtcaattgctgcaagctta

SEQ ID NO: 379713 - DNA, 19 bp, Homo sapiens
  siRNA target sequence for KIAA1468 (NM_020854.2,2881-2899).
gatacaaagaccaagtttt

SEQ ID NO: 379714 - DNA, 19 bp, Homo sapiens
  siRNA target sequence for KIAA1468 (NM_020854.2,2885-2903).
caaagaccaagtttttgaa

SEQ ID NO: 379715 - DNA, 19 bp, Homo sapiens
  siRNA target sequence for KIAA1468 (NM_020854.2,2910-2928).
gggccagttgacaacatca

SEQ ID NO: 379716 - DNA, 19 bp, Homo sapiens
  siRNA target sequence for KIAA1468 (NM_020854.2,2932-2950).
gccatgttggccaatgtat

SEQ ID NO: 379717 - DNA, 19 bp, Homo sapiens
  siRNA target sequence for KIAA1468 (NM_020854.2,2933-2951).
ccatgttggccaatgtatt

SEQ ID NO: 379718 - DNA, 19 bp, Homo sapiens
  siRNA target sequence for SH3MD2 (NM_020870.1,251-269).
gccttgccagcatacgttt

SEQ ID NO: 379719 - DNA, 19 bp, Homo sapiens
  siRNA target sequence for SH3MD2 (NM_020870.1,256-274).
gccagcatacgttttgcaa

SEQ ID NO: 379720 - DNA, 19 bp, Homo sapiens
  siRNA target sequence for SH3MD2 (NM_020870.1,265-283).
cgttttgcaagcgatgttt

SEQ ID NO: 379721 - DNA, 19 bp, Homo sapiens
  siRNA target sequence for SH3MD2 (NM_020870.1,290-308).
gatcgtaggttctcgaaat

SEQ ID NO: 379722 - DNA, 19 bp, Homo sapiens
  siRNA target sequence for SH3MD2 (NM_020870.1,293-311).
cgtaggttctcgaaatgaa

SEQ ID NO: 379723 - DNA, 19 bp, Homo sapiens
  siRNA target sequence for SH3MD2 (NM_020870.1,323-341).
cgagtgcaggactcttgtt

SEQ ID NO: 379724 - DNA, 19 bp, Homo sapiens
  siRNA target sequence for SH3MD2 (NM_020870.1,443-461).
gaccaactgcacaaatgca

SEQ ID NO: 379725 - DNA, 19 bp, Homo sapiens
  siRNA target sequence for SH3MD2 (NM_020870.1,476-494).
cagcactgtggctaattgt

SEQ ID NO: 379726 - DNA, 19 bp, Homo sapiens
  siRNA target sequence for SH3MD2 (NM_020870.1,485-503).
ggctaattgtagctcaaaa

SEQ ID NO: 379727 - DNA, 19 bp, Homo sapiens
  siRNA target sequence for SH3MD2 (NM_020870.1,1734-1752).
gccccttctcaggttcata

SEQ ID NO: 379728 - DNA, 19 bp, Homo sapiens
  siRNA target sequence for SH3MD2 (NM_020870.1,1735-1753).
ccccttctcaggttcatat

SEQ ID NO: 379729 - DNA, 19 bp, Homo sapiens
  siRNA target sequence for SH3MD2 (NM_020870.1,1756-1774).
gtaccaccgggttaattgt

SEQ ID NO: 379730 - DNA, 19 bp, Homo sapiens
  siRNA target sequence for SH3MD2 (NM_020870.1,1845-1863).
gctgcccttggaactttga

SEQ ID NO: 379731 - DNA, 19 bp, Homo sapiens
  siRNA target sequence for SH3MD2 (NM_020870.1,2009-2027).
gactcgccccagtgtgtat

SEQ ID NO: 379732 - DNA, 19 bp, Homo sapiens
  siRNA target sequence for SH3MD2 (NM_020870.1,2018-2036).
cagtgtgtatgttgctata

SEQ ID NO: 379733 - DNA, 19 bp, Homo sapiens
  siRNA target sequence for SH3MD2 (NM_020870.1,2020-2038).
gtgtgtatgttgctatata

SEQ ID NO: 379734 - DNA, 19 bp, Homo sapiens
  siRNA target sequence for SH3MD2 (NM_020870.1,2024-2042).
gtatgttgctatatatcca

SEQ ID NO: 379735 - DNA, 19 bp, Homo sapiens
  siRNA target sequence for SH3MD2 (NM_020870.1,2082-2100).
ggggagatgtttttagtgt

SEQ ID NO: 379736 - DNA, 19 bp, Homo sapiens
  siRNA target sequence for SH3MD2 (NM_020870.1,2158-2176).
gggttttccctggcaatta

SEQ ID NO: 379737 - DNA, 19 bp, Homo sapiens
  siRNA target sequence for SH3MD2 (NM_020870.1,2159-2177).
ggttttccctggcaattat

SEQ ID NO: 379738 - DNA, 19 bp, Homo sapiens
  siRNA target sequence for SH3MD2 (NM_020870.1,2189-2207).
cacaagggcggtgacaaat

SEQ ID NO: 379739 - DNA, 19 bp, Homo sapiens
  siRNA target sequence for SH3MD2 (NM_020870.1,2383-2401).
ctcaggctaaggtcttgtt

SEQ ID NO: 379740 - DNA, 19 bp, Homo sapiens
  siRNA target sequence for SH3MD2 (NM_020870.1,2403-2421).
cacatgacggggcaaatga

SEQ ID NO: 379741 - DNA, 19 bp, Homo sapiens
  siRNA target sequence for SH3MD2 (NM_020870.1,2405-2423).
catgacggggcaaatgaca

SEQ ID NO: 379742 - DNA, 19 bp, Homo sapiens
  siRNA target sequence for SH3MD2 (NM_020870.1,3044-3062).
cctggcccaggatgctttt

SEQ ID NO: 379743 - DNA, 19 bp, Homo sapiens
  siRNA target sequence for SH3MD2 (NM_020870.1,3047-3065).
ggcccaggatgcttttcat

SEQ ID NO: 379744 - DNA, 19 bp, Homo sapiens
  siRNA target sequence for SH3MD2 (NM_020870.1,3048-3066).
gcccaggatgcttttcata

SEQ ID NO: 379745 - DNA, 19 bp, Homo sapiens
  siRNA target sequence for SH3MD2 (NM_020870.1,3154-3172).
ctagacctgtcgtttgtga

SEQ ID NO: 379746 - DNA, 19 bp, Homo sapiens
  siRNA target sequence for SH3MD2 (NM_020870.1,3208-3226).
gtgaggcagaacttgaact

SEQ ID NO: 379747 - DNA, 19 bp, Homo sapiens
  siRNA target sequence for SH3MD2 (NM_020870.1,3210-3228).
gaggcagaacttgaactta

SEQ ID NO: 379748 - DNA, 19 bp, Homo sapiens
  siRNA target sequence for KIAA1495 (NM_020871.2,387-405).
ccagaaatcgttttacaga

SEQ ID NO: 379749 - DNA, 19 bp, Homo sapiens
  siRNA target sequence for KIAA1495 (NM_020871.2,410-428).
ccttctgatgtctggttat

SEQ ID NO: 379750 - DNA, 19 bp, Homo sapiens
  siRNA target sequence for KIAA1495 (NM_020871.2,431-449).
gcaccccttgaaacattaa

SEQ ID NO: 379751 - DNA, 19 bp, Homo sapiens
  siRNA target sequence for KIAA1495 (NM_020871.2,432-450).
caccccttgaaacattaaa

SEQ ID NO: 379752 - DNA, 19 bp, Homo sapiens
  siRNA target sequence for KIAA1495 (NM_020871.2,458-476).
cataattgcatcaaaacca

SEQ ID NO: 379753 - DNA, 19 bp, Homo sapiens
  siRNA target sequence for KIAA1495 (NM_020871.2,499-517).
gcagatgttaacatacctt

SEQ ID NO: 379754 - DNA, 19 bp, Homo sapiens
  siRNA target sequence for KIAA1495 (NM_020871.2,500-518).
cagatgttaacatacctta

SEQ ID NO: 379755 - DNA, 19 bp, Homo sapiens
  siRNA target sequence for KIAA1495 (NM_020871.2,520-538).
cattagccgaaatctttta

SEQ ID NO: 379756 - DNA, 19 bp, Homo sapiens
  siRNA target sequence for KIAA1495 (NM_020871.2,547-565).
gccaaaatacctatttgat

SEQ ID NO: 379757 - DNA, 19 bp, Homo sapiens
  siRNA target sequence for KIAA1495 (NM_020871.2,563-581).
gatcttccccttaaagttt

SEQ ID NO: 379758 - DNA, 19 bp, Homo sapiens
  siRNA target sequence for KIAA1495 (NM_020871.2,578-596).
gttttggtcgtcagtaata

SEQ ID NO: 379759 - DNA, 19 bp, Homo sapiens
  siRNA target sequence for KIAA1495 (NM_020871.2,583-601).
ggtcgtcagtaataataaa

SEQ ID NO: 379760 - DNA, 19 bp, Homo sapiens
  siRNA target sequence for KIAA1495 (NM_020871.2,660-678).
gctgcaatgagattcaagt

SEQ ID NO: 379761 - DNA, 19 bp, Homo sapiens
  siRNA target sequence for KIAA1495 (NM_020871.2,743-761).
catgttttgccagatgaat

SEQ ID NO: 379762 - DNA, 19 bp, Homo sapiens
  siRNA target sequence for KIAA1495 (NM_020871.2,765-783).
gagaccttcccttagtcaa

SEQ ID NO: 379763 - DNA, 19 bp, Homo sapiens
  siRNA target sequence for KIAA1495 (NM_020871.2,774-792).
ccttagtcaagctggattt

SEQ ID NO: 379764 - DNA, 19 bp, Homo sapiens
  siRNA target sequence for KIAA1495 (NM_020871.2,808-826).
gaccgaaattccagtttgt

SEQ ID NO: 379765 - DNA, 19 bp, Homo sapiens
  siRNA target sequence for KIAA1495 (NM_020871.2,916-934).
gcacatatttaagtactta

SEQ ID NO: 379766 - DNA, 19 bp, Homo sapiens
  siRNA target sequence for KIAA1495 (NM_020871.2,979-997).
ggatcttccatcattgagt

SEQ ID NO: 379767 - DNA, 19 bp, Homo sapiens
  siRNA target sequence for KIAA1495 (NM_020871.2,1025-1043).
gacagtatggaagattttt

SEQ ID NO: 379768 - DNA, 19 bp, Homo sapiens
  siRNA target sequence for KIAA1495 (NM_020871.2,1185-1203).
gaaatgacagtcacataat

SEQ ID NO: 379769 - DNA, 19 bp, Homo sapiens
  siRNA target sequence for KIAA1495 (NM_020871.2,1206-1224).
gaagtaagactgattctca

SEQ ID NO: 379770 - DNA, 19 bp, Homo sapiens
  siRNA target sequence for KIAA1495 (NM_020871.2,1225-1243).
gaaagaccaggaggtatat

SEQ ID NO: 379771 - DNA, 19 bp, Homo sapiens
  siRNA target sequence for KIAA1495 (NM_020871.2,1229-1247).
gaccaggaggtatatgatt

SEQ ID NO: 379772 - DNA, 19 bp, Homo sapiens
  siRNA target sequence for KIAA1495 (NM_020871.2,1255-1273).
ccccaacacagaagatgta

SEQ ID NO: 379773 - DNA, 19 bp, Homo sapiens
  siRNA target sequence for KIAA1495 (NM_020871.2,1484-1502).
cagaagaacaggattctta

SEQ ID NO: 379774 - DNA, 19 bp, Homo sapiens
  siRNA target sequence for KIAA1495 (NM_020871.2,1492-1510).
caggattcttaatcattca

SEQ ID NO: 379775 - DNA, 19 bp, Homo sapiens
  siRNA target sequence for KIAA1495 (NM_020871.2,1574-1592).
gaagttaattcaccattat

SEQ ID NO: 379776 - DNA, 19 bp, Homo sapiens
  siRNA target sequence for KIAA1495 (NM_020871.2,1605-1623).
ggcagcccttagaaaatca

SEQ ID NO: 379777 - DNA, 19 bp, Homo sapiens
  siRNA target sequence for KIAA1495 (NM_020871.2,1627-1645).
ggatcaaatagatgaacaa

SEQ ID NO: 379778 - DNA, 19 bp, Homo sapiens
  siRNA target sequence for KIAA1495 (NM_020871.2,1693-1711).
gcggagcaaacagattaga

SEQ ID NO: 379779 - DNA, 19 bp, Homo sapiens
  siRNA target sequence for KIAA1495 (NM_020871.2,1694-1712).
cggagcaaacagattagaa

SEQ ID NO: 379780 - DNA, 19 bp, Homo sapiens
  siRNA target sequence for KIAA1495 (NM_020871.2,1744-1762).
gagttcaagtggcaatgaa

SEQ ID NO: 379781 - DNA, 19 bp, Homo sapiens
  siRNA target sequence for KIAA1495 (NM_020871.2,1787-1805).
gctaatatgtcaacacaat

SEQ ID NO: 379782 - DNA, 19 bp, Homo sapiens
  siRNA target sequence for KIAA1495 (NM_020871.2,1889-1907).
cgctcatctcgccaagaat

SEQ ID NO: 379783 - DNA, 19 bp, Homo sapiens
  siRNA target sequence for KIAA1495 (NM_020871.2,1919-1937).
gatccaggatttacaatga

SEQ ID NO: 379784 - DNA, 19 bp, Homo sapiens
  siRNA target sequence for KIAA1495 (NM_020871.2,1960-1978).
ggaagagcgagagcaaata

SEQ ID NO: 379785 - DNA, 19 bp, Homo sapiens
  siRNA target sequence for KIAA1495 (NM_020871.2,1980-1998).
gacaacttcgcaacaatct

SEQ ID NO: 379786 - DNA, 19 bp, Homo sapiens
  siRNA target sequence for KIAA1495 (NM_020871.2,2091-2109).
cacgttctgttgctagtat

SEQ ID NO: 379787 - DNA, 19 bp, Homo sapiens
  siRNA target sequence for KIAA1495 (NM_020871.2,2123-2141).
ccagcagtgcccaaactga

SEQ ID NO: 379788 - DNA, 19 bp, Homo sapiens
  siRNA target sequence for KIAA1495 (NM_020871.2,2154-2172).
gtcgaagaaatgtagaaaa

SEQ ID NO: 379789 - DNA, 19 bp, Homo sapiens
  siRNA target sequence for LRRN1 (NM_020873.3,333-351).
ggctaggatgagctttgtt

SEQ ID NO: 379790 - DNA, 19 bp, Homo sapiens
  siRNA target sequence for LRRN1 (NM_020873.3,334-352).
gctaggatgagctttgtta

SEQ ID NO: 379791 - DNA, 19 bp, Homo sapiens
  siRNA target sequence for LRRN1 (NM_020873.3,372-390).
gctgggcctactaatgact

SEQ ID NO: 379792 - DNA, 19 bp, Homo sapiens
  siRNA target sequence for LRRN1 (NM_020873.3,373-391).
ctgggcctactaatgactt

SEQ ID NO: 379793 - DNA, 19 bp, Homo sapiens
  siRNA target sequence for LRRN1 (NM_020873.3,379-397).
ctactaatgacttcattaa

SEQ ID NO: 379794 - DNA, 19 bp, Homo sapiens
  siRNA target sequence for LRRN1 (NM_020873.3,398-416).
ccgagtcttccatacagaa

SEQ ID NO: 379795 - DNA, 19 bp, Homo sapiens
  siRNA target sequence for LRRN1 (NM_020873.3,399-417).
cgagtcttccatacagaat

SEQ ID NO: 379796 - DNA, 19 bp, Homo sapiens
  siRNA target sequence for LRRN1 (NM_020873.3,400-418).
gagtcttccatacagaata

SEQ ID NO: 379797 - DNA, 19 bp, Homo sapiens
  siRNA target sequence for LRRN1 (NM_020873.3,402-420).
gtcttccatacagaatagt

SEQ ID NO: 379798 - DNA, 19 bp, Homo sapiens
  siRNA target sequence for LRRN1 (NM_020873.3,404-422).
cttccatacagaatagtga

SEQ ID NO: 379799 - DNA, 19 bp, Homo sapiens
  siRNA target sequence for LRRN1 (NM_020873.3,445-463).
gaaattcgtccctggttta

SEQ ID NO: 379800 - DNA, 19 bp, Homo sapiens
  siRNA target sequence for LRRN1 (NM_020873.3,465-483).
cccacagtcaacttacaga

SEQ ID NO: 379801 - DNA, 19 bp, Homo sapiens
  siRNA target sequence for LRRN1 (NM_020873.3,484-502).
gaagccaccactgttgatt

SEQ ID NO: 379802 - DNA, 19 bp, Homo sapiens
  siRNA target sequence for LRRN1 (NM_020873.3,504-522).
caatgacctccgcttaaca

SEQ ID NO: 379803 - DNA, 19 bp, Homo sapiens
  siRNA target sequence for LRRN1 (NM_020873.3,510-528).
cctccgcttaacaaggatt

SEQ ID NO: 379804 - DNA, 19 bp, Homo sapiens
  siRNA target sequence for LRRN1 (NM_020873.3,628-646).
ctagatttctcccaaaaca

SEQ ID NO: 379805 - DNA, 19 bp, Homo sapiens
  siRNA target sequence for LRRN1 (NM_020873.3,638-656).
cccaaaacaactttactaa

SEQ ID NO: 379806 - DNA, 19 bp, Homo sapiens
  siRNA target sequence for LRRN1 (NM_020873.3,666-684).
ggtcgggctggcaaaccta

SEQ ID NO: 379807 - DNA, 19 bp, Homo sapiens
  siRNA target sequence for LRRN1 (NM_020873.3,667-685).
gtcgggctggcaaacctaa

SEQ ID NO: 379808 - DNA, 19 bp, Homo sapiens
  siRNA target sequence for LRRN1 (NM_020873.3,726-744).
cgagatgactgattactgt

SEQ ID NO: 379809 - DNA, 19 bp, Homo sapiens
  siRNA target sequence for LRRN1 (NM_020873.3,753-771).
cctcagcaaccttcaagaa

SEQ ID NO: 379810 - DNA, 19 bp, Homo sapiens
  siRNA target sequence for LRRN1 (NM_020873.3,789-807).
ccaaattagcactatttct

SEQ ID NO: 379811 - DNA, 19 bp, Homo sapiens
  siRNA target sequence for LRRN1 (NM_020873.3,846-864).
ccacctgaactccaacaaa

SEQ ID NO: 379812 - DNA, 19 bp, Homo sapiens
  siRNA target sequence for LRRN1 (NM_020873.3,877-895).
gatagtcgctggtttgatt

SEQ ID NO: 379813 - DNA, 19 bp, Homo sapiens
  siRNA target sequence for LRRN1 (NM_020873.3,899-917).
cacccaacctggaaattct

SEQ ID NO: 379814 - DNA, 19 bp, Homo sapiens
  siRNA target sequence for LRRN1 (NM_020873.3,1058-1076).
gcctgtctttttatgataa

SEQ ID NO: 379815 - DNA, 19 bp, Homo sapiens
  siRNA target sequence for LRRN1 (NM_020873.3,1286-1304).
ccaccaataaccctaaact

SEQ ID NO: 379816 - DNA, 19 bp, Homo sapiens
  siRNA target sequence for LRRN1 (NM_020873.3,1419-1437).
gcgtgagatcagtatccat

SEQ ID NO: 379817 - DNA, 19 bp, Homo sapiens
  siRNA target sequence for LRRN1 (NM_020873.3,1614-1632).
cgacagcttcccaaatcgt

SEQ ID NO: 379818 - DNA, 19 bp, Homo sapiens
  siRNA target sequence for LRRN1 (NM_020873.3,1615-1633).
gacagcttcccaaatcgtt

SEQ ID NO: 379819 - DNA, 19 bp, Homo sapiens
  siRNA target sequence for LRRN1 (NM_020873.3,1706-1724).
gggtcactcccattggaaa

SEQ ID NO: 379820 - DNA, 19 bp, Homo sapiens
  siRNA target sequence for LRRN1 (NM_020873.3,1707-1725).
ggtcactcccattggaaat

SEQ ID NO: 379821 - DNA, 19 bp, Homo sapiens
  siRNA target sequence for LRRN1 (NM_020873.3,1708-1726).
gtcactcccattggaaata

SEQ ID NO: 379822 - DNA, 19 bp, Homo sapiens
  siRNA target sequence for LRRN1 (NM_020873.3,1750-1768).
gataaatacaagctaagta

SEQ ID NO: 379823 - DNA, 19 bp, Homo sapiens
  siRNA target sequence for LRRN1 (NM_020873.3,1769-1787).
gcgaaggtaccttggaaat

SEQ ID NO: 379824 - DNA, 19 bp, Homo sapiens
  siRNA target sequence for LRRN1 (NM_020873.3,1778-1796).
ccttggaaatatctaacat

SEQ ID NO: 379825 - DNA, 19 bp, Homo sapiens
  siRNA target sequence for LRRN1 (NM_020873.3,1779-1797).
cttggaaatatctaacata

SEQ ID NO: 379826 - DNA, 19 bp, Homo sapiens
  siRNA target sequence for LRRN1 (NM_020873.3,1823-1841).
catgtgttgcccagaatgt

SEQ ID NO: 379827 - DNA, 19 bp, Homo sapiens
  siRNA target sequence for LRRN1 (NM_020873.3,1854-1872).
cactcgggtggcaacaatt

SEQ ID NO: 379828 - DNA, 19 bp, Homo sapiens
  siRNA target sequence for LRRN1 (NM_020873.3,1856-1874).
ctcgggtggcaacaattaa

SEQ ID NO: 379829 - DNA, 19 bp, Homo sapiens
  siRNA target sequence for LRRN1 (NM_020873.3,1859-1877).
gggtggcaacaattaaggt

SEQ ID NO: 379830 - DNA, 19 bp, Homo sapiens
  siRNA target sequence for LRRN1 (NM_020873.3,1860-1878).
ggtggcaacaattaaggtt

SEQ ID NO: 379831 - DNA, 19 bp, Homo sapiens
  siRNA target sequence for LRRN1 (NM_020873.3,1861-1879).
gtggcaacaattaaggtta

SEQ ID NO: 379832 - DNA, 19 bp, Homo sapiens
  siRNA target sequence for LRRN1 (NM_020873.3,1898-1916).
gtacccaggtgctaaaaat

SEQ ID NO: 379833 - DNA, 19 bp, Homo sapiens
  siRNA target sequence for LRRN1 (NM_020873.3,1955-1973).
cctggaaagttaattccaa

SEQ ID NO: 379834 - DNA, 19 bp, Homo sapiens
  siRNA target sequence for LRRN1 (NM_020873.3,2006-2024).
ccaccatgaagattgataa

SEQ ID NO: 379835 - DNA, 19 bp, Homo sapiens
  siRNA target sequence for LRRN1 (NM_020873.3,2016-2034).
gattgataaccctcacata

SEQ ID NO: 379836 - DNA, 19 bp, Homo sapiens
  siRNA target sequence for LRRN1 (NM_020873.3,2020-2038).
gataaccctcacataacat

SEQ ID NO: 379837 - DNA, 19 bp, Homo sapiens
  siRNA target sequence for LRRN1 (NM_020873.3,2025-2043).
ccctcacataacatatact

SEQ ID NO: 379838 - DNA, 19 bp, Homo sapiens
  siRNA target sequence for LRRN1 (NM_020873.3,2054-2072).
cagtcgatgtccatgaata

SEQ ID NO: 379839 - DNA, 19 bp, Homo sapiens
  siRNA target sequence for LRRN1 (NM_020873.3,2062-2080).
gtccatgaatacaacctaa

SEQ ID NO: 379840 - DNA, 19 bp, Homo sapiens
  siRNA target sequence for LRRN1 (NM_020873.3,2088-2106).
gcagccttccacagattat

SEQ ID NO: 379841 - DNA, 19 bp, Homo sapiens
  siRNA target sequence for LRRN1 (NM_020873.3,2091-2109).
gccttccacagattatgaa

SEQ ID NO: 379842 - DNA, 19 bp, Homo sapiens
  siRNA target sequence for LRRN1 (NM_020873.3,2114-2132).
gtctcacagtgtccaatat

SEQ ID NO: 379843 - DNA, 19 bp, Homo sapiens
  siRNA target sequence for LRRN1 (NM_020873.3,2118-2136).
cacagtgtccaatattcat

SEQ ID NO: 379844 - DNA, 19 bp, Homo sapiens
  siRNA target sequence for LRRN1 (NM_020873.3,2120-2138).
cagtgtccaatattcatca

SEQ ID NO: 379845 - DNA, 19 bp, Homo sapiens
  siRNA target sequence for LRRN1 (NM_020873.3,2230-2248).
gcagtaatggggtctatgt

SEQ ID NO: 379846 - DNA, 19 bp, Homo sapiens
  siRNA target sequence for LRRN1 (NM_020873.3,2267-2285).
cgtccattgctgtgtactt

SEQ ID NO: 379847 - DNA, 19 bp, Homo sapiens
  siRNA target sequence for LRRN1 (NM_020873.3,2278-2296).
gtgtactttgccaaaagat

SEQ ID NO: 379848 - DNA, 19 bp, Homo sapiens
  siRNA target sequence for LRRN1 (NM_020873.3,2314-2332).
caccactcattaaaaaagt

SEQ ID NO: 379849 - DNA, 19 bp, Homo sapiens
  siRNA target sequence for LRRN1 (NM_020873.3,2346-2364).
ctcttcaatcccactaaat

SEQ ID NO: 379850 - DNA, 19 bp, Homo sapiens
  siRNA target sequence for LRRN1 (NM_020873.3,2348-2366).
cttcaatcccactaaatga

SEQ ID NO: 379851 - DNA, 19 bp, Homo sapiens
  siRNA target sequence for KIAA1508 (NM_020880.2,241-259).
cccgacccagcaggttttt

SEQ ID NO: 379852 - DNA, 19 bp, Homo sapiens
  siRNA target sequence for KIAA1508 (NM_020880.2,243-261).
cgacccagcaggtttttgt

SEQ ID NO: 379853 - DNA, 19 bp, Homo sapiens
  siRNA target sequence for KIAA1508 (NM_020880.2,244-262).
gacccagcaggtttttgta

SEQ ID NO: 379854 - DNA, 19 bp, Homo sapiens
  siRNA target sequence for KIAA1508 (NM_020880.2,417-435).
ctgcagagagcgtttctgt

SEQ ID NO: 379855 - DNA, 19 bp, Homo sapiens
  siRNA target sequence for KIAA1508 (NM_020880.2,467-485).
gcagatacatccactgata

SEQ ID NO: 379856 - DNA, 19 bp, Homo sapiens
  siRNA target sequence for KIAA1508 (NM_020880.2,470-488).
gatacatccactgataaga

SEQ ID NO: 379857 - DNA, 19 bp, Homo sapiens
  siRNA target sequence for KIAA1508 (NM_020880.2,487-505).
gagtcacccctgtgagatt

SEQ ID NO: 379858 - DNA, 19 bp, Homo sapiens
  siRNA target sequence for KIAA1508 (NM_020880.2,601-619).
ctggatgagttcaaacctt

SEQ ID NO: 379859 - DNA, 19 bp, Homo sapiens
  siRNA target sequence for KIAA1508 (NM_020880.2,625-643).
gctccagaagcttgataat

SEQ ID NO: 379860 - DNA, 19 bp, Homo sapiens
  siRNA target sequence for KIAA1508 (NM_020880.2,669-687).
gggaccaggcctcatttat

SEQ ID NO: 379861 - DNA, 19 bp, Homo sapiens
  siRNA target sequence for KIAA1508 (NM_020880.2,677-695).
gcctcatttatgatgaact

SEQ ID NO: 379862 - DNA, 19 bp, Homo sapiens
  siRNA target sequence for KIAA1508 (NM_020880.2,782-800).
gtgactcccaccattgaga

SEQ ID NO: 379863 - DNA, 19 bp, Homo sapiens
  siRNA target sequence for KIAA1508 (NM_020880.2,839-857).
ggacgaaagcctctcaaat

SEQ ID NO: 379864 - DNA, 19 bp, Homo sapiens
  siRNA target sequence for KIAA1508 (NM_020880.2,863-881).
gaatccaggaaatctttta

SEQ ID NO: 379865 - DNA, 19 bp, Homo sapiens
  siRNA target sequence for KIAA1508 (NM_020880.2,882-900).
gagagaaatctgtattcat

SEQ ID NO: 379866 - DNA, 19 bp, Homo sapiens
  siRNA target sequence for KIAA1508 (NM_020880.2,1053-1071).
gcaaaactcacctaactca

SEQ ID NO: 379867 - DNA, 19 bp, Homo sapiens
  siRNA target sequence for KIAA1508 (NM_020880.2,1128-1146).
cctttcgccaggtatctgt

SEQ ID NO: 379868 - DNA, 19 bp, Homo sapiens
  siRNA target sequence for KIAA1508 (NM_020880.2,1375-1393).
gaaagcatttagttgcaat

SEQ ID NO: 379869 - DNA, 19 bp, Homo sapiens
  siRNA target sequence for KIAA1508 (NM_020880.2,1389-1407).
gcaatatctaccttattca

SEQ ID NO: 379870 - DNA, 19 bp, Homo sapiens
  siRNA target sequence for KIAA1508 (NM_020880.2,1464-1482).
catttggccagaaatctgt

SEQ ID NO: 379871 - DNA, 19 bp, Homo sapiens
  siRNA target sequence for KIAA1508 (NM_020880.2,1747-1765).
ccagactgttcacactaat

SEQ ID NO: 379872 - DNA, 19 bp, Homo sapiens
  siRNA target sequence for KIAA1508 (NM_020880.2,1884-1902).
cttttacccgcaaaaatca

SEQ ID NO: 379873 - DNA, 19 bp, Homo sapiens
  siRNA target sequence for USP28 (NM_020886.2,93-111).
ctgccaaatgctgttaaat

SEQ ID NO: 379874 - DNA, 19 bp, Homo sapiens
  siRNA target sequence for USP28 (NM_020886.2,168-186).
ggccagtaatggtgacatt

SEQ ID NO: 379875 - DNA, 19 bp, Homo sapiens
  siRNA target sequence for USP28 (NM_020886.2,310-328).
gaccttactcatgataaca

SEQ ID NO: 379876 - DNA, 19 bp, Homo sapiens
  siRNA target sequence for USP28 (NM_020886.2,312-330).
ccttactcatgataacaaa

SEQ ID NO: 379877 - DNA, 19 bp, Homo sapiens
  siRNA target sequence for USP28 (NM_020886.2,388-406).
gatggaagagatcttaaca

SEQ ID NO: 379878 - DNA, 19 bp, Homo sapiens
  siRNA target sequence for USP28 (NM_020886.2,430-448).
gaaactaaacgctcaaaga

SEQ ID NO: 379879 - DNA, 19 bp, Homo sapiens
  siRNA target sequence for USP28 (NM_020886.2,434-452).
ctaaacgctcaaagagaaa

SEQ ID NO: 379880 - DNA, 19 bp, Homo sapiens
  siRNA target sequence for USP28 (NM_020886.2,512-530).
ggccagttgggctgaaaaa

SEQ ID NO: 379881 - DNA, 19 bp, Homo sapiens
  siRNA target sequence for USP28 (NM_020886.2,513-531).
gccagttgggctgaaaaat

SEQ ID NO: 379882 - DNA, 19 bp, Homo sapiens
  siRNA target sequence for USP28 (NM_020886.2,515-533).
cagttgggctgaaaaatgt

SEQ ID NO: 379883 - DNA, 19 bp, Homo sapiens
  siRNA target sequence for USP28 (NM_020886.2,577-595).
caattgcctgaatttcgaa

SEQ ID NO: 379884 - DNA, 19 bp, Homo sapiens
  siRNA target sequence for USP28 (NM_020886.2,608-626).
gttatagtctgccacaaaa

SEQ ID NO: 379885 - DNA, 19 bp, Homo sapiens
  siRNA target sequence for USP28 (NM_020886.2,614-632).
gtctgccacaaaatgtact

SEQ ID NO: 379886 - DNA, 19 bp, Homo sapiens
  siRNA target sequence for USP28 (NM_020886.2,634-652).
gaaaattgtcgaagtcata

SEQ ID NO: 379887 - DNA, 19 bp, Homo sapiens
  siRNA target sequence for USP28 (NM_020886.2,641-659).
gtcgaagtcatacagaaaa

SEQ ID NO: 379888 - DNA, 19 bp, Homo sapiens
  siRNA target sequence for USP28 (NM_020886.2,643-661).
cgaagtcatacagaaaaga

SEQ ID NO: 379889 - DNA, 19 bp, Homo sapiens
  siRNA target sequence for USP28 (NM_020886.2,662-680).
gaaatatcatgtttatgca

SEQ ID NO: 379890 - DNA, 19 bp, Homo sapiens
  siRNA target sequence for USP28 (NM_020886.2,846-864).
ccagctagctgttaatgtt

SEQ ID NO: 379891 - DNA, 19 bp, Homo sapiens
  siRNA target sequence for USP28 (NM_020886.2,850-868).
ctagctgttaatgttaaca

SEQ ID NO: 379892 - DNA, 19 bp, Homo sapiens
  siRNA target sequence for USP28 (NM_020886.2,893-911).
caatggtgcagctgttcta

SEQ ID NO: 379893 - DNA, 19 bp, Homo sapiens
  siRNA target sequence for USP28 (NM_020886.2,898-916).
gtgcagctgttctatggta

SEQ ID NO: 379894 - DNA, 19 bp, Homo sapiens
  siRNA target sequence for USP28 (NM_020886.2,1004-1022).
gcaacttagacgagtgttt

SEQ ID NO: 379895 - DNA, 19 bp, Homo sapiens
  siRNA target sequence for USP28 (NM_020886.2,1032-1050).
catggtggagggtgatgtt

SEQ ID NO: 379896 - DNA, 19 bp, Homo sapiens
  siRNA target sequence for USP28 (NM_020886.2,1064-1082).
ccgatcactcggtgaagta

SEQ ID NO: 379897 - DNA, 19 bp, Homo sapiens
  siRNA target sequence for USP28 (NM_020886.2,1065-1083).
cgatcactcggtgaagtat

SEQ ID NO: 379898 - DNA, 19 bp, Homo sapiens
  siRNA target sequence for USP28 (NM_020886.2,1087-1105).
caagagcgttggtttacaa

SEQ ID NO: 379899 - DNA, 19 bp, Homo sapiens
  siRNA target sequence for USP28 (NM_020886.2,1115-1133).
cagtgttgacctttgaact

SEQ ID NO: 379900 - DNA, 19 bp, Homo sapiens
  siRNA target sequence for USP28 (NM_020886.2,1129-1147).
gaactctcaagatttgagt

SEQ ID NO: 379901 - DNA, 19 bp, Homo sapiens
  siRNA target sequence for USP28 (NM_020886.2,1235-1253).
gcaaggagcttattcgaaa

SEQ ID NO: 379902 - DNA, 19 bp, Homo sapiens
  siRNA target sequence for USP28 (NM_020886.2,1240-1258).
gagcttattcgaaataaga

SEQ ID NO: 379903 - DNA, 19 bp, Homo sapiens
  siRNA target sequence for USP28 (NM_020886.2,1259-1277).
gagagtgtattcgaaagtt

SEQ ID NO: 379904 - DNA, 19 bp, Homo sapiens
  siRNA target sequence for USP28 (NM_020886.2,1354-1372).
ctcccggacatgctgaaat

SEQ ID NO: 379905 - DNA, 19 bp, Homo sapiens
  siRNA target sequence for USP28 (NM_020886.2,1359-1377).
ggacatgctgaaatatgtt

SEQ ID NO: 379906 - DNA, 19 bp, Homo sapiens
  siRNA target sequence for USP28 (NM_020886.2,1431-1449).
cacacatatgacattacca

SEQ ID NO: 379907 - DNA, 19 bp, Homo sapiens
  siRNA target sequence for USP28 (NM_020886.2,1480-1498).
cagacatccaaggaaagta

SEQ ID NO: 379908 - DNA, 19 bp, Homo sapiens
  siRNA target sequence for USP28 (NM_020886.2,1482-1500).
gacatccaaggaaagtaca

SEQ ID NO: 379909 - DNA, 19 bp, Homo sapiens
  siRNA target sequence for USP28 (NM_020886.2,1488-1506).
caaggaaagtacaagtaca

SEQ ID NO: 379910 - DNA, 19 bp, Homo sapiens
  siRNA target sequence for USP28 (NM_020886.2,1525-1543).
gttgaaagtaccttttctt

SEQ ID NO: 379911 - DNA, 19 bp, Homo sapiens
  siRNA target sequence for USP28 (NM_020886.2,1586-1604).
ctcggtcttccatggaaat

SEQ ID NO: 379912 - DNA, 19 bp, Homo sapiens
  siRNA target sequence for USP28 (NM_020886.2,1671-1689).
gagatggaggagtgagatt

SEQ ID NO: 379913 - DNA, 19 bp, Homo sapiens
  siRNA target sequence for USP28 (NM_020886.2,1677-1695).
gaggagtgagattgaacaa

SEQ ID NO: 379914 - DNA, 19 bp, Homo sapiens
  siRNA target sequence for USP28 (NM_020886.2,1680-1698).
gagtgagattgaacaagat

SEQ ID NO: 379915 - DNA, 19 bp, Homo sapiens
  siRNA target sequence for USP28 (NM_020886.2,1686-1704).
gattgaacaagatatacaa

SEQ ID NO: 379916 - DNA, 19 bp, Homo sapiens
  siRNA target sequence for USP28 (NM_020886.2,1690-1708).
gaacaagatatacaagatt

SEQ ID NO: 379917 - DNA, 19 bp, Homo sapiens
  siRNA target sequence for USP28 (NM_020886.2,1713-1731).
gacttgtattgcaagtact

SEQ ID NO: 379918 - DNA, 19 bp, Homo sapiens
  siRNA target sequence for USP28 (NM_020886.2,1724-1742).
caagtactactcagactat

SEQ ID NO: 379919 - DNA, 19 bp, Homo sapiens
  siRNA target sequence for USP28 (NM_020886.2,1727-1745).
gtactactcagactattga

SEQ ID NO: 379920 - DNA, 19 bp, Homo sapiens
  siRNA target sequence for USP28 (NM_020886.2,1730-1748).
ctactcagactattgaaca

SEQ ID NO: 379921 - DNA, 19 bp, Homo sapiens
  siRNA target sequence for USP28 (NM_020886.2,1829-1847).
gacactattgggcctatat

SEQ ID NO: 379922 - DNA, 19 bp, Homo sapiens
  siRNA target sequence for USP28 (NM_020886.2,1831-1849).
cactattgggcctatatct

SEQ ID NO: 379923 - DNA, 19 bp, Homo sapiens
  siRNA target sequence for USP28 (NM_020886.2,1833-1851).
ctattgggcctatatctat

SEQ ID NO: 379924 - DNA, 19 bp, Homo sapiens
  siRNA target sequence for USP28 (NM_020886.2,1838-1856).
gggcctatatctataatca

SEQ ID NO: 379925 - DNA, 19 bp, Homo sapiens
  siRNA target sequence for USP28 (NM_020886.2,1839-1857).
ggcctatatctataatcaa

SEQ ID NO: 379926 - DNA, 19 bp, Homo sapiens
  siRNA target sequence for USP28 (NM_020886.2,1864-1882).
cagagctggctcaagtaca

SEQ ID NO: 379927 - DNA, 19 bp, Homo sapiens
  siRNA target sequence for USP28 (NM_020886.2,1881-1899).
caatgacatctctgttact

SEQ ID NO: 379928 - DNA, 19 bp, Homo sapiens
  siRNA target sequence for USP28 (NM_020886.2,1955-1973).
gtgcttactgtctgatgta

SEQ ID NO: 379929 - DNA, 19 bp, Homo sapiens
  siRNA target sequence for USP28 (NM_020886.2,1957-1975).
gcttactgtctgatgtaca

SEQ ID NO: 379930 - DNA, 19 bp, Homo sapiens
  siRNA target sequence for USP28 (NM_020886.2,1964-1982).
gtctgatgtacattaatga

SEQ ID NO: 379931 - DNA, 19 bp, Homo sapiens
  siRNA target sequence for USP28 (NM_020886.2,1981-1999).
gacaaactaccctacttca

SEQ ID NO: 379932 - DNA, 19 bp, Homo sapiens
  siRNA target sequence for USP28 (NM_020886.2,2007-2025).
ggcagccccaactgaatca

SEQ ID NO: 379933 - DNA, 19 bp, Homo sapiens
  siRNA target sequence for USP28 (NM_020886.2,2009-2027).
cagccccaactgaatcaga

SEQ ID NO: 379934 - DNA, 19 bp, Homo sapiens
  siRNA target sequence for USP28 (NM_020886.2,2054-2072).
ctgtggaactcaagcatta

SEQ ID NO: 379935 - DNA, 19 bp, Homo sapiens
  siRNA target sequence for USP28 (NM_020886.2,2132-2150).
cttgcaaaatccctcaaat

SEQ ID NO: 379936 - DNA, 19 bp, Homo sapiens
  siRNA target sequence for USP28 (NM_020886.2,2135-2153).
gcaaaatccctcaaatgga

SEQ ID NO: 379937 - DNA, 19 bp, Homo sapiens
  siRNA target sequence for USP28 (NM_020886.2,2242-2260).
gagcatgctgtgattgtaa

SEQ ID NO: 379938 - DNA, 19 bp, Homo sapiens
  siRNA target sequence for USP28 (NM_020886.2,2291-2309).
cagcccgtgcctatgagaa

SEQ ID NO: 379939 - DNA, 19 bp, Homo sapiens
  siRNA target sequence for USP28 (NM_020886.2,2424-2442).
gctgattaaggcattccat

SEQ ID NO: 379940 - DNA, 19 bp, Homo sapiens
  siRNA target sequence for USP28 (NM_020886.2,2543-2561).
cacccaaaagggtagtaga

SEQ ID NO: 379941 - DNA, 19 bp, Homo sapiens
  siRNA target sequence for USP28 (NM_020886.2,2564-2582).
gaacccttctggaacagtt

SEQ ID NO: 379942 - DNA, 19 bp, Homo sapiens
  siRNA target sequence for USP28 (NM_020886.2,2585-2603).
cagataaaaatcttagcta

SEQ ID NO: 379943 - DNA, 19 bp, Homo sapiens
  siRNA target sequence for USP28 (NM_020886.2,2596-2614).
cttagctatgatgaaagat

SEQ ID NO: 379944 - DNA, 19 bp, Homo sapiens
  siRNA target sequence for USP28 (NM_020886.2,2600-2618).
gctatgatgaaagatcaat

SEQ ID NO: 379945 - DNA, 19 bp, Homo sapiens
  siRNA target sequence for USP28 (NM_020886.2,2612-2630).
gatcaatcagcattatgaa

SEQ ID NO: 379946 - DNA, 19 bp, Homo sapiens
  siRNA target sequence for USP28 (NM_020886.2,2632-2650).
gtggctcaagcgaaactga

SEQ ID NO: 379947 - DNA, 19 bp, Homo sapiens
  siRNA target sequence for USP28 (NM_020886.2,2660-2678).
gtccagatgacatgaatat

SEQ ID NO: 379948 - DNA, 19 bp, Homo sapiens
  siRNA target sequence for USP28 (NM_020886.2,2691-2709).
gaagtggcatgaagattat

SEQ ID NO: 379949 - DNA, 19 bp, Homo sapiens
  siRNA target sequence for USP28 (NM_020886.2,2694-2712).
gtggcatgaagattatagt

SEQ ID NO: 379950 - DNA, 19 bp, Homo sapiens
  siRNA target sequence for USP28 (NM_020886.2,2696-2714).
ggcatgaagattatagttt

SEQ ID NO: 379951 - DNA, 19 bp, Homo sapiens
  siRNA target sequence for USP28 (NM_020886.2,2698-2716).
catgaagattatagtttgt

SEQ ID NO: 379952 - DNA, 19 bp, Homo sapiens
  siRNA target sequence for USP28 (NM_020886.2,2747-2765).
gcctagaactctatcaaaa

SEQ ID NO: 379953 - DNA, 19 bp, Homo sapiens
  siRNA target sequence for USP28 (NM_020886.2,2869-2887).
gctttataccgaagaaaat

SEQ ID NO: 379954 - DNA, 19 bp, Homo sapiens
  siRNA target sequence for USP28 (NM_020886.2,2946-2964).
cgtaactgagggcattaat

SEQ ID NO: 379955 - DNA, 19 bp, Homo sapiens
  siRNA target sequence for USP28 (NM_020886.2,2951-2969).
ctgagggcattaatgtgat

SEQ ID NO: 379956 - DNA, 19 bp, Homo sapiens
  siRNA target sequence for USP28 (NM_020886.2,2955-2973).
gggcattaatgtgatgaat

SEQ ID NO: 379957 - DNA, 19 bp, Homo sapiens
  siRNA target sequence for USP28 (NM_020886.2,2987-3005).
cctgcattcaccttatcat

SEQ ID NO: 379958 - DNA, 19 bp, Homo sapiens
  siRNA target sequence for USP28 (NM_020886.2,3037-3055).
gccattgaggtcatgagaa

SEQ ID NO: 379959 - DNA, 19 bp, Homo sapiens
  siRNA target sequence for USP28 (NM_020886.2,3038-3056).
ccattgaggtcatgagaaa

SEQ ID NO: 379960 - DNA, 19 bp, Homo sapiens
  siRNA target sequence for USP28 (NM_020886.2,3043-3061).
gaggtcatgagaaaccatt

SEQ ID NO: 379961 - DNA, 19 bp, Homo sapiens
  siRNA target sequence for USP28 (NM_020886.2,3057-3075).
ccattggtgctcttacctt

SEQ ID NO: 379962 - DNA, 19 bp, Homo sapiens
  siRNA target sequence for USP28 (NM_020886.2,3105-3123).
gtgcctaggggagtttcta

SEQ ID NO: 379963 - DNA, 19 bp, Homo sapiens
  siRNA target sequence for USP28 (NM_020886.2,3201-3219).
cctatgtagccgatttgca

SEQ ID NO: 379964 - DNA, 19 bp, Homo sapiens
  siRNA target sequence for USP28 (NM_020886.2,3218-3236).
cagctgtcatggagtcaat

SEQ ID NO: 379965 - DNA, 19 bp, Homo sapiens
  siRNA target sequence for USP28 (NM_020886.2,3231-3249).
gtcaattcagggagtttca

SEQ ID NO: 379966 - DNA, 19 bp, Homo sapiens
  siRNA target sequence for KIAA1524 (NM_020890.1,139-157).
cgaacgccactcagctttt

SEQ ID NO: 379967 - DNA, 19 bp, Homo sapiens
  siRNA target sequence for KIAA1524 (NM_020890.1,158-176).
gcggcacttggaggtaatt

SEQ ID NO: 379968 - DNA, 19 bp, Homo sapiens
  siRNA target sequence for KIAA1524 (NM_020890.1,159-177).
cggcacttggaggtaattt

SEQ ID NO: 379969 - DNA, 19 bp, Homo sapiens
  siRNA target sequence for KIAA1524 (NM_020890.1,170-188).
ggtaatttctggacagaaa

SEQ ID NO: 379970 - DNA, 19 bp, Homo sapiens
  siRNA target sequence for KIAA1524 (NM_020890.1,189-207).
ctcacacgactatttacat

SEQ ID NO: 379971 - DNA, 19 bp, Homo sapiens
  siRNA target sequence for KIAA1524 (NM_020890.1,191-209).
cacacgactatttacatca

SEQ ID NO: 379972 - DNA, 19 bp, Homo sapiens
  siRNA target sequence for KIAA1524 (NM_020890.1,193-211).
cacgactatttacatcaaa

SEQ ID NO: 379973 - DNA, 19 bp, Homo sapiens
  siRNA target sequence for KIAA1524 (NM_020890.1,198-216).
ctatttacatcaaatcaga

SEQ ID NO: 379974 - DNA, 19 bp, Homo sapiens
  siRNA target sequence for KIAA1524 (NM_020890.1,241-259).
gccttgtagagctacttga

SEQ ID NO: 379975 - DNA, 19 bp, Homo sapiens
  siRNA target sequence for KIAA1524 (NM_020890.1,276-294).
gcttcactgatcttaagta

SEQ ID NO: 379976 - DNA, 19 bp, Homo sapiens
  siRNA target sequence for KIAA1524 (NM_020890.1,299-317).
cggtttgctgtctcaacta

SEQ ID NO: 379977 - DNA, 19 bp, Homo sapiens
  siRNA target sequence for KIAA1524 (NM_020890.1,315-333).
ctagcagtagacattgaaa

SEQ ID NO: 379978 - DNA, 19 bp, Homo sapiens
  siRNA target sequence for KIAA1524 (NM_020890.1,324-342).
gacattgaaaccagagatt

SEQ ID NO: 379979 - DNA, 19 bp, Homo sapiens
  siRNA target sequence for KIAA1524 (NM_020890.1,343-361).
gtcttcagaatacatataa

SEQ ID NO: 379980 - DNA, 19 bp, Homo sapiens
  siRNA target sequence for KIAA1524 (NM_020890.1,393-411).
cggagcagccacactgatt

SEQ ID NO: 379981 - DNA, 19 bp, Homo sapiens
  siRNA target sequence for KIAA1524 (NM_020890.1,406-424).
ctgattcggtgtttttgca

SEQ ID NO: 379982 - DNA, 19 bp, Homo sapiens
  siRNA target sequence for KIAA1524 (NM_020890.1,422-440).
gcagtgcattcaacttcta

SEQ ID NO: 379983 - DNA, 19 bp, Homo sapiens
  siRNA target sequence for KIAA1524 (NM_020890.1,432-450).
caacttctacagaagttaa

SEQ ID NO: 379984 - DNA, 19 bp, Homo sapiens
  siRNA target sequence for KIAA1524 (NM_020890.1,470-488).
ctattctggtgccaatata

SEQ ID NO: 379985 - DNA, 19 bp, Homo sapiens
  siRNA target sequence for KIAA1524 (NM_020890.1,475-493).
ctggtgccaatatagatga

SEQ ID NO: 379986 - DNA, 19 bp, Homo sapiens
  siRNA target sequence for KIAA1524 (NM_020890.1,477-495).
ggtgccaatatagatgaat

SEQ ID NO: 379987 - DNA, 19 bp, Homo sapiens
  siRNA target sequence for KIAA1524 (NM_020890.1,478-496).
gtgccaatatagatgaatt

SEQ ID NO: 379988 - DNA, 19 bp, Homo sapiens
  siRNA target sequence for KIAA1524 (NM_020890.1,502-520).
cgttcctgatagatcacat

SEQ ID NO: 379989 - DNA, 19 bp, Homo sapiens
  siRNA target sequence for KIAA1524 (NM_020890.1,506-524).
cctgatagatcacattcaa

SEQ ID NO: 379990 - DNA, 19 bp, Homo sapiens
  siRNA target sequence for KIAA1524 (NM_020890.1,507-525).
ctgatagatcacattcaat

SEQ ID NO: 379991 - DNA, 19 bp, Homo sapiens
  siRNA target sequence for KIAA1524 (NM_020890.1,509-527).
gatagatcacattcaatct

SEQ ID NO: 379992 - DNA, 19 bp, Homo sapiens
  siRNA target sequence for KIAA1524 (NM_020890.1,558-576).
ggattattggcaaatcttt

SEQ ID NO: 379993 - DNA, 19 bp, Homo sapiens
  siRNA target sequence for KIAA1524 (NM_020890.1,577-595).
gtcggcacaatctttctgt

SEQ ID NO: 379994 - DNA, 19 bp, Homo sapiens
  siRNA target sequence for KIAA1524 (NM_020890.1,592-610).
ctgttcaaacgcacataaa

SEQ ID NO: 379995 - DNA, 19 bp, Homo sapiens
  siRNA target sequence for KIAA1524 (NM_020890.1,594-612).
gttcaaacgcacataaaga

SEQ ID NO: 379996 - DNA, 19 bp, Homo sapiens
  siRNA target sequence for KIAA1524 (NM_020890.1,602-620).
gcacataaagacattgagt

SEQ ID NO: 379997 - DNA, 19 bp, Homo sapiens
  siRNA target sequence for KIAA1524 (NM_020890.1,619-637).
gtaatgtgaaatcttttta

SEQ ID NO: 379998 - DNA, 19 bp, Homo sapiens
  siRNA target sequence for KIAA1524 (NM_020890.1,631-649).
ctttttatcgaactcttat

SEQ ID NO: 379999 - DNA, 19 bp, Homo sapiens
  siRNA target sequence for KIAA1524 (NM_020890.1,653-671).
cttgttggcccatagtagt

SEQ ID NO: 380000 - DNA, 19 bp, Homo sapiens
  siRNA target sequence for KIAA1524 (NM_020890.1,656-674).
gttggcccatagtagttta

SEQ ID NO: 380001 - DNA, 19 bp, Homo sapiens
  siRNA target sequence for KIAA1524 (NM_020890.1,659-677).
ggcccatagtagtttaact

SEQ ID NO: 380002 - DNA, 19 bp, Homo sapiens
  siRNA target sequence for KIAA1524 (NM_020890.1,661-679).
cccatagtagtttaactgt

SEQ ID NO: 380003 - DNA, 19 bp, Homo sapiens
  siRNA target sequence for KIAA1524 (NM_020890.1,680-698).
ggttgtgtttgcactttca

SEQ ID NO: 380004 - DNA, 19 bp, Homo sapiens
  siRNA target sequence for KIAA1524 (NM_020890.1,681-699).
gttgtgtttgcactttcaa

SEQ ID NO: 380005 - DNA, 19 bp, Homo sapiens
  siRNA target sequence for KIAA1524 (NM_020890.1,762-780).
catcagacttttcaactaa

SEQ ID NO: 380006 - DNA, 19 bp, Homo sapiens
  siRNA target sequence for KIAA1524 (NM_020890.1,800-818).
cggtgatggcactctaact

SEQ ID NO: 380007 - DNA, 19 bp, Homo sapiens
  siRNA target sequence for KIAA1524 (NM_020890.1,801-819).
ggtgatggcactctaacta

SEQ ID NO: 380008 - DNA, 19 bp, Homo sapiens
  siRNA target sequence for KIAA1524 (NM_020890.1,804-822).
gatggcactctaactagaa

SEQ ID NO: 380009 - DNA, 19 bp, Homo sapiens
  siRNA target sequence for KIAA1524 (NM_020890.1,809-827).
cactctaactagaaagtat

SEQ ID NO: 380010 - DNA, 19 bp, Homo sapiens
  siRNA target sequence for KIAA1524 (NM_020890.1,849-867).
ctccttaagaatcctaaaa

SEQ ID NO: 380011 - DNA, 19 bp, Homo sapiens
  siRNA target sequence for KIAA1524 (NM_020890.1,1059-1077).
ctgggaagccatactaaat

SEQ ID NO: 380012 - DNA, 19 bp, Homo sapiens
  siRNA target sequence for KIAA1524 (NM_020890.1,1061-1079).
gggaagccatactaaatgt

SEQ ID NO: 380013 - DNA, 19 bp, Homo sapiens
  siRNA target sequence for KIAA1524 (NM_020890.1,1062-1080).
ggaagccatactaaatgtt

SEQ ID NO: 380014 - DNA, 19 bp, Homo sapiens
  siRNA target sequence for KIAA1524 (NM_020890.1,1066-1084).
gccatactaaatgtttaga

SEQ ID NO: 380015 - DNA, 19 bp, Homo sapiens
  siRNA target sequence for KIAA1524 (NM_020890.1,1095-1113).
gctctactgcgctggttaa

SEQ ID NO: 380016 - DNA, 19 bp, Homo sapiens
  siRNA target sequence for KIAA1524 (NM_020890.1,1105-1123).
gctggttaagccaaccttt

SEQ ID NO: 380017 - DNA, 19 bp, Homo sapiens
  siRNA target sequence for KIAA1524 (NM_020890.1,1120-1138).
ctttggacggatcagaaaa

SEQ ID NO: 380018 - DNA, 19 bp, Homo sapiens
  siRNA target sequence for KIAA1524 (NM_020890.1,1124-1142).
ggacggatcagaaaactgt

SEQ ID NO: 380019 - DNA, 19 bp, Homo sapiens
  siRNA target sequence for KIAA1524 (NM_020890.1,1125-1143).
gacggatcagaaaactgtt

SEQ ID NO: 380020 - DNA, 19 bp, Homo sapiens
  siRNA target sequence for KIAA1524 (NM_020890.1,1158-1176).
gagttgttcaaggaaatat

SEQ ID NO: 380021 - DNA, 19 bp, Homo sapiens
  siRNA target sequence for KIAA1524 (NM_020890.1,1187-1205).
catagatgctgctaactgt

SEQ ID NO: 380022 - DNA, 19 bp, Homo sapiens
  siRNA target sequence for KIAA1524 (NM_020890.1,1204-1222).
gttcctcggctgatcgttt

SEQ ID NO: 380023 - DNA, 19 bp, Homo sapiens
  siRNA target sequence for KIAA1524 (NM_020890.1,1207-1225).
cctcggctgatcgttttgt

SEQ ID NO: 380024 - DNA, 19 bp, Homo sapiens
  siRNA target sequence for KIAA1524 (NM_020890.1,1238-1256).
gcctacaatccttgatcaa

SEQ ID NO: 380025 - DNA, 19 bp, Homo sapiens
  siRNA target sequence for KIAA1524 (NM_020890.1,1262-1280).
gttcacagaacaaaatcta

SEQ ID NO: 380026 - DNA, 19 bp, Homo sapiens
  siRNA target sequence for KIAA1524 (NM_020890.1,1278-1296).
ctagatgaggctttaacaa

SEQ ID NO: 380027 - DNA, 19 bp, Homo sapiens
  siRNA target sequence for KIAA1524 (NM_020890.1,1346-1364).
ctgtggagatgatacacta

SEQ ID NO: 380028 - DNA, 19 bp, Homo sapiens
  siRNA target sequence for KIAA1524 (NM_020890.1,1348-1366).
gtggagatgatacactaaa

SEQ ID NO: 380029 - DNA, 19 bp, Homo sapiens
  siRNA target sequence for KIAA1524 (NM_020890.1,1356-1374).
gatacactaaaaatgcata

SEQ ID NO: 380030 - DNA, 19 bp, Homo sapiens
  siRNA target sequence for KIAA1524 (NM_020890.1,1395-1413).
gtcaagtgtaccactctta

SEQ ID NO: 380031 - DNA, 19 bp, Homo sapiens
  siRNA target sequence for KIAA1524 (NM_020890.1,1397-1415).
caagtgtaccactcttata

SEQ ID NO: 380032 - DNA, 19 bp, Homo sapiens
  siRNA target sequence for KIAA1524 (NM_020890.1,1405-1423).
ccactcttatagaacaaca

SEQ ID NO: 380033 - DNA, 19 bp, Homo sapiens
  siRNA target sequence for KIAA1524 (NM_020890.1,1410-1428).
cttatagaacaacaattta

SEQ ID NO: 380034 - DNA, 19 bp, Homo sapiens
  siRNA target sequence for KIAA1524 (NM_020890.1,1448-1466).
gggatttggaacaaaggtt

SEQ ID NO: 380035 - DNA, 19 bp, Homo sapiens
  siRNA target sequence for KIAA1524 (NM_020890.1,1459-1477).
caaaggttgcagattctga

SEQ ID NO: 380036 - DNA, 19 bp, Homo sapiens
  siRNA target sequence for KIAA1524 (NM_020890.1,1468-1486).
cagattctgaattatgcaa

SEQ ID NO: 380037 - DNA, 19 bp, Homo sapiens
  siRNA target sequence for KIAA1524 (NM_020890.1,1513-1531).
ctcttgatttgattaacaa

SEQ ID NO: 380038 - DNA, 19 bp, Homo sapiens
  siRNA target sequence for KIAA1524 (NM_020890.1,1549-1567).
ctggtatggaagtaagctt

SEQ ID NO: 380039 - DNA, 19 bp, Homo sapiens
  siRNA target sequence for KIAA1524 (NM_020890.1,1557-1575).
gaagtaagcttctacaaaa

SEQ ID NO: 380040 - DNA, 19 bp, Homo sapiens
  siRNA target sequence for KIAA1524 (NM_020890.1,1583-1601).
ggacccacgtttgattact

SEQ ID NO: 380041 - DNA, 19 bp, Homo sapiens
  siRNA target sequence for KIAA1524 (NM_020890.1,1646-1664).
gtctggactgagaatatta

SEQ ID NO: 380042 - DNA, 19 bp, Homo sapiens
  siRNA target sequence for KIAA1524 (NM_020890.1,1651-1669).
gactgagaatattattgga

SEQ ID NO: 380043 - DNA, 19 bp, Homo sapiens
  siRNA target sequence for KIAA1524 (NM_020890.1,1672-1690).
ctgctccactgccagattt

SEQ ID NO: 380044 - DNA, 19 bp, Homo sapiens
  siRNA target sequence for KIAA1524 (NM_020890.1,1774-1792).
cctggcaatcatcaaatca

SEQ ID NO: 380045 - DNA, 19 bp, Homo sapiens
  siRNA target sequence for KIAA1524 (NM_020890.1,1793-1811).
cagttttccaacatcaata

SEQ ID NO: 380046 - DNA, 19 bp, Homo sapiens
  siRNA target sequence for KIAA1524 (NM_020890.1,1795-1813).
gttttccaacatcaataaa

SEQ ID NO: 380047 - DNA, 19 bp, Homo sapiens
  siRNA target sequence for KIAA1524 (NM_020890.1,1839-1857).
ggtgttcctggattgaata

SEQ ID NO: 380048 - DNA, 19 bp, Homo sapiens
  siRNA target sequence for KIAA1524 (NM_020890.1,1840-1858).
gtgttcctggattgaatat

SEQ ID NO: 380049 - DNA, 19 bp, Homo sapiens
  siRNA target sequence for KIAA1524 (NM_020890.1,1848-1866).
ggattgaatattgaagaat

SEQ ID NO: 380050 - DNA, 19 bp, Homo sapiens
  siRNA target sequence for KIAA1524 (NM_020890.1,1907-1925).
gatttgtgatgtgagaata

SEQ ID NO: 380051 - DNA, 19 bp, Homo sapiens
  siRNA target sequence for KIAA1524 (NM_020890.1,1912-1930).
gtgatgtgagaatatctga

SEQ ID NO: 380052 - DNA, 19 bp, Homo sapiens
  siRNA target sequence for KIAA1524 (NM_020890.1,1921-1939).
gaatatctgacataatgga

SEQ ID NO: 380053 - DNA, 19 bp, Homo sapiens
  siRNA target sequence for KIAA1524 (NM_020890.1,1927-1945).
ctgacataatggatgtata

SEQ ID NO: 380054 - DNA, 19 bp, Homo sapiens
  siRNA target sequence for KIAA1524 (NM_020890.1,1984-2002).
ggctacaagatcttttgga

SEQ ID NO: 380055 - DNA, 19 bp, Homo sapiens
  siRNA target sequence for KIAA1524 (NM_020890.1,1985-2003).
gctacaagatcttttggaa

SEQ ID NO: 380056 - DNA, 19 bp, Homo sapiens
  siRNA target sequence for KIAA1524 (NM_020890.1,2018-2036).
ccttgcacaggctgataga

SEQ ID NO: 380057 - DNA, 19 bp, Homo sapiens
  siRNA target sequence for KIAA1524 (NM_020890.1,2043-2061).
gctcagcatcgctgtcaaa

SEQ ID NO: 380058 - DNA, 19 bp, Homo sapiens
  siRNA target sequence for KIAA1524 (NM_020890.1,2046-2064).
cagcatcgctgtcaaagaa

SEQ ID NO: 380059 - DNA, 19 bp, Homo sapiens
  siRNA target sequence for KIAA1524 (NM_020890.1,2048-2066).
gcatcgctgtcaaagaact

SEQ ID NO: 380060 - DNA, 19 bp, Homo sapiens
  siRNA target sequence for KIAA1524 (NM_020890.1,2147-2165).
gaaggcgcagcaagttgaa

SEQ ID NO: 380061 - DNA, 19 bp, Homo sapiens
  siRNA target sequence for KIAA1524 (NM_020890.1,2152-2170).
cgcagcaagttgaatcaga

SEQ ID NO: 380062 - DNA, 19 bp, Homo sapiens
  siRNA target sequence for KIAA1524 (NM_020890.1,2169-2187).
gaaagagcgcagagtgata

SEQ ID NO: 380063 - DNA, 19 bp, Homo sapiens
  siRNA target sequence for KIAA1524 (NM_020890.1,2325-2343).
gattctctgaataaacaaa

SEQ ID NO: 380064 - DNA, 19 bp, Homo sapiens
  siRNA target sequence for KIAA1524 (NM_020890.1,2395-2413).
gtattgcccaattaataga

SEQ ID NO: 380065 - DNA, 19 bp, Homo sapiens
  siRNA target sequence for KIAA1524 (NM_020890.1,2401-2419).
cccaattaatagagaaaga

SEQ ID NO: 380066 - DNA, 19 bp, Homo sapiens
  siRNA target sequence for KIAA1524 (NM_020890.1,2447-2465).
gctagtagacagagaacat

SEQ ID NO: 380067 - DNA, 19 bp, Homo sapiens
  siRNA target sequence for KIAA1524 (NM_020890.1,2448-2466).
ctagtagacagagaacata

SEQ ID NO: 380068 - DNA, 19 bp, Homo sapiens
  siRNA target sequence for KIAA1524 (NM_020890.1,2596-2614).
gaaaagagttgagcattaa

SEQ ID NO: 380069 - DNA, 19 bp, Homo sapiens
  siRNA target sequence for KIAA1524 (NM_020890.1,2620-2638).
cctccctagaggttcaaaa

SEQ ID NO: 380070 - DNA, 19 bp, Homo sapiens
  siRNA target sequence for KIAA1524 (NM_020890.1,2630-2648).
ggttcaaaaggcacaatta

SEQ ID NO: 380071 - DNA, 19 bp, Homo sapiens
  siRNA target sequence for KIAA1524 (NM_020890.1,2655-2673).
cgtttggaagagaaagagt

SEQ ID NO: 380072 - DNA, 19 bp, Homo sapiens
  siRNA target sequence for KIAA1524 (NM_020890.1,2709-2727).
cactcccacatgatagcaa

SEQ ID NO: 380073 - DNA, 19 bp, Homo sapiens
  siRNA target sequence for KIAA1533 (NM_020895.2,401-419).
cttataagcagcgtaatga

SEQ ID NO: 380074 - DNA, 19 bp, Homo sapiens
  siRNA target sequence for KIAA1533 (NM_020895.2,659-677).
cggagagcgagaagcattt

SEQ ID NO: 380075 - DNA, 19 bp, Homo sapiens
  siRNA target sequence for KIAA1533 (NM_020895.2,661-679).
gagagcgagaagcatttct

SEQ ID NO: 380076 - DNA, 19 bp, Homo sapiens
  siRNA target sequence for KIAA1533 (NM_020895.2,970-988).
catgtcacgcccaaccttt

SEQ ID NO: 380077 - DNA, 19 bp, Homo sapiens
  siRNA target sequence for KIAA1533 (NM_020895.2,1161-1179).
cagtgaggagctattgaca

SEQ ID NO: 380078 - DNA, 19 bp, Homo sapiens
  siRNA target sequence for KIAA1533 (NM_020895.2,1171-1189).
ctattgacagacacaagta

SEQ ID NO: 380079 - DNA, 19 bp, Homo sapiens
  siRNA target sequence for KIAA1533 (NM_020895.2,1689-1707).
ctcgtggagcggcattgaa

SEQ ID NO: 380080 - DNA, 19 bp, Homo sapiens
  siRNA target sequence for KIAA1533 (NM_020895.2,1691-1709).
cgtggagcggcattgaaga

SEQ ID NO: 380081 - DNA, 19 bp, Homo sapiens
  siRNA target sequence for KIAA1533 (NM_020895.2,1694-1712).
ggagcggcattgaagacta

SEQ ID NO: 380082 - DNA, 19 bp, Homo sapiens
  siRNA target sequence for KIAA1533 (NM_020895.2,1695-1713).
gagcggcattgaagactat

SEQ ID NO: 380083 - DNA, 19 bp, Homo sapiens
  siRNA target sequence for KIAA1533 (NM_020895.2,1697-1715).
gcggcattgaagactattt

SEQ ID NO: 380084 - DNA, 19 bp, Homo sapiens
  siRNA target sequence for KIAA1536 (NM_020898.1,94-112).
gtggagtcaactttctcaa

SEQ ID NO: 380085 - DNA, 19 bp, Homo sapiens
  siRNA target sequence for KIAA1536 (NM_020898.1,97-115).
gagtcaactttctcaatgt

SEQ ID NO: 380086 - DNA, 19 bp, Homo sapiens
  siRNA target sequence for KIAA1536 (NM_020898.1,223-241).
cctgtgttcgggattacca

SEQ ID NO: 380087 - DNA, 19 bp, Homo sapiens
  siRNA target sequence for KIAA1536 (NM_020898.1,263-281).
gcctgaaagtacaactgat

SEQ ID NO: 380088 - DNA, 19 bp, Homo sapiens
  siRNA target sequence for KIAA1536 (NM_020898.1,487-505).
ccaaggcaactgtgttaca

SEQ ID NO: 380089 - DNA, 19 bp, Homo sapiens
  siRNA target sequence for KIAA1536 (NM_020898.1,835-853).
ccctgactcgggaacaaga

SEQ ID NO: 380090 - DNA, 19 bp, Homo sapiens
  siRNA target sequence for KIAA1536 (NM_020898.1,927-945).
caggagaaccatcacttaa

SEQ ID NO: 380091 - DNA, 19 bp, Homo sapiens
  siRNA target sequence for KIAA1536 (NM_020898.1,996-1014).
gctcagcgactgaaagaca

SEQ ID NO: 380092 - DNA, 19 bp, Homo sapiens
  siRNA target sequence for KIAA1536 (NM_020898.1,1180-1198).
gcaccatagccgaactaca

SEQ ID NO: 380093 - DNA, 19 bp, Homo sapiens
  siRNA target sequence for KIAA1536 (NM_020898.1,1209-1227).
ctggaagtggctgaagtta

SEQ ID NO: 380094 - DNA, 19 bp, Homo sapiens
  siRNA target sequence for KIAA1536 (NM_020898.1,1345-1363).
gtgcagagatacttcgatt

SEQ ID NO: 380095 - DNA, 19 bp, Homo sapiens
  siRNA target sequence for KIAA1536 (NM_020898.1,1443-1461).
gtacagttgtcagaaagta

SEQ ID NO: 380096 - DNA, 19 bp, Homo sapiens
  siRNA target sequence for KIAA1536 (NM_020898.1,1494-1512).
cgtgtgctccagaaggaaa

SEQ ID NO: 380097 - DNA, 19 bp, Homo sapiens
  siRNA target sequence for KIAA1536 (NM_020898.1,1765-1783).
cttctccccttgttgtcat

SEQ ID NO: 380098 - DNA, 19 bp, Homo sapiens
  siRNA target sequence for KIAA1536 (NM_020898.1,1895-1913).
gggtgaggaggccaactta

SEQ ID NO: 380099 - DNA, 19 bp, Homo sapiens
  siRNA target sequence for KIAA1536 (NM_020898.1,1930-1948).
gcagtgccttctatgacat

SEQ ID NO: 380100 - DNA, 19 bp, Homo sapiens
  siRNA target sequence for KIAA1536 (NM_020898.1,1965-1983).
gtgggtaccctgtcagaaa

SEQ ID NO: 380101 - DNA, 19 bp, Homo sapiens
  siRNA target sequence for KIAA1536 (NM_020898.1,2015-2033).
gaaggagtgtcctatctgt

SEQ ID NO: 380102 - DNA, 19 bp, Homo sapiens
  siRNA target sequence for KIAA1536 (NM_020898.1,2085-2103).
gatggacacttctttttca

SEQ ID NO: 380103 - DNA, 19 bp, Homo sapiens
  siRNA target sequence for EPB41L5 (NM_020909.2,522-540).
ggagctaacccggtattta

SEQ ID NO: 380104 - DNA, 19 bp, Homo sapiens
  siRNA target sequence for EPB41L5 (NM_020909.2,523-541).
gagctaacccggtatttat

SEQ ID NO: 380105 - DNA, 19 bp, Homo sapiens
  siRNA target sequence for EPB41L5 (NM_020909.2,525-543).
gctaacccggtatttattt

SEQ ID NO: 380106 - DNA, 19 bp, Homo sapiens
  siRNA target sequence for EPB41L5 (NM_020909.2,531-549).
ccggtatttatttgttctt

SEQ ID NO: 380107 - DNA, 19 bp, Homo sapiens
  siRNA target sequence for EPB41L5 (NM_020909.2,568-586).
ctcagtggaaaattagact

SEQ ID NO: 380108 - DNA, 19 bp, Homo sapiens
  siRNA target sequence for EPB41L5 (NM_020909.2,698-716).
ctattcagactgaagagat

SEQ ID NO: 380109 - DNA, 19 bp, Homo sapiens
  siRNA target sequence for EPB41L5 (NM_020909.2,766-784).
gcacaggctgaaaccaatt

SEQ ID NO: 380110 - DNA, 19 bp, Homo sapiens
  siRNA target sequence for EPB41L5 (NM_020909.2,813-831).
gtatggggttgatatgcat

SEQ ID NO: 380111 - DNA, 19 bp, Homo sapiens
  siRNA target sequence for EPB41L5 (NM_020909.2,841-859).
gctagagatgggaatgact

SEQ ID NO: 380112 - DNA, 19 bp, Homo sapiens
  siRNA target sequence for EPB41L5 (NM_020909.2,842-860).
ctagagatgggaatgacta

SEQ ID NO: 380113 - DNA, 19 bp, Homo sapiens
  siRNA target sequence for EPB41L5 (NM_020909.2,847-865).
gatgggaatgactatagtt

SEQ ID NO: 380114 - DNA, 19 bp, Homo sapiens
  siRNA target sequence for EPB41L5 (NM_020909.2,858-876).
ctatagtttgggactaaca

SEQ ID NO: 380115 - DNA, 19 bp, Homo sapiens
  siRNA target sequence for EPB41L5 (NM_020909.2,878-896).
caacaggagtccttgtttt

SEQ ID NO: 380116 - DNA, 19 bp, Homo sapiens
  siRNA target sequence for EPB41L5 (NM_020909.2,972-990).
cttggtggttgtagaagat

SEQ ID NO: 380117 - DNA, 19 bp, Homo sapiens
  siRNA target sequence for EPB41L5 (NM_020909.2,1124-1142).
ctcatcgatcaggatttat

SEQ ID NO: 380118 - DNA, 19 bp, Homo sapiens
  siRNA target sequence for EPB41L5 (NM_020909.2,1144-1162).
cgactaggatcacgattta

SEQ ID NO: 380119 - DNA, 19 bp, Homo sapiens
  siRNA target sequence for EPB41L5 (NM_020909.2,1147-1165).
ctaggatcacgatttagat

SEQ ID NO: 380120 - DNA, 19 bp, Homo sapiens
  siRNA target sequence for EPB41L5 (NM_020909.2,1180-1198).
gagtatcagaccacaaaaa

SEQ ID NO: 380121 - DNA, 19 bp, Homo sapiens
  siRNA target sequence for EPB41L5 (NM_020909.2,1236-1254).
gcccagcaaacgatattct

SEQ ID NO: 380122 - DNA, 19 bp, Homo sapiens
  siRNA target sequence for EPB41L5 (NM_020909.2,1237-1255).
cccagcaaacgatattcta

SEQ ID NO: 380123 - DNA, 19 bp, Homo sapiens
  siRNA target sequence for EPB41L5 (NM_020909.2,1253-1271).
ctagacgaactctacaaat

SEQ ID NO: 380124 - DNA, 19 bp, Homo sapiens
  siRNA target sequence for EPB41L5 (NM_020909.2,1297-1315).
gaacttagtgttcacaata

SEQ ID NO: 380125 - DNA, 19 bp, Homo sapiens
  siRNA target sequence for EPB41L5 (NM_020909.2,1372-1390).
cctgtgagtccttccattt

SEQ ID NO: 380126 - DNA, 19 bp, Homo sapiens
  siRNA target sequence for EPB41L5 (NM_020909.2,1400-1418).
ctgtgccagtggagataga

SEQ ID NO: 380127 - DNA, 19 bp, Homo sapiens
  siRNA target sequence for EPB41L5 (NM_020909.2,1469-1487).
ctctgaatattgatttgct

SEQ ID NO: 380128 - DNA, 19 bp, Homo sapiens
  siRNA target sequence for EPB41L5 (NM_020909.2,1486-1504).
ctgaatagcccagacttat

SEQ ID NO: 380129 - DNA, 19 bp, Homo sapiens
  siRNA target sequence for EPB41L5 (NM_020909.2,1500-1518).
cttattggaagcaacgatt

SEQ ID NO: 380130 - DNA, 19 bp, Homo sapiens
  siRNA target sequence for EPB41L5 (NM_020909.2,1511-1529).
caacgattggtgatgtaat

SEQ ID NO: 380131 - DNA, 19 bp, Homo sapiens
  siRNA target sequence for EPB41L5 (NM_020909.2,1562-1580).
cactgaatgacgttaatgt

SEQ ID NO: 380132 - DNA, 19 bp, Homo sapiens
  siRNA target sequence for EPB41L5 (NM_020909.2,1604-1622).
gggaacctgaagttgaata

SEQ ID NO: 380133 - DNA, 19 bp, Homo sapiens
  siRNA target sequence for EPB41L5 (NM_020909.2,1615-1633).
gttgaatatgagacattaa

SEQ ID NO: 380134 - DNA, 19 bp, Homo sapiens
  siRNA target sequence for EPB41L5 (NM_020909.2,1693-1711).
cgatccaacatcgatgtta

SEQ ID NO: 380135 - DNA, 19 bp, Homo sapiens
  siRNA target sequence for EPB41L5 (NM_020909.2,1694-1712).
gatccaacatcgatgttaa

SEQ ID NO: 380136 - DNA, 19 bp, Homo sapiens
  siRNA target sequence for EPB41L5 (NM_020909.2,1697-1715).
ccaacatcgatgttaacat

SEQ ID NO: 380137 - DNA, 19 bp, Homo sapiens
  siRNA target sequence for EPB41L5 (NM_020909.2,1775-1793).
gcccaggattgaatgtcat

SEQ ID NO: 380138 - DNA, 19 bp, Homo sapiens
  siRNA target sequence for EPB41L5 (NM_020909.2,1801-1819).
cctcctgacttcaagagta

SEQ ID NO: 380139 - DNA, 19 bp, Homo sapiens
  siRNA target sequence for EPB41L5 (NM_020909.2,1840-1858).
gaagcagtgcataaggtta

SEQ ID NO: 380140 - DNA, 19 bp, Homo sapiens
  siRNA target sequence for EPB41L5 (NM_020909.2,1843-1861).
gcagtgcataaggttacaa

SEQ ID NO: 380141 - DNA, 19 bp, Homo sapiens
  siRNA target sequence for EPB41L5 (NM_020909.2,1844-1862).
cagtgcataaggttacaaa

SEQ ID NO: 380142 - DNA, 19 bp, Homo sapiens
  siRNA target sequence for EPB41L5 (NM_020909.2,1911-1929).
cacaaacagtgctgtgtta

SEQ ID NO: 380143 - DNA, 19 bp, Homo sapiens
  siRNA target sequence for EPB41L5 (NM_020909.2,1919-1937).
gtgctgtgttaaatgagaa

SEQ ID NO: 380144 - DNA, 19 bp, Homo sapiens
  siRNA target sequence for EPB41L5 (NM_020909.2,1968-1986).
gactctgatgcttatcaca

SEQ ID NO: 380145 - DNA, 19 bp, Homo sapiens
  siRNA target sequence for EPB41L5 (NM_020909.2,1992-2010).
cgacagtggttctgttcta

SEQ ID NO: 380146 - DNA, 19 bp, Homo sapiens
  siRNA target sequence for EPB41L5 (NM_020909.2,1997-2015).
gtggttctgttctaaagga

SEQ ID NO: 380147 - DNA, 19 bp, Homo sapiens
  siRNA target sequence for EPB41L5 (NM_020909.2,2035-2053).
gccttgcttgcatctctaa

SEQ ID NO: 380148 - DNA, 19 bp, Homo sapiens
  siRNA target sequence for EPB41L5 (NM_020909.2,2054-2072).
ctgagaatctaattgatca

SEQ ID NO: 380149 - DNA, 19 bp, Homo sapiens
  siRNA target sequence for EPB41L5 (NM_020909.2,2109-2127).
cacaccccggtggattgtt

SEQ ID NO: 380150 - DNA, 19 bp, Homo sapiens
  siRNA target sequence for EPB41L5 (NM_020909.2,2133-2151).
gagtggtgccatgtctaat

SEQ ID NO: 380151 - DNA, 19 bp, Homo sapiens
  siRNA target sequence for EPB41L5 (NM_020909.2,2152-2170).
ggacttgcgggatgtgaaa

SEQ ID NO: 380152 - DNA, 19 bp, Homo sapiens
  siRNA target sequence for EPB41L5 (NM_020909.2,2153-2171).
gacttgcgggatgtgaaat

SEQ ID NO: 380153 - DNA, 19 bp, Homo sapiens
  siRNA target sequence for EPB41L5 (NM_020909.2,2159-2177).
cgggatgtgaaatgctttt

SEQ ID NO: 380154 - DNA, 19 bp, Homo sapiens
  siRNA target sequence for EPB41L5 (NM_020909.2,2187-2205).
ggagggacatggtaataaa

SEQ ID NO: 380155 - DNA, 19 bp, Homo sapiens
  siRNA target sequence for EPB41L5 (NM_020909.2,2190-2208).
gggacatggtaataaagat

SEQ ID NO: 380156 - DNA, 19 bp, Homo sapiens
  siRNA target sequence for KIAA1587 (NM_020932.1,275-293).
gcagctggggcgaaatgca

SEQ ID NO: 380157 - DNA, 19 bp, Homo sapiens
  siRNA target sequence for KIAA1587 (NM_020932.1,1441-1459).
ccgagcacattgtttagct

SEQ ID NO: 380158 - DNA, 19 bp, Homo sapiens
  siRNA target sequence for KIAA1587 (NM_020932.1,1477-1495).
cggaacccctccaagtgtt

SEQ ID NO: 380159 - DNA, 19 bp, Homo sapiens
  siRNA target sequence for KIAA1587 (NM_020932.1,1562-1580).
gtgcagaaggccctataga

SEQ ID NO: 380160 - DNA, 19 bp, Homo sapiens
  siRNA target sequence for KIAA1587 (NM_020932.1,1564-1582).
gcagaaggccctatagaat

SEQ ID NO: 380161 - DNA, 19 bp, Homo sapiens
  siRNA target sequence for KIAA1587 (NM_020932.1,1603-1621).
gagagccccaactccatta

SEQ ID NO: 380162 - DNA, 19 bp, Homo sapiens
  siRNA target sequence for KIAA1587 (NM_020932.1,1605-1623).
gagccccaactccattagt

SEQ ID NO: 380163 - DNA, 19 bp, Homo sapiens
  siRNA target sequence for KIAA1587 (NM_020932.1,1607-1625).
gccccaactccattagtat

SEQ ID NO: 380164 - DNA, 19 bp, Homo sapiens
  siRNA target sequence for KIAA1587 (NM_020932.1,1610-1628).
ccaactccattagtattat

SEQ ID NO: 380165 - DNA, 19 bp, Homo sapiens
  siRNA target sequence for KIAA1587 (NM_020932.1,1738-1756).
cctatccgggagtctgaaa

SEQ ID NO: 380166 - DNA, 19 bp, Homo sapiens
  siRNA target sequence for KIAA1587 (NM_020932.1,1739-1757).
ctatccgggagtctgaaat

SEQ ID NO: 380167 - DNA, 19 bp, Homo sapiens
  siRNA target sequence for KIAA1587 (NM_020932.1,1749-1767).
gtctgaaatgcgggaatat

SEQ ID NO: 380168 - DNA, 19 bp, Homo sapiens
  siRNA target sequence for KIAA1587 (NM_020932.1,1751-1769).
ctgaaatgcgggaatatat

SEQ ID NO: 380169 - DNA, 19 bp, Homo sapiens
  siRNA target sequence for KIAA1587 (NM_020932.1,1758-1776).
gcgggaatatattgttaaa

SEQ ID NO: 380170 - DNA, 19 bp, Homo sapiens
  siRNA target sequence for KIAA1587 (NM_020932.1,1899-1917).
gggacctgtgccctttgaa

SEQ ID NO: 380171 - DNA, 19 bp, Homo sapiens
  siRNA target sequence for KIAA1587 (NM_020932.1,2108-2126).
ggcagcgttacttagacta

SEQ ID NO: 380172 - DNA, 19 bp, Homo sapiens
  siRNA target sequence for KIAA1587 (NM_020932.1,2129-2147).
ggccagtaactgactgtaa

SEQ ID NO: 380173 - DNA, 19 bp, Homo sapiens
  siRNA target sequence for KIAA1587 (NM_020932.1,2130-2148).
gccagtaactgactgtaaa

SEQ ID NO: 380174 - DNA, 19 bp, Homo sapiens
  siRNA target sequence for KIAA1587 (NM_020932.1,2144-2162).
gtaaaccagtggagtatga

SEQ ID NO: 380175 - DNA, 19 bp, Homo sapiens
  siRNA target sequence for KIAA1587 (NM_020932.1,2176-2194).
ccaagatcccacctagaaa

SEQ ID NO: 380176 - DNA, 19 bp, Homo sapiens
  siRNA target sequence for KIAA1587 (NM_020932.1,2214-2232).
gaagttcatggcgaaaata

SEQ ID NO: 380177 - DNA, 19 bp, Homo sapiens
  siRNA target sequence for KIAA1587 (NM_020932.1,2217-2235).
gttcatggcgaaaatatat

SEQ ID NO: 380178 - DNA, 19 bp, Homo sapiens
  siRNA target sequence for KIAA1587 (NM_020932.1,2251-2269).
gattggccagagaaataca

SEQ ID NO: 380179 - DNA, 19 bp, Homo sapiens
  siRNA target sequence for KIAA1587 (NM_020932.1,2316-2334).
gcaggctctccctcacttt

SEQ ID NO: 380180 - DNA, 19 bp, Homo sapiens
  siRNA target sequence for KIAA1587 (NM_020932.1,2367-2385).
ggtaccatcccctgattca

SEQ ID NO: 380181 - DNA, 19 bp, Homo sapiens
  siRNA target sequence for KIAA1587 (NM_020932.1,2423-2441).
catggcctgagtcaagatt

SEQ ID NO: 380182 - DNA, 19 bp, Homo sapiens
  siRNA target sequence for KIAA1587 (NM_020932.1,2476-2494).
ctgcttatggattcaacta

SEQ ID NO: 380183 - DNA, 19 bp, Homo sapiens
  siRNA target sequence for KIAA1587 (NM_020932.1,2492-2510).
ctaagctgcctataccaaa

SEQ ID NO: 380184 - DNA, 19 bp, Homo sapiens
  siRNA target sequence for KIAA1587 (NM_020932.1,2501-2519).
ctataccaaagaaaggaat

SEQ ID NO: 380185 - DNA, 19 bp, Homo sapiens
  siRNA target sequence for KIAA1587 (NM_020932.1,2536-2554).
cgagagtgcagcaaagtgt

SEQ ID NO: 380186 - DNA, 19 bp, Homo sapiens
  siRNA target sequence for KIAA1587 (NM_020932.1,2582-2600).
gcaccctgaaccatgtcta

SEQ ID NO: 380187 - DNA, 19 bp, Homo sapiens
  siRNA target sequence for KIAA1587 (NM_020932.1,2583-2601).
caccctgaaccatgtctat

SEQ ID NO: 380188 - DNA, 19 bp, Homo sapiens
  siRNA target sequence for KIAA1587 (NM_020932.1,2626-2644).
cccaggaatcactcctata

SEQ ID NO: 380189 - DNA, 19 bp, Homo sapiens
  siRNA target sequence for KIAA1587 (NM_020932.1,2628-2646).
caggaatcactcctatact

SEQ ID NO: 380190 - DNA, 19 bp, Homo sapiens
  siRNA target sequence for KIAA1587 (NM_020932.1,2725-2743).
caggtcctaagcttcatct

SEQ ID NO: 380191 - DNA, 19 bp, Homo sapiens
  siRNA target sequence for KIAA1587 (NM_020932.1,2727-2745).
ggtcctaagcttcatcttt

SEQ ID NO: 380192 - DNA, 19 bp, Homo sapiens
  siRNA target sequence for KIAA1587 (NM_020932.1,2824-2842).
gtgattacctgcagatact

SEQ ID NO: 380193 - DNA, 19 bp, Homo sapiens
  siRNA target sequence for KIAA1587 (NM_020932.1,2841-2859).
cttgagtcagcgctatata

SEQ ID NO: 380194 - DNA, 19 bp, Homo sapiens
  siRNA target sequence for KIAA1587 (NM_020932.1,2882-2900).
gtgatccagtgcaatatga

SEQ ID NO: 380195 - DNA, 19 bp, Homo sapiens
  siRNA target sequence for KIAA1587 (NM_020932.1,2884-2902).
gatccagtgcaatatgagt

SEQ ID NO: 380196 - DNA, 19 bp, Homo sapiens
  siRNA target sequence for KIAA1587 (NM_020932.1,2888-2906).
cagtgcaatatgagtttgt

SEQ ID NO: 380197 - DNA, 19 bp, Homo sapiens
  siRNA target sequence for KIAA1587 (NM_020932.1,3047-3065).
ggcacaggcaaatctttgt

SEQ ID NO: 380198 - DNA, 19 bp, Homo sapiens
  siRNA target sequence for CPNE5 (NM_020939.1,199-217).
cccactgtgcgtcatgtat

SEQ ID NO: 380199 - DNA, 19 bp, Homo sapiens
  siRNA target sequence for CPNE5 (NM_020939.1,200-218).
ccactgtgcgtcatgtata

SEQ ID NO: 380200 - DNA, 19 bp, Homo sapiens
  siRNA target sequence for CPNE5 (NM_020939.1,334-352).
gcagaacctccgttttgat

SEQ ID NO: 380201 - DNA, 19 bp, Homo sapiens
  siRNA target sequence for CPNE5 (NM_020939.1,337-355).
gaacctccgttttgatcta

SEQ ID NO: 380202 - DNA, 19 bp, Homo sapiens
  siRNA target sequence for CPNE5 (NM_020939.1,358-376).
cgacgttgactctaagagt

SEQ ID NO: 380203 - DNA, 19 bp, Homo sapiens
  siRNA target sequence for CPNE5 (NM_020939.1,373-391).
gagtcctgatttatccaaa

SEQ ID NO: 380204 - DNA, 19 bp, Homo sapiens
  siRNA target sequence for CPNE5 (NM_020939.1,479-497).
gcattcagcctgaattcca

SEQ ID NO: 380205 - DNA, 19 bp, Homo sapiens
  siRNA target sequence for CPNE5 (NM_020939.1,657-675).
ctgaccccttcttggtatt

SEQ ID NO: 380206 - DNA, 19 bp, Homo sapiens
  siRNA target sequence for CPNE5 (NM_020939.1,893-911).
cgtgggcagagccaattca

SEQ ID NO: 380207 - DNA, 19 bp, Homo sapiens
  siRNA target sequence for CPNE5 (NM_020939.1,894-912).
gtgggcagagccaattcaa

SEQ ID NO: 380208 - DNA, 19 bp, Homo sapiens
  siRNA target sequence for CPNE5 (NM_020939.1,897-915).
ggcagagccaattcaacat

SEQ ID NO: 380209 - DNA, 19 bp, Homo sapiens
  siRNA target sequence for CPNE5 (NM_020939.1,901-919).
gagccaattcaacatctat

SEQ ID NO: 380210 - DNA, 19 bp, Homo sapiens
  siRNA target sequence for CPNE5 (NM_020939.1,1037-1055).
gggacccagatcaacttca

SEQ ID NO: 380211 - DNA, 19 bp, Homo sapiens
  siRNA target sequence for CPNE5 (NM_020939.1,1252-1270).
ccacgagttcccactgaat

SEQ ID NO: 380212 - DNA, 19 bp, Homo sapiens
  siRNA target sequence for KIAA1609 (NM_020947.2,223-241).
cccgaatgtctcatccaaa

SEQ ID NO: 380213 - DNA, 19 bp, Homo sapiens
  siRNA target sequence for KIAA1609 (NM_020947.2,224-242).
ccgaatgtctcatccaaat

SEQ ID NO: 380214 - DNA, 19 bp, Homo sapiens
  siRNA target sequence for KIAA1609 (NM_020947.2,298-316).
ggtcaccaggctgtatgat

SEQ ID NO: 380215 - DNA, 19 bp, Homo sapiens
  siRNA target sequence for KIAA1609 (NM_020947.2,479-497).
gccagagaagtccaaaagt

SEQ ID NO: 380216 - DNA, 19 bp, Homo sapiens
  siRNA target sequence for KIAA1609 (NM_020947.2,665-683).
cagtggctggactatgact

SEQ ID NO: 380217 - DNA, 19 bp, Homo sapiens
  siRNA target sequence for KIAA1609 (NM_020947.2,723-741).
cccatgtggccatattcct

SEQ ID NO: 380218 - DNA, 19 bp, Homo sapiens
  siRNA target sequence for KIAA1609 (NM_020947.2,1051-1069).
ggtgaagcctcagtttcaa

SEQ ID NO: 380219 - DNA, 19 bp, Homo sapiens
  siRNA target sequence for KIAA1622 (NM_020958.2,369-387).
caagtgtgattgcaaatct

SEQ ID NO: 380220 - DNA, 19 bp, Homo sapiens
  siRNA target sequence for KIAA1622 (NM_020958.2,381-399).
caaatctcccatttttgat

SEQ ID NO: 380221 - DNA, 19 bp, Homo sapiens
  siRNA target sequence for KIAA1622 (NM_020958.2,451-469).
ccatgaggatgcacactta

SEQ ID NO: 380222 - DNA, 19 bp, Homo sapiens
  siRNA target sequence for KIAA1622 (NM_020958.2,455-473).
gaggatgcacacttattta

SEQ ID NO: 380223 - DNA, 19 bp, Homo sapiens
  siRNA target sequence for KIAA1622 (NM_020958.2,480-498).
gagtatggatctcacatat

SEQ ID NO: 380224 - DNA, 19 bp, Homo sapiens
  siRNA target sequence for GPR107 (NM_020960.1,164-182).
ggcataaagttcatctgaa

SEQ ID NO: 380225 - DNA, 19 bp, Homo sapiens
  siRNA target sequence for GPR107 (NM_020960.1,278-296).
gcctagaccgtacaaagaa

SEQ ID NO: 380226 - DNA, 19 bp, Homo sapiens
  siRNA target sequence for GPR107 (NM_020960.1,358-376).
gtctctgtcacccttttaa

SEQ ID NO: 380227 - DNA, 19 bp, Homo sapiens
  siRNA target sequence for GPR107 (NM_020960.1,389-407).
ccagaagtgaggtaagagt

SEQ ID NO: 380228 - DNA, 19 bp, Homo sapiens
  siRNA target sequence for GPR107 (NM_020960.1,424-442).
gctggtacccagttaccaa

SEQ ID NO: 380229 - DNA, 19 bp, Homo sapiens
  siRNA target sequence for GPR107 (NM_020960.1,425-443).
ctggtacccagttaccaaa

SEQ ID NO: 380230 - DNA, 19 bp, Homo sapiens
  siRNA target sequence for GPR107 (NM_020960.1,428-446).
gtacccagttaccaaagat

SEQ ID NO: 380231 - DNA, 19 bp, Homo sapiens
  siRNA target sequence for GPR107 (NM_020960.1,431-449).
cccagttaccaaagatcat

SEQ ID NO: 380232 - DNA, 19 bp, Homo sapiens
  siRNA target sequence for GPR107 (NM_020960.1,541-559).
ggtggaaagtctaaaagaa

SEQ ID NO: 380233 - DNA, 19 bp, Homo sapiens
  siRNA target sequence for GPR107 (NM_020960.1,577-595).
gccatgggagagaaatcct

SEQ ID NO: 380234 - DNA, 19 bp, Homo sapiens
  siRNA target sequence for GPR107 (NM_020960.1,618-636).
ggcagtgtcatttcagttt

SEQ ID NO: 380235 - DNA, 19 bp, Homo sapiens
  siRNA target sequence for GPR107 (NM_020960.1,660-678).
ccaagaaggcctttacagt

SEQ ID NO: 380236 - DNA, 19 bp, Homo sapiens
  siRNA target sequence for GPR107 (NM_020960.1,668-686).
gcctttacagtctttattt

SEQ ID NO: 380237 - DNA, 19 bp, Homo sapiens
  siRNA target sequence for GPR107 (NM_020960.1,728-746).
cattcagccttgatattga

SEQ ID NO: 380238 - DNA, 19 bp, Homo sapiens
  siRNA target sequence for GPR107 (NM_020960.1,774-792).
cctctcagcaggagaaatt

SEQ ID NO: 380239 - DNA, 19 bp, Homo sapiens
  siRNA target sequence for GPR107 (NM_020960.1,851-869).
ggattcatatccttcgaaa

SEQ ID NO: 380240 - DNA, 19 bp, Homo sapiens
  siRNA target sequence for GPR107 (NM_020960.1,852-870).
gattcatatccttcgaaaa

SEQ ID NO: 380241 - DNA, 19 bp, Homo sapiens
  siRNA target sequence for GPR107 (NM_020960.1,866-884).
gaaaacgacggaatgatgt

SEQ ID NO: 380242 - DNA, 19 bp, Homo sapiens
  siRNA target sequence for GPR107 (NM_020960.1,871-889).
cgacggaatgatgtattta

SEQ ID NO: 380243 - DNA, 19 bp, Homo sapiens
  siRNA target sequence for GPR107 (NM_020960.1,872-890).
gacggaatgatgtatttaa

SEQ ID NO: 380244 - DNA, 19 bp, Homo sapiens
  siRNA target sequence for GPR107 (NM_020960.1,895-913).
cactggctgggctttcatt

SEQ ID NO: 380245 - DNA, 19 bp, Homo sapiens
  siRNA target sequence for KIAA1627 (NM_020961.2,205-223).
gcattggtgccgtgttaaa

SEQ ID NO: 380246 - DNA, 19 bp, Homo sapiens
  siRNA target sequence for KIAA1627 (NM_020961.2,206-224).
cattggtgccgtgttaaat

SEQ ID NO: 380247 - DNA, 19 bp, Homo sapiens
  siRNA target sequence for KIAA1627 (NM_020961.2,215-233).
cgtgttaaatagcaaagat

SEQ ID NO: 380248 - DNA, 19 bp, Homo sapiens
  siRNA target sequence for KIAA1627 (NM_020961.2,291-309).
gctccaaatgcaaaacgta

SEQ ID NO: 380249 - DNA, 19 bp, Homo sapiens
  siRNA target sequence for KIAA1627 (NM_020961.2,295-313).
caaatgcaaaacgtaagta

SEQ ID NO: 380250 - DNA, 19 bp, Homo sapiens
  siRNA target sequence for KIAA1627 (NM_020961.2,374-392).
gcaacaggatgaagaaaat

SEQ ID NO: 380251 - DNA, 19 bp, Homo sapiens
  siRNA target sequence for KIAA1627 (NM_020961.2,408-426).
gagatttacaaagattcta

SEQ ID NO: 380252 - DNA, 19 bp, Homo sapiens
  siRNA target sequence for KIAA1627 (NM_020961.2,449-467).
gagcttaaatccccataat

SEQ ID NO: 380253 - DNA, 19 bp, Homo sapiens
  siRNA target sequence for KIAA1627 (NM_020961.2,451-469).
gcttaaatccccataatga

SEQ ID NO: 380254 - DNA, 19 bp, Homo sapiens
  siRNA target sequence for KIAA1627 (NM_020961.2,495-513).
ggacatagacctcagaatt

SEQ ID NO: 380255 - DNA, 19 bp, Homo sapiens
  siRNA target sequence for KIAA1627 (NM_020961.2,496-514).
gacatagacctcagaattt

SEQ ID NO: 380256 - DNA, 19 bp, Homo sapiens
  siRNA target sequence for KIAA1627 (NM_020961.2,515-533).
catcagggatgtaggttta

SEQ ID NO: 380257 - DNA, 19 bp, Homo sapiens
  siRNA target sequence for KIAA1627 (NM_020961.2,518-536).
cagggatgtaggtttagct

SEQ ID NO: 380258 - DNA, 19 bp, Homo sapiens
  siRNA target sequence for KIAA1627 (NM_020961.2,534-552).
gctgacagatttgaagaat

SEQ ID NO: 380259 - DNA, 19 bp, Homo sapiens
  siRNA target sequence for KIAA1627 (NM_020961.2,575-593).
caggctaaaggatgagtta

SEQ ID NO: 380260 - DNA, 19 bp, Homo sapiens
  siRNA target sequence for KIAA1627 (NM_020961.2,588-606).
gagttaatagctaaatcta

SEQ ID NO: 380261 - DNA, 19 bp, Homo sapiens
  siRNA target sequence for KIAA1627 (NM_020961.2,608-626).
cactcctcccatgtactta

SEQ ID NO: 380262 - DNA, 19 bp, Homo sapiens
  siRNA target sequence for KIAA1627 (NM_020961.2,620-638).
gtacttacaagccgatata

SEQ ID NO: 380263 - DNA, 19 bp, Homo sapiens
  siRNA target sequence for KIAA1627 (NM_020961.2,623-641).
cttacaagccgatatagaa

SEQ ID NO: 380264 - DNA, 19 bp, Homo sapiens
  siRNA target sequence for KIAA1627 (NM_020961.2,689-707).
ggaaccccctttagaagaa

SEQ ID NO: 380265 - DNA, 19 bp, Homo sapiens
  siRNA target sequence for KIAA1627 (NM_020961.2,694-712).
cccctttagaagaatatta

SEQ ID NO: 380266 - DNA, 19 bp, Homo sapiens
  siRNA target sequence for KIAA1627 (NM_020961.2,751-769).
cttgggatgatattatgaa

SEQ ID NO: 380267 - DNA, 19 bp, Homo sapiens
  siRNA target sequence for KIAA1627 (NM_020961.2,754-772).
gggatgatattatgaagtt

SEQ ID NO: 380268 - DNA, 19 bp, Homo sapiens
  siRNA target sequence for KIAA1627 (NM_020961.2,789-807).
gcagcacctcgatcattta

SEQ ID NO: 380269 - DNA, 19 bp, Homo sapiens
  siRNA target sequence for KIAA1627 (NM_020961.2,790-808).
cagcacctcgatcatttat

SEQ ID NO: 380270 - DNA, 19 bp, Homo sapiens
  siRNA target sequence for KIAA1627 (NM_020961.2,926-944).
gaagactaagactttagat

SEQ ID NO: 380271 - DNA, 19 bp, Homo sapiens
  siRNA target sequence for KIAA1627 (NM_020961.2,977-995).
ctgcctcatggggatcaaa

SEQ ID NO: 380272 - DNA, 19 bp, Homo sapiens
  siRNA target sequence for KIAA1627 (NM_020961.2,1012-1030).
gcacagacggggacttcat

SEQ ID NO: 380273 - DNA, 19 bp, Homo sapiens
  siRNA target sequence for KIAA1627 (NM_020961.2,1015-1033).
cagacggggacttcattca

SEQ ID NO: 380274 - DNA, 19 bp, Homo sapiens
  siRNA target sequence for KIAA1627 (NM_020961.2,1035-1053).
gctaatgttgacattgact

SEQ ID NO: 380275 - DNA, 19 bp, Homo sapiens
  siRNA target sequence for KIAA1627 (NM_020961.2,1138-1156).
gaagacgccttcatctatt

SEQ ID NO: 380276 - DNA, 19 bp, Homo sapiens
  siRNA target sequence for KIAA1627 (NM_020961.2,1194-1212).
gttggaccaacgcttacaa

SEQ ID NO: 380277 - DNA, 19 bp, Homo sapiens
  siRNA target sequence for KIAA1627 (NM_020961.2,1197-1215).
ggaccaacgcttacaaata

SEQ ID NO: 380278 - DNA, 19 bp, Homo sapiens
  siRNA target sequence for KIAA1627 (NM_020961.2,1244-1262).
ctatttcagtgctcctaat

SEQ ID NO: 380279 - DNA, 19 bp, Homo sapiens
  siRNA target sequence for KIAA1627 (NM_020961.2,1254-1272).
gctcctaattcctacttga

SEQ ID NO: 380280 - DNA, 19 bp, Homo sapiens
  siRNA target sequence for KIAA1627 (NM_020961.2,1265-1283).
ctacttgactggttgtaca

SEQ ID NO: 380281 - DNA, 19 bp, Homo sapiens
  siRNA target sequence for KIAA1627 (NM_020961.2,1268-1286).
cttgactggttgtacagaa

SEQ ID NO: 380282 - DNA, 19 bp, Homo sapiens
  siRNA target sequence for KIAA1627 (NM_020961.2,1293-1311).
gagagacttcgaccaaaat

SEQ ID NO: 380283 - DNA, 19 bp, Homo sapiens
  siRNA target sequence for KIAA1627 (NM_020961.2,1312-1330).
cgcctcctcccaaatctaa

SEQ ID NO: 380284 - DNA, 19 bp, Homo sapiens
  siRNA target sequence for KIAA1627 (NM_020961.2,1386-1404).
ggccgtggacgagaaagaa

SEQ ID NO: 380285 - DNA, 19 bp, Homo sapiens
  siRNA target sequence for KIAA1627 (NM_020961.2,1388-1406).
ccgtggacgagaaagaaat

SEQ ID NO: 380286 - DNA, 19 bp, Homo sapiens
  siRNA target sequence for KIAA1627 (NM_020961.2,1389-1407).
cgtggacgagaaagaaata

SEQ ID NO: 380287 - DNA, 19 bp, Homo sapiens
  siRNA target sequence for KIAA1627 (NM_020961.2,1395-1413).
cgagaaagaaatagatcta

SEQ ID NO: 380288 - DNA, 19 bp, Homo sapiens
  siRNA target sequence for NOPE (NM_020962.1,364-382).
gctgcagtgctaaactgta

SEQ ID NO: 380289 - DNA, 19 bp, Homo sapiens
  siRNA target sequence for NOPE (NM_020962.1,549-567).
ggtcattgaaggcaactat

SEQ ID NO: 380290 - DNA, 19 bp, Homo sapiens
  siRNA target sequence for NOPE (NM_020962.1,550-568).
gtcattgaaggcaactatt

SEQ ID NO: 380291 - DNA, 19 bp, Homo sapiens
  siRNA target sequence for NOPE (NM_020962.1,682-700).
gggacagctcgctttgagt

SEQ ID NO: 380292 - DNA, 19 bp, Homo sapiens
  siRNA target sequence for NOPE (NM_020962.1,692-710).
gctttgagtgccacattga

SEQ ID NO: 380293 - DNA, 19 bp, Homo sapiens
  siRNA target sequence for NOPE (NM_020962.1,693-711).
ctttgagtgccacattgaa

SEQ ID NO: 380294 - DNA, 19 bp, Homo sapiens
  siRNA target sequence for NOPE (NM_020962.1,717-735).
gccagctcccatcattact

SEQ ID NO: 380295 - DNA, 19 bp, Homo sapiens
  siRNA target sequence for NOPE (NM_020962.1,788-806).
ccaacggcgtccttcagat

SEQ ID NO: 380296 - DNA, 19 bp, Homo sapiens
  siRNA target sequence for NOPE (NM_020962.1,1089-1107).
ccgcaccaacctactaatt

SEQ ID NO: 380297 - DNA, 19 bp, Homo sapiens
  siRNA target sequence for NOPE (NM_020962.1,1124-1142).
ggcactccggcgtctatgt

SEQ ID NO: 380298 - DNA, 19 bp, Homo sapiens
  siRNA target sequence for NOPE (NM_020962.1,1616-1634).
cacggggcatggacaatgt

SEQ ID NO: 380299 - DNA, 19 bp, Homo sapiens
  siRNA target sequence for NOPE (NM_020962.1,1687-1705).
ctggaacccaacacagatt

SEQ ID NO: 380300 - DNA, 19 bp, Homo sapiens
  siRNA target sequence for NOPE (NM_020962.1,1884-1902).
ggtggtgaagtacaagata

SEQ ID NO: 380301 - DNA, 19 bp, Homo sapiens
  siRNA target sequence for NOPE (NM_020962.1,1940-1958).
ctgaggtgcgaggaaatga

SEQ ID NO: 380302 - DNA, 19 bp, Homo sapiens
  siRNA target sequence for NOPE (NM_020962.1,2181-2199).
gatctctggctacaaacta

SEQ ID NO: 380303 - DNA, 19 bp, Homo sapiens
  siRNA target sequence for NOPE (NM_020962.1,2184-2202).
ctctggctacaaactatat

SEQ ID NO: 380304 - DNA, 19 bp, Homo sapiens
  siRNA target sequence for NOPE (NM_020962.1,2282-2300).
ggcctgtccggctcaagaa

SEQ ID NO: 380305 - DNA, 19 bp, Homo sapiens
  siRNA target sequence for NOPE (NM_020962.1,2284-2302).
cctgtccggctcaagaaga

SEQ ID NO: 380306 - DNA, 19 bp, Homo sapiens
  siRNA target sequence for NOPE (NM_020962.1,2361-2379).
cgtggctttcaacaaacat

SEQ ID NO: 380307 - DNA, 19 bp, Homo sapiens
  siRNA target sequence for NOPE (NM_020962.1,2542-2560).
gtcaagattgtcaactaca

SEQ ID NO: 380308 - DNA, 19 bp, Homo sapiens
  siRNA target sequence for NOPE (NM_020962.1,2594-2612).
cctccctggtcacctatta

SEQ ID NO: 380309 - DNA, 19 bp, Homo sapiens
  siRNA target sequence for NOPE (NM_020962.1,2909-2927).
ccacgcagggaaacatctt

SEQ ID NO: 380310 - DNA, 19 bp, Homo sapiens
  siRNA target sequence for NOPE (NM_020962.1,2954-2972).
gcgacactcggtacttctt

SEQ ID NO: 380311 - DNA, 19 bp, Homo sapiens
  siRNA target sequence for NOPE (NM_020962.1,2956-2974).
gacactcggtacttcttca

SEQ ID NO: 380312 - DNA, 19 bp, Homo sapiens
  siRNA target sequence for NOPE (NM_020962.1,2960-2978).
ctcggtacttcttcaagat

SEQ ID NO: 380313 - DNA, 19 bp, Homo sapiens
  siRNA target sequence for NOPE (NM_020962.1,3367-3385).
ggccggagtcactccaaaa

SEQ ID NO: 380314 - DNA, 19 bp, Homo sapiens
  siRNA target sequence for NOPE (NM_020962.1,3369-3387).
ccggagtcactccaaaaga

SEQ ID NO: 380315 - DNA, 19 bp, Homo sapiens
  siRNA target sequence for NOPE (NM_020962.1,3370-3388).
cggagtcactccaaaagaa

SEQ ID NO: 380316 - DNA, 19 bp, Homo sapiens
  siRNA target sequence for NOPE (NM_020962.1,3374-3392).
gtcactccaaaagaaagat

SEQ ID NO: 380317 - DNA, 19 bp, Homo sapiens
  siRNA target sequence for NOPE (NM_020962.1,3376-3394).
cactccaaaagaaagatct

SEQ ID NO: 380318 - DNA, 19 bp, Homo sapiens
  siRNA target sequence for NOPE (NM_020962.1,3883-3901).
gatagctgccagctcaaat

SEQ ID NO: 380319 - DNA, 19 bp, Homo sapiens
  siRNA target sequence for SPTBN4 (NM_020971.1,126-144).
ctgcctgctcctaacaaca

SEQ ID NO: 380320 - DNA, 19 bp, Homo sapiens
  siRNA target sequence for SPTBN4 (NM_020971.1,213-231).
gcggcctcgctctttgagt

SEQ ID NO: 380321 - DNA, 19 bp, Homo sapiens
  siRNA target sequence for SPTBN4 (NM_020971.1,581-599).
gattcaagtcatcaaaatt

SEQ ID NO: 380322 - DNA, 19 bp, Homo sapiens
  siRNA target sequence for SPTBN4 (NM_020971.1,672-690).
ggttaccctgaggtaaaca

SEQ ID NO: 380323 - DNA, 19 bp, Homo sapiens
  siRNA target sequence for SPTBN4 (NM_020971.1,684-702).
gtaaacatccagaatttca

SEQ ID NO: 380324 - DNA, 19 bp, Homo sapiens
  siRNA target sequence for SPTBN4 (NM_020971.1,1076-1094).
cctcatcagcaatcagaaa

SEQ ID NO: 380325 - DNA, 19 bp, Homo sapiens
  siRNA target sequence for SPTBN4 (NM_020971.1,1134-1152).
gctttcacggcctattgca

SEQ ID NO: 380326 - DNA, 19 bp, Homo sapiens
  siRNA target sequence for SPTBN4 (NM_020971.1,1234-1252).
gcaaccgtcgcctctttgt

SEQ ID NO: 380327 - DNA, 19 bp, Homo sapiens
  siRNA target sequence for SPTBN4 (NM_020971.1,1265-1283).
ctgtggcatctgggatatt

SEQ ID NO: 380328 - DNA, 19 bp, Homo sapiens
  siRNA target sequence for SPTBN4 (NM_020971.1,1575-1593).
gccgaaggctactacgata

SEQ ID NO: 380329 - DNA, 19 bp, Homo sapiens
  siRNA target sequence for SPTBN4 (NM_020971.1,1576-1594).
ccgaaggctactacgatat

SEQ ID NO: 380330 - DNA, 19 bp, Homo sapiens
  siRNA target sequence for SPTBN4 (NM_020971.1,1853-1871).
gcgggtggaggctctcaat

SEQ ID NO: 380331 - DNA, 19 bp, Homo sapiens
  siRNA target sequence for SPTBN4 (NM_020971.1,3506-3524).
ccagcgcgaggaagactat

SEQ ID NO: 380332 - DNA, 19 bp, Homo sapiens
  siRNA target sequence for SPTBN4 (NM_020971.1,3617-3635).
cgaacttggctggcataaa

SEQ ID NO: 380333 - DNA, 19 bp, Homo sapiens
  siRNA target sequence for SPTBN4 (NM_020971.1,3976-3994).
ggatgcaaaagctacatga

SEQ ID NO: 380334 - DNA, 19 bp, Homo sapiens
  siRNA target sequence for SPTBN4 (NM_020971.1,4138-4156).
ccgagctggctcagaataa

SEQ ID NO: 380335 - DNA, 19 bp, Homo sapiens
  siRNA target sequence for SPTBN4 (NM_020971.1,4950-4968).
caggtggagcagtactact

SEQ ID NO: 380336 - DNA, 19 bp, Homo sapiens
  siRNA target sequence for SPTBN4 (NM_020971.1,5374-5392).
cggtgctgcaggagaaatt

SEQ ID NO: 380337 - DNA, 19 bp, Homo sapiens
  siRNA target sequence for SPTBN4 (NM_020971.1,5584-5602).
ctcgggagcttcataagtt

SEQ ID NO: 380338 - DNA, 19 bp, Homo sapiens
  siRNA target sequence for SPTBN4 (NM_020971.1,5586-5604).
cgggagcttcataagttct

SEQ ID NO: 380339 - DNA, 19 bp, Homo sapiens
  siRNA target sequence for SPTBN4 (NM_020971.1,5795-5813).
ggtgtatgcgggtgaacat

SEQ ID NO: 380340 - DNA, 19 bp, Homo sapiens
  siRNA target sequence for SPTBN4 (NM_020971.1,6103-6121).
gatctctgctgctcaacaa

SEQ ID NO: 380341 - DNA, 19 bp, Homo sapiens
  siRNA target sequence for SPTBN4 (NM_020971.1,6418-6436).
ccacgatcgagaaaatcaa

SEQ ID NO: 380342 - DNA, 19 bp, Homo sapiens
  siRNA target sequence for SPTBN4 (NM_020971.1,6419-6437).
cacgatcgagaaaatcaaa

SEQ ID NO: 380343 - DNA, 19 bp, Homo sapiens
  siRNA target sequence for SPTBN4 (NM_020971.1,7419-7437).
ctgtactgtgtgcttagta

SEQ ID NO: 380344 - DNA, 19 bp, Homo sapiens
  siRNA target sequence for SPTBN4 (NM_020971.1,7536-7554).
gtggctagtgactacaaga

SEQ ID NO: 380345 - DNA, 19 bp, Homo sapiens
  siRNA target sequence for SPTBN4 (NM_020971.1,7538-7556).
ggctagtgactacaagaaa

SEQ ID NO: 380346 - DNA, 19 bp, Homo sapiens
  siRNA target sequence for SPTBN4 (NM_020971.1,7539-7557).
gctagtgactacaagaaaa

SEQ ID NO: 380347 - DNA, 19 bp, Homo sapiens
  siRNA target sequence for BCL7A (NM_020993.2,1071-1089).
gtgacacatccctacgaat

SEQ ID NO: 380348 - DNA, 19 bp, Homo sapiens
  siRNA target sequence for BCL7A (NM_020993.2,1077-1095).
catccctacgaatctacaa

SEQ ID NO: 380349 - DNA, 19 bp, Homo sapiens
  siRNA target sequence for BCL7A (NM_020993.2,1110-1128).
cggagcccaaggttgatga

SEQ ID NO: 380350 - DNA, 19 bp, Homo sapiens
  siRNA target sequence for BCL7A (NM_020993.2,1115-1133).
cccaaggttgatgacaaaa

SEQ ID NO: 380351 - DNA, 19 bp, Homo sapiens
  siRNA target sequence for BCL7A (NM_020993.2,1116-1134).
ccaaggttgatgacaaaaa

SEQ ID NO: 380352 - DNA, 19 bp, Homo sapiens
  siRNA target sequence for BCL7A (NM_020993.2,1422-1440).
cctcgatggaacattcgat

SEQ ID NO: 380353 - DNA, 19 bp, Homo sapiens
  siRNA target sequence for PTTG3 (NM_021000.1,48-66).
ccttgtggctacaaaggat

SEQ ID NO: 380354 - DNA, 19 bp, Homo sapiens
  siRNA target sequence for PTTG3 (NM_021000.1,118-136).
caagtttcaatatcatgtt

SEQ ID NO: 380355 - DNA, 19 bp, Homo sapiens
  siRNA target sequence for PTTG3 (NM_021000.1,150-168).
cgatgctcccacatcctta

SEQ ID NO: 380356 - DNA, 19 bp, Homo sapiens
  siRNA target sequence for KRTHA4 (NM_021013.3,30-48).
cccacccacaattaatggt

SEQ ID NO: 380357 - DNA, 19 bp, Homo sapiens
  siRNA target sequence for KRTHA4 (NM_021013.3,31-49).
ccacccacaattaatggta

SEQ ID NO: 380358 - DNA, 19 bp, Homo sapiens
  siRNA target sequence for KRTHA4 (NM_021013.3,32-50).
cacccacaattaatggtat

SEQ ID NO: 380359 - DNA, 19 bp, Homo sapiens
  siRNA target sequence for KRTHA4 (NM_021013.3,34-52).
cccacaattaatggtataa

SEQ ID NO: 380360 - DNA, 19 bp, Homo sapiens
  siRNA target sequence for KRTHA4 (NM_021013.3,35-53).
ccacaattaatggtataaa

SEQ ID NO: 380361 - DNA, 19 bp, Homo sapiens
  siRNA target sequence for KRTHA4 (NM_021013.3,36-54).
cacaattaatggtataaaa

SEQ ID NO: 380362 - DNA, 19 bp, Homo sapiens
  siRNA target sequence for KRTHA4 (NM_021013.3,105-123).
gcttacctgcttttccatt

SEQ ID NO: 380363 - DNA, 19 bp, Homo sapiens
  siRNA target sequence for KRTHA4 (NM_021013.3,1289-1307).
cctgtggcacctctcaaaa

SEQ ID NO: 380364 - DNA, 19 bp, Homo sapiens
  siRNA target sequence for KRTHA4 (NM_021013.3,1303-1321).
caaaagggttgctgtaatt

SEQ ID NO: 380365 - DNA, 19 bp, Homo sapiens
  siRNA target sequence for TLX3 (NM_021025.1,213-231).
ggacgcgggatcttacagt

SEQ ID NO: 380366 - DNA, 19 bp, Homo sapiens
  siRNA target sequence for TLX3 (NM_021025.1,733-751).
cacgacgccttccaaaaga

SEQ ID NO: 380367 - DNA, 19 bp, Homo sapiens
  siRNA target sequence for RFPL1 (NM_021026.1,1071-1089).
ccacctaatggtgataaga

SEQ ID NO: 380368 - DNA, 19 bp, Homo sapiens
  siRNA target sequence for RFPL1 (NM_021026.1,1088-1106).
gagtgtcttgagtatctgt

SEQ ID NO: 380369 - DNA, 19 bp, Homo sapiens
  siRNA target sequence for UGT1A9 (NM_021027.1,317-335).
cacaagtacgaagtatata

SEQ ID NO: 380370 - DNA, 19 bp, Homo sapiens
  siRNA target sequence for UGT1A9 (NM_021027.1,319-337).
caagtacgaagtatatatt

SEQ ID NO: 380371 - DNA, 19 bp, Homo sapiens
  siRNA target sequence for UGT1A9 (NM_021027.1,349-367).
ggttcatacaatgacattt

SEQ ID NO: 380372 - DNA, 19 bp, Homo sapiens
  siRNA target sequence for UGT1A9 (NM_021027.1,731-749).
ctgttacggagtatgatct

SEQ ID NO: 380373 - DNA, 19 bp, Homo sapiens
  siRNA target sequence for KIAA1404 (NM_021035.1,120-138).
ccaggaattcccataccaa

SEQ ID NO: 380374 - DNA, 19 bp, Homo sapiens
  siRNA target sequence for KIAA1404 (NM_021035.1,304-322).
gggcaggaacccacatcaa

SEQ ID NO: 380375 - DNA, 19 bp, Homo sapiens
  siRNA target sequence for KIAA1404 (NM_021035.1,372-390).
gacatgaccaggagaatga

SEQ ID NO: 380376 - DNA, 19 bp, Homo sapiens
  siRNA target sequence for KIAA1404 (NM_021035.1,435-453).
caccatggtccaatgacaa

SEQ ID NO: 380377 - DNA, 19 bp, Homo sapiens
  siRNA target sequence for KIAA1404 (NM_021035.1,438-456).
catggtccaatgacaactt

SEQ ID NO: 380378 - DNA, 19 bp, Homo sapiens
  siRNA target sequence for KIAA1404 (NM_021035.1,475-493).
ccaccagaagcctacagaa

SEQ ID NO: 380379 - DNA, 19 bp, Homo sapiens
  siRNA target sequence for KIAA1404 (NM_021035.1,517-535).
gggctacaagttcttagaa

SEQ ID NO: 380380 - DNA, 19 bp, Homo sapiens
  siRNA target sequence for KIAA1404 (NM_021035.1,518-536).
ggctacaagttcttagaaa

SEQ ID NO: 380381 - DNA, 19 bp, Homo sapiens
  siRNA target sequence for KIAA1404 (NM_021035.1,520-538).
ctacaagttcttagaaagt

SEQ ID NO: 380382 - DNA, 19 bp, Homo sapiens
  siRNA target sequence for KIAA1404 (NM_021035.1,571-589).
cacacttgccacaagttta

SEQ ID NO: 380383 - DNA, 19 bp, Homo sapiens
  siRNA target sequence for KIAA1404 (NM_021035.1,704-722).
gtactgggcatattgaaaa

SEQ ID NO: 380384 - DNA, 19 bp, Homo sapiens
  siRNA target sequence for KIAA1404 (NM_021035.1,800-818).
cagtatccagagcacataa

SEQ ID NO: 380385 - DNA, 19 bp, Homo sapiens
  siRNA target sequence for KIAA1404 (NM_021035.1,835-853).
cctccaggaccttgtaagt

SEQ ID NO: 380386 - DNA, 19 bp, Homo sapiens
  siRNA target sequence for KIAA1404 (NM_021035.1,927-945).
gagcctctggtgttgacat

SEQ ID NO: 380387 - DNA, 19 bp, Homo sapiens
  siRNA target sequence for KIAA1404 (NM_021035.1,931-949).
ctctggtgttgacatagaa

SEQ ID NO: 380388 - DNA, 19 bp, Homo sapiens
  siRNA target sequence for KIAA1404 (NM_021035.1,961-979).
gaagaacctggaaaaggta

SEQ ID NO: 380389 - DNA, 19 bp, Homo sapiens
  siRNA target sequence for KIAA1404 (NM_021035.1,1137-1155).
ccttccttcgccccaatat

SEQ ID NO: 380390 - DNA, 19 bp, Homo sapiens
  siRNA target sequence for KIAA1404 (NM_021035.1,1141-1159).
ccttcgccccaatatcatt

SEQ ID NO: 380391 - DNA, 19 bp, Homo sapiens
  siRNA target sequence for KIAA1404 (NM_021035.1,1142-1160).
cttcgccccaatatcattt

SEQ ID NO: 380392 - DNA, 19 bp, Homo sapiens
  siRNA target sequence for KIAA1404 (NM_021035.1,1171-1189).
cgacagcactgctatctat

SEQ ID NO: 380393 - DNA, 19 bp, Homo sapiens
  siRNA target sequence for KIAA1404 (NM_021035.1,1204-1222).
ccggctcctgcgagaagat

SEQ ID NO: 380394 - DNA, 19 bp, Homo sapiens
  siRNA target sequence for KIAA1404 (NM_021035.1,1205-1223).
cggctcctgcgagaagatt

SEQ ID NO: 380395 - DNA, 19 bp, Homo sapiens
  siRNA target sequence for KIAA1404 (NM_021035.1,1230-1248).
gacctttacgggaaggtat

SEQ ID NO: 380396 - DNA, 19 bp, Homo sapiens
  siRNA target sequence for KIAA1404 (NM_021035.1,1233-1251).
ctttacgggaaggtatttt

SEQ ID NO: 380397 - DNA, 19 bp, Homo sapiens
  siRNA target sequence for KIAA1404 (NM_021035.1,1353-1371).
catcaggcatagtctacaa

SEQ ID NO: 380398 - DNA, 19 bp, Homo sapiens
  siRNA target sequence for KIAA1404 (NM_021035.1,1375-1393).
gcagtttgacacaaaacca

SEQ ID NO: 380399 - DNA, 19 bp, Homo sapiens
  siRNA target sequence for KIAA1404 (NM_021035.1,1403-1421).
gttcgctggcagaattcca

SEQ ID NO: 380400 - DNA, 19 bp, Homo sapiens
  siRNA target sequence for KIAA1404 (NM_021035.1,1410-1428).
ggcagaattccaaacgatt

SEQ ID NO: 380401 - DNA, 19 bp, Homo sapiens
  siRNA target sequence for KIAA1404 (NM_021035.1,1429-1447).
gctctatgggtctttggta

SEQ ID NO: 380402 - DNA, 19 bp, Homo sapiens
  siRNA target sequence for KIAA1404 (NM_021035.1,1478-1496).
ctttttgccaccgtatcta

SEQ ID NO: 380403 - DNA, 19 bp, Homo sapiens
  siRNA target sequence for KIAA1404 (NM_021035.1,1677-1695).
ccttccagaggaatatcgt

SEQ ID NO: 380404 - DNA, 19 bp, Homo sapiens
  siRNA target sequence for KIAA1404 (NM_021035.1,1686-1704).
ggaatatcgtggagtgtaa

SEQ ID NO: 380405 - DNA, 19 bp, Homo sapiens
  siRNA target sequence for KIAA1404 (NM_021035.1,1750-1768).
cgactttacccccttaata

SEQ ID NO: 380406 - DNA, 19 bp, Homo sapiens
  siRNA target sequence for KIAA1404 (NM_021035.1,1760-1778).
cccttaatagagaatcctt

SEQ ID NO: 380407 - DNA, 19 bp, Homo sapiens
  siRNA target sequence for KIAA1404 (NM_021035.1,1779-1797).
cagccactggggaatttct

SEQ ID NO: 380408 - DNA, 19 bp, Homo sapiens
  siRNA target sequence for KIAA1404 (NM_021035.1,1820-1838).
catcccagaattaatgtct

SEQ ID NO: 380409 - DNA, 19 bp, Homo sapiens
  siRNA target sequence for KIAA1404 (NM_021035.1,1848-1866).
gccagtggccctcaaaaga

SEQ ID NO: 380410 - DNA, 19 bp, Homo sapiens
  siRNA target sequence for KIAA1404 (NM_021035.1,1920-1938).
gggaactggctattattca

SEQ ID NO: 380411 - DNA, 19 bp, Homo sapiens
  siRNA target sequence for KIAA1404 (NM_021035.1,1921-1939).
ggaactggctattattcaa

SEQ ID NO: 380412 - DNA, 19 bp, Homo sapiens
  siRNA target sequence for KIAA1404 (NM_021035.1,1962-1980).
cctatgtgggtctaaaaat

SEQ ID NO: 380413 - DNA, 19 bp, Homo sapiens
  siRNA target sequence for KIAA1404 (NM_021035.1,1963-1981).
ctatgtgggtctaaaaatt

SEQ ID NO: 380414 - DNA, 19 bp, Homo sapiens
  siRNA target sequence for KIAA1404 (NM_021035.1,1994-2012).
ctaaccaacgagtctgttt

SEQ ID NO: 380415 - DNA, 19 bp, Homo sapiens
  siRNA target sequence for KIAA1404 (NM_021035.1,2037-2055).
ccatcttggttgtgtgtta

SEQ ID NO: 380416 - DNA, 19 bp, Homo sapiens
  siRNA target sequence for KIAA1404 (NM_021035.1,2216-2234).
ctccgaagggcctacatga

SEQ ID NO: 380417 - DNA, 19 bp, Homo sapiens
  siRNA target sequence for KIAA1404 (NM_021035.1,2219-2237).
cgaagggcctacatgagta

SEQ ID NO: 380418 - DNA, 19 bp, Homo sapiens
  siRNA target sequence for KIAA1404 (NM_021035.1,2220-2238).
gaagggcctacatgagtat

SEQ ID NO: 380419 - DNA, 19 bp, Homo sapiens
  siRNA target sequence for KIAA1404 (NM_021035.1,2223-2241).
gggcctacatgagtatcat

SEQ ID NO: 380420 - DNA, 19 bp, Homo sapiens
  siRNA target sequence for KIAA1404 (NM_021035.1,2225-2243).
gcctacatgagtatcatga

SEQ ID NO: 380421 - DNA, 19 bp, Homo sapiens
  siRNA target sequence for KIAA1404 (NM_021035.1,2310-2328).
gtgtcctacgggaacagta

SEQ ID NO: 380422 - DNA, 19 bp, Homo sapiens
  siRNA target sequence for KIAA1404 (NM_021035.1,2378-2396).
ccagtgcaggatagtgaat

SEQ ID NO: 380423 - DNA, 19 bp, Homo sapiens
  siRNA target sequence for KIAA1404 (NM_021035.1,2383-2401).
gcaggatagtgaatggatt

SEQ ID NO: 380424 - DNA, 19 bp, Homo sapiens
  siRNA target sequence for KIAA1404 (NM_021035.1,2445-2463).
gtcttggtgtcggttcttt

SEQ ID NO: 380425 - DNA, 19 bp, Homo sapiens
  siRNA target sequence for KIAA1404 (NM_021035.1,2447-2465).
cttggtgtcggttctttca

SEQ ID NO: 380426 - DNA, 19 bp, Homo sapiens
  siRNA target sequence for KIAA1404 (NM_021035.1,2540-2558).
gagagttcgctgatagaga

SEQ ID NO: 380427 - DNA, 19 bp, Homo sapiens
  siRNA target sequence for KIAA1404 (NM_021035.1,2659-2677).
ggagttggctaaaatgctt

SEQ ID NO: 380428 - DNA, 19 bp, Homo sapiens
  siRNA target sequence for KIAA1404 (NM_021035.1,2868-2886).
gttctcgctggcagcttta

SEQ ID NO: 380429 - DNA, 19 bp, Homo sapiens
  siRNA target sequence for KIAA1404 (NM_021035.1,2889-2907).
ggctctggctacagttgta

SEQ ID NO: 380430 - DNA, 19 bp, Homo sapiens
  siRNA target sequence for KIAA1404 (NM_021035.1,3019-3037).
ccaggttgtaggaatgaca

SEQ ID NO: 380431 - DNA, 19 bp, Homo sapiens
  siRNA target sequence for KIAA1404 (NM_021035.1,3039-3057).
ccacaggtgctgccaaata

SEQ ID NO: 380432 - DNA, 19 bp, Homo sapiens
  siRNA target sequence for KIAA1404 (NM_021035.1,3077-3095).
gtggagccgaggattgtca

SEQ ID NO: 380433 - DNA, 19 bp, Homo sapiens
  siRNA target sequence for KIAA1404 (NM_021035.1,3079-3097).
ggagccgaggattgtcata

SEQ ID NO: 380434 - DNA, 19 bp, Homo sapiens
  siRNA target sequence for KIAA1404 (NM_021035.1,3118-3136).
ccttgaggcccataccatt

SEQ ID NO: 380435 - DNA, 19 bp, Homo sapiens
  siRNA target sequence for KIAA1404 (NM_021035.1,3199-3217).
cagtgccaacgtgtatgat

SEQ ID NO: 380436 - DNA, 19 bp, Homo sapiens
  siRNA target sequence for KIAA1404 (NM_021035.1,3201-3219).
gtgccaacgtgtatgatct

SEQ ID NO: 380437 - DNA, 19 bp, Homo sapiens
  siRNA target sequence for KIAA1404 (NM_021035.1,3254-3272).
gaacggctagtgaaagtaa

SEQ ID NO: 380438 - DNA, 19 bp, Homo sapiens
  siRNA target sequence for KIAA1404 (NM_021035.1,3257-3275).
cggctagtgaaagtaaaca

SEQ ID NO: 380439 - DNA, 19 bp, Homo sapiens
  siRNA target sequence for KIAA1404 (NM_021035.1,3304-3322).
ccgtatgtgccctgaaatt

SEQ ID NO: 380440 - DNA, 19 bp, Homo sapiens
  siRNA target sequence for KIAA1404 (NM_021035.1,3497-3515).
gtagagctgtgcaagtact

SEQ ID NO: 380441 - DNA, 19 bp, Homo sapiens
  siRNA target sequence for KIAA1404 (NM_021035.1,3618-3636).
gcgtcagggtccatgttgt

SEQ ID NO: 380442 - DNA, 19 bp, Homo sapiens
  siRNA target sequence for KIAA1404 (NM_021035.1,3753-3771).
gagccaagaagggaatgta

SEQ ID NO: 380443 - DNA, 19 bp, Homo sapiens
  siRNA target sequence for KIAA1404 (NM_021035.1,3811-3829).
gtggagcaagatcattcat

SEQ ID NO: 380444 - DNA, 19 bp, Homo sapiens
  siRNA target sequence for KIAA1404 (NM_021035.1,3816-3834).
gcaagatcattcatacact

SEQ ID NO: 380445 - DNA, 19 bp, Homo sapiens
  siRNA target sequence for KIAA1404 (NM_021035.1,3817-3835).
caagatcattcatacactt

SEQ ID NO: 380446 - DNA, 19 bp, Homo sapiens
  siRNA target sequence for KIAA1404 (NM_021035.1,3894-3912).
cccacaccttagtatccaa

SEQ ID NO: 380447 - DNA, 19 bp, Homo sapiens
  siRNA target sequence for KIAA1404 (NM_021035.1,3895-3913).
ccacaccttagtatccaaa

SEQ ID NO: 380448 - DNA, 19 bp, Homo sapiens
  siRNA target sequence for KIAA1404 (NM_021035.1,3996-4014).
gtgcctgccacccttatga

SEQ ID NO: 380449 - DNA, 19 bp, Homo sapiens
  siRNA target sequence for KIAA1404 (NM_021035.1,4143-4161).
ctcggtgcggccatgaaca

SEQ ID NO: 380450 - DNA, 19 bp, Homo sapiens
  siRNA target sequence for KIAA1404 (NM_021035.1,4145-4163).
cggtgcggccatgaacaaa

SEQ ID NO: 380451 - DNA, 19 bp, Homo sapiens
  siRNA target sequence for KIAA1404 (NM_021035.1,4146-4164).
ggtgcggccatgaacaaat

SEQ ID NO: 380452 - DNA, 19 bp, Homo sapiens
  siRNA target sequence for KIAA1404 (NM_021035.1,4176-4194).
ccgtgcctgagtcagattt

SEQ ID NO: 380453 - DNA, 19 bp, Homo sapiens
  siRNA target sequence for KIAA1404 (NM_021035.1,4312-4330).
gcacagtcaaccggtaaaa

SEQ ID NO: 380454 - DNA, 19 bp, Homo sapiens
  siRNA target sequence for KIAA1404 (NM_021035.1,4313-4331).
cacagtcaaccggtaaaat

SEQ ID NO: 380455 - DNA, 19 bp, Homo sapiens
  siRNA target sequence for KIAA1404 (NM_021035.1,4441-4459).
cttcgaagggcgtttccat

SEQ ID NO: 380456 - DNA, 19 bp, Homo sapiens
  siRNA target sequence for KIAA1404 (NM_021035.1,4476-4494).
cctgcaagcgcctgcttat

SEQ ID NO: 380457 - DNA, 19 bp, Homo sapiens
  siRNA target sequence for KIAA1404 (NM_021035.1,4678-4696).
caaccgacccccatgctat

SEQ ID NO: 380458 - DNA, 19 bp, Homo sapiens
  siRNA target sequence for KIAA1404 (NM_021035.1,4692-4710).
gctatgtgccttgtactaa

SEQ ID NO: 380459 - DNA, 19 bp, Homo sapiens
  siRNA target sequence for KIAA1404 (NM_021035.1,4786-4804).
ggatgaggtcacccaaata

SEQ ID NO: 380460 - DNA, 19 bp, Homo sapiens
  siRNA target sequence for KIAA1404 (NM_021035.1,4787-4805).
gatgaggtcacccaaatat

SEQ ID NO: 380461 - DNA, 19 bp, Homo sapiens
  siRNA target sequence for KIAA1404 (NM_021035.1,4881-4899).
ccctagaccgctacatgaa

SEQ ID NO: 380462 - DNA, 19 bp, Homo sapiens
  siRNA target sequence for KIAA1404 (NM_021035.1,4882-4900).
cctagaccgctacatgaat

SEQ ID NO: 380463 - DNA, 19 bp, Homo sapiens
  siRNA target sequence for KIAA1404 (NM_021035.1,4913-4931).
gatgaagtcgccatcagat

SEQ ID NO: 380464 - DNA, 19 bp, Homo sapiens
  siRNA target sequence for KIAA1404 (NM_021035.1,4916-4934).
gaagtcgccatcagattga

SEQ ID NO: 380465 - DNA, 19 bp, Homo sapiens
  siRNA target sequence for KIAA1404 (NM_021035.1,4922-4940).
gccatcagattgaaagtct

SEQ ID NO: 380466 - DNA, 19 bp, Homo sapiens
  siRNA target sequence for KIAA1404 (NM_021035.1,4975-4993).
gaggtatggaactagcata

SEQ ID NO: 380467 - DNA, 19 bp, Homo sapiens
  siRNA target sequence for KIAA1404 (NM_021035.1,4999-5017).
gcggctagaagagattgaa

SEQ ID NO: 380468 - DNA, 19 bp, Homo sapiens
  siRNA target sequence for KIAA1404 (NM_021035.1,5000-5018).
cggctagaagagattgaaa

SEQ ID NO: 380469 - DNA, 19 bp, Homo sapiens
  siRNA target sequence for KIAA1404 (NM_021035.1,5123-5141).
gaagacttcctgatgttaa

SEQ ID NO: 380470 - DNA, 19 bp, Homo sapiens
  siRNA target sequence for KIAA1404 (NM_021035.1,5194-5212).
gaattacatcagcttctat

SEQ ID NO: 380471 - DNA, 19 bp, Homo sapiens
  siRNA target sequence for KIAA1404 (NM_021035.1,5251-5269).
gcatgtcttagaagagaaa

SEQ ID NO: 380472 - DNA, 19 bp, Homo sapiens
  siRNA target sequence for KIAA1404 (NM_021035.1,5329-5347).
cactagccaggaactaagt

SEQ ID NO: 380473 - DNA, 19 bp, Homo sapiens
  siRNA target sequence for KIAA1404 (NM_021035.1,5346-5364).
gtgacctccgaagtgaaat

SEQ ID NO: 380474 - DNA, 19 bp, Homo sapiens
  siRNA target sequence for KIAA1404 (NM_021035.1,5390-5408).
cttctgacccgctacaaga

SEQ ID NO: 380475 - DNA, 19 bp, Homo sapiens
  siRNA target sequence for KIAA1404 (NM_021035.1,5439-5457).
cagtagaggtctatagtgt

SEQ ID NO: 380476 - DNA, 19 bp, Homo sapiens
  siRNA target sequence for KIAA1404 (NM_021035.1,5471-5489).
gagaaaacatgtaagttca

SEQ ID NO: 380477 - DNA, 19 bp, Homo sapiens
  siRNA target sequence for KIAA1404 (NM_021035.1,5490-5508).
cccaagaggatgaacaact

SEQ ID NO: 380478 - DNA, 19 bp, Homo sapiens
  siRNA target sequence for KIAA1404 (NM_021035.1,5491-5509).
ccaagaggatgaacaactt

SEQ ID NO: 380479 - DNA, 19 bp, Homo sapiens
  siRNA target sequence for KIAA1404 (NM_021035.1,5631-5649).
gccgcaatggccatatcta

SEQ ID NO: 380480 - DNA, 19 bp, Homo sapiens
  siRNA target sequence for KIAA1404 (NM_021035.1,5632-5650).
ccgcaatggccatatctat

SEQ ID NO: 380481 - DNA, 19 bp, Homo sapiens
  siRNA target sequence for KIAA1404 (NM_021035.1,5634-5652).
gcaatggccatatctatgt

SEQ ID NO: 380482 - DNA, 19 bp, Homo sapiens
  siRNA target sequence for KIAA1404 (NM_021035.1,5685-5703).
gcacgtgtcctgactgtaa

SEQ ID NO: 380483 - DNA, 19 bp, Homo sapiens
  siRNA target sequence for KIAA1404 (NM_021035.1,5694-5712).
ctgactgtaaggaagtgat

SEQ ID NO: 380484 - DNA, 19 bp, Homo sapiens
  siRNA target sequence for KIAA1404 (NM_021035.1,5715-5733).
gtggcacaaatcatactct

SEQ ID NO: 380485 - DNA, 19 bp, Homo sapiens
  siRNA target sequence for ZNF253 (NM_021047.1,353-371).
gcgtgggtgagcataaggt

SEQ ID NO: 380486 - DNA, 19 bp, Homo sapiens
  siRNA target sequence for ZNF253 (NM_021047.1,757-775).
cgaaaaccctacatagtga

SEQ ID NO: 380487 - DNA, 19 bp, Homo sapiens
  siRNA target sequence for ZNF253 (NM_021047.1,758-776).
gaaaaccctacatagtgaa

SEQ ID NO: 380488 - DNA, 19 bp, Homo sapiens
  siRNA target sequence for ZNF253 (NM_021047.1,799-817).
gttcctccacttttaatta

SEQ ID NO: 380489 - DNA, 19 bp, Homo sapiens
  siRNA target sequence for MAGEA10 (NM_021048.3,503-521).
ctgctatcctctaatacca

SEQ ID NO: 380490 - DNA, 19 bp, Homo sapiens
  siRNA target sequence for MAGEA10 (NM_021048.3,610-628).
cttcccttccattagatca

SEQ ID NO: 380491 - DNA, 19 bp, Homo sapiens
  siRNA target sequence for MAGEA10 (NM_021048.3,640-658).
gctccagcagccaaaagga

SEQ ID NO: 380492 - DNA, 19 bp, Homo sapiens
  siRNA target sequence for MAGEA10 (NM_021048.3,753-771).
ctcttcaagtatcaaatga

SEQ ID NO: 380493 - DNA, 19 bp, Homo sapiens
  siRNA target sequence for MAGEA10 (NM_021048.3,988-1006).
ctggcattctcatacttat

SEQ ID NO: 380494 - DNA, 19 bp, Homo sapiens
  siRNA target sequence for MAGEA10 (NM_021048.3,991-1009).
gcattctcatacttatcct

SEQ ID NO: 380495 - DNA, 19 bp, Homo sapiens
  siRNA target sequence for MAGEA10 (NM_021048.3,998-1016).
catacttatcctaagcata

SEQ ID NO: 380496 - DNA, 19 bp, Homo sapiens
  siRNA target sequence for MAGEA10 (NM_021048.3,1189-1207).
ctgcacggtatgagtttct

SEQ ID NO: 380497 - DNA, 19 bp, Homo sapiens
  siRNA target sequence for HIST1H2AD (NM_021065.2,294-312).
gggtaaagtcacaattgct

SEQ ID NO: 380498 - DNA, 19 bp, Homo sapiens
  siRNA target sequence for NDUFV3 (NM_021075.2,608-626).
gcttctacggtttctttgt

SEQ ID NO: 380499 - DNA, 19 bp, Homo sapiens
  siRNA target sequence for NDUFV3 (NM_021075.2,681-699).
gtccaccaaaaaatgtagt

SEQ ID NO: 380500 - DNA, 19 bp, Homo sapiens
  siRNA target sequence for NDUFV3 (NM_021075.2,738-756).
cagcagctgaattgtctaa

SEQ ID NO: 380501 - DNA, 19 bp, Homo sapiens
  siRNA target sequence for NDUFV3 (NM_021075.2,751-769).
gtctaaaaacttatcttca

SEQ ID NO: 380502 - DNA, 19 bp, Homo sapiens
  siRNA target sequence for NDUFV3 (NM_021075.2,825-843).
ccagtggcagcgtgctatt

SEQ ID NO: 380503 - DNA, 19 bp, Homo sapiens
  siRNA target sequence for NDUFV3 (NM_021075.2,851-869).
gaaggggttccgaaatttt

SEQ ID NO: 380504 - DNA, 19 bp, Homo sapiens
  siRNA target sequence for NDUFV3 (NM_021075.2,857-875).
gttccgaaatttttgtcaa

SEQ ID NO: 380505 - DNA, 19 bp, Homo sapiens
  siRNA target sequence for NDUFV3 (NM_021075.2,886-904).
ggtagagtttccacagaaa

SEQ ID NO: 380506 - DNA, 19 bp, Homo sapiens
  siRNA target sequence for NDUFV3 (NM_021075.2,950-968).
caggtgggtcggaaagtga

SEQ ID NO: 380507 - DNA, 19 bp, Homo sapiens
  siRNA target sequence for NDUFV3 (NM_021075.2,1162-1180).
gccgcatgtggacattact

SEQ ID NO: 380508 - DNA, 19 bp, Homo sapiens
  siRNA target sequence for NDUFV3 (NM_021075.2,1164-1182).
cgcatgtggacattactga

SEQ ID NO: 380509 - DNA, 19 bp, Homo sapiens
  siRNA target sequence for NDUFV3 (NM_021075.2,1264-1282).
cacaatgcccagatctcaa

SEQ ID NO: 380510 - DNA, 19 bp, Homo sapiens
  siRNA target sequence for NDUFV3 (NM_021075.2,1272-1290).
ccagatctcaagtagatga

SEQ ID NO: 380511 - DNA, 19 bp, Homo sapiens
  siRNA target sequence for NDUFV3 (NM_021075.2,1587-1605).
cagggacgcagggaataga

SEQ ID NO: 380512 - DNA, 19 bp, Homo sapiens
  siRNA target sequence for NDUFV3 (NM_021075.2,1629-1647).
caatcgtggaagatcagat

SEQ ID NO: 380513 - DNA, 19 bp, Homo sapiens
  siRNA target sequence for NDUFV3 (NM_021075.2,1643-1661).
cagataccaccaagcaatt

SEQ ID NO: 380514 - DNA, 19 bp, Homo sapiens
  siRNA target sequence for NDUFV3 (NM_021075.2,1666-1684).
gacagttcctgttgagaat

SEQ ID NO: 380515 - DNA, 19 bp, Homo sapiens
  siRNA target sequence for NDUFV3 (NM_021075.2,1681-1699).
gaataaccacggtttccat

SEQ ID NO: 380516 - DNA, 19 bp, Homo sapiens
  siRNA target sequence for NDUFV3 (NM_021075.2,1802-1820).
cctgctgagccgtttgaca

SEQ ID NO: 380517 - DNA, 19 bp, Homo sapiens
  siRNA target sequence for NDUFV3 (NM_021075.2,1808-1826).
gagccgtttgacaacacta

SEQ ID NO: 380518 - DNA, 19 bp, Homo sapiens
  siRNA target sequence for NDUFV3 (NM_021075.2,1817-1835).
gacaacactacctacaaga

SEQ ID NO: 380519 - DNA, 19 bp, Homo sapiens
  siRNA target sequence for NDUFV3 (NM_021075.2,1855-1873).
cagcacgtacaccttctta

SEQ ID NO: 380520 - DNA, 19 bp, Homo sapiens
  siRNA target sequence for NDUFV3 (NM_021075.2,1857-1875).
gcacgtacaccttcttaga

SEQ ID NO: 380521 - DNA, 19 bp, Homo sapiens
  siRNA target sequence for NEFH (NM_021076.2,974-992).
cgcaggaggagataactga

SEQ ID NO: 380522 - DNA, 19 bp, Homo sapiens
  siRNA target sequence for NEFH (NM_021076.2,1172-1190).
cccagctgcgagaatacca

SEQ ID NO: 380523 - DNA, 19 bp, Homo sapiens
  siRNA target sequence for NEFH (NM_021076.2,2295-2313).
gaaggccaagactcttgat

SEQ ID NO: 380524 - DNA, 19 bp, Homo sapiens
  siRNA target sequence for NEFH (NM_021076.2,2357-2375).
ggtcccctgcagacaaatt

SEQ ID NO: 380525 - DNA, 19 bp, Homo sapiens
  siRNA target sequence for NEFH (NM_021076.2,2572-2590).
gcccctgccacaccaaaaa

SEQ ID NO: 380526 - DNA, 19 bp, Homo sapiens
  siRNA target sequence for NEFH (NM_021076.2,2884-2902).
gcaccggagaaaaaagaca

SEQ ID NO: 380527 - DNA, 19 bp, Homo sapiens
  siRNA target sequence for NEFH (NM_021076.2,3026-3044).
ccagcacagaccaaaaaga

SEQ ID NO: 380528 - DNA, 19 bp, Homo sapiens
  siRNA target sequence for PMAIP1 (NM_021127.1,262-280).
ggagatttggagacaaact

SEQ ID NO: 380529 - DNA, 19 bp, Homo sapiens
  siRNA target sequence for PMAIP1 (NM_021127.1,287-305).
ccggcagaaacttctgaat

SEQ ID NO: 380530 - DNA, 19 bp, Homo sapiens
  siRNA target sequence for PSIP2 (NM_021144.2,240-258).
ccaaaggatatatttcctt

SEQ ID NO: 380531 - DNA, 19 bp, Homo sapiens
  siRNA target sequence for PSIP2 (NM_021144.2,273-291).
gaaaagtatggcaaaccaa

SEQ ID NO: 380532 - DNA, 19 bp, Homo sapiens
  siRNA target sequence for PSIP2 (NM_021144.2,326-344).
gatagataacaatccaaaa

SEQ ID NO: 380533 - DNA, 19 bp, Homo sapiens
  siRNA target sequence for PSIP2 (NM_021144.2,358-376).
gtcaacaggcagcaactaa

SEQ ID NO: 380534 - DNA, 19 bp, Homo sapiens
  siRNA target sequence for PSIP2 (NM_021144.2,366-384).
gcagcaactaaacaatcaa

SEQ ID NO: 380535 - DNA, 19 bp, Homo sapiens
  siRNA target sequence for PSIP2 (NM_021144.2,491-509).
cataactactccaaaagct

SEQ ID NO: 380536 - DNA, 19 bp, Homo sapiens
  siRNA target sequence for PSIP2 (NM_021144.2,658-676).
gaggcagacccaaaatggt

SEQ ID NO: 380537 - DNA, 19 bp, Homo sapiens
  siRNA target sequence for PSIP2 (NM_021144.2,661-679).
gcagacccaaaatggtaaa

SEQ ID NO: 380538 - DNA, 19 bp, Homo sapiens
  siRNA target sequence for PSIP2 (NM_021144.2,698-716).
gagtgacatcattactgaa

SEQ ID NO: 380539 - DNA, 19 bp, Homo sapiens
  siRNA target sequence for PSIP2 (NM_021144.2,843-861).
gaagttgaatcaaaaagga

SEQ ID NO: 380540 - DNA, 19 bp, Homo sapiens
  siRNA target sequence for PSIP2 (NM_021144.2,886-904).
cttcaacctccgattctga

SEQ ID NO: 380541 - DNA, 19 bp, Homo sapiens
  siRNA target sequence for PSIP2 (NM_021144.2,1024-1042).
gcaagcaagaggaacaaat

SEQ ID NO: 380542 - DNA, 19 bp, Homo sapiens
  siRNA target sequence for DJ971N18.2 (NM_021156.2,290-308).
ggcgagtggatgctgaaat

SEQ ID NO: 380543 - DNA, 19 bp, Homo sapiens
  siRNA target sequence for DJ971N18.2 (NM_021156.2,291-309).
gcgagtggatgctgaaatt

SEQ ID NO: 380544 - DNA, 19 bp, Homo sapiens
  siRNA target sequence for DJ971N18.2 (NM_021156.2,331-349).
ctgccagcagactgattca

SEQ ID NO: 380545 - DNA, 19 bp, Homo sapiens
  siRNA target sequence for DJ971N18.2 (NM_021156.2,333-351).
gccagcagactgattcaga

SEQ ID NO: 380546 - DNA, 19 bp, Homo sapiens
  siRNA target sequence for DJ971N18.2 (NM_021156.2,350-368).
gaatgggaggcttttgcaa

SEQ ID NO: 380547 - DNA, 19 bp, Homo sapiens
  siRNA target sequence for DJ971N18.2 (NM_021156.2,484-502).
gatattccgccgttatcgt

SEQ ID NO: 380548 - DNA, 19 bp, Homo sapiens
  siRNA target sequence for DJ971N18.2 (NM_021156.2,517-535).
cgaagacctgcagaattat

SEQ ID NO: 380549 - DNA, 19 bp, Homo sapiens
  siRNA target sequence for DJ971N18.2 (NM_021156.2,521-539).
gacctgcagaattatatct

SEQ ID NO: 380550 - DNA, 19 bp, Homo sapiens
  siRNA target sequence for DJ971N18.2 (NM_021156.2,608-626).
ggaatggctggtcttttta

SEQ ID NO: 380551 - DNA, 19 bp, Homo sapiens
  siRNA target sequence for DJ971N18.2 (NM_021156.2,664-682).
cacagtgactcttggaatt

SEQ ID NO: 380552 - DNA, 19 bp, Homo sapiens
  siRNA target sequence for DJ971N18.2 (NM_021156.2,744-762).
gtctggtcttggtggtaat

SEQ ID NO: 380553 - DNA, 19 bp, Homo sapiens
  siRNA target sequence for DJ971N18.2 (NM_021156.2,754-772).
ggtggtaatatcagaatgt

SEQ ID NO: 380554 - DNA, 19 bp, Homo sapiens
  siRNA target sequence for DJ971N18.2 (NM_021156.2,758-776).
gtaatatcagaatgtttct

SEQ ID NO: 380555 - DNA, 19 bp, Homo sapiens
  siRNA target sequence for DJ971N18.2 (NM_021156.2,782-800).
ccacttccaaggcatttat

SEQ ID NO: 380556 - DNA, 19 bp, Homo sapiens
  siRNA target sequence for DJ971N18.2 (NM_021156.2,837-855).
ctcatagagctgaacagtt

SEQ ID NO: 380557 - DNA, 19 bp, Homo sapiens
  siRNA target sequence for DJ971N18.2 (NM_021156.2,1009-1027).
gagaagtgaggccaatgat

SEQ ID NO: 380558 - DNA, 19 bp, Homo sapiens
  siRNA target sequence for DBC-1 (NM_021174.4,456-474).
ccagggggacgcaacttct

SEQ ID NO: 380559 - DNA, 19 bp, Homo sapiens
  siRNA target sequence for DBC-1 (NM_021174.4,479-497).
cacagcttcaacatctctt

SEQ ID NO: 380560 - DNA, 19 bp, Homo sapiens
  siRNA target sequence for DBC-1 (NM_021174.4,584-602).
gcgggtcttcactggtatt

SEQ ID NO: 380561 - DNA, 19 bp, Homo sapiens
  siRNA target sequence for DBC-1 (NM_021174.4,608-626).
cagcttgcatgactacttt

SEQ ID NO: 380562 - DNA, 19 bp, Homo sapiens
  siRNA target sequence for DBC-1 (NM_021174.4,769-787).
ccaaccagcccctactgaa

SEQ ID NO: 380563 - DNA, 19 bp, Homo sapiens
  siRNA target sequence for DBC-1 (NM_021174.4,909-927).
ctgagtctcttccaaacat

SEQ ID NO: 380564 - DNA, 19 bp, Homo sapiens
  siRNA target sequence for DBC-1 (NM_021174.4,989-1007).
ggatcagggccgaagtgat

SEQ ID NO: 380565 - DNA, 19 bp, Homo sapiens
  siRNA target sequence for DBC-1 (NM_021174.4,999-1017).
cgaagtgatgactatgact

SEQ ID NO: 380566 - DNA, 19 bp, Homo sapiens
  siRNA target sequence for DBC-1 (NM_021174.4,1173-1191).
gtcccctcagattttctgt

SEQ ID NO: 380567 - DNA, 19 bp, Homo sapiens
  siRNA target sequence for DBC-1 (NM_021174.4,1259-1277).
gatccaggtctcttctgaa

SEQ ID NO: 380568 - DNA, 19 bp, Homo sapiens
  siRNA target sequence for DBC-1 (NM_021174.4,1322-1340).
cagtgaccccgcttatagt

SEQ ID NO: 380569 - DNA, 19 bp, Homo sapiens
  siRNA target sequence for DBC-1 (NM_021174.4,1443-1461).
cctctgaagcagattaagt

SEQ ID NO: 380570 - DNA, 19 bp, Homo sapiens
  siRNA target sequence for DBC-1 (NM_021174.4,1629-1647).
cgctttgccgagtttcagt

SEQ ID NO: 380571 - DNA, 19 bp, Homo sapiens
  siRNA target sequence for DBC-1 (NM_021174.4,1630-1648).
gctttgccgagtttcagta

SEQ ID NO: 380572 - DNA, 19 bp, Homo sapiens
  siRNA target sequence for DBC-1 (NM_021174.4,1708-1726).
ggaccatcatgcctacttt

SEQ ID NO: 380573 - DNA, 19 bp, Homo sapiens
  siRNA target sequence for DBC-1 (NM_021174.4,1950-1968).
gcacgccctggctgtgtaa

SEQ ID NO: 380574 - DNA, 19 bp, Homo sapiens
  siRNA target sequence for DBC-1 (NM_021174.4,1951-1969).
cacgccctggctgtgtaaa

SEQ ID NO: 380575 - DNA, 19 bp, Homo sapiens
  siRNA target sequence for DBC-1 (NM_021174.4,2057-2075).
gatgctccagagggatttt

SEQ ID NO: 380576 - DNA, 19 bp, Homo sapiens
  siRNA target sequence for DBC-1 (NM_021174.4,2066-2084).
gagggattttggctataga

SEQ ID NO: 380577 - DNA, 19 bp, Homo sapiens
  siRNA target sequence for DBC-1 (NM_021174.4,2076-2094).
ggctatagagtttataaga

SEQ ID NO: 380578 - DNA, 19 bp, Homo sapiens
  siRNA target sequence for DBC-1 (NM_021174.4,2077-2095).
gctatagagtttataagat

SEQ ID NO: 380579 - DNA, 19 bp, Homo sapiens
  siRNA target sequence for IGRP (NM_021176.1,17-35).
ggaatggagtgctcataat

SEQ ID NO: 380580 - DNA, 19 bp, Homo sapiens
  siRNA target sequence for IGRP (NM_021176.1,52-70).
gactaccgagcttactaca

SEQ ID NO: 380581 - DNA, 19 bp, Homo sapiens
  siRNA target sequence for IGRP (NM_021176.1,57-75).
ccgagcttactacactttt

SEQ ID NO: 380582 - DNA, 19 bp, Homo sapiens
  siRNA target sequence for IGRP (NM_021176.1,59-77).
gagcttactacacttttct

SEQ ID NO: 380583 - DNA, 19 bp, Homo sapiens
  siRNA target sequence for IGRP (NM_021176.1,61-79).
gcttactacacttttctaa

SEQ ID NO: 380584 - DNA, 19 bp, Homo sapiens
  siRNA target sequence for IGRP (NM_021176.1,155-173).
cagttggaaccaagatgat

SEQ ID NO: 380585 - DNA, 19 bp, Homo sapiens
  siRNA target sequence for IGRP (NM_021176.1,157-175).
gttggaaccaagatgatat

SEQ ID NO: 380586 - DNA, 19 bp, Homo sapiens
  siRNA target sequence for IGRP (NM_021176.1,171-189).
gatatgggtagcagtcatt

SEQ ID NO: 380587 - DNA, 19 bp, Homo sapiens
  siRNA target sequence for IGRP (NM_021176.1,182-200).
cagtcattggggattggtt

SEQ ID NO: 380588 - DNA, 19 bp, Homo sapiens
  siRNA target sequence for IGRP (NM_021176.1,190-208).
ggggattggttaaatctta

SEQ ID NO: 380589 - DNA, 19 bp, Homo sapiens
  siRNA target sequence for IGRP (NM_021176.1,245-263).
ggtgggtccaagaaactca

SEQ ID NO: 380590 - DNA, 19 bp, Homo sapiens
  siRNA target sequence for IGRP (NM_021176.1,284-302).
gtccatgccttgaacagtt

SEQ ID NO: 380591 - DNA, 19 bp, Homo sapiens
  siRNA target sequence for IGRP (NM_021176.1,303-321).
ccctactacatgtgaaaca

SEQ ID NO: 380592 - DNA, 19 bp, Homo sapiens
  siRNA target sequence for IGRP (NM_021176.1,364-382).
gtctggtatgtcatggtaa

SEQ ID NO: 380593 - DNA, 19 bp, Homo sapiens
  siRNA target sequence for IGRP (NM_021176.1,410-428).
ggatggataagttctctat

SEQ ID NO: 380594 - DNA, 19 bp, Homo sapiens
  siRNA target sequence for IGRP (NM_021176.1,414-432).
ggataagttctctatcact

SEQ ID NO: 380595 - DNA, 19 bp, Homo sapiens
  siRNA target sequence for IGRP (NM_021176.1,494-512).
gcatctccagagtattcat

SEQ ID NO: 380596 - DNA, 19 bp, Homo sapiens
  siRNA target sequence for IGRP (NM_021176.1,495-513).
catctccagagtattcata

SEQ ID NO: 380597 - DNA, 19 bp, Homo sapiens
  siRNA target sequence for IGRP (NM_021176.1,583-601).
cacactccaggcatccaaa

SEQ ID NO: 380598 - DNA, 19 bp, Homo sapiens
  siRNA target sequence for IGRP (NM_021176.1,658-676).
ggcttttacctgcttctta

SEQ ID NO: 380599 - DNA, 19 bp, Homo sapiens
  siRNA target sequence for IGRP (NM_021176.1,704-722).
ccgtgcccatagccaaaaa

SEQ ID NO: 380600 - DNA, 19 bp, Homo sapiens
  siRNA target sequence for IGRP (NM_021176.1,706-724).
gtgcccatagccaaaaagt

SEQ ID NO: 380601 - DNA, 19 bp, Homo sapiens
  siRNA target sequence for IGRP (NM_021176.1,737-755).
ccgactggatccacattga

SEQ ID NO: 380602 - DNA, 19 bp, Homo sapiens
  siRNA target sequence for IGRP (NM_021176.1,845-863).
gccgagggggaaataacta

SEQ ID NO: 380603 - DNA, 19 bp, Homo sapiens
  siRNA target sequence for IGRP (NM_021176.1,847-865).
cgagggggaaataactaca

SEQ ID NO: 380604 - DNA, 19 bp, Homo sapiens
  siRNA target sequence for IGRP (NM_021176.1,938-956).
cgactcacgaagagcattt

SEQ ID NO: 380605 - DNA, 19 bp, Homo sapiens
  siRNA target sequence for IGRP (NM_021176.1,939-957).
gactcacgaagagcattta

SEQ ID NO: 380606 - DNA, 19 bp, Homo sapiens
  siRNA target sequence for IGRP (NM_021176.1,941-959).
ctcacgaagagcatttatt

SEQ ID NO: 380607 - DNA, 19 bp, Homo sapiens
  siRNA target sequence for IGRP (NM_021176.1,995-1013).
ccctaactgtggttgcttt

SEQ ID NO: 380608 - DNA, 19 bp, Homo sapiens
  siRNA target sequence for IGRP (NM_021176.1,1014-1032).
cattccctactctgttcat

SEQ ID NO: 380609 - DNA, 19 bp, Homo sapiens
  siRNA target sequence for IGRP (NM_021176.1,1018-1036).
ccctactctgttcatatgt

SEQ ID NO: 380610 - DNA, 19 bp, Homo sapiens
  siRNA target sequence for IGRP (NM_021176.1,1019-1037).
cctactctgttcatatgtt

SEQ ID NO: 380611 - DNA, 19 bp, Homo sapiens
  siRNA target sequence for IGRP (NM_021176.1,1020-1038).
ctactctgttcatatgtta

SEQ ID NO: 380612 - DNA, 19 bp, Homo sapiens
  siRNA target sequence for LOC57821 (NM_021179.1,232-250).
gacctggagtggttaatta

SEQ ID NO: 380613 - DNA, 19 bp, Homo sapiens
  siRNA target sequence for LOC57821 (NM_021179.1,234-252).
cctggagtggttaattaat

SEQ ID NO: 380614 - DNA, 19 bp, Homo sapiens
  siRNA target sequence for LOC57821 (NM_021179.1,237-255).
ggagtggttaattaatgaa

SEQ ID NO: 380615 - DNA, 19 bp, Homo sapiens
  siRNA target sequence for LOC57821 (NM_021179.1,315-333).
ccaagacttaaaagagaat

SEQ ID NO: 380616 - DNA, 19 bp, Homo sapiens
  siRNA target sequence for LOC57821 (NM_021179.1,351-369).
caccaaacggcattctgat

SEQ ID NO: 380617 - DNA, 19 bp, Homo sapiens
  siRNA target sequence for LOC57821 (NM_021179.1,440-458).
ctttggatcccatatcaga

SEQ ID NO: 380618 - DNA, 19 bp, Homo sapiens
  siRNA target sequence for LOC57821 (NM_021179.1,529-547).
gaggaagtaaggagatata

SEQ ID NO: 380619 - DNA, 19 bp, Homo sapiens
  siRNA target sequence for LOC57821 (NM_021179.1,532-550).
gaagtaaggagatatatta

SEQ ID NO: 380620 - DNA, 19 bp, Homo sapiens
  siRNA target sequence for LOC57821 (NM_021179.1,589-607).
caagaaccggtgaatgata

SEQ ID NO: 380621 - DNA, 19 bp, Homo sapiens
  siRNA target sequence for LOC57821 (NM_021179.1,611-629).
gggagcgaaaacttaagtt

SEQ ID NO: 380622 - DNA, 19 bp, Homo sapiens
  siRNA target sequence for LOC57821 (NM_021179.1,613-631).
gagcgaaaacttaagttca

SEQ ID NO: 380623 - DNA, 19 bp, Homo sapiens
  siRNA target sequence for LOC57821 (NM_021179.1,627-645).
gttcaaggaccagttagtt

SEQ ID NO: 380624 - DNA, 19 bp, Homo sapiens
  siRNA target sequence for LOC57821 (NM_021179.1,651-669).
ggaagttcctccactagaa

SEQ ID NO: 380625 - DNA, 19 bp, Homo sapiens
  siRNA target sequence for LOC57821 (NM_021179.1,661-679).
ccactagaagacactacta

SEQ ID NO: 380626 - DNA, 19 bp, Homo sapiens
  siRNA target sequence for LOC57821 (NM_021179.1,664-682).
ctagaagacactactactt

SEQ ID NO: 380627 - DNA, 19 bp, Homo sapiens
  siRNA target sequence for LOC57821 (NM_021179.1,724-742).
ctgtcacaattatgtattt

SEQ ID NO: 380628 - DNA, 19 bp, Homo sapiens
  siRNA target sequence for LOC57821 (NM_021179.1,772-790).
ctgtcacttactaatggaa

SEQ ID NO: 380629 - DNA, 19 bp, Homo sapiens
  siRNA target sequence for LOC57821 (NM_021179.1,885-903).
gcctcccattaataatgca

SEQ ID NO: 380630 - DNA, 19 bp, Homo sapiens
  siRNA target sequence for LOC57821 (NM_021179.1,1021-1039).
ggagagccgctggcttata

SEQ ID NO: 380631 - DNA, 19 bp, Homo sapiens
  siRNA target sequence for LOC57821 (NM_021179.1,1022-1040).
gagagccgctggcttatat

SEQ ID NO: 380632 - DNA, 19 bp, Homo sapiens
  siRNA target sequence for LOC57821 (NM_021179.1,1051-1069).
ccactcaaccgcaagactt

SEQ ID NO: 380633 - DNA, 19 bp, Homo sapiens
  siRNA target sequence for LOC57821 (NM_021179.1,1086-1104).
caactcagatcgaagtaaa

SEQ ID NO: 380634 - DNA, 19 bp, Homo sapiens
  siRNA target sequence for LOC57821 (NM_021179.1,1127-1145).
ggacacagtctgcacatat

SEQ ID NO: 380635 - DNA, 19 bp, Homo sapiens
  siRNA target sequence for LOC57821 (NM_021179.1,1236-1254).
ggaagagcgacgaaaaata

SEQ ID NO: 380636 - DNA, 19 bp, Homo sapiens
  siRNA target sequence for LOC57821 (NM_021179.1,1242-1260).
gcgacgaaaaatagaagaa

SEQ ID NO: 380637 - DNA, 19 bp, Homo sapiens
  siRNA target sequence for LOC57821 (NM_021179.1,1277-1295).
gagagaatgacatagtatt

SEQ ID NO: 380638 - DNA, 19 bp, Homo sapiens
  siRNA target sequence for LOC57821 (NM_021179.1,1329-1347).
cttagaaatgaggagaatt

SEQ ID NO: 380639 - DNA, 19 bp, Homo sapiens
  siRNA target sequence for LOC57821 (NM_021179.1,1391-1409).
gagatccacaacaagcttt

SEQ ID NO: 380640 - DNA, 19 bp, Homo sapiens
  siRNA target sequence for LOC57821 (NM_021179.1,1525-1543).
gcctttaaacaatggttaa

SEQ ID NO: 380641 - DNA, 19 bp, Homo sapiens
  siRNA target sequence for LOC57821 (NM_021179.1,1632-1650).
gttacagcaccacctatat

SEQ ID NO: 380642 - DNA, 19 bp, Homo sapiens
  siRNA target sequence for LOC57821 (NM_021179.1,1672-1690).
cgttttactgatcattata

SEQ ID NO: 380643 - DNA, 19 bp, Homo sapiens
  siRNA target sequence for SOM (NM_021180.2,121-139).
gcagaaattctcttacact

SEQ ID NO: 380644 - DNA, 19 bp, Homo sapiens
  siRNA target sequence for SOM (NM_021180.2,156-174).
ggaagacgtacctagaaaa

SEQ ID NO: 380645 - DNA, 19 bp, Homo sapiens
  siRNA target sequence for SOM (NM_021180.2,237-255).
ccttgagcttcctctatga

SEQ ID NO: 380646 - DNA, 19 bp, Homo sapiens
  siRNA target sequence for SOM (NM_021180.2,423-441).
cagagtacccagatttgct

SEQ ID NO: 380647 - DNA, 19 bp, Homo sapiens
  siRNA target sequence for SOM (NM_021180.2,558-576).
ccaccactgatatgtatga

SEQ ID NO: 380648 - DNA, 19 bp, Homo sapiens
  siRNA target sequence for SOM (NM_021180.2,559-577).
caccactgatatgtatgat

SEQ ID NO: 380649 - DNA, 19 bp, Homo sapiens
  siRNA target sequence for SOM (NM_021180.2,561-579).
ccactgatatgtatgataa

SEQ ID NO: 380650 - DNA, 19 bp, Homo sapiens
  siRNA target sequence for SOM (NM_021180.2,675-693).
cgatgctcttcccagatat

SEQ ID NO: 380651 - DNA, 19 bp, Homo sapiens
  siRNA target sequence for SOM (NM_021180.2,990-1008).
ccaagcagcgggtcattga

SEQ ID NO: 380652 - DNA, 19 bp, Homo sapiens
  siRNA target sequence for SOM (NM_021180.2,1054-1072).
ggaggtggcctataatgca

SEQ ID NO: 380653 - DNA, 19 bp, Homo sapiens
  siRNA target sequence for SOM (NM_021180.2,1109-1127).
gtgttcatcggcgtaaact

SEQ ID NO: 380654 - DNA, 19 bp, Homo sapiens
  siRNA target sequence for SOM (NM_021180.2,1111-1129).
gttcatcggcgtaaactgt

SEQ ID NO: 380655 - DNA, 19 bp, Homo sapiens
  siRNA target sequence for SOM (NM_021180.2,1126-1144).
ctgtctgagcacagacttt

SEQ ID NO: 380656 - DNA, 19 bp, Homo sapiens
  siRNA target sequence for SOM (NM_021180.2,1184-1202).
cagattgacacctatgact

SEQ ID NO: 380657 - DNA, 19 bp, Homo sapiens
  siRNA target sequence for SOM (NM_021180.2,1233-1251).
gtgctgtctgccagatcaa

SEQ ID NO: 380658 - DNA, 19 bp, Homo sapiens
  siRNA target sequence for SOM (NM_021180.2,1236-1254).
ctgtctgccagatcaagat

SEQ ID NO: 380659 - DNA, 19 bp, Homo sapiens
  siRNA target sequence for SOM (NM_021180.2,1422-1440).
cgccacccgtgctgttcat

SEQ ID NO: 380660 - DNA, 19 bp, Homo sapiens
  siRNA target sequence for SOM (NM_021180.2,1643-1661).
gacgcgctcatgttgaaga

SEQ ID NO: 380661 - DNA, 19 bp, Homo sapiens
  siRNA target sequence for SOM (NM_021180.2,1707-1725).
ggttccctgaagagaacat

SEQ ID NO: 380662 - DNA, 19 bp, Homo sapiens
  siRNA target sequence for SOM (NM_021180.2,1746-1764).
gcaagcgaggaatcttagt

SEQ ID NO: 380663 - DNA, 19 bp, Homo sapiens
  siRNA target sequence for SOM (NM_021180.2,1752-1770).
gaggaatcttagtcaacat

SEQ ID NO: 380664 - DNA, 19 bp, Homo sapiens
  siRNA target sequence for SOM (NM_021180.2,1827-1845).
gggagctggacggcaaaat

SEQ ID NO: 380665 - DNA, 19 bp, Homo sapiens
  siRNA target sequence for SOM (NM_021180.2,1828-1846).
ggagctggacggcaaaatt

SEQ ID NO: 380666 - DNA, 19 bp, Homo sapiens
  siRNA target sequence for HB-1 (NM_021182.1,164-182).
gtcggaattggttgaagtt

SEQ ID NO: 380667 - DNA, 19 bp, Homo sapiens
  siRNA target sequence for DKFZP434A1022 (NM_021185.3,967-985).
gcaagcatgagggttatgt

SEQ ID NO: 380668 - DNA, 19 bp, Homo sapiens
  siRNA target sequence for DKFZP434A1022 (NM_021185.3,1097-1115).
catcgcgggtgagtatact

SEQ ID NO: 380669 - DNA, 19 bp, Homo sapiens
  siRNA target sequence for DKFZP434A1022 (NM_021185.3,1100-1118).
cgcgggtgagtatactcta

SEQ ID NO: 380670 - DNA, 19 bp, Homo sapiens
  siRNA target sequence for DKFZP434A1022 (NM_021185.3,1124-1142).
gctggtggagagtggatat

SEQ ID NO: 380671 - DNA, 19 bp, Homo sapiens
  siRNA target sequence for DKFZP434A1022 (NM_021185.3,1130-1148).
ggagagtggatatggtaat

SEQ ID NO: 380672 - DNA, 19 bp, Homo sapiens
  siRNA target sequence for DKFZP434A1022 (NM_021185.3,1138-1156).
gatatggtaatgcaagtaa

SEQ ID NO: 380673 - DNA, 19 bp, Homo sapiens
  siRNA target sequence for DKFZP434A1022 (NM_021185.3,1143-1161).
ggtaatgcaagtaaacgtt

SEQ ID NO: 380674 - DNA, 19 bp, Homo sapiens
  siRNA target sequence for DKFZP434A1022 (NM_021185.3,1144-1162).
gtaatgcaagtaaacgttt

SEQ ID NO: 380675 - DNA, 19 bp, Homo sapiens
  siRNA target sequence for DKFZP434A1022 (NM_021185.3,1164-1182).
caggtggtcagctacaaca

SEQ ID NO: 380676 - DNA, 19 bp, Homo sapiens
  siRNA target sequence for DKFZP434A1022 (NM_021185.3,1189-1207).
gtgatgacctggaacttct

SEQ ID NO: 380677 - DNA, 19 bp, Homo sapiens
  siRNA target sequence for DKFZP434A1022 (NM_021185.3,1356-1374).
ctcctgcagagctctaaca

SEQ ID NO: 380678 - DNA, 19 bp, Homo sapiens
  siRNA target sequence for DKFZP434A1022 (NM_021185.3,1362-1380).
cagagctctaacaaggaaa

SEQ ID NO: 380679 - DNA, 19 bp, Homo sapiens
  siRNA target sequence for DKFZP434A1022 (NM_021185.3,1406-1424).
caaggaactgtccatcaaa

SEQ ID NO: 380680 - DNA, 19 bp, Homo sapiens
  siRNA target sequence for DKFZP434A1022 (NM_021185.3,1574-1592).
ctctctctacgcatccaat

SEQ ID NO: 380681 - DNA, 19 bp, Homo sapiens
  siRNA target sequence for DKFZP434A1022 (NM_021185.3,1578-1596).
ctctacgcatccaatgaga

SEQ ID NO: 380682 - DNA, 19 bp, Homo sapiens
  siRNA target sequence for DKFZP434A1022 (NM_021185.3,1635-1653).
cagctggtgtaccttatga

SEQ ID NO: 380683 - DNA, 19 bp, Homo sapiens
  siRNA target sequence for DKFZP434A1022 (NM_021185.3,1744-1762).
ggaaagggggctacttgat

SEQ ID NO: 380684 - DNA, 19 bp, Homo sapiens
  siRNA target sequence for DKFZP434A1022 (NM_021185.3,1998-2016).
cgctggtgggcgaacaaca

SEQ ID NO: 380685 - DNA, 19 bp, Homo sapiens
  siRNA target sequence for DKFZP434A1022 (NM_021185.3,1999-2017).
gctggtgggcgaacaacaa

SEQ ID NO: 380686 - DNA, 19 bp, Homo sapiens
  siRNA target sequence for DKFZP434A1022 (NM_021185.3,2000-2018).
ctggtgggcgaacaacaaa

SEQ ID NO: 380687 - DNA, 19 bp, Homo sapiens
  siRNA target sequence for DKFZP434A1022 (NM_021185.3,2002-2020).
ggtgggcgaacaacaaaca

SEQ ID NO: 380688 - DNA, 19 bp, Homo sapiens
  siRNA target sequence for DKFZP434A1022 (NM_021185.3,2003-2021).
gtgggcgaacaacaaacaa

SEQ ID NO: 380689 - DNA, 19 bp, Homo sapiens
  siRNA target sequence for DKFZP434A1022 (NM_021185.3,2022-2040).
gaccaggattactacttct

SEQ ID NO: 380690 - DNA, 19 bp, Homo sapiens
  siRNA target sequence for DKFZP434A1022 (NM_021185.3,2071-2089).
gcgtgtccatagaaatgga

SEQ ID NO: 380691 - DNA, 19 bp, Homo sapiens
  siRNA target sequence for DKFZP434A1022 (NM_021185.3,2082-2100).
gaaatggacagctacgaaa

SEQ ID NO: 380692 - DNA, 19 bp, Homo sapiens
  siRNA target sequence for DKFZP434A1022 (NM_021185.3,2088-2106).
gacagctacgaaaagatct

SEQ ID NO: 380693 - DNA, 19 bp, Homo sapiens
  siRNA target sequence for DKFZP434A1022 (NM_021185.3,2306-2324).
gcaggaggtcctgattaat

SEQ ID NO: 380694 - DNA, 19 bp, Homo sapiens
  siRNA target sequence for DKFZP434A1022 (NM_021185.3,2325-2343).
cgcaactcggtgctatttt

SEQ ID NO: 380695 - DNA, 19 bp, Homo sapiens
  siRNA target sequence for DKFZP434A1022 (NM_021185.3,2330-2348).
ctcggtgctattttcgatt

SEQ ID NO: 380696 - DNA, 19 bp, Homo sapiens
  siRNA target sequence for DKFZP434A1022 (NM_021185.3,2344-2362).
cgattacgctcaaggataa

SEQ ID NO: 380697 - DNA, 19 bp, Homo sapiens
  siRNA target sequence for DKFZP434A1022 (NM_021185.3,2351-2369).
gctcaaggataaaaagctt

SEQ ID NO: 380698 - DNA, 19 bp, Homo sapiens
  siRNA target sequence for DKFZP434A1022 (NM_021185.3,2357-2375).
ggataaaaagctttgctat

SEQ ID NO: 380699 - DNA, 19 bp, Homo sapiens
  siRNA target sequence for DKFZP434A1022 (NM_021185.3,2372-2390).
ctatgaccaaggcattagt

SEQ ID NO: 380700 - DNA, 19 bp, Homo sapiens
  siRNA target sequence for DKFZP434A1022 (NM_021185.3,2410-2428).
cttccatgacggtcaatgt

SEQ ID NO: 380701 - DNA, 19 bp, Homo sapiens
  siRNA target sequence for DKFZP434A1022 (NM_021185.3,2613-2631).
gagatgccctgctttctct

SEQ ID NO: 380702 - DNA, 19 bp, Homo sapiens
  siRNA target sequence for DKFZP434A1022 (NM_021185.3,2769-2787).
gaaatctaccgcttcaaca

SEQ ID NO: 380703 - DNA, 19 bp, Homo sapiens
  siRNA target sequence for DKFZP434A1022 (NM_021185.3,2912-2930).
cccatgctatgacaatgtt

SEQ ID NO: 380704 - DNA, 19 bp, Homo sapiens
  siRNA target sequence for DKFZP434A1022 (NM_021185.3,2966-2984).
ggtgttggtgagcaataga

SEQ ID NO: 380705 - DNA, 19 bp, Homo sapiens
  siRNA target sequence for DKFZP434A1022 (NM_021185.3,3167-3185).
gatgatccggtggaagata

SEQ ID NO: 380706 - DNA, 19 bp, Homo sapiens
  siRNA target sequence for DKFZP434A1022 (NM_021185.3,3198-3216).
gcctcagaatcctactaca

SEQ ID NO: 380707 - DNA, 19 bp, Homo sapiens
  siRNA target sequence for ZNF410 (NM_021188.1,211-229).
cagagctcctggtacagtt

SEQ ID NO: 380708 - DNA, 19 bp, Homo sapiens
  siRNA target sequence for ZNF410 (NM_021188.1,222-240).
gtacagtttgttcagaata

SEQ ID NO: 380709 - DNA, 19 bp, Homo sapiens
  siRNA target sequence for ZNF410 (NM_021188.1,225-243).
cagtttgttcagaatacgt

SEQ ID NO: 380710 - DNA, 19 bp, Homo sapiens
  siRNA target sequence for ZNF410 (NM_021188.1,255-273).
ggacaggggcttgtagaat

SEQ ID NO: 380711 - DNA, 19 bp, Homo sapiens
  siRNA target sequence for ZNF410 (NM_021188.1,260-278).
ggggcttgtagaatcagaa

SEQ ID NO: 380712 - DNA, 19 bp, Homo sapiens
  siRNA target sequence for ZNF410 (NM_021188.1,327-345).
gaatgcagtcggctaatgt

SEQ ID NO: 380713 - DNA, 19 bp, Homo sapiens
  siRNA target sequence for ZNF410 (NM_021188.1,338-356).
gctaatgttaccagatgat

SEQ ID NO: 380714 - DNA, 19 bp, Homo sapiens
  siRNA target sequence for ZNF410 (NM_021188.1,351-369).
gatgatactacaaatcatt

SEQ ID NO: 380715 - DNA, 19 bp, Homo sapiens
  siRNA target sequence for ZNF410 (NM_021188.1,465-483).
cagaaatccccggagtttt

SEQ ID NO: 380716 - DNA, 19 bp, Homo sapiens
  siRNA target sequence for ZNF410 (NM_021188.1,516-534).
gatctacagccaagtgata

SEQ ID NO: 380717 - DNA, 19 bp, Homo sapiens
  siRNA target sequence for ZNF410 (NM_021188.1,529-547).
gtgatagcacttcttttat

SEQ ID NO: 380718 - DNA, 19 bp, Homo sapiens
  siRNA target sequence for ZNF410 (NM_021188.1,586-604).
ctgagcacttagtgtttgt

SEQ ID NO: 380719 - DNA, 19 bp, Homo sapiens
  siRNA target sequence for ZNF410 (NM_021188.1,695-713).
ggcccatgacagtttgatt

SEQ ID NO: 380720 - DNA, 19 bp, Homo sapiens
  siRNA target sequence for ZNF410 (NM_021188.1,724-742).
gtgcacaactggcaaagaa

SEQ ID NO: 380721 - DNA, 19 bp, Homo sapiens
  siRNA target sequence for ZNF410 (NM_021188.1,789-807).
gatgggcagtcaaaagatt

SEQ ID NO: 380722 - DNA, 19 bp, Homo sapiens
  siRNA target sequence for ZNF410 (NM_021188.1,833-851).
gaagctcaagtgtacagtt

SEQ ID NO: 380723 - DNA, 19 bp, Homo sapiens
  siRNA target sequence for ZNF410 (NM_021188.1,836-854).
gctcaagtgtacagttgaa

SEQ ID NO: 380724 - DNA, 19 bp, Homo sapiens
  siRNA target sequence for ZNF410 (NM_021188.1,873-891).
gtatggccagctcacttta

SEQ ID NO: 380725 - DNA, 19 bp, Homo sapiens
  siRNA target sequence for ZNF410 (NM_021188.1,877-895).
ggccagctcactttaaata

SEQ ID NO: 380726 - DNA, 19 bp, Homo sapiens
  siRNA target sequence for ZNF410 (NM_021188.1,1035-1053).
ggctgtggtaagcagttta

SEQ ID NO: 380727 - DNA, 19 bp, Homo sapiens
  siRNA target sequence for ZNF410 (NM_021188.1,1133-1151).
ccgttcctttgctgagtat

SEQ ID NO: 380728 - DNA, 19 bp, Homo sapiens
  siRNA target sequence for ZNF410 (NM_021188.1,1134-1152).
cgttcctttgctgagtatt

SEQ ID NO: 380729 - DNA, 19 bp, Homo sapiens
  siRNA target sequence for ZNF410 (NM_021188.1,1153-1171).
ctagcctccgaaaacatct

SEQ ID NO: 380730 - DNA, 19 bp, Homo sapiens
  siRNA target sequence for ZNF410 (NM_021188.1,1317-1335).
ccactaatgggcagtagtt

SEQ ID NO: 380731 - DNA, 19 bp, Homo sapiens
  siRNA target sequence for ZNF410 (NM_021188.1,1318-1336).
cactaatgggcagtagttt

SEQ ID NO: 380732 - DNA, 19 bp, Homo sapiens
  siRNA target sequence for ZNF410 (NM_021188.1,1327-1345).
gcagtagtttgcttgaaga

SEQ ID NO: 380733 - DNA, 19 bp, Homo sapiens
  siRNA target sequence for ZNF410 (NM_021188.1,1360-1378).
gtaaaaacctggtgtctat

SEQ ID NO: 380734 - DNA, 19 bp, Homo sapiens
  siRNA target sequence for ZNF410 (NM_021188.1,1432-1450).
ctatcctgggagttgatga

SEQ ID NO: 380735 - DNA, 19 bp, Homo sapiens
  siRNA target sequence for ZNF410 (NM_021188.1,1524-1542).
cagtcagggaggcaatcat

SEQ ID NO: 380736 - DNA, 19 bp, Homo sapiens
  siRNA target sequence for ZNF410 (NM_021188.1,1526-1544).
gtcagggaggcaatcatat

SEQ ID NO: 380737 - DNA, 19 bp, Homo sapiens
  siRNA target sequence for ZNF410 (NM_021188.1,1532-1550).
gaggcaatcatatgaagtt

SEQ ID NO: 380738 - DNA, 19 bp, Homo sapiens
  siRNA target sequence for ZNF410 (NM_021188.1,1564-1582).
cagtaaatccacaagagtt

SEQ ID NO: 380739 - DNA, 19 bp, Homo sapiens
  siRNA target sequence for ZNF410 (NM_021188.1,1573-1591).
cacaagagttactaaacca

SEQ ID NO: 380740 - DNA, 19 bp, Homo sapiens
  siRNA target sequence for ZNF410 (NM_021188.1,1584-1602).
ctaaaccaaggagatttaa

SEQ ID NO: 380741 - DNA, 19 bp, Homo sapiens
  siRNA target sequence for ZNF410 (NM_021188.1,1589-1607).
ccaaggagatttaactgaa

SEQ ID NO: 380742 - DNA, 19 bp, Homo sapiens
  siRNA target sequence for HOXD11 (NM_021192.2,116-134).
cgtcctgccagatgacttt

SEQ ID NO: 380743 - DNA, 19 bp, Homo sapiens
  siRNA target sequence for HOXD11 (NM_021192.2,843-861).
ggaacgcgagtttttcttt

SEQ ID NO: 380744 - DNA, 19 bp, Homo sapiens
  siRNA target sequence for HOXD11 (NM_021192.2,844-862).
gaacgcgagtttttcttta

SEQ ID NO: 380745 - DNA, 19 bp, Homo sapiens
  siRNA target sequence for HOXD11 (NM_021192.2,981-999).
ccgtctgcagtatttcact

SEQ ID NO: 380746 - DNA, 19 bp, Homo sapiens
  siRNA target sequence for HOXD12 (NM_021193.2,281-299).
ccgaagagcaggctaagtt

SEQ ID NO: 380747 - DNA, 19 bp, Homo sapiens
  siRNA target sequence for HOXD12 (NM_021193.2,670-688).
gcggagttggagaacgaat

SEQ ID NO: 380748 - DNA, 19 bp, Homo sapiens
  siRNA target sequence for HOXD12 (NM_021193.2,685-703).
gaattcctcgtcaacgaat

SEQ ID NO: 380749 - DNA, 19 bp, Homo sapiens
  siRNA target sequence for HOXD12 (NM_021193.2,721-739).
cgcaaggaattgtccaata

SEQ ID NO: 380750 - DNA, 19 bp, Homo sapiens
  siRNA target sequence for HOXD12 (NM_021193.2,752-770).
gcgaccagcaagtcaaaat

SEQ ID NO: 380751 - DNA, 19 bp, Homo sapiens
  siRNA target sequence for C20orf110 (NM_021202.1,537-555).
gacgagagctggtttgtta

SEQ ID NO: 380752 - DNA, 19 bp, Homo sapiens
  siRNA target sequence for C20orf110 (NM_021202.1,973-991).
cgtgccagcgccagttcaa

SEQ ID NO: 380753 - DNA, 19 bp, Homo sapiens
  siRNA target sequence for C20orf110 (NM_021202.1,976-994).
gccagcgccagttcaacta

SEQ ID NO: 380754 - DNA, 19 bp, Homo sapiens
  siRNA target sequence for C20orf110 (NM_021202.1,978-996).
cagcgccagttcaactact

SEQ ID NO: 380755 - DNA, 19 bp, Homo sapiens
  siRNA target sequence for TRAPPC1 (NM_021210.2,314-332).
ccaaactagccgttacaaa

SEQ ID NO: 380756 - DNA, 19 bp, Homo sapiens
  siRNA target sequence for TRAPPC1 (NM_021210.2,322-340).
gccgttacaaactccatta

SEQ ID NO: 380757 - DNA, 19 bp, Homo sapiens
  siRNA target sequence for TRAPPC1 (NM_021210.2,324-342).
cgttacaaactccattact

SEQ ID NO: 380758 - DNA, 19 bp, Homo sapiens
  siRNA target sequence for TRAPPC1 (NM_021210.2,325-343).
gttacaaactccattacta

SEQ ID NO: 380759 - DNA, 19 bp, Homo sapiens
  siRNA target sequence for TRAPPC1 (NM_021210.2,347-365).
gacgcccactgggatcaaa

SEQ ID NO: 380760 - DNA, 19 bp, Homo sapiens
  siRNA target sequence for TRAPPC1 (NM_021210.2,349-367).
cgcccactgggatcaaagt

SEQ ID NO: 380761 - DNA, 19 bp, Homo sapiens
  siRNA target sequence for TRAPPC1 (NM_021210.2,350-368).
gcccactgggatcaaagtt

SEQ ID NO: 380762 - DNA, 19 bp, Homo sapiens
  siRNA target sequence for TRAPPC1 (NM_021210.2,352-370).
ccactgggatcaaagttgt

SEQ ID NO: 380763 - DNA, 19 bp, Homo sapiens
  siRNA target sequence for TRAPPC1 (NM_021210.2,358-376).
ggatcaaagttgtcatgaa

SEQ ID NO: 380764 - DNA, 19 bp, Homo sapiens
  siRNA target sequence for TRAPPC1 (NM_021210.2,359-377).
gatcaaagttgtcatgaat

SEQ ID NO: 380765 - DNA, 19 bp, Homo sapiens
  siRNA target sequence for C20orf77 (NM_021215.2,438-456).
gctccgcaaagccaaatca

SEQ ID NO: 380766 - DNA, 19 bp, Homo sapiens
  siRNA target sequence for C20orf77 (NM_021215.2,439-457).
ctccgcaaagccaaatcaa

SEQ ID NO: 380767 - DNA, 19 bp, Homo sapiens
  siRNA target sequence for C20orf77 (NM_021215.2,450-468).
caaatcaaatagaaagctt

SEQ ID NO: 380768 - DNA, 19 bp, Homo sapiens
  siRNA target sequence for C20orf77 (NM_021215.2,485-503).
cgaatgatgtcatccaaaa

SEQ ID NO: 380769 - DNA, 19 bp, Homo sapiens
  siRNA target sequence for C20orf77 (NM_021215.2,530-548).
ctagagaatttgaatctgt

SEQ ID NO: 380770 - DNA, 19 bp, Homo sapiens
  siRNA target sequence for C20orf77 (NM_021215.2,630-648).
gcaagaacgaagtgtgtat

SEQ ID NO: 380771 - DNA, 19 bp, Homo sapiens
  siRNA target sequence for C20orf77 (NM_021215.2,731-749).
ctctgaaacgaacttttca

SEQ ID NO: 380772 - DNA, 19 bp, Homo sapiens
  siRNA target sequence for C20orf77 (NM_021215.2,880-898).
gctactgtccgacagaaaa

SEQ ID NO: 380773 - DNA, 19 bp, Homo sapiens
  siRNA target sequence for C20orf77 (NM_021215.2,881-899).
ctactgtccgacagaaaat

SEQ ID NO: 380774 - DNA, 19 bp, Homo sapiens
  siRNA target sequence for C20orf77 (NM_021215.2,886-904).
gtccgacagaaaattgctt

SEQ ID NO: 380775 - DNA, 19 bp, Homo sapiens
  siRNA target sequence for C20orf77 (NM_021215.2,961-979).
gcagctgaacgtctttcaa

SEQ ID NO: 380776 - DNA, 19 bp, Homo sapiens
  siRNA target sequence for C20orf77 (NM_021215.2,964-982).
gctgaacgtctttcaaaaa

SEQ ID NO: 380777 - DNA, 19 bp, Homo sapiens
  siRNA target sequence for C20orf77 (NM_021215.2,1000-1018).
ctgttactagcagaatata

SEQ ID NO: 380778 - DNA, 19 bp, Homo sapiens
  siRNA target sequence for C20orf77 (NM_021215.2,1063-1081).
cggatgttggtggagtata

SEQ ID NO: 380779 - DNA, 19 bp, Homo sapiens
  siRNA target sequence for C20orf77 (NM_021215.2,1075-1093).
gagtatacccagaatcaga

SEQ ID NO: 380780 - DNA, 19 bp, Homo sapiens
  siRNA target sequence for C20orf77 (NM_021215.2,1082-1100).
cccagaatcagaaagatgt

SEQ ID NO: 380781 - DNA, 19 bp, Homo sapiens
  siRNA target sequence for C20orf77 (NM_021215.2,1084-1102).
cagaatcagaaagatgttt

SEQ ID NO: 380782 - DNA, 19 bp, Homo sapiens
  siRNA target sequence for C20orf77 (NM_021215.2,1252-1270).
gctggggacctgttttcaa

SEQ ID NO: 380783 - DNA, 19 bp, Homo sapiens
  siRNA target sequence for HSPC043 (NM_021218.1,273-291).
gaaccagtcttcaacaaat

SEQ ID NO: 380784 - DNA, 19 bp, Homo sapiens
  siRNA target sequence for HSPC043 (NM_021218.1,313-331).
ctctcgagaccctctctta

SEQ ID NO: 380785 - DNA, 19 bp, Homo sapiens
  siRNA target sequence for HSPC043 (NM_021218.1,320-338).
gaccctctcttaataagga

SEQ ID NO: 380786 - DNA, 19 bp, Homo sapiens
  siRNA target sequence for HSPC043 (NM_021218.1,440-458).
ctgcatttgggaaccttat

SEQ ID NO: 380787 - DNA, 19 bp, Homo sapiens
  siRNA target sequence for ZNF462 (NM_021224.2,260-278).
cggtcaaaggggtactcat

SEQ ID NO: 380788 - DNA, 19 bp, Homo sapiens
  siRNA target sequence for ZNF462 (NM_021224.2,261-279).
ggtcaaaggggtactcatt

SEQ ID NO: 380789 - DNA, 19 bp, Homo sapiens
  siRNA target sequence for ZNF462 (NM_021224.2,334-352).
catacggccaccattcgaa

SEQ ID NO: 380790 - DNA, 19 bp, Homo sapiens
  siRNA target sequence for ZNF462 (NM_021224.2,412-430).
ctggagcgggacaaaacga

SEQ ID NO: 380791 - DNA, 19 bp, Homo sapiens
  siRNA target sequence for ZNF462 (NM_021224.2,414-432).
ggagcgggacaaaacgaaa

SEQ ID NO: 380792 - DNA, 19 bp, Homo sapiens
  siRNA target sequence for ZNF462 (NM_021224.2,484-502).
gcactgaggaagcatatca

SEQ ID NO: 380793 - DNA, 19 bp, Homo sapiens
  siRNA target sequence for ZNF462 (NM_021224.2,491-509).
ggaagcatatcaagaaaga

SEQ ID NO: 380794 - DNA, 19 bp, Homo sapiens
  siRNA target sequence for ZNF462 (NM_021224.2,543-561).
catgcgatgggcatttcta

SEQ ID NO: 380795 - DNA, 19 bp, Homo sapiens
  siRNA target sequence for ZNF462 (NM_021224.2,546-564).
gcgatgggcatttctagat

SEQ ID NO: 380796 - DNA, 19 bp, Homo sapiens
  siRNA target sequence for ZNF462 (NM_021224.2,647-665).
ggaggcatccagaacacta

SEQ ID NO: 380797 - DNA, 19 bp, Homo sapiens
  siRNA target sequence for ZNF462 (NM_021224.2,650-668).
ggcatccagaacactatgt

SEQ ID NO: 380798 - DNA, 19 bp, Homo sapiens
  siRNA target sequence for ZNF462 (NM_021224.2,651-669).
gcatccagaacactatgtt

SEQ ID NO: 380799 - DNA, 19 bp, Homo sapiens
  siRNA target sequence for ZNF462 (NM_021224.2,655-673).
ccagaacactatgttgatt

SEQ ID NO: 380800 - DNA, 19 bp, Homo sapiens
  siRNA target sequence for ZNF462 (NM_021224.2,656-674).
cagaacactatgttgatta

SEQ ID NO: 380801 - DNA, 19 bp, Homo sapiens
  siRNA target sequence for ZNF462 (NM_021224.2,737-755).
cagccgaagccaaaaccta

SEQ ID NO: 380802 - DNA, 19 bp, Homo sapiens
  siRNA target sequence for ZNF462 (NM_021224.2,762-780).
cagggactgtgttttcgaa

SEQ ID NO: 380803 - DNA, 19 bp, Homo sapiens
  siRNA target sequence for ZNF462 (NM_021224.2,788-806).
ccatctgggacatcactaa

SEQ ID NO: 380804 - DNA, 19 bp, Homo sapiens
  siRNA target sequence for ZNF462 (NM_021224.2,789-807).
catctgggacatcactaat

SEQ ID NO: 380805 - DNA, 19 bp, Homo sapiens
  siRNA target sequence for ZNF462 (NM_021224.2,794-812).
gggacatcactaatcacta

SEQ ID NO: 380806 - DNA, 19 bp, Homo sapiens
  siRNA target sequence for ZNF462 (NM_021224.2,803-821).
ctaatcactaccaagcatt

SEQ ID NO: 380807 - DNA, 19 bp, Homo sapiens
  siRNA target sequence for ZNF462 (NM_021224.2,851-869).
cagtgctactggacatcat

SEQ ID NO: 380808 - DNA, 19 bp, Homo sapiens
  siRNA target sequence for ZNF462 (NM_021224.2,886-904).
gtggagaagcccattcttt

SEQ ID NO: 380809 - DNA, 19 bp, Homo sapiens
  siRNA target sequence for ZNF462 (NM_021224.2,1064-1082).
gcacggtatgccaatctga

SEQ ID NO: 380810 - DNA, 19 bp, Homo sapiens
  siRNA target sequence for ZNF462 (NM_021224.2,1068-1086).
ggtatgccaatctgagtat

SEQ ID NO: 380811 - DNA, 19 bp, Homo sapiens
  siRNA target sequence for ZNF462 (NM_021224.2,1179-1197).
cccaggtgccgtctacaaa

SEQ ID NO: 380812 - DNA, 19 bp, Homo sapiens
  siRNA target sequence for ZNF462 (NM_021224.2,1180-1198).
ccaggtgccgtctacaaat

SEQ ID NO: 380813 - DNA, 19 bp, Homo sapiens
  siRNA target sequence for ZNF462 (NM_021224.2,1342-1360).
gagacgagcaggatcttca

SEQ ID NO: 380814 - DNA, 19 bp, Homo sapiens
  siRNA target sequence for ZNF462 (NM_021224.2,1375-1393).
gcctaccggtgcaaactgt

SEQ ID NO: 380815 - DNA, 19 bp, Homo sapiens
  siRNA target sequence for ZNF462 (NM_021224.2,1432-1450).
cactacgagaagtatcaca

SEQ ID NO: 380816 - DNA, 19 bp, Homo sapiens
  siRNA target sequence for ZNF462 (NM_021224.2,1434-1452).
ctacgagaagtatcacaat

SEQ ID NO: 380817 - DNA, 19 bp, Homo sapiens
  siRNA target sequence for ZNF462 (NM_021224.2,1634-1652).
gccagctctgcaagtactt

SEQ ID NO: 380818 - DNA, 19 bp, Homo sapiens
  siRNA target sequence for ZNF462 (NM_021224.2,1800-1818).
gaagcgccacgacattgat

SEQ ID NO: 380819 - DNA, 19 bp, Homo sapiens
  siRNA target sequence for ZNF462 (NM_021224.2,1810-1828).
gacattgatgcgtattaca

SEQ ID NO: 380820 - DNA, 19 bp, Homo sapiens
  siRNA target sequence for ZNF462 (NM_021224.2,1812-1830).
cattgatgcgtattacact

SEQ ID NO: 380821 - DNA, 19 bp, Homo sapiens
  siRNA target sequence for ZNF462 (NM_021224.2,1995-2013).
cgtgtcccattacatgaaa

SEQ ID NO: 380822 - DNA, 19 bp, Homo sapiens
  siRNA target sequence for ZNF462 (NM_021224.2,2182-2200).
ccattccgctgcatcaaat

SEQ ID NO: 380823 - DNA, 19 bp, Homo sapiens
  siRNA target sequence for ZNF462 (NM_021224.2,2230-2248).
ctgctgtgcatgcattaca

SEQ ID NO: 380824 - DNA, 19 bp, Homo sapiens
  siRNA target sequence for ZNF462 (NM_021224.2,2257-2275).
cacagtcgggacctaaaga

SEQ ID NO: 380825 - DNA, 19 bp, Homo sapiens
  siRNA target sequence for ZNF462 (NM_021224.2,2370-2388).
gacctcacacttgaacatt

SEQ ID NO: 380826 - DNA, 19 bp, Homo sapiens
  siRNA target sequence for ZNF462 (NM_021224.2,2372-2390).
cctcacacttgaacattca

SEQ ID NO: 380827 - DNA, 19 bp, Homo sapiens
  siRNA target sequence for ZNF462 (NM_021224.2,2493-2511).
gaggccttttggtcactta

SEQ ID NO: 380828 - DNA, 19 bp, Homo sapiens
  siRNA target sequence for ZNF462 (NM_021224.2,2542-2560).
gtggtgggctacaaatgta

SEQ ID NO: 380829 - DNA, 19 bp, Homo sapiens
  siRNA target sequence for ZNF462 (NM_021224.2,2544-2562).
ggtgggctacaaatgtaaa

SEQ ID NO: 380830 - DNA, 19 bp, Homo sapiens
  siRNA target sequence for ZNF462 (NM_021224.2,2797-2815).
ggataccattgcagtcaat

SEQ ID NO: 380831 - DNA, 19 bp, Homo sapiens
  siRNA target sequence for ZNF462 (NM_021224.2,2838-2856).
gcaggggctgcgttctcat

SEQ ID NO: 380832 - DNA, 19 bp, Homo sapiens
  siRNA target sequence for ZNF462 (NM_021224.2,2869-2887).
ctggccctggccatgttta

SEQ ID NO: 380833 - DNA, 19 bp, Homo sapiens
  siRNA target sequence for ZNF462 (NM_021224.2,2966-2984).
cccaccacggacaccataa

SEQ ID NO: 380834 - DNA, 19 bp, Homo sapiens
  siRNA target sequence for ZNF462 (NM_021224.2,2967-2985).
ccaccacggacaccataaa

SEQ ID NO: 380835 - DNA, 19 bp, Homo sapiens
  siRNA target sequence for ZNF462 (NM_021224.2,2986-3004).
ccattccgatgcaaactct

SEQ ID NO: 380836 - DNA, 19 bp, Homo sapiens
  siRNA target sequence for ZNF462 (NM_021224.2,3029-3047).
gccggctgaaaacacatat

SEQ ID NO: 380837 - DNA, 19 bp, Homo sapiens
  siRNA target sequence for ZNF462 (NM_021224.2,3030-3048).
ccggctgaaaacacatata

SEQ ID NO: 380838 - DNA, 19 bp, Homo sapiens
  siRNA target sequence for ZNF462 (NM_021224.2,3032-3050).
ggctgaaaacacatatact

SEQ ID NO: 380839 - DNA, 19 bp, Homo sapiens
  siRNA target sequence for ZNF462 (NM_021224.2,3067-3085).
gagcatgcctacaagtgtt

SEQ ID NO: 380840 - DNA, 19 bp, Homo sapiens
  siRNA target sequence for ZNF462 (NM_021224.2,3070-3088).
catgcctacaagtgttctt

SEQ ID NO: 380841 - DNA, 19 bp, Homo sapiens
  siRNA target sequence for ZNF462 (NM_021224.2,3241-3259).
gtggaagactccaatgact

SEQ ID NO: 380842 - DNA, 19 bp, Homo sapiens
  siRNA target sequence for ZNF462 (NM_021224.2,3316-3334).
gccctggcaaggaacaaca

SEQ ID NO: 380843 - DNA, 19 bp, Homo sapiens
  siRNA target sequence for ZNF462 (NM_021224.2,3399-3417).
gcttcactgcgaattctgt

SEQ ID NO: 380844 - DNA, 19 bp, Homo sapiens
  siRNA target sequence for ZNF462 (NM_021224.2,3403-3421).
cactgcgaattctgtgaat

SEQ ID NO: 380845 - DNA, 19 bp, Homo sapiens
  siRNA target sequence for ZNF462 (NM_021224.2,3469-3487).
catggtgggaagaagcttt

SEQ ID NO: 380846 - DNA, 19 bp, Homo sapiens
  siRNA target sequence for ZNF462 (NM_021224.2,3494-3512).
gcaaagactgctcctttta

SEQ ID NO: 380847 - DNA, 19 bp, Homo sapiens
  siRNA target sequence for ZNF462 (NM_021224.2,3506-3524).
ccttttacacaggctttaa

SEQ ID NO: 380848 - DNA, 19 bp, Homo sapiens
  siRNA target sequence for RhoGAP2 (NM_021226.2,481-499).
cgtggggatcagcttttct

SEQ ID NO: 380849 - DNA, 19 bp, Homo sapiens
  siRNA target sequence for RhoGAP2 (NM_021226.2,482-500).
gtggggatcagcttttcta

SEQ ID NO: 380850 - DNA, 19 bp, Homo sapiens
  siRNA target sequence for RhoGAP2 (NM_021226.2,528-546).
ccagggatttatttctcta

SEQ ID NO: 380851 - DNA, 19 bp, Homo sapiens
  siRNA target sequence for RhoGAP2 (NM_021226.2,780-798).
ccaccacgagcggaagtat

SEQ ID NO: 380852 - DNA, 19 bp, Homo sapiens
  siRNA target sequence for RhoGAP2 (NM_021226.2,1160-1178).
gcaagtttctggatgaagt

SEQ ID NO: 380853 - DNA, 19 bp, Homo sapiens
  siRNA target sequence for RhoGAP2 (NM_021226.2,1215-1233).
gaatctggcaaccgttttt

SEQ ID NO: 380854 - DNA, 19 bp, Homo sapiens
  siRNA target sequence for RhoGAP2 (NM_021226.2,1226-1244).
ccgtttttggacctaacat

SEQ ID NO: 380855 - DNA, 19 bp, Homo sapiens
  siRNA target sequence for RhoGAP2 (NM_021226.2,1227-1245).
cgtttttggacctaacatt

SEQ ID NO: 380856 - DNA, 19 bp, Homo sapiens
  siRNA target sequence for RhoGAP2 (NM_021226.2,2154-2172).
gagtgtgaaaagaatcgaa

SEQ ID NO: 380857 - DNA, 19 bp, Homo sapiens
  siRNA target sequence for RhoGAP2 (NM_021226.2,2177-2195).
ggagtgctgacctgagaaa

SEQ ID NO: 380858 - DNA, 19 bp, Homo sapiens
  siRNA target sequence for RhoGAP2 (NM_021226.2,2182-2200).
gctgacctgagaaaacgaa

SEQ ID NO: 380859 - DNA, 19 bp, Homo sapiens
  siRNA target sequence for RhoGAP2 (NM_021226.2,2183-2201).
ctgacctgagaaaacgaat

SEQ ID NO: 380860 - DNA, 19 bp, Homo sapiens
  siRNA target sequence for RhoGAP2 (NM_021226.2,2198-2216).
gaatgtcccggttagaaga

SEQ ID NO: 380861 - DNA, 19 bp, Homo sapiens
  siRNA target sequence for RhoGAP2 (NM_021226.2,2202-2220).
gtcccggttagaagaagaa

SEQ ID NO: 380862 - DNA, 19 bp, Homo sapiens
  siRNA target sequence for SR-A1 (NM_021228.1,156-174).
ggggacctgcccaatgata

SEQ ID NO: 380863 - DNA, 19 bp, Homo sapiens
  siRNA target sequence for SR-A1 (NM_021228.1,157-175).
gggacctgcccaatgataa

SEQ ID NO: 380864 - DNA, 19 bp, Homo sapiens
  siRNA target sequence for SR-A1 (NM_021228.1,158-176).
ggacctgcccaatgataaa

SEQ ID NO: 380865 - DNA, 19 bp, Homo sapiens
  siRNA target sequence for SR-A1 (NM_021228.1,679-697).
cccgattcgatatctatga

SEQ ID NO: 380866 - DNA, 19 bp, Homo sapiens
  siRNA target sequence for SR-A1 (NM_021228.1,733-751).
cgcctgctccggagcaaaa

SEQ ID NO: 380867 - DNA, 19 bp, Homo sapiens
  siRNA target sequence for SR-A1 (NM_021228.1,735-753).
cctgctccggagcaaaagt

SEQ ID NO: 380868 - DNA, 19 bp, Homo sapiens
  siRNA target sequence for SR-A1 (NM_021228.1,736-754).
ctgctccggagcaaaagta

SEQ ID NO: 380869 - DNA, 19 bp, Homo sapiens
  siRNA target sequence for SR-A1 (NM_021228.1,1548-1566).
ccgcccacgcgcaagaagt

SEQ ID NO: 380870 - DNA, 19 bp, Homo sapiens
  siRNA target sequence for SR-A1 (NM_021228.1,2589-2607).
ggctccattggcgtcaaat

SEQ ID NO: 380871 - DNA, 19 bp, Homo sapiens
  siRNA target sequence for SR-A1 (NM_021228.1,2590-2608).
gctccattggcgtcaaatt

SEQ ID NO: 380872 - DNA, 19 bp, Homo sapiens
  siRNA target sequence for SR-A1 (NM_021228.1,2689-2707).
gcagcaccaagcccaaaaa

SEQ ID NO: 380873 - DNA, 19 bp, Homo sapiens
  siRNA target sequence for SR-A1 (NM_021228.1,2773-2791).
ccaagaccaggaaaaaggt

SEQ ID NO: 380874 - DNA, 19 bp, Homo sapiens
  siRNA target sequence for SR-A1 (NM_021228.1,2824-2842).
gccaggtgtcgctgaagaa

SEQ ID NO: 380875 - DNA, 19 bp, Homo sapiens
  siRNA target sequence for SR-A1 (NM_021228.1,3609-3627).
ggccgtggggacacagata

SEQ ID NO: 380876 - DNA, 19 bp, Homo sapiens
  siRNA target sequence for SR-A1 (NM_021228.1,3610-3628).
gccgtggggacacagataa

SEQ ID NO: 380877 - DNA, 19 bp, Homo sapiens
  siRNA target sequence for SR-A1 (NM_021228.1,3680-3698).
ggccatcaagccatactat

SEQ ID NO: 380878 - DNA, 19 bp, Homo sapiens
  siRNA target sequence for SELK (NM_021237.2,147-165).
ctggggaatagctgagttt

SEQ ID NO: 380879 - DNA, 19 bp, Homo sapiens
  siRNA target sequence for STRAIT11499 (NM_021242.3,886-904).
cagaagcactcgctcttta

SEQ ID NO: 380880 - DNA, 19 bp, Homo sapiens
  siRNA target sequence for STRAIT11499 (NM_021242.3,897-915).
gctctttaacgccatgaat

SEQ ID NO: 380881 - DNA, 19 bp, Homo sapiens
  siRNA target sequence for STRAIT11499 (NM_021242.3,906-924).
cgccatgaatcgcttcatt

SEQ ID NO: 380882 - DNA, 19 bp, Homo sapiens
  siRNA target sequence for STRAIT11499 (NM_021242.3,1351-1369).
gccaacatcctcactaaca

SEQ ID NO: 380883 - DNA, 19 bp, Homo sapiens
  siRNA target sequence for STRAIT11499 (NM_021242.3,1353-1371).
caacatcctcactaacaga

SEQ ID NO: 380884 - DNA, 19 bp, Homo sapiens
  siRNA target sequence for MYOZ1 (NM_021245.2,481-499).
gtgtcccaagggatgtgat

SEQ ID NO: 380885 - DNA, 19 bp, Homo sapiens
  siRNA target sequence for MYOZ1 (NM_021245.2,666-684).
gctggtcagggattctcat

SEQ ID NO: 380886 - DNA, 19 bp, Homo sapiens
  siRNA target sequence for MYOZ1 (NM_021245.2,667-685).
ctggtcagggattctcata

SEQ ID NO: 380887 - DNA, 19 bp, Homo sapiens
  siRNA target sequence for MYOZ1 (NM_021245.2,943-961).
gggttgacccccagcaaaa

SEQ ID NO: 380888 - DNA, 19 bp, Homo sapiens
  siRNA target sequence for MYOZ1 (NM_021245.2,944-962).
ggttgacccccagcaaaaa

SEQ ID NO: 380889 - DNA, 19 bp, Homo sapiens
  siRNA target sequence for MYOZ1 (NM_021245.2,1128-1146).
ctggtcctctacaaccaaa

SEQ ID NO: 380890 - DNA, 19 bp, Homo sapiens
  siRNA target sequence for MYOZ1 (NM_021245.2,1154-1172).
caacaggccttctttcaat

SEQ ID NO: 380891 - DNA, 19 bp, Homo sapiens
  siRNA target sequence for MYOZ1 (NM_021245.2,1198-1216).
ctggggagcctgtagacta

SEQ ID NO: 380892 - DNA, 19 bp, Homo sapiens
  siRNA target sequence for MYOZ1 (NM_021245.2,1201-1219).
gggagcctgtagactacaa

SEQ ID NO: 380893 - DNA, 19 bp, Homo sapiens
  siRNA target sequence for LY6G6D (NM_021246.1,44-62).
cccaggctgcagacaacat

SEQ ID NO: 380894 - DNA, 19 bp, Homo sapiens
  siRNA target sequence for LY6G6D (NM_021246.1,252-270).
cagactgctggggaactat

SEQ ID NO: 380895 - DNA, 19 bp, Homo sapiens
  siRNA target sequence for LY6G6D (NM_021246.1,276-294).
gtggttggagggatccaaa

SEQ ID NO: 380896 - DNA, 19 bp, Homo sapiens
  siRNA target sequence for LY6G6D (NM_021246.1,379-397).
ctcaaaggatcccagttat

SEQ ID NO: 380897 - DNA, 19 bp, Homo sapiens
  siRNA target sequence for LY6G6D (NM_021246.1,381-399).
caaaggatcccagttatct

SEQ ID NO: 380898 - DNA, 19 bp, Homo sapiens
  siRNA target sequence for LY6G6D (NM_021246.1,584-602).
gccgaagaccaagaatcat

SEQ ID NO: 380899 - DNA, 19 bp, Homo sapiens
  siRNA target sequence for LY6G6D (NM_021246.1,693-711).
ctgggacatgccttggatt

SEQ ID NO: 380900 - DNA, 19 bp, Homo sapiens
  siRNA target sequence for LY6G6D (NM_021246.1,811-829).
cgaatgcggtgctacaact

SEQ ID NO: 380901 - DNA, 19 bp, Homo sapiens
  siRNA target sequence for LY6G6D (NM_021246.1,927-945).
ccccccagtgaccttgatt

SEQ ID NO: 380902 - DNA, 19 bp, Homo sapiens
  siRNA target sequence for LY6G6D (NM_021246.1,966-984).
cgcagcccatcattgcaat

SEQ ID NO: 380903 - DNA, 19 bp, Homo sapiens
  siRNA target sequence for LIR9 (NM_021250.2,458-476).
gataccgctgttactacta

SEQ ID NO: 380904 - DNA, 19 bp, Homo sapiens
  siRNA target sequence for LIR9 (NM_021250.2,618-636).
gagattcgacaggttcatt

SEQ ID NO: 380905 - DNA, 19 bp, Homo sapiens
  siRNA target sequence for LIR9 (NM_021250.2,767-785).
gctctcgcaggcatatcct

SEQ ID NO: 380906 - DNA, 19 bp, Homo sapiens
  siRNA target sequence for PELI2 (NM_021255.1,242-260).
ggtggtgctcgggtacaat

SEQ ID NO: 380907 - DNA, 19 bp, Homo sapiens
  siRNA target sequence for PELI2 (NM_021255.1,251-269).
cgggtacaatggtgcttta

SEQ ID NO: 380908 - DNA, 19 bp, Homo sapiens
  siRNA target sequence for PELI2 (NM_021255.1,298-316).
gtagatttgccctctacaa

SEQ ID NO: 380909 - DNA, 19 bp, Homo sapiens
  siRNA target sequence for PELI2 (NM_021255.1,323-341).
caaggcaaatggtgtcaaa

SEQ ID NO: 380910 - DNA, 19 bp, Homo sapiens
  siRNA target sequence for PELI2 (NM_021255.1,344-362).
cagcaccgtccatgtgata

SEQ ID NO: 380911 - DNA, 19 bp, Homo sapiens
  siRNA target sequence for PELI2 (NM_021255.1,399-417).
ggtcaacacagtatatcct

SEQ ID NO: 380912 - DNA, 19 bp, Homo sapiens
  siRNA target sequence for PELI2 (NM_021255.1,400-418).
gtcaacacagtatatccta

SEQ ID NO: 380913 - DNA, 19 bp, Homo sapiens
  siRNA target sequence for PELI2 (NM_021255.1,416-434).
ctacactttgtcaaggaat

SEQ ID NO: 380914 - DNA, 19 bp, Homo sapiens
  siRNA target sequence for PELI2 (NM_021255.1,452-470).
gtacacacatgataaggat

SEQ ID NO: 380915 - DNA, 19 bp, Homo sapiens
  siRNA target sequence for PELI2 (NM_021255.1,462-480).
gataaggatacggatatgt

SEQ ID NO: 380916 - DNA, 19 bp, Homo sapiens
  siRNA target sequence for PELI2 (NM_021255.1,519-537).
gttgtcacagacacgattt

SEQ ID NO: 380917 - DNA, 19 bp, Homo sapiens
  siRNA target sequence for PELI2 (NM_021255.1,610-628).
gcgacaggaatgaacctta

SEQ ID NO: 380918 - DNA, 19 bp, Homo sapiens
  siRNA target sequence for PELI2 (NM_021255.1,722-740).
ggatgggctcactactaat

SEQ ID NO: 380919 - DNA, 19 bp, Homo sapiens
  siRNA target sequence for PELI2 (NM_021255.1,948-966).
gcagatgggctttttcata

SEQ ID NO: 380920 - DNA, 19 bp, Homo sapiens
  siRNA target sequence for PELI2 (NM_021255.1,990-1008).
gccctccggcaggagatta

SEQ ID NO: 380921 - DNA, 19 bp, Homo sapiens
  siRNA target sequence for PELI2 (NM_021255.1,991-1009).
ccctccggcaggagattaa

SEQ ID NO: 380922 - DNA, 19 bp, Homo sapiens
  siRNA target sequence for PELI2 (NM_021255.1,1092-1110).
cagccctgggcatatctca

SEQ ID NO: 380923 - DNA, 19 bp, Homo sapiens
  siRNA target sequence for PELI2 (NM_021255.1,1250-1268).
cgcaggaccgccaactcat

SEQ ID NO: 380924 - DNA, 19 bp, Homo sapiens
  siRNA target sequence for PELI2 (NM_021255.1,1255-1273).
gaccgccaactcatgcttt

SEQ ID NO: 380925 - DNA, 19 bp, Homo sapiens
  siRNA target sequence for PELI2 (NM_021255.1,1299-1317).
gagaagtctgcaaaatact

SEQ ID NO: 380926 - DNA, 19 bp, Homo sapiens
  siRNA target sequence for PELI2 (NM_021255.1,1331-1349).
gttgcctcatggaactcat

SEQ ID NO: 380927 - DNA, 19 bp, Homo sapiens
  siRNA target sequence for PELI2 (NM_021255.1,1336-1354).
ctcatggaactcatgcatt

SEQ ID NO: 380928 - DNA, 19 bp, Homo sapiens
  siRNA target sequence for LASS1 (NM_021267.2,372-390).
cgagagcgcttggaagttt

SEQ ID NO: 380929 - DNA, 19 bp, Homo sapiens
  siRNA target sequence for LASS1 (NM_021267.2,377-395).
gcgcttggaagtttctctt

SEQ ID NO: 380930 - DNA, 19 bp, Homo sapiens
  siRNA target sequence for LASS1 (NM_021267.2,656-674).
ccttccggtaccacaatgt

SEQ ID NO: 380931 - DNA, 19 bp, Homo sapiens
  siRNA target sequence for LASS1 (NM_021267.2,723-741).
gttcaccaagctcaacatt

SEQ ID NO: 380932 - DNA, 19 bp, Homo sapiens
  siRNA target sequence for PBOV1 (NM_021635.1,129-147).
gaggatatgcacaatatta

SEQ ID NO: 380933 - DNA, 19 bp, Homo sapiens
  siRNA target sequence for PBOV1 (NM_021635.1,237-255).
ccattctgctacaaggtat

SEQ ID NO: 380934 - DNA, 19 bp, Homo sapiens
  siRNA target sequence for PBOV1 (NM_021635.1,242-260).
ctgctacaaggtatttcga

SEQ ID NO: 380935 - DNA, 19 bp, Homo sapiens
  siRNA target sequence for PBOV1 (NM_021635.1,245-263).
ctacaaggtatttcgaaaa

SEQ ID NO: 380936 - DNA, 19 bp, Homo sapiens
  siRNA target sequence for PBOV1 (NM_021635.1,290-308).
ggcaacagagttcattgat

SEQ ID NO: 380937 - DNA, 19 bp, Homo sapiens
  siRNA target sequence for PBOV1 (NM_021635.1,302-320).
cattgattattccatagaa

SEQ ID NO: 380938 - DNA, 19 bp, Homo sapiens
  siRNA target sequence for PBOV1 (NM_021635.1,357-375).
cacttgaccatgaaaggtt

SEQ ID NO: 380939 - DNA, 19 bp, Homo sapiens
  siRNA target sequence for PBOV1 (NM_021635.1,400-418).
cttcagaagccatattatt

SEQ ID NO: 380940 - DNA, 19 bp, Homo sapiens
  siRNA target sequence for PBOV1 (NM_021635.1,405-423).
gaagccatattattcacat

SEQ ID NO: 380941 - DNA, 19 bp, Homo sapiens
  siRNA target sequence for PBOV1 (NM_021635.1,410-428).
catattattcacattgact

SEQ ID NO: 380942 - DNA, 19 bp, Homo sapiens
  siRNA target sequence for PBOV1 (NM_021635.1,484-502).
ctatacatccacagatcat

SEQ ID NO: 380943 - DNA, 19 bp, Homo sapiens
  siRNA target sequence for FLJ14084 (NM_021637.1,137-155).
cccccagaaccgtaactat

SEQ ID NO: 380944 - DNA, 19 bp, Homo sapiens
  siRNA target sequence for FLJ14084 (NM_021637.1,138-156).
ccccagaaccgtaactatt

SEQ ID NO: 380945 - DNA, 19 bp, Homo sapiens
  siRNA target sequence for FLJ14084 (NM_021637.1,190-208).
gttttcatggggactatca

SEQ ID NO: 380946 - DNA, 19 bp, Homo sapiens
  siRNA target sequence for FLJ14084 (NM_021637.1,329-347).
gcattggtgcccttgaagt

SEQ ID NO: 380947 - DNA, 19 bp, Homo sapiens
  siRNA target sequence for FLJ14084 (NM_021637.1,375-393).
gcctgggcgtcccaaagat

SEQ ID NO: 380948 - DNA, 19 bp, Homo sapiens
  siRNA target sequence for FLJ14084 (NM_021637.1,377-395).
ctgggcgtcccaaagatgt

SEQ ID NO: 380949 - DNA, 19 bp, Homo sapiens
  siRNA target sequence for FLJ14084 (NM_021637.1,450-468).
ggtcggtgatcctctcaaa

SEQ ID NO: 380950 - DNA, 19 bp, Homo sapiens
  siRNA target sequence for FLJ14084 (NM_021637.1,577-595).
gaggagcaaccctccttat

SEQ ID NO: 380951 - DNA, 19 bp, Homo sapiens
  siRNA target sequence for FLJ14084 (NM_021637.1,583-601).
caaccctccttatatgaga

SEQ ID NO: 380952 - DNA, 19 bp, Homo sapiens
  siRNA target sequence for AFAP (NM_021638.3,1073-1091).
ggagggtgttgtggaaaat

SEQ ID NO: 380953 - DNA, 19 bp, Homo sapiens
  siRNA target sequence for AFAP (NM_021638.3,1076-1094).
gggtgttgtggaaaatgga

SEQ ID NO: 380954 - DNA, 19 bp, Homo sapiens
  siRNA target sequence for AFAP (NM_021638.3,1077-1095).
ggtgttgtggaaaatggaa

SEQ ID NO: 380955 - DNA, 19 bp, Homo sapiens
  siRNA target sequence for AFAP (NM_021638.3,1158-1176).
ggcactgtgtcgaaagtca

SEQ ID NO: 380956 - DNA, 19 bp, Homo sapiens
  siRNA target sequence for AFAP (NM_021638.3,1243-1261).
cctcagctgaggaagatgt

SEQ ID NO: 380957 - DNA, 19 bp, Homo sapiens
  siRNA target sequence for AFAP (NM_021638.3,1263-1281).
cccacctgcggctatctga

SEQ ID NO: 380958 - DNA, 19 bp, Homo sapiens
  siRNA target sequence for AFAP (NM_021638.3,1264-1282).
ccacctgcggctatctgaa

SEQ ID NO: 380959 - DNA, 19 bp, Homo sapiens
  siRNA target sequence for AFAP (NM_021638.3,1313-1331).
ctggtgccgagtgaaagat

SEQ ID NO: 380960 - DNA, 19 bp, Homo sapiens
  siRNA target sequence for AFAP (NM_021638.3,1315-1333).
ggtgccgagtgaaagataa

SEQ ID NO: 380961 - DNA, 19 bp, Homo sapiens
  siRNA target sequence for AFAP (NM_021638.3,1318-1336).
gccgagtgaaagataacaa

SEQ ID NO: 380962 - DNA, 19 bp, Homo sapiens
  siRNA target sequence for AFAP (NM_021638.3,1406-1424).
ggtgatcccgggtttggat

SEQ ID NO: 380963 - DNA, 19 bp, Homo sapiens
  siRNA target sequence for AFAP (NM_021638.3,1407-1425).
gtgatcccgggtttggatt

SEQ ID NO: 380964 - DNA, 19 bp, Homo sapiens
  siRNA target sequence for AFAP (NM_021638.3,1414-1432).
cgggtttggattctaaaca

SEQ ID NO: 380965 - DNA, 19 bp, Homo sapiens
  siRNA target sequence for AFAP (NM_021638.3,1415-1433).
gggtttggattctaaacat

SEQ ID NO: 380966 - DNA, 19 bp, Homo sapiens
  siRNA target sequence for AFAP (NM_021638.3,1589-1607).
gatgtctgcaagtgtcatt

SEQ ID NO: 380967 - DNA, 19 bp, Homo sapiens
  siRNA target sequence for AFAP (NM_021638.3,1634-1652).
catgaacaggcgtgttata

SEQ ID NO: 380968 - DNA, 19 bp, Homo sapiens
  siRNA target sequence for AFAP (NM_021638.3,1637-1655).
gaacaggcgtgttatatct

SEQ ID NO: 380969 - DNA, 19 bp, Homo sapiens
  siRNA target sequence for AFAP (NM_021638.3,1700-1718).
cagcgggacggcacttcat

SEQ ID NO: 380970 - DNA, 19 bp, Homo sapiens
  siRNA target sequence for AFAP (NM_021638.3,1702-1720).
gcgggacggcacttcatta

SEQ ID NO: 380971 - DNA, 19 bp, Homo sapiens
  siRNA target sequence for AFAP (NM_021638.3,1703-1721).
cgggacggcacttcattat

SEQ ID NO: 380972 - DNA, 19 bp, Homo sapiens
  siRNA target sequence for AFAP (NM_021638.3,1705-1723).
ggacggcacttcattatga

SEQ ID NO: 380973 - DNA, 19 bp, Homo sapiens
  siRNA target sequence for AFAP (NM_021638.3,1743-1761).
ggctcgctcaagggtaaaa

SEQ ID NO: 380974 - DNA, 19 bp, Homo sapiens
  siRNA target sequence for AFAP (NM_021638.3,1744-1762).
gctcgctcaagggtaaaaa

SEQ ID NO: 380975 - DNA, 19 bp, Homo sapiens
  siRNA target sequence for AFAP (NM_021638.3,1847-1865).
gaaaaggacgggttcgaat

SEQ ID NO: 380976 - DNA, 19 bp, Homo sapiens
  siRNA target sequence for AFAP (NM_021638.3,2005-2023).
gagcggctattgaagtgaa

SEQ ID NO: 380977 - DNA, 19 bp, Homo sapiens
  siRNA target sequence for SP192 (NM_021639.3,1030-1048).
gttcctgcttggctaaatt

SEQ ID NO: 380978 - DNA, 19 bp, Homo sapiens
  siRNA target sequence for SP192 (NM_021639.3,1033-1051).
cctgcttggctaaatttct

SEQ ID NO: 380979 - DNA, 19 bp, Homo sapiens
  siRNA target sequence for SP192 (NM_021639.3,1075-1093).
cctactgccaccttcgaaa

SEQ ID NO: 380980 - DNA, 19 bp, Homo sapiens
  siRNA target sequence for SP192 (NM_021639.3,1157-1175).
cctctgatggtttttttaa

SEQ ID NO: 380981 - DNA, 19 bp, Homo sapiens
  siRNA target sequence for SP192 (NM_021639.3,1254-1272).
ctctaagggagcatatgct

SEQ ID NO: 380982 - DNA, 19 bp, Homo sapiens
  siRNA target sequence for SP192 (NM_021639.3,1305-1323).
ctcttcccgaggtcatgat

SEQ ID NO: 380983 - DNA, 19 bp, Homo sapiens
  siRNA target sequence for SP192 (NM_021639.3,1389-1407).
ccggaaagggtgtgctttt

SEQ ID NO: 380984 - DNA, 19 bp, Homo sapiens
  siRNA target sequence for SP192 (NM_021639.3,1391-1409).
ggaaagggtgtgcttttca

SEQ ID NO: 380985 - DNA, 19 bp, Homo sapiens
  siRNA target sequence for SP192 (NM_021639.3,1589-1607).
ccaagatgctagttatcaa

SEQ ID NO: 380986 - DNA, 19 bp, Homo sapiens
  siRNA target sequence for SP192 (NM_021639.3,1661-1679).
caggatctcaccatgcaaa

SEQ ID NO: 380987 - DNA, 19 bp, Homo sapiens
  siRNA target sequence for SP192 (NM_021639.3,1698-1716).
cgtggttccaagtgtctat

SEQ ID NO: 380988 - DNA, 19 bp, Homo sapiens
  siRNA target sequence for SP192 (NM_021639.3,1747-1765).
ccttccaagcctaatgcat

SEQ ID NO: 380989 - DNA, 19 bp, Homo sapiens
  siRNA target sequence for SP192 (NM_021639.3,1752-1770).
caagcctaatgcatggaaa

SEQ ID NO: 380990 - DNA, 19 bp, Homo sapiens
  siRNA target sequence for SP192 (NM_021639.3,1813-1831).
cgggagtctgcttttacca

SEQ ID NO: 380991 - DNA, 19 bp, Homo sapiens
  siRNA target sequence for SP192 (NM_021639.3,1832-1850).
gtccaatctctgttaccaa

SEQ ID NO: 380992 - DNA, 19 bp, Homo sapiens
  siRNA target sequence for SP192 (NM_021639.3,1879-1897).
ctgagttctcccaaagaga

SEQ ID NO: 380993 - DNA, 19 bp, Homo sapiens
  siRNA target sequence for SP192 (NM_021639.3,1910-1928).
ccacccctccaattgagat

SEQ ID NO: 380994 - DNA, 19 bp, Homo sapiens
  siRNA target sequence for SP192 (NM_021639.3,1977-1995).
gagtgagttcctgaaaact

SEQ ID NO: 380995 - DNA, 19 bp, Homo sapiens
  siRNA target sequence for SP192 (NM_021639.3,2167-2185).
gaagcagagcacaggttat

SEQ ID NO: 380996 - DNA, 19 bp, Homo sapiens
  siRNA target sequence for SP192 (NM_021639.3,2196-2214).
gggttggcaggaatatcct

SEQ ID NO: 380997 - DNA, 19 bp, Homo sapiens
  siRNA target sequence for SP192 (NM_021639.3,2392-2410).
gaaaccagtagcagtgaaa

SEQ ID NO: 380998 - DNA, 19 bp, Homo sapiens
  siRNA target sequence for C12orf10 (NM_021640.1,126-144).
cgatcccgcagcaaactca

SEQ ID NO: 380999 - DNA, 19 bp, Homo sapiens
  siRNA target sequence for C12orf10 (NM_021640.1,127-145).
gatcccgcagcaaactcat

SEQ ID NO: 381000 - DNA, 19 bp, Homo sapiens
  siRNA target sequence for C12orf10 (NM_021640.1,230-248).
gtaccgggatgcagagatt

SEQ ID NO: 381001 - DNA, 19 bp, Homo sapiens
  siRNA target sequence for C12orf10 (NM_021640.1,254-272).
gacccgggatcccgaaaaa

SEQ ID NO: 381002 - DNA, 19 bp, Homo sapiens
  siRNA target sequence for C12orf10 (NM_021640.1,256-274).
cccgggatcccgaaaaact

SEQ ID NO: 381003 - DNA, 19 bp, Homo sapiens
  siRNA target sequence for C12orf10 (NM_021640.1,319-337).
ctcggagacaccgatatga

SEQ ID NO: 381004 - DNA, 19 bp, Homo sapiens
  siRNA target sequence for C12orf10 (NM_021640.1,409-427).
gcagtgcgggactcatcta

SEQ ID NO: 381005 - DNA, 19 bp, Homo sapiens
  siRNA target sequence for C12orf10 (NM_021640.1,410-428).
cagtgcgggactcatctat

SEQ ID NO: 381006 - DNA, 19 bp, Homo sapiens
  siRNA target sequence for C12orf10 (NM_021640.1,412-430).
gtgcgggactcatctatct

SEQ ID NO: 381007 - DNA, 19 bp, Homo sapiens
  siRNA target sequence for C12orf10 (NM_021640.1,572-590).
gggggagcctcgatatgca

SEQ ID NO: 381008 - DNA, 19 bp, Homo sapiens
  siRNA target sequence for C12orf10 (NM_021640.1,610-628).
cacgagttgctcgacttaa

SEQ ID NO: 381009 - DNA, 19 bp, Homo sapiens
  siRNA target sequence for C12orf10 (NM_021640.1,615-633).
gttgctcgacttaatccta

SEQ ID NO: 381010 - DNA, 19 bp, Homo sapiens
  siRNA target sequence for C12orf10 (NM_021640.1,668-686).
gttcaagcgtgcaatggat

SEQ ID NO: 381011 - DNA, 19 bp, Homo sapiens
  siRNA target sequence for C12orf10 (NM_021640.1,701-719).
gtttctgcagagattagat

SEQ ID NO: 381012 - DNA, 19 bp, Homo sapiens
  siRNA target sequence for C12orf10 (NM_021640.1,705-723).
ctgcagagattagatttct

SEQ ID NO: 381013 - DNA, 19 bp, Homo sapiens
  siRNA target sequence for C12orf10 (NM_021640.1,915-933).
ggacagtggcgaatacagt

SEQ ID NO: 381014 - DNA, 19 bp, Homo sapiens
  siRNA target sequence for C12orf10 (NM_021640.1,944-962).
ggagccccactcattccaa

SEQ ID NO: 381015 - DNA, 19 bp, Homo sapiens
  siRNA target sequence for KIAA0266 (NM_021645.1,808-826).
ccccttgagtgaaaatgaa

SEQ ID NO: 381016 - DNA, 19 bp, Homo sapiens
  siRNA target sequence for KIAA0266 (NM_021645.1,2101-2119).
cgaattgagggcactatct

SEQ ID NO: 381017 - DNA, 19 bp, Homo sapiens
  siRNA target sequence for KIAA0266 (NM_021645.1,2236-2254).
gaggtcagagagagtacaa

SEQ ID NO: 381018 - DNA, 19 bp, Homo sapiens
  siRNA target sequence for KIAA0266 (NM_021645.1,2452-2470).
ggcagttcccacaataata

SEQ ID NO: 381019 - DNA, 19 bp, Homo sapiens
  siRNA target sequence for KIAA0266 (NM_021645.1,2454-2472).
cagttcccacaataataga

SEQ ID NO: 381020 - DNA, 19 bp, Homo sapiens
  siRNA target sequence for TIRP (NM_021649.2,113-131).
gggtatcgggaagtctaaa

SEQ ID NO: 381021 - DNA, 19 bp, Homo sapiens
  siRNA target sequence for TIRP (NM_021649.2,114-132).
ggtatcgggaagtctaaaa

SEQ ID NO: 381022 - DNA, 19 bp, Homo sapiens
  siRNA target sequence for TIRP (NM_021649.2,119-137).
cgggaagtctaaaataaat

SEQ ID NO: 381023 - DNA, 19 bp, Homo sapiens
  siRNA target sequence for TIRP (NM_021649.2,184-202).
caagtccaggatatcatga

SEQ ID NO: 381024 - DNA, 19 bp, Homo sapiens
  siRNA target sequence for TIRP (NM_021649.2,222-240).
gaagatctatccttgtgta

SEQ ID NO: 381025 - DNA, 19 bp, Homo sapiens
  siRNA target sequence for TIRP (NM_021649.2,347-365).
caaatttgtgatattgcat

SEQ ID NO: 381026 - DNA, 19 bp, Homo sapiens
  siRNA target sequence for TIRP (NM_021649.2,356-374).
gatattgcatgcagaagat

SEQ ID NO: 381027 - DNA, 19 bp, Homo sapiens
  siRNA target sequence for TIRP (NM_021649.2,428-446).
caaacccggaataatcttt

SEQ ID NO: 381028 - DNA, 19 bp, Homo sapiens
  siRNA target sequence for TIRP (NM_021649.2,503-521).
gtctgcatggacaatctta

SEQ ID NO: 381029 - DNA, 19 bp, Homo sapiens
  siRNA target sequence for TIRP (NM_021649.2,579-597).
ctaatgaactccgttaaca

SEQ ID NO: 381030 - DNA, 19 bp, Homo sapiens
  siRNA target sequence for TIRP (NM_021649.2,589-607).
ccgttaacaggcagcataa

SEQ ID NO: 381031 - DNA, 19 bp, Homo sapiens
  siRNA target sequence for TIRP (NM_021649.2,590-608).
cgttaacaggcagcataaa

SEQ ID NO: 381032 - DNA, 19 bp, Homo sapiens
  siRNA target sequence for TIRP (NM_021649.2,603-621).
cataaatacaactctgtta

SEQ ID NO: 381033 - DNA, 19 bp, Homo sapiens
  siRNA target sequence for TIRP (NM_021649.2,698-716).
ggaagaaagtcgtggattt

SEQ ID NO: 381034 - DNA, 19 bp, Homo sapiens
  siRNA target sequence for TIRP (NM_021649.2,717-735).
cctacacaagtagaaagaa

SEQ ID NO: 381035 - DNA, 19 bp, Homo sapiens
  siRNA target sequence for TIRP (NM_021649.2,741-759).
caggagtctgtgtataaga

SEQ ID NO: 381036 - DNA, 19 bp, Homo sapiens
  siRNA target sequence for TIRP (NM_021649.2,752-770).
gtataagacacaacaaact

SEQ ID NO: 381037 - DNA, 19 bp, Homo sapiens
  siRNA target sequence for TIRP (NM_021649.2,760-778).
cacaacaaactatatggaa

SEQ ID NO: 381038 - DNA, 19 bp, Homo sapiens
  siRNA target sequence for TIRP (NM_021649.2,787-805).
gaaatatggtacaaagaca

SEQ ID NO: 381039 - DNA, 19 bp, Homo sapiens
  siRNA target sequence for TIRP (NM_021649.2,794-812).
ggtacaaagacaatttatt

SEQ ID NO: 381040 - DNA, 19 bp, Homo sapiens
  siRNA target sequence for C6orf75 (NM_021820.1,71-89).
ctgtcgtgtacccttaaca

SEQ ID NO: 381041 - DNA, 19 bp, Homo sapiens
  siRNA target sequence for C6orf75 (NM_021820.1,124-142).
gttccgcctgccggaaata

SEQ ID NO: 381042 - DNA, 19 bp, Homo sapiens
  siRNA target sequence for C6orf75 (NM_021820.1,128-146).
cgcctgccggaaataaagt

SEQ ID NO: 381043 - DNA, 19 bp, Homo sapiens
  siRNA target sequence for C6orf75 (NM_021820.1,130-148).
cctgccggaaataaagtct

SEQ ID NO: 381044 - DNA, 19 bp, Homo sapiens
  siRNA target sequence for C6orf75 (NM_021820.1,131-149).
ctgccggaaataaagtctt

SEQ ID NO: 381045 - DNA, 19 bp, Homo sapiens
  siRNA target sequence for C6orf75 (NM_021820.1,172-190).
gtttgccagcagtcaagaa

SEQ ID NO: 381046 - DNA, 19 bp, Homo sapiens
  siRNA target sequence for C6orf75 (NM_021820.1,198-216).
gaaagtcaccattttggat

SEQ ID NO: 381047 - DNA, 19 bp, Homo sapiens
  siRNA target sequence for C6orf75 (NM_021820.1,207-225).
cattttggattcttagcat

SEQ ID NO: 381048 - DNA, 19 bp, Homo sapiens
  siRNA target sequence for C6orf75 (NM_021820.1,222-240).
gcattccctctgaagatat

SEQ ID NO: 381049 - DNA, 19 bp, Homo sapiens
  siRNA target sequence for C6orf75 (NM_021820.1,264-282).
cagtgtgtgccaagtctat

SEQ ID NO: 381050 - DNA, 19 bp, Homo sapiens
  siRNA target sequence for C6orf75 (NM_021820.1,316-334).
ggagctgtacagttctctt

SEQ ID NO: 381051 - DNA, 19 bp, Homo sapiens
  siRNA target sequence for C6orf75 (NM_021820.1,317-335).
gagctgtacagttctctta

SEQ ID NO: 381052 - DNA, 19 bp, Homo sapiens
  siRNA target sequence for C6orf75 (NM_021820.1,368-386).
ctacattcggactctacat

SEQ ID NO: 381053 - DNA, 19 bp, Homo sapiens
  siRNA target sequence for C6orf75 (NM_021820.1,371-389).
cattcggactctacatata

SEQ ID NO: 381054 - DNA, 19 bp, Homo sapiens
  siRNA target sequence for C6orf75 (NM_021820.1,375-393).
cggactctacatataaaat

SEQ ID NO: 381055 - DNA, 19 bp, Homo sapiens
  siRNA target sequence for C6orf75 (NM_021820.1,377-395).
gactctacatataaaataa

SEQ ID NO: 381056 - DNA, 19 bp, Homo sapiens
  siRNA target sequence for C6orf75 (NM_021820.1,442-460).
gcgaatagatgcacttgaa

SEQ ID NO: 381057 - DNA, 19 bp, Homo sapiens
  siRNA target sequence for C6orf75 (NM_021820.1,443-461).
cgaatagatgcacttgaat

SEQ ID NO: 381058 - DNA, 19 bp, Homo sapiens
  siRNA target sequence for C6orf75 (NM_021820.1,444-462).
gaatagatgcacttgaatt

SEQ ID NO: 381059 - DNA, 19 bp, Homo sapiens
  siRNA target sequence for C6orf75 (NM_021820.1,493-511).
gaaaccgcaacatgtattt

SEQ ID NO: 381060 - DNA, 19 bp, Homo sapiens
  siRNA target sequence for C6orf75 (NM_021820.1,498-516).
cgcaacatgtattttctgt

SEQ ID NO: 381061 - DNA, 19 bp, Homo sapiens
  siRNA target sequence for C6orf75 (NM_021820.1,597-615).
gacagagagagcttattga

SEQ ID NO: 381062 - DNA, 19 bp, Homo sapiens
  siRNA target sequence for C6orf75 (NM_021820.1,605-623).
gagcttattgagtcataca

SEQ ID NO: 381063 - DNA, 19 bp, Homo sapiens
  siRNA target sequence for C6orf75 (NM_021820.1,607-625).
gcttattgagtcatacagt

SEQ ID NO: 381064 - DNA, 19 bp, Homo sapiens
  siRNA target sequence for C6orf75 (NM_021820.1,665-683).
gctggtttgtcattcatta

SEQ ID NO: 381065 - DNA, 19 bp, Homo sapiens
  siRNA target sequence for C6orf75 (NM_021820.1,686-704).
gctaaccatggaaaagtga

SEQ ID NO: 381066 - DNA, 19 bp, Homo sapiens
  siRNA target sequence for C6orf75 (NM_021820.1,687-705).
ctaaccatggaaaagtgaa

SEQ ID NO: 381067 - DNA, 19 bp, Homo sapiens
  siRNA target sequence for C6orf75 (NM_021820.1,789-807).
ggacagacatagactacaa

SEQ ID NO: 381068 - DNA, 19 bp, Homo sapiens
  siRNA target sequence for MDS018 (NM_021823.2,209-227).
cttctggtgtcaaagcttt

SEQ ID NO: 381069 - DNA, 19 bp, Homo sapiens
  siRNA target sequence for NIF3L1 (NM_021824.1,305-323).
gttgggacaatgttggatt

SEQ ID NO: 381070 - DNA, 19 bp, Homo sapiens
  siRNA target sequence for NIF3L1 (NM_021824.1,339-357).
cccaccacatactgtaaat

SEQ ID NO: 381071 - DNA, 19 bp, Homo sapiens
  siRNA target sequence for NIF3L1 (NM_021824.1,340-358).
ccaccacatactgtaaata

SEQ ID NO: 381072 - DNA, 19 bp, Homo sapiens
  siRNA target sequence for NIF3L1 (NM_021824.1,434-452).
cctaccatccgcctatctt

SEQ ID NO: 381073 - DNA, 19 bp, Homo sapiens
  siRNA target sequence for NIF3L1 (NM_021824.1,565-583).
ccccagggcgtcaacaact

SEQ ID NO: 381074 - DNA, 19 bp, Homo sapiens
  siRNA target sequence for NIF3L1 (NM_021824.1,667-685).
cgagtagaattcaacgtta

SEQ ID NO: 381075 - DNA, 19 bp, Homo sapiens
  siRNA target sequence for NIF3L1 (NM_021824.1,668-686).
gagtagaattcaacgttaa

SEQ ID NO: 381076 - DNA, 19 bp, Homo sapiens
  siRNA target sequence for NIF3L1 (NM_021824.1,670-688).
gtagaattcaacgttaact

SEQ ID NO: 381077 - DNA, 19 bp, Homo sapiens
  siRNA target sequence for NIF3L1 (NM_021824.1,694-712).
caagacctggacaaagtca

SEQ ID NO: 381078 - DNA, 19 bp, Homo sapiens
  siRNA target sequence for NIF3L1 (NM_021824.1,716-734).
ctgcagtgaaaggaattga

SEQ ID NO: 381079 - DNA, 19 bp, Homo sapiens
  siRNA target sequence for NIF3L1 (NM_021824.1,728-746).
gaattgacggtgtttctgt

SEQ ID NO: 381080 - DNA, 19 bp, Homo sapiens
  siRNA target sequence for NIF3L1 (NM_021824.1,777-795).
ggaacaaacacggattaat

SEQ ID NO: 381081 - DNA, 19 bp, Homo sapiens
  siRNA target sequence for NIF3L1 (NM_021824.1,781-799).
caaacacggattaatctga

SEQ ID NO: 381082 - DNA, 19 bp, Homo sapiens
  siRNA target sequence for NIF3L1 (NM_021824.1,787-805).
cggattaatctgaattgta

SEQ ID NO: 381083 - DNA, 19 bp, Homo sapiens
  siRNA target sequence for NIF3L1 (NM_021824.1,789-807).
gattaatctgaattgtact

SEQ ID NO: 381084 - DNA, 19 bp, Homo sapiens
  siRNA target sequence for NIF3L1 (NM_021824.1,842-860).
cccggaacaaacaacttta

SEQ ID NO: 381085 - DNA, 19 bp, Homo sapiens
  siRNA target sequence for NIF3L1 (NM_021824.1,843-861).
ccggaacaaacaactttat

SEQ ID NO: 381086 - DNA, 19 bp, Homo sapiens
  siRNA target sequence for NIF3L1 (NM_021824.1,891-909).
gcctttgcttctacatact

SEQ ID NO: 381087 - DNA, 19 bp, Homo sapiens
  siRNA target sequence for NIF3L1 (NM_021824.1,953-971).
caaccatgattgatcgaat

SEQ ID NO: 381088 - DNA, 19 bp, Homo sapiens
  siRNA target sequence for NIF3L1 (NM_021824.1,977-995).
gacacctaaaactatctca

SEQ ID NO: 381089 - DNA, 19 bp, Homo sapiens
  siRNA target sequence for NIF3L1 (NM_021824.1,979-997).
cacctaaaactatctcata

SEQ ID NO: 381090 - DNA, 19 bp, Homo sapiens
  siRNA target sequence for NIF3L1 (NM_021824.1,981-999).
cctaaaactatctcatatt

SEQ ID NO: 381091 - DNA, 19 bp, Homo sapiens
  siRNA target sequence for NIF3L1 (NM_021824.1,1025-1043).
ccttagagtctcaagtcaa

SEQ ID NO: 381092 - DNA, 19 bp, Homo sapiens
  siRNA target sequence for NIF3L1 (NM_021824.1,1026-1044).
cttagagtctcaagtcaaa

SEQ ID NO: 381093 - DNA, 19 bp, Homo sapiens
  siRNA target sequence for NIF3L1 (NM_021824.1,1088-1106).
gtgttgaggctgaccttta

SEQ ID NO: 381094 - DNA, 19 bp, Homo sapiens
  siRNA target sequence for NIF3L1 (NM_021824.1,1119-1137).
gatgtcccatcatgatact

SEQ ID NO: 381095 - DNA, 19 bp, Homo sapiens
  siRNA target sequence for NIF3L1 (NM_021824.1,1125-1143).
ccatcatgatactttggat

SEQ ID NO: 381096 - DNA, 19 bp, Homo sapiens
  siRNA target sequence for NIF3L1 (NM_021824.1,1151-1169).
cccaaggaataaatgtcat

SEQ ID NO: 381097 - DNA, 19 bp, Homo sapiens
  siRNA target sequence for NIF3L1 (NM_021824.1,1208-1226).
ctgaccttcgagatatgct

SEQ ID NO: 381098 - DNA, 19 bp, Homo sapiens
  siRNA target sequence for NIF3L1 (NM_021824.1,1232-1250).
ctcacttggagaataagat

SEQ ID NO: 381099 - DNA, 19 bp, Homo sapiens
  siRNA target sequence for NIF3L1 (NM_021824.1,1234-1252).
cacttggagaataagataa

SEQ ID NO: 381100 - DNA, 19 bp, Homo sapiens
  siRNA target sequence for NIF3L1 (NM_021824.1,1236-1254).
cttggagaataagataaat

SEQ ID NO: 381101 - DNA, 19 bp, Homo sapiens
  siRNA target sequence for MDS025 (NM_021825.3,378-396).
gcttggcggctctttctct

SEQ ID NO: 381102 - DNA, 19 bp, Homo sapiens
  siRNA target sequence for MDS025 (NM_021825.3,408-426).
ggagatcgttgggtttcaa

SEQ ID NO: 381103 - DNA, 19 bp, Homo sapiens
  siRNA target sequence for MDS025 (NM_021825.3,453-471).
ctgcggagagagttcttca

SEQ ID NO: 381104 - DNA, 19 bp, Homo sapiens
  siRNA target sequence for MDS025 (NM_021825.3,456-474).
cggagagagttcttcacta

SEQ ID NO: 381105 - DNA, 19 bp, Homo sapiens
  siRNA target sequence for MDS025 (NM_021825.3,478-496).
caaccaaggagggatatga

SEQ ID NO: 381106 - DNA, 19 bp, Homo sapiens
  siRNA target sequence for MDS025 (NM_021825.3,541-559).
cttttgatacccatgcatt

SEQ ID NO: 381107 - DNA, 19 bp, Homo sapiens
  siRNA target sequence for MDS025 (NM_021825.3,618-636).
gcgttaactgctttatcaa

SEQ ID NO: 381108 - DNA, 19 bp, Homo sapiens
  siRNA target sequence for MDS025 (NM_021825.3,639-657).
gtcagcctggatactatct

SEQ ID NO: 381109 - DNA, 19 bp, Homo sapiens
  siRNA target sequence for MDS025 (NM_021825.3,641-659).
cagcctggatactatctat

SEQ ID NO: 381110 - DNA, 19 bp, Homo sapiens
  siRNA target sequence for MDS025 (NM_021825.3,643-661).
gcctggatactatctataa

SEQ ID NO: 381111 - DNA, 19 bp, Homo sapiens
  siRNA target sequence for MDS025 (NM_021825.3,704-722).
gctaatggctcatttggat

SEQ ID NO: 381112 - DNA, 19 bp, Homo sapiens
  siRNA target sequence for MDS025 (NM_021825.3,819-837).
caacaactaatgcatgaaa

SEQ ID NO: 381113 - DNA, 19 bp, Homo sapiens
  siRNA target sequence for MDS025 (NM_021825.3,956-974).
ggatactcaaaccaaaagt

SEQ ID NO: 381114 - DNA, 19 bp, Homo sapiens
  siRNA target sequence for MDS025 (NM_021825.3,961-979).
ctcaaaccaaaagtattat

SEQ ID NO: 381115 - DNA, 19 bp, Homo sapiens
  siRNA target sequence for MDS025 (NM_021825.3,982-1000).
cagagaccagtaataaaat

SEQ ID NO: 381116 - DNA, 19 bp, Homo sapiens
  siRNA target sequence for MDS025 (NM_021825.3,1031-1049).
gatggaatctaacaaactt

SEQ ID NO: 381117 - DNA, 19 bp, Homo sapiens
  siRNA target sequence for MDS025 (NM_021825.3,1043-1061).
caaacttgagacaattcgt

SEQ ID NO: 381118 - DNA, 19 bp, Homo sapiens
  siRNA target sequence for MDS025 (NM_021825.3,1084-1102).
cttgcctggcaatagcatt

SEQ ID NO: 381119 - DNA, 19 bp, Homo sapiens
  siRNA target sequence for MDS025 (NM_021825.3,1093-1111).
caatagcattgggatttta

SEQ ID NO: 381120 - DNA, 19 bp, Homo sapiens
  siRNA target sequence for FLJ13149 (NM_021826.4,315-333).
gcagctactctcaagtcat

SEQ ID NO: 381121 - DNA, 19 bp, Homo sapiens
  siRNA target sequence for FLJ13149 (NM_021826.4,318-336).
gctactctcaagtcattaa

SEQ ID NO: 381122 - DNA, 19 bp, Homo sapiens
  siRNA target sequence for FLJ13149 (NM_021826.4,342-360).
gtaagataccgagcatttt

SEQ ID NO: 381123 - DNA, 19 bp, Homo sapiens
  siRNA target sequence for FLJ13149 (NM_021826.4,382-400).
cagtccgaagtgtgtcata

SEQ ID NO: 381124 - DNA, 19 bp, Homo sapiens
  siRNA target sequence for FLJ13149 (NM_021826.4,384-402).
gtccgaagtgtgtcatact

SEQ ID NO: 381125 - DNA, 19 bp, Homo sapiens
  siRNA target sequence for FLJ13149 (NM_021826.4,434-452).
ggaccctccagaacacatt

SEQ ID NO: 381126 - DNA, 19 bp, Homo sapiens
  siRNA target sequence for FLJ13149 (NM_021826.4,435-453).
gaccctccagaacacatta

SEQ ID NO: 381127 - DNA, 19 bp, Homo sapiens
  siRNA target sequence for FLJ13149 (NM_021826.4,469-487).
ccaaaaaagttaagaacat

SEQ ID NO: 381128 - DNA, 19 bp, Homo sapiens
  siRNA target sequence for FLJ13149 (NM_021826.4,565-583).
cctctaaggccagtacatt

SEQ ID NO: 381129 - DNA, 19 bp, Homo sapiens
  siRNA target sequence for FLJ13149 (NM_021826.4,599-617).
cagggccacaggagttgat

SEQ ID NO: 381130 - DNA, 19 bp, Homo sapiens
  siRNA target sequence for FLJ13149 (NM_021826.4,601-619).
gggccacaggagttgatga

SEQ ID NO: 381131 - DNA, 19 bp, Homo sapiens
  siRNA target sequence for FLJ13149 (NM_021826.4,602-620).
ggccacaggagttgatgaa

SEQ ID NO: 381132 - DNA, 19 bp, Homo sapiens
  siRNA target sequence for FLJ13149 (NM_021826.4,623-641).
ggacgtagaagtgtttgat

SEQ ID NO: 381133 - DNA, 19 bp, Homo sapiens
  siRNA target sequence for FLJ13149 (NM_021826.4,624-642).
gacgtagaagtgtttgatt

SEQ ID NO: 381134 - DNA, 19 bp, Homo sapiens
  siRNA target sequence for FLJ13149 (NM_021826.4,686-704).
ccgtgttcacagctataat

SEQ ID NO: 381135 - DNA, 19 bp, Homo sapiens
  siRNA target sequence for FLJ13149 (NM_021826.4,690-708).
gttcacagctataatgcat

SEQ ID NO: 381136 - DNA, 19 bp, Homo sapiens
  siRNA target sequence for FLJ13149 (NM_021826.4,722-740).
gctcctgtctgtttcagaa

SEQ ID NO: 381137 - DNA, 19 bp, Homo sapiens
  siRNA target sequence for FLJ13149 (NM_021826.4,732-750).
gtttcagaaggtgaactaa

SEQ ID NO: 381138 - DNA, 19 bp, Homo sapiens
  siRNA target sequence for FLJ13149 (NM_021826.4,766-784).
gagttaatcaaaataatct

SEQ ID NO: 381139 - DNA, 19 bp, Homo sapiens
  siRNA target sequence for FLJ13149 (NM_021826.4,790-808).
ctcaagtcattgttgatta

SEQ ID NO: 381140 - DNA, 19 bp, Homo sapiens
  siRNA target sequence for FLJ13149 (NM_021826.4,919-937).
cccaagatctgatcaatgt

SEQ ID NO: 381141 - DNA, 19 bp, Homo sapiens
  siRNA target sequence for FLJ13149 (NM_021826.4,973-991).
cccattcaatgctagatgt

SEQ ID NO: 381142 - DNA, 19 bp, Homo sapiens
  siRNA target sequence for FLJ13149 (NM_021826.4,1014-1032).
caggtatgggagatgaata

SEQ ID NO: 381143 - DNA, 19 bp, Homo sapiens
  siRNA target sequence for FLJ13149 (NM_021826.4,1067-1085).
gtacttaggccgcaaagta

SEQ ID NO: 381144 - DNA, 19 bp, Homo sapiens
  siRNA target sequence for FLJ13149 (NM_021826.4,1076-1094).
ccgcaaagtacctaggttt

SEQ ID NO: 381145 - DNA, 19 bp, Homo sapiens
  siRNA target sequence for FLJ13149 (NM_021826.4,1077-1095).
cgcaaagtacctaggtttt

SEQ ID NO: 381146 - DNA, 19 bp, Homo sapiens
  siRNA target sequence for FLJ13149 (NM_021826.4,1078-1096).
gcaaagtacctaggttttt

SEQ ID NO: 381147 - DNA, 19 bp, Homo sapiens
  siRNA target sequence for FLJ13149 (NM_021826.4,1086-1104).
cctaggtttttaaacattt

SEQ ID NO: 381148 - DNA, 19 bp, Homo sapiens
  siRNA target sequence for FLJ13149 (NM_021826.4,1145-1163).
gtctcagctagttcactta

SEQ ID NO: 381149 - DNA, 19 bp, Homo sapiens
  siRNA target sequence for FLJ13149 (NM_021826.4,1147-1165).
ctcagctagttcacttaat

SEQ ID NO: 381150 - DNA, 19 bp, Homo sapiens
  siRNA target sequence for FLJ13149 (NM_021826.4,1151-1169).
gctagttcacttaatttat

SEQ ID NO: 381151 - DNA, 19 bp, Homo sapiens
  siRNA target sequence for FLJ13149 (NM_021826.4,1217-1235).
ggaatcattgatccttaaa

SEQ ID NO: 381152 - DNA, 19 bp, Homo sapiens
  siRNA target sequence for FLJ13149 (NM_021826.4,1218-1236).
gaatcattgatccttaaat

SEQ ID NO: 381153 - DNA, 19 bp, Homo sapiens
  siRNA target sequence for FLJ13149 (NM_021826.4,1222-1240).
cattgatccttaaatatat

SEQ ID NO: 381154 - DNA, 19 bp, Homo sapiens
  siRNA target sequence for FLJ13149 (NM_021826.4,1337-1355).
cttggcttgtgctaacatt

SEQ ID NO: 381155 - DNA, 19 bp, Homo sapiens
  siRNA target sequence for FLJ13149 (NM_021826.4,1366-1384).
gtagtcgctccttagtgaa

SEQ ID NO: 381156 - DNA, 19 bp, Homo sapiens
  siRNA target sequence for FLJ13149 (NM_021826.4,1369-1387).
gtcgctccttagtgaatat

SEQ ID NO: 381157 - DNA, 19 bp, Homo sapiens
  siRNA target sequence for FLJ13149 (NM_021826.4,1408-1426).
ctcacgtggatcacatcaa

SEQ ID NO: 381158 - DNA, 19 bp, Homo sapiens
  siRNA target sequence for FLJ13149 (NM_021826.4,1410-1428).
cacgtggatcacatcaatt

SEQ ID NO: 381159 - DNA, 19 bp, Homo sapiens
  siRNA target sequence for FLJ13149 (NM_021826.4,1416-1434).
gatcacatcaatttcatga

SEQ ID NO: 381160 - DNA, 19 bp, Homo sapiens
  siRNA target sequence for FLJ13149 (NM_021826.4,1433-1451).
gaagcagattggagagata

SEQ ID NO: 381161 - DNA, 19 bp, Homo sapiens
  siRNA target sequence for FLJ13149 (NM_021826.4,1577-1595).
ggcacactgtcgaagtaaa

SEQ ID NO: 381162 - DNA, 19 bp, Homo sapiens
  siRNA target sequence for FLJ13149 (NM_021826.4,1579-1597).
cacactgtcgaagtaaaga

SEQ ID NO: 381163 - DNA, 19 bp, Homo sapiens
  siRNA target sequence for FLJ13149 (NM_021826.4,1583-1601).
ctgtcgaagtaaagatgtt

SEQ ID NO: 381164 - DNA, 19 bp, Homo sapiens
  siRNA target sequence for FLJ13149 (NM_021826.4,1596-1614).
gatgttgccaagattctgt

SEQ ID NO: 381165 - DNA, 19 bp, Homo sapiens
  siRNA target sequence for FLJ13149 (NM_021826.4,1642-1660).
cacccaatgcagaagaatt

SEQ ID NO: 381166 - DNA, 19 bp, Homo sapiens
  siRNA target sequence for FLJ13149 (NM_021826.4,1669-1687).
gcctgataagtgagattca

SEQ ID NO: 381167 - DNA, 19 bp, Homo sapiens
  siRNA target sequence for FLJ13149 (NM_021826.4,1767-1785).
ccagtagagttaattgatt

SEQ ID NO: 381168 - DNA, 19 bp, Homo sapiens
  siRNA target sequence for FLJ13149 (NM_021826.4,1815-1833).
gctcaggagagaactaagt

SEQ ID NO: 381169 - DNA, 19 bp, Homo sapiens
  siRNA target sequence for FLJ13149 (NM_021826.4,1816-1834).
ctcaggagagaactaagtt

SEQ ID NO: 381170 - DNA, 19 bp, Homo sapiens
  siRNA target sequence for FLJ13149 (NM_021826.4,1836-1854).
gacctccttaaggaactat

SEQ ID NO: 381171 - DNA, 19 bp, Homo sapiens
  siRNA target sequence for FLJ13149 (NM_021826.4,1866-1884).
ggtacagttggcattgagt

SEQ ID NO: 381172 - DNA, 19 bp, Homo sapiens
  siRNA target sequence for FLJ13149 (NM_021826.4,1895-1913).
cagaggcaatcgtcttagt

SEQ ID NO: 381173 - DNA, 19 bp, Homo sapiens
  siRNA target sequence for FLJ13149 (NM_021826.4,1923-1941).
cagcaagaggggtctgaat

SEQ ID NO: 381174 - DNA, 19 bp, Homo sapiens
  siRNA target sequence for FLJ13149 (NM_021826.4,2036-2054).
cgtcaagcaccatatgatt

SEQ ID NO: 381175 - DNA, 19 bp, Homo sapiens
  siRNA target sequence for FLJ13149 (NM_021826.4,2057-2075).
gcctcatacccgatcttct

SEQ ID NO: 381176 - DNA, 19 bp, Homo sapiens
  siRNA target sequence for FLJ13149 (NM_021826.4,2065-2083).
cccgatcttctgacttaga

SEQ ID NO: 381177 - DNA, 19 bp, Homo sapiens
  siRNA target sequence for FLJ13149 (NM_021826.4,2102-2120).
cctgaagccattaccattt

SEQ ID NO: 381178 - DNA, 19 bp, Homo sapiens
  siRNA target sequence for FLJ13149 (NM_021826.4,2103-2121).
ctgaagccattaccattta

SEQ ID NO: 381179 - DNA, 19 bp, Homo sapiens
  siRNA target sequence for FLJ13149 (NM_021826.4,2110-2128).
cattaccatttaatagaga

SEQ ID NO: 381180 - DNA, 19 bp, Homo sapiens
  siRNA target sequence for FLJ13149 (NM_021826.4,2178-2196).
gtcagccttacagatgatt

SEQ ID NO: 381181 - DNA, 19 bp, Homo sapiens
  siRNA target sequence for FLJ13149 (NM_021826.4,2184-2202).
cttacagatgatttgatga

SEQ ID NO: 381182 - DNA, 19 bp, Homo sapiens
  siRNA target sequence for FLJ13149 (NM_021826.4,2218-2236).
ggaaagcaagaggacattt

SEQ ID NO: 381183 - DNA, 19 bp, Homo sapiens
  siRNA target sequence for FLJ13149 (NM_021826.4,2309-2327).
gggcttcctttgcaatgta

SEQ ID NO: 381184 - DNA, 19 bp, Homo sapiens
  siRNA target sequence for FLJ13149 (NM_021826.4,2451-2469).
ctccttggactgcacaata

SEQ ID NO: 381185 - DNA, 19 bp, Homo sapiens
  siRNA target sequence for FLJ13149 (NM_021826.4,2454-2472).
cttggactgcacaatatga

SEQ ID NO: 381186 - DNA, 19 bp, Homo sapiens
  siRNA target sequence for FLJ13149 (NM_021826.4,2457-2475).
ggactgcacaatatgaaga

SEQ ID NO: 381187 - DNA, 19 bp, Homo sapiens
  siRNA target sequence for FLJ23514 (NM_021827.1,275-293).
gacccttgtagaagaatgt

SEQ ID NO: 381188 - DNA, 19 bp, Homo sapiens
  siRNA target sequence for FLJ23514 (NM_021827.1,310-328).
ggaagtgcaagttaaaaga

SEQ ID NO: 381189 - DNA, 19 bp, Homo sapiens
  siRNA target sequence for FLJ23514 (NM_021827.1,401-419).
ccctgccaaagtgacaaat

SEQ ID NO: 381190 - DNA, 19 bp, Homo sapiens
  siRNA target sequence for FLJ23514 (NM_021827.1,482-500).
cttatcatatccaagttgt

SEQ ID NO: 381191 - DNA, 19 bp, Homo sapiens
  siRNA target sequence for FLJ23514 (NM_021827.1,538-556).
cagcttgccaggatcataa

SEQ ID NO: 381192 - DNA, 19 bp, Homo sapiens
  siRNA target sequence for FLJ23514 (NM_021827.1,540-558).
gcttgccaggatcataaca

SEQ ID NO: 381193 - DNA, 19 bp, Homo sapiens
  siRNA target sequence for FLJ23514 (NM_021827.1,541-559).
cttgccaggatcataacaa

SEQ ID NO: 381194 - DNA, 19 bp, Homo sapiens
  siRNA target sequence for FLJ23514 (NM_021827.1,657-675).
gagaaaccggaattttata

SEQ ID NO: 381195 - DNA, 19 bp, Homo sapiens
  siRNA target sequence for FLJ23514 (NM_021827.1,704-722).
cagtcctgcgcttaatgct

SEQ ID NO: 381196 - DNA, 19 bp, Homo sapiens
  siRNA target sequence for FLJ23514 (NM_021827.1,709-727).
ctgcgcttaatgctcttaa

SEQ ID NO: 381197 - DNA, 19 bp, Homo sapiens
  siRNA target sequence for FLJ23514 (NM_021827.1,712-730).
cgcttaatgctcttaagca

SEQ ID NO: 381198 - DNA, 19 bp, Homo sapiens
  siRNA target sequence for FLJ23514 (NM_021827.1,748-766).
gtctcctgaaacaaatgga

SEQ ID NO: 381199 - DNA, 19 bp, Homo sapiens
  siRNA target sequence for FLJ23514 (NM_021827.1,796-814).
gacaatacagagagttgat

SEQ ID NO: 381200 - DNA, 19 bp, Homo sapiens
  siRNA target sequence for FLJ23514 (NM_021827.1,855-873).
gcgcaaagagcgaaatttt

SEQ ID NO: 381201 - DNA, 19 bp, Homo sapiens
  siRNA target sequence for FLJ23514 (NM_021827.1,856-874).
cgcaaagagcgaaattttt

SEQ ID NO: 381202 - DNA, 19 bp, Homo sapiens
  siRNA target sequence for FLJ23514 (NM_021827.1,857-875).
gcaaagagcgaaattttta

SEQ ID NO: 381203 - DNA, 19 bp, Homo sapiens
  siRNA target sequence for FLJ23514 (NM_021827.1,977-995).
gcccatctttggtaagaat

SEQ ID NO: 381204 - DNA, 19 bp, Homo sapiens
  siRNA target sequence for FLJ23514 (NM_021827.1,1084-1102).
ccatcctgcatcaactagt

SEQ ID NO: 381205 - DNA, 19 bp, Homo sapiens
  siRNA target sequence for FLJ23514 (NM_021827.1,1106-1124).
ccagaggcgggatttgcaa

SEQ ID NO: 381206 - DNA, 19 bp, Homo sapiens
  siRNA target sequence for FLJ23514 (NM_021827.1,1107-1125).
cagaggcgggatttgcaaa

SEQ ID NO: 381207 - DNA, 19 bp, Homo sapiens
  siRNA target sequence for FLJ23514 (NM_021827.1,1111-1129).
ggcgggatttgcaaatgct

SEQ ID NO: 381208 - DNA, 19 bp, Homo sapiens
  siRNA target sequence for FLJ23514 (NM_021827.1,1112-1130).
gcgggatttgcaaatgctt

SEQ ID NO: 381209 - DNA, 19 bp, Homo sapiens
  siRNA target sequence for HPSE2 (NM_021828.2,234-252).
gaccctgattctacttgat

SEQ ID NO: 381210 - DNA, 19 bp, Homo sapiens
  siRNA target sequence for HPSE2 (NM_021828.2,236-254).
ccctgattctacttgatgt

SEQ ID NO: 381211 - DNA, 19 bp, Homo sapiens
  siRNA target sequence for HPSE2 (NM_021828.2,267-285).
cccagtcaggacagtcaat

SEQ ID NO: 381212 - DNA, 19 bp, Homo sapiens
  siRNA target sequence for HPSE2 (NM_021828.2,275-293).
ggacagtcaatgagaactt

SEQ ID NO: 381213 - DNA, 19 bp, Homo sapiens
  siRNA target sequence for HPSE2 (NM_021828.2,306-324).
gctggatccgtccatcatt

SEQ ID NO: 381214 - DNA, 19 bp, Homo sapiens
  siRNA target sequence for HPSE2 (NM_021828.2,309-327).
ggatccgtccatcattcat

SEQ ID NO: 381215 - DNA, 19 bp, Homo sapiens
  siRNA target sequence for HPSE2 (NM_021828.2,331-349).
ggctggctcgatttcctaa

SEQ ID NO: 381216 - DNA, 19 bp, Homo sapiens
  siRNA target sequence for HPSE2 (NM_021828.2,478-496).
ccggattactatctcaaaa

SEQ ID NO: 381217 - DNA, 19 bp, Homo sapiens
  siRNA target sequence for HPSE2 (NM_021828.2,479-497).
cggattactatctcaaaaa

SEQ ID NO: 381218 - DNA, 19 bp, Homo sapiens
  siRNA target sequence for HPSE2 (NM_021828.2,481-499).
gattactatctcaaaaact

SEQ ID NO: 381219 - DNA, 19 bp, Homo sapiens
  siRNA target sequence for HPSE2 (NM_021828.2,510-528).
cattgttcgaagtgatgtt

SEQ ID NO: 381220 - DNA, 19 bp, Homo sapiens
  siRNA target sequence for HPSE2 (NM_021828.2,526-544).
gttgccttagataaacaga

SEQ ID NO: 381221 - DNA, 19 bp, Homo sapiens
  siRNA target sequence for HPSE2 (NM_021828.2,631-649).
gagcaattctccaatactt

SEQ ID NO: 381222 - DNA, 19 bp, Homo sapiens
  siRNA target sequence for HPSE2 (NM_021828.2,634-652).
caattctccaatacttaca

SEQ ID NO: 381223 - DNA, 19 bp, Homo sapiens
  siRNA target sequence for HPSE2 (NM_021828.2,639-657).
ctccaatacttacagtaat

SEQ ID NO: 381224 - DNA, 19 bp, Homo sapiens
  siRNA target sequence for HPSE2 (NM_021828.2,651-669).
cagtaatctcatattaaca

SEQ ID NO: 381225 - DNA, 19 bp, Homo sapiens
  siRNA target sequence for HPSE2 (NM_021828.2,668-686).
cagccaggtctctagacaa

SEQ ID NO: 381226 - DNA, 19 bp, Homo sapiens
  siRNA target sequence for HPSE2 (NM_021828.2,672-690).
caggtctctagacaaactt

SEQ ID NO: 381227 - DNA, 19 bp, Homo sapiens
  siRNA target sequence for HPSE2 (NM_021828.2,675-693).
gtctctagacaaactttat

SEQ ID NO: 381228 - DNA, 19 bp, Homo sapiens
  siRNA target sequence for HPSE2 (NM_021828.2,745-763).
cgtcgtaatcccaataact

SEQ ID NO: 381229 - DNA, 19 bp, Homo sapiens
  siRNA target sequence for HPSE2 (NM_021828.2,781-799).
gccctgagtctgttgaagt

SEQ ID NO: 381230 - DNA, 19 bp, Homo sapiens
  siRNA target sequence for HPSE2 (NM_021828.2,784-802).
ctgagtctgttgaagtaca

SEQ ID NO: 381231 - DNA, 19 bp, Homo sapiens
  siRNA target sequence for HPSE2 (NM_021828.2,803-821).
gcgccagcaaaaagtacaa

SEQ ID NO: 381232 - DNA, 19 bp, Homo sapiens
  siRNA target sequence for HPSE2 (NM_021828.2,807-825).
cagcaaaaagtacaacatt

SEQ ID NO: 381233 - DNA, 19 bp, Homo sapiens
  siRNA target sequence for HPSE2 (NM_021828.2,835-853).
ctgggtaatgagccaaata

SEQ ID NO: 381234 - DNA, 19 bp, Homo sapiens
  siRNA target sequence for HPSE2 (NM_021828.2,839-857).
gtaatgagccaaataacta

SEQ ID NO: 381235 - DNA, 19 bp, Homo sapiens
  siRNA target sequence for HPSE2 (NM_021828.2,931-949).
cagcccatccggatttatt

SEQ ID NO: 381236 - DNA, 19 bp, Homo sapiens
  siRNA target sequence for HPSE2 (NM_021828.2,934-952).
cccatccggatttattcca

SEQ ID NO: 381237 - DNA, 19 bp, Homo sapiens
  siRNA target sequence for HPSE2 (NM_021828.2,959-977).
gcttatatggccctaatat

SEQ ID NO: 381238 - DNA, 19 bp, Homo sapiens
  siRNA target sequence for HPSE2 (NM_021828.2,960-978).
cttatatggccctaatatt

SEQ ID NO: 381239 - DNA, 19 bp, Homo sapiens
  siRNA target sequence for HPSE2 (NM_021828.2,1006-1024).
ctcctagatggattcatga

SEQ ID NO: 381240 - DNA, 19 bp, Homo sapiens
  siRNA target sequence for HPSE2 (NM_021828.2,1026-1044).
ggtggcaggaagtacagta

SEQ ID NO: 381241 - DNA, 19 bp, Homo sapiens
  siRNA target sequence for HPSE2 (NM_021828.2,1048-1066).
gcagttacctggcaacatt

SEQ ID NO: 381242 - DNA, 19 bp, Homo sapiens
  siRNA target sequence for HPSE2 (NM_021828.2,1059-1077).
gcaacattgctacattgat

SEQ ID NO: 381243 - DNA, 19 bp, Homo sapiens
  siRNA target sequence for HPSE2 (NM_021828.2,1133-1151).
ctgaccagattaggaaaat

SEQ ID NO: 381244 - DNA, 19 bp, Homo sapiens
  siRNA target sequence for HPSE2 (NM_021828.2,1169-1187).
catacactccaggaaagaa

SEQ ID NO: 381245 - DNA, 19 bp, Homo sapiens
  siRNA target sequence for HPSE2 (NM_021828.2,1217-1235).
cagctggaggcacaaacaa

SEQ ID NO: 381246 - DNA, 19 bp, Homo sapiens
  siRNA target sequence for HPSE2 (NM_021828.2,1220-1238).
ctggaggcacaaacaatct

SEQ ID NO: 381247 - DNA, 19 bp, Homo sapiens
  siRNA target sequence for HPSE2 (NM_021828.2,1222-1240).
ggaggcacaaacaatctat

SEQ ID NO: 381248 - DNA, 19 bp, Homo sapiens
  siRNA target sequence for HPSE2 (NM_021828.2,1233-1251).
caatctatccgattcctat

SEQ ID NO: 381249 - DNA, 19 bp, Homo sapiens
  siRNA target sequence for HPSE2 (NM_021828.2,1252-1270).
gctgcaggattcttatggt

SEQ ID NO: 381250 - DNA, 19 bp, Homo sapiens
  siRNA target sequence for HPSE2 (NM_021828.2,1253-1271).
ctgcaggattcttatggtt

SEQ ID NO: 381251 - DNA, 19 bp, Homo sapiens
  siRNA target sequence for HPSE2 (NM_021828.2,1258-1276).
ggattcttatggttgaaca

SEQ ID NO: 381252 - DNA, 19 bp, Homo sapiens
  siRNA target sequence for HPSE2 (NM_021828.2,1290-1308).
ggccaatcagggcattgat

SEQ ID NO: 381253 - DNA, 19 bp, Homo sapiens
  siRNA target sequence for HPSE2 (NM_021828.2,1311-1329).
cgtgatacggcactcattt

SEQ ID NO: 381254 - DNA, 19 bp, Homo sapiens
  siRNA target sequence for HPSE2 (NM_021828.2,1312-1330).
gtgatacggcactcatttt

SEQ ID NO: 381255 - DNA, 19 bp, Homo sapiens
  siRNA target sequence for HPSE2 (NM_021828.2,1314-1332).
gatacggcactcatttttt

SEQ ID NO: 381256 - DNA, 19 bp, Homo sapiens
  siRNA target sequence for HPSE2 (NM_021828.2,1348-1366).
cacctcgtggaccagaatt

SEQ ID NO: 381257 - DNA, 19 bp, Homo sapiens
  siRNA target sequence for HPSE2 (NM_021828.2,1475-1493).
gagtgatccgggacaaact

SEQ ID NO: 381258 - DNA, 19 bp, Homo sapiens
  siRNA target sequence for HPSE2 (NM_021828.2,1477-1495).
gtgatccgggacaaactaa

SEQ ID NO: 381259 - DNA, 19 bp, Homo sapiens
  siRNA target sequence for HPSE2 (NM_021828.2,1482-1500).
ccgggacaaactaaggatt

SEQ ID NO: 381260 - DNA, 19 bp, Homo sapiens
  siRNA target sequence for HPSE2 (NM_021828.2,1536-1554).
cgttcgtgggtccattaca

SEQ ID NO: 381261 - DNA, 19 bp, Homo sapiens
  siRNA target sequence for HPSE2 (NM_021828.2,1540-1558).
cgtgggtccattacacttt

SEQ ID NO: 381262 - DNA, 19 bp, Homo sapiens
  siRNA target sequence for HPSE2 (NM_021828.2,1541-1559).
gtgggtccattacactttt

SEQ ID NO: 381263 - DNA, 19 bp, Homo sapiens
  siRNA target sequence for HPSE2 (NM_021828.2,1543-1561).
gggtccattacacttttta

SEQ ID NO: 381264 - DNA, 19 bp, Homo sapiens
  siRNA target sequence for HPSE2 (NM_021828.2,1553-1571).
cactttttatcatcaactt

SEQ ID NO: 381265 - DNA, 19 bp, Homo sapiens
  siRNA target sequence for ST7 (NM_021908.1,885-903).
ctgggagataaaattgtta

SEQ ID NO: 381266 - DNA, 19 bp, Homo sapiens
  siRNA target sequence for ST7 (NM_021908.1,1824-1842).
cttcgcaaaagctatgatt

SEQ ID NO: 381267 - DNA, 19 bp, Homo sapiens
  siRNA target sequence for ST7 (NM_021908.1,1829-1847).
caaaagctatgattgacat

SEQ ID NO: 381268 - DNA, 19 bp, Homo sapiens
  siRNA target sequence for ST7 (NM_021908.1,1834-1852).
gctatgattgacattttct

SEQ ID NO: 381269 - DNA, 19 bp, Homo sapiens
  siRNA target sequence for ST7 (NM_021908.1,1893-1911).
catgcgtgttgaagatgaa

SEQ ID NO: 381270 - DNA, 19 bp, Homo sapiens
  siRNA target sequence for ST7 (NM_021908.1,1920-1938).
ccctccggcacctcaatct

SEQ ID NO: 381271 - DNA, 19 bp, Homo sapiens
  siRNA target sequence for FLJ22649 (NM_021928.1,240-258).
gtctcgcggatcatgctaa

SEQ ID NO: 381272 - DNA, 19 bp, Homo sapiens
  siRNA target sequence for FLJ22649 (NM_021928.1,242-260).
ctcgcggatcatgctaaaa

SEQ ID NO: 381273 - DNA, 19 bp, Homo sapiens
  siRNA target sequence for FLJ22649 (NM_021928.1,244-262).
cgcggatcatgctaaaaaa

SEQ ID NO: 381274 - DNA, 19 bp, Homo sapiens
  siRNA target sequence for FLJ22649 (NM_021928.1,302-320).
gggatttatcacatttgat

SEQ ID NO: 381275 - DNA, 19 bp, Homo sapiens
  siRNA target sequence for FLJ22649 (NM_021928.1,500-518).
ctttgacgatggaaatggt

SEQ ID NO: 381276 - DNA, 19 bp, Homo sapiens
  siRNA target sequence for FLJ22649 (NM_021928.1,553-571).
cttggaacgtcgtaccaaa

SEQ ID NO: 381277 - DNA, 19 bp, Homo sapiens
  siRNA target sequence for FLJ22649 (NM_021928.1,557-575).
gaacgtcgtaccaaatgct

SEQ ID NO: 381278 - DNA, 19 bp, Homo sapiens
  siRNA target sequence for FLJ22649 (NM_021928.1,615-633).
gtcccatttccagatacat

SEQ ID NO: 381279 - DNA, 19 bp, Homo sapiens
  siRNA target sequence for FLJ22649 (NM_021928.1,617-635).
cccatttccagatacatat

SEQ ID NO: 381280 - DNA, 19 bp, Homo sapiens
  siRNA target sequence for FLJ22649 (NM_021928.1,624-642).
ccagatacatatgaaataa

SEQ ID NO: 381281 - DNA, 19 bp, Homo sapiens
  siRNA target sequence for FLJ22649 (NM_021928.1,627-645).
gatacatatgaaataacga

SEQ ID NO: 381282 - DNA, 19 bp, Homo sapiens
  siRNA target sequence for FLJ11785 (NM_021930.2,214-232).
cagttcttattggaagtaa

SEQ ID NO: 381283 - DNA, 19 bp, Homo sapiens
  siRNA target sequence for FLJ11785 (NM_021930.2,237-255).
gtcagtgaaggtacagata

SEQ ID NO: 381284 - DNA, 19 bp, Homo sapiens
  siRNA target sequence for FLJ11785 (NM_021930.2,259-277).
gtgatctcccttcttatgt

SEQ ID NO: 381285 - DNA, 19 bp, Homo sapiens
  siRNA target sequence for FLJ11785 (NM_021930.2,261-279).
gatctcccttcttatgtgt

SEQ ID NO: 381286 - DNA, 19 bp, Homo sapiens
  siRNA target sequence for FLJ11785 (NM_021930.2,271-289).
cttatgtgtctgcattcat

SEQ ID NO: 381287 - DNA, 19 bp, Homo sapiens
  siRNA target sequence for FLJ11785 (NM_021930.2,276-294).
gtgtctgcattcatagaaa

SEQ ID NO: 381288 - DNA, 19 bp, Homo sapiens
  siRNA target sequence for FLJ11785 (NM_021930.2,300-318).
gttggaaatgaccttaaat

SEQ ID NO: 381289 - DNA, 19 bp, Homo sapiens
  siRNA target sequence for FLJ11785 (NM_021930.2,352-370).
ggacagtaagtaaaatgca

SEQ ID NO: 381290 - DNA, 19 bp, Homo sapiens
  siRNA target sequence for FLJ11785 (NM_021930.2,378-396).
gaacaggtacttacaattt

SEQ ID NO: 381291 - DNA, 19 bp, Homo sapiens
  siRNA target sequence for FLJ11785 (NM_021930.2,381-399).
caggtacttacaatttcat

SEQ ID NO: 381292 - DNA, 19 bp, Homo sapiens
  siRNA target sequence for FLJ11785 (NM_021930.2,489-507).
ctcttcagcgccattaaca

SEQ ID NO: 381293 - DNA, 19 bp, Homo sapiens
  siRNA target sequence for FLJ11785 (NM_021930.2,539-557).
cgatcttggaaccatgatt

SEQ ID NO: 381294 - DNA, 19 bp, Homo sapiens
  siRNA target sequence for FLJ11785 (NM_021930.2,540-558).
gatcttggaaccatgatta

SEQ ID NO: 381295 - DNA, 19 bp, Homo sapiens
  siRNA target sequence for FLJ11785 (NM_021930.2,550-568).
ccatgattagccagattga

SEQ ID NO: 381296 - DNA, 19 bp, Homo sapiens
  siRNA target sequence for FLJ11785 (NM_021930.2,551-569).
catgattagccagattgaa

SEQ ID NO: 381297 - DNA, 19 bp, Homo sapiens
  siRNA target sequence for FLJ11785 (NM_021930.2,585-603).
cttgcttaccttaaatgga

SEQ ID NO: 381298 - DNA, 19 bp, Homo sapiens
  siRNA target sequence for FLJ11785 (NM_021930.2,625-643).
gtgataacattcagcaata

SEQ ID NO: 381299 - DNA, 19 bp, Homo sapiens
  siRNA target sequence for FLJ11785 (NM_021930.2,639-657).
caatatctgatgaccaata

SEQ ID NO: 381300 - DNA, 19 bp, Homo sapiens
  siRNA target sequence for FLJ11785 (NM_021930.2,673-691).
cctccactctagtgtctat

SEQ ID NO: 381301 - DNA, 19 bp, Homo sapiens
  siRNA target sequence for FLJ11785 (NM_021930.2,688-706).
ctatggcagaacttgacat

SEQ ID NO: 381302 - DNA, 19 bp, Homo sapiens
  siRNA target sequence for FLJ11785 (NM_021930.2,694-712).
cagaacttgacattaaact

SEQ ID NO: 381303 - DNA, 19 bp, Homo sapiens
  siRNA target sequence for FLJ11785 (NM_021930.2,711-729).
cttcaggaatcatcttgta

SEQ ID NO: 381304 - DNA, 19 bp, Homo sapiens
  siRNA target sequence for FLJ11785 (NM_021930.2,746-764).
catgagagccacagttaaa

SEQ ID NO: 381305 - DNA, 19 bp, Homo sapiens
  siRNA target sequence for FLJ11785 (NM_021930.2,785-803).
ggacaagcttacaagtgat

SEQ ID NO: 381306 - DNA, 19 bp, Homo sapiens
  siRNA target sequence for FLJ11785 (NM_021930.2,788-806).
caagcttacaagtgatttt

SEQ ID NO: 381307 - DNA, 19 bp, Homo sapiens
  siRNA target sequence for FLJ11785 (NM_021930.2,839-857).
catcgcaccccctcaatca

SEQ ID NO: 381308 - DNA, 19 bp, Homo sapiens
  siRNA target sequence for FLJ11785 (NM_021930.2,842-860).
cgcaccccctcaatcacaa

SEQ ID NO: 381309 - DNA, 19 bp, Homo sapiens
  siRNA target sequence for FLJ11785 (NM_021930.2,847-865).
cccctcaatcacaaactgt

SEQ ID NO: 381310 - DNA, 19 bp, Homo sapiens
  siRNA target sequence for FLJ11785 (NM_021930.2,848-866).
ccctcaatcacaaactgtt

SEQ ID NO: 381311 - DNA, 19 bp, Homo sapiens
  siRNA target sequence for FLJ11785 (NM_021930.2,908-926).
cctggagacactgttttgt

SEQ ID NO: 381312 - DNA, 19 bp, Homo sapiens
  siRNA target sequence for FLJ11785 (NM_021930.2,947-965).
ctcagatgaattacttact

SEQ ID NO: 381313 - DNA, 19 bp, Homo sapiens
  siRNA target sequence for FLJ11785 (NM_021930.2,949-967).
cagatgaattacttactga

SEQ ID NO: 381314 - DNA, 19 bp, Homo sapiens
  siRNA target sequence for FLJ11785 (NM_021930.2,975-993).
caactcccagaaaaatact

SEQ ID NO: 381315 - DNA, 19 bp, Homo sapiens
  siRNA target sequence for FLJ11785 (NM_021930.2,1075-1093).
gagggaaccggcagactaa

SEQ ID NO: 381316 - DNA, 19 bp, Homo sapiens
  siRNA target sequence for FLJ11785 (NM_021930.2,1078-1096).
ggaaccggcagactaatgt

SEQ ID NO: 381317 - DNA, 19 bp, Homo sapiens
  siRNA target sequence for FLJ11785 (NM_021930.2,1082-1100).
ccggcagactaatgtgtta

SEQ ID NO: 381318 - DNA, 19 bp, Homo sapiens
  siRNA target sequence for FLJ11785 (NM_021930.2,1083-1101).
cggcagactaatgtgttaa

SEQ ID NO: 381319 - DNA, 19 bp, Homo sapiens
  siRNA target sequence for FLJ11785 (NM_021930.2,1128-1146).
gtacttatgtggattggaa

SEQ ID NO: 381320 - DNA, 19 bp, Homo sapiens
  siRNA target sequence for FLJ11785 (NM_021930.2,1178-1196).
gccaatattagacaaagta

SEQ ID NO: 381321 - DNA, 19 bp, Homo sapiens
  siRNA target sequence for FLJ11785 (NM_021930.2,1190-1208).
caaagtaggctctttggta

SEQ ID NO: 381322 - DNA, 19 bp, Homo sapiens
  siRNA target sequence for FLJ11785 (NM_021930.2,1206-1224).
gtaaacgcaaggcttgaat

SEQ ID NO: 381323 - DNA, 19 bp, Homo sapiens
  siRNA target sequence for FLJ11785 (NM_021930.2,1254-1272).
gagaagttagccactgata

SEQ ID NO: 381324 - DNA, 19 bp, Homo sapiens
  siRNA target sequence for FLJ11785 (NM_021930.2,1256-1274).
gaagttagccactgatatt

SEQ ID NO: 381325 - DNA, 19 bp, Homo sapiens
  siRNA target sequence for FLJ11785 (NM_021930.2,1259-1277).
gttagccactgatattcct

SEQ ID NO: 381326 - DNA, 19 bp, Homo sapiens
  siRNA target sequence for FLJ11785 (NM_021930.2,1276-1294).
cttgtctgctatatgatga

SEQ ID NO: 381327 - DNA, 19 bp, Homo sapiens
  siRNA target sequence for FLJ11785 (NM_021930.2,1279-1297).
gtctgctatatgatgacaa

SEQ ID NO: 381328 - DNA, 19 bp, Homo sapiens
  siRNA target sequence for FLJ11785 (NM_021930.2,1316-1334).
ggatgaagtactcttgttt

SEQ ID NO: 381329 - DNA, 19 bp, Homo sapiens
  siRNA target sequence for FLJ11785 (NM_021930.2,1361-1379).
ctatcctggcacttttgct

SEQ ID NO: 381330 - DNA, 19 bp, Homo sapiens
  siRNA target sequence for FLJ11785 (NM_021930.2,1368-1386).
ggcacttttgctagttgta

SEQ ID NO: 381331 - DNA, 19 bp, Homo sapiens
  siRNA target sequence for FLJ11785 (NM_021930.2,1378-1396).
ctagttgtatgcatattct

SEQ ID NO: 381332 - DNA, 19 bp, Homo sapiens
  siRNA target sequence for FLJ11785 (NM_021930.2,1384-1402).
gtatgcatattctatcaga

SEQ ID NO: 381333 - DNA, 19 bp, Homo sapiens
  siRNA target sequence for FLJ11785 (NM_021930.2,1485-1503).
gcctgggtatcgcaatata

SEQ ID NO: 381334 - DNA, 19 bp, Homo sapiens
  siRNA target sequence for FLJ11785 (NM_021930.2,1486-1504).
cctgggtatcgcaatataa

SEQ ID NO: 381335 - DNA, 19 bp, Homo sapiens
  siRNA target sequence for FLJ11785 (NM_021930.2,1489-1507).
gggtatcgcaatataagga

SEQ ID NO: 381336 - DNA, 19 bp, Homo sapiens
  siRNA target sequence for FLJ11785 (NM_021930.2,1490-1508).
ggtatcgcaatataaggat

SEQ ID NO: 381337 - DNA, 19 bp, Homo sapiens
  siRNA target sequence for FLJ11785 (NM_021930.2,1491-1509).
gtatcgcaatataaggata

SEQ ID NO: 381338 - DNA, 19 bp, Homo sapiens
  siRNA target sequence for FLJ11785 (NM_021930.2,1517-1535).
cgtggatgaaatgaaagtt

SEQ ID NO: 381339 - DNA, 19 bp, Homo sapiens
  siRNA target sequence for FLJ11785 (NM_021930.2,1536-1554).
ccagattgtgcagaaactt

SEQ ID NO: 381340 - DNA, 19 bp, Homo sapiens
  siRNA target sequence for FLJ11785 (NM_021930.2,1572-1590).
gttataactgacaggtata

SEQ ID NO: 381341 - DNA, 19 bp, Homo sapiens
  siRNA target sequence for FLJ11785 (NM_021930.2,1579-1597).
ctgacaggtataaaaatct

SEQ ID NO: 381342 - DNA, 19 bp, Homo sapiens
  siRNA target sequence for FLJ11785 (NM_021930.2,1698-1716).
gcttcccttggctttcgat

SEQ ID NO: 381343 - DNA, 19 bp, Homo sapiens
  siRNA target sequence for FLJ11785 (NM_021930.2,1699-1717).
cttcccttggctttcgata

SEQ ID NO: 381344 - DNA, 19 bp, Homo sapiens
  siRNA target sequence for FLJ11785 (NM_021930.2,1703-1721).
ccttggctttcgatactgt

SEQ ID NO: 381345 - DNA, 19 bp, Homo sapiens
  siRNA target sequence for FLJ11785 (NM_021930.2,1709-1727).
ctttcgatactgtgcaatt

SEQ ID NO: 381346 - DNA, 19 bp, Homo sapiens
  siRNA target sequence for FLJ11785 (NM_021930.2,1762-1780).
cagattgggctgacaatgt

SEQ ID NO: 381347 - DNA, 19 bp, Homo sapiens
  siRNA target sequence for FLJ11785 (NM_021930.2,1764-1782).
gattgggctgacaatgttt

SEQ ID NO: 381348 - DNA, 19 bp, Homo sapiens
  siRNA target sequence for FLJ11785 (NM_021930.2,1769-1787).
ggctgacaatgttttcttt

SEQ ID NO: 381349 - DNA, 19 bp, Homo sapiens
  siRNA target sequence for FLJ11785 (NM_021930.2,1812-1830).
gaggtgtttgcagagaata

SEQ ID NO: 381350 - DNA, 19 bp, Homo sapiens
  siRNA target sequence for FLJ11785 (NM_021930.2,1815-1833).
gtgtttgcagagaataata

SEQ ID NO: 381351 - DNA, 19 bp, Homo sapiens
  siRNA target sequence for FLJ11785 (NM_021930.2,1908-1926).
gaacgtttaaagcatgata

SEQ ID NO: 381352 - DNA, 19 bp, Homo sapiens
  siRNA target sequence for FLJ11785 (NM_021930.2,1911-1929).
cgtttaaagcatgatatgt

SEQ ID NO: 381353 - DNA, 19 bp, Homo sapiens
  siRNA target sequence for FLJ11785 (NM_021930.2,1936-1954).
gtcaagtagaccacgtttt

SEQ ID NO: 381354 - DNA, 19 bp, Homo sapiens
  siRNA target sequence for FLJ11785 (NM_021930.2,1938-1956).
caagtagaccacgttttta

SEQ ID NO: 381355 - DNA, 19 bp, Homo sapiens
  siRNA target sequence for FLJ11785 (NM_021930.2,1946-1964).
ccacgtttttagagaagtt

SEQ ID NO: 381356 - DNA, 19 bp, Homo sapiens
  siRNA target sequence for FLJ11785 (NM_021930.2,1947-1965).
cacgtttttagagaagtta

SEQ ID NO: 381357 - DNA, 19 bp, Homo sapiens
  siRNA target sequence for FLJ11785 (NM_021930.2,1968-1986).
gatgctgcaaaattgtata

SEQ ID NO: 381358 - DNA, 19 bp, Homo sapiens
  siRNA target sequence for FLJ11785 (NM_021930.2,2069-2087).
gacgttacgagaccattta

SEQ ID NO: 381359 - DNA, 19 bp, Homo sapiens
  siRNA target sequence for FLJ11785 (NM_021930.2,2071-2089).
cgttacgagaccatttact

SEQ ID NO: 381360 - DNA, 19 bp, Homo sapiens
  siRNA target sequence for FLJ11785 (NM_021930.2,2160-2178).
gtatacatctaccaagaaa

SEQ ID NO: 381361 - DNA, 19 bp, Homo sapiens
  siRNA target sequence for FLJ11785 (NM_021930.2,2229-2247).
gatatgactcggaatcttt

SEQ ID NO: 381362 - DNA, 19 bp, Homo sapiens
  siRNA target sequence for FLJ11785 (NM_021930.2,2442-2460).
gagattctacttaatttga

SEQ ID NO: 381363 - DNA, 19 bp, Homo sapiens
  siRNA target sequence for FLJ11785 (NM_021930.2,2451-2469).
cttaatttgaggacaaatt

SEQ ID NO: 381364 - DNA, 19 bp, Homo sapiens
  siRNA target sequence for RIC-8 (NM_021932.4,383-401).
gaagctctgcggtcataca

SEQ ID NO: 381365 - DNA, 19 bp, Homo sapiens
  siRNA target sequence for RIC-8 (NM_021932.4,649-667).
cgcagacatggatgttgta

SEQ ID NO: 381366 - DNA, 19 bp, Homo sapiens
  siRNA target sequence for RIC-8 (NM_021932.4,651-669).
cagacatggatgttgtact

SEQ ID NO: 381367 - DNA, 19 bp, Homo sapiens
  siRNA target sequence for RIC-8 (NM_021932.4,795-813).
cccacgatgtccagttctt

SEQ ID NO: 381368 - DNA, 19 bp, Homo sapiens
  siRNA target sequence for RIC-8 (NM_021932.4,796-814).
ccacgatgtccagttcttt

SEQ ID NO: 381369 - DNA, 19 bp, Homo sapiens
  siRNA target sequence for RIC-8 (NM_021932.4,888-906).
gagtgcgcctgctaactga

SEQ ID NO: 381370 - DNA, 19 bp, Homo sapiens
  siRNA target sequence for RIC-8 (NM_021932.4,1215-1233).
gagactccacggagttcat

SEQ ID NO: 381371 - DNA, 19 bp, Homo sapiens
  siRNA target sequence for RIC-8 (NM_021932.4,1236-1254).
gagtgaatatggatgtgat

SEQ ID NO: 381372 - DNA, 19 bp, Homo sapiens
  siRNA target sequence for RIC-8 (NM_021932.4,1328-1346).
ctgagcgtgctgactgaat

SEQ ID NO: 381373 - DNA, 19 bp, Homo sapiens
  siRNA target sequence for RIC-8 (NM_021932.4,1330-1348).
gagcgtgctgactgaatgt

SEQ ID NO: 381374 - DNA, 19 bp, Homo sapiens
  siRNA target sequence for RIC-8 (NM_021932.4,1512-1530).
gggtggctgccgagttctt

SEQ ID NO: 381375 - DNA, 19 bp, Homo sapiens
  siRNA target sequence for RIC-8 (NM_021932.4,1514-1532).
gtggctgccgagttcttgt

SEQ ID NO: 381376 - DNA, 19 bp, Homo sapiens
  siRNA target sequence for RIC-8 (NM_021932.4,1516-1534).
ggctgccgagttcttgttt

SEQ ID NO: 381377 - DNA, 19 bp, Homo sapiens
  siRNA target sequence for RIC-8 (NM_021932.4,1551-1569).
gtgtgccccgattcatcaa

SEQ ID NO: 381378 - DNA, 19 bp, Homo sapiens
  siRNA target sequence for FLJ12438 (NM_021933.1,796-814).
ccaacaaggaggagtgtat

SEQ ID NO: 381379 - DNA, 19 bp, Homo sapiens
  siRNA target sequence for FLJ12438 (NM_021933.1,1146-1164).
ccgaagtctgagaaaagct

SEQ ID NO: 381380 - DNA, 19 bp, Homo sapiens
  siRNA target sequence for FLJ11773 (NM_021934.3,528-546).
caggcaagttccactacaa

SEQ ID NO: 381381 - DNA, 19 bp, Homo sapiens
  siRNA target sequence for FLJ11773 (NM_021934.3,599-617).
gacttcatcgacttcactt

SEQ ID NO: 381382 - DNA, 19 bp, Homo sapiens
  siRNA target sequence for FLJ11773 (NM_021934.3,601-619).
cttcatcgacttcacttat

SEQ ID NO: 381383 - DNA, 19 bp, Homo sapiens
  siRNA target sequence for FLJ11773 (NM_021934.3,889-907).
catcgtggaggtgatgaat

SEQ ID NO: 381384 - DNA, 19 bp, Homo sapiens
  siRNA target sequence for FLJ11773 (NM_021934.3,936-954).
cacagtcggaggtggataa

SEQ ID NO: 381385 - DNA, 19 bp, Homo sapiens
  siRNA target sequence for FLJ11773 (NM_021934.3,947-965).
gtggataacgtgtttgaca

SEQ ID NO: 381386 - DNA, 19 bp, Homo sapiens
  siRNA target sequence for C21orf97 (NM_021941.1,770-788).
cttcccatccaccagtata

SEQ ID NO: 381387 - DNA, 19 bp, Homo sapiens
  siRNA target sequence for C21orf97 (NM_021941.1,1021-1039).
gaaacctgtcctaagtaaa

SEQ ID NO: 381388 - DNA, 19 bp, Homo sapiens
  siRNA target sequence for C21orf97 (NM_021941.1,1025-1043).
cctgtcctaagtaaaacta

SEQ ID NO: 381389 - DNA, 19 bp, Homo sapiens
  siRNA target sequence for FLJ12716 (NM_021942.4,194-212).
ggacttccctgtggaatta

SEQ ID NO: 381390 - DNA, 19 bp, Homo sapiens
  siRNA target sequence for FLJ12716 (NM_021942.4,223-241).
ctatggcctttgttactct

SEQ ID NO: 381391 - DNA, 19 bp, Homo sapiens
  siRNA target sequence for FLJ12716 (NM_021942.4,244-262).
cgggcctggatgtagttta

SEQ ID NO: 381392 - DNA, 19 bp, Homo sapiens
  siRNA target sequence for FLJ12716 (NM_021942.4,245-263).
gggcctggatgtagtttat

SEQ ID NO: 381393 - DNA, 19 bp, Homo sapiens
  siRNA target sequence for FLJ12716 (NM_021942.4,287-305).
ggacgccttctgtgcaaat

SEQ ID NO: 381394 - DNA, 19 bp, Homo sapiens
  siRNA target sequence for FLJ12716 (NM_021942.4,310-328).
gagctgatcgagtaccaat

SEQ ID NO: 381395 - DNA, 19 bp, Homo sapiens
  siRNA target sequence for FLJ12716 (NM_021942.4,312-330).
gctgatcgagtaccaattt

SEQ ID NO: 381396 - DNA, 19 bp, Homo sapiens
  siRNA target sequence for FLJ12716 (NM_021942.4,315-333).
gatcgagtaccaatttctt

SEQ ID NO: 381397 - DNA, 19 bp, Homo sapiens
  siRNA target sequence for FLJ12716 (NM_021942.4,318-336).
cgagtaccaatttctttca

SEQ ID NO: 381398 - DNA, 19 bp, Homo sapiens
  siRNA target sequence for FLJ12716 (NM_021942.4,344-362).
cccaggtgaccatgagtat

SEQ ID NO: 381399 - DNA, 19 bp, Homo sapiens
  siRNA target sequence for FLJ12716 (NM_021942.4,376-394).
ccaagagaacttcatatga

SEQ ID NO: 381400 - DNA, 19 bp, Homo sapiens
  siRNA target sequence for FLJ12716 (NM_021942.4,401-419).
cattcctaaagggatctta

SEQ ID NO: 381401 - DNA, 19 bp, Homo sapiens
  siRNA target sequence for FLJ12716 (NM_021942.4,526-544).
gcgccaccagagtggaaat

SEQ ID NO: 381402 - DNA, 19 bp, Homo sapiens
  siRNA target sequence for FLJ12716 (NM_021942.4,527-545).
cgccaccagagtggaaata

SEQ ID NO: 381403 - DNA, 19 bp, Homo sapiens
  siRNA target sequence for FLJ12716 (NM_021942.4,540-558).
gaaatagtcaggcaaagtt

SEQ ID NO: 381404 - DNA, 19 bp, Homo sapiens
  siRNA target sequence for FLJ12716 (NM_021942.4,677-695).
ctcaggaaagtctttgttt

SEQ ID NO: 381405 - DNA, 19 bp, Homo sapiens
  siRNA target sequence for FLJ12716 (NM_021942.4,711-729).
gaccaccttgtgggttata

SEQ ID NO: 381406 - DNA, 19 bp, Homo sapiens
  siRNA target sequence for FLJ12716 (NM_021942.4,713-731).
ccaccttgtgggttatatt

SEQ ID NO: 381407 - DNA, 19 bp, Homo sapiens
  siRNA target sequence for FLJ12716 (NM_021942.4,714-732).
caccttgtgggttatatta

SEQ ID NO: 381408 - DNA, 19 bp, Homo sapiens
  siRNA target sequence for FLJ12716 (NM_021942.4,716-734).
ccttgtgggttatattata

SEQ ID NO: 381409 - DNA, 19 bp, Homo sapiens
  siRNA target sequence for FLJ12716 (NM_021942.4,846-864).
gttaggcatcagttcaaaa

SEQ ID NO: 381410 - DNA, 19 bp, Homo sapiens
  siRNA target sequence for FLJ12716 (NM_021942.4,851-869).
gcatcagttcaaaatagct

SEQ ID NO: 381411 - DNA, 19 bp, Homo sapiens
  siRNA target sequence for FLJ12716 (NM_021942.4,897-915).
caaaatgcgctgaagaatt

SEQ ID NO: 381412 - DNA, 19 bp, Homo sapiens
  siRNA target sequence for FLJ12716 (NM_021942.4,903-921).
gcgctgaagaattatagga

SEQ ID NO: 381413 - DNA, 19 bp, Homo sapiens
  siRNA target sequence for FLJ12716 (NM_021942.4,919-937).
ggaccgcctataatcttgt

SEQ ID NO: 381414 - DNA, 19 bp, Homo sapiens
  siRNA target sequence for FLJ12716 (NM_021942.4,920-938).
gaccgcctataatcttgta

SEQ ID NO: 381415 - DNA, 19 bp, Homo sapiens
  siRNA target sequence for FLJ12716 (NM_021942.4,942-960).
gaattgagagcccatgaaa

SEQ ID NO: 381416 - DNA, 19 bp, Homo sapiens
  siRNA target sequence for FLJ12716 (NM_021942.4,947-965).
gagagcccatgaaactaat

SEQ ID NO: 381417 - DNA, 19 bp, Homo sapiens
  siRNA target sequence for FLJ12716 (NM_021942.4,949-967).
gagcccatgaaactaatat

SEQ ID NO: 381418 - DNA, 19 bp, Homo sapiens
  siRNA target sequence for FLJ12716 (NM_021942.4,980-998).
gactatggcaggatttata

SEQ ID NO: 381419 - DNA, 19 bp, Homo sapiens
  siRNA target sequence for FLJ12716 (NM_021942.4,991-1009).
gatttataaactacaagat

SEQ ID NO: 381420 - DNA, 19 bp, Homo sapiens
  siRNA target sequence for FLJ12716 (NM_021942.4,1012-1030).
gtaggctgtgttttcaaca

SEQ ID NO: 381421 - DNA, 19 bp, Homo sapiens
  siRNA target sequence for FLJ12716 (NM_021942.4,1034-1052).
caccccattggatgcaatt

SEQ ID NO: 381422 - DNA, 19 bp, Homo sapiens
  siRNA target sequence for FLJ12716 (NM_021942.4,1037-1055).
cccattggatgcaattgct

SEQ ID NO: 381423 - DNA, 19 bp, Homo sapiens
  siRNA target sequence for FLJ12716 (NM_021942.4,1054-1072).
ctcagttccgaaaacacat

SEQ ID NO: 381424 - DNA, 19 bp, Homo sapiens
  siRNA target sequence for FLJ12716 (NM_021942.4,1068-1086).
cacatcgacttgtgtaaga

SEQ ID NO: 381425 - DNA, 19 bp, Homo sapiens
  siRNA target sequence for FLJ12716 (NM_021942.4,1119-1137).
catgatgcatggatgtcta

SEQ ID NO: 381426 - DNA, 19 bp, Homo sapiens
  siRNA target sequence for FLJ12716 (NM_021942.4,1125-1143).
gcatggatgtctaaacaat

SEQ ID NO: 381427 - DNA, 19 bp, Homo sapiens
  siRNA target sequence for FLJ12716 (NM_021942.4,1126-1144).
catggatgtctaaacaatt

SEQ ID NO: 381428 - DNA, 19 bp, Homo sapiens
  siRNA target sequence for FLJ12716 (NM_021942.4,1146-1164).
caggcctttggagatttat

SEQ ID NO: 381429 - DNA, 19 bp, Homo sapiens
  siRNA target sequence for FLJ12716 (NM_021942.4,1181-1199).
gttagggttaacagctatt

SEQ ID NO: 381430 - DNA, 19 bp, Homo sapiens
  siRNA target sequence for FLJ12716 (NM_021942.4,1185-1203).
gggttaacagctattcaaa

SEQ ID NO: 381431 - DNA, 19 bp, Homo sapiens
  siRNA target sequence for FLJ12716 (NM_021942.4,1187-1205).
gttaacagctattcaaact

SEQ ID NO: 381432 - DNA, 19 bp, Homo sapiens
  siRNA target sequence for FLJ12716 (NM_021942.4,1284-1302).
cacgaagcttctgtaatgt

SEQ ID NO: 381433 - DNA, 19 bp, Homo sapiens
  siRNA target sequence for FLJ12716 (NM_021942.4,1286-1304).
cgaagcttctgtaatgtat

SEQ ID NO: 381434 - DNA, 19 bp, Homo sapiens
  siRNA target sequence for FLJ12716 (NM_021942.4,1307-1325).
caatcctgatcccttagaa

SEQ ID NO: 381435 - DNA, 19 bp, Homo sapiens
  siRNA target sequence for FLJ12716 (NM_021942.4,1327-1345).
cacaaacaggcgttcttga

SEQ ID NO: 381436 - DNA, 19 bp, Homo sapiens
  siRNA target sequence for FLJ12716 (NM_021942.4,1360-1378).
gatcatggcgacaaggaat

SEQ ID NO: 381437 - DNA, 19 bp, Homo sapiens
  siRNA target sequence for FLJ12716 (NM_021942.4,1363-1381).
catggcgacaaggaatact

SEQ ID NO: 381438 - DNA, 19 bp, Homo sapiens
  siRNA target sequence for FLJ12716 (NM_021942.4,1368-1386).
cgacaaggaatactaagtt

SEQ ID NO: 381439 - DNA, 19 bp, Homo sapiens
  siRNA target sequence for FLJ12716 (NM_021942.4,1369-1387).
gacaaggaatactaagttt

SEQ ID NO: 381440 - DNA, 19 bp, Homo sapiens
  siRNA target sequence for FLJ12716 (NM_021942.4,1460-1478).
ctctgagataatcataact

SEQ ID NO: 381441 - DNA, 19 bp, Homo sapiens
  siRNA target sequence for FLJ12716 (NM_021942.4,1494-1512).
gttgcacagttcaagaagt

SEQ ID NO: 381442 - DNA, 19 bp, Homo sapiens
  siRNA target sequence for FLJ12716 (NM_021942.4,1497-1515).
gcacagttcaagaagtata

SEQ ID NO: 381443 - DNA, 19 bp, Homo sapiens
  siRNA target sequence for FLJ12716 (NM_021942.4,1571-1589).
cgcaaaggattataccaaa

SEQ ID NO: 381444 - DNA, 19 bp, Homo sapiens
  siRNA target sequence for FLJ12716 (NM_021942.4,1647-1665).
ctgctcacttctgtattaa

SEQ ID NO: 381445 - DNA, 19 bp, Homo sapiens
  siRNA target sequence for FLJ12716 (NM_021942.4,1649-1667).
gctcacttctgtattaact

SEQ ID NO: 381446 - DNA, 19 bp, Homo sapiens
  siRNA target sequence for FLJ12716 (NM_021942.4,1652-1670).
cacttctgtattaactaca

SEQ ID NO: 381447 - DNA, 19 bp, Homo sapiens
  siRNA target sequence for FLJ12716 (NM_021942.4,1685-1703).
ctacctcatggcccaatta

SEQ ID NO: 381448 - DNA, 19 bp, Homo sapiens
  siRNA target sequence for FLJ12716 (NM_021942.4,1741-1759).
gagcttcaactctgaaaga

SEQ ID NO: 381449 - DNA, 19 bp, Homo sapiens
  siRNA target sequence for FLJ12716 (NM_021942.4,1763-1781).
ccagaagtctcggatagaa

SEQ ID NO: 381450 - DNA, 19 bp, Homo sapiens
  siRNA target sequence for FLJ12716 (NM_021942.4,1822-1840).
cagaacccgactgtgatat

SEQ ID NO: 381451 - DNA, 19 bp, Homo sapiens
  siRNA target sequence for FLJ12716 (NM_021942.4,1824-1842).
gaacccgactgtgatatct

SEQ ID NO: 381452 - DNA, 19 bp, Homo sapiens
  siRNA target sequence for FLJ12716 (NM_021942.4,1870-1888).
gggcagaccgaatttctct

SEQ ID NO: 381453 - DNA, 19 bp, Homo sapiens
  siRNA target sequence for FLJ12716 (NM_021942.4,1893-1911).
ggcagcaatattttcacaa

SEQ ID NO: 381454 - DNA, 19 bp, Homo sapiens
  siRNA target sequence for FLJ12716 (NM_021942.4,1898-1916).
caatattttcacaatagga

SEQ ID NO: 381455 - DNA, 19 bp, Homo sapiens
  siRNA target sequence for FLJ12716 (NM_021942.4,1943-1961).
gtgcaaagccaagtttcat

SEQ ID NO: 381456 - DNA, 19 bp, Homo sapiens
  siRNA target sequence for FLJ12716 (NM_021942.4,1964-1982).
cccaagttttcatgttgat

SEQ ID NO: 381457 - DNA, 19 bp, Homo sapiens
  siRNA target sequence for FLJ12716 (NM_021942.4,2020-2038).
gtccacatcccattaggtt

SEQ ID NO: 381458 - DNA, 19 bp, Homo sapiens
  siRNA target sequence for FLJ12716 (NM_021942.4,2022-2040).
ccacatcccattaggtttt

SEQ ID NO: 381459 - DNA, 19 bp, Homo sapiens
  siRNA target sequence for FLJ12716 (NM_021942.4,2046-2064).
ctctgtgtcagctttaata

SEQ ID NO: 381460 - DNA, 19 bp, Homo sapiens
  siRNA target sequence for FLJ12716 (NM_021942.4,2050-2068).
gtgtcagctttaataatca

SEQ ID NO: 381461 - DNA, 19 bp, Homo sapiens
  siRNA target sequence for FLJ12716 (NM_021942.4,2151-2169).
ctagttcctggcaaaacaa

SEQ ID NO: 381462 - DNA, 19 bp, Homo sapiens
  siRNA target sequence for FLJ12716 (NM_021942.4,2252-2270).
caatgagacgggaagatgt

SEQ ID NO: 381463 - DNA, 19 bp, Homo sapiens
  siRNA target sequence for FLJ12716 (NM_021942.4,2330-2348).
ggcagctcggtctttcaaa

SEQ ID NO: 381464 - DNA, 19 bp, Homo sapiens
  siRNA target sequence for FLJ12716 (NM_021942.4,2360-2378).
gctacctgacaatgaagtt

SEQ ID NO: 381465 - DNA, 19 bp, Homo sapiens
  siRNA target sequence for FLJ12716 (NM_021942.4,2376-2394).
gttcactgggacagcatta

SEQ ID NO: 381466 - DNA, 19 bp, Homo sapiens
  siRNA target sequence for FLJ12716 (NM_021942.4,2379-2397).
cactgggacagcattataa

SEQ ID NO: 381467 - DNA, 19 bp, Homo sapiens
  siRNA target sequence for FLJ12716 (NM_021942.4,2381-2399).
ctgggacagcattataatt

SEQ ID NO: 381468 - DNA, 19 bp, Homo sapiens
  siRNA target sequence for FLJ12716 (NM_021942.4,2383-2401).
gggacagcattataattca

SEQ ID NO: 381469 - DNA, 19 bp, Homo sapiens
  siRNA target sequence for FLJ12716 (NM_021942.4,2400-2418).
caggcaagcacaatgatca

SEQ ID NO: 381470 - DNA, 19 bp, Homo sapiens
  siRNA target sequence for FLJ12716 (NM_021942.4,2402-2420).
ggcaagcacaatgatcata

SEQ ID NO: 381471 - DNA, 19 bp, Homo sapiens
  siRNA target sequence for FLJ12716 (NM_021942.4,2403-2421).
gcaagcacaatgatcatat

SEQ ID NO: 381472 - DNA, 19 bp, Homo sapiens
  siRNA target sequence for FLJ12716 (NM_021942.4,2440-2458).
ctgtacatctgctacatga

SEQ ID NO: 381473 - DNA, 19 bp, Homo sapiens
  siRNA target sequence for FLJ12716 (NM_021942.4,2463-2481).
cctgcactgactaatgaaa

SEQ ID NO: 381474 - DNA, 19 bp, Homo sapiens
  siRNA target sequence for FLJ12716 (NM_021942.4,2464-2482).
ctgcactgactaatgaaat

SEQ ID NO: 381475 - DNA, 19 bp, Homo sapiens
  siRNA target sequence for FLJ12716 (NM_021942.4,2521-2539).
cccaaatcagagatgtgaa

SEQ ID NO: 381476 - DNA, 19 bp, Homo sapiens
  siRNA target sequence for FLJ12716 (NM_021942.4,2543-2561).
caccgctggcttaaaacca

SEQ ID NO: 381477 - DNA, 19 bp, Homo sapiens
  siRNA target sequence for FLJ12716 (NM_021942.4,2562-2580).
ggacaggatgccaatttaa

SEQ ID NO: 381478 - DNA, 19 bp, Homo sapiens
  siRNA target sequence for FLJ12716 (NM_021942.4,2588-2606).
gactcacgtgactcttcat

SEQ ID NO: 381479 - DNA, 19 bp, Homo sapiens
  siRNA target sequence for FLJ12716 (NM_021942.4,2636-2654).
ggctttactcactgacatt

SEQ ID NO: 381480 - DNA, 19 bp, Homo sapiens
  siRNA target sequence for FLJ12716 (NM_021942.4,2764-2782).
caaccgttgaagaaaaaga

SEQ ID NO: 381481 - DNA, 19 bp, Homo sapiens
  siRNA target sequence for FLJ12716 (NM_021942.4,2844-2862).
gttgcggttaaatttgttt

SEQ ID NO: 381482 - DNA, 19 bp, Homo sapiens
  siRNA target sequence for FLJ12716 (NM_021942.4,2847-2865).
gcggttaaatttgtttcta

SEQ ID NO: 381483 - DNA, 19 bp, Homo sapiens
  siRNA target sequence for FLJ12716 (NM_021942.4,2879-2897).
cctggaaagggtttatgct

SEQ ID NO: 381484 - DNA, 19 bp, Homo sapiens
  siRNA target sequence for FLJ12716 (NM_021942.4,2915-2933).
gatgacggacctcttaagt

SEQ ID NO: 381485 - DNA, 19 bp, Homo sapiens
  siRNA target sequence for FLJ12716 (NM_021942.4,2941-2959).
cctgggccctcactattgt

SEQ ID NO: 381486 - DNA, 19 bp, Homo sapiens
  siRNA target sequence for FLJ12716 (NM_021942.4,2942-2960).
ctgggccctcactattgtt

SEQ ID NO: 381487 - DNA, 19 bp, Homo sapiens
  siRNA target sequence for FLJ12716 (NM_021942.4,3011-3029).
gtctcaagtggacaatgtt

SEQ ID NO: 381488 - DNA, 19 bp, Homo sapiens
  siRNA target sequence for FLJ12716 (NM_021942.4,3021-3039).
gacaatgttatcttacaga

SEQ ID NO: 381489 - DNA, 19 bp, Homo sapiens
  siRNA target sequence for FLJ12716 (NM_021942.4,3047-3065).
gagtgctagtgaatgcttt

SEQ ID NO: 381490 - DNA, 19 bp, Homo sapiens
  siRNA target sequence for FLJ12716 (NM_021942.4,3057-3075).
gaatgcttttgtcttcaat

SEQ ID NO: 381491 - DNA, 19 bp, Homo sapiens
  siRNA target sequence for FLJ12716 (NM_021942.4,3105-3123).
gtagcaaccgggcattata

SEQ ID NO: 381492 - DNA, 19 bp, Homo sapiens
  siRNA target sequence for FLJ12716 (NM_021942.4,3113-3131).
cgggcattatattatctct

SEQ ID NO: 381493 - DNA, 19 bp, Homo sapiens
  siRNA target sequence for FLJ12716 (NM_021942.4,3184-3202).
ctctgccgcacgtgattgt

SEQ ID NO: 381494 - DNA, 19 bp, Homo sapiens
  siRNA target sequence for FLJ12716 (NM_021942.4,3260-3278).
gtcgttacctgtcaagtat

SEQ ID NO: 381495 - DNA, 19 bp, Homo sapiens
  siRNA target sequence for FLJ12716 (NM_021942.4,3262-3280).
cgttacctgtcaagtatca

SEQ ID NO: 381496 - DNA, 19 bp, Homo sapiens
  siRNA target sequence for FLJ12716 (NM_021942.4,3293-3311).
gaccgacttagttcaagat

SEQ ID NO: 381497 - DNA, 19 bp, Homo sapiens
  siRNA target sequence for FLJ12716 (NM_021942.4,3295-3313).
ccgacttagttcaagatgt

SEQ ID NO: 381498 - DNA, 19 bp, Homo sapiens
  siRNA target sequence for FLJ12716 (NM_021942.4,3296-3314).
cgacttagttcaagatgta

SEQ ID NO: 381499 - DNA, 19 bp, Homo sapiens
  siRNA target sequence for FLJ12716 (NM_021942.4,3391-3409).
cggagcaggaaatgctata

SEQ ID NO: 381500 - DNA, 19 bp, Homo sapiens
  siRNA target sequence for FLJ12716 (NM_021942.4,3392-3410).
ggagcaggaaatgctatat

SEQ ID NO: 381501 - DNA, 19 bp, Homo sapiens
  siRNA target sequence for FLJ12716 (NM_021942.4,3393-3411).
gagcaggaaatgctatata

SEQ ID NO: 381502 - DNA, 19 bp, Homo sapiens
  siRNA target sequence for FLJ12716 (NM_021942.4,3447-3465).
ccatctctcaacatcaact

SEQ ID NO: 381503 - DNA, 19 bp, Homo sapiens
  siRNA target sequence for FLJ12716 (NM_021942.4,3453-3471).
ctcaacatcaacttgctta

SEQ ID NO: 381504 - DNA, 19 bp, Homo sapiens
  siRNA target sequence for FLJ12716 (NM_021942.4,3458-3476).
catcaacttgcttagattt

SEQ ID NO: 381505 - DNA, 19 bp, Homo sapiens
  siRNA target sequence for FLJ12716 (NM_021942.4,3498-3516).
ctcaggcgttttataccta

SEQ ID NO: 381506 - DNA, 19 bp, Homo sapiens
  siRNA target sequence for FLJ12716 (NM_021942.4,3513-3531).
cctaccagtatttttgtca

SEQ ID NO: 381507 - DNA, 19 bp, Homo sapiens
  siRNA target sequence for FLJ12716 (NM_021942.4,3540-3558).
ggtcgactcatggatgata

SEQ ID NO: 381508 - DNA, 19 bp, Homo sapiens
  siRNA target sequence for FLJ12716 (NM_021942.4,3551-3569).
ggatgatacctctattgct

SEQ ID NO: 381509 - DNA, 19 bp, Homo sapiens
  siRNA target sequence for C14orf93 (NM_021944.1,482-500).
ctgctgcgcctgtaagagt

SEQ ID NO: 381510 - DNA, 19 bp, Homo sapiens
  siRNA target sequence for C14orf93 (NM_021944.1,490-508).
cctgtaagagtgagactaa

SEQ ID NO: 381511 - DNA, 19 bp, Homo sapiens
  siRNA target sequence for C14orf93 (NM_021944.1,491-509).
ctgtaagagtgagactaat

SEQ ID NO: 381512 - DNA, 19 bp, Homo sapiens
  siRNA target sequence for C14orf93 (NM_021944.1,673-691).
gggccaacaatgagttgtt

SEQ ID NO: 381513 - DNA, 19 bp, Homo sapiens
  siRNA target sequence for C14orf93 (NM_021944.1,675-693).
gccaacaatgagttgttaa

SEQ ID NO: 381514 - DNA, 19 bp, Homo sapiens
  siRNA target sequence for C14orf93 (NM_021944.1,1293-1311).
ggaagtgggcagaagaact

SEQ ID NO: 381515 - DNA, 19 bp, Homo sapiens
  siRNA target sequence for C14orf93 (NM_021944.1,1315-1333).
ggcgcaagcgggatcttgt

SEQ ID NO: 381516 - DNA, 19 bp, Homo sapiens
  siRNA target sequence for C14orf93 (NM_021944.1,1316-1334).
gcgcaagcgggatcttgta

SEQ ID NO: 381517 - DNA, 19 bp, Homo sapiens
  siRNA target sequence for C14orf93 (NM_021944.1,1372-1390).
ccaatgacaagagattcaa

SEQ ID NO: 381518 - DNA, 19 bp, Homo sapiens
  siRNA target sequence for C14orf93 (NM_021944.1,1373-1391).
caatgacaagagattcaat

SEQ ID NO: 381519 - DNA, 19 bp, Homo sapiens
  siRNA target sequence for C14orf93 (NM_021944.1,1406-1424).
caagtcctcttggaatatt

SEQ ID NO: 381520 - DNA, 19 bp, Homo sapiens
  siRNA target sequence for C14orf93 (NM_021944.1,1409-1427).
gtcctcttggaatatttca

SEQ ID NO: 381521 - DNA, 19 bp, Homo sapiens
  siRNA target sequence for C14orf93 (NM_021944.1,1472-1490).
cagtccccacaattacact

SEQ ID NO: 381522 - DNA, 19 bp, Homo sapiens
  siRNA target sequence for C14orf93 (NM_021944.1,1476-1494).
ccccacaattacactgata

SEQ ID NO: 381523 - DNA, 19 bp, Homo sapiens
  siRNA target sequence for C14orf93 (NM_021944.1,1477-1495).
cccacaattacactgataa

SEQ ID NO: 381524 - DNA, 19 bp, Homo sapiens
  siRNA target sequence for C14orf93 (NM_021944.1,1515-1533).
gtggcctacttccttacta

SEQ ID NO: 381525 - DNA, 19 bp, Homo sapiens
  siRNA target sequence for C14orf93 (NM_021944.1,1626-1644).
gccaaccgatccagtatca

SEQ ID NO: 381526 - DNA, 19 bp, Homo sapiens
  siRNA target sequence for C14orf93 (NM_021944.1,1799-1817).
ggatgctaactctaagcat

SEQ ID NO: 381527 - DNA, 19 bp, Homo sapiens
  siRNA target sequence for C14orf93 (NM_021944.1,1880-1898).
gctccttccaccagaactt

SEQ ID NO: 381528 - DNA, 19 bp, Homo sapiens
  siRNA target sequence for C14orf93 (NM_021944.1,1884-1902).
cttccaccagaactttaca

SEQ ID NO: 381529 - DNA, 19 bp, Homo sapiens
  siRNA target sequence for C14orf93 (NM_021944.1,1968-1986).
gaccaaccccacaaaacct

SEQ ID NO: 381530 - DNA, 19 bp, Homo sapiens
  siRNA target sequence for C6orf85 (NM_021945.2,1821-1839).
ctgttgagcaacaccttta

SEQ ID NO: 381531 - DNA, 19 bp, Homo sapiens
  siRNA target sequence for C6orf85 (NM_021945.2,2135-2153).
ccctgtcagcctttcaata

SEQ ID NO: 381532 - DNA, 19 bp, Homo sapiens
  siRNA target sequence for C6orf85 (NM_021945.2,2136-2154).
cctgtcagcctttcaataa

SEQ ID NO: 381533 - DNA, 19 bp, Homo sapiens
  siRNA target sequence for C6orf85 (NM_021945.2,2137-2155).
ctgtcagcctttcaataaa

SEQ ID NO: 381534 - DNA, 19 bp, Homo sapiens
  siRNA target sequence for FLJ11362 (NM_021946.2,254-272).
gatctcaggagttttgtgt

SEQ ID NO: 381535 - DNA, 19 bp, Homo sapiens
  siRNA target sequence for FLJ11362 (NM_021946.2,348-366).
cagtgctacagaaaaactt

SEQ ID NO: 381536 - DNA, 19 bp, Homo sapiens
  siRNA target sequence for FLJ11362 (NM_021946.2,682-700).
cccctggttaccactaact

SEQ ID NO: 381537 - DNA, 19 bp, Homo sapiens
  siRNA target sequence for FLJ11362 (NM_021946.2,1026-1044).
gctttcagtcccagtttca

SEQ ID NO: 381538 - DNA, 19 bp, Homo sapiens
  siRNA target sequence for FLJ11362 (NM_021946.2,1350-1368).
ggcctccttcagtttgagt

SEQ ID NO: 381539 - DNA, 19 bp, Homo sapiens
  siRNA target sequence for FLJ11362 (NM_021946.2,1448-1466).
cgagccagccgctggtata

SEQ ID NO: 381540 - DNA, 19 bp, Homo sapiens
  siRNA target sequence for FLJ11362 (NM_021946.2,1449-1467).
gagccagccgctggtatat

SEQ ID NO: 381541 - DNA, 19 bp, Homo sapiens
  siRNA target sequence for FLJ11362 (NM_021946.2,1451-1469).
gccagccgctggtatatat

SEQ ID NO: 381542 - DNA, 19 bp, Homo sapiens
  siRNA target sequence for FLJ11362 (NM_021946.2,1525-1543).
ggggtttcctccactctta

SEQ ID NO: 381543 - DNA, 19 bp, Homo sapiens
  siRNA target sequence for FLJ11362 (NM_021946.2,1601-1619).
cccccgagctccgttctta

SEQ ID NO: 381544 - DNA, 19 bp, Homo sapiens
  siRNA target sequence for FLJ11362 (NM_021946.2,1612-1630).
cgttcttacccgtatgcat

SEQ ID NO: 381545 - DNA, 19 bp, Homo sapiens
  siRNA target sequence for FLJ11362 (NM_021946.2,1613-1631).
gttcttacccgtatgcatt

SEQ ID NO: 381546 - DNA, 19 bp, Homo sapiens
  siRNA target sequence for FLJ11362 (NM_021946.2,1967-1985).
gcgagatgccccttgatct

SEQ ID NO: 381547 - DNA, 19 bp, Homo sapiens
  siRNA target sequence for FLJ11362 (NM_021946.2,2125-2143).
gctgccggtggcaatgtca

SEQ ID NO: 381548 - DNA, 19 bp, Homo sapiens
  siRNA target sequence for FLJ11362 (NM_021946.2,2165-2183).
cctcgccctttgtcatctt

SEQ ID NO: 381549 - DNA, 19 bp, Homo sapiens
  siRNA target sequence for FLJ11362 (NM_021946.2,2166-2184).
ctcgccctttgtcatcttt

SEQ ID NO: 381550 - DNA, 19 bp, Homo sapiens
  siRNA target sequence for FLJ11362 (NM_021946.2,2210-2228).
cgagcacctgggtgaagaa

SEQ ID NO: 381551 - DNA, 19 bp, Homo sapiens
  siRNA target sequence for FLJ11362 (NM_021946.2,2450-2468).
caagcacagtgaaacgata

SEQ ID NO: 381552 - DNA, 19 bp, Homo sapiens
  siRNA target sequence for FLJ11362 (NM_021946.2,2706-2724).
cgttgtttcggagttttct

SEQ ID NO: 381553 - DNA, 19 bp, Homo sapiens
  siRNA target sequence for FLJ11362 (NM_021946.2,2933-2951).
gcggtggggacattcgaat

SEQ ID NO: 381554 - DNA, 19 bp, Homo sapiens
  siRNA target sequence for FLJ11362 (NM_021946.2,2936-2954).
gtggggacattcgaatgaa

SEQ ID NO: 381555 - DNA, 19 bp, Homo sapiens
  siRNA target sequence for FLJ11362 (NM_021946.2,3113-3131).
cccagaacctgcctaagat

SEQ ID NO: 381556 - DNA, 19 bp, Homo sapiens
  siRNA target sequence for FLJ11362 (NM_021946.2,3161-3179).
gccaccccaaggaacttat

SEQ ID NO: 381557 - DNA, 19 bp, Homo sapiens
  siRNA target sequence for FLJ11362 (NM_021946.2,3246-3264).
ggatctggggcgagtgaaa

SEQ ID NO: 381558 - DNA, 19 bp, Homo sapiens
  siRNA target sequence for FLJ11362 (NM_021946.2,3247-3265).
gatctggggcgagtgaaaa

SEQ ID NO: 381559 - DNA, 19 bp, Homo sapiens
  siRNA target sequence for FLJ11362 (NM_021946.2,3281-3299).
gtgatgtggtcttcaattt

SEQ ID NO: 381560 - DNA, 19 bp, Homo sapiens
  siRNA target sequence for FLJ11362 (NM_021946.2,3374-3392).
ggcaggctcgagtgaaaca

SEQ ID NO: 381561 - DNA, 19 bp, Homo sapiens
  siRNA target sequence for FLJ11362 (NM_021946.2,3406-3424).
gtctttgcttgcaagaaca

SEQ ID NO: 381562 - DNA, 19 bp, Homo sapiens
  siRNA target sequence for FLJ11362 (NM_021946.2,3747-3765).
cagtttccgtgactttatt

SEQ ID NO: 381563 - DNA, 19 bp, Homo sapiens
  siRNA target sequence for FLJ11362 (NM_021946.2,3907-3925).
cgtcgaaaggtgagaaaga

SEQ ID NO: 381564 - DNA, 19 bp, Homo sapiens
  siRNA target sequence for FLJ11362 (NM_021946.2,4116-4134).
gcagaagagccgaaaatat

SEQ ID NO: 381565 - DNA, 19 bp, Homo sapiens
  siRNA target sequence for FLJ11362 (NM_021946.2,4201-4219).
gcccgtaagcagaagactt

SEQ ID NO: 381566 - DNA, 19 bp, Homo sapiens
  siRNA target sequence for FLJ11362 (NM_021946.2,4581-4599).
cacgaggccagttcatgat

SEQ ID NO: 381567 - DNA, 19 bp, Homo sapiens
  siRNA target sequence for FLJ11362 (NM_021946.2,4773-4791).
cggtgtatcctgggatttt

SEQ ID NO: 381568 - DNA, 19 bp, Homo sapiens
  siRNA target sequence for FLJ11362 (NM_021946.2,4829-4847).
cctgtgacctcctacataa

SEQ ID NO: 381569 - DNA, 19 bp, Homo sapiens
  siRNA target sequence for FLJ11362 (NM_021946.2,4830-4848).
ctgtgacctcctacataat

SEQ ID NO: 381570 - DNA, 19 bp, Homo sapiens
  siRNA target sequence for FLJ11362 (NM_021946.2,4883-4901).
cgatggaggaggatgattt

SEQ ID NO: 381571 - DNA, 19 bp, Homo sapiens
  siRNA target sequence for FLJ11362 (NM_021946.2,5013-5031).
gctttcctcgaggatcttt

SEQ ID NO: 381572 - DNA, 19 bp, Homo sapiens
  siRNA target sequence for FLJ11362 (NM_021946.2,5037-5055).
ccggttcccgcactttgaa

SEQ ID NO: 381573 - DNA, 19 bp, Homo sapiens
  siRNA target sequence for FLJ11362 (NM_021946.2,5038-5056).
cggttcccgcactttgaaa

SEQ ID NO: 381574 - DNA, 19 bp, Homo sapiens
  siRNA target sequence for FLJ11362 (NM_021946.2,5039-5057).
ggttcccgcactttgaaat

SEQ ID NO: 381575 - DNA, 19 bp, Homo sapiens
  siRNA target sequence for GJA3 (NM_021954.2,21-39).
gggaagactcttagaaaat

SEQ ID NO: 381576 - DNA, 19 bp, Homo sapiens
  siRNA target sequence for GJA3 (NM_021954.2,439-457).
cggacctacgtcttcaaca

SEQ ID NO: 381577 - DNA, 19 bp, Homo sapiens
  siRNA target sequence for GJA3 (NM_021954.2,440-458).
ggacctacgtcttcaacat

SEQ ID NO: 381578 - DNA, 19 bp, Homo sapiens
  siRNA target sequence for GJA3 (NM_021954.2,798-816).
cgggttcccaccctactat

SEQ ID NO: 381579 - DNA, 19 bp, Homo sapiens
  siRNA target sequence for GYS2 (NM_021957.2,38-56).
ggccgatccctctctgtaa

SEQ ID NO: 381580 - DNA, 19 bp, Homo sapiens
  siRNA target sequence for GYS2 (NM_021957.2,40-58).
ccgatccctctctgtaaca

SEQ ID NO: 381581 - DNA, 19 bp, Homo sapiens
  siRNA target sequence for GYS2 (NM_021957.2,41-59).
cgatccctctctgtaacat

SEQ ID NO: 381582 - DNA, 19 bp, Homo sapiens
  siRNA target sequence for GYS2 (NM_021957.2,79-97).
gtgggaagtcgaagaactt

SEQ ID NO: 381583 - DNA, 19 bp, Homo sapiens
  siRNA target sequence for GYS2 (NM_021957.2,128-146).
gcttgggaagtgaccaata

SEQ ID NO: 381584 - DNA, 19 bp, Homo sapiens
  siRNA target sequence for GYS2 (NM_021957.2,132-150).
gggaagtgaccaataaagt

SEQ ID NO: 381585 - DNA, 19 bp, Homo sapiens
  siRNA target sequence for GYS2 (NM_021957.2,156-174).
gcatctatactgtgattca

SEQ ID NO: 381586 - DNA, 19 bp, Homo sapiens
  siRNA target sequence for GYS2 (NM_021957.2,200-218).
gaatggggagagaactatt

SEQ ID NO: 381587 - DNA, 19 bp, Homo sapiens
  siRNA target sequence for GYS2 (NM_021957.2,297-315).
gagcagtggacgcaatgaa

SEQ ID NO: 381588 - DNA, 19 bp, Homo sapiens
  siRNA target sequence for GYS2 (NM_021957.2,299-317).
gcagtggacgcaatgaata

SEQ ID NO: 381589 - DNA, 19 bp, Homo sapiens
  siRNA target sequence for GYS2 (NM_021957.2,300-318).
cagtggacgcaatgaataa

SEQ ID NO: 381590 - DNA, 19 bp, Homo sapiens
  siRNA target sequence for GYS2 (NM_021957.2,325-343).
ctgccaggtgcattttgga

SEQ ID NO: 381591 - DNA, 19 bp, Homo sapiens
  siRNA target sequence for GYS2 (NM_021957.2,441-459).
gcagtgtcggcattcctta

SEQ ID NO: 381592 - DNA, 19 bp, Homo sapiens
  siRNA target sequence for GYS2 (NM_021957.2,442-460).
cagtgtcggcattccttat

SEQ ID NO: 381593 - DNA, 19 bp, Homo sapiens
  siRNA target sequence for GYS2 (NM_021957.2,444-462).
gtgtcggcattccttatca

SEQ ID NO: 381594 - DNA, 19 bp, Homo sapiens
  siRNA target sequence for GYS2 (NM_021957.2,464-482).
gaccgagaagccaatgata

SEQ ID NO: 381595 - DNA, 19 bp, Homo sapiens
  siRNA target sequence for GYS2 (NM_021957.2,487-505).
gatatttggatctttaact

SEQ ID NO: 381596 - DNA, 19 bp, Homo sapiens
  siRNA target sequence for GYS2 (NM_021957.2,650-668).
ctacttgggaggtatctct

SEQ ID NO: 381597 - DNA, 19 bp, Homo sapiens
  siRNA target sequence for GYS2 (NM_021957.2,661-679).
gtatctctgtgcagcaaat

SEQ ID NO: 381598 - DNA, 19 bp, Homo sapiens
  siRNA target sequence for GYS2 (NM_021957.2,669-687).
gtgcagcaaatattgattt

SEQ ID NO: 381599 - DNA, 19 bp, Homo sapiens
  siRNA target sequence for GYS2 (NM_021957.2,761-779).
gagcgagcttccgttcatt

SEQ ID NO: 381600 - DNA, 19 bp, Homo sapiens
  siRNA target sequence for GYS2 (NM_021957.2,796-814).
cacggtttctgaaataaca

SEQ ID NO: 381601 - DNA, 19 bp, Homo sapiens
  siRNA target sequence for GYS2 (NM_021957.2,815-833).
gcaatagaagctgaacata

SEQ ID NO: 381602 - DNA, 19 bp, Homo sapiens
  siRNA target sequence for GYS2 (NM_021957.2,816-834).
caatagaagctgaacatat

SEQ ID NO: 381603 - DNA, 19 bp, Homo sapiens
  siRNA target sequence for GYS2 (NM_021957.2,861-879).
ctccaaacggcttgaatgt

SEQ ID NO: 381604 - DNA, 19 bp, Homo sapiens
  siRNA target sequence for GYS2 (NM_021957.2,864-882).
caaacggcttgaatgttaa

SEQ ID NO: 381605 - DNA, 19 bp, Homo sapiens
  siRNA target sequence for GYS2 (NM_021957.2,868-886).
cggcttgaatgttaagaaa

SEQ ID NO: 381606 - DNA, 19 bp, Homo sapiens
  siRNA target sequence for GYS2 (NM_021957.2,869-887).
ggcttgaatgttaagaaat

SEQ ID NO: 381607 - DNA, 19 bp, Homo sapiens
  siRNA target sequence for GYS2 (NM_021957.2,925-943).
gtacaaggccagaatccaa

SEQ ID NO: 381608 - DNA, 19 bp, Homo sapiens
  siRNA target sequence for GYS2 (NM_021957.2,1013-1031).
gctgggaggtatgagtttt

SEQ ID NO: 381609 - DNA, 19 bp, Homo sapiens
  siRNA target sequence for GYS2 (NM_021957.2,1016-1034).
gggaggtatgagttttcaa

SEQ ID NO: 381610 - DNA, 19 bp, Homo sapiens
  siRNA target sequence for GYS2 (NM_021957.2,1017-1035).
ggaggtatgagttttcaaa

SEQ ID NO: 381611 - DNA, 19 bp, Homo sapiens
  siRNA target sequence for GYS2 (NM_021957.2,1062-1080).
ccttatccaggctaaattt

SEQ ID NO: 381612 - DNA, 19 bp, Homo sapiens
  siRNA target sequence for GYS2 (NM_021957.2,1084-1102).
gctgaggatgcataaaagt

SEQ ID NO: 381613 - DNA, 19 bp, Homo sapiens
  siRNA target sequence for GYS2 (NM_021957.2,1240-1258).
ctatgatgcattattaaga

SEQ ID NO: 381614 - DNA, 19 bp, Homo sapiens
  siRNA target sequence for GYS2 (NM_021957.2,1269-1287).
ctgacctgaacgatatttt

SEQ ID NO: 381615 - DNA, 19 bp, Homo sapiens
  siRNA target sequence for GYS2 (NM_021957.2,1289-1307).
gatcgagatgatctaacaa

SEQ ID NO: 381616 - DNA, 19 bp, Homo sapiens
  siRNA target sequence for GYS2 (NM_021957.2,1292-1310).
cgagatgatctaacaatta

SEQ ID NO: 381617 - DNA, 19 bp, Homo sapiens
  siRNA target sequence for GYS2 (NM_021957.2,1293-1311).
gagatgatctaacaattat

SEQ ID NO: 381618 - DNA, 19 bp, Homo sapiens
  siRNA target sequence for GYS2 (NM_021957.2,1329-1347).
caactcagcgacagtcatt

SEQ ID NO: 381619 - DNA, 19 bp, Homo sapiens
  siRNA target sequence for GYS2 (NM_021957.2,1355-1373).
gtgaccacgcacaacatga

SEQ ID NO: 381620 - DNA, 19 bp, Homo sapiens
  siRNA target sequence for GYS2 (NM_021957.2,1357-1375).
gaccacgcacaacatgatt

SEQ ID NO: 381621 - DNA, 19 bp, Homo sapiens
  siRNA target sequence for GYS2 (NM_021957.2,1359-1377).
ccacgcacaacatgattga

SEQ ID NO: 381622 - DNA, 19 bp, Homo sapiens
  siRNA target sequence for GYS2 (NM_021957.2,1362-1380).
cgcacaacatgattgatga

SEQ ID NO: 381623 - DNA, 19 bp, Homo sapiens
  siRNA target sequence for GYS2 (NM_021957.2,1410-1428).
gacggattggacttttcaa

SEQ ID NO: 381624 - DNA, 19 bp, Homo sapiens
  siRNA target sequence for GYS2 (NM_021957.2,1412-1430).
cggattggacttttcaaca

SEQ ID NO: 381625 - DNA, 19 bp, Homo sapiens
  siRNA target sequence for GYS2 (NM_021957.2,1426-1444).
caacaaccgcacagataga

SEQ ID NO: 381626 - DNA, 19 bp, Homo sapiens
  siRNA target sequence for GYS2 (NM_021957.2,1529-1547).
catcttggagtatttccat

SEQ ID NO: 381627 - DNA, 19 bp, Homo sapiens
  siRNA target sequence for GYS2 (NM_021957.2,1536-1554).
gagtatttccatcatacta

SEQ ID NO: 381628 - DNA, 19 bp, Homo sapiens
  siRNA target sequence for GYS2 (NM_021957.2,1696-1714).
gttccgttctccagatgat

SEQ ID NO: 381629 - DNA, 19 bp, Homo sapiens
  siRNA target sequence for GYS2 (NM_021957.2,1716-1734).
cttgcaatcagctgactaa

SEQ ID NO: 381630 - DNA, 19 bp, Homo sapiens
  siRNA target sequence for GYS2 (NM_021957.2,1719-1737).
gcaatcagctgactaagtt

SEQ ID NO: 381631 - DNA, 19 bp, Homo sapiens
  siRNA target sequence for GYS2 (NM_021957.2,1720-1738).
caatcagctgactaagttt

SEQ ID NO: 381632 - DNA, 19 bp, Homo sapiens
  siRNA target sequence for GYS2 (NM_021957.2,1724-1742).
cagctgactaagtttctct

SEQ ID NO: 381633 - DNA, 19 bp, Homo sapiens
  siRNA target sequence for GYS2 (NM_021957.2,1726-1744).
gctgactaagtttctctat

SEQ ID NO: 381634 - DNA, 19 bp, Homo sapiens
  siRNA target sequence for GYS2 (NM_021957.2,1731-1749).
ctaagtttctctatggatt

SEQ ID NO: 381635 - DNA, 19 bp, Homo sapiens
  siRNA target sequence for GYS2 (NM_021957.2,1913-1931).
ccaacgacagaaggattta

SEQ ID NO: 381636 - DNA, 19 bp, Homo sapiens
  siRNA target sequence for GYS2 (NM_021957.2,1914-1932).
caacgacagaaggatttaa

SEQ ID NO: 381637 - DNA, 19 bp, Homo sapiens
  siRNA target sequence for GYS2 (NM_021957.2,2017-2035).
ggaggatgagagatacgat

SEQ ID NO: 381638 - DNA, 19 bp, Homo sapiens
  siRNA target sequence for GYS2 (NM_021957.2,2049-2067).
ctgaaagggatcggttaaa

SEQ ID NO: 381639 - DNA, 19 bp, Homo sapiens
  siRNA target sequence for GYS2 (NM_021957.2,2055-2073).
gggatcggttaaatatcaa

SEQ ID NO: 381640 - DNA, 19 bp, Homo sapiens
  siRNA target sequence for GYS2 (NM_021957.2,2057-2075).
gatcggttaaatatcaagt

SEQ ID NO: 381641 - DNA, 19 bp, Homo sapiens
  siRNA target sequence for GYS2 (NM_021957.2,2117-2135).
ctgcatggtgaatataaga

SEQ ID NO: 381642 - DNA, 19 bp, Homo sapiens
  siRNA target sequence for TEAD1 (NM_021961.2,517-535).
ctgcagataagccaattga

SEQ ID NO: 381643 - DNA, 19 bp, Homo sapiens
  siRNA target sequence for TEAD1 (NM_021961.2,563-581).
cgacatcgagcaaagcttt

SEQ ID NO: 381644 - DNA, 19 bp, Homo sapiens
  siRNA target sequence for TEAD1 (NM_021961.2,617-635).
gaggaaaatcatcttatca

SEQ ID NO: 381645 - DNA, 19 bp, Homo sapiens
  siRNA target sequence for TEAD1 (NM_021961.2,737-755).
ggttcttgccagaaggaaa

SEQ ID NO: 381646 - DNA, 19 bp, Homo sapiens
  siRNA target sequence for TEAD1 (NM_021961.2,752-770).
gaaatctcgtgattttcat

SEQ ID NO: 381647 - DNA, 19 bp, Homo sapiens
  siRNA target sequence for TEAD1 (NM_021961.2,782-800).
ggatcagactgcaaaggat

SEQ ID NO: 381648 - DNA, 19 bp, Homo sapiens
  siRNA target sequence for TEAD1 (NM_021961.2,845-863).
ctcggccactgccattcat

SEQ ID NO: 381649 - DNA, 19 bp, Homo sapiens
  siRNA target sequence for TEAD1 (NM_021961.2,847-865).
cggccactgccattcataa

SEQ ID NO: 381650 - DNA, 19 bp, Homo sapiens
  siRNA target sequence for TEAD1 (NM_021961.2,1098-1116).
cttcgcctggtggaatttt

SEQ ID NO: 381651 - DNA, 19 bp, Homo sapiens
  siRNA target sequence for TEAD1 (NM_021961.2,1144-1162).
cagactcgtacaacaaaca

SEQ ID NO: 381652 - DNA, 19 bp, Homo sapiens
  siRNA target sequence for TEAD1 (NM_021961.2,1180-1198).
ggcatgccaaccattctta

SEQ ID NO: 381653 - DNA, 19 bp, Homo sapiens
  siRNA target sequence for TEAD1 (NM_021961.2,1221-1239).
gtggacattcgtcagattt

SEQ ID NO: 381654 - DNA, 19 bp, Homo sapiens
  siRNA target sequence for TEAD1 (NM_021961.2,1223-1241).
ggacattcgtcagatttat

SEQ ID NO: 381655 - DNA, 19 bp, Homo sapiens
  siRNA target sequence for TEAD1 (NM_021961.2,1259-1277).
gaaaggtggcttaaaggaa

SEQ ID NO: 381656 - DNA, 19 bp, Homo sapiens
  siRNA target sequence for TEAD1 (NM_021961.2,1302-1320).
gccttcttcctcgtaaaat

SEQ ID NO: 381657 - DNA, 19 bp, Homo sapiens
  siRNA target sequence for TEAD1 (NM_021961.2,1327-1345).
ctgatttaaactgcaatat

SEQ ID NO: 381658 - DNA, 19 bp, Homo sapiens
  siRNA target sequence for TEAD1 (NM_021961.2,1385-1403).
gtacgagagttctgaaaat

SEQ ID NO: 381659 - DNA, 19 bp, Homo sapiens
  siRNA target sequence for TEAD1 (NM_021961.2,1412-1430).
cacctgttccaccaaagtt

SEQ ID NO: 381660 - DNA, 19 bp, Homo sapiens
  siRNA target sequence for TEAD1 (NM_021961.2,1470-1488).
gagtatgcaaggtttgaga

SEQ ID NO: 381661 - DNA, 19 bp, Homo sapiens
  siRNA target sequence for TEAD1 (NM_021961.2,1485-1503).
gagaatggccgatttgtat

SEQ ID NO: 381662 - DNA, 19 bp, Homo sapiens
  siRNA target sequence for TEAD1 (NM_021961.2,1494-1512).
cgatttgtataccgaataa

SEQ ID NO: 381663 - DNA, 19 bp, Homo sapiens
  siRNA target sequence for TEAD1 (NM_021961.2,1495-1513).
gatttgtataccgaataaa

SEQ ID NO: 381664 - DNA, 19 bp, Homo sapiens
  siRNA target sequence for TEAD1 (NM_021961.2,1517-1535).
ctccccaatgtgtgaatat

SEQ ID NO: 381665 - DNA, 19 bp, Homo sapiens
  siRNA target sequence for TEAD1 (NM_021961.2,1519-1537).
ccccaatgtgtgaatatat

SEQ ID NO: 381666 - DNA, 19 bp, Homo sapiens
  siRNA target sequence for TEAD1 (NM_021961.2,1559-1577).
caaacacttaccagagaaa

SEQ ID NO: 381667 - DNA, 19 bp, Homo sapiens
  siRNA target sequence for TEAD1 (NM_021961.2,1631-1649).
cagggatacacaagaaact

SEQ ID NO: 381668 - DNA, 19 bp, Homo sapiens
  siRNA target sequence for TEAD1 (NM_021961.2,1666-1684).
gtgtgtttgaagtttcaaa

SEQ ID NO: 381669 - DNA, 19 bp, Homo sapiens
  siRNA target sequence for TEAD1 (NM_021961.2,1694-1712).
cggagcacaacatcatatt

SEQ ID NO: 381670 - DNA, 19 bp, Homo sapiens
  siRNA target sequence for FS (NM_021996.3,380-398).
ctcctatgtcccctattat

SEQ ID NO: 381671 - DNA, 19 bp, Homo sapiens
  siRNA target sequence for FS (NM_021996.3,636-654).
gggaagtacactcatttca

SEQ ID NO: 381672 - DNA, 19 bp, Homo sapiens
  siRNA target sequence for FS (NM_021996.3,673-691).
cagccgaggagttcttcat

SEQ ID NO: 381673 - DNA, 19 bp, Homo sapiens
  siRNA target sequence for FS (NM_021996.3,697-715).
ggtaccgggtgcactacta

SEQ ID NO: 381674 - DNA, 19 bp, Homo sapiens
  siRNA target sequence for FS (NM_021996.3,702-720).
cgggtgcactactacatct

SEQ ID NO: 381675 - DNA, 19 bp, Homo sapiens
  siRNA target sequence for FS (NM_021996.3,703-721).
gggtgcactactacatctt

SEQ ID NO: 381676 - DNA, 19 bp, Homo sapiens
  siRNA target sequence for FS (NM_021996.3,1086-1104).
gtggccagggtatatgagt

SEQ ID NO: 381677 - DNA, 19 bp, Homo sapiens
  siRNA target sequence for FS (NM_021996.3,1182-1200).
ctgaaccgtcacttcatct

SEQ ID NO: 381678 - DNA, 19 bp, Homo sapiens
  siRNA target sequence for FS (NM_021996.3,1271-1289).
gaagctgatccgcttttct

SEQ ID NO: 381679 - DNA, 19 bp, Homo sapiens
  siRNA target sequence for FS (NM_021996.3,1288-1306).
ctacactggacaaggatat

SEQ ID NO: 381680 - DNA, 19 bp, Homo sapiens
  siRNA target sequence for GPRC5C (NM_022036.2,576-594).
cctcaccagccggaaagta

SEQ ID NO: 381681 - DNA, 19 bp, Homo sapiens
  siRNA target sequence for MTBP (NM_022045.2,170-188).
cagcagcaaatgtttatca

SEQ ID NO: 381682 - DNA, 19 bp, Homo sapiens
  siRNA target sequence for MTBP (NM_022045.2,181-199).
gtttatcacctcttgaaaa

SEQ ID NO: 381683 - DNA, 19 bp, Homo sapiens
  siRNA target sequence for MTBP (NM_022045.2,192-210).
cttgaaaagaagcattagt

SEQ ID NO: 381684 - DNA, 19 bp, Homo sapiens
  siRNA target sequence for MTBP (NM_022045.2,200-218).
gaagcattagtgcttcaat

SEQ ID NO: 381685 - DNA, 19 bp, Homo sapiens
  siRNA target sequence for MTBP (NM_022045.2,326-344).
gttctgattggcaagagat

SEQ ID NO: 381686 - DNA, 19 bp, Homo sapiens
  siRNA target sequence for MTBP (NM_022045.2,331-349).
gattggcaagagatacatt

SEQ ID NO: 381687 - DNA, 19 bp, Homo sapiens
  siRNA target sequence for MTBP (NM_022045.2,385-403).
caaacgaatatcgaagaat

SEQ ID NO: 381688 - DNA, 19 bp, Homo sapiens
  siRNA target sequence for MTBP (NM_022045.2,389-407).
cgaatatcgaagaatgttt

SEQ ID NO: 381689 - DNA, 19 bp, Homo sapiens
  siRNA target sequence for MTBP (NM_022045.2,440-458).
gtaatagcagggaatcatt

SEQ ID NO: 381690 - DNA, 19 bp, Homo sapiens
  siRNA target sequence for MTBP (NM_022045.2,446-464).
gcagggaatcattatcctt

SEQ ID NO: 381691 - DNA, 19 bp, Homo sapiens
  siRNA target sequence for MTBP (NM_022045.2,461-479).
ccttggctgatctctatga

SEQ ID NO: 381692 - DNA, 19 bp, Homo sapiens
  siRNA target sequence for MTBP (NM_022045.2,465-483).
ggctgatctctatgaagaa

SEQ ID NO: 381693 - DNA, 19 bp, Homo sapiens
  siRNA target sequence for MTBP (NM_022045.2,533-551).
gagcaatggtagatataat

SEQ ID NO: 381694 - DNA, 19 bp, Homo sapiens
  siRNA target sequence for MTBP (NM_022045.2,536-554).
caatggtagatataatact

SEQ ID NO: 381695 - DNA, 19 bp, Homo sapiens
  siRNA target sequence for MTBP (NM_022045.2,598-616).
cctactgtaggagcattaa

SEQ ID NO: 381696 - DNA, 19 bp, Homo sapiens
  siRNA target sequence for MTBP (NM_022045.2,602-620).
ctgtaggagcattaaaaca

SEQ ID NO: 381697 - DNA, 19 bp, Homo sapiens
  siRNA target sequence for MTBP (NM_022045.2,648-666).
cactatagcaggaaatcat

SEQ ID NO: 381698 - DNA, 19 bp, Homo sapiens
  siRNA target sequence for MTBP (NM_022045.2,831-849).
gggagtcacacttaagaat

SEQ ID NO: 381699 - DNA, 19 bp, Homo sapiens
  siRNA target sequence for MTBP (NM_022045.2,832-850).
ggagtcacacttaagaatt

SEQ ID NO: 381700 - DNA, 19 bp, Homo sapiens
  siRNA target sequence for MTBP (NM_022045.2,833-851).
gagtcacacttaagaattt

SEQ ID NO: 381701 - DNA, 19 bp, Homo sapiens
  siRNA target sequence for MTBP (NM_022045.2,879-897).
ccttgccaaaaagatcata

SEQ ID NO: 381702 - DNA, 19 bp, Homo sapiens
  siRNA target sequence for MTBP (NM_022045.2,898-916).
ccatcaaaggataagaata

SEQ ID NO: 381703 - DNA, 19 bp, Homo sapiens
  siRNA target sequence for MTBP (NM_022045.2,982-1000).
gatctaccctcctgctata

SEQ ID NO: 381704 - DNA, 19 bp, Homo sapiens
  siRNA target sequence for MTBP (NM_022045.2,985-1003).
ctaccctcctgctatatgt

SEQ ID NO: 381705 - DNA, 19 bp, Homo sapiens
  siRNA target sequence for MTBP (NM_022045.2,995-1013).
gctatatgtcggatattga

SEQ ID NO: 381706 - DNA, 19 bp, Homo sapiens
  siRNA target sequence for MTBP (NM_022045.2,1018-1036).
gagttaggattgacaaaca

SEQ ID NO: 381707 - DNA, 19 bp, Homo sapiens
  siRNA target sequence for MTBP (NM_022045.2,1020-1038).
gttaggattgacaaacagt

SEQ ID NO: 381708 - DNA, 19 bp, Homo sapiens
  siRNA target sequence for MTBP (NM_022045.2,1037-1055).
gtaccaaacagaattctgt

SEQ ID NO: 381709 - DNA, 19 bp, Homo sapiens
  siRNA target sequence for MTBP (NM_022045.2,1059-1077).
gctgttggagcagatttct

SEQ ID NO: 381710 - DNA, 19 bp, Homo sapiens
  siRNA target sequence for MTBP (NM_022045.2,1089-1107).
caaggttggtgctcttttt

SEQ ID NO: 381711 - DNA, 19 bp, Homo sapiens
  siRNA target sequence for MTBP (NM_022045.2,1092-1110).
ggttggtgctctttttgta

SEQ ID NO: 381712 - DNA, 19 bp, Homo sapiens
  siRNA target sequence for MTBP (NM_022045.2,1108-1126).
gtattgccatgtaccatta

SEQ ID NO: 381713 - DNA, 19 bp, Homo sapiens
  siRNA target sequence for MTBP (NM_022045.2,1118-1136).
gtaccattagtaacatact

SEQ ID NO: 381714 - DNA, 19 bp, Homo sapiens
  siRNA target sequence for MTBP (NM_022045.2,1121-1139).
ccattagtaacatactgat

SEQ ID NO: 381715 - DNA, 19 bp, Homo sapiens
  siRNA target sequence for MTBP (NM_022045.2,1122-1140).
cattagtaacatactgatt

SEQ ID NO: 381716 - DNA, 19 bp, Homo sapiens
  siRNA target sequence for MTBP (NM_022045.2,1147-1165).
cccaaccaactcagttcaa

SEQ ID NO: 381717 - DNA, 19 bp, Homo sapiens
  siRNA target sequence for MTBP (NM_022045.2,1232-1250).
gagagtgttctagctatta

SEQ ID NO: 381718 - DNA, 19 bp, Homo sapiens
  siRNA target sequence for MTBP (NM_022045.2,1244-1262).
gctattatctcttgttaca

SEQ ID NO: 381719 - DNA, 19 bp, Homo sapiens
  siRNA target sequence for MTBP (NM_022045.2,1245-1263).
ctattatctcttgttacaa

SEQ ID NO: 381720 - DNA, 19 bp, Homo sapiens
  siRNA target sequence for MTBP (NM_022045.2,1261-1279).
caaggtaatggcaatagaa

SEQ ID NO: 381721 - DNA, 19 bp, Homo sapiens
  siRNA target sequence for MTBP (NM_022045.2,1280-1298).
gatgtaaagccacattgat

SEQ ID NO: 381722 - DNA, 19 bp, Homo sapiens
  siRNA target sequence for MTBP (NM_022045.2,1311-1329).
ccagatcaatggctcattt

SEQ ID NO: 381723 - DNA, 19 bp, Homo sapiens
  siRNA target sequence for MTBP (NM_022045.2,1321-1339).
ggctcatttgcactcaatt

SEQ ID NO: 381724 - DNA, 19 bp, Homo sapiens
  siRNA target sequence for MTBP (NM_022045.2,1391-1409).
cttttgacttattatcact

SEQ ID NO: 381725 - DNA, 19 bp, Homo sapiens
  siRNA target sequence for MTBP (NM_022045.2,1446-1464).
gaaacagttagctaatgtt

SEQ ID NO: 381726 - DNA, 19 bp, Homo sapiens
  siRNA target sequence for MTBP (NM_022045.2,1452-1470).
gttagctaatgttcaagtt

SEQ ID NO: 381727 - DNA, 19 bp, Homo sapiens
  siRNA target sequence for MTBP (NM_022045.2,1487-1505).
gcctaaaaagacgaaagtt

SEQ ID NO: 381728 - DNA, 19 bp, Homo sapiens
  siRNA target sequence for MTBP (NM_022045.2,1515-1533).
gcctgaaacagtttctgtt

SEQ ID NO: 381729 - DNA, 19 bp, Homo sapiens
  siRNA target sequence for MTBP (NM_022045.2,1663-1681).
ccagtggaacctaattcct

SEQ ID NO: 381730 - DNA, 19 bp, Homo sapiens
  siRNA target sequence for MTBP (NM_022045.2,1673-1691).
ctaattcctcaagtctaat

SEQ ID NO: 381731 - DNA, 19 bp, Homo sapiens
  siRNA target sequence for MTBP (NM_022045.2,1770-1788).
gagaactggttcattacct

SEQ ID NO: 381732 - DNA, 19 bp, Homo sapiens
  siRNA target sequence for MTBP (NM_022045.2,1787-1805).
ctcattcatctgaacagtt

SEQ ID NO: 381733 - DNA, 19 bp, Homo sapiens
  siRNA target sequence for MTBP (NM_022045.2,1822-1840).
ggtcctcgggactcaatca

SEQ ID NO: 381734 - DNA, 19 bp, Homo sapiens
  siRNA target sequence for MTBP (NM_022045.2,1825-1843).
cctcgggactcaatcacat

SEQ ID NO: 381735 - DNA, 19 bp, Homo sapiens
  siRNA target sequence for MTBP (NM_022045.2,1826-1844).
ctcgggactcaatcacatt

SEQ ID NO: 381736 - DNA, 19 bp, Homo sapiens
  siRNA target sequence for MTBP (NM_022045.2,1828-1846).
cgggactcaatcacattgt

SEQ ID NO: 381737 - DNA, 19 bp, Homo sapiens
  siRNA target sequence for MTBP (NM_022045.2,1839-1857).
cacattgttggatgctaaa

SEQ ID NO: 381738 - DNA, 19 bp, Homo sapiens
  siRNA target sequence for MTBP (NM_022045.2,1841-1859).
cattgttggatgctaaaga

SEQ ID NO: 381739 - DNA, 19 bp, Homo sapiens
  siRNA target sequence for MTBP (NM_022045.2,1853-1871).
ctaaagaattgctgaagta

SEQ ID NO: 381740 - DNA, 19 bp, Homo sapiens
  siRNA target sequence for MTBP (NM_022045.2,1872-1890).
ctttacctcagatggatta

SEQ ID NO: 381741 - DNA, 19 bp, Homo sapiens
  siRNA target sequence for MTBP (NM_022045.2,1906-1924).
caacctttaccgattcaaa

SEQ ID NO: 381742 - DNA, 19 bp, Homo sapiens
  siRNA target sequence for MTBP (NM_022045.2,1942-1960).
gttttgacaccagaactta

SEQ ID NO: 381743 - DNA, 19 bp, Homo sapiens
  siRNA target sequence for MTBP (NM_022045.2,1977-1995).
ggtcttaccttttgagaaa

SEQ ID NO: 381744 - DNA, 19 bp, Homo sapiens
  siRNA target sequence for MTBP (NM_022045.2,2080-2098).
cagtctcgtcttattcgtt

SEQ ID NO: 381745 - DNA, 19 bp, Homo sapiens
  siRNA target sequence for MTBP (NM_022045.2,2082-2100).
gtctcgtcttattcgttat

SEQ ID NO: 381746 - DNA, 19 bp, Homo sapiens
  siRNA target sequence for MTBP (NM_022045.2,2084-2102).
ctcgtcttattcgttatga

SEQ ID NO: 381747 - DNA, 19 bp, Homo sapiens
  siRNA target sequence for MTBP (NM_022045.2,2086-2104).
cgtcttattcgttatgaaa

SEQ ID NO: 381748 - DNA, 19 bp, Homo sapiens
  siRNA target sequence for MTBP (NM_022045.2,2095-2113).
cgttatgaaactcaaacta

SEQ ID NO: 381749 - DNA, 19 bp, Homo sapiens
  siRNA target sequence for MTBP (NM_022045.2,2114-2132).
cctgcaccagagaaagttt

SEQ ID NO: 381750 - DNA, 19 bp, Homo sapiens
  siRNA target sequence for MTBP (NM_022045.2,2115-2133).
ctgcaccagagaaagtttt

SEQ ID NO: 381751 - DNA, 19 bp, Homo sapiens
  siRNA target sequence for MTBP (NM_022045.2,2202-2220).
cggagaagttttacaaaat

SEQ ID NO: 381752 - DNA, 19 bp, Homo sapiens
  siRNA target sequence for MTBP (NM_022045.2,2242-2260).
cgattgaaacggagatcta

SEQ ID NO: 381753 - DNA, 19 bp, Homo sapiens
  siRNA target sequence for MTBP (NM_022045.2,2243-2261).
gattgaaacggagatctaa

SEQ ID NO: 381754 - DNA, 19 bp, Homo sapiens
  siRNA target sequence for MTBP (NM_022045.2,2329-2347).
cagacaactggtaatagta

SEQ ID NO: 381755 - DNA, 19 bp, Homo sapiens
  siRNA target sequence for MTBP (NM_022045.2,2333-2351).
caactggtaatagtaatca

SEQ ID NO: 381756 - DNA, 19 bp, Homo sapiens
  siRNA target sequence for MTBP (NM_022045.2,2336-2354).
ctggtaatagtaatcacta

SEQ ID NO: 381757 - DNA, 19 bp, Homo sapiens
  siRNA target sequence for MTBP (NM_022045.2,2339-2357).
gtaatagtaatcactatca

SEQ ID NO: 381758 - DNA, 19 bp, Homo sapiens
  siRNA target sequence for MTBP (NM_022045.2,2408-2426).
cttgtccattggttccaat

SEQ ID NO: 381759 - DNA, 19 bp, Homo sapiens
  siRNA target sequence for MTBP (NM_022045.2,2413-2431).
ccattggttccaattccta

SEQ ID NO: 381760 - DNA, 19 bp, Homo sapiens
  siRNA target sequence for MTBP (NM_022045.2,2422-2440).
ccaattcctagctgtgaaa

SEQ ID NO: 381761 - DNA, 19 bp, Homo sapiens
  siRNA target sequence for MTBP (NM_022045.2,2443-2461).
ccaaaacttgctacaaaga

SEQ ID NO: 381762 - DNA, 19 bp, Homo sapiens
  siRNA target sequence for MTBP (NM_022045.2,2460-2478).
gaccagttcaggtcaaaaa

SEQ ID NO: 381763 - DNA, 19 bp, Homo sapiens
  siRNA target sequence for MTBP (NM_022045.2,2463-2481).
cagttcaggtcaaaaaagt

SEQ ID NO: 381764 - DNA, 19 bp, Homo sapiens
  siRNA target sequence for MTBP (NM_022045.2,2465-2483).
gttcaggtcaaaaaagtat

SEQ ID NO: 381765 - DNA, 19 bp, Homo sapiens
  siRNA target sequence for MTBP (NM_022045.2,2535-2553).
cacacggatactgaaagaa

SEQ ID NO: 381766 - DNA, 19 bp, Homo sapiens
  siRNA target sequence for MTBP (NM_022045.2,2588-2606).
ccgagactcatgaatgttt

SEQ ID NO: 381767 - DNA, 19 bp, Homo sapiens
  siRNA target sequence for MTBP (NM_022045.2,2622-2640).
gcgtctctttgaaatctct

SEQ ID NO: 381768 - DNA, 19 bp, Homo sapiens
  siRNA target sequence for MTBP (NM_022045.2,2623-2641).
cgtctctttgaaatctcta

SEQ ID NO: 381769 - DNA, 19 bp, Homo sapiens
  siRNA target sequence for MTBP (NM_022045.2,2646-2664).
ctatctaaaggatcttaaa

SEQ ID NO: 381770 - DNA, 19 bp, Homo sapiens
  siRNA target sequence for MTBP (NM_022045.2,2724-2742).
gattgactgggtattagaa

SEQ ID NO: 381771 - DNA, 19 bp, Homo sapiens
  siRNA target sequence for MTBP (NM_022045.2,2728-2746).
gactgggtattagaaaaga

SEQ ID NO: 381772 - DNA, 19 bp, Homo sapiens
  siRNA target sequence for FLJ13188 (NM_022063.1,265-283).
cctcctggcctaaatgaaa

SEQ ID NO: 381773 - DNA, 19 bp, Homo sapiens
  siRNA target sequence for FLJ13188 (NM_022063.1,322-340).
gagaactctggacttaact

SEQ ID NO: 381774 - DNA, 19 bp, Homo sapiens
  siRNA target sequence for FLJ13188 (NM_022063.1,324-342).
gaactctggacttaactta

SEQ ID NO: 381775 - DNA, 19 bp, Homo sapiens
  siRNA target sequence for FLJ13188 (NM_022063.1,334-352).
cttaacttacaggaagata

SEQ ID NO: 381776 - DNA, 19 bp, Homo sapiens
  siRNA target sequence for FLJ13188 (NM_022063.1,358-376).
gatgagagcatcagaaaaa

SEQ ID NO: 381777 - DNA, 19 bp, Homo sapiens
  siRNA target sequence for FLJ13188 (NM_022063.1,384-402).
catagatttctcaacagat

SEQ ID NO: 381778 - DNA, 19 bp, Homo sapiens
  siRNA target sequence for FLJ13188 (NM_022063.1,455-473).
ctggaattcccatagatat

SEQ ID NO: 381779 - DNA, 19 bp, Homo sapiens
  siRNA target sequence for FLJ13188 (NM_022063.1,457-475).
ggaattcccatagatatgt

SEQ ID NO: 381780 - DNA, 19 bp, Homo sapiens
  siRNA target sequence for FLJ13188 (NM_022063.1,599-617).
gtgaaccgtcctcaaatga

SEQ ID NO: 381781 - DNA, 19 bp, Homo sapiens
  siRNA target sequence for FLJ13188 (NM_022063.1,601-619).
gaaccgtcctcaaatgaaa

SEQ ID NO: 381782 - DNA, 19 bp, Homo sapiens
  siRNA target sequence for FLJ13188 (NM_022063.1,650-668).
gagtcaatgatagatttga

SEQ ID NO: 381783 - DNA, 19 bp, Homo sapiens
  siRNA target sequence for FLJ13188 (NM_022063.1,662-680).
gatttgacccgcctgttaa

SEQ ID NO: 381784 - DNA, 19 bp, Homo sapiens
  siRNA target sequence for FLJ13188 (NM_022063.1,782-800).
ctcgagagcttggtgtaaa

SEQ ID NO: 381785 - DNA, 19 bp, Homo sapiens
  siRNA target sequence for FLJ13188 (NM_022063.1,784-802).
cgagagcttggtgtaaaaa

SEQ ID NO: 381786 - DNA, 19 bp, Homo sapiens
  siRNA target sequence for FLJ13188 (NM_022063.1,862-880).
caggctgcccgaaaaaaga

SEQ ID NO: 381787 - DNA, 19 bp, Homo sapiens
  siRNA target sequence for FLJ13188 (NM_022063.1,890-908).
catgggggtttgaagcaaa

SEQ ID NO: 381788 - DNA, 19 bp, Homo sapiens
  siRNA target sequence for RNF123 (NM_022064.2,201-219).
ctgaaccgcatcttttcct

SEQ ID NO: 381789 - DNA, 19 bp, Homo sapiens
  siRNA target sequence for RNF123 (NM_022064.2,463-481).
ctaccacatgcgtgtacaa

SEQ ID NO: 381790 - DNA, 19 bp, Homo sapiens
  siRNA target sequence for RNF123 (NM_022064.2,719-737).
ctgcctgaacggtgtatca

SEQ ID NO: 381791 - DNA, 19 bp, Homo sapiens
  siRNA target sequence for RNF123 (NM_022064.2,721-739).
gcctgaacggtgtatcact

SEQ ID NO: 381792 - DNA, 19 bp, Homo sapiens
  siRNA target sequence for RNF123 (NM_022064.2,813-831).
gagtccgtggccttcaact

SEQ ID NO: 381793 - DNA, 19 bp, Homo sapiens
  siRNA target sequence for RNF123 (NM_022064.2,1196-1214).
ggactacgaggtacaagat

SEQ ID NO: 381794 - DNA, 19 bp, Homo sapiens
  siRNA target sequence for RNF123 (NM_022064.2,1197-1215).
gactacgaggtacaagatt

SEQ ID NO: 381795 - DNA, 19 bp, Homo sapiens
  siRNA target sequence for RNF123 (NM_022064.2,1216-1234).
gcctcaagcagttgatgat

SEQ ID NO: 381796 - DNA, 19 bp, Homo sapiens
  siRNA target sequence for RNF123 (NM_022064.2,1282-1300).
gcctacagatccattacct

SEQ ID NO: 381797 - DNA, 19 bp, Homo sapiens
  siRNA target sequence for RNF123 (NM_022064.2,1577-1595).
cgaagtggtggaagaacta

SEQ ID NO: 381798 - DNA, 19 bp, Homo sapiens
  siRNA target sequence for RNF123 (NM_022064.2,1643-1661).
gggtgaagcttctaggtat

SEQ ID NO: 381799 - DNA, 19 bp, Homo sapiens
  siRNA target sequence for RNF123 (NM_022064.2,1644-1662).
ggtgaagcttctaggtata

SEQ ID NO: 381800 - DNA, 19 bp, Homo sapiens
  siRNA target sequence for RNF123 (NM_022064.2,1647-1665).
gaagcttctaggtatatct

SEQ ID NO: 381801 - DNA, 19 bp, Homo sapiens
  siRNA target sequence for RNF123 (NM_022064.2,1670-1688).
gaccaagtttcgcaagttt

SEQ ID NO: 381802 - DNA, 19 bp, Homo sapiens
  siRNA target sequence for RNF123 (NM_022064.2,1672-1690).
ccaagtttcgcaagtttct

SEQ ID NO: 381803 - DNA, 19 bp, Homo sapiens
  siRNA target sequence for RNF123 (NM_022064.2,1742-1760).
gtacatggtctgcttctta

SEQ ID NO: 381804 - DNA, 19 bp, Homo sapiens
  siRNA target sequence for RNF123 (NM_022064.2,1772-1790).
ctctgccctgcgctactat

SEQ ID NO: 381805 - DNA, 19 bp, Homo sapiens
  siRNA target sequence for RNF123 (NM_022064.2,1782-1800).
cgctactattgggatgaat

SEQ ID NO: 381806 - DNA, 19 bp, Homo sapiens
  siRNA target sequence for RNF123 (NM_022064.2,1783-1801).
gctactattgggatgaata

SEQ ID NO: 381807 - DNA, 19 bp, Homo sapiens
  siRNA target sequence for RNF123 (NM_022064.2,1922-1940).
gcggaagaccctcaaagat

SEQ ID NO: 381808 - DNA, 19 bp, Homo sapiens
  siRNA target sequence for RNF123 (NM_022064.2,2185-2203).
gcacctcggagaaagtgaa

SEQ ID NO: 381809 - DNA, 19 bp, Homo sapiens
  siRNA target sequence for RNF123 (NM_022064.2,2230-2248).
ggacccgtgaggacattga

SEQ ID NO: 381810 - DNA, 19 bp, Homo sapiens
  siRNA target sequence for RNF123 (NM_022064.2,2231-2249).
gacccgtgaggacattgaa

SEQ ID NO: 381811 - DNA, 19 bp, Homo sapiens
  siRNA target sequence for RNF123 (NM_022064.2,2665-2683).
ccttcatgcccgagttcta

SEQ ID NO: 381812 - DNA, 19 bp, Homo sapiens
  siRNA target sequence for RNF123 (NM_022064.2,2710-2728).
gtgctctcaagaattactt

SEQ ID NO: 381813 - DNA, 19 bp, Homo sapiens
  siRNA target sequence for RNF123 (NM_022064.2,2750-2768).
ggagctcccaggctatgaa

SEQ ID NO: 381814 - DNA, 19 bp, Homo sapiens
  siRNA target sequence for RNF123 (NM_022064.2,2790-2808).
gccattctcgccaaacact

SEQ ID NO: 381815 - DNA, 19 bp, Homo sapiens
  siRNA target sequence for RNF123 (NM_022064.2,2791-2809).
ccattctcgccaaacactt

SEQ ID NO: 381816 - DNA, 19 bp, Homo sapiens
  siRNA target sequence for RNF123 (NM_022064.2,3020-3038).
cttcgggtaccgctataca

SEQ ID NO: 381817 - DNA, 19 bp, Homo sapiens
  siRNA target sequence for RNF123 (NM_022064.2,3256-3274).
gcctggagcggaactttgt

SEQ ID NO: 381818 - DNA, 19 bp, Homo sapiens
  siRNA target sequence for RNF123 (NM_022064.2,3333-3351).
cgtgtcttggagatgacta

SEQ ID NO: 381819 - DNA, 19 bp, Homo sapiens
  siRNA target sequence for RNF123 (NM_022064.2,3457-3475).
ctgagaggaacctgtttga

SEQ ID NO: 381820 - DNA, 19 bp, Homo sapiens
  siRNA target sequence for RNF123 (NM_022064.2,3626-3644).
cttccagctacgctcaata

SEQ ID NO: 381821 - DNA, 19 bp, Homo sapiens
  siRNA target sequence for RNF123 (NM_022064.2,3630-3648).
cagctacgctcaatatgct

SEQ ID NO: 381822 - DNA, 19 bp, Homo sapiens
  siRNA target sequence for RNF123 (NM_022064.2,3632-3650).
gctacgctcaatatgctat

SEQ ID NO: 381823 - DNA, 19 bp, Homo sapiens
  siRNA target sequence for RNF123 (NM_022064.2,3723-3741).
cagagctatgcggattata

SEQ ID NO: 381824 - DNA, 19 bp, Homo sapiens
  siRNA target sequence for RNF123 (NM_022064.2,3924-3942).
cagcacctgatgaacaaca

SEQ ID NO: 381825 - DNA, 19 bp, Homo sapiens
  siRNA target sequence for RNF123 (NM_022064.2,3990-4008).
gagaagggagccaatacga

SEQ ID NO: 381826 - DNA, 19 bp, Homo sapiens
  siRNA target sequence for RNF123 (NM_022064.2,3996-4014).
ggagccaatacgagtacta

SEQ ID NO: 381827 - DNA, 19 bp, Homo sapiens
  siRNA target sequence for THADA (NM_022065.3,163-181).
gttgctgcgctgaccattt

SEQ ID NO: 381828 - DNA, 19 bp, Homo sapiens
  siRNA target sequence for THADA (NM_022065.3,275-293).
gagtgtcacaaatccatta

SEQ ID NO: 381829 - DNA, 19 bp, Homo sapiens
  siRNA target sequence for THADA (NM_022065.3,277-295).
gtgtcacaaatccattata

SEQ ID NO: 381830 - DNA, 19 bp, Homo sapiens
  siRNA target sequence for THADA (NM_022065.3,342-360).
gtgtgatcccactattcaa

SEQ ID NO: 381831 - DNA, 19 bp, Homo sapiens
  siRNA target sequence for THADA (NM_022065.3,349-367).
cccactattcaaagttgtt

SEQ ID NO: 381832 - DNA, 19 bp, Homo sapiens
  siRNA target sequence for THADA (NM_022065.3,469-487).
gaggctatgcaccgtttta

SEQ ID NO: 381833 - DNA, 19 bp, Homo sapiens
  siRNA target sequence for THADA (NM_022065.3,471-489).
ggctatgcaccgttttact

SEQ ID NO: 381834 - DNA, 19 bp, Homo sapiens
  siRNA target sequence for THADA (NM_022065.3,472-490).
gctatgcaccgttttactt

SEQ ID NO: 381835 - DNA, 19 bp, Homo sapiens
  siRNA target sequence for THADA (NM_022065.3,493-511).
cgtcttcaggaagaattga

SEQ ID NO: 381836 - DNA, 19 bp, Homo sapiens
  siRNA target sequence for THADA (NM_022065.3,494-512).
gtcttcaggaagaattgaa

SEQ ID NO: 381837 - DNA, 19 bp, Homo sapiens
  siRNA target sequence for THADA (NM_022065.3,528-546).
ctcttacaggaaagttact

SEQ ID NO: 381838 - DNA, 19 bp, Homo sapiens
  siRNA target sequence for THADA (NM_022065.3,541-559).
gttactgacaatatttctt

SEQ ID NO: 381839 - DNA, 19 bp, Homo sapiens
  siRNA target sequence for THADA (NM_022065.3,579-597).
cttgggtagagcaagtgtt

SEQ ID NO: 381840 - DNA, 19 bp, Homo sapiens
  siRNA target sequence for THADA (NM_022065.3,582-600).
gggtagagcaagtgttaat

SEQ ID NO: 381841 - DNA, 19 bp, Homo sapiens
  siRNA target sequence for THADA (NM_022065.3,630-648).
gcagaagagtttaattgaa

SEQ ID NO: 381842 - DNA, 19 bp, Homo sapiens
  siRNA target sequence for THADA (NM_022065.3,674-692).
ctggaaatcatattattca

SEQ ID NO: 381843 - DNA, 19 bp, Homo sapiens
  siRNA target sequence for THADA (NM_022065.3,717-735).
ggtaggcattagagtttca

SEQ ID NO: 381844 - DNA, 19 bp, Homo sapiens
  siRNA target sequence for THADA (NM_022065.3,718-736).
gtaggcattagagtttcaa

SEQ ID NO: 381845 - DNA, 19 bp, Homo sapiens
  siRNA target sequence for THADA (NM_022065.3,796-814).
cccatatggcaaaatatgt

SEQ ID NO: 381846 - DNA, 19 bp, Homo sapiens
  siRNA target sequence for THADA (NM_022065.3,798-816).
catatggcaaaatatgtgt

SEQ ID NO: 381847 - DNA, 19 bp, Homo sapiens
  siRNA target sequence for THADA (NM_022065.3,840-858).
ggttttaagcgatgatgat

SEQ ID NO: 381848 - DNA, 19 bp, Homo sapiens
  siRNA target sequence for THADA (NM_022065.3,848-866).
gcgatgatgatctgttaca

SEQ ID NO: 381849 - DNA, 19 bp, Homo sapiens
  siRNA target sequence for THADA (NM_022065.3,881-899).
catctggattagctattat

SEQ ID NO: 381850 - DNA, 19 bp, Homo sapiens
  siRNA target sequence for THADA (NM_022065.3,986-1004).
gtgtccccgagtggtttat

SEQ ID NO: 381851 - DNA, 19 bp, Homo sapiens
  siRNA target sequence for THADA (NM_022065.3,1157-1175).
ccttgagttcacagattaa

SEQ ID NO: 381852 - DNA, 19 bp, Homo sapiens
  siRNA target sequence for THADA (NM_022065.3,1158-1176).
cttgagttcacagattaaa

SEQ ID NO: 381853 - DNA, 19 bp, Homo sapiens
  siRNA target sequence for THADA (NM_022065.3,1177-1195).
gagccaacgctggaaatgt

SEQ ID NO: 381854 - DNA, 19 bp, Homo sapiens
  siRNA target sequence for THADA (NM_022065.3,1189-1207).
gaaatgtttctgtctagaa

SEQ ID NO: 381855 - DNA, 19 bp, Homo sapiens
  siRNA target sequence for THADA (NM_022065.3,1221-1239).
gactaattcagccatacaa

SEQ ID NO: 381856 - DNA, 19 bp, Homo sapiens
  siRNA target sequence for THADA (NM_022065.3,1223-1241).
ctaattcagccatacaagt

SEQ ID NO: 381857 - DNA, 19 bp, Homo sapiens
  siRNA target sequence for THADA (NM_022065.3,1237-1255).
caagtccttgaatcaagtt

SEQ ID NO: 381858 - DNA, 19 bp, Homo sapiens
  siRNA target sequence for THADA (NM_022065.3,1278-1296).
gaatgggaattcaagtata

SEQ ID NO: 381859 - DNA, 19 bp, Homo sapiens
  siRNA target sequence for THADA (NM_022065.3,1357-1375).
caccaaaccaaaatcatgt

SEQ ID NO: 381860 - DNA, 19 bp, Homo sapiens
  siRNA target sequence for THADA (NM_022065.3,1447-1465).
gaattgactgagagtcttt

SEQ ID NO: 381861 - DNA, 19 bp, Homo sapiens
  siRNA target sequence for THADA (NM_022065.3,1452-1470).
gactgagagtcttttacga

SEQ ID NO: 381862 - DNA, 19 bp, Homo sapiens
  siRNA target sequence for THADA (NM_022065.3,1454-1472).
ctgagagtcttttacgatt

SEQ ID NO: 381863 - DNA, 19 bp, Homo sapiens
  siRNA target sequence for THADA (NM_022065.3,1458-1476).
gagtcttttacgattggaa

SEQ ID NO: 381864 - DNA, 19 bp, Homo sapiens
  siRNA target sequence for THADA (NM_022065.3,1468-1486).
cgattggaatggcatatta

SEQ ID NO: 381865 - DNA, 19 bp, Homo sapiens
  siRNA target sequence for THADA (NM_022065.3,1473-1491).
ggaatggcatattaaagga

SEQ ID NO: 381866 - DNA, 19 bp, Homo sapiens
  siRNA target sequence for THADA (NM_022065.3,1500-1518).
gtgccttggttgtttggta

SEQ ID NO: 381867 - DNA, 19 bp, Homo sapiens
  siRNA target sequence for THADA (NM_022065.3,1521-1539).
gtgcataggagttgaacat

SEQ ID NO: 381868 - DNA, 19 bp, Homo sapiens
  siRNA target sequence for THADA (NM_022065.3,1523-1541).
gcataggagttgaacatat

SEQ ID NO: 381869 - DNA, 19 bp, Homo sapiens
  siRNA target sequence for THADA (NM_022065.3,1593-1611).
ccagtcattggtaccttat

SEQ ID NO: 381870 - DNA, 19 bp, Homo sapiens
  siRNA target sequence for THADA (NM_022065.3,1596-1614).
gtcattggtaccttatgca

SEQ ID NO: 381871 - DNA, 19 bp, Homo sapiens
  siRNA target sequence for THADA (NM_022065.3,1616-1634).
gtgacctcttggaaaccat

SEQ ID NO: 381872 - DNA, 19 bp, Homo sapiens
  siRNA target sequence for THADA (NM_022065.3,1635-1653).
gtttagaaatcataagagt

SEQ ID NO: 381873 - DNA, 19 bp, Homo sapiens
  siRNA target sequence for THADA (NM_022065.3,1666-1684).
cagactgctgagagttctt

SEQ ID NO: 381874 - DNA, 19 bp, Homo sapiens
  siRNA target sequence for THADA (NM_022065.3,1760-1778).
cttacgtgattgattatta

SEQ ID NO: 381875 - DNA, 19 bp, Homo sapiens
  siRNA target sequence for THADA (NM_022065.3,1771-1789).
gattattacttgccaaaat

SEQ ID NO: 381876 - DNA, 19 bp, Homo sapiens
  siRNA target sequence for THADA (NM_022065.3,1796-1814).
gttacagccctgaaagctt

SEQ ID NO: 381877 - DNA, 19 bp, Homo sapiens
  siRNA target sequence for THADA (NM_022065.3,1811-1829).
gcttacagtacatggtaaa

SEQ ID NO: 381878 - DNA, 19 bp, Homo sapiens
  siRNA target sequence for THADA (NM_022065.3,1859-1877).
ctggacaagagcaatcttt

SEQ ID NO: 381879 - DNA, 19 bp, Homo sapiens
  siRNA target sequence for THADA (NM_022065.3,1926-1944).
ggcatgtctgcgaatagct

SEQ ID NO: 381880 - DNA, 19 bp, Homo sapiens
  siRNA target sequence for THADA (NM_022065.3,1960-1978).
cttcagtctgcaactgata

SEQ ID NO: 381881 - DNA, 19 bp, Homo sapiens
  siRNA target sequence for THADA (NM_022065.3,1992-2010).
cgtgtctgatgcaagaata

SEQ ID NO: 381882 - DNA, 19 bp, Homo sapiens
  siRNA target sequence for THADA (NM_022065.3,1993-2011).
gtgtctgatgcaagaataa

SEQ ID NO: 381883 - DNA, 19 bp, Homo sapiens
  siRNA target sequence for THADA (NM_022065.3,2050-2068).
gatacattaggcttgcttt

SEQ ID NO: 381884 - DNA, 19 bp, Homo sapiens
  siRNA target sequence for THADA (NM_022065.3,2054-2072).
cattaggcttgctttgtga

SEQ ID NO: 381885 - DNA, 19 bp, Homo sapiens
  siRNA target sequence for THADA (NM_022065.3,2059-2077).
ggcttgctttgtgaaagta

SEQ ID NO: 381886 - DNA, 19 bp, Homo sapiens
  siRNA target sequence for THADA (NM_022065.3,2060-2078).
gcttgctttgtgaaagtaa

SEQ ID NO: 381887 - DNA, 19 bp, Homo sapiens
  siRNA target sequence for THADA (NM_022065.3,2080-2098).
cggagcacagaaattgttt

SEQ ID NO: 381888 - DNA, 19 bp, Homo sapiens
  siRNA target sequence for THADA (NM_022065.3,2107-2125).
gaaatgcagtggattcagt

SEQ ID NO: 381889 - DNA, 19 bp, Homo sapiens
  siRNA target sequence for THADA (NM_022065.3,2112-2130).
gcagtggattcagttcttt

SEQ ID NO: 381890 - DNA, 19 bp, Homo sapiens
  siRNA target sequence for THADA (NM_022065.3,2115-2133).
gtggattcagttctttatt

SEQ ID NO: 381891 - DNA, 19 bp, Homo sapiens
  siRNA target sequence for THADA (NM_022065.3,2159-2177).
caggagtgcggcaacagat

SEQ ID NO: 381892 - DNA, 19 bp, Homo sapiens
  siRNA target sequence for THADA (NM_022065.3,2266-2284).
ccagagaatgagttaacca

SEQ ID NO: 381893 - DNA, 19 bp, Homo sapiens
  siRNA target sequence for THADA (NM_022065.3,2328-2346).
gtcatccatttgtaacagt

SEQ ID NO: 381894 - DNA, 19 bp, Homo sapiens
  siRNA target sequence for THADA (NM_022065.3,2333-2351).
ccatttgtaacagtctttt

SEQ ID NO: 381895 - DNA, 19 bp, Homo sapiens
  siRNA target sequence for THADA (NM_022065.3,2376-2394).
ctactcgactagattttca

SEQ ID NO: 381896 - DNA, 19 bp, Homo sapiens
  siRNA target sequence for THADA (NM_022065.3,2395-2413).
gctttaaccattttaggtt

SEQ ID NO: 381897 - DNA, 19 bp, Homo sapiens
  siRNA target sequence for THADA (NM_022065.3,2469-2487).
gagtcatgatattgatgtt

SEQ ID NO: 381898 - DNA, 19 bp, Homo sapiens
  siRNA target sequence for THADA (NM_022065.3,2482-2500).
gatgttggtcgtttccaaa

SEQ ID NO: 381899 - DNA, 19 bp, Homo sapiens
  siRNA target sequence for THADA (NM_022065.3,2557-2575).
cttctgatgaagttatcaa

SEQ ID NO: 381900 - DNA, 19 bp, Homo sapiens
  siRNA target sequence for THADA (NM_022065.3,2642-2660).
gcacaagcaccaaaccata

SEQ ID NO: 381901 - DNA, 19 bp, Homo sapiens
  siRNA target sequence for THADA (NM_022065.3,2679-2697).
ctacctgctgaacttctta

SEQ ID NO: 381902 - DNA, 19 bp, Homo sapiens
  siRNA target sequence for THADA (NM_022065.3,2683-2701).
ctgctgaacttcttaatct

SEQ ID NO: 381903 - DNA, 19 bp, Homo sapiens
  siRNA target sequence for THADA (NM_022065.3,2724-2742).
cttgtctgcctacttaact

SEQ ID NO: 381904 - DNA, 19 bp, Homo sapiens
  siRNA target sequence for THADA (NM_022065.3,2842-2860).
gtatctcaggctgaaaatt

SEQ ID NO: 381905 - DNA, 19 bp, Homo sapiens
  siRNA target sequence for THADA (NM_022065.3,2896-2914).
gggcgagtccactgtataa

SEQ ID NO: 381906 - DNA, 19 bp, Homo sapiens
  siRNA target sequence for THADA (NM_022065.3,2898-2916).
gcgagtccactgtataaca

SEQ ID NO: 381907 - DNA, 19 bp, Homo sapiens
  siRNA target sequence for THADA (NM_022065.3,2966-2984).
ggagacctgtggtagagaa

SEQ ID NO: 381908 - DNA, 19 bp, Homo sapiens
  siRNA target sequence for THADA (NM_022065.3,3083-3101).
cagcaagccgcttacagat

SEQ ID NO: 381909 - DNA, 19 bp, Homo sapiens
  siRNA target sequence for THADA (NM_022065.3,3089-3107).
gccgcttacagatgattct

SEQ ID NO: 381910 - DNA, 19 bp, Homo sapiens
  siRNA target sequence for THADA (NM_022065.3,3114-3132).
gattcagcctcgagatact

SEQ ID NO: 381911 - DNA, 19 bp, Homo sapiens
  siRNA target sequence for THADA (NM_022065.3,3121-3139).
cctcgagatactaatgatt

SEQ ID NO: 381912 - DNA, 19 bp, Homo sapiens
  siRNA target sequence for THADA (NM_022065.3,3122-3140).
ctcgagatactaatgatta

SEQ ID NO: 381913 - DNA, 19 bp, Homo sapiens
  siRNA target sequence for THADA (NM_022065.3,3124-3142).
cgagatactaatgattatt

SEQ ID NO: 381914 - DNA, 19 bp, Homo sapiens
  siRNA target sequence for THADA (NM_022065.3,3169-3187).
catgatagctttgatatga

SEQ ID NO: 381915 - DNA, 19 bp, Homo sapiens
  siRNA target sequence for THADA (NM_022065.3,3205-3223).
gtggtgaatattgatactt

SEQ ID NO: 381916 - DNA, 19 bp, Homo sapiens
  siRNA target sequence for THADA (NM_022065.3,3207-3225).
ggtgaatattgatacttct

SEQ ID NO: 381917 - DNA, 19 bp, Homo sapiens
  siRNA target sequence for THADA (NM_022065.3,3208-3226).
gtgaatattgatacttcta

SEQ ID NO: 381918 - DNA, 19 bp, Homo sapiens
  siRNA target sequence for THADA (NM_022065.3,3210-3228).
gaatattgatacttctaca

SEQ ID NO: 381919 - DNA, 19 bp, Homo sapiens
  siRNA target sequence for THADA (NM_022065.3,3271-3289).
cagatggtgctggtatgtt

SEQ ID NO: 381920 - DNA, 19 bp, Homo sapiens
  siRNA target sequence for THADA (NM_022065.3,3287-3305).
gttgttggagaagtatgaa

SEQ ID NO: 381921 - DNA, 19 bp, Homo sapiens
  siRNA target sequence for THADA (NM_022065.3,3299-3317).
gtatgaaggaagttgcttt

SEQ ID NO: 381922 - DNA, 19 bp, Homo sapiens
  siRNA target sequence for THADA (NM_022065.3,3384-3402).
gacggtggagcaggtaaaa

SEQ ID NO: 381923 - DNA, 19 bp, Homo sapiens
  siRNA target sequence for THADA (NM_022065.3,3386-3404).
cggtggagcaggtaaaaga

SEQ ID NO: 381924 - DNA, 19 bp, Homo sapiens
  siRNA target sequence for THADA (NM_022065.3,3410-3428).
gagattactttaaacaaca

SEQ ID NO: 381925 - DNA, 19 bp, Homo sapiens
  siRNA target sequence for THADA (NM_022065.3,3466-3484).
gcttatactggttttgtga

SEQ ID NO: 381926 - DNA, 19 bp, Homo sapiens
  siRNA target sequence for THADA (NM_022065.3,3467-3485).
cttatactggttttgtgaa

SEQ ID NO: 381927 - DNA, 19 bp, Homo sapiens
  siRNA target sequence for THADA (NM_022065.3,3552-3570).
gagtgttttagaggaaatt

SEQ ID NO: 381928 - DNA, 19 bp, Homo sapiens
  siRNA target sequence for THADA (NM_022065.3,3575-3593).
gcagtgatccttcatctaa

SEQ ID NO: 381929 - DNA, 19 bp, Homo sapiens
  siRNA target sequence for THADA (NM_022065.3,3576-3594).
cagtgatccttcatctaaa

SEQ ID NO: 381930 - DNA, 19 bp, Homo sapiens
  siRNA target sequence for THADA (NM_022065.3,3578-3596).
gtgatccttcatctaaact

SEQ ID NO: 381931 - DNA, 19 bp, Homo sapiens
  siRNA target sequence for THADA (NM_022065.3,3610-3628).
cgcagtgctggaattcctt

SEQ ID NO: 381932 - DNA, 19 bp, Homo sapiens
  siRNA target sequence for THADA (NM_022065.3,3667-3685).
ggcagaatggatttgttga

SEQ ID NO: 381933 - DNA, 19 bp, Homo sapiens
  siRNA target sequence for THADA (NM_022065.3,3716-3734).
ctgggcctacagatgacat

SEQ ID NO: 381934 - DNA, 19 bp, Homo sapiens
  siRNA target sequence for THADA (NM_022065.3,3719-3737).
ggcctacagatgacataca

SEQ ID NO: 381935 - DNA, 19 bp, Homo sapiens
  siRNA target sequence for THADA (NM_022065.3,3747-3765).
cccccaggttcatgcttta

SEQ ID NO: 381936 - DNA, 19 bp, Homo sapiens
  siRNA target sequence for THADA (NM_022065.3,3748-3766).
ccccaggttcatgctttaa

SEQ ID NO: 381937 - DNA, 19 bp, Homo sapiens
  siRNA target sequence for THADA (NM_022065.3,3796-3814).
cgcctgggagaaaatatta

SEQ ID NO: 381938 - DNA, 19 bp, Homo sapiens
  siRNA target sequence for THADA (NM_022065.3,3802-3820).
ggagaaaatattattcctt

SEQ ID NO: 381939 - DNA, 19 bp, Homo sapiens
  siRNA target sequence for THADA (NM_022065.3,3868-3886).
gtctgggcagtgcgaaatt

SEQ ID NO: 381940 - DNA, 19 bp, Homo sapiens
  siRNA target sequence for THADA (NM_022065.3,3870-3888).
ctgggcagtgcgaaattca

SEQ ID NO: 381941 - DNA, 19 bp, Homo sapiens
  siRNA target sequence for THADA (NM_022065.3,3905-3923).
gtgccttgatcacaagaat

SEQ ID NO: 381942 - DNA, 19 bp, Homo sapiens
  siRNA target sequence for THADA (NM_022065.3,3907-3925).
gccttgatcacaagaattt

SEQ ID NO: 381943 - DNA, 19 bp, Homo sapiens
  siRNA target sequence for THADA (NM_022065.3,3908-3926).
ccttgatcacaagaatttt

SEQ ID NO: 381944 - DNA, 19 bp, Homo sapiens
  siRNA target sequence for THADA (NM_022065.3,3909-3927).
cttgatcacaagaattttt

SEQ ID NO: 381945 - DNA, 19 bp, Homo sapiens
  siRNA target sequence for THADA (NM_022065.3,3912-3930).
gatcacaagaatttttgga

SEQ ID NO: 381946 - DNA, 19 bp, Homo sapiens
  siRNA target sequence for THADA (NM_022065.3,3949-3967).
gaacattccaaaacaaata

SEQ ID NO: 381947 - DNA, 19 bp, Homo sapiens
  siRNA target sequence for THADA (NM_022065.3,3992-4010).
ctcgtttcccagaactcta

SEQ ID NO: 381948 - DNA, 19 bp, Homo sapiens
  siRNA target sequence for THADA (NM_022065.3,4032-4050).
ggaaactgtagccaataca

SEQ ID NO: 381949 - DNA, 19 bp, Homo sapiens
  siRNA target sequence for THADA (NM_022065.3,4079-4097).
gtcatccaagcatgtttct

SEQ ID NO: 381950 - DNA, 19 bp, Homo sapiens
  siRNA target sequence for THADA (NM_022065.3,4131-4149).
cccgatggatggtacttct

SEQ ID NO: 381951 - DNA, 19 bp, Homo sapiens
  siRNA target sequence for THADA (NM_022065.3,4235-4253).
gtgccttggtcccatttgt

SEQ ID NO: 381952 - DNA, 19 bp, Homo sapiens
  siRNA target sequence for THADA (NM_022065.3,4242-4260).
ggtcccatttgttatgata

SEQ ID NO: 381953 - DNA, 19 bp, Homo sapiens
  siRNA target sequence for THADA (NM_022065.3,4245-4263).
cccatttgttatgatagat

SEQ ID NO: 381954 - DNA, 19 bp, Homo sapiens
  siRNA target sequence for THADA (NM_022065.3,4247-4265).
catttgttatgatagatca

SEQ ID NO: 381955 - DNA, 19 bp, Homo sapiens
  siRNA target sequence for THADA (NM_022065.3,4257-4275).
gatagatcacattcctaat

SEQ ID NO: 381956 - DNA, 19 bp, Homo sapiens
  siRNA target sequence for THADA (NM_022065.3,4261-4279).
gatcacattcctaatacca

SEQ ID NO: 381957 - DNA, 19 bp, Homo sapiens
  siRNA target sequence for THADA (NM_022065.3,4307-4325).
gctgcactgaccagtgttt

SEQ ID NO: 381958 - DNA, 19 bp, Homo sapiens
  siRNA target sequence for THADA (NM_022065.3,4389-4407).
ctccaaacacggaacgaat

SEQ ID NO: 381959 - DNA, 19 bp, Homo sapiens
  siRNA target sequence for THADA (NM_022065.3,4392-4410).
caaacacggaacgaattca

SEQ ID NO: 381960 - DNA, 19 bp, Homo sapiens
  siRNA target sequence for THADA (NM_022065.3,4426-4444).
ctgactgacatcactgttt

SEQ ID NO: 381961 - DNA, 19 bp, Homo sapiens
  siRNA target sequence for THADA (NM_022065.3,4428-4446).
gactgacatcactgtttgt

SEQ ID NO: 381962 - DNA, 19 bp, Homo sapiens
  siRNA target sequence for THADA (NM_022065.3,4434-4452).
catcactgtttgtaccaaa

SEQ ID NO: 381963 - DNA, 19 bp, Homo sapiens
  siRNA target sequence for THADA (NM_022065.3,4597-4615).
gaagtcagagggattatct

SEQ ID NO: 381964 - DNA, 19 bp, Homo sapiens
  siRNA target sequence for THADA (NM_022065.3,4767-4785).
ctctcagctgttagaatct

SEQ ID NO: 381965 - DNA, 19 bp, Homo sapiens
  siRNA target sequence for THADA (NM_022065.3,4792-4810).
cctgaagtgcgctcactaa

SEQ ID NO: 381966 - DNA, 19 bp, Homo sapiens
  siRNA target sequence for THADA (NM_022065.3,4819-4837).
gccctcttggaaaagttct

SEQ ID NO: 381967 - DNA, 19 bp, Homo sapiens
  siRNA target sequence for THADA (NM_022065.3,4890-4908).
catgggagagaagttctta

SEQ ID NO: 381968 - DNA, 19 bp, Homo sapiens
  siRNA target sequence for THADA (NM_022065.3,4946-4964).
gcaagatactgaaaattct

SEQ ID NO: 381969 - DNA, 19 bp, Homo sapiens
  siRNA target sequence for THADA (NM_022065.3,5021-5039).
ccccaaaggagttcttgat

SEQ ID NO: 381970 - DNA, 19 bp, Homo sapiens
  siRNA target sequence for THADA (NM_022065.3,5023-5041).
ccaaaggagttcttgatct

SEQ ID NO: 381971 - DNA, 19 bp, Homo sapiens
  siRNA target sequence for THADA (NM_022065.3,5037-5055).
gatctggacgatggatatt

SEQ ID NO: 381972 - DNA, 19 bp, Homo sapiens
  siRNA target sequence for THADA (NM_022065.3,5096-5114).
gacttgcttccaaagtcat

SEQ ID NO: 381973 - DNA, 19 bp, Homo sapiens
  siRNA target sequence for THADA (NM_022065.3,5182-5200).
cagctggtcatcttgtcat

SEQ ID NO: 381974 - DNA, 19 bp, Homo sapiens
  siRNA target sequence for THADA (NM_022065.3,5228-5246).
ggctggccgtcgttgaagt

SEQ ID NO: 381975 - DNA, 19 bp, Homo sapiens
  siRNA target sequence for THADA (NM_022065.3,5242-5260).
gaagtcctcaccagtacta

SEQ ID NO: 381976 - DNA, 19 bp, Homo sapiens
  siRNA target sequence for THADA (NM_022065.3,5255-5273).
gtactacaccacttttcct

SEQ ID NO: 381977 - DNA, 19 bp, Homo sapiens
  siRNA target sequence for THADA (NM_022065.3,5274-5292).
caccaacccccatcctatt

SEQ ID NO: 381978 - DNA, 19 bp, Homo sapiens
  siRNA target sequence for THADA (NM_022065.3,5645-5663).
ccgagaccctgatctttgt

SEQ ID NO: 381979 - DNA, 19 bp, Homo sapiens
  siRNA target sequence for THADA (NM_022065.3,5649-5667).
gaccctgatctttgtgaaa

SEQ ID NO: 381980 - DNA, 19 bp, Homo sapiens
  siRNA target sequence for THADA (NM_022065.3,5835-5853).
cacaagactacgcattcaa

SEQ ID NO: 381981 - DNA, 19 bp, Homo sapiens
  siRNA target sequence for THADA (NM_022065.3,5837-5855).
caagactacgcattcaaga

SEQ ID NO: 381982 - DNA, 19 bp, Homo sapiens
  siRNA target sequence for THADA (NM_022065.3,5879-5897).
ggctgctggcctttttgga

SEQ ID NO: 381983 - DNA, 19 bp, Homo sapiens
  siRNA target sequence for THADA (NM_022065.3,5909-5927).
gggaagacaccctagttct

SEQ ID NO: 381984 - DNA, 19 bp, Homo sapiens
  siRNA target sequence for THADA (NM_022065.3,5947-5965).
gcagaatcgaggcagttaa

SEQ ID NO: 381985 - DNA, 19 bp, Homo sapiens
  siRNA target sequence for C14orf133 (NM_022067.2,386-404).
gttcaaggcttttaccttt

SEQ ID NO: 381986 - DNA, 19 bp, Homo sapiens
  siRNA target sequence for C14orf133 (NM_022067.2,417-435).
gatgagctttcacagttaa

SEQ ID NO: 381987 - DNA, 19 bp, Homo sapiens
  siRNA target sequence for C14orf133 (NM_022067.2,588-606).
gggcgtgaacagctaaaga

SEQ ID NO: 381988 - DNA, 19 bp, Homo sapiens
  siRNA target sequence for C14orf133 (NM_022067.2,620-638).
ctcctcctatgcacaacta

SEQ ID NO: 381989 - DNA, 19 bp, Homo sapiens
  siRNA target sequence for C14orf133 (NM_022067.2,671-689).
cttttttagaggtagaact

SEQ ID NO: 381990 - DNA, 19 bp, Homo sapiens
  siRNA target sequence for C14orf133 (NM_022067.2,729-747).
gacacacctgccaaaagct

SEQ ID NO: 381991 - DNA, 19 bp, Homo sapiens
  siRNA target sequence for C14orf133 (NM_022067.2,798-816).
gactggagccccagtgata

SEQ ID NO: 381992 - DNA, 19 bp, Homo sapiens
  siRNA target sequence for C14orf133 (NM_022067.2,912-930).
catgatggaaacgtcatta

SEQ ID NO: 381993 - DNA, 19 bp, Homo sapiens
  siRNA target sequence for C14orf133 (NM_022067.2,1001-1019).
ggttgccctgagacatctt

SEQ ID NO: 381994 - DNA, 19 bp, Homo sapiens
  siRNA target sequence for C14orf133 (NM_022067.2,1002-1020).
gttgccctgagacatctta

SEQ ID NO: 381995 - DNA, 19 bp, Homo sapiens
  siRNA target sequence for C14orf133 (NM_022067.2,1041-1059).
ggggatcaaaagttgcttt

SEQ ID NO: 381996 - DNA, 19 bp, Homo sapiens
  siRNA target sequence for C14orf133 (NM_022067.2,1042-1060).
gggatcaaaagttgctttt

SEQ ID NO: 381997 - DNA, 19 bp, Homo sapiens
  siRNA target sequence for C14orf133 (NM_022067.2,1073-1091).
gttcctagatagaacagaa

SEQ ID NO: 381998 - DNA, 19 bp, Homo sapiens
  siRNA target sequence for C14orf133 (NM_022067.2,1094-1112).
gcttgcgctatctcattat

SEQ ID NO: 381999 - DNA, 19 bp, Homo sapiens
  siRNA target sequence for C14orf133 (NM_022067.2,1107-1125).
cattatcgagagcatttga

SEQ ID NO: 382000 - DNA, 19 bp, Homo sapiens
  siRNA target sequence for C14orf133 (NM_022067.2,1136-1154).
ccctgacaaacgaaaagaa

SEQ ID NO: 382001 - DNA, 19 bp, Homo sapiens
  siRNA target sequence for C14orf133 (NM_022067.2,1203-1221).
cacatacaggaccattaca

SEQ ID NO: 382002 - DNA, 19 bp, Homo sapiens
  siRNA target sequence for C14orf133 (NM_022067.2,1227-1245).
ctggaacgtcagatcatta

SEQ ID NO: 382003 - DNA, 19 bp, Homo sapiens
  siRNA target sequence for C14orf133 (NM_022067.2,1276-1294).
caggacagactgagatctt

SEQ ID NO: 382004 - DNA, 19 bp, Homo sapiens
  siRNA target sequence for C14orf133 (NM_022067.2,1332-1350).
ccactagtgacaacacttt

SEQ ID NO: 382005 - DNA, 19 bp, Homo sapiens
  siRNA target sequence for C14orf133 (NM_022067.2,1333-1351).
cactagtgacaacactttt

SEQ ID NO: 382006 - DNA, 19 bp, Homo sapiens
  siRNA target sequence for C14orf133 (NM_022067.2,1475-1493).
gcttcgagcctggaatgat

SEQ ID NO: 382007 - DNA, 19 bp, Homo sapiens
  siRNA target sequence for C14orf133 (NM_022067.2,1491-1509).
gatgtagatgccctattca

SEQ ID NO: 382008 - DNA, 19 bp, Homo sapiens
  siRNA target sequence for C14orf133 (NM_022067.2,1500-1518).
gccctattcaccacaaaga

SEQ ID NO: 382009 - DNA, 19 bp, Homo sapiens
  siRNA target sequence for C14orf133 (NM_022067.2,1559-1577).
ccatcgggttgtcgaaatt

SEQ ID NO: 382010 - DNA, 19 bp, Homo sapiens
  siRNA target sequence for C14orf133 (NM_022067.2,1560-1578).
catcgggttgtcgaaattt

SEQ ID NO: 382011 - DNA, 19 bp, Homo sapiens
  siRNA target sequence for C14orf133 (NM_022067.2,1564-1582).
gggttgtcgaaattttgca

SEQ ID NO: 382012 - DNA, 19 bp, Homo sapiens
  siRNA target sequence for C14orf133 (NM_022067.2,1638-1656).
gtggacacgaagttgaact

SEQ ID NO: 382013 - DNA, 19 bp, Homo sapiens
  siRNA target sequence for C14orf133 (NM_022067.2,1675-1693).
gccatgatgtcgtcattga

SEQ ID NO: 382014 - DNA, 19 bp, Homo sapiens
  siRNA target sequence for C14orf133 (NM_022067.2,1676-1694).
ccatgatgtcgtcattgat

SEQ ID NO: 382015 - DNA, 19 bp, Homo sapiens
  siRNA target sequence for C14orf133 (NM_022067.2,1677-1695).
catgatgtcgtcattgata

SEQ ID NO: 382016 - DNA, 19 bp, Homo sapiens
  siRNA target sequence for C14orf133 (NM_022067.2,1717-1735).
gtcaacagttgctagcata

SEQ ID NO: 382017 - DNA, 19 bp, Homo sapiens
  siRNA target sequence for C14orf133 (NM_022067.2,1736-1754).
caggagtaaggtagataaa

SEQ ID NO: 382018 - DNA, 19 bp, Homo sapiens
  siRNA target sequence for C14orf133 (NM_022067.2,1790-1808).
cagcagctcgcaaattcga

SEQ ID NO: 382019 - DNA, 19 bp, Homo sapiens
  siRNA target sequence for FLJ23403 (NM_022068.1,79-97).
gatctatgtgcccatcaaa

SEQ ID NO: 382020 - DNA, 19 bp, Homo sapiens
  siRNA target sequence for FLJ23403 (NM_022068.1,113-131).
ctcatccacccggagtata

SEQ ID NO: 382021 - DNA, 19 bp, Homo sapiens
  siRNA target sequence for FLJ23403 (NM_022068.1,135-153).
ccgtgactgacgtgtatgt

SEQ ID NO: 382022 - DNA, 19 bp, Homo sapiens
  siRNA target sequence for FLJ23403 (NM_022068.1,136-154).
cgtgactgacgtgtatgta

SEQ ID NO: 382023 - DNA, 19 bp, Homo sapiens
  siRNA target sequence for FLJ23403 (NM_022068.1,141-159).
ctgacgtgtatgtactcat

SEQ ID NO: 382024 - DNA, 19 bp, Homo sapiens
  siRNA target sequence for FLJ23403 (NM_022068.1,284-302).
gtgatggtcctcattcagt

SEQ ID NO: 382025 - DNA, 19 bp, Homo sapiens
  siRNA target sequence for FLJ23403 (NM_022068.1,290-308).
gtcctcattcagtttggaa

SEQ ID NO: 382026 - DNA, 19 bp, Homo sapiens
  siRNA target sequence for FLJ23403 (NM_022068.1,361-379).
catcttccaggtcattctt

SEQ ID NO: 382027 - DNA, 19 bp, Homo sapiens
  siRNA target sequence for FLJ23403 (NM_022068.1,377-395).
cttgtgttcggaattcact

SEQ ID NO: 382028 - DNA, 19 bp, Homo sapiens
  siRNA target sequence for FLJ23403 (NM_022068.1,419-437).
ggtgtgactgagaggaaat

SEQ ID NO: 382029 - DNA, 19 bp, Homo sapiens
  siRNA target sequence for FLJ23403 (NM_022068.1,420-438).
gtgtgactgagaggaaatt

SEQ ID NO: 382030 - DNA, 19 bp, Homo sapiens
  siRNA target sequence for FLJ23403 (NM_022068.1,552-570).
ccaagagctacaattacgt

SEQ ID NO: 382031 - DNA, 19 bp, Homo sapiens
  siRNA target sequence for FLJ23403 (NM_022068.1,768-786).
gccagttgaaagttatgga

SEQ ID NO: 382032 - DNA, 19 bp, Homo sapiens
  siRNA target sequence for FLJ23403 (NM_022068.1,826-844).
ggacaccggtgctatgcaa

SEQ ID NO: 382033 - DNA, 19 bp, Homo sapiens
  siRNA target sequence for FLJ23403 (NM_022068.1,827-845).
gacaccggtgctatgcaat

SEQ ID NO: 382034 - DNA, 19 bp, Homo sapiens
  siRNA target sequence for FLJ23403 (NM_022068.1,829-847).
caccggtgctatgcaattt

SEQ ID NO: 382035 - DNA, 19 bp, Homo sapiens
  siRNA target sequence for FLJ23403 (NM_022068.1,831-849).
ccggtgctatgcaatttct

SEQ ID NO: 382036 - DNA, 19 bp, Homo sapiens
  siRNA target sequence for FLJ23403 (NM_022068.1,837-855).
ctatgcaatttctggaaaa

SEQ ID NO: 382037 - DNA, 19 bp, Homo sapiens
  siRNA target sequence for FLJ23403 (NM_022068.1,930-948).
gtaagcagaaaatgataca

SEQ ID NO: 382038 - DNA, 19 bp, Homo sapiens
  siRNA target sequence for FLJ23403 (NM_022068.1,953-971).
ctcctggaccccaatagta

SEQ ID NO: 382039 - DNA, 19 bp, Homo sapiens
  siRNA target sequence for FLJ23403 (NM_022068.1,993-1011).
ggagtattcagagaaactt

SEQ ID NO: 382040 - DNA, 19 bp, Homo sapiens
  siRNA target sequence for FLJ23403 (NM_022068.1,994-1012).
gagtattcagagaaactta

SEQ ID NO: 382041 - DNA, 19 bp, Homo sapiens
  siRNA target sequence for FLJ23403 (NM_022068.1,1009-1027).
cttaagtctgggtgcaaaa

SEQ ID NO: 382042 - DNA, 19 bp, Homo sapiens
  siRNA target sequence for FLJ23403 (NM_022068.1,1018-1036).
gggtgcaaaatcggaaata

SEQ ID NO: 382043 - DNA, 19 bp, Homo sapiens
  siRNA target sequence for FLJ23403 (NM_022068.1,1022-1040).
gcaaaatcggaaatagcaa

SEQ ID NO: 382044 - DNA, 19 bp, Homo sapiens
  siRNA target sequence for FLJ23403 (NM_022068.1,1076-1094).
cgaaagaatatcgctaaaa

SEQ ID NO: 382045 - DNA, 19 bp, Homo sapiens
  siRNA target sequence for FLJ23403 (NM_022068.1,1077-1095).
gaaagaatatcgctaaaat

SEQ ID NO: 382046 - DNA, 19 bp, Homo sapiens
  siRNA target sequence for FLJ23403 (NM_022068.1,1163-1181).
gtgaaagcacctagtgatt

SEQ ID NO: 382047 - DNA, 19 bp, Homo sapiens
  siRNA target sequence for FLJ23403 (NM_022068.1,1172-1190).
cctagtgattctaactcaa

SEQ ID NO: 382048 - DNA, 19 bp, Homo sapiens
  siRNA target sequence for FLJ23403 (NM_022068.1,1193-1211).
cctataaagcaacttttat

SEQ ID NO: 382049 - DNA, 19 bp, Homo sapiens
  siRNA target sequence for FLJ23403 (NM_022068.1,1246-1264).
gtccagagacaatacaact

SEQ ID NO: 382050 - DNA, 19 bp, Homo sapiens
  siRNA target sequence for FLJ23403 (NM_022068.1,1275-1293).
gtgagtggtgggttctcaa

SEQ ID NO: 382051 - DNA, 19 bp, Homo sapiens
  siRNA target sequence for FLJ23403 (NM_022068.1,1340-1358).
ctggtggtcttcaatgaca

SEQ ID NO: 382052 - DNA, 19 bp, Homo sapiens
  siRNA target sequence for FLJ23403 (NM_022068.1,1342-1360).
ggtggtcttcaatgacaaa

SEQ ID NO: 382053 - DNA, 19 bp, Homo sapiens
  siRNA target sequence for FLJ23403 (NM_022068.1,1385-1403).
ctggctggctatggtatta

SEQ ID NO: 382054 - DNA, 19 bp, Homo sapiens
  siRNA target sequence for FLJ23403 (NM_022068.1,1416-1434).
cttcagttgtccttgtgat

SEQ ID NO: 382055 - DNA, 19 bp, Homo sapiens
  siRNA target sequence for FLJ23403 (NM_022068.1,1470-1488).
ctcactccatcatgtttga

SEQ ID NO: 382056 - DNA, 19 bp, Homo sapiens
  siRNA target sequence for FLJ23403 (NM_022068.1,1505-1523).
gatcgaattttgaagttgt

SEQ ID NO: 382057 - DNA, 19 bp, Homo sapiens
  siRNA target sequence for FLJ23403 (NM_022068.1,1516-1534).
gaagttgtgcacagatatt

SEQ ID NO: 382058 - DNA, 19 bp, Homo sapiens
  siRNA target sequence for FLJ23403 (NM_022068.1,1564-1582).
gctagaagaagatctctat

SEQ ID NO: 382059 - DNA, 19 bp, Homo sapiens
  siRNA target sequence for FLJ23403 (NM_022068.1,1574-1592).
gatctctatgccaaattaa

SEQ ID NO: 382060 - DNA, 19 bp, Homo sapiens
  siRNA target sequence for ABC1 (NM_022070.3,227-245).
ggacgttagtgctcttctt

SEQ ID NO: 382061 - DNA, 19 bp, Homo sapiens
  siRNA target sequence for ABC1 (NM_022070.3,256-274).
gccgactggtacctcttaa

SEQ ID NO: 382062 - DNA, 19 bp, Homo sapiens
  siRNA target sequence for ABC1 (NM_022070.3,257-275).
ccgactggtacctcttaat

SEQ ID NO: 382063 - DNA, 19 bp, Homo sapiens
  siRNA target sequence for ABC1 (NM_022070.3,259-277).
gactggtacctcttaatca

SEQ ID NO: 382064 - DNA, 19 bp, Homo sapiens
  siRNA target sequence for ABC1 (NM_022070.3,261-279).
ctggtacctcttaatcaga

SEQ ID NO: 382065 - DNA, 19 bp, Homo sapiens
  siRNA target sequence for ABC1 (NM_022070.3,263-281).
ggtacctcttaatcagaat

SEQ ID NO: 382066 - DNA, 19 bp, Homo sapiens
  siRNA target sequence for ABC1 (NM_022070.3,305-323).
gcttatccaccatttactt

SEQ ID NO: 382067 - DNA, 19 bp, Homo sapiens
  siRNA target sequence for ABC1 (NM_022070.3,306-324).
cttatccaccatttactta

SEQ ID NO: 382068 - DNA, 19 bp, Homo sapiens
  siRNA target sequence for ABC1 (NM_022070.3,326-344).
cagattacaggtaattgtt

SEQ ID NO: 382069 - DNA, 19 bp, Homo sapiens
  siRNA target sequence for ABC1 (NM_022070.3,345-363).
gatgaacagcacttggatt

SEQ ID NO: 382070 - DNA, 19 bp, Homo sapiens
  siRNA target sequence for ABC1 (NM_022070.3,360-378).
gatttcctgttggcatata

SEQ ID NO: 382071 - DNA, 19 bp, Homo sapiens
  siRNA target sequence for ABC1 (NM_022070.3,366-384).
ctgttggcatatactattt

SEQ ID NO: 382072 - DNA, 19 bp, Homo sapiens
  siRNA target sequence for ABC1 (NM_022070.3,379-397).
ctatttcggctattcatca

SEQ ID NO: 382073 - DNA, 19 bp, Homo sapiens
  siRNA target sequence for ABC1 (NM_022070.3,496-514).
gcaacaccggactcttaat

SEQ ID NO: 382074 - DNA, 19 bp, Homo sapiens
  siRNA target sequence for ABC1 (NM_022070.3,502-520).
ccggactcttaatgaagtt

SEQ ID NO: 382075 - DNA, 19 bp, Homo sapiens
  siRNA target sequence for ABC1 (NM_022070.3,554-572).
gagagctgcagtacattgt

SEQ ID NO: 382076 - DNA, 19 bp, Homo sapiens
  siRNA target sequence for ABC1 (NM_022070.3,556-574).
gagctgcagtacattgtat

SEQ ID NO: 382077 - DNA, 19 bp, Homo sapiens
  siRNA target sequence for ABC1 (NM_022070.3,571-589).
gtatggcaaacttatgtct

SEQ ID NO: 382078 - DNA, 19 bp, Homo sapiens
  siRNA target sequence for ABC1 (NM_022070.3,598-616).
caggacagccgtatttgga

SEQ ID NO: 382079 - DNA, 19 bp, Homo sapiens
  siRNA target sequence for ABC1 (NM_022070.3,614-632).
ggaggagccctaccaaaat

SEQ ID NO: 382080 - DNA, 19 bp, Homo sapiens
  siRNA target sequence for ABC1 (NM_022070.3,618-636).
gagccctaccaaaatgtct

SEQ ID NO: 382081 - DNA, 19 bp, Homo sapiens
  siRNA target sequence for ABC1 (NM_022070.3,641-659).
ccaagcttttctgactatt

SEQ ID NO: 382082 - DNA, 19 bp, Homo sapiens
  siRNA target sequence for ABC1 (NM_022070.3,676-694).
catctgatatggatgatat

SEQ ID NO: 382083 - DNA, 19 bp, Homo sapiens
  siRNA target sequence for ABC1 (NM_022070.3,707-725).
gttattgcaaaatgcatta

SEQ ID NO: 382084 - DNA, 19 bp, Homo sapiens
  siRNA target sequence for ABC1 (NM_022070.3,729-747).
ggtatacagtcacttctaa

SEQ ID NO: 382085 - DNA, 19 bp, Homo sapiens
  siRNA target sequence for ABC1 (NM_022070.3,792-810).
cttttagctgtgctaaaga

SEQ ID NO: 382086 - DNA, 19 bp, Homo sapiens
  siRNA target sequence for ABC1 (NM_022070.3,846-864).
gagatgcccacggtgttat

SEQ ID NO: 382087 - DNA, 19 bp, Homo sapiens
  siRNA target sequence for ABC1 (NM_022070.3,871-889).
ctccgcttcctcagtatga

SEQ ID NO: 382088 - DNA, 19 bp, Homo sapiens
  siRNA target sequence for ABC1 (NM_022070.3,905-923).
caaaccacagcaatcagaa

SEQ ID NO: 382089 - DNA, 19 bp, Homo sapiens
  siRNA target sequence for ABC1 (NM_022070.3,928-946).
gtgcttctcgaccaacttt

SEQ ID NO: 382090 - DNA, 19 bp, Homo sapiens
  siRNA target sequence for ABC1 (NM_022070.3,930-948).
gcttctcgaccaactttga

SEQ ID NO: 382091 - DNA, 19 bp, Homo sapiens
  siRNA target sequence for ABC1 (NM_022070.3,931-949).
cttctcgaccaactttgaa

SEQ ID NO: 382092 - DNA, 19 bp, Homo sapiens
  siRNA target sequence for ABC1 (NM_022070.3,934-952).
ctcgaccaactttgaataa

SEQ ID NO: 382093 - DNA, 19 bp, Homo sapiens
  siRNA target sequence for ABC1 (NM_022070.3,936-954).
cgaccaactttgaataaaa

SEQ ID NO: 382094 - DNA, 19 bp, Homo sapiens
  siRNA target sequence for ABC1 (NM_022070.3,1065-1083).
ctgcatgaagggaacactt

SEQ ID NO: 382095 - DNA, 19 bp, Homo sapiens
  siRNA target sequence for ABC1 (NM_022070.3,1247-1265).
gtcttaccaagctaaagtt

SEQ ID NO: 382096 - DNA, 19 bp, Homo sapiens
  siRNA target sequence for ABC1 (NM_022070.3,1297-1315).
ctataaaatcgatagaaaa

SEQ ID NO: 382097 - DNA, 19 bp, Homo sapiens
  siRNA target sequence for ABC1 (NM_022070.3,1391-1409).
gatgactcttacattgaaa

SEQ ID NO: 382098 - DNA, 19 bp, Homo sapiens
  siRNA target sequence for ABC1 (NM_022070.3,1525-1543).
cccccttctccgtaatgat

SEQ ID NO: 382099 - DNA, 19 bp, Homo sapiens
  siRNA target sequence for ABC1 (NM_022070.3,1541-1559).
gatcgcttgcagcattaga

SEQ ID NO: 382100 - DNA, 19 bp, Homo sapiens
  siRNA target sequence for ABC1 (NM_022070.3,1634-1652).
ccttgcaaatttagtatca

SEQ ID NO: 382101 - DNA, 19 bp, Homo sapiens
  siRNA target sequence for ABC1 (NM_022070.3,1657-1675).
caccttatgatcgtctaaa

SEQ ID NO: 382102 - DNA, 19 bp, Homo sapiens
  siRNA target sequence for ABC1 (NM_022070.3,1660-1678).
cttatgatcgtctaaaact

SEQ ID NO: 382103 - DNA, 19 bp, Homo sapiens
  siRNA target sequence for ABC1 (NM_022070.3,1703-1721).
ccagataaagccttatatt

SEQ ID NO: 382104 - DNA, 19 bp, Homo sapiens
  siRNA target sequence for ABC1 (NM_022070.3,1714-1732).
cttatattcgccacaaaga

SEQ ID NO: 382105 - DNA, 19 bp, Homo sapiens
  siRNA target sequence for ABC1 (NM_022070.3,1761-1779).
ctcttgggagctatagtgt

SEQ ID NO: 382106 - DNA, 19 bp, Homo sapiens
  siRNA target sequence for ABC1 (NM_022070.3,1778-1796).
gtccacccacgcaccttta

SEQ ID NO: 382107 - DNA, 19 bp, Homo sapiens
  siRNA target sequence for ABC1 (NM_022070.3,1798-1816).
ctgaagtccaactacttct

SEQ ID NO: 382108 - DNA, 19 bp, Homo sapiens
  siRNA target sequence for ABC1 (NM_022070.3,1836-1854).
ggactcggtaatagcaatt

SEQ ID NO: 382109 - DNA, 19 bp, Homo sapiens
  siRNA target sequence for ABC1 (NM_022070.3,1965-1983).
ctcattcgactctgcattt

SEQ ID NO: 382110 - DNA, 19 bp, Homo sapiens
  siRNA target sequence for ABC1 (NM_022070.3,2076-2094).
gaggccttacaggtattga

SEQ ID NO: 382111 - DNA, 19 bp, Homo sapiens
  siRNA target sequence for ABC1 (NM_022070.3,2078-2096).
ggccttacaggtattgact

SEQ ID NO: 382112 - DNA, 19 bp, Homo sapiens
  siRNA target sequence for ABC1 (NM_022070.3,2145-2163).
cttggagaggtgatttgca

SEQ ID NO: 382113 - DNA, 19 bp, Homo sapiens
  siRNA target sequence for ABC1 (NM_022070.3,2195-2213).
gcttcatggagcaaagctt

SEQ ID NO: 382114 - DNA, 19 bp, Homo sapiens
  siRNA target sequence for ABC1 (NM_022070.3,2234-2252).
cttaatacagcagtataaa

SEQ ID NO: 382115 - DNA, 19 bp, Homo sapiens
  siRNA target sequence for ABC1 (NM_022070.3,2318-2336).
gatgctgaacggtccttta

SEQ ID NO: 382116 - DNA, 19 bp, Homo sapiens
  siRNA target sequence for ABC1 (NM_022070.3,2482-2500).
gcaagaatcgcttagtgaa

SEQ ID NO: 382117 - DNA, 19 bp, Homo sapiens
  siRNA target sequence for ABC1 (NM_022070.3,2483-2501).
caagaatcgcttagtgaaa

SEQ ID NO: 382118 - DNA, 19 bp, Homo sapiens
  siRNA target sequence for ABC1 (NM_022070.3,2580-2598).
gcaaatgcaatattgatgt

SEQ ID NO: 382119 - DNA, 19 bp, Homo sapiens
  siRNA target sequence for ABC1 (NM_022070.3,2654-2672).
cctgacagacactctgatt

SEQ ID NO: 382120 - DNA, 19 bp, Homo sapiens
  siRNA target sequence for ABC1 (NM_022070.3,2727-2745).
ctcttgaaaatgttacgat

SEQ ID NO: 382121 - DNA, 19 bp, Homo sapiens
  siRNA target sequence for ABC1 (NM_022070.3,2738-2756).
gttacgatcagctatagaa

SEQ ID NO: 382122 - DNA, 19 bp, Homo sapiens
  siRNA target sequence for ABC1 (NM_022070.3,2825-2843).
gcaaccctctcatatagaa

SEQ ID NO: 382123 - DNA, 19 bp, Homo sapiens
  siRNA target sequence for ABC1 (NM_022070.3,2826-2844).
caaccctctcatatagaaa

SEQ ID NO: 382124 - DNA, 19 bp, Homo sapiens
  siRNA target sequence for ABC1 (NM_022070.3,2873-2891).
gtctatccaggccctaatt

SEQ ID NO: 382125 - DNA, 19 bp, Homo sapiens
  siRNA target sequence for ABC1 (NM_022070.3,2882-2900).
ggccctaatttctactgtt

SEQ ID NO: 382126 - DNA, 19 bp, Homo sapiens
  siRNA target sequence for ABC1 (NM_022070.3,2915-2933).
catgaaagtccgatggaat

SEQ ID NO: 382127 - DNA, 19 bp, Homo sapiens
  siRNA target sequence for ABC1 (NM_022070.3,2924-2942).
ccgatggaatgcttgttat

SEQ ID NO: 382128 - DNA, 19 bp, Homo sapiens
  siRNA target sequence for ABC1 (NM_022070.3,2929-2947).
ggaatgcttgttatgcaat

SEQ ID NO: 382129 - DNA, 19 bp, Homo sapiens
  siRNA target sequence for ABC1 (NM_022070.3,3034-3052).
catcatgcaagaacttcaa

SEQ ID NO: 382130 - DNA, 19 bp, Homo sapiens
  siRNA target sequence for ABC1 (NM_022070.3,3037-3055).
catgcaagaacttcaaagt

SEQ ID NO: 382131 - DNA, 19 bp, Homo sapiens
  siRNA target sequence for ABC1 (NM_022070.3,3126-3144).
gctcggatctggaatgcat

SEQ ID NO: 382132 - DNA, 19 bp, Homo sapiens
  siRNA target sequence for ABC1 (NM_022070.3,3142-3160).
cattggtcaccgctttaca

SEQ ID NO: 382133 - DNA, 19 bp, Homo sapiens
  siRNA target sequence for ABC1 (NM_022070.3,3265-3283).
cggacctcccttgtatgaa

SEQ ID NO: 382134 - DNA, 19 bp, Homo sapiens
  siRNA target sequence for ABC1 (NM_022070.3,3269-3287).
cctcccttgtatgaaagaa

SEQ ID NO: 382135 - DNA, 19 bp, Homo sapiens
  siRNA target sequence for ABC1 (NM_022070.3,3311-3329).
ggtccagtcctatattcta

SEQ ID NO: 382136 - DNA, 19 bp, Homo sapiens
  siRNA target sequence for ABC1 (NM_022070.3,3406-3424).
gaatggcccttaaacacat

SEQ ID NO: 382137 - DNA, 19 bp, Homo sapiens
  siRNA target sequence for ABC1 (NM_022070.3,3463-3481).
gggccatcatgggcttttt

SEQ ID NO: 382138 - DNA, 19 bp, Homo sapiens
  siRNA target sequence for ABC1 (NM_022070.3,3464-3482).
ggccatcatgggcttttta

SEQ ID NO: 382139 - DNA, 19 bp, Homo sapiens
  siRNA target sequence for ABC1 (NM_022070.3,3466-3484).
ccatcatgggctttttaga

SEQ ID NO: 382140 - DNA, 19 bp, Homo sapiens
  siRNA target sequence for ABC1 (NM_022070.3,3467-3485).
catcatgggctttttagaa

SEQ ID NO: 382141 - DNA, 19 bp, Homo sapiens
  siRNA target sequence for ABC1 (NM_022070.3,3486-3504).
gagatcctggccgtttgtt

SEQ ID NO: 382142 - DNA, 19 bp, Homo sapiens
  siRNA target sequence for ABC1 (NM_022070.3,3528-3546).
gcactcccagggttaacaa

SEQ ID NO: 382143 - DNA, 19 bp, Homo sapiens
  siRNA target sequence for ABC1 (NM_022070.3,3529-3547).
cactcccagggttaacaaa

SEQ ID NO: 382144 - DNA, 19 bp, Homo sapiens
  siRNA target sequence for ABC1 (NM_022070.3,3534-3552).
ccagggttaacaaatcagt

SEQ ID NO: 382145 - DNA, 19 bp, Homo sapiens
  siRNA target sequence for FLJ22609 (NM_022072.2,591-609).
cattgtaatgaatatgata

SEQ ID NO: 382146 - DNA, 19 bp, Homo sapiens
  siRNA target sequence for FLJ22609 (NM_022072.2,595-613).
gtaatgaatatgatagtct

SEQ ID NO: 382147 - DNA, 19 bp, Homo sapiens
  siRNA target sequence for FLJ22609 (NM_022072.2,633-651).
cagacgttggaatctttca

SEQ ID NO: 382148 - DNA, 19 bp, Homo sapiens
  siRNA target sequence for FLJ22609 (NM_022072.2,657-675).
cagcctttgataaatgtaa

SEQ ID NO: 382149 - DNA, 19 bp, Homo sapiens
  siRNA target sequence for FLJ22609 (NM_022072.2,744-762).
gtggatgctccgtgttcaa

SEQ ID NO: 382150 - DNA, 19 bp, Homo sapiens
  siRNA target sequence for FLJ22609 (NM_022072.2,746-764).
ggatgctccgtgttcaaat

SEQ ID NO: 382151 - DNA, 19 bp, Homo sapiens
  siRNA target sequence for FLJ22609 (NM_022072.2,765-783).
gatcgaagctggttgtttt

SEQ ID NO: 382152 - DNA, 19 bp, Homo sapiens
  siRNA target sequence for FLJ22609 (NM_022072.2,802-820).
catcctgtaggataagtca

SEQ ID NO: 382153 - DNA, 19 bp, Homo sapiens
  siRNA target sequence for FLJ22609 (NM_022072.2,840-858).
ctacagatagagctgttaa

SEQ ID NO: 382154 - DNA, 19 bp, Homo sapiens
  siRNA target sequence for FLJ22609 (NM_022072.2,843-861).
cagatagagctgttaaggt

SEQ ID NO: 382155 - DNA, 19 bp, Homo sapiens
  siRNA target sequence for FLJ22609 (NM_022072.2,852-870).
ctgttaaggtctgcaatta

SEQ ID NO: 382156 - DNA, 19 bp, Homo sapiens
  siRNA target sequence for FLJ22609 (NM_022072.2,882-900).
cctggagggatacttgtat

SEQ ID NO: 382157 - DNA, 19 bp, Homo sapiens
  siRNA target sequence for FLJ22609 (NM_022072.2,888-906).
gggatacttgtatactcta

SEQ ID NO: 382158 - DNA, 19 bp, Homo sapiens
  siRNA target sequence for FLJ22609 (NM_022072.2,925-943).
cagaaaatcaagatgtgat

SEQ ID NO: 382159 - DNA, 19 bp, Homo sapiens
  siRNA target sequence for FLJ22609 (NM_022072.2,977-995).
gcctatggacattaaagga

SEQ ID NO: 382160 - DNA, 19 bp, Homo sapiens
  siRNA target sequence for FLJ22609 (NM_022072.2,978-996).
cctatggacattaaaggaa

SEQ ID NO: 382161 - DNA, 19 bp, Homo sapiens
  siRNA target sequence for FLJ22609 (NM_022072.2,984-1002).
gacattaaaggaatagcaa

SEQ ID NO: 382162 - DNA, 19 bp, Homo sapiens
  siRNA target sequence for FLJ22794 (NM_022074.2,281-299).
gaaaatcgagcactatttt

SEQ ID NO: 382163 - DNA, 19 bp, Homo sapiens
  siRNA target sequence for FLJ22794 (NM_022074.2,308-326).
ctctaaagagcaacagaat

SEQ ID NO: 382164 - DNA, 19 bp, Homo sapiens
  siRNA target sequence for FLJ22794 (NM_022074.2,310-328).
ctaaagagcaacagaataa

SEQ ID NO: 382165 - DNA, 19 bp, Homo sapiens
  siRNA target sequence for FLJ22794 (NM_022074.2,315-333).
gagcaacagaataattgca

SEQ ID NO: 382166 - DNA, 19 bp, Homo sapiens
  siRNA target sequence for FLJ22794 (NM_022074.2,368-386).
cccaagagccacaactaat

SEQ ID NO: 382167 - DNA, 19 bp, Homo sapiens
  siRNA target sequence for FLJ22794 (NM_022074.2,369-387).
ccaagagccacaactaata

SEQ ID NO: 382168 - DNA, 19 bp, Homo sapiens
  siRNA target sequence for FLJ22794 (NM_022074.2,389-407).
ccaggctcaaagattccat

SEQ ID NO: 382169 - DNA, 19 bp, Homo sapiens
  siRNA target sequence for FLJ22794 (NM_022074.2,390-408).
caggctcaaagattccatt

SEQ ID NO: 382170 - DNA, 19 bp, Homo sapiens
  siRNA target sequence for FLJ22794 (NM_022074.2,440-458).
gccccaaaataggacaata

SEQ ID NO: 382171 - DNA, 19 bp, Homo sapiens
  siRNA target sequence for FLJ22794 (NM_022074.2,442-460).
cccaaaataggacaatata

SEQ ID NO: 382172 - DNA, 19 bp, Homo sapiens
  siRNA target sequence for FLJ22794 (NM_022074.2,443-461).
ccaaaataggacaatatat

SEQ ID NO: 382173 - DNA, 19 bp, Homo sapiens
  siRNA target sequence for FLJ22794 (NM_022074.2,451-469).
ggacaatatatgttacctt

SEQ ID NO: 382174 - DNA, 19 bp, Homo sapiens
  siRNA target sequence for FLJ22794 (NM_022074.2,480-498).
cacaggagaaaccaagata

SEQ ID NO: 382175 - DNA, 19 bp, Homo sapiens
  siRNA target sequence for FLJ22794 (NM_022074.2,510-528).
ctcacacatagtgagaata

SEQ ID NO: 382176 - DNA, 19 bp, Homo sapiens
  siRNA target sequence for FLJ22794 (NM_022074.2,512-530).
cacacatagtgagaatagt

SEQ ID NO: 382177 - DNA, 19 bp, Homo sapiens
  siRNA target sequence for FLJ22794 (NM_022074.2,583-601).
ctcaccaaggccaagaaat

SEQ ID NO: 382178 - DNA, 19 bp, Homo sapiens
  siRNA target sequence for FLJ22794 (NM_022074.2,610-628).
gtggcacagaaggaatcaa

SEQ ID NO: 382179 - DNA, 19 bp, Homo sapiens
  siRNA target sequence for FLJ22794 (NM_022074.2,675-693).
ggccaggtggtcattacat

SEQ ID NO: 382180 - DNA, 19 bp, Homo sapiens
  siRNA target sequence for FLJ22794 (NM_022074.2,747-765).
gacaaagcatcgactgaat

SEQ ID NO: 382181 - DNA, 19 bp, Homo sapiens
  siRNA target sequence for FLJ22794 (NM_022074.2,749-767).
caaagcatcgactgaatgt

SEQ ID NO: 382182 - DNA, 19 bp, Homo sapiens
  siRNA target sequence for FLJ22794 (NM_022074.2,805-823).
gtaaaagaaggattgttaa

SEQ ID NO: 382183 - DNA, 19 bp, Homo sapiens
  siRNA target sequence for FLJ22794 (NM_022074.2,848-866).
gcgcaaactctgtgtttat

SEQ ID NO: 382184 - DNA, 19 bp, Homo sapiens
  siRNA target sequence for FLJ22794 (NM_022074.2,943-961).
ggaaactcattgaaaacaa

SEQ ID NO: 382185 - DNA, 19 bp, Homo sapiens
  siRNA target sequence for FLJ22794 (NM_022074.2,983-1001).
ccagccagttgatgaatta

SEQ ID NO: 382186 - DNA, 19 bp, Homo sapiens
  siRNA target sequence for FLJ22794 (NM_022074.2,1116-1134).
gctcagtaccccagtttga

SEQ ID NO: 382187 - DNA, 19 bp, Homo sapiens
  siRNA target sequence for FLJ22794 (NM_022074.2,1246-1264).
cttcttcgattaaagtagt

SEQ ID NO: 382188 - DNA, 19 bp, Homo sapiens
  siRNA target sequence for FLJ22794 (NM_022074.2,1249-1267).
cttcgattaaagtagtgaa

SEQ ID NO: 382189 - DNA, 19 bp, Homo sapiens
  siRNA target sequence for FLJ22794 (NM_022074.2,1252-1270).
cgattaaagtagtgaaact

SEQ ID NO: 382190 - DNA, 19 bp, Homo sapiens
  siRNA target sequence for FLJ22794 (NM_022074.2,1253-1271).
gattaaagtagtgaaactt

SEQ ID NO: 382191 - DNA, 19 bp, Homo sapiens
  siRNA target sequence for FLJ22794 (NM_022074.2,1287-1305).
gactcagttgggtacttat

SEQ ID NO: 382192 - DNA, 19 bp, Homo sapiens
  siRNA target sequence for FLJ22794 (NM_022074.2,1404-1422).
ggaatagagccaagtaagt

SEQ ID NO: 382193 - DNA, 19 bp, Homo sapiens
  siRNA target sequence for FLJ22794 (NM_022074.2,1429-1447).
ccataattggtcaatgtgt

SEQ ID NO: 382194 - DNA, 19 bp, Homo sapiens
  siRNA target sequence for FLJ22794 (NM_022074.2,1430-1448).
cataattggtcaatgtgta

SEQ ID NO: 382195 - DNA, 19 bp, Homo sapiens
  siRNA target sequence for FLJ22794 (NM_022074.2,1446-1464).
gtaagggtgacatttggtt

SEQ ID NO: 382196 - DNA, 19 bp, Homo sapiens
  siRNA target sequence for FLJ22794 (NM_022074.2,1509-1527).
ccttggtttgagatacata

SEQ ID NO: 382197 - DNA, 19 bp, Homo sapiens
  siRNA target sequence for FLJ22794 (NM_022074.2,1510-1528).
cttggtttgagatacataa

SEQ ID NO: 382198 - DNA, 19 bp, Homo sapiens
  siRNA target sequence for FLJ22794 (NM_022074.2,1513-1531).
ggtttgagatacataatga

SEQ ID NO: 382199 - DNA, 19 bp, Homo sapiens
  siRNA target sequence for FLJ22794 (NM_022074.2,1578-1596).
gtacctatggaactatata

SEQ ID NO: 382200 - DNA, 19 bp, Homo sapiens
  siRNA target sequence for FLJ22794 (NM_022074.2,1617-1635).
cttagtgggttgatacata

SEQ ID NO: 382201 - DNA, 19 bp, Homo sapiens
  siRNA target sequence for FLJ22794 (NM_022074.2,1621-1639).
gtgggttgatacatattat

SEQ ID NO: 382202 - DNA, 19 bp, Homo sapiens
  siRNA target sequence for FLJ22794 (NM_022074.2,1694-1712).
gggtcagcgagcaaagaaa

SEQ ID NO: 382203 - DNA, 19 bp, Homo sapiens
  siRNA target sequence for FLJ22794 (NM_022074.2,1695-1713).
ggtcagcgagcaaagaaat

SEQ ID NO: 382204 - DNA, 19 bp, Homo sapiens
  siRNA target sequence for FLJ22794 (NM_022074.2,1718-1736).
ggaacgtgttcagtctaaa

SEQ ID NO: 382205 - DNA, 19 bp, Homo sapiens
  siRNA target sequence for FLJ22794 (NM_022074.2,1719-1737).
gaacgtgttcagtctaaaa

SEQ ID NO: 382206 - DNA, 19 bp, Homo sapiens
  siRNA target sequence for FLJ22794 (NM_022074.2,1752-1770).
gagtatgtccatatgtata

SEQ ID NO: 382207 - DNA, 19 bp, Homo sapiens
  siRNA target sequence for FLJ22794 (NM_022074.2,1754-1772).
gtatgtccatatgtatact

SEQ ID NO: 382208 - DNA, 19 bp, Homo sapiens
  siRNA target sequence for FLJ22794 (NM_022074.2,1802-1820).
ccctgatgtgattacctat

SEQ ID NO: 382209 - DNA, 19 bp, Homo sapiens
  siRNA target sequence for FLJ22794 (NM_022074.2,1806-1824).
gatgtgattacctatgaca

SEQ ID NO: 382210 - DNA, 19 bp, Homo sapiens
  siRNA target sequence for FLJ22794 (NM_022074.2,1847-1865).
cggctcccctgtgtttgat

SEQ ID NO: 382211 - DNA, 19 bp, Homo sapiens
  siRNA target sequence for FLJ22794 (NM_022074.2,1901-1919).
ctttgcttatacttaccaa

SEQ ID NO: 382212 - DNA, 19 bp, Homo sapiens
  siRNA target sequence for FLJ22794 (NM_022074.2,1927-1945).
ctcgtagtatcattgagtt

SEQ ID NO: 382213 - DNA, 19 bp, Homo sapiens
  siRNA target sequence for FLJ22794 (NM_022074.2,1948-1966).
gctctaccatggaatccat

SEQ ID NO: 382214 - DNA, 19 bp, Homo sapiens
  siRNA target sequence for FLJ22794 (NM_022074.2,1963-1981).
ccatcctccttgatattaa

SEQ ID NO: 382215 - DNA, 19 bp, Homo sapiens
  siRNA target sequence for FLJ22794 (NM_022074.2,1967-1985).
cctccttgatattaagcaa

SEQ ID NO: 382216 - DNA, 19 bp, Homo sapiens
  siRNA target sequence for GALNT11 (NM_022087.1,93-111).
gtcacagttcggtatttct

SEQ ID NO: 382217 - DNA, 19 bp, Homo sapiens
  siRNA target sequence for GALNT11 (NM_022087.1,95-113).
cacagttcggtatttctgt

SEQ ID NO: 382218 - DNA, 19 bp, Homo sapiens
  siRNA target sequence for GALNT11 (NM_022087.1,97-115).
cagttcggtatttctgtta

SEQ ID NO: 382219 - DNA, 19 bp, Homo sapiens
  siRNA target sequence for GALNT11 (NM_022087.1,110-128).
ctgttatgggtgccttttt

SEQ ID NO: 382220 - DNA, 19 bp, Homo sapiens
  siRNA target sequence for GALNT11 (NM_022087.1,133-151).
ctgcgacctggacagtttt

SEQ ID NO: 382221 - DNA, 19 bp, Homo sapiens
  siRNA target sequence for GALNT11 (NM_022087.1,136-154).
cgacctggacagttttgct

SEQ ID NO: 382222 - DNA, 19 bp, Homo sapiens
  siRNA target sequence for GALNT11 (NM_022087.1,224-242).
ccacggaccatctccaaaa

SEQ ID NO: 382223 - DNA, 19 bp, Homo sapiens
  siRNA target sequence for GALNT11 (NM_022087.1,225-243).
cacggaccatctccaaaaa

SEQ ID NO: 382224 - DNA, 19 bp, Homo sapiens
  siRNA target sequence for GALNT11 (NM_022087.1,227-245).
cggaccatctccaaaaaaa

SEQ ID NO: 382225 - DNA, 19 bp, Homo sapiens
  siRNA target sequence for GALNT11 (NM_022087.1,228-246).
ggaccatctccaaaaaaat

SEQ ID NO: 382226 - DNA, 19 bp, Homo sapiens
  siRNA target sequence for GALNT11 (NM_022087.1,289-307).
cacagttcaaagcaaacaa

SEQ ID NO: 382227 - DNA, 19 bp, Homo sapiens
  siRNA target sequence for GALNT11 (NM_022087.1,345-363).
gaagaaggccacttgaaat

SEQ ID NO: 382228 - DNA, 19 bp, Homo sapiens
  siRNA target sequence for GALNT11 (NM_022087.1,367-385).
cttctgaattaggtatgat

SEQ ID NO: 382229 - DNA, 19 bp, Homo sapiens
  siRNA target sequence for GALNT11 (NM_022087.1,493-511).
ggaatgcagcatgtaaaga

SEQ ID NO: 382230 - DNA, 19 bp, Homo sapiens
  siRNA target sequence for GALNT11 (NM_022087.1,590-608).
gacagtgcacagtgtcata

SEQ ID NO: 382231 - DNA, 19 bp, Homo sapiens
  siRNA target sequence for GALNT11 (NM_022087.1,644-662).
ccttgtggatgatgatagt

SEQ ID NO: 382232 - DNA, 19 bp, Homo sapiens
  siRNA target sequence for GALNT11 (NM_022087.1,682-700).
gagaactagatgaatatgt

SEQ ID NO: 382233 - DNA, 19 bp, Homo sapiens
  siRNA target sequence for GALNT11 (NM_022087.1,951-969).
gtccgcggagggttcaact

SEQ ID NO: 382234 - DNA, 19 bp, Homo sapiens
  siRNA target sequence for GALNT11 (NM_022087.1,1026-1044).
ggagccactgcaccaataa

SEQ ID NO: 382235 - DNA, 19 bp, Homo sapiens
  siRNA target sequence for GALNT11 (NM_022087.1,1027-1045).
gagccactgcaccaataaa

SEQ ID NO: 382236 - DNA, 19 bp, Homo sapiens
  siRNA target sequence for GALNT11 (NM_022087.1,1029-1047).
gccactgcaccaataaagt

SEQ ID NO: 382237 - DNA, 19 bp, Homo sapiens
  siRNA target sequence for GALNT11 (NM_022087.1,1031-1049).
cactgcaccaataaagtca

SEQ ID NO: 382238 - DNA, 19 bp, Homo sapiens
  siRNA target sequence for GALNT11 (NM_022087.1,1113-1131).
gatagtggcatggatatct

SEQ ID NO: 382239 - DNA, 19 bp, Homo sapiens
  siRNA target sequence for GALNT11 (NM_022087.1,1174-1192).
gtggcggtaagctcttcat

SEQ ID NO: 382240 - DNA, 19 bp, Homo sapiens
  siRNA target sequence for GALNT11 (NM_022087.1,1176-1194).
ggcggtaagctcttcatca

SEQ ID NO: 382241 - DNA, 19 bp, Homo sapiens
  siRNA target sequence for GALNT11 (NM_022087.1,1177-1195).
gcggtaagctcttcatcat

SEQ ID NO: 382242 - DNA, 19 bp, Homo sapiens
  siRNA target sequence for GALNT11 (NM_022087.1,1202-1220).
ctctagagtaggacacatt

SEQ ID NO: 382243 - DNA, 19 bp, Homo sapiens
  siRNA target sequence for GALNT11 (NM_022087.1,1204-1222).
ctagagtaggacacatttt

SEQ ID NO: 382244 - DNA, 19 bp, Homo sapiens
  siRNA target sequence for GALNT11 (NM_022087.1,1223-1241).
ccgaaaaaggcgaccatat

SEQ ID NO: 382245 - DNA, 19 bp, Homo sapiens
  siRNA target sequence for GALNT11 (NM_022087.1,1293-1311).
catgtctggttggatgaat

SEQ ID NO: 382246 - DNA, 19 bp, Homo sapiens
  siRNA target sequence for GALNT11 (NM_022087.1,1316-1334).
ggagcagtatttttcctta

SEQ ID NO: 382247 - DNA, 19 bp, Homo sapiens
  siRNA target sequence for GALNT11 (NM_022087.1,1317-1335).
gagcagtatttttccttaa

SEQ ID NO: 382248 - DNA, 19 bp, Homo sapiens
  siRNA target sequence for GALNT11 (NM_022087.1,1319-1337).
gcagtatttttccttaaga

SEQ ID NO: 382249 - DNA, 19 bp, Homo sapiens
  siRNA target sequence for GALNT11 (NM_022087.1,1341-1359).
gacctgaagacgaaaagct

SEQ ID NO: 382250 - DNA, 19 bp, Homo sapiens
  siRNA target sequence for GALNT11 (NM_022087.1,1394-1412).
gaagttgggctgtaaatca

SEQ ID NO: 382251 - DNA, 19 bp, Homo sapiens
  siRNA target sequence for GALNT11 (NM_022087.1,1401-1419).
ggctgtaaatcatttaaat

SEQ ID NO: 382252 - DNA, 19 bp, Homo sapiens
  siRNA target sequence for GALNT11 (NM_022087.1,1439-1457).
cccagagatgcagatatct

SEQ ID NO: 382253 - DNA, 19 bp, Homo sapiens
  siRNA target sequence for GALNT11 (NM_022087.1,1476-1494).
caacaacccatttttgtca

SEQ ID NO: 382254 - DNA, 19 bp, Homo sapiens
  siRNA target sequence for GALNT11 (NM_022087.1,1542-1560).
cacctccagaccaacaaat

SEQ ID NO: 382255 - DNA, 19 bp, Homo sapiens
  siRNA target sequence for GALNT11 (NM_022087.1,1594-1612).
gaggtctcgtggtgcttaa

SEQ ID NO: 382256 - DNA, 19 bp, Homo sapiens
  siRNA target sequence for GALNT11 (NM_022087.1,1640-1658).
gatctggatctataatgaa

SEQ ID NO: 382257 - DNA, 19 bp, Homo sapiens
  siRNA target sequence for GALNT11 (NM_022087.1,1659-1677).
gagcatgaattggttttaa

SEQ ID NO: 382258 - DNA, 19 bp, Homo sapiens
  siRNA target sequence for GALNT11 (NM_022087.1,1885-1903).
cacagcagtggcatttgga

SEQ ID NO: 382259 - DNA, 19 bp, Homo sapiens
  siRNA target sequence for LOC63920 (NM_022090.2,579-597).
cctgtacaacggaagtaga

SEQ ID NO: 382260 - DNA, 19 bp, Homo sapiens
  siRNA target sequence for LOC63920 (NM_022090.2,580-598).
ctgtacaacggaagtagat

SEQ ID NO: 382261 - DNA, 19 bp, Homo sapiens
  siRNA target sequence for LOC63920 (NM_022090.2,614-632).
cagtgtgtgttgtgtaact

SEQ ID NO: 382262 - DNA, 19 bp, Homo sapiens
  siRNA target sequence for LOC63920 (NM_022090.2,704-722).
gctgggcatgatctcaata

SEQ ID NO: 382263 - DNA, 19 bp, Homo sapiens
  siRNA target sequence for LOC63920 (NM_022090.2,783-801).
catctcatgaggatacttt

SEQ ID NO: 382264 - DNA, 19 bp, Homo sapiens
  siRNA target sequence for LOC63920 (NM_022090.2,786-804).
ctcatgaggatactttatt

SEQ ID NO: 382265 - DNA, 19 bp, Homo sapiens
  siRNA target sequence for LOC63920 (NM_022090.2,813-831).
cgtatcaatttgcgtattt

SEQ ID NO: 382266 - DNA, 19 bp, Homo sapiens
  siRNA target sequence for LOC63920 (NM_022090.2,814-832).
gtatcaatttgcgtattta

SEQ ID NO: 382267 - DNA, 19 bp, Homo sapiens
  siRNA target sequence for LOC63920 (NM_022090.2,892-910).
ggaaatagcacaaatagtt

SEQ ID NO: 382268 - DNA, 19 bp, Homo sapiens
  siRNA target sequence for LOC63920 (NM_022090.2,918-936).
cagatgcacaaaaaaagct

SEQ ID NO: 382269 - DNA, 19 bp, Homo sapiens
  siRNA target sequence for LOC63920 (NM_022090.2,940-958).
gcaggtacccttatcagat

SEQ ID NO: 382270 - DNA, 19 bp, Homo sapiens
  siRNA target sequence for LOC63920 (NM_022090.2,943-961).
ggtacccttatcagatgat

SEQ ID NO: 382271 - DNA, 19 bp, Homo sapiens
  siRNA target sequence for LOC63920 (NM_022090.2,956-974).
gatgatgtgatccattcta

SEQ ID NO: 382272 - DNA, 19 bp, Homo sapiens
  siRNA target sequence for LOC63920 (NM_022090.2,959-977).
gatgtgatccattctagaa

SEQ ID NO: 382273 - DNA, 19 bp, Homo sapiens
  siRNA target sequence for LOC63920 (NM_022090.2,983-1001).
gaaatgagccaggatatct

SEQ ID NO: 382274 - DNA, 19 bp, Homo sapiens
  siRNA target sequence for LOC63920 (NM_022090.2,1000-1018).
cttacagcaagttctagaa

SEQ ID NO: 382275 - DNA, 19 bp, Homo sapiens
  siRNA target sequence for LOC63920 (NM_022090.2,2025-2043).
gagctagtggccaaatcct

SEQ ID NO: 382276 - DNA, 19 bp, Homo sapiens
  siRNA target sequence for LOC63920 (NM_022090.2,2027-2045).
gctagtggccaaatcctaa

SEQ ID NO: 382277 - DNA, 19 bp, Homo sapiens
  siRNA target sequence for LOC63920 (NM_022090.2,2035-2053).
ccaaatcctaatggaattt

SEQ ID NO: 382278 - DNA, 19 bp, Homo sapiens
  siRNA target sequence for LOC63920 (NM_022090.2,2200-2218).
gtccagaagctgctttaat

SEQ ID NO: 382279 - DNA, 19 bp, Homo sapiens
  siRNA target sequence for LOC63920 (NM_022090.2,2228-2246).
gatatccgtgtggctattt

SEQ ID NO: 382280 - DNA, 19 bp, Homo sapiens
  siRNA target sequence for LOC63920 (NM_022090.2,2259-2277).
ctcgtttctcggacatcat

SEQ ID NO: 382281 - DNA, 19 bp, Homo sapiens
  siRNA target sequence for LOC63920 (NM_022090.2,2262-2280).
gtttctcggacatcattga

SEQ ID NO: 382282 - DNA, 19 bp, Homo sapiens
  siRNA target sequence for LOC63920 (NM_022090.2,2266-2284).
ctcggacatcattgaacaa

SEQ ID NO: 382283 - DNA, 19 bp, Homo sapiens
  siRNA target sequence for C20orf51 (NM_022099.2,683-701).
ctgattgcggaattttact

SEQ ID NO: 382284 - DNA, 19 bp, Homo sapiens
  siRNA target sequence for C20orf51 (NM_022099.2,685-703).
gattgcggaattttactct

SEQ ID NO: 382285 - DNA, 19 bp, Homo sapiens
  siRNA target sequence for C20orf51 (NM_022099.2,753-771).
cgctgcgcgtcccttgttt

SEQ ID NO: 382286 - DNA, 19 bp, Homo sapiens
  siRNA target sequence for FLJ22965 (NM_022101.2,87-105).
ctcgggaccgggaggaata

SEQ ID NO: 382287 - DNA, 19 bp, Homo sapiens
  siRNA target sequence for FLJ22965 (NM_022101.2,122-140).
cccctccatgtttactact

SEQ ID NO: 382288 - DNA, 19 bp, Homo sapiens
  siRNA target sequence for FLJ22965 (NM_022101.2,205-223).
ggaccggtcccgtgtgatt

SEQ ID NO: 382289 - DNA, 19 bp, Homo sapiens
  siRNA target sequence for FLJ22965 (NM_022101.2,220-238).
gattgatgctgccaaacat

SEQ ID NO: 382290 - DNA, 19 bp, Homo sapiens
  siRNA target sequence for FLJ22965 (NM_022101.2,230-248).
gccaaacatgcccataagt

SEQ ID NO: 382291 - DNA, 19 bp, Homo sapiens
  siRNA target sequence for FLJ22965 (NM_022101.2,232-250).
caaacatgcccataagttt

SEQ ID NO: 382292 - DNA, 19 bp, Homo sapiens
  siRNA target sequence for FLJ22965 (NM_022101.2,236-254).
catgcccataagttttgta

SEQ ID NO: 382293 - DNA, 19 bp, Homo sapiens
  siRNA target sequence for FLJ22965 (NM_022101.2,239-257).
gcccataagttttgtaaca

SEQ ID NO: 382294 - DNA, 19 bp, Homo sapiens
  siRNA target sequence for FLJ22965 (NM_022101.2,241-259).
ccataagttttgtaacaca

SEQ ID NO: 382295 - DNA, 19 bp, Homo sapiens
  siRNA target sequence for FLJ22965 (NM_022101.2,305-323).
cgacagtacaggaagaaat

SEQ ID NO: 382296 - DNA, 19 bp, Homo sapiens
  siRNA target sequence for FLJ22965 (NM_022101.2,333-351).
gtggactgccgctcttcta

SEQ ID NO: 382297 - DNA, 19 bp, Homo sapiens
  siRNA target sequence for FLJ22965 (NM_022101.2,338-356).
ctgccgctcttctaccaat

SEQ ID NO: 382298 - DNA, 19 bp, Homo sapiens
  siRNA target sequence for FLJ22965 (NM_022101.2,425-443).
gggaaaacgaacatatata

SEQ ID NO: 382299 - DNA, 19 bp, Homo sapiens
  siRNA target sequence for FLJ22965 (NM_022101.2,480-498).
ccaaacggaccaaagacat

SEQ ID NO: 382300 - DNA, 19 bp, Homo sapiens
  siRNA target sequence for FLJ22965 (NM_022101.2,494-512).
gacatgggcaagttcagtt

SEQ ID NO: 382301 - DNA, 19 bp, Homo sapiens
  siRNA target sequence for C6orf79 (NM_022102.1,588-606).
gagcgcaaaaggagagatt

SEQ ID NO: 382302 - DNA, 19 bp, Homo sapiens
  siRNA target sequence for C20orf67 (NM_022104.2,454-472).
gagaatcgtccctactact

SEQ ID NO: 382303 - DNA, 19 bp, Homo sapiens
  siRNA target sequence for C20orf67 (NM_022104.2,516-534).
ggggcagcacgatgtgatt

SEQ ID NO: 382304 - DNA, 19 bp, Homo sapiens
  siRNA target sequence for C20orf67 (NM_022104.2,517-535).
gggcagcacgatgtgattt

SEQ ID NO: 382305 - DNA, 19 bp, Homo sapiens
  siRNA target sequence for C20orf67 (NM_022104.2,647-665).
gcggcaatggtgtgaagaa

SEQ ID NO: 382306 - DNA, 19 bp, Homo sapiens
  siRNA target sequence for C20orf67 (NM_022104.2,753-771).
gggtacgtcccctgaagat

SEQ ID NO: 382307 - DNA, 19 bp, Homo sapiens
  siRNA target sequence for C20orf67 (NM_022104.2,754-772).
ggtacgtcccctgaagata

SEQ ID NO: 382308 - DNA, 19 bp, Homo sapiens
  siRNA target sequence for C20orf67 (NM_022104.2,755-773).
gtacgtcccctgaagataa

SEQ ID NO: 382309 - DNA, 19 bp, Homo sapiens
  siRNA target sequence for C20orf67 (NM_022104.2,758-776).
cgtcccctgaagataaaca

SEQ ID NO: 382310 - DNA, 19 bp, Homo sapiens
  siRNA target sequence for C20orf67 (NM_022104.2,967-985).
cctccacgggagtctttca

SEQ ID NO: 382311 - DNA, 19 bp, Homo sapiens
  siRNA target sequence for C20orf67 (NM_022104.2,968-986).
ctccacgggagtctttcaa

SEQ ID NO: 382312 - DNA, 19 bp, Homo sapiens
  siRNA target sequence for C20orf67 (NM_022104.2,1059-1077).
cgtgtcaccttccatgttt

SEQ ID NO: 382313 - DNA, 19 bp, Homo sapiens
  siRNA target sequence for C20orf67 (NM_022104.2,1067-1085).
cttccatgtttcgtgaaat

SEQ ID NO: 382314 - DNA, 19 bp, Homo sapiens
  siRNA target sequence for C20orf67 (NM_022104.2,1070-1088).
ccatgtttcgtgaaatcat

SEQ ID NO: 382315 - DNA, 19 bp, Homo sapiens
  siRNA target sequence for C20orf67 (NM_022104.2,1135-1153).
gccaagcgcctgctcttta

SEQ ID NO: 382316 - DNA, 19 bp, Homo sapiens
  siRNA target sequence for C20orf67 (NM_022104.2,1137-1155).
caagcgcctgctctttaaa

SEQ ID NO: 382317 - DNA, 19 bp, Homo sapiens
  siRNA target sequence for C20orf67 (NM_022104.2,1271-1289).
cctccaaggaggactacat

SEQ ID NO: 382318 - DNA, 19 bp, Homo sapiens
  siRNA target sequence for C20orf67 (NM_022104.2,1361-1379).
gcatctgcagtaagatcta

SEQ ID NO: 382319 - DNA, 19 bp, Homo sapiens
  siRNA target sequence for C20orf67 (NM_022104.2,1600-1618).
gtcagccgcaactacttca

SEQ ID NO: 382320 - DNA, 19 bp, Homo sapiens
  siRNA target sequence for C20orf67 (NM_022104.2,1640-1658).
gctacagctgcattgatga

SEQ ID NO: 382321 - DNA, 19 bp, Homo sapiens
  siRNA target sequence for C20orf67 (NM_022104.2,1702-1720).
cgacggtaccagatgatgt

SEQ ID NO: 382322 - DNA, 19 bp, Homo sapiens
  siRNA target sequence for C20orf67 (NM_022104.2,1703-1721).
gacggtaccagatgatgtt

SEQ ID NO: 382323 - DNA, 19 bp, Homo sapiens
  siRNA target sequence for C20orf67 (NM_022104.2,1869-1887).
cgacacagacggctacttt

SEQ ID NO: 382324 - DNA, 19 bp, Homo sapiens
  siRNA target sequence for C20orf67 (NM_022104.2,1916-1934).
ctccactgagtggttcatt

SEQ ID NO: 382325 - DNA, 19 bp, Homo sapiens
  siRNA target sequence for DATF1 (NM_022105.2,577-595).
gaaaacatggggttttcga

SEQ ID NO: 382326 - DNA, 19 bp, Homo sapiens
  siRNA target sequence for DATF1 (NM_022105.2,1270-1288).
ccgaccgaagcctgaatgt

SEQ ID NO: 382327 - DNA, 19 bp, Homo sapiens
  siRNA target sequence for DATF1 (NM_022105.2,1301-1319).
cccaacgccctgtattgca

SEQ ID NO: 382328 - DNA, 19 bp, Homo sapiens
  siRNA target sequence for DATF1 (NM_022105.2,1302-1320).
ccaacgccctgtattgcat

SEQ ID NO: 382329 - DNA, 19 bp, Homo sapiens
  siRNA target sequence for DATF1 (NM_022105.2,1303-1321).
caacgccctgtattgcatt

SEQ ID NO: 382330 - DNA, 19 bp, Homo sapiens
  siRNA target sequence for DATF1 (NM_022105.2,1331-1349).
cctcacaacaacaggttta

SEQ ID NO: 382331 - DNA, 19 bp, Homo sapiens
  siRNA target sequence for DATF1 (NM_022105.2,1363-1381).
ccgctgtgaagaatggttt

SEQ ID NO: 382332 - DNA, 19 bp, Homo sapiens
  siRNA target sequence for DATF1 (NM_022105.2,1410-1428).
ctcgagggaggcttttgga

SEQ ID NO: 382333 - DNA, 19 bp, Homo sapiens
  siRNA target sequence for DATF1 (NM_022105.2,1412-1430).
cgagggaggcttttggaaa

SEQ ID NO: 382334 - DNA, 19 bp, Homo sapiens
  siRNA target sequence for DATF1 (NM_022105.2,1417-1435).
gaggcttttggaaaggaat

SEQ ID NO: 382335 - DNA, 19 bp, Homo sapiens
  siRNA target sequence for DATF1 (NM_022105.2,1431-1449).
ggaatggggaagactatat

SEQ ID NO: 382336 - DNA, 19 bp, Homo sapiens
  siRNA target sequence for DATF1 (NM_022105.2,1475-1493).
gtgcaggatgagactcatt

SEQ ID NO: 382337 - DNA, 19 bp, Homo sapiens
  siRNA target sequence for DATF1 (NM_022105.2,1477-1495).
gcaggatgagactcattca

SEQ ID NO: 382338 - DNA, 19 bp, Homo sapiens
  siRNA target sequence for DATF1 (NM_022105.2,1481-1499).
gatgagactcattcagaaa

SEQ ID NO: 382339 - DNA, 19 bp, Homo sapiens
  siRNA target sequence for DATF1 (NM_022105.2,1538-1556).
gctgatggcaccgattgta

SEQ ID NO: 382340 - DNA, 19 bp, Homo sapiens
  siRNA target sequence for DATF1 (NM_022105.2,1541-1559).
gatggcaccgattgtacaa

SEQ ID NO: 382341 - DNA, 19 bp, Homo sapiens
  siRNA target sequence for DATF1 (NM_022105.2,1544-1562).
ggcaccgattgtacaagta

SEQ ID NO: 382342 - DNA, 19 bp, Homo sapiens
  siRNA target sequence for DATF1 (NM_022105.2,1545-1563).
gcaccgattgtacaagtat

SEQ ID NO: 382343 - DNA, 19 bp, Homo sapiens
  siRNA target sequence for DATF1 (NM_022105.2,1549-1567).
cgattgtacaagtatagga

SEQ ID NO: 382344 - DNA, 19 bp, Homo sapiens
  siRNA target sequence for DATF1 (NM_022105.2,1550-1568).
gattgtacaagtataggaa

SEQ ID NO: 382345 - DNA, 19 bp, Homo sapiens
  siRNA target sequence for DATF1 (NM_022105.2,1554-1572).
gtacaagtataggaacaat

SEQ ID NO: 382346 - DNA, 19 bp, Homo sapiens
  siRNA target sequence for DATF1 (NM_022105.2,1557-1575).
caagtataggaacaataga

SEQ ID NO: 382347 - DNA, 19 bp, Homo sapiens
  siRNA target sequence for DATF1 (NM_022105.2,1587-1605).
gcgaagaccaagggataaa

SEQ ID NO: 382348 - DNA, 19 bp, Homo sapiens
  siRNA target sequence for DATF1 (NM_022105.2,1675-1693).
ggcgcctggtgcctcaaaa

SEQ ID NO: 382349 - DNA, 19 bp, Homo sapiens
  siRNA target sequence for DATF1 (NM_022105.2,1732-1750).
ctcggtgtactgcagtaat

SEQ ID NO: 382350 - DNA, 19 bp, Homo sapiens
  siRNA target sequence for DATF1 (NM_022105.2,1766-1784).
cacgccgcagcgacaatga

SEQ ID NO: 382351 - DNA, 19 bp, Homo sapiens
  siRNA target sequence for DATF1 (NM_022105.2,1769-1787).
gccgcagcgacaatgaagt

SEQ ID NO: 382352 - DNA, 19 bp, Homo sapiens
  siRNA target sequence for DATF1 (NM_022105.2,1770-1788).
ccgcagcgacaatgaagtt

SEQ ID NO: 382353 - DNA, 19 bp, Homo sapiens
  siRNA target sequence for DATF1 (NM_022105.2,1771-1789).
cgcagcgacaatgaagttt

SEQ ID NO: 382354 - DNA, 19 bp, Homo sapiens
  siRNA target sequence for DATF1 (NM_022105.2,1773-1791).
cagcgacaatgaagtttct

SEQ ID NO: 382355 - DNA, 19 bp, Homo sapiens
  siRNA target sequence for DATF1 (NM_022105.2,1786-1804).
gtttctaagctcaggtaaa

SEQ ID NO: 382356 - DNA, 19 bp, Homo sapiens
  siRNA target sequence for DATF1 (NM_022105.2,2016-2034).
cgtgggcgagcgatcacaa

SEQ ID NO: 382357 - DNA, 19 bp, Homo sapiens
  siRNA target sequence for DATF1 (NM_022105.2,2017-2035).
gtgggcgagcgatcacaat

SEQ ID NO: 382358 - DNA, 19 bp, Homo sapiens
  siRNA target sequence for DATF1 (NM_022105.2,2019-2037).
gggcgagcgatcacaatta

SEQ ID NO: 382359 - DNA, 19 bp, Homo sapiens
  siRNA target sequence for DATF1 (NM_022105.2,2021-2039).
gcgagcgatcacaattaca

SEQ ID NO: 382360 - DNA, 19 bp, Homo sapiens
  siRNA target sequence for DATF1 (NM_022105.2,2022-2040).
cgagcgatcacaattacaa

SEQ ID NO: 382361 - DNA, 19 bp, Homo sapiens
  siRNA target sequence for DATF1 (NM_022105.2,2023-2041).
gagcgatcacaattacaat

SEQ ID NO: 382362 - DNA, 19 bp, Homo sapiens
  siRNA target sequence for DATF1 (NM_022105.2,2070-2088).
cctcgccgtcactgttgta

SEQ ID NO: 382363 - DNA, 19 bp, Homo sapiens
  siRNA target sequence for DATF1 (NM_022105.2,2071-2089).
ctcgccgtcactgttgtat

SEQ ID NO: 382364 - DNA, 19 bp, Homo sapiens
  siRNA target sequence for DATF1 (NM_022105.2,2073-2091).
cgccgtcactgttgtataa

SEQ ID NO: 382365 - DNA, 19 bp, Homo sapiens
  siRNA target sequence for DATF1 (NM_022105.2,2074-2092).
gccgtcactgttgtataaa

SEQ ID NO: 382366 - DNA, 19 bp, Homo sapiens
  siRNA target sequence for DATF1 (NM_022105.2,2075-2093).
ccgtcactgttgtataaat

SEQ ID NO: 382367 - DNA, 19 bp, Homo sapiens
  siRNA target sequence for DATF1 (NM_022105.2,2123-2141).
gacccctcccgttctttct

SEQ ID NO: 382368 - DNA, 19 bp, Homo sapiens
  siRNA target sequence for C20orf177 (NM_022106.1,244-262).
gctggcccatcttggaata

SEQ ID NO: 382369 - DNA, 19 bp, Homo sapiens
  siRNA target sequence for C20orf177 (NM_022106.1,245-263).
ctggcccatcttggaataa

SEQ ID NO: 382370 - DNA, 19 bp, Homo sapiens
  siRNA target sequence for C20orf177 (NM_022106.1,248-266).
gcccatcttggaataaagt

SEQ ID NO: 382371 - DNA, 19 bp, Homo sapiens
  siRNA target sequence for C20orf177 (NM_022106.1,265-283).
gtgcaacattcaaagaatt

SEQ ID NO: 382372 - DNA, 19 bp, Homo sapiens
  siRNA target sequence for C20orf177 (NM_022106.1,449-467).
cagggaataaactgtttct

SEQ ID NO: 382373 - DNA, 19 bp, Homo sapiens
  siRNA target sequence for C20orf177 (NM_022106.1,453-471).
gaataaactgtttcttgat

SEQ ID NO: 382374 - DNA, 19 bp, Homo sapiens
  siRNA target sequence for C20orf177 (NM_022106.1,466-484).
cttgattttcagtcaatga

SEQ ID NO: 382375 - DNA, 19 bp, Homo sapiens
  siRNA target sequence for C20orf177 (NM_022106.1,526-544).
ctctctgattcggaaagaa

SEQ ID NO: 382376 - DNA, 19 bp, Homo sapiens
  siRNA target sequence for C20orf177 (NM_022106.1,567-585).
cacacctccagatctcaat

SEQ ID NO: 382377 - DNA, 19 bp, Homo sapiens
  siRNA target sequence for C20orf177 (NM_022106.1,628-646).
cctggtcagggccatacaa

SEQ ID NO: 382378 - DNA, 19 bp, Homo sapiens
  siRNA target sequence for C20orf177 (NM_022106.1,629-647).
ctggtcagggccatacaaa

SEQ ID NO: 382379 - DNA, 19 bp, Homo sapiens
  siRNA target sequence for C20orf177 (NM_022106.1,638-656).
gccatacaaaacctgaata

SEQ ID NO: 382380 - DNA, 19 bp, Homo sapiens
  siRNA target sequence for C20orf177 (NM_022106.1,640-658).
catacaaaacctgaatact

SEQ ID NO: 382381 - DNA, 19 bp, Homo sapiens
  siRNA target sequence for C20orf177 (NM_022106.1,649-667).
cctgaatactattatccta

SEQ ID NO: 382382 - DNA, 19 bp, Homo sapiens
  siRNA target sequence for C20orf177 (NM_022106.1,650-668).
ctgaatactattatcctaa

SEQ ID NO: 382383 - DNA, 19 bp, Homo sapiens
  siRNA target sequence for C20orf177 (NM_022106.1,764-782).
gacttcttgggaagtatat

SEQ ID NO: 382384 - DNA, 19 bp, Homo sapiens
  siRNA target sequence for C20orf177 (NM_022106.1,769-787).
cttgggaagtatatcgata

SEQ ID NO: 382385 - DNA, 19 bp, Homo sapiens
  siRNA target sequence for C20orf177 (NM_022106.1,773-791).
ggaagtatatcgatagact

SEQ ID NO: 382386 - DNA, 19 bp, Homo sapiens
  siRNA target sequence for C20orf177 (NM_022106.1,774-792).
gaagtatatcgatagactt

SEQ ID NO: 382387 - DNA, 19 bp, Homo sapiens
  siRNA target sequence for C20orf177 (NM_022106.1,777-795).
gtatatcgatagacttatt

SEQ ID NO: 382388 - DNA, 19 bp, Homo sapiens
  siRNA target sequence for C20orf177 (NM_022106.1,903-921).
gagaagtaagctaattgct

SEQ ID NO: 382389 - DNA, 19 bp, Homo sapiens
  siRNA target sequence for C20orf177 (NM_022106.1,977-995).
cccgaaagaaagcttttca

SEQ ID NO: 382390 - DNA, 19 bp, Homo sapiens
  siRNA target sequence for C20orf177 (NM_022106.1,1003-1021).
gaaatccacccatcacatt

SEQ ID NO: 382391 - DNA, 19 bp, Homo sapiens
  siRNA target sequence for C20orf177 (NM_022106.1,1013-1031).
catcacattatgcatttga

SEQ ID NO: 382392 - DNA, 19 bp, Homo sapiens
  siRNA target sequence for C20orf177 (NM_022106.1,1037-1055).
cccctagacccattgatgt

SEQ ID NO: 382393 - DNA, 19 bp, Homo sapiens
  siRNA target sequence for C20orf177 (NM_022106.1,1057-1075).
cttggtggtaccaggtttt

SEQ ID NO: 382394 - DNA, 19 bp, Homo sapiens
  siRNA target sequence for C20orf177 (NM_022106.1,1060-1078).
ggtggtaccaggttttgtt

SEQ ID NO: 382395 - DNA, 19 bp, Homo sapiens
  siRNA target sequence for C20orf177 (NM_022106.1,1323-1341).
cactgtatcgagtgagaaa

SEQ ID NO: 382396 - DNA, 19 bp, Homo sapiens
  siRNA target sequence for C20orf177 (NM_022106.1,1352-1370).
caaacggagtaaagcaaaa

SEQ ID NO: 382397 - DNA, 19 bp, Homo sapiens
  siRNA target sequence for C20orf177 (NM_022106.1,1356-1374).
cggagtaaagcaaaacaca

SEQ ID NO: 382398 - DNA, 19 bp, Homo sapiens
  siRNA target sequence for C20orf177 (NM_022106.1,1357-1375).
ggagtaaagcaaaacacat

SEQ ID NO: 382399 - DNA, 19 bp, Homo sapiens
  siRNA target sequence for GOLPH3 (NM_022130.3,505-523).
cgcgagggttacacatcat

SEQ ID NO: 382400 - DNA, 19 bp, Homo sapiens
  siRNA target sequence for GOLPH3 (NM_022130.3,506-524).
gcgagggttacacatcatt

SEQ ID NO: 382401 - DNA, 19 bp, Homo sapiens
  siRNA target sequence for GOLPH3 (NM_022130.3,507-525).
cgagggttacacatcattt

SEQ ID NO: 382402 - DNA, 19 bp, Homo sapiens
  siRNA target sequence for GOLPH3 (NM_022130.3,508-526).
gagggttacacatcatttt

SEQ ID NO: 382403 - DNA, 19 bp, Homo sapiens
  siRNA target sequence for GOLPH3 (NM_022130.3,521-539).
cattttggaatgactgtat

SEQ ID NO: 382404 - DNA, 19 bp, Homo sapiens
  siRNA target sequence for GOLPH3 (NM_022130.3,547-565).
ggattacgtggctgtatgt

SEQ ID NO: 382405 - DNA, 19 bp, Homo sapiens
  siRNA target sequence for GOLPH3 (NM_022130.3,548-566).
gattacgtggctgtatgtt

SEQ ID NO: 382406 - DNA, 19 bp, Homo sapiens
  siRNA target sequence for GOLPH3 (NM_022130.3,557-575).
gctgtatgttaattgaatt

SEQ ID NO: 382407 - DNA, 19 bp, Homo sapiens
  siRNA target sequence for GOLPH3 (NM_022130.3,582-600).
gagaggaaggttacaacta

SEQ ID NO: 382408 - DNA, 19 bp, Homo sapiens
  siRNA target sequence for GOLPH3 (NM_022130.3,584-602).
gaggaaggttacaactaga

SEQ ID NO: 382409 - DNA, 19 bp, Homo sapiens
  siRNA target sequence for GOLPH3 (NM_022130.3,611-629).
gaatgagacgtaaaagtct

SEQ ID NO: 382410 - DNA, 19 bp, Homo sapiens
  siRNA target sequence for GOLPH3 (NM_022130.3,615-633).
gagacgtaaaagtctatta

SEQ ID NO: 382411 - DNA, 19 bp, Homo sapiens
  siRNA target sequence for GOLPH3 (NM_022130.3,628-646).
ctattaacaagaaaggtaa

SEQ ID NO: 382412 - DNA, 19 bp, Homo sapiens
  siRNA target sequence for GOLPH3 (NM_022130.3,665-683).
caacaggggatgttcttct

SEQ ID NO: 382413 - DNA, 19 bp, Homo sapiens
  siRNA target sequence for GOLPH3 (NM_022130.3,729-747).
ggtccagaactggattgaa

SEQ ID NO: 382414 - DNA, 19 bp, Homo sapiens
  siRNA target sequence for GOLPH3 (NM_022130.3,757-775).
ggtgagacatggaatccat

SEQ ID NO: 382415 - DNA, 19 bp, Homo sapiens
  siRNA target sequence for GOLPH3 (NM_022130.3,783-801).
gcattatcagttaagaaat

SEQ ID NO: 382416 - DNA, 19 bp, Homo sapiens
  siRNA target sequence for GOLPH3 (NM_022130.3,797-815).
gaaatgtacgggaacgatt

SEQ ID NO: 382417 - DNA, 19 bp, Homo sapiens
  siRNA target sequence for GOLPH3 (NM_022130.3,802-820).
gtacgggaacgattagcta

SEQ ID NO: 382418 - DNA, 19 bp, Homo sapiens
  siRNA target sequence for GOLPH3 (NM_022130.3,805-823).
cgggaacgattagctaaaa

SEQ ID NO: 382419 - DNA, 19 bp, Homo sapiens
  siRNA target sequence for GOLPH3 (NM_022130.3,831-849).
ggaaaagggtgtattgaca

SEQ ID NO: 382420 - DNA, 19 bp, Homo sapiens
  siRNA target sequence for GOLPH3 (NM_022130.3,889-907).
catcccctcaccaataaca

SEQ ID NO: 382421 - DNA, 19 bp, Homo sapiens
  siRNA target sequence for GOLPH3 (NM_022130.3,918-936).
gcgcctcatcaagaaagta

SEQ ID NO: 382422 - DNA, 19 bp, Homo sapiens
  siRNA target sequence for GOLPH3 (NM_022130.3,1026-1044).
cgtcctggagaatgctttt

SEQ ID NO: 382423 - DNA, 19 bp, Homo sapiens
  siRNA target sequence for GOLPH3 (NM_022130.3,1091-1109).
ggcagcttctcgacttaga

SEQ ID NO: 382424 - DNA, 19 bp, Homo sapiens
  siRNA target sequence for SAMSN1 (NM_022136.2,181-199).
gattagattggatactctt

SEQ ID NO: 382425 - DNA, 19 bp, Homo sapiens
  siRNA target sequence for SAMSN1 (NM_022136.2,211-229).
gggtagatccagcacttta

SEQ ID NO: 382426 - DNA, 19 bp, Homo sapiens
  siRNA target sequence for SAMSN1 (NM_022136.2,212-230).
ggtagatccagcactttaa

SEQ ID NO: 382427 - DNA, 19 bp, Homo sapiens
  siRNA target sequence for SAMSN1 (NM_022136.2,235-253).
ctgcaacttggaagataaa

SEQ ID NO: 382428 - DNA, 19 bp, Homo sapiens
  siRNA target sequence for SAMSN1 (NM_022136.2,238-256).
caacttggaagataaatta

SEQ ID NO: 382429 - DNA, 19 bp, Homo sapiens
  siRNA target sequence for SAMSN1 (NM_022136.2,261-279).
ggtatgaaggtgaagctta

SEQ ID NO: 382430 - DNA, 19 bp, Homo sapiens
  siRNA target sequence for SAMSN1 (NM_022136.2,386-404).
cacacacgtctcaagtctt

SEQ ID NO: 382431 - DNA, 19 bp, Homo sapiens
  siRNA target sequence for SAMSN1 (NM_022136.2,402-420).
cttcctgctcagatatgga

SEQ ID NO: 382432 - DNA, 19 bp, Homo sapiens
  siRNA target sequence for SAMSN1 (NM_022136.2,460-478).
cgatcgttttcggaataat

SEQ ID NO: 382433 - DNA, 19 bp, Homo sapiens
  siRNA target sequence for SAMSN1 (NM_022136.2,461-479).
gatcgttttcggaataatt

SEQ ID NO: 382434 - DNA, 19 bp, Homo sapiens
  siRNA target sequence for SAMSN1 (NM_022136.2,464-482).
cgttttcggaataattctt

SEQ ID NO: 382435 - DNA, 19 bp, Homo sapiens
  siRNA target sequence for SAMSN1 (NM_022136.2,465-483).
gttttcggaataattcttt

SEQ ID NO: 382436 - DNA, 19 bp, Homo sapiens
  siRNA target sequence for SAMSN1 (NM_022136.2,567-585).
gaggcggtttgggtaaaaa

SEQ ID NO: 382437 - DNA, 19 bp, Homo sapiens
  siRNA target sequence for SAMSN1 (NM_022136.2,593-611).
gctatttcatggacaatga

SEQ ID NO: 382438 - DNA, 19 bp, Homo sapiens
  siRNA target sequence for SAMSN1 (NM_022136.2,674-692).
gagaatgcccacccatata

SEQ ID NO: 382439 - DNA, 19 bp, Homo sapiens
  siRNA target sequence for SAMSN1 (NM_022136.2,676-694).
gaatgcccacccatataga

SEQ ID NO: 382440 - DNA, 19 bp, Homo sapiens
  siRNA target sequence for SAMSN1 (NM_022136.2,680-698).
gcccacccatatagaaaca

SEQ ID NO: 382441 - DNA, 19 bp, Homo sapiens
  siRNA target sequence for SAMSN1 (NM_022136.2,682-700).
ccacccatatagaaacagt

SEQ ID NO: 382442 - DNA, 19 bp, Homo sapiens
  siRNA target sequence for SAMSN1 (NM_022136.2,743-761).
gccagtgactccatggata

SEQ ID NO: 382443 - DNA, 19 bp, Homo sapiens
  siRNA target sequence for SAMSN1 (NM_022136.2,747-765).
gtgactccatggatagtct

SEQ ID NO: 382444 - DNA, 19 bp, Homo sapiens
  siRNA target sequence for SAMSN1 (NM_022136.2,781-799).
ctcatcaagtggcataaca

SEQ ID NO: 382445 - DNA, 19 bp, Homo sapiens
  siRNA target sequence for SAMSN1 (NM_022136.2,793-811).
cataacaagctgttcagat

SEQ ID NO: 382446 - DNA, 19 bp, Homo sapiens
  siRNA target sequence for SAMSN1 (NM_022136.2,802-820).
ctgttcagatggtacaagt

SEQ ID NO: 382447 - DNA, 19 bp, Homo sapiens
  siRNA target sequence for SAMSN1 (NM_022136.2,917-935).
gacactgactccctcaaaa

SEQ ID NO: 382448 - DNA, 19 bp, Homo sapiens
  siRNA target sequence for SAMSN1 (NM_022136.2,987-1005).
ggacaggaatgttgaacaa

SEQ ID NO: 382449 - DNA, 19 bp, Homo sapiens
  siRNA target sequence for SAMSN1 (NM_022136.2,1079-1097).
gcaaaccgaaggagtaaca

SEQ ID NO: 382450 - DNA, 19 bp, Homo sapiens
  siRNA target sequence for SAMSN1 (NM_022136.2,1123-1141).
gttcctagagaggattcat

SEQ ID NO: 382451 - DNA, 19 bp, Homo sapiens
  siRNA target sequence for SAMSN1 (NM_022136.2,1147-1165).
ggaatacacctcaacactt

SEQ ID NO: 382452 - DNA, 19 bp, Homo sapiens
  siRNA target sequence for SAMSN1 (NM_022136.2,1148-1166).
gaatacacctcaacacttt

SEQ ID NO: 382453 - DNA, 19 bp, Homo sapiens
  siRNA target sequence for SAMSN1 (NM_022136.2,1176-1194).
gttatgagactctagaaga

SEQ ID NO: 382454 - DNA, 19 bp, Homo sapiens
  siRNA target sequence for SAMSN1 (NM_022136.2,1183-1201).
gactctagaagatttaaaa

SEQ ID NO: 382455 - DNA, 19 bp, Homo sapiens
  siRNA target sequence for SAMSN1 (NM_022136.2,1250-1268).
gacagaagaaggttactat

SEQ ID NO: 382456 - DNA, 19 bp, Homo sapiens
  siRNA target sequence for SAMSN1 (NM_022136.2,1252-1270).
cagaagaaggttactatca

SEQ ID NO: 382457 - DNA, 19 bp, Homo sapiens
  siRNA target sequence for SAMSN1 (NM_022136.2,1388-1406).
gactctggttgctatatct

SEQ ID NO: 382458 - DNA, 19 bp, Homo sapiens
  siRNA target sequence for SAMSN1 (NM_022136.2,1399-1417).
ctatatctcatcaggaaat

SEQ ID NO: 382459 - DNA, 19 bp, Homo sapiens
  siRNA target sequence for SAMSN1 (NM_022136.2,1405-1423).
ctcatcaggaaattcagat

SEQ ID NO: 382460 - DNA, 19 bp, Homo sapiens
  siRNA target sequence for SAMSN1 (NM_022136.2,1458-1476).
ctgacatggtacataagat

SEQ ID NO: 382461 - DNA, 19 bp, Homo sapiens
  siRNA target sequence for SAMSN1 (NM_022136.2,1460-1478).
gacatggtacataagatta

SEQ ID NO: 382462 - DNA, 19 bp, Homo sapiens
  siRNA target sequence for SAMSN1 (NM_022136.2,1466-1484).
gtacataagattattatca

SEQ ID NO: 382463 - DNA, 19 bp, Homo sapiens
  siRNA target sequence for ELSPBP1 (NM_022142.3,198-216).
cttctctattcctatgagt

SEQ ID NO: 382464 - DNA, 19 bp, Homo sapiens
  siRNA target sequence for ELSPBP1 (NM_022142.3,275-293).
cttcacttgcacccatatt

SEQ ID NO: 382465 - DNA, 19 bp, Homo sapiens
  siRNA target sequence for ELSPBP1 (NM_022142.3,283-301).
gcacccatattcatagctt

SEQ ID NO: 382466 - DNA, 19 bp, Homo sapiens
  siRNA target sequence for ELSPBP1 (NM_022142.3,316-334).
ccaccagagccgtgtacaa

SEQ ID NO: 382467 - DNA, 19 bp, Homo sapiens
  siRNA target sequence for ELSPBP1 (NM_022142.3,363-381).
gattacccacgctgtatct

SEQ ID NO: 382468 - DNA, 19 bp, Homo sapiens
  siRNA target sequence for ELSPBP1 (NM_022142.3,396-414).
cgaggaaaggcttataaca

SEQ ID NO: 382469 - DNA, 19 bp, Homo sapiens
  siRNA target sequence for ELSPBP1 (NM_022142.3,490-508).
ggaaattctgtgaaacgaa

SEQ ID NO: 382470 - DNA, 19 bp, Homo sapiens
  siRNA target sequence for ELSPBP1 (NM_022142.3,548-566).
cccctccatctacagaaat

SEQ ID NO: 382471 - DNA, 19 bp, Homo sapiens
  siRNA target sequence for ELSPBP1 (NM_022142.3,549-567).
ccctccatctacagaaata

SEQ ID NO: 382472 - DNA, 19 bp, Homo sapiens
  siRNA target sequence for ELSPBP1 (NM_022142.3,553-571).
ccatctacagaaataatgt

SEQ ID NO: 382473 - DNA, 19 bp, Homo sapiens
  siRNA target sequence for ELSPBP1 (NM_022142.3,700-718).
gtcactttccgttcaacta

SEQ ID NO: 382474 - DNA, 19 bp, Homo sapiens
  siRNA target sequence for ELSPBP1 (NM_022142.3,702-720).
cactttccgttcaactata

SEQ ID NO: 382475 - DNA, 19 bp, Homo sapiens
  siRNA target sequence for ELSPBP1 (NM_022142.3,708-726).
ccgttcaactataaaaaca

SEQ ID NO: 382476 - DNA, 19 bp, Homo sapiens
  siRNA target sequence for ELSPBP1 (NM_022142.3,771-789).
gtgtggtgtgcaacttctt

SEQ ID NO: 382477 - DNA, 19 bp, Homo sapiens
  siRNA target sequence for ELSPBP1 (NM_022142.3,775-793).
ggtgtgcaacttcttacaa

SEQ ID NO: 382478 - DNA, 19 bp, Homo sapiens
  siRNA target sequence for LRRC4 (NM_022143.3,709-727).
cttttgaggggctgttcaa

SEQ ID NO: 382479 - DNA, 19 bp, Homo sapiens
  siRNA target sequence for LRRC4 (NM_022143.3,892-910).
cacaggtcagcctgattga

SEQ ID NO: 382480 - DNA, 19 bp, Homo sapiens
  siRNA target sequence for LRRC4 (NM_022143.3,903-921).
ctgattgagcggaatgctt

SEQ ID NO: 382481 - DNA, 19 bp, Homo sapiens
  siRNA target sequence for LRRC4 (NM_022143.3,937-955).
cacttgtggaactcaactt

SEQ ID NO: 382482 - DNA, 19 bp, Homo sapiens
  siRNA target sequence for LRRC4 (NM_022143.3,1073-1091).
ctggtggcttcgagagtat

SEQ ID NO: 382483 - DNA, 19 bp, Homo sapiens
  siRNA target sequence for LRRC4 (NM_022143.3,1076-1094).
gtggcttcgagagtatata

SEQ ID NO: 382484 - DNA, 19 bp, Homo sapiens
  siRNA target sequence for LRRC4 (NM_022143.3,1086-1104).
gagtatatacccaccaatt

SEQ ID NO: 382485 - DNA, 19 bp, Homo sapiens
  siRNA target sequence for LRRC4 (NM_022143.3,1210-1228).
cacctcgagacctcaacat

SEQ ID NO: 382486 - DNA, 19 bp, Homo sapiens
  siRNA target sequence for LRRC4 (NM_022143.3,1235-1253).
gggtcggatggcagaactt

SEQ ID NO: 382487 - DNA, 19 bp, Homo sapiens
  siRNA target sequence for LRRC4 (NM_022143.3,1239-1257).
cggatggcagaacttaagt

SEQ ID NO: 382488 - DNA, 19 bp, Homo sapiens
  siRNA target sequence for LRRC4 (NM_022143.3,1352-1370).
cgacggcaccttgaacttt

SEQ ID NO: 382489 - DNA, 19 bp, Homo sapiens
  siRNA target sequence for LRRC4 (NM_022143.3,1353-1371).
gacggcaccttgaactttt

SEQ ID NO: 382490 - DNA, 19 bp, Homo sapiens
  siRNA target sequence for LRRC4 (NM_022143.3,1389-1407).
gacactggggtgtacacat

SEQ ID NO: 382491 - DNA, 19 bp, Homo sapiens
  siRNA target sequence for LRRC4 (NM_022143.3,1539-1557).
gacacaacgcgaaagtaca

SEQ ID NO: 382492 - DNA, 19 bp, Homo sapiens
  siRNA target sequence for LRRC4 (NM_022143.3,1581-1599).
ggttaccagccggcatata

SEQ ID NO: 382493 - DNA, 19 bp, Homo sapiens
  siRNA target sequence for LRRC4 (NM_022143.3,1606-1624).
ctaccacggtgctcattca

SEQ ID NO: 382494 - DNA, 19 bp, Homo sapiens
  siRNA target sequence for LRRC4 (NM_022143.3,1758-1776).
gccgccatgttgattgtct

SEQ ID NO: 382495 - DNA, 19 bp, Homo sapiens
  siRNA target sequence for LRRC4 (NM_022143.3,1759-1777).
ccgccatgttgattgtctt

SEQ ID NO: 382496 - DNA, 19 bp, Homo sapiens
  siRNA target sequence for LRRC4 (NM_022143.3,2032-2050).
ccactatctctgaacctta

SEQ ID NO: 382497 - DNA, 19 bp, Homo sapiens
  siRNA target sequence for LRRC4 (NM_022143.3,2033-2051).
cactatctctgaaccttat

SEQ ID NO: 382498 - DNA, 19 bp, Homo sapiens
  siRNA target sequence for LRRC4 (NM_022143.3,2035-2053).
ctatctctgaaccttatat

SEQ ID NO: 382499 - DNA, 19 bp, Homo sapiens
  siRNA target sequence for LRRC4 (NM_022143.3,2039-2057).
ctctgaaccttatataatt

SEQ ID NO: 382500 - DNA, 19 bp, Homo sapiens
  siRNA target sequence for LRRC4 (NM_022143.3,2041-2059).
ctgaaccttatataattca

SEQ ID NO: 382501 - DNA, 19 bp, Homo sapiens
  siRNA target sequence for FKSG14 (NM_022145.2,267-285).
gaatcaggaggatctagat

SEQ ID NO: 382502 - DNA, 19 bp, Homo sapiens
  siRNA target sequence for FKSG14 (NM_022145.2,277-295).
gatctagatccggatagta

SEQ ID NO: 382503 - DNA, 19 bp, Homo sapiens
  siRNA target sequence for FKSG14 (NM_022145.2,280-298).
ctagatccggatagtacta

SEQ ID NO: 382504 - DNA, 19 bp, Homo sapiens
  siRNA target sequence for FKSG14 (NM_022145.2,304-322).
gtgggagatgttacaaata

SEQ ID NO: 382505 - DNA, 19 bp, Homo sapiens
  siRNA target sequence for FKSG14 (NM_022145.2,308-326).
gagatgttacaaatactga

SEQ ID NO: 382506 - DNA, 19 bp, Homo sapiens
  siRNA target sequence for FKSG14 (NM_022145.2,427-445).
gctcagctatcattgttaa

SEQ ID NO: 382507 - DNA, 19 bp, Homo sapiens
  siRNA target sequence for FKSG14 (NM_022145.2,428-446).
ctcagctatcattgttaat

SEQ ID NO: 382508 - DNA, 19 bp, Homo sapiens
  siRNA target sequence for FKSG14 (NM_022145.2,516-534).
gactgaagacgttctcata

SEQ ID NO: 382509 - DNA, 19 bp, Homo sapiens
  siRNA target sequence for FKSG14 (NM_022145.2,525-543).
cgttctcataacattagga

SEQ ID NO: 382510 - DNA, 19 bp, Homo sapiens
  siRNA target sequence for FKSG14 (NM_022145.2,526-544).
gttctcataacattaggaa

SEQ ID NO: 382511 - DNA, 19 bp, Homo sapiens
  siRNA target sequence for FKSG14 (NM_022145.2,666-684).
gataatggaatctcttaat

SEQ ID NO: 382512 - DNA, 19 bp, Homo sapiens
  siRNA target sequence for FKSG14 (NM_022145.2,672-690).
ggaatctcttaatgtacta

SEQ ID NO: 382513 - DNA, 19 bp, Homo sapiens
  siRNA target sequence for FKSG14 (NM_022145.2,685-703).
gtactacacagtgaattga

SEQ ID NO: 382514 - DNA, 19 bp, Homo sapiens
  siRNA target sequence for FKSG14 (NM_022145.2,695-713).
gtgaattgaaaaataaggt

SEQ ID NO: 382515 - DNA, 19 bp, Homo sapiens
  siRNA target sequence for FKSG14 (NM_022145.2,797-815).
gtaccttgggcgagtttct

SEQ ID NO: 382516 - DNA, 19 bp, Homo sapiens
  siRNA target sequence for FKSG14 (NM_022145.2,832-850).
ctgcctgatagaagtgtta

SEQ ID NO: 382517 - DNA, 19 bp, Homo sapiens
  siRNA target sequence for FKSG14 (NM_022145.2,881-899).
ctgtaaacctgataacact

SEQ ID NO: 382518 - DNA, 19 bp, Homo sapiens
  siRNA target sequence for FKSG14 (NM_022145.2,896-914).
cactgcatgaaatgttaga

SEQ ID NO: 382519 - DNA, 19 bp, Homo sapiens
  siRNA target sequence for FKSG14 (NM_022145.2,904-922).
gaaatgttagagattctta

SEQ ID NO: 382520 - DNA, 19 bp, Homo sapiens
  siRNA target sequence for FKSG14 (NM_022145.2,943-961).
ccacatgatccatatgtca

SEQ ID NO: 382521 - DNA, 19 bp, Homo sapiens
  siRNA target sequence for FKSG14 (NM_022145.2,996-1014).
gctgctgctgcgtaatgga

SEQ ID NO: 382522 - DNA, 19 bp, Homo sapiens
  siRNA target sequence for FKSG14 (NM_022145.2,999-1017).
gctgctgcgtaatggaatt

SEQ ID NO: 382523 - DNA, 19 bp, Homo sapiens
  siRNA target sequence for FKSG14 (NM_022145.2,1033-1051).
gaagatccaacccgaataa

SEQ ID NO: 382524 - DNA, 19 bp, Homo sapiens
  siRNA target sequence for FKSG14 (NM_022145.2,1036-1054).
gatccaacccgaataagat

SEQ ID NO: 382525 - DNA, 19 bp, Homo sapiens
  siRNA target sequence for FKSG14 (NM_022145.2,1040-1058).
caacccgaataagattaga

SEQ ID NO: 382526 - DNA, 19 bp, Homo sapiens
  siRNA target sequence for MAGEF1 (NM_022149.3,480-498).
cggagatggtgaaatacgt

SEQ ID NO: 382527 - DNA, 19 bp, Homo sapiens
  siRNA target sequence for MAGEF1 (NM_022149.3,481-499).
ggagatggtgaaatacgtt

SEQ ID NO: 382528 - DNA, 19 bp, Homo sapiens
  siRNA target sequence for MAGEF1 (NM_022149.3,482-500).
gagatggtgaaatacgtta

SEQ ID NO: 382529 - DNA, 19 bp, Homo sapiens
  siRNA target sequence for MAGEF1 (NM_022149.3,484-502).
gatggtgaaatacgttatt

SEQ ID NO: 382530 - DNA, 19 bp, Homo sapiens
  siRNA target sequence for MAGEF1 (NM_022149.3,487-505).
ggtgaaatacgttattgga

SEQ ID NO: 382531 - DNA, 19 bp, Homo sapiens
  siRNA target sequence for MAGEF1 (NM_022149.3,550-568).
gcatctgcggtatgtcttt

SEQ ID NO: 382532 - DNA, 19 bp, Homo sapiens
  siRNA target sequence for MAGEF1 (NM_022149.3,554-572).
ctgcggtatgtctttggtt

SEQ ID NO: 382533 - DNA, 19 bp, Homo sapiens
  siRNA target sequence for MAGEF1 (NM_022149.3,569-587).
ggttttgagctgaaacagt

SEQ ID NO: 382534 - DNA, 19 bp, Homo sapiens
  siRNA target sequence for MAGEF1 (NM_022149.3,673-691).
ccccagattgggtctgtta

SEQ ID NO: 382535 - DNA, 19 bp, Homo sapiens
  siRNA target sequence for MAGEF1 (NM_022149.3,674-692).
cccagattgggtctgttaa

SEQ ID NO: 382536 - DNA, 19 bp, Homo sapiens
  siRNA target sequence for MAGEF1 (NM_022149.3,675-693).
ccagattgggtctgttaat

SEQ ID NO: 382537 - DNA, 19 bp, Homo sapiens
  siRNA target sequence for MAGEF1 (NM_022149.3,697-715).
gatcctgggccttatctat

SEQ ID NO: 382538 - DNA, 19 bp, Homo sapiens
  siRNA target sequence for MAGEF1 (NM_022149.3,701-719).
ctgggccttatctatatga

SEQ ID NO: 382539 - DNA, 19 bp, Homo sapiens
  siRNA target sequence for MAGEF1 (NM_022149.3,770-788).
ggggtgcaaccctcaaagt

SEQ ID NO: 382540 - DNA, 19 bp, Homo sapiens
  siRNA target sequence for MAGEF1 (NM_022149.3,772-790).
ggtgcaaccctcaaagtat

SEQ ID NO: 382541 - DNA, 19 bp, Homo sapiens
  siRNA target sequence for MAGEF1 (NM_022149.3,776-794).
caaccctcaaagtatcatt

SEQ ID NO: 382542 - DNA, 19 bp, Homo sapiens
  siRNA target sequence for MAGEF1 (NM_022149.3,805-823).
gtatccgaagaggcttatt

SEQ ID NO: 382543 - DNA, 19 bp, Homo sapiens
  siRNA target sequence for MAGEF1 (NM_022149.3,842-860).
cagcgatatctcagttaca

SEQ ID NO: 382544 - DNA, 19 bp, Homo sapiens
  siRNA target sequence for MAGEF1 (NM_022149.3,874-892).
caccaatccaccagaatat

SEQ ID NO: 382545 - DNA, 19 bp, Homo sapiens
  siRNA target sequence for MAGEF1 (NM_022149.3,876-894).
ccaatccaccagaatatga

SEQ ID NO: 382546 - DNA, 19 bp, Homo sapiens
  siRNA target sequence for MOAP1 (NM_022151.3,412-430).
cctcggaaagcgctattga

SEQ ID NO: 382547 - DNA, 19 bp, Homo sapiens
  siRNA target sequence for MOAP1 (NM_022151.3,413-431).
ctcggaaagcgctattgat

SEQ ID NO: 382548 - DNA, 19 bp, Homo sapiens
  siRNA target sequence for MOAP1 (NM_022151.3,452-470).
gcagtgtggcagaaatcga

SEQ ID NO: 382549 - DNA, 19 bp, Homo sapiens
  siRNA target sequence for MOAP1 (NM_022151.3,474-492).
ggctctgcaggctggttta

SEQ ID NO: 382550 - DNA, 19 bp, Homo sapiens
  siRNA target sequence for MOAP1 (NM_022151.3,649-667).
cctgacccagataatacat

SEQ ID NO: 382551 - DNA, 19 bp, Homo sapiens
  siRNA target sequence for MOAP1 (NM_022151.3,650-668).
ctgacccagataatacatt

SEQ ID NO: 382552 - DNA, 19 bp, Homo sapiens
  siRNA target sequence for MOAP1 (NM_022151.3,652-670).
gacccagataatacatttt

SEQ ID NO: 382553 - DNA, 19 bp, Homo sapiens
  siRNA target sequence for MOAP1 (NM_022151.3,654-672).
cccagataatacattttta

SEQ ID NO: 382554 - DNA, 19 bp, Homo sapiens
  siRNA target sequence for MOAP1 (NM_022151.3,769-787).
ggcatgatcccggaaatgt

SEQ ID NO: 382555 - DNA, 19 bp, Homo sapiens
  siRNA target sequence for MOAP1 (NM_022151.3,829-847).
gccctgcaatgcttgaagt

SEQ ID NO: 382556 - DNA, 19 bp, Homo sapiens
  siRNA target sequence for MOAP1 (NM_022151.3,830-848).
ccctgcaatgcttgaagta

SEQ ID NO: 382557 - DNA, 19 bp, Homo sapiens
  siRNA target sequence for MOAP1 (NM_022151.3,831-849).
cctgcaatgcttgaagtat

SEQ ID NO: 382558 - DNA, 19 bp, Homo sapiens
  siRNA target sequence for MOAP1 (NM_022151.3,832-850).
ctgcaatgcttgaagtata

SEQ ID NO: 382559 - DNA, 19 bp, Homo sapiens
  siRNA target sequence for MOAP1 (NM_022151.3,907-925).
ggacgctggatgtttcata

SEQ ID NO: 382560 - DNA, 19 bp, Homo sapiens
  siRNA target sequence for MOAP1 (NM_022151.3,910-928).
cgctggatgtttcatacta

SEQ ID NO: 382561 - DNA, 19 bp, Homo sapiens
  siRNA target sequence for MOAP1 (NM_022151.3,912-930).
ctggatgtttcatactact

SEQ ID NO: 382562 - DNA, 19 bp, Homo sapiens
  siRNA target sequence for MOAP1 (NM_022151.3,922-940).
catactactcagatgataa

SEQ ID NO: 382563 - DNA, 19 bp, Homo sapiens
  siRNA target sequence for MOAP1 (NM_022151.3,966-984).
gaagagaaggcgattgcta

SEQ ID NO: 382564 - DNA, 19 bp, Homo sapiens
  siRNA target sequence for MOAP1 (NM_022151.3,995-1013).
gaggcccagcacttgatgt

SEQ ID NO: 382565 - DNA, 19 bp, Homo sapiens
  siRNA target sequence for MOAP1 (NM_022151.3,999-1017).
cccagcacttgatgttatt

SEQ ID NO: 382566 - DNA, 19 bp, Homo sapiens
  siRNA target sequence for MOAP1 (NM_022151.3,1024-1042).
ctcaagataaacaatcctt

SEQ ID NO: 382567 - DNA, 19 bp, Homo sapiens
  siRNA target sequence for MOAP1 (NM_022151.3,1029-1047).
gataaacaatcctttaatt

SEQ ID NO: 382568 - DNA, 19 bp, Homo sapiens
  siRNA target sequence for MOAP1 (NM_022151.3,1155-1173).
gttgtcggcttatgtacta

SEQ ID NO: 382569 - DNA, 19 bp, Homo sapiens
  siRNA target sequence for MOAP1 (NM_022151.3,1200-1218).
ggtacagagaggagcaatt

SEQ ID NO: 382570 - DNA, 19 bp, Homo sapiens
  siRNA target sequence for MOAP1 (NM_022151.3,1265-1283).
gggcagtccacaaaacaat

SEQ ID NO: 382571 - DNA, 19 bp, Homo sapiens
  siRNA target sequence for MOAP1 (NM_022151.3,1266-1284).
ggcagtccacaaaacaatt

SEQ ID NO: 382572 - DNA, 19 bp, Homo sapiens
  siRNA target sequence for MOAP1 (NM_022151.3,1322-1340).
ctggtttcttgcagttatt

SEQ ID NO: 382573 - DNA, 19 bp, Homo sapiens
  siRNA target sequence for MOAP1 (NM_022151.3,1325-1343).
gtttcttgcagttattggt

SEQ ID NO: 382574 - DNA, 19 bp, Homo sapiens
  siRNA target sequence for MOAP1 (NM_022151.3,1382-1400).
cccttctccaggcaatatt

SEQ ID NO: 382575 - DNA, 19 bp, Homo sapiens
  siRNA target sequence for MOAP1 (NM_022151.3,1392-1410).
ggcaatattggaaggtaat

SEQ ID NO: 382576 - DNA, 19 bp, Homo sapiens
  siRNA target sequence for MOAP1 (NM_022151.3,1393-1411).
gcaatattggaaggtaatt

SEQ ID NO: 382577 - DNA, 19 bp, Homo sapiens
  siRNA target sequence for PP1201 (NM_022152.3,404-422).
ctgtggccatcattgctat

SEQ ID NO: 382578 - DNA, 19 bp, Homo sapiens
  siRNA target sequence for PP1201 (NM_022152.3,461-479).
gaaatgtggctgtctacta

SEQ ID NO: 382579 - DNA, 19 bp, Homo sapiens
  siRNA target sequence for PP1201 (NM_022152.3,544-562).
cgtttcccatggaacatca

SEQ ID NO: 382580 - DNA, 19 bp, Homo sapiens
  siRNA target sequence for PP1201 (NM_022152.3,545-563).
gtttcccatggaacatcat

SEQ ID NO: 382581 - DNA, 19 bp, Homo sapiens
  siRNA target sequence for PP1201 (NM_022152.3,565-583).
ctgctgaccctttttactt

SEQ ID NO: 382582 - DNA, 19 bp, Homo sapiens
  siRNA target sequence for PP1201 (NM_022152.3,604-622).
ggcaccatttccagtatgt

SEQ ID NO: 382583 - DNA, 19 bp, Homo sapiens
  siRNA target sequence for PP1201 (NM_022152.3,605-623).
gcaccatttccagtatgta

SEQ ID NO: 382584 - DNA, 19 bp, Homo sapiens
  siRNA target sequence for PP1201 (NM_022152.3,614-632).
ccagtatgtaccaaaccaa

SEQ ID NO: 382585 - DNA, 19 bp, Homo sapiens
  siRNA target sequence for PP1201 (NM_022152.3,637-655).
gtcatcattgcaatgatca

SEQ ID NO: 382586 - DNA, 19 bp, Homo sapiens
  siRNA target sequence for PP1201 (NM_022152.3,657-675).
cactgcggtggtatccatt

SEQ ID NO: 382587 - DNA, 19 bp, Homo sapiens
  siRNA target sequence for PP1201 (NM_022152.3,662-680).
cggtggtatccatttcagt

SEQ ID NO: 382588 - DNA, 19 bp, Homo sapiens
  siRNA target sequence for PP1201 (NM_022152.3,776-794).
ctagcattgtgctctactt

SEQ ID NO: 382589 - DNA, 19 bp, Homo sapiens
  siRNA target sequence for PP1201 (NM_022152.3,786-804).
gctctacttccaatacgtt

SEQ ID NO: 382590 - DNA, 19 bp, Homo sapiens
  siRNA target sequence for LIN7B (NM_022165.1,526-544).
gctggttgtccgttacaca

SEQ ID NO: 382591 - DNA, 19 bp, Homo sapiens
  siRNA target sequence for TCTA (NM_022171.1,501-519).
gcaaacgaacctctcaaaa

SEQ ID NO: 382592 - DNA, 19 bp, Homo sapiens
  siRNA target sequence for C11orf24 (NM_022338.1,415-433).
cttgtgctcatttggattt

SEQ ID NO: 382593 - DNA, 19 bp, Homo sapiens
  siRNA target sequence for C11orf24 (NM_022338.1,468-486).
caacgatccacgcaacttt

SEQ ID NO: 382594 - DNA, 19 bp, Homo sapiens
  siRNA target sequence for C11orf24 (NM_022338.1,479-497).
gcaactttgtccctaacaa

SEQ ID NO: 382595 - DNA, 19 bp, Homo sapiens
  siRNA target sequence for C11orf24 (NM_022338.1,480-498).
caactttgtccctaacaaa

SEQ ID NO: 382596 - DNA, 19 bp, Homo sapiens
  siRNA target sequence for C11orf24 (NM_022338.1,613-631).
gcagcccacctcaactcta

SEQ ID NO: 382597 - DNA, 19 bp, Homo sapiens
  siRNA target sequence for C11orf24 (NM_022338.1,1191-1209).
ccagcctgtggttaacaca

SEQ ID NO: 382598 - DNA, 19 bp, Homo sapiens
  siRNA target sequence for C11orf24 (NM_022338.1,1493-1511).
gctcagggggcactaagat

SEQ ID NO: 382599 - DNA, 19 bp, Homo sapiens
  siRNA target sequence for C11orf24 (NM_022338.1,1584-1602).
ggccgtggtagacaaaact

SEQ ID NO: 382600 - DNA, 19 bp, Homo sapiens
  siRNA target sequence for C11orf24 (NM_022338.1,1703-1721).
cccaggtggactacttaat

SEQ ID NO: 382601 - DNA, 19 bp, Homo sapiens
  siRNA target sequence for C11orf24 (NM_022338.1,1705-1723).
caggtggactacttaatca

SEQ ID NO: 382602 - DNA, 19 bp, Homo sapiens
  siRNA target sequence for PDF (NM_022341.1,687-705).
gctgcctgtttattgacaa

SEQ ID NO: 382603 - DNA, 19 bp, Homo sapiens
  siRNA target sequence for PDF (NM_022341.1,710-728).
gacagcaggacgttcacaa

SEQ ID NO: 382604 - DNA, 19 bp, Homo sapiens
  siRNA target sequence for NJMU-R1 (NM_022344.1,253-271).
ccttggcagatactaatct

SEQ ID NO: 382605 - DNA, 19 bp, Homo sapiens
  siRNA target sequence for NJMU-R1 (NM_022344.1,254-272).
cttggcagatactaatcta

SEQ ID NO: 382606 - DNA, 19 bp, Homo sapiens
  siRNA target sequence for NJMU-R1 (NM_022344.1,289-307).
cagagctgcgcagtttcat

SEQ ID NO: 382607 - DNA, 19 bp, Homo sapiens
  siRNA target sequence for NJMU-R1 (NM_022344.1,305-323).
cattgctaagcgtctttca

SEQ ID NO: 382608 - DNA, 19 bp, Homo sapiens
  siRNA target sequence for NJMU-R1 (NM_022344.1,382-400).
gttaccgagttggttgtta

SEQ ID NO: 382609 - DNA, 19 bp, Homo sapiens
  siRNA target sequence for NJMU-R1 (NM_022344.1,387-405).
cgagttggttgttattact

SEQ ID NO: 382610 - DNA, 19 bp, Homo sapiens
  siRNA target sequence for NJMU-R1 (NM_022344.1,435-453).
gaaacagtaacgatagact

SEQ ID NO: 382611 - DNA, 19 bp, Homo sapiens
  siRNA target sequence for NJMU-R1 (NM_022344.1,445-463).
cgatagactctgaacgtaa

SEQ ID NO: 382612 - DNA, 19 bp, Homo sapiens
  siRNA target sequence for NJMU-R1 (NM_022344.1,460-478).
gtaacccttcagaatatgt

SEQ ID NO: 382613 - DNA, 19 bp, Homo sapiens
  siRNA target sequence for NJMU-R1 (NM_022344.1,523-541).
ggcttgaattggacaagta

SEQ ID NO: 382614 - DNA, 19 bp, Homo sapiens
  siRNA target sequence for NJMU-R1 (NM_022344.1,616-634).
gctggtttgaggatgttgt

SEQ ID NO: 382615 - DNA, 19 bp, Homo sapiens
  siRNA target sequence for NJMU-R1 (NM_022344.1,617-635).
ctggtttgaggatgttgta

SEQ ID NO: 382616 - DNA, 19 bp, Homo sapiens
  siRNA target sequence for NJMU-R1 (NM_022344.1,630-648).
gttgtatgcccaatccaaa

SEQ ID NO: 382617 - DNA, 19 bp, Homo sapiens
  siRNA target sequence for NJMU-R1 (NM_022344.1,640-658).
caatccaaagggttgttct

SEQ ID NO: 382618 - DNA, 19 bp, Homo sapiens
  siRNA target sequence for NJMU-R1 (NM_022344.1,649-667).
gggttgttcttctctttca

SEQ ID NO: 382619 - DNA, 19 bp, Homo sapiens
  siRNA target sequence for NJMU-R1 (NM_022344.1,686-704).
gctacatgctgctttgagt

SEQ ID NO: 382620 - DNA, 19 bp, Homo sapiens
  siRNA target sequence for NJMU-R1 (NM_022344.1,690-708).
catgctgctttgagttaca

SEQ ID NO: 382621 - DNA, 19 bp, Homo sapiens
  siRNA target sequence for NJMU-R1 (NM_022344.1,701-719).
gagttacactcctgttgaa

SEQ ID NO: 382622 - DNA, 19 bp, Homo sapiens
  siRNA target sequence for NJMU-R1 (NM_022344.1,776-794).
cagtcttcaaggacttatt

SEQ ID NO: 382623 - DNA, 19 bp, Homo sapiens
  siRNA target sequence for NJMU-R1 (NM_022344.1,917-935).
ggattggatgcaagctttt

SEQ ID NO: 382624 - DNA, 19 bp, Homo sapiens
  siRNA target sequence for DIO3OS (NM_022345.2,663-681).
cctccactggcctcttgaa

SEQ ID NO: 382625 - DNA, 19 bp, Homo sapiens
  siRNA target sequence for IFRG15 (NM_022347.1,3-21).
gttttcagataattcacat

SEQ ID NO: 382626 - DNA, 19 bp, Homo sapiens
  siRNA target sequence for IFRG15 (NM_022347.1,42-60).
gtggttccctagtttagaa

SEQ ID NO: 382627 - DNA, 19 bp, Homo sapiens
  siRNA target sequence for IFRG15 (NM_022347.1,44-62).
ggttccctagtttagaact

SEQ ID NO: 382628 - DNA, 19 bp, Homo sapiens
  siRNA target sequence for IFRG15 (NM_022347.1,45-63).
gttccctagtttagaacta

SEQ ID NO: 382629 - DNA, 19 bp, Homo sapiens
  siRNA target sequence for IFRG15 (NM_022347.1,64-82).
ggccactggttgtaccaaa

SEQ ID NO: 382630 - DNA, 19 bp, Homo sapiens
  siRNA target sequence for IFRG15 (NM_022347.1,69-87).
ctggttgtaccaaactgaa

SEQ ID NO: 382631 - DNA, 19 bp, Homo sapiens
  siRNA target sequence for IFRG15 (NM_022347.1,72-90).
gttgtaccaaactgaactt

SEQ ID NO: 382632 - DNA, 19 bp, Homo sapiens
  siRNA target sequence for IFRG15 (NM_022347.1,75-93).
gtaccaaactgaacttgtt

SEQ ID NO: 382633 - DNA, 19 bp, Homo sapiens
  siRNA target sequence for IFRG15 (NM_022347.1,112-130).
gtattcttagaccgtatta

SEQ ID NO: 382634 - DNA, 19 bp, Homo sapiens
  siRNA target sequence for IFRG15 (NM_022347.1,117-135).
cttagaccgtattaacaga

SEQ ID NO: 382635 - DNA, 19 bp, Homo sapiens
  siRNA target sequence for IFRG15 (NM_022347.1,160-178).
cctgataatcctgctaata

SEQ ID NO: 382636 - DNA, 19 bp, Homo sapiens
  siRNA target sequence for IFRG15 (NM_022347.1,163-181).
gataatcctgctaatagaa

SEQ ID NO: 382637 - DNA, 19 bp, Homo sapiens
  siRNA target sequence for IFRG15 (NM_022347.1,173-191).
ctaatagaagccttgttct

SEQ ID NO: 382638 - DNA, 19 bp, Homo sapiens
  siRNA target sequence for IFRG15 (NM_022347.1,234-252).
cagatggacctttgagaaa

SEQ ID NO: 382639 - DNA, 19 bp, Homo sapiens
  siRNA target sequence for IFRG15 (NM_022347.1,274-292).
ggtcctccactggttagaa

SEQ ID NO: 382640 - DNA, 19 bp, Homo sapiens
  siRNA target sequence for IFRG15 (NM_022347.1,320-338).
gttttaaccctgcattaca

SEQ ID NO: 382641 - DNA, 19 bp, Homo sapiens
  siRNA target sequence for IFRG15 (NM_022347.1,328-346).
cctgcattacagttaatct

SEQ ID NO: 382642 - DNA, 19 bp, Homo sapiens
  siRNA target sequence for IFRG15 (NM_022347.1,329-347).
ctgcattacagttaatctt

SEQ ID NO: 382643 - DNA, 19 bp, Homo sapiens
  siRNA target sequence for SPATA1 (NM_022354.1,198-216).
gataattatcccattcaga

SEQ ID NO: 382644 - DNA, 19 bp, Homo sapiens
  siRNA target sequence for SPATA1 (NM_022354.1,208-226).
ccattcagacattagtgaa

SEQ ID NO: 382645 - DNA, 19 bp, Homo sapiens
  siRNA target sequence for SPATA1 (NM_022354.1,298-316).
gatcatggaactataagct

SEQ ID NO: 382646 - DNA, 19 bp, Homo sapiens
  siRNA target sequence for SPATA1 (NM_022354.1,301-319).
catggaactataagctaaa

SEQ ID NO: 382647 - DNA, 19 bp, Homo sapiens
  siRNA target sequence for SPATA1 (NM_022354.1,314-332).
gctaaataccatttcaaca

SEQ ID NO: 382648 - DNA, 19 bp, Homo sapiens
  siRNA target sequence for SPATA1 (NM_022354.1,422-440).
cctgggtgaagatgctatt

SEQ ID NO: 382649 - DNA, 19 bp, Homo sapiens
  siRNA target sequence for SPATA1 (NM_022354.1,425-443).
gggtgaagatgctattgca

SEQ ID NO: 382650 - DNA, 19 bp, Homo sapiens
  siRNA target sequence for SPATA1 (NM_022354.1,573-591).
gtaatggaccatttaggaa

SEQ ID NO: 382651 - DNA, 19 bp, Homo sapiens
  siRNA target sequence for SPATA1 (NM_022354.1,578-596).
ggaccatttaggaaatgtt

SEQ ID NO: 382652 - DNA, 19 bp, Homo sapiens
  siRNA target sequence for SPATA1 (NM_022354.1,607-625).
caacagttattttagatga

SEQ ID NO: 382653 - DNA, 19 bp, Homo sapiens
  siRNA target sequence for SPATA1 (NM_022354.1,621-639).
gatgagcggcagactaata

SEQ ID NO: 382654 - DNA, 19 bp, Homo sapiens
  siRNA target sequence for SPATA1 (NM_022354.1,626-644).
gcggcagactaataatggt

SEQ ID NO: 382655 - DNA, 19 bp, Homo sapiens
  siRNA target sequence for SPATA1 (NM_022354.1,632-650).
gactaataatggtgttaat

SEQ ID NO: 382656 - DNA, 19 bp, Homo sapiens
  siRNA target sequence for SPATA1 (NM_022354.1,673-691).
gaccaattagtgtaacttt

SEQ ID NO: 382657 - DNA, 19 bp, Homo sapiens
  siRNA target sequence for SPATA1 (NM_022354.1,675-693).
ccaattagtgtaactttgt

SEQ ID NO: 382658 - DNA, 19 bp, Homo sapiens
  siRNA target sequence for SPATA1 (NM_022354.1,712-730).
gagatcccagtttgttaga

SEQ ID NO: 382659 - DNA, 19 bp, Homo sapiens
  siRNA target sequence for SPATA1 (NM_022354.1,719-737).
cagtttgttagaaaacact

SEQ ID NO: 382660 - DNA, 19 bp, Homo sapiens
  siRNA target sequence for SPATA1 (NM_022354.1,837-855).
ccaggatcattggaagatt

SEQ ID NO: 382661 - DNA, 19 bp, Homo sapiens
  siRNA target sequence for SPATA1 (NM_022354.1,848-866).
ggaagattcaaataatgat

SEQ ID NO: 382662 - DNA, 19 bp, Homo sapiens
  siRNA target sequence for SPATA1 (NM_022354.1,864-882).
gattgctttggcactaaaa

SEQ ID NO: 382663 - DNA, 19 bp, Homo sapiens
  siRNA target sequence for SPATA1 (NM_022354.1,908-926).
gatacagctatcagtagaa

SEQ ID NO: 382664 - DNA, 19 bp, Homo sapiens
  siRNA target sequence for TFB2M (NM_022366.1,180-198).
gcgctggtcgcttttgcat

SEQ ID NO: 382665 - DNA, 19 bp, Homo sapiens
  siRNA target sequence for TFB2M (NM_022366.1,181-199).
cgctggtcgcttttgcatt

SEQ ID NO: 382666 - DNA, 19 bp, Homo sapiens
  siRNA target sequence for TFB2M (NM_022366.1,182-200).
gctggtcgcttttgcattt

SEQ ID NO: 382667 - DNA, 19 bp, Homo sapiens
  siRNA target sequence for TFB2M (NM_022366.1,183-201).
ctggtcgcttttgcatttt

SEQ ID NO: 382668 - DNA, 19 bp, Homo sapiens
  siRNA target sequence for TFB2M (NM_022366.1,212-230).
gcggcgacgcgaaagcatt

SEQ ID NO: 382669 - DNA, 19 bp, Homo sapiens
  siRNA target sequence for TFB2M (NM_022366.1,213-231).
cggcgacgcgaaagcattt

SEQ ID NO: 382670 - DNA, 19 bp, Homo sapiens
  siRNA target sequence for TFB2M (NM_022366.1,318-336).
ctaaggccagcttagactt

SEQ ID NO: 382671 - DNA, 19 bp, Homo sapiens
  siRNA target sequence for TFB2M (NM_022366.1,332-350).
gactttaagcgttacgtaa

SEQ ID NO: 382672 - DNA, 19 bp, Homo sapiens
  siRNA target sequence for TFB2M (NM_022366.1,368-386).
gagaccctggcgcaaatct

SEQ ID NO: 382673 - DNA, 19 bp, Homo sapiens
  siRNA target sequence for TFB2M (NM_022366.1,370-388).
gaccctggcgcaaatctat

SEQ ID NO: 382674 - DNA, 19 bp, Homo sapiens
  siRNA target sequence for TFB2M (NM_022366.1,372-390).
ccctggcgcaaatctattt

SEQ ID NO: 382675 - DNA, 19 bp, Homo sapiens
  siRNA target sequence for TFB2M (NM_022366.1,451-469).
gactcaggcattacttgaa

SEQ ID NO: 382676 - DNA, 19 bp, Homo sapiens
  siRNA target sequence for TFB2M (NM_022366.1,490-508).
gctcgaaagtgacaaaact

SEQ ID NO: 382677 - DNA, 19 bp, Homo sapiens
  siRNA target sequence for TFB2M (NM_022366.1,491-509).
ctcgaaagtgacaaaactt

SEQ ID NO: 382678 - DNA, 19 bp, Homo sapiens
  siRNA target sequence for TFB2M (NM_022366.1,518-536).
catttggagtccttaggaa

SEQ ID NO: 382679 - DNA, 19 bp, Homo sapiens
  siRNA target sequence for TFB2M (NM_022366.1,594-612).
gaagtggtggagtaataaa

SEQ ID NO: 382680 - DNA, 19 bp, Homo sapiens
  siRNA target sequence for TFB2M (NM_022366.1,627-645).
cttctcgagggctctttaa

SEQ ID NO: 382681 - DNA, 19 bp, Homo sapiens
  siRNA target sequence for TFB2M (NM_022366.1,632-650).
cgagggctctttaagaatt

SEQ ID NO: 382682 - DNA, 19 bp, Homo sapiens
  siRNA target sequence for TFB2M (NM_022366.1,682-700).
catccctttaaaagtagtt

SEQ ID NO: 382683 - DNA, 19 bp, Homo sapiens
  siRNA target sequence for TFB2M (NM_022366.1,709-727).
cccaagtagaggtgagaaa

SEQ ID NO: 382684 - DNA, 19 bp, Homo sapiens
  siRNA target sequence for TFB2M (NM_022366.1,746-764).
gcatatgacttgtattcct

SEQ ID NO: 382685 - DNA, 19 bp, Homo sapiens
  siRNA target sequence for TFB2M (NM_022366.1,786-804).
gacgaatagaagtaaatat

SEQ ID NO: 382686 - DNA, 19 bp, Homo sapiens
  siRNA target sequence for TFB2M (NM_022366.1,788-806).
cgaatagaagtaaatatgt

SEQ ID NO: 382687 - DNA, 19 bp, Homo sapiens
  siRNA target sequence for TFB2M (NM_022366.1,838-856).
ggcagatcccggaaatcca

SEQ ID NO: 382688 - DNA, 19 bp, Homo sapiens
  siRNA target sequence for TFB2M (NM_022366.1,854-872).
ccagacttgtatcatgtat

SEQ ID NO: 382689 - DNA, 19 bp, Homo sapiens
  siRNA target sequence for TFB2M (NM_022366.1,859-877).
cttgtatcatgtattaagt

SEQ ID NO: 382690 - DNA, 19 bp, Homo sapiens
  siRNA target sequence for TFB2M (NM_022366.1,878-896).
gttatctggcaattagctt

SEQ ID NO: 382691 - DNA, 19 bp, Homo sapiens
  siRNA target sequence for TFB2M (NM_022366.1,887-905).
caattagcttgtgagatta

SEQ ID NO: 382692 - DNA, 19 bp, Homo sapiens
  siRNA target sequence for TFB2M (NM_022366.1,970-988).
cccaaagcgtagggaatta

SEQ ID NO: 382693 - DNA, 19 bp, Homo sapiens
  siRNA target sequence for TFB2M (NM_022366.1,971-989).
ccaaagcgtagggaattat

SEQ ID NO: 382694 - DNA, 19 bp, Homo sapiens
  siRNA target sequence for TFB2M (NM_022366.1,972-990).
caaagcgtagggaattatt

SEQ ID NO: 382695 - DNA, 19 bp, Homo sapiens
  siRNA target sequence for TFB2M (NM_022366.1,981-999).
gggaattattagaccaatt

SEQ ID NO: 382696 - DNA, 19 bp, Homo sapiens
  siRNA target sequence for TFB2M (NM_022366.1,982-1000).
ggaattattagaccaatta

SEQ ID NO: 382697 - DNA, 19 bp, Homo sapiens
  siRNA target sequence for TFB2M (NM_022366.1,1027-1045).
gattcctcgtcaaaattta

SEQ ID NO: 382698 - DNA, 19 bp, Homo sapiens
  siRNA target sequence for TFB2M (NM_022366.1,1057-1075).
cttaacacctatgaactat

SEQ ID NO: 382699 - DNA, 19 bp, Homo sapiens
  siRNA target sequence for TFB2M (NM_022366.1,1065-1083).
ctatgaactataatatatt

SEQ ID NO: 382700 - DNA, 19 bp, Homo sapiens
  siRNA target sequence for TFB2M (NM_022366.1,1113-1131).
ggcgcagcgccactgtaat

SEQ ID NO: 382701 - DNA, 19 bp, Homo sapiens
  siRNA target sequence for TFB2M (NM_022366.1,1127-1145).
gtaatagaccacttacgtt

SEQ ID NO: 382702 - DNA, 19 bp, Homo sapiens
  siRNA target sequence for TFB2M (NM_022366.1,1135-1153).
ccacttacgttcattgact

SEQ ID NO: 382703 - DNA, 19 bp, Homo sapiens
  siRNA target sequence for TFB2M (NM_022366.1,1154-1172).
ccacttgatgcgagagata

SEQ ID NO: 382704 - DNA, 19 bp, Homo sapiens
  siRNA target sequence for TFB2M (NM_022366.1,1155-1173).
cacttgatgcgagagatat

SEQ ID NO: 382705 - DNA, 19 bp, Homo sapiens
  siRNA target sequence for TFB2M (NM_022366.1,1263-1281).
ccaaagattgtgcttataa

SEQ ID NO: 382706 - DNA, 19 bp, Homo sapiens
  siRNA target sequence for TFB2M (NM_022366.1,1275-1293).
cttataaatggctgtatga

SEQ ID NO: 382707 - DNA, 19 bp, Homo sapiens
  siRNA target sequence for PJA1 (NM_022368.2,337-355).
ggagggtatcagtccaata

SEQ ID NO: 382708 - DNA, 19 bp, Homo sapiens
  siRNA target sequence for PJA1 (NM_022368.2,548-566).
cgggaaccaacctgaatat

SEQ ID NO: 382709 - DNA, 19 bp, Homo sapiens
  siRNA target sequence for PJA1 (NM_022368.2,551-569).
gaaccaacctgaatattga

SEQ ID NO: 382710 - DNA, 19 bp, Homo sapiens
  siRNA target sequence for PJA1 (NM_022368.2,554-572).
ccaacctgaatattgataa

SEQ ID NO: 382711 - DNA, 19 bp, Homo sapiens
  siRNA target sequence for PJA1 (NM_022368.2,555-573).
caacctgaatattgataat

SEQ ID NO: 382712 - DNA, 19 bp, Homo sapiens
  siRNA target sequence for PJA1 (NM_022368.2,574-592).
gaggactattccagtactt

SEQ ID NO: 382713 - DNA, 19 bp, Homo sapiens
  siRNA target sequence for PJA1 (NM_022368.2,602-620).
gggataccgccaatgacaa

SEQ ID NO: 382714 - DNA, 19 bp, Homo sapiens
  siRNA target sequence for PJA1 (NM_022368.2,603-621).
ggataccgccaatgacaat

SEQ ID NO: 382715 - DNA, 19 bp, Homo sapiens
  siRNA target sequence for PJA1 (NM_022368.2,654-672).
gagaggcgagagttcaagt

SEQ ID NO: 382716 - DNA, 19 bp, Homo sapiens
  siRNA target sequence for PJA1 (NM_022368.2,674-692).
gctatcccgagccaaagta

SEQ ID NO: 382717 - DNA, 19 bp, Homo sapiens
  siRNA target sequence for PJA1 (NM_022368.2,714-732).
gaggagtgaccaagtgaaa

SEQ ID NO: 382718 - DNA, 19 bp, Homo sapiens
  siRNA target sequence for PJA1 (NM_022368.2,782-800).
ggacgcacagtgatgatta

SEQ ID NO: 382719 - DNA, 19 bp, Homo sapiens
  siRNA target sequence for PJA1 (NM_022368.2,848-866).
ctgctctgcgtcggaaata

SEQ ID NO: 382720 - DNA, 19 bp, Homo sapiens
  siRNA target sequence for PJA1 (NM_022368.2,853-871).
ctgcgtcggaaatatcgaa

SEQ ID NO: 382721 - DNA, 19 bp, Homo sapiens
  siRNA target sequence for PJA1 (NM_022368.2,1561-1579).
ctgccgtgccaccactatt

SEQ ID NO: 382722 - DNA, 19 bp, Homo sapiens
  siRNA target sequence for FLJ12541 (NM_022369.2,318-336).
gcctggcctcgctgtcaat

SEQ ID NO: 382723 - DNA, 19 bp, Homo sapiens
  siRNA target sequence for FLJ12541 (NM_022369.2,322-340).
ggcctcgctgtcaatcctt

SEQ ID NO: 382724 - DNA, 19 bp, Homo sapiens
  siRNA target sequence for FLJ12541 (NM_022369.2,456-474).
cagtgcctgctgctgtttt

SEQ ID NO: 382725 - DNA, 19 bp, Homo sapiens
  siRNA target sequence for FLJ12541 (NM_022369.2,595-613).
gatactgggactgttctat

SEQ ID NO: 382726 - DNA, 19 bp, Homo sapiens
  siRNA target sequence for FLJ12541 (NM_022369.2,601-619).
gggactgttctattatgct

SEQ ID NO: 382727 - DNA, 19 bp, Homo sapiens
  siRNA target sequence for FLJ12541 (NM_022369.2,738-756).
cccaggtgcccaagatcta

SEQ ID NO: 382728 - DNA, 19 bp, Homo sapiens
  siRNA target sequence for FLJ12541 (NM_022369.2,740-758).
caggtgcccaagatctaca

SEQ ID NO: 382729 - DNA, 19 bp, Homo sapiens
  siRNA target sequence for FLJ12541 (NM_022369.2,743-761).
gtgcccaagatctacaagt

SEQ ID NO: 382730 - DNA, 19 bp, Homo sapiens
  siRNA target sequence for FLJ12541 (NM_022369.2,746-764).
cccaagatctacaagtact

SEQ ID NO: 382731 - DNA, 19 bp, Homo sapiens
  siRNA target sequence for FLJ12541 (NM_022369.2,886-904).
cagctactctgaggaatat

SEQ ID NO: 382732 - DNA, 19 bp, Homo sapiens
  siRNA target sequence for FLJ12541 (NM_022369.2,1062-1080).
cagggacggccatttacca

SEQ ID NO: 382733 - DNA, 19 bp, Homo sapiens
  siRNA target sequence for FLJ12541 (NM_022369.2,1393-1411).
ccgccaagccatattctgt

SEQ ID NO: 382734 - DNA, 19 bp, Homo sapiens
  siRNA target sequence for FLJ12541 (NM_022369.2,1394-1412).
cgccaagccatattctgtt

SEQ ID NO: 382735 - DNA, 19 bp, Homo sapiens
  siRNA target sequence for FLJ12541 (NM_022369.2,1848-1866).
cgtaccgaaacttcttgaa

SEQ ID NO: 382736 - DNA, 19 bp, Homo sapiens
  siRNA target sequence for TOR3A (NM_022371.2,483-501).
gtgaggggctacttagaga

SEQ ID NO: 382737 - DNA, 19 bp, Homo sapiens
  siRNA target sequence for TOR3A (NM_022371.2,828-846).
gagtctccatggactatct

SEQ ID NO: 382738 - DNA, 19 bp, Homo sapiens
  siRNA target sequence for TOR3A (NM_022371.2,834-852).
ccatggactatctttctgt

SEQ ID NO: 382739 - DNA, 19 bp, Homo sapiens
  siRNA target sequence for TOR3A (NM_022371.2,835-853).
catggactatctttctgtt

SEQ ID NO: 382740 - DNA, 19 bp, Homo sapiens
  siRNA target sequence for TOR3A (NM_022371.2,864-882).
ctcaggggcgatataatca

SEQ ID NO: 382741 - DNA, 19 bp, Homo sapiens
  siRNA target sequence for TOR3A (NM_022371.2,866-884).
caggggcgatataatcaat

SEQ ID NO: 382742 - DNA, 19 bp, Homo sapiens
  siRNA target sequence for TOR3A (NM_022371.2,868-886).
ggggcgatataatcaatga

SEQ ID NO: 382743 - DNA, 19 bp, Homo sapiens
  siRNA target sequence for TOR3A (NM_022371.2,913-931).
gatggtcccgggaagaaat

SEQ ID NO: 382744 - DNA, 19 bp, Homo sapiens
  siRNA target sequence for TOR3A (NM_022371.2,919-937).
cccgggaagaaattacgat

SEQ ID NO: 382745 - DNA, 19 bp, Homo sapiens
  siRNA target sequence for TOR3A (NM_022371.2,1003-1021).
gccgtcttgtgaaggaaaa

SEQ ID NO: 382746 - DNA, 19 bp, Homo sapiens
  siRNA target sequence for TOR3A (NM_022371.2,1099-1117).
gccaggagctcctgtataa

SEQ ID NO: 382747 - DNA, 19 bp, Homo sapiens
  siRNA target sequence for GBL (NM_022372.2,259-277).
ccagcacatccgcatgtat

SEQ ID NO: 382748 - DNA, 19 bp, Homo sapiens
  siRNA target sequence for GBL (NM_022372.2,262-280).
gcacatccgcatgtatgat

SEQ ID NO: 382749 - DNA, 19 bp, Homo sapiens
  siRNA target sequence for GBL (NM_022372.2,312-330).
gctacgacggcgtcaacaa

SEQ ID NO: 382750 - DNA, 19 bp, Homo sapiens
  siRNA target sequence for GBL (NM_022372.2,317-335).
gacggcgtcaacaagaaca

SEQ ID NO: 382751 - DNA, 19 bp, Homo sapiens
  siRNA target sequence for GBL (NM_022372.2,452-470).
gtgaacgcacccattaact

SEQ ID NO: 382752 - DNA, 19 bp, Homo sapiens
  siRNA target sequence for GBL (NM_022372.2,909-927).
cgggggactcccagtacat

SEQ ID NO: 382753 - DNA, 19 bp, Homo sapiens
  siRNA target sequence for FLJ22313 (NM_022373.3,709-727).
ctggaccgtggggaaacta

SEQ ID NO: 382754 - DNA, 19 bp, Homo sapiens
  siRNA target sequence for FLJ22313 (NM_022373.3,725-743).
ctaaaaacgcatctatcta

SEQ ID NO: 382755 - DNA, 19 bp, Homo sapiens
  siRNA target sequence for FLJ22313 (NM_022373.3,732-750).
cgcatctatctaacgttta

SEQ ID NO: 382756 - DNA, 19 bp, Homo sapiens
  siRNA target sequence for FLJ22313 (NM_022373.3,746-764).
gtttaccctagcaaaccat

SEQ ID NO: 382757 - DNA, 19 bp, Homo sapiens
  siRNA target sequence for FLJ22313 (NM_022373.3,798-816).
gactgcttcccgatcatct

SEQ ID NO: 382758 - DNA, 19 bp, Homo sapiens
  siRNA target sequence for FLJ22313 (NM_022373.3,850-868).
gtatcatatggttcatcta

SEQ ID NO: 382759 - DNA, 19 bp, Homo sapiens
  siRNA target sequence for FLJ22313 (NM_022373.3,854-872).
catatggttcatctagtat

SEQ ID NO: 382760 - DNA, 19 bp, Homo sapiens
  siRNA target sequence for FLJ22313 (NM_022373.3,909-927).
gcaccaatagagaaagtca

SEQ ID NO: 382761 - DNA, 19 bp, Homo sapiens
  siRNA target sequence for FLJ22313 (NM_022373.3,910-928).
caccaatagagaaagtcat

SEQ ID NO: 382762 - DNA, 19 bp, Homo sapiens
  siRNA target sequence for FLJ22313 (NM_022373.3,949-967).
caattctagttcagatcat

SEQ ID NO: 382763 - DNA, 19 bp, Homo sapiens
  siRNA target sequence for FLJ22313 (NM_022373.3,987-1005).
catctggtcaagaaacctt

SEQ ID NO: 382764 - DNA, 19 bp, Homo sapiens
  siRNA target sequence for FLJ22313 (NM_022373.3,1020-1038).
gttcttcctcagaaggatt

SEQ ID NO: 382765 - DNA, 19 bp, Homo sapiens
  siRNA target sequence for FLJ22313 (NM_022373.3,1085-1103).
caccagtttccatatgtaa

SEQ ID NO: 382766 - DNA, 19 bp, Homo sapiens
  siRNA target sequence for FLJ22313 (NM_022373.3,1109-1127).
ggaaatgtagacaaccaat

SEQ ID NO: 382767 - DNA, 19 bp, Homo sapiens
  siRNA target sequence for FLJ22313 (NM_022373.3,1204-1222).
gatgtatgctcatcagtat

SEQ ID NO: 382768 - DNA, 19 bp, Homo sapiens
  siRNA target sequence for FLJ22313 (NM_022373.3,1207-1225).
gtatgctcatcagtattat

SEQ ID NO: 382769 - DNA, 19 bp, Homo sapiens
  siRNA target sequence for FLJ22313 (NM_022373.3,1219-1237).
gtattatatgcagtatcaa

SEQ ID NO: 382770 - DNA, 19 bp, Homo sapiens
  siRNA target sequence for FLJ22313 (NM_022373.3,1231-1249).
gtatcaagctgcagtttca

SEQ ID NO: 382771 - DNA, 19 bp, Homo sapiens
  siRNA target sequence for FLJ22313 (NM_022373.3,1253-1271).
caggccacatcaaatgtca

SEQ ID NO: 382772 - DNA, 19 bp, Homo sapiens
  siRNA target sequence for FLJ22313 (NM_022373.3,1290-1308).
cttcacagcctctaaattt

SEQ ID NO: 382773 - DNA, 19 bp, Homo sapiens
  siRNA target sequence for FLJ22313 (NM_022373.3,1333-1351).
cccaccagctccaaaccta

SEQ ID NO: 382774 - DNA, 19 bp, Homo sapiens
  siRNA target sequence for FLJ22313 (NM_022373.3,1368-1386).
gacccatgaatgagaatgt

SEQ ID NO: 382775 - DNA, 19 bp, Homo sapiens
  siRNA target sequence for FLJ22313 (NM_022373.3,1402-1420).
gggaggtccagtactaaat

SEQ ID NO: 382776 - DNA, 19 bp, Homo sapiens
  siRNA target sequence for FLJ22313 (NM_022373.3,1404-1422).
gaggtccagtactaaatga

SEQ ID NO: 382777 - DNA, 19 bp, Homo sapiens
  siRNA target sequence for FLJ22313 (NM_022373.3,1410-1428).
cagtactaaatgaagaaga

SEQ ID NO: 382778 - DNA, 19 bp, Homo sapiens
  siRNA target sequence for FLJ22313 (NM_022373.3,1473-1491).
ctgcgattctccttagcat

SEQ ID NO: 382779 - DNA, 19 bp, Homo sapiens
  siRNA target sequence for FLJ22313 (NM_022373.3,1509-1527).
cttttagtcggtttatcat

SEQ ID NO: 382780 - DNA, 19 bp, Homo sapiens
  siRNA target sequence for FLJ22313 (NM_022373.3,1515-1533).
gtcggtttatcatggtaat

SEQ ID NO: 382781 - DNA, 19 bp, Homo sapiens
  siRNA target sequence for FLJ22313 (NM_022373.3,1763-1781).
gcttcagcttggtctttca

SEQ ID NO: 382782 - DNA, 19 bp, Homo sapiens
  siRNA target sequence for FLJ22313 (NM_022373.3,1764-1782).
cttcagcttggtctttcat

SEQ ID NO: 382783 - DNA, 19 bp, Homo sapiens
  siRNA target sequence for FLJ22313 (NM_022373.3,1788-1806).
ccttctttacttcactaat

SEQ ID NO: 382784 - DNA, 19 bp, Homo sapiens
  siRNA target sequence for FLJ22313 (NM_022373.3,1792-1810).
ctttacttcactaatacca

SEQ ID NO: 382785 - DNA, 19 bp, Homo sapiens
  siRNA target sequence for AD24 (NM_022451.9,119-137).
ccaagctttcgcaagttaa

SEQ ID NO: 382786 - DNA, 19 bp, Homo sapiens
  siRNA target sequence for AD24 (NM_022451.9,120-138).
caagctttcgcaagttaat

SEQ ID NO: 382787 - DNA, 19 bp, Homo sapiens
  siRNA target sequence for AD24 (NM_022451.9,293-311).
gaaaagcgaccaggtaaaa

SEQ ID NO: 382788 - DNA, 19 bp, Homo sapiens
  siRNA target sequence for AD24 (NM_022451.9,298-316).
gcgaccaggtaaaaggatt

SEQ ID NO: 382789 - DNA, 19 bp, Homo sapiens
  siRNA target sequence for AD24 (NM_022451.9,341-359).
gaagcccttcctttagata

SEQ ID NO: 382790 - DNA, 19 bp, Homo sapiens
  siRNA target sequence for AD24 (NM_022451.9,391-409).
ggatttaggacaaagagta

SEQ ID NO: 382791 - DNA, 19 bp, Homo sapiens
  siRNA target sequence for AD24 (NM_022451.9,416-434).
ctaacaagagatctttctt

SEQ ID NO: 382792 - DNA, 19 bp, Homo sapiens
  siRNA target sequence for AD24 (NM_022451.9,442-460).
gcctgttcatgcgaagaaa

SEQ ID NO: 382793 - DNA, 19 bp, Homo sapiens
  siRNA target sequence for AD24 (NM_022451.9,463-481).
gaagcatgaacgcattata

SEQ ID NO: 382794 - DNA, 19 bp, Homo sapiens
  siRNA target sequence for AD24 (NM_022451.9,466-484).
gcatgaacgcattatagat

SEQ ID NO: 382795 - DNA, 19 bp, Homo sapiens
  siRNA target sequence for AD24 (NM_022451.9,467-485).
catgaacgcattatagata

SEQ ID NO: 382796 - DNA, 19 bp, Homo sapiens
  siRNA target sequence for AD24 (NM_022451.9,470-488).
gaacgcattatagataaat

SEQ ID NO: 382797 - DNA, 19 bp, Homo sapiens
  siRNA target sequence for AD24 (NM_022451.9,545-563).
cttcctatcaaagataaaa

SEQ ID NO: 382798 - DNA, 19 bp, Homo sapiens
  siRNA target sequence for AD24 (NM_022451.9,589-607).
gaagccagttactgatagt

SEQ ID NO: 382799 - DNA, 19 bp, Homo sapiens
  siRNA target sequence for AD24 (NM_022451.9,655-673).
gatcattgaagatcctatt

SEQ ID NO: 382800 - DNA, 19 bp, Homo sapiens
  siRNA target sequence for AD24 (NM_022451.9,684-702).
ccatagaagaacatttgat

SEQ ID NO: 382801 - DNA, 19 bp, Homo sapiens
  siRNA target sequence for AD24 (NM_022451.9,685-703).
catagaagaacatttgatt

SEQ ID NO: 382802 - DNA, 19 bp, Homo sapiens
  siRNA target sequence for AD24 (NM_022451.9,851-869).
cgaaagctggtaattgttt

SEQ ID NO: 382803 - DNA, 19 bp, Homo sapiens
  siRNA target sequence for AD24 (NM_022451.9,866-884).
gtttctctgatggagttat

SEQ ID NO: 382804 - DNA, 19 bp, Homo sapiens
  siRNA target sequence for AD24 (NM_022451.9,960-978).
cccagaagttaagagaatt

SEQ ID NO: 382805 - DNA, 19 bp, Homo sapiens
  siRNA target sequence for AD24 (NM_022451.9,961-979).
ccagaagttaagagaattt

SEQ ID NO: 382806 - DNA, 19 bp, Homo sapiens
  siRNA target sequence for AD24 (NM_022451.9,987-1005).
gcctggttagccaatacaa

SEQ ID NO: 382807 - DNA, 19 bp, Homo sapiens
  siRNA target sequence for AD24 (NM_022451.9,989-1007).
ctggttagccaatacaagt

SEQ ID NO: 382808 - DNA, 19 bp, Homo sapiens
  siRNA target sequence for AD24 (NM_022451.9,1139-1157).
gtggcactacctcatttta

SEQ ID NO: 382809 - DNA, 19 bp, Homo sapiens
  siRNA target sequence for AD24 (NM_022451.9,1163-1181).
cacaacaacatcatcgtat

SEQ ID NO: 382810 - DNA, 19 bp, Homo sapiens
  siRNA target sequence for AD24 (NM_022451.9,1168-1186).
caacatcatcgtattgatt

SEQ ID NO: 382811 - DNA, 19 bp, Homo sapiens
  siRNA target sequence for AD24 (NM_022451.9,1202-1220).
gacatgtcaaaattgatat

SEQ ID NO: 382812 - DNA, 19 bp, Homo sapiens
  siRNA target sequence for AD24 (NM_022451.9,1334-1352).
gttaggccagagatgttaa

SEQ ID NO: 382813 - DNA, 19 bp, Homo sapiens
  siRNA target sequence for AD24 (NM_022451.9,1586-1604).
gtaacctacttcagaatat

SEQ ID NO: 382814 - DNA, 19 bp, Homo sapiens
  siRNA target sequence for AD24 (NM_022451.9,1590-1608).
cctacttcagaatattgaa

SEQ ID NO: 382815 - DNA, 19 bp, Homo sapiens
  siRNA target sequence for AD24 (NM_022451.9,1657-1675).
caagtttgctcaccttata

SEQ ID NO: 382816 - DNA, 19 bp, Homo sapiens
  siRNA target sequence for AD24 (NM_022451.9,1699-1717).
gttagtagttcttcatact

SEQ ID NO: 382817 - DNA, 19 bp, Homo sapiens
  siRNA target sequence for AD24 (NM_022451.9,1709-1727).
cttcatactctcattgagt

SEQ ID NO: 382818 - DNA, 19 bp, Homo sapiens
  siRNA target sequence for AD24 (NM_022451.9,1735-1753).
cctaagctatcaagaaagt

SEQ ID NO: 382819 - DNA, 19 bp, Homo sapiens
  siRNA target sequence for AD24 (NM_022451.9,1807-1825).
gaatattgatccattgaaa

SEQ ID NO: 382820 - DNA, 19 bp, Homo sapiens
  siRNA target sequence for AD24 (NM_022451.9,1828-1846).
ctacacacatctctacaaa

SEQ ID NO: 382821 - DNA, 19 bp, Homo sapiens
  siRNA target sequence for AD24 (NM_022451.9,1875-1893).
ccaatgaaggtgttgagat

SEQ ID NO: 382822 - DNA, 19 bp, Homo sapiens
  siRNA target sequence for AD24 (NM_022451.9,1907-1925).
cttgatgtcatgctaacta

SEQ ID NO: 382823 - DNA, 19 bp, Homo sapiens
  siRNA target sequence for AD24 (NM_022451.9,1980-1998).
gtacccttgctcttcatgt

SEQ ID NO: 382824 - DNA, 19 bp, Homo sapiens
  siRNA target sequence for AD24 (NM_022451.9,2172-2190).
ctctgcggaggcattatca

SEQ ID NO: 382825 - DNA, 19 bp, Homo sapiens
  siRNA target sequence for AD24 (NM_022451.9,2291-2309).
ctttttgaggcatatagca

SEQ ID NO: 382826 - DNA, 19 bp, Homo sapiens
  siRNA target sequence for AD24 (NM_022451.9,2311-2329).
ggcagaaatgacattcaat

SEQ ID NO: 382827 - DNA, 19 bp, Homo sapiens
  siRNA target sequence for AD24 (NM_022451.9,2326-2344).
caatcctcctgttgaatct

SEQ ID NO: 382828 - DNA, 19 bp, Homo sapiens
  siRNA target sequence for AD24 (NM_022451.9,2408-2426).
cagctaatcaaaagatact

SEQ ID NO: 382829 - DNA, 19 bp, Homo sapiens
  siRNA target sequence for AD24 (NM_022451.9,2442-2460).
ctgaatcgcctctggattt

SEQ ID NO: 382830 - DNA, 19 bp, Homo sapiens
  siRNA target sequence for AD24 (NM_022451.9,2444-2462).
gaatcgcctctggatttca

SEQ ID NO: 382831 - DNA, 19 bp, Homo sapiens
  siRNA target sequence for AD24 (NM_022451.9,2450-2468).
cctctggatttcacgaaat

SEQ ID NO: 382832 - DNA, 19 bp, Homo sapiens
  siRNA target sequence for FBS1 (NM_022452.1,236-254).
gtgcgtgtggcttacatga

SEQ ID NO: 382833 - DNA, 19 bp, Homo sapiens
  siRNA target sequence for FBS1 (NM_022452.1,548-566).
ggcagccccacattcaact

SEQ ID NO: 382834 - DNA, 19 bp, Homo sapiens
  siRNA target sequence for FBS1 (NM_022452.1,845-863).
cctcggccaaccaaggaat

SEQ ID NO: 382835 - DNA, 19 bp, Homo sapiens
  siRNA target sequence for FBS1 (NM_022452.1,1083-1101).
ggccaccccgcttctatga

SEQ ID NO: 382836 - DNA, 19 bp, Homo sapiens
  siRNA target sequence for RAB3IP (NM_022456.2,270-288).
gtatgaatcaggaactcaa

SEQ ID NO: 382837 - DNA, 19 bp, Homo sapiens
  siRNA target sequence for RAB3IP (NM_022456.2,350-368).
ctatccaggcaaatgcatt

SEQ ID NO: 382838 - DNA, 19 bp, Homo sapiens
  siRNA target sequence for RAB3IP (NM_022456.2,354-372).
ccaggcaaatgcattagat

SEQ ID NO: 382839 - DNA, 19 bp, Homo sapiens
  siRNA target sequence for RAB3IP (NM_022456.2,358-376).
gcaaatgcattagatgttt

SEQ ID NO: 382840 - DNA, 19 bp, Homo sapiens
  siRNA target sequence for RAB3IP (NM_022456.2,385-403).
cctacacaacccgtgtatt

SEQ ID NO: 382841 - DNA, 19 bp, Homo sapiens
  siRNA target sequence for RAB3IP (NM_022456.2,404-422).
catcccccagacgtttaaa

SEQ ID NO: 382842 - DNA, 19 bp, Homo sapiens
  siRNA target sequence for RAB3IP (NM_022456.2,427-445).
gcggaaatatctagtatca

SEQ ID NO: 382843 - DNA, 19 bp, Homo sapiens
  siRNA target sequence for RAB3IP (NM_022456.2,487-505).
gtcacagctggattaacta

SEQ ID NO: 382844 - DNA, 19 bp, Homo sapiens
  siRNA target sequence for RAB3IP (NM_022456.2,496-514).
ggattaactaaattaacta

SEQ ID NO: 382845 - DNA, 19 bp, Homo sapiens
  siRNA target sequence for RAB3IP (NM_022456.2,592-610).
gatatttttgggttgagta

SEQ ID NO: 382846 - DNA, 19 bp, Homo sapiens
  siRNA target sequence for RAB3IP (NM_022456.2,602-620).
ggttgagtactgatagtct

SEQ ID NO: 382847 - DNA, 19 bp, Homo sapiens
  siRNA target sequence for RAB3IP (NM_022456.2,663-681).
gggctatgaacgattaaaa

SEQ ID NO: 382848 - DNA, 19 bp, Homo sapiens
  siRNA target sequence for RAB3IP (NM_022456.2,665-683).
gctatgaacgattaaaaga

SEQ ID NO: 382849 - DNA, 19 bp, Homo sapiens
  siRNA target sequence for RAB3IP (NM_022456.2,727-745).
gaatgtgagaggctttcaa

SEQ ID NO: 382850 - DNA, 19 bp, Homo sapiens
  siRNA target sequence for RAB3IP (NM_022456.2,731-749).
gtgagaggctttcaaaagt

SEQ ID NO: 382851 - DNA, 19 bp, Homo sapiens
  siRNA target sequence for RAB3IP (NM_022456.2,743-761).
caaaagtgcgagatcaact

SEQ ID NO: 382852 - DNA, 19 bp, Homo sapiens
  siRNA target sequence for RAB3IP (NM_022456.2,778-796).
gaactcacagctagtctat

SEQ ID NO: 382853 - DNA, 19 bp, Homo sapiens
  siRNA target sequence for RAB3IP (NM_022456.2,898-916).
gaagtagctgcattgaaga

SEQ ID NO: 382854 - DNA, 19 bp, Homo sapiens
  siRNA target sequence for RAB3IP (NM_022456.2,968-986).
gtggaaagacaccttttaa

SEQ ID NO: 382855 - DNA, 19 bp, Homo sapiens
  siRNA target sequence for RAB3IP (NM_022456.2,1085-1103).
ctgacttatccttgtataa

SEQ ID NO: 382856 - DNA, 19 bp, Homo sapiens
  siRNA target sequence for RAB3IP (NM_022456.2,1089-1107).
cttatccttgtataatgaa

SEQ ID NO: 382857 - DNA, 19 bp, Homo sapiens
  siRNA target sequence for RAB3IP (NM_022456.2,1140-1158).
caggacgtgtcctttctta

SEQ ID NO: 382858 - DNA, 19 bp, Homo sapiens
  siRNA target sequence for RAB3IP (NM_022456.2,1334-1352).
ctctcactggccagagtaa

SEQ ID NO: 382859 - DNA, 19 bp, Homo sapiens
  siRNA target sequence for RAB3IP (NM_022456.2,1344-1362).
ccagagtaagtcctgtaaa

SEQ ID NO: 382860 - DNA, 19 bp, Homo sapiens
  siRNA target sequence for RAB3IP (NM_022456.2,1380-1398).
ggactcaagcaactattat

SEQ ID NO: 382861 - DNA, 19 bp, Homo sapiens
  siRNA target sequence for RAB3IP (NM_022456.2,1428-1446).
cacttctgtatgtaacttt

SEQ ID NO: 382862 - DNA, 19 bp, Homo sapiens
  siRNA target sequence for RAB3IP (NM_022456.2,1491-1509).
ggatgttgatcagatgttt

SEQ ID NO: 382863 - DNA, 19 bp, Homo sapiens
  siRNA target sequence for RAB3IP (NM_022456.2,1546-1564).
gcaaagctgggttatttca

SEQ ID NO: 382864 - DNA, 19 bp, Homo sapiens
  siRNA target sequence for RAB3IP (NM_022456.2,1547-1565).
caaagctgggttatttcaa

SEQ ID NO: 382865 - DNA, 19 bp, Homo sapiens
  siRNA target sequence for COP1 (NM_022457.4,462-480).
cttttgctacaagtgtatt

SEQ ID NO: 382866 - DNA, 19 bp, Homo sapiens
  siRNA target sequence for COP1 (NM_022457.4,467-485).
gctacaagtgtattcatca

SEQ ID NO: 382867 - DNA, 19 bp, Homo sapiens
  siRNA target sequence for COP1 (NM_022457.4,506-524).
gatgtcccaagtgtaacta

SEQ ID NO: 382868 - DNA, 19 bp, Homo sapiens
  siRNA target sequence for COP1 (NM_022457.4,509-527).
gtcccaagtgtaactatgt

SEQ ID NO: 382869 - DNA, 19 bp, Homo sapiens
  siRNA target sequence for COP1 (NM_022457.4,534-552).
caatattgaccatctgtat

SEQ ID NO: 382870 - DNA, 19 bp, Homo sapiens
  siRNA target sequence for COP1 (NM_022457.4,654-672).
gtggcagatatttcaagat

SEQ ID NO: 382871 - DNA, 19 bp, Homo sapiens
  siRNA target sequence for COP1 (NM_022457.4,685-703).
gaccaagataaccttgatt

SEQ ID NO: 382872 - DNA, 19 bp, Homo sapiens
  siRNA target sequence for COP1 (NM_022457.4,697-715).
cttgatttggccaatgtca

SEQ ID NO: 382873 - DNA, 19 bp, Homo sapiens
  siRNA target sequence for COP1 (NM_022457.4,773-791).
cagcccaactacagattct

SEQ ID NO: 382874 - DNA, 19 bp, Homo sapiens
  siRNA target sequence for COP1 (NM_022457.4,776-794).
cccaactacagattcttat

SEQ ID NO: 382875 - DNA, 19 bp, Homo sapiens
  siRNA target sequence for COP1 (NM_022457.4,801-819).
cctcaaggttgcaagaaga

SEQ ID NO: 382876 - DNA, 19 bp, Homo sapiens
  siRNA target sequence for COP1 (NM_022457.4,846-864).
ccagaaggagctaagtgtt

SEQ ID NO: 382877 - DNA, 19 bp, Homo sapiens
  siRNA target sequence for COP1 (NM_022457.4,892-910).
gaaatgagtggcttatact

SEQ ID NO: 382878 - DNA, 19 bp, Homo sapiens
  siRNA target sequence for COP1 (NM_022457.4,956-974).
ctccatcacacagtagtat

SEQ ID NO: 382879 - DNA, 19 bp, Homo sapiens
  siRNA target sequence for COP1 (NM_022457.4,1056-1074).
gttagcatcaagacgaaaa

SEQ ID NO: 382880 - DNA, 19 bp, Homo sapiens
  siRNA target sequence for COP1 (NM_022457.4,1179-1197).
ggaatgcttgtccaagttt

SEQ ID NO: 382881 - DNA, 19 bp, Homo sapiens
  siRNA target sequence for COP1 (NM_022457.4,1180-1198).
gaatgcttgtccaagttta

SEQ ID NO: 382882 - DNA, 19 bp, Homo sapiens
  siRNA target sequence for COP1 (NM_022457.4,1188-1206).
gtccaagtttactcgatat

SEQ ID NO: 382883 - DNA, 19 bp, Homo sapiens
  siRNA target sequence for COP1 (NM_022457.4,1216-1234).
cgacctttagccacattgt

SEQ ID NO: 382884 - DNA, 19 bp, Homo sapiens
  siRNA target sequence for COP1 (NM_022457.4,1220-1238).
ctttagccacattgtcata

SEQ ID NO: 382885 - DNA, 19 bp, Homo sapiens
  siRNA target sequence for COP1 (NM_022457.4,1235-1253).
catatgctagtgatctcta

SEQ ID NO: 382886 - DNA, 19 bp, Homo sapiens
  siRNA target sequence for COP1 (NM_022457.4,1263-1281).
cagtatagtctctagtatt

SEQ ID NO: 382887 - DNA, 19 bp, Homo sapiens
  siRNA target sequence for COP1 (NM_022457.4,1265-1283).
gtatagtctctagtattga

SEQ ID NO: 382888 - DNA, 19 bp, Homo sapiens
  siRNA target sequence for COP1 (NM_022457.4,1288-1306).
gaccgggattgtgactatt

SEQ ID NO: 382889 - DNA, 19 bp, Homo sapiens
  siRNA target sequence for COP1 (NM_022457.4,1309-1327).
gcgattgctggagttacaa

SEQ ID NO: 382890 - DNA, 19 bp, Homo sapiens
  siRNA target sequence for COP1 (NM_022457.4,1310-1328).
cgattgctggagttacaaa

SEQ ID NO: 382891 - DNA, 19 bp, Homo sapiens
  siRNA target sequence for COP1 (NM_022457.4,1332-1350).
gattaaagtctatgaatat

SEQ ID NO: 382892 - DNA, 19 bp, Homo sapiens
  siRNA target sequence for COP1 (NM_022457.4,1424-1442).
gtatcagttggagtagtta

SEQ ID NO: 382893 - DNA, 19 bp, Homo sapiens
  siRNA target sequence for COP1 (NM_022457.4,1428-1446).
cagttggagtagttaccat

SEQ ID NO: 382894 - DNA, 19 bp, Homo sapiens
  siRNA target sequence for COP1 (NM_022457.4,1430-1448).
gttggagtagttaccataa

SEQ ID NO: 382895 - DNA, 19 bp, Homo sapiens
  siRNA target sequence for COP1 (NM_022457.4,1455-1473).
gttagctagcagtgattat

SEQ ID NO: 382896 - DNA, 19 bp, Homo sapiens
  siRNA target sequence for COP1 (NM_022457.4,1468-1486).
gattatgaaggcactgtta

SEQ ID NO: 382897 - DNA, 19 bp, Homo sapiens
  siRNA target sequence for COP1 (NM_022457.4,1544-1562).
ggtgttggagtgttgactt

SEQ ID NO: 382898 - DNA, 19 bp, Homo sapiens
  siRNA target sequence for COP1 (NM_022457.4,1547-1565).
gttggagtgttgactttaa

SEQ ID NO: 382899 - DNA, 19 bp, Homo sapiens
  siRNA target sequence for COP1 (NM_022457.4,1553-1571).
gtgttgactttaatttgat

SEQ ID NO: 382900 - DNA, 19 bp, Homo sapiens
  siRNA target sequence for COP1 (NM_022457.4,1638-1656).
caactcagtggcaagcatt

SEQ ID NO: 382901 - DNA, 19 bp, Homo sapiens
  siRNA target sequence for COP1 (NM_022457.4,1785-1803).
caaaggacaccgtaaagca

SEQ ID NO: 382902 - DNA, 19 bp, Homo sapiens
  siRNA target sequence for COP1 (NM_022457.4,1794-1812).
ccgtaaagcagtctcttat

SEQ ID NO: 382903 - DNA, 19 bp, Homo sapiens
  siRNA target sequence for COP1 (NM_022457.4,2061-2079).
cgacaaagaccgaaaagaa

SEQ ID NO: 382904 - DNA, 19 bp, Homo sapiens
  siRNA target sequence for COP1 (NM_022457.4,2156-2174).
ctaacagtcagggtacaat

SEQ ID NO: 382905 - DNA, 19 bp, Homo sapiens
  siRNA target sequence for C7orf2 (NM_022458.2,206-224).
gtgcgggagtccacgatat

SEQ ID NO: 382906 - DNA, 19 bp, Homo sapiens
  siRNA target sequence for C7orf2 (NM_022458.2,208-226).
gcgggagtccacgatatgt

SEQ ID NO: 382907 - DNA, 19 bp, Homo sapiens
  siRNA target sequence for C7orf2 (NM_022458.2,209-227).
cgggagtccacgatatgtt

SEQ ID NO: 382908 - DNA, 19 bp, Homo sapiens
  siRNA target sequence for C7orf2 (NM_022458.2,210-228).
gggagtccacgatatgttt

SEQ ID NO: 382909 - DNA, 19 bp, Homo sapiens
  siRNA target sequence for C7orf2 (NM_022458.2,214-232).
gtccacgatatgtttcctt

SEQ ID NO: 382910 - DNA, 19 bp, Homo sapiens
  siRNA target sequence for C7orf2 (NM_022458.2,314-332).
gccatcgtcaacaggattt

SEQ ID NO: 382911 - DNA, 19 bp, Homo sapiens
  siRNA target sequence for C7orf2 (NM_022458.2,322-340).
caacaggatttcgttgttt

SEQ ID NO: 382912 - DNA, 19 bp, Homo sapiens
  siRNA target sequence for C7orf2 (NM_022458.2,368-386).
gctggggctgttttgcttt

SEQ ID NO: 382913 - DNA, 19 bp, Homo sapiens
  siRNA target sequence for C7orf2 (NM_022458.2,579-597).
gaatccgagcccgcatttt

SEQ ID NO: 382914 - DNA, 19 bp, Homo sapiens
  siRNA target sequence for C7orf2 (NM_022458.2,588-606).
cccgcattttagagacttt

SEQ ID NO: 382915 - DNA, 19 bp, Homo sapiens
  siRNA target sequence for C7orf2 (NM_022458.2,603-621).
ctttggtcatgcttcttct

SEQ ID NO: 382916 - DNA, 19 bp, Homo sapiens
  siRNA target sequence for C7orf2 (NM_022458.2,617-635).
cttcttcttgcgttactca

SEQ ID NO: 382917 - DNA, 19 bp, Homo sapiens
  siRNA target sequence for C7orf2 (NM_022458.2,652-670).
ggtagcttcagcactcatt

SEQ ID NO: 382918 - DNA, 19 bp, Homo sapiens
  siRNA target sequence for C7orf2 (NM_022458.2,677-695).
gatgccgcaagcatggaat

SEQ ID NO: 382919 - DNA, 19 bp, Homo sapiens
  siRNA target sequence for C7orf2 (NM_022458.2,680-698).
gccgcaagcatggaatctt

SEQ ID NO: 382920 - DNA, 19 bp, Homo sapiens
  siRNA target sequence for C7orf2 (NM_022458.2,681-699).
ccgcaagcatggaatcttt

SEQ ID NO: 382921 - DNA, 19 bp, Homo sapiens
  siRNA target sequence for C7orf2 (NM_022458.2,682-700).
cgcaagcatggaatcttta

SEQ ID NO: 382922 - DNA, 19 bp, Homo sapiens
  siRNA target sequence for C7orf2 (NM_022458.2,715-733).
gttctatctaccctattta

SEQ ID NO: 382923 - DNA, 19 bp, Homo sapiens
  siRNA target sequence for C7orf2 (NM_022458.2,718-736).
ctatctaccctatttatat

SEQ ID NO: 382924 - DNA, 19 bp, Homo sapiens
  siRNA target sequence for C7orf2 (NM_022458.2,722-740).
ctaccctatttatattcct

SEQ ID NO: 382925 - DNA, 19 bp, Homo sapiens
  siRNA target sequence for C7orf2 (NM_022458.2,788-806).
ggcctttctcgtatgttca

SEQ ID NO: 382926 - DNA, 19 bp, Homo sapiens
  siRNA target sequence for C7orf2 (NM_022458.2,829-847).
gaagccaacaattcttgaa

SEQ ID NO: 382927 - DNA, 19 bp, Homo sapiens
  siRNA target sequence for C7orf2 (NM_022458.2,854-872).
gatgaacaaatttatatca

SEQ ID NO: 382928 - DNA, 19 bp, Homo sapiens
  siRNA target sequence for C7orf2 (NM_022458.2,891-909).
cactccagagacgactaaa

SEQ ID NO: 382929 - DNA, 19 bp, Homo sapiens
  siRNA target sequence for C7orf2 (NM_022458.2,905-923).
ctaaatgggctgtcttcat

SEQ ID NO: 382930 - DNA, 19 bp, Homo sapiens
  siRNA target sequence for C7orf2 (NM_022458.2,918-936).
cttcatcggtggaatacaa

SEQ ID NO: 382931 - DNA, 19 bp, Homo sapiens
  siRNA target sequence for C7orf2 (NM_022458.2,921-939).
catcggtggaatacaacat

SEQ ID NO: 382932 - DNA, 19 bp, Homo sapiens
  siRNA target sequence for C7orf2 (NM_022458.2,1033-1051).
gtatcccgctgttatggtt

SEQ ID NO: 382933 - DNA, 19 bp, Homo sapiens
  siRNA target sequence for C7orf2 (NM_022458.2,1049-1067).
gttctccttcttattgaga

SEQ ID NO: 382934 - DNA, 19 bp, Homo sapiens
  siRNA target sequence for C7orf2 (NM_022458.2,1087-1105).
ggtggcttgtaatattctt

SEQ ID NO: 382935 - DNA, 19 bp, Homo sapiens
  siRNA target sequence for C7orf2 (NM_022458.2,1160-1178).
ggaaatgcctctctttcta

SEQ ID NO: 382936 - DNA, 19 bp, Homo sapiens
  siRNA target sequence for C7orf2 (NM_022458.2,1170-1188).
ctctttctacgtttggttt

SEQ ID NO: 382937 - DNA, 19 bp, Homo sapiens
  siRNA target sequence for C7orf2 (NM_022458.2,1196-1214).
gctgcgcttgaaatcattt

SEQ ID NO: 382938 - DNA, 19 bp, Homo sapiens
  siRNA target sequence for C7orf2 (NM_022458.2,1199-1217).
gcgcttgaaatcattttga

SEQ ID NO: 382939 - DNA, 19 bp, Homo sapiens
  siRNA target sequence for C7orf2 (NM_022458.2,1248-1266).
gcttctatagccttcgatt

SEQ ID NO: 382940 - DNA, 19 bp, Homo sapiens
  siRNA target sequence for C7orf2 (NM_022458.2,1252-1270).
ctatagccttcgatttttt

SEQ ID NO: 382941 - DNA, 19 bp, Homo sapiens
  siRNA target sequence for C7orf2 (NM_022458.2,1295-1313).
gacacaactatgacaaaga

SEQ ID NO: 382942 - DNA, 19 bp, Homo sapiens
  siRNA target sequence for C7orf2 (NM_022458.2,1378-1396).
gggaatcactagatttgat

SEQ ID NO: 382943 - DNA, 19 bp, Homo sapiens
  siRNA target sequence for C7orf2 (NM_022458.2,1380-1398).
gaatcactagatttgatct

SEQ ID NO: 382944 - DNA, 19 bp, Homo sapiens
  siRNA target sequence for C7orf2 (NM_022458.2,1403-1421).
ggcgactttggaaggttta

SEQ ID NO: 382945 - DNA, 19 bp, Homo sapiens
  siRNA target sequence for C7orf2 (NM_022458.2,1404-1422).
gcgactttggaaggtttaa

SEQ ID NO: 382946 - DNA, 19 bp, Homo sapiens
  siRNA target sequence for C7orf2 (NM_022458.2,1405-1423).
cgactttggaaggtttaat

SEQ ID NO: 382947 - DNA, 19 bp, Homo sapiens
  siRNA target sequence for C7orf2 (NM_022458.2,1469-1487).
gctattgtgacaacattgt

SEQ ID NO: 382948 - DNA, 19 bp, Homo sapiens
  siRNA target sequence for C7orf2 (NM_022458.2,1534-1552).
ggccctagggcttcataaa

SEQ ID NO: 382949 - DNA, 19 bp, Homo sapiens
  siRNA target sequence for C7orf2 (NM_022458.2,1543-1561).
gcttcataaacttcactta

SEQ ID NO: 382950 - DNA, 19 bp, Homo sapiens
  siRNA target sequence for AZ2 (NM_022461.1,389-407).
ctggtagaagatgatatct

SEQ ID NO: 382951 - DNA, 19 bp, Homo sapiens
  siRNA target sequence for AZ2 (NM_022461.1,398-416).
gatgatatctgtattctga

SEQ ID NO: 382952 - DNA, 19 bp, Homo sapiens
  siRNA target sequence for AZ2 (NM_022461.1,429-447).
cccataagagagatacagt

SEQ ID NO: 382953 - DNA, 19 bp, Homo sapiens
  siRNA target sequence for AZ2 (NM_022461.1,595-613).
gctaatagctcgatttgaa

SEQ ID NO: 382954 - DNA, 19 bp, Homo sapiens
  siRNA target sequence for AZ2 (NM_022461.1,627-645).
ccgtgggacgagaacaagt

SEQ ID NO: 382955 - DNA, 19 bp, Homo sapiens
  siRNA target sequence for AZ2 (NM_022461.1,628-646).
cgtgggacgagaacaagta

SEQ ID NO: 382956 - DNA, 19 bp, Homo sapiens
  siRNA target sequence for AZ2 (NM_022461.1,631-649).
gggacgagaacaagtaaat

SEQ ID NO: 382957 - DNA, 19 bp, Homo sapiens
  siRNA target sequence for AZ2 (NM_022461.1,632-650).
ggacgagaacaagtaaata

SEQ ID NO: 382958 - DNA, 19 bp, Homo sapiens
  siRNA target sequence for AZ2 (NM_022461.1,652-670).
ggcctatcatgcatatcga

SEQ ID NO: 382959 - DNA, 19 bp, Homo sapiens
  siRNA target sequence for AZ2 (NM_022461.1,663-681).
catatcgagaggtttgcat

SEQ ID NO: 382960 - DNA, 19 bp, Homo sapiens
  siRNA target sequence for AZ2 (NM_022461.1,668-686).
cgagaggtttgcattgata

SEQ ID NO: 382961 - DNA, 19 bp, Homo sapiens
  siRNA target sequence for AZ2 (NM_022461.1,678-696).
gcattgatagagataattt

SEQ ID NO: 382962 - DNA, 19 bp, Homo sapiens
  siRNA target sequence for AZ2 (NM_022461.1,760-778).
gctacaatctaaagaagta

SEQ ID NO: 382963 - DNA, 19 bp, Homo sapiens
  siRNA target sequence for AZ2 (NM_022461.1,814-832).
gcaggtgatgaggaattta

SEQ ID NO: 382964 - DNA, 19 bp, Homo sapiens
  siRNA target sequence for AZ2 (NM_022461.1,880-898).
gaagatccatggtttggaa

SEQ ID NO: 382965 - DNA, 19 bp, Homo sapiens
  siRNA target sequence for AZ2 (NM_022461.1,923-941).
gaatgtagcgatctcaaaa

SEQ ID NO: 382966 - DNA, 19 bp, Homo sapiens
  siRNA target sequence for AZ2 (NM_022461.1,927-945).
gtagcgatctcaaaataga

SEQ ID NO: 382967 - DNA, 19 bp, Homo sapiens
  siRNA target sequence for AZ2 (NM_022461.1,957-975).
ccaaacaaacggatccata

SEQ ID NO: 382968 - DNA, 19 bp, Homo sapiens
  siRNA target sequence for AZ2 (NM_022461.1,958-976).
caaacaaacggatccatat

SEQ ID NO: 382969 - DNA, 19 bp, Homo sapiens
  siRNA target sequence for AZ2 (NM_022461.1,1006-1024).
ccaaaaactaagcatttca

SEQ ID NO: 382970 - DNA, 19 bp, Homo sapiens
  siRNA target sequence for AZ2 (NM_022461.1,1013-1031).
ctaagcatttcaagtgata

SEQ ID NO: 382971 - DNA, 19 bp, Homo sapiens
  siRNA target sequence for AZ2 (NM_022461.1,1097-1115).
caagctgaactactaagaa

SEQ ID NO: 382972 - DNA, 19 bp, Homo sapiens
  siRNA target sequence for AZ2 (NM_022461.1,1191-1209).
caaaactgcacttgatgaa

SEQ ID NO: 382973 - DNA, 19 bp, Homo sapiens
  siRNA target sequence for AZ2 (NM_022461.1,1198-1216).
gcacttgatgaattttact

SEQ ID NO: 382974 - DNA, 19 bp, Homo sapiens
  siRNA target sequence for AZ2 (NM_022461.1,1253-1271).
ggcaaagctctttgtcata

SEQ ID NO: 382975 - DNA, 19 bp, Homo sapiens
  siRNA target sequence for AZ2 (NM_022461.1,1262-1280).
ctttgtcataccacatctt

SEQ ID NO: 382976 - DNA, 19 bp, Homo sapiens
  siRNA target sequence for AZ2 (NM_022461.1,1417-1435).
caattcctgggtatttcca

SEQ ID NO: 382977 - DNA, 19 bp, Homo sapiens
  siRNA target sequence for AZ2 (NM_022461.1,1433-1451).
ccaagtcctcctaaatcaa

SEQ ID NO: 382978 - DNA, 19 bp, Homo sapiens
  siRNA target sequence for AZ2 (NM_022461.1,1502-1520).
cttccaccactgcattact

SEQ ID NO: 382979 - DNA, 19 bp, Homo sapiens
  siRNA target sequence for AZ2 (NM_022461.1,1513-1531).
gcattacttggatcaacat

SEQ ID NO: 382980 - DNA, 19 bp, Homo sapiens
  siRNA target sequence for AZ2 (NM_022461.1,1537-1555).
gaactgcctttataagaat

SEQ ID NO: 382981 - DNA, 19 bp, Homo sapiens
  siRNA target sequence for NXN (NM_022463.3,452-470).
gctcaaactttggaacaaa

SEQ ID NO: 382982 - DNA, 19 bp, Homo sapiens
  siRNA target sequence for NXN (NM_022463.3,474-492).
cgaatttccaacattccat

SEQ ID NO: 382983 - DNA, 19 bp, Homo sapiens
  siRNA target sequence for NXN (NM_022463.3,481-499).
ccaacattccatcactaat

SEQ ID NO: 382984 - DNA, 19 bp, Homo sapiens
  siRNA target sequence for NXN (NM_022463.3,482-500).
caacattccatcactaata

SEQ ID NO: 382985 - DNA, 19 bp, Homo sapiens
  siRNA target sequence for NXN (NM_022463.3,615-633).
gcagggcccttgcttagaa

SEQ ID NO: 382986 - DNA, 19 bp, Homo sapiens
  siRNA target sequence for NXN (NM_022463.3,616-634).
cagggcccttgcttagaaa

SEQ ID NO: 382987 - DNA, 19 bp, Homo sapiens
  siRNA target sequence for NXN (NM_022463.3,618-636).
gggcccttgcttagaaaca

SEQ ID NO: 382988 - DNA, 19 bp, Homo sapiens
  siRNA target sequence for NXN (NM_022463.3,619-637).
ggcccttgcttagaaacaa

SEQ ID NO: 382989 - DNA, 19 bp, Homo sapiens
  siRNA target sequence for NXN (NM_022463.3,730-748).
gggtcctggtggaatccta

SEQ ID NO: 382990 - DNA, 19 bp, Homo sapiens
  siRNA target sequence for NXN (NM_022463.3,806-824).
gtcggaggagtccttcaaa

SEQ ID NO: 382991 - DNA, 19 bp, Homo sapiens
  siRNA target sequence for NXN (NM_022463.3,808-826).
cggaggagtccttcaaaca

SEQ ID NO: 382992 - DNA, 19 bp, Homo sapiens
  siRNA target sequence for NXN (NM_022463.3,810-828).
gaggagtccttcaaacagt

SEQ ID NO: 382993 - DNA, 19 bp, Homo sapiens
  siRNA target sequence for NXN (NM_022463.3,893-911).
ccggctgtacggaatccaa

SEQ ID NO: 382994 - DNA, 19 bp, Homo sapiens
  siRNA target sequence for NXN (NM_022463.3,1075-1093).
gcctcgtcctttttgtaga

SEQ ID NO: 382995 - DNA, 19 bp, Homo sapiens
  siRNA target sequence for NXN (NM_022463.3,1076-1094).
cctcgtcctttttgtagat

SEQ ID NO: 382996 - DNA, 19 bp, Homo sapiens
  siRNA target sequence for NXN (NM_022463.3,1077-1095).
ctcgtcctttttgtagatt

SEQ ID NO: 382997 - DNA, 19 bp, Homo sapiens
  siRNA target sequence for NXN (NM_022463.3,1228-1246).
ctgactccctgcgagatta

SEQ ID NO: 382998 - DNA, 19 bp, Homo sapiens
  siRNA target sequence for NXN (NM_022463.3,1230-1248).
gactccctgcgagattaca

SEQ ID NO: 382999 - DNA, 19 bp, Homo sapiens
  siRNA target sequence for NXN (NM_022463.3,1347-1365).
gaggcctttgtgaatgact

SEQ ID NO: 383000 - DNA, 19 bp, Homo sapiens
  siRNA target sequence for PEGASUS (NM_022466.2,332-350).
ctttggacttcgtgaaaga

SEQ ID NO: 383001 - DNA, 19 bp, Homo sapiens
  siRNA target sequence for PEGASUS (NM_022466.2,336-354).
ggacttcgtgaaagatttt

SEQ ID NO: 383002 - DNA, 19 bp, Homo sapiens
  siRNA target sequence for PEGASUS (NM_022466.2,378-396).
ccatcacgtgaacatgatt

SEQ ID NO: 383003 - DNA, 19 bp, Homo sapiens
  siRNA target sequence for PEGASUS (NM_022466.2,379-397).
catcacgtgaacatgattt

SEQ ID NO: 383004 - DNA, 19 bp, Homo sapiens
  siRNA target sequence for PEGASUS (NM_022466.2,516-534).
gttagtagacgggtttgaa

SEQ ID NO: 383005 - DNA, 19 bp, Homo sapiens
  siRNA target sequence for PEGASUS (NM_022466.2,558-576).
gtgtcggtactgcaactat

SEQ ID NO: 383006 - DNA, 19 bp, Homo sapiens
  siRNA target sequence for PEGASUS (NM_022466.2,688-706).
gcccatatgcgttctcata

SEQ ID NO: 383007 - DNA, 19 bp, Homo sapiens
  siRNA target sequence for PEGASUS (NM_022466.2,749-767).
gcagtgatcgaagtaactt

SEQ ID NO: 383008 - DNA, 19 bp, Homo sapiens
  siRNA target sequence for PEGASUS (NM_022466.2,775-793).
catcgaaggcgcaagcata

SEQ ID NO: 383009 - DNA, 19 bp, Homo sapiens
  siRNA target sequence for PEGASUS (NM_022466.2,778-796).
cgaaggcgcaagcataaaa

SEQ ID NO: 383010 - DNA, 19 bp, Homo sapiens
  siRNA target sequence for PEGASUS (NM_022466.2,782-800).
ggcgcaagcataaaatggt

SEQ ID NO: 383011 - DNA, 19 bp, Homo sapiens
  siRNA target sequence for PEGASUS (NM_022466.2,783-801).
gcgcaagcataaaatggta

SEQ ID NO: 383012 - DNA, 19 bp, Homo sapiens
  siRNA target sequence for PEGASUS (NM_022466.2,790-808).
cataaaatggtaccaatta

SEQ ID NO: 383013 - DNA, 19 bp, Homo sapiens
  siRNA target sequence for PEGASUS (NM_022466.2,811-829).
ggtactaggtcttccttaa

SEQ ID NO: 383014 - DNA, 19 bp, Homo sapiens
  siRNA target sequence for PEGASUS (NM_022466.2,884-902).
gcagaagagcactaatcaa

SEQ ID NO: 383015 - DNA, 19 bp, Homo sapiens
  siRNA target sequence for PEGASUS (NM_022466.2,887-905).
gaagagcactaatcaactt

SEQ ID NO: 383016 - DNA, 19 bp, Homo sapiens
  siRNA target sequence for PEGASUS (NM_022466.2,928-946).
cagaaaccagactacctta

SEQ ID NO: 383017 - DNA, 19 bp, Homo sapiens
  siRNA target sequence for PEGASUS (NM_022466.2,934-952).
ccagactaccttaacgatt

SEQ ID NO: 383018 - DNA, 19 bp, Homo sapiens
  siRNA target sequence for PEGASUS (NM_022466.2,935-953).
cagactaccttaacgattt

SEQ ID NO: 383019 - DNA, 19 bp, Homo sapiens
  siRNA target sequence for PEGASUS (NM_022466.2,937-955).
gactaccttaacgatttta

SEQ ID NO: 383020 - DNA, 19 bp, Homo sapiens
  siRNA target sequence for PEGASUS (NM_022466.2,956-974).
cccacgaaatcccaaatat

SEQ ID NO: 383021 - DNA, 19 bp, Homo sapiens
  siRNA target sequence for PEGASUS (NM_022466.2,975-993).
ccagactgactcctatgaa

SEQ ID NO: 383022 - DNA, 19 bp, Homo sapiens
  siRNA target sequence for PEGASUS (NM_022466.2,978-996).
gactgactcctatgaaagt

SEQ ID NO: 383023 - DNA, 19 bp, Homo sapiens
  siRNA target sequence for PEGASUS (NM_022466.2,1028-1046).
caagggacccccaagaact

SEQ ID NO: 383024 - DNA, 19 bp, Homo sapiens
  siRNA target sequence for PEGASUS (NM_022466.2,1031-1049).
gggacccccaagaactcat

SEQ ID NO: 383025 - DNA, 19 bp, Homo sapiens
  siRNA target sequence for PEGASUS (NM_022466.2,1050-1068).
ggttgataaccctttgaat

SEQ ID NO: 383026 - DNA, 19 bp, Homo sapiens
  siRNA target sequence for PEGASUS (NM_022466.2,1100-1118).
gtctgccacccgaaaacca

SEQ ID NO: 383027 - DNA, 19 bp, Homo sapiens
  siRNA target sequence for PEGASUS (NM_022466.2,1102-1120).
ctgccacccgaaaaccaaa

SEQ ID NO: 383028 - DNA, 19 bp, Homo sapiens
  siRNA target sequence for PEGASUS (NM_022466.2,1206-1224).
cgtatcagcaagtattcct

SEQ ID NO: 383029 - DNA, 19 bp, Homo sapiens
  siRNA target sequence for PEGASUS (NM_022466.2,1253-1271).
ctcggccatcccatagtca

SEQ ID NO: 383030 - DNA, 19 bp, Homo sapiens
  siRNA target sequence for PEGASUS (NM_022466.2,1255-1273).
cggccatcccatagtcaaa

SEQ ID NO: 383031 - DNA, 19 bp, Homo sapiens
  siRNA target sequence for PEGASUS (NM_022466.2,1263-1281).
ccatagtcaaaggaactat

SEQ ID NO: 383032 - DNA, 19 bp, Homo sapiens
  siRNA target sequence for PEGASUS (NM_022466.2,1264-1282).
catagtcaaaggaactata

SEQ ID NO: 383033 - DNA, 19 bp, Homo sapiens
  siRNA target sequence for PEGASUS (NM_022466.2,1406-1424).
gccagcactgtgatatgta

SEQ ID NO: 383034 - DNA, 19 bp, Homo sapiens
  siRNA target sequence for PEGASUS (NM_022466.2,1432-1450).
gacaacatcctttacacta

SEQ ID NO: 383035 - DNA, 19 bp, Homo sapiens
  siRNA target sequence for PEGASUS (NM_022466.2,1437-1455).
catcctttacactattcat

SEQ ID NO: 383036 - DNA, 19 bp, Homo sapiens
  siRNA target sequence for PEGASUS (NM_022466.2,1460-1478).
gatgtcatgggtatgaaaa

SEQ ID NO: 383037 - DNA, 19 bp, Homo sapiens
  siRNA target sequence for FLJ21195 (NM_022469.2,633-651).
cacccttccgactcaagaa

SEQ ID NO: 383038 - DNA, 19 bp, Homo sapiens
  siRNA target sequence for FLJ21195 (NM_022469.2,635-653).
cccttccgactcaagaaaa

SEQ ID NO: 383039 - DNA, 19 bp, Homo sapiens
  siRNA target sequence for ZFP106 (NM_022473.1,338-356).
gccagtggggagaattgaa

SEQ ID NO: 383040 - DNA, 19 bp, Homo sapiens
  siRNA target sequence for ZFP106 (NM_022473.1,377-395).
ccctagggacattagtcat

SEQ ID NO: 383041 - DNA, 19 bp, Homo sapiens
  siRNA target sequence for ZFP106 (NM_022473.1,416-434).
cacagaagtgggtctttct

SEQ ID NO: 383042 - DNA, 19 bp, Homo sapiens
  siRNA target sequence for ZFP106 (NM_022473.1,425-443).
gggtctttctgcatatgca

SEQ ID NO: 383043 - DNA, 19 bp, Homo sapiens
  siRNA target sequence for ZFP106 (NM_022473.1,426-444).
ggtctttctgcatatgcaa

SEQ ID NO: 383044 - DNA, 19 bp, Homo sapiens
  siRNA target sequence for ZFP106 (NM_022473.1,456-474).
ggccagttgcacaaagata

SEQ ID NO: 383045 - DNA, 19 bp, Homo sapiens
  siRNA target sequence for ZFP106 (NM_022473.1,537-555).
gacaaggaactcattcagt

SEQ ID NO: 383046 - DNA, 19 bp, Homo sapiens
  siRNA target sequence for ZFP106 (NM_022473.1,539-557).
caaggaactcattcagtta

SEQ ID NO: 383047 - DNA, 19 bp, Homo sapiens
  siRNA target sequence for ZFP106 (NM_022473.1,585-603).
caagatgaaccttccaata

SEQ ID NO: 383048 - DNA, 19 bp, Homo sapiens
  siRNA target sequence for ZFP106 (NM_022473.1,588-606).
gatgaaccttccaatagca

SEQ ID NO: 383049 - DNA, 19 bp, Homo sapiens
  siRNA target sequence for ZFP106 (NM_022473.1,598-616).
ccaatagcaaccaagaaat

SEQ ID NO: 383050 - DNA, 19 bp, Homo sapiens
  siRNA target sequence for ZFP106 (NM_022473.1,648-666).
cgagaagaccgaattcctt

SEQ ID NO: 383051 - DNA, 19 bp, Homo sapiens
  siRNA target sequence for ZFP106 (NM_022473.1,649-667).
gagaagaccgaattcctta

SEQ ID NO: 383052 - DNA, 19 bp, Homo sapiens
  siRNA target sequence for ZFP106 (NM_022473.1,717-735).
ccacagcgggattggaaat

SEQ ID NO: 383053 - DNA, 19 bp, Homo sapiens
  siRNA target sequence for ZFP106 (NM_022473.1,847-865).
cctcgacttggtttcacaa

SEQ ID NO: 383054 - DNA, 19 bp, Homo sapiens
  siRNA target sequence for ZFP106 (NM_022473.1,856-874).
ggtttcacaaccatagtaa

SEQ ID NO: 383055 - DNA, 19 bp, Homo sapiens
  siRNA target sequence for ZFP106 (NM_022473.1,882-900).
ggtggttggctttcaaata

SEQ ID NO: 383056 - DNA, 19 bp, Homo sapiens
  siRNA target sequence for ZFP106 (NM_022473.1,901-919).
gtggagcagtagattggaa

SEQ ID NO: 383057 - DNA, 19 bp, Homo sapiens
  siRNA target sequence for ZFP106 (NM_022473.1,906-924).
gcagtagattggaatcata

SEQ ID NO: 383058 - DNA, 19 bp, Homo sapiens
  siRNA target sequence for ZFP106 (NM_022473.1,976-994).
ccagttggcatatgaacaa

SEQ ID NO: 383059 - DNA, 19 bp, Homo sapiens
  siRNA target sequence for ZFP106 (NM_022473.1,982-1000).
ggcatatgaacaacagtaa

SEQ ID NO: 383060 - DNA, 19 bp, Homo sapiens
  siRNA target sequence for ZFP106 (NM_022473.1,1015-1033).
ccagtgtacgtagtacaaa

SEQ ID NO: 383061 - DNA, 19 bp, Homo sapiens
  siRNA target sequence for ZFP106 (NM_022473.1,1016-1034).
cagtgtacgtagtacaaat

SEQ ID NO: 383062 - DNA, 19 bp, Homo sapiens
  siRNA target sequence for ZFP106 (NM_022473.1,1018-1036).
gtgtacgtagtacaaataa

SEQ ID NO: 383063 - DNA, 19 bp, Homo sapiens
  siRNA target sequence for ZFP106 (NM_022473.1,1020-1038).
gtacgtagtacaaataatt

SEQ ID NO: 383064 - DNA, 19 bp, Homo sapiens
  siRNA target sequence for ZFP106 (NM_022473.1,1023-1041).
cgtagtacaaataattgga

SEQ ID NO: 383065 - DNA, 19 bp, Homo sapiens
  siRNA target sequence for ZFP106 (NM_022473.1,1052-1070).
ccctggagacaaatttcaa

SEQ ID NO: 383066 - DNA, 19 bp, Homo sapiens
  siRNA target sequence for ZFP106 (NM_022473.1,1103-1121).
ggaagacatgactatgcta

SEQ ID NO: 383067 - DNA, 19 bp, Homo sapiens
  siRNA target sequence for ZFP106 (NM_022473.1,1114-1132).
ctatgctatggaacaagaa

SEQ ID NO: 383068 - DNA, 19 bp, Homo sapiens
  siRNA target sequence for ZFP106 (NM_022473.1,1127-1145).
caagaaatctaataagtca

SEQ ID NO: 383069 - DNA, 19 bp, Homo sapiens
  siRNA target sequence for ZFP106 (NM_022473.1,1154-1172).
cagtcacgacagatataat

SEQ ID NO: 383070 - DNA, 19 bp, Homo sapiens
  siRNA target sequence for ZFP106 (NM_022473.1,1200-1218).
ggtacagttgccacatata

SEQ ID NO: 383071 - DNA, 19 bp, Homo sapiens
  siRNA target sequence for ZFP106 (NM_022473.1,1263-1281).
ggcttactcgacttcaatt

SEQ ID NO: 383072 - DNA, 19 bp, Homo sapiens
  siRNA target sequence for ZFP106 (NM_022473.1,1264-1282).
gcttactcgacttcaattt

SEQ ID NO: 383073 - DNA, 19 bp, Homo sapiens
  siRNA target sequence for ZFP106 (NM_022473.1,1265-1283).
cttactcgacttcaatttt

SEQ ID NO: 383074 - DNA, 19 bp, Homo sapiens
  siRNA target sequence for ZFP106 (NM_022473.1,1292-1310).
ggaaagccaaaccactaaa

SEQ ID NO: 383075 - DNA, 19 bp, Homo sapiens
  siRNA target sequence for ZFP106 (NM_022473.1,1416-1434).
cagtcgggattgaaagaca

SEQ ID NO: 383076 - DNA, 19 bp, Homo sapiens
  siRNA target sequence for ZFP106 (NM_022473.1,1484-1502).
cttgataactacaggaata

SEQ ID NO: 383077 - DNA, 19 bp, Homo sapiens
  siRNA target sequence for ZFP106 (NM_022473.1,1506-1524).
gagccccaaactgatgaaa

SEQ ID NO: 383078 - DNA, 19 bp, Homo sapiens
  siRNA target sequence for ZFP106 (NM_022473.1,1567-1585).
ctggatctcttaatcacaa

SEQ ID NO: 383079 - DNA, 19 bp, Homo sapiens
  siRNA target sequence for ZFP106 (NM_022473.1,1628-1646).
gtgccccactgcagaaaaa

SEQ ID NO: 383080 - DNA, 19 bp, Homo sapiens
  siRNA target sequence for ZFP106 (NM_022473.1,1656-1674).
gagcatacaccaaataaaa

SEQ ID NO: 383081 - DNA, 19 bp, Homo sapiens
  siRNA target sequence for ZFP106 (NM_022473.1,1707-1725).
ccagccactaaatcattgt

SEQ ID NO: 383082 - DNA, 19 bp, Homo sapiens
  siRNA target sequence for ZFP106 (NM_022473.1,1737-1755).
gatccaaagaatatctcaa

SEQ ID NO: 383083 - DNA, 19 bp, Homo sapiens
  siRNA target sequence for ZFP106 (NM_022473.1,1780-1798).
cccctggagaacactcaaa

SEQ ID NO: 383084 - DNA, 19 bp, Homo sapiens
  siRNA target sequence for ZFP106 (NM_022473.1,1847-1865).
caaactgcgtagttcatgt

SEQ ID NO: 383085 - DNA, 19 bp, Homo sapiens
  siRNA target sequence for ZFP106 (NM_022473.1,1910-1928).
gcaatctggtgataattta

SEQ ID NO: 383086 - DNA, 19 bp, Homo sapiens
  siRNA target sequence for ZFP106 (NM_022473.1,1964-1982).
gtgtcatgagtcattgcaa

SEQ ID NO: 383087 - DNA, 19 bp, Homo sapiens
  siRNA target sequence for ZFP106 (NM_022473.1,1966-1984).
gtcatgagtcattgcaaaa

SEQ ID NO: 383088 - DNA, 19 bp, Homo sapiens
  siRNA target sequence for ZFP106 (NM_022473.1,1986-2004).
ccacttcttagcacttcta

SEQ ID NO: 383089 - DNA, 19 bp, Homo sapiens
  siRNA target sequence for ZFP106 (NM_022473.1,1992-2010).
cttagcacttctaaaagta

SEQ ID NO: 383090 - DNA, 19 bp, Homo sapiens
  siRNA target sequence for ZFP106 (NM_022473.1,2018-2036).
ctatgcaaaagcaagtaga

SEQ ID NO: 383091 - DNA, 19 bp, Homo sapiens
  siRNA target sequence for ZFP106 (NM_022473.1,2050-2068).
ctgaaaaagggtctttgaa

SEQ ID NO: 383092 - DNA, 19 bp, Homo sapiens
  siRNA target sequence for ZFP106 (NM_022473.1,2084-2102).
gcacgcactagaagatgaa

SEQ ID NO: 383093 - DNA, 19 bp, Homo sapiens
  siRNA target sequence for ZFP106 (NM_022473.1,2085-2103).
cacgcactagaagatgaaa

SEQ ID NO: 383094 - DNA, 19 bp, Homo sapiens
  siRNA target sequence for ZFP106 (NM_022473.1,2087-2105).
cgcactagaagatgaaagt

SEQ ID NO: 383095 - DNA, 19 bp, Homo sapiens
  siRNA target sequence for ZFP106 (NM_022473.1,2089-2107).
cactagaagatgaaagtga

SEQ ID NO: 383096 - DNA, 19 bp, Homo sapiens
  siRNA target sequence for ZFP106 (NM_022473.1,2116-2134).
catctgacacggaaaagca

SEQ ID NO: 383097 - DNA, 19 bp, Homo sapiens
  siRNA target sequence for ZFP106 (NM_022473.1,2153-2171).
cctaggttctgcaactaca

SEQ ID NO: 383098 - DNA, 19 bp, Homo sapiens
  siRNA target sequence for ZFP106 (NM_022473.1,2161-2179).
ctgcaactacagaattgtt

SEQ ID NO: 383099 - DNA, 19 bp, Homo sapiens
  siRNA target sequence for ZFP106 (NM_022473.1,2258-2276).
cccatgtaatcccatagtt

SEQ ID NO: 383100 - DNA, 19 bp, Homo sapiens
  siRNA target sequence for ZFP106 (NM_022473.1,2269-2287).
ccatagttcgccagaaaga

SEQ ID NO: 383101 - DNA, 19 bp, Homo sapiens
  siRNA target sequence for ZFP106 (NM_022473.1,2270-2288).
catagttcgccagaaagaa

SEQ ID NO: 383102 - DNA, 19 bp, Homo sapiens
  siRNA target sequence for ZFP106 (NM_022473.1,2326-2344).
ctggcttattgctagactt

SEQ ID NO: 383103 - DNA, 19 bp, Homo sapiens
  siRNA target sequence for ZFP106 (NM_022473.1,2365-2383).
cacaggttgatgactctat

SEQ ID NO: 383104 - DNA, 19 bp, Homo sapiens
  siRNA target sequence for ZFP106 (NM_022473.1,2367-2385).
caggttgatgactctatta

SEQ ID NO: 383105 - DNA, 19 bp, Homo sapiens
  siRNA target sequence for ZFP106 (NM_022473.1,2526-2544).
gatctaacccggcacatta

SEQ ID NO: 383106 - DNA, 19 bp, Homo sapiens
  siRNA target sequence for ZFP106 (NM_022473.1,2529-2547).
ctaacccggcacattagtt

SEQ ID NO: 383107 - DNA, 19 bp, Homo sapiens
  siRNA target sequence for ZFP106 (NM_022473.1,2533-2551).
cccggcacattagtttgaa

SEQ ID NO: 383108 - DNA, 19 bp, Homo sapiens
  siRNA target sequence for ZFP106 (NM_022473.1,2662-2680).
caaccctacggcagattct

SEQ ID NO: 383109 - DNA, 19 bp, Homo sapiens
  siRNA target sequence for ZFP106 (NM_022473.1,2666-2684).
cctacggcagattctaaat

SEQ ID NO: 383110 - DNA, 19 bp, Homo sapiens
  siRNA target sequence for ZFP106 (NM_022473.1,2670-2688).
cggcagattctaaatgcat

SEQ ID NO: 383111 - DNA, 19 bp, Homo sapiens
  siRNA target sequence for ZFP106 (NM_022473.1,2685-2703).
gcatctcggagaaatgtca

SEQ ID NO: 383112 - DNA, 19 bp, Homo sapiens
  siRNA target sequence for ZFP106 (NM_022473.1,2686-2704).
catctcggagaaatgtcaa

SEQ ID NO: 383113 - DNA, 19 bp, Homo sapiens
  siRNA target sequence for ZFP106 (NM_022473.1,2764-2782).
ccaggtttggcatagaaat

SEQ ID NO: 383114 - DNA, 19 bp, Homo sapiens
  siRNA target sequence for ZFP106 (NM_022473.1,2783-2801).
ggtaccccttgttcaaaat

SEQ ID NO: 383115 - DNA, 19 bp, Homo sapiens
  siRNA target sequence for ZFP106 (NM_022473.1,2994-3012).
gagccccagcagatggttt

SEQ ID NO: 383116 - DNA, 19 bp, Homo sapiens
  siRNA target sequence for ZFP106 (NM_022473.1,3008-3026).
ggtttcacctagtaactca

SEQ ID NO: 383117 - DNA, 19 bp, Homo sapiens
  siRNA target sequence for ZFP106 (NM_022473.1,3009-3027).
gtttcacctagtaactcat

SEQ ID NO: 383118 - DNA, 19 bp, Homo sapiens
  siRNA target sequence for ZFP106 (NM_022473.1,3055-3073).
ccatgcacctcaaacaaga

SEQ ID NO: 383119 - DNA, 19 bp, Homo sapiens
  siRNA target sequence for ZFP106 (NM_022473.1,3137-3155).
gcgacatagtgcacaatta

SEQ ID NO: 383120 - DNA, 19 bp, Homo sapiens
  siRNA target sequence for ZFP106 (NM_022473.1,3138-3156).
cgacatagtgcacaattat

SEQ ID NO: 383121 - DNA, 19 bp, Homo sapiens
  siRNA target sequence for ZFP106 (NM_022473.1,3141-3159).
catagtgcacaattatcct

SEQ ID NO: 383122 - DNA, 19 bp, Homo sapiens
  siRNA target sequence for ZFP106 (NM_022473.1,3158-3176).
ctctgaccatataatacct

SEQ ID NO: 383123 - DNA, 19 bp, Homo sapiens
  siRNA target sequence for ZFP106 (NM_022473.1,3160-3178).
ctgaccatataataccttt

SEQ ID NO: 383124 - DNA, 19 bp, Homo sapiens
  siRNA target sequence for ZFP106 (NM_022473.1,3225-3243).
ccgtcagagaatcagaatt

SEQ ID NO: 383125 - DNA, 19 bp, Homo sapiens
  siRNA target sequence for ZFP106 (NM_022473.1,3239-3257).
gaattcccaggagagtaat

SEQ ID NO: 383126 - DNA, 19 bp, Homo sapiens
  siRNA target sequence for ZFP106 (NM_022473.1,3315-3333).
gcggatgcagccacagata

SEQ ID NO: 383127 - DNA, 19 bp, Homo sapiens
  siRNA target sequence for ZFP106 (NM_022473.1,3317-3335).
ggatgcagccacagatagt

SEQ ID NO: 383128 - DNA, 19 bp, Homo sapiens
  siRNA target sequence for ZFP106 (NM_022473.1,3318-3336).
gatgcagccacagatagta

SEQ ID NO: 383129 - DNA, 19 bp, Homo sapiens
  siRNA target sequence for ZFP106 (NM_022473.1,3343-3361).
cctctggtgctgaacaaaa

SEQ ID NO: 383130 - DNA, 19 bp, Homo sapiens
  siRNA target sequence for ZFP106 (NM_022473.1,3346-3364).
ctggtgctgaacaaaatga

SEQ ID NO: 383131 - DNA, 19 bp, Homo sapiens
  siRNA target sequence for ZFP106 (NM_022473.1,3536-3554).
gcagtgcatggataacaat

SEQ ID NO: 383132 - DNA, 19 bp, Homo sapiens
  siRNA target sequence for ZFP106 (NM_022473.1,3539-3557).
gtgcatggataacaatctt

SEQ ID NO: 383133 - DNA, 19 bp, Homo sapiens
  siRNA target sequence for ZFP106 (NM_022473.1,3541-3559).
gcatggataacaatcttct

SEQ ID NO: 383134 - DNA, 19 bp, Homo sapiens
  siRNA target sequence for ZFP106 (NM_022473.1,3574-3592).
cccttcagacagcttatgt

SEQ ID NO: 383135 - DNA, 19 bp, Homo sapiens
  siRNA target sequence for ZFP106 (NM_022473.1,3614-3632).
gctcaagcagcagataact

SEQ ID NO: 383136 - DNA, 19 bp, Homo sapiens
  siRNA target sequence for ZFP106 (NM_022473.1,3615-3633).
ctcaagcagcagataacta

SEQ ID NO: 383137 - DNA, 19 bp, Homo sapiens
  siRNA target sequence for ZFP106 (NM_022473.1,3646-3664).
cactgaggacccatagaat

SEQ ID NO: 383138 - DNA, 19 bp, Homo sapiens
  siRNA target sequence for ZFP106 (NM_022473.1,3652-3670).
ggacccatagaatacagat

SEQ ID NO: 383139 - DNA, 19 bp, Homo sapiens
  siRNA target sequence for ZFP106 (NM_022473.1,3653-3671).
gacccatagaatacagatt

SEQ ID NO: 383140 - DNA, 19 bp, Homo sapiens
  siRNA target sequence for ZFP106 (NM_022473.1,3848-3866).
caccggagcctctcttcaa

SEQ ID NO: 383141 - DNA, 19 bp, Homo sapiens
  siRNA target sequence for ZFP106 (NM_022473.1,3855-3873).
gcctctcttcaaataacca

SEQ ID NO: 383142 - DNA, 19 bp, Homo sapiens
  siRNA target sequence for ZFP106 (NM_022473.1,3872-3890).
cacgtctcctactttccaa

SEQ ID NO: 383143 - DNA, 19 bp, Homo sapiens
  siRNA target sequence for ZFP106 (NM_022473.1,3913-3931).
cagactcatcagttcagat

SEQ ID NO: 383144 - DNA, 19 bp, Homo sapiens
  siRNA target sequence for ZFP106 (NM_022473.1,3915-3933).
gactcatcagttcagatta

SEQ ID NO: 383145 - DNA, 19 bp, Homo sapiens
  siRNA target sequence for ZFP106 (NM_022473.1,3919-3937).
catcagttcagattaaaca

SEQ ID NO: 383146 - DNA, 19 bp, Homo sapiens
  siRNA target sequence for ZFP106 (NM_022473.1,3997-4015).
gcaatgtgtccaaggaatt

SEQ ID NO: 383147 - DNA, 19 bp, Homo sapiens
  siRNA target sequence for ZFP106 (NM_022473.1,3998-4016).
caatgtgtccaaggaatta

SEQ ID NO: 383148 - DNA, 19 bp, Homo sapiens
  siRNA target sequence for ZFP106 (NM_022473.1,4039-4057).
gtgacagttgtccagttta

SEQ ID NO: 383149 - DNA, 19 bp, Homo sapiens
  siRNA target sequence for ZFP106 (NM_022473.1,4043-4061).
cagttgtccagtttatcca

SEQ ID NO: 383150 - DNA, 19 bp, Homo sapiens
  siRNA target sequence for ZFP106 (NM_022473.1,4114-4132).
ctagccaagaactgaagtt

SEQ ID NO: 383151 - DNA, 19 bp, Homo sapiens
  siRNA target sequence for ZFP106 (NM_022473.1,4182-4200).
caatcagctggtctttcta

SEQ ID NO: 383152 - DNA, 19 bp, Homo sapiens
  siRNA target sequence for ZFP106 (NM_022473.1,4188-4206).
gctggtctttctagcataa

SEQ ID NO: 383153 - DNA, 19 bp, Homo sapiens
  siRNA target sequence for ZFP106 (NM_022473.1,4189-4207).
ctggtctttctagcataaa

SEQ ID NO: 383154 - DNA, 19 bp, Homo sapiens
  siRNA target sequence for ZFP106 (NM_022473.1,4253-4271).
ctgtaccagttcttttcta

SEQ ID NO: 383155 - DNA, 19 bp, Homo sapiens
  siRNA target sequence for ZFP106 (NM_022473.1,4343-4361).
ggcagaatccactttgaca

SEQ ID NO: 383156 - DNA, 19 bp, Homo sapiens
  siRNA target sequence for ZFP106 (NM_022473.1,4400-4418).
ccggaagaagaaaagtcta

SEQ ID NO: 383157 - DNA, 19 bp, Homo sapiens
  siRNA target sequence for ZFP106 (NM_022473.1,4455-4473).
caggatgttttgactgtta

SEQ ID NO: 383158 - DNA, 19 bp, Homo sapiens
  siRNA target sequence for ZFP106 (NM_022473.1,4457-4475).
ggatgttttgactgttaaa

SEQ ID NO: 383159 - DNA, 19 bp, Homo sapiens
  siRNA target sequence for ZFP106 (NM_022473.1,4574-4592).
cagagatgagccagatagt

SEQ ID NO: 383160 - DNA, 19 bp, Homo sapiens
  siRNA target sequence for ZFP106 (NM_022473.1,4576-4594).
gagatgagccagatagtga

SEQ ID NO: 383161 - DNA, 19 bp, Homo sapiens
  siRNA target sequence for ZFP106 (NM_022473.1,4600-4618).
ctctggaagtcctagaaat

SEQ ID NO: 383162 - DNA, 19 bp, Homo sapiens
  siRNA target sequence for ZFP106 (NM_022473.1,4621-4639).
ctaatcctcagttagaagt

SEQ ID NO: 383163 - DNA, 19 bp, Homo sapiens
  siRNA target sequence for ZFP106 (NM_022473.1,4635-4653).
gaagtagtagccattgatt

SEQ ID NO: 383164 - DNA, 19 bp, Homo sapiens
  siRNA target sequence for ZFP106 (NM_022473.1,4638-4656).
gtagtagccattgattctt

SEQ ID NO: 383165 - DNA, 19 bp, Homo sapiens
  siRNA target sequence for ZFP106 (NM_022473.1,4677-4695).
ccagacagcccatctaaaa

SEQ ID NO: 383166 - DNA, 19 bp, Homo sapiens
  siRNA target sequence for ZFP106 (NM_022473.1,4678-4696).
cagacagcccatctaaaaa

SEQ ID NO: 383167 - DNA, 19 bp, Homo sapiens
  siRNA target sequence for ZFP106 (NM_022473.1,4682-4700).
cagcccatctaaaaaggat

SEQ ID NO: 383168 - DNA, 19 bp, Homo sapiens
  siRNA target sequence for ZFP106 (NM_022473.1,4684-4702).
gcccatctaaaaaggatat

SEQ ID NO: 383169 - DNA, 19 bp, Homo sapiens
  siRNA target sequence for ZFP106 (NM_022473.1,4685-4703).
cccatctaaaaaggatatt

SEQ ID NO: 383170 - DNA, 19 bp, Homo sapiens
  siRNA target sequence for ZFP106 (NM_022473.1,4686-4704).
ccatctaaaaaggatattt

SEQ ID NO: 383171 - DNA, 19 bp, Homo sapiens
  siRNA target sequence for ZFP106 (NM_022473.1,4758-4776).
gttagctctaccagtgaaa

SEQ ID NO: 383172 - DNA, 19 bp, Homo sapiens
  siRNA target sequence for ZFP106 (NM_022473.1,4832-4850).
gatctcctccataaaagga

SEQ ID NO: 383173 - DNA, 19 bp, Homo sapiens
  siRNA target sequence for ZFP106 (NM_022473.1,4837-4855).
cctccataaaaggatcaaa

SEQ ID NO: 383174 - DNA, 19 bp, Homo sapiens
  siRNA target sequence for ZFP106 (NM_022473.1,4932-4950).
gccgtaaatgcaattcaga

SEQ ID NO: 383175 - DNA, 19 bp, Homo sapiens
  siRNA target sequence for ZFP106 (NM_022473.1,4933-4951).
ccgtaaatgcaattcagat

SEQ ID NO: 383176 - DNA, 19 bp, Homo sapiens
  siRNA target sequence for ZFP106 (NM_022473.1,4956-4974).
gggaacttgctatatacct

SEQ ID NO: 383177 - DNA, 19 bp, Homo sapiens
  siRNA target sequence for ZFP106 (NM_022473.1,4990-5008).
ctgttcgggtttataatct

SEQ ID NO: 383178 - DNA, 19 bp, Homo sapiens
  siRNA target sequence for ZFP106 (NM_022473.1,5009-5027).
ggtgagtcggaaatgtatt

SEQ ID NO: 383179 - DNA, 19 bp, Homo sapiens
  siRNA target sequence for ZFP106 (NM_022473.1,5012-5030).
gagtcggaaatgtattggt

SEQ ID NO: 383180 - DNA, 19 bp, Homo sapiens
  siRNA target sequence for ZFP106 (NM_022473.1,5039-5057).
gggtcatacctccaaagtt

SEQ ID NO: 383181 - DNA, 19 bp, Homo sapiens
  siRNA target sequence for ZFP106 (NM_022473.1,5040-5058).
ggtcatacctccaaagtta

SEQ ID NO: 383182 - DNA, 19 bp, Homo sapiens
  siRNA target sequence for ZFP106 (NM_022473.1,5041-5059).
gtcatacctccaaagttaa

SEQ ID NO: 383183 - DNA, 19 bp, Homo sapiens
  siRNA target sequence for ZFP106 (NM_022473.1,5121-5139).
cataccatccgctgctata

SEQ ID NO: 383184 - DNA, 19 bp, Homo sapiens
  siRNA target sequence for ZFP106 (NM_022473.1,5125-5143).
ccatccgctgctataatgt

SEQ ID NO: 383185 - DNA, 19 bp, Homo sapiens
  siRNA target sequence for ZFP106 (NM_022473.1,5126-5144).
catccgctgctataatgtt

SEQ ID NO: 383186 - DNA, 19 bp, Homo sapiens
  siRNA target sequence for ZFP106 (NM_022473.1,5130-5148).
cgctgctataatgttaaga

SEQ ID NO: 383187 - DNA, 19 bp, Homo sapiens
  siRNA target sequence for ZFP106 (NM_022473.1,5244-5262).
gtggtcaccttcaacataa

SEQ ID NO: 383188 - DNA, 19 bp, Homo sapiens
  siRNA target sequence for ZFP106 (NM_022473.1,5247-5265).
gtcaccttcaacataaaga

SEQ ID NO: 383189 - DNA, 19 bp, Homo sapiens
  siRNA target sequence for ZFP106 (NM_022473.1,5270-5288).
caaacgacttgagatcttt

SEQ ID NO: 383190 - DNA, 19 bp, Homo sapiens
  siRNA target sequence for ZFP106 (NM_022473.1,5351-5369).
gctggtcgtggggtcttat

SEQ ID NO: 383191 - DNA, 19 bp, Homo sapiens
  siRNA target sequence for ZFP106 (NM_022473.1,5497-5515).
cagtccatgctcacaacat

SEQ ID NO: 383192 - DNA, 19 bp, Homo sapiens
  siRNA target sequence for ZFP106 (NM_022473.1,5526-5544).
gagctcgtgcggatctata

SEQ ID NO: 383193 - DNA, 19 bp, Homo sapiens
  siRNA target sequence for ZFP106 (NM_022473.1,5528-5546).
gctcgtgcggatctataaa

SEQ ID NO: 383194 - DNA, 19 bp, Homo sapiens
  siRNA target sequence for ZFP106 (NM_022473.1,5531-5549).
cgtgcggatctataaaggt

SEQ ID NO: 383195 - DNA, 19 bp, Homo sapiens
  siRNA target sequence for ZFP106 (NM_022473.1,5564-5582).
gactgtggtgaatatccta

SEQ ID NO: 383196 - DNA, 19 bp, Homo sapiens
  siRNA target sequence for ZFP106 (NM_022473.1,5597-5615).
gactgcttgcctggataaa

SEQ ID NO: 383197 - DNA, 19 bp, Homo sapiens
  siRNA target sequence for ZFP106 (NM_022473.1,5599-5617).
ctgcttgcctggataaatt

SEQ ID NO: 383198 - DNA, 19 bp, Homo sapiens
  siRNA target sequence for ZFP106 (NM_022473.1,5622-5640).
cgtgtctatgaattacagt

SEQ ID NO: 383199 - DNA, 19 bp, Homo sapiens
  siRNA target sequence for ZFP106 (NM_022473.1,5639-5657).
gtctcatgatcgattacaa

SEQ ID NO: 383200 - DNA, 19 bp, Homo sapiens
  siRNA target sequence for ZFP106 (NM_022473.1,5641-5659).
ctcatgatcgattacaagt

SEQ ID NO: 383201 - DNA, 19 bp, Homo sapiens
  siRNA target sequence for ZFP106 (NM_022473.1,5676-5694).
gacatgattatgtgtatga

SEQ ID NO: 383202 - DNA, 19 bp, Homo sapiens
  siRNA target sequence for ZFP106 (NM_022473.1,5696-5714).
catccataaaagcatgatt

SEQ ID NO: 383203 - DNA, 19 bp, Homo sapiens
  siRNA target sequence for ZFP106 (NM_022473.1,5745-5763).
gccgtgaggcttaatctga

SEQ ID NO: 383204 - DNA, 19 bp, Homo sapiens
  siRNA target sequence for ZFP106 (NM_022473.1,5746-5764).
ccgtgaggcttaatctgat

SEQ ID NO: 383205 - DNA, 19 bp, Homo sapiens
  siRNA target sequence for ZFP106 (NM_022473.1,5786-5804).
gcatggttgctctctgata

SEQ ID NO: 383206 - DNA, 19 bp, Homo sapiens
  siRNA target sequence for ZFP106 (NM_022473.1,5801-5819).
gatatttggcgttgtagat

SEQ ID NO: 383207 - DNA, 19 bp, Homo sapiens
  siRNA target sequence for ZFP106 (NM_022473.1,5808-5826).
ggcgttgtagatcatttaa

SEQ ID NO: 383208 - DNA, 19 bp, Homo sapiens
  siRNA target sequence for ZFP106 (NM_022473.1,5837-5855).
gctgaccgaccacactaat

SEQ ID NO: 383209 - DNA, 19 bp, Homo sapiens
  siRNA target sequence for ZFP106 (NM_022473.1,5858-5876).
caacttccagactctgaaa

SEQ ID NO: 383210 - DNA, 19 bp, Homo sapiens
  siRNA target sequence for ZFP106 (NM_022473.1,5891-5909).
ctgcgatgcttttttcact

SEQ ID NO: 383211 - DNA, 19 bp, Homo sapiens
  siRNA target sequence for HHIP (NM_022475.1,944-962).
gttaccaacaacacagaat

SEQ ID NO: 383212 - DNA, 19 bp, Homo sapiens
  siRNA target sequence for HHIP (NM_022475.1,1143-1161).
ctgcggatgagttttgctt

SEQ ID NO: 383213 - DNA, 19 bp, Homo sapiens
  siRNA target sequence for HHIP (NM_022475.1,1221-1239).
gaggaccagcatctaacta

SEQ ID NO: 383214 - DNA, 19 bp, Homo sapiens
  siRNA target sequence for HHIP (NM_022475.1,1223-1241).
ggaccagcatctaactact

SEQ ID NO: 383215 - DNA, 19 bp, Homo sapiens
  siRNA target sequence for HHIP (NM_022475.1,1224-1242).
gaccagcatctaactactt

SEQ ID NO: 383216 - DNA, 19 bp, Homo sapiens
  siRNA target sequence for HHIP (NM_022475.1,1243-1261).
ggaccagatggaagaatat

SEQ ID NO: 383217 - DNA, 19 bp, Homo sapiens
  siRNA target sequence for HHIP (NM_022475.1,1368-1386).
gctcgcaacgtctcttcat

SEQ ID NO: 383218 - DNA, 19 bp, Homo sapiens
  siRNA target sequence for HHIP (NM_022475.1,1369-1387).
ctcgcaacgtctcttcatt

SEQ ID NO: 383219 - DNA, 19 bp, Homo sapiens
  siRNA target sequence for HHIP (NM_022475.1,1371-1389).
cgcaacgtctcttcattct

SEQ ID NO: 383220 - DNA, 19 bp, Homo sapiens
  siRNA target sequence for HHIP (NM_022475.1,1507-1525).
gctaagcctcgcattccat

SEQ ID NO: 383221 - DNA, 19 bp, Homo sapiens
  siRNA target sequence for HHIP (NM_022475.1,1517-1535).
gcattccatcccaattaca

SEQ ID NO: 383222 - DNA, 19 bp, Homo sapiens
  siRNA target sequence for HHIP (NM_022475.1,1522-1540).
ccatcccaattacaagaaa

SEQ ID NO: 383223 - DNA, 19 bp, Homo sapiens
  siRNA target sequence for HHIP (NM_022475.1,1610-1628).
cttagggttgtggaataca

SEQ ID NO: 383224 - DNA, 19 bp, Homo sapiens
  siRNA target sequence for HHIP (NM_022475.1,1616-1634).
gttgtggaatacacagtat

SEQ ID NO: 383225 - DNA, 19 bp, Homo sapiens
  siRNA target sequence for HHIP (NM_022475.1,1646-1664).
ccacaccaagttgatttga

SEQ ID NO: 383226 - DNA, 19 bp, Homo sapiens
  siRNA target sequence for HHIP (NM_022475.1,1649-1667).
caccaagttgatttgagaa

SEQ ID NO: 383227 - DNA, 19 bp, Homo sapiens
  siRNA target sequence for HHIP (NM_022475.1,1734-1752).
gccctgacggctttttgta

SEQ ID NO: 383228 - DNA, 19 bp, Homo sapiens
  siRNA target sequence for HHIP (NM_022475.1,1736-1754).
cctgacggctttttgtaca

SEQ ID NO: 383229 - DNA, 19 bp, Homo sapiens
  siRNA target sequence for HHIP (NM_022475.1,1737-1755).
ctgacggctttttgtacat

SEQ ID NO: 383230 - DNA, 19 bp, Homo sapiens
  siRNA target sequence for HHIP (NM_022475.1,1739-1757).
gacggctttttgtacatca

SEQ ID NO: 383231 - DNA, 19 bp, Homo sapiens
  siRNA target sequence for HHIP (NM_022475.1,1760-1778).
cttggtgatgggatgatta

SEQ ID NO: 383232 - DNA, 19 bp, Homo sapiens
  siRNA target sequence for HHIP (NM_022475.1,1967-1985).
gatagacatcccactgata

SEQ ID NO: 383233 - DNA, 19 bp, Homo sapiens
  siRNA target sequence for HHIP (NM_022475.1,1976-1994).
cccactgatataaacatca

SEQ ID NO: 383234 - DNA, 19 bp, Homo sapiens
  siRNA target sequence for HHIP (NM_022475.1,1977-1995).
ccactgatataaacatcaa

SEQ ID NO: 383235 - DNA, 19 bp, Homo sapiens
  siRNA target sequence for HHIP (NM_022475.1,2043-2061).
ccagaattctacagataat

SEQ ID NO: 383236 - DNA, 19 bp, Homo sapiens
  siRNA target sequence for HHIP (NM_022475.1,2113-2131).
cagtaatggtcctttggtt

SEQ ID NO: 383237 - DNA, 19 bp, Homo sapiens
  siRNA target sequence for HHIP (NM_022475.1,2154-2172).
gccagtcagaaagattgta

SEQ ID NO: 383238 - DNA, 19 bp, Homo sapiens
  siRNA target sequence for HHIP (NM_022475.1,2155-2173).
ccagtcagaaagattgtat

SEQ ID NO: 383239 - DNA, 19 bp, Homo sapiens
  siRNA target sequence for HHIP (NM_022475.1,2182-2200).
cgtgtttggagatcgtaat

SEQ ID NO: 383240 - DNA, 19 bp, Homo sapiens
  siRNA target sequence for HHIP (NM_022475.1,2190-2208).
gagatcgtaatgggaattt

SEQ ID NO: 383241 - DNA, 19 bp, Homo sapiens
  siRNA target sequence for HHIP (NM_022475.1,2195-2213).
cgtaatgggaatttcctaa

SEQ ID NO: 383242 - DNA, 19 bp, Homo sapiens
  siRNA target sequence for HHIP (NM_022475.1,2278-2296).
gtcctgtagaggctacttt

SEQ ID NO: 383243 - DNA, 19 bp, Homo sapiens
  siRNA target sequence for HHIP (NM_022475.1,2313-2331).
gatttggagaagatgaact

SEQ ID NO: 383244 - DNA, 19 bp, Homo sapiens
  siRNA target sequence for HHIP (NM_022475.1,2327-2345).
gaactaggtgaagtttaca

SEQ ID NO: 383245 - DNA, 19 bp, Homo sapiens
  siRNA target sequence for HHIP (NM_022475.1,2370-2388).
cccagactcacaatggaaa

SEQ ID NO: 383246 - DNA, 19 bp, Homo sapiens
  siRNA target sequence for HHIP (NM_022475.1,2371-2389).
ccagactcacaatggaaaa

SEQ ID NO: 383247 - DNA, 19 bp, Homo sapiens
  siRNA target sequence for HHIP (NM_022475.1,2686-2704).
cagggcaggtattcttgat

SEQ ID NO: 383248 - DNA, 19 bp, Homo sapiens
  siRNA target sequence for HHIP (NM_022475.1,2688-2706).
gggcaggtattcttgatca

SEQ ID NO: 383249 - DNA, 19 bp, Homo sapiens
  siRNA target sequence for HHIP (NM_022475.1,2694-2712).
gtattcttgatcagatcat

SEQ ID NO: 383250 - DNA, 19 bp, Homo sapiens
  siRNA target sequence for HHIP (NM_022475.1,2705-2723).
cagatcattgacatgacat

SEQ ID NO: 383251 - DNA, 19 bp, Homo sapiens
  siRNA target sequence for HHIP (NM_022475.1,2728-2746).
cttgctggatctaacaagt

SEQ ID NO: 383252 - DNA, 19 bp, Homo sapiens
  siRNA target sequence for HHIP (NM_022475.1,2734-2752).
ggatctaacaagttacatt

SEQ ID NO: 383253 - DNA, 19 bp, Homo sapiens
  siRNA target sequence for FLJ21657 (NM_022483.2,345-363).
gcatccgagactgaaaaga

SEQ ID NO: 383254 - DNA, 19 bp, Homo sapiens
  siRNA target sequence for FLJ21657 (NM_022483.2,378-396).
cagacttgtagcactgaat

SEQ ID NO: 383255 - DNA, 19 bp, Homo sapiens
  siRNA target sequence for FLJ21657 (NM_022483.2,380-398).
gacttgtagcactgaatct

SEQ ID NO: 383256 - DNA, 19 bp, Homo sapiens
  siRNA target sequence for FLJ21657 (NM_022483.2,382-400).
cttgtagcactgaatctct

SEQ ID NO: 383257 - DNA, 19 bp, Homo sapiens
  siRNA target sequence for FLJ21657 (NM_022483.2,385-403).
gtagcactgaatctcttat

SEQ ID NO: 383258 - DNA, 19 bp, Homo sapiens
  siRNA target sequence for FLJ21657 (NM_022483.2,434-452).
cgtagctgacagacttctt

SEQ ID NO: 383259 - DNA, 19 bp, Homo sapiens
  siRNA target sequence for FLJ21657 (NM_022483.2,483-501).
cttcgtgctctctcagata

SEQ ID NO: 383260 - DNA, 19 bp, Homo sapiens
  siRNA target sequence for FLJ21657 (NM_022483.2,540-558).
gtagtcactggaatcaaga

SEQ ID NO: 383261 - DNA, 19 bp, Homo sapiens
  siRNA target sequence for FLJ21657 (NM_022483.2,543-561).
gtcactggaatcaagaaga

SEQ ID NO: 383262 - DNA, 19 bp, Homo sapiens
  siRNA target sequence for FLJ21657 (NM_022483.2,634-652).
ctggatccatgtctttaaa

SEQ ID NO: 383263 - DNA, 19 bp, Homo sapiens
  siRNA target sequence for FLJ21657 (NM_022483.2,668-686).
cccgcgaagacctttcctt

SEQ ID NO: 383264 - DNA, 19 bp, Homo sapiens
  siRNA target sequence for FLJ21657 (NM_022483.2,711-729).
gtggttctgaccctgaaat

SEQ ID NO: 383265 - DNA, 19 bp, Homo sapiens
  siRNA target sequence for FLJ21657 (NM_022483.2,771-789).
cttccctggatgttattta

SEQ ID NO: 383266 - DNA, 19 bp, Homo sapiens
  siRNA target sequence for FLJ21657 (NM_022483.2,836-854).
gtggatatgcccatttgga

SEQ ID NO: 383267 - DNA, 19 bp, Homo sapiens
  siRNA target sequence for FLJ21657 (NM_022483.2,838-856).
ggatatgcccatttggaaa

SEQ ID NO: 383268 - DNA, 19 bp, Homo sapiens
  siRNA target sequence for FLJ21657 (NM_022483.2,870-888).
ccattctggctttatgtaa

SEQ ID NO: 383269 - DNA, 19 bp, Homo sapiens
  siRNA target sequence for FLJ21657 (NM_022483.2,871-889).
cattctggctttatgtaat

SEQ ID NO: 383270 - DNA, 19 bp, Homo sapiens
  siRNA target sequence for FLJ21657 (NM_022483.2,909-927).
cacatctgttcattcgtta

SEQ ID NO: 383271 - DNA, 19 bp, Homo sapiens
  siRNA target sequence for FLJ21657 (NM_022483.2,916-934).
gttcattcgttatgtattt

SEQ ID NO: 383272 - DNA, 19 bp, Homo sapiens
  siRNA target sequence for FLJ21657 (NM_022483.2,961-979).
caaaacatggagttcgtat

SEQ ID NO: 383273 - DNA, 19 bp, Homo sapiens
  siRNA target sequence for FLJ13576 (NM_022484.2,379-397).
gcgttattgctttagtcat

SEQ ID NO: 383274 - DNA, 19 bp, Homo sapiens
  siRNA target sequence for FLJ13576 (NM_022484.2,388-406).
ctttagtcattgtctctat

SEQ ID NO: 383275 - DNA, 19 bp, Homo sapiens
  siRNA target sequence for FLJ13576 (NM_022484.2,401-419).
ctctatttagcaatgacaa

SEQ ID NO: 383276 - DNA, 19 bp, Homo sapiens
  siRNA target sequence for FLJ13576 (NM_022484.2,463-481).
gcggtatcttggctattta

SEQ ID NO: 383277 - DNA, 19 bp, Homo sapiens
  siRNA target sequence for FLJ13576 (NM_022484.2,473-491).
ggctatttagccagaatca

SEQ ID NO: 383278 - DNA, 19 bp, Homo sapiens
  siRNA target sequence for FLJ13576 (NM_022484.2,474-492).
gctatttagccagaatcaa

SEQ ID NO: 383279 - DNA, 19 bp, Homo sapiens
  siRNA target sequence for FLJ13576 (NM_022484.2,475-493).
ctatttagccagaatcaat

SEQ ID NO: 383280 - DNA, 19 bp, Homo sapiens
  siRNA target sequence for FLJ13576 (NM_022484.2,504-522).
ctatatgcttaggtctata

SEQ ID NO: 383281 - DNA, 19 bp, Homo sapiens
  siRNA target sequence for FLJ13576 (NM_022484.2,591-609).
gaatcgccagcatactcta

SEQ ID NO: 383282 - DNA, 19 bp, Homo sapiens
  siRNA target sequence for FLJ13576 (NM_022484.2,596-614).
gccagcatactctattact

SEQ ID NO: 383283 - DNA, 19 bp, Homo sapiens
  siRNA target sequence for FLJ13576 (NM_022484.2,597-615).
ccagcatactctattacta

SEQ ID NO: 383284 - DNA, 19 bp, Homo sapiens
  siRNA target sequence for FLJ13576 (NM_022484.2,598-616).
cagcatactctattactat

SEQ ID NO: 383285 - DNA, 19 bp, Homo sapiens
  siRNA target sequence for FLJ13576 (NM_022484.2,670-688).
gcttggcctcctatgtttt

SEQ ID NO: 383286 - DNA, 19 bp, Homo sapiens
  siRNA target sequence for FLJ13576 (NM_022484.2,774-792).
gctctctggtggagagaat

SEQ ID NO: 383287 - DNA, 19 bp, Homo sapiens
  siRNA target sequence for FLJ13576 (NM_022484.2,805-823).
ccgtcatcggcccacttta

SEQ ID NO: 383288 - DNA, 19 bp, Homo sapiens
  siRNA target sequence for FLJ13576 (NM_022484.2,807-825).
gtcatcggcccactttact

SEQ ID NO: 383289 - DNA, 19 bp, Homo sapiens
  siRNA target sequence for FLJ13576 (NM_022484.2,809-827).
catcggcccactttactaa

SEQ ID NO: 383290 - DNA, 19 bp, Homo sapiens
  siRNA target sequence for FLJ13576 (NM_022484.2,860-878).
gccattgccagcacaacta

SEQ ID NO: 383291 - DNA, 19 bp, Homo sapiens
  siRNA target sequence for FLJ13576 (NM_022484.2,927-945).
ctatgctgattattgatct

SEQ ID NO: 383292 - DNA, 19 bp, Homo sapiens
  siRNA target sequence for FLJ13576 (NM_022484.2,961-979).
cttagctattccaaactta

SEQ ID NO: 383293 - DNA, 19 bp, Homo sapiens
  siRNA target sequence for FLJ13576 (NM_022484.2,1022-1040).
cccaaaaatccgattgctt

SEQ ID NO: 383294 - DNA, 19 bp, Homo sapiens
  siRNA target sequence for FLJ13576 (NM_022484.2,1024-1042).
caaaaatccgattgctttt

SEQ ID NO: 383295 - DNA, 19 bp, Homo sapiens
  siRNA target sequence for FLJ13576 (NM_022484.2,1033-1051).
gattgcttttgcgtgtttt

SEQ ID NO: 383296 - DNA, 19 bp, Homo sapiens
  siRNA target sequence for FLJ13576 (NM_022484.2,1037-1055).
gcttttgcgtgttttttta

SEQ ID NO: 383297 - DNA, 19 bp, Homo sapiens
  siRNA target sequence for FLJ13576 (NM_022484.2,1038-1056).
cttttgcgtgtttttttat

SEQ ID NO: 383298 - DNA, 19 bp, Homo sapiens
  siRNA target sequence for FLJ13576 (NM_022484.2,1152-1170).
gaagactttcagtcgtttt

SEQ ID NO: 383299 - DNA, 19 bp, Homo sapiens
  siRNA target sequence for FLJ13576 (NM_022484.2,1165-1183).
cgtttttgctggaatgatt

SEQ ID NO: 383300 - DNA, 19 bp, Homo sapiens
  siRNA target sequence for FLJ13576 (NM_022484.2,1175-1193).
ggaatgattgagcttacat

SEQ ID NO: 383301 - DNA, 19 bp, Homo sapiens
  siRNA target sequence for FLJ13576 (NM_022484.2,1206-1224).
ccgcattcaaacttagaga

SEQ ID NO: 383302 - DNA, 19 bp, Homo sapiens
  siRNA target sequence for FLJ13576 (NM_022484.2,1223-1241).
gacactcacctctggtatt

SEQ ID NO: 383303 - DNA, 19 bp, Homo sapiens
  siRNA target sequence for FLJ13576 (NM_022484.2,1225-1243).
cactcacctctggtatttt

SEQ ID NO: 383304 - DNA, 19 bp, Homo sapiens
  siRNA target sequence for FLJ13576 (NM_022484.2,1315-1333).
gggattccataccaaatta

SEQ ID NO: 383305 - DNA, 19 bp, Homo sapiens
  siRNA target sequence for FLJ13576 (NM_022484.2,1316-1334).
ggattccataccaaattaa

SEQ ID NO: 383306 - DNA, 19 bp, Homo sapiens
  siRNA target sequence for FLJ13576 (NM_022484.2,1317-1335).
gattccataccaaattaaa

SEQ ID NO: 383307 - DNA, 19 bp, Homo sapiens
  siRNA target sequence for FLJ13576 (NM_022484.2,1322-1340).
cataccaaattaaatgact

SEQ ID NO: 383308 - DNA, 19 bp, Homo sapiens
  siRNA target sequence for FLJ13576 (NM_022484.2,1361-1379).
cacaggacagattacaata

SEQ ID NO: 383309 - DNA, 19 bp, Homo sapiens
  siRNA target sequence for FLJ13576 (NM_022484.2,1402-1420).
caaagggatgcgccatttt

SEQ ID NO: 383310 - DNA, 19 bp, Homo sapiens
  siRNA target sequence for FLJ13576 (NM_022484.2,1406-1424).
gggatgcgccatttttgct

SEQ ID NO: 383311 - DNA, 19 bp, Homo sapiens
  siRNA target sequence for FLJ13576 (NM_022484.2,1407-1425).
ggatgcgccatttttgctt

SEQ ID NO: 383312 - DNA, 19 bp, Homo sapiens
  siRNA target sequence for FLJ13576 (NM_022484.2,1414-1432).
ccatttttgcttgatttca

SEQ ID NO: 383313 - DNA, 19 bp, Homo sapiens
  siRNA target sequence for FLJ13576 (NM_022484.2,1564-1582).
ccatgaattgggtaactgt

SEQ ID NO: 383314 - DNA, 19 bp, Homo sapiens
  siRNA target sequence for FLJ13576 (NM_022484.2,1565-1583).
catgaattgggtaactgtt

SEQ ID NO: 383315 - DNA, 19 bp, Homo sapiens
  siRNA target sequence for FLJ13576 (NM_022484.2,1613-1631).
gtgattcccaccaacttct

SEQ ID NO: 383316 - DNA, 19 bp, Homo sapiens
  siRNA target sequence for FLJ13576 (NM_022484.2,1698-1716).
ctggcatgctcaatgctat

SEQ ID NO: 383317 - DNA, 19 bp, Homo sapiens
  siRNA target sequence for FLJ13576 (NM_022484.2,1706-1724).
ctcaatgctatccaaagat

SEQ ID NO: 383318 - DNA, 19 bp, Homo sapiens
  siRNA target sequence for FLJ13576 (NM_022484.2,1730-1748).
gcatatcatatgattgaga

SEQ ID NO: 383319 - DNA, 19 bp, Homo sapiens
  siRNA target sequence for FLJ13576 (NM_022484.2,1768-1786).
cacaagtggactgtcattt

SEQ ID NO: 383320 - DNA, 19 bp, Homo sapiens
  siRNA target sequence for FLJ13576 (NM_022484.2,1776-1794).
gactgtcatttgatactct

SEQ ID NO: 383321 - DNA, 19 bp, Homo sapiens
  siRNA target sequence for FLJ13576 (NM_022484.2,1839-1857).
gacccagacatgatacgta

SEQ ID NO: 383322 - DNA, 19 bp, Homo sapiens
  siRNA target sequence for FLJ13576 (NM_022484.2,1841-1859).
cccagacatgatacgtata

SEQ ID NO: 383323 - DNA, 19 bp, Homo sapiens
  siRNA target sequence for FLJ13576 (NM_022484.2,1842-1860).
ccagacatgatacgtatat

SEQ ID NO: 383324 - DNA, 19 bp, Homo sapiens
  siRNA target sequence for FLJ13576 (NM_022484.2,1922-1940).
ctacgccttgacacactta

SEQ ID NO: 383325 - DNA, 19 bp, Homo sapiens
  siRNA target sequence for FLJ13576 (NM_022484.2,1926-1944).
gccttgacacacttataga

SEQ ID NO: 383326 - DNA, 19 bp, Homo sapiens
  siRNA target sequence for FLJ13576 (NM_022484.2,1928-1946).
cttgacacacttatagaat

SEQ ID NO: 383327 - DNA, 19 bp, Homo sapiens
  siRNA target sequence for FLJ13576 (NM_022484.2,1974-1992).
gttcccggcttattatcgt

SEQ ID NO: 383328 - DNA, 19 bp, Homo sapiens
  siRNA target sequence for FLJ13576 (NM_022484.2,1978-1996).
ccggcttattatcgtatta

SEQ ID NO: 383329 - DNA, 19 bp, Homo sapiens
  siRNA target sequence for FLJ13576 (NM_022484.2,1980-1998).
ggcttattatcgtattaga

SEQ ID NO: 383330 - DNA, 19 bp, Homo sapiens
  siRNA target sequence for FLJ13576 (NM_022484.2,1982-2000).
cttattatcgtattagaca

SEQ ID NO: 383331 - DNA, 19 bp, Homo sapiens
  siRNA target sequence for FLJ13576 (NM_022484.2,1990-2008).
cgtattagacagcgaaaat

SEQ ID NO: 383332 - DNA, 19 bp, Homo sapiens
  siRNA target sequence for FLJ13576 (NM_022484.2,2130-2148).
caaaagactgggtagaata

SEQ ID NO: 383333 - DNA, 19 bp, Homo sapiens
  siRNA target sequence for FLJ13576 (NM_022484.2,2271-2289).
ccaagcactggatgttaca

SEQ ID NO: 383334 - DNA, 19 bp, Homo sapiens
  siRNA target sequence for FLJ13576 (NM_022484.2,2275-2293).
gcactggatgttacacttt

SEQ ID NO: 383335 - DNA, 19 bp, Homo sapiens
  siRNA target sequence for FLJ13576 (NM_022484.2,2288-2306).
cactttcctcgtattacat

SEQ ID NO: 383336 - DNA, 19 bp, Homo sapiens
  siRNA target sequence for FLJ13576 (NM_022484.2,2304-2322).
catatcccctagtgcattt

SEQ ID NO: 383337 - DNA, 19 bp, Homo sapiens
  siRNA target sequence for FLJ13576 (NM_022484.2,2339-2357).
ggtctgaaccttttttgga

SEQ ID NO: 383338 - DNA, 19 bp, Homo sapiens
  siRNA target sequence for FLJ13576 (NM_022484.2,2340-2358).
gtctgaaccttttttggat

SEQ ID NO: 383339 - DNA, 19 bp, Homo sapiens
  siRNA target sequence for FLJ13576 (NM_022484.2,2355-2373).
ggatctgcaaaacttgttt

SEQ ID NO: 383340 - DNA, 19 bp, Homo sapiens
  siRNA target sequence for DKFZP761E1824 (NM_022486.1,426-444).
ggaatggacctgaaccttt

SEQ ID NO: 383341 - DNA, 19 bp, Homo sapiens
  siRNA target sequence for DKFZP761E1824 (NM_022486.1,461-479).
gccacatcatgcacagaaa

SEQ ID NO: 383342 - DNA, 19 bp, Homo sapiens
  siRNA target sequence for DKFZP761E1824 (NM_022486.1,462-480).
ccacatcatgcacagaaat

SEQ ID NO: 383343 - DNA, 19 bp, Homo sapiens
  siRNA target sequence for DKFZP761E1824 (NM_022486.1,503-521).
gttccagatggctatatca

SEQ ID NO: 383344 - DNA, 19 bp, Homo sapiens
  siRNA target sequence for DKFZP761E1824 (NM_022486.1,544-562).
gggcagccaggttcgttat

SEQ ID NO: 383345 - DNA, 19 bp, Homo sapiens
  siRNA target sequence for DKFZP761E1824 (NM_022486.1,547-565).
cagccaggttcgttatgct

SEQ ID NO: 383346 - DNA, 19 bp, Homo sapiens
  siRNA target sequence for DKFZP761E1824 (NM_022486.1,585-603).
gtgttccagaagatacagt

SEQ ID NO: 383347 - DNA, 19 bp, Homo sapiens
  siRNA target sequence for DKFZP761E1824 (NM_022486.1,630-648).
gggagtccccaaaattaca

SEQ ID NO: 383348 - DNA, 19 bp, Homo sapiens
  siRNA target sequence for DKFZP761E1824 (NM_022486.1,631-649).
ggagtccccaaaattacat

SEQ ID NO: 383349 - DNA, 19 bp, Homo sapiens
  siRNA target sequence for DKFZP761E1824 (NM_022486.1,632-650).
gagtccccaaaattacatt

SEQ ID NO: 383350 - DNA, 19 bp, Homo sapiens
  siRNA target sequence for DKFZP761E1824 (NM_022486.1,691-709).
cgccatcttggtaggaaat

SEQ ID NO: 383351 - DNA, 19 bp, Homo sapiens
  siRNA target sequence for DKFZP761E1824 (NM_022486.1,693-711).
ccatcttggtaggaaatca

SEQ ID NO: 383352 - DNA, 19 bp, Homo sapiens
  siRNA target sequence for DKFZP761E1824 (NM_022486.1,728-746).
ggtgtggctcgctatgtct

SEQ ID NO: 383353 - DNA, 19 bp, Homo sapiens
  siRNA target sequence for DKFZP761E1824 (NM_022486.1,767-785).
cctggaggaaagatcactt

SEQ ID NO: 383354 - DNA, 19 bp, Homo sapiens
  siRNA target sequence for DKFZP761E1824 (NM_022486.1,917-935).
cccaagatctcatatgtga

SEQ ID NO: 383355 - DNA, 19 bp, Homo sapiens
  siRNA target sequence for DKFZP761E1824 (NM_022486.1,953-971).
cggttggaccctatggaat

SEQ ID NO: 383356 - DNA, 19 bp, Homo sapiens
  siRNA target sequence for DKFZP761E1824 (NM_022486.1,958-976).
ggaccctatggaatcagtt

SEQ ID NO: 383357 - DNA, 19 bp, Homo sapiens
  siRNA target sequence for DKFZP761E1824 (NM_022486.1,1189-1207).
gaacaggcgttctaggaaa

SEQ ID NO: 383358 - DNA, 19 bp, Homo sapiens
  siRNA target sequence for DKFZP761E1824 (NM_022486.1,1192-1210).
caggcgttctaggaaagtt

SEQ ID NO: 383359 - DNA, 19 bp, Homo sapiens
  siRNA target sequence for DKFZP761E1824 (NM_022486.1,1215-1233).
cagaacacatgtaccaatt

SEQ ID NO: 383360 - DNA, 19 bp, Homo sapiens
  siRNA target sequence for DKFZP761E1824 (NM_022486.1,1251-1269).
ggtggtatctggctaactt

SEQ ID NO: 383361 - DNA, 19 bp, Homo sapiens
  siRNA target sequence for DKFZP761E1824 (NM_022486.1,1252-1270).
gtggtatctggctaacttt

SEQ ID NO: 383362 - DNA, 19 bp, Homo sapiens
  siRNA target sequence for DKFZP761E1824 (NM_022486.1,1255-1273).
gtatctggctaacttttct

SEQ ID NO: 383363 - DNA, 19 bp, Homo sapiens
  siRNA target sequence for DKFZP761E1824 (NM_022486.1,1272-1290).
ctcatgcaacatcgtttaa

SEQ ID NO: 383364 - DNA, 19 bp, Homo sapiens
  siRNA target sequence for DKFZP761E1824 (NM_022486.1,1274-1292).
catgcaacatcgtttaact

SEQ ID NO: 383365 - DNA, 19 bp, Homo sapiens
  siRNA target sequence for DKFZP761E1824 (NM_022486.1,1312-1330).
gcctgtagtgtgtttggat

SEQ ID NO: 383366 - DNA, 19 bp, Homo sapiens
  siRNA target sequence for DKFZP761E1824 (NM_022486.1,1331-1349).
ctgtaccctacgactgatt

SEQ ID NO: 383367 - DNA, 19 bp, Homo sapiens
  siRNA target sequence for DKFZP761E1824 (NM_022486.1,1333-1351).
gtaccctacgactgattat

SEQ ID NO: 383368 - DNA, 19 bp, Homo sapiens
  siRNA target sequence for DKFZP761E1824 (NM_022486.1,1384-1402).
gcggcactcagtgcaaata

SEQ ID NO: 383369 - DNA, 19 bp, Homo sapiens
  siRNA target sequence for DKFZP761E1824 (NM_022486.1,1385-1403).
cggcactcagtgcaaataa

SEQ ID NO: 383370 - DNA, 19 bp, Homo sapiens
  siRNA target sequence for DKFZP761E1824 (NM_022486.1,1387-1405).
gcactcagtgcaaataaca

SEQ ID NO: 383371 - DNA, 19 bp, Homo sapiens
  siRNA target sequence for DKFZP761E1824 (NM_022486.1,1410-1428).
caactcccccagcagtaaa

SEQ ID NO: 383372 - DNA, 19 bp, Homo sapiens
  siRNA target sequence for DKFZP761E1824 (NM_022486.1,1413-1431).
ctcccccagcagtaaaaca

SEQ ID NO: 383373 - DNA, 19 bp, Homo sapiens
  siRNA target sequence for DKFZP761E1824 (NM_022486.1,1424-1442).
gtaaaacagaccatcagta

SEQ ID NO: 383374 - DNA, 19 bp, Homo sapiens
  siRNA target sequence for DKFZP761E1824 (NM_022486.1,1430-1448).
cagaccatcagtaacattt

SEQ ID NO: 383375 - DNA, 19 bp, Homo sapiens
  siRNA target sequence for DKFZP761E1824 (NM_022486.1,1482-1500).
gcatcaagacagctgatat

SEQ ID NO: 383376 - DNA, 19 bp, Homo sapiens
  siRNA target sequence for DKFZP761E1824 (NM_022486.1,1620-1638).
gtccgggtaccaactacaa

SEQ ID NO: 383377 - DNA, 19 bp, Homo sapiens
  siRNA target sequence for DKFZP761E1824 (NM_022486.1,1623-1641).
cgggtaccaactacaatgt

SEQ ID NO: 383378 - DNA, 19 bp, Homo sapiens
  siRNA target sequence for DKFZP761E1824 (NM_022486.1,1625-1643).
ggtaccaactacaatgtca

SEQ ID NO: 383379 - DNA, 19 bp, Homo sapiens
  siRNA target sequence for DKFZP761E1824 (NM_022486.1,1712-1730).
ctcccggaagtagaatttt

SEQ ID NO: 383380 - DNA, 19 bp, Homo sapiens
  siRNA target sequence for DKFZP761E1824 (NM_022486.1,1715-1733).
ccggaagtagaatttttta

SEQ ID NO: 383381 - DNA, 19 bp, Homo sapiens
  siRNA target sequence for DKFZP761E1824 (NM_022486.1,1791-1809).
gaccaatcagttcatatca

SEQ ID NO: 383382 - DNA, 19 bp, Homo sapiens
  siRNA target sequence for DKFZP761E1824 (NM_022486.1,1828-1846).
ggccctccaaagcacattt

SEQ ID NO: 383383 - DNA, 19 bp, Homo sapiens
  siRNA target sequence for DKFZP761E1824 (NM_022486.1,1829-1847).
gccctccaaagcacatttt

SEQ ID NO: 383384 - DNA, 19 bp, Homo sapiens
  siRNA target sequence for DKFZP761E1824 (NM_022486.1,1862-1880).
ggcgcttcctccttcttta

SEQ ID NO: 383385 - DNA, 19 bp, Homo sapiens
  siRNA target sequence for DKFZP761E1824 (NM_022486.1,1943-1961).
gatgccatggagataccta

SEQ ID NO: 383386 - DNA, 19 bp, Homo sapiens
  siRNA target sequence for DKFZP761E1824 (NM_022486.1,1948-1966).
catggagatacctatagga

SEQ ID NO: 383387 - DNA, 19 bp, Homo sapiens
  siRNA target sequence for DKFZP761E1824 (NM_022486.1,1972-1990).
gctgtactatggggaatat

SEQ ID NO: 383388 - DNA, 19 bp, Homo sapiens
  siRNA target sequence for DKFZP761E1824 (NM_022486.1,1973-1991).
ctgtactatggggaatatt

SEQ ID NO: 383389 - DNA, 19 bp, Homo sapiens
  siRNA target sequence for DKFZP761E1824 (NM_022486.1,1975-1993).
gtactatggggaatattat

SEQ ID NO: 383390 - DNA, 19 bp, Homo sapiens
  siRNA target sequence for DKFZP761E1824 (NM_022486.1,2016-2034).
gtgattactgcattatatt

SEQ ID NO: 383391 - DNA, 19 bp, Homo sapiens
  siRNA target sequence for DKFZP761E1824 (NM_022486.1,2026-2044).
cattatattacgaatcaca

SEQ ID NO: 383392 - DNA, 19 bp, Homo sapiens
  siRNA target sequence for DCLRE1C (NM_022487.1,501-519).
gacatccaaagtgtatatt

SEQ ID NO: 383393 - DNA, 19 bp, Homo sapiens
  siRNA target sequence for DCLRE1C (NM_022487.1,559-577).
caagtcgggaggagtgttt

SEQ ID NO: 383394 - DNA, 19 bp, Homo sapiens
  siRNA target sequence for DCLRE1C (NM_022487.1,574-592).
gtttaagtggagtcttaga

SEQ ID NO: 383395 - DNA, 19 bp, Homo sapiens
  siRNA target sequence for DCLRE1C (NM_022487.1,616-634).
ggagcccgtaccatgttgt

SEQ ID NO: 383396 - DNA, 19 bp, Homo sapiens
  siRNA target sequence for DCLRE1C (NM_022487.1,651-669).
gcggcttatggctatgaat

SEQ ID NO: 383397 - DNA, 19 bp, Homo sapiens
  siRNA target sequence for DCLRE1C (NM_022487.1,652-670).
cggcttatggctatgaata

SEQ ID NO: 383398 - DNA, 19 bp, Homo sapiens
  siRNA target sequence for DCLRE1C (NM_022487.1,702-720).
gtccaggttcatgtgaata

SEQ ID NO: 383399 - DNA, 19 bp, Homo sapiens
  siRNA target sequence for DCLRE1C (NM_022487.1,716-734).
gaataagctagacatgttt

SEQ ID NO: 383400 - DNA, 19 bp, Homo sapiens
  siRNA target sequence for DCLRE1C (NM_022487.1,743-761).
gcctgagatccttcatcat

SEQ ID NO: 383401 - DNA, 19 bp, Homo sapiens
  siRNA target sequence for DCLRE1C (NM_022487.1,946-964).
ggactggagagagttcata

SEQ ID NO: 383402 - DNA, 19 bp, Homo sapiens
  siRNA target sequence for DCLRE1C (NM_022487.1,986-1004).
ctcctcctacagtgagatt

SEQ ID NO: 383403 - DNA, 19 bp, Homo sapiens
  siRNA target sequence for DCLRE1C (NM_022487.1,999-1017).
gagattaaagatttcttga

SEQ ID NO: 383404 - DNA, 19 bp, Homo sapiens
  siRNA target sequence for DCLRE1C (NM_022487.1,1029-1047).
cctgtgaacgcatatccaa

SEQ ID NO: 383405 - DNA, 19 bp, Homo sapiens
  siRNA target sequence for DCLRE1C (NM_022487.1,1030-1048).
ctgtgaacgcatatccaaa

SEQ ID NO: 383406 - DNA, 19 bp, Homo sapiens
  siRNA target sequence for DCLRE1C (NM_022487.1,1066-1084).
caactatggataaagttgt

SEQ ID NO: 383407 - DNA, 19 bp, Homo sapiens
  siRNA target sequence for DCLRE1C (NM_022487.1,1120-1138).
gtacggagccaaagtataa

SEQ ID NO: 383408 - DNA, 19 bp, Homo sapiens
  siRNA target sequence for DCLRE1C (NM_022487.1,1212-1230).
gatcctctgccaatacctt

SEQ ID NO: 383409 - DNA, 19 bp, Homo sapiens
  siRNA target sequence for DCLRE1C (NM_022487.1,1263-1281).
caccctgaggtattttcaa

SEQ ID NO: 383410 - DNA, 19 bp, Homo sapiens
  siRNA target sequence for DCLRE1C (NM_022487.1,1266-1284).
cctgaggtattttcaatga

SEQ ID NO: 383411 - DNA, 19 bp, Homo sapiens
  siRNA target sequence for DCLRE1C (NM_022487.1,1357-1375).
gctctcgtttcacaaactt

SEQ ID NO: 383412 - DNA, 19 bp, Homo sapiens
  siRNA target sequence for DCLRE1C (NM_022487.1,1360-1378).
ctcgtttcacaaactttgt

SEQ ID NO: 383413 - DNA, 19 bp, Homo sapiens
  siRNA target sequence for DCLRE1C (NM_022487.1,1491-1509).
cagtgggaagtattcttta

SEQ ID NO: 383414 - DNA, 19 bp, Homo sapiens
  siRNA target sequence for DCLRE1C (NM_022487.1,1580-1598).
gtcaccaaagcttttcagt

SEQ ID NO: 383415 - DNA, 19 bp, Homo sapiens
  siRNA target sequence for DCLRE1C (NM_022487.1,1599-1617).
gactctgatggagaatcaa

SEQ ID NO: 383416 - DNA, 19 bp, Homo sapiens
  siRNA target sequence for DCLRE1C (NM_022487.1,1601-1619).
ctctgatggagaatcaact

SEQ ID NO: 383417 - DNA, 19 bp, Homo sapiens
  siRNA target sequence for DCLRE1C (NM_022487.1,1643-1661).
ccagtcaacacacataaca

SEQ ID NO: 383418 - DNA, 19 bp, Homo sapiens
  siRNA target sequence for DCLRE1C (NM_022487.1,1646-1664).
gtcaacacacataacagaa

SEQ ID NO: 383419 - DNA, 19 bp, Homo sapiens
  siRNA target sequence for DCLRE1C (NM_022487.1,1682-1700).
ggacagccaatctgatact

SEQ ID NO: 383420 - DNA, 19 bp, Homo sapiens
  siRNA target sequence for DCLRE1C (NM_022487.1,1687-1705).
gccaatctgatactgtttt

SEQ ID NO: 383421 - DNA, 19 bp, Homo sapiens
  siRNA target sequence for DCLRE1C (NM_022487.1,1689-1707).
caatctgatactgttttgt

SEQ ID NO: 383422 - DNA, 19 bp, Homo sapiens
  siRNA target sequence for DCLRE1C (NM_022487.1,1756-1774).
ctgactacagaccaacaat

SEQ ID NO: 383423 - DNA, 19 bp, Homo sapiens
  siRNA target sequence for DCLRE1C (NM_022487.1,1758-1776).
gactacagaccaacaatca

SEQ ID NO: 383424 - DNA, 19 bp, Homo sapiens
  siRNA target sequence for DCLRE1C (NM_022487.1,1865-1883).
gacaatagttcctagtact

SEQ ID NO: 383425 - DNA, 19 bp, Homo sapiens
  siRNA target sequence for DCLRE1C (NM_022487.1,1884-1902).
ggagaaccaactactctaa

SEQ ID NO: 383426 - DNA, 19 bp, Homo sapiens
  siRNA target sequence for DCLRE1C (NM_022487.1,1899-1917).
ctaagcagtgagacacata

SEQ ID NO: 383427 - DNA, 19 bp, Homo sapiens
  siRNA target sequence for DCLRE1C (NM_022487.1,1963-1981).
cccagagctcttctgattt

SEQ ID NO: 383428 - DNA, 19 bp, Homo sapiens
  siRNA target sequence for DCLRE1C (NM_022487.1,2014-2032).
ctaaacgagagcatttaca

SEQ ID NO: 383429 - DNA, 19 bp, Homo sapiens
  siRNA target sequence for DCLRE1C (NM_022487.1,2083-2101).
gaaaatgctcactcttaga

SEQ ID NO: 383430 - DNA, 19 bp, Homo sapiens
  siRNA target sequence for APG3 (NM_022488.3,172-190).
cggtcctcaaggaatcaaa

SEQ ID NO: 383431 - DNA, 19 bp, Homo sapiens
  siRNA target sequence for APG3 (NM_022488.3,276-294).
gctacaggggaagaattga

SEQ ID NO: 383432 - DNA, 19 bp, Homo sapiens
  siRNA target sequence for APG3 (NM_022488.3,308-326).
cctaccaacaggcaaacaa

SEQ ID NO: 383433 - DNA, 19 bp, Homo sapiens
  siRNA target sequence for APG3 (NM_022488.3,318-336).
ggcaaacaatttttggtaa

SEQ ID NO: 383434 - DNA, 19 bp, Homo sapiens
  siRNA target sequence for APG3 (NM_022488.3,365-383).
caaacagatggaatattca

SEQ ID NO: 383435 - DNA, 19 bp, Homo sapiens
  siRNA target sequence for APG3 (NM_022488.3,427-445).
gatgggtagatacatatca

SEQ ID NO: 383436 - DNA, 19 bp, Homo sapiens
  siRNA target sequence for APG3 (NM_022488.3,430-448).
gggtagatacatatcacaa

SEQ ID NO: 383437 - DNA, 19 bp, Homo sapiens
  siRNA target sequence for APG3 (NM_022488.3,449-467).
cacaggtattacaggaata

SEQ ID NO: 383438 - DNA, 19 bp, Homo sapiens
  siRNA target sequence for APG3 (NM_022488.3,469-487).
cggaagccgttaaagagat

SEQ ID NO: 383439 - DNA, 19 bp, Homo sapiens
  siRNA target sequence for APG3 (NM_022488.3,506-524).
caatataaggcttcaagat

SEQ ID NO: 383440 - DNA, 19 bp, Homo sapiens
  siRNA target sequence for APG3 (NM_022488.3,615-633).
gatgaggctaccctagata

SEQ ID NO: 383441 - DNA, 19 bp, Homo sapiens
  siRNA target sequence for APG3 (NM_022488.3,618-636).
gaggctaccctagatacaa

SEQ ID NO: 383442 - DNA, 19 bp, Homo sapiens
  siRNA target sequence for APG3 (NM_022488.3,652-670).
cttgtaaagccaaaactga

SEQ ID NO: 383443 - DNA, 19 bp, Homo sapiens
  siRNA target sequence for APG3 (NM_022488.3,673-691).
ctggcggtgaagatgctat

SEQ ID NO: 383444 - DNA, 19 bp, Homo sapiens
  siRNA target sequence for APG3 (NM_022488.3,700-718).
ccagaacttatgaccttta

SEQ ID NO: 383445 - DNA, 19 bp, Homo sapiens
  siRNA target sequence for APG3 (NM_022488.3,741-759).
cagactccacgattatggt

SEQ ID NO: 383446 - DNA, 19 bp, Homo sapiens
  siRNA target sequence for APG3 (NM_022488.3,774-792).
gagcaacggcagcctttaa

SEQ ID NO: 383447 - DNA, 19 bp, Homo sapiens
  siRNA target sequence for APG3 (NM_022488.3,776-794).
gcaacggcagcctttaaca

SEQ ID NO: 383448 - DNA, 19 bp, Homo sapiens
  siRNA target sequence for APG3 (NM_022488.3,954-972).
ggagaacttggagttcata

SEQ ID NO: 383449 - DNA, 19 bp, Homo sapiens
  siRNA target sequence for APG3 (NM_022488.3,955-973).
gagaacttggagttcatat

SEQ ID NO: 383450 - DNA, 19 bp, Homo sapiens
  siRNA target sequence for APG3 (NM_022488.3,1006-1024).
ctgtcattccaacaataga

SEQ ID NO: 383451 - DNA, 19 bp, Homo sapiens
  siRNA target sequence for APG3 (NM_022488.3,1008-1026).
gtcattccaacaatagaat

SEQ ID NO: 383452 - DNA, 19 bp, Homo sapiens
  siRNA target sequence for APG3 (NM_022488.3,1010-1028).
cattccaacaatagaatat

SEQ ID NO: 383453 - DNA, 19 bp, Homo sapiens
  siRNA target sequence for PAF53 (NM_022490.1,214-232).
catgcgctttaccttgtat

SEQ ID NO: 383454 - DNA, 19 bp, Homo sapiens
  siRNA target sequence for PAF53 (NM_022490.1,219-237).
gctttaccttgtatgagaa

SEQ ID NO: 383455 - DNA, 19 bp, Homo sapiens
  siRNA target sequence for PAF53 (NM_022490.1,303-321).
cctatgtgggaaacaattt

SEQ ID NO: 383456 - DNA, 19 bp, Homo sapiens
  siRNA target sequence for PAF53 (NM_022490.1,304-322).
ctatgtgggaaacaatttt

SEQ ID NO: 383457 - DNA, 19 bp, Homo sapiens
  siRNA target sequence for PAF53 (NM_022490.1,327-345).
ctggagccctcaaatgcaa

SEQ ID NO: 383458 - DNA, 19 bp, Homo sapiens
  siRNA target sequence for PAF53 (NM_022490.1,390-408).
gccaaatggaagtatatga

SEQ ID NO: 383459 - DNA, 19 bp, Homo sapiens
  siRNA target sequence for PAF53 (NM_022490.1,391-409).
ccaaatggaagtatatgat

SEQ ID NO: 383460 - DNA, 19 bp, Homo sapiens
  siRNA target sequence for PAF53 (NM_022490.1,401-419).
gtatatgatgctgaattgt

SEQ ID NO: 383461 - DNA, 19 bp, Homo sapiens
  siRNA target sequence for PAF53 (NM_022490.1,424-442).
catgcagccactattttca

SEQ ID NO: 383462 - DNA, 19 bp, Homo sapiens
  siRNA target sequence for PAF53 (NM_022490.1,470-488).
ctagagagtcagaccaaaa

SEQ ID NO: 383463 - DNA, 19 bp, Homo sapiens
  siRNA target sequence for PAF53 (NM_022490.1,571-589).
cagagttggcaatgaatct

SEQ ID NO: 383464 - DNA, 19 bp, Homo sapiens
  siRNA target sequence for PAF53 (NM_022490.1,648-666).
ctctggtcagcgatgctat

SEQ ID NO: 383465 - DNA, 19 bp, Homo sapiens
  siRNA target sequence for PAF53 (NM_022490.1,657-675).
gcgatgctatccacaatga

SEQ ID NO: 383466 - DNA, 19 bp, Homo sapiens
  siRNA target sequence for PAF53 (NM_022490.1,659-677).
gatgctatccacaatgact

SEQ ID NO: 383467 - DNA, 19 bp, Homo sapiens
  siRNA target sequence for PAF53 (NM_022490.1,727-745).
gcctgaagacgtgtataaa

SEQ ID NO: 383468 - DNA, 19 bp, Homo sapiens
  siRNA target sequence for PAF53 (NM_022490.1,728-746).
cctgaagacgtgtataaat

SEQ ID NO: 383469 - DNA, 19 bp, Homo sapiens
  siRNA target sequence for PAF53 (NM_022490.1,811-829).
cgtcacgtcagaagaaata

SEQ ID NO: 383470 - DNA, 19 bp, Homo sapiens
  siRNA target sequence for PAF53 (NM_022490.1,913-931).
ccgccaggcccgatgcata

SEQ ID NO: 383471 - DNA, 19 bp, Homo sapiens
  siRNA target sequence for PAF53 (NM_022490.1,914-932).
cgccaggcccgatgcatat

SEQ ID NO: 383472 - DNA, 19 bp, Homo sapiens
  siRNA target sequence for PAF53 (NM_022490.1,917-935).
caggcccgatgcatatggt

SEQ ID NO: 383473 - DNA, 19 bp, Homo sapiens
  siRNA target sequence for PAF53 (NM_022490.1,919-937).
ggcccgatgcatatggttt

SEQ ID NO: 383474 - DNA, 19 bp, Homo sapiens
  siRNA target sequence for PAF53 (NM_022490.1,940-958).
ggataccctcatcaaattt

SEQ ID NO: 383475 - DNA, 19 bp, Homo sapiens
  siRNA target sequence for PAF53 (NM_022490.1,959-977).
cgagctcatagggtagtta

SEQ ID NO: 383476 - DNA, 19 bp, Homo sapiens
  siRNA target sequence for PAF53 (NM_022490.1,960-978).
gagctcatagggtagttaa

SEQ ID NO: 383477 - DNA, 19 bp, Homo sapiens
  siRNA target sequence for PAF53 (NM_022490.1,970-988).
ggtagttaagcggaaaagt

SEQ ID NO: 383478 - DNA, 19 bp, Homo sapiens
  siRNA target sequence for PAF53 (NM_022490.1,1065-1083).
gcagattacggaacttaat

SEQ ID NO: 383479 - DNA, 19 bp, Homo sapiens
  siRNA target sequence for PAF53 (NM_022490.1,1066-1084).
cagattacggaacttaatt

SEQ ID NO: 383480 - DNA, 19 bp, Homo sapiens
  siRNA target sequence for PAF53 (NM_022490.1,1099-1117).
ggcgaagattactgcatat

SEQ ID NO: 383481 - DNA, 19 bp, Homo sapiens
  siRNA target sequence for PAF53 (NM_022490.1,1101-1119).
cgaagattactgcatatgt

SEQ ID NO: 383482 - DNA, 19 bp, Homo sapiens
  siRNA target sequence for PAF53 (NM_022490.1,1336-1354).
ggcaaagcggaggaagatt

SEQ ID NO: 383483 - DNA, 19 bp, Homo sapiens
  siRNA target sequence for PAF53 (NM_022490.1,1337-1355).
gcaaagcggaggaagatta

SEQ ID NO: 383484 - DNA, 19 bp, Homo sapiens
  siRNA target sequence for FLJ12788 (NM_022492.1,89-107).
ctgcacccaaactttgcaa

SEQ ID NO: 383485 - DNA, 19 bp, Homo sapiens
  siRNA target sequence for FLJ12788 (NM_022492.1,94-112).
cccaaactttgcaaggaat

SEQ ID NO: 383486 - DNA, 19 bp, Homo sapiens
  siRNA target sequence for FLJ12788 (NM_022492.1,138-156).
ggacatagtggattttctt

SEQ ID NO: 383487 - DNA, 19 bp, Homo sapiens
  siRNA target sequence for FLJ12788 (NM_022492.1,694-712).
gactcactggatctatcta

SEQ ID NO: 383488 - DNA, 19 bp, Homo sapiens
  siRNA target sequence for NARFL (NM_022493.1,81-99).
gtgcatcaagcctgtcaaa

SEQ ID NO: 383489 - DNA, 19 bp, Homo sapiens
  siRNA target sequence for NARFL (NM_022493.1,83-101).
gcatcaagcctgtcaaagt

SEQ ID NO: 383490 - DNA, 19 bp, Homo sapiens
  siRNA target sequence for NARFL (NM_022493.1,128-146).
ccaagattcgcattgaaga

SEQ ID NO: 383491 - DNA, 19 bp, Homo sapiens
  siRNA target sequence for NARFL (NM_022493.1,129-147).
caagattcgcattgaagat

SEQ ID NO: 383492 - DNA, 19 bp, Homo sapiens
  siRNA target sequence for NARFL (NM_022493.1,148-166).
gacgggagctacttccaaa

SEQ ID NO: 383493 - DNA, 19 bp, Homo sapiens
  siRNA target sequence for NARFL (NM_022493.1,203-221).
ccaaggtctcgctaaacga

SEQ ID NO: 383494 - DNA, 19 bp, Homo sapiens
  siRNA target sequence for NARFL (NM_022493.1,251-269).
ccgcagagaccgtgcttat

SEQ ID NO: 383495 - DNA, 19 bp, Homo sapiens
  siRNA target sequence for NARFL (NM_022493.1,253-271).
gcagagaccgtgcttatca

SEQ ID NO: 383496 - DNA, 19 bp, Homo sapiens
  siRNA target sequence for NARFL (NM_022493.1,391-409).
cggtttcagctgaatccta

SEQ ID NO: 383497 - DNA, 19 bp, Homo sapiens
  siRNA target sequence for NARFL (NM_022493.1,399-417).
gctgaatcctacagatact

SEQ ID NO: 383498 - DNA, 19 bp, Homo sapiens
  siRNA target sequence for NARFL (NM_022493.1,739-757).
gtgatgccctgctatgaca

SEQ ID NO: 383499 - DNA, 19 bp, Homo sapiens
  siRNA target sequence for NARFL (NM_022493.1,746-764).
cctgctatgacaaaaagct

SEQ ID NO: 383500 - DNA, 19 bp, Homo sapiens
  siRNA target sequence for NARFL (NM_022493.1,1020-1038).
ggctgaggttacctacaaa

SEQ ID NO: 383501 - DNA, 19 bp, Homo sapiens
  siRNA target sequence for NARFL (NM_022493.1,1035-1053).
caaacccctgaggaacaaa

SEQ ID NO: 383502 - DNA, 19 bp, Homo sapiens
  siRNA target sequence for C14orf135 (NM_022495.2,500-518).
ctcatggagttcagttgtt

SEQ ID NO: 383503 - DNA, 19 bp, Homo sapiens
  siRNA target sequence for C14orf135 (NM_022495.2,502-520).
catggagttcagttgttca

SEQ ID NO: 383504 - DNA, 19 bp, Homo sapiens
  siRNA target sequence for C14orf135 (NM_022495.2,505-523).
ggagttcagttgttcacat

SEQ ID NO: 383505 - DNA, 19 bp, Homo sapiens
  siRNA target sequence for C14orf135 (NM_022495.2,506-524).
gagttcagttgttcacatt

SEQ ID NO: 383506 - DNA, 19 bp, Homo sapiens
  siRNA target sequence for C14orf135 (NM_022495.2,626-644).
gttctaaggcagttggaat

SEQ ID NO: 383507 - DNA, 19 bp, Homo sapiens
  siRNA target sequence for C14orf135 (NM_022495.2,635-653).
cagttggaatgttatcatt

SEQ ID NO: 383508 - DNA, 19 bp, Homo sapiens
  siRNA target sequence for C14orf135 (NM_022495.2,719-737).
gttcatacagtaatgactt

SEQ ID NO: 383509 - DNA, 19 bp, Homo sapiens
  siRNA target sequence for C14orf135 (NM_022495.2,722-740).
catacagtaatgacttgtt

SEQ ID NO: 383510 - DNA, 19 bp, Homo sapiens
  siRNA target sequence for C14orf135 (NM_022495.2,726-744).
cagtaatgacttgttattt

SEQ ID NO: 383511 - DNA, 19 bp, Homo sapiens
  siRNA target sequence for C14orf135 (NM_022495.2,728-746).
gtaatgacttgttatttta

SEQ ID NO: 383512 - DNA, 19 bp, Homo sapiens
  siRNA target sequence for C14orf135 (NM_022495.2,771-789).
ctcctagtcctggtcatat

SEQ ID NO: 383513 - DNA, 19 bp, Homo sapiens
  siRNA target sequence for C14orf135 (NM_022495.2,773-791).
cctagtcctggtcatatat

SEQ ID NO: 383514 - DNA, 19 bp, Homo sapiens
  siRNA target sequence for C14orf135 (NM_022495.2,782-800).
ggtcatatattgagagttt

SEQ ID NO: 383515 - DNA, 19 bp, Homo sapiens
  siRNA target sequence for C14orf135 (NM_022495.2,783-801).
gtcatatattgagagttta

SEQ ID NO: 383516 - DNA, 19 bp, Homo sapiens
  siRNA target sequence for C14orf135 (NM_022495.2,795-813).
gagtttacggtggtgtttt

SEQ ID NO: 383517 - DNA, 19 bp, Homo sapiens
  siRNA target sequence for C14orf135 (NM_022495.2,850-868).
gccagaactgtttcaacta

SEQ ID NO: 383518 - DNA, 19 bp, Homo sapiens
  siRNA target sequence for C14orf135 (NM_022495.2,859-877).
gtttcaactagcactgaaa

SEQ ID NO: 383519 - DNA, 19 bp, Homo sapiens
  siRNA target sequence for C14orf135 (NM_022495.2,883-901).
caggtatactctgaaacta

SEQ ID NO: 383520 - DNA, 19 bp, Homo sapiens
  siRNA target sequence for C14orf135 (NM_022495.2,885-903).
ggtatactctgaaactaat

SEQ ID NO: 383521 - DNA, 19 bp, Homo sapiens
  siRNA target sequence for C14orf135 (NM_022495.2,899-917).
ctaatgattgataaagcaa

SEQ ID NO: 383522 - DNA, 19 bp, Homo sapiens
  siRNA target sequence for C14orf135 (NM_022495.2,915-933).
caagtttaggtccaataga

SEQ ID NO: 383523 - DNA, 19 bp, Homo sapiens
  siRNA target sequence for C14orf135 (NM_022495.2,935-953).
gactttagagaactgatta

SEQ ID NO: 383524 - DNA, 19 bp, Homo sapiens
  siRNA target sequence for C14orf135 (NM_022495.2,955-973).
gtaccttgaagaatatgaa

SEQ ID NO: 383525 - DNA, 19 bp, Homo sapiens
  siRNA target sequence for C14orf135 (NM_022495.2,974-992).
cgtgactggtacattggtt

SEQ ID NO: 383526 - DNA, 19 bp, Homo sapiens
  siRNA target sequence for C14orf135 (NM_022495.2,979-997).
ctggtacattggtttggta

SEQ ID NO: 383527 - DNA, 19 bp, Homo sapiens
  siRNA target sequence for C14orf135 (NM_022495.2,985-1003).
cattggtttggtatctgat

SEQ ID NO: 383528 - DNA, 19 bp, Homo sapiens
  siRNA target sequence for C14orf135 (NM_022495.2,1009-1027).
gtggaaggaagcaatttta

SEQ ID NO: 383529 - DNA, 19 bp, Homo sapiens
  siRNA target sequence for C14orf135 (NM_022495.2,1012-1030).
gaaggaagcaattttacaa

SEQ ID NO: 383530 - DNA, 19 bp, Homo sapiens
  siRNA target sequence for C14orf135 (NM_022495.2,1031-1049).
gaaaagccatacttgtttt

SEQ ID NO: 383531 - DNA, 19 bp, Homo sapiens
  siRNA target sequence for C14orf135 (NM_022495.2,1052-1070).
ctggggtatgattctaata

SEQ ID NO: 383532 - DNA, 19 bp, Homo sapiens
  siRNA target sequence for C14orf135 (NM_022495.2,1091-1109).
gtgcttagccttcaagaat

SEQ ID NO: 383533 - DNA, 19 bp, Homo sapiens
  siRNA target sequence for C14orf135 (NM_022495.2,1093-1111).
gcttagccttcaagaatta

SEQ ID NO: 383534 - DNA, 19 bp, Homo sapiens
  siRNA target sequence for C14orf135 (NM_022495.2,1098-1116).
gccttcaagaattattgat

SEQ ID NO: 383535 - DNA, 19 bp, Homo sapiens
  siRNA target sequence for C14orf135 (NM_022495.2,1154-1172).
cagtgggccaatctttcat

SEQ ID NO: 383536 - DNA, 19 bp, Homo sapiens
  siRNA target sequence for C14orf135 (NM_022495.2,1162-1180).
caatctttcatgggaatta

SEQ ID NO: 383537 - DNA, 19 bp, Homo sapiens
  siRNA target sequence for C14orf135 (NM_022495.2,1188-1206).
ccacaaacgatgatgaaga

SEQ ID NO: 383538 - DNA, 19 bp, Homo sapiens
  siRNA target sequence for C14orf135 (NM_022495.2,1189-1207).
cacaaacgatgatgaagaa

SEQ ID NO: 383539 - DNA, 19 bp, Homo sapiens
  siRNA target sequence for C14orf135 (NM_022495.2,1195-1213).
cgatgatgaagaacgttat

SEQ ID NO: 383540 - DNA, 19 bp, Homo sapiens
  siRNA target sequence for C14orf135 (NM_022495.2,1199-1217).
gatgaagaacgttatagta

SEQ ID NO: 383541 - DNA, 19 bp, Homo sapiens
  siRNA target sequence for C14orf135 (NM_022495.2,1272-1290).
ccctgggatatccgattta

SEQ ID NO: 383542 - DNA, 19 bp, Homo sapiens
  siRNA target sequence for C14orf135 (NM_022495.2,1273-1291).
cctgggatatccgatttat

SEQ ID NO: 383543 - DNA, 19 bp, Homo sapiens
  siRNA target sequence for C14orf135 (NM_022495.2,1274-1292).
ctgggatatccgatttatt

SEQ ID NO: 383544 - DNA, 19 bp, Homo sapiens
  siRNA target sequence for C14orf135 (NM_022495.2,1276-1294).
gggatatccgatttattct

SEQ ID NO: 383545 - DNA, 19 bp, Homo sapiens
  siRNA target sequence for C14orf135 (NM_022495.2,1277-1295).
ggatatccgatttattctt

SEQ ID NO: 383546 - DNA, 19 bp, Homo sapiens
  siRNA target sequence for C14orf135 (NM_022495.2,1301-1319).
cctctccacatacatttgt

SEQ ID NO: 383547 - DNA, 19 bp, Homo sapiens
  siRNA target sequence for C14orf135 (NM_022495.2,1302-1320).
ctctccacatacatttgta

SEQ ID NO: 383548 - DNA, 19 bp, Homo sapiens
  siRNA target sequence for VPS52 (NM_022553.3,294-312).
gggctgggacctcagatat

SEQ ID NO: 383549 - DNA, 19 bp, Homo sapiens
  siRNA target sequence for VPS52 (NM_022553.3,365-383).
caacttggggagttggata

SEQ ID NO: 383550 - DNA, 19 bp, Homo sapiens
  siRNA target sequence for VPS52 (NM_022553.3,379-397).
ggatatcacttctgatgaa

SEQ ID NO: 383551 - DNA, 19 bp, Homo sapiens
  siRNA target sequence for VPS52 (NM_022553.3,437-455).
ctggaggatgagttagtaa

SEQ ID NO: 383552 - DNA, 19 bp, Homo sapiens
  siRNA target sequence for VPS52 (NM_022553.3,476-494).
gtagatctccgtcactatt

SEQ ID NO: 383553 - DNA, 19 bp, Homo sapiens
  siRNA target sequence for VPS52 (NM_022553.3,479-497).
gatctccgtcactattcaa

SEQ ID NO: 383554 - DNA, 19 bp, Homo sapiens
  siRNA target sequence for VPS52 (NM_022553.3,532-550).
gaaatccattcgggattat

SEQ ID NO: 383555 - DNA, 19 bp, Homo sapiens
  siRNA target sequence for VPS52 (NM_022553.3,538-556).
cattcgggattatattcaa

SEQ ID NO: 383556 - DNA, 19 bp, Homo sapiens
  siRNA target sequence for VPS52 (NM_022553.3,692-710).
cagtcaggagccatgaaca

SEQ ID NO: 383557 - DNA, 19 bp, Homo sapiens
  siRNA target sequence for VPS52 (NM_022553.3,694-712).
gtcaggagccatgaacatt

SEQ ID NO: 383558 - DNA, 19 bp, Homo sapiens
  siRNA target sequence for VPS52 (NM_022553.3,783-801).
ctctggtcacggcaattct

SEQ ID NO: 383559 - DNA, 19 bp, Homo sapiens
  siRNA target sequence for VPS52 (NM_022553.3,949-967).
gacgaagatccgagagttt

SEQ ID NO: 383560 - DNA, 19 bp, Homo sapiens
  siRNA target sequence for VPS52 (NM_022553.3,994-1012).
gaaacccatgaccaactat

SEQ ID NO: 383561 - DNA, 19 bp, Homo sapiens
  siRNA target sequence for VPS52 (NM_022553.3,998-1016).
cccatgaccaactatcaga

SEQ ID NO: 383562 - DNA, 19 bp, Homo sapiens
  siRNA target sequence for VPS52 (NM_022553.3,1042-1060).
caggttcttctatcagttt

SEQ ID NO: 383563 - DNA, 19 bp, Homo sapiens
  siRNA target sequence for VPS52 (NM_022553.3,1044-1062).
ggttcttctatcagtttct

SEQ ID NO: 383564 - DNA, 19 bp, Homo sapiens
  siRNA target sequence for VPS52 (NM_022553.3,1168-1186).
gaaggtgcagtatccattt

SEQ ID NO: 383565 - DNA, 19 bp, Homo sapiens
  siRNA target sequence for VPS52 (NM_022553.3,1210-1228).
ctacgccctcctagacaat

SEQ ID NO: 383566 - DNA, 19 bp, Homo sapiens
  siRNA target sequence for VPS52 (NM_022553.3,1214-1232).
gccctcctagacaattcct

SEQ ID NO: 383567 - DNA, 19 bp, Homo sapiens
  siRNA target sequence for VPS52 (NM_022553.3,1233-1251).
gccgcgaataccttttcat

SEQ ID NO: 383568 - DNA, 19 bp, Homo sapiens
  siRNA target sequence for VPS52 (NM_022553.3,1235-1253).
cgcgaataccttttcatct

SEQ ID NO: 383569 - DNA, 19 bp, Homo sapiens
  siRNA target sequence for VPS52 (NM_022553.3,1477-1495).
gctatggccacggtttgaa

SEQ ID NO: 383570 - DNA, 19 bp, Homo sapiens
  siRNA target sequence for VPS52 (NM_022553.3,1544-1562).
cgcctaggggggttggata

SEQ ID NO: 383571 - DNA, 19 bp, Homo sapiens
  siRNA target sequence for VPS52 (NM_022553.3,1602-1620).
cctccgctcttgtcagtat

SEQ ID NO: 383572 - DNA, 19 bp, Homo sapiens
  siRNA target sequence for VPS52 (NM_022553.3,1736-1754).
gtgtttctgatcaacaact

SEQ ID NO: 383573 - DNA, 19 bp, Homo sapiens
  siRNA target sequence for VPS52 (NM_022553.3,1872-1890).
ccccttttgggggtttagt

SEQ ID NO: 383574 - DNA, 19 bp, Homo sapiens
  siRNA target sequence for VPS52 (NM_022553.3,1883-1901).
ggtttagtggcatttgtga

SEQ ID NO: 383575 - DNA, 19 bp, Homo sapiens
  siRNA target sequence for VPS52 (NM_022553.3,1973-1991).
ctgatccgtggctttggta

SEQ ID NO: 383576 - DNA, 19 bp, Homo sapiens
  siRNA target sequence for VPS52 (NM_022553.3,2027-2045).
gatgtaatgcggagtttca

SEQ ID NO: 383577 - DNA, 19 bp, Homo sapiens
  siRNA target sequence for MESDC1 (NM_022566.1,1647-1665).
gctgcaccctgctatctca

SEQ ID NO: 383578 - DNA, 19 bp, Homo sapiens
  siRNA target sequence for MESDC1 (NM_022566.1,1681-1699).
gtcttcgcccaggacttta

SEQ ID NO: 383579 - DNA, 19 bp, Homo sapiens
  siRNA target sequence for MESDC1 (NM_022566.1,1693-1711).
gactttaccgccagtgaat

SEQ ID NO: 383580 - DNA, 19 bp, Homo sapiens
  siRNA target sequence for MESDC1 (NM_022566.1,1700-1718).
ccgccagtgaattccaatt

SEQ ID NO: 383581 - DNA, 19 bp, Homo sapiens
  siRNA target sequence for MESDC1 (NM_022566.1,1704-1722).
cagtgaattccaattctgt

SEQ ID NO: 383582 - DNA, 19 bp, Homo sapiens
  siRNA target sequence for PERQ1 (NM_022574.2,388-406).
cgtggtgacagctgctttt

SEQ ID NO: 383583 - DNA, 19 bp, Homo sapiens
  siRNA target sequence for PERQ1 (NM_022574.2,706-724).
gcgcaagtttgaatttgat

SEQ ID NO: 383584 - DNA, 19 bp, Homo sapiens
  siRNA target sequence for PERQ1 (NM_022574.2,707-725).
cgcaagtttgaatttgatt

SEQ ID NO: 383585 - DNA, 19 bp, Homo sapiens
  siRNA target sequence for PERQ1 (NM_022574.2,1433-1451).
ggcgaggtgatcaagatgt

SEQ ID NO: 383586 - DNA, 19 bp, Homo sapiens
  siRNA target sequence for PERQ1 (NM_022574.2,2141-2159).
ggcctcggcctgaagaaca

SEQ ID NO: 383587 - DNA, 19 bp, Homo sapiens
  siRNA target sequence for PERQ1 (NM_022574.2,2205-2223).
gtcggcccattcgcaaaaa

SEQ ID NO: 383588 - DNA, 19 bp, Homo sapiens
  siRNA target sequence for PERQ1 (NM_022574.2,2207-2225).
cggcccattcgcaaaaaga

SEQ ID NO: 383589 - DNA, 19 bp, Homo sapiens
  siRNA target sequence for PERQ1 (NM_022574.2,2382-2400).
cctatgatgtccacgatta

SEQ ID NO: 383590 - DNA, 19 bp, Homo sapiens
  siRNA target sequence for PERQ1 (NM_022574.2,2383-2401).
ctatgatgtccacgattat

SEQ ID NO: 383591 - DNA, 19 bp, Homo sapiens
  siRNA target sequence for VPS16 (NM_022575.2,92-110).
ccttttaccggaaatatga

SEQ ID NO: 383592 - DNA, 19 bp, Homo sapiens
  siRNA target sequence for VPS16 (NM_022575.2,236-254).
ggccagtgctcgatatata

SEQ ID NO: 383593 - DNA, 19 bp, Homo sapiens
  siRNA target sequence for VPS16 (NM_022575.2,238-256).
ccagtgctcgatatatact

SEQ ID NO: 383594 - DNA, 19 bp, Homo sapiens
  siRNA target sequence for VPS16 (NM_022575.2,603-621).
ggaccgagtggcacacatt

SEQ ID NO: 383595 - DNA, 19 bp, Homo sapiens
  siRNA target sequence for VPS16 (NM_022575.2,606-624).
ccgagtggcacacattctt

SEQ ID NO: 383596 - DNA, 19 bp, Homo sapiens
  siRNA target sequence for VPS16 (NM_022575.2,629-647).
ctgtggggcctgaccttta

SEQ ID NO: 383597 - DNA, 19 bp, Homo sapiens
  siRNA target sequence for VPS16 (NM_022575.2,988-1006).
gatggggtccgcatcttct

SEQ ID NO: 383598 - DNA, 19 bp, Homo sapiens
  siRNA target sequence for VPS16 (NM_022575.2,1043-1061).
cggccagcgaggaaatctt

SEQ ID NO: 383599 - DNA, 19 bp, Homo sapiens
  siRNA target sequence for VPS16 (NM_022575.2,1045-1063).
gccagcgaggaaatcttca

SEQ ID NO: 383600 - DNA, 19 bp, Homo sapiens
  siRNA target sequence for VPS16 (NM_022575.2,1047-1065).
cagcgaggaaatcttcaaa

SEQ ID NO: 383601 - DNA, 19 bp, Homo sapiens
  siRNA target sequence for VPS16 (NM_022575.2,1254-1272).
cgcctccttcggaaagtgt

SEQ ID NO: 383602 - DNA, 19 bp, Homo sapiens
  siRNA target sequence for VPS16 (NM_022575.2,1256-1274).
cctccttcggaaagtgttt

SEQ ID NO: 383603 - DNA, 19 bp, Homo sapiens
  siRNA target sequence for VPS16 (NM_022575.2,1269-1287).
gtgtttcctggacagattt

SEQ ID NO: 383604 - DNA, 19 bp, Homo sapiens
  siRNA target sequence for VPS16 (NM_022575.2,1357-1375).
gggatcccgctcacctata

SEQ ID NO: 383605 - DNA, 19 bp, Homo sapiens
  siRNA target sequence for VPS16 (NM_022575.2,1517-1535).
gctacaaggtgcaacagaa

SEQ ID NO: 383606 - DNA, 19 bp, Homo sapiens
  siRNA target sequence for VPS16 (NM_022575.2,1860-1878).
ccgacagttctgtaagcat

SEQ ID NO: 383607 - DNA, 19 bp, Homo sapiens
  siRNA target sequence for VPS16 (NM_022575.2,1892-1910).
cgctgaaggacctttacaa

SEQ ID NO: 383608 - DNA, 19 bp, Homo sapiens
  siRNA target sequence for VPS16 (NM_022575.2,1893-1911).
gctgaaggacctttacaat

SEQ ID NO: 383609 - DNA, 19 bp, Homo sapiens
  siRNA target sequence for VPS16 (NM_022575.2,1964-1982).
ctgcagaagagcgtattga

SEQ ID NO: 383610 - DNA, 19 bp, Homo sapiens
  siRNA target sequence for VPS16 (NM_022575.2,2243-2261).
ctgccctggcagatttgga

SEQ ID NO: 383611 - DNA, 19 bp, Homo sapiens
  siRNA target sequence for VPS16 (NM_022575.2,2473-2491).
gagctgagcctcgtattgt

SEQ ID NO: 383612 - DNA, 19 bp, Homo sapiens
  siRNA target sequence for VPS16 (NM_022575.2,2516-2534).
gggccacagctgacaagat

SEQ ID NO: 383613 - DNA, 19 bp, Homo sapiens
  siRNA target sequence for ANAPC1 (NM_022662.1,648-666).
gtgacttcattatatcaca

SEQ ID NO: 383614 - DNA, 19 bp, Homo sapiens
  siRNA target sequence for ANAPC1 (NM_022662.1,682-700).
ggcctacagtagcaatgaa

SEQ ID NO: 383615 - DNA, 19 bp, Homo sapiens
  siRNA target sequence for ANAPC1 (NM_022662.1,690-708).
gtagcaatgaagtagaaaa

SEQ ID NO: 383616 - DNA, 19 bp, Homo sapiens
  siRNA target sequence for ANAPC1 (NM_022662.1,763-781).
ggattacatagcttcatta

SEQ ID NO: 383617 - DNA, 19 bp, Homo sapiens
  siRNA target sequence for ANAPC1 (NM_022662.1,837-855).
gcgcttcttcacatgaagt

SEQ ID NO: 383618 - DNA, 19 bp, Homo sapiens
  siRNA target sequence for ANAPC1 (NM_022662.1,838-856).
cgcttcttcacatgaagta

SEQ ID NO: 383619 - DNA, 19 bp, Homo sapiens
  siRNA target sequence for ANAPC1 (NM_022662.1,864-882).
gttcacccagagaaccttt

SEQ ID NO: 383620 - DNA, 19 bp, Homo sapiens
  siRNA target sequence for ANAPC1 (NM_022662.1,873-891).
gagaacctttacctactat

SEQ ID NO: 383621 - DNA, 19 bp, Homo sapiens
  siRNA target sequence for ANAPC1 (NM_022662.1,875-893).
gaacctttacctactatgt

SEQ ID NO: 383622 - DNA, 19 bp, Homo sapiens
  siRNA target sequence for ANAPC1 (NM_022662.1,878-896).
cctttacctactatgttca

SEQ ID NO: 383623 - DNA, 19 bp, Homo sapiens
  siRNA target sequence for ANAPC1 (NM_022662.1,1390-1408).
gtctccaaagagacatagt

SEQ ID NO: 383624 - DNA, 19 bp, Homo sapiens
  siRNA target sequence for ANAPC1 (NM_022662.1,1413-1431).
ctcattctccaaatagtaa

SEQ ID NO: 383625 - DNA, 19 bp, Homo sapiens
  siRNA target sequence for ANAPC1 (NM_022662.1,1419-1437).
ctccaaatagtaattctaa

SEQ ID NO: 383626 - DNA, 19 bp, Homo sapiens
  siRNA target sequence for ANAPC1 (NM_022662.1,1501-1519).
gacagaaacgattactaat

SEQ ID NO: 383627 - DNA, 19 bp, Homo sapiens
  siRNA target sequence for ANAPC1 (NM_022662.1,1503-1521).
cagaaacgattactaatat

SEQ ID NO: 383628 - DNA, 19 bp, Homo sapiens
  siRNA target sequence for ANAPC1 (NM_022662.1,1509-1527).
cgattactaatataagaga

SEQ ID NO: 383629 - DNA, 19 bp, Homo sapiens
  siRNA target sequence for ANAPC1 (NM_022662.1,1538-1556).
caagcctcaaaagtgttta

SEQ ID NO: 383630 - DNA, 19 bp, Homo sapiens
  siRNA target sequence for ANAPC1 (NM_022662.1,1541-1559).
gcctcaaaagtgtttatta

SEQ ID NO: 383631 - DNA, 19 bp, Homo sapiens
  siRNA target sequence for ANAPC1 (NM_022662.1,1565-1583).
gacctatgtgggcaaaagt

SEQ ID NO: 383632 - DNA, 19 bp, Homo sapiens
  siRNA target sequence for ANAPC1 (NM_022662.1,1582-1600).
gttcctgtgctttttagta

SEQ ID NO: 383633 - DNA, 19 bp, Homo sapiens
  siRNA target sequence for ANAPC1 (NM_022662.1,1610-1628).
ctccagttacgctgtgtaa

SEQ ID NO: 383634 - DNA, 19 bp, Homo sapiens
  siRNA target sequence for ANAPC1 (NM_022662.1,1620-1638).
gctgtgtaaagtttcaaga

SEQ ID NO: 383635 - DNA, 19 bp, Homo sapiens
  siRNA target sequence for ANAPC1 (NM_022662.1,1678-1696).
caacataccagcaaaggat

SEQ ID NO: 383636 - DNA, 19 bp, Homo sapiens
  siRNA target sequence for ANAPC1 (NM_022662.1,2417-2435).
gttgagtctcatcttttga

SEQ ID NO: 383637 - DNA, 19 bp, Homo sapiens
  siRNA target sequence for ANAPC1 (NM_022662.1,2420-2438).
gagtctcatcttttgaaca

SEQ ID NO: 383638 - DNA, 19 bp, Homo sapiens
  siRNA target sequence for ANAPC1 (NM_022662.1,2532-2550).
ctcacatacctgcaatttt

SEQ ID NO: 383639 - DNA, 19 bp, Homo sapiens
  siRNA target sequence for ANAPC1 (NM_022662.1,2567-2585).
gtgtatgaggagcttaagt

SEQ ID NO: 383640 - DNA, 19 bp, Homo sapiens
  siRNA target sequence for ANAPC1 (NM_022662.1,2613-2631).
gttcacttgttgaacttct

SEQ ID NO: 383641 - DNA, 19 bp, Homo sapiens
  siRNA target sequence for ANAPC1 (NM_022662.1,2638-2656).
gttggcaagggacttaaaa

SEQ ID NO: 383642 - DNA, 19 bp, Homo sapiens
  siRNA target sequence for ANAPC1 (NM_022662.1,2659-2677).
ggggccttatgtagatcat

SEQ ID NO: 383643 - DNA, 19 bp, Homo sapiens
  siRNA target sequence for ANAPC1 (NM_022662.1,2660-2678).
gggccttatgtagatcatt

SEQ ID NO: 383644 - DNA, 19 bp, Homo sapiens
  siRNA target sequence for ANAPC1 (NM_022662.1,2661-2679).
ggccttatgtagatcatta

SEQ ID NO: 383645 - DNA, 19 bp, Homo sapiens
  siRNA target sequence for ANAPC1 (NM_022662.1,2663-2681).
ccttatgtagatcattact

SEQ ID NO: 383646 - DNA, 19 bp, Homo sapiens
  siRNA target sequence for ANAPC1 (NM_022662.1,2664-2682).
cttatgtagatcattacta

SEQ ID NO: 383647 - DNA, 19 bp, Homo sapiens
  siRNA target sequence for ANAPC1 (NM_022662.1,2715-2733).
gacaagtgtgcacaattga

SEQ ID NO: 383648 - DNA, 19 bp, Homo sapiens
  siRNA target sequence for ANAPC1 (NM_022662.1,4428-4446).
cccctgacaccatgtattt

SEQ ID NO: 383649 - DNA, 19 bp, Homo sapiens
  siRNA target sequence for ANAPC1 (NM_022662.1,4430-4448).
cctgacaccatgtatttgt

SEQ ID NO: 383650 - DNA, 19 bp, Homo sapiens
  siRNA target sequence for ANAPC1 (NM_022662.1,4453-4471).
ctttgtgaagccagaattt

SEQ ID NO: 383651 - DNA, 19 bp, Homo sapiens
  siRNA target sequence for ANAPC1 (NM_022662.1,4487-4505).
cttgctcgatgcctgattt

SEQ ID NO: 383652 - DNA, 19 bp, Homo sapiens
  siRNA target sequence for ANAPC1 (NM_022662.1,4499-4517).
ctgattttgtgggatgata

SEQ ID NO: 383653 - DNA, 19 bp, Homo sapiens
  siRNA target sequence for ANAPC1 (NM_022662.1,4507-4525).
gtgggatgatattttacca

SEQ ID NO: 383654 - DNA, 19 bp, Homo sapiens
  siRNA target sequence for ANAPC1 (NM_022662.1,4601-4619).
ccgtgctcagaggatttga

SEQ ID NO: 383655 - DNA, 19 bp, Homo sapiens
  siRNA target sequence for ANAPC1 (NM_022662.1,4602-4620).
cgtgctcagaggatttgaa

SEQ ID NO: 383656 - DNA, 19 bp, Homo sapiens
  siRNA target sequence for ANAPC1 (NM_022662.1,4636-4654).
ccaagcacatgtctacata

SEQ ID NO: 383657 - DNA, 19 bp, Homo sapiens
  siRNA target sequence for ANAPC1 (NM_022662.1,4762-4780).
cgcacctaatgcttctgtt

SEQ ID NO: 383658 - DNA, 19 bp, Homo sapiens
  siRNA target sequence for ANAPC1 (NM_022662.1,4763-4781).
gcacctaatgcttctgtta

SEQ ID NO: 383659 - DNA, 19 bp, Homo sapiens
  siRNA target sequence for ANAPC1 (NM_022662.1,4776-4794).
ctgttacaggtcctcataa

SEQ ID NO: 383660 - DNA, 19 bp, Homo sapiens
  siRNA target sequence for ANAPC1 (NM_022662.1,4848-4866).
gctcaggaaacctaaaggt

SEQ ID NO: 383661 - DNA, 19 bp, Homo sapiens
  siRNA target sequence for ANAPC1 (NM_022662.1,4870-4888).
gcagctttgtcgcttctta

SEQ ID NO: 383662 - DNA, 19 bp, Homo sapiens
  siRNA target sequence for ANAPC1 (NM_022662.1,4874-4892).
ctttgtcgcttcttacaca

SEQ ID NO: 383663 - DNA, 19 bp, Homo sapiens
  siRNA target sequence for ANAPC1 (NM_022662.1,4899-4917).
cgggtggtgaaatgaacta

SEQ ID NO: 383664 - DNA, 19 bp, Homo sapiens
  siRNA target sequence for ANAPC1 (NM_022662.1,4900-4918).
gggtggtgaaatgaactat

SEQ ID NO: 383665 - DNA, 19 bp, Homo sapiens
  siRNA target sequence for ANAPC1 (NM_022662.1,4942-4960).
ggcccttggacttctattt

SEQ ID NO: 383666 - DNA, 19 bp, Homo sapiens
  siRNA target sequence for ANAPC1 (NM_022662.1,4965-4983).
gaggaggaaggtactcttt

SEQ ID NO: 383667 - DNA, 19 bp, Homo sapiens
  siRNA target sequence for ANAPC1 (NM_022662.1,4978-4996).
ctctttgagcacatcaaat

SEQ ID NO: 383668 - DNA, 19 bp, Homo sapiens
  siRNA target sequence for ANAPC1 (NM_022662.1,5052-5070).
ctgacaaccggtatcatct

SEQ ID NO: 383669 - DNA, 19 bp, Homo sapiens
  siRNA target sequence for ANAPC1 (NM_022662.1,5076-5094).
ctctccggcacctctatgt

SEQ ID NO: 383670 - DNA, 19 bp, Homo sapiens
  siRNA target sequence for ANAPC1 (NM_022662.1,5152-5170).
ctatgccctcttagaagtt

SEQ ID NO: 383671 - DNA, 19 bp, Homo sapiens
  siRNA target sequence for ANAPC1 (NM_022662.1,5179-5197).
gggcactcagtggtatgaa

SEQ ID NO: 383672 - DNA, 19 bp, Homo sapiens
  siRNA target sequence for ANAPC1 (NM_022662.1,5182-5200).
cactcagtggtatgaacaa

SEQ ID NO: 383673 - DNA, 19 bp, Homo sapiens
  siRNA target sequence for ANAPC1 (NM_022662.1,5234-5252).
ccagaactccatcttttaa

SEQ ID NO: 383674 - DNA, 19 bp, Homo sapiens
  siRNA target sequence for ANAPC1 (NM_022662.1,5264-5282).
gtaaaaggcccaagatact

SEQ ID NO: 383675 - DNA, 19 bp, Homo sapiens
  siRNA target sequence for ANAPC1 (NM_022662.1,5281-5299).
ctgggaactgctcatagat

SEQ ID NO: 383676 - DNA, 19 bp, Homo sapiens
  siRNA target sequence for ANAPC1 (NM_022662.1,5283-5301).
gggaactgctcatagattt

SEQ ID NO: 383677 - DNA, 19 bp, Homo sapiens
  siRNA target sequence for ANAPC1 (NM_022662.1,5288-5306).
ctgctcatagatttaagca

SEQ ID NO: 383678 - DNA, 19 bp, Homo sapiens
  siRNA target sequence for ANAPC1 (NM_022662.1,5318-5336).
cacttgaagtccatccttt

SEQ ID NO: 383679 - DNA, 19 bp, Homo sapiens
  siRNA target sequence for ANAPC1 (NM_022662.1,5338-5356).
caaggatggggttttatat

SEQ ID NO: 383680 - DNA, 19 bp, Homo sapiens
  siRNA target sequence for ANAPC1 (NM_022662.1,5566-5584).
ggatctcttttcttcagta

SEQ ID NO: 383681 - DNA, 19 bp, Homo sapiens
  siRNA target sequence for ANAPC1 (NM_022662.1,5677-5695).
gtctgagacttctgaactt

SEQ ID NO: 383682 - DNA, 19 bp, Homo sapiens
  siRNA target sequence for ANAPC1 (NM_022662.1,5806-5824).
gaagtgcaccattgataat

SEQ ID NO: 383683 - DNA, 19 bp, Homo sapiens
  siRNA target sequence for ANAPC1 (NM_022662.1,5843-5861).
caagtcgggggtgatatgt

SEQ ID NO: 383684 - DNA, 19 bp, Homo sapiens
  siRNA target sequence for ANAPC1 (NM_022662.1,5962-5980).
gccacctataggactagaa

SEQ ID NO: 383685 - DNA, 19 bp, Homo sapiens
  siRNA target sequence for ANAPC1 (NM_022662.1,5997-6015).
ctgaactgctcttcaaatt

SEQ ID NO: 383686 - DNA, 19 bp, Homo sapiens
  siRNA target sequence for ANAPC1 (NM_022662.1,6049-6067).
gagattggctcctttgctt

SEQ ID NO: 383687 - DNA, 19 bp, Homo sapiens
  siRNA target sequence for CTAGE-1 (NM_022663.1,20-38).
gtcatcatatcattacata

SEQ ID NO: 383688 - DNA, 19 bp, Homo sapiens
  siRNA target sequence for CTAGE-1 (NM_022663.1,22-40).
catcatatcattacataat

SEQ ID NO: 383689 - DNA, 19 bp, Homo sapiens
  siRNA target sequence for CTAGE-1 (NM_022663.1,75-93).
gtgggaacaactttatcca

SEQ ID NO: 383690 - DNA, 19 bp, Homo sapiens
  siRNA target sequence for CTAGE-1 (NM_022663.1,106-124).
gccccagaattatatagat

SEQ ID NO: 383691 - DNA, 19 bp, Homo sapiens
  siRNA target sequence for CTAGE-1 (NM_022663.1,108-126).
cccagaattatatagatca

SEQ ID NO: 383692 - DNA, 19 bp, Homo sapiens
  siRNA target sequence for CTAGE-1 (NM_022663.1,161-179).
gttggtgttctaatagttt

SEQ ID NO: 383693 - DNA, 19 bp, Homo sapiens
  siRNA target sequence for CTAGE-1 (NM_022663.1,218-236).
gaaggagtaaatctaagat

SEQ ID NO: 383694 - DNA, 19 bp, Homo sapiens
  siRNA target sequence for DGCR8 (NM_022720.4,582-600).
cttctacggagcttctctt

SEQ ID NO: 383695 - DNA, 19 bp, Homo sapiens
  siRNA target sequence for DGCR8 (NM_022720.4,685-703).
cctgcggtccggaagttct

SEQ ID NO: 383696 - DNA, 19 bp, Homo sapiens
  siRNA target sequence for DGCR8 (NM_022720.4,706-724).
cctgaccttaagttgctta

SEQ ID NO: 383697 - DNA, 19 bp, Homo sapiens
  siRNA target sequence for DGCR8 (NM_022720.4,707-725).
ctgaccttaagttgcttaa

SEQ ID NO: 383698 - DNA, 19 bp, Homo sapiens
  siRNA target sequence for DGCR8 (NM_022720.4,968-986).
cagtgctcgatgagttaga

SEQ ID NO: 383699 - DNA, 19 bp, Homo sapiens
  siRNA target sequence for DGCR8 (NM_022720.4,1029-1047).
cgggttcacggctaaagca

SEQ ID NO: 383700 - DNA, 19 bp, Homo sapiens
  siRNA target sequence for DGCR8 (NM_022720.4,1030-1048).
gggttcacggctaaagcaa

SEQ ID NO: 383701 - DNA, 19 bp, Homo sapiens
  siRNA target sequence for DGCR8 (NM_022720.4,1031-1049).
ggttcacggctaaagcaat

SEQ ID NO: 383702 - DNA, 19 bp, Homo sapiens
  siRNA target sequence for DGCR8 (NM_022720.4,1035-1053).
cacggctaaagcaatcgtt

SEQ ID NO: 383703 - DNA, 19 bp, Homo sapiens
  siRNA target sequence for DGCR8 (NM_022720.4,1089-1107).
cccctacgaggatgacttt

SEQ ID NO: 383704 - DNA, 19 bp, Homo sapiens
  siRNA target sequence for DGCR8 (NM_022720.4,1139-1157).
gcctttgtgcccccaaaaa

SEQ ID NO: 383705 - DNA, 19 bp, Homo sapiens
  siRNA target sequence for DGCR8 (NM_022720.4,1160-1178).
ggcgaacagaggaaaaata

SEQ ID NO: 383706 - DNA, 19 bp, Homo sapiens
  siRNA target sequence for DGCR8 (NM_022720.4,1161-1179).
gcgaacagaggaaaaatat

SEQ ID NO: 383707 - DNA, 19 bp, Homo sapiens
  siRNA target sequence for DGCR8 (NM_022720.4,1224-1242).
gccgatgatgaccaagatt

SEQ ID NO: 383708 - DNA, 19 bp, Homo sapiens
  siRNA target sequence for DGCR8 (NM_022720.4,1225-1243).
ccgatgatgaccaagatta

SEQ ID NO: 383709 - DNA, 19 bp, Homo sapiens
  siRNA target sequence for DGCR8 (NM_022720.4,1226-1244).
cgatgatgaccaagattaa

SEQ ID NO: 383710 - DNA, 19 bp, Homo sapiens
  siRNA target sequence for DGCR8 (NM_022720.4,1298-1316).
ggatcatgacattccataa

SEQ ID NO: 383711 - DNA, 19 bp, Homo sapiens
  siRNA target sequence for DGCR8 (NM_022720.4,1424-1442).
gcatcccttgtctgcatta

SEQ ID NO: 383712 - DNA, 19 bp, Homo sapiens
  siRNA target sequence for DGCR8 (NM_022720.4,1679-1697).
ccgttgatctcgaggaatt

SEQ ID NO: 383713 - DNA, 19 bp, Homo sapiens
  siRNA target sequence for DGCR8 (NM_022720.4,1684-1702).
gatctcgaggaatttcgaa

SEQ ID NO: 383714 - DNA, 19 bp, Homo sapiens
  siRNA target sequence for DGCR8 (NM_022720.4,1833-1851).
caatcagaagctcattact

SEQ ID NO: 383715 - DNA, 19 bp, Homo sapiens
  siRNA target sequence for DGCR8 (NM_022720.4,1867-1885).
gcacccacaaagaaagagt

SEQ ID NO: 383716 - DNA, 19 bp, Homo sapiens
  siRNA target sequence for DGCR8 (NM_022720.4,1953-1971).
ggtccgccctgtctataat

SEQ ID NO: 383717 - DNA, 19 bp, Homo sapiens
  siRNA target sequence for DGCR8 (NM_022720.4,1954-1972).
gtccgccctgtctataatt

SEQ ID NO: 383718 - DNA, 19 bp, Homo sapiens
  siRNA target sequence for DGCR8 (NM_022720.4,1957-1975).
cgccctgtctataatttct

SEQ ID NO: 383719 - DNA, 19 bp, Homo sapiens
  siRNA target sequence for DGCR8 (NM_022720.4,1989-2007).
cccaagtgagccttttggt

SEQ ID NO: 383720 - DNA, 19 bp, Homo sapiens
  siRNA target sequence for DGCR8 (NM_022720.4,2018-2036).
ccattgatggtgtgactta

SEQ ID NO: 383721 - DNA, 19 bp, Homo sapiens
  siRNA target sequence for DGCR8 (NM_022720.4,2084-2102).
cccgagctacactggaaat

SEQ ID NO: 383722 - DNA, 19 bp, Homo sapiens
  siRNA target sequence for DGCR8 (NM_022720.4,2155-2173).
gaagaactcgagtatttta

SEQ ID NO: 383723 - DNA, 19 bp, Homo sapiens
  siRNA target sequence for DGCR8 (NM_022720.4,2225-2243).
ggctgttgtctccatatca

SEQ ID NO: 383724 - DNA, 19 bp, Homo sapiens
  siRNA target sequence for DGCR8 (NM_022720.4,2227-2245).
ctgttgtctccatatcaga

SEQ ID NO: 383725 - DNA, 19 bp, Homo sapiens
  siRNA target sequence for DGCR8 (NM_022720.4,2248-2266).
ctccacgagtgccttaaaa

SEQ ID NO: 383726 - DNA, 19 bp, Homo sapiens
  siRNA target sequence for DGCR8 (NM_022720.4,2250-2268).
ccacgagtgccttaaaaga

SEQ ID NO: 383727 - DNA, 19 bp, Homo sapiens
  siRNA target sequence for DGCR8 (NM_022720.4,2251-2269).
cacgagtgccttaaaagaa

SEQ ID NO: 383728 - DNA, 19 bp, Homo sapiens
  siRNA target sequence for DGCR8 (NM_022720.4,2281-2299).
ggtgacacgtctatcaagt

SEQ ID NO: 383729 - DNA, 19 bp, Homo sapiens
  siRNA target sequence for DGCR8 (NM_022720.4,2282-2300).
gtgacacgtctatcaagtt

SEQ ID NO: 383730 - DNA, 19 bp, Homo sapiens
  siRNA target sequence for DGCR8 (NM_022720.4,2286-2304).
cacgtctatcaagtttgaa

SEQ ID NO: 383731 - DNA, 19 bp, Homo sapiens
  siRNA target sequence for DGCR8 (NM_022720.4,2288-2306).
cgtctatcaagtttgaagt

SEQ ID NO: 383732 - DNA, 19 bp, Homo sapiens
  siRNA target sequence for DGCR8 (NM_022720.4,2368-2386).
gggtggtgtaagaacaaga

SEQ ID NO: 383733 - DNA, 19 bp, Homo sapiens
  siRNA target sequence for DGCR8 (NM_022720.4,2431-2449).
cacccacatgtcaagaact

SEQ ID NO: 383734 - DNA, 19 bp, Homo sapiens
  siRNA target sequence for DGCR8 (NM_022720.4,2454-2472).
gtctttactgcgcatgtat

SEQ ID NO: 383735 - DNA, 19 bp, Homo sapiens
  siRNA target sequence for DGCR8 (NM_022720.4,2615-2633).
gggaggagactcgaaagaa

SEQ ID NO: 383736 - DNA, 19 bp, Homo sapiens
  siRNA target sequence for COPS7B (NM_022730.1,265-283).
gcttgcggaaggagctaat

SEQ ID NO: 383737 - DNA, 19 bp, Homo sapiens
  siRNA target sequence for COPS7B (NM_022730.1,275-293).
ggagctaatgctgcttatt

SEQ ID NO: 383738 - DNA, 19 bp, Homo sapiens
  siRNA target sequence for COPS7B (NM_022730.1,320-338).
gggacatacccagattaca

SEQ ID NO: 383739 - DNA, 19 bp, Homo sapiens
  siRNA target sequence for COPS7B (NM_022730.1,321-339).
ggacatacccagattacat

SEQ ID NO: 383740 - DNA, 19 bp, Homo sapiens
  siRNA target sequence for COPS7B (NM_022730.1,406-424).
cgtgagcttggcatcaaga

SEQ ID NO: 383741 - DNA, 19 bp, Homo sapiens
  siRNA target sequence for COPS7B (NM_022730.1,471-489).
ggaatctccgggaactaga

SEQ ID NO: 383742 - DNA, 19 bp, Homo sapiens
  siRNA target sequence for COPS7B (NM_022730.1,472-490).
gaatctccgggaactagaa

SEQ ID NO: 383743 - DNA, 19 bp, Homo sapiens
  siRNA target sequence for COPS7B (NM_022730.1,480-498).
gggaactagaagaccttat

SEQ ID NO: 383744 - DNA, 19 bp, Homo sapiens
  siRNA target sequence for COPS7B (NM_022730.1,579-597).
gccgtgacatccgaaagaa

SEQ ID NO: 383745 - DNA, 19 bp, Homo sapiens
  siRNA target sequence for COPS7B (NM_022730.1,584-602).
gacatccgaaagaaggata

SEQ ID NO: 383746 - DNA, 19 bp, Homo sapiens
  siRNA target sequence for COPS7B (NM_022730.1,589-607).
ccgaaagaaggatatcaat

SEQ ID NO: 383747 - DNA, 19 bp, Homo sapiens
  siRNA target sequence for COPS7B (NM_022730.1,595-613).
gaaggatatcaataatatt

SEQ ID NO: 383748 - DNA, 19 bp, Homo sapiens
  siRNA target sequence for COPS7B (NM_022730.1,642-660).
gctgtgaagcagttctact

SEQ ID NO: 383749 - DNA, 19 bp, Homo sapiens
  siRNA target sequence for COPS7B (NM_022730.1,684-702).
gagccaaccagtacaaaga

SEQ ID NO: 383750 - DNA, 19 bp, Homo sapiens
  siRNA target sequence for COPS7B (NM_022730.1,740-758).
gttaccaacatcaagaaga

SEQ ID NO: 383751 - DNA, 19 bp, Homo sapiens
  siRNA target sequence for FLJ20859 (NM_022734.1,120-138).
ggagtgacccaggtagata

SEQ ID NO: 383752 - DNA, 19 bp, Homo sapiens
  siRNA target sequence for FLJ20859 (NM_022734.1,123-141).
gtgacccaggtagataaca

SEQ ID NO: 383753 - DNA, 19 bp, Homo sapiens
  siRNA target sequence for FLJ20859 (NM_022734.1,225-243).
gctaacggtgcccagttat

SEQ ID NO: 383754 - DNA, 19 bp, Homo sapiens
  siRNA target sequence for FLJ20859 (NM_022734.1,226-244).
ctaacggtgcccagttatt

SEQ ID NO: 383755 - DNA, 19 bp, Homo sapiens
  siRNA target sequence for FLJ20859 (NM_022734.1,262-280).
ggcccactatggagaatca

SEQ ID NO: 383756 - DNA, 19 bp, Homo sapiens
  siRNA target sequence for FLJ20859 (NM_022734.1,284-302).
gcaaacactgaccagttat

SEQ ID NO: 383757 - DNA, 19 bp, Homo sapiens
  siRNA target sequence for FLJ20859 (NM_022734.1,346-364).
gacgggctaggcatcttga

SEQ ID NO: 383758 - DNA, 19 bp, Homo sapiens
  siRNA target sequence for FLJ20859 (NM_022734.1,349-367).
gggctaggcatcttgagaa

SEQ ID NO: 383759 - DNA, 19 bp, Homo sapiens
  siRNA target sequence for FLJ20859 (NM_022734.1,350-368).
ggctaggcatcttgagaaa

SEQ ID NO: 383760 - DNA, 19 bp, Homo sapiens
  siRNA target sequence for FLJ20859 (NM_022734.1,351-369).
gctaggcatcttgagaaaa

SEQ ID NO: 383761 - DNA, 19 bp, Homo sapiens
  siRNA target sequence for FLJ20859 (NM_022734.1,425-443).
gctacacgcactacgtaaa

SEQ ID NO: 383762 - DNA, 19 bp, Homo sapiens
  siRNA target sequence for FLJ20859 (NM_022734.1,426-444).
ctacacgcactacgtaaaa

SEQ ID NO: 383763 - DNA, 19 bp, Homo sapiens
  siRNA target sequence for FLJ20859 (NM_022734.1,429-447).
cacgcactacgtaaaacta

SEQ ID NO: 383764 - DNA, 19 bp, Homo sapiens
  siRNA target sequence for FLJ20859 (NM_022734.1,480-498).
ggactgagcctggtgtata

SEQ ID NO: 383765 - DNA, 19 bp, Homo sapiens
  siRNA target sequence for FLJ20859 (NM_022734.1,551-569).
gatccgggctcgaaatcca

SEQ ID NO: 383766 - DNA, 19 bp, Homo sapiens
  siRNA target sequence for FLJ20859 (NM_022734.1,557-575).
ggctcgaaatccagcattt

SEQ ID NO: 383767 - DNA, 19 bp, Homo sapiens
  siRNA target sequence for FLJ20859 (NM_022734.1,623-641).
ctgggctgctcacagtatt

SEQ ID NO: 383768 - DNA, 19 bp, Homo sapiens
  siRNA target sequence for FLJ20859 (NM_022734.1,647-665).
ccagagcctacgtgaatat

SEQ ID NO: 383769 - DNA, 19 bp, Homo sapiens
  siRNA target sequence for FLJ20859 (NM_022734.1,648-666).
cagagcctacgtgaatata

SEQ ID NO: 383770 - DNA, 19 bp, Homo sapiens
  siRNA target sequence for FLJ20859 (NM_022734.1,851-869).
ccgcactgaggtagttcaa

SEQ ID NO: 383771 - DNA, 19 bp, Homo sapiens
  siRNA target sequence for FLJ20859 (NM_022734.1,852-870).
cgcactgaggtagttcaaa

SEQ ID NO: 383772 - DNA, 19 bp, Homo sapiens
  siRNA target sequence for FLJ20859 (NM_022734.1,856-874).
ctgaggtagttcaaacctt

SEQ ID NO: 383773 - DNA, 19 bp, Homo sapiens
  siRNA target sequence for FLJ20859 (NM_022734.1,877-895).
ggcgtaagacaggtcattt

SEQ ID NO: 383774 - DNA, 19 bp, Homo sapiens
  siRNA target sequence for FLJ20859 (NM_022734.1,989-1007).
ggaccctcgacctggtttt

SEQ ID NO: 383775 - DNA, 19 bp, Homo sapiens
  siRNA target sequence for FLJ20859 (NM_022734.1,993-1011).
cctcgacctggttttgtct

SEQ ID NO: 383776 - DNA, 19 bp, Homo sapiens
  siRNA target sequence for FLJ20859 (NM_022734.1,994-1012).
ctcgacctggttttgtctt

SEQ ID NO: 383777 - DNA, 19 bp, Homo sapiens
  siRNA target sequence for FLJ20859 (NM_022734.1,1092-1110).
cccttcagctggaacaaga

SEQ ID NO: 383778 - DNA, 19 bp, Homo sapiens
  siRNA target sequence for FLJ20859 (NM_022734.1,1187-1205).
cactcagcctgtccttaaa

SEQ ID NO: 383779 - DNA, 19 bp, Homo sapiens
  siRNA target sequence for FLJ20859 (NM_022734.1,1210-1228).
ctcgccatgtgcattgtca

SEQ ID NO: 383780 - DNA, 19 bp, Homo sapiens
  siRNA target sequence for FLJ20859 (NM_022734.1,1278-1296).
cggcacggcagggatttgt

SEQ ID NO: 383781 - DNA, 19 bp, Homo sapiens
  siRNA target sequence for FLJ20859 (NM_022734.1,1280-1298).
gcacggcagggatttgtat

SEQ ID NO: 383782 - DNA, 19 bp, Homo sapiens
  siRNA target sequence for FLJ20859 (NM_022734.1,1284-1302).
ggcagggatttgtatcgtt

SEQ ID NO: 383783 - DNA, 19 bp, Homo sapiens
  siRNA target sequence for FLJ20859 (NM_022734.1,1315-1333).
gctcctggggagatctttt

SEQ ID NO: 383784 - DNA, 19 bp, Homo sapiens
  siRNA target sequence for FLJ20859 (NM_022734.1,1316-1334).
ctcctggggagatctttta

SEQ ID NO: 383785 - DNA, 19 bp, Homo sapiens
  siRNA target sequence for FLJ20859 (NM_022734.1,1319-1337).
ctggggagatcttttacct

SEQ ID NO: 383786 - DNA, 19 bp, Homo sapiens
  siRNA target sequence for LPPR2 (NM_022737.1,479-497).
ggattcttctgctatgaca

SEQ ID NO: 383787 - DNA, 19 bp, Homo sapiens
  siRNA target sequence for LPPR2 (NM_022737.1,875-893).
ggtcccgaccgctttgtca

SEQ ID NO: 383788 - DNA, 19 bp, Homo sapiens
  siRNA target sequence for LPPR2 (NM_022737.1,1182-1200).
cctgcgttgtgcataactt

SEQ ID NO: 383789 - DNA, 19 bp, Homo sapiens
  siRNA target sequence for LPPR2 (NM_022737.1,1183-1201).
ctgcgttgtgcataacttt

SEQ ID NO: 383790 - DNA, 19 bp, Homo sapiens
  siRNA target sequence for LPPR2 (NM_022737.1,1187-1205).
gttgtgcataactttcaga

SEQ ID NO: 383791 - DNA, 19 bp, Homo sapiens
  siRNA target sequence for LPPR2 (NM_022737.1,1253-1271).
caagcccccaccatggata

SEQ ID NO: 383792 - DNA, 19 bp, Homo sapiens
  siRNA target sequence for LPPR2 (NM_022737.1,1268-1286).
gatagccccctcgaaaaga

SEQ ID NO: 383793 - DNA, 19 bp, Homo sapiens
  siRNA target sequence for DKFZP434G156 (NM_022742.2,489-507).
gctctctgtcagtcaacaa

SEQ ID NO: 383794 - DNA, 19 bp, Homo sapiens
  siRNA target sequence for DKFZP434G156 (NM_022742.2,748-766).
gttagagcatgagaaagaa

SEQ ID NO: 383795 - DNA, 19 bp, Homo sapiens
  siRNA target sequence for DKFZP434G156 (NM_022742.2,758-776).
gagaaagaaagcgaactta

SEQ ID NO: 383796 - DNA, 19 bp, Homo sapiens
  siRNA target sequence for DKFZP434G156 (NM_022742.2,768-786).
gcgaacttaaggaaataga

SEQ ID NO: 383797 - DNA, 19 bp, Homo sapiens
  siRNA target sequence for DKFZP434G156 (NM_022742.2,769-787).
cgaacttaaggaaatagaa

SEQ ID NO: 383798 - DNA, 19 bp, Homo sapiens
  siRNA target sequence for DKFZP434G156 (NM_022742.2,841-859).
ggattccgcaactgaacat

SEQ ID NO: 383799 - DNA, 19 bp, Homo sapiens
  siRNA target sequence for DKFZP434G156 (NM_022742.2,927-945).
gcattcggggagattatga

SEQ ID NO: 383800 - DNA, 19 bp, Homo sapiens
  siRNA target sequence for DKFZP434G156 (NM_022742.2,957-975).
cctccctccgtgcagaaat

SEQ ID NO: 383801 - DNA, 19 bp, Homo sapiens
  siRNA target sequence for DKFZP434G156 (NM_022742.2,990-1008).
ctgaaccatccggtagttt

SEQ ID NO: 383802 - DNA, 19 bp, Homo sapiens
  siRNA target sequence for DKFZP434G156 (NM_022742.2,1005-1023).
gtttaggtctctcagatta

SEQ ID NO: 383803 - DNA, 19 bp, Homo sapiens
  siRNA target sequence for DKFZP434G156 (NM_022742.2,1052-1070).
ctgcgggaacgctaccatt

SEQ ID NO: 383804 - DNA, 19 bp, Homo sapiens
  siRNA target sequence for DKFZP434G156 (NM_022742.2,1399-1417).
gctcaagtgtgctcagaat

SEQ ID NO: 383805 - DNA, 19 bp, Homo sapiens
  siRNA target sequence for DKFZP434G156 (NM_022742.2,1418-1436).
gaggtgcttcggtttcaga

SEQ ID NO: 383806 - DNA, 19 bp, Homo sapiens
  siRNA target sequence for DKFZP434G156 (NM_022742.2,1478-1496).
ctctgtaccctgcagaaaa

SEQ ID NO: 383807 - DNA, 19 bp, Homo sapiens
  siRNA target sequence for DKFZP434G156 (NM_022742.2,1755-1773).
cggtggcctccttcaaaga

SEQ ID NO: 383808 - DNA, 19 bp, Homo sapiens
  siRNA target sequence for DKFZP434G156 (NM_022742.2,1951-1969).
caaaggaaagtgtgctaat

SEQ ID NO: 383809 - DNA, 19 bp, Homo sapiens
  siRNA target sequence for DKFZP434G156 (NM_022742.2,2145-2163).
caaagagtggcctcttact

SEQ ID NO: 383810 - DNA, 19 bp, Homo sapiens
  siRNA target sequence for DKFZP434G156 (NM_022742.2,2176-2194).
gctactcaccaagttagaa

SEQ ID NO: 383811 - DNA, 19 bp, Homo sapiens
  siRNA target sequence for DKFZP434G156 (NM_022742.2,2257-2275).
gaaccaagactgtgtatta

SEQ ID NO: 383812 - DNA, 19 bp, Homo sapiens
  siRNA target sequence for DKFZP434G156 (NM_022742.2,2303-2321).
ctgcgacgtttcaaagagt

SEQ ID NO: 383813 - DNA, 19 bp, Homo sapiens
  siRNA target sequence for DKFZP434G156 (NM_022742.2,2365-2383).
ggctaagtcctccaaatgt

SEQ ID NO: 383814 - DNA, 19 bp, Homo sapiens
  siRNA target sequence for DKFZP434G156 (NM_022742.2,2371-2389).
gtcctccaaatgtaatcga

SEQ ID NO: 383815 - DNA, 19 bp, Homo sapiens
  siRNA target sequence for DKFZP434G156 (NM_022742.2,2561-2579).
gtccagtccccttctataa

SEQ ID NO: 383816 - DNA, 19 bp, Homo sapiens
  siRNA target sequence for DKFZP434G156 (NM_022742.2,2563-2581).
ccagtccccttctataaaa

SEQ ID NO: 383817 - DNA, 19 bp, Homo sapiens
  siRNA target sequence for DKFZP434G156 (NM_022742.2,2633-2651).
gagaactgtcgcaagactt

SEQ ID NO: 383818 - DNA, 19 bp, Homo sapiens
  siRNA target sequence for DKFZP434G156 (NM_022742.2,2635-2653).
gaactgtcgcaagacttat

SEQ ID NO: 383819 - DNA, 19 bp, Homo sapiens
  siRNA target sequence for DKFZP434G156 (NM_022742.2,2638-2656).
ctgtcgcaagacttatgat

SEQ ID NO: 383820 - DNA, 19 bp, Homo sapiens
  siRNA target sequence for DKFZP434G156 (NM_022742.2,2669-2687).
gacaatgagagctattaca

SEQ ID NO: 383821 - DNA, 19 bp, Homo sapiens
  siRNA target sequence for DKFZP434G156 (NM_022742.2,2675-2693).
gagagctattacaagagtt

SEQ ID NO: 383822 - DNA, 19 bp, Homo sapiens
  siRNA target sequence for DKFZP434G156 (NM_022742.2,3113-3131).
cagaacgacaagaatgaga

SEQ ID NO: 383823 - DNA, 19 bp, Homo sapiens
  siRNA target sequence for DKFZP434G156 (NM_022742.2,3271-3289).
ggagaagaggccttctgtt

SEQ ID NO: 383824 - DNA, 19 bp, Homo sapiens
  siRNA target sequence for DKFZP434G156 (NM_022742.2,3334-3352).
gaatgccaatggggttaaa

SEQ ID NO: 383825 - DNA, 19 bp, Homo sapiens
  siRNA target sequence for DKFZP434G156 (NM_022742.2,3338-3356).
gccaatggggttaaaatga

SEQ ID NO: 383826 - DNA, 19 bp, Homo sapiens
  siRNA target sequence for DKFZP434G156 (NM_022742.2,3370-3388).
gccatgctcggatacttct

SEQ ID NO: 383827 - DNA, 19 bp, Homo sapiens
  siRNA target sequence for DKFZP434G156 (NM_022742.2,3439-3457).
ggccagccagaggaaatta

SEQ ID NO: 383828 - DNA, 19 bp, Homo sapiens
  siRNA target sequence for DKFZP434G156 (NM_022742.2,3572-3590).
cctgaggaagctaaatcca

SEQ ID NO: 383829 - DNA, 19 bp, Homo sapiens
  siRNA target sequence for DKFZP434G156 (NM_022742.2,3713-3731).
ctttccgagagcaaaaagt

SEQ ID NO: 383830 - DNA, 19 bp, Homo sapiens
  siRNA target sequence for SMYD3 (NM_022743.1,145-163).
ccgcgtcgccaaatactgt

SEQ ID NO: 383831 - DNA, 19 bp, Homo sapiens
  siRNA target sequence for SMYD3 (NM_022743.1,146-164).
cgcgtcgccaaatactgta

SEQ ID NO: 383832 - DNA, 19 bp, Homo sapiens
  siRNA target sequence for SMYD3 (NM_022743.1,270-288).
gagttgtcttcaaacttat

SEQ ID NO: 383833 - DNA, 19 bp, Homo sapiens
  siRNA target sequence for SMYD3 (NM_022743.1,332-350).
gatctggagtcaaatatta

SEQ ID NO: 383834 - DNA, 19 bp, Homo sapiens
  siRNA target sequence for SMYD3 (NM_022743.1,384-402).
ggcaactcgtaatgacatt

SEQ ID NO: 383835 - DNA, 19 bp, Homo sapiens
  siRNA target sequence for SMYD3 (NM_022743.1,385-403).
gcaactcgtaatgacattt

SEQ ID NO: 383836 - DNA, 19 bp, Homo sapiens
  siRNA target sequence for SMYD3 (NM_022743.1,447-465).
cacctgcctttgacctttt

SEQ ID NO: 383837 - DNA, 19 bp, Homo sapiens
  siRNA target sequence for SMYD3 (NM_022743.1,578-596).
cccaactgttcgattgtgt

SEQ ID NO: 383838 - DNA, 19 bp, Homo sapiens
  siRNA target sequence for SMYD3 (NM_022743.1,579-597).
ccaactgttcgattgtgtt

SEQ ID NO: 383839 - DNA, 19 bp, Homo sapiens
  siRNA target sequence for SMYD3 (NM_022743.1,583-601).
ctgttcgattgtgttcaat

SEQ ID NO: 383840 - DNA, 19 bp, Homo sapiens
  siRNA target sequence for SMYD3 (NM_022743.1,712-730).
ggaccagtactgctttgaa

SEQ ID NO: 383841 - DNA, 19 bp, Homo sapiens
  siRNA target sequence for SMYD3 (NM_022743.1,902-920).
gaacggcttcccgatatca

SEQ ID NO: 383842 - DNA, 19 bp, Homo sapiens
  siRNA target sequence for SMYD3 (NM_022743.1,986-1004).
gaagccttgttctatggta

SEQ ID NO: 383843 - DNA, 19 bp, Homo sapiens
  siRNA target sequence for SMYD3 (NM_022743.1,1015-1033).
ggagccatacaggattttt

SEQ ID NO: 383844 - DNA, 19 bp, Homo sapiens
  siRNA target sequence for SMYD3 (NM_022743.1,1050-1068).
ccgtcagaggggttcaagt

SEQ ID NO: 383845 - DNA, 19 bp, Homo sapiens
  siRNA target sequence for SMYD3 (NM_022743.1,1090-1108).
gctacatcaaggcatgttt

SEQ ID NO: 383846 - DNA, 19 bp, Homo sapiens
  siRNA target sequence for SMYD3 (NM_022743.1,1110-1128).
cccaagcaatgaagaatct

SEQ ID NO: 383847 - DNA, 19 bp, Homo sapiens
  siRNA target sequence for SMYD3 (NM_022743.1,1131-1149).
gactggcttttgatattat

SEQ ID NO: 383848 - DNA, 19 bp, Homo sapiens
  siRNA target sequence for SMYD3 (NM_022743.1,1176-1194).
gcctgattgaagatttgat

SEQ ID NO: 383849 - DNA, 19 bp, Homo sapiens
  siRNA target sequence for FLJ13868 (NM_022744.1,266-284).
gcgtcagcccggactactt

SEQ ID NO: 383850 - DNA, 19 bp, Homo sapiens
  siRNA target sequence for FLJ13868 (NM_022744.1,381-399).
cgcaaaagccactgtttca

SEQ ID NO: 383851 - DNA, 19 bp, Homo sapiens
  siRNA target sequence for FLJ13868 (NM_022744.1,410-428).
ccacctggctcgtgaaaga

SEQ ID NO: 383852 - DNA, 19 bp, Homo sapiens
  siRNA target sequence for FLJ13868 (NM_022744.1,417-435).
gctcgtgaaagattcaact

SEQ ID NO: 383853 - DNA, 19 bp, Homo sapiens
  siRNA target sequence for FLJ13868 (NM_022744.1,495-513).
caagcagtggaggcttttt

SEQ ID NO: 383854 - DNA, 19 bp, Homo sapiens
  siRNA target sequence for FLJ13868 (NM_022744.1,536-554).
ccatgttccttgagattat

SEQ ID NO: 383855 - DNA, 19 bp, Homo sapiens
  siRNA target sequence for FLJ13868 (NM_022744.1,559-577).
cctgtatacccaatctgtt

SEQ ID NO: 383856 - DNA, 19 bp, Homo sapiens
  siRNA target sequence for FLJ13868 (NM_022744.1,560-578).
ctgtatacccaatctgttt

SEQ ID NO: 383857 - DNA, 19 bp, Homo sapiens
  siRNA target sequence for FLJ13868 (NM_022744.1,1051-1069).
gttgaggggcaccaagaat

SEQ ID NO: 383858 - DNA, 19 bp, Homo sapiens
  siRNA target sequence for FLJ13868 (NM_022744.1,1132-1150).
ggccccaagaccatcctaa

SEQ ID NO: 383859 - DNA, 19 bp, Homo sapiens
  siRNA target sequence for FLJ13868 (NM_022744.1,1236-1254).
gcgggcaggtcctaagaaa

SEQ ID NO: 383860 - DNA, 19 bp, Homo sapiens
  siRNA target sequence for FLJ13868 (NM_022744.1,1300-1318).
ctgttcccaaagttcttga

SEQ ID NO: 383861 - DNA, 19 bp, Homo sapiens
  siRNA target sequence for FLJ13868 (NM_022744.1,1302-1320).
gttcccaaagttcttgaaa

SEQ ID NO: 383862 - DNA, 19 bp, Homo sapiens
  siRNA target sequence for ATPAF1 (NM_022745.1,383-401).
ggcaaggtgattttatcaa

SEQ ID NO: 383863 - DNA, 19 bp, Homo sapiens
  siRNA target sequence for ATPAF1 (NM_022745.1,384-402).
gcaaggtgattttatcaaa

SEQ ID NO: 383864 - DNA, 19 bp, Homo sapiens
  siRNA target sequence for ATPAF1 (NM_022745.1,442-460).
gtgaacagaggattcacta

SEQ ID NO: 383865 - DNA, 19 bp, Homo sapiens
  siRNA target sequence for ATPAF1 (NM_022745.1,470-488).
ctctcagttcaatctttaa

SEQ ID NO: 383866 - DNA, 19 bp, Homo sapiens
  siRNA target sequence for ATPAF1 (NM_022745.1,819-837).
ggattccacatttctgaat

SEQ ID NO: 383867 - DNA, 19 bp, Homo sapiens
  siRNA target sequence for ATPAF1 (NM_022745.1,854-872).
gcatcgccaaccaagttca

SEQ ID NO: 383868 - DNA, 19 bp, Homo sapiens
  siRNA target sequence for ATPAF1 (NM_022745.1,883-901).
gctactgatcggaaagaga

SEQ ID NO: 383869 - DNA, 19 bp, Homo sapiens
  siRNA target sequence for ATPAF1 (NM_022745.1,907-925).
gggttagtggagaccttta

SEQ ID NO: 383870 - DNA, 19 bp, Homo sapiens
  siRNA target sequence for ATPAF1 (NM_022745.1,908-926).
ggttagtggagacctttaa

SEQ ID NO: 383871 - DNA, 19 bp, Homo sapiens
  siRNA target sequence for ATPAF1 (NM_022745.1,932-950).
gaccaaatgagttcaaata

SEQ ID NO: 383872 - DNA, 19 bp, Homo sapiens
  siRNA target sequence for ATPAF1 (NM_022745.1,956-974).
ctgtcatcgctgaattgga

SEQ ID NO: 383873 - DNA, 19 bp, Homo sapiens
  siRNA target sequence for ATPAF1 (NM_022745.1,1006-1024).
gcccagaaccaaaataaga

SEQ ID NO: 383874 - DNA, 19 bp, Homo sapiens
  siRNA target sequence for FLJ22390 (NM_022746.2,415-433).
cctactactgcctatcaaa

SEQ ID NO: 383875 - DNA, 19 bp, Homo sapiens
  siRNA target sequence for FLJ22390 (NM_022746.2,416-434).
ctactactgcctatcaaaa

SEQ ID NO: 383876 - DNA, 19 bp, Homo sapiens
  siRNA target sequence for FLJ22390 (NM_022746.2,583-601).
gagacgtcctcatcaaata

SEQ ID NO: 383877 - DNA, 19 bp, Homo sapiens
  siRNA target sequence for FLJ22390 (NM_022746.2,622-640).
ggaccagattgcttactca

SEQ ID NO: 383878 - DNA, 19 bp, Homo sapiens
  siRNA target sequence for FLJ22390 (NM_022746.2,641-659).
gacaccagcccattcttga

SEQ ID NO: 383879 - DNA, 19 bp, Homo sapiens
  siRNA target sequence for FLJ22390 (NM_022746.2,651-669).
cattcttgatcctttctga

SEQ ID NO: 383880 - DNA, 19 bp, Homo sapiens
  siRNA target sequence for FLJ22390 (NM_022746.2,672-690).
cgtcgctggcggatctcaa

SEQ ID NO: 383881 - DNA, 19 bp, Homo sapiens
  siRNA target sequence for FLJ22390 (NM_022746.2,720-738).
ccaacttcaggcccaatat

SEQ ID NO: 383882 - DNA, 19 bp, Homo sapiens
  siRNA target sequence for FLJ22390 (NM_022746.2,721-739).
caacttcaggcccaatatt

SEQ ID NO: 383883 - DNA, 19 bp, Homo sapiens
  siRNA target sequence for FLJ22390 (NM_022746.2,724-742).
cttcaggcccaatattgta

SEQ ID NO: 383884 - DNA, 19 bp, Homo sapiens
  siRNA target sequence for FLJ22390 (NM_022746.2,758-776).
gtctatgcagaggattctt

SEQ ID NO: 383885 - DNA, 19 bp, Homo sapiens
  siRNA target sequence for FLJ22390 (NM_022746.2,774-792).
cttgggatgagcttcttat

SEQ ID NO: 383886 - DNA, 19 bp, Homo sapiens
  siRNA target sequence for FLJ22390 (NM_022746.2,778-796).
ggatgagcttcttattggt

SEQ ID NO: 383887 - DNA, 19 bp, Homo sapiens
  siRNA target sequence for FLJ22390 (NM_022746.2,794-812).
ggtgacgtggaactgaaaa

SEQ ID NO: 383888 - DNA, 19 bp, Homo sapiens
  siRNA target sequence for FLJ22390 (NM_022746.2,950-968).
ccactctttgggcagtatt

SEQ ID NO: 383889 - DNA, 19 bp, Homo sapiens
  siRNA target sequence for C14orf136 (NM_022747.1,728-746).
gaaagggtttcaaatccaa

SEQ ID NO: 383890 - DNA, 19 bp, Homo sapiens
  siRNA target sequence for C14orf136 (NM_022747.1,773-791).
cgcagcaaggcttcaaagt

SEQ ID NO: 383891 - DNA, 19 bp, Homo sapiens
  siRNA target sequence for C14orf136 (NM_022747.1,774-792).
gcagcaaggcttcaaagtt

SEQ ID NO: 383892 - DNA, 19 bp, Homo sapiens
  siRNA target sequence for C14orf136 (NM_022747.1,778-796).
caaggcttcaaagtttcaa

SEQ ID NO: 383893 - DNA, 19 bp, Homo sapiens
  siRNA target sequence for C14orf136 (NM_022747.1,974-992).
ggagggcctctgcacattt

SEQ ID NO: 383894 - DNA, 19 bp, Homo sapiens
  siRNA target sequence for RAI16 (NM_022749.4,1073-1091).
cttcttgggctggtttgat

SEQ ID NO: 383895 - DNA, 19 bp, Homo sapiens
  siRNA target sequence for RAI16 (NM_022749.4,1545-1563).
gaggaagacccctacttca

SEQ ID NO: 383896 - DNA, 19 bp, Homo sapiens
  siRNA target sequence for RAI16 (NM_022749.4,1577-1595).
ggattccggctttcaaact

SEQ ID NO: 383897 - DNA, 19 bp, Homo sapiens
  siRNA target sequence for RAI16 (NM_022749.4,1732-1750).
catacgtccacgatgctta

SEQ ID NO: 383898 - DNA, 19 bp, Homo sapiens
  siRNA target sequence for RAI16 (NM_022749.4,2041-2059).
gggtgatcggggacttgat

SEQ ID NO: 383899 - DNA, 19 bp, Homo sapiens
  siRNA target sequence for RAI16 (NM_022749.4,2050-2068).
gggacttgatgcagagaat

SEQ ID NO: 383900 - DNA, 19 bp, Homo sapiens
  siRNA target sequence for RAI16 (NM_022749.4,2222-2240).
caagtttcccccacatgat

SEQ ID NO: 383901 - DNA, 19 bp, Homo sapiens
  siRNA target sequence for FLJ21610 (NM_022751.1,192-210).
gggctgcgggaaaatgact

SEQ ID NO: 383902 - DNA, 19 bp, Homo sapiens
  siRNA target sequence for FLJ21610 (NM_022751.1,193-211).
ggctgcgggaaaatgacta

SEQ ID NO: 383903 - DNA, 19 bp, Homo sapiens
  siRNA target sequence for FLJ21610 (NM_022751.1,207-225).
gactatctgctgattcatt

SEQ ID NO: 383904 - DNA, 19 bp, Homo sapiens
  siRNA target sequence for FLJ21610 (NM_022751.1,299-317).
gattccggtacattatgca

SEQ ID NO: 383905 - DNA, 19 bp, Homo sapiens
  siRNA target sequence for FLJ21610 (NM_022751.1,309-327).
cattatgcagggcaattca

SEQ ID NO: 383906 - DNA, 19 bp, Homo sapiens
  siRNA target sequence for FLJ21610 (NM_022751.1,336-354).
gaacaagaccgagatataa

SEQ ID NO: 383907 - DNA, 19 bp, Homo sapiens
  siRNA target sequence for FLJ21610 (NM_022751.1,357-375).
gagccagtgcaatatttca

SEQ ID NO: 383908 - DNA, 19 bp, Homo sapiens
  siRNA target sequence for FLJ21610 (NM_022751.1,360-378).
ccagtgcaatatttcaaca

SEQ ID NO: 383909 - DNA, 19 bp, Homo sapiens
  siRNA target sequence for FLJ21610 (NM_022751.1,389-407).
ggtggctaaggcatttcct

SEQ ID NO: 383910 - DNA, 19 bp, Homo sapiens
  siRNA target sequence for FLJ21610 (NM_022751.1,507-525).
ggggatgaactcactctaa

SEQ ID NO: 383911 - DNA, 19 bp, Homo sapiens
  siRNA target sequence for FLJ21610 (NM_022751.1,508-526).
gggatgaactcactctaat

SEQ ID NO: 383912 - DNA, 19 bp, Homo sapiens
  siRNA target sequence for FLJ21610 (NM_022751.1,528-546).
gggcaggcagaaatccttt

SEQ ID NO: 383913 - DNA, 19 bp, Homo sapiens
  siRNA target sequence for FLJ21610 (NM_022751.1,529-547).
ggcaggcagaaatccttta

SEQ ID NO: 383914 - DNA, 19 bp, Homo sapiens
  siRNA target sequence for FLJ21610 (NM_022751.1,571-589).
cacgactcaacacaatctt

SEQ ID NO: 383915 - DNA, 19 bp, Homo sapiens
  siRNA target sequence for FLJ21610 (NM_022751.1,646-664).
gcctcatttgtatgaatca

SEQ ID NO: 383916 - DNA, 19 bp, Homo sapiens
  siRNA target sequence for FLJ21610 (NM_022751.1,665-683).
ccggaccaacgaaagcatt

SEQ ID NO: 383917 - DNA, 19 bp, Homo sapiens
  siRNA target sequence for FLJ21610 (NM_022751.1,666-684).
cggaccaacgaaagcatta

SEQ ID NO: 383918 - DNA, 19 bp, Homo sapiens
  siRNA target sequence for FLJ21610 (NM_022751.1,832-850).
catacgacctccacttcat

SEQ ID NO: 383919 - DNA, 19 bp, Homo sapiens
  siRNA target sequence for FLJ21610 (NM_022751.1,853-871).
gtgaggggcaccgctataa

SEQ ID NO: 383920 - DNA, 19 bp, Homo sapiens
  siRNA target sequence for FLJ21610 (NM_022751.1,855-873).
gaggggcaccgctataagt

SEQ ID NO: 383921 - DNA, 19 bp, Homo sapiens
  siRNA target sequence for FLJ21610 (NM_022751.1,857-875).
ggggcaccgctataagttt

SEQ ID NO: 383922 - DNA, 19 bp, Homo sapiens
  siRNA target sequence for FLJ21610 (NM_022751.1,859-877).
ggcaccgctataagtttgt

SEQ ID NO: 383923 - DNA, 19 bp, Homo sapiens
  siRNA target sequence for FLJ21610 (NM_022751.1,861-879).
caccgctataagtttgtga

SEQ ID NO: 383924 - DNA, 19 bp, Homo sapiens
  siRNA target sequence for FLJ21610 (NM_022751.1,865-883).
gctataagtttgtgaacat

SEQ ID NO: 383925 - DNA, 19 bp, Homo sapiens
  siRNA target sequence for FLJ21610 (NM_022751.1,910-928).
gtgtgctgcggaacaacaa

SEQ ID NO: 383926 - DNA, 19 bp, Homo sapiens
  siRNA target sequence for FLJ21610 (NM_022751.1,1039-1057).
gtatctgccaagaacagtt

SEQ ID NO: 383927 - DNA, 19 bp, Homo sapiens
  siRNA target sequence for FLJ21610 (NM_022751.1,1055-1073).
gttcgacatcgatgagtat

SEQ ID NO: 383928 - DNA, 19 bp, Homo sapiens
  siRNA target sequence for FLJ21610 (NM_022751.1,1058-1076).
cgacatcgatgagtattca

SEQ ID NO: 383929 - DNA, 19 bp, Homo sapiens
  siRNA target sequence for FLJ21610 (NM_022751.1,1079-1097).
ggctgtccgtgatgtgaaa

SEQ ID NO: 383930 - DNA, 19 bp, Homo sapiens
  siRNA target sequence for FLJ21610 (NM_022751.1,1094-1112).
gaaaaccgactggaatgaa

SEQ ID NO: 383931 - DNA, 19 bp, Homo sapiens
  siRNA target sequence for FLJ21610 (NM_022751.1,1220-1238).
ctgtgtgtatggcaacaat

SEQ ID NO: 383932 - DNA, 19 bp, Homo sapiens
  siRNA target sequence for FLJ21610 (NM_022751.1,1222-1240).
gtgtgtatggcaacaatct

SEQ ID NO: 383933 - DNA, 19 bp, Homo sapiens
  siRNA target sequence for FLJ21610 (NM_022751.1,1342-1360).
gtgggagcgactacctttt

SEQ ID NO: 383934 - DNA, 19 bp, Homo sapiens
  siRNA target sequence for FLJ21610 (NM_022751.1,1391-1409).
cccgggaaagtcagaactt

SEQ ID NO: 383935 - DNA, 19 bp, Homo sapiens
  siRNA target sequence for FLJ21610 (NM_022751.1,1503-1521).
ggttctgtccgatccaaat

SEQ ID NO: 383936 - DNA, 19 bp, Homo sapiens
  siRNA target sequence for FLJ21610 (NM_022751.1,1754-1772).
caccttgtcctactattct

SEQ ID NO: 383937 - DNA, 19 bp, Homo sapiens
  siRNA target sequence for FLJ21610 (NM_022751.1,1842-1860).
ccatgtaaccgagtgaaaa

SEQ ID NO: 383938 - DNA, 19 bp, Homo sapiens
  siRNA target sequence for FLJ21610 (NM_022751.1,1850-1868).
ccgagtgaaaactgattct

SEQ ID NO: 383939 - DNA, 19 bp, Homo sapiens
  siRNA target sequence for FLJ21610 (NM_022751.1,1925-1943).
ctcatggcctaaccattat

SEQ ID NO: 383940 - DNA, 19 bp, Homo sapiens
  siRNA target sequence for FLJ21610 (NM_022751.1,1986-2004).
gatccaagcaggagttata

SEQ ID NO: 383941 - DNA, 19 bp, Homo sapiens
  siRNA target sequence for FLJ21610 (NM_022751.1,1989-2007).
ccaagcaggagttatagtt

SEQ ID NO: 383942 - DNA, 19 bp, Homo sapiens
  siRNA target sequence for FLJ21610 (NM_022751.1,2165-2183).
gagcacagatgtgaaatct

SEQ ID NO: 383943 - DNA, 19 bp, Homo sapiens
  siRNA target sequence for FLJ21610 (NM_022751.1,2261-2279).
ggtcgcctccgaaacatct

SEQ ID NO: 383944 - DNA, 19 bp, Homo sapiens
  siRNA target sequence for FLJ21610 (NM_022751.1,2339-2357).
ctcggaggaccagtatttt

SEQ ID NO: 383945 - DNA, 19 bp, Homo sapiens
  siRNA target sequence for FLJ21610 (NM_022751.1,2341-2359).
cggaggaccagtattttgt

SEQ ID NO: 383946 - DNA, 19 bp, Homo sapiens
  siRNA target sequence for FLJ21610 (NM_022751.1,2342-2360).
ggaggaccagtattttgtt

SEQ ID NO: 383947 - DNA, 19 bp, Homo sapiens
  siRNA target sequence for FLJ21610 (NM_022751.1,2474-2492).
cctatcaggactctctata

SEQ ID NO: 383948 - DNA, 19 bp, Homo sapiens
  siRNA target sequence for FLJ21610 (NM_022751.1,2504-2522).
caagtcactacggttcatt

SEQ ID NO: 383949 - DNA, 19 bp, Homo sapiens
  siRNA target sequence for FLJ21610 (NM_022751.1,2509-2527).
cactacggttcattggttt

SEQ ID NO: 383950 - DNA, 19 bp, Homo sapiens
  siRNA target sequence for FLJ21610 (NM_022751.1,2524-2542).
gtttgtccgaagatgtcat

SEQ ID NO: 383951 - DNA, 19 bp, Homo sapiens
  siRNA target sequence for FLJ21610 (NM_022751.1,2583-2601).
gttcagctaacggaagaaa

SEQ ID NO: 383952 - DNA, 19 bp, Homo sapiens
  siRNA target sequence for FLJ12903 (NM_022753.1,151-169).
ggtcttagcccaaatgaaa

SEQ ID NO: 383953 - DNA, 19 bp, Homo sapiens
  siRNA target sequence for FLJ12903 (NM_022753.1,193-211).
gggatcagccccaataact

SEQ ID NO: 383954 - DNA, 19 bp, Homo sapiens
  siRNA target sequence for FLJ12903 (NM_022753.1,195-213).
gatcagccccaataactct

SEQ ID NO: 383955 - DNA, 19 bp, Homo sapiens
  siRNA target sequence for FLJ12903 (NM_022753.1,256-274).
caacagactgtctctgata

SEQ ID NO: 383956 - DNA, 19 bp, Homo sapiens
  siRNA target sequence for FLJ12903 (NM_022753.1,292-310).
gagaaccctacgtctgtat

SEQ ID NO: 383957 - DNA, 19 bp, Homo sapiens
  siRNA target sequence for FLJ12903 (NM_022753.1,317-335).
ggatctcagaccattcaga

SEQ ID NO: 383958 - DNA, 19 bp, Homo sapiens
  siRNA target sequence for FLJ12903 (NM_022753.1,327-345).
ccattcagagactcctaat

SEQ ID NO: 383959 - DNA, 19 bp, Homo sapiens
  siRNA target sequence for FLJ12903 (NM_022753.1,332-350).
cagagactcctaatatgga

SEQ ID NO: 383960 - DNA, 19 bp, Homo sapiens
  siRNA target sequence for FLJ12903 (NM_022753.1,348-366).
ggagttatcctgcagaaat

SEQ ID NO: 383961 - DNA, 19 bp, Homo sapiens
  siRNA target sequence for FLJ12903 (NM_022753.1,367-385).
ggtggttcacacaagtcaa

SEQ ID NO: 383962 - DNA, 19 bp, Homo sapiens
  siRNA target sequence for FLJ12903 (NM_022753.1,370-388).
ggttcacacaagtcaagtt

SEQ ID NO: 383963 - DNA, 19 bp, Homo sapiens
  siRNA target sequence for FLJ12903 (NM_022753.1,433-451).
gatgttcttaacaaggatt

SEQ ID NO: 383964 - DNA, 19 bp, Homo sapiens
  siRNA target sequence for FLJ12903 (NM_022753.1,486-504).
caaagtcattcctgttcta

SEQ ID NO: 383965 - DNA, 19 bp, Homo sapiens
  siRNA target sequence for FLJ12903 (NM_022753.1,496-514).
cctgttctacaaactaaga

SEQ ID NO: 383966 - DNA, 19 bp, Homo sapiens
  siRNA target sequence for FLJ12903 (NM_022753.1,509-527).
ctaagaccaggactaatgt

SEQ ID NO: 383967 - DNA, 19 bp, Homo sapiens
  siRNA target sequence for FLJ11730 (NM_022756.3,106-124).
gcggaaacattggcaaatt

SEQ ID NO: 383968 - DNA, 19 bp, Homo sapiens
  siRNA target sequence for FLJ11730 (NM_022756.3,107-125).
cggaaacattggcaaattt

SEQ ID NO: 383969 - DNA, 19 bp, Homo sapiens
  siRNA target sequence for FLJ11730 (NM_022756.3,127-145).
gagcgacagatctatgctt

SEQ ID NO: 383970 - DNA, 19 bp, Homo sapiens
  siRNA target sequence for FLJ11730 (NM_022756.3,129-147).
gcgacagatctatgctttt

SEQ ID NO: 383971 - DNA, 19 bp, Homo sapiens
  siRNA target sequence for FLJ11730 (NM_022756.3,205-223).
cggtatctgaccaaccaaa

SEQ ID NO: 383972 - DNA, 19 bp, Homo sapiens
  siRNA target sequence for FLJ11730 (NM_022756.3,247-265).
cgaaggaaccggaagttta

SEQ ID NO: 383973 - DNA, 19 bp, Homo sapiens
  siRNA target sequence for FLJ11730 (NM_022756.3,272-290).
ctgagcggctcttcagtaa

SEQ ID NO: 383974 - DNA, 19 bp, Homo sapiens
  siRNA target sequence for FLJ11730 (NM_022756.3,337-355).
caggaccagctcattgaaa

SEQ ID NO: 383975 - DNA, 19 bp, Homo sapiens
  siRNA target sequence for FLJ11730 (NM_022756.3,340-358).
gaccagctcattgaaaaga

SEQ ID NO: 383976 - DNA, 19 bp, Homo sapiens
  siRNA target sequence for FLJ11730 (NM_022756.3,475-493).
cagaaggctgcttcttcta

SEQ ID NO: 383977 - DNA, 19 bp, Homo sapiens
  siRNA target sequence for FLJ11730 (NM_022756.3,518-536).
gccataaaaagcgaaagaa

SEQ ID NO: 383978 - DNA, 19 bp, Homo sapiens
  siRNA target sequence for FLJ11730 (NM_022756.3,519-537).
ccataaaaagcgaaagaat

SEQ ID NO: 383979 - DNA, 19 bp, Homo sapiens
  siRNA target sequence for FLJ11730 (NM_022756.3,549-567).
cagcccgtctggcatgttt

SEQ ID NO: 383980 - DNA, 19 bp, Homo sapiens
  siRNA target sequence for FLJ11730 (NM_022756.3,552-570).
cccgtctggcatgtttgat

SEQ ID NO: 383981 - DNA, 19 bp, Homo sapiens
  siRNA target sequence for FLJ11730 (NM_022756.3,553-571).
ccgtctggcatgtttgatt

SEQ ID NO: 383982 - DNA, 19 bp, Homo sapiens
  siRNA target sequence for FLJ11730 (NM_022756.3,555-573).
gtctggcatgtttgattat

SEQ ID NO: 383983 - DNA, 19 bp, Homo sapiens
  siRNA target sequence for C6orf106 (NM_022758.3,673-691).
ccacacttggcaagttaaa

SEQ ID NO: 383984 - DNA, 19 bp, Homo sapiens
  siRNA target sequence for C6orf106 (NM_022758.3,674-692).
cacacttggcaagttaaat

SEQ ID NO: 383985 - DNA, 19 bp, Homo sapiens
  siRNA target sequence for C6orf106 (NM_022758.3,676-694).
cacttggcaagttaaatgt

SEQ ID NO: 383986 - DNA, 19 bp, Homo sapiens
  siRNA target sequence for C20orf81 (NM_022760.3,929-947).
ggatctctccagatatggt

SEQ ID NO: 383987 - DNA, 19 bp, Homo sapiens
  siRNA target sequence for C20orf81 (NM_022760.3,993-1011).
gtgcgcatggaccaagtat

SEQ ID NO: 383988 - DNA, 19 bp, Homo sapiens
  siRNA target sequence for C20orf81 (NM_022760.3,1052-1070).
cctcggggaacgtatcact

SEQ ID NO: 383989 - DNA, 19 bp, Homo sapiens
  siRNA target sequence for C20orf81 (NM_022760.3,1557-1575).
ccccatgaattcttcaact

SEQ ID NO: 383990 - DNA, 19 bp, Homo sapiens
  siRNA target sequence for C20orf81 (NM_022760.3,1618-1636).
gtggccctggagtgaactt

SEQ ID NO: 383991 - DNA, 19 bp, Homo sapiens
  siRNA target sequence for C20orf81 (NM_022760.3,1712-1730).
ggggatgccacgctatgtt

SEQ ID NO: 383992 - DNA, 19 bp, Homo sapiens
  siRNA target sequence for C20orf81 (NM_022760.3,1798-1816).
gactgatccacacatacaa

SEQ ID NO: 383993 - DNA, 19 bp, Homo sapiens
  siRNA target sequence for FLJ22318 (NM_022762.3,367-385).
cagtgctgccggaagatca

SEQ ID NO: 383994 - DNA, 19 bp, Homo sapiens
  siRNA target sequence for FLJ22318 (NM_022762.3,372-390).
ctgccggaagatcaaagat

SEQ ID NO: 383995 - DNA, 19 bp, Homo sapiens
  siRNA target sequence for FLJ22318 (NM_022762.3,410-428).
cggaccataaggacattca

SEQ ID NO: 383996 - DNA, 19 bp, Homo sapiens
  siRNA target sequence for FLJ22318 (NM_022762.3,595-613).
gagctgtgccaggaatcaa

SEQ ID NO: 383997 - DNA, 19 bp, Homo sapiens
  siRNA target sequence for FLJ22318 (NM_022762.3,1061-1079).
cgctgcctgtgttgatgaa

SEQ ID NO: 383998 - DNA, 19 bp, Homo sapiens
  siRNA target sequence for FLJ22318 (NM_022762.3,1067-1085).
ctgtgttgatgaacatcaa

SEQ ID NO: 383999 - DNA, 19 bp, Homo sapiens
  siRNA target sequence for FLJ22318 (NM_022762.3,1132-1150).
gacgagttaccgattgaga

SEQ ID NO: 384000 - DNA, 19 bp, Homo sapiens
  siRNA target sequence for FLJ22318 (NM_022762.3,1134-1152).
cgagttaccgattgagatt

SEQ ID NO: 384001 - DNA, 19 bp, Homo sapiens
  siRNA target sequence for FLJ22318 (NM_022762.3,1137-1155).
gttaccgattgagattgaa

SEQ ID NO: 384002 - DNA, 19 bp, Homo sapiens
  siRNA target sequence for FLJ22318 (NM_022762.3,1204-1222).
cgccagcagacgtcagatt

SEQ ID NO: 384003 - DNA, 19 bp, Homo sapiens
  siRNA target sequence for FLJ22318 (NM_022762.3,1260-1278).
ctcccgagatgcactcaat

SEQ ID NO: 384004 - DNA, 19 bp, Homo sapiens
  siRNA target sequence for FLJ22318 (NM_022762.3,1262-1280).
cccgagatgcactcaataa

SEQ ID NO: 384005 - DNA, 19 bp, Homo sapiens
  siRNA target sequence for FLJ22318 (NM_022762.3,1265-1283).
gagatgcactcaataagct

SEQ ID NO: 384006 - DNA, 19 bp, Homo sapiens
  siRNA target sequence for FLJ22318 (NM_022762.3,1270-1288).
gcactcaataagctcatta

SEQ ID NO: 384007 - DNA, 19 bp, Homo sapiens
  siRNA target sequence for FLJ22318 (NM_022762.3,1271-1289).
cactcaataagctcattaa

SEQ ID NO: 384008 - DNA, 19 bp, Homo sapiens
  siRNA target sequence for FLJ22318 (NM_022762.3,1275-1293).
caataagctcattaatgga

SEQ ID NO: 384009 - DNA, 19 bp, Homo sapiens
  siRNA target sequence for FLJ22318 (NM_022762.3,1339-1357).
gatgggaaacgcatcatat

SEQ ID NO: 384010 - DNA, 19 bp, Homo sapiens
  siRNA target sequence for FLJ21868 (NM_022769.1,261-279).
ggaatagtgtgaacaacat

SEQ ID NO: 384011 - DNA, 19 bp, Homo sapiens
  siRNA target sequence for FLJ21868 (NM_022769.1,292-310).
gacccacctgggtataaga

SEQ ID NO: 384012 - DNA, 19 bp, Homo sapiens
  siRNA target sequence for FLJ21868 (NM_022769.1,436-454).
cccttcgctccgtctgttt

SEQ ID NO: 384013 - DNA, 19 bp, Homo sapiens
  siRNA target sequence for FLJ21868 (NM_022769.1,437-455).
ccttcgctccgtctgtttt

SEQ ID NO: 384014 - DNA, 19 bp, Homo sapiens
  siRNA target sequence for FLJ21868 (NM_022769.1,457-475).
ccttagcaacccatctctt

SEQ ID NO: 384015 - DNA, 19 bp, Homo sapiens
  siRNA target sequence for FLJ21868 (NM_022769.1,458-476).
cttagcaacccatctcttt

SEQ ID NO: 384016 - DNA, 19 bp, Homo sapiens
  siRNA target sequence for FLJ21868 (NM_022769.1,593-611).
ccactggccccatatccta

SEQ ID NO: 384017 - DNA, 19 bp, Homo sapiens
  siRNA target sequence for FLJ21868 (NM_022769.1,825-843).
catctttgaccaacttctt

SEQ ID NO: 384018 - DNA, 19 bp, Homo sapiens
  siRNA target sequence for FLJ21868 (NM_022769.1,954-972).
gaccaagcccgtattccaa

SEQ ID NO: 384019 - DNA, 19 bp, Homo sapiens
  siRNA target sequence for FLJ21868 (NM_022769.1,1069-1087).
gaacgtggacactccattt

SEQ ID NO: 384020 - DNA, 19 bp, Homo sapiens
  siRNA target sequence for FLJ21868 (NM_022769.1,1126-1144).
ggacggactcaacatgtta

SEQ ID NO: 384021 - DNA, 19 bp, Homo sapiens
  siRNA target sequence for FLJ21868 (NM_022769.1,1129-1147).
cggactcaacatgttaagt

SEQ ID NO: 384022 - DNA, 19 bp, Homo sapiens
  siRNA target sequence for FLJ21868 (NM_022769.1,1131-1149).
gactcaacatgttaagtga

SEQ ID NO: 384023 - DNA, 19 bp, Homo sapiens
  siRNA target sequence for FLJ21868 (NM_022769.1,1165-1183).
gctggacccctctgttgaa

SEQ ID NO: 384024 - DNA, 19 bp, Homo sapiens
  siRNA target sequence for FLJ13912 (NM_022770.2,205-223).
ctcgccttggcgctttctt

SEQ ID NO: 384025 - DNA, 19 bp, Homo sapiens
  siRNA target sequence for FLJ13912 (NM_022770.2,290-308).
cttgtggctggcaaaagga

SEQ ID NO: 384026 - DNA, 19 bp, Homo sapiens
  siRNA target sequence for FLJ13912 (NM_022770.2,399-417).
gtggtggacctccacaaaa

SEQ ID NO: 384027 - DNA, 19 bp, Homo sapiens
  siRNA target sequence for FLJ13912 (NM_022770.2,503-521).
gacttttatcggacgtttt

SEQ ID NO: 384028 - DNA, 19 bp, Homo sapiens
  siRNA target sequence for FLJ13912 (NM_022770.2,619-637).
ggcagaaaggactgaatga

SEQ ID NO: 384029 - DNA, 19 bp, Homo sapiens
  siRNA target sequence for FLJ13912 (NM_022770.2,682-700).
ccaacctcgttcagaatta

SEQ ID NO: 384030 - DNA, 19 bp, Homo sapiens
  siRNA target sequence for FLJ13912 (NM_022770.2,687-705).
ctcgttcagaattacaaga

SEQ ID NO: 384031 - DNA, 19 bp, Homo sapiens
  siRNA target sequence for FLJ12085 (NM_022771.3,39-57).
gttgtgagcgggaagatta

SEQ ID NO: 384032 - DNA, 19 bp, Homo sapiens
  siRNA target sequence for FLJ12085 (NM_022771.3,44-62).
gagcgggaagattatatat

SEQ ID NO: 384033 - DNA, 19 bp, Homo sapiens
  siRNA target sequence for FLJ12085 (NM_022771.3,46-64).
gcgggaagattatatatga

SEQ ID NO: 384034 - DNA, 19 bp, Homo sapiens
  siRNA target sequence for FLJ12085 (NM_022771.3,108-126).
gaccaagacggcttgattt

SEQ ID NO: 384035 - DNA, 19 bp, Homo sapiens
  siRNA target sequence for FLJ12085 (NM_022771.3,110-128).
ccaagacggcttgatttca

SEQ ID NO: 384036 - DNA, 19 bp, Homo sapiens
  siRNA target sequence for FLJ12085 (NM_022771.3,116-134).
cggcttgatttcaggaata

SEQ ID NO: 384037 - DNA, 19 bp, Homo sapiens
  siRNA target sequence for FLJ12085 (NM_022771.3,130-148).
gaatattacgtgttttaga

SEQ ID NO: 384038 - DNA, 19 bp, Homo sapiens
  siRNA target sequence for FLJ12085 (NM_022771.3,147-165).
gaaaaggatgccgaagtaa

SEQ ID NO: 384039 - DNA, 19 bp, Homo sapiens
  siRNA target sequence for FLJ12085 (NM_022771.3,178-196).
gaccattggatgatgcatt

SEQ ID NO: 384040 - DNA, 19 bp, Homo sapiens
  siRNA target sequence for FLJ12085 (NM_022771.3,181-199).
cattggatgatgcattaga

SEQ ID NO: 384041 - DNA, 19 bp, Homo sapiens
  siRNA target sequence for FLJ12085 (NM_022771.3,192-210).
gcattagattcctctagta

SEQ ID NO: 384042 - DNA, 19 bp, Homo sapiens
  siRNA target sequence for FLJ12085 (NM_022771.3,198-216).
gattcctctagtattctct

SEQ ID NO: 384043 - DNA, 19 bp, Homo sapiens
  siRNA target sequence for FLJ12085 (NM_022771.3,230-248).
ctccagttcagttgtagaa

SEQ ID NO: 384044 - DNA, 19 bp, Homo sapiens
  siRNA target sequence for FLJ12085 (NM_022771.3,250-268).
ggactcaggccccaaaaga

SEQ ID NO: 384045 - DNA, 19 bp, Homo sapiens
  siRNA target sequence for FLJ12085 (NM_022771.3,286-304).
cagaacatctgaacagtta

SEQ ID NO: 384046 - DNA, 19 bp, Homo sapiens
  siRNA target sequence for FLJ12085 (NM_022771.3,309-327).
gcagaatgggacatggtta

SEQ ID NO: 384047 - DNA, 19 bp, Homo sapiens
  siRNA target sequence for FLJ12085 (NM_022771.3,316-334).
gggacatggttaatacagt

SEQ ID NO: 384048 - DNA, 19 bp, Homo sapiens
  siRNA target sequence for FLJ12085 (NM_022771.3,317-335).
ggacatggttaatacagtt

SEQ ID NO: 384049 - DNA, 19 bp, Homo sapiens
  siRNA target sequence for FLJ12085 (NM_022771.3,366-384).
gatgctccaagtcatagaa

SEQ ID NO: 384050 - DNA, 19 bp, Homo sapiens
  siRNA target sequence for FLJ12085 (NM_022771.3,526-544).
gagatagcaaactactgat

SEQ ID NO: 384051 - DNA, 19 bp, Homo sapiens
  siRNA target sequence for FLJ12085 (NM_022771.3,603-621).
cttgtgaattgtcagaata

SEQ ID NO: 384052 - DNA, 19 bp, Homo sapiens
  siRNA target sequence for FLJ12085 (NM_022771.3,606-624).
gtgaattgtcagaataaga

SEQ ID NO: 384053 - DNA, 19 bp, Homo sapiens
  siRNA target sequence for FLJ12085 (NM_022771.3,625-643).
gtctttcacagtcttttga

SEQ ID NO: 384054 - DNA, 19 bp, Homo sapiens
  siRNA target sequence for FLJ12085 (NM_022771.3,654-672).
gatgagccagcatatggtt

SEQ ID NO: 384055 - DNA, 19 bp, Homo sapiens
  siRNA target sequence for FLJ12085 (NM_022771.3,659-677).
gccagcatatggtttaata

SEQ ID NO: 384056 - DNA, 19 bp, Homo sapiens
  siRNA target sequence for FLJ12085 (NM_022771.3,714-732).
gccattcaccactggaaaa

SEQ ID NO: 384057 - DNA, 19 bp, Homo sapiens
  siRNA target sequence for FLJ12085 (NM_022771.3,715-733).
ccattcaccactggaaaaa

SEQ ID NO: 384058 - DNA, 19 bp, Homo sapiens
  siRNA target sequence for FLJ12085 (NM_022771.3,747-765).
ccttatacggcaactatga

SEQ ID NO: 384059 - DNA, 19 bp, Homo sapiens
  siRNA target sequence for FLJ12085 (NM_022771.3,748-766).
cttatacggcaactatgat

SEQ ID NO: 384060 - DNA, 19 bp, Homo sapiens
  siRNA target sequence for FLJ12085 (NM_022771.3,754-772).
cggcaactatgataggatt

SEQ ID NO: 384061 - DNA, 19 bp, Homo sapiens
  siRNA target sequence for FLJ12085 (NM_022771.3,755-773).
ggcaactatgataggattt

SEQ ID NO: 384062 - DNA, 19 bp, Homo sapiens
  siRNA target sequence for FLJ12085 (NM_022771.3,756-774).
gcaactatgataggatttt

SEQ ID NO: 384063 - DNA, 19 bp, Homo sapiens
  siRNA target sequence for FLJ12085 (NM_022771.3,775-793).
ccaaagtcacaaactacat

SEQ ID NO: 384064 - DNA, 19 bp, Homo sapiens
  siRNA target sequence for FLJ12085 (NM_022771.3,815-833).
cgatccctctacacatcaa

SEQ ID NO: 384065 - DNA, 19 bp, Homo sapiens
  siRNA target sequence for FLJ12085 (NM_022771.3,877-895).
caggtctaaagataaatca

SEQ ID NO: 384066 - DNA, 19 bp, Homo sapiens
  siRNA target sequence for FLJ12085 (NM_022771.3,918-936).
gtcatcacaagaattgatt

SEQ ID NO: 384067 - DNA, 19 bp, Homo sapiens
  siRNA target sequence for FLJ12085 (NM_022771.3,940-958).
gggaacgccctgttgttca

SEQ ID NO: 384068 - DNA, 19 bp, Homo sapiens
  siRNA target sequence for FLJ12085 (NM_022771.3,941-959).
ggaacgccctgttgttcaa

SEQ ID NO: 384069 - DNA, 19 bp, Homo sapiens
  siRNA target sequence for FLJ12085 (NM_022771.3,961-979).
ggagagaaccggtatcact

SEQ ID NO: 384070 - DNA, 19 bp, Homo sapiens
  siRNA target sequence for FLJ12085 (NM_022771.3,1057-1075).
ggggacttagtcatgcatt

SEQ ID NO: 384071 - DNA, 19 bp, Homo sapiens
  siRNA target sequence for FLJ12085 (NM_022771.3,1062-1080).
cttagtcatgcattgagaa

SEQ ID NO: 384072 - DNA, 19 bp, Homo sapiens
  siRNA target sequence for FLJ12085 (NM_022771.3,1138-1156).
gaacccaattacaaaagca

SEQ ID NO: 384073 - DNA, 19 bp, Homo sapiens
  siRNA target sequence for FLJ12085 (NM_022771.3,1222-1240).
gaaattcgaggttaagaga

SEQ ID NO: 384074 - DNA, 19 bp, Homo sapiens
  siRNA target sequence for FLJ12085 (NM_022771.3,1237-1255).
gagattatagaagtcttat

SEQ ID NO: 384075 - DNA, 19 bp, Homo sapiens
  siRNA target sequence for FLJ12085 (NM_022771.3,1256-1274).
cgaaaaagatgttaacaga

SEQ ID NO: 384076 - DNA, 19 bp, Homo sapiens
  siRNA target sequence for FLJ12085 (NM_022771.3,1282-1300).
gaacaaacaagttttatga

SEQ ID NO: 384077 - DNA, 19 bp, Homo sapiens
  siRNA target sequence for FLJ12085 (NM_022771.3,1531-1549).
gtaccttacttcgattgtt

SEQ ID NO: 384078 - DNA, 19 bp, Homo sapiens
  siRNA target sequence for FLJ12085 (NM_022771.3,1534-1552).
ccttacttcgattgttaga

SEQ ID NO: 384079 - DNA, 19 bp, Homo sapiens
  siRNA target sequence for FLJ12085 (NM_022771.3,1583-1601).
ggactctggatacctttat

SEQ ID NO: 384080 - DNA, 19 bp, Homo sapiens
  siRNA target sequence for FLJ12085 (NM_022771.3,1584-1602).
gactctggatacctttatt

SEQ ID NO: 384081 - DNA, 19 bp, Homo sapiens
  siRNA target sequence for FLJ12085 (NM_022771.3,1586-1604).
ctctggatacctttatttt

SEQ ID NO: 384082 - DNA, 19 bp, Homo sapiens
  siRNA target sequence for FLJ12085 (NM_022771.3,1606-1624).
gcttcaggtggcttttaat

SEQ ID NO: 384083 - DNA, 19 bp, Homo sapiens
  siRNA target sequence for FLJ12085 (NM_022771.3,1615-1633).
ggcttttaatcagattcaa

SEQ ID NO: 384084 - DNA, 19 bp, Homo sapiens
  siRNA target sequence for FLJ12085 (NM_022771.3,1650-1668).
ctagatattcttcgattat

SEQ ID NO: 384085 - DNA, 19 bp, Homo sapiens
  siRNA target sequence for FLJ12085 (NM_022771.3,1682-1700).
gaccgaactaccatgtaca

SEQ ID NO: 384086 - DNA, 19 bp, Homo sapiens
  siRNA target sequence for FLJ12085 (NM_022771.3,1684-1702).
ccgaactaccatgtacaaa

SEQ ID NO: 384087 - DNA, 19 bp, Homo sapiens
  siRNA target sequence for FLJ12085 (NM_022771.3,1779-1797).
gaaatacttaagcatatca

SEQ ID NO: 384088 - DNA, 19 bp, Homo sapiens
  siRNA target sequence for FLJ12085 (NM_022771.3,1796-1814).
caatgaattgtccatgaaa

SEQ ID NO: 384089 - DNA, 19 bp, Homo sapiens
  siRNA target sequence for FLJ12085 (NM_022771.3,1818-1836).
gatgtggaagatatactct

SEQ ID NO: 384090 - DNA, 19 bp, Homo sapiens
  siRNA target sequence for FLJ12085 (NM_022771.3,1946-1964).
cgttggtgaagacgaaaat

SEQ ID NO: 384091 - DNA, 19 bp, Homo sapiens
  siRNA target sequence for FLJ12085 (NM_022771.3,1951-1969).
gtgaagacgaaaatgttgt

SEQ ID NO: 384092 - DNA, 19 bp, Homo sapiens
  siRNA target sequence for FLJ12681 (NM_022773.1,7-25).
gccctgacagcccaacaat

SEQ ID NO: 384093 - DNA, 19 bp, Homo sapiens
  siRNA target sequence for FLJ12681 (NM_022773.1,178-196).
ccctagccttcgtgtactt

SEQ ID NO: 384094 - DNA, 19 bp, Homo sapiens
  siRNA target sequence for FLJ12681 (NM_022773.1,404-422).
gggcatctcgtctttcgta

SEQ ID NO: 384095 - DNA, 19 bp, Homo sapiens
  siRNA target sequence for FLJ12681 (NM_022773.1,436-454).
gcgccaacatgcttctcat

SEQ ID NO: 384096 - DNA, 19 bp, Homo sapiens
  siRNA target sequence for FLJ12681 (NM_022773.1,462-480).
ctgtggggcctctacatgt

SEQ ID NO: 384097 - DNA, 19 bp, Homo sapiens
  siRNA target sequence for FLJ12681 (NM_022773.1,628-646).
gcttccggtggctgatctt

SEQ ID NO: 384098 - DNA, 19 bp, Homo sapiens
  siRNA target sequence for FLJ12681 (NM_022773.1,661-679).
gagcaggcctgatcaagat

SEQ ID NO: 384099 - DNA, 19 bp, Homo sapiens
  siRNA target sequence for FLJ12681 (NM_022773.1,1165-1183).
gctccaggcaggtcatgaa

SEQ ID NO: 384100 - DNA, 19 bp, Homo sapiens
  siRNA target sequence for FLJ12681 (NM_022773.1,1200-1218).
cttcacatcgtcaacactt

SEQ ID NO: 384101 - DNA, 19 bp, Homo sapiens
  siRNA target sequence for FLJ12681 (NM_022773.1,1309-1327).
gggaggactacgagttcaa

SEQ ID NO: 384102 - DNA, 19 bp, Homo sapiens
  siRNA target sequence for FLJ12681 (NM_022773.1,1311-1329).
gaggactacgagttcaagt

SEQ ID NO: 384103 - DNA, 19 bp, Homo sapiens
  siRNA target sequence for FLJ12681 (NM_022773.1,1545-1563).
gagcactacaggtacaagt

SEQ ID NO: 384104 - DNA, 19 bp, Homo sapiens
  siRNA target sequence for FLJ12681 (NM_022773.1,1548-1566).
cactacaggtacaagttca

SEQ ID NO: 384105 - DNA, 19 bp, Homo sapiens
  siRNA target sequence for FLJ12681 (NM_022773.1,1653-1671).
gagctgaggccctacttca

SEQ ID NO: 384106 - DNA, 19 bp, Homo sapiens
  siRNA target sequence for FLJ21144 (NM_022774.1,286-304).
gtttctggacctagaagat

SEQ ID NO: 384107 - DNA, 19 bp, Homo sapiens
  siRNA target sequence for FLJ21144 (NM_022774.1,374-392).
cccataagcttacaaaact

SEQ ID NO: 384108 - DNA, 19 bp, Homo sapiens
  siRNA target sequence for FLJ21144 (NM_022774.1,425-443).
gagagattccaccttaaat

SEQ ID NO: 384109 - DNA, 19 bp, Homo sapiens
  siRNA target sequence for FLJ21144 (NM_022774.1,562-580).
catacacctagctagagaa

SEQ ID NO: 384110 - DNA, 19 bp, Homo sapiens
  siRNA target sequence for FLJ21144 (NM_022774.1,568-586).
cctagctagagaactagaa

SEQ ID NO: 384111 - DNA, 19 bp, Homo sapiens
  siRNA target sequence for FLJ21144 (NM_022774.1,573-591).
ctagagaactagaacttca

SEQ ID NO: 384112 - DNA, 19 bp, Homo sapiens
  siRNA target sequence for FLJ21144 (NM_022774.1,633-651).
gggcaattaagtttctgaa

SEQ ID NO: 384113 - DNA, 19 bp, Homo sapiens
  siRNA target sequence for FLJ21144 (NM_022774.1,720-738).
gggagggtgtacttcttgt

SEQ ID NO: 384114 - DNA, 19 bp, Homo sapiens
  siRNA target sequence for FLJ21144 (NM_022774.1,721-739).
ggagggtgtacttcttgtt

SEQ ID NO: 384115 - DNA, 19 bp, Homo sapiens
  siRNA target sequence for FLJ21144 (NM_022774.1,854-872).
caagtcagcctatacaaat

SEQ ID NO: 384116 - DNA, 19 bp, Homo sapiens
  siRNA target sequence for FLJ21144 (NM_022774.1,862-880).
cctatacaaatatatcttt

SEQ ID NO: 384117 - DNA, 19 bp, Homo sapiens
  siRNA target sequence for FLJ21144 (NM_022774.1,1048-1066).
gtcagacctcccagttatt

SEQ ID NO: 384118 - DNA, 19 bp, Homo sapiens
  siRNA target sequence for FLJ21144 (NM_022774.1,1059-1077).
cagttattgatatcttgaa

SEQ ID NO: 384119 - DNA, 19 bp, Homo sapiens
  siRNA target sequence for FLJ21144 (NM_022774.1,1231-1249).
gtgccggacgtgtacctat

SEQ ID NO: 384120 - DNA, 19 bp, Homo sapiens
  siRNA target sequence for FLJ21144 (NM_022774.1,1240-1258).
gtgtacctatgcagacatt

SEQ ID NO: 384121 - DNA, 19 bp, Homo sapiens
  siRNA target sequence for FLJ21144 (NM_022774.1,1245-1263).
cctatgcagacatttgtga

SEQ ID NO: 384122 - DNA, 19 bp, Homo sapiens
  siRNA target sequence for FLJ14117 (NM_022777.1,512-530).
cggatggaattcataaagt

SEQ ID NO: 384123 - DNA, 19 bp, Homo sapiens
  siRNA target sequence for DKFZP434L0117 (NM_022778.2,181-199).
caccgagttccgatgtgat

SEQ ID NO: 384124 - DNA, 19 bp, Homo sapiens
  siRNA target sequence for DKFZP434L0117 (NM_022778.2,184-202).
cgagttccgatgtgattca

SEQ ID NO: 384125 - DNA, 19 bp, Homo sapiens
  siRNA target sequence for DKFZP434L0117 (NM_022778.2,264-282).
cgcttcagccgctgttcaa

SEQ ID NO: 384126 - DNA, 19 bp, Homo sapiens
  siRNA target sequence for DKFZP434L0117 (NM_022778.2,266-284).
cttcagccgctgttcaagt

SEQ ID NO: 384127 - DNA, 19 bp, Homo sapiens
  siRNA target sequence for DKFZP434L0117 (NM_022778.2,269-287).
cagccgctgttcaagtgta

SEQ ID NO: 384128 - DNA, 19 bp, Homo sapiens
  siRNA target sequence for DKFZP434L0117 (NM_022778.2,302-320).
cacagccattggtacatca

SEQ ID NO: 384129 - DNA, 19 bp, Homo sapiens
  siRNA target sequence for DKFZP434L0117 (NM_022778.2,312-330).
ggtacatcatgctcagata

SEQ ID NO: 384130 - DNA, 19 bp, Homo sapiens
  siRNA target sequence for DKFZP434L0117 (NM_022778.2,313-331).
gtacatcatgctcagatat

SEQ ID NO: 384131 - DNA, 19 bp, Homo sapiens
  siRNA target sequence for DKFZP434L0117 (NM_022778.2,327-345).
gatattgcggaggattttt

SEQ ID NO: 384132 - DNA, 19 bp, Homo sapiens
  siRNA target sequence for DKFZP434L0117 (NM_022778.2,380-398).
caaaagccacgtaaccatt

SEQ ID NO: 384133 - DNA, 19 bp, Homo sapiens
  siRNA target sequence for DKFZP434L0117 (NM_022778.2,438-456).
cctgccaagccaaattcta

SEQ ID NO: 384134 - DNA, 19 bp, Homo sapiens
  siRNA target sequence for DKFZP434L0117 (NM_022778.2,529-547).
gagacctcggtgcaatgaa

SEQ ID NO: 384135 - DNA, 19 bp, Homo sapiens
  siRNA target sequence for DKFZP434L0117 (NM_022778.2,533-551).
cctcggtgcaatgaaacat

SEQ ID NO: 384136 - DNA, 19 bp, Homo sapiens
  siRNA target sequence for DKFZP434L0117 (NM_022778.2,534-552).
ctcggtgcaatgaaacatt

SEQ ID NO: 384137 - DNA, 19 bp, Homo sapiens
  siRNA target sequence for DKFZP434L0117 (NM_022778.2,536-554).
cggtgcaatgaaacattct

SEQ ID NO: 384138 - DNA, 19 bp, Homo sapiens
  siRNA target sequence for DKFZP434L0117 (NM_022778.2,549-567).
cattctccaggcctatcta

SEQ ID NO: 384139 - DNA, 19 bp, Homo sapiens
  siRNA target sequence for DKFZP434L0117 (NM_022778.2,559-577).
gcctatctagagatctcat

SEQ ID NO: 384140 - DNA, 19 bp, Homo sapiens
  siRNA target sequence for DKFZP434L0117 (NM_022778.2,627-645).
ccagcagtgggccatgaaa

SEQ ID NO: 384141 - DNA, 19 bp, Homo sapiens
  siRNA target sequence for DKFZP434L0117 (NM_022778.2,654-672).
gaggcgaggaagtttgata

SEQ ID NO: 384142 - DNA, 19 bp, Homo sapiens
  siRNA target sequence for DKFZP434L0117 (NM_022778.2,656-674).
ggcgaggaagtttgatatt

SEQ ID NO: 384143 - DNA, 19 bp, Homo sapiens
  siRNA target sequence for DKFZP434L0117 (NM_022778.2,769-787).
gcacaagtaaggagttgta

SEQ ID NO: 384144 - DNA, 19 bp, Homo sapiens
  siRNA target sequence for DKFZP434L0117 (NM_022778.2,839-857).
gcggaatggaccacattct

SEQ ID NO: 384145 - DNA, 19 bp, Homo sapiens
  siRNA target sequence for DKFZP434L0117 (NM_022778.2,840-858).
cggaatggaccacattcta

SEQ ID NO: 384146 - DNA, 19 bp, Homo sapiens
  siRNA target sequence for DKFZP434L0117 (NM_022778.2,842-860).
gaatggaccacattctaat

SEQ ID NO: 384147 - DNA, 19 bp, Homo sapiens
  siRNA target sequence for DKFZP434L0117 (NM_022778.2,959-977).
ccgagagcaatcttgtgaa

SEQ ID NO: 384148 - DNA, 19 bp, Homo sapiens
  siRNA target sequence for DKFZP434L0117 (NM_022778.2,1002-1020).
gaattgattcgtttacaga

SEQ ID NO: 384149 - DNA, 19 bp, Homo sapiens
  siRNA target sequence for DKFZP434L0117 (NM_022778.2,1078-1096).
cttcactgcccatcttaga

SEQ ID NO: 384150 - DNA, 19 bp, Homo sapiens
  siRNA target sequence for DKFZP434L0117 (NM_022778.2,1295-1313).
gcgagaaaacactttctta

SEQ ID NO: 384151 - DNA, 19 bp, Homo sapiens
  siRNA target sequence for DKFZP434L0117 (NM_022778.2,1429-1447).
cgttgcagaagcattctga

SEQ ID NO: 384152 - DNA, 19 bp, Homo sapiens
  siRNA target sequence for DKFZP434L0117 (NM_022778.2,1475-1493).
caaaggtcgtgataaacat

SEQ ID NO: 384153 - DNA, 19 bp, Homo sapiens
  siRNA target sequence for DKFZP434L0117 (NM_022778.2,1479-1497).
ggtcgtgataaacatatca

SEQ ID NO: 384154 - DNA, 19 bp, Homo sapiens
  siRNA target sequence for DKFZP434L0117 (NM_022778.2,1480-1498).
gtcgtgataaacatatcaa

SEQ ID NO: 384155 - DNA, 19 bp, Homo sapiens
  siRNA target sequence for DKFZP434L0117 (NM_022778.2,1616-1634).
gagccagcagcttaaggat

SEQ ID NO: 384156 - DNA, 19 bp, Homo sapiens
  siRNA target sequence for DKFZP434L0117 (NM_022778.2,1773-1791).
ggacatagcctgcaagata

SEQ ID NO: 384157 - DNA, 19 bp, Homo sapiens
  siRNA target sequence for DKFZP434L0117 (NM_022778.2,1774-1792).
gacatagcctgcaagataa

SEQ ID NO: 384158 - DNA, 19 bp, Homo sapiens
  siRNA target sequence for DKFZP434L0117 (NM_022778.2,1844-1862).
ctggcagaagcgatacgat

SEQ ID NO: 384159 - DNA, 19 bp, Homo sapiens
  siRNA target sequence for DKFZP434L0117 (NM_022778.2,1855-1873).
gatacgattcgctccaaaa

SEQ ID NO: 384160 - DNA, 19 bp, Homo sapiens
  siRNA target sequence for DKFZP434L0117 (NM_022778.2,1859-1877).
cgattcgctccaaaagatt

SEQ ID NO: 384161 - DNA, 19 bp, Homo sapiens
  siRNA target sequence for DKFZP434L0117 (NM_022778.2,2183-2201).
gcaggctgtctgtagcatt

SEQ ID NO: 384162 - DNA, 19 bp, Homo sapiens
  siRNA target sequence for DKFZP434L0117 (NM_022778.2,2187-2205).
gctgtctgtagcattgtga

SEQ ID NO: 384163 - DNA, 19 bp, Homo sapiens
  siRNA target sequence for DKFZP434L0117 (NM_022778.2,2272-2290).
cagagactcagctagattt

SEQ ID NO: 384164 - DNA, 19 bp, Homo sapiens
  siRNA target sequence for DKFZP434L0117 (NM_022778.2,2343-2361).
cgtgacattgaggacttaa

SEQ ID NO: 384165 - DNA, 19 bp, Homo sapiens
  siRNA target sequence for DKFZP434L0117 (NM_022778.2,2346-2364).
gacattgaggacttaagga

SEQ ID NO: 384166 - DNA, 19 bp, Homo sapiens
  siRNA target sequence for DKFZP434L0117 (NM_022778.2,2390-2408).
ggacatgggagaaaactgt

SEQ ID NO: 384167 - DNA, 19 bp, Homo sapiens
  siRNA target sequence for FLJ13910 (NM_022780.2,242-260).
ccaagatgctgaattatca

SEQ ID NO: 384168 - DNA, 19 bp, Homo sapiens
  siRNA target sequence for FLJ13910 (NM_022780.2,285-303).
cagtgctgtaaaagaataa

SEQ ID NO: 384169 - DNA, 19 bp, Homo sapiens
  siRNA target sequence for FLJ13910 (NM_022780.2,324-342).
gcctccgaccacaaagaca

SEQ ID NO: 384170 - DNA, 19 bp, Homo sapiens
  siRNA target sequence for FLJ13910 (NM_022780.2,439-457).
gccaaaggcttctcaatga

SEQ ID NO: 384171 - DNA, 19 bp, Homo sapiens
  siRNA target sequence for FLJ13910 (NM_022780.2,555-573).
ccatttgtggagttaaata

SEQ ID NO: 384172 - DNA, 19 bp, Homo sapiens
  siRNA target sequence for FLJ13910 (NM_022780.2,563-581).
ggagttaaatagaatatta

SEQ ID NO: 384173 - DNA, 19 bp, Homo sapiens
  siRNA target sequence for FLJ13910 (NM_022780.2,677-695).
gctacacagactgtatttt

SEQ ID NO: 384174 - DNA, 19 bp, Homo sapiens
  siRNA target sequence for FLJ13910 (NM_022780.2,726-744).
cagcgagaggcattacaat

SEQ ID NO: 384175 - DNA, 19 bp, Homo sapiens
  siRNA target sequence for FLJ13910 (NM_022780.2,728-746).
gcgagaggcattacaatat

SEQ ID NO: 384176 - DNA, 19 bp, Homo sapiens
  siRNA target sequence for FLJ13910 (NM_022780.2,732-750).
gaggcattacaatatgcta

SEQ ID NO: 384177 - DNA, 19 bp, Homo sapiens
  siRNA target sequence for FLJ13910 (NM_022780.2,830-848).
gattgagaactcaccatat

SEQ ID NO: 384178 - DNA, 19 bp, Homo sapiens
  siRNA target sequence for FLJ13910 (NM_022780.2,844-862).
catatgttcacctacttga

SEQ ID NO: 384179 - DNA, 19 bp, Homo sapiens
  siRNA target sequence for FLJ13910 (NM_022780.2,971-989).
ggcgctgccagctttaatt

SEQ ID NO: 384180 - DNA, 19 bp, Homo sapiens
  siRNA target sequence for FLJ13910 (NM_022780.2,972-990).
gcgctgccagctttaatta

SEQ ID NO: 384181 - DNA, 19 bp, Homo sapiens
  siRNA target sequence for FLJ13910 (NM_022780.2,973-991).
cgctgccagctttaattaa

SEQ ID NO: 384182 - DNA, 19 bp, Homo sapiens
  siRNA target sequence for FLJ13910 (NM_022780.2,978-996).
ccagctttaattaacatca

SEQ ID NO: 384183 - DNA, 19 bp, Homo sapiens
  siRNA target sequence for FLJ13910 (NM_022780.2,992-1010).
catcaaagccgtgattgaa

SEQ ID NO: 384184 - DNA, 19 bp, Homo sapiens
  siRNA target sequence for FLJ13910 (NM_022780.2,1079-1097).
gtgctggtatcactctata

SEQ ID NO: 384185 - DNA, 19 bp, Homo sapiens
  siRNA target sequence for FLJ13910 (NM_022780.2,1081-1099).
gctggtatcactctatatt

SEQ ID NO: 384186 - DNA, 19 bp, Homo sapiens
  siRNA target sequence for FLJ13910 (NM_022780.2,1082-1100).
ctggtatcactctatattt

SEQ ID NO: 384187 - DNA, 19 bp, Homo sapiens
  siRNA target sequence for FLJ13910 (NM_022780.2,1116-1134).
cgtcagcaaacaacagata

SEQ ID NO: 384188 - DNA, 19 bp, Homo sapiens
  siRNA target sequence for FLJ13910 (NM_022780.2,1154-1172).
ggtctgtggtcatattata

SEQ ID NO: 384189 - DNA, 19 bp, Homo sapiens
  siRNA target sequence for FLJ13910 (NM_022780.2,1174-1192).
caagagatgccctgaataa

SEQ ID NO: 384190 - DNA, 19 bp, Homo sapiens
  siRNA target sequence for FLJ13910 (NM_022780.2,1177-1195).
gagatgccctgaataaaat

SEQ ID NO: 384191 - DNA, 19 bp, Homo sapiens
  siRNA target sequence for FLJ13910 (NM_022780.2,1196-1214).
gtttaatggtagcaaatta

SEQ ID NO: 384192 - DNA, 19 bp, Homo sapiens
  siRNA target sequence for FLJ13910 (NM_022780.2,1248-1266).
ggagatgccaaacagatat

SEQ ID NO: 384193 - DNA, 19 bp, Homo sapiens
  siRNA target sequence for FLJ13910 (NM_022780.2,1251-1269).
gatgccaaacagatatttt

SEQ ID NO: 384194 - DNA, 19 bp, Homo sapiens
  siRNA target sequence for RNF38 (NM_022781.3,444-462).
cgaccatgggagatgacat

SEQ ID NO: 384195 - DNA, 19 bp, Homo sapiens
  siRNA target sequence for RNF38 (NM_022781.3,582-600).
cgtctgtctcgacataatt

SEQ ID NO: 384196 - DNA, 19 bp, Homo sapiens
  siRNA target sequence for RNF38 (NM_022781.3,585-603).
ctgtctcgacataattcca

SEQ ID NO: 384197 - DNA, 19 bp, Homo sapiens
  siRNA target sequence for RNF38 (NM_022781.3,587-605).
gtctcgacataattccatt

SEQ ID NO: 384198 - DNA, 19 bp, Homo sapiens
  siRNA target sequence for RNF38 (NM_022781.3,607-625).
gtcaagatgaaaactatca

SEQ ID NO: 384199 - DNA, 19 bp, Homo sapiens
  siRNA target sequence for RNF38 (NM_022781.3,671-689).
cttccaccctccgaatgta

SEQ ID NO: 384200 - DNA, 19 bp, Homo sapiens
  siRNA target sequence for RNF38 (NM_022781.3,674-692).
ccaccctccgaatgtatct

SEQ ID NO: 384201 - DNA, 19 bp, Homo sapiens
  siRNA target sequence for RNF38 (NM_022781.3,740-758).
catggttgacatacatgat

SEQ ID NO: 384202 - DNA, 19 bp, Homo sapiens
  siRNA target sequence for RNF38 (NM_022781.3,839-857).
gcacatccctgcttgtagt

SEQ ID NO: 384203 - DNA, 19 bp, Homo sapiens
  siRNA target sequence for RNF38 (NM_022781.3,840-858).
cacatccctgcttgtagta

SEQ ID NO: 384204 - DNA, 19 bp, Homo sapiens
  siRNA target sequence for RNF38 (NM_022781.3,842-860).
catccctgcttgtagtaca

SEQ ID NO: 384205 - DNA, 19 bp, Homo sapiens
  siRNA target sequence for RNF38 (NM_022781.3,953-971).
gcacttaccagtaccatat

SEQ ID NO: 384206 - DNA, 19 bp, Homo sapiens
  siRNA target sequence for RNF38 (NM_022781.3,994-1012).
ctagtgatccatttcttat

SEQ ID NO: 384207 - DNA, 19 bp, Homo sapiens
  siRNA target sequence for RNF38 (NM_022781.3,1096-1114).
gatcgcctctgcaaaggat

SEQ ID NO: 384208 - DNA, 19 bp, Homo sapiens
  siRNA target sequence for RNF38 (NM_022781.3,1127-1145).
ggaactcttaggagaacat

SEQ ID NO: 384209 - DNA, 19 bp, Homo sapiens
  siRNA target sequence for RNF38 (NM_022781.3,1206-1224).
gctcccttgcagttcttaa

SEQ ID NO: 384210 - DNA, 19 bp, Homo sapiens
  siRNA target sequence for RNF38 (NM_022781.3,1250-1268).
gtcctttggagtaccttat

SEQ ID NO: 384211 - DNA, 19 bp, Homo sapiens
  siRNA target sequence for RNF38 (NM_022781.3,1260-1278).
gtaccttatcctccattta

SEQ ID NO: 384212 - DNA, 19 bp, Homo sapiens
  siRNA target sequence for RNF38 (NM_022781.3,1289-1307).
gcttacaggacgtagtaga

SEQ ID NO: 384213 - DNA, 19 bp, Homo sapiens
  siRNA target sequence for RNF38 (NM_022781.3,1290-1308).
cttacaggacgtagtagat

SEQ ID NO: 384214 - DNA, 19 bp, Homo sapiens
  siRNA target sequence for RNF38 (NM_022781.3,1348-1366).
ccagcttactgccatatgt

SEQ ID NO: 384215 - DNA, 19 bp, Homo sapiens
  siRNA target sequence for RNF38 (NM_022781.3,1352-1370).
cttactgccatatgtgtta

SEQ ID NO: 384216 - DNA, 19 bp, Homo sapiens
  siRNA target sequence for RNF38 (NM_022781.3,1356-1374).
ctgccatatgtgttatcaa

SEQ ID NO: 384217 - DNA, 19 bp, Homo sapiens
  siRNA target sequence for RNF38 (NM_022781.3,1392-1410).
gcagtgggcccaactttca

SEQ ID NO: 384218 - DNA, 19 bp, Homo sapiens
  siRNA target sequence for RNF38 (NM_022781.3,1534-1552).
cttatcggttcaatcctaa

SEQ ID NO: 384219 - DNA, 19 bp, Homo sapiens
  siRNA target sequence for RNF38 (NM_022781.3,1562-1580).
gtcagaacagactttgtgt

SEQ ID NO: 384220 - DNA, 19 bp, Homo sapiens
  siRNA target sequence for RNF38 (NM_022781.3,1581-1599).
gtagtatgcatgtgtgatt

SEQ ID NO: 384221 - DNA, 19 bp, Homo sapiens
  siRNA target sequence for RNF38 (NM_022781.3,1604-1622).
gtcaaggcagctacttaga

SEQ ID NO: 384222 - DNA, 19 bp, Homo sapiens
  siRNA target sequence for RNF38 (NM_022781.3,1606-1624).
caaggcagctacttagagt

SEQ ID NO: 384223 - DNA, 19 bp, Homo sapiens
  siRNA target sequence for ARV1 (NM_022786.1,120-138).
cagtacaggtgcatcgaat

SEQ ID NO: 384224 - DNA, 19 bp, Homo sapiens
  siRNA target sequence for ARV1 (NM_022786.1,156-174).
gagttgtaccgagactata

SEQ ID NO: 384225 - DNA, 19 bp, Homo sapiens
  siRNA target sequence for ARV1 (NM_022786.1,176-194).
ccacggtgtgctgaagata

SEQ ID NO: 384226 - DNA, 19 bp, Homo sapiens
  siRNA target sequence for ARV1 (NM_022786.1,177-195).
cacggtgtgctgaagataa

SEQ ID NO: 384227 - DNA, 19 bp, Homo sapiens
  siRNA target sequence for ARV1 (NM_022786.1,181-199).
gtgtgctgaagataaccat

SEQ ID NO: 384228 - DNA, 19 bp, Homo sapiens
  siRNA target sequence for ARV1 (NM_022786.1,220-238).
ctgtagacaaatatatcga

SEQ ID NO: 384229 - DNA, 19 bp, Homo sapiens
  siRNA target sequence for ARV1 (NM_022786.1,237-255).
gagtatgatcctgttatca

SEQ ID NO: 384230 - DNA, 19 bp, Homo sapiens
  siRNA target sequence for ARV1 (NM_022786.1,283-301).
ctcaggcctacagacatat

SEQ ID NO: 384231 - DNA, 19 bp, Homo sapiens
  siRNA target sequence for ARV1 (NM_022786.1,303-321).
cttttcaatactcaaataa

SEQ ID NO: 384232 - DNA, 19 bp, Homo sapiens
  siRNA target sequence for ARV1 (NM_022786.1,379-397).
ggcagcttcaagattccaa

SEQ ID NO: 384233 - DNA, 19 bp, Homo sapiens
  siRNA target sequence for ARV1 (NM_022786.1,432-450).
gctaaggaatgggatttct

SEQ ID NO: 384234 - DNA, 19 bp, Homo sapiens
  siRNA target sequence for ARV1 (NM_022786.1,433-451).
ctaaggaatgggatttcta

SEQ ID NO: 384235 - DNA, 19 bp, Homo sapiens
  siRNA target sequence for ARV1 (NM_022786.1,437-455).
ggaatgggatttctataga

SEQ ID NO: 384236 - DNA, 19 bp, Homo sapiens
  siRNA target sequence for ARV1 (NM_022786.1,438-456).
gaatgggatttctatagaa

SEQ ID NO: 384237 - DNA, 19 bp, Homo sapiens
  siRNA target sequence for ARV1 (NM_022786.1,458-476).
gtttgcgattgctgcttta

SEQ ID NO: 384238 - DNA, 19 bp, Homo sapiens
  siRNA target sequence for ARV1 (NM_022786.1,463-481).
cgattgctgctttagaaca

SEQ ID NO: 384239 - DNA, 19 bp, Homo sapiens
  siRNA target sequence for ARV1 (NM_022786.1,526-544).
ggcccatgacggcaaaaaa

SEQ ID NO: 384240 - DNA, 19 bp, Homo sapiens
  siRNA target sequence for ARV1 (NM_022786.1,527-545).
gcccatgacggcaaaaaaa

SEQ ID NO: 384241 - DNA, 19 bp, Homo sapiens
  siRNA target sequence for ARV1 (NM_022786.1,586-604).
ctagctacggaaaactctt

SEQ ID NO: 384242 - DNA, 19 bp, Homo sapiens
  siRNA target sequence for ARV1 (NM_022786.1,647-665).
gtgcctcaaactcattaaa

SEQ ID NO: 384243 - DNA, 19 bp, Homo sapiens
  siRNA target sequence for ARV1 (NM_022786.1,651-669).
ctcaaactcattaaagtat

SEQ ID NO: 384244 - DNA, 19 bp, Homo sapiens
  siRNA target sequence for ARV1 (NM_022786.1,751-769).
gcttactgctggaaagcat

SEQ ID NO: 384245 - DNA, 19 bp, Homo sapiens
  siRNA target sequence for ARV1 (NM_022786.1,799-817).
gggatgttggaagtgatta

SEQ ID NO: 384246 - DNA, 19 bp, Homo sapiens
  siRNA target sequence for ARV1 (NM_022786.1,800-818).
ggatgttggaagtgattat

SEQ ID NO: 384247 - DNA, 19 bp, Homo sapiens
  siRNA target sequence for FRCP1 (NM_022823.1,589-607).
gtcattggctactccattt

SEQ ID NO: 384248 - DNA, 19 bp, Homo sapiens
  siRNA target sequence for FRCP1 (NM_022823.1,788-806).
ctgaccggctaccttcaaa

SEQ ID NO: 384249 - DNA, 19 bp, Homo sapiens
  siRNA target sequence for FRCP1 (NM_022823.1,790-808).
gaccggctaccttcaaaca

SEQ ID NO: 384250 - DNA, 19 bp, Homo sapiens
  siRNA target sequence for FRCP1 (NM_022823.1,792-810).
ccggctaccttcaaacagt

SEQ ID NO: 384251 - DNA, 19 bp, Homo sapiens
  siRNA target sequence for FRCP1 (NM_022823.1,921-939).
gctgttctgccgtcagtat

SEQ ID NO: 384252 - DNA, 19 bp, Homo sapiens
  siRNA target sequence for FRCP1 (NM_022823.1,952-970).
gacaatgactccaacaaca

SEQ ID NO: 384253 - DNA, 19 bp, Homo sapiens
  siRNA target sequence for PPN (NM_022825.1,11-29).
cctttagccgccaggaatt

SEQ ID NO: 384254 - DNA, 19 bp, Homo sapiens
  siRNA target sequence for PPN (NM_022825.1,12-30).
ctttagccgccaggaattt

SEQ ID NO: 384255 - DNA, 19 bp, Homo sapiens
  siRNA target sequence for PPN (NM_022825.1,283-301).
catcgaggcgtcttcctat

SEQ ID NO: 384256 - DNA, 19 bp, Homo sapiens
  siRNA target sequence for PPN (NM_022825.1,353-371).
ccgtgacatggcacaagat

SEQ ID NO: 384257 - DNA, 19 bp, Homo sapiens
  siRNA target sequence for PPN (NM_022825.1,372-390).
gcgaggggcacagatgatt

SEQ ID NO: 384258 - DNA, 19 bp, Homo sapiens
  siRNA target sequence for PPN (NM_022825.1,374-392).
gaggggcacagatgattgt

SEQ ID NO: 384259 - DNA, 19 bp, Homo sapiens
  siRNA target sequence for PPN (NM_022825.1,452-470).
cctcgccagtggagttcat

SEQ ID NO: 384260 - DNA, 19 bp, Homo sapiens
  siRNA target sequence for PPN (NM_022825.1,703-721).
gccaggggcaccatggtaa

SEQ ID NO: 384261 - DNA, 19 bp, Homo sapiens
  siRNA target sequence for PPN (NM_022825.1,890-908).
ggtcaatggtggaagttgt

SEQ ID NO: 384262 - DNA, 19 bp, Homo sapiens
  siRNA target sequence for PPN (NM_022825.1,917-935).
ggaacctgcccatgtctta

SEQ ID NO: 384263 - DNA, 19 bp, Homo sapiens
  siRNA target sequence for PPN (NM_022825.1,927-945).
catgtcttattggctaaat

SEQ ID NO: 384264 - DNA, 19 bp, Homo sapiens
  siRNA target sequence for PPN (NM_022825.1,932-950).
cttattggctaaataacta

SEQ ID NO: 384265 - DNA, 19 bp, Homo sapiens
  siRNA target sequence for PPN (NM_022825.1,1054-1072).
ctgctgtccctggctttta

SEQ ID NO: 384266 - DNA, 19 bp, Homo sapiens
  siRNA target sequence for PPN (NM_022825.1,1183-1201).
ggggtgcgagccttaaact

SEQ ID NO: 384267 - DNA, 19 bp, Homo sapiens
  siRNA target sequence for PPN (NM_022825.1,1184-1202).
gggtgcgagccttaaactt

SEQ ID NO: 384268 - DNA, 19 bp, Homo sapiens
  siRNA target sequence for PPN (NM_022825.1,1290-1308).
ctacggcatggcatacact

SEQ ID NO: 384269 - DNA, 19 bp, Homo sapiens
  siRNA target sequence for PPN (NM_022825.1,1342-1360).
cactgggtcacttttggat

SEQ ID NO: 384270 - DNA, 19 bp, Homo sapiens
  siRNA target sequence for PPN (NM_022825.1,1365-1383).
gatcttctaccgtctcata

SEQ ID NO: 384271 - DNA, 19 bp, Homo sapiens
  siRNA target sequence for AXOT (NM_022826.1,250-268).
catttagattggattctga

SEQ ID NO: 384272 - DNA, 19 bp, Homo sapiens
  siRNA target sequence for AXOT (NM_022826.1,256-274).
gattggattctgaatatca

SEQ ID NO: 384273 - DNA, 19 bp, Homo sapiens
  siRNA target sequence for AXOT (NM_022826.1,292-310).
catctgcgtcaccatttca

SEQ ID NO: 384274 - DNA, 19 bp, Homo sapiens
  siRNA target sequence for AXOT (NM_022826.1,316-334).
catggtatagtgaatctga

SEQ ID NO: 384275 - DNA, 19 bp, Homo sapiens
  siRNA target sequence for AXOT (NM_022826.1,320-338).
gtatagtgaatctgagata

SEQ ID NO: 384276 - DNA, 19 bp, Homo sapiens
  siRNA target sequence for AXOT (NM_022826.1,342-360).
cagggagcacgctcaagat

SEQ ID NO: 384277 - DNA, 19 bp, Homo sapiens
  siRNA target sequence for AXOT (NM_022826.1,396-414).
cctaaactttcctgtacaa

SEQ ID NO: 384278 - DNA, 19 bp, Homo sapiens
  siRNA target sequence for AXOT (NM_022826.1,397-415).
ctaaactttcctgtacaaa

SEQ ID NO: 384279 - DNA, 19 bp, Homo sapiens
  siRNA target sequence for AXOT (NM_022826.1,441-459).
gttggaaatggtttaaaca

SEQ ID NO: 384280 - DNA, 19 bp, Homo sapiens
  siRNA target sequence for AXOT (NM_022826.1,458-476).
cacattatcagattcatct

SEQ ID NO: 384281 - DNA, 19 bp, Homo sapiens
  siRNA target sequence for AXOT (NM_022826.1,472-490).
catcttggaggcatagtca

SEQ ID NO: 384282 - DNA, 19 bp, Homo sapiens
  siRNA target sequence for AXOT (NM_022826.1,492-510).
gttcctagatcttcatcaa

SEQ ID NO: 384283 - DNA, 19 bp, Homo sapiens
  siRNA target sequence for AXOT (NM_022826.1,508-526).
caatggtacttggatcatt

SEQ ID NO: 384284 - DNA, 19 bp, Homo sapiens
  siRNA target sequence for AXOT (NM_022826.1,512-530).
ggtacttggatcatttgga

SEQ ID NO: 384285 - DNA, 19 bp, Homo sapiens
  siRNA target sequence for AXOT (NM_022826.1,580-598).
ctattagtaatcttatgga

SEQ ID NO: 384286 - DNA, 19 bp, Homo sapiens
  siRNA target sequence for AXOT (NM_022826.1,604-622).
gtcaccgaagtggtgattt

SEQ ID NO: 384287 - DNA, 19 bp, Homo sapiens
  siRNA target sequence for AXOT (NM_022826.1,606-624).
caccgaagtggtgatttca

SEQ ID NO: 384288 - DNA, 19 bp, Homo sapiens
  siRNA target sequence for AXOT (NM_022826.1,608-626).
ccgaagtggtgatttcaca

SEQ ID NO: 384289 - DNA, 19 bp, Homo sapiens
  siRNA target sequence for AXOT (NM_022826.1,609-627).
cgaagtggtgatttcacaa

SEQ ID NO: 384290 - DNA, 19 bp, Homo sapiens
  siRNA target sequence for AXOT (NM_022826.1,618-636).
gatttcacaacttcatcat

SEQ ID NO: 384291 - DNA, 19 bp, Homo sapiens
  siRNA target sequence for AXOT (NM_022826.1,623-641).
cacaacttcatcatatgtt

SEQ ID NO: 384292 - DNA, 19 bp, Homo sapiens
  siRNA target sequence for AXOT (NM_022826.1,645-663).
gacagagttccttcatatt

SEQ ID NO: 384293 - DNA, 19 bp, Homo sapiens
  siRNA target sequence for AXOT (NM_022826.1,647-665).
cagagttccttcatattca

SEQ ID NO: 384294 - DNA, 19 bp, Homo sapiens
  siRNA target sequence for AXOT (NM_022826.1,718-736).
catccacaaaccaccaatt

SEQ ID NO: 384295 - DNA, 19 bp, Homo sapiens
  siRNA target sequence for AXOT (NM_022826.1,744-762).
gaacatcagaccatactaa

SEQ ID NO: 384296 - DNA, 19 bp, Homo sapiens
  siRNA target sequence for AXOT (NM_022826.1,747-765).
catcagaccatactaagtt

SEQ ID NO: 384297 - DNA, 19 bp, Homo sapiens
  siRNA target sequence for AXOT (NM_022826.1,830-848).
caatacgcagcctggattt

SEQ ID NO: 384298 - DNA, 19 bp, Homo sapiens
  siRNA target sequence for AXOT (NM_022826.1,899-917).
ggttgtttcatctcaaaga

SEQ ID NO: 384299 - DNA, 19 bp, Homo sapiens
  siRNA target sequence for AXOT (NM_022826.1,1034-1052).
gaatacaagatcattgaat

SEQ ID NO: 384300 - DNA, 19 bp, Homo sapiens
  siRNA target sequence for AXOT (NM_022826.1,1068-1086).
gtttctccaagaatcttga

SEQ ID NO: 384301 - DNA, 19 bp, Homo sapiens
  siRNA target sequence for AXOT (NM_022826.1,1090-1108).
cttcacagtcccgtagtaa

SEQ ID NO: 384302 - DNA, 19 bp, Homo sapiens
  siRNA target sequence for AXOT (NM_022826.1,1093-1111).
cacagtcccgtagtaatgt

SEQ ID NO: 384303 - DNA, 19 bp, Homo sapiens
  siRNA target sequence for AXOT (NM_022826.1,1158-1176).
cagggatttcgatttctta

SEQ ID NO: 384304 - DNA, 19 bp, Homo sapiens
  siRNA target sequence for AXOT (NM_022826.1,1178-1196).
gcgaagatggggtttgtca

SEQ ID NO: 384305 - DNA, 19 bp, Homo sapiens
  siRNA target sequence for AXOT (NM_022826.1,1195-1213).
catctcttagccacaatca

SEQ ID NO: 384306 - DNA, 19 bp, Homo sapiens
  siRNA target sequence for AXOT (NM_022826.1,1344-1362).
gaatcttcaaggataccta

SEQ ID NO: 384307 - DNA, 19 bp, Homo sapiens
  siRNA target sequence for AXOT (NM_022826.1,1355-1373).
gatacctacctctgataca

SEQ ID NO: 384308 - DNA, 19 bp, Homo sapiens
  siRNA target sequence for AXOT (NM_022826.1,1359-1377).
cctacctctgatacatcat

SEQ ID NO: 384309 - DNA, 19 bp, Homo sapiens
  siRNA target sequence for AXOT (NM_022826.1,1364-1382).
ctctgatacatcatctaga

SEQ ID NO: 384310 - DNA, 19 bp, Homo sapiens
  siRNA target sequence for AXOT (NM_022826.1,1520-1538).
ggctcaaggtggaagaaat

SEQ ID NO: 384311 - DNA, 19 bp, Homo sapiens
  siRNA target sequence for AXOT (NM_022826.1,1590-1608).
ccagcacttgggagtaatt

SEQ ID NO: 384312 - DNA, 19 bp, Homo sapiens
  siRNA target sequence for AXOT (NM_022826.1,1593-1611).
gcacttgggagtaatttga

SEQ ID NO: 384313 - DNA, 19 bp, Homo sapiens
  siRNA target sequence for AXOT (NM_022826.1,1620-1638).
gtcatgatcacagtagata

SEQ ID NO: 384314 - DNA, 19 bp, Homo sapiens
  siRNA target sequence for AXOT (NM_022826.1,1628-1646).
cacagtagatattattcct

SEQ ID NO: 384315 - DNA, 19 bp, Homo sapiens
  siRNA target sequence for AXOT (NM_022826.1,1797-1815).
gctgcatcatcatctaatt

SEQ ID NO: 384316 - DNA, 19 bp, Homo sapiens
  siRNA target sequence for AXOT (NM_022826.1,1857-1875).
gtccaccaagactgtatga

SEQ ID NO: 384317 - DNA, 19 bp, Homo sapiens
  siRNA target sequence for AXOT (NM_022826.1,1880-1898).
gtggttacaggccaaaatt

SEQ ID NO: 384318 - DNA, 19 bp, Homo sapiens
  siRNA target sequence for AXOT (NM_022826.1,1882-1900).
ggttacaggccaaaattaa

SEQ ID NO: 384319 - DNA, 19 bp, Homo sapiens
  siRNA target sequence for AXOT (NM_022826.1,1923-1941).
gtaaccacctgtgaactat

SEQ ID NO: 384320 - DNA, 19 bp, Homo sapiens
  siRNA target sequence for AXOT (NM_022826.1,2043-2061).
ctctacctagtggtgttat

SEQ ID NO: 384321 - DNA, 19 bp, Homo sapiens
  siRNA target sequence for AXOT (NM_022826.1,2066-2084).
cttgtgcgaacaaagcttt

SEQ ID NO: 384322 - DNA, 19 bp, Homo sapiens
  siRNA target sequence for AXOT (NM_022826.1,2069-2087).
gtgcgaacaaagcttttct

SEQ ID NO: 384323 - DNA, 19 bp, Homo sapiens
  siRNA target sequence for AXOT (NM_022826.1,2071-2089).
gcgaacaaagcttttctga

SEQ ID NO: 384324 - DNA, 19 bp, Homo sapiens
  siRNA target sequence for AXOT (NM_022826.1,2072-2090).
cgaacaaagcttttctgat

SEQ ID NO: 384325 - DNA, 19 bp, Homo sapiens
  siRNA target sequence for AXOT (NM_022826.1,2122-2140).
gtgtccgatttattaacct

SEQ ID NO: 384326 - DNA, 19 bp, Homo sapiens
  siRNA target sequence for AXOT (NM_022826.1,2199-2217).
gaagacggagaccataaca

SEQ ID NO: 384327 - DNA, 19 bp, Homo sapiens
  siRNA target sequence for FLJ21940 (NM_022828.2,316-334).
gtgaagatcgcagtcaata

SEQ ID NO: 384328 - DNA, 19 bp, Homo sapiens
  siRNA target sequence for FLJ21940 (NM_022828.2,361-379).
gaccagagagaaatggaat

SEQ ID NO: 384329 - DNA, 19 bp, Homo sapiens
  siRNA target sequence for FLJ21940 (NM_022828.2,476-494).
gatacctaactgtgaagaa

SEQ ID NO: 384330 - DNA, 19 bp, Homo sapiens
  siRNA target sequence for FLJ21940 (NM_022828.2,520-538).
gcaatgatgacctgtaatt

SEQ ID NO: 384331 - DNA, 19 bp, Homo sapiens
  siRNA target sequence for FLJ21940 (NM_022828.2,521-539).
caatgatgacctgtaattt

SEQ ID NO: 384332 - DNA, 19 bp, Homo sapiens
  siRNA target sequence for FLJ21940 (NM_022828.2,530-548).
cctgtaatttgactcataa

SEQ ID NO: 384333 - DNA, 19 bp, Homo sapiens
  siRNA target sequence for FLJ21940 (NM_022828.2,531-549).
ctgtaatttgactcataat

SEQ ID NO: 384334 - DNA, 19 bp, Homo sapiens
  siRNA target sequence for FLJ21940 (NM_022828.2,560-578).
ctgttaggagcctaattca

SEQ ID NO: 384335 - DNA, 19 bp, Homo sapiens
  siRNA target sequence for FLJ21940 (NM_022828.2,562-580).
gttaggagcctaattcaaa

SEQ ID NO: 384336 - DNA, 19 bp, Homo sapiens
  siRNA target sequence for FLJ21940 (NM_022828.2,566-584).
ggagcctaattcaaagatt

SEQ ID NO: 384337 - DNA, 19 bp, Homo sapiens
  siRNA target sequence for FLJ21940 (NM_022828.2,567-585).
gagcctaattcaaagattt

SEQ ID NO: 384338 - DNA, 19 bp, Homo sapiens
  siRNA target sequence for FLJ21940 (NM_022828.2,680-698).
caagtgggcgactcaacaa

SEQ ID NO: 384339 - DNA, 19 bp, Homo sapiens
  siRNA target sequence for FLJ21940 (NM_022828.2,696-714).
caatggcatacctcagatt

SEQ ID NO: 384340 - DNA, 19 bp, Homo sapiens
  siRNA target sequence for FLJ21940 (NM_022828.2,725-743).
gaggagaatccgaatttga

SEQ ID NO: 384341 - DNA, 19 bp, Homo sapiens
  siRNA target sequence for FLJ21940 (NM_022828.2,727-745).
ggagaatccgaatttgatt

SEQ ID NO: 384342 - DNA, 19 bp, Homo sapiens
  siRNA target sequence for FLJ21940 (NM_022828.2,753-771).
gcagtctttaccagtgttt

SEQ ID NO: 384343 - DNA, 19 bp, Homo sapiens
  siRNA target sequence for FLJ21940 (NM_022828.2,863-881).
ctcagttccttttagatga

SEQ ID NO: 384344 - DNA, 19 bp, Homo sapiens
  siRNA target sequence for FLJ21940 (NM_022828.2,895-913).
ggtatcccctgccgtatat

SEQ ID NO: 384345 - DNA, 19 bp, Homo sapiens
  siRNA target sequence for FLJ21940 (NM_022828.2,896-914).
gtatcccctgccgtatatt

SEQ ID NO: 384346 - DNA, 19 bp, Homo sapiens
  siRNA target sequence for FLJ21940 (NM_022828.2,900-918).
cccctgccgtatattttgt

SEQ ID NO: 384347 - DNA, 19 bp, Homo sapiens
  siRNA target sequence for FLJ21940 (NM_022828.2,901-919).
ccctgccgtatattttgta

SEQ ID NO: 384348 - DNA, 19 bp, Homo sapiens
  siRNA target sequence for FLJ21940 (NM_022828.2,903-921).
ctgccgtatattttgtact

SEQ ID NO: 384349 - DNA, 19 bp, Homo sapiens
  siRNA target sequence for FLJ21940 (NM_022828.2,906-924).
ccgtatattttgtactcaa

SEQ ID NO: 384350 - DNA, 19 bp, Homo sapiens
  siRNA target sequence for FLJ21940 (NM_022828.2,945-963).
cgctgtggctgaaagagtt

SEQ ID NO: 384351 - DNA, 19 bp, Homo sapiens
  siRNA target sequence for FLJ21940 (NM_022828.2,968-986).
cagagagacgggaaaggat

SEQ ID NO: 384352 - DNA, 19 bp, Homo sapiens
  siRNA target sequence for FLJ21940 (NM_022828.2,978-996).
ggaaaggattggtcaaaca

SEQ ID NO: 384353 - DNA, 19 bp, Homo sapiens
  siRNA target sequence for FLJ21940 (NM_022828.2,979-997).
gaaaggattggtcaaacaa

SEQ ID NO: 384354 - DNA, 19 bp, Homo sapiens
  siRNA target sequence for FLJ21940 (NM_022828.2,984-1002).
gattggtcaaacaattggt

SEQ ID NO: 384355 - DNA, 19 bp, Homo sapiens
  siRNA target sequence for FLJ21940 (NM_022828.2,989-1007).
gtcaaacaattggttatca

SEQ ID NO: 384356 - DNA, 19 bp, Homo sapiens
  siRNA target sequence for FLJ21940 (NM_022828.2,1001-1019).
gttatcagatccgattaga

SEQ ID NO: 384357 - DNA, 19 bp, Homo sapiens
  siRNA target sequence for FLJ21940 (NM_022828.2,1055-1073).
gtactaatggggtattgct

SEQ ID NO: 384358 - DNA, 19 bp, Homo sapiens
  siRNA target sequence for FLJ21940 (NM_022828.2,1064-1082).
gggtattgcttcgtacatt

SEQ ID NO: 384359 - DNA, 19 bp, Homo sapiens
  siRNA target sequence for FLJ21940 (NM_022828.2,1104-1122).
gtcgactgtgacacatgtt

SEQ ID NO: 384360 - DNA, 19 bp, Homo sapiens
  siRNA target sequence for FLJ21940 (NM_022828.2,1106-1124).
cgactgtgacacatgttat

SEQ ID NO: 384361 - DNA, 19 bp, Homo sapiens
  siRNA target sequence for FLJ21940 (NM_022828.2,1109-1127).
ctgtgacacatgttatcgt

SEQ ID NO: 384362 - DNA, 19 bp, Homo sapiens
  siRNA target sequence for FLJ21940 (NM_022828.2,1147-1165).
gatcgatttagtgattttt

SEQ ID NO: 384363 - DNA, 19 bp, Homo sapiens
  siRNA target sequence for FLJ21940 (NM_022828.2,1198-1216).
cacccaactttgaaactaa

SEQ ID NO: 384364 - DNA, 19 bp, Homo sapiens
  siRNA target sequence for FLJ21940 (NM_022828.2,1209-1227).
gaaactaattctttctagt

SEQ ID NO: 384365 - DNA, 19 bp, Homo sapiens
  siRNA target sequence for FLJ21940 (NM_022828.2,1264-1282).
ggaagttgtccagtgatat

SEQ ID NO: 384366 - DNA, 19 bp, Homo sapiens
  siRNA target sequence for FLJ21940 (NM_022828.2,1265-1283).
gaagttgtccagtgatata

SEQ ID NO: 384367 - DNA, 19 bp, Homo sapiens
  siRNA target sequence for FLJ21940 (NM_022828.2,1271-1289).
gtccagtgatatatataca

SEQ ID NO: 384368 - DNA, 19 bp, Homo sapiens
  siRNA target sequence for FLJ21940 (NM_022828.2,1340-1358).
caactggatatacaaacaa

SEQ ID NO: 384369 - DNA, 19 bp, Homo sapiens
  siRNA target sequence for FLJ21940 (NM_022828.2,1405-1423).
caaaccacacttacagaat

SEQ ID NO: 384370 - DNA, 19 bp, Homo sapiens
  siRNA target sequence for FLJ21940 (NM_022828.2,1409-1427).
ccacacttacagaatggta

SEQ ID NO: 384371 - DNA, 19 bp, Homo sapiens
  siRNA target sequence for FLJ21940 (NM_022828.2,1445-1463).
gtttcaagcctgaatctca

SEQ ID NO: 384372 - DNA, 19 bp, Homo sapiens
  siRNA target sequence for FLJ21940 (NM_022828.2,1563-1581).
ccttgaaccatggttaata

SEQ ID NO: 384373 - DNA, 19 bp, Homo sapiens
  siRNA target sequence for FLJ21940 (NM_022828.2,1564-1582).
cttgaaccatggttaataa

SEQ ID NO: 384374 - DNA, 19 bp, Homo sapiens
  siRNA target sequence for FLJ21940 (NM_022828.2,1591-1609).
gatgcttgcctttctgata

SEQ ID NO: 384375 - DNA, 19 bp, Homo sapiens
  siRNA target sequence for FLJ21940 (NM_022828.2,1594-1612).
gcttgcctttctgatatat

SEQ ID NO: 384376 - DNA, 19 bp, Homo sapiens
  siRNA target sequence for FLJ21940 (NM_022828.2,1726-1744).
gcaggacgtggctttgcaa

SEQ ID NO: 384377 - DNA, 19 bp, Homo sapiens
  siRNA target sequence for FLJ21940 (NM_022828.2,1736-1754).
gctttgcaagtcaagtaga

SEQ ID NO: 384378 - DNA, 19 bp, Homo sapiens
  siRNA target sequence for FLJ21940 (NM_022828.2,1747-1765).
caagtagaacagttaatca

SEQ ID NO: 384379 - DNA, 19 bp, Homo sapiens
  siRNA target sequence for FLJ21940 (NM_022828.2,1771-1789).
ggagccaatgtccatagta

SEQ ID NO: 384380 - DNA, 19 bp, Homo sapiens
  siRNA target sequence for FLJ21940 (NM_022828.2,1772-1790).
gagccaatgtccatagtaa

SEQ ID NO: 384381 - DNA, 19 bp, Homo sapiens
  siRNA target sequence for FLJ21940 (NM_022828.2,1815-1833).
ggattgggctaaacacttt

SEQ ID NO: 384382 - DNA, 19 bp, Homo sapiens
  siRNA target sequence for FLJ21940 (NM_022828.2,1830-1848).
ctttgggcagactgaaatt

SEQ ID NO: 384383 - DNA, 19 bp, Homo sapiens
  siRNA target sequence for FLJ21940 (NM_022828.2,1841-1859).
ctgaaattgtggatcttct

SEQ ID NO: 384384 - DNA, 19 bp, Homo sapiens
  siRNA target sequence for FLJ21940 (NM_022828.2,1852-1870).
gatcttctagaatcttaca

SEQ ID NO: 384385 - DNA, 19 bp, Homo sapiens
  siRNA target sequence for FLJ21940 (NM_022828.2,1949-1967).
gagagctcctgaaagctta

SEQ ID NO: 384386 - DNA, 19 bp, Homo sapiens
  siRNA target sequence for FLJ21940 (NM_022828.2,1956-1974).
cctgaaagcttatcatcat

SEQ ID NO: 384387 - DNA, 19 bp, Homo sapiens
  siRNA target sequence for FLJ21940 (NM_022828.2,1957-1975).
ctgaaagcttatcatcata

SEQ ID NO: 384388 - DNA, 19 bp, Homo sapiens
  siRNA target sequence for FLJ21940 (NM_022828.2,1972-1990).
catagtttcgatgatgaaa

SEQ ID NO: 384389 - DNA, 19 bp, Homo sapiens
  siRNA target sequence for FLJ21940 (NM_022828.2,2044-2062).
gatgctggtgcagtactaa

SEQ ID NO: 384390 - DNA, 19 bp, Homo sapiens
  siRNA target sequence for FLJ21940 (NM_022828.2,2047-2065).
gctggtgcagtactaattt

SEQ ID NO: 384391 - DNA, 19 bp, Homo sapiens
  siRNA target sequence for FLJ21940 (NM_022828.2,2143-2161).
catagataccaagtcttta

SEQ ID NO: 384392 - DNA, 19 bp, Homo sapiens
  siRNA target sequence for FLJ21940 (NM_022828.2,2147-2165).
gataccaagtctttatgct

SEQ ID NO: 384393 - DNA, 19 bp, Homo sapiens
  siRNA target sequence for FLJ21940 (NM_022828.2,2163-2181).
gcttcattcaaatatgcaa

SEQ ID NO: 384394 - DNA, 19 bp, Homo sapiens
  siRNA target sequence for FLJ21940 (NM_022828.2,2179-2197).
caaacatccgatcaaaaga

SEQ ID NO: 384395 - DNA, 19 bp, Homo sapiens
  siRNA target sequence for FLJ21940 (NM_022828.2,2183-2201).
catccgatcaaaagaaagt

SEQ ID NO: 384396 - DNA, 19 bp, Homo sapiens
  siRNA target sequence for FLJ21940 (NM_022828.2,2186-2204).
ccgatcaaaagaaagtatt

SEQ ID NO: 384397 - DNA, 19 bp, Homo sapiens
  siRNA target sequence for FLJ21940 (NM_022828.2,2215-2233).
cctgcaggtgttcgaaaaa

SEQ ID NO: 384398 - DNA, 19 bp, Homo sapiens
  siRNA target sequence for FLJ21940 (NM_022828.2,2216-2234).
ctgcaggtgttcgaaaaat

SEQ ID NO: 384399 - DNA, 19 bp, Homo sapiens
  siRNA target sequence for FLJ21940 (NM_022828.2,2218-2236).
gcaggtgttcgaaaaataa

SEQ ID NO: 384400 - DNA, 19 bp, Homo sapiens
  siRNA target sequence for FLJ21940 (NM_022828.2,2261-2279).
ccagcatcacagtcaatga

SEQ ID NO: 384401 - DNA, 19 bp, Homo sapiens
  siRNA target sequence for FLJ21940 (NM_022828.2,2406-2424).
gcgatgtagacctggaatt

SEQ ID NO: 384402 - DNA, 19 bp, Homo sapiens
  siRNA target sequence for FLJ21940 (NM_022828.2,2407-2425).
cgatgtagacctggaattt

SEQ ID NO: 384403 - DNA, 19 bp, Homo sapiens
  siRNA target sequence for FLJ21940 (NM_022828.2,2444-2462).
gactccgattccagaatat

SEQ ID NO: 384404 - DNA, 19 bp, Homo sapiens
  siRNA target sequence for FLJ21940 (NM_022828.2,2446-2464).
ctccgattccagaatatgt

SEQ ID NO: 384405 - DNA, 19 bp, Homo sapiens
  siRNA target sequence for FLJ21940 (NM_022828.2,2473-2491).
cagactccggaacttttga

SEQ ID NO: 384406 - DNA, 19 bp, Homo sapiens
  siRNA target sequence for FLJ21940 (NM_022828.2,2477-2495).
ctccggaacttttgagaat

SEQ ID NO: 384407 - DNA, 19 bp, Homo sapiens
  siRNA target sequence for FLJ21940 (NM_022828.2,2526-2544).
gctgttagccccagttaat

SEQ ID NO: 384408 - DNA, 19 bp, Homo sapiens
  siRNA target sequence for FLJ21940 (NM_022828.2,2529-2547).
gttagccccagttaattgt

SEQ ID NO: 384409 - DNA, 19 bp, Homo sapiens
  siRNA target sequence for FLJ21940 (NM_022828.2,2608-2626).
gctgtacaaatgcttaaga

SEQ ID NO: 384410 - DNA, 19 bp, Homo sapiens
  siRNA target sequence for FLJ21940 (NM_022828.2,2611-2629).
gtacaaatgcttaagacaa

SEQ ID NO: 384411 - DNA, 19 bp, Homo sapiens
  siRNA target sequence for FLJ21940 (NM_022828.2,2625-2643).
gacaatagatgcaatggat

SEQ ID NO: 384412 - DNA, 19 bp, Homo sapiens
  siRNA target sequence for FLJ21940 (NM_022828.2,2649-2667).
ggaagatctgactgaactt

SEQ ID NO: 384413 - DNA, 19 bp, Homo sapiens
  siRNA target sequence for FLJ21940 (NM_022828.2,2688-2706).
gccagtagaaccacatctt

SEQ ID NO: 384414 - DNA, 19 bp, Homo sapiens
  siRNA target sequence for FLJ21940 (NM_022828.2,2699-2717).
cacatcttggtaaaatggt

SEQ ID NO: 384415 - DNA, 19 bp, Homo sapiens
  siRNA target sequence for FLJ21940 (NM_022828.2,2715-2733).
ggtcttgtgtgctgttgtt

SEQ ID NO: 384416 - DNA, 19 bp, Homo sapiens
  siRNA target sequence for FLJ21940 (NM_022828.2,2748-2766).
ccccatccttacaattgct

SEQ ID NO: 384417 - DNA, 19 bp, Homo sapiens
  siRNA target sequence for FLJ21940 (NM_022828.2,2749-2767).
cccatccttacaattgctt

SEQ ID NO: 384418 - DNA, 19 bp, Homo sapiens
  siRNA target sequence for FLJ21940 (NM_022828.2,2801-2819).
ctactcaggcctctcaaaa

SEQ ID NO: 384419 - DNA, 19 bp, Homo sapiens
  siRNA target sequence for FLJ21940 (NM_022828.2,2821-2839).
cgtgcagctatgctttgta

SEQ ID NO: 384420 - DNA, 19 bp, Homo sapiens
  siRNA target sequence for FLJ21940 (NM_022828.2,2832-2850).
gctttgtaggaaacgtttt

SEQ ID NO: 384421 - DNA, 19 bp, Homo sapiens
  siRNA target sequence for FLJ21940 (NM_022828.2,2998-3016).
cagttgcttggtcaactta

SEQ ID NO: 384422 - DNA, 19 bp, Homo sapiens
  siRNA target sequence for FLJ21940 (NM_022828.2,3000-3018).
gttgcttggtcaacttaga

SEQ ID NO: 384423 - DNA, 19 bp, Homo sapiens
  siRNA target sequence for FLJ21940 (NM_022828.2,3050-3068).
gtgacattcgggacgttaa

SEQ ID NO: 384424 - DNA, 19 bp, Homo sapiens
  siRNA target sequence for FLJ21940 (NM_022828.2,3052-3070).
gacattcgggacgttaaca

SEQ ID NO: 384425 - DNA, 19 bp, Homo sapiens
  siRNA target sequence for FLJ21940 (NM_022828.2,3054-3072).
cattcgggacgttaacaca

SEQ ID NO: 384426 - DNA, 19 bp, Homo sapiens
  siRNA target sequence for FLJ21940 (NM_022828.2,3081-3099).
gaattgggctgtcgttaaa

SEQ ID NO: 384427 - DNA, 19 bp, Homo sapiens
  siRNA target sequence for FLJ21940 (NM_022828.2,3109-3127).
gtggcaggcatgtatccta

SEQ ID NO: 384428 - DNA, 19 bp, Homo sapiens
  siRNA target sequence for FLJ21940 (NM_022828.2,3111-3129).
ggcaggcatgtatcctaat

SEQ ID NO: 384429 - DNA, 19 bp, Homo sapiens
  siRNA target sequence for FLJ21940 (NM_022828.2,3112-3130).
gcaggcatgtatcctaatt

SEQ ID NO: 384430 - DNA, 19 bp, Homo sapiens
  siRNA target sequence for FLJ21940 (NM_022828.2,3177-3195).
gaaaaaagtacgatttcat

SEQ ID NO: 384431 - DNA, 19 bp, Homo sapiens
  siRNA target sequence for FLJ21940 (NM_022828.2,3208-3226).
ctcagtcagcctcaatata

SEQ ID NO: 384432 - DNA, 19 bp, Homo sapiens
  siRNA target sequence for FLJ21940 (NM_022828.2,3210-3228).
cagtcagcctcaatataaa

SEQ ID NO: 384433 - DNA, 19 bp, Homo sapiens
  siRNA target sequence for FLJ21940 (NM_022828.2,3275-3293).
ccacagattggcttattta

SEQ ID NO: 384434 - DNA, 19 bp, Homo sapiens
  siRNA target sequence for FLJ21940 (NM_022828.2,3276-3294).
cacagattggcttatttat

SEQ ID NO: 384435 - DNA, 19 bp, Homo sapiens
  siRNA target sequence for FLJ21940 (NM_022828.2,3284-3302).
ggcttatttatgatgaaat

SEQ ID NO: 384436 - DNA, 19 bp, Homo sapiens
  siRNA target sequence for FLJ21940 (NM_022828.2,3286-3304).
cttatttatgatgaaatga

SEQ ID NO: 384437 - DNA, 19 bp, Homo sapiens
  siRNA target sequence for FLJ21940 (NM_022828.2,3303-3321).
gaccagagcccatagaata

SEQ ID NO: 384438 - DNA, 19 bp, Homo sapiens
  siRNA target sequence for FLJ21940 (NM_022828.2,3306-3324).
cagagcccatagaatagct

SEQ ID NO: 384439 - DNA, 19 bp, Homo sapiens
  siRNA target sequence for FLJ21940 (NM_022828.2,3310-3328).
gcccatagaatagctaata

SEQ ID NO: 384440 - DNA, 19 bp, Homo sapiens
  siRNA target sequence for FLJ21940 (NM_022828.2,3311-3329).
cccatagaatagctaatat

SEQ ID NO: 384441 - DNA, 19 bp, Homo sapiens
  siRNA target sequence for FLJ21940 (NM_022828.2,3322-3340).
gctaatattagatgttgtt

SEQ ID NO: 384442 - DNA, 19 bp, Homo sapiens
  siRNA target sequence for FLJ21940 (NM_022828.2,3344-3362).
cagtgacgcctgtcactat

SEQ ID NO: 384443 - DNA, 19 bp, Homo sapiens
  siRNA target sequence for FLJ21940 (NM_022828.2,3346-3364).
gtgacgcctgtcactatat

SEQ ID NO: 384444 - DNA, 19 bp, Homo sapiens
  siRNA target sequence for FLJ21940 (NM_022828.2,3353-3371).
ctgtcactatattggtatt

SEQ ID NO: 384445 - DNA, 19 bp, Homo sapiens
  siRNA target sequence for FLJ21940 (NM_022828.2,3380-3398).
cagctagattggcaagtaa

SEQ ID NO: 384446 - DNA, 19 bp, Homo sapiens
  siRNA target sequence for FLJ21940 (NM_022828.2,3532-3550).
ccagaggcagctagtttat

SEQ ID NO: 384447 - DNA, 19 bp, Homo sapiens
  siRNA target sequence for FLJ21940 (NM_022828.2,3533-3551).
cagaggcagctagtttatt

SEQ ID NO: 384448 - DNA, 19 bp, Homo sapiens
  siRNA target sequence for FLJ21940 (NM_022828.2,3565-3583).
cagaagtggcatagcttat

SEQ ID NO: 384449 - DNA, 19 bp, Homo sapiens
  siRNA target sequence for FLJ21940 (NM_022828.2,3567-3585).
gaagtggcatagcttattt

SEQ ID NO: 384450 - DNA, 19 bp, Homo sapiens
  siRNA target sequence for FLJ21940 (NM_022828.2,3570-3588).
gtggcatagcttattttta

SEQ ID NO: 384451 - DNA, 19 bp, Homo sapiens
  siRNA target sequence for FLJ21940 (NM_022828.2,3593-3611).
gaatgagagctccatctaa

SEQ ID NO: 384452 - DNA, 19 bp, Homo sapiens
  siRNA target sequence for FLJ21940 (NM_022828.2,3614-3632).
cttggtctcaagttgatga

SEQ ID NO: 384453 - DNA, 19 bp, Homo sapiens
  siRNA target sequence for FLJ21940 (NM_022828.2,3625-3643).
gttgatgaagctaccataa

SEQ ID NO: 384454 - DNA, 19 bp, Homo sapiens
  siRNA target sequence for FLJ21940 (NM_022828.2,3644-3662).
gagcaattatagctgtttt

SEQ ID NO: 384455 - DNA, 19 bp, Homo sapiens
  siRNA target sequence for FLJ21940 (NM_022828.2,3753-3771).
ctcatcttggaggtcaaat

SEQ ID NO: 384456 - DNA, 19 bp, Homo sapiens
  siRNA target sequence for FLJ21940 (NM_022828.2,3780-3798).
gaaaagttcagcagatact

SEQ ID NO: 384457 - DNA, 19 bp, Homo sapiens
  siRNA target sequence for FLJ21940 (NM_022828.2,3813-3831).
gtgtactactgcagaaaga

SEQ ID NO: 384458 - DNA, 19 bp, Homo sapiens
  siRNA target sequence for FLJ21940 (NM_022828.2,3815-3833).
gtactactgcagaaagagt

SEQ ID NO: 384459 - DNA, 19 bp, Homo sapiens
  siRNA target sequence for FLJ21940 (NM_022828.2,3821-3839).
ctgcagaaagagtactgat

SEQ ID NO: 384460 - DNA, 19 bp, Homo sapiens
  siRNA target sequence for FLJ21940 (NM_022828.2,4022-4040).
cttcgccaagaccaaacat

SEQ ID NO: 384461 - DNA, 19 bp, Homo sapiens
  siRNA target sequence for FLJ21940 (NM_022828.2,4034-4052).
caaacatgcctgttcgata

SEQ ID NO: 384462 - DNA, 19 bp, Homo sapiens
  siRNA target sequence for FLJ21940 (NM_022828.2,4293-4311).
ggtggagtggatacgaaaa

SEQ ID NO: 384463 - DNA, 19 bp, Homo sapiens
  siRNA target sequence for FLJ21940 (NM_022828.2,4345-4363).
ctcaatccatggaatgaca

SEQ ID NO: 384464 - DNA, 19 bp, Homo sapiens
  siRNA target sequence for FLJ21940 (NM_022828.2,4417-4435).
gaacagttgctccagttat

SEQ ID NO: 384465 - DNA, 19 bp, Homo sapiens
  siRNA target sequence for FLJ12806 (NM_022831.1,248-266).
gcgatagacgagtatcaga

SEQ ID NO: 384466 - DNA, 19 bp, Homo sapiens
  siRNA target sequence for FLJ12806 (NM_022831.1,249-267).
cgatagacgagtatcagat

SEQ ID NO: 384467 - DNA, 19 bp, Homo sapiens
  siRNA target sequence for FLJ12806 (NM_022831.1,250-268).
gatagacgagtatcagata

SEQ ID NO: 384468 - DNA, 19 bp, Homo sapiens
  siRNA target sequence for FLJ12806 (NM_022831.1,256-274).
cgagtatcagatattagca

SEQ ID NO: 384469 - DNA, 19 bp, Homo sapiens
  siRNA target sequence for FLJ12806 (NM_022831.1,265-283).
gatattagcaagacatcta

SEQ ID NO: 384470 - DNA, 19 bp, Homo sapiens
  siRNA target sequence for FLJ12806 (NM_022831.1,295-313).
ccaagctcaacacaataat

SEQ ID NO: 384471 - DNA, 19 bp, Homo sapiens
  siRNA target sequence for DKFZP434H0820 (NM_022833.1,141-159).
gcatgcgccatgagattga

SEQ ID NO: 384472 - DNA, 19 bp, Homo sapiens
  siRNA target sequence for DKFZP434H0820 (NM_022833.1,282-300).
gcctcgtgccccacaacta

SEQ ID NO: 384473 - DNA, 19 bp, Homo sapiens
  siRNA target sequence for DKFZP434H0820 (NM_022833.1,303-321).
ggctggtgctctacgaaaa

SEQ ID NO: 384474 - DNA, 19 bp, Homo sapiens
  siRNA target sequence for DKFZP434H0820 (NM_022833.1,307-325).
ggtgctctacgaaaacaaa

SEQ ID NO: 384475 - DNA, 19 bp, Homo sapiens
  siRNA target sequence for DKFZP434H0820 (NM_022833.1,348-366).
caccacgagccgtcatcaa

SEQ ID NO: 384476 - DNA, 19 bp, Homo sapiens
  siRNA target sequence for DKFZP434H0820 (NM_022833.1,350-368).
ccacgagccgtcatcaaca

SEQ ID NO: 384477 - DNA, 19 bp, Homo sapiens
  siRNA target sequence for DKFZP434H0820 (NM_022833.1,369-387).
gtgcaggctacaaaatcct

SEQ ID NO: 384478 - DNA, 19 bp, Homo sapiens
  siRNA target sequence for DKFZP434H0820 (NM_022833.1,390-408).
cgtccgtggaccaatacct

SEQ ID NO: 384479 - DNA, 19 bp, Homo sapiens
  siRNA target sequence for DKFZP434H0820 (NM_022833.1,507-525).
cttatgcgcgtcactacta

SEQ ID NO: 384480 - DNA, 19 bp, Homo sapiens
  siRNA target sequence for DKFZP434H0820 (NM_022833.1,512-530).
gcgcgtcactactacttct

SEQ ID NO: 384481 - DNA, 19 bp, Homo sapiens
  siRNA target sequence for DKFZP434H0820 (NM_022833.1,583-601).
catccggcactgcaacaat

SEQ ID NO: 384482 - DNA, 19 bp, Homo sapiens
  siRNA target sequence for DKFZP434H0820 (NM_022833.1,587-605).
cggcactgcaacaatggaa

SEQ ID NO: 384483 - DNA, 19 bp, Homo sapiens
  siRNA target sequence for DKFZP434H0820 (NM_022833.1,588-606).
ggcactgcaacaatggaat

SEQ ID NO: 384484 - DNA, 19 bp, Homo sapiens
  siRNA target sequence for DKFZP434H0820 (NM_022833.1,935-953).
gacatggaccaaattatca

SEQ ID NO: 384485 - DNA, 19 bp, Homo sapiens
  siRNA target sequence for DKFZP434H0820 (NM_022833.1,1200-1218).
cgtaccaccccctgaagat

SEQ ID NO: 384486 - DNA, 19 bp, Homo sapiens
  siRNA target sequence for DKFZP434H0820 (NM_022833.1,1260-1278).
ggctgcagcagcgatttga

SEQ ID NO: 384487 - DNA, 19 bp, Homo sapiens
  siRNA target sequence for DKFZP434H0820 (NM_022833.1,1284-1302).
ccagcacgtccgtgttcaa

SEQ ID NO: 384488 - DNA, 19 bp, Homo sapiens
  siRNA target sequence for WARP (NM_022834.3,703-721).
gggcgtcaccgtgttcatt

SEQ ID NO: 384489 - DNA, 19 bp, Homo sapiens
  siRNA target sequence for WARP (NM_022834.3,705-723).
gcgtcaccgtgttcattgt

SEQ ID NO: 384490 - DNA, 19 bp, Homo sapiens
  siRNA target sequence for WARP (NM_022834.3,933-951).
cagactcgggctactatgt

SEQ ID NO: 384491 - DNA, 19 bp, Homo sapiens
  siRNA target sequence for DCLRE1B (NM_022836.2,236-254).
gcaccgcacgtctcttctt

SEQ ID NO: 384492 - DNA, 19 bp, Homo sapiens
  siRNA target sequence for DCLRE1B (NM_022836.2,349-367).
cgtcacctacaggtatcta

SEQ ID NO: 384493 - DNA, 19 bp, Homo sapiens
  siRNA target sequence for DCLRE1B (NM_022836.2,350-368).
gtcacctacaggtatctaa

SEQ ID NO: 384494 - DNA, 19 bp, Homo sapiens
  siRNA target sequence for DCLRE1B (NM_022836.2,354-372).
cctacaggtatctaagcaa

SEQ ID NO: 384495 - DNA, 19 bp, Homo sapiens
  siRNA target sequence for DCLRE1B (NM_022836.2,391-409).
gttggtgagagccatgtat

SEQ ID NO: 384496 - DNA, 19 bp, Homo sapiens
  siRNA target sequence for DCLRE1B (NM_022836.2,406-424).
gtattacccctagatgaaa

SEQ ID NO: 384497 - DNA, 19 bp, Homo sapiens
  siRNA target sequence for DCLRE1B (NM_022836.2,451-469).
ctcctcgatgccaatcact

SEQ ID NO: 384498 - DNA, 19 bp, Homo sapiens
  siRNA target sequence for DCLRE1B (NM_022836.2,486-504).
gtttctctttgaaggatat

SEQ ID NO: 384499 - DNA, 19 bp, Homo sapiens
  siRNA target sequence for DCLRE1B (NM_022836.2,519-537).
ctacacaggtgattttcga

SEQ ID NO: 384500 - DNA, 19 bp, Homo sapiens
  siRNA target sequence for DCLRE1B (NM_022836.2,577-595).
gggaaacagatccatactt

SEQ ID NO: 384501 - DNA, 19 bp, Homo sapiens
  siRNA target sequence for DCLRE1B (NM_022836.2,579-597).
gaaacagatccatacttta

SEQ ID NO: 384502 - DNA, 19 bp, Homo sapiens
  siRNA target sequence for DCLRE1B (NM_022836.2,679-697).
cgaaaacacccacaacata

SEQ ID NO: 384503 - DNA, 19 bp, Homo sapiens
  siRNA target sequence for DCLRE1B (NM_022836.2,688-706).
ccacaacataacataaaga

SEQ ID NO: 384504 - DNA, 19 bp, Homo sapiens
  siRNA target sequence for DCLRE1B (NM_022836.2,763-781).
cagacctgggtggtattga

SEQ ID NO: 384505 - DNA, 19 bp, Homo sapiens
  siRNA target sequence for DCLRE1B (NM_022836.2,765-783).
gacctgggtggtattgagt

SEQ ID NO: 384506 - DNA, 19 bp, Homo sapiens
  siRNA target sequence for DCLRE1B (NM_022836.2,914-932).
cccaccctacgattgctat

SEQ ID NO: 384507 - DNA, 19 bp, Homo sapiens
  siRNA target sequence for DCLRE1B (NM_022836.2,959-977).
gctcccaccctgatatcca

SEQ ID NO: 384508 - DNA, 19 bp, Homo sapiens
  siRNA target sequence for DCLRE1B (NM_022836.2,1050-1068).
ggtggtgcccattgtaagt

SEQ ID NO: 384509 - DNA, 19 bp, Homo sapiens
  siRNA target sequence for DCLRE1B (NM_022836.2,1130-1148).
cggactctgtacagcaata

SEQ ID NO: 384510 - DNA, 19 bp, Homo sapiens
  siRNA target sequence for DCLRE1B (NM_022836.2,1132-1150).
gactctgtacagcaataca

SEQ ID NO: 384511 - DNA, 19 bp, Homo sapiens
  siRNA target sequence for DCLRE1B (NM_022836.2,1138-1156).
gtacagcaatacatgagtt

SEQ ID NO: 384512 - DNA, 19 bp, Homo sapiens
  siRNA target sequence for DCLRE1B (NM_022836.2,1218-1236).
ccaaggtgttgtgtttgaa

SEQ ID NO: 384513 - DNA, 19 bp, Homo sapiens
  siRNA target sequence for DCLRE1B (NM_022836.2,1219-1237).
caaggtgttgtgtttgaat

SEQ ID NO: 384514 - DNA, 19 bp, Homo sapiens
  siRNA target sequence for DCLRE1B (NM_022836.2,1243-1261).
gaggaaagtgctgatcaat

SEQ ID NO: 384515 - DNA, 19 bp, Homo sapiens
  siRNA target sequence for DCLRE1B (NM_022836.2,1345-1363).
catcctttgcggatcaaga

SEQ ID NO: 384516 - DNA, 19 bp, Homo sapiens
  siRNA target sequence for DCLRE1B (NM_022836.2,1378-1396).
gatctctatagcaaagaat

SEQ ID NO: 384517 - DNA, 19 bp, Homo sapiens
  siRNA target sequence for DCLRE1B (NM_022836.2,1424-1442).
ctcaaaagagggtgactat

SEQ ID NO: 384518 - DNA, 19 bp, Homo sapiens
  siRNA target sequence for DCLRE1B (NM_022836.2,1426-1444).
caaaagagggtgactatgt

SEQ ID NO: 384519 - DNA, 19 bp, Homo sapiens
  siRNA target sequence for DCLRE1B (NM_022836.2,1459-1477).
ggattttcagtgcacttaa

SEQ ID NO: 384520 - DNA, 19 bp, Homo sapiens
  siRNA target sequence for DCLRE1B (NM_022836.2,1511-1529).
ccagggaggaaattggttt

SEQ ID NO: 384521 - DNA, 19 bp, Homo sapiens
  siRNA target sequence for DCLRE1B (NM_022836.2,1641-1659).
ccctcttctagctactgaa

SEQ ID NO: 384522 - DNA, 19 bp, Homo sapiens
  siRNA target sequence for DCLRE1B (NM_022836.2,1642-1660).
cctcttctagctactgaat

SEQ ID NO: 384523 - DNA, 19 bp, Homo sapiens
  siRNA target sequence for DCLRE1B (NM_022836.2,1662-1680).
caggggtctagcactcaaa

SEQ ID NO: 384524 - DNA, 19 bp, Homo sapiens
  siRNA target sequence for DCLRE1B (NM_022836.2,1664-1682).
ggggtctagcactcaaata

SEQ ID NO: 384525 - DNA, 19 bp, Homo sapiens
  siRNA target sequence for DCLRE1B (NM_022836.2,1691-1709).
ctccagtgaactttttcca

SEQ ID NO: 384526 - DNA, 19 bp, Homo sapiens
  siRNA target sequence for FLJ22833 (NM_022837.1,487-505).
gggtcaacgacccacttat

SEQ ID NO: 384527 - DNA, 19 bp, Homo sapiens
  siRNA target sequence for FLJ22833 (NM_022837.1,488-506).
ggtcaacgacccacttatt

SEQ ID NO: 384528 - DNA, 19 bp, Homo sapiens
  siRNA target sequence for FLJ22833 (NM_022837.1,489-507).
gtcaacgacccacttattt

SEQ ID NO: 384529 - DNA, 19 bp, Homo sapiens
  siRNA target sequence for FLJ22833 (NM_022837.1,524-542).
gcccggactgaaaaactta

SEQ ID NO: 384530 - DNA, 19 bp, Homo sapiens
  siRNA target sequence for FLJ22833 (NM_022837.1,525-543).
cccggactgaaaaacttaa

SEQ ID NO: 384531 - DNA, 19 bp, Homo sapiens
  siRNA target sequence for FLJ22833 (NM_022837.1,526-544).
ccggactgaaaaacttaaa

SEQ ID NO: 384532 - DNA, 19 bp, Homo sapiens
  siRNA target sequence for FLJ22833 (NM_022837.1,539-557).
cttaaatgtcgtctttatt

SEQ ID NO: 384533 - DNA, 19 bp, Homo sapiens
  siRNA target sequence for FLJ22833 (NM_022837.1,570-588).
ggacgcgtgaccaaaacca

SEQ ID NO: 384534 - DNA, 19 bp, Homo sapiens
  siRNA target sequence for FLJ22833 (NM_022837.1,571-589).
gacgcgtgaccaaaaccaa

SEQ ID NO: 384535 - DNA, 19 bp, Homo sapiens
  siRNA target sequence for FLJ22833 (NM_022837.1,610-628).
cgtgcaaagtagcagataa

SEQ ID NO: 384536 - DNA, 19 bp, Homo sapiens
  siRNA target sequence for FLJ22833 (NM_022837.1,755-773).
gggtggtgaacttcaaaaa

SEQ ID NO: 384537 - DNA, 19 bp, Homo sapiens
  siRNA target sequence for FLJ22833 (NM_022837.1,802-820).
ccgcaatgcgagattccat

SEQ ID NO: 384538 - DNA, 19 bp, Homo sapiens
  siRNA target sequence for FLJ22833 (NM_022837.1,803-821).
cgcaatgcgagattccata

SEQ ID NO: 384539 - DNA, 19 bp, Homo sapiens
  siRNA target sequence for FLJ22833 (NM_022837.1,824-842).
ctactaccctggtaatgat

SEQ ID NO: 384540 - DNA, 19 bp, Homo sapiens
  siRNA target sequence for FLJ12994 (NM_022841.2,236-254).
ctagtcgggcacaacaaat

SEQ ID NO: 384541 - DNA, 19 bp, Homo sapiens
  siRNA target sequence for FLJ12994 (NM_022841.2,239-257).
gtcgggcacaacaaatgca

SEQ ID NO: 384542 - DNA, 19 bp, Homo sapiens
  siRNA target sequence for FLJ12994 (NM_022841.2,339-357).
gagctattgtgacaatctt

SEQ ID NO: 384543 - DNA, 19 bp, Homo sapiens
  siRNA target sequence for FLJ12994 (NM_022841.2,355-373).
cttggttaccatccattaa

SEQ ID NO: 384544 - DNA, 19 bp, Homo sapiens
  siRNA target sequence for FLJ12994 (NM_022841.2,379-397).
gctgattttggaaagatca

SEQ ID NO: 384545 - DNA, 19 bp, Homo sapiens
  siRNA target sequence for FLJ12994 (NM_022841.2,389-407).
gaaagatcatgaaaaacgt

SEQ ID NO: 384546 - DNA, 19 bp, Homo sapiens
  siRNA target sequence for FLJ12994 (NM_022841.2,435-453).
gggcacaagaggcaaatct

SEQ ID NO: 384547 - DNA, 19 bp, Homo sapiens
  siRNA target sequence for FLJ12994 (NM_022841.2,438-456).
cacaagaggcaaatctaaa

SEQ ID NO: 384548 - DNA, 19 bp, Homo sapiens
  siRNA target sequence for FLJ12994 (NM_022841.2,446-464).
gcaaatctaaatattgcta

SEQ ID NO: 384549 - DNA, 19 bp, Homo sapiens
  siRNA target sequence for FLJ12994 (NM_022841.2,509-527).
ccaaccttgactttcacaa

SEQ ID NO: 384550 - DNA, 19 bp, Homo sapiens
  siRNA target sequence for FLJ12994 (NM_022841.2,560-578).
ctgggcagcttcaaaatat

SEQ ID NO: 384551 - DNA, 19 bp, Homo sapiens
  siRNA target sequence for FLJ12994 (NM_022841.2,621-639).
gtgggcccagaaagtgtta

SEQ ID NO: 384552 - DNA, 19 bp, Homo sapiens
  siRNA target sequence for FLJ12994 (NM_022841.2,708-726).
gtcaatggcagctctaact

SEQ ID NO: 384553 - DNA, 19 bp, Homo sapiens
  siRNA target sequence for FLJ12994 (NM_022841.2,710-728).
caatggcagctctaactgt

SEQ ID NO: 384554 - DNA, 19 bp, Homo sapiens
  siRNA target sequence for FLJ12994 (NM_022841.2,784-802).
cctacagctgaaagtaatt

SEQ ID NO: 384555 - DNA, 19 bp, Homo sapiens
  siRNA target sequence for FLJ12994 (NM_022841.2,830-848).
catctccaattgatgctaa

SEQ ID NO: 384556 - DNA, 19 bp, Homo sapiens
  siRNA target sequence for FLJ12994 (NM_022841.2,833-851).
ctccaattgatgctaaaca

SEQ ID NO: 384557 - DNA, 19 bp, Homo sapiens
  siRNA target sequence for FLJ12994 (NM_022841.2,947-965).
caagcaatggagtgactaa

SEQ ID NO: 384558 - DNA, 19 bp, Homo sapiens
  siRNA target sequence for FLJ12994 (NM_022841.2,950-968).
gcaatggagtgactaatct

SEQ ID NO: 384559 - DNA, 19 bp, Homo sapiens
  siRNA target sequence for FLJ12994 (NM_022841.2,956-974).
gagtgactaatcttcctaa

SEQ ID NO: 384560 - DNA, 19 bp, Homo sapiens
  siRNA target sequence for FLJ12994 (NM_022841.2,960-978).
gactaatcttcctaatgga

SEQ ID NO: 384561 - DNA, 19 bp, Homo sapiens
  siRNA target sequence for FLJ12994 (NM_022841.2,971-989).
ctaatggaaatccttcaat

SEQ ID NO: 384562 - DNA, 19 bp, Homo sapiens
  siRNA target sequence for FLJ12994 (NM_022841.2,1050-1068).
gcggactaggcaattggta

SEQ ID NO: 384563 - DNA, 19 bp, Homo sapiens
  siRNA target sequence for FLJ12994 (NM_022841.2,1051-1069).
cggactaggcaattggtaa

SEQ ID NO: 384564 - DNA, 19 bp, Homo sapiens
  siRNA target sequence for FLJ12994 (NM_022841.2,1075-1093).
ccgagtccaatgagttctt

SEQ ID NO: 384565 - DNA, 19 bp, Homo sapiens
  siRNA target sequence for FLJ12994 (NM_022841.2,1091-1109).
cttctgacggcaaagttct

SEQ ID NO: 384566 - DNA, 19 bp, Homo sapiens
  siRNA target sequence for FLJ12994 (NM_022841.2,1218-1236).
ccgttaccctcagatctta

SEQ ID NO: 384567 - DNA, 19 bp, Homo sapiens
  siRNA target sequence for FLJ12994 (NM_022841.2,1266-1284).
cattcgctctccaactact

SEQ ID NO: 384568 - DNA, 19 bp, Homo sapiens
  siRNA target sequence for FLJ12994 (NM_022841.2,1276-1294).
ccaactactgtcctcttta

SEQ ID NO: 384569 - DNA, 19 bp, Homo sapiens
  siRNA target sequence for FLJ12994 (NM_022841.2,1324-1342).
cccgcttcacacatgagtt

SEQ ID NO: 384570 - DNA, 19 bp, Homo sapiens
  siRNA target sequence for FLJ12994 (NM_022841.2,1375-1393).
ctcacacccagcaacagta

SEQ ID NO: 384571 - DNA, 19 bp, Homo sapiens
  siRNA target sequence for FLJ12994 (NM_022841.2,1389-1407).
cagtaacacccctcttaaa

SEQ ID NO: 384572 - DNA, 19 bp, Homo sapiens
  siRNA target sequence for FLJ12994 (NM_022841.2,1391-1409).
gtaacacccctcttaaaca

SEQ ID NO: 384573 - DNA, 19 bp, Homo sapiens
  siRNA target sequence for FLJ12994 (NM_022841.2,1454-1472).
ggagtgttccacagatcaa

SEQ ID NO: 384574 - DNA, 19 bp, Homo sapiens
  siRNA target sequence for FLJ12994 (NM_022841.2,1728-1746).
ccagaggaccaaatgtaaa

SEQ ID NO: 384575 - DNA, 19 bp, Homo sapiens
  siRNA target sequence for FLJ12994 (NM_022841.2,1742-1760).
gtaaaagtcgctgtaatga

SEQ ID NO: 384576 - DNA, 19 bp, Homo sapiens
  siRNA target sequence for FLJ12994 (NM_022841.2,1748-1766).
gtcgctgtaatgaaatgct

SEQ ID NO: 384577 - DNA, 19 bp, Homo sapiens
  siRNA target sequence for FLJ12994 (NM_022841.2,1775-1793).
cgtcaacaggcaataatca

SEQ ID NO: 384578 - DNA, 19 bp, Homo sapiens
  siRNA target sequence for FLJ12994 (NM_022841.2,1796-1814).
gcactatcactctatcagt

SEQ ID NO: 384579 - DNA, 19 bp, Homo sapiens
  siRNA target sequence for FLJ12994 (NM_022841.2,1797-1815).
cactatcactctatcagtt

SEQ ID NO: 384580 - DNA, 19 bp, Homo sapiens
  siRNA target sequence for FLJ12994 (NM_022841.2,1853-1871).
cacctaatggtgactcaat

SEQ ID NO: 384581 - DNA, 19 bp, Homo sapiens
  siRNA target sequence for FLJ12994 (NM_022841.2,1855-1873).
cctaatggtgactcaatca

SEQ ID NO: 384582 - DNA, 19 bp, Homo sapiens
  siRNA target sequence for FLJ12994 (NM_022841.2,1856-1874).
ctaatggtgactcaatcaa

SEQ ID NO: 384583 - DNA, 19 bp, Homo sapiens
  siRNA target sequence for FLJ12994 (NM_022841.2,1881-1899).
ccctaaattatgcactaaa

SEQ ID NO: 384584 - DNA, 19 bp, Homo sapiens
  siRNA target sequence for FLJ12994 (NM_022841.2,1892-1910).
gcactaaaagcccaagaaa

SEQ ID NO: 384585 - DNA, 19 bp, Homo sapiens
  siRNA target sequence for FLJ12994 (NM_022841.2,1893-1911).
cactaaaagcccaagaaaa

SEQ ID NO: 384586 - DNA, 19 bp, Homo sapiens
  siRNA target sequence for FLJ12994 (NM_022841.2,1974-1992).
gctttcagcagctaccata

SEQ ID NO: 384587 - DNA, 19 bp, Homo sapiens
  siRNA target sequence for FLJ12994 (NM_022841.2,2074-2092).
cagattcctagcaaggtat

SEQ ID NO: 384588 - DNA, 19 bp, Homo sapiens
  siRNA target sequence for FLJ12994 (NM_022841.2,2119-2137).
gcaaatcaacccttgaatt

SEQ ID NO: 384589 - DNA, 19 bp, Homo sapiens
  siRNA target sequence for FLJ12994 (NM_022841.2,2186-2204).
catcatcatctccagatat

SEQ ID NO: 384590 - DNA, 19 bp, Homo sapiens
  siRNA target sequence for FLJ12994 (NM_022841.2,2192-2210).
catctccagatataaaagt

SEQ ID NO: 384591 - DNA, 19 bp, Homo sapiens
  siRNA target sequence for FLJ12994 (NM_022841.2,2233-2251).
ctcttggacagtgattcaa

SEQ ID NO: 384592 - DNA, 19 bp, Homo sapiens
  siRNA target sequence for FLJ12994 (NM_022841.2,2257-2275).
gttggcagctttaatccaa

SEQ ID NO: 384593 - DNA, 19 bp, Homo sapiens
  siRNA target sequence for FLJ12994 (NM_022841.2,2335-2353).
caagatatcagtgttatga

SEQ ID NO: 384594 - DNA, 19 bp, Homo sapiens
  siRNA target sequence for FLJ12994 (NM_022841.2,2338-2356).
gatatcagtgttatgacaa

SEQ ID NO: 384595 - DNA, 19 bp, Homo sapiens
  siRNA target sequence for FLJ12994 (NM_022841.2,2411-2429).
gaatgccacaggacacata

SEQ ID NO: 384596 - DNA, 19 bp, Homo sapiens
  siRNA target sequence for FLJ12994 (NM_022841.2,2448-2466).
ccagatacaggaatcttct

SEQ ID NO: 384597 - DNA, 19 bp, Homo sapiens
  siRNA target sequence for FLJ12994 (NM_022841.2,2449-2467).
cagatacaggaatcttctt

SEQ ID NO: 384598 - DNA, 19 bp, Homo sapiens
  siRNA target sequence for FLJ12994 (NM_022841.2,2483-2501).
cacattcttcagatcagtt

SEQ ID NO: 384599 - DNA, 19 bp, Homo sapiens
  siRNA target sequence for FLJ12994 (NM_022841.2,2543-2561).
cccagacaaatgaaagcta

SEQ ID NO: 384600 - DNA, 19 bp, Homo sapiens
  siRNA target sequence for FLJ12994 (NM_022841.2,2578-2596).
gaacttacacaagatagta

SEQ ID NO: 384601 - DNA, 19 bp, Homo sapiens
  siRNA target sequence for FLJ12994 (NM_022841.2,2631-2649).
gtcaatgaacaattctcat

SEQ ID NO: 384602 - DNA, 19 bp, Homo sapiens
  siRNA target sequence for FLJ12994 (NM_022841.2,2647-2665).
cattcttacggcaactgtt

SEQ ID NO: 384603 - DNA, 19 bp, Homo sapiens
  siRNA target sequence for FLJ12994 (NM_022841.2,2727-2745).
cagcacccacttctatcat

SEQ ID NO: 384604 - DNA, 19 bp, Homo sapiens
  siRNA target sequence for FLJ12994 (NM_022841.2,2732-2750).
cccacttctatcatccaat

SEQ ID NO: 384605 - DNA, 19 bp, Homo sapiens
  siRNA target sequence for FLJ12994 (NM_022841.2,2821-2839).
ccaaccccgacatctgaaa

SEQ ID NO: 384606 - DNA, 19 bp, Homo sapiens
  siRNA target sequence for FLJ12994 (NM_022841.2,2822-2840).
caaccccgacatctgaaat

SEQ ID NO: 384607 - DNA, 19 bp, Homo sapiens
  siRNA target sequence for FLJ12994 (NM_022841.2,2825-2843).
ccccgacatctgaaatgat

SEQ ID NO: 384608 - DNA, 19 bp, Homo sapiens
  siRNA target sequence for FLJ12994 (NM_022841.2,2905-2923).
gtggatagtgctttaggaa

SEQ ID NO: 384609 - DNA, 19 bp, Homo sapiens
  siRNA target sequence for FLJ12994 (NM_022841.2,2929-2947).
cgacatacacccattggta

SEQ ID NO: 384610 - DNA, 19 bp, Homo sapiens
  siRNA target sequence for FLJ12994 (NM_022841.2,2944-2962).
ggtactccacattctaact

SEQ ID NO: 384611 - DNA, 19 bp, Homo sapiens
  siRNA target sequence for FLJ12994 (NM_022841.2,3000-3018).
gaatccgtttgcattcact

SEQ ID NO: 384612 - DNA, 19 bp, Homo sapiens
  siRNA target sequence for FLJ12994 (NM_022841.2,3006-3024).
gtttgcattcactccaata

SEQ ID NO: 384613 - DNA, 19 bp, Homo sapiens
  siRNA target sequence for FLJ12994 (NM_022841.2,3010-3028).
gcattcactccaataagct

SEQ ID NO: 384614 - DNA, 19 bp, Homo sapiens
  siRNA target sequence for FLJ12994 (NM_022841.2,3027-3045).
ctccagtatggcatatcat

SEQ ID NO: 384615 - DNA, 19 bp, Homo sapiens
  siRNA target sequence for FLJ12994 (NM_022841.2,3029-3047).
ccagtatggcatatcatga

SEQ ID NO: 384616 - DNA, 19 bp, Homo sapiens
  siRNA target sequence for FLJ12994 (NM_022841.2,3049-3067).
gccagcattgtctcaagta

SEQ ID NO: 384617 - DNA, 19 bp, Homo sapiens
  siRNA target sequence for FLJ12994 (NM_022841.2,3051-3069).
cagcattgtctcaagtagt

SEQ ID NO: 384618 - DNA, 19 bp, Homo sapiens
  siRNA target sequence for FLJ12994 (NM_022841.2,3060-3078).
ctcaagtagtcctgtgaaa

SEQ ID NO: 384619 - DNA, 19 bp, Homo sapiens
  siRNA target sequence for FLJ12994 (NM_022841.2,3140-3158).
ggtatagtggggttggtaa

SEQ ID NO: 384620 - DNA, 19 bp, Homo sapiens
  siRNA target sequence for FLJ12994 (NM_022841.2,3150-3168).
ggttggtaattcatcagtt

SEQ ID NO: 384621 - DNA, 19 bp, Homo sapiens
  siRNA target sequence for FLJ12994 (NM_022841.2,3188-3206).
caagctatcaggaactagt

SEQ ID NO: 384622 - DNA, 19 bp, Homo sapiens
  siRNA target sequence for FLJ12994 (NM_022841.2,3244-3262).
cctggacagtcttatcagt

SEQ ID NO: 384623 - DNA, 19 bp, Homo sapiens
  siRNA target sequence for FLJ12994 (NM_022841.2,3263-3281).
ctcaatccagacatcatga

SEQ ID NO: 384624 - DNA, 19 bp, Homo sapiens
  siRNA target sequence for FLJ12994 (NM_022841.2,3351-3369).
caaacaggagggttttgca

SEQ ID NO: 384625 - DNA, 19 bp, Homo sapiens
  siRNA target sequence for FLJ12994 (NM_022841.2,3370-3388).
gtccctgcccctcttgata

SEQ ID NO: 384626 - DNA, 19 bp, Homo sapiens
  siRNA target sequence for FLJ12994 (NM_022841.2,3373-3391).
cctgcccctcttgataata

SEQ ID NO: 384627 - DNA, 19 bp, Homo sapiens
  siRNA target sequence for FLJ12994 (NM_022841.2,3374-3392).
ctgcccctcttgataataa

SEQ ID NO: 384628 - DNA, 19 bp, Homo sapiens
  siRNA target sequence for FLJ12994 (NM_022841.2,3446-3464).
ctgttcatcgccaacgtaa

SEQ ID NO: 384629 - DNA, 19 bp, Homo sapiens
  siRNA target sequence for FLJ12994 (NM_022841.2,3451-3469).
catcgccaacgtaatctta

SEQ ID NO: 384630 - DNA, 19 bp, Homo sapiens
  siRNA target sequence for FLJ12994 (NM_022841.2,3479-3497).
ccctctatccagtatctaa

SEQ ID NO: 384631 - DNA, 19 bp, Homo sapiens
  siRNA target sequence for FLJ12994 (NM_022841.2,3480-3498).
cctctatccagtatctaat

SEQ ID NO: 384632 - DNA, 19 bp, Homo sapiens
  siRNA target sequence for FLJ12994 (NM_022841.2,3576-3594).
cgcatgtgccaacaacata

SEQ ID NO: 384633 - DNA, 19 bp, Homo sapiens
  siRNA target sequence for FLJ12994 (NM_022841.2,3753-3771).
cctgccctctaattataca

SEQ ID NO: 384634 - DNA, 19 bp, Homo sapiens
  siRNA target sequence for FLJ12994 (NM_022841.2,3818-3836).
ctagtgccaacccacaaaa

SEQ ID NO: 384635 - DNA, 19 bp, Homo sapiens
  siRNA target sequence for FLJ12994 (NM_022841.2,3829-3847).
ccacaaaatatgatcgatt

SEQ ID NO: 384636 - DNA, 19 bp, Homo sapiens
  siRNA target sequence for FLJ12994 (NM_022841.2,3843-3861).
cgattccagcacttctgtt

SEQ ID NO: 384637 - DNA, 19 bp, Homo sapiens
  siRNA target sequence for FLJ12994 (NM_022841.2,3881-3899).
cttacctcaccaaaagtaa

SEQ ID NO: 384638 - DNA, 19 bp, Homo sapiens
  siRNA target sequence for FLJ12994 (NM_022841.2,3902-3920).
gcaccggtcagatcaattt

SEQ ID NO: 384639 - DNA, 19 bp, Homo sapiens
  siRNA target sequence for FLJ12994 (NM_022841.2,3906-3924).
cggtcagatcaatttttct

SEQ ID NO: 384640 - DNA, 19 bp, Homo sapiens
  siRNA target sequence for FLJ12994 (NM_022841.2,3955-3973).
ggagagcaacaattagatt

SEQ ID NO: 384641 - DNA, 19 bp, Homo sapiens
  siRNA target sequence for FLJ12994 (NM_022841.2,3964-3982).
caattagatttcaatagca

SEQ ID NO: 384642 - DNA, 19 bp, Homo sapiens
  siRNA target sequence for CDCP1 (NM_022842.3,289-307).
ctggcaaaaccctgttaca

SEQ ID NO: 384643 - DNA, 19 bp, Homo sapiens
  siRNA target sequence for CDCP1 (NM_022842.3,298-316).
ccctgttacatcgtcattt

SEQ ID NO: 384644 - DNA, 19 bp, Homo sapiens
  siRNA target sequence for CDCP1 (NM_022842.3,300-318).
ctgttacatcgtcatttct

SEQ ID NO: 384645 - DNA, 19 bp, Homo sapiens
  siRNA target sequence for CDCP1 (NM_022842.3,310-328).
gtcatttctaaaagacata

SEQ ID NO: 384646 - DNA, 19 bp, Homo sapiens
  siRNA target sequence for CDCP1 (NM_022842.3,355-373).
gaaagaatagtctttacct

SEQ ID NO: 384647 - DNA, 19 bp, Homo sapiens
  siRNA target sequence for CDCP1 (NM_022842.3,388-406).
cctgagaatcactttgtca

SEQ ID NO: 384648 - DNA, 19 bp, Homo sapiens
  siRNA target sequence for CDCP1 (NM_022842.3,389-407).
ctgagaatcactttgtcat

SEQ ID NO: 384649 - DNA, 19 bp, Homo sapiens
  siRNA target sequence for CDCP1 (NM_022842.3,680-698).
ctgtgtcccggatcaagat

SEQ ID NO: 384650 - DNA, 19 bp, Homo sapiens
  siRNA target sequence for CDCP1 (NM_022842.3,769-787).
gcaaaccgctcatctataa

SEQ ID NO: 384651 - DNA, 19 bp, Homo sapiens
  siRNA target sequence for CDCP1 (NM_022842.3,774-792).
ccgctcatctataaaacgt

SEQ ID NO: 384652 - DNA, 19 bp, Homo sapiens
  siRNA target sequence for CDCP1 (NM_022842.3,923-941).
gcgtctccttcctcaactt

SEQ ID NO: 384653 - DNA, 19 bp, Homo sapiens
  siRNA target sequence for CDCP1 (NM_022842.3,970-988).
gagcgggttgaatactaca

SEQ ID NO: 384654 - DNA, 19 bp, Homo sapiens
  siRNA target sequence for CDCP1 (NM_022842.3,1114-1132).
cggctgcagttccaagttt

SEQ ID NO: 384655 - DNA, 19 bp, Homo sapiens
  siRNA target sequence for CDCP1 (NM_022842.3,1115-1133).
ggctgcagttccaagtttt

SEQ ID NO: 384656 - DNA, 19 bp, Homo sapiens
  siRNA target sequence for CDCP1 (NM_022842.3,1134-1152).
ggtccaacatccacaaaat

SEQ ID NO: 384657 - DNA, 19 bp, Homo sapiens
  siRNA target sequence for CDCP1 (NM_022842.3,1170-1188).
cgtggttgacttgagtaat

SEQ ID NO: 384658 - DNA, 19 bp, Homo sapiens
  siRNA target sequence for CDCP1 (NM_022842.3,1309-1327).
ggctccaaacacaaaatct

SEQ ID NO: 384659 - DNA, 19 bp, Homo sapiens
  siRNA target sequence for CDCP1 (NM_022842.3,1328-1346).
ccttcctttgtgatgatct

SEQ ID NO: 384660 - DNA, 19 bp, Homo sapiens
  siRNA target sequence for CDCP1 (NM_022842.3,1349-1367).
cacgtctgtggatgaatgt

SEQ ID NO: 384661 - DNA, 19 bp, Homo sapiens
  siRNA target sequence for CDCP1 (NM_022842.3,1366-1384).
gtggaaaaaaccataagct

SEQ ID NO: 384662 - DNA, 19 bp, Homo sapiens
  siRNA target sequence for CDCP1 (NM_022842.3,1396-1414).
cggtactgccaaaggaaat

SEQ ID NO: 384663 - DNA, 19 bp, Homo sapiens
  siRNA target sequence for CDCP1 (NM_022842.3,1729-1747).
ggtctgacggtgtccttta

SEQ ID NO: 384664 - DNA, 19 bp, Homo sapiens
  siRNA target sequence for CDCP1 (NM_022842.3,1730-1748).
gtctgacggtgtcctttat

SEQ ID NO: 384665 - DNA, 19 bp, Homo sapiens
  siRNA target sequence for CDCP1 (NM_022842.3,1736-1754).
cggtgtcctttatacctta

SEQ ID NO: 384666 - DNA, 19 bp, Homo sapiens
  siRNA target sequence for CDCP1 (NM_022842.3,1737-1755).
ggtgtcctttataccttat

SEQ ID NO: 384667 - DNA, 19 bp, Homo sapiens
  siRNA target sequence for CDCP1 (NM_022842.3,1738-1756).
gtgtcctttataccttatt

SEQ ID NO: 384668 - DNA, 19 bp, Homo sapiens
  siRNA target sequence for CDCP1 (NM_022842.3,1779-1797).
ggtgacccctgacacaaaa

SEQ ID NO: 384669 - DNA, 19 bp, Homo sapiens
  siRNA target sequence for CDCP1 (NM_022842.3,2095-2113).
ctcttctcggtgacactta

SEQ ID NO: 384670 - DNA, 19 bp, Homo sapiens
  siRNA target sequence for CDCP1 (NM_022842.3,2154-2172).
ggtgggaggtggagtctta

SEQ ID NO: 384671 - DNA, 19 bp, Homo sapiens
  siRNA target sequence for CDCP1 (NM_022842.3,2185-2203).
ctcgggctcatcatttgct

SEQ ID NO: 384672 - DNA, 19 bp, Homo sapiens
  siRNA target sequence for CDCP1 (NM_022842.3,2240-2258).
ccgctgtgggtatctacaa

SEQ ID NO: 384673 - DNA, 19 bp, Homo sapiens
  siRNA target sequence for CDCP1 (NM_022842.3,2241-2259).
cgctgtgggtatctacaat

SEQ ID NO: 384674 - DNA, 19 bp, Homo sapiens
  siRNA target sequence for CDCP1 (NM_022842.3,2249-2267).
gtatctacaatgacaacat

SEQ ID NO: 384675 - DNA, 19 bp, Homo sapiens
  siRNA target sequence for CDCP1 (NM_022842.3,2281-2299).
ccgaggcagccaaaaaagt

SEQ ID NO: 384676 - DNA, 19 bp, Homo sapiens
  siRNA target sequence for CDCP1 (NM_022842.3,2282-2300).
cgaggcagccaaaaaagtt

SEQ ID NO: 384677 - DNA, 19 bp, Homo sapiens
  siRNA target sequence for CDCP1 (NM_022842.3,2308-2326).
gggcgaaaggacaatgact

SEQ ID NO: 384678 - DNA, 19 bp, Homo sapiens
  siRNA target sequence for CDCP1 (NM_022842.3,2319-2337).
caatgactcccatgtgtat

SEQ ID NO: 384679 - DNA, 19 bp, Homo sapiens
  siRNA target sequence for CDCP1 (NM_022842.3,2346-2364).
cgaggacaccatggtatat

SEQ ID NO: 384680 - DNA, 19 bp, Homo sapiens
  siRNA target sequence for CDCP1 (NM_022842.3,2566-2584).
cccaacaatggggatgtaa

SEQ ID NO: 384681 - DNA, 19 bp, Homo sapiens
  siRNA target sequence for CDCP1 (NM_022842.3,2597-2615).
cagacattcccttactgaa

SEQ ID NO: 384682 - DNA, 19 bp, Homo sapiens
  siRNA target sequence for BCL11A (NM_022893.2,2611-2629).
gtggggaaggacgtttaca

SEQ ID NO: 384683 - DNA, 19 bp, Homo sapiens
  siRNA target sequence for BCL11A (NM_022893.2,2620-2638).
gacgtttacaaatgtgaaa

SEQ ID NO: 384684 - DNA, 19 bp, Homo sapiens
  siRNA target sequence for BCL11A (NM_022893.2,2622-2640).
cgtttacaaatgtgaaatt

SEQ ID NO: 384685 - DNA, 19 bp, Homo sapiens
  siRNA target sequence for BCL11A (NM_022893.2,2650-2668).
ccttttagcgtgtacagta

SEQ ID NO: 384686 - DNA, 19 bp, Homo sapiens
  siRNA target sequence for BCL11A (NM_022893.2,2697-2715).
cagtgatcgagtgttgaat

SEQ ID NO: 384687 - DNA, 19 bp, Homo sapiens
  siRNA target sequence for BCL11A (NM_022893.2,2699-2717).
gtgatcgagtgttgaataa

SEQ ID NO: 384688 - DNA, 19 bp, Homo sapiens
  siRNA target sequence for BCL11A (NM_022893.2,2704-2722).
cgagtgttgaataatgata

SEQ ID NO: 384689 - DNA, 19 bp, Homo sapiens
  siRNA target sequence for BCL11A (NM_022893.2,2705-2723).
gagtgttgaataatgatat

SEQ ID NO: 384690 - DNA, 19 bp, Homo sapiens
  siRNA target sequence for FLJ12448 (NM_022895.1,45-63).
gtgagcgattcggaaagta

SEQ ID NO: 384691 - DNA, 19 bp, Homo sapiens
  siRNA target sequence for FLJ12448 (NM_022895.1,49-67).
gcgattcggaaagtagtaa

SEQ ID NO: 384692 - DNA, 19 bp, Homo sapiens
  siRNA target sequence for FLJ12448 (NM_022895.1,51-69).
gattcggaaagtagtaaca

SEQ ID NO: 384693 - DNA, 19 bp, Homo sapiens
  siRNA target sequence for FLJ12448 (NM_022895.1,218-236).
ggtgaatgagcatgaacaa

SEQ ID NO: 384694 - DNA, 19 bp, Homo sapiens
  siRNA target sequence for FLJ12448 (NM_022895.1,341-359).
gccagcaaaagctaaggta

SEQ ID NO: 384695 - DNA, 19 bp, Homo sapiens
  siRNA target sequence for FLJ12448 (NM_022895.1,714-732).
gtgtcgcttgggaccaaaa

SEQ ID NO: 384696 - DNA, 19 bp, Homo sapiens
  siRNA target sequence for FLJ12448 (NM_022895.1,718-736).
cgcttgggaccaaaaagaa

SEQ ID NO: 384697 - DNA, 19 bp, Homo sapiens
  siRNA target sequence for FLJ12448 (NM_022895.1,785-803).
gagtgctacagctatacct

SEQ ID NO: 384698 - DNA, 19 bp, Homo sapiens
  siRNA target sequence for BCL11B (NM_022898.1,440-458).
gtggccagtgtcaaatgaa

SEQ ID NO: 384699 - DNA, 19 bp, Homo sapiens
  siRNA target sequence for BCL11B (NM_022898.1,442-460).
ggccagtgtcaaatgaact

SEQ ID NO: 384700 - DNA, 19 bp, Homo sapiens
  siRNA target sequence for BCL11B (NM_022898.1,443-461).
gccagtgtcaaatgaactt

SEQ ID NO: 384701 - DNA, 19 bp, Homo sapiens
  siRNA target sequence for BCL11B (NM_022898.1,469-487).
ggggacatcctggttttta

SEQ ID NO: 384702 - DNA, 19 bp, Homo sapiens
  siRNA target sequence for BCL11B (NM_022898.1,481-499).
gtttttatagagcacaaaa

SEQ ID NO: 384703 - DNA, 19 bp, Homo sapiens
  siRNA target sequence for BCL11B (NM_022898.1,879-897).
gcagtccccgctcatgaat

SEQ ID NO: 384704 - DNA, 19 bp, Homo sapiens
  siRNA target sequence for BCL11B (NM_022898.1,880-898).
cagtccccgctcatgaatt

SEQ ID NO: 384705 - DNA, 19 bp, Homo sapiens
  siRNA target sequence for BCL11B (NM_022898.1,2203-2221).
gcgtcgcggcacttcatga

SEQ ID NO: 384706 - DNA, 19 bp, Homo sapiens
  siRNA target sequence for BCL11B (NM_022898.1,2204-2222).
cgtcgcggcacttcatgaa

SEQ ID NO: 384707 - DNA, 19 bp, Homo sapiens
  siRNA target sequence for BCL11B (NM_022898.1,2687-2705).
gcgagcacttgctgactaa

SEQ ID NO: 384708 - DNA, 19 bp, Homo sapiens
  siRNA target sequence for BCL11B (NM_022898.1,2698-2716).
ctgactaacgacgtcaaaa

SEQ ID NO: 384709 - DNA, 19 bp, Homo sapiens
  siRNA target sequence for BCL11B (NM_022898.1,2702-2720).
ctaacgacgtcaaaatcga

SEQ ID NO: 384710 - DNA, 19 bp, Homo sapiens
  siRNA target sequence for LRRC19 (NM_022901.1,122-140).
ggcccctctccatgatatt

SEQ ID NO: 384711 - DNA, 19 bp, Homo sapiens
  siRNA target sequence for LRRC19 (NM_022901.1,123-141).
gcccctctccatgatatta

SEQ ID NO: 384712 - DNA, 19 bp, Homo sapiens
  siRNA target sequence for LRRC19 (NM_022901.1,124-142).
cccctctccatgatattat

SEQ ID NO: 384713 - DNA, 19 bp, Homo sapiens
  siRNA target sequence for LRRC19 (NM_022901.1,125-143).
ccctctccatgatattatt

SEQ ID NO: 384714 - DNA, 19 bp, Homo sapiens
  siRNA target sequence for LRRC19 (NM_022901.1,126-144).
cctctccatgatattatta

SEQ ID NO: 384715 - DNA, 19 bp, Homo sapiens
  siRNA target sequence for LRRC19 (NM_022901.1,129-147).
ctccatgatattattatca

SEQ ID NO: 384716 - DNA, 19 bp, Homo sapiens
  siRNA target sequence for LRRC19 (NM_022901.1,170-188).
gagaagtccaatgtaattt

SEQ ID NO: 384717 - DNA, 19 bp, Homo sapiens
  siRNA target sequence for LRRC19 (NM_022901.1,172-190).
gaagtccaatgtaatttta

SEQ ID NO: 384718 - DNA, 19 bp, Homo sapiens
  siRNA target sequence for LRRC19 (NM_022901.1,206-224).
ccttgattccagcagatat

SEQ ID NO: 384719 - DNA, 19 bp, Homo sapiens
  siRNA target sequence for LRRC19 (NM_022901.1,228-246).
gaaagatgttactatactt

SEQ ID NO: 384720 - DNA, 19 bp, Homo sapiens
  siRNA target sequence for LRRC19 (NM_022901.1,252-270).
cagttataaccaaattact

SEQ ID NO: 384721 - DNA, 19 bp, Homo sapiens
  siRNA target sequence for LRRC19 (NM_022901.1,254-272).
gttataaccaaattactct

SEQ ID NO: 384722 - DNA, 19 bp, Homo sapiens
  siRNA target sequence for LRRC19 (NM_022901.1,261-279).
ccaaattactcttaatggt

SEQ ID NO: 384723 - DNA, 19 bp, Homo sapiens
  siRNA target sequence for LRRC19 (NM_022901.1,290-308).
gagttctacagacatactt

SEQ ID NO: 384724 - DNA, 19 bp, Homo sapiens
  siRNA target sequence for LRRC19 (NM_022901.1,298-316).
cagacatactttttactca

SEQ ID NO: 384725 - DNA, 19 bp, Homo sapiens
  siRNA target sequence for LRRC19 (NM_022901.1,315-333).
cacagagctctatttgatt

SEQ ID NO: 384726 - DNA, 19 bp, Homo sapiens
  siRNA target sequence for LRRC19 (NM_022901.1,317-335).
cagagctctatttgattga

SEQ ID NO: 384727 - DNA, 19 bp, Homo sapiens
  siRNA target sequence for LRRC19 (NM_022901.1,339-357).
caaggttactatcttacat

SEQ ID NO: 384728 - DNA, 19 bp, Homo sapiens
  siRNA target sequence for LRRC19 (NM_022901.1,342-360).
ggttactatcttacataat

SEQ ID NO: 384729 - DNA, 19 bp, Homo sapiens
  siRNA target sequence for LRRC19 (NM_022901.1,355-373).
cataataacggttttggta

SEQ ID NO: 384730 - DNA, 19 bp, Homo sapiens
  siRNA target sequence for LRRC19 (NM_022901.1,376-394).
ctctccagtctagaaattt

SEQ ID NO: 384731 - DNA, 19 bp, Homo sapiens
  siRNA target sequence for LRRC19 (NM_022901.1,402-420).
ctgtagaaactccatctat

SEQ ID NO: 384732 - DNA, 19 bp, Homo sapiens
  siRNA target sequence for LRRC19 (NM_022901.1,404-422).
gtagaaactccatctatgt

SEQ ID NO: 384733 - DNA, 19 bp, Homo sapiens
  siRNA target sequence for LRRC19 (NM_022901.1,493-511).
caactgaatgctgatgtat

SEQ ID NO: 384734 - DNA, 19 bp, Homo sapiens
  siRNA target sequence for LRRC19 (NM_022901.1,508-526).
gtatttgtgcctctaagaa

SEQ ID NO: 384735 - DNA, 19 bp, Homo sapiens
  siRNA target sequence for LRRC19 (NM_022901.1,544-562).
ctgcaaggcaatttgatta

SEQ ID NO: 384736 - DNA, 19 bp, Homo sapiens
  siRNA target sequence for LRRC19 (NM_022901.1,550-568).
ggcaatttgattagctatt

SEQ ID NO: 384737 - DNA, 19 bp, Homo sapiens
  siRNA target sequence for LRRC19 (NM_022901.1,629-647).
gctcttgcagtctatttaa

SEQ ID NO: 384738 - DNA, 19 bp, Homo sapiens
  siRNA target sequence for LRRC19 (NM_022901.1,657-675).
ctggttgaacacatcaaat

SEQ ID NO: 384739 - DNA, 19 bp, Homo sapiens
  siRNA target sequence for LRRC19 (NM_022901.1,659-677).
ggttgaacacatcaaatgt

SEQ ID NO: 384740 - DNA, 19 bp, Homo sapiens
  siRNA target sequence for LRRC19 (NM_022901.1,726-744).
gcagagctacaatatcaaa

SEQ ID NO: 384741 - DNA, 19 bp, Homo sapiens
  siRNA target sequence for LRRC19 (NM_022901.1,785-803).
catcagtaactgaagatct

SEQ ID NO: 384742 - DNA, 19 bp, Homo sapiens
  siRNA target sequence for LRRC19 (NM_022901.1,819-837).
gcccatcagcaattcaata

SEQ ID NO: 384743 - DNA, 19 bp, Homo sapiens
  siRNA target sequence for LRRC19 (NM_022901.1,820-838).
cccatcagcaattcaatat

SEQ ID NO: 384744 - DNA, 19 bp, Homo sapiens
  siRNA target sequence for LRRC19 (NM_022901.1,821-839).
ccatcagcaattcaatatt

SEQ ID NO: 384745 - DNA, 19 bp, Homo sapiens
  siRNA target sequence for LRRC19 (NM_022901.1,858-876).
cttaacaagaaattcagaa

SEQ ID NO: 384746 - DNA, 19 bp, Homo sapiens
  siRNA target sequence for LRRC19 (NM_022901.1,933-951).
gacgacttcacttctcatt

SEQ ID NO: 384747 - DNA, 19 bp, Homo sapiens
  siRNA target sequence for LRRC19 (NM_022901.1,958-976).
gctatcaaatgcccaatat

SEQ ID NO: 384748 - DNA, 19 bp, Homo sapiens
  siRNA target sequence for LRRC19 (NM_022901.1,968-986).
gcccaatatggtacaatat

SEQ ID NO: 384749 - DNA, 19 bp, Homo sapiens
  siRNA target sequence for LRRC19 (NM_022901.1,969-987).
cccaatatggtacaatatt

SEQ ID NO: 384750 - DNA, 19 bp, Homo sapiens
  siRNA target sequence for LRRC19 (NM_022901.1,971-989).
caatatggtacaatattct

SEQ ID NO: 384751 - DNA, 19 bp, Homo sapiens
  siRNA target sequence for LRRC19 (NM_022901.1,1096-1114).
gaagaaactacagtaatat

SEQ ID NO: 384752 - DNA, 19 bp, Homo sapiens
  siRNA target sequence for FLJ12572 (NM_022905.2,469-487).
caaccacctagatgaagtt

SEQ ID NO: 384753 - DNA, 19 bp, Homo sapiens
  siRNA target sequence for FLJ12572 (NM_022905.2,472-490).
ccacctagatgaagttgtt

SEQ ID NO: 384754 - DNA, 19 bp, Homo sapiens
  siRNA target sequence for FLJ12572 (NM_022905.2,501-519).
gcatcactcatagaaagaa

SEQ ID NO: 384755 - DNA, 19 bp, Homo sapiens
  siRNA target sequence for FLJ12572 (NM_022905.2,607-625).
caacagtcatgagtacaaa

SEQ ID NO: 384756 - DNA, 19 bp, Homo sapiens
  siRNA target sequence for FLJ12572 (NM_022905.2,651-669).
gcgtagcactgacaagaat

SEQ ID NO: 384757 - DNA, 19 bp, Homo sapiens
  siRNA target sequence for FLJ12572 (NM_022905.2,652-670).
cgtagcactgacaagaatt

SEQ ID NO: 384758 - DNA, 19 bp, Homo sapiens
  siRNA target sequence for FLJ12572 (NM_022905.2,653-671).
gtagcactgacaagaattt

SEQ ID NO: 384759 - DNA, 19 bp, Homo sapiens
  siRNA target sequence for FLJ12572 (NM_022905.2,656-674).
gcactgacaagaatttgct

SEQ ID NO: 384760 - DNA, 19 bp, Homo sapiens
  siRNA target sequence for FLJ12572 (NM_022905.2,699-717).
cagaggcacatgttaatct

SEQ ID NO: 384761 - DNA, 19 bp, Homo sapiens
  siRNA target sequence for FLJ12572 (NM_022905.2,802-820).
cattgtgcctccctatagt

SEQ ID NO: 384762 - DNA, 19 bp, Homo sapiens
  siRNA target sequence for FLJ12572 (NM_022905.2,864-882).
ccatgggcagagctttact

SEQ ID NO: 384763 - DNA, 19 bp, Homo sapiens
  siRNA target sequence for FLJ12572 (NM_022905.2,995-1013).
gcacggatcagattatcat

SEQ ID NO: 384764 - DNA, 19 bp, Homo sapiens
  siRNA target sequence for FLJ12572 (NM_022905.2,1011-1029).
catttgcacaggtgtatca

SEQ ID NO: 384765 - DNA, 19 bp, Homo sapiens
  siRNA target sequence for FLJ12572 (NM_022905.2,1113-1131).
gtgagtgtgtacccatatt

SEQ ID NO: 384766 - DNA, 19 bp, Homo sapiens
  siRNA target sequence for FLJ12572 (NM_022905.2,1117-1135).
gtgtgtacccatattgaga

SEQ ID NO: 384767 - DNA, 19 bp, Homo sapiens
  siRNA target sequence for FLJ12572 (NM_022905.2,1160-1178).
ctgggactccacgatgtat

SEQ ID NO: 384768 - DNA, 19 bp, Homo sapiens
  siRNA target sequence for FLJ12572 (NM_022905.2,1164-1182).
gactccacgatgtatccat

SEQ ID NO: 384769 - DNA, 19 bp, Homo sapiens
  siRNA target sequence for FLJ12572 (NM_022905.2,1332-1350).
gcatggctcatcttaagga

SEQ ID NO: 384770 - DNA, 19 bp, Homo sapiens
  siRNA target sequence for FLJ12572 (NM_022905.2,1333-1351).
catggctcatcttaaggat

SEQ ID NO: 384771 - DNA, 19 bp, Homo sapiens
  siRNA target sequence for FLJ12572 (NM_022905.2,1475-1493).
gaagcatttggcgatttca

SEQ ID NO: 384772 - DNA, 19 bp, Homo sapiens
  siRNA target sequence for FLJ12442 (NM_022908.1,433-451).
gcgcaggaaagaggaattt

SEQ ID NO: 384773 - DNA, 19 bp, Homo sapiens
  siRNA target sequence for FLJ12442 (NM_022908.1,463-481).
ctgtcgacgttgctagaaa

SEQ ID NO: 384774 - DNA, 19 bp, Homo sapiens
  siRNA target sequence for FLJ12442 (NM_022908.1,613-631).
gaggtctacggctttgact

SEQ ID NO: 384775 - DNA, 19 bp, Homo sapiens
  siRNA target sequence for FLJ12442 (NM_022908.1,662-680).
cactgcaccccgagatctt

SEQ ID NO: 384776 - DNA, 19 bp, Homo sapiens
  siRNA target sequence for FLJ12442 (NM_022908.1,664-682).
ctgcaccccgagatcttca

SEQ ID NO: 384777 - DNA, 19 bp, Homo sapiens
  siRNA target sequence for FLJ12442 (NM_022908.1,667-685).
caccccgagatcttcagta

SEQ ID NO: 384778 - DNA, 19 bp, Homo sapiens
  siRNA target sequence for FLJ12442 (NM_022908.1,700-718).
ctgatcgagcactacaagt

SEQ ID NO: 384779 - DNA, 19 bp, Homo sapiens
  siRNA target sequence for FLJ12442 (NM_022908.1,727-745).
gggattcggaagtatgact

SEQ ID NO: 384780 - DNA, 19 bp, Homo sapiens
  siRNA target sequence for FLJ12442 (NM_022908.1,728-746).
ggattcggaagtatgacta

SEQ ID NO: 384781 - DNA, 19 bp, Homo sapiens
  siRNA target sequence for FLJ12442 (NM_022908.1,767-785).
gtggcctccactatgacat

SEQ ID NO: 384782 - DNA, 19 bp, Homo sapiens
  siRNA target sequence for FLJ12442 (NM_022908.1,770-788).
gcctccactatgacattca

SEQ ID NO: 384783 - DNA, 19 bp, Homo sapiens
  siRNA target sequence for FLJ12442 (NM_022908.1,866-884).
cagacgaggaggtgattga

SEQ ID NO: 384784 - DNA, 19 bp, Homo sapiens
  siRNA target sequence for FLJ12442 (NM_022908.1,899-917).
cccagcacatcccactata

SEQ ID NO: 384785 - DNA, 19 bp, Homo sapiens
  siRNA target sequence for FLJ12442 (NM_022908.1,937-955).
ggcaagggtccctccatta

SEQ ID NO: 384786 - DNA, 19 bp, Homo sapiens
  siRNA target sequence for FLJ12442 (NM_022908.1,938-956).
gcaagggtccctccattaa

SEQ ID NO: 384787 - DNA, 19 bp, Homo sapiens
  siRNA target sequence for FLJ12442 (NM_022908.1,1223-1241).
ctttcagcttcgtagacaa

SEQ ID NO: 384788 - DNA, 19 bp, Homo sapiens
  siRNA target sequence for FLJ12442 (NM_022908.1,1332-1350).
gcgcaagcctttcagaaaa

SEQ ID NO: 384789 - DNA, 19 bp, Homo sapiens
  siRNA target sequence for FLJ12442 (NM_022908.1,1381-1399).
cggatcacccgcttggaaa

SEQ ID NO: 384790 - DNA, 19 bp, Homo sapiens
  siRNA target sequence for FLJ12442 (NM_022908.1,1382-1400).
ggatcacccgcttggaaaa

SEQ ID NO: 384791 - DNA, 19 bp, Homo sapiens
  siRNA target sequence for FLJ12442 (NM_022908.1,1395-1413).
ggaaaagggcaagatctat

SEQ ID NO: 384792 - DNA, 19 bp, Homo sapiens
  siRNA target sequence for FLJ12442 (NM_022908.1,1479-1497).
cggggaccacctctatagt

SEQ ID NO: 384793 - DNA, 19 bp, Homo sapiens
  siRNA target sequence for FLJ12442 (NM_022908.1,1496-1514).
gtgatctggcggatctcat

SEQ ID NO: 384794 - DNA, 19 bp, Homo sapiens
  siRNA target sequence for FLJ12442 (NM_022908.1,1719-1737).
caccaaggccctgttcaat

SEQ ID NO: 384795 - DNA, 19 bp, Homo sapiens
  siRNA target sequence for FLJ12442 (NM_022908.1,1768-1786).
cacaaccccacctacttct

SEQ ID NO: 384796 - DNA, 19 bp, Homo sapiens
  siRNA target sequence for FLJ13110 (NM_022912.1,191-209).
ccctttaccctgcgtatta

SEQ ID NO: 384797 - DNA, 19 bp, Homo sapiens
  siRNA target sequence for FLJ13110 (NM_022912.1,192-210).
cctttaccctgcgtattat

SEQ ID NO: 384798 - DNA, 19 bp, Homo sapiens
  siRNA target sequence for FLJ13110 (NM_022912.1,213-231).
ctacaaggctgtgaaatca

SEQ ID NO: 384799 - DNA, 19 bp, Homo sapiens
  siRNA target sequence for FLJ13110 (NM_022912.1,312-330).
catcttcctttgttggttt

SEQ ID NO: 384800 - DNA, 19 bp, Homo sapiens
  siRNA target sequence for FLJ13110 (NM_022912.1,326-344).
ggtttccattctattatga

SEQ ID NO: 384801 - DNA, 19 bp, Homo sapiens
  siRNA target sequence for FLJ13110 (NM_022912.1,688-706).
cacggccagcctaagatgt

SEQ ID NO: 384802 - DNA, 19 bp, Homo sapiens
  siRNA target sequence for DKFZp761C169 (NM_022913.1,1161-1179).
caacaaagtcgtcattgaa

SEQ ID NO: 384803 - DNA, 19 bp, Homo sapiens
  siRNA target sequence for DKFZp761C169 (NM_022913.1,1170-1188).
cgtcattgaattttgagaa

SEQ ID NO: 384804 - DNA, 19 bp, Homo sapiens
  siRNA target sequence for DKFZp761C169 (NM_022913.1,1201-1219).
ctttgcatggacagagaat

SEQ ID NO: 384805 - DNA, 19 bp, Homo sapiens
  siRNA target sequence for DKFZp761C169 (NM_022913.1,1205-1223).
gcatggacagagaatcgtt

SEQ ID NO: 384806 - DNA, 19 bp, Homo sapiens
  siRNA target sequence for DKFZp761C169 (NM_022913.1,1206-1224).
catggacagagaatcgtta

SEQ ID NO: 384807 - DNA, 19 bp, Homo sapiens
  siRNA target sequence for DKFZp761C169 (NM_022913.1,1209-1227).
ggacagagaatcgttatga

SEQ ID NO: 384808 - DNA, 19 bp, Homo sapiens
  siRNA target sequence for DKFZp761C169 (NM_022913.1,1210-1228).
gacagagaatcgttatgat

SEQ ID NO: 384809 - DNA, 19 bp, Homo sapiens
  siRNA target sequence for DKFZp761C169 (NM_022913.1,1212-1230).
cagagaatcgttatgatgt

SEQ ID NO: 384810 - DNA, 19 bp, Homo sapiens
  siRNA target sequence for DKFZp761C169 (NM_022913.1,1235-1253).
cgtcgacgacacaactctt

SEQ ID NO: 384811 - DNA, 19 bp, Homo sapiens
  siRNA target sequence for DKFZp761C169 (NM_022913.1,1323-1341).
ggcgtacacatggaagaaa

SEQ ID NO: 384812 - DNA, 19 bp, Homo sapiens
  siRNA target sequence for DKFZp761C169 (NM_022913.1,1324-1342).
gcgtacacatggaagaaat

SEQ ID NO: 384813 - DNA, 19 bp, Homo sapiens
  siRNA target sequence for DKFZp761C169 (NM_022913.1,1390-1408).
ccgttctcgtagcagtatt

SEQ ID NO: 384814 - DNA, 19 bp, Homo sapiens
  siRNA target sequence for DKFZp761C169 (NM_022913.1,1391-1409).
cgttctcgtagcagtattt

SEQ ID NO: 384815 - DNA, 19 bp, Homo sapiens
  siRNA target sequence for DKFZp761C169 (NM_022913.1,1392-1410).
gttctcgtagcagtatttt

SEQ ID NO: 384816 - DNA, 19 bp, Homo sapiens
  siRNA target sequence for DKFZp761C169 (NM_022913.1,1427-1445).
caaggactacatgaaaaca

SEQ ID NO: 384817 - DNA, 19 bp, Homo sapiens
  siRNA target sequence for DKFZp761C169 (NM_022913.1,1483-1501).
gagagaacgcaaacagttt

SEQ ID NO: 384818 - DNA, 19 bp, Homo sapiens
  siRNA target sequence for DKFZp761C169 (NM_022913.1,1519-1537).
gtctttaaatcctgagtat

SEQ ID NO: 384819 - DNA, 19 bp, Homo sapiens
  siRNA target sequence for DKFZp761C169 (NM_022913.1,1534-1552).
gtatgagagagaaccaaat

SEQ ID NO: 384820 - DNA, 19 bp, Homo sapiens
  siRNA target sequence for DKFZp761C169 (NM_022913.1,1583-1601).
gaatatcctccgaatccta

SEQ ID NO: 384821 - DNA, 19 bp, Homo sapiens
  siRNA target sequence for DKFZp761C169 (NM_022913.1,1614-1632).
caaggatgctggtcattaa

SEQ ID NO: 384822 - DNA, 19 bp, Homo sapiens
  siRNA target sequence for DKFZp761C169 (NM_022913.1,1688-1706).
ccgtcacagccagttaaga

SEQ ID NO: 384823 - DNA, 19 bp, Homo sapiens
  siRNA target sequence for DKFZp761C169 (NM_022913.1,1689-1707).
cgtcacagccagttaagaa

SEQ ID NO: 384824 - DNA, 19 bp, Homo sapiens
  siRNA target sequence for DKFZp761C169 (NM_022913.1,1690-1708).
gtcacagccagttaagaat

SEQ ID NO: 384825 - DNA, 19 bp, Homo sapiens
  siRNA target sequence for DKFZp761C169 (NM_022913.1,1754-1772).
gctccacctacaaaaccta

SEQ ID NO: 384826 - DNA, 19 bp, Homo sapiens
  siRNA target sequence for DKFZp761C169 (NM_022913.1,1819-1837).
ccctcatgagtccacattt

SEQ ID NO: 384827 - DNA, 19 bp, Homo sapiens
  siRNA target sequence for DKFZp761C169 (NM_022913.1,1840-1858).
cgttggcaactttaatgct

SEQ ID NO: 384828 - DNA, 19 bp, Homo sapiens
  siRNA target sequence for DKFZp761C169 (NM_022913.1,1841-1859).
gttggcaactttaatgctt

SEQ ID NO: 384829 - DNA, 19 bp, Homo sapiens
  siRNA target sequence for DKFZp761C169 (NM_022913.1,1879-1897).
ctttagtccatctacaaat

SEQ ID NO: 384830 - DNA, 19 bp, Homo sapiens
  siRNA target sequence for DKFZp761C169 (NM_022913.1,1890-1908).
ctacaaattcagtgaaaga

SEQ ID NO: 384831 - DNA, 19 bp, Homo sapiens
  siRNA target sequence for DKFZp761C169 (NM_022913.1,1907-1925).
gagtgtaatcgctcaaatt

SEQ ID NO: 384832 - DNA, 19 bp, Homo sapiens
  siRNA target sequence for DKFZp761C169 (NM_022913.1,1932-1950).
ctcctgttgacaaacttaa

SEQ ID NO: 384833 - DNA, 19 bp, Homo sapiens
  siRNA target sequence for DKFZp761C169 (NM_022913.1,1935-1953).
ctgttgacaaacttaatca

SEQ ID NO: 384834 - DNA, 19 bp, Homo sapiens
  siRNA target sequence for DKFZp761C169 (NM_022913.1,1954-1972).
gcagcctcgtctaaccaaa

SEQ ID NO: 384835 - DNA, 19 bp, Homo sapiens
  siRNA target sequence for DKFZp761C169 (NM_022913.1,1977-1995).
cacgaatgcgcactgataa

SEQ ID NO: 384836 - DNA, 19 bp, Homo sapiens
  siRNA target sequence for DKFZp761C169 (NM_022913.1,1979-1997).
cgaatgcgcactgataaga

SEQ ID NO: 384837 - DNA, 19 bp, Homo sapiens
  siRNA target sequence for DKFZp761C169 (NM_022913.1,1989-2007).
ctgataagaagagtgaatt

SEQ ID NO: 384838 - DNA, 19 bp, Homo sapiens
  siRNA target sequence for DKFZp761C169 (NM_022913.1,2074-2092).
gaaggatgacgactcattt

SEQ ID NO: 384839 - DNA, 19 bp, Homo sapiens
  siRNA target sequence for DKFZp761C169 (NM_022913.1,2077-2095).
ggatgacgactcatttaat

SEQ ID NO: 384840 - DNA, 19 bp, Homo sapiens
  siRNA target sequence for DKFZp761C169 (NM_022913.1,2078-2096).
gatgacgactcatttaatt

SEQ ID NO: 384841 - DNA, 19 bp, Homo sapiens
  siRNA target sequence for DKFZp761C169 (NM_022913.1,2083-2101).
cgactcatttaatttacat

SEQ ID NO: 384842 - DNA, 19 bp, Homo sapiens
  siRNA target sequence for DKFZp761C169 (NM_022913.1,2127-2145).
gggatataaaccgaaactt

SEQ ID NO: 384843 - DNA, 19 bp, Homo sapiens
  siRNA target sequence for DKFZp761C169 (NM_022913.1,2137-2155).
ccgaaacttcgatgaaaat

SEQ ID NO: 384844 - DNA, 19 bp, Homo sapiens
  siRNA target sequence for DKFZp761C169 (NM_022913.1,2188-2206).
gatttcccagcagatcatt

SEQ ID NO: 384845 - DNA, 19 bp, Homo sapiens
  siRNA target sequence for DKFZp761C169 (NM_022913.1,2198-2216).
cagatcattcggtcttcaa

SEQ ID NO: 384846 - DNA, 19 bp, Homo sapiens
  siRNA target sequence for DKFZp761C169 (NM_022913.1,2221-2239).
cccacaaactgatgttctt

SEQ ID NO: 384847 - DNA, 19 bp, Homo sapiens
  siRNA target sequence for DKFZp761C169 (NM_022913.1,2222-2240).
ccacaaactgatgttcttt

SEQ ID NO: 384848 - DNA, 19 bp, Homo sapiens
  siRNA target sequence for DKFZp761C169 (NM_022913.1,2322-2340).
ccttaactgaggatgaaat

SEQ ID NO: 384849 - DNA, 19 bp, Homo sapiens
  siRNA target sequence for DKFZp761C169 (NM_022913.1,2382-2400).
gtctgagaaaaaatggtat

SEQ ID NO: 384850 - DNA, 19 bp, Homo sapiens
  siRNA target sequence for DKFZp761C169 (NM_022913.1,2412-2430).
gcttgatctgtgacttcaa

SEQ ID NO: 384851 - DNA, 19 bp, Homo sapiens
  siRNA target sequence for DKFZp761C169 (NM_022913.1,2477-2495).
gatgacacagagacaagta

SEQ ID NO: 384852 - DNA, 19 bp, Homo sapiens
  siRNA target sequence for DKFZp761C169 (NM_022913.1,2486-2504).
gagacaagtagcagtgata

SEQ ID NO: 384853 - DNA, 19 bp, Homo sapiens
  siRNA target sequence for DKFZp761C169 (NM_022913.1,2488-2506).
gacaagtagcagtgataca

SEQ ID NO: 384854 - DNA, 19 bp, Homo sapiens
  siRNA target sequence for 24432 (NM_022914.1,994-1012).
gcaaccaagacttagatgt

SEQ ID NO: 384855 - DNA, 19 bp, Homo sapiens
  siRNA target sequence for 24432 (NM_022914.1,995-1013).
caaccaagacttagatgtt

SEQ ID NO: 384856 - DNA, 19 bp, Homo sapiens
  siRNA target sequence for 24432 (NM_022914.1,1351-1369).
ctctgcaggacctatctct

SEQ ID NO: 384857 - DNA, 19 bp, Homo sapiens
  siRNA target sequence for NOL6 (NM_022917.4,205-223).
cctccaggaagcgtacatt

SEQ ID NO: 384858 - DNA, 19 bp, Homo sapiens
  siRNA target sequence for NOL6 (NM_022917.4,268-286).
gcagggcagaactgtacaa

SEQ ID NO: 384859 - DNA, 19 bp, Homo sapiens
  siRNA target sequence for NOL6 (NM_022917.4,281-299).
gtacaaggagcctaccaat

SEQ ID NO: 384860 - DNA, 19 bp, Homo sapiens
  siRNA target sequence for NOL6 (NM_022917.4,292-310).
ctaccaatgaggagcttaa

SEQ ID NO: 384861 - DNA, 19 bp, Homo sapiens
  siRNA target sequence for NOL6 (NM_022917.4,318-336).
cgggagactgagatcttgt

SEQ ID NO: 384862 - DNA, 19 bp, Homo sapiens
  siRNA target sequence for NOL6 (NM_022917.4,341-359).
ctccagcttgcttcgttta

SEQ ID NO: 384863 - DNA, 19 bp, Homo sapiens
  siRNA target sequence for NOL6 (NM_022917.4,343-361).
ccagcttgcttcgtttaca

SEQ ID NO: 384864 - DNA, 19 bp, Homo sapiens
  siRNA target sequence for NOL6 (NM_022917.4,360-378).
caggtagaggagctactaa

SEQ ID NO: 384865 - DNA, 19 bp, Homo sapiens
  siRNA target sequence for NOL6 (NM_022917.4,613-631).
gcatccgaccagacatcaa

SEQ ID NO: 384866 - DNA, 19 bp, Homo sapiens
  siRNA target sequence for NOL6 (NM_022917.4,614-632).
catccgaccagacatcaat

SEQ ID NO: 384867 - DNA, 19 bp, Homo sapiens
  siRNA target sequence for NOL6 (NM_022917.4,650-668).
catgcccagggaaatccta

SEQ ID NO: 384868 - DNA, 19 bp, Homo sapiens
  siRNA target sequence for NOL6 (NM_022917.4,902-920).
gctgccaaccaagaacaat

SEQ ID NO: 384869 - DNA, 19 bp, Homo sapiens
  siRNA target sequence for NOL6 (NM_022917.4,1000-1018).
gggtcctgcaagatacagt

SEQ ID NO: 384870 - DNA, 19 bp, Homo sapiens
  siRNA target sequence for NOL6 (NM_022917.4,1228-1246).
gaagtgtcttgcagtttct

SEQ ID NO: 384871 - DNA, 19 bp, Homo sapiens
  siRNA target sequence for NOL6 (NM_022917.4,1264-1282).
cagtcaacgggatcagttt

SEQ ID NO: 384872 - DNA, 19 bp, Homo sapiens
  siRNA target sequence for NOL6 (NM_022917.4,1266-1284).
gtcaacgggatcagtttat

SEQ ID NO: 384873 - DNA, 19 bp, Homo sapiens
  siRNA target sequence for NOL6 (NM_022917.4,1268-1286).
caacgggatcagtttatgt

SEQ ID NO: 384874 - DNA, 19 bp, Homo sapiens
  siRNA target sequence for NOL6 (NM_022917.4,1465-1483).
ggttccacctgctgttgat

SEQ ID NO: 384875 - DNA, 19 bp, Homo sapiens
  siRNA target sequence for NOL6 (NM_022917.4,1495-1513).
ccatgatccgggcttttga

SEQ ID NO: 384876 - DNA, 19 bp, Homo sapiens
  siRNA target sequence for NOL6 (NM_022917.4,1925-1943).
gtcccagaagcgccttatt

SEQ ID NO: 384877 - DNA, 19 bp, Homo sapiens
  siRNA target sequence for NOL6 (NM_022917.4,2021-2039).
cctggatgcacttatccaa

SEQ ID NO: 384878 - DNA, 19 bp, Homo sapiens
  siRNA target sequence for NOL6 (NM_022917.4,2302-2320).
ccatgaccgtggtttgtca

SEQ ID NO: 384879 - DNA, 19 bp, Homo sapiens
  siRNA target sequence for NOL6 (NM_022917.4,2446-2464).
cgcacacggatgtccttaa

SEQ ID NO: 384880 - DNA, 19 bp, Homo sapiens
  siRNA target sequence for NOL6 (NM_022917.4,2450-2468).
cacggatgtccttaaggat

SEQ ID NO: 384881 - DNA, 19 bp, Homo sapiens
  siRNA target sequence for NOL6 (NM_022917.4,2796-2814).
ggcttccttcgattccttt

SEQ ID NO: 384882 - DNA, 19 bp, Homo sapiens
  siRNA target sequence for NOL6 (NM_022917.4,2805-2823).
cgattccttttcttggtat

SEQ ID NO: 384883 - DNA, 19 bp, Homo sapiens
  siRNA target sequence for NOL6 (NM_022917.4,2816-2834).
cttggtatcaacgtttgat

SEQ ID NO: 384884 - DNA, 19 bp, Homo sapiens
  siRNA target sequence for NOL6 (NM_022917.4,2827-2845).
cgtttgattggaagaacaa

SEQ ID NO: 384885 - DNA, 19 bp, Homo sapiens
  siRNA target sequence for NOL6 (NM_022917.4,2934-2952).
cccgtcatggtcattgtta

SEQ ID NO: 384886 - DNA, 19 bp, Homo sapiens
  siRNA target sequence for NOL6 (NM_022917.4,3242-3260).
gcccgtgctgggctatgat

SEQ ID NO: 384887 - DNA, 19 bp, Homo sapiens
  siRNA target sequence for NOL6 (NM_022917.4,3301-3319).
gggatctggcccttttctt

SEQ ID NO: 384888 - DNA, 19 bp, Homo sapiens
  siRNA target sequence for NOL6 (NM_022917.4,3426-3444).
cgaggtggggagctagtaa

SEQ ID NO: 384889 - DNA, 19 bp, Homo sapiens
  siRNA target sequence for NOL6 (NM_022917.4,3427-3445).
gaggtggggagctagtaat

SEQ ID NO: 384890 - DNA, 19 bp, Homo sapiens
  siRNA target sequence for NOL6 (NM_022917.4,3430-3448).
gtggggagctagtaatggt

SEQ ID NO: 384891 - DNA, 19 bp, Homo sapiens
  siRNA target sequence for FLJ22104 (NM_022918.2,158-176).
gtacttgattgcagcaatt

SEQ ID NO: 384892 - DNA, 19 bp, Homo sapiens
  siRNA target sequence for FLJ22104 (NM_022918.2,182-200).
gaaacggaaattagactat

SEQ ID NO: 384893 - DNA, 19 bp, Homo sapiens
  siRNA target sequence for FLJ22104 (NM_022918.2,186-204).
cggaaattagactattatt

SEQ ID NO: 384894 - DNA, 19 bp, Homo sapiens
  siRNA target sequence for FLJ22104 (NM_022918.2,197-215).
ctattatttacacaaacta

SEQ ID NO: 384895 - DNA, 19 bp, Homo sapiens
  siRNA target sequence for FLJ22104 (NM_022918.2,231-249).
caatccgcttcatttctaa

SEQ ID NO: 384896 - DNA, 19 bp, Homo sapiens
  siRNA target sequence for FLJ22104 (NM_022918.2,252-270).
gctaatggggccttgtata

SEQ ID NO: 384897 - DNA, 19 bp, Homo sapiens
  siRNA target sequence for FLJ22104 (NM_022918.2,253-271).
ctaatggggccttgtatat

SEQ ID NO: 384898 - DNA, 19 bp, Homo sapiens
  siRNA target sequence for FLJ22104 (NM_022918.2,338-356).
cgctctgccagcatcttat

SEQ ID NO: 384899 - DNA, 19 bp, Homo sapiens
  siRNA target sequence for FLJ22104 (NM_022918.2,340-358).
ctctgccagcatcttatgt

SEQ ID NO: 384900 - DNA, 19 bp, Homo sapiens
  siRNA target sequence for FLJ22104 (NM_022918.2,359-377).
ggccattctcattgaaaga

SEQ ID NO: 384901 - DNA, 19 bp, Homo sapiens
  siRNA target sequence for FLJ22104 (NM_022918.2,360-378).
gccattctcattgaaagaa

SEQ ID NO: 384902 - DNA, 19 bp, Homo sapiens
  siRNA target sequence for FLJ22104 (NM_022918.2,388-406).
gagggctgctcacaattta

SEQ ID NO: 384903 - DNA, 19 bp, Homo sapiens
  siRNA target sequence for FLJ22104 (NM_022918.2,507-525).
gctgccatgtacatgttct

SEQ ID NO: 384904 - DNA, 19 bp, Homo sapiens
  siRNA target sequence for FLJ22104 (NM_022918.2,539-557).
ggatggcttgaaaggattt

SEQ ID NO: 384905 - DNA, 19 bp, Homo sapiens
  siRNA target sequence for FLJ22104 (NM_022918.2,540-558).
gatggcttgaaaggattta

SEQ ID NO: 384906 - DNA, 19 bp, Homo sapiens
  siRNA target sequence for FLJ22104 (NM_022918.2,543-561).
ggcttgaaaggatttacat

SEQ ID NO: 384907 - DNA, 19 bp, Homo sapiens
  siRNA target sequence for FLJ22104 (NM_022918.2,559-577).
cattttctgcacttaggtt

SEQ ID NO: 384908 - DNA, 19 bp, Homo sapiens
  siRNA target sequence for FLJ22104 (NM_022918.2,694-712).
gtctagtcaggaaatttgt

SEQ ID NO: 384909 - DNA, 19 bp, Homo sapiens
  siRNA target sequence for FLJ22104 (NM_022918.2,713-731).
ggattcaatatgcaaacat

SEQ ID NO: 384910 - DNA, 19 bp, Homo sapiens
  siRNA target sequence for FLJ22104 (NM_022918.2,732-750).
ggaccaaggcatagatgtt

SEQ ID NO: 384911 - DNA, 19 bp, Homo sapiens
  siRNA target sequence for FLJ22104 (NM_022918.2,772-790).
gcatctcttattgcattaa

SEQ ID NO: 384912 - DNA, 19 bp, Homo sapiens
  siRNA target sequence for FLJ22104 (NM_022918.2,839-857).
ccgaatcccttctgcattt

SEQ ID NO: 384913 - DNA, 19 bp, Homo sapiens
  siRNA target sequence for FLJ22104 (NM_022918.2,840-858).
cgaatcccttctgcattta

SEQ ID NO: 384914 - DNA, 19 bp, Homo sapiens
  siRNA target sequence for FLJ22104 (NM_022918.2,885-903).
ctactttctctcttctaca

SEQ ID NO: 384915 - DNA, 19 bp, Homo sapiens
  siRNA target sequence for FLJ22104 (NM_022918.2,914-932).
cttccagcttggagctttt

SEQ ID NO: 384916 - DNA, 19 bp, Homo sapiens
  siRNA target sequence for FLJ22104 (NM_022918.2,977-995).
gcgctggatcagaaactta

SEQ ID NO: 384917 - DNA, 19 bp, Homo sapiens
  siRNA target sequence for FLJ22104 (NM_022918.2,999-1017).
gatgaactacatgctatta

SEQ ID NO: 384918 - DNA, 19 bp, Homo sapiens
  siRNA target sequence for FLJ22104 (NM_022918.2,1023-1041).
ggatttttggcaggtatat

SEQ ID NO: 384919 - DNA, 19 bp, Homo sapiens
  siRNA target sequence for FLJ22104 (NM_022918.2,1035-1053).
ggtatatcaatgatgtttt

SEQ ID NO: 384920 - DNA, 19 bp, Homo sapiens
  siRNA target sequence for FLJ22104 (NM_022918.2,1130-1148).
gaaggttccctattttcct

SEQ ID NO: 384921 - DNA, 19 bp, Homo sapiens
  siRNA target sequence for FLJ22104 (NM_022918.2,1256-1274).
caccaagggcaaatttgct

SEQ ID NO: 384922 - DNA, 19 bp, Homo sapiens
  siRNA target sequence for FLJ22104 (NM_022918.2,1283-1301).
ccgaaaagtccttgatgtt

SEQ ID NO: 384923 - DNA, 19 bp, Homo sapiens
  siRNA target sequence for FLJ22104 (NM_022918.2,1284-1302).
cgaaaagtccttgatgttt

SEQ ID NO: 384924 - DNA, 19 bp, Homo sapiens
  siRNA target sequence for FLJ22104 (NM_022918.2,1342-1360).
ccaggttggatccaagata

SEQ ID NO: 384925 - DNA, 19 bp, Homo sapiens
  siRNA target sequence for FLJ22104 (NM_022918.2,1346-1364).
gttggatccaagatacaca

SEQ ID NO: 384926 - DNA, 19 bp, Homo sapiens
  siRNA target sequence for FLJ22104 (NM_022918.2,1353-1371).
ccaagatacacaactgtaa

SEQ ID NO: 384927 - DNA, 19 bp, Homo sapiens
  siRNA target sequence for FLJ12517 (NM_023007.1,295-313).
ctgccctgcgtgttttcca

SEQ ID NO: 384928 - DNA, 19 bp, Homo sapiens
  siRNA target sequence for FLJ12517 (NM_023007.1,488-506).
cctactggaaagagtacat

SEQ ID NO: 384929 - DNA, 19 bp, Homo sapiens
  siRNA target sequence for FLJ12517 (NM_023007.1,574-592).
ccggtggaggacgttttca

SEQ ID NO: 384930 - DNA, 19 bp, Homo sapiens
  siRNA target sequence for FLJ12517 (NM_023007.1,611-629).
cgtccgactggctgaatga

SEQ ID NO: 384931 - DNA, 19 bp, Homo sapiens
  siRNA target sequence for FLJ12517 (NM_023007.1,614-632).
ccgactggctgaatgagtt

SEQ ID NO: 384932 - DNA, 19 bp, Homo sapiens
  siRNA target sequence for FLJ12517 (NM_023007.1,641-659).
cactggatgtggatgacta

SEQ ID NO: 384933 - DNA, 19 bp, Homo sapiens
  siRNA target sequence for FLJ12517 (NM_023007.1,1099-1117).
cactgccaggtcatcatga

SEQ ID NO: 384934 - DNA, 19 bp, Homo sapiens
  siRNA target sequence for FLJ12517 (NM_023007.1,1121-1139).
cctgctcgggcatcaactt

SEQ ID NO: 384935 - DNA, 19 bp, Homo sapiens
  siRNA target sequence for FLJ12517 (NM_023007.1,1122-1140).
ctgctcgggcatcaacttt

SEQ ID NO: 384936 - DNA, 19 bp, Homo sapiens
  siRNA target sequence for FLJ12517 (NM_023007.1,1124-1142).
gctcgggcatcaactttga

SEQ ID NO: 384937 - DNA, 19 bp, Homo sapiens
  siRNA target sequence for FLJ12517 (NM_023007.1,1125-1143).
ctcgggcatcaactttgaa

SEQ ID NO: 384938 - DNA, 19 bp, Homo sapiens
  siRNA target sequence for FLJ12517 (NM_023007.1,1127-1145).
cgggcatcaactttgaaga

SEQ ID NO: 384939 - DNA, 19 bp, Homo sapiens
  siRNA target sequence for FLJ12517 (NM_023007.1,1233-1251).
cgaacaggcagcctttgat

SEQ ID NO: 384940 - DNA, 19 bp, Homo sapiens
  siRNA target sequence for FLJ12949 (NM_023008.2,182-200).
gcgacgagcgcgtggaatt

SEQ ID NO: 384941 - DNA, 19 bp, Homo sapiens
  siRNA target sequence for FLJ12949 (NM_023008.2,183-201).
cgacgagcgcgtggaattt

SEQ ID NO: 384942 - DNA, 19 bp, Homo sapiens
  siRNA target sequence for FLJ12949 (NM_023008.2,213-231).
ggagcgggacttttacaaa

SEQ ID NO: 384943 - DNA, 19 bp, Homo sapiens
  siRNA target sequence for FLJ12949 (NM_023008.2,214-232).
gagcgggacttttacaaaa

SEQ ID NO: 384944 - DNA, 19 bp, Homo sapiens
  siRNA target sequence for FLJ12949 (NM_023008.2,277-295).
gatgccaccttctataaca

SEQ ID NO: 384945 - DNA, 19 bp, Homo sapiens
  siRNA target sequence for FLJ12949 (NM_023008.2,376-394).
gactacgagaggaaggtta

SEQ ID NO: 384946 - DNA, 19 bp, Homo sapiens
  siRNA target sequence for FLJ12949 (NM_023008.2,439-457).
ggggagacttccaatcaca

SEQ ID NO: 384947 - DNA, 19 bp, Homo sapiens
  siRNA target sequence for FLJ12949 (NM_023008.2,466-484).
gagacatcgtcgcaaagtt

SEQ ID NO: 384948 - DNA, 19 bp, Homo sapiens
  siRNA target sequence for FLJ12949 (NM_023008.2,468-486).
gacatcgtcgcaaagttat

SEQ ID NO: 384949 - DNA, 19 bp, Homo sapiens
  siRNA target sequence for FLJ12949 (NM_023008.2,470-488).
catcgtcgcaaagttatgt

SEQ ID NO: 384950 - DNA, 19 bp, Homo sapiens
  siRNA target sequence for FLJ12949 (NM_023008.2,749-767).
gggattacatcctcaacaa

SEQ ID NO: 384951 - DNA, 19 bp, Homo sapiens
  siRNA target sequence for FLJ12949 (NM_023008.2,750-768).
ggattacatcctcaacaaa

SEQ ID NO: 384952 - DNA, 19 bp, Homo sapiens
  siRNA target sequence for FLJ12949 (NM_023008.2,984-1002).
ctccgtgcgccgtaaggat

SEQ ID NO: 384953 - DNA, 19 bp, Homo sapiens
  siRNA target sequence for FLJ12949 (NM_023008.2,1125-1143).
gaagctgcggaaagtaaca

SEQ ID NO: 384954 - DNA, 19 bp, Homo sapiens
  siRNA target sequence for FLJ12949 (NM_023008.2,1226-1244).
gctttggggacgagtacta

SEQ ID NO: 384955 - DNA, 19 bp, Homo sapiens
  siRNA target sequence for FLJ12949 (NM_023008.2,1531-1549).
gagtacctggatgagtatt

SEQ ID NO: 384956 - DNA, 19 bp, Homo sapiens
  siRNA target sequence for FLJ12949 (NM_023008.2,1675-1693).
cggtggtgctccctaaaga

SEQ ID NO: 384957 - DNA, 19 bp, Homo sapiens
  siRNA target sequence for FLJ12949 (NM_023008.2,1937-1955).
ctgtatcaccccacaagaa

SEQ ID NO: 384958 - DNA, 19 bp, Homo sapiens
  siRNA target sequence for FLJ11021 (NM_023012.3,174-192).
ggactagccccagaaaaga

SEQ ID NO: 384959 - DNA, 19 bp, Homo sapiens
  siRNA target sequence for FLJ11021 (NM_023012.3,177-195).
ctagccccagaaaagacat

SEQ ID NO: 384960 - DNA, 19 bp, Homo sapiens
  siRNA target sequence for FLJ11021 (NM_023012.3,222-240).
cagtcagaagtatctgttt

SEQ ID NO: 384961 - DNA, 19 bp, Homo sapiens
  siRNA target sequence for FLJ11021 (NM_023012.3,241-259).
ctcctagagcttcaaaaca

SEQ ID NO: 384962 - DNA, 19 bp, Homo sapiens
  siRNA target sequence for FLJ11021 (NM_023012.3,244-262).
ctagagcttcaaaacatca

SEQ ID NO: 384963 - DNA, 19 bp, Homo sapiens
  siRNA target sequence for FLJ11021 (NM_023012.3,393-411).
cataagtctgaggaacata

SEQ ID NO: 384964 - DNA, 19 bp, Homo sapiens
  siRNA target sequence for FLJ11021 (NM_023012.3,400-418).
ctgaggaacataatgacaa

SEQ ID NO: 384965 - DNA, 19 bp, Homo sapiens
  siRNA target sequence for FLJ11021 (NM_023012.3,438-456).
ggaagagagcgactaaatt

SEQ ID NO: 384966 - DNA, 19 bp, Homo sapiens
  siRNA target sequence for FLJ11021 (NM_023012.3,681-699).
cgttcccgctcaagatcaa

SEQ ID NO: 384967 - DNA, 19 bp, Homo sapiens
  siRNA target sequence for FLJ11021 (NM_023012.3,845-863).
ggatgcacaggaagcttta

SEQ ID NO: 384968 - DNA, 19 bp, Homo sapiens
  siRNA target sequence for FLJ11021 (NM_023012.3,849-867).
gcacaggaagctttagcta

SEQ ID NO: 384969 - DNA, 19 bp, Homo sapiens
  siRNA target sequence for FLJ11021 (NM_023012.3,1043-1061).
ggcagccctgcaagctaaa

SEQ ID NO: 384970 - DNA, 19 bp, Homo sapiens
  siRNA target sequence for FLJ11021 (NM_023012.3,1047-1065).
gccctgcaagctaaagctt

SEQ ID NO: 384971 - DNA, 19 bp, Homo sapiens
  siRNA target sequence for FLJ11021 (NM_023012.3,1048-1066).
ccctgcaagctaaagcttt

SEQ ID NO: 384972 - DNA, 19 bp, Homo sapiens
  siRNA target sequence for FLJ11021 (NM_023012.3,1083-1101).
gctgttcctagctactata

SEQ ID NO: 384973 - DNA, 19 bp, Homo sapiens
  siRNA target sequence for FLJ11021 (NM_023012.3,1084-1102).
ctgttcctagctactataa

SEQ ID NO: 384974 - DNA, 19 bp, Homo sapiens
  siRNA target sequence for FLJ11021 (NM_023012.3,1103-1121).
cccagccgctgttaatcca

SEQ ID NO: 384975 - DNA, 19 bp, Homo sapiens
  siRNA target sequence for FLJ11021 (NM_023012.3,1105-1123).
cagccgctgttaatccaat

SEQ ID NO: 384976 - DNA, 19 bp, Homo sapiens
  siRNA target sequence for FLJ11021 (NM_023012.3,1108-1126).
ccgctgttaatccaatgaa

SEQ ID NO: 384977 - DNA, 19 bp, Homo sapiens
  siRNA target sequence for FLJ11021 (NM_023012.3,1109-1127).
cgctgttaatccaatgaaa

SEQ ID NO: 384978 - DNA, 19 bp, Homo sapiens
  siRNA target sequence for FLJ11021 (NM_023012.3,1242-1260).
gtcaaatttaggaaattga

SEQ ID NO: 384979 - DNA, 19 bp, Homo sapiens
  siRNA target sequence for FLJ11021 (NM_023012.3,1264-1282).
gtattaagagtgaagatga

SEQ ID NO: 384980 - DNA, 19 bp, Homo sapiens
  siRNA target sequence for FLJ11021 (NM_023012.3,1288-1306).
gatgtagctcagttgatga

SEQ ID NO: 384981 - DNA, 19 bp, Homo sapiens
  siRNA target sequence for FLJ11021 (NM_023012.3,1297-1315).
cagttgatgaagaaagtta

SEQ ID NO: 384982 - DNA, 19 bp, Homo sapiens
  siRNA target sequence for FLJ11021 (NM_023012.3,1335-1353).
gaagaagtatttcgaaatt

SEQ ID NO: 384983 - DNA, 19 bp, Homo sapiens
  siRNA target sequence for LOC65122 (NM_023014.1,310-328).
ctggagccattgaaagcat

SEQ ID NO: 384984 - DNA, 19 bp, Homo sapiens
  siRNA target sequence for LOC65122 (NM_023014.1,1242-1260).
cagcaattgcatgtctatt

SEQ ID NO: 384985 - DNA, 19 bp, Homo sapiens
  siRNA target sequence for LOC65122 (NM_023014.1,1244-1262).
gcaattgcatgtctattga

SEQ ID NO: 384986 - DNA, 19 bp, Homo sapiens
  siRNA target sequence for FLJ21919 (NM_023015.3,849-867).
cccaagcccagaagtgtta

SEQ ID NO: 384987 - DNA, 19 bp, Homo sapiens
  siRNA target sequence for FLJ21919 (NM_023015.3,886-904).
gagtcgtgatggcatgaat

SEQ ID NO: 384988 - DNA, 19 bp, Homo sapiens
  siRNA target sequence for FLJ21919 (NM_023015.3,1018-1036).
gggagccgatggtgtttgt

SEQ ID NO: 384989 - DNA, 19 bp, Homo sapiens
  siRNA target sequence for FLJ21919 (NM_023015.3,1019-1037).
ggagccgatggtgtttgta

SEQ ID NO: 384990 - DNA, 19 bp, Homo sapiens
  siRNA target sequence for FLJ21919 (NM_023015.3,1020-1038).
gagccgatggtgtttgtat

SEQ ID NO: 384991 - DNA, 19 bp, Homo sapiens
  siRNA target sequence for FLJ21919 (NM_023015.3,1022-1040).
gccgatggtgtttgtatga

SEQ ID NO: 384992 - DNA, 19 bp, Homo sapiens
  siRNA target sequence for FLJ21919 (NM_023015.3,1065-1083).
gagatgttacagccaaaaa

SEQ ID NO: 384993 - DNA, 19 bp, Homo sapiens
  siRNA target sequence for FLJ21919 (NM_023015.3,1087-1105).
ctggttggcagaaagtgtt

SEQ ID NO: 384994 - DNA, 19 bp, Homo sapiens
  siRNA target sequence for FLJ21919 (NM_023015.3,1265-1283).
cgggaacggttcatggaat

SEQ ID NO: 384995 - DNA, 19 bp, Homo sapiens
  siRNA target sequence for FLJ21919 (NM_023015.3,1296-1314).
gtcgggatctcgtaagact

SEQ ID NO: 384996 - DNA, 19 bp, Homo sapiens
  siRNA target sequence for FLJ21919 (NM_023015.3,1300-1318).
ggatctcgtaagactactt

SEQ ID NO: 384997 - DNA, 19 bp, Homo sapiens
  siRNA target sequence for FLJ21919 (NM_023015.3,1306-1324).
cgtaagactacttcagaat

SEQ ID NO: 384998 - DNA, 19 bp, Homo sapiens
  siRNA target sequence for FLJ21919 (NM_023015.3,1404-1422).
gtatcctacagcttcttca

SEQ ID NO: 384999 - DNA, 19 bp, Homo sapiens
  siRNA target sequence for FLJ21919 (NM_023015.3,1414-1432).
gcttcttcagtcaagaaca

SEQ ID NO: 385000 - DNA, 19 bp, Homo sapiens
  siRNA target sequence for FLJ21919 (NM_023015.3,1415-1433).
cttcttcagtcaagaacat

SEQ ID NO: 385001 - DNA, 19 bp, Homo sapiens
  siRNA target sequence for FLJ21919 (NM_023015.3,1428-1446).
gaacatcccgaaaattcct

SEQ ID NO: 385002 - DNA, 19 bp, Homo sapiens
  siRNA target sequence for FLJ21919 (NM_023015.3,1461-1479).
ccccggacatggagactaa

SEQ ID NO: 385003 - DNA, 19 bp, Homo sapiens
  siRNA target sequence for FLJ21919 (NM_023015.3,1462-1480).
cccggacatggagactaaa

SEQ ID NO: 385004 - DNA, 19 bp, Homo sapiens
  siRNA target sequence for FLJ21919 (NM_023015.3,1501-1519).
ggtgcgatttggtcaacaa

SEQ ID NO: 385005 - DNA, 19 bp, Homo sapiens
  siRNA target sequence for FLJ21919 (NM_023015.3,1502-1520).
gtgcgatttggtcaacaaa

SEQ ID NO: 385006 - DNA, 19 bp, Homo sapiens
  siRNA target sequence for FLJ21919 (NM_023015.3,1586-1604).
gacctcattcgctacatct

SEQ ID NO: 385007 - DNA, 19 bp, Homo sapiens
  siRNA target sequence for FLJ21919 (NM_023015.3,1608-1626).
gggtagtccacccttctaa

SEQ ID NO: 385008 - DNA, 19 bp, Homo sapiens
  siRNA target sequence for FLJ21919 (NM_023015.3,1609-1627).
ggtagtccacccttctaat

SEQ ID NO: 385009 - DNA, 19 bp, Homo sapiens
  siRNA target sequence for FLJ21919 (NM_023015.3,1615-1633).
ccacccttctaatgaagta

SEQ ID NO: 385010 - DNA, 19 bp, Homo sapiens
  siRNA target sequence for FLJ21919 (NM_023015.3,1631-1649).
gtactgagttcagatatct

SEQ ID NO: 385011 - DNA, 19 bp, Homo sapiens
  siRNA target sequence for FLJ21919 (NM_023015.3,1655-1673).
cggtgggccatcattggtt

SEQ ID NO: 385012 - DNA, 19 bp, Homo sapiens
  siRNA target sequence for FLJ21919 (NM_023015.3,1681-1699).
gacaacgtgcacgtcaaat

SEQ ID NO: 385013 - DNA, 19 bp, Homo sapiens
  siRNA target sequence for FLJ21919 (NM_023015.3,1683-1701).
caacgtgcacgtcaaatgt

SEQ ID NO: 385014 - DNA, 19 bp, Homo sapiens
  siRNA target sequence for FLJ21919 (NM_023015.3,1757-1775).
gacaaggatagcattatga

SEQ ID NO: 385015 - DNA, 19 bp, Homo sapiens
  siRNA target sequence for FLJ21919 (NM_023015.3,1897-1915).
cgtgcggcagggtgtcttt

SEQ ID NO: 385016 - DNA, 19 bp, Homo sapiens
  siRNA target sequence for FLJ21919 (NM_023015.3,1898-1916).
gtgcggcagggtgtctttt

SEQ ID NO: 385017 - DNA, 19 bp, Homo sapiens
  siRNA target sequence for FLJ21919 (NM_023015.3,1901-1919).
cggcagggtgtcttttcct

SEQ ID NO: 385018 - DNA, 19 bp, Homo sapiens
  siRNA target sequence for FLJ21919 (NM_023015.3,1973-1991).
gacaaccctaagttggata

SEQ ID NO: 385019 - DNA, 19 bp, Homo sapiens
  siRNA target sequence for FLJ21919 (NM_023015.3,2049-2067).
cacctgtggaagtcaaaat

SEQ ID NO: 385020 - DNA, 19 bp, Homo sapiens
  siRNA target sequence for FLJ21919 (NM_023015.3,2087-2105).
gagatggacaaccatatgt

SEQ ID NO: 385021 - DNA, 19 bp, Homo sapiens
  siRNA target sequence for FLJ21919 (NM_023015.3,2098-2116).
ccatatgtcggataaggat

SEQ ID NO: 385022 - DNA, 19 bp, Homo sapiens
  siRNA target sequence for FLJ21919 (NM_023015.3,2114-2132).
gatgagagttgctatgaca

SEQ ID NO: 385023 - DNA, 19 bp, Homo sapiens
  siRNA target sequence for FLJ21919 (NM_023015.3,2297-2315).
ctacagaaggggagtgata

SEQ ID NO: 385024 - DNA, 19 bp, Homo sapiens
  siRNA target sequence for FLJ21919 (NM_023015.3,2328-2346).
gtgaggtcatgcaggaaat

SEQ ID NO: 385025 - DNA, 19 bp, Homo sapiens
  siRNA target sequence for FLJ21919 (NM_023015.3,2444-2462).
gtcctgcctgaggagatta

SEQ ID NO: 385026 - DNA, 19 bp, Homo sapiens
  siRNA target sequence for FLJ21919 (NM_023015.3,2489-2507).
ggaaagcctctgtacctaa

SEQ ID NO: 385027 - DNA, 19 bp, Homo sapiens
  siRNA target sequence for FLJ21919 (NM_023015.3,2490-2508).
gaaagcctctgtacctaat

SEQ ID NO: 385028 - DNA, 19 bp, Homo sapiens
  siRNA target sequence for FLJ21919 (NM_023015.3,2498-2516).
ctgtacctaatatttagga

SEQ ID NO: 385029 - DNA, 19 bp, Homo sapiens
  siRNA target sequence for FLJ21919 (NM_023015.3,2545-2563).
cagcttctctctacttcta

SEQ ID NO: 385030 - DNA, 19 bp, Homo sapiens
  siRNA target sequence for FLJ21919 (NM_023015.3,2566-2584).
ccttctctccgagctatat

SEQ ID NO: 385031 - DNA, 19 bp, Homo sapiens
  siRNA target sequence for FLJ21919 (NM_023015.3,2570-2588).
ctctccgagctatatcaga

SEQ ID NO: 385032 - DNA, 19 bp, Homo sapiens
  siRNA target sequence for FLJ21919 (NM_023015.3,2604-2622).
gctaccacctgctctacta

SEQ ID NO: 385033 - DNA, 19 bp, Homo sapiens
  siRNA target sequence for FLJ21919 (NM_023015.3,2656-2674).
gaacctgtacgagtcattt

SEQ ID NO: 385034 - DNA, 19 bp, Homo sapiens
  siRNA target sequence for FLJ21919 (NM_023015.3,2773-2791).
ctccatctacacagagttt

SEQ ID NO: 385035 - DNA, 19 bp, Homo sapiens
  siRNA target sequence for FLJ21919 (NM_023015.3,2887-2905).
gggtaacctggttatgttt

SEQ ID NO: 385036 - DNA, 19 bp, Homo sapiens
  siRNA target sequence for FLJ21919 (NM_023015.3,2893-2911).
cctggttatgtttcgaaaa

SEQ ID NO: 385037 - DNA, 19 bp, Homo sapiens
  siRNA target sequence for FLJ21919 (NM_023015.3,2897-2915).
gttatgtttcgaaaagact

SEQ ID NO: 385038 - DNA, 19 bp, Homo sapiens
  siRNA target sequence for FLJ21919 (NM_023015.3,2921-2939).
ctcaacatactcattcaga

SEQ ID NO: 385039 - DNA, 19 bp, Homo sapiens
  siRNA target sequence for FLJ21919 (NM_023015.3,2951-2969).
gagacctttgagcagtatt

SEQ ID NO: 385040 - DNA, 19 bp, Homo sapiens
  siRNA target sequence for FLJ21919 (NM_023015.3,2953-2971).
gacctttgagcagtattgt

SEQ ID NO: 385041 - DNA, 19 bp, Homo sapiens
  siRNA target sequence for FLJ21919 (NM_023015.3,3077-3095).
cttcaactccgaagagaaa

SEQ ID NO: 385042 - DNA, 19 bp, Homo sapiens
  siRNA target sequence for FLJ21919 (NM_023015.3,3425-3443).
gcccacaagatgaaattca

SEQ ID NO: 385043 - DNA, 19 bp, Homo sapiens
  siRNA target sequence for FLJ21919 (NM_023015.3,3454-3472).
ctccctggcggaggaatat

SEQ ID NO: 385044 - DNA, 19 bp, Homo sapiens
  siRNA target sequence for FLJ21870 (NM_023016.1,1009-1027).
gtcaagcgggacttcatta

SEQ ID NO: 385045 - DNA, 19 bp, Homo sapiens
  siRNA target sequence for SPATS2 (NM_023071.1,465-483).
gaggagcttttgagaacat

SEQ ID NO: 385046 - DNA, 19 bp, Homo sapiens
  siRNA target sequence for SPATS2 (NM_023071.1,506-524).
cgtgcaatagttcctaata

SEQ ID NO: 385047 - DNA, 19 bp, Homo sapiens
  siRNA target sequence for SPATS2 (NM_023071.1,507-525).
gtgcaatagttcctaataa

SEQ ID NO: 385048 - DNA, 19 bp, Homo sapiens
  siRNA target sequence for SPATS2 (NM_023071.1,703-721).
catcccagattccagtaaa

SEQ ID NO: 385049 - DNA, 19 bp, Homo sapiens
  siRNA target sequence for SPATS2 (NM_023071.1,706-724).
cccagattccagtaaatca

SEQ ID NO: 385050 - DNA, 19 bp, Homo sapiens
  siRNA target sequence for SPATS2 (NM_023071.1,841-859).
ggagacactttcaatagat

SEQ ID NO: 385051 - DNA, 19 bp, Homo sapiens
  siRNA target sequence for SPATS2 (NM_023071.1,881-899).
gagtctgccatgctagata

SEQ ID NO: 385052 - DNA, 19 bp, Homo sapiens
  siRNA target sequence for SPATS2 (NM_023071.1,967-985).
gcactctattcacaattct

SEQ ID NO: 385053 - DNA, 19 bp, Homo sapiens
  siRNA target sequence for SPATS2 (NM_023071.1,970-988).
ctctattcacaattctcaa

SEQ ID NO: 385054 - DNA, 19 bp, Homo sapiens
  siRNA target sequence for SPATS2 (NM_023071.1,1020-1038).
gacctaccacagaaactca

SEQ ID NO: 385055 - DNA, 19 bp, Homo sapiens
  siRNA target sequence for SPATS2 (NM_023071.1,1072-1090).
cgccaccagtaaaaagcta

SEQ ID NO: 385056 - DNA, 19 bp, Homo sapiens
  siRNA target sequence for SPATS2 (NM_023071.1,1073-1091).
gccaccagtaaaaagctaa

SEQ ID NO: 385057 - DNA, 19 bp, Homo sapiens
  siRNA target sequence for SPATS2 (NM_023071.1,1087-1105).
gctaagttccaatattgaa

SEQ ID NO: 385058 - DNA, 19 bp, Homo sapiens
  siRNA target sequence for SPATS2 (NM_023071.1,1146-1164).
cacggtatcgagttgtagt

SEQ ID NO: 385059 - DNA, 19 bp, Homo sapiens
  siRNA target sequence for SPATS2 (NM_023071.1,1148-1166).
cggtatcgagttgtagtta

SEQ ID NO: 385060 - DNA, 19 bp, Homo sapiens
  siRNA target sequence for SPATS2 (NM_023071.1,1149-1167).
ggtatcgagttgtagttaa

SEQ ID NO: 385061 - DNA, 19 bp, Homo sapiens
  siRNA target sequence for SPATS2 (NM_023071.1,1150-1168).
gtatcgagttgtagttaaa

SEQ ID NO: 385062 - DNA, 19 bp, Homo sapiens
  siRNA target sequence for SPATS2 (NM_023071.1,1177-1195).
ggatgcctccattaagaaa

SEQ ID NO: 385063 - DNA, 19 bp, Homo sapiens
  siRNA target sequence for SPATS2 (NM_023071.1,1178-1196).
gatgcctccattaagaaaa

SEQ ID NO: 385064 - DNA, 19 bp, Homo sapiens
  siRNA target sequence for SPATS2 (NM_023071.1,1248-1266).
cgttgcttgctgaaatgga

SEQ ID NO: 385065 - DNA, 19 bp, Homo sapiens
  siRNA target sequence for SPATS2 (NM_023071.1,1336-1354).
gactcatgtggctgttcaa

SEQ ID NO: 385066 - DNA, 19 bp, Homo sapiens
  siRNA target sequence for SPATS2 (NM_023071.1,1338-1356).
ctcatgtggctgttcaaat

SEQ ID NO: 385067 - DNA, 19 bp, Homo sapiens
  siRNA target sequence for SPATS2 (NM_023071.1,1357-1375).
gtcagagcagcaattggtt

SEQ ID NO: 385068 - DNA, 19 bp, Homo sapiens
  siRNA target sequence for SPATS2 (NM_023071.1,1444-1462).
ccggttcacctgtgatgta

SEQ ID NO: 385069 - DNA, 19 bp, Homo sapiens
  siRNA target sequence for SPATS2 (NM_023071.1,1457-1475).
gatgtagagaccctaaaga

SEQ ID NO: 385070 - DNA, 19 bp, Homo sapiens
  siRNA target sequence for SPATS2 (NM_023071.1,1535-1553).
cgatgtagctcagttacat

SEQ ID NO: 385071 - DNA, 19 bp, Homo sapiens
  siRNA target sequence for SPATS2 (NM_023071.1,1561-1579).
cttgagtagcccaagtgat

SEQ ID NO: 385072 - DNA, 19 bp, Homo sapiens
  siRNA target sequence for SPATS2 (NM_023071.1,1620-1638).
gccttacaagtgctaacaa

SEQ ID NO: 385073 - DNA, 19 bp, Homo sapiens
  siRNA target sequence for SPATS2 (NM_023071.1,1622-1640).
cttacaagtgctaacaaga

SEQ ID NO: 385074 - DNA, 19 bp, Homo sapiens
  siRNA target sequence for SPATS2 (NM_023071.1,1629-1647).
gtgctaacaagaaaaactt

SEQ ID NO: 385075 - DNA, 19 bp, Homo sapiens
  siRNA target sequence for SPATS2 (NM_023071.1,1801-1819).
cagtatgggtcgttacaga

SEQ ID NO: 385076 - DNA, 19 bp, Homo sapiens
  siRNA target sequence for SPATS2 (NM_023071.1,1803-1821).
gtatgggtcgttacagaaa

SEQ ID NO: 385077 - DNA, 19 bp, Homo sapiens
  siRNA target sequence for SPATS2 (NM_023071.1,1822-1840).
cagctcgtggtattcatct

SEQ ID NO: 385078 - DNA, 19 bp, Homo sapiens
  siRNA target sequence for SPATS2 (NM_023071.1,1950-1968).
ctcccacgccttcattcaa

SEQ ID NO: 385079 - DNA, 19 bp, Homo sapiens
  siRNA target sequence for FLJ13231 (NM_023073.2,782-800).
ggccgatgcagatattctt

SEQ ID NO: 385080 - DNA, 19 bp, Homo sapiens
  siRNA target sequence for FLJ13231 (NM_023073.2,783-801).
gccgatgcagatattcttt

SEQ ID NO: 385081 - DNA, 19 bp, Homo sapiens
  siRNA target sequence for FLJ13231 (NM_023073.2,808-826).
catttcaacttctgataga

SEQ ID NO: 385082 - DNA, 19 bp, Homo sapiens
  siRNA target sequence for FLJ13231 (NM_023073.2,866-884).
gccattcggcttgtatctt

SEQ ID NO: 385083 - DNA, 19 bp, Homo sapiens
  siRNA target sequence for FLJ13231 (NM_023073.2,904-922).
gtccccagccagctattct

SEQ ID NO: 385084 - DNA, 19 bp, Homo sapiens
  siRNA target sequence for FLJ13231 (NM_023073.2,908-926).
ccagccagctattcttagt

SEQ ID NO: 385085 - DNA, 19 bp, Homo sapiens
  siRNA target sequence for FLJ13231 (NM_023073.2,911-929).
gccagctattcttagtgaa

SEQ ID NO: 385086 - DNA, 19 bp, Homo sapiens
  siRNA target sequence for FLJ13231 (NM_023073.2,977-995).
gaaggtatctggaatcctt

SEQ ID NO: 385087 - DNA, 19 bp, Homo sapiens
  siRNA target sequence for FLJ13231 (NM_023073.2,1126-1144).
gtccttttcctcagtcatt

SEQ ID NO: 385088 - DNA, 19 bp, Homo sapiens
  siRNA target sequence for FLJ13231 (NM_023073.2,1139-1157).
gtcattacttaattactgt

SEQ ID NO: 385089 - DNA, 19 bp, Homo sapiens
  siRNA target sequence for FLJ13231 (NM_023073.2,1161-1179).
ggaggtatcgcatttttta

SEQ ID NO: 385090 - DNA, 19 bp, Homo sapiens
  siRNA target sequence for FLJ13231 (NM_023073.2,1199-1217).
ccacaagcttgatgaagtt

SEQ ID NO: 385091 - DNA, 19 bp, Homo sapiens
  siRNA target sequence for FLJ13231 (NM_023073.2,1200-1218).
cacaagcttgatgaagttt

SEQ ID NO: 385092 - DNA, 19 bp, Homo sapiens
  siRNA target sequence for FLJ13231 (NM_023073.2,1205-1223).
gcttgatgaagtttccatt

SEQ ID NO: 385093 - DNA, 19 bp, Homo sapiens
  siRNA target sequence for FLJ13231 (NM_023073.2,1269-1287).
ctgcatgtccgtgataagt

SEQ ID NO: 385094 - DNA, 19 bp, Homo sapiens
  siRNA target sequence for FLJ13231 (NM_023073.2,1275-1293).
gtccgtgataagttatcct

SEQ ID NO: 385095 - DNA, 19 bp, Homo sapiens
  siRNA target sequence for FLJ13231 (NM_023073.2,1277-1295).
ccgtgataagttatcctat

SEQ ID NO: 385096 - DNA, 19 bp, Homo sapiens
  siRNA target sequence for FLJ13231 (NM_023073.2,1278-1296).
cgtgataagttatcctata

SEQ ID NO: 385097 - DNA, 19 bp, Homo sapiens
  siRNA target sequence for FLJ13231 (NM_023073.2,1281-1299).
gataagttatcctatagtt

SEQ ID NO: 385098 - DNA, 19 bp, Homo sapiens
  siRNA target sequence for FLJ13231 (NM_023073.2,1292-1310).
ctatagttgcaggcaatat

SEQ ID NO: 385099 - DNA, 19 bp, Homo sapiens
  siRNA target sequence for FLJ13231 (NM_023073.2,1297-1315).
gttgcaggcaatatcagaa

SEQ ID NO: 385100 - DNA, 19 bp, Homo sapiens
  siRNA target sequence for FLJ13231 (NM_023073.2,1346-1364).
ccttgaagtggagtttgat

SEQ ID NO: 385101 - DNA, 19 bp, Homo sapiens
  siRNA target sequence for FLJ13231 (NM_023073.2,1392-1410).
gcagtggaatgggcttata

SEQ ID NO: 385102 - DNA, 19 bp, Homo sapiens
  siRNA target sequence for FLJ13231 (NM_023073.2,1395-1413).
gtggaatgggcttatagaa

SEQ ID NO: 385103 - DNA, 19 bp, Homo sapiens
  siRNA target sequence for FLJ13231 (NM_023073.2,1419-1437).
cctttctctcggtttttta

SEQ ID NO: 385104 - DNA, 19 bp, Homo sapiens
  siRNA target sequence for FLJ13231 (NM_023073.2,1446-1464).
gaacttattcaggatataa

SEQ ID NO: 385105 - DNA, 19 bp, Homo sapiens
  siRNA target sequence for FLJ13231 (NM_023073.2,1509-1527).
gaaattttcgtgaaagcat

SEQ ID NO: 385106 - DNA, 19 bp, Homo sapiens
  siRNA target sequence for FLJ13231 (NM_023073.2,1541-1559).
ggacgtgagggttccttta

SEQ ID NO: 385107 - DNA, 19 bp, Homo sapiens
  siRNA target sequence for FLJ13231 (NM_023073.2,1542-1560).
gacgtgagggttcctttaa

SEQ ID NO: 385108 - DNA, 19 bp, Homo sapiens
  siRNA target sequence for FLJ13231 (NM_023073.2,1544-1562).
cgtgagggttcctttaaga

SEQ ID NO: 385109 - DNA, 19 bp, Homo sapiens
  siRNA target sequence for FLJ13231 (NM_023073.2,1667-1685).
ggtgaaagctctaaaacgt

SEQ ID NO: 385110 - DNA, 19 bp, Homo sapiens
  siRNA target sequence for FLJ13231 (NM_023073.2,1701-1719).
ggctcttttgaagtgaata

SEQ ID NO: 385111 - DNA, 19 bp, Homo sapiens
  siRNA target sequence for FLJ13231 (NM_023073.2,1715-1733).
gaatatatgggaaccaatt

SEQ ID NO: 385112 - DNA, 19 bp, Homo sapiens
  siRNA target sequence for FLJ13231 (NM_023073.2,1810-1828).
cagaactaggagattctgt

SEQ ID NO: 385113 - DNA, 19 bp, Homo sapiens
  siRNA target sequence for FLJ13231 (NM_023073.2,1860-1878).
gctttgtcggttgaagaaa

SEQ ID NO: 385114 - DNA, 19 bp, Homo sapiens
  siRNA target sequence for FLJ13231 (NM_023073.2,1882-1900).
gtaggataaatatctatca

SEQ ID NO: 385115 - DNA, 19 bp, Homo sapiens
  siRNA target sequence for FLJ13231 (NM_023073.2,1917-1935).
cacatggaattaacatcaa

SEQ ID NO: 385116 - DNA, 19 bp, Homo sapiens
  siRNA target sequence for FLJ13231 (NM_023073.2,2045-2063).
ggaatttgaacgtgatgat

SEQ ID NO: 385117 - DNA, 19 bp, Homo sapiens
  siRNA target sequence for FLJ13231 (NM_023073.2,2055-2073).
cgtgatgatgatgaatata

SEQ ID NO: 385118 - DNA, 19 bp, Homo sapiens
  siRNA target sequence for FLJ13231 (NM_023073.2,2081-2099).
ccttgatctgtttttgagt

SEQ ID NO: 385119 - DNA, 19 bp, Homo sapiens
  siRNA target sequence for FLJ13231 (NM_023073.2,2131-2149).
gggatgctgacattccatt

SEQ ID NO: 385120 - DNA, 19 bp, Homo sapiens
  siRNA target sequence for FLJ13231 (NM_023073.2,2132-2150).
ggatgctgacattccattt

SEQ ID NO: 385121 - DNA, 19 bp, Homo sapiens
  siRNA target sequence for FLJ13231 (NM_023073.2,2139-2157).
gacattccatttctaacta

SEQ ID NO: 385122 - DNA, 19 bp, Homo sapiens
  siRNA target sequence for FLJ13231 (NM_023073.2,2141-2159).
cattccatttctaactagt

SEQ ID NO: 385123 - DNA, 19 bp, Homo sapiens
  siRNA target sequence for FLJ13231 (NM_023073.2,2226-2244).
cgacatcagagcaaaacta

SEQ ID NO: 385124 - DNA, 19 bp, Homo sapiens
  siRNA target sequence for FLJ13231 (NM_023073.2,2227-2245).
gacatcagagcaaaactaa

SEQ ID NO: 385125 - DNA, 19 bp, Homo sapiens
  siRNA target sequence for FLJ13231 (NM_023073.2,2242-2260).
ctaaaagccagaatgtgtt

SEQ ID NO: 385126 - DNA, 19 bp, Homo sapiens
  siRNA target sequence for FLJ13231 (NM_023073.2,2290-2308).
ctgagtcctatgaatcaga

SEQ ID NO: 385127 - DNA, 19 bp, Homo sapiens
  siRNA target sequence for FLJ13231 (NM_023073.2,2294-2312).
gtcctatgaatcagaaaaa

SEQ ID NO: 385128 - DNA, 19 bp, Homo sapiens
  siRNA target sequence for FLJ13231 (NM_023073.2,2365-2383).
catcatcagtactggttaa

SEQ ID NO: 385129 - DNA, 19 bp, Homo sapiens
  siRNA target sequence for FLJ13231 (NM_023073.2,2368-2386).
catcagtactggttaatca

SEQ ID NO: 385130 - DNA, 19 bp, Homo sapiens
  siRNA target sequence for FLJ13231 (NM_023073.2,2378-2396).
ggttaatcaagggatcaaa

SEQ ID NO: 385131 - DNA, 19 bp, Homo sapiens
  siRNA target sequence for FLJ13231 (NM_023073.2,2390-2408).
gatcaaaccttttttacaa

SEQ ID NO: 385132 - DNA, 19 bp, Homo sapiens
  siRNA target sequence for FLJ13231 (NM_023073.2,2547-2565).
cccaagtccattaaaacta

SEQ ID NO: 385133 - DNA, 19 bp, Homo sapiens
  siRNA target sequence for FLJ13231 (NM_023073.2,2583-2601).
gctattcagtgcaatgata

SEQ ID NO: 385134 - DNA, 19 bp, Homo sapiens
  siRNA target sequence for FLJ13231 (NM_023073.2,2619-2637).
cttcctttagcactaaaca

SEQ ID NO: 385135 - DNA, 19 bp, Homo sapiens
  siRNA target sequence for FLJ13231 (NM_023073.2,2653-2671).
gaagactgctggaatggat

SEQ ID NO: 385136 - DNA, 19 bp, Homo sapiens
  siRNA target sequence for FLJ13231 (NM_023073.2,2658-2676).
ctgctggaatggatgataa

SEQ ID NO: 385137 - DNA, 19 bp, Homo sapiens
  siRNA target sequence for FLJ13231 (NM_023073.2,2669-2687).
gatgataaggtggtctaat

SEQ ID NO: 385138 - DNA, 19 bp, Homo sapiens
  siRNA target sequence for FLJ13231 (NM_023073.2,2672-2690).
gataaggtggtctaataga

SEQ ID NO: 385139 - DNA, 19 bp, Homo sapiens
  siRNA target sequence for FLJ13231 (NM_023073.2,2699-2717).
ctgtgattctggtataact

SEQ ID NO: 385140 - DNA, 19 bp, Homo sapiens
  siRNA target sequence for FLJ13231 (NM_023073.2,2701-2719).
gtgattctggtataactga

SEQ ID NO: 385141 - DNA, 19 bp, Homo sapiens
  siRNA target sequence for FLJ13231 (NM_023073.2,2728-2746).
ctgagtacagtccagtaat

SEQ ID NO: 385142 - DNA, 19 bp, Homo sapiens
  siRNA target sequence for FLJ13231 (NM_023073.2,2732-2750).
gtacagtccagtaattcgt

SEQ ID NO: 385143 - DNA, 19 bp, Homo sapiens
  siRNA target sequence for FLJ13231 (NM_023073.2,2737-2755).
gtccagtaattcgtgtaaa

SEQ ID NO: 385144 - DNA, 19 bp, Homo sapiens
  siRNA target sequence for FLJ13231 (NM_023073.2,2869-2887).
gtcagattggacccaatat

SEQ ID NO: 385145 - DNA, 19 bp, Homo sapiens
  siRNA target sequence for FLJ13231 (NM_023073.2,2891-2909).
gagggagagcaaatcagat

SEQ ID NO: 385146 - DNA, 19 bp, Homo sapiens
  siRNA target sequence for FLJ13231 (NM_023073.2,3137-3155).
gcacatatcagactatgaa

SEQ ID NO: 385147 - DNA, 19 bp, Homo sapiens
  siRNA target sequence for FLJ13231 (NM_023073.2,3192-3210).
cccagtcttgccatttgca

SEQ ID NO: 385148 - DNA, 19 bp, Homo sapiens
  siRNA target sequence for FLJ13231 (NM_023073.2,3193-3211).
ccagtcttgccatttgcat

SEQ ID NO: 385149 - DNA, 19 bp, Homo sapiens
  siRNA target sequence for FLJ13231 (NM_023073.2,3202-3220).
ccatttgcatgatgacttt

SEQ ID NO: 385150 - DNA, 19 bp, Homo sapiens
  siRNA target sequence for FLJ13231 (NM_023073.2,3273-3291).
gaaccactggagacaatta

SEQ ID NO: 385151 - DNA, 19 bp, Homo sapiens
  siRNA target sequence for FLJ13231 (NM_023073.2,3296-3314).
ggaaaaatcgactgaacaa

SEQ ID NO: 385152 - DNA, 19 bp, Homo sapiens
  siRNA target sequence for FLJ13231 (NM_023073.2,3304-3322).
cgactgaacaaaaaggtat

SEQ ID NO: 385153 - DNA, 19 bp, Homo sapiens
  siRNA target sequence for FLJ13231 (NM_023073.2,3323-3341).
gatcgaagccttttcacat

SEQ ID NO: 385154 - DNA, 19 bp, Homo sapiens
  siRNA target sequence for FLJ13231 (NM_023073.2,3372-3390).
gtagatacgagttcagaaa

SEQ ID NO: 385155 - DNA, 19 bp, Homo sapiens
  siRNA target sequence for FLJ13231 (NM_023073.2,3380-3398).
gagttcagaaatttctagt

SEQ ID NO: 385156 - DNA, 19 bp, Homo sapiens
  siRNA target sequence for FLJ13231 (NM_023073.2,3397-3415).
gtgcacagatttctacata

SEQ ID NO: 385157 - DNA, 19 bp, Homo sapiens
  siRNA target sequence for FLJ13231 (NM_023073.2,3446-3464).
gatatcaaatggagtcaat

SEQ ID NO: 385158 - DNA, 19 bp, Homo sapiens
  siRNA target sequence for FLJ13231 (NM_023073.2,3522-3540).
gctcagttaccagattgtt

SEQ ID NO: 385159 - DNA, 19 bp, Homo sapiens
  siRNA target sequence for FLJ13231 (NM_023073.2,3608-3626).
catgagcctaatgcaaata

SEQ ID NO: 385160 - DNA, 19 bp, Homo sapiens
  siRNA target sequence for FLJ13231 (NM_023073.2,3627-3645).
gtaggatcatcctttgcta

SEQ ID NO: 385161 - DNA, 19 bp, Homo sapiens
  siRNA target sequence for FLJ13231 (NM_023073.2,3652-3670).
cagatacacaacaacttgt

SEQ ID NO: 385162 - DNA, 19 bp, Homo sapiens
  siRNA target sequence for FLJ13231 (NM_023073.2,3696-3714).
ggggaaagccaagaatcaa

SEQ ID NO: 385163 - DNA, 19 bp, Homo sapiens
  siRNA target sequence for FLJ13231 (NM_023073.2,3844-3862).
ctatcccatctggtcaaaa

SEQ ID NO: 385164 - DNA, 19 bp, Homo sapiens
  siRNA target sequence for FLJ13231 (NM_023073.2,3889-3907).
cacatgggagtattccttt

SEQ ID NO: 385165 - DNA, 19 bp, Homo sapiens
  siRNA target sequence for FLJ13231 (NM_023073.2,3891-3909).
catgggagtattcctttat

SEQ ID NO: 385166 - DNA, 19 bp, Homo sapiens
  siRNA target sequence for FLJ13231 (NM_023073.2,3895-3913).
ggagtattcctttatgtca

SEQ ID NO: 385167 - DNA, 19 bp, Homo sapiens
  siRNA target sequence for FLJ13231 (NM_023073.2,3896-3914).
gagtattcctttatgtcaa

SEQ ID NO: 385168 - DNA, 19 bp, Homo sapiens
  siRNA target sequence for FLJ13231 (NM_023073.2,3962-3980).
cttaccatccacttcgttt

SEQ ID NO: 385169 - DNA, 19 bp, Homo sapiens
  siRNA target sequence for FLJ13231 (NM_023073.2,4019-4037).
gtccacaccttctgttgtt

SEQ ID NO: 385170 - DNA, 19 bp, Homo sapiens
  siRNA target sequence for FLJ13231 (NM_023073.2,4051-4069).
gacttatcccacatgcaaa

SEQ ID NO: 385171 - DNA, 19 bp, Homo sapiens
  siRNA target sequence for FLJ13231 (NM_023073.2,4260-4278).
gcatcccatttgaatgtaa

SEQ ID NO: 385172 - DNA, 19 bp, Homo sapiens
  siRNA target sequence for FLJ13231 (NM_023073.2,4322-4340).
gacgtgggcagaaactgta

SEQ ID NO: 385173 - DNA, 19 bp, Homo sapiens
  siRNA target sequence for FLJ13231 (NM_023073.2,4324-4342).
cgtgggcagaaactgtaat

SEQ ID NO: 385174 - DNA, 19 bp, Homo sapiens
  siRNA target sequence for FLJ13231 (NM_023073.2,4328-4346).
ggcagaaactgtaattaca

SEQ ID NO: 385175 - DNA, 19 bp, Homo sapiens
  siRNA target sequence for FLJ13231 (NM_023073.2,4407-4425).
caggactcttcagtgttta

SEQ ID NO: 385176 - DNA, 19 bp, Homo sapiens
  siRNA target sequence for FLJ13231 (NM_023073.2,4487-4505).
ctttggacttccgttacta

SEQ ID NO: 385177 - DNA, 19 bp, Homo sapiens
  siRNA target sequence for FLJ13231 (NM_023073.2,4492-4510).
gacttccgttactatacct

SEQ ID NO: 385178 - DNA, 19 bp, Homo sapiens
  siRNA target sequence for FLJ13231 (NM_023073.2,4511-4529).
gccacttaaacctcctaat

SEQ ID NO: 385179 - DNA, 19 bp, Homo sapiens
  siRNA target sequence for FLJ13231 (NM_023073.2,4512-4530).
ccacttaaacctcctaata

SEQ ID NO: 385180 - DNA, 19 bp, Homo sapiens
  siRNA target sequence for FLJ13231 (NM_023073.2,4515-4533).
cttaaacctcctaatatgt

SEQ ID NO: 385181 - DNA, 19 bp, Homo sapiens
  siRNA target sequence for FLJ13231 (NM_023073.2,4540-4558).
caacctcaagagcatctat

SEQ ID NO: 385182 - DNA, 19 bp, Homo sapiens
  siRNA target sequence for FLJ13231 (NM_023073.2,4546-4564).
caagagcatctattacagt

SEQ ID NO: 385183 - DNA, 19 bp, Homo sapiens
  siRNA target sequence for FLJ13231 (NM_023073.2,4581-4599).
caacctatagcagaagaaa

SEQ ID NO: 385184 - DNA, 19 bp, Homo sapiens
  siRNA target sequence for FLJ13231 (NM_023073.2,4632-4650).
catttgtccccagaaaata

SEQ ID NO: 385185 - DNA, 19 bp, Homo sapiens
  siRNA target sequence for FLJ13231 (NM_023073.2,4641-4659).
ccagaaaataggtgcaaaa

SEQ ID NO: 385186 - DNA, 19 bp, Homo sapiens
  siRNA target sequence for FLJ13231 (NM_023073.2,4686-4704).
ctcattgcgtttaaacaaa

SEQ ID NO: 385187 - DNA, 19 bp, Homo sapiens
  siRNA target sequence for FLJ13231 (NM_023073.2,4750-4768).
gacaccttcaacttctaaa

SEQ ID NO: 385188 - DNA, 19 bp, Homo sapiens
  siRNA target sequence for FLJ13231 (NM_023073.2,4842-4860).
gagctgcaagaaaaaagat

SEQ ID NO: 385189 - DNA, 19 bp, Homo sapiens
  siRNA target sequence for FLJ13231 (NM_023073.2,4997-5015).
cgttccttttgaaatgcta

SEQ ID NO: 385190 - DNA, 19 bp, Homo sapiens
  siRNA target sequence for FLJ13231 (NM_023073.2,5012-5030).
gctacaagatgataatact

SEQ ID NO: 385191 - DNA, 19 bp, Homo sapiens
  siRNA target sequence for FLJ13231 (NM_023073.2,5066-5084).
gaaagctataggaagtcaa

SEQ ID NO: 385192 - DNA, 19 bp, Homo sapiens
  siRNA target sequence for FLJ13231 (NM_023073.2,5138-5156).
cttggtcccagatgtctat

SEQ ID NO: 385193 - DNA, 19 bp, Homo sapiens
  siRNA target sequence for FLJ13231 (NM_023073.2,5141-5159).
ggtcccagatgtctatcta

SEQ ID NO: 385194 - DNA, 19 bp, Homo sapiens
  siRNA target sequence for FLJ13231 (NM_023073.2,5142-5160).
gtcccagatgtctatctaa

SEQ ID NO: 385195 - DNA, 19 bp, Homo sapiens
  siRNA target sequence for FLJ13231 (NM_023073.2,5203-5221).
cctcaatacctcatacagt

SEQ ID NO: 385196 - DNA, 19 bp, Homo sapiens
  siRNA target sequence for FLJ13231 (NM_023073.2,5204-5222).
ctcaatacctcatacagta

SEQ ID NO: 385197 - DNA, 19 bp, Homo sapiens
  siRNA target sequence for FLJ13231 (NM_023073.2,5211-5229).
cctcatacagtaacaaact

SEQ ID NO: 385198 - DNA, 19 bp, Homo sapiens
  siRNA target sequence for FLJ13231 (NM_023073.2,5232-5250).
gttggacatacttatataa

SEQ ID NO: 385199 - DNA, 19 bp, Homo sapiens
  siRNA target sequence for FLJ13231 (NM_023073.2,5255-5273).
gattgacattgaagctaat

SEQ ID NO: 385200 - DNA, 19 bp, Homo sapiens
  siRNA target sequence for FLJ13231 (NM_023073.2,5307-5325).
ccttcaaatgataatgtta

SEQ ID NO: 385201 - DNA, 19 bp, Homo sapiens
  siRNA target sequence for FLJ13231 (NM_023073.2,5356-5374).
catcgtctgcagagttaca

SEQ ID NO: 385202 - DNA, 19 bp, Homo sapiens
  siRNA target sequence for FLJ13231 (NM_023073.2,5359-5377).
cgtctgcagagttacatta

SEQ ID NO: 385203 - DNA, 19 bp, Homo sapiens
  siRNA target sequence for FLJ13231 (NM_023073.2,5360-5378).
gtctgcagagttacattat

SEQ ID NO: 385204 - DNA, 19 bp, Homo sapiens
  siRNA target sequence for FLJ13231 (NM_023073.2,5484-5502).
gcagaagattatctattgt

SEQ ID NO: 385205 - DNA, 19 bp, Homo sapiens
  siRNA target sequence for FLJ13231 (NM_023073.2,5573-5591).
cagtgctaagcttcagaaa

SEQ ID NO: 385206 - DNA, 19 bp, Homo sapiens
  siRNA target sequence for FLJ13231 (NM_023073.2,5597-5615).
cgagcagttgctagcaata

SEQ ID NO: 385207 - DNA, 19 bp, Homo sapiens
  siRNA target sequence for FLJ13231 (NM_023073.2,5648-5666).
ccccaagcctgaaatgcta

SEQ ID NO: 385208 - DNA, 19 bp, Homo sapiens
  siRNA target sequence for FLJ13231 (NM_023073.2,5656-5674).
ctgaaatgctagatctaca

SEQ ID NO: 385209 - DNA, 19 bp, Homo sapiens
  siRNA target sequence for FLJ13231 (NM_023073.2,5667-5685).
gatctacattgtgataaga

SEQ ID NO: 385210 - DNA, 19 bp, Homo sapiens
  siRNA target sequence for FLJ13231 (NM_023073.2,5689-5707).
gaccagtggatcacattga

SEQ ID NO: 385211 - DNA, 19 bp, Homo sapiens
  siRNA target sequence for FLJ13231 (NM_023073.2,5764-5782).
ctgaagaagtgcgtttttt

SEQ ID NO: 385212 - DNA, 19 bp, Homo sapiens
  siRNA target sequence for FLJ13231 (NM_023073.2,5766-5784).
gaagaagtgcgttttttga

SEQ ID NO: 385213 - DNA, 19 bp, Homo sapiens
  siRNA target sequence for FLJ13231 (NM_023073.2,5799-5817).
gaagatcaaagtgacaaaa

SEQ ID NO: 385214 - DNA, 19 bp, Homo sapiens
  siRNA target sequence for FLJ13231 (NM_023073.2,5918-5936).
cagtgatcagaatactact

SEQ ID NO: 385215 - DNA, 19 bp, Homo sapiens
  siRNA target sequence for FLJ13231 (NM_023073.2,5993-6011).
ccagatgactggattgact

SEQ ID NO: 385216 - DNA, 19 bp, Homo sapiens
  siRNA target sequence for FLJ13231 (NM_023073.2,5999-6017).
gactggattgactgatatt

SEQ ID NO: 385217 - DNA, 19 bp, Homo sapiens
  siRNA target sequence for FLJ13231 (NM_023073.2,6010-6028).
ctgatattgcagacattat

SEQ ID NO: 385218 - DNA, 19 bp, Homo sapiens
  siRNA target sequence for FLJ13231 (NM_023073.2,6023-6041).
cattattgatgaccttata

SEQ ID NO: 385219 - DNA, 19 bp, Homo sapiens
  siRNA target sequence for FLJ13231 (NM_023073.2,6122-6140).
cagacattcacaaagaact

SEQ ID NO: 385220 - DNA, 19 bp, Homo sapiens
  siRNA target sequence for FLJ13231 (NM_023073.2,6232-6250).
ggcaagaacatgatccttt

SEQ ID NO: 385221 - DNA, 19 bp, Homo sapiens
  siRNA target sequence for FLJ13231 (NM_023073.2,6267-6285).
ccactttacatgacttcaa

SEQ ID NO: 385222 - DNA, 19 bp, Homo sapiens
  siRNA target sequence for FLJ13231 (NM_023073.2,6288-6306).
gaaataaggctgagacaaa

SEQ ID NO: 385223 - DNA, 19 bp, Homo sapiens
  siRNA target sequence for FLJ13231 (NM_023073.2,6332-6350).
gctgctctctgaacactat

SEQ ID NO: 385224 - DNA, 19 bp, Homo sapiens
  siRNA target sequence for FLJ13231 (NM_023073.2,6333-6351).
ctgctctctgaacactata

SEQ ID NO: 385225 - DNA, 19 bp, Homo sapiens
  siRNA target sequence for FLJ13231 (NM_023073.2,6347-6365).
ctatagtcgtcgaatctca

SEQ ID NO: 385226 - DNA, 19 bp, Homo sapiens
  siRNA target sequence for FLJ13231 (NM_023073.2,6370-6388).
cgtacggtctgatgaatga

SEQ ID NO: 385227 - DNA, 19 bp, Homo sapiens
  siRNA target sequence for FLJ13231 (NM_023073.2,6371-6389).
gtacggtctgatgaatgaa

SEQ ID NO: 385228 - DNA, 19 bp, Homo sapiens
  siRNA target sequence for FLJ13231 (NM_023073.2,6376-6394).
gtctgatgaatgaactgtt

SEQ ID NO: 385229 - DNA, 19 bp, Homo sapiens
  siRNA target sequence for FLJ13231 (NM_023073.2,6418-6436).
ctctaccacagaaaccatt

SEQ ID NO: 385230 - DNA, 19 bp, Homo sapiens
  siRNA target sequence for FLJ13231 (NM_023073.2,6428-6446).
gaaaccattgcctaacaaa

SEQ ID NO: 385231 - DNA, 19 bp, Homo sapiens
  siRNA target sequence for FLJ13231 (NM_023073.2,6510-6528).
ggtcacagttttctaataa

SEQ ID NO: 385232 - DNA, 19 bp, Homo sapiens
  siRNA target sequence for FLJ13231 (NM_023073.2,6515-6533).
cagttttctaataaatcga

SEQ ID NO: 385233 - DNA, 19 bp, Homo sapiens
  siRNA target sequence for FLJ13231 (NM_023073.2,6627-6645).
gccactttcaccatacaga

SEQ ID NO: 385234 - DNA, 19 bp, Homo sapiens
  siRNA target sequence for FLJ13231 (NM_023073.2,6629-6647).
cactttcaccatacagaaa

SEQ ID NO: 385235 - DNA, 19 bp, Homo sapiens
  siRNA target sequence for FLJ13231 (NM_023073.2,6635-6653).
caccatacagaaaaaagct

SEQ ID NO: 385236 - DNA, 19 bp, Homo sapiens
  siRNA target sequence for FLJ13231 (NM_023073.2,6701-6719).
cttccaaaaaggctctaat

SEQ ID NO: 385237 - DNA, 19 bp, Homo sapiens
  siRNA target sequence for FLJ13231 (NM_023073.2,6704-6722).
ccaaaaaggctctaatgct

SEQ ID NO: 385238 - DNA, 19 bp, Homo sapiens
  siRNA target sequence for FLJ13231 (NM_023073.2,6830-6848).
ctggacgataccttcagaa

SEQ ID NO: 385239 - DNA, 19 bp, Homo sapiens
  siRNA target sequence for FLJ13231 (NM_023073.2,6832-6850).
ggacgataccttcagaaat

SEQ ID NO: 385240 - DNA, 19 bp, Homo sapiens
  siRNA target sequence for FLJ13231 (NM_023073.2,6840-6858).
ccttcagaaatccataaga

SEQ ID NO: 385241 - DNA, 19 bp, Homo sapiens
  siRNA target sequence for FLJ13231 (NM_023073.2,6844-6862).
cagaaatccataagattct

SEQ ID NO: 385242 - DNA, 19 bp, Homo sapiens
  siRNA target sequence for FLJ13231 (NM_023073.2,6994-7012).
ggaatgccatcgaagacat

SEQ ID NO: 385243 - DNA, 19 bp, Homo sapiens
  siRNA target sequence for FLJ12439 (NM_023077.1,136-154).
ggacccggacggttgctat

SEQ ID NO: 385244 - DNA, 19 bp, Homo sapiens
  siRNA target sequence for FLJ12439 (NM_023077.1,204-222).
ccaaggtgttgaagtttaa

SEQ ID NO: 385245 - DNA, 19 bp, Homo sapiens
  siRNA target sequence for FLJ12439 (NM_023077.1,230-248).
gagaaccagcacagtgata

SEQ ID NO: 385246 - DNA, 19 bp, Homo sapiens
  siRNA target sequence for FLJ12439 (NM_023077.1,241-259).
cagtgatagctgctacaaa

SEQ ID NO: 385247 - DNA, 19 bp, Homo sapiens
  siRNA target sequence for FLJ12439 (NM_023077.1,243-261).
gtgatagctgctacaaact

SEQ ID NO: 385248 - DNA, 19 bp, Homo sapiens
  siRNA target sequence for FLJ12439 (NM_023077.1,312-330).
ctgccgccaggtgcttttt

SEQ ID NO: 385249 - DNA, 19 bp, Homo sapiens
  siRNA target sequence for FLJ12439 (NM_023077.1,314-332).
gccgccaggtgctttttga

SEQ ID NO: 385250 - DNA, 19 bp, Homo sapiens
  siRNA target sequence for FLJ12439 (NM_023077.1,435-453).
gaaaggccagggactacta

SEQ ID NO: 385251 - DNA, 19 bp, Homo sapiens
  siRNA target sequence for FLJ12439 (NM_023077.1,440-458).
gccagggactactacacaa

SEQ ID NO: 385252 - DNA, 19 bp, Homo sapiens
  siRNA target sequence for FLJ12439 (NM_023077.1,541-559).
catggacctggcatgtaaa

SEQ ID NO: 385253 - DNA, 19 bp, Homo sapiens
  siRNA target sequence for FLJ12439 (NM_023077.1,658-676).
ggccgaggtgctaaaaaat

SEQ ID NO: 385254 - DNA, 19 bp, Homo sapiens
  siRNA target sequence for FLJ12439 (NM_023077.1,661-679).
cgaggtgctaaaaaatcga

SEQ ID NO: 385255 - DNA, 19 bp, Homo sapiens
  siRNA target sequence for FLJ12439 (NM_023077.1,710-728).
ggtgtccaacccttaacat

SEQ ID NO: 385256 - DNA, 19 bp, Homo sapiens
  siRNA target sequence for FLJ12439 (NM_023077.1,711-729).
gtgtccaacccttaacatt

SEQ ID NO: 385257 - DNA, 19 bp, Homo sapiens
  siRNA target sequence for FLJ20989 (NM_023080.1,243-261).
gcggcacagcgtcgaaaaa

SEQ ID NO: 385258 - DNA, 19 bp, Homo sapiens
  siRNA target sequence for FLJ20989 (NM_023080.1,244-262).
cggcacagcgtcgaaaaaa

SEQ ID NO: 385259 - DNA, 19 bp, Homo sapiens
  siRNA target sequence for FLJ20989 (NM_023080.1,479-497).
cgaaccctgcgcagcaaaa

SEQ ID NO: 385260 - DNA, 19 bp, Homo sapiens
  siRNA target sequence for FLJ20989 (NM_023080.1,523-541).
gctgatgcactccttgttt

SEQ ID NO: 385261 - DNA, 19 bp, Homo sapiens
  siRNA target sequence for FLJ20989 (NM_023080.1,664-682).
ctgcaggcctcgctctata

SEQ ID NO: 385262 - DNA, 19 bp, Homo sapiens
  siRNA target sequence for FLJ20989 (NM_023080.1,716-734).
gaagagtttaggttcaatt

SEQ ID NO: 385263 - DNA, 19 bp, Homo sapiens
  siRNA target sequence for FLJ20989 (NM_023080.1,719-737).
gagtttaggttcaatttct

SEQ ID NO: 385264 - DNA, 19 bp, Homo sapiens
  siRNA target sequence for FLJ13171 (NM_023923.2,322-340).
cacaacacctcctaccaaa

SEQ ID NO: 385265 - DNA, 19 bp, Homo sapiens
  siRNA target sequence for FLJ13171 (NM_023923.2,327-345).
cacctcctaccaaaaggaa

SEQ ID NO: 385266 - DNA, 19 bp, Homo sapiens
  siRNA target sequence for FLJ13171 (NM_023923.2,535-553).
gccaagcgatgccatgtta

SEQ ID NO: 385267 - DNA, 19 bp, Homo sapiens
  siRNA target sequence for FLJ13171 (NM_023923.2,536-554).
ccaagcgatgccatgttaa

SEQ ID NO: 385268 - DNA, 19 bp, Homo sapiens
  siRNA target sequence for FLJ13171 (NM_023923.2,537-555).
caagcgatgccatgttaaa

SEQ ID NO: 385269 - DNA, 19 bp, Homo sapiens
  siRNA target sequence for FLJ13171 (NM_023923.2,578-596).
gggaatgccagatcatcta

SEQ ID NO: 385270 - DNA, 19 bp, Homo sapiens
  siRNA target sequence for FLJ13171 (NM_023923.2,617-635).
gagccagtaagattagcaa

SEQ ID NO: 385271 - DNA, 19 bp, Homo sapiens
  siRNA target sequence for FLJ13171 (NM_023923.2,623-641).
gtaagattagcaagtctta

SEQ ID NO: 385272 - DNA, 19 bp, Homo sapiens
  siRNA target sequence for FLJ13171 (NM_023923.2,627-645).
gattagcaagtcttaggaa

SEQ ID NO: 385273 - DNA, 19 bp, Homo sapiens
  siRNA target sequence for FLJ13171 (NM_023923.2,633-651).
caagtcttaggaaagctat

SEQ ID NO: 385274 - DNA, 19 bp, Homo sapiens
  siRNA target sequence for FLJ13171 (NM_023923.2,715-733).
gtctgttcctgagaatgta

SEQ ID NO: 385275 - DNA, 19 bp, Homo sapiens
  siRNA target sequence for FLJ13171 (NM_023923.2,766-784).
cttgtcctcttctcatgaa

SEQ ID NO: 385276 - DNA, 19 bp, Homo sapiens
  siRNA target sequence for FLJ13171 (NM_023923.2,824-842).
ggcacggcaaggttcatca

SEQ ID NO: 385277 - DNA, 19 bp, Homo sapiens
  siRNA target sequence for FLJ13171 (NM_023923.2,825-843).
gcacggcaaggttcatcat

SEQ ID NO: 385278 - DNA, 19 bp, Homo sapiens
  siRNA target sequence for FLJ13171 (NM_023923.2,956-974).
cctgccagcactaacacta

SEQ ID NO: 385279 - DNA, 19 bp, Homo sapiens
  siRNA target sequence for FLJ13171 (NM_023923.2,984-1002).
caagcctcactcatatggt

SEQ ID NO: 385280 - DNA, 19 bp, Homo sapiens
  siRNA target sequence for FLJ13171 (NM_023923.2,1073-1091).
ctgtcccaagcaataaaca

SEQ ID NO: 385281 - DNA, 19 bp, Homo sapiens
  siRNA target sequence for FLJ13171 (NM_023923.2,1075-1093).
gtcccaagcaataaacagt

SEQ ID NO: 385282 - DNA, 19 bp, Homo sapiens
  siRNA target sequence for FLJ13171 (NM_023923.2,1090-1108).
cagtggtacattgttatca

SEQ ID NO: 385283 - DNA, 19 bp, Homo sapiens
  siRNA target sequence for FLJ13171 (NM_023923.2,1092-1110).
gtggtacattgttatcaaa

SEQ ID NO: 385284 - DNA, 19 bp, Homo sapiens
  siRNA target sequence for FLJ13171 (NM_023923.2,1197-1215).
caccaagtgatgaaagaga

SEQ ID NO: 385285 - DNA, 19 bp, Homo sapiens
  siRNA target sequence for FLJ13171 (NM_023923.2,1230-1248).
ctatgggctcggaactact

SEQ ID NO: 385286 - DNA, 19 bp, Homo sapiens
  siRNA target sequence for FLJ13171 (NM_023923.2,1236-1254).
gctcggaactactaccaat

SEQ ID NO: 385287 - DNA, 19 bp, Homo sapiens
  siRNA target sequence for FLJ13171 (NM_023923.2,1239-1257).
cggaactactaccaatgat

SEQ ID NO: 385288 - DNA, 19 bp, Homo sapiens
  siRNA target sequence for FLJ13171 (NM_023923.2,1323-1341).
cattccctgctaagacttt

SEQ ID NO: 385289 - DNA, 19 bp, Homo sapiens
  siRNA target sequence for FLJ13171 (NM_023923.2,1487-1505).
ctcccactgcatattcgaa

SEQ ID NO: 385290 - DNA, 19 bp, Homo sapiens
  siRNA target sequence for FLJ13171 (NM_023923.2,1557-1575).
ctcacagagctcattcgtt

SEQ ID NO: 385291 - DNA, 19 bp, Homo sapiens
  siRNA target sequence for FLJ13171 (NM_023923.2,1563-1581).
gagctcattcgttgctttt

SEQ ID NO: 385292 - DNA, 19 bp, Homo sapiens
  siRNA target sequence for FLJ13171 (NM_023923.2,1566-1584).
ctcattcgttgctttttga

SEQ ID NO: 385293 - DNA, 19 bp, Homo sapiens
  siRNA target sequence for FLJ13171 (NM_023923.2,1632-1650).
ggtctcttcccatcactat

SEQ ID NO: 385294 - DNA, 19 bp, Homo sapiens
  siRNA target sequence for FLJ13171 (NM_023923.2,1633-1651).
gtctcttcccatcactatt

SEQ ID NO: 385295 - DNA, 19 bp, Homo sapiens
  siRNA target sequence for FLJ13171 (NM_023923.2,1642-1660).
catcactattgaaatgcta

SEQ ID NO: 385296 - DNA, 19 bp, Homo sapiens
  siRNA target sequence for FLJ13171 (NM_023923.2,1723-1741).
gacacctacctcagtcatt

SEQ ID NO: 385297 - DNA, 19 bp, Homo sapiens
  siRNA target sequence for FLJ13171 (NM_023923.2,1807-1825).
cattcagtaccgagatgaa

SEQ ID NO: 385298 - DNA, 19 bp, Homo sapiens
  siRNA target sequence for FLJ13171 (NM_023923.2,1938-1956).
cttggccttgtaaaagcaa

SEQ ID NO: 385299 - DNA, 19 bp, Homo sapiens
  siRNA target sequence for FLJ13171 (NM_023923.2,2002-2020).
ccggcgactgagtcaaaga

SEQ ID NO: 385300 - DNA, 19 bp, Homo sapiens
  siRNA target sequence for FLJ13171 (NM_023923.2,2025-2043).
caccagaagaactagaaca

SEQ ID NO: 385301 - DNA, 19 bp, Homo sapiens
  siRNA target sequence for FLJ13171 (NM_023923.2,2036-2054).
ctagaacaacgcaatatat

SEQ ID NO: 385302 - DNA, 19 bp, Homo sapiens
  siRNA target sequence for FLJ13171 (NM_023923.2,2046-2064).
gcaatatattgcaacctaa

SEQ ID NO: 385303 - DNA, 19 bp, Homo sapiens
  siRNA target sequence for FLJ13171 (NM_023923.2,2196-2214).
cagatgctcaagattatga

SEQ ID NO: 385304 - DNA, 19 bp, Homo sapiens
  siRNA target sequence for FLJ13171 (NM_023923.2,2216-2234).
cggcgagccgacaaacctt

SEQ ID NO: 385305 - DNA, 19 bp, Homo sapiens
  siRNA target sequence for FLJ13441 (NM_023924.1,356-374).
gggataccaaagtcttgta

SEQ ID NO: 385306 - DNA, 19 bp, Homo sapiens
  siRNA target sequence for FLJ13441 (NM_023924.1,357-375).
ggataccaaagtcttgtat

SEQ ID NO: 385307 - DNA, 19 bp, Homo sapiens
  siRNA target sequence for FLJ13441 (NM_023924.1,511-529).
ctcctggatattcaatgat

SEQ ID NO: 385308 - DNA, 19 bp, Homo sapiens
  siRNA target sequence for FLJ13441 (NM_023924.1,513-531).
cctggatattcaatgataa

SEQ ID NO: 385309 - DNA, 19 bp, Homo sapiens
  siRNA target sequence for FLJ13441 (NM_023924.1,514-532).
ctggatattcaatgataat

SEQ ID NO: 385310 - DNA, 19 bp, Homo sapiens
  siRNA target sequence for FLJ13441 (NM_023924.1,516-534).
ggatattcaatgataataa

SEQ ID NO: 385311 - DNA, 19 bp, Homo sapiens
  siRNA target sequence for FLJ13441 (NM_023924.1,573-591).
gtagctaatgaatacaagt

SEQ ID NO: 385312 - DNA, 19 bp, Homo sapiens
  siRNA target sequence for FLJ13441 (NM_023924.1,587-605).
caagtcagttacggaattt

SEQ ID NO: 385313 - DNA, 19 bp, Homo sapiens
  siRNA target sequence for FLJ13441 (NM_023924.1,617-635).
caagctgatgtgtgataat

SEQ ID NO: 385314 - DNA, 19 bp, Homo sapiens
  siRNA target sequence for FLJ13441 (NM_023924.1,626-644).
gtgtgataatgcaatgaca

SEQ ID NO: 385315 - DNA, 19 bp, Homo sapiens
  siRNA target sequence for FLJ13441 (NM_023924.1,654-672).
ccagataccgtgtactaca

SEQ ID NO: 385316 - DNA, 19 bp, Homo sapiens
  siRNA target sequence for FLJ13441 (NM_023924.1,655-673).
cagataccgtgtactacaa

SEQ ID NO: 385317 - DNA, 19 bp, Homo sapiens
  siRNA target sequence for FLJ13441 (NM_023924.1,657-675).
gataccgtgtactacaagt

SEQ ID NO: 385318 - DNA, 19 bp, Homo sapiens
  siRNA target sequence for FLJ13441 (NM_023924.1,690-708).
cttcacgcaggctttaaga

SEQ ID NO: 385319 - DNA, 19 bp, Homo sapiens
  siRNA target sequence for FLJ13441 (NM_023924.1,693-711).
cacgcaggctttaagatga

SEQ ID NO: 385320 - DNA, 19 bp, Homo sapiens
  siRNA target sequence for FLJ13441 (NM_023924.1,715-733).
gcaaacaggcagctctttt

SEQ ID NO: 385321 - DNA, 19 bp, Homo sapiens
  siRNA target sequence for FLJ13441 (NM_023924.1,758-776).
ggaacctgtccctgaagtt

SEQ ID NO: 385322 - DNA, 19 bp, Homo sapiens
  siRNA target sequence for FLJ13441 (NM_023924.1,777-795).
gtaccagtacaagtagaaa

SEQ ID NO: 385323 - DNA, 19 bp, Homo sapiens
  siRNA target sequence for FLJ13441 (NM_023924.1,792-810).
gaaactgccaagaaatcca

SEQ ID NO: 385324 - DNA, 19 bp, Homo sapiens
  siRNA target sequence for FLJ13441 (NM_023924.1,816-834).
ccgagtagagaagttatca

SEQ ID NO: 385325 - DNA, 19 bp, Homo sapiens
  siRNA target sequence for C1QDC1 (NM_023925.2,858-876).
gtccctctagtcctaattt

SEQ ID NO: 385326 - DNA, 19 bp, Homo sapiens
  siRNA target sequence for C1QDC1 (NM_023925.2,864-882).
ctagtcctaattttatact

SEQ ID NO: 385327 - DNA, 19 bp, Homo sapiens
  siRNA target sequence for C1QDC1 (NM_023925.2,899-917).
ccttcagcctcatctgttt

SEQ ID NO: 385328 - DNA, 19 bp, Homo sapiens
  siRNA target sequence for C1QDC1 (NM_023925.2,1091-1109).
ccttcccaagcgtatgaga

SEQ ID NO: 385329 - DNA, 19 bp, Homo sapiens
  siRNA target sequence for C1QDC1 (NM_023925.2,1097-1115).
caagcgtatgagacctata

SEQ ID NO: 385330 - DNA, 19 bp, Homo sapiens
  siRNA target sequence for C1QDC1 (NM_023925.2,1102-1120).
gtatgagacctatattgaa

SEQ ID NO: 385331 - DNA, 19 bp, Homo sapiens
  siRNA target sequence for C1QDC1 (NM_023925.2,1129-1147).
catatgccttaaacacaaa

SEQ ID NO: 385332 - DNA, 19 bp, Homo sapiens
  siRNA target sequence for C1QDC1 (NM_023925.2,1171-1189).
gctcaaactggaggattat

SEQ ID NO: 385333 - DNA, 19 bp, Homo sapiens
  siRNA target sequence for C1QDC1 (NM_023925.2,1305-1323).
ctgggttgagcctagatct

SEQ ID NO: 385334 - DNA, 19 bp, Homo sapiens
  siRNA target sequence for C1QDC1 (NM_023925.2,1309-1327).
gttgagcctagatctacta

SEQ ID NO: 385335 - DNA, 19 bp, Homo sapiens
  siRNA target sequence for C1QDC1 (NM_023925.2,1312-1330).
gagcctagatctactaaaa

SEQ ID NO: 385336 - DNA, 19 bp, Homo sapiens
  siRNA target sequence for C1QDC1 (NM_023925.2,1398-1416).
ctatacttcaagttcagta

SEQ ID NO: 385337 - DNA, 19 bp, Homo sapiens
  siRNA target sequence for C1QDC1 (NM_023925.2,1434-1452).
cacaggagcacgtacaaaa

SEQ ID NO: 385338 - DNA, 19 bp, Homo sapiens
  siRNA target sequence for C1QDC1 (NM_023925.2,1439-1457).
gagcacgtacaaaaagact

SEQ ID NO: 385339 - DNA, 19 bp, Homo sapiens
  siRNA target sequence for C1QDC1 (NM_023925.2,1499-1517).
gaacttgactacctcatta

SEQ ID NO: 385340 - DNA, 19 bp, Homo sapiens
  siRNA target sequence for C1QDC1 (NM_023925.2,1502-1520).
cttgactacctcattaagt

SEQ ID NO: 385341 - DNA, 19 bp, Homo sapiens
  siRNA target sequence for C1QDC1 (NM_023925.2,1507-1525).
ctacctcattaagttttca

SEQ ID NO: 385342 - DNA, 19 bp, Homo sapiens
  siRNA target sequence for C1QDC1 (NM_023925.2,1634-1652).
ggaacgacatacaaacact

SEQ ID NO: 385343 - DNA, 19 bp, Homo sapiens
  siRNA target sequence for C1QDC1 (NM_023925.2,1635-1653).
gaacgacatacaaacactt

SEQ ID NO: 385344 - DNA, 19 bp, Homo sapiens
  siRNA target sequence for C1QDC1 (NM_023925.2,1638-1656).
cgacatacaaacacttgaa

SEQ ID NO: 385345 - DNA, 19 bp, Homo sapiens
  siRNA target sequence for C1QDC1 (NM_023925.2,1681-1699).
ctcaggctattttgaaagt

SEQ ID NO: 385346 - DNA, 19 bp, Homo sapiens
  siRNA target sequence for C1QDC1 (NM_023925.2,1683-1701).
caggctattttgaaagtat

SEQ ID NO: 385347 - DNA, 19 bp, Homo sapiens
  siRNA target sequence for C1QDC1 (NM_023925.2,1840-1858).
gatacaaccacaagagttt

SEQ ID NO: 385348 - DNA, 19 bp, Homo sapiens
  siRNA target sequence for C1QDC1 (NM_023925.2,1844-1862).
caaccacaagagtttctta

SEQ ID NO: 385349 - DNA, 19 bp, Homo sapiens
  siRNA target sequence for C1QDC1 (NM_023925.2,1859-1877).
cttaacagacgctatatga

SEQ ID NO: 385350 - DNA, 19 bp, Homo sapiens
  siRNA target sequence for C1QDC1 (NM_023925.2,1869-1887).
gctatatgacagaagtaga

SEQ ID NO: 385351 - DNA, 19 bp, Homo sapiens
  siRNA target sequence for C1QDC1 (NM_023925.2,1870-1888).
ctatatgacagaagtagat

SEQ ID NO: 385352 - DNA, 19 bp, Homo sapiens
  siRNA target sequence for C1QDC1 (NM_023925.2,1878-1896).
cagaagtagattattcaaa

SEQ ID NO: 385353 - DNA, 19 bp, Homo sapiens
  siRNA target sequence for C1QDC1 (NM_023925.2,1943-1961).
ccaaatctcccaaaacgtt

SEQ ID NO: 385354 - DNA, 19 bp, Homo sapiens
  siRNA target sequence for C1QDC1 (NM_023925.2,1953-1971).
caaaacgttgggatatgct

SEQ ID NO: 385355 - DNA, 19 bp, Homo sapiens
  siRNA target sequence for C1QDC1 (NM_023925.2,1959-1977).
gttgggatatgcttactga

SEQ ID NO: 385356 - DNA, 19 bp, Homo sapiens
  siRNA target sequence for C1QDC1 (NM_023925.2,2472-2490).
cagcaagcctcataccaaa

SEQ ID NO: 385357 - DNA, 19 bp, Homo sapiens
  siRNA target sequence for C1QDC1 (NM_023925.2,2475-2493).
caagcctcataccaaatga

SEQ ID NO: 385358 - DNA, 19 bp, Homo sapiens
  siRNA target sequence for C1QDC1 (NM_023925.2,2614-2632).
ggatctgatgactcagatt

SEQ ID NO: 385359 - DNA, 19 bp, Homo sapiens
  siRNA target sequence for C1QDC1 (NM_023925.2,2671-2689).
ctttgacaaaccttcaagt

SEQ ID NO: 385360 - DNA, 19 bp, Homo sapiens
  siRNA target sequence for C1QDC1 (NM_023925.2,2681-2699).
ccttcaagtgcaattccaa

SEQ ID NO: 385361 - DNA, 19 bp, Homo sapiens
  siRNA target sequence for C1QDC1 (NM_023925.2,2727-2745).
gtagccccgtagcatctaa

SEQ ID NO: 385362 - DNA, 19 bp, Homo sapiens
  siRNA target sequence for C1QDC1 (NM_023925.2,2730-2748).
gccccgtagcatctaaaga

SEQ ID NO: 385363 - DNA, 19 bp, Homo sapiens
  siRNA target sequence for C1QDC1 (NM_023925.2,2731-2749).
ccccgtagcatctaaagaa

SEQ ID NO: 385364 - DNA, 19 bp, Homo sapiens
  siRNA target sequence for C1QDC1 (NM_023925.2,2785-2803).
gccgttacaggctacttct

SEQ ID NO: 385365 - DNA, 19 bp, Homo sapiens
  siRNA target sequence for C1QDC1 (NM_023925.2,2786-2804).
ccgttacaggctacttctt

SEQ ID NO: 385366 - DNA, 19 bp, Homo sapiens
  siRNA target sequence for C1QDC1 (NM_023925.2,2851-2869).
ggcttcttctggatctgaa

SEQ ID NO: 385367 - DNA, 19 bp, Homo sapiens
  siRNA target sequence for C1QDC1 (NM_023925.2,2886-2904).
cagagactcctgaggtatt

SEQ ID NO: 385368 - DNA, 19 bp, Homo sapiens
  siRNA target sequence for C1QDC1 (NM_023925.2,2892-2910).
ctcctgaggtatttaacgt

SEQ ID NO: 385369 - DNA, 19 bp, Homo sapiens
  siRNA target sequence for C1QDC1 (NM_023925.2,2894-2912).
cctgaggtatttaacgtta

SEQ ID NO: 385370 - DNA, 19 bp, Homo sapiens
  siRNA target sequence for C1QDC1 (NM_023925.2,2923-2941).
gcctccacgaaaagaacaa

SEQ ID NO: 385371 - DNA, 19 bp, Homo sapiens
  siRNA target sequence for C1QDC1 (NM_023925.2,2969-2987).
ggctacaatcaaagtttta

SEQ ID NO: 385372 - DNA, 19 bp, Homo sapiens
  siRNA target sequence for C1QDC1 (NM_023925.2,3152-3170).
cctactcagccatttgtca

SEQ ID NO: 385373 - DNA, 19 bp, Homo sapiens
  siRNA target sequence for C1QDC1 (NM_023925.2,3153-3171).
ctactcagccatttgtcaa

SEQ ID NO: 385374 - DNA, 19 bp, Homo sapiens
  siRNA target sequence for C1QDC1 (NM_023925.2,3198-3216).
ctcgtggtgggagattaat

SEQ ID NO: 385375 - DNA, 19 bp, Homo sapiens
  siRNA target sequence for C1QDC1 (NM_023925.2,3210-3228).
gattaataaccaattccta

SEQ ID NO: 385376 - DNA, 19 bp, Homo sapiens
  siRNA target sequence for C1QDC1 (NM_023925.2,3230-3248).
cggtcccctggtggttata

SEQ ID NO: 385377 - DNA, 19 bp, Homo sapiens
  siRNA target sequence for C1QDC1 (NM_023925.2,3231-3249).
ggtcccctggtggttataa

SEQ ID NO: 385378 - DNA, 19 bp, Homo sapiens
  siRNA target sequence for C1QDC1 (NM_023925.2,3232-3250).
gtcccctggtggttataaa

SEQ ID NO: 385379 - DNA, 19 bp, Homo sapiens
  siRNA target sequence for C1QDC1 (NM_023925.2,3235-3253).
ccctggtggttataaaggt

SEQ ID NO: 385380 - DNA, 19 bp, Homo sapiens
  siRNA target sequence for C1QDC1 (NM_023925.2,3236-3254).
cctggtggttataaaggtt

SEQ ID NO: 385381 - DNA, 19 bp, Homo sapiens
  siRNA target sequence for C1QDC1 (NM_023925.2,3310-3328).
gttccaagctagagagtat

SEQ ID NO: 385382 - DNA, 19 bp, Homo sapiens
  siRNA target sequence for C1QDC1 (NM_023925.2,3392-3410).
ggtggtccacgagcaaatt

SEQ ID NO: 385383 - DNA, 19 bp, Homo sapiens
  siRNA target sequence for C1QDC1 (NM_023925.2,3395-3413).
ggtccacgagcaaattcga

SEQ ID NO: 385384 - DNA, 19 bp, Homo sapiens
  siRNA target sequence for C1QDC1 (NM_023925.2,3416-3434).
gcagggtggagtgattctt

SEQ ID NO: 385385 - DNA, 19 bp, Homo sapiens
  siRNA target sequence for C1QDC1 (NM_023925.2,3456-3474).
gagacaacgaaacctttaa

SEQ ID NO: 385386 - DNA, 19 bp, Homo sapiens
  siRNA target sequence for C1QDC1 (NM_023925.2,3458-3476).
gacaacgaaacctttaaca

SEQ ID NO: 385387 - DNA, 19 bp, Homo sapiens
  siRNA target sequence for C1QDC1 (NM_023925.2,3606-3624).
cagccagaacctctaatct

SEQ ID NO: 385388 - DNA, 19 bp, Homo sapiens
  siRNA target sequence for C1QDC1 (NM_023925.2,3633-3651).
gaactttagaccaacctat

SEQ ID NO: 385389 - DNA, 19 bp, Homo sapiens
  siRNA target sequence for C1QDC1 (NM_023925.2,3636-3654).
ctttagaccaacctattgt

SEQ ID NO: 385390 - DNA, 19 bp, Homo sapiens
  siRNA target sequence for C1QDC1 (NM_023925.2,3643-3661).
ccaacctattgtgtttgat

SEQ ID NO: 385391 - DNA, 19 bp, Homo sapiens
  siRNA target sequence for C1QDC1 (NM_023925.2,3754-3772).
gctaaagctggcagtgaat

SEQ ID NO: 385392 - DNA, 19 bp, Homo sapiens
  siRNA target sequence for C1QDC1 (NM_023925.2,3855-3873).
ctgctagcaatcatgcaat

SEQ ID NO: 385393 - DNA, 19 bp, Homo sapiens
  siRNA target sequence for C1QDC1 (NM_023925.2,3861-3879).
gcaatcatgcaattcttca

SEQ ID NO: 385394 - DNA, 19 bp, Homo sapiens
  siRNA target sequence for C1QDC1 (NM_023925.2,3940-3958).
ctggaaatattctacgttt

SEQ ID NO: 385395 - DNA, 19 bp, Homo sapiens
  siRNA target sequence for C1QDC1 (NM_023925.2,3943-3961).
gaaatattctacgttttca

SEQ ID NO: 385396 - DNA, 19 bp, Homo sapiens
  siRNA target sequence for NS3TP2 (NM_023927.1,390-408).
cattagcctatggtcaaaa

SEQ ID NO: 385397 - DNA, 19 bp, Homo sapiens
  siRNA target sequence for NS3TP2 (NM_023927.1,418-436).
gatggtgcctctttagcaa

SEQ ID NO: 385398 - DNA, 19 bp, Homo sapiens
  siRNA target sequence for NS3TP2 (NM_023927.1,425-443).
cctctttagcaagtgataa

SEQ ID NO: 385399 - DNA, 19 bp, Homo sapiens
  siRNA target sequence for NS3TP2 (NM_023927.1,428-446).
ctttagcaagtgataagaa

SEQ ID NO: 385400 - DNA, 19 bp, Homo sapiens
  siRNA target sequence for NS3TP2 (NM_023927.1,439-457).
gataagaacgactgtaaaa

SEQ ID NO: 385401 - DNA, 19 bp, Homo sapiens
  siRNA target sequence for NS3TP2 (NM_023927.1,444-462).
gaacgactgtaaaacagaa

SEQ ID NO: 385402 - DNA, 19 bp, Homo sapiens
  siRNA target sequence for NS3TP2 (NM_023927.1,509-527).
gccagtacaaggccaatat

SEQ ID NO: 385403 - DNA, 19 bp, Homo sapiens
  siRNA target sequence for NS3TP2 (NM_023927.1,520-538).
gccaatatgcactttcaca

SEQ ID NO: 385404 - DNA, 19 bp, Homo sapiens
  siRNA target sequence for NS3TP2 (NM_023927.1,615-633).
ccaaggaaagctctttgta

SEQ ID NO: 385405 - DNA, 19 bp, Homo sapiens
  siRNA target sequence for NS3TP2 (NM_023927.1,616-634).
caaggaaagctctttgtat

SEQ ID NO: 385406 - DNA, 19 bp, Homo sapiens
  siRNA target sequence for NS3TP2 (NM_023927.1,655-673).
cattccaaagtctttggaa

SEQ ID NO: 385407 - DNA, 19 bp, Homo sapiens
  siRNA target sequence for NS3TP2 (NM_023927.1,678-696).
cacaaagatctctattcca

SEQ ID NO: 385408 - DNA, 19 bp, Homo sapiens
  siRNA target sequence for NS3TP2 (NM_023927.1,704-722).
cggtaaccctaataaagaa

SEQ ID NO: 385409 - DNA, 19 bp, Homo sapiens
  siRNA target sequence for NS3TP2 (NM_023927.1,705-723).
ggtaaccctaataaagaaa

SEQ ID NO: 385410 - DNA, 19 bp, Homo sapiens
  siRNA target sequence for NS3TP2 (NM_023927.1,773-791).
cagacaggtacatatttgt

SEQ ID NO: 385411 - DNA, 19 bp, Homo sapiens
  siRNA target sequence for NS3TP2 (NM_023927.1,775-793).
gacaggtacatatttgtct

SEQ ID NO: 385412 - DNA, 19 bp, Homo sapiens
  siRNA target sequence for NS3TP2 (NM_023927.1,804-822).
cagagattcaacttacaaa

SEQ ID NO: 385413 - DNA, 19 bp, Homo sapiens
  siRNA target sequence for NS3TP2 (NM_023927.1,806-824).
gagattcaacttacaaact

SEQ ID NO: 385414 - DNA, 19 bp, Homo sapiens
  siRNA target sequence for NS3TP2 (NM_023927.1,865-883).
ggtaacagtcccaatccat

SEQ ID NO: 385415 - DNA, 19 bp, Homo sapiens
  siRNA target sequence for NS3TP2 (NM_023927.1,927-945).
gcctctggatttcaatgat

SEQ ID NO: 385416 - DNA, 19 bp, Homo sapiens
  siRNA target sequence for NS3TP2 (NM_023927.1,1031-1049).
ctgagaactctcgagattt

SEQ ID NO: 385417 - DNA, 19 bp, Homo sapiens
  siRNA target sequence for NS3TP2 (NM_023927.1,1035-1053).
gaactctcgagatttccat

SEQ ID NO: 385418 - DNA, 19 bp, Homo sapiens
  siRNA target sequence for NS3TP2 (NM_023927.1,1045-1063).
gatttccatgcgacagaat

SEQ ID NO: 385419 - DNA, 19 bp, Homo sapiens
  siRNA target sequence for NS3TP2 (NM_023927.1,1162-1180).
gtacagggtctgtcagaaa

SEQ ID NO: 385420 - DNA, 19 bp, Homo sapiens
  siRNA target sequence for NS3TP2 (NM_023927.1,1186-1204).
ggaatcttacataaagtca

SEQ ID NO: 385421 - DNA, 19 bp, Homo sapiens
  siRNA target sequence for NS3TP2 (NM_023927.1,1217-1235).
gtccgatgcttcaccatat

SEQ ID NO: 385422 - DNA, 19 bp, Homo sapiens
  siRNA target sequence for NS3TP2 (NM_023927.1,1220-1238).
cgatgcttcaccatattct

SEQ ID NO: 385423 - DNA, 19 bp, Homo sapiens
  siRNA target sequence for NS3TP2 (NM_023927.1,1258-1276).
gtctgtgcactaatcatct

SEQ ID NO: 385424 - DNA, 19 bp, Homo sapiens
  siRNA target sequence for NS3TP2 (NM_023927.1,1277-1295).
cgaccttctacatgagata

SEQ ID NO: 385425 - DNA, 19 bp, Homo sapiens
  siRNA target sequence for NS3TP2 (NM_023927.1,1287-1305).
catgagatacagaattaat

SEQ ID NO: 385426 - DNA, 19 bp, Homo sapiens
  siRNA target sequence for NS3TP2 (NM_023927.1,1315-1333).
gagcagctggggttactaa

SEQ ID NO: 385427 - DNA, 19 bp, Homo sapiens
  siRNA target sequence for NS3TP2 (NM_023927.1,1338-1356).
cattgtggacacccataat

SEQ ID NO: 385428 - DNA, 19 bp, Homo sapiens
  siRNA target sequence for NS3TP2 (NM_023927.1,1385-1403).
ggtcacaagtacaattcaa

SEQ ID NO: 385429 - DNA, 19 bp, Homo sapiens
  siRNA target sequence for NS3TP2 (NM_023927.1,1388-1406).
cacaagtacaattcaatgt

SEQ ID NO: 385430 - DNA, 19 bp, Homo sapiens
  siRNA target sequence for NS3TP2 (NM_023927.1,1426-1444).
cttacagctaacatagtga

SEQ ID NO: 385431 - DNA, 19 bp, Homo sapiens
  siRNA target sequence for MGC2494 (NM_023933.1,693-711).
ccgagtatgggcttatgat

SEQ ID NO: 385432 - DNA, 19 bp, Homo sapiens
  siRNA target sequence for C20orf116 (NM_023935.1,57-75).
ctctgctagtcggctttat

SEQ ID NO: 385433 - DNA, 19 bp, Homo sapiens
  siRNA target sequence for C20orf116 (NM_023935.1,354-372).
ctcacctgtcggggaaaat

SEQ ID NO: 385434 - DNA, 19 bp, Homo sapiens
  siRNA target sequence for C20orf116 (NM_023935.1,668-686).
ctgacagagttcatcaact

SEQ ID NO: 385435 - DNA, 19 bp, Homo sapiens
  siRNA target sequence for C20orf116 (NM_023935.1,743-761).
cgcactcaggacaccataa

SEQ ID NO: 385436 - DNA, 19 bp, Homo sapiens
  siRNA target sequence for C20orf116 (NM_023935.1,745-763).
cactcaggacaccataaat

SEQ ID NO: 385437 - DNA, 19 bp, Homo sapiens
  siRNA target sequence for C20orf116 (NM_023935.1,781-799).
ggctgaggggactataaca

SEQ ID NO: 385438 - DNA, 19 bp, Homo sapiens
  siRNA target sequence for C20orf116 (NM_023935.1,790-808).
gactataacaggtgtgatt

SEQ ID NO: 385439 - DNA, 19 bp, Homo sapiens
  siRNA target sequence for C20orf116 (NM_023935.1,792-810).
ctataacaggtgtgattga

SEQ ID NO: 385440 - DNA, 19 bp, Homo sapiens
  siRNA target sequence for C20orf116 (NM_023935.1,817-835).
gggcaagttcatctacata

SEQ ID NO: 385441 - DNA, 19 bp, Homo sapiens
  siRNA target sequence for C20orf116 (NM_023935.1,818-836).
ggcaagttcatctacataa

SEQ ID NO: 385442 - DNA, 19 bp, Homo sapiens
  siRNA target sequence for SARG (NM_023938.3,344-362).
cgctctggatctagtgata

SEQ ID NO: 385443 - DNA, 19 bp, Homo sapiens
  siRNA target sequence for SARG (NM_023938.3,566-584).
cgaacgccaaggacagtaa

SEQ ID NO: 385444 - DNA, 19 bp, Homo sapiens
  siRNA target sequence for SARG (NM_023938.3,648-666).
gcctccctaggaatatcca

SEQ ID NO: 385445 - DNA, 19 bp, Homo sapiens
  siRNA target sequence for SARG (NM_023938.3,1052-1070).
gggttgcctcagaatgcaa

SEQ ID NO: 385446 - DNA, 19 bp, Homo sapiens
  siRNA target sequence for SARG (NM_023938.3,1145-1163).
cggaagctgccacctaata

SEQ ID NO: 385447 - DNA, 19 bp, Homo sapiens
  siRNA target sequence for SARG (NM_023938.3,1146-1164).
ggaagctgccacctaatat

SEQ ID NO: 385448 - DNA, 19 bp, Homo sapiens
  siRNA target sequence for SARG (NM_023938.3,1334-1352).
gagcctggactccacttaa

SEQ ID NO: 385449 - DNA, 19 bp, Homo sapiens
  siRNA target sequence for SARG (NM_023938.3,1336-1354).
gcctggactccacttaagt

SEQ ID NO: 385450 - DNA, 19 bp, Homo sapiens
  siRNA target sequence for SARG (NM_023938.3,1337-1355).
cctggactccacttaagta

SEQ ID NO: 385451 - DNA, 19 bp, Homo sapiens
  siRNA target sequence for SARG (NM_023938.3,1338-1356).
ctggactccacttaagtaa

SEQ ID NO: 385452 - DNA, 19 bp, Homo sapiens
  siRNA target sequence for SARG (NM_023938.3,1549-1567).
caatgttgcagctagcaaa

SEQ ID NO: 385453 - DNA, 19 bp, Homo sapiens
  siRNA target sequence for SARG (NM_023938.3,1553-1571).
gttgcagctagcaaatcta

SEQ ID NO: 385454 - DNA, 19 bp, Homo sapiens
  siRNA target sequence for SARG (NM_023938.3,1801-1819).
gatctcgcccagtgtctta

SEQ ID NO: 385455 - DNA, 19 bp, Homo sapiens
  siRNA target sequence for SARG (NM_023938.3,1806-1824).
cgcccagtgtcttacgtaa

SEQ ID NO: 385456 - DNA, 19 bp, Homo sapiens
  siRNA target sequence for SARG (NM_023938.3,1807-1825).
gcccagtgtcttacgtaat

SEQ ID NO: 385457 - DNA, 19 bp, Homo sapiens
  siRNA target sequence for SARG (NM_023938.3,1846-1864).
cctgggcacggggaaagat

SEQ ID NO: 385458 - DNA, 19 bp, Homo sapiens
  siRNA target sequence for MGC3036 (NM_023942.1,677-695).
cgacggtgagcgtgtgatt

SEQ ID NO: 385459 - DNA, 19 bp, Homo sapiens
  siRNA target sequence for IMAGE3455200 (NM_024006.2,254-272).
ggacagcatcctcaatcaa

SEQ ID NO: 385460 - DNA, 19 bp, Homo sapiens
  siRNA target sequence for IMAGE3455200 (NM_024006.2,259-277).
gcatcctcaatcaatccaa

SEQ ID NO: 385461 - DNA, 19 bp, Homo sapiens
  siRNA target sequence for IMAGE3455200 (NM_024006.2,306-324).
ctacagctattgttaggtt

SEQ ID NO: 385462 - DNA, 19 bp, Homo sapiens
  siRNA target sequence for BTN2A3 (NM_024018.1,322-340).
ctgatcatacacaatgtca

SEQ ID NO: 385463 - DNA, 19 bp, Homo sapiens
  siRNA target sequence for BTN2A3 (NM_024018.1,356-374).
gcatctaccagtgttactt

SEQ ID NO: 385464 - DNA, 19 bp, Homo sapiens
  siRNA target sequence for BTN2A3 (NM_024018.1,436-454).
gagcccgtcattgaaatga

SEQ ID NO: 385465 - DNA, 19 bp, Homo sapiens
  siRNA target sequence for BTN2A3 (NM_024018.1,438-456).
gcccgtcattgaaatgaga

SEQ ID NO: 385466 - DNA, 19 bp, Homo sapiens
  siRNA target sequence for BTN2A3 (NM_024018.1,739-757).
gtgatcctgcctgttatca

SEQ ID NO: 385467 - DNA, 19 bp, Homo sapiens
  siRNA target sequence for BTN2A3 (NM_024018.1,744-762).
cctgcctgttatcatgatt

SEQ ID NO: 385468 - DNA, 19 bp, Homo sapiens
  siRNA target sequence for BTN2A3 (NM_024018.1,745-763).
ctgcctgttatcatgatta

SEQ ID NO: 385469 - DNA, 19 bp, Homo sapiens
  siRNA target sequence for BTN2A3 (NM_024018.1,826-844).
gattctcatctcatgacat

SEQ ID NO: 385470 - DNA, 19 bp, Homo sapiens
  siRNA target sequence for BTN2A3 (NM_024018.1,885-903).
cttacatgctgccaatgtt

SEQ ID NO: 385471 - DNA, 19 bp, Homo sapiens
  siRNA target sequence for BTN2A3 (NM_024018.1,942-960).
gtcagaggacaaaagaagt

SEQ ID NO: 385472 - DNA, 19 bp, Homo sapiens
  siRNA target sequence for BTN2A3 (NM_024018.1,1201-1219).
gccctgacctcccttaagt

SEQ ID NO: 385473 - DNA, 19 bp, Homo sapiens
  siRNA target sequence for BTN2A3 (NM_024018.1,1379-1397).
cttatgacagccaaatctt

SEQ ID NO: 385474 - DNA, 19 bp, Homo sapiens
  siRNA target sequence for BTN2A3 (NM_024018.1,1648-1666).
gttcacctcctcattaggt

SEQ ID NO: 385475 - DNA, 19 bp, Homo sapiens
  siRNA target sequence for NEUROG2 (NM_024019.2,569-587).
gtctggtacacgattgcaa

SEQ ID NO: 385476 - DNA, 19 bp, Homo sapiens
  siRNA target sequence for NEUROG2 (NM_024019.2,1024-1042).
ccctacagctgcactttat

SEQ ID NO: 385477 - DNA, 19 bp, Homo sapiens
  siRNA target sequence for NEUROG2 (NM_024019.2,1060-1078).
gggtcagacatggactatt

SEQ ID NO: 385478 - DNA, 19 bp, Homo sapiens
  siRNA target sequence for MGC3265 (NM_024028.2,559-577).
gggagtccacctttgttaa

SEQ ID NO: 385479 - DNA, 19 bp, Homo sapiens
  siRNA target sequence for MGC3265 (NM_024028.2,620-638).
cgtcacgcagcgctttatt

SEQ ID NO: 385480 - DNA, 19 bp, Homo sapiens
  siRNA target sequence for MGC3265 (NM_024028.2,623-641).
cacgcagcgctttattgat

SEQ ID NO: 385481 - DNA, 19 bp, Homo sapiens
  siRNA target sequence for MGC3265 (NM_024028.2,625-643).
cgcagcgctttattgatga

SEQ ID NO: 385482 - DNA, 19 bp, Homo sapiens
  siRNA target sequence for MGC3265 (NM_024028.2,626-644).
gcagcgctttattgatgat

SEQ ID NO: 385483 - DNA, 19 bp, Homo sapiens
  siRNA target sequence for MGC3265 (NM_024028.2,1247-1265).
gaccctgttccgttcctat

SEQ ID NO: 385484 - DNA, 19 bp, Homo sapiens
  siRNA target sequence for MGC3265 (NM_024028.2,1249-1267).
ccctgttccgttcctatta

SEQ ID NO: 385485 - DNA, 19 bp, Homo sapiens
  siRNA target sequence for MGC3265 (NM_024028.2,1253-1271).
gttccgttcctattactca

SEQ ID NO: 385486 - DNA, 19 bp, Homo sapiens
  siRNA target sequence for MGC3265 (NM_024028.2,1400-1418).
ggccgtggctgccaagaat

SEQ ID NO: 385487 - DNA, 19 bp, Homo sapiens
  siRNA target sequence for MGC3265 (NM_024028.2,1455-1473).
ctagacaagattgatcaaa

SEQ ID NO: 385488 - DNA, 19 bp, Homo sapiens
  siRNA target sequence for MGC3262 (NM_024029.3,163-181).
cgaggaggccactaatctt

SEQ ID NO: 385489 - DNA, 19 bp, Homo sapiens
  siRNA target sequence for MGC3262 (NM_024029.3,360-378).
ggaccttcagctactatca

SEQ ID NO: 385490 - DNA, 19 bp, Homo sapiens
  siRNA target sequence for MGC3262 (NM_024029.3,406-424).
ggtcctggaccggatcaaa

SEQ ID NO: 385491 - DNA, 19 bp, Homo sapiens
  siRNA target sequence for MGC3262 (NM_024029.3,947-965).
gccatgggctgtaagttgt

SEQ ID NO: 385492 - DNA, 19 bp, Homo sapiens
  siRNA target sequence for MGC3262 (NM_024029.3,948-966).
ccatgggctgtaagttgta

SEQ ID NO: 385493 - DNA, 19 bp, Homo sapiens
  siRNA target sequence for MGC3262 (NM_024029.3,953-971).
ggctgtaagttgtacttct

SEQ ID NO: 385494 - DNA, 19 bp, Homo sapiens
  siRNA target sequence for MGC3262 (NM_024029.3,954-972).
gctgtaagttgtacttctt

SEQ ID NO: 385495 - DNA, 19 bp, Homo sapiens
  siRNA target sequence for MGC3121 (NM_024031.2,775-793).
gagacccccaacttcatca

SEQ ID NO: 385496 - DNA, 19 bp, Homo sapiens
  siRNA target sequence for MGC3121 (NM_024031.2,1047-1065).
cttcctcacgcccaacaaa

SEQ ID NO: 385497 - DNA, 19 bp, Homo sapiens
  siRNA target sequence for MGC3121 (NM_024031.2,1195-1213).
cgaactcaggaccacaata

SEQ ID NO: 385498 - DNA, 19 bp, Homo sapiens
  siRNA target sequence for MGC3121 (NM_024031.2,1542-1560).
ggaccaggtgctttcagaa

SEQ ID NO: 385499 - DNA, 19 bp, Homo sapiens
  siRNA target sequence for MGC3121 (NM_024031.2,1569-1587).
caagaccatgggaaaggtt

SEQ ID NO: 385500 - DNA, 19 bp, Homo sapiens
  siRNA target sequence for MGC3121 (NM_024031.2,1616-1634).
cccgtcctcagctaaacct

SEQ ID NO: 385501 - DNA, 19 bp, Homo sapiens
  siRNA target sequence for MGC3121 (NM_024031.2,1617-1635).
ccgtcctcagctaaacctt

SEQ ID NO: 385502 - DNA, 19 bp, Homo sapiens
  siRNA target sequence for MGC3121 (NM_024031.2,1654-1672).
cgaccaatcaggttgaaca

SEQ ID NO: 385503 - DNA, 19 bp, Homo sapiens
  siRNA target sequence for MGC3121 (NM_024031.2,1655-1673).
gaccaatcaggttgaacaa

SEQ ID NO: 385504 - DNA, 19 bp, Homo sapiens
  siRNA target sequence for MGC3121 (NM_024031.2,1693-1711).
gaaatttacaccaacaaga

SEQ ID NO: 385505 - DNA, 19 bp, Homo sapiens
  siRNA target sequence for MGC3121 (NM_024031.2,1770-1788).
gcgcaatgggactctgatt

SEQ ID NO: 385506 - DNA, 19 bp, Homo sapiens
  siRNA target sequence for MGC3121 (NM_024031.2,1771-1789).
cgcaatgggactctgattt

SEQ ID NO: 385507 - DNA, 19 bp, Homo sapiens
  siRNA target sequence for MGC3121 (NM_024031.2,1772-1790).
gcaatgggactctgatttt

SEQ ID NO: 385508 - DNA, 19 bp, Homo sapiens
  siRNA target sequence for MGC3130 (NM_024032.2,231-249).
gaagatgaggatttcttgt

SEQ ID NO: 385509 - DNA, 19 bp, Homo sapiens
  siRNA target sequence for MGC3130 (NM_024032.2,455-473).
cagccgtccatcatgcata

SEQ ID NO: 385510 - DNA, 19 bp, Homo sapiens
  siRNA target sequence for MGC3130 (NM_024032.2,640-658).
ggcctgaacaagacgaatt

SEQ ID NO: 385511 - DNA, 19 bp, Homo sapiens
  siRNA target sequence for MGC3130 (NM_024032.2,641-659).
gcctgaacaagacgaattt

SEQ ID NO: 385512 - DNA, 19 bp, Homo sapiens
  siRNA target sequence for MGC3130 (NM_024032.2,721-739).
gcagtgaggccataccaat

SEQ ID NO: 385513 - DNA, 19 bp, Homo sapiens
  siRNA target sequence for MGC3130 (NM_024032.2,752-770).
gcagcgggagggttcagta

SEQ ID NO: 385514 - DNA, 19 bp, Homo sapiens
  siRNA target sequence for MGC3130 (NM_024032.2,753-771).
cagcgggagggttcagtat

SEQ ID NO: 385515 - DNA, 19 bp, Homo sapiens
  siRNA target sequence for MGC3130 (NM_024032.2,762-780).
ggttcagtattggctaaaa

SEQ ID NO: 385516 - DNA, 19 bp, Homo sapiens
  siRNA target sequence for MGC3130 (NM_024032.2,837-855).
cacaaagcgggtatcatgt

SEQ ID NO: 385517 - DNA, 19 bp, Homo sapiens
  siRNA target sequence for MGC3130 (NM_024032.2,860-878).
ccaggatgagtctctagat

SEQ ID NO: 385518 - DNA, 19 bp, Homo sapiens
  siRNA target sequence for MGC3130 (NM_024032.2,873-891).
ctagatcctgtcatccaat

SEQ ID NO: 385519 - DNA, 19 bp, Homo sapiens
  siRNA target sequence for MGC3130 (NM_024032.2,876-894).
gatcctgtcatccaatgta

SEQ ID NO: 385520 - DNA, 19 bp, Homo sapiens
  siRNA target sequence for MGC3130 (NM_024032.2,995-1013).
gcaacgctcccctgttcaa

SEQ ID NO: 385521 - DNA, 19 bp, Homo sapiens
  siRNA target sequence for MGC3130 (NM_024032.2,1145-1163).
caactcaagctgttctact

SEQ ID NO: 385522 - DNA, 19 bp, Homo sapiens
  siRNA target sequence for MGC3130 (NM_024032.2,1171-1189).
ggactagctctggattatt

SEQ ID NO: 385523 - DNA, 19 bp, Homo sapiens
  siRNA target sequence for MGC3130 (NM_024032.2,1172-1190).
gactagctctggattattt

SEQ ID NO: 385524 - DNA, 19 bp, Homo sapiens
  siRNA target sequence for MGC3130 (NM_024032.2,1352-1370).
ctccacccgagccaaaact

SEQ ID NO: 385525 - DNA, 19 bp, Homo sapiens
  siRNA target sequence for MGC3130 (NM_024032.2,1464-1482).
catggtgctctggctaaat

SEQ ID NO: 385526 - DNA, 19 bp, Homo sapiens
  siRNA target sequence for MGC3130 (NM_024032.2,1542-1560).
ccctggctgaccatgaaat

SEQ ID NO: 385527 - DNA, 19 bp, Homo sapiens
  siRNA target sequence for MGC3130 (NM_024032.2,1603-1621).
gtacctacagcattgtcat

SEQ ID NO: 385528 - DNA, 19 bp, Homo sapiens
  siRNA target sequence for MGC3130 (NM_024032.2,1716-1734).
gacgccagtgtggttttca

SEQ ID NO: 385529 - DNA, 19 bp, Homo sapiens
  siRNA target sequence for MGC3130 (NM_024032.2,1966-1984).
ggagcttccagcatgatgt

SEQ ID NO: 385530 - DNA, 19 bp, Homo sapiens
  siRNA target sequence for MGC3130 (NM_024032.2,2038-2056).
cgtcccctgaggaagaact

SEQ ID NO: 385531 - DNA, 19 bp, Homo sapiens
  siRNA target sequence for MGC5242 (NM_024033.1,474-492).
gtgtcgcctcacacaagtt

SEQ ID NO: 385532 - DNA, 19 bp, Homo sapiens
  siRNA target sequence for MGC5242 (NM_024033.1,633-651).
gtccgggagatctttttca

SEQ ID NO: 385533 - DNA, 19 bp, Homo sapiens
  siRNA target sequence for GDAP1L1 (NM_024034.3,71-89).
gcgacccccaacaatctga

SEQ ID NO: 385534 - DNA, 19 bp, Homo sapiens
  siRNA target sequence for GDAP1L1 (NM_024034.3,602-620).
gccgagatccgcagacatt

SEQ ID NO: 385535 - DNA, 19 bp, Homo sapiens
  siRNA target sequence for GDAP1L1 (NM_024034.3,604-622).
cgagatccgcagacattta

SEQ ID NO: 385536 - DNA, 19 bp, Homo sapiens
  siRNA target sequence for GDAP1L1 (NM_024034.3,718-736).
gatcttggagcatgatgat

SEQ ID NO: 385537 - DNA, 19 bp, Homo sapiens
  siRNA target sequence for GDAP1L1 (NM_024034.3,917-935).
ggactgtccaagaaatact

SEQ ID NO: 385538 - DNA, 19 bp, Homo sapiens
  siRNA target sequence for GDAP1L1 (NM_024034.3,1120-1138).
gggtgggatgggctacttt

SEQ ID NO: 385539 - DNA, 19 bp, Homo sapiens
  siRNA target sequence for MGC3113 (NM_024035.1,276-294).
gtgtcgtcctgcttccaaa

SEQ ID NO: 385540 - DNA, 19 bp, Homo sapiens
  siRNA target sequence for MGC3103 (NM_024036.3,439-457).
cctgacttccgcaacatga

SEQ ID NO: 385541 - DNA, 19 bp, Homo sapiens
  siRNA target sequence for MGC3103 (NM_024036.3,761-779).
ccctcaacctggaccataa

SEQ ID NO: 385542 - DNA, 19 bp, Homo sapiens
  siRNA target sequence for MGC3103 (NM_024036.3,765-783).
caacctggaccataacctt

SEQ ID NO: 385543 - DNA, 19 bp, Homo sapiens
  siRNA target sequence for MGC3103 (NM_024036.3,768-786).
cctggaccataaccttatt

SEQ ID NO: 385544 - DNA, 19 bp, Homo sapiens
  siRNA target sequence for MGC3103 (NM_024036.3,868-886).
gctccggacccgcttttct

SEQ ID NO: 385545 - DNA, 19 bp, Homo sapiens
  siRNA target sequence for MGC3103 (NM_024036.3,1237-1255).
cccaacgggaccttagaga

SEQ ID NO: 385546 - DNA, 19 bp, Homo sapiens
  siRNA target sequence for MGC3103 (NM_024036.3,1238-1256).
ccaacgggaccttagagat

SEQ ID NO: 385547 - DNA, 19 bp, Homo sapiens
  siRNA target sequence for MGC3103 (NM_024036.3,1239-1257).
caacgggaccttagagatt

SEQ ID NO: 385548 - DNA, 19 bp, Homo sapiens
  siRNA target sequence for MGC3103 (NM_024036.3,1320-1338).
ggccacagcccgagtagaa

SEQ ID NO: 385549 - DNA, 19 bp, Homo sapiens
  siRNA target sequence for MGC3103 (NM_024036.3,1534-1552).
ccagtgtggatgttccaaa

SEQ ID NO: 385550 - DNA, 19 bp, Homo sapiens
  siRNA target sequence for MGC3103 (NM_024036.3,1535-1553).
cagtgtggatgttccaaat

SEQ ID NO: 385551 - DNA, 19 bp, Homo sapiens
  siRNA target sequence for MGC2603 (NM_024037.1,246-264).
gagtgtttcatctcataca

SEQ ID NO: 385552 - DNA, 19 bp, Homo sapiens
  siRNA target sequence for MGC2603 (NM_024037.1,248-266).
gtgtttcatctcatacaga

SEQ ID NO: 385553 - DNA, 19 bp, Homo sapiens
  siRNA target sequence for MGC2603 (NM_024037.1,254-272).
catctcatacagaaagtca

SEQ ID NO: 385554 - DNA, 19 bp, Homo sapiens
  siRNA target sequence for MGC2603 (NM_024037.1,299-317).
cgacccagctagaccattt

SEQ ID NO: 385555 - DNA, 19 bp, Homo sapiens
  siRNA target sequence for MGC2603 (NM_024037.1,326-344).
gcttagcacacgattgcat

SEQ ID NO: 385556 - DNA, 19 bp, Homo sapiens
  siRNA target sequence for MGC2603 (NM_024037.1,419-437).
ctggccaccacagaatgaa

SEQ ID NO: 385557 - DNA, 19 bp, Homo sapiens
  siRNA target sequence for MGC2603 (NM_024037.1,486-504).
ctgtgctggagatagtcat

SEQ ID NO: 385558 - DNA, 19 bp, Homo sapiens
  siRNA target sequence for MGC2603 (NM_024037.1,537-555).
ggaaagttcttgtttgcta

SEQ ID NO: 385559 - DNA, 19 bp, Homo sapiens
  siRNA target sequence for MGC2603 (NM_024037.1,574-592).
ggggattctgccaggaaat

SEQ ID NO: 385560 - DNA, 19 bp, Homo sapiens
  siRNA target sequence for MGC2603 (NM_024037.1,633-651).
ggagaaacacaccaaacta

SEQ ID NO: 385561 - DNA, 19 bp, Homo sapiens
  siRNA target sequence for MGC2603 (NM_024037.1,649-667).
ctacctggggacaaatgct

SEQ ID NO: 385562 - DNA, 19 bp, Homo sapiens
  siRNA target sequence for MGC2603 (NM_024037.1,670-688).
cagcccttaggcaagacta

SEQ ID NO: 385563 - DNA, 19 bp, Homo sapiens
  siRNA target sequence for MGC2603 (NM_024037.1,672-690).
gcccttaggcaagactaaa

SEQ ID NO: 385564 - DNA, 19 bp, Homo sapiens
  siRNA target sequence for MGC2603 (NM_024037.1,673-691).
cccttaggcaagactaaat

SEQ ID NO: 385565 - DNA, 19 bp, Homo sapiens
  siRNA target sequence for MGC2603 (NM_024037.1,794-812).
gccgtagtccagtttctgt

SEQ ID NO: 385566 - DNA, 19 bp, Homo sapiens
  siRNA target sequence for MGC2603 (NM_024037.1,813-831).
gttttcctgggacaatgaa

SEQ ID NO: 385567 - DNA, 19 bp, Homo sapiens
  siRNA target sequence for MGC2603 (NM_024037.1,843-861).
ggactcctggagtcaactt

SEQ ID NO: 385568 - DNA, 19 bp, Homo sapiens
  siRNA target sequence for MGC2603 (NM_024037.1,903-921).
cactagagctccttttcaa

SEQ ID NO: 385569 - DNA, 19 bp, Homo sapiens
  siRNA target sequence for MGC2603 (NM_024037.1,905-923).
ctagagctccttttcaaga

SEQ ID NO: 385570 - DNA, 19 bp, Homo sapiens
  siRNA target sequence for MGC2603 (NM_024037.1,910-928).
gctccttttcaagatgtaa

SEQ ID NO: 385571 - DNA, 19 bp, Homo sapiens
  siRNA target sequence for MGC2603 (NM_024037.1,946-964).
gacttagggccgtttccta

SEQ ID NO: 385572 - DNA, 19 bp, Homo sapiens
  siRNA target sequence for MGC2603 (NM_024037.1,990-1008).
ggatgggccaactcaaaat

SEQ ID NO: 385573 - DNA, 19 bp, Homo sapiens
  siRNA target sequence for MGC2603 (NM_024037.1,1031-1049).
cccaggactctgaaggtaa

SEQ ID NO: 385574 - DNA, 19 bp, Homo sapiens
  siRNA target sequence for MGC2603 (NM_024037.1,1035-1053).
ggactctgaaggtaatcaa

SEQ ID NO: 385575 - DNA, 19 bp, Homo sapiens
  siRNA target sequence for MGC2603 (NM_024037.1,1040-1058).
ctgaaggtaatcaagttat

SEQ ID NO: 385576 - DNA, 19 bp, Homo sapiens
  siRNA target sequence for MGC2803 (NM_024038.2,380-398).
ggtccgggctccacactta

SEQ ID NO: 385577 - DNA, 19 bp, Homo sapiens
  siRNA target sequence for MGC2803 (NM_024038.2,384-402).
cgggctccacacttagctt

SEQ ID NO: 385578 - DNA, 19 bp, Homo sapiens
  siRNA target sequence for MGC2803 (NM_024038.2,435-453).
ccctcaagacgggaatagt

SEQ ID NO: 385579 - DNA, 19 bp, Homo sapiens
  siRNA target sequence for MGC2803 (NM_024038.2,436-454).
cctcaagacgggaatagta

SEQ ID NO: 385580 - DNA, 19 bp, Homo sapiens
  siRNA target sequence for MGC2803 (NM_024038.2,469-487).
gacggaggatgaggtatta

SEQ ID NO: 385581 - DNA, 19 bp, Homo sapiens
  siRNA target sequence for MGC2803 (NM_024038.2,472-490).
ggaggatgaggtattaaca

SEQ ID NO: 385582 - DNA, 19 bp, Homo sapiens
  siRNA target sequence for MGC2803 (NM_024038.2,473-491).
gaggatgaggtattaacaa

SEQ ID NO: 385583 - DNA, 19 bp, Homo sapiens
  siRNA target sequence for MGC2803 (NM_024038.2,475-493).
ggatgaggtattaacaagt

SEQ ID NO: 385584 - DNA, 19 bp, Homo sapiens
  siRNA target sequence for MGC2803 (NM_024038.2,548-566).
cagtgcggtgacgatgata

SEQ ID NO: 385585 - DNA, 19 bp, Homo sapiens
  siRNA target sequence for MGC2803 (NM_024038.2,550-568).
gtgcggtgacgatgataaa

SEQ ID NO: 385586 - DNA, 19 bp, Homo sapiens
  siRNA target sequence for MGC2803 (NM_024038.2,553-571).
cggtgacgatgataaaact

SEQ ID NO: 385587 - DNA, 19 bp, Homo sapiens
  siRNA target sequence for MIS12 (NM_024039.1,574-592).
ctacgaggcccagttcttt

SEQ ID NO: 385588 - DNA, 19 bp, Homo sapiens
  siRNA target sequence for MIS12 (NM_024039.1,617-635).
cttcggatctacattgcat

SEQ ID NO: 385589 - DNA, 19 bp, Homo sapiens
  siRNA target sequence for MIS12 (NM_024039.1,621-639).
ggatctacattgcatttca

SEQ ID NO: 385590 - DNA, 19 bp, Homo sapiens
  siRNA target sequence for MIS12 (NM_024039.1,664-682).
ggccgttgaacaggttatt

SEQ ID NO: 385591 - DNA, 19 bp, Homo sapiens
  siRNA target sequence for MIS12 (NM_024039.1,666-684).
ccgttgaacaggttattct

SEQ ID NO: 385592 - DNA, 19 bp, Homo sapiens
  siRNA target sequence for MIS12 (NM_024039.1,827-845).
cgtattccctcaaacatct

SEQ ID NO: 385593 - DNA, 19 bp, Homo sapiens
  siRNA target sequence for MIS12 (NM_024039.1,875-893).
ccttatagtgaggaagatt

SEQ ID NO: 385594 - DNA, 19 bp, Homo sapiens
  siRNA target sequence for MIS12 (NM_024039.1,934-952).
gtacaagactgaattatgt

SEQ ID NO: 385595 - DNA, 19 bp, Homo sapiens
  siRNA target sequence for MIS12 (NM_024039.1,937-955).
caagactgaattatgtact

SEQ ID NO: 385596 - DNA, 19 bp, Homo sapiens
  siRNA target sequence for MIS12 (NM_024039.1,1007-1025).
ctcaaacagacgttgactt

SEQ ID NO: 385597 - DNA, 19 bp, Homo sapiens
  siRNA target sequence for MIS12 (NM_024039.1,1015-1033).
gacgttgactttctttgat

SEQ ID NO: 385598 - DNA, 19 bp, Homo sapiens
  siRNA target sequence for MIS12 (NM_024039.1,1017-1035).
cgttgactttctttgatga

SEQ ID NO: 385599 - DNA, 19 bp, Homo sapiens
  siRNA target sequence for MIS12 (NM_024039.1,1058-1076).
catgggactagtgatttta

SEQ ID NO: 385600 - DNA, 19 bp, Homo sapiens
  siRNA target sequence for MIS12 (NM_024039.1,1145-1163).
gaatcgaaacgactgaaaa

SEQ ID NO: 385601 - DNA, 19 bp, Homo sapiens
  siRNA target sequence for MGC2491 (NM_024040.1,158-176).
gcttggatgaggtcatctt

SEQ ID NO: 385602 - DNA, 19 bp, Homo sapiens
  siRNA target sequence for MGC2491 (NM_024040.1,237-255).
cgatatggaggctttcact

SEQ ID NO: 385603 - DNA, 19 bp, Homo sapiens
  siRNA target sequence for MGC2491 (NM_024040.1,431-449).
ccgaaatgctcaaagaaga

SEQ ID NO: 385604 - DNA, 19 bp, Homo sapiens
  siRNA target sequence for SCNM1 (NM_024041.1,99-117).
cgattggagtcaactcaat

SEQ ID NO: 385605 - DNA, 19 bp, Homo sapiens
  siRNA target sequence for SCNM1 (NM_024041.1,109-127).
caactcaatgtgctcaaaa

SEQ ID NO: 385606 - DNA, 19 bp, Homo sapiens
  siRNA target sequence for SCNM1 (NM_024041.1,144-162).
cctcctagccagttacatt

SEQ ID NO: 385607 - DNA, 19 bp, Homo sapiens
  siRNA target sequence for SCNM1 (NM_024041.1,187-205).
cgggatggacgctttgctt

SEQ ID NO: 385608 - DNA, 19 bp, Homo sapiens
  siRNA target sequence for SCNM1 (NM_024041.1,258-276).
ccaccgtgcaggcaagaaa

SEQ ID NO: 385609 - DNA, 19 bp, Homo sapiens
  siRNA target sequence for SCNM1 (NM_024041.1,261-279).
ccgtgcaggcaagaaacat

SEQ ID NO: 385610 - DNA, 19 bp, Homo sapiens
  siRNA target sequence for SCNM1 (NM_024041.1,263-281).
gtgcaggcaagaaacatct

SEQ ID NO: 385611 - DNA, 19 bp, Homo sapiens
  siRNA target sequence for SCNM1 (NM_024041.1,430-448).
cacagagctccccactata

SEQ ID NO: 385612 - DNA, 19 bp, Homo sapiens
  siRNA target sequence for SCNM1 (NM_024041.1,436-454).
gctccccactataacagtt

SEQ ID NO: 385613 - DNA, 19 bp, Homo sapiens
  siRNA target sequence for SCNM1 (NM_024041.1,515-533).
caccctcagaggtcaaact

SEQ ID NO: 385614 - DNA, 19 bp, Homo sapiens
  siRNA target sequence for SCNM1 (NM_024041.1,618-636).
catgagccccacaagaaga

SEQ ID NO: 385615 - DNA, 19 bp, Homo sapiens
  siRNA target sequence for SCNM1 (NM_024041.1,635-653).
gacgagccctggaccatta

SEQ ID NO: 385616 - DNA, 19 bp, Homo sapiens
  siRNA target sequence for SCNM1 (NM_024041.1,638-656).
gagccctggaccattatct

SEQ ID NO: 385617 - DNA, 19 bp, Homo sapiens
  siRNA target sequence for SCNM1 (NM_024041.1,695-713).
gtcgatgggtaaaagatga

SEQ ID NO: 385618 - DNA, 19 bp, Homo sapiens
  siRNA target sequence for SCNM1 (NM_024041.1,712-730).
gaaaatgttgagtttgact

SEQ ID NO: 385619 - DNA, 19 bp, Homo sapiens
  siRNA target sequence for MGC2601 (NM_024042.2,668-686).
gcaccagcgacttcgtaat

SEQ ID NO: 385620 - DNA, 19 bp, Homo sapiens
  siRNA target sequence for MGC2601 (NM_024042.2,669-687).
caccagcgacttcgtaatt

SEQ ID NO: 385621 - DNA, 19 bp, Homo sapiens
  siRNA target sequence for MGC2601 (NM_024042.2,671-689).
ccagcgacttcgtaattca

SEQ ID NO: 385622 - DNA, 19 bp, Homo sapiens
  siRNA target sequence for MGC2601 (NM_024042.2,811-829).
gggctgacctccattcgta

SEQ ID NO: 385623 - DNA, 19 bp, Homo sapiens
  siRNA target sequence for MGC3020 (NM_024048.2,739-757).
ccatgtcaccacatcactt

SEQ ID NO: 385624 - DNA, 19 bp, Homo sapiens
  siRNA target sequence for MGC2594 (NM_024050.2,143-161).
gcaattttagtcgatttca

SEQ ID NO: 385625 - DNA, 19 bp, Homo sapiens
  siRNA target sequence for MGC2594 (NM_024050.2,280-298).
catcagcaatgggacaaaa

SEQ ID NO: 385626 - DNA, 19 bp, Homo sapiens
  siRNA target sequence for C7orf24 (NM_024051.2,268-286).
ggattttaagcttgacttt

SEQ ID NO: 385627 - DNA, 19 bp, Homo sapiens
  siRNA target sequence for C7orf24 (NM_024051.2,289-307).
caattcccaaggcaaaaca

SEQ ID NO: 385628 - DNA, 19 bp, Homo sapiens
  siRNA target sequence for C7orf24 (NM_024051.2,366-384).
ggggagtagtatggaaaat

SEQ ID NO: 385629 - DNA, 19 bp, Homo sapiens
  siRNA target sequence for C7orf24 (NM_024051.2,432-450).
gtggaatgtatgttgtaat

SEQ ID NO: 385630 - DNA, 19 bp, Homo sapiens
  siRNA target sequence for C7orf24 (NM_024051.2,435-453).
gaatgtatgttgtaataga

SEQ ID NO: 385631 - DNA, 19 bp, Homo sapiens
  siRNA target sequence for C7orf24 (NM_024051.2,489-507).
cctgtcgaagttatctgat

SEQ ID NO: 385632 - DNA, 19 bp, Homo sapiens
  siRNA target sequence for C7orf24 (NM_024051.2,503-521).
ctgatgacaaattacgaaa

SEQ ID NO: 385633 - DNA, 19 bp, Homo sapiens
  siRNA target sequence for C7orf24 (NM_024051.2,530-548).
ccatccccacagtataaaa

SEQ ID NO: 385634 - DNA, 19 bp, Homo sapiens
  siRNA target sequence for C7orf24 (NM_024051.2,535-553).
cccacagtataaaaagatt

SEQ ID NO: 385635 - DNA, 19 bp, Homo sapiens
  siRNA target sequence for C7orf24 (NM_024051.2,585-603).
cgctggagtatcaagagaa

SEQ ID NO: 385636 - DNA, 19 bp, Homo sapiens
  siRNA target sequence for C7orf24 (NM_024051.2,611-629).
gcaatagaaccaaatgact

SEQ ID NO: 385637 - DNA, 19 bp, Homo sapiens
  siRNA target sequence for C7orf24 (NM_024051.2,612-630).
caatagaaccaaatgacta

SEQ ID NO: 385638 - DNA, 19 bp, Homo sapiens
  siRNA target sequence for MGC3048 (NM_024052.3,510-528).
gtgggtacttgaagattaa

SEQ ID NO: 385639 - DNA, 19 bp, Homo sapiens
  siRNA target sequence for MGC3048 (NM_024052.3,542-560).
gagtatccaacccttacaa

SEQ ID NO: 385640 - DNA, 19 bp, Homo sapiens
  siRNA target sequence for MGC3048 (NM_024052.3,561-579).
ccttcttcgaaggagaaat

SEQ ID NO: 385641 - DNA, 19 bp, Homo sapiens
  siRNA target sequence for MGC3048 (NM_024052.3,613-631).
gtgggatgcagatgaagat

SEQ ID NO: 385642 - DNA, 19 bp, Homo sapiens
  siRNA target sequence for MGC3048 (NM_024052.3,629-647).
gatgttgatcggaaacact

SEQ ID NO: 385643 - DNA, 19 bp, Homo sapiens
  siRNA target sequence for MGC3048 (NM_024052.3,766-784).
cccagatcacacgatcaaa

SEQ ID NO: 385644 - DNA, 19 bp, Homo sapiens
  siRNA target sequence for MGC3048 (NM_024052.3,768-786).
cagatcacacgatcaaaga

SEQ ID NO: 385645 - DNA, 19 bp, Homo sapiens
  siRNA target sequence for MGC3048 (NM_024052.3,770-788).
gatcacacgatcaaagaca

SEQ ID NO: 385646 - DNA, 19 bp, Homo sapiens
  siRNA target sequence for MGC3048 (NM_024052.3,806-824).
gccgggttctactacatct

SEQ ID NO: 385647 - DNA, 19 bp, Homo sapiens
  siRNA target sequence for MGC3048 (NM_024052.3,846-864).
ccatagagggctactacta

SEQ ID NO: 385648 - DNA, 19 bp, Homo sapiens
  siRNA target sequence for MGC3048 (NM_024052.3,862-880).
ctaccataggagttcagaa

SEQ ID NO: 385649 - DNA, 19 bp, Homo sapiens
  siRNA target sequence for MGC3048 (NM_024052.3,882-900).
ggtatcagtccctcaatct

SEQ ID NO: 385650 - DNA, 19 bp, Homo sapiens
  siRNA target sequence for MGC3048 (NM_024052.3,883-901).
gtatcagtccctcaatcta

SEQ ID NO: 385651 - DNA, 19 bp, Homo sapiens
  siRNA target sequence for MGC3048 (NM_024052.3,919-937).
cagtgcacccatctatgaa

SEQ ID NO: 385652 - DNA, 19 bp, Homo sapiens
  siRNA target sequence for C22orf18 (NM_024053.2,130-148).
cggactcgatgctcaaaga

SEQ ID NO: 385653 - DNA, 19 bp, Homo sapiens
  siRNA target sequence for C22orf18 (NM_024053.2,392-410).
gctggcccacacctatcaa

SEQ ID NO: 385654 - DNA, 19 bp, Homo sapiens
  siRNA target sequence for C22orf18 (NM_024053.2,393-411).
ctggcccacacctatcaaa

SEQ ID NO: 385655 - DNA, 19 bp, Homo sapiens
  siRNA target sequence for C7orf25 (NM_024054.1,179-197).
ccatgctctgtgaacgaat

SEQ ID NO: 385656 - DNA, 19 bp, Homo sapiens
  siRNA target sequence for C7orf25 (NM_024054.1,229-247).
gaatcactttctagatcaa

SEQ ID NO: 385657 - DNA, 19 bp, Homo sapiens
  siRNA target sequence for C7orf25 (NM_024054.1,337-355).
gctattaaagagtctcatt

SEQ ID NO: 385658 - DNA, 19 bp, Homo sapiens
  siRNA target sequence for C7orf25 (NM_024054.1,436-454).
gtctttggttatacagata

SEQ ID NO: 385659 - DNA, 19 bp, Homo sapiens
  siRNA target sequence for C7orf25 (NM_024054.1,558-576).
gctgggcaggggccaatat

SEQ ID NO: 385660 - DNA, 19 bp, Homo sapiens
  siRNA target sequence for C7orf25 (NM_024054.1,578-596).
gtgacaaaagcatcattga

SEQ ID NO: 385661 - DNA, 19 bp, Homo sapiens
  siRNA target sequence for C7orf25 (NM_024054.1,628-646).
cagcagccagtgcagtata

SEQ ID NO: 385662 - DNA, 19 bp, Homo sapiens
  siRNA target sequence for C7orf25 (NM_024054.1,781-799).
caaccaagtgagagtgaat

SEQ ID NO: 385663 - DNA, 19 bp, Homo sapiens
  siRNA target sequence for C7orf25 (NM_024054.1,836-854).
gagttgaccgagaaaatat

SEQ ID NO: 385664 - DNA, 19 bp, Homo sapiens
  siRNA target sequence for C7orf25 (NM_024054.1,859-877).
gcaagtgttgcgtttccaa

SEQ ID NO: 385665 - DNA, 19 bp, Homo sapiens
  siRNA target sequence for C7orf25 (NM_024054.1,865-883).
gttgcgtttccaacagaaa

SEQ ID NO: 385666 - DNA, 19 bp, Homo sapiens
  siRNA target sequence for C7orf25 (NM_024054.1,868-886).
gcgtttccaacagaaatta

SEQ ID NO: 385667 - DNA, 19 bp, Homo sapiens
  siRNA target sequence for C7orf25 (NM_024054.1,888-906).
ggtcgatgtgtgcaaaaga

SEQ ID NO: 385668 - DNA, 19 bp, Homo sapiens
  siRNA target sequence for C7orf25 (NM_024054.1,891-909).
cgatgtgtgcaaaagagta

SEQ ID NO: 385669 - DNA, 19 bp, Homo sapiens
  siRNA target sequence for C7orf25 (NM_024054.1,913-931).
ctggacattactactttaa

SEQ ID NO: 385670 - DNA, 19 bp, Homo sapiens
  siRNA target sequence for C7orf25 (NM_024054.1,916-934).
gacattactactttaatca

SEQ ID NO: 385671 - DNA, 19 bp, Homo sapiens
  siRNA target sequence for C7orf25 (NM_024054.1,1063-1081).
gagttgtttgcttgtgaat

SEQ ID NO: 385672 - DNA, 19 bp, Homo sapiens
  siRNA target sequence for C7orf25 (NM_024054.1,1092-1110).
ggactttcagtctatttta

SEQ ID NO: 385673 - DNA, 19 bp, Homo sapiens
  siRNA target sequence for C7orf25 (NM_024054.1,1140-1158).
gagggccactgtgttaatt

SEQ ID NO: 385674 - DNA, 19 bp, Homo sapiens
  siRNA target sequence for C7orf25 (NM_024054.1,1142-1160).
gggccactgtgttaattaa

SEQ ID NO: 385675 - DNA, 19 bp, Homo sapiens
  siRNA target sequence for C7orf25 (NM_024054.1,1150-1168).
gtgttaattaagcgaatta

SEQ ID NO: 385676 - DNA, 19 bp, Homo sapiens
  siRNA target sequence for C7orf25 (NM_024054.1,1232-1250).
gccgctcattaacaatttt

SEQ ID NO: 385677 - DNA, 19 bp, Homo sapiens
  siRNA target sequence for C7orf25 (NM_024054.1,1233-1251).
ccgctcattaacaattttt

SEQ ID NO: 385678 - DNA, 19 bp, Homo sapiens
  siRNA target sequence for C7orf25 (NM_024054.1,1267-1285).
ctaaaagccatcacaatga

SEQ ID NO: 385679 - DNA, 19 bp, Homo sapiens
  siRNA target sequence for C7orf25 (NM_024054.1,1278-1296).
cacaatgactgctaatagt

SEQ ID NO: 385680 - DNA, 19 bp, Homo sapiens
  siRNA target sequence for C7orf25 (NM_024054.1,1313-1331).
caaacaaccagggtgttaa

SEQ ID NO: 385681 - DNA, 19 bp, Homo sapiens
  siRNA target sequence for C7orf25 (NM_024054.1,1320-1338).
ccagggtgttaaatttagt

SEQ ID NO: 385682 - DNA, 19 bp, Homo sapiens
  siRNA target sequence for C7orf25 (NM_024054.1,1391-1409).
cccccttaccaaaagacta

SEQ ID NO: 385683 - DNA, 19 bp, Homo sapiens
  siRNA target sequence for MGC5576 (NM_024056.2,152-170).
gaattcaccgggagagata

SEQ ID NO: 385684 - DNA, 19 bp, Homo sapiens
  siRNA target sequence for MGC5576 (NM_024056.2,190-208).
ccaggggacaggctacatt

SEQ ID NO: 385685 - DNA, 19 bp, Homo sapiens
  siRNA target sequence for MGC5576 (NM_024056.2,269-287).
cctcagcgaactaagcaat

SEQ ID NO: 385686 - DNA, 19 bp, Homo sapiens
  siRNA target sequence for MGC5576 (NM_024056.2,386-404).
gtggtgaaagtcacattta

SEQ ID NO: 385687 - DNA, 19 bp, Homo sapiens
  siRNA target sequence for MGC5576 (NM_024056.2,388-406).
ggtgaaagtcacatttaat

SEQ ID NO: 385688 - DNA, 19 bp, Homo sapiens
  siRNA target sequence for MGC5576 (NM_024056.2,413-431).
gactcccttgtaattctca

SEQ ID NO: 385689 - DNA, 19 bp, Homo sapiens
  siRNA target sequence for MGC5576 (NM_024056.2,489-507).
gcctgtccagccagattca

SEQ ID NO: 385690 - DNA, 19 bp, Homo sapiens
  siRNA target sequence for MGC5576 (NM_024056.2,498-516).
gccagattcagtacatgaa

SEQ ID NO: 385691 - DNA, 19 bp, Homo sapiens
  siRNA target sequence for MGC5576 (NM_024056.2,519-537).
cagtggtcagtacatatgt

SEQ ID NO: 385692 - DNA, 19 bp, Homo sapiens
  siRNA target sequence for MGC5576 (NM_024056.2,521-539).
gtggtcagtacatatgtga

SEQ ID NO: 385693 - DNA, 19 bp, Homo sapiens
  siRNA target sequence for MGC5576 (NM_024056.2,611-629).
ggaccgttttcctatgtgt

SEQ ID NO: 385694 - DNA, 19 bp, Homo sapiens
  siRNA target sequence for MGC5576 (NM_024056.2,612-630).
gaccgttttcctatgtgta

SEQ ID NO: 385695 - DNA, 19 bp, Homo sapiens
  siRNA target sequence for MGC5576 (NM_024056.2,656-674).
ctggtgcacaacatagtga

SEQ ID NO: 385696 - DNA, 19 bp, Homo sapiens
  siRNA target sequence for MGC5576 (NM_024056.2,673-691).
gatcttcatgcgaacttca

SEQ ID NO: 385697 - DNA, 19 bp, Homo sapiens
  siRNA target sequence for MGC5576 (NM_024056.2,682-700).
gcgaacttcagtgaagatt

SEQ ID NO: 385698 - DNA, 19 bp, Homo sapiens
  siRNA target sequence for MGC5576 (NM_024056.2,683-701).
cgaacttcagtgaagattt

SEQ ID NO: 385699 - DNA, 19 bp, Homo sapiens
  siRNA target sequence for MGC5576 (NM_024056.2,690-708).
cagtgaagatttcatacat

SEQ ID NO: 385700 - DNA, 19 bp, Homo sapiens
  siRNA target sequence for MGC5590 (NM_024058.1,247-265).
cgtggccatgccattagca

SEQ ID NO: 385701 - DNA, 19 bp, Homo sapiens
  siRNA target sequence for MGC5590 (NM_024058.1,274-292).
ggcttctggacgagtttca

SEQ ID NO: 385702 - DNA, 19 bp, Homo sapiens
  siRNA target sequence for MGC5590 (NM_024058.1,275-293).
gcttctggacgagtttcat

SEQ ID NO: 385703 - DNA, 19 bp, Homo sapiens
  siRNA target sequence for MGC5590 (NM_024058.1,315-333).
cgcttggatcagcaagata

SEQ ID NO: 385704 - DNA, 19 bp, Homo sapiens
  siRNA target sequence for MGC5590 (NM_024058.1,317-335).
cttggatcagcaagataaa

SEQ ID NO: 385705 - DNA, 19 bp, Homo sapiens
  siRNA target sequence for MGC5356 (NM_024059.2,306-324).
cgtaagtgctcctactaca

SEQ ID NO: 385706 - DNA, 19 bp, Homo sapiens
  siRNA target sequence for MGC5356 (NM_024059.2,307-325).
gtaagtgctcctactacat

SEQ ID NO: 385707 - DNA, 19 bp, Homo sapiens
  siRNA target sequence for MGC5356 (NM_024059.2,911-929).
gctgcccaaccgatcctat

SEQ ID NO: 385708 - DNA, 19 bp, Homo sapiens
  siRNA target sequence for MGC5356 (NM_024059.2,912-930).
ctgcccaaccgatcctata

SEQ ID NO: 385709 - DNA, 19 bp, Homo sapiens
  siRNA target sequence for MGC5356 (NM_024059.2,915-933).
cccaaccgatcctataagt

SEQ ID NO: 385710 - DNA, 19 bp, Homo sapiens
  siRNA target sequence for MGC5356 (NM_024059.2,916-934).
ccaaccgatcctataagtt

SEQ ID NO: 385711 - DNA, 19 bp, Homo sapiens
  siRNA target sequence for C7orf26 (NM_024067.2,183-201).
gcagcccaagagactgaat

SEQ ID NO: 385712 - DNA, 19 bp, Homo sapiens
  siRNA target sequence for C7orf26 (NM_024067.2,184-202).
cagcccaagagactgaatt

SEQ ID NO: 385713 - DNA, 19 bp, Homo sapiens
  siRNA target sequence for C7orf26 (NM_024067.2,210-228).
ggagcttcaacttcttgaa

SEQ ID NO: 385714 - DNA, 19 bp, Homo sapiens
  siRNA target sequence for C7orf26 (NM_024067.2,226-244).
gaaatcatgtgcaattatt

SEQ ID NO: 385715 - DNA, 19 bp, Homo sapiens
  siRNA target sequence for C7orf26 (NM_024067.2,262-280).
gactctgttcggcagatta

SEQ ID NO: 385716 - DNA, 19 bp, Homo sapiens
  siRNA target sequence for C7orf26 (NM_024067.2,415-433).
cggacgcccgtggtttact

SEQ ID NO: 385717 - DNA, 19 bp, Homo sapiens
  siRNA target sequence for C7orf26 (NM_024067.2,417-435).
gacgcccgtggtttactgt

SEQ ID NO: 385718 - DNA, 19 bp, Homo sapiens
  siRNA target sequence for C7orf26 (NM_024067.2,478-496).
gtgccgggatccattcaga

SEQ ID NO: 385719 - DNA, 19 bp, Homo sapiens
  siRNA target sequence for C7orf26 (NM_024067.2,498-516).
gctgaagcagatattcagt

SEQ ID NO: 385720 - DNA, 19 bp, Homo sapiens
  siRNA target sequence for C7orf26 (NM_024067.2,551-569).
ccgttaccgcgctctatga

SEQ ID NO: 385721 - DNA, 19 bp, Homo sapiens
  siRNA target sequence for C7orf26 (NM_024067.2,637-655).
gacccaaggttgattctca

SEQ ID NO: 385722 - DNA, 19 bp, Homo sapiens
  siRNA target sequence for C7orf26 (NM_024067.2,681-699).
ggccaatctgccaatagga

SEQ ID NO: 385723 - DNA, 19 bp, Homo sapiens
  siRNA target sequence for C7orf26 (NM_024067.2,682-700).
gccaatctgccaataggat

SEQ ID NO: 385724 - DNA, 19 bp, Homo sapiens
  siRNA target sequence for C7orf26 (NM_024067.2,713-731).
ccccgctcgttggattgat

SEQ ID NO: 385725 - DNA, 19 bp, Homo sapiens
  siRNA target sequence for C7orf26 (NM_024067.2,842-860).
gagactcccacctcttgta

SEQ ID NO: 385726 - DNA, 19 bp, Homo sapiens
  siRNA target sequence for C7orf26 (NM_024067.2,844-862).
gactcccacctcttgtact

SEQ ID NO: 385727 - DNA, 19 bp, Homo sapiens
  siRNA target sequence for C7orf26 (NM_024067.2,971-989).
cgctggtagaggagatcaa

SEQ ID NO: 385728 - DNA, 19 bp, Homo sapiens
  siRNA target sequence for C7orf26 (NM_024067.2,1128-1146).
ctccaggctgccccataat

SEQ ID NO: 385729 - DNA, 19 bp, Homo sapiens
  siRNA target sequence for C7orf26 (NM_024067.2,1133-1151).
ggctgccccataataacct

SEQ ID NO: 385730 - DNA, 19 bp, Homo sapiens
  siRNA target sequence for MGC2731 (NM_024068.2,139-157).
cgacggagacctttgtgaa

SEQ ID NO: 385731 - DNA, 19 bp, Homo sapiens
  siRNA target sequence for MGC2731 (NM_024068.2,164-182).
caagcctgggctcaagaat

SEQ ID NO: 385732 - DNA, 19 bp, Homo sapiens
  siRNA target sequence for MGC2731 (NM_024068.2,214-232).
gccgagtgaccaagacaaa

SEQ ID NO: 385733 - DNA, 19 bp, Homo sapiens
  siRNA target sequence for MGC2731 (NM_024068.2,347-365).
caaagggtacgcttcagtt

SEQ ID NO: 385734 - DNA, 19 bp, Homo sapiens
  siRNA target sequence for MGC2731 (NM_024068.2,351-369).
gggtacgcttcagttttca

SEQ ID NO: 385735 - DNA, 19 bp, Homo sapiens
  siRNA target sequence for MGC2731 (NM_024068.2,352-370).
ggtacgcttcagttttcaa

SEQ ID NO: 385736 - DNA, 19 bp, Homo sapiens
  siRNA target sequence for MGC2731 (NM_024068.2,353-371).
gtacgcttcagttttcaaa

SEQ ID NO: 385737 - DNA, 19 bp, Homo sapiens
  siRNA target sequence for MGC2731 (NM_024068.2,401-419).
gggtgatctgcagaagatt

SEQ ID NO: 385738 - DNA, 19 bp, Homo sapiens
  siRNA target sequence for MGC2731 (NM_024068.2,718-736).
ccagcaaccctgttagtaa

SEQ ID NO: 385739 - DNA, 19 bp, Homo sapiens
  siRNA target sequence for MGC2749 (NM_024069.2,193-211).
catggtgaacacagatgat

SEQ ID NO: 385740 - DNA, 19 bp, Homo sapiens
  siRNA target sequence for MGC2749 (NM_024069.2,342-360).
cgaggaccctagtagagat

SEQ ID NO: 385741 - DNA, 19 bp, Homo sapiens
  siRNA target sequence for MGC2749 (NM_024069.2,345-363).
ggaccctagtagagatgaa

SEQ ID NO: 385742 - DNA, 19 bp, Homo sapiens
  siRNA target sequence for MGC2749 (NM_024069.2,346-364).
gaccctagtagagatgaaa

SEQ ID NO: 385743 - DNA, 19 bp, Homo sapiens
  siRNA target sequence for MGC3169 (NM_024074.1,159-177).
ccgtcttcgacctcagtta

SEQ ID NO: 385744 - DNA, 19 bp, Homo sapiens
  siRNA target sequence for MGC3169 (NM_024074.1,161-179).
gtcttcgacctcagttact

SEQ ID NO: 385745 - DNA, 19 bp, Homo sapiens
  siRNA target sequence for MGC3169 (NM_024074.1,190-208).
catcctctacctcaagtat

SEQ ID NO: 385746 - DNA, 19 bp, Homo sapiens
  siRNA target sequence for MGC3169 (NM_024074.1,312-330).
gggagccactgatcgatta

SEQ ID NO: 385747 - DNA, 19 bp, Homo sapiens
  siRNA target sequence for MGC3169 (NM_024074.1,314-332).
gagccactgatcgattact

SEQ ID NO: 385748 - DNA, 19 bp, Homo sapiens
  siRNA target sequence for MGC3169 (NM_024074.1,363-381).
cagctgtctggtacttgat

SEQ ID NO: 385749 - DNA, 19 bp, Homo sapiens
  siRNA target sequence for MGC3169 (NM_024074.1,520-538).
cgggtggttcgtcatgatt

SEQ ID NO: 385750 - DNA, 19 bp, Homo sapiens
  siRNA target sequence for MGC3169 (NM_024074.1,568-586).
cgccctcatgtccaacttt

SEQ ID NO: 385751 - DNA, 19 bp, Homo sapiens
  siRNA target sequence for MGC3169 (NM_024074.1,626-644).
gagatcctgcacatgtctt

SEQ ID NO: 385752 - DNA, 19 bp, Homo sapiens
  siRNA target sequence for MGC3162 (NM_024078.1,193-211).
gcacgtgcagccgtctttt

SEQ ID NO: 385753 - DNA, 19 bp, Homo sapiens
  siRNA target sequence for MGC3162 (NM_024078.1,288-306).
ggagccacacggaagtaca

SEQ ID NO: 385754 - DNA, 19 bp, Homo sapiens
  siRNA target sequence for MGC3162 (NM_024078.1,717-735).
gtctccagcttctatgtga

SEQ ID NO: 385755 - DNA, 19 bp, Homo sapiens
  siRNA target sequence for MGC3162 (NM_024078.1,895-913).
cgcagcccacgctcatgat

SEQ ID NO: 385756 - DNA, 19 bp, Homo sapiens
  siRNA target sequence for MGC3162 (NM_024078.1,964-982).
ccttgaacgggctgttcat

SEQ ID NO: 385757 - DNA, 19 bp, Homo sapiens
  siRNA target sequence for MGC3162 (NM_024078.1,971-989).
cgggctgttcatcttgatt

SEQ ID NO: 385758 - DNA, 19 bp, Homo sapiens
  siRNA target sequence for MGC3162 (NM_024078.1,973-991).
ggctgttcatcttgattca

SEQ ID NO: 385759 - DNA, 19 bp, Homo sapiens
  siRNA target sequence for MGC3162 (NM_024078.1,1051-1069).
ctgtctttcacgtcaagta

SEQ ID NO: 385760 - DNA, 19 bp, Homo sapiens
  siRNA target sequence for MGC3162 (NM_024078.1,1460-1478).
cacggcctacgagatcttt

SEQ ID NO: 385761 - DNA, 19 bp, Homo sapiens
  siRNA target sequence for MGC3162 (NM_024078.1,1462-1480).
cggcctacgagatctttga

SEQ ID NO: 385762 - DNA, 19 bp, Homo sapiens
  siRNA target sequence for TMG4 (NM_024081.4,321-339).
gaggtccaaaggcttctaa

SEQ ID NO: 385763 - DNA, 19 bp, Homo sapiens
  siRNA target sequence for TMG4 (NM_024081.4,392-410).
catagacgccttctgtata

SEQ ID NO: 385764 - DNA, 19 bp, Homo sapiens
  siRNA target sequence for TMG4 (NM_024081.4,438-456).
ccggcaacctagaaagaga

SEQ ID NO: 385765 - DNA, 19 bp, Homo sapiens
  siRNA target sequence for TMG4 (NM_024081.4,455-473).
gagtgcaatgaagaacttt

SEQ ID NO: 385766 - DNA, 19 bp, Homo sapiens
  siRNA target sequence for TMG4 (NM_024081.4,459-477).
gcaatgaagaactttgcaa

SEQ ID NO: 385767 - DNA, 19 bp, Homo sapiens
  siRNA target sequence for TMG4 (NM_024081.4,503-521).
gtggatgaagataaaacga

SEQ ID NO: 385768 - DNA, 19 bp, Homo sapiens
  siRNA target sequence for TMG4 (NM_024081.4,509-527).
gaagataaaacgattgcat

SEQ ID NO: 385769 - DNA, 19 bp, Homo sapiens
  siRNA target sequence for TMG4 (NM_024081.4,552-570).
gaccaaccacaaaatcaga

SEQ ID NO: 385770 - DNA, 19 bp, Homo sapiens
  siRNA target sequence for TMG4 (NM_024081.4,600-618).
gccttctgactggattaat

SEQ ID NO: 385771 - DNA, 19 bp, Homo sapiens
  siRNA target sequence for TMG4 (NM_024081.4,621-639).
ctgctggagtatttttggt

SEQ ID NO: 385772 - DNA, 19 bp, Homo sapiens
  siRNA target sequence for TMG4 (NM_024081.4,656-674).
ggctactatctttgtatca

SEQ ID NO: 385773 - DNA, 19 bp, Homo sapiens
  siRNA target sequence for TMG4 (NM_024081.4,702-720).
gctcttcagccgtctatga

SEQ ID NO: 385774 - DNA, 19 bp, Homo sapiens
  siRNA target sequence for TMG4 (NM_024081.4,731-749).
cacactccctccatcattt

SEQ ID NO: 385775 - DNA, 19 bp, Homo sapiens
  siRNA target sequence for TMG4 (NM_024081.4,796-814).
ggaggatgcaggattacct

SEQ ID NO: 385776 - DNA, 19 bp, Homo sapiens
  siRNA target sequence for TMG4 (NM_024081.4,804-822).
caggattaccttcttatga

SEQ ID NO: 385777 - DNA, 19 bp, Homo sapiens
  siRNA target sequence for TMG4 (NM_024081.4,807-825).
gattaccttcttatgaaca

SEQ ID NO: 385778 - DNA, 19 bp, Homo sapiens
  siRNA target sequence for TMG4 (NM_024081.4,875-893).
cctgggcacacaaaaggat

SEQ ID NO: 385779 - DNA, 19 bp, Homo sapiens
  siRNA target sequence for TMG4 (NM_024081.4,876-894).
ctgggcacacaaaaggatt

SEQ ID NO: 385780 - DNA, 19 bp, Homo sapiens
  siRNA target sequence for TMG4 (NM_024081.4,878-896).
gggcacacaaaaggattta

SEQ ID NO: 385781 - DNA, 19 bp, Homo sapiens
  siRNA target sequence for FLJ22169 (NM_024085.2,108-126).
gcgcagtttgacactgaat

SEQ ID NO: 385782 - DNA, 19 bp, Homo sapiens
  siRNA target sequence for FLJ22169 (NM_024085.2,109-127).
cgcagtttgacactgaata

SEQ ID NO: 385783 - DNA, 19 bp, Homo sapiens
  siRNA target sequence for FLJ22169 (NM_024085.2,134-152).
cctagaggcctcctatagt

SEQ ID NO: 385784 - DNA, 19 bp, Homo sapiens
  siRNA target sequence for FLJ22169 (NM_024085.2,138-156).
gaggcctcctatagtgatt

SEQ ID NO: 385785 - DNA, 19 bp, Homo sapiens
  siRNA target sequence for FLJ22169 (NM_024085.2,242-260).
cttctctcgagtttataat

SEQ ID NO: 385786 - DNA, 19 bp, Homo sapiens
  siRNA target sequence for FLJ22169 (NM_024085.2,267-285).
cagaagaatggcttcacat

SEQ ID NO: 385787 - DNA, 19 bp, Homo sapiens
  siRNA target sequence for FLJ22169 (NM_024085.2,358-376).
gctgcgtggactatgacat

SEQ ID NO: 385788 - DNA, 19 bp, Homo sapiens
  siRNA target sequence for FLJ22169 (NM_024085.2,363-381).
gtggactatgacatcctat

SEQ ID NO: 385789 - DNA, 19 bp, Homo sapiens
  siRNA target sequence for FLJ22169 (NM_024085.2,532-550).
ggatccaccggcttatcaa

SEQ ID NO: 385790 - DNA, 19 bp, Homo sapiens
  siRNA target sequence for FLJ22169 (NM_024085.2,537-555).
caccggcttatcaagttca

SEQ ID NO: 385791 - DNA, 19 bp, Homo sapiens
  siRNA target sequence for FLJ22169 (NM_024085.2,541-559).
ggcttatcaagttcatcta

SEQ ID NO: 385792 - DNA, 19 bp, Homo sapiens
  siRNA target sequence for FLJ22169 (NM_024085.2,543-561).
cttatcaagttcatctata

SEQ ID NO: 385793 - DNA, 19 bp, Homo sapiens
  siRNA target sequence for FLJ22169 (NM_024085.2,835-853).
cccgtggtctcaagtacaa

SEQ ID NO: 385794 - DNA, 19 bp, Homo sapiens
  siRNA target sequence for FLJ22169 (NM_024085.2,837-855).
cgtggtctcaagtacaact

SEQ ID NO: 385795 - DNA, 19 bp, Homo sapiens
  siRNA target sequence for FLJ22169 (NM_024085.2,875-893).
gggacctggctctctgttt

SEQ ID NO: 385796 - DNA, 19 bp, Homo sapiens
  siRNA target sequence for FLJ22169 (NM_024085.2,908-926).
cctcaaggccgagtacaaa

SEQ ID NO: 385797 - DNA, 19 bp, Homo sapiens
  siRNA target sequence for FLJ22169 (NM_024085.2,979-997).
ggattggcatcgctaactt

SEQ ID NO: 385798 - DNA, 19 bp, Homo sapiens
  siRNA target sequence for FLJ22169 (NM_024085.2,1184-1202).
cgcctccaagtacatgaat

SEQ ID NO: 385799 - DNA, 19 bp, Homo sapiens
  siRNA target sequence for FLJ22169 (NM_024085.2,1189-1207).
ccaagtacatgaattgctt

SEQ ID NO: 385800 - DNA, 19 bp, Homo sapiens
  siRNA target sequence for FLJ22169 (NM_024085.2,1288-1306).
ccatttatgacgaagatgt

SEQ ID NO: 385801 - DNA, 19 bp, Homo sapiens
  siRNA target sequence for FLJ22169 (NM_024085.2,1360-1378).
ccgtgtgcaggtcctttat

SEQ ID NO: 385802 - DNA, 19 bp, Homo sapiens
  siRNA target sequence for FLJ22169 (NM_024085.2,1596-1614).
gccctggagattatagact

SEQ ID NO: 385803 - DNA, 19 bp, Homo sapiens
  siRNA target sequence for FLJ22169 (NM_024085.2,1905-1923).
gaaaatgccctctttacgt

SEQ ID NO: 385804 - DNA, 19 bp, Homo sapiens
  siRNA target sequence for FLJ22169 (NM_024085.2,2192-2210).
ggtgctgtcagaatatgca

SEQ ID NO: 385805 - DNA, 19 bp, Homo sapiens
  siRNA target sequence for FLJ22169 (NM_024085.2,2224-2242).
gcctgcatgccctctatat

SEQ ID NO: 385806 - DNA, 19 bp, Homo sapiens
  siRNA target sequence for FLJ22169 (NM_024085.2,2372-2390).
ccctcgctctgctagctat

SEQ ID NO: 385807 - DNA, 19 bp, Homo sapiens
  siRNA target sequence for FLJ22169 (NM_024085.2,2604-2622).
cctcaggtgcacaaggtat

SEQ ID NO: 385808 - DNA, 19 bp, Homo sapiens
  siRNA target sequence for MGC3329 (NM_024086.2,170-188).
ggacaaacctcctgacttt

SEQ ID NO: 385809 - DNA, 19 bp, Homo sapiens
  siRNA target sequence for MGC3329 (NM_024086.2,246-264).
ggaagagtgagccttaatt

SEQ ID NO: 385810 - DNA, 19 bp, Homo sapiens
  siRNA target sequence for MGC3329 (NM_024086.2,247-265).
gaagagtgagccttaattt

SEQ ID NO: 385811 - DNA, 19 bp, Homo sapiens
  siRNA target sequence for MGC3329 (NM_024086.2,368-386).
cttgagactcaactatatt

SEQ ID NO: 385812 - DNA, 19 bp, Homo sapiens
  siRNA target sequence for MGC3329 (NM_024086.2,411-429).
caccaggattctgacaaaa

SEQ ID NO: 385813 - DNA, 19 bp, Homo sapiens
  siRNA target sequence for MGC3329 (NM_024086.2,435-453).
ctccgaagaggaattgaca

SEQ ID NO: 385814 - DNA, 19 bp, Homo sapiens
  siRNA target sequence for MGC3329 (NM_024086.2,437-455).
ccgaagaggaattgacata

SEQ ID NO: 385815 - DNA, 19 bp, Homo sapiens
  siRNA target sequence for MGC3329 (NM_024086.2,509-527).
gtatttcctcgcaacagaa

SEQ ID NO: 385816 - DNA, 19 bp, Homo sapiens
  siRNA target sequence for MGC3329 (NM_024086.2,519-537).
gcaacagaagtggatgata

SEQ ID NO: 385817 - DNA, 19 bp, Homo sapiens
  siRNA target sequence for MGC3329 (NM_024086.2,531-549).
gatgatatgtgtttcaact

SEQ ID NO: 385818 - DNA, 19 bp, Homo sapiens
  siRNA target sequence for MGC3329 (NM_024086.2,623-641).
cctgatggatgctcttaaa

SEQ ID NO: 385819 - DNA, 19 bp, Homo sapiens
  siRNA target sequence for MGC3329 (NM_024086.2,684-702).
cccttttttgccaatcaat

SEQ ID NO: 385820 - DNA, 19 bp, Homo sapiens
  siRNA target sequence for MGC3329 (NM_024086.2,705-723).
gaagccaagggagtaaact

SEQ ID NO: 385821 - DNA, 19 bp, Homo sapiens
  siRNA target sequence for MGC3329 (NM_024086.2,713-731).
gggagtaaactcacgaaat

SEQ ID NO: 385822 - DNA, 19 bp, Homo sapiens
  siRNA target sequence for MGC3329 (NM_024086.2,741-759).
cctccgcctagttctgtta

SEQ ID NO: 385823 - DNA, 19 bp, Homo sapiens
  siRNA target sequence for MGC3329 (NM_024086.2,742-760).
ctccgcctagttctgttaa

SEQ ID NO: 385824 - DNA, 19 bp, Homo sapiens
  siRNA target sequence for MGC3329 (NM_024086.2,744-762).
ccgcctagttctgttaata

SEQ ID NO: 385825 - DNA, 19 bp, Homo sapiens
  siRNA target sequence for MGC3329 (NM_024086.2,746-764).
gcctagttctgttaataca

SEQ ID NO: 385826 - DNA, 19 bp, Homo sapiens
  siRNA target sequence for MGC3329 (NM_024086.2,789-807).
gaaggaggtgaattagagt

SEQ ID NO: 385827 - DNA, 19 bp, Homo sapiens
  siRNA target sequence for MGC3329 (NM_024086.2,793-811).
gaggtgaattagagtttgt

SEQ ID NO: 385828 - DNA, 19 bp, Homo sapiens
  siRNA target sequence for MGC3329 (NM_024086.2,795-813).
ggtgaattagagtttgtta

SEQ ID NO: 385829 - DNA, 19 bp, Homo sapiens
  siRNA target sequence for MGC3329 (NM_024086.2,905-923).
ggaggagcttcgcatacaa

SEQ ID NO: 385830 - DNA, 19 bp, Homo sapiens
  siRNA target sequence for MGC3329 (NM_024086.2,925-943).
gggttcccaaagtaacgta

SEQ ID NO: 385831 - DNA, 19 bp, Homo sapiens
  siRNA target sequence for MGC3329 (NM_024086.2,957-975).
caaggtcggacaatgagat

SEQ ID NO: 385832 - DNA, 19 bp, Homo sapiens
  siRNA target sequence for MGC3329 (NM_024086.2,978-996).
gccttagcttggagttttt

SEQ ID NO: 385833 - DNA, 19 bp, Homo sapiens
  siRNA target sequence for MGC3329 (NM_024086.2,1021-1039).
caccaagtaagcgaagaaa

SEQ ID NO: 385834 - DNA, 19 bp, Homo sapiens
  siRNA target sequence for MGC3329 (NM_024086.2,1027-1045).
gtaagcgaagaaaattaga

SEQ ID NO: 385835 - DNA, 19 bp, Homo sapiens
  siRNA target sequence for MGC3329 (NM_024086.2,1031-1049).
gcgaagaaaattagagaaa

SEQ ID NO: 385836 - DNA, 19 bp, Homo sapiens
  siRNA target sequence for MGC3329 (NM_024086.2,1050-1068).
ccgagaaaacccataacat

SEQ ID NO: 385837 - DNA, 19 bp, Homo sapiens
  siRNA target sequence for MGC3329 (NM_024086.2,1081-1099).
cgtccgtgatgaaggaatt

SEQ ID NO: 385838 - DNA, 19 bp, Homo sapiens
  siRNA target sequence for MGC3329 (NM_024086.2,1148-1166).
cgttgtcacgacatggatt

SEQ ID NO: 385839 - DNA, 19 bp, Homo sapiens
  siRNA target sequence for MGC3329 (NM_024086.2,1152-1170).
gtcacgacatggattgaaa

SEQ ID NO: 385840 - DNA, 19 bp, Homo sapiens
  siRNA target sequence for MGC3329 (NM_024086.2,1239-1257).
ctaacggccatagaaaact

SEQ ID NO: 385841 - DNA, 19 bp, Homo sapiens
  siRNA target sequence for MGC3329 (NM_024086.2,1550-1568).
ggaggttttggaaagttgt

SEQ ID NO: 385842 - DNA, 19 bp, Homo sapiens
  siRNA target sequence for KDELC1 (NM_024089.1,344-362).
ggcactttgctactttatt

SEQ ID NO: 385843 - DNA, 19 bp, Homo sapiens
  siRNA target sequence for KDELC1 (NM_024089.1,421-439).
cccggagaagagcgaaata

SEQ ID NO: 385844 - DNA, 19 bp, Homo sapiens
  siRNA target sequence for KDELC1 (NM_024089.1,422-440).
ccggagaagagcgaaatat

SEQ ID NO: 385845 - DNA, 19 bp, Homo sapiens
  siRNA target sequence for KDELC1 (NM_024089.1,528-546).
cttctccaggcgaaaaggt

SEQ ID NO: 385846 - DNA, 19 bp, Homo sapiens
  siRNA target sequence for KDELC1 (NM_024089.1,569-587).
ccagaggagcaattcacta

SEQ ID NO: 385847 - DNA, 19 bp, Homo sapiens
  siRNA target sequence for KDELC1 (NM_024089.1,601-619).
ggttttagaccgaaaagat

SEQ ID NO: 385848 - DNA, 19 bp, Homo sapiens
  siRNA target sequence for KDELC1 (NM_024089.1,620-638).
gggtccttcatagtaagat

SEQ ID NO: 385849 - DNA, 19 bp, Homo sapiens
  siRNA target sequence for KDELC1 (NM_024089.1,650-668).
gcaagctacaaaaatctga

SEQ ID NO: 385850 - DNA, 19 bp, Homo sapiens
  siRNA target sequence for KDELC1 (NM_024089.1,698-716).
gtggccaaatccccatata

SEQ ID NO: 385851 - DNA, 19 bp, Homo sapiens
  siRNA target sequence for KDELC1 (NM_024089.1,749-767).
gactgtcctctgcaagata

SEQ ID NO: 385852 - DNA, 19 bp, Homo sapiens
  siRNA target sequence for KDELC1 (NM_024089.1,902-920).
ctatgtcactacaccttaa

SEQ ID NO: 385853 - DNA, 19 bp, Homo sapiens
  siRNA target sequence for KDELC1 (NM_024089.1,906-924).
gtcactacaccttaaagga

SEQ ID NO: 385854 - DNA, 19 bp, Homo sapiens
  siRNA target sequence for KDELC1 (NM_024089.1,940-958).
caagactcatggtgaacat

SEQ ID NO: 385855 - DNA, 19 bp, Homo sapiens
  siRNA target sequence for KDELC1 (NM_024089.1,950-968).
ggtgaacatgtaggtttta

SEQ ID NO: 385856 - DNA, 19 bp, Homo sapiens
  siRNA target sequence for KDELC1 (NM_024089.1,976-994).
catggatgccatactactt

SEQ ID NO: 385857 - DNA, 19 bp, Homo sapiens
  siRNA target sequence for KDELC1 (NM_024089.1,1116-1134).
cagattccaaggatatcgt

SEQ ID NO: 385858 - DNA, 19 bp, Homo sapiens
  siRNA target sequence for KDELC1 (NM_024089.1,1133-1151).
gtgatgcctacgtacgatt

SEQ ID NO: 385859 - DNA, 19 bp, Homo sapiens
  siRNA target sequence for KDELC1 (NM_024089.1,1138-1156).
gcctacgtacgatttgact

SEQ ID NO: 385860 - DNA, 19 bp, Homo sapiens
  siRNA target sequence for KDELC1 (NM_024089.1,1282-1300).
gagactcgagctggttaaa

SEQ ID NO: 385861 - DNA, 19 bp, Homo sapiens
  siRNA target sequence for KDELC1 (NM_024089.1,1286-1304).
ctcgagctggttaaactca

SEQ ID NO: 385862 - DNA, 19 bp, Homo sapiens
  siRNA target sequence for KDELC1 (NM_024089.1,1292-1310).
ctggttaaactcagtagaa

SEQ ID NO: 385863 - DNA, 19 bp, Homo sapiens
  siRNA target sequence for KDELC1 (NM_024089.1,1375-1393).
gtatggtcccattgtgaaa

SEQ ID NO: 385864 - DNA, 19 bp, Homo sapiens
  siRNA target sequence for KDELC1 (NM_024089.1,1379-1397).
ggtcccattgtgaaacata

SEQ ID NO: 385865 - DNA, 19 bp, Homo sapiens
  siRNA target sequence for KDELC1 (NM_024089.1,1414-1432).
cttcaagcataagtatcaa

SEQ ID NO: 385866 - DNA, 19 bp, Homo sapiens
  siRNA target sequence for KDELC1 (NM_024089.1,1417-1435).
caagcataagtatcaaata

SEQ ID NO: 385867 - DNA, 19 bp, Homo sapiens
  siRNA target sequence for KDELC1 (NM_024089.1,1426-1444).
gtatcaaataaatatcgat

SEQ ID NO: 385868 - DNA, 19 bp, Homo sapiens
  siRNA target sequence for KDELC1 (NM_024089.1,1457-1475).
gcttatcgcctgccatatt

SEQ ID NO: 385869 - DNA, 19 bp, Homo sapiens
  siRNA target sequence for KDELC1 (NM_024089.1,1458-1476).
cttatcgcctgccatattt

SEQ ID NO: 385870 - DNA, 19 bp, Homo sapiens
  siRNA target sequence for KDELC1 (NM_024089.1,1507-1525).
ggattccatctactatgaa

SEQ ID NO: 385871 - DNA, 19 bp, Homo sapiens
  siRNA target sequence for KDELC1 (NM_024089.1,1512-1530).
ccatctactatgaacattt

SEQ ID NO: 385872 - DNA, 19 bp, Homo sapiens
  siRNA target sequence for KDELC1 (NM_024089.1,1546-1564).
gccctggaaacactacatt

SEQ ID NO: 385873 - DNA, 19 bp, Homo sapiens
  siRNA target sequence for KDELC1 (NM_024089.1,1580-1598).
ctgagcgatctgctagaaa

SEQ ID NO: 385874 - DNA, 19 bp, Homo sapiens
  siRNA target sequence for KDELC1 (NM_024089.1,1628-1646).
gaggccaaaaagatagcaa

SEQ ID NO: 385875 - DNA, 19 bp, Homo sapiens
  siRNA target sequence for KDELC1 (NM_024089.1,1676-1694).
ctcatgggcgatgacatat

SEQ ID NO: 385876 - DNA, 19 bp, Homo sapiens
  siRNA target sequence for KDELC1 (NM_024089.1,1682-1700).
ggcgatgacatattctgtt

SEQ ID NO: 385877 - DNA, 19 bp, Homo sapiens
  siRNA target sequence for KDELC1 (NM_024089.1,1683-1701).
gcgatgacatattctgtta

SEQ ID NO: 385878 - DNA, 19 bp, Homo sapiens
  siRNA target sequence for KDELC1 (NM_024089.1,1717-1735).
ccaggaatatgccaattta

SEQ ID NO: 385879 - DNA, 19 bp, Homo sapiens
  siRNA target sequence for KDELC1 (NM_024089.1,1720-1738).
ggaatatgccaatttacaa

SEQ ID NO: 385880 - DNA, 19 bp, Homo sapiens
  siRNA target sequence for KDELC1 (NM_024089.1,1795-1813).
cgacctcttcccttgtact

SEQ ID NO: 385881 - DNA, 19 bp, Homo sapiens
  siRNA target sequence for KDELC1 (NM_024089.1,1796-1814).
gacctcttcccttgtactt

SEQ ID NO: 385882 - DNA, 19 bp, Homo sapiens
  siRNA target sequence for KDELC1 (NM_024089.1,1806-1824).
cttgtacttgccataggaa

SEQ ID NO: 385883 - DNA, 19 bp, Homo sapiens
  siRNA target sequence for MGC5297 (NM_024091.2,155-173).
gaggaagaacctttatcgt

SEQ ID NO: 385884 - DNA, 19 bp, Homo sapiens
  siRNA target sequence for MGC5297 (NM_024091.2,164-182).
cctttatcgtttatctgat

SEQ ID NO: 385885 - DNA, 19 bp, Homo sapiens
  siRNA target sequence for MGC5297 (NM_024091.2,165-183).
ctttatcgtttatctgatt

SEQ ID NO: 385886 - DNA, 19 bp, Homo sapiens
  siRNA target sequence for MGC5297 (NM_024091.2,171-189).
cgtttatctgattttcaga

SEQ ID NO: 385887 - DNA, 19 bp, Homo sapiens
  siRNA target sequence for MGC5297 (NM_024091.2,223-241).
ctctaaatcatgttcacaa

SEQ ID NO: 385888 - DNA, 19 bp, Homo sapiens
  siRNA target sequence for MGC5297 (NM_024091.2,288-306).
gagcctttcggggtcaaat

SEQ ID NO: 385889 - DNA, 19 bp, Homo sapiens
  siRNA target sequence for MGC5297 (NM_024091.2,317-335).
ccattgtaaaaagtttcat

SEQ ID NO: 385890 - DNA, 19 bp, Homo sapiens
  siRNA target sequence for MGC5297 (NM_024091.2,322-340).
gtaaaaagtttcattcgaa

SEQ ID NO: 385891 - DNA, 19 bp, Homo sapiens
  siRNA target sequence for MGC5297 (NM_024091.2,329-347).
gtttcattcgaaaaatgga

SEQ ID NO: 385892 - DNA, 19 bp, Homo sapiens
  siRNA target sequence for MGC5297 (NM_024091.2,395-413).
ctgcgacaggcttgaacaa

SEQ ID NO: 385893 - DNA, 19 bp, Homo sapiens
  siRNA target sequence for MGC5297 (NM_024091.2,426-444).
gaggagagtcagatgtttt

SEQ ID NO: 385894 - DNA, 19 bp, Homo sapiens
  siRNA target sequence for MGC5297 (NM_024091.2,429-447).
gagagtcagatgttttaca

SEQ ID NO: 385895 - DNA, 19 bp, Homo sapiens
  siRNA target sequence for MGC5297 (NM_024091.2,458-476).
caacttgacttcatcagaa

SEQ ID NO: 385896 - DNA, 19 bp, Homo sapiens
  siRNA target sequence for MGC5297 (NM_024091.2,477-495).
gaagtgctaagttttataa

SEQ ID NO: 385897 - DNA, 19 bp, Homo sapiens
  siRNA target sequence for MGC5297 (NM_024091.2,480-498).
gtgctaagttttataagca

SEQ ID NO: 385898 - DNA, 19 bp, Homo sapiens
  siRNA target sequence for MGC5297 (NM_024091.2,529-547).
caggagctttacaacgaat

SEQ ID NO: 385899 - DNA, 19 bp, Homo sapiens
  siRNA target sequence for MGC5297 (NM_024091.2,535-553).
ctttacaacgaatttgtga

SEQ ID NO: 385900 - DNA, 19 bp, Homo sapiens
  siRNA target sequence for MGC5297 (NM_024091.2,599-617).
ggagaatagcatctttcaa

SEQ ID NO: 385901 - DNA, 19 bp, Homo sapiens
  siRNA target sequence for MGC5297 (NM_024091.2,615-633).
caagctttatgctttcagt

SEQ ID NO: 385902 - DNA, 19 bp, Homo sapiens
  siRNA target sequence for MGC5297 (NM_024091.2,651-669).
cagctgtcaaacactagtt

SEQ ID NO: 385903 - DNA, 19 bp, Homo sapiens
  siRNA target sequence for MGC5297 (NM_024091.2,653-671).
gctgtcaaacactagttta

SEQ ID NO: 385904 - DNA, 19 bp, Homo sapiens
  siRNA target sequence for MGC5297 (NM_024091.2,798-816).
cttggggaaagtctgatta

SEQ ID NO: 385905 - DNA, 19 bp, Homo sapiens
  siRNA target sequence for MGC5297 (NM_024091.2,802-820).
gggaaagtctgattacact

SEQ ID NO: 385906 - DNA, 19 bp, Homo sapiens
  siRNA target sequence for MGC5297 (NM_024091.2,832-850).
gttgtgtgacactagaact

SEQ ID NO: 385907 - DNA, 19 bp, Homo sapiens
  siRNA target sequence for MGC5297 (NM_024091.2,839-857).
gacactagaactcattata

SEQ ID NO: 385908 - DNA, 19 bp, Homo sapiens
  siRNA target sequence for MGC5297 (NM_024091.2,900-918).
gatattgtggccctttata

SEQ ID NO: 385909 - DNA, 19 bp, Homo sapiens
  siRNA target sequence for MGC5297 (NM_024091.2,906-924).
gtggccctttatagaatct

SEQ ID NO: 385910 - DNA, 19 bp, Homo sapiens
  siRNA target sequence for MGC5297 (NM_024091.2,945-963).
gtggatgaacaccaaacat

SEQ ID NO: 385911 - DNA, 19 bp, Homo sapiens
  siRNA target sequence for MGC5297 (NM_024091.2,983-1001).
cttttccctatcaatagtt

SEQ ID NO: 385912 - DNA, 19 bp, Homo sapiens
  siRNA target sequence for MGC5297 (NM_024091.2,988-1006).
ccctatcaatagtttccaa

SEQ ID NO: 385913 - DNA, 19 bp, Homo sapiens
  siRNA target sequence for MGC5297 (NM_024091.2,1043-1061).
cctggtggttcttgatcaa

SEQ ID NO: 385914 - DNA, 19 bp, Homo sapiens
  siRNA target sequence for MGC5297 (NM_024091.2,1044-1062).
ctggtggttcttgatcaaa

SEQ ID NO: 385915 - DNA, 19 bp, Homo sapiens
  siRNA target sequence for MGC5297 (NM_024091.2,1046-1064).
ggtggttcttgatcaaagt

SEQ ID NO: 385916 - DNA, 19 bp, Homo sapiens
  siRNA target sequence for MGC5297 (NM_024091.2,1065-1083).
caagcatttcctctgatta

SEQ ID NO: 385917 - DNA, 19 bp, Homo sapiens
  siRNA target sequence for MGC5297 (NM_024091.2,1146-1164).
gtcttggaggcgttcatat

SEQ ID NO: 385918 - DNA, 19 bp, Homo sapiens
  siRNA target sequence for MGC5297 (NM_024091.2,1148-1166).
cttggaggcgttcatatat

SEQ ID NO: 385919 - DNA, 19 bp, Homo sapiens
  siRNA target sequence for MGC5297 (NM_024091.2,1151-1169).
ggaggcgttcatatatttt

SEQ ID NO: 385920 - DNA, 19 bp, Homo sapiens
  siRNA target sequence for MGC5297 (NM_024091.2,1176-1194).
catgacacattttttacaa

SEQ ID NO: 385921 - DNA, 19 bp, Homo sapiens
  siRNA target sequence for MGC5297 (NM_024091.2,1229-1247).
cacgttggatcctgaagtt

SEQ ID NO: 385922 - DNA, 19 bp, Homo sapiens
  siRNA target sequence for MGC5297 (NM_024091.2,1231-1249).
cgttggatcctgaagttgt

SEQ ID NO: 385923 - DNA, 19 bp, Homo sapiens
  siRNA target sequence for MGC5297 (NM_024091.2,1378-1396).
catttgggaaactcaatta

SEQ ID NO: 385924 - DNA, 19 bp, Homo sapiens
  siRNA target sequence for MGC5297 (NM_024091.2,1433-1451).
ggaaaacgtgctattcact

SEQ ID NO: 385925 - DNA, 19 bp, Homo sapiens
  siRNA target sequence for MGC5297 (NM_024091.2,1440-1458).
gtgctattcactcatttca

SEQ ID NO: 385926 - DNA, 19 bp, Homo sapiens
  siRNA target sequence for MGC5297 (NM_024091.2,1442-1460).
gctattcactcatttcaat

SEQ ID NO: 385927 - DNA, 19 bp, Homo sapiens
  siRNA target sequence for MGC5297 (NM_024091.2,1443-1461).
ctattcactcatttcaatt

SEQ ID NO: 385928 - DNA, 19 bp, Homo sapiens
  siRNA target sequence for MGC5297 (NM_024091.2,1566-1584).
cggctgcaaggtaaagaat

SEQ ID NO: 385929 - DNA, 19 bp, Homo sapiens
  siRNA target sequence for MGC5297 (NM_024091.2,1568-1586).
gctgcaaggtaaagaatct

SEQ ID NO: 385930 - DNA, 19 bp, Homo sapiens
  siRNA target sequence for MGC5297 (NM_024091.2,1608-1626).
gcacaactgacccaacttt

SEQ ID NO: 385931 - DNA, 19 bp, Homo sapiens
  siRNA target sequence for MGC5297 (NM_024091.2,1609-1627).
cacaactgacccaactttt

SEQ ID NO: 385932 - DNA, 19 bp, Homo sapiens
  siRNA target sequence for MGC5297 (NM_024091.2,1641-1659).
ctggaatgccctttctata

SEQ ID NO: 385933 - DNA, 19 bp, Homo sapiens
  siRNA target sequence for MGC5297 (NM_024091.2,1731-1749).
gtggattctcagctttata

SEQ ID NO: 385934 - DNA, 19 bp, Homo sapiens
  siRNA target sequence for MGC5297 (NM_024091.2,1733-1751).
ggattctcagctttataga

SEQ ID NO: 385935 - DNA, 19 bp, Homo sapiens
  siRNA target sequence for MGC5297 (NM_024091.2,1738-1756).
ctcagctttatagatatgt

SEQ ID NO: 385936 - DNA, 19 bp, Homo sapiens
  siRNA target sequence for MGC5297 (NM_024091.2,1811-1829).
gttgacaccctattgttat

SEQ ID NO: 385937 - DNA, 19 bp, Homo sapiens
  siRNA target sequence for MGC5297 (NM_024091.2,1814-1832).
gacaccctattgttataca

SEQ ID NO: 385938 - DNA, 19 bp, Homo sapiens
  siRNA target sequence for MGC5297 (NM_024091.2,1816-1834).
caccctattgttatacaat

SEQ ID NO: 385939 - DNA, 19 bp, Homo sapiens
  siRNA target sequence for MGC5297 (NM_024091.2,1819-1837).
cctattgttatacaataga

SEQ ID NO: 385940 - DNA, 19 bp, Homo sapiens
  siRNA target sequence for MGC5297 (NM_024091.2,1825-1843).
gttatacaatagatgttga

SEQ ID NO: 385941 - DNA, 19 bp, Homo sapiens
  siRNA target sequence for MGC5297 (NM_024091.2,1874-1892).
gccatccacagctaatgaa

SEQ ID NO: 385942 - DNA, 19 bp, Homo sapiens
  siRNA target sequence for MGC5297 (NM_024091.2,1906-1924).
ggatagcactgtgtattga

SEQ ID NO: 385943 - DNA, 19 bp, Homo sapiens
  siRNA target sequence for MGC5297 (NM_024091.2,1907-1925).
gatagcactgtgtattgat

SEQ ID NO: 385944 - DNA, 19 bp, Homo sapiens
  siRNA target sequence for MGC5297 (NM_024091.2,1916-1934).
gtgtattgatggtccaaaa

SEQ ID NO: 385945 - DNA, 19 bp, Homo sapiens
  siRNA target sequence for MGC5297 (NM_024091.2,1936-1954).
ggttttgctccaatagcaa

SEQ ID NO: 385946 - DNA, 19 bp, Homo sapiens
  siRNA target sequence for MGC5297 (NM_024091.2,1937-1955).
gttttgctccaatagcaaa

SEQ ID NO: 385947 - DNA, 19 bp, Homo sapiens
  siRNA target sequence for MGC5297 (NM_024091.2,1943-1961).
ctccaatagcaaacactta

SEQ ID NO: 385948 - DNA, 19 bp, Homo sapiens
  siRNA target sequence for MGC5297 (NM_024091.2,1997-2015).
gttactcggttatcaagtt

SEQ ID NO: 385949 - DNA, 19 bp, Homo sapiens
  siRNA target sequence for MGC5297 (NM_024091.2,2021-2039).
gatcccctatcatgagatt

SEQ ID NO: 385950 - DNA, 19 bp, Homo sapiens
  siRNA target sequence for MGC5297 (NM_024091.2,2036-2054).
gattgggatgctaaaatca

SEQ ID NO: 385951 - DNA, 19 bp, Homo sapiens
  siRNA target sequence for MGC5297 (NM_024091.2,2106-2124).
gttcattggttgcaagaat

SEQ ID NO: 385952 - DNA, 19 bp, Homo sapiens
  siRNA target sequence for MGC5508 (NM_024092.1,101-119).
ggggaaagcatgtgttcaa

SEQ ID NO: 385953 - DNA, 19 bp, Homo sapiens
  siRNA target sequence for MGC5508 (NM_024092.1,171-189).
ccagtcccgtcgagacttt

SEQ ID NO: 385954 - DNA, 19 bp, Homo sapiens
  siRNA target sequence for MGC5508 (NM_024092.1,210-228).
gagagaagccccagttgat

SEQ ID NO: 385955 - DNA, 19 bp, Homo sapiens
  siRNA target sequence for MGC5508 (NM_024092.1,322-340).
gtgttgtgggccatctcat

SEQ ID NO: 385956 - DNA, 19 bp, Homo sapiens
  siRNA target sequence for MGC5508 (NM_024092.1,404-422).
gactagctggtgattacct

SEQ ID NO: 385957 - DNA, 19 bp, Homo sapiens
  siRNA target sequence for MGC5509 (NM_024093.1,147-165).
gaaactgatgtaagagtaa

SEQ ID NO: 385958 - DNA, 19 bp, Homo sapiens
  siRNA target sequence for MGC5509 (NM_024093.1,156-174).
gtaagagtaaacaaagaca

SEQ ID NO: 385959 - DNA, 19 bp, Homo sapiens
  siRNA target sequence for MGC5509 (NM_024093.1,218-236).
gagggatttgccgaagaat

SEQ ID NO: 385960 - DNA, 19 bp, Homo sapiens
  siRNA target sequence for MGC5509 (NM_024093.1,222-240).
gatttgccgaagaatagat

SEQ ID NO: 385961 - DNA, 19 bp, Homo sapiens
  siRNA target sequence for MGC5509 (NM_024093.1,328-346).
gacccctcatcgtatttga

SEQ ID NO: 385962 - DNA, 19 bp, Homo sapiens
  siRNA target sequence for MGC5509 (NM_024093.1,345-363).
gatggaagttcaacaagta

SEQ ID NO: 385963 - DNA, 19 bp, Homo sapiens
  siRNA target sequence for MGC5509 (NM_024093.1,348-366).
ggaagttcaacaagtacaa

SEQ ID NO: 385964 - DNA, 19 bp, Homo sapiens
  siRNA target sequence for MGC5509 (NM_024093.1,358-376).
caagtacaagcataaaagt

SEQ ID NO: 385965 - DNA, 19 bp, Homo sapiens
  siRNA target sequence for MGC5509 (NM_024093.1,425-443).
ggcaagctttaccagtaat

SEQ ID NO: 385966 - DNA, 19 bp, Homo sapiens
  siRNA target sequence for MGC5509 (NM_024093.1,436-454).
ccagtaatgcctttagaaa

SEQ ID NO: 385967 - DNA, 19 bp, Homo sapiens
  siRNA target sequence for MGC5509 (NM_024093.1,499-517).
ccaatttgcctgtgaacaa

SEQ ID NO: 385968 - DNA, 19 bp, Homo sapiens
  siRNA target sequence for MGC5509 (NM_024093.1,500-518).
caatttgcctgtgaacaat

SEQ ID NO: 385969 - DNA, 19 bp, Homo sapiens
  siRNA target sequence for MGC5509 (NM_024093.1,560-578).
cttaacgcataggaaaagt

SEQ ID NO: 385970 - DNA, 19 bp, Homo sapiens
  siRNA target sequence for MGC5509 (NM_024093.1,608-626).
gtcccctgttggaactact

SEQ ID NO: 385971 - DNA, 19 bp, Homo sapiens
  siRNA target sequence for MGC5509 (NM_024093.1,622-640).
ctactccagtgaagttaaa

SEQ ID NO: 385972 - DNA, 19 bp, Homo sapiens
  siRNA target sequence for MGC5528 (NM_024094.1,370-388).
gcagacacttccaatatgt

SEQ ID NO: 385973 - DNA, 19 bp, Homo sapiens
  siRNA target sequence for MGC5528 (NM_024094.1,413-431).
ctccggaccagttgaagaa

SEQ ID NO: 385974 - DNA, 19 bp, Homo sapiens
  siRNA target sequence for MGC5528 (NM_024094.1,440-458).
cacactgtaacattattca

SEQ ID NO: 385975 - DNA, 19 bp, Homo sapiens
  siRNA target sequence for MGC5528 (NM_024094.1,457-475).
cacactgagatctttggtt

SEQ ID NO: 385976 - DNA, 19 bp, Homo sapiens
  siRNA target sequence for MGC5528 (NM_024094.1,503-521).
gacgtagacccaagttaaa

SEQ ID NO: 385977 - DNA, 19 bp, Homo sapiens
  siRNA target sequence for MGC5528 (NM_024094.1,582-600).
ggattcaaatagctcaaaa

SEQ ID NO: 385978 - DNA, 19 bp, Homo sapiens
  siRNA target sequence for MGC5528 (NM_024094.1,594-612).
ctcaaaatatacaactgaa

SEQ ID NO: 385979 - DNA, 19 bp, Homo sapiens
  siRNA target sequence for MGC5528 (NM_024094.1,656-674).
cccaattacaagttctaaa

SEQ ID NO: 385980 - DNA, 19 bp, Homo sapiens
  siRNA target sequence for MGC5528 (NM_024094.1,667-685).
gttctaaatgcctgtaaga

SEQ ID NO: 385981 - DNA, 19 bp, Homo sapiens
  siRNA target sequence for MGC5528 (NM_024094.1,678-696).
ctgtaagattggaggttat

SEQ ID NO: 385982 - DNA, 19 bp, Homo sapiens
  siRNA target sequence for MGC5528 (NM_024094.1,698-716).
ggaggattcttgaatttga

SEQ ID NO: 385983 - DNA, 19 bp, Homo sapiens
  siRNA target sequence for MGC5528 (NM_024094.1,699-717).
gaggattcttgaatttgat

SEQ ID NO: 385984 - DNA, 19 bp, Homo sapiens
  siRNA target sequence for MGC5528 (NM_024094.1,701-719).
ggattcttgaatttgatta

SEQ ID NO: 385985 - DNA, 19 bp, Homo sapiens
  siRNA target sequence for MGC5528 (NM_024094.1,702-720).
gattcttgaatttgattat

SEQ ID NO: 385986 - DNA, 19 bp, Homo sapiens
  siRNA target sequence for MGC5528 (NM_024094.1,726-744).
gaaacttctgaatcatgta

SEQ ID NO: 385987 - DNA, 19 bp, Homo sapiens
  siRNA target sequence for MGC5528 (NM_024094.1,746-764).
ctcagcttgtggattctga

SEQ ID NO: 385988 - DNA, 19 bp, Homo sapiens
  siRNA target sequence for MGC5528 (NM_024094.1,750-768).
gcttgtggattctgaatca

SEQ ID NO: 385989 - DNA, 19 bp, Homo sapiens
  siRNA target sequence for MGC5528 (NM_024094.1,751-769).
cttgtggattctgaatcat

SEQ ID NO: 385990 - DNA, 19 bp, Homo sapiens
  siRNA target sequence for MGC5528 (NM_024094.1,773-791).
cttttggtaaagttccttt

SEQ ID NO: 385991 - DNA, 19 bp, Homo sapiens
  siRNA target sequence for MGC5528 (NM_024094.1,877-895).
gatgaaggcgaagtttatt

SEQ ID NO: 385992 - DNA, 19 bp, Homo sapiens
  siRNA target sequence for MGC5528 (NM_024094.1,929-947).
cagcacgaatgctacttca

SEQ ID NO: 385993 - DNA, 19 bp, Homo sapiens
  siRNA target sequence for MGC5528 (NM_024094.1,943-961).
cttcagaatgcggtgaaat

SEQ ID NO: 385994 - DNA, 19 bp, Homo sapiens
  siRNA target sequence for MGC5528 (NM_024094.1,948-966).
gaatgcggtgaaattcaat

SEQ ID NO: 385995 - DNA, 19 bp, Homo sapiens
  siRNA target sequence for MGC5528 (NM_024094.1,1019-1037).
ctagtcttgatcagcttaa

SEQ ID NO: 385996 - DNA, 19 bp, Homo sapiens
  siRNA target sequence for MGC5528 (NM_024094.1,1058-1076).
gacactcgagaccagaaat

SEQ ID NO: 385997 - DNA, 19 bp, Homo sapiens
  siRNA target sequence for MGC5528 (NM_024094.1,1110-1128).
ggataatcaggaacgtttt

SEQ ID NO: 385998 - DNA, 19 bp, Homo sapiens
  siRNA target sequence for MGC5528 (NM_024094.1,1111-1129).
gataatcaggaacgtttta

SEQ ID NO: 385999 - DNA, 19 bp, Homo sapiens
  siRNA target sequence for MGC5528 (NM_024094.1,1123-1141).
cgttttaatagccttttct

SEQ ID NO: 386000 - DNA, 19 bp, Homo sapiens
  siRNA target sequence for MGC5528 (NM_024094.1,1216-1234).
ggtgcattactcactaaat

SEQ ID NO: 386001 - DNA, 19 bp, Homo sapiens
  siRNA target sequence for MGC5528 (NM_024094.1,1219-1237).
gcattactcactaaatatt

SEQ ID NO: 386002 - DNA, 19 bp, Homo sapiens
  siRNA target sequence for MGC5528 (NM_024094.1,1261-1279).
gttaaagtttataattcga

SEQ ID NO: 386003 - DNA, 19 bp, Homo sapiens
  siRNA target sequence for XTP3TPA (NM_024096.1,480-498).
ctcttcccgcaagtataca

SEQ ID NO: 386004 - DNA, 19 bp, Homo sapiens
  siRNA target sequence for XTP3TPA (NM_024096.1,485-503).
cccgcaagtatacagaatt

SEQ ID NO: 386005 - DNA, 19 bp, Homo sapiens
  siRNA target sequence for MGC955 (NM_024097.1,279-297).
cagtcatagctgagcaaat

SEQ ID NO: 386006 - DNA, 19 bp, Homo sapiens
  siRNA target sequence for MGC955 (NM_024097.1,283-301).
catagctgagcaaatccaa

SEQ ID NO: 386007 - DNA, 19 bp, Homo sapiens
  siRNA target sequence for MGC955 (NM_024097.1,287-305).
gctgagcaaatccaacatt

SEQ ID NO: 386008 - DNA, 19 bp, Homo sapiens
  siRNA target sequence for MGC955 (NM_024097.1,358-376).
gcaccatgtagcttgtaat

SEQ ID NO: 386009 - DNA, 19 bp, Homo sapiens
  siRNA target sequence for MGC955 (NM_024097.1,361-379).
ccatgtagcttgtaatata

SEQ ID NO: 386010 - DNA, 19 bp, Homo sapiens
  siRNA target sequence for MGC955 (NM_024097.1,365-383).
gtagcttgtaatatagtga

SEQ ID NO: 386011 - DNA, 19 bp, Homo sapiens
  siRNA target sequence for MGC955 (NM_024097.1,419-437).
gagagtggtcagcagtatt

SEQ ID NO: 386012 - DNA, 19 bp, Homo sapiens
  siRNA target sequence for MGC955 (NM_024097.1,426-444).
gtcagcagtatttttccat

SEQ ID NO: 386013 - DNA, 19 bp, Homo sapiens
  siRNA target sequence for MGC2574 (NM_024098.1,352-370).
cctggagtcgcctcaaaga

SEQ ID NO: 386014 - DNA, 19 bp, Homo sapiens
  siRNA target sequence for MGC2574 (NM_024098.1,419-437).
gaggaggcaccaaagtgtt

SEQ ID NO: 386015 - DNA, 19 bp, Homo sapiens
  siRNA target sequence for MGC2574 (NM_024098.1,462-480).
cggagttggcccagaataa

SEQ ID NO: 386016 - DNA, 19 bp, Homo sapiens
  siRNA target sequence for MGC2574 (NM_024098.1,691-709).
gaagcgaaaaggttcttca

SEQ ID NO: 386017 - DNA, 19 bp, Homo sapiens
  siRNA target sequence for MGC2574 (NM_024098.1,716-734).
gccccagcgtccaagaagt

SEQ ID NO: 386018 - DNA, 19 bp, Homo sapiens
  siRNA target sequence for MGC2574 (NM_024098.1,717-735).
ccccagcgtccaagaagtt

SEQ ID NO: 386019 - DNA, 19 bp, Homo sapiens
  siRNA target sequence for MGC2574 (NM_024098.1,719-737).
ccagcgtccaagaagttga

SEQ ID NO: 386020 - DNA, 19 bp, Homo sapiens
  siRNA target sequence for MGC2574 (NM_024098.1,720-738).
cagcgtccaagaagttgaa

SEQ ID NO: 386021 - DNA, 19 bp, Homo sapiens
  siRNA target sequence for MGC2574 (NM_024098.1,800-818).
cgctccaagaaaagattct

SEQ ID NO: 386022 - DNA, 19 bp, Homo sapiens
  siRNA target sequence for MGC2574 (NM_024098.1,1002-1020).
cagaggtcgtccaagtgat

SEQ ID NO: 386023 - DNA, 19 bp, Homo sapiens
  siRNA target sequence for MGC2574 (NM_024098.1,1058-1076).
cagctgcgctccattgaga

SEQ ID NO: 386024 - DNA, 19 bp, Homo sapiens
  siRNA target sequence for MGC2477 (NM_024099.1,2812-2830).
ggctcccgtgtttgtagaa

SEQ ID NO: 386025 - DNA, 19 bp, Homo sapiens
  siRNA target sequence for MGC2477 (NM_024099.1,2814-2832).
ctcccgtgtttgtagaagt

SEQ ID NO: 386026 - DNA, 19 bp, Homo sapiens
  siRNA target sequence for MGC2477 (NM_024099.1,2979-2997).
cgcggcaccacctcaagaa

SEQ ID NO: 386027 - DNA, 19 bp, Homo sapiens
  siRNA target sequence for MGC2477 (NM_024099.1,3012-3030).
cacgtgccaacattacact

SEQ ID NO: 386028 - DNA, 19 bp, Homo sapiens
  siRNA target sequence for WDR18 (NM_024100.2,65-83).
gcatcgtgtgggaacttca

SEQ ID NO: 386029 - DNA, 19 bp, Homo sapiens
  siRNA target sequence for WDR18 (NM_024100.2,589-607).
gaccagacggtgaagctat

SEQ ID NO: 386030 - DNA, 19 bp, Homo sapiens
  siRNA target sequence for WDR18 (NM_024100.2,1009-1027).
ccgctgccccacttcaaca

SEQ ID NO: 386031 - DNA, 19 bp, Homo sapiens
  siRNA target sequence for MEP50 (NM_024102.2,308-326).
gggagagaggtattctagt

SEQ ID NO: 386032 - DNA, 19 bp, Homo sapiens
  siRNA target sequence for MEP50 (NM_024102.2,333-351).
cgattcaggtgctgttgaa

SEQ ID NO: 386033 - DNA, 19 bp, Homo sapiens
  siRNA target sequence for MEP50 (NM_024102.2,379-397).
cttattgtcagcaagttct

SEQ ID NO: 386034 - DNA, 19 bp, Homo sapiens
  siRNA target sequence for MEP50 (NM_024102.2,387-405).
cagcaagttctgcaagtat

SEQ ID NO: 386035 - DNA, 19 bp, Homo sapiens
  siRNA target sequence for MEP50 (NM_024102.2,402-420).
gtatgagcatgatgacatt

SEQ ID NO: 386036 - DNA, 19 bp, Homo sapiens
  siRNA target sequence for MEP50 (NM_024102.2,508-526).
caggtggtactgagttcat

SEQ ID NO: 386037 - DNA, 19 bp, Homo sapiens
  siRNA target sequence for MEP50 (NM_024102.2,599-617).
gcgaggacaatagaatttt

SEQ ID NO: 386038 - DNA, 19 bp, Homo sapiens
  siRNA target sequence for MEP50 (NM_024102.2,754-772).
cttgtggacaccaagagta

SEQ ID NO: 386039 - DNA, 19 bp, Homo sapiens
  siRNA target sequence for MEP50 (NM_024102.2,893-911).
caagcctttctgagttgtt

SEQ ID NO: 386040 - DNA, 19 bp, Homo sapiens
  siRNA target sequence for MEP50 (NM_024102.2,950-968).
cttggtccccgctcaatca

SEQ ID NO: 386041 - DNA, 19 bp, Homo sapiens
  siRNA target sequence for MGC2747 (NM_024104.2,100-118).
cctccattcctgatgactt

SEQ ID NO: 386042 - DNA, 19 bp, Homo sapiens
  siRNA target sequence for MGC2747 (NM_024104.2,144-162).
gacaaccttcccagaaagt

SEQ ID NO: 386043 - DNA, 19 bp, Homo sapiens
  siRNA target sequence for MGC2747 (NM_024104.2,192-210).
gccgaggtgtgcatggttt

SEQ ID NO: 386044 - DNA, 19 bp, Homo sapiens
  siRNA target sequence for MGC3123 (NM_024107.1,299-317).
ctcctgggcgctattgtgt

SEQ ID NO: 386045 - DNA, 19 bp, Homo sapiens
  siRNA target sequence for MGC3123 (NM_024107.1,379-397).
caaccccgagccaactgaa

SEQ ID NO: 386046 - DNA, 19 bp, Homo sapiens
  siRNA target sequence for MGC3123 (NM_024107.1,407-425).
ccatcagaggcaaatactt

SEQ ID NO: 386047 - DNA, 19 bp, Homo sapiens
  siRNA target sequence for MGC2650 (NM_024108.1,12-30).
ggcggatactgtgttgttt

SEQ ID NO: 386048 - DNA, 19 bp, Homo sapiens
  siRNA target sequence for MGC2650 (NM_024108.1,14-32).
cggatactgtgttgtttga

SEQ ID NO: 386049 - DNA, 19 bp, Homo sapiens
  siRNA target sequence for MGC2650 (NM_024108.1,16-34).
gatactgtgttgtttgagt

SEQ ID NO: 386050 - DNA, 19 bp, Homo sapiens
  siRNA target sequence for MGC2650 (NM_024108.1,326-344).
cctacgtcctgcaagacaa

SEQ ID NO: 386051 - DNA, 19 bp, Homo sapiens
  siRNA target sequence for MGC2654 (NM_024109.1,286-304).
gacgaggtcacctttagga

SEQ ID NO: 386052 - DNA, 19 bp, Homo sapiens
  siRNA target sequence for MGC2654 (NM_024109.1,331-349).
ctctataccccgaaccata

SEQ ID NO: 386053 - DNA, 19 bp, Homo sapiens
  siRNA target sequence for MGC2654 (NM_024109.1,341-359).
cgaaccatagacatctcat

SEQ ID NO: 386054 - DNA, 19 bp, Homo sapiens
  siRNA target sequence for MGC2654 (NM_024109.1,637-655).
ccacgagccgcctctgatt

SEQ ID NO: 386055 - DNA, 19 bp, Homo sapiens
  siRNA target sequence for MGC2654 (NM_024109.1,681-699).
caaggtacatcccatgatt

SEQ ID NO: 386056 - DNA, 19 bp, Homo sapiens
  siRNA target sequence for MGC2654 (NM_024109.1,684-702).
ggtacatcccatgattcta

SEQ ID NO: 386057 - DNA, 19 bp, Homo sapiens
  siRNA target sequence for MGC2654 (NM_024109.1,743-761).
gcagcccgcacgatatcat

SEQ ID NO: 386058 - DNA, 19 bp, Homo sapiens
  siRNA target sequence for MGC2654 (NM_024109.1,748-766).
ccgcacgatatcatcagaa

SEQ ID NO: 386059 - DNA, 19 bp, Homo sapiens
  siRNA target sequence for MGC2654 (NM_024109.1,749-767).
cgcacgatatcatcagaat

SEQ ID NO: 386060 - DNA, 19 bp, Homo sapiens
  siRNA target sequence for MGC2654 (NM_024109.1,750-768).
gcacgatatcatcagaata

SEQ ID NO: 386061 - DNA, 19 bp, Homo sapiens
  siRNA target sequence for MGC2654 (NM_024109.1,753-771).
cgatatcatcagaataggt

SEQ ID NO: 386062 - DNA, 19 bp, Homo sapiens
  siRNA target sequence for MGC2654 (NM_024109.1,820-838).
cctcttccgaggatgtaca

SEQ ID NO: 386063 - DNA, 19 bp, Homo sapiens
  siRNA target sequence for MGC4504 (NM_024111.2,334-352).
ggtgacgctccttgaagat

SEQ ID NO: 386064 - DNA, 19 bp, Homo sapiens
  siRNA target sequence for MGC4504 (NM_024111.2,337-355).
gacgctccttgaagatcat

SEQ ID NO: 386065 - DNA, 19 bp, Homo sapiens
  siRNA target sequence for MGC4504 (NM_024111.2,440-458).
gtgcttggtggctacgata

SEQ ID NO: 386066 - DNA, 19 bp, Homo sapiens
  siRNA target sequence for MGC4504 (NM_024111.2,460-478).
caaggaggtcaccttctat

SEQ ID NO: 386067 - DNA, 19 bp, Homo sapiens
  siRNA target sequence for MGC4504 (NM_024111.2,606-624).
ccggccacaaccttgaata

SEQ ID NO: 386068 - DNA, 19 bp, Homo sapiens
  siRNA target sequence for MGC4707 (NM_024113.2,193-211).
gccaggttcttcactgaat

SEQ ID NO: 386069 - DNA, 19 bp, Homo sapiens
  siRNA target sequence for MGC4707 (NM_024113.2,194-212).
ccaggttcttcactgaata

SEQ ID NO: 386070 - DNA, 19 bp, Homo sapiens
  siRNA target sequence for MGC4707 (NM_024113.2,195-213).
caggttcttcactgaatat

SEQ ID NO: 386071 - DNA, 19 bp, Homo sapiens
  siRNA target sequence for MGC4707 (NM_024113.2,277-295).
ccccacaatagggtatcat

SEQ ID NO: 386072 - DNA, 19 bp, Homo sapiens
  siRNA target sequence for MGC4707 (NM_024113.2,279-297).
ccacaatagggtatcattt

SEQ ID NO: 386073 - DNA, 19 bp, Homo sapiens
  siRNA target sequence for MGC4707 (NM_024113.2,321-339).
ccgaactgtgggcaaaaat

SEQ ID NO: 386074 - DNA, 19 bp, Homo sapiens
  siRNA target sequence for MGC4707 (NM_024113.2,332-350).
gcaaaaatggcgatttgct

SEQ ID NO: 386075 - DNA, 19 bp, Homo sapiens
  siRNA target sequence for MGC4707 (NM_024113.2,453-471).
ggactgcttgatgtctttt

SEQ ID NO: 386076 - DNA, 19 bp, Homo sapiens
  siRNA target sequence for MGC4707 (NM_024113.2,493-511).
cagatccagttttactact

SEQ ID NO: 386077 - DNA, 19 bp, Homo sapiens
  siRNA target sequence for MGC4707 (NM_024113.2,499-517).
cagttttactactcagaat

SEQ ID NO: 386078 - DNA, 19 bp, Homo sapiens
  siRNA target sequence for MGC4707 (NM_024113.2,791-809).
caaagcaccgtggaatcaa

SEQ ID NO: 386079 - DNA, 19 bp, Homo sapiens
  siRNA target sequence for MGC4707 (NM_024113.2,830-848).
ctgacaagggggatctgat

SEQ ID NO: 386080 - DNA, 19 bp, Homo sapiens
  siRNA target sequence for MGC4707 (NM_024113.2,849-867).
gcacgacccagcaatggat

SEQ ID NO: 386081 - DNA, 19 bp, Homo sapiens
  siRNA target sequence for MGC5306 (NM_024116.1,264-282).
gcaaatcgaagtgataact

SEQ ID NO: 386082 - DNA, 19 bp, Homo sapiens
  siRNA target sequence for MGC5306 (NM_024116.1,283-301).
cttctgatagcagcttatt

SEQ ID NO: 386083 - DNA, 19 bp, Homo sapiens
  siRNA target sequence for MGC5306 (NM_024116.1,347-365).
ccccattcgaaaatttgtt

SEQ ID NO: 386084 - DNA, 19 bp, Homo sapiens
  siRNA target sequence for MGC5306 (NM_024116.1,381-399).
gttcacgcaagtgattcat

SEQ ID NO: 386085 - DNA, 19 bp, Homo sapiens
  siRNA target sequence for MGC5306 (NM_024116.1,384-402).
cacgcaagtgattcatcaa

SEQ ID NO: 386086 - DNA, 19 bp, Homo sapiens
  siRNA target sequence for MGC5306 (NM_024116.1,417-435).
gaaccaataccattgacta

SEQ ID NO: 386087 - DNA, 19 bp, Homo sapiens
  siRNA target sequence for MGC5306 (NM_024116.1,420-438).
ccaataccattgactataa

SEQ ID NO: 386088 - DNA, 19 bp, Homo sapiens
  siRNA target sequence for MGC5306 (NM_024116.1,421-439).
caataccattgactataaa

SEQ ID NO: 386089 - DNA, 19 bp, Homo sapiens
  siRNA target sequence for MGC5306 (NM_024116.1,441-459).
gctatttttgaaagattca

SEQ ID NO: 386090 - DNA, 19 bp, Homo sapiens
  siRNA target sequence for MGC5306 (NM_024116.1,542-560).
gagaaatcctatatactca

SEQ ID NO: 386091 - DNA, 19 bp, Homo sapiens
  siRNA target sequence for MGC5306 (NM_024116.1,559-577).
cactaatagataagaagaa

SEQ ID NO: 386092 - DNA, 19 bp, Homo sapiens
  siRNA target sequence for MGC5306 (NM_024116.1,635-653).
cgcaccttggagaaaaatt

SEQ ID NO: 386093 - DNA, 19 bp, Homo sapiens
  siRNA target sequence for MGC5306 (NM_024116.1,714-732).
gaacaccacctgaaagaat

SEQ ID NO: 386094 - DNA, 19 bp, Homo sapiens
  siRNA target sequence for MGC5306 (NM_024116.1,780-798).
gacagtcgtagatacaaat

SEQ ID NO: 386095 - DNA, 19 bp, Homo sapiens
  siRNA target sequence for MGC5306 (NM_024116.1,782-800).
cagtcgtagatacaaattt

SEQ ID NO: 386096 - DNA, 19 bp, Homo sapiens
  siRNA target sequence for MGC5306 (NM_024116.1,787-805).
gtagatacaaatttttgga

SEQ ID NO: 386097 - DNA, 19 bp, Homo sapiens
  siRNA target sequence for MGC5306 (NM_024116.1,814-832).
gatccatttctcctattga

SEQ ID NO: 386098 - DNA, 19 bp, Homo sapiens
  siRNA target sequence for MGC5306 (NM_024116.1,848-866).
ggatgaggatgcaacacat

SEQ ID NO: 386099 - DNA, 19 bp, Homo sapiens
  siRNA target sequence for MGC5306 (NM_024116.1,854-872).
ggatgcaacacatcttgaa

SEQ ID NO: 386100 - DNA, 19 bp, Homo sapiens
  siRNA target sequence for MGC5306 (NM_024116.1,858-876).
gcaacacatcttgaagata

SEQ ID NO: 386101 - DNA, 19 bp, Homo sapiens
  siRNA target sequence for MGC5306 (NM_024116.1,900-918).
ggggatagtttcatagtaa

SEQ ID NO: 386102 - DNA, 19 bp, Homo sapiens
  siRNA target sequence for MGC5306 (NM_024116.1,902-920).
ggatagtttcatagtaagt

SEQ ID NO: 386103 - DNA, 19 bp, Homo sapiens
  siRNA target sequence for MGC5306 (NM_024116.1,903-921).
gatagtttcatagtaagtt

SEQ ID NO: 386104 - DNA, 19 bp, Homo sapiens
  siRNA target sequence for MGC5306 (NM_024116.1,930-948).
cctgtaagactgagtgtat

SEQ ID NO: 386105 - DNA, 19 bp, Homo sapiens
  siRNA target sequence for MGC5306 (NM_024116.1,931-949).
ctgtaagactgagtgtata

SEQ ID NO: 386106 - DNA, 19 bp, Homo sapiens
  siRNA target sequence for MGC5306 (NM_024116.1,933-951).
gtaagactgagtgtatact

SEQ ID NO: 386107 - DNA, 19 bp, Homo sapiens
  siRNA target sequence for MGC5306 (NM_024116.1,937-955).
gactgagtgtatacttaga

SEQ ID NO: 386108 - DNA, 19 bp, Homo sapiens
  siRNA target sequence for C20orf7 (NM_024120.2,204-222).
cagcccgagccgaccaaat

SEQ ID NO: 386109 - DNA, 19 bp, Homo sapiens
  siRNA target sequence for C20orf7 (NM_024120.2,206-224).
gcccgagccgaccaaattt

SEQ ID NO: 386110 - DNA, 19 bp, Homo sapiens
  siRNA target sequence for C20orf7 (NM_024120.2,208-226).
ccgagccgaccaaatttga

SEQ ID NO: 386111 - DNA, 19 bp, Homo sapiens
  siRNA target sequence for C20orf7 (NM_024120.2,210-228).
gagccgaccaaatttgact

SEQ ID NO: 386112 - DNA, 19 bp, Homo sapiens
  siRNA target sequence for C20orf7 (NM_024120.2,253-271).
ggatcgcagaccgtgtata

SEQ ID NO: 386113 - DNA, 19 bp, Homo sapiens
  siRNA target sequence for C20orf7 (NM_024120.2,254-272).
gatcgcagaccgtgtatat

SEQ ID NO: 386114 - DNA, 19 bp, Homo sapiens
  siRNA target sequence for C20orf7 (NM_024120.2,258-276).
gcagaccgtgtatatgaca

SEQ ID NO: 386115 - DNA, 19 bp, Homo sapiens
  siRNA target sequence for C20orf7 (NM_024120.2,259-277).
cagaccgtgtatatgacat

SEQ ID NO: 386116 - DNA, 19 bp, Homo sapiens
  siRNA target sequence for C20orf7 (NM_024120.2,428-446).
cagcgttttagctgatgaa

SEQ ID NO: 386117 - DNA, 19 bp, Homo sapiens
  siRNA target sequence for C20orf7 (NM_024120.2,430-448).
gcgttttagctgatgaaga

SEQ ID NO: 386118 - DNA, 19 bp, Homo sapiens
  siRNA target sequence for C20orf7 (NM_024120.2,529-547).
cacttgagcagattcatta

SEQ ID NO: 386119 - DNA, 19 bp, Homo sapiens
  siRNA target sequence for C20orf7 (NM_024120.2,569-587).
gtttatcggtgcaatgttt

SEQ ID NO: 386120 - DNA, 19 bp, Homo sapiens
  siRNA target sequence for C20orf7 (NM_024120.2,589-607).
gaggcgacacactctatga

SEQ ID NO: 386121 - DNA, 19 bp, Homo sapiens
  siRNA target sequence for C20orf7 (NM_024120.2,592-610).
gcgacacactctatgaact

SEQ ID NO: 386122 - DNA, 19 bp, Homo sapiens
  siRNA target sequence for C20orf7 (NM_024120.2,593-611).
cgacacactctatgaactt

SEQ ID NO: 386123 - DNA, 19 bp, Homo sapiens
  siRNA target sequence for C20orf7 (NM_024120.2,609-627).
cttcggtgttccttacagt

SEQ ID NO: 386124 - DNA, 19 bp, Homo sapiens
  siRNA target sequence for C20orf7 (NM_024120.2,708-726).
gggagagctggctttaata

SEQ ID NO: 386125 - DNA, 19 bp, Homo sapiens
  siRNA target sequence for C20orf7 (NM_024120.2,710-728).
gagagctggctttaatact

SEQ ID NO: 386126 - DNA, 19 bp, Homo sapiens
  siRNA target sequence for C20orf7 (NM_024120.2,867-885).
gcggcagtgtacagagaaa

SEQ ID NO: 386127 - DNA, 19 bp, Homo sapiens
  siRNA target sequence for C20orf7 (NM_024120.2,868-886).
cggcagtgtacagagaaat

SEQ ID NO: 386128 - DNA, 19 bp, Homo sapiens
  siRNA target sequence for C20orf7 (NM_024120.2,913-931).
ctgctacataccagatcta

SEQ ID NO: 386129 - DNA, 19 bp, Homo sapiens
  siRNA target sequence for C20orf7 (NM_024120.2,915-933).
gctacataccagatctatt

SEQ ID NO: 386130 - DNA, 19 bp, Homo sapiens
  siRNA target sequence for C20orf7 (NM_024120.2,916-934).
ctacataccagatctatta

SEQ ID NO: 386131 - DNA, 19 bp, Homo sapiens
  siRNA target sequence for C20orf7 (NM_024120.2,923-941).
ccagatctattacatgata

SEQ ID NO: 386132 - DNA, 19 bp, Homo sapiens
  siRNA target sequence for C20orf7 (NM_024120.2,1034-1052).
gccaccggggaaaaaatca

SEQ ID NO: 386133 - DNA, 19 bp, Homo sapiens
  siRNA target sequence for C20orf7 (NM_024120.2,1036-1054).
caccggggaaaaaatcaca

SEQ ID NO: 386134 - DNA, 19 bp, Homo sapiens
  siRNA target sequence for MGC4825 (NM_024122.2,456-474).
gaaacgtactcccaaacta

SEQ ID NO: 386135 - DNA, 19 bp, Homo sapiens
  siRNA target sequence for MGC4825 (NM_024122.2,479-497).
caagatgcaaagtttggtt

SEQ ID NO: 386136 - DNA, 19 bp, Homo sapiens
  siRNA target sequence for MGC4825 (NM_024122.2,504-522).
gggttagacagctatgact

SEQ ID NO: 386137 - DNA, 19 bp, Homo sapiens
  siRNA target sequence for MGC4825 (NM_024122.2,505-523).
ggttagacagctatgacta

SEQ ID NO: 386138 - DNA, 19 bp, Homo sapiens
  siRNA target sequence for MGC4825 (NM_024122.2,506-524).
gttagacagctatgactat

SEQ ID NO: 386139 - DNA, 19 bp, Homo sapiens
  siRNA target sequence for MGC4825 (NM_024122.2,514-532).
gctatgactatctccaaaa

SEQ ID NO: 386140 - DNA, 19 bp, Homo sapiens
  siRNA target sequence for MGC4825 (NM_024122.2,554-572).
gagacttggtgttattggt

SEQ ID NO: 386141 - DNA, 19 bp, Homo sapiens
  siRNA target sequence for MGC4825 (NM_024122.2,556-574).
gacttggtgttattggttt

SEQ ID NO: 386142 - DNA, 19 bp, Homo sapiens
  siRNA target sequence for MGC4825 (NM_024122.2,722-740).
ctggggtttacgaggatat

SEQ ID NO: 386143 - DNA, 19 bp, Homo sapiens
  siRNA target sequence for MGC4825 (NM_024122.2,724-742).
ggggtttacgaggatatat

SEQ ID NO: 386144 - DNA, 19 bp, Homo sapiens
  siRNA target sequence for MGC4825 (NM_024122.2,725-743).
gggtttacgaggatatata

SEQ ID NO: 386145 - DNA, 19 bp, Homo sapiens
  siRNA target sequence for MGC4825 (NM_024122.2,733-751).
gaggatatatagtcataga

SEQ ID NO: 386146 - DNA, 19 bp, Homo sapiens
  siRNA target sequence for MGC3035 (NM_024293.2,616-634).
ggctcaccttccagattca

SEQ ID NO: 386147 - DNA, 19 bp, Homo sapiens
  siRNA target sequence for MGC3035 (NM_024293.2,732-750).
gttccagggattatgattt

SEQ ID NO: 386148 - DNA, 19 bp, Homo sapiens
  siRNA target sequence for MGC3035 (NM_024293.2,736-754).
cagggattatgatttccta

SEQ ID NO: 386149 - DNA, 19 bp, Homo sapiens
  siRNA target sequence for MGC3035 (NM_024293.2,740-758).
gattatgatttcctacatt

SEQ ID NO: 386150 - DNA, 19 bp, Homo sapiens
  siRNA target sequence for MGC3035 (NM_024293.2,779-797).
gtggcccctggtggtttat

SEQ ID NO: 386151 - DNA, 19 bp, Homo sapiens
  siRNA target sequence for MGC3035 (NM_024293.2,782-800).
gcccctggtggtttatcat

SEQ ID NO: 386152 - DNA, 19 bp, Homo sapiens
  siRNA target sequence for MGC3035 (NM_024293.2,784-802).
ccctggtggtttatcatga

SEQ ID NO: 386153 - DNA, 19 bp, Homo sapiens
  siRNA target sequence for MGC3035 (NM_024293.2,874-892).
ccaatgccctgcatcacaa

SEQ ID NO: 386154 - DNA, 19 bp, Homo sapiens
  siRNA target sequence for MGC3035 (NM_024293.2,875-893).
caatgccctgcatcacaaa

SEQ ID NO: 386155 - DNA, 19 bp, Homo sapiens
  siRNA target sequence for MGC3035 (NM_024293.2,1293-1311).
gatgtggcagctaaggaaa

SEQ ID NO: 386156 - DNA, 19 bp, Homo sapiens
  siRNA target sequence for MGC4614 (NM_024294.1,382-400).
ctatgtcctttgttgaaga

SEQ ID NO: 386157 - DNA, 19 bp, Homo sapiens
  siRNA target sequence for MGC4614 (NM_024294.1,424-442).
caatacctccggatactca

SEQ ID NO: 386158 - DNA, 19 bp, Homo sapiens
  siRNA target sequence for MGC4614 (NM_024294.1,430-448).
ctccggatactcagtttgt

SEQ ID NO: 386159 - DNA, 19 bp, Homo sapiens
  siRNA target sequence for MGC4614 (NM_024294.1,432-450).
ccggatactcagtttgtaa

SEQ ID NO: 386160 - DNA, 19 bp, Homo sapiens
  siRNA target sequence for MGC4614 (NM_024294.1,433-451).
cggatactcagtttgtaaa

SEQ ID NO: 386161 - DNA, 19 bp, Homo sapiens
  siRNA target sequence for MGC4614 (NM_024294.1,434-452).
ggatactcagtttgtaaaa

SEQ ID NO: 386162 - DNA, 19 bp, Homo sapiens
  siRNA target sequence for MGC4614 (NM_024294.1,490-508).
ctccaggggtttgtcttaa

SEQ ID NO: 386163 - DNA, 19 bp, Homo sapiens
  siRNA target sequence for MGC4614 (NM_024294.1,492-510).
ccaggggtttgtcttaaat

SEQ ID NO: 386164 - DNA, 19 bp, Homo sapiens
  siRNA target sequence for MGC4614 (NM_024294.1,493-511).
caggggtttgtcttaaata

SEQ ID NO: 386165 - DNA, 19 bp, Homo sapiens
  siRNA target sequence for MGC4614 (NM_024294.1,515-533).
cgggggagaccaatttgga

SEQ ID NO: 386166 - DNA, 19 bp, Homo sapiens
  siRNA target sequence for MGC4614 (NM_024294.1,610-628).
gcagagcaggaatgtatca

SEQ ID NO: 386167 - DNA, 19 bp, Homo sapiens
  siRNA target sequence for MGC4614 (NM_024294.1,724-742).
cgcagcagctgtcatcttt

SEQ ID NO: 386168 - DNA, 19 bp, Homo sapiens
  siRNA target sequence for MGC4614 (NM_024294.1,739-757).
cttttgaaacggagttcaa

SEQ ID NO: 386169 - DNA, 19 bp, Homo sapiens
  siRNA target sequence for MGC4614 (NM_024294.1,809-827).
ccaaaagaaccgacaatca

SEQ ID NO: 386170 - DNA, 19 bp, Homo sapiens
  siRNA target sequence for MGC4614 (NM_024294.1,815-833).
gaaccgacaatcagatgaa

SEQ ID NO: 386171 - DNA, 19 bp, Homo sapiens
  siRNA target sequence for MGC4614 (NM_024294.1,982-1000).
gcagtcacgcaaacaactt

SEQ ID NO: 386172 - DNA, 19 bp, Homo sapiens
  siRNA target sequence for MGC4614 (NM_024294.1,983-1001).
cagtcacgcaaacaactta

SEQ ID NO: 386173 - DNA, 19 bp, Homo sapiens
  siRNA target sequence for MGC4614 (NM_024294.1,989-1007).
cgcaaacaacttatcagta

SEQ ID NO: 386174 - DNA, 19 bp, Homo sapiens
  siRNA target sequence for MGC3067 (NM_024295.3,216-234).
gcgatcacgcgctattggt

SEQ ID NO: 386175 - DNA, 19 bp, Homo sapiens
  siRNA target sequence for MGC3067 (NM_024295.3,217-235).
cgatcacgcgctattggtt

SEQ ID NO: 386176 - DNA, 19 bp, Homo sapiens
  siRNA target sequence for MGC3067 (NM_024295.3,304-322).
ggcccgaagccttccttta

SEQ ID NO: 386177 - DNA, 19 bp, Homo sapiens
  siRNA target sequence for MGC3067 (NM_024295.3,317-335).
cctttatcgctttcagatt

SEQ ID NO: 386178 - DNA, 19 bp, Homo sapiens
  siRNA target sequence for MGC3067 (NM_024295.3,332-350).
gatttggaggccaatcact

SEQ ID NO: 386179 - DNA, 19 bp, Homo sapiens
  siRNA target sequence for MGC3067 (NM_024295.3,422-440).
gtattctacgcgacttgaa

SEQ ID NO: 386180 - DNA, 19 bp, Homo sapiens
  siRNA target sequence for MGC3067 (NM_024295.3,456-474).
gggaggccagcagactatt

SEQ ID NO: 386181 - DNA, 19 bp, Homo sapiens
  siRNA target sequence for MGC3067 (NM_024295.3,457-475).
ggaggccagcagactattt

SEQ ID NO: 386182 - DNA, 19 bp, Homo sapiens
  siRNA target sequence for MGC3067 (NM_024295.3,458-476).
gaggccagcagactattta

SEQ ID NO: 386183 - DNA, 19 bp, Homo sapiens
  siRNA target sequence for MGC3067 (NM_024295.3,460-478).
ggccagcagactatttatt

SEQ ID NO: 386184 - DNA, 19 bp, Homo sapiens
  siRNA target sequence for MGC3067 (NM_024295.3,462-480).
ccagcagactatttattca

SEQ ID NO: 386185 - DNA, 19 bp, Homo sapiens
  siRNA target sequence for MGC3067 (NM_024295.3,497-515).
gatttgcatcgtgattact

SEQ ID NO: 386186 - DNA, 19 bp, Homo sapiens
  siRNA target sequence for MGC3067 (NM_024295.3,552-570).
ctgatcatgtcagtacttt

SEQ ID NO: 386187 - DNA, 19 bp, Homo sapiens
  siRNA target sequence for MGC3067 (NM_024295.3,590-608).
cagagacatgattgtatca

SEQ ID NO: 386188 - DNA, 19 bp, Homo sapiens
  siRNA target sequence for MGC3067 (NM_024295.3,603-621).
gtatcattttggtttggaa

SEQ ID NO: 386189 - DNA, 19 bp, Homo sapiens
  siRNA target sequence for MGC3067 (NM_024295.3,624-642).
cgatttaaggcctgctatt

SEQ ID NO: 386190 - DNA, 19 bp, Homo sapiens
  siRNA target sequence for MGC3067 (NM_024295.3,625-643).
gatttaaggcctgctattt

SEQ ID NO: 386191 - DNA, 19 bp, Homo sapiens
  siRNA target sequence for MGC3067 (NM_024295.3,646-664).
cctgggttatccttggatt

SEQ ID NO: 386192 - DNA, 19 bp, Homo sapiens
  siRNA target sequence for MGC3067 (NM_024295.3,649-667).
gggttatccttggattcaa

SEQ ID NO: 386193 - DNA, 19 bp, Homo sapiens
  siRNA target sequence for MGC3067 (NM_024295.3,651-669).
gttatccttggattcaact

SEQ ID NO: 386194 - DNA, 19 bp, Homo sapiens
  siRNA target sequence for MGC3067 (NM_024295.3,657-675).
cttggattcaactatatca

SEQ ID NO: 386195 - DNA, 19 bp, Homo sapiens
  siRNA target sequence for MGC3067 (NM_024295.3,677-695).
cggaggctcggtaatcaat

SEQ ID NO: 386196 - DNA, 19 bp, Homo sapiens
  siRNA target sequence for MGC3067 (NM_024295.3,679-697).
gaggctcggtaatcaatga

SEQ ID NO: 386197 - DNA, 19 bp, Homo sapiens
  siRNA target sequence for MGC3067 (NM_024295.3,685-703).
cggtaatcaatgagcttat

SEQ ID NO: 386198 - DNA, 19 bp, Homo sapiens
  siRNA target sequence for MGC3067 (NM_024295.3,713-731).
ggttggacatctttatttt

SEQ ID NO: 386199 - DNA, 19 bp, Homo sapiens
  siRNA target sequence for MGC3067 (NM_024295.3,756-774).
gacttgggaggaagaaatt

SEQ ID NO: 386200 - DNA, 19 bp, Homo sapiens
  siRNA target sequence for MGC3067 (NM_024295.3,777-795).
ctatccacacctcagtttt

SEQ ID NO: 386201 - DNA, 19 bp, Homo sapiens
  siRNA target sequence for MGC3067 (NM_024295.3,781-799).
ccacacctcagtttttgta

SEQ ID NO: 386202 - DNA, 19 bp, Homo sapiens
  siRNA target sequence for MGC1203 (NM_024296.2,348-366).
ccgaggtgactgatgtcta

SEQ ID NO: 386203 - DNA, 19 bp, Homo sapiens
  siRNA target sequence for MGC1203 (NM_024296.2,349-367).
cgaggtgactgatgtctat

SEQ ID NO: 386204 - DNA, 19 bp, Homo sapiens
  siRNA target sequence for MGC1203 (NM_024296.2,607-625).
ggaccagctgcttagcaat

SEQ ID NO: 386205 - DNA, 19 bp, Homo sapiens
  siRNA target sequence for MGC1203 (NM_024296.2,629-647).
gaagacctcagtaattcta

SEQ ID NO: 386206 - DNA, 19 bp, Homo sapiens
  siRNA target sequence for MGC1203 (NM_024296.2,634-652).
cctcagtaattctatgtat

SEQ ID NO: 386207 - DNA, 19 bp, Homo sapiens
  siRNA target sequence for MGC1203 (NM_024296.2,710-728).
ccagccctccaggagtatt

SEQ ID NO: 386208 - DNA, 19 bp, Homo sapiens
  siRNA target sequence for MGC1203 (NM_024296.2,714-732).
ccctccaggagtattcaca

SEQ ID NO: 386209 - DNA, 19 bp, Homo sapiens
  siRNA target sequence for MGC1203 (NM_024296.2,792-810).
ccaggtacaggaatttaga

SEQ ID NO: 386210 - DNA, 19 bp, Homo sapiens
  siRNA target sequence for MGC2217 (NM_024300.2,207-225).
gagagatcctgacataaat

SEQ ID NO: 386211 - DNA, 19 bp, Homo sapiens
  siRNA target sequence for MGC2217 (NM_024300.2,325-343).
cggagattctggaattcta

SEQ ID NO: 386212 - DNA, 19 bp, Homo sapiens
  siRNA target sequence for FKRP (NM_024301.2,1474-1492).
gcggtcgagggcgactttt

SEQ ID NO: 386213 - DNA, 19 bp, Homo sapiens
  siRNA target sequence for FKRP (NM_024301.2,1475-1493).
cggtcgagggcgacttttt

SEQ ID NO: 386214 - DNA, 19 bp, Homo sapiens
  siRNA target sequence for FKRP (NM_024301.2,1660-1678).
gcgcaggcgcctaacaact

SEQ ID NO: 386215 - DNA, 19 bp, Homo sapiens
  siRNA target sequence for FKRP (NM_024301.2,1661-1679).
cgcaggcgcctaacaacta

SEQ ID NO: 386216 - DNA, 19 bp, Homo sapiens
  siRNA target sequence for TNIP2 (NM_024309.2,333-351).
gctgactgagcgactagaa

SEQ ID NO: 386217 - DNA, 19 bp, Homo sapiens
  siRNA target sequence for TNIP2 (NM_024309.2,338-356).
ctgagcgactagaagaaaa

SEQ ID NO: 386218 - DNA, 19 bp, Homo sapiens
  siRNA target sequence for TNIP2 (NM_024309.2,667-685).
gaagaaaatcgactgttaa

SEQ ID NO: 386219 - DNA, 19 bp, Homo sapiens
  siRNA target sequence for TNIP2 (NM_024309.2,740-758).
ccagcagggacgaatacgt

SEQ ID NO: 386220 - DNA, 19 bp, Homo sapiens
  siRNA target sequence for TNIP2 (NM_024309.2,994-1012).
cgggaacgggctcaaagta

SEQ ID NO: 386221 - DNA, 19 bp, Homo sapiens
  siRNA target sequence for TNIP2 (NM_024309.2,1002-1020).
ggctcaaagtaggattcaa

SEQ ID NO: 386222 - DNA, 19 bp, Homo sapiens
  siRNA target sequence for TNIP2 (NM_024309.2,1004-1022).
ctcaaagtaggattcaaga

SEQ ID NO: 386223 - DNA, 19 bp, Homo sapiens
  siRNA target sequence for TNIP2 (NM_024309.2,1110-1128).
gagcaaaactgccaagtat

SEQ ID NO: 386224 - DNA, 19 bp, Homo sapiens
  siRNA target sequence for TNIP2 (NM_024309.2,1136-1154).
ccgacgcattagagcttat

SEQ ID NO: 386225 - DNA, 19 bp, Homo sapiens
  siRNA target sequence for MGC3731 (NM_024313.1,80-98).
cgaggctcgttcttagctt

SEQ ID NO: 386226 - DNA, 19 bp, Homo sapiens
  siRNA target sequence for MGC3731 (NM_024313.1,220-238).
gagcgccaccaggaatact

SEQ ID NO: 386227 - DNA, 19 bp, Homo sapiens
  siRNA target sequence for MGC3731 (NM_024313.1,224-242).
gccaccaggaatacttgaa

SEQ ID NO: 386228 - DNA, 19 bp, Homo sapiens
  siRNA target sequence for MGC3731 (NM_024313.1,311-329).
cggagtcggtgcagtatga

SEQ ID NO: 386229 - DNA, 19 bp, Homo sapiens
  siRNA target sequence for MGC3731 (NM_024313.1,453-471).
cacggagaaaccaaccaaa

SEQ ID NO: 386230 - DNA, 19 bp, Homo sapiens
  siRNA target sequence for MGC3731 (NM_024313.1,542-560).
cacacagccgcaaaaaggt

SEQ ID NO: 386231 - DNA, 19 bp, Homo sapiens
  siRNA target sequence for C7orf23 (NM_024315.2,280-298).
cgtccgccaaggatcgaat

SEQ ID NO: 386232 - DNA, 19 bp, Homo sapiens
  siRNA target sequence for C7orf23 (NM_024315.2,283-301).
ccgccaaggatcgaatcat

SEQ ID NO: 386233 - DNA, 19 bp, Homo sapiens
  siRNA target sequence for C7orf23 (NM_024315.2,286-304).
ccaaggatcgaatcatcaa

SEQ ID NO: 386234 - DNA, 19 bp, Homo sapiens
  siRNA target sequence for C7orf23 (NM_024315.2,287-305).
caaggatcgaatcatcaat

SEQ ID NO: 386235 - DNA, 19 bp, Homo sapiens
  siRNA target sequence for C7orf23 (NM_024315.2,290-308).
ggatcgaatcatcaattta

SEQ ID NO: 386236 - DNA, 19 bp, Homo sapiens
  siRNA target sequence for C7orf23 (NM_024315.2,316-334).
gcagcttaacatccttatt

SEQ ID NO: 386237 - DNA, 19 bp, Homo sapiens
  siRNA target sequence for C7orf23 (NM_024315.2,325-343).
catccttattgattctagt

SEQ ID NO: 386238 - DNA, 19 bp, Homo sapiens
  siRNA target sequence for C7orf23 (NM_024315.2,378-396).
cctccaaaaccgttgaata

SEQ ID NO: 386239 - DNA, 19 bp, Homo sapiens
  siRNA target sequence for C7orf23 (NM_024315.2,379-397).
ctccaaaaccgttgaatat

SEQ ID NO: 386240 - DNA, 19 bp, Homo sapiens
  siRNA target sequence for C7orf23 (NM_024315.2,433-451).
ctgcctgcatacttatcta

SEQ ID NO: 386241 - DNA, 19 bp, Homo sapiens
  siRNA target sequence for C7orf23 (NM_024315.2,455-473).
gtatcgacaaggagactta

SEQ ID NO: 386242 - DNA, 19 bp, Homo sapiens
  siRNA target sequence for C7orf23 (NM_024315.2,466-484).
gagacttagaaccgaaatt

SEQ ID NO: 386243 - DNA, 19 bp, Homo sapiens
  siRNA target sequence for C7orf23 (NM_024315.2,468-486).
gacttagaaccgaaattta

SEQ ID NO: 386244 - DNA, 19 bp, Homo sapiens
  siRNA target sequence for C7orf23 (NM_024315.2,470-488).
cttagaaccgaaatttaga

SEQ ID NO: 386245 - DNA, 19 bp, Homo sapiens
  siRNA target sequence for C7orf23 (NM_024315.2,477-495).
ccgaaatttagaaagctaa

SEQ ID NO: 386246 - DNA, 19 bp, Homo sapiens
  siRNA target sequence for C7orf23 (NM_024315.2,514-532).
ctatcatcatgttgtgtat

SEQ ID NO: 386247 - DNA, 19 bp, Homo sapiens
  siRNA target sequence for C7orf23 (NM_024315.2,518-536).
catcatgttgtgtatatgt

SEQ ID NO: 386248 - DNA, 19 bp, Homo sapiens
  siRNA target sequence for ILT10 (NM_024317.2,537-555).
ggatacccagggttactat

SEQ ID NO: 386249 - DNA, 19 bp, Homo sapiens
  siRNA target sequence for ILT10 (NM_024317.2,1118-1136).
gggagcagttggacacttt

SEQ ID NO: 386250 - DNA, 19 bp, Homo sapiens
  siRNA target sequence for C1orf35 (NM_024319.2,128-146).
gggcaggaccagttcaact

SEQ ID NO: 386251 - DNA, 19 bp, Homo sapiens
  siRNA target sequence for C1orf35 (NM_024319.2,342-360).
gctacaagaacgtgaagaa

SEQ ID NO: 386252 - DNA, 19 bp, Homo sapiens
  siRNA target sequence for MGC11242 (NM_024320.2,253-271).
ggccccaacagcgacttta

SEQ ID NO: 386253 - DNA, 19 bp, Homo sapiens
  siRNA target sequence for MGC11242 (NM_024320.2,254-272).
gccccaacagcgactttaa

SEQ ID NO: 386254 - DNA, 19 bp, Homo sapiens
  siRNA target sequence for MGC11242 (NM_024320.2,338-356).
gacgcttcaaggagaagaa

SEQ ID NO: 386255 - DNA, 19 bp, Homo sapiens
  siRNA target sequence for MGC11242 (NM_024320.2,384-402).
ccctaacctctttgatgat

SEQ ID NO: 386256 - DNA, 19 bp, Homo sapiens
  siRNA target sequence for MGC11242 (NM_024320.2,386-404).
ctaacctctttgatgatca

SEQ ID NO: 386257 - DNA, 19 bp, Homo sapiens
  siRNA target sequence for MGC11266 (NM_024322.1,170-188).
caaaggaggtgttttagct

SEQ ID NO: 386258 - DNA, 19 bp, Homo sapiens
  siRNA target sequence for MGC11266 (NM_024322.1,343-361).
ccagcgtgaaagcatgtat

SEQ ID NO: 386259 - DNA, 19 bp, Homo sapiens
  siRNA target sequence for MGC11266 (NM_024322.1,344-362).
cagcgtgaaagcatgtatt

SEQ ID NO: 386260 - DNA, 19 bp, Homo sapiens
  siRNA target sequence for MGC11266 (NM_024322.1,380-398).
ccaaacagtggagatcaat

SEQ ID NO: 386261 - DNA, 19 bp, Homo sapiens
  siRNA target sequence for MGC11266 (NM_024322.1,439-457).
ccattctgcaggcatatca

SEQ ID NO: 386262 - DNA, 19 bp, Homo sapiens
  siRNA target sequence for MGC11266 (NM_024322.1,440-458).
cattctgcaggcatatcat

SEQ ID NO: 386263 - DNA, 19 bp, Homo sapiens
  siRNA target sequence for MGC11266 (NM_024322.1,463-481).
caggcctcagtggtaaact

SEQ ID NO: 386264 - DNA, 19 bp, Homo sapiens
  siRNA target sequence for MGC11266 (NM_024322.1,465-483).
ggcctcagtggtaaactga

SEQ ID NO: 386265 - DNA, 19 bp, Homo sapiens
  siRNA target sequence for MGC11266 (NM_024322.1,482-500).
gaccagccgaggagtttgt

SEQ ID NO: 386266 - DNA, 19 bp, Homo sapiens
  siRNA target sequence for MGC11266 (NM_024322.1,495-513).
gtttgtgtctgcatcagta

SEQ ID NO: 386267 - DNA, 19 bp, Homo sapiens
  siRNA target sequence for MGC11266 (NM_024322.1,505-523).
gcatcagtactgcttttga

SEQ ID NO: 386268 - DNA, 19 bp, Homo sapiens
  siRNA target sequence for MGC11266 (NM_024322.1,522-540).
gaggggaacctattggatt

SEQ ID NO: 386269 - DNA, 19 bp, Homo sapiens
  siRNA target sequence for MGC11266 (NM_024322.1,527-545).
gaacctattggattcctat

SEQ ID NO: 386270 - DNA, 19 bp, Homo sapiens
  siRNA target sequence for MGC11266 (NM_024322.1,549-567).
gtggaccttgtcatacaga

SEQ ID NO: 386271 - DNA, 19 bp, Homo sapiens
  siRNA target sequence for MGC11266 (NM_024322.1,566-584).
gaaaccactccggatacat

SEQ ID NO: 386272 - DNA, 19 bp, Homo sapiens
  siRNA target sequence for MGC11266 (NM_024322.1,677-695).
gtacctgaatgcttactct

SEQ ID NO: 386273 - DNA, 19 bp, Homo sapiens
  siRNA target sequence for MGC11266 (NM_024322.1,773-791).
gtgtaacttgctgtcattt

SEQ ID NO: 386274 - DNA, 19 bp, Homo sapiens
  siRNA target sequence for MGC11266 (NM_024322.1,878-896).
cgtcaccgtgacatgtcaa

SEQ ID NO: 386275 - DNA, 19 bp, Homo sapiens
  siRNA target sequence for MGC11266 (NM_024322.1,903-921).
gaagtattatccacttcat

SEQ ID NO: 386276 - DNA, 19 bp, Homo sapiens
  siRNA target sequence for MGC11266 (NM_024322.1,926-944).
ggagcaacgagcatctcat

SEQ ID NO: 386277 - DNA, 19 bp, Homo sapiens
  siRNA target sequence for MGC11266 (NM_024322.1,930-948).
caacgagcatctcatgaaa

SEQ ID NO: 386278 - DNA, 19 bp, Homo sapiens
  siRNA target sequence for MGC11266 (NM_024322.1,961-979).
cgaagcccttgcatcaagt

SEQ ID NO: 386279 - DNA, 19 bp, Homo sapiens
  siRNA target sequence for MGC11266 (NM_024322.1,965-983).
gcccttgcatcaagtgttt

SEQ ID NO: 386280 - DNA, 19 bp, Homo sapiens
  siRNA target sequence for MGC11266 (NM_024322.1,978-996).
gtgtttgcctcatttacaa

SEQ ID NO: 386281 - DNA, 19 bp, Homo sapiens
  siRNA target sequence for MGC11271 (NM_024323.3,163-181).
ccatgttgggctgtttaca

SEQ ID NO: 386282 - DNA, 19 bp, Homo sapiens
  siRNA target sequence for MGC11271 (NM_024323.3,164-182).
catgttgggctgtttacat

SEQ ID NO: 386283 - DNA, 19 bp, Homo sapiens
  siRNA target sequence for MGC11271 (NM_024323.3,350-368).
ctcattcgggaggtttgtt

SEQ ID NO: 386284 - DNA, 19 bp, Homo sapiens
  siRNA target sequence for MGC11271 (NM_024323.3,745-763).
gtgacggtggccaaaagga

SEQ ID NO: 386285 - DNA, 19 bp, Homo sapiens
  siRNA target sequence for MGC11271 (NM_024323.3,765-783).
cacctaccaagcattgatt

SEQ ID NO: 386286 - DNA, 19 bp, Homo sapiens
  siRNA target sequence for MGC11271 (NM_024323.3,767-785).
cctaccaagcattgattct

SEQ ID NO: 386287 - DNA, 19 bp, Homo sapiens
  siRNA target sequence for MGC11271 (NM_024323.3,1057-1075).
ccctcgggatggttgtcat

SEQ ID NO: 386288 - DNA, 19 bp, Homo sapiens
  siRNA target sequence for MGC11271 (NM_024323.3,1382-1400).
cacaggtccatgtgtcaat

SEQ ID NO: 386289 - DNA, 19 bp, Homo sapiens
  siRNA target sequence for MGC11271 (NM_024323.3,1384-1402).
caggtccatgtgtcaatca

SEQ ID NO: 386290 - DNA, 19 bp, Homo sapiens
  siRNA target sequence for MGC11271 (NM_024323.3,1387-1405).
gtccatgtgtcaatcagaa

SEQ ID NO: 386291 - DNA, 19 bp, Homo sapiens
  siRNA target sequence for MGC11271 (NM_024323.3,1508-1526).
ggaacacagagaaatagca

SEQ ID NO: 386292 - DNA, 19 bp, Homo sapiens
  siRNA target sequence for MGC11271 (NM_024323.3,1857-1875).
gctttcaagcgccttaact

SEQ ID NO: 386293 - DNA, 19 bp, Homo sapiens
  siRNA target sequence for MGC11271 (NM_024323.3,1858-1876).
ctttcaagcgccttaacta

SEQ ID NO: 386294 - DNA, 19 bp, Homo sapiens
  siRNA target sequence for MGC11271 (NM_024323.3,1869-1887).
cttaactaccggaagacaa

SEQ ID NO: 386295 - DNA, 19 bp, Homo sapiens
  siRNA target sequence for MGC2508 (NM_024327.1,220-238).
cgaaccctgaagagaacat

SEQ ID NO: 386296 - DNA, 19 bp, Homo sapiens
  siRNA target sequence for MGC2508 (NM_024327.1,679-697).
ggctgcatcaacactacat

SEQ ID NO: 386297 - DNA, 19 bp, Homo sapiens
  siRNA target sequence for MGC3222 (NM_024334.1,175-193).
gtacccggagagaacatgt

SEQ ID NO: 386298 - DNA, 19 bp, Homo sapiens
  siRNA target sequence for MGC3222 (NM_024334.1,178-196).
cccggagagaacatgtcaa

SEQ ID NO: 386299 - DNA, 19 bp, Homo sapiens
  siRNA target sequence for MGC3222 (NM_024334.1,179-197).
ccggagagaacatgtcaaa

SEQ ID NO: 386300 - DNA, 19 bp, Homo sapiens
  siRNA target sequence for MGC3222 (NM_024334.1,182-200).
gagagaacatgtcaaagtt

SEQ ID NO: 386301 - DNA, 19 bp, Homo sapiens
  siRNA target sequence for MGC3222 (NM_024334.1,281-299).
gctctccttctacctaatt

SEQ ID NO: 386302 - DNA, 19 bp, Homo sapiens
  siRNA target sequence for MGC3222 (NM_024334.1,282-300).
ctctccttctacctaattt

SEQ ID NO: 386303 - DNA, 19 bp, Homo sapiens
  siRNA target sequence for MGC3222 (NM_024334.1,385-403).
gtgtggctccggagaatga

SEQ ID NO: 386304 - DNA, 19 bp, Homo sapiens
  siRNA target sequence for MGC3222 (NM_024334.1,437-455).
gacatccaagcttttgtct

SEQ ID NO: 386305 - DNA, 19 bp, Homo sapiens
  siRNA target sequence for MGC3222 (NM_024334.1,496-514).
ggaggcacgtggagatgta

SEQ ID NO: 386306 - DNA, 19 bp, Homo sapiens
  siRNA target sequence for MGC3222 (NM_024334.1,601-619).
ggaggtcagaaatcatcaa

SEQ ID NO: 386307 - DNA, 19 bp, Homo sapiens
  siRNA target sequence for MGC3222 (NM_024334.1,636-654).
cgagagattggccacaaaa

SEQ ID NO: 386308 - DNA, 19 bp, Homo sapiens
  siRNA target sequence for MGC3222 (NM_024334.1,730-748).
caggcctcatcgacaaagt

SEQ ID NO: 386309 - DNA, 19 bp, Homo sapiens
  siRNA target sequence for MGC3222 (NM_024334.1,741-759).
gacaaagtcgacaacttca

SEQ ID NO: 386310 - DNA, 19 bp, Homo sapiens
  siRNA target sequence for MGC3222 (NM_024334.1,803-821).
cattcgccgtggagacttt

SEQ ID NO: 386311 - DNA, 19 bp, Homo sapiens
  siRNA target sequence for MGC3222 (NM_024334.1,830-848).
cagcgaaaatcccaagtat

SEQ ID NO: 386312 - DNA, 19 bp, Homo sapiens
  siRNA target sequence for MGC3222 (NM_024334.1,1034-1052).
ggtgtttcatagagaacta

SEQ ID NO: 386313 - DNA, 19 bp, Homo sapiens
  siRNA target sequence for MGC3222 (NM_024334.1,1035-1053).
gtgtttcatagagaactaa

SEQ ID NO: 386314 - DNA, 19 bp, Homo sapiens
  siRNA target sequence for MGC3222 (NM_024334.1,1112-1130).
gggcctcaaccttatgaca

SEQ ID NO: 386315 - DNA, 19 bp, Homo sapiens
  siRNA target sequence for MGC3222 (NM_024334.1,1169-1187).
ccgagacctggtcaacatt

SEQ ID NO: 386316 - DNA, 19 bp, Homo sapiens
  siRNA target sequence for MGC2655 (NM_024339.2,291-309).
ccttgcagcggctccatat

SEQ ID NO: 386317 - DNA, 19 bp, Homo sapiens
  siRNA target sequence for MGC2655 (NM_024339.2,302-320).
ctccatatgaccatcttct

SEQ ID NO: 386318 - DNA, 19 bp, Homo sapiens
  siRNA target sequence for MGC2655 (NM_024339.2,333-351).
caccatgtgggaagtttct

SEQ ID NO: 386319 - DNA, 19 bp, Homo sapiens
  siRNA target sequence for MGC2655 (NM_024339.2,350-368).
ctggcggctggcaacaatt

SEQ ID NO: 386320 - DNA, 19 bp, Homo sapiens
  siRNA target sequence for MGC2655 (NM_024339.2,436-454).
gccggtggtgactttccaa

SEQ ID NO: 386321 - DNA, 19 bp, Homo sapiens
  siRNA target sequence for MGC2655 (NM_024339.2,467-485).
cccgtctatagcatggttt

SEQ ID NO: 386322 - DNA, 19 bp, Homo sapiens
  siRNA target sequence for MGC2655 (NM_024339.2,686-704).
cacactatggaccttgaaa

SEQ ID NO: 386323 - DNA, 19 bp, Homo sapiens
  siRNA target sequence for MGC2655 (NM_024339.2,688-706).
cactatggaccttgaaact

SEQ ID NO: 386324 - DNA, 19 bp, Homo sapiens
  siRNA target sequence for MGC2655 (NM_024339.2,845-863).
cagacgatcgaggtctata

SEQ ID NO: 386325 - DNA, 19 bp, Homo sapiens
  siRNA target sequence for MGC2655 (NM_024339.2,849-867).
cgatcgaggtctataagca

SEQ ID NO: 386326 - DNA, 19 bp, Homo sapiens
  siRNA target sequence for MGC2655 (NM_024339.2,905-923).
ggatgtttggcaactgatt

SEQ ID NO: 386327 - DNA, 19 bp, Homo sapiens
  siRNA target sequence for MGC2655 (NM_024339.2,1203-1221).
gctgccgggtggatgtctt

SEQ ID NO: 386328 - DNA, 19 bp, Homo sapiens
  siRNA target sequence for GRLF1 (NM_024342.1,908-926).
cagaataccaggactatgt

SEQ ID NO: 386329 - DNA, 19 bp, Homo sapiens
  siRNA target sequence for GRLF1 (NM_024342.1,1075-1093).
gaccacctaagctgcataa

SEQ ID NO: 386330 - DNA, 19 bp, Homo sapiens
  siRNA target sequence for GRLF1 (NM_024342.1,1578-1596).
ggaacagcgatttaaagca

SEQ ID NO: 386331 - DNA, 19 bp, Homo sapiens
  siRNA target sequence for GRLF1 (NM_024342.1,1618-1636).
cgtgatgcccttattctga

SEQ ID NO: 386332 - DNA, 19 bp, Homo sapiens
  siRNA target sequence for GRLF1 (NM_024342.1,1619-1637).
gtgatgcccttattctgaa

SEQ ID NO: 386333 - DNA, 19 bp, Homo sapiens
  siRNA target sequence for GRLF1 (NM_024342.1,1843-1861).
gagattcgagctctttgta

SEQ ID NO: 386334 - DNA, 19 bp, Homo sapiens
  siRNA target sequence for GRLF1 (NM_024342.1,1845-1863).
gattcgagctctttgtaca

SEQ ID NO: 386335 - DNA, 19 bp, Homo sapiens
  siRNA target sequence for GRLF1 (NM_024342.1,2924-2942).
caccgctctgcaactcaaa

SEQ ID NO: 386336 - DNA, 19 bp, Homo sapiens
  siRNA target sequence for GRLF1 (NM_024342.1,3527-3545).
gcgtggggagtgatgatga

SEQ ID NO: 386337 - DNA, 19 bp, Homo sapiens
  siRNA target sequence for MGC10765 (NM_024345.1,57-75).
caacgtcctctggatatct

SEQ ID NO: 386338 - DNA, 19 bp, Homo sapiens
  siRNA target sequence for MGC10765 (NM_024345.1,60-78).
cgtcctctggatatctctt

SEQ ID NO: 386339 - DNA, 19 bp, Homo sapiens
  siRNA target sequence for MGC10765 (NM_024345.1,69-87).
gatatctcttaattttgca

SEQ ID NO: 386340 - DNA, 19 bp, Homo sapiens
  siRNA target sequence for MGC10765 (NM_024345.1,85-103).
gcatgaccttgacttaact

SEQ ID NO: 386341 - DNA, 19 bp, Homo sapiens
  siRNA target sequence for MGC10765 (NM_024345.1,119-137).
ggcagctatcccattttaa

SEQ ID NO: 386342 - DNA, 19 bp, Homo sapiens
  siRNA target sequence for MGC10765 (NM_024345.1,121-139).
cagctatcccattttaaga

SEQ ID NO: 386343 - DNA, 19 bp, Homo sapiens
  siRNA target sequence for MGC10765 (NM_024345.1,140-158).
gcaagaagaactacttcaa

SEQ ID NO: 386344 - DNA, 19 bp, Homo sapiens
  siRNA target sequence for MGC10765 (NM_024345.1,193-211).
cgtaacccctgaagttctt

SEQ ID NO: 386345 - DNA, 19 bp, Homo sapiens
  siRNA target sequence for MGC10765 (NM_024345.1,288-306).
caagcaacagtgatgatga

SEQ ID NO: 386346 - DNA, 19 bp, Homo sapiens
  siRNA target sequence for MGC10765 (NM_024345.1,307-325).
ggagtgtacttgtgtctat

SEQ ID NO: 386347 - DNA, 19 bp, Homo sapiens
  siRNA target sequence for MGC10765 (NM_024345.1,312-330).
gtacttgtgtctatgaatt

SEQ ID NO: 386348 - DNA, 19 bp, Homo sapiens
  siRNA target sequence for MGC10765 (NM_024345.1,372-390).
ctctacgactgactcatta

SEQ ID NO: 386349 - DNA, 19 bp, Homo sapiens
  siRNA target sequence for MGC10765 (NM_024345.1,374-392).
ctacgactgactcattaca

SEQ ID NO: 386350 - DNA, 19 bp, Homo sapiens
  siRNA target sequence for MGC10765 (NM_024345.1,412-430).
caggggttacatcaaagaa

SEQ ID NO: 386351 - DNA, 19 bp, Homo sapiens
  siRNA target sequence for MGC10765 (NM_024345.1,414-432).
ggggttacatcaaagaact

SEQ ID NO: 386352 - DNA, 19 bp, Homo sapiens
  siRNA target sequence for MGC10765 (NM_024345.1,441-459).
gccccgatggacgaatgat

SEQ ID NO: 386353 - DNA, 19 bp, Homo sapiens
  siRNA target sequence for MGC10765 (NM_024345.1,442-460).
ccccgatggacgaatgatt

SEQ ID NO: 386354 - DNA, 19 bp, Homo sapiens
  siRNA target sequence for MGC10765 (NM_024345.1,443-461).
cccgatggacgaatgattt

SEQ ID NO: 386355 - DNA, 19 bp, Homo sapiens
  siRNA target sequence for MGC10765 (NM_024345.1,445-463).
cgatggacgaatgatttct

SEQ ID NO: 386356 - DNA, 19 bp, Homo sapiens
  siRNA target sequence for MGC10765 (NM_024345.1,446-464).
gatggacgaatgatttctt

SEQ ID NO: 386357 - DNA, 19 bp, Homo sapiens
  siRNA target sequence for MGC10765 (NM_024345.1,563-581).
cgttctctgtactctcata

SEQ ID NO: 386358 - DNA, 19 bp, Homo sapiens
  siRNA target sequence for MGC10765 (NM_024345.1,564-582).
gttctctgtactctcataa

SEQ ID NO: 386359 - DNA, 19 bp, Homo sapiens
  siRNA target sequence for MGC10765 (NM_024345.1,567-585).
ctctgtactctcataatga

SEQ ID NO: 386360 - DNA, 19 bp, Homo sapiens
  siRNA target sequence for MGC10765 (NM_024345.1,584-602).
gatgtggtactgacaacaa

SEQ ID NO: 386361 - DNA, 19 bp, Homo sapiens
  siRNA target sequence for MGC10765 (NM_024345.1,641-659).
cttagtggacgggtttctt

SEQ ID NO: 386362 - DNA, 19 bp, Homo sapiens
  siRNA target sequence for MGC10765 (NM_024345.1,648-666).
gacgggtttctttgtatca

SEQ ID NO: 386363 - DNA, 19 bp, Homo sapiens
  siRNA target sequence for NDUFS7 (NM_024407.3,489-507).
ggaggctactaccactatt

SEQ ID NO: 386364 - DNA, 19 bp, Homo sapiens
  siRNA target sequence for NDUFS7 (NM_024407.3,492-510).
ggctactaccactattcct

SEQ ID NO: 386365 - DNA, 19 bp, Homo sapiens
  siRNA target sequence for NDUFS7 (NM_024407.3,540-558).
gtgcccgtggacatctaca

SEQ ID NO: 386366 - DNA, 19 bp, Homo sapiens
  siRNA target sequence for BITE (NM_024491.1,227-245).
gcagaatgggaaagcataa

SEQ ID NO: 386367 - DNA, 19 bp, Homo sapiens
  siRNA target sequence for BITE (NM_024491.1,256-274).
gatgatgcatggcttaaaa

SEQ ID NO: 386368 - DNA, 19 bp, Homo sapiens
  siRNA target sequence for BITE (NM_024491.1,294-312).
gaacagatctcaaagatct

SEQ ID NO: 386369 - DNA, 19 bp, Homo sapiens
  siRNA target sequence for BITE (NM_024491.1,394-412).
catgatacaggagcttata

SEQ ID NO: 386370 - DNA, 19 bp, Homo sapiens
  siRNA target sequence for BITE (NM_024491.1,397-415).
gatacaggagcttatagaa

SEQ ID NO: 386371 - DNA, 19 bp, Homo sapiens
  siRNA target sequence for BITE (NM_024491.1,401-419).
caggagcttatagaaacta

SEQ ID NO: 386372 - DNA, 19 bp, Homo sapiens
  siRNA target sequence for BITE (NM_024491.1,473-491).
gaacaacgagctaatgact

SEQ ID NO: 386373 - DNA, 19 bp, Homo sapiens
  siRNA target sequence for BITE (NM_024491.1,519-537).
ccaaaattggtgaattgga

SEQ ID NO: 386374 - DNA, 19 bp, Homo sapiens
  siRNA target sequence for BITE (NM_024491.1,536-554).
gaggatgaatcactaagta

SEQ ID NO: 386375 - DNA, 19 bp, Homo sapiens
  siRNA target sequence for BITE (NM_024491.1,614-632).
gtgaagtgccagcattata

SEQ ID NO: 386376 - DNA, 19 bp, Homo sapiens
  siRNA target sequence for BITE (NM_024491.1,621-639).
gccagcattataagaaaaa

SEQ ID NO: 386377 - DNA, 19 bp, Homo sapiens
  siRNA target sequence for BITE (NM_024491.1,645-663).
cggagcaagaagaaactat

SEQ ID NO: 386378 - DNA, 19 bp, Homo sapiens
  siRNA target sequence for BITE (NM_024491.1,674-692).
caaatggaagtctgtagat

SEQ ID NO: 386379 - DNA, 19 bp, Homo sapiens
  siRNA target sequence for BITE (NM_024491.1,704-722).
gaagaagatcgcattgtca

SEQ ID NO: 386380 - DNA, 19 bp, Homo sapiens
  siRNA target sequence for BITE (NM_024491.1,713-731).
cgcattgtcactcaaaaca

SEQ ID NO: 386381 - DNA, 19 bp, Homo sapiens
  siRNA target sequence for BITE (NM_024491.1,721-739).
cactcaaaacagagtgttt

SEQ ID NO: 386382 - DNA, 19 bp, Homo sapiens
  siRNA target sequence for BITE (NM_024491.1,761-779).
cctcataccgtcttggata

SEQ ID NO: 386383 - DNA, 19 bp, Homo sapiens
  siRNA target sequence for BITE (NM_024491.1,780-798).
gacagttgctttgtctaat

SEQ ID NO: 386384 - DNA, 19 bp, Homo sapiens
  siRNA target sequence for BITE (NM_024491.1,792-810).
gtctaattgattactatga

SEQ ID NO: 386385 - DNA, 19 bp, Homo sapiens
  siRNA target sequence for BITE (NM_024491.1,805-823).
ctatgaatctaaaattaga

SEQ ID NO: 386386 - DNA, 19 bp, Homo sapiens
  siRNA target sequence for BITE (NM_024491.1,840-858).
ggcaatataaagaagatga

SEQ ID NO: 386387 - DNA, 19 bp, Homo sapiens
  siRNA target sequence for BITE (NM_024491.1,895-913).
ggatgcctcaccaacttat

SEQ ID NO: 386388 - DNA, 19 bp, Homo sapiens
  siRNA target sequence for BITE (NM_024491.1,896-914).
gatgcctcaccaacttata

SEQ ID NO: 386389 - DNA, 19 bp, Homo sapiens
  siRNA target sequence for BITE (NM_024491.1,1025-1043).
cagcatgaattaagacttt

SEQ ID NO: 386390 - DNA, 19 bp, Homo sapiens
  siRNA target sequence for BITE (NM_024491.1,1097-1115).
caggagcttattaatcata

SEQ ID NO: 386391 - DNA, 19 bp, Homo sapiens
  siRNA target sequence for BITE (NM_024491.1,1142-1160).
gatgagcccagcaaatata

SEQ ID NO: 386392 - DNA, 19 bp, Homo sapiens
  siRNA target sequence for BITE (NM_024491.1,1175-1193).
ctaattgaccagagatact

SEQ ID NO: 386393 - DNA, 19 bp, Homo sapiens
  siRNA target sequence for BITE (NM_024491.1,1199-1217).
gtgctgtgtagcatcaatt

SEQ ID NO: 386394 - DNA, 19 bp, Homo sapiens
  siRNA target sequence for BITE (NM_024491.1,1201-1219).
gctgtgtagcatcaattca

SEQ ID NO: 386395 - DNA, 19 bp, Homo sapiens
  siRNA target sequence for BITE (NM_024491.1,1204-1222).
gtgtagcatcaattcaatt

SEQ ID NO: 386396 - DNA, 19 bp, Homo sapiens
  siRNA target sequence for BITE (NM_024491.1,1206-1224).
gtagcatcaattcaattat

SEQ ID NO: 386397 - DNA, 19 bp, Homo sapiens
  siRNA target sequence for BITE (NM_024491.1,1209-1227).
gcatcaattcaattatcca

SEQ ID NO: 386398 - DNA, 19 bp, Homo sapiens
  siRNA target sequence for BITE (NM_024491.1,1263-1281).
ccaaagggggagtccaaaa

SEQ ID NO: 386399 - DNA, 19 bp, Homo sapiens
  siRNA target sequence for BITE (NM_024491.1,1264-1282).
caaagggggagtccaaaat

SEQ ID NO: 386400 - DNA, 19 bp, Homo sapiens
  siRNA target sequence for BITE (NM_024491.1,1268-1286).
gggggagtccaaaatttta

SEQ ID NO: 386401 - DNA, 19 bp, Homo sapiens
  siRNA target sequence for BITE (NM_024491.1,1269-1287).
ggggagtccaaaattttaa

SEQ ID NO: 386402 - DNA, 19 bp, Homo sapiens
  siRNA target sequence for BITE (NM_024491.1,1270-1288).
gggagtccaaaattttaat

SEQ ID NO: 386403 - DNA, 19 bp, Homo sapiens
  siRNA target sequence for BITE (NM_024491.1,1322-1340).
cttgttcctgtaatagaaa

SEQ ID NO: 386404 - DNA, 19 bp, Homo sapiens
  siRNA target sequence for BITE (NM_024491.1,1359-1377).
catccttaaaggatttgta

SEQ ID NO: 386405 - DNA, 19 bp, Homo sapiens
  siRNA target sequence for BITE (NM_024491.1,1468-1486).
gttgtttatagtagatact

SEQ ID NO: 386406 - DNA, 19 bp, Homo sapiens
  siRNA target sequence for BITE (NM_024491.1,1521-1539).
gcaatatgccacactttca

SEQ ID NO: 386407 - DNA, 19 bp, Homo sapiens
  siRNA target sequence for BITE (NM_024491.1,1599-1617).
gagtctatccccgaatgaa

SEQ ID NO: 386408 - DNA, 19 bp, Homo sapiens
  siRNA target sequence for BITE (NM_024491.1,1607-1625).
ccccgaatgaatgaagttt

SEQ ID NO: 386409 - DNA, 19 bp, Homo sapiens
  siRNA target sequence for BITE (NM_024491.1,1608-1626).
cccgaatgaatgaagttta

SEQ ID NO: 386410 - DNA, 19 bp, Homo sapiens
  siRNA target sequence for BITE (NM_024491.1,1673-1691).
ctcttagaattagatagtt

SEQ ID NO: 386411 - DNA, 19 bp, Homo sapiens
  siRNA target sequence for BITE (NM_024491.1,1685-1703).
gatagttcatcctcattgt

SEQ ID NO: 386412 - DNA, 19 bp, Homo sapiens
  siRNA target sequence for BITE (NM_024491.1,1765-1783).
ggttatgcaggtattagga

SEQ ID NO: 386413 - DNA, 19 bp, Homo sapiens
  siRNA target sequence for BITE (NM_024491.1,1790-1808).
gacctccagagcattatct

SEQ ID NO: 386414 - DNA, 19 bp, Homo sapiens
  siRNA target sequence for BITE (NM_024491.1,1801-1819).
cattatctacaaattggaa

SEQ ID NO: 386415 - DNA, 19 bp, Homo sapiens
  siRNA target sequence for BITE (NM_024491.1,1841-1859).
gcatttcaggcatttacta

SEQ ID NO: 386416 - DNA, 19 bp, Homo sapiens
  siRNA target sequence for BITE (NM_024491.1,1857-1875).
ctaatgatctacttgaaat

SEQ ID NO: 386417 - DNA, 19 bp, Homo sapiens
  siRNA target sequence for BITE (NM_024491.1,1899-1917).
ccattgtacctgcagtaaa

SEQ ID NO: 386418 - DNA, 19 bp, Homo sapiens
  siRNA target sequence for BITE (NM_024491.1,1904-1922).
gtacctgcagtaaagaaat

SEQ ID NO: 386419 - DNA, 19 bp, Homo sapiens
  siRNA target sequence for MGC10771 (NM_024506.3,427-445).
gggccgaccggcttttgaa

SEQ ID NO: 386420 - DNA, 19 bp, Homo sapiens
  siRNA target sequence for MGC10771 (NM_024506.3,429-447).
gccgaccggcttttgaaga

SEQ ID NO: 386421 - DNA, 19 bp, Homo sapiens
  siRNA target sequence for MGC10771 (NM_024506.3,430-448).
ccgaccggcttttgaagat

SEQ ID NO: 386422 - DNA, 19 bp, Homo sapiens
  siRNA target sequence for MGC10771 (NM_024506.3,459-477).
ggcctcaacgccatacagt

SEQ ID NO: 386423 - DNA, 19 bp, Homo sapiens
  siRNA target sequence for MGC10771 (NM_024506.3,464-482).
caacgccatacagttttat

SEQ ID NO: 386424 - DNA, 19 bp, Homo sapiens
  siRNA target sequence for MGC10771 (NM_024506.3,505-523).
cacagcctggggtctataa

SEQ ID NO: 386425 - DNA, 19 bp, Homo sapiens
  siRNA target sequence for MGC10771 (NM_024506.3,509-527).
gcctggggtctataacttt

SEQ ID NO: 386426 - DNA, 19 bp, Homo sapiens
  siRNA target sequence for MGC10771 (NM_024506.3,510-528).
cctggggtctataacttta

SEQ ID NO: 386427 - DNA, 19 bp, Homo sapiens
  siRNA target sequence for MGC10771 (NM_024506.3,511-529).
ctggggtctataactttaa

SEQ ID NO: 386428 - DNA, 19 bp, Homo sapiens
  siRNA target sequence for MGC10771 (NM_024506.3,574-592).
cgaacctgttggtcatact

SEQ ID NO: 386429 - DNA, 19 bp, Homo sapiens
  siRNA target sequence for MGC10771 (NM_024506.3,640-658).
catcctggttgcttcgaaa

SEQ ID NO: 386430 - DNA, 19 bp, Homo sapiens
  siRNA target sequence for MGC10771 (NM_024506.3,644-662).
ctggttgcttcgaaaacct

SEQ ID NO: 386431 - DNA, 19 bp, Homo sapiens
  siRNA target sequence for MGC10771 (NM_024506.3,650-668).
gcttcgaaaacctgaaatt

SEQ ID NO: 386432 - DNA, 19 bp, Homo sapiens
  siRNA target sequence for MGC10771 (NM_024506.3,763-781).
ggggcaacatcattagcat

SEQ ID NO: 386433 - DNA, 19 bp, Homo sapiens
  siRNA target sequence for MGC10771 (NM_024506.3,924-942).
ctccggggactctatacca

SEQ ID NO: 386434 - DNA, 19 bp, Homo sapiens
  siRNA target sequence for MGC10771 (NM_024506.3,985-1003).
ccctgcttcggaagtatga

SEQ ID NO: 386435 - DNA, 19 bp, Homo sapiens
  siRNA target sequence for MGC10771 (NM_024506.3,1006-1024).
cccatgggccattggtaaa

SEQ ID NO: 386436 - DNA, 19 bp, Homo sapiens
  siRNA target sequence for MGC10771 (NM_024506.3,1008-1026).
catgggccattggtaaact

SEQ ID NO: 386437 - DNA, 19 bp, Homo sapiens
  siRNA target sequence for MGC10771 (NM_024506.3,1081-1099).
ctgtgtcagctgtaaccaa

SEQ ID NO: 386438 - DNA, 19 bp, Homo sapiens
  siRNA target sequence for MGC10771 (NM_024506.3,1096-1114).
ccaaaggactagagaacat

SEQ ID NO: 386439 - DNA, 19 bp, Homo sapiens
  siRNA target sequence for MGC10771 (NM_024506.3,1126-1144).
gagccagtgtgaacatgta

SEQ ID NO: 386440 - DNA, 19 bp, Homo sapiens
  siRNA target sequence for MGC10771 (NM_024506.3,1158-1176).
ggtaccaactttggatatt

SEQ ID NO: 386441 - DNA, 19 bp, Homo sapiens
  siRNA target sequence for MGC10771 (NM_024506.3,1162-1180).
ccaactttggatattggaa

SEQ ID NO: 386442 - DNA, 19 bp, Homo sapiens
  siRNA target sequence for MGC10771 (NM_024506.3,1163-1181).
caactttggatattggaat

SEQ ID NO: 386443 - DNA, 19 bp, Homo sapiens
  siRNA target sequence for MGC10771 (NM_024506.3,1177-1195).
ggaatggtgccgataagaa

SEQ ID NO: 386444 - DNA, 19 bp, Homo sapiens
  siRNA target sequence for MGC10771 (NM_024506.3,1227-1245).
gactatgatgcacctatat

SEQ ID NO: 386445 - DNA, 19 bp, Homo sapiens
  siRNA target sequence for MGC10771 (NM_024506.3,1370-1388).
gcacctggttgggcattta

SEQ ID NO: 386446 - DNA, 19 bp, Homo sapiens
  siRNA target sequence for MGC10771 (NM_024506.3,1415-1433).
ccgtgggcccattcattca

SEQ ID NO: 386447 - DNA, 19 bp, Homo sapiens
  siRNA target sequence for MGC10771 (NM_024506.3,1416-1434).
cgtgggcccattcattcaa

SEQ ID NO: 386448 - DNA, 19 bp, Homo sapiens
  siRNA target sequence for MGC10771 (NM_024506.3,1417-1435).
gtgggcccattcattcaat

SEQ ID NO: 386449 - DNA, 19 bp, Homo sapiens
  siRNA target sequence for MGC10771 (NM_024506.3,1419-1437).
gggcccattcattcaatct

SEQ ID NO: 386450 - DNA, 19 bp, Homo sapiens
  siRNA target sequence for MGC10771 (NM_024506.3,1420-1438).
ggcccattcattcaatctt

SEQ ID NO: 386451 - DNA, 19 bp, Homo sapiens
  siRNA target sequence for MGC10771 (NM_024506.3,1478-1496).
catgttgtaccgaacctat

SEQ ID NO: 386452 - DNA, 19 bp, Homo sapiens
  siRNA target sequence for MGC10771 (NM_024506.3,1492-1510).
cctatatgacccataccat

SEQ ID NO: 386453 - DNA, 19 bp, Homo sapiens
  siRNA target sequence for MGC10771 (NM_024506.3,1493-1511).
ctatatgacccataccatt

SEQ ID NO: 386454 - DNA, 19 bp, Homo sapiens
  siRNA target sequence for MGC10771 (NM_024506.3,1590-1608).
ggtgttgtggagcgaaata

SEQ ID NO: 386455 - DNA, 19 bp, Homo sapiens
  siRNA target sequence for MGC10771 (NM_024506.3,1591-1609).
gtgttgtggagcgaaatat

SEQ ID NO: 386456 - DNA, 19 bp, Homo sapiens
  siRNA target sequence for MGC10771 (NM_024506.3,1593-1611).
gttgtggagcgaaatatga

SEQ ID NO: 386457 - DNA, 19 bp, Homo sapiens
  siRNA target sequence for MGC10771 (NM_024506.3,1641-1659).
gggtccaaactggatatct

SEQ ID NO: 386458 - DNA, 19 bp, Homo sapiens
  siRNA target sequence for MGC10771 (NM_024506.3,1642-1660).
ggtccaaactggatatctt

SEQ ID NO: 386459 - DNA, 19 bp, Homo sapiens
  siRNA target sequence for MGC10771 (NM_024506.3,1680-1698).
ctcagctttgggtctaaca

SEQ ID NO: 386460 - DNA, 19 bp, Homo sapiens
  siRNA target sequence for MGC10771 (NM_024506.3,1715-1733).
cctgttgaagccaccaatt

SEQ ID NO: 386461 - DNA, 19 bp, Homo sapiens
  siRNA target sequence for MGC10771 (NM_024506.3,1728-1746).
ccaattctggggcaaacaa

SEQ ID NO: 386462 - DNA, 19 bp, Homo sapiens
  siRNA target sequence for MGC10771 (NM_024506.3,1763-1781).
gatgttccctctgaaaatt

SEQ ID NO: 386463 - DNA, 19 bp, Homo sapiens
  siRNA target sequence for MGC10771 (NM_024506.3,1843-1861).
cttctggccccacattcta

SEQ ID NO: 386464 - DNA, 19 bp, Homo sapiens
  siRNA target sequence for MGC10771 (NM_024506.3,1859-1877).
ctactccaaaacatttcca

SEQ ID NO: 386465 - DNA, 19 bp, Homo sapiens
  siRNA target sequence for MGC10771 (NM_024506.3,1885-1903).
gctcagttggggacacatt

SEQ ID NO: 386466 - DNA, 19 bp, Homo sapiens
  siRNA target sequence for MGC10771 (NM_024506.3,1886-1904).
ctcagttggggacacattt

SEQ ID NO: 386467 - DNA, 19 bp, Homo sapiens
  siRNA target sequence for MGC10771 (NM_024506.3,1890-1908).
gttggggacacatttctat

SEQ ID NO: 386468 - DNA, 19 bp, Homo sapiens
  siRNA target sequence for MGC10771 (NM_024506.3,2023-2041).
ctaggggagccctcaacaa

SEQ ID NO: 386469 - DNA, 19 bp, Homo sapiens
  siRNA target sequence for MGC10771 (NM_024506.3,2027-2045).
gggagccctcaacaaaatt

SEQ ID NO: 386470 - DNA, 19 bp, Homo sapiens
  siRNA target sequence for MGC10771 (NM_024506.3,2075-2093).
ccagccccaagtccaattt

SEQ ID NO: 386471 - DNA, 19 bp, Homo sapiens
  siRNA target sequence for MGC10771 (NM_024506.3,2081-2099).
ccaagtccaatttttggat

SEQ ID NO: 386472 - DNA, 19 bp, Homo sapiens
  siRNA target sequence for MGC10771 (NM_024506.3,2109-2127).
ctcaatagcactagtactt

SEQ ID NO: 386473 - DNA, 19 bp, Homo sapiens
  siRNA target sequence for MGC10771 (NM_024506.3,2125-2143).
ctttgcacaggacacatat

SEQ ID NO: 386474 - DNA, 19 bp, Homo sapiens
  siRNA target sequence for MGC2656 (NM_024509.1,1455-1473).
cggctgctaggcaactcaa

SEQ ID NO: 386475 - DNA, 19 bp, Homo sapiens
  siRNA target sequence for MGC2656 (NM_024509.1,1936-1954).
gcgtgctcgccgtgtatga

SEQ ID NO: 386476 - DNA, 19 bp, Homo sapiens
  siRNA target sequence for MGC2656 (NM_024509.1,2101-2119).
cggtactggtcttcatctt

SEQ ID NO: 386477 - DNA, 19 bp, Homo sapiens
  siRNA target sequence for MGC4701 (NM_024511.3,987-1005).
caaggaattctaaatgcaa

SEQ ID NO: 386478 - DNA, 19 bp, Homo sapiens
  siRNA target sequence for MGC4701 (NM_024511.3,991-1009).
gaattctaaatgcaatgat

SEQ ID NO: 386479 - DNA, 19 bp, Homo sapiens
  siRNA target sequence for MGC4701 (NM_024511.3,1007-1025).
gatcactaagatcagtaat

SEQ ID NO: 386480 - DNA, 19 bp, Homo sapiens
  siRNA target sequence for MGC4701 (NM_024511.3,1012-1030).
ctaagatcagtaatgaact

SEQ ID NO: 386481 - DNA, 19 bp, Homo sapiens
  siRNA target sequence for MGC4701 (NM_024511.3,1035-1053).
gctcttactgatgaagtta

SEQ ID NO: 386482 - DNA, 19 bp, Homo sapiens
  siRNA target sequence for MGC4701 (NM_024511.3,1047-1065).
gaagttacacaattgatga

SEQ ID NO: 386483 - DNA, 19 bp, Homo sapiens
  siRNA target sequence for MGC4701 (NM_024511.3,1096-1114).
ggacaaatccactggtatt

SEQ ID NO: 386484 - DNA, 19 bp, Homo sapiens
  siRNA target sequence for MGC4701 (NM_024511.3,1109-1127).
ggtatttttatcgcaattt

SEQ ID NO: 386485 - DNA, 19 bp, Homo sapiens
  siRNA target sequence for MGC4701 (NM_024511.3,1158-1176).
caaagcacagcagcattaa

SEQ ID NO: 386486 - DNA, 19 bp, Homo sapiens
  siRNA target sequence for MGC4701 (NM_024511.3,1165-1183).
cagcagcattaactttgta

SEQ ID NO: 386487 - DNA, 19 bp, Homo sapiens
  siRNA target sequence for MGC4701 (NM_024511.3,1186-1204).
ccaaaaaacagttctttca

SEQ ID NO: 386488 - DNA, 19 bp, Homo sapiens
  siRNA target sequence for MGC4701 (NM_024511.3,1196-1214).
gttctttcagggtatacat

SEQ ID NO: 386489 - DNA, 19 bp, Homo sapiens
  siRNA target sequence for MGC4701 (NM_024511.3,1199-1217).
ctttcagggtatacatgaa

SEQ ID NO: 386490 - DNA, 19 bp, Homo sapiens
  siRNA target sequence for MGC4701 (NM_024511.3,1205-1223).
gggtatacatgaagtagtt

SEQ ID NO: 386491 - DNA, 19 bp, Homo sapiens
  siRNA target sequence for MGC4701 (NM_024511.3,1207-1225).
gtatacatgaagtagttga

SEQ ID NO: 386492 - DNA, 19 bp, Homo sapiens
  siRNA target sequence for MGC4701 (NM_024511.3,1215-1233).
gaagtagttgaaagttcaa

SEQ ID NO: 386493 - DNA, 19 bp, Homo sapiens
  siRNA target sequence for MGC4701 (NM_024511.3,1267-1285).
caccatctatttgtgataa

SEQ ID NO: 386494 - DNA, 19 bp, Homo sapiens
  siRNA target sequence for MGC4701 (NM_024511.3,1273-1291).
ctatttgtgataatcaaga

SEQ ID NO: 386495 - DNA, 19 bp, Homo sapiens
  siRNA target sequence for MGC4701 (NM_024511.3,1326-1344).
ctgcagctcgcatacattt

SEQ ID NO: 386496 - DNA, 19 bp, Homo sapiens
  siRNA target sequence for MGC4701 (NM_024511.3,1328-1346).
gcagctcgcatacatttgt

SEQ ID NO: 386497 - DNA, 19 bp, Homo sapiens
  siRNA target sequence for MGC4701 (NM_024511.3,1384-1402).
cgagcatgaagtcaagtat

SEQ ID NO: 386498 - DNA, 19 bp, Homo sapiens
  siRNA target sequence for MGC4701 (NM_024511.3,1480-1498).
gcttgaccagtgagattat

SEQ ID NO: 386499 - DNA, 19 bp, Homo sapiens
  siRNA target sequence for MGC4701 (NM_024511.3,1489-1507).
gtgagattatgaaacttga

SEQ ID NO: 386500 - DNA, 19 bp, Homo sapiens
  siRNA target sequence for MGC4701 (NM_024511.3,1491-1509).
gagattatgaaacttgaaa

SEQ ID NO: 386501 - DNA, 19 bp, Homo sapiens
  siRNA target sequence for MGC4701 (NM_024511.3,1633-1651).
cagcaagacaagagttagt

SEQ ID NO: 386502 - DNA, 19 bp, Homo sapiens
  siRNA target sequence for MGC4701 (NM_024511.3,1635-1653).
gcaagacaagagttagttt

SEQ ID NO: 386503 - DNA, 19 bp, Homo sapiens
  siRNA target sequence for MGC4701 (NM_024511.3,1676-1694).
ggcatcatttgaacttcta

SEQ ID NO: 386504 - DNA, 19 bp, Homo sapiens
  siRNA target sequence for MGC4701 (NM_024511.3,1697-1715).
gttatcatatgaaattgaa

SEQ ID NO: 386505 - DNA, 19 bp, Homo sapiens
  siRNA target sequence for MGC4701 (NM_024511.3,1724-1742).
gcatcgggacatatatcgt

SEQ ID NO: 386506 - DNA, 19 bp, Homo sapiens
  siRNA target sequence for MGC4701 (NM_024511.3,1730-1748).
ggacatatatcgtcaactt

SEQ ID NO: 386507 - DNA, 19 bp, Homo sapiens
  siRNA target sequence for MGC4701 (NM_024511.3,1767-1785).
cttagtcaaagtaacatga

SEQ ID NO: 386508 - DNA, 19 bp, Homo sapiens
  siRNA target sequence for MGC4701 (NM_024511.3,1777-1795).
gtaacatgatgctctacaa

SEQ ID NO: 386509 - DNA, 19 bp, Homo sapiens
  siRNA target sequence for MGC4701 (NM_024511.3,1808-1826).
gttaacagatccatcagtt

SEQ ID NO: 386510 - DNA, 19 bp, Homo sapiens
  siRNA target sequence for MGC4701 (NM_024511.3,1842-1860).
ccaaggaataccattgata

SEQ ID NO: 386511 - DNA, 19 bp, Homo sapiens
  siRNA target sequence for MGC4701 (NM_024511.3,1852-1870).
ccattgatactaaggatta

SEQ ID NO: 386512 - DNA, 19 bp, Homo sapiens
  siRNA target sequence for MGC4701 (NM_024511.3,1878-1896).
cataggctttaccaagttt

SEQ ID NO: 386513 - DNA, 19 bp, Homo sapiens
  siRNA target sequence for MGC4701 (NM_024511.3,1882-1900).
ggctttaccaagttttgga

SEQ ID NO: 386514 - DNA, 19 bp, Homo sapiens
  siRNA target sequence for MGC4701 (NM_024511.3,1973-1991).
gaatatttctttagtacaa

SEQ ID NO: 386515 - DNA, 19 bp, Homo sapiens
  siRNA target sequence for MGC4701 (NM_024511.3,1981-1999).
ctttagtacaagatcagtt

SEQ ID NO: 386516 - DNA, 19 bp, Homo sapiens
  siRNA target sequence for MGC4701 (NM_024511.3,2002-2020).
cagtatctgctcaagaaca

SEQ ID NO: 386517 - DNA, 19 bp, Homo sapiens
  siRNA target sequence for MGC4701 (NM_024511.3,2004-2022).
gtatctgctcaagaacatt

SEQ ID NO: 386518 - DNA, 19 bp, Homo sapiens
  siRNA target sequence for MGC4701 (NM_024511.3,2052-2070).
gtggacatgctttgtgata

SEQ ID NO: 386519 - DNA, 19 bp, Homo sapiens
  siRNA target sequence for MGC4701 (NM_024511.3,2054-2072).
ggacatgctttgtgatact

SEQ ID NO: 386520 - DNA, 19 bp, Homo sapiens
  siRNA target sequence for MGC4701 (NM_024511.3,2055-2073).
gacatgctttgtgatactt

SEQ ID NO: 386521 - DNA, 19 bp, Homo sapiens
  siRNA target sequence for MGC4701 (NM_024511.3,2060-2078).
gctttgtgatactttgtat

SEQ ID NO: 386522 - DNA, 19 bp, Homo sapiens
  siRNA target sequence for MGC4701 (NM_024511.3,2100-2118).
cttagtgatcaggagttaa

SEQ ID NO: 386523 - DNA, 19 bp, Homo sapiens
  siRNA target sequence for MGC4701 (NM_024511.3,2114-2132).
gttaacagagcagtttcat

SEQ ID NO: 386524 - DNA, 19 bp, Homo sapiens
  siRNA target sequence for MGC4701 (NM_024511.3,2119-2137).
cagagcagtttcataaagt

SEQ ID NO: 386525 - DNA, 19 bp, Homo sapiens
  siRNA target sequence for MGC4701 (NM_024511.3,2124-2142).
cagtttcataaagttgaat

SEQ ID NO: 386526 - DNA, 19 bp, Homo sapiens
  siRNA target sequence for LRRC2 (NM_024512.2,182-200).
ggttgtcttcgacatttct

SEQ ID NO: 386527 - DNA, 19 bp, Homo sapiens
  siRNA target sequence for LRRC2 (NM_024512.2,217-235).
gggaaactcgtgtcaagaa

SEQ ID NO: 386528 - DNA, 19 bp, Homo sapiens
  siRNA target sequence for LRRC2 (NM_024512.2,278-296).
gagcgccttggagaagata

SEQ ID NO: 386529 - DNA, 19 bp, Homo sapiens
  siRNA target sequence for LRRC2 (NM_024512.2,280-298).
gcgccttggagaagataaa

SEQ ID NO: 386530 - DNA, 19 bp, Homo sapiens
  siRNA target sequence for LRRC2 (NM_024512.2,358-376).
gcaagaatggcttcataga

SEQ ID NO: 386531 - DNA, 19 bp, Homo sapiens
  siRNA target sequence for LRRC2 (NM_024512.2,386-404).
gcggcttctggacaagatt

SEQ ID NO: 386532 - DNA, 19 bp, Homo sapiens
  siRNA target sequence for LRRC2 (NM_024512.2,456-474).
cggagcagtgcgtttgtgt

SEQ ID NO: 386533 - DNA, 19 bp, Homo sapiens
  siRNA target sequence for LRRC2 (NM_024512.2,461-479).
cagtgcgtttgtgtttgaa

SEQ ID NO: 386534 - DNA, 19 bp, Homo sapiens
  siRNA target sequence for LRRC2 (NM_024512.2,463-481).
gtgcgtttgtgtttgaact

SEQ ID NO: 386535 - DNA, 19 bp, Homo sapiens
  siRNA target sequence for LRRC2 (NM_024512.2,465-483).
gcgtttgtgtttgaacttt

SEQ ID NO: 386536 - DNA, 19 bp, Homo sapiens
  siRNA target sequence for LRRC2 (NM_024512.2,501-519).
gagctcccagattcattga

SEQ ID NO: 386537 - DNA, 19 bp, Homo sapiens
  siRNA target sequence for LRRC2 (NM_024512.2,529-547).
cacacctgagagaatggta

SEQ ID NO: 386538 - DNA, 19 bp, Homo sapiens
  siRNA target sequence for LRRC2 (NM_024512.2,553-571).
gcaataccttgattcaaat

SEQ ID NO: 386539 - DNA, 19 bp, Homo sapiens
  siRNA target sequence for LRRC2 (NM_024512.2,567-585).
caaatcattcctacatata

SEQ ID NO: 386540 - DNA, 19 bp, Homo sapiens
  siRNA target sequence for LRRC2 (NM_024512.2,646-664).
cagcagaaatcggttgttt

SEQ ID NO: 386541 - DNA, 19 bp, Homo sapiens
  siRNA target sequence for LRRC2 (NM_024512.2,668-686).
gaacctgaaagaactcaat

SEQ ID NO: 386542 - DNA, 19 bp, Homo sapiens
  siRNA target sequence for LRRC2 (NM_024512.2,683-701).
caatgtgggtttcaactat

SEQ ID NO: 386543 - DNA, 19 bp, Homo sapiens
  siRNA target sequence for LRRC2 (NM_024512.2,687-705).
gtgggtttcaactatctga

SEQ ID NO: 386544 - DNA, 19 bp, Homo sapiens
  siRNA target sequence for LRRC2 (NM_024512.2,727-745).
gagattgtgaaaatctaga

SEQ ID NO: 386545 - DNA, 19 bp, Homo sapiens
  siRNA target sequence for LRRC2 (NM_024512.2,780-798).
gagctgccctttgaattaa

SEQ ID NO: 386546 - DNA, 19 bp, Homo sapiens
  siRNA target sequence for LRRC2 (NM_024512.2,785-803).
gccctttgaattaagtaat

SEQ ID NO: 386547 - DNA, 19 bp, Homo sapiens
  siRNA target sequence for LRRC2 (NM_024512.2,806-824).
gaagcaagttacatttgta

SEQ ID NO: 386548 - DNA, 19 bp, Homo sapiens
  siRNA target sequence for LRRC2 (NM_024512.2,864-882).
gtcctgcggatgtcgaatt

SEQ ID NO: 386549 - DNA, 19 bp, Homo sapiens
  siRNA target sequence for LRRC2 (NM_024512.2,916-934).
ccgacctgccgcaagatat

SEQ ID NO: 386550 - DNA, 19 bp, Homo sapiens
  siRNA target sequence for LRRC2 (NM_024512.2,917-935).
cgacctgccgcaagatata

SEQ ID NO: 386551 - DNA, 19 bp, Homo sapiens
  siRNA target sequence for LRRC2 (NM_024512.2,921-939).
ctgccgcaagatatagaca

SEQ ID NO: 386552 - DNA, 19 bp, Homo sapiens
  siRNA target sequence for LRRC2 (NM_024512.2,1077-1095).
gactcatccacacctttaa

SEQ ID NO: 386553 - DNA, 19 bp, Homo sapiens
  siRNA target sequence for LRRC2 (NM_024512.2,1079-1097).
ctcatccacacctttaaaa

SEQ ID NO: 386554 - DNA, 19 bp, Homo sapiens
  siRNA target sequence for LRRC2 (NM_024512.2,1081-1099).
catccacacctttaaaatt

SEQ ID NO: 386555 - DNA, 19 bp, Homo sapiens
  siRNA target sequence for LRRC2 (NM_024512.2,1084-1102).
ccacacctttaaaatttgt

SEQ ID NO: 386556 - DNA, 19 bp, Homo sapiens
  siRNA target sequence for LRRC2 (NM_024512.2,1112-1130).
ggacaatcctattgataat

SEQ ID NO: 386557 - DNA, 19 bp, Homo sapiens
  siRNA target sequence for LRRC2 (NM_024512.2,1167-1185).
gaacgggatcgccaacatt

SEQ ID NO: 386558 - DNA, 19 bp, Homo sapiens
  siRNA target sequence for LRRC2 (NM_024512.2,1171-1189).
gggatcgccaacattttga

SEQ ID NO: 386559 - DNA, 19 bp, Homo sapiens
  siRNA target sequence for LRRC2 (NM_024512.2,1172-1190).
ggatcgccaacattttgat

SEQ ID NO: 386560 - DNA, 19 bp, Homo sapiens
  siRNA target sequence for LRRC2 (NM_024512.2,1207-1225).
cctatattgaagaccttaa

SEQ ID NO: 386561 - DNA, 19 bp, Homo sapiens
  siRNA target sequence for MGC4645 (NM_024515.2,252-270).
ctcagtggtggctttgact

SEQ ID NO: 386562 - DNA, 19 bp, Homo sapiens
  siRNA target sequence for MGC4645 (NM_024515.2,318-336).
ggtcgaagtgactttagaa

SEQ ID NO: 386563 - DNA, 19 bp, Homo sapiens
  siRNA target sequence for MGC4645 (NM_024515.2,319-337).
gtcgaagtgactttagaat

SEQ ID NO: 386564 - DNA, 19 bp, Homo sapiens
  siRNA target sequence for MGC4645 (NM_024515.2,321-339).
cgaagtgactttagaatca

SEQ ID NO: 386565 - DNA, 19 bp, Homo sapiens
  siRNA target sequence for MGC4645 (NM_024515.2,334-352).
gaatcactaccttgaaatt

SEQ ID NO: 386566 - DNA, 19 bp, Homo sapiens
  siRNA target sequence for MGC4645 (NM_024515.2,363-381).
gaccacaacatctttttat

SEQ ID NO: 386567 - DNA, 19 bp, Homo sapiens
  siRNA target sequence for MGC4645 (NM_024515.2,535-553).
cagctgaccgcaccattat

SEQ ID NO: 386568 - DNA, 19 bp, Homo sapiens
  siRNA target sequence for MGC4645 (NM_024515.2,567-585).
cggacctctgccaaaatct

SEQ ID NO: 386569 - DNA, 19 bp, Homo sapiens
  siRNA target sequence for MGC4645 (NM_024515.2,934-952).
cctggggaggggacatgaa

SEQ ID NO: 386570 - DNA, 19 bp, Homo sapiens
  siRNA target sequence for MGC4606 (NM_024516.2,504-522).
catgcccacggaatttgat

SEQ ID NO: 386571 - DNA, 19 bp, Homo sapiens
  siRNA target sequence for MGC4606 (NM_024516.2,512-530).
cggaatttgattttgatga

SEQ ID NO: 386572 - DNA, 19 bp, Homo sapiens
  siRNA target sequence for MGC4606 (NM_024516.2,760-778).
cctcggcagcggaaatact

SEQ ID NO: 386573 - DNA, 19 bp, Homo sapiens
  siRNA target sequence for FLJ13725 (NM_024519.2,246-264).
ccgagtgtccaggatgttt

SEQ ID NO: 386574 - DNA, 19 bp, Homo sapiens
  siRNA target sequence for FLJ13725 (NM_024519.2,247-265).
cgagtgtccaggatgtttt

SEQ ID NO: 386575 - DNA, 19 bp, Homo sapiens
  siRNA target sequence for FLJ13725 (NM_024519.2,510-528).
gctgtatgaggcatactgt

SEQ ID NO: 386576 - DNA, 19 bp, Homo sapiens
  siRNA target sequence for FLJ13725 (NM_024519.2,544-562).
cgggatggtgcctacaaca

SEQ ID NO: 386577 - DNA, 19 bp, Homo sapiens
  siRNA target sequence for FLJ13725 (NM_024519.2,545-563).
gggatggtgcctacaacat

SEQ ID NO: 386578 - DNA, 19 bp, Homo sapiens
  siRNA target sequence for FLJ13725 (NM_024519.2,741-759).
gtgtgtaggcgatcagtat

SEQ ID NO: 386579 - DNA, 19 bp, Homo sapiens
  siRNA target sequence for FLJ13725 (NM_024519.2,743-761).
gtgtaggcgatcagtatga

SEQ ID NO: 386580 - DNA, 19 bp, Homo sapiens
  siRNA target sequence for FLJ13725 (NM_024519.2,745-763).
gtaggcgatcagtatgaga

SEQ ID NO: 386581 - DNA, 19 bp, Homo sapiens
  siRNA target sequence for FLJ13725 (NM_024519.2,780-798).
gcgtcagcgctggaaacta

SEQ ID NO: 386582 - DNA, 19 bp, Homo sapiens
  siRNA target sequence for FLJ13725 (NM_024519.2,839-857).
gtgaagaaaccatctttct

SEQ ID NO: 386583 - DNA, 19 bp, Homo sapiens
  siRNA target sequence for FLJ13725 (NM_024519.2,858-876).
ccctctactcacggaattt

SEQ ID NO: 386584 - DNA, 19 bp, Homo sapiens
  siRNA target sequence for FLJ13725 (NM_024519.2,860-878).
ctctactcacggaatttct

SEQ ID NO: 386585 - DNA, 19 bp, Homo sapiens
  siRNA target sequence for FLJ13725 (NM_024519.2,862-880).
ctactcacggaatttctgt

SEQ ID NO: 386586 - DNA, 19 bp, Homo sapiens
  siRNA target sequence for FLJ13725 (NM_024519.2,869-887).
cggaatttctgtctattaa

SEQ ID NO: 386587 - DNA, 19 bp, Homo sapiens
  siRNA target sequence for FLJ13725 (NM_024519.2,1150-1168).
cgggaacaggctttctata

SEQ ID NO: 386588 - DNA, 19 bp, Homo sapiens
  siRNA target sequence for FLJ13725 (NM_024519.2,1151-1169).
gggaacaggctttctataa

SEQ ID NO: 386589 - DNA, 19 bp, Homo sapiens
  siRNA target sequence for FLJ13725 (NM_024519.2,1153-1171).
gaacaggctttctataaca

SEQ ID NO: 386590 - DNA, 19 bp, Homo sapiens
  siRNA target sequence for FLJ13725 (NM_024519.2,1440-1458).
cagtgaggctagtgtagat

SEQ ID NO: 386591 - DNA, 19 bp, Homo sapiens
  siRNA target sequence for FLJ13725 (NM_024519.2,1780-1798).
cccctcactcacactacta

SEQ ID NO: 386592 - DNA, 19 bp, Homo sapiens
  siRNA target sequence for FLJ13725 (NM_024519.2,1809-1827).
ccacaagcccataatctct

SEQ ID NO: 386593 - DNA, 19 bp, Homo sapiens
  siRNA target sequence for FLJ13725 (NM_024519.2,1824-1842).
ctctacccttactactaca

SEQ ID NO: 386594 - DNA, 19 bp, Homo sapiens
  siRNA target sequence for FLJ13725 (NM_024519.2,1841-1859).
caggccctaccctcaatat

SEQ ID NO: 386595 - DNA, 19 bp, Homo sapiens
  siRNA target sequence for FLJ13725 (NM_024519.2,1844-1862).
gccctaccctcaatatcat

SEQ ID NO: 386596 - DNA, 19 bp, Homo sapiens
  siRNA target sequence for FLJ13725 (NM_024519.2,1845-1863).
ccctaccctcaatatcata

SEQ ID NO: 386597 - DNA, 19 bp, Homo sapiens
  siRNA target sequence for FLJ13725 (NM_024519.2,1924-1942).
gcaagccccactcatactt

SEQ ID NO: 386598 - DNA, 19 bp, Homo sapiens
  siRNA target sequence for FLJ13725 (NM_024519.2,2090-2108).
ccacaagccccatccttat

SEQ ID NO: 386599 - DNA, 19 bp, Homo sapiens
  siRNA target sequence for FLJ13725 (NM_024519.2,2093-2111).
caagccccatccttataaa

SEQ ID NO: 386600 - DNA, 19 bp, Homo sapiens
  siRNA target sequence for FLJ13725 (NM_024519.2,2120-2138).
cttccacttctctagaact

SEQ ID NO: 386601 - DNA, 19 bp, Homo sapiens
  siRNA target sequence for FLJ13725 (NM_024519.2,2210-2228).
ccccagtctccaattccta

SEQ ID NO: 386602 - DNA, 19 bp, Homo sapiens
  siRNA target sequence for FLJ13725 (NM_024519.2,2536-2554).
gaggtgacccgcctagaaa

SEQ ID NO: 386603 - DNA, 19 bp, Homo sapiens
  siRNA target sequence for FLJ13725 (NM_024519.2,2538-2556).
ggtgacccgcctagaaagt

SEQ ID NO: 386604 - DNA, 19 bp, Homo sapiens
  siRNA target sequence for FLJ13725 (NM_024519.2,3280-3298).
ctactggtgcggaatctga

SEQ ID NO: 386605 - DNA, 19 bp, Homo sapiens
  siRNA target sequence for FLJ22555 (NM_024520.1,328-346).
gctggccgctcgtttgcta

SEQ ID NO: 386606 - DNA, 19 bp, Homo sapiens
  siRNA target sequence for FLJ22555 (NM_024520.1,422-440).
ctgccgtcggccacacttt

SEQ ID NO: 386607 - DNA, 19 bp, Homo sapiens
  siRNA target sequence for FLJ22555 (NM_024520.1,465-483).
gcttgggagcggcgttatt

SEQ ID NO: 386608 - DNA, 19 bp, Homo sapiens
  siRNA target sequence for FLJ22555 (NM_024520.1,466-484).
cttgggagcggcgttattt

SEQ ID NO: 386609 - DNA, 19 bp, Homo sapiens
  siRNA target sequence for FLJ22555 (NM_024520.1,567-585).
ccgcagccttcgcttcttt

SEQ ID NO: 386610 - DNA, 19 bp, Homo sapiens
  siRNA target sequence for FLJ22555 (NM_024520.1,682-700).
ctgggttaggactcgaatt

SEQ ID NO: 386611 - DNA, 19 bp, Homo sapiens
  siRNA target sequence for FLJ22555 (NM_024520.1,684-702).
gggttaggactcgaattaa

SEQ ID NO: 386612 - DNA, 19 bp, Homo sapiens
  siRNA target sequence for FLJ22555 (NM_024520.1,793-811).
gttgctgtcacagtgtaaa

SEQ ID NO: 386613 - DNA, 19 bp, Homo sapiens
  siRNA target sequence for FLJ22555 (NM_024520.1,844-862).
ggtgctacatgcattgaaa

SEQ ID NO: 386614 - DNA, 19 bp, Homo sapiens
  siRNA target sequence for FLJ22555 (NM_024520.1,859-877).
gaaagaaaaggttacttca

SEQ ID NO: 386615 - DNA, 19 bp, Homo sapiens
  siRNA target sequence for FLJ22555 (NM_024520.1,876-894).
cactacctgacaaccataa

SEQ ID NO: 386616 - DNA, 19 bp, Homo sapiens
  siRNA target sequence for FLJ22555 (NM_024520.1,878-896).
ctacctgacaaccataaaa

SEQ ID NO: 386617 - DNA, 19 bp, Homo sapiens
  siRNA target sequence for FLJ22555 (NM_024520.1,920-938).
gaaattgtatttacatcaa

SEQ ID NO: 386618 - DNA, 19 bp, Homo sapiens
  siRNA target sequence for FLJ22555 (NM_024520.1,994-1012).
gatgtgcttttggtatcta

SEQ ID NO: 386619 - DNA, 19 bp, Homo sapiens
  siRNA target sequence for FLJ22555 (NM_024520.1,1027-1045).
ccccagtgaaactttaaga

SEQ ID NO: 386620 - DNA, 19 bp, Homo sapiens
  siRNA target sequence for FLJ22555 (NM_024520.1,1050-1068).
ccagtgtattccaggttaa

SEQ ID NO: 386621 - DNA, 19 bp, Homo sapiens
  siRNA target sequence for FLJ22555 (NM_024520.1,1064-1082).
gttaagttggggaatcaga

SEQ ID NO: 386622 - DNA, 19 bp, Homo sapiens
  siRNA target sequence for FLJ22555 (NM_024520.1,1087-1105).
ggaaactaaacaacttctt

SEQ ID NO: 386623 - DNA, 19 bp, Homo sapiens
  siRNA target sequence for FLJ22555 (NM_024520.1,1103-1121).
cttagtgcaagctatgagt

SEQ ID NO: 386624 - DNA, 19 bp, Homo sapiens
  siRNA target sequence for FLJ22555 (NM_024520.1,1107-1125).
gtgcaagctatgagtttca

SEQ ID NO: 386625 - DNA, 19 bp, Homo sapiens
  siRNA target sequence for FLJ22555 (NM_024520.1,1109-1127).
gcaagctatgagtttcaga

SEQ ID NO: 386626 - DNA, 19 bp, Homo sapiens
  siRNA target sequence for FLJ22555 (NM_024520.1,1159-1177).
gaccattgcacggattgaa

SEQ ID NO: 386627 - DNA, 19 bp, Homo sapiens
  siRNA target sequence for FLJ22555 (NM_024520.1,1167-1185).
cacggattgaacactcaaa

SEQ ID NO: 386628 - DNA, 19 bp, Homo sapiens
  siRNA target sequence for FLJ22555 (NM_024520.1,1169-1187).
cggattgaacactcaaaat

SEQ ID NO: 386629 - DNA, 19 bp, Homo sapiens
  siRNA target sequence for FLJ22555 (NM_024520.1,1170-1188).
ggattgaacactcaaaatt

SEQ ID NO: 386630 - DNA, 19 bp, Homo sapiens
  siRNA target sequence for FLJ12650 (NM_024522.1,132-150).
ggctggaatgcatttatca

SEQ ID NO: 386631 - DNA, 19 bp, Homo sapiens
  siRNA target sequence for FLJ12650 (NM_024522.1,133-151).
gctggaatgcatttatcat

SEQ ID NO: 386632 - DNA, 19 bp, Homo sapiens
  siRNA target sequence for FLJ12650 (NM_024522.1,329-347).
gcttgactacccctacatt

SEQ ID NO: 386633 - DNA, 19 bp, Homo sapiens
  siRNA target sequence for FLJ12650 (NM_024522.1,488-506).
ccagaagacgtcgcattta

SEQ ID NO: 386634 - DNA, 19 bp, Homo sapiens
  siRNA target sequence for TTC13 (NM_024525.2,272-290).
gtgcggcgagtcatccttt

SEQ ID NO: 386635 - DNA, 19 bp, Homo sapiens
  siRNA target sequence for TTC13 (NM_024525.2,274-292).
gcggcgagtcatccttttt

SEQ ID NO: 386636 - DNA, 19 bp, Homo sapiens
  siRNA target sequence for TTC13 (NM_024525.2,276-294).
ggcgagtcatcctttttga

SEQ ID NO: 386637 - DNA, 19 bp, Homo sapiens
  siRNA target sequence for TTC13 (NM_024525.2,277-295).
gcgagtcatcctttttgaa

SEQ ID NO: 386638 - DNA, 19 bp, Homo sapiens
  siRNA target sequence for TTC13 (NM_024525.2,377-395).
ccaggccaagtctattgca

SEQ ID NO: 386639 - DNA, 19 bp, Homo sapiens
  siRNA target sequence for TTC13 (NM_024525.2,410-428).
cccgtttgccactgataat

SEQ ID NO: 386640 - DNA, 19 bp, Homo sapiens
  siRNA target sequence for TTC13 (NM_024525.2,451-469).
ctattgcttatgtcttgat

SEQ ID NO: 386641 - DNA, 19 bp, Homo sapiens
  siRNA target sequence for TTC13 (NM_024525.2,478-496).
gtctgtatgatgaagcaat

SEQ ID NO: 386642 - DNA, 19 bp, Homo sapiens
  siRNA target sequence for TTC13 (NM_024525.2,531-549).
gatctggttagtgcaattt

SEQ ID NO: 386643 - DNA, 19 bp, Homo sapiens
  siRNA target sequence for TTC13 (NM_024525.2,555-573).
cgagggatagcctatggaa

SEQ ID NO: 386644 - DNA, 19 bp, Homo sapiens
  siRNA target sequence for TTC13 (NM_024525.2,617-635).
cgaactgagccgagtaatt

SEQ ID NO: 386645 - DNA, 19 bp, Homo sapiens
  siRNA target sequence for TTC13 (NM_024525.2,621-639).
ctgagccgagtaattacct

SEQ ID NO: 386646 - DNA, 19 bp, Homo sapiens
  siRNA target sequence for TTC13 (NM_024525.2,686-704).
gtcccctctgggacgaatt

SEQ ID NO: 386647 - DNA, 19 bp, Homo sapiens
  siRNA target sequence for TTC13 (NM_024525.2,688-706).
cccctctgggacgaattaa

SEQ ID NO: 386648 - DNA, 19 bp, Homo sapiens
  siRNA target sequence for TTC13 (NM_024525.2,689-707).
ccctctgggacgaattaat

SEQ ID NO: 386649 - DNA, 19 bp, Homo sapiens
  siRNA target sequence for TTC13 (NM_024525.2,691-709).
ctctgggacgaattaatga

SEQ ID NO: 386650 - DNA, 19 bp, Homo sapiens
  siRNA target sequence for TTC13 (NM_024525.2,712-730).
cagtgaatgacctcactaa

SEQ ID NO: 386651 - DNA, 19 bp, Homo sapiens
  siRNA target sequence for TTC13 (NM_024525.2,722-740).
cctcactaaagctatccaa

SEQ ID NO: 386652 - DNA, 19 bp, Homo sapiens
  siRNA target sequence for TTC13 (NM_024525.2,773-791).
gggaaccctgtacttcata

SEQ ID NO: 386653 - DNA, 19 bp, Homo sapiens
  siRNA target sequence for TTC13 (NM_024525.2,852-870).
cagcctatagctatgctat

SEQ ID NO: 386654 - DNA, 19 bp, Homo sapiens
  siRNA target sequence for TTC13 (NM_024525.2,855-873).
cctatagctatgctataca

SEQ ID NO: 386655 - DNA, 19 bp, Homo sapiens
  siRNA target sequence for TTC13 (NM_024525.2,856-874).
ctatagctatgctatacaa

SEQ ID NO: 386656 - DNA, 19 bp, Homo sapiens
  siRNA target sequence for TTC13 (NM_024525.2,861-879).
gctatgctatacaaaggtt

SEQ ID NO: 386657 - DNA, 19 bp, Homo sapiens
  siRNA target sequence for TTC13 (NM_024525.2,862-880).
ctatgctatacaaaggttt

SEQ ID NO: 386658 - DNA, 19 bp, Homo sapiens
  siRNA target sequence for TTC13 (NM_024525.2,898-916).
gacttctgaaggaagctat

SEQ ID NO: 386659 - DNA, 19 bp, Homo sapiens
  siRNA target sequence for TTC13 (NM_024525.2,991-1009).
gagaactgggcaattttga

SEQ ID NO: 386660 - DNA, 19 bp, Homo sapiens
  siRNA target sequence for TTC13 (NM_024525.2,1014-1032).
gccactgagagctttcaaa

SEQ ID NO: 386661 - DNA, 19 bp, Homo sapiens
  siRNA target sequence for TTC13 (NM_024525.2,1015-1033).
ccactgagagctttcaaaa

SEQ ID NO: 386662 - DNA, 19 bp, Homo sapiens
  siRNA target sequence for TTC13 (NM_024525.2,1110-1128).
caggaagcccttaagaact

SEQ ID NO: 386663 - DNA, 19 bp, Homo sapiens
  siRNA target sequence for TTC13 (NM_024525.2,1145-1163).
gctagagccatataatgaa

SEQ ID NO: 386664 - DNA, 19 bp, Homo sapiens
  siRNA target sequence for TTC13 (NM_024525.2,1271-1289).
ggctagccctgagtatctt

SEQ ID NO: 386665 - DNA, 19 bp, Homo sapiens
  siRNA target sequence for TTC13 (NM_024525.2,1272-1290).
gctagccctgagtatctta

SEQ ID NO: 386666 - DNA, 19 bp, Homo sapiens
  siRNA target sequence for TTC13 (NM_024525.2,1273-1291).
ctagccctgagtatcttaa

SEQ ID NO: 386667 - DNA, 19 bp, Homo sapiens
  siRNA target sequence for TTC13 (NM_024525.2,1276-1294).
gccctgagtatcttaaagt

SEQ ID NO: 386668 - DNA, 19 bp, Homo sapiens
  siRNA target sequence for TTC13 (NM_024525.2,1278-1296).
cctgagtatcttaaagtaa

SEQ ID NO: 386669 - DNA, 19 bp, Homo sapiens
  siRNA target sequence for TTC13 (NM_024525.2,1323-1341).
cttcatgcacaccttgata

SEQ ID NO: 386670 - DNA, 19 bp, Homo sapiens
  siRNA target sequence for TTC13 (NM_024525.2,1342-1360).
ccccccttacggaatataa

SEQ ID NO: 386671 - DNA, 19 bp, Homo sapiens
  siRNA target sequence for TTC13 (NM_024525.2,1344-1362).
ccccttacggaatataaca

SEQ ID NO: 386672 - DNA, 19 bp, Homo sapiens
  siRNA target sequence for TTC13 (NM_024525.2,1345-1363).
cccttacggaatataacat

SEQ ID NO: 386673 - DNA, 19 bp, Homo sapiens
  siRNA target sequence for TTC13 (NM_024525.2,1346-1364).
ccttacggaatataacatt

SEQ ID NO: 386674 - DNA, 19 bp, Homo sapiens
  siRNA target sequence for TTC13 (NM_024525.2,1351-1369).
cggaatataacattgatgt

SEQ ID NO: 386675 - DNA, 19 bp, Homo sapiens
  siRNA target sequence for TTC13 (NM_024525.2,1446-1464).
gggttgcaaccccacataa

SEQ ID NO: 386676 - DNA, 19 bp, Homo sapiens
  siRNA target sequence for TTC13 (NM_024525.2,1447-1465).
ggttgcaaccccacataaa

SEQ ID NO: 386677 - DNA, 19 bp, Homo sapiens
  siRNA target sequence for TTC13 (NM_024525.2,1448-1466).
gttgcaaccccacataaaa

SEQ ID NO: 386678 - DNA, 19 bp, Homo sapiens
  siRNA target sequence for TTC13 (NM_024525.2,1451-1469).
gcaaccccacataaaagat

SEQ ID NO: 386679 - DNA, 19 bp, Homo sapiens
  siRNA target sequence for TTC13 (NM_024525.2,1457-1475).
ccacataaaagatgtgtta

SEQ ID NO: 386680 - DNA, 19 bp, Homo sapiens
  siRNA target sequence for TTC13 (NM_024525.2,1490-1508).
gagttataagcctgaagta

SEQ ID NO: 386681 - DNA, 19 bp, Homo sapiens
  siRNA target sequence for TTC13 (NM_024525.2,1538-1556).
gggatccctgatgcaatat

SEQ ID NO: 386682 - DNA, 19 bp, Homo sapiens
  siRNA target sequence for TTC13 (NM_024525.2,1540-1558).
gatccctgatgcaatatga

SEQ ID NO: 386683 - DNA, 19 bp, Homo sapiens
  siRNA target sequence for TTC13 (NM_024525.2,1544-1562).
cctgatgcaatatgaaaca

SEQ ID NO: 386684 - DNA, 19 bp, Homo sapiens
  siRNA target sequence for TTC13 (NM_024525.2,1566-1584).
ggtttcctgccaaacaaga

SEQ ID NO: 386685 - DNA, 19 bp, Homo sapiens
  siRNA target sequence for TTC13 (NM_024525.2,1750-1768).
ccgtgctgtggttagatca

SEQ ID NO: 386686 - DNA, 19 bp, Homo sapiens
  siRNA target sequence for TTC13 (NM_024525.2,1751-1769).
cgtgctgtggttagatcaa

SEQ ID NO: 386687 - DNA, 19 bp, Homo sapiens
  siRNA target sequence for TTC13 (NM_024525.2,1832-1850).
gatcaacatgagataccta

SEQ ID NO: 386688 - DNA, 19 bp, Homo sapiens
  siRNA target sequence for TTC13 (NM_024525.2,1886-1904).
cagaattcttgtttatcat

SEQ ID NO: 386689 - DNA, 19 bp, Homo sapiens
  siRNA target sequence for TTC13 (NM_024525.2,1902-1920).
catggagctaataatccta

SEQ ID NO: 386690 - DNA, 19 bp, Homo sapiens
  siRNA target sequence for TTC13 (NM_024525.2,1971-1989).
gaccttcttccgattatga

SEQ ID NO: 386691 - DNA, 19 bp, Homo sapiens
  siRNA target sequence for TTC13 (NM_024525.2,1992-2010).
cagtttaatactaaaacga

SEQ ID NO: 386692 - DNA, 19 bp, Homo sapiens
  siRNA target sequence for TTC13 (NM_024525.2,2021-2039).
caccgtgaacacaaaagtt

SEQ ID NO: 386693 - DNA, 19 bp, Homo sapiens
  siRNA target sequence for TTC13 (NM_024525.2,2073-2091).
ggattcacaatcacgatta

SEQ ID NO: 386694 - DNA, 19 bp, Homo sapiens
  siRNA target sequence for TTC13 (NM_024525.2,2084-2102).
cacgattacaggagacaaa

SEQ ID NO: 386695 - DNA, 19 bp, Homo sapiens
  siRNA target sequence for TTC13 (NM_024525.2,2140-2158).
cggaagaaaggacacaatt

SEQ ID NO: 386696 - DNA, 19 bp, Homo sapiens
  siRNA target sequence for TTC13 (NM_024525.2,2255-2273).
caacttaatcttatcctta

SEQ ID NO: 386697 - DNA, 19 bp, Homo sapiens
  siRNA target sequence for TTC13 (NM_024525.2,2258-2276).
cttaatcttatccttagtt

SEQ ID NO: 386698 - DNA, 19 bp, Homo sapiens
  siRNA target sequence for TTC13 (NM_024525.2,2305-2323).
ctcgaggatccagtgtaat

SEQ ID NO: 386699 - DNA, 19 bp, Homo sapiens
  siRNA target sequence for TTC13 (NM_024525.2,2392-2410).
ggaagttagtcgactttga

SEQ ID NO: 386700 - DNA, 19 bp, Homo sapiens
  siRNA target sequence for TTC13 (NM_024525.2,2402-2420).
cgactttgaagctatgaca

SEQ ID NO: 386701 - DNA, 19 bp, Homo sapiens
  siRNA target sequence for TTC13 (NM_024525.2,2427-2445).
ggttcagaggcctttagca

SEQ ID NO: 386702 - DNA, 19 bp, Homo sapiens
  siRNA target sequence for TTC13 (NM_024525.2,2527-2545).
cgttaagatcgatgattga

SEQ ID NO: 386703 - DNA, 19 bp, Homo sapiens
  siRNA target sequence for TTC13 (NM_024525.2,2536-2554).
cgatgattgaggtgctaaa

SEQ ID NO: 386704 - DNA, 19 bp, Homo sapiens
  siRNA target sequence for TTC13 (NM_024525.2,2563-2581).
cttctccacgttgtcttaa

SEQ ID NO: 386705 - DNA, 19 bp, Homo sapiens
  siRNA target sequence for TTC13 (NM_024525.2,2566-2584).
ctccacgttgtcttaagaa

SEQ ID NO: 386706 - DNA, 19 bp, Homo sapiens
  siRNA target sequence for TTC13 (NM_024525.2,2569-2587).
cacgttgtcttaagaaact

SEQ ID NO: 386707 - DNA, 19 bp, Homo sapiens
  siRNA target sequence for NKAP (NM_024528.1,719-737).
gaagtctagccgttcaaaa

SEQ ID NO: 386708 - DNA, 19 bp, Homo sapiens
  siRNA target sequence for NKAP (NM_024528.1,722-740).
gtctagccgttcaaaagaa

SEQ ID NO: 386709 - DNA, 19 bp, Homo sapiens
  siRNA target sequence for NKAP (NM_024528.1,1017-1035).
gctgaagaaccatcagatt

SEQ ID NO: 386710 - DNA, 19 bp, Homo sapiens
  siRNA target sequence for NKAP (NM_024528.1,1189-1207).
gtgaagaaattgcatcatt

SEQ ID NO: 386711 - DNA, 19 bp, Homo sapiens
  siRNA target sequence for NKAP (NM_024528.1,1258-1276).
ctgtgcgactgcgaaaaga

SEQ ID NO: 386712 - DNA, 19 bp, Homo sapiens
  siRNA target sequence for NKAP (NM_024528.1,1260-1278).
gtgcgactgcgaaaagaga

SEQ ID NO: 386713 - DNA, 19 bp, Homo sapiens
  siRNA target sequence for NKAP (NM_024528.1,1364-1382).
cagttttcgagaaatggtt

SEQ ID NO: 386714 - DNA, 19 bp, Homo sapiens
  siRNA target sequence for NKAP (NM_024528.1,1366-1384).
gttttcgagaaatggttta

SEQ ID NO: 386715 - DNA, 19 bp, Homo sapiens
  siRNA target sequence for NKAP (NM_024528.1,1371-1389).
cgagaaatggtttacagaa

SEQ ID NO: 386716 - DNA, 19 bp, Homo sapiens
  siRNA target sequence for C1orf28 (NM_024529.3,187-205).
gcgtcctgcgacagtacaa

SEQ ID NO: 386717 - DNA, 19 bp, Homo sapiens
  siRNA target sequence for C1orf28 (NM_024529.3,278-296).
gaagaccaactatgttgtt

SEQ ID NO: 386718 - DNA, 19 bp, Homo sapiens
  siRNA target sequence for C1orf28 (NM_024529.3,318-336).
caacccagagagtactaca

SEQ ID NO: 386719 - DNA, 19 bp, Homo sapiens
  siRNA target sequence for C1orf28 (NM_024529.3,327-345).
gagtactacacattggatt

SEQ ID NO: 386720 - DNA, 19 bp, Homo sapiens
  siRNA target sequence for C1orf28 (NM_024529.3,332-350).
ctacacattggattccatt

SEQ ID NO: 386721 - DNA, 19 bp, Homo sapiens
  siRNA target sequence for C1orf28 (NM_024529.3,430-448).
gaagacctgatcgaaaaga

SEQ ID NO: 386722 - DNA, 19 bp, Homo sapiens
  siRNA target sequence for C1orf28 (NM_024529.3,447-465).
gatctacttggatatctca

SEQ ID NO: 386723 - DNA, 19 bp, Homo sapiens
  siRNA target sequence for C1orf28 (NM_024529.3,475-493).
cgtcaacatcggcaagtat

SEQ ID NO: 386724 - DNA, 19 bp, Homo sapiens
  siRNA target sequence for C1orf28 (NM_024529.3,476-494).
gtcaacatcggcaagtata

SEQ ID NO: 386725 - DNA, 19 bp, Homo sapiens
  siRNA target sequence for C1orf28 (NM_024529.3,478-496).
caacatcggcaagtataga

SEQ ID NO: 386726 - DNA, 19 bp, Homo sapiens
  siRNA target sequence for C1orf28 (NM_024529.3,497-515).
cagaagcgctcccttagaa

SEQ ID NO: 386727 - DNA, 19 bp, Homo sapiens
  siRNA target sequence for C1orf28 (NM_024529.3,499-517).
gaagcgctcccttagaaat

SEQ ID NO: 386728 - DNA, 19 bp, Homo sapiens
  siRNA target sequence for C1orf28 (NM_024529.3,503-521).
cgctcccttagaaataggt

SEQ ID NO: 386729 - DNA, 19 bp, Homo sapiens
  siRNA target sequence for C1orf28 (NM_024529.3,600-618).
gagtgtgtgcgccttgata

SEQ ID NO: 386730 - DNA, 19 bp, Homo sapiens
  siRNA target sequence for C1orf28 (NM_024529.3,602-620).
gtgtgtgcgccttgataaa

SEQ ID NO: 386731 - DNA, 19 bp, Homo sapiens
  siRNA target sequence for C1orf28 (NM_024529.3,604-622).
gtgtgcgccttgataaaga

SEQ ID NO: 386732 - DNA, 19 bp, Homo sapiens
  siRNA target sequence for C1orf28 (NM_024529.3,606-624).
gtgcgccttgataaagaga

SEQ ID NO: 386733 - DNA, 19 bp, Homo sapiens
  siRNA target sequence for C1orf28 (NM_024529.3,635-653).
ccgtttggagggtcacaaa

SEQ ID NO: 386734 - DNA, 19 bp, Homo sapiens
  siRNA target sequence for C1orf28 (NM_024529.3,666-684).
cagactgaacagattaggt

SEQ ID NO: 386735 - DNA, 19 bp, Homo sapiens
  siRNA target sequence for C1orf28 (NM_024529.3,682-700).
ggtctttgtctgaagctat

SEQ ID NO: 386736 - DNA, 19 bp, Homo sapiens
  siRNA target sequence for C1orf28 (NM_024529.3,696-714).
gctatgtcagtggaaaaaa

SEQ ID NO: 386737 - DNA, 19 bp, Homo sapiens
  siRNA target sequence for C1orf28 (NM_024529.3,742-760).
ctaagaaaagatctactat

SEQ ID NO: 386738 - DNA, 19 bp, Homo sapiens
  siRNA target sequence for C1orf28 (NM_024529.3,757-775).
ctatcaagactgatctaga

SEQ ID NO: 386739 - DNA, 19 bp, Homo sapiens
  siRNA target sequence for C1orf28 (NM_024529.3,761-779).
caagactgatctagatgat

SEQ ID NO: 386740 - DNA, 19 bp, Homo sapiens
  siRNA target sequence for C1orf28 (NM_024529.3,766-784).
ctgatctagatgatgacat

SEQ ID NO: 386741 - DNA, 19 bp, Homo sapiens
  siRNA target sequence for C1orf28 (NM_024529.3,791-809).
ccttaaacagaggagtttt

SEQ ID NO: 386742 - DNA, 19 bp, Homo sapiens
  siRNA target sequence for C1orf28 (NM_024529.3,862-880).
ggaggacacgaacaactat

SEQ ID NO: 386743 - DNA, 19 bp, Homo sapiens
  siRNA target sequence for C1orf28 (NM_024529.3,865-883).
ggacacgaacaactatctt

SEQ ID NO: 386744 - DNA, 19 bp, Homo sapiens
  siRNA target sequence for C1orf28 (NM_024529.3,866-884).
gacacgaacaactatctta

SEQ ID NO: 386745 - DNA, 19 bp, Homo sapiens
  siRNA target sequence for C1orf28 (NM_024529.3,868-886).
cacgaacaactatcttaca

SEQ ID NO: 386746 - DNA, 19 bp, Homo sapiens
  siRNA target sequence for C1orf28 (NM_024529.3,870-888).
cgaacaactatcttacaaa

SEQ ID NO: 386747 - DNA, 19 bp, Homo sapiens
  siRNA target sequence for C1orf28 (NM_024529.3,971-989).
gcgacctgccccaaatgca

SEQ ID NO: 386748 - DNA, 19 bp, Homo sapiens
  siRNA target sequence for C1orf28 (NM_024529.3,1024-1042).
ctatcccagctgcctataa

SEQ ID NO: 386749 - DNA, 19 bp, Homo sapiens
  siRNA target sequence for C1orf28 (NM_024529.3,1029-1047).
ccagctgcctataacagat

SEQ ID NO: 386750 - DNA, 19 bp, Homo sapiens
  siRNA target sequence for C1orf28 (NM_024529.3,1045-1063).
gatacgatcaggaaagatt

SEQ ID NO: 386751 - DNA, 19 bp, Homo sapiens
  siRNA target sequence for C1orf28 (NM_024529.3,1077-1095).
gaaacggaaggcttcaaaa

SEQ ID NO: 386752 - DNA, 19 bp, Homo sapiens
  siRNA target sequence for C1orf28 (NM_024529.3,1081-1099).
cggaaggcttcaaaattga

SEQ ID NO: 386753 - DNA, 19 bp, Homo sapiens
  siRNA target sequence for C1orf28 (NM_024529.3,1210-1228).
caagacctcccccaaatca

SEQ ID NO: 386754 - DNA, 19 bp, Homo sapiens
  siRNA target sequence for C1orf28 (NM_024529.3,1237-1255).
gatctcgaacacccattat

SEQ ID NO: 386755 - DNA, 19 bp, Homo sapiens
  siRNA target sequence for C1orf28 (NM_024529.3,1242-1260).
cgaacacccattatcataa

SEQ ID NO: 386756 - DNA, 19 bp, Homo sapiens
  siRNA target sequence for C1orf28 (NM_024529.3,1243-1261).
gaacacccattatcataat

SEQ ID NO: 386757 - DNA, 19 bp, Homo sapiens
  siRNA target sequence for C1orf28 (NM_024529.3,1266-1284).
gcagctaccacctctttaa

SEQ ID NO: 386758 - DNA, 19 bp, Homo sapiens
  siRNA target sequence for C1orf28 (NM_024529.3,1329-1347).
gtcccatcagatgaaaaga

SEQ ID NO: 386759 - DNA, 19 bp, Homo sapiens
  siRNA target sequence for C1orf28 (NM_024529.3,1410-1428).
ccagggggcactgcaatta

SEQ ID NO: 386760 - DNA, 19 bp, Homo sapiens
  siRNA target sequence for C1orf28 (NM_024529.3,1414-1432).
ggggcactgcaattagtgt

SEQ ID NO: 386761 - DNA, 19 bp, Homo sapiens
  siRNA target sequence for C1orf28 (NM_024529.3,1415-1433).
gggcactgcaattagtgtt

SEQ ID NO: 386762 - DNA, 19 bp, Homo sapiens
  siRNA target sequence for C1orf28 (NM_024529.3,1416-1434).
ggcactgcaattagtgtta

SEQ ID NO: 386763 - DNA, 19 bp, Homo sapiens
  siRNA target sequence for C1orf28 (NM_024529.3,1420-1438).
ctgcaattagtgttacagt

SEQ ID NO: 386764 - DNA, 19 bp, Homo sapiens
  siRNA target sequence for C1orf28 (NM_024529.3,1455-1473).
gaccagccccttaaactta

SEQ ID NO: 386765 - DNA, 19 bp, Homo sapiens
  siRNA target sequence for C1orf28 (NM_024529.3,1490-1508).
ccgcgttgtagccgttttt

SEQ ID NO: 386766 - DNA, 19 bp, Homo sapiens
  siRNA target sequence for C1orf28 (NM_024529.3,1492-1510).
gcgttgtagccgtttttgt

SEQ ID NO: 386767 - DNA, 19 bp, Homo sapiens
  siRNA target sequence for C1orf28 (NM_024529.3,1560-1578).
ggatcaccagttgatatat

SEQ ID NO: 386768 - DNA, 19 bp, Homo sapiens
  siRNA target sequence for C1orf28 (NM_024529.3,1566-1584).
ccagttgatatatttgcta

SEQ ID NO: 386769 - DNA, 19 bp, Homo sapiens
  siRNA target sequence for C1orf28 (NM_024529.3,1567-1585).
cagttgatatatttgctaa

SEQ ID NO: 386770 - DNA, 19 bp, Homo sapiens
  siRNA target sequence for C1orf28 (NM_024529.3,1569-1587).
gttgatatatttgctaaaa

SEQ ID NO: 386771 - DNA, 19 bp, Homo sapiens
  siRNA target sequence for C1orf28 (NM_024529.3,1572-1590).
gatatatttgctaaaatta

SEQ ID NO: 386772 - DNA, 19 bp, Homo sapiens
  siRNA target sequence for C1orf28 (NM_024529.3,1594-1612).
ccttccatctgaagtatga

SEQ ID NO: 386773 - DNA, 19 bp, Homo sapiens
  siRNA target sequence for C1orf28 (NM_024529.3,1595-1613).
cttccatctgaagtatgat

SEQ ID NO: 386774 - DNA, 19 bp, Homo sapiens
  siRNA target sequence for C1orf28 (NM_024529.3,1621-1639).
gtctggatccaaatgttca

SEQ ID NO: 386775 - DNA, 19 bp, Homo sapiens
  siRNA target sequence for C1orf28 (NM_024529.3,1640-1658).
gaaatgggatgtaacagta

SEQ ID NO: 386776 - DNA, 19 bp, Homo sapiens
  siRNA target sequence for C1orf28 (NM_024529.3,1646-1664).
ggatgtaacagtattagaa

SEQ ID NO: 386777 - DNA, 19 bp, Homo sapiens
  siRNA target sequence for C1orf28 (NM_024529.3,1669-1687).
gctatcacaaacgtcattt

SEQ ID NO: 386778 - DNA, 19 bp, Homo sapiens
  siRNA target sequence for C1orf28 (NM_024529.3,1674-1692).
cacaaacgtcatttggata

SEQ ID NO: 386779 - DNA, 19 bp, Homo sapiens
  siRNA target sequence for C1orf28 (NM_024529.3,1688-1706).
ggatagaccagtgttctta

SEQ ID NO: 386780 - DNA, 19 bp, Homo sapiens
  siRNA target sequence for C1orf28 (NM_024529.3,1743-1761).
cataaatcgcacttgagat

SEQ ID NO: 386781 - DNA, 19 bp, Homo sapiens
  siRNA target sequence for FLJ23306 (NM_024530.1,780-798).
gccacctgctggatcaagt

SEQ ID NO: 386782 - DNA, 19 bp, Homo sapiens
  siRNA target sequence for FLJ11856 (NM_024531.3,642-660).
gtggcaggacagttgcatt

SEQ ID NO: 386783 - DNA, 19 bp, Homo sapiens
  siRNA target sequence for FLJ11856 (NM_024531.3,646-664).
caggacagttgcattctgt

SEQ ID NO: 386784 - DNA, 19 bp, Homo sapiens
  siRNA target sequence for FLJ11856 (NM_024531.3,753-771).
cgcttcttacggtcattct

SEQ ID NO: 386785 - DNA, 19 bp, Homo sapiens
  siRNA target sequence for FLJ11856 (NM_024531.3,754-772).
gcttcttacggtcattctt

SEQ ID NO: 386786 - DNA, 19 bp, Homo sapiens
  siRNA target sequence for PF20 (NM_024532.2,223-241).
gagataccagatgacaatt

SEQ ID NO: 386787 - DNA, 19 bp, Homo sapiens
  siRNA target sequence for PF20 (NM_024532.2,229-247).
ccagatgacaattttagca

SEQ ID NO: 386788 - DNA, 19 bp, Homo sapiens
  siRNA target sequence for PF20 (NM_024532.2,230-248).
cagatgacaattttagcat

SEQ ID NO: 386789 - DNA, 19 bp, Homo sapiens
  siRNA target sequence for PF20 (NM_024532.2,348-366).
gcatgcagtacctgaagta

SEQ ID NO: 386790 - DNA, 19 bp, Homo sapiens
  siRNA target sequence for PF20 (NM_024532.2,349-367).
catgcagtacctgaagtaa

SEQ ID NO: 386791 - DNA, 19 bp, Homo sapiens
  siRNA target sequence for PF20 (NM_024532.2,425-443).
gctttcagtctgaatggta

SEQ ID NO: 386792 - DNA, 19 bp, Homo sapiens
  siRNA target sequence for PF20 (NM_024532.2,432-450).
gtctgaatggtatgagtta

SEQ ID NO: 386793 - DNA, 19 bp, Homo sapiens
  siRNA target sequence for PF20 (NM_024532.2,440-458).
ggtatgagttaatacagaa

SEQ ID NO: 386794 - DNA, 19 bp, Homo sapiens
  siRNA target sequence for PF20 (NM_024532.2,460-478).
ggagtgactgaacttagaa

SEQ ID NO: 386795 - DNA, 19 bp, Homo sapiens
  siRNA target sequence for PF20 (NM_024532.2,501-519).
ctacacccagattatgctt

SEQ ID NO: 386796 - DNA, 19 bp, Homo sapiens
  siRNA target sequence for PF20 (NM_024532.2,609-627).
gaaagaacgtgattttcat

SEQ ID NO: 386797 - DNA, 19 bp, Homo sapiens
  siRNA target sequence for PF20 (NM_024532.2,642-660).
gcgaatagtccaggaaaaa

SEQ ID NO: 386798 - DNA, 19 bp, Homo sapiens
  siRNA target sequence for PF20 (NM_024532.2,643-661).
cgaatagtccaggaaaaaa

SEQ ID NO: 386799 - DNA, 19 bp, Homo sapiens
  siRNA target sequence for PF20 (NM_024532.2,716-734).
cgactataagggtgttaca

SEQ ID NO: 386800 - DNA, 19 bp, Homo sapiens
  siRNA target sequence for PF20 (NM_024532.2,717-735).
gactataagggtgttacat

SEQ ID NO: 386801 - DNA, 19 bp, Homo sapiens
  siRNA target sequence for PF20 (NM_024532.2,725-743).
gggtgttacatgagaaaca

SEQ ID NO: 386802 - DNA, 19 bp, Homo sapiens
  siRNA target sequence for PF20 (NM_024532.2,809-827).
ctggacttcaagaaacatt

SEQ ID NO: 386803 - DNA, 19 bp, Homo sapiens
  siRNA target sequence for PF20 (NM_024532.2,811-829).
ggacttcaagaaacattga

SEQ ID NO: 386804 - DNA, 19 bp, Homo sapiens
  siRNA target sequence for PF20 (NM_024532.2,855-873).
ccatggtcctcaaattaaa

SEQ ID NO: 386805 - DNA, 19 bp, Homo sapiens
  siRNA target sequence for PF20 (NM_024532.2,860-878).
gtcctcaaattaaagttga

SEQ ID NO: 386806 - DNA, 19 bp, Homo sapiens
  siRNA target sequence for PF20 (NM_024532.2,989-1007).
cagaatttcccatagatat

SEQ ID NO: 386807 - DNA, 19 bp, Homo sapiens
  siRNA target sequence for PF20 (NM_024532.2,999-1017).
catagatatgcaaccaaat

SEQ ID NO: 386808 - DNA, 19 bp, Homo sapiens
  siRNA target sequence for PF20 (NM_024532.2,1013-1031).
caaatccaaacctgaatgt

SEQ ID NO: 386809 - DNA, 19 bp, Homo sapiens
  siRNA target sequence for PF20 (NM_024532.2,1174-1192).
gtgttgggccttccaaaat

SEQ ID NO: 386810 - DNA, 19 bp, Homo sapiens
  siRNA target sequence for PF20 (NM_024532.2,1249-1267).
catcccagtggcgacaaat

SEQ ID NO: 386811 - DNA, 19 bp, Homo sapiens
  siRNA target sequence for PF20 (NM_024532.2,1260-1278).
cgacaaattggctacttca

SEQ ID NO: 386812 - DNA, 19 bp, Homo sapiens
  siRNA target sequence for PF20 (NM_024532.2,1261-1279).
gacaaattggctacttcaa

SEQ ID NO: 386813 - DNA, 19 bp, Homo sapiens
  siRNA target sequence for PF20 (NM_024532.2,1263-1281).
caaattggctacttcaagt

SEQ ID NO: 386814 - DNA, 19 bp, Homo sapiens
  siRNA target sequence for PF20 (NM_024532.2,1294-1312).
gttaaattatgggatctat

SEQ ID NO: 386815 - DNA, 19 bp, Homo sapiens
  siRNA target sequence for PF20 (NM_024532.2,1373-1391).
ggcactcctgcggcaattt

SEQ ID NO: 386816 - DNA, 19 bp, Homo sapiens
  siRNA target sequence for PF20 (NM_024532.2,1374-1392).
gcactcctgcggcaatttt

SEQ ID NO: 386817 - DNA, 19 bp, Homo sapiens
  siRNA target sequence for PF20 (NM_024532.2,1401-1419).
ctcctcactggataaaact

SEQ ID NO: 386818 - DNA, 19 bp, Homo sapiens
  siRNA target sequence for PF20 (NM_024532.2,1431-1449).
ggatgttaatagtgaaaga

SEQ ID NO: 386819 - DNA, 19 bp, Homo sapiens
  siRNA target sequence for PF20 (NM_024532.2,1481-1499).
ctgtgaacagcattgagtt

SEQ ID NO: 386820 - DNA, 19 bp, Homo sapiens
  siRNA target sequence for PF20 (NM_024532.2,1483-1501).
gtgaacagcattgagtttt

SEQ ID NO: 386821 - DNA, 19 bp, Homo sapiens
  siRNA target sequence for PF20 (NM_024532.2,1488-1506).
cagcattgagttttttcct

SEQ ID NO: 386822 - DNA, 19 bp, Homo sapiens
  siRNA target sequence for PF20 (NM_024532.2,1557-1575).
ggatgcaagaacaggtata

SEQ ID NO: 386823 - DNA, 19 bp, Homo sapiens
  siRNA target sequence for PF20 (NM_024532.2,1558-1576).
gatgcaagaacaggtatat

SEQ ID NO: 386824 - DNA, 19 bp, Homo sapiens
  siRNA target sequence for PF20 (NM_024532.2,1588-1606).
ctttatggtcacatgcatt

SEQ ID NO: 386825 - DNA, 19 bp, Homo sapiens
  siRNA target sequence for PF20 (NM_024532.2,1595-1613).
gtcacatgcattctatcaa

SEQ ID NO: 386826 - DNA, 19 bp, Homo sapiens
  siRNA target sequence for PF20 (NM_024532.2,1691-1709).
ggaagctgttaccaattgt

SEQ ID NO: 386827 - DNA, 19 bp, Homo sapiens
  siRNA target sequence for PF20 (NM_024532.2,1743-1761).
ggtgaattttgattcatca

SEQ ID NO: 386828 - DNA, 19 bp, Homo sapiens
  siRNA target sequence for PF20 (NM_024532.2,1781-1799).
caagtggcaatggtgttat

SEQ ID NO: 386829 - DNA, 19 bp, Homo sapiens
  siRNA target sequence for PF20 (NM_024532.2,1784-1802).
gtggcaatggtgttatcca

SEQ ID NO: 386830 - DNA, 19 bp, Homo sapiens
  siRNA target sequence for PF20 (NM_024532.2,1787-1805).
gcaatggtgttatccattt

SEQ ID NO: 386831 - DNA, 19 bp, Homo sapiens
  siRNA target sequence for PF20 (NM_024532.2,1822-1840).
ggggagattcacaaattga

SEQ ID NO: 386832 - DNA, 19 bp, Homo sapiens
  siRNA target sequence for PF20 (NM_024532.2,1823-1841).
gggagattcacaaattgat

SEQ ID NO: 386833 - DNA, 19 bp, Homo sapiens
  siRNA target sequence for PF20 (NM_024532.2,1858-1876).
gcacacacggttgtgtttt

SEQ ID NO: 386834 - DNA, 19 bp, Homo sapiens
  siRNA target sequence for PF20 (NM_024532.2,1877-1895).
ctcacgacggggagattct

SEQ ID NO: 386835 - DNA, 19 bp, Homo sapiens
  siRNA target sequence for PF20 (NM_024532.2,1879-1897).
cacgacggggagattctct

SEQ ID NO: 386836 - DNA, 19 bp, Homo sapiens
  siRNA target sequence for FLJ12684 (NM_024534.2,744-762).
gggctccctttcaaactat

SEQ ID NO: 386837 - DNA, 19 bp, Homo sapiens
  siRNA target sequence for FLJ12684 (NM_024534.2,785-803).
ctgcttttttgacaattct

SEQ ID NO: 386838 - DNA, 19 bp, Homo sapiens
  siRNA target sequence for FLJ12684 (NM_024534.2,788-806).
cttttttgacaattctagt

SEQ ID NO: 386839 - DNA, 19 bp, Homo sapiens
  siRNA target sequence for FLJ12684 (NM_024534.2,829-847).
ccagttttccggacactat

SEQ ID NO: 386840 - DNA, 19 bp, Homo sapiens
  siRNA target sequence for FLJ12684 (NM_024534.2,832-850).
gttttccggacactatcta

SEQ ID NO: 386841 - DNA, 19 bp, Homo sapiens
  siRNA target sequence for FLJ12684 (NM_024534.2,838-856).
cggacactatctatcttga

SEQ ID NO: 386842 - DNA, 19 bp, Homo sapiens
  siRNA target sequence for FLJ12684 (NM_024534.2,842-860).
cactatctatcttgactaa

SEQ ID NO: 386843 - DNA, 19 bp, Homo sapiens
  siRNA target sequence for FLJ12684 (NM_024534.2,864-882).
gtctaattgctggttatgt

SEQ ID NO: 386844 - DNA, 19 bp, Homo sapiens
  siRNA target sequence for FLJ12684 (NM_024534.2,866-884).
ctaattgctggttatgtga

SEQ ID NO: 386845 - DNA, 19 bp, Homo sapiens
  siRNA target sequence for FLJ12684 (NM_024534.2,873-891).
ctggttatgtgaacatcta

SEQ ID NO: 386846 - DNA, 19 bp, Homo sapiens
  siRNA target sequence for FLJ12684 (NM_024534.2,899-917).
cagaacaacccgaactagt

SEQ ID NO: 386847 - DNA, 19 bp, Homo sapiens
  siRNA target sequence for FLJ12684 (NM_024534.2,901-919).
gaacaacccgaactagttt

SEQ ID NO: 386848 - DNA, 19 bp, Homo sapiens
  siRNA target sequence for FLJ12684 (NM_024534.2,984-1002).
gtatccacaagcagaagta

SEQ ID NO: 386849 - DNA, 19 bp, Homo sapiens
  siRNA target sequence for FLJ12684 (NM_024534.2,1013-1031).
ctacttcctcctatcgtaa

SEQ ID NO: 386850 - DNA, 19 bp, Homo sapiens
  siRNA target sequence for FLJ12684 (NM_024534.2,1016-1034).
cttcctcctatcgtaaagt

SEQ ID NO: 386851 - DNA, 19 bp, Homo sapiens
  siRNA target sequence for FLJ12684 (NM_024534.2,1141-1159).
ggacccttcctaggtaata

SEQ ID NO: 386852 - DNA, 19 bp, Homo sapiens
  siRNA target sequence for FLJ12684 (NM_024534.2,1142-1160).
gacccttcctaggtaatat

SEQ ID NO: 386853 - DNA, 19 bp, Homo sapiens
  siRNA target sequence for FLJ12684 (NM_024534.2,1153-1171).
ggtaatatacctaaacaat

SEQ ID NO: 386854 - DNA, 19 bp, Homo sapiens
  siRNA target sequence for FLJ12684 (NM_024534.2,1154-1172).
gtaatatacctaaacaata

SEQ ID NO: 386855 - DNA, 19 bp, Homo sapiens
  siRNA target sequence for FLJ12684 (NM_024534.2,1163-1181).
ctaaacaatactgtaatca

SEQ ID NO: 386856 - DNA, 19 bp, Homo sapiens
  siRNA target sequence for FLJ12684 (NM_024534.2,1215-1233).
catgccctctatagatgtt

SEQ ID NO: 386857 - DNA, 19 bp, Homo sapiens
  siRNA target sequence for FLJ12684 (NM_024534.2,1219-1237).
ccctctatagatgttacaa

SEQ ID NO: 386858 - DNA, 19 bp, Homo sapiens
  siRNA target sequence for FLJ12684 (NM_024534.2,1275-1293).
cctaggcactagacaatgt

SEQ ID NO: 386859 - DNA, 19 bp, Homo sapiens
  siRNA target sequence for FLJ12684 (NM_024534.2,1276-1294).
ctaggcactagacaatgtt

SEQ ID NO: 386860 - DNA, 19 bp, Homo sapiens
  siRNA target sequence for FLJ12684 (NM_024534.2,1359-1377).
caatacccaagactacaaa

SEQ ID NO: 386861 - DNA, 19 bp, Homo sapiens
  siRNA target sequence for FLJ12684 (NM_024534.2,1374-1392).
caaatgggtagatcgaaat

SEQ ID NO: 386862 - DNA, 19 bp, Homo sapiens
  siRNA target sequence for FLJ12684 (NM_024534.2,1417-1435).
gacacctgtctctatagct

SEQ ID NO: 386863 - DNA, 19 bp, Homo sapiens
  siRNA target sequence for FLJ12684 (NM_024534.2,1428-1446).
ctatagctgccaaaaccaa

SEQ ID NO: 386864 - DNA, 19 bp, Homo sapiens
  siRNA target sequence for FLJ12684 (NM_024534.2,1465-1483).
cagctatttcgcaacctat

SEQ ID NO: 386865 - DNA, 19 bp, Homo sapiens
  siRNA target sequence for FLJ12684 (NM_024534.2,1467-1485).
gctatttcgcaacctattt

SEQ ID NO: 386866 - DNA, 19 bp, Homo sapiens
  siRNA target sequence for FLJ12684 (NM_024534.2,1476-1494).
caacctattttgctcttat

SEQ ID NO: 386867 - DNA, 19 bp, Homo sapiens
  siRNA target sequence for FLJ12684 (NM_024534.2,1528-1546).
gcagatgccagcataacta

SEQ ID NO: 386868 - DNA, 19 bp, Homo sapiens
  siRNA target sequence for FLJ12684 (NM_024534.2,1534-1552).
gccagcataactaatgaca

SEQ ID NO: 386869 - DNA, 19 bp, Homo sapiens
  siRNA target sequence for FLJ12684 (NM_024534.2,1535-1553).
ccagcataactaatgacaa

SEQ ID NO: 386870 - DNA, 19 bp, Homo sapiens
  siRNA target sequence for FLJ12684 (NM_024534.2,1588-1606).
ctcacaggttccaatctga

SEQ ID NO: 386871 - DNA, 19 bp, Homo sapiens
  siRNA target sequence for FLJ12684 (NM_024534.2,1663-1681).
gggtttccacctaaatggt

SEQ ID NO: 386872 - DNA, 19 bp, Homo sapiens
  siRNA target sequence for FLJ12684 (NM_024534.2,1763-1781).
gatccttcattcataaagt

SEQ ID NO: 386873 - DNA, 19 bp, Homo sapiens
  siRNA target sequence for FLJ12684 (NM_024534.2,1874-1892).
gtttgggaacttatgattt

SEQ ID NO: 386874 - DNA, 19 bp, Homo sapiens
  siRNA target sequence for FLJ12684 (NM_024534.2,2000-2018).
cccgaaaggatcatgtctt

SEQ ID NO: 386875 - DNA, 19 bp, Homo sapiens
  siRNA target sequence for FLJ12684 (NM_024534.2,2132-2150).
catccgagaacctgaagaa

SEQ ID NO: 386876 - DNA, 19 bp, Homo sapiens
  siRNA target sequence for FLJ12684 (NM_024534.2,2135-2153).
ccgagaacctgaagaatgt

SEQ ID NO: 386877 - DNA, 19 bp, Homo sapiens
  siRNA target sequence for FLJ12684 (NM_024534.2,2145-2163).
gaagaatgtaccgttactt

SEQ ID NO: 386878 - DNA, 19 bp, Homo sapiens
  siRNA target sequence for FLJ12684 (NM_024534.2,2148-2166).
gaatgtaccgttacttgat

SEQ ID NO: 386879 - DNA, 19 bp, Homo sapiens
  siRNA target sequence for FLJ12684 (NM_024534.2,2169-2187).
gcaaggcatatttgcaaaa

SEQ ID NO: 386880 - DNA, 19 bp, Homo sapiens
  siRNA target sequence for FLJ12684 (NM_024534.2,2188-2206).
gtgggagactggttcagat

SEQ ID NO: 386881 - DNA, 19 bp, Homo sapiens
  siRNA target sequence for FLJ12684 (NM_024534.2,2191-2209).
ggagactggttcagatcat

SEQ ID NO: 386882 - DNA, 19 bp, Homo sapiens
  siRNA target sequence for FLJ12684 (NM_024534.2,2207-2225).
catggggctatgtgctttt

SEQ ID NO: 386883 - DNA, 19 bp, Homo sapiens
  siRNA target sequence for FLJ12684 (NM_024534.2,2210-2228).
ggggctatgtgcttttaat

SEQ ID NO: 386884 - DNA, 19 bp, Homo sapiens
  siRNA target sequence for FLJ12684 (NM_024534.2,2211-2229).
gggctatgtgcttttaatt

SEQ ID NO: 386885 - DNA, 19 bp, Homo sapiens
  siRNA target sequence for FLJ12684 (NM_024534.2,2238-2256).
ctgcttattcatctttgtt

SEQ ID NO: 386886 - DNA, 19 bp, Homo sapiens
  siRNA target sequence for FLJ12684 (NM_024534.2,2395-2413).
ggactaacaacccatcaat

SEQ ID NO: 386887 - DNA, 19 bp, Homo sapiens
  siRNA target sequence for FLJ12684 (NM_024534.2,2396-2414).
gactaacaacccatcaata

SEQ ID NO: 386888 - DNA, 19 bp, Homo sapiens
  siRNA target sequence for FLJ22021 (NM_024535.1,154-172).
caggaaccacatcaaatca

SEQ ID NO: 386889 - DNA, 19 bp, Homo sapiens
  siRNA target sequence for FLJ22021 (NM_024535.1,301-319).
ggacttctcgccctttgat

SEQ ID NO: 386890 - DNA, 19 bp, Homo sapiens
  siRNA target sequence for FLJ22021 (NM_024535.1,345-363).
ctgacaggacggtaaaact

SEQ ID NO: 386891 - DNA, 19 bp, Homo sapiens
  siRNA target sequence for FLJ22021 (NM_024535.1,347-365).
gacaggacggtaaaactct

SEQ ID NO: 386892 - DNA, 19 bp, Homo sapiens
  siRNA target sequence for FLJ22021 (NM_024535.1,619-637).
caagcagctgcggatcttt

SEQ ID NO: 386893 - DNA, 19 bp, Homo sapiens
  siRNA target sequence for FLJ22021 (NM_024535.1,669-687).
gcacgcaggcccatgagaa

SEQ ID NO: 386894 - DNA, 19 bp, Homo sapiens
  siRNA target sequence for FLJ22021 (NM_024535.1,1321-1339).
cgcaagcgagggtttctct

SEQ ID NO: 386895 - DNA, 19 bp, Homo sapiens
  siRNA target sequence for FLJ22021 (NM_024535.1,1322-1340).
gcaagcgagggtttctctt

SEQ ID NO: 386896 - DNA, 19 bp, Homo sapiens
  siRNA target sequence for FLJ22021 (NM_024535.1,1824-1842).
caggccacacggagaagat

SEQ ID NO: 386897 - DNA, 19 bp, Homo sapiens
  siRNA target sequence for FLJ22021 (NM_024535.1,1956-1974).
gccaccaagaccagatctt

SEQ ID NO: 386898 - DNA, 19 bp, Homo sapiens
  siRNA target sequence for FLJ22021 (NM_024535.1,1958-1976).
caccaagaccagatcttca

SEQ ID NO: 386899 - DNA, 19 bp, Homo sapiens
  siRNA target sequence for FLJ22021 (NM_024535.1,2099-2117).
cgcggagctcgcattgtct

SEQ ID NO: 386900 - DNA, 19 bp, Homo sapiens
  siRNA target sequence for FLJ22021 (NM_024535.1,2170-2188).
gcgccagctgctcctatat

SEQ ID NO: 386901 - DNA, 19 bp, Homo sapiens
  siRNA target sequence for FLJ22021 (NM_024535.1,2172-2190).
gccagctgctcctatatga

SEQ ID NO: 386902 - DNA, 19 bp, Homo sapiens
  siRNA target sequence for FLJ22021 (NM_024535.1,2304-2322).
gcgacacccgtgtattcct

SEQ ID NO: 386903 - DNA, 19 bp, Homo sapiens
  siRNA target sequence for FLJ22021 (NM_024535.1,2498-2516).
ccccgagtccggaaagagt

SEQ ID NO: 386904 - DNA, 19 bp, Homo sapiens
  siRNA target sequence for FLJ22021 (NM_024535.1,2499-2517).
cccgagtccggaaagagtt

SEQ ID NO: 386905 - DNA, 19 bp, Homo sapiens
  siRNA target sequence for CHPF (NM_024536.4,740-758).
cacggcgacgactttgact

SEQ ID NO: 386906 - DNA, 19 bp, Homo sapiens
  siRNA target sequence for CHPF (NM_024536.4,1061-1079).
cacgagggggtgcactata

SEQ ID NO: 386907 - DNA, 19 bp, Homo sapiens
  siRNA target sequence for CHPF (NM_024536.4,1161-1179).
gtgaccctgtgcacatgta

SEQ ID NO: 386908 - DNA, 19 bp, Homo sapiens
  siRNA target sequence for CHPF (NM_024536.4,1437-1455).
ctgatgtggccgatgttct

SEQ ID NO: 386909 - DNA, 19 bp, Homo sapiens
  siRNA target sequence for CHPF (NM_024536.4,2090-2108).
gccttctttcccatgcatt

SEQ ID NO: 386910 - DNA, 19 bp, Homo sapiens
  siRNA target sequence for CHPF (NM_024536.4,2202-2220).
gcgaggcctgcttctacaa

SEQ ID NO: 386911 - DNA, 19 bp, Homo sapiens
  siRNA target sequence for FLJ13114 (NM_024541.1,46-64).
ccctgccgtcctttagtat

SEQ ID NO: 386912 - DNA, 19 bp, Homo sapiens
  siRNA target sequence for FLJ13114 (NM_024541.1,48-66).
ctgccgtcctttagtatgt

SEQ ID NO: 386913 - DNA, 19 bp, Homo sapiens
  siRNA target sequence for FLJ13114 (NM_024541.1,76-94).
gacctgatggtagagttta

SEQ ID NO: 386914 - DNA, 19 bp, Homo sapiens
  siRNA target sequence for FLJ13114 (NM_024541.1,81-99).
gatggtagagtttattgta

SEQ ID NO: 386915 - DNA, 19 bp, Homo sapiens
  siRNA target sequence for FLJ13114 (NM_024541.1,84-102).
ggtagagtttattgtaaca

SEQ ID NO: 386916 - DNA, 19 bp, Homo sapiens
  siRNA target sequence for FLJ13114 (NM_024541.1,117-135).
gtttcctatggatctctat

SEQ ID NO: 386917 - DNA, 19 bp, Homo sapiens
  siRNA target sequence for FLJ13114 (NM_024541.1,140-158).
gctgcatccaggtagtaca

SEQ ID NO: 386918 - DNA, 19 bp, Homo sapiens
  siRNA target sequence for FLJ13114 (NM_024541.1,144-162).
catccaggtagtacacaaa

SEQ ID NO: 386919 - DNA, 19 bp, Homo sapiens
  siRNA target sequence for FLJ13114 (NM_024541.1,185-203).
gtcgggtacgcctgcatta

SEQ ID NO: 386920 - DNA, 19 bp, Homo sapiens
  siRNA target sequence for FLJ13114 (NM_024541.1,187-205).
cgggtacgcctgcattaca

SEQ ID NO: 386921 - DNA, 19 bp, Homo sapiens
  siRNA target sequence for FLJ13114 (NM_024541.1,221-239).
ggtcagccttgataaattt

SEQ ID NO: 386922 - DNA, 19 bp, Homo sapiens
  siRNA target sequence for FLJ13114 (NM_024541.1,243-261).
gaagttccttatgtcaaat

SEQ ID NO: 386923 - DNA, 19 bp, Homo sapiens
  siRNA target sequence for FLJ13114 (NM_024541.1,255-273).
gtcaaatgagactgtactt

SEQ ID NO: 386924 - DNA, 19 bp, Homo sapiens
  siRNA target sequence for FLJ13114 (NM_024541.1,268-286).
gtacttttggccaaacaca

SEQ ID NO: 386925 - DNA, 19 bp, Homo sapiens
  siRNA target sequence for FLJ13114 (NM_024541.1,304-322).
cttatgattgtgaacctat

SEQ ID NO: 386926 - DNA, 19 bp, Homo sapiens
  siRNA target sequence for FLJ13114 (NM_024541.1,309-327).
gattgtgaacctatttaat

SEQ ID NO: 386927 - DNA, 19 bp, Homo sapiens
  siRNA target sequence for FLJ13114 (NM_024541.1,313-331).
gtgaacctatttaatatgt

SEQ ID NO: 386928 - DNA, 19 bp, Homo sapiens
  siRNA target sequence for FLJ13114 (NM_024541.1,336-354).
cacatatggcgacacattt

SEQ ID NO: 386929 - DNA, 19 bp, Homo sapiens
  siRNA target sequence for FLJ13114 (NM_024541.1,438-456).
cctgaggctttctaccaat

SEQ ID NO: 386930 - DNA, 19 bp, Homo sapiens
  siRNA target sequence for FLJ13114 (NM_024541.1,489-507).
gacccatgcattggttaat

SEQ ID NO: 386931 - DNA, 19 bp, Homo sapiens
  siRNA target sequence for FLJ13114 (NM_024541.1,546-564).
gtcctacgctgctgtgaat

SEQ ID NO: 386932 - DNA, 19 bp, Homo sapiens
  siRNA target sequence for FLJ13114 (NM_024541.1,552-570).
cgctgctgtgaatcacata

SEQ ID NO: 386933 - DNA, 19 bp, Homo sapiens
  siRNA target sequence for FLJ13114 (NM_024541.1,553-571).
gctgctgtgaatcacatat

SEQ ID NO: 386934 - DNA, 19 bp, Homo sapiens
  siRNA target sequence for FLJ13114 (NM_024541.1,600-618).
ggtggtgagagccaactat

SEQ ID NO: 386935 - DNA, 19 bp, Homo sapiens
  siRNA target sequence for FLJ13114 (NM_024541.1,703-721).
gagctggttcgatccatta

SEQ ID NO: 386936 - DNA, 19 bp, Homo sapiens
  siRNA target sequence for FLJ13114 (NM_024541.1,706-724).
ctggttcgatccattagca

SEQ ID NO: 386937 - DNA, 19 bp, Homo sapiens
  siRNA target sequence for FLJ12875 (NM_024544.1,255-273).
gagctcaagggagctaaaa

SEQ ID NO: 386938 - DNA, 19 bp, Homo sapiens
  siRNA target sequence for FLJ12875 (NM_024544.1,257-275).
gctcaagggagctaaaaaa

SEQ ID NO: 386939 - DNA, 19 bp, Homo sapiens
  siRNA target sequence for FLJ12875 (NM_024544.1,284-302).
gggtgaagatttaaagagt

SEQ ID NO: 386940 - DNA, 19 bp, Homo sapiens
  siRNA target sequence for FLJ12875 (NM_024544.1,285-303).
ggtgaagatttaaagagta

SEQ ID NO: 386941 - DNA, 19 bp, Homo sapiens
  siRNA target sequence for FLJ12875 (NM_024544.1,328-346).
gcgtgccttatgctgttat

SEQ ID NO: 386942 - DNA, 19 bp, Homo sapiens
  siRNA target sequence for FLJ12875 (NM_024544.1,329-347).
cgtgccttatgctgttata

SEQ ID NO: 386943 - DNA, 19 bp, Homo sapiens
  siRNA target sequence for FLJ12875 (NM_024544.1,351-369).
ggagctgtgcggtctgtta

SEQ ID NO: 386944 - DNA, 19 bp, Homo sapiens
  siRNA target sequence for FLJ12875 (NM_024544.1,355-373).
ctgtgcggtctgttaaaga

SEQ ID NO: 386945 - DNA, 19 bp, Homo sapiens
  siRNA target sequence for FLJ12875 (NM_024544.1,357-375).
gtgcggtctgttaaagaaa

SEQ ID NO: 386946 - DNA, 19 bp, Homo sapiens
  siRNA target sequence for FLJ12875 (NM_024544.1,376-394).
cgcttaacagccagtttgt

SEQ ID NO: 386947 - DNA, 19 bp, Homo sapiens
  siRNA target sequence for FLJ12875 (NM_024544.1,472-490).
ggaatgattgctcaaagat

SEQ ID NO: 386948 - DNA, 19 bp, Homo sapiens
  siRNA target sequence for FLJ12875 (NM_024544.1,481-499).
gctcaaagatcattcatca

SEQ ID NO: 386949 - DNA, 19 bp, Homo sapiens
  siRNA target sequence for FLJ12875 (NM_024544.1,744-762).
ctggtcctggacaacaact

SEQ ID NO: 386950 - DNA, 19 bp, Homo sapiens
  siRNA target sequence for FLJ12875 (NM_024544.1,789-807).
ggcatgcagtactatctaa

SEQ ID NO: 386951 - DNA, 19 bp, Homo sapiens
  siRNA target sequence for FLJ12875 (NM_024544.1,866-884).
ggtgctggcgctggttttt

SEQ ID NO: 386952 - DNA, 19 bp, Homo sapiens
  siRNA target sequence for FLJ12875 (NM_024544.1,1177-1195).
gggtgatacccctgtacaa

SEQ ID NO: 386953 - DNA, 19 bp, Homo sapiens
  siRNA target sequence for SAP130 (NM_024545.2,285-303).
gtggttctgctggattgat

SEQ ID NO: 386954 - DNA, 19 bp, Homo sapiens
  siRNA target sequence for SAP130 (NM_024545.2,314-332).
gctacagtcaatgatgaat

SEQ ID NO: 386955 - DNA, 19 bp, Homo sapiens
  siRNA target sequence for SAP130 (NM_024545.2,434-452).
ccacaggtgcagatgttgt

SEQ ID NO: 386956 - DNA, 19 bp, Homo sapiens
  siRNA target sequence for SAP130 (NM_024545.2,519-537).
cagcagtgccactttcatt

SEQ ID NO: 386957 - DNA, 19 bp, Homo sapiens
  siRNA target sequence for SAP130 (NM_024545.2,534-552).
cattttcggagggacttat

SEQ ID NO: 386958 - DNA, 19 bp, Homo sapiens
  siRNA target sequence for SAP130 (NM_024545.2,639-657).
ggcaggttaccgttaccat

SEQ ID NO: 386959 - DNA, 19 bp, Homo sapiens
  siRNA target sequence for SAP130 (NM_024545.2,684-702).
ccattcctgtggcaacaat

SEQ ID NO: 386960 - DNA, 19 bp, Homo sapiens
  siRNA target sequence for SAP130 (NM_024545.2,843-861).
ctgtgatgtccagttctaa

SEQ ID NO: 386961 - DNA, 19 bp, Homo sapiens
  siRNA target sequence for SAP130 (NM_024545.2,847-865).
gatgtccagttctaaagta

SEQ ID NO: 386962 - DNA, 19 bp, Homo sapiens
  siRNA target sequence for SAP130 (NM_024545.2,918-936).
cagcagtacagcacatcat

SEQ ID NO: 386963 - DNA, 19 bp, Homo sapiens
  siRNA target sequence for SAP130 (NM_024545.2,1185-1203).
cattagggacgccaaaaca

SEQ ID NO: 386964 - DNA, 19 bp, Homo sapiens
  siRNA target sequence for SAP130 (NM_024545.2,1196-1214).
ccaaaacagcagcttcata

SEQ ID NO: 386965 - DNA, 19 bp, Homo sapiens
  siRNA target sequence for SAP130 (NM_024545.2,1223-1241).
cagaaaacaatcttcagta

SEQ ID NO: 386966 - DNA, 19 bp, Homo sapiens
  siRNA target sequence for SAP130 (NM_024545.2,1283-1301).
gcaaccaacaccattcctt

SEQ ID NO: 386967 - DNA, 19 bp, Homo sapiens
  siRNA target sequence for SAP130 (NM_024545.2,1340-1358).
cccacaagtaccattgtta

SEQ ID NO: 386968 - DNA, 19 bp, Homo sapiens
  siRNA target sequence for SAP130 (NM_024545.2,1395-1413).
ctgtgaccacctcaaacat

SEQ ID NO: 386969 - DNA, 19 bp, Homo sapiens
  siRNA target sequence for SAP130 (NM_024545.2,1566-1584).
cgtctgttcccgttcagtt

SEQ ID NO: 386970 - DNA, 19 bp, Homo sapiens
  siRNA target sequence for SAP130 (NM_024545.2,1574-1592).
cccgttcagttccaatatt

SEQ ID NO: 386971 - DNA, 19 bp, Homo sapiens
  siRNA target sequence for SAP130 (NM_024545.2,1575-1593).
ccgttcagttccaatattt

SEQ ID NO: 386972 - DNA, 19 bp, Homo sapiens
  siRNA target sequence for SAP130 (NM_024545.2,1576-1594).
cgttcagttccaatatttt

SEQ ID NO: 386973 - DNA, 19 bp, Homo sapiens
  siRNA target sequence for SAP130 (NM_024545.2,1623-1641).
cactggcggcacataccta

SEQ ID NO: 386974 - DNA, 19 bp, Homo sapiens
  siRNA target sequence for SAP130 (NM_024545.2,1663-1681).
gtccactatccgacagtat

SEQ ID NO: 386975 - DNA, 19 bp, Homo sapiens
  siRNA target sequence for SAP130 (NM_024545.2,1672-1690).
ccgacagtatccagtttca

SEQ ID NO: 386976 - DNA, 19 bp, Homo sapiens
  siRNA target sequence for SAP130 (NM_024545.2,1740-1758).
cgtctaccgtccacctaaa

SEQ ID NO: 386977 - DNA, 19 bp, Homo sapiens
  siRNA target sequence for SAP130 (NM_024545.2,1785-1803).
catcgcatgctcgacatat

SEQ ID NO: 386978 - DNA, 19 bp, Homo sapiens
  siRNA target sequence for SAP130 (NM_024545.2,1788-1806).
cgcatgctcgacatattca

SEQ ID NO: 386979 - DNA, 19 bp, Homo sapiens
  siRNA target sequence for SAP130 (NM_024545.2,1889-1907).
ggcacacagggaattcact

SEQ ID NO: 386980 - DNA, 19 bp, Homo sapiens
  siRNA target sequence for SAP130 (NM_024545.2,1999-2017).
ggcagatggagccacaatt

SEQ ID NO: 386981 - DNA, 19 bp, Homo sapiens
  siRNA target sequence for SAP130 (NM_024545.2,2001-2019).
cagatggagccacaattgt

SEQ ID NO: 386982 - DNA, 19 bp, Homo sapiens
  siRNA target sequence for SAP130 (NM_024545.2,2018-2036).
gtggccaaccctattagca

SEQ ID NO: 386983 - DNA, 19 bp, Homo sapiens
  siRNA target sequence for SAP130 (NM_024545.2,2020-2038).
ggccaaccctattagcaat

SEQ ID NO: 386984 - DNA, 19 bp, Homo sapiens
  siRNA target sequence for SAP130 (NM_024545.2,2216-2234).
gtgtccatggagactgtat

SEQ ID NO: 386985 - DNA, 19 bp, Homo sapiens
  siRNA target sequence for SAP130 (NM_024545.2,2224-2242).
ggagactgtatccaatcaa

SEQ ID NO: 386986 - DNA, 19 bp, Homo sapiens
  siRNA target sequence for SAP130 (NM_024545.2,2292-2310).
caccgaccattccaactat

SEQ ID NO: 386987 - DNA, 19 bp, Homo sapiens
  siRNA target sequence for SAP130 (NM_024545.2,2294-2312).
ccgaccattccaactatga

SEQ ID NO: 386988 - DNA, 19 bp, Homo sapiens
  siRNA target sequence for SAP130 (NM_024545.2,2339-2357).
ccagccgttgccctttcaa

SEQ ID NO: 386989 - DNA, 19 bp, Homo sapiens
  siRNA target sequence for SAP130 (NM_024545.2,2344-2362).
cgttgccctttcaaccatt

SEQ ID NO: 386990 - DNA, 19 bp, Homo sapiens
  siRNA target sequence for SAP130 (NM_024545.2,2457-2475).
gccctcccgttcctgaaat

SEQ ID NO: 386991 - DNA, 19 bp, Homo sapiens
  siRNA target sequence for SAP130 (NM_024545.2,2458-2476).
ccctcccgttcctgaaatt

SEQ ID NO: 386992 - DNA, 19 bp, Homo sapiens
  siRNA target sequence for SAP130 (NM_024545.2,2459-2477).
cctcccgttcctgaaatta

SEQ ID NO: 386993 - DNA, 19 bp, Homo sapiens
  siRNA target sequence for SAP130 (NM_024545.2,2460-2478).
ctcccgttcctgaaattaa

SEQ ID NO: 386994 - DNA, 19 bp, Homo sapiens
  siRNA target sequence for SAP130 (NM_024545.2,2492-2510).
gtagaaccaatggatatca

SEQ ID NO: 386995 - DNA, 19 bp, Homo sapiens
  siRNA target sequence for SAP130 (NM_024545.2,2584-2602).
cttgtccatgcctacaagt

SEQ ID NO: 386996 - DNA, 19 bp, Homo sapiens
  siRNA target sequence for SAP130 (NM_024545.2,2629-2647).
gaaaaagcctcgaaagcaa

SEQ ID NO: 386997 - DNA, 19 bp, Homo sapiens
  siRNA target sequence for SAP130 (NM_024545.2,2645-2663).
caacagcatgtgatctcaa

SEQ ID NO: 386998 - DNA, 19 bp, Homo sapiens
  siRNA target sequence for SAP130 (NM_024545.2,2807-2825).
ccaagaccccccattactt

SEQ ID NO: 386999 - DNA, 19 bp, Homo sapiens
  siRNA target sequence for SAP130 (NM_024545.2,2808-2826).
caagaccccccattacttt

SEQ ID NO: 387000 - DNA, 19 bp, Homo sapiens
  siRNA target sequence for SAP130 (NM_024545.2,2883-2901).
gtgacgtccgggtcaaaga

SEQ ID NO: 387001 - DNA, 19 bp, Homo sapiens
  siRNA target sequence for SAP130 (NM_024545.2,2982-3000).
gtgctgcccagttactaca

SEQ ID NO: 387002 - DNA, 19 bp, Homo sapiens
  siRNA target sequence for SAP130 (NM_024545.2,3001-3019).
gctgacgaatctagaacat

SEQ ID NO: 387003 - DNA, 19 bp, Homo sapiens
  siRNA target sequence for SAP130 (NM_024545.2,3004-3022).
gacgaatctagaacatgat

SEQ ID NO: 387004 - DNA, 19 bp, Homo sapiens
  siRNA target sequence for SAP130 (NM_024545.2,3014-3032).
gaacatgatgtctatgaaa

SEQ ID NO: 387005 - DNA, 19 bp, Homo sapiens
  siRNA target sequence for SAP130 (NM_024545.2,3086-3104).
gatgatctccaccgaataa

SEQ ID NO: 387006 - DNA, 19 bp, Homo sapiens
  siRNA target sequence for SAP130 (NM_024545.2,3097-3115).
ccgaataaacgaactgata

SEQ ID NO: 387007 - DNA, 19 bp, Homo sapiens
  siRNA target sequence for SAP130 (NM_024545.2,3140-3158).
cttgtgatggatcaaatca

SEQ ID NO: 387008 - DNA, 19 bp, Homo sapiens
  siRNA target sequence for SAP130 (NM_024545.2,3175-3193).
catgcttaaggttttagat

SEQ ID NO: 387009 - DNA, 19 bp, Homo sapiens
  siRNA target sequence for SAP130 (NM_024545.2,3178-3196).
gcttaaggttttagatcat

SEQ ID NO: 387010 - DNA, 19 bp, Homo sapiens
  siRNA target sequence for SAP130 (NM_024545.2,3179-3197).
cttaaggttttagatcata

SEQ ID NO: 387011 - DNA, 19 bp, Homo sapiens
  siRNA target sequence for SAP130 (NM_024545.2,3236-3254).
gtcaaaaaagtgtccaaat

SEQ ID NO: 387012 - DNA, 19 bp, Homo sapiens
  siRNA target sequence for C13orf7 (NM_024546.2,316-334).
gaagcatcttcggaaaact

SEQ ID NO: 387013 - DNA, 19 bp, Homo sapiens
  siRNA target sequence for C13orf7 (NM_024546.2,319-337).
gcatcttcggaaaactaga

SEQ ID NO: 387014 - DNA, 19 bp, Homo sapiens
  siRNA target sequence for C13orf7 (NM_024546.2,326-344).
cggaaaactagacttgaat

SEQ ID NO: 387015 - DNA, 19 bp, Homo sapiens
  siRNA target sequence for C13orf7 (NM_024546.2,327-345).
ggaaaactagacttgaatt

SEQ ID NO: 387016 - DNA, 19 bp, Homo sapiens
  siRNA target sequence for C13orf7 (NM_024546.2,328-346).
gaaaactagacttgaatta

SEQ ID NO: 387017 - DNA, 19 bp, Homo sapiens
  siRNA target sequence for C13orf7 (NM_024546.2,333-351).
ctagacttgaattactaca

SEQ ID NO: 387018 - DNA, 19 bp, Homo sapiens
  siRNA target sequence for C13orf7 (NM_024546.2,336-354).
gacttgaattactacacaa

SEQ ID NO: 387019 - DNA, 19 bp, Homo sapiens
  siRNA target sequence for C13orf7 (NM_024546.2,362-380).
gaggacgaaatagattgtt

SEQ ID NO: 387020 - DNA, 19 bp, Homo sapiens
  siRNA target sequence for C13orf7 (NM_024546.2,364-382).
ggacgaaatagattgttta

SEQ ID NO: 387021 - DNA, 19 bp, Homo sapiens
  siRNA target sequence for C13orf7 (NM_024546.2,392-410).
gtagaagagcttaagagta

SEQ ID NO: 387022 - DNA, 19 bp, Homo sapiens
  siRNA target sequence for C13orf7 (NM_024546.2,429-447).
cacagatcaaaactattct

SEQ ID NO: 387023 - DNA, 19 bp, Homo sapiens
  siRNA target sequence for C13orf7 (NM_024546.2,463-481).
ggtgcagggcaaccaaaat

SEQ ID NO: 387024 - DNA, 19 bp, Homo sapiens
  siRNA target sequence for C13orf7 (NM_024546.2,466-484).
gcagggcaaccaaaatgaa

SEQ ID NO: 387025 - DNA, 19 bp, Homo sapiens
  siRNA target sequence for C13orf7 (NM_024546.2,471-489).
gcaaccaaaatgaagacaa

SEQ ID NO: 387026 - DNA, 19 bp, Homo sapiens
  siRNA target sequence for C13orf7 (NM_024546.2,494-512).
ctagtcacagataatccaa

SEQ ID NO: 387027 - DNA, 19 bp, Homo sapiens
  siRNA target sequence for C13orf7 (NM_024546.2,499-517).
cacagataatccaagtaaa

SEQ ID NO: 387028 - DNA, 19 bp, Homo sapiens
  siRNA target sequence for C13orf7 (NM_024546.2,590-608).
gatgatgtggataagctaa

SEQ ID NO: 387029 - DNA, 19 bp, Homo sapiens
  siRNA target sequence for C13orf7 (NM_024546.2,644-662).
ggtctggtgagggagaatt

SEQ ID NO: 387030 - DNA, 19 bp, Homo sapiens
  siRNA target sequence for C13orf7 (NM_024546.2,673-691).
ggctgaagttgataacaga

SEQ ID NO: 387031 - DNA, 19 bp, Homo sapiens
  siRNA target sequence for C13orf7 (NM_024546.2,674-692).
gctgaagttgataacagat

SEQ ID NO: 387032 - DNA, 19 bp, Homo sapiens
  siRNA target sequence for C13orf7 (NM_024546.2,726-744).
ctcttcagtccaaagtaga

SEQ ID NO: 387033 - DNA, 19 bp, Homo sapiens
  siRNA target sequence for C13orf7 (NM_024546.2,748-766).
gtatgagcgtgaaaccaat

SEQ ID NO: 387034 - DNA, 19 bp, Homo sapiens
  siRNA target sequence for C13orf7 (NM_024546.2,784-802).
ggaacgaagtgataagtat

SEQ ID NO: 387035 - DNA, 19 bp, Homo sapiens
  siRNA target sequence for C13orf7 (NM_024546.2,785-803).
gaacgaagtgataagtata

SEQ ID NO: 387036 - DNA, 19 bp, Homo sapiens
  siRNA target sequence for C13orf7 (NM_024546.2,857-875).
gaagctatgaattccattt

SEQ ID NO: 387037 - DNA, 19 bp, Homo sapiens
  siRNA target sequence for C13orf7 (NM_024546.2,1060-1078).
caaagcagaccttaactgt

SEQ ID NO: 387038 - DNA, 19 bp, Homo sapiens
  siRNA target sequence for C13orf7 (NM_024546.2,1064-1082).
gcagaccttaactgttcta

SEQ ID NO: 387039 - DNA, 19 bp, Homo sapiens
  siRNA target sequence for C13orf7 (NM_024546.2,1065-1083).
cagaccttaactgttctaa

SEQ ID NO: 387040 - DNA, 19 bp, Homo sapiens
  siRNA target sequence for C13orf7 (NM_024546.2,1084-1102).
gaacaaagacctatatcaa

SEQ ID NO: 387041 - DNA, 19 bp, Homo sapiens
  siRNA target sequence for C13orf7 (NM_024546.2,1108-1126).
ggtagaagtaatgttagat

SEQ ID NO: 387042 - DNA, 19 bp, Homo sapiens
  siRNA target sequence for C13orf7 (NM_024546.2,1124-1142).
gatgtgacagatacaagta

SEQ ID NO: 387043 - DNA, 19 bp, Homo sapiens
  siRNA target sequence for C13orf7 (NM_024546.2,1129-1147).
gacagatacaagtatggat

SEQ ID NO: 387044 - DNA, 19 bp, Homo sapiens
  siRNA target sequence for C13orf7 (NM_024546.2,1188-1206).
gtgtaccctacaaagatga

SEQ ID NO: 387045 - DNA, 19 bp, Homo sapiens
  siRNA target sequence for C13orf7 (NM_024546.2,1312-1330).
caaaaagcactcaaaccat

SEQ ID NO: 387046 - DNA, 19 bp, Homo sapiens
  siRNA target sequence for C13orf7 (NM_024546.2,1333-1351).
cagaaaattggtgtttgat

SEQ ID NO: 387047 - DNA, 19 bp, Homo sapiens
  siRNA target sequence for C13orf7 (NM_024546.2,1479-1497).
caagctatgcccaaaactt

SEQ ID NO: 387048 - DNA, 19 bp, Homo sapiens
  siRNA target sequence for C13orf7 (NM_024546.2,1482-1500).
gctatgcccaaaacttaga

SEQ ID NO: 387049 - DNA, 19 bp, Homo sapiens
  siRNA target sequence for C13orf7 (NM_024546.2,1483-1501).
ctatgcccaaaacttagat

SEQ ID NO: 387050 - DNA, 19 bp, Homo sapiens
  siRNA target sequence for C13orf7 (NM_024546.2,1514-1532).
gaggggaacacgatagcaa

SEQ ID NO: 387051 - DNA, 19 bp, Homo sapiens
  siRNA target sequence for C13orf7 (NM_024546.2,1519-1537).
gaacacgatagcaaattct

SEQ ID NO: 387052 - DNA, 19 bp, Homo sapiens
  siRNA target sequence for C13orf7 (NM_024546.2,1522-1540).
cacgatagcaaattctgtt

SEQ ID NO: 387053 - DNA, 19 bp, Homo sapiens
  siRNA target sequence for C13orf7 (NM_024546.2,1572-1590).
caggcttatgtttatccaa

SEQ ID NO: 387054 - DNA, 19 bp, Homo sapiens
  siRNA target sequence for C13orf7 (NM_024546.2,1602-1620).
ctattcgctcttttgaaat

SEQ ID NO: 387055 - DNA, 19 bp, Homo sapiens
  siRNA target sequence for C13orf7 (NM_024546.2,1616-1634).
gaaatgaaccggacaagaa

SEQ ID NO: 387056 - DNA, 19 bp, Homo sapiens
  siRNA target sequence for C13orf7 (NM_024546.2,1680-1698).
ctgagttggattcaatgat

SEQ ID NO: 387057 - DNA, 19 bp, Homo sapiens
  siRNA target sequence for C13orf7 (NM_024546.2,1714-1732).
cagcaagagcccttgtaat

SEQ ID NO: 387058 - DNA, 19 bp, Homo sapiens
  siRNA target sequence for C13orf7 (NM_024546.2,1716-1734).
gcaagagcccttgtaataa

SEQ ID NO: 387059 - DNA, 19 bp, Homo sapiens
  siRNA target sequence for C13orf7 (NM_024546.2,1724-1742).
ccttgtaataacggtttta

SEQ ID NO: 387060 - DNA, 19 bp, Homo sapiens
  siRNA target sequence for C13orf7 (NM_024546.2,1725-1743).
cttgtaataacggttttaa

SEQ ID NO: 387061 - DNA, 19 bp, Homo sapiens
  siRNA target sequence for C13orf7 (NM_024546.2,1756-1774).
ggatgggttatcaaagtca

SEQ ID NO: 387062 - DNA, 19 bp, Homo sapiens
  siRNA target sequence for C13orf7 (NM_024546.2,1762-1780).
gttatcaaagtcatctcaa

SEQ ID NO: 387063 - DNA, 19 bp, Homo sapiens
  siRNA target sequence for C13orf7 (NM_024546.2,1776-1794).
ctcaaggcagtgaatttct

SEQ ID NO: 387064 - DNA, 19 bp, Homo sapiens
  siRNA target sequence for C13orf7 (NM_024546.2,1793-1811).
cttgaggaacctgataagt

SEQ ID NO: 387065 - DNA, 19 bp, Homo sapiens
  siRNA target sequence for C13orf7 (NM_024546.2,1824-1842).
ctgagctaaacctttccaa

SEQ ID NO: 387066 - DNA, 19 bp, Homo sapiens
  siRNA target sequence for C13orf7 (NM_024546.2,1839-1857).
ccaaaggttctctaactaa

SEQ ID NO: 387067 - DNA, 19 bp, Homo sapiens
  siRNA target sequence for C13orf7 (NM_024546.2,1840-1858).
caaaggttctctaactaat

SEQ ID NO: 387068 - DNA, 19 bp, Homo sapiens
  siRNA target sequence for C13orf7 (NM_024546.2,1845-1863).
gttctctaactaatgatca

SEQ ID NO: 387069 - DNA, 19 bp, Homo sapiens
  siRNA target sequence for C13orf7 (NM_024546.2,1848-1866).
ctctaactaatgatcagtt

SEQ ID NO: 387070 - DNA, 19 bp, Homo sapiens
  siRNA target sequence for C13orf7 (NM_024546.2,1880-1898).
gaatggaaacccacttctt

SEQ ID NO: 387071 - DNA, 19 bp, Homo sapiens
  siRNA target sequence for FLJ23047 (NM_024548.2,70-88).
ggatcagtggtcaattggt

SEQ ID NO: 387072 - DNA, 19 bp, Homo sapiens
  siRNA target sequence for FLJ23047 (NM_024548.2,89-107).
caggacagggactacagaa

SEQ ID NO: 387073 - DNA, 19 bp, Homo sapiens
  siRNA target sequence for FLJ23047 (NM_024548.2,91-109).
ggacagggactacagaaat

SEQ ID NO: 387074 - DNA, 19 bp, Homo sapiens
  siRNA target sequence for FLJ23047 (NM_024548.2,96-114).
gggactacagaaattaggt

SEQ ID NO: 387075 - DNA, 19 bp, Homo sapiens
  siRNA target sequence for FLJ23047 (NM_024548.2,189-207).
ggagaaatgcaaacgatta

SEQ ID NO: 387076 - DNA, 19 bp, Homo sapiens
  siRNA target sequence for FLJ23047 (NM_024548.2,197-215).
gcaaacgattaatacagtt

SEQ ID NO: 387077 - DNA, 19 bp, Homo sapiens
  siRNA target sequence for FLJ23047 (NM_024548.2,198-216).
caaacgattaatacagtta

SEQ ID NO: 387078 - DNA, 19 bp, Homo sapiens
  siRNA target sequence for FLJ23047 (NM_024548.2,203-221).
gattaatacagttatcagt

SEQ ID NO: 387079 - DNA, 19 bp, Homo sapiens
  siRNA target sequence for FLJ23047 (NM_024548.2,211-229).
cagttatcagtagctaata

SEQ ID NO: 387080 - DNA, 19 bp, Homo sapiens
  siRNA target sequence for FLJ23047 (NM_024548.2,264-282).
gacgttgcttcgtgtatta

SEQ ID NO: 387081 - DNA, 19 bp, Homo sapiens
  siRNA target sequence for FLJ23047 (NM_024548.2,266-284).
cgttgcttcgtgtattaaa

SEQ ID NO: 387082 - DNA, 19 bp, Homo sapiens
  siRNA target sequence for FLJ23047 (NM_024548.2,267-285).
gttgcttcgtgtattaaat

SEQ ID NO: 387083 - DNA, 19 bp, Homo sapiens
  siRNA target sequence for FLJ23047 (NM_024548.2,317-335).
ggctaaaggaactagtaca

SEQ ID NO: 387084 - DNA, 19 bp, Homo sapiens
  siRNA target sequence for FLJ23047 (NM_024548.2,318-336).
gctaaaggaactagtacat

SEQ ID NO: 387085 - DNA, 19 bp, Homo sapiens
  siRNA target sequence for FLJ23047 (NM_024548.2,373-391).
gccatggaacagatcaata

SEQ ID NO: 387086 - DNA, 19 bp, Homo sapiens
  siRNA target sequence for FLJ23047 (NM_024548.2,401-419).
ctctacagcatctcgattt

SEQ ID NO: 387087 - DNA, 19 bp, Homo sapiens
  siRNA target sequence for FLJ23047 (NM_024548.2,414-432).
cgatttatcagacaataat

SEQ ID NO: 387088 - DNA, 19 bp, Homo sapiens
  siRNA target sequence for FLJ23047 (NM_024548.2,439-457).
cagataggtgatctatcta

SEQ ID NO: 387089 - DNA, 19 bp, Homo sapiens
  siRNA target sequence for FLJ23047 (NM_024548.2,441-459).
gataggtgatctatctaaa

SEQ ID NO: 387090 - DNA, 19 bp, Homo sapiens
  siRNA target sequence for FLJ23047 (NM_024548.2,446-464).
gtgatctatctaaattggt

SEQ ID NO: 387091 - DNA, 19 bp, Homo sapiens
  siRNA target sequence for FLJ23047 (NM_024548.2,471-489).
gaaaaccctgcttttacat

SEQ ID NO: 387092 - DNA, 19 bp, Homo sapiens
  siRNA target sequence for FLJ23047 (NM_024548.2,534-552).
cagaagtcttgctatactt

SEQ ID NO: 387093 - DNA, 19 bp, Homo sapiens
  siRNA target sequence for FLJ23047 (NM_024548.2,539-557).
gtcttgctatactttcttt

SEQ ID NO: 387094 - DNA, 19 bp, Homo sapiens
  siRNA target sequence for FLJ23047 (NM_024548.2,577-595).
gacttaaatgagatctctt

SEQ ID NO: 387095 - DNA, 19 bp, Homo sapiens
  siRNA target sequence for FLJ23047 (NM_024548.2,719-737).
gagtcctagatggatatgt

SEQ ID NO: 387096 - DNA, 19 bp, Homo sapiens
  siRNA target sequence for FLJ23047 (NM_024548.2,724-742).
ctagatggatatgtgattt

SEQ ID NO: 387097 - DNA, 19 bp, Homo sapiens
  siRNA target sequence for FLJ23047 (NM_024548.2,816-834).
catccagcttgtccaatat

SEQ ID NO: 387098 - DNA, 19 bp, Homo sapiens
  siRNA target sequence for FLJ23047 (NM_024548.2,849-867).
ccccctcacttctacacta

SEQ ID NO: 387099 - DNA, 19 bp, Homo sapiens
  siRNA target sequence for FLJ23047 (NM_024548.2,889-907).
gccaaactagagaagattt

SEQ ID NO: 387100 - DNA, 19 bp, Homo sapiens
  siRNA target sequence for FLJ23047 (NM_024548.2,1000-1018).
cttattcctgagcattcaa

SEQ ID NO: 387101 - DNA, 19 bp, Homo sapiens
  siRNA target sequence for FLJ23047 (NM_024548.2,1011-1029).
gcattcaagccctgttcaa

SEQ ID NO: 387102 - DNA, 19 bp, Homo sapiens
  siRNA target sequence for FLJ23047 (NM_024548.2,1024-1042).
gttcaagattgccagatat

SEQ ID NO: 387103 - DNA, 19 bp, Homo sapiens
  siRNA target sequence for FLJ23047 (NM_024548.2,1057-1075).
cccgtcattcaagtgaatt

SEQ ID NO: 387104 - DNA, 19 bp, Homo sapiens
  siRNA target sequence for FLJ23047 (NM_024548.2,1060-1078).
gtcattcaagtgaattctt

SEQ ID NO: 387105 - DNA, 19 bp, Homo sapiens
  siRNA target sequence for FLJ23047 (NM_024548.2,1085-1103).
ggataaacagtaatgatga

SEQ ID NO: 387106 - DNA, 19 bp, Homo sapiens
  siRNA target sequence for FLJ23047 (NM_024548.2,1092-1110).
cagtaatgatgatcagtta

SEQ ID NO: 387107 - DNA, 19 bp, Homo sapiens
  siRNA target sequence for FLJ23047 (NM_024548.2,1094-1112).
gtaatgatgatcagttatt

SEQ ID NO: 387108 - DNA, 19 bp, Homo sapiens
  siRNA target sequence for FLJ23047 (NM_024548.2,1105-1123).
cagttatttgcggttaaga

SEQ ID NO: 387109 - DNA, 19 bp, Homo sapiens
  siRNA target sequence for FLJ23047 (NM_024548.2,1107-1125).
gttatttgcggttaagaat

SEQ ID NO: 387110 - DNA, 19 bp, Homo sapiens
  siRNA target sequence for FLJ23047 (NM_024548.2,1141-1159).
gtacacactacgagatatt

SEQ ID NO: 387111 - DNA, 19 bp, Homo sapiens
  siRNA target sequence for FLJ23047 (NM_024548.2,1154-1172).
gatattctcgaaatgatct

SEQ ID NO: 387112 - DNA, 19 bp, Homo sapiens
  siRNA target sequence for FLJ23047 (NM_024548.2,1191-1209).
gacggatgaggacaagtta

SEQ ID NO: 387113 - DNA, 19 bp, Homo sapiens
  siRNA target sequence for FLJ23047 (NM_024548.2,1193-1211).
cggatgaggacaagttaaa

SEQ ID NO: 387114 - DNA, 19 bp, Homo sapiens
  siRNA target sequence for FLJ23047 (NM_024548.2,1357-1375).
gaaagccaggtgttggata

SEQ ID NO: 387115 - DNA, 19 bp, Homo sapiens
  siRNA target sequence for FLJ23047 (NM_024548.2,1408-1426).
gagaattctgttcaaatga

SEQ ID NO: 387116 - DNA, 19 bp, Homo sapiens
  siRNA target sequence for FLJ23047 (NM_024548.2,1425-1443).
gatgagaagtgaaatcaat

SEQ ID NO: 387117 - DNA, 19 bp, Homo sapiens
  siRNA target sequence for FLJ23047 (NM_024548.2,1480-1498).
cctgagccaacaataatca

SEQ ID NO: 387118 - DNA, 19 bp, Homo sapiens
  siRNA target sequence for FLJ23047 (NM_024548.2,1490-1508).
caataatcagtgctatctt

SEQ ID NO: 387119 - DNA, 19 bp, Homo sapiens
  siRNA target sequence for FLJ23047 (NM_024548.2,1516-1534).
gataaccacagtcttacat

SEQ ID NO: 387120 - DNA, 19 bp, Homo sapiens
  siRNA target sequence for FLJ23047 (NM_024548.2,1667-1685).
ctttgggacaagacaaagt

SEQ ID NO: 387121 - DNA, 19 bp, Homo sapiens
  siRNA target sequence for FLJ23047 (NM_024548.2,1684-1702).
gttgcccttcagaaattaa

SEQ ID NO: 387122 - DNA, 19 bp, Homo sapiens
  siRNA target sequence for FLJ23047 (NM_024548.2,1770-1788).
caaagatgtgcgttacgaa

SEQ ID NO: 387123 - DNA, 19 bp, Homo sapiens
  siRNA target sequence for FLJ23047 (NM_024548.2,1791-1809).
ccggctacgcagaatgcaa

SEQ ID NO: 387124 - DNA, 19 bp, Homo sapiens
  siRNA target sequence for FLJ23047 (NM_024548.2,1802-1820).
gaatgcaagagcacattgt

SEQ ID NO: 387125 - DNA, 19 bp, Homo sapiens
  siRNA target sequence for FLJ23047 (NM_024548.2,1810-1828).
gagcacattgtctgcttaa

SEQ ID NO: 387126 - DNA, 19 bp, Homo sapiens
  siRNA target sequence for FLJ23047 (NM_024548.2,1812-1830).
gcacattgtctgcttaact

SEQ ID NO: 387127 - DNA, 19 bp, Homo sapiens
  siRNA target sequence for FLJ23047 (NM_024548.2,1951-1969).
gtggaccagcgtctaagtt

SEQ ID NO: 387128 - DNA, 19 bp, Homo sapiens
  siRNA target sequence for FLJ23047 (NM_024548.2,1984-2002).
gttcctcctatatcaagta

SEQ ID NO: 387129 - DNA, 19 bp, Homo sapiens
  siRNA target sequence for FLJ23047 (NM_024548.2,2011-2029).
ccatcgaaacatccattat

SEQ ID NO: 387130 - DNA, 19 bp, Homo sapiens
  siRNA target sequence for FLJ23047 (NM_024548.2,2012-2030).
catcgaaacatccattatt

SEQ ID NO: 387131 - DNA, 19 bp, Homo sapiens
  siRNA target sequence for FLJ23047 (NM_024548.2,2044-2062).
gagtcctcttgtgatcaaa

SEQ ID NO: 387132 - DNA, 19 bp, Homo sapiens
  siRNA target sequence for FLJ23047 (NM_024548.2,2142-2160).
ctctctaacagaacaagtt

SEQ ID NO: 387133 - DNA, 19 bp, Homo sapiens
  siRNA target sequence for FLJ23047 (NM_024548.2,2219-2237).
ccataatggggaattccat

SEQ ID NO: 387134 - DNA, 19 bp, Homo sapiens
  siRNA target sequence for FLJ23047 (NM_024548.2,2220-2238).
cataatggggaattccatt

SEQ ID NO: 387135 - DNA, 19 bp, Homo sapiens
  siRNA target sequence for FLJ23047 (NM_024548.2,2235-2253).
cattgacacagtcagatat

SEQ ID NO: 387136 - DNA, 19 bp, Homo sapiens
  siRNA target sequence for FLJ23047 (NM_024548.2,2273-2291).
gggatgttagtgaagaaca

SEQ ID NO: 387137 - DNA, 19 bp, Homo sapiens
  siRNA target sequence for FLJ23047 (NM_024548.2,2336-2354).
gtctgcttgaacagtattt

SEQ ID NO: 387138 - DNA, 19 bp, Homo sapiens
  siRNA target sequence for FLJ23047 (NM_024548.2,2380-2398).
gctgatgagaggaccaatt

SEQ ID NO: 387139 - DNA, 19 bp, Homo sapiens
  siRNA target sequence for FLJ23047 (NM_024548.2,2388-2406).
gaggaccaattttgataca

SEQ ID NO: 387140 - DNA, 19 bp, Homo sapiens
  siRNA target sequence for FLJ23047 (NM_024548.2,2390-2408).
ggaccaattttgatacaga

SEQ ID NO: 387141 - DNA, 19 bp, Homo sapiens
  siRNA target sequence for FLJ23047 (NM_024548.2,2438-2456).
gtttcccagtacagttaga

SEQ ID NO: 387142 - DNA, 19 bp, Homo sapiens
  siRNA target sequence for FLJ23047 (NM_024548.2,2446-2464).
gtacagttagatacattgt

SEQ ID NO: 387143 - DNA, 19 bp, Homo sapiens
  siRNA target sequence for FLJ23047 (NM_024548.2,2463-2481).
gtctgacggtgcttctgta

SEQ ID NO: 387144 - DNA, 19 bp, Homo sapiens
  siRNA target sequence for FLJ23047 (NM_024548.2,2496-2514).
catatctcctcctttgcaa

SEQ ID NO: 387145 - DNA, 19 bp, Homo sapiens
  siRNA target sequence for FLJ21127 (NM_024549.3,396-414).
gccagttttgtagtcaaaa

SEQ ID NO: 387146 - DNA, 19 bp, Homo sapiens
  siRNA target sequence for FLJ21127 (NM_024549.3,408-426).
gtcaaaaagcagtcatcta

SEQ ID NO: 387147 - DNA, 19 bp, Homo sapiens
  siRNA target sequence for FLJ21127 (NM_024549.3,416-434).
gcagtcatctattcattga

SEQ ID NO: 387148 - DNA, 19 bp, Homo sapiens
  siRNA target sequence for FLJ21127 (NM_024549.3,417-435).
cagtcatctattcattgaa

SEQ ID NO: 387149 - DNA, 19 bp, Homo sapiens
  siRNA target sequence for FLJ21127 (NM_024549.3,419-437).
gtcatctattcattgaatt

SEQ ID NO: 387150 - DNA, 19 bp, Homo sapiens
  siRNA target sequence for FLJ21127 (NM_024549.3,424-442).
ctattcattgaattttaca

SEQ ID NO: 387151 - DNA, 19 bp, Homo sapiens
  siRNA target sequence for FLJ21127 (NM_024549.3,478-496).
ccagattaatccatctatt

SEQ ID NO: 387152 - DNA, 19 bp, Homo sapiens
  siRNA target sequence for FLJ21127 (NM_024549.3,502-520).
cattcatattacaaactat

SEQ ID NO: 387153 - DNA, 19 bp, Homo sapiens
  siRNA target sequence for FLJ21127 (NM_024549.3,603-621).
cattgaatgctgaatcata

SEQ ID NO: 387154 - DNA, 19 bp, Homo sapiens
  siRNA target sequence for FLJ21127 (NM_024549.3,654-672).
ctgctgctaaatatgagta

SEQ ID NO: 387155 - DNA, 19 bp, Homo sapiens
  siRNA target sequence for FLJ21127 (NM_024549.3,685-703).
gcagacttcagattcgttt

SEQ ID NO: 387156 - DNA, 19 bp, Homo sapiens
  siRNA target sequence for FLJ21127 (NM_024549.3,821-839).
cttgaggtacctgattcaa

SEQ ID NO: 387157 - DNA, 19 bp, Homo sapiens
  siRNA target sequence for FLJ21127 (NM_024549.3,863-881).
cagtccatcgtcattcagt

SEQ ID NO: 387158 - DNA, 19 bp, Homo sapiens
  siRNA target sequence for FLJ21127 (NM_024549.3,872-890).
gtcattcagtctctaaata

SEQ ID NO: 387159 - DNA, 19 bp, Homo sapiens
  siRNA target sequence for FLJ21127 (NM_024549.3,937-955).
cgtcaacgctggacacttt

SEQ ID NO: 387160 - DNA, 19 bp, Homo sapiens
  siRNA target sequence for FLJ21127 (NM_024549.3,938-956).
gtcaacgctggacacttta

SEQ ID NO: 387161 - DNA, 19 bp, Homo sapiens
  siRNA target sequence for FLJ21127 (NM_024549.3,957-975).
gcctttgcgtgaatgttgt

SEQ ID NO: 387162 - DNA, 19 bp, Homo sapiens
  siRNA target sequence for FLJ21127 (NM_024549.3,958-976).
cctttgcgtgaatgttgtt

SEQ ID NO: 387163 - DNA, 19 bp, Homo sapiens
  siRNA target sequence for FLJ21127 (NM_024549.3,1132-1150).
cagtggaaaccctggttat

SEQ ID NO: 387164 - DNA, 19 bp, Homo sapiens
  siRNA target sequence for FLJ21127 (NM_024549.3,1134-1152).
gtggaaaccctggttatgt

SEQ ID NO: 387165 - DNA, 19 bp, Homo sapiens
  siRNA target sequence for FLJ21127 (NM_024549.3,1153-1171).
cgtggggctcccattagct

SEQ ID NO: 387166 - DNA, 19 bp, Homo sapiens
  siRNA target sequence for FLJ21127 (NM_024549.3,1173-1191).
ctggattccagcctcataa

SEQ ID NO: 387167 - DNA, 19 bp, Homo sapiens
  siRNA target sequence for FLJ21127 (NM_024549.3,1281-1299).
gggtccggaccccagtatt

SEQ ID NO: 387168 - DNA, 19 bp, Homo sapiens
  siRNA target sequence for FLJ21127 (NM_024549.3,1282-1300).
ggtccggaccccagtatta

SEQ ID NO: 387169 - DNA, 19 bp, Homo sapiens
  siRNA target sequence for FLJ21127 (NM_024549.3,1283-1301).
gtccggaccccagtattat

SEQ ID NO: 387170 - DNA, 19 bp, Homo sapiens
  siRNA target sequence for FLJ21127 (NM_024549.3,1285-1303).
ccggaccccagtattattt

SEQ ID NO: 387171 - DNA, 19 bp, Homo sapiens
  siRNA target sequence for FLJ21127 (NM_024549.3,1290-1308).
ccccagtattatttggtta

SEQ ID NO: 387172 - DNA, 19 bp, Homo sapiens
  siRNA target sequence for FLJ21127 (NM_024549.3,1518-1536).
gggctttggttatagaagt

SEQ ID NO: 387173 - DNA, 19 bp, Homo sapiens
  siRNA target sequence for FLJ21127 (NM_024549.3,1573-1591).
ggccaaaatagtcaatgta

SEQ ID NO: 387174 - DNA, 19 bp, Homo sapiens
  siRNA target sequence for FLJ20097 (NM_024553.2,279-297).
caagagcttattaatagta

SEQ ID NO: 387175 - DNA, 19 bp, Homo sapiens
  siRNA target sequence for FLJ20097 (NM_024553.2,320-338).
ggattcatttgatattgtt

SEQ ID NO: 387176 - DNA, 19 bp, Homo sapiens
  siRNA target sequence for FLJ20097 (NM_024553.2,356-374).
gcttccacctgttctcaat

SEQ ID NO: 387177 - DNA, 19 bp, Homo sapiens
  siRNA target sequence for FLJ20097 (NM_024553.2,366-384).
gttctcaatttgcaagaat

SEQ ID NO: 387178 - DNA, 19 bp, Homo sapiens
  siRNA target sequence for FLJ20097 (NM_024553.2,387-405).
gaggcgtatagagacaaat

SEQ ID NO: 387179 - DNA, 19 bp, Homo sapiens
  siRNA target sequence for FLJ20097 (NM_024553.2,416-434).
gcaagctgcagtatctaaa

SEQ ID NO: 387180 - DNA, 19 bp, Homo sapiens
  siRNA target sequence for FLJ20097 (NM_024553.2,441-459).
gcagatttaatccttgaaa

SEQ ID NO: 387181 - DNA, 19 bp, Homo sapiens
  siRNA target sequence for FLJ20097 (NM_024553.2,464-482).
gcctgcttatgtaaaggaa

SEQ ID NO: 387182 - DNA, 19 bp, Homo sapiens
  siRNA target sequence for FLJ20097 (NM_024553.2,506-524).
gacaggtcttcaattagct

SEQ ID NO: 387183 - DNA, 19 bp, Homo sapiens
  siRNA target sequence for FLJ20097 (NM_024553.2,516-534).
caattagctgctgttatct

SEQ ID NO: 387184 - DNA, 19 bp, Homo sapiens
  siRNA target sequence for FLJ20097 (NM_024553.2,522-540).
gctgctgttatctgtacaa

SEQ ID NO: 387185 - DNA, 19 bp, Homo sapiens
  siRNA target sequence for FLJ20097 (NM_024553.2,523-541).
ctgctgttatctgtacaaa

SEQ ID NO: 387186 - DNA, 19 bp, Homo sapiens
  siRNA target sequence for FLJ20097 (NM_024553.2,545-563).
gagaagacacttgaatatt

SEQ ID NO: 387187 - DNA, 19 bp, Homo sapiens
  siRNA target sequence for FLJ20097 (NM_024553.2,565-583).
caaaggaaggttttactca

SEQ ID NO: 387188 - DNA, 19 bp, Homo sapiens
  siRNA target sequence for FLJ20097 (NM_024553.2,589-607).
gtttaggccttcttgcaaa

SEQ ID NO: 387189 - DNA, 19 bp, Homo sapiens
  siRNA target sequence for FLJ20097 (NM_024553.2,594-612).
ggccttcttgcaaatcaaa

SEQ ID NO: 387190 - DNA, 19 bp, Homo sapiens
  siRNA target sequence for FLJ20097 (NM_024553.2,676-694).
cagatgtacggttaagtga

SEQ ID NO: 387191 - DNA, 19 bp, Homo sapiens
  siRNA target sequence for FLJ20097 (NM_024553.2,678-696).
gatgtacggttaagtgaaa

SEQ ID NO: 387192 - DNA, 19 bp, Homo sapiens
  siRNA target sequence for FLJ20097 (NM_024553.2,761-779).
cacttttaaacattacagt

SEQ ID NO: 387193 - DNA, 19 bp, Homo sapiens
  siRNA target sequence for FLJ20097 (NM_024553.2,839-857).
ggacgtagctctttccaaa

SEQ ID NO: 387194 - DNA, 19 bp, Homo sapiens
  siRNA target sequence for FLJ20097 (NM_024553.2,840-858).
gacgtagctctttccaaaa

SEQ ID NO: 387195 - DNA, 19 bp, Homo sapiens
  siRNA target sequence for FLJ20097 (NM_024553.2,934-952).
caatggatcaacttcatat

SEQ ID NO: 387196 - DNA, 19 bp, Homo sapiens
  siRNA target sequence for FLJ20097 (NM_024553.2,977-995).
caccgtgtttcaagttgtt

SEQ ID NO: 387197 - DNA, 19 bp, Homo sapiens
  siRNA target sequence for FLJ20097 (NM_024553.2,996-1014).
cttggttatgtggaactat

SEQ ID NO: 387198 - DNA, 19 bp, Homo sapiens
  siRNA target sequence for FLJ20097 (NM_024553.2,1071-1089).
gtatgtagtgacttaatta

SEQ ID NO: 387199 - DNA, 19 bp, Homo sapiens
  siRNA target sequence for FLJ20097 (NM_024553.2,1080-1098).
gacttaattactattcata

SEQ ID NO: 387200 - DNA, 19 bp, Homo sapiens
  siRNA target sequence for PGBD5 (NM_024554.2,22-40).
gctctcttcgtgcaaagta

SEQ ID NO: 387201 - DNA, 19 bp, Homo sapiens
  siRNA target sequence for PGBD5 (NM_024554.2,100-118).
ctgcagccaagcgattcat

SEQ ID NO: 387202 - DNA, 19 bp, Homo sapiens
  siRNA target sequence for PGBD5 (NM_024554.2,103-121).
cagccaagcgattcattca

SEQ ID NO: 387203 - DNA, 19 bp, Homo sapiens
  siRNA target sequence for PGBD5 (NM_024554.2,105-123).
gccaagcgattcattcaca

SEQ ID NO: 387204 - DNA, 19 bp, Homo sapiens
  siRNA target sequence for PGBD5 (NM_024554.2,146-164).
ctgtgtggtcagaacttga

SEQ ID NO: 387205 - DNA, 19 bp, Homo sapiens
  siRNA target sequence for PGBD5 (NM_024554.2,163-181).
gagcacatccgtggaaaat

SEQ ID NO: 387206 - DNA, 19 bp, Homo sapiens
  siRNA target sequence for PGBD5 (NM_024554.2,165-183).
gcacatccgtggaaaatca

SEQ ID NO: 387207 - DNA, 19 bp, Homo sapiens
  siRNA target sequence for PGBD5 (NM_024554.2,210-228).
cagccttccagggagtatt

SEQ ID NO: 387208 - DNA, 19 bp, Homo sapiens
  siRNA target sequence for PGBD5 (NM_024554.2,419-437).
gaggtcccacccgaaagat

SEQ ID NO: 387209 - DNA, 19 bp, Homo sapiens
  siRNA target sequence for PGBD5 (NM_024554.2,482-500).
cagacaacgtcctcaagaa

SEQ ID NO: 387210 - DNA, 19 bp, Homo sapiens
  siRNA target sequence for PGBD5 (NM_024554.2,596-614).
cgttcctgggctacatgat

SEQ ID NO: 387211 - DNA, 19 bp, Homo sapiens
  siRNA target sequence for PGBD5 (NM_024554.2,871-889).
gatgaggatcctgtattca

SEQ ID NO: 387212 - DNA, 19 bp, Homo sapiens
  siRNA target sequence for PGBD5 (NM_024554.2,1087-1105).
gcggcaggcaagaactaca

SEQ ID NO: 387213 - DNA, 19 bp, Homo sapiens
  siRNA target sequence for PGBD5 (NM_024554.2,1088-1106).
cggcaggcaagaactacat

SEQ ID NO: 387214 - DNA, 19 bp, Homo sapiens
  siRNA target sequence for PGBD5 (NM_024554.2,1091-1109).
caggcaagaactacatcat

SEQ ID NO: 387215 - DNA, 19 bp, Homo sapiens
  siRNA target sequence for PGBD5 (NM_024554.2,1131-1149).
cagcctgacgctgtttgaa

SEQ ID NO: 387216 - DNA, 19 bp, Homo sapiens
  siRNA target sequence for PGBD5 (NM_024554.2,1133-1151).
gcctgacgctgtttgaaga

SEQ ID NO: 387217 - DNA, 19 bp, Homo sapiens
  siRNA target sequence for PGBD5 (NM_024554.2,1262-1280).
gccagtaccaaatcaagat

SEQ ID NO: 387218 - DNA, 19 bp, Homo sapiens
  siRNA target sequence for PGBD5 (NM_024554.2,1264-1282).
cagtaccaaatcaagatga

SEQ ID NO: 387219 - DNA, 19 bp, Homo sapiens
  siRNA target sequence for PGBD5 (NM_024554.2,1359-1377).
gcagggagtcatcatcaaa

SEQ ID NO: 387220 - DNA, 19 bp, Homo sapiens
  siRNA target sequence for PGBD5 (NM_024554.2,1445-1463).
gcagatacgatgacaaata

SEQ ID NO: 387221 - DNA, 19 bp, Homo sapiens
  siRNA target sequence for PGBD5 (NM_024554.2,1456-1474).
gacaaatacagcaagtatt

SEQ ID NO: 387222 - DNA, 19 bp, Homo sapiens
  siRNA target sequence for PGBD5 (NM_024554.2,1527-1545).
cagcatcgccatcaacaat

SEQ ID NO: 387223 - DNA, 19 bp, Homo sapiens
  siRNA target sequence for PGBD5 (NM_024554.2,1546-1564).
gcctacatcctgtacaaaa

SEQ ID NO: 387224 - DNA, 19 bp, Homo sapiens
  siRNA target sequence for FLJ21103 (NM_024556.1,103-121).
gagccaggcctctgatata

SEQ ID NO: 387225 - DNA, 19 bp, Homo sapiens
  siRNA target sequence for FLJ21103 (NM_024556.1,105-123).
gccaggcctctgatataga

SEQ ID NO: 387226 - DNA, 19 bp, Homo sapiens
  siRNA target sequence for FLJ21103 (NM_024556.1,114-132).
ctgatatagacgagatttt

SEQ ID NO: 387227 - DNA, 19 bp, Homo sapiens
  siRNA target sequence for FLJ21103 (NM_024556.1,210-228).
gagaacttgtgctagtgat

SEQ ID NO: 387228 - DNA, 19 bp, Homo sapiens
  siRNA target sequence for FLJ21103 (NM_024556.1,421-439).
ctctcctcgtaccagtaat

SEQ ID NO: 387229 - DNA, 19 bp, Homo sapiens
  siRNA target sequence for FLJ21103 (NM_024556.1,423-441).
ctcctcgtaccagtaatgt

SEQ ID NO: 387230 - DNA, 19 bp, Homo sapiens
  siRNA target sequence for FLJ21103 (NM_024556.1,491-509).
gagtcaaagatggaagatt

SEQ ID NO: 387231 - DNA, 19 bp, Homo sapiens
  siRNA target sequence for FLJ21103 (NM_024556.1,554-572).
ggagccctcgtattaacta

SEQ ID NO: 387232 - DNA, 19 bp, Homo sapiens
  siRNA target sequence for FLJ21103 (NM_024556.1,557-575).
gccctcgtattaactacaa

SEQ ID NO: 387233 - DNA, 19 bp, Homo sapiens
  siRNA target sequence for FLJ21103 (NM_024556.1,559-577).
cctcgtattaactacaaat

SEQ ID NO: 387234 - DNA, 19 bp, Homo sapiens
  siRNA target sequence for FLJ21103 (NM_024556.1,611-629).
caggggaaacagcttgaat

SEQ ID NO: 387235 - DNA, 19 bp, Homo sapiens
  siRNA target sequence for FLJ21103 (NM_024556.1,736-754).
ccttcatccggctggatat

SEQ ID NO: 387236 - DNA, 19 bp, Homo sapiens
  siRNA target sequence for FLJ21103 (NM_024556.1,794-812).
cagaaactctacgaaaaca

SEQ ID NO: 387237 - DNA, 19 bp, Homo sapiens
  siRNA target sequence for FLJ21103 (NM_024556.1,802-820).
ctacgaaaacaagtcattt

SEQ ID NO: 387238 - DNA, 19 bp, Homo sapiens
  siRNA target sequence for FLJ21103 (NM_024556.1,878-896).
gaggctgtcaagcataaat

SEQ ID NO: 387239 - DNA, 19 bp, Homo sapiens
  siRNA target sequence for FLJ21103 (NM_024556.1,880-898).
ggctgtcaagcataaatct

SEQ ID NO: 387240 - DNA, 19 bp, Homo sapiens
  siRNA target sequence for FLJ21103 (NM_024556.1,927-945).
gaggagacgtagatgagtt

SEQ ID NO: 387241 - DNA, 19 bp, Homo sapiens
  siRNA target sequence for FLJ21103 (NM_024556.1,930-948).
gagacgtagatgagttcaa

SEQ ID NO: 387242 - DNA, 19 bp, Homo sapiens
  siRNA target sequence for FLJ21103 (NM_024556.1,932-950).
gacgtagatgagttcaaaa

SEQ ID NO: 387243 - DNA, 19 bp, Homo sapiens
  siRNA target sequence for FLJ21103 (NM_024556.1,971-989).
gacaaggggattaaagtca

SEQ ID NO: 387244 - DNA, 19 bp, Homo sapiens
  siRNA target sequence for FLJ21103 (NM_024556.1,1010-1028).
gccgatcttccagaatatt

SEQ ID NO: 387245 - DNA, 19 bp, Homo sapiens
  siRNA target sequence for FLJ21103 (NM_024556.1,1011-1029).
ccgatcttccagaatattt

SEQ ID NO: 387246 - DNA, 19 bp, Homo sapiens
  siRNA target sequence for FLJ21103 (NM_024556.1,1051-1069).
ctccacaaggggtacatca

SEQ ID NO: 387247 - DNA, 19 bp, Homo sapiens
  siRNA target sequence for FLJ21103 (NM_024556.1,1081-1099).
gagagaaggtcagctaaat

SEQ ID NO: 387248 - DNA, 19 bp, Homo sapiens
  siRNA target sequence for FLJ21103 (NM_024556.1,1109-1127).
gcagcacacagtgaaataa

SEQ ID NO: 387249 - DNA, 19 bp, Homo sapiens
  siRNA target sequence for FLJ21103 (NM_024556.1,1121-1139).
gaaataagaggctgtagta

SEQ ID NO: 387250 - DNA, 19 bp, Homo sapiens
  siRNA target sequence for RIC3 (NM_024557.2,149-167).
cgacacctgaaggaaaatt

SEQ ID NO: 387251 - DNA, 19 bp, Homo sapiens
  siRNA target sequence for RIC3 (NM_024557.2,179-197).
cacctatgatgcatcatca

SEQ ID NO: 387252 - DNA, 19 bp, Homo sapiens
  siRNA target sequence for RIC3 (NM_024557.2,249-267).
ccttgccgaggcatttgca

SEQ ID NO: 387253 - DNA, 19 bp, Homo sapiens
  siRNA target sequence for RIC3 (NM_024557.2,250-268).
cttgccgaggcatttgcaa

SEQ ID NO: 387254 - DNA, 19 bp, Homo sapiens
  siRNA target sequence for RIC3 (NM_024557.2,342-360).
ctacggttttgggattttt

SEQ ID NO: 387255 - DNA, 19 bp, Homo sapiens
  siRNA target sequence for RIC3 (NM_024557.2,598-616).
catcagctccgagaaatca

SEQ ID NO: 387256 - DNA, 19 bp, Homo sapiens
  siRNA target sequence for RIC3 (NM_024557.2,635-653).
gaaaattcattgacagatt

SEQ ID NO: 387257 - DNA, 19 bp, Homo sapiens
  siRNA target sequence for RIC3 (NM_024557.2,754-772).
cgtaggcaagaaacaatct

SEQ ID NO: 387258 - DNA, 19 bp, Homo sapiens
  siRNA target sequence for RIC3 (NM_024557.2,941-959).
gttcctgctgttttcatga

SEQ ID NO: 387259 - DNA, 19 bp, Homo sapiens
  siRNA target sequence for RIC3 (NM_024557.2,1046-1064).
ggtcccaagactttaaaga

SEQ ID NO: 387260 - DNA, 19 bp, Homo sapiens
  siRNA target sequence for RIC3 (NM_024557.2,1121-1139).
gtaacccccagggtttaga

SEQ ID NO: 387261 - DNA, 19 bp, Homo sapiens
  siRNA target sequence for C14orf138 (NM_024558.1,331-349).
gacttgctgaagatgaata

SEQ ID NO: 387262 - DNA, 19 bp, Homo sapiens
  siRNA target sequence for C14orf138 (NM_024558.1,422-440).
ccacccgacttcatactga

SEQ ID NO: 387263 - DNA, 19 bp, Homo sapiens
  siRNA target sequence for C14orf138 (NM_024558.1,423-441).
cacccgacttcatactgat

SEQ ID NO: 387264 - DNA, 19 bp, Homo sapiens
  siRNA target sequence for FLJ22054 (NM_024561.3,1187-1205).
ctgagggttaacttcagta

SEQ ID NO: 387265 - DNA, 19 bp, Homo sapiens
  siRNA target sequence for FLJ22054 (NM_024561.3,1213-1231).
cccacccttgtttactact

SEQ ID NO: 387266 - DNA, 19 bp, Homo sapiens
  siRNA target sequence for FLJ22054 (NM_024561.3,1215-1233).
cacccttgtttactacttt

SEQ ID NO: 387267 - DNA, 19 bp, Homo sapiens
  siRNA target sequence for FLJ22054 (NM_024561.3,1217-1235).
cccttgtttactactttga

SEQ ID NO: 387268 - DNA, 19 bp, Homo sapiens
  siRNA target sequence for FLJ22054 (NM_024561.3,1218-1236).
ccttgtttactactttgaa

SEQ ID NO: 387269 - DNA, 19 bp, Homo sapiens
  siRNA target sequence for FLJ22054 (NM_024561.3,1219-1237).
cttgtttactactttgaaa

SEQ ID NO: 387270 - DNA, 19 bp, Homo sapiens
  siRNA target sequence for FLJ22054 (NM_024561.3,1276-1294).
ggaacttgttactaattat

SEQ ID NO: 387271 - DNA, 19 bp, Homo sapiens
  siRNA target sequence for FLJ22054 (NM_024561.3,1295-1313).
gaagcctctcttaaaacgt

SEQ ID NO: 387272 - DNA, 19 bp, Homo sapiens
  siRNA target sequence for FLJ22054 (NM_024561.3,1348-1366).
ggaacccccgacaacacta

SEQ ID NO: 387273 - DNA, 19 bp, Homo sapiens
  siRNA target sequence for FLJ22054 (NM_024561.3,1362-1380).
cactactctgggttcagta

SEQ ID NO: 387274 - DNA, 19 bp, Homo sapiens
  siRNA target sequence for FLJ22054 (NM_024561.3,1364-1382).
ctactctgggttcagtatt

SEQ ID NO: 387275 - DNA, 19 bp, Homo sapiens
  siRNA target sequence for FLJ22054 (NM_024561.3,1400-1418).
gataaacttggacagtatt

SEQ ID NO: 387276 - DNA, 19 bp, Homo sapiens
  siRNA target sequence for FLJ22054 (NM_024561.3,1452-1470).
ctagtactccaactctaat

SEQ ID NO: 387277 - DNA, 19 bp, Homo sapiens
  siRNA target sequence for FLJ22054 (NM_024561.3,1455-1473).
gtactccaactctaataga

SEQ ID NO: 387278 - DNA, 19 bp, Homo sapiens
  siRNA target sequence for FLJ22054 (NM_024561.3,1458-1476).
ctccaactctaatagaatt

SEQ ID NO: 387279 - DNA, 19 bp, Homo sapiens
  siRNA target sequence for FLJ22054 (NM_024561.3,1460-1478).
ccaactctaatagaattat

SEQ ID NO: 387280 - DNA, 19 bp, Homo sapiens
  siRNA target sequence for FLJ22054 (NM_024561.3,1504-1522).
gcatataggtaatctcaaa

SEQ ID NO: 387281 - DNA, 19 bp, Homo sapiens
  siRNA target sequence for FLJ22054 (NM_024561.3,1559-1577).
gacacagctgatagattca

SEQ ID NO: 387282 - DNA, 19 bp, Homo sapiens
  siRNA target sequence for FLJ22054 (NM_024561.3,1603-1621).
gcttcgagcaaatatgata

SEQ ID NO: 387283 - DNA, 19 bp, Homo sapiens
  siRNA target sequence for FLJ22054 (NM_024561.3,1604-1622).
cttcgagcaaatatgataa

SEQ ID NO: 387284 - DNA, 19 bp, Homo sapiens
  siRNA target sequence for FLJ22054 (NM_024561.3,1665-1683).
catctgccatggaaaatct

SEQ ID NO: 387285 - DNA, 19 bp, Homo sapiens
  siRNA target sequence for FLJ22054 (NM_024561.3,1705-1723).
gtttcagacagaatgcatt

SEQ ID NO: 387286 - DNA, 19 bp, Homo sapiens
  siRNA target sequence for FLJ22054 (NM_024561.3,1808-1826).
gaccaattcgacttccata

SEQ ID NO: 387287 - DNA, 19 bp, Homo sapiens
  siRNA target sequence for FLJ22054 (NM_024561.3,1811-1829).
caattcgacttccatacat

SEQ ID NO: 387288 - DNA, 19 bp, Homo sapiens
  siRNA target sequence for FLJ22054 (NM_024561.3,1846-1864).
gacccttcgtgcctatgtt

SEQ ID NO: 387289 - DNA, 19 bp, Homo sapiens
  siRNA target sequence for FLJ22054 (NM_024561.3,1848-1866).
cccttcgtgcctatgttga

SEQ ID NO: 387290 - DNA, 19 bp, Homo sapiens
  siRNA target sequence for FLJ22054 (NM_024561.3,1919-1937).
gctagatcagcgattgaaa

SEQ ID NO: 387291 - DNA, 19 bp, Homo sapiens
  siRNA target sequence for FLJ22054 (NM_024561.3,1926-1944).
cagcgattgaaatatactt

SEQ ID NO: 387292 - DNA, 19 bp, Homo sapiens
  siRNA target sequence for FLJ22054 (NM_024561.3,1928-1946).
gcgattgaaatatacttga

SEQ ID NO: 387293 - DNA, 19 bp, Homo sapiens
  siRNA target sequence for FLJ22054 (NM_024561.3,1929-1947).
cgattgaaatatacttgaa

SEQ ID NO: 387294 - DNA, 19 bp, Homo sapiens
  siRNA target sequence for FLJ22054 (NM_024561.3,2097-2115).
gagaacgtcaacagaaaaa

SEQ ID NO: 387295 - DNA, 19 bp, Homo sapiens
  siRNA target sequence for FLJ22054 (NM_024561.3,2213-2231).
gaagccgttaagttcctta

SEQ ID NO: 387296 - DNA, 19 bp, Homo sapiens
  siRNA target sequence for FLJ22054 (NM_024561.3,2260-2278).
cattgacactcatctgtta

SEQ ID NO: 387297 - DNA, 19 bp, Homo sapiens
  siRNA target sequence for FLJ22054 (NM_024561.3,2336-2354).
cgagcttttgccattaaca

SEQ ID NO: 387298 - DNA, 19 bp, Homo sapiens
  siRNA target sequence for FLJ22054 (NM_024561.3,2353-2371).
cagtaataacccatggtta

SEQ ID NO: 387299 - DNA, 19 bp, Homo sapiens
  siRNA target sequence for FLJ22054 (NM_024561.3,2498-2516).
gaggattttctgaaacgta

SEQ ID NO: 387300 - DNA, 19 bp, Homo sapiens
  siRNA target sequence for FLJ22054 (NM_024561.3,2523-2541).
cctctcttcagcatctact

SEQ ID NO: 387301 - DNA, 19 bp, Homo sapiens
  siRNA target sequence for FLJ22054 (NM_024561.3,2537-2555).
ctactttcaggtgctaaaa

SEQ ID NO: 387302 - DNA, 19 bp, Homo sapiens
  siRNA target sequence for FLJ22054 (NM_024561.3,2581-2599).
gcaggagaaagcaattgct

SEQ ID NO: 387303 - DNA, 19 bp, Homo sapiens
  siRNA target sequence for FLJ22054 (NM_024561.3,2582-2600).
caggagaaagcaattgcta

SEQ ID NO: 387304 - DNA, 19 bp, Homo sapiens
  siRNA target sequence for FLJ22054 (NM_024561.3,2603-2621).
gccactagactagatgaaa

SEQ ID NO: 387305 - DNA, 19 bp, Homo sapiens
  siRNA target sequence for FLJ22054 (NM_024561.3,2605-2623).
cactagactagatgaaact

SEQ ID NO: 387306 - DNA, 19 bp, Homo sapiens
  siRNA target sequence for FLJ22054 (NM_024561.3,2607-2625).
ctagactagatgaaactat

SEQ ID NO: 387307 - DNA, 19 bp, Homo sapiens
  siRNA target sequence for FLJ22054 (NM_024561.3,2689-2707).
gaactgtagttcccaatat

SEQ ID NO: 387308 - DNA, 19 bp, Homo sapiens
  siRNA target sequence for FLJ22054 (NM_024561.3,2692-2710).
ctgtagttcccaatatgaa

SEQ ID NO: 387309 - DNA, 19 bp, Homo sapiens
  siRNA target sequence for FLJ22054 (NM_024561.3,2694-2712).
gtagttcccaatatgaaga

SEQ ID NO: 387310 - DNA, 19 bp, Homo sapiens
  siRNA target sequence for FLJ22054 (NM_024561.3,2697-2715).
gttcccaatatgaagaata

SEQ ID NO: 387311 - DNA, 19 bp, Homo sapiens
  siRNA target sequence for FLJ22054 (NM_024561.3,2702-2720).
caatatgaagaatatagga

SEQ ID NO: 387312 - DNA, 19 bp, Homo sapiens
  siRNA target sequence for FLJ22054 (NM_024561.3,2718-2736).
ggatggcctgtcataacct

SEQ ID NO: 387313 - DNA, 19 bp, Homo sapiens
  siRNA target sequence for FLJ22054 (NM_024561.3,2800-2818).
gaaccatacagctaattat

SEQ ID NO: 387314 - DNA, 19 bp, Homo sapiens
  siRNA target sequence for FLJ22054 (NM_024561.3,2808-2826).
cagctaattatgatgtctt

SEQ ID NO: 387315 - DNA, 19 bp, Homo sapiens
  siRNA target sequence for FLJ14054 (NM_024563.2,600-618).
gaaccatcaacttgtcttt

SEQ ID NO: 387316 - DNA, 19 bp, Homo sapiens
  siRNA target sequence for FLJ14054 (NM_024563.2,626-644).
ccacaggaatggttctaca

SEQ ID NO: 387317 - DNA, 19 bp, Homo sapiens
  siRNA target sequence for FLJ14054 (NM_024563.2,637-655).
gttctacagaccctactat

SEQ ID NO: 387318 - DNA, 19 bp, Homo sapiens
  siRNA target sequence for FLJ14054 (NM_024563.2,643-661).
cagaccctactataattct

SEQ ID NO: 387319 - DNA, 19 bp, Homo sapiens
  siRNA target sequence for FLJ14054 (NM_024563.2,780-798).
cctattcacaggcttctaa

SEQ ID NO: 387320 - DNA, 19 bp, Homo sapiens
  siRNA target sequence for FLJ14054 (NM_024563.2,781-799).
ctattcacaggcttctaaa

SEQ ID NO: 387321 - DNA, 19 bp, Homo sapiens
  siRNA target sequence for FLJ14054 (NM_024563.2,786-804).
cacaggcttctaaaatcat

SEQ ID NO: 387322 - DNA, 19 bp, Homo sapiens
  siRNA target sequence for FLJ14054 (NM_024563.2,844-862).
gcatcactttccttttagt

SEQ ID NO: 387323 - DNA, 19 bp, Homo sapiens
  siRNA target sequence for FLJ14054 (NM_024563.2,845-863).
catcactttccttttagtt

SEQ ID NO: 387324 - DNA, 19 bp, Homo sapiens
  siRNA target sequence for FLJ14166 (NM_024565.4,969-987).
caccctgcaagatcacata

SEQ ID NO: 387325 - DNA, 19 bp, Homo sapiens
  siRNA target sequence for FLJ14166 (NM_024565.4,1107-1125).
gcacctcagcacgtgtatt

SEQ ID NO: 387326 - DNA, 19 bp, Homo sapiens
  siRNA target sequence for FLJ14166 (NM_024565.4,1110-1128).
cctcagcacgtgtattgaa

SEQ ID NO: 387327 - DNA, 19 bp, Homo sapiens
  siRNA target sequence for FLJ14166 (NM_024565.4,1111-1129).
ctcagcacgtgtattgaaa

SEQ ID NO: 387328 - DNA, 19 bp, Homo sapiens
  siRNA target sequence for FLJ14166 (NM_024565.4,1298-1316).
ccgtgcaggacctatgctt

SEQ ID NO: 387329 - DNA, 19 bp, Homo sapiens
  siRNA target sequence for FLJ14166 (NM_024565.4,1442-1460).
catcccttagcatgcatat

SEQ ID NO: 387330 - DNA, 19 bp, Homo sapiens
  siRNA target sequence for FLJ14166 (NM_024565.4,1489-1507).
ctcgccaccacctatggaa

SEQ ID NO: 387331 - DNA, 19 bp, Homo sapiens
  siRNA target sequence for FLJ21047 (NM_024569.2,480-498).
cctggttgcagataacgaa

SEQ ID NO: 387332 - DNA, 19 bp, Homo sapiens
  siRNA target sequence for FLJ21047 (NM_024569.2,547-565).
gcaaacagggtcgtcttaa

SEQ ID NO: 387333 - DNA, 19 bp, Homo sapiens
  siRNA target sequence for FLJ21047 (NM_024569.2,548-566).
caaacagggtcgtcttaaa

SEQ ID NO: 387334 - DNA, 19 bp, Homo sapiens
  siRNA target sequence for FLJ21047 (NM_024569.2,581-599).
ctgtatgggagcactcaaa

SEQ ID NO: 387335 - DNA, 19 bp, Homo sapiens
  siRNA target sequence for FLJ21047 (NM_024569.2,591-609).
gcactcaaaaggcattact

SEQ ID NO: 387336 - DNA, 19 bp, Homo sapiens
  siRNA target sequence for FLJ11712 (NM_024570.1,423-441).
gagaaggagccatttactt

SEQ ID NO: 387337 - DNA, 19 bp, Homo sapiens
  siRNA target sequence for FLJ11712 (NM_024570.1,428-446).
ggagccatttacttgttca

SEQ ID NO: 387338 - DNA, 19 bp, Homo sapiens
  siRNA target sequence for FLJ11712 (NM_024570.1,429-447).
gagccatttacttgttcaa

SEQ ID NO: 387339 - DNA, 19 bp, Homo sapiens
  siRNA target sequence for FLJ11712 (NM_024570.1,494-512).
caccattcttggtttataa

SEQ ID NO: 387340 - DNA, 19 bp, Homo sapiens
  siRNA target sequence for FLJ11712 (NM_024570.1,552-570).
cacctgtggatcctctatt

SEQ ID NO: 387341 - DNA, 19 bp, Homo sapiens
  siRNA target sequence for FLJ11712 (NM_024570.1,613-631).
gtttcagccccttgatcaa

SEQ ID NO: 387342 - DNA, 19 bp, Homo sapiens
  siRNA target sequence for FLJ11712 (NM_024570.1,638-656).
gtggataacgtgtttccaa

SEQ ID NO: 387343 - DNA, 19 bp, Homo sapiens
  siRNA target sequence for FLJ11712 (NM_024570.1,640-658).
ggataacgtgtttccaaat

SEQ ID NO: 387344 - DNA, 19 bp, Homo sapiens
  siRNA target sequence for FLJ11712 (NM_024570.1,641-659).
gataacgtgtttccaaatt

SEQ ID NO: 387345 - DNA, 19 bp, Homo sapiens
  siRNA target sequence for FLJ11712 (NM_024570.1,684-702).
gacttgagaagttacttca

SEQ ID NO: 387346 - DNA, 19 bp, Homo sapiens
  siRNA target sequence for FLJ11712 (NM_024570.1,723-741).
gtaatccagaaatagacaa

SEQ ID NO: 387347 - DNA, 19 bp, Homo sapiens
  siRNA target sequence for FLJ11712 (NM_024570.1,737-755).
gacaacaagaaatattaca

SEQ ID NO: 387348 - DNA, 19 bp, Homo sapiens
  siRNA target sequence for FLJ11712 (NM_024570.1,784-802).
gctggaaaaaaaggttaat

SEQ ID NO: 387349 - DNA, 19 bp, Homo sapiens
  siRNA target sequence for FLJ11712 (NM_024570.1,787-805).
ggaaaaaaaggttaatcaa

SEQ ID NO: 387350 - DNA, 19 bp, Homo sapiens
  siRNA target sequence for FLJ11712 (NM_024570.1,812-830).
gcagcattaaaaaccaata

SEQ ID NO: 387351 - DNA, 19 bp, Homo sapiens
  siRNA target sequence for FLJ11712 (NM_024570.1,850-868).
ggtacagtcaactgcattt

SEQ ID NO: 387352 - DNA, 19 bp, Homo sapiens
  siRNA target sequence for FLJ11712 (NM_024570.1,898-916).
ggaagaggattatattcgt

SEQ ID NO: 387353 - DNA, 19 bp, Homo sapiens
  siRNA target sequence for FLJ11712 (NM_024570.1,899-917).
gaagaggattatattcgtt

SEQ ID NO: 387354 - DNA, 19 bp, Homo sapiens
  siRNA target sequence for FLJ11712 (NM_024570.1,927-945).
gtctgatatctgactacat

SEQ ID NO: 387355 - DNA, 19 bp, Homo sapiens
  siRNA target sequence for FLJ11712 (NM_024570.1,938-956).
gactacatccctaaagaat

SEQ ID NO: 387356 - DNA, 19 bp, Homo sapiens
  siRNA target sequence for FLJ11712 (NM_024570.1,940-958).
ctacatccctaaagaatta

SEQ ID NO: 387357 - DNA, 19 bp, Homo sapiens
  siRNA target sequence for FLJ11712 (NM_024570.1,960-978).
gtgatgacttatctaaata

SEQ ID NO: 387358 - DNA, 19 bp, Homo sapiens
  siRNA target sequence for FLJ11712 (NM_024570.1,1058-1076).
gcaaaagaagattacacta

SEQ ID NO: 387359 - DNA, 19 bp, Homo sapiens
  siRNA target sequence for FLJ11712 (NM_024570.1,1059-1077).
caaaagaagattacactaa

SEQ ID NO: 387360 - DNA, 19 bp, Homo sapiens
  siRNA target sequence for FLJ11712 (NM_024570.1,1064-1082).
gaagattacactaagttta

SEQ ID NO: 387361 - DNA, 19 bp, Homo sapiens
  siRNA target sequence for FLJ11712 (NM_024570.1,1067-1085).
gattacactaagtttaata

SEQ ID NO: 387362 - DNA, 19 bp, Homo sapiens
  siRNA target sequence for FLJ11712 (NM_024570.1,1072-1090).
cactaagtttaatactaaa

SEQ ID NO: 387363 - DNA, 19 bp, Homo sapiens
  siRNA target sequence for FLJ11712 (NM_024570.1,1154-1172).
gacaagagtggaatgaaaa

SEQ ID NO: 387364 - DNA, 19 bp, Homo sapiens
  siRNA target sequence for C16orf33 (NM_024571.1,1075-1093).
cccaaatagccctagaata

SEQ ID NO: 387365 - DNA, 19 bp, Homo sapiens
  siRNA target sequence for C6orf211 (NM_024573.1,288-306).
gacaggacgtgggatcatt

SEQ ID NO: 387366 - DNA, 19 bp, Homo sapiens
  siRNA target sequence for C6orf211 (NM_024573.1,292-310).
ggacgtgggatcatttgca

SEQ ID NO: 387367 - DNA, 19 bp, Homo sapiens
  siRNA target sequence for C6orf211 (NM_024573.1,293-311).
gacgtgggatcatttgcat

SEQ ID NO: 387368 - DNA, 19 bp, Homo sapiens
  siRNA target sequence for C6orf211 (NM_024573.1,340-358).
gatcttaactaaggttatt

SEQ ID NO: 387369 - DNA, 19 bp, Homo sapiens
  siRNA target sequence for C6orf211 (NM_024573.1,343-361).
cttaactaaggttattgat

SEQ ID NO: 387370 - DNA, 19 bp, Homo sapiens
  siRNA target sequence for C6orf211 (NM_024573.1,348-366).
ctaaggttattgatacatt

SEQ ID NO: 387371 - DNA, 19 bp, Homo sapiens
  siRNA target sequence for C6orf211 (NM_024573.1,367-385).
gcatcgacataaaagtgaa

SEQ ID NO: 387372 - DNA, 19 bp, Homo sapiens
  siRNA target sequence for C6orf211 (NM_024573.1,368-386).
catcgacataaaagtgaat

SEQ ID NO: 387373 - DNA, 19 bp, Homo sapiens
  siRNA target sequence for C6orf211 (NM_024573.1,410-428).
ggcgtggaagctgaaaaga

SEQ ID NO: 387374 - DNA, 19 bp, Homo sapiens
  siRNA target sequence for C6orf211 (NM_024573.1,411-429).
gcgtggaagctgaaaagaa

SEQ ID NO: 387375 - DNA, 19 bp, Homo sapiens
  siRNA target sequence for C6orf211 (NM_024573.1,456-474).
ggaatgaattgcaaacaga

SEQ ID NO: 387376 - DNA, 19 bp, Homo sapiens
  siRNA target sequence for C6orf211 (NM_024573.1,457-475).
gaatgaattgcaaacagat

SEQ ID NO: 387377 - DNA, 19 bp, Homo sapiens
  siRNA target sequence for C6orf211 (NM_024573.1,489-507).
ccttggttgagaaatttgt

SEQ ID NO: 387378 - DNA, 19 bp, Homo sapiens
  siRNA target sequence for C6orf211 (NM_024573.1,490-508).
cttggttgagaaatttgtt

SEQ ID NO: 387379 - DNA, 19 bp, Homo sapiens
  siRNA target sequence for C6orf211 (NM_024573.1,522-540).
ggaatcagtacctagaata

SEQ ID NO: 387380 - DNA, 19 bp, Homo sapiens
  siRNA target sequence for C6orf211 (NM_024573.1,523-541).
gaatcagtacctagaatat

SEQ ID NO: 387381 - DNA, 19 bp, Homo sapiens
  siRNA target sequence for C6orf211 (NM_024573.1,593-611).
ccgtggttgttggtagaat

SEQ ID NO: 387382 - DNA, 19 bp, Homo sapiens
  siRNA target sequence for C6orf211 (NM_024573.1,608-626).
gaatgttacatgtatcgaa

SEQ ID NO: 387383 - DNA, 19 bp, Homo sapiens
  siRNA target sequence for C6orf211 (NM_024573.1,612-630).
gttacatgtatcgaagaat

SEQ ID NO: 387384 - DNA, 19 bp, Homo sapiens
  siRNA target sequence for C6orf211 (NM_024573.1,616-634).
catgtatcgaagaattcat

SEQ ID NO: 387385 - DNA, 19 bp, Homo sapiens
  siRNA target sequence for C6orf211 (NM_024573.1,619-637).
gtatcgaagaattcatgaa

SEQ ID NO: 387386 - DNA, 19 bp, Homo sapiens
  siRNA target sequence for C6orf211 (NM_024573.1,646-664).
ccagagtccaccaatcgat

SEQ ID NO: 387387 - DNA, 19 bp, Homo sapiens
  siRNA target sequence for C6orf211 (NM_024573.1,647-665).
cagagtccaccaatcgatt

SEQ ID NO: 387388 - DNA, 19 bp, Homo sapiens
  siRNA target sequence for C6orf211 (NM_024573.1,651-669).
gtccaccaatcgattactt

SEQ ID NO: 387389 - DNA, 19 bp, Homo sapiens
  siRNA target sequence for C6orf211 (NM_024573.1,654-672).
caccaatcgattactttga

SEQ ID NO: 387390 - DNA, 19 bp, Homo sapiens
  siRNA target sequence for C6orf211 (NM_024573.1,661-679).
cgattactttgatgtattt

SEQ ID NO: 387391 - DNA, 19 bp, Homo sapiens
  siRNA target sequence for C6orf211 (NM_024573.1,713-731).
caggaatccatcattgctt

SEQ ID NO: 387392 - DNA, 19 bp, Homo sapiens
  siRNA target sequence for C6orf211 (NM_024573.1,745-763).
gcaacaattgataagaact

SEQ ID NO: 387393 - DNA, 19 bp, Homo sapiens
  siRNA target sequence for C6orf211 (NM_024573.1,746-764).
caacaattgataagaacta

SEQ ID NO: 387394 - DNA, 19 bp, Homo sapiens
  siRNA target sequence for C6orf211 (NM_024573.1,851-869).
ctctcaggtggagaaagta

SEQ ID NO: 387395 - DNA, 19 bp, Homo sapiens
  siRNA target sequence for C6orf211 (NM_024573.1,873-891).
ctcagaataccaatgtact

SEQ ID NO: 387396 - DNA, 19 bp, Homo sapiens
  siRNA target sequence for C6orf211 (NM_024573.1,875-893).
cagaataccaatgtactaa

SEQ ID NO: 387397 - DNA, 19 bp, Homo sapiens
  siRNA target sequence for C6orf211 (NM_024573.1,941-959).
catctttggtcattgctta

SEQ ID NO: 387398 - DNA, 19 bp, Homo sapiens
  siRNA target sequence for C6orf211 (NM_024573.1,951-969).
cattgcttagcaattgcaa

SEQ ID NO: 387399 - DNA, 19 bp, Homo sapiens
  siRNA target sequence for C6orf211 (NM_024573.1,993-1011).
ctactagagtgtatattgt

SEQ ID NO: 387400 - DNA, 19 bp, Homo sapiens
  siRNA target sequence for C6orf211 (NM_024573.1,1083-1101).
ctactgaggttcattttta

SEQ ID NO: 387401 - DNA, 19 bp, Homo sapiens
  siRNA target sequence for C6orf211 (NM_024573.1,1120-1138).
gtttgtttctgatactact

SEQ ID NO: 387402 - DNA, 19 bp, Homo sapiens
  siRNA target sequence for C6orf211 (NM_024573.1,1128-1146).
ctgatactactatacatga

SEQ ID NO: 387403 - DNA, 19 bp, Homo sapiens
  siRNA target sequence for C6orf211 (NM_024573.1,1130-1148).
gatactactatacatgatt

SEQ ID NO: 387404 - DNA, 19 bp, Homo sapiens
  siRNA target sequence for C6orf211 (NM_024573.1,1242-1260).
gggtttaccacaatcatat

SEQ ID NO: 387405 - DNA, 19 bp, Homo sapiens
  siRNA target sequence for C6orf211 (NM_024573.1,1266-1284).
ggactctgcctcatgagta

SEQ ID NO: 387406 - DNA, 19 bp, Homo sapiens
  siRNA target sequence for C6orf211 (NM_024573.1,1300-1318).
ggttgcacctgacttatat

SEQ ID NO: 387407 - DNA, 19 bp, Homo sapiens
  siRNA target sequence for C6orf211 (NM_024573.1,1325-1343).
ctacagaaggcacatttaa

SEQ ID NO: 387408 - DNA, 19 bp, Homo sapiens
  siRNA target sequence for C6orf211 (NM_024573.1,1442-1460).
gcaccactctgtaccataa

SEQ ID NO: 387409 - DNA, 19 bp, Homo sapiens
  siRNA target sequence for C6orf211 (NM_024573.1,1534-1552).
ctggtggaccactggaaaa

SEQ ID NO: 387410 - DNA, 19 bp, Homo sapiens
  siRNA target sequence for C6orf211 (NM_024573.1,1536-1554).
ggtggaccactggaaaata

SEQ ID NO: 387411 - DNA, 19 bp, Homo sapiens
  siRNA target sequence for FLJ23191 (NM_024574.2,1273-1291).
cccaaggttgatattcaga

SEQ ID NO: 387412 - DNA, 19 bp, Homo sapiens
  siRNA target sequence for FLJ23191 (NM_024574.2,1320-1338).
caccgtctctgatctgaaa

SEQ ID NO: 387413 - DNA, 19 bp, Homo sapiens
  siRNA target sequence for FLJ23191 (NM_024574.2,1339-1357).
cccgacacgcagtactact

SEQ ID NO: 387414 - DNA, 19 bp, Homo sapiens
  siRNA target sequence for FLJ23191 (NM_024574.2,1340-1358).
ccgacacgcagtactactt

SEQ ID NO: 387415 - DNA, 19 bp, Homo sapiens
  siRNA target sequence for FLJ23191 (NM_024574.2,1341-1359).
cgacacgcagtactacttt

SEQ ID NO: 387416 - DNA, 19 bp, Homo sapiens
  siRNA target sequence for FLJ23191 (NM_024574.2,1389-1407).
catgagcaccgcttatgta

SEQ ID NO: 387417 - DNA, 19 bp, Homo sapiens
  siRNA target sequence for FLJ23191 (NM_024574.2,1465-1483).
gggaagataacagatgtat

SEQ ID NO: 387418 - DNA, 19 bp, Homo sapiens
  siRNA target sequence for FLJ23191 (NM_024574.2,1493-1511).
ggaagggagcaaagtttct

SEQ ID NO: 387419 - DNA, 19 bp, Homo sapiens
  siRNA target sequence for FLJ23191 (NM_024574.2,1536-1554).
ccaaaaagtcaccttcttt

SEQ ID NO: 387420 - DNA, 19 bp, Homo sapiens
  siRNA target sequence for FLJ23191 (NM_024574.2,1543-1561).
gtcaccttctttattcact

SEQ ID NO: 387421 - DNA, 19 bp, Homo sapiens
  siRNA target sequence for FLJ23191 (NM_024574.2,1565-1583).
gtctggatgctgtccaaat

SEQ ID NO: 387422 - DNA, 19 bp, Homo sapiens
  siRNA target sequence for FLJ23191 (NM_024574.2,1647-1665).
gcttagaggaaaacctaaa

SEQ ID NO: 387423 - DNA, 19 bp, Homo sapiens
  siRNA target sequence for FLJ23191 (NM_024574.2,1675-1693).
ctcgttcgactgaaaggaa

SEQ ID NO: 387424 - DNA, 19 bp, Homo sapiens
  siRNA target sequence for FLJ23191 (NM_024574.2,1702-1720).
ggagcatctatgttgaaaa

SEQ ID NO: 387425 - DNA, 19 bp, Homo sapiens
  siRNA target sequence for FLJ23191 (NM_024574.2,1703-1721).
gagcatctatgttgaaaat

SEQ ID NO: 387426 - DNA, 19 bp, Homo sapiens
  siRNA target sequence for FLJ23191 (NM_024574.2,1727-1745).
ctaccacaaggcctactaa

SEQ ID NO: 387427 - DNA, 19 bp, Homo sapiens
  siRNA target sequence for FLJ23191 (NM_024574.2,1737-1755).
gcctactaagcagtcattt

SEQ ID NO: 387428 - DNA, 19 bp, Homo sapiens
  siRNA target sequence for FLJ23191 (NM_024574.2,1838-1856).
ctcaggaaaggaacaagtt

SEQ ID NO: 387429 - DNA, 19 bp, Homo sapiens
  siRNA target sequence for FLJ23191 (NM_024574.2,1854-1872).
gttttgcatctacaaaaaa

SEQ ID NO: 387430 - DNA, 19 bp, Homo sapiens
  siRNA target sequence for FLJ23191 (NM_024574.2,1927-1945).
ctaggaccagatataagga

SEQ ID NO: 387431 - DNA, 19 bp, Homo sapiens
  siRNA target sequence for FLJ23191 (NM_024574.2,2002-2020).
gtgaccacagaaacaatta

SEQ ID NO: 387432 - DNA, 19 bp, Homo sapiens
  siRNA target sequence for FLJ23191 (NM_024574.2,2004-2022).
gaccacagaaacaattaaa

SEQ ID NO: 387433 - DNA, 19 bp, Homo sapiens
  siRNA target sequence for FLJ23191 (NM_024574.2,2078-2096).
ggcactctgtaaagtatca

SEQ ID NO: 387434 - DNA, 19 bp, Homo sapiens
  siRNA target sequence for FLJ23191 (NM_024574.2,2107-2125).
gtgaaaactagaaagttct

SEQ ID NO: 387435 - DNA, 19 bp, Homo sapiens
  siRNA target sequence for FLJ23467 (NM_024575.1,527-545).
gcatccgccacgtgtttga

SEQ ID NO: 387436 - DNA, 19 bp, Homo sapiens
  siRNA target sequence for FLJ23467 (NM_024575.1,528-546).
catccgccacgtgtttgat

SEQ ID NO: 387437 - DNA, 19 bp, Homo sapiens
  siRNA target sequence for FLJ22709 (NM_024578.1,383-401).
cgccaagaagcctattgga

SEQ ID NO: 387438 - DNA, 19 bp, Homo sapiens
  siRNA target sequence for FLJ22709 (NM_024578.1,441-459).
cccgactatgagcttaagt

SEQ ID NO: 387439 - DNA, 19 bp, Homo sapiens
  siRNA target sequence for FLJ22709 (NM_024578.1,442-460).
ccgactatgagcttaagta

SEQ ID NO: 387440 - DNA, 19 bp, Homo sapiens
  siRNA target sequence for FLJ22709 (NM_024578.1,775-793).
gcgagggctccgtgtactt

SEQ ID NO: 387441 - DNA, 19 bp, Homo sapiens
  siRNA target sequence for FLJ23221 (NM_024579.1,117-135).
caggtggtctattattata

SEQ ID NO: 387442 - DNA, 19 bp, Homo sapiens
  siRNA target sequence for FLJ23221 (NM_024579.1,119-137).
ggtggtctattattataca

SEQ ID NO: 387443 - DNA, 19 bp, Homo sapiens
  siRNA target sequence for FLJ23221 (NM_024579.1,136-154).
cagtcacccccagttatga

SEQ ID NO: 387444 - DNA, 19 bp, Homo sapiens
  siRNA target sequence for FLJ23221 (NM_024579.1,143-161).
ccccagttatgatgacttt

SEQ ID NO: 387445 - DNA, 19 bp, Homo sapiens
  siRNA target sequence for FLJ23221 (NM_024579.1,144-162).
cccagttatgatgacttta

SEQ ID NO: 387446 - DNA, 19 bp, Homo sapiens
  siRNA target sequence for FLJ23221 (NM_024579.1,146-164).
cagttatgatgactttagt

SEQ ID NO: 387447 - DNA, 19 bp, Homo sapiens
  siRNA target sequence for FLJ23221 (NM_024579.1,166-184).
cagatttcaccattgatta

SEQ ID NO: 387448 - DNA, 19 bp, Homo sapiens
  siRNA target sequence for FLJ23221 (NM_024579.1,180-198).
gattactccatatttgagt

SEQ ID NO: 387449 - DNA, 19 bp, Homo sapiens
  siRNA target sequence for FLJ23221 (NM_024579.1,218-236).
gttggataaggacataaca

SEQ ID NO: 387450 - DNA, 19 bp, Homo sapiens
  siRNA target sequence for FLJ23221 (NM_024579.1,221-239).
ggataaggacataacagaa

SEQ ID NO: 387451 - DNA, 19 bp, Homo sapiens
  siRNA target sequence for FLJ23221 (NM_024579.1,227-245).
ggacataacagaagcaata

SEQ ID NO: 387452 - DNA, 19 bp, Homo sapiens
  siRNA target sequence for FLJ23221 (NM_024579.1,248-266).
gactaccattagtcttgaa

SEQ ID NO: 387453 - DNA, 19 bp, Homo sapiens
  siRNA target sequence for FLJ23221 (NM_024579.1,281-299).
ccatccgaagcctgtaact

SEQ ID NO: 387454 - DNA, 19 bp, Homo sapiens
  siRNA target sequence for FLJ23221 (NM_024579.1,350-368).
cagtttgcgaagtcctatt

SEQ ID NO: 387455 - DNA, 19 bp, Homo sapiens
  siRNA target sequence for FLJ23221 (NM_024579.1,393-411).
gttcaggtggggatgtatt

SEQ ID NO: 387456 - DNA, 19 bp, Homo sapiens
  siRNA target sequence for C6orf60 (NM_024581.3,504-522).
caaggtaatatatgcttta

SEQ ID NO: 387457 - DNA, 19 bp, Homo sapiens
  siRNA target sequence for C6orf60 (NM_024581.3,540-558).
gcatgaatctgcaattcaa

SEQ ID NO: 387458 - DNA, 19 bp, Homo sapiens
  siRNA target sequence for C6orf60 (NM_024581.3,627-645).
gtataaaagcaaagtaaca

SEQ ID NO: 387459 - DNA, 19 bp, Homo sapiens
  siRNA target sequence for C6orf60 (NM_024581.3,648-666).
ggagctagaccttagaaga

SEQ ID NO: 387460 - DNA, 19 bp, Homo sapiens
  siRNA target sequence for C6orf60 (NM_024581.3,649-667).
gagctagaccttagaagaa

SEQ ID NO: 387461 - DNA, 19 bp, Homo sapiens
  siRNA target sequence for C6orf60 (NM_024581.3,717-735).
gcaggctttgacagaattt

SEQ ID NO: 387462 - DNA, 19 bp, Homo sapiens
  siRNA target sequence for C6orf60 (NM_024581.3,796-814).
cgcatagtgaccatgtcta

SEQ ID NO: 387463 - DNA, 19 bp, Homo sapiens
  siRNA target sequence for C6orf60 (NM_024581.3,857-875).
ggagctttggacaacttca

SEQ ID NO: 387464 - DNA, 19 bp, Homo sapiens
  siRNA target sequence for C6orf60 (NM_024581.3,858-876).
gagctttggacaacttcaa

SEQ ID NO: 387465 - DNA, 19 bp, Homo sapiens
  siRNA target sequence for C6orf60 (NM_024581.3,860-878).
gctttggacaacttcaagt

SEQ ID NO: 387466 - DNA, 19 bp, Homo sapiens
  siRNA target sequence for C6orf60 (NM_024581.3,894-912).
caaacgattggcattggaa

SEQ ID NO: 387467 - DNA, 19 bp, Homo sapiens
  siRNA target sequence for C6orf60 (NM_024581.3,967-985).
gatcacagtgcctcagtaa

SEQ ID NO: 387468 - DNA, 19 bp, Homo sapiens
  siRNA target sequence for C6orf60 (NM_024581.3,1004-1022).
cagaggaactacacagaat

SEQ ID NO: 387469 - DNA, 19 bp, Homo sapiens
  siRNA target sequence for C6orf60 (NM_024581.3,1024-1042).
gaggtggagtccctaaaca

SEQ ID NO: 387470 - DNA, 19 bp, Homo sapiens
  siRNA target sequence for C6orf60 (NM_024581.3,1026-1044).
ggtggagtccctaaacaaa

SEQ ID NO: 387471 - DNA, 19 bp, Homo sapiens
  siRNA target sequence for C6orf60 (NM_024581.3,1061-1079).
gacttgaacggaagaaact

SEQ ID NO: 387472 - DNA, 19 bp, Homo sapiens
  siRNA target sequence for C6orf60 (NM_024581.3,1063-1081).
cttgaacggaagaaactaa

SEQ ID NO: 387473 - DNA, 19 bp, Homo sapiens
  siRNA target sequence for C6orf60 (NM_024581.3,1087-1105).
gattatgaaggcaagttga

SEQ ID NO: 387474 - DNA, 19 bp, Homo sapiens
  siRNA target sequence for C6orf60 (NM_024581.3,1129-1147).
cgtgagcttgatactttga

SEQ ID NO: 387475 - DNA, 19 bp, Homo sapiens
  siRNA target sequence for C6orf60 (NM_024581.3,1192-1210).
gaaaaggaagctgatctta

SEQ ID NO: 387476 - DNA, 19 bp, Homo sapiens
  siRNA target sequence for C6orf60 (NM_024581.3,1234-1252).
gcaattttacgaaaaacta

SEQ ID NO: 387477 - DNA, 19 bp, Homo sapiens
  siRNA target sequence for C6orf60 (NM_024581.3,1235-1253).
caattttacgaaaaactat

SEQ ID NO: 387478 - DNA, 19 bp, Homo sapiens
  siRNA target sequence for C6orf60 (NM_024581.3,1340-1358).
ccatagcagagaacaatgt

SEQ ID NO: 387479 - DNA, 19 bp, Homo sapiens
  siRNA target sequence for C6orf60 (NM_024581.3,1395-1413).
gggagaaatggccctatta

SEQ ID NO: 387480 - DNA, 19 bp, Homo sapiens
  siRNA target sequence for C6orf60 (NM_024581.3,1396-1414).
ggagaaatggccctattaa

SEQ ID NO: 387481 - DNA, 19 bp, Homo sapiens
  siRNA target sequence for C6orf60 (NM_024581.3,1445-1463).
cagctgccagagaacgttt

SEQ ID NO: 387482 - DNA, 19 bp, Homo sapiens
  siRNA target sequence for C6orf60 (NM_024581.3,1491-1509).
caaagctagtcatattgga

SEQ ID NO: 387483 - DNA, 19 bp, Homo sapiens
  siRNA target sequence for C6orf60 (NM_024581.3,1513-1531).
cttcaagcaactcaaatga

SEQ ID NO: 387484 - DNA, 19 bp, Homo sapiens
  siRNA target sequence for C6orf60 (NM_024581.3,1525-1543).
caaatgacccaggaagtta

SEQ ID NO: 387485 - DNA, 19 bp, Homo sapiens
  siRNA target sequence for C6orf60 (NM_024581.3,1532-1550).
cccaggaagttacaattaa

SEQ ID NO: 387486 - DNA, 19 bp, Homo sapiens
  siRNA target sequence for C6orf60 (NM_024581.3,1571-1589).
cgagagtcaatgagagatt

SEQ ID NO: 387487 - DNA, 19 bp, Homo sapiens
  siRNA target sequence for C6orf60 (NM_024581.3,1612-1630).
gcttttttgcgaagcaaaa

SEQ ID NO: 387488 - DNA, 19 bp, Homo sapiens
  siRNA target sequence for C6orf60 (NM_024581.3,1753-1771).
gaagaggaggtgactcaat

SEQ ID NO: 387489 - DNA, 19 bp, Homo sapiens
  siRNA target sequence for C6orf60 (NM_024581.3,1777-1795).
gaggcccattctaagactt

SEQ ID NO: 387490 - DNA, 19 bp, Homo sapiens
  siRNA target sequence for C6orf60 (NM_024581.3,1782-1800).
ccattctaagactttggaa

SEQ ID NO: 387491 - DNA, 19 bp, Homo sapiens
  siRNA target sequence for C6orf60 (NM_024581.3,1835-1853).
ctgtccacagtaatgcaat

SEQ ID NO: 387492 - DNA, 19 bp, Homo sapiens
  siRNA target sequence for C6orf60 (NM_024581.3,1849-1867).
gcaattagggataagaaaa

SEQ ID NO: 387493 - DNA, 19 bp, Homo sapiens
  siRNA target sequence for C6orf60 (NM_024581.3,1888-1906).
gaacaacataacaaagata

SEQ ID NO: 387494 - DNA, 19 bp, Homo sapiens
  siRNA target sequence for C6orf60 (NM_024581.3,1894-1912).
cataacaaagataaactaa

SEQ ID NO: 387495 - DNA, 19 bp, Homo sapiens
  siRNA target sequence for C6orf60 (NM_024581.3,1980-1998).
gttgaatacagccaatcaa

SEQ ID NO: 387496 - DNA, 19 bp, Homo sapiens
  siRNA target sequence for C6orf60 (NM_024581.3,2006-2024).
gccacctccaagatatggt

SEQ ID NO: 387497 - DNA, 19 bp, Homo sapiens
  siRNA target sequence for C6orf60 (NM_024581.3,2007-2025).
ccacctccaagatatggta

SEQ ID NO: 387498 - DNA, 19 bp, Homo sapiens
  siRNA target sequence for C6orf60 (NM_024581.3,2008-2026).
cacctccaagatatggtaa

SEQ ID NO: 387499 - DNA, 19 bp, Homo sapiens
  siRNA target sequence for C6orf60 (NM_024581.3,2014-2032).
caagatatggtaaggaaaa

SEQ ID NO: 387500 - DNA, 19 bp, Homo sapiens
  siRNA target sequence for C6orf60 (NM_024581.3,2053-2071).
gcagaaggacttattgcta

SEQ ID NO: 387501 - DNA, 19 bp, Homo sapiens
  siRNA target sequence for C6orf60 (NM_024581.3,2117-2135).
ctaaagacagcctaaagga

SEQ ID NO: 387502 - DNA, 19 bp, Homo sapiens
  siRNA target sequence for C6orf60 (NM_024581.3,2136-2154).
gaccaaggatgctctatta

SEQ ID NO: 387503 - DNA, 19 bp, Homo sapiens
  siRNA target sequence for C6orf60 (NM_024581.3,2241-2259).
caaaatggcccatgactta

SEQ ID NO: 387504 - DNA, 19 bp, Homo sapiens
  siRNA target sequence for C6orf60 (NM_024581.3,2297-2315).
ctaaacttcgtgaagagtt

SEQ ID NO: 387505 - DNA, 19 bp, Homo sapiens
  siRNA target sequence for C6orf60 (NM_024581.3,2422-2440).
gatctcttaaaccagattt

SEQ ID NO: 387506 - DNA, 19 bp, Homo sapiens
  siRNA target sequence for C6orf60 (NM_024581.3,2441-2459).
ccttgctgaaacagaatct

SEQ ID NO: 387507 - DNA, 19 bp, Homo sapiens
  siRNA target sequence for C6orf60 (NM_024581.3,2537-2555).
cgcaagagcttgaagaatt

SEQ ID NO: 387508 - DNA, 19 bp, Homo sapiens
  siRNA target sequence for C6orf60 (NM_024581.3,2602-2620).
gtccttgcatttcaaacta

SEQ ID NO: 387509 - DNA, 19 bp, Homo sapiens
  siRNA target sequence for C6orf60 (NM_024581.3,2681-2699).
ctgcagagcttcaatcact

SEQ ID NO: 387510 - DNA, 19 bp, Homo sapiens
  siRNA target sequence for C6orf60 (NM_024581.3,2683-2701).
gcagagcttcaatcactaa

SEQ ID NO: 387511 - DNA, 19 bp, Homo sapiens
  siRNA target sequence for C6orf60 (NM_024581.3,2684-2702).
cagagcttcaatcactaaa

SEQ ID NO: 387512 - DNA, 19 bp, Homo sapiens
  siRNA target sequence for C6orf60 (NM_024581.3,2724-2742).
ggagggcttccggatagaa

SEQ ID NO: 387513 - DNA, 19 bp, Homo sapiens
  siRNA target sequence for C6orf60 (NM_024581.3,2725-2743).
gagggcttccggatagaaa

SEQ ID NO: 387514 - DNA, 19 bp, Homo sapiens
  siRNA target sequence for C6orf60 (NM_024581.3,2729-2747).
gcttccggatagaaatgga

SEQ ID NO: 387515 - DNA, 19 bp, Homo sapiens
  siRNA target sequence for C6orf60 (NM_024581.3,2758-2776).
cagactcttcggtttgaat

SEQ ID NO: 387516 - DNA, 19 bp, Homo sapiens
  siRNA target sequence for C6orf60 (NM_024581.3,2760-2778).
gactcttcggtttgaatta

SEQ ID NO: 387517 - DNA, 19 bp, Homo sapiens
  siRNA target sequence for C6orf60 (NM_024581.3,2762-2780).
ctcttcggtttgaattaga

SEQ ID NO: 387518 - DNA, 19 bp, Homo sapiens
  siRNA target sequence for C6orf60 (NM_024581.3,2768-2786).
ggtttgaattagaagatga

SEQ ID NO: 387519 - DNA, 19 bp, Homo sapiens
  siRNA target sequence for C6orf60 (NM_024581.3,2807-2825).
ccttgcgctcagaactcaa

SEQ ID NO: 387520 - DNA, 19 bp, Homo sapiens
  siRNA target sequence for C6orf60 (NM_024581.3,2816-2834).
cagaactcaaccatcaaca

SEQ ID NO: 387521 - DNA, 19 bp, Homo sapiens
  siRNA target sequence for C6orf60 (NM_024581.3,2833-2851).
catgcagctgcaattgatt

SEQ ID NO: 387522 - DNA, 19 bp, Homo sapiens
  siRNA target sequence for C6orf60 (NM_024581.3,2853-2871).
gttacggcataatcatcat

SEQ ID NO: 387523 - DNA, 19 bp, Homo sapiens
  siRNA target sequence for C6orf60 (NM_024581.3,2881-2899).
gcagctgctaaaatggaat

SEQ ID NO: 387524 - DNA, 19 bp, Homo sapiens
  siRNA target sequence for C6orf60 (NM_024581.3,2887-2905).
gctaaaatggaattagaga

SEQ ID NO: 387525 - DNA, 19 bp, Homo sapiens
  siRNA target sequence for C6orf60 (NM_024581.3,2895-2913).
ggaattagagagaagcata

SEQ ID NO: 387526 - DNA, 19 bp, Homo sapiens
  siRNA target sequence for C6orf60 (NM_024581.3,2937-2955).
ggagcacatatgtagaatt

SEQ ID NO: 387527 - DNA, 19 bp, Homo sapiens
  siRNA target sequence for C6orf60 (NM_024581.3,2938-2956).
gagcacatatgtagaatta

SEQ ID NO: 387528 - DNA, 19 bp, Homo sapiens
  siRNA target sequence for C6orf60 (NM_024581.3,2948-2966).
gtagaattacagatctaca

SEQ ID NO: 387529 - DNA, 19 bp, Homo sapiens
  siRNA target sequence for C6orf60 (NM_024581.3,2957-2975).
cagatctacaagaggaatt

SEQ ID NO: 387530 - DNA, 19 bp, Homo sapiens
  siRNA target sequence for C6orf60 (NM_024581.3,2959-2977).
gatctacaagaggaattaa

SEQ ID NO: 387531 - DNA, 19 bp, Homo sapiens
  siRNA target sequence for C6orf60 (NM_024581.3,2986-3004).
gagcatcacatctctgaat

SEQ ID NO: 387532 - DNA, 19 bp, Homo sapiens
  siRNA target sequence for C6orf60 (NM_024581.3,3019-3037).
cagcaccttcatgagaata

SEQ ID NO: 387533 - DNA, 19 bp, Homo sapiens
  siRNA target sequence for C6orf60 (NM_024581.3,3022-3040).
caccttcatgagaatataa

SEQ ID NO: 387534 - DNA, 19 bp, Homo sapiens
  siRNA target sequence for C6orf60 (NM_024581.3,3024-3042).
ccttcatgagaatataagt

SEQ ID NO: 387535 - DNA, 19 bp, Homo sapiens
  siRNA target sequence for C6orf60 (NM_024581.3,3041-3059).
gtgccctaaccaaagaact

SEQ ID NO: 387536 - DNA, 19 bp, Homo sapiens
  siRNA target sequence for C6orf60 (NM_024581.3,3082-3100).
ctcagaatacgaagtgaat

SEQ ID NO: 387537 - DNA, 19 bp, Homo sapiens
  siRNA target sequence for C6orf60 (NM_024581.3,3198-3216).
catgcgggcagattttaat

SEQ ID NO: 387538 - DNA, 19 bp, Homo sapiens
  siRNA target sequence for C6orf60 (NM_024581.3,3204-3222).
ggcagattttaataagact

SEQ ID NO: 387539 - DNA, 19 bp, Homo sapiens
  siRNA target sequence for C6orf60 (NM_024581.3,3205-3223).
gcagattttaataagacta

SEQ ID NO: 387540 - DNA, 19 bp, Homo sapiens
  siRNA target sequence for C6orf60 (NM_024581.3,3225-3243).
cgagctactcaaggaaata

SEQ ID NO: 387541 - DNA, 19 bp, Homo sapiens
  siRNA target sequence for C6orf60 (NM_024581.3,3248-3266).
ccgctttacaagtgtcatt

SEQ ID NO: 387542 - DNA, 19 bp, Homo sapiens
  siRNA target sequence for C6orf60 (NM_024581.3,3249-3267).
cgctttacaagtgtcatta

SEQ ID NO: 387543 - DNA, 19 bp, Homo sapiens
  siRNA target sequence for C6orf60 (NM_024581.3,3376-3394).
ctaattgaggataataagt

SEQ ID NO: 387544 - DNA, 19 bp, Homo sapiens
  siRNA target sequence for C6orf60 (NM_024581.3,3393-3411).
gttttatcagctggaatta

SEQ ID NO: 387545 - DNA, 19 bp, Homo sapiens
  siRNA target sequence for C6orf60 (NM_024581.3,3418-3436).
cgagaaactaacttcaaca

SEQ ID NO: 387546 - DNA, 19 bp, Homo sapiens
  siRNA target sequence for C6orf60 (NM_024581.3,3452-3470).
gtcctactgttggtgttat

SEQ ID NO: 387547 - DNA, 19 bp, Homo sapiens
  siRNA target sequence for C6orf60 (NM_024581.3,3511-3529).
ccaacaaacaggtttgtga

SEQ ID NO: 387548 - DNA, 19 bp, Homo sapiens
  siRNA target sequence for C6orf60 (NM_024581.3,3528-3546).
gagtgttcccaatctaagt

SEQ ID NO: 387549 - DNA, 19 bp, Homo sapiens
  siRNA target sequence for C6orf60 (NM_024581.3,3588-3606).
cctggatcccattcctaat

SEQ ID NO: 387550 - DNA, 19 bp, Homo sapiens
  siRNA target sequence for C6orf60 (NM_024581.3,3589-3607).
ctggatcccattcctaatt

SEQ ID NO: 387551 - DNA, 19 bp, Homo sapiens
  siRNA target sequence for C6orf60 (NM_024581.3,3591-3609).
ggatcccattcctaattct

SEQ ID NO: 387552 - DNA, 19 bp, Homo sapiens
  siRNA target sequence for C6orf60 (NM_024581.3,3608-3626).
ctccagtccacgatattga

SEQ ID NO: 387553 - DNA, 19 bp, Homo sapiens
  siRNA target sequence for C6orf60 (NM_024581.3,3610-3628).
ccagtccacgatattgagt

SEQ ID NO: 387554 - DNA, 19 bp, Homo sapiens
  siRNA target sequence for C6orf60 (NM_024581.3,3611-3629).
cagtccacgatattgagtt

SEQ ID NO: 387555 - DNA, 19 bp, Homo sapiens
  siRNA target sequence for C6orf60 (NM_024581.3,3616-3634).
cacgatattgagttcaaca

SEQ ID NO: 387556 - DNA, 19 bp, Homo sapiens
  siRNA target sequence for C6orf60 (NM_024581.3,3665-3683).
ctaaagggcccaagacatt

SEQ ID NO: 387557 - DNA, 19 bp, Homo sapiens
  siRNA target sequence for C6orf60 (NM_024581.3,3672-3690).
gcccaagacatttttgagt

SEQ ID NO: 387558 - DNA, 19 bp, Homo sapiens
  siRNA target sequence for C6orf60 (NM_024581.3,3751-3769).
gcccggtacttcacattct

SEQ ID NO: 387559 - DNA, 19 bp, Homo sapiens
  siRNA target sequence for FLJ23056 (NM_024582.1,84-102).
ggagcaagcagtttgactt

SEQ ID NO: 387560 - DNA, 19 bp, Homo sapiens
  siRNA target sequence for FLJ23056 (NM_024582.1,85-103).
gagcaagcagtttgactta

SEQ ID NO: 387561 - DNA, 19 bp, Homo sapiens
  siRNA target sequence for FLJ23056 (NM_024582.1,208-226).
cttctacgttctatagaaa

SEQ ID NO: 387562 - DNA, 19 bp, Homo sapiens
  siRNA target sequence for FLJ23056 (NM_024582.1,252-270).
cctataagggatggtaata

SEQ ID NO: 387563 - DNA, 19 bp, Homo sapiens
  siRNA target sequence for FLJ23056 (NM_024582.1,265-283).
gtaatactttggaaatgca

SEQ ID NO: 387564 - DNA, 19 bp, Homo sapiens
  siRNA target sequence for FLJ23056 (NM_024582.1,292-310).
cctgccaacctggcatttt

SEQ ID NO: 387565 - DNA, 19 bp, Homo sapiens
  siRNA target sequence for FLJ23056 (NM_024582.1,297-315).
caacctggcattttcaact

SEQ ID NO: 387566 - DNA, 19 bp, Homo sapiens
  siRNA target sequence for FLJ23056 (NM_024582.1,379-397).
cagggagtcgcctaaagca

SEQ ID NO: 387567 - DNA, 19 bp, Homo sapiens
  siRNA target sequence for FLJ23056 (NM_024582.1,430-448).
ctccagtcggactttctat

SEQ ID NO: 387568 - DNA, 19 bp, Homo sapiens
  siRNA target sequence for FLJ23056 (NM_024582.1,433-451).
cagtcggactttctattga

SEQ ID NO: 387569 - DNA, 19 bp, Homo sapiens
  siRNA target sequence for FLJ23056 (NM_024582.1,437-455).
cggactttctattgaagaa

SEQ ID NO: 387570 - DNA, 19 bp, Homo sapiens
  siRNA target sequence for FLJ23056 (NM_024582.1,603-621).
gatagtgactcccatgaat

SEQ ID NO: 387571 - DNA, 19 bp, Homo sapiens
  siRNA target sequence for FLJ23056 (NM_024582.1,684-702).
ccaaattatctcaagtcaa

SEQ ID NO: 387572 - DNA, 19 bp, Homo sapiens
  siRNA target sequence for FLJ23056 (NM_024582.1,685-703).
caaattatctcaagtcaat

SEQ ID NO: 387573 - DNA, 19 bp, Homo sapiens
  siRNA target sequence for SES3 (NM_024583.2,109-127).
cactttcgtggcattacct

SEQ ID NO: 387574 - DNA, 19 bp, Homo sapiens
  siRNA target sequence for SES3 (NM_024583.2,126-144).
ctccagcaacagtcgataa

SEQ ID NO: 387575 - DNA, 19 bp, Homo sapiens
  siRNA target sequence for SES3 (NM_024583.2,135-153).
cagtcgataacaggattat

SEQ ID NO: 387576 - DNA, 19 bp, Homo sapiens
  siRNA target sequence for SES3 (NM_024583.2,137-155).
gtcgataacaggattattt

SEQ ID NO: 387577 - DNA, 19 bp, Homo sapiens
  siRNA target sequence for SES3 (NM_024583.2,188-206).
gtacaagaggtggtttatt

SEQ ID NO: 387578 - DNA, 19 bp, Homo sapiens
  siRNA target sequence for SES3 (NM_024583.2,210-228).
ctgctgtagttcatgataa

SEQ ID NO: 387579 - DNA, 19 bp, Homo sapiens
  siRNA target sequence for SES3 (NM_024583.2,233-251).
ggagaacgtcttaagtgta

SEQ ID NO: 387580 - DNA, 19 bp, Homo sapiens
  siRNA target sequence for SES3 (NM_024583.2,236-254).
gaacgtcttaagtgtacat

SEQ ID NO: 387581 - DNA, 19 bp, Homo sapiens
  siRNA target sequence for SES3 (NM_024583.2,239-257).
cgtcttaagtgtacatata

SEQ ID NO: 387582 - DNA, 19 bp, Homo sapiens
  siRNA target sequence for SES3 (NM_024583.2,398-416).
gaagaagcactattaggaa

SEQ ID NO: 387583 - DNA, 19 bp, Homo sapiens
  siRNA target sequence for SES3 (NM_024583.2,436-454).
ccttgaaagagctgataca

SEQ ID NO: 387584 - DNA, 19 bp, Homo sapiens
  siRNA target sequence for SES3 (NM_024583.2,465-483).
ccctcaatgtcattgttga

SEQ ID NO: 387585 - DNA, 19 bp, Homo sapiens
  siRNA target sequence for SES3 (NM_024583.2,517-535).
cacagagggtagaatggta

SEQ ID NO: 387586 - DNA, 19 bp, Homo sapiens
  siRNA target sequence for SES3 (NM_024583.2,521-539).
gagggtagaatggtattta

SEQ ID NO: 387587 - DNA, 19 bp, Homo sapiens
  siRNA target sequence for SES3 (NM_024583.2,556-574).
cctgatagctgataggaat

SEQ ID NO: 387588 - DNA, 19 bp, Homo sapiens
  siRNA target sequence for SES3 (NM_024583.2,559-577).
gatagctgataggaatgaa

SEQ ID NO: 387589 - DNA, 19 bp, Homo sapiens
  siRNA target sequence for SES3 (NM_024583.2,631-649).
gggagttcgtaatatttct

SEQ ID NO: 387590 - DNA, 19 bp, Homo sapiens
  siRNA target sequence for SES3 (NM_024583.2,632-650).
ggagttcgtaatatttcta

SEQ ID NO: 387591 - DNA, 19 bp, Homo sapiens
  siRNA target sequence for SES3 (NM_024583.2,692-710).
gacatgagaaactatgcta

SEQ ID NO: 387592 - DNA, 19 bp, Homo sapiens
  siRNA target sequence for SES3 (NM_024583.2,719-737).
ggttggtgggatggtaaaa

SEQ ID NO: 387593 - DNA, 19 bp, Homo sapiens
  siRNA target sequence for SES3 (NM_024583.2,723-741).
ggtgggatggtaaaaagga

SEQ ID NO: 387594 - DNA, 19 bp, Homo sapiens
  siRNA target sequence for SES3 (NM_024583.2,756-774).
cagcatattcctatcttga

SEQ ID NO: 387595 - DNA, 19 bp, Homo sapiens
  siRNA target sequence for SES3 (NM_024583.2,814-832).
gggctacaagcttctaaat

SEQ ID NO: 387596 - DNA, 19 bp, Homo sapiens
  siRNA target sequence for SES3 (NM_024583.2,815-833).
ggctacaagcttctaaata

SEQ ID NO: 387597 - DNA, 19 bp, Homo sapiens
  siRNA target sequence for SES3 (NM_024583.2,1033-1051).
gccacatatttcacaacta

SEQ ID NO: 387598 - DNA, 19 bp, Homo sapiens
  siRNA target sequence for SES3 (NM_024583.2,1035-1053).
cacatatttcacaactatt

SEQ ID NO: 387599 - DNA, 19 bp, Homo sapiens
  siRNA target sequence for SES3 (NM_024583.2,1062-1080).
gttcaccaacatttgaact

SEQ ID NO: 387600 - DNA, 19 bp, Homo sapiens
  siRNA target sequence for SES3 (NM_024583.2,1229-1247).
ctattcagagagatggaat

SEQ ID NO: 387601 - DNA, 19 bp, Homo sapiens
  siRNA target sequence for FLJ22160 (NM_024585.2,358-376).
cgctggtcacggaattcca

SEQ ID NO: 387602 - DNA, 19 bp, Homo sapiens
  siRNA target sequence for FLJ22160 (NM_024585.2,595-613).
gaggtgtcccactcatcat

SEQ ID NO: 387603 - DNA, 19 bp, Homo sapiens
  siRNA target sequence for FLJ22353 (NM_024587.1,213-231).
catcgtaatccgatacaca

SEQ ID NO: 387604 - DNA, 19 bp, Homo sapiens
  siRNA target sequence for FLJ22353 (NM_024587.1,236-254).
cgtggcacatggtcttctt

SEQ ID NO: 387605 - DNA, 19 bp, Homo sapiens
  siRNA target sequence for FLJ22353 (NM_024587.1,303-321).
gctcgagctgctctttgat

SEQ ID NO: 387606 - DNA, 19 bp, Homo sapiens
  siRNA target sequence for FLJ22353 (NM_024587.1,304-322).
ctcgagctgctctttgatt

SEQ ID NO: 387607 - DNA, 19 bp, Homo sapiens
  siRNA target sequence for FLJ22353 (NM_024587.1,306-324).
cgagctgctctttgattat

SEQ ID NO: 387608 - DNA, 19 bp, Homo sapiens
  siRNA target sequence for FLJ22353 (NM_024587.1,674-692).
cgagggctgacgaagtagt

SEQ ID NO: 387609 - DNA, 19 bp, Homo sapiens
  siRNA target sequence for FLJ22353 (NM_024587.1,749-767).
cgcgttctgtggatttcgt

SEQ ID NO: 387610 - DNA, 19 bp, Homo sapiens
  siRNA target sequence for FLJ22353 (NM_024587.1,793-811).
cgtgactaccctacttact

SEQ ID NO: 387611 - DNA, 19 bp, Homo sapiens
  siRNA target sequence for FLJ22353 (NM_024587.1,794-812).
gtgactaccctacttacta

SEQ ID NO: 387612 - DNA, 19 bp, Homo sapiens
  siRNA target sequence for FLJ22353 (NM_024587.1,796-814).
gactaccctacttactaca

SEQ ID NO: 387613 - DNA, 19 bp, Homo sapiens
  siRNA target sequence for FLJ23584 (NM_024588.2,464-482).
ccctgccagggatcataga

SEQ ID NO: 387614 - DNA, 19 bp, Homo sapiens
  siRNA target sequence for FLJ23584 (NM_024588.2,664-682).
cggaagctgccatcattct

SEQ ID NO: 387615 - DNA, 19 bp, Homo sapiens
  siRNA target sequence for FLJ23584 (NM_024588.2,720-738).
gggacaggcctcaagaaga

SEQ ID NO: 387616 - DNA, 19 bp, Homo sapiens
  siRNA target sequence for FLJ22386 (NM_024589.1,356-374).
cggatgtgaacctgaagat

SEQ ID NO: 387617 - DNA, 19 bp, Homo sapiens
  siRNA target sequence for FLJ22386 (NM_024589.1,868-886).
gacgccctggtctacttca

SEQ ID NO: 387618 - DNA, 19 bp, Homo sapiens
  siRNA target sequence for FLJ23548 (NM_024590.2,943-961).
gtgtctgtcctggaaagat

SEQ ID NO: 387619 - DNA, 19 bp, Homo sapiens
  siRNA target sequence for FLJ23548 (NM_024590.2,952-970).
ctggaaagatgctagcaat

SEQ ID NO: 387620 - DNA, 19 bp, Homo sapiens
  siRNA target sequence for FLJ23548 (NM_024590.2,1000-1018).
gcctcctcacttatggtta

SEQ ID NO: 387621 - DNA, 19 bp, Homo sapiens
  siRNA target sequence for FLJ23548 (NM_024590.2,1025-1043).
ctggggccaggccttagaa

SEQ ID NO: 387622 - DNA, 19 bp, Homo sapiens
  siRNA target sequence for FLJ23548 (NM_024590.2,1027-1045).
ggggccaggccttagaaga

SEQ ID NO: 387623 - DNA, 19 bp, Homo sapiens
  siRNA target sequence for FLJ23548 (NM_024590.2,1049-1067).
ggaagaaggggccttacta

SEQ ID NO: 387624 - DNA, 19 bp, Homo sapiens
  siRNA target sequence for FLJ23548 (NM_024590.2,1137-1155).
gcggatgatcagggattta

SEQ ID NO: 387625 - DNA, 19 bp, Homo sapiens
  siRNA target sequence for FLJ23548 (NM_024590.2,1169-1187).
ccacggatctgagattaaa

SEQ ID NO: 387626 - DNA, 19 bp, Homo sapiens
  siRNA target sequence for FLJ23548 (NM_024590.2,1170-1188).
cacggatctgagattaaaa

SEQ ID NO: 387627 - DNA, 19 bp, Homo sapiens
  siRNA target sequence for FLJ23548 (NM_024590.2,1208-1226).
cgctgccgaaggagttaaa

SEQ ID NO: 387628 - DNA, 19 bp, Homo sapiens
  siRNA target sequence for FLJ23548 (NM_024590.2,1210-1228).
ctgccgaaggagttaaact

SEQ ID NO: 387629 - DNA, 19 bp, Homo sapiens
  siRNA target sequence for FLJ23548 (NM_024590.2,1260-1278).
ccatccaggagtcagttta

SEQ ID NO: 387630 - DNA, 19 bp, Homo sapiens
  siRNA target sequence for FLJ23548 (NM_024590.2,1261-1279).
catccaggagtcagtttat

SEQ ID NO: 387631 - DNA, 19 bp, Homo sapiens
  siRNA target sequence for FLJ23548 (NM_024590.2,1301-1319).
caccggacttcaacattct

SEQ ID NO: 387632 - DNA, 19 bp, Homo sapiens
  siRNA target sequence for FLJ23548 (NM_024590.2,1305-1323).
ggacttcaacattctatca

SEQ ID NO: 387633 - DNA, 19 bp, Homo sapiens
  siRNA target sequence for FLJ23548 (NM_024590.2,1306-1324).
gacttcaacattctatcat

SEQ ID NO: 387634 - DNA, 19 bp, Homo sapiens
  siRNA target sequence for FLJ23548 (NM_024590.2,1329-1347).
cctacccaacccaactgtt

SEQ ID NO: 387635 - DNA, 19 bp, Homo sapiens
  siRNA target sequence for FLJ23548 (NM_024590.2,1330-1348).
ctacccaacccaactgttt

SEQ ID NO: 387636 - DNA, 19 bp, Homo sapiens
  siRNA target sequence for FLJ23548 (NM_024590.2,1334-1352).
ccaacccaactgtttacct

SEQ ID NO: 387637 - DNA, 19 bp, Homo sapiens
  siRNA target sequence for FLJ23548 (NM_024590.2,1380-1398).
ctgaaggaggttggatatt

SEQ ID NO: 387638 - DNA, 19 bp, Homo sapiens
  siRNA target sequence for FLJ23548 (NM_024590.2,1382-1400).
gaaggaggttggatattca

SEQ ID NO: 387639 - DNA, 19 bp, Homo sapiens
  siRNA target sequence for FLJ23548 (NM_024590.2,1393-1411).
gatattcaacgcatatggt

SEQ ID NO: 387640 - DNA, 19 bp, Homo sapiens
  siRNA target sequence for FLJ23548 (NM_024590.2,1572-1590).
gctgcctgggactatgaca

SEQ ID NO: 387641 - DNA, 19 bp, Homo sapiens
  siRNA target sequence for FLJ23548 (NM_024590.2,1573-1591).
ctgcctgggactatgacaa

SEQ ID NO: 387642 - DNA, 19 bp, Homo sapiens
  siRNA target sequence for FLJ23548 (NM_024590.2,1620-1638).
cagagagtacagcaaatct

SEQ ID NO: 387643 - DNA, 19 bp, Homo sapiens
  siRNA target sequence for FLJ23548 (NM_024590.2,1682-1700).
ctatcaagctgttcattca

SEQ ID NO: 387644 - DNA, 19 bp, Homo sapiens
  siRNA target sequence for FLJ23548 (NM_024590.2,1711-1729).
ctcctggcaggtatttcga

SEQ ID NO: 387645 - DNA, 19 bp, Homo sapiens
  siRNA target sequence for FLJ23548 (NM_024590.2,1717-1735).
gcaggtatttcgaacacta

SEQ ID NO: 387646 - DNA, 19 bp, Homo sapiens
  siRNA target sequence for FLJ23548 (NM_024590.2,1727-1745).
cgaacactaccgatccatt

SEQ ID NO: 387647 - DNA, 19 bp, Homo sapiens
  siRNA target sequence for FLJ23548 (NM_024590.2,1728-1746).
gaacactaccgatccatta

SEQ ID NO: 387648 - DNA, 19 bp, Homo sapiens
  siRNA target sequence for FLJ23548 (NM_024590.2,1731-1749).
cactaccgatccattatca

SEQ ID NO: 387649 - DNA, 19 bp, Homo sapiens
  siRNA target sequence for FLJ23548 (NM_024590.2,1736-1754).
ccgatccattatcaacata

SEQ ID NO: 387650 - DNA, 19 bp, Homo sapiens
  siRNA target sequence for FLJ23548 (NM_024590.2,1737-1755).
cgatccattatcaacataa

SEQ ID NO: 387651 - DNA, 19 bp, Homo sapiens
  siRNA target sequence for FLJ23548 (NM_024590.2,1798-1816).
caatcaacaacgtgacatt

SEQ ID NO: 387652 - DNA, 19 bp, Homo sapiens
  siRNA target sequence for FLJ23548 (NM_024590.2,1818-1836).
gctctaaagacttatggtt

SEQ ID NO: 387653 - DNA, 19 bp, Homo sapiens
  siRNA target sequence for FLJ23548 (NM_024590.2,1847-1865).
cagcattatcatttactct

SEQ ID NO: 387654 - DNA, 19 bp, Homo sapiens
  siRNA target sequence for FLJ23548 (NM_024590.2,1907-1925).
gcctctcagaggtagcaaa

SEQ ID NO: 387655 - DNA, 19 bp, Homo sapiens
  siRNA target sequence for FLJ23548 (NM_024590.2,1996-2014).
cagtgtgtaaggaacttgt

SEQ ID NO: 387656 - DNA, 19 bp, Homo sapiens
  siRNA target sequence for FLJ23548 (NM_024590.2,2030-2048).
gtaccccactctcatttca

SEQ ID NO: 387657 - DNA, 19 bp, Homo sapiens
  siRNA target sequence for FLJ23548 (NM_024590.2,2079-2097).
caactagatggctatgata

SEQ ID NO: 387658 - DNA, 19 bp, Homo sapiens
  siRNA target sequence for FLJ23548 (NM_024590.2,2124-2142).
cgctcaccccgagtagata

SEQ ID NO: 387659 - DNA, 19 bp, Homo sapiens
  siRNA target sequence for FLJ23548 (NM_024590.2,2125-2143).
gctcaccccgagtagatat

SEQ ID NO: 387660 - DNA, 19 bp, Homo sapiens
  siRNA target sequence for FLJ23548 (NM_024590.2,2126-2144).
ctcaccccgagtagatatt

SEQ ID NO: 387661 - DNA, 19 bp, Homo sapiens
  siRNA target sequence for FLJ23548 (NM_024590.2,2128-2146).
caccccgagtagatatttt

SEQ ID NO: 387662 - DNA, 19 bp, Homo sapiens
  siRNA target sequence for FLJ23548 (NM_024590.2,2132-2150).
ccgagtagatattttgcat

SEQ ID NO: 387663 - DNA, 19 bp, Homo sapiens
  siRNA target sequence for FLJ23548 (NM_024590.2,2133-2151).
cgagtagatattttgcata

SEQ ID NO: 387664 - DNA, 19 bp, Homo sapiens
  siRNA target sequence for FLJ23548 (NM_024590.2,2319-2337).
cgaaccggtggcacaatga

SEQ ID NO: 387665 - DNA, 19 bp, Homo sapiens
  siRNA target sequence for FLJ23548 (NM_024590.2,2320-2338).
gaaccggtggcacaatgaa

SEQ ID NO: 387666 - DNA, 19 bp, Homo sapiens
  siRNA target sequence for FLJ23548 (NM_024590.2,2336-2354).
gaacggatcaccttgtcaa

SEQ ID NO: 387667 - DNA, 19 bp, Homo sapiens
  siRNA target sequence for FLJ23548 (NM_024590.2,2350-2368).
gtcaactggcaaaagtgta

SEQ ID NO: 387668 - DNA, 19 bp, Homo sapiens
  siRNA target sequence for FLJ23548 (NM_024590.2,2364-2382).
gtgtatggcttttcaacat

SEQ ID NO: 387669 - DNA, 19 bp, Homo sapiens
  siRNA target sequence for FLJ23548 (NM_024590.2,2399-2417).
gagagggtggacctatcta

SEQ ID NO: 387670 - DNA, 19 bp, Homo sapiens
  siRNA target sequence for FLJ13352 (NM_024592.1,288-306).
cgcctgccgagcctttgat

SEQ ID NO: 387671 - DNA, 19 bp, Homo sapiens
  siRNA target sequence for FLJ13352 (NM_024592.1,290-308).
cctgccgagcctttgatgt

SEQ ID NO: 387672 - DNA, 19 bp, Homo sapiens
  siRNA target sequence for FLJ13352 (NM_024592.1,307-325).
gtccccaagagatattttt

SEQ ID NO: 387673 - DNA, 19 bp, Homo sapiens
  siRNA target sequence for FLJ13352 (NM_024592.1,371-389).
ggtgccttactcaatctct

SEQ ID NO: 387674 - DNA, 19 bp, Homo sapiens
  siRNA target sequence for FLJ13352 (NM_024592.1,394-412).
ctgggagcaccttttccaa

SEQ ID NO: 387675 - DNA, 19 bp, Homo sapiens
  siRNA target sequence for FLJ13352 (NM_024592.1,471-489).
ggcactgtctgcattctta

SEQ ID NO: 387676 - DNA, 19 bp, Homo sapiens
  siRNA target sequence for FLJ13352 (NM_024592.1,481-499).
gcattcttagtgctagtat

SEQ ID NO: 387677 - DNA, 19 bp, Homo sapiens
  siRNA target sequence for FLJ13352 (NM_024592.1,482-500).
cattcttagtgctagtatt

SEQ ID NO: 387678 - DNA, 19 bp, Homo sapiens
  siRNA target sequence for FLJ13352 (NM_024592.1,571-589).
cacgtcgtgcagtactgtt

SEQ ID NO: 387679 - DNA, 19 bp, Homo sapiens
  siRNA target sequence for FLJ13352 (NM_024592.1,573-591).
cgtcgtgcagtactgtttt

SEQ ID NO: 387680 - DNA, 19 bp, Homo sapiens
  siRNA target sequence for FLJ13352 (NM_024592.1,576-594).
cgtgcagtactgttttgga

SEQ ID NO: 387681 - DNA, 19 bp, Homo sapiens
  siRNA target sequence for FLJ13352 (NM_024592.1,587-605).
gttttggacttgtctatta

SEQ ID NO: 387682 - DNA, 19 bp, Homo sapiens
  siRNA target sequence for FLJ13352 (NM_024592.1,630-648).
gagccaagtgccaatggat

SEQ ID NO: 387683 - DNA, 19 bp, Homo sapiens
  siRNA target sequence for FLJ13352 (NM_024592.1,651-669).
caggaatgcctacataaca

SEQ ID NO: 387684 - DNA, 19 bp, Homo sapiens
  siRNA target sequence for FLJ13352 (NM_024592.1,663-681).
cataacagggaaaaatcta

SEQ ID NO: 387685 - DNA, 19 bp, Homo sapiens
  siRNA target sequence for FLJ13352 (NM_024592.1,692-710).
cacggtggttccatattct

SEQ ID NO: 387686 - DNA, 19 bp, Homo sapiens
  siRNA target sequence for FLJ13352 (NM_024592.1,731-749).
ggtcatctgcccatcagta

SEQ ID NO: 387687 - DNA, 19 bp, Homo sapiens
  siRNA target sequence for FLJ13352 (NM_024592.1,732-750).
gtcatctgcccatcagtat

SEQ ID NO: 387688 - DNA, 19 bp, Homo sapiens
  siRNA target sequence for FLJ13352 (NM_024592.1,734-752).
catctgcccatcagtataa

SEQ ID NO: 387689 - DNA, 19 bp, Homo sapiens
  siRNA target sequence for FLJ13352 (NM_024592.1,760-778).
gttattctcggcaatctca

SEQ ID NO: 387690 - DNA, 19 bp, Homo sapiens
  siRNA target sequence for FLJ13352 (NM_024592.1,766-784).
ctcggcaatctcaggaaaa

SEQ ID NO: 387691 - DNA, 19 bp, Homo sapiens
  siRNA target sequence for FLJ13352 (NM_024592.1,871-889).
gagctgatgatctacgttt

SEQ ID NO: 387692 - DNA, 19 bp, Homo sapiens
  siRNA target sequence for FLJ13352 (NM_024592.1,902-920).
cctttgggttccacaactt

SEQ ID NO: 387693 - DNA, 19 bp, Homo sapiens
  siRNA target sequence for FLJ13352 (NM_024592.1,903-921).
ctttgggttccacaactta

SEQ ID NO: 387694 - DNA, 19 bp, Homo sapiens
  siRNA target sequence for FLJ13352 (NM_024592.1,907-925).
gggttccacaacttaactt

SEQ ID NO: 387695 - DNA, 19 bp, Homo sapiens
  siRNA target sequence for FLJ13352 (NM_024592.1,926-944).
ggtggctagtggtgacaaa

SEQ ID NO: 387696 - DNA, 19 bp, Homo sapiens
  siRNA target sequence for FLJ13352 (NM_024592.1,927-945).
gtggctagtggtgacaaat

SEQ ID NO: 387697 - DNA, 19 bp, Homo sapiens
  siRNA target sequence for FLJ13352 (NM_024592.1,929-947).
ggctagtggtgacaaatgt

SEQ ID NO: 387698 - DNA, 19 bp, Homo sapiens
  siRNA target sequence for FLJ13352 (NM_024592.1,937-955).
gtgacaaatgtcttcttta

SEQ ID NO: 387699 - DNA, 19 bp, Homo sapiens
  siRNA target sequence for FLJ13352 (NM_024592.1,978-996).
cagccaccaattctacaaa

SEQ ID NO: 387700 - DNA, 19 bp, Homo sapiens
  siRNA target sequence for FLJ13352 (NM_024592.1,982-1000).
caccaattctacaaaagca

SEQ ID NO: 387701 - DNA, 19 bp, Homo sapiens
  siRNA target sequence for FLJ13352 (NM_024592.1,985-1003).
caattctacaaaagcaaat

SEQ ID NO: 387702 - DNA, 19 bp, Homo sapiens
  siRNA target sequence for FLJ13352 (NM_024592.1,1006-1024).
gtctcttacccgaagcata

SEQ ID NO: 387703 - DNA, 19 bp, Homo sapiens
  siRNA target sequence for FLJ13352 (NM_024592.1,1010-1028).
cttacccgaagcataggaa

SEQ ID NO: 387704 - DNA, 19 bp, Homo sapiens
  siRNA target sequence for FLJ13352 (NM_024592.1,1015-1033).
ccgaagcataggaaagctt

SEQ ID NO: 387705 - DNA, 19 bp, Homo sapiens
  siRNA target sequence for FLJ13352 (NM_024592.1,1020-1038).
gcataggaaagctttccta

SEQ ID NO: 387706 - DNA, 19 bp, Homo sapiens
  siRNA target sequence for FLJ12666 (NM_024595.1,347-365).
ccaactccggagcaaattt

SEQ ID NO: 387707 - DNA, 19 bp, Homo sapiens
  siRNA target sequence for FLJ12666 (NM_024595.1,348-366).
caactccggagcaaatttt

SEQ ID NO: 387708 - DNA, 19 bp, Homo sapiens
  siRNA target sequence for FLJ12666 (NM_024595.1,351-369).
ctccggagcaaatttttca

SEQ ID NO: 387709 - DNA, 19 bp, Homo sapiens
  siRNA target sequence for FLJ12666 (NM_024595.1,353-371).
ccggagcaaatttttcaga

SEQ ID NO: 387710 - DNA, 19 bp, Homo sapiens
  siRNA target sequence for FLJ12666 (NM_024595.1,354-372).
cggagcaaatttttcagaa

SEQ ID NO: 387711 - DNA, 19 bp, Homo sapiens
  siRNA target sequence for FLJ12666 (NM_024595.1,358-376).
gcaaatttttcagaacata

SEQ ID NO: 387712 - DNA, 19 bp, Homo sapiens
  siRNA target sequence for FLJ12666 (NM_024595.1,383-401).
gaatatagtcgttatcaga

SEQ ID NO: 387713 - DNA, 19 bp, Homo sapiens
  siRNA target sequence for FLJ12666 (NM_024595.1,514-532).
gaaggaccagcccacattt

SEQ ID NO: 387714 - DNA, 19 bp, Homo sapiens
  siRNA target sequence for FLJ12666 (NM_024595.1,538-556).
ccgacaagttggcataata

SEQ ID NO: 387715 - DNA, 19 bp, Homo sapiens
  siRNA target sequence for FLJ12666 (NM_024595.1,539-557).
cgacaagttggcataatat

SEQ ID NO: 387716 - DNA, 19 bp, Homo sapiens
  siRNA target sequence for FLJ12666 (NM_024595.1,558-576).
gtgagcgcctcttaaaaga

SEQ ID NO: 387717 - DNA, 19 bp, Homo sapiens
  siRNA target sequence for FLJ12666 (NM_024595.1,560-578).
gagcgcctcttaaaagact

SEQ ID NO: 387718 - DNA, 19 bp, Homo sapiens
  siRNA target sequence for FLJ12666 (NM_024595.1,562-580).
gcgcctcttaaaagactat

SEQ ID NO: 387719 - DNA, 19 bp, Homo sapiens
  siRNA target sequence for FLJ12666 (NM_024595.1,564-582).
gcctcttaaaagactatga

SEQ ID NO: 387720 - DNA, 19 bp, Homo sapiens
  siRNA target sequence for FLJ12666 (NM_024595.1,626-644).
ctagcagaacaatatgaat

SEQ ID NO: 387721 - DNA, 19 bp, Homo sapiens
  siRNA target sequence for FLJ13154 (NM_024598.1,220-238).
ctgacagtgtgctgaacat

SEQ ID NO: 387722 - DNA, 19 bp, Homo sapiens
  siRNA target sequence for FLJ13154 (NM_024598.1,331-349).
cccacgtctatgtaccata

SEQ ID NO: 387723 - DNA, 19 bp, Homo sapiens
  siRNA target sequence for FLJ13154 (NM_024598.1,332-350).
ccacgtctatgtaccatat

SEQ ID NO: 387724 - DNA, 19 bp, Homo sapiens
  siRNA target sequence for FLJ13154 (NM_024598.1,335-353).
cgtctatgtaccatatgaa

SEQ ID NO: 387725 - DNA, 19 bp, Homo sapiens
  siRNA target sequence for FLJ13154 (NM_024598.1,491-509).
cttcgtgcaggctctgaaa

SEQ ID NO: 387726 - DNA, 19 bp, Homo sapiens
  siRNA target sequence for FLJ13154 (NM_024598.1,547-565).
ccaaccaggtaaagattta

SEQ ID NO: 387727 - DNA, 19 bp, Homo sapiens
  siRNA target sequence for FLJ13154 (NM_024598.1,576-594).
gagaaaaccaggaccttta

SEQ ID NO: 387728 - DNA, 19 bp, Homo sapiens
  siRNA target sequence for FLJ13154 (NM_024598.1,782-800).
cgtggatgggtttgaagat

SEQ ID NO: 387729 - DNA, 19 bp, Homo sapiens
  siRNA target sequence for FLJ22341 (NM_024599.2,1173-1191).
gctccatgcctgatgatgt

SEQ ID NO: 387730 - DNA, 19 bp, Homo sapiens
  siRNA target sequence for FLJ22341 (NM_024599.2,1257-1275).
cccccgatggggtgcaaat

SEQ ID NO: 387731 - DNA, 19 bp, Homo sapiens
  siRNA target sequence for FLJ22341 (NM_024599.2,1974-1992).
ggcccgatgacatcactaa

SEQ ID NO: 387732 - DNA, 19 bp, Homo sapiens
  siRNA target sequence for FLJ22341 (NM_024599.2,1976-1994).
cccgatgacatcactaagt

SEQ ID NO: 387733 - DNA, 19 bp, Homo sapiens
  siRNA target sequence for FLJ22341 (NM_024599.2,2128-2146).
catgcacggctatttccat

SEQ ID NO: 387734 - DNA, 19 bp, Homo sapiens
  siRNA target sequence for FLJ22341 (NM_024599.2,2222-2240).
gtcccagatcagttctaca

SEQ ID NO: 387735 - DNA, 19 bp, Homo sapiens
  siRNA target sequence for FLJ22341 (NM_024599.2,2288-2306).
gtgtctgtggtctttcaaa

SEQ ID NO: 387736 - DNA, 19 bp, Homo sapiens
  siRNA target sequence for FLJ22341 (NM_024599.2,2803-2821).
ccgcttctgcgagaagtat

SEQ ID NO: 387737 - DNA, 19 bp, Homo sapiens
  siRNA target sequence for FLJ22341 (NM_024599.2,2805-2823).
gcttctgcgagaagtatga

SEQ ID NO: 387738 - DNA, 19 bp, Homo sapiens
  siRNA target sequence for FLJ20898 (NM_024600.1,883-901).
cccgaggcaccgtcaaact

SEQ ID NO: 387739 - DNA, 19 bp, Homo sapiens
  siRNA target sequence for FLJ20898 (NM_024600.1,1074-1092).
gggctcgtgactttctaca

SEQ ID NO: 387740 - DNA, 19 bp, Homo sapiens
  siRNA target sequence for FLJ20898 (NM_024600.1,1079-1097).
cgtgactttctacagaatt

SEQ ID NO: 387741 - DNA, 19 bp, Homo sapiens
  siRNA target sequence for FLJ11588 (NM_024603.1,749-767).
gcacttgtgtctgaaatga

SEQ ID NO: 387742 - DNA, 19 bp, Homo sapiens
  siRNA target sequence for FLJ11588 (NM_024603.1,823-841).
cagcggtcccgccattgat

SEQ ID NO: 387743 - DNA, 19 bp, Homo sapiens
  siRNA target sequence for FLJ11588 (NM_024603.1,825-843).
gcggtcccgccattgatct

SEQ ID NO: 387744 - DNA, 19 bp, Homo sapiens
  siRNA target sequence for FLJ11588 (NM_024603.1,881-899).
gagttacggagcactttca

SEQ ID NO: 387745 - DNA, 19 bp, Homo sapiens
  siRNA target sequence for FLJ11588 (NM_024603.1,908-926).
gcaaatacgtcgtcctatt

SEQ ID NO: 387746 - DNA, 19 bp, Homo sapiens
  siRNA target sequence for FLJ11588 (NM_024603.1,909-927).
caaatacgtcgtcctatta

SEQ ID NO: 387747 - DNA, 19 bp, Homo sapiens
  siRNA target sequence for FLJ11588 (NM_024603.1,939-957).
cgcctgtcatggacaagta

SEQ ID NO: 387748 - DNA, 19 bp, Homo sapiens
  siRNA target sequence for FLJ11588 (NM_024603.1,952-970).
caagtatatcctagacaat

SEQ ID NO: 387749 - DNA, 19 bp, Homo sapiens
  siRNA target sequence for FLJ11588 (NM_024603.1,990-1008).
gcgggatttgggttgatga

SEQ ID NO: 387750 - DNA, 19 bp, Homo sapiens
  siRNA target sequence for FLJ11588 (NM_024603.1,1037-1055).
caaggagattccaagtaca

SEQ ID NO: 387751 - DNA, 19 bp, Homo sapiens
  siRNA target sequence for FLJ11588 (NM_024603.1,1047-1065).
ccaagtacacgaagaactt

SEQ ID NO: 387752 - DNA, 19 bp, Homo sapiens
  siRNA target sequence for FLJ11588 (NM_024603.1,1277-1295).
gaaaaaatcatggatatca

SEQ ID NO: 387753 - DNA, 19 bp, Homo sapiens
  siRNA target sequence for FLJ21908 (NM_024604.1,56-74).
gcaaataaagcaatcgaat

SEQ ID NO: 387754 - DNA, 19 bp, Homo sapiens
  siRNA target sequence for FLJ21908 (NM_024604.1,57-75).
caaataaagcaatcgaatt

SEQ ID NO: 387755 - DNA, 19 bp, Homo sapiens
  siRNA target sequence for FLJ21908 (NM_024604.1,66-84).
caatcgaattacaactaca

SEQ ID NO: 387756 - DNA, 19 bp, Homo sapiens
  siRNA target sequence for FLJ21908 (NM_024604.1,115-133).
ctttatgcgggatttagaa

SEQ ID NO: 387757 - DNA, 19 bp, Homo sapiens
  siRNA target sequence for FLJ21908 (NM_024604.1,199-217).
gaatttacctcctattcga

SEQ ID NO: 387758 - DNA, 19 bp, Homo sapiens
  siRNA target sequence for FLJ21908 (NM_024604.1,501-519).
caattgactgctacacaaa

SEQ ID NO: 387759 - DNA, 19 bp, Homo sapiens
  siRNA target sequence for FLJ21908 (NM_024604.1,522-540).
gcatggatgccgatccata

SEQ ID NO: 387760 - DNA, 19 bp, Homo sapiens
  siRNA target sequence for FLJ21908 (NM_024604.1,523-541).
catggatgccgatccatat

SEQ ID NO: 387761 - DNA, 19 bp, Homo sapiens
  siRNA target sequence for FLJ21908 (NM_024604.1,526-544).
ggatgccgatccatataat

SEQ ID NO: 387762 - DNA, 19 bp, Homo sapiens
  siRNA target sequence for FLJ21908 (NM_024604.1,559-577).
gaacagagcgtcagcatat

SEQ ID NO: 387763 - DNA, 19 bp, Homo sapiens
  siRNA target sequence for FLJ21908 (NM_024604.1,562-580).
cagagcgtcagcatatttt

SEQ ID NO: 387764 - DNA, 19 bp, Homo sapiens
  siRNA target sequence for FLJ21908 (NM_024604.1,567-585).
cgtcagcatattttagact

SEQ ID NO: 387765 - DNA, 19 bp, Homo sapiens
  siRNA target sequence for FLJ21908 (NM_024604.1,599-617).
gttgctgagtctgattgta

SEQ ID NO: 387766 - DNA, 19 bp, Homo sapiens
  siRNA target sequence for FLJ21908 (NM_024604.1,607-625).
gtctgattgtaatttagca

SEQ ID NO: 387767 - DNA, 19 bp, Homo sapiens
  siRNA target sequence for FLJ21908 (NM_024604.1,669-687).
gtgctgctcgatttgcttt

SEQ ID NO: 387768 - DNA, 19 bp, Homo sapiens
  siRNA target sequence for FLJ21908 (NM_024604.1,675-693).
ctcgatttgctttgcaaaa

SEQ ID NO: 387769 - DNA, 19 bp, Homo sapiens
  siRNA target sequence for FLJ21908 (NM_024604.1,784-802).
ggctttagcatccaaagaa

SEQ ID NO: 387770 - DNA, 19 bp, Homo sapiens
  siRNA target sequence for FLJ21908 (NM_024604.1,791-809).
gcatccaaagaaaactcat

SEQ ID NO: 387771 - DNA, 19 bp, Homo sapiens
  siRNA target sequence for FLJ21908 (NM_024604.1,821-839).
gctgacatagtgattaagt

SEQ ID NO: 387772 - DNA, 19 bp, Homo sapiens
  siRNA target sequence for FLJ21908 (NM_024604.1,849-867).
gagagcgaaagcaaattga

SEQ ID NO: 387773 - DNA, 19 bp, Homo sapiens
  siRNA target sequence for FLJ21908 (NM_024604.1,886-904).
gcaggccatttcagagaaa

SEQ ID NO: 387774 - DNA, 19 bp, Homo sapiens
  siRNA target sequence for FLJ21908 (NM_024604.1,1011-1029).
gagctatggcctatctgaa

SEQ ID NO: 387775 - DNA, 19 bp, Homo sapiens
  siRNA target sequence for FLJ21908 (NM_024604.1,1248-1266).
gacactgggatgatgtctt

SEQ ID NO: 387776 - DNA, 19 bp, Homo sapiens
  siRNA target sequence for FLJ21908 (NM_024604.1,1255-1273).
ggatgatgtctttcttgat

SEQ ID NO: 387777 - DNA, 19 bp, Homo sapiens
  siRNA target sequence for FLJ21908 (NM_024604.1,1292-1310).
gtggtaaaacccattgata

SEQ ID NO: 387778 - DNA, 19 bp, Homo sapiens
  siRNA target sequence for FLJ21908 (NM_024604.1,1294-1312).
ggtaaaacccattgataat

SEQ ID NO: 387779 - DNA, 19 bp, Homo sapiens
  siRNA target sequence for FLJ21908 (NM_024604.1,1316-1334).
ccgcatcctggatcaacta

SEQ ID NO: 387780 - DNA, 19 bp, Homo sapiens
  siRNA target sequence for FLJ21908 (NM_024604.1,1317-1335).
cgcatcctggatcaactaa

SEQ ID NO: 387781 - DNA, 19 bp, Homo sapiens
  siRNA target sequence for FLJ21908 (NM_024604.1,1318-1336).
gcatcctggatcaactaaa

SEQ ID NO: 387782 - DNA, 19 bp, Homo sapiens
  siRNA target sequence for FLJ21908 (NM_024604.1,1337-1355).
ccactcaagaaggttatta

SEQ ID NO: 387783 - DNA, 19 bp, Homo sapiens
  siRNA target sequence for FLJ21908 (NM_024604.1,1416-1434).
ctccagagaataatcctat

SEQ ID NO: 387784 - DNA, 19 bp, Homo sapiens
  siRNA target sequence for FLJ21908 (NM_024604.1,1418-1436).
ccagagaataatcctatta

SEQ ID NO: 387785 - DNA, 19 bp, Homo sapiens
  siRNA target sequence for FLJ21908 (NM_024604.1,1520-1538).
ccaagagcaaaagtattga

SEQ ID NO: 387786 - DNA, 19 bp, Homo sapiens
  siRNA target sequence for FLJ21908 (NM_024604.1,1544-1562).
gaagaagtcagtgatactt

SEQ ID NO: 387787 - DNA, 19 bp, Homo sapiens
  siRNA target sequence for FLJ21908 (NM_024604.1,1547-1565).
gaagtcagtgatacttcat

SEQ ID NO: 387788 - DNA, 19 bp, Homo sapiens
  siRNA target sequence for FLJ21908 (NM_024604.1,1618-1636).
gaaaatgcccatagagata

SEQ ID NO: 387789 - DNA, 19 bp, Homo sapiens
  siRNA target sequence for FLJ21908 (NM_024604.1,1654-1672).
gtttgccacaactgttctt

SEQ ID NO: 387790 - DNA, 19 bp, Homo sapiens
  siRNA target sequence for FLJ21908 (NM_024604.1,1692-1710).
cgttccagctcgaatctga

SEQ ID NO: 387791 - DNA, 19 bp, Homo sapiens
  siRNA target sequence for FLJ21908 (NM_024604.1,1731-1749).
ctccagatatgttgtatca

SEQ ID NO: 387792 - DNA, 19 bp, Homo sapiens
  siRNA target sequence for FLJ21908 (NM_024604.1,1736-1754).
gatatgttgtatcagtatt

SEQ ID NO: 387793 - DNA, 19 bp, Homo sapiens
  siRNA target sequence for FLJ21908 (NM_024604.1,1766-1784).
gaaccatctttgtatccta

SEQ ID NO: 387794 - DNA, 19 bp, Homo sapiens
  siRNA target sequence for FLJ21908 (NM_024604.1,1773-1791).
ctttgtatcctaagttgtt

SEQ ID NO: 387795 - DNA, 19 bp, Homo sapiens
  siRNA target sequence for FLJ21908 (NM_024604.1,1802-1820).
ctggatccagatgtattca

SEQ ID NO: 387796 - DNA, 19 bp, Homo sapiens
  siRNA target sequence for FLJ21908 (NM_024604.1,1814-1832).
gtattcaaccagatcgtta

SEQ ID NO: 387797 - DNA, 19 bp, Homo sapiens
  siRNA target sequence for FLJ21908 (NM_024604.1,1883-1901).
gaaatcttacaaagacttt

SEQ ID NO: 387798 - DNA, 19 bp, Homo sapiens
  siRNA target sequence for FLJ21908 (NM_024604.1,1957-1975).
gattgcacgtgcattattt

SEQ ID NO: 387799 - DNA, 19 bp, Homo sapiens
  siRNA target sequence for FLJ21908 (NM_024604.1,1965-1983).
gtgcattatttaatcacat

SEQ ID NO: 387800 - DNA, 19 bp, Homo sapiens
  siRNA target sequence for FLJ21908 (NM_024604.1,2007-2025).
gttctgtcgaagaactcaa

SEQ ID NO: 387801 - DNA, 19 bp, Homo sapiens
  siRNA target sequence for FLJ20896 (NM_024605.2,362-380).
gtttgcttgctcactagat

SEQ ID NO: 387802 - DNA, 19 bp, Homo sapiens
  siRNA target sequence for FLJ20896 (NM_024605.2,480-498).
cctctcatgacctatgagt

SEQ ID NO: 387803 - DNA, 19 bp, Homo sapiens
  siRNA target sequence for FLJ20896 (NM_024605.2,481-499).
ctctcatgacctatgagtt

SEQ ID NO: 387804 - DNA, 19 bp, Homo sapiens
  siRNA target sequence for FLJ20896 (NM_024605.2,485-503).
catgacctatgagttacat

SEQ ID NO: 387805 - DNA, 19 bp, Homo sapiens
  siRNA target sequence for FLJ20896 (NM_024605.2,535-553).
gcccagaatctcgtgttaa

SEQ ID NO: 387806 - DNA, 19 bp, Homo sapiens
  siRNA target sequence for FLJ20896 (NM_024605.2,546-564).
cgtgttaatgcgatccatt

SEQ ID NO: 387807 - DNA, 19 bp, Homo sapiens
  siRNA target sequence for FLJ20896 (NM_024605.2,547-565).
gtgttaatgcgatccattt

SEQ ID NO: 387808 - DNA, 19 bp, Homo sapiens
  siRNA target sequence for FLJ20896 (NM_024605.2,549-567).
gttaatgcgatccatttct

SEQ ID NO: 387809 - DNA, 19 bp, Homo sapiens
  siRNA target sequence for FLJ20896 (NM_024605.2,730-748).
ccctcatggacttgaagtt

SEQ ID NO: 387810 - DNA, 19 bp, Homo sapiens
  siRNA target sequence for FLJ20896 (NM_024605.2,904-922).
ccgtggccgtctacaatct

SEQ ID NO: 387811 - DNA, 19 bp, Homo sapiens
  siRNA target sequence for FLJ20896 (NM_024605.2,905-923).
cgtggccgtctacaatctt

SEQ ID NO: 387812 - DNA, 19 bp, Homo sapiens
  siRNA target sequence for FLJ20896 (NM_024605.2,908-926).
ggccgtctacaatctttgt

SEQ ID NO: 387813 - DNA, 19 bp, Homo sapiens
  siRNA target sequence for FLJ20896 (NM_024605.2,910-928).
ccgtctacaatctttgtct

SEQ ID NO: 387814 - DNA, 19 bp, Homo sapiens
  siRNA target sequence for FLJ20896 (NM_024605.2,1299-1317).
gaacacagctcggaattat

SEQ ID NO: 387815 - DNA, 19 bp, Homo sapiens
  siRNA target sequence for FLJ20896 (NM_024605.2,1302-1320).
cacagctcggaattatctt

SEQ ID NO: 387816 - DNA, 19 bp, Homo sapiens
  siRNA target sequence for FLJ20896 (NM_024605.2,1306-1324).
gctcggaattatcttttga

SEQ ID NO: 387817 - DNA, 19 bp, Homo sapiens
  siRNA target sequence for PPP1R3B (NM_024607.1,161-179).
gtggacatcgagtacagat

SEQ ID NO: 387818 - DNA, 19 bp, Homo sapiens
  siRNA target sequence for PPP1R3B (NM_024607.1,209-227).
gagaggtttgcctttaaga

SEQ ID NO: 387819 - DNA, 19 bp, Homo sapiens
  siRNA target sequence for PPP1R3B (NM_024607.1,249-267).
cactgaggccttgtattca

SEQ ID NO: 387820 - DNA, 19 bp, Homo sapiens
  siRNA target sequence for PPP1R3B (NM_024607.1,405-423).
cgctagatatgccattcaa

SEQ ID NO: 387821 - DNA, 19 bp, Homo sapiens
  siRNA target sequence for PPP1R3B (NM_024607.1,407-425).
ctagatatgccattcaaca

SEQ ID NO: 387822 - DNA, 19 bp, Homo sapiens
  siRNA target sequence for PPP1R3B (NM_024607.1,410-428).
gatatgccattcaacatca

SEQ ID NO: 387823 - DNA, 19 bp, Homo sapiens
  siRNA target sequence for PPP1R3B (NM_024607.1,499-517).
gccctctgcagattactta

SEQ ID NO: 387824 - DNA, 19 bp, Homo sapiens
  siRNA target sequence for PPP1R3B (NM_024607.1,504-522).
ctgcagattacttagactt

SEQ ID NO: 387825 - DNA, 19 bp, Homo sapiens
  siRNA target sequence for PPP1R3B (NM_024607.1,506-524).
gcagattacttagacttta

SEQ ID NO: 387826 - DNA, 19 bp, Homo sapiens
  siRNA target sequence for PPP1R3B (NM_024607.1,605-623).
cagaacctcgcatttgaga

SEQ ID NO: 387827 - DNA, 19 bp, Homo sapiens
  siRNA target sequence for PPP1R3B (NM_024607.1,685-703).
gtacgtgaaggacacttat

SEQ ID NO: 387828 - DNA, 19 bp, Homo sapiens
  siRNA target sequence for PPP1R3B (NM_024607.1,748-766).
cgagaagattcagtcttat

SEQ ID NO: 387829 - DNA, 19 bp, Homo sapiens
  siRNA target sequence for PPP1R3B (NM_024607.1,751-769).
gaagattcagtcttatgaa

SEQ ID NO: 387830 - DNA, 19 bp, Homo sapiens
  siRNA target sequence for PPP1R3B (NM_024607.1,754-772).
gattcagtcttatgaaaga

SEQ ID NO: 387831 - DNA, 19 bp, Homo sapiens
  siRNA target sequence for PPP1R3B (NM_024607.1,847-865).
catccgggctgagttaaaa

SEQ ID NO: 387832 - DNA, 19 bp, Homo sapiens
  siRNA target sequence for PPP1R3B (NM_024607.1,851-869).
cgggctgagttaaaatcta

SEQ ID NO: 387833 - DNA, 19 bp, Homo sapiens
  siRNA target sequence for PPP1R3B (NM_024607.1,940-958).
gtgttcctatggtctgttt

SEQ ID NO: 387834 - DNA, 19 bp, Homo sapiens
  siRNA target sequence for PPP1R3B (NM_024607.1,966-984).
ggccaagttacttaggata

SEQ ID NO: 387835 - DNA, 19 bp, Homo sapiens
  siRNA target sequence for PPP1R3B (NM_024607.1,969-987).
caagttacttaggatatga

SEQ ID NO: 387836 - DNA, 19 bp, Homo sapiens
  siRNA target sequence for HSPBAP1 (NM_024610.3,250-268).
cctgcaatcttctgtaaca

SEQ ID NO: 387837 - DNA, 19 bp, Homo sapiens
  siRNA target sequence for HSPBAP1 (NM_024610.3,251-269).
ctgcaatcttctgtaacat

SEQ ID NO: 387838 - DNA, 19 bp, Homo sapiens
  siRNA target sequence for HSPBAP1 (NM_024610.3,286-304).
gcacgacactggaatgcta

SEQ ID NO: 387839 - DNA, 19 bp, Homo sapiens
  siRNA target sequence for HSPBAP1 (NM_024610.3,287-305).
cacgacactggaatgctaa

SEQ ID NO: 387840 - DNA, 19 bp, Homo sapiens
  siRNA target sequence for HSPBAP1 (NM_024610.3,289-307).
cgacactggaatgctaaat

SEQ ID NO: 387841 - DNA, 19 bp, Homo sapiens
  siRNA target sequence for HSPBAP1 (NM_024610.3,492-510).
ctgggcttatgctgactat

SEQ ID NO: 387842 - DNA, 19 bp, Homo sapiens
  siRNA target sequence for HSPBAP1 (NM_024610.3,494-512).
gggcttatgctgactataa

SEQ ID NO: 387843 - DNA, 19 bp, Homo sapiens
  siRNA target sequence for HSPBAP1 (NM_024610.3,497-515).
cttatgctgactataaata

SEQ ID NO: 387844 - DNA, 19 bp, Homo sapiens
  siRNA target sequence for HSPBAP1 (NM_024610.3,595-613).
ggacaggaaagtacattgt

SEQ ID NO: 387845 - DNA, 19 bp, Homo sapiens
  siRNA target sequence for HSPBAP1 (NM_024610.3,646-664).
catctggactcctatggtt

SEQ ID NO: 387846 - DNA, 19 bp, Homo sapiens
  siRNA target sequence for HSPBAP1 (NM_024610.3,718-736).
gaagatactcctttccttt

SEQ ID NO: 387847 - DNA, 19 bp, Homo sapiens
  siRNA target sequence for HSPBAP1 (NM_024610.3,740-758).
caactagaatcccttatga

SEQ ID NO: 387848 - DNA, 19 bp, Homo sapiens
  siRNA target sequence for HSPBAP1 (NM_024610.3,760-778).
gaatctagtgtgttcagta

SEQ ID NO: 387849 - DNA, 19 bp, Homo sapiens
  siRNA target sequence for HSPBAP1 (NM_024610.3,764-782).
ctagtgtgttcagtaaaat

SEQ ID NO: 387850 - DNA, 19 bp, Homo sapiens
  siRNA target sequence for HSPBAP1 (NM_024610.3,881-899).
gacactggtggcattacgt

SEQ ID NO: 387851 - DNA, 19 bp, Homo sapiens
  siRNA target sequence for HSPBAP1 (NM_024610.3,890-908).
ggcattacgtagaatccat

SEQ ID NO: 387852 - DNA, 19 bp, Homo sapiens
  siRNA target sequence for HSPBAP1 (NM_024610.3,891-909).
gcattacgtagaatccatt

SEQ ID NO: 387853 - DNA, 19 bp, Homo sapiens
  siRNA target sequence for HSPBAP1 (NM_024610.3,913-931).
cctgtcactgtcagtataa

SEQ ID NO: 387854 - DNA, 19 bp, Homo sapiens
  siRNA target sequence for HSPBAP1 (NM_024610.3,914-932).
ctgtcactgtcagtataaa

SEQ ID NO: 387855 - DNA, 19 bp, Homo sapiens
  siRNA target sequence for HSPBAP1 (NM_024610.3,916-934).
gtcactgtcagtataaact

SEQ ID NO: 387856 - DNA, 19 bp, Homo sapiens
  siRNA target sequence for HSPBAP1 (NM_024610.3,978-996).
ggcaatcacccgtatgctt

SEQ ID NO: 387857 - DNA, 19 bp, Homo sapiens
  siRNA target sequence for HSPBAP1 (NM_024610.3,1081-1099).
gtcaactgttgctacttaa

SEQ ID NO: 387858 - DNA, 19 bp, Homo sapiens
  siRNA target sequence for HSPBAP1 (NM_024610.3,1083-1101).
caactgttgctacttaaat

SEQ ID NO: 387859 - DNA, 19 bp, Homo sapiens
  siRNA target sequence for HSPBAP1 (NM_024610.3,1133-1151).
gaacatctgaggtagtaga

SEQ ID NO: 387860 - DNA, 19 bp, Homo sapiens
  siRNA target sequence for HSPBAP1 (NM_024610.3,1169-1187).
cagatggagagcacatgaa

SEQ ID NO: 387861 - DNA, 19 bp, Homo sapiens
  siRNA target sequence for HSPBAP1 (NM_024610.3,1355-1373).
gaagtgatgggaaagactt

SEQ ID NO: 387862 - DNA, 19 bp, Homo sapiens
  siRNA target sequence for HSPBAP1 (NM_024610.3,1458-1476).
ggaacagattgcctcaaat

SEQ ID NO: 387863 - DNA, 19 bp, Homo sapiens
  siRNA target sequence for HSPBAP1 (NM_024610.3,1459-1477).
gaacagattgcctcaaata

SEQ ID NO: 387864 - DNA, 19 bp, Homo sapiens
  siRNA target sequence for HSPBAP1 (NM_024610.3,1484-1502).
cgactcctcaaacattcat

SEQ ID NO: 387865 - DNA, 19 bp, Homo sapiens
  siRNA target sequence for HSPBAP1 (NM_024610.3,1557-1575).
ggcacaacttttgatacaa

SEQ ID NO: 387866 - DNA, 19 bp, Homo sapiens
  siRNA target sequence for NARG2 (NM_024611.2,199-217).
ctccaagatggtcataagt

SEQ ID NO: 387867 - DNA, 19 bp, Homo sapiens
  siRNA target sequence for NARG2 (NM_024611.2,256-274).
ccttaagacatttttctct

SEQ ID NO: 387868 - DNA, 19 bp, Homo sapiens
  siRNA target sequence for NARG2 (NM_024611.2,271-289).
ctctcgagaaaattataaa

SEQ ID NO: 387869 - DNA, 19 bp, Homo sapiens
  siRNA target sequence for NARG2 (NM_024611.2,297-315).
ccatggctccaagtttaaa

SEQ ID NO: 387870 - DNA, 19 bp, Homo sapiens
  siRNA target sequence for NARG2 (NM_024611.2,298-316).
catggctccaagtttaaaa

SEQ ID NO: 387871 - DNA, 19 bp, Homo sapiens
  siRNA target sequence for NARG2 (NM_024611.2,339-357).
gacgtataggagaaaattt

SEQ ID NO: 387872 - DNA, 19 bp, Homo sapiens
  siRNA target sequence for NARG2 (NM_024611.2,435-453).
caattggaatggttcttct

SEQ ID NO: 387873 - DNA, 19 bp, Homo sapiens
  siRNA target sequence for NARG2 (NM_024611.2,501-519).
gagagcagaggagttatgt

SEQ ID NO: 387874 - DNA, 19 bp, Homo sapiens
  siRNA target sequence for NARG2 (NM_024611.2,510-528).
ggagttatgtggacttgtt

SEQ ID NO: 387875 - DNA, 19 bp, Homo sapiens
  siRNA target sequence for NARG2 (NM_024611.2,529-547).
ggttaaatacgcaaagatt

SEQ ID NO: 387876 - DNA, 19 bp, Homo sapiens
  siRNA target sequence for NARG2 (NM_024611.2,614-632).
catgtgaacgaagaagtta

SEQ ID NO: 387877 - DNA, 19 bp, Homo sapiens
  siRNA target sequence for NARG2 (NM_024611.2,626-644).
gaagttactgagttcctaa

SEQ ID NO: 387878 - DNA, 19 bp, Homo sapiens
  siRNA target sequence for NARG2 (NM_024611.2,675-693).
cgcaggattataatatgct

SEQ ID NO: 387879 - DNA, 19 bp, Homo sapiens
  siRNA target sequence for NARG2 (NM_024611.2,676-694).
gcaggattataatatgctt

SEQ ID NO: 387880 - DNA, 19 bp, Homo sapiens
  siRNA target sequence for NARG2 (NM_024611.2,706-724).
ccgtctcttcacagagaaa

SEQ ID NO: 387881 - DNA, 19 bp, Homo sapiens
  siRNA target sequence for NARG2 (NM_024611.2,707-725).
cgtctcttcacagagaaaa

SEQ ID NO: 387882 - DNA, 19 bp, Homo sapiens
  siRNA target sequence for NARG2 (NM_024611.2,732-750).
gagcttgcattgaacaagt

SEQ ID NO: 387883 - DNA, 19 bp, Homo sapiens
  siRNA target sequence for NARG2 (NM_024611.2,738-756).
gcattgaacaagtgaaaaa

SEQ ID NO: 387884 - DNA, 19 bp, Homo sapiens
  siRNA target sequence for NARG2 (NM_024611.2,757-775).
gtattcagaattctatact

SEQ ID NO: 387885 - DNA, 19 bp, Homo sapiens
  siRNA target sequence for NARG2 (NM_024611.2,789-807).
ccagcttaatgggattctt

SEQ ID NO: 387886 - DNA, 19 bp, Homo sapiens
  siRNA target sequence for NARG2 (NM_024611.2,823-841).
gatgggattaaagttagaa

SEQ ID NO: 387887 - DNA, 19 bp, Homo sapiens
  siRNA target sequence for NARG2 (NM_024611.2,853-871).
cgcattgggcagtgtaaaa

SEQ ID NO: 387888 - DNA, 19 bp, Homo sapiens
  siRNA target sequence for NARG2 (NM_024611.2,855-873).
cattgggcagtgtaaaata

SEQ ID NO: 387889 - DNA, 19 bp, Homo sapiens
  siRNA target sequence for NARG2 (NM_024611.2,860-878).
ggcagtgtaaaatatgtga

SEQ ID NO: 387890 - DNA, 19 bp, Homo sapiens
  siRNA target sequence for NARG2 (NM_024611.2,916-934).
gtcaaaggacgatatagct

SEQ ID NO: 387891 - DNA, 19 bp, Homo sapiens
  siRNA target sequence for NARG2 (NM_024611.2,922-940).
ggacgatatagctaccatt

SEQ ID NO: 387892 - DNA, 19 bp, Homo sapiens
  siRNA target sequence for NARG2 (NM_024611.2,925-943).
cgatatagctaccattgaa

SEQ ID NO: 387893 - DNA, 19 bp, Homo sapiens
  siRNA target sequence for NARG2 (NM_024611.2,926-944).
gatatagctaccattgaaa

SEQ ID NO: 387894 - DNA, 19 bp, Homo sapiens
  siRNA target sequence for NARG2 (NM_024611.2,937-955).
cattgaaacgtcagaacaa

SEQ ID NO: 387895 - DNA, 19 bp, Homo sapiens
  siRNA target sequence for NARG2 (NM_024611.2,962-980).
gaagctatgcattatgata

SEQ ID NO: 387896 - DNA, 19 bp, Homo sapiens
  siRNA target sequence for NARG2 (NM_024611.2,965-983).
gctatgcattatgatatta

SEQ ID NO: 387897 - DNA, 19 bp, Homo sapiens
  siRNA target sequence for NARG2 (NM_024611.2,1003-1021).
gaagcttgtttccagatat

SEQ ID NO: 387898 - DNA, 19 bp, Homo sapiens
  siRNA target sequence for NARG2 (NM_024611.2,1015-1033).
cagatatcaccctcagata

SEQ ID NO: 387899 - DNA, 19 bp, Homo sapiens
  siRNA target sequence for NARG2 (NM_024611.2,1024-1042).
ccctcagatagctctaact

SEQ ID NO: 387900 - DNA, 19 bp, Homo sapiens
  siRNA target sequence for NARG2 (NM_024611.2,1025-1043).
cctcagatagctctaacta

SEQ ID NO: 387901 - DNA, 19 bp, Homo sapiens
  siRNA target sequence for NARG2 (NM_024611.2,1035-1053).
ctctaactagtcagtcatt

SEQ ID NO: 387902 - DNA, 19 bp, Homo sapiens
  siRNA target sequence for NARG2 (NM_024611.2,1037-1055).
ctaactagtcagtcattat

SEQ ID NO: 387903 - DNA, 19 bp, Homo sapiens
  siRNA target sequence for NARG2 (NM_024611.2,1044-1062).
gtcagtcattatttacctt

SEQ ID NO: 387904 - DNA, 19 bp, Homo sapiens
  siRNA target sequence for NARG2 (NM_024611.2,1048-1066).
gtcattatttaccttatta

SEQ ID NO: 387905 - DNA, 19 bp, Homo sapiens
  siRNA target sequence for NARG2 (NM_024611.2,1134-1152).
caggttcaaaaccagttaa

SEQ ID NO: 387906 - DNA, 19 bp, Homo sapiens
  siRNA target sequence for NARG2 (NM_024611.2,1145-1163).
ccagttaaagtaatatata

SEQ ID NO: 387907 - DNA, 19 bp, Homo sapiens
  siRNA target sequence for NARG2 (NM_024611.2,1246-1264).
gtccaaaaacacatctgtt

SEQ ID NO: 387908 - DNA, 19 bp, Homo sapiens
  siRNA target sequence for NARG2 (NM_024611.2,1288-1306).
caaacctgaagagtttata

SEQ ID NO: 387909 - DNA, 19 bp, Homo sapiens
  siRNA target sequence for NARG2 (NM_024611.2,1333-1351).
caacgagtgccgaaaaatt

SEQ ID NO: 387910 - DNA, 19 bp, Homo sapiens
  siRNA target sequence for NARG2 (NM_024611.2,1352-1370).
gagagtcttgaaaacttgt

SEQ ID NO: 387911 - DNA, 19 bp, Homo sapiens
  siRNA target sequence for NARG2 (NM_024611.2,1354-1372).
gagtcttgaaaacttgtat

SEQ ID NO: 387912 - DNA, 19 bp, Homo sapiens
  siRNA target sequence for NARG2 (NM_024611.2,1415-1433).
gtaaccaccaccaaagtat

SEQ ID NO: 387913 - DNA, 19 bp, Homo sapiens
  siRNA target sequence for NARG2 (NM_024611.2,1442-1460).
ccaagtccagcaagtactt

SEQ ID NO: 387914 - DNA, 19 bp, Homo sapiens
  siRNA target sequence for NARG2 (NM_024611.2,1455-1473).
gtacttccacagtacctaa

SEQ ID NO: 387915 - DNA, 19 bp, Homo sapiens
  siRNA target sequence for NARG2 (NM_024611.2,1458-1476).
cttccacagtacctaacat

SEQ ID NO: 387916 - DNA, 19 bp, Homo sapiens
  siRNA target sequence for NARG2 (NM_024611.2,1523-1541).
ccaagtgcaccagacattt

SEQ ID NO: 387917 - DNA, 19 bp, Homo sapiens
  siRNA target sequence for NARG2 (NM_024611.2,1537-1555).
catttctgctaattctaga

SEQ ID NO: 387918 - DNA, 19 bp, Homo sapiens
  siRNA target sequence for NARG2 (NM_024611.2,1544-1562).
gctaattctagaagtttat

SEQ ID NO: 387919 - DNA, 19 bp, Homo sapiens
  siRNA target sequence for NARG2 (NM_024611.2,1600-1618).
gctggtcactggtatggat

SEQ ID NO: 387920 - DNA, 19 bp, Homo sapiens
  siRNA target sequence for NARG2 (NM_024611.2,1623-1641).
gccctgaggaatgcaaaaa

SEQ ID NO: 387921 - DNA, 19 bp, Homo sapiens
  siRNA target sequence for NARG2 (NM_024611.2,1654-1672).
gggatttgaatcatgtgaa

SEQ ID NO: 387922 - DNA, 19 bp, Homo sapiens
  siRNA target sequence for NARG2 (NM_024611.2,1686-1704).
ctgacaagcctttgataca

SEQ ID NO: 387923 - DNA, 19 bp, Homo sapiens
  siRNA target sequence for NARG2 (NM_024611.2,1690-1708).
caagcctttgatacaagat

SEQ ID NO: 387924 - DNA, 19 bp, Homo sapiens
  siRNA target sequence for NARG2 (NM_024611.2,1693-1711).
gcctttgatacaagatagt

SEQ ID NO: 387925 - DNA, 19 bp, Homo sapiens
  siRNA target sequence for NARG2 (NM_024611.2,1722-1740).
catctgatgccttacagtt

SEQ ID NO: 387926 - DNA, 19 bp, Homo sapiens
  siRNA target sequence for NARG2 (NM_024611.2,1815-1833).
gacctaatgttctagaaaa

SEQ ID NO: 387927 - DNA, 19 bp, Homo sapiens
  siRNA target sequence for NARG2 (NM_024611.2,1892-1910).
gttctctgcagcagtgata

SEQ ID NO: 387928 - DNA, 19 bp, Homo sapiens
  siRNA target sequence for NARG2 (NM_024611.2,1913-1931).
gatgaggagtgtttaatca

SEQ ID NO: 387929 - DNA, 19 bp, Homo sapiens
  siRNA target sequence for NARG2 (NM_024611.2,1921-1939).
gtgtttaatcattgataca

SEQ ID NO: 387930 - DNA, 19 bp, Homo sapiens
  siRNA target sequence for NARG2 (NM_024611.2,1970-1988).
gctgttgtgggttctaact

SEQ ID NO: 387931 - DNA, 19 bp, Homo sapiens
  siRNA target sequence for NARG2 (NM_024611.2,1971-1989).
ctgttgtgggttctaactt

SEQ ID NO: 387932 - DNA, 19 bp, Homo sapiens
  siRNA target sequence for NARG2 (NM_024611.2,1973-1991).
gttgtgggttctaacttaa

SEQ ID NO: 387933 - DNA, 19 bp, Homo sapiens
  siRNA target sequence for NARG2 (NM_024611.2,1976-1994).
gtgggttctaacttaagtt

SEQ ID NO: 387934 - DNA, 19 bp, Homo sapiens
  siRNA target sequence for NARG2 (NM_024611.2,1996-2014).
cagaccagctagtccaaat

SEQ ID NO: 387935 - DNA, 19 bp, Homo sapiens
  siRNA target sequence for NARG2 (NM_024611.2,2025-2043).
gacaggcttctgtaggaaa

SEQ ID NO: 387936 - DNA, 19 bp, Homo sapiens
  siRNA target sequence for NARG2 (NM_024611.2,2047-2065).
gactaatactgcttgtagt

SEQ ID NO: 387937 - DNA, 19 bp, Homo sapiens
  siRNA target sequence for NARG2 (NM_024611.2,2093-2111).
cctatcaaacgagtatata

SEQ ID NO: 387938 - DNA, 19 bp, Homo sapiens
  siRNA target sequence for NARG2 (NM_024611.2,2094-2112).
ctatcaaacgagtatataa

SEQ ID NO: 387939 - DNA, 19 bp, Homo sapiens
  siRNA target sequence for NARG2 (NM_024611.2,2164-2182).
gccaatttccagaaaagta

SEQ ID NO: 387940 - DNA, 19 bp, Homo sapiens
  siRNA target sequence for NARG2 (NM_024611.2,2183-2201).
ccagaattgcccttaatga

SEQ ID NO: 387941 - DNA, 19 bp, Homo sapiens
  siRNA target sequence for NARG2 (NM_024611.2,2184-2202).
cagaattgcccttaatgaa

SEQ ID NO: 387942 - DNA, 19 bp, Homo sapiens
  siRNA target sequence for NARG2 (NM_024611.2,2186-2204).
gaattgcccttaatgaatt

SEQ ID NO: 387943 - DNA, 19 bp, Homo sapiens
  siRNA target sequence for NARG2 (NM_024611.2,2260-2278).
ctctagttggccgaaatct

SEQ ID NO: 387944 - DNA, 19 bp, Homo sapiens
  siRNA target sequence for NARG2 (NM_024611.2,2280-2298).
gatggccttctgcatttca

SEQ ID NO: 387945 - DNA, 19 bp, Homo sapiens
  siRNA target sequence for NARG2 (NM_024611.2,2400-2418).
gcctgcaagacctgttgtt

SEQ ID NO: 387946 - DNA, 19 bp, Homo sapiens
  siRNA target sequence for NARG2 (NM_024611.2,2449-2467).
gacaagaccacgttctaaa

SEQ ID NO: 387947 - DNA, 19 bp, Homo sapiens
  siRNA target sequence for NARG2 (NM_024611.2,2561-2579).
gaactttgtcgcttatgga

SEQ ID NO: 387948 - DNA, 19 bp, Homo sapiens
  siRNA target sequence for NARG2 (NM_024611.2,2570-2588).
cgcttatggactgaaagtt

SEQ ID NO: 387949 - DNA, 19 bp, Homo sapiens
  siRNA target sequence for NARG2 (NM_024611.2,2571-2589).
gcttatggactgaaagttt

SEQ ID NO: 387950 - DNA, 19 bp, Homo sapiens
  siRNA target sequence for NARG2 (NM_024611.2,2618-2636).
gggcatatcgatgcattta

SEQ ID NO: 387951 - DNA, 19 bp, Homo sapiens
  siRNA target sequence for NARG2 (NM_024611.2,2620-2638).
gcatatcgatgcatttact

SEQ ID NO: 387952 - DNA, 19 bp, Homo sapiens
  siRNA target sequence for NARG2 (NM_024611.2,2621-2639).
catatcgatgcatttactt

SEQ ID NO: 387953 - DNA, 19 bp, Homo sapiens
  siRNA target sequence for NARG2 (NM_024611.2,2694-2712).
cagcactcaagatttccaa

SEQ ID NO: 387954 - DNA, 19 bp, Homo sapiens
  siRNA target sequence for NARG2 (NM_024611.2,2759-2777).
caggagggttcctacttgt

SEQ ID NO: 387955 - DNA, 19 bp, Homo sapiens
  siRNA target sequence for NARG2 (NM_024611.2,2761-2779).
ggagggttcctacttgtta

SEQ ID NO: 387956 - DNA, 19 bp, Homo sapiens
  siRNA target sequence for NARG2 (NM_024611.2,2762-2780).
gagggttcctacttgttat

SEQ ID NO: 387957 - DNA, 19 bp, Homo sapiens
  siRNA target sequence for NARG2 (NM_024611.2,2764-2782).
gggttcctacttgttatct

SEQ ID NO: 387958 - DNA, 19 bp, Homo sapiens
  siRNA target sequence for NARG2 (NM_024611.2,2799-2817).
cttcactcctgatttataa

SEQ ID NO: 387959 - DNA, 19 bp, Homo sapiens
  siRNA target sequence for NARG2 (NM_024611.2,2846-2864).
gcatacaatttgtataaaa

SEQ ID NO: 387960 - DNA, 19 bp, Homo sapiens
  siRNA target sequence for NARG2 (NM_024611.2,2924-2942).
cccagcctgttattaccat

SEQ ID NO: 387961 - DNA, 19 bp, Homo sapiens
  siRNA target sequence for NARG2 (NM_024611.2,2925-2943).
ccagcctgttattaccata

SEQ ID NO: 387962 - DNA, 19 bp, Homo sapiens
  siRNA target sequence for NARG2 (NM_024611.2,2926-2944).
cagcctgttattaccatat

SEQ ID NO: 387963 - DNA, 19 bp, Homo sapiens
  siRNA target sequence for NARG2 (NM_024611.2,2928-2946).
gcctgttattaccatatca

SEQ ID NO: 387964 - DNA, 19 bp, Homo sapiens
  siRNA target sequence for NARG2 (NM_024611.2,2930-2948).
ctgttattaccatatcata

SEQ ID NO: 387965 - DNA, 19 bp, Homo sapiens
  siRNA target sequence for NARG2 (NM_024611.2,2973-2991).
cttttccaccgaaatcact

SEQ ID NO: 387966 - DNA, 19 bp, Homo sapiens
  siRNA target sequence for NARG2 (NM_024611.2,2992-3010).
ggataccacaacacaacaa

SEQ ID NO: 387967 - DNA, 19 bp, Homo sapiens
  siRNA target sequence for NARG2 (NM_024611.2,3110-3128).
ggagtggctccacataaaa

SEQ ID NO: 387968 - DNA, 19 bp, Homo sapiens
  siRNA target sequence for NARG2 (NM_024611.2,3113-3131).
gtggctccacataaaagaa

SEQ ID NO: 387969 - DNA, 19 bp, Homo sapiens
  siRNA target sequence for FLJ13197 (NM_024614.1,150-168).
gagggagacgggacttact

SEQ ID NO: 387970 - DNA, 19 bp, Homo sapiens
  siRNA target sequence for FLJ13197 (NM_024614.1,152-170).
gggagacgggacttacttt

SEQ ID NO: 387971 - DNA, 19 bp, Homo sapiens
  siRNA target sequence for FLJ13197 (NM_024614.1,236-254).
cccgagcgcagcaatgtca

SEQ ID NO: 387972 - DNA, 19 bp, Homo sapiens
  siRNA target sequence for FLJ13197 (NM_024614.1,445-463).
gctggcgggagaataactt

SEQ ID NO: 387973 - DNA, 19 bp, Homo sapiens
  siRNA target sequence for FLJ21308 (NM_024615.2,505-523).
gacaatgattccgaagaat

SEQ ID NO: 387974 - DNA, 19 bp, Homo sapiens
  siRNA target sequence for FLJ21308 (NM_024615.2,511-529).
gattccgaagaattttatt

SEQ ID NO: 387975 - DNA, 19 bp, Homo sapiens
  siRNA target sequence for FLJ21308 (NM_024615.2,644-662).
gagccattgatgatgtaga

SEQ ID NO: 387976 - DNA, 19 bp, Homo sapiens
  siRNA target sequence for FLJ21308 (NM_024615.2,647-665).
ccattgatgatgtagatat

SEQ ID NO: 387977 - DNA, 19 bp, Homo sapiens
  siRNA target sequence for FLJ21308 (NM_024615.2,667-685).
gatctgcatatcgatgtta

SEQ ID NO: 387978 - DNA, 19 bp, Homo sapiens
  siRNA target sequence for FLJ21308 (NM_024615.2,678-696).
cgatgttagctttcttgat

SEQ ID NO: 387979 - DNA, 19 bp, Homo sapiens
  siRNA target sequence for FLJ21308 (NM_024615.2,711-729).
ggcttgggaagtaattcga

SEQ ID NO: 387980 - DNA, 19 bp, Homo sapiens
  siRNA target sequence for FLJ21308 (NM_024615.2,712-730).
gcttgggaagtaattcgaa

SEQ ID NO: 387981 - DNA, 19 bp, Homo sapiens
  siRNA target sequence for FLJ21308 (NM_024615.2,717-735).
ggaagtaattcgaacagaa

SEQ ID NO: 387982 - DNA, 19 bp, Homo sapiens
  siRNA target sequence for FLJ21308 (NM_024615.2,728-746).
gaacagaacctataattgt

SEQ ID NO: 387983 - DNA, 19 bp, Homo sapiens
  siRNA target sequence for FLJ21308 (NM_024615.2,748-766).
cgactacactgttcactta

SEQ ID NO: 387984 - DNA, 19 bp, Homo sapiens
  siRNA target sequence for FLJ21308 (NM_024615.2,818-836).
caaaagagcgatttggatt

SEQ ID NO: 387985 - DNA, 19 bp, Homo sapiens
  siRNA target sequence for FLJ21308 (NM_024615.2,905-923).
ccaattgcctgcacaataa

SEQ ID NO: 387986 - DNA, 19 bp, Homo sapiens
  siRNA target sequence for FLJ21308 (NM_024615.2,906-924).
caattgcctgcacaataaa

SEQ ID NO: 387987 - DNA, 19 bp, Homo sapiens
  siRNA target sequence for FLJ21308 (NM_024615.2,975-993).
gcgcaggtcgccaagttat

SEQ ID NO: 387988 - DNA, 19 bp, Homo sapiens
  siRNA target sequence for FLJ21308 (NM_024615.2,978-996).
caggtcgccaagttatcct

SEQ ID NO: 387989 - DNA, 19 bp, Homo sapiens
  siRNA target sequence for FLJ21308 (NM_024615.2,1039-1057).
caggacggaatctccaaaa

SEQ ID NO: 387990 - DNA, 19 bp, Homo sapiens
  siRNA target sequence for FLJ21308 (NM_024615.2,1164-1182).
ggcggagcaggctatgaca

SEQ ID NO: 387991 - DNA, 19 bp, Homo sapiens
  siRNA target sequence for FLJ21308 (NM_024615.2,1170-1188).
gcaggctatgacagcaatt

SEQ ID NO: 387992 - DNA, 19 bp, Homo sapiens
  siRNA target sequence for FLJ21308 (NM_024615.2,1171-1189).
caggctatgacagcaatta

SEQ ID NO: 387993 - DNA, 19 bp, Homo sapiens
  siRNA target sequence for FLJ21308 (NM_024615.2,1173-1191).
ggctatgacagcaattaaa

SEQ ID NO: 387994 - DNA, 19 bp, Homo sapiens
  siRNA target sequence for FLJ21308 (NM_024615.2,1174-1192).
gctatgacagcaattaaat

SEQ ID NO: 387995 - DNA, 19 bp, Homo sapiens
  siRNA target sequence for FLJ21308 (NM_024615.2,1184-1202).
caattaaatcgcacaaact

SEQ ID NO: 387996 - DNA, 19 bp, Homo sapiens
  siRNA target sequence for FLJ21308 (NM_024615.2,1235-1253).
cagaggaatgcctaactct

SEQ ID NO: 387997 - DNA, 19 bp, Homo sapiens
  siRNA target sequence for FLJ21308 (NM_024615.2,1250-1268).
ctctaaagtcgcatagact

SEQ ID NO: 387998 - DNA, 19 bp, Homo sapiens
  siRNA target sequence for FLJ21308 (NM_024615.2,1252-1270).
ctaaagtcgcatagactat

SEQ ID NO: 387999 - DNA, 19 bp, Homo sapiens
  siRNA target sequence for FLJ21308 (NM_024615.2,1257-1275).
gtcgcatagactattgact

SEQ ID NO: 388000 - DNA, 19 bp, Homo sapiens
  siRNA target sequence for FLJ21308 (NM_024615.2,1267-1285).
ctattgactcgatcttgtt

SEQ ID NO: 388001 - DNA, 19 bp, Homo sapiens
  siRNA target sequence for FLJ21308 (NM_024615.2,1297-1315).
cgatgtgagcacaacacaa

SEQ ID NO: 388002 - DNA, 19 bp, Homo sapiens
  siRNA target sequence for FLJ21308 (NM_024615.2,1298-1316).
gatgtgagcacaacacaaa

SEQ ID NO: 388003 - DNA, 19 bp, Homo sapiens
  siRNA target sequence for FLJ21308 (NM_024615.2,1301-1319).
gtgagcacaacacaaactt

SEQ ID NO: 388004 - DNA, 19 bp, Homo sapiens
  siRNA target sequence for FLJ21308 (NM_024615.2,1333-1351).
ctgttaagcaggtcttact

SEQ ID NO: 388005 - DNA, 19 bp, Homo sapiens
  siRNA target sequence for FLJ21308 (NM_024615.2,1335-1353).
gttaagcaggtcttactct

SEQ ID NO: 388006 - DNA, 19 bp, Homo sapiens
  siRNA target sequence for FLJ21308 (NM_024615.2,1340-1358).
gcaggtcttactctagtaa

SEQ ID NO: 388007 - DNA, 19 bp, Homo sapiens
  siRNA target sequence for FLJ21308 (NM_024615.2,1341-1359).
caggtcttactctagtaat

SEQ ID NO: 388008 - DNA, 19 bp, Homo sapiens
  siRNA target sequence for FLJ21308 (NM_024615.2,1343-1361).
ggtcttactctagtaatct

SEQ ID NO: 388009 - DNA, 19 bp, Homo sapiens
  siRNA target sequence for FLJ21308 (NM_024615.2,1425-1443).
ccccaagtcatccaaaact

SEQ ID NO: 388010 - DNA, 19 bp, Homo sapiens
  siRNA target sequence for FLJ21308 (NM_024615.2,1490-1508).
cctcagggcttattggtat

SEQ ID NO: 388011 - DNA, 19 bp, Homo sapiens
  siRNA target sequence for FLJ21308 (NM_024615.2,1495-1513).
gggcttattggtatcctaa

SEQ ID NO: 388012 - DNA, 19 bp, Homo sapiens
  siRNA target sequence for FLJ21308 (NM_024615.2,1590-1608).
ggtgcagacaattgagttt

SEQ ID NO: 388013 - DNA, 19 bp, Homo sapiens
  siRNA target sequence for FLJ21308 (NM_024615.2,1615-1633).
cagcggatccctgtattaa

SEQ ID NO: 388014 - DNA, 19 bp, Homo sapiens
  siRNA target sequence for FLJ21308 (NM_024615.2,1617-1635).
gcggatccctgtattaaat

SEQ ID NO: 388015 - DNA, 19 bp, Homo sapiens
  siRNA target sequence for FLJ21308 (NM_024615.2,1778-1796).
gagctcaggtggtagatct

SEQ ID NO: 388016 - DNA, 19 bp, Homo sapiens
  siRNA target sequence for FLJ21308 (NM_024615.2,1781-1799).
ctcaggtggtagatctact

SEQ ID NO: 388017 - DNA, 19 bp, Homo sapiens
  siRNA target sequence for FLJ21308 (NM_024615.2,1785-1803).
ggtggtagatctactagta

SEQ ID NO: 388018 - DNA, 19 bp, Homo sapiens
  siRNA target sequence for FLJ21308 (NM_024615.2,1786-1804).
gtggtagatctactagtat

SEQ ID NO: 388019 - DNA, 19 bp, Homo sapiens
  siRNA target sequence for FLJ21308 (NM_024615.2,1795-1813).
ctactagtatccatgtgta

SEQ ID NO: 388020 - DNA, 19 bp, Homo sapiens
  siRNA target sequence for FLJ21308 (NM_024615.2,1820-1838).
cgttggaatctcctagaaa

SEQ ID NO: 388021 - DNA, 19 bp, Homo sapiens
  siRNA target sequence for FLJ21308 (NM_024615.2,1829-1847).
ctcctagaaaagttgtgat

SEQ ID NO: 388022 - DNA, 19 bp, Homo sapiens
  siRNA target sequence for FLJ21308 (NM_024615.2,1845-1863).
gattttcgagccatatcct

SEQ ID NO: 388023 - DNA, 19 bp, Homo sapiens
  siRNA target sequence for FLJ21308 (NM_024615.2,1877-1895).
ctaatgatcctcagatgtt

SEQ ID NO: 388024 - DNA, 19 bp, Homo sapiens
  siRNA target sequence for FLJ21308 (NM_024615.2,1920-1938).
ctatgatcgagtaatgaaa

SEQ ID NO: 388025 - DNA, 19 bp, Homo sapiens
  siRNA target sequence for FLJ21308 (NM_024615.2,1935-1953).
gaaagcactggatagcata

SEQ ID NO: 388026 - DNA, 19 bp, Homo sapiens
  siRNA target sequence for FLJ21308 (NM_024615.2,1939-1957).
gcactggatagcataactt

SEQ ID NO: 388027 - DNA, 19 bp, Homo sapiens
  siRNA target sequence for FLJ21308 (NM_024615.2,1945-1963).
gatagcataacttctatca

SEQ ID NO: 388028 - DNA, 19 bp, Homo sapiens
  siRNA target sequence for FLJ21308 (NM_024615.2,2040-2058).
gcaatgggttatatcaagt

SEQ ID NO: 388029 - DNA, 19 bp, Homo sapiens
  siRNA target sequence for FLJ21308 (NM_024615.2,2041-2059).
caatgggttatatcaagta

SEQ ID NO: 388030 - DNA, 19 bp, Homo sapiens
  siRNA target sequence for FLJ21308 (NM_024615.2,2046-2064).
ggttatatcaagtaataga

SEQ ID NO: 388031 - DNA, 19 bp, Homo sapiens
  siRNA target sequence for FLJ21308 (NM_024615.2,2074-2092).
gtgaaactgccagttaaca

SEQ ID NO: 388032 - DNA, 19 bp, Homo sapiens
  siRNA target sequence for FLJ21308 (NM_024615.2,2086-2104).
gttaacaggcaattgaagt

SEQ ID NO: 388033 - DNA, 19 bp, Homo sapiens
  siRNA target sequence for FLJ21308 (NM_024615.2,2094-2112).
gcaattgaagtttatgcat

SEQ ID NO: 388034 - DNA, 19 bp, Homo sapiens
  siRNA target sequence for FLJ21308 (NM_024615.2,2146-2164).
ccagccaaagaatccaatt

SEQ ID NO: 388035 - DNA, 19 bp, Homo sapiens
  siRNA target sequence for FLJ21308 (NM_024615.2,2249-2267).
gtctggttgttgcttctaa

SEQ ID NO: 388036 - DNA, 19 bp, Homo sapiens
  siRNA target sequence for FLJ21308 (NM_024615.2,2253-2271).
ggttgttgcttctaataca

SEQ ID NO: 388037 - DNA, 19 bp, Homo sapiens
  siRNA target sequence for FLJ21308 (NM_024615.2,2280-2298).
gctccatggtgcaatgtat

SEQ ID NO: 388038 - DNA, 19 bp, Homo sapiens
  siRNA target sequence for FLJ21308 (NM_024615.2,2284-2302).
catggtgcaatgtatggaa

SEQ ID NO: 388039 - DNA, 19 bp, Homo sapiens
  siRNA target sequence for FLJ21308 (NM_024615.2,2295-2313).
gtatggaagtggaatctat

SEQ ID NO: 388040 - DNA, 19 bp, Homo sapiens
  siRNA target sequence for FLJ21308 (NM_024615.2,2331-2349).
catatcatttggttactca

SEQ ID NO: 388041 - DNA, 19 bp, Homo sapiens
  siRNA target sequence for FLJ21308 (NM_024615.2,2346-2364).
ctcagggatgaacaagaaa

SEQ ID NO: 388042 - DNA, 19 bp, Homo sapiens
  siRNA target sequence for FLJ21308 (NM_024615.2,2388-2406).
gccagcttcaagcagtaaa

SEQ ID NO: 388043 - DNA, 19 bp, Homo sapiens
  siRNA target sequence for FLJ21308 (NM_024615.2,2392-2410).
gcttcaagcagtaaaagca

SEQ ID NO: 388044 - DNA, 19 bp, Homo sapiens
  siRNA target sequence for FLJ21308 (NM_024615.2,2454-2472).
cctgcaaagccgtaactta

SEQ ID NO: 388045 - DNA, 19 bp, Homo sapiens
  siRNA target sequence for FLJ21308 (NM_024615.2,2455-2473).
ctgcaaagccgtaacttaa

SEQ ID NO: 388046 - DNA, 19 bp, Homo sapiens
  siRNA target sequence for FLJ21308 (NM_024615.2,2457-2475).
gcaaagccgtaacttaaaa

SEQ ID NO: 388047 - DNA, 19 bp, Homo sapiens
  siRNA target sequence for FLJ21308 (NM_024615.2,2458-2476).
caaagccgtaacttaaaat

SEQ ID NO: 388048 - DNA, 19 bp, Homo sapiens
  siRNA target sequence for FLJ21308 (NM_024615.2,2462-2480).
gccgtaacttaaaatgcat

SEQ ID NO: 388049 - DNA, 19 bp, Homo sapiens
  siRNA target sequence for FLJ21308 (NM_024615.2,2593-2611).
caagtgggagatgcaaata

SEQ ID NO: 388050 - DNA, 19 bp, Homo sapiens
  siRNA target sequence for FLJ21308 (NM_024615.2,2643-2661).
gatcctccgagtaattggt

SEQ ID NO: 388051 - DNA, 19 bp, Homo sapiens
  siRNA target sequence for FLJ21308 (NM_024615.2,2646-2664).
cctccgagtaattggtaat

SEQ ID NO: 388052 - DNA, 19 bp, Homo sapiens
  siRNA target sequence for FLJ21308 (NM_024615.2,2649-2667).
ccgagtaattggtaatcaa

SEQ ID NO: 388053 - DNA, 19 bp, Homo sapiens
  siRNA target sequence for FLJ21308 (NM_024615.2,2650-2668).
cgagtaattggtaatcaaa

SEQ ID NO: 388054 - DNA, 19 bp, Homo sapiens
  siRNA target sequence for FLJ23186 (NM_024616.1,257-275).
gatcatcataggcttatgt

SEQ ID NO: 388055 - DNA, 19 bp, Homo sapiens
  siRNA target sequence for FLJ23186 (NM_024616.1,596-614).
ggatttccgtgatcagaat

SEQ ID NO: 388056 - DNA, 19 bp, Homo sapiens
  siRNA target sequence for FLJ23186 (NM_024616.1,602-620).
ccgtgatcagaatatacct

SEQ ID NO: 388057 - DNA, 19 bp, Homo sapiens
  siRNA target sequence for NOD9 (NM_024618.2,396-414).
cacggaagctcggtagata

SEQ ID NO: 388058 - DNA, 19 bp, Homo sapiens
  siRNA target sequence for NOD9 (NM_024618.2,457-475).
cctctgcaactgaagctat

SEQ ID NO: 388059 - DNA, 19 bp, Homo sapiens
  siRNA target sequence for NOD9 (NM_024618.2,460-478).
ctgcaactgaagctataca

SEQ ID NO: 388060 - DNA, 19 bp, Homo sapiens
  siRNA target sequence for NOD9 (NM_024618.2,868-886).
cctccctgtgccaacttgt

SEQ ID NO: 388061 - DNA, 19 bp, Homo sapiens
  siRNA target sequence for NOD9 (NM_024618.2,1650-1668).
cgggatgccctgaggtttt

SEQ ID NO: 388062 - DNA, 19 bp, Homo sapiens
  siRNA target sequence for NOD9 (NM_024618.2,1771-1789).
gcaagacgaccctgcaaaa

SEQ ID NO: 388063 - DNA, 19 bp, Homo sapiens
  siRNA target sequence for NOD9 (NM_024618.2,1910-1928).
ggtggttccacgagtgttt

SEQ ID NO: 388064 - DNA, 19 bp, Homo sapiens
  siRNA target sequence for NOD9 (NM_024618.2,1990-2008).
gagaggaggactactacaa

SEQ ID NO: 388065 - DNA, 19 bp, Homo sapiens
  siRNA target sequence for NOD9 (NM_024618.2,2568-2586).
gaccagtgccaaattacca

SEQ ID NO: 388066 - DNA, 19 bp, Homo sapiens
  siRNA target sequence for NOD9 (NM_024618.2,2620-2638).
caggtgttgccgtgctaat

SEQ ID NO: 388067 - DNA, 19 bp, Homo sapiens
  siRNA target sequence for NOD9 (NM_024618.2,2946-2964).
gggacggcggtgtcagaat

SEQ ID NO: 388068 - DNA, 19 bp, Homo sapiens
  siRNA target sequence for NOD9 (NM_024618.2,2947-2965).
ggacggcggtgtcagaata

SEQ ID NO: 388069 - DNA, 19 bp, Homo sapiens
  siRNA target sequence for NOD9 (NM_024618.2,2988-3006).
gtccagcggaacctcaata

SEQ ID NO: 388070 - DNA, 19 bp, Homo sapiens
  siRNA target sequence for NOD9 (NM_024618.2,3071-3089).
gggtgccacccttaatcct

SEQ ID NO: 388071 - DNA, 19 bp, Homo sapiens
  siRNA target sequence for NOD9 (NM_024618.2,3072-3090).
ggtgccacccttaatcctt

SEQ ID NO: 388072 - DNA, 19 bp, Homo sapiens
  siRNA target sequence for FLJ12604 (NM_024621.1,334-352).
gactggttttgggacaaaa

SEQ ID NO: 388073 - DNA, 19 bp, Homo sapiens
  siRNA target sequence for FLJ12604 (NM_024621.1,451-469).
cttcagattaccaaaccaa

SEQ ID NO: 388074 - DNA, 19 bp, Homo sapiens
  siRNA target sequence for FLJ12604 (NM_024621.1,473-491).
caatgaccaggcagtagtt

SEQ ID NO: 388075 - DNA, 19 bp, Homo sapiens
  siRNA target sequence for FLJ12604 (NM_024621.1,486-504).
gtagttgaaatctgtatca

SEQ ID NO: 388076 - DNA, 19 bp, Homo sapiens
  siRNA target sequence for FLJ12604 (NM_024621.1,497-515).
ctgtatcacaagaatcaca

SEQ ID NO: 388077 - DNA, 19 bp, Homo sapiens
  siRNA target sequence for FLJ12604 (NM_024621.1,621-639).
gacactcctcatgcaaaaa

SEQ ID NO: 388078 - DNA, 19 bp, Homo sapiens
  siRNA target sequence for FLJ12604 (NM_024621.1,633-651).
gcaaaaatcgcatctgata

SEQ ID NO: 388079 - DNA, 19 bp, Homo sapiens
  siRNA target sequence for FLJ12604 (NM_024621.1,634-652).
caaaaatcgcatctgatat

SEQ ID NO: 388080 - DNA, 19 bp, Homo sapiens
  siRNA target sequence for FLJ12604 (NM_024621.1,648-666).
gatatcatgagttgcattt

SEQ ID NO: 388081 - DNA, 19 bp, Homo sapiens
  siRNA target sequence for FLJ12604 (NM_024621.1,813-831).
cacacggaagttatagtaa

SEQ ID NO: 388082 - DNA, 19 bp, Homo sapiens
  siRNA target sequence for FLJ12604 (NM_024621.1,843-861).
caaggtaacaccatgttgt

SEQ ID NO: 388083 - DNA, 19 bp, Homo sapiens
  siRNA target sequence for FLJ12604 (NM_024621.1,846-864).
ggtaacaccatgttgttga

SEQ ID NO: 388084 - DNA, 19 bp, Homo sapiens
  siRNA target sequence for FLJ12604 (NM_024621.1,869-887).
gttacctgctgtgtatgaa

SEQ ID NO: 388085 - DNA, 19 bp, Homo sapiens
  siRNA target sequence for FLJ12604 (NM_024621.1,1011-1029).
gaggtagttcagaagtgta

SEQ ID NO: 388086 - DNA, 19 bp, Homo sapiens
  siRNA target sequence for FLJ12604 (NM_024621.1,1052-1070).
gaaggattcaacccataat

SEQ ID NO: 388087 - DNA, 19 bp, Homo sapiens
  siRNA target sequence for FLJ12604 (NM_024621.1,1060-1078).
caacccataatgacatcat

SEQ ID NO: 388088 - DNA, 19 bp, Homo sapiens
  siRNA target sequence for FLJ12604 (NM_024621.1,1110-1128).
gagccagtggctttgaaca

SEQ ID NO: 388089 - DNA, 19 bp, Homo sapiens
  siRNA target sequence for FLJ12604 (NM_024621.1,1184-1202).
gatggcaaggatttatgga

SEQ ID NO: 388090 - DNA, 19 bp, Homo sapiens
  siRNA target sequence for FLJ12604 (NM_024621.1,1267-1285).
ccaacatggagcattcgtt

SEQ ID NO: 388091 - DNA, 19 bp, Homo sapiens
  siRNA target sequence for FLJ12604 (NM_024621.1,1268-1286).
caacatggagcattcgttt

SEQ ID NO: 388092 - DNA, 19 bp, Homo sapiens
  siRNA target sequence for FLJ12604 (NM_024621.1,1277-1295).
gcattcgtttcaccatatt

SEQ ID NO: 388093 - DNA, 19 bp, Homo sapiens
  siRNA target sequence for FLJ12604 (NM_024621.1,1381-1399).
gcttcaccgccattgctaa

SEQ ID NO: 388094 - DNA, 19 bp, Homo sapiens
  siRNA target sequence for FLJ12604 (NM_024621.1,1382-1400).
cttcaccgccattgctaaa

SEQ ID NO: 388095 - DNA, 19 bp, Homo sapiens
  siRNA target sequence for FLJ12604 (NM_024621.1,1488-1506).
gaaaccaagctcatagtaa

SEQ ID NO: 388096 - DNA, 19 bp, Homo sapiens
  siRNA target sequence for FLJ12604 (NM_024621.1,1492-1510).
ccaagctcatagtaactga

SEQ ID NO: 388097 - DNA, 19 bp, Homo sapiens
  siRNA target sequence for FLJ12604 (NM_024621.1,1585-1603).
ctggctctatcagaagata

SEQ ID NO: 388098 - DNA, 19 bp, Homo sapiens
  siRNA target sequence for FLJ12604 (NM_024621.1,1591-1609).
ctatcagaagatatagtct

SEQ ID NO: 388099 - DNA, 19 bp, Homo sapiens
  siRNA target sequence for FLJ12604 (NM_024621.1,1606-1624).
gtctgggccaagtttctaa

SEQ ID NO: 388100 - DNA, 19 bp, Homo sapiens
  siRNA target sequence for FLJ12604 (NM_024621.1,1787-1805).
caagctgccgtttaagaca

SEQ ID NO: 388101 - DNA, 19 bp, Homo sapiens
  siRNA target sequence for FLJ12604 (NM_024621.1,1826-1844).
gggggagtcttcagtttca

SEQ ID NO: 388102 - DNA, 19 bp, Homo sapiens
  siRNA target sequence for FLJ12604 (NM_024621.1,1843-1861).
catacccaaatattataca

SEQ ID NO: 388103 - DNA, 19 bp, Homo sapiens
  siRNA target sequence for FLJ12604 (NM_024621.1,1860-1878).
catatagactcagagaatt

SEQ ID NO: 388104 - DNA, 19 bp, Homo sapiens
  siRNA target sequence for FLJ12604 (NM_024621.1,1924-1942).
caactgcaagtcctataga

SEQ ID NO: 388105 - DNA, 19 bp, Homo sapiens
  siRNA target sequence for FLJ12604 (NM_024621.1,1927-1945).
ctgcaagtcctatagaata

SEQ ID NO: 388106 - DNA, 19 bp, Homo sapiens
  siRNA target sequence for FLJ12604 (NM_024621.1,1955-1973).
gctctacttgcacttaaaa

SEQ ID NO: 388107 - DNA, 19 bp, Homo sapiens
  siRNA target sequence for FLJ12604 (NM_024621.1,2054-2072).
cactgtgagaagttgtgta

SEQ ID NO: 388108 - DNA, 19 bp, Homo sapiens
  siRNA target sequence for FLJ12604 (NM_024621.1,2065-2083).
gttgtgtagcaaagttgtt

SEQ ID NO: 388109 - DNA, 19 bp, Homo sapiens
  siRNA target sequence for FLJ12604 (NM_024621.1,2103-2121).
ggtcattactgcctataca

SEQ ID NO: 388110 - DNA, 19 bp, Homo sapiens
  siRNA target sequence for FLJ12604 (NM_024621.1,2106-2124).
cattactgcctatacagta

SEQ ID NO: 388111 - DNA, 19 bp, Homo sapiens
  siRNA target sequence for FLJ12604 (NM_024621.1,2122-2140).
gtaagtccagttttattct

SEQ ID NO: 388112 - DNA, 19 bp, Homo sapiens
  siRNA target sequence for FLJ12604 (NM_024621.1,2161-2179).
catggatccagatcatgtt

SEQ ID NO: 388113 - DNA, 19 bp, Homo sapiens
  siRNA target sequence for FLJ12604 (NM_024621.1,2205-2223).
gaacccctgtccattcaga

SEQ ID NO: 388114 - DNA, 19 bp, Homo sapiens
  siRNA target sequence for FLJ12604 (NM_024621.1,2213-2231).
gtccattcagagtcattct

SEQ ID NO: 388115 - DNA, 19 bp, Homo sapiens
  siRNA target sequence for FLJ12604 (NM_024621.1,2274-2292).
ggtgctcacagctttgaaa

SEQ ID NO: 388116 - DNA, 19 bp, Homo sapiens
  siRNA target sequence for FLJ12604 (NM_024621.1,2376-2394).
gtgtttggcttcagtgaaa

SEQ ID NO: 388117 - DNA, 19 bp, Homo sapiens
  siRNA target sequence for FLJ12604 (NM_024621.1,2420-2438).
gtgcaacaatcctgagaaa

SEQ ID NO: 388118 - DNA, 19 bp, Homo sapiens
  siRNA target sequence for FLJ12604 (NM_024621.1,2467-2485).
ctctcatagaaggaaaact

SEQ ID NO: 388119 - DNA, 19 bp, Homo sapiens
  siRNA target sequence for FLJ12604 (NM_024621.1,2469-2487).
ctcatagaaggaaaactta

SEQ ID NO: 388120 - DNA, 19 bp, Homo sapiens
  siRNA target sequence for FLJ12604 (NM_024621.1,2522-2540).
gtggaaaacacgctatttt

SEQ ID NO: 388121 - DNA, 19 bp, Homo sapiens
  siRNA target sequence for FLJ12604 (NM_024621.1,2525-2543).
gaaaacacgctattttaca

SEQ ID NO: 388122 - DNA, 19 bp, Homo sapiens
  siRNA target sequence for FLJ12604 (NM_024621.1,2593-2611).
ctgacgactgcccaataga

SEQ ID NO: 388123 - DNA, 19 bp, Homo sapiens
  siRNA target sequence for FLJ12604 (NM_024621.1,2797-2815).
gagaagtaaccacatatct

SEQ ID NO: 388124 - DNA, 19 bp, Homo sapiens
  siRNA target sequence for FLJ12604 (NM_024621.1,2799-2817).
gaagtaaccacatatctgt

SEQ ID NO: 388125 - DNA, 19 bp, Homo sapiens
  siRNA target sequence for FLJ21901 (NM_024622.2,300-318).
ctgttttcctagagtcatt

SEQ ID NO: 388126 - DNA, 19 bp, Homo sapiens
  siRNA target sequence for FLJ21901 (NM_024622.2,308-326).
ctagagtcattggttacaa

SEQ ID NO: 388127 - DNA, 19 bp, Homo sapiens
  siRNA target sequence for FLJ21901 (NM_024622.2,331-349).
gcttcgtctaagagctatt

SEQ ID NO: 388128 - DNA, 19 bp, Homo sapiens
  siRNA target sequence for FLJ21901 (NM_024622.2,332-350).
cttcgtctaagagctattt

SEQ ID NO: 388129 - DNA, 19 bp, Homo sapiens
  siRNA target sequence for FLJ21901 (NM_024622.2,364-382).
gagagtgtttcaatttcga

SEQ ID NO: 388130 - DNA, 19 bp, Homo sapiens
  siRNA target sequence for FLJ21901 (NM_024622.2,388-406).
cagttgtgaaccactaatt

SEQ ID NO: 388131 - DNA, 19 bp, Homo sapiens
  siRNA target sequence for FLJ21901 (NM_024622.2,390-408).
gttgtgaaccactaattat

SEQ ID NO: 388132 - DNA, 19 bp, Homo sapiens
  siRNA target sequence for FLJ21901 (NM_024622.2,393-411).
gtgaaccactaattattca

SEQ ID NO: 388133 - DNA, 19 bp, Homo sapiens
  siRNA target sequence for FLJ21901 (NM_024622.2,423-441).
gtacagatgaggagcaaat

SEQ ID NO: 388134 - DNA, 19 bp, Homo sapiens
  siRNA target sequence for FLJ21901 (NM_024622.2,431-449).
gaggagcaaatgtttggtt

SEQ ID NO: 388135 - DNA, 19 bp, Homo sapiens
  siRNA target sequence for FLJ21901 (NM_024622.2,498-516).
catttgatatgctttggaa

SEQ ID NO: 388136 - DNA, 19 bp, Homo sapiens
  siRNA target sequence for FLJ21901 (NM_024622.2,562-580).
cagagaccatcctcaattt

SEQ ID NO: 388137 - DNA, 19 bp, Homo sapiens
  siRNA target sequence for FLJ21901 (NM_024622.2,629-647).
gataccctggtgaatgtgt

SEQ ID NO: 388138 - DNA, 19 bp, Homo sapiens
  siRNA target sequence for FLJ21901 (NM_024622.2,678-696).
cccatgacccgctagttga

SEQ ID NO: 388139 - DNA, 19 bp, Homo sapiens
  siRNA target sequence for FLJ21901 (NM_024622.2,679-697).
ccatgacccgctagttgaa

SEQ ID NO: 388140 - DNA, 19 bp, Homo sapiens
  siRNA target sequence for FLJ21901 (NM_024622.2,713-731).
gcatggagaaggctagaaa

SEQ ID NO: 388141 - DNA, 19 bp, Homo sapiens
  siRNA target sequence for FLJ21901 (NM_024622.2,768-786).
gcctagcagatcagcattt

SEQ ID NO: 388142 - DNA, 19 bp, Homo sapiens
  siRNA target sequence for FLJ21901 (NM_024622.2,770-788).
ctagcagatcagcatttgt

SEQ ID NO: 388143 - DNA, 19 bp, Homo sapiens
  siRNA target sequence for FLJ21901 (NM_024622.2,816-834).
ctgatattgttcataggaa

SEQ ID NO: 388144 - DNA, 19 bp, Homo sapiens
  siRNA target sequence for FLJ21901 (NM_024622.2,867-885).
ctgtcttgatggtcaacat

SEQ ID NO: 388145 - DNA, 19 bp, Homo sapiens
  siRNA target sequence for FLJ21901 (NM_024622.2,871-889).
cttgatggtcaacatatct

SEQ ID NO: 388146 - DNA, 19 bp, Homo sapiens
  siRNA target sequence for FLJ21901 (NM_024622.2,874-892).
gatggtcaacatatcttct

SEQ ID NO: 388147 - DNA, 19 bp, Homo sapiens
  siRNA target sequence for FLJ21901 (NM_024622.2,900-918).
cacgacattttcaacaaca

SEQ ID NO: 388148 - DNA, 19 bp, Homo sapiens
  siRNA target sequence for FLJ21901 (NM_024622.2,941-959).
ctttttgacaccatagatt

SEQ ID NO: 388149 - DNA, 19 bp, Homo sapiens
  siRNA target sequence for FLJ21901 (NM_024622.2,970-988).
caacgttgcaaaaagcata

SEQ ID NO: 388150 - DNA, 19 bp, Homo sapiens
  siRNA target sequence for FLJ21901 (NM_024622.2,974-992).
gttgcaaaaagcatagcaa

SEQ ID NO: 388151 - DNA, 19 bp, Homo sapiens
  siRNA target sequence for FLJ21901 (NM_024622.2,978-996).
caaaaagcatagcaaagtt

SEQ ID NO: 388152 - DNA, 19 bp, Homo sapiens
  siRNA target sequence for FLJ21901 (NM_024622.2,994-1012).
gtttcttcgaaatgttaga

SEQ ID NO: 388153 - DNA, 19 bp, Homo sapiens
  siRNA target sequence for FLJ21901 (NM_024622.2,1001-1019).
cgaaatgttagatatcgtt

SEQ ID NO: 388154 - DNA, 19 bp, Homo sapiens
  siRNA target sequence for FLJ21901 (NM_024622.2,1017-1035).
gttatcaaccactattaga

SEQ ID NO: 388155 - DNA, 19 bp, Homo sapiens
  siRNA target sequence for FLJ21901 (NM_024622.2,1025-1043).
ccactattagaaagatgta

SEQ ID NO: 388156 - DNA, 19 bp, Homo sapiens
  siRNA target sequence for FLJ21901 (NM_024622.2,1038-1056).
gatgtaataacgtattttt

SEQ ID NO: 388157 - DNA, 19 bp, Homo sapiens
  siRNA target sequence for FLJ21901 (NM_024622.2,1066-1084).
ggaccaccttgatttggat

SEQ ID NO: 388158 - DNA, 19 bp, Homo sapiens
  siRNA target sequence for FLJ21901 (NM_024622.2,1067-1085).
gaccaccttgatttggatt

SEQ ID NO: 388159 - DNA, 19 bp, Homo sapiens
  siRNA target sequence for FLJ21901 (NM_024622.2,1090-1108).
cagtaaaatacttagtgta

SEQ ID NO: 388160 - DNA, 19 bp, Homo sapiens
  siRNA target sequence for FLJ21901 (NM_024622.2,1174-1192).
gattcctctgtgtaatcat

SEQ ID NO: 388161 - DNA, 19 bp, Homo sapiens
  siRNA target sequence for FLJ21901 (NM_024622.2,1196-1214).
gctagctttgtaaaattgt

SEQ ID NO: 388162 - DNA, 19 bp, Homo sapiens
  siRNA target sequence for FLJ21901 (NM_024622.2,1259-1277).
cttaaatcaactatgttat

SEQ ID NO: 388163 - DNA, 19 bp, Homo sapiens
  siRNA target sequence for FLJ21901 (NM_024622.2,1351-1369).
ctcatgtctgattaaaaga

SEQ ID NO: 388164 - DNA, 19 bp, Homo sapiens
  siRNA target sequence for FLJ21901 (NM_024622.2,1353-1371).
catgtctgattaaaagagt

SEQ ID NO: 388165 - DNA, 19 bp, Homo sapiens
  siRNA target sequence for FLJ21901 (NM_024622.2,1400-1418).
ggctataaaccattagagt

SEQ ID NO: 388166 - DNA, 19 bp, Homo sapiens
  siRNA target sequence for FLJ21901 (NM_024622.2,1401-1419).
gctataaaccattagagtt

SEQ ID NO: 388167 - DNA, 19 bp, Homo sapiens
  siRNA target sequence for FLJ21901 (NM_024622.2,1417-1435).
gttgttgaagataactcaa

SEQ ID NO: 388168 - DNA, 19 bp, Homo sapiens
  siRNA target sequence for FLJ21901 (NM_024622.2,1466-1484).
gagttttttgcgaaactta

SEQ ID NO: 388169 - DNA, 19 bp, Homo sapiens
  siRNA target sequence for FLJ21901 (NM_024622.2,1468-1486).
gttttttgcgaaacttaga

SEQ ID NO: 388170 - DNA, 19 bp, Homo sapiens
  siRNA target sequence for FLJ21901 (NM_024622.2,1476-1494).
cgaaacttagagaattact

SEQ ID NO: 388171 - DNA, 19 bp, Homo sapiens
  siRNA target sequence for FLJ21901 (NM_024622.2,1538-1556).
gttctggtccgtgctattt

SEQ ID NO: 388172 - DNA, 19 bp, Homo sapiens
  siRNA target sequence for FLJ21901 (NM_024622.2,1588-1606).
ggggatatcccgaattgaa

SEQ ID NO: 388173 - DNA, 19 bp, Homo sapiens
  siRNA target sequence for FLJ21901 (NM_024622.2,1597-1615).
ccgaattgaagccgtttta

SEQ ID NO: 388174 - DNA, 19 bp, Homo sapiens
  siRNA target sequence for FLJ21901 (NM_024622.2,1628-1646).
ctaaataacctgagtagtt

SEQ ID NO: 388175 - DNA, 19 bp, Homo sapiens
  siRNA target sequence for FLJ21901 (NM_024622.2,1665-1683).
gatggattcagcatgatca

SEQ ID NO: 388176 - DNA, 19 bp, Homo sapiens
  siRNA target sequence for FLJ21901 (NM_024622.2,1746-1764).
gtcgtcagagactacaaca

SEQ ID NO: 388177 - DNA, 19 bp, Homo sapiens
  siRNA target sequence for FLJ21901 (NM_024622.2,1767-1785).
gcaacagtttggatctgtt

SEQ ID NO: 388178 - DNA, 19 bp, Homo sapiens
  siRNA target sequence for FLJ21901 (NM_024622.2,1850-1868).
gctactttacagcatttca

SEQ ID NO: 388179 - DNA, 19 bp, Homo sapiens
  siRNA target sequence for FLJ21901 (NM_024622.2,1851-1869).
ctactttacagcatttcat

SEQ ID NO: 388180 - DNA, 19 bp, Homo sapiens
  siRNA target sequence for FLJ21901 (NM_024622.2,1895-1913).
ggggagattgcatctttta

SEQ ID NO: 388181 - DNA, 19 bp, Homo sapiens
  siRNA target sequence for FLJ21901 (NM_024622.2,1896-1914).
gggagattgcatcttttat

SEQ ID NO: 388182 - DNA, 19 bp, Homo sapiens
  siRNA target sequence for FLJ21901 (NM_024622.2,1933-1951).
cagtactttgctactagat

SEQ ID NO: 388183 - DNA, 19 bp, Homo sapiens
  siRNA target sequence for FLJ21901 (NM_024622.2,2018-2036).
cgtccattcagcgtattga

SEQ ID NO: 388184 - DNA, 19 bp, Homo sapiens
  siRNA target sequence for FLJ21901 (NM_024622.2,2019-2037).
gtccattcagcgtattgaa

SEQ ID NO: 388185 - DNA, 19 bp, Homo sapiens
  siRNA target sequence for FLJ21901 (NM_024622.2,2021-2039).
ccattcagcgtattgaact

SEQ ID NO: 388186 - DNA, 19 bp, Homo sapiens
  siRNA target sequence for FLJ21901 (NM_024622.2,2046-2064).
cacctcaaagggatgaatt

SEQ ID NO: 388187 - DNA, 19 bp, Homo sapiens
  siRNA target sequence for FLJ21901 (NM_024622.2,2073-2091).
cttgcgtgcaacatcttaa

SEQ ID NO: 388188 - DNA, 19 bp, Homo sapiens
  siRNA target sequence for FLJ21901 (NM_024622.2,2094-2112).
cttacttaggtatattgga

SEQ ID NO: 388189 - DNA, 19 bp, Homo sapiens
  siRNA target sequence for FLJ21901 (NM_024622.2,2102-2120).
ggtatattggatcctttta

SEQ ID NO: 388190 - DNA, 19 bp, Homo sapiens
  siRNA target sequence for FLJ21901 (NM_024622.2,2111-2129).
gatccttttatattagtgt

SEQ ID NO: 388191 - DNA, 19 bp, Homo sapiens
  siRNA target sequence for FLJ21901 (NM_024622.2,2140-2158).
ctctttggccacacttgaa

SEQ ID NO: 388192 - DNA, 19 bp, Homo sapiens
  siRNA target sequence for FLJ21901 (NM_024622.2,2142-2160).
ctttggccacacttgaata

SEQ ID NO: 388193 - DNA, 19 bp, Homo sapiens
  siRNA target sequence for FLJ21901 (NM_024622.2,2171-2189).
gatctgctaaaggcaattt

SEQ ID NO: 388194 - DNA, 19 bp, Homo sapiens
  siRNA target sequence for FLJ21901 (NM_024622.2,2256-2274).
gagtccagtttcatcttat

SEQ ID NO: 388195 - DNA, 19 bp, Homo sapiens
  siRNA target sequence for FLJ21901 (NM_024622.2,2270-2288).
cttatggagttaaatagat

SEQ ID NO: 388196 - DNA, 19 bp, Homo sapiens
  siRNA target sequence for FLJ21901 (NM_024622.2,2300-2318).
gaatgccctgagtttcaga

SEQ ID NO: 388197 - DNA, 19 bp, Homo sapiens
  siRNA target sequence for FLJ21901 (NM_024622.2,2333-2351).
gaccgcttctgtcaacaat

SEQ ID NO: 388198 - DNA, 19 bp, Homo sapiens
  siRNA target sequence for FLJ21901 (NM_024622.2,2336-2354).
cgcttctgtcaacaatata

SEQ ID NO: 388199 - DNA, 19 bp, Homo sapiens
  siRNA target sequence for FLJ21901 (NM_024622.2,2414-2432).
gtactaggaggaatcaatt

SEQ ID NO: 388200 - DNA, 19 bp, Homo sapiens
  siRNA target sequence for FLJ21901 (NM_024622.2,2435-2453).
gtaaaagcctcggttctta

SEQ ID NO: 388201 - DNA, 19 bp, Homo sapiens
  siRNA target sequence for FLJ21901 (NM_024622.2,2445-2463).
cggttcttacgccttatta

SEQ ID NO: 388202 - DNA, 19 bp, Homo sapiens
  siRNA target sequence for FLJ21901 (NM_024622.2,2454-2472).
cgccttattaccacaaagt

SEQ ID NO: 388203 - DNA, 19 bp, Homo sapiens
  siRNA target sequence for FLJ21901 (NM_024622.2,2471-2489).
gtagattttgagtgtatct

SEQ ID NO: 388204 - DNA, 19 bp, Homo sapiens
  siRNA target sequence for FLJ21901 (NM_024622.2,2482-2500).
gtgtatcttggataaaaga

SEQ ID NO: 388205 - DNA, 19 bp, Homo sapiens
  siRNA target sequence for FLJ21901 (NM_024622.2,2513-2531).
ccgtatggaagccataata

SEQ ID NO: 388206 - DNA, 19 bp, Homo sapiens
  siRNA target sequence for FLJ21901 (NM_024622.2,2514-2532).
cgtatggaagccataatat

SEQ ID NO: 388207 - DNA, 19 bp, Homo sapiens
  siRNA target sequence for FLJ21901 (NM_024622.2,2515-2533).
gtatggaagccataatata

SEQ ID NO: 388208 - DNA, 19 bp, Homo sapiens
  siRNA target sequence for FLJ21901 (NM_024622.2,2519-2537).
ggaagccataatatagcat

SEQ ID NO: 388209 - DNA, 19 bp, Homo sapiens
  siRNA target sequence for FLJ21901 (NM_024622.2,2559-2577).
cctgggaatcaaatatcga

SEQ ID NO: 388210 - DNA, 19 bp, Homo sapiens
  siRNA target sequence for FLJ21901 (NM_024622.2,2560-2578).
ctgggaatcaaatatcgaa

SEQ ID NO: 388211 - DNA, 19 bp, Homo sapiens
  siRNA target sequence for FLJ21901 (NM_024622.2,2562-2580).
gggaatcaaatatcgaaat

SEQ ID NO: 388212 - DNA, 19 bp, Homo sapiens
  siRNA target sequence for FLJ21901 (NM_024622.2,2604-2622).
gggctgaaaggattgcttt

SEQ ID NO: 388213 - DNA, 19 bp, Homo sapiens
  siRNA target sequence for FLJ21901 (NM_024622.2,2712-2730).
ggtatcgtgtaattcagat

SEQ ID NO: 388214 - DNA, 19 bp, Homo sapiens
  siRNA target sequence for FLJ21901 (NM_024622.2,2713-2731).
gtatcgtgtaattcagatt

SEQ ID NO: 388215 - DNA, 19 bp, Homo sapiens
  siRNA target sequence for FLJ21901 (NM_024622.2,2735-2753).
cagtttgaatggaactcta

SEQ ID NO: 388216 - DNA, 19 bp, Homo sapiens
  siRNA target sequence for FLJ21901 (NM_024622.2,2782-2800).
ggactacctgagagaatgt

SEQ ID NO: 388217 - DNA, 19 bp, Homo sapiens
  siRNA target sequence for FLJ21901 (NM_024622.2,2783-2801).
gactacctgagagaatgta

SEQ ID NO: 388218 - DNA, 19 bp, Homo sapiens
  siRNA target sequence for FLJ21901 (NM_024622.2,2785-2803).
ctacctgagagaatgtata

SEQ ID NO: 388219 - DNA, 19 bp, Homo sapiens
  siRNA target sequence for FLJ21901 (NM_024622.2,2799-2817).
gtatatttggagaagtcaa

SEQ ID NO: 388220 - DNA, 19 bp, Homo sapiens
  siRNA target sequence for B7-H4 (NM_024626.1,102-120).
gcataattagcatcatcat

SEQ ID NO: 388221 - DNA, 19 bp, Homo sapiens
  siRNA target sequence for B7-H4 (NM_024626.1,245-263).
gaacctgacatcaaacttt

SEQ ID NO: 388222 - DNA, 19 bp, Homo sapiens
  siRNA target sequence for B7-H4 (NM_024626.1,283-301).
gctgaaggaaggtgtttta

SEQ ID NO: 388223 - DNA, 19 bp, Homo sapiens
  siRNA target sequence for B7-H4 (NM_024626.1,304-322).
cttggtccatgagttcaaa

SEQ ID NO: 388224 - DNA, 19 bp, Homo sapiens
  siRNA target sequence for B7-H4 (NM_024626.1,307-325).
ggtccatgagttcaaagaa

SEQ ID NO: 388225 - DNA, 19 bp, Homo sapiens
  siRNA target sequence for B7-H4 (NM_024626.1,338-356).
ctgtcggagcaggatgaaa

SEQ ID NO: 388226 - DNA, 19 bp, Homo sapiens
  siRNA target sequence for B7-H4 (NM_024626.1,444-462).
ctggcacctacaaatgtta

SEQ ID NO: 388227 - DNA, 19 bp, Homo sapiens
  siRNA target sequence for B7-H4 (NM_024626.1,447-465).
gcacctacaaatgttatat

SEQ ID NO: 388228 - DNA, 19 bp, Homo sapiens
  siRNA target sequence for B7-H4 (NM_024626.1,450-468).
cctacaaatgttatatcat

SEQ ID NO: 388229 - DNA, 19 bp, Homo sapiens
  siRNA target sequence for B7-H4 (NM_024626.1,487-505).
gaatgctaaccttgagtat

SEQ ID NO: 388230 - DNA, 19 bp, Homo sapiens
  siRNA target sequence for B7-H4 (NM_024626.1,522-540).
gcatgccggaagtgaatgt

SEQ ID NO: 388231 - DNA, 19 bp, Homo sapiens
  siRNA target sequence for B7-H4 (NM_024626.1,719-737).
gttacgatcaacaacacat

SEQ ID NO: 388232 - DNA, 19 bp, Homo sapiens
  siRNA target sequence for B7-H4 (NM_024626.1,735-753).
catactcctgtatgattga

SEQ ID NO: 388233 - DNA, 19 bp, Homo sapiens
  siRNA target sequence for B7-H4 (NM_024626.1,779-797).
gatatcaaagtgacagaat

SEQ ID NO: 388234 - DNA, 19 bp, Homo sapiens
  siRNA target sequence for B7-H4 (NM_024626.1,816-834).
gtcacctacagctgctaaa

SEQ ID NO: 388235 - DNA, 19 bp, Homo sapiens
  siRNA target sequence for FLJ21125 (NM_024627.4,690-708).
cacttgtggcggtaaacct

SEQ ID NO: 388236 - DNA, 19 bp, Homo sapiens
  siRNA target sequence for FLJ21125 (NM_024627.4,835-853).
gcccagctgggcgattaca

SEQ ID NO: 388237 - DNA, 19 bp, Homo sapiens
  siRNA target sequence for FLJ21125 (NM_024627.4,836-854).
cccagctgggcgattacat

SEQ ID NO: 388238 - DNA, 19 bp, Homo sapiens
  siRNA target sequence for FLJ21125 (NM_024627.4,838-856).
cagctgggcgattacatgt

SEQ ID NO: 388239 - DNA, 19 bp, Homo sapiens
  siRNA target sequence for FLJ21125 (NM_024627.4,968-986).
ccctgcctgacgattacga

SEQ ID NO: 388240 - DNA, 19 bp, Homo sapiens
  siRNA target sequence for FLJ21125 (NM_024627.4,999-1017).
ggatctcaaggaagttgtt

SEQ ID NO: 388241 - DNA, 19 bp, Homo sapiens
  siRNA target sequence for FLJ21125 (NM_024627.4,1108-1126).
cctgtggtgaggcaatact

SEQ ID NO: 388242 - DNA, 19 bp, Homo sapiens
  siRNA target sequence for FLJ21125 (NM_024627.4,1109-1127).
ctgtggtgaggcaatactt

SEQ ID NO: 388243 - DNA, 19 bp, Homo sapiens
  siRNA target sequence for FLJ21125 (NM_024627.4,1389-1407).
gtcggagtcagctaatcct

SEQ ID NO: 388244 - DNA, 19 bp, Homo sapiens
  siRNA target sequence for FLJ21125 (NM_024627.4,1492-1510).
caggaggtgtccttaggta

SEQ ID NO: 388245 - DNA, 19 bp, Homo sapiens
  siRNA target sequence for KLIP1 (NM_024629.2,116-134).
ggcgcaagacgttcaaaga

SEQ ID NO: 388246 - DNA, 19 bp, Homo sapiens
  siRNA target sequence for KLIP1 (NM_024629.2,117-135).
gcgcaagacgttcaaagaa

SEQ ID NO: 388247 - DNA, 19 bp, Homo sapiens
  siRNA target sequence for KLIP1 (NM_024629.2,164-182).
gataaagctggtcaaaagt

SEQ ID NO: 388248 - DNA, 19 bp, Homo sapiens
  siRNA target sequence for KLIP1 (NM_024629.2,199-217).
gttcgactttcctgataat

SEQ ID NO: 388249 - DNA, 19 bp, Homo sapiens
  siRNA target sequence for KLIP1 (NM_024629.2,202-220).
cgactttcctgataattct

SEQ ID NO: 388250 - DNA, 19 bp, Homo sapiens
  siRNA target sequence for KLIP1 (NM_024629.2,323-341).
gaagaattctccaaacatt

SEQ ID NO: 388251 - DNA, 19 bp, Homo sapiens
  siRNA target sequence for KLIP1 (NM_024629.2,410-428).
gaagcaagtgaaatcgaat

SEQ ID NO: 388252 - DNA, 19 bp, Homo sapiens
  siRNA target sequence for KLIP1 (NM_024629.2,419-437).
gaaatcgaatctgtaaaaa

SEQ ID NO: 388253 - DNA, 19 bp, Homo sapiens
  siRNA target sequence for KLIP1 (NM_024629.2,424-442).
cgaatctgtaaaaattagt

SEQ ID NO: 388254 - DNA, 19 bp, Homo sapiens
  siRNA target sequence for KLIP1 (NM_024629.2,463-481).
gctcaggcccattagtgat

SEQ ID NO: 388255 - DNA, 19 bp, Homo sapiens
  siRNA target sequence for KLIP1 (NM_024629.2,546-564).
cacaacgtcatgaggttat

SEQ ID NO: 388256 - DNA, 19 bp, Homo sapiens
  siRNA target sequence for KLIP1 (NM_024629.2,551-569).
cgtcatgaggttattcgaa

SEQ ID NO: 388257 - DNA, 19 bp, Homo sapiens
  siRNA target sequence for KLIP1 (NM_024629.2,576-594).
cgtcttcagaactttcaga

SEQ ID NO: 388258 - DNA, 19 bp, Homo sapiens
  siRNA target sequence for KLIP1 (NM_024629.2,603-621).
ctgagtctgtcacttctaa

SEQ ID NO: 388259 - DNA, 19 bp, Homo sapiens
  siRNA target sequence for KLIP1 (NM_024629.2,641-659).
gcccagccctctgttgaaa

SEQ ID NO: 388260 - DNA, 19 bp, Homo sapiens
  siRNA target sequence for KLIP1 (NM_024629.2,647-665).
ccctctgttgaaaaagaga

SEQ ID NO: 388261 - DNA, 19 bp, Homo sapiens
  siRNA target sequence for KLIP1 (NM_024629.2,664-682).
gaacttggcaatagaaagt

SEQ ID NO: 388262 - DNA, 19 bp, Homo sapiens
  siRNA target sequence for KLIP1 (NM_024629.2,667-685).
cttggcaatagaaagtcaa

SEQ ID NO: 388263 - DNA, 19 bp, Homo sapiens
  siRNA target sequence for KLIP1 (NM_024629.2,672-690).
caatagaaagtcaatcgaa

SEQ ID NO: 388264 - DNA, 19 bp, Homo sapiens
  siRNA target sequence for KLIP1 (NM_024629.2,705-723).
ggaagatatctcatgacaa

SEQ ID NO: 388265 - DNA, 19 bp, Homo sapiens
  siRNA target sequence for KLIP1 (NM_024629.2,746-764).
gccataggctcagatactt

SEQ ID NO: 388266 - DNA, 19 bp, Homo sapiens
  siRNA target sequence for KLIP1 (NM_024629.2,754-772).
ctcagatacttctgacatt

SEQ ID NO: 388267 - DNA, 19 bp, Homo sapiens
  siRNA target sequence for KLIP1 (NM_024629.2,809-827).
gacatcaaggagttgaata

SEQ ID NO: 388268 - DNA, 19 bp, Homo sapiens
  siRNA target sequence for KLIP1 (NM_024629.2,866-884).
caacaaagaatagaatcta

SEQ ID NO: 388269 - DNA, 19 bp, Homo sapiens
  siRNA target sequence for KLIP1 (NM_024629.2,901-919).
catcgccacattttatgtt

SEQ ID NO: 388270 - DNA, 19 bp, Homo sapiens
  siRNA target sequence for KLIP1 (NM_024629.2,953-971).
gaaagccagatgttgacaa

SEQ ID NO: 388271 - DNA, 19 bp, Homo sapiens
  siRNA target sequence for KLIP1 (NM_024629.2,994-1012).
gatgatttcagatatcgaa

SEQ ID NO: 388272 - DNA, 19 bp, Homo sapiens
  siRNA target sequence for KLIP1 (NM_024629.2,1063-1081).
gccacagctgaaacaacta

SEQ ID NO: 388273 - DNA, 19 bp, Homo sapiens
  siRNA target sequence for KLIP1 (NM_024629.2,1130-1148).
gcagcatatttcttatcta

SEQ ID NO: 388274 - DNA, 19 bp, Homo sapiens
  siRNA target sequence for KLIP1 (NM_024629.2,1131-1149).
cagcatatttcttatctaa

SEQ ID NO: 388275 - DNA, 19 bp, Homo sapiens
  siRNA target sequence for KLIP1 (NM_024629.2,1133-1151).
gcatatttcttatctaatt

SEQ ID NO: 388276 - DNA, 19 bp, Homo sapiens
  siRNA target sequence for KLIP1 (NM_024629.2,1187-1205).
gctcaagaaccaaacgtaa

SEQ ID NO: 388277 - DNA, 19 bp, Homo sapiens
  siRNA target sequence for KLIP1 (NM_024629.2,1188-1206).
ctcaagaaccaaacgtaaa

SEQ ID NO: 388278 - DNA, 19 bp, Homo sapiens
  siRNA target sequence for KLIP1 (NM_024629.2,1197-1215).
caaacgtaaaggaaacgta

SEQ ID NO: 388279 - DNA, 19 bp, Homo sapiens
  siRNA target sequence for KLIP1 (NM_024629.2,1271-1289).
gaaagccatctgcgaaata

SEQ ID NO: 388280 - DNA, 19 bp, Homo sapiens
  siRNA target sequence for KLIP1 (NM_024629.2,1275-1293).
gccatctgcgaaatatcaa

SEQ ID NO: 388281 - DNA, 19 bp, Homo sapiens
  siRNA target sequence for ZDHHC14 (NM_024630.2,673-691).
ggcagacgggcgtcttcta

SEQ ID NO: 388282 - DNA, 19 bp, Homo sapiens
  siRNA target sequence for ZDHHC14 (NM_024630.2,747-765).
ccgtacctggcggtgaaaa

SEQ ID NO: 388283 - DNA, 19 bp, Homo sapiens
  siRNA target sequence for ZDHHC14 (NM_024630.2,972-990).
ggccagaccgtgaaactta

SEQ ID NO: 388284 - DNA, 19 bp, Homo sapiens
  siRNA target sequence for ZDHHC14 (NM_024630.2,974-992).
ccagaccgtgaaacttaaa

SEQ ID NO: 388285 - DNA, 19 bp, Homo sapiens
  siRNA target sequence for ZDHHC14 (NM_024630.2,975-993).
cagaccgtgaaacttaaat

SEQ ID NO: 388286 - DNA, 19 bp, Homo sapiens
  siRNA target sequence for ZDHHC14 (NM_024630.2,1055-1073).
ctgcgtagaacggtttgat

SEQ ID NO: 388287 - DNA, 19 bp, Homo sapiens
  siRNA target sequence for ZDHHC14 (NM_024630.2,1057-1075).
gcgtagaacggtttgatca

SEQ ID NO: 388288 - DNA, 19 bp, Homo sapiens
  siRNA target sequence for ZDHHC14 (NM_024630.2,1208-1226).
gcaaacaggattcctaaat

SEQ ID NO: 388289 - DNA, 19 bp, Homo sapiens
  siRNA target sequence for ZDHHC14 (NM_024630.2,1582-1600).
gcattcagagcaccaaatt

SEQ ID NO: 388290 - DNA, 19 bp, Homo sapiens
  siRNA target sequence for ZDHHC14 (NM_024630.2,1587-1605).
cagagcaccaaattcgttt

SEQ ID NO: 388291 - DNA, 19 bp, Homo sapiens
  siRNA target sequence for ZDHHC14 (NM_024630.2,1591-1609).
gcaccaaattcgttttgca

SEQ ID NO: 388292 - DNA, 19 bp, Homo sapiens
  siRNA target sequence for FLJ23342 (NM_024631.1,53-71).
cgccaactcgccgctaaaa

SEQ ID NO: 388293 - DNA, 19 bp, Homo sapiens
  siRNA target sequence for FLJ23342 (NM_024631.1,54-72).
gccaactcgccgctaaaaa

SEQ ID NO: 388294 - DNA, 19 bp, Homo sapiens
  siRNA target sequence for FLJ23342 (NM_024631.1,55-73).
ccaactcgccgctaaaaat

SEQ ID NO: 388295 - DNA, 19 bp, Homo sapiens
  siRNA target sequence for FLJ23342 (NM_024631.1,56-74).
caactcgccgctaaaaatt

SEQ ID NO: 388296 - DNA, 19 bp, Homo sapiens
  siRNA target sequence for FLJ23342 (NM_024631.1,114-132).
ctgagcgacggaaatccat

SEQ ID NO: 388297 - DNA, 19 bp, Homo sapiens
  siRNA target sequence for FLJ23342 (NM_024631.1,600-618).
gatctccatggctatccaa

SEQ ID NO: 388298 - DNA, 19 bp, Homo sapiens
  siRNA target sequence for FLJ23342 (NM_024631.1,605-623).
ccatggctatccaacagat

SEQ ID NO: 388299 - DNA, 19 bp, Homo sapiens
  siRNA target sequence for FLJ23342 (NM_024631.1,642-660).
cctgtcacaaagagaacat

SEQ ID NO: 388300 - DNA, 19 bp, Homo sapiens
  siRNA target sequence for FLJ23342 (NM_024631.1,781-799).
caaggctccatctttctaa

SEQ ID NO: 388301 - DNA, 19 bp, Homo sapiens
  siRNA target sequence for FLJ23342 (NM_024631.1,806-824).
ggccatttttggaattggt

SEQ ID NO: 388302 - DNA, 19 bp, Homo sapiens
  siRNA target sequence for FLJ23342 (NM_024631.1,808-826).
ccatttttggaattggtta

SEQ ID NO: 388303 - DNA, 19 bp, Homo sapiens
  siRNA target sequence for FLJ23342 (NM_024631.1,843-861).
gaggatatccgttaccatt

SEQ ID NO: 388304 - DNA, 19 bp, Homo sapiens
  siRNA target sequence for FLJ23342 (NM_024631.1,897-915).
cgacttcgggagtacttca

SEQ ID NO: 388305 - DNA, 19 bp, Homo sapiens
  siRNA target sequence for FLJ23342 (NM_024631.1,928-946).
ctgaaggacggatcattat

SEQ ID NO: 388306 - DNA, 19 bp, Homo sapiens
  siRNA target sequence for FLJ23342 (NM_024631.1,930-948).
gaaggacggatcattatga

SEQ ID NO: 388307 - DNA, 19 bp, Homo sapiens
  siRNA target sequence for FLJ23342 (NM_024631.1,949-967).
cccgagtgcagaaaatgaa

SEQ ID NO: 388308 - DNA, 19 bp, Homo sapiens
  siRNA target sequence for FLJ23342 (NM_024631.1,1072-1090).
caactggtgggaatgttgt

SEQ ID NO: 388309 - DNA, 19 bp, Homo sapiens
  siRNA target sequence for FLJ23342 (NM_024631.1,1077-1095).
ggtgggaatgttgttcaat

SEQ ID NO: 388310 - DNA, 19 bp, Homo sapiens
  siRNA target sequence for FLJ23342 (NM_024631.1,1080-1098).
gggaatgttgttcaatatt

SEQ ID NO: 388311 - DNA, 19 bp, Homo sapiens
  siRNA target sequence for FLJ23342 (NM_024631.1,1103-1121).
gcctgggggtattcctaaa

SEQ ID NO: 388312 - DNA, 19 bp, Homo sapiens
  siRNA target sequence for FLJ23342 (NM_024631.1,1104-1122).
cctgggggtattcctaaaa

SEQ ID NO: 388313 - DNA, 19 bp, Homo sapiens
  siRNA target sequence for FLJ23342 (NM_024631.1,1144-1162).
gctatgaagaatgtattga

SEQ ID NO: 388314 - DNA, 19 bp, Homo sapiens
  siRNA target sequence for FLJ23342 (NM_024631.1,1269-1287).
gaacccacccgaattatct

SEQ ID NO: 388315 - DNA, 19 bp, Homo sapiens
  siRNA target sequence for FLJ23342 (NM_024631.1,1272-1290).
cccacccgaattatctatt

SEQ ID NO: 388316 - DNA, 19 bp, Homo sapiens
  siRNA target sequence for FLJ23342 (NM_024631.1,1276-1294).
cccgaattatctattgcta

SEQ ID NO: 388317 - DNA, 19 bp, Homo sapiens
  siRNA target sequence for FLJ23342 (NM_024631.1,1330-1348).
gcttatttttacatttcca

SEQ ID NO: 388318 - DNA, 19 bp, Homo sapiens
  siRNA target sequence for FLJ23342 (NM_024631.1,1341-1359).
catttccaagcgaatacca

SEQ ID NO: 388319 - DNA, 19 bp, Homo sapiens
  siRNA target sequence for FLJ23342 (NM_024631.1,1347-1365).
caagcgaataccaaaacct

SEQ ID NO: 388320 - DNA, 19 bp, Homo sapiens
  siRNA target sequence for FLJ23342 (NM_024631.1,1383-1401).
ggtattaacgggtttttgt

SEQ ID NO: 388321 - DNA, 19 bp, Homo sapiens
  siRNA target sequence for FLJ23342 (NM_024631.1,1441-1459).
ccatctacatcaaatttgt

SEQ ID NO: 388322 - DNA, 19 bp, Homo sapiens
  siRNA target sequence for FLJ23342 (NM_024631.1,1483-1501).
ccgcaggctctttagttga

SEQ ID NO: 388323 - DNA, 19 bp, Homo sapiens
  siRNA target sequence for FLJ23342 (NM_024631.1,1516-1534).
ccattggataccccttaaa

SEQ ID NO: 388324 - DNA, 19 bp, Homo sapiens
  siRNA target sequence for FLJ23342 (NM_024631.1,1517-1535).
cattggataccccttaaaa

SEQ ID NO: 388325 - DNA, 19 bp, Homo sapiens
  siRNA target sequence for FLJ11526 (NM_024632.1,846-864).
gagcgtaaggcacctatat

SEQ ID NO: 388326 - DNA, 19 bp, Homo sapiens
  siRNA target sequence for FLJ11526 (NM_024632.1,848-866).
gcgtaaggcacctatatat

SEQ ID NO: 388327 - DNA, 19 bp, Homo sapiens
  siRNA target sequence for FLJ11526 (NM_024632.1,850-868).
gtaaggcacctatatatct

SEQ ID NO: 388328 - DNA, 19 bp, Homo sapiens
  siRNA target sequence for FLJ11526 (NM_024632.1,858-876).
cctatatatctgtgatttt

SEQ ID NO: 388329 - DNA, 19 bp, Homo sapiens
  siRNA target sequence for FLJ11526 (NM_024632.1,948-966).
cgagcacgacactgacatt

SEQ ID NO: 388330 - DNA, 19 bp, Homo sapiens
  siRNA target sequence for FLJ11526 (NM_024632.1,999-1017).
caccctacgacgttataaa

SEQ ID NO: 388331 - DNA, 19 bp, Homo sapiens
  siRNA target sequence for FLJ11526 (NM_024632.1,1002-1020).
cctacgacgttataaacga

SEQ ID NO: 388332 - DNA, 19 bp, Homo sapiens
  siRNA target sequence for FLJ11526 (NM_024632.1,1010-1028).
gttataaacgacactacaa

SEQ ID NO: 388333 - DNA, 19 bp, Homo sapiens
  siRNA target sequence for FLJ11526 (NM_024632.1,1035-1053).
gaccagaccaggcttcaat

SEQ ID NO: 388334 - DNA, 19 bp, Homo sapiens
  siRNA target sequence for FLJ11526 (NM_024632.1,1037-1055).
ccagaccaggcttcaataa

SEQ ID NO: 388335 - DNA, 19 bp, Homo sapiens
  siRNA target sequence for FLJ11526 (NM_024632.1,1056-1074).
ggcccagttagcagaaact

SEQ ID NO: 388336 - DNA, 19 bp, Homo sapiens
  siRNA target sequence for C14orf139 (NM_024633.2,514-532).
cctgctctccggttgtcat

SEQ ID NO: 388337 - DNA, 19 bp, Homo sapiens
  siRNA target sequence for C14orf139 (NM_024633.2,522-540).
ccggttgtcatggtaacat

SEQ ID NO: 388338 - DNA, 19 bp, Homo sapiens
  siRNA target sequence for C14orf139 (NM_024633.2,524-542).
ggttgtcatggtaacatca

SEQ ID NO: 388339 - DNA, 19 bp, Homo sapiens
  siRNA target sequence for C14orf139 (NM_024633.2,525-543).
gttgtcatggtaacatcat

SEQ ID NO: 388340 - DNA, 19 bp, Homo sapiens
  siRNA target sequence for C14orf139 (NM_024633.2,567-585).
gccgagagacagcaatcat

SEQ ID NO: 388341 - DNA, 19 bp, Homo sapiens
  siRNA target sequence for C14orf139 (NM_024633.2,568-586).
ccgagagacagcaatcata

SEQ ID NO: 388342 - DNA, 19 bp, Homo sapiens
  siRNA target sequence for C14orf139 (NM_024633.2,569-587).
cgagagacagcaatcataa

SEQ ID NO: 388343 - DNA, 19 bp, Homo sapiens
  siRNA target sequence for C14orf139 (NM_024633.2,763-781).
ccccgagcgcctgcaatat

SEQ ID NO: 388344 - DNA, 19 bp, Homo sapiens
  siRNA target sequence for C14orf139 (NM_024633.2,766-784).
cgagcgcctgcaatatggt

SEQ ID NO: 388345 - DNA, 19 bp, Homo sapiens
  siRNA target sequence for FLJ21613 (NM_024635.2,136-154).
ggttatgaaagcttctgta

SEQ ID NO: 388346 - DNA, 19 bp, Homo sapiens
  siRNA target sequence for FLJ21613 (NM_024635.2,142-160).
gaaagcttctgtagatgat

SEQ ID NO: 388347 - DNA, 19 bp, Homo sapiens
  siRNA target sequence for FLJ21613 (NM_024635.2,221-239).
gtggacattacccaagatt

SEQ ID NO: 388348 - DNA, 19 bp, Homo sapiens
  siRNA target sequence for FLJ21613 (NM_024635.2,226-244).
cattacccaagattttgaa

SEQ ID NO: 388349 - DNA, 19 bp, Homo sapiens
  siRNA target sequence for FLJ21613 (NM_024635.2,245-263).
gaagcttgtcgagaattaa

SEQ ID NO: 388350 - DNA, 19 bp, Homo sapiens
  siRNA target sequence for FLJ21613 (NM_024635.2,248-266).
gcttgtcgagaattaaagt

SEQ ID NO: 388351 - DNA, 19 bp, Homo sapiens
  siRNA target sequence for FLJ21613 (NM_024635.2,249-267).
cttgtcgagaattaaagtt

SEQ ID NO: 388352 - DNA, 19 bp, Homo sapiens
  siRNA target sequence for FLJ21613 (NM_024635.2,269-287).
ggagaactacttcatgata

SEQ ID NO: 388353 - DNA, 19 bp, Homo sapiens
  siRNA target sequence for FLJ21613 (NM_024635.2,340-358).
gatggatgctggcatgatt

SEQ ID NO: 388354 - DNA, 19 bp, Homo sapiens
  siRNA target sequence for FLJ21613 (NM_024635.2,359-377).
ggaaaccaagttaatcgaa

SEQ ID NO: 388355 - DNA, 19 bp, Homo sapiens
  siRNA target sequence for FLJ21613 (NM_024635.2,360-378).
gaaaccaagttaatcgaaa

SEQ ID NO: 388356 - DNA, 19 bp, Homo sapiens
  siRNA target sequence for FLJ21613 (NM_024635.2,364-382).
ccaagttaatcgaaaagtt

SEQ ID NO: 388357 - DNA, 19 bp, Homo sapiens
  siRNA target sequence for FLJ21613 (NM_024635.2,446-464).
ctgatagggattatggata

SEQ ID NO: 388358 - DNA, 19 bp, Homo sapiens
  siRNA target sequence for FLJ21613 (NM_024635.2,453-471).
ggattatggatacatgttt

SEQ ID NO: 388359 - DNA, 19 bp, Homo sapiens
  siRNA target sequence for FLJ21613 (NM_024635.2,489-507).
ggttagaaggccattcact

SEQ ID NO: 388360 - DNA, 19 bp, Homo sapiens
  siRNA target sequence for FLJ21613 (NM_024635.2,509-527).
gcacagacagtatttacgt

SEQ ID NO: 388361 - DNA, 19 bp, Homo sapiens
  siRNA target sequence for FLJ21613 (NM_024635.2,518-536).
gtatttacgtgcctttaca

SEQ ID NO: 388362 - DNA, 19 bp, Homo sapiens
  siRNA target sequence for FLJ21613 (NM_024635.2,525-543).
cgtgcctttacattcataa

SEQ ID NO: 388363 - DNA, 19 bp, Homo sapiens
  siRNA target sequence for FLJ21613 (NM_024635.2,526-544).
gtgcctttacattcataat

SEQ ID NO: 388364 - DNA, 19 bp, Homo sapiens
  siRNA target sequence for FLJ21613 (NM_024635.2,535-553).
cattcataatccagacttt

SEQ ID NO: 388365 - DNA, 19 bp, Homo sapiens
  siRNA target sequence for FLJ21613 (NM_024635.2,576-594).
cttttgctctgggaatctt

SEQ ID NO: 388366 - DNA, 19 bp, Homo sapiens
  siRNA target sequence for FLJ21613 (NM_024635.2,707-725).
cgagttacaggcatgctaa

SEQ ID NO: 388367 - DNA, 19 bp, Homo sapiens
  siRNA target sequence for FLJ21613 (NM_024635.2,708-726).
gagttacaggcatgctaaa

SEQ ID NO: 388368 - DNA, 19 bp, Homo sapiens
  siRNA target sequence for FLJ21613 (NM_024635.2,803-821).
gaactagaacaccaacaat

SEQ ID NO: 388369 - DNA, 19 bp, Homo sapiens
  siRNA target sequence for FLJ21613 (NM_024635.2,844-862).
gaaatttactcgtgtgtta

SEQ ID NO: 388370 - DNA, 19 bp, Homo sapiens
  siRNA target sequence for FLJ21613 (NM_024635.2,908-926).
gcagaagctcaaaaattga

SEQ ID NO: 388371 - DNA, 19 bp, Homo sapiens
  siRNA target sequence for FLJ21613 (NM_024635.2,983-1001).
caggcccagaatgatacta

SEQ ID NO: 388372 - DNA, 19 bp, Homo sapiens
  siRNA target sequence for FLJ21613 (NM_024635.2,988-1006).
ccagaatgatactacaaaa

SEQ ID NO: 388373 - DNA, 19 bp, Homo sapiens
  siRNA target sequence for FLJ21613 (NM_024635.2,991-1009).
gaatgatactacaaaagga

SEQ ID NO: 388374 - DNA, 19 bp, Homo sapiens
  siRNA target sequence for FLJ21613 (NM_024635.2,1008-1026).
gagatcatccaattatgat

SEQ ID NO: 388375 - DNA, 19 bp, Homo sapiens
  siRNA target sequence for FLJ21613 (NM_024635.2,1069-1087).
cttccctcgatatgcaaaa

SEQ ID NO: 388376 - DNA, 19 bp, Homo sapiens
  siRNA target sequence for FLJ21613 (NM_024635.2,1072-1090).
ccctcgatatgcaaaaata

SEQ ID NO: 388377 - DNA, 19 bp, Homo sapiens
  siRNA target sequence for FLJ21613 (NM_024635.2,1111-1129).
gaactattttgcaagatta

SEQ ID NO: 388378 - DNA, 19 bp, Homo sapiens
  siRNA target sequence for FLJ21613 (NM_024635.2,1125-1143).
gattaatagatagaataaa

SEQ ID NO: 388379 - DNA, 19 bp, Homo sapiens
  siRNA target sequence for FLJ21613 (NM_024635.2,1316-1334).
gcacttcggtcttttgtca

SEQ ID NO: 388380 - DNA, 19 bp, Homo sapiens
  siRNA target sequence for FLJ21613 (NM_024635.2,1353-1371).
ccaagtgctacctatataa

SEQ ID NO: 388381 - DNA, 19 bp, Homo sapiens
  siRNA target sequence for FLJ21613 (NM_024635.2,1354-1372).
caagtgctacctatataat

SEQ ID NO: 388382 - DNA, 19 bp, Homo sapiens
  siRNA target sequence for FLJ21613 (NM_024635.2,1359-1377).
gctacctatataataatca

SEQ ID NO: 388383 - DNA, 19 bp, Homo sapiens
  siRNA target sequence for FLJ21613 (NM_024635.2,1390-1408).
ctgtatcgactcctttgtt

SEQ ID NO: 388384 - DNA, 19 bp, Homo sapiens
  siRNA target sequence for FLJ21613 (NM_024635.2,1421-1439).
cggccattctgtagtctta

SEQ ID NO: 388385 - DNA, 19 bp, Homo sapiens
  siRNA target sequence for FLJ21613 (NM_024635.2,1422-1440).
ggccattctgtagtcttat

SEQ ID NO: 388386 - DNA, 19 bp, Homo sapiens
  siRNA target sequence for FLJ21613 (NM_024635.2,1423-1441).
gccattctgtagtcttatt

SEQ ID NO: 388387 - DNA, 19 bp, Homo sapiens
  siRNA target sequence for FLJ21613 (NM_024635.2,1442-1460).
cagatccatggacataaca

SEQ ID NO: 388388 - DNA, 19 bp, Homo sapiens
  siRNA target sequence for FLJ21613 (NM_024635.2,1461-1479).
gggctcgacagagagataa

SEQ ID NO: 388389 - DNA, 19 bp, Homo sapiens
  siRNA target sequence for FLJ21613 (NM_024635.2,1464-1482).
ctcgacagagagataagct

SEQ ID NO: 388390 - DNA, 19 bp, Homo sapiens
  siRNA target sequence for FLJ21613 (NM_024635.2,1473-1491).
gagataagcttggtcatat

SEQ ID NO: 388391 - DNA, 19 bp, Homo sapiens
  siRNA target sequence for FLJ21613 (NM_024635.2,1485-1503).
gtcatattcttgaggaatt

SEQ ID NO: 388392 - DNA, 19 bp, Homo sapiens
  siRNA target sequence for FLJ21613 (NM_024635.2,1599-1617).
gtacctgggtcctttacca

SEQ ID NO: 388393 - DNA, 19 bp, Homo sapiens
  siRNA target sequence for FLJ21613 (NM_024635.2,1616-1634).
cataaccttcgcattatga

SEQ ID NO: 388394 - DNA, 19 bp, Homo sapiens
  siRNA target sequence for FLJ21613 (NM_024635.2,1633-1651).
gatacagtaccttctaagt

SEQ ID NO: 388395 - DNA, 19 bp, Homo sapiens
  siRNA target sequence for FLJ21613 (NM_024635.2,1658-1676).
gaattggaactctacagta

SEQ ID NO: 388396 - DNA, 19 bp, Homo sapiens
  siRNA target sequence for FLJ21613 (NM_024635.2,1672-1690).
cagtatgcacgagtactat

SEQ ID NO: 388397 - DNA, 19 bp, Homo sapiens
  siRNA target sequence for FLJ21613 (NM_024635.2,1674-1692).
gtatgcacgagtactatta

SEQ ID NO: 388398 - DNA, 19 bp, Homo sapiens
  siRNA target sequence for FLJ21613 (NM_024635.2,1678-1696).
gcacgagtactattacata

SEQ ID NO: 388399 - DNA, 19 bp, Homo sapiens
  siRNA target sequence for FLJ21613 (NM_024635.2,1681-1699).
cgagtactattacatatat

SEQ ID NO: 388400 - DNA, 19 bp, Homo sapiens
  siRNA target sequence for FLJ21613 (NM_024635.2,1718-1736).
ctttacgcatggttgatgt

SEQ ID NO: 388401 - DNA, 19 bp, Homo sapiens
  siRNA target sequence for FLJ21613 (NM_024635.2,1748-1766).
cgtgccgatggctctcaaa

SEQ ID NO: 388402 - DNA, 19 bp, Homo sapiens
  siRNA target sequence for FLJ21613 (NM_024635.2,1749-1767).
gtgccgatggctctcaaat

SEQ ID NO: 388403 - DNA, 19 bp, Homo sapiens
  siRNA target sequence for FLJ21613 (NM_024635.2,1798-1816).
gaaaggccgtagtagtaaa

SEQ ID NO: 388404 - DNA, 19 bp, Homo sapiens
  siRNA target sequence for FLJ21613 (NM_024635.2,1802-1820).
ggccgtagtagtaaaaaaa

SEQ ID NO: 388405 - DNA, 19 bp, Homo sapiens
  siRNA target sequence for FLJ21613 (NM_024635.2,1804-1822).
ccgtagtagtaaaaaaaca

SEQ ID NO: 388406 - DNA, 19 bp, Homo sapiens
  siRNA target sequence for FLJ21613 (NM_024635.2,1805-1823).
cgtagtagtaaaaaaacaa

SEQ ID NO: 388407 - DNA, 19 bp, Homo sapiens
  siRNA target sequence for FLJ21613 (NM_024635.2,1863-1881).
caatgagccaagcatatca

SEQ ID NO: 388408 - DNA, 19 bp, Homo sapiens
  siRNA target sequence for FLJ21613 (NM_024635.2,1871-1889).
caagcatatcagaacatgt

SEQ ID NO: 388409 - DNA, 19 bp, Homo sapiens
  siRNA target sequence for FLJ21613 (NM_024635.2,1888-1906).
gtgtgctggaatgtttaaa

SEQ ID NO: 388410 - DNA, 19 bp, Homo sapiens
  siRNA target sequence for FLJ21613 (NM_024635.2,1892-1910).
gctggaatgtttaaaacca

SEQ ID NO: 388411 - DNA, 19 bp, Homo sapiens
  siRNA target sequence for FLJ21613 (NM_024635.2,1908-1926).
ccatggtagcatttgacat

SEQ ID NO: 388412 - DNA, 19 bp, Homo sapiens
  siRNA target sequence for FLJ21613 (NM_024635.2,1927-1945).
ggacggcaaagtacgtaaa

SEQ ID NO: 388413 - DNA, 19 bp, Homo sapiens
  siRNA target sequence for FLJ21613 (NM_024635.2,1946-1964).
ccgaagtttgagcttgata

SEQ ID NO: 388414 - DNA, 19 bp, Homo sapiens
  siRNA target sequence for FLJ21613 (NM_024635.2,1951-1969).
gtttgagcttgatagtgaa

SEQ ID NO: 388415 - DNA, 19 bp, Homo sapiens
  siRNA target sequence for FLJ21613 (NM_024635.2,2024-2042).
ccagtgcactacttacagt

SEQ ID NO: 388416 - DNA, 19 bp, Homo sapiens
  siRNA target sequence for FLJ21613 (NM_024635.2,2025-2043).
cagtgcactacttacagtt

SEQ ID NO: 388417 - DNA, 19 bp, Homo sapiens
  siRNA target sequence for FLJ21613 (NM_024635.2,2048-2066).
gaaatgtctgacctcaata

SEQ ID NO: 388418 - DNA, 19 bp, Homo sapiens
  siRNA target sequence for FLJ21613 (NM_024635.2,2053-2071).
gtctgacctcaataaatat

SEQ ID NO: 388419 - DNA, 19 bp, Homo sapiens
  siRNA target sequence for FLJ21613 (NM_024635.2,2109-2127).
ctagtaagcactttcaaca

SEQ ID NO: 388420 - DNA, 19 bp, Homo sapiens
  siRNA target sequence for FLJ21613 (NM_024635.2,2158-2176).
cccggaccatgaggttaat

SEQ ID NO: 388421 - DNA, 19 bp, Homo sapiens
  siRNA target sequence for FLJ21613 (NM_024635.2,2159-2177).
ccggaccatgaggttaata

SEQ ID NO: 388422 - DNA, 19 bp, Homo sapiens
  siRNA target sequence for FLJ21613 (NM_024635.2,2161-2179).
ggaccatgaggttaataga

SEQ ID NO: 388423 - DNA, 19 bp, Homo sapiens
  siRNA target sequence for FLJ21613 (NM_024635.2,2162-2180).
gaccatgaggttaatagaa

SEQ ID NO: 388424 - DNA, 19 bp, Homo sapiens
  siRNA target sequence for FLJ21613 (NM_024635.2,2164-2182).
ccatgaggttaatagaatt

SEQ ID NO: 388425 - DNA, 19 bp, Homo sapiens
  siRNA target sequence for FLJ21613 (NM_024635.2,2165-2183).
catgaggttaatagaattt

SEQ ID NO: 388426 - DNA, 19 bp, Homo sapiens
  siRNA target sequence for FLJ21613 (NM_024635.2,2198-2216).
cccaactttgtggttatga

SEQ ID NO: 388427 - DNA, 19 bp, Homo sapiens
  siRNA target sequence for FLJ23476 (NM_024640.2,637-655).
cctcagttgtccttggtta

SEQ ID NO: 388428 - DNA, 19 bp, Homo sapiens
  siRNA target sequence for FLJ23476 (NM_024640.2,642-660).
gttgtccttggttattgat

SEQ ID NO: 388429 - DNA, 19 bp, Homo sapiens
  siRNA target sequence for FLJ23476 (NM_024640.2,782-800).
ccatcctccaacagaagta

SEQ ID NO: 388430 - DNA, 19 bp, Homo sapiens
  siRNA target sequence for MANEA (NM_024641.1,214-232).
gcgctcagcttcaattggt

SEQ ID NO: 388431 - DNA, 19 bp, Homo sapiens
  siRNA target sequence for MANEA (NM_024641.1,250-268).
gtacccacctgatgtaaat

SEQ ID NO: 388432 - DNA, 19 bp, Homo sapiens
  siRNA target sequence for MANEA (NM_024641.1,298-316).
ggtacccactattttggat

SEQ ID NO: 388433 - DNA, 19 bp, Homo sapiens
  siRNA target sequence for MANEA (NM_024641.1,299-317).
gtacccactattttggata

SEQ ID NO: 388434 - DNA, 19 bp, Homo sapiens
  siRNA target sequence for MANEA (NM_024641.1,320-338).
gctcataaatataacctaa

SEQ ID NO: 388435 - DNA, 19 bp, Homo sapiens
  siRNA target sequence for MANEA (NM_024641.1,321-339).
ctcataaatataacctaaa

SEQ ID NO: 388436 - DNA, 19 bp, Homo sapiens
  siRNA target sequence for MANEA (NM_024641.1,350-368).
cacatagaaccatatagca

SEQ ID NO: 388437 - DNA, 19 bp, Homo sapiens
  siRNA target sequence for MANEA (NM_024641.1,352-370).
catagaaccatatagcaat

SEQ ID NO: 388438 - DNA, 19 bp, Homo sapiens
  siRNA target sequence for MANEA (NM_024641.1,371-389).
cgagatgatcaaaacatgt

SEQ ID NO: 388439 - DNA, 19 bp, Homo sapiens
  siRNA target sequence for MANEA (NM_024641.1,374-392).
gatgatcaaaacatgtaca

SEQ ID NO: 388440 - DNA, 19 bp, Homo sapiens
  siRNA target sequence for MANEA (NM_024641.1,423-441).
gaaatcatccggcctttta

SEQ ID NO: 388441 - DNA, 19 bp, Homo sapiens
  siRNA target sequence for MANEA (NM_024641.1,434-452).
gccttttacaggtacaaga

SEQ ID NO: 388442 - DNA, 19 bp, Homo sapiens
  siRNA target sequence for MANEA (NM_024641.1,462-480).
gcaatgctcttcctatgtt

SEQ ID NO: 388443 - DNA, 19 bp, Homo sapiens
  siRNA target sequence for MANEA (NM_024641.1,463-481).
caatgctcttcctatgttt

SEQ ID NO: 388444 - DNA, 19 bp, Homo sapiens
  siRNA target sequence for MANEA (NM_024641.1,468-486).
ctcttcctatgttttatgt

SEQ ID NO: 388445 - DNA, 19 bp, Homo sapiens
  siRNA target sequence for MANEA (NM_024641.1,485-503).
gtctatgattcctatatta

SEQ ID NO: 388446 - DNA, 19 bp, Homo sapiens
  siRNA target sequence for MANEA (NM_024641.1,538-556).
ctcagggtctcggagtatt

SEQ ID NO: 388447 - DNA, 19 bp, Homo sapiens
  siRNA target sequence for MANEA (NM_024641.1,566-584).
ccttatgatggactgttta

SEQ ID NO: 388448 - DNA, 19 bp, Homo sapiens
  siRNA target sequence for MANEA (NM_024641.1,659-677).
gccacaaatggctttactt

SEQ ID NO: 388449 - DNA, 19 bp, Homo sapiens
  siRNA target sequence for MANEA (NM_024641.1,680-698).
ggctcatcacatcagaatt

SEQ ID NO: 388450 - DNA, 19 bp, Homo sapiens
  siRNA target sequence for MANEA (NM_024641.1,802-820).
cactcggaaccgaatcaat

SEQ ID NO: 388451 - DNA, 19 bp, Homo sapiens
  siRNA target sequence for MANEA (NM_024641.1,811-829).
ccgaatcaatgggaagtat

SEQ ID NO: 388452 - DNA, 19 bp, Homo sapiens
  siRNA target sequence for MANEA (NM_024641.1,812-830).
cgaatcaatgggaagtatt

SEQ ID NO: 388453 - DNA, 19 bp, Homo sapiens
  siRNA target sequence for MANEA (NM_024641.1,823-841).
gaagtattatgaaattggt

SEQ ID NO: 388454 - DNA, 19 bp, Homo sapiens
  siRNA target sequence for MANEA (NM_024641.1,857-875).
cagacacgccccagcttaa

SEQ ID NO: 388455 - DNA, 19 bp, Homo sapiens
  siRNA target sequence for MANEA (NM_024641.1,859-877).
gacacgccccagcttaatt

SEQ ID NO: 388456 - DNA, 19 bp, Homo sapiens
  siRNA target sequence for MANEA (NM_024641.1,1002-1020).
ctcgcaagtggtctgaaaa

SEQ ID NO: 388457 - DNA, 19 bp, Homo sapiens
  siRNA target sequence for MANEA (NM_024641.1,1009-1027).
gtggtctgaaaaatacagt

SEQ ID NO: 388458 - DNA, 19 bp, Homo sapiens
  siRNA target sequence for MANEA (NM_024641.1,1026-1044).
gtaaggaaagagcaactta

SEQ ID NO: 388459 - DNA, 19 bp, Homo sapiens
  siRNA target sequence for MANEA (NM_024641.1,1031-1049).
gaaagagcaacttatgcat

SEQ ID NO: 388460 - DNA, 19 bp, Homo sapiens
  siRNA target sequence for C14orf140 (NM_024643.1,169-187).
cgttatgctcccacataat

SEQ ID NO: 388461 - DNA, 19 bp, Homo sapiens
  siRNA target sequence for C14orf140 (NM_024643.1,170-188).
gttatgctcccacataata

SEQ ID NO: 388462 - DNA, 19 bp, Homo sapiens
  siRNA target sequence for C14orf140 (NM_024643.1,266-284).
gggcacctgaggaacaatt

SEQ ID NO: 388463 - DNA, 19 bp, Homo sapiens
  siRNA target sequence for C14orf140 (NM_024643.1,267-285).
ggcacctgaggaacaattt

SEQ ID NO: 388464 - DNA, 19 bp, Homo sapiens
  siRNA target sequence for C14orf140 (NM_024643.1,432-450).
gccaaggaaatggtttgtt

SEQ ID NO: 388465 - DNA, 19 bp, Homo sapiens
  siRNA target sequence for C14orf140 (NM_024643.1,474-492).
ggtatcccaaagccaataa

SEQ ID NO: 388466 - DNA, 19 bp, Homo sapiens
  siRNA target sequence for C14orf140 (NM_024643.1,497-515).
gactttatcccctttacaa

SEQ ID NO: 388467 - DNA, 19 bp, Homo sapiens
  siRNA target sequence for C14orf140 (NM_024643.1,599-617).
gatggggaccataatgtct

SEQ ID NO: 388468 - DNA, 19 bp, Homo sapiens
  siRNA target sequence for C14orf140 (NM_024643.1,629-647).
cctgagccgagagagtttt

SEQ ID NO: 388469 - DNA, 19 bp, Homo sapiens
  siRNA target sequence for C14orf140 (NM_024643.1,634-652).
gccgagagagttttcatct

SEQ ID NO: 388470 - DNA, 19 bp, Homo sapiens
  siRNA target sequence for C14orf140 (NM_024643.1,635-653).
ccgagagagttttcatcta

SEQ ID NO: 388471 - DNA, 19 bp, Homo sapiens
  siRNA target sequence for C14orf140 (NM_024643.1,728-746).
gccgtggcaaactttgaca

SEQ ID NO: 388472 - DNA, 19 bp, Homo sapiens
  siRNA target sequence for C14orf140 (NM_024643.1,757-775).
ggtgcagatccgaagacta

SEQ ID NO: 388473 - DNA, 19 bp, Homo sapiens
  siRNA target sequence for C14orf140 (NM_024643.1,760-778).
gcagatccgaagactagaa

SEQ ID NO: 388474 - DNA, 19 bp, Homo sapiens
  siRNA target sequence for C14orf169 (NM_024644.1,158-176).
ggtccaggaagatacgaaa

SEQ ID NO: 388475 - DNA, 19 bp, Homo sapiens
  siRNA target sequence for C14orf169 (NM_024644.1,177-195).
gcagctgcgaagtgttgta

SEQ ID NO: 388476 - DNA, 19 bp, Homo sapiens
  siRNA target sequence for C14orf169 (NM_024644.1,178-196).
cagctgcgaagtgttgtat

SEQ ID NO: 388477 - DNA, 19 bp, Homo sapiens
  siRNA target sequence for C14orf169 (NM_024644.1,501-519).
gtgcaccgcgcaacactta

SEQ ID NO: 388478 - DNA, 19 bp, Homo sapiens
  siRNA target sequence for C14orf169 (NM_024644.1,761-779).
cctactaccagggactttt

SEQ ID NO: 388479 - DNA, 19 bp, Homo sapiens
  siRNA target sequence for C14orf169 (NM_024644.1,765-783).
ctaccagggacttttctct

SEQ ID NO: 388480 - DNA, 19 bp, Homo sapiens
  siRNA target sequence for C14orf169 (NM_024644.1,785-803).
ccgctgacctggattcgat

SEQ ID NO: 388481 - DNA, 19 bp, Homo sapiens
  siRNA target sequence for C14orf169 (NM_024644.1,841-859).
gacgccgctcgctacatca

SEQ ID NO: 388482 - DNA, 19 bp, Homo sapiens
  siRNA target sequence for C14orf169 (NM_024644.1,971-989).
ctactgtgtggcagttttt

SEQ ID NO: 388483 - DNA, 19 bp, Homo sapiens
  siRNA target sequence for C14orf169 (NM_024644.1,1101-1119).
gcagctggaaggtaggaaa

SEQ ID NO: 388484 - DNA, 19 bp, Homo sapiens
  siRNA target sequence for C14orf169 (NM_024644.1,1115-1133).
ggaaactctggcgtgtata

SEQ ID NO: 388485 - DNA, 19 bp, Homo sapiens
  siRNA target sequence for C14orf169 (NM_024644.1,1231-1249).
cctggagatttgctgtatt

SEQ ID NO: 388486 - DNA, 19 bp, Homo sapiens
  siRNA target sequence for C14orf169 (NM_024644.1,1417-1435).
ccccgagacttcatggatt

SEQ ID NO: 388487 - DNA, 19 bp, Homo sapiens
  siRNA target sequence for C14orf169 (NM_024644.1,1418-1436).
cccgagacttcatggatta

SEQ ID NO: 388488 - DNA, 19 bp, Homo sapiens
  siRNA target sequence for C14orf169 (NM_024644.1,1469-1487).
cgcgaagaaccgctttcat

SEQ ID NO: 388489 - DNA, 19 bp, Homo sapiens
  siRNA target sequence for C14orf169 (NM_024644.1,1549-1567).
gaccagcgagccaaagact

SEQ ID NO: 388490 - DNA, 19 bp, Homo sapiens
  siRNA target sequence for C14orf169 (NM_024644.1,1585-1603).
ccccctgttttgactgata

SEQ ID NO: 388491 - DNA, 19 bp, Homo sapiens
  siRNA target sequence for C14orf169 (NM_024644.1,1605-1623).
ggagagggcactaagtgtt

SEQ ID NO: 388492 - DNA, 19 bp, Homo sapiens
  siRNA target sequence for C14orf169 (NM_024644.1,1606-1624).
gagagggcactaagtgttt

SEQ ID NO: 388493 - DNA, 19 bp, Homo sapiens
  siRNA target sequence for C14orf169 (NM_024644.1,1619-1637).
gtgtttacgggcttccaat

SEQ ID NO: 388494 - DNA, 19 bp, Homo sapiens
  siRNA target sequence for C14orf169 (NM_024644.1,1674-1692).
ccagttgacaacagaaaca

SEQ ID NO: 388495 - DNA, 19 bp, Homo sapiens
  siRNA target sequence for C14orf169 (NM_024644.1,1742-1760).
gccatttgtttctctatta

SEQ ID NO: 388496 - DNA, 19 bp, Homo sapiens
  siRNA target sequence for C14orf169 (NM_024644.1,1799-1817).
ccaagtgcttggaaatata

SEQ ID NO: 388497 - DNA, 19 bp, Homo sapiens
  siRNA target sequence for C14orf169 (NM_024644.1,1845-1863).
gttgcttggttcttatcca

SEQ ID NO: 388498 - DNA, 19 bp, Homo sapiens
  siRNA target sequence for C14orf169 (NM_024644.1,1917-1935).
cttggcaaccacgttgtat

SEQ ID NO: 388499 - DNA, 19 bp, Homo sapiens
  siRNA target sequence for C14orf169 (NM_024644.1,1920-1938).
ggcaaccacgttgtatgat

SEQ ID NO: 388500 - DNA, 19 bp, Homo sapiens
  siRNA target sequence for C14orf169 (NM_024644.1,1921-1939).
gcaaccacgttgtatgata

SEQ ID NO: 388501 - DNA, 19 bp, Homo sapiens
  siRNA target sequence for C14orf169 (NM_024644.1,1922-1940).
caaccacgttgtatgataa

SEQ ID NO: 388502 - DNA, 19 bp, Homo sapiens
  siRNA target sequence for C14orf169 (NM_024644.1,1959-1977).
gatgcctctagccctaaat

SEQ ID NO: 388503 - DNA, 19 bp, Homo sapiens
  siRNA target sequence for BBS1 (NM_024649.4,337-355).
ggcccttgtgtctatgtgt

SEQ ID NO: 388504 - DNA, 19 bp, Homo sapiens
  siRNA target sequence for BBS1 (NM_024649.4,809-827).
cctgccgcaatggaaacat

SEQ ID NO: 388505 - DNA, 19 bp, Homo sapiens
  siRNA target sequence for BBS1 (NM_024649.4,813-831).
ccgcaatggaaacatctat

SEQ ID NO: 388506 - DNA, 19 bp, Homo sapiens
  siRNA target sequence for BBS1 (NM_024649.4,814-832).
cgcaatggaaacatctata

SEQ ID NO: 388507 - DNA, 19 bp, Homo sapiens
  siRNA target sequence for BBS1 (NM_024649.4,893-911).
gacttatccgggtacacaa

SEQ ID NO: 388508 - DNA, 19 bp, Homo sapiens
  siRNA target sequence for BBS1 (NM_024649.4,1190-1208).
gaggtggtggcctgatcat

SEQ ID NO: 388509 - DNA, 19 bp, Homo sapiens
  siRNA target sequence for BBS1 (NM_024649.4,1193-1211).
gtggtggcctgatcatcaa

SEQ ID NO: 388510 - DNA, 19 bp, Homo sapiens
  siRNA target sequence for BBS1 (NM_024649.4,1195-1213).
ggtggcctgatcatcaaga

SEQ ID NO: 388511 - DNA, 19 bp, Homo sapiens
  siRNA target sequence for BBS1 (NM_024649.4,1196-1214).
gtggcctgatcatcaagat

SEQ ID NO: 388512 - DNA, 19 bp, Homo sapiens
  siRNA target sequence for BBS1 (NM_024649.4,1221-1239).
gcgtacagcagtgtttgta

SEQ ID NO: 388513 - DNA, 19 bp, Homo sapiens
  siRNA target sequence for BBS1 (NM_024649.4,1223-1241).
gtacagcagtgtttgtaga

SEQ ID NO: 388514 - DNA, 19 bp, Homo sapiens
  siRNA target sequence for BBS1 (NM_024649.4,1298-1316).
gaaagacccggctttacgt

SEQ ID NO: 388515 - DNA, 19 bp, Homo sapiens
  siRNA target sequence for BBS1 (NM_024649.4,1364-1382).
ccttccagacagacctata

SEQ ID NO: 388516 - DNA, 19 bp, Homo sapiens
  siRNA target sequence for BBS1 (NM_024649.4,1525-1543).
ctgcagaacacctcaacaa

SEQ ID NO: 388517 - DNA, 19 bp, Homo sapiens
  siRNA target sequence for BBS1 (NM_024649.4,1666-1684).
gtggagagtctcagtaaca

SEQ ID NO: 388518 - DNA, 19 bp, Homo sapiens
  siRNA target sequence for FLJ22531 (NM_024650.2,520-538).
gaagttcctaaaagaaata

SEQ ID NO: 388519 - DNA, 19 bp, Homo sapiens
  siRNA target sequence for FLJ22531 (NM_024650.2,672-690).
cagattgtctggttataaa

SEQ ID NO: 388520 - DNA, 19 bp, Homo sapiens
  siRNA target sequence for FLJ22531 (NM_024650.2,721-739).
ccctaaggtcagatttcat

SEQ ID NO: 388521 - DNA, 19 bp, Homo sapiens
  siRNA target sequence for FLJ22531 (NM_024650.2,727-745).
ggtcagatttcatttcagt

SEQ ID NO: 388522 - DNA, 19 bp, Homo sapiens
  siRNA target sequence for FLJ22531 (NM_024650.2,788-806).
gagaatgaacccactttga

SEQ ID NO: 388523 - DNA, 19 bp, Homo sapiens
  siRNA target sequence for FLJ22531 (NM_024650.2,832-850).
ggtcgactcccagcattat

SEQ ID NO: 388524 - DNA, 19 bp, Homo sapiens
  siRNA target sequence for FLJ22531 (NM_024650.2,844-862).
gcattatgtgagaccaaat

SEQ ID NO: 388525 - DNA, 19 bp, Homo sapiens
  siRNA target sequence for FLJ22531 (NM_024650.2,955-973).
cttgttgggagaactgata

SEQ ID NO: 388526 - DNA, 19 bp, Homo sapiens
  siRNA target sequence for FLJ22531 (NM_024650.2,1024-1042).
gcttaacaggatttcttca

SEQ ID NO: 388527 - DNA, 19 bp, Homo sapiens
  siRNA target sequence for FLJ22531 (NM_024650.2,1041-1059).
cagtttccatatttctata

SEQ ID NO: 388528 - DNA, 19 bp, Homo sapiens
  siRNA target sequence for FLJ22531 (NM_024650.2,1097-1115).
gagcagccgatgactactt

SEQ ID NO: 388529 - DNA, 19 bp, Homo sapiens
  siRNA target sequence for FLJ22531 (NM_024650.2,1164-1182).
gtatgatacccaatttgga

SEQ ID NO: 388530 - DNA, 19 bp, Homo sapiens
  siRNA target sequence for FLJ22531 (NM_024650.2,1172-1190).
cccaatttggatctcaatt

SEQ ID NO: 388531 - DNA, 19 bp, Homo sapiens
  siRNA target sequence for FLJ22531 (NM_024650.2,1173-1191).
ccaatttggatctcaattt

SEQ ID NO: 388532 - DNA, 19 bp, Homo sapiens
  siRNA target sequence for FLJ22531 (NM_024650.2,1336-1354).
ggaaatctggggagtctat

SEQ ID NO: 388533 - DNA, 19 bp, Homo sapiens
  siRNA target sequence for FLJ22531 (NM_024650.2,1337-1355).
gaaatctggggagtctata

SEQ ID NO: 388534 - DNA, 19 bp, Homo sapiens
  siRNA target sequence for FLJ22531 (NM_024650.2,1505-1523).
gtgaactccatcatgagta

SEQ ID NO: 388535 - DNA, 19 bp, Homo sapiens
  siRNA target sequence for FLJ22531 (NM_024650.2,1507-1525).
gaactccatcatgagtatt

SEQ ID NO: 388536 - DNA, 19 bp, Homo sapiens
  siRNA target sequence for FLJ22531 (NM_024650.2,1581-1599).
cagctgacacacaagagtt

SEQ ID NO: 388537 - DNA, 19 bp, Homo sapiens
  siRNA target sequence for FLJ22531 (NM_024650.2,1603-1621).
gaccaaactgcacaaagta

SEQ ID NO: 388538 - DNA, 19 bp, Homo sapiens
  siRNA target sequence for FLJ22531 (NM_024650.2,1606-1624).
caaactgcacaaagtattt

SEQ ID NO: 388539 - DNA, 19 bp, Homo sapiens
  siRNA target sequence for FLJ22531 (NM_024650.2,1630-1648).
gatcacccaacaccaattt

SEQ ID NO: 388540 - DNA, 19 bp, Homo sapiens
  siRNA target sequence for FLJ22531 (NM_024650.2,1718-1736).
gaggacgcacctgataaca

SEQ ID NO: 388541 - DNA, 19 bp, Homo sapiens
  siRNA target sequence for PRKRIP1 (NM_024653.1,83-101).
caccgaggcccaagaaaga

SEQ ID NO: 388542 - DNA, 19 bp, Homo sapiens
  siRNA target sequence for PRKRIP1 (NM_024653.1,111-129).
gctcgtcatccccaagaat

SEQ ID NO: 388543 - DNA, 19 bp, Homo sapiens
  siRNA target sequence for PRKRIP1 (NM_024653.1,221-239).
ctcgacctcccccagaatt

SEQ ID NO: 388544 - DNA, 19 bp, Homo sapiens
  siRNA target sequence for PRKRIP1 (NM_024653.1,224-242).
gacctcccccagaatttgt

SEQ ID NO: 388545 - DNA, 19 bp, Homo sapiens
  siRNA target sequence for FLJ23323 (NM_024654.3,404-422).
ccggtcgagcagggtttta

SEQ ID NO: 388546 - DNA, 19 bp, Homo sapiens
  siRNA target sequence for FLJ23323 (NM_024654.3,461-479).
caggtgcaggtatttggtt

SEQ ID NO: 388547 - DNA, 19 bp, Homo sapiens
  siRNA target sequence for FLJ23323 (NM_024654.3,464-482).
gtgcaggtatttggtttta

SEQ ID NO: 388548 - DNA, 19 bp, Homo sapiens
  siRNA target sequence for FLJ23323 (NM_024654.3,467-485).
caggtatttggttttacca

SEQ ID NO: 388549 - DNA, 19 bp, Homo sapiens
  siRNA target sequence for FLJ23323 (NM_024654.3,509-527).
gacatcttctctgtgtata

SEQ ID NO: 388550 - DNA, 19 bp, Homo sapiens
  siRNA target sequence for FLJ23323 (NM_024654.3,543-561).
gtatccatgcacttcacta

SEQ ID NO: 388551 - DNA, 19 bp, Homo sapiens
  siRNA target sequence for FLJ23323 (NM_024654.3,559-577).
ctactcacagcctgagaaa

SEQ ID NO: 388552 - DNA, 19 bp, Homo sapiens
  siRNA target sequence for FLJ23323 (NM_024654.3,644-662).
cgttggtcgatgcagaatt

SEQ ID NO: 388553 - DNA, 19 bp, Homo sapiens
  siRNA target sequence for FLJ23323 (NM_024654.3,645-663).
gttggtcgatgcagaattt

SEQ ID NO: 388554 - DNA, 19 bp, Homo sapiens
  siRNA target sequence for FLJ23323 (NM_024654.3,698-716).
ctgaaaactgccactgtaa

SEQ ID NO: 388555 - DNA, 19 bp, Homo sapiens
  siRNA target sequence for FLJ23323 (NM_024654.3,735-753).
cgggttcatcctacatttt

SEQ ID NO: 388556 - DNA, 19 bp, Homo sapiens
  siRNA target sequence for FLJ23323 (NM_024654.3,736-754).
gggttcatcctacattttt

SEQ ID NO: 388557 - DNA, 19 bp, Homo sapiens
  siRNA target sequence for FLJ23323 (NM_024654.3,765-783).
gtccaactccccagattaa

SEQ ID NO: 388558 - DNA, 19 bp, Homo sapiens
  siRNA target sequence for FLJ23323 (NM_024654.3,774-792).
cccagattaaacctgaata

SEQ ID NO: 388559 - DNA, 19 bp, Homo sapiens
  siRNA target sequence for FLJ23323 (NM_024654.3,775-793).
ccagattaaacctgaatat

SEQ ID NO: 388560 - DNA, 19 bp, Homo sapiens
  siRNA target sequence for FLJ23323 (NM_024654.3,871-889).
cctggaagagttagtcaat

SEQ ID NO: 388561 - DNA, 19 bp, Homo sapiens
  siRNA target sequence for FLJ23323 (NM_024654.3,874-892).
ggaagagttagtcaatgtt

SEQ ID NO: 388562 - DNA, 19 bp, Homo sapiens
  siRNA target sequence for FLJ23323 (NM_024654.3,912-930).
gctgccctgtcattctagt

SEQ ID NO: 388563 - DNA, 19 bp, Homo sapiens
  siRNA target sequence for FLJ23323 (NM_024654.3,940-958).
ccaggatgttggaaagtca

SEQ ID NO: 388564 - DNA, 19 bp, Homo sapiens
  siRNA target sequence for FLJ23323 (NM_024654.3,969-987).
gatacctgattaaccattt

SEQ ID NO: 388565 - DNA, 19 bp, Homo sapiens
  siRNA target sequence for FLJ23323 (NM_024654.3,973-991).
cctgattaaccatttgtta

SEQ ID NO: 388566 - DNA, 19 bp, Homo sapiens
  siRNA target sequence for FLJ23323 (NM_024654.3,996-1014).
gtcttccctgcgttgacta

SEQ ID NO: 388567 - DNA, 19 bp, Homo sapiens
  siRNA target sequence for FLJ23323 (NM_024654.3,998-1016).
cttccctgcgttgactatt

SEQ ID NO: 388568 - DNA, 19 bp, Homo sapiens
  siRNA target sequence for FLJ23323 (NM_024654.3,1003-1021).
ctgcgttgactatttggaa

SEQ ID NO: 388569 - DNA, 19 bp, Homo sapiens
  siRNA target sequence for FLJ23323 (NM_024654.3,1056-1074).
gttgcatttctttgcttaa

SEQ ID NO: 388570 - DNA, 19 bp, Homo sapiens
  siRNA target sequence for FLJ23323 (NM_024654.3,1065-1083).
ctttgcttaatattacaga

SEQ ID NO: 388571 - DNA, 19 bp, Homo sapiens
  siRNA target sequence for FLJ23323 (NM_024654.3,1122-1140).
cacagaagatggtatatta

SEQ ID NO: 388572 - DNA, 19 bp, Homo sapiens
  siRNA target sequence for FLJ23323 (NM_024654.3,1133-1151).
gtatattatgggaaacctt

SEQ ID NO: 388573 - DNA, 19 bp, Homo sapiens
  siRNA target sequence for FLJ23323 (NM_024654.3,1196-1214).
gtgttcagcgcttacaaga

SEQ ID NO: 388574 - DNA, 19 bp, Homo sapiens
  siRNA target sequence for FLJ23323 (NM_024654.3,1239-1257).
ctatgggatgggtttcaga

SEQ ID NO: 388575 - DNA, 19 bp, Homo sapiens
  siRNA target sequence for FLJ23323 (NM_024654.3,1263-1281).
ggctcctgcttctcattga

SEQ ID NO: 388576 - DNA, 19 bp, Homo sapiens
  siRNA target sequence for FLJ23323 (NM_024654.3,1351-1369).
ccttaccccgcagtatgta

SEQ ID NO: 388577 - DNA, 19 bp, Homo sapiens
  siRNA target sequence for FLJ23323 (NM_024654.3,1356-1374).
ccccgcagtatgtagatga

SEQ ID NO: 388578 - DNA, 19 bp, Homo sapiens
  siRNA target sequence for FLJ23323 (NM_024654.3,1359-1377).
cgcagtatgtagatgacat

SEQ ID NO: 388579 - DNA, 19 bp, Homo sapiens
  siRNA target sequence for FLJ23323 (NM_024654.3,1373-1391).
gacatggatggcttgtaca

SEQ ID NO: 388580 - DNA, 19 bp, Homo sapiens
  siRNA target sequence for FLJ23323 (NM_024654.3,1383-1401).
gcttgtacacaaaaagcaa

SEQ ID NO: 388581 - DNA, 19 bp, Homo sapiens
  siRNA target sequence for FLJ23323 (NM_024654.3,1411-1429).
gagaaatcgacgtttcaga

SEQ ID NO: 388582 - DNA, 19 bp, Homo sapiens
  siRNA target sequence for FLJ23323 (NM_024654.3,1492-1510).
cactggacataaactgata

SEQ ID NO: 388583 - DNA, 19 bp, Homo sapiens
  siRNA target sequence for FLJ23323 (NM_024654.3,1525-1543).
ctttgcattcagaataact

SEQ ID NO: 388584 - DNA, 19 bp, Homo sapiens
  siRNA target sequence for FLJ23323 (NM_024654.3,1548-1566).
gaaatagagagtcacataa

SEQ ID NO: 388585 - DNA, 19 bp, Homo sapiens
  siRNA target sequence for FLJ23323 (NM_024654.3,1558-1576).
gtcacataacaaaattctt

SEQ ID NO: 388586 - DNA, 19 bp, Homo sapiens
  siRNA target sequence for FLJ23323 (NM_024654.3,1577-1595).
cgagatctgtccatcttga

SEQ ID NO: 388587 - DNA, 19 bp, Homo sapiens
  siRNA target sequence for FLJ23323 (NM_024654.3,1660-1678).
ctatcaggtccctttcaat

SEQ ID NO: 388588 - DNA, 19 bp, Homo sapiens
  siRNA target sequence for FLJ23323 (NM_024654.3,1711-1729).
cgcccctacccatatacta

SEQ ID NO: 388589 - DNA, 19 bp, Homo sapiens
  siRNA target sequence for FLJ23323 (NM_024654.3,1712-1730).
gcccctacccatatactat

SEQ ID NO: 388590 - DNA, 19 bp, Homo sapiens
  siRNA target sequence for FLJ23323 (NM_024654.3,1714-1732).
ccctacccatatactatat

SEQ ID NO: 388591 - DNA, 19 bp, Homo sapiens
  siRNA target sequence for FLJ23323 (NM_024654.3,1746-1764).
gctgggttggtctttgcaa

SEQ ID NO: 388592 - DNA, 19 bp, Homo sapiens
  siRNA target sequence for FLJ23323 (NM_024654.3,1910-1928).
gagctaaggaccgtgaatt

SEQ ID NO: 388593 - DNA, 19 bp, Homo sapiens
  siRNA target sequence for FLJ23323 (NM_024654.3,1912-1930).
gctaaggaccgtgaattgt

SEQ ID NO: 388594 - DNA, 19 bp, Homo sapiens
  siRNA target sequence for FLJ23323 (NM_024654.3,1991-2009).
gggacagtaccttatgtca

SEQ ID NO: 388595 - DNA, 19 bp, Homo sapiens
  siRNA target sequence for FLJ23323 (NM_024654.3,2006-2024).
gtcacaacggattacaatt

SEQ ID NO: 388596 - DNA, 19 bp, Homo sapiens
  siRNA target sequence for FLJ23323 (NM_024654.3,2008-2026).
cacaacggattacaatttt

SEQ ID NO: 388597 - DNA, 19 bp, Homo sapiens
  siRNA target sequence for FLJ23323 (NM_024654.3,2071-2089).
ggaggcacataaagagaaa

SEQ ID NO: 388598 - DNA, 19 bp, Homo sapiens
  siRNA target sequence for FLJ23323 (NM_024654.3,2103-2121).
ctaagttctgtcgaaaaat

SEQ ID NO: 388599 - DNA, 19 bp, Homo sapiens
  siRNA target sequence for ZCWCC2 (NM_024657.2,56-74).
ccatcttgaactattccat

SEQ ID NO: 388600 - DNA, 19 bp, Homo sapiens
  siRNA target sequence for ZCWCC2 (NM_024657.2,57-75).
catcttgaactattccatt

SEQ ID NO: 388601 - DNA, 19 bp, Homo sapiens
  siRNA target sequence for ZCWCC2 (NM_024657.2,72-90).
cattttcaaccgtgaaaat

SEQ ID NO: 388602 - DNA, 19 bp, Homo sapiens
  siRNA target sequence for ZCWCC2 (NM_024657.2,134-152).
ctcgtgttctcatttggaa

SEQ ID NO: 388603 - DNA, 19 bp, Homo sapiens
  siRNA target sequence for ZCWCC2 (NM_024657.2,150-168).
gaacatccgcagaaataaa

SEQ ID NO: 388604 - DNA, 19 bp, Homo sapiens
  siRNA target sequence for ZCWCC2 (NM_024657.2,153-171).
catccgcagaaataaaaat

SEQ ID NO: 388605 - DNA, 19 bp, Homo sapiens
  siRNA target sequence for ZCWCC2 (NM_024657.2,186-204).
ggactttgatacagatcaa

SEQ ID NO: 388606 - DNA, 19 bp, Homo sapiens
  siRNA target sequence for ZCWCC2 (NM_024657.2,193-211).
gatacagatcaatatgaca

SEQ ID NO: 388607 - DNA, 19 bp, Homo sapiens
  siRNA target sequence for ZCWCC2 (NM_024657.2,321-339).
gccacgcatgaaaattttt

SEQ ID NO: 388608 - DNA, 19 bp, Homo sapiens
  siRNA target sequence for ZCWCC2 (NM_024657.2,354-372).
ggtgactacccagatgatt

SEQ ID NO: 388609 - DNA, 19 bp, Homo sapiens
  siRNA target sequence for ZCWCC2 (NM_024657.2,380-398).
gcctggccaatgtagaata

SEQ ID NO: 388610 - DNA, 19 bp, Homo sapiens
  siRNA target sequence for ZCWCC2 (NM_024657.2,381-399).
cctggccaatgtagaatat

SEQ ID NO: 388611 - DNA, 19 bp, Homo sapiens
  siRNA target sequence for ZCWCC2 (NM_024657.2,384-402).
ggccaatgtagaatatgat

SEQ ID NO: 388612 - DNA, 19 bp, Homo sapiens
  siRNA target sequence for ZCWCC2 (NM_024657.2,413-431).
ctaccttcacaaataagca

SEQ ID NO: 388613 - DNA, 19 bp, Homo sapiens
  siRNA target sequence for ZCWCC2 (NM_024657.2,422-440).
caaataagcaggtgagaat

SEQ ID NO: 388614 - DNA, 19 bp, Homo sapiens
  siRNA target sequence for ZCWCC2 (NM_024657.2,448-466).
gggttctcttgcaagaata

SEQ ID NO: 388615 - DNA, 19 bp, Homo sapiens
  siRNA target sequence for ZCWCC2 (NM_024657.2,467-485).
gtaaccagtttggaataat

SEQ ID NO: 388616 - DNA, 19 bp, Homo sapiens
  siRNA target sequence for ZCWCC2 (NM_024657.2,474-492).
gtttggaataatgatgtat

SEQ ID NO: 388617 - DNA, 19 bp, Homo sapiens
  siRNA target sequence for ZCWCC2 (NM_024657.2,479-497).
gaataatgatgtatcataa

SEQ ID NO: 388618 - DNA, 19 bp, Homo sapiens
  siRNA target sequence for ZCWCC2 (NM_024657.2,493-511).
cataacaaccgactcataa

SEQ ID NO: 388619 - DNA, 19 bp, Homo sapiens
  siRNA target sequence for ZCWCC2 (NM_024657.2,498-516).
caaccgactcataaaatct

SEQ ID NO: 388620 - DNA, 19 bp, Homo sapiens
  siRNA target sequence for ZCWCC2 (NM_024657.2,566-584).
gagtaattggagtcattga

SEQ ID NO: 388621 - DNA, 19 bp, Homo sapiens
  siRNA target sequence for ZCWCC2 (NM_024657.2,574-592).
ggagtcattgagtgcaatt

SEQ ID NO: 388622 - DNA, 19 bp, Homo sapiens
  siRNA target sequence for ZCWCC2 (NM_024657.2,575-593).
gagtcattgagtgcaattt

SEQ ID NO: 388623 - DNA, 19 bp, Homo sapiens
  siRNA target sequence for ZCWCC2 (NM_024657.2,579-597).
cattgagtgcaatttccta

SEQ ID NO: 388624 - DNA, 19 bp, Homo sapiens
  siRNA target sequence for ZCWCC2 (NM_024657.2,605-623).
cctacaacaaacaagactt

SEQ ID NO: 388625 - DNA, 19 bp, Homo sapiens
  siRNA target sequence for ZCWCC2 (NM_024657.2,606-624).
ctacaacaaacaagacttt

SEQ ID NO: 388626 - DNA, 19 bp, Homo sapiens
  siRNA target sequence for ZCWCC2 (NM_024657.2,616-634).
caagactttgagtatacca

SEQ ID NO: 388627 - DNA, 19 bp, Homo sapiens
  siRNA target sequence for ZCWCC2 (NM_024657.2,636-654).
ggagtaccggctaacaata

SEQ ID NO: 388628 - DNA, 19 bp, Homo sapiens
  siRNA target sequence for ZCWCC2 (NM_024657.2,637-655).
gagtaccggctaacaataa

SEQ ID NO: 388629 - DNA, 19 bp, Homo sapiens
  siRNA target sequence for ZCWCC2 (NM_024657.2,639-657).
gtaccggctaacaataaat

SEQ ID NO: 388630 - DNA, 19 bp, Homo sapiens
  siRNA target sequence for ZCWCC2 (NM_024657.2,775-793).
gatgagtgtcttaaatgga

SEQ ID NO: 388631 - DNA, 19 bp, Homo sapiens
  siRNA target sequence for ZCWCC2 (NM_024657.2,798-816).
gcttcctgggaagattgat

SEQ ID NO: 388632 - DNA, 19 bp, Homo sapiens
  siRNA target sequence for ZCWCC2 (NM_024657.2,810-828).
gattgatccatccatgtta

SEQ ID NO: 388633 - DNA, 19 bp, Homo sapiens
  siRNA target sequence for ZCWCC2 (NM_024657.2,916-934).
ctgtgcttgagcaaagcta

SEQ ID NO: 388634 - DNA, 19 bp, Homo sapiens
  siRNA target sequence for ZCWCC2 (NM_024657.2,921-939).
cttgagcaaagctaagaaa

SEQ ID NO: 388635 - DNA, 19 bp, Homo sapiens
  siRNA target sequence for ZCWCC2 (NM_024657.2,1039-1057).
gctggattgaataacaaga

SEQ ID NO: 388636 - DNA, 19 bp, Homo sapiens
  siRNA target sequence for ZCWCC2 (NM_024657.2,1042-1060).
ggattgaataacaagacaa

SEQ ID NO: 388637 - DNA, 19 bp, Homo sapiens
  siRNA target sequence for ZCWCC2 (NM_024657.2,1063-1081).
ggatatgagggaattcata

SEQ ID NO: 388638 - DNA, 19 bp, Homo sapiens
  siRNA target sequence for ZCWCC2 (NM_024657.2,1147-1165).
gattccagtgttttacagt

SEQ ID NO: 388639 - DNA, 19 bp, Homo sapiens
  siRNA target sequence for ZCWCC2 (NM_024657.2,1169-1187).
ccagtaagtacaaatggat

SEQ ID NO: 388640 - DNA, 19 bp, Homo sapiens
  siRNA target sequence for ZCWCC2 (NM_024657.2,1198-1216).
gaaccggtggagaaacgaa

SEQ ID NO: 388641 - DNA, 19 bp, Homo sapiens
  siRNA target sequence for ZCWCC2 (NM_024657.2,1233-1251).
gatgacaacaccttctcta

SEQ ID NO: 388642 - DNA, 19 bp, Homo sapiens
  siRNA target sequence for ZCWCC2 (NM_024657.2,1238-1256).
caacaccttctctagatta

SEQ ID NO: 388643 - DNA, 19 bp, Homo sapiens
  siRNA target sequence for ZCWCC2 (NM_024657.2,1374-1392).
cccagaagcaagcaagaat

SEQ ID NO: 388644 - DNA, 19 bp, Homo sapiens
  siRNA target sequence for ZCWCC2 (NM_024657.2,1399-1417).
cagaatagggaggtttcaa

SEQ ID NO: 388645 - DNA, 19 bp, Homo sapiens
  siRNA target sequence for ZCWCC2 (NM_024657.2,1401-1419).
gaatagggaggtttcaatt

SEQ ID NO: 388646 - DNA, 19 bp, Homo sapiens
  siRNA target sequence for ZCWCC2 (NM_024657.2,1406-1424).
gggaggtttcaattctgta

SEQ ID NO: 388647 - DNA, 19 bp, Homo sapiens
  siRNA target sequence for ZCWCC2 (NM_024657.2,1516-1534).
ggtagcacaaccataaaca

SEQ ID NO: 388648 - DNA, 19 bp, Homo sapiens
  siRNA target sequence for ZCWCC2 (NM_024657.2,1517-1535).
gtagcacaaccataaacaa

SEQ ID NO: 388649 - DNA, 19 bp, Homo sapiens
  siRNA target sequence for ZCWCC2 (NM_024657.2,1545-1563).
caacaagggaccttttgta

SEQ ID NO: 388650 - DNA, 19 bp, Homo sapiens
  siRNA target sequence for ZCWCC2 (NM_024657.2,1612-1630).
cagctgatcccttttaaca

SEQ ID NO: 388651 - DNA, 19 bp, Homo sapiens
  siRNA target sequence for ZCWCC2 (NM_024657.2,1614-1632).
gctgatcccttttaacaga

SEQ ID NO: 388652 - DNA, 19 bp, Homo sapiens
  siRNA target sequence for ZCWCC2 (NM_024657.2,1638-1656).
gcttgctgagagacgaaaa

SEQ ID NO: 388653 - DNA, 19 bp, Homo sapiens
  siRNA target sequence for ZCWCC2 (NM_024657.2,1746-1764).
ggagagcgaaggtcataat

SEQ ID NO: 388654 - DNA, 19 bp, Homo sapiens
  siRNA target sequence for ZCWCC2 (NM_024657.2,1747-1765).
gagagcgaaggtcataata

SEQ ID NO: 388655 - DNA, 19 bp, Homo sapiens
  siRNA target sequence for ZCWCC2 (NM_024657.2,1749-1767).
gagcgaaggtcataataca

SEQ ID NO: 388656 - DNA, 19 bp, Homo sapiens
  siRNA target sequence for ZCWCC2 (NM_024657.2,1891-1909).
cactggcagtctgaattca

SEQ ID NO: 388657 - DNA, 19 bp, Homo sapiens
  siRNA target sequence for ZCWCC2 (NM_024657.2,1921-1939).
catgaattggtgatctaca

SEQ ID NO: 388658 - DNA, 19 bp, Homo sapiens
  siRNA target sequence for ZCWCC2 (NM_024657.2,1985-2003).
gttatcgccaagctgaatt

SEQ ID NO: 388659 - DNA, 19 bp, Homo sapiens
  siRNA target sequence for ZCWCC2 (NM_024657.2,2184-2202).
cagctatctccttacttct

SEQ ID NO: 388660 - DNA, 19 bp, Homo sapiens
  siRNA target sequence for ZCWCC2 (NM_024657.2,2232-2250).
cgggtatgactcagaacaa

SEQ ID NO: 388661 - DNA, 19 bp, Homo sapiens
  siRNA target sequence for ZCWCC2 (NM_024657.2,2234-2252).
ggtatgactcagaacaagt

SEQ ID NO: 388662 - DNA, 19 bp, Homo sapiens
  siRNA target sequence for ZCWCC2 (NM_024657.2,2274-2292).
gctggaggcaaatcacata

SEQ ID NO: 388663 - DNA, 19 bp, Homo sapiens
  siRNA target sequence for FLJ11753 (NM_024659.2,411-429).
cccggacatctgctttata

SEQ ID NO: 388664 - DNA, 19 bp, Homo sapiens
  siRNA target sequence for FLJ11753 (NM_024659.2,412-430).
ccggacatctgctttatat

SEQ ID NO: 388665 - DNA, 19 bp, Homo sapiens
  siRNA target sequence for FLJ11753 (NM_024659.2,414-432).
ggacatctgctttatattt

SEQ ID NO: 388666 - DNA, 19 bp, Homo sapiens
  siRNA target sequence for FLJ11753 (NM_024659.2,477-495).
caagttcagtgcttaacct

SEQ ID NO: 388667 - DNA, 19 bp, Homo sapiens
  siRNA target sequence for FLJ11753 (NM_024659.2,554-572).
cacgagaaccagttgatat

SEQ ID NO: 388668 - DNA, 19 bp, Homo sapiens
  siRNA target sequence for FLJ11753 (NM_024659.2,559-577).
gaaccagttgatatatcct

SEQ ID NO: 388669 - DNA, 19 bp, Homo sapiens
  siRNA target sequence for FLJ11753 (NM_024659.2,588-606).
gtcaggagagggatttcca

SEQ ID NO: 388670 - DNA, 19 bp, Homo sapiens
  siRNA target sequence for FLJ11753 (NM_024659.2,590-608).
caggagagggatttccaat

SEQ ID NO: 388671 - DNA, 19 bp, Homo sapiens
  siRNA target sequence for FLJ11753 (NM_024659.2,597-615).
gggatttccaatatggata

SEQ ID NO: 388672 - DNA, 19 bp, Homo sapiens
  siRNA target sequence for FLJ11753 (NM_024659.2,611-629).
ggatacaaccaaattcttt

SEQ ID NO: 388673 - DNA, 19 bp, Homo sapiens
  siRNA target sequence for FLJ11753 (NM_024659.2,641-659).
gctgatgtggttgtattca

SEQ ID NO: 388674 - DNA, 19 bp, Homo sapiens
  siRNA target sequence for FLJ11753 (NM_024659.2,644-662).
gatgtggttgtattcaact

SEQ ID NO: 388675 - DNA, 19 bp, Homo sapiens
  siRNA target sequence for FLJ11753 (NM_024659.2,686-704).
ctcacttccatgggaaaat

SEQ ID NO: 388676 - DNA, 19 bp, Homo sapiens
  siRNA target sequence for FLJ11753 (NM_024659.2,688-706).
cacttccatgggaaaattt

SEQ ID NO: 388677 - DNA, 19 bp, Homo sapiens
  siRNA target sequence for FLJ11753 (NM_024659.2,756-774).
gacccaagtgccaagttat

SEQ ID NO: 388678 - DNA, 19 bp, Homo sapiens
  siRNA target sequence for FLJ11753 (NM_024659.2,758-776).
cccaagtgccaagttattt

SEQ ID NO: 388679 - DNA, 19 bp, Homo sapiens
  siRNA target sequence for FLJ11753 (NM_024659.2,759-777).
ccaagtgccaagttattta

SEQ ID NO: 388680 - DNA, 19 bp, Homo sapiens
  siRNA target sequence for FLJ11753 (NM_024659.2,841-859).
gaagatgctcggccttaaa

SEQ ID NO: 388681 - DNA, 19 bp, Homo sapiens
  siRNA target sequence for FLJ11753 (NM_024659.2,844-862).
gatgctcggccttaaagga

SEQ ID NO: 388682 - DNA, 19 bp, Homo sapiens
  siRNA target sequence for FLJ11753 (NM_024659.2,901-919).
gccagagcagagagattca

SEQ ID NO: 388683 - DNA, 19 bp, Homo sapiens
  siRNA target sequence for FLJ11753 (NM_024659.2,912-930).
gagattcagaggatttatt

SEQ ID NO: 388684 - DNA, 19 bp, Homo sapiens
  siRNA target sequence for FLJ11753 (NM_024659.2,914-932).
gattcagaggatttattga

SEQ ID NO: 388685 - DNA, 19 bp, Homo sapiens
  siRNA target sequence for FLJ11753 (NM_024659.2,971-989).
gatactgcacgacaagaat

SEQ ID NO: 388686 - DNA, 19 bp, Homo sapiens
  siRNA target sequence for FLJ11753 (NM_024659.2,975-993).
ctgcacgacaagaatattt

SEQ ID NO: 388687 - DNA, 19 bp, Homo sapiens
  siRNA target sequence for FLJ11753 (NM_024659.2,1053-1071).
gctctcatcatggtgaaaa

SEQ ID NO: 388688 - DNA, 19 bp, Homo sapiens
  siRNA target sequence for FLJ11753 (NM_024659.2,1056-1074).
ctcatcatggtgaaaataa

SEQ ID NO: 388689 - DNA, 19 bp, Homo sapiens
  siRNA target sequence for FLJ11753 (NM_024659.2,1126-1144).
gcaaagactgctacacatt

SEQ ID NO: 388690 - DNA, 19 bp, Homo sapiens
  siRNA target sequence for FLJ11753 (NM_024659.2,1189-1207).
cccactttgtcctaaagat

SEQ ID NO: 388691 - DNA, 19 bp, Homo sapiens
  siRNA target sequence for FLJ11753 (NM_024659.2,1210-1228).
ggtttatcccgaaatattt

SEQ ID NO: 388692 - DNA, 19 bp, Homo sapiens
  siRNA target sequence for FLJ11753 (NM_024659.2,1232-1250).
gctgaatatctgtattcta

SEQ ID NO: 388693 - DNA, 19 bp, Homo sapiens
  siRNA target sequence for FLJ11753 (NM_024659.2,1287-1305).
gcaagagaccagatattat

SEQ ID NO: 388694 - DNA, 19 bp, Homo sapiens
  siRNA target sequence for FLJ11753 (NM_024659.2,1347-1365).
gggcagccctacatggtaa

SEQ ID NO: 388695 - DNA, 19 bp, Homo sapiens
  siRNA target sequence for FLJ11753 (NM_024659.2,1349-1367).
gcagccctacatggtaaat

SEQ ID NO: 388696 - DNA, 19 bp, Homo sapiens
  siRNA target sequence for FLJ11753 (NM_024659.2,1350-1368).
cagccctacatggtaaatt

SEQ ID NO: 388697 - DNA, 19 bp, Homo sapiens
  siRNA target sequence for FLJ11753 (NM_024659.2,1352-1370).
gccctacatggtaaattca

SEQ ID NO: 388698 - DNA, 19 bp, Homo sapiens
  siRNA target sequence for FLJ11753 (NM_024659.2,1372-1390).
gtctctgcttacaacagaa

SEQ ID NO: 388699 - DNA, 19 bp, Homo sapiens
  siRNA target sequence for FLJ22573 (NM_024660.1,247-265).
ccctgcccggactatgagt

SEQ ID NO: 388700 - DNA, 19 bp, Homo sapiens
  siRNA target sequence for FLJ22573 (NM_024660.1,248-266).
cctgcccggactatgagtt

SEQ ID NO: 388701 - DNA, 19 bp, Homo sapiens
  siRNA target sequence for FLJ22573 (NM_024660.1,270-288).
ggaaaactgcggactcaat

SEQ ID NO: 388702 - DNA, 19 bp, Homo sapiens
  siRNA target sequence for FLJ22573 (NM_024660.1,289-307).
gaccacggcgatttcgtaa

SEQ ID NO: 388703 - DNA, 19 bp, Homo sapiens
  siRNA target sequence for FLJ22573 (NM_024660.1,313-331).
ccgttccgaaagtgttctt

SEQ ID NO: 388704 - DNA, 19 bp, Homo sapiens
  siRNA target sequence for FLJ22573 (NM_024660.1,315-333).
gttccgaaagtgttcttct

SEQ ID NO: 388705 - DNA, 19 bp, Homo sapiens
  siRNA target sequence for FLJ22573 (NM_024660.1,786-804).
gaaggaggcctcactactt

SEQ ID NO: 388706 - DNA, 19 bp, Homo sapiens
  siRNA target sequence for FLJ22573 (NM_024660.1,947-965).
gacacctggccgcaagata

SEQ ID NO: 388707 - DNA, 19 bp, Homo sapiens
  siRNA target sequence for FLJ22573 (NM_024660.1,1022-1040).
cgctgcgggctctgattga

SEQ ID NO: 388708 - DNA, 19 bp, Homo sapiens
  siRNA target sequence for FLJ12436 (NM_024661.2,262-280).
gacttggtgggacagatat

SEQ ID NO: 388709 - DNA, 19 bp, Homo sapiens
  siRNA target sequence for FLJ12436 (NM_024661.2,270-288).
gggacagatatgaagagtt

SEQ ID NO: 388710 - DNA, 19 bp, Homo sapiens
  siRNA target sequence for FLJ12436 (NM_024661.2,271-289).
ggacagatatgaagagttt

SEQ ID NO: 388711 - DNA, 19 bp, Homo sapiens
  siRNA target sequence for FLJ12436 (NM_024661.2,671-689).
gctggctccacctatgtga

SEQ ID NO: 388712 - DNA, 19 bp, Homo sapiens
  siRNA target sequence for FLJ12436 (NM_024661.2,672-690).
ctggctccacctatgtgaa

SEQ ID NO: 388713 - DNA, 19 bp, Homo sapiens
  siRNA target sequence for FLJ12436 (NM_024661.2,955-973).
gcaagtccattcatgtcta

SEQ ID NO: 388714 - DNA, 19 bp, Homo sapiens
  siRNA target sequence for FLJ12436 (NM_024661.2,989-1007).
cagcttgatggcctagaaa

SEQ ID NO: 388715 - DNA, 19 bp, Homo sapiens
  siRNA target sequence for FLJ12436 (NM_024661.2,992-1010).
cttgatggcctagaaaaga

SEQ ID NO: 388716 - DNA, 19 bp, Homo sapiens
  siRNA target sequence for FLJ12436 (NM_024661.2,995-1013).
gatggcctagaaaagactt

SEQ ID NO: 388717 - DNA, 19 bp, Homo sapiens
  siRNA target sequence for FLJ12436 (NM_024661.2,998-1016).
ggcctagaaaagacttgta

SEQ ID NO: 388718 - DNA, 19 bp, Homo sapiens
  siRNA target sequence for FLJ12436 (NM_024661.2,1028-1046).
ggggtggttcagcttgtaa

SEQ ID NO: 388719 - DNA, 19 bp, Homo sapiens
  siRNA target sequence for FLJ12436 (NM_024661.2,1033-1051).
ggttcagcttgtaaagtct

SEQ ID NO: 388720 - DNA, 19 bp, Homo sapiens
  siRNA target sequence for FLJ12436 (NM_024661.2,1141-1159).
cacggagcagagactagaa

SEQ ID NO: 388721 - DNA, 19 bp, Homo sapiens
  siRNA target sequence for FLJ12436 (NM_024661.2,1152-1170).
gactagaagcccaagtcaa

SEQ ID NO: 388722 - DNA, 19 bp, Homo sapiens
  siRNA target sequence for FLJ12436 (NM_024661.2,1227-1245).
ctgtgctctacatgctatt

SEQ ID NO: 388723 - DNA, 19 bp, Homo sapiens
  siRNA target sequence for FLJ12436 (NM_024661.2,1229-1247).
gtgctctacatgctattca

SEQ ID NO: 388724 - DNA, 19 bp, Homo sapiens
  siRNA target sequence for FLJ11838 (NM_024664.1,57-75).
cgcgctgggctgaggttat

SEQ ID NO: 388725 - DNA, 19 bp, Homo sapiens
  siRNA target sequence for FLJ11838 (NM_024664.1,237-255).
gctacggggtcctgttctt

SEQ ID NO: 388726 - DNA, 19 bp, Homo sapiens
  siRNA target sequence for FLJ11838 (NM_024664.1,241-259).
cggggtcctgttcttgtat

SEQ ID NO: 388727 - DNA, 19 bp, Homo sapiens
  siRNA target sequence for FLJ11838 (NM_024664.1,456-474).
ccactttggcggactattt

SEQ ID NO: 388728 - DNA, 19 bp, Homo sapiens
  siRNA target sequence for FLJ11838 (NM_024664.1,465-483).
cggactatttgcatctgtt

SEQ ID NO: 388729 - DNA, 19 bp, Homo sapiens
  siRNA target sequence for FLJ11838 (NM_024664.1,519-537).
cttctgcgatgttttacct

SEQ ID NO: 388730 - DNA, 19 bp, Homo sapiens
  siRNA target sequence for FLJ11838 (NM_024664.1,540-558).
ctgcggctgtgtcagattt

SEQ ID NO: 388731 - DNA, 19 bp, Homo sapiens
  siRNA target sequence for FLJ11838 (NM_024664.1,542-560).
gcggctgtgtcagatttct

SEQ ID NO: 388732 - DNA, 19 bp, Homo sapiens
  siRNA target sequence for FLJ11838 (NM_024664.1,543-561).
cggctgtgtcagatttcta

SEQ ID NO: 388733 - DNA, 19 bp, Homo sapiens
  siRNA target sequence for FLJ11838 (NM_024664.1,609-627).
gcccactgcagataacaat

SEQ ID NO: 388734 - DNA, 19 bp, Homo sapiens
  siRNA target sequence for IRA1 (NM_024665.2,245-263).
gaggtcaacttcttggtat

SEQ ID NO: 388735 - DNA, 19 bp, Homo sapiens
  siRNA target sequence for IRA1 (NM_024665.2,311-329).
ggtatagaaagccatatca

SEQ ID NO: 388736 - DNA, 19 bp, Homo sapiens
  siRNA target sequence for IRA1 (NM_024665.2,358-376).
cccacccgctgcattgatt

SEQ ID NO: 388737 - DNA, 19 bp, Homo sapiens
  siRNA target sequence for IRA1 (NM_024665.2,359-377).
ccacccgctgcattgattt

SEQ ID NO: 388738 - DNA, 19 bp, Homo sapiens
  siRNA target sequence for IRA1 (NM_024665.2,362-380).
cccgctgcattgatttcta

SEQ ID NO: 388739 - DNA, 19 bp, Homo sapiens
  siRNA target sequence for IRA1 (NM_024665.2,363-381).
ccgctgcattgatttctat

SEQ ID NO: 388740 - DNA, 19 bp, Homo sapiens
  siRNA target sequence for IRA1 (NM_024665.2,365-383).
gctgcattgatttctatca

SEQ ID NO: 388741 - DNA, 19 bp, Homo sapiens
  siRNA target sequence for IRA1 (NM_024665.2,442-460).
gtttgatggtcgaccaata

SEQ ID NO: 388742 - DNA, 19 bp, Homo sapiens
  siRNA target sequence for IRA1 (NM_024665.2,483-501).
ccgtaatgcctgatgtagt

SEQ ID NO: 388743 - DNA, 19 bp, Homo sapiens
  siRNA target sequence for IRA1 (NM_024665.2,490-508).
gcctgatgtagtacaaaca

SEQ ID NO: 388744 - DNA, 19 bp, Homo sapiens
  siRNA target sequence for IRA1 (NM_024665.2,491-509).
cctgatgtagtacaaacaa

SEQ ID NO: 388745 - DNA, 19 bp, Homo sapiens
  siRNA target sequence for IRA1 (NM_024665.2,635-653).
ggagcacatactatagcaa

SEQ ID NO: 388746 - DNA, 19 bp, Homo sapiens
  siRNA target sequence for IRA1 (NM_024665.2,638-656).
gcacatactatagcaaata

SEQ ID NO: 388747 - DNA, 19 bp, Homo sapiens
  siRNA target sequence for IRA1 (NM_024665.2,803-821).
gcaagaatatggaatctta

SEQ ID NO: 388748 - DNA, 19 bp, Homo sapiens
  siRNA target sequence for IRA1 (NM_024665.2,835-853).
cagtggctctacacagtta

SEQ ID NO: 388749 - DNA, 19 bp, Homo sapiens
  siRNA target sequence for IRA1 (NM_024665.2,840-858).
gctctacacagttagtact

SEQ ID NO: 388750 - DNA, 19 bp, Homo sapiens
  siRNA target sequence for IRA1 (NM_024665.2,841-859).
ctctacacagttagtactt

SEQ ID NO: 388751 - DNA, 19 bp, Homo sapiens
  siRNA target sequence for IRA1 (NM_024665.2,848-866).
cagttagtacttagacatt

SEQ ID NO: 388752 - DNA, 19 bp, Homo sapiens
  siRNA target sequence for IRA1 (NM_024665.2,904-922).
ggatgtcacatctctagat

SEQ ID NO: 388753 - DNA, 19 bp, Homo sapiens
  siRNA target sequence for IRA1 (NM_024665.2,905-923).
gatgtcacatctctagatt

SEQ ID NO: 388754 - DNA, 19 bp, Homo sapiens
  siRNA target sequence for IRA1 (NM_024665.2,910-928).
cacatctctagattggaat

SEQ ID NO: 388755 - DNA, 19 bp, Homo sapiens
  siRNA target sequence for IRA1 (NM_024665.2,915-933).
ctctagattggaatagtga

SEQ ID NO: 388756 - DNA, 19 bp, Homo sapiens
  siRNA target sequence for IRA1 (NM_024665.2,925-943).
gaatagtgaaggtacactt

SEQ ID NO: 388757 - DNA, 19 bp, Homo sapiens
  siRNA target sequence for IRA1 (NM_024665.2,962-980).
gatgggtttgccagaatat

SEQ ID NO: 388758 - DNA, 19 bp, Homo sapiens
  siRNA target sequence for IRA1 (NM_024665.2,1016-1034).
cagcataaaggccctatat

SEQ ID NO: 388759 - DNA, 19 bp, Homo sapiens
  siRNA target sequence for IRA1 (NM_024665.2,1018-1036).
gcataaaggccctatattt

SEQ ID NO: 388760 - DNA, 19 bp, Homo sapiens
  siRNA target sequence for IRA1 (NM_024665.2,1025-1043).
ggccctatatttgcattaa

SEQ ID NO: 388761 - DNA, 19 bp, Homo sapiens
  siRNA target sequence for IRA1 (NM_024665.2,1080-1098).
gagtagacaagactacaat

SEQ ID NO: 388762 - DNA, 19 bp, Homo sapiens
  siRNA target sequence for IRA1 (NM_024665.2,1119-1137).
gtgaagccaagcaacagtt

SEQ ID NO: 388763 - DNA, 19 bp, Homo sapiens
  siRNA target sequence for IRA1 (NM_024665.2,1186-1204).
cacctttgcttcttgtagt

SEQ ID NO: 388764 - DNA, 19 bp, Homo sapiens
  siRNA target sequence for IRA1 (NM_024665.2,1235-1253).
ggacaagacagacctatta

SEQ ID NO: 388765 - DNA, 19 bp, Homo sapiens
  siRNA target sequence for IRA1 (NM_024665.2,1236-1254).
gacaagacagacctattaa

SEQ ID NO: 388766 - DNA, 19 bp, Homo sapiens
  siRNA target sequence for IRA1 (NM_024665.2,1261-1279).
ccaaggacatacgaatgaa

SEQ ID NO: 388767 - DNA, 19 bp, Homo sapiens
  siRNA target sequence for IRA1 (NM_024665.2,1265-1283).
ggacatacgaatgaagtaa

SEQ ID NO: 388768 - DNA, 19 bp, Homo sapiens
  siRNA target sequence for IRA1 (NM_024665.2,1266-1284).
gacatacgaatgaagtaaa

SEQ ID NO: 388769 - DNA, 19 bp, Homo sapiens
  siRNA target sequence for IRA1 (NM_024665.2,1298-1316).
gacccaactggcaatctct

SEQ ID NO: 388770 - DNA, 19 bp, Homo sapiens
  siRNA target sequence for IRA1 (NM_024665.2,1331-1349).
gacgacatgactttaaaga

SEQ ID NO: 388771 - DNA, 19 bp, Homo sapiens
  siRNA target sequence for IRA1 (NM_024665.2,1348-1366).
gatatggagtatgaaacaa

SEQ ID NO: 388772 - DNA, 19 bp, Homo sapiens
  siRNA target sequence for IRA1 (NM_024665.2,1367-1385).
gacaattgtgtccatgatt

SEQ ID NO: 388773 - DNA, 19 bp, Homo sapiens
  siRNA target sequence for IRA1 (NM_024665.2,1382-1400).
gatttgcaagcacataata

SEQ ID NO: 388774 - DNA, 19 bp, Homo sapiens
  siRNA target sequence for IRA1 (NM_024665.2,1431-1449).
caggaccagggactaataa

SEQ ID NO: 388775 - DNA, 19 bp, Homo sapiens
  siRNA target sequence for IRA1 (NM_024665.2,1436-1454).
ccagggactaataatccaa

SEQ ID NO: 388776 - DNA, 19 bp, Homo sapiens
  siRNA target sequence for IRA1 (NM_024665.2,1437-1455).
cagggactaataatccaaa

SEQ ID NO: 388777 - DNA, 19 bp, Homo sapiens
  siRNA target sequence for IRA1 (NM_024665.2,1452-1470).
caaatgccaaccttatgtt

SEQ ID NO: 388778 - DNA, 19 bp, Homo sapiens
  siRNA target sequence for IRA1 (NM_024665.2,1457-1475).
gccaaccttatgttagcaa

SEQ ID NO: 388779 - DNA, 19 bp, Homo sapiens
  siRNA target sequence for IRA1 (NM_024665.2,1468-1486).
gttagcaagtgcatccttt

SEQ ID NO: 388780 - DNA, 19 bp, Homo sapiens
  siRNA target sequence for IRA1 (NM_024665.2,1511-1529).
gtagaccgagggatatgca

SEQ ID NO: 388781 - DNA, 19 bp, Homo sapiens
  siRNA target sequence for IRA1 (NM_024665.2,1517-1535).
cgagggatatgcatccata

SEQ ID NO: 388782 - DNA, 19 bp, Homo sapiens
  siRNA target sequence for IRA1 (NM_024665.2,1528-1546).
catccataccttgacaaaa

SEQ ID NO: 388783 - DNA, 19 bp, Homo sapiens
  siRNA target sequence for IRA1 (NM_024665.2,1605-1623).
gttcttttgacaaatgtgt

SEQ ID NO: 388784 - DNA, 19 bp, Homo sapiens
  siRNA target sequence for IRA1 (NM_024665.2,1669-1687).
gggaacaggtggaatattt

SEQ ID NO: 388785 - DNA, 19 bp, Homo sapiens
  siRNA target sequence for IRA1 (NM_024665.2,1671-1689).
gaacaggtggaatatttga

SEQ ID NO: 388786 - DNA, 19 bp, Homo sapiens
  siRNA target sequence for FLJ11506 (NM_024666.2,28-46).
gtaccctgtgcgttagtca

SEQ ID NO: 388787 - DNA, 19 bp, Homo sapiens
  siRNA target sequence for FLJ11506 (NM_024666.2,152-170).
cctggaccattgataataa

SEQ ID NO: 388788 - DNA, 19 bp, Homo sapiens
  siRNA target sequence for FLJ11506 (NM_024666.2,153-171).
ctggaccattgataataaa

SEQ ID NO: 388789 - DNA, 19 bp, Homo sapiens
  siRNA target sequence for FLJ11506 (NM_024666.2,197-215).
gtgtggtgccaaacaaatt

SEQ ID NO: 388790 - DNA, 19 bp, Homo sapiens
  siRNA target sequence for FLJ11506 (NM_024666.2,201-219).
ggtgccaaacaaatttctt

SEQ ID NO: 388791 - DNA, 19 bp, Homo sapiens
  siRNA target sequence for FLJ11506 (NM_024666.2,204-222).
gccaaacaaatttcttgtt

SEQ ID NO: 388792 - DNA, 19 bp, Homo sapiens
  siRNA target sequence for FLJ11506 (NM_024666.2,247-265).
caagcatttgtggtttact

SEQ ID NO: 388793 - DNA, 19 bp, Homo sapiens
  siRNA target sequence for FLJ11506 (NM_024666.2,310-328).
cttccactggcaaaagcat

SEQ ID NO: 388794 - DNA, 19 bp, Homo sapiens
  siRNA target sequence for FLJ11506 (NM_024666.2,329-347).
ggttacctgaggtgatgat

SEQ ID NO: 388795 - DNA, 19 bp, Homo sapiens
  siRNA target sequence for FLJ11506 (NM_024666.2,357-375).
cgatagagtgtctgaagat

SEQ ID NO: 388796 - DNA, 19 bp, Homo sapiens
  siRNA target sequence for FLJ11506 (NM_024666.2,519-537).
caatgtgtggtccaatgta

SEQ ID NO: 388797 - DNA, 19 bp, Homo sapiens
  siRNA target sequence for FLJ11506 (NM_024666.2,530-548).
ccaatgtagtgatgaagaa

SEQ ID NO: 388798 - DNA, 19 bp, Homo sapiens
  siRNA target sequence for FLJ11506 (NM_024666.2,682-700).
cggggtggtgcatctaaca

SEQ ID NO: 388799 - DNA, 19 bp, Homo sapiens
  siRNA target sequence for FLJ11506 (NM_024666.2,684-702).
gggtggtgcatctaacaca

SEQ ID NO: 388800 - DNA, 19 bp, Homo sapiens
  siRNA target sequence for FLJ11506 (NM_024666.2,685-703).
ggtggtgcatctaacacaa

SEQ ID NO: 388801 - DNA, 19 bp, Homo sapiens
  siRNA target sequence for FLJ11506 (NM_024666.2,928-946).
gaaattgaaggcctttcat

SEQ ID NO: 388802 - DNA, 19 bp, Homo sapiens
  siRNA target sequence for FLJ12750 (NM_024667.1,314-332).
gcacgcttgacccagaaat

SEQ ID NO: 388803 - DNA, 19 bp, Homo sapiens
  siRNA target sequence for FLJ12750 (NM_024667.1,315-333).
cacgcttgacccagaaata

SEQ ID NO: 388804 - DNA, 19 bp, Homo sapiens
  siRNA target sequence for FLJ12750 (NM_024667.1,350-368).
ctctttgaagcctatcaga

SEQ ID NO: 388805 - DNA, 19 bp, Homo sapiens
  siRNA target sequence for FLJ12750 (NM_024667.1,415-433).
gaccctgttagcacttctt

SEQ ID NO: 388806 - DNA, 19 bp, Homo sapiens
  siRNA target sequence for FLJ12750 (NM_024667.1,504-522).
ctctggattccttcattga

SEQ ID NO: 388807 - DNA, 19 bp, Homo sapiens
  siRNA target sequence for FLJ12750 (NM_024667.1,757-775).
cttagccaccccgtttact

SEQ ID NO: 388808 - DNA, 19 bp, Homo sapiens
  siRNA target sequence for FLJ12750 (NM_024667.1,799-817).
cgtgccgtacccaggatta

SEQ ID NO: 388809 - DNA, 19 bp, Homo sapiens
  siRNA target sequence for FLJ12750 (NM_024667.1,803-821).
ccgtacccaggattacagt

SEQ ID NO: 388810 - DNA, 19 bp, Homo sapiens
  siRNA target sequence for FLJ11795 (NM_024669.1,238-256).
gtgctcaaccaaatattct

SEQ ID NO: 388811 - DNA, 19 bp, Homo sapiens
  siRNA target sequence for FLJ11795 (NM_024669.1,300-318).
cagcagggaccgatacaga

SEQ ID NO: 388812 - DNA, 19 bp, Homo sapiens
  siRNA target sequence for FLJ11795 (NM_024669.1,374-392).
gtaccaactgccaagaaca

SEQ ID NO: 388813 - DNA, 19 bp, Homo sapiens
  siRNA target sequence for FLJ11795 (NM_024669.1,529-547).
ctgggcaataacttcctaa

SEQ ID NO: 388814 - DNA, 19 bp, Homo sapiens
  siRNA target sequence for FLJ11795 (NM_024669.1,603-621).
ggcccagcgatctcagaaa

SEQ ID NO: 388815 - DNA, 19 bp, Homo sapiens
  siRNA target sequence for FLJ11795 (NM_024669.1,623-641).
gtcgaagtgagcaggattt

SEQ ID NO: 388816 - DNA, 19 bp, Homo sapiens
  siRNA target sequence for FLJ11795 (NM_024669.1,656-674).
ctggctgccagatgttact

SEQ ID NO: 388817 - DNA, 19 bp, Homo sapiens
  siRNA target sequence for FLJ11795 (NM_024669.1,659-677).
gctgccagatgttactaga

SEQ ID NO: 388818 - DNA, 19 bp, Homo sapiens
  siRNA target sequence for FLJ11795 (NM_024669.1,662-680).
gccagatgttactagataa

SEQ ID NO: 388819 - DNA, 19 bp, Homo sapiens
  siRNA target sequence for FLJ11795 (NM_024669.1,686-704).
ggaagagtgattctaatca

SEQ ID NO: 388820 - DNA, 19 bp, Homo sapiens
  siRNA target sequence for FLJ11795 (NM_024669.1,692-710).
gtgattctaatcaggtatt

SEQ ID NO: 388821 - DNA, 19 bp, Homo sapiens
  siRNA target sequence for FLJ11795 (NM_024669.1,694-712).
gattctaatcaggtatttt

SEQ ID NO: 388822 - DNA, 19 bp, Homo sapiens
  siRNA target sequence for FLJ11795 (NM_024669.1,811-829).
cgccatctacataatccat

SEQ ID NO: 388823 - DNA, 19 bp, Homo sapiens
  siRNA target sequence for FLJ11795 (NM_024669.1,827-845).
catcatcaggacaaaattt

SEQ ID NO: 388824 - DNA, 19 bp, Homo sapiens
  siRNA target sequence for FLJ11795 (NM_024669.1,849-867).
gcatctttccccaaacaga

SEQ ID NO: 388825 - DNA, 19 bp, Homo sapiens
  siRNA target sequence for FLJ11795 (NM_024669.1,908-926).
ctcccctaccagatcaaaa

SEQ ID NO: 388826 - DNA, 19 bp, Homo sapiens
  siRNA target sequence for FLJ11795 (NM_024669.1,910-928).
cccctaccagatcaaaaat

SEQ ID NO: 388827 - DNA, 19 bp, Homo sapiens
  siRNA target sequence for FLJ11795 (NM_024669.1,911-929).
ccctaccagatcaaaaatt

SEQ ID NO: 388828 - DNA, 19 bp, Homo sapiens
  siRNA target sequence for THAP9 (NM_024672.2,119-137).
ctccttccaccaatttcca

SEQ ID NO: 388829 - DNA, 19 bp, Homo sapiens
  siRNA target sequence for THAP9 (NM_024672.2,125-143).
ccaccaatttccaactgat

SEQ ID NO: 388830 - DNA, 19 bp, Homo sapiens
  siRNA target sequence for THAP9 (NM_024672.2,164-182).
gatcagggctgttaatcgt

SEQ ID NO: 388831 - DNA, 19 bp, Homo sapiens
  siRNA target sequence for THAP9 (NM_024672.2,214-232).
caggaccaggtgctatact

SEQ ID NO: 388832 - DNA, 19 bp, Homo sapiens
  siRNA target sequence for THAP9 (NM_024672.2,216-234).
ggaccaggtgctatactgt

SEQ ID NO: 388833 - DNA, 19 bp, Homo sapiens
  siRNA target sequence for THAP9 (NM_024672.2,266-284).
gtcatatggcataagaaga

SEQ ID NO: 388834 - DNA, 19 bp, Homo sapiens
  siRNA target sequence for THAP9 (NM_024672.2,268-286).
catatggcataagaagaaa

SEQ ID NO: 388835 - DNA, 19 bp, Homo sapiens
  siRNA target sequence for THAP9 (NM_024672.2,307-325).
cttctgtttctctatacaa

SEQ ID NO: 388836 - DNA, 19 bp, Homo sapiens
  siRNA target sequence for THAP9 (NM_024672.2,310-328).
ctgtttctctatacaagat

SEQ ID NO: 388837 - DNA, 19 bp, Homo sapiens
  siRNA target sequence for THAP9 (NM_024672.2,326-344).
gattcctcaaggtgtacat

SEQ ID NO: 388838 - DNA, 19 bp, Homo sapiens
  siRNA target sequence for THAP9 (NM_024672.2,336-354).
ggtgtacatcttaaaggta

SEQ ID NO: 388839 - DNA, 19 bp, Homo sapiens
  siRNA target sequence for THAP9 (NM_024672.2,378-396).
caacctcttccagacaatt

SEQ ID NO: 388840 - DNA, 19 bp, Homo sapiens
  siRNA target sequence for THAP9 (NM_024672.2,409-427).
ctactgaggaccataacta

SEQ ID NO: 388841 - DNA, 19 bp, Homo sapiens
  siRNA target sequence for THAP9 (NM_024672.2,414-432).
gaggaccataactatagtt

SEQ ID NO: 388842 - DNA, 19 bp, Homo sapiens
  siRNA target sequence for THAP9 (NM_024672.2,416-434).
ggaccataactatagttta

SEQ ID NO: 388843 - DNA, 19 bp, Homo sapiens
  siRNA target sequence for THAP9 (NM_024672.2,473-491).
ggtgcaacaaatgttacaa

SEQ ID NO: 388844 - DNA, 19 bp, Homo sapiens
  siRNA target sequence for THAP9 (NM_024672.2,505-523).
gacttatctccgtaaagaa

SEQ ID NO: 388845 - DNA, 19 bp, Homo sapiens
  siRNA target sequence for THAP9 (NM_024672.2,507-525).
cttatctccgtaaagaact

SEQ ID NO: 388846 - DNA, 19 bp, Homo sapiens
  siRNA target sequence for THAP9 (NM_024672.2,542-560).
gagaaagggtttacgatta

SEQ ID NO: 388847 - DNA, 19 bp, Homo sapiens
  siRNA target sequence for THAP9 (NM_024672.2,544-562).
gaaagggtttacgattaat

SEQ ID NO: 388848 - DNA, 19 bp, Homo sapiens
  siRNA target sequence for THAP9 (NM_024672.2,607-625).
gtctgctacgagctcaatt

SEQ ID NO: 388849 - DNA, 19 bp, Homo sapiens
  siRNA target sequence for THAP9 (NM_024672.2,630-648).
gattttaagtgggagttat

SEQ ID NO: 388850 - DNA, 19 bp, Homo sapiens
  siRNA target sequence for THAP9 (NM_024672.2,669-687).
gagtactccgcagaaatga

SEQ ID NO: 388851 - DNA, 19 bp, Homo sapiens
  siRNA target sequence for THAP9 (NM_024672.2,671-689).
gtactccgcagaaatgaaa

SEQ ID NO: 388852 - DNA, 19 bp, Homo sapiens
  siRNA target sequence for THAP9 (NM_024672.2,707-725).
ctacttgtgcagtagcaaa

SEQ ID NO: 388853 - DNA, 19 bp, Homo sapiens
  siRNA target sequence for THAP9 (NM_024672.2,713-731).
gtgcagtagcaaagtctat

SEQ ID NO: 388854 - DNA, 19 bp, Homo sapiens
  siRNA target sequence for THAP9 (NM_024672.2,715-733).
gcagtagcaaagtctatga

SEQ ID NO: 388855 - DNA, 19 bp, Homo sapiens
  siRNA target sequence for THAP9 (NM_024672.2,716-734).
cagtagcaaagtctatgat

SEQ ID NO: 388856 - DNA, 19 bp, Homo sapiens
  siRNA target sequence for THAP9 (NM_024672.2,776-794).
cagaacgtggttatccaaa

SEQ ID NO: 388857 - DNA, 19 bp, Homo sapiens
  siRNA target sequence for THAP9 (NM_024672.2,858-876).
ggagatcagctctatcaat

SEQ ID NO: 388858 - DNA, 19 bp, Homo sapiens
  siRNA target sequence for THAP9 (NM_024672.2,859-877).
gagatcagctctatcaata

SEQ ID NO: 388859 - DNA, 19 bp, Homo sapiens
  siRNA target sequence for THAP9 (NM_024672.2,861-879).
gatcagctctatcaatact

SEQ ID NO: 388860 - DNA, 19 bp, Homo sapiens
  siRNA target sequence for THAP9 (NM_024672.2,864-882).
cagctctatcaatactgtt

SEQ ID NO: 388861 - DNA, 19 bp, Homo sapiens
  siRNA target sequence for THAP9 (NM_024672.2,867-885).
ctctatcaatactgttcat

SEQ ID NO: 388862 - DNA, 19 bp, Homo sapiens
  siRNA target sequence for THAP9 (NM_024672.2,873-891).
caatactgttcattgttaa

SEQ ID NO: 388863 - DNA, 19 bp, Homo sapiens
  siRNA target sequence for THAP9 (NM_024672.2,1049-1067).
gagaacacctcttggttat

SEQ ID NO: 388864 - DNA, 19 bp, Homo sapiens
  siRNA target sequence for THAP9 (NM_024672.2,1051-1069).
gaacacctcttggttattt

SEQ ID NO: 388865 - DNA, 19 bp, Homo sapiens
  siRNA target sequence for THAP9 (NM_024672.2,1106-1124).
gctgcttcgtctgactatt

SEQ ID NO: 388866 - DNA, 19 bp, Homo sapiens
  siRNA target sequence for THAP9 (NM_024672.2,1110-1128).
cttcgtctgactattggta

SEQ ID NO: 388867 - DNA, 19 bp, Homo sapiens
  siRNA target sequence for THAP9 (NM_024672.2,1114-1132).
gtctgactattggtaaact

SEQ ID NO: 388868 - DNA, 19 bp, Homo sapiens
  siRNA target sequence for THAP9 (NM_024672.2,1177-1195).
cagcacatagtgttcagat

SEQ ID NO: 388869 - DNA, 19 bp, Homo sapiens
  siRNA target sequence for THAP9 (NM_024672.2,1204-1222).
cattggggatacatattga

SEQ ID NO: 388870 - DNA, 19 bp, Homo sapiens
  siRNA target sequence for THAP9 (NM_024672.2,1221-1239).
gatggagacgacatgaaat

SEQ ID NO: 388871 - DNA, 19 bp, Homo sapiens
  siRNA target sequence for THAP9 (NM_024672.2,1224-1242).
ggagacgacatgaaatgta

SEQ ID NO: 388872 - DNA, 19 bp, Homo sapiens
  siRNA target sequence for THAP9 (NM_024672.2,1227-1245).
gacgacatgaaatgtacat

SEQ ID NO: 388873 - DNA, 19 bp, Homo sapiens
  siRNA target sequence for THAP9 (NM_024672.2,1250-1268).
gcatccttcatcttctagt

SEQ ID NO: 388874 - DNA, 19 bp, Homo sapiens
  siRNA target sequence for THAP9 (NM_024672.2,1258-1276).
catcttctagtcaacagat

SEQ ID NO: 388875 - DNA, 19 bp, Homo sapiens
  siRNA target sequence for THAP9 (NM_024672.2,1297-1315).
gccacttgctaagattaat

SEQ ID NO: 388876 - DNA, 19 bp, Homo sapiens
  siRNA target sequence for THAP9 (NM_024672.2,1298-1316).
ccacttgctaagattaata

SEQ ID NO: 388877 - DNA, 19 bp, Homo sapiens
  siRNA target sequence for THAP9 (NM_024672.2,1376-1394).
gcacctcgtggagttagta

SEQ ID NO: 388878 - DNA, 19 bp, Homo sapiens
  siRNA target sequence for THAP9 (NM_024672.2,1401-1419).
gaggaacaggaattatcaa

SEQ ID NO: 388879 - DNA, 19 bp, Homo sapiens
  siRNA target sequence for THAP9 (NM_024672.2,1483-1501).
ccacccaactctttagtga

SEQ ID NO: 388880 - DNA, 19 bp, Homo sapiens
  siRNA target sequence for THAP9 (NM_024672.2,1504-1522).
gtgtagccagtgcattaga

SEQ ID NO: 388881 - DNA, 19 bp, Homo sapiens
  siRNA target sequence for THAP9 (NM_024672.2,1509-1527).
gccagtgcattagaatatt

SEQ ID NO: 388882 - DNA, 19 bp, Homo sapiens
  siRNA target sequence for THAP9 (NM_024672.2,1539-1557).
gacctgccaccttttcaaa

SEQ ID NO: 388883 - DNA, 19 bp, Homo sapiens
  siRNA target sequence for THAP9 (NM_024672.2,1544-1562).
gccaccttttcaaaactgt

SEQ ID NO: 388884 - DNA, 19 bp, Homo sapiens
  siRNA target sequence for THAP9 (NM_024672.2,1570-1588).
ccatccattttttacgttt

SEQ ID NO: 388885 - DNA, 19 bp, Homo sapiens
  siRNA target sequence for THAP9 (NM_024672.2,1651-1669).
ctctgttgcctgaaactta

SEQ ID NO: 388886 - DNA, 19 bp, Homo sapiens
  siRNA target sequence for THAP9 (NM_024672.2,1658-1676).
gcctgaaacttacagtaaa

SEQ ID NO: 388887 - DNA, 19 bp, Homo sapiens
  siRNA target sequence for THAP9 (NM_024672.2,1700-1718).
caagactatttttgttaca

SEQ ID NO: 388888 - DNA, 19 bp, Homo sapiens
  siRNA target sequence for THAP9 (NM_024672.2,1703-1721).
gactatttttgttacatta

SEQ ID NO: 388889 - DNA, 19 bp, Homo sapiens
  siRNA target sequence for THAP9 (NM_024672.2,1725-1743).
gacactagcaataatcaaa

SEQ ID NO: 388890 - DNA, 19 bp, Homo sapiens
  siRNA target sequence for THAP9 (NM_024672.2,1729-1747).
ctagcaataatcaaataat

SEQ ID NO: 388891 - DNA, 19 bp, Homo sapiens
  siRNA target sequence for THAP9 (NM_024672.2,1753-1771).
gtaagcaaaaactaggatt

SEQ ID NO: 388892 - DNA, 19 bp, Homo sapiens
  siRNA target sequence for THAP9 (NM_024672.2,1807-1825).
ggctctaccaaaattatgt

SEQ ID NO: 388893 - DNA, 19 bp, Homo sapiens
  siRNA target sequence for THAP9 (NM_024672.2,1808-1826).
gctctaccaaaattatgtt

SEQ ID NO: 388894 - DNA, 19 bp, Homo sapiens
  siRNA target sequence for THAP9 (NM_024672.2,1809-1827).
ctctaccaaaattatgttt

SEQ ID NO: 388895 - DNA, 19 bp, Homo sapiens
  siRNA target sequence for THAP9 (NM_024672.2,1904-1922).
gcttaggcaggtattagta

SEQ ID NO: 388896 - DNA, 19 bp, Homo sapiens
  siRNA target sequence for THAP9 (NM_024672.2,1910-1928).
gcaggtattagtaacaagt

SEQ ID NO: 388897 - DNA, 19 bp, Homo sapiens
  siRNA target sequence for THAP9 (NM_024672.2,1911-1929).
caggtattagtaacaagtt

SEQ ID NO: 388898 - DNA, 19 bp, Homo sapiens
  siRNA target sequence for THAP9 (NM_024672.2,1953-1971).
cagaaagcttactataatt

SEQ ID NO: 388899 - DNA, 19 bp, Homo sapiens
  siRNA target sequence for THAP9 (NM_024672.2,1973-1991).
ggagaccagatacaaattt

SEQ ID NO: 388900 - DNA, 19 bp, Homo sapiens
  siRNA target sequence for THAP9 (NM_024672.2,2011-2029).
gcaaagtaagcatctttga

SEQ ID NO: 388901 - DNA, 19 bp, Homo sapiens
  siRNA target sequence for THAP9 (NM_024672.2,2085-2103).
ggtgtcagcgttacaaaga

SEQ ID NO: 388902 - DNA, 19 bp, Homo sapiens
  siRNA target sequence for THAP9 (NM_024672.2,2114-2132).
cgaagagggtatttgtcaa

SEQ ID NO: 388903 - DNA, 19 bp, Homo sapiens
  siRNA target sequence for THAP9 (NM_024672.2,2135-2153).
ctggtctcattgttcacta

SEQ ID NO: 388904 - DNA, 19 bp, Homo sapiens
  siRNA target sequence for THAP9 (NM_024672.2,2138-2156).
gtctcattgttcactaagt

SEQ ID NO: 388905 - DNA, 19 bp, Homo sapiens
  siRNA target sequence for THAP9 (NM_024672.2,2149-2167).
cactaagtgaggcattact

SEQ ID NO: 388906 - DNA, 19 bp, Homo sapiens
  siRNA target sequence for THAP9 (NM_024672.2,2166-2184).
ctagacctgtcagatcata

SEQ ID NO: 388907 - DNA, 19 bp, Homo sapiens
  siRNA target sequence for THAP9 (NM_024672.2,2185-2203).
ggcgaaatctcatctgtta

SEQ ID NO: 388908 - DNA, 19 bp, Homo sapiens
  siRNA target sequence for THAP9 (NM_024672.2,2186-2204).
gcgaaatctcatctgttat

SEQ ID NO: 388909 - DNA, 19 bp, Homo sapiens
  siRNA target sequence for THAP9 (NM_024672.2,2195-2213).
catctgttatgctggttat

SEQ ID NO: 388910 - DNA, 19 bp, Homo sapiens
  siRNA target sequence for THAP9 (NM_024672.2,2209-2227).
gttatgttgcaaacaagtt

SEQ ID NO: 388911 - DNA, 19 bp, Homo sapiens
  siRNA target sequence for THAP9 (NM_024672.2,2267-2285).
gtatgcatcggatctcaaa

SEQ ID NO: 388912 - DNA, 19 bp, Homo sapiens
  siRNA target sequence for THAP9 (NM_024672.2,2350-2368).
gtctgtgtcgggtcataaa

SEQ ID NO: 388913 - DNA, 19 bp, Homo sapiens
  siRNA target sequence for THAP9 (NM_024672.2,2354-2372).
gtgtcgggtcataaatatt

SEQ ID NO: 388914 - DNA, 19 bp, Homo sapiens
  siRNA target sequence for THAP9 (NM_024672.2,2359-2377).
gggtcataaatatttgtga

SEQ ID NO: 388915 - DNA, 19 bp, Homo sapiens
  siRNA target sequence for THAP9 (NM_024672.2,2382-2400).
gttgtaagaacccattcaa

SEQ ID NO: 388916 - DNA, 19 bp, Homo sapiens
  siRNA target sequence for THAP9 (NM_024672.2,2405-2423).
ggcaatttttgaactagtt

SEQ ID NO: 388917 - DNA, 19 bp, Homo sapiens
  siRNA target sequence for THAP9 (NM_024672.2,2406-2424).
gcaatttttgaactagttt

SEQ ID NO: 388918 - DNA, 19 bp, Homo sapiens
  siRNA target sequence for THAP9 (NM_024672.2,2528-2546).
gtgtgccatcaatcacttt

SEQ ID NO: 388919 - DNA, 19 bp, Homo sapiens
  siRNA target sequence for THAP9 (NM_024672.2,2547-2565).
gtcaagttgctaaaggata

SEQ ID NO: 388920 - DNA, 19 bp, Homo sapiens
  siRNA target sequence for THAP9 (NM_024672.2,2549-2567).
caagttgctaaaggatata

SEQ ID NO: 388921 - DNA, 19 bp, Homo sapiens
  siRNA target sequence for THAP9 (NM_024672.2,2562-2580).
gatataataatctgtttct

SEQ ID NO: 388922 - DNA, 19 bp, Homo sapiens
  siRNA target sequence for THAP9 (NM_024672.2,2625-2643).
cattcagagagaactgata

SEQ ID NO: 388923 - DNA, 19 bp, Homo sapiens
  siRNA target sequence for THAP9 (NM_024672.2,2679-2697).
caggattataaatgttcaa

SEQ ID NO: 388924 - DNA, 19 bp, Homo sapiens
  siRNA target sequence for THAP9 (NM_024672.2,2726-2744).
gcatttgctaagtaacgat

SEQ ID NO: 388925 - DNA, 19 bp, Homo sapiens
  siRNA target sequence for THAP9 (NM_024672.2,2732-2750).
gctaagtaacgatggatat

SEQ ID NO: 388926 - DNA, 19 bp, Homo sapiens
  siRNA target sequence for THAP9 (NM_024672.2,2741-2759).
cgatggatatccattcaaa

SEQ ID NO: 388927 - DNA, 19 bp, Homo sapiens
  siRNA target sequence for THAP9 (NM_024672.2,2742-2760).
gatggatatccattcaaat

SEQ ID NO: 388928 - DNA, 19 bp, Homo sapiens
  siRNA target sequence for FLJ21816 (NM_024675.2,387-405).
gacaagttacacatcaaaa

SEQ ID NO: 388929 - DNA, 19 bp, Homo sapiens
  siRNA target sequence for FLJ21816 (NM_024675.2,434-452).
gacatctatcacacttgat

SEQ ID NO: 388930 - DNA, 19 bp, Homo sapiens
  siRNA target sequence for FLJ21816 (NM_024675.2,436-454).
catctatcacacttgatgt

SEQ ID NO: 388931 - DNA, 19 bp, Homo sapiens
  siRNA target sequence for FLJ21816 (NM_024675.2,453-471).
gttgggcctgagtccttta

SEQ ID NO: 388932 - DNA, 19 bp, Homo sapiens
  siRNA target sequence for FLJ21816 (NM_024675.2,484-502).
gcccaggaggattacctat

SEQ ID NO: 388933 - DNA, 19 bp, Homo sapiens
  siRNA target sequence for FLJ21816 (NM_024675.2,485-503).
cccaggaggattacctata

SEQ ID NO: 388934 - DNA, 19 bp, Homo sapiens
  siRNA target sequence for FLJ21816 (NM_024675.2,487-505).
caggaggattacctataca

SEQ ID NO: 388935 - DNA, 19 bp, Homo sapiens
  siRNA target sequence for FLJ21816 (NM_024675.2,489-507).
ggaggattacctatacaaa

SEQ ID NO: 388936 - DNA, 19 bp, Homo sapiens
  siRNA target sequence for FLJ21816 (NM_024675.2,492-510).
ggattacctatacaaagaa

SEQ ID NO: 388937 - DNA, 19 bp, Homo sapiens
  siRNA target sequence for FLJ21816 (NM_024675.2,643-661).
gcactgattcactcagatt

SEQ ID NO: 388938 - DNA, 19 bp, Homo sapiens
  siRNA target sequence for FLJ21816 (NM_024675.2,658-676).
gattgtctgggaaaagact

SEQ ID NO: 388939 - DNA, 19 bp, Homo sapiens
  siRNA target sequence for FLJ21816 (NM_024675.2,712-730).
ctagatcaccagtaactga

SEQ ID NO: 388940 - DNA, 19 bp, Homo sapiens
  siRNA target sequence for FLJ21816 (NM_024675.2,715-733).
gatcaccagtaactgaaat

SEQ ID NO: 388941 - DNA, 19 bp, Homo sapiens
  siRNA target sequence for FLJ21816 (NM_024675.2,858-876).
ctaagaagacctaatttca

SEQ ID NO: 388942 - DNA, 19 bp, Homo sapiens
  siRNA target sequence for FLJ21816 (NM_024675.2,881-899).
ggcgactacagttccttta

SEQ ID NO: 388943 - DNA, 19 bp, Homo sapiens
  siRNA target sequence for FLJ21816 (NM_024675.2,883-901).
cgactacagttcctttaca

SEQ ID NO: 388944 - DNA, 19 bp, Homo sapiens
  siRNA target sequence for FLJ21816 (NM_024675.2,925-943).
gtcagcaccttgaacacat

SEQ ID NO: 388945 - DNA, 19 bp, Homo sapiens
  siRNA target sequence for FLJ21816 (NM_024675.2,970-988).
ctactcacgacctaaaaaa

SEQ ID NO: 388946 - DNA, 19 bp, Homo sapiens
  siRNA target sequence for FLJ21816 (NM_024675.2,973-991).
ctcacgacctaaaaaacat

SEQ ID NO: 388947 - DNA, 19 bp, Homo sapiens
  siRNA target sequence for FLJ21816 (NM_024675.2,975-993).
cacgacctaaaaaacatta

SEQ ID NO: 388948 - DNA, 19 bp, Homo sapiens
  siRNA target sequence for FLJ21816 (NM_024675.2,977-995).
cgacctaaaaaacattaga

SEQ ID NO: 388949 - DNA, 19 bp, Homo sapiens
  siRNA target sequence for FLJ21816 (NM_024675.2,978-996).
gacctaaaaaacattagat

SEQ ID NO: 388950 - DNA, 19 bp, Homo sapiens
  siRNA target sequence for FLJ21816 (NM_024675.2,1055-1073).
cctccttgtaaataaagct

SEQ ID NO: 388951 - DNA, 19 bp, Homo sapiens
  siRNA target sequence for FLJ21816 (NM_024675.2,1086-1104).
ggccaactgcccacaagtt

SEQ ID NO: 388952 - DNA, 19 bp, Homo sapiens
  siRNA target sequence for FLJ21816 (NM_024675.2,1094-1112).
gcccacaagttctaattta

SEQ ID NO: 388953 - DNA, 19 bp, Homo sapiens
  siRNA target sequence for FLJ21816 (NM_024675.2,1140-1158).
gaactcacctacaataact

SEQ ID NO: 388954 - DNA, 19 bp, Homo sapiens
  siRNA target sequence for FLJ21816 (NM_024675.2,1358-1376).
gtttcctgcagaatattat

SEQ ID NO: 388955 - DNA, 19 bp, Homo sapiens
  siRNA target sequence for FLJ21816 (NM_024675.2,1524-1542).
gaccaaagtgaaattagga

SEQ ID NO: 388956 - DNA, 19 bp, Homo sapiens
  siRNA target sequence for FLJ21816 (NM_024675.2,1593-1611).
ctctcattaactaaagtca

SEQ ID NO: 388957 - DNA, 19 bp, Homo sapiens
  siRNA target sequence for FLJ21816 (NM_024675.2,1619-1637).
cgctgggcccactgaagat

SEQ ID NO: 388958 - DNA, 19 bp, Homo sapiens
  siRNA target sequence for FLJ21816 (NM_024675.2,1620-1638).
gctgggcccactgaagata

SEQ ID NO: 388959 - DNA, 19 bp, Homo sapiens
  siRNA target sequence for FLJ21816 (NM_024675.2,1621-1639).
ctgggcccactgaagataa

SEQ ID NO: 388960 - DNA, 19 bp, Homo sapiens
  siRNA target sequence for FLJ21816 (NM_024675.2,1624-1642).
ggcccactgaagataatga

SEQ ID NO: 388961 - DNA, 19 bp, Homo sapiens
  siRNA target sequence for FLJ21816 (NM_024675.2,1665-1683).
caagcacctggtagaagat

SEQ ID NO: 388962 - DNA, 19 bp, Homo sapiens
  siRNA target sequence for FLJ21816 (NM_024675.2,1668-1686).
gcacctggtagaagataca

SEQ ID NO: 388963 - DNA, 19 bp, Homo sapiens
  siRNA target sequence for FLJ21816 (NM_024675.2,1750-1768).
ctagcctgtcgattgttaa

SEQ ID NO: 388964 - DNA, 19 bp, Homo sapiens
  siRNA target sequence for FLJ21816 (NM_024675.2,1782-1800).
gaagtcacctcacacaaat

SEQ ID NO: 388965 - DNA, 19 bp, Homo sapiens
  siRNA target sequence for FLJ21816 (NM_024675.2,1873-1891).
ggagtaatagtgcttattt

SEQ ID NO: 388966 - DNA, 19 bp, Homo sapiens
  siRNA target sequence for FLJ21816 (NM_024675.2,1874-1892).
gagtaatagtgcttattta

SEQ ID NO: 388967 - DNA, 19 bp, Homo sapiens
  siRNA target sequence for FLJ21816 (NM_024675.2,1894-1912).
ccttggatgatgatgcttt

SEQ ID NO: 388968 - DNA, 19 bp, Homo sapiens
  siRNA target sequence for FLJ21816 (NM_024675.2,1930-1948).
gggatggaatgctgagttt

SEQ ID NO: 388969 - DNA, 19 bp, Homo sapiens
  siRNA target sequence for FLJ21816 (NM_024675.2,1931-1949).
ggatggaatgctgagttta

SEQ ID NO: 388970 - DNA, 19 bp, Homo sapiens
  siRNA target sequence for FLJ21816 (NM_024675.2,2003-2021).
ctttggacctcttaagctt

SEQ ID NO: 388971 - DNA, 19 bp, Homo sapiens
  siRNA target sequence for FLJ21816 (NM_024675.2,2007-2025).
ggacctcttaagcttgaaa

SEQ ID NO: 388972 - DNA, 19 bp, Homo sapiens
  siRNA target sequence for FLJ21816 (NM_024675.2,2049-2067).
ccagtggagccctttgagt

SEQ ID NO: 388973 - DNA, 19 bp, Homo sapiens
  siRNA target sequence for FLJ21816 (NM_024675.2,2131-2149).
ctaaacgcatggatacaga

SEQ ID NO: 388974 - DNA, 19 bp, Homo sapiens
  siRNA target sequence for FLJ21816 (NM_024675.2,2215-2233).
cgcaaagccagcatacaaa

SEQ ID NO: 388975 - DNA, 19 bp, Homo sapiens
  siRNA target sequence for FLJ21816 (NM_024675.2,2245-2263).
cttcatccatattacttta

SEQ ID NO: 388976 - DNA, 19 bp, Homo sapiens
  siRNA target sequence for FLJ21816 (NM_024675.2,2278-2296).
cggttgcgcctgatgataa

SEQ ID NO: 388977 - DNA, 19 bp, Homo sapiens
  siRNA target sequence for FLJ21816 (NM_024675.2,2279-2297).
ggttgcgcctgatgataat

SEQ ID NO: 388978 - DNA, 19 bp, Homo sapiens
  siRNA target sequence for FLJ21816 (NM_024675.2,2283-2301).
gcgcctgatgataatgaca

SEQ ID NO: 388979 - DNA, 19 bp, Homo sapiens
  siRNA target sequence for FLJ21816 (NM_024675.2,2427-2445).
cttgctcatttgaaagact

SEQ ID NO: 388980 - DNA, 19 bp, Homo sapiens
  siRNA target sequence for FLJ21816 (NM_024675.2,2448-2466).
gtctgtcttgccagtgata

SEQ ID NO: 388981 - DNA, 19 bp, Homo sapiens
  siRNA target sequence for FLJ21816 (NM_024675.2,2458-2476).
ccagtgatactaaacaatt

SEQ ID NO: 388982 - DNA, 19 bp, Homo sapiens
  siRNA target sequence for FLJ21816 (NM_024675.2,2715-2733).
caattggtttcagagttaa

SEQ ID NO: 388983 - DNA, 19 bp, Homo sapiens
  siRNA target sequence for FLJ21816 (NM_024675.2,2720-2738).
ggtttcagagttaaagaat

SEQ ID NO: 388984 - DNA, 19 bp, Homo sapiens
  siRNA target sequence for FLJ21816 (NM_024675.2,2779-2797).
gggaaagagccggttgtaa

SEQ ID NO: 388985 - DNA, 19 bp, Homo sapiens
  siRNA target sequence for FLJ21816 (NM_024675.2,2791-2809).
gttgtaaagagccatgtat

SEQ ID NO: 388986 - DNA, 19 bp, Homo sapiens
  siRNA target sequence for FLJ21816 (NM_024675.2,2815-2833).
ctgcttgcgaagatgtagt

SEQ ID NO: 388987 - DNA, 19 bp, Homo sapiens
  siRNA target sequence for FLJ21816 (NM_024675.2,2891-2909).
cgcagaggttccagtatta

SEQ ID NO: 388988 - DNA, 19 bp, Homo sapiens
  siRNA target sequence for FLJ21816 (NM_024675.2,2974-2992).
gagagatcagggcattgtt

SEQ ID NO: 388989 - DNA, 19 bp, Homo sapiens
  siRNA target sequence for FLJ21816 (NM_024675.2,2976-2994).
gagatcagggcattgtttt

SEQ ID NO: 388990 - DNA, 19 bp, Homo sapiens
  siRNA target sequence for FLJ21816 (NM_024675.2,2978-2996).
gatcagggcattgttttgt

SEQ ID NO: 388991 - DNA, 19 bp, Homo sapiens
  siRNA target sequence for FLJ21816 (NM_024675.2,3035-3053).
gtctggaaatataaaagct

SEQ ID NO: 388992 - DNA, 19 bp, Homo sapiens
  siRNA target sequence for FLJ21816 (NM_024675.2,3054-3072).
gtgcttggcctgacaaaga

SEQ ID NO: 388993 - DNA, 19 bp, Homo sapiens
  siRNA target sequence for FLJ21816 (NM_024675.2,3097-3115).
ccctttctgatcaacaagt

SEQ ID NO: 388994 - DNA, 19 bp, Homo sapiens
  siRNA target sequence for FLJ21816 (NM_024675.2,3174-3192).
cctgaggagactatactaa

SEQ ID NO: 388995 - DNA, 19 bp, Homo sapiens
  siRNA target sequence for FLJ21816 (NM_024675.2,3179-3197).
ggagactatactaactttt

SEQ ID NO: 388996 - DNA, 19 bp, Homo sapiens
  siRNA target sequence for FLJ21816 (NM_024675.2,3222-3240).
gctctgcttggtactacta

SEQ ID NO: 388997 - DNA, 19 bp, Homo sapiens
  siRNA target sequence for FLJ21816 (NM_024675.2,3223-3241).
ctctgcttggtactactat

SEQ ID NO: 388998 - DNA, 19 bp, Homo sapiens
  siRNA target sequence for FLJ21816 (NM_024675.2,3228-3246).
cttggtactactattatga

SEQ ID NO: 388999 - DNA, 19 bp, Homo sapiens
  siRNA target sequence for FLJ21816 (NM_024675.2,3293-3311).
gatgcacattgatgattct

SEQ ID NO: 389000 - DNA, 19 bp, Homo sapiens
  siRNA target sequence for FLJ21816 (NM_024675.2,3345-3363).
gaaatggggcttctcttta

SEQ ID NO: 389001 - DNA, 19 bp, Homo sapiens
  siRNA target sequence for FLJ21816 (NM_024675.2,3401-3419).
gttgcgaagccctgtgttt

SEQ ID NO: 389002 - DNA, 19 bp, Homo sapiens
  siRNA target sequence for FLJ21816 (NM_024675.2,3606-3624).
cctgtctctgaccaacatt

SEQ ID NO: 389003 - DNA, 19 bp, Homo sapiens
  siRNA target sequence for FLJ21816 (NM_024675.2,3643-3661).
cgggtacagactctcattt

SEQ ID NO: 389004 - DNA, 19 bp, Homo sapiens
  siRNA target sequence for FLJ21816 (NM_024675.2,3646-3664).
gtacagactctcatttgct

SEQ ID NO: 389005 - DNA, 19 bp, Homo sapiens
  siRNA target sequence for FLJ21816 (NM_024675.2,3682-3700).
gaaatatatttgtatacca

SEQ ID NO: 389006 - DNA, 19 bp, Homo sapiens
  siRNA target sequence for FLJ22938 (NM_024676.2,869-887).
cagagagggtcttttcagt

SEQ ID NO: 389007 - DNA, 19 bp, Homo sapiens
  siRNA target sequence for FLJ22938 (NM_024676.2,987-1005).
gaccccagagctttctgaa

SEQ ID NO: 389008 - DNA, 19 bp, Homo sapiens
  siRNA target sequence for FLJ22938 (NM_024676.2,1022-1040).
gagatgacattcaattcca

SEQ ID NO: 389009 - DNA, 19 bp, Homo sapiens
  siRNA target sequence for FLJ22938 (NM_024676.2,1068-1086).
gaaggtcaagtactttgta

SEQ ID NO: 389010 - DNA, 19 bp, Homo sapiens
  siRNA target sequence for FLJ22938 (NM_024676.2,1211-1229).
cacgccaggctgagttgaa

SEQ ID NO: 389011 - DNA, 19 bp, Homo sapiens
  siRNA target sequence for FLJ22938 (NM_024676.2,1551-1569).
cgctggtcccgcaaaacta

SEQ ID NO: 389012 - DNA, 19 bp, Homo sapiens
  siRNA target sequence for FLJ22938 (NM_024676.2,1553-1571).
ctggtcccgcaaaactaca

SEQ ID NO: 389013 - DNA, 19 bp, Homo sapiens
  siRNA target sequence for FLJ14001 (NM_024677.3,483-501).
ggcgaactggagttttcga

SEQ ID NO: 389014 - DNA, 19 bp, Homo sapiens
  siRNA target sequence for FLJ14001 (NM_024677.3,484-502).
gcgaactggagttttcgaa

SEQ ID NO: 389015 - DNA, 19 bp, Homo sapiens
  siRNA target sequence for FLJ14001 (NM_024677.3,494-512).
gttttcgaacgaagaagat

SEQ ID NO: 389016 - DNA, 19 bp, Homo sapiens
  siRNA target sequence for FLJ14001 (NM_024677.3,507-525).
gaagatcccgagatcatct

SEQ ID NO: 389017 - DNA, 19 bp, Homo sapiens
  siRNA target sequence for FLJ14001 (NM_024677.3,595-613).
cggactccgtttatgtcat

SEQ ID NO: 389018 - DNA, 19 bp, Homo sapiens
  siRNA target sequence for FLJ14001 (NM_024677.3,644-662).
cgaaaagtcggcacagaaa

SEQ ID NO: 389019 - DNA, 19 bp, Homo sapiens
  siRNA target sequence for FLJ14001 (NM_024677.3,650-668).
gtcggcacagaaagtctta

SEQ ID NO: 389020 - DNA, 19 bp, Homo sapiens
  siRNA target sequence for FLJ14001 (NM_024677.3,652-670).
cggcacagaaagtcttaat

SEQ ID NO: 389021 - DNA, 19 bp, Homo sapiens
  siRNA target sequence for FLJ14001 (NM_024677.3,719-737).
gtcctttcagcgtttgtct

SEQ ID NO: 389022 - DNA, 19 bp, Homo sapiens
  siRNA target sequence for FLJ14001 (NM_024677.3,721-739).
cctttcagcgtttgtctta

SEQ ID NO: 389023 - DNA, 19 bp, Homo sapiens
  siRNA target sequence for FLJ14001 (NM_024677.3,754-772).
gtgccctgaaatatcaaga

SEQ ID NO: 389024 - DNA, 19 bp, Homo sapiens
  siRNA target sequence for FLJ14001 (NM_024677.3,771-789).
gatattttggaaactatat

SEQ ID NO: 389025 - DNA, 19 bp, Homo sapiens
  siRNA target sequence for FLJ14001 (NM_024677.3,780-798).
gaaactatattgatagaca

SEQ ID NO: 389026 - DNA, 19 bp, Homo sapiens
  siRNA target sequence for FLJ14001 (NM_024677.3,809-827).
cccaagtaccacaatacca

SEQ ID NO: 389027 - DNA, 19 bp, Homo sapiens
  siRNA target sequence for FLJ14001 (NM_024677.3,828-846).
gatcatttgagcagtctta

SEQ ID NO: 389028 - DNA, 19 bp, Homo sapiens
  siRNA target sequence for FLJ14001 (NM_024677.3,838-856).
gcagtcttattattgtgat

SEQ ID NO: 389029 - DNA, 19 bp, Homo sapiens
  siRNA target sequence for FLJ14001 (NM_024677.3,889-907).
ctcgtgtcctttctgataa

SEQ ID NO: 389030 - DNA, 19 bp, Homo sapiens
  siRNA target sequence for FLJ14001 (NM_024677.3,936-954).
gtagagaaccttcttaaca

SEQ ID NO: 389031 - DNA, 19 bp, Homo sapiens
  siRNA target sequence for FLJ14001 (NM_024677.3,1001-1019).
gcatgatgccctttcaatt

SEQ ID NO: 389032 - DNA, 19 bp, Homo sapiens
  siRNA target sequence for FLJ14001 (NM_024677.3,1064-1082).
ctccactttaccactttat

SEQ ID NO: 389033 - DNA, 19 bp, Homo sapiens
  siRNA target sequence for FLJ14001 (NM_024677.3,1083-1101).
gcttggataaatacttgta

SEQ ID NO: 389034 - DNA, 19 bp, Homo sapiens
  siRNA target sequence for FLJ14001 (NM_024677.3,1084-1102).
cttggataaatacttgtaa

SEQ ID NO: 389035 - DNA, 19 bp, Homo sapiens
  siRNA target sequence for FLJ14001 (NM_024677.3,1143-1161).
ggctataataaagtcaaat

SEQ ID NO: 389036 - DNA, 19 bp, Homo sapiens
  siRNA target sequence for FLJ14001 (NM_024677.3,1155-1173).
gtcaaatctgtattgcata

SEQ ID NO: 389037 - DNA, 19 bp, Homo sapiens
  siRNA target sequence for FLJ14001 (NM_024677.3,1192-1210).
ctgtggatcaacattgcta

SEQ ID NO: 389038 - DNA, 19 bp, Homo sapiens
  siRNA target sequence for FLJ14001 (NM_024677.3,1203-1221).
cattgctatgatgtcttaa

SEQ ID NO: 389039 - DNA, 19 bp, Homo sapiens
  siRNA target sequence for FLJ14001 (NM_024677.3,1292-1310).
ggacaaatctcgaagtctt

SEQ ID NO: 389040 - DNA, 19 bp, Homo sapiens
  siRNA target sequence for FLJ14001 (NM_024677.3,1467-1485).
gacttgaagacccttttca

SEQ ID NO: 389041 - DNA, 19 bp, Homo sapiens
  siRNA target sequence for FLJ14001 (NM_024677.3,1478-1496).
ccttttcacaaaaatagga

SEQ ID NO: 389042 - DNA, 19 bp, Homo sapiens
  siRNA target sequence for FLJ14001 (NM_024677.3,1547-1565).
ggatcacaggttacagaaa

SEQ ID NO: 389043 - DNA, 19 bp, Homo sapiens
  siRNA target sequence for FLJ14001 (NM_024677.3,1580-1598).
gctgctacctcgttgttca

SEQ ID NO: 389044 - DNA, 19 bp, Homo sapiens
  siRNA target sequence for FLJ14001 (NM_024677.3,1597-1615).
caggactgggtgttagtaa

SEQ ID NO: 389045 - DNA, 19 bp, Homo sapiens
  siRNA target sequence for FLJ14001 (NM_024677.3,1644-1662).
gaagatacagaattcctta

SEQ ID NO: 389046 - DNA, 19 bp, Homo sapiens
  siRNA target sequence for FLJ14001 (NM_024677.3,1721-1739).
gtatgaacagctaacacat

SEQ ID NO: 389047 - DNA, 19 bp, Homo sapiens
  siRNA target sequence for FLJ14001 (NM_024677.3,1731-1749).
ctaacacatgcaatgaaat

SEQ ID NO: 389048 - DNA, 19 bp, Homo sapiens
  siRNA target sequence for FLJ14001 (NM_024677.3,1737-1755).
catgcaatgaaatttacta

SEQ ID NO: 389049 - DNA, 19 bp, Homo sapiens
  siRNA target sequence for FLJ14001 (NM_024677.3,1767-1785).
gttgtttactgcacatgtt

SEQ ID NO: 389050 - DNA, 19 bp, Homo sapiens
  siRNA target sequence for FLJ23311 (NM_024680.2,592-610).
gaatccaccacagcaaata

SEQ ID NO: 389051 - DNA, 19 bp, Homo sapiens
  siRNA target sequence for FLJ23311 (NM_024680.2,596-614).
ccaccacagcaaatatcgt

SEQ ID NO: 389052 - DNA, 19 bp, Homo sapiens
  siRNA target sequence for FLJ23311 (NM_024680.2,744-762).
ccgcaacagagatcagaaa

SEQ ID NO: 389053 - DNA, 19 bp, Homo sapiens
  siRNA target sequence for FLJ23311 (NM_024680.2,766-784).
ggtttgtttgacaacagaa

SEQ ID NO: 389054 - DNA, 19 bp, Homo sapiens
  siRNA target sequence for FLJ23311 (NM_024680.2,807-825).
ctgtatacacgaacactta

SEQ ID NO: 389055 - DNA, 19 bp, Homo sapiens
  siRNA target sequence for FLJ23311 (NM_024680.2,848-866).
cccaaccaagtcgaaaaga

SEQ ID NO: 389056 - DNA, 19 bp, Homo sapiens
  siRNA target sequence for FLJ23311 (NM_024680.2,850-868).
caaccaagtcgaaaagaga

SEQ ID NO: 389057 - DNA, 19 bp, Homo sapiens
  siRNA target sequence for FLJ23311 (NM_024680.2,894-912).
gttcttagcacgatatcct

SEQ ID NO: 389058 - DNA, 19 bp, Homo sapiens
  siRNA target sequence for FLJ23311 (NM_024680.2,897-915).
cttagcacgatatcctaat

SEQ ID NO: 389059 - DNA, 19 bp, Homo sapiens
  siRNA target sequence for FLJ23311 (NM_024680.2,921-939).
caaccctgctgtgaataat

SEQ ID NO: 389060 - DNA, 19 bp, Homo sapiens
  siRNA target sequence for FLJ23311 (NM_024680.2,960-978).
ggcagaggaacttaatgtt

SEQ ID NO: 389061 - DNA, 19 bp, Homo sapiens
  siRNA target sequence for FLJ23311 (NM_024680.2,982-1000).
cgtcgacgcatttacgata

SEQ ID NO: 389062 - DNA, 19 bp, Homo sapiens
  siRNA target sequence for FLJ23311 (NM_024680.2,983-1001).
gtcgacgcatttacgatat

SEQ ID NO: 389063 - DNA, 19 bp, Homo sapiens
  siRNA target sequence for FLJ23311 (NM_024680.2,986-1004).
gacgcatttacgatatcgt

SEQ ID NO: 389064 - DNA, 19 bp, Homo sapiens
  siRNA target sequence for FLJ23311 (NM_024680.2,1005-1023).
gaacgtcctagagagttta

SEQ ID NO: 389065 - DNA, 19 bp, Homo sapiens
  siRNA target sequence for FLJ23311 (NM_024680.2,1042-1060).
gccaaaaacaggtacactt

SEQ ID NO: 389066 - DNA, 19 bp, Homo sapiens
  siRNA target sequence for FLJ23311 (NM_024680.2,1061-1079).
ggcacgggcgacacaatct

SEQ ID NO: 389067 - DNA, 19 bp, Homo sapiens
  siRNA target sequence for FLJ23311 (NM_024680.2,1063-1081).
cacgggcgacacaatctca

SEQ ID NO: 389068 - DNA, 19 bp, Homo sapiens
  siRNA target sequence for FLJ23311 (NM_024680.2,1129-1147).
gccgagcagattatgatga

SEQ ID NO: 389069 - DNA, 19 bp, Homo sapiens
  siRNA target sequence for FLJ23311 (NM_024680.2,1177-1195).
gactttattaagagttaca

SEQ ID NO: 389070 - DNA, 19 bp, Homo sapiens
  siRNA target sequence for FLJ23311 (NM_024680.2,1204-1222).
gatcatatcatcaaatcaa

SEQ ID NO: 389071 - DNA, 19 bp, Homo sapiens
  siRNA target sequence for FLJ23311 (NM_024680.2,1294-1312).
gtaaacagccgcaaagaca

SEQ ID NO: 389072 - DNA, 19 bp, Homo sapiens
  siRNA target sequence for FLJ23311 (NM_024680.2,1301-1319).
gccgcaaagacaagtcttt

SEQ ID NO: 389073 - DNA, 19 bp, Homo sapiens
  siRNA target sequence for FLJ23311 (NM_024680.2,1302-1320).
ccgcaaagacaagtcttta

SEQ ID NO: 389074 - DNA, 19 bp, Homo sapiens
  siRNA target sequence for FLJ23311 (NM_024680.2,1303-1321).
cgcaaagacaagtctttaa

SEQ ID NO: 389075 - DNA, 19 bp, Homo sapiens
  siRNA target sequence for FLJ23311 (NM_024680.2,1322-1340).
gggtaatgagccagaaatt

SEQ ID NO: 389076 - DNA, 19 bp, Homo sapiens
  siRNA target sequence for FLJ23311 (NM_024680.2,1323-1341).
ggtaatgagccagaaattt

SEQ ID NO: 389077 - DNA, 19 bp, Homo sapiens
  siRNA target sequence for FLJ23311 (NM_024680.2,1356-1374).
ggtgtcaacgcctcagata

SEQ ID NO: 389078 - DNA, 19 bp, Homo sapiens
  siRNA target sequence for FLJ23311 (NM_024680.2,1359-1377).
gtcaacgcctcagatagta

SEQ ID NO: 389079 - DNA, 19 bp, Homo sapiens
  siRNA target sequence for FLJ23311 (NM_024680.2,1387-1405).
gttgctgccaagattttaa

SEQ ID NO: 389080 - DNA, 19 bp, Homo sapiens
  siRNA target sequence for FLJ23311 (NM_024680.2,1461-1479).
gaggttgtatgatatagct

SEQ ID NO: 389081 - DNA, 19 bp, Homo sapiens
  siRNA target sequence for FLJ23311 (NM_024680.2,1463-1481).
ggttgtatgatatagctaa

SEQ ID NO: 389082 - DNA, 19 bp, Homo sapiens
  siRNA target sequence for FLJ23311 (NM_024680.2,1464-1482).
gttgtatgatatagctaat

SEQ ID NO: 389083 - DNA, 19 bp, Homo sapiens
  siRNA target sequence for FLJ23311 (NM_024680.2,1486-1504).
ctgagtagcctggatctta

SEQ ID NO: 389084 - DNA, 19 bp, Homo sapiens
  siRNA target sequence for FLJ23311 (NM_024680.2,1535-1553).
gccgaaaaccagctttcaa

SEQ ID NO: 389085 - DNA, 19 bp, Homo sapiens
  siRNA target sequence for FLJ23311 (NM_024680.2,1536-1554).
ccgaaaaccagctttcaaa

SEQ ID NO: 389086 - DNA, 19 bp, Homo sapiens
  siRNA target sequence for FLJ23311 (NM_024680.2,1563-1581).
cccagaaatcagtccaaat

SEQ ID NO: 389087 - DNA, 19 bp, Homo sapiens
  siRNA target sequence for FLJ23311 (NM_024680.2,1596-1614).
cccagtcattcattttact

SEQ ID NO: 389088 - DNA, 19 bp, Homo sapiens
  siRNA target sequence for FLJ23311 (NM_024680.2,1627-1645).
gaggtgagacggtcttcaa

SEQ ID NO: 389089 - DNA, 19 bp, Homo sapiens
  siRNA target sequence for FLJ23311 (NM_024680.2,1629-1647).
ggtgagacggtcttcaaaa

SEQ ID NO: 389090 - DNA, 19 bp, Homo sapiens
  siRNA target sequence for FLJ23311 (NM_024680.2,1634-1652).
gacggtcttcaaaagagaa

SEQ ID NO: 389091 - DNA, 19 bp, Homo sapiens
  siRNA target sequence for FLJ23311 (NM_024680.2,1673-1691).
ccacacgtgggaaaccaaa

SEQ ID NO: 389092 - DNA, 19 bp, Homo sapiens
  siRNA target sequence for FLJ23311 (NM_024680.2,1676-1694).
cacgtgggaaaccaaactt

SEQ ID NO: 389093 - DNA, 19 bp, Homo sapiens
  siRNA target sequence for FLJ23311 (NM_024680.2,1678-1696).
cgtgggaaaccaaacttta

SEQ ID NO: 389094 - DNA, 19 bp, Homo sapiens
  siRNA target sequence for FLJ23311 (NM_024680.2,1697-1715).
ctcgacacccatctcttat

SEQ ID NO: 389095 - DNA, 19 bp, Homo sapiens
  siRNA target sequence for FLJ23311 (NM_024680.2,1699-1717).
cgacacccatctcttatca

SEQ ID NO: 389096 - DNA, 19 bp, Homo sapiens
  siRNA target sequence for FLJ23311 (NM_024680.2,1702-1720).
cacccatctcttatcaaat

SEQ ID NO: 389097 - DNA, 19 bp, Homo sapiens
  siRNA target sequence for FLJ23311 (NM_024680.2,1706-1724).
catctcttatcaaattggt

SEQ ID NO: 389098 - DNA, 19 bp, Homo sapiens
  siRNA target sequence for FLJ23311 (NM_024680.2,1722-1740).
ggtaaagagtatagaaagt

SEQ ID NO: 389099 - DNA, 19 bp, Homo sapiens
  siRNA target sequence for FLJ23311 (NM_024680.2,1763-1781).
cgcccagtagccctatcaa

SEQ ID NO: 389100 - DNA, 19 bp, Homo sapiens
  siRNA target sequence for FLJ23311 (NM_024680.2,1765-1783).
cccagtagccctatcaaga

SEQ ID NO: 389101 - DNA, 19 bp, Homo sapiens
  siRNA target sequence for FLJ23311 (NM_024680.2,1814-1832).
cacccttcccaagtaaaat

SEQ ID NO: 389102 - DNA, 19 bp, Homo sapiens
  siRNA target sequence for FLJ23311 (NM_024680.2,1833-1851).
ggctcagctcgcagctatt

SEQ ID NO: 389103 - DNA, 19 bp, Homo sapiens
  siRNA target sequence for FLJ23311 (NM_024680.2,1834-1852).
gctcagctcgcagctattt

SEQ ID NO: 389104 - DNA, 19 bp, Homo sapiens
  siRNA target sequence for FLJ23311 (NM_024680.2,1837-1855).
cagctcgcagctatttgta

SEQ ID NO: 389105 - DNA, 19 bp, Homo sapiens
  siRNA target sequence for FLJ23311 (NM_024680.2,1839-1857).
gctcgcagctatttgtaaa

SEQ ID NO: 389106 - DNA, 19 bp, Homo sapiens
  siRNA target sequence for FLJ23311 (NM_024680.2,2105-2123).
ctcaagcccaccaaagtgt

SEQ ID NO: 389107 - DNA, 19 bp, Homo sapiens
  siRNA target sequence for FLJ23311 (NM_024680.2,2156-2174).
gcaccacccactcttctaa

SEQ ID NO: 389108 - DNA, 19 bp, Homo sapiens
  siRNA target sequence for FLJ23311 (NM_024680.2,2160-2178).
cacccactcttctaaagct

SEQ ID NO: 389109 - DNA, 19 bp, Homo sapiens
  siRNA target sequence for FLJ23311 (NM_024680.2,2176-2194).
gctactggctcaaaagact

SEQ ID NO: 389110 - DNA, 19 bp, Homo sapiens
  siRNA target sequence for FLJ23311 (NM_024680.2,2352-2370).
cgaggacagtggttccaaa

SEQ ID NO: 389111 - DNA, 19 bp, Homo sapiens
  siRNA target sequence for FLJ23311 (NM_024680.2,2385-2403).
ggacctaaaaggacttgaa

SEQ ID NO: 389112 - DNA, 19 bp, Homo sapiens
  siRNA target sequence for FLJ23311 (NM_024680.2,2513-2531).
ccccaaaccacaggattta

SEQ ID NO: 389113 - DNA, 19 bp, Homo sapiens
  siRNA target sequence for FLJ23311 (NM_024680.2,2537-2555).
ccccaattgcaggtgttat

SEQ ID NO: 389114 - DNA, 19 bp, Homo sapiens
  siRNA target sequence for FLJ23311 (NM_024680.2,2551-2569).
gttattccagtgacatcat

SEQ ID NO: 389115 - DNA, 19 bp, Homo sapiens
  siRNA target sequence for FLJ23311 (NM_024680.2,2605-2623).
gtaacaccgttgaagctaa

SEQ ID NO: 389116 - DNA, 19 bp, Homo sapiens
  siRNA target sequence for FLJ23311 (NM_024680.2,2609-2627).
caccgttgaagctaatggt

SEQ ID NO: 389117 - DNA, 19 bp, Homo sapiens
  siRNA target sequence for FLJ23311 (NM_024680.2,2708-2726).
caagctcagccattgtaaa

SEQ ID NO: 389118 - DNA, 19 bp, Homo sapiens
  siRNA target sequence for FLJ23311 (NM_024680.2,2781-2799).
ccctgggtctggaatcgtt

SEQ ID NO: 389119 - DNA, 19 bp, Homo sapiens
  siRNA target sequence for FLJ23311 (NM_024680.2,2861-2879).
gaagggccaccaactatga

SEQ ID NO: 389120 - DNA, 19 bp, Homo sapiens
  siRNA target sequence for FLJ23311 (NM_024680.2,2960-2978).
ccaaagggtcacaattagt

SEQ ID NO: 389121 - DNA, 19 bp, Homo sapiens
  siRNA target sequence for FLJ23311 (NM_024680.2,2971-2989).
caattagtggccgaaagtt

SEQ ID NO: 389122 - DNA, 19 bp, Homo sapiens
  siRNA target sequence for FLJ12168 (NM_024682.1,1163-1181).
ggcccacatacgcaagaaa

SEQ ID NO: 389123 - DNA, 19 bp, Homo sapiens
  siRNA target sequence for FLJ12168 (NM_024682.1,1297-1315).
ctgacaggaccaacaagtt

SEQ ID NO: 389124 - DNA, 19 bp, Homo sapiens
  siRNA target sequence for FLJ12168 (NM_024682.1,1345-1363).
gcctgctgaacgatatcct

SEQ ID NO: 389125 - DNA, 19 bp, Homo sapiens
  siRNA target sequence for FLJ12168 (NM_024682.1,1364-1382).
cctcacctactgcatgtat

SEQ ID NO: 389126 - DNA, 19 bp, Homo sapiens
  siRNA target sequence for FLJ12168 (NM_024682.1,1429-1447).
cgatcctctacgtcattca

SEQ ID NO: 389127 - DNA, 19 bp, Homo sapiens
  siRNA target sequence for FLJ12168 (NM_024682.1,1490-1508).
gctcgtgcaagggaacttt

SEQ ID NO: 389128 - DNA, 19 bp, Homo sapiens
  siRNA target sequence for FLJ12168 (NM_024682.1,1493-1511).
cgtgcaagggaactttgaa

SEQ ID NO: 389129 - DNA, 19 bp, Homo sapiens
  siRNA target sequence for FLJ12168 (NM_024682.1,1785-1803).
ggcttcggctccaatgaga

SEQ ID NO: 389130 - DNA, 19 bp, Homo sapiens
  siRNA target sequence for FLJ12168 (NM_024682.1,1786-1804).
gcttcggctccaatgagat

SEQ ID NO: 389131 - DNA, 19 bp, Homo sapiens
  siRNA target sequence for FLJ22729 (NM_024683.1,639-657).
gagatttcctcgatcattt

SEQ ID NO: 389132 - DNA, 19 bp, Homo sapiens
  siRNA target sequence for FLJ22729 (NM_024683.1,641-659).
gatttcctcgatcatttca

SEQ ID NO: 389133 - DNA, 19 bp, Homo sapiens
  siRNA target sequence for FLJ22729 (NM_024683.1,646-664).
cctcgatcatttcaaagat

SEQ ID NO: 389134 - DNA, 19 bp, Homo sapiens
  siRNA target sequence for FLJ22729 (NM_024683.1,667-685).
ctaaagcagatttctatgt

SEQ ID NO: 389135 - DNA, 19 bp, Homo sapiens
  siRNA target sequence for FLJ22729 (NM_024683.1,725-743).
gtttccaatactgttacat

SEQ ID NO: 389136 - DNA, 19 bp, Homo sapiens
  siRNA target sequence for FLJ22729 (NM_024683.1,760-778).
ccatgctgtatgccttatt

SEQ ID NO: 389137 - DNA, 19 bp, Homo sapiens
  siRNA target sequence for FLJ22729 (NM_024683.1,764-782).
gctgtatgccttattaaat

SEQ ID NO: 389138 - DNA, 19 bp, Homo sapiens
  siRNA target sequence for FLJ22729 (NM_024683.1,765-783).
ctgtatgccttattaaata

SEQ ID NO: 389139 - DNA, 19 bp, Homo sapiens
  siRNA target sequence for FLJ22729 (NM_024683.1,813-831).
gtgctgagcatgaatcgaa

SEQ ID NO: 389140 - DNA, 19 bp, Homo sapiens
  siRNA target sequence for FLJ22729 (NM_024683.1,815-833).
gctgagcatgaatcgaaat

SEQ ID NO: 389141 - DNA, 19 bp, Homo sapiens
  siRNA target sequence for FLJ22729 (NM_024683.1,841-859).
ggaagcattttgaactgat

SEQ ID NO: 389142 - DNA, 19 bp, Homo sapiens
  siRNA target sequence for FLJ22729 (NM_024683.1,902-920).
gtttctcttcgattctata

SEQ ID NO: 389143 - DNA, 19 bp, Homo sapiens
  siRNA target sequence for FLJ22729 (NM_024683.1,906-924).
ctcttcgattctatactga

SEQ ID NO: 389144 - DNA, 19 bp, Homo sapiens
  siRNA target sequence for FLJ22729 (NM_024683.1,928-946).
cggatcctcgggtgttctt

SEQ ID NO: 389145 - DNA, 19 bp, Homo sapiens
  siRNA target sequence for FLJ22729 (NM_024683.1,939-957).
gtgttcttcccatcagata

SEQ ID NO: 389146 - DNA, 19 bp, Homo sapiens
  siRNA target sequence for FLJ22729 (NM_024683.1,952-970).
cagataaaatagttcacta

SEQ ID NO: 389147 - DNA, 19 bp, Homo sapiens
  siRNA target sequence for FLJ22729 (NM_024683.1,1003-1021).
gagtagaagagctttatga

SEQ ID NO: 389148 - DNA, 19 bp, Homo sapiens
  siRNA target sequence for FLJ22729 (NM_024683.1,1005-1023).
gtagaagagctttatgatt

SEQ ID NO: 389149 - DNA, 19 bp, Homo sapiens
  siRNA target sequence for FLJ23560 (NM_024685.2,283-301).
gtttccagtcatctcaaaa

SEQ ID NO: 389150 - DNA, 19 bp, Homo sapiens
  siRNA target sequence for FLJ23560 (NM_024685.2,314-332).
gtgcaaaaacatttattat

SEQ ID NO: 389151 - DNA, 19 bp, Homo sapiens
  siRNA target sequence for FLJ23560 (NM_024685.2,458-476).
cccaggctctcctaacgtt

SEQ ID NO: 389152 - DNA, 19 bp, Homo sapiens
  siRNA target sequence for FLJ23560 (NM_024685.2,463-481).
gctctcctaacgtttcaga

SEQ ID NO: 389153 - DNA, 19 bp, Homo sapiens
  siRNA target sequence for FLJ23560 (NM_024685.2,469-487).
ctaacgtttcagacacaaa

SEQ ID NO: 389154 - DNA, 19 bp, Homo sapiens
  siRNA target sequence for FLJ23560 (NM_024685.2,504-522).
ggaccagtacctaagtaga

SEQ ID NO: 389155 - DNA, 19 bp, Homo sapiens
  siRNA target sequence for FLJ23560 (NM_024685.2,566-584).
gtaggagctctttagagtt

SEQ ID NO: 389156 - DNA, 19 bp, Homo sapiens
  siRNA target sequence for FLJ23560 (NM_024685.2,585-603).
gctcttagaagcatacttt

SEQ ID NO: 389157 - DNA, 19 bp, Homo sapiens
  siRNA target sequence for FLJ23560 (NM_024685.2,613-631).
gtgggaagaaataatcata

SEQ ID NO: 389158 - DNA, 19 bp, Homo sapiens
  siRNA target sequence for FLJ23560 (NM_024685.2,645-663).
gttgatgtgtgactacttt

SEQ ID NO: 389159 - DNA, 19 bp, Homo sapiens
  siRNA target sequence for FLJ23560 (NM_024685.2,831-849).
catgcgaatggtgatagta

SEQ ID NO: 389160 - DNA, 19 bp, Homo sapiens
  siRNA target sequence for FLJ23560 (NM_024685.2,834-852).
gcgaatggtgatagtaaca

SEQ ID NO: 389161 - DNA, 19 bp, Homo sapiens
  siRNA target sequence for FLJ23560 (NM_024685.2,836-854).
gaatggtgatagtaacaga

SEQ ID NO: 389162 - DNA, 19 bp, Homo sapiens
  siRNA target sequence for FLJ23560 (NM_024685.2,876-894).
cacttctggatcagagttt

SEQ ID NO: 389163 - DNA, 19 bp, Homo sapiens
  siRNA target sequence for FLJ23560 (NM_024685.2,878-896).
cttctggatcagagtttat

SEQ ID NO: 389164 - DNA, 19 bp, Homo sapiens
  siRNA target sequence for FLJ23560 (NM_024685.2,883-901).
ggatcagagtttattctaa

SEQ ID NO: 389165 - DNA, 19 bp, Homo sapiens
  siRNA target sequence for FLJ23560 (NM_024685.2,884-902).
gatcagagtttattctaaa

SEQ ID NO: 389166 - DNA, 19 bp, Homo sapiens
  siRNA target sequence for FLJ23560 (NM_024685.2,977-995).
gtcagaatgtaaaattgct

SEQ ID NO: 389167 - DNA, 19 bp, Homo sapiens
  siRNA target sequence for FLJ23560 (NM_024685.2,985-1003).
gtaaaattgctcatatcta

SEQ ID NO: 389168 - DNA, 19 bp, Homo sapiens
  siRNA target sequence for FLJ23560 (NM_024685.2,1012-1030).
caaccagatttagttagtt

SEQ ID NO: 389169 - DNA, 19 bp, Homo sapiens
  siRNA target sequence for FLJ23560 (NM_024685.2,1015-1033).
ccagatttagttagttatt

SEQ ID NO: 389170 - DNA, 19 bp, Homo sapiens
  siRNA target sequence for FLJ23560 (NM_024685.2,1040-1058).
gggtgaatggcatatcagt

SEQ ID NO: 389171 - DNA, 19 bp, Homo sapiens
  siRNA target sequence for FLJ23560 (NM_024685.2,1059-1077).
ggttgagtgtttatcatca

SEQ ID NO: 389172 - DNA, 19 bp, Homo sapiens
  siRNA target sequence for FLJ23560 (NM_024685.2,1098-1116).
gaggatcattggtctttct

SEQ ID NO: 389173 - DNA, 19 bp, Homo sapiens
  siRNA target sequence for FLJ23560 (NM_024685.2,1104-1122).
cattggtctttctccattt

SEQ ID NO: 389174 - DNA, 19 bp, Homo sapiens
  siRNA target sequence for FLJ23560 (NM_024685.2,1135-1153).
gccttttcgcagtgtgaaa

SEQ ID NO: 389175 - DNA, 19 bp, Homo sapiens
  siRNA target sequence for FLJ23560 (NM_024685.2,1137-1155).
cttttcgcagtgtgaaata

SEQ ID NO: 389176 - DNA, 19 bp, Homo sapiens
  siRNA target sequence for FLJ23560 (NM_024685.2,1142-1160).
cgcagtgtgaaatacctaa

SEQ ID NO: 389177 - DNA, 19 bp, Homo sapiens
  siRNA target sequence for FLJ23560 (NM_024685.2,1165-1183).
gctttggtgaaattttgta

SEQ ID NO: 389178 - DNA, 19 bp, Homo sapiens
  siRNA target sequence for FLJ23560 (NM_024685.2,1213-1231).
gttcatctaggcttgataa

SEQ ID NO: 389179 - DNA, 19 bp, Homo sapiens
  siRNA target sequence for FLJ23560 (NM_024685.2,1274-1292).
cagtgcatggtctcattga

SEQ ID NO: 389180 - DNA, 19 bp, Homo sapiens
  siRNA target sequence for FLJ23560 (NM_024685.2,1307-1325).
ctttacatggagcacttaa

SEQ ID NO: 389181 - DNA, 19 bp, Homo sapiens
  siRNA target sequence for FLJ23560 (NM_024685.2,1348-1366).
gaccttgatctaaattaca

SEQ ID NO: 389182 - DNA, 19 bp, Homo sapiens
  siRNA target sequence for FLJ23560 (NM_024685.2,1381-1399).
gaccaaaatggcacttcaa

SEQ ID NO: 389183 - DNA, 19 bp, Homo sapiens
  siRNA target sequence for FLJ23560 (NM_024685.2,1416-1434).
gaacagtggagaaagttat

SEQ ID NO: 389184 - DNA, 19 bp, Homo sapiens
  siRNA target sequence for FLJ23560 (NM_024685.2,1534-1552).
gtacattctaatttggtaa

SEQ ID NO: 389185 - DNA, 19 bp, Homo sapiens
  siRNA target sequence for FLJ23560 (NM_024685.2,1627-1645).
gttgaaacgctgacatgtt

SEQ ID NO: 389186 - DNA, 19 bp, Homo sapiens
  siRNA target sequence for FLJ23560 (NM_024685.2,1634-1652).
cgctgacatgtttgtcttt

SEQ ID NO: 389187 - DNA, 19 bp, Homo sapiens
  siRNA target sequence for FLJ23560 (NM_024685.2,1662-1680).
caggctaactgattattat

SEQ ID NO: 389188 - DNA, 19 bp, Homo sapiens
  siRNA target sequence for FLJ23560 (NM_024685.2,1681-1699).
gaaccattactcaagaaca

SEQ ID NO: 389189 - DNA, 19 bp, Homo sapiens
  siRNA target sequence for FLJ23560 (NM_024685.2,1684-1702).
ccattactcaagaacaatt

SEQ ID NO: 389190 - DNA, 19 bp, Homo sapiens
  siRNA target sequence for FLJ23560 (NM_024685.2,1698-1716).
caattccactgcttattca

SEQ ID NO: 389191 - DNA, 19 bp, Homo sapiens
  siRNA target sequence for FLJ23560 (NM_024685.2,1756-1774).
caggtcacaaatattacta

SEQ ID NO: 389192 - DNA, 19 bp, Homo sapiens
  siRNA target sequence for FLJ23560 (NM_024685.2,1758-1776).
ggtcacaaatattactaga

SEQ ID NO: 389193 - DNA, 19 bp, Homo sapiens
  siRNA target sequence for FLJ23560 (NM_024685.2,1869-1887).
gccagtaggtggtaatttt

SEQ ID NO: 389194 - DNA, 19 bp, Homo sapiens
  siRNA target sequence for FLJ23560 (NM_024685.2,1945-1963).
gaaaccatggttagtatga

SEQ ID NO: 389195 - DNA, 19 bp, Homo sapiens
  siRNA target sequence for FLJ23560 (NM_024685.2,1949-1967).
ccatggttagtatgataat

SEQ ID NO: 389196 - DNA, 19 bp, Homo sapiens
  siRNA target sequence for FLJ23560 (NM_024685.2,1950-1968).
catggttagtatgataata

SEQ ID NO: 389197 - DNA, 19 bp, Homo sapiens
  siRNA target sequence for FLJ23560 (NM_024685.2,1953-1971).
ggttagtatgataatagct

SEQ ID NO: 389198 - DNA, 19 bp, Homo sapiens
  siRNA target sequence for FLJ23560 (NM_024685.2,1985-2003).
gcattcccaaagtccttta

SEQ ID NO: 389199 - DNA, 19 bp, Homo sapiens
  siRNA target sequence for FLJ23560 (NM_024685.2,1986-2004).
cattcccaaagtcctttat

SEQ ID NO: 389200 - DNA, 19 bp, Homo sapiens
  siRNA target sequence for FLJ23560 (NM_024685.2,2055-2073).
ccatgcactgcaaaccaat

SEQ ID NO: 389201 - DNA, 19 bp, Homo sapiens
  siRNA target sequence for FLJ23560 (NM_024685.2,2104-2122).
gaatcagtaatgggtaaat

SEQ ID NO: 389202 - DNA, 19 bp, Homo sapiens
  siRNA target sequence for FLJ23560 (NM_024685.2,2108-2126).
cagtaatgggtaaatacca

SEQ ID NO: 389203 - DNA, 19 bp, Homo sapiens
  siRNA target sequence for FLJ23560 (NM_024685.2,2116-2134).
ggtaaataccagctactaa

SEQ ID NO: 389204 - DNA, 19 bp, Homo sapiens
  siRNA target sequence for FLJ23033 (NM_024686.3,426-444).
ggatttgaatacagaatta

SEQ ID NO: 389205 - DNA, 19 bp, Homo sapiens
  siRNA target sequence for FLJ23033 (NM_024686.3,538-556).
cgtttagtaatagatgaaa

SEQ ID NO: 389206 - DNA, 19 bp, Homo sapiens
  siRNA target sequence for FLJ23033 (NM_024686.3,735-753).
gtctcggcctctggattat

SEQ ID NO: 389207 - DNA, 19 bp, Homo sapiens
  siRNA target sequence for FLJ23033 (NM_024686.3,739-757).
cggcctctggattatacct

SEQ ID NO: 389208 - DNA, 19 bp, Homo sapiens
  siRNA target sequence for FLJ23033 (NM_024686.3,740-758).
ggcctctggattatacctt

SEQ ID NO: 389209 - DNA, 19 bp, Homo sapiens
  siRNA target sequence for FLJ23033 (NM_024686.3,741-759).
gcctctggattataccttt

SEQ ID NO: 389210 - DNA, 19 bp, Homo sapiens
  siRNA target sequence for FLJ23033 (NM_024686.3,787-805).
gaatatactcaattccaaa

SEQ ID NO: 389211 - DNA, 19 bp, Homo sapiens
  siRNA target sequence for FLJ23033 (NM_024686.3,877-895).
ggtcatgggatttctttga

SEQ ID NO: 389212 - DNA, 19 bp, Homo sapiens
  siRNA target sequence for FLJ23033 (NM_024686.3,883-901).
gggatttctttgataagaa

SEQ ID NO: 389213 - DNA, 19 bp, Homo sapiens
  siRNA target sequence for FLJ23033 (NM_024686.3,917-935).
catctcaggatcatttgat

SEQ ID NO: 389214 - DNA, 19 bp, Homo sapiens
  siRNA target sequence for FLJ23033 (NM_024686.3,978-996).
caagtttgacttacgaatt

SEQ ID NO: 389215 - DNA, 19 bp, Homo sapiens
  siRNA target sequence for FLJ23033 (NM_024686.3,1010-1028).
catcgtgtgatccactaaa

SEQ ID NO: 389216 - DNA, 19 bp, Homo sapiens
  siRNA target sequence for FLJ23033 (NM_024686.3,1013-1031).
cgtgtgatccactaaaaat

SEQ ID NO: 389217 - DNA, 19 bp, Homo sapiens
  siRNA target sequence for FLJ23033 (NM_024686.3,1062-1080).
gggtacagagaagtacatt

SEQ ID NO: 389218 - DNA, 19 bp, Homo sapiens
  siRNA target sequence for FLJ23033 (NM_024686.3,1071-1089).
gaagtacattccacctaat

SEQ ID NO: 389219 - DNA, 19 bp, Homo sapiens
  siRNA target sequence for FLJ23033 (NM_024686.3,1084-1102).
cctaatgagtccaatttga

SEQ ID NO: 389220 - DNA, 19 bp, Homo sapiens
  siRNA target sequence for FLJ23033 (NM_024686.3,1094-1112).
ccaatttgacccagttata

SEQ ID NO: 389221 - DNA, 19 bp, Homo sapiens
  siRNA target sequence for FLJ23033 (NM_024686.3,1131-1149).
ctccgtgaacaagcataat

SEQ ID NO: 389222 - DNA, 19 bp, Homo sapiens
  siRNA target sequence for FLJ23033 (NM_024686.3,1133-1151).
ccgtgaacaagcataatga

SEQ ID NO: 389223 - DNA, 19 bp, Homo sapiens
  siRNA target sequence for FLJ23033 (NM_024686.3,1153-1171).
cattttgaacgggatgaaa

SEQ ID NO: 389224 - DNA, 19 bp, Homo sapiens
  siRNA target sequence for FLJ23033 (NM_024686.3,1196-1214).
ccatcaaatggtttacaga

SEQ ID NO: 389225 - DNA, 19 bp, Homo sapiens
  siRNA target sequence for FLJ23033 (NM_024686.3,1237-1255).
gatgttgctaagttttgga

SEQ ID NO: 389226 - DNA, 19 bp, Homo sapiens
  siRNA target sequence for FLJ23033 (NM_024686.3,1243-1261).
gctaagttttggagtgata

SEQ ID NO: 389227 - DNA, 19 bp, Homo sapiens
  siRNA target sequence for FLJ23033 (NM_024686.3,1306-1324).
gtcctgcatgcctatcgaa

SEQ ID NO: 389228 - DNA, 19 bp, Homo sapiens
  siRNA target sequence for FLJ23033 (NM_024686.3,1311-1329).
gcatgcctatcgaatgtgt

SEQ ID NO: 389229 - DNA, 19 bp, Homo sapiens
  siRNA target sequence for FLJ23033 (NM_024686.3,1312-1330).
catgcctatcgaatgtgta

SEQ ID NO: 389230 - DNA, 19 bp, Homo sapiens
  siRNA target sequence for FLJ23033 (NM_024686.3,1542-1560).
cttggccaaacaaaaagct

SEQ ID NO: 389231 - DNA, 19 bp, Homo sapiens
  siRNA target sequence for FLJ23033 (NM_024686.3,1572-1590).
gaggctctatggtcaaaat

SEQ ID NO: 389232 - DNA, 19 bp, Homo sapiens
  siRNA target sequence for FLJ23033 (NM_024686.3,1576-1594).
ctctatggtcaaaattcaa

SEQ ID NO: 389233 - DNA, 19 bp, Homo sapiens
  siRNA target sequence for FLJ23033 (NM_024686.3,1653-1671).
gcggaaagaagagttgaaa

SEQ ID NO: 389234 - DNA, 19 bp, Homo sapiens
  siRNA target sequence for FLJ23033 (NM_024686.3,1676-1694).
gactcgctcaagtacgaaa

SEQ ID NO: 389235 - DNA, 19 bp, Homo sapiens
  siRNA target sequence for FLJ23033 (NM_024686.3,1695-1713).
gcagatctcacgagaagaa

SEQ ID NO: 389236 - DNA, 19 bp, Homo sapiens
  siRNA target sequence for FLJ23033 (NM_024686.3,1723-1741).
cgacatatggggaattata

SEQ ID NO: 389237 - DNA, 19 bp, Homo sapiens
  siRNA target sequence for FLJ23033 (NM_024686.3,1731-1749).
ggggaattatagacgaatt

SEQ ID NO: 389238 - DNA, 19 bp, Homo sapiens
  siRNA target sequence for FLJ23033 (NM_024686.3,1732-1750).
gggaattatagacgaattt

SEQ ID NO: 389239 - DNA, 19 bp, Homo sapiens
  siRNA target sequence for FLJ23033 (NM_024686.3,1733-1751).
ggaattatagacgaattta

SEQ ID NO: 389240 - DNA, 19 bp, Homo sapiens
  siRNA target sequence for FLJ23033 (NM_024686.3,1734-1752).
gaattatagacgaatttat

SEQ ID NO: 389241 - DNA, 19 bp, Homo sapiens
  siRNA target sequence for FLJ23033 (NM_024686.3,1980-1998).
gcctgagagtactgagata

SEQ ID NO: 389242 - DNA, 19 bp, Homo sapiens
  siRNA target sequence for FLJ23033 (NM_024686.3,1981-1999).
cctgagagtactgagataa

SEQ ID NO: 389243 - DNA, 19 bp, Homo sapiens
  siRNA target sequence for FLJ23033 (NM_024686.3,2136-2154).
caaccactacaaattaatt

SEQ ID NO: 389244 - DNA, 19 bp, Homo sapiens
  siRNA target sequence for FLJ23033 (NM_024686.3,2285-2303).
ctcggtcacattccttaaa

SEQ ID NO: 389245 - DNA, 19 bp, Homo sapiens
  siRNA target sequence for FLJ23033 (NM_024686.3,2305-2323).
cgtgcttcctcctacatga

SEQ ID NO: 389246 - DNA, 19 bp, Homo sapiens
  siRNA target sequence for FLJ23033 (NM_024686.3,2416-2434).
ctaacaagtcagaccttat

SEQ ID NO: 389247 - DNA, 19 bp, Homo sapiens
  siRNA target sequence for FLJ23033 (NM_024686.3,2420-2438).
caagtcagaccttatttgt

SEQ ID NO: 389248 - DNA, 19 bp, Homo sapiens
  siRNA target sequence for FLJ23033 (NM_024686.3,2423-2441).
gtcagaccttatttgttct

SEQ ID NO: 389249 - DNA, 19 bp, Homo sapiens
  siRNA target sequence for FLJ23033 (NM_024686.3,2457-2475).
ccggtttccaggaaagtca

SEQ ID NO: 389250 - DNA, 19 bp, Homo sapiens
  siRNA target sequence for FLJ23033 (NM_024686.3,2488-2506).
gaacttctgatagaagata

SEQ ID NO: 389251 - DNA, 19 bp, Homo sapiens
  siRNA target sequence for FLJ23033 (NM_024686.3,2519-2537).
ggaagtatcataaaaccaa

SEQ ID NO: 389252 - DNA, 19 bp, Homo sapiens
  siRNA target sequence for FLJ23033 (NM_024686.3,2543-2561).
cttcatattggctcataaa

SEQ ID NO: 389253 - DNA, 19 bp, Homo sapiens
  siRNA target sequence for FLJ23033 (NM_024686.3,2592-2610).
ggacatagtgaaaacaagt

SEQ ID NO: 389254 - DNA, 19 bp, Homo sapiens
  siRNA target sequence for FLJ23033 (NM_024686.3,2593-2611).
gacatagtgaaaacaagta

SEQ ID NO: 389255 - DNA, 19 bp, Homo sapiens
  siRNA target sequence for FLJ23033 (NM_024686.3,2673-2691).
gattttcaaccgggttttt

SEQ ID NO: 389256 - DNA, 19 bp, Homo sapiens
  siRNA target sequence for FLJ13031 (NM_024688.1,871-889).
gtgaaaatcctatgcttaa

SEQ ID NO: 389257 - DNA, 19 bp, Homo sapiens
  siRNA target sequence for FLJ13031 (NM_024688.1,955-973).
gacgtagcataccagataa

SEQ ID NO: 389258 - DNA, 19 bp, Homo sapiens
  siRNA target sequence for FLJ13031 (NM_024688.1,957-975).
cgtagcataccagataaaa

SEQ ID NO: 389259 - DNA, 19 bp, Homo sapiens
  siRNA target sequence for FLJ13031 (NM_024688.1,1054-1072).
ggcgtaatactcgtattgt

SEQ ID NO: 389260 - DNA, 19 bp, Homo sapiens
  siRNA target sequence for FLJ13031 (NM_024688.1,1055-1073).
gcgtaatactcgtattgta

SEQ ID NO: 389261 - DNA, 19 bp, Homo sapiens
  siRNA target sequence for FLJ13031 (NM_024688.1,1057-1075).
gtaatactcgtattgtagt

SEQ ID NO: 389262 - DNA, 19 bp, Homo sapiens
  siRNA target sequence for FLJ13031 (NM_024688.1,1063-1081).
ctcgtattgtagtaccaaa

SEQ ID NO: 389263 - DNA, 19 bp, Homo sapiens
  siRNA target sequence for FLJ13031 (NM_024688.1,1066-1084).
gtattgtagtaccaaatga

SEQ ID NO: 389264 - DNA, 19 bp, Homo sapiens
  siRNA target sequence for FLJ13031 (NM_024688.1,1169-1187).
caagacgtttcctttagaa

SEQ ID NO: 389265 - DNA, 19 bp, Homo sapiens
  siRNA target sequence for FLJ13031 (NM_024688.1,1199-1217).
ggatatatcacttgaacat

SEQ ID NO: 389266 - DNA, 19 bp, Homo sapiens
  siRNA target sequence for FLJ13031 (NM_024688.1,1336-1354).
gacgcttattaaatgatga

SEQ ID NO: 389267 - DNA, 19 bp, Homo sapiens
  siRNA target sequence for FLJ13031 (NM_024688.1,1338-1356).
cgcttattaaatgatgaat

SEQ ID NO: 389268 - DNA, 19 bp, Homo sapiens
  siRNA target sequence for FLJ13031 (NM_024688.1,1379-1397).
ccctgggcctgatatagaa

SEQ ID NO: 389269 - DNA, 19 bp, Homo sapiens
  siRNA target sequence for FLJ13031 (NM_024688.1,1383-1401).
gggcctgatatagaacaat

SEQ ID NO: 389270 - DNA, 19 bp, Homo sapiens
  siRNA target sequence for FLJ13031 (NM_024688.1,1384-1402).
ggcctgatatagaacaatt

SEQ ID NO: 389271 - DNA, 19 bp, Homo sapiens
  siRNA target sequence for FLJ13031 (NM_024688.1,1469-1487).
gactgatgaacgattgcat

SEQ ID NO: 389272 - DNA, 19 bp, Homo sapiens
  siRNA target sequence for FLJ13031 (NM_024688.1,1473-1491).
gatgaacgattgcatagta

SEQ ID NO: 389273 - DNA, 19 bp, Homo sapiens
  siRNA target sequence for FLJ13031 (NM_024688.1,1476-1494).
gaacgattgcatagtacaa

SEQ ID NO: 389274 - DNA, 19 bp, Homo sapiens
  siRNA target sequence for FLJ13031 (NM_024688.1,1504-1522).
gtacaataaatgatgcaat

SEQ ID NO: 389275 - DNA, 19 bp, Homo sapiens
  siRNA target sequence for FLJ13031 (NM_024688.1,1518-1536).
gcaattaagacgcagttaa

SEQ ID NO: 389276 - DNA, 19 bp, Homo sapiens
  siRNA target sequence for FLJ13031 (NM_024688.1,1529-1547).
gcagttaaagagaaagagt

SEQ ID NO: 389277 - DNA, 19 bp, Homo sapiens
  siRNA target sequence for FLJ13031 (NM_024688.1,1530-1548).
cagttaaagagaaagagtt

SEQ ID NO: 389278 - DNA, 19 bp, Homo sapiens
  siRNA target sequence for FLJ13031 (NM_024688.1,1593-1611).
gatataataaagcatctaa

SEQ ID NO: 389279 - DNA, 19 bp, Homo sapiens
  siRNA target sequence for FLJ13031 (NM_024688.1,1605-1623).
catctaatcaacatacagt

SEQ ID NO: 389280 - DNA, 19 bp, Homo sapiens
  siRNA target sequence for FLJ13031 (NM_024688.1,1689-1707).
gagtcaaccacgacacaat

SEQ ID NO: 389281 - DNA, 19 bp, Homo sapiens
  siRNA target sequence for FLJ13031 (NM_024688.1,1691-1709).
gtcaaccacgacacaatta

SEQ ID NO: 389282 - DNA, 19 bp, Homo sapiens
  siRNA target sequence for FLJ13031 (NM_024688.1,1693-1711).
caaccacgacacaattaaa

SEQ ID NO: 389283 - DNA, 19 bp, Homo sapiens
  siRNA target sequence for FLJ13031 (NM_024688.1,1858-1876).
gaccaatcagtgcacaatt

SEQ ID NO: 389284 - DNA, 19 bp, Homo sapiens
  siRNA target sequence for FLJ13031 (NM_024688.1,1860-1878).
ccaatcagtgcacaattaa

SEQ ID NO: 389285 - DNA, 19 bp, Homo sapiens
  siRNA target sequence for FLJ13031 (NM_024688.1,1966-1984).
ctcactatgatgtgaactt

SEQ ID NO: 389286 - DNA, 19 bp, Homo sapiens
  siRNA target sequence for FLJ13031 (NM_024688.1,2003-2021).
gtccgtacaacgtcaagaa

SEQ ID NO: 389287 - DNA, 19 bp, Homo sapiens
  siRNA target sequence for FLJ13031 (NM_024688.1,2013-2031).
cgtcaagaaggtatcttta

SEQ ID NO: 389288 - DNA, 19 bp, Homo sapiens
  siRNA target sequence for FLJ13031 (NM_024688.1,2027-2045).
ctttactaggagcattaca

SEQ ID NO: 389289 - DNA, 19 bp, Homo sapiens
  siRNA target sequence for FLJ13031 (NM_024688.1,2050-2068).
gtaaattcccaacaaaagt

SEQ ID NO: 389290 - DNA, 19 bp, Homo sapiens
  siRNA target sequence for FLJ13031 (NM_024688.1,2059-2077).
caacaaaagtgatcaattt

SEQ ID NO: 389291 - DNA, 19 bp, Homo sapiens
  siRNA target sequence for FLJ13031 (NM_024688.1,2131-2149).
ctgcaccttcaaaagcaat

SEQ ID NO: 389292 - DNA, 19 bp, Homo sapiens
  siRNA target sequence for FLJ13031 (NM_024688.1,2133-2151).
gcaccttcaaaagcaattt

SEQ ID NO: 389293 - DNA, 19 bp, Homo sapiens
  siRNA target sequence for FLJ13031 (NM_024688.1,2136-2154).
ccttcaaaagcaatttata

SEQ ID NO: 389294 - DNA, 19 bp, Homo sapiens
  siRNA target sequence for FLJ13031 (NM_024688.1,2167-2185).
ctggtccaagcttttctaa

SEQ ID NO: 389295 - DNA, 19 bp, Homo sapiens
  siRNA target sequence for FLJ13031 (NM_024688.1,2216-2234).
cccttcagggcattcgaaa

SEQ ID NO: 389296 - DNA, 19 bp, Homo sapiens
  siRNA target sequence for FLJ13031 (NM_024688.1,2221-2239).
cagggcattcgaaagttgt

SEQ ID NO: 389297 - DNA, 19 bp, Homo sapiens
  siRNA target sequence for FLJ13031 (NM_024688.1,2223-2241).
gggcattcgaaagttgtta

SEQ ID NO: 389298 - DNA, 19 bp, Homo sapiens
  siRNA target sequence for FLJ13031 (NM_024688.1,2271-2289).
ctgcctactgtgaccaata

SEQ ID NO: 389299 - DNA, 19 bp, Homo sapiens
  siRNA target sequence for FLJ13031 (NM_024688.1,2273-2291).
gcctactgtgaccaataca

SEQ ID NO: 389300 - DNA, 19 bp, Homo sapiens
  siRNA target sequence for FLJ13031 (NM_024688.1,2296-2314).
gaaaacctacctataaagt

SEQ ID NO: 389301 - DNA, 19 bp, Homo sapiens
  siRNA target sequence for FLJ13031 (NM_024688.1,2323-2341).
ctgctgcccgaaaatctgt

SEQ ID NO: 389302 - DNA, 19 bp, Homo sapiens
  siRNA target sequence for FLJ13031 (NM_024688.1,2338-2356).
ctgtaccacacccatactt

SEQ ID NO: 389303 - DNA, 19 bp, Homo sapiens
  siRNA target sequence for FLJ13031 (NM_024688.1,2340-2358).
gtaccacacccatactttt

SEQ ID NO: 389304 - DNA, 19 bp, Homo sapiens
  siRNA target sequence for FLJ14103 (NM_024689.1,205-223).
gtcagaaccagctacaatt

SEQ ID NO: 389305 - DNA, 19 bp, Homo sapiens
  siRNA target sequence for FLJ14103 (NM_024689.1,231-249).
gactttcctcggtcttgat

SEQ ID NO: 389306 - DNA, 19 bp, Homo sapiens
  siRNA target sequence for FLJ14103 (NM_024689.1,233-251).
ctttcctcggtcttgataa

SEQ ID NO: 389307 - DNA, 19 bp, Homo sapiens
  siRNA target sequence for FLJ14103 (NM_024689.1,238-256).
ctcggtcttgataaatgca

SEQ ID NO: 389308 - DNA, 19 bp, Homo sapiens
  siRNA target sequence for FLJ14103 (NM_024689.1,259-277).
gcctgcatcgggacatcta

SEQ ID NO: 389309 - DNA, 19 bp, Homo sapiens
  siRNA target sequence for FLJ14103 (NM_024689.1,346-364).
cccgattccttgctttctt

SEQ ID NO: 389310 - DNA, 19 bp, Homo sapiens
  siRNA target sequence for FLJ14103 (NM_024689.1,347-365).
ccgattccttgctttctta

SEQ ID NO: 389311 - DNA, 19 bp, Homo sapiens
  siRNA target sequence for FLJ14103 (NM_024689.1,419-437).
gactggtcagcaaatatca

SEQ ID NO: 389312 - DNA, 19 bp, Homo sapiens
  siRNA target sequence for FLJ14103 (NM_024689.1,501-519).
gcgtgtcctgcggaaaaca

SEQ ID NO: 389313 - DNA, 19 bp, Homo sapiens
  siRNA target sequence for FLJ14103 (NM_024689.1,503-521).
gtgtcctgcggaaaacaga

SEQ ID NO: 389314 - DNA, 19 bp, Homo sapiens
  siRNA target sequence for FLJ21069 (NM_024692.3,266-284).
ggaaatcctttgtttggaa

SEQ ID NO: 389315 - DNA, 19 bp, Homo sapiens
  siRNA target sequence for FLJ21069 (NM_024692.3,306-324).
cttctgataccccagttat

SEQ ID NO: 389316 - DNA, 19 bp, Homo sapiens
  siRNA target sequence for FLJ21069 (NM_024692.3,309-327).
ctgataccccagttatctt

SEQ ID NO: 389317 - DNA, 19 bp, Homo sapiens
  siRNA target sequence for FLJ21069 (NM_024692.3,311-329).
gataccccagttatctttt

SEQ ID NO: 389318 - DNA, 19 bp, Homo sapiens
  siRNA target sequence for FLJ21069 (NM_024692.3,315-333).
ccccagttatcttttccat

SEQ ID NO: 389319 - DNA, 19 bp, Homo sapiens
  siRNA target sequence for FLJ21069 (NM_024692.3,511-529).
gagaggttgcaatgtgaat

SEQ ID NO: 389320 - DNA, 19 bp, Homo sapiens
  siRNA target sequence for FLJ21069 (NM_024692.3,515-533).
ggttgcaatgtgaatgata

SEQ ID NO: 389321 - DNA, 19 bp, Homo sapiens
  siRNA target sequence for FLJ21069 (NM_024692.3,534-552).
gagatggattgacagatat

SEQ ID NO: 389322 - DNA, 19 bp, Homo sapiens
  siRNA target sequence for FLJ21069 (NM_024692.3,544-562).
gacagatatgactctttta

SEQ ID NO: 389323 - DNA, 19 bp, Homo sapiens
  siRNA target sequence for FLJ21069 (NM_024692.3,640-658).
cctgggagcagacattagt

SEQ ID NO: 389324 - DNA, 19 bp, Homo sapiens
  siRNA target sequence for FLJ21069 (NM_024692.3,641-659).
ctgggagcagacattagtt

SEQ ID NO: 389325 - DNA, 19 bp, Homo sapiens
  siRNA target sequence for FLJ21069 (NM_024692.3,662-680).
cggagtcgctggacaaaca

SEQ ID NO: 389326 - DNA, 19 bp, Homo sapiens
  siRNA target sequence for FLJ21069 (NM_024692.3,663-681).
ggagtcgctggacaaacat

SEQ ID NO: 389327 - DNA, 19 bp, Homo sapiens
  siRNA target sequence for FLJ21069 (NM_024692.3,691-709).
gcattatgctgcttatttt

SEQ ID NO: 389328 - DNA, 19 bp, Homo sapiens
  siRNA target sequence for FLJ21069 (NM_024692.3,857-875).
ggagcaaatcctgcattta

SEQ ID NO: 389329 - DNA, 19 bp, Homo sapiens
  siRNA target sequence for FLJ21069 (NM_024692.3,860-878).
gcaaatcctgcatttagga

SEQ ID NO: 389330 - DNA, 19 bp, Homo sapiens
  siRNA target sequence for FLJ21069 (NM_024692.3,920-938).
gtagatatgccgttagaga

SEQ ID NO: 389331 - DNA, 19 bp, Homo sapiens
  siRNA target sequence for FLJ21069 (NM_024692.3,949-967).
cgcagccactgctaaggaa

SEQ ID NO: 389332 - DNA, 19 bp, Homo sapiens
  siRNA target sequence for FLJ21069 (NM_024692.3,989-1007).
gcggtgcctctgtcatgta

SEQ ID NO: 389333 - DNA, 19 bp, Homo sapiens
  siRNA target sequence for FLJ21069 (NM_024692.3,990-1008).
cggtgcctctgtcatgtaa

SEQ ID NO: 389334 - DNA, 19 bp, Homo sapiens
  siRNA target sequence for FLJ21069 (NM_024692.3,992-1010).
gtgcctctgtcatgtaaca

SEQ ID NO: 389335 - DNA, 19 bp, Homo sapiens
  siRNA target sequence for FLJ21069 (NM_024692.3,995-1013).
cctctgtcatgtaacatct

SEQ ID NO: 389336 - DNA, 19 bp, Homo sapiens
  siRNA target sequence for FLJ21069 (NM_024692.3,1018-1036).
ggccatgctcccaaattat

SEQ ID NO: 389337 - DNA, 19 bp, Homo sapiens
  siRNA target sequence for FLJ21069 (NM_024692.3,1020-1038).
ccatgctcccaaattatga

SEQ ID NO: 389338 - DNA, 19 bp, Homo sapiens
  siRNA target sequence for FLJ21069 (NM_024692.3,1021-1039).
catgctcccaaattatgat

SEQ ID NO: 389339 - DNA, 19 bp, Homo sapiens
  siRNA target sequence for FLJ21069 (NM_024692.3,1024-1042).
gctcccaaattatgatcat

SEQ ID NO: 389340 - DNA, 19 bp, Homo sapiens
  siRNA target sequence for FLJ21069 (NM_024692.3,1065-1083).
cgtcacttggcctgaagtt

SEQ ID NO: 389341 - DNA, 19 bp, Homo sapiens
  siRNA target sequence for FLJ21069 (NM_024692.3,1081-1099).
gttgggggatcgtgttgtt

SEQ ID NO: 389342 - DNA, 19 bp, Homo sapiens
  siRNA target sequence for FLJ21069 (NM_024692.3,1084-1102).
gggggatcgtgttgttatt

SEQ ID NO: 389343 - DNA, 19 bp, Homo sapiens
  siRNA target sequence for FLJ21069 (NM_024692.3,1087-1105).
ggatcgtgttgttattgca

SEQ ID NO: 389344 - DNA, 19 bp, Homo sapiens
  siRNA target sequence for FLJ21069 (NM_024692.3,1107-1125).
gacagaaggttggtacatt

SEQ ID NO: 389345 - DNA, 19 bp, Homo sapiens
  siRNA target sequence for FLJ21069 (NM_024692.3,1109-1127).
cagaaggttggtacattaa

SEQ ID NO: 389346 - DNA, 19 bp, Homo sapiens
  siRNA target sequence for FLJ21069 (NM_024692.3,1111-1129).
gaaggttggtacattaaga

SEQ ID NO: 389347 - DNA, 19 bp, Homo sapiens
  siRNA target sequence for FLJ21069 (NM_024692.3,1114-1132).
ggttggtacattaagattt

SEQ ID NO: 389348 - DNA, 19 bp, Homo sapiens
  siRNA target sequence for FLJ21069 (NM_024692.3,1115-1133).
gttggtacattaagatttt

SEQ ID NO: 389349 - DNA, 19 bp, Homo sapiens
  siRNA target sequence for FLJ21069 (NM_024692.3,1136-1154).
ggaacaactgaatttgcaa

SEQ ID NO: 389350 - DNA, 19 bp, Homo sapiens
  siRNA target sequence for FLJ21069 (NM_024692.3,1159-1177).
gcagtgggctggcattgaa

SEQ ID NO: 389351 - DNA, 19 bp, Homo sapiens
  siRNA target sequence for FLJ21069 (NM_024692.3,1273-1291).
gataagtaaagcaaaaggt

SEQ ID NO: 389352 - DNA, 19 bp, Homo sapiens
  siRNA target sequence for FLJ21069 (NM_024692.3,1342-1360).
catcaggtcccagaaaatt

SEQ ID NO: 389353 - DNA, 19 bp, Homo sapiens
  siRNA target sequence for FLJ21069 (NM_024692.3,1375-1393).
gacgtcaaaagtaaatact

SEQ ID NO: 389354 - DNA, 19 bp, Homo sapiens
  siRNA target sequence for FLJ21069 (NM_024692.3,1565-1583).
gcaatcagcagtaacaaga

SEQ ID NO: 389355 - DNA, 19 bp, Homo sapiens
  siRNA target sequence for FLJ21069 (NM_024692.3,1643-1661).
gcaacatctacagcaaata

SEQ ID NO: 389356 - DNA, 19 bp, Homo sapiens
  siRNA target sequence for FLJ21069 (NM_024692.3,1687-1705).
cctcggagagagagtgtta

SEQ ID NO: 389357 - DNA, 19 bp, Homo sapiens
  siRNA target sequence for FLJ21069 (NM_024692.3,1719-1737).
gactgggcaccattaggtt

SEQ ID NO: 389358 - DNA, 19 bp, Homo sapiens
  siRNA target sequence for FLJ21069 (NM_024692.3,1756-1774).
cgctccaggatattggtat

SEQ ID NO: 389359 - DNA, 19 bp, Homo sapiens
  siRNA target sequence for FLJ21069 (NM_024692.3,1760-1778).
ccaggatattggtatggta

SEQ ID NO: 389360 - DNA, 19 bp, Homo sapiens
  siRNA target sequence for FLJ21069 (NM_024692.3,1761-1779).
caggatattggtatggtat

SEQ ID NO: 389361 - DNA, 19 bp, Homo sapiens
  siRNA target sequence for FLJ21069 (NM_024692.3,1842-1860).
gttctccaagatatggaat

SEQ ID NO: 389362 - DNA, 19 bp, Homo sapiens
  siRNA target sequence for FLJ21069 (NM_024692.3,1845-1863).
ctccaagatatggaatatt

SEQ ID NO: 389363 - DNA, 19 bp, Homo sapiens
  siRNA target sequence for FLJ21069 (NM_024692.3,1872-1890).
catccagggtgcaaagagt

SEQ ID NO: 389364 - DNA, 19 bp, Homo sapiens
  siRNA target sequence for FLJ21069 (NM_024692.3,1876-1894).
cagggtgcaaagagtaaca

SEQ ID NO: 389365 - DNA, 19 bp, Homo sapiens
  siRNA target sequence for FLJ21069 (NM_024692.3,1878-1896).
gggtgcaaagagtaacaga

SEQ ID NO: 389366 - DNA, 19 bp, Homo sapiens
  siRNA target sequence for FLJ21069 (NM_024692.3,1879-1897).
ggtgcaaagagtaacagat

SEQ ID NO: 389367 - DNA, 19 bp, Homo sapiens
  siRNA target sequence for FLJ21069 (NM_024692.3,1880-1898).
gtgcaaagagtaacagatt

SEQ ID NO: 389368 - DNA, 19 bp, Homo sapiens
  siRNA target sequence for FLJ21069 (NM_024692.3,1904-1922).
gataccctttcagaaattt

SEQ ID NO: 389369 - DNA, 19 bp, Homo sapiens
  siRNA target sequence for FLJ21069 (NM_024692.3,1940-1958).
cattcttatcctggtttta

SEQ ID NO: 389370 - DNA, 19 bp, Homo sapiens
  siRNA target sequence for FLJ21069 (NM_024692.3,2065-2083).
caccgcaggtggcattgaa

SEQ ID NO: 389371 - DNA, 19 bp, Homo sapiens
  siRNA target sequence for FLJ21069 (NM_024692.3,2120-2138).
ctcacgagctccaatgaga

SEQ ID NO: 389372 - DNA, 19 bp, Homo sapiens
  siRNA target sequence for FLJ21069 (NM_024692.3,2137-2155).
gatgggtactgttaggtat

SEQ ID NO: 389373 - DNA, 19 bp, Homo sapiens
  siRNA target sequence for FLJ21069 (NM_024692.3,2204-2222).
cgaagcgccaagggaaaaa

SEQ ID NO: 389374 - DNA, 19 bp, Homo sapiens
  siRNA target sequence for FLJ21069 (NM_024692.3,2237-2255).
ggtgacaagcgctatttca

SEQ ID NO: 389375 - DNA, 19 bp, Homo sapiens
  siRNA target sequence for FLJ21069 (NM_024692.3,2265-2283).
cgaaccatggagtcttagt

SEQ ID NO: 389376 - DNA, 19 bp, Homo sapiens
  siRNA target sequence for FLJ21069 (NM_024692.3,2266-2284).
gaaccatggagtcttagtt

SEQ ID NO: 389377 - DNA, 19 bp, Homo sapiens
  siRNA target sequence for FLJ21069 (NM_024692.3,2297-2315).
gtgacctatcggggaatta

SEQ ID NO: 389378 - DNA, 19 bp, Homo sapiens
  siRNA target sequence for FLJ21069 (NM_024692.3,2299-2317).
gacctatcggggaattaat

SEQ ID NO: 389379 - DNA, 19 bp, Homo sapiens
  siRNA target sequence for FLJ21069 (NM_024692.3,2327-2345).
cttgtggatgagaattgtt

SEQ ID NO: 389380 - DNA, 19 bp, Homo sapiens
  siRNA target sequence for FLJ23058 (NM_024696.1,302-320).
gcatctcacctgtgttcaa

SEQ ID NO: 389381 - DNA, 19 bp, Homo sapiens
  siRNA target sequence for FLJ23058 (NM_024696.1,381-399).
gtatctgctgaatcatatt

SEQ ID NO: 389382 - DNA, 19 bp, Homo sapiens
  siRNA target sequence for FLJ23058 (NM_024696.1,390-408).
gaatcatattccaacctat

SEQ ID NO: 389383 - DNA, 19 bp, Homo sapiens
  siRNA target sequence for FLJ23058 (NM_024696.1,401-419).
caacctatatctgatttct

SEQ ID NO: 389384 - DNA, 19 bp, Homo sapiens
  siRNA target sequence for FLJ23058 (NM_024696.1,566-584).
cctaactttcctgaaagta

SEQ ID NO: 389385 - DNA, 19 bp, Homo sapiens
  siRNA target sequence for SNIP1 (NM_024700.2,294-312).
gccggtccccacccaaaaa

SEQ ID NO: 389386 - DNA, 19 bp, Homo sapiens
  siRNA target sequence for SNIP1 (NM_024700.2,296-314).
cggtccccacccaaaaaga

SEQ ID NO: 389387 - DNA, 19 bp, Homo sapiens
  siRNA target sequence for SNIP1 (NM_024700.2,343-361).
gtctcctcgcagtaagaga

SEQ ID NO: 389388 - DNA, 19 bp, Homo sapiens
  siRNA target sequence for SNIP1 (NM_024700.2,695-713).
cggcctggtggcaacaaca

SEQ ID NO: 389389 - DNA, 19 bp, Homo sapiens
  siRNA target sequence for SNIP1 (NM_024700.2,699-717).
ctggtggcaacaacaaaga

SEQ ID NO: 389390 - DNA, 19 bp, Homo sapiens
  siRNA target sequence for SNIP1 (NM_024700.2,722-740).
gaggtgcccgctaaagaaa

SEQ ID NO: 389391 - DNA, 19 bp, Homo sapiens
  siRNA target sequence for SNIP1 (NM_024700.2,724-742).
ggtgcccgctaaagaaaaa

SEQ ID NO: 389392 - DNA, 19 bp, Homo sapiens
  siRNA target sequence for SNIP1 (NM_024700.2,727-745).
gcccgctaaagaaaaacca

SEQ ID NO: 389393 - DNA, 19 bp, Homo sapiens
  siRNA target sequence for SNIP1 (NM_024700.2,728-746).
cccgctaaagaaaaaccaa

SEQ ID NO: 389394 - DNA, 19 bp, Homo sapiens
  siRNA target sequence for SNIP1 (NM_024700.2,770-788).
cttgaggacaccaacactt

SEQ ID NO: 389395 - DNA, 19 bp, Homo sapiens
  siRNA target sequence for SNIP1 (NM_024700.2,786-804).
ctttccggggtgtagtcat

SEQ ID NO: 389396 - DNA, 19 bp, Homo sapiens
  siRNA target sequence for SNIP1 (NM_024700.2,790-808).
ccggggtgtagtcattaaa

SEQ ID NO: 389397 - DNA, 19 bp, Homo sapiens
  siRNA target sequence for SNIP1 (NM_024700.2,791-809).
cggggtgtagtcattaaat

SEQ ID NO: 389398 - DNA, 19 bp, Homo sapiens
  siRNA target sequence for SNIP1 (NM_024700.2,792-810).
ggggtgtagtcattaaata

SEQ ID NO: 389399 - DNA, 19 bp, Homo sapiens
  siRNA target sequence for SNIP1 (NM_024700.2,849-867).
ggcgtctctacccatttaa

SEQ ID NO: 389400 - DNA, 19 bp, Homo sapiens
  siRNA target sequence for SNIP1 (NM_024700.2,850-868).
gcgtctctacccatttaaa

SEQ ID NO: 389401 - DNA, 19 bp, Homo sapiens
  siRNA target sequence for SNIP1 (NM_024700.2,851-869).
cgtctctacccatttaaaa

SEQ ID NO: 389402 - DNA, 19 bp, Homo sapiens
  siRNA target sequence for SNIP1 (NM_024700.2,878-896).
gtgcttccagtcatgtaca

SEQ ID NO: 389403 - DNA, 19 bp, Homo sapiens
  siRNA target sequence for SNIP1 (NM_024700.2,880-898).
gcttccagtcatgtacata

SEQ ID NO: 389404 - DNA, 19 bp, Homo sapiens
  siRNA target sequence for SNIP1 (NM_024700.2,935-953).
cgcattgcagacattccaa

SEQ ID NO: 389405 - DNA, 19 bp, Homo sapiens
  siRNA target sequence for SNIP1 (NM_024700.2,956-974).
gatcacccgtcttgttcaa

SEQ ID NO: 389406 - DNA, 19 bp, Homo sapiens
  siRNA target sequence for SNIP1 (NM_024700.2,977-995).
cagcatgcggtctttcaat

SEQ ID NO: 389407 - DNA, 19 bp, Homo sapiens
  siRNA target sequence for SNIP1 (NM_024700.2,979-997).
gcatgcggtctttcaatat

SEQ ID NO: 389408 - DNA, 19 bp, Homo sapiens
  siRNA target sequence for SNIP1 (NM_024700.2,1087-1105).
cttaaacaacaaacgtatt

SEQ ID NO: 389409 - DNA, 19 bp, Homo sapiens
  siRNA target sequence for SNIP1 (NM_024700.2,1108-1126).
gccacagagatactatgaa

SEQ ID NO: 389410 - DNA, 19 bp, Homo sapiens
  siRNA target sequence for SNIP1 (NM_024700.2,1138-1156).
ggatgtactcaaatttgga

SEQ ID NO: 389411 - DNA, 19 bp, Homo sapiens
  siRNA target sequence for SNIP1 (NM_024700.2,1145-1163).
ctcaaatttggattcagta

SEQ ID NO: 389412 - DNA, 19 bp, Homo sapiens
  siRNA target sequence for SNIP1 (NM_024700.2,1189-1207).
gtcgtcggacacttctgaa

SEQ ID NO: 389413 - DNA, 19 bp, Homo sapiens
  siRNA target sequence for SNIP1 (NM_024700.2,1191-1209).
cgtcggacacttctgaaat

SEQ ID NO: 389414 - DNA, 19 bp, Homo sapiens
  siRNA target sequence for SNIP1 (NM_024700.2,1192-1210).
gtcggacacttctgaaata

SEQ ID NO: 389415 - DNA, 19 bp, Homo sapiens
  siRNA target sequence for SNIP1 (NM_024700.2,1196-1214).
gacacttctgaaatagaca

SEQ ID NO: 389416 - DNA, 19 bp, Homo sapiens
  siRNA target sequence for FLJ13841 (NM_024702.1,371-389).
ccctttacttgcaatgaga

SEQ ID NO: 389417 - DNA, 19 bp, Homo sapiens
  siRNA target sequence for FLJ13841 (NM_024702.1,372-390).
cctttacttgcaatgagaa

SEQ ID NO: 389418 - DNA, 19 bp, Homo sapiens
  siRNA target sequence for FLJ13841 (NM_024702.1,426-444).
gtaaaaactcgattacttt

SEQ ID NO: 389419 - DNA, 19 bp, Homo sapiens
  siRNA target sequence for FLJ13841 (NM_024702.1,467-485).
cccaagtgccctaaatcta

SEQ ID NO: 389420 - DNA, 19 bp, Homo sapiens
  siRNA target sequence for FLJ13841 (NM_024702.1,468-486).
ccaagtgccctaaatctaa

SEQ ID NO: 389421 - DNA, 19 bp, Homo sapiens
  siRNA target sequence for FLJ13841 (NM_024702.1,544-562).
caagtctgtcgcaaatgga

SEQ ID NO: 389422 - DNA, 19 bp, Homo sapiens
  siRNA target sequence for FLJ13841 (NM_024702.1,750-768).
ctcggccttctgcatttgt

SEQ ID NO: 389423 - DNA, 19 bp, Homo sapiens
  siRNA target sequence for FLJ13841 (NM_024702.1,924-942).
caccagagtttccacataa

SEQ ID NO: 389424 - DNA, 19 bp, Homo sapiens
  siRNA target sequence for FLJ13841 (NM_024702.1,1001-1019).
gagtacccgcctcactttt

SEQ ID NO: 389425 - DNA, 19 bp, Homo sapiens
  siRNA target sequence for FLJ13841 (NM_024702.1,1006-1024).
cccgcctcacttttacaca

SEQ ID NO: 389426 - DNA, 19 bp, Homo sapiens
  siRNA target sequence for FLJ13841 (NM_024702.1,1176-1194).
cagccacatacgatcacta

SEQ ID NO: 389427 - DNA, 19 bp, Homo sapiens
  siRNA target sequence for FLJ13841 (NM_024702.1,1218-1236).
ctaacctgccgattcctta

SEQ ID NO: 389428 - DNA, 19 bp, Homo sapiens
  siRNA target sequence for FLJ13841 (NM_024702.1,1226-1244).
ccgattccttacggatttt

SEQ ID NO: 389429 - DNA, 19 bp, Homo sapiens
  siRNA target sequence for FLJ13841 (NM_024702.1,1227-1245).
cgattccttacggatttta

SEQ ID NO: 389430 - DNA, 19 bp, Homo sapiens
  siRNA target sequence for FLJ13841 (NM_024702.1,1318-1336).
ctctcacctgcttgaagaa

SEQ ID NO: 389431 - DNA, 19 bp, Homo sapiens
  siRNA target sequence for FLJ13841 (NM_024702.1,1359-1377).
cgagtccttccaggttaaa

SEQ ID NO: 389432 - DNA, 19 bp, Homo sapiens
  siRNA target sequence for FLJ13841 (NM_024702.1,1380-1398).
cttcggaccccaacagaaa

SEQ ID NO: 389433 - DNA, 19 bp, Homo sapiens
  siRNA target sequence for FLJ13841 (NM_024702.1,1383-1401).
cggaccccaacagaaaaca

SEQ ID NO: 389434 - DNA, 19 bp, Homo sapiens
  siRNA target sequence for FLJ13841 (NM_024702.1,1405-1423).
cgagttcgaaagtccaatt

SEQ ID NO: 389435 - DNA, 19 bp, Homo sapiens
  siRNA target sequence for FLJ13841 (NM_024702.1,1408-1426).
gttcgaaagtccaattcct

SEQ ID NO: 389436 - DNA, 19 bp, Homo sapiens
  siRNA target sequence for FLJ13841 (NM_024702.1,1460-1478).
gacacggaagggtccaaaa

SEQ ID NO: 389437 - DNA, 19 bp, Homo sapiens
  siRNA target sequence for FLJ13841 (NM_024702.1,1707-1725).
ctccagtaagcctcaatgt

SEQ ID NO: 389438 - DNA, 19 bp, Homo sapiens
  siRNA target sequence for FLJ13841 (NM_024702.1,1710-1728).
cagtaagcctcaatgttgt

SEQ ID NO: 389439 - DNA, 19 bp, Homo sapiens
  siRNA target sequence for FLJ13841 (NM_024702.1,1918-1936).
gcaggaccttccactcaat

SEQ ID NO: 389440 - DNA, 19 bp, Homo sapiens
  siRNA target sequence for FLJ13841 (NM_024702.1,1922-1940).
gaccttccactcaatctct

SEQ ID NO: 389441 - DNA, 19 bp, Homo sapiens
  siRNA target sequence for FLJ22593 (NM_024703.2,1014-1032).
ccagaccccaacatagctt

SEQ ID NO: 389442 - DNA, 19 bp, Homo sapiens
  siRNA target sequence for FLJ13639 (NM_024705.1,228-246).
cgccaagcgagaacatttt

SEQ ID NO: 389443 - DNA, 19 bp, Homo sapiens
  siRNA target sequence for FLJ13639 (NM_024705.1,229-247).
gccaagcgagaacattttt

SEQ ID NO: 389444 - DNA, 19 bp, Homo sapiens
  siRNA target sequence for FLJ13639 (NM_024705.1,341-359).
gcaggttgcatggtcaata

SEQ ID NO: 389445 - DNA, 19 bp, Homo sapiens
  siRNA target sequence for FLJ13639 (NM_024705.1,342-360).
caggttgcatggtcaataa

SEQ ID NO: 389446 - DNA, 19 bp, Homo sapiens
  siRNA target sequence for FLJ13639 (NM_024705.1,524-542).
gatctccagtccgaaagaa

SEQ ID NO: 389447 - DNA, 19 bp, Homo sapiens
  siRNA target sequence for FLJ13639 (NM_024705.1,532-550).
gtccgaaagaacaccattt

SEQ ID NO: 389448 - DNA, 19 bp, Homo sapiens
  siRNA target sequence for FLJ13639 (NM_024705.1,534-552).
ccgaaagaacaccatttga

SEQ ID NO: 389449 - DNA, 19 bp, Homo sapiens
  siRNA target sequence for FLJ13639 (NM_024705.1,535-553).
cgaaagaacaccatttgat

SEQ ID NO: 389450 - DNA, 19 bp, Homo sapiens
  siRNA target sequence for FLJ13639 (NM_024705.1,543-561).
caccatttgatggaactat

SEQ ID NO: 389451 - DNA, 19 bp, Homo sapiens
  siRNA target sequence for GEMIN7 (NM_024707.1,350-368).
gtgtcccatagctcaagaa

SEQ ID NO: 389452 - DNA, 19 bp, Homo sapiens
  siRNA target sequence for GEMIN7 (NM_024707.1,569-587).
ggcgctgctccgatgtagt

SEQ ID NO: 389453 - DNA, 19 bp, Homo sapiens
  siRNA target sequence for GEMIN7 (NM_024707.1,575-593).
gctccgatgtagtgacatt

SEQ ID NO: 389454 - DNA, 19 bp, Homo sapiens
  siRNA target sequence for GEMIN7 (NM_024707.1,576-594).
ctccgatgtagtgacatta

SEQ ID NO: 389455 - DNA, 19 bp, Homo sapiens
  siRNA target sequence for GEMIN7 (NM_024707.1,579-597).
cgatgtagtgacattattt

SEQ ID NO: 389456 - DNA, 19 bp, Homo sapiens
  siRNA target sequence for ASB7 (NM_024708.2,779-797).
gcgaaagatgctagaacaa

SEQ ID NO: 389457 - DNA, 19 bp, Homo sapiens
  siRNA target sequence for ASB7 (NM_024708.2,898-916).
gagctgatcctacagttaa

SEQ ID NO: 389458 - DNA, 19 bp, Homo sapiens
  siRNA target sequence for ASB7 (NM_024708.2,903-921).
gatcctacagttaaagact

SEQ ID NO: 389459 - DNA, 19 bp, Homo sapiens
  siRNA target sequence for ASB7 (NM_024708.2,906-924).
cctacagttaaagacttaa

SEQ ID NO: 389460 - DNA, 19 bp, Homo sapiens
  siRNA target sequence for ASB7 (NM_024708.2,972-990).
cgcattgcacgcttgatgt

SEQ ID NO: 389461 - DNA, 19 bp, Homo sapiens
  siRNA target sequence for ASB7 (NM_024708.2,973-991).
gcattgcacgcttgatgtt

SEQ ID NO: 389462 - DNA, 19 bp, Homo sapiens
  siRNA target sequence for ASB7 (NM_024708.2,974-992).
cattgcacgcttgatgtta

SEQ ID NO: 389463 - DNA, 19 bp, Homo sapiens
  siRNA target sequence for ASB7 (NM_024708.2,978-996).
gcacgcttgatgttagaat

SEQ ID NO: 389464 - DNA, 19 bp, Homo sapiens
  siRNA target sequence for ASB7 (NM_024708.2,1004-1022).
caggagcgacatcattaat

SEQ ID NO: 389465 - DNA, 19 bp, Homo sapiens
  siRNA target sequence for ASB7 (NM_024708.2,1010-1028).
cgacatcattaatgcaaaa

SEQ ID NO: 389466 - DNA, 19 bp, Homo sapiens
  siRNA target sequence for ASB7 (NM_024708.2,1067-1085).
ctacggcagggactcattt

SEQ ID NO: 389467 - DNA, 19 bp, Homo sapiens
  siRNA target sequence for ASB7 (NM_024708.2,1116-1134).
gttgacccactcagtgata

SEQ ID NO: 389468 - DNA, 19 bp, Homo sapiens
  siRNA target sequence for ASB7 (NM_024708.2,1147-1165).
cgcttcagctcgccattat

SEQ ID NO: 389469 - DNA, 19 bp, Homo sapiens
  siRNA target sequence for ASB7 (NM_024708.2,1209-1227).
gccaacatcgacattcaga

SEQ ID NO: 389470 - DNA, 19 bp, Homo sapiens
  siRNA target sequence for ASB7 (NM_024708.2,1241-1259).
gcgatacgccgtgatcaaa

SEQ ID NO: 389471 - DNA, 19 bp, Homo sapiens
  siRNA target sequence for ASB7 (NM_024708.2,1247-1265).
cgccgtgatcaaaagcaat

SEQ ID NO: 389472 - DNA, 19 bp, Homo sapiens
  siRNA target sequence for ASB7 (NM_024708.2,1251-1269).
gtgatcaaaagcaatcact

SEQ ID NO: 389473 - DNA, 19 bp, Homo sapiens
  siRNA target sequence for ASB7 (NM_024708.2,1256-1274).
caaaagcaatcactcttat

SEQ ID NO: 389474 - DNA, 19 bp, Homo sapiens
  siRNA target sequence for ASB7 (NM_024708.2,1329-1347).
ggacagactcctttacact

SEQ ID NO: 389475 - DNA, 19 bp, Homo sapiens
  siRNA target sequence for ASB7 (NM_024708.2,1330-1348).
gacagactcctttacactt

SEQ ID NO: 389476 - DNA, 19 bp, Homo sapiens
  siRNA target sequence for ASB7 (NM_024708.2,1332-1350).
cagactcctttacacttat

SEQ ID NO: 389477 - DNA, 19 bp, Homo sapiens
  siRNA target sequence for ASB7 (NM_024708.2,1371-1389).
ctgtgtgcacggatgttat

SEQ ID NO: 389478 - DNA, 19 bp, Homo sapiens
  siRNA target sequence for ASB7 (NM_024708.2,1377-1395).
gcacggatgttatataatt

SEQ ID NO: 389479 - DNA, 19 bp, Homo sapiens
  siRNA target sequence for ASB7 (NM_024708.2,1378-1396).
cacggatgttatataatta

SEQ ID NO: 389480 - DNA, 19 bp, Homo sapiens
  siRNA target sequence for ASB7 (NM_024708.2,1406-1424).
cacgaacacacggaactat

SEQ ID NO: 389481 - DNA, 19 bp, Homo sapiens
  siRNA target sequence for ASB7 (NM_024708.2,1408-1426).
cgaacacacggaactatga

SEQ ID NO: 389482 - DNA, 19 bp, Homo sapiens
  siRNA target sequence for ASB7 (NM_024708.2,1437-1455).
ccattggctgtttcaataa

SEQ ID NO: 389483 - DNA, 19 bp, Homo sapiens
  siRNA target sequence for ASB7 (NM_024708.2,1442-1460).
ggctgtttcaataagtatt

SEQ ID NO: 389484 - DNA, 19 bp, Homo sapiens
  siRNA target sequence for ASB7 (NM_024708.2,1471-1489).
gtcgaccatgtttggattt

SEQ ID NO: 389485 - DNA, 19 bp, Homo sapiens
  siRNA target sequence for ASB7 (NM_024708.2,1473-1491).
cgaccatgtttggatttct

SEQ ID NO: 389486 - DNA, 19 bp, Homo sapiens
  siRNA target sequence for ASB7 (NM_024708.2,1494-1512).
caagaagtcacaagtatgt

SEQ ID NO: 389487 - DNA, 19 bp, Homo sapiens
  siRNA target sequence for FLJ14146 (NM_024709.2,396-414).
gtcgggaaggtcatcatca

SEQ ID NO: 389488 - DNA, 19 bp, Homo sapiens
  siRNA target sequence for FLJ14146 (NM_024709.2,398-416).
cgggaaggtcatcatcaaa

SEQ ID NO: 389489 - DNA, 19 bp, Homo sapiens
  siRNA target sequence for hIAN2 (NM_024711.2,270-288).
gactgaggctcattctcat

SEQ ID NO: 389490 - DNA, 19 bp, Homo sapiens
  siRNA target sequence for hIAN2 (NM_024711.2,339-357).
gggacgtcttcgagtctaa

SEQ ID NO: 389491 - DNA, 19 bp, Homo sapiens
  siRNA target sequence for hIAN2 (NM_024711.2,340-358).
ggacgtcttcgagtctaaa

SEQ ID NO: 389492 - DNA, 19 bp, Homo sapiens
  siRNA target sequence for hIAN2 (NM_024711.2,419-437).
gagcttgaggtgattgaca

SEQ ID NO: 389493 - DNA, 19 bp, Homo sapiens
  siRNA target sequence for hIAN2 (NM_024711.2,734-752).
cgccattgcggcttcaaca

SEQ ID NO: 389494 - DNA, 19 bp, Homo sapiens
  siRNA target sequence for hIAN2 (NM_024711.2,735-753).
gccattgcggcttcaacaa

SEQ ID NO: 389495 - DNA, 19 bp, Homo sapiens
  siRNA target sequence for hIAN2 (NM_024711.2,813-831).
ccattatgtgggaaaacga

SEQ ID NO: 389496 - DNA, 19 bp, Homo sapiens
  siRNA target sequence for hIAN2 (NM_024711.2,844-862).
cagcaacaaggcttaccaa

SEQ ID NO: 389497 - DNA, 19 bp, Homo sapiens
  siRNA target sequence for hIAN2 (NM_024711.2,846-864).
gcaacaaggcttaccaata

SEQ ID NO: 389498 - DNA, 19 bp, Homo sapiens
  siRNA target sequence for hIAN2 (NM_024711.2,847-865).
caacaaggcttaccaatat

SEQ ID NO: 389499 - DNA, 19 bp, Homo sapiens
  siRNA target sequence for hIAN2 (NM_024711.2,877-895).
ctttcggctgaaagaacta

SEQ ID NO: 389500 - DNA, 19 bp, Homo sapiens
  siRNA target sequence for FLJ22557 (NM_024713.1,789-807).
gttatagttggtttaaact

SEQ ID NO: 389501 - DNA, 19 bp, Homo sapiens
  siRNA target sequence for FLJ22557 (NM_024713.1,808-826).
ggcttcaagcagtcattaa

SEQ ID NO: 389502 - DNA, 19 bp, Homo sapiens
  siRNA target sequence for FLJ22557 (NM_024713.1,830-848).
gtggtggtcagaactatca

SEQ ID NO: 389503 - DNA, 19 bp, Homo sapiens
  siRNA target sequence for FLJ22557 (NM_024713.1,836-854).
gtcagaactatcatccaaa

SEQ ID NO: 389504 - DNA, 19 bp, Homo sapiens
  siRNA target sequence for FLJ22557 (NM_024713.1,907-925).
gattatgggaacaggaaaa

SEQ ID NO: 389505 - DNA, 19 bp, Homo sapiens
  siRNA target sequence for FLJ22344 (NM_024717.2,232-250).
cactgctggaaccagtaat

SEQ ID NO: 389506 - DNA, 19 bp, Homo sapiens
  siRNA target sequence for FLJ22344 (NM_024717.2,284-302).
cagctggacattacattaa

SEQ ID NO: 389507 - DNA, 19 bp, Homo sapiens
  siRNA target sequence for FLJ22344 (NM_024717.2,336-354).
gagggacgagtgatccata

SEQ ID NO: 389508 - DNA, 19 bp, Homo sapiens
  siRNA target sequence for FLJ22344 (NM_024717.2,466-484).
gccattgtatataaaggta

SEQ ID NO: 389509 - DNA, 19 bp, Homo sapiens
  siRNA target sequence for FLJ22344 (NM_024717.2,467-485).
ccattgtatataaaggtat

SEQ ID NO: 389510 - DNA, 19 bp, Homo sapiens
  siRNA target sequence for FLJ22344 (NM_024717.2,468-486).
cattgtatataaaggtatt

SEQ ID NO: 389511 - DNA, 19 bp, Homo sapiens
  siRNA target sequence for FLJ22344 (NM_024717.2,501-519).
gactacaggatgactttat

SEQ ID NO: 389512 - DNA, 19 bp, Homo sapiens
  siRNA target sequence for FLJ22344 (NM_024717.2,574-592).
gacccttactctgaaagat

SEQ ID NO: 389513 - DNA, 19 bp, Homo sapiens
  siRNA target sequence for FLJ22344 (NM_024717.2,582-600).
ctctgaaagatcctcatta

SEQ ID NO: 389514 - DNA, 19 bp, Homo sapiens
  siRNA target sequence for FLJ22344 (NM_024717.2,607-625).
ccatgatcttggaatcatt

SEQ ID NO: 389515 - DNA, 19 bp, Homo sapiens
  siRNA target sequence for FLJ22344 (NM_024717.2,637-655).
catccttacccctaaagaa

SEQ ID NO: 389516 - DNA, 19 bp, Homo sapiens
  siRNA target sequence for FLJ22344 (NM_024717.2,664-682).
cagggatgtgacaatgcta

SEQ ID NO: 389517 - DNA, 19 bp, Homo sapiens
  siRNA target sequence for FLJ22344 (NM_024717.2,834-852).
gcgatccctacgtgaagtt

SEQ ID NO: 389518 - DNA, 19 bp, Homo sapiens
  siRNA target sequence for FLJ22344 (NM_024717.2,857-875).
cttgggcatcagaagtaca

SEQ ID NO: 389519 - DNA, 19 bp, Homo sapiens
  siRNA target sequence for FLJ22344 (NM_024717.2,948-966).
gaggaggagtcattgatat

SEQ ID NO: 389520 - DNA, 19 bp, Homo sapiens
  siRNA target sequence for FLJ22344 (NM_024717.2,1174-1192).
ggaacgagaggagatatta

SEQ ID NO: 389521 - DNA, 19 bp, Homo sapiens
  siRNA target sequence for FLJ22344 (NM_024717.2,1175-1193).
gaacgagaggagatattaa

SEQ ID NO: 389522 - DNA, 19 bp, Homo sapiens
  siRNA target sequence for FLJ22344 (NM_024717.2,1203-1221).
gcccattgaggatatttca

SEQ ID NO: 389523 - DNA, 19 bp, Homo sapiens
  siRNA target sequence for FLJ22344 (NM_024717.2,1308-1326).
cattttgtgtggtagaact

SEQ ID NO: 389524 - DNA, 19 bp, Homo sapiens
  siRNA target sequence for FLJ22344 (NM_024717.2,1319-1337).
gtagaactgaacaacgata

SEQ ID NO: 389525 - DNA, 19 bp, Homo sapiens
  siRNA target sequence for FLJ22344 (NM_024717.2,1333-1351).
cgatagactgctaacacat

SEQ ID NO: 389526 - DNA, 19 bp, Homo sapiens
  siRNA target sequence for FLJ22344 (NM_024717.2,1334-1352).
gatagactgctaacacata

SEQ ID NO: 389527 - DNA, 19 bp, Homo sapiens
  siRNA target sequence for FLJ22344 (NM_024717.2,1393-1411).
cacgttcaacattaaagat

SEQ ID NO: 389528 - DNA, 19 bp, Homo sapiens
  siRNA target sequence for FLJ22344 (NM_024717.2,1395-1413).
cgttcaacattaaagatat

SEQ ID NO: 389529 - DNA, 19 bp, Homo sapiens
  siRNA target sequence for FLJ22344 (NM_024717.2,1453-1471).
ggatcgaagtgctgacttt

SEQ ID NO: 389530 - DNA, 19 bp, Homo sapiens
  siRNA target sequence for FLJ22344 (NM_024717.2,1474-1492).
gggcaaagttgctatacca

SEQ ID NO: 389531 - DNA, 19 bp, Homo sapiens
  siRNA target sequence for FLJ22344 (NM_024717.2,1475-1493).
ggcaaagttgctataccat

SEQ ID NO: 389532 - DNA, 19 bp, Homo sapiens
  siRNA target sequence for FLJ22344 (NM_024717.2,1519-1537).
gaaagcctacgtcttgaaa

SEQ ID NO: 389533 - DNA, 19 bp, Homo sapiens
  siRNA target sequence for FLJ22344 (NM_024717.2,1523-1541).
gcctacgtcttgaaaaaca

SEQ ID NO: 389534 - DNA, 19 bp, Homo sapiens
  siRNA target sequence for FLJ22344 (NM_024717.2,1557-1575).
caacaaagggggtcatcta

SEQ ID NO: 389535 - DNA, 19 bp, Homo sapiens
  siRNA target sequence for FLJ22344 (NM_024717.2,1560-1578).
caaagggggtcatctatct

SEQ ID NO: 389536 - DNA, 19 bp, Homo sapiens
  siRNA target sequence for FLJ22344 (NM_024717.2,1610-1628).
gccagcttacgaacattaa

SEQ ID NO: 389537 - DNA, 19 bp, Homo sapiens
  siRNA target sequence for FLJ22344 (NM_024717.2,1612-1630).
cagcttacgaacattaata

SEQ ID NO: 389538 - DNA, 19 bp, Homo sapiens
  siRNA target sequence for FLJ22344 (NM_024717.2,1713-1731).
gtgtcatggtgctggtaaa

SEQ ID NO: 389539 - DNA, 19 bp, Homo sapiens
  siRNA target sequence for FLJ22344 (NM_024717.2,1733-1751).
gctgcatactacgttaata

SEQ ID NO: 389540 - DNA, 19 bp, Homo sapiens
  siRNA target sequence for FLJ22344 (NM_024717.2,1736-1754).
gcatactacgttaatagtt

SEQ ID NO: 389541 - DNA, 19 bp, Homo sapiens
  siRNA target sequence for FLJ22344 (NM_024717.2,1779-1797).
ggagtctcgctgcttttgt

SEQ ID NO: 389542 - DNA, 19 bp, Homo sapiens
  siRNA target sequence for FLJ22344 (NM_024717.2,1890-1908).
ccatccaggaggtatgtgt

SEQ ID NO: 389543 - DNA, 19 bp, Homo sapiens
  siRNA target sequence for FLJ22344 (NM_024717.2,1905-1923).
gtgtcagtgtccagaacat

SEQ ID NO: 389544 - DNA, 19 bp, Homo sapiens
  siRNA target sequence for FLJ22344 (NM_024717.2,1915-1933).
ccagaacatcctagatgaa

SEQ ID NO: 389545 - DNA, 19 bp, Homo sapiens
  siRNA target sequence for FLJ22344 (NM_024717.2,1972-1990).
ctggactgtcccattctta

SEQ ID NO: 389546 - DNA, 19 bp, Homo sapiens
  siRNA target sequence for FLJ22344 (NM_024717.2,2040-2058).
gcattccgctgagatacat

SEQ ID NO: 389547 - DNA, 19 bp, Homo sapiens
  siRNA target sequence for FLJ22344 (NM_024717.2,2041-2059).
cattccgctgagatacatt

SEQ ID NO: 389548 - DNA, 19 bp, Homo sapiens
  siRNA target sequence for FLJ22344 (NM_024717.2,2062-2080).
ccttgtctggggcatcaat

SEQ ID NO: 389549 - DNA, 19 bp, Homo sapiens
  siRNA target sequence for FLJ22344 (NM_024717.2,2063-2081).
cttgtctggggcatcaata

SEQ ID NO: 389550 - DNA, 19 bp, Homo sapiens
  siRNA target sequence for FLJ22344 (NM_024717.2,2096-2114).
cttcggagtccatatgcaa

SEQ ID NO: 389551 - DNA, 19 bp, Homo sapiens
  siRNA target sequence for FLJ22344 (NM_024717.2,2100-2118).
ggagtccatatgcaattga

SEQ ID NO: 389552 - DNA, 19 bp, Homo sapiens
  siRNA target sequence for FLJ22344 (NM_024717.2,2101-2119).
gagtccatatgcaattgat

SEQ ID NO: 389553 - DNA, 19 bp, Homo sapiens
  siRNA target sequence for FLJ22344 (NM_024717.2,2103-2121).
gtccatatgcaattgataa

SEQ ID NO: 389554 - DNA, 19 bp, Homo sapiens
  siRNA target sequence for FLJ22344 (NM_024717.2,2106-2124).
catatgcaattgataacaa

SEQ ID NO: 389555 - DNA, 19 bp, Homo sapiens
  siRNA target sequence for FLJ22344 (NM_024717.2,2112-2130).
caattgataacaatgaact

SEQ ID NO: 389556 - DNA, 19 bp, Homo sapiens
  siRNA target sequence for FLJ22344 (NM_024717.2,2198-2216).
ccttctcatagcccatata

SEQ ID NO: 389557 - DNA, 19 bp, Homo sapiens
  siRNA target sequence for FLJ22344 (NM_024717.2,2199-2217).
cttctcatagcccatataa

SEQ ID NO: 389558 - DNA, 19 bp, Homo sapiens
  siRNA target sequence for FLJ23471 (NM_024723.1,196-214).
ggctaccgcgacgtgaata

SEQ ID NO: 389559 - DNA, 19 bp, Homo sapiens
  siRNA target sequence for FLJ23471 (NM_024723.1,197-215).
gctaccgcgacgtgaatat

SEQ ID NO: 389560 - DNA, 19 bp, Homo sapiens
  siRNA target sequence for FLJ23471 (NM_024723.1,520-538).
cgccctcgtgtgaccaata

SEQ ID NO: 389561 - DNA, 19 bp, Homo sapiens
  siRNA target sequence for FLJ23471 (NM_024723.1,523-541).
cctcgtgtgaccaatagct

SEQ ID NO: 389562 - DNA, 19 bp, Homo sapiens
  siRNA target sequence for FLJ23471 (NM_024723.1,673-691).
caaaccacactcagttcaa

SEQ ID NO: 389563 - DNA, 19 bp, Homo sapiens
  siRNA target sequence for FLJ23471 (NM_024723.1,759-777).
ccggaataagtttttccaa

SEQ ID NO: 389564 - DNA, 19 bp, Homo sapiens
  siRNA target sequence for FLJ23471 (NM_024723.1,760-778).
cggaataagtttttccaaa

SEQ ID NO: 389565 - DNA, 19 bp, Homo sapiens
  siRNA target sequence for FLJ23471 (NM_024723.1,821-839).
ccaccccgtcacttgttct

SEQ ID NO: 389566 - DNA, 19 bp, Homo sapiens
  siRNA target sequence for FLJ23471 (NM_024723.1,822-840).
caccccgtcacttgttcta

SEQ ID NO: 389567 - DNA, 19 bp, Homo sapiens
  siRNA target sequence for FLJ23471 (NM_024723.1,827-845).
cgtcacttgttctatccaa

SEQ ID NO: 389568 - DNA, 19 bp, Homo sapiens
  siRNA target sequence for FLJ23471 (NM_024723.1,1268-1286).
gatggagagcgaatctgaa

SEQ ID NO: 389569 - DNA, 19 bp, Homo sapiens
  siRNA target sequence for FLJ23471 (NM_024723.1,1523-1541).
ccagcctcgacgtttgtga

SEQ ID NO: 389570 - DNA, 19 bp, Homo sapiens
  siRNA target sequence for FLJ23471 (NM_024723.1,1894-1912).
gagtcagagctgatgtaca

SEQ ID NO: 389571 - DNA, 19 bp, Homo sapiens
  siRNA target sequence for FLJ23471 (NM_024723.1,2190-2208).
ctggtcaccaaaaagcaaa

SEQ ID NO: 389572 - DNA, 19 bp, Homo sapiens
  siRNA target sequence for FLJ23518 (NM_024725.2,205-223).
gatacatgttagaagacat

SEQ ID NO: 389573 - DNA, 19 bp, Homo sapiens
  siRNA target sequence for FLJ23518 (NM_024725.2,248-266).
cacgtgcctgagcagaaat

SEQ ID NO: 389574 - DNA, 19 bp, Homo sapiens
  siRNA target sequence for FLJ23518 (NM_024725.2,259-277).
gcagaaatctcgagttgat

SEQ ID NO: 389575 - DNA, 19 bp, Homo sapiens
  siRNA target sequence for FLJ23518 (NM_024725.2,260-278).
cagaaatctcgagttgatt

SEQ ID NO: 389576 - DNA, 19 bp, Homo sapiens
  siRNA target sequence for FLJ23518 (NM_024725.2,275-293).
gattggaggcgaactaaaa

SEQ ID NO: 389577 - DNA, 19 bp, Homo sapiens
  siRNA target sequence for FLJ23518 (NM_024725.2,283-301).
gcgaactaaaagaagtagt

SEQ ID NO: 389578 - DNA, 19 bp, Homo sapiens
  siRNA target sequence for FLJ23518 (NM_024725.2,285-303).
gaactaaaagaagtagtat

SEQ ID NO: 389579 - DNA, 19 bp, Homo sapiens
  siRNA target sequence for FLJ23518 (NM_024725.2,297-315).
gtagtatctcacaattact

SEQ ID NO: 389580 - DNA, 19 bp, Homo sapiens
  siRNA target sequence for FLJ23518 (NM_024725.2,412-430).
caagggacctgattgtaat

SEQ ID NO: 389581 - DNA, 19 bp, Homo sapiens
  siRNA target sequence for FLJ23518 (NM_024725.2,415-433).
gggacctgattgtaataaa

SEQ ID NO: 389582 - DNA, 19 bp, Homo sapiens
  siRNA target sequence for FLJ23518 (NM_024725.2,416-434).
ggacctgattgtaataaaa

SEQ ID NO: 389583 - DNA, 19 bp, Homo sapiens
  siRNA target sequence for FLJ23518 (NM_024725.2,444-462).
gtgaaagagagctcaactt

SEQ ID NO: 389584 - DNA, 19 bp, Homo sapiens
  siRNA target sequence for FLJ23518 (NM_024725.2,450-468).
gagagctcaacttaagtaa

SEQ ID NO: 389585 - DNA, 19 bp, Homo sapiens
  siRNA target sequence for FLJ23518 (NM_024725.2,452-470).
gagctcaacttaagtaaaa

SEQ ID NO: 389586 - DNA, 19 bp, Homo sapiens
  siRNA target sequence for FLJ23518 (NM_024725.2,454-472).
gctcaacttaagtaaaatt

SEQ ID NO: 389587 - DNA, 19 bp, Homo sapiens
  siRNA target sequence for FLJ23518 (NM_024725.2,510-528).
ctggcaacggttcaacata

SEQ ID NO: 389588 - DNA, 19 bp, Homo sapiens
  siRNA target sequence for FLJ23518 (NM_024725.2,513-531).
gcaacggttcaacatatga

SEQ ID NO: 389589 - DNA, 19 bp, Homo sapiens
  siRNA target sequence for FLJ23518 (NM_024725.2,514-532).
caacggttcaacatatgaa

SEQ ID NO: 389590 - DNA, 19 bp, Homo sapiens
  siRNA target sequence for FLJ23518 (NM_024725.2,517-535).
cggttcaacatatgaagaa

SEQ ID NO: 389591 - DNA, 19 bp, Homo sapiens
  siRNA target sequence for FLJ23518 (NM_024725.2,519-537).
gttcaacatatgaagaaga

SEQ ID NO: 389592 - DNA, 19 bp, Homo sapiens
  siRNA target sequence for FLJ23518 (NM_024725.2,728-746).
gacatcaagcgaggaaaaa

SEQ ID NO: 389593 - DNA, 19 bp, Homo sapiens
  siRNA target sequence for FLJ23518 (NM_024725.2,786-804).
gtgatgacagcgatatcct

SEQ ID NO: 389594 - DNA, 19 bp, Homo sapiens
  siRNA target sequence for FLJ23518 (NM_024725.2,791-809).
gacagcgatatcctagtta

SEQ ID NO: 389595 - DNA, 19 bp, Homo sapiens
  siRNA target sequence for FLJ23518 (NM_024725.2,795-813).
gcgatatcctagttagaaa

SEQ ID NO: 389596 - DNA, 19 bp, Homo sapiens
  siRNA target sequence for FLJ23518 (NM_024725.2,796-814).
cgatatcctagttagaaaa

SEQ ID NO: 389597 - DNA, 19 bp, Homo sapiens
  siRNA target sequence for FLJ23518 (NM_024725.2,965-983).
cgcagtagtggtagagatt

SEQ ID NO: 389598 - DNA, 19 bp, Homo sapiens
  siRNA target sequence for FLJ23518 (NM_024725.2,1045-1063).
ggataattatgaatctgat

SEQ ID NO: 389599 - DNA, 19 bp, Homo sapiens
  siRNA target sequence for FLJ23518 (NM_024725.2,1158-1176).
catcacaactgaaattagt

SEQ ID NO: 389600 - DNA, 19 bp, Homo sapiens
  siRNA target sequence for FLJ23518 (NM_024725.2,1203-1221).
gtgaccactatactcattt

SEQ ID NO: 389601 - DNA, 19 bp, Homo sapiens
  siRNA target sequence for FLJ23518 (NM_024725.2,1207-1225).
ccactatactcattttgaa

SEQ ID NO: 389602 - DNA, 19 bp, Homo sapiens
  siRNA target sequence for FLJ23518 (NM_024725.2,1246-1264).
gatcaacgctttagatgaa

SEQ ID NO: 389603 - DNA, 19 bp, Homo sapiens
  siRNA target sequence for FLJ23518 (NM_024725.2,1249-1267).
caacgctttagatgaatct

SEQ ID NO: 389604 - DNA, 19 bp, Homo sapiens
  siRNA target sequence for FLJ23518 (NM_024725.2,1286-1304).
gatggcacaaggcaaaaat

SEQ ID NO: 389605 - DNA, 19 bp, Homo sapiens
  siRNA target sequence for FLJ23518 (NM_024725.2,1289-1307).
ggcacaaggcaaaaatcat

SEQ ID NO: 389606 - DNA, 19 bp, Homo sapiens
  siRNA target sequence for FLJ23518 (NM_024725.2,1290-1308).
gcacaaggcaaaaatcata

SEQ ID NO: 389607 - DNA, 19 bp, Homo sapiens
  siRNA target sequence for FLJ23518 (NM_024725.2,1291-1309).
cacaaggcaaaaatcatat

SEQ ID NO: 389608 - DNA, 19 bp, Homo sapiens
  siRNA target sequence for FLJ23518 (NM_024725.2,1321-1339).
gctaacatctcttcattat

SEQ ID NO: 389609 - DNA, 19 bp, Homo sapiens
  siRNA target sequence for FLJ23518 (NM_024725.2,1367-1385).
ctagagagcttggtatcta

SEQ ID NO: 389610 - DNA, 19 bp, Homo sapiens
  siRNA target sequence for FLJ23518 (NM_024725.2,1389-1407).
gtcgttggaaagagcaata

SEQ ID NO: 389611 - DNA, 19 bp, Homo sapiens
  siRNA target sequence for FLJ23518 (NM_024725.2,1395-1413).
ggaaagagcaatataagga

SEQ ID NO: 389612 - DNA, 19 bp, Homo sapiens
  siRNA target sequence for FLJ23518 (NM_024725.2,1412-1430).
gagcgagtagaaaattatt

SEQ ID NO: 389613 - DNA, 19 bp, Homo sapiens
  siRNA target sequence for FLJ23518 (NM_024725.2,1414-1432).
gcgagtagaaaattattct

SEQ ID NO: 389614 - DNA, 19 bp, Homo sapiens
  siRNA target sequence for FLJ23518 (NM_024725.2,1484-1502).
ggactgcatcgctactgta

SEQ ID NO: 389615 - DNA, 19 bp, Homo sapiens
  siRNA target sequence for FLJ23518 (NM_024725.2,1537-1555).
caccaggaccatgcaaata

SEQ ID NO: 389616 - DNA, 19 bp, Homo sapiens
  siRNA target sequence for FLJ23518 (NM_024725.2,1543-1561).
gaccatgcaaatagataat

SEQ ID NO: 389617 - DNA, 19 bp, Homo sapiens
  siRNA target sequence for FLJ23518 (NM_024725.2,1609-1627).
cagccgtaccagaatttat

SEQ ID NO: 389618 - DNA, 19 bp, Homo sapiens
  siRNA target sequence for FLJ23518 (NM_024725.2,1612-1630).
ccgtaccagaatttatcat

SEQ ID NO: 389619 - DNA, 19 bp, Homo sapiens
  siRNA target sequence for FLJ23518 (NM_024725.2,1613-1631).
cgtaccagaatttatcata

SEQ ID NO: 389620 - DNA, 19 bp, Homo sapiens
  siRNA target sequence for FLJ23518 (NM_024725.2,1620-1638).
gaatttatcataaactgaa

SEQ ID NO: 389621 - DNA, 19 bp, Homo sapiens
  siRNA target sequence for FLJ23518 (NM_024725.2,1755-1773).
gctggattaaggagaaata

SEQ ID NO: 389622 - DNA, 19 bp, Homo sapiens
  siRNA target sequence for FLJ23518 (NM_024725.2,1795-1813).
caattttgcggattacttt

SEQ ID NO: 389623 - DNA, 19 bp, Homo sapiens
  siRNA target sequence for FLJ22527 (NM_024726.3,185-203).
gtcgaacgcaatgtataat

SEQ ID NO: 389624 - DNA, 19 bp, Homo sapiens
  siRNA target sequence for FLJ22527 (NM_024726.3,187-205).
cgaacgcaatgtataataa

SEQ ID NO: 389625 - DNA, 19 bp, Homo sapiens
  siRNA target sequence for FLJ22527 (NM_024726.3,233-251).
cggtgctttactcgataaa

SEQ ID NO: 389626 - DNA, 19 bp, Homo sapiens
  siRNA target sequence for FLJ22527 (NM_024726.3,280-298).
gaaatcaggttttcatctt

SEQ ID NO: 389627 - DNA, 19 bp, Homo sapiens
  siRNA target sequence for FLJ22527 (NM_024726.3,288-306).
gttttcatctttcaaacat

SEQ ID NO: 389628 - DNA, 19 bp, Homo sapiens
  siRNA target sequence for FLJ22527 (NM_024726.3,309-327).
gccaccttctacgtaaagt

SEQ ID NO: 389629 - DNA, 19 bp, Homo sapiens
  siRNA target sequence for FLJ22527 (NM_024726.3,313-331).
ccttctacgtaaagtatgt

SEQ ID NO: 389630 - DNA, 19 bp, Homo sapiens
  siRNA target sequence for FLJ22527 (NM_024726.3,326-344).
gtatgtgcagatctttaga

SEQ ID NO: 389631 - DNA, 19 bp, Homo sapiens
  siRNA target sequence for FLJ22527 (NM_024726.3,462-480).
gaactcacggagttccatt

SEQ ID NO: 389632 - DNA, 19 bp, Homo sapiens
  siRNA target sequence for FLJ22527 (NM_024726.3,469-487).
cggagttccattatttcga

SEQ ID NO: 389633 - DNA, 19 bp, Homo sapiens
  siRNA target sequence for FLJ22527 (NM_024726.3,557-575).
ggagaagttggaagtaata

SEQ ID NO: 389634 - DNA, 19 bp, Homo sapiens
  siRNA target sequence for FLJ22527 (NM_024726.3,563-581).
gttggaagtaataaaagga

SEQ ID NO: 389635 - DNA, 19 bp, Homo sapiens
  siRNA target sequence for FLJ22527 (NM_024726.3,609-627).
gcggacagcggaatagata

SEQ ID NO: 389636 - DNA, 19 bp, Homo sapiens
  siRNA target sequence for FLJ22527 (NM_024726.3,612-630).
gacagcggaatagatacat

SEQ ID NO: 389637 - DNA, 19 bp, Homo sapiens
  siRNA target sequence for FLJ22527 (NM_024726.3,665-683).
cgatgaggctgttaaatta

SEQ ID NO: 389638 - DNA, 19 bp, Homo sapiens
  siRNA target sequence for FLJ22527 (NM_024726.3,714-732).
cgcctaagggctttattca

SEQ ID NO: 389639 - DNA, 19 bp, Homo sapiens
  siRNA target sequence for FLJ22527 (NM_024726.3,715-733).
gcctaagggctttattcat

SEQ ID NO: 389640 - DNA, 19 bp, Homo sapiens
  siRNA target sequence for FLJ22527 (NM_024726.3,783-801).
ggcaagaaagtgacagata

SEQ ID NO: 389641 - DNA, 19 bp, Homo sapiens
  siRNA target sequence for FLJ22527 (NM_024726.3,810-828).
gctgcactccgcattcaga

SEQ ID NO: 389642 - DNA, 19 bp, Homo sapiens
  siRNA target sequence for FLJ22527 (NM_024726.3,811-829).
ctgcactccgcattcagaa

SEQ ID NO: 389643 - DNA, 19 bp, Homo sapiens
  siRNA target sequence for FLJ22527 (NM_024726.3,816-834).
ctccgcattcagaaggttt

SEQ ID NO: 389644 - DNA, 19 bp, Homo sapiens
  siRNA target sequence for FLJ22527 (NM_024726.3,830-848).
ggtttggcgacgtttccat

SEQ ID NO: 389645 - DNA, 19 bp, Homo sapiens
  siRNA target sequence for FLJ22527 (NM_024726.3,838-856).
gacgtttccatcaacgtaa

SEQ ID NO: 389646 - DNA, 19 bp, Homo sapiens
  siRNA target sequence for FLJ22527 (NM_024726.3,849-867).
caacgtaaggaaactgaaa

SEQ ID NO: 389647 - DNA, 19 bp, Homo sapiens
  siRNA target sequence for FLJ22527 (NM_024726.3,887-905).
gatcttcctgggtatgaat

SEQ ID NO: 389648 - DNA, 19 bp, Homo sapiens
  siRNA target sequence for FLJ22527 (NM_024726.3,907-925).
cacctcctctctttaatga

SEQ ID NO: 389649 - DNA, 19 bp, Homo sapiens
  siRNA target sequence for FLJ22527 (NM_024726.3,1011-1029).
gccctggttaccatcaaga

SEQ ID NO: 389650 - DNA, 19 bp, Homo sapiens
  siRNA target sequence for FLJ22527 (NM_024726.3,1021-1039).
ccatcaagaatgacctaaa

SEQ ID NO: 389651 - DNA, 19 bp, Homo sapiens
  siRNA target sequence for FLJ22527 (NM_024726.3,1028-1046).
gaatgacctaaagttgata

SEQ ID NO: 389652 - DNA, 19 bp, Homo sapiens
  siRNA target sequence for FLJ22527 (NM_024726.3,1097-1115).
catcgaatgcagaaattta

SEQ ID NO: 389653 - DNA, 19 bp, Homo sapiens
  siRNA target sequence for FLJ22527 (NM_024726.3,1149-1167).
gaaggagggtcagctatta

SEQ ID NO: 389654 - DNA, 19 bp, Homo sapiens
  siRNA target sequence for FLJ22527 (NM_024726.3,1152-1170).
ggagggtcagctattattt

SEQ ID NO: 389655 - DNA, 19 bp, Homo sapiens
  siRNA target sequence for FLJ22527 (NM_024726.3,1153-1171).
gagggtcagctattatttt

SEQ ID NO: 389656 - DNA, 19 bp, Homo sapiens
  siRNA target sequence for FLJ22527 (NM_024726.3,1174-1192).
ctgacaagaccatacaaca

SEQ ID NO: 389657 - DNA, 19 bp, Homo sapiens
  siRNA target sequence for FLJ22527 (NM_024726.3,1181-1199).
gaccatacaacaggttatt

SEQ ID NO: 389658 - DNA, 19 bp, Homo sapiens
  siRNA target sequence for FLJ22527 (NM_024726.3,1183-1201).
ccatacaacaggttattga

SEQ ID NO: 389659 - DNA, 19 bp, Homo sapiens
  siRNA target sequence for FLJ22527 (NM_024726.3,1202-1220).
ggatatcatagcaaaccaa

SEQ ID NO: 389660 - DNA, 19 bp, Homo sapiens
  siRNA target sequence for FLJ22527 (NM_024726.3,1325-1343).
cgaaaaatggaaaatgtca

SEQ ID NO: 389661 - DNA, 19 bp, Homo sapiens
  siRNA target sequence for FLJ22527 (NM_024726.3,1363-1381).
caatgaaggaaggatgtaa

SEQ ID NO: 389662 - DNA, 19 bp, Homo sapiens
  siRNA target sequence for FLJ22527 (NM_024726.3,1375-1393).
gatgtaacgcatacaaaga

SEQ ID NO: 389663 - DNA, 19 bp, Homo sapiens
  siRNA target sequence for FLJ22527 (NM_024726.3,1378-1396).
gtaacgcatacaaagaaat

SEQ ID NO: 389664 - DNA, 19 bp, Homo sapiens
  siRNA target sequence for FLJ22527 (NM_024726.3,1497-1515).
caggttgatgagttgatga

SEQ ID NO: 389665 - DNA, 19 bp, Homo sapiens
  siRNA target sequence for FLJ22527 (NM_024726.3,1516-1534).
gacaggaacttaaaaactt

SEQ ID NO: 389666 - DNA, 19 bp, Homo sapiens
  siRNA target sequence for FLJ22527 (NM_024726.3,1661-1679).
gaccatcgagtctctgtat

SEQ ID NO: 389667 - DNA, 19 bp, Homo sapiens
  siRNA target sequence for FLJ22527 (NM_024726.3,1667-1685).
cgagtctctgtataaggaa

SEQ ID NO: 389668 - DNA, 19 bp, Homo sapiens
  siRNA target sequence for FLJ22527 (NM_024726.3,1754-1772).
ctacctggggactactctt

SEQ ID NO: 389669 - DNA, 19 bp, Homo sapiens
  siRNA target sequence for FLJ22527 (NM_024726.3,1812-1830).
gtcagacagctcatcacat

SEQ ID NO: 389670 - DNA, 19 bp, Homo sapiens
  siRNA target sequence for FLJ22527 (NM_024726.3,1835-1853).
cggaatctggccattaggt

SEQ ID NO: 389671 - DNA, 19 bp, Homo sapiens
  siRNA target sequence for FLJ22527 (NM_024726.3,1960-1978).
gagccaacctcttcaactt

SEQ ID NO: 389672 - DNA, 19 bp, Homo sapiens
  siRNA target sequence for FLJ22527 (NM_024726.3,1987-2005).
ctaacattgctgggaaata

SEQ ID NO: 389673 - DNA, 19 bp, Homo sapiens
  siRNA target sequence for FLJ22527 (NM_024726.3,2074-2092).
ccgtggtgtggattgaaga

SEQ ID NO: 389674 - DNA, 19 bp, Homo sapiens
  siRNA target sequence for FLJ22527 (NM_024726.3,2123-2141).
caacgcagaaaagatgaat

SEQ ID NO: 389675 - DNA, 19 bp, Homo sapiens
  siRNA target sequence for FLJ22527 (NM_024726.3,2142-2160).
gaacctaaacgcctgaaaa

SEQ ID NO: 389676 - DNA, 19 bp, Homo sapiens
  siRNA target sequence for FLJ22527 (NM_024726.3,2146-2164).
ctaaacgcctgaaaaaaca

SEQ ID NO: 389677 - DNA, 19 bp, Homo sapiens
  siRNA target sequence for FLJ22527 (NM_024726.3,2238-2256).
gatgctgaactccaatctt

SEQ ID NO: 389678 - DNA, 19 bp, Homo sapiens
  siRNA target sequence for FLJ22527 (NM_024726.3,2289-2307).
cccagaccagactatgctt

SEQ ID NO: 389679 - DNA, 19 bp, Homo sapiens
  siRNA target sequence for FLJ22527 (NM_024726.3,2300-2318).
ctatgcttccagatacgtt

SEQ ID NO: 389680 - DNA, 19 bp, Homo sapiens
  siRNA target sequence for FLJ22527 (NM_024726.3,2401-2419).
gcttcacccaaggacatat

SEQ ID NO: 389681 - DNA, 19 bp, Homo sapiens
  siRNA target sequence for FLJ22527 (NM_024726.3,2402-2420).
cttcacccaaggacatata

SEQ ID NO: 389682 - DNA, 19 bp, Homo sapiens
  siRNA target sequence for FLJ22527 (NM_024726.3,2479-2497).
ctctcactgcagttgagtt

SEQ ID NO: 389683 - DNA, 19 bp, Homo sapiens
  siRNA target sequence for FLJ22527 (NM_024726.3,2504-2522).
ggcgataaccagcatgaat

SEQ ID NO: 389684 - DNA, 19 bp, Homo sapiens
  siRNA target sequence for FLJ22527 (NM_024726.3,2516-2534).
catgaatccagtgtacaaa

SEQ ID NO: 389685 - DNA, 19 bp, Homo sapiens
  siRNA target sequence for FLJ22527 (NM_024726.3,2541-2559).
gaagagagctttaagaact

SEQ ID NO: 389686 - DNA, 19 bp, Homo sapiens
  siRNA target sequence for FLJ22527 (NM_024726.3,2555-2573).
gaactggtatgccaaaact

SEQ ID NO: 389687 - DNA, 19 bp, Homo sapiens
  siRNA target sequence for FLJ23259 (NM_024727.1,177-195).
cttcaactgtcaacaaatt

SEQ ID NO: 389688 - DNA, 19 bp, Homo sapiens
  siRNA target sequence for FLJ23259 (NM_024727.1,180-198).
caactgtcaacaaatttct

SEQ ID NO: 389689 - DNA, 19 bp, Homo sapiens
  siRNA target sequence for FLJ23259 (NM_024727.1,229-247).
ggacaatgaccttaaaaca

SEQ ID NO: 389690 - DNA, 19 bp, Homo sapiens
  siRNA target sequence for FLJ23259 (NM_024727.1,372-390).
gcaaaaaggctgtcaacaa

SEQ ID NO: 389691 - DNA, 19 bp, Homo sapiens
  siRNA target sequence for FLJ23259 (NM_024727.1,383-401).
gtcaacaagtgtctagatt

SEQ ID NO: 389692 - DNA, 19 bp, Homo sapiens
  siRNA target sequence for FLJ23259 (NM_024727.1,403-421).
gaataactgtggattaaca

SEQ ID NO: 389693 - DNA, 19 bp, Homo sapiens
  siRNA target sequence for FLJ23259 (NM_024727.1,545-563).
gggagcaagatacaaatga

SEQ ID NO: 389694 - DNA, 19 bp, Homo sapiens
  siRNA target sequence for FLJ23259 (NM_024727.1,546-564).
ggagcaagatacaaatgat

SEQ ID NO: 389695 - DNA, 19 bp, Homo sapiens
  siRNA target sequence for FLJ23259 (NM_024727.1,549-567).
gcaagatacaaatgattga

SEQ ID NO: 389696 - DNA, 19 bp, Homo sapiens
  siRNA target sequence for FLJ23259 (NM_024727.1,580-598).
ctccctcacgtcagaagat

SEQ ID NO: 389697 - DNA, 19 bp, Homo sapiens
  siRNA target sequence for FLJ23259 (NM_024727.1,636-654).
gtctcgaagtacttgatct

SEQ ID NO: 389698 - DNA, 19 bp, Homo sapiens
  siRNA target sequence for FLJ23259 (NM_024727.1,638-656).
ctcgaagtacttgatcttt

SEQ ID NO: 389699 - DNA, 19 bp, Homo sapiens
  siRNA target sequence for FLJ23259 (NM_024727.1,695-713).
gctcagggattaaaaagca

SEQ ID NO: 389700 - DNA, 19 bp, Homo sapiens
  siRNA target sequence for FLJ23259 (NM_024727.1,714-732).
cctcaaatctgaaagtact

SEQ ID NO: 389701 - DNA, 19 bp, Homo sapiens
  siRNA target sequence for FLJ23259 (NM_024727.1,763-781).
gagtgtcaaaatattggat

SEQ ID NO: 389702 - DNA, 19 bp, Homo sapiens
  siRNA target sequence for FLJ23259 (NM_024727.1,779-797).
gatgctgcttttaggtatt

SEQ ID NO: 389703 - DNA, 19 bp, Homo sapiens
  siRNA target sequence for FLJ23259 (NM_024727.1,801-819).
gtgagctgaggaaattaga

SEQ ID NO: 389704 - DNA, 19 bp, Homo sapiens
  siRNA target sequence for FLJ23259 (NM_024727.1,835-853).
ggatctaggtggaggtttt

SEQ ID NO: 389705 - DNA, 19 bp, Homo sapiens
  siRNA target sequence for FLJ23259 (NM_024727.1,871-889).
gttggtcatgctaaagcat

SEQ ID NO: 389706 - DNA, 19 bp, Homo sapiens
  siRNA target sequence for FLJ23259 (NM_024727.1,877-895).
catgctaaagcatctacaa

SEQ ID NO: 389707 - DNA, 19 bp, Homo sapiens
  siRNA target sequence for FLJ23259 (NM_024727.1,905-923).
cttcaccagtgctcactaa

SEQ ID NO: 389708 - DNA, 19 bp, Homo sapiens
  siRNA target sequence for FLJ23259 (NM_024727.1,985-1003).
ggatttatcagccaacaaa

SEQ ID NO: 389709 - DNA, 19 bp, Homo sapiens
  siRNA target sequence for FLJ23259 (NM_024727.1,1010-1028).
ggcagttcttctgaaaact

SEQ ID NO: 389710 - DNA, 19 bp, Homo sapiens
  siRNA target sequence for FLJ23259 (NM_024727.1,1031-1049).
ctcagcaggctccgatttt

SEQ ID NO: 389711 - DNA, 19 bp, Homo sapiens
  siRNA target sequence for FLJ23259 (NM_024727.1,1033-1051).
cagcaggctccgattttta

SEQ ID NO: 389712 - DNA, 19 bp, Homo sapiens
  siRNA target sequence for FLJ23259 (NM_024727.1,1036-1054).
caggctccgatttttacca

SEQ ID NO: 389713 - DNA, 19 bp, Homo sapiens
  siRNA target sequence for FLJ23259 (NM_024727.1,1055-1073).
gcattgaagtcattagtta

SEQ ID NO: 389714 - DNA, 19 bp, Homo sapiens
  siRNA target sequence for FLJ23259 (NM_024727.1,1280-1298).
ctggcatcggtcatacaga

SEQ ID NO: 389715 - DNA, 19 bp, Homo sapiens
  siRNA target sequence for FLJ23259 (NM_024727.1,1328-1346).
gacctgagctacaatgaca

SEQ ID NO: 389716 - DNA, 19 bp, Homo sapiens
  siRNA target sequence for FLJ23259 (NM_024727.1,1368-1386).
ccatgttctgccaaaacgt

SEQ ID NO: 389717 - DNA, 19 bp, Homo sapiens
  siRNA target sequence for FLJ23259 (NM_024727.1,1402-1420).
gctaatcgagctggatatt

SEQ ID NO: 389718 - DNA, 19 bp, Homo sapiens
  siRNA target sequence for FLJ23259 (NM_024727.1,1403-1421).
ctaatcgagctggatatta

SEQ ID NO: 389719 - DNA, 19 bp, Homo sapiens
  siRNA target sequence for MYH14 (NM_024729.2,420-438).
ctccgggagcggtactact

SEQ ID NO: 389720 - DNA, 19 bp, Homo sapiens
  siRNA target sequence for MYH14 (NM_024729.2,1263-1281).
ctgggggtgacggatttct

SEQ ID NO: 389721 - DNA, 19 bp, Homo sapiens
  siRNA target sequence for MYH14 (NM_024729.2,1292-1310).
gctcacccctcgcatcaaa

SEQ ID NO: 389722 - DNA, 19 bp, Homo sapiens
  siRNA target sequence for MYH14 (NM_024729.2,1868-1886).
caacgagtggctgatgaaa

SEQ ID NO: 389723 - DNA, 19 bp, Homo sapiens
  siRNA target sequence for MYH14 (NM_024729.2,2906-2924).
gtgcagccgtcaaatgcaa

SEQ ID NO: 389724 - DNA, 19 bp, Homo sapiens
  siRNA target sequence for MYH14 (NM_024729.2,5246-5264).
ggtggccaatggtaacctt

SEQ ID NO: 389725 - DNA, 19 bp, Homo sapiens
  siRNA target sequence for MYH14 (NM_024729.2,5547-5565).
gctgcccttgagtctaagt

SEQ ID NO: 389726 - DNA, 19 bp, Homo sapiens
  siRNA target sequence for FLJ14351 (NM_024732.1,231-249).
gtgtaacctggcatggttt

SEQ ID NO: 389727 - DNA, 19 bp, Homo sapiens
  siRNA target sequence for FLJ14351 (NM_024732.1,252-270).
gtgtgctaggagtttgtga

SEQ ID NO: 389728 - DNA, 19 bp, Homo sapiens
  siRNA target sequence for FLJ14351 (NM_024732.1,338-356).
gatgagactccctttttat

SEQ ID NO: 389729 - DNA, 19 bp, Homo sapiens
  siRNA target sequence for FLJ14351 (NM_024732.1,341-359).
gagactccctttttatgca

SEQ ID NO: 389730 - DNA, 19 bp, Homo sapiens
  siRNA target sequence for FLJ14351 (NM_024732.1,391-409).
cctggtggccagacttcta

SEQ ID NO: 389731 - DNA, 19 bp, Homo sapiens
  siRNA target sequence for FLJ14351 (NM_024732.1,399-417).
ccagacttctagcaacttt

SEQ ID NO: 389732 - DNA, 19 bp, Homo sapiens
  siRNA target sequence for FLJ14351 (NM_024732.1,506-524).
gctatcaaggtcatcttct

SEQ ID NO: 389733 - DNA, 19 bp, Homo sapiens
  siRNA target sequence for FLJ14351 (NM_024732.1,563-581).
ctgcacatcaggagcataa

SEQ ID NO: 389734 - DNA, 19 bp, Homo sapiens
  siRNA target sequence for FLJ14351 (NM_024732.1,565-583).
gcacatcaggagcataaat

SEQ ID NO: 389735 - DNA, 19 bp, Homo sapiens
  siRNA target sequence for FLJ14351 (NM_024732.1,566-584).
cacatcaggagcataaata

SEQ ID NO: 389736 - DNA, 19 bp, Homo sapiens
  siRNA target sequence for FLJ14351 (NM_024732.1,602-620).
cccactggctgcaacaagt

SEQ ID NO: 389737 - DNA, 19 bp, Homo sapiens
  siRNA target sequence for FLJ14345 (NM_024733.2,291-309).
cgttctacacggtgaagtt

SEQ ID NO: 389738 - DNA, 19 bp, Homo sapiens
  siRNA target sequence for FLJ14345 (NM_024733.2,605-623).
cgaggaaaacattataaat

SEQ ID NO: 389739 - DNA, 19 bp, Homo sapiens
  siRNA target sequence for FLJ14345 (NM_024733.2,650-668).
caaaactcacggctaacaa

SEQ ID NO: 389740 - DNA, 19 bp, Homo sapiens
  siRNA target sequence for FLJ14345 (NM_024733.2,655-673).
ctcacggctaacaagtcat

SEQ ID NO: 389741 - DNA, 19 bp, Homo sapiens
  siRNA target sequence for FLJ14345 (NM_024733.2,657-675).
cacggctaacaagtcataa

SEQ ID NO: 389742 - DNA, 19 bp, Homo sapiens
  siRNA target sequence for FLJ14345 (NM_024733.2,814-832).
cagtcaaccttcaaacctt

SEQ ID NO: 389743 - DNA, 19 bp, Homo sapiens
  siRNA target sequence for FLJ14345 (NM_024733.2,1318-1336).
cactcagtattcacactta

SEQ ID NO: 389744 - DNA, 19 bp, Homo sapiens
  siRNA target sequence for FLJ14345 (NM_024733.2,1322-1340).
cagtattcacacttagcaa

SEQ ID NO: 389745 - DNA, 19 bp, Homo sapiens
  siRNA target sequence for MGC15419 (NM_024735.2,566-584).
cgtcgatgaccctatgaga

SEQ ID NO: 389746 - DNA, 19 bp, Homo sapiens
  siRNA target sequence for MGC15419 (NM_024735.2,567-585).
gtcgatgaccctatgagat

SEQ ID NO: 389747 - DNA, 19 bp, Homo sapiens
  siRNA target sequence for MGC15419 (NM_024735.2,570-588).
gatgaccctatgagattca

SEQ ID NO: 389748 - DNA, 19 bp, Homo sapiens
  siRNA target sequence for MGC15419 (NM_024735.2,669-687).
ggccacatccagattgtga

SEQ ID NO: 389749 - DNA, 19 bp, Homo sapiens
  siRNA target sequence for MGC15419 (NM_024735.2,828-846).
ctcatcctgatgaagttca

SEQ ID NO: 389750 - DNA, 19 bp, Homo sapiens
  siRNA target sequence for MGC15419 (NM_024735.2,1095-1113).
gagaaccagcgcaacttca

SEQ ID NO: 389751 - DNA, 19 bp, Homo sapiens
  siRNA target sequence for MGC15419 (NM_024735.2,1097-1115).
gaaccagcgcaacttcaat

SEQ ID NO: 389752 - DNA, 19 bp, Homo sapiens
  siRNA target sequence for MGC15419 (NM_024735.2,1404-1422).
cgaacctgcaggatgtgtt

SEQ ID NO: 389753 - DNA, 19 bp, Homo sapiens
  siRNA target sequence for MGC15419 (NM_024735.2,1405-1423).
gaacctgcaggatgtgttt

SEQ ID NO: 389754 - DNA, 19 bp, Homo sapiens
  siRNA target sequence for MGC15419 (NM_024735.2,1518-1536).
gtctggctggagctgaaat

SEQ ID NO: 389755 - DNA, 19 bp, Homo sapiens
  siRNA target sequence for FLJ12150 (NM_024736.4,696-714).
gaaaccccgttataagtgt

SEQ ID NO: 389756 - DNA, 19 bp, Homo sapiens
  siRNA target sequence for FLJ12150 (NM_024736.4,713-731).
gtgtcaacctgtctatcaa

SEQ ID NO: 389757 - DNA, 19 bp, Homo sapiens
  siRNA target sequence for FLJ12150 (NM_024736.4,839-857).
ccccaggacaggcaaagat

SEQ ID NO: 389758 - DNA, 19 bp, Homo sapiens
  siRNA target sequence for FLJ12150 (NM_024736.4,890-908).
gcacctcaatgaatgtgta

SEQ ID NO: 389759 - DNA, 19 bp, Homo sapiens
  siRNA target sequence for FLJ12150 (NM_024736.4,1000-1018).
caagcaaccctgcttttat

SEQ ID NO: 389760 - DNA, 19 bp, Homo sapiens
  siRNA target sequence for FLJ12150 (NM_024736.4,1598-1616).
ggcagccagaacacaaagt

SEQ ID NO: 389761 - DNA, 19 bp, Homo sapiens
  siRNA target sequence for FLJ21415 (NM_024738.1,257-275).
gggcagtgagagataggaa

SEQ ID NO: 389762 - DNA, 19 bp, Homo sapiens
  siRNA target sequence for FLJ21415 (NM_024738.1,258-276).
ggcagtgagagataggaat

SEQ ID NO: 389763 - DNA, 19 bp, Homo sapiens
  siRNA target sequence for FLJ21415 (NM_024738.1,282-300).
ccaggttcatgaccataat

SEQ ID NO: 389764 - DNA, 19 bp, Homo sapiens
  siRNA target sequence for FLJ21415 (NM_024738.1,397-415).
gatgaactcggctacgttt

SEQ ID NO: 389765 - DNA, 19 bp, Homo sapiens
  siRNA target sequence for FLJ21415 (NM_024738.1,435-453).
ggtaaatggctgctgtaat

SEQ ID NO: 389766 - DNA, 19 bp, Homo sapiens
  siRNA target sequence for FLJ21415 (NM_024738.1,509-527).
gctgcagcgcctatgagta

SEQ ID NO: 389767 - DNA, 19 bp, Homo sapiens
  siRNA target sequence for FLJ21415 (NM_024738.1,620-638).
cagtcgaagatcactttga

SEQ ID NO: 389768 - DNA, 19 bp, Homo sapiens
  siRNA target sequence for FLJ21415 (NM_024738.1,698-716).
gggaccccatagcaaagta

SEQ ID NO: 389769 - DNA, 19 bp, Homo sapiens
  siRNA target sequence for FLJ21415 (NM_024738.1,704-722).
ccatagcaaagtattgcta

SEQ ID NO: 389770 - DNA, 19 bp, Homo sapiens
  siRNA target sequence for FLJ21415 (NM_024738.1,705-723).
catagcaaagtattgctat

SEQ ID NO: 389771 - DNA, 19 bp, Homo sapiens
  siRNA target sequence for DIBD1 (NM_024740.1,217-235).
gagcaccggaccgagttat

SEQ ID NO: 389772 - DNA, 19 bp, Homo sapiens
  siRNA target sequence for DIBD1 (NM_024740.1,219-237).
gcaccggaccgagttatct

SEQ ID NO: 389773 - DNA, 19 bp, Homo sapiens
  siRNA target sequence for DIBD1 (NM_024740.1,228-246).
cgagttatctgggaacaaa

SEQ ID NO: 389774 - DNA, 19 bp, Homo sapiens
  siRNA target sequence for DIBD1 (NM_024740.1,261-279).
ggcacctgaaggatctact

SEQ ID NO: 389775 - DNA, 19 bp, Homo sapiens
  siRNA target sequence for DIBD1 (NM_024740.1,271-289).
ggatctactgctttcaagt

SEQ ID NO: 389776 - DNA, 19 bp, Homo sapiens
  siRNA target sequence for DIBD1 (NM_024740.1,368-386).
caacacactacctcatcta

SEQ ID NO: 389777 - DNA, 19 bp, Homo sapiens
  siRNA target sequence for DIBD1 (NM_024740.1,408-426).
ggaatattccccagcatat

SEQ ID NO: 389778 - DNA, 19 bp, Homo sapiens
  siRNA target sequence for DIBD1 (NM_024740.1,427-445).
gccattcgctcctatgctt

SEQ ID NO: 389779 - DNA, 19 bp, Homo sapiens
  siRNA target sequence for DIBD1 (NM_024740.1,428-446).
ccattcgctcctatgctta

SEQ ID NO: 389780 - DNA, 19 bp, Homo sapiens
  siRNA target sequence for DIBD1 (NM_024740.1,473-491).
catttcatgcaagaattct

SEQ ID NO: 389781 - DNA, 19 bp, Homo sapiens
  siRNA target sequence for DIBD1 (NM_024740.1,497-515).
ctaataagattcttgtgtt

SEQ ID NO: 389782 - DNA, 19 bp, Homo sapiens
  siRNA target sequence for DIBD1 (NM_024740.1,537-555).
ggcttttgtgagctgtatt

SEQ ID NO: 389783 - DNA, 19 bp, Homo sapiens
  siRNA target sequence for DIBD1 (NM_024740.1,538-556).
gcttttgtgagctgtattt

SEQ ID NO: 389784 - DNA, 19 bp, Homo sapiens
  siRNA target sequence for DIBD1 (NM_024740.1,673-691).
cctagtagcttctgtatgt

SEQ ID NO: 389785 - DNA, 19 bp, Homo sapiens
  siRNA target sequence for DIBD1 (NM_024740.1,706-724).
gccatgactggatggtata

SEQ ID NO: 389786 - DNA, 19 bp, Homo sapiens
  siRNA target sequence for DIBD1 (NM_024740.1,707-725).
ccatgactggatggtatat

SEQ ID NO: 389787 - DNA, 19 bp, Homo sapiens
  siRNA target sequence for DIBD1 (NM_024740.1,771-789).
cttaggctggccattcagt

SEQ ID NO: 389788 - DNA, 19 bp, Homo sapiens
  siRNA target sequence for DIBD1 (NM_024740.1,786-804).
cagtgcagctcttggttta

SEQ ID NO: 389789 - DNA, 19 bp, Homo sapiens
  siRNA target sequence for DIBD1 (NM_024740.1,864-882).
gctgatggccctcatacta

SEQ ID NO: 389790 - DNA, 19 bp, Homo sapiens
  siRNA target sequence for DIBD1 (NM_024740.1,865-883).
ctgatggccctcatactat

SEQ ID NO: 389791 - DNA, 19 bp, Homo sapiens
  siRNA target sequence for DIBD1 (NM_024740.1,867-885).
gatggccctcatactattt

SEQ ID NO: 389792 - DNA, 19 bp, Homo sapiens
  siRNA target sequence for DIBD1 (NM_024740.1,940-958).
ccactcaacattgttttgt

SEQ ID NO: 389793 - DNA, 19 bp, Homo sapiens
  siRNA target sequence for DIBD1 (NM_024740.1,979-997).
ggacctgatctttatggta

SEQ ID NO: 389794 - DNA, 19 bp, Homo sapiens
  siRNA target sequence for DIBD1 (NM_024740.1,994-1012).
ggtacagaaccctggtatt

SEQ ID NO: 389795 - DNA, 19 bp, Homo sapiens
  siRNA target sequence for DIBD1 (NM_024740.1,998-1016).
cagaaccctggtatttcta

SEQ ID NO: 389796 - DNA, 19 bp, Homo sapiens
  siRNA target sequence for DIBD1 (NM_024740.1,1082-1100).
cttctcttatggaatacct

SEQ ID NO: 389797 - DNA, 19 bp, Homo sapiens
  siRNA target sequence for DIBD1 (NM_024740.1,1109-1127).
gatttcatgttcagaattt

SEQ ID NO: 389798 - DNA, 19 bp, Homo sapiens
  siRNA target sequence for DIBD1 (NM_024740.1,1153-1171).
gctccaatgtatatttggt

SEQ ID NO: 389799 - DNA, 19 bp, Homo sapiens
  siRNA target sequence for DIBD1 (NM_024740.1,1154-1172).
ctccaatgtatatttggtt

SEQ ID NO: 389800 - DNA, 19 bp, Homo sapiens
  siRNA target sequence for DIBD1 (NM_024740.1,1156-1174).
ccaatgtatatttggttta

SEQ ID NO: 389801 - DNA, 19 bp, Homo sapiens
  siRNA target sequence for DIBD1 (NM_024740.1,1218-1236).
ccctgtgtatccacttata

SEQ ID NO: 389802 - DNA, 19 bp, Homo sapiens
  siRNA target sequence for DIBD1 (NM_024740.1,1305-1323).
ctttgtgtttcaacgatat

SEQ ID NO: 389803 - DNA, 19 bp, Homo sapiens
  siRNA target sequence for DIBD1 (NM_024740.1,1325-1343).
gcctggagcactatactgt

SEQ ID NO: 389804 - DNA, 19 bp, Homo sapiens
  siRNA target sequence for DIBD1 (NM_024740.1,1335-1353).
ctatactgtgacatcgaat

SEQ ID NO: 389805 - DNA, 19 bp, Homo sapiens
  siRNA target sequence for DIBD1 (NM_024740.1,1378-1396).
ctgtttgggctcttgtcat

SEQ ID NO: 389806 - DNA, 19 bp, Homo sapiens
  siRNA target sequence for DIBD1 (NM_024740.1,1453-1471).
gaattttaccgaattgcta

SEQ ID NO: 389807 - DNA, 19 bp, Homo sapiens
  siRNA target sequence for DIBD1 (NM_024740.1,1525-1543).
ggaaaagagtggtatcgat

SEQ ID NO: 389808 - DNA, 19 bp, Homo sapiens
  siRNA target sequence for DIBD1 (NM_024740.1,1526-1544).
gaaaagagtggtatcgatt

SEQ ID NO: 389809 - DNA, 19 bp, Homo sapiens
  siRNA target sequence for DIBD1 (NM_024740.1,1607-1625).
gtcagttaccaaaaccttt

SEQ ID NO: 389810 - DNA, 19 bp, Homo sapiens
  siRNA target sequence for DIBD1 (NM_024740.1,1691-1709).
catccagatatattgatat

SEQ ID NO: 389811 - DNA, 19 bp, Homo sapiens
  siRNA target sequence for DIBD1 (NM_024740.1,1718-1736).
gccattatttagtggattt

SEQ ID NO: 389812 - DNA, 19 bp, Homo sapiens
  siRNA target sequence for DIBD1 (NM_024740.1,1759-1777).
cgggagccaaaatattcat

SEQ ID NO: 389813 - DNA, 19 bp, Homo sapiens
  siRNA target sequence for DIBD1 (NM_024740.1,1764-1782).
gccaaaatattcatccaat

SEQ ID NO: 389814 - DNA, 19 bp, Homo sapiens
  siRNA target sequence for DIBD1 (NM_024740.1,1803-1821).
ggcctatagaccattcctt

SEQ ID NO: 389815 - DNA, 19 bp, Homo sapiens
  siRNA target sequence for DIBD1 (NM_024740.1,1842-1860).
gctgctgcgggcattctat

SEQ ID NO: 389816 - DNA, 19 bp, Homo sapiens
  siRNA target sequence for DIBD1 (NM_024740.1,1879-1897).
cagtatacagtgtacgtaa

SEQ ID NO: 389817 - DNA, 19 bp, Homo sapiens
  siRNA target sequence for SHCBP1 (NM_024745.2,104-122).
cgtctctggagaaaggttt

SEQ ID NO: 389818 - DNA, 19 bp, Homo sapiens
  siRNA target sequence for SHCBP1 (NM_024745.2,136-154).
gattcatgcagtgattgta

SEQ ID NO: 389819 - DNA, 19 bp, Homo sapiens
  siRNA target sequence for SHCBP1 (NM_024745.2,172-190).
ggttctagtttacaaagtt

SEQ ID NO: 389820 - DNA, 19 bp, Homo sapiens
  siRNA target sequence for SHCBP1 (NM_024745.2,255-273).
gcgattcagagcctatcaa

SEQ ID NO: 389821 - DNA, 19 bp, Homo sapiens
  siRNA target sequence for SHCBP1 (NM_024745.2,257-275).
gattcagagcctatcaaga

SEQ ID NO: 389822 - DNA, 19 bp, Homo sapiens
  siRNA target sequence for SHCBP1 (NM_024745.2,263-281).
gagcctatcaagattacat

SEQ ID NO: 389823 - DNA, 19 bp, Homo sapiens
  siRNA target sequence for SHCBP1 (NM_024745.2,265-283).
gcctatcaagattacattt

SEQ ID NO: 389824 - DNA, 19 bp, Homo sapiens
  siRNA target sequence for SHCBP1 (NM_024745.2,362-380).
gggcagtctggcacactaa

SEQ ID NO: 389825 - DNA, 19 bp, Homo sapiens
  siRNA target sequence for SHCBP1 (NM_024745.2,363-381).
ggcagtctggcacactaat

SEQ ID NO: 389826 - DNA, 19 bp, Homo sapiens
  siRNA target sequence for SHCBP1 (NM_024745.2,365-383).
cagtctggcacactaatgt

SEQ ID NO: 389827 - DNA, 19 bp, Homo sapiens
  siRNA target sequence for SHCBP1 (NM_024745.2,367-385).
gtctggcacactaatgtgt

SEQ ID NO: 389828 - DNA, 19 bp, Homo sapiens
  siRNA target sequence for SHCBP1 (NM_024745.2,596-614).
caattgagcatgtcagatt

SEQ ID NO: 389829 - DNA, 19 bp, Homo sapiens
  siRNA target sequence for SHCBP1 (NM_024745.2,655-673).
gaggatgaatacgattatt

SEQ ID NO: 389830 - DNA, 19 bp, Homo sapiens
  siRNA target sequence for SHCBP1 (NM_024745.2,685-703).
gttgaacctcgattaagat

SEQ ID NO: 389831 - DNA, 19 bp, Homo sapiens
  siRNA target sequence for SHCBP1 (NM_024745.2,692-710).
ctcgattaagattgcatta

SEQ ID NO: 389832 - DNA, 19 bp, Homo sapiens
  siRNA target sequence for SHCBP1 (NM_024745.2,728-746).
gagttccatcaggacttat

SEQ ID NO: 389833 - DNA, 19 bp, Homo sapiens
  siRNA target sequence for SHCBP1 (NM_024745.2,737-755).
caggacttattgttgacta

SEQ ID NO: 389834 - DNA, 19 bp, Homo sapiens
  siRNA target sequence for SHCBP1 (NM_024745.2,748-766).
gttgactaccacaatctgt

SEQ ID NO: 389835 - DNA, 19 bp, Homo sapiens
  siRNA target sequence for SHCBP1 (NM_024745.2,778-796).
gaggagagttacaggaaat

SEQ ID NO: 389836 - DNA, 19 bp, Homo sapiens
  siRNA target sequence for SHCBP1 (NM_024745.2,780-798).
ggagagttacaggaaattt

SEQ ID NO: 389837 - DNA, 19 bp, Homo sapiens
  siRNA target sequence for SHCBP1 (NM_024745.2,805-823).
ctgagaagcagtttgtcaa

SEQ ID NO: 389838 - DNA, 19 bp, Homo sapiens
  siRNA target sequence for SHCBP1 (NM_024745.2,835-853).
gattccgagcaggaaaata

SEQ ID NO: 389839 - DNA, 19 bp, Homo sapiens
  siRNA target sequence for SHCBP1 (NM_024745.2,884-902).
cggagatggaacagttgaa

SEQ ID NO: 389840 - DNA, 19 bp, Homo sapiens
  siRNA target sequence for SHCBP1 (NM_024745.2,909-927).
gctgaaactcattgagaat

SEQ ID NO: 389841 - DNA, 19 bp, Homo sapiens
  siRNA target sequence for SHCBP1 (NM_024745.2,949-967).
ggttatcagaagaattcta

SEQ ID NO: 389842 - DNA, 19 bp, Homo sapiens
  siRNA target sequence for SHCBP1 (NM_024745.2,950-968).
gttatcagaagaattctaa

SEQ ID NO: 389843 - DNA, 19 bp, Homo sapiens
  siRNA target sequence for SHCBP1 (NM_024745.2,989-1007).
gttccagcggtcagaagat

SEQ ID NO: 389844 - DNA, 19 bp, Homo sapiens
  siRNA target sequence for SHCBP1 (NM_024745.2,1080-1098).
gcctggtgaggaagaaaga

SEQ ID NO: 389845 - DNA, 19 bp, Homo sapiens
  siRNA target sequence for SHCBP1 (NM_024745.2,1110-1128).
ccatagtgatccattgtct

SEQ ID NO: 389846 - DNA, 19 bp, Homo sapiens
  siRNA target sequence for SHCBP1 (NM_024745.2,1117-1135).
gatccattgtctgctataa

SEQ ID NO: 389847 - DNA, 19 bp, Homo sapiens
  siRNA target sequence for SHCBP1 (NM_024745.2,1183-1201).
gtggtacatggcactttct

SEQ ID NO: 389848 - DNA, 19 bp, Homo sapiens
  siRNA target sequence for SHCBP1 (NM_024745.2,1265-1283).
ggggcaaaggcgacacttt

SEQ ID NO: 389849 - DNA, 19 bp, Homo sapiens
  siRNA target sequence for SHCBP1 (NM_024745.2,1266-1284).
gggcaaaggcgacactttt

SEQ ID NO: 389850 - DNA, 19 bp, Homo sapiens
  siRNA target sequence for SHCBP1 (NM_024745.2,1268-1286).
gcaaaggcgacacttttgt

SEQ ID NO: 389851 - DNA, 19 bp, Homo sapiens
  siRNA target sequence for SHCBP1 (NM_024745.2,1290-1308).
ctgcactggtgctgatatt

SEQ ID NO: 389852 - DNA, 19 bp, Homo sapiens
  siRNA target sequence for SHCBP1 (NM_024745.2,1297-1315).
ggtgctgatattaaaatct

SEQ ID NO: 389853 - DNA, 19 bp, Homo sapiens
  siRNA target sequence for SHCBP1 (NM_024745.2,1342-1360).
gctgtagagggaatcttaa

SEQ ID NO: 389854 - DNA, 19 bp, Homo sapiens
  siRNA target sequence for SHCBP1 (NM_024745.2,1343-1361).
ctgtagagggaatcttaat

SEQ ID NO: 389855 - DNA, 19 bp, Homo sapiens
  siRNA target sequence for SHCBP1 (NM_024745.2,1373-1391).
gtaagactacgctggaaaa

SEQ ID NO: 389856 - DNA, 19 bp, Homo sapiens
  siRNA target sequence for SHCBP1 (NM_024745.2,1377-1395).
gactacgctggaaaactgt

SEQ ID NO: 389857 - DNA, 19 bp, Homo sapiens
  siRNA target sequence for SHCBP1 (NM_024745.2,1428-1446).
gcggacatcagcagagttt

SEQ ID NO: 389858 - DNA, 19 bp, Homo sapiens
  siRNA target sequence for SHCBP1 (NM_024745.2,1433-1451).
catcagcagagtttctaat

SEQ ID NO: 389859 - DNA, 19 bp, Homo sapiens
  siRNA target sequence for SHCBP1 (NM_024745.2,1436-1454).
cagcagagtttctaatgaa

SEQ ID NO: 389860 - DNA, 19 bp, Homo sapiens
  siRNA target sequence for SHCBP1 (NM_024745.2,1452-1470).
gaagaactcggatttatat

SEQ ID NO: 389861 - DNA, 19 bp, Homo sapiens
  siRNA target sequence for SHCBP1 (NM_024745.2,1473-1491).
cgccaagggtgctggtata

SEQ ID NO: 389862 - DNA, 19 bp, Homo sapiens
  siRNA target sequence for SHCBP1 (NM_024745.2,1566-1584).
ggacttcttagatgaacat

SEQ ID NO: 389863 - DNA, 19 bp, Homo sapiens
  siRNA target sequence for SHCBP1 (NM_024745.2,1608-1626).
ggtgaataatataatacat

SEQ ID NO: 389864 - DNA, 19 bp, Homo sapiens
  siRNA target sequence for SHCBP1 (NM_024745.2,1831-1849).
gagcaagtcgagggaaatt

SEQ ID NO: 389865 - DNA, 19 bp, Homo sapiens
  siRNA target sequence for SHCBP1 (NM_024745.2,1833-1851).
gcaagtcgagggaaattgt

SEQ ID NO: 389866 - DNA, 19 bp, Homo sapiens
  siRNA target sequence for SHCBP1 (NM_024745.2,1837-1855).
gtcgagggaaattgtgaaa

SEQ ID NO: 389867 - DNA, 19 bp, Homo sapiens
  siRNA target sequence for SHCBP1 (NM_024745.2,1932-1950).
gcaagctgatgacaactta

SEQ ID NO: 389868 - DNA, 19 bp, Homo sapiens
  siRNA target sequence for SHCBP1 (NM_024745.2,2009-2027).
gtagttttggcacatttct

SEQ ID NO: 389869 - DNA, 19 bp, Homo sapiens
  siRNA target sequence for FLJ13840 (NM_024746.2,739-757).
cggcacccatcgcttcttt

SEQ ID NO: 389870 - DNA, 19 bp, Homo sapiens
  siRNA target sequence for FLJ13840 (NM_024746.2,741-759).
gcacccatcgcttctttgt

SEQ ID NO: 389871 - DNA, 19 bp, Homo sapiens
  siRNA target sequence for FLJ13840 (NM_024746.2,909-927).
gccacaatcgcaagttcta

SEQ ID NO: 389872 - DNA, 19 bp, Homo sapiens
  siRNA target sequence for FLJ13840 (NM_024746.2,913-931).
caatcgcaagttctatatt

SEQ ID NO: 389873 - DNA, 19 bp, Homo sapiens
  siRNA target sequence for FLJ13840 (NM_024746.2,939-957).
cgtgcctggacaagaagaa

SEQ ID NO: 389874 - DNA, 19 bp, Homo sapiens
  siRNA target sequence for FLJ13840 (NM_024746.2,959-977).
gtagaaaagatccgaatta

SEQ ID NO: 389875 - DNA, 19 bp, Homo sapiens
  siRNA target sequence for FLJ13840 (NM_024746.2,993-1011).
ctcgggctgatcctaacaa

SEQ ID NO: 389876 - DNA, 19 bp, Homo sapiens
  siRNA target sequence for FLJ13840 (NM_024746.2,1052-1070).
gaaccagcctcaaaccata

SEQ ID NO: 389877 - DNA, 19 bp, Homo sapiens
  siRNA target sequence for FLJ13840 (NM_024746.2,1066-1084).
ccataatggcggacaactt

SEQ ID NO: 389878 - DNA, 19 bp, Homo sapiens
  siRNA target sequence for FLJ13840 (NM_024746.2,1247-1265).
gtcccctcggacaatccat

SEQ ID NO: 389879 - DNA, 19 bp, Homo sapiens
  siRNA target sequence for FLJ13840 (NM_024746.2,1364-1382).
ggccgaggccggatattct

SEQ ID NO: 389880 - DNA, 19 bp, Homo sapiens
  siRNA target sequence for FLJ13840 (NM_024746.2,1366-1384).
ccgaggccggatattctgt

SEQ ID NO: 389881 - DNA, 19 bp, Homo sapiens
  siRNA target sequence for FLJ13840 (NM_024746.2,1459-1477).
ggaagggtttgcatgttat

SEQ ID NO: 389882 - DNA, 19 bp, Homo sapiens
  siRNA target sequence for FLJ13840 (NM_024746.2,1556-1574).
gtcactggaggttatgtct

SEQ ID NO: 389883 - DNA, 19 bp, Homo sapiens
  siRNA target sequence for FLJ13840 (NM_024746.2,1571-1589).
gtctatcgtggttgtgaat

SEQ ID NO: 389884 - DNA, 19 bp, Homo sapiens
  siRNA target sequence for FLJ13840 (NM_024746.2,1600-1618).
caatggcctgtatatcttt

SEQ ID NO: 389885 - DNA, 19 bp, Homo sapiens
  siRNA target sequence for FLJ13840 (NM_024746.2,1742-1760).
catagcaagttcatcatct

SEQ ID NO: 389886 - DNA, 19 bp, Homo sapiens
  siRNA target sequence for FLJ13840 (NM_024746.2,1775-1793).
gaagcaggggagctgtatt

SEQ ID NO: 389887 - DNA, 19 bp, Homo sapiens
  siRNA target sequence for FLJ13840 (NM_024746.2,1823-1841).
gcaccacgtggatctattt

SEQ ID NO: 389888 - DNA, 19 bp, Homo sapiens
  siRNA target sequence for FLJ13840 (NM_024746.2,1829-1847).
cgtggatctatttacaagt

SEQ ID NO: 389889 - DNA, 19 bp, Homo sapiens
  siRNA target sequence for FLJ13840 (NM_024746.2,1871-1889).
cccccaggcaagtgcaaat

SEQ ID NO: 389890 - DNA, 19 bp, Homo sapiens
  siRNA target sequence for FLJ13840 (NM_024746.2,1950-1968).
cagtcttggacttgctaaa

SEQ ID NO: 389891 - DNA, 19 bp, Homo sapiens
  siRNA target sequence for FLJ13840 (NM_024746.2,2096-2114).
cgagggcctggtacaaaga

SEQ ID NO: 389892 - DNA, 19 bp, Homo sapiens
  siRNA target sequence for HPS6 (NM_024747.4,717-735).
gcgtggcccacgttctact

SEQ ID NO: 389893 - DNA, 19 bp, Homo sapiens
  siRNA target sequence for HPS6 (NM_024747.4,785-803).
ggtctctcctacagtaaga

SEQ ID NO: 389894 - DNA, 19 bp, Homo sapiens
  siRNA target sequence for HPS6 (NM_024747.4,921-939).
gcctgctgttgcttgactt

SEQ ID NO: 389895 - DNA, 19 bp, Homo sapiens
  siRNA target sequence for HPS6 (NM_024747.4,945-963).
gcactgtgagcctattgca

SEQ ID NO: 389896 - DNA, 19 bp, Homo sapiens
  siRNA target sequence for HPS6 (NM_024747.4,1066-1084).
gctgggctccacattggaa

SEQ ID NO: 389897 - DNA, 19 bp, Homo sapiens
  siRNA target sequence for HPS6 (NM_024747.4,1117-1135).
gaggaaggtcctaagtaca

SEQ ID NO: 389898 - DNA, 19 bp, Homo sapiens
  siRNA target sequence for HPS6 (NM_024747.4,1254-1272).
ccccacagggtgttgagtt

SEQ ID NO: 389899 - DNA, 19 bp, Homo sapiens
  siRNA target sequence for HPS6 (NM_024747.4,1465-1483).
ggattaccgaggcttagaa

SEQ ID NO: 389900 - DNA, 19 bp, Homo sapiens
  siRNA target sequence for HPS6 (NM_024747.4,1564-1582).
gctgaggactgagttgata

SEQ ID NO: 389901 - DNA, 19 bp, Homo sapiens
  siRNA target sequence for HPS6 (NM_024747.4,2076-2094).
ccctgcttcgaagtgaaat

SEQ ID NO: 389902 - DNA, 19 bp, Homo sapiens
  siRNA target sequence for HPS6 (NM_024747.4,2081-2099).
cttcgaagtgaaatcttca

SEQ ID NO: 389903 - DNA, 19 bp, Homo sapiens
  siRNA target sequence for FLJ12505 (NM_024749.2,641-659).
ctccaggcgatccagaatt

SEQ ID NO: 389904 - DNA, 19 bp, Homo sapiens
  siRNA target sequence for FLJ12505 (NM_024749.2,644-662).
caggcgatccagaattaca

SEQ ID NO: 389905 - DNA, 19 bp, Homo sapiens
  siRNA target sequence for FLJ12505 (NM_024749.2,647-665).
gcgatccagaattacatga

SEQ ID NO: 389906 - DNA, 19 bp, Homo sapiens
  siRNA target sequence for FLJ12505 (NM_024749.2,664-682).
gaagaccctacactactta

SEQ ID NO: 389907 - DNA, 19 bp, Homo sapiens
  siRNA target sequence for FLJ12505 (NM_024749.2,669-687).
ccctacactacttaaccaa

SEQ ID NO: 389908 - DNA, 19 bp, Homo sapiens
  siRNA target sequence for FLJ12505 (NM_024749.2,670-688).
cctacactacttaaccaat

SEQ ID NO: 389909 - DNA, 19 bp, Homo sapiens
  siRNA target sequence for FLJ12505 (NM_024749.2,758-776).
gttgtgctggggatttact

SEQ ID NO: 389910 - DNA, 19 bp, Homo sapiens
  siRNA target sequence for FLJ12505 (NM_024749.2,869-887).
gactttgaggactcttaca

SEQ ID NO: 389911 - DNA, 19 bp, Homo sapiens
  siRNA target sequence for FLJ12505 (NM_024749.2,936-954).
cccatgagcctcatagctt

SEQ ID NO: 389912 - DNA, 19 bp, Homo sapiens
  siRNA target sequence for FLJ12505 (NM_024749.2,980-998).
gtcctcaacgtctcaaaga

SEQ ID NO: 389913 - DNA, 19 bp, Homo sapiens
  siRNA target sequence for FLJ12505 (NM_024749.2,1226-1244).
ggctatcaaatccgaattt

SEQ ID NO: 389914 - DNA, 19 bp, Homo sapiens
  siRNA target sequence for FLJ13273 (NM_024751.1,371-389).
ctgtgactgtaaaatcttt

SEQ ID NO: 389915 - DNA, 19 bp, Homo sapiens
  siRNA target sequence for FLJ13273 (NM_024751.1,410-428).
caaagaggtgagtagagat

SEQ ID NO: 389916 - DNA, 19 bp, Homo sapiens
  siRNA target sequence for FLJ13273 (NM_024751.1,419-437).
gagtagagatagttcacta

SEQ ID NO: 389917 - DNA, 19 bp, Homo sapiens
  siRNA target sequence for FLJ13273 (NM_024751.1,452-470).
gatccaggatgttgaaata

SEQ ID NO: 389918 - DNA, 19 bp, Homo sapiens
  siRNA target sequence for FLJ13273 (NM_024751.1,485-503).
gcaggagctcccaccaata

SEQ ID NO: 389919 - DNA, 19 bp, Homo sapiens
  siRNA target sequence for FLJ13273 (NM_024751.1,495-513).
ccaccaatagtccaaaatt

SEQ ID NO: 389920 - DNA, 19 bp, Homo sapiens
  siRNA target sequence for FLJ13273 (NM_024751.1,517-535).
gtttgcctgcagtagtaga

SEQ ID NO: 389921 - DNA, 19 bp, Homo sapiens
  siRNA target sequence for FLJ13273 (NM_024751.1,531-549).
gtagaacgatcagacaatt

SEQ ID NO: 389922 - DNA, 19 bp, Homo sapiens
  siRNA target sequence for FLJ13273 (NM_024751.1,561-579).
ggacttgctgttgtattga

SEQ ID NO: 389923 - DNA, 19 bp, Homo sapiens
  siRNA target sequence for FLJ13273 (NM_024751.1,603-621).
gaagcagaccccttaaaga

SEQ ID NO: 389924 - DNA, 19 bp, Homo sapiens
  siRNA target sequence for FLJ13273 (NM_024751.1,686-704).
gtggaccaggctatgtgaa

SEQ ID NO: 389925 - DNA, 19 bp, Homo sapiens
  siRNA target sequence for FLJ13273 (NM_024751.1,797-815).
gcttagtgagcctgttaga

SEQ ID NO: 389926 - DNA, 19 bp, Homo sapiens
  siRNA target sequence for FLJ13273 (NM_024751.1,806-824).
gcctgttagagtgcataat

SEQ ID NO: 389927 - DNA, 19 bp, Homo sapiens
  siRNA target sequence for FLJ13273 (NM_024751.1,808-826).
ctgttagagtgcataatga

SEQ ID NO: 389928 - DNA, 19 bp, Homo sapiens
  siRNA target sequence for FLJ13273 (NM_024751.1,912-930).
gtccacacacaggaaacat

SEQ ID NO: 389929 - DNA, 19 bp, Homo sapiens
  siRNA target sequence for FLJ13273 (NM_024751.1,953-971).
caagagtctggaactgaaa

SEQ ID NO: 389930 - DNA, 19 bp, Homo sapiens
  siRNA target sequence for FLJ13273 (NM_024751.1,1134-1152).
catcatttcttggtaatta

SEQ ID NO: 389931 - DNA, 19 bp, Homo sapiens
  siRNA target sequence for FLJ13273 (NM_024751.1,1146-1164).
gtaattatcagcaggaaat

SEQ ID NO: 389932 - DNA, 19 bp, Homo sapiens
  siRNA target sequence for FLJ13273 (NM_024751.1,1221-1239).
gaagtgccaggagtaaaaa

SEQ ID NO: 389933 - DNA, 19 bp, Homo sapiens
  siRNA target sequence for FLJ13273 (NM_024751.1,1249-1267).
ctaagtgtgggatccaatt

SEQ ID NO: 389934 - DNA, 19 bp, Homo sapiens
  siRNA target sequence for FLJ13273 (NM_024751.1,1258-1276).
ggatccaatttctccattt

SEQ ID NO: 389935 - DNA, 19 bp, Homo sapiens
  siRNA target sequence for FLJ13273 (NM_024751.1,1262-1280).
ccaatttctccatttacca

SEQ ID NO: 389936 - DNA, 19 bp, Homo sapiens
  siRNA target sequence for FLJ13273 (NM_024751.1,1286-1304).
gttgacaacctcaactgaa

SEQ ID NO: 389937 - DNA, 19 bp, Homo sapiens
  siRNA target sequence for FLJ13273 (NM_024751.1,1404-1422).
ggcattgaagtgatgtttt

SEQ ID NO: 389938 - DNA, 19 bp, Homo sapiens
  siRNA target sequence for FLJ13273 (NM_024751.1,1480-1498).
gcccaaaggaaggtaaaat

SEQ ID NO: 389939 - DNA, 19 bp, Homo sapiens
  siRNA target sequence for FLJ13273 (NM_024751.1,1532-1550).
gttgaacaaccttgtctat

SEQ ID NO: 389940 - DNA, 19 bp, Homo sapiens
  siRNA target sequence for FLJ13273 (NM_024751.1,1542-1560).
cttgtctatgtggtaacaa

SEQ ID NO: 389941 - DNA, 19 bp, Homo sapiens
  siRNA target sequence for FLJ13273 (NM_024751.1,1595-1613).
ctgcagcggtggggtattt

SEQ ID NO: 389942 - DNA, 19 bp, Homo sapiens
  siRNA target sequence for FLJ13273 (NM_024751.1,1597-1615).
gcagcggtggggtatttta

SEQ ID NO: 389943 - DNA, 19 bp, Homo sapiens
  siRNA target sequence for FLJ13273 (NM_024751.1,1598-1616).
cagcggtggggtattttat

SEQ ID NO: 389944 - DNA, 19 bp, Homo sapiens
  siRNA target sequence for FLJ13273 (NM_024751.1,1600-1618).
gcggtggggtattttatct

SEQ ID NO: 389945 - DNA, 19 bp, Homo sapiens
  siRNA target sequence for FLJ13273 (NM_024751.1,1602-1620).
ggtggggtattttatctct

SEQ ID NO: 389946 - DNA, 19 bp, Homo sapiens
  siRNA target sequence for FLJ11457 (NM_024753.2,154-172).
gactttgattaattactat

SEQ ID NO: 389947 - DNA, 19 bp, Homo sapiens
  siRNA target sequence for FLJ11457 (NM_024753.2,205-223).
ggttgccagtgaaggaatt

SEQ ID NO: 389948 - DNA, 19 bp, Homo sapiens
  siRNA target sequence for FLJ11457 (NM_024753.2,239-257).
gatccagtcttcaggtttt

SEQ ID NO: 389949 - DNA, 19 bp, Homo sapiens
  siRNA target sequence for FLJ11457 (NM_024753.2,264-282).
cctatggcacattaatgga

SEQ ID NO: 389950 - DNA, 19 bp, Homo sapiens
  siRNA target sequence for FLJ11457 (NM_024753.2,270-288).
gcacattaatggaaggtaa

SEQ ID NO: 389951 - DNA, 19 bp, Homo sapiens
  siRNA target sequence for FLJ11457 (NM_024753.2,305-323).
cgagaatttgaggctatta

SEQ ID NO: 389952 - DNA, 19 bp, Homo sapiens
  siRNA target sequence for FLJ11457 (NM_024753.2,306-324).
gagaatttgaggctattaa

SEQ ID NO: 389953 - DNA, 19 bp, Homo sapiens
  siRNA target sequence for FLJ11457 (NM_024753.2,332-350).
caagatgtatcactttgtt

SEQ ID NO: 389954 - DNA, 19 bp, Homo sapiens
  siRNA target sequence for FLJ11457 (NM_024753.2,351-369).
ctctacttgcactgatata

SEQ ID NO: 389955 - DNA, 19 bp, Homo sapiens
  siRNA target sequence for FLJ11457 (NM_024753.2,362-380).
ctgatatatgcccataaaa

SEQ ID NO: 389956 - DNA, 19 bp, Homo sapiens
  siRNA target sequence for FLJ11457 (NM_024753.2,491-509).
cacattggtcgccatgata

SEQ ID NO: 389957 - DNA, 19 bp, Homo sapiens
  siRNA target sequence for FLJ11457 (NM_024753.2,493-511).
cattggtcgccatgataaa

SEQ ID NO: 389958 - DNA, 19 bp, Homo sapiens
  siRNA target sequence for FLJ11457 (NM_024753.2,497-515).
ggtcgccatgataaagcaa

SEQ ID NO: 389959 - DNA, 19 bp, Homo sapiens
  siRNA target sequence for FLJ11457 (NM_024753.2,506-524).
gataaagcaagggaatata

SEQ ID NO: 389960 - DNA, 19 bp, Homo sapiens
  siRNA target sequence for FLJ11457 (NM_024753.2,512-530).
gcaagggaatatattgaca

SEQ ID NO: 389961 - DNA, 19 bp, Homo sapiens
  siRNA target sequence for FLJ11457 (NM_024753.2,555-573).
gtaaacagggacacgtttt

SEQ ID NO: 389962 - DNA, 19 bp, Homo sapiens
  siRNA target sequence for FLJ11457 (NM_024753.2,599-617).
ggaaaagagccttacacta

SEQ ID NO: 389963 - DNA, 19 bp, Homo sapiens
  siRNA target sequence for FLJ11457 (NM_024753.2,600-618).
gaaaagagccttacactaa

SEQ ID NO: 389964 - DNA, 19 bp, Homo sapiens
  siRNA target sequence for FLJ11457 (NM_024753.2,649-667).
ccaagatgggaatgatact

SEQ ID NO: 389965 - DNA, 19 bp, Homo sapiens
  siRNA target sequence for FLJ11457 (NM_024753.2,695-713).
cttgagatgcgccagaatt

SEQ ID NO: 389966 - DNA, 19 bp, Homo sapiens
  siRNA target sequence for FLJ11457 (NM_024753.2,698-716).
gagatgcgccagaattatt

SEQ ID NO: 389967 - DNA, 19 bp, Homo sapiens
  siRNA target sequence for FLJ11457 (NM_024753.2,700-718).
gatgcgccagaattattca

SEQ ID NO: 389968 - DNA, 19 bp, Homo sapiens
  siRNA target sequence for FLJ11457 (NM_024753.2,739-757).
ccagataatcgtgaatttt

SEQ ID NO: 389969 - DNA, 19 bp, Homo sapiens
  siRNA target sequence for FLJ11457 (NM_024753.2,904-922).
gtgtagagagggggatata

SEQ ID NO: 389970 - DNA, 19 bp, Homo sapiens
  siRNA target sequence for FLJ11457 (NM_024753.2,906-924).
gtagagagggggatataga

SEQ ID NO: 389971 - DNA, 19 bp, Homo sapiens
  siRNA target sequence for FLJ11457 (NM_024753.2,933-951).
ccaccaagctggaaaactt

SEQ ID NO: 389972 - DNA, 19 bp, Homo sapiens
  siRNA target sequence for FLJ11457 (NM_024753.2,1010-1028).
ctcgccttcagcagaactt

SEQ ID NO: 389973 - DNA, 19 bp, Homo sapiens
  siRNA target sequence for FLJ11457 (NM_024753.2,1029-1047).
gtggacgtagtcaacttat

SEQ ID NO: 389974 - DNA, 19 bp, Homo sapiens
  siRNA target sequence for FLJ11457 (NM_024753.2,1032-1050).
gacgtagtcaacttattct

SEQ ID NO: 389975 - DNA, 19 bp, Homo sapiens
  siRNA target sequence for FLJ11457 (NM_024753.2,1035-1053).
gtagtcaacttattcttca

SEQ ID NO: 389976 - DNA, 19 bp, Homo sapiens
  siRNA target sequence for FLJ11457 (NM_024753.2,1070-1088).
cttgagagagcttttagtt

SEQ ID NO: 389977 - DNA, 19 bp, Homo sapiens
  siRNA target sequence for FLJ11457 (NM_024753.2,1116-1134).
cagaacttggataccaaat

SEQ ID NO: 389978 - DNA, 19 bp, Homo sapiens
  siRNA target sequence for FLJ11457 (NM_024753.2,1118-1136).
gaacttggataccaaatga

SEQ ID NO: 389979 - DNA, 19 bp, Homo sapiens
  siRNA target sequence for FLJ11457 (NM_024753.2,1121-1139).
cttggataccaaatgattt

SEQ ID NO: 389980 - DNA, 19 bp, Homo sapiens
  siRNA target sequence for FLJ11457 (NM_024753.2,1135-1153).
gattttacaaggaagagtt

SEQ ID NO: 389981 - DNA, 19 bp, Homo sapiens
  siRNA target sequence for FLJ11457 (NM_024753.2,1157-1175).
gaggcactgaagtggtata

SEQ ID NO: 389982 - DNA, 19 bp, Homo sapiens
  siRNA target sequence for FLJ11457 (NM_024753.2,1160-1178).
gcactgaagtggtataaga

SEQ ID NO: 389983 - DNA, 19 bp, Homo sapiens
  siRNA target sequence for FLJ11457 (NM_024753.2,1177-1195).
gaccgccatgacacttgat

SEQ ID NO: 389984 - DNA, 19 bp, Homo sapiens
  siRNA target sequence for FLJ11457 (NM_024753.2,1207-1225).
gtctgccctagttggattt

SEQ ID NO: 389985 - DNA, 19 bp, Homo sapiens
  siRNA target sequence for FLJ11457 (NM_024753.2,1212-1230).
ccctagttggatttatcca

SEQ ID NO: 389986 - DNA, 19 bp, Homo sapiens
  siRNA target sequence for FLJ11457 (NM_024753.2,1262-1280).
gcagatcagcagctagaat

SEQ ID NO: 389987 - DNA, 19 bp, Homo sapiens
  siRNA target sequence for FLJ11457 (NM_024753.2,1294-1312).
ccagcaatccattggaaaa

SEQ ID NO: 389988 - DNA, 19 bp, Homo sapiens
  siRNA target sequence for FLJ11457 (NM_024753.2,1297-1315).
gcaatccattggaaaatct

SEQ ID NO: 389989 - DNA, 19 bp, Homo sapiens
  siRNA target sequence for FLJ11457 (NM_024753.2,1307-1325).
ggaaaatctgcggaattaa

SEQ ID NO: 389990 - DNA, 19 bp, Homo sapiens
  siRNA target sequence for FLJ11457 (NM_024753.2,1308-1326).
gaaaatctgcggaattaat

SEQ ID NO: 389991 - DNA, 19 bp, Homo sapiens
  siRNA target sequence for FLJ11457 (NM_024753.2,1314-1332).
ctgcggaattaatctattt

SEQ ID NO: 389992 - DNA, 19 bp, Homo sapiens
  siRNA target sequence for FLJ11457 (NM_024753.2,1317-1335).
cggaattaatctatttaca

SEQ ID NO: 389993 - DNA, 19 bp, Homo sapiens
  siRNA target sequence for FLJ11457 (NM_024753.2,1402-1420).
ggacactcacttttcacaa

SEQ ID NO: 389994 - DNA, 19 bp, Homo sapiens
  siRNA target sequence for FLJ11457 (NM_024753.2,1403-1421).
gacactcacttttcacaat

SEQ ID NO: 389995 - DNA, 19 bp, Homo sapiens
  siRNA target sequence for FLJ11457 (NM_024753.2,1434-1452).
ctcttggcatacagtattt

SEQ ID NO: 389996 - DNA, 19 bp, Homo sapiens
  siRNA target sequence for FLJ11457 (NM_024753.2,1466-1484).
cctgatttcttgttagaaa

SEQ ID NO: 389997 - DNA, 19 bp, Homo sapiens
  siRNA target sequence for FLJ11457 (NM_024753.2,1573-1591).
cctggagactgtagtaaga

SEQ ID NO: 389998 - DNA, 19 bp, Homo sapiens
  siRNA target sequence for FLJ11457 (NM_024753.2,1574-1592).
ctggagactgtagtaagaa

SEQ ID NO: 389999 - DNA, 19 bp, Homo sapiens
  siRNA target sequence for FLJ11457 (NM_024753.2,1576-1594).
ggagactgtagtaagaact

SEQ ID NO: 390000 - DNA, 19 bp, Homo sapiens
  siRNA target sequence for FLJ11457 (NM_024753.2,1579-1597).
gactgtagtaagaactgtt

SEQ ID NO: 390001 - DNA, 19 bp, Homo sapiens
  siRNA target sequence for FLJ11457 (NM_024753.2,1681-1699).
gcactgcttagaacacaat

SEQ ID NO: 390002 - DNA, 19 bp, Homo sapiens
  siRNA target sequence for FLJ11457 (NM_024753.2,1724-1742).
ctgctagctcaggtttact

SEQ ID NO: 390003 - DNA, 19 bp, Homo sapiens
  siRNA target sequence for FLJ11457 (NM_024753.2,1727-1745).
ctagctcaggtttacttgt

SEQ ID NO: 390004 - DNA, 19 bp, Homo sapiens
  siRNA target sequence for FLJ11457 (NM_024753.2,1765-1783).
gtgttctcagtctcttgaa

SEQ ID NO: 390005 - DNA, 19 bp, Homo sapiens
  siRNA target sequence for FLJ11457 (NM_024753.2,1807-1825).
ggtgagagactatccttta

SEQ ID NO: 390006 - DNA, 19 bp, Homo sapiens
  siRNA target sequence for FLJ11457 (NM_024753.2,1812-1830).
gagactatcctttatacca

SEQ ID NO: 390007 - DNA, 19 bp, Homo sapiens
  siRNA target sequence for FLJ11457 (NM_024753.2,1865-1883).
gaaatagcagacgcaatta

SEQ ID NO: 390008 - DNA, 19 bp, Homo sapiens
  siRNA target sequence for FLJ11457 (NM_024753.2,1889-1907).
ctgcatatggcaatgagtt

SEQ ID NO: 390009 - DNA, 19 bp, Homo sapiens
  siRNA target sequence for FLJ11457 (NM_024753.2,1967-1985).
gatacaagccatcgtttat

SEQ ID NO: 390010 - DNA, 19 bp, Homo sapiens
  siRNA target sequence for FLJ11457 (NM_024753.2,1971-1989).
caagccatcgtttatcgat

SEQ ID NO: 390011 - DNA, 19 bp, Homo sapiens
  siRNA target sequence for FLJ11457 (NM_024753.2,1975-1993).
ccatcgtttatcgatcttt

SEQ ID NO: 390012 - DNA, 19 bp, Homo sapiens
  siRNA target sequence for FLJ11457 (NM_024753.2,1980-1998).
gtttatcgatctttcttga

SEQ ID NO: 390013 - DNA, 19 bp, Homo sapiens
  siRNA target sequence for FLJ11457 (NM_024753.2,2033-2051).
catgaggcaaccaaagttt

SEQ ID NO: 390014 - DNA, 19 bp, Homo sapiens
  siRNA target sequence for FLJ11457 (NM_024753.2,2093-2111).
gtgcgggttaccattgcta

SEQ ID NO: 390015 - DNA, 19 bp, Homo sapiens
  siRNA target sequence for FLJ11457 (NM_024753.2,2095-2113).
gcgggttaccattgctaat

SEQ ID NO: 390016 - DNA, 19 bp, Homo sapiens
  siRNA target sequence for FLJ11457 (NM_024753.2,2124-2142).
ctctagcccaaggagatat

SEQ ID NO: 390017 - DNA, 19 bp, Homo sapiens
  siRNA target sequence for FLJ11457 (NM_024753.2,2175-2193).
cagccgaacagccttattt

SEQ ID NO: 390018 - DNA, 19 bp, Homo sapiens
  siRNA target sequence for FLJ11457 (NM_024753.2,2177-2195).
gccgaacagccttatttta

SEQ ID NO: 390019 - DNA, 19 bp, Homo sapiens
  siRNA target sequence for FLJ11457 (NM_024753.2,2178-2196).
ccgaacagccttattttat

SEQ ID NO: 390020 - DNA, 19 bp, Homo sapiens
  siRNA target sequence for FLJ11457 (NM_024753.2,2179-2197).
cgaacagccttattttata

SEQ ID NO: 390021 - DNA, 19 bp, Homo sapiens
  siRNA target sequence for FLJ11457 (NM_024753.2,2290-2308).
ggctaaccctcggtctttt

SEQ ID NO: 390022 - DNA, 19 bp, Homo sapiens
  siRNA target sequence for FLJ11457 (NM_024753.2,2315-2333).
cttggtgatgcatacatga

SEQ ID NO: 390023 - DNA, 19 bp, Homo sapiens
  siRNA target sequence for FLJ11457 (NM_024753.2,2420-2438).
ggcaaagcacttatcaaaa

SEQ ID NO: 390024 - DNA, 19 bp, Homo sapiens
  siRNA target sequence for FLJ11457 (NM_024753.2,2429-2447).
cttatcaaaactcataact

SEQ ID NO: 390025 - DNA, 19 bp, Homo sapiens
  siRNA target sequence for FLJ11457 (NM_024753.2,2451-2469).
caatggcaatcacttacta

SEQ ID NO: 390026 - DNA, 19 bp, Homo sapiens
  siRNA target sequence for FLJ11457 (NM_024753.2,2455-2473).
ggcaatcacttactatgaa

SEQ ID NO: 390027 - DNA, 19 bp, Homo sapiens
  siRNA target sequence for FLJ11457 (NM_024753.2,2581-2599).
ggctcatgaacctgtaaat

SEQ ID NO: 390028 - DNA, 19 bp, Homo sapiens
  siRNA target sequence for FLJ11457 (NM_024753.2,2583-2601).
ctcatgaacctgtaaatga

SEQ ID NO: 390029 - DNA, 19 bp, Homo sapiens
  siRNA target sequence for FLJ11457 (NM_024753.2,2642-2660).
ctagcaaaagtttatagta

SEQ ID NO: 390030 - DNA, 19 bp, Homo sapiens
  siRNA target sequence for FLJ11457 (NM_024753.2,2682-2700).
cgatcactgcattacaaca

SEQ ID NO: 390031 - DNA, 19 bp, Homo sapiens
  siRNA target sequence for FLJ11457 (NM_024753.2,2867-2885).
gttcactgcgaaacagata

SEQ ID NO: 390032 - DNA, 19 bp, Homo sapiens
  siRNA target sequence for FLJ11457 (NM_024753.2,2874-2892).
gcgaaacagataataagat

SEQ ID NO: 390033 - DNA, 19 bp, Homo sapiens
  siRNA target sequence for FLJ11457 (NM_024753.2,2896-2914).
gttggaactggcacgatta

SEQ ID NO: 390034 - DNA, 19 bp, Homo sapiens
  siRNA target sequence for FLJ11457 (NM_024753.2,3008-3026).
gctgatctcatgttcagaa

SEQ ID NO: 390035 - DNA, 19 bp, Homo sapiens
  siRNA target sequence for FLJ11457 (NM_024753.2,3071-3089).
gaacgtaagccagataatt

SEQ ID NO: 390036 - DNA, 19 bp, Homo sapiens
  siRNA target sequence for FLJ11457 (NM_024753.2,3074-3092).
cgtaagccagataattata

SEQ ID NO: 390037 - DNA, 19 bp, Homo sapiens
  siRNA target sequence for FLJ11457 (NM_024753.2,3094-3112).
gacattatctcgtttgatt

SEQ ID NO: 390038 - DNA, 19 bp, Homo sapiens
  siRNA target sequence for FLJ11457 (NM_024753.2,3096-3114).
cattatctcgtttgattga

SEQ ID NO: 390039 - DNA, 19 bp, Homo sapiens
  siRNA target sequence for FLJ11457 (NM_024753.2,3176-3194).
cgtaactccagagcaaaat

SEQ ID NO: 390040 - DNA, 19 bp, Homo sapiens
  siRNA target sequence for FLJ11457 (NM_024753.2,3181-3199).
ctccagagcaaaattggaa

SEQ ID NO: 390041 - DNA, 19 bp, Homo sapiens
  siRNA target sequence for FLJ11457 (NM_024753.2,3235-3253).
gtacactggagaaccaaat

SEQ ID NO: 390042 - DNA, 19 bp, Homo sapiens
  siRNA target sequence for FLJ11457 (NM_024753.2,3254-3272).
gatgcccttcgacatttta

SEQ ID NO: 390043 - DNA, 19 bp, Homo sapiens
  siRNA target sequence for FLJ11457 (NM_024753.2,3257-3275).
gcccttcgacattttaata

SEQ ID NO: 390044 - DNA, 19 bp, Homo sapiens
  siRNA target sequence for FLJ11457 (NM_024753.2,3258-3276).
cccttcgacattttaataa

SEQ ID NO: 390045 - DNA, 19 bp, Homo sapiens
  siRNA target sequence for FLJ11457 (NM_024753.2,3309-3327).
ccctttataatatgataga

SEQ ID NO: 390046 - DNA, 19 bp, Homo sapiens
  siRNA target sequence for FLJ11457 (NM_024753.2,3363-3381).
gtgaagtatttgaaaacct

SEQ ID NO: 390047 - DNA, 19 bp, Homo sapiens
  siRNA target sequence for FLJ11457 (NM_024753.2,3386-3404).
ggagacctgggtaattcaa

SEQ ID NO: 390048 - DNA, 19 bp, Homo sapiens
  siRNA target sequence for FLJ11457 (NM_024753.2,3422-3440).
gtgcaactggcagtaagaa

SEQ ID NO: 390049 - DNA, 19 bp, Homo sapiens
  siRNA target sequence for FLJ11457 (NM_024753.2,3424-3442).
gcaactggcagtaagaaca

SEQ ID NO: 390050 - DNA, 19 bp, Homo sapiens
  siRNA target sequence for FLJ11457 (NM_024753.2,3494-3512).
cagcttcgcataatggaaa

SEQ ID NO: 390051 - DNA, 19 bp, Homo sapiens
  siRNA target sequence for FLJ11457 (NM_024753.2,3497-3515).
cttcgcataatggaaaact

SEQ ID NO: 390052 - DNA, 19 bp, Homo sapiens
  siRNA target sequence for FLJ11457 (NM_024753.2,3526-3544).
ggctaccaaacagaaatct

SEQ ID NO: 390053 - DNA, 19 bp, Homo sapiens
  siRNA target sequence for FLJ11457 (NM_024753.2,3531-3549).
ccaaacagaaatctaatgt

SEQ ID NO: 390054 - DNA, 19 bp, Homo sapiens
  siRNA target sequence for FLJ11457 (NM_024753.2,3617-3635).
ggaatggcaacggcttata

SEQ ID NO: 390055 - DNA, 19 bp, Homo sapiens
  siRNA target sequence for FLJ11457 (NM_024753.2,3618-3636).
gaatggcaacggcttatat

SEQ ID NO: 390056 - DNA, 19 bp, Homo sapiens
  siRNA target sequence for FLJ11457 (NM_024753.2,3623-3641).
gcaacggcttatatgatct

SEQ ID NO: 390057 - DNA, 19 bp, Homo sapiens
  siRNA target sequence for FLJ11457 (NM_024753.2,3627-3645).
cggcttatatgatcttgaa

SEQ ID NO: 390058 - DNA, 19 bp, Homo sapiens
  siRNA target sequence for FLJ11457 (NM_024753.2,3628-3646).
ggcttatatgatcttgaaa

SEQ ID NO: 390059 - DNA, 19 bp, Homo sapiens
  siRNA target sequence for FLJ11457 (NM_024753.2,3676-3694).
gcgtattgcgaaaatgaat

SEQ ID NO: 390060 - DNA, 19 bp, Homo sapiens
  siRNA target sequence for FLJ11457 (NM_024753.2,3677-3695).
cgtattgcgaaaatgaatt

SEQ ID NO: 390061 - DNA, 19 bp, Homo sapiens
  siRNA target sequence for FLJ11457 (NM_024753.2,3691-3709).
gaattggaatgctattgat

SEQ ID NO: 390062 - DNA, 19 bp, Homo sapiens
  siRNA target sequence for FLJ11457 (NM_024753.2,3732-3750).
ggctgctacttgctgatat

SEQ ID NO: 390063 - DNA, 19 bp, Homo sapiens
  siRNA target sequence for FLJ11457 (NM_024753.2,3797-3815).
cggtgcctgcgtcataata

SEQ ID NO: 390064 - DNA, 19 bp, Homo sapiens
  siRNA target sequence for FLJ11457 (NM_024753.2,3802-3820).
cctgcgtcataatagatct

SEQ ID NO: 390065 - DNA, 19 bp, Homo sapiens
  siRNA target sequence for FLJ11457 (NM_024753.2,3803-3821).
ctgcgtcataatagatctt

SEQ ID NO: 390066 - DNA, 19 bp, Homo sapiens
  siRNA target sequence for FLJ11457 (NM_024753.2,3819-3837).
cttgctgcaaagcttatga

SEQ ID NO: 390067 - DNA, 19 bp, Homo sapiens
  siRNA target sequence for FLJ11457 (NM_024753.2,3822-3840).
gctgcaaagcttatgaata

SEQ ID NO: 390068 - DNA, 19 bp, Homo sapiens
  siRNA target sequence for FLJ11457 (NM_024753.2,3836-3854).
gaatatatgggatacatta

SEQ ID NO: 390069 - DNA, 19 bp, Homo sapiens
  siRNA target sequence for FLJ11457 (NM_024753.2,3881-3899).
gctgccttgaactatgaga

SEQ ID NO: 390070 - DNA, 19 bp, Homo sapiens
  siRNA target sequence for FLJ11457 (NM_024753.2,3892-3910).
ctatgagatggcatggaaa

SEQ ID NO: 390071 - DNA, 19 bp, Homo sapiens
  siRNA target sequence for FLJ11457 (NM_024753.2,3896-3914).
gagatggcatggaaatata

SEQ ID NO: 390072 - DNA, 19 bp, Homo sapiens
  siRNA target sequence for FLJ11457 (NM_024753.2,3901-3919).
ggcatggaaatatagcaat

SEQ ID NO: 390073 - DNA, 19 bp, Homo sapiens
  siRNA target sequence for FLJ11457 (NM_024753.2,3924-3942).
caaatccggcagtaggata

SEQ ID NO: 390074 - DNA, 19 bp, Homo sapiens
  siRNA target sequence for FLJ11457 (NM_024753.2,3930-3948).
cggcagtaggatacaaact

SEQ ID NO: 390075 - DNA, 19 bp, Homo sapiens
  siRNA target sequence for FLJ11457 (NM_024753.2,4031-4049).
ccaaaaatcagaaaggata

SEQ ID NO: 390076 - DNA, 19 bp, Homo sapiens
  siRNA target sequence for FLJ11457 (NM_024753.2,4041-4059).
gaaaggatatacttgataa

SEQ ID NO: 390077 - DNA, 19 bp, Homo sapiens
  siRNA target sequence for FLJ11457 (NM_024753.2,4060-4078).
ggcccgtgcgtctttaaga

SEQ ID NO: 390078 - DNA, 19 bp, Homo sapiens
  siRNA target sequence for FLJ12598 (NM_024754.2,461-479).
catttacgaggtttcttct

SEQ ID NO: 390079 - DNA, 19 bp, Homo sapiens
  siRNA target sequence for FLJ12598 (NM_024754.2,583-601).
gttcaccaaagatacctat

SEQ ID NO: 390080 - DNA, 19 bp, Homo sapiens
  siRNA target sequence for FLJ12598 (NM_024754.2,614-632).
gcaatttgctacaaactga

SEQ ID NO: 390081 - DNA, 19 bp, Homo sapiens
  siRNA target sequence for FLJ12598 (NM_024754.2,734-752).
gctctgaatcagaatgaga

SEQ ID NO: 390082 - DNA, 19 bp, Homo sapiens
  siRNA target sequence for FLJ12598 (NM_024754.2,784-802).
catgaatccagaaagcata

SEQ ID NO: 390083 - DNA, 19 bp, Homo sapiens
  siRNA target sequence for FLJ12598 (NM_024754.2,794-812).
gaaagcatagcctgcatta

SEQ ID NO: 390084 - DNA, 19 bp, Homo sapiens
  siRNA target sequence for FLJ12598 (NM_024754.2,856-874).
cctgataaagactctaaaa

SEQ ID NO: 390085 - DNA, 19 bp, Homo sapiens
  siRNA target sequence for FLJ12598 (NM_024754.2,857-875).
ctgataaagactctaaaaa

SEQ ID NO: 390086 - DNA, 19 bp, Homo sapiens
  siRNA target sequence for FLJ12598 (NM_024754.2,1065-1083).
ccagggacaggaaatctca

SEQ ID NO: 390087 - DNA, 19 bp, Homo sapiens
  siRNA target sequence for FLJ12598 (NM_024754.2,1080-1098).
ctcacacgttgctattaaa

SEQ ID NO: 390088 - DNA, 19 bp, Homo sapiens
  siRNA target sequence for FLJ12598 (NM_024754.2,1082-1100).
cacacgttgctattaaaca

SEQ ID NO: 390089 - DNA, 19 bp, Homo sapiens
  siRNA target sequence for EMILIN3 (NM_024756.1,263-281).
caagctggtcaccttacta

SEQ ID NO: 390090 - DNA, 19 bp, Homo sapiens
  siRNA target sequence for EMILIN3 (NM_024756.1,274-292).
ccttactagctctttgcaa

SEQ ID NO: 390091 - DNA, 19 bp, Homo sapiens
  siRNA target sequence for EMILIN3 (NM_024756.1,342-360).
ccagactgccagaaagtca

SEQ ID NO: 390092 - DNA, 19 bp, Homo sapiens
  siRNA target sequence for EMILIN3 (NM_024756.1,463-481).
gcgagcaccacgattccat

SEQ ID NO: 390093 - DNA, 19 bp, Homo sapiens
  siRNA target sequence for EMILIN3 (NM_024756.1,560-578).
ccttgctgcagtgatcaat

SEQ ID NO: 390094 - DNA, 19 bp, Homo sapiens
  siRNA target sequence for EMILIN3 (NM_024756.1,801-819).
cccatctggaggagcttta

SEQ ID NO: 390095 - DNA, 19 bp, Homo sapiens
  siRNA target sequence for EMILIN3 (NM_024756.1,1065-1083).
gccgatgtggacaccaaat

SEQ ID NO: 390096 - DNA, 19 bp, Homo sapiens
  siRNA target sequence for EMILIN3 (NM_024756.1,1066-1084).
ccgatgtggacaccaaatt

SEQ ID NO: 390097 - DNA, 19 bp, Homo sapiens
  siRNA target sequence for EMILIN3 (NM_024756.1,1324-1342).
ccgaatcggacgagacttt

SEQ ID NO: 390098 - DNA, 19 bp, Homo sapiens
  siRNA target sequence for EMILIN3 (NM_024756.1,1334-1352).
cgagactttcgatcagatt

SEQ ID NO: 390099 - DNA, 19 bp, Homo sapiens
  siRNA target sequence for EMILIN3 (NM_024756.1,1335-1353).
gagactttcgatcagatta

SEQ ID NO: 390100 - DNA, 19 bp, Homo sapiens
  siRNA target sequence for EMILIN3 (NM_024756.1,1339-1357).
ctttcgatcagattagcaa

SEQ ID NO: 390101 - DNA, 19 bp, Homo sapiens
  siRNA target sequence for EMILIN3 (NM_024756.1,1555-1573).
gccagaagctctatttaga

SEQ ID NO: 390102 - DNA, 19 bp, Homo sapiens
  siRNA target sequence for EMILIN3 (NM_024756.1,2188-2206).
gcaacgacgtcaagaatgt

SEQ ID NO: 390103 - DNA, 19 bp, Homo sapiens
  siRNA target sequence for EMILIN3 (NM_024756.1,2828-2846).
gggtgagcgagtatggttt

SEQ ID NO: 390104 - DNA, 19 bp, Homo sapiens
  siRNA target sequence for EMILIN3 (NM_024756.1,2832-2850).
gagcgagtatggtttgagt

SEQ ID NO: 390105 - DNA, 19 bp, Homo sapiens
  siRNA target sequence for EMILIN3 (NM_024756.1,2834-2852).
gcgagtatggtttgagtta

SEQ ID NO: 390106 - DNA, 19 bp, Homo sapiens
  siRNA target sequence for EMILIN3 (NM_024756.1,2835-2853).
cgagtatggtttgagttaa

SEQ ID NO: 390107 - DNA, 19 bp, Homo sapiens
  siRNA target sequence for EMILIN3 (NM_024756.1,2849-2867).
gttaacccagggatcaata

SEQ ID NO: 390108 - DNA, 19 bp, Homo sapiens
  siRNA target sequence for Eu-HMTase1 (NM_024757.3,256-274).
cggaaaatggggtttcaga

SEQ ID NO: 390109 - DNA, 19 bp, Homo sapiens
  siRNA target sequence for Eu-HMTase1 (NM_024757.3,342-360).
ggcagcaacggatacatct

SEQ ID NO: 390110 - DNA, 19 bp, Homo sapiens
  siRNA target sequence for Eu-HMTase1 (NM_024757.3,343-361).
gcagcaacggatacatctt

SEQ ID NO: 390111 - DNA, 19 bp, Homo sapiens
  siRNA target sequence for Eu-HMTase1 (NM_024757.3,344-362).
cagcaacggatacatctta

SEQ ID NO: 390112 - DNA, 19 bp, Homo sapiens
  siRNA target sequence for Eu-HMTase1 (NM_024757.3,347-365).
caacggatacatcttaaat

SEQ ID NO: 390113 - DNA, 19 bp, Homo sapiens
  siRNA target sequence for Eu-HMTase1 (NM_024757.3,620-638).
cctgcatgcagccagtaaa

SEQ ID NO: 390114 - DNA, 19 bp, Homo sapiens
  siRNA target sequence for Eu-HMTase1 (NM_024757.3,655-673).
gagaagctagagatcataa

SEQ ID NO: 390115 - DNA, 19 bp, Homo sapiens
  siRNA target sequence for Eu-HMTase1 (NM_024757.3,664-682).
gagatcataaggaaccaaa

SEQ ID NO: 390116 - DNA, 19 bp, Homo sapiens
  siRNA target sequence for Eu-HMTase1 (NM_024757.3,736-754).
ccttcccatcccttcatca

SEQ ID NO: 390117 - DNA, 19 bp, Homo sapiens
  siRNA target sequence for Eu-HMTase1 (NM_024757.3,865-883).
cctatagcctggttcctaa

SEQ ID NO: 390118 - DNA, 19 bp, Homo sapiens
  siRNA target sequence for Eu-HMTase1 (NM_024757.3,913-931).
cggtgattgagatgtttaa

SEQ ID NO: 390119 - DNA, 19 bp, Homo sapiens
  siRNA target sequence for Eu-HMTase1 (NM_024757.3,915-933).
gtgattgagatgtttaaga

SEQ ID NO: 390120 - DNA, 19 bp, Homo sapiens
  siRNA target sequence for Eu-HMTase1 (NM_024757.3,1231-1249).
gttcggaatccagcattaa

SEQ ID NO: 390121 - DNA, 19 bp, Homo sapiens
  siRNA target sequence for Eu-HMTase1 (NM_024757.3,1243-1261).
gcattaagaagaaatttct

SEQ ID NO: 390122 - DNA, 19 bp, Homo sapiens
  siRNA target sequence for Eu-HMTase1 (NM_024757.3,1315-1333).
ggcggagaagtagaaagaa

SEQ ID NO: 390123 - DNA, 19 bp, Homo sapiens
  siRNA target sequence for Eu-HMTase1 (NM_024757.3,1347-1365).
ctcggttctgagtcgtata

SEQ ID NO: 390124 - DNA, 19 bp, Homo sapiens
  siRNA target sequence for Eu-HMTase1 (NM_024757.3,1350-1368).
ggttctgagtcgtataagt

SEQ ID NO: 390125 - DNA, 19 bp, Homo sapiens
  siRNA target sequence for Eu-HMTase1 (NM_024757.3,1642-1660).
caaacagcgtggtcaagta

SEQ ID NO: 390126 - DNA, 19 bp, Homo sapiens
  siRNA target sequence for Eu-HMTase1 (NM_024757.3,1763-1781).
ctgcacagcgggtaatttt

SEQ ID NO: 390127 - DNA, 19 bp, Homo sapiens
  siRNA target sequence for Eu-HMTase1 (NM_024757.3,1765-1783).
gcacagcgggtaattttat

SEQ ID NO: 390128 - DNA, 19 bp, Homo sapiens
  siRNA target sequence for Eu-HMTase1 (NM_024757.3,1829-1847).
ctgtgcctctcgagtcaat

SEQ ID NO: 390129 - DNA, 19 bp, Homo sapiens
  siRNA target sequence for Eu-HMTase1 (NM_024757.3,1831-1849).
gtgcctctcgagtcaataa

SEQ ID NO: 390130 - DNA, 19 bp, Homo sapiens
  siRNA target sequence for Eu-HMTase1 (NM_024757.3,1842-1860).
gtcaataacgccagctatt

SEQ ID NO: 390131 - DNA, 19 bp, Homo sapiens
  siRNA target sequence for Eu-HMTase1 (NM_024757.3,1898-1916).
ggtgacgatagctaaagca

SEQ ID NO: 390132 - DNA, 19 bp, Homo sapiens
  siRNA target sequence for Eu-HMTase1 (NM_024757.3,2865-2883).
gattcagatgtcaccttaa

SEQ ID NO: 390133 - DNA, 19 bp, Homo sapiens
  siRNA target sequence for Eu-HMTase1 (NM_024757.3,2871-2889).
gatgtcaccttaaagaaca

SEQ ID NO: 390134 - DNA, 19 bp, Homo sapiens
  siRNA target sequence for Eu-HMTase1 (NM_024757.3,2994-3012).
cccgtggagaggatagtga

SEQ ID NO: 390135 - DNA, 19 bp, Homo sapiens
  siRNA target sequence for Eu-HMTase1 (NM_024757.3,3127-3145).
ccatgaacatcgacagaaa

SEQ ID NO: 390136 - DNA, 19 bp, Homo sapiens
  siRNA target sequence for Eu-HMTase1 (NM_024757.3,3247-3265).
ggctcctgccagagttcaa

SEQ ID NO: 390137 - DNA, 19 bp, Homo sapiens
  siRNA target sequence for Eu-HMTase1 (NM_024757.3,3270-3288).
gcggagcctcccttgatct

SEQ ID NO: 390138 - DNA, 19 bp, Homo sapiens
  siRNA target sequence for Eu-HMTase1 (NM_024757.3,3276-3294).
cctcccttgatcttcgaat

SEQ ID NO: 390139 - DNA, 19 bp, Homo sapiens
  siRNA target sequence for Eu-HMTase1 (NM_024757.3,3477-3495).
gacgttcgagaggaagatt

SEQ ID NO: 390140 - DNA, 19 bp, Homo sapiens
  siRNA target sequence for Eu-HMTase1 (NM_024757.3,3479-3497).
cgttcgagaggaagattct

SEQ ID NO: 390141 - DNA, 19 bp, Homo sapiens
  siRNA target sequence for Eu-HMTase1 (NM_024757.3,3501-3519).
ctctttgatctcgacaata

SEQ ID NO: 390142 - DNA, 19 bp, Homo sapiens
  siRNA target sequence for FLJ13955 (NM_024759.1,311-329).
gagctgtcactgaatttca

SEQ ID NO: 390143 - DNA, 19 bp, Homo sapiens
  siRNA target sequence for FLJ13955 (NM_024759.1,433-451).
ggtgatcagtatttctcta

SEQ ID NO: 390144 - DNA, 19 bp, Homo sapiens
  siRNA target sequence for FLJ13955 (NM_024759.1,436-454).
gatcagtatttctctaaat

SEQ ID NO: 390145 - DNA, 19 bp, Homo sapiens
  siRNA target sequence for FLJ13955 (NM_024759.1,703-721).
ggcatttgcaggaacatat

SEQ ID NO: 390146 - DNA, 19 bp, Homo sapiens
  siRNA target sequence for FLJ13955 (NM_024759.1,764-782).
gcaagaacagtacagtatt

SEQ ID NO: 390147 - DNA, 19 bp, Homo sapiens
  siRNA target sequence for FLJ13955 (NM_024759.1,765-783).
caagaacagtacagtatta

SEQ ID NO: 390148 - DNA, 19 bp, Homo sapiens
  siRNA target sequence for FLJ13955 (NM_024759.1,768-786).
gaacagtacagtattacct

SEQ ID NO: 390149 - DNA, 19 bp, Homo sapiens
  siRNA target sequence for FLJ13955 (NM_024759.1,792-810).
gatggcagttcctgatcta

SEQ ID NO: 390150 - DNA, 19 bp, Homo sapiens
  siRNA target sequence for FLJ13955 (NM_024759.1,795-813).
ggcagttcctgatctatgt

SEQ ID NO: 390151 - DNA, 19 bp, Homo sapiens
  siRNA target sequence for FLJ13955 (NM_024759.1,799-817).
gttcctgatctatgtgatt

SEQ ID NO: 390152 - DNA, 19 bp, Homo sapiens
  siRNA target sequence for FLJ13955 (NM_024759.1,844-862).
cctgtatttctataaaaga

SEQ ID NO: 390153 - DNA, 19 bp, Homo sapiens
  siRNA target sequence for FLJ13955 (NM_024759.1,908-926).
ctagcctcattgactgtta

SEQ ID NO: 390154 - DNA, 19 bp, Homo sapiens
  siRNA target sequence for FLJ13955 (NM_024759.1,938-956).
gccgtctcaggcatgatca

SEQ ID NO: 390155 - DNA, 19 bp, Homo sapiens
  siRNA target sequence for FLJ13955 (NM_024759.1,943-961).
ctcaggcatgatcactttt

SEQ ID NO: 390156 - DNA, 19 bp, Homo sapiens
  siRNA target sequence for FLJ13955 (NM_024759.1,1090-1108).
ggtgccagttaatcatatt

SEQ ID NO: 390157 - DNA, 19 bp, Homo sapiens
  siRNA target sequence for FLJ13955 (NM_024759.1,1223-1241).
gtatttttggtcacaagaa

SEQ ID NO: 390158 - DNA, 19 bp, Homo sapiens
  siRNA target sequence for FLJ13955 (NM_024759.1,1256-1274).
catctgcaacagtcttata

SEQ ID NO: 390159 - DNA, 19 bp, Homo sapiens
  siRNA target sequence for FLJ13955 (NM_024759.1,1261-1279).
gcaacagtcttatattgat

SEQ ID NO: 390160 - DNA, 19 bp, Homo sapiens
  siRNA target sequence for FLJ14009 (NM_024760.1,529-547).
gacaaggagccttggtttt

SEQ ID NO: 390161 - DNA, 19 bp, Homo sapiens
  siRNA target sequence for FLJ14009 (NM_024760.1,567-585).
gcaactctggcggattttt

SEQ ID NO: 390162 - DNA, 19 bp, Homo sapiens
  siRNA target sequence for FLJ14009 (NM_024760.1,754-772).
caagacaggaacacaagtt

SEQ ID NO: 390163 - DNA, 19 bp, Homo sapiens
  siRNA target sequence for FLJ14009 (NM_024760.1,808-826).
cggtttctacagtccatat

SEQ ID NO: 390164 - DNA, 19 bp, Homo sapiens
  siRNA target sequence for FLJ14009 (NM_024760.1,904-922).
ccgtgcaaactggaaaaga

SEQ ID NO: 390165 - DNA, 19 bp, Homo sapiens
  siRNA target sequence for FLJ14009 (NM_024760.1,905-923).
cgtgcaaactggaaaagat

SEQ ID NO: 390166 - DNA, 19 bp, Homo sapiens
  siRNA target sequence for FLJ14009 (NM_024760.1,1345-1363).
cctgatggagtcaagagta

SEQ ID NO: 390167 - DNA, 19 bp, Homo sapiens
  siRNA target sequence for FLJ14009 (NM_024760.1,1366-1384).
gtggtcaagggctacaaca

SEQ ID NO: 390168 - DNA, 19 bp, Homo sapiens
  siRNA target sequence for FLJ14009 (NM_024760.1,1369-1387).
gtcaagggctacaacatct

SEQ ID NO: 390169 - DNA, 19 bp, Homo sapiens
  siRNA target sequence for FLJ14009 (NM_024760.1,1444-1462).
cctctggagtaccaattca

SEQ ID NO: 390170 - DNA, 19 bp, Homo sapiens
  siRNA target sequence for FLJ14009 (NM_024760.1,1445-1463).
ctctggagtaccaattcaa

SEQ ID NO: 390171 - DNA, 19 bp, Homo sapiens
  siRNA target sequence for FLJ14009 (NM_024760.1,1447-1465).
ctggagtaccaattcaagt

SEQ ID NO: 390172 - DNA, 19 bp, Homo sapiens
  siRNA target sequence for FLJ14009 (NM_024760.1,1566-1584).
gcacatggtggggcaaaaa

SEQ ID NO: 390173 - DNA, 19 bp, Homo sapiens
  siRNA target sequence for MOB3B (NM_024761.2,747-765).
ccttcttatggattggatt

SEQ ID NO: 390174 - DNA, 19 bp, Homo sapiens
  siRNA target sequence for MOB3B (NM_024761.2,761-779).
ggattgaggttcagatcaa

SEQ ID NO: 390175 - DNA, 19 bp, Homo sapiens
  siRNA target sequence for MOB3B (NM_024761.2,774-792).
gatcaacaacgaggaaata

SEQ ID NO: 390176 - DNA, 19 bp, Homo sapiens
  siRNA target sequence for MOB3B (NM_024761.2,780-798).
caacgaggaaatatttcca

SEQ ID NO: 390177 - DNA, 19 bp, Homo sapiens
  siRNA target sequence for MOB3B (NM_024761.2,996-1014).
ggagctagagcctttgaaa

SEQ ID NO: 390178 - DNA, 19 bp, Homo sapiens
  siRNA target sequence for FLJ21603 (NM_024762.1,369-387).
gaggtttgtcagaaatttt

SEQ ID NO: 390179 - DNA, 19 bp, Homo sapiens
  siRNA target sequence for FLJ21603 (NM_024762.1,484-502).
ctacattccgtgttcataa

SEQ ID NO: 390180 - DNA, 19 bp, Homo sapiens
  siRNA target sequence for FLJ21603 (NM_024762.1,701-719).
cagtgagtccagtctcatt

SEQ ID NO: 390181 - DNA, 19 bp, Homo sapiens
  siRNA target sequence for FLJ21603 (NM_024762.1,705-723).
gagtccagtctcattaaat

SEQ ID NO: 390182 - DNA, 19 bp, Homo sapiens
  siRNA target sequence for FLJ23129 (NM_024763.2,160-178).
cagaacttcgggttgaaca

SEQ ID NO: 390183 - DNA, 19 bp, Homo sapiens
  siRNA target sequence for FLJ23129 (NM_024763.2,187-205).
caaccaaagaagtctatta

SEQ ID NO: 390184 - DNA, 19 bp, Homo sapiens
  siRNA target sequence for FLJ23129 (NM_024763.2,191-209).
caaagaagtctattagctt

SEQ ID NO: 390185 - DNA, 19 bp, Homo sapiens
  siRNA target sequence for FLJ23129 (NM_024763.2,226-244).
gcaacttcagtgaaaggat

SEQ ID NO: 390186 - DNA, 19 bp, Homo sapiens
  siRNA target sequence for FLJ23129 (NM_024763.2,276-294).
gtccaaaaccgtgcttatt

SEQ ID NO: 390187 - DNA, 19 bp, Homo sapiens
  siRNA target sequence for FLJ23129 (NM_024763.2,377-395).
ctccccgacctctttacca

SEQ ID NO: 390188 - DNA, 19 bp, Homo sapiens
  siRNA target sequence for FLJ23129 (NM_024763.2,424-442).
ccaagtaaactcttgacat

SEQ ID NO: 390189 - DNA, 19 bp, Homo sapiens
  siRNA target sequence for FLJ23129 (NM_024763.2,452-470).
gatcacttggatcagaatt

SEQ ID NO: 390190 - DNA, 19 bp, Homo sapiens
  siRNA target sequence for FLJ23129 (NM_024763.2,455-473).
cacttggatcagaatttat

SEQ ID NO: 390191 - DNA, 19 bp, Homo sapiens
  siRNA target sequence for FLJ23129 (NM_024763.2,460-478).
ggatcagaatttatatctt

SEQ ID NO: 390192 - DNA, 19 bp, Homo sapiens
  siRNA target sequence for FLJ23129 (NM_024763.2,466-484).
gaatttatatcttcctata

SEQ ID NO: 390193 - DNA, 19 bp, Homo sapiens
  siRNA target sequence for FLJ23129 (NM_024763.2,479-497).
cctatagcctttatcagaa

SEQ ID NO: 390194 - DNA, 19 bp, Homo sapiens
  siRNA target sequence for FLJ23129 (NM_024763.2,549-567).
cagtacagtttctaagtca

SEQ ID NO: 390195 - DNA, 19 bp, Homo sapiens
  siRNA target sequence for FLJ23129 (NM_024763.2,600-618).
cctggaagaaccatcctat

SEQ ID NO: 390196 - DNA, 19 bp, Homo sapiens
  siRNA target sequence for FLJ23129 (NM_024763.2,601-619).
ctggaagaaccatcctata

SEQ ID NO: 390197 - DNA, 19 bp, Homo sapiens
  siRNA target sequence for FLJ23129 (NM_024763.2,622-640).
cgggaaagattgactagtt

SEQ ID NO: 390198 - DNA, 19 bp, Homo sapiens
  siRNA target sequence for FLJ23129 (NM_024763.2,623-641).
gggaaagattgactagttt

SEQ ID NO: 390199 - DNA, 19 bp, Homo sapiens
  siRNA target sequence for FLJ23129 (NM_024763.2,635-653).
ctagtttcacagatttgca

SEQ ID NO: 390200 - DNA, 19 bp, Homo sapiens
  siRNA target sequence for FLJ23129 (NM_024763.2,642-660).
cacagatttgcaagttata

SEQ ID NO: 390201 - DNA, 19 bp, Homo sapiens
  siRNA target sequence for FLJ23129 (NM_024763.2,768-786).
ggtctctgtagaatctgaa

SEQ ID NO: 390202 - DNA, 19 bp, Homo sapiens
  siRNA target sequence for FLJ23129 (NM_024763.2,799-817).
gtaactcagagaaacaaga

SEQ ID NO: 390203 - DNA, 19 bp, Homo sapiens
  siRNA target sequence for FLJ23129 (NM_024763.2,842-860).
gattaggcaatgacctata

SEQ ID NO: 390204 - DNA, 19 bp, Homo sapiens
  siRNA target sequence for FLJ23129 (NM_024763.2,849-867).
caatgacctatatgttgaa

SEQ ID NO: 390205 - DNA, 19 bp, Homo sapiens
  siRNA target sequence for FLJ23129 (NM_024763.2,907-925).
gatgttcaatgtgataaaa

SEQ ID NO: 390206 - DNA, 19 bp, Homo sapiens
  siRNA target sequence for FLJ23129 (NM_024763.2,910-928).
gttcaatgtgataaaatca

SEQ ID NO: 390207 - DNA, 19 bp, Homo sapiens
  siRNA target sequence for FLJ23129 (NM_024763.2,964-982).
gatttgtatgattcttaca

SEQ ID NO: 390208 - DNA, 19 bp, Homo sapiens
  siRNA target sequence for FLJ23129 (NM_024763.2,981-999).
caatgctatggaacttgta

SEQ ID NO: 390209 - DNA, 19 bp, Homo sapiens
  siRNA target sequence for FLJ23129 (NM_024763.2,985-1003).
gctatggaacttgtatctt

SEQ ID NO: 390210 - DNA, 19 bp, Homo sapiens
  siRNA target sequence for FLJ23129 (NM_024763.2,990-1008).
ggaacttgtatctttatca

SEQ ID NO: 390211 - DNA, 19 bp, Homo sapiens
  siRNA target sequence for FLJ23129 (NM_024763.2,1021-1039).
gtggttgagtcaagtagta

SEQ ID NO: 390212 - DNA, 19 bp, Homo sapiens
  siRNA target sequence for FLJ23129 (NM_024763.2,1023-1041).
ggttgagtcaagtagtaaa

SEQ ID NO: 390213 - DNA, 19 bp, Homo sapiens
  siRNA target sequence for FLJ23129 (NM_024763.2,1115-1133).
ctctaatggacatagaaaa

SEQ ID NO: 390214 - DNA, 19 bp, Homo sapiens
  siRNA target sequence for FLJ23129 (NM_024763.2,1168-1186).
gaccactcagatgcaatat

SEQ ID NO: 390215 - DNA, 19 bp, Homo sapiens
  siRNA target sequence for FLJ23129 (NM_024763.2,1170-1188).
ccactcagatgcaatatta

SEQ ID NO: 390216 - DNA, 19 bp, Homo sapiens
  siRNA target sequence for FLJ23129 (NM_024763.2,1209-1227).
ggacttattttttatggaa

SEQ ID NO: 390217 - DNA, 19 bp, Homo sapiens
  siRNA target sequence for FLJ23129 (NM_024763.2,1225-1243).
gaacgggttctgatggaaa

SEQ ID NO: 390218 - DNA, 19 bp, Homo sapiens
  siRNA target sequence for FLJ23129 (NM_024763.2,1228-1246).
cgggttctgatggaaaata

SEQ ID NO: 390219 - DNA, 19 bp, Homo sapiens
  siRNA target sequence for FLJ23129 (NM_024763.2,1257-1275).
caaacttgcagcttatcgt

SEQ ID NO: 390220 - DNA, 19 bp, Homo sapiens
  siRNA target sequence for FLJ23129 (NM_024763.2,1419-1437).
ggaacgactttggtctttt

SEQ ID NO: 390221 - DNA, 19 bp, Homo sapiens
  siRNA target sequence for FLJ23129 (NM_024763.2,1423-1441).
cgactttggtctttttcct

SEQ ID NO: 390222 - DNA, 19 bp, Homo sapiens
  siRNA target sequence for FLJ23129 (NM_024763.2,1469-1487).
gcagccttgcctggaataa

SEQ ID NO: 390223 - DNA, 19 bp, Homo sapiens
  siRNA target sequence for FLJ23129 (NM_024763.2,1470-1488).
cagccttgcctggaataaa

SEQ ID NO: 390224 - DNA, 19 bp, Homo sapiens
  siRNA target sequence for FLJ23129 (NM_024763.2,1514-1532).
gctatgggcactttggatt

SEQ ID NO: 390225 - DNA, 19 bp, Homo sapiens
  siRNA target sequence for FLJ23129 (NM_024763.2,1581-1599).
catggtaacccaaacaaga

SEQ ID NO: 390226 - DNA, 19 bp, Homo sapiens
  siRNA target sequence for FLJ23129 (NM_024763.2,1584-1602).
ggtaacccaaacaagaata

SEQ ID NO: 390227 - DNA, 19 bp, Homo sapiens
  siRNA target sequence for C14orf161 (NM_024764.1,131-149).
cagtgcagtcggaagtgtt

SEQ ID NO: 390228 - DNA, 19 bp, Homo sapiens
  siRNA target sequence for C14orf161 (NM_024764.1,166-184).
cattatactatgatcactt

SEQ ID NO: 390229 - DNA, 19 bp, Homo sapiens
  siRNA target sequence for C14orf161 (NM_024764.1,180-198).
cacttgggattcctacata

SEQ ID NO: 390230 - DNA, 19 bp, Homo sapiens
  siRNA target sequence for C14orf161 (NM_024764.1,203-221).
gactctgggtcgctttgaa

SEQ ID NO: 390231 - DNA, 19 bp, Homo sapiens
  siRNA target sequence for C14orf161 (NM_024764.1,246-264).
ggaaattctagaaatcttt

SEQ ID NO: 390232 - DNA, 19 bp, Homo sapiens
  siRNA target sequence for C14orf161 (NM_024764.1,311-329).
gcacacctccttagatgaa

SEQ ID NO: 390233 - DNA, 19 bp, Homo sapiens
  siRNA target sequence for C14orf161 (NM_024764.1,382-400).
gcaagaagttcggcaatat

SEQ ID NO: 390234 - DNA, 19 bp, Homo sapiens
  siRNA target sequence for C14orf161 (NM_024764.1,416-434).
gatacactctgggaaaact

SEQ ID NO: 390235 - DNA, 19 bp, Homo sapiens
  siRNA target sequence for C14orf161 (NM_024764.1,435-453).
ggaagagcttacataagaa

SEQ ID NO: 390236 - DNA, 19 bp, Homo sapiens
  siRNA target sequence for C14orf161 (NM_024764.1,446-464).
cataagaaaggtattgcaa

SEQ ID NO: 390237 - DNA, 19 bp, Homo sapiens
  siRNA target sequence for C14orf161 (NM_024764.1,461-479).
gcaacatacgactcctaaa

SEQ ID NO: 390238 - DNA, 19 bp, Homo sapiens
  siRNA target sequence for C14orf161 (NM_024764.1,517-535).
cctttggattagaagaagt

SEQ ID NO: 390239 - DNA, 19 bp, Homo sapiens
  siRNA target sequence for C14orf161 (NM_024764.1,534-552).
gtgaatgagagctcttgtt

SEQ ID NO: 390240 - DNA, 19 bp, Homo sapiens
  siRNA target sequence for C14orf161 (NM_024764.1,540-558).
gagagctcttgtttgtcta

SEQ ID NO: 390241 - DNA, 19 bp, Homo sapiens
  siRNA target sequence for C14orf161 (NM_024764.1,569-587).
gattaataaagctggaaat

SEQ ID NO: 390242 - DNA, 19 bp, Homo sapiens
  siRNA target sequence for C14orf161 (NM_024764.1,590-608).
ctataaactcactcttgat

SEQ ID NO: 390243 - DNA, 19 bp, Homo sapiens
  siRNA target sequence for C14orf161 (NM_024764.1,601-619).
ctcttgattcacaagttgt

SEQ ID NO: 390244 - DNA, 19 bp, Homo sapiens
  siRNA target sequence for C14orf161 (NM_024764.1,623-641).
ggccttgtttgaagataca

SEQ ID NO: 390245 - DNA, 19 bp, Homo sapiens
  siRNA target sequence for C14orf161 (NM_024764.1,680-698).
cttcctcatcacaagcatt

SEQ ID NO: 390246 - DNA, 19 bp, Homo sapiens
  siRNA target sequence for C14orf161 (NM_024764.1,738-756).
gaaagtgcacccaacaata

SEQ ID NO: 390247 - DNA, 19 bp, Homo sapiens
  siRNA target sequence for C14orf161 (NM_024764.1,772-790).
gcacatggttcttatacaa

SEQ ID NO: 390248 - DNA, 19 bp, Homo sapiens
  siRNA target sequence for C14orf161 (NM_024764.1,808-826).
gacgaacatggaaaatata

SEQ ID NO: 390249 - DNA, 19 bp, Homo sapiens
  siRNA target sequence for C14orf161 (NM_024764.1,810-828).
cgaacatggaaaatatatt

SEQ ID NO: 390250 - DNA, 19 bp, Homo sapiens
  siRNA target sequence for C14orf161 (NM_024764.1,848-866).
gtttcaacatgatgattca

SEQ ID NO: 390251 - DNA, 19 bp, Homo sapiens
  siRNA target sequence for C14orf161 (NM_024764.1,890-908).
cattgatctgggaaactct

SEQ ID NO: 390252 - DNA, 19 bp, Homo sapiens
  siRNA target sequence for C14orf161 (NM_024764.1,935-953).
gaatgcaaaaggttttcga

SEQ ID NO: 390253 - DNA, 19 bp, Homo sapiens
  siRNA target sequence for C14orf161 (NM_024764.1,967-985).
cactactgactgtgtttgt

SEQ ID NO: 390254 - DNA, 19 bp, Homo sapiens
  siRNA target sequence for C14orf161 (NM_024764.1,1040-1058).
cagttatgtaataacaatt

SEQ ID NO: 390255 - DNA, 19 bp, Homo sapiens
  siRNA target sequence for C14orf161 (NM_024764.1,1063-1081).
cagctagcaaagttttaca

SEQ ID NO: 390256 - DNA, 19 bp, Homo sapiens
  siRNA target sequence for C14orf161 (NM_024764.1,1093-1111).
cttcactggcatttattat

SEQ ID NO: 390257 - DNA, 19 bp, Homo sapiens
  siRNA target sequence for C14orf161 (NM_024764.1,1158-1176).
ctgaaaagcagctgtagtt

SEQ ID NO: 390258 - DNA, 19 bp, Homo sapiens
  siRNA target sequence for C14orf161 (NM_024764.1,1181-1199).
cagatctatgcatcacatt

SEQ ID NO: 390259 - DNA, 19 bp, Homo sapiens
  siRNA target sequence for C14orf161 (NM_024764.1,1194-1212).
cacattcctagcaaattta

SEQ ID NO: 390260 - DNA, 19 bp, Homo sapiens
  siRNA target sequence for C14orf161 (NM_024764.1,1289-1307).
ctacaggcctccatctaat

SEQ ID NO: 390261 - DNA, 19 bp, Homo sapiens
  siRNA target sequence for C14orf161 (NM_024764.1,1317-1335).
gctattccactcacagata

SEQ ID NO: 390262 - DNA, 19 bp, Homo sapiens
  siRNA target sequence for C14orf161 (NM_024764.1,1353-1371).
cctagcaaacccataccaa

SEQ ID NO: 390263 - DNA, 19 bp, Homo sapiens
  siRNA target sequence for C14orf161 (NM_024764.1,1394-1412).
gaaaaccggtaaattcaaa

SEQ ID NO: 390264 - DNA, 19 bp, Homo sapiens
  siRNA target sequence for C14orf161 (NM_024764.1,1409-1427).
caaacagtgtgctaatgtt

SEQ ID NO: 390265 - DNA, 19 bp, Homo sapiens
  siRNA target sequence for C14orf161 (NM_024764.1,1429-1447).
ccactcgggaggagtgtaa

SEQ ID NO: 390266 - DNA, 19 bp, Homo sapiens
  siRNA target sequence for C14orf161 (NM_024764.1,1487-1505).
ctcggattgcagggaaaaa

SEQ ID NO: 390267 - DNA, 19 bp, Homo sapiens
  siRNA target sequence for C14orf161 (NM_024764.1,1489-1507).
cggattgcagggaaaaagt

SEQ ID NO: 390268 - DNA, 19 bp, Homo sapiens
  siRNA target sequence for C14orf161 (NM_024764.1,1512-1530).
cgctttaagtttccaatta

SEQ ID NO: 390269 - DNA, 19 bp, Homo sapiens
  siRNA target sequence for C14orf161 (NM_024764.1,1569-1587).
ggacgtgtcccattgcaat

SEQ ID NO: 390270 - DNA, 19 bp, Homo sapiens
  siRNA target sequence for C14orf161 (NM_024764.1,1577-1595).
cccattgcaatctccatat

SEQ ID NO: 390271 - DNA, 19 bp, Homo sapiens
  siRNA target sequence for C14orf161 (NM_024764.1,1588-1606).
ctccatatctggttactgt

SEQ ID NO: 390272 - DNA, 19 bp, Homo sapiens
  siRNA target sequence for C14orf161 (NM_024764.1,1603-1621).
ctgtgactgaagtgaacat

SEQ ID NO: 390273 - DNA, 19 bp, Homo sapiens
  siRNA target sequence for C14orf161 (NM_024764.1,1773-1791).
gtcatttcaggagtaactt

SEQ ID NO: 390274 - DNA, 19 bp, Homo sapiens
  siRNA target sequence for C14orf161 (NM_024764.1,1795-1813).
gtaacttaattgaagaatt

SEQ ID NO: 390275 - DNA, 19 bp, Homo sapiens
  siRNA target sequence for C14orf161 (NM_024764.1,1847-1865).
cccaggacacacgcttatt

SEQ ID NO: 390276 - DNA, 19 bp, Homo sapiens
  siRNA target sequence for C14orf161 (NM_024764.1,1881-1899).
gtagtgctagggggattaa

SEQ ID NO: 390277 - DNA, 19 bp, Homo sapiens
  siRNA target sequence for C14orf161 (NM_024764.1,1884-1902).
gtgctagggggattaattt

SEQ ID NO: 390278 - DNA, 19 bp, Homo sapiens
  siRNA target sequence for C14orf161 (NM_024764.1,1938-1956).
ccgtggaggacattccaaa

SEQ ID NO: 390279 - DNA, 19 bp, Homo sapiens
  siRNA target sequence for C14orf161 (NM_024764.1,1973-1991).
ccaagagaagttttcaagt

SEQ ID NO: 390280 - DNA, 19 bp, Homo sapiens
  siRNA target sequence for C14orf161 (NM_024764.1,1998-2016).
ctcagtgagctgattcata

SEQ ID NO: 390281 - DNA, 19 bp, Homo sapiens
  siRNA target sequence for C14orf161 (NM_024764.1,2000-2018).
cagtgagctgattcataga

SEQ ID NO: 390282 - DNA, 19 bp, Homo sapiens
  siRNA target sequence for C14orf161 (NM_024764.1,2007-2025).
ctgattcatagatcaaagt

SEQ ID NO: 390283 - DNA, 19 bp, Homo sapiens
  siRNA target sequence for C14orf161 (NM_024764.1,2009-2027).
gattcatagatcaaagtct

SEQ ID NO: 390284 - DNA, 19 bp, Homo sapiens
  siRNA target sequence for FLJ23451 (NM_024766.1,207-225).
gattgcctgcgacatgtat

SEQ ID NO: 390285 - DNA, 19 bp, Homo sapiens
  siRNA target sequence for FLJ23451 (NM_024766.1,211-229).
gcctgcgacatgtatctgt

SEQ ID NO: 390286 - DNA, 19 bp, Homo sapiens
  siRNA target sequence for FLJ23451 (NM_024766.1,215-233).
gcgacatgtatctgtaaga

SEQ ID NO: 390287 - DNA, 19 bp, Homo sapiens
  siRNA target sequence for FLJ23451 (NM_024766.1,228-246).
gtaagaagatttgaatcat

SEQ ID NO: 390288 - DNA, 19 bp, Homo sapiens
  siRNA target sequence for FLJ23451 (NM_024766.1,300-318).
ggtgcatgggtccaatata

SEQ ID NO: 390289 - DNA, 19 bp, Homo sapiens
  siRNA target sequence for FLJ23451 (NM_024766.1,303-321).
gcatgggtccaatatacaa

SEQ ID NO: 390290 - DNA, 19 bp, Homo sapiens
  siRNA target sequence for FLJ23451 (NM_024766.1,347-365).
ctccttaaggcataatagt

SEQ ID NO: 390291 - DNA, 19 bp, Homo sapiens
  siRNA target sequence for FLJ23451 (NM_024766.1,364-382).
gtggatccttgaatgttga

SEQ ID NO: 390292 - DNA, 19 bp, Homo sapiens
  siRNA target sequence for FLJ23451 (NM_024766.1,387-405).
gtccttaccagctttgaca

SEQ ID NO: 390293 - DNA, 19 bp, Homo sapiens
  siRNA target sequence for FLJ23451 (NM_024766.1,438-456).
gaggttttggcttactact

SEQ ID NO: 390294 - DNA, 19 bp, Homo sapiens
  siRNA target sequence for FLJ23451 (NM_024766.1,459-477).
ctcaagcacaataatatat

SEQ ID NO: 390295 - DNA, 19 bp, Homo sapiens
  siRNA target sequence for FLJ23451 (NM_024766.1,501-519).
ctagggggtggcatgacat

SEQ ID NO: 390296 - DNA, 19 bp, Homo sapiens
  siRNA target sequence for FLJ23451 (NM_024766.1,555-573).
gtcaaagaagttctgttaa

SEQ ID NO: 390297 - DNA, 19 bp, Homo sapiens
  siRNA target sequence for FLJ23451 (NM_024766.1,569-587).
gttaactgatgggaatgaa

SEQ ID NO: 390298 - DNA, 19 bp, Homo sapiens
  siRNA target sequence for FLJ23451 (NM_024766.1,603-621).
gtgcaagacatcatcacaa

SEQ ID NO: 390299 - DNA, 19 bp, Homo sapiens
  siRNA target sequence for FLJ23451 (NM_024766.1,641-659).
gtttaagacccagaaaata

SEQ ID NO: 390300 - DNA, 19 bp, Homo sapiens
  siRNA target sequence for FLJ23451 (NM_024766.1,668-686).
cgttttacgatgggataat

SEQ ID NO: 390301 - DNA, 19 bp, Homo sapiens
  siRNA target sequence for FLJ23451 (NM_024766.1,707-725).
ggaaggacattttgacatt

SEQ ID NO: 390302 - DNA, 19 bp, Homo sapiens
  siRNA target sequence for FLJ23451 (NM_024766.1,712-730).
gacattttgacattgttat

SEQ ID NO: 390303 - DNA, 19 bp, Homo sapiens
  siRNA target sequence for FLJ23451 (NM_024766.1,766-784).
ccagccttgttgatgcaat

SEQ ID NO: 390304 - DNA, 19 bp, Homo sapiens
  siRNA target sequence for FLJ23451 (NM_024766.1,767-785).
cagccttgttgatgcaata

SEQ ID NO: 390305 - DNA, 19 bp, Homo sapiens
  siRNA target sequence for FLJ23451 (NM_024766.1,827-845).
cccacgccgagggaatact

SEQ ID NO: 390306 - DNA, 19 bp, Homo sapiens
  siRNA target sequence for FLJ23451 (NM_024766.1,828-846).
ccacgccgagggaatactt

SEQ ID NO: 390307 - DNA, 19 bp, Homo sapiens
  siRNA target sequence for FLJ23451 (NM_024766.1,829-847).
cacgccgagggaatacttt

SEQ ID NO: 390308 - DNA, 19 bp, Homo sapiens
  siRNA target sequence for FLJ23451 (NM_024766.1,831-849).
cgccgagggaatactttaa

SEQ ID NO: 390309 - DNA, 19 bp, Homo sapiens
  siRNA target sequence for FLJ23451 (NM_024766.1,832-850).
gccgagggaatactttaaa

SEQ ID NO: 390310 - DNA, 19 bp, Homo sapiens
  siRNA target sequence for FLJ23451 (NM_024766.1,860-878).
caatctagctgaaaaagct

SEQ ID NO: 390311 - DNA, 19 bp, Homo sapiens
  siRNA target sequence for FLJ23451 (NM_024766.1,926-944).
cttccactccaagttgaaa

SEQ ID NO: 390312 - DNA, 19 bp, Homo sapiens
  siRNA target sequence for FLJ23451 (NM_024766.1,947-965).
ggaaaacccggacatatat

SEQ ID NO: 390313 - DNA, 19 bp, Homo sapiens
  siRNA target sequence for FLJ23451 (NM_024766.1,953-971).
cccggacatatatgaagaa

SEQ ID NO: 390314 - DNA, 19 bp, Homo sapiens
  siRNA target sequence for FLJ23451 (NM_024766.1,954-972).
ccggacatatatgaagaaa

SEQ ID NO: 390315 - DNA, 19 bp, Homo sapiens
  siRNA target sequence for FLJ23451 (NM_024766.1,984-1002).
ccgcttctgcttattttga

SEQ ID NO: 390316 - DNA, 19 bp, Homo sapiens
  siRNA target sequence for FLJ23451 (NM_024766.1,992-1010).
gcttattttgaccaaacat

SEQ ID NO: 390317 - DNA, 19 bp, Homo sapiens
  siRNA target sequence for FLJ12057 (NM_024768.1,852-870).
gctccgggacctgaacata

SEQ ID NO: 390318 - DNA, 19 bp, Homo sapiens
  siRNA target sequence for FLJ12057 (NM_024768.1,853-871).
ctccgggacctgaacatat

SEQ ID NO: 390319 - DNA, 19 bp, Homo sapiens
  siRNA target sequence for FLJ12057 (NM_024768.1,857-875).
gggacctgaacatatcgaa

SEQ ID NO: 390320 - DNA, 19 bp, Homo sapiens
  siRNA target sequence for FLJ12057 (NM_024768.1,858-876).
ggacctgaacatatcgaaa

SEQ ID NO: 390321 - DNA, 19 bp, Homo sapiens
  siRNA target sequence for FLJ12057 (NM_024768.1,861-879).
cctgaacatatcgaaaaga

SEQ ID NO: 390322 - DNA, 19 bp, Homo sapiens
  siRNA target sequence for ASAM (NM_024769.1,354-372).
cttctcctcttgctagttt

SEQ ID NO: 390323 - DNA, 19 bp, Homo sapiens
  siRNA target sequence for ASAM (NM_024769.1,365-383).
gctagtttcctactatgtt

SEQ ID NO: 390324 - DNA, 19 bp, Homo sapiens
  siRNA target sequence for ASAM (NM_024769.1,394-412).
ggactcacactgagatcaa

SEQ ID NO: 390325 - DNA, 19 bp, Homo sapiens
  siRNA target sequence for ASAM (NM_024769.1,474-492).
gacactctggatattgaat

SEQ ID NO: 390326 - DNA, 19 bp, Homo sapiens
  siRNA target sequence for ASAM (NM_024769.1,493-511).
ggctgctcaccgataatga

SEQ ID NO: 390327 - DNA, 19 bp, Homo sapiens
  siRNA target sequence for ASAM (NM_024769.1,494-512).
gctgctcaccgataatgaa

SEQ ID NO: 390328 - DNA, 19 bp, Homo sapiens
  siRNA target sequence for ASAM (NM_024769.1,541-559).
ccagtcgtcatgtctacaa

SEQ ID NO: 390329 - DNA, 19 bp, Homo sapiens
  siRNA target sequence for ASAM (NM_024769.1,542-560).
cagtcgtcatgtctacaat

SEQ ID NO: 390330 - DNA, 19 bp, Homo sapiens
  siRNA target sequence for ASAM (NM_024769.1,544-562).
gtcgtcatgtctacaataa

SEQ ID NO: 390331 - DNA, 19 bp, Homo sapiens
  siRNA target sequence for ASAM (NM_024769.1,546-564).
cgtcatgtctacaataact

SEQ ID NO: 390332 - DNA, 19 bp, Homo sapiens
  siRNA target sequence for ASAM (NM_024769.1,547-565).
gtcatgtctacaataactt

SEQ ID NO: 390333 - DNA, 19 bp, Homo sapiens
  siRNA target sequence for ASAM (NM_024769.1,668-686).
cacctgtaaggttaagaat

SEQ ID NO: 390334 - DNA, 19 bp, Homo sapiens
  siRNA target sequence for ASAM (NM_024769.1,814-832).
gcacagagcccattgtgta

SEQ ID NO: 390335 - DNA, 19 bp, Homo sapiens
  siRNA target sequence for ASAM (NM_024769.1,815-833).
cacagagcccattgtgtat

SEQ ID NO: 390336 - DNA, 19 bp, Homo sapiens
  siRNA target sequence for ASAM (NM_024769.1,819-837).
gagcccattgtgtattact

SEQ ID NO: 390337 - DNA, 19 bp, Homo sapiens
  siRNA target sequence for ASAM (NM_024769.1,882-900).
cccaaatctaggattgact

SEQ ID NO: 390338 - DNA, 19 bp, Homo sapiens
  siRNA target sequence for ASAM (NM_024769.1,883-901).
ccaaatctaggattgacta

SEQ ID NO: 390339 - DNA, 19 bp, Homo sapiens
  siRNA target sequence for ASAM (NM_024769.1,995-1013).
ctgtgtggtgcgagtaact

SEQ ID NO: 390340 - DNA, 19 bp, Homo sapiens
  siRNA target sequence for ASAM (NM_024769.1,997-1015).
gtgtggtgcgagtaactgt

SEQ ID NO: 390341 - DNA, 19 bp, Homo sapiens
  siRNA target sequence for ASAM (NM_024769.1,1004-1022).
gcgagtaactgtacagtat

SEQ ID NO: 390342 - DNA, 19 bp, Homo sapiens
  siRNA target sequence for ASAM (NM_024769.1,1250-1268).
cactcgctccacagcaaat

SEQ ID NO: 390343 - DNA, 19 bp, Homo sapiens
  siRNA target sequence for ASAM (NM_024769.1,1366-1384).
gttctgaaccaaagaaagt

SEQ ID NO: 390344 - DNA, 19 bp, Homo sapiens
  siRNA target sequence for ASAM (NM_024769.1,1383-1401).
gtccaccatgctaatctga

SEQ ID NO: 390345 - DNA, 19 bp, Homo sapiens
  siRNA target sequence for FLJ13984 (NM_024770.1,481-499).
cattttacaagattcataa

SEQ ID NO: 390346 - DNA, 19 bp, Homo sapiens
  siRNA target sequence for FLJ13984 (NM_024770.1,506-524).
gtttttcaaggatcgtaat

SEQ ID NO: 390347 - DNA, 19 bp, Homo sapiens
  siRNA target sequence for FLJ13984 (NM_024770.1,578-596).
gaaggcgagagaatcatca

SEQ ID NO: 390348 - DNA, 19 bp, Homo sapiens
  siRNA target sequence for FLJ13984 (NM_024770.1,592-610).
catcatgggatcatgtaaa

SEQ ID NO: 390349 - DNA, 19 bp, Homo sapiens
  siRNA target sequence for FLJ13984 (NM_024770.1,613-631).
ctagtgctacaaatcgttt

SEQ ID NO: 390350 - DNA, 19 bp, Homo sapiens
  siRNA target sequence for FLJ13984 (NM_024770.1,618-636).
gctacaaatcgtttctcaa

SEQ ID NO: 390351 - DNA, 19 bp, Homo sapiens
  siRNA target sequence for FLJ13984 (NM_024770.1,622-640).
caaatcgtttctcaagaat

SEQ ID NO: 390352 - DNA, 19 bp, Homo sapiens
  siRNA target sequence for FLJ13984 (NM_024770.1,648-666).
cctactgtgcctgatgaaa

SEQ ID NO: 390353 - DNA, 19 bp, Homo sapiens
  siRNA target sequence for FLJ13984 (NM_024770.1,656-674).
gcctgatgaaaaaaatcat

SEQ ID NO: 390354 - DNA, 19 bp, Homo sapiens
  siRNA target sequence for FLJ23151 (NM_024772.2,185-203).
gaaagaaccacttttaggt

SEQ ID NO: 390355 - DNA, 19 bp, Homo sapiens
  siRNA target sequence for FLJ23151 (NM_024772.2,236-254).
ggggctgctagatgaaatt

SEQ ID NO: 390356 - DNA, 19 bp, Homo sapiens
  siRNA target sequence for FLJ23151 (NM_024772.2,237-255).
gggctgctagatgaaatta

SEQ ID NO: 390357 - DNA, 19 bp, Homo sapiens
  siRNA target sequence for FLJ23151 (NM_024772.2,501-519).
ggatctgctcaacttttct

SEQ ID NO: 390358 - DNA, 19 bp, Homo sapiens
  siRNA target sequence for FLJ23151 (NM_024772.2,513-531).
cttttctgctccataccat

SEQ ID NO: 390359 - DNA, 19 bp, Homo sapiens
  siRNA target sequence for FLJ23151 (NM_024772.2,528-546).
ccatgcatcactgaataca

SEQ ID NO: 390360 - DNA, 19 bp, Homo sapiens
  siRNA target sequence for FLJ23151 (NM_024772.2,529-547).
catgcatcactgaatacat

SEQ ID NO: 390361 - DNA, 19 bp, Homo sapiens
  siRNA target sequence for FLJ23151 (NM_024772.2,533-551).
catcactgaatacatttca

SEQ ID NO: 390362 - DNA, 19 bp, Homo sapiens
  siRNA target sequence for FLJ23151 (NM_024772.2,559-577).
gttcaccagttccttctaa

SEQ ID NO: 390363 - DNA, 19 bp, Homo sapiens
  siRNA target sequence for FLJ23151 (NM_024772.2,647-665).
cactacctcttgcaaaact

SEQ ID NO: 390364 - DNA, 19 bp, Homo sapiens
  siRNA target sequence for FLJ23151 (NM_024772.2,649-667).
ctacctcttgcaaaacttt

SEQ ID NO: 390365 - DNA, 19 bp, Homo sapiens
  siRNA target sequence for FLJ23151 (NM_024772.2,674-692).
cctatcttgtctttcatca

SEQ ID NO: 390366 - DNA, 19 bp, Homo sapiens
  siRNA target sequence for FLJ23151 (NM_024772.2,717-735).
gttaccatatgtactaata

SEQ ID NO: 390367 - DNA, 19 bp, Homo sapiens
  siRNA target sequence for FLJ23151 (NM_024772.2,722-740).
catatgtactaatagcatt

SEQ ID NO: 390368 - DNA, 19 bp, Homo sapiens
  siRNA target sequence for FLJ23151 (NM_024772.2,761-779).
ccagaagactgctattatt

SEQ ID NO: 390369 - DNA, 19 bp, Homo sapiens
  siRNA target sequence for FLJ23151 (NM_024772.2,769-787).
ctgctattattcagtatga

SEQ ID NO: 390370 - DNA, 19 bp, Homo sapiens
  siRNA target sequence for FLJ23151 (NM_024772.2,782-800).
gtatgaagtaaaataccaa

SEQ ID NO: 390371 - DNA, 19 bp, Homo sapiens
  siRNA target sequence for FLJ23151 (NM_024772.2,879-897).
gagaactgtggcacttact

SEQ ID NO: 390372 - DNA, 19 bp, Homo sapiens
  siRNA target sequence for FLJ23151 (NM_024772.2,881-899).
gaactgtggcacttactgt

SEQ ID NO: 390373 - DNA, 19 bp, Homo sapiens
  siRNA target sequence for FLJ23151 (NM_024772.2,910-928).
ctagtctgtcccacatact

SEQ ID NO: 390374 - DNA, 19 bp, Homo sapiens
  siRNA target sequence for FLJ23151 (NM_024772.2,939-957).
ggacagtctcattacttta

SEQ ID NO: 390375 - DNA, 19 bp, Homo sapiens
  siRNA target sequence for FLJ23151 (NM_024772.2,940-958).
gacagtctcattactttaa

SEQ ID NO: 390376 - DNA, 19 bp, Homo sapiens
  siRNA target sequence for FLJ23151 (NM_024772.2,944-962).
gtctcattactttaatagt

SEQ ID NO: 390377 - DNA, 19 bp, Homo sapiens
  siRNA target sequence for FLJ23151 (NM_024772.2,997-1015).
ccaaaccacttatatctgt

SEQ ID NO: 390378 - DNA, 19 bp, Homo sapiens
  siRNA target sequence for FLJ23151 (NM_024772.2,998-1016).
caaaccacttatatctgtt

SEQ ID NO: 390379 - DNA, 19 bp, Homo sapiens
  siRNA target sequence for FLJ23151 (NM_024772.2,1012-1030).
ctgttccttgcaaaccatt

SEQ ID NO: 390380 - DNA, 19 bp, Homo sapiens
  siRNA target sequence for FLJ23151 (NM_024772.2,1122-1140).
gctaagatggaatcttctt

SEQ ID NO: 390381 - DNA, 19 bp, Homo sapiens
  siRNA target sequence for FLJ23151 (NM_024772.2,1158-1176).
gtggtgcatgatacttcaa

SEQ ID NO: 390382 - DNA, 19 bp, Homo sapiens
  siRNA target sequence for FLJ23151 (NM_024772.2,1160-1178).
ggtgcatgatacttcaaca

SEQ ID NO: 390383 - DNA, 19 bp, Homo sapiens
  siRNA target sequence for FLJ23151 (NM_024772.2,1210-1228).
cagttataagcaatatagt

SEQ ID NO: 390384 - DNA, 19 bp, Homo sapiens
  siRNA target sequence for FLJ23151 (NM_024772.2,1212-1230).
gttataagcaatatagtgt

SEQ ID NO: 390385 - DNA, 19 bp, Homo sapiens
  siRNA target sequence for FLJ23151 (NM_024772.2,1248-1266).
gttgccttgcccatcatga

SEQ ID NO: 390386 - DNA, 19 bp, Homo sapiens
  siRNA target sequence for FLJ23151 (NM_024772.2,1262-1280).
catgaacactgatgtctta

SEQ ID NO: 390387 - DNA, 19 bp, Homo sapiens
  siRNA target sequence for FLJ23151 (NM_024772.2,1306-1324).
caacagcagatgtcattgt

SEQ ID NO: 390388 - DNA, 19 bp, Homo sapiens
  siRNA target sequence for FLJ23151 (NM_024772.2,1323-1341).
gtggatctttctaagagtt

SEQ ID NO: 390389 - DNA, 19 bp, Homo sapiens
  siRNA target sequence for FLJ23151 (NM_024772.2,1394-1412).
cgtttcaccatcttcatca

SEQ ID NO: 390390 - DNA, 19 bp, Homo sapiens
  siRNA target sequence for FLJ23151 (NM_024772.2,1435-1453).
gttccagtacagaagtaca

SEQ ID NO: 390391 - DNA, 19 bp, Homo sapiens
  siRNA target sequence for FLJ23151 (NM_024772.2,1438-1456).
ccagtacagaagtacaaaa

SEQ ID NO: 390392 - DNA, 19 bp, Homo sapiens
  siRNA target sequence for FLJ23151 (NM_024772.2,1458-1476).
gacaatatgaaatctatga

SEQ ID NO: 390393 - DNA, 19 bp, Homo sapiens
  siRNA target sequence for FLJ23151 (NM_024772.2,1533-1551).
ggtaaatcacgaagtatta

SEQ ID NO: 390394 - DNA, 19 bp, Homo sapiens
  siRNA target sequence for FLJ23151 (NM_024772.2,1558-1576).
cttgttgtgcagattttga

SEQ ID NO: 390395 - DNA, 19 bp, Homo sapiens
  siRNA target sequence for FLJ23151 (NM_024772.2,1564-1582).
gtgcagattttgagtgttt

SEQ ID NO: 390396 - DNA, 19 bp, Homo sapiens
  siRNA target sequence for FLJ23151 (NM_024772.2,1612-1630).
gttattcatgccagttgtt

SEQ ID NO: 390397 - DNA, 19 bp, Homo sapiens
  siRNA target sequence for FLJ23151 (NM_024772.2,1649-1667).
ctgtggaagagagtcattt

SEQ ID NO: 390398 - DNA, 19 bp, Homo sapiens
  siRNA target sequence for FLJ23151 (NM_024772.2,1668-1686).
gcaacccacggaacttcta

SEQ ID NO: 390399 - DNA, 19 bp, Homo sapiens
  siRNA target sequence for FLJ23151 (NM_024772.2,1669-1687).
caacccacggaacttctaa

SEQ ID NO: 390400 - DNA, 19 bp, Homo sapiens
  siRNA target sequence for FLJ23151 (NM_024772.2,1674-1692).
cacggaacttctaattgga

SEQ ID NO: 390401 - DNA, 19 bp, Homo sapiens
  siRNA target sequence for FLJ23151 (NM_024772.2,1676-1694).
cggaacttctaattggaaa

SEQ ID NO: 390402 - DNA, 19 bp, Homo sapiens
  siRNA target sequence for FLJ23151 (NM_024772.2,1783-1801).
gagctgtcagtgacgattt

SEQ ID NO: 390403 - DNA, 19 bp, Homo sapiens
  siRNA target sequence for FLJ23151 (NM_024772.2,1785-1803).
gctgtcagtgacgatttat

SEQ ID NO: 390404 - DNA, 19 bp, Homo sapiens
  siRNA target sequence for FLJ23151 (NM_024772.2,1794-1812).
gacgatttatctattcatt

SEQ ID NO: 390405 - DNA, 19 bp, Homo sapiens
  siRNA target sequence for FLJ23151 (NM_024772.2,1804-1822).
ctattcattcgaaacagat

SEQ ID NO: 390406 - DNA, 19 bp, Homo sapiens
  siRNA target sequence for FLJ23151 (NM_024772.2,1838-1856).
gtacctaaagcttataatt

SEQ ID NO: 390407 - DNA, 19 bp, Homo sapiens
  siRNA target sequence for FLJ23151 (NM_024772.2,1904-1922).
cgaccagtcagtttcatct

SEQ ID NO: 390408 - DNA, 19 bp, Homo sapiens
  siRNA target sequence for FLJ23151 (NM_024772.2,2002-2020).
cacaagttgacttctataa

SEQ ID NO: 390409 - DNA, 19 bp, Homo sapiens
  siRNA target sequence for FLJ23151 (NM_024772.2,2004-2022).
caagttgacttctataaca

SEQ ID NO: 390410 - DNA, 19 bp, Homo sapiens
  siRNA target sequence for FLJ23151 (NM_024772.2,2038-2056).
gtgatattatcgaaataat

SEQ ID NO: 390411 - DNA, 19 bp, Homo sapiens
  siRNA target sequence for FLJ23151 (NM_024772.2,2073-2091).
caggatattgtgaatgaga

SEQ ID NO: 390412 - DNA, 19 bp, Homo sapiens
  siRNA target sequence for FLJ23151 (NM_024772.2,2154-2172).
cagctttcaatttgtgtaa

SEQ ID NO: 390413 - DNA, 19 bp, Homo sapiens
  siRNA target sequence for FLJ23151 (NM_024772.2,2191-2209).
caaaggctatcttaattaa

SEQ ID NO: 390414 - DNA, 19 bp, Homo sapiens
  siRNA target sequence for FLJ23151 (NM_024772.2,2195-2213).
ggctatcttaattaaggaa

SEQ ID NO: 390415 - DNA, 19 bp, Homo sapiens
  siRNA target sequence for FLJ23151 (NM_024772.2,2246-2264).
gactgggacccacttacat

SEQ ID NO: 390416 - DNA, 19 bp, Homo sapiens
  siRNA target sequence for FLJ23151 (NM_024772.2,2256-2274).
cacttacataggactatca

SEQ ID NO: 390417 - DNA, 19 bp, Homo sapiens
  siRNA target sequence for FLJ23151 (NM_024772.2,2262-2280).
cataggactatcaaaactt

SEQ ID NO: 390418 - DNA, 19 bp, Homo sapiens
  siRNA target sequence for FLJ23151 (NM_024772.2,2285-2303).
gcagcaaattggagttgat

SEQ ID NO: 390419 - DNA, 19 bp, Homo sapiens
  siRNA target sequence for FLJ23151 (NM_024772.2,2295-2313).
ggagttgatatggataaaa

SEQ ID NO: 390420 - DNA, 19 bp, Homo sapiens
  siRNA target sequence for FLJ23151 (NM_024772.2,2331-2349).
gatagcaccactaatttga

SEQ ID NO: 390421 - DNA, 19 bp, Homo sapiens
  siRNA target sequence for FLJ23151 (NM_024772.2,2338-2356).
ccactaatttgaagataaa

SEQ ID NO: 390422 - DNA, 19 bp, Homo sapiens
  siRNA target sequence for FLJ23151 (NM_024772.2,2391-2409).
gaaccaagagctttataca

SEQ ID NO: 390423 - DNA, 19 bp, Homo sapiens
  siRNA target sequence for FLJ23151 (NM_024772.2,2395-2413).
caagagctttatacataca

SEQ ID NO: 390424 - DNA, 19 bp, Homo sapiens
  siRNA target sequence for FLJ23151 (NM_024772.2,2416-2434).
gttatgcacactttttgga

SEQ ID NO: 390425 - DNA, 19 bp, Homo sapiens
  siRNA target sequence for FLJ23151 (NM_024772.2,2421-2439).
gcacactttttggatttat

SEQ ID NO: 390426 - DNA, 19 bp, Homo sapiens
  siRNA target sequence for FLJ23151 (NM_024772.2,2474-2492).
ccgaagtgctctaaaaact

SEQ ID NO: 390427 - DNA, 19 bp, Homo sapiens
  siRNA target sequence for FLJ23151 (NM_024772.2,2491-2509).
ctctcagttctttgttcaa

SEQ ID NO: 390428 - DNA, 19 bp, Homo sapiens
  siRNA target sequence for FLJ23151 (NM_024772.2,2497-2515).
gttctttgttcaacactat

SEQ ID NO: 390429 - DNA, 19 bp, Homo sapiens
  siRNA target sequence for FLJ23151 (NM_024772.2,2507-2525).
caacactatttgtatgtct

SEQ ID NO: 390430 - DNA, 19 bp, Homo sapiens
  siRNA target sequence for FLJ23151 (NM_024772.2,2611-2629).
cagtccatgatcgtacatt

SEQ ID NO: 390431 - DNA, 19 bp, Homo sapiens
  siRNA target sequence for FLJ23151 (NM_024772.2,2615-2633).
ccatgatcgtacattacta

SEQ ID NO: 390432 - DNA, 19 bp, Homo sapiens
  siRNA target sequence for FLJ23151 (NM_024772.2,2616-2634).
catgatcgtacattactat

SEQ ID NO: 390433 - DNA, 19 bp, Homo sapiens
  siRNA target sequence for FLJ23151 (NM_024772.2,2643-2661).
gacagtcttccagagatta

SEQ ID NO: 390434 - DNA, 19 bp, Homo sapiens
  siRNA target sequence for FLJ23151 (NM_024772.2,2701-2719).
caagtttcgccgatgaatt

SEQ ID NO: 390435 - DNA, 19 bp, Homo sapiens
  siRNA target sequence for FLJ23151 (NM_024772.2,2709-2727).
gccgatgaattgagtcatt

SEQ ID NO: 390436 - DNA, 19 bp, Homo sapiens
  siRNA target sequence for FLJ23151 (NM_024772.2,2710-2728).
ccgatgaattgagtcattt

SEQ ID NO: 390437 - DNA, 19 bp, Homo sapiens
  siRNA target sequence for FLJ23151 (NM_024772.2,2786-2804).
gctgagtgttacaggaatt

SEQ ID NO: 390438 - DNA, 19 bp, Homo sapiens
  siRNA target sequence for FLJ23151 (NM_024772.2,2789-2807).
gagtgttacaggaattctt

SEQ ID NO: 390439 - DNA, 19 bp, Homo sapiens
  siRNA target sequence for FLJ23151 (NM_024772.2,2814-2832).
gagcttcaaaataaaacca

SEQ ID NO: 390440 - DNA, 19 bp, Homo sapiens
  siRNA target sequence for FLJ13798 (NM_024773.1,209-227).
ggccagagaaggcacttta

SEQ ID NO: 390441 - DNA, 19 bp, Homo sapiens
  siRNA target sequence for FLJ13798 (NM_024773.1,244-262).
cgctcctgccgcacagtaa

SEQ ID NO: 390442 - DNA, 19 bp, Homo sapiens
  siRNA target sequence for FLJ13798 (NM_024773.1,245-263).
gctcctgccgcacagtaaa

SEQ ID NO: 390443 - DNA, 19 bp, Homo sapiens
  siRNA target sequence for FLJ13798 (NM_024773.1,248-266).
cctgccgcacagtaaagaa

SEQ ID NO: 390444 - DNA, 19 bp, Homo sapiens
  siRNA target sequence for FLJ13798 (NM_024773.1,325-343).
gagccactgagctcttcta

SEQ ID NO: 390445 - DNA, 19 bp, Homo sapiens
  siRNA target sequence for FLJ13798 (NM_024773.1,421-439).
catggcaggacgtagacaa

SEQ ID NO: 390446 - DNA, 19 bp, Homo sapiens
  siRNA target sequence for FLJ13798 (NM_024773.1,426-444).
caggacgtagacaaagact

SEQ ID NO: 390447 - DNA, 19 bp, Homo sapiens
  siRNA target sequence for FLJ13798 (NM_024773.1,573-591).
ctgggggacatccttctta

SEQ ID NO: 390448 - DNA, 19 bp, Homo sapiens
  siRNA target sequence for FLJ13798 (NM_024773.1,577-595).
gggacatccttcttaaagt

SEQ ID NO: 390449 - DNA, 19 bp, Homo sapiens
  siRNA target sequence for FLJ13798 (NM_024773.1,676-694).
caagggcggaccatggttt

SEQ ID NO: 390450 - DNA, 19 bp, Homo sapiens
  siRNA target sequence for FLJ13798 (NM_024773.1,679-697).
gggcggaccatggtttgat

SEQ ID NO: 390451 - DNA, 19 bp, Homo sapiens
  siRNA target sequence for FLJ13798 (NM_024773.1,680-698).
ggcggaccatggtttgatt

SEQ ID NO: 390452 - DNA, 19 bp, Homo sapiens
  siRNA target sequence for FLJ13798 (NM_024773.1,691-709).
gtttgattccagatgtgaa

SEQ ID NO: 390453 - DNA, 19 bp, Homo sapiens
  siRNA target sequence for FLJ13798 (NM_024773.1,699-717).
ccagatgtgaagttagaaa

SEQ ID NO: 390454 - DNA, 19 bp, Homo sapiens
  siRNA target sequence for FLJ13798 (NM_024773.1,952-970).
gcaaatacatcgtgaatga

SEQ ID NO: 390455 - DNA, 19 bp, Homo sapiens
  siRNA target sequence for FLJ13798 (NM_024773.1,1079-1097).
ggaggaaatcaccatcaat

SEQ ID NO: 390456 - DNA, 19 bp, Homo sapiens
  siRNA target sequence for FLJ13798 (NM_024773.1,1347-1365).
ctgttcatcccggtgaaat

SEQ ID NO: 390457 - DNA, 19 bp, Homo sapiens
  siRNA target sequence for FLJ13798 (NM_024773.1,1377-1395).
gtgcgggctctggatttga

SEQ ID NO: 390458 - DNA, 19 bp, Homo sapiens
  siRNA target sequence for FLJ21924 (NM_024774.2,471-489).
gcaactgagctgtttgcta

SEQ ID NO: 390459 - DNA, 19 bp, Homo sapiens
  siRNA target sequence for FLJ21924 (NM_024774.2,548-566).
caccaccttcagcaataga

SEQ ID NO: 390460 - DNA, 19 bp, Homo sapiens
  siRNA target sequence for FLJ21924 (NM_024774.2,553-571).
ccttcagcaatagaaactt

SEQ ID NO: 390461 - DNA, 19 bp, Homo sapiens
  siRNA target sequence for FLJ21924 (NM_024774.2,554-572).
cttcagcaatagaaacttt

SEQ ID NO: 390462 - DNA, 19 bp, Homo sapiens
  siRNA target sequence for FLJ21924 (NM_024774.2,642-660).
catgaccctttgctacaaa

SEQ ID NO: 390463 - DNA, 19 bp, Homo sapiens
  siRNA target sequence for FLJ21924 (NM_024774.2,645-663).
gaccctttgctacaaatca

SEQ ID NO: 390464 - DNA, 19 bp, Homo sapiens
  siRNA target sequence for FLJ21924 (NM_024774.2,665-683).
gacttcccagggaactgtt

SEQ ID NO: 390465 - DNA, 19 bp, Homo sapiens
  siRNA target sequence for FLJ21924 (NM_024774.2,710-728).
gggcagttctgtattaagt

SEQ ID NO: 390466 - DNA, 19 bp, Homo sapiens
  siRNA target sequence for FLJ21924 (NM_024774.2,907-925).
gagaatgtagtgttattaa

SEQ ID NO: 390467 - DNA, 19 bp, Homo sapiens
  siRNA target sequence for FLJ21924 (NM_024774.2,981-999).
cagcactccttacatagtt

SEQ ID NO: 390468 - DNA, 19 bp, Homo sapiens
  siRNA target sequence for FLJ21924 (NM_024774.2,983-1001).
gcactccttacatagttat

SEQ ID NO: 390469 - DNA, 19 bp, Homo sapiens
  siRNA target sequence for FLJ21924 (NM_024774.2,989-1007).
cttacatagttatctatca

SEQ ID NO: 390470 - DNA, 19 bp, Homo sapiens
  siRNA target sequence for FLJ21924 (NM_024774.2,1071-1089).
ggagattccactcagaatt

SEQ ID NO: 390471 - DNA, 19 bp, Homo sapiens
  siRNA target sequence for FLJ21924 (NM_024774.2,1072-1090).
gagattccactcagaattt

SEQ ID NO: 390472 - DNA, 19 bp, Homo sapiens
  siRNA target sequence for FLJ21924 (NM_024774.2,1099-1117).
ctagcccgacccagaatta

SEQ ID NO: 390473 - DNA, 19 bp, Homo sapiens
  siRNA target sequence for FLJ21924 (NM_024774.2,1102-1120).
gcccgacccagaattatat

SEQ ID NO: 390474 - DNA, 19 bp, Homo sapiens
  siRNA target sequence for FLJ21924 (NM_024774.2,1103-1121).
cccgacccagaattatatt

SEQ ID NO: 390475 - DNA, 19 bp, Homo sapiens
  siRNA target sequence for FLJ21924 (NM_024774.2,1104-1122).
ccgacccagaattatattt

SEQ ID NO: 390476 - DNA, 19 bp, Homo sapiens
  siRNA target sequence for FLJ21924 (NM_024774.2,1146-1164).
cagactcaagagtcatcat

SEQ ID NO: 390477 - DNA, 19 bp, Homo sapiens
  siRNA target sequence for FLJ21924 (NM_024774.2,1196-1214).
ccagtcatcatcttttgca

SEQ ID NO: 390478 - DNA, 19 bp, Homo sapiens
  siRNA target sequence for FLJ21924 (NM_024774.2,1213-1231).
catcctctactcattgtca

SEQ ID NO: 390479 - DNA, 19 bp, Homo sapiens
  siRNA target sequence for FLJ21924 (NM_024774.2,1255-1273).
cccctgacccaaagtctta

SEQ ID NO: 390480 - DNA, 19 bp, Homo sapiens
  siRNA target sequence for FLJ21924 (NM_024774.2,1286-1304).
gcttgactcagatgtgtat

SEQ ID NO: 390481 - DNA, 19 bp, Homo sapiens
  siRNA target sequence for FLJ21924 (NM_024774.2,1301-1319).
gtatccatcttcaaagcaa

SEQ ID NO: 390482 - DNA, 19 bp, Homo sapiens
  siRNA target sequence for FLJ21924 (NM_024774.2,1365-1383).
gcatctcttgagtcatcaa

SEQ ID NO: 390483 - DNA, 19 bp, Homo sapiens
  siRNA target sequence for FLJ21924 (NM_024774.2,1438-1456).
caaaggcagatgacagata

SEQ ID NO: 390484 - DNA, 19 bp, Homo sapiens
  siRNA target sequence for FLJ21924 (NM_024774.2,1461-1479).
cagagtgtaatcagaagta

SEQ ID NO: 390485 - DNA, 19 bp, Homo sapiens
  siRNA target sequence for FLJ21924 (NM_024774.2,1463-1481).
gagtgtaatcagaagtaat

SEQ ID NO: 390486 - DNA, 19 bp, Homo sapiens
  siRNA target sequence for FLJ21924 (NM_024774.2,1483-1501).
cccgtcttgaagatcaagt

SEQ ID NO: 390487 - DNA, 19 bp, Homo sapiens
  siRNA target sequence for FLJ21924 (NM_024774.2,1484-1502).
ccgtcttgaagatcaagtt

SEQ ID NO: 390488 - DNA, 19 bp, Homo sapiens
  siRNA target sequence for FLJ21924 (NM_024774.2,1485-1503).
cgtcttgaagatcaagtta

SEQ ID NO: 390489 - DNA, 19 bp, Homo sapiens
  siRNA target sequence for FLJ21924 (NM_024774.2,1548-1566).
ggttcagtgacacaactta

SEQ ID NO: 390490 - DNA, 19 bp, Homo sapiens
  siRNA target sequence for FLJ21924 (NM_024774.2,1549-1567).
gttcagtgacacaacttaa

SEQ ID NO: 390491 - DNA, 19 bp, Homo sapiens
  siRNA target sequence for FLJ21924 (NM_024774.2,1558-1576).
cacaacttaaccaacaaat

SEQ ID NO: 390492 - DNA, 19 bp, Homo sapiens
  siRNA target sequence for FLJ21924 (NM_024774.2,1572-1590).
caaattggccaagtcaata

SEQ ID NO: 390493 - DNA, 19 bp, Homo sapiens
  siRNA target sequence for FLJ21924 (NM_024774.2,1593-1611).
gcagctacccttgatctta

SEQ ID NO: 390494 - DNA, 19 bp, Homo sapiens
  siRNA target sequence for FLJ21924 (NM_024774.2,1594-1612).
cagctacccttgatcttaa

SEQ ID NO: 390495 - DNA, 19 bp, Homo sapiens
  siRNA target sequence for FLJ21924 (NM_024774.2,1596-1614).
gctacccttgatcttaaga

SEQ ID NO: 390496 - DNA, 19 bp, Homo sapiens
  siRNA target sequence for FLJ21924 (NM_024774.2,1605-1623).
gatcttaagaactcaacta

SEQ ID NO: 390497 - DNA, 19 bp, Homo sapiens
  siRNA target sequence for FLJ21924 (NM_024774.2,1608-1626).
cttaagaactcaactaatt

SEQ ID NO: 390498 - DNA, 19 bp, Homo sapiens
  siRNA target sequence for FLJ21924 (NM_024774.2,1613-1631).
gaactcaactaatttaata

SEQ ID NO: 390499 - DNA, 19 bp, Homo sapiens
  siRNA target sequence for FLJ21924 (NM_024774.2,1632-1650).
cagactccacaaataaggt

SEQ ID NO: 390500 - DNA, 19 bp, Homo sapiens
  siRNA target sequence for FLJ21924 (NM_024774.2,1638-1656).
ccacaaataaggttgaata

SEQ ID NO: 390501 - DNA, 19 bp, Homo sapiens
  siRNA target sequence for FLJ21924 (NM_024774.2,1641-1659).
caaataaggttgaatacta

SEQ ID NO: 390502 - DNA, 19 bp, Homo sapiens
  siRNA target sequence for FLJ21924 (NM_024774.2,1648-1666).
ggttgaatactaaagactt

SEQ ID NO: 390503 - DNA, 19 bp, Homo sapiens
  siRNA target sequence for FLJ21924 (NM_024774.2,1649-1667).
gttgaatactaaagactta

SEQ ID NO: 390504 - DNA, 19 bp, Homo sapiens
  siRNA target sequence for FLJ21924 (NM_024774.2,1674-1692).
caacatcctctcatactta

SEQ ID NO: 390505 - DNA, 19 bp, Homo sapiens
  siRNA target sequence for FLJ21924 (NM_024774.2,1715-1733).
ggaacagcacgatcaaata

SEQ ID NO: 390506 - DNA, 19 bp, Homo sapiens
  siRNA target sequence for FLJ21924 (NM_024774.2,1716-1734).
gaacagcacgatcaaataa

SEQ ID NO: 390507 - DNA, 19 bp, Homo sapiens
  siRNA target sequence for FLJ21924 (NM_024774.2,1719-1737).
cagcacgatcaaataatta

SEQ ID NO: 390508 - DNA, 19 bp, Homo sapiens
  siRNA target sequence for FLJ21924 (NM_024774.2,1751-1769).
gattcaaattccaaatcat

SEQ ID NO: 390509 - DNA, 19 bp, Homo sapiens
  siRNA target sequence for FLJ21924 (NM_024774.2,1865-1883).
ggcaggtttaggtcaagta

SEQ ID NO: 390510 - DNA, 19 bp, Homo sapiens
  siRNA target sequence for FLJ21924 (NM_024774.2,1866-1884).
gcaggtttaggtcaagtaa

SEQ ID NO: 390511 - DNA, 19 bp, Homo sapiens
  siRNA target sequence for FLJ21924 (NM_024774.2,1867-1885).
caggtttaggtcaagtaaa

SEQ ID NO: 390512 - DNA, 19 bp, Homo sapiens
  siRNA target sequence for FLJ21924 (NM_024774.2,1896-1914).
caagcacagcgtgttcaaa

SEQ ID NO: 390513 - DNA, 19 bp, Homo sapiens
  siRNA target sequence for FLJ21924 (NM_024774.2,1946-1964).
gatggaaggtcatgttatt

SEQ ID NO: 390514 - DNA, 19 bp, Homo sapiens
  siRNA target sequence for FLJ21924 (NM_024774.2,1969-1987).
gcaatggtgatcattctca

SEQ ID NO: 390515 - DNA, 19 bp, Homo sapiens
  siRNA target sequence for FLJ21924 (NM_024774.2,2075-2093).
gggccattttagtgaaaca

SEQ ID NO: 390516 - DNA, 19 bp, Homo sapiens
  siRNA target sequence for FLJ21924 (NM_024774.2,2076-2094).
ggccattttagtgaaacaa

SEQ ID NO: 390517 - DNA, 19 bp, Homo sapiens
  siRNA target sequence for FLJ21924 (NM_024774.2,2092-2110).
caaatcaacatgattcaaa

SEQ ID NO: 390518 - DNA, 19 bp, Homo sapiens
  siRNA target sequence for FLJ21924 (NM_024774.2,2125-2143).
ctcttggatcgatgtgttt

SEQ ID NO: 390519 - DNA, 19 bp, Homo sapiens
  siRNA target sequence for FLJ21924 (NM_024774.2,2283-2301).
gaagatggtgattctaaat

SEQ ID NO: 390520 - DNA, 19 bp, Homo sapiens
  siRNA target sequence for FLJ21924 (NM_024774.2,2289-2307).
ggtgattctaaatctcatt

SEQ ID NO: 390521 - DNA, 19 bp, Homo sapiens
  siRNA target sequence for FLJ21924 (NM_024774.2,2395-2413).
cttccttaaatggaaatca

SEQ ID NO: 390522 - DNA, 19 bp, Homo sapiens
  siRNA target sequence for FLJ21924 (NM_024774.2,2442-2460).
gcccttcagtcaaaaatga

SEQ ID NO: 390523 - DNA, 19 bp, Homo sapiens
  siRNA target sequence for FLJ21924 (NM_024774.2,2481-2499).
gaaacacctggtcaaaata

SEQ ID NO: 390524 - DNA, 19 bp, Homo sapiens
  siRNA target sequence for FLJ21924 (NM_024774.2,2562-2580).
ggcccattcaagaaacagt

SEQ ID NO: 390525 - DNA, 19 bp, Homo sapiens
  siRNA target sequence for FLJ21924 (NM_024774.2,2573-2591).
gaaacagtctgctaccaat

SEQ ID NO: 390526 - DNA, 19 bp, Homo sapiens
  siRNA target sequence for FLJ21924 (NM_024774.2,2613-2631).
gaagctcctgttgatagta

SEQ ID NO: 390527 - DNA, 19 bp, Homo sapiens
  siRNA target sequence for FLJ21924 (NM_024774.2,2616-2634).
gctcctgttgatagtacat

SEQ ID NO: 390528 - DNA, 19 bp, Homo sapiens
  siRNA target sequence for FLJ21924 (NM_024774.2,2655-2673).
gagtttgtttctagtagta

SEQ ID NO: 390529 - DNA, 19 bp, Homo sapiens
  siRNA target sequence for FLJ21924 (NM_024774.2,2694-2712).
gctacatcagagagtgaat

SEQ ID NO: 390530 - DNA, 19 bp, Homo sapiens
  siRNA target sequence for FLJ21924 (NM_024774.2,2695-2713).
ctacatcagagagtgaatt

SEQ ID NO: 390531 - DNA, 19 bp, Homo sapiens
  siRNA target sequence for FLJ21924 (NM_024774.2,2800-2818).
cagtcagtgtcaagattga

SEQ ID NO: 390532 - DNA, 19 bp, Homo sapiens
  siRNA target sequence for FLJ21924 (NM_024774.2,2934-2952).
ggcaaacgccagaatccaa

SEQ ID NO: 390533 - DNA, 19 bp, Homo sapiens
  siRNA target sequence for FLJ21924 (NM_024774.2,2945-2963).
gaatccaaggggaacagat

SEQ ID NO: 390534 - DNA, 19 bp, Homo sapiens
  siRNA target sequence for FLJ21924 (NM_024774.2,2998-3016).
gctgccatgatggttatca

SEQ ID NO: 390535 - DNA, 19 bp, Homo sapiens
  siRNA target sequence for FLJ21924 (NM_024774.2,3074-3092).
caaaacaggatttattgct

SEQ ID NO: 390536 - DNA, 19 bp, Homo sapiens
  siRNA target sequence for FLJ21924 (NM_024774.2,3120-3138).
cccaagcagcagttttcca

SEQ ID NO: 390537 - DNA, 19 bp, Homo sapiens
  siRNA target sequence for FLJ21924 (NM_024774.2,3136-3154).
ccactcttgctgtacgaat

SEQ ID NO: 390538 - DNA, 19 bp, Homo sapiens
  siRNA target sequence for FLJ21924 (NM_024774.2,3181-3199).
cccagatggttcgtacatt

SEQ ID NO: 390539 - DNA, 19 bp, Homo sapiens
  siRNA target sequence for FLJ21924 (NM_024774.2,3218-3236).
caagccttcatctacaaca

SEQ ID NO: 390540 - DNA, 19 bp, Homo sapiens
  siRNA target sequence for FLJ21924 (NM_024774.2,3263-3281).
cggtaacagtccatcagat

SEQ ID NO: 390541 - DNA, 19 bp, Homo sapiens
  siRNA target sequence for FLJ21924 (NM_024774.2,3264-3282).
ggtaacagtccatcagata

SEQ ID NO: 390542 - DNA, 19 bp, Homo sapiens
  siRNA target sequence for FLJ21924 (NM_024774.2,3265-3283).
gtaacagtccatcagataa

SEQ ID NO: 390543 - DNA, 19 bp, Homo sapiens
  siRNA target sequence for FLJ21924 (NM_024774.2,3271-3289).
gtccatcagataaagttga

SEQ ID NO: 390544 - DNA, 19 bp, Homo sapiens
  siRNA target sequence for FLJ21924 (NM_024774.2,3273-3291).
ccatcagataaagttgata

SEQ ID NO: 390545 - DNA, 19 bp, Homo sapiens
  siRNA target sequence for FLJ21924 (NM_024774.2,3349-3367).
gatatagtcaagatgctta

SEQ ID NO: 390546 - DNA, 19 bp, Homo sapiens
  siRNA target sequence for FLJ21924 (NM_024774.2,3374-3392).
cgtctctactcccttaact

SEQ ID NO: 390547 - DNA, 19 bp, Homo sapiens
  siRNA target sequence for FLJ21924 (NM_024774.2,3375-3393).
gtctctactcccttaacta

SEQ ID NO: 390548 - DNA, 19 bp, Homo sapiens
  siRNA target sequence for FLJ21924 (NM_024774.2,3379-3397).
ctactcccttaactacttt

SEQ ID NO: 390549 - DNA, 19 bp, Homo sapiens
  siRNA target sequence for FLJ21924 (NM_024774.2,3398-3416).
ggatgctacttctgataaa

SEQ ID NO: 390550 - DNA, 19 bp, Homo sapiens
  siRNA target sequence for FLJ21924 (NM_024774.2,3434-3452).
cctacaggtggcaactact

SEQ ID NO: 390551 - DNA, 19 bp, Homo sapiens
  siRNA target sequence for FLJ21924 (NM_024774.2,3435-3453).
ctacaggtggcaactacta

SEQ ID NO: 390552 - DNA, 19 bp, Homo sapiens
  siRNA target sequence for FLJ21924 (NM_024774.2,3496-3514).
ccactgtgggtgcagttaa

SEQ ID NO: 390553 - DNA, 19 bp, Homo sapiens
  siRNA target sequence for FLJ21924 (NM_024774.2,3532-3550).
ctacttcatatgcagtaaa

SEQ ID NO: 390554 - DNA, 19 bp, Homo sapiens
  siRNA target sequence for FLJ21924 (NM_024774.2,3581-3599).
ctcaaagcccattgaactt

SEQ ID NO: 390555 - DNA, 19 bp, Homo sapiens
  siRNA target sequence for FLJ21924 (NM_024774.2,3583-3601).
caaagcccattgaacttga

SEQ ID NO: 390556 - DNA, 19 bp, Homo sapiens
  siRNA target sequence for FLJ21924 (NM_024774.2,3635-3653).
ggacactgttgccatagaa

SEQ ID NO: 390557 - DNA, 19 bp, Homo sapiens
  siRNA target sequence for FLJ21924 (NM_024774.2,3646-3664).
ccatagaaggttttacaga

SEQ ID NO: 390558 - DNA, 19 bp, Homo sapiens
  siRNA target sequence for FLJ21924 (NM_024774.2,3701-3719).
cagagagcgtgatgaattt

SEQ ID NO: 390559 - DNA, 19 bp, Homo sapiens
  siRNA target sequence for FLJ21924 (NM_024774.2,3732-3750).
gaagacatagagactttta

SEQ ID NO: 390560 - DNA, 19 bp, Homo sapiens
  siRNA target sequence for FLJ21924 (NM_024774.2,3783-3801).
gctatttggaaagtacaaa

SEQ ID NO: 390561 - DNA, 19 bp, Homo sapiens
  siRNA target sequence for FLJ21924 (NM_024774.2,3856-3874).
ctgctacaaatagttatct

SEQ ID NO: 390562 - DNA, 19 bp, Homo sapiens
  siRNA target sequence for FLJ21924 (NM_024774.2,3862-3880).
caaatagttatcttggata

SEQ ID NO: 390563 - DNA, 19 bp, Homo sapiens
  siRNA target sequence for FLJ21924 (NM_024774.2,4011-4029).
caagctaagccaagtagta

SEQ ID NO: 390564 - DNA, 19 bp, Homo sapiens
  siRNA target sequence for FLJ21924 (NM_024774.2,4042-4060).
ctgatcctctagcatcaaa

SEQ ID NO: 390565 - DNA, 19 bp, Homo sapiens
  siRNA target sequence for FLJ21924 (NM_024774.2,4047-4065).
cctctagcatcaaaaacta

SEQ ID NO: 390566 - DNA, 19 bp, Homo sapiens
  siRNA target sequence for FLJ21924 (NM_024774.2,4085-4103).
cgtgaaacccaaagttaaa

SEQ ID NO: 390567 - DNA, 19 bp, Homo sapiens
  siRNA target sequence for FLJ21924 (NM_024774.2,4188-4206).
cctgagatccatactagta

SEQ ID NO: 390568 - DNA, 19 bp, Homo sapiens
  siRNA target sequence for FLJ21924 (NM_024774.2,4191-4209).
gagatccatactagtagta

SEQ ID NO: 390569 - DNA, 19 bp, Homo sapiens
  siRNA target sequence for FLJ21924 (NM_024774.2,4193-4211).
gatccatactagtagtagt

SEQ ID NO: 390570 - DNA, 19 bp, Homo sapiens
  siRNA target sequence for GEMIN6 (NM_024775.8,82-100).
cccttagaatggcaagatt

SEQ ID NO: 390571 - DNA, 19 bp, Homo sapiens
  siRNA target sequence for GEMIN6 (NM_024775.8,144-162).
gtataaaggatgggtttta

SEQ ID NO: 390572 - DNA, 19 bp, Homo sapiens
  siRNA target sequence for GEMIN6 (NM_024775.8,173-191).
cagtctctgccaatattgt

SEQ ID NO: 390573 - DNA, 19 bp, Homo sapiens
  siRNA target sequence for GEMIN6 (NM_024775.8,182-200).
ccaatattgtccttgtgaa

SEQ ID NO: 390574 - DNA, 19 bp, Homo sapiens
  siRNA target sequence for GEMIN6 (NM_024775.8,320-338).
ctggagactgcaaagcata

SEQ ID NO: 390575 - DNA, 19 bp, Homo sapiens
  siRNA target sequence for GEMIN6 (NM_024775.8,444-462).
ggctggggtcctgactata

SEQ ID NO: 390576 - DNA, 19 bp, Homo sapiens
  siRNA target sequence for GEMIN6 (NM_024775.8,446-464).
ctggggtcctgactataga

SEQ ID NO: 390577 - DNA, 19 bp, Homo sapiens
  siRNA target sequence for GEMIN6 (NM_024775.8,456-474).
gactatagacccaccatat

SEQ ID NO: 390578 - DNA, 19 bp, Homo sapiens
  siRNA target sequence for TMC5 (NM_024780.3,265-283).
ccgatgaccacgtgaatga

SEQ ID NO: 390579 - DNA, 19 bp, Homo sapiens
  siRNA target sequence for TMC5 (NM_024780.3,266-284).
cgatgaccacgtgaatgaa

SEQ ID NO: 390580 - DNA, 19 bp, Homo sapiens
  siRNA target sequence for TMC5 (NM_024780.3,267-285).
gatgaccacgtgaatgaaa

SEQ ID NO: 390581 - DNA, 19 bp, Homo sapiens
  siRNA target sequence for TMC5 (NM_024780.3,275-293).
cgtgaatgaaatcatcata

SEQ ID NO: 390582 - DNA, 19 bp, Homo sapiens
  siRNA target sequence for TMC5 (NM_024780.3,287-305).
catcatacaggttgagaat

SEQ ID NO: 390583 - DNA, 19 bp, Homo sapiens
  siRNA target sequence for TMC5 (NM_024780.3,290-308).
catacaggttgagaatgtt

SEQ ID NO: 390584 - DNA, 19 bp, Homo sapiens
  siRNA target sequence for TMC5 (NM_024780.3,325-343).
gccacccatcctcaaatca

SEQ ID NO: 390585 - DNA, 19 bp, Homo sapiens
  siRNA target sequence for TMC5 (NM_024780.3,327-345).
cacccatcctcaaatcaga

SEQ ID NO: 390586 - DNA, 19 bp, Homo sapiens
  siRNA target sequence for TMC5 (NM_024780.3,329-347).
cccatcctcaaatcagatt

SEQ ID NO: 390587 - DNA, 19 bp, Homo sapiens
  siRNA target sequence for TMC5 (NM_024780.3,330-348).
ccatcctcaaatcagattt

SEQ ID NO: 390588 - DNA, 19 bp, Homo sapiens
  siRNA target sequence for TMC5 (NM_024780.3,394-412).
caatatctgacattgatgt

SEQ ID NO: 390589 - DNA, 19 bp, Homo sapiens
  siRNA target sequence for TMC5 (NM_024780.3,402-420).
gacattgatgtgatagact

SEQ ID NO: 390590 - DNA, 19 bp, Homo sapiens
  siRNA target sequence for TMC5 (NM_024780.3,459-477).
caggtgctgcggttttcaa

SEQ ID NO: 390591 - DNA, 19 bp, Homo sapiens
  siRNA target sequence for TMC5 (NM_024780.3,461-479).
ggtgctgcggttttcaaca

SEQ ID NO: 390592 - DNA, 19 bp, Homo sapiens
  siRNA target sequence for TMC5 (NM_024780.3,462-480).
gtgctgcggttttcaacat

SEQ ID NO: 390593 - DNA, 19 bp, Homo sapiens
  siRNA target sequence for TMC5 (NM_024780.3,464-482).
gctgcggttttcaacatct

SEQ ID NO: 390594 - DNA, 19 bp, Homo sapiens
  siRNA target sequence for TMC5 (NM_024780.3,465-483).
ctgcggttttcaacatctt

SEQ ID NO: 390595 - DNA, 19 bp, Homo sapiens
  siRNA target sequence for TMC5 (NM_024780.3,468-486).
cggttttcaacatctttga

SEQ ID NO: 390596 - DNA, 19 bp, Homo sapiens
  siRNA target sequence for TMC5 (NM_024780.3,519-537).
gaatgcatgggcatagaca

SEQ ID NO: 390597 - DNA, 19 bp, Homo sapiens
  siRNA target sequence for TMC5 (NM_024780.3,599-617).
gacatccagagacagaatt

SEQ ID NO: 390598 - DNA, 19 bp, Homo sapiens
  siRNA target sequence for TMC5 (NM_024780.3,705-723).
cgtatccttcagctcaatt

SEQ ID NO: 390599 - DNA, 19 bp, Homo sapiens
  siRNA target sequence for TMC5 (NM_024780.3,717-735).
ctcaattgctgtattcagt

SEQ ID NO: 390600 - DNA, 19 bp, Homo sapiens
  siRNA target sequence for TMC5 (NM_024780.3,779-797).
cctgtcggaaattctgaat

SEQ ID NO: 390601 - DNA, 19 bp, Homo sapiens
  siRNA target sequence for TMC5 (NM_024780.3,929-947).
catcataatccctcagttt

SEQ ID NO: 390602 - DNA, 19 bp, Homo sapiens
  siRNA target sequence for TMC5 (NM_024780.3,1095-1113).
ctggcctacatcttcacaa

SEQ ID NO: 390603 - DNA, 19 bp, Homo sapiens
  siRNA target sequence for TMC5 (NM_024780.3,1172-1190).
ccggaacaacttcattaat

SEQ ID NO: 390604 - DNA, 19 bp, Homo sapiens
  siRNA target sequence for TMC5 (NM_024780.3,1210-1228).
ggatcaccaagctgatctt

SEQ ID NO: 390605 - DNA, 19 bp, Homo sapiens
  siRNA target sequence for TMC5 (NM_024780.3,1317-1335).
ctccgtcaggagaattcca

SEQ ID NO: 390606 - DNA, 19 bp, Homo sapiens
  siRNA target sequence for TMC5 (NM_024780.3,1333-1351).
ccaagttgacgttcaatca

SEQ ID NO: 390607 - DNA, 19 bp, Homo sapiens
  siRNA target sequence for TMC5 (NM_024780.3,1420-1438).
gtgcagccgtttattacct

SEQ ID NO: 390608 - DNA, 19 bp, Homo sapiens
  siRNA target sequence for TMC5 (NM_024780.3,1505-1523).
cgttgtgtcctgcattaat

SEQ ID NO: 390609 - DNA, 19 bp, Homo sapiens
  siRNA target sequence for TMC5 (NM_024780.3,1599-1617).
ctcctgatccgaaacatct

SEQ ID NO: 390610 - DNA, 19 bp, Homo sapiens
  siRNA target sequence for TMC5 (NM_024780.3,1602-1620).
ctgatccgaaacatctttt

SEQ ID NO: 390611 - DNA, 19 bp, Homo sapiens
  siRNA target sequence for TMC5 (NM_024780.3,1722-1740).
cggctccttctgatggatt

SEQ ID NO: 390612 - DNA, 19 bp, Homo sapiens
  siRNA target sequence for TMC5 (NM_024780.3,1819-1837).
gccttcaggagtttgacat

SEQ ID NO: 390613 - DNA, 19 bp, Homo sapiens
  siRNA target sequence for TMC5 (NM_024780.3,1847-1865).
cgttctagaactgatctat

SEQ ID NO: 390614 - DNA, 19 bp, Homo sapiens
  siRNA target sequence for TMC5 (NM_024780.3,1940-1958).
catgttctactccaaaaat

SEQ ID NO: 390615 - DNA, 19 bp, Homo sapiens
  siRNA target sequence for TMC5 (NM_024780.3,2162-2180).
gatcgacaccctaagtaca

SEQ ID NO: 390616 - DNA, 19 bp, Homo sapiens
  siRNA target sequence for TMC5 (NM_024780.3,2187-2205).
ggctacctgtgggttgttt

SEQ ID NO: 390617 - DNA, 19 bp, Homo sapiens
  siRNA target sequence for TMC5 (NM_024780.3,2195-2213).
gtgggttgtttggatctat

SEQ ID NO: 390618 - DNA, 19 bp, Homo sapiens
  siRNA target sequence for TMC5 (NM_024780.3,2254-2272).
ccctcattgtgctaatcat

SEQ ID NO: 390619 - DNA, 19 bp, Homo sapiens
  siRNA target sequence for TMC5 (NM_024780.3,2264-2282).
gctaatcatcacctatctt

SEQ ID NO: 390620 - DNA, 19 bp, Homo sapiens
  siRNA target sequence for TMC5 (NM_024780.3,2265-2283).
ctaatcatcacctatcttt

SEQ ID NO: 390621 - DNA, 19 bp, Homo sapiens
  siRNA target sequence for TMC5 (NM_024780.3,2324-2342).
gctccatgagcagatcatt

SEQ ID NO: 390622 - DNA, 19 bp, Homo sapiens
  siRNA target sequence for TMC5 (NM_024780.3,2325-2343).
ctccatgagcagatcatta

SEQ ID NO: 390623 - DNA, 19 bp, Homo sapiens
  siRNA target sequence for TMC5 (NM_024780.3,2327-2345).
ccatgagcagatcattaat

SEQ ID NO: 390624 - DNA, 19 bp, Homo sapiens
  siRNA target sequence for TMC5 (NM_024780.3,2339-2357).
cattaatgagggcaaagat

SEQ ID NO: 390625 - DNA, 19 bp, Homo sapiens
  siRNA target sequence for TMC5 (NM_024780.3,2450-2468).
gcaacaaggctttttgcat

SEQ ID NO: 390626 - DNA, 19 bp, Homo sapiens
  siRNA target sequence for TMC5 (NM_024780.3,2490-2508).
cttgacttgcgatctagaa

SEQ ID NO: 390627 - DNA, 19 bp, Homo sapiens
  siRNA target sequence for TMC5 (NM_024780.3,2493-2511).
gacttgcgatctagaagat

SEQ ID NO: 390628 - DNA, 19 bp, Homo sapiens
  siRNA target sequence for TMC5 (NM_024780.3,2495-2513).
cttgcgatctagaagatca

SEQ ID NO: 390629 - DNA, 19 bp, Homo sapiens
  siRNA target sequence for TMC5 (NM_024780.3,2503-2521).
ctagaagatcagttcaaga

SEQ ID NO: 390630 - DNA, 19 bp, Homo sapiens
  siRNA target sequence for TMC5 (NM_024780.3,2509-2527).
gatcagttcaagaaggtaa

SEQ ID NO: 390631 - DNA, 19 bp, Homo sapiens
  siRNA target sequence for FLJ23594 (NM_024781.1,498-516).
caagagggaaatacttgaa

SEQ ID NO: 390632 - DNA, 19 bp, Homo sapiens
  siRNA target sequence for FLJ23594 (NM_024781.1,682-700).
cttcaacatgcctactata

SEQ ID NO: 390633 - DNA, 19 bp, Homo sapiens
  siRNA target sequence for FLJ23594 (NM_024781.1,693-711).
ctactataaactaaacaga

SEQ ID NO: 390634 - DNA, 19 bp, Homo sapiens
  siRNA target sequence for FLJ23594 (NM_024781.1,710-728).
gacaataccaggcaaatat

SEQ ID NO: 390635 - DNA, 19 bp, Homo sapiens
  siRNA target sequence for FLJ23594 (NM_024781.1,750-768).
caaccgagtggatcaaaat

SEQ ID NO: 390636 - DNA, 19 bp, Homo sapiens
  siRNA target sequence for FLJ23594 (NM_024781.1,922-940).
gaactcaggcacttgcaaa

SEQ ID NO: 390637 - DNA, 19 bp, Homo sapiens
  siRNA target sequence for FLJ23594 (NM_024781.1,925-943).
ctcaggcacttgcaaaact

SEQ ID NO: 390638 - DNA, 19 bp, Homo sapiens
  siRNA target sequence for FLJ12610 (NM_024782.1,149-167).
ctcttggccaaggttttta

SEQ ID NO: 390639 - DNA, 19 bp, Homo sapiens
  siRNA target sequence for FLJ12610 (NM_024782.1,298-316).
cctctgtcatttggataat

SEQ ID NO: 390640 - DNA, 19 bp, Homo sapiens
  siRNA target sequence for FLJ12610 (NM_024782.1,317-335).
ctccttcgcccattgttga

SEQ ID NO: 390641 - DNA, 19 bp, Homo sapiens
  siRNA target sequence for FLJ12610 (NM_024782.1,382-400).
ggcagatgcactgattcta

SEQ ID NO: 390642 - DNA, 19 bp, Homo sapiens
  siRNA target sequence for FLJ12610 (NM_024782.1,422-440).
ggcctccccttctattgga

SEQ ID NO: 390643 - DNA, 19 bp, Homo sapiens
  siRNA target sequence for FLJ12610 (NM_024782.1,424-442).
cctccccttctattggaat

SEQ ID NO: 390644 - DNA, 19 bp, Homo sapiens
  siRNA target sequence for FLJ12610 (NM_024782.1,425-443).
ctccccttctattggaatt

SEQ ID NO: 390645 - DNA, 19 bp, Homo sapiens
  siRNA target sequence for FLJ12610 (NM_024782.1,468-486).
ccctggtctcccaacattt

SEQ ID NO: 390646 - DNA, 19 bp, Homo sapiens
  siRNA target sequence for FLJ12610 (NM_024782.1,472-490).
ggtctcccaacatttgatt

SEQ ID NO: 390647 - DNA, 19 bp, Homo sapiens
  siRNA target sequence for FLJ12610 (NM_024782.1,504-522).
gcatgagtctggcattaca

SEQ ID NO: 390648 - DNA, 19 bp, Homo sapiens
  siRNA target sequence for FLJ12610 (NM_024782.1,535-553).
ggagctagcaacgttactt

SEQ ID NO: 390649 - DNA, 19 bp, Homo sapiens
  siRNA target sequence for FLJ12610 (NM_024782.1,539-557).
ctagcaacgttacttcata

SEQ ID NO: 390650 - DNA, 19 bp, Homo sapiens
  siRNA target sequence for FLJ12610 (NM_024782.1,542-560).
gcaacgttacttcatatga

SEQ ID NO: 390651 - DNA, 19 bp, Homo sapiens
  siRNA target sequence for FLJ12610 (NM_024782.1,600-618).
cgctgattcgagatcgatt

SEQ ID NO: 390652 - DNA, 19 bp, Homo sapiens
  siRNA target sequence for FLJ12610 (NM_024782.1,825-843).
gaatcgatagccaatgtgt

SEQ ID NO: 390653 - DNA, 19 bp, Homo sapiens
  siRNA target sequence for FLJ22746 (NM_024785.2,313-331).
ccagctcctggattgcatt

SEQ ID NO: 390654 - DNA, 19 bp, Homo sapiens
  siRNA target sequence for FLJ22746 (NM_024785.2,368-386).
gccagtcctgtgaaatact

SEQ ID NO: 390655 - DNA, 19 bp, Homo sapiens
  siRNA target sequence for FLJ22746 (NM_024785.2,370-388).
cagtcctgtgaaatactgt

SEQ ID NO: 390656 - DNA, 19 bp, Homo sapiens
  siRNA target sequence for FLJ22746 (NM_024785.2,387-405).
gtgaaaagtcccattccaa

SEQ ID NO: 390657 - DNA, 19 bp, Homo sapiens
  siRNA target sequence for FLJ22746 (NM_024785.2,648-666).
cgctgtactgcagttttga

SEQ ID NO: 390658 - DNA, 19 bp, Homo sapiens
  siRNA target sequence for FLJ22746 (NM_024785.2,649-667).
gctgtactgcagttttgat

SEQ ID NO: 390659 - DNA, 19 bp, Homo sapiens
  siRNA target sequence for FLJ22746 (NM_024785.2,650-668).
ctgtactgcagttttgata

SEQ ID NO: 390660 - DNA, 19 bp, Homo sapiens
  siRNA target sequence for FLJ22746 (NM_024785.2,657-675).
gcagttttgataactatga

SEQ ID NO: 390661 - DNA, 19 bp, Homo sapiens
  siRNA target sequence for FLJ22746 (NM_024785.2,831-849).
cttcggtgctgcagtttaa

SEQ ID NO: 390662 - DNA, 19 bp, Homo sapiens
  siRNA target sequence for FLJ22746 (NM_024785.2,931-949).
ctacgatggcaacaagatt

SEQ ID NO: 390663 - DNA, 19 bp, Homo sapiens
  siRNA target sequence for RNF122 (NM_024787.2,420-438).
gtgtaacgggtgtttctgt

SEQ ID NO: 390664 - DNA, 19 bp, Homo sapiens
  siRNA target sequence for RNF122 (NM_024787.2,448-466).
ctggttagcaccaacaagt

SEQ ID NO: 390665 - DNA, 19 bp, Homo sapiens
  siRNA target sequence for RNF122 (NM_024787.2,496-514).
gaccttccgctcaacatct

SEQ ID NO: 390666 - DNA, 19 bp, Homo sapiens
  siRNA target sequence for RNF122 (NM_024787.2,498-516).
ccttccgctcaacatctat

SEQ ID NO: 390667 - DNA, 19 bp, Homo sapiens
  siRNA target sequence for RNF122 (NM_024787.2,499-517).
cttccgctcaacatctata

SEQ ID NO: 390668 - DNA, 19 bp, Homo sapiens
  siRNA target sequence for RNF122 (NM_024787.2,503-521).
cgctcaacatctatatggt

SEQ ID NO: 390669 - DNA, 19 bp, Homo sapiens
  siRNA target sequence for RNF122 (NM_024787.2,608-626).
gtgagcgatacggatataa

SEQ ID NO: 390670 - DNA, 19 bp, Homo sapiens
  siRNA target sequence for RNF122 (NM_024787.2,649-667).
gccaagaagttacaattat

SEQ ID NO: 390671 - DNA, 19 bp, Homo sapiens
  siRNA target sequence for RNF122 (NM_024787.2,702-720).
caaggggaaggatgagtta

SEQ ID NO: 390672 - DNA, 19 bp, Homo sapiens
  siRNA target sequence for RNF122 (NM_024787.2,751-769).
cgcaagtgtctggtgaaat

SEQ ID NO: 390673 - DNA, 19 bp, Homo sapiens
  siRNA target sequence for RNF122 (NM_024787.2,787-805).
gtctgccccatgtgtaaca

SEQ ID NO: 390674 - DNA, 19 bp, Homo sapiens
  siRNA target sequence for RNF122 (NM_024787.2,824-842).
cagaggccacgcagaacat

SEQ ID NO: 390675 - DNA, 19 bp, Homo sapiens
  siRNA target sequence for RNF122 (NM_024787.2,835-853).
cagaacattgggattctat

SEQ ID NO: 390676 - DNA, 19 bp, Homo sapiens
  siRNA target sequence for RNF122 (NM_024787.2,840-858).
cattgggattctattggat

SEQ ID NO: 390677 - DNA, 19 bp, Homo sapiens
  siRNA target sequence for FLJ21062 (NM_024788.2,1012-1030).
ctgaatgtggctttaccaa

SEQ ID NO: 390678 - DNA, 19 bp, Homo sapiens
  siRNA target sequence for FLJ21062 (NM_024788.2,1018-1036).
gtggctttaccaaggattt

SEQ ID NO: 390679 - DNA, 19 bp, Homo sapiens
  siRNA target sequence for FLJ21062 (NM_024788.2,1142-1160).
caacgtaattgtgatctta

SEQ ID NO: 390680 - DNA, 19 bp, Homo sapiens
  siRNA target sequence for FLJ21062 (NM_024788.2,1146-1164).
gtaattgtgatcttatgta

SEQ ID NO: 390681 - DNA, 19 bp, Homo sapiens
  siRNA target sequence for FLJ21062 (NM_024788.2,1173-1191).
cctactgtacagctattaa

SEQ ID NO: 390682 - DNA, 19 bp, Homo sapiens
  siRNA target sequence for FLJ21062 (NM_024788.2,1174-1192).
ctactgtacagctattaat

SEQ ID NO: 390683 - DNA, 19 bp, Homo sapiens
  siRNA target sequence for FLJ21062 (NM_024788.2,1177-1195).
ctgtacagctattaattga

SEQ ID NO: 390684 - DNA, 19 bp, Homo sapiens
  siRNA target sequence for FLJ21062 (NM_024788.2,1213-1231).
ctttgtttacctatgttaa

SEQ ID NO: 390685 - DNA, 19 bp, Homo sapiens
  siRNA target sequence for FLJ21062 (NM_024788.2,1296-1314).
gcaattgccactttgtcat

SEQ ID NO: 390686 - DNA, 19 bp, Homo sapiens
  siRNA target sequence for FLJ21062 (NM_024788.2,1310-1328).
gtcatcagtggctccttta

SEQ ID NO: 390687 - DNA, 19 bp, Homo sapiens
  siRNA target sequence for FLJ21062 (NM_024788.2,1405-1423).
cgtttttcagtcatggtaa

SEQ ID NO: 390688 - DNA, 19 bp, Homo sapiens
  siRNA target sequence for FLJ21062 (NM_024788.2,1440-1458).
ggtggccgaggcaacaagt

SEQ ID NO: 390689 - DNA, 19 bp, Homo sapiens
  siRNA target sequence for FLJ21062 (NM_024788.2,1461-1479).
gcccagatgcgttacagtt

SEQ ID NO: 390690 - DNA, 19 bp, Homo sapiens
  siRNA target sequence for FLJ21062 (NM_024788.2,1462-1480).
cccagatgcgttacagttt

SEQ ID NO: 390691 - DNA, 19 bp, Homo sapiens
  siRNA target sequence for FLJ21062 (NM_024788.2,1546-1564).
gaacaattcagcaaatgat

SEQ ID NO: 390692 - DNA, 19 bp, Homo sapiens
  siRNA target sequence for FLJ21062 (NM_024788.2,1556-1574).
gcaaatgataggaatcttt

SEQ ID NO: 390693 - DNA, 19 bp, Homo sapiens
  siRNA target sequence for FLJ21062 (NM_024788.2,1633-1651).
ctgatatattacttatcct

SEQ ID NO: 390694 - DNA, 19 bp, Homo sapiens
  siRNA target sequence for FLJ21062 (NM_024788.2,1658-1676).
cctttgtgagaatcacatt

SEQ ID NO: 390695 - DNA, 19 bp, Homo sapiens
  siRNA target sequence for FLJ21062 (NM_024788.2,1685-1703).
ggaaattttcggaactgaa

SEQ ID NO: 390696 - DNA, 19 bp, Homo sapiens
  siRNA target sequence for FLJ21062 (NM_024788.2,1699-1717).
ctgaaggagtagatatcgt

SEQ ID NO: 390697 - DNA, 19 bp, Homo sapiens
  siRNA target sequence for FLJ21062 (NM_024788.2,1705-1723).
gagtagatatcgttcttca

SEQ ID NO: 390698 - DNA, 19 bp, Homo sapiens
  siRNA target sequence for FLJ21062 (NM_024788.2,1716-1734).
gttcttcatgtgatgaaaa

SEQ ID NO: 390699 - DNA, 19 bp, Homo sapiens
  siRNA target sequence for FLJ21062 (NM_024788.2,1754-1772).
gagtggcttaggctataat

SEQ ID NO: 390700 - DNA, 19 bp, Homo sapiens
  siRNA target sequence for FLJ21062 (NM_024788.2,1759-1777).
gcttaggctataatgtact

SEQ ID NO: 390701 - DNA, 19 bp, Homo sapiens
  siRNA target sequence for FLJ21062 (NM_024788.2,1760-1778).
cttaggctataatgtactt

SEQ ID NO: 390702 - DNA, 19 bp, Homo sapiens
  siRNA target sequence for FLJ21062 (NM_024788.2,1796-1814).
cagcatttggtgctgtatt

SEQ ID NO: 390703 - DNA, 19 bp, Homo sapiens
  siRNA target sequence for FLJ21062 (NM_024788.2,1808-1826).
ctgtattttgggatgttat

SEQ ID NO: 390704 - DNA, 19 bp, Homo sapiens
  siRNA target sequence for FLJ21062 (NM_024788.2,1906-1924).
gtaatctaatacttggaat

SEQ ID NO: 390705 - DNA, 19 bp, Homo sapiens
  siRNA target sequence for FLJ21062 (NM_024788.2,1992-2010).
cagacagctgctagtcttt

SEQ ID NO: 390706 - DNA, 19 bp, Homo sapiens
  siRNA target sequence for FLJ21062 (NM_024788.2,1994-2012).
gacagctgctagtctttta

SEQ ID NO: 390707 - DNA, 19 bp, Homo sapiens
  siRNA target sequence for FLJ21062 (NM_024788.2,2047-2065).
gagtaaaacgtgataaaaa

SEQ ID NO: 390708 - DNA, 19 bp, Homo sapiens
  siRNA target sequence for FLJ21062 (NM_024788.2,2149-2167).
catctattgcggttatgga

SEQ ID NO: 390709 - DNA, 19 bp, Homo sapiens
  siRNA target sequence for FLJ21062 (NM_024788.2,2185-2203).
gagcaaaaatttatgctat

SEQ ID NO: 390710 - DNA, 19 bp, Homo sapiens
  siRNA target sequence for FLJ21062 (NM_024788.2,2187-2205).
gcaaaaatttatgctatat

SEQ ID NO: 390711 - DNA, 19 bp, Homo sapiens
  siRNA target sequence for FLJ21062 (NM_024788.2,2236-2254).
gcctatctgctgaagattt

SEQ ID NO: 390712 - DNA, 19 bp, Homo sapiens
  siRNA target sequence for FLJ21062 (NM_024788.2,2237-2255).
cctatctgctgaagatttt

SEQ ID NO: 390713 - DNA, 19 bp, Homo sapiens
  siRNA target sequence for FLJ21062 (NM_024788.2,2258-2276).
caccctttgtatcatacat

SEQ ID NO: 390714 - DNA, 19 bp, Homo sapiens
  siRNA target sequence for FLJ21062 (NM_024788.2,2261-2279).
cctttgtatcatacataga

SEQ ID NO: 390715 - DNA, 19 bp, Homo sapiens
  siRNA target sequence for FLJ21062 (NM_024788.2,2347-2365).
gaccagtcactacagataa

SEQ ID NO: 390716 - DNA, 19 bp, Homo sapiens
  siRNA target sequence for FLJ21062 (NM_024788.2,2349-2367).
ccagtcactacagataaaa

SEQ ID NO: 390717 - DNA, 19 bp, Homo sapiens
  siRNA target sequence for FLJ21062 (NM_024788.2,2455-2473).
gccaagacatgcaaaatga

SEQ ID NO: 390718 - DNA, 19 bp, Homo sapiens
  siRNA target sequence for FLJ21062 (NM_024788.2,2557-2575).
catcaaacgctaaaacgtt

SEQ ID NO: 390719 - DNA, 19 bp, Homo sapiens
  siRNA target sequence for FLJ21062 (NM_024788.2,2610-2628).
gaagcctccagataccata

SEQ ID NO: 390720 - DNA, 19 bp, Homo sapiens
  siRNA target sequence for FLJ21062 (NM_024788.2,2661-2679).
catattaaaggccttaaca

SEQ ID NO: 390721 - DNA, 19 bp, Homo sapiens
  siRNA target sequence for FLJ21062 (NM_024788.2,2690-2708).
ctctggtggagtagtaaca

SEQ ID NO: 390722 - DNA, 19 bp, Homo sapiens
  siRNA target sequence for FLJ21062 (NM_024788.2,2692-2710).
ctggtggagtagtaacagt

SEQ ID NO: 390723 - DNA, 19 bp, Homo sapiens
  siRNA target sequence for FLJ21062 (NM_024788.2,2716-2734).
gcactcctgcccgattagt

SEQ ID NO: 390724 - DNA, 19 bp, Homo sapiens
  siRNA target sequence for FLJ21062 (NM_024788.2,2717-2735).
cactcctgcccgattagta

SEQ ID NO: 390725 - DNA, 19 bp, Homo sapiens
  siRNA target sequence for FLJ21062 (NM_024788.2,2736-2754).
ggaggacctctggttgata

SEQ ID NO: 390726 - DNA, 19 bp, Homo sapiens
  siRNA target sequence for FLJ21062 (NM_024788.2,2747-2765).
ggttgatacggatattgct

SEQ ID NO: 390727 - DNA, 19 bp, Homo sapiens
  siRNA target sequence for FLJ21062 (NM_024788.2,2755-2773).
cggatattgctcttaaaaa

SEQ ID NO: 390728 - DNA, 19 bp, Homo sapiens
  siRNA target sequence for FLJ21062 (NM_024788.2,2825-2843).
ggatgcaccaaaaaagagt

SEQ ID NO: 390729 - DNA, 19 bp, Homo sapiens
  siRNA target sequence for FLJ21062 (NM_024788.2,2826-2844).
gatgcaccaaaaaagagta

SEQ ID NO: 390730 - DNA, 19 bp, Homo sapiens
  siRNA target sequence for FLJ22490 (NM_024790.2,189-207).
ccggtacctgccaggaaaa

SEQ ID NO: 390731 - DNA, 19 bp, Homo sapiens
  siRNA target sequence for FLJ22490 (NM_024790.2,190-208).
cggtacctgccaggaaaaa

SEQ ID NO: 390732 - DNA, 19 bp, Homo sapiens
  siRNA target sequence for FLJ22490 (NM_024790.2,434-452).
cgctgccacttttcagaat

SEQ ID NO: 390733 - DNA, 19 bp, Homo sapiens
  siRNA target sequence for FLJ22490 (NM_024790.2,436-454).
ctgccacttttcagaatgt

SEQ ID NO: 390734 - DNA, 19 bp, Homo sapiens
  siRNA target sequence for FLJ22490 (NM_024790.2,470-488).
gctgaaagatagagattca

SEQ ID NO: 390735 - DNA, 19 bp, Homo sapiens
  siRNA target sequence for FLJ22490 (NM_024790.2,493-511).
cacgagttgatctgaaatt

SEQ ID NO: 390736 - DNA, 19 bp, Homo sapiens
  siRNA target sequence for FLJ22490 (NM_024790.2,521-539).
ggatcctccaagagatcat

SEQ ID NO: 390737 - DNA, 19 bp, Homo sapiens
  siRNA target sequence for FLJ22490 (NM_024790.2,616-634).
gtgccaaagttgacttaga

SEQ ID NO: 390738 - DNA, 19 bp, Homo sapiens
  siRNA target sequence for FLJ22490 (NM_024790.2,637-655).
ccatcccaagtgctaaagt

SEQ ID NO: 390739 - DNA, 19 bp, Homo sapiens
  siRNA target sequence for FLJ22490 (NM_024790.2,638-656).
catcccaagtgctaaagta

SEQ ID NO: 390740 - DNA, 19 bp, Homo sapiens
  siRNA target sequence for FLJ22490 (NM_024790.2,681-699).
gacactagtgatttcttga

SEQ ID NO: 390741 - DNA, 19 bp, Homo sapiens
  siRNA target sequence for FLJ22490 (NM_024790.2,713-731).
ggaatctgatagtgctttt

SEQ ID NO: 390742 - DNA, 19 bp, Homo sapiens
  siRNA target sequence for FLJ22490 (NM_024790.2,714-732).
gaatctgatagtgctttta

SEQ ID NO: 390743 - DNA, 19 bp, Homo sapiens
  siRNA target sequence for FLJ22490 (NM_024790.2,736-754).
gggcttacggtgagacata

SEQ ID NO: 390744 - DNA, 19 bp, Homo sapiens
  siRNA target sequence for FLJ22490 (NM_024790.2,737-755).
ggcttacggtgagacatat

SEQ ID NO: 390745 - DNA, 19 bp, Homo sapiens
  siRNA target sequence for FLJ22490 (NM_024790.2,829-847).
ggaaaggactagacattga

SEQ ID NO: 390746 - DNA, 19 bp, Homo sapiens
  siRNA target sequence for FLJ22490 (NM_024790.2,876-894).
ggtctctctctaaaatcta

SEQ ID NO: 390747 - DNA, 19 bp, Homo sapiens
  siRNA target sequence for FLJ22490 (NM_024790.2,892-910).
ctatatccagtgtaaatgt

SEQ ID NO: 390748 - DNA, 19 bp, Homo sapiens
  siRNA target sequence for FLJ22490 (NM_024790.2,944-962).
gcgaagactgaatgaattt

SEQ ID NO: 390749 - DNA, 19 bp, Homo sapiens
  siRNA target sequence for FLJ22490 (NM_024790.2,957-975).
gaatttcacaataaaccta

SEQ ID NO: 390750 - DNA, 19 bp, Homo sapiens
  siRNA target sequence for FLJ22490 (NM_024790.2,1032-1050).
ggggatgacggatcaaact

SEQ ID NO: 390751 - DNA, 19 bp, Homo sapiens
  siRNA target sequence for FLJ22490 (NM_024790.2,1034-1052).
ggatgacggatcaaactct

SEQ ID NO: 390752 - DNA, 19 bp, Homo sapiens
  siRNA target sequence for FLJ22490 (NM_024790.2,1074-1092).
cgccctggcacttcagaaa

SEQ ID NO: 390753 - DNA, 19 bp, Homo sapiens
  siRNA target sequence for KIAA0643 (NM_024793.1,98-116).
gccagacctctggaaataa

SEQ ID NO: 390754 - DNA, 19 bp, Homo sapiens
  siRNA target sequence for KIAA0643 (NM_024793.1,177-195).
ctaaagacctgctcaataa

SEQ ID NO: 390755 - DNA, 19 bp, Homo sapiens
  siRNA target sequence for KIAA0643 (NM_024793.1,204-222).
ctgatgaagctaatttaga

SEQ ID NO: 390756 - DNA, 19 bp, Homo sapiens
  siRNA target sequence for KIAA0643 (NM_024793.1,292-310).
caggccatgttttatggat

SEQ ID NO: 390757 - DNA, 19 bp, Homo sapiens
  siRNA target sequence for KIAA0643 (NM_024793.1,350-368).
gacacttatctggagaaat

SEQ ID NO: 390758 - DNA, 19 bp, Homo sapiens
  siRNA target sequence for KIAA0643 (NM_024793.1,499-517).
caagagtggaagtaacgat

SEQ ID NO: 390759 - DNA, 19 bp, Homo sapiens
  siRNA target sequence for KIAA0643 (NM_024793.1,679-697).
ctcggaggagagtgaaatt

SEQ ID NO: 390760 - DNA, 19 bp, Homo sapiens
  siRNA target sequence for KIAA0643 (NM_024793.1,718-736).
cgaggatgacgatttggaa

SEQ ID NO: 390761 - DNA, 19 bp, Homo sapiens
  siRNA target sequence for KIAA0643 (NM_024793.1,733-751).
ggaagacgagagcatttct

SEQ ID NO: 390762 - DNA, 19 bp, Homo sapiens
  siRNA target sequence for KIAA0643 (NM_024793.1,758-776).
ccaaccaagcccaatcgaa

SEQ ID NO: 390763 - DNA, 19 bp, Homo sapiens
  siRNA target sequence for KIAA0643 (NM_024793.1,774-792).
gaagggtccggaaatctga

SEQ ID NO: 390764 - DNA, 19 bp, Homo sapiens
  siRNA target sequence for FLJ22639 (NM_024796.1,510-528).
cctgcccgatcctgtaaca

SEQ ID NO: 390765 - DNA, 19 bp, Homo sapiens
  siRNA target sequence for FLJ22639 (NM_024796.1,511-529).
ctgcccgatcctgtaacaa

SEQ ID NO: 390766 - DNA, 19 bp, Homo sapiens
  siRNA target sequence for FLJ23554 (NM_024806.2,319-337).
cccaagctctctattcaat

SEQ ID NO: 390767 - DNA, 19 bp, Homo sapiens
  siRNA target sequence for FLJ23554 (NM_024806.2,321-339).
caagctctctattcaatct

SEQ ID NO: 390768 - DNA, 19 bp, Homo sapiens
  siRNA target sequence for FLJ23554 (NM_024806.2,343-361).
gtccttcataccaacttaa

SEQ ID NO: 390769 - DNA, 19 bp, Homo sapiens
  siRNA target sequence for FLJ23554 (NM_024806.2,397-415).
gacttacatcggatttcaa

SEQ ID NO: 390770 - DNA, 19 bp, Homo sapiens
  siRNA target sequence for FLJ23554 (NM_024806.2,418-436).
gactccttggaatctgatt

SEQ ID NO: 390771 - DNA, 19 bp, Homo sapiens
  siRNA target sequence for FLJ23554 (NM_024806.2,443-461).
gcctcacgcaagagattat

SEQ ID NO: 390772 - DNA, 19 bp, Homo sapiens
  siRNA target sequence for FLJ23554 (NM_024806.2,445-463).
ctcacgcaagagattatgt

SEQ ID NO: 390773 - DNA, 19 bp, Homo sapiens
  siRNA target sequence for FLJ23554 (NM_024806.2,464-482).
gccattctgagtttgatga

SEQ ID NO: 390774 - DNA, 19 bp, Homo sapiens
  siRNA target sequence for FLJ23554 (NM_024806.2,465-483).
ccattctgagtttgatgat

SEQ ID NO: 390775 - DNA, 19 bp, Homo sapiens
  siRNA target sequence for FLJ23554 (NM_024806.2,639-657).
caggcaacaaccaatagaa

SEQ ID NO: 390776 - DNA, 19 bp, Homo sapiens
  siRNA target sequence for FLJ23554 (NM_024806.2,646-664).
caaccaatagaagacaaat

SEQ ID NO: 390777 - DNA, 19 bp, Homo sapiens
  siRNA target sequence for FLJ23554 (NM_024806.2,682-700).
gacccgaactggaagagta

SEQ ID NO: 390778 - DNA, 19 bp, Homo sapiens
  siRNA target sequence for FLJ23554 (NM_024806.2,744-762).
gtccacggacagctcttta

SEQ ID NO: 390779 - DNA, 19 bp, Homo sapiens
  siRNA target sequence for FLJ23554 (NM_024806.2,747-765).
cacggacagctctttagaa

SEQ ID NO: 390780 - DNA, 19 bp, Homo sapiens
  siRNA target sequence for FLJ23554 (NM_024806.2,749-767).
cggacagctctttagaaaa

SEQ ID NO: 390781 - DNA, 19 bp, Homo sapiens
  siRNA target sequence for FLJ23554 (NM_024806.2,795-813).
ccaggagacgtcaatggaa

SEQ ID NO: 390782 - DNA, 19 bp, Homo sapiens
  siRNA target sequence for FLJ23554 (NM_024806.2,914-932).
gcagcaagccgttttcaga

SEQ ID NO: 390783 - DNA, 19 bp, Homo sapiens
  siRNA target sequence for FLJ23554 (NM_024806.2,981-999).
cgtgaagagctcaagttca

SEQ ID NO: 390784 - DNA, 19 bp, Homo sapiens
  siRNA target sequence for FLJ23554 (NM_024806.2,989-1007).
gctcaagttcacataacga

SEQ ID NO: 390785 - DNA, 19 bp, Homo sapiens
  siRNA target sequence for FLJ23554 (NM_024806.2,995-1013).
gttcacataacgaggtttt

SEQ ID NO: 390786 - DNA, 19 bp, Homo sapiens
  siRNA target sequence for FLJ23554 (NM_024806.2,998-1016).
cacataacgaggttttcct

SEQ ID NO: 390787 - DNA, 19 bp, Homo sapiens
  siRNA target sequence for FLJ23554 (NM_024806.2,1030-1048).
ggccctcggcgaaggaaat

SEQ ID NO: 390788 - DNA, 19 bp, Homo sapiens
  siRNA target sequence for FLJ23554 (NM_024806.2,1034-1052).
ctcggcgaaggaaatccaa

SEQ ID NO: 390789 - DNA, 19 bp, Homo sapiens
  siRNA target sequence for FLJ23554 (NM_024806.2,1043-1061).
ggaaatccaaacaacattt

SEQ ID NO: 390790 - DNA, 19 bp, Homo sapiens
  siRNA target sequence for FLJ23554 (NM_024806.2,1097-1115).
ccccgaaaacggactctta

SEQ ID NO: 390791 - DNA, 19 bp, Homo sapiens
  siRNA target sequence for FLJ23554 (NM_024806.2,1098-1116).
cccgaaaacggactcttat

SEQ ID NO: 390792 - DNA, 19 bp, Homo sapiens
  siRNA target sequence for FLJ23554 (NM_024806.2,1100-1118).
cgaaaacggactcttatct

SEQ ID NO: 390793 - DNA, 19 bp, Homo sapiens
  siRNA target sequence for FLJ23554 (NM_024806.2,1101-1119).
gaaaacggactcttatctt

SEQ ID NO: 390794 - DNA, 19 bp, Homo sapiens
  siRNA target sequence for FLJ23554 (NM_024806.2,1106-1124).
cggactcttatcttcaact

SEQ ID NO: 390795 - DNA, 19 bp, Homo sapiens
  siRNA target sequence for FLJ23554 (NM_024806.2,1167-1185).
ctaccccgtcagagtaaca

SEQ ID NO: 390796 - DNA, 19 bp, Homo sapiens
  siRNA target sequence for FLJ23554 (NM_024806.2,1229-1247).
ccatcgatcctgaagataa

SEQ ID NO: 390797 - DNA, 19 bp, Homo sapiens
  siRNA target sequence for FLJ23554 (NM_024806.2,1261-1279).
gcacaacagctaaagaatt

SEQ ID NO: 390798 - DNA, 19 bp, Homo sapiens
  siRNA target sequence for FLJ23554 (NM_024806.2,1284-1302).
ggaacactggtctcaatat

SEQ ID NO: 390799 - DNA, 19 bp, Homo sapiens
  siRNA target sequence for FLJ23554 (NM_024806.2,1288-1306).
cactggtctcaatatgaaa

SEQ ID NO: 390800 - DNA, 19 bp, Homo sapiens
  siRNA target sequence for FLJ23554 (NM_024806.2,1293-1311).
gtctcaatatgaaagtaca

SEQ ID NO: 390801 - DNA, 19 bp, Homo sapiens
  siRNA target sequence for FLJ23554 (NM_024806.2,1376-1394).
gaccagccaagctcaagat

SEQ ID NO: 390802 - DNA, 19 bp, Homo sapiens
  siRNA target sequence for FLJ23554 (NM_024806.2,1382-1400).
ccaagctcaagattcgaaa

SEQ ID NO: 390803 - DNA, 19 bp, Homo sapiens
  siRNA target sequence for FLJ23554 (NM_024806.2,1506-1524).
gcctcttgatacttcaaca

SEQ ID NO: 390804 - DNA, 19 bp, Homo sapiens
  siRNA target sequence for FLJ23554 (NM_024806.2,1520-1538).
caacaaagcctgaatcgat

SEQ ID NO: 390805 - DNA, 19 bp, Homo sapiens
  siRNA target sequence for FLJ23554 (NM_024806.2,1527-1545).
gcctgaatcgattgtgatt

SEQ ID NO: 390806 - DNA, 19 bp, Homo sapiens
  siRNA target sequence for FLJ23554 (NM_024806.2,1528-1546).
cctgaatcgattgtgatta

SEQ ID NO: 390807 - DNA, 19 bp, Homo sapiens
  siRNA target sequence for FLJ23554 (NM_024806.2,1553-1571).
cctctaacaatgatgtaca

SEQ ID NO: 390808 - DNA, 19 bp, Homo sapiens
  siRNA target sequence for FLJ23554 (NM_024806.2,1573-1591).
gcctcaagggcacttagaa

SEQ ID NO: 390809 - DNA, 19 bp, Homo sapiens
  siRNA target sequence for FLJ23554 (NM_024806.2,1585-1603).
cttagaagccacaatctca

SEQ ID NO: 390810 - DNA, 19 bp, Homo sapiens
  siRNA target sequence for FLJ23554 (NM_024806.2,1602-1620).
caaagaaacctccaataca

SEQ ID NO: 390811 - DNA, 19 bp, Homo sapiens
  siRNA target sequence for FLJ23554 (NM_024806.2,1619-1637).
catttgctccaccaaaaca

SEQ ID NO: 390812 - DNA, 19 bp, Homo sapiens
  siRNA target sequence for FLJ23554 (NM_024806.2,1650-1668).
ggtcttatctaaaaactct

SEQ ID NO: 390813 - DNA, 19 bp, Homo sapiens
  siRNA target sequence for FLJ23554 (NM_024806.2,1651-1669).
gtcttatctaaaaactcta

SEQ ID NO: 390814 - DNA, 19 bp, Homo sapiens
  siRNA target sequence for FLJ23554 (NM_024806.2,1680-1698).
ctctgggctgaatgttaat

SEQ ID NO: 390815 - DNA, 19 bp, Homo sapiens
  siRNA target sequence for FLJ23554 (NM_024806.2,1685-1703).
ggctgaatgttaataaaga

SEQ ID NO: 390816 - DNA, 19 bp, Homo sapiens
  siRNA target sequence for FLJ23554 (NM_024806.2,1759-1777).
ctttctgacatggatttga

SEQ ID NO: 390817 - DNA, 19 bp, Homo sapiens
  siRNA target sequence for FLJ23554 (NM_024806.2,1826-1844).
gctctcagtttgtttatca

SEQ ID NO: 390818 - DNA, 19 bp, Homo sapiens
  siRNA target sequence for FLJ23554 (NM_024806.2,1879-1897).
caactcaaacagccttata

SEQ ID NO: 390819 - DNA, 19 bp, Homo sapiens
  siRNA target sequence for FLJ23554 (NM_024806.2,2067-2085).
cgtcacgcttccacctata

SEQ ID NO: 390820 - DNA, 19 bp, Homo sapiens
  siRNA target sequence for FLJ23554 (NM_024806.2,2145-2163).
gaaaattagccgtagcaat

SEQ ID NO: 390821 - DNA, 19 bp, Homo sapiens
  siRNA target sequence for FLJ23554 (NM_024806.2,2300-2318).
gagacaaaacgcaaaaatt

SEQ ID NO: 390822 - DNA, 19 bp, Homo sapiens
  siRNA target sequence for FLJ23554 (NM_024806.2,2344-2362).
caagtcaaggagtacaaca

SEQ ID NO: 390823 - DNA, 19 bp, Homo sapiens
  siRNA target sequence for FLJ23554 (NM_024806.2,2361-2379).
catgaagacactatccatt

SEQ ID NO: 390824 - DNA, 19 bp, Homo sapiens
  siRNA target sequence for FLJ23554 (NM_024806.2,2369-2387).
cactatccattctatcaaa

SEQ ID NO: 390825 - DNA, 19 bp, Homo sapiens
  siRNA target sequence for FLJ23554 (NM_024806.2,2428-2446).
cggcagaaggctttggaat

SEQ ID NO: 390826 - DNA, 19 bp, Homo sapiens
  siRNA target sequence for FLJ23554 (NM_024806.2,2520-2538).
ctatgctgggaaagaagaa

SEQ ID NO: 390827 - DNA, 19 bp, Homo sapiens
  siRNA target sequence for FLJ23554 (NM_024806.2,2579-2597).
gacacgaaagggaaaaaca

SEQ ID NO: 390828 - DNA, 19 bp, Homo sapiens
  siRNA target sequence for C6orf76 (NM_024807.1,60-78).
gggcagcttcacttttaga

SEQ ID NO: 390829 - DNA, 19 bp, Homo sapiens
  siRNA target sequence for C6orf76 (NM_024807.1,242-260).
gctgacagtgtatacacaa

SEQ ID NO: 390830 - DNA, 19 bp, Homo sapiens
  siRNA target sequence for C6orf76 (NM_024807.1,243-261).
ctgacagtgtatacacaaa

SEQ ID NO: 390831 - DNA, 19 bp, Homo sapiens
  siRNA target sequence for C6orf76 (NM_024807.1,291-309).
ctgtgcagtgctcctataa

SEQ ID NO: 390832 - DNA, 19 bp, Homo sapiens
  siRNA target sequence for C6orf76 (NM_024807.1,301-319).
ctcctataagggctacaaa

SEQ ID NO: 390833 - DNA, 19 bp, Homo sapiens
  siRNA target sequence for C6orf76 (NM_024807.1,303-321).
cctataagggctacaaaaa

SEQ ID NO: 390834 - DNA, 19 bp, Homo sapiens
  siRNA target sequence for C6orf76 (NM_024807.1,647-665).
cctgatgccccttttacca

SEQ ID NO: 390835 - DNA, 19 bp, Homo sapiens
  siRNA target sequence for C6orf76 (NM_024807.1,1075-1093).
gtgcagcgatccttctaca

SEQ ID NO: 390836 - DNA, 19 bp, Homo sapiens
  siRNA target sequence for FLJ22624 (NM_024808.2,126-144).
gatgtcaaggaatcaaaga

SEQ ID NO: 390837 - DNA, 19 bp, Homo sapiens
  siRNA target sequence for FLJ22624 (NM_024808.2,146-164).
gcaaataacaccagaaact

SEQ ID NO: 390838 - DNA, 19 bp, Homo sapiens
  siRNA target sequence for FLJ22624 (NM_024808.2,166-184).
caggaaggatccctgtttt

SEQ ID NO: 390839 - DNA, 19 bp, Homo sapiens
  siRNA target sequence for FLJ22624 (NM_024808.2,173-191).
gatccctgttttaaatcct

SEQ ID NO: 390840 - DNA, 19 bp, Homo sapiens
  siRNA target sequence for FLJ22624 (NM_024808.2,195-213).
gaaagtcctagtgattatt

SEQ ID NO: 390841 - DNA, 19 bp, Homo sapiens
  siRNA target sequence for FLJ22624 (NM_024808.2,234-252).
ctcgccagtccttctgttt

SEQ ID NO: 390842 - DNA, 19 bp, Homo sapiens
  siRNA target sequence for FLJ22624 (NM_024808.2,270-288).
ccaactccagggaaattta

SEQ ID NO: 390843 - DNA, 19 bp, Homo sapiens
  siRNA target sequence for FLJ22624 (NM_024808.2,348-366).
catcgtcaagctttatact

SEQ ID NO: 390844 - DNA, 19 bp, Homo sapiens
  siRNA target sequence for FLJ22624 (NM_024808.2,370-388).
gtcattctcgaatagataa

SEQ ID NO: 390845 - DNA, 19 bp, Homo sapiens
  siRNA target sequence for FLJ22624 (NM_024808.2,376-394).
ctcgaatagataaagatgt

SEQ ID NO: 390846 - DNA, 19 bp, Homo sapiens
  siRNA target sequence for FLJ22624 (NM_024808.2,480-498).
cagctttcacaatgtcatt

SEQ ID NO: 390847 - DNA, 19 bp, Homo sapiens
  siRNA target sequence for FLJ22624 (NM_024808.2,499-517).
ccagtaaatgcactaacat

SEQ ID NO: 390848 - DNA, 19 bp, Homo sapiens
  siRNA target sequence for FLJ22624 (NM_024808.2,500-518).
cagtaaatgcactaacata

SEQ ID NO: 390849 - DNA, 19 bp, Homo sapiens
  siRNA target sequence for FLJ22624 (NM_024808.2,502-520).
gtaaatgcactaacataaa

SEQ ID NO: 390850 - DNA, 19 bp, Homo sapiens
  siRNA target sequence for FLJ22624 (NM_024808.2,508-526).
gcactaacataaatagtga

SEQ ID NO: 390851 - DNA, 19 bp, Homo sapiens
  siRNA target sequence for FLJ22624 (NM_024808.2,669-687).
cctggaaacctcagttctt

SEQ ID NO: 390852 - DNA, 19 bp, Homo sapiens
  siRNA target sequence for FLJ22624 (NM_024808.2,765-783).
cctcacagtggtgttcaaa

SEQ ID NO: 390853 - DNA, 19 bp, Homo sapiens
  siRNA target sequence for FLJ22624 (NM_024808.2,849-867).
ccaagttcggggcagtttt

SEQ ID NO: 390854 - DNA, 19 bp, Homo sapiens
  siRNA target sequence for FLJ22624 (NM_024808.2,885-903).
gctagtgcaaaaaaataca

SEQ ID NO: 390855 - DNA, 19 bp, Homo sapiens
  siRNA target sequence for FLJ22624 (NM_024808.2,943-961).
ccactttctcaccaattga

SEQ ID NO: 390856 - DNA, 19 bp, Homo sapiens
  siRNA target sequence for FLJ22624 (NM_024808.2,944-962).
cactttctcaccaattgaa

SEQ ID NO: 390857 - DNA, 19 bp, Homo sapiens
  siRNA target sequence for FLJ22624 (NM_024808.2,977-995).
gactccactctcagaacaa

SEQ ID NO: 390858 - DNA, 19 bp, Homo sapiens
  siRNA target sequence for FLJ22624 (NM_024808.2,998-1016).
gaagtttactgttcattct

SEQ ID NO: 390859 - DNA, 19 bp, Homo sapiens
  siRNA target sequence for FLJ22624 (NM_024808.2,1067-1085).
cagaagtccttatatagat

SEQ ID NO: 390860 - DNA, 19 bp, Homo sapiens
  siRNA target sequence for FLJ22624 (NM_024808.2,1087-1105).
gctgctcgccaattaaaaa

SEQ ID NO: 390861 - DNA, 19 bp, Homo sapiens
  siRNA target sequence for FLJ22624 (NM_024808.2,1111-1129).
ctcctatgagacttcagat

SEQ ID NO: 390862 - DNA, 19 bp, Homo sapiens
  siRNA target sequence for FLJ22624 (NM_024808.2,1114-1132).
ctatgagacttcagatgta

SEQ ID NO: 390863 - DNA, 19 bp, Homo sapiens
  siRNA target sequence for FLJ22624 (NM_024808.2,1148-1166).
gtatcggacctcagtgatt

SEQ ID NO: 390864 - DNA, 19 bp, Homo sapiens
  siRNA target sequence for FLJ22624 (NM_024808.2,1269-1287).
cacctacggcagtttagta

SEQ ID NO: 390865 - DNA, 19 bp, Homo sapiens
  siRNA target sequence for FLJ22624 (NM_024808.2,1271-1289).
cctacggcagtttagtaat

SEQ ID NO: 390866 - DNA, 19 bp, Homo sapiens
  siRNA target sequence for FLJ22624 (NM_024808.2,1300-1318).
cccatggtacacatttggt

SEQ ID NO: 390867 - DNA, 19 bp, Homo sapiens
  siRNA target sequence for FLJ22624 (NM_024808.2,1301-1319).
ccatggtacacatttggtt

SEQ ID NO: 390868 - DNA, 19 bp, Homo sapiens
  siRNA target sequence for FLJ22624 (NM_024808.2,1328-1346).
catgtctgttacacaaaat

SEQ ID NO: 390869 - DNA, 19 bp, Homo sapiens
  siRNA target sequence for FLJ22624 (NM_024808.2,1486-1504).
gtttacccatgactgattt

SEQ ID NO: 390870 - DNA, 19 bp, Homo sapiens
  siRNA target sequence for FLJ22624 (NM_024808.2,1491-1509).
cccatgactgattttgtaa

SEQ ID NO: 390871 - DNA, 19 bp, Homo sapiens
  siRNA target sequence for FLJ22624 (NM_024808.2,1493-1511).
catgactgattttgtaagt

SEQ ID NO: 390872 - DNA, 19 bp, Homo sapiens
  siRNA target sequence for FLJ22624 (NM_024808.2,1513-1531).
gcattgccttcagtattga

SEQ ID NO: 390873 - DNA, 19 bp, Homo sapiens
  siRNA target sequence for FLJ22624 (NM_024808.2,1582-1600).
gtgaaagcagtaacattca

SEQ ID NO: 390874 - DNA, 19 bp, Homo sapiens
  siRNA target sequence for FLJ22624 (NM_024808.2,1613-1631).
ctataatacgcagaattgt

SEQ ID NO: 390875 - DNA, 19 bp, Homo sapiens
  siRNA target sequence for FLJ22624 (NM_024808.2,1630-1648).
gtggaagcaatattatgga

SEQ ID NO: 390876 - DNA, 19 bp, Homo sapiens
  siRNA target sequence for FLJ22624 (NM_024808.2,1706-1724).
gagtaaatctcaagcattt

SEQ ID NO: 390877 - DNA, 19 bp, Homo sapiens
  siRNA target sequence for FLJ22624 (NM_024808.2,1714-1732).
ctcaagcatttaatatgaa

SEQ ID NO: 390878 - DNA, 19 bp, Homo sapiens
  siRNA target sequence for FLJ12975 (NM_024809.2,275-293).
caggacgaggcgggaatat

SEQ ID NO: 390879 - DNA, 19 bp, Homo sapiens
  siRNA target sequence for FLJ12975 (NM_024809.2,306-324).
cgtgtggagtgctgaacaa

SEQ ID NO: 390880 - DNA, 19 bp, Homo sapiens
  siRNA target sequence for FLJ12975 (NM_024809.2,417-435).
ccaatgagacagattcctt

SEQ ID NO: 390881 - DNA, 19 bp, Homo sapiens
  siRNA target sequence for FLJ12975 (NM_024809.2,469-487).
ggtttcagcatctcataat

SEQ ID NO: 390882 - DNA, 19 bp, Homo sapiens
  siRNA target sequence for FLJ12975 (NM_024809.2,521-539).
gaaatttatgccaactctt

SEQ ID NO: 390883 - DNA, 19 bp, Homo sapiens
  siRNA target sequence for FLJ12975 (NM_024809.2,604-622).
cccttgtccttgtaattta

SEQ ID NO: 390884 - DNA, 19 bp, Homo sapiens
  siRNA target sequence for FLJ12975 (NM_024809.2,656-674).
gaccaggaatgctcatcaa

SEQ ID NO: 390885 - DNA, 19 bp, Homo sapiens
  siRNA target sequence for FLJ12975 (NM_024809.2,658-676).
ccaggaatgctcatcaaat

SEQ ID NO: 390886 - DNA, 19 bp, Homo sapiens
  siRNA target sequence for FLJ12975 (NM_024809.2,661-679).
ggaatgctcatcaaattta

SEQ ID NO: 390887 - DNA, 19 bp, Homo sapiens
  siRNA target sequence for FLJ12975 (NM_024809.2,662-680).
gaatgctcatcaaatttaa

SEQ ID NO: 390888 - DNA, 19 bp, Homo sapiens
  siRNA target sequence for FLJ12975 (NM_024809.2,727-745).
cgtcaatcctccttttgat

SEQ ID NO: 390889 - DNA, 19 bp, Homo sapiens
  siRNA target sequence for FLJ12975 (NM_024809.2,774-792).
gtggtgtccccgattggtt

SEQ ID NO: 390890 - DNA, 19 bp, Homo sapiens
  siRNA target sequence for FLJ12975 (NM_024809.2,832-850).
cttccttggttacttctat

SEQ ID NO: 390891 - DNA, 19 bp, Homo sapiens
  siRNA target sequence for FLJ12975 (NM_024809.2,835-853).
ccttggttacttctatcat

SEQ ID NO: 390892 - DNA, 19 bp, Homo sapiens
  siRNA target sequence for FLJ12975 (NM_024809.2,874-892).
ggactcttcctttgaagta

SEQ ID NO: 390893 - DNA, 19 bp, Homo sapiens
  siRNA target sequence for FLJ12975 (NM_024809.2,938-956).
caaggagatcccattatga

SEQ ID NO: 390894 - DNA, 19 bp, Homo sapiens
  siRNA target sequence for FLJ12975 (NM_024809.2,944-962).
gatcccattatgactgtaa

SEQ ID NO: 390895 - DNA, 19 bp, Homo sapiens
  siRNA target sequence for FLJ12975 (NM_024809.2,957-975).
ctgtaaagaaggcatattt

SEQ ID NO: 390896 - DNA, 19 bp, Homo sapiens
  siRNA target sequence for FLJ12975 (NM_024809.2,1046-1064).
gatgttaaatgcgttacta

SEQ ID NO: 390897 - DNA, 19 bp, Homo sapiens
  siRNA target sequence for FLJ12975 (NM_024809.2,1078-1096).
ccaagaacgagatggtatt

SEQ ID NO: 390898 - DNA, 19 bp, Homo sapiens
  siRNA target sequence for FLJ12975 (NM_024809.2,1121-1139).
gccttaggaggcatagtta

SEQ ID NO: 390899 - DNA, 19 bp, Homo sapiens
  siRNA target sequence for FLJ12975 (NM_024809.2,1123-1141).
cttaggaggcatagttaca

SEQ ID NO: 390900 - DNA, 19 bp, Homo sapiens
  siRNA target sequence for FLJ12975 (NM_024809.2,1163-1181).
gcaactgacctagacaaat

SEQ ID NO: 390901 - DNA, 19 bp, Homo sapiens
  siRNA target sequence for FLJ12975 (NM_024809.2,1167-1185).
ctgacctagacaaattcat

SEQ ID NO: 390902 - DNA, 19 bp, Homo sapiens
  siRNA target sequence for FLJ12975 (NM_024809.2,1175-1193).
gacaaattcatcaccaata

SEQ ID NO: 390903 - DNA, 19 bp, Homo sapiens
  siRNA target sequence for FLJ12975 (NM_024809.2,1183-1201).
catcaccaatacagaaact

SEQ ID NO: 390904 - DNA, 19 bp, Homo sapiens
  siRNA target sequence for FLJ12975 (NM_024809.2,1189-1207).
caatacagaaactccttta

SEQ ID NO: 390905 - DNA, 19 bp, Homo sapiens
  siRNA target sequence for FLJ12975 (NM_024809.2,1221-1239).
cccctagaattgtgaatgt

SEQ ID NO: 390906 - DNA, 19 bp, Homo sapiens
  siRNA target sequence for FLJ12975 (NM_024809.2,1341-1359).
cacagagatttgtagtaaa

SEQ ID NO: 390907 - DNA, 19 bp, Homo sapiens
  siRNA target sequence for FLJ12975 (NM_024809.2,1426-1444).
gcctgtccgagctctaaat

SEQ ID NO: 390908 - DNA, 19 bp, Homo sapiens
  siRNA target sequence for FLJ12975 (NM_024809.2,1430-1448).
gtccgagctctaaatatca

SEQ ID NO: 390909 - DNA, 19 bp, Homo sapiens
  siRNA target sequence for FLJ12975 (NM_024809.2,1463-1481).
gtcacgactttacatcttt

SEQ ID NO: 390910 - DNA, 19 bp, Homo sapiens
  siRNA target sequence for FLJ12975 (NM_024809.2,1493-1511).
ggaaggggtctgtgtacat

SEQ ID NO: 390911 - DNA, 19 bp, Homo sapiens
  siRNA target sequence for FLJ12975 (NM_024809.2,1564-1582).
gttagaagtcgggattaat

SEQ ID NO: 390912 - DNA, 19 bp, Homo sapiens
  siRNA target sequence for FLJ12975 (NM_024809.2,1571-1589).
gtcgggattaatgaaaatt

SEQ ID NO: 390913 - DNA, 19 bp, Homo sapiens
  siRNA target sequence for FLJ12975 (NM_024809.2,1573-1591).
cgggattaatgaaaattgt

SEQ ID NO: 390914 - DNA, 19 bp, Homo sapiens
  siRNA target sequence for FLJ12975 (NM_024809.2,1642-1660).
gactcacgttgcaatgaga

SEQ ID NO: 390915 - DNA, 19 bp, Homo sapiens
  siRNA target sequence for FLJ12975 (NM_024809.2,1666-1684).
ctccgattacgctgatctt

SEQ ID NO: 390916 - DNA, 19 bp, Homo sapiens
  siRNA target sequence for FLJ12975 (NM_024809.2,1669-1687).
cgattacgctgatcttagt

SEQ ID NO: 390917 - DNA, 19 bp, Homo sapiens
  siRNA target sequence for FLJ12975 (NM_024809.2,1686-1704).
gtgatggctggctcgaaat

SEQ ID NO: 390918 - DNA, 19 bp, Homo sapiens
  siRNA target sequence for FLJ12975 (NM_024809.2,1688-1706).
gatggctggctcgaaataa

SEQ ID NO: 390919 - DNA, 19 bp, Homo sapiens
  siRNA target sequence for FLJ12975 (NM_024809.2,1699-1717).
cgaaataatacgtgtagat

SEQ ID NO: 390920 - DNA, 19 bp, Homo sapiens
  siRNA target sequence for FLJ12975 (NM_024809.2,1759-1777).
cggcatgtgcctggatatt

SEQ ID NO: 390921 - DNA, 19 bp, Homo sapiens
  siRNA target sequence for FLJ12975 (NM_024809.2,1821-1839).
cggtggaagggattactca

SEQ ID NO: 390922 - DNA, 19 bp, Homo sapiens
  siRNA target sequence for FLJ12975 (NM_024809.2,1921-1939).
cgaccttctccctatcagt

SEQ ID NO: 390923 - DNA, 19 bp, Homo sapiens
  siRNA target sequence for FLJ12975 (NM_024809.2,1987-2005).
gacaagattccagatcaat

SEQ ID NO: 390924 - DNA, 19 bp, Homo sapiens
  siRNA target sequence for FLJ12975 (NM_024809.2,1999-2017).
gatcaattatacagagtat

SEQ ID NO: 390925 - DNA, 19 bp, Homo sapiens
  siRNA target sequence for FLJ12975 (NM_024809.2,2040-2058).
gttggccgcagcttctata

SEQ ID NO: 390926 - DNA, 19 bp, Homo sapiens
  siRNA target sequence for FLJ12975 (NM_024809.2,2045-2063).
ccgcagcttctatatccat

SEQ ID NO: 390927 - DNA, 19 bp, Homo sapiens
  siRNA target sequence for FLJ12975 (NM_024809.2,2160-2178).
cctggaccagaatatgcaa

SEQ ID NO: 390928 - DNA, 19 bp, Homo sapiens
  siRNA target sequence for FLJ23018 (NM_024810.1,293-311).
gctatgataacttctctta

SEQ ID NO: 390929 - DNA, 19 bp, Homo sapiens
  siRNA target sequence for FLJ23018 (NM_024810.1,294-312).
ctatgataacttctcttat

SEQ ID NO: 390930 - DNA, 19 bp, Homo sapiens
  siRNA target sequence for FLJ23018 (NM_024810.1,405-423).
caggggcttggaagaaact

SEQ ID NO: 390931 - DNA, 19 bp, Homo sapiens
  siRNA target sequence for FLJ23018 (NM_024810.1,545-563).
gctcaggcaaacagacttt

SEQ ID NO: 390932 - DNA, 19 bp, Homo sapiens
  siRNA target sequence for FLJ23018 (NM_024810.1,590-608).
gtgaaaatgggcgatatca

SEQ ID NO: 390933 - DNA, 19 bp, Homo sapiens
  siRNA target sequence for FLJ23018 (NM_024810.1,628-646).
gcagagccagactatgaaa

SEQ ID NO: 390934 - DNA, 19 bp, Homo sapiens
  siRNA target sequence for FLJ23018 (NM_024810.1,631-649).
gagccagactatgaaactt

SEQ ID NO: 390935 - DNA, 19 bp, Homo sapiens
  siRNA target sequence for FLJ23018 (NM_024810.1,670-688).
gcatctacagcaaacttgt

SEQ ID NO: 390936 - DNA, 19 bp, Homo sapiens
  siRNA target sequence for FLJ23018 (NM_024810.1,697-715).
gacagaaagtcatgttcta

SEQ ID NO: 390937 - DNA, 19 bp, Homo sapiens
  siRNA target sequence for FLJ23018 (NM_024810.1,785-803).
cagcttcctgtgccaataa

SEQ ID NO: 390938 - DNA, 19 bp, Homo sapiens
  siRNA target sequence for FLJ23018 (NM_024810.1,808-826).
ccagctccagtcttatcta

SEQ ID NO: 390939 - DNA, 19 bp, Homo sapiens
  siRNA target sequence for FLJ23018 (NM_024810.1,809-827).
cagctccagtcttatctaa

SEQ ID NO: 390940 - DNA, 19 bp, Homo sapiens
  siRNA target sequence for FLJ23018 (NM_024810.1,828-846).
cggtgcagcggctaatcaa

SEQ ID NO: 390941 - DNA, 19 bp, Homo sapiens
  siRNA target sequence for FLJ23018 (NM_024810.1,833-851).
cagcggctaatcaagctat

SEQ ID NO: 390942 - DNA, 19 bp, Homo sapiens
  siRNA target sequence for FLJ23018 (NM_024810.1,835-853).
gcggctaatcaagctatta

SEQ ID NO: 390943 - DNA, 19 bp, Homo sapiens
  siRNA target sequence for FLJ23018 (NM_024810.1,837-855).
ggctaatcaagctattagt

SEQ ID NO: 390944 - DNA, 19 bp, Homo sapiens
  siRNA target sequence for FLJ23018 (NM_024810.1,838-856).
gctaatcaagctattagta

SEQ ID NO: 390945 - DNA, 19 bp, Homo sapiens
  siRNA target sequence for FLJ23018 (NM_024810.1,869-887).
cctcacagaatgctataca

SEQ ID NO: 390946 - DNA, 19 bp, Homo sapiens
  siRNA target sequence for FLJ23018 (NM_024810.1,915-933).
cggcaggccagatacaaaa

SEQ ID NO: 390947 - DNA, 19 bp, Homo sapiens
  siRNA target sequence for FLJ23018 (NM_024810.1,917-935).
gcaggccagatacaaaagt

SEQ ID NO: 390948 - DNA, 19 bp, Homo sapiens
  siRNA target sequence for FLJ23018 (NM_024810.1,939-957).
gcagtactatttcaatcta

SEQ ID NO: 390949 - DNA, 19 bp, Homo sapiens
  siRNA target sequence for FLJ23018 (NM_024810.1,955-973).
ctaggattgcagtgctatt

SEQ ID NO: 390950 - DNA, 19 bp, Homo sapiens
  siRNA target sequence for FLJ23018 (NM_024810.1,959-977).
gattgcagtgctattacca

SEQ ID NO: 390951 - DNA, 19 bp, Homo sapiens
  siRNA target sequence for FLJ23018 (NM_024810.1,1023-1041).
gcttcatgtagagaattat

SEQ ID NO: 390952 - DNA, 19 bp, Homo sapiens
  siRNA target sequence for FLJ23018 (NM_024810.1,1150-1168).
ccgaatgctgattcttcat

SEQ ID NO: 390953 - DNA, 19 bp, Homo sapiens
  siRNA target sequence for FLJ23018 (NM_024810.1,1184-1202).
cagtctattatccagtaat

SEQ ID NO: 390954 - DNA, 19 bp, Homo sapiens
  siRNA target sequence for FLJ23018 (NM_024810.1,1252-1270).
ccggttgtgccagattatt

SEQ ID NO: 390955 - DNA, 19 bp, Homo sapiens
  siRNA target sequence for FLJ23018 (NM_024810.1,1310-1328).
gtggttcttctcaaattca

SEQ ID NO: 390956 - DNA, 19 bp, Homo sapiens
  siRNA target sequence for FLJ23018 (NM_024810.1,1347-1365).
gccaattggctgtattgct

SEQ ID NO: 390957 - DNA, 19 bp, Homo sapiens
  siRNA target sequence for FLJ23018 (NM_024810.1,1373-1391).
ccccagcttctcattatgt

SEQ ID NO: 390958 - DNA, 19 bp, Homo sapiens
  siRNA target sequence for FLJ23018 (NM_024810.1,1374-1392).
cccagcttctcattatgta

SEQ ID NO: 390959 - DNA, 19 bp, Homo sapiens
  siRNA target sequence for BAALC (NM_024812.1,504-522).
cacagaggctaaaagagat

SEQ ID NO: 390960 - DNA, 19 bp, Homo sapiens
  siRNA target sequence for BAALC (NM_024812.1,549-567).
caccattaatgtaacagat

SEQ ID NO: 390961 - DNA, 19 bp, Homo sapiens
  siRNA target sequence for BAALC (NM_024812.1,583-601).
gacagaagtcgaagaatca

SEQ ID NO: 390962 - DNA, 19 bp, Homo sapiens
  siRNA target sequence for BAALC (NM_024812.1,590-608).
gtcgaagaatcacaaagaa

SEQ ID NO: 390963 - DNA, 19 bp, Homo sapiens
  siRNA target sequence for BAALC (NM_024812.1,592-610).
cgaagaatcacaaagaact

SEQ ID NO: 390964 - DNA, 19 bp, Homo sapiens
  siRNA target sequence for FLJ13150 (NM_024813.1,88-106).
gaaaagccgcaggtactaa

SEQ ID NO: 390965 - DNA, 19 bp, Homo sapiens
  siRNA target sequence for FLJ13150 (NM_024813.1,93-111).
gccgcaggtactaaacaga

SEQ ID NO: 390966 - DNA, 19 bp, Homo sapiens
  siRNA target sequence for FLJ13150 (NM_024813.1,193-211).
gaaaagctctacatattgt

SEQ ID NO: 390967 - DNA, 19 bp, Homo sapiens
  siRNA target sequence for FLJ13150 (NM_024813.1,238-256).
cagaagagttcctaatgga

SEQ ID NO: 390968 - DNA, 19 bp, Homo sapiens
  siRNA target sequence for FLJ13150 (NM_024813.1,254-272).
ggagtgtgggaggttcatt

SEQ ID NO: 390969 - DNA, 19 bp, Homo sapiens
  siRNA target sequence for FLJ13150 (NM_024813.1,255-273).
gagtgtgggaggttcatta

SEQ ID NO: 390970 - DNA, 19 bp, Homo sapiens
  siRNA target sequence for FLJ13150 (NM_024813.1,296-314).
cgtggatgaacgttctatt

SEQ ID NO: 390971 - DNA, 19 bp, Homo sapiens
  siRNA target sequence for FLJ13150 (NM_024813.1,306-324).
cgttctattgtcaaactct

SEQ ID NO: 390972 - DNA, 19 bp, Homo sapiens
  siRNA target sequence for FLJ13150 (NM_024813.1,321-339).
ctctgtggttatcctttat

SEQ ID NO: 390973 - DNA, 19 bp, Homo sapiens
  siRNA target sequence for FLJ13150 (NM_024813.1,350-368).
gctgggaattgtaccaaaa

SEQ ID NO: 390974 - DNA, 19 bp, Homo sapiens
  siRNA target sequence for FLJ13150 (NM_024813.1,394-412).
ccaataaagtctatgatat

SEQ ID NO: 390975 - DNA, 19 bp, Homo sapiens
  siRNA target sequence for FLJ13150 (NM_024813.1,445-463).
gttatcaagcatctaagtt

SEQ ID NO: 390976 - DNA, 19 bp, Homo sapiens
  siRNA target sequence for FLJ13150 (NM_024813.1,561-579).
ggagaagaagtacagttat

SEQ ID NO: 390977 - DNA, 19 bp, Homo sapiens
  siRNA target sequence for FLJ13150 (NM_024813.1,611-629).
caatcctagccactttgaa

SEQ ID NO: 390978 - DNA, 19 bp, Homo sapiens
  siRNA target sequence for FLJ13150 (NM_024813.1,616-634).
ctagccactttgaaaagca

SEQ ID NO: 390979 - DNA, 19 bp, Homo sapiens
  siRNA target sequence for FLJ13150 (NM_024813.1,749-767).
gctgcaccaaaaaagcata

SEQ ID NO: 390980 - DNA, 19 bp, Homo sapiens
  siRNA target sequence for FLJ13150 (NM_024813.1,750-768).
ctgcaccaaaaaagcataa

SEQ ID NO: 390981 - DNA, 19 bp, Homo sapiens
  siRNA target sequence for FLJ13150 (NM_024813.1,845-863).
gttaggcgattgcaaatta

SEQ ID NO: 390982 - DNA, 19 bp, Homo sapiens
  siRNA target sequence for FLJ13150 (NM_024813.1,851-869).
cgattgcaaattagatagt

SEQ ID NO: 390983 - DNA, 19 bp, Homo sapiens
  siRNA target sequence for FLJ13150 (NM_024813.1,875-893).
gaaagatgctacatgtgaa

SEQ ID NO: 390984 - DNA, 19 bp, Homo sapiens
  siRNA target sequence for FLJ13150 (NM_024813.1,989-1007).
gtcagaaataactctagta

SEQ ID NO: 390985 - DNA, 19 bp, Homo sapiens
  siRNA target sequence for FLJ13150 (NM_024813.1,1000-1018).
ctctagtaggcataagtaa

SEQ ID NO: 390986 - DNA, 19 bp, Homo sapiens
  siRNA target sequence for FLJ13150 (NM_024813.1,1026-1044).
gcagagcattttaagagaa

SEQ ID NO: 390987 - DNA, 19 bp, Homo sapiens
  siRNA target sequence for FLJ13150 (NM_024813.1,1027-1045).
cagagcattttaagagaaa

SEQ ID NO: 390988 - DNA, 19 bp, Homo sapiens
  siRNA target sequence for FLJ13150 (NM_024813.1,1219-1237).
ccgaagcctctctggttaa

SEQ ID NO: 390989 - DNA, 19 bp, Homo sapiens
  siRNA target sequence for FLJ13150 (NM_024813.1,1220-1238).
cgaagcctctctggttaaa

SEQ ID NO: 390990 - DNA, 19 bp, Homo sapiens
  siRNA target sequence for FLJ13150 (NM_024813.1,1228-1246).
ctctggttaaagaagaact

SEQ ID NO: 390991 - DNA, 19 bp, Homo sapiens
  siRNA target sequence for FLJ13150 (NM_024813.1,1265-1283).
ctcagatccagatagtcat

SEQ ID NO: 390992 - DNA, 19 bp, Homo sapiens
  siRNA target sequence for FLJ13150 (NM_024813.1,1313-1331).
cttggatgagtctttacct

SEQ ID NO: 390993 - DNA, 19 bp, Homo sapiens
  siRNA target sequence for FLJ13150 (NM_024813.1,1316-1334).
ggatgagtctttacctttt

SEQ ID NO: 390994 - DNA, 19 bp, Homo sapiens
  siRNA target sequence for FLJ13150 (NM_024813.1,1362-1380).
ctgccaagttacgagaatt

SEQ ID NO: 390995 - DNA, 19 bp, Homo sapiens
  siRNA target sequence for FLJ13150 (NM_024813.1,1365-1383).
ccaagttacgagaatttga

SEQ ID NO: 390996 - DNA, 19 bp, Homo sapiens
  siRNA target sequence for FLJ13150 (NM_024813.1,1531-1549).
gaaaacgcatcgtacttga

SEQ ID NO: 390997 - DNA, 19 bp, Homo sapiens
  siRNA target sequence for FLJ13150 (NM_024813.1,1536-1554).
cgcatcgtacttgaaaagt

SEQ ID NO: 390998 - DNA, 19 bp, Homo sapiens
  siRNA target sequence for FLJ13150 (NM_024813.1,1537-1555).
gcatcgtacttgaaaagtt

SEQ ID NO: 390999 - DNA, 19 bp, Homo sapiens
  siRNA target sequence for FLJ13150 (NM_024813.1,1615-1633).
cacaacttaaaaatcttgt

SEQ ID NO: 391000 - DNA, 19 bp, Homo sapiens
  siRNA target sequence for FLJ13150 (NM_024813.1,1632-1650).
gttcgaactttcaggttaa

SEQ ID NO: 391001 - DNA, 19 bp, Homo sapiens
  siRNA target sequence for FLJ13150 (NM_024813.1,1675-1693).
ctgcggaatggactttaat

SEQ ID NO: 391002 - DNA, 19 bp, Homo sapiens
  siRNA target sequence for FLJ13150 (NM_024813.1,1679-1697).
ggaatggactttaattgct

SEQ ID NO: 391003 - DNA, 19 bp, Homo sapiens
  siRNA target sequence for FLJ13150 (NM_024813.1,1722-1740).
ccaattcttggcattcaga

SEQ ID NO: 391004 - DNA, 19 bp, Homo sapiens
  siRNA target sequence for FLJ13150 (NM_024813.1,1760-1778).
ggtgtttacacggtttcta

SEQ ID NO: 391005 - DNA, 19 bp, Homo sapiens
  siRNA target sequence for FLJ13150 (NM_024813.1,1784-1802).
cctccttgaagaattacat

SEQ ID NO: 391006 - DNA, 19 bp, Homo sapiens
  siRNA target sequence for CBLL1 (NM_024814.1,32-50).
cactgacaatgagttacaa

SEQ ID NO: 391007 - DNA, 19 bp, Homo sapiens
  siRNA target sequence for CBLL1 (NM_024814.1,42-60).
gagttacaaggcactaata

SEQ ID NO: 391008 - DNA, 19 bp, Homo sapiens
  siRNA target sequence for CBLL1 (NM_024814.1,87-105).
gttcgcagacgaattccta

SEQ ID NO: 391009 - DNA, 19 bp, Homo sapiens
  siRNA target sequence for CBLL1 (NM_024814.1,91-109).
gcagacgaattcctataaa

SEQ ID NO: 391010 - DNA, 19 bp, Homo sapiens
  siRNA target sequence for CBLL1 (NM_024814.1,94-112).
gacgaattcctataaagct

SEQ ID NO: 391011 - DNA, 19 bp, Homo sapiens
  siRNA target sequence for CBLL1 (NM_024814.1,141-159).
cctgcaccgcgaactcaaa

SEQ ID NO: 391012 - DNA, 19 bp, Homo sapiens
  siRNA target sequence for CBLL1 (NM_024814.1,144-162).
gcaccgcgaactcaaagaa

SEQ ID NO: 391013 - DNA, 19 bp, Homo sapiens
  siRNA target sequence for CBLL1 (NM_024814.1,147-165).
ccgcgaactcaaagaacta

SEQ ID NO: 391014 - DNA, 19 bp, Homo sapiens
  siRNA target sequence for CBLL1 (NM_024814.1,150-168).
cgaactcaaagaactataa

SEQ ID NO: 391015 - DNA, 19 bp, Homo sapiens
  siRNA target sequence for CBLL1 (NM_024814.1,185-203).
ggctccacctggtgatgaa

SEQ ID NO: 391016 - DNA, 19 bp, Homo sapiens
  siRNA target sequence for CBLL1 (NM_024814.1,247-265).
ggggtgagctgtttgcaaa

SEQ ID NO: 391017 - DNA, 19 bp, Homo sapiens
  siRNA target sequence for CBLL1 (NM_024814.1,248-266).
gggtgagctgtttgcaaat

SEQ ID NO: 391018 - DNA, 19 bp, Homo sapiens
  siRNA target sequence for CBLL1 (NM_024814.1,327-345).
gatgatacaccagttcatt

SEQ ID NO: 391019 - DNA, 19 bp, Homo sapiens
  siRNA target sequence for CBLL1 (NM_024814.1,455-473).
gtgtccaggctgtagtgat

SEQ ID NO: 391020 - DNA, 19 bp, Homo sapiens
  siRNA target sequence for CBLL1 (NM_024814.1,531-549).
caagggtgcaagagaacat

SEQ ID NO: 391021 - DNA, 19 bp, Homo sapiens
  siRNA target sequence for CBLL1 (NM_024814.1,534-552).
gggtgcaagagaacatatt

SEQ ID NO: 391022 - DNA, 19 bp, Homo sapiens
  siRNA target sequence for CBLL1 (NM_024814.1,581-599).
caaccatcgccatatgaga

SEQ ID NO: 391023 - DNA, 19 bp, Homo sapiens
  siRNA target sequence for CBLL1 (NM_024814.1,693-711).
ccagacaagcaccatatga

SEQ ID NO: 391024 - DNA, 19 bp, Homo sapiens
  siRNA target sequence for CBLL1 (NM_024814.1,701-719).
gcaccatatgagccatatt

SEQ ID NO: 391025 - DNA, 19 bp, Homo sapiens
  siRNA target sequence for CBLL1 (NM_024814.1,850-868).
cggtcagtcaggaaacctt

SEQ ID NO: 391026 - DNA, 19 bp, Homo sapiens
  siRNA target sequence for CBLL1 (NM_024814.1,851-869).
ggtcagtcaggaaaccttt

SEQ ID NO: 391027 - DNA, 19 bp, Homo sapiens
  siRNA target sequence for CBLL1 (NM_024814.1,856-874).
gtcaggaaacctttcgtat

SEQ ID NO: 391028 - DNA, 19 bp, Homo sapiens
  siRNA target sequence for CBLL1 (NM_024814.1,860-878).
ggaaacctttcgtatttca

SEQ ID NO: 391029 - DNA, 19 bp, Homo sapiens
  siRNA target sequence for CBLL1 (NM_024814.1,1111-1129).
gtactcctcacttggtata

SEQ ID NO: 391030 - DNA, 19 bp, Homo sapiens
  siRNA target sequence for CBLL1 (NM_024814.1,1178-1196).
ccctccccctggacatatt

SEQ ID NO: 391031 - DNA, 19 bp, Homo sapiens
  siRNA target sequence for CBLL1 (NM_024814.1,1200-1218).
gcccagatgccaccttata

SEQ ID NO: 391032 - DNA, 19 bp, Homo sapiens
  siRNA target sequence for CBLL1 (NM_024814.1,1201-1219).
cccagatgccaccttatat

SEQ ID NO: 391033 - DNA, 19 bp, Homo sapiens
  siRNA target sequence for CBLL1 (NM_024814.1,1203-1221).
cagatgccaccttatatga

SEQ ID NO: 391034 - DNA, 19 bp, Homo sapiens
  siRNA target sequence for CBLL1 (NM_024814.1,1208-1226).
gccaccttatatgaatcat

SEQ ID NO: 391035 - DNA, 19 bp, Homo sapiens
  siRNA target sequence for CBLL1 (NM_024814.1,1289-1307).
ccattataatcctaactca

SEQ ID NO: 391036 - DNA, 19 bp, Homo sapiens
  siRNA target sequence for CBLL1 (NM_024814.1,1290-1308).
cattataatcctaactcat

SEQ ID NO: 391037 - DNA, 19 bp, Homo sapiens
  siRNA target sequence for CBLL1 (NM_024814.1,1421-1439).
gcagggtccgccttctcaa

SEQ ID NO: 391038 - DNA, 19 bp, Homo sapiens
  siRNA target sequence for CBLL1 (NM_024814.1,1422-1440).
cagggtccgccttctcaaa

SEQ ID NO: 391039 - DNA, 19 bp, Homo sapiens
  siRNA target sequence for CBLL1 (NM_024814.1,1464-1482).
ccagatcagacaagatata

SEQ ID NO: 391040 - DNA, 19 bp, Homo sapiens
  siRNA target sequence for CBLL1 (NM_024814.1,1474-1492).
caagatatagaccgtatta

SEQ ID NO: 391041 - DNA, 19 bp, Homo sapiens
  siRNA target sequence for CBLL1 (NM_024814.1,1477-1495).
gatatagaccgtattacca

SEQ ID NO: 391042 - DNA, 19 bp, Homo sapiens
  siRNA target sequence for FLJ22494 (NM_024815.2,244-262).
cacgggccatgtgacattt

SEQ ID NO: 391043 - DNA, 19 bp, Homo sapiens
  siRNA target sequence for FLJ22494 (NM_024815.2,246-264).
cgggccatgtgacatttat

SEQ ID NO: 391044 - DNA, 19 bp, Homo sapiens
  siRNA target sequence for FLJ22494 (NM_024815.2,248-266).
ggccatgtgacatttataa

SEQ ID NO: 391045 - DNA, 19 bp, Homo sapiens
  siRNA target sequence for FLJ22494 (NM_024815.2,1308-1326).
cgctgcgagcccatgacat

SEQ ID NO: 391046 - DNA, 19 bp, Homo sapiens
  siRNA target sequence for FLJ22494 (NM_024815.2,1420-1438).
gcggctcgtggctaccttt

SEQ ID NO: 391047 - DNA, 19 bp, Homo sapiens
  siRNA target sequence for FLJ22494 (NM_024815.2,1421-1439).
cggctcgtggctaccttta

SEQ ID NO: 391048 - DNA, 19 bp, Homo sapiens
  siRNA target sequence for FLJ22494 (NM_024815.2,1424-1442).
ctcgtggctacctttacca

SEQ ID NO: 391049 - DNA, 19 bp, Homo sapiens
  siRNA target sequence for FLJ22494 (NM_024815.2,1718-1736).
gttcggggtgagaacttct

SEQ ID NO: 391050 - DNA, 19 bp, Homo sapiens
  siRNA target sequence for FLJ22494 (NM_024815.2,1721-1739).
cggggtgagaacttctctt

SEQ ID NO: 391051 - DNA, 19 bp, Homo sapiens
  siRNA target sequence for FLJ13710 (NM_024817.1,101-119).
cacctacaagcgtccaaat

SEQ ID NO: 391052 - DNA, 19 bp, Homo sapiens
  siRNA target sequence for FLJ13710 (NM_024817.1,103-121).
cctacaagcgtccaaatga

SEQ ID NO: 391053 - DNA, 19 bp, Homo sapiens
  siRNA target sequence for FLJ13710 (NM_024817.1,107-125).
caagcgtccaaatgagatt

SEQ ID NO: 391054 - DNA, 19 bp, Homo sapiens
  siRNA target sequence for FLJ13710 (NM_024817.1,111-129).
cgtccaaatgagatttcga

SEQ ID NO: 391055 - DNA, 19 bp, Homo sapiens
  siRNA target sequence for FLJ13710 (NM_024817.1,133-151).
ctgccggagagtccttttt

SEQ ID NO: 391056 - DNA, 19 bp, Homo sapiens
  siRNA target sequence for FLJ13710 (NM_024817.1,428-446).
caggcatccagacagattt

SEQ ID NO: 391057 - DNA, 19 bp, Homo sapiens
  siRNA target sequence for FLJ13710 (NM_024817.1,451-469).
cccatcgaccggacaactt

SEQ ID NO: 391058 - DNA, 19 bp, Homo sapiens
  siRNA target sequence for FLJ13710 (NM_024817.1,496-514).
ggcgcagccgggatcacaa

SEQ ID NO: 391059 - DNA, 19 bp, Homo sapiens
  siRNA target sequence for FLJ13710 (NM_024817.1,521-539).
gcagcttgggacaacagaa

SEQ ID NO: 391060 - DNA, 19 bp, Homo sapiens
  siRNA target sequence for FLJ13710 (NM_024817.1,522-540).
cagcttgggacaacagaat

SEQ ID NO: 391061 - DNA, 19 bp, Homo sapiens
  siRNA target sequence for FLJ13710 (NM_024817.1,525-543).
cttgggacaacagaatgtt

SEQ ID NO: 391062 - DNA, 19 bp, Homo sapiens
  siRNA target sequence for FLJ13710 (NM_024817.1,561-579).
ggatcgcagtaccctattt

SEQ ID NO: 391063 - DNA, 19 bp, Homo sapiens
  siRNA target sequence for FLJ13710 (NM_024817.1,562-580).
gatcgcagtaccctatttt

SEQ ID NO: 391064 - DNA, 19 bp, Homo sapiens
  siRNA target sequence for FLJ13710 (NM_024817.1,611-629).
ggctcctgagagttactgt

SEQ ID NO: 391065 - DNA, 19 bp, Homo sapiens
  siRNA target sequence for FLJ13710 (NM_024817.1,1277-1295).
gagggaggtgatttgtgtt

SEQ ID NO: 391066 - DNA, 19 bp, Homo sapiens
  siRNA target sequence for FLJ13710 (NM_024817.1,1284-1302).
gtgatttgtgttagaaaga

SEQ ID NO: 391067 - DNA, 19 bp, Homo sapiens
  siRNA target sequence for FLJ13710 (NM_024817.1,1320-1338).
gtgttggacccctctgaat

SEQ ID NO: 391068 - DNA, 19 bp, Homo sapiens
  siRNA target sequence for FLJ13710 (NM_024817.1,1322-1340).
gttggacccctctgaatgt

SEQ ID NO: 391069 - DNA, 19 bp, Homo sapiens
  siRNA target sequence for FLJ13710 (NM_024817.1,1325-1343).
ggacccctctgaatgttct

SEQ ID NO: 391070 - DNA, 19 bp, Homo sapiens
  siRNA target sequence for FLJ13710 (NM_024817.1,1387-1405).
cttgcggagccaaatggtt

SEQ ID NO: 391071 - DNA, 19 bp, Homo sapiens
  siRNA target sequence for FLJ13710 (NM_024817.1,1392-1410).
ggagccaaatggtttagca

SEQ ID NO: 391072 - DNA, 19 bp, Homo sapiens
  siRNA target sequence for FLJ13710 (NM_024817.1,1479-1497).
gatgacatgactctaagta

SEQ ID NO: 391073 - DNA, 19 bp, Homo sapiens
  siRNA target sequence for KIAA1608 (NM_024820.1,249-267).
gagaccacatttgaagtat

SEQ ID NO: 391074 - DNA, 19 bp, Homo sapiens
  siRNA target sequence for KIAA1608 (NM_024820.1,253-271).
ccacatttgaagtatatgt

SEQ ID NO: 391075 - DNA, 19 bp, Homo sapiens
  siRNA target sequence for KIAA1608 (NM_024820.1,290-308).
gacaggtggcactctttca

SEQ ID NO: 391076 - DNA, 19 bp, Homo sapiens
  siRNA target sequence for KIAA1608 (NM_024820.1,354-372).
gaagttctacagactttga

SEQ ID NO: 391077 - DNA, 19 bp, Homo sapiens
  siRNA target sequence for KIAA1608 (NM_024820.1,417-435).
caagttggccagaacttca

SEQ ID NO: 391078 - DNA, 19 bp, Homo sapiens
  siRNA target sequence for KIAA1608 (NM_024820.1,473-491).
cgggttctgccgcttatct

SEQ ID NO: 391079 - DNA, 19 bp, Homo sapiens
  siRNA target sequence for KIAA1608 (NM_024820.1,474-492).
gggttctgccgcttatctt

SEQ ID NO: 391080 - DNA, 19 bp, Homo sapiens
  siRNA target sequence for KIAA1608 (NM_024820.1,476-494).
gttctgccgcttatcttca

SEQ ID NO: 391081 - DNA, 19 bp, Homo sapiens
  siRNA target sequence for KIAA1608 (NM_024820.1,508-526).
gcttctgtatcttaagcta

SEQ ID NO: 391082 - DNA, 19 bp, Homo sapiens
  siRNA target sequence for KIAA1608 (NM_024820.1,509-527).
cttctgtatcttaagctat

SEQ ID NO: 391083 - DNA, 19 bp, Homo sapiens
  siRNA target sequence for KIAA1608 (NM_024820.1,530-548).
cccctggttcgaggtattt

SEQ ID NO: 391084 - DNA, 19 bp, Homo sapiens
  siRNA target sequence for KIAA1608 (NM_024820.1,533-551).
ctggttcgaggtattttat

SEQ ID NO: 391085 - DNA, 19 bp, Homo sapiens
  siRNA target sequence for KIAA1608 (NM_024820.1,569-587).
ggcagattacacgacaaaa

SEQ ID NO: 391086 - DNA, 19 bp, Homo sapiens
  siRNA target sequence for KIAA1608 (NM_024820.1,570-588).
gcagattacacgacaaaaa

SEQ ID NO: 391087 - DNA, 19 bp, Homo sapiens
  siRNA target sequence for KIAA1608 (NM_024820.1,666-684).
ctcagcgtgcattcttatt

SEQ ID NO: 391088 - DNA, 19 bp, Homo sapiens
  siRNA target sequence for KIAA1608 (NM_024820.1,671-689).
cgtgcattcttattttact

SEQ ID NO: 391089 - DNA, 19 bp, Homo sapiens
  siRNA target sequence for KIAA1608 (NM_024820.1,804-822).
cgccggatactcatcattt

SEQ ID NO: 391090 - DNA, 19 bp, Homo sapiens
  siRNA target sequence for KIAA1608 (NM_024820.1,953-971).
ctacctcataggaatccat

SEQ ID NO: 391091 - DNA, 19 bp, Homo sapiens
  siRNA target sequence for KIAA1608 (NM_024820.1,956-974).
cctcataggaatccattta

SEQ ID NO: 391092 - DNA, 19 bp, Homo sapiens
  siRNA target sequence for KIAA1608 (NM_024820.1,957-975).
ctcataggaatccatttaa

SEQ ID NO: 391093 - DNA, 19 bp, Homo sapiens
  siRNA target sequence for KIAA1608 (NM_024820.1,959-977).
cataggaatccatttaagt

SEQ ID NO: 391094 - DNA, 19 bp, Homo sapiens
  siRNA target sequence for KIAA1608 (NM_024820.1,1077-1095).
ccaaacgacgtgatctctt

SEQ ID NO: 391095 - DNA, 19 bp, Homo sapiens
  siRNA target sequence for KIAA1608 (NM_024820.1,1192-1210).
gaaacgctctgaaaatcga

SEQ ID NO: 391096 - DNA, 19 bp, Homo sapiens
  siRNA target sequence for KIAA1608 (NM_024820.1,1212-1230).
ccggaggagccgatcactt

SEQ ID NO: 391097 - DNA, 19 bp, Homo sapiens
  siRNA target sequence for KIAA1608 (NM_024820.1,1213-1231).
cggaggagccgatcacttt

SEQ ID NO: 391098 - DNA, 19 bp, Homo sapiens
  siRNA target sequence for KIAA1608 (NM_024820.1,1319-1337).
gtttattgatggtcgatta

SEQ ID NO: 391099 - DNA, 19 bp, Homo sapiens
  siRNA target sequence for KIAA1608 (NM_024820.1,1330-1348).
gtcgattagatcttctcaa

SEQ ID NO: 391100 - DNA, 19 bp, Homo sapiens
  siRNA target sequence for KIAA1608 (NM_024820.1,1332-1350).
cgattagatcttctcaatt

SEQ ID NO: 391101 - DNA, 19 bp, Homo sapiens
  siRNA target sequence for KIAA1608 (NM_024820.1,1400-1418).
gtacgctggcagtgacaaa

SEQ ID NO: 391102 - DNA, 19 bp, Homo sapiens
  siRNA target sequence for KIAA1608 (NM_024820.1,1405-1423).
ctggcagtgacaaactgta

SEQ ID NO: 391103 - DNA, 19 bp, Homo sapiens
  siRNA target sequence for KIAA1608 (NM_024820.1,1453-1471).
gaagtggagcaattctgaa

SEQ ID NO: 391104 - DNA, 19 bp, Homo sapiens
  siRNA target sequence for KIAA1608 (NM_024820.1,1511-1529).
ctacaagttcgcaaaagat

SEQ ID NO: 391105 - DNA, 19 bp, Homo sapiens
  siRNA target sequence for KIAA1608 (NM_024820.1,1514-1532).
caagttcgcaaaagatcat

SEQ ID NO: 391106 - DNA, 19 bp, Homo sapiens
  siRNA target sequence for KIAA1608 (NM_024820.1,1530-1548).
catgcaaaaatgggaataa

SEQ ID NO: 391107 - DNA, 19 bp, Homo sapiens
  siRNA target sequence for KIAA1608 (NM_024820.1,1719-1737).
cctcgtccacatgttgtta

SEQ ID NO: 391108 - DNA, 19 bp, Homo sapiens
  siRNA target sequence for KIAA1608 (NM_024820.1,1722-1740).
cgtccacatgttgttaaga

SEQ ID NO: 391109 - DNA, 19 bp, Homo sapiens
  siRNA target sequence for KIAA1608 (NM_024820.1,1822-1840).
cactccacatcctacagaa

SEQ ID NO: 391110 - DNA, 19 bp, Homo sapiens
  siRNA target sequence for FLJ22349 (NM_024821.1,472-490).
cgaggattgtgcactatta

SEQ ID NO: 391111 - DNA, 19 bp, Homo sapiens
  siRNA target sequence for FLJ22349 (NM_024821.1,525-543).
cgctggggtatcagtttct

SEQ ID NO: 391112 - DNA, 19 bp, Homo sapiens
  siRNA target sequence for FLJ22349 (NM_024821.1,656-674).
cgaccgcacagagttcatt

SEQ ID NO: 391113 - DNA, 19 bp, Homo sapiens
  siRNA target sequence for FLJ23447 (NM_024825.2,471-489).
gagtgttcccggacaacat

SEQ ID NO: 391114 - DNA, 19 bp, Homo sapiens
  siRNA target sequence for FLJ23447 (NM_024825.2,473-491).
gtgttcccggacaacatca

SEQ ID NO: 391115 - DNA, 19 bp, Homo sapiens
  siRNA target sequence for FLJ23447 (NM_024825.2,532-550).
ccaggaactcccctacaat

SEQ ID NO: 391116 - DNA, 19 bp, Homo sapiens
  siRNA target sequence for FLJ23447 (NM_024825.2,1203-1221).
cgcgtggtctgcgctattt

SEQ ID NO: 391117 - DNA, 19 bp, Homo sapiens
  siRNA target sequence for FLJ23447 (NM_024825.2,1205-1223).
cgtggtctgcgctatttgt

SEQ ID NO: 391118 - DNA, 19 bp, Homo sapiens
  siRNA target sequence for FLJ23447 (NM_024825.2,1206-1224).
gtggtctgcgctatttgtt

SEQ ID NO: 391119 - DNA, 19 bp, Homo sapiens
  siRNA target sequence for FLJ23447 (NM_024825.2,1782-1800).
gccacgtcccaaacattct

SEQ ID NO: 391120 - DNA, 19 bp, Homo sapiens
  siRNA target sequence for FLJ23447 (NM_024825.2,1786-1804).
cgtcccaaacattctagtt

SEQ ID NO: 391121 - DNA, 19 bp, Homo sapiens
  siRNA target sequence for FLJ21159 (NM_024826.1,285-303).
caccactttggcatataca

SEQ ID NO: 391122 - DNA, 19 bp, Homo sapiens
  siRNA target sequence for FLJ21159 (NM_024826.1,287-305).
ccactttggcatatacaaa

SEQ ID NO: 391123 - DNA, 19 bp, Homo sapiens
  siRNA target sequence for FLJ21159 (NM_024826.1,306-324).
gagtccaaaagttaccaaa

SEQ ID NO: 391124 - DNA, 19 bp, Homo sapiens
  siRNA target sequence for FLJ21159 (NM_024826.1,316-334).
gttaccaaaagaactactt

SEQ ID NO: 391125 - DNA, 19 bp, Homo sapiens
  siRNA target sequence for FLJ21159 (NM_024826.1,332-350).
ctttccaggatgagctaat

SEQ ID NO: 391126 - DNA, 19 bp, Homo sapiens
  siRNA target sequence for FLJ21159 (NM_024826.1,364-382).
gctcgctcagccagacaaa

SEQ ID NO: 391127 - DNA, 19 bp, Homo sapiens
  siRNA target sequence for FLJ21159 (NM_024826.1,377-395).
gacaaaggagttctgaata

SEQ ID NO: 391128 - DNA, 19 bp, Homo sapiens
  siRNA target sequence for FLJ21159 (NM_024826.1,379-397).
caaaggagttctgaatact

SEQ ID NO: 391129 - DNA, 19 bp, Homo sapiens
  siRNA target sequence for FLJ21159 (NM_024826.1,529-547).
ctattgtttttgaaaacca

SEQ ID NO: 391130 - DNA, 19 bp, Homo sapiens
  siRNA target sequence for FLJ21159 (NM_024826.1,554-572).
caaacggtaacataaccaa

SEQ ID NO: 391131 - DNA, 19 bp, Homo sapiens
  siRNA target sequence for FLJ21159 (NM_024826.1,558-576).
cggtaacataaccaaagat

SEQ ID NO: 391132 - DNA, 19 bp, Homo sapiens
  siRNA target sequence for FLJ21159 (NM_024826.1,581-599).
cagtgtgtgccatcaaaaa

SEQ ID NO: 391133 - DNA, 19 bp, Homo sapiens
  siRNA target sequence for FLJ21159 (NM_024826.1,713-731).
ccagaattctttcaattaa

SEQ ID NO: 391134 - DNA, 19 bp, Homo sapiens
  siRNA target sequence for FLJ21159 (NM_024826.1,734-752).
gcacatcttcagcagaaaa

SEQ ID NO: 391135 - DNA, 19 bp, Homo sapiens
  siRNA target sequence for FLJ21159 (NM_024826.1,911-929).
cgccgaatggcatacaatt

SEQ ID NO: 391136 - DNA, 19 bp, Homo sapiens
  siRNA target sequence for FLJ21159 (NM_024826.1,912-930).
gccgaatggcatacaatta

SEQ ID NO: 391137 - DNA, 19 bp, Homo sapiens
  siRNA target sequence for FLJ21159 (NM_024826.1,914-932).
cgaatggcatacaattaga

SEQ ID NO: 391138 - DNA, 19 bp, Homo sapiens
  siRNA target sequence for FLJ21159 (NM_024826.1,961-979).
cttgatcctgaggattcat

SEQ ID NO: 391139 - DNA, 19 bp, Homo sapiens
  siRNA target sequence for FLJ21159 (NM_024826.1,970-988).
gaggattcatgcttaacaa

SEQ ID NO: 391140 - DNA, 19 bp, Homo sapiens
  siRNA target sequence for FLJ21159 (NM_024826.1,1047-1065).
gggaaacgcatctggaaaa

SEQ ID NO: 391141 - DNA, 19 bp, Homo sapiens
  siRNA target sequence for FLJ21159 (NM_024826.1,1066-1084).
gatccaaatgaagaaatca

SEQ ID NO: 391142 - DNA, 19 bp, Homo sapiens
  siRNA target sequence for FLJ21159 (NM_024826.1,1164-1182).
gaaatccaaggaaagtcaa

SEQ ID NO: 391143 - DNA, 19 bp, Homo sapiens
  siRNA target sequence for FLJ21159 (NM_024826.1,1213-1231).
gcaaaagcggaactgatta

SEQ ID NO: 391144 - DNA, 19 bp, Homo sapiens
  siRNA target sequence for FLJ21159 (NM_024826.1,1214-1232).
caaaagcggaactgattat

SEQ ID NO: 391145 - DNA, 19 bp, Homo sapiens
  siRNA target sequence for FLJ21159 (NM_024826.1,1249-1267).
gttgatccactactatcta

SEQ ID NO: 391146 - DNA, 19 bp, Homo sapiens
  siRNA target sequence for FLJ21159 (NM_024826.1,1252-1270).
gatccactactatctaaat

SEQ ID NO: 391147 - DNA, 19 bp, Homo sapiens
  siRNA target sequence for FLJ21159 (NM_024826.1,1273-1291).
cagagtatcttaatatcta

SEQ ID NO: 391148 - DNA, 19 bp, Homo sapiens
  siRNA target sequence for FLJ21159 (NM_024826.1,1295-1313).
gtgcaacagcatcttcaaa

SEQ ID NO: 391149 - DNA, 19 bp, Homo sapiens
  siRNA target sequence for FLJ21159 (NM_024826.1,1319-1337).
caattgaagatagaaatat

SEQ ID NO: 391150 - DNA, 19 bp, Homo sapiens
  siRNA target sequence for FLJ13657 (NM_024828.1,112-130).
gagaaacggcgcaaacgta

SEQ ID NO: 391151 - DNA, 19 bp, Homo sapiens
  siRNA target sequence for FLJ13657 (NM_024828.1,248-266).
gctgtgggaacgccaattt

SEQ ID NO: 391152 - DNA, 19 bp, Homo sapiens
  siRNA target sequence for FLJ13657 (NM_024828.1,249-267).
ctgtgggaacgccaatttt

SEQ ID NO: 391153 - DNA, 19 bp, Homo sapiens
  siRNA target sequence for FLJ13657 (NM_024828.1,469-487).
gacctgactgtgtcattga

SEQ ID NO: 391154 - DNA, 19 bp, Homo sapiens
  siRNA target sequence for FLJ13657 (NM_024828.1,480-498).
gtcattgaaaccagttagt

SEQ ID NO: 391155 - DNA, 19 bp, Homo sapiens
  siRNA target sequence for FLJ13657 (NM_024828.1,529-547).
cagcagtgcttctgtatta

SEQ ID NO: 391156 - DNA, 19 bp, Homo sapiens
  siRNA target sequence for FLJ13657 (NM_024828.1,782-800).
ccgtgagagagaataagca

SEQ ID NO: 391157 - DNA, 19 bp, Homo sapiens
  siRNA target sequence for FLJ13657 (NM_024828.1,783-801).
cgtgagagagaataagcaa

SEQ ID NO: 391158 - DNA, 19 bp, Homo sapiens
  siRNA target sequence for FLJ13657 (NM_024828.1,799-817).
caacctgaaggtttggaat

SEQ ID NO: 391159 - DNA, 19 bp, Homo sapiens
  siRNA target sequence for FLJ13657 (NM_024828.1,802-820).
cctgaaggtttggaattaa

SEQ ID NO: 391160 - DNA, 19 bp, Homo sapiens
  siRNA target sequence for FLJ13657 (NM_024828.1,842-860).
gtgatgtactcagtataaa

SEQ ID NO: 391161 - DNA, 19 bp, Homo sapiens
  siRNA target sequence for FLJ13657 (NM_024828.1,869-887).
cttatgacagcgacataga

SEQ ID NO: 391162 - DNA, 19 bp, Homo sapiens
  siRNA target sequence for FLJ13657 (NM_024828.1,914-932).
ctcccgaggcaccagaaaa

SEQ ID NO: 391163 - DNA, 19 bp, Homo sapiens
  siRNA target sequence for FLJ13657 (NM_024828.1,916-934).
cccgaggcaccagaaaata

SEQ ID NO: 391164 - DNA, 19 bp, Homo sapiens
  siRNA target sequence for FLJ13657 (NM_024828.1,1116-1134).
gagggcaagagcgattaaa

SEQ ID NO: 391165 - DNA, 19 bp, Homo sapiens
  siRNA target sequence for FLJ13657 (NM_024828.1,1126-1144).
gcgattaaagccctaatga

SEQ ID NO: 391166 - DNA, 19 bp, Homo sapiens
  siRNA target sequence for FLJ13657 (NM_024828.1,1127-1145).
cgattaaagccctaatgaa

SEQ ID NO: 391167 - DNA, 19 bp, Homo sapiens
  siRNA target sequence for FLJ22662 (NM_024829.1,115-133).
gggacgcctatggctttta

SEQ ID NO: 391168 - DNA, 19 bp, Homo sapiens
  siRNA target sequence for FLJ22662 (NM_024829.1,117-135).
gacgcctatggcttttaca

SEQ ID NO: 391169 - DNA, 19 bp, Homo sapiens
  siRNA target sequence for FLJ22662 (NM_024829.1,119-137).
cgcctatggcttttacaat

SEQ ID NO: 391170 - DNA, 19 bp, Homo sapiens
  siRNA target sequence for FLJ22662 (NM_024829.1,120-138).
gcctatggcttttacaata

SEQ ID NO: 391171 - DNA, 19 bp, Homo sapiens
  siRNA target sequence for FLJ22662 (NM_024829.1,180-198).
gctggctatggctctcaaa

SEQ ID NO: 391172 - DNA, 19 bp, Homo sapiens
  siRNA target sequence for FLJ22662 (NM_024829.1,195-213).
caaaccctgagcaatgaga

SEQ ID NO: 391173 - DNA, 19 bp, Homo sapiens
  siRNA target sequence for FLJ22662 (NM_024829.1,251-269).
cactgccccacacatgaat

SEQ ID NO: 391174 - DNA, 19 bp, Homo sapiens
  siRNA target sequence for FLJ22662 (NM_024829.1,253-271).
ctgccccacacatgaatga

SEQ ID NO: 391175 - DNA, 19 bp, Homo sapiens
  siRNA target sequence for FLJ22662 (NM_024829.1,294-312).
cagctgatcacgaaacctt

SEQ ID NO: 391176 - DNA, 19 bp, Homo sapiens
  siRNA target sequence for FLJ22662 (NM_024829.1,320-338).
ggataaagtgcaggatttt

SEQ ID NO: 391177 - DNA, 19 bp, Homo sapiens
  siRNA target sequence for FLJ22662 (NM_024829.1,403-421).
gacatacaggctatgtgat

SEQ ID NO: 391178 - DNA, 19 bp, Homo sapiens
  siRNA target sequence for FLJ22662 (NM_024829.1,412-430).
gctatgtgatggcacaaat

SEQ ID NO: 391179 - DNA, 19 bp, Homo sapiens
  siRNA target sequence for FLJ22662 (NM_024829.1,413-431).
ctatgtgatggcacaaata

SEQ ID NO: 391180 - DNA, 19 bp, Homo sapiens
  siRNA target sequence for FLJ22662 (NM_024829.1,523-541).
gagatctattggatctgat

SEQ ID NO: 391181 - DNA, 19 bp, Homo sapiens
  siRNA target sequence for FLJ22662 (NM_024829.1,566-584).
cggcagcctaaaggttttt

SEQ ID NO: 391182 - DNA, 19 bp, Homo sapiens
  siRNA target sequence for FLJ22662 (NM_024829.1,568-586).
gcagcctaaaggtttttaa

SEQ ID NO: 391183 - DNA, 19 bp, Homo sapiens
  siRNA target sequence for FLJ22662 (NM_024829.1,572-590).
cctaaaggtttttaagaga

SEQ ID NO: 391184 - DNA, 19 bp, Homo sapiens
  siRNA target sequence for FLJ22662 (NM_024829.1,573-591).
ctaaaggtttttaagagat

SEQ ID NO: 391185 - DNA, 19 bp, Homo sapiens
  siRNA target sequence for FLJ22662 (NM_024829.1,601-619).
gacattgctccgctcttat

SEQ ID NO: 391186 - DNA, 19 bp, Homo sapiens
  siRNA target sequence for FLJ22662 (NM_024829.1,603-621).
cattgctccgctcttatca

SEQ ID NO: 391187 - DNA, 19 bp, Homo sapiens
  siRNA target sequence for FLJ22662 (NM_024829.1,620-638).
caaggttcttcctggattt

SEQ ID NO: 391188 - DNA, 19 bp, Homo sapiens
  siRNA target sequence for FLJ22662 (NM_024829.1,683-701).
catgctcaggatatataaa

SEQ ID NO: 391189 - DNA, 19 bp, Homo sapiens
  siRNA target sequence for FLJ22662 (NM_024829.1,736-754).
gcagtagtcgcctctcttt

SEQ ID NO: 391190 - DNA, 19 bp, Homo sapiens
  siRNA target sequence for FLJ22662 (NM_024829.1,777-795).
gagtctctggatgattttt

SEQ ID NO: 391191 - DNA, 19 bp, Homo sapiens
  siRNA target sequence for FLJ22662 (NM_024829.1,801-819).
cttagcagtggattgatat

SEQ ID NO: 391192 - DNA, 19 bp, Homo sapiens
  siRNA target sequence for FLJ22662 (NM_024829.1,805-823).
gcagtggattgatattgct

SEQ ID NO: 391193 - DNA, 19 bp, Homo sapiens
  siRNA target sequence for FLJ22662 (NM_024829.1,854-872).
cctgctaaagcaggtaata

SEQ ID NO: 391194 - DNA, 19 bp, Homo sapiens
  siRNA target sequence for FLJ22662 (NM_024829.1,898-916).
gagtccgtgtggccaatat

SEQ ID NO: 391195 - DNA, 19 bp, Homo sapiens
  siRNA target sequence for FLJ22662 (NM_024829.1,900-918).
gtccgtgtggccaatatga

SEQ ID NO: 391196 - DNA, 19 bp, Homo sapiens
  siRNA target sequence for FLJ22662 (NM_024829.1,911-929).
caatatgatggcagatagt

SEQ ID NO: 391197 - DNA, 19 bp, Homo sapiens
  siRNA target sequence for FLJ22662 (NM_024829.1,935-953).
gaggtgggcagacatcttt

SEQ ID NO: 391198 - DNA, 19 bp, Homo sapiens
  siRNA target sequence for FLJ22662 (NM_024829.1,967-985).
ctggcacctataacaatca

SEQ ID NO: 391199 - DNA, 19 bp, Homo sapiens
  siRNA target sequence for FLJ22662 (NM_024829.1,969-987).
ggcacctataacaatcaat

SEQ ID NO: 391200 - DNA, 19 bp, Homo sapiens
  siRNA target sequence for FLJ22662 (NM_024829.1,970-988).
gcacctataacaatcaata

SEQ ID NO: 391201 - DNA, 19 bp, Homo sapiens
  siRNA target sequence for FLJ22662 (NM_024829.1,973-991).
cctataacaatcaatacat

SEQ ID NO: 391202 - DNA, 19 bp, Homo sapiens
  siRNA target sequence for FLJ22662 (NM_024829.1,1046-1064).
gtacattgtggagcaaatt

SEQ ID NO: 391203 - DNA, 19 bp, Homo sapiens
  siRNA target sequence for FLJ22662 (NM_024829.1,1055-1073).
ggagcaaattcctacatat

SEQ ID NO: 391204 - DNA, 19 bp, Homo sapiens
  siRNA target sequence for FLJ22662 (NM_024829.1,1058-1076).
gcaaattcctacatatgta

SEQ ID NO: 391205 - DNA, 19 bp, Homo sapiens
  siRNA target sequence for FLJ22662 (NM_024829.1,1084-1102).
ctgaacaaactgatgttct

SEQ ID NO: 391206 - DNA, 19 bp, Homo sapiens
  siRNA target sequence for FLJ22662 (NM_024829.1,1095-1113).
gatgttctacggaaaggat

SEQ ID NO: 391207 - DNA, 19 bp, Homo sapiens
  siRNA target sequence for FLJ22662 (NM_024829.1,1160-1178).
gagtggctatccactgtta

SEQ ID NO: 391208 - DNA, 19 bp, Homo sapiens
  siRNA target sequence for FLJ22662 (NM_024829.1,1162-1180).
gtggctatccactgttagt

SEQ ID NO: 391209 - DNA, 19 bp, Homo sapiens
  siRNA target sequence for FLJ22662 (NM_024829.1,1192-1210).
gcttggactactcttatga

SEQ ID NO: 391210 - DNA, 19 bp, Homo sapiens
  siRNA target sequence for FLJ22662 (NM_024829.1,1199-1217).
ctactcttatgatttagct

SEQ ID NO: 391211 - DNA, 19 bp, Homo sapiens
  siRNA target sequence for FLJ22662 (NM_024829.1,1216-1234).
ctccacgagccaaaatttt

SEQ ID NO: 391212 - DNA, 19 bp, Homo sapiens
  siRNA target sequence for FLJ22662 (NM_024829.1,1239-1257).
cgtgaccaagggaaagtga

SEQ ID NO: 391213 - DNA, 19 bp, Homo sapiens
  siRNA target sequence for FLJ22662 (NM_024829.1,1245-1263).
caagggaaagtgactgata

SEQ ID NO: 391214 - DNA, 19 bp, Homo sapiens
  siRNA target sequence for FLJ22662 (NM_024829.1,1260-1278).
gatacggcatccatgaaat

SEQ ID NO: 391215 - DNA, 19 bp, Homo sapiens
  siRNA target sequence for FLJ22662 (NM_024829.1,1264-1282).
cggcatccatgaaatatat

SEQ ID NO: 391216 - DNA, 19 bp, Homo sapiens
  siRNA target sequence for FLJ22662 (NM_024829.1,1266-1284).
gcatccatgaaatatatca

SEQ ID NO: 391217 - DNA, 19 bp, Homo sapiens
  siRNA target sequence for FLJ22662 (NM_024829.1,1287-1305).
cgatacaacaattataaga

SEQ ID NO: 391218 - DNA, 19 bp, Homo sapiens
  siRNA target sequence for FLJ22662 (NM_024829.1,1324-1342).
gtgacccctgtaataccat

SEQ ID NO: 391219 - DNA, 19 bp, Homo sapiens
  siRNA target sequence for FLJ22662 (NM_024829.1,1375-1393).
caagtcctggaggttgtta

SEQ ID NO: 391220 - DNA, 19 bp, Homo sapiens
  siRNA target sequence for FLJ22662 (NM_024829.1,1384-1402).
gaggttgttatgacacaaa

SEQ ID NO: 391221 - DNA, 19 bp, Homo sapiens
  siRNA target sequence for FLJ22662 (NM_024829.1,1485-1503).
cgctgggaccgtttcaaca

SEQ ID NO: 391222 - DNA, 19 bp, Homo sapiens
  siRNA target sequence for FLJ22662 (NM_024829.1,1487-1505).
ctgggaccgtttcaacaaa

SEQ ID NO: 391223 - DNA, 19 bp, Homo sapiens
  siRNA target sequence for FLJ22662 (NM_024829.1,1493-1511).
ccgtttcaacaaaactcta

SEQ ID NO: 391224 - DNA, 19 bp, Homo sapiens
  siRNA target sequence for FLJ13081 (NM_024834.1,208-226).
gaatcgtgcagggattctt

SEQ ID NO: 391225 - DNA, 19 bp, Homo sapiens
  siRNA target sequence for FLJ13081 (NM_024834.1,218-236).
gggattcttcgcccaaaat

SEQ ID NO: 391226 - DNA, 19 bp, Homo sapiens
  siRNA target sequence for FLJ13081 (NM_024834.1,227-245).
cgcccaaaatggagttaat

SEQ ID NO: 391227 - DNA, 19 bp, Homo sapiens
  siRNA target sequence for FLJ13081 (NM_024834.1,230-248).
ccaaaatggagttaatcct

SEQ ID NO: 391228 - DNA, 19 bp, Homo sapiens
  siRNA target sequence for FLJ13081 (NM_024834.1,333-351).
gttccccttcattatttga

SEQ ID NO: 391229 - DNA, 19 bp, Homo sapiens
  siRNA target sequence for FLJ13081 (NM_024834.1,339-357).
cttcattatttgaaaccta

SEQ ID NO: 391230 - DNA, 19 bp, Homo sapiens
  siRNA target sequence for FLJ13081 (NM_024834.1,368-386).
gaaatttcgttgcatgatt

SEQ ID NO: 391231 - DNA, 19 bp, Homo sapiens
  siRNA target sequence for FLJ13081 (NM_024834.1,379-397).
gcatgattcaggatatgtt

SEQ ID NO: 391232 - DNA, 19 bp, Homo sapiens
  siRNA target sequence for FLJ13081 (NM_024834.1,380-398).
catgattcaggatatgttt

SEQ ID NO: 391233 - DNA, 19 bp, Homo sapiens
  siRNA target sequence for FLJ13081 (NM_024834.1,426-444).
gaaacggttaaccaaaaca

SEQ ID NO: 391234 - DNA, 19 bp, Homo sapiens
  siRNA target sequence for FLJ13081 (NM_024834.1,497-515).
gcctcaacaagaacttgat

SEQ ID NO: 391235 - DNA, 19 bp, Homo sapiens
  siRNA target sequence for FLJ13081 (NM_024834.1,528-546).
cgaaataccactttggaaa

SEQ ID NO: 391236 - DNA, 19 bp, Homo sapiens
  siRNA target sequence for FLJ13081 (NM_024834.1,567-585).
ccggtgcctggggaatcta

SEQ ID NO: 391237 - DNA, 19 bp, Homo sapiens
  siRNA target sequence for FLJ13081 (NM_024834.1,578-596).
ggaatctacgtgggtaaaa

SEQ ID NO: 391238 - DNA, 19 bp, Homo sapiens
  siRNA target sequence for FLJ13081 (NM_024834.1,658-676).
gccacaagaggagttatga

SEQ ID NO: 391239 - DNA, 19 bp, Homo sapiens
  siRNA target sequence for FLJ13081 (NM_024834.1,659-677).
ccacaagaggagttatgaa

SEQ ID NO: 391240 - DNA, 19 bp, Homo sapiens
  siRNA target sequence for FLJ13081 (NM_024834.1,746-764).
gagtgttggtggtcttcaa

SEQ ID NO: 391241 - DNA, 19 bp, Homo sapiens
  siRNA target sequence for FLJ13081 (NM_024834.1,767-785).
gtgtggagagccaaaacgt

SEQ ID NO: 391242 - DNA, 19 bp, Homo sapiens
  siRNA target sequence for FLJ13081 (NM_024834.1,769-787).
gtggagagccaaaacgttt

SEQ ID NO: 391243 - DNA, 19 bp, Homo sapiens
  siRNA target sequence for FLJ13081 (NM_024834.1,886-904).
gccttgtgaaggtttatga

SEQ ID NO: 391244 - DNA, 19 bp, Homo sapiens
  siRNA target sequence for FLJ13081 (NM_024834.1,903-921).
gaagattgggattgtttca

SEQ ID NO: 391245 - DNA, 19 bp, Homo sapiens
  siRNA target sequence for FLJ13081 (NM_024834.1,911-929).
ggattgtttcaaagtaaat

SEQ ID NO: 391246 - DNA, 19 bp, Homo sapiens
  siRNA target sequence for FLJ13081 (NM_024834.1,939-957).
gagctatatggcatactgt

SEQ ID NO: 391247 - DNA, 19 bp, Homo sapiens
  siRNA target sequence for FLJ13081 (NM_024834.1,969-987).
gtgctgagtatactgaata

SEQ ID NO: 391248 - DNA, 19 bp, Homo sapiens
  siRNA target sequence for FLJ13081 (NM_024834.1,971-989).
gctgagtatactgaataat

SEQ ID NO: 391249 - DNA, 19 bp, Homo sapiens
  siRNA target sequence for FLJ13081 (NM_024834.1,974-992).
gagtatactgaataatgat

SEQ ID NO: 391250 - DNA, 19 bp, Homo sapiens
  siRNA target sequence for FLJ13081 (NM_024834.1,1063-1081).
gtcctcctgcttcattagt

SEQ ID NO: 391251 - DNA, 19 bp, Homo sapiens
  siRNA target sequence for FLJ13081 (NM_024834.1,1075-1093).
cattagtgccgagaattca

SEQ ID NO: 391252 - DNA, 19 bp, Homo sapiens
  siRNA target sequence for FLJ13081 (NM_024834.1,1084-1102).
cgagaattcatgtgatctt

SEQ ID NO: 391253 - DNA, 19 bp, Homo sapiens
  siRNA target sequence for FLJ13081 (NM_024834.1,1116-1134).
caacacatcaacccattat

SEQ ID NO: 391254 - DNA, 19 bp, Homo sapiens
  siRNA target sequence for FLJ13081 (NM_024834.1,1162-1180).
gcaaaacctgtaagtttgt

SEQ ID NO: 391255 - DNA, 19 bp, Homo sapiens
  siRNA target sequence for FLJ13081 (NM_024834.1,1163-1181).
caaaacctgtaagtttgtt

SEQ ID NO: 391256 - DNA, 19 bp, Homo sapiens
  siRNA target sequence for FLJ13081 (NM_024834.1,1218-1236).
gaacttcttgggttcctta

SEQ ID NO: 391257 - DNA, 19 bp, Homo sapiens
  siRNA target sequence for FLJ13081 (NM_024834.1,1242-1260).
gcccttctgggggatagtt

SEQ ID NO: 391258 - DNA, 19 bp, Homo sapiens
  siRNA target sequence for FLJ13081 (NM_024834.1,1243-1261).
cccttctgggggatagttt

SEQ ID NO: 391259 - DNA, 19 bp, Homo sapiens
  siRNA target sequence for FLJ13081 (NM_024834.1,1287-1305).
ctcatctccacagtatata

SEQ ID NO: 391260 - DNA, 19 bp, Homo sapiens
  siRNA target sequence for FLJ13081 (NM_024834.1,1320-1338).
cttccactaggaaaattta

SEQ ID NO: 391261 - DNA, 19 bp, Homo sapiens
  siRNA target sequence for FLJ13081 (NM_024834.1,1353-1371).
ggttgcccacggaatagta

SEQ ID NO: 391262 - DNA, 19 bp, Homo sapiens
  siRNA target sequence for FLJ13081 (NM_024834.1,1369-1387).
gtaccttcacagaacactt

SEQ ID NO: 391263 - DNA, 19 bp, Homo sapiens
  siRNA target sequence for FLJ13081 (NM_024834.1,1372-1390).
ccttcacagaacacttgta

SEQ ID NO: 391264 - DNA, 19 bp, Homo sapiens
  siRNA target sequence for FLJ13081 (NM_024834.1,1373-1391).
cttcacagaacacttgtat

SEQ ID NO: 391265 - DNA, 19 bp, Homo sapiens
  siRNA target sequence for FLJ13081 (NM_024834.1,1378-1396).
cagaacacttgtatcgaat

SEQ ID NO: 391266 - DNA, 19 bp, Homo sapiens
  siRNA target sequence for FLJ13081 (NM_024834.1,1380-1398).
gaacacttgtatcgaatta

SEQ ID NO: 391267 - DNA, 19 bp, Homo sapiens
  siRNA target sequence for FLJ13081 (NM_024834.1,1385-1403).
cttgtatcgaattattcaa

SEQ ID NO: 391268 - DNA, 19 bp, Homo sapiens
  siRNA target sequence for FLJ13081 (NM_024834.1,1388-1406).
gtatcgaattattcaacat

SEQ ID NO: 391269 - DNA, 19 bp, Homo sapiens
  siRNA target sequence for FLJ13081 (NM_024834.1,1512-1530).
ctccagctgcccagcaata

SEQ ID NO: 391270 - DNA, 19 bp, Homo sapiens
  siRNA target sequence for FLJ13081 (NM_024834.1,1525-1543).
gcaatacttcccttgtaat

SEQ ID NO: 391271 - DNA, 19 bp, Homo sapiens
  siRNA target sequence for FLJ13081 (NM_024834.1,1574-1592).
ggataccccaggtgttcat

SEQ ID NO: 391272 - DNA, 19 bp, Homo sapiens
  siRNA target sequence for FLJ13081 (NM_024834.1,1575-1593).
gataccccaggtgttcata

SEQ ID NO: 391273 - DNA, 19 bp, Homo sapiens
  siRNA target sequence for FLJ13081 (NM_024834.1,1602-1620).
gccctgagcaacctcataa

SEQ ID NO: 391274 - DNA, 19 bp, Homo sapiens
  siRNA target sequence for FLJ13081 (NM_024834.1,1626-1644).
cagaaggtggattatgact

SEQ ID NO: 391275 - DNA, 19 bp, Homo sapiens
  siRNA target sequence for FLJ13081 (NM_024834.1,1668-1686).
ccctgcaatattaacgttt

SEQ ID NO: 391276 - DNA, 19 bp, Homo sapiens
  siRNA target sequence for FLJ13081 (NM_024834.1,1669-1687).
cctgcaatattaacgtttt

SEQ ID NO: 391277 - DNA, 19 bp, Homo sapiens
  siRNA target sequence for FLJ13081 (NM_024834.1,1672-1690).
gcaatattaacgttttcat

SEQ ID NO: 391278 - DNA, 19 bp, Homo sapiens
  siRNA target sequence for FLJ13081 (NM_024834.1,1673-1691).
caatattaacgttttcatt

SEQ ID NO: 391279 - DNA, 19 bp, Homo sapiens
  siRNA target sequence for FLJ13081 (NM_024834.1,1759-1777).
caaacatggaggagtacat

SEQ ID NO: 391280 - DNA, 19 bp, Homo sapiens
  siRNA target sequence for FLJ13081 (NM_024834.1,1817-1835).
caaattccgcatttatcta

SEQ ID NO: 391281 - DNA, 19 bp, Homo sapiens
  siRNA target sequence for FLJ13081 (NM_024834.1,1823-1841).
ccgcatttatctaactctt

SEQ ID NO: 391282 - DNA, 19 bp, Homo sapiens
  siRNA target sequence for FLJ13081 (NM_024834.1,1833-1851).
ctaactcttttgagattct

SEQ ID NO: 391283 - DNA, 19 bp, Homo sapiens
  siRNA target sequence for FLJ13081 (NM_024834.1,1853-1871).
ggaatatagcatatctgat

SEQ ID NO: 391284 - DNA, 19 bp, Homo sapiens
  siRNA target sequence for FLJ13081 (NM_024834.1,1930-1948).
gcatcactgctgatgatct

SEQ ID NO: 391285 - DNA, 19 bp, Homo sapiens
  siRNA target sequence for FLJ13081 (NM_024834.1,1997-2015).
gacaacgctgtcaagagaa

SEQ ID NO: 391286 - DNA, 19 bp, Homo sapiens
  siRNA target sequence for FLJ13081 (NM_024834.1,2029-2047).
caaagcagctagagtcttt

SEQ ID NO: 391287 - DNA, 19 bp, Homo sapiens
  siRNA target sequence for FLJ13081 (NM_024834.1,2034-2052).
cagctagagtctttaagaa

SEQ ID NO: 391288 - DNA, 19 bp, Homo sapiens
  siRNA target sequence for FLJ13081 (NM_024834.1,2060-2078).
gcttcagcagcaaaaatgt

SEQ ID NO: 391289 - DNA, 19 bp, Homo sapiens
  siRNA target sequence for LZK1 (NM_024835.1,106-124).
ggcagattcccctctacat

SEQ ID NO: 391290 - DNA, 19 bp, Homo sapiens
  siRNA target sequence for LZK1 (NM_024835.1,150-168).
gaatttcctgataatgtgt

SEQ ID NO: 391291 - DNA, 19 bp, Homo sapiens
  siRNA target sequence for LZK1 (NM_024835.1,157-175).
ctgataatgtgttaaatct

SEQ ID NO: 391292 - DNA, 19 bp, Homo sapiens
  siRNA target sequence for LZK1 (NM_024835.1,176-194).
cgatggacatcagaataat

SEQ ID NO: 391293 - DNA, 19 bp, Homo sapiens
  siRNA target sequence for LZK1 (NM_024835.1,219-237).
cagcgacatggtatgctta

SEQ ID NO: 391294 - DNA, 19 bp, Homo sapiens
  siRNA target sequence for LZK1 (NM_024835.1,223-241).
gacatggtatgcttaagca

SEQ ID NO: 391295 - DNA, 19 bp, Homo sapiens
  siRNA target sequence for LZK1 (NM_024835.1,239-257).
gcaacaggatctaagtatt

SEQ ID NO: 391296 - DNA, 19 bp, Homo sapiens
  siRNA target sequence for LZK1 (NM_024835.1,353-371).
gcttgtagagtctggaaat

SEQ ID NO: 391297 - DNA, 19 bp, Homo sapiens
  siRNA target sequence for LZK1 (NM_024835.1,376-394).
ctcttgaacccctaacagt

SEQ ID NO: 391298 - DNA, 19 bp, Homo sapiens
  siRNA target sequence for LZK1 (NM_024835.1,404-422).
gggagtcctgtctgtaact

SEQ ID NO: 391299 - DNA, 19 bp, Homo sapiens
  siRNA target sequence for LZK1 (NM_024835.1,468-486).
gtacatgggtccaaactaa

SEQ ID NO: 391300 - DNA, 19 bp, Homo sapiens
  siRNA target sequence for LZK1 (NM_024835.1,494-512).
gatagatgctattccaaaa

SEQ ID NO: 391301 - DNA, 19 bp, Homo sapiens
  siRNA target sequence for LZK1 (NM_024835.1,501-519).
gctattccaaaaagtaaga

SEQ ID NO: 391302 - DNA, 19 bp, Homo sapiens
  siRNA target sequence for LZK1 (NM_024835.1,588-606).
gatgtatgggaactaatgt

SEQ ID NO: 391303 - DNA, 19 bp, Homo sapiens
  siRNA target sequence for LZK1 (NM_024835.1,641-659).
ctcgagttgtcttttagaa

SEQ ID NO: 391304 - DNA, 19 bp, Homo sapiens
  siRNA target sequence for LZK1 (NM_024835.1,675-693).
ctgcgaaaacacaggtttt

SEQ ID NO: 391305 - DNA, 19 bp, Homo sapiens
  siRNA target sequence for LZK1 (NM_024835.1,678-696).
cgaaaacacaggttttgca

SEQ ID NO: 391306 - DNA, 19 bp, Homo sapiens
  siRNA target sequence for LZK1 (NM_024835.1,688-706).
ggttttgcactgattgcaa

SEQ ID NO: 391307 - DNA, 19 bp, Homo sapiens
  siRNA target sequence for LZK1 (NM_024835.1,719-737).
ccgagcatacaatatcctt

SEQ ID NO: 391308 - DNA, 19 bp, Homo sapiens
  siRNA target sequence for LZK1 (NM_024835.1,720-738).
cgagcatacaatatcctta

SEQ ID NO: 391309 - DNA, 19 bp, Homo sapiens
  siRNA target sequence for LZK1 (NM_024835.1,721-739).
gagcatacaatatccttat

SEQ ID NO: 391310 - DNA, 19 bp, Homo sapiens
  siRNA target sequence for LZK1 (NM_024835.1,769-787).
gctactgtgctgcacttta

SEQ ID NO: 391311 - DNA, 19 bp, Homo sapiens
  siRNA target sequence for LZK1 (NM_024835.1,797-815).
gcggtgctgtccacatgaa

SEQ ID NO: 391312 - DNA, 19 bp, Homo sapiens
  siRNA target sequence for LZK1 (NM_024835.1,904-922).
ggcatgcaaagacaataga

SEQ ID NO: 391313 - DNA, 19 bp, Homo sapiens
  siRNA target sequence for LZK1 (NM_024835.1,1015-1033).
catggcagatgcttttcta

SEQ ID NO: 391314 - DNA, 19 bp, Homo sapiens
  siRNA target sequence for LZK1 (NM_024835.1,1018-1036).
ggcagatgcttttctatct

SEQ ID NO: 391315 - DNA, 19 bp, Homo sapiens
  siRNA target sequence for LZK1 (NM_024835.1,1044-1062).
gatgctttacgcaagagtt

SEQ ID NO: 391316 - DNA, 19 bp, Homo sapiens
  siRNA target sequence for LZK1 (NM_024835.1,1048-1066).
ctttacgcaagagttttga

SEQ ID NO: 391317 - DNA, 19 bp, Homo sapiens
  siRNA target sequence for LZK1 (NM_024835.1,1088-1106).
gggtattagcagattggaa

SEQ ID NO: 391318 - DNA, 19 bp, Homo sapiens
  siRNA target sequence for LZK1 (NM_024835.1,1099-1117).
gattggaacaactttgtga

SEQ ID NO: 391319 - DNA, 19 bp, Homo sapiens
  siRNA target sequence for LZK1 (NM_024835.1,1167-1185).
cgccaaaaacggaagaata

SEQ ID NO: 391320 - DNA, 19 bp, Homo sapiens
  siRNA target sequence for LZK1 (NM_024835.1,1169-1187).
ccaaaaacggaagaataga

SEQ ID NO: 391321 - DNA, 19 bp, Homo sapiens
  siRNA target sequence for LZK1 (NM_024835.1,1324-1342).
cttgtgtagaagtaattgt

SEQ ID NO: 391322 - DNA, 19 bp, Homo sapiens
  siRNA target sequence for LZK1 (NM_024835.1,1371-1389).
cctagcagtggcaatcttt

SEQ ID NO: 391323 - DNA, 19 bp, Homo sapiens
  siRNA target sequence for LZK1 (NM_024835.1,1392-1410).
gggtcccctaaaataaaga

SEQ ID NO: 391324 - DNA, 19 bp, Homo sapiens
  siRNA target sequence for LZK1 (NM_024835.1,1393-1411).
ggtcccctaaaataaagaa

SEQ ID NO: 391325 - DNA, 19 bp, Homo sapiens
  siRNA target sequence for LZK1 (NM_024835.1,1414-1432).
gcttatctccacactgtaa

SEQ ID NO: 391326 - DNA, 19 bp, Homo sapiens
  siRNA target sequence for LZK1 (NM_024835.1,1415-1433).
cttatctccacactgtaat

SEQ ID NO: 391327 - DNA, 19 bp, Homo sapiens
  siRNA target sequence for LZK1 (NM_024835.1,1425-1443).
cactgtaatggtagtgatt

SEQ ID NO: 391328 - DNA, 19 bp, Homo sapiens
  siRNA target sequence for LZK1 (NM_024835.1,1460-1478).
catggaagggagtgaaaca

SEQ ID NO: 391329 - DNA, 19 bp, Homo sapiens
  siRNA target sequence for LZK1 (NM_024835.1,1505-1523).
ctgcactgaaggcatttgt

SEQ ID NO: 391330 - DNA, 19 bp, Homo sapiens
  siRNA target sequence for LZK1 (NM_024835.1,1584-1602).
ggtgatagttgtgttgaat

SEQ ID NO: 391331 - DNA, 19 bp, Homo sapiens
  siRNA target sequence for LZK1 (NM_024835.1,1663-1681).
gcaagatactgaaatgtga

SEQ ID NO: 391332 - DNA, 19 bp, Homo sapiens
  siRNA target sequence for LZK1 (NM_024835.1,1664-1682).
caagatactgaaatgtgat

SEQ ID NO: 391333 - DNA, 19 bp, Homo sapiens
  siRNA target sequence for LZK1 (NM_024835.1,1671-1689).
ctgaaatgtgatgaacata

SEQ ID NO: 391334 - DNA, 19 bp, Homo sapiens
  siRNA target sequence for LZK1 (NM_024835.1,1747-1765).
ccatgcacacagtgtttca

SEQ ID NO: 391335 - DNA, 19 bp, Homo sapiens
  siRNA target sequence for LZK1 (NM_024835.1,1767-1785).
cgtgacaagaccaaagata

SEQ ID NO: 391336 - DNA, 19 bp, Homo sapiens
  siRNA target sequence for LZK1 (NM_024835.1,1772-1790).
caagaccaaagatacacat

SEQ ID NO: 391337 - DNA, 19 bp, Homo sapiens
  siRNA target sequence for LZK1 (NM_024835.1,1834-1852).
cttggtttgagcataggaa

SEQ ID NO: 391338 - DNA, 19 bp, Homo sapiens
  siRNA target sequence for LZK1 (NM_024835.1,1870-1888).
cagaacctacagaaacgtt

SEQ ID NO: 391339 - DNA, 19 bp, Homo sapiens
  siRNA target sequence for LZK1 (NM_024835.1,1912-1930).
gtgccaagagcttagttga

SEQ ID NO: 391340 - DNA, 19 bp, Homo sapiens
  siRNA target sequence for LZK1 (NM_024835.1,1915-1933).
ccaagagcttagttgaact

SEQ ID NO: 391341 - DNA, 19 bp, Homo sapiens
  siRNA target sequence for LZK1 (NM_024835.1,1935-1953).
cttgatgagtctgaatgta

SEQ ID NO: 391342 - DNA, 19 bp, Homo sapiens
  siRNA target sequence for LZK1 (NM_024835.1,1943-1961).
gtctgaatgtacttcagat

SEQ ID NO: 391343 - DNA, 19 bp, Homo sapiens
  siRNA target sequence for LZK1 (NM_024835.1,1959-1977).
gatgaggaaatctttatct

SEQ ID NO: 391344 - DNA, 19 bp, Homo sapiens
  siRNA target sequence for LZK1 (NM_024835.1,2049-2067).
catctgaaggagaaattta

SEQ ID NO: 391345 - DNA, 19 bp, Homo sapiens
  siRNA target sequence for LZK1 (NM_024835.1,2077-2095).
gccggttaaatgatcacaa

SEQ ID NO: 391346 - DNA, 19 bp, Homo sapiens
  siRNA target sequence for LZK1 (NM_024835.1,2091-2109).
cacaagaggcccatttgta

SEQ ID NO: 391347 - DNA, 19 bp, Homo sapiens
  siRNA target sequence for LZK1 (NM_024835.1,2093-2111).
caagaggcccatttgtagt

SEQ ID NO: 391348 - DNA, 19 bp, Homo sapiens
  siRNA target sequence for LZK1 (NM_024835.1,2120-2138).
gacaacggctggagcaaat

SEQ ID NO: 391349 - DNA, 19 bp, Homo sapiens
  siRNA target sequence for FLJ22301 (NM_024836.1,816-834).
cgcttccgttgcctagaat

SEQ ID NO: 391350 - DNA, 19 bp, Homo sapiens
  siRNA target sequence for FLJ22301 (NM_024836.1,943-961).
gccgtcttgacctacactt

SEQ ID NO: 391351 - DNA, 19 bp, Homo sapiens
  siRNA target sequence for FLJ14213 (NM_024841.2,385-403).
ccgtcgagttccacaagat

SEQ ID NO: 391352 - DNA, 19 bp, Homo sapiens
  siRNA target sequence for FLJ14213 (NM_024841.2,420-438).
cctagaccgcgcttcatga

SEQ ID NO: 391353 - DNA, 19 bp, Homo sapiens
  siRNA target sequence for FLJ14213 (NM_024841.2,576-594).
ctctatgccctgaacgaaa

SEQ ID NO: 391354 - DNA, 19 bp, Homo sapiens
  siRNA target sequence for FLJ14213 (NM_024841.2,616-634).
gtgaacttggatcattcat

SEQ ID NO: 391355 - DNA, 19 bp, Homo sapiens
  siRNA target sequence for FLJ14213 (NM_024841.2,618-636).
gaacttggatcattcatta

SEQ ID NO: 391356 - DNA, 19 bp, Homo sapiens
  siRNA target sequence for FLJ14213 (NM_024841.2,738-756).
gtctgggaccacttcttca

SEQ ID NO: 391357 - DNA, 19 bp, Homo sapiens
  siRNA target sequence for FLJ14213 (NM_024841.2,773-791).
cctgcaggcaatattttat

SEQ ID NO: 391358 - DNA, 19 bp, Homo sapiens
  siRNA target sequence for FLJ14213 (NM_024841.2,838-856).
gcttccgagacctagtctt

SEQ ID NO: 391359 - DNA, 19 bp, Homo sapiens
  siRNA target sequence for FLJ14213 (NM_024841.2,960-978).
ggcccaagtgagagttatt

SEQ ID NO: 391360 - DNA, 19 bp, Homo sapiens
  siRNA target sequence for FLJ14213 (NM_024841.2,1097-1115).
ggtgactgtcctgaactat

SEQ ID NO: 391361 - DNA, 19 bp, Homo sapiens
  siRNA target sequence for TMC7 (NM_024847.2,228-246).
cattcccgggacaagcaaa

SEQ ID NO: 391362 - DNA, 19 bp, Homo sapiens
  siRNA target sequence for TMC7 (NM_024847.2,242-260).
gcaaagcggaactttgcta

SEQ ID NO: 391363 - DNA, 19 bp, Homo sapiens
  siRNA target sequence for TMC7 (NM_024847.2,243-261).
caaagcggaactttgctaa

SEQ ID NO: 391364 - DNA, 19 bp, Homo sapiens
  siRNA target sequence for TMC7 (NM_024847.2,316-334).
gcagccattctcttcgaaa

SEQ ID NO: 391365 - DNA, 19 bp, Homo sapiens
  siRNA target sequence for TMC7 (NM_024847.2,317-335).
cagccattctcttcgaaat

SEQ ID NO: 391366 - DNA, 19 bp, Homo sapiens
  siRNA target sequence for TMC7 (NM_024847.2,319-337).
gccattctcttcgaaatta

SEQ ID NO: 391367 - DNA, 19 bp, Homo sapiens
  siRNA target sequence for TMC7 (NM_024847.2,331-349).
gaaattatgcactgaacat

SEQ ID NO: 391368 - DNA, 19 bp, Homo sapiens
  siRNA target sequence for TMC7 (NM_024847.2,361-379).
ggagactaagggacattca

SEQ ID NO: 391369 - DNA, 19 bp, Homo sapiens
  siRNA target sequence for TMC7 (NM_024847.2,362-380).
gagactaagggacattcaa

SEQ ID NO: 391370 - DNA, 19 bp, Homo sapiens
  siRNA target sequence for TMC7 (NM_024847.2,500-518).
ggacatccgcagcatagaa

SEQ ID NO: 391371 - DNA, 19 bp, Homo sapiens
  siRNA target sequence for TMC7 (NM_024847.2,622-640).
cagtcttactcacgaaata

SEQ ID NO: 391372 - DNA, 19 bp, Homo sapiens
  siRNA target sequence for TMC7 (NM_024847.2,624-642).
gtcttactcacgaaataca

SEQ ID NO: 391373 - DNA, 19 bp, Homo sapiens
  siRNA target sequence for TMC7 (NM_024847.2,630-648).
ctcacgaaatacaagatca

SEQ ID NO: 391374 - DNA, 19 bp, Homo sapiens
  siRNA target sequence for TMC7 (NM_024847.2,681-699).
gacatggataaacaatgta

SEQ ID NO: 391375 - DNA, 19 bp, Homo sapiens
  siRNA target sequence for TMC7 (NM_024847.2,734-752).
cttttacagttatatcata

SEQ ID NO: 391376 - DNA, 19 bp, Homo sapiens
  siRNA target sequence for TMC7 (NM_024847.2,790-808).
gcctcttttacggacatta

SEQ ID NO: 391377 - DNA, 19 bp, Homo sapiens
  siRNA target sequence for TMC7 (NM_024847.2,792-810).
ctcttttacggacattaca

SEQ ID NO: 391378 - DNA, 19 bp, Homo sapiens
  siRNA target sequence for TMC7 (NM_024847.2,800-818).
cggacattacaccattgat

SEQ ID NO: 391379 - DNA, 19 bp, Homo sapiens
  siRNA target sequence for TMC7 (NM_024847.2,851-869).
gcccctggcgtatttgtta

SEQ ID NO: 391380 - DNA, 19 bp, Homo sapiens
  siRNA target sequence for TMC7 (NM_024847.2,916-934).
ggtcggtggaaggattcaa

SEQ ID NO: 391381 - DNA, 19 bp, Homo sapiens
  siRNA target sequence for TMC7 (NM_024847.2,917-935).
gtcggtggaaggattcaaa

SEQ ID NO: 391382 - DNA, 19 bp, Homo sapiens
  siRNA target sequence for TMC7 (NM_024847.2,919-937).
cggtggaaggattcaaaat

SEQ ID NO: 391383 - DNA, 19 bp, Homo sapiens
  siRNA target sequence for TMC7 (NM_024847.2,921-939).
gtggaaggattcaaaatca

SEQ ID NO: 391384 - DNA, 19 bp, Homo sapiens
  siRNA target sequence for TMC7 (NM_024847.2,957-975).
gagcactttcagagttact

SEQ ID NO: 391385 - DNA, 19 bp, Homo sapiens
  siRNA target sequence for TMC7 (NM_024847.2,1018-1036).
gcagcatggcggatctgaa

SEQ ID NO: 391386 - DNA, 19 bp, Homo sapiens
  siRNA target sequence for TMC7 (NM_024847.2,1119-1137).
gaaacaatacgcatttact

SEQ ID NO: 391387 - DNA, 19 bp, Homo sapiens
  siRNA target sequence for TMC7 (NM_024847.2,1180-1198).
gggcatgcttttatgcaat

SEQ ID NO: 391388 - DNA, 19 bp, Homo sapiens
  siRNA target sequence for TMC7 (NM_024847.2,1181-1199).
ggcatgcttttatgcaata

SEQ ID NO: 391389 - DNA, 19 bp, Homo sapiens
  siRNA target sequence for TMC7 (NM_024847.2,1186-1204).
gcttttatgcaatatacgt

SEQ ID NO: 391390 - DNA, 19 bp, Homo sapiens
  siRNA target sequence for TMC7 (NM_024847.2,1244-1262).
cgacaagatggtttttgga

SEQ ID NO: 391391 - DNA, 19 bp, Homo sapiens
  siRNA target sequence for TMC7 (NM_024847.2,1263-1281).
gagaacctcttcatattgt

SEQ ID NO: 391392 - DNA, 19 bp, Homo sapiens
  siRNA target sequence for TMC7 (NM_024847.2,1265-1283).
gaacctcttcatattgtat

SEQ ID NO: 391393 - DNA, 19 bp, Homo sapiens
  siRNA target sequence for TMC7 (NM_024847.2,1268-1286).
cctcttcatattgtatcta

SEQ ID NO: 391394 - DNA, 19 bp, Homo sapiens
  siRNA target sequence for TMC7 (NM_024847.2,1343-1361).
catccgctatgaggattat

SEQ ID NO: 391395 - DNA, 19 bp, Homo sapiens
  siRNA target sequence for TMC7 (NM_024847.2,1346-1364).
ccgctatgaggattattct

SEQ ID NO: 391396 - DNA, 19 bp, Homo sapiens
  siRNA target sequence for TMC7 (NM_024847.2,1376-1394).
gatccgtctgacaatcctt

SEQ ID NO: 391397 - DNA, 19 bp, Homo sapiens
  siRNA target sequence for TMC7 (NM_024847.2,1590-1608).
ctcttcgtggattttccta

SEQ ID NO: 391398 - DNA, 19 bp, Homo sapiens
  siRNA target sequence for TMC7 (NM_024847.2,1724-1742).
gatcggagcctttttctca

SEQ ID NO: 391399 - DNA, 19 bp, Homo sapiens
  siRNA target sequence for TMC7 (NM_024847.2,1745-1763).
ccttctccctgcaattgca

SEQ ID NO: 391400 - DNA, 19 bp, Homo sapiens
  siRNA target sequence for TMC7 (NM_024847.2,1756-1774).
caattgcaaccctgaaatt

SEQ ID NO: 391401 - DNA, 19 bp, Homo sapiens
  siRNA target sequence for TMC7 (NM_024847.2,1765-1783).
ccctgaaattcattatcat

SEQ ID NO: 391402 - DNA, 19 bp, Homo sapiens
  siRNA target sequence for TMC7 (NM_024847.2,1835-1853).
gccgttcagagcatccaat

SEQ ID NO: 391403 - DNA, 19 bp, Homo sapiens
  siRNA target sequence for TMC7 (NM_024847.2,1836-1854).
ccgttcagagcatccaatt

SEQ ID NO: 391404 - DNA, 19 bp, Homo sapiens
  siRNA target sequence for TMC7 (NM_024847.2,1841-1859).
cagagcatccaattctaat

SEQ ID NO: 391405 - DNA, 19 bp, Homo sapiens
  siRNA target sequence for TMC7 (NM_024847.2,1843-1861).
gagcatccaattctaattt

SEQ ID NO: 391406 - DNA, 19 bp, Homo sapiens
  siRNA target sequence for TMC7 (NM_024847.2,1892-1910).
gtgtttggcaataatacct

SEQ ID NO: 391407 - DNA, 19 bp, Homo sapiens
  siRNA target sequence for TMC7 (NM_024847.2,1908-1926).
cctctgacaatcagcatat

SEQ ID NO: 391408 - DNA, 19 bp, Homo sapiens
  siRNA target sequence for TMC7 (NM_024847.2,1953-1971).
gggccgttcaccaacttca

SEQ ID NO: 391409 - DNA, 19 bp, Homo sapiens
  siRNA target sequence for TMC7 (NM_024847.2,1954-1972).
ggccgttcaccaacttcaa

SEQ ID NO: 391410 - DNA, 19 bp, Homo sapiens
  siRNA target sequence for TMC7 (NM_024847.2,2062-2080).
cagttcctttcttcatgat

SEQ ID NO: 391411 - DNA, 19 bp, Homo sapiens
  siRNA target sequence for TMC7 (NM_024847.2,2086-2104).
gcctcatcatgttttactt

SEQ ID NO: 391412 - DNA, 19 bp, Homo sapiens
  siRNA target sequence for TMC7 (NM_024847.2,2088-2106).
ctcatcatgttttacttca

SEQ ID NO: 391413 - DNA, 19 bp, Homo sapiens
  siRNA target sequence for TMC7 (NM_024847.2,2172-2190).
cgtgacaagtgctacctaa

SEQ ID NO: 391414 - DNA, 19 bp, Homo sapiens
  siRNA target sequence for TMC7 (NM_024847.2,2182-2200).
gctacctaatccagaaact

SEQ ID NO: 391415 - DNA, 19 bp, Homo sapiens
  siRNA target sequence for TMC7 (NM_024847.2,2186-2204).
cctaatccagaaactaaca

SEQ ID NO: 391416 - DNA, 19 bp, Homo sapiens
  siRNA target sequence for FLJ13941 (NM_024848.1,97-115).
ggttatggtgtctacgtat

SEQ ID NO: 391417 - DNA, 19 bp, Homo sapiens
  siRNA target sequence for FLJ13941 (NM_024848.1,98-116).
gttatggtgtctacgtata

SEQ ID NO: 391418 - DNA, 19 bp, Homo sapiens
  siRNA target sequence for FLJ13941 (NM_024848.1,106-124).
gtctacgtatacccaaatt

SEQ ID NO: 391419 - DNA, 19 bp, Homo sapiens
  siRNA target sequence for FLJ13941 (NM_024848.1,168-186).
cggtcacgggaagttgtta

SEQ ID NO: 391420 - DNA, 19 bp, Homo sapiens
  siRNA target sequence for FLJ13941 (NM_024848.1,275-293).
ccttctctggacagtttgt

SEQ ID NO: 391421 - DNA, 19 bp, Homo sapiens
  siRNA target sequence for FLJ13941 (NM_024848.1,422-440).
gctccttccatgacaacaa

SEQ ID NO: 391422 - DNA, 19 bp, Homo sapiens
  siRNA target sequence for FLJ13941 (NM_024848.1,609-627).
ctcaggggtcacctattat

SEQ ID NO: 391423 - DNA, 19 bp, Homo sapiens
  siRNA target sequence for FLJ13941 (NM_024848.1,662-680).
ctacgaggatcgtgatctt

SEQ ID NO: 391424 - DNA, 19 bp, Homo sapiens
  siRNA target sequence for FLJ13941 (NM_024848.1,741-759).
gcaggaccacggggaaatt

SEQ ID NO: 391425 - DNA, 19 bp, Homo sapiens
  siRNA target sequence for FLJ13941 (NM_024848.1,887-905).
catttgggttcgaatgcat

SEQ ID NO: 391426 - DNA, 19 bp, Homo sapiens
  siRNA target sequence for FLJ13941 (NM_024848.1,897-915).
cgaatgcatcccttatcct

SEQ ID NO: 391427 - DNA, 19 bp, Homo sapiens
  siRNA target sequence for FLJ21458 (NM_024850.1,392-410).
gtatcaaggcaggacaaaa

SEQ ID NO: 391428 - DNA, 19 bp, Homo sapiens
  siRNA target sequence for FLJ21458 (NM_024850.1,485-503).
ctatgggtgcaggattagt

SEQ ID NO: 391429 - DNA, 19 bp, Homo sapiens
  siRNA target sequence for FLJ21458 (NM_024850.1,575-593).
catcacgggatatgttgat

SEQ ID NO: 391430 - DNA, 19 bp, Homo sapiens
  siRNA target sequence for FLJ21458 (NM_024850.1,580-598).
cgggatatgttgatagaga

SEQ ID NO: 391431 - DNA, 19 bp, Homo sapiens
  siRNA target sequence for FLJ21458 (NM_024850.1,733-751).
ctctgaccgtccaagagaa

SEQ ID NO: 391432 - DNA, 19 bp, Homo sapiens
  siRNA target sequence for EIF2C3 (NM_024852.2,352-370).
gctggctaactgttttcaa

SEQ ID NO: 391433 - DNA, 19 bp, Homo sapiens
  siRNA target sequence for EIF2C3 (NM_024852.2,357-375).
ctaactgttttcaagttga

SEQ ID NO: 391434 - DNA, 19 bp, Homo sapiens
  siRNA target sequence for EIF2C3 (NM_024852.2,495-513).
gagaccgtagaccagttta

SEQ ID NO: 391435 - DNA, 19 bp, Homo sapiens
  siRNA target sequence for EIF2C3 (NM_024852.2,499-517).
ccgtagaccagtttatgat

SEQ ID NO: 391436 - DNA, 19 bp, Homo sapiens
  siRNA target sequence for EIF2C3 (NM_024852.2,557-575).
gcaactacaggggtagatt

SEQ ID NO: 391437 - DNA, 19 bp, Homo sapiens
  siRNA target sequence for EIF2C3 (NM_024852.2,558-576).
caactacaggggtagattt

SEQ ID NO: 391438 - DNA, 19 bp, Homo sapiens
  siRNA target sequence for EIF2C3 (NM_024852.2,603-621).
gaaaagatcgacctttcaa

SEQ ID NO: 391439 - DNA, 19 bp, Homo sapiens
  siRNA target sequence for EIF2C3 (NM_024852.2,612-630).
gacctttcaaggtgtcaat

SEQ ID NO: 391440 - DNA, 19 bp, Homo sapiens
  siRNA target sequence for EIF2C3 (NM_024852.2,619-637).
caaggtgtcaatcaaattt

SEQ ID NO: 391441 - DNA, 19 bp, Homo sapiens
  siRNA target sequence for EIF2C3 (NM_024852.2,623-641).
gtgtcaatcaaatttgtct

SEQ ID NO: 391442 - DNA, 19 bp, Homo sapiens
  siRNA target sequence for EIF2C3 (NM_024852.2,655-673).
gcacctactgcatgaagta

SEQ ID NO: 391443 - DNA, 19 bp, Homo sapiens
  siRNA target sequence for EIF2C3 (NM_024852.2,764-782).
ctgccctccatgaaataca

SEQ ID NO: 391444 - DNA, 19 bp, Homo sapiens
  siRNA target sequence for EIF2C3 (NM_024852.2,807-825).
ccgctccagaaggatatga

SEQ ID NO: 391445 - DNA, 19 bp, Homo sapiens
  siRNA target sequence for EIF2C3 (NM_024852.2,939-957).
cacaacctgtaattcagtt

SEQ ID NO: 391446 - DNA, 19 bp, Homo sapiens
  siRNA target sequence for EIF2C3 (NM_024852.2,961-979).
gtgtgaagttcttgatatt

SEQ ID NO: 391447 - DNA, 19 bp, Homo sapiens
  siRNA target sequence for EIF2C3 (NM_024852.2,998-1016).
ccaagacctctgactgatt

SEQ ID NO: 391448 - DNA, 19 bp, Homo sapiens
  siRNA target sequence for EIF2C3 (NM_024852.2,1002-1020).
gacctctgactgattctca

SEQ ID NO: 391449 - DNA, 19 bp, Homo sapiens
  siRNA target sequence for EIF2C3 (NM_024852.2,1025-1043).
gtaaaattcaccaaagaga

SEQ ID NO: 391450 - DNA, 19 bp, Homo sapiens
  siRNA target sequence for EIF2C3 (NM_024852.2,1057-1075).
ggttgaagtgactcattgt

SEQ ID NO: 391451 - DNA, 19 bp, Homo sapiens
  siRNA target sequence for EIF2C3 (NM_024852.2,1096-1114).
ccgtgtttgtaatgtaaca

SEQ ID NO: 391452 - DNA, 19 bp, Homo sapiens
  siRNA target sequence for EIF2C3 (NM_024852.2,1097-1115).
cgtgtttgtaatgtaacaa

SEQ ID NO: 391453 - DNA, 19 bp, Homo sapiens
  siRNA target sequence for EIF2C3 (NM_024852.2,1176-1194).
gaacagtagcgcagtattt

SEQ ID NO: 391454 - DNA, 19 bp, Homo sapiens
  siRNA target sequence for EIF2C3 (NM_024852.2,1184-1202).
gcgcagtatttcagagaaa

SEQ ID NO: 391455 - DNA, 19 bp, Homo sapiens
  siRNA target sequence for EIF2C3 (NM_024852.2,1267-1285).
cacctacctgccactagaa

SEQ ID NO: 391456 - DNA, 19 bp, Homo sapiens
  siRNA target sequence for EIF2C3 (NM_024852.2,1269-1287).
cctacctgccactagaagt

SEQ ID NO: 391457 - DNA, 19 bp, Homo sapiens
  siRNA target sequence for EIF2C3 (NM_024852.2,1368-1386).
gatctgcaccagatagaca

SEQ ID NO: 391458 - DNA, 19 bp, Homo sapiens
  siRNA target sequence for EIF2C3 (NM_024852.2,1379-1397).
gatagacaagaggaaatta

SEQ ID NO: 391459 - DNA, 19 bp, Homo sapiens
  siRNA target sequence for EIF2C3 (NM_024852.2,1465-1483).
ggatgaaatggctcatgta

SEQ ID NO: 391460 - DNA, 19 bp, Homo sapiens
  siRNA target sequence for EIF2C3 (NM_024852.2,1466-1484).
gatgaaatggctcatgtaa

SEQ ID NO: 391461 - DNA, 19 bp, Homo sapiens
  siRNA target sequence for EIF2C3 (NM_024852.2,1800-1818).
gcctacagcttattatcgt

SEQ ID NO: 391462 - DNA, 19 bp, Homo sapiens
  siRNA target sequence for EIF2C3 (NM_024852.2,1859-1877).
cgtgtaggagacacacttt

SEQ ID NO: 391463 - DNA, 19 bp, Homo sapiens
  siRNA target sequence for EIF2C3 (NM_024852.2,1879-1897).
gggtatggctacacaatgt

SEQ ID NO: 391464 - DNA, 19 bp, Homo sapiens
  siRNA target sequence for EIF2C3 (NM_024852.2,1885-1903).
ggctacacaatgtgttcaa

SEQ ID NO: 391465 - DNA, 19 bp, Homo sapiens
  siRNA target sequence for EIF2C3 (NM_024852.2,1887-1905).
ctacacaatgtgttcaagt

SEQ ID NO: 391466 - DNA, 19 bp, Homo sapiens
  siRNA target sequence for EIF2C3 (NM_024852.2,1890-1908).
cacaatgtgttcaagtcaa

SEQ ID NO: 391467 - DNA, 19 bp, Homo sapiens
  siRNA target sequence for EIF2C3 (NM_024852.2,1901-1919).
caagtcaagaatgtaataa

SEQ ID NO: 391468 - DNA, 19 bp, Homo sapiens
  siRNA target sequence for EIF2C3 (NM_024852.2,1928-1946).
cctcaaactctgtcaaact

SEQ ID NO: 391469 - DNA, 19 bp, Homo sapiens
  siRNA target sequence for EIF2C3 (NM_024852.2,1970-1988).
ctcggagggatcaataata

SEQ ID NO: 391470 - DNA, 19 bp, Homo sapiens
  siRNA target sequence for EIF2C3 (NM_024852.2,1972-1990).
cggagggatcaataatatt

SEQ ID NO: 391471 - DNA, 19 bp, Homo sapiens
  siRNA target sequence for EIF2C3 (NM_024852.2,1978-1996).
gatcaataatattcttgta

SEQ ID NO: 391472 - DNA, 19 bp, Homo sapiens
  siRNA target sequence for EIF2C3 (NM_024852.2,2094-2112).
ctgctgttgtaggtagtat

SEQ ID NO: 391473 - DNA, 19 bp, Homo sapiens
  siRNA target sequence for EIF2C3 (NM_024852.2,2134-2152).
ctgtgccacagtaagagtt

SEQ ID NO: 391474 - DNA, 19 bp, Homo sapiens
  siRNA target sequence for EIF2C3 (NM_024852.2,2157-2175).
gaccccgacaggagatcat

SEQ ID NO: 391475 - DNA, 19 bp, Homo sapiens
  siRNA target sequence for EIF2C3 (NM_024852.2,2194-2212).
ggtccgggaacttcttatt

SEQ ID NO: 391476 - DNA, 19 bp, Homo sapiens
  siRNA target sequence for EIF2C3 (NM_024852.2,2197-2215).
ccgggaacttcttattcaa

SEQ ID NO: 391477 - DNA, 19 bp, Homo sapiens
  siRNA target sequence for EIF2C3 (NM_024852.2,2198-2216).
cgggaacttcttattcaat

SEQ ID NO: 391478 - DNA, 19 bp, Homo sapiens
  siRNA target sequence for EIF2C3 (NM_024852.2,2199-2217).
gggaacttcttattcaatt

SEQ ID NO: 391479 - DNA, 19 bp, Homo sapiens
  siRNA target sequence for EIF2C3 (NM_024852.2,2239-2257).
gcctactcgtatcatcttt

SEQ ID NO: 391480 - DNA, 19 bp, Homo sapiens
  siRNA target sequence for EIF2C3 (NM_024852.2,2240-2258).
cctactcgtatcatctttt

SEQ ID NO: 391481 - DNA, 19 bp, Homo sapiens
  siRNA target sequence for EIF2C3 (NM_024852.2,2270-2288).
gtttcagaggggcagttta

SEQ ID NO: 391482 - DNA, 19 bp, Homo sapiens
  siRNA target sequence for EIF2C3 (NM_024852.2,2280-2298).
ggcagtttaggcaggtatt

SEQ ID NO: 391483 - DNA, 19 bp, Homo sapiens
  siRNA target sequence for EIF2C3 (NM_024852.2,2282-2300).
cagtttaggcaggtattat

SEQ ID NO: 391484 - DNA, 19 bp, Homo sapiens
  siRNA target sequence for EIF2C3 (NM_024852.2,2284-2302).
gtttaggcaggtattatat

SEQ ID NO: 391485 - DNA, 19 bp, Homo sapiens
  siRNA target sequence for EIF2C3 (NM_024852.2,2289-2307).
ggcaggtattatattatga

SEQ ID NO: 391486 - DNA, 19 bp, Homo sapiens
  siRNA target sequence for EIF2C3 (NM_024852.2,2290-2308).
gcaggtattatattatgaa

SEQ ID NO: 391487 - DNA, 19 bp, Homo sapiens
  siRNA target sequence for EIF2C3 (NM_024852.2,2348-2366).
gactatcaacctggaataa

SEQ ID NO: 391488 - DNA, 19 bp, Homo sapiens
  siRNA target sequence for EIF2C3 (NM_024852.2,2367-2385).
cctacattgtagttcagaa

SEQ ID NO: 391489 - DNA, 19 bp, Homo sapiens
  siRNA target sequence for EIF2C3 (NM_024852.2,2386-2404).
gagacatcacactcgatta

SEQ ID NO: 391490 - DNA, 19 bp, Homo sapiens
  siRNA target sequence for EIF2C3 (NM_024852.2,2388-2406).
gacatcacactcgattatt

SEQ ID NO: 391491 - DNA, 19 bp, Homo sapiens
  siRNA target sequence for EIF2C3 (NM_024852.2,2453-2471).
gctggaacaacagttgata

SEQ ID NO: 391492 - DNA, 19 bp, Homo sapiens
  siRNA target sequence for EIF2C3 (NM_024852.2,2457-2475).
gaacaacagttgatacaga

SEQ ID NO: 391493 - DNA, 19 bp, Homo sapiens
  siRNA target sequence for EIF2C3 (NM_024852.2,2483-2501).
cacccatatgagttcgatt

SEQ ID NO: 391494 - DNA, 19 bp, Homo sapiens
  siRNA target sequence for EIF2C3 (NM_024852.2,2485-2503).
cccatatgagttcgatttt

SEQ ID NO: 391495 - DNA, 19 bp, Homo sapiens
  siRNA target sequence for EIF2C3 (NM_024852.2,2486-2504).
ccatatgagttcgattttt

SEQ ID NO: 391496 - DNA, 19 bp, Homo sapiens
  siRNA target sequence for EIF2C3 (NM_024852.2,2509-2527).
ctgtagccatgctggaata

SEQ ID NO: 391497 - DNA, 19 bp, Homo sapiens
  siRNA target sequence for EIF2C3 (NM_024852.2,2536-2554).
cagtcgtccttcacactat

SEQ ID NO: 391498 - DNA, 19 bp, Homo sapiens
  siRNA target sequence for EIF2C3 (NM_024852.2,2538-2556).
gtcgtccttcacactatca

SEQ ID NO: 391499 - DNA, 19 bp, Homo sapiens
  siRNA target sequence for EIF2C3 (NM_024852.2,2541-2559).
gtccttcacactatcatgt

SEQ ID NO: 391500 - DNA, 19 bp, Homo sapiens
  siRNA target sequence for EIF2C3 (NM_024852.2,2544-2562).
cttcacactatcatgtttt

SEQ ID NO: 391501 - DNA, 19 bp, Homo sapiens
  siRNA target sequence for EIF2C3 (NM_024852.2,2558-2576).
gttttatgggatgataact

SEQ ID NO: 391502 - DNA, 19 bp, Homo sapiens
  siRNA target sequence for EIF2C3 (NM_024852.2,2591-2609).
gaacttcagctgctaactt

SEQ ID NO: 391503 - DNA, 19 bp, Homo sapiens
  siRNA target sequence for EIF2C3 (NM_024852.2,2633-2651).
cgctgtacacgatctgttt

SEQ ID NO: 391504 - DNA, 19 bp, Homo sapiens
  siRNA target sequence for EIF2C3 (NM_024852.2,2637-2655).
gtacacgatctgtttctat

SEQ ID NO: 391505 - DNA, 19 bp, Homo sapiens
  siRNA target sequence for EIF2C3 (NM_024852.2,2675-2693).
gctcacctggtagcattta

SEQ ID NO: 391506 - DNA, 19 bp, Homo sapiens
  siRNA target sequence for EIF2C3 (NM_024852.2,2688-2706).
catttagagccagatatca

SEQ ID NO: 391507 - DNA, 19 bp, Homo sapiens
  siRNA target sequence for EIF2C3 (NM_024852.2,2694-2712).
gagccagatatcatcttgt

SEQ ID NO: 391508 - DNA, 19 bp, Homo sapiens
  siRNA target sequence for EIF2C3 (NM_024852.2,2787-2805).
ccaaggctgtacagattca

SEQ ID NO: 391509 - DNA, 19 bp, Homo sapiens
  siRNA target sequence for EIF2C3 (NM_024852.2,2810-2828).
gataccttacgcacaatgt

SEQ ID NO: 391510 - DNA, 19 bp, Homo sapiens
  siRNA target sequence for EIF2C3 (NM_024852.2,2814-2832).
ccttacgcacaatgtactt

SEQ ID NO: 391511 - DNA, 19 bp, Homo sapiens
  siRNA target sequence for FLJ21148 (NM_024860.1,560-578).
gggttcgctccctagaact

SEQ ID NO: 391512 - DNA, 19 bp, Homo sapiens
  siRNA target sequence for FLJ21148 (NM_024860.1,672-690).
ggtgcctgctgcagacata

SEQ ID NO: 391513 - DNA, 19 bp, Homo sapiens
  siRNA target sequence for FLJ21148 (NM_024860.1,675-693).
gcctgctgcagacatacta

SEQ ID NO: 391514 - DNA, 19 bp, Homo sapiens
  siRNA target sequence for FLJ21148 (NM_024860.1,680-698).
ctgcagacatactaaacca

SEQ ID NO: 391515 - DNA, 19 bp, Homo sapiens
  siRNA target sequence for FLJ21148 (NM_024860.1,705-723).
caatcacaacgccaatcta

SEQ ID NO: 391516 - DNA, 19 bp, Homo sapiens
  siRNA target sequence for FLJ21148 (NM_024860.1,709-727).
cacaacgccaatctagaat

SEQ ID NO: 391517 - DNA, 19 bp, Homo sapiens
  siRNA target sequence for FLJ21148 (NM_024860.1,714-732).
cgccaatctagaatactct

SEQ ID NO: 391518 - DNA, 19 bp, Homo sapiens
  siRNA target sequence for FLJ21148 (NM_024860.1,807-825).
ggctaactggcaactgatt

SEQ ID NO: 391519 - DNA, 19 bp, Homo sapiens
  siRNA target sequence for FLJ21148 (NM_024860.1,809-827).
ctaactggcaactgattca

SEQ ID NO: 391520 - DNA, 19 bp, Homo sapiens
  siRNA target sequence for FLJ21148 (NM_024860.1,815-833).
ggcaactgattcatatgta

SEQ ID NO: 391521 - DNA, 19 bp, Homo sapiens
  siRNA target sequence for FLJ21148 (NM_024860.1,907-925).
gcattacagggaacaaaaa

SEQ ID NO: 391522 - DNA, 19 bp, Homo sapiens
  siRNA target sequence for FLJ21148 (NM_024860.1,932-950).
ctgaaaggcacctagtgta

SEQ ID NO: 391523 - DNA, 19 bp, Homo sapiens
  siRNA target sequence for FLJ21148 (NM_024860.1,951-969).
cgagcgctgggatttccta

SEQ ID NO: 391524 - DNA, 19 bp, Homo sapiens
  siRNA target sequence for FLJ21148 (NM_024860.1,952-970).
gagcgctgggatttcctat

SEQ ID NO: 391525 - DNA, 19 bp, Homo sapiens
  siRNA target sequence for FLJ21148 (NM_024860.1,1044-1062).
gaccaccacactaaaggta

SEQ ID NO: 391526 - DNA, 19 bp, Homo sapiens
  siRNA target sequence for FLJ21148 (NM_024860.1,1135-1153).
ggcagcctgacgatcacaa

SEQ ID NO: 391527 - DNA, 19 bp, Homo sapiens
  siRNA target sequence for FLJ21148 (NM_024860.1,1140-1158).
cctgacgatcacaaatatt

SEQ ID NO: 391528 - DNA, 19 bp, Homo sapiens
  siRNA target sequence for FLJ21148 (NM_024860.1,1218-1236).
gacctatgccacagactta

SEQ ID NO: 391529 - DNA, 19 bp, Homo sapiens
  siRNA target sequence for FLJ21148 (NM_024860.1,1245-1263).
ccaaggtttactcagtaat

SEQ ID NO: 391530 - DNA, 19 bp, Homo sapiens
  siRNA target sequence for FLJ21148 (NM_024860.1,1250-1268).
gtttactcagtaataagga

SEQ ID NO: 391531 - DNA, 19 bp, Homo sapiens
  siRNA target sequence for FLJ21148 (NM_024860.1,1267-1285).
gaagtctatgcgaaactca

SEQ ID NO: 391532 - DNA, 19 bp, Homo sapiens
  siRNA target sequence for FLJ21148 (NM_024860.1,1316-1334).
gctatggtcagaagatgat

SEQ ID NO: 391533 - DNA, 19 bp, Homo sapiens
  siRNA target sequence for FLJ13962 (NM_024862.1,108-126).
gtgtgaaaacatgtatcat

SEQ ID NO: 391534 - DNA, 19 bp, Homo sapiens
  siRNA target sequence for FLJ13962 (NM_024862.1,110-128).
gtgaaaacatgtatcatga

SEQ ID NO: 391535 - DNA, 19 bp, Homo sapiens
  siRNA target sequence for FLJ13962 (NM_024862.1,120-138).
gtatcatgaataatgaaat

SEQ ID NO: 391536 - DNA, 19 bp, Homo sapiens
  siRNA target sequence for FLJ13962 (NM_024862.1,158-176).
gatgaaacaaaggactata

SEQ ID NO: 391537 - DNA, 19 bp, Homo sapiens
  siRNA target sequence for FLJ13962 (NM_024862.1,172-190).
ctatatgaatcaactttca

SEQ ID NO: 391538 - DNA, 19 bp, Homo sapiens
  siRNA target sequence for FLJ13962 (NM_024862.1,227-245).
ctgcaggatatcatgtgta

SEQ ID NO: 391539 - DNA, 19 bp, Homo sapiens
  siRNA target sequence for FLJ13962 (NM_024862.1,232-250).
ggatatcatgtgtatggaa

SEQ ID NO: 391540 - DNA, 19 bp, Homo sapiens
  siRNA target sequence for FLJ13962 (NM_024862.1,292-310).
gcgagttgtgagagttgta

SEQ ID NO: 391541 - DNA, 19 bp, Homo sapiens
  siRNA target sequence for FLJ13962 (NM_024862.1,324-342).
ggcggtggtgggaatacat

SEQ ID NO: 391542 - DNA, 19 bp, Homo sapiens
  siRNA target sequence for FLJ13962 (NM_024862.1,415-433).
ccttcaccctcgatacctt

SEQ ID NO: 391543 - DNA, 19 bp, Homo sapiens
  siRNA target sequence for FLJ13962 (NM_024862.1,430-448).
ccttgagaggcgaagagta

SEQ ID NO: 391544 - DNA, 19 bp, Homo sapiens
  siRNA target sequence for FLJ13962 (NM_024862.1,431-449).
cttgagaggcgaagagtaa

SEQ ID NO: 391545 - DNA, 19 bp, Homo sapiens
  siRNA target sequence for FLJ13962 (NM_024862.1,493-511).
gcaggcatgcccaaactta

SEQ ID NO: 391546 - DNA, 19 bp, Homo sapiens
  siRNA target sequence for FLJ13962 (NM_024862.1,516-534).
gtgtggaaacttctcattt

SEQ ID NO: 391547 - DNA, 19 bp, Homo sapiens
  siRNA target sequence for FLJ13962 (NM_024862.1,545-563).
gaatccatttggacatata

SEQ ID NO: 391548 - DNA, 19 bp, Homo sapiens
  siRNA target sequence for FLJ13962 (NM_024862.1,558-576).
catatatgccccatgttca

SEQ ID NO: 391549 - DNA, 19 bp, Homo sapiens
  siRNA target sequence for FLJ13962 (NM_024862.1,583-601).
ggggaaatttcgtaatcgt

SEQ ID NO: 391550 - DNA, 19 bp, Homo sapiens
  siRNA target sequence for FLJ13962 (NM_024862.1,584-602).
gggaaatttcgtaatcgta

SEQ ID NO: 391551 - DNA, 19 bp, Homo sapiens
  siRNA target sequence for FLJ13962 (NM_024862.1,585-603).
ggaaatttcgtaatcgtaa

SEQ ID NO: 391552 - DNA, 19 bp, Homo sapiens
  siRNA target sequence for FLJ13962 (NM_024862.1,586-604).
gaaatttcgtaatcgtaat

SEQ ID NO: 391553 - DNA, 19 bp, Homo sapiens
  siRNA target sequence for FLJ13962 (NM_024862.1,599-617).
cgtaatggagcttttccaa

SEQ ID NO: 391554 - DNA, 19 bp, Homo sapiens
  siRNA target sequence for FLJ13962 (NM_024862.1,600-618).
gtaatggagcttttccaat

SEQ ID NO: 391555 - DNA, 19 bp, Homo sapiens
  siRNA target sequence for FLJ13962 (NM_024862.1,682-700).
ggtgaatgttcctgaaatt

SEQ ID NO: 391556 - DNA, 19 bp, Homo sapiens
  siRNA target sequence for FLJ13962 (NM_024862.1,701-719).
ccttgtatcccaatgctaa

SEQ ID NO: 391557 - DNA, 19 bp, Homo sapiens
  siRNA target sequence for FLJ13962 (NM_024862.1,711-729).
caatgctaaggcaccttta

SEQ ID NO: 391558 - DNA, 19 bp, Homo sapiens
  siRNA target sequence for FLJ13962 (NM_024862.1,716-734).
ctaaggcacctttatatga

SEQ ID NO: 391559 - DNA, 19 bp, Homo sapiens
  siRNA target sequence for FLJ13962 (NM_024862.1,736-754).
gtgggtaagactcactaaa

SEQ ID NO: 391560 - DNA, 19 bp, Homo sapiens
  siRNA target sequence for FLJ13962 (NM_024862.1,739-757).
ggtaagactcactaaacca

SEQ ID NO: 391561 - DNA, 19 bp, Homo sapiens
  siRNA target sequence for FLJ13962 (NM_024862.1,756-774).
cacagccatttaaagactt

SEQ ID NO: 391562 - DNA, 19 bp, Homo sapiens
  siRNA target sequence for FLJ13962 (NM_024862.1,816-834).
caggacccacaaattcctt

SEQ ID NO: 391563 - DNA, 19 bp, Homo sapiens
  siRNA target sequence for FLJ13962 (NM_024862.1,835-853).
gaaatatgtccctttagta

SEQ ID NO: 391564 - DNA, 19 bp, Homo sapiens
  siRNA target sequence for FLJ13962 (NM_024862.1,895-913).
ggttcgagttcctttcctt

SEQ ID NO: 391565 - DNA, 19 bp, Homo sapiens
  siRNA target sequence for FLJ13962 (NM_024862.1,915-933).
gaggtcttatccaacatgt

SEQ ID NO: 391566 - DNA, 19 bp, Homo sapiens
  siRNA target sequence for FLJ13962 (NM_024862.1,966-984).
gaaatttgcacactattgt

SEQ ID NO: 391567 - DNA, 19 bp, Homo sapiens
  siRNA target sequence for FLJ13962 (NM_024862.1,1041-1059).
ctgcccgtaggttacatga

SEQ ID NO: 391568 - DNA, 19 bp, Homo sapiens
  siRNA target sequence for FLJ13962 (NM_024862.1,1044-1062).
cccgtaggttacatgaagt

SEQ ID NO: 391569 - DNA, 19 bp, Homo sapiens
  siRNA target sequence for FLJ13962 (NM_024862.1,1069-1087).
ccagccttccctaaccaaa

SEQ ID NO: 391570 - DNA, 19 bp, Homo sapiens
  siRNA target sequence for FLJ21174 (NM_024863.3,358-376).
ggaaaggtcacatatcata

SEQ ID NO: 391571 - DNA, 19 bp, Homo sapiens
  siRNA target sequence for FLJ21174 (NM_024863.3,378-396).
gtggagcgggacataacaa

SEQ ID NO: 391572 - DNA, 19 bp, Homo sapiens
  siRNA target sequence for FLJ21174 (NM_024863.3,380-398).
ggagcgggacataacaact

SEQ ID NO: 391573 - DNA, 19 bp, Homo sapiens
  siRNA target sequence for FLJ21174 (NM_024863.3,381-399).
gagcgggacataacaactt

SEQ ID NO: 391574 - DNA, 19 bp, Homo sapiens
  siRNA target sequence for FLJ21174 (NM_024863.3,389-407).
cataacaacttcggaaatt

SEQ ID NO: 391575 - DNA, 19 bp, Homo sapiens
  siRNA target sequence for FLJ21174 (NM_024863.3,625-643).
cccgcaggtccgtgaaaga

SEQ ID NO: 391576 - DNA, 19 bp, Homo sapiens
  siRNA target sequence for FLJ21174 (NM_024863.3,627-645).
cgcaggtccgtgaaagaca

SEQ ID NO: 391577 - DNA, 19 bp, Homo sapiens
  siRNA target sequence for FLJ21174 (NM_024863.3,1074-1092).
cattacctcaaggagtata

SEQ ID NO: 391578 - DNA, 19 bp, Homo sapiens
  siRNA target sequence for FLJ22578 (NM_024864.3,256-274).
gcctcgtcacccgtcattt

SEQ ID NO: 391579 - DNA, 19 bp, Homo sapiens
  siRNA target sequence for FLJ22578 (NM_024864.3,258-276).
ctcgtcacccgtcatttct

SEQ ID NO: 391580 - DNA, 19 bp, Homo sapiens
  siRNA target sequence for FLJ22578 (NM_024864.3,828-846).
gatgacctcaccggatttt

SEQ ID NO: 391581 - DNA, 19 bp, Homo sapiens
  siRNA target sequence for FLJ22578 (NM_024864.3,1110-1128).
cttcttcactccatttgca

SEQ ID NO: 391582 - DNA, 19 bp, Homo sapiens
  siRNA target sequence for AM2 (NM_024866.1,858-876).
ctttgcacacgtaaaccta

SEQ ID NO: 391583 - DNA, 19 bp, Homo sapiens
  siRNA target sequence for FLJ14050 (NM_024869.1,454-472).
gcaaggcttcggtgaacaa

SEQ ID NO: 391584 - DNA, 19 bp, Homo sapiens
  siRNA target sequence for FLJ12748 (NM_024871.1,422-440).
cgtcgtacagacaggaatt

SEQ ID NO: 391585 - DNA, 19 bp, Homo sapiens
  siRNA target sequence for FLJ12748 (NM_024871.1,465-483).
ctcaagatccacaaagaca

SEQ ID NO: 391586 - DNA, 19 bp, Homo sapiens
  siRNA target sequence for FLJ12748 (NM_024871.1,467-485).
caagatccacaaagacaaa

SEQ ID NO: 391587 - DNA, 19 bp, Homo sapiens
  siRNA target sequence for FLJ12748 (NM_024871.1,605-623).
cagctccccggattctcaa

SEQ ID NO: 391588 - DNA, 19 bp, Homo sapiens
  siRNA target sequence for TNIP3 (NM_024873.2,217-235).
gtacagggcacatctagaa

SEQ ID NO: 391589 - DNA, 19 bp, Homo sapiens
  siRNA target sequence for TNIP3 (NM_024873.2,220-238).
cagggcacatctagaatga

SEQ ID NO: 391590 - DNA, 19 bp, Homo sapiens
  siRNA target sequence for TNIP3 (NM_024873.2,222-240).
gggcacatctagaatgatt

SEQ ID NO: 391591 - DNA, 19 bp, Homo sapiens
  siRNA target sequence for TNIP3 (NM_024873.2,237-255).
gattgccgcagaaagttct

SEQ ID NO: 391592 - DNA, 19 bp, Homo sapiens
  siRNA target sequence for TNIP3 (NM_024873.2,270-288).
gtgtgctgaaccatcaaca

SEQ ID NO: 391593 - DNA, 19 bp, Homo sapiens
  siRNA target sequence for TNIP3 (NM_024873.2,274-292).
gctgaaccatcaacaagaa

SEQ ID NO: 391594 - DNA, 19 bp, Homo sapiens
  siRNA target sequence for TNIP3 (NM_024873.2,310-328).
cttgaacaaaagataaggt

SEQ ID NO: 391595 - DNA, 19 bp, Homo sapiens
  siRNA target sequence for TNIP3 (NM_024873.2,370-388).
caatgggatcagcaattta

SEQ ID NO: 391596 - DNA, 19 bp, Homo sapiens
  siRNA target sequence for TNIP3 (NM_024873.2,376-394).
gatcagcaatttagaagta

SEQ ID NO: 391597 - DNA, 19 bp, Homo sapiens
  siRNA target sequence for TNIP3 (NM_024873.2,392-410).
gtatgaaagagttatatga

SEQ ID NO: 391598 - DNA, 19 bp, Homo sapiens
  siRNA target sequence for TNIP3 (NM_024873.2,576-594).
ggaacgcctaaatgaagaa

SEQ ID NO: 391599 - DNA, 19 bp, Homo sapiens
  siRNA target sequence for TNIP3 (NM_024873.2,577-595).
gaacgcctaaatgaagaat

SEQ ID NO: 391600 - DNA, 19 bp, Homo sapiens
  siRNA target sequence for TNIP3 (NM_024873.2,664-682).
cattacgaatgtgaaataa

SEQ ID NO: 391601 - DNA, 19 bp, Homo sapiens
  siRNA target sequence for TNIP3 (NM_024873.2,810-828).
gcaggtgcaaatatacgaa

SEQ ID NO: 391602 - DNA, 19 bp, Homo sapiens
  siRNA target sequence for TNIP3 (NM_024873.2,851-869).
cggatcgagagagacttaa

SEQ ID NO: 391603 - DNA, 19 bp, Homo sapiens
  siRNA target sequence for TNIP3 (NM_024873.2,852-870).
ggatcgagagagacttaat

SEQ ID NO: 391604 - DNA, 19 bp, Homo sapiens
  siRNA target sequence for TNIP3 (NM_024873.2,861-879).
gagacttaatcaagagaaa

SEQ ID NO: 391605 - DNA, 19 bp, Homo sapiens
  siRNA target sequence for TNIP3 (NM_024873.2,926-944).
ggctgaattcccagataaa

SEQ ID NO: 391606 - DNA, 19 bp, Homo sapiens
  siRNA target sequence for TNIP3 (NM_024873.2,1135-1153).
caacacaaggcaaatggtt

SEQ ID NO: 391607 - DNA, 19 bp, Homo sapiens
  siRNA target sequence for SYNPO2L (NM_024875.1,60-78).
gccaagccagctatgacaa

SEQ ID NO: 391608 - DNA, 19 bp, Homo sapiens
  siRNA target sequence for SYNPO2L (NM_024875.1,172-190).
gaccaaatgcaggacaatt

SEQ ID NO: 391609 - DNA, 19 bp, Homo sapiens
  siRNA target sequence for SYNPO2L (NM_024875.1,230-248).
ggggtacttatgtttaaga

SEQ ID NO: 391610 - DNA, 19 bp, Homo sapiens
  siRNA target sequence for SYNPO2L (NM_024875.1,231-249).
gggtacttatgtttaagaa

SEQ ID NO: 391611 - DNA, 19 bp, Homo sapiens
  siRNA target sequence for SYNPO2L (NM_024875.1,254-272).
cggcagagagccaagaagt

SEQ ID NO: 391612 - DNA, 19 bp, Homo sapiens
  siRNA target sequence for SYNPO2L (NM_024875.1,380-398).
cgcagcctcaccaatcaat

SEQ ID NO: 391613 - DNA, 19 bp, Homo sapiens
  siRNA target sequence for SYNPO2L (NM_024875.1,384-402).
gcctcaccaatcaatctga

SEQ ID NO: 391614 - DNA, 19 bp, Homo sapiens
  siRNA target sequence for SYNPO2L (NM_024875.1,726-744).
cagctccaagcatctttaa

SEQ ID NO: 391615 - DNA, 19 bp, Homo sapiens
  siRNA target sequence for SYNPO2L (NM_024875.1,792-810).
ctaccacctcggttatttt

SEQ ID NO: 391616 - DNA, 19 bp, Homo sapiens
  siRNA target sequence for SYNPO2L (NM_024875.1,1080-1098).
cctccaccgcttctatctt

SEQ ID NO: 391617 - DNA, 19 bp, Homo sapiens
  siRNA target sequence for SYNPO2L (NM_024875.1,1316-1334).
gtacagaacctggatgaaa

SEQ ID NO: 391618 - DNA, 19 bp, Homo sapiens
  siRNA target sequence for SYNPO2L (NM_024875.1,1418-1436).
gtaggggccaggagttaca

SEQ ID NO: 391619 - DNA, 19 bp, Homo sapiens
  siRNA target sequence for SYNPO2L (NM_024875.1,1773-1791).
cgcctcctattgcttacaa

SEQ ID NO: 391620 - DNA, 19 bp, Homo sapiens
  siRNA target sequence for SYNPO2L (NM_024875.1,1876-1894).
gggcatcaaggctctagat

SEQ ID NO: 391621 - DNA, 19 bp, Homo sapiens
  siRNA target sequence for SYNPO2L (NM_024875.1,1877-1895).
ggcatcaaggctctagatt

SEQ ID NO: 391622 - DNA, 19 bp, Homo sapiens
  siRNA target sequence for SYNPO2L (NM_024875.1,1878-1896).
gcatcaaggctctagattt

SEQ ID NO: 391623 - DNA, 19 bp, Homo sapiens
  siRNA target sequence for SYNPO2L (NM_024875.1,1902-1920).
ggcatcagccctatcaact

SEQ ID NO: 391624 - DNA, 19 bp, Homo sapiens
  siRNA target sequence for SYNPO2L (NM_024875.1,1975-1993).
ctcagggtcccccaaaact

SEQ ID NO: 391625 - DNA, 19 bp, Homo sapiens
  siRNA target sequence for SYNPO2L (NM_024875.1,2230-2248).
caccagaacaggattgcaa

SEQ ID NO: 391626 - DNA, 19 bp, Homo sapiens
  siRNA target sequence for ADCK4 (NM_024876.2,533-551).
cggattgtgcagaccttat

SEQ ID NO: 391627 - DNA, 19 bp, Homo sapiens
  siRNA target sequence for ADCK4 (NM_024876.2,754-772).
ctttgccgctgcctcaatt

SEQ ID NO: 391628 - DNA, 19 bp, Homo sapiens
  siRNA target sequence for ADCK4 (NM_024876.2,875-893).
ctggcggtactcaagatga

SEQ ID NO: 391629 - DNA, 19 bp, Homo sapiens
  siRNA target sequence for ADCK4 (NM_024876.2,983-1001).
gcggcttgtgcccagaatt

SEQ ID NO: 391630 - DNA, 19 bp, Homo sapiens
  siRNA target sequence for ADCK4 (NM_024876.2,1035-1053).
gggtcccagccgtggttaa

SEQ ID NO: 391631 - DNA, 19 bp, Homo sapiens
  siRNA target sequence for ADCK4 (NM_024876.2,1136-1154).
ctgcggaaccagatttgct

SEQ ID NO: 391632 - DNA, 19 bp, Homo sapiens
  siRNA target sequence for ADCK4 (NM_024876.2,1222-1240).
ggccaacttcctgtatgat

SEQ ID NO: 391633 - DNA, 19 bp, Homo sapiens
  siRNA target sequence for SLC35E1 (NM_024881.3,468-486).
cctcctgtcccggatcatt

SEQ ID NO: 391634 - DNA, 19 bp, Homo sapiens
  siRNA target sequence for SLC35E1 (NM_024881.3,472-490).
ctgtcccggatcattatga

SEQ ID NO: 391635 - DNA, 19 bp, Homo sapiens
  siRNA target sequence for SLC35E1 (NM_024881.3,499-517).
cagagcaccaaggtatact

SEQ ID NO: 391636 - DNA, 19 bp, Homo sapiens
  siRNA target sequence for SLC35E1 (NM_024881.3,819-837).
cagcggcttctgtaacttt

SEQ ID NO: 391637 - DNA, 19 bp, Homo sapiens
  siRNA target sequence for SLC35E1 (NM_024881.3,830-848).
gtaactttgcccagaatgt

SEQ ID NO: 391638 - DNA, 19 bp, Homo sapiens
  siRNA target sequence for SLC35E1 (NM_024881.3,895-913).
gtcgccaatgccaccaaaa

SEQ ID NO: 391639 - DNA, 19 bp, Homo sapiens
  siRNA target sequence for SLC35E1 (NM_024881.3,897-915).
cgccaatgccaccaaaaga

SEQ ID NO: 391640 - DNA, 19 bp, Homo sapiens
  siRNA target sequence for SLC35E1 (NM_024881.3,1000-1018).
ggggtcttcctctataaca

SEQ ID NO: 391641 - DNA, 19 bp, Homo sapiens
  siRNA target sequence for SLC35E1 (NM_024881.3,1144-1162).
cagcacggggactatcagt

SEQ ID NO: 391642 - DNA, 19 bp, Homo sapiens
  siRNA target sequence for SLC35E1 (NM_024881.3,1216-1234).
ccaaactcgtacagtttga

SEQ ID NO: 391643 - DNA, 19 bp, Homo sapiens
  siRNA target sequence for SLC35E1 (NM_024881.3,1217-1235).
caaactcgtacagtttgaa

SEQ ID NO: 391644 - DNA, 19 bp, Homo sapiens
  siRNA target sequence for SLC35E1 (NM_024881.3,1227-1245).
cagtttgaaccgctatgat

SEQ ID NO: 391645 - DNA, 19 bp, Homo sapiens
  siRNA target sequence for C6orf155 (NM_024882.1,499-517).
cttgcgaaccgggaaaagt

SEQ ID NO: 391646 - DNA, 19 bp, Homo sapiens
  siRNA target sequence for C6orf155 (NM_024882.1,568-586).
ggtcatcgcgggtgacttt

SEQ ID NO: 391647 - DNA, 19 bp, Homo sapiens
  siRNA target sequence for C6orf155 (NM_024882.1,668-686).
cctcgggctgcggatttca

SEQ ID NO: 391648 - DNA, 19 bp, Homo sapiens
  siRNA target sequence for C6orf155 (NM_024882.1,688-706).
gtactccactgggcatttt

SEQ ID NO: 391649 - DNA, 19 bp, Homo sapiens
  siRNA target sequence for C6orf155 (NM_024882.1,693-711).
ccactgggcattttctctt

SEQ ID NO: 391650 - DNA, 19 bp, Homo sapiens
  siRNA target sequence for FLJ22202 (NM_024883.1,142-160).
ggccgttggaggtatagct

SEQ ID NO: 391651 - DNA, 19 bp, Homo sapiens
  siRNA target sequence for FLJ22202 (NM_024883.1,226-244).
ggagtatgcgtggattgtt

SEQ ID NO: 391652 - DNA, 19 bp, Homo sapiens
  siRNA target sequence for FLJ22202 (NM_024883.1,286-304).
cctttctctgaaatttcga

SEQ ID NO: 391653 - DNA, 19 bp, Homo sapiens
  siRNA target sequence for C14orf160 (NM_024884.1,83-101).
gtgccagcgctgcgttatt

SEQ ID NO: 391654 - DNA, 19 bp, Homo sapiens
  siRNA target sequence for C14orf160 (NM_024884.1,87-105).
cagcgctgcgttatttggt

SEQ ID NO: 391655 - DNA, 19 bp, Homo sapiens
  siRNA target sequence for C14orf160 (NM_024884.1,284-302).
ctgcgacatccatcacttt

SEQ ID NO: 391656 - DNA, 19 bp, Homo sapiens
  siRNA target sequence for C14orf160 (NM_024884.1,286-304).
gcgacatccatcactttct

SEQ ID NO: 391657 - DNA, 19 bp, Homo sapiens
  siRNA target sequence for C14orf160 (NM_024884.1,341-359).
caccagactggacataaca

SEQ ID NO: 391658 - DNA, 19 bp, Homo sapiens
  siRNA target sequence for C14orf160 (NM_024884.1,343-361).
ccagactggacataacagt

SEQ ID NO: 391659 - DNA, 19 bp, Homo sapiens
  siRNA target sequence for C14orf160 (NM_024884.1,426-444).
gtgcagccctcctctatga

SEQ ID NO: 391660 - DNA, 19 bp, Homo sapiens
  siRNA target sequence for C14orf160 (NM_024884.1,428-446).
gcagccctcctctatgagt

SEQ ID NO: 391661 - DNA, 19 bp, Homo sapiens
  siRNA target sequence for C14orf160 (NM_024884.1,475-493).
gcagtgtggcaagcttata

SEQ ID NO: 391662 - DNA, 19 bp, Homo sapiens
  siRNA target sequence for C14orf160 (NM_024884.1,520-538).
cagacttcaggccctatat

SEQ ID NO: 391663 - DNA, 19 bp, Homo sapiens
  siRNA target sequence for C14orf160 (NM_024884.1,522-540).
gacttcaggccctatatga

SEQ ID NO: 391664 - DNA, 19 bp, Homo sapiens
  siRNA target sequence for C14orf160 (NM_024884.1,524-542).
cttcaggccctatatgaga

SEQ ID NO: 391665 - DNA, 19 bp, Homo sapiens
  siRNA target sequence for C14orf160 (NM_024884.1,609-627).
catattgtaggggtctaat

SEQ ID NO: 391666 - DNA, 19 bp, Homo sapiens
  siRNA target sequence for C14orf160 (NM_024884.1,618-636).
ggggtctaatggctattga

SEQ ID NO: 391667 - DNA, 19 bp, Homo sapiens
  siRNA target sequence for C14orf160 (NM_024884.1,619-637).
gggtctaatggctattgat

SEQ ID NO: 391668 - DNA, 19 bp, Homo sapiens
  siRNA target sequence for C14orf160 (NM_024884.1,620-638).
ggtctaatggctattgatt

SEQ ID NO: 391669 - DNA, 19 bp, Homo sapiens
  siRNA target sequence for C14orf160 (NM_024884.1,665-683).
cggcaggtggctttgtcat

SEQ ID NO: 391670 - DNA, 19 bp, Homo sapiens
  siRNA target sequence for C14orf160 (NM_024884.1,710-728).
ggctctgtcttgaccaatt

SEQ ID NO: 391671 - DNA, 19 bp, Homo sapiens
  siRNA target sequence for C14orf160 (NM_024884.1,711-729).
gctctgtcttgaccaattt

SEQ ID NO: 391672 - DNA, 19 bp, Homo sapiens
  siRNA target sequence for C14orf160 (NM_024884.1,718-736).
cttgaccaattttgaagta

SEQ ID NO: 391673 - DNA, 19 bp, Homo sapiens
  siRNA target sequence for C14orf160 (NM_024884.1,731-749).
gaagtaaaaggtattgaaa

SEQ ID NO: 391674 - DNA, 19 bp, Homo sapiens
  siRNA target sequence for C14orf160 (NM_024884.1,774-792).
gtatagatggaatgcaata

SEQ ID NO: 391675 - DNA, 19 bp, Homo sapiens
  siRNA target sequence for C14orf160 (NM_024884.1,783-801).
gaatgcaatatccaattgt

SEQ ID NO: 391676 - DNA, 19 bp, Homo sapiens
  siRNA target sequence for C14orf160 (NM_024884.1,787-805).
gcaatatccaattgttata

SEQ ID NO: 391677 - DNA, 19 bp, Homo sapiens
  siRNA target sequence for C14orf160 (NM_024884.1,823-841).
ggaaattcgatgtcagtat

SEQ ID NO: 391678 - DNA, 19 bp, Homo sapiens
  siRNA target sequence for C14orf160 (NM_024884.1,860-878).
ctttactcagaccgtattt

SEQ ID NO: 391679 - DNA, 19 bp, Homo sapiens
  siRNA target sequence for C14orf160 (NM_024884.1,897-915).
ctcctgatcctcgaattgt

SEQ ID NO: 391680 - DNA, 19 bp, Homo sapiens
  siRNA target sequence for C14orf160 (NM_024884.1,918-936).
cattccggggagattacct

SEQ ID NO: 391681 - DNA, 19 bp, Homo sapiens
  siRNA target sequence for C14orf160 (NM_024884.1,924-942).
ggggagattacctgctttt

SEQ ID NO: 391682 - DNA, 19 bp, Homo sapiens
  siRNA target sequence for C14orf160 (NM_024884.1,926-944).
ggagattacctgcttttga

SEQ ID NO: 391683 - DNA, 19 bp, Homo sapiens
  siRNA target sequence for C14orf160 (NM_024884.1,927-945).
gagattacctgcttttgaa

SEQ ID NO: 391684 - DNA, 19 bp, Homo sapiens
  siRNA target sequence for C14orf160 (NM_024884.1,946-964).
gccagaaaaatgttatctt

SEQ ID NO: 391685 - DNA, 19 bp, Homo sapiens
  siRNA target sequence for C14orf160 (NM_024884.1,990-1008).
cagatagccggtttccttt

SEQ ID NO: 391686 - DNA, 19 bp, Homo sapiens
  siRNA target sequence for C14orf160 (NM_024884.1,1110-1128).
gtgccacagatgttatgga

SEQ ID NO: 391687 - DNA, 19 bp, Homo sapiens
  siRNA target sequence for C14orf160 (NM_024884.1,1121-1139).
gttatggatataattatca

SEQ ID NO: 391688 - DNA, 19 bp, Homo sapiens
  siRNA target sequence for C14orf160 (NM_024884.1,1161-1179).
catcccagaatttttccta

SEQ ID NO: 391689 - DNA, 19 bp, Homo sapiens
  siRNA target sequence for C14orf160 (NM_024884.1,1176-1194).
cctatggagttactgaaat

SEQ ID NO: 391690 - DNA, 19 bp, Homo sapiens
  siRNA target sequence for C14orf160 (NM_024884.1,1218-1236).
caacagtgaagtatcttca

SEQ ID NO: 391691 - DNA, 19 bp, Homo sapiens
  siRNA target sequence for C14orf160 (NM_024884.1,1250-1268).
gaaattactatcagtgata

SEQ ID NO: 391692 - DNA, 19 bp, Homo sapiens
  siRNA target sequence for C14orf160 (NM_024884.1,1365-1383).
gaaatcgcattcttcatgt

SEQ ID NO: 391693 - DNA, 19 bp, Homo sapiens
  siRNA target sequence for C14orf160 (NM_024884.1,1448-1466).
gtacaacaaagatttgaat

SEQ ID NO: 391694 - DNA, 19 bp, Homo sapiens
  siRNA target sequence for TAF7L (NM_024885.1,349-367).
gaacctagcacgttctcaa

SEQ ID NO: 391695 - DNA, 19 bp, Homo sapiens
  siRNA target sequence for TAF7L (NM_024885.1,363-381).
ctcaaagtgtcaagatgaa

SEQ ID NO: 391696 - DNA, 19 bp, Homo sapiens
  siRNA target sequence for TAF7L (NM_024885.1,489-507).
gcctgagaacgcttgataa

SEQ ID NO: 391697 - DNA, 19 bp, Homo sapiens
  siRNA target sequence for TAF7L (NM_024885.1,490-508).
cctgagaacgcttgataaa

SEQ ID NO: 391698 - DNA, 19 bp, Homo sapiens
  siRNA target sequence for TAF7L (NM_024885.1,555-573).
ctgctgatggtgatatcca

SEQ ID NO: 391699 - DNA, 19 bp, Homo sapiens
  siRNA target sequence for TAF7L (NM_024885.1,594-612).
ctgcctctactgatcctaa

SEQ ID NO: 391700 - DNA, 19 bp, Homo sapiens
  siRNA target sequence for TAF7L (NM_024885.1,596-614).
gcctctactgatcctaata

SEQ ID NO: 391701 - DNA, 19 bp, Homo sapiens
  siRNA target sequence for TAF7L (NM_024885.1,597-615).
cctctactgatcctaatat

SEQ ID NO: 391702 - DNA, 19 bp, Homo sapiens
  siRNA target sequence for TAF7L (NM_024885.1,598-616).
ctctactgatcctaatata

SEQ ID NO: 391703 - DNA, 19 bp, Homo sapiens
  siRNA target sequence for TAF7L (NM_024885.1,666-684).
gcattacgccaccacttaa

SEQ ID NO: 391704 - DNA, 19 bp, Homo sapiens
  siRNA target sequence for TAF7L (NM_024885.1,777-795).
ctccagacgtggaaaatga

SEQ ID NO: 391705 - DNA, 19 bp, Homo sapiens
  siRNA target sequence for TAF7L (NM_024885.1,834-852).
gtacccgttgggaagtcat

SEQ ID NO: 391706 - DNA, 19 bp, Homo sapiens
  siRNA target sequence for TAF7L (NM_024885.1,892-910).
catcccaggatttttgata

SEQ ID NO: 391707 - DNA, 19 bp, Homo sapiens
  siRNA target sequence for TAF7L (NM_024885.1,945-963).
cctcgtcagtcatggaaat

SEQ ID NO: 391708 - DNA, 19 bp, Homo sapiens
  siRNA target sequence for TAF7L (NM_024885.1,995-1013).
ctccataagattcagaata

SEQ ID NO: 391709 - DNA, 19 bp, Homo sapiens
  siRNA target sequence for TAF7L (NM_024885.1,997-1015).
ccataagattcagaataaa

SEQ ID NO: 391710 - DNA, 19 bp, Homo sapiens
  siRNA target sequence for TAF7L (NM_024885.1,1093-1111).
gcttgagttacaggaaaaa

SEQ ID NO: 391711 - DNA, 19 bp, Homo sapiens
  siRNA target sequence for TAF7L (NM_024885.1,1145-1163).
cagttgcagcgttttctga

SEQ ID NO: 391712 - DNA, 19 bp, Homo sapiens
  siRNA target sequence for TAF7L (NM_024885.1,1151-1169).
cagcgttttctgaagaagt

SEQ ID NO: 391713 - DNA, 19 bp, Homo sapiens
  siRNA target sequence for FLJ11535 (NM_024888.1,159-177).
ccatcgtatccttgtactt

SEQ ID NO: 391714 - DNA, 19 bp, Homo sapiens
  siRNA target sequence for FLJ11535 (NM_024888.1,335-353).
gccgagggcatgttgtact

SEQ ID NO: 391715 - DNA, 19 bp, Homo sapiens
  siRNA target sequence for FLJ11535 (NM_024888.1,1077-1095).
gccacgactcggtttatca

SEQ ID NO: 391716 - DNA, 19 bp, Homo sapiens
  siRNA target sequence for FLJ11783 (NM_024891.1,353-371).
ccttctcttctcgtcattt

SEQ ID NO: 391717 - DNA, 19 bp, Homo sapiens
  siRNA target sequence for FLJ11783 (NM_024891.1,448-466).
gtagataagggacagttat

SEQ ID NO: 391718 - DNA, 19 bp, Homo sapiens
  siRNA target sequence for FLJ11783 (NM_024891.1,451-469).
gataagggacagttatact

SEQ ID NO: 391719 - DNA, 19 bp, Homo sapiens
  siRNA target sequence for FLJ11783 (NM_024891.1,458-476).
gacagttatactttagtgt

SEQ ID NO: 391720 - DNA, 19 bp, Homo sapiens
  siRNA target sequence for FLJ11783 (NM_024891.1,603-621).
ccccttccccattagtact

SEQ ID NO: 391721 - DNA, 19 bp, Homo sapiens
  siRNA target sequence for FLJ14075 (NM_024894.1,127-145).
ctcaatgaggtgaagattt

SEQ ID NO: 391722 - DNA, 19 bp, Homo sapiens
  siRNA target sequence for FLJ14075 (NM_024894.1,198-216).
gagagcgctacagaagaaa

SEQ ID NO: 391723 - DNA, 19 bp, Homo sapiens
  siRNA target sequence for FLJ14075 (NM_024894.1,269-287).
ctgtgtgtaccactattaa

SEQ ID NO: 391724 - DNA, 19 bp, Homo sapiens
  siRNA target sequence for FLJ14075 (NM_024894.1,279-297).
cactattaaggtgtcaaaa

SEQ ID NO: 391725 - DNA, 19 bp, Homo sapiens
  siRNA target sequence for FLJ14075 (NM_024894.1,335-353).
ctcgggttcgatgttatga

SEQ ID NO: 391726 - DNA, 19 bp, Homo sapiens
  siRNA target sequence for FLJ14075 (NM_024894.1,337-355).
cgggttcgatgttatgaca

SEQ ID NO: 391727 - DNA, 19 bp, Homo sapiens
  siRNA target sequence for FLJ14075 (NM_024894.1,347-365).
gttatgacacctatcaatt

SEQ ID NO: 391728 - DNA, 19 bp, Homo sapiens
  siRNA target sequence for FLJ14075 (NM_024894.1,427-445).
gactactcaaagattgtct

SEQ ID NO: 391729 - DNA, 19 bp, Homo sapiens
  siRNA target sequence for FLJ14075 (NM_024894.1,475-493).
cattcgcaatcaggttttt

SEQ ID NO: 391730 - DNA, 19 bp, Homo sapiens
  siRNA target sequence for FLJ14075 (NM_024894.1,479-497).
cgcaatcaggtttttacta

SEQ ID NO: 391731 - DNA, 19 bp, Homo sapiens
  siRNA target sequence for FLJ14075 (NM_024894.1,516-534).
gtttgggagagatttctct

SEQ ID NO: 391732 - DNA, 19 bp, Homo sapiens
  siRNA target sequence for FLJ14075 (NM_024894.1,561-579).
ctttgttggtgcaagttct

SEQ ID NO: 391733 - DNA, 19 bp, Homo sapiens
  siRNA target sequence for FLJ14075 (NM_024894.1,569-587).
gtgcaagttctgaagttta

SEQ ID NO: 391734 - DNA, 19 bp, Homo sapiens
  siRNA target sequence for FLJ14075 (NM_024894.1,580-598).
gaagtttataggttaaact

SEQ ID NO: 391735 - DNA, 19 bp, Homo sapiens
  siRNA target sequence for FLJ14075 (NM_024894.1,723-741).
cccaagaactcgaaacaga

SEQ ID NO: 391736 - DNA, 19 bp, Homo sapiens
  siRNA target sequence for FLJ14075 (NM_024894.1,795-813).
cagtttaccaacaatctct

SEQ ID NO: 391737 - DNA, 19 bp, Homo sapiens
  siRNA target sequence for FLJ14075 (NM_024894.1,898-916).
catgaccttaatgatgttt

SEQ ID NO: 391738 - DNA, 19 bp, Homo sapiens
  siRNA target sequence for FLJ14075 (NM_024894.1,966-984).
gatgggcatctattacatt

SEQ ID NO: 391739 - DNA, 19 bp, Homo sapiens
  siRNA target sequence for FLJ14075 (NM_024894.1,1010-1028).
ggtgttccttcttagacaa

SEQ ID NO: 391740 - DNA, 19 bp, Homo sapiens
  siRNA target sequence for FLJ14075 (NM_024894.1,1024-1042).
gacaacttgaccgaagaat

SEQ ID NO: 391741 - DNA, 19 bp, Homo sapiens
  siRNA target sequence for FLJ14075 (NM_024894.1,1026-1044).
caacttgaccgaagaatta

SEQ ID NO: 391742 - DNA, 19 bp, Homo sapiens
  siRNA target sequence for FLJ14075 (NM_024894.1,1029-1047).
cttgaccgaagaattagaa

SEQ ID NO: 391743 - DNA, 19 bp, Homo sapiens
  siRNA target sequence for FLJ14075 (NM_024894.1,1138-1156).
cctttcctccgggcatata

SEQ ID NO: 391744 - DNA, 19 bp, Homo sapiens
  siRNA target sequence for FLJ14075 (NM_024894.1,1139-1157).
ctttcctccgggcatatat

SEQ ID NO: 391745 - DNA, 19 bp, Homo sapiens
  siRNA target sequence for FLJ14075 (NM_024894.1,1143-1161).
cctccgggcatatatgcat

SEQ ID NO: 391746 - DNA, 19 bp, Homo sapiens
  siRNA target sequence for FLJ14075 (NM_024894.1,1170-1188).
catggatataagactctat

SEQ ID NO: 391747 - DNA, 19 bp, Homo sapiens
  siRNA target sequence for FLJ14075 (NM_024894.1,1174-1192).
gatataagactctatcaca

SEQ ID NO: 391748 - DNA, 19 bp, Homo sapiens
  siRNA target sequence for FLJ14075 (NM_024894.1,1219-1237).
gcttatgaagaatatagga

SEQ ID NO: 391749 - DNA, 19 bp, Homo sapiens
  siRNA target sequence for FLJ14075 (NM_024894.1,1315-1333).
gagctggcacttaaattaa

SEQ ID NO: 391750 - DNA, 19 bp, Homo sapiens
  siRNA target sequence for FLJ14075 (NM_024894.1,1399-1417).
ctcaccgatgatcgattta

SEQ ID NO: 391751 - DNA, 19 bp, Homo sapiens
  siRNA target sequence for FLJ14075 (NM_024894.1,1401-1419).
caccgatgatcgatttaaa

SEQ ID NO: 391752 - DNA, 19 bp, Homo sapiens
  siRNA target sequence for FLJ14075 (NM_024894.1,1403-1421).
ccgatgatcgatttaaagt

SEQ ID NO: 391753 - DNA, 19 bp, Homo sapiens
  siRNA target sequence for FLJ14075 (NM_024894.1,1404-1422).
cgatgatcgatttaaagtt

SEQ ID NO: 391754 - DNA, 19 bp, Homo sapiens
  siRNA target sequence for FLJ14075 (NM_024894.1,1575-1593).
ggaaggaaaaccaagtgat

SEQ ID NO: 391755 - DNA, 19 bp, Homo sapiens
  siRNA target sequence for FLJ14075 (NM_024894.1,1811-1829).
cccttgaagatcgtttgaa

SEQ ID NO: 391756 - DNA, 19 bp, Homo sapiens
  siRNA target sequence for FLJ14075 (NM_024894.1,1812-1830).
ccttgaagatcgtttgaaa

SEQ ID NO: 391757 - DNA, 19 bp, Homo sapiens
  siRNA target sequence for FLJ14075 (NM_024894.1,1813-1831).
cttgaagatcgtttgaaaa

SEQ ID NO: 391758 - DNA, 19 bp, Homo sapiens
  siRNA target sequence for FLJ14075 (NM_024894.1,1873-1891).
gttggcagcaaacaattga

SEQ ID NO: 391759 - DNA, 19 bp, Homo sapiens
  siRNA target sequence for FLJ14075 (NM_024894.1,1885-1903).
caattgacattcacgttaa

SEQ ID NO: 391760 - DNA, 19 bp, Homo sapiens
  siRNA target sequence for FLJ14075 (NM_024894.1,1989-2007).
cctgaagtcaagacacaaa

SEQ ID NO: 391761 - DNA, 19 bp, Homo sapiens
  siRNA target sequence for FLJ22757 (NM_024898.1,323-341).
cggcaaccgcagatttggt

SEQ ID NO: 391762 - DNA, 19 bp, Homo sapiens
  siRNA target sequence for FLJ22757 (NM_024898.1,325-343).
gcaaccgcagatttggttt

SEQ ID NO: 391763 - DNA, 19 bp, Homo sapiens
  siRNA target sequence for FLJ22757 (NM_024898.1,405-423).
gaggtgttttacaagctat

SEQ ID NO: 391764 - DNA, 19 bp, Homo sapiens
  siRNA target sequence for FLJ22757 (NM_024898.1,408-426).
gtgttttacaagctattga

SEQ ID NO: 391765 - DNA, 19 bp, Homo sapiens
  siRNA target sequence for FLJ22757 (NM_024898.1,463-481).
ccgaggcagaggaacttct

SEQ ID NO: 391766 - DNA, 19 bp, Homo sapiens
  siRNA target sequence for FLJ22757 (NM_024898.1,468-486).
gcagaggaacttcttcaaa

SEQ ID NO: 391767 - DNA, 19 bp, Homo sapiens
  siRNA target sequence for FLJ22757 (NM_024898.1,474-492).
gaacttcttcaaaatctgt

SEQ ID NO: 391768 - DNA, 19 bp, Homo sapiens
  siRNA target sequence for FLJ22757 (NM_024898.1,685-703).
ccgtgactgacgagaacat

SEQ ID NO: 391769 - DNA, 19 bp, Homo sapiens
  siRNA target sequence for FLJ22757 (NM_024898.1,913-931).
ccgagagagtacgagaaaa

SEQ ID NO: 391770 - DNA, 19 bp, Homo sapiens
  siRNA target sequence for FLJ22757 (NM_024898.1,973-991).
ccttggagacgacctttaa

SEQ ID NO: 391771 - DNA, 19 bp, Homo sapiens
  siRNA target sequence for FLJ22757 (NM_024898.1,1286-1304).
ggagggcttctcagatcaa

SEQ ID NO: 391772 - DNA, 19 bp, Homo sapiens
  siRNA target sequence for FLJ22757 (NM_024898.1,1287-1305).
gagggcttctcagatcaat

SEQ ID NO: 391773 - DNA, 19 bp, Homo sapiens
  siRNA target sequence for FLJ22757 (NM_024898.1,1291-1309).
gcttctcagatcaattcga

SEQ ID NO: 391774 - DNA, 19 bp, Homo sapiens
  siRNA target sequence for FLJ22757 (NM_024898.1,1425-1443).
caaccagccgtcaagaaca

SEQ ID NO: 391775 - DNA, 19 bp, Homo sapiens
  siRNA target sequence for FLJ22757 (NM_024898.1,1478-1496).
gcagagccttctaatgtat

SEQ ID NO: 391776 - DNA, 19 bp, Homo sapiens
  siRNA target sequence for FLJ22757 (NM_024898.1,1479-1497).
cagagccttctaatgtata

SEQ ID NO: 391777 - DNA, 19 bp, Homo sapiens
  siRNA target sequence for FLJ22757 (NM_024898.1,1483-1501).
gccttctaatgtataagga

SEQ ID NO: 391778 - DNA, 19 bp, Homo sapiens
  siRNA target sequence for FLJ22757 (NM_024898.1,1706-1724).
gtgcccgtgggcagaagaa

SEQ ID NO: 391779 - DNA, 19 bp, Homo sapiens
  siRNA target sequence for FLJ22757 (NM_024898.1,1755-1773).
gaagaactggatttgttga

SEQ ID NO: 391780 - DNA, 19 bp, Homo sapiens
  siRNA target sequence for FLJ22757 (NM_024898.1,1827-1845).
ccgagccagagtttagact

SEQ ID NO: 391781 - DNA, 19 bp, Homo sapiens
  siRNA target sequence for FLJ22757 (NM_024898.1,1897-1915).
gatggcaaccagacgataa

SEQ ID NO: 391782 - DNA, 19 bp, Homo sapiens
  siRNA target sequence for FLJ22757 (NM_024898.1,1900-1918).
ggcaaccagacgataagaa

SEQ ID NO: 391783 - DNA, 19 bp, Homo sapiens
  siRNA target sequence for FLJ22757 (NM_024898.1,2026-2044).
cagagtccgaccaagaagt

SEQ ID NO: 391784 - DNA, 19 bp, Homo sapiens
  siRNA target sequence for FLJ22757 (NM_024898.1,2117-2135).
cacagagcccctaattctt

SEQ ID NO: 391785 - DNA, 19 bp, Homo sapiens
  siRNA target sequence for FLJ22757 (NM_024898.1,2150-2168).
ccacaaggcagctgaagat

SEQ ID NO: 391786 - DNA, 19 bp, Homo sapiens
  siRNA target sequence for FLJ22757 (NM_024898.1,2230-2248).
cagaaagcccccaaattct

SEQ ID NO: 391787 - DNA, 19 bp, Homo sapiens
  siRNA target sequence for FLJ22757 (NM_024898.1,2255-2273).
cacaaagcccaactttgat

SEQ ID NO: 391788 - DNA, 19 bp, Homo sapiens
  siRNA target sequence for C18orf9 (NM_024899.2,228-246).
ccatggtagaataagagaa

SEQ ID NO: 391789 - DNA, 19 bp, Homo sapiens
  siRNA target sequence for C18orf9 (NM_024899.2,256-274).
gagactatacgggaagaat

SEQ ID NO: 391790 - DNA, 19 bp, Homo sapiens
  siRNA target sequence for C18orf9 (NM_024899.2,326-344).
gacgtcgaggaatcattga

SEQ ID NO: 391791 - DNA, 19 bp, Homo sapiens
  siRNA target sequence for C18orf9 (NM_024899.2,401-419).
cctctccaaaacaacctat

SEQ ID NO: 391792 - DNA, 19 bp, Homo sapiens
  siRNA target sequence for C18orf9 (NM_024899.2,412-430).
caacctatttgttttgata

SEQ ID NO: 391793 - DNA, 19 bp, Homo sapiens
  siRNA target sequence for C18orf9 (NM_024899.2,427-445).
gatagacaatcgacattaa

SEQ ID NO: 391794 - DNA, 19 bp, Homo sapiens
  siRNA target sequence for C18orf9 (NM_024899.2,431-449).
gacaatcgacattaaaaaa

SEQ ID NO: 391795 - DNA, 19 bp, Homo sapiens
  siRNA target sequence for C18orf9 (NM_024899.2,464-482).
caacacggaggtatcttta

SEQ ID NO: 391796 - DNA, 19 bp, Homo sapiens
  siRNA target sequence for C18orf9 (NM_024899.2,490-508).
gttttgggtggaaaagctt

SEQ ID NO: 391797 - DNA, 19 bp, Homo sapiens
  siRNA target sequence for C18orf9 (NM_024899.2,534-552).
gcctttacctggacaagtt

SEQ ID NO: 391798 - DNA, 19 bp, Homo sapiens
  siRNA target sequence for C18orf9 (NM_024899.2,547-565).
caagtttgttcaacgttta

SEQ ID NO: 391799 - DNA, 19 bp, Homo sapiens
  siRNA target sequence for C18orf9 (NM_024899.2,550-568).
gtttgttcaacgtttactt

SEQ ID NO: 391800 - DNA, 19 bp, Homo sapiens
  siRNA target sequence for C18orf9 (NM_024899.2,583-601).
cgaaaccaacgttttcgtt

SEQ ID NO: 391801 - DNA, 19 bp, Homo sapiens
  siRNA target sequence for C18orf9 (NM_024899.2,588-606).
ccaacgttttcgttctaaa

SEQ ID NO: 391802 - DNA, 19 bp, Homo sapiens
  siRNA target sequence for C18orf9 (NM_024899.2,617-635).
gtgcctgtgaaccagattt

SEQ ID NO: 391803 - DNA, 19 bp, Homo sapiens
  siRNA target sequence for C18orf9 (NM_024899.2,623-641).
gtgaaccagattttcatga

SEQ ID NO: 391804 - DNA, 19 bp, Homo sapiens
  siRNA target sequence for C18orf9 (NM_024899.2,644-662).
gctttttacttgaagtaca

SEQ ID NO: 391805 - DNA, 19 bp, Homo sapiens
  siRNA target sequence for C18orf9 (NM_024899.2,697-715).
gattcaacaacaatgttat

SEQ ID NO: 391806 - DNA, 19 bp, Homo sapiens
  siRNA target sequence for C18orf9 (NM_024899.2,707-725).
caatgttatcaataagtga

SEQ ID NO: 391807 - DNA, 19 bp, Homo sapiens
  siRNA target sequence for C18orf9 (NM_024899.2,716-734).
caataagtgatccaattca

SEQ ID NO: 391808 - DNA, 19 bp, Homo sapiens
  siRNA target sequence for C18orf9 (NM_024899.2,770-788).
cgactttagtagcatcata

SEQ ID NO: 391809 - DNA, 19 bp, Homo sapiens
  siRNA target sequence for C18orf9 (NM_024899.2,856-874).
ggtgtaggcacagaatcaa

SEQ ID NO: 391810 - DNA, 19 bp, Homo sapiens
  siRNA target sequence for C18orf9 (NM_024899.2,857-875).
gtgtaggcacagaatcaaa

SEQ ID NO: 391811 - DNA, 19 bp, Homo sapiens
  siRNA target sequence for C18orf9 (NM_024899.2,881-899).
ctgtgggaattttaaatat

SEQ ID NO: 391812 - DNA, 19 bp, Homo sapiens
  siRNA target sequence for C18orf9 (NM_024899.2,912-930).
gtatccaccactcaatcaa

SEQ ID NO: 391813 - DNA, 19 bp, Homo sapiens
  siRNA target sequence for C18orf9 (NM_024899.2,917-935).
caccactcaatcaaacgtt

SEQ ID NO: 391814 - DNA, 19 bp, Homo sapiens
  siRNA target sequence for C18orf9 (NM_024899.2,919-937).
ccactcaatcaaacgttat

SEQ ID NO: 391815 - DNA, 19 bp, Homo sapiens
  siRNA target sequence for C18orf9 (NM_024899.2,924-942).
caatcaaacgttatctcaa

SEQ ID NO: 391816 - DNA, 19 bp, Homo sapiens
  siRNA target sequence for C18orf9 (NM_024899.2,932-950).
cgttatctcaagaagtagt

SEQ ID NO: 391817 - DNA, 19 bp, Homo sapiens
  siRNA target sequence for C18orf9 (NM_024899.2,986-1004).
cagagaaagagcgattatt

SEQ ID NO: 391818 - DNA, 19 bp, Homo sapiens
  siRNA target sequence for C18orf9 (NM_024899.2,994-1012).
gagcgattatttcttgtat

SEQ ID NO: 391819 - DNA, 19 bp, Homo sapiens
  siRNA target sequence for C18orf9 (NM_024899.2,996-1014).
gcgattatttcttgtatat

SEQ ID NO: 391820 - DNA, 19 bp, Homo sapiens
  siRNA target sequence for C18orf9 (NM_024899.2,1064-1082).
cacgactggttaagatttt

SEQ ID NO: 391821 - DNA, 19 bp, Homo sapiens
  siRNA target sequence for C18orf9 (NM_024899.2,1090-1108).
gatgaaaatgggataaata

SEQ ID NO: 391822 - DNA, 19 bp, Homo sapiens
  siRNA target sequence for C18orf9 (NM_024899.2,1111-1129).
ccagtctgttcctatgtta

SEQ ID NO: 391823 - DNA, 19 bp, Homo sapiens
  siRNA target sequence for C18orf9 (NM_024899.2,1112-1130).
cagtctgttcctatgttaa

SEQ ID NO: 391824 - DNA, 19 bp, Homo sapiens
  siRNA target sequence for C18orf9 (NM_024899.2,1141-1159).
gctggacggcttcttgata

SEQ ID NO: 391825 - DNA, 19 bp, Homo sapiens
  siRNA target sequence for C18orf9 (NM_024899.2,1166-1184).
ggcaagcagcaagatttgt

SEQ ID NO: 391826 - DNA, 19 bp, Homo sapiens
  siRNA target sequence for C18orf9 (NM_024899.2,1167-1185).
gcaagcagcaagatttgtt

SEQ ID NO: 391827 - DNA, 19 bp, Homo sapiens
  siRNA target sequence for C18orf9 (NM_024899.2,1255-1273).
ctggcctttctctgtagaa

SEQ ID NO: 391828 - DNA, 19 bp, Homo sapiens
  siRNA target sequence for C18orf9 (NM_024899.2,1375-1393).
cctcatgcatgggttatga

SEQ ID NO: 391829 - DNA, 19 bp, Homo sapiens
  siRNA target sequence for C18orf9 (NM_024899.2,1405-1423).
gatggggccatcacttttt

SEQ ID NO: 391830 - DNA, 19 bp, Homo sapiens
  siRNA target sequence for C18orf9 (NM_024899.2,1438-1456).
ggacacaggtacatccata

SEQ ID NO: 391831 - DNA, 19 bp, Homo sapiens
  siRNA target sequence for C18orf9 (NM_024899.2,1449-1467).
catccataaacctaccaat

SEQ ID NO: 391832 - DNA, 19 bp, Homo sapiens
  siRNA target sequence for C18orf9 (NM_024899.2,1501-1519).
ccactgtacccatatcgaa

SEQ ID NO: 391833 - DNA, 19 bp, Homo sapiens
  siRNA target sequence for C18orf9 (NM_024899.2,1506-1524).
gtacccatatcgaacaatt

SEQ ID NO: 391834 - DNA, 19 bp, Homo sapiens
  siRNA target sequence for C18orf9 (NM_024899.2,1509-1527).
cccatatcgaacaattggt

SEQ ID NO: 391835 - DNA, 19 bp, Homo sapiens
  siRNA target sequence for C18orf9 (NM_024899.2,1510-1528).
ccatatcgaacaattggtt

SEQ ID NO: 391836 - DNA, 19 bp, Homo sapiens
  siRNA target sequence for C18orf9 (NM_024899.2,1529-1547).
gtgttttcaaccatcagat

SEQ ID NO: 391837 - DNA, 19 bp, Homo sapiens
  siRNA target sequence for C18orf9 (NM_024899.2,1543-1561).
cagatgttcctgggaaatt

SEQ ID NO: 391838 - DNA, 19 bp, Homo sapiens
  siRNA target sequence for C18orf9 (NM_024899.2,1545-1563).
gatgttcctgggaaattgt

SEQ ID NO: 391839 - DNA, 19 bp, Homo sapiens
  siRNA target sequence for C18orf9 (NM_024899.2,1576-1594).
gcagtagaaacctgtgtat

SEQ ID NO: 391840 - DNA, 19 bp, Homo sapiens
  siRNA target sequence for C18orf9 (NM_024899.2,1586-1604).
cctgtgtatttgatttgaa

SEQ ID NO: 391841 - DNA, 19 bp, Homo sapiens
  siRNA target sequence for C18orf9 (NM_024899.2,1657-1675).
gctcctggagctacaacat

SEQ ID NO: 391842 - DNA, 19 bp, Homo sapiens
  siRNA target sequence for C18orf9 (NM_024899.2,1714-1732).
gacgcgtcagtaacaagta

SEQ ID NO: 391843 - DNA, 19 bp, Homo sapiens
  siRNA target sequence for C18orf9 (NM_024899.2,1716-1734).
cgcgtcagtaacaagtaat

SEQ ID NO: 391844 - DNA, 19 bp, Homo sapiens
  siRNA target sequence for C18orf9 (NM_024899.2,1718-1736).
cgtcagtaacaagtaatga

SEQ ID NO: 391845 - DNA, 19 bp, Homo sapiens
  siRNA target sequence for C18orf9 (NM_024899.2,1832-1850).
cagctttggcttcttatga

SEQ ID NO: 391846 - DNA, 19 bp, Homo sapiens
  siRNA target sequence for C18orf9 (NM_024899.2,1855-1873).
gagcgtacaacaagtatat

SEQ ID NO: 391847 - DNA, 19 bp, Homo sapiens
  siRNA target sequence for C18orf9 (NM_024899.2,1940-1958).
ggttcccaatacattttgt

SEQ ID NO: 391848 - DNA, 19 bp, Homo sapiens
  siRNA target sequence for C18orf9 (NM_024899.2,1944-1962).
cccaatacattttgtgtat

SEQ ID NO: 391849 - DNA, 19 bp, Homo sapiens
  siRNA target sequence for C18orf9 (NM_024899.2,2051-2069).
cagttcgtgtccgagtatt

SEQ ID NO: 391850 - DNA, 19 bp, Homo sapiens
  siRNA target sequence for C18orf9 (NM_024899.2,2053-2071).
gttcgtgtccgagtattta

SEQ ID NO: 391851 - DNA, 19 bp, Homo sapiens
  siRNA target sequence for C18orf9 (NM_024899.2,2056-2074).
cgtgtccgagtatttactt

SEQ ID NO: 391852 - DNA, 19 bp, Homo sapiens
  siRNA target sequence for C18orf9 (NM_024899.2,2057-2075).
gtgtccgagtatttactta

SEQ ID NO: 391853 - DNA, 19 bp, Homo sapiens
  siRNA target sequence for FLJ22457 (NM_024901.3,281-299).
caattcaggggaagcttta

SEQ ID NO: 391854 - DNA, 19 bp, Homo sapiens
  siRNA target sequence for FLJ22457 (NM_024901.3,313-331).
gggcccaggagcactcttt

SEQ ID NO: 391855 - DNA, 19 bp, Homo sapiens
  siRNA target sequence for FLJ22457 (NM_024901.3,353-371).
gcacttctttgaatacctt

SEQ ID NO: 391856 - DNA, 19 bp, Homo sapiens
  siRNA target sequence for FLJ22457 (NM_024901.3,405-423).
gatgattacgagcctataa

SEQ ID NO: 391857 - DNA, 19 bp, Homo sapiens
  siRNA target sequence for FLJ22457 (NM_024901.3,417-435).
cctataatcacctaccaat

SEQ ID NO: 391858 - DNA, 19 bp, Homo sapiens
  siRNA target sequence for FLJ22457 (NM_024901.3,418-436).
ctataatcacctaccaatt

SEQ ID NO: 391859 - DNA, 19 bp, Homo sapiens
  siRNA target sequence for FLJ22457 (NM_024901.3,480-498).
gagcggctgctcaaagcta

SEQ ID NO: 391860 - DNA, 19 bp, Homo sapiens
  siRNA target sequence for FLJ22457 (NM_024901.3,838-856).
gcactgagttcatttcact

SEQ ID NO: 391861 - DNA, 19 bp, Homo sapiens
  siRNA target sequence for FLJ22457 (NM_024901.3,869-887).
ggactcccacctagaacat

SEQ ID NO: 391862 - DNA, 19 bp, Homo sapiens
  siRNA target sequence for FLJ22457 (NM_024901.3,1173-1191).
gtcctgctggtcaatcttt

SEQ ID NO: 391863 - DNA, 19 bp, Homo sapiens
  siRNA target sequence for FLJ22457 (NM_024901.3,1192-1210).
gtgaaggaaccttcttaat

SEQ ID NO: 391864 - DNA, 19 bp, Homo sapiens
  siRNA target sequence for FLJ22457 (NM_024901.3,1211-1229).
gtcggttggtgatgaaaaa

SEQ ID NO: 391865 - DNA, 19 bp, Homo sapiens
  siRNA target sequence for FLJ22457 (NM_024901.3,1247-1265).
gcttcaggatgacatctta

SEQ ID NO: 391866 - DNA, 19 bp, Homo sapiens
  siRNA target sequence for FLJ22457 (NM_024901.3,1276-1294).
gtcaggggatcaatgagtt

SEQ ID NO: 391867 - DNA, 19 bp, Homo sapiens
  siRNA target sequence for FLJ22457 (NM_024901.3,1278-1296).
caggggatcaatgagttaa

SEQ ID NO: 391868 - DNA, 19 bp, Homo sapiens
  siRNA target sequence for FLJ22457 (NM_024901.3,1281-1299).
gggatcaatgagttaaaga

SEQ ID NO: 391869 - DNA, 19 bp, Homo sapiens
  siRNA target sequence for FLJ22457 (NM_024901.3,1283-1301).
gatcaatgagttaaagact

SEQ ID NO: 391870 - DNA, 19 bp, Homo sapiens
  siRNA target sequence for FLJ22457 (NM_024901.3,1352-1370).
caagattgtgggccattat

SEQ ID NO: 391871 - DNA, 19 bp, Homo sapiens
  siRNA target sequence for FLJ22457 (NM_024901.3,1355-1373).
gattgtgggccattatgct

SEQ ID NO: 391872 - DNA, 19 bp, Homo sapiens
  siRNA target sequence for FLJ22457 (NM_024901.3,1361-1379).
gggccattatgcttcctat

SEQ ID NO: 391873 - DNA, 19 bp, Homo sapiens
  siRNA target sequence for FLJ22457 (NM_024901.3,1450-1468).
ccaaccgccgatttgtgaa

SEQ ID NO: 391874 - DNA, 19 bp, Homo sapiens
  siRNA target sequence for FLJ22457 (NM_024901.3,1455-1473).
cgccgatttgtgaagaagt

SEQ ID NO: 391875 - DNA, 19 bp, Homo sapiens
  siRNA target sequence for FLJ22457 (NM_024901.3,1456-1474).
gccgatttgtgaagaagtt

SEQ ID NO: 391876 - DNA, 19 bp, Homo sapiens
  siRNA target sequence for FLJ22457 (NM_024901.3,1457-1475).
ccgatttgtgaagaagttt

SEQ ID NO: 391877 - DNA, 19 bp, Homo sapiens
  siRNA target sequence for FLJ13236 (NM_024902.2,653-671).
ggtgatagttggcatctat

SEQ ID NO: 391878 - DNA, 19 bp, Homo sapiens
  siRNA target sequence for FLJ13236 (NM_024902.2,656-674).
gatagttggcatctatttt

SEQ ID NO: 391879 - DNA, 19 bp, Homo sapiens
  siRNA target sequence for FLJ13236 (NM_024902.2,675-693).
ggccttgtggcactgatta

SEQ ID NO: 391880 - DNA, 19 bp, Homo sapiens
  siRNA target sequence for FLJ13236 (NM_024902.2,700-718).
cttccatggtcaacttcta

SEQ ID NO: 391881 - DNA, 19 bp, Homo sapiens
  siRNA target sequence for FLJ13236 (NM_024902.2,780-798).
cagacctcagactttaaga

SEQ ID NO: 391882 - DNA, 19 bp, Homo sapiens
  siRNA target sequence for FLJ13236 (NM_024902.2,821-839).
cacttcacctatcttctat

SEQ ID NO: 391883 - DNA, 19 bp, Homo sapiens
  siRNA target sequence for FLJ13236 (NM_024902.2,897-915).
catcgccgctacaaagctt

SEQ ID NO: 391884 - DNA, 19 bp, Homo sapiens
  siRNA target sequence for FLJ13236 (NM_024902.2,1027-1045).
gctatgtggcagaaacctt

SEQ ID NO: 391885 - DNA, 19 bp, Homo sapiens
  siRNA target sequence for FLJ13236 (NM_024902.2,1047-1065).
ggctccttcttgaattggt

SEQ ID NO: 391886 - DNA, 19 bp, Homo sapiens
  siRNA target sequence for FLJ13236 (NM_024902.2,1048-1066).
gctccttcttgaattggtt

SEQ ID NO: 391887 - DNA, 19 bp, Homo sapiens
  siRNA target sequence for FLJ13236 (NM_024902.2,1253-1271).
ctcagaaggggcaacaaat

SEQ ID NO: 391888 - DNA, 19 bp, Homo sapiens
  siRNA target sequence for FLJ13236 (NM_024902.2,1288-1306).
gttaccaggagctagtgaa

SEQ ID NO: 391889 - DNA, 19 bp, Homo sapiens
  siRNA target sequence for FLJ14297 (NM_024903.1,341-359).
cgaagtagaggaactcata

SEQ ID NO: 391890 - DNA, 19 bp, Homo sapiens
  siRNA target sequence for FBXO26 (NM_024907.5,556-574).
gaacggctgggccatagaa

SEQ ID NO: 391891 - DNA, 19 bp, Homo sapiens
  siRNA target sequence for FBXO26 (NM_024907.5,616-634).
cttcgtgacctctttcgaa

SEQ ID NO: 391892 - DNA, 19 bp, Homo sapiens
  siRNA target sequence for FBXO26 (NM_024907.5,779-797).
cttctggatgtgtatgaaa

SEQ ID NO: 391893 - DNA, 19 bp, Homo sapiens
  siRNA target sequence for FBXO26 (NM_024907.5,897-915).
gcatccgctacgtatcttt

SEQ ID NO: 391894 - DNA, 19 bp, Homo sapiens
  siRNA target sequence for FBXO26 (NM_024907.5,898-916).
catccgctacgtatctttt

SEQ ID NO: 391895 - DNA, 19 bp, Homo sapiens
  siRNA target sequence for FLJ12973 (NM_024908.1,71-89).
gaccccagatgaaggtaaa

SEQ ID NO: 391896 - DNA, 19 bp, Homo sapiens
  siRNA target sequence for FLJ12973 (NM_024908.1,106-124).
caaaacatcgcttatgtgt

SEQ ID NO: 391897 - DNA, 19 bp, Homo sapiens
  siRNA target sequence for FLJ12973 (NM_024908.1,179-197).
cccccttttcactcagtaa

SEQ ID NO: 391898 - DNA, 19 bp, Homo sapiens
  siRNA target sequence for FLJ12973 (NM_024908.1,180-198).
ccccttttcactcagtaat

SEQ ID NO: 391899 - DNA, 19 bp, Homo sapiens
  siRNA target sequence for FLJ12973 (NM_024908.1,221-239).
gccccaaatccctatcaga

SEQ ID NO: 391900 - DNA, 19 bp, Homo sapiens
  siRNA target sequence for FLJ12973 (NM_024908.1,222-240).
ccccaaatccctatcagaa

SEQ ID NO: 391901 - DNA, 19 bp, Homo sapiens
  siRNA target sequence for FLJ12973 (NM_024908.1,256-274).
gaagtggcgtgtaagaaga

SEQ ID NO: 391902 - DNA, 19 bp, Homo sapiens
  siRNA target sequence for FLJ12973 (NM_024908.1,259-277).
gtggcgtgtaagaagacta

SEQ ID NO: 391903 - DNA, 19 bp, Homo sapiens
  siRNA target sequence for FLJ12973 (NM_024908.1,261-279).
ggcgtgtaagaagactaaa

SEQ ID NO: 391904 - DNA, 19 bp, Homo sapiens
  siRNA target sequence for FLJ12973 (NM_024908.1,299-317).
ggattatacctccaaagat

SEQ ID NO: 391905 - DNA, 19 bp, Homo sapiens
  siRNA target sequence for FLJ12973 (NM_024908.1,363-381).
ctcagctgttcatactgaa

SEQ ID NO: 391906 - DNA, 19 bp, Homo sapiens
  siRNA target sequence for FLJ12973 (NM_024908.1,367-385).
gctgttcatactgaaagta

SEQ ID NO: 391907 - DNA, 19 bp, Homo sapiens
  siRNA target sequence for FLJ12973 (NM_024908.1,417-435).
gatgaatctcagtgttgat

SEQ ID NO: 391908 - DNA, 19 bp, Homo sapiens
  siRNA target sequence for FLJ12973 (NM_024908.1,486-504).
ggatttttcgggattgtca

SEQ ID NO: 391909 - DNA, 19 bp, Homo sapiens
  siRNA target sequence for FLJ12973 (NM_024908.1,496-514).
ggattgtcaccctacgaaa

SEQ ID NO: 391910 - DNA, 19 bp, Homo sapiens
  siRNA target sequence for FLJ12973 (NM_024908.1,587-605).
gactccgtgaaatgataga

SEQ ID NO: 391911 - DNA, 19 bp, Homo sapiens
  siRNA target sequence for FLJ12973 (NM_024908.1,589-607).
ctccgtgaaatgatagaga

SEQ ID NO: 391912 - DNA, 19 bp, Homo sapiens
  siRNA target sequence for FLJ12973 (NM_024908.1,668-686).
gaaggtcaatgcgattact

SEQ ID NO: 391913 - DNA, 19 bp, Homo sapiens
  siRNA target sequence for FLJ12973 (NM_024908.1,671-689).
ggtcaatgcgattactaaa

SEQ ID NO: 391914 - DNA, 19 bp, Homo sapiens
  siRNA target sequence for FLJ12973 (NM_024908.1,672-690).
gtcaatgcgattactaaaa

SEQ ID NO: 391915 - DNA, 19 bp, Homo sapiens
  siRNA target sequence for FLJ12973 (NM_024908.1,674-692).
caatgcgattactaaaagt

SEQ ID NO: 391916 - DNA, 19 bp, Homo sapiens
  siRNA target sequence for FLJ12973 (NM_024908.1,694-712).
gatccttcgggagtttcat

SEQ ID NO: 391917 - DNA, 19 bp, Homo sapiens
  siRNA target sequence for FLJ12973 (NM_024908.1,725-743).
caacaccgccgacattagt

SEQ ID NO: 391918 - DNA, 19 bp, Homo sapiens
  siRNA target sequence for FLJ12973 (NM_024908.1,807-825).
caacaatgaacgatttaaa

SEQ ID NO: 391919 - DNA, 19 bp, Homo sapiens
  siRNA target sequence for FLJ12973 (NM_024908.1,810-828).
caatgaacgatttaaagga

SEQ ID NO: 391920 - DNA, 19 bp, Homo sapiens
  siRNA target sequence for FLJ12973 (NM_024908.1,879-897).
gaagggattatctagcatt

SEQ ID NO: 391921 - DNA, 19 bp, Homo sapiens
  siRNA target sequence for FLJ12973 (NM_024908.1,882-900).
gggattatctagcattaaa

SEQ ID NO: 391922 - DNA, 19 bp, Homo sapiens
  siRNA target sequence for FLJ12973 (NM_024908.1,902-920).
gctacaaagccaatttaaa

SEQ ID NO: 391923 - DNA, 19 bp, Homo sapiens
  siRNA target sequence for FLJ12973 (NM_024908.1,924-942).
catggtcattagtgaagat

SEQ ID NO: 391924 - DNA, 19 bp, Homo sapiens
  siRNA target sequence for FLJ12973 (NM_024908.1,940-958).
gataccgtttacaaagtta

SEQ ID NO: 391925 - DNA, 19 bp, Homo sapiens
  siRNA target sequence for FLJ12973 (NM_024908.1,955-973).
gttaccacaggcccaatat

SEQ ID NO: 391926 - DNA, 19 bp, Homo sapiens
  siRNA target sequence for FLJ12973 (NM_024908.1,960-978).
cacaggcccaatattctct

SEQ ID NO: 391927 - DNA, 19 bp, Homo sapiens
  siRNA target sequence for FLJ12973 (NM_024908.1,981-999).
ggctctccatccatcagaa

SEQ ID NO: 391928 - DNA, 19 bp, Homo sapiens
  siRNA target sequence for FLJ12973 (NM_024908.1,982-1000).
gctctccatccatcagaaa

SEQ ID NO: 391929 - DNA, 19 bp, Homo sapiens
  siRNA target sequence for FLJ12973 (NM_024908.1,985-1003).
ctccatccatcagaaacta

SEQ ID NO: 391930 - DNA, 19 bp, Homo sapiens
  siRNA target sequence for FLJ12973 (NM_024908.1,1108-1126).
ccagttagctgtctttact

SEQ ID NO: 391931 - DNA, 19 bp, Homo sapiens
  siRNA target sequence for FLJ12973 (NM_024908.1,1109-1127).
cagttagctgtctttactt

SEQ ID NO: 391932 - DNA, 19 bp, Homo sapiens
  siRNA target sequence for FLJ12973 (NM_024908.1,1176-1194).
gttacgctgtggggatttt

SEQ ID NO: 391933 - DNA, 19 bp, Homo sapiens
  siRNA target sequence for FLJ12973 (NM_024908.1,1180-1198).
cgctgtggggatttttcca

SEQ ID NO: 391934 - DNA, 19 bp, Homo sapiens
  siRNA target sequence for FLJ12973 (NM_024908.1,1324-1342).
cggacacctggaacttctt

SEQ ID NO: 391935 - DNA, 19 bp, Homo sapiens
  siRNA target sequence for FLJ12973 (NM_024908.1,1325-1343).
ggacacctggaacttctta

SEQ ID NO: 391936 - DNA, 19 bp, Homo sapiens
  siRNA target sequence for FLJ12973 (NM_024908.1,1396-1414).
ccagtgcatagacagtatt

SEQ ID NO: 391937 - DNA, 19 bp, Homo sapiens
  siRNA target sequence for FLJ12973 (NM_024908.1,1397-1415).
cagtgcatagacagtattt

SEQ ID NO: 391938 - DNA, 19 bp, Homo sapiens
  siRNA target sequence for FLJ12973 (NM_024908.1,1424-1442).
ccggattgagggatactca

SEQ ID NO: 391939 - DNA, 19 bp, Homo sapiens
  siRNA target sequence for FLJ12973 (NM_024908.1,1425-1443).
cggattgagggatactcat

SEQ ID NO: 391940 - DNA, 19 bp, Homo sapiens
  siRNA target sequence for FLJ12973 (NM_024908.1,1427-1445).
gattgagggatactcatat

SEQ ID NO: 391941 - DNA, 19 bp, Homo sapiens
  siRNA target sequence for FLJ12973 (NM_024908.1,1431-1449).
gagggatactcatatttat

SEQ ID NO: 391942 - DNA, 19 bp, Homo sapiens
  siRNA target sequence for FLJ12973 (NM_024908.1,1450-1468).
gatgcaaggcgattgaatt

SEQ ID NO: 391943 - DNA, 19 bp, Homo sapiens
  siRNA target sequence for FLJ12973 (NM_024908.1,1453-1471).
gcaaggcgattgaattcca

SEQ ID NO: 391944 - DNA, 19 bp, Homo sapiens
  siRNA target sequence for FLJ12973 (NM_024908.1,1493-1511).
ctttgactgaacatacaaa

SEQ ID NO: 391945 - DNA, 19 bp, Homo sapiens
  siRNA target sequence for FLJ12973 (NM_024908.1,1504-1522).
catacaaagagcattgctt

SEQ ID NO: 391946 - DNA, 19 bp, Homo sapiens
  siRNA target sequence for FLJ12973 (NM_024908.1,1515-1533).
cattgcttccgcctatttt

SEQ ID NO: 391947 - DNA, 19 bp, Homo sapiens
  siRNA target sequence for FLJ12973 (NM_024908.1,1527-1545).
ctatttttcacctcttact

SEQ ID NO: 391948 - DNA, 19 bp, Homo sapiens
  siRNA target sequence for FLJ12973 (NM_024908.1,1598-1616).
gcagctgtatatcttctaa

SEQ ID NO: 391949 - DNA, 19 bp, Homo sapiens
  siRNA target sequence for FLJ12973 (NM_024908.1,1601-1619).
gctgtatatcttctaagat

SEQ ID NO: 391950 - DNA, 19 bp, Homo sapiens
  siRNA target sequence for FLJ12973 (NM_024908.1,1682-1700).
ccatgtgggatcctaaaca

SEQ ID NO: 391951 - DNA, 19 bp, Homo sapiens
  siRNA target sequence for FLJ12973 (NM_024908.1,1683-1701).
catgtgggatcctaaacaa

SEQ ID NO: 391952 - DNA, 19 bp, Homo sapiens
  siRNA target sequence for FLJ12973 (NM_024908.1,1686-1704).
gtgggatcctaaacaagaa

SEQ ID NO: 391953 - DNA, 19 bp, Homo sapiens
  siRNA target sequence for FLJ12973 (NM_024908.1,1732-1750).
catccacgacgggtagaaa

SEQ ID NO: 391954 - DNA, 19 bp, Homo sapiens
  siRNA target sequence for FLJ12973 (NM_024908.1,1735-1753).
ccacgacgggtagaaatct

SEQ ID NO: 391955 - DNA, 19 bp, Homo sapiens
  siRNA target sequence for FLJ12973 (NM_024908.1,1736-1754).
cacgacgggtagaaatctt

SEQ ID NO: 391956 - DNA, 19 bp, Homo sapiens
  siRNA target sequence for FLJ12973 (NM_024908.1,1766-1784).
gaaagagggtgcattcgtt

SEQ ID NO: 391957 - DNA, 19 bp, Homo sapiens
  siRNA target sequence for FLJ12973 (NM_024908.1,1781-1799).
cgtttggtggagaatacct

SEQ ID NO: 391958 - DNA, 19 bp, Homo sapiens
  siRNA target sequence for FLJ12973 (NM_024908.1,1782-1800).
gtttggtggagaatacctt

SEQ ID NO: 391959 - DNA, 19 bp, Homo sapiens
  siRNA target sequence for FLJ12973 (NM_024908.1,1827-1845).
gcacccaactcggtatatt

SEQ ID NO: 391960 - DNA, 19 bp, Homo sapiens
  siRNA target sequence for FLJ12973 (NM_024908.1,1828-1846).
cacccaactcggtatattt

SEQ ID NO: 391961 - DNA, 19 bp, Homo sapiens
  siRNA target sequence for FLJ12973 (NM_024908.1,1866-1884).
cgggaagatacatgttttt

SEQ ID NO: 391962 - DNA, 19 bp, Homo sapiens
  siRNA target sequence for C6orf134 (NM_024909.1,188-206).
ctttccgctcctatcacta

SEQ ID NO: 391963 - DNA, 19 bp, Homo sapiens
  siRNA target sequence for C6orf134 (NM_024909.1,225-243).
gtaaccgccatgttgttta

SEQ ID NO: 391964 - DNA, 19 bp, Homo sapiens
  siRNA target sequence for C6orf134 (NM_024909.1,229-247).
ccgccatgttgtttatatt

SEQ ID NO: 391965 - DNA, 19 bp, Homo sapiens
  siRNA target sequence for C6orf134 (NM_024909.1,231-249).
gccatgttgtttatattct

SEQ ID NO: 391966 - DNA, 19 bp, Homo sapiens
  siRNA target sequence for C6orf134 (NM_024909.1,411-429).
gccatgggcgagaactctt

SEQ ID NO: 391967 - DNA, 19 bp, Homo sapiens
  siRNA target sequence for C6orf134 (NM_024909.1,419-437).
cgagaactcttccagtata

SEQ ID NO: 391968 - DNA, 19 bp, Homo sapiens
  siRNA target sequence for C6orf134 (NM_024909.1,420-438).
gagaactcttccagtatat

SEQ ID NO: 391969 - DNA, 19 bp, Homo sapiens
  siRNA target sequence for C6orf134 (NM_024909.1,537-555).
cagtcccacaggtgaacaa

SEQ ID NO: 391970 - DNA, 19 bp, Homo sapiens
  siRNA target sequence for C6orf134 (NM_024909.1,541-559).
cccacaggtgaacaacttt

SEQ ID NO: 391971 - DNA, 19 bp, Homo sapiens
  siRNA target sequence for C6orf134 (NM_024909.1,543-561).
cacaggtgaacaactttgt

SEQ ID NO: 391972 - DNA, 19 bp, Homo sapiens
  siRNA target sequence for C6orf134 (NM_024909.1,717-735).
cctctagtgaccgagaatt

SEQ ID NO: 391973 - DNA, 19 bp, Homo sapiens
  siRNA target sequence for C6orf134 (NM_024909.1,718-736).
ctctagtgaccgagaattt

SEQ ID NO: 391974 - DNA, 19 bp, Homo sapiens
  siRNA target sequence for C6orf134 (NM_024909.1,720-738).
ctagtgaccgagaatttct

SEQ ID NO: 391975 - DNA, 19 bp, Homo sapiens
  siRNA target sequence for FLJ12700 (NM_024910.1,471-489).
gggggagtcccctaagact

SEQ ID NO: 391976 - DNA, 19 bp, Homo sapiens
  siRNA target sequence for FLJ12700 (NM_024910.1,472-490).
ggggagtcccctaagacta

SEQ ID NO: 391977 - DNA, 19 bp, Homo sapiens
  siRNA target sequence for FLJ23091 (NM_024911.3,227-245).
ggctggggcaattatagaa

SEQ ID NO: 391978 - DNA, 19 bp, Homo sapiens
  siRNA target sequence for FLJ23091 (NM_024911.3,228-246).
gctggggcaattatagaaa

SEQ ID NO: 391979 - DNA, 19 bp, Homo sapiens
  siRNA target sequence for FLJ23091 (NM_024911.3,229-247).
ctggggcaattatagaaaa

SEQ ID NO: 391980 - DNA, 19 bp, Homo sapiens
  siRNA target sequence for FLJ23091 (NM_024911.3,382-400).
cccgtaagaaccatcacaa

SEQ ID NO: 391981 - DNA, 19 bp, Homo sapiens
  siRNA target sequence for FLJ23091 (NM_024911.3,416-434).
gccttggggacccaatcat

SEQ ID NO: 391982 - DNA, 19 bp, Homo sapiens
  siRNA target sequence for FLJ23091 (NM_024911.3,417-435).
ccttggggacccaatcatt

SEQ ID NO: 391983 - DNA, 19 bp, Homo sapiens
  siRNA target sequence for FLJ23091 (NM_024911.3,421-439).
ggggacccaatcattgtga

SEQ ID NO: 391984 - DNA, 19 bp, Homo sapiens
  siRNA target sequence for FLJ23091 (NM_024911.3,440-458).
caagatccgagacattgaa

SEQ ID NO: 391985 - DNA, 19 bp, Homo sapiens
  siRNA target sequence for FLJ23091 (NM_024911.3,463-481).
caattccaagggaaattga

SEQ ID NO: 391986 - DNA, 19 bp, Homo sapiens
  siRNA target sequence for FLJ23091 (NM_024911.3,573-591).
gacattgccttcaagctaa

SEQ ID NO: 391987 - DNA, 19 bp, Homo sapiens
  siRNA target sequence for FLJ23091 (NM_024911.3,693-711).
ccacggaaactcaaatgca

SEQ ID NO: 391988 - DNA, 19 bp, Homo sapiens
  siRNA target sequence for FLJ23091 (NM_024911.3,702-720).
ctcaaatgcaccttcacat

SEQ ID NO: 391989 - DNA, 19 bp, Homo sapiens
  siRNA target sequence for FLJ23091 (NM_024911.3,743-761).
gggccgttactatgaatgt

SEQ ID NO: 391990 - DNA, 19 bp, Homo sapiens
  siRNA target sequence for FLJ23091 (NM_024911.3,745-763).
gccgttactatgaatgtga

SEQ ID NO: 391991 - DNA, 19 bp, Homo sapiens
  siRNA target sequence for FLJ23091 (NM_024911.3,786-804).
gggtctgtggcccataagt

SEQ ID NO: 391992 - DNA, 19 bp, Homo sapiens
  siRNA target sequence for FLJ23091 (NM_024911.3,787-805).
ggtctgtggcccataagtt

SEQ ID NO: 391993 - DNA, 19 bp, Homo sapiens
  siRNA target sequence for FLJ23091 (NM_024911.3,788-806).
gtctgtggcccataagttt

SEQ ID NO: 391994 - DNA, 19 bp, Homo sapiens
  siRNA target sequence for FLJ23091 (NM_024911.3,790-808).
ctgtggcccataagtttta

SEQ ID NO: 391995 - DNA, 19 bp, Homo sapiens
  siRNA target sequence for FLJ23091 (NM_024911.3,794-812).
ggcccataagttttacctt

SEQ ID NO: 391996 - DNA, 19 bp, Homo sapiens
  siRNA target sequence for FLJ23091 (NM_024911.3,795-813).
gcccataagttttaccttt

SEQ ID NO: 391997 - DNA, 19 bp, Homo sapiens
  siRNA target sequence for FLJ23091 (NM_024911.3,818-836).
catccggctgcctgtgaat

SEQ ID NO: 391998 - DNA, 19 bp, Homo sapiens
  siRNA target sequence for FLJ23091 (NM_024911.3,890-908).
ggggatccaccaaaatgga

SEQ ID NO: 391999 - DNA, 19 bp, Homo sapiens
  siRNA target sequence for FLJ23091 (NM_024911.3,1051-1069).
ccatgacctttatcaatat

SEQ ID NO: 392000 - DNA, 19 bp, Homo sapiens
  siRNA target sequence for FLJ23091 (NM_024911.3,1130-1148).
ccgacagggcatcttctat

SEQ ID NO: 392001 - DNA, 19 bp, Homo sapiens
  siRNA target sequence for FLJ23091 (NM_024911.3,1288-1306).
gtgagagaggggtacaact

SEQ ID NO: 392002 - DNA, 19 bp, Homo sapiens
  siRNA target sequence for FLJ23091 (NM_024911.3,1305-1323).
ctcacgaatcccttctaca

SEQ ID NO: 392003 - DNA, 19 bp, Homo sapiens
  siRNA target sequence for FLJ23091 (NM_024911.3,1309-1327).
cgaatcccttctacagtat

SEQ ID NO: 392004 - DNA, 19 bp, Homo sapiens
  siRNA target sequence for FLJ23091 (NM_024911.3,1615-1633).
gcgtcacagtccaagtgaa

SEQ ID NO: 392005 - DNA, 19 bp, Homo sapiens
  siRNA target sequence for FLJ23091 (NM_024911.3,1664-1682).
gtggaatctgtatgtcttt

SEQ ID NO: 392006 - DNA, 19 bp, Homo sapiens
  siRNA target sequence for FLJ23091 (NM_024911.3,1701-1719).
gcaccatcccataaaaact

SEQ ID NO: 392007 - DNA, 19 bp, Homo sapiens
  siRNA target sequence for FLJ23091 (NM_024911.3,1702-1720).
caccatcccataaaaacta

SEQ ID NO: 392008 - DNA, 19 bp, Homo sapiens
  siRNA target sequence for FLJ23091 (NM_024911.3,1806-1824).
cccactgagatctacaagt

SEQ ID NO: 392009 - DNA, 19 bp, Homo sapiens
  siRNA target sequence for FLJ21986 (NM_024913.3,424-442).
ccttgtcgtcggcgatttt

SEQ ID NO: 392010 - DNA, 19 bp, Homo sapiens
  siRNA target sequence for FLJ21986 (NM_024913.3,593-611).
gattctctcaggacaaaca

SEQ ID NO: 392011 - DNA, 19 bp, Homo sapiens
  siRNA target sequence for FLJ21986 (NM_024913.3,688-706).
ggccgaagggccatactct

SEQ ID NO: 392012 - DNA, 19 bp, Homo sapiens
  siRNA target sequence for FLJ21986 (NM_024913.3,689-707).
gccgaagggccatactcta

SEQ ID NO: 392013 - DNA, 19 bp, Homo sapiens
  siRNA target sequence for FLJ21986 (NM_024913.3,777-795).
ggttgtcatcgctgaagaa

SEQ ID NO: 392014 - DNA, 19 bp, Homo sapiens
  siRNA target sequence for FLJ21986 (NM_024913.3,899-917).
gtatatccaaggaagtcat

SEQ ID NO: 392015 - DNA, 19 bp, Homo sapiens
  siRNA target sequence for FLJ21986 (NM_024913.3,921-939).
ccagttaggtttacatcaa

SEQ ID NO: 392016 - DNA, 19 bp, Homo sapiens
  siRNA target sequence for FLJ21986 (NM_024913.3,922-940).
cagttaggtttacatcaaa

SEQ ID NO: 392017 - DNA, 19 bp, Homo sapiens
  siRNA target sequence for FLJ21986 (NM_024913.3,934-952).
catcaaaaggcaaacagat

SEQ ID NO: 392018 - DNA, 19 bp, Homo sapiens
  siRNA target sequence for FLJ21986 (NM_024913.3,988-1006).
ggattatgtcaaatagtta

SEQ ID NO: 392019 - DNA, 19 bp, Homo sapiens
  siRNA target sequence for FLJ21986 (NM_024913.3,995-1013).
gtcaaatagttagaagatt

SEQ ID NO: 392020 - DNA, 19 bp, Homo sapiens
  siRNA target sequence for FLJ21986 (NM_024913.3,1053-1071).
ggatcagggaatgcaatta

SEQ ID NO: 392021 - DNA, 19 bp, Homo sapiens
  siRNA target sequence for FLJ21986 (NM_024913.3,1054-1072).
gatcagggaatgcaattaa

SEQ ID NO: 392022 - DNA, 19 bp, Homo sapiens
  siRNA target sequence for FLJ21986 (NM_024913.3,1079-1097).
gtacttcgagtcacctttt

SEQ ID NO: 392023 - DNA, 19 bp, Homo sapiens
  siRNA target sequence for FLJ21986 (NM_024913.3,1082-1100).
cttcgagtcaccttttaaa

SEQ ID NO: 392024 - DNA, 19 bp, Homo sapiens
  siRNA target sequence for FLJ21986 (NM_024913.3,1139-1157).
gtcgtgaacagctgaatga

SEQ ID NO: 392025 - DNA, 19 bp, Homo sapiens
  siRNA target sequence for FLJ21986 (NM_024913.3,1188-1206).
ctttcgagccgaagatcta

SEQ ID NO: 392026 - DNA, 19 bp, Homo sapiens
  siRNA target sequence for FLJ21986 (NM_024913.3,1201-1219).
gatctatctgtgattctta

SEQ ID NO: 392027 - DNA, 19 bp, Homo sapiens
  siRNA target sequence for FLJ21986 (NM_024913.3,1247-1265).
cccctttgcgtgcattcat

SEQ ID NO: 392028 - DNA, 19 bp, Homo sapiens
  siRNA target sequence for FLJ21986 (NM_024913.3,1250-1268).
ctttgcgtgcattcattca

SEQ ID NO: 392029 - DNA, 19 bp, Homo sapiens
  siRNA target sequence for FLJ21986 (NM_024913.3,1313-1331).
ctgtcaagctgcaaacatt

SEQ ID NO: 392030 - DNA, 19 bp, Homo sapiens
  siRNA target sequence for FLJ21986 (NM_024913.3,1386-1404).
ggaagcaattggcaaacta

SEQ ID NO: 392031 - DNA, 19 bp, Homo sapiens
  siRNA target sequence for FLJ21986 (NM_024913.3,1405-1423).
ctgctagcggctgaagtat

SEQ ID NO: 392032 - DNA, 19 bp, Homo sapiens
  siRNA target sequence for FLJ21986 (NM_024913.3,1408-1426).
ctagcggctgaagtattca

SEQ ID NO: 392033 - DNA, 19 bp, Homo sapiens
  siRNA target sequence for FLJ21986 (NM_024913.3,1417-1435).
gaagtattcagtgaaacat

SEQ ID NO: 392034 - DNA, 19 bp, Homo sapiens
  siRNA target sequence for FLJ21986 (NM_024913.3,1466-1484).
gcagattctgctttcaact

SEQ ID NO: 392035 - DNA, 19 bp, Homo sapiens
  siRNA target sequence for FLJ21986 (NM_024913.3,1533-1551).
ccaggtacacgagcattta

SEQ ID NO: 392036 - DNA, 19 bp, Homo sapiens
  siRNA target sequence for FLJ21986 (NM_024913.3,1536-1554).
ggtacacgagcatttaaat

SEQ ID NO: 392037 - DNA, 19 bp, Homo sapiens
  siRNA target sequence for FLJ21986 (NM_024913.3,1561-1579).
gattatgataatatggatt

SEQ ID NO: 392038 - DNA, 19 bp, Homo sapiens
  siRNA target sequence for FLJ21986 (NM_024913.3,1576-1594).
gattttgaggaccaaaata

SEQ ID NO: 392039 - DNA, 19 bp, Homo sapiens
  siRNA target sequence for FLJ21986 (NM_024913.3,1677-1695).
gagactttatagatcagat

SEQ ID NO: 392040 - DNA, 19 bp, Homo sapiens
  siRNA target sequence for FLJ21986 (NM_024913.3,1747-1765).
gaagaaattaactcaatta

SEQ ID NO: 392041 - DNA, 19 bp, Homo sapiens
  siRNA target sequence for FLJ21986 (NM_024913.3,1807-1825).
ctgctcttcccatctacta

SEQ ID NO: 392042 - DNA, 19 bp, Homo sapiens
  siRNA target sequence for FLJ21986 (NM_024913.3,1809-1827).
gctcttcccatctactact

SEQ ID NO: 392043 - DNA, 19 bp, Homo sapiens
  siRNA target sequence for FLJ21986 (NM_024913.3,1837-1855).
cagtcactgatgcatgaat

SEQ ID NO: 392044 - DNA, 19 bp, Homo sapiens
  siRNA target sequence for FLJ21986 (NM_024913.3,1839-1857).
gtcactgatgcatgaattt

SEQ ID NO: 392045 - DNA, 19 bp, Homo sapiens
  siRNA target sequence for FLJ21986 (NM_024913.3,1902-1920).
ccaatactggtctctttta

SEQ ID NO: 392046 - DNA, 19 bp, Homo sapiens
  siRNA target sequence for FLJ21986 (NM_024913.3,1903-1921).
caatactggtctcttttaa

SEQ ID NO: 392047 - DNA, 19 bp, Homo sapiens
  siRNA target sequence for FLJ21986 (NM_024913.3,2053-2071).
gcagttccacaaattaaaa

SEQ ID NO: 392048 - DNA, 19 bp, Homo sapiens
  siRNA target sequence for FLJ21986 (NM_024913.3,2117-2135).
gtcatatcaagcagatctt

SEQ ID NO: 392049 - DNA, 19 bp, Homo sapiens
  siRNA target sequence for FLJ21986 (NM_024913.3,2170-2188).
catccaaagatcaaagatt

SEQ ID NO: 392050 - DNA, 19 bp, Homo sapiens
  siRNA target sequence for FLJ21986 (NM_024913.3,2173-2191).
ccaaagatcaaagattatt

SEQ ID NO: 392051 - DNA, 19 bp, Homo sapiens
  siRNA target sequence for FLJ21986 (NM_024913.3,2178-2196).
gatcaaagattattactgt

SEQ ID NO: 392052 - DNA, 19 bp, Homo sapiens
  siRNA target sequence for FLJ21986 (NM_024913.3,2367-2385).
gactctgatcacgtacaaa

SEQ ID NO: 392053 - DNA, 19 bp, Homo sapiens
  siRNA target sequence for FLJ21986 (NM_024913.3,2371-2389).
ctgatcacgtacaaactca

SEQ ID NO: 392054 - DNA, 19 bp, Homo sapiens
  siRNA target sequence for FLJ21986 (NM_024913.3,2382-2400).
caaactcaccatctataga

SEQ ID NO: 392055 - DNA, 19 bp, Homo sapiens
  siRNA target sequence for FLJ21986 (NM_024913.3,2411-2429).
caagtctgcccttgtttga

SEQ ID NO: 392056 - DNA, 19 bp, Homo sapiens
  siRNA target sequence for FLJ21986 (NM_024913.3,2538-2556).
gtctgaactaaaaagatgt

SEQ ID NO: 392057 - DNA, 19 bp, Homo sapiens
  siRNA target sequence for FLJ21986 (NM_024913.3,2555-2573).
gtccatctggggacatgaa

SEQ ID NO: 392058 - DNA, 19 bp, Homo sapiens
  siRNA target sequence for FLJ21986 (NM_024913.3,2587-2605).
gtgccttgccttagttgtt

SEQ ID NO: 392059 - DNA, 19 bp, Homo sapiens
  siRNA target sequence for FLJ21986 (NM_024913.3,2649-2667).
ccacaactgccaatatggt

SEQ ID NO: 392060 - DNA, 19 bp, Homo sapiens
  siRNA target sequence for FLJ21986 (NM_024913.3,2659-2677).
caatatggtgtcctaacta

SEQ ID NO: 392061 - DNA, 19 bp, Homo sapiens
  siRNA target sequence for FLJ21986 (NM_024913.3,2735-2753).
ccaacagagggatcatgta

SEQ ID NO: 392062 - DNA, 19 bp, Homo sapiens
  siRNA target sequence for FLJ21986 (NM_024913.3,2741-2759).
gagggatcatgtactatct

SEQ ID NO: 392063 - DNA, 19 bp, Homo sapiens
  siRNA target sequence for FLJ21986 (NM_024913.3,2743-2761).
gggatcatgtactatctta

SEQ ID NO: 392064 - DNA, 19 bp, Homo sapiens
  siRNA target sequence for FLJ21986 (NM_024913.3,2796-2814).
gaaagtacatggcactaaa

SEQ ID NO: 392065 - DNA, 19 bp, Homo sapiens
  siRNA target sequence for FLJ21986 (NM_024913.3,2800-2818).
gtacatggcactaaattct

SEQ ID NO: 392066 - DNA, 19 bp, Homo sapiens
  siRNA target sequence for FLJ21986 (NM_024913.3,2806-2824).
ggcactaaattctatcaca

SEQ ID NO: 392067 - DNA, 19 bp, Homo sapiens
  siRNA target sequence for FLJ21986 (NM_024913.3,2827-2845).
gtcaatggtgggaagactt

SEQ ID NO: 392068 - DNA, 19 bp, Homo sapiens
  siRNA target sequence for FLJ21986 (NM_024913.3,2877-2895).
gataagcccttcattgaga

SEQ ID NO: 392069 - DNA, 19 bp, Homo sapiens
  siRNA target sequence for FLJ21986 (NM_024913.3,2888-2906).
cattgagaccaacatttga

SEQ ID NO: 392070 - DNA, 19 bp, Homo sapiens
  siRNA target sequence for FLJ21986 (NM_024913.3,2933-2951).
gatcacgtcccctagagaa

SEQ ID NO: 392071 - DNA, 19 bp, Homo sapiens
  siRNA target sequence for FLJ21986 (NM_024913.3,2954-2972).
ctggccagactgtattggt

SEQ ID NO: 392072 - DNA, 19 bp, Homo sapiens
  siRNA target sequence for FLJ21986 (NM_024913.3,2999-3017).
ccaatcacctgcaaattat

SEQ ID NO: 392073 - DNA, 19 bp, Homo sapiens
  siRNA target sequence for FLJ21986 (NM_024913.3,3000-3018).
caatcacctgcaaattatt

SEQ ID NO: 392074 - DNA, 19 bp, Homo sapiens
  siRNA target sequence for FLJ21986 (NM_024913.3,3094-3112).
ccagtggatggagtacatt

SEQ ID NO: 392075 - DNA, 19 bp, Homo sapiens
  siRNA target sequence for FLJ21986 (NM_024913.3,3095-3113).
cagtggatggagtacattt

SEQ ID NO: 392076 - DNA, 19 bp, Homo sapiens
  siRNA target sequence for FLJ21986 (NM_024913.3,3123-3141).
gagtgaagtacagaactta

SEQ ID NO: 392077 - DNA, 19 bp, Homo sapiens
  siRNA target sequence for FLJ21986 (NM_024913.3,3193-3211).
gtagttgacacattcacta

SEQ ID NO: 392078 - DNA, 19 bp, Homo sapiens
  siRNA target sequence for FLJ21986 (NM_024913.3,3196-3214).
gttgacacattcactataa

SEQ ID NO: 392079 - DNA, 19 bp, Homo sapiens
  siRNA target sequence for FLJ21986 (NM_024913.3,3215-3233).
caatggggcgttacaaaga

SEQ ID NO: 392080 - DNA, 19 bp, Homo sapiens
  siRNA target sequence for FLJ21986 (NM_024913.3,3219-3237).
ggggcgttacaaagagttt

SEQ ID NO: 392081 - DNA, 19 bp, Homo sapiens
  siRNA target sequence for FLJ21986 (NM_024913.3,3245-3263).
ggaagtgtggatgtcattt

SEQ ID NO: 392082 - DNA, 19 bp, Homo sapiens
  siRNA target sequence for FLJ21986 (NM_024913.3,3264-3282).
ccatgaggtagtgaaatca

SEQ ID NO: 392083 - DNA, 19 bp, Homo sapiens
  siRNA target sequence for FLJ21986 (NM_024913.3,3274-3292).
gtgaaatcaaagttatcca

SEQ ID NO: 392084 - DNA, 19 bp, Homo sapiens
  siRNA target sequence for FLJ21986 (NM_024913.3,3367-3385).
ctacaacaaggcactgtaa

SEQ ID NO: 392085 - DNA, 19 bp, Homo sapiens
  siRNA target sequence for FLJ21986 (NM_024913.3,3373-3391).
caaggcactgtaacaaatt

SEQ ID NO: 392086 - DNA, 19 bp, Homo sapiens
  siRNA target sequence for FLJ21986 (NM_024913.3,3378-3396).
cactgtaacaaattttcga

SEQ ID NO: 392087 - DNA, 19 bp, Homo sapiens
  siRNA target sequence for FLJ21986 (NM_024913.3,3418-3436).
ccaataaatcaggtttgtt

SEQ ID NO: 392088 - DNA, 19 bp, Homo sapiens
  siRNA target sequence for FLJ21986 (NM_024913.3,3429-3447).
ggtttgttctgaaatcctt

SEQ ID NO: 392089 - DNA, 19 bp, Homo sapiens
  siRNA target sequence for TFCP2L3 (NM_024915.1,17-35).
cacaagagtcggacaataa

SEQ ID NO: 392090 - DNA, 19 bp, Homo sapiens
  siRNA target sequence for TFCP2L3 (NM_024915.1,19-37).
caagagtcggacaataata

SEQ ID NO: 392091 - DNA, 19 bp, Homo sapiens
  siRNA target sequence for TFCP2L3 (NM_024915.1,22-40).
gagtcggacaataataaaa

SEQ ID NO: 392092 - DNA, 19 bp, Homo sapiens
  siRNA target sequence for TFCP2L3 (NM_024915.1,24-42).
gtcggacaataataaaaga

SEQ ID NO: 392093 - DNA, 19 bp, Homo sapiens
  siRNA target sequence for TFCP2L3 (NM_024915.1,65-83).
ccagtgaccctccattcaa

SEQ ID NO: 392094 - DNA, 19 bp, Homo sapiens
  siRNA target sequence for TFCP2L3 (NM_024915.1,66-84).
cagtgaccctccattcaat

SEQ ID NO: 392095 - DNA, 19 bp, Homo sapiens
  siRNA target sequence for TFCP2L3 (NM_024915.1,112-130).
gaagcctggaagtcatact

SEQ ID NO: 392096 - DNA, 19 bp, Homo sapiens
  siRNA target sequence for TFCP2L3 (NM_024915.1,245-263).
ggctgctgtctgtaagcaa

SEQ ID NO: 392097 - DNA, 19 bp, Homo sapiens
  siRNA target sequence for TFCP2L3 (NM_024915.1,250-268).
ctgtctgtaagcaaagcaa

SEQ ID NO: 392098 - DNA, 19 bp, Homo sapiens
  siRNA target sequence for TFCP2L3 (NM_024915.1,349-367).
cgagtgcaagtcctaaaga

SEQ ID NO: 392099 - DNA, 19 bp, Homo sapiens
  siRNA target sequence for TFCP2L3 (NM_024915.1,394-412).
caagatcacctggagaatt

SEQ ID NO: 392100 - DNA, 19 bp, Homo sapiens
  siRNA target sequence for TFCP2L3 (NM_024915.1,397-415).
gatcacctggagaattcca

SEQ ID NO: 392101 - DNA, 19 bp, Homo sapiens
  siRNA target sequence for TFCP2L3 (NM_024915.1,553-571).
gagcaacgagtggttatct

SEQ ID NO: 392102 - DNA, 19 bp, Homo sapiens
  siRNA target sequence for TFCP2L3 (NM_024915.1,555-573).
gcaacgagtggttatcttt

SEQ ID NO: 392103 - DNA, 19 bp, Homo sapiens
  siRNA target sequence for TFCP2L3 (NM_024915.1,609-627).
ccacagcgcctatctcaaa

SEQ ID NO: 392104 - DNA, 19 bp, Homo sapiens
  siRNA target sequence for TFCP2L3 (NM_024915.1,738-756).
gacatcaagtggcacattt

SEQ ID NO: 392105 - DNA, 19 bp, Homo sapiens
  siRNA target sequence for TFCP2L3 (NM_024915.1,743-761).
caagtggcacatttcagta

SEQ ID NO: 392106 - DNA, 19 bp, Homo sapiens
  siRNA target sequence for TFCP2L3 (NM_024915.1,854-872).
gcgagaccggagacaacaa

SEQ ID NO: 392107 - DNA, 19 bp, Homo sapiens
  siRNA target sequence for TFCP2L3 (NM_024915.1,1006-1024).
cttgacattgccgattaca

SEQ ID NO: 392108 - DNA, 19 bp, Homo sapiens
  siRNA target sequence for TFCP2L3 (NM_024915.1,1026-1044).
ggagagctttaatacgatt

SEQ ID NO: 392109 - DNA, 19 bp, Homo sapiens
  siRNA target sequence for TFCP2L3 (NM_024915.1,1031-1049).
gctttaatacgattggaaa

SEQ ID NO: 392110 - DNA, 19 bp, Homo sapiens
  siRNA target sequence for TFCP2L3 (NM_024915.1,1040-1058).
cgattggaaacattgaaga

SEQ ID NO: 392111 - DNA, 19 bp, Homo sapiens
  siRNA target sequence for TFCP2L3 (NM_024915.1,1095-1113).
gaatgaagaggcgaagatt

SEQ ID NO: 392112 - DNA, 19 bp, Homo sapiens
  siRNA target sequence for TFCP2L3 (NM_024915.1,1099-1117).
gaagaggcgaagattttca

SEQ ID NO: 392113 - DNA, 19 bp, Homo sapiens
  siRNA target sequence for TFCP2L3 (NM_024915.1,1102-1120).
gaggcgaagattttcatca

SEQ ID NO: 392114 - DNA, 19 bp, Homo sapiens
  siRNA target sequence for TFCP2L3 (NM_024915.1,1169-1187).
gacttcctttgatgattca

SEQ ID NO: 392115 - DNA, 19 bp, Homo sapiens
  siRNA target sequence for TFCP2L3 (NM_024915.1,1194-1212).
cacatacagttataacaat

SEQ ID NO: 392116 - DNA, 19 bp, Homo sapiens
  siRNA target sequence for TFCP2L3 (NM_024915.1,1235-1253).
gagcttattgccagatcaa

SEQ ID NO: 392117 - DNA, 19 bp, Homo sapiens
  siRNA target sequence for TFCP2L3 (NM_024915.1,1328-1346).
gccaggcctcccaaactca

SEQ ID NO: 392118 - DNA, 19 bp, Homo sapiens
  siRNA target sequence for TFCP2L3 (NM_024915.1,1330-1348).
caggcctcccaaactcaat

SEQ ID NO: 392119 - DNA, 19 bp, Homo sapiens
  siRNA target sequence for TFCP2L3 (NM_024915.1,1334-1352).
cctcccaaactcaatgcaa

SEQ ID NO: 392120 - DNA, 19 bp, Homo sapiens
  siRNA target sequence for TFCP2L3 (NM_024915.1,1371-1389).
gttggctgccataccttta

SEQ ID NO: 392121 - DNA, 19 bp, Homo sapiens
  siRNA target sequence for TFCP2L3 (NM_024915.1,1376-1394).
ctgccatacctttacagaa

SEQ ID NO: 392122 - DNA, 19 bp, Homo sapiens
  siRNA target sequence for TFCP2L3 (NM_024915.1,1379-1397).
ccatacctttacagaagaa

SEQ ID NO: 392123 - DNA, 19 bp, Homo sapiens
  siRNA target sequence for TFCP2L3 (NM_024915.1,1402-1420).
gacatcacctacttcaaaa

SEQ ID NO: 392124 - DNA, 19 bp, Homo sapiens
  siRNA target sequence for TFCP2L3 (NM_024915.1,1455-1473).
catacctgatgttcacttt

SEQ ID NO: 392125 - DNA, 19 bp, Homo sapiens
  siRNA target sequence for TFCP2L3 (NM_024915.1,1487-1505).
ggaccggacaggtgtatta

SEQ ID NO: 392126 - DNA, 19 bp, Homo sapiens
  siRNA target sequence for TFCP2L3 (NM_024915.1,1490-1508).
ccggacaggtgtattacaa

SEQ ID NO: 392127 - DNA, 19 bp, Homo sapiens
  siRNA target sequence for TFCP2L3 (NM_024915.1,1528-1546).
ggtggcagtgtccttgtta

SEQ ID NO: 392128 - DNA, 19 bp, Homo sapiens
  siRNA target sequence for TFCP2L3 (NM_024915.1,1616-1634).
caaagcgagtgctcttgta

SEQ ID NO: 392129 - DNA, 19 bp, Homo sapiens
  siRNA target sequence for TFCP2L3 (NM_024915.1,1657-1675).
gtgttcgatgcattgatgt

SEQ ID NO: 392130 - DNA, 19 bp, Homo sapiens
  siRNA target sequence for TFCP2L3 (NM_024915.1,1698-1716).
cctgatggaagcgatatct

SEQ ID NO: 392131 - DNA, 19 bp, Homo sapiens
  siRNA target sequence for TFCP2L3 (NM_024915.1,1704-1722).
ggaagcgatatctgagaaa

SEQ ID NO: 392132 - DNA, 19 bp, Homo sapiens
  siRNA target sequence for TFCP2L3 (NM_024915.1,1705-1723).
gaagcgatatctgagaaat

SEQ ID NO: 392133 - DNA, 19 bp, Homo sapiens
  siRNA target sequence for C20orf172 (NM_024918.2,284-302).
gacttcagtgactagatca

SEQ ID NO: 392134 - DNA, 19 bp, Homo sapiens
  siRNA target sequence for C20orf172 (NM_024918.2,293-311).
gactagatcagagatcata

SEQ ID NO: 392135 - DNA, 19 bp, Homo sapiens
  siRNA target sequence for C20orf172 (NM_024918.2,298-316).
gatcagagatcatagatga

SEQ ID NO: 392136 - DNA, 19 bp, Homo sapiens
  siRNA target sequence for C20orf172 (NM_024918.2,334-352).
ctaagactcatgatcatca

SEQ ID NO: 392137 - DNA, 19 bp, Homo sapiens
  siRNA target sequence for C20orf172 (NM_024918.2,342-360).
catgatcatcaattggaat

SEQ ID NO: 392138 - DNA, 19 bp, Homo sapiens
  siRNA target sequence for C20orf172 (NM_024918.2,378-396).
gaagtgtttgctaaaacat

SEQ ID NO: 392139 - DNA, 19 bp, Homo sapiens
  siRNA target sequence for C20orf172 (NM_024918.2,636-654).
gagctcagccggtctatca

SEQ ID NO: 392140 - DNA, 19 bp, Homo sapiens
  siRNA target sequence for C20orf172 (NM_024918.2,638-656).
gctcagccggtctatcagt

SEQ ID NO: 392141 - DNA, 19 bp, Homo sapiens
  siRNA target sequence for C20orf172 (NM_024918.2,647-665).
gtctatcagtgtcgattta

SEQ ID NO: 392142 - DNA, 19 bp, Homo sapiens
  siRNA target sequence for C20orf172 (NM_024918.2,733-751).
ctttcctaagggacactaa

SEQ ID NO: 392143 - DNA, 19 bp, Homo sapiens
  siRNA target sequence for C20orf172 (NM_024918.2,753-771).
ggcttcagtcttgaaagtt

SEQ ID NO: 392144 - DNA, 19 bp, Homo sapiens
  siRNA target sequence for C20orf172 (NM_024918.2,834-852).
gatggaactctacaaaaat

SEQ ID NO: 392145 - DNA, 19 bp, Homo sapiens
  siRNA target sequence for C20orf172 (NM_024918.2,906-924).
gctgagatgaaggaataca

SEQ ID NO: 392146 - DNA, 19 bp, Homo sapiens
  siRNA target sequence for C20orf172 (NM_024918.2,1015-1033).
ctgaggccaaaattactga

SEQ ID NO: 392147 - DNA, 19 bp, Homo sapiens
  siRNA target sequence for C20orf172 (NM_024918.2,1037-1055).
caaagtggaacctatgaca

SEQ ID NO: 392148 - DNA, 19 bp, Homo sapiens
  siRNA target sequence for C20orf172 (NM_024918.2,1043-1061).
ggaacctatgacatatctt

SEQ ID NO: 392149 - DNA, 19 bp, Homo sapiens
  siRNA target sequence for C20orf172 (NM_024918.2,1063-1081).
ggtcttctcagaatgaagt

SEQ ID NO: 392150 - DNA, 19 bp, Homo sapiens
  siRNA target sequence for C20orf172 (NM_024918.2,1069-1087).
ctcagaatgaagttcttaa

SEQ ID NO: 392151 - DNA, 19 bp, Homo sapiens
  siRNA target sequence for C20orf172 (NM_024918.2,1095-1113).
cctgactaccagaaaatat

SEQ ID NO: 392152 - DNA, 19 bp, Homo sapiens
  siRNA target sequence for C20orf172 (NM_024918.2,1190-1208).
ggcctttatggatgaaagt

SEQ ID NO: 392153 - DNA, 19 bp, Homo sapiens
  siRNA target sequence for C20orf172 (NM_024918.2,1191-1209).
gcctttatggatgaaagta

SEQ ID NO: 392154 - DNA, 19 bp, Homo sapiens
  siRNA target sequence for C20orf172 (NM_024918.2,1233-1251).
gtacagctcggaaagagaa

SEQ ID NO: 392155 - DNA, 19 bp, Homo sapiens
  siRNA target sequence for C20orf172 (NM_024918.2,1249-1267).
gaagcatgcaacaattaga

SEQ ID NO: 392156 - DNA, 19 bp, Homo sapiens
  siRNA target sequence for C20orf172 (NM_024918.2,1270-1288).
cctcaccagctcgaaaact

SEQ ID NO: 392157 - DNA, 19 bp, Homo sapiens
  siRNA target sequence for C20orf172 (NM_024918.2,1273-1291).
caccagctcgaaaactgtt

SEQ ID NO: 392158 - DNA, 19 bp, Homo sapiens
  siRNA target sequence for C20orf172 (NM_024918.2,1276-1294).
cagctcgaaaactgttgaa

SEQ ID NO: 392159 - DNA, 19 bp, Homo sapiens
  siRNA target sequence for C20orf172 (NM_024918.2,1307-1325).
gaacccacctgccatacat

SEQ ID NO: 392160 - DNA, 19 bp, Homo sapiens
  siRNA target sequence for POF1B (NM_024921.2,339-357).
gccttggaccccttcaact

SEQ ID NO: 392161 - DNA, 19 bp, Homo sapiens
  siRNA target sequence for POF1B (NM_024921.2,366-384).
gtgctctcccctctcaaaa

SEQ ID NO: 392162 - DNA, 19 bp, Homo sapiens
  siRNA target sequence for POF1B (NM_024921.2,465-483).
gccccaagtactctacata

SEQ ID NO: 392163 - DNA, 19 bp, Homo sapiens
  siRNA target sequence for POF1B (NM_024921.2,467-485).
cccaagtactctacatata

SEQ ID NO: 392164 - DNA, 19 bp, Homo sapiens
  siRNA target sequence for POF1B (NM_024921.2,468-486).
ccaagtactctacatataa

SEQ ID NO: 392165 - DNA, 19 bp, Homo sapiens
  siRNA target sequence for POF1B (NM_024921.2,477-495).
ctacatataacccaaaata

SEQ ID NO: 392166 - DNA, 19 bp, Homo sapiens
  siRNA target sequence for POF1B (NM_024921.2,524-542).
gaaacttactacatatcca

SEQ ID NO: 392167 - DNA, 19 bp, Homo sapiens
  siRNA target sequence for POF1B (NM_024921.2,710-728).
ccatcatcacattatccaa

SEQ ID NO: 392168 - DNA, 19 bp, Homo sapiens
  siRNA target sequence for POF1B (NM_024921.2,785-803).
ccaagccatcacaggaaat

SEQ ID NO: 392169 - DNA, 19 bp, Homo sapiens
  siRNA target sequence for POF1B (NM_024921.2,817-835).
cacatattggaaatgaact

SEQ ID NO: 392170 - DNA, 19 bp, Homo sapiens
  siRNA target sequence for POF1B (NM_024921.2,862-880).
gtgagcaggtgataattca

SEQ ID NO: 392171 - DNA, 19 bp, Homo sapiens
  siRNA target sequence for POF1B (NM_024921.2,902-920).
ggaccccagatattttgga

SEQ ID NO: 392172 - DNA, 19 bp, Homo sapiens
  siRNA target sequence for POF1B (NM_024921.2,933-951).
gatctgagccgtaagaata

SEQ ID NO: 392173 - DNA, 19 bp, Homo sapiens
  siRNA target sequence for POF1B (NM_024921.2,942-960).
cgtaagaatacggatctat

SEQ ID NO: 392174 - DNA, 19 bp, Homo sapiens
  siRNA target sequence for POF1B (NM_024921.2,943-961).
gtaagaatacggatctata

SEQ ID NO: 392175 - DNA, 19 bp, Homo sapiens
  siRNA target sequence for POF1B (NM_024921.2,954-972).
gatctatatcactgcttat

SEQ ID NO: 392176 - DNA, 19 bp, Homo sapiens
  siRNA target sequence for POF1B (NM_024921.2,967-985).
gcttattagaacatttgca

SEQ ID NO: 392177 - DNA, 19 bp, Homo sapiens
  siRNA target sequence for POF1B (NM_024921.2,1028-1046).
gtcggaagacattgaatca

SEQ ID NO: 392178 - DNA, 19 bp, Homo sapiens
  siRNA target sequence for POF1B (NM_024921.2,1030-1048).
cggaagacattgaatcatt

SEQ ID NO: 392179 - DNA, 19 bp, Homo sapiens
  siRNA target sequence for POF1B (NM_024921.2,1109-1127).
gggtatgtctgataagtca

SEQ ID NO: 392180 - DNA, 19 bp, Homo sapiens
  siRNA target sequence for POF1B (NM_024921.2,1137-1155).
gtgctgtccacatttagca

SEQ ID NO: 392181 - DNA, 19 bp, Homo sapiens
  siRNA target sequence for POF1B (NM_024921.2,1142-1160).
gtccacatttagcaacata

SEQ ID NO: 392182 - DNA, 19 bp, Homo sapiens
  siRNA target sequence for POF1B (NM_024921.2,1217-1235).
gagacttgagaaagattta

SEQ ID NO: 392183 - DNA, 19 bp, Homo sapiens
  siRNA target sequence for POF1B (NM_024921.2,1364-1382).
ctctcttcgacatacacta

SEQ ID NO: 392184 - DNA, 19 bp, Homo sapiens
  siRNA target sequence for POF1B (NM_024921.2,1399-1417).
gactaaaagaactggaata

SEQ ID NO: 392185 - DNA, 19 bp, Homo sapiens
  siRNA target sequence for POF1B (NM_024921.2,1410-1428).
ctggaatattgtaaacgta

SEQ ID NO: 392186 - DNA, 19 bp, Homo sapiens
  siRNA target sequence for POF1B (NM_024921.2,1412-1430).
ggaatattgtaaacgtaat

SEQ ID NO: 392187 - DNA, 19 bp, Homo sapiens
  siRNA target sequence for POF1B (NM_024921.2,1436-1454).
gcaagagaatcaaaacctt

SEQ ID NO: 392188 - DNA, 19 bp, Homo sapiens
  siRNA target sequence for POF1B (NM_024921.2,1437-1455).
caagagaatcaaaacctta

SEQ ID NO: 392189 - DNA, 19 bp, Homo sapiens
  siRNA target sequence for POF1B (NM_024921.2,1485-1503).
ccaatgttgcaggctaaaa

SEQ ID NO: 392190 - DNA, 19 bp, Homo sapiens
  siRNA target sequence for POF1B (NM_024921.2,1486-1504).
caatgttgcaggctaaaat

SEQ ID NO: 392191 - DNA, 19 bp, Homo sapiens
  siRNA target sequence for POF1B (NM_024921.2,1490-1508).
gttgcaggctaaaatggat

SEQ ID NO: 392192 - DNA, 19 bp, Homo sapiens
  siRNA target sequence for POF1B (NM_024921.2,1521-1539).
cactacacggagatggtaa

SEQ ID NO: 392193 - DNA, 19 bp, Homo sapiens
  siRNA target sequence for POF1B (NM_024921.2,1574-1592).
cagactgaggtcccaatta

SEQ ID NO: 392194 - DNA, 19 bp, Homo sapiens
  siRNA target sequence for POF1B (NM_024921.2,1595-1613).
ccagtaccataaagatgtt

SEQ ID NO: 392195 - DNA, 19 bp, Homo sapiens
  siRNA target sequence for POF1B (NM_024921.2,1596-1614).
cagtaccataaagatgttt

SEQ ID NO: 392196 - DNA, 19 bp, Homo sapiens
  siRNA target sequence for POF1B (NM_024921.2,1633-1651).
gtagtgacttccaatttaa

SEQ ID NO: 392197 - DNA, 19 bp, Homo sapiens
  siRNA target sequence for POF1B (NM_024921.2,1720-1738).
ccaagttgcggcaagaaat

SEQ ID NO: 392198 - DNA, 19 bp, Homo sapiens
  siRNA target sequence for POF1B (NM_024921.2,1721-1739).
caagttgcggcaagaaata

SEQ ID NO: 392199 - DNA, 19 bp, Homo sapiens
  siRNA target sequence for POF1B (NM_024921.2,1728-1746).
cggcaagaaatatattcct

SEQ ID NO: 392200 - DNA, 19 bp, Homo sapiens
  siRNA target sequence for POF1B (NM_024921.2,1765-1783).
ctggtggaaggactactat

SEQ ID NO: 392201 - DNA, 19 bp, Homo sapiens
  siRNA target sequence for POF1B (NM_024921.2,1770-1788).
ggaaggactactattacca

SEQ ID NO: 392202 - DNA, 19 bp, Homo sapiens
  siRNA target sequence for POF1B (NM_024921.2,1777-1795).
ctactattaccactaaaaa

SEQ ID NO: 392203 - DNA, 19 bp, Homo sapiens
  siRNA target sequence for POF1B (NM_024921.2,1796-1814).
gtacaggacacaatatcca

SEQ ID NO: 392204 - DNA, 19 bp, Homo sapiens
  siRNA target sequence for POF1B (NM_024921.2,1802-1820).
gacacaatatccaatccta

SEQ ID NO: 392205 - DNA, 19 bp, Homo sapiens
  siRNA target sequence for POF1B (NM_024921.2,1817-1835).
cctaggcctcctatatgat

SEQ ID NO: 392206 - DNA, 19 bp, Homo sapiens
  siRNA target sequence for POF1B (NM_024921.2,1822-1840).
gcctcctatatgatgacta

SEQ ID NO: 392207 - DNA, 19 bp, Homo sapiens
  siRNA target sequence for POF1B (NM_024921.2,1863-1881).
gaaacacagactattgtga

SEQ ID NO: 392208 - DNA, 19 bp, Homo sapiens
  siRNA target sequence for POF1B (NM_024921.2,1867-1885).
cacagactattgtgattga

SEQ ID NO: 392209 - DNA, 19 bp, Homo sapiens
  siRNA target sequence for NUP210 (NM_024923.2,201-219).
gccacgcgcgttaacttca

SEQ ID NO: 392210 - DNA, 19 bp, Homo sapiens
  siRNA target sequence for NUP210 (NM_024923.2,610-628).
cgctgcgaatcctcacttt

SEQ ID NO: 392211 - DNA, 19 bp, Homo sapiens
  siRNA target sequence for NUP210 (NM_024923.2,612-630).
ctgcgaatcctcactttct

SEQ ID NO: 392212 - DNA, 19 bp, Homo sapiens
  siRNA target sequence for NUP210 (NM_024923.2,755-773).
ggctgtctacaagaatgta

SEQ ID NO: 392213 - DNA, 19 bp, Homo sapiens
  siRNA target sequence for NUP210 (NM_024923.2,846-864).
gtgggaacctccattcact

SEQ ID NO: 392214 - DNA, 19 bp, Homo sapiens
  siRNA target sequence for NUP210 (NM_024923.2,1046-1064).
ccttggccacaggagtatt

SEQ ID NO: 392215 - DNA, 19 bp, Homo sapiens
  siRNA target sequence for NUP210 (NM_024923.2,1109-1127).
ggtcgaacctggataccta

SEQ ID NO: 392216 - DNA, 19 bp, Homo sapiens
  siRNA target sequence for NUP210 (NM_024923.2,1182-1200).
gaaatcaccatcgaagttt

SEQ ID NO: 392217 - DNA, 19 bp, Homo sapiens
  siRNA target sequence for NUP210 (NM_024923.2,1189-1207).
ccatcgaagtttttgacaa

SEQ ID NO: 392218 - DNA, 19 bp, Homo sapiens
  siRNA target sequence for NUP210 (NM_024923.2,1214-1232).
caacaaggtctatgtatct

SEQ ID NO: 392219 - DNA, 19 bp, Homo sapiens
  siRNA target sequence for NUP210 (NM_024923.2,1231-1249).
ctgacaacatccgaattga

SEQ ID NO: 392220 - DNA, 19 bp, Homo sapiens
  siRNA target sequence for NUP210 (NM_024923.2,1233-1251).
gacaacatccgaattgaaa

SEQ ID NO: 392221 - DNA, 19 bp, Homo sapiens
  siRNA target sequence for NUP210 (NM_024923.2,1235-1253).
caacatccgaattgaaact

SEQ ID NO: 392222 - DNA, 19 bp, Homo sapiens
  siRNA target sequence for NUP210 (NM_024923.2,1311-1329).
cgcatcagggcactaaaga

SEQ ID NO: 392223 - DNA, 19 bp, Homo sapiens
  siRNA target sequence for NUP210 (NM_024923.2,1493-1511).
cgcctatcagtacacaata

SEQ ID NO: 392224 - DNA, 19 bp, Homo sapiens
  siRNA target sequence for NUP210 (NM_024923.2,1494-1512).
gcctatcagtacacaataa

SEQ ID NO: 392225 - DNA, 19 bp, Homo sapiens
  siRNA target sequence for NUP210 (NM_024923.2,1557-1575).
cacctggttgccacagtta

SEQ ID NO: 392226 - DNA, 19 bp, Homo sapiens
  siRNA target sequence for NUP210 (NM_024923.2,1559-1577).
cctggttgccacagttact

SEQ ID NO: 392227 - DNA, 19 bp, Homo sapiens
  siRNA target sequence for NUP210 (NM_024923.2,1804-1822).
gcgactgctcccactttga

SEQ ID NO: 392228 - DNA, 19 bp, Homo sapiens
  siRNA target sequence for NUP210 (NM_024923.2,1930-1948).
gctctaccacgcttcttgt

SEQ ID NO: 392229 - DNA, 19 bp, Homo sapiens
  siRNA target sequence for NUP210 (NM_024923.2,1971-1989).
cacctgagtgccaagatca

SEQ ID NO: 392230 - DNA, 19 bp, Homo sapiens
  siRNA target sequence for NUP210 (NM_024923.2,2100-2118).
ctcgagccgtccaaattct

SEQ ID NO: 392231 - DNA, 19 bp, Homo sapiens
  siRNA target sequence for NUP210 (NM_024923.2,2150-2168).
catcggcctggctctcttt

SEQ ID NO: 392232 - DNA, 19 bp, Homo sapiens
  siRNA target sequence for NUP210 (NM_024923.2,2173-2191).
cccattcctcccggaatta

SEQ ID NO: 392233 - DNA, 19 bp, Homo sapiens
  siRNA target sequence for NUP210 (NM_024923.2,2174-2192).
ccattcctcccggaattat

SEQ ID NO: 392234 - DNA, 19 bp, Homo sapiens
  siRNA target sequence for NUP210 (NM_024923.2,2835-2853).
gaaggctcaggttacttct

SEQ ID NO: 392235 - DNA, 19 bp, Homo sapiens
  siRNA target sequence for NUP210 (NM_024923.2,2861-2879).
caccagcaccgcagatgtt

SEQ ID NO: 392236 - DNA, 19 bp, Homo sapiens
  siRNA target sequence for NUP210 (NM_024923.2,2863-2881).
ccagcaccgcagatgttgt

SEQ ID NO: 392237 - DNA, 19 bp, Homo sapiens
  siRNA target sequence for NUP210 (NM_024923.2,2937-2955).
ggctcatccaccatcatga

SEQ ID NO: 392238 - DNA, 19 bp, Homo sapiens
  siRNA target sequence for NUP210 (NM_024923.2,2938-2956).
gctcatccaccatcatgat

SEQ ID NO: 392239 - DNA, 19 bp, Homo sapiens
  siRNA target sequence for NUP210 (NM_024923.2,2986-3004).
cagccaaggctgtcgttta

SEQ ID NO: 392240 - DNA, 19 bp, Homo sapiens
  siRNA target sequence for NUP210 (NM_024923.2,2989-3007).
ccaaggctgtcgtttacgt

SEQ ID NO: 392241 - DNA, 19 bp, Homo sapiens
  siRNA target sequence for NUP210 (NM_024923.2,3150-3168).
gcagcctccccgatcatta

SEQ ID NO: 392242 - DNA, 19 bp, Homo sapiens
  siRNA target sequence for NUP210 (NM_024923.2,3154-3172).
cctccccgatcattacatt

SEQ ID NO: 392243 - DNA, 19 bp, Homo sapiens
  siRNA target sequence for NUP210 (NM_024923.2,3195-3213).
gacaactacaccatcacat

SEQ ID NO: 392244 - DNA, 19 bp, Homo sapiens
  siRNA target sequence for NUP210 (NM_024923.2,3236-3254).
cggccagaccagtctaact

SEQ ID NO: 392245 - DNA, 19 bp, Homo sapiens
  siRNA target sequence for NUP210 (NM_024923.2,3295-3313).
ccccacaacagattgaagt

SEQ ID NO: 392246 - DNA, 19 bp, Homo sapiens
  siRNA target sequence for NUP210 (NM_024923.2,3631-3649).
cccagatgcccatctatgt

SEQ ID NO: 392247 - DNA, 19 bp, Homo sapiens
  siRNA target sequence for NUP210 (NM_024923.2,3633-3651).
cagatgcccatctatgtca

SEQ ID NO: 392248 - DNA, 19 bp, Homo sapiens
  siRNA target sequence for NUP210 (NM_024923.2,3782-3800).
cccgtcacagtacaacttt

SEQ ID NO: 392249 - DNA, 19 bp, Homo sapiens
  siRNA target sequence for NUP210 (NM_024923.2,3898-3916).
gagaactctcggatgagat

SEQ ID NO: 392250 - DNA, 19 bp, Homo sapiens
  siRNA target sequence for NUP210 (NM_024923.2,3944-3962).
gctgctcaaccctgaaata

SEQ ID NO: 392251 - DNA, 19 bp, Homo sapiens
  siRNA target sequence for NUP210 (NM_024923.2,3947-3965).
gctcaaccctgaaatagaa

SEQ ID NO: 392252 - DNA, 19 bp, Homo sapiens
  siRNA target sequence for NUP210 (NM_024923.2,3983-4001).
gtcgcccaactcatatata

SEQ ID NO: 392253 - DNA, 19 bp, Homo sapiens
  siRNA target sequence for NUP210 (NM_024923.2,3985-4003).
cgcccaactcatatataaa

SEQ ID NO: 392254 - DNA, 19 bp, Homo sapiens
  siRNA target sequence for NUP210 (NM_024923.2,4155-4173).
ccctttggggccaaccaaa

SEQ ID NO: 392255 - DNA, 19 bp, Homo sapiens
  siRNA target sequence for NUP210 (NM_024923.2,4163-4181).
ggccaaccaaaccatcatt

SEQ ID NO: 392256 - DNA, 19 bp, Homo sapiens
  siRNA target sequence for NUP210 (NM_024923.2,4178-4196).
cattgttgctgtaaaggta

SEQ ID NO: 392257 - DNA, 19 bp, Homo sapiens
  siRNA target sequence for NUP210 (NM_024923.2,4674-4692).
ggatccgtgacggtttact

SEQ ID NO: 392258 - DNA, 19 bp, Homo sapiens
  siRNA target sequence for NUP210 (NM_024923.2,4675-4693).
gatccgtgacggtttacta

SEQ ID NO: 392259 - DNA, 19 bp, Homo sapiens
  siRNA target sequence for NUP210 (NM_024923.2,4678-4696).
ccgtgacggtttactatga

SEQ ID NO: 392260 - DNA, 19 bp, Homo sapiens
  siRNA target sequence for NUP210 (NM_024923.2,4798-4816).
ctacagcctccaaagtgat

SEQ ID NO: 392261 - DNA, 19 bp, Homo sapiens
  siRNA target sequence for NUP210 (NM_024923.2,5161-5179).
ccgaccaggctgaaatcct

SEQ ID NO: 392262 - DNA, 19 bp, Homo sapiens
  siRNA target sequence for NUP210 (NM_024923.2,5162-5180).
cgaccaggctgaaatcctt

SEQ ID NO: 392263 - DNA, 19 bp, Homo sapiens
  siRNA target sequence for NUP210 (NM_024923.2,5543-5561).
gacagcggtcatgatcata

SEQ ID NO: 392264 - DNA, 19 bp, Homo sapiens
  siRNA target sequence for NUP210 (NM_024923.2,5631-5649).
ggacacagcccccactatt

SEQ ID NO: 392265 - DNA, 19 bp, Homo sapiens
  siRNA target sequence for NUP210 (NM_024923.2,5665-5683).
ccacatctcccaatgcatt

SEQ ID NO: 392266 - DNA, 19 bp, Homo sapiens
  siRNA target sequence for FLJ12571 (NM_024926.1,143-161).
gaagaaaggtaggaagatt

SEQ ID NO: 392267 - DNA, 19 bp, Homo sapiens
  siRNA target sequence for FLJ12571 (NM_024926.1,151-169).
gtaggaagattccaaaact

SEQ ID NO: 392268 - DNA, 19 bp, Homo sapiens
  siRNA target sequence for FLJ12571 (NM_024926.1,154-172).
ggaagattccaaaactaga

SEQ ID NO: 392269 - DNA, 19 bp, Homo sapiens
  siRNA target sequence for FLJ12571 (NM_024926.1,218-236).
ggagttcaaacgtcatgtt

SEQ ID NO: 392270 - DNA, 19 bp, Homo sapiens
  siRNA target sequence for FLJ12571 (NM_024926.1,369-387).
ctagcttgcacctacttct

SEQ ID NO: 392271 - DNA, 19 bp, Homo sapiens
  siRNA target sequence for FLJ12571 (NM_024926.1,465-483).
cacttggctcacaagttta

SEQ ID NO: 392272 - DNA, 19 bp, Homo sapiens
  siRNA target sequence for FLJ12571 (NM_024926.1,470-488).
ggctcacaagtttaatgat

SEQ ID NO: 392273 - DNA, 19 bp, Homo sapiens
  siRNA target sequence for FLJ12571 (NM_024926.1,472-490).
ctcacaagtttaatgatga

SEQ ID NO: 392274 - DNA, 19 bp, Homo sapiens
  siRNA target sequence for FLJ12571 (NM_024926.1,574-592).
ctcactaccaagaagctat

SEQ ID NO: 392275 - DNA, 19 bp, Homo sapiens
  siRNA target sequence for FLJ12571 (NM_024926.1,606-624).
cgaatactgctagataaca

SEQ ID NO: 392276 - DNA, 19 bp, Homo sapiens
  siRNA target sequence for FLJ12571 (NM_024926.1,632-650).
ccttgcccttaatgtttat

SEQ ID NO: 392277 - DNA, 19 bp, Homo sapiens
  siRNA target sequence for FLJ12571 (NM_024926.1,717-735).
cagcaaattcctgatagta

SEQ ID NO: 392278 - DNA, 19 bp, Homo sapiens
  siRNA target sequence for FLJ12571 (NM_024926.1,736-754).
ccatcgcactcaatcttaa

SEQ ID NO: 392279 - DNA, 19 bp, Homo sapiens
  siRNA target sequence for FLJ12571 (NM_024926.1,737-755).
catcgcactcaatcttaaa

SEQ ID NO: 392280 - DNA, 19 bp, Homo sapiens
  siRNA target sequence for FLJ12571 (NM_024926.1,750-768).
cttaaagcctgtaaccatt

SEQ ID NO: 392281 - DNA, 19 bp, Homo sapiens
  siRNA target sequence for FLJ12571 (NM_024926.1,913-931).
ctcccctagttgatgtcat

SEQ ID NO: 392282 - DNA, 19 bp, Homo sapiens
  siRNA target sequence for FLJ12571 (NM_024926.1,943-961).
ggctaaacttggtgattta

SEQ ID NO: 392283 - DNA, 19 bp, Homo sapiens
  siRNA target sequence for FLJ12571 (NM_024926.1,945-963).
ctaaacttggtgatttact

SEQ ID NO: 392284 - DNA, 19 bp, Homo sapiens
  siRNA target sequence for FLJ12571 (NM_024926.1,965-983).
ccttcgtcaagatgatgta

SEQ ID NO: 392285 - DNA, 19 bp, Homo sapiens
  siRNA target sequence for FLJ12571 (NM_024926.1,978-996).
gatgtacaagaagcttata

SEQ ID NO: 392286 - DNA, 19 bp, Homo sapiens
  siRNA target sequence for FLJ12571 (NM_024926.1,987-1005).
gaagcttataacttaatta

SEQ ID NO: 392287 - DNA, 19 bp, Homo sapiens
  siRNA target sequence for FLJ12571 (NM_024926.1,991-1009).
cttataacttaattaagga

SEQ ID NO: 392288 - DNA, 19 bp, Homo sapiens
  siRNA target sequence for FLJ12571 (NM_024926.1,1007-1025).
ggatctggaacctactact

SEQ ID NO: 392289 - DNA, 19 bp, Homo sapiens
  siRNA target sequence for FLJ12571 (NM_024926.1,1021-1039).
ctactcctcaggagtatat

SEQ ID NO: 392290 - DNA, 19 bp, Homo sapiens
  siRNA target sequence for FLJ12571 (NM_024926.1,1027-1045).
ctcaggagtatattctcaa

SEQ ID NO: 392291 - DNA, 19 bp, Homo sapiens
  siRNA target sequence for FLJ12571 (NM_024926.1,1080-1098).
ggttcaagggatcatatga

SEQ ID NO: 392292 - DNA, 19 bp, Homo sapiens
  siRNA target sequence for FLJ12571 (NM_024926.1,1081-1099).
gttcaagggatcatatgaa

SEQ ID NO: 392293 - DNA, 19 bp, Homo sapiens
  siRNA target sequence for FLJ12571 (NM_024926.1,1193-1211).
gcttaagcaatttgatgat

SEQ ID NO: 392294 - DNA, 19 bp, Homo sapiens
  siRNA target sequence for FLJ12571 (NM_024926.1,1217-1235).
gatttacctcaactcattt

SEQ ID NO: 392295 - DNA, 19 bp, Homo sapiens
  siRNA target sequence for FLJ12571 (NM_024926.1,1223-1241).
cctcaactcatttaagagt

SEQ ID NO: 392296 - DNA, 19 bp, Homo sapiens
  siRNA target sequence for FLJ12571 (NM_024926.1,1224-1242).
ctcaactcatttaagagtt

SEQ ID NO: 392297 - DNA, 19 bp, Homo sapiens
  siRNA target sequence for FLJ12571 (NM_024926.1,1247-1265).
ctataatgatgacatcttt

SEQ ID NO: 392298 - DNA, 19 bp, Homo sapiens
  siRNA target sequence for FLJ12571 (NM_024926.1,1290-1308).
gctgcaacaggcaatacca

SEQ ID NO: 392299 - DNA, 19 bp, Homo sapiens
  siRNA target sequence for FLJ12571 (NM_024926.1,1323-1341).
gcgttcctcttgatccaaa

SEQ ID NO: 392300 - DNA, 19 bp, Homo sapiens
  siRNA target sequence for FLJ12571 (NM_024926.1,1379-1397).
gttagctcggtgctatatt

SEQ ID NO: 392301 - DNA, 19 bp, Homo sapiens
  siRNA target sequence for FLJ12571 (NM_024926.1,1383-1401).
gctcggtgctatattatga

SEQ ID NO: 392302 - DNA, 19 bp, Homo sapiens
  siRNA target sequence for FLJ12571 (NM_024926.1,1384-1402).
ctcggtgctatattatgaa

SEQ ID NO: 392303 - DNA, 19 bp, Homo sapiens
  siRNA target sequence for FLJ12571 (NM_024926.1,1414-1432).
gactagcctgggaacttta

SEQ ID NO: 392304 - DNA, 19 bp, Homo sapiens
  siRNA target sequence for FLJ12571 (NM_024926.1,1420-1438).
cctgggaactttatcttaa

SEQ ID NO: 392305 - DNA, 19 bp, Homo sapiens
  siRNA target sequence for FLJ12571 (NM_024926.1,1499-1517).
gatgggccagttttactat

SEQ ID NO: 392306 - DNA, 19 bp, Homo sapiens
  siRNA target sequence for FLJ12571 (NM_024926.1,1502-1520).
gggccagttttactattct

SEQ ID NO: 392307 - DNA, 19 bp, Homo sapiens
  siRNA target sequence for FLJ12571 (NM_024926.1,1550-1568).
ggatcctaaccctgaatat

SEQ ID NO: 392308 - DNA, 19 bp, Homo sapiens
  siRNA target sequence for FLJ12571 (NM_024926.1,1551-1569).
gatcctaaccctgaatatt

SEQ ID NO: 392309 - DNA, 19 bp, Homo sapiens
  siRNA target sequence for FLJ12571 (NM_024926.1,1675-1693).
gtaacacccaagtagaata

SEQ ID NO: 392310 - DNA, 19 bp, Homo sapiens
  siRNA target sequence for C6orf59 (NM_024929.1,728-746).
gcgcatgctcatctgtaaa

SEQ ID NO: 392311 - DNA, 19 bp, Homo sapiens
  siRNA target sequence for C6orf59 (NM_024929.1,764-782).
gacacaccggggtcttctt

SEQ ID NO: 392312 - DNA, 19 bp, Homo sapiens
  siRNA target sequence for C6orf59 (NM_024929.1,768-786).
caccggggtcttcttcttt

SEQ ID NO: 392313 - DNA, 19 bp, Homo sapiens
  siRNA target sequence for C6orf59 (NM_024929.1,770-788).
ccggggtcttcttctttgt

SEQ ID NO: 392314 - DNA, 19 bp, Homo sapiens
  siRNA target sequence for C6orf59 (NM_024929.1,799-817).
cctctggcagtgtctttaa

SEQ ID NO: 392315 - DNA, 19 bp, Homo sapiens
  siRNA target sequence for C6orf59 (NM_024929.1,829-847).
ctgatcccaccgctcataa

SEQ ID NO: 392316 - DNA, 19 bp, Homo sapiens
  siRNA target sequence for C6orf59 (NM_024929.1,928-946).
ctgtacaccgacttggtat

SEQ ID NO: 392317 - DNA, 19 bp, Homo sapiens
  siRNA target sequence for C6orf59 (NM_024929.1,1030-1048).
gcaagcacctattatctat

SEQ ID NO: 392318 - DNA, 19 bp, Homo sapiens
  siRNA target sequence for FLJ12056 (NM_024933.1,119-137).
catgcagcaggcgaacaaa

SEQ ID NO: 392319 - DNA, 19 bp, Homo sapiens
  siRNA target sequence for DOCK5 (NM_024940.3,47-65).
ctgggtccccacaaaatca

SEQ ID NO: 392320 - DNA, 19 bp, Homo sapiens
  siRNA target sequence for DOCK5 (NM_024940.3,105-123).
ctctgacccctgaagtaga

SEQ ID NO: 392321 - DNA, 19 bp, Homo sapiens
  siRNA target sequence for DOCK5 (NM_024940.3,185-203).
ggaaatggcaatttccata

SEQ ID NO: 392322 - DNA, 19 bp, Homo sapiens
  siRNA target sequence for DOCK5 (NM_024940.3,440-458).
gtgaacgtgctgaactttt

SEQ ID NO: 392323 - DNA, 19 bp, Homo sapiens
  siRNA target sequence for DOCK5 (NM_024940.3,622-640).
ggacagttactatgtttat

SEQ ID NO: 392324 - DNA, 19 bp, Homo sapiens
  siRNA target sequence for DOCK5 (NM_024940.3,671-689).
caagaaatcatatcatatt

SEQ ID NO: 392325 - DNA, 19 bp, Homo sapiens
  siRNA target sequence for DOCK5 (NM_024940.3,736-754).
gttggctgagacttacgaa

SEQ ID NO: 392326 - DNA, 19 bp, Homo sapiens
  siRNA target sequence for DOCK5 (NM_024940.3,752-770).
gaaagcaaagtatttgact

SEQ ID NO: 392327 - DNA, 19 bp, Homo sapiens
  siRNA target sequence for DOCK5 (NM_024940.3,801-819).
gggcctcattttatgagaa

SEQ ID NO: 392328 - DNA, 19 bp, Homo sapiens
  siRNA target sequence for DOCK5 (NM_024940.3,837-855).
ggcctcagcctgaatactt

SEQ ID NO: 392329 - DNA, 19 bp, Homo sapiens
  siRNA target sequence for DOCK5 (NM_024940.3,838-856).
gcctcagcctgaatacttt

SEQ ID NO: 392330 - DNA, 19 bp, Homo sapiens
  siRNA target sequence for DOCK5 (NM_024940.3,893-911).
ctacggaataaaatcttca

SEQ ID NO: 392331 - DNA, 19 bp, Homo sapiens
  siRNA target sequence for DOCK5 (NM_024940.3,1026-1044).
cgtcccccaagcagtacat

SEQ ID NO: 392332 - DNA, 19 bp, Homo sapiens
  siRNA target sequence for DOCK5 (NM_024940.3,1101-1119).
ctgttccagagcagatctt

SEQ ID NO: 392333 - DNA, 19 bp, Homo sapiens
  siRNA target sequence for DOCK5 (NM_024940.3,1103-1121).
gttccagagcagatcttaa

SEQ ID NO: 392334 - DNA, 19 bp, Homo sapiens
  siRNA target sequence for DOCK5 (NM_024940.3,1107-1125).
cagagcagatcttaaacta

SEQ ID NO: 392335 - DNA, 19 bp, Homo sapiens
  siRNA target sequence for DOCK5 (NM_024940.3,1142-1160).
gtgcagcagttcagatact

SEQ ID NO: 392336 - DNA, 19 bp, Homo sapiens
  siRNA target sequence for DOCK5 (NM_024940.3,1167-1185).
cgttccggaaaggagaaaa

SEQ ID NO: 392337 - DNA, 19 bp, Homo sapiens
  siRNA target sequence for DOCK5 (NM_024940.3,1220-1238).
gaacggaccacgtatacga

SEQ ID NO: 392338 - DNA, 19 bp, Homo sapiens
  siRNA target sequence for DOCK5 (NM_024940.3,1228-1246).
cacgtatacgactgcatat

SEQ ID NO: 392339 - DNA, 19 bp, Homo sapiens
  siRNA target sequence for DOCK5 (NM_024940.3,1264-1282).
caagtggtttgaagtcaaa

SEQ ID NO: 392340 - DNA, 19 bp, Homo sapiens
  siRNA target sequence for DOCK5 (NM_024940.3,1452-1470).
gcttctccaactatgaaaa

SEQ ID NO: 392341 - DNA, 19 bp, Homo sapiens
  siRNA target sequence for DOCK5 (NM_024940.3,1472-1490).
gctttttttacagaaaagt

SEQ ID NO: 392342 - DNA, 19 bp, Homo sapiens
  siRNA target sequence for DOCK5 (NM_024940.3,1528-1546).
gctgctaaagcgactaata

SEQ ID NO: 392343 - DNA, 19 bp, Homo sapiens
  siRNA target sequence for DOCK5 (NM_024940.3,1531-1549).
gctaaagcgactaatagca

SEQ ID NO: 392344 - DNA, 19 bp, Homo sapiens
  siRNA target sequence for DOCK5 (NM_024940.3,1538-1556).
cgactaatagcattacaga

SEQ ID NO: 392345 - DNA, 19 bp, Homo sapiens
  siRNA target sequence for DOCK5 (NM_024940.3,1539-1557).
gactaatagcattacagat

SEQ ID NO: 392346 - DNA, 19 bp, Homo sapiens
  siRNA target sequence for DOCK5 (NM_024940.3,1555-1573).
gatgcccctgctaacagaa

SEQ ID NO: 392347 - DNA, 19 bp, Homo sapiens
  siRNA target sequence for DOCK5 (NM_024940.3,1581-1599).
gcatccatggggagaaact

SEQ ID NO: 392348 - DNA, 19 bp, Homo sapiens
  siRNA target sequence for DOCK5 (NM_024940.3,1619-1637).
ctgcatgagcggttgtctt

SEQ ID NO: 392349 - DNA, 19 bp, Homo sapiens
  siRNA target sequence for DOCK5 (NM_024940.3,1622-1640).
catgagcggttgtcttctt

SEQ ID NO: 392350 - DNA, 19 bp, Homo sapiens
  siRNA target sequence for DOCK5 (NM_024940.3,1638-1656).
cttgcttccgggaactcaa

SEQ ID NO: 392351 - DNA, 19 bp, Homo sapiens
  siRNA target sequence for DOCK5 (NM_024940.3,1722-1740).
gccgcacggggtctattgt

SEQ ID NO: 392352 - DNA, 19 bp, Homo sapiens
  siRNA target sequence for DOCK5 (NM_024940.3,1863-1881).
caatcttggagccactttt

SEQ ID NO: 392353 - DNA, 19 bp, Homo sapiens
  siRNA target sequence for DOCK5 (NM_024940.3,1945-1963).
gaaccggatcagcaagttt

SEQ ID NO: 392354 - DNA, 19 bp, Homo sapiens
  siRNA target sequence for DOCK5 (NM_024940.3,1949-1967).
cggatcagcaagtttaaga

SEQ ID NO: 392355 - DNA, 19 bp, Homo sapiens
  siRNA target sequence for DOCK5 (NM_024940.3,2012-2030).
gcaccagaacccgatttga

SEQ ID NO: 392356 - DNA, 19 bp, Homo sapiens
  siRNA target sequence for DOCK5 (NM_024940.3,2013-2031).
caccagaacccgatttgat

SEQ ID NO: 392357 - DNA, 19 bp, Homo sapiens
  siRNA target sequence for DOCK5 (NM_024940.3,2015-2033).
ccagaacccgatttgatga

SEQ ID NO: 392358 - DNA, 19 bp, Homo sapiens
  siRNA target sequence for DOCK5 (NM_024940.3,2223-2241).
cacctccccccaaaagcaa

SEQ ID NO: 392359 - DNA, 19 bp, Homo sapiens
  siRNA target sequence for FLJ13611 (NM_024941.1,262-280).
gttatatcagcgttcataa

SEQ ID NO: 392360 - DNA, 19 bp, Homo sapiens
  siRNA target sequence for FLJ13611 (NM_024941.1,271-289).
gcgttcataatgatagcaa

SEQ ID NO: 392361 - DNA, 19 bp, Homo sapiens
  siRNA target sequence for FLJ13611 (NM_024941.1,291-309).
caagttgtaaaagacatat

SEQ ID NO: 392362 - DNA, 19 bp, Homo sapiens
  siRNA target sequence for FLJ13611 (NM_024941.1,318-336).
gctgatcttcagacaagtt

SEQ ID NO: 392363 - DNA, 19 bp, Homo sapiens
  siRNA target sequence for FLJ13611 (NM_024941.1,334-352).
gttctcagcgtttaaatct

SEQ ID NO: 392364 - DNA, 19 bp, Homo sapiens
  siRNA target sequence for FLJ13611 (NM_024941.1,388-406).
cggattgttgtattgatga

SEQ ID NO: 392365 - DNA, 19 bp, Homo sapiens
  siRNA target sequence for FLJ13611 (NM_024941.1,397-415).
gtattgatgatgtcataca

SEQ ID NO: 392366 - DNA, 19 bp, Homo sapiens
  siRNA target sequence for FLJ13611 (NM_024941.1,528-546).
ccattggatgtgaaaacca

SEQ ID NO: 392367 - DNA, 19 bp, Homo sapiens
  siRNA target sequence for FLJ13611 (NM_024941.1,599-617).
ggaagcccagattcagaat

SEQ ID NO: 392368 - DNA, 19 bp, Homo sapiens
  siRNA target sequence for FLJ13611 (NM_024941.1,620-638).
gacaacctcacctatgttt

SEQ ID NO: 392369 - DNA, 19 bp, Homo sapiens
  siRNA target sequence for FLJ13611 (NM_024941.1,622-640).
caacctcacctatgtttat

SEQ ID NO: 392370 - DNA, 19 bp, Homo sapiens
  siRNA target sequence for FLJ13611 (NM_024941.1,625-643).
cctcacctatgtttatgga

SEQ ID NO: 392371 - DNA, 19 bp, Homo sapiens
  siRNA target sequence for FLJ13611 (NM_024941.1,652-670).
cactggagccatctattat

SEQ ID NO: 392372 - DNA, 19 bp, Homo sapiens
  siRNA target sequence for FLJ13611 (NM_024941.1,654-672).
ctggagccatctattatgt

SEQ ID NO: 392373 - DNA, 19 bp, Homo sapiens
  siRNA target sequence for FLJ13611 (NM_024941.1,657-675).
gagccatctattatgtaca

SEQ ID NO: 392374 - DNA, 19 bp, Homo sapiens
  siRNA target sequence for FLJ13611 (NM_024941.1,659-677).
gccatctattatgtacaat

SEQ ID NO: 392375 - DNA, 19 bp, Homo sapiens
  siRNA target sequence for FLJ13611 (NM_024941.1,661-679).
catctattatgtacaatgt

SEQ ID NO: 392376 - DNA, 19 bp, Homo sapiens
  siRNA target sequence for FLJ13611 (NM_024941.1,674-692).
caatgtaacagaattaaat

SEQ ID NO: 392377 - DNA, 19 bp, Homo sapiens
  siRNA target sequence for FLJ13611 (NM_024941.1,725-743).
gtttgggtcaagagcatat

SEQ ID NO: 392378 - DNA, 19 bp, Homo sapiens
  siRNA target sequence for FLJ13611 (NM_024941.1,730-748).
ggtcaagagcatatttgca

SEQ ID NO: 392379 - DNA, 19 bp, Homo sapiens
  siRNA target sequence for FLJ13611 (NM_024941.1,731-749).
gtcaagagcatatttgcaa

SEQ ID NO: 392380 - DNA, 19 bp, Homo sapiens
  siRNA target sequence for FLJ13611 (NM_024941.1,755-773).
ggatacacgccagtactta

SEQ ID NO: 392381 - DNA, 19 bp, Homo sapiens
  siRNA target sequence for FLJ13611 (NM_024941.1,756-774).
gatacacgccagtacttat

SEQ ID NO: 392382 - DNA, 19 bp, Homo sapiens
  siRNA target sequence for FLJ13611 (NM_024941.1,776-794).
ctgcctaaagccaaagaat

SEQ ID NO: 392383 - DNA, 19 bp, Homo sapiens
  siRNA target sequence for FLJ13611 (NM_024941.1,778-796).
gcctaaagccaaagaatga

SEQ ID NO: 392384 - DNA, 19 bp, Homo sapiens
  siRNA target sequence for FLJ13611 (NM_024941.1,824-842).
gggagtaacagtaattgga

SEQ ID NO: 392385 - DNA, 19 bp, Homo sapiens
  siRNA target sequence for FLJ13611 (NM_024941.1,825-843).
ggagtaacagtaattggaa

SEQ ID NO: 392386 - DNA, 19 bp, Homo sapiens
  siRNA target sequence for FLJ13611 (NM_024941.1,826-844).
gagtaacagtaattggaaa

SEQ ID NO: 392387 - DNA, 19 bp, Homo sapiens
  siRNA target sequence for FLJ13611 (NM_024941.1,922-940).
gttatggagatgttaggtt

SEQ ID NO: 392388 - DNA, 19 bp, Homo sapiens
  siRNA target sequence for FLJ13611 (NM_024941.1,927-945).
ggagatgttaggttgtctt

SEQ ID NO: 392389 - DNA, 19 bp, Homo sapiens
  siRNA target sequence for FLJ13611 (NM_024941.1,1064-1082).
ccactggtgtggaatttca

SEQ ID NO: 392390 - DNA, 19 bp, Homo sapiens
  siRNA target sequence for FLJ13611 (NM_024941.1,1182-1200).
ctaacagacacattcttaa

SEQ ID NO: 392391 - DNA, 19 bp, Homo sapiens
  siRNA target sequence for FLJ13611 (NM_024941.1,1188-1206).
gacacattcttaaagagaa

SEQ ID NO: 392392 - DNA, 19 bp, Homo sapiens
  siRNA target sequence for FLJ23235 (NM_024943.1,142-160).
gcaatagtgatcacattca

SEQ ID NO: 392393 - DNA, 19 bp, Homo sapiens
  siRNA target sequence for FLJ23235 (NM_024943.1,186-204).
gacaccgaaagaaagaaca

SEQ ID NO: 392394 - DNA, 19 bp, Homo sapiens
  siRNA target sequence for FLJ23235 (NM_024943.1,223-241).
gaagtgtgtttgcaatcta

SEQ ID NO: 392395 - DNA, 19 bp, Homo sapiens
  siRNA target sequence for FLJ23235 (NM_024943.1,239-257).
ctaattttacctattcact

SEQ ID NO: 392396 - DNA, 19 bp, Homo sapiens
  siRNA target sequence for FLJ23235 (NM_024943.1,304-322).
gaaactcagattatcatga

SEQ ID NO: 392397 - DNA, 19 bp, Homo sapiens
  siRNA target sequence for FLJ23235 (NM_024943.1,396-414).
gtgctcctcgtgtttggtt

SEQ ID NO: 392398 - DNA, 19 bp, Homo sapiens
  siRNA target sequence for FLJ23235 (NM_024943.1,411-429).
ggtttgtgagtctaaagga

SEQ ID NO: 392399 - DNA, 19 bp, Homo sapiens
  siRNA target sequence for FLJ23235 (NM_024943.1,412-430).
gtttgtgagtctaaaggaa

SEQ ID NO: 392400 - DNA, 19 bp, Homo sapiens
  siRNA target sequence for FLJ23235 (NM_024943.1,559-577).
cacttggaggaatataaca

SEQ ID NO: 392401 - DNA, 19 bp, Homo sapiens
  siRNA target sequence for FLJ23235 (NM_024943.1,576-594).
cactacctgtcatctaaaa

SEQ ID NO: 392402 - DNA, 19 bp, Homo sapiens
  siRNA target sequence for FLJ23235 (NM_024943.1,635-653).
gcaaggagaaatcgataaa

SEQ ID NO: 392403 - DNA, 19 bp, Homo sapiens
  siRNA target sequence for FLJ23235 (NM_024943.1,669-687).
catggaatacccgaatgat

SEQ ID NO: 392404 - DNA, 19 bp, Homo sapiens
  siRNA target sequence for FLJ23235 (NM_024943.1,672-690).
ggaatacccgaatgattgt

SEQ ID NO: 392405 - DNA, 19 bp, Homo sapiens
  siRNA target sequence for FLJ23235 (NM_024943.1,673-691).
gaatacccgaatgattgta

SEQ ID NO: 392406 - DNA, 19 bp, Homo sapiens
  siRNA target sequence for FLJ23235 (NM_024943.1,679-697).
ccgaatgattgtatacaca

SEQ ID NO: 392407 - DNA, 19 bp, Homo sapiens
  siRNA target sequence for FLJ23235 (NM_024943.1,680-698).
cgaatgattgtatacacat

SEQ ID NO: 392408 - DNA, 19 bp, Homo sapiens
  siRNA target sequence for FLJ23235 (NM_024943.1,685-703).
gattgtatacacatttctt

SEQ ID NO: 392409 - DNA, 19 bp, Homo sapiens
  siRNA target sequence for FLJ23235 (NM_024943.1,741-759).
catgaagatcacttggtat

SEQ ID NO: 392410 - DNA, 19 bp, Homo sapiens
  siRNA target sequence for FLJ23235 (NM_024943.1,747-765).
gatcacttggtatatttta

SEQ ID NO: 392411 - DNA, 19 bp, Homo sapiens
  siRNA target sequence for FLJ23235 (NM_024943.1,750-768).
cacttggtatattttagtt

SEQ ID NO: 392412 - DNA, 19 bp, Homo sapiens
  siRNA target sequence for FLJ23235 (NM_024943.1,795-813).
cctcactatccgcaaaata

SEQ ID NO: 392413 - DNA, 19 bp, Homo sapiens
  siRNA target sequence for FLJ23235 (NM_024943.1,798-816).
cactatccgcaaaatactt

SEQ ID NO: 392414 - DNA, 19 bp, Homo sapiens
  siRNA target sequence for FLJ23235 (NM_024943.1,862-880).
cctacatctgttctcttaa

SEQ ID NO: 392415 - DNA, 19 bp, Homo sapiens
  siRNA target sequence for FLJ23235 (NM_024943.1,912-930).
gaatgtgcaggttctttca

SEQ ID NO: 392416 - DNA, 19 bp, Homo sapiens
  siRNA target sequence for C9orf76 (NM_024945.1,335-353).
gaatgtgactagtattgca

SEQ ID NO: 392417 - DNA, 19 bp, Homo sapiens
  siRNA target sequence for C9orf76 (NM_024945.1,407-425).
gtggctggaagcttgtatt

SEQ ID NO: 392418 - DNA, 19 bp, Homo sapiens
  siRNA target sequence for C9orf76 (NM_024945.1,409-427).
ggctggaagcttgtattaa

SEQ ID NO: 392419 - DNA, 19 bp, Homo sapiens
  siRNA target sequence for C9orf76 (NM_024945.1,421-439).
gtattaactggattcaaga

SEQ ID NO: 392420 - DNA, 19 bp, Homo sapiens
  siRNA target sequence for C9orf76 (NM_024945.1,467-485).
ggcccaaatgaataaacaa

SEQ ID NO: 392421 - DNA, 19 bp, Homo sapiens
  siRNA target sequence for C9orf76 (NM_024945.1,540-558).
cccgatggcattttagaaa

SEQ ID NO: 392422 - DNA, 19 bp, Homo sapiens
  siRNA target sequence for C9orf76 (NM_024945.1,541-559).
ccgatggcattttagaaat

SEQ ID NO: 392423 - DNA, 19 bp, Homo sapiens
  siRNA target sequence for C9orf76 (NM_024945.1,588-606).
gctctgcagattaattcct

SEQ ID NO: 392424 - DNA, 19 bp, Homo sapiens
  siRNA target sequence for C9orf76 (NM_024945.1,589-607).
ctctgcagattaattcctt

SEQ ID NO: 392425 - DNA, 19 bp, Homo sapiens
  siRNA target sequence for C9orf76 (NM_024945.1,628-646).
catactcccagatacagaa

SEQ ID NO: 392426 - DNA, 19 bp, Homo sapiens
  siRNA target sequence for C9orf76 (NM_024945.1,659-677).
gaatacaacaaatgatcta

SEQ ID NO: 392427 - DNA, 19 bp, Homo sapiens
  siRNA target sequence for C9orf76 (NM_024945.1,693-711).
caagtaaccccaaaacctt

SEQ ID NO: 392428 - DNA, 19 bp, Homo sapiens
  siRNA target sequence for C9orf76 (NM_024945.1,737-755).
gatgctgcagctaactgat

SEQ ID NO: 392429 - DNA, 19 bp, Homo sapiens
  siRNA target sequence for C9orf76 (NM_024945.1,746-764).
gctaactgatggaatcgta

SEQ ID NO: 392430 - DNA, 19 bp, Homo sapiens
  siRNA target sequence for C9orf76 (NM_024945.1,751-769).
ctgatggaatcgtacaaat

SEQ ID NO: 392431 - DNA, 19 bp, Homo sapiens
  siRNA target sequence for C9orf76 (NM_024945.1,779-797).
ggaatatcagcctattcca

SEQ ID NO: 392432 - DNA, 19 bp, Homo sapiens
  siRNA target sequence for C9orf76 (NM_024945.1,780-798).
gaatatcagcctattccaa

SEQ ID NO: 392433 - DNA, 19 bp, Homo sapiens
  siRNA target sequence for C9orf76 (NM_024945.1,788-806).
gcctattccaattcttcat

SEQ ID NO: 392434 - DNA, 19 bp, Homo sapiens
  siRNA target sequence for C9orf76 (NM_024945.1,816-834).
cctccaggtacaaaaattt

SEQ ID NO: 392435 - DNA, 19 bp, Homo sapiens
  siRNA target sequence for C9orf76 (NM_024945.1,819-837).
ccaggtacaaaaattttga

SEQ ID NO: 392436 - DNA, 19 bp, Homo sapiens
  siRNA target sequence for C9orf76 (NM_024945.1,822-840).
ggtacaaaaattttgattt

SEQ ID NO: 392437 - DNA, 19 bp, Homo sapiens
  siRNA target sequence for C9orf76 (NM_024945.1,823-841).
gtacaaaaattttgattta

SEQ ID NO: 392438 - DNA, 19 bp, Homo sapiens
  siRNA target sequence for C9orf76 (NM_024945.1,857-875).
ccgtcttggtgttctctta

SEQ ID NO: 392439 - DNA, 19 bp, Homo sapiens
  siRNA target sequence for C9orf76 (NM_024945.1,858-876).
cgtcttggtgttctcttat

SEQ ID NO: 392440 - DNA, 19 bp, Homo sapiens
  siRNA target sequence for C9orf76 (NM_024945.1,967-985).
gggaacctgatcttgtagt

SEQ ID NO: 392441 - DNA, 19 bp, Homo sapiens
  siRNA target sequence for C9orf76 (NM_024945.1,969-987).
gaacctgatcttgtagttt

SEQ ID NO: 392442 - DNA, 19 bp, Homo sapiens
  siRNA target sequence for C9orf76 (NM_024945.1,981-999).
gtagtttcagtcataccaa

SEQ ID NO: 392443 - DNA, 19 bp, Homo sapiens
  siRNA target sequence for C9orf76 (NM_024945.1,1011-1029).
gaaaacattcccagagtta

SEQ ID NO: 392444 - DNA, 19 bp, Homo sapiens
  siRNA target sequence for C9orf76 (NM_024945.1,1024-1042).
gagttacagatgttctaga

SEQ ID NO: 392445 - DNA, 19 bp, Homo sapiens
  siRNA target sequence for C9orf76 (NM_024945.1,1073-1091).
cttggcaagtcttgatgaa

SEQ ID NO: 392446 - DNA, 19 bp, Homo sapiens
  siRNA target sequence for C9orf76 (NM_024945.1,1146-1164).
ggtagttcctcaaatacca

SEQ ID NO: 392447 - DNA, 19 bp, Homo sapiens
  siRNA target sequence for C9orf76 (NM_024945.1,1147-1165).
gtagttcctcaaataccat

SEQ ID NO: 392448 - DNA, 19 bp, Homo sapiens
  siRNA target sequence for C9orf76 (NM_024945.1,1167-1185).
cccacaagacagtcaagtt

SEQ ID NO: 392449 - DNA, 19 bp, Homo sapiens
  siRNA target sequence for C9orf76 (NM_024945.1,1169-1187).
cacaagacagtcaagtttt

SEQ ID NO: 392450 - DNA, 19 bp, Homo sapiens
  siRNA target sequence for C9orf76 (NM_024945.1,1216-1234).
caaaagaggaaccatcaaa

SEQ ID NO: 392451 - DNA, 19 bp, Homo sapiens
  siRNA target sequence for C9orf76 (NM_024945.1,1221-1239).
gaggaaccatcaaacctat

SEQ ID NO: 392452 - DNA, 19 bp, Homo sapiens
  siRNA target sequence for C9orf76 (NM_024945.1,1224-1242).
gaaccatcaaacctatcta

SEQ ID NO: 392453 - DNA, 19 bp, Homo sapiens
  siRNA target sequence for C9orf76 (NM_024945.1,1231-1249).
caaacctatctatacatgt

SEQ ID NO: 392454 - DNA, 19 bp, Homo sapiens
  siRNA target sequence for C9orf76 (NM_024945.1,1325-1343).
ggaaactaaggaattgcaa

SEQ ID NO: 392455 - DNA, 19 bp, Homo sapiens
  siRNA target sequence for C9orf76 (NM_024945.1,1330-1348).
ctaaggaattgcaaccatt

SEQ ID NO: 392456 - DNA, 19 bp, Homo sapiens
  siRNA target sequence for C9orf76 (NM_024945.1,1344-1362).
ccattgacttttaacagaa

SEQ ID NO: 392457 - DNA, 19 bp, Homo sapiens
  siRNA target sequence for C9orf76 (NM_024945.1,1360-1378).
gaaatgccgatcgaagtat

SEQ ID NO: 392458 - DNA, 19 bp, Homo sapiens
  siRNA target sequence for C9orf76 (NM_024945.1,1365-1383).
gccgatcgaagtatagaga

SEQ ID NO: 392459 - DNA, 19 bp, Homo sapiens
  siRNA target sequence for C9orf76 (NM_024945.1,1398-1416).
cctaatactacgaataact

SEQ ID NO: 392460 - DNA, 19 bp, Homo sapiens
  siRNA target sequence for C9orf76 (NM_024945.1,1501-1519).
gttgtccatctgttagaga

SEQ ID NO: 392461 - DNA, 19 bp, Homo sapiens
  siRNA target sequence for C9orf76 (NM_024945.1,1507-1525).
catctgttagagaccaaaa

SEQ ID NO: 392462 - DNA, 19 bp, Homo sapiens
  siRNA target sequence for C9orf76 (NM_024945.1,1529-1547).
gagtattttttcagttcat

SEQ ID NO: 392463 - DNA, 19 bp, Homo sapiens
  siRNA target sequence for C9orf76 (NM_024945.1,1554-1572).
gtacccttagcccatgatt

SEQ ID NO: 392464 - DNA, 19 bp, Homo sapiens
  siRNA target sequence for C9orf76 (NM_024945.1,1557-1575).
cccttagcccatgatttta

SEQ ID NO: 392465 - DNA, 19 bp, Homo sapiens
  siRNA target sequence for C9orf76 (NM_024945.1,1559-1577).
cttagcccatgattttaca

SEQ ID NO: 392466 - DNA, 19 bp, Homo sapiens
  siRNA target sequence for C9orf76 (NM_024945.1,1589-1607).
gaacttagagacagataat

SEQ ID NO: 392467 - DNA, 19 bp, Homo sapiens
  siRNA target sequence for C9orf76 (NM_024945.1,1617-1635).
caaaccagcagttcagata

SEQ ID NO: 392468 - DNA, 19 bp, Homo sapiens
  siRNA target sequence for C9orf76 (NM_024945.1,1627-1645).
gttcagatagccattcctt

SEQ ID NO: 392469 - DNA, 19 bp, Homo sapiens
  siRNA target sequence for C9orf76 (NM_024945.1,1630-1648).
cagatagccattccttaaa

SEQ ID NO: 392470 - DNA, 19 bp, Homo sapiens
  siRNA target sequence for C9orf76 (NM_024945.1,1673-1691).
ggtcaactatgtacagaaa

SEQ ID NO: 392471 - DNA, 19 bp, Homo sapiens
  siRNA target sequence for C9orf76 (NM_024945.1,1674-1692).
gtcaactatgtacagaaaa

SEQ ID NO: 392472 - DNA, 19 bp, Homo sapiens
  siRNA target sequence for C9orf76 (NM_024945.1,1750-1768).
catcagagaatagcattaa

SEQ ID NO: 392473 - DNA, 19 bp, Homo sapiens
  siRNA target sequence for C9orf76 (NM_024945.1,1753-1771).
cagagaatagcattaatct

SEQ ID NO: 392474 - DNA, 19 bp, Homo sapiens
  siRNA target sequence for C9orf76 (NM_024945.1,1821-1839).
ctaatggccagcaaaccaa

SEQ ID NO: 392475 - DNA, 19 bp, Homo sapiens
  siRNA target sequence for C9orf76 (NM_024945.1,1866-1884).
gcatttattgtaaccttaa

SEQ ID NO: 392476 - DNA, 19 bp, Homo sapiens
  siRNA target sequence for C9orf76 (NM_024945.1,1895-1913).
ctcaagttctggtggtatt

SEQ ID NO: 392477 - DNA, 19 bp, Homo sapiens
  siRNA target sequence for C9orf76 (NM_024945.1,1934-1952).
gtctgatggtactgcatat

SEQ ID NO: 392478 - DNA, 19 bp, Homo sapiens
  siRNA target sequence for C9orf76 (NM_024945.1,1936-1954).
ctgatggtactgcatatct

SEQ ID NO: 392479 - DNA, 19 bp, Homo sapiens
  siRNA target sequence for C9orf76 (NM_024945.1,1948-1966).
catatctagatgtagactt

SEQ ID NO: 392480 - DNA, 19 bp, Homo sapiens
  siRNA target sequence for C9orf76 (NM_024945.1,1959-1977).
gtagactttgtggatgaaa

SEQ ID NO: 392481 - DNA, 19 bp, Homo sapiens
  siRNA target sequence for C9orf76 (NM_024945.1,1996-2014).
ggttctcagtaccagaaat

SEQ ID NO: 392482 - DNA, 19 bp, Homo sapiens
  siRNA target sequence for C9orf76 (NM_024945.1,2015-2033).
gaaacagtcaaaaaaggat

SEQ ID NO: 392483 - DNA, 19 bp, Homo sapiens
  siRNA target sequence for C9orf76 (NM_024945.1,2057-2075).
ggaagggttgcagaaatgt

SEQ ID NO: 392484 - DNA, 19 bp, Homo sapiens
  siRNA target sequence for C9orf76 (NM_024945.1,2061-2079).
gggttgcagaaatgtcaaa

SEQ ID NO: 392485 - DNA, 19 bp, Homo sapiens
  siRNA target sequence for C9orf76 (NM_024945.1,2066-2084).
gcagaaatgtcaaagagat

SEQ ID NO: 392486 - DNA, 19 bp, Homo sapiens
  siRNA target sequence for C9orf76 (NM_024945.1,2074-2092).
gtcaaagagatctaataga

SEQ ID NO: 392487 - DNA, 19 bp, Homo sapiens
  siRNA target sequence for C9orf76 (NM_024945.1,2096-2114).
gtgctgtctaatgactatt

SEQ ID NO: 392488 - DNA, 19 bp, Homo sapiens
  siRNA target sequence for C9orf76 (NM_024945.1,2150-2168).
ggcattacaagatgttaat

SEQ ID NO: 392489 - DNA, 19 bp, Homo sapiens
  siRNA target sequence for C9orf76 (NM_024945.1,2152-2170).
cattacaagatgttaatat

SEQ ID NO: 392490 - DNA, 19 bp, Homo sapiens
  siRNA target sequence for C9orf76 (NM_024945.1,2187-2205).
ctaaagaagcggttaaata

SEQ ID NO: 392491 - DNA, 19 bp, Homo sapiens
  siRNA target sequence for PHC3 (NM_024947.2,195-213).
gacatgctgtacaggtatt

SEQ ID NO: 392492 - DNA, 19 bp, Homo sapiens
  siRNA target sequence for PHC3 (NM_024947.2,276-294).
cccaacaacagcacttgat

SEQ ID NO: 392493 - DNA, 19 bp, Homo sapiens
  siRNA target sequence for PHC3 (NM_024947.2,356-374).
gctgttcaggcaagtttgt

SEQ ID NO: 392494 - DNA, 19 bp, Homo sapiens
  siRNA target sequence for PHC3 (NM_024947.2,459-477).
gtattacccaacagactat

SEQ ID NO: 392495 - DNA, 19 bp, Homo sapiens
  siRNA target sequence for PHC3 (NM_024947.2,465-483).
cccaacagactatgttact

SEQ ID NO: 392496 - DNA, 19 bp, Homo sapiens
  siRNA target sequence for PHC3 (NM_024947.2,533-551).
cgagctcaaatgctgattt

SEQ ID NO: 392497 - DNA, 19 bp, Homo sapiens
  siRNA target sequence for PHC3 (NM_024947.2,536-554).
gctcaaatgctgattttca

SEQ ID NO: 392498 - DNA, 19 bp, Homo sapiens
  siRNA target sequence for PHC3 (NM_024947.2,641-659).
caggttcagaatttaacat

SEQ ID NO: 392499 - DNA, 19 bp, Homo sapiens
  siRNA target sequence for PHC3 (NM_024947.2,657-675).
cattacgcagccagaagtt

SEQ ID NO: 392500 - DNA, 19 bp, Homo sapiens
  siRNA target sequence for PHC3 (NM_024947.2,717-735).
ctagtcaaactcagtcatt

SEQ ID NO: 392501 - DNA, 19 bp, Homo sapiens
  siRNA target sequence for PHC3 (NM_024947.2,722-740).
caaactcagtcattgacaa

SEQ ID NO: 392502 - DNA, 19 bp, Homo sapiens
  siRNA target sequence for PHC3 (NM_024947.2,848-866).
gctgtcacccggacatcaa

SEQ ID NO: 392503 - DNA, 19 bp, Homo sapiens
  siRNA target sequence for PHC3 (NM_024947.2,851-869).
gtcacccggacatcaagta

SEQ ID NO: 392504 - DNA, 19 bp, Homo sapiens
  siRNA target sequence for PHC3 (NM_024947.2,853-871).
cacccggacatcaagtatt

SEQ ID NO: 392505 - DNA, 19 bp, Homo sapiens
  siRNA target sequence for PHC3 (NM_024947.2,855-873).
cccggacatcaagtattca

SEQ ID NO: 392506 - DNA, 19 bp, Homo sapiens
  siRNA target sequence for PHC3 (NM_024947.2,960-978).
ccaaagtttcccatcatca

SEQ ID NO: 392507 - DNA, 19 bp, Homo sapiens
  siRNA target sequence for PHC3 (NM_024947.2,1012-1030).
gccaatcacacttcagaat

SEQ ID NO: 392508 - DNA, 19 bp, Homo sapiens
  siRNA target sequence for PHC3 (NM_024947.2,1047-1065).
ccccatcccagcactgtat

SEQ ID NO: 392509 - DNA, 19 bp, Homo sapiens
  siRNA target sequence for PHC3 (NM_024947.2,1048-1066).
cccatcccagcactgtata

SEQ ID NO: 392510 - DNA, 19 bp, Homo sapiens
  siRNA target sequence for PHC3 (NM_024947.2,1135-1153).
gagtcatccctctccttta

SEQ ID NO: 392511 - DNA, 19 bp, Homo sapiens
  siRNA target sequence for PHC3 (NM_024947.2,1224-1242).
caagtcagtctcctactat

SEQ ID NO: 392512 - DNA, 19 bp, Homo sapiens
  siRNA target sequence for PHC3 (NM_024947.2,1315-1333).
gcagcagtccactgctaat

SEQ ID NO: 392513 - DNA, 19 bp, Homo sapiens
  siRNA target sequence for PHC3 (NM_024947.2,1383-1401).
cagcttcccctgttgtaca

SEQ ID NO: 392514 - DNA, 19 bp, Homo sapiens
  siRNA target sequence for PHC3 (NM_024947.2,1705-1723).
gactgttgcggtaaaccta

SEQ ID NO: 392515 - DNA, 19 bp, Homo sapiens
  siRNA target sequence for PHC3 (NM_024947.2,1811-1829).
gaatgtgtccggatggata

SEQ ID NO: 392516 - DNA, 19 bp, Homo sapiens
  siRNA target sequence for PHC3 (NM_024947.2,1896-1914).
ctgaacatcctttgttaga

SEQ ID NO: 392517 - DNA, 19 bp, Homo sapiens
  siRNA target sequence for PHC3 (NM_024947.2,1909-1927).
gttagagcaagtggaatta

SEQ ID NO: 392518 - DNA, 19 bp, Homo sapiens
  siRNA target sequence for PHC3 (NM_024947.2,1943-1961).
gtcagtgcttcagtaatta

SEQ ID NO: 392519 - DNA, 19 bp, Homo sapiens
  siRNA target sequence for PHC3 (NM_024947.2,2031-2049).
ggagtaacagtacatctat

SEQ ID NO: 392520 - DNA, 19 bp, Homo sapiens
  siRNA target sequence for PHC3 (NM_024947.2,2053-2071).
cagtagcattcccagtata

SEQ ID NO: 392521 - DNA, 19 bp, Homo sapiens
  siRNA target sequence for PHC3 (NM_024947.2,2055-2073).
gtagcattcccagtataga

SEQ ID NO: 392522 - DNA, 19 bp, Homo sapiens
  siRNA target sequence for PHC3 (NM_024947.2,2081-2099).
cctccacaggctattgtta

SEQ ID NO: 392523 - DNA, 19 bp, Homo sapiens
  siRNA target sequence for PHC3 (NM_024947.2,2096-2114).
gttaaaccacagatcctaa

SEQ ID NO: 392524 - DNA, 19 bp, Homo sapiens
  siRNA target sequence for PHC3 (NM_024947.2,2105-2123).
cagatcctaacccatgtta

SEQ ID NO: 392525 - DNA, 19 bp, Homo sapiens
  siRNA target sequence for PHC3 (NM_024947.2,2107-2125).
gatcctaacccatgttatt

SEQ ID NO: 392526 - DNA, 19 bp, Homo sapiens
  siRNA target sequence for PHC3 (NM_024947.2,2110-2128).
cctaacccatgttattgaa

SEQ ID NO: 392527 - DNA, 19 bp, Homo sapiens
  siRNA target sequence for PHC3 (NM_024947.2,2167-2185).
gagtcgttcctctttgcta

SEQ ID NO: 392528 - DNA, 19 bp, Homo sapiens
  siRNA target sequence for PHC3 (NM_024947.2,2169-2187).
gtcgttcctctttgctaat

SEQ ID NO: 392529 - DNA, 19 bp, Homo sapiens
  siRNA target sequence for PHC3 (NM_024947.2,2218-2236).
ggataatcaggtgataaat

SEQ ID NO: 392530 - DNA, 19 bp, Homo sapiens
  siRNA target sequence for PHC3 (NM_024947.2,2314-2332).
gattgctgaagagacatta

SEQ ID NO: 392531 - DNA, 19 bp, Homo sapiens
  siRNA target sequence for PHC3 (NM_024947.2,2372-2390).
gggaaaatgggatatgcta

SEQ ID NO: 392532 - DNA, 19 bp, Homo sapiens
  siRNA target sequence for PHC3 (NM_024947.2,2373-2391).
ggaaaatgggatatgctaa

SEQ ID NO: 392533 - DNA, 19 bp, Homo sapiens
  siRNA target sequence for PHC3 (NM_024947.2,2374-2392).
gaaaatgggatatgctaat

SEQ ID NO: 392534 - DNA, 19 bp, Homo sapiens
  siRNA target sequence for PHC3 (NM_024947.2,2411-2429).
cgattctgcactatgtcat

SEQ ID NO: 392535 - DNA, 19 bp, Homo sapiens
  siRNA target sequence for PHC3 (NM_024947.2,2430-2448).
gtgccaaaaggtacaatgt

SEQ ID NO: 392536 - DNA, 19 bp, Homo sapiens
  siRNA target sequence for PHC3 (NM_024947.2,2432-2450).
gccaaaaggtacaatgtta

SEQ ID NO: 392537 - DNA, 19 bp, Homo sapiens
  siRNA target sequence for PHC3 (NM_024947.2,2471-2489).
cttagtcgttggaatcgta

SEQ ID NO: 392538 - DNA, 19 bp, Homo sapiens
  siRNA target sequence for PHC3 (NM_024947.2,2486-2504).
cgtaagcctgataatcaaa

SEQ ID NO: 392539 - DNA, 19 bp, Homo sapiens
  siRNA target sequence for PHC3 (NM_024947.2,2543-2561).
ggggcagcgagagaacata

SEQ ID NO: 392540 - DNA, 19 bp, Homo sapiens
  siRNA target sequence for PHC3 (NM_024947.2,2544-2562).
gggcagcgagagaacatat

SEQ ID NO: 392541 - DNA, 19 bp, Homo sapiens
  siRNA target sequence for PHC3 (NM_024947.2,2549-2567).
gcgagagaacatatcctta

SEQ ID NO: 392542 - DNA, 19 bp, Homo sapiens
  siRNA target sequence for PHC3 (NM_024947.2,2564-2582).
cttaggcagcttccaatta

SEQ ID NO: 392543 - DNA, 19 bp, Homo sapiens
  siRNA target sequence for PHC3 (NM_024947.2,2573-2591).
cttccaattacttatccat

SEQ ID NO: 392544 - DNA, 19 bp, Homo sapiens
  siRNA target sequence for PHC3 (NM_024947.2,2627-2645).
gtgccatctgctatgacaa

SEQ ID NO: 392545 - DNA, 19 bp, Homo sapiens
  siRNA target sequence for PHC3 (NM_024947.2,2744-2762).
caaacagagccatctatat

SEQ ID NO: 392546 - DNA, 19 bp, Homo sapiens
  siRNA target sequence for PHC3 (NM_024947.2,2810-2828).
caggatatcgcagatgaat

SEQ ID NO: 392547 - DNA, 19 bp, Homo sapiens
  siRNA target sequence for PHC3 (NM_024947.2,2856-2874).
cccttctcttgctgaaaga

SEQ ID NO: 392548 - DNA, 19 bp, Homo sapiens
  siRNA target sequence for PHC3 (NM_024947.2,2857-2875).
ccttctcttgctgaaagaa

SEQ ID NO: 392549 - DNA, 19 bp, Homo sapiens
  siRNA target sequence for BOMB (NM_024949.3,100-118).
ggggcactggatattgaga

SEQ ID NO: 392550 - DNA, 19 bp, Homo sapiens
  siRNA target sequence for BOMB (NM_024949.3,101-119).
gggcactggatattgagaa

SEQ ID NO: 392551 - DNA, 19 bp, Homo sapiens
  siRNA target sequence for BOMB (NM_024949.3,127-145).
ctgatgctgattaatgaaa

SEQ ID NO: 392552 - DNA, 19 bp, Homo sapiens
  siRNA target sequence for BOMB (NM_024949.3,171-189).
gttcgtcaccccacagaaa

SEQ ID NO: 392553 - DNA, 19 bp, Homo sapiens
  siRNA target sequence for BOMB (NM_024949.3,175-193).
gtcaccccacagaaacgta

SEQ ID NO: 392554 - DNA, 19 bp, Homo sapiens
  siRNA target sequence for BOMB (NM_024949.3,186-204).
gaaacgtacccaagatgaa

SEQ ID NO: 392555 - DNA, 19 bp, Homo sapiens
  siRNA target sequence for BOMB (NM_024949.3,285-303).
cgagagattgagattggaa

SEQ ID NO: 392556 - DNA, 19 bp, Homo sapiens
  siRNA target sequence for BOMB (NM_024949.3,341-359).
ctactaaattaactactta

SEQ ID NO: 392557 - DNA, 19 bp, Homo sapiens
  siRNA target sequence for BOMB (NM_024949.3,353-371).
ctacttatttgcattcaca

SEQ ID NO: 392558 - DNA, 19 bp, Homo sapiens
  siRNA target sequence for BOMB (NM_024949.3,486-504).
cagttccaccgaactctat

SEQ ID NO: 392559 - DNA, 19 bp, Homo sapiens
  siRNA target sequence for BOMB (NM_024949.3,499-517).
ctctattacagcagtcaaa

SEQ ID NO: 392560 - DNA, 19 bp, Homo sapiens
  siRNA target sequence for BOMB (NM_024949.3,501-519).
ctattacagcagtcaaagt

SEQ ID NO: 392561 - DNA, 19 bp, Homo sapiens
  siRNA target sequence for BOMB (NM_024949.3,509-527).
gcagtcaaagtgatcagat

SEQ ID NO: 392562 - DNA, 19 bp, Homo sapiens
  siRNA target sequence for BOMB (NM_024949.3,510-528).
cagtcaaagtgatcagata

SEQ ID NO: 392563 - DNA, 19 bp, Homo sapiens
  siRNA target sequence for BOMB (NM_024949.3,529-547).
gatgtggattatcagtata

SEQ ID NO: 392564 - DNA, 19 bp, Homo sapiens
  siRNA target sequence for BOMB (NM_024949.3,602-620).
ccaccatccatgaaaacga

SEQ ID NO: 392565 - DNA, 19 bp, Homo sapiens
  siRNA target sequence for BOMB (NM_024949.3,834-852).
gttcactgctgactttgaa

SEQ ID NO: 392566 - DNA, 19 bp, Homo sapiens
  siRNA target sequence for BOMB (NM_024949.3,861-879).
gttgagtagccattttgca

SEQ ID NO: 392567 - DNA, 19 bp, Homo sapiens
  siRNA target sequence for BOMB (NM_024949.3,866-884).
gtagccattttgcagatat

SEQ ID NO: 392568 - DNA, 19 bp, Homo sapiens
  siRNA target sequence for BOMB (NM_024949.3,887-905).
gcctcatcgaaaatcagat

SEQ ID NO: 392569 - DNA, 19 bp, Homo sapiens
  siRNA target sequence for BOMB (NM_024949.3,889-907).
ctcatcgaaaatcagattt

SEQ ID NO: 392570 - DNA, 19 bp, Homo sapiens
  siRNA target sequence for BOMB (NM_024949.3,971-989).
gtgctagggagccattata

SEQ ID NO: 392571 - DNA, 19 bp, Homo sapiens
  siRNA target sequence for BOMB (NM_024949.3,974-992).
ctagggagccattatatga

SEQ ID NO: 392572 - DNA, 19 bp, Homo sapiens
  siRNA target sequence for BOMB (NM_024949.3,1106-1124).
gtggggtctatgaagcttt

SEQ ID NO: 392573 - DNA, 19 bp, Homo sapiens
  siRNA target sequence for BOMB (NM_024949.3,1125-1143).
cgtgaaacaacctagtgaa

SEQ ID NO: 392574 - DNA, 19 bp, Homo sapiens
  siRNA target sequence for BOMB (NM_024949.3,1188-1206).
gaccgcccaggttcagata

SEQ ID NO: 392575 - DNA, 19 bp, Homo sapiens
  siRNA target sequence for BOMB (NM_024949.3,1201-1219).
cagataggactcagataca

SEQ ID NO: 392576 - DNA, 19 bp, Homo sapiens
  siRNA target sequence for BOMB (NM_024949.3,1203-1221).
gataggactcagatacaat

SEQ ID NO: 392577 - DNA, 19 bp, Homo sapiens
  siRNA target sequence for BOMB (NM_024949.3,1278-1296).
cttgatacctcatacttca

SEQ ID NO: 392578 - DNA, 19 bp, Homo sapiens
  siRNA target sequence for BOMB (NM_024949.3,1346-1364).
gtctgtttcgcacaaaagt

SEQ ID NO: 392579 - DNA, 19 bp, Homo sapiens
  siRNA target sequence for BOMB (NM_024949.3,1350-1368).
gtttcgcacaaaagttcat

SEQ ID NO: 392580 - DNA, 19 bp, Homo sapiens
  siRNA target sequence for BOMB (NM_024949.3,1506-1524).
gatcagcctggcagattta

SEQ ID NO: 392581 - DNA, 19 bp, Homo sapiens
  siRNA target sequence for BOMB (NM_024949.3,1539-1557).
ggttttcactctatggtat

SEQ ID NO: 392582 - DNA, 19 bp, Homo sapiens
  siRNA target sequence for BOMB (NM_024949.3,1540-1558).
gttttcactctatggtata

SEQ ID NO: 392583 - DNA, 19 bp, Homo sapiens
  siRNA target sequence for BOMB (NM_024949.3,1625-1643).
caaaccagccgttagtaga

SEQ ID NO: 392584 - DNA, 19 bp, Homo sapiens
  siRNA target sequence for BOMB (NM_024949.3,1629-1647).
ccagccgttagtagattct

SEQ ID NO: 392585 - DNA, 19 bp, Homo sapiens
  siRNA target sequence for BOMB (NM_024949.3,1630-1648).
cagccgttagtagattcta

SEQ ID NO: 392586 - DNA, 19 bp, Homo sapiens
  siRNA target sequence for BOMB (NM_024949.3,1632-1650).
gccgttagtagattctata

SEQ ID NO: 392587 - DNA, 19 bp, Homo sapiens
  siRNA target sequence for BOMB (NM_024949.3,1669-1687).
gccttacttgcaagaacat

SEQ ID NO: 392588 - DNA, 19 bp, Homo sapiens
  siRNA target sequence for BOMB (NM_024949.3,1774-1792).
gactggctaacaatgctaa

SEQ ID NO: 392589 - DNA, 19 bp, Homo sapiens
  siRNA target sequence for BOMB (NM_024949.3,1848-1866).
ggacagtagctgtacagaa

SEQ ID NO: 392590 - DNA, 19 bp, Homo sapiens
  siRNA target sequence for BOMB (NM_024949.3,1851-1869).
cagtagctgtacagaagat

SEQ ID NO: 392591 - DNA, 19 bp, Homo sapiens
  siRNA target sequence for BOMB (NM_024949.3,1949-1967).
gtcagccacctactagaat

SEQ ID NO: 392592 - DNA, 19 bp, Homo sapiens
  siRNA target sequence for BOMB (NM_024949.3,1953-1971).
gccacctactagaatacca

SEQ ID NO: 392593 - DNA, 19 bp, Homo sapiens
  siRNA target sequence for BOMB (NM_024949.3,1997-2015).
ctgatgaagccgctaatga

SEQ ID NO: 392594 - DNA, 19 bp, Homo sapiens
  siRNA target sequence for BOMB (NM_024949.3,2092-2110).
gtgcgctcacagacctttt

SEQ ID NO: 392595 - DNA, 19 bp, Homo sapiens
  siRNA target sequence for BOMB (NM_024949.3,2117-2135).
gagagcggaaccagtacat

SEQ ID NO: 392596 - DNA, 19 bp, Homo sapiens
  siRNA target sequence for BOMB (NM_024949.3,2119-2137).
gagcggaaccagtacatct

SEQ ID NO: 392597 - DNA, 19 bp, Homo sapiens
  siRNA target sequence for BOMB (NM_024949.3,2244-2262).
ccagtcagtccttagaaga

SEQ ID NO: 392598 - DNA, 19 bp, Homo sapiens
  siRNA target sequence for FLJ13089 (NM_024953.2,68-86).
gcccatttacgattatctt

SEQ ID NO: 392599 - DNA, 19 bp, Homo sapiens
  siRNA target sequence for FLJ13089 (NM_024953.2,70-88).
ccatttacgattatcttga

SEQ ID NO: 392600 - DNA, 19 bp, Homo sapiens
  siRNA target sequence for FLJ13089 (NM_024953.2,78-96).
gattatcttgacaatggta

SEQ ID NO: 392601 - DNA, 19 bp, Homo sapiens
  siRNA target sequence for FLJ13089 (NM_024953.2,150-168).
cttcattgtgctaaggttt

SEQ ID NO: 392602 - DNA, 19 bp, Homo sapiens
  siRNA target sequence for FLJ13089 (NM_024953.2,262-280).
cactgcaggcactgactat

SEQ ID NO: 392603 - DNA, 19 bp, Homo sapiens
  siRNA target sequence for FLJ13089 (NM_024953.2,266-284).
gcaggcactgactatcctt

SEQ ID NO: 392604 - DNA, 19 bp, Homo sapiens
  siRNA target sequence for FLJ13089 (NM_024953.2,267-285).
caggcactgactatccttt

SEQ ID NO: 392605 - DNA, 19 bp, Homo sapiens
  siRNA target sequence for FLJ13089 (NM_024953.2,296-314).
gcaccgaccggagttagtt

SEQ ID NO: 392606 - DNA, 19 bp, Homo sapiens
  siRNA target sequence for FLJ13089 (NM_024953.2,297-315).
caccgaccggagttagtta

SEQ ID NO: 392607 - DNA, 19 bp, Homo sapiens
  siRNA target sequence for FLJ13089 (NM_024953.2,299-317).
ccgaccggagttagttaca

SEQ ID NO: 392608 - DNA, 19 bp, Homo sapiens
  siRNA target sequence for FLJ13089 (NM_024953.2,300-318).
cgaccggagttagttacaa

SEQ ID NO: 392609 - DNA, 19 bp, Homo sapiens
  siRNA target sequence for FLJ13089 (NM_024953.2,301-319).
gaccggagttagttacaaa

SEQ ID NO: 392610 - DNA, 19 bp, Homo sapiens
  siRNA target sequence for FLJ13089 (NM_024953.2,304-322).
cggagttagttacaaaact

SEQ ID NO: 392611 - DNA, 19 bp, Homo sapiens
  siRNA target sequence for FLJ13089 (NM_024953.2,306-324).
gagttagttacaaaacttt

SEQ ID NO: 392612 - DNA, 19 bp, Homo sapiens
  siRNA target sequence for FLJ13089 (NM_024953.2,338-356).
gaagaaagttcccaatagt

SEQ ID NO: 392613 - DNA, 19 bp, Homo sapiens
  siRNA target sequence for FLJ13089 (NM_024953.2,349-367).
ccaatagtgaggagtatca

SEQ ID NO: 392614 - DNA, 19 bp, Homo sapiens
  siRNA target sequence for FLJ13089 (NM_024953.2,390-408).
gccagagtgggtgaataca

SEQ ID NO: 392615 - DNA, 19 bp, Homo sapiens
  siRNA target sequence for FLJ13089 (NM_024953.2,422-440).
ggctggcatggctctatat

SEQ ID NO: 392616 - DNA, 19 bp, Homo sapiens
  siRNA target sequence for FLJ13089 (NM_024953.2,424-442).
ctggcatggctctatataa

SEQ ID NO: 392617 - DNA, 19 bp, Homo sapiens
  siRNA target sequence for FLJ13089 (NM_024953.2,451-469).
ccaaaaatccctactactt

SEQ ID NO: 392618 - DNA, 19 bp, Homo sapiens
  siRNA target sequence for FLJ13089 (NM_024953.2,479-497).
gatgagcttaattatgcaa

SEQ ID NO: 392619 - DNA, 19 bp, Homo sapiens
  siRNA target sequence for FLJ13089 (NM_024953.2,556-574).
gaatggtcgaaaaaatggt

SEQ ID NO: 392620 - DNA, 19 bp, Homo sapiens
  siRNA target sequence for FLJ13089 (NM_024953.2,600-618).
gctgaagttgaactttatt

SEQ ID NO: 392621 - DNA, 19 bp, Homo sapiens
  siRNA target sequence for FLJ13089 (NM_024953.2,601-619).
ctgaagttgaactttatta

SEQ ID NO: 392622 - DNA, 19 bp, Homo sapiens
  siRNA target sequence for FLJ13089 (NM_024953.2,603-621).
gaagttgaactttattata

SEQ ID NO: 392623 - DNA, 19 bp, Homo sapiens
  siRNA target sequence for FLJ13089 (NM_024953.2,686-704).
gaagttgacaagtgagatt

SEQ ID NO: 392624 - DNA, 19 bp, Homo sapiens
  siRNA target sequence for FLJ13089 (NM_024953.2,705-723).
cagagtcgggaaaataaat

SEQ ID NO: 392625 - DNA, 19 bp, Homo sapiens
  siRNA target sequence for FLJ13089 (NM_024953.2,780-798).
cgcctcttactaaaaaact

SEQ ID NO: 392626 - DNA, 19 bp, Homo sapiens
  siRNA target sequence for FLJ13089 (NM_024953.2,782-800).
cctcttactaaaaaactca

SEQ ID NO: 392627 - DNA, 19 bp, Homo sapiens
  siRNA target sequence for FLJ13089 (NM_024953.2,804-822).
gactggcagttctatctga

SEQ ID NO: 392628 - DNA, 19 bp, Homo sapiens
  siRNA target sequence for FLJ13089 (NM_024953.2,810-828).
cagttctatctgacttatt

SEQ ID NO: 392629 - DNA, 19 bp, Homo sapiens
  siRNA target sequence for FLJ13089 (NM_024953.2,815-833).
ctatctgacttatttcgat

SEQ ID NO: 392630 - DNA, 19 bp, Homo sapiens
  siRNA target sequence for FLJ13089 (NM_024953.2,942-960).
gatcggataacggaagaat

SEQ ID NO: 392631 - DNA, 19 bp, Homo sapiens
  siRNA target sequence for FLJ13089 (NM_024953.2,945-963).
cggataacggaagaatcta

SEQ ID NO: 392632 - DNA, 19 bp, Homo sapiens
  siRNA target sequence for FLJ13089 (NM_024953.2,946-964).
ggataacggaagaatctaa

SEQ ID NO: 392633 - DNA, 19 bp, Homo sapiens
  siRNA target sequence for FLJ13089 (NM_024953.2,947-965).
gataacggaagaatctaaa

SEQ ID NO: 392634 - DNA, 19 bp, Homo sapiens
  siRNA target sequence for FLJ13089 (NM_024953.2,953-971).
ggaagaatctaaaagttct

SEQ ID NO: 392635 - DNA, 19 bp, Homo sapiens
  siRNA target sequence for FLJ13089 (NM_024953.2,982-1000).
gaggaccacatctagctaa

SEQ ID NO: 392636 - DNA, 19 bp, Homo sapiens
  siRNA target sequence for FLJ13089 (NM_024953.2,988-1006).
cacatctagctaaattgga

SEQ ID NO: 392637 - DNA, 19 bp, Homo sapiens
  siRNA target sequence for FLJ13089 (NM_024953.2,996-1014).
gctaaattggagctgatta

SEQ ID NO: 392638 - DNA, 19 bp, Homo sapiens
  siRNA target sequence for FLJ13089 (NM_024953.2,1007-1025).
gctgattaggcgtttacga

SEQ ID NO: 392639 - DNA, 19 bp, Homo sapiens
  siRNA target sequence for FLJ13089 (NM_024953.2,1008-1026).
ctgattaggcgtttacgaa

SEQ ID NO: 392640 - DNA, 19 bp, Homo sapiens
  siRNA target sequence for FLJ13089 (NM_024953.2,1033-1051).
gttgtaacgatgagtacaa

SEQ ID NO: 392641 - DNA, 19 bp, Homo sapiens
  siRNA target sequence for FLJ13089 (NM_024953.2,1036-1054).
gtaacgatgagtacaaact

SEQ ID NO: 392642 - DNA, 19 bp, Homo sapiens
  siRNA target sequence for FLJ13089 (NM_024953.2,1056-1074).
ggtgatccagaagaattaa

SEQ ID NO: 392643 - DNA, 19 bp, Homo sapiens
  siRNA target sequence for FLJ13089 (NM_024953.2,1057-1075).
gtgatccagaagaattaat

SEQ ID NO: 392644 - DNA, 19 bp, Homo sapiens
  siRNA target sequence for FLJ13089 (NM_024953.2,1098-1116).
ggcgataaaccttgttgtt

SEQ ID NO: 392645 - DNA, 19 bp, Homo sapiens
  siRNA target sequence for FLJ13089 (NM_024953.2,1099-1117).
gcgataaaccttgttgttt

SEQ ID NO: 392646 - DNA, 19 bp, Homo sapiens
  siRNA target sequence for FLJ13089 (NM_024953.2,1100-1118).
cgataaaccttgttgtttt

SEQ ID NO: 392647 - DNA, 19 bp, Homo sapiens
  siRNA target sequence for FLJ13089 (NM_024953.2,1120-1138).
cagaccttaaggtgtttgt

SEQ ID NO: 392648 - DNA, 19 bp, Homo sapiens
  siRNA target sequence for FLJ13089 (NM_024953.2,1156-1174).
cacagtgtacaaaatttat

SEQ ID NO: 392649 - DNA, 19 bp, Homo sapiens
  siRNA target sequence for FLJ13089 (NM_024953.2,1274-1292).
gcagctgacgaggttactt

SEQ ID NO: 392650 - DNA, 19 bp, Homo sapiens
  siRNA target sequence for FLJ13089 (NM_024953.2,1298-1316).
gtaccacaccatggataaa

SEQ ID NO: 392651 - DNA, 19 bp, Homo sapiens
  siRNA target sequence for FLJ13089 (NM_024953.2,1432-1450).
ctgtccatgcgcttattga

SEQ ID NO: 392652 - DNA, 19 bp, Homo sapiens
  siRNA target sequence for FLJ13089 (NM_024953.2,1436-1454).
ccatgcgcttattgatgta

SEQ ID NO: 392653 - DNA, 19 bp, Homo sapiens
  siRNA target sequence for FLJ13089 (NM_024953.2,1437-1455).
catgcgcttattgatgtat

SEQ ID NO: 392654 - DNA, 19 bp, Homo sapiens
  siRNA target sequence for FLJ13089 (NM_024953.2,1551-1569).
ctgcttgttcgaatctact

SEQ ID NO: 392655 - DNA, 19 bp, Homo sapiens
  siRNA target sequence for FLJ13089 (NM_024953.2,1554-1572).
cttgttcgaatctactgta

SEQ ID NO: 392656 - DNA, 19 bp, Homo sapiens
  siRNA target sequence for FLJ13089 (NM_024953.2,1587-1605).
gaaccagtggtggatcttt

SEQ ID NO: 392657 - DNA, 19 bp, Homo sapiens
  siRNA target sequence for FLJ13089 (NM_024953.2,1612-1630).
gcctcgatgctaagcatat

SEQ ID NO: 392658 - DNA, 19 bp, Homo sapiens
  siRNA target sequence for FLJ13089 (NM_024953.2,1658-1676).
gacccgatatgctgaatct

SEQ ID NO: 392659 - DNA, 19 bp, Homo sapiens
  siRNA target sequence for FLJ13089 (NM_024953.2,1661-1679).
ccgatatgctgaatctcta

SEQ ID NO: 392660 - DNA, 19 bp, Homo sapiens
  siRNA target sequence for FLJ13089 (NM_024953.2,1695-1713).
gcgtcccaatcctgtaact

SEQ ID NO: 392661 - DNA, 19 bp, Homo sapiens
  siRNA target sequence for FLJ13089 (NM_024953.2,1696-1714).
cgtcccaatcctgtaactt

SEQ ID NO: 392662 - DNA, 19 bp, Homo sapiens
  siRNA target sequence for FLJ13089 (NM_024953.2,1712-1730).
cttcgcactcaggtttttt

SEQ ID NO: 392663 - DNA, 19 bp, Homo sapiens
  siRNA target sequence for FLJ13089 (NM_024953.2,1746-1764).
gatacctcagaatatatta

SEQ ID NO: 392664 - DNA, 19 bp, Homo sapiens
  siRNA target sequence for FLJ13089 (NM_024953.2,1750-1768).
cctcagaatatattattca

SEQ ID NO: 392665 - DNA, 19 bp, Homo sapiens
  siRNA target sequence for FLJ13089 (NM_024953.2,1800-1818).
ccagagtttatcgctttta

SEQ ID NO: 392666 - DNA, 19 bp, Homo sapiens
  siRNA target sequence for FLJ13089 (NM_024953.2,1803-1821).
gagtttatcgcttttagga

SEQ ID NO: 392667 - DNA, 19 bp, Homo sapiens
  siRNA target sequence for FLJ13089 (NM_024953.2,1823-1841).
caggctgaataattctctt

SEQ ID NO: 392668 - DNA, 19 bp, Homo sapiens
  siRNA target sequence for FLJ13089 (NM_024953.2,1826-1844).
gctgaataattctcttcat

SEQ ID NO: 392669 - DNA, 19 bp, Homo sapiens
  siRNA target sequence for FLJ13089 (NM_024953.2,1861-1879).
ctgaacggatgctgttaga

SEQ ID NO: 392670 - DNA, 19 bp, Homo sapiens
  siRNA target sequence for FLJ13089 (NM_024953.2,1874-1892).
gttagaccttctacttgaa

SEQ ID NO: 392671 - DNA, 19 bp, Homo sapiens
  siRNA target sequence for FLJ13089 (NM_024953.2,1906-1924).
ccagtttagcagaaagtat

SEQ ID NO: 392672 - DNA, 19 bp, Homo sapiens
  siRNA target sequence for FLJ13089 (NM_024953.2,1907-1925).
cagtttagcagaaagtata

SEQ ID NO: 392673 - DNA, 19 bp, Homo sapiens
  siRNA target sequence for FLJ13089 (NM_024953.2,1937-1955).
ccttaggccagaagaagat

SEQ ID NO: 392674 - DNA, 19 bp, Homo sapiens
  siRNA target sequence for FLJ13089 (NM_024953.2,2026-2044).
gggacgtttctgaagaaca

SEQ ID NO: 392675 - DNA, 19 bp, Homo sapiens
  siRNA target sequence for FLJ13089 (NM_024953.2,2067-2085).
gagaccttgtggttaagaa

SEQ ID NO: 392676 - DNA, 19 bp, Homo sapiens
  siRNA target sequence for FLJ13089 (NM_024953.2,2078-2096).
gttaagaatccgatcctta

SEQ ID NO: 392677 - DNA, 19 bp, Homo sapiens
  siRNA target sequence for FLJ13089 (NM_024953.2,2177-2195).
ggtatcctcccggattgat

SEQ ID NO: 392678 - DNA, 19 bp, Homo sapiens
  siRNA target sequence for FLJ13089 (NM_024953.2,2178-2196).
gtatcctcccggattgata

SEQ ID NO: 392679 - DNA, 19 bp, Homo sapiens
  siRNA target sequence for FLJ13089 (NM_024953.2,2183-2201).
ctcccggattgatattctt

SEQ ID NO: 392680 - DNA, 19 bp, Homo sapiens
  siRNA target sequence for FLJ13089 (NM_024953.2,2235-2253).
gagacaggaaagcgattta

SEQ ID NO: 392681 - DNA, 19 bp, Homo sapiens
  siRNA target sequence for FLJ13089 (NM_024953.2,2241-2259).
ggaaagcgatttattgaga

SEQ ID NO: 392682 - DNA, 19 bp, Homo sapiens
  siRNA target sequence for FLJ13089 (NM_024953.2,2247-2265).
cgatttattgagaaggata

SEQ ID NO: 392683 - DNA, 19 bp, Homo sapiens
  siRNA target sequence for FLJ13089 (NM_024953.2,2333-2351).
gtgccagataagctctttt

SEQ ID NO: 392684 - DNA, 19 bp, Homo sapiens
  siRNA target sequence for FLJ13089 (NM_024953.2,2335-2353).
gccagataagctcttttta

SEQ ID NO: 392685 - DNA, 19 bp, Homo sapiens
  siRNA target sequence for FLJ13089 (NM_024953.2,2336-2354).
ccagataagctctttttat

SEQ ID NO: 392686 - DNA, 19 bp, Homo sapiens
  siRNA target sequence for FLJ13089 (NM_024953.2,2345-2363).
ctctttttatcttgtcaat

SEQ ID NO: 392687 - DNA, 19 bp, Homo sapiens
  siRNA target sequence for FLJ13089 (NM_024953.2,2386-2404).
gtggtttagaggatacaat

SEQ ID NO: 392688 - DNA, 19 bp, Homo sapiens
  siRNA target sequence for FLJ13089 (NM_024953.2,2405-2423).
ggagattcaggaacgaata

SEQ ID NO: 392689 - DNA, 19 bp, Homo sapiens
  siRNA target sequence for FLJ13089 (NM_024953.2,2412-2430).
caggaacgaatagaaaata

SEQ ID NO: 392690 - DNA, 19 bp, Homo sapiens
  siRNA target sequence for FLJ13089 (NM_024953.2,2414-2432).
ggaacgaatagaaaatagt

SEQ ID NO: 392691 - DNA, 19 bp, Homo sapiens
  siRNA target sequence for FLJ13089 (NM_024953.2,2418-2436).
cgaatagaaaatagtttta

SEQ ID NO: 392692 - DNA, 19 bp, Homo sapiens
  siRNA target sequence for FLJ13089 (NM_024953.2,2440-2458).
ctttactagaccagttaaa

SEQ ID NO: 392693 - DNA, 19 bp, Homo sapiens
  siRNA target sequence for FLJ13089 (NM_024953.2,2465-2483).
cttcagtaaatgtaaaggt

SEQ ID NO: 392694 - DNA, 19 bp, Homo sapiens
  siRNA target sequence for FLJ13089 (NM_024953.2,2476-2494).
gtaaaggtgacctcttaga

SEQ ID NO: 392695 - DNA, 19 bp, Homo sapiens
  siRNA target sequence for FLJ13089 (NM_024953.2,2496-2514).
gttaaagatggtaacttga

SEQ ID NO: 392696 - DNA, 19 bp, Homo sapiens
  siRNA target sequence for FLJ13089 (NM_024953.2,2518-2536).
cacatcctactcttttaga

SEQ ID NO: 392697 - DNA, 19 bp, Homo sapiens
  siRNA target sequence for FLJ13089 (NM_024953.2,2574-2592).
ctttgggtatccagttact

SEQ ID NO: 392698 - DNA, 19 bp, Homo sapiens
  siRNA target sequence for FLJ13089 (NM_024953.2,2599-2617).
gtgtcctacgaccatacaa

SEQ ID NO: 392699 - DNA, 19 bp, Homo sapiens
  siRNA target sequence for FLJ13089 (NM_024953.2,2603-2621).
cctacgaccatacaaacta

SEQ ID NO: 392700 - DNA, 19 bp, Homo sapiens
  siRNA target sequence for FLJ13089 (NM_024953.2,2604-2622).
ctacgaccatacaaactaa

SEQ ID NO: 392701 - DNA, 19 bp, Homo sapiens
  siRNA target sequence for FLJ13089 (NM_024953.2,2607-2625).
cgaccatacaaactaaatt

SEQ ID NO: 392702 - DNA, 19 bp, Homo sapiens
  siRNA target sequence for FLJ13089 (NM_024953.2,2608-2626).
gaccatacaaactaaattt

SEQ ID NO: 392703 - DNA, 19 bp, Homo sapiens
  siRNA target sequence for FLJ13089 (NM_024953.2,2683-2701).
ccagtttccaagactatgt

SEQ ID NO: 392704 - DNA, 19 bp, Homo sapiens
  siRNA target sequence for FLJ13089 (NM_024953.2,2706-2724).
gggcttcagactttaattt

SEQ ID NO: 392705 - DNA, 19 bp, Homo sapiens
  siRNA target sequence for FLJ13089 (NM_024953.2,2726-2744).
caatgttgtggatcatatt

SEQ ID NO: 392706 - DNA, 19 bp, Homo sapiens
  siRNA target sequence for FLJ13089 (NM_024953.2,2758-2776).
cacatctaattgcacttaa

SEQ ID NO: 392707 - DNA, 19 bp, Homo sapiens
  siRNA target sequence for FLJ13089 (NM_024953.2,2849-2867).
gaaggtgcagagcagttat

SEQ ID NO: 392708 - DNA, 19 bp, Homo sapiens
  siRNA target sequence for FLJ11807 (NM_024954.3,336-354).
ggagcaaacgggatgagtt

SEQ ID NO: 392709 - DNA, 19 bp, Homo sapiens
  siRNA target sequence for FLJ23375 (NM_024956.2,947-965).
gtcggagcaaccatacaat

SEQ ID NO: 392710 - DNA, 19 bp, Homo sapiens
  siRNA target sequence for FLJ23375 (NM_024956.2,949-967).
cggagcaaccatacaattt

SEQ ID NO: 392711 - DNA, 19 bp, Homo sapiens
  siRNA target sequence for FLJ23375 (NM_024956.2,953-971).
gcaaccatacaatttggtt

SEQ ID NO: 392712 - DNA, 19 bp, Homo sapiens
  siRNA target sequence for FLJ23375 (NM_024956.2,969-987).
gtttggacactttacaaca

SEQ ID NO: 392713 - DNA, 19 bp, Homo sapiens
  siRNA target sequence for FLJ23375 (NM_024956.2,978-996).
ctttacaacatccactatt

SEQ ID NO: 392714 - DNA, 19 bp, Homo sapiens
  siRNA target sequence for FLJ23375 (NM_024956.2,1009-1027).
ccaggaatccggtcaataa

SEQ ID NO: 392715 - DNA, 19 bp, Homo sapiens
  siRNA target sequence for FLJ23375 (NM_024956.2,1012-1030).
ggaatccggtcaataatga

SEQ ID NO: 392716 - DNA, 19 bp, Homo sapiens
  siRNA target sequence for FLJ23375 (NM_024956.2,1029-1047).
gagttcggctatagcttat

SEQ ID NO: 392717 - DNA, 19 bp, Homo sapiens
  siRNA target sequence for FLJ23375 (NM_024956.2,1129-1147).
gtgggagactggaaggata

SEQ ID NO: 392718 - DNA, 19 bp, Homo sapiens
  siRNA target sequence for FLJ23375 (NM_024956.2,1152-1170).
gaggtaccggatttttgct

SEQ ID NO: 392719 - DNA, 19 bp, Homo sapiens
  siRNA target sequence for FLJ23375 (NM_024956.2,1154-1172).
ggtaccggatttttgcttt

SEQ ID NO: 392720 - DNA, 19 bp, Homo sapiens
  siRNA target sequence for FLJ23375 (NM_024956.2,1155-1173).
gtaccggatttttgctttt

SEQ ID NO: 392721 - DNA, 19 bp, Homo sapiens
  siRNA target sequence for FLJ23375 (NM_024956.2,1174-1192).
gatcacgacctctttagct

SEQ ID NO: 392722 - DNA, 19 bp, Homo sapiens
  siRNA target sequence for FLJ23375 (NM_024956.2,1225-1243).
gttcttatcaccaatccta

SEQ ID NO: 392723 - DNA, 19 bp, Homo sapiens
  siRNA target sequence for FLJ23375 (NM_024956.2,1228-1246).
cttatcaccaatcctaaat

SEQ ID NO: 392724 - DNA, 19 bp, Homo sapiens
  siRNA target sequence for FLJ23375 (NM_024956.2,1240-1258).
cctaaatcactcctttata

SEQ ID NO: 392725 - DNA, 19 bp, Homo sapiens
  siRNA target sequence for FLJ23375 (NM_024956.2,1356-1374).
gattgatggagttcattta

SEQ ID NO: 392726 - DNA, 19 bp, Homo sapiens
  siRNA target sequence for FLJ23375 (NM_024956.2,1392-1410).
gtctggtcccattttcgta

SEQ ID NO: 392727 - DNA, 19 bp, Homo sapiens
  siRNA target sequence for FLJ23375 (NM_024956.2,1408-1426).
gtactgaagtggaatccta

SEQ ID NO: 392728 - DNA, 19 bp, Homo sapiens
  siRNA target sequence for FLJ23375 (NM_024956.2,1436-1454).
gtagtgggacacataacat

SEQ ID NO: 392729 - DNA, 19 bp, Homo sapiens
  siRNA target sequence for FLJ23375 (NM_024956.2,1442-1460).
ggacacataacatagaagt

SEQ ID NO: 392730 - DNA, 19 bp, Homo sapiens
  siRNA target sequence for FLJ23375 (NM_024956.2,1540-1558).
gatcccctggcatcattta

SEQ ID NO: 392731 - DNA, 19 bp, Homo sapiens
  siRNA target sequence for FLJ23375 (NM_024956.2,1564-1582).
cgtactgatcactacatca

SEQ ID NO: 392732 - DNA, 19 bp, Homo sapiens
  siRNA target sequence for FLJ23375 (NM_024956.2,1565-1583).
gtactgatcactacatcat

SEQ ID NO: 392733 - DNA, 19 bp, Homo sapiens
  siRNA target sequence for FLJ23375 (NM_024956.2,1618-1636).
cagctcaccattctcatta

SEQ ID NO: 392734 - DNA, 19 bp, Homo sapiens
  siRNA target sequence for FLJ23375 (NM_024956.2,1620-1638).
gctcaccattctcattatt

SEQ ID NO: 392735 - DNA, 19 bp, Homo sapiens
  siRNA target sequence for FLJ23375 (NM_024956.2,1649-1667).
gaggatacccagagcttaa

SEQ ID NO: 392736 - DNA, 19 bp, Homo sapiens
  siRNA target sequence for FLJ23375 (NM_024956.2,1669-1687).
gaaccttcagggtttataa

SEQ ID NO: 392737 - DNA, 19 bp, Homo sapiens
  siRNA target sequence for FLJ23375 (NM_024956.2,1673-1691).
cttcagggtttataaatct

SEQ ID NO: 392738 - DNA, 19 bp, Homo sapiens
  siRNA target sequence for FLJ23375 (NM_024956.2,1797-1815).
cattgatggcaaatttggt

SEQ ID NO: 392739 - DNA, 19 bp, Homo sapiens
  siRNA target sequence for FLJ23375 (NM_024956.2,1854-1872).
cctacaaggcagcataaca

SEQ ID NO: 392740 - DNA, 19 bp, Homo sapiens
  siRNA target sequence for FLJ23375 (NM_024956.2,1888-1906).
ctccagctggcgtttttta

SEQ ID NO: 392741 - DNA, 19 bp, Homo sapiens
  siRNA target sequence for FLJ23375 (NM_024956.2,2034-2052).
gtacatctggcaggtttat

SEQ ID NO: 392742 - DNA, 19 bp, Homo sapiens
  siRNA target sequence for FLJ23375 (NM_024956.2,2075-2093).
catacggcaccctagcttt

SEQ ID NO: 392743 - DNA, 19 bp, Homo sapiens
  siRNA target sequence for FLJ23375 (NM_024956.2,2079-2097).
cggcaccctagctttttta

SEQ ID NO: 392744 - DNA, 19 bp, Homo sapiens
  siRNA target sequence for FLJ23375 (NM_024956.2,2127-2145).
gctgacacctgttctcatt

SEQ ID NO: 392745 - DNA, 19 bp, Homo sapiens
  siRNA target sequence for FLJ23375 (NM_024956.2,2135-2153).
ctgttctcattcgttatgt

SEQ ID NO: 392746 - DNA, 19 bp, Homo sapiens
  siRNA target sequence for FLJ23375 (NM_024956.2,2137-2155).
gttctcattcgttatgtgt

SEQ ID NO: 392747 - DNA, 19 bp, Homo sapiens
  siRNA target sequence for FLJ23375 (NM_024956.2,2184-2202).
cttcatggtgcagttaaaa

SEQ ID NO: 392748 - DNA, 19 bp, Homo sapiens
  siRNA target sequence for FLJ11467 (NM_024963.2,96-114).
ggacatatccaatgatgat

SEQ ID NO: 392749 - DNA, 19 bp, Homo sapiens
  siRNA target sequence for FLJ11467 (NM_024963.2,290-308).
ccgtgttgctgcaaaagga

SEQ ID NO: 392750 - DNA, 19 bp, Homo sapiens
  siRNA target sequence for FLJ11467 (NM_024963.2,647-665).
gctgcaccagcctagagaa

SEQ ID NO: 392751 - DNA, 19 bp, Homo sapiens
  siRNA target sequence for FLJ11467 (NM_024963.2,762-780).
gaacctgcgggtcttctat

SEQ ID NO: 392752 - DNA, 19 bp, Homo sapiens
  siRNA target sequence for FLJ11467 (NM_024963.2,1546-1564).
ctgattgggtccaacttct

SEQ ID NO: 392753 - DNA, 19 bp, Homo sapiens
  siRNA target sequence for FLJ11467 (NM_024963.2,1717-1735).
ggctccgggctggtcaata

SEQ ID NO: 392754 - DNA, 19 bp, Homo sapiens
  siRNA target sequence for FLJ11467 (NM_024963.2,1718-1736).
gctccgggctggtcaatat

SEQ ID NO: 392755 - DNA, 19 bp, Homo sapiens
  siRNA target sequence for FLJ11467 (NM_024963.2,1813-1831).
gcgctctcagacatgttga

SEQ ID NO: 392756 - DNA, 19 bp, Homo sapiens
  siRNA target sequence for FLJ11467 (NM_024963.2,1814-1832).
cgctctcagacatgttgaa

SEQ ID NO: 392757 - DNA, 19 bp, Homo sapiens
  siRNA target sequence for FLJ11467 (NM_024963.2,1880-1898).
gcgccaacgcccagttctt

SEQ ID NO: 392758 - DNA, 19 bp, Homo sapiens
  siRNA target sequence for FLJ11800 (NM_024974.1,103-121).
cctccgaaacacatcactt

SEQ ID NO: 392759 - DNA, 19 bp, Homo sapiens
  siRNA target sequence for FLJ11800 (NM_024974.1,200-218).
gaggcagttcgcttctctt

SEQ ID NO: 392760 - DNA, 19 bp, Homo sapiens
  siRNA target sequence for FLJ11800 (NM_024974.1,254-272).
gcctactgtctgatgtcat

SEQ ID NO: 392761 - DNA, 19 bp, Homo sapiens
  siRNA target sequence for FLJ11800 (NM_024974.1,306-324).
cagagcttttggctaatta

SEQ ID NO: 392762 - DNA, 19 bp, Homo sapiens
  siRNA target sequence for FLJ11800 (NM_024974.1,325-343).
ctgtcactcctctttacat

SEQ ID NO: 392763 - DNA, 19 bp, Homo sapiens
  siRNA target sequence for FLJ11800 (NM_024974.1,346-364).
gtgcatatgcatatcatct

SEQ ID NO: 392764 - DNA, 19 bp, Homo sapiens
  siRNA target sequence for FLJ11800 (NM_024974.1,348-366).
gcatatgcatatcatcttt

SEQ ID NO: 392765 - DNA, 19 bp, Homo sapiens
  siRNA target sequence for FLJ11800 (NM_024974.1,374-392).
gagactggaaatcatgatt

SEQ ID NO: 392766 - DNA, 19 bp, Homo sapiens
  siRNA target sequence for FLJ11800 (NM_024974.1,376-394).
gactggaaatcatgattca

SEQ ID NO: 392767 - DNA, 19 bp, Homo sapiens
  siRNA target sequence for FLJ11800 (NM_024974.1,405-423).
cagtggtttccataagtga

SEQ ID NO: 392768 - DNA, 19 bp, Homo sapiens
  siRNA target sequence for FLJ11800 (NM_024974.1,507-525).
gagaggaggatctcataaa

SEQ ID NO: 392769 - DNA, 19 bp, Homo sapiens
  siRNA target sequence for FLJ12355 (NM_024988.1,294-312).
ggctggaaaactttcttta

SEQ ID NO: 392770 - DNA, 19 bp, Homo sapiens
  siRNA target sequence for FLJ12355 (NM_024988.1,376-394).
gcgtggagtcgccgatttt

SEQ ID NO: 392771 - DNA, 19 bp, Homo sapiens
  siRNA target sequence for FLJ12355 (NM_024988.1,377-395).
cgtggagtcgccgattttt

SEQ ID NO: 392772 - DNA, 19 bp, Homo sapiens
  siRNA target sequence for FLJ12355 (NM_024988.1,378-396).
gtggagtcgccgatttttt

SEQ ID NO: 392773 - DNA, 19 bp, Homo sapiens
  siRNA target sequence for FLJ12355 (NM_024988.1,380-398).
ggagtcgccgatttttttt

SEQ ID NO: 392774 - DNA, 19 bp, Homo sapiens
  siRNA target sequence for FLJ12355 (NM_024988.1,466-484).
caccgagggaggagacaaa

SEQ ID NO: 392775 - DNA, 19 bp, Homo sapiens
  siRNA target sequence for FLJ12355 (NM_024988.1,469-487).
cgagggaggagacaaactt

SEQ ID NO: 392776 - DNA, 19 bp, Homo sapiens
  siRNA target sequence for FLJ12355 (NM_024988.1,473-491).
ggaggagacaaacttaact

SEQ ID NO: 392777 - DNA, 19 bp, Homo sapiens
  siRNA target sequence for LRRTM4 (NM_024993.3,473-491).
cctacactgctgcttgtta

SEQ ID NO: 392778 - DNA, 19 bp, Homo sapiens
  siRNA target sequence for LRRTM4 (NM_024993.3,474-492).
ctacactgctgcttgttat

SEQ ID NO: 392779 - DNA, 19 bp, Homo sapiens
  siRNA target sequence for LRRTM4 (NM_024993.3,599-617).
gggtcacaaggcttatcat

SEQ ID NO: 392780 - DNA, 19 bp, Homo sapiens
  siRNA target sequence for LRRTM4 (NM_024993.3,600-618).
ggtcacaaggcttatcatt

SEQ ID NO: 392781 - DNA, 19 bp, Homo sapiens
  siRNA target sequence for LRRTM4 (NM_024993.3,601-619).
gtcacaaggcttatcatta

SEQ ID NO: 392782 - DNA, 19 bp, Homo sapiens
  siRNA target sequence for LRRTM4 (NM_024993.3,605-623).
caaggcttatcattaaggt

SEQ ID NO: 392783 - DNA, 19 bp, Homo sapiens
  siRNA target sequence for LRRTM4 (NM_024993.3,621-639).
ggttcaacagcattcagaa

SEQ ID NO: 392784 - DNA, 19 bp, Homo sapiens
  siRNA target sequence for LRRTM4 (NM_024993.3,662-680).
ggccttaaccagcttatat

SEQ ID NO: 392785 - DNA, 19 bp, Homo sapiens
  siRNA target sequence for LRRTM4 (NM_024993.3,682-700).
gctttatcttgaccataat

SEQ ID NO: 392786 - DNA, 19 bp, Homo sapiens
  siRNA target sequence for LRRTM4 (NM_024993.3,689-707).
cttgaccataattacatta

SEQ ID NO: 392787 - DNA, 19 bp, Homo sapiens
  siRNA target sequence for LRRTM4 (NM_024993.3,692-710).
gaccataattacattagct

SEQ ID NO: 392788 - DNA, 19 bp, Homo sapiens
  siRNA target sequence for LRRTM4 (NM_024993.3,735-753).
ggatccgtagactgaaaga

SEQ ID NO: 392789 - DNA, 19 bp, Homo sapiens
  siRNA target sequence for LRRTM4 (NM_024993.3,736-754).
gatccgtagactgaaagaa

SEQ ID NO: 392790 - DNA, 19 bp, Homo sapiens
  siRNA target sequence for LRRTM4 (NM_024993.3,739-757).
ccgtagactgaaagaatta

SEQ ID NO: 392791 - DNA, 19 bp, Homo sapiens
  siRNA target sequence for LRRTM4 (NM_024993.3,853-871).
gacattgcaatctgaacaa

SEQ ID NO: 392792 - DNA, 19 bp, Homo sapiens
  siRNA target sequence for LRRTM4 (NM_024993.3,855-873).
cattgcaatctgaacaatt

SEQ ID NO: 392793 - DNA, 19 bp, Homo sapiens
  siRNA target sequence for LRRTM4 (NM_024993.3,879-897).
gccttcggaaactcatcat

SEQ ID NO: 392794 - DNA, 19 bp, Homo sapiens
  siRNA target sequence for LRRTM4 (NM_024993.3,881-899).
cttcggaaactcatcattt

SEQ ID NO: 392795 - DNA, 19 bp, Homo sapiens
  siRNA target sequence for LRRTM4 (NM_024993.3,901-919).
gcacttgagatctaactca

SEQ ID NO: 392796 - DNA, 19 bp, Homo sapiens
  siRNA target sequence for LRRTM4 (NM_024993.3,950-968).
gactgtcggaatcttgatt

SEQ ID NO: 392797 - DNA, 19 bp, Homo sapiens
  siRNA target sequence for LRRTM4 (NM_024993.3,952-970).
ctgtcggaatcttgatttt

SEQ ID NO: 392798 - DNA, 19 bp, Homo sapiens
  siRNA target sequence for LRRTM4 (NM_024993.3,999-1017).
gcttgtcccgaaatgcatt

SEQ ID NO: 392799 - DNA, 19 bp, Homo sapiens
  siRNA target sequence for LRRTM4 (NM_024993.3,1003-1021).
gtcccgaaatgcatttgct

SEQ ID NO: 392800 - DNA, 19 bp, Homo sapiens
  siRNA target sequence for LRRTM4 (NM_024993.3,1099-1117).
cttcaacctccgctcaatt

SEQ ID NO: 392801 - DNA, 19 bp, Homo sapiens
  siRNA target sequence for LRRTM4 (NM_024993.3,1105-1123).
cctccgctcaatttactta

SEQ ID NO: 392802 - DNA, 19 bp, Homo sapiens
  siRNA target sequence for LRRTM4 (NM_024993.3,1108-1126).
ccgctcaatttacttacaa

SEQ ID NO: 392803 - DNA, 19 bp, Homo sapiens
  siRNA target sequence for LRRTM4 (NM_024993.3,1109-1127).
cgctcaatttacttacaat

SEQ ID NO: 392804 - DNA, 19 bp, Homo sapiens
  siRNA target sequence for LRRTM4 (NM_024993.3,1144-1162).
cattagccaaggtttgaca

SEQ ID NO: 392805 - DNA, 19 bp, Homo sapiens
  siRNA target sequence for LRRTM4 (NM_024993.3,1167-1185).
cttggagttccttacacaa

SEQ ID NO: 392806 - DNA, 19 bp, Homo sapiens
  siRNA target sequence for LRRTM4 (NM_024993.3,1170-1188).
ggagttccttacacaactt

SEQ ID NO: 392807 - DNA, 19 bp, Homo sapiens
  siRNA target sequence for LRRTM4 (NM_024993.3,1176-1194).
ccttacacaacttggattt

SEQ ID NO: 392808 - DNA, 19 bp, Homo sapiens
  siRNA target sequence for LRRTM4 (NM_024993.3,1304-1322).
gtcaatgcgtggatatcat

SEQ ID NO: 392809 - DNA, 19 bp, Homo sapiens
  siRNA target sequence for LRRTM4 (NM_024993.3,1306-1324).
caatgcgtggatatcatta

SEQ ID NO: 392810 - DNA, 19 bp, Homo sapiens
  siRNA target sequence for LRRTM4 (NM_024993.3,1310-1328).
gcgtggatatcattaatat

SEQ ID NO: 392811 - DNA, 19 bp, Homo sapiens
  siRNA target sequence for LRRTM4 (NM_024993.3,1355-1373).
gaatgcagtcggagcattt

SEQ ID NO: 392812 - DNA, 19 bp, Homo sapiens
  siRNA target sequence for LRRTM4 (NM_024993.3,1364-1382).
cggagcatttgtcctttat

SEQ ID NO: 392813 - DNA, 19 bp, Homo sapiens
  siRNA target sequence for LRRTM4 (NM_024993.3,1365-1383).
ggagcatttgtcctttatt

SEQ ID NO: 392814 - DNA, 19 bp, Homo sapiens
  siRNA target sequence for LRRTM4 (NM_024993.3,1469-1487).
gatgcagtggaaacatata

SEQ ID NO: 392815 - DNA, 19 bp, Homo sapiens
  siRNA target sequence for LRRTM4 (NM_024993.3,1547-1565).
ccccagaaacctctgatta

SEQ ID NO: 392816 - DNA, 19 bp, Homo sapiens
  siRNA target sequence for LRRTM4 (NM_024993.3,1569-1587).
ctagacctaccatcttcaa

SEQ ID NO: 392817 - DNA, 19 bp, Homo sapiens
  siRNA target sequence for LRRTM4 (NM_024993.3,1597-1615).
cacccaatccacctttgaa

SEQ ID NO: 392818 - DNA, 19 bp, Homo sapiens
  siRNA target sequence for LRRTM4 (NM_024993.3,1647-1665).
ctggcgcagagcaagagta

SEQ ID NO: 392819 - DNA, 19 bp, Homo sapiens
  siRNA target sequence for LRRTM4 (NM_024993.3,1650-1668).
gcgcagagcaagagtatga

SEQ ID NO: 392820 - DNA, 19 bp, Homo sapiens
  siRNA target sequence for LRRTM4 (NM_024993.3,1661-1679).
gagtatgagcatgtttcat

SEQ ID NO: 392821 - DNA, 19 bp, Homo sapiens
  siRNA target sequence for LRRTM4 (NM_024993.3,1787-1805).
cagcaacactctcttatga

SEQ ID NO: 392822 - DNA, 19 bp, Homo sapiens
  siRNA target sequence for ATF7IP2 (NM_024997.2,162-180).
ggcaagtccagatagaagt

SEQ ID NO: 392823 - DNA, 19 bp, Homo sapiens
  siRNA target sequence for ATF7IP2 (NM_024997.2,163-181).
gcaagtccagatagaagta

SEQ ID NO: 392824 - DNA, 19 bp, Homo sapiens
  siRNA target sequence for ATF7IP2 (NM_024997.2,176-194).
gaagtaaacggaagatatt

SEQ ID NO: 392825 - DNA, 19 bp, Homo sapiens
  siRNA target sequence for ATF7IP2 (NM_024997.2,221-239).
gttgccggaagcaagtaga

SEQ ID NO: 392826 - DNA, 19 bp, Homo sapiens
  siRNA target sequence for ATF7IP2 (NM_024997.2,224-242).
gccggaagcaagtagagat

SEQ ID NO: 392827 - DNA, 19 bp, Homo sapiens
  siRNA target sequence for ATF7IP2 (NM_024997.2,246-264).
gaataagtcaaggaatgtt

SEQ ID NO: 392828 - DNA, 19 bp, Homo sapiens
  siRNA target sequence for ATF7IP2 (NM_024997.2,295-313).
gttccaagcggtaatcaga

SEQ ID NO: 392829 - DNA, 19 bp, Homo sapiens
  siRNA target sequence for ATF7IP2 (NM_024997.2,318-336).
cagtcctagtgtcataact

SEQ ID NO: 392830 - DNA, 19 bp, Homo sapiens
  siRNA target sequence for ATF7IP2 (NM_024997.2,354-372).
caaatgtagcccttctgaa

SEQ ID NO: 392831 - DNA, 19 bp, Homo sapiens
  siRNA target sequence for ATF7IP2 (NM_024997.2,380-398).
catcctcattggactctaa

SEQ ID NO: 392832 - DNA, 19 bp, Homo sapiens
  siRNA target sequence for ATF7IP2 (NM_024997.2,384-402).
ctcattggactctaataaa

SEQ ID NO: 392833 - DNA, 19 bp, Homo sapiens
  siRNA target sequence for ATF7IP2 (NM_024997.2,432-450).
ctctcagaattgcataaaa

SEQ ID NO: 392834 - DNA, 19 bp, Homo sapiens
  siRNA target sequence for ATF7IP2 (NM_024997.2,493-511).
gttgtttgttcgtaccaaa

SEQ ID NO: 392835 - DNA, 19 bp, Homo sapiens
  siRNA target sequence for ATF7IP2 (NM_024997.2,634-652).
gagggggcttgtagtctaa

SEQ ID NO: 392836 - DNA, 19 bp, Homo sapiens
  siRNA target sequence for ATF7IP2 (NM_024997.2,637-655).
ggggcttgtagtctaaagt

SEQ ID NO: 392837 - DNA, 19 bp, Homo sapiens
  siRNA target sequence for ATF7IP2 (NM_024997.2,662-680).
gctgtccacccagtgtatt

SEQ ID NO: 392838 - DNA, 19 bp, Homo sapiens
  siRNA target sequence for ATF7IP2 (NM_024997.2,719-737).
gtaccgtgggtgacaagaa

SEQ ID NO: 392839 - DNA, 19 bp, Homo sapiens
  siRNA target sequence for ATF7IP2 (NM_024997.2,774-792).
caattcagaatcacatgat

SEQ ID NO: 392840 - DNA, 19 bp, Homo sapiens
  siRNA target sequence for ATF7IP2 (NM_024997.2,857-875).
ctaatttggtgaattcagt

SEQ ID NO: 392841 - DNA, 19 bp, Homo sapiens
  siRNA target sequence for ATF7IP2 (NM_024997.2,971-989).
catcacttgacactaataa

SEQ ID NO: 392842 - DNA, 19 bp, Homo sapiens
  siRNA target sequence for ATF7IP2 (NM_024997.2,1131-1149).
gattcagcaggagatctat

SEQ ID NO: 392843 - DNA, 19 bp, Homo sapiens
  siRNA target sequence for ATF7IP2 (NM_024997.2,1138-1156).
caggagatctatagcataa

SEQ ID NO: 392844 - DNA, 19 bp, Homo sapiens
  siRNA target sequence for ATF7IP2 (NM_024997.2,1140-1158).
ggagatctatagcataaat

SEQ ID NO: 392845 - DNA, 19 bp, Homo sapiens
  siRNA target sequence for ATF7IP2 (NM_024997.2,1141-1159).
gagatctatagcataaatt

SEQ ID NO: 392846 - DNA, 19 bp, Homo sapiens
  siRNA target sequence for ATF7IP2 (NM_024997.2,1143-1161).
gatctatagcataaattat

SEQ ID NO: 392847 - DNA, 19 bp, Homo sapiens
  siRNA target sequence for ATF7IP2 (NM_024997.2,1146-1164).
ctatagcataaattatgaa

SEQ ID NO: 392848 - DNA, 19 bp, Homo sapiens
  siRNA target sequence for ATF7IP2 (NM_024997.2,1234-1252).
ggaatagctgataaacttt

SEQ ID NO: 392849 - DNA, 19 bp, Homo sapiens
  siRNA target sequence for ATF7IP2 (NM_024997.2,1326-1344).
catgttatccagtaatgga

SEQ ID NO: 392850 - DNA, 19 bp, Homo sapiens
  siRNA target sequence for ATF7IP2 (NM_024997.2,1343-1361).
gagcctctaaggttgcaaa

SEQ ID NO: 392851 - DNA, 19 bp, Homo sapiens
  siRNA target sequence for ATF7IP2 (NM_024997.2,1345-1363).
gcctctaaggttgcaaatt

SEQ ID NO: 392852 - DNA, 19 bp, Homo sapiens
  siRNA target sequence for ATF7IP2 (NM_024997.2,1540-1558).
gtggaaagtcctaatttga

SEQ ID NO: 392853 - DNA, 19 bp, Homo sapiens
  siRNA target sequence for ATF7IP2 (NM_024997.2,1543-1561).
gaaagtcctaatttgacaa

SEQ ID NO: 392854 - DNA, 19 bp, Homo sapiens
  siRNA target sequence for ATF7IP2 (NM_024997.2,1557-1575).
gacaactccaattacatca

SEQ ID NO: 392855 - DNA, 19 bp, Homo sapiens
  siRNA target sequence for ATF7IP2 (NM_024997.2,1687-1705).
ggcctatccaactgcaata

SEQ ID NO: 392856 - DNA, 19 bp, Homo sapiens
  siRNA target sequence for ATF7IP2 (NM_024997.2,1689-1707).
cctatccaactgcaataca

SEQ ID NO: 392857 - DNA, 19 bp, Homo sapiens
  siRNA target sequence for ATF7IP2 (NM_024997.2,1695-1713).
caactgcaatacagaaagt

SEQ ID NO: 392858 - DNA, 19 bp, Homo sapiens
  siRNA target sequence for ATF7IP2 (NM_024997.2,1766-1784).
caaccccattggcacaaaa

SEQ ID NO: 392859 - DNA, 19 bp, Homo sapiens
  siRNA target sequence for ATF7IP2 (NM_024997.2,1844-1862).
cactacctgaattagtaga

SEQ ID NO: 392860 - DNA, 19 bp, Homo sapiens
  siRNA target sequence for ATF7IP2 (NM_024997.2,1932-1950).
cattgccctgacttggaat

SEQ ID NO: 392861 - DNA, 19 bp, Homo sapiens
  siRNA target sequence for ATF7IP2 (NM_024997.2,1936-1954).
gccctgacttggaatataa

SEQ ID NO: 392862 - DNA, 19 bp, Homo sapiens
  siRNA target sequence for ATF7IP2 (NM_024997.2,1941-1959).
gacttggaatataaccaaa

SEQ ID NO: 392863 - DNA, 19 bp, Homo sapiens
  siRNA target sequence for ATF7IP2 (NM_024997.2,1973-1991).
gtgctcctgtagaaagcta

SEQ ID NO: 392864 - DNA, 19 bp, Homo sapiens
  siRNA target sequence for ATF7IP2 (NM_024997.2,2016-2034).
ctctaataataagttgatt

SEQ ID NO: 392865 - DNA, 19 bp, Homo sapiens
  siRNA target sequence for ATF7IP2 (NM_024997.2,2068-2086).
ctccccatggcctgtactt

SEQ ID NO: 392866 - DNA, 19 bp, Homo sapiens
  siRNA target sequence for ATF7IP2 (NM_024997.2,2070-2088).
ccccatggcctgtacttta

SEQ ID NO: 392867 - DNA, 19 bp, Homo sapiens
  siRNA target sequence for ATF7IP2 (NM_024997.2,2081-2099).
gtactttatctcagttttt

SEQ ID NO: 392868 - DNA, 19 bp, Homo sapiens
  siRNA target sequence for ATF7IP2 (NM_024997.2,2106-2124).
caacagatactattttact

SEQ ID NO: 392869 - DNA, 19 bp, Homo sapiens
  siRNA target sequence for ATF7IP2 (NM_024997.2,2125-2143).
gtccaatcaaaagatattt

SEQ ID NO: 392870 - DNA, 19 bp, Homo sapiens
  siRNA target sequence for ATF7IP2 (NM_024997.2,2177-2195).
ctatccctgggttttctga

SEQ ID NO: 392871 - DNA, 19 bp, Homo sapiens
  siRNA target sequence for FLJ13096 (NM_025000.1,721-739).
ccctggagaatgcttttca

SEQ ID NO: 392872 - DNA, 19 bp, Homo sapiens
  siRNA target sequence for FLJ13096 (NM_025000.1,723-741).
ctggagaatgcttttcaga

SEQ ID NO: 392873 - DNA, 19 bp, Homo sapiens
  siRNA target sequence for FLJ13096 (NM_025000.1,725-743).
ggagaatgcttttcagatt

SEQ ID NO: 392874 - DNA, 19 bp, Homo sapiens
  siRNA target sequence for FLJ13096 (NM_025000.1,748-766).
gccatccttggcactacat

SEQ ID NO: 392875 - DNA, 19 bp, Homo sapiens
  siRNA target sequence for FLJ13096 (NM_025000.1,761-779).
ctacatcgtcacacctaat

SEQ ID NO: 392876 - DNA, 19 bp, Homo sapiens
  siRNA target sequence for FLJ13096 (NM_025000.1,791-809).
gaaaggagttttccatatt

SEQ ID NO: 392877 - DNA, 19 bp, Homo sapiens
  siRNA target sequence for FLJ13096 (NM_025000.1,857-875).
ggattgttgttctctagaa

SEQ ID NO: 392878 - DNA, 19 bp, Homo sapiens
  siRNA target sequence for FLJ13096 (NM_025000.1,858-876).
gattgttgttctctagaat

SEQ ID NO: 392879 - DNA, 19 bp, Homo sapiens
  siRNA target sequence for FLJ13096 (NM_025000.1,873-891).
gaatctgactggatctatt

SEQ ID NO: 392880 - DNA, 19 bp, Homo sapiens
  siRNA target sequence for FLJ13096 (NM_025000.1,900-918).
gatgcttctggtagaataa

SEQ ID NO: 392881 - DNA, 19 bp, Homo sapiens
  siRNA target sequence for FLJ13096 (NM_025000.1,904-922).
cttctggtagaataataca

SEQ ID NO: 392882 - DNA, 19 bp, Homo sapiens
  siRNA target sequence for FLJ13096 (NM_025000.1,907-925).
ctggtagaataatacatgt

SEQ ID NO: 392883 - DNA, 19 bp, Homo sapiens
  siRNA target sequence for FLJ13096 (NM_025000.1,953-971).
gctaactgaaatagaaaat

SEQ ID NO: 392884 - DNA, 19 bp, Homo sapiens
  siRNA target sequence for FLJ13096 (NM_025000.1,1014-1032).
gccaacagggagaaccata

SEQ ID NO: 392885 - DNA, 19 bp, Homo sapiens
  siRNA target sequence for FLJ13096 (NM_025000.1,1015-1033).
ccaacagggagaaccataa

SEQ ID NO: 392886 - DNA, 19 bp, Homo sapiens
  siRNA target sequence for FLJ13096 (NM_025000.1,1016-1034).
caacagggagaaccataaa

SEQ ID NO: 392887 - DNA, 19 bp, Homo sapiens
  siRNA target sequence for FLJ13096 (NM_025000.1,1060-1078).
cttctggacgggtggtaaa

SEQ ID NO: 392888 - DNA, 19 bp, Homo sapiens
  siRNA target sequence for FLJ13096 (NM_025000.1,1063-1081).
ctggacgggtggtaaaaaa

SEQ ID NO: 392889 - DNA, 19 bp, Homo sapiens
  siRNA target sequence for FLJ13096 (NM_025000.1,1065-1083).
ggacgggtggtaaaaaaaa

SEQ ID NO: 392890 - DNA, 19 bp, Homo sapiens
  siRNA target sequence for FLJ13096 (NM_025000.1,1230-1248).
ggaactttacttaaaagca

SEQ ID NO: 392891 - DNA, 19 bp, Homo sapiens
  siRNA target sequence for FLJ13096 (NM_025000.1,1231-1249).
gaactttacttaaaagcat

SEQ ID NO: 392892 - DNA, 19 bp, Homo sapiens
  siRNA target sequence for FLJ13096 (NM_025000.1,1262-1280).
gtcatgggatgtgacatat

SEQ ID NO: 392893 - DNA, 19 bp, Homo sapiens
  siRNA target sequence for FLJ13096 (NM_025000.1,1276-1294).
catatagccatgaagtcta

SEQ ID NO: 392894 - DNA, 19 bp, Homo sapiens
  siRNA target sequence for C6orf208 (NM_025002.1,620-638).
ccgcactctgtccatttca

SEQ ID NO: 392895 - DNA, 19 bp, Homo sapiens
  siRNA target sequence for C6orf208 (NM_025002.1,621-639).
cgcactctgtccatttcat

SEQ ID NO: 392896 - DNA, 19 bp, Homo sapiens
  siRNA target sequence for ADAMTS20 (NM_025003.2,133-151).
cccgagcgggtcaatgagt

SEQ ID NO: 392897 - DNA, 19 bp, Homo sapiens
  siRNA target sequence for ADAMTS20 (NM_025003.2,134-152).
ccgagcgggtcaatgagtt

SEQ ID NO: 392898 - DNA, 19 bp, Homo sapiens
  siRNA target sequence for ADAMTS20 (NM_025003.2,135-153).
cgagcgggtcaatgagttt

SEQ ID NO: 392899 - DNA, 19 bp, Homo sapiens
  siRNA target sequence for ADAMTS20 (NM_025003.2,279-297).
gaccgccgatgcatccttt

SEQ ID NO: 392900 - DNA, 19 bp, Homo sapiens
  siRNA target sequence for ADAMTS20 (NM_025003.2,448-466).
ggcctggtgggaacattta

SEQ ID NO: 392901 - DNA, 19 bp, Homo sapiens
  siRNA target sequence for ADAMTS20 (NM_025003.2,449-467).
gcctggtgggaacatttaa

SEQ ID NO: 392902 - DNA, 19 bp, Homo sapiens
  siRNA target sequence for ADAMTS20 (NM_025003.2,477-495).
cggtgaatatttcttagaa

SEQ ID NO: 392903 - DNA, 19 bp, Homo sapiens
  siRNA target sequence for ADAMTS20 (NM_025003.2,543-561).
gccacatcttatatacaga

SEQ ID NO: 392904 - DNA, 19 bp, Homo sapiens
  siRNA target sequence for ADAMTS20 (NM_025003.2,635-653).
gtttaccctttcataccta

SEQ ID NO: 392905 - DNA, 19 bp, Homo sapiens
  siRNA target sequence for ADAMTS20 (NM_025003.2,667-685).
gaagatcttaatgtaatga

SEQ ID NO: 392906 - DNA, 19 bp, Homo sapiens
  siRNA target sequence for ADAMTS20 (NM_025003.2,757-775).
cgtcttatatcatatccaa

SEQ ID NO: 392907 - DNA, 19 bp, Homo sapiens
  siRNA target sequence for ADAMTS20 (NM_025003.2,792-810).
ggttacagctgatgctaaa

SEQ ID NO: 392908 - DNA, 19 bp, Homo sapiens
  siRNA target sequence for ADAMTS20 (NM_025003.2,821-839).
ctcatggatcgaatttgca

SEQ ID NO: 392909 - DNA, 19 bp, Homo sapiens
  siRNA target sequence for ADAMTS20 (NM_025003.2,826-844).
ggatcgaatttgcaaaact

SEQ ID NO: 392910 - DNA, 19 bp, Homo sapiens
  siRNA target sequence for ADAMTS20 (NM_025003.2,863-881).
caattgttgcaacaatcta

SEQ ID NO: 392911 - DNA, 19 bp, Homo sapiens
  siRNA target sequence for ADAMTS20 (NM_025003.2,916-934).
gtagtggtaaaattagtta

SEQ ID NO: 392912 - DNA, 19 bp, Homo sapiens
  siRNA target sequence for ADAMTS20 (NM_025003.2,921-939).
ggtaaaattagttatgatt

SEQ ID NO: 392913 - DNA, 19 bp, Homo sapiens
  siRNA target sequence for ADAMTS20 (NM_025003.2,949-967).
gaggaaggaccagtcatta

SEQ ID NO: 392914 - DNA, 19 bp, Homo sapiens
  siRNA target sequence for ADAMTS20 (NM_025003.2,952-970).
gaaggaccagtcattaatt

SEQ ID NO: 392915 - DNA, 19 bp, Homo sapiens
  siRNA target sequence for ADAMTS20 (NM_025003.2,973-991).
gatggtgctaccacattaa

SEQ ID NO: 392916 - DNA, 19 bp, Homo sapiens
  siRNA target sequence for ADAMTS20 (NM_025003.2,977-995).
gtgctaccacattaaagaa

SEQ ID NO: 392917 - DNA, 19 bp, Homo sapiens
  siRNA target sequence for ADAMTS20 (NM_025003.2,1001-1019).
gttcatggcaacaaactca

SEQ ID NO: 392918 - DNA, 19 bp, Homo sapiens
  siRNA target sequence for ADAMTS20 (NM_025003.2,1071-1089).
cactaggtatgatatttgt

SEQ ID NO: 392919 - DNA, 19 bp, Homo sapiens
  siRNA target sequence for ADAMTS20 (NM_025003.2,1077-1095).
gtatgatatttgttcatct

SEQ ID NO: 392920 - DNA, 19 bp, Homo sapiens
  siRNA target sequence for ADAMTS20 (NM_025003.2,1117-1135).
ggtttatcatatttaggta

SEQ ID NO: 392921 - DNA, 19 bp, Homo sapiens
  siRNA target sequence for ADAMTS20 (NM_025003.2,1133-1151).
gtaccatatgtgatccttt

SEQ ID NO: 392922 - DNA, 19 bp, Homo sapiens
  siRNA target sequence for ADAMTS20 (NM_025003.2,1136-1154).
ccatatgtgatcctttaca

SEQ ID NO: 392923 - DNA, 19 bp, Homo sapiens
  siRNA target sequence for ADAMTS20 (NM_025003.2,1147-1165).
cctttacaaagctgcttta

SEQ ID NO: 392924 - DNA, 19 bp, Homo sapiens
  siRNA target sequence for ADAMTS20 (NM_025003.2,1185-1203).
catttctgcttttactata

SEQ ID NO: 392925 - DNA, 19 bp, Homo sapiens
  siRNA target sequence for ADAMTS20 (NM_025003.2,1223-1241).
cacttggtgttcaacatga

SEQ ID NO: 392926 - DNA, 19 bp, Homo sapiens
  siRNA target sequence for ADAMTS20 (NM_025003.2,1228-1246).
ggtgttcaacatgatgata

SEQ ID NO: 392927 - DNA, 19 bp, Homo sapiens
  siRNA target sequence for ADAMTS20 (NM_025003.2,1240-1258).
gatgataatcctagatgta

SEQ ID NO: 392928 - DNA, 19 bp, Homo sapiens
  siRNA target sequence for ADAMTS20 (NM_025003.2,1249-1267).
cctagatgtaaagaaatga

SEQ ID NO: 392929 - DNA, 19 bp, Homo sapiens
  siRNA target sequence for ADAMTS20 (NM_025003.2,1270-1288).
gttacaaagtatcatgtaa

SEQ ID NO: 392930 - DNA, 19 bp, Homo sapiens
  siRNA target sequence for ADAMTS20 (NM_025003.2,1340-1358).
gtcggaaatatgttactga

SEQ ID NO: 392931 - DNA, 19 bp, Homo sapiens
  siRNA target sequence for ADAMTS20 (NM_025003.2,1439-1457).
gatcacgatatgatggaaa

SEQ ID NO: 392932 - DNA, 19 bp, Homo sapiens
  siRNA target sequence for ADAMTS20 (NM_025003.2,1442-1460).
cacgatatgatggaaacaa

SEQ ID NO: 392933 - DNA, 19 bp, Homo sapiens
  siRNA target sequence for ADAMTS20 (NM_025003.2,1492-1510).
caaatgtgtccccatataa

SEQ ID NO: 392934 - DNA, 19 bp, Homo sapiens
  siRNA target sequence for ADAMTS20 (NM_025003.2,1599-1617).
ctgcggtcctggaatgcat

SEQ ID NO: 392935 - DNA, 19 bp, Homo sapiens
  siRNA target sequence for ADAMTS20 (NM_025003.2,1620-1638).
ccgtcatgggctatgtgta

SEQ ID NO: 392936 - DNA, 19 bp, Homo sapiens
  siRNA target sequence for ADAMTS20 (NM_025003.2,1621-1639).
cgtcatgggctatgtgtaa

SEQ ID NO: 392937 - DNA, 19 bp, Homo sapiens
  siRNA target sequence for ADAMTS20 (NM_025003.2,1622-1640).
gtcatgggctatgtgtaaa

SEQ ID NO: 392938 - DNA, 19 bp, Homo sapiens
  siRNA target sequence for ADAMTS20 (NM_025003.2,1624-1642).
catgggctatgtgtaaaca

SEQ ID NO: 392939 - DNA, 19 bp, Homo sapiens
  siRNA target sequence for ADAMTS20 (NM_025003.2,1628-1646).
ggctatgtgtaaacaaaga

SEQ ID NO: 392940 - DNA, 19 bp, Homo sapiens
  siRNA target sequence for ADAMTS20 (NM_025003.2,1649-1667).
cggaaacacgtcctgtaaa

SEQ ID NO: 392941 - DNA, 19 bp, Homo sapiens
  siRNA target sequence for ADAMTS20 (NM_025003.2,1650-1668).
ggaaacacgtcctgtaaat

SEQ ID NO: 392942 - DNA, 19 bp, Homo sapiens
  siRNA target sequence for ADAMTS20 (NM_025003.2,1681-1699).
ccatgggaaccttacagtt

SEQ ID NO: 392943 - DNA, 19 bp, Homo sapiens
  siRNA target sequence for ADAMTS20 (NM_025003.2,1687-1705).
gaaccttacagttcttgtt

SEQ ID NO: 392944 - DNA, 19 bp, Homo sapiens
  siRNA target sequence for ADAMTS20 (NM_025003.2,1761-1779).
gccaagaaacggaggaaat

SEQ ID NO: 392945 - DNA, 19 bp, Homo sapiens
  siRNA target sequence for ADAMTS20 (NM_025003.2,1791-1809).
ccgcaggatgaaatttcga

SEQ ID NO: 392946 - DNA, 19 bp, Homo sapiens
  siRNA target sequence for ADAMTS20 (NM_025003.2,1797-1815).
gatgaaatttcgatcatgt

SEQ ID NO: 392947 - DNA, 19 bp, Homo sapiens
  siRNA target sequence for ADAMTS20 (NM_025003.2,1807-1825).
cgatcatgtaatactgatt

SEQ ID NO: 392948 - DNA, 19 bp, Homo sapiens
  siRNA target sequence for ADAMTS20 (NM_025003.2,1896-1914).
cagtggcattccctctaat

SEQ ID NO: 392949 - DNA, 19 bp, Homo sapiens
  siRNA target sequence for ADAMTS20 (NM_025003.2,1898-1916).
gtggcattccctctaatgt

SEQ ID NO: 392950 - DNA, 19 bp, Homo sapiens
  siRNA target sequence for ADAMTS20 (NM_025003.2,1900-1918).
ggcattccctctaatgtga

SEQ ID NO: 392951 - DNA, 19 bp, Homo sapiens
  siRNA target sequence for ADAMTS20 (NM_025003.2,1946-1964).
gcacaaaggatcgttgtaa

SEQ ID NO: 392952 - DNA, 19 bp, Homo sapiens
  siRNA target sequence for ADAMTS20 (NM_025003.2,1947-1965).
cacaaaggatcgttgtaaa

SEQ ID NO: 392953 - DNA, 19 bp, Homo sapiens
  siRNA target sequence for ADAMTS20 (NM_025003.2,1949-1967).
caaaggatcgttgtaaact

SEQ ID NO: 392954 - DNA, 19 bp, Homo sapiens
  siRNA target sequence for ADAMTS20 (NM_025003.2,1953-1971).
ggatcgttgtaaactctat

SEQ ID NO: 392955 - DNA, 19 bp, Homo sapiens
  siRNA target sequence for ADAMTS20 (NM_025003.2,1958-1976).
gttgtaaactctattgtca

SEQ ID NO: 392956 - DNA, 19 bp, Homo sapiens
  siRNA target sequence for ADAMTS20 (NM_025003.2,1975-1993).
caggttgctggaaccaatt

SEQ ID NO: 392957 - DNA, 19 bp, Homo sapiens
  siRNA target sequence for ADAMTS20 (NM_025003.2,1977-1995).
ggttgctggaaccaattat

SEQ ID NO: 392958 - DNA, 19 bp, Homo sapiens
  siRNA target sequence for ADAMTS20 (NM_025003.2,1982-2000).
ctggaaccaattatttcta

SEQ ID NO: 392959 - DNA, 19 bp, Homo sapiens
  siRNA target sequence for ADAMTS20 (NM_025003.2,2060-2078).
gtgttcaaggccagtgtat

SEQ ID NO: 392960 - DNA, 19 bp, Homo sapiens
  siRNA target sequence for ADAMTS20 (NM_025003.2,2086-2104).
ggttgtgatcacgtgttaa

SEQ ID NO: 392961 - DNA, 19 bp, Homo sapiens
  siRNA target sequence for ADAMTS20 (NM_025003.2,2087-2105).
gttgtgatcacgtgttaaa

SEQ ID NO: 392962 - DNA, 19 bp, Homo sapiens
  siRNA target sequence for ADAMTS20 (NM_025003.2,2223-2241).
cgcaggagcaacaaacgtt

SEQ ID NO: 392963 - DNA, 19 bp, Homo sapiens
  siRNA target sequence for ADAMTS20 (NM_025003.2,2228-2246).
gagcaacaaacgttgacat

SEQ ID NO: 392964 - DNA, 19 bp, Homo sapiens
  siRNA target sequence for ADAMTS20 (NM_025003.2,2280-2298).
cagttaccttgcattatct

SEQ ID NO: 392965 - DNA, 19 bp, Homo sapiens
  siRNA target sequence for ADAMTS20 (NM_025003.2,2335-2353).
cttctaagtacgtcaaaaa

SEQ ID NO: 392966 - DNA, 19 bp, Homo sapiens
  siRNA target sequence for ADAMTS20 (NM_025003.2,2342-2360).
gtacgtcaaaaaaagaaat

SEQ ID NO: 392967 - DNA, 19 bp, Homo sapiens
  siRNA target sequence for ADAMTS20 (NM_025003.2,2423-2441).
gtactaatcgacaagagaa

SEQ ID NO: 392968 - DNA, 19 bp, Homo sapiens
  siRNA target sequence for ADAMTS20 (NM_025003.2,2460-2478).
gttgtgtgtgggtaattta

SEQ ID NO: 392969 - DNA, 19 bp, Homo sapiens
  siRNA target sequence for ADAMTS20 (NM_025003.2,2465-2483).
gtgtgggtaatttatacaa

SEQ ID NO: 392970 - DNA, 19 bp, Homo sapiens
  siRNA target sequence for ADAMTS20 (NM_025003.2,2485-2503).
cctgatgtacattattcct

SEQ ID NO: 392971 - DNA, 19 bp, Homo sapiens
  siRNA target sequence for ADAMTS20 (NM_025003.2,2486-2504).
ctgatgtacattattcctt

SEQ ID NO: 392972 - DNA, 19 bp, Homo sapiens
  siRNA target sequence for ADAMTS20 (NM_025003.2,2502-2520).
cttcaatatccctttggaa

SEQ ID NO: 392973 - DNA, 19 bp, Homo sapiens
  siRNA target sequence for ADAMTS20 (NM_025003.2,2561-2579).
gggaaggctgtaccaaaat

SEQ ID NO: 392974 - DNA, 19 bp, Homo sapiens
  siRNA target sequence for ADAMTS20 (NM_025003.2,2588-2606).
gtcttcagcgaagaaacat

SEQ ID NO: 392975 - DNA, 19 bp, Homo sapiens
  siRNA target sequence for ADAMTS20 (NM_025003.2,2613-2631).
catacataagagtgatcat

SEQ ID NO: 392976 - DNA, 19 bp, Homo sapiens
  siRNA target sequence for ADAMTS20 (NM_025003.2,2629-2647).
catagtgttgtgtctgata

SEQ ID NO: 392977 - DNA, 19 bp, Homo sapiens
  siRNA target sequence for ADAMTS20 (NM_025003.2,2664-2682).
gccacttccatcatttgtt

SEQ ID NO: 392978 - DNA, 19 bp, Homo sapiens
  siRNA target sequence for ADAMTS20 (NM_025003.2,2665-2683).
ccacttccatcatttgtta

SEQ ID NO: 392979 - DNA, 19 bp, Homo sapiens
  siRNA target sequence for ADAMTS20 (NM_025003.2,2680-2698).
gttactcaaagttgcaata

SEQ ID NO: 392980 - DNA, 19 bp, Homo sapiens
  siRNA target sequence for ADAMTS20 (NM_025003.2,2684-2702).
ctcaaagttgcaatacaga

SEQ ID NO: 392981 - DNA, 19 bp, Homo sapiens
  siRNA target sequence for ADAMTS20 (NM_025003.2,2694-2712).
caatacagactgtgaacta

SEQ ID NO: 392982 - DNA, 19 bp, Homo sapiens
  siRNA target sequence for ADAMTS20 (NM_025003.2,2747-2765).
cccaatgtggtcaaggata

SEQ ID NO: 392983 - DNA, 19 bp, Homo sapiens
  siRNA target sequence for ADAMTS20 (NM_025003.2,2749-2767).
caatgtggtcaaggatata

SEQ ID NO: 392984 - DNA, 19 bp, Homo sapiens
  siRNA target sequence for ADAMTS20 (NM_025003.2,2771-2789).
ccttggacatccattgcat

SEQ ID NO: 392985 - DNA, 19 bp, Homo sapiens
  siRNA target sequence for ADAMTS20 (NM_025003.2,2776-2794).
gacatccattgcatgaagt

SEQ ID NO: 392986 - DNA, 19 bp, Homo sapiens
  siRNA target sequence for ADAMTS20 (NM_025003.2,2787-2805).
catgaagtattccattcat

SEQ ID NO: 392987 - DNA, 19 bp, Homo sapiens
  siRNA target sequence for ADAMTS20 (NM_025003.2,2810-2828).
gacagactgttcaagttga

SEQ ID NO: 392988 - DNA, 19 bp, Homo sapiens
  siRNA target sequence for ADAMTS20 (NM_025003.2,2838-2856).
ctgtggtgaccagcttaaa

SEQ ID NO: 392989 - DNA, 19 bp, Homo sapiens
  siRNA target sequence for ADAMTS20 (NM_025003.2,2857-2875).
cctcctacccaagaactat

SEQ ID NO: 392990 - DNA, 19 bp, Homo sapiens
  siRNA target sequence for ADAMTS20 (NM_025003.2,2892-2910).
cttcacaagatggcattat

SEQ ID NO: 392991 - DNA, 19 bp, Homo sapiens
  siRNA target sequence for ADAMTS20 (NM_025003.2,2957-2975).
ctcgagaatcttattgtat

SEQ ID NO: 392992 - DNA, 19 bp, Homo sapiens
  siRNA target sequence for ADAMTS20 (NM_025003.2,2959-2977).
cgagaatcttattgtatga

SEQ ID NO: 392993 - DNA, 19 bp, Homo sapiens
  siRNA target sequence for ADAMTS20 (NM_025003.2,2960-2978).
gagaatcttattgtatgaa

SEQ ID NO: 392994 - DNA, 19 bp, Homo sapiens
  siRNA target sequence for ADAMTS20 (NM_025003.2,2962-2980).
gaatcttattgtatgaata

SEQ ID NO: 392995 - DNA, 19 bp, Homo sapiens
  siRNA target sequence for ADAMTS20 (NM_025003.2,2966-2984).
cttattgtatgaataactt

SEQ ID NO: 392996 - DNA, 19 bp, Homo sapiens
  siRNA target sequence for ADAMTS20 (NM_025003.2,2992-3010).
cgtcttgctgacaatgaat

SEQ ID NO: 392997 - DNA, 19 bp, Homo sapiens
  siRNA target sequence for ADAMTS20 (NM_025003.2,3024-3042).
ccgagtgacgagagagaat

SEQ ID NO: 392998 - DNA, 19 bp, Homo sapiens
  siRNA target sequence for ADAMTS20 (NM_025003.2,3025-3043).
cgagtgacgagagagaatt

SEQ ID NO: 392999 - DNA, 19 bp, Homo sapiens
  siRNA target sequence for ADAMTS20 (NM_025003.2,3028-3046).
gtgacgagagagaattgca

SEQ ID NO: 393000 - DNA, 19 bp, Homo sapiens
  siRNA target sequence for ADAMTS20 (NM_025003.2,3084-3102).
gagcgagtgccttgttaca

SEQ ID NO: 393001 - DNA, 19 bp, Homo sapiens
  siRNA target sequence for ADAMTS20 (NM_025003.2,3087-3105).
cgagtgccttgttacatgt

SEQ ID NO: 393002 - DNA, 19 bp, Homo sapiens
  siRNA target sequence for ADAMTS20 (NM_025003.2,3097-3115).
gttacatgtggtaaaggaa

SEQ ID NO: 393003 - DNA, 19 bp, Homo sapiens
  siRNA target sequence for ADAMTS20 (NM_025003.2,3137-3155).
gtcagctgaatgtagatca

SEQ ID NO: 393004 - DNA, 19 bp, Homo sapiens
  siRNA target sequence for ADAMTS20 (NM_025003.2,3205-3223).
ccatgtgaacttcatacat

SEQ ID NO: 393005 - DNA, 19 bp, Homo sapiens
  siRNA target sequence for ADAMTS20 (NM_025003.2,3279-3297).
gtatcagatgcgagatgtt

SEQ ID NO: 393006 - DNA, 19 bp, Homo sapiens
  siRNA target sequence for ADAMTS20 (NM_025003.2,3283-3301).
cagatgcgagatgttaaat

SEQ ID NO: 393007 - DNA, 19 bp, Homo sapiens
  siRNA target sequence for ADAMTS20 (NM_025003.2,3312-3330).
gctagctagtgcagtgtta

SEQ ID NO: 393008 - DNA, 19 bp, Homo sapiens
  siRNA target sequence for ADAMTS20 (NM_025003.2,3325-3343).
gtgttagaggacacagaat

SEQ ID NO: 393009 - DNA, 19 bp, Homo sapiens
  siRNA target sequence for ADAMTS20 (NM_025003.2,3415-3433).
gagaccgctttattaccaa

SEQ ID NO: 393010 - DNA, 19 bp, Homo sapiens
  siRNA target sequence for ADAMTS20 (NM_025003.2,3420-3438).
cgctttattaccaactgtt

SEQ ID NO: 393011 - DNA, 19 bp, Homo sapiens
  siRNA target sequence for ADAMTS20 (NM_025003.2,3480-3498).
cccatgctccgtatcttgt

SEQ ID NO: 393012 - DNA, 19 bp, Homo sapiens
  siRNA target sequence for ADAMTS20 (NM_025003.2,3532-3550).
cgtgatgctcttgatagaa

SEQ ID NO: 393013 - DNA, 19 bp, Homo sapiens
  siRNA target sequence for ADAMTS20 (NM_025003.2,3680-3698).
ctcgacaagttttatgcat

SEQ ID NO: 393014 - DNA, 19 bp, Homo sapiens
  siRNA target sequence for ADAMTS20 (NM_025003.2,3685-3703).
caagttttatgcatgaact

SEQ ID NO: 393015 - DNA, 19 bp, Homo sapiens
  siRNA target sequence for ADAMTS20 (NM_025003.2,3702-3720).
ctaccatcagccaattgat

SEQ ID NO: 393016 - DNA, 19 bp, Homo sapiens
  siRNA target sequence for ADAMTS20 (NM_025003.2,3712-3730).
ccaattgatgagaattact

SEQ ID NO: 393017 - DNA, 19 bp, Homo sapiens
  siRNA target sequence for ADAMTS20 (NM_025003.2,3737-3755).
ctgaagttcgccctttgat

SEQ ID NO: 393018 - DNA, 19 bp, Homo sapiens
  siRNA target sequence for ADAMTS20 (NM_025003.2,3790-3808).
gcacacagccactttccta

SEQ ID NO: 393019 - DNA, 19 bp, Homo sapiens
  siRNA target sequence for ADAMTS20 (NM_025003.2,3813-3831).
ccctgtgcagccaagctat

SEQ ID NO: 393020 - DNA, 19 bp, Homo sapiens
  siRNA target sequence for ADAMTS20 (NM_025003.2,3815-3833).
ctgtgcagccaagctatta

SEQ ID NO: 393021 - DNA, 19 bp, Homo sapiens
  siRNA target sequence for ADAMTS20 (NM_025003.2,3819-3837).
gcagccaagctattatcta

SEQ ID NO: 393022 - DNA, 19 bp, Homo sapiens
  siRNA target sequence for ADAMTS20 (NM_025003.2,3820-3838).
cagccaagctattatctaa

SEQ ID NO: 393023 - DNA, 19 bp, Homo sapiens
  siRNA target sequence for ADAMTS20 (NM_025003.2,3840-3858).
cacgaatttgccattaact

SEQ ID NO: 393024 - DNA, 19 bp, Homo sapiens
  siRNA target sequence for ADAMTS20 (NM_025003.2,3842-3860).
cgaatttgccattaactca

SEQ ID NO: 393025 - DNA, 19 bp, Homo sapiens
  siRNA target sequence for ADAMTS20 (NM_025003.2,3849-3867).
gccattaactcaaaaactt

SEQ ID NO: 393026 - DNA, 19 bp, Homo sapiens
  siRNA target sequence for ADAMTS20 (NM_025003.2,3851-3869).
cattaactcaaaaacttga

SEQ ID NO: 393027 - DNA, 19 bp, Homo sapiens
  siRNA target sequence for ADAMTS20 (NM_025003.2,4000-4018).
ggacaaagtgctagttact

SEQ ID NO: 393028 - DNA, 19 bp, Homo sapiens
  siRNA target sequence for ADAMTS20 (NM_025003.2,4075-4093).
cagtggaactacggaaatt

SEQ ID NO: 393029 - DNA, 19 bp, Homo sapiens
  siRNA target sequence for ADAMTS20 (NM_025003.2,4157-4175).
ccaatggccaaatattaga

SEQ ID NO: 393030 - DNA, 19 bp, Homo sapiens
  siRNA target sequence for ADAMTS20 (NM_025003.2,4200-4218).
caagccacctagcgtaata

SEQ ID NO: 393031 - DNA, 19 bp, Homo sapiens
  siRNA target sequence for ADAMTS20 (NM_025003.2,4204-4222).
ccacctagcgtaatacagt

SEQ ID NO: 393032 - DNA, 19 bp, Homo sapiens
  siRNA target sequence for ADAMTS20 (NM_025003.2,4281-4299).
ctcagcttcttgtggtaaa

SEQ ID NO: 393033 - DNA, 19 bp, Homo sapiens
  siRNA target sequence for ADAMTS20 (NM_025003.2,4285-4303).
gcttcttgtggtaaaggta

SEQ ID NO: 393034 - DNA, 19 bp, Homo sapiens
  siRNA target sequence for ADAMTS20 (NM_025003.2,4304-4322).
gaaagtaccgtgaagtgtt

SEQ ID NO: 393035 - DNA, 19 bp, Homo sapiens
  siRNA target sequence for ADAMTS20 (NM_025003.2,4474-4492).
cagcagagggatgtatact

SEQ ID NO: 393036 - DNA, 19 bp, Homo sapiens
  siRNA target sequence for ADAMTS20 (NM_025003.2,4657-4675).
cgaatggagtgcacagata

SEQ ID NO: 393037 - DNA, 19 bp, Homo sapiens
  siRNA target sequence for ADAMTS20 (NM_025003.2,4658-4676).
gaatggagtgcacagataa

SEQ ID NO: 393038 - DNA, 19 bp, Homo sapiens
  siRNA target sequence for ADAMTS20 (NM_025003.2,4663-4681).
gagtgcacagataaccaaa

SEQ ID NO: 393039 - DNA, 19 bp, Homo sapiens
  siRNA target sequence for ADAMTS20 (NM_025003.2,4726-4744).
cttacatccaagaattgca

SEQ ID NO: 393040 - DNA, 19 bp, Homo sapiens
  siRNA target sequence for ADAMTS20 (NM_025003.2,4745-4763).
ggaaccctccttgcaatta

SEQ ID NO: 393041 - DNA, 19 bp, Homo sapiens
  siRNA target sequence for ADAMTS20 (NM_025003.2,4749-4767).
ccctccttgcaattacatt

SEQ ID NO: 393042 - DNA, 19 bp, Homo sapiens
  siRNA target sequence for ADAMTS20 (NM_025003.2,4751-4769).
ctccttgcaattacattgt

SEQ ID NO: 393043 - DNA, 19 bp, Homo sapiens
  siRNA target sequence for ADAMTS20 (NM_025003.2,4795-4813).
gcaaacaactgtggattta

SEQ ID NO: 393044 - DNA, 19 bp, Homo sapiens
  siRNA target sequence for ADAMTS20 (NM_025003.2,4839-4857).
caccgagatcccatctact

SEQ ID NO: 393045 - DNA, 19 bp, Homo sapiens
  siRNA target sequence for ADAMTS20 (NM_025003.2,4841-4859).
ccgagatcccatctactaa

SEQ ID NO: 393046 - DNA, 19 bp, Homo sapiens
  siRNA target sequence for ADAMTS20 (NM_025003.2,4845-4863).
gatcccatctactaagaaa

SEQ ID NO: 393047 - DNA, 19 bp, Homo sapiens
  siRNA target sequence for ADAMTS20 (NM_025003.2,4927-4945).
gtttaccaatgcattaaca

SEQ ID NO: 393048 - DNA, 19 bp, Homo sapiens
  siRNA target sequence for ADAMTS20 (NM_025003.2,4938-4956).
cattaacagctgtttgcat

SEQ ID NO: 393049 - DNA, 19 bp, Homo sapiens
  siRNA target sequence for ADAMTS20 (NM_025003.2,5036-5054).
gcattaccaaacatggttt

SEQ ID NO: 393050 - DNA, 19 bp, Homo sapiens
  siRNA target sequence for ADAMTS20 (NM_025003.2,5060-5078).
gtgacttatgtttaaacca

SEQ ID NO: 393051 - DNA, 19 bp, Homo sapiens
  siRNA target sequence for ADAMTS20 (NM_025003.2,5090-5108).
gtgctcaaaagaaatgtta

SEQ ID NO: 393052 - DNA, 19 bp, Homo sapiens
  siRNA target sequence for ADAMTS20 (NM_025003.2,5110-5128).
gccaatgactgtaaatcat

SEQ ID NO: 393053 - DNA, 19 bp, Homo sapiens
  siRNA target sequence for ADAMTS20 (NM_025003.2,5173-5191).
gatggtgactattacctta

SEQ ID NO: 393054 - DNA, 19 bp, Homo sapiens
  siRNA target sequence for ADAMTS20 (NM_025003.2,5176-5194).
ggtgactattaccttaaca

SEQ ID NO: 393055 - DNA, 19 bp, Homo sapiens
  siRNA target sequence for ADAMTS20 (NM_025003.2,5177-5195).
gtgactattaccttaacat

SEQ ID NO: 393056 - DNA, 19 bp, Homo sapiens
  siRNA target sequence for ADAMTS20 (NM_025003.2,5179-5197).
gactattaccttaacatta

SEQ ID NO: 393057 - DNA, 19 bp, Homo sapiens
  siRNA target sequence for ADAMTS20 (NM_025003.2,5246-5264).
ctaaggaatatttaacact

SEQ ID NO: 393058 - DNA, 19 bp, Homo sapiens
  siRNA target sequence for ADAMTS20 (NM_025003.2,5306-5324).
ggctaaaaaatccatatca

SEQ ID NO: 393059 - DNA, 19 bp, Homo sapiens
  siRNA target sequence for ADAMTS20 (NM_025003.2,5317-5335).
ccatatcaatgtcctttta

SEQ ID NO: 393060 - DNA, 19 bp, Homo sapiens
  siRNA target sequence for ADAMTS20 (NM_025003.2,5318-5336).
catatcaatgtccttttaa

SEQ ID NO: 393061 - DNA, 19 bp, Homo sapiens
  siRNA target sequence for ADAMTS20 (NM_025003.2,5329-5347).
ccttttaatgggagtagaa

SEQ ID NO: 393062 - DNA, 19 bp, Homo sapiens
  siRNA target sequence for ADAMTS20 (NM_025003.2,5419-5437).
ctcacttccatgcaaatta

SEQ ID NO: 393063 - DNA, 19 bp, Homo sapiens
  siRNA target sequence for ADAMTS20 (NM_025003.2,5440-5458).
gctacggaccttctttttt

SEQ ID NO: 393064 - DNA, 19 bp, Homo sapiens
  siRNA target sequence for ADAMTS20 (NM_025003.2,5528-5546).
cacagggacagtttagcat

SEQ ID NO: 393065 - DNA, 19 bp, Homo sapiens
  siRNA target sequence for ADAMTS20 (NM_025003.2,5530-5548).
cagggacagtttagcatta

SEQ ID NO: 393066 - DNA, 19 bp, Homo sapiens
  siRNA target sequence for ADAMTS20 (NM_025003.2,5532-5550).
gggacagtttagcattaat

SEQ ID NO: 393067 - DNA, 19 bp, Homo sapiens
  siRNA target sequence for ADAMTS20 (NM_025003.2,5538-5556).
gtttagcattaatttgtca

SEQ ID NO: 393068 - DNA, 19 bp, Homo sapiens
  siRNA target sequence for ADAMTS20 (NM_025003.2,5592-5610).
gctcactcaggggagttat

SEQ ID NO: 393069 - DNA, 19 bp, Homo sapiens
  siRNA target sequence for ADAMTS20 (NM_025003.2,5593-5611).
ctcactcaggggagttata

SEQ ID NO: 393070 - DNA, 19 bp, Homo sapiens
  siRNA target sequence for ADAMTS20 (NM_025003.2,5699-5717).
ctactggtctcccaattca

SEQ ID NO: 393071 - DNA, 19 bp, Homo sapiens
  siRNA target sequence for ADAMTS20 (NM_025003.2,5702-5720).
ctggtctcccaattcaagt

SEQ ID NO: 393072 - DNA, 19 bp, Homo sapiens
  siRNA target sequence for ADAMTS20 (NM_025003.2,5705-5723).
gtctcccaattcaagtcat

SEQ ID NO: 393073 - DNA, 19 bp, Homo sapiens
  siRNA target sequence for FLJ13215 (NM_025004.1,303-321).
ggttgcccctggctttaaa

SEQ ID NO: 393074 - DNA, 19 bp, Homo sapiens
  siRNA target sequence for FLJ13215 (NM_025004.1,421-439).
ggaaatcccagcatataca

SEQ ID NO: 393075 - DNA, 19 bp, Homo sapiens
  siRNA target sequence for FLJ13215 (NM_025004.1,422-440).
gaaatcccagcatatacat

SEQ ID NO: 393076 - DNA, 19 bp, Homo sapiens
  siRNA target sequence for FLJ13215 (NM_025004.1,431-449).
gcatatacatcagcatatt

SEQ ID NO: 393077 - DNA, 19 bp, Homo sapiens
  siRNA target sequence for FLJ13215 (NM_025004.1,526-544).
ccgagtaaatcaacaaatt

SEQ ID NO: 393078 - DNA, 19 bp, Homo sapiens
  siRNA target sequence for FLJ13215 (NM_025004.1,527-545).
cgagtaaatcaacaaatta

SEQ ID NO: 393079 - DNA, 19 bp, Homo sapiens
  siRNA target sequence for FLJ13215 (NM_025004.1,530-548).
gtaaatcaacaaattaggt

SEQ ID NO: 393080 - DNA, 19 bp, Homo sapiens
  siRNA target sequence for FLJ13215 (NM_025004.1,565-583).
gcttcagaagtcttatgaa

SEQ ID NO: 393081 - DNA, 19 bp, Homo sapiens
  siRNA target sequence for FLJ13215 (NM_025004.1,576-594).
cttatgaaagagcacaaaa

SEQ ID NO: 393082 - DNA, 19 bp, Homo sapiens
  siRNA target sequence for FLJ13215 (NM_025004.1,629-647).
cacttaacttccaaaagga

SEQ ID NO: 393083 - DNA, 19 bp, Homo sapiens
  siRNA target sequence for FLJ13215 (NM_025004.1,645-663).
ggacaagtgtttttccaaa

SEQ ID NO: 393084 - DNA, 19 bp, Homo sapiens
  siRNA target sequence for FLJ13215 (NM_025004.1,709-727).
gatgcctggggatggaata

SEQ ID NO: 393085 - DNA, 19 bp, Homo sapiens
  siRNA target sequence for FLJ13215 (NM_025004.1,767-785).
gcccaggctcttagtgaaa

SEQ ID NO: 393086 - DNA, 19 bp, Homo sapiens
  siRNA target sequence for FLJ13215 (NM_025004.1,773-791).
gctcttagtgaaactatga

SEQ ID NO: 393087 - DNA, 19 bp, Homo sapiens
  siRNA target sequence for FLJ13215 (NM_025004.1,774-792).
ctcttagtgaaactatgaa

SEQ ID NO: 393088 - DNA, 19 bp, Homo sapiens
  siRNA target sequence for FLJ13215 (NM_025004.1,805-823).
ccggctagcatcctttaaa

SEQ ID NO: 393089 - DNA, 19 bp, Homo sapiens
  siRNA target sequence for FLJ13215 (NM_025004.1,942-960).
gagagttgcccattaaggt

SEQ ID NO: 393090 - DNA, 19 bp, Homo sapiens
  siRNA target sequence for FLJ13215 (NM_025004.1,958-976).
ggtccatcaaggtctttta

SEQ ID NO: 393091 - DNA, 19 bp, Homo sapiens
  siRNA target sequence for FLJ13215 (NM_025004.1,961-979).
ccatcaaggtcttttagct

SEQ ID NO: 393092 - DNA, 19 bp, Homo sapiens
  siRNA target sequence for FLJ13215 (NM_025004.1,981-999).
ctgtaccttaccagaatta

SEQ ID NO: 393093 - DNA, 19 bp, Homo sapiens
  siRNA target sequence for FLJ13215 (NM_025004.1,983-1001).
gtaccttaccagaattata

SEQ ID NO: 393094 - DNA, 19 bp, Homo sapiens
  siRNA target sequence for FLJ13215 (NM_025004.1,1031-1049).
cctgactatgaggaatctt

SEQ ID NO: 393095 - DNA, 19 bp, Homo sapiens
  siRNA target sequence for FLJ13215 (NM_025004.1,1034-1052).
gactatgaggaatcttcat

SEQ ID NO: 393096 - DNA, 19 bp, Homo sapiens
  siRNA target sequence for FLJ13215 (NM_025004.1,1047-1065).
cttcatctcttgtaactga

SEQ ID NO: 393097 - DNA, 19 bp, Homo sapiens
  siRNA target sequence for FLJ13215 (NM_025004.1,1111-1129).
gcaggctatccattctgaa

SEQ ID NO: 393098 - DNA, 19 bp, Homo sapiens
  siRNA target sequence for FLJ13215 (NM_025004.1,1127-1145).
gaagataagaacaaacctt

SEQ ID NO: 393099 - DNA, 19 bp, Homo sapiens
  siRNA target sequence for FLJ13215 (NM_025004.1,1205-1223).
gaacaaaagcagttacatt

SEQ ID NO: 393100 - DNA, 19 bp, Homo sapiens
  siRNA target sequence for FLJ13215 (NM_025004.1,1246-1264).
gccagaagcccaggattat

SEQ ID NO: 393101 - DNA, 19 bp, Homo sapiens
  siRNA target sequence for FLJ13215 (NM_025004.1,1292-1310).
gaaacccagggtgatttga

SEQ ID NO: 393102 - DNA, 19 bp, Homo sapiens
  siRNA target sequence for FLJ13215 (NM_025004.1,1435-1453).
gctgaaagcccagagtatt

SEQ ID NO: 393103 - DNA, 19 bp, Homo sapiens
  siRNA target sequence for FLJ13215 (NM_025004.1,1447-1465).
gagtattgagctagaagaa

SEQ ID NO: 393104 - DNA, 19 bp, Homo sapiens
  siRNA target sequence for FLJ13215 (NM_025004.1,1466-1484).
gggagtattgtgttgaaaa

SEQ ID NO: 393105 - DNA, 19 bp, Homo sapiens
  siRNA target sequence for FLJ13215 (NM_025004.1,1508-1526).
caggctcttctaacgaaaa

SEQ ID NO: 393106 - DNA, 19 bp, Homo sapiens
  siRNA target sequence for FLJ13215 (NM_025004.1,1521-1539).
cgaaaaaccaggatgtttt

SEQ ID NO: 393107 - DNA, 19 bp, Homo sapiens
  siRNA target sequence for FLJ13215 (NM_025004.1,1528-1546).
ccaggatgttttactcaaa

SEQ ID NO: 393108 - DNA, 19 bp, Homo sapiens
  siRNA target sequence for FLJ13544 (NM_025008.1,519-537).
cagctcgggatgggattat

SEQ ID NO: 393109 - DNA, 19 bp, Homo sapiens
  siRNA target sequence for FLJ13544 (NM_025008.1,521-539).
gctcgggatgggattatgt

SEQ ID NO: 393110 - DNA, 19 bp, Homo sapiens
  siRNA target sequence for FLJ13544 (NM_025008.1,524-542).
cgggatgggattatgtgta

SEQ ID NO: 393111 - DNA, 19 bp, Homo sapiens
  siRNA target sequence for FLJ13544 (NM_025008.1,640-658).
gggcaggcagtgactatca

SEQ ID NO: 393112 - DNA, 19 bp, Homo sapiens
  siRNA target sequence for FLJ13544 (NM_025008.1,1041-1059).
gatccaacagaaacagatt

SEQ ID NO: 393113 - DNA, 19 bp, Homo sapiens
  siRNA target sequence for FLJ13621 (NM_025009.1,305-323).
ctctgacagtggagtgttt

SEQ ID NO: 393114 - DNA, 19 bp, Homo sapiens
  siRNA target sequence for FLJ13621 (NM_025009.1,315-333).
ggagtgtttacctttggta

SEQ ID NO: 393115 - DNA, 19 bp, Homo sapiens
  siRNA target sequence for FLJ13621 (NM_025009.1,345-363).
cagcgacttagttcataca

SEQ ID NO: 393116 - DNA, 19 bp, Homo sapiens
  siRNA target sequence for FLJ13621 (NM_025009.1,348-366).
cgacttagttcatacaact

SEQ ID NO: 393117 - DNA, 19 bp, Homo sapiens
  siRNA target sequence for FLJ13621 (NM_025009.1,367-385).
gagagccttcggcaatcaa

SEQ ID NO: 393118 - DNA, 19 bp, Homo sapiens
  siRNA target sequence for FLJ13621 (NM_025009.1,371-389).
gccttcggcaatcaaaatt

SEQ ID NO: 393119 - DNA, 19 bp, Homo sapiens
  siRNA target sequence for FLJ13621 (NM_025009.1,464-482).
gattgagtagagaaaataa

SEQ ID NO: 393120 - DNA, 19 bp, Homo sapiens
  siRNA target sequence for FLJ13621 (NM_025009.1,493-511).
ctagagttaatgaaactga

SEQ ID NO: 393121 - DNA, 19 bp, Homo sapiens
  siRNA target sequence for FLJ13621 (NM_025009.1,504-522).
gaaactgagagaacattca

SEQ ID NO: 393122 - DNA, 19 bp, Homo sapiens
  siRNA target sequence for FLJ13621 (NM_025009.1,531-549).
cgttaaagagttgaaaact

SEQ ID NO: 393123 - DNA, 19 bp, Homo sapiens
  siRNA target sequence for FLJ13621 (NM_025009.1,532-550).
gttaaagagttgaaaactt

SEQ ID NO: 393124 - DNA, 19 bp, Homo sapiens
  siRNA target sequence for FLJ13621 (NM_025009.1,558-576).
gaaatgtgcacgtgaaaca

SEQ ID NO: 393125 - DNA, 19 bp, Homo sapiens
  siRNA target sequence for FLJ13621 (NM_025009.1,607-625).
gctcataaactcaaactgt

SEQ ID NO: 393126 - DNA, 19 bp, Homo sapiens
  siRNA target sequence for FLJ13621 (NM_025009.1,678-696).
gaatttgcatgctgtagta

SEQ ID NO: 393127 - DNA, 19 bp, Homo sapiens
  siRNA target sequence for FLJ13621 (NM_025009.1,706-724).
ggtggcaagaaaagaagta

SEQ ID NO: 393128 - DNA, 19 bp, Homo sapiens
  siRNA target sequence for FLJ13621 (NM_025009.1,732-750).
caggcgccagcgtatgcaa

SEQ ID NO: 393129 - DNA, 19 bp, Homo sapiens
  siRNA target sequence for FLJ13621 (NM_025009.1,734-752).
ggcgccagcgtatgcaaat

SEQ ID NO: 393130 - DNA, 19 bp, Homo sapiens
  siRNA target sequence for FLJ13621 (NM_025009.1,735-753).
gcgccagcgtatgcaaatt

SEQ ID NO: 393131 - DNA, 19 bp, Homo sapiens
  siRNA target sequence for FLJ13621 (NM_025009.1,737-755).
gccagcgtatgcaaattga

SEQ ID NO: 393132 - DNA, 19 bp, Homo sapiens
  siRNA target sequence for FLJ13621 (NM_025009.1,741-759).
gcgtatgcaaattgatgaa

SEQ ID NO: 393133 - DNA, 19 bp, Homo sapiens
  siRNA target sequence for FLJ13621 (NM_025009.1,837-855).
ggctgataacaggattcaa

SEQ ID NO: 393134 - DNA, 19 bp, Homo sapiens
  siRNA target sequence for FLJ13621 (NM_025009.1,839-857).
ctgataacaggattcaaga

SEQ ID NO: 393135 - DNA, 19 bp, Homo sapiens
  siRNA target sequence for FLJ13621 (NM_025009.1,848-866).
ggattcaagaacttcaaca

SEQ ID NO: 393136 - DNA, 19 bp, Homo sapiens
  siRNA target sequence for FLJ13621 (NM_025009.1,910-928).
ggggtgagagactatagca

SEQ ID NO: 393137 - DNA, 19 bp, Homo sapiens
  siRNA target sequence for FLJ13621 (NM_025009.1,933-951).
ggtaggatttttatttact

SEQ ID NO: 393138 - DNA, 19 bp, Homo sapiens
  siRNA target sequence for FLJ13621 (NM_025009.1,953-971).
gcatagtagggattgagat

SEQ ID NO: 393139 - DNA, 19 bp, Homo sapiens
  siRNA target sequence for FLJ13621 (NM_025009.1,954-972).
catagtagggattgagata

SEQ ID NO: 393140 - DNA, 19 bp, Homo sapiens
  siRNA target sequence for FLJ13744 (NM_025011.1,531-549).
gctgaactccggtattcat

SEQ ID NO: 393141 - DNA, 19 bp, Homo sapiens
  siRNA target sequence for FLJ13744 (NM_025011.1,532-550).
ctgaactccggtattcatt

SEQ ID NO: 393142 - DNA, 19 bp, Homo sapiens
  siRNA target sequence for FLJ13744 (NM_025011.1,534-552).
gaactccggtattcattga

SEQ ID NO: 393143 - DNA, 19 bp, Homo sapiens
  siRNA target sequence for FLJ13744 (NM_025011.1,540-558).
cggtattcattgatagaga

SEQ ID NO: 393144 - DNA, 19 bp, Homo sapiens
  siRNA target sequence for FLJ13744 (NM_025011.1,563-581).
gctagcagctgtatatgct

SEQ ID NO: 393145 - DNA, 19 bp, Homo sapiens
  siRNA target sequence for FLJ13744 (NM_025011.1,615-633).
gctgcagtcatcatatgga

SEQ ID NO: 393146 - DNA, 19 bp, Homo sapiens
  siRNA target sequence for FLJ13744 (NM_025011.1,652-670).
gatggatgcgtctatgtgt

SEQ ID NO: 393147 - DNA, 19 bp, Homo sapiens
  siRNA target sequence for FLJ13744 (NM_025011.1,655-673).
ggatgcgtctatgtgtaat

SEQ ID NO: 393148 - DNA, 19 bp, Homo sapiens
  siRNA target sequence for FLJ13744 (NM_025011.1,844-862).
ctgagtcttcaccatttaa

SEQ ID NO: 393149 - DNA, 19 bp, Homo sapiens
  siRNA target sequence for FLJ13744 (NM_025011.1,892-910).
catggtacacagtagatga

SEQ ID NO: 393150 - DNA, 19 bp, Homo sapiens
  siRNA target sequence for FLJ14069 (NM_025023.1,621-639).
cccctgggagtgaggaatt

SEQ ID NO: 393151 - DNA, 19 bp, Homo sapiens
  siRNA target sequence for FLJ14069 (NM_025023.1,623-641).
cctgggagtgaggaattca

SEQ ID NO: 393152 - DNA, 19 bp, Homo sapiens
  siRNA target sequence for FLJ14069 (NM_025023.1,743-761).
cctatagacccagaaaata

SEQ ID NO: 393153 - DNA, 19 bp, Homo sapiens
  siRNA target sequence for FLJ14069 (NM_025023.1,1426-1444).
gggtgagcagaaaaacagt

SEQ ID NO: 393154 - DNA, 19 bp, Homo sapiens
  siRNA target sequence for FLJ14100 (NM_025025.1,1022-1040).
ggtgcaggacgctttctca

SEQ ID NO: 393155 - DNA, 19 bp, Homo sapiens
  siRNA target sequence for FLJ14107 (NM_025026.1,512-530).
ccttagcctcgttaatcct

SEQ ID NO: 393156 - DNA, 19 bp, Homo sapiens
  siRNA target sequence for FLJ14107 (NM_025026.1,532-550).
cttaatcctgctagaacat

SEQ ID NO: 393157 - DNA, 19 bp, Homo sapiens
  siRNA target sequence for FLJ14107 (NM_025026.1,700-718).
cttcaccatgagcataagt

SEQ ID NO: 393158 - DNA, 19 bp, Homo sapiens
  siRNA target sequence for FLJ14107 (NM_025026.1,725-743).
gggaactcagcctgttcat

SEQ ID NO: 393159 - DNA, 19 bp, Homo sapiens
  siRNA target sequence for FLJ14107 (NM_025026.1,726-744).
ggaactcagcctgttcatt

SEQ ID NO: 393160 - DNA, 19 bp, Homo sapiens
  siRNA target sequence for FLJ20972 (NM_025030.1,72-90).
gttaggggtggctcatgaa

SEQ ID NO: 393161 - DNA, 19 bp, Homo sapiens
  siRNA target sequence for FLJ20972 (NM_025030.1,132-150).
ggaacaatgtaaattagat

SEQ ID NO: 393162 - DNA, 19 bp, Homo sapiens
  siRNA target sequence for FLJ20972 (NM_025030.1,162-180).
gaaggctcaactagaaatt

SEQ ID NO: 393163 - DNA, 19 bp, Homo sapiens
  siRNA target sequence for FLJ20972 (NM_025030.1,226-244).
gctgacctacagaaagcaa

SEQ ID NO: 393164 - DNA, 19 bp, Homo sapiens
  siRNA target sequence for FLJ20972 (NM_025030.1,447-465).
catgttagagcctgaatta

SEQ ID NO: 393165 - DNA, 19 bp, Homo sapiens
  siRNA target sequence for FLJ20972 (NM_025030.1,454-472).
gagcctgaattatcagtaa

SEQ ID NO: 393166 - DNA, 19 bp, Homo sapiens
  siRNA target sequence for FLJ21075 (NM_025031.1,165-183).
ggtgctggttcttaactct

SEQ ID NO: 393167 - DNA, 19 bp, Homo sapiens
  siRNA target sequence for FLJ21941 (NM_025040.2,459-477).
ctataaccacctagtatca

SEQ ID NO: 393168 - DNA, 19 bp, Homo sapiens
  siRNA target sequence for FLJ21941 (NM_025040.2,472-490).
gtatcactggggtatcaaa

SEQ ID NO: 393169 - DNA, 19 bp, Homo sapiens
  siRNA target sequence for FLJ21941 (NM_025040.2,516-534).
gttggcacatggacaagaa

SEQ ID NO: 393170 - DNA, 19 bp, Homo sapiens
  siRNA target sequence for FLJ21941 (NM_025040.2,636-654).
gagcgtgcagcaatgcaat

SEQ ID NO: 393171 - DNA, 19 bp, Homo sapiens
  siRNA target sequence for FLJ21941 (NM_025040.2,650-668).
gcaatggacagaatacact

SEQ ID NO: 393172 - DNA, 19 bp, Homo sapiens
  siRNA target sequence for FLJ21941 (NM_025040.2,665-683).
cacttagaaatattgtaca

SEQ ID NO: 393173 - DNA, 19 bp, Homo sapiens
  siRNA target sequence for FLJ21941 (NM_025040.2,682-700).
catctcagcaagacacatt

SEQ ID NO: 393174 - DNA, 19 bp, Homo sapiens
  siRNA target sequence for FLJ21941 (NM_025040.2,721-739).
gatacatttgacttgtaca

SEQ ID NO: 393175 - DNA, 19 bp, Homo sapiens
  siRNA target sequence for FLJ21941 (NM_025040.2,847-865).
catgaacgtacgcatacta

SEQ ID NO: 393176 - DNA, 19 bp, Homo sapiens
  siRNA target sequence for FLJ21941 (NM_025040.2,850-868).
gaacgtacgcatactaaaa

SEQ ID NO: 393177 - DNA, 19 bp, Homo sapiens
  siRNA target sequence for FLJ21941 (NM_025040.2,853-871).
cgtacgcatactaaaacta

SEQ ID NO: 393178 - DNA, 19 bp, Homo sapiens
  siRNA target sequence for FLJ21941 (NM_025040.2,857-875).
cgcatactaaaactagatt

SEQ ID NO: 393179 - DNA, 19 bp, Homo sapiens
  siRNA target sequence for FLJ21941 (NM_025040.2,858-876).
gcatactaaaactagattt

SEQ ID NO: 393180 - DNA, 19 bp, Homo sapiens
  siRNA target sequence for FLJ21941 (NM_025040.2,886-904).
gcaaaatgtatccatacta

SEQ ID NO: 393181 - DNA, 19 bp, Homo sapiens
  siRNA target sequence for FLJ21941 (NM_025040.2,893-911).
gtatccatactaaattcca

SEQ ID NO: 393182 - DNA, 19 bp, Homo sapiens
  siRNA target sequence for FLJ21941 (NM_025040.2,949-967).
ccccatgcatgcattgaat

SEQ ID NO: 393183 - DNA, 19 bp, Homo sapiens
  siRNA target sequence for FLJ21941 (NM_025040.2,986-1004).
ggaagtctcagctcattta

SEQ ID NO: 393184 - DNA, 19 bp, Homo sapiens
  siRNA target sequence for FLJ21941 (NM_025040.2,1113-1131).
ctgtatacccaatgaatat

SEQ ID NO: 393185 - DNA, 19 bp, Homo sapiens
  siRNA target sequence for FLJ21941 (NM_025040.2,1149-1167).
gaagagtagtctcattaca

SEQ ID NO: 393186 - DNA, 19 bp, Homo sapiens
  siRNA target sequence for FLJ21941 (NM_025040.2,1152-1170).
gagtagtctcattacacat

SEQ ID NO: 393187 - DNA, 19 bp, Homo sapiens
  siRNA target sequence for FLJ21941 (NM_025040.2,1229-1247).
caatgaagcgctatctaat

SEQ ID NO: 393188 - DNA, 19 bp, Homo sapiens
  siRNA target sequence for FLJ21941 (NM_025040.2,1233-1251).
gaagcgctatctaattgct

SEQ ID NO: 393189 - DNA, 19 bp, Homo sapiens
  siRNA target sequence for FLJ21941 (NM_025040.2,1397-1415).
ccatgaagcgctatcttgt

SEQ ID NO: 393190 - DNA, 19 bp, Homo sapiens
  siRNA target sequence for FLJ21941 (NM_025040.2,1398-1416).
catgaagcgctatcttgtt

SEQ ID NO: 393191 - DNA, 19 bp, Homo sapiens
  siRNA target sequence for FLJ21941 (NM_025040.2,1569-1587).
caaacgcactctcgttata

SEQ ID NO: 393192 - DNA, 19 bp, Homo sapiens
  siRNA target sequence for FLJ21941 (NM_025040.2,1652-1670).
caaagcgcactcttattat

SEQ ID NO: 393193 - DNA, 19 bp, Homo sapiens
  siRNA target sequence for WBSCR23 (NM_025042.2,437-455).
ggcctccagcgtgaaaaca

SEQ ID NO: 393194 - DNA, 19 bp, Homo sapiens
  siRNA target sequence for WBSCR23 (NM_025042.2,439-457).
cctccagcgtgaaaacaga

SEQ ID NO: 393195 - DNA, 19 bp, Homo sapiens
  siRNA target sequence for WBSCR23 (NM_025042.2,440-458).
ctccagcgtgaaaacagaa

SEQ ID NO: 393196 - DNA, 19 bp, Homo sapiens
  siRNA target sequence for WBSCR23 (NM_025042.2,534-552).
gtcctcccttggacattgt

SEQ ID NO: 393197 - DNA, 19 bp, Homo sapiens
  siRNA target sequence for BICC1 (NM_025044.2,37-55).
gatgtcttcatcagtatta

SEQ ID NO: 393198 - DNA, 19 bp, Homo sapiens
  siRNA target sequence for BICC1 (NM_025044.2,74-92).
caagcaagtctgtgattgt

SEQ ID NO: 393199 - DNA, 19 bp, Homo sapiens
  siRNA target sequence for BICC1 (NM_025044.2,311-329).
ccccaaactcactcttgaa

SEQ ID NO: 393200 - DNA, 19 bp, Homo sapiens
  siRNA target sequence for BICC1 (NM_025044.2,312-330).
cccaaactcactcttgaat

SEQ ID NO: 393201 - DNA, 19 bp, Homo sapiens
  siRNA target sequence for BICC1 (NM_025044.2,395-413).
gggcacccccacttgctaa

SEQ ID NO: 393202 - DNA, 19 bp, Homo sapiens
  siRNA target sequence for BICC1 (NM_025044.2,396-414).
ggcacccccacttgctaat

SEQ ID NO: 393203 - DNA, 19 bp, Homo sapiens
  siRNA target sequence for BICC1 (NM_025044.2,397-415).
gcacccccacttgctaata

SEQ ID NO: 393204 - DNA, 19 bp, Homo sapiens
  siRNA target sequence for BICC1 (NM_025044.2,400-418).
cccccacttgctaatactt

SEQ ID NO: 393205 - DNA, 19 bp, Homo sapiens
  siRNA target sequence for BICC1 (NM_025044.2,402-420).
cccacttgctaatacttca

SEQ ID NO: 393206 - DNA, 19 bp, Homo sapiens
  siRNA target sequence for BICC1 (NM_025044.2,439-457).
gctataccacaccttatga

SEQ ID NO: 393207 - DNA, 19 bp, Homo sapiens
  siRNA target sequence for BICC1 (NM_025044.2,440-458).
ctataccacaccttatgat

SEQ ID NO: 393208 - DNA, 19 bp, Homo sapiens
  siRNA target sequence for BICC1 (NM_025044.2,445-463).
ccacaccttatgattccat

SEQ ID NO: 393209 - DNA, 19 bp, Homo sapiens
  siRNA target sequence for BICC1 (NM_025044.2,450-468).
ccttatgattccatctact

SEQ ID NO: 393210 - DNA, 19 bp, Homo sapiens
  siRNA target sequence for BICC1 (NM_025044.2,545-563).
gcttgactcctgttgatgt

SEQ ID NO: 393211 - DNA, 19 bp, Homo sapiens
  siRNA target sequence for BICC1 (NM_025044.2,551-569).
ctcctgttgatgtccatat

SEQ ID NO: 393212 - DNA, 19 bp, Homo sapiens
  siRNA target sequence for BICC1 (NM_025044.2,553-571).
cctgttgatgtccatatca

SEQ ID NO: 393213 - DNA, 19 bp, Homo sapiens
  siRNA target sequence for BICC1 (NM_025044.2,585-603).
cgaaggcaaaaaaatctct

SEQ ID NO: 393214 - DNA, 19 bp, Homo sapiens
  siRNA target sequence for BICC1 (NM_025044.2,750-768).
ccccactgaaggttgtaat

SEQ ID NO: 393215 - DNA, 19 bp, Homo sapiens
  siRNA target sequence for BICC1 (NM_025044.2,753-771).
cactgaaggttgtaatgat

SEQ ID NO: 393216 - DNA, 19 bp, Homo sapiens
  siRNA target sequence for BICC1 (NM_025044.2,820-838).
gctggtgacttgaaacaga

SEQ ID NO: 393217 - DNA, 19 bp, Homo sapiens
  siRNA target sequence for BICC1 (NM_025044.2,821-839).
ctggtgacttgaaacagat

SEQ ID NO: 393218 - DNA, 19 bp, Homo sapiens
  siRNA target sequence for BICC1 (NM_025044.2,876-894).
gacagtggaactattgcaa

SEQ ID NO: 393219 - DNA, 19 bp, Homo sapiens
  siRNA target sequence for BICC1 (NM_025044.2,886-904).
ctattgcaaggcacgaaaa

SEQ ID NO: 393220 - DNA, 19 bp, Homo sapiens
  siRNA target sequence for BICC1 (NM_025044.2,1051-1069).
cttgctccacggtcatcat

SEQ ID NO: 393221 - DNA, 19 bp, Homo sapiens
  siRNA target sequence for BICC1 (NM_025044.2,1057-1075).
ccacggtcatcatatgtca

SEQ ID NO: 393222 - DNA, 19 bp, Homo sapiens
  siRNA target sequence for BICC1 (NM_025044.2,1061-1079).
ggtcatcatatgtcaacat

SEQ ID NO: 393223 - DNA, 19 bp, Homo sapiens
  siRNA target sequence for BICC1 (NM_025044.2,1080-1098).
gcaggcatttgactatgaa

SEQ ID NO: 393224 - DNA, 19 bp, Homo sapiens
  siRNA target sequence for BICC1 (NM_025044.2,1085-1103).
catttgactatgaacagaa

SEQ ID NO: 393225 - DNA, 19 bp, Homo sapiens
  siRNA target sequence for BICC1 (NM_025044.2,1108-1126).
ctattagccaccaaagcta

SEQ ID NO: 393226 - DNA, 19 bp, Homo sapiens
  siRNA target sequence for BICC1 (NM_025044.2,1152-1170).
ggtcagaacgcccacaaat

SEQ ID NO: 393227 - DNA, 19 bp, Homo sapiens
  siRNA target sequence for BICC1 (NM_025044.2,1153-1171).
gtcagaacgcccacaaata

SEQ ID NO: 393228 - DNA, 19 bp, Homo sapiens
  siRNA target sequence for BICC1 (NM_025044.2,1178-1196).
gtggcctgggtttttctaa

SEQ ID NO: 393229 - DNA, 19 bp, Homo sapiens
  siRNA target sequence for BICC1 (NM_025044.2,1183-1201).
ctgggtttttctaaatcca

SEQ ID NO: 393230 - DNA, 19 bp, Homo sapiens
  siRNA target sequence for BICC1 (NM_025044.2,1330-1348).
ggaagcgaatctgataact

SEQ ID NO: 393231 - DNA, 19 bp, Homo sapiens
  siRNA target sequence for BICC1 (NM_025044.2,1347-1365).
ctggagagaccgaaatgga

SEQ ID NO: 393232 - DNA, 19 bp, Homo sapiens
  siRNA target sequence for BICC1 (NM_025044.2,1349-1367).
ggagagaccgaaatggaat

SEQ ID NO: 393233 - DNA, 19 bp, Homo sapiens
  siRNA target sequence for BICC1 (NM_025044.2,1406-1424).
gcagccctaagcgtaaaca

SEQ ID NO: 393234 - DNA, 19 bp, Homo sapiens
  siRNA target sequence for BICC1 (NM_025044.2,1407-1425).
cagccctaagcgtaaacaa

SEQ ID NO: 393235 - DNA, 19 bp, Homo sapiens
  siRNA target sequence for BICC1 (NM_025044.2,1409-1427).
gccctaagcgtaaacaaaa

SEQ ID NO: 393236 - DNA, 19 bp, Homo sapiens
  siRNA target sequence for BICC1 (NM_025044.2,1411-1429).
cctaagcgtaaacaaaaca

SEQ ID NO: 393237 - DNA, 19 bp, Homo sapiens
  siRNA target sequence for BICC1 (NM_025044.2,1412-1430).
ctaagcgtaaacaaaacaa

SEQ ID NO: 393238 - DNA, 19 bp, Homo sapiens
  siRNA target sequence for BICC1 (NM_025044.2,1416-1434).
gcgtaaacaaaacaaatca

SEQ ID NO: 393239 - DNA, 19 bp, Homo sapiens
  siRNA target sequence for BICC1 (NM_025044.2,1465-1483).
ggtatccccagattagaat

SEQ ID NO: 393240 - DNA, 19 bp, Homo sapiens
  siRNA target sequence for FLJ22684 (NM_025048.1,206-224).
gcttcctggggaaaaatga

SEQ ID NO: 393241 - DNA, 19 bp, Homo sapiens
  siRNA target sequence for FLJ22684 (NM_025048.1,271-289).
ctaggcccagtcgaagaat

SEQ ID NO: 393242 - DNA, 19 bp, Homo sapiens
  siRNA target sequence for FLJ22684 (NM_025048.1,275-293).
gcccagtcgaagaatatca

SEQ ID NO: 393243 - DNA, 19 bp, Homo sapiens
  siRNA target sequence for FLJ22684 (NM_025048.1,298-316).
ctgcttcaggtgacctata

SEQ ID NO: 393244 - DNA, 19 bp, Homo sapiens
  siRNA target sequence for FLJ22684 (NM_025048.1,300-318).
gcttcaggtgacctataga

SEQ ID NO: 393245 - DNA, 19 bp, Homo sapiens
  siRNA target sequence for FLJ22684 (NM_025048.1,304-322).
caggtgacctatagagatt

SEQ ID NO: 393246 - DNA, 19 bp, Homo sapiens
  siRNA target sequence for FLJ22684 (NM_025048.1,383-401).
cacatgggctaattagaat

SEQ ID NO: 393247 - DNA, 19 bp, Homo sapiens
  siRNA target sequence for FLJ22684 (NM_025048.1,388-406).
gggctaattagaattatca

SEQ ID NO: 393248 - DNA, 19 bp, Homo sapiens
  siRNA target sequence for FLJ22684 (NM_025048.1,532-550).
gcactcccaagctgtgaat

SEQ ID NO: 393249 - DNA, 19 bp, Homo sapiens
  siRNA target sequence for FLJ22684 (NM_025048.1,537-555).
cccaagctgtgaatgtcat

SEQ ID NO: 393250 - DNA, 19 bp, Homo sapiens
  siRNA target sequence for FLJ22684 (NM_025048.1,564-582).
cctcagccagagtgtcaat

SEQ ID NO: 393251 - DNA, 19 bp, Homo sapiens
  siRNA target sequence for FLJ22684 (NM_025048.1,605-623).
ggggcactttcaaaattaa

SEQ ID NO: 393252 - DNA, 19 bp, Homo sapiens
  siRNA target sequence for FLJ22684 (NM_025048.1,659-677).
ctgctatatactccaaata

SEQ ID NO: 393253 - DNA, 19 bp, Homo sapiens
  siRNA target sequence for FLJ22684 (NM_025048.1,738-756).
ggttcaggtcacccaattt

SEQ ID NO: 393254 - DNA, 19 bp, Homo sapiens
  siRNA target sequence for FLJ22692 (NM_025049.1,799-817).
gggagacctgtctaacttt

SEQ ID NO: 393255 - DNA, 19 bp, Homo sapiens
  siRNA target sequence for VCIP135 (NM_025054.3,418-436).
gtgtcaggcgcgtctattt

SEQ ID NO: 393256 - DNA, 19 bp, Homo sapiens
  siRNA target sequence for VCIP135 (NM_025054.3,420-438).
gtcaggcgcgtctattttt

SEQ ID NO: 393257 - DNA, 19 bp, Homo sapiens
  siRNA target sequence for VCIP135 (NM_025054.3,531-549).
cggacgtagtgctacacaa

SEQ ID NO: 393258 - DNA, 19 bp, Homo sapiens
  siRNA target sequence for VCIP135 (NM_025054.3,620-638).
ggcctttccaactatcact

SEQ ID NO: 393259 - DNA, 19 bp, Homo sapiens
  siRNA target sequence for VCIP135 (NM_025054.3,627-645).
ccaactatcactgcaaatt

SEQ ID NO: 393260 - DNA, 19 bp, Homo sapiens
  siRNA target sequence for VCIP135 (NM_025054.3,646-664).
gttgtcgcccatattagct

SEQ ID NO: 393261 - DNA, 19 bp, Homo sapiens
  siRNA target sequence for VCIP135 (NM_025054.3,719-737).
cagggcgaactgttcgatt

SEQ ID NO: 393262 - DNA, 19 bp, Homo sapiens
  siRNA target sequence for VCIP135 (NM_025054.3,816-834).
gaagcctcctgtatttgca

SEQ ID NO: 393263 - DNA, 19 bp, Homo sapiens
  siRNA target sequence for VCIP135 (NM_025054.3,836-854).
gacactctggaggacatta

SEQ ID NO: 393264 - DNA, 19 bp, Homo sapiens
  siRNA target sequence for VCIP135 (NM_025054.3,964-982).
gcatgccttaagagagaat

SEQ ID NO: 393265 - DNA, 19 bp, Homo sapiens
  siRNA target sequence for VCIP135 (NM_025054.3,969-987).
ccttaagagagaatcttaa

SEQ ID NO: 393266 - DNA, 19 bp, Homo sapiens
  siRNA target sequence for VCIP135 (NM_025054.3,1054-1072).
gtgggaggacattatcaat

SEQ ID NO: 393267 - DNA, 19 bp, Homo sapiens
  siRNA target sequence for VCIP135 (NM_025054.3,1123-1141).
gaatatccacatatttggt

SEQ ID NO: 393268 - DNA, 19 bp, Homo sapiens
  siRNA target sequence for VCIP135 (NM_025054.3,1151-1169).
gtgctacatcgtcctatta

SEQ ID NO: 393269 - DNA, 19 bp, Homo sapiens
  siRNA target sequence for VCIP135 (NM_025054.3,1157-1175).
catcgtcctattattctgt

SEQ ID NO: 393270 - DNA, 19 bp, Homo sapiens
  siRNA target sequence for VCIP135 (NM_025054.3,1161-1179).
gtcctattattctgttaga

SEQ ID NO: 393271 - DNA, 19 bp, Homo sapiens
  siRNA target sequence for VCIP135 (NM_025054.3,1163-1181).
cctattattctgttagatt

SEQ ID NO: 393272 - DNA, 19 bp, Homo sapiens
  siRNA target sequence for VCIP135 (NM_025054.3,1195-1213).
gagaagctctggtgattat

SEQ ID NO: 393273 - DNA, 19 bp, Homo sapiens
  siRNA target sequence for VCIP135 (NM_025054.3,1279-1297).
caaaccaatctgtattgca

SEQ ID NO: 393274 - DNA, 19 bp, Homo sapiens
  siRNA target sequence for VCIP135 (NM_025054.3,1305-1323).
gctccggtagaaaccatta

SEQ ID NO: 393275 - DNA, 19 bp, Homo sapiens
  siRNA target sequence for VCIP135 (NM_025054.3,1306-1324).
ctccggtagaaaccattat

SEQ ID NO: 393276 - DNA, 19 bp, Homo sapiens
  siRNA target sequence for VCIP135 (NM_025054.3,1308-1326).
ccggtagaaaccattatat

SEQ ID NO: 393277 - DNA, 19 bp, Homo sapiens
  siRNA target sequence for VCIP135 (NM_025054.3,1327-1345).
ccccttggtaggcataaaa

SEQ ID NO: 393278 - DNA, 19 bp, Homo sapiens
  siRNA target sequence for VCIP135 (NM_025054.3,1358-1376).
cccaaactgcctatgaatt

SEQ ID NO: 393279 - DNA, 19 bp, Homo sapiens
  siRNA target sequence for VCIP135 (NM_025054.3,1397-1415).
gtgcctcaggaccttatta

SEQ ID NO: 393280 - DNA, 19 bp, Homo sapiens
  siRNA target sequence for VCIP135 (NM_025054.3,1399-1417).
gcctcaggaccttattaaa

SEQ ID NO: 393281 - DNA, 19 bp, Homo sapiens
  siRNA target sequence for VCIP135 (NM_025054.3,1463-1481).
gacagaagtttgcaagata

SEQ ID NO: 393282 - DNA, 19 bp, Homo sapiens
  siRNA target sequence for VCIP135 (NM_025054.3,1525-1543).
ggacaaacatggtatccat

SEQ ID NO: 393283 - DNA, 19 bp, Homo sapiens
  siRNA target sequence for VCIP135 (NM_025054.3,1616-1634).
gtcacagcagctgctaaaa

SEQ ID NO: 393284 - DNA, 19 bp, Homo sapiens
  siRNA target sequence for VCIP135 (NM_025054.3,1626-1644).
ctgctaaaaaagcagtaat

SEQ ID NO: 393285 - DNA, 19 bp, Homo sapiens
  siRNA target sequence for VCIP135 (NM_025054.3,1645-1663).
ggataatcgccttcacaaa

SEQ ID NO: 393286 - DNA, 19 bp, Homo sapiens
  siRNA target sequence for VCIP135 (NM_025054.3,1646-1664).
gataatcgccttcacaaat

SEQ ID NO: 393287 - DNA, 19 bp, Homo sapiens
  siRNA target sequence for VCIP135 (NM_025054.3,1681-1699).
cctttctgaacttcatgtt

SEQ ID NO: 393288 - DNA, 19 bp, Homo sapiens
  siRNA target sequence for VCIP135 (NM_025054.3,1804-1822).
ggtttgctcatatgattca

SEQ ID NO: 393289 - DNA, 19 bp, Homo sapiens
  siRNA target sequence for VCIP135 (NM_025054.3,1842-1860).
cagactatggaatgagtaa

SEQ ID NO: 393290 - DNA, 19 bp, Homo sapiens
  siRNA target sequence for VCIP135 (NM_025054.3,1846-1864).
ctatggaatgagtaaccta

SEQ ID NO: 393291 - DNA, 19 bp, Homo sapiens
  siRNA target sequence for VCIP135 (NM_025054.3,1857-1875).
gtaacctaacagcttgtaa

SEQ ID NO: 393292 - DNA, 19 bp, Homo sapiens
  siRNA target sequence for VCIP135 (NM_025054.3,1862-1880).
ctaacagcttgtaattggt

SEQ ID NO: 393293 - DNA, 19 bp, Homo sapiens
  siRNA target sequence for VCIP135 (NM_025054.3,1906-1924).
cagaggagatgggtctatt

SEQ ID NO: 393294 - DNA, 19 bp, Homo sapiens
  siRNA target sequence for VCIP135 (NM_025054.3,1917-1935).
ggtctattgtgtatttgga

SEQ ID NO: 393295 - DNA, 19 bp, Homo sapiens
  siRNA target sequence for VCIP135 (NM_025054.3,1933-1951).
ggatggagacagaactaat

SEQ ID NO: 393296 - DNA, 19 bp, Homo sapiens
  siRNA target sequence for VCIP135 (NM_025054.3,1957-1975).
gtccactggtggcaaatgt

SEQ ID NO: 393297 - DNA, 19 bp, Homo sapiens
  siRNA target sequence for VCIP135 (NM_025054.3,2024-2042).
ccagaagctttccctatta

SEQ ID NO: 393298 - DNA, 19 bp, Homo sapiens
  siRNA target sequence for VCIP135 (NM_025054.3,2031-2049).
ctttccctattactttaga

SEQ ID NO: 393299 - DNA, 19 bp, Homo sapiens
  siRNA target sequence for VCIP135 (NM_025054.3,2063-2081).
gtggtcagagaaacagtat

SEQ ID NO: 393300 - DNA, 19 bp, Homo sapiens
  siRNA target sequence for VCIP135 (NM_025054.3,2113-2131).
gaatagtaatgtttacgat

SEQ ID NO: 393301 - DNA, 19 bp, Homo sapiens
  siRNA target sequence for VCIP135 (NM_025054.3,2233-2251).
gaatcccgatgattatact

SEQ ID NO: 393302 - DNA, 19 bp, Homo sapiens
  siRNA target sequence for VCIP135 (NM_025054.3,2278-2296).
ccaaagagttggagatgtt

SEQ ID NO: 393303 - DNA, 19 bp, Homo sapiens
  siRNA target sequence for VCIP135 (NM_025054.3,2314-2332).
gtctcagctcccaactaaa

SEQ ID NO: 393304 - DNA, 19 bp, Homo sapiens
  siRNA target sequence for VCIP135 (NM_025054.3,2316-2334).
ctcagctcccaactaaaat

SEQ ID NO: 393305 - DNA, 19 bp, Homo sapiens
  siRNA target sequence for VCIP135 (NM_025054.3,2320-2338).
gctcccaactaaaattatt

SEQ ID NO: 393306 - DNA, 19 bp, Homo sapiens
  siRNA target sequence for VCIP135 (NM_025054.3,2323-2341).
cccaactaaaattattctt

SEQ ID NO: 393307 - DNA, 19 bp, Homo sapiens
  siRNA target sequence for VCIP135 (NM_025054.3,2383-2401).
catgagtaaaactgaaaga

SEQ ID NO: 393308 - DNA, 19 bp, Homo sapiens
  siRNA target sequence for VCIP135 (NM_025054.3,2480-2498).
gggcaacccaggactgttt

SEQ ID NO: 393309 - DNA, 19 bp, Homo sapiens
  siRNA target sequence for VCIP135 (NM_025054.3,2581-2599).
gaagaagatccgaatcaca

SEQ ID NO: 393310 - DNA, 19 bp, Homo sapiens
  siRNA target sequence for VCIP135 (NM_025054.3,2587-2605).
gatccgaatcacaactaat

SEQ ID NO: 393311 - DNA, 19 bp, Homo sapiens
  siRNA target sequence for VCIP135 (NM_025054.3,2609-2627).
ggacgacagtccatggtta

SEQ ID NO: 393312 - DNA, 19 bp, Homo sapiens
  siRNA target sequence for VCIP135 (NM_025054.3,2620-2638).
catggttacccttaagtct

SEQ ID NO: 393313 - DNA, 19 bp, Homo sapiens
  siRNA target sequence for VCIP135 (NM_025054.3,2624-2642).
gttacccttaagtcttcaa

SEQ ID NO: 393314 - DNA, 19 bp, Homo sapiens
  siRNA target sequence for VCIP135 (NM_025054.3,2717-2735).
gggtttcctcctaaagagt

SEQ ID NO: 393315 - DNA, 19 bp, Homo sapiens
  siRNA target sequence for VCIP135 (NM_025054.3,2719-2737).
gtttcctcctaaagagtta

SEQ ID NO: 393316 - DNA, 19 bp, Homo sapiens
  siRNA target sequence for VCIP135 (NM_025054.3,2780-2798).
cagcatggcgacagaatta

SEQ ID NO: 393317 - DNA, 19 bp, Homo sapiens
  siRNA target sequence for VCIP135 (NM_025054.3,2782-2800).
gcatggcgacagaattaca

SEQ ID NO: 393318 - DNA, 19 bp, Homo sapiens
  siRNA target sequence for VCIP135 (NM_025054.3,2783-2801).
catggcgacagaattacaa

SEQ ID NO: 393319 - DNA, 19 bp, Homo sapiens
  siRNA target sequence for VCIP135 (NM_025054.3,2787-2805).
gcgacagaattacaataga

SEQ ID NO: 393320 - DNA, 19 bp, Homo sapiens
  siRNA target sequence for VCIP135 (NM_025054.3,2853-2871).
cagcccacactgtgaaaca

SEQ ID NO: 393321 - DNA, 19 bp, Homo sapiens
  siRNA target sequence for VCIP135 (NM_025054.3,2882-2900).
gctgttactggtaaactgt

SEQ ID NO: 393322 - DNA, 19 bp, Homo sapiens
  siRNA target sequence for VCIP135 (NM_025054.3,2889-2907).
ctggtaaactgtcatctaa

SEQ ID NO: 393323 - DNA, 19 bp, Homo sapiens
  siRNA target sequence for VCIP135 (NM_025054.3,2995-3013).
gggacttcctcacatgttt

SEQ ID NO: 393324 - DNA, 19 bp, Homo sapiens
  siRNA target sequence for VCIP135 (NM_025054.3,2997-3015).
gacttcctcacatgtttca

SEQ ID NO: 393325 - DNA, 19 bp, Homo sapiens
  siRNA target sequence for VCIP135 (NM_025054.3,3166-3184).
ccccattggtcctgatgtt

SEQ ID NO: 393326 - DNA, 19 bp, Homo sapiens
  siRNA target sequence for VCIP135 (NM_025054.3,3173-3191).
ggtcctgatgttgaagatt

SEQ ID NO: 393327 - DNA, 19 bp, Homo sapiens
  siRNA target sequence for VCIP135 (NM_025054.3,3218-3236).
cgagcagaggctactacaa

SEQ ID NO: 393328 - DNA, 19 bp, Homo sapiens
  siRNA target sequence for VCIP135 (NM_025054.3,3308-3326).
gagcaacttcataacgtaa

SEQ ID NO: 393329 - DNA, 19 bp, Homo sapiens
  siRNA target sequence for VCIP135 (NM_025054.3,3426-3444).
cagggacagactttagtaa

SEQ ID NO: 393330 - DNA, 19 bp, Homo sapiens
  siRNA target sequence for VCIP135 (NM_025054.3,3430-3448).
gacagactttagtaatagt

SEQ ID NO: 393331 - DNA, 19 bp, Homo sapiens
  siRNA target sequence for VCIP135 (NM_025054.3,3470-3488).
gtattcacagcttcttcta

SEQ ID NO: 393332 - DNA, 19 bp, Homo sapiens
  siRNA target sequence for VCIP135 (NM_025054.3,3475-3493).
cacagcttcttctagtaat

SEQ ID NO: 393333 - DNA, 19 bp, Homo sapiens
  siRNA target sequence for VCIP135 (NM_025054.3,3480-3498).
cttcttctagtaatagtga

SEQ ID NO: 393334 - DNA, 19 bp, Homo sapiens
  siRNA target sequence for VCIP135 (NM_025054.3,3513-3531).
ctcctggagtagtaacaat

SEQ ID NO: 393335 - DNA, 19 bp, Homo sapiens
  siRNA target sequence for VCIP135 (NM_025054.3,3515-3533).
cctggagtagtaacaatga

SEQ ID NO: 393336 - DNA, 19 bp, Homo sapiens
  siRNA target sequence for VCIP135 (NM_025054.3,3543-3561).
ggcagcttgatcctgattt

SEQ ID NO: 393337 - DNA, 19 bp, Homo sapiens
  siRNA target sequence for VCIP135 (NM_025054.3,3547-3565).
gcttgatcctgatttggtt

SEQ ID NO: 393338 - DNA, 19 bp, Homo sapiens
  siRNA target sequence for VCIP135 (NM_025054.3,3563-3581).
gttgaggcccagcgaaaaa

SEQ ID NO: 393339 - DNA, 19 bp, Homo sapiens
  siRNA target sequence for VCIP135 (NM_025054.3,3566-3584).
gaggcccagcgaaaaaaat

SEQ ID NO: 393340 - DNA, 19 bp, Homo sapiens
  siRNA target sequence for VCIP135 (NM_025054.3,3626-3644).
caccttcgggatcaaagta

SEQ ID NO: 393341 - DNA, 19 bp, Homo sapiens
  siRNA target sequence for VCIP135 (NM_025054.3,3628-3646).
ccttcgggatcaaagtaca

SEQ ID NO: 393342 - DNA, 19 bp, Homo sapiens
  siRNA target sequence for VCIP135 (NM_025054.3,3691-3709).
gagttcttctgcaaagtct

SEQ ID NO: 393343 - DNA, 19 bp, Homo sapiens
  siRNA target sequence for VCIP135 (NM_025054.3,3755-3773).
ggtactgaaaatttgaata

SEQ ID NO: 393344 - DNA, 19 bp, Homo sapiens
  siRNA target sequence for VCIP135 (NM_025054.3,3901-3919).
cacaactgagccaatggat

SEQ ID NO: 393345 - DNA, 19 bp, Homo sapiens
  siRNA target sequence for C14orf45 (NM_025057.1,95-113).
gcagcaacacgcaatgata

SEQ ID NO: 393346 - DNA, 19 bp, Homo sapiens
  siRNA target sequence for C14orf45 (NM_025057.1,127-145).
gtcaggtagaaattgacaa

SEQ ID NO: 393347 - DNA, 19 bp, Homo sapiens
  siRNA target sequence for C14orf45 (NM_025057.1,228-246).
gaagtggaaagattctttt

SEQ ID NO: 393348 - DNA, 19 bp, Homo sapiens
  siRNA target sequence for C14orf45 (NM_025057.1,264-282).
gtgaagcaacagatcctaa

SEQ ID NO: 393349 - DNA, 19 bp, Homo sapiens
  siRNA target sequence for C14orf45 (NM_025057.1,279-297).
ctaattagcaggaagcatt

SEQ ID NO: 393350 - DNA, 19 bp, Homo sapiens
  siRNA target sequence for C14orf45 (NM_025057.1,309-327).
gcacaagctgctttcaatt

SEQ ID NO: 393351 - DNA, 19 bp, Homo sapiens
  siRNA target sequence for C14orf45 (NM_025057.1,310-328).
cacaagctgctttcaattt

SEQ ID NO: 393352 - DNA, 19 bp, Homo sapiens
  siRNA target sequence for C14orf45 (NM_025057.1,400-418).
gcaccaatagtgtgaatca

SEQ ID NO: 393353 - DNA, 19 bp, Homo sapiens
  siRNA target sequence for C14orf45 (NM_025057.1,409-427).
gtgtgaatcaggatcttct

SEQ ID NO: 393354 - DNA, 19 bp, Homo sapiens
  siRNA target sequence for C14orf45 (NM_025057.1,423-441).
cttctggaggccgaaaaat

SEQ ID NO: 393355 - DNA, 19 bp, Homo sapiens
  siRNA target sequence for C14orf45 (NM_025057.1,433-451).
ccgaaaaatggacacatat

SEQ ID NO: 393356 - DNA, 19 bp, Homo sapiens
  siRNA target sequence for C14orf45 (NM_025057.1,443-461).
gacacatattgaaggaaat

SEQ ID NO: 393357 - DNA, 19 bp, Homo sapiens
  siRNA target sequence for C14orf45 (NM_025057.1,532-550).
gctgtccttctaggaaata

SEQ ID NO: 393358 - DNA, 19 bp, Homo sapiens
  siRNA target sequence for C14orf45 (NM_025057.1,692-710).
ggtgctacccactattcca

SEQ ID NO: 393359 - DNA, 19 bp, Homo sapiens
  siRNA target sequence for C14orf45 (NM_025057.1,693-711).
gtgctacccactattccaa

SEQ ID NO: 393360 - DNA, 19 bp, Homo sapiens
  siRNA target sequence for C6orf97 (NM_025059.2,94-112).
ggaaacttacgatcatctt

SEQ ID NO: 393361 - DNA, 19 bp, Homo sapiens
  siRNA target sequence for C6orf97 (NM_025059.2,95-113).
gaaacttacgatcatcttt

SEQ ID NO: 393362 - DNA, 19 bp, Homo sapiens
  siRNA target sequence for C6orf97 (NM_025059.2,125-143).
gtcacgcgggagcagttaa

SEQ ID NO: 393363 - DNA, 19 bp, Homo sapiens
  siRNA target sequence for C6orf97 (NM_025059.2,189-207).
caactttggtcaaatttga

SEQ ID NO: 393364 - DNA, 19 bp, Homo sapiens
  siRNA target sequence for C6orf97 (NM_025059.2,236-254).
cgatccaagatgctttcta

SEQ ID NO: 393365 - DNA, 19 bp, Homo sapiens
  siRNA target sequence for C6orf97 (NM_025059.2,262-280).
ctcctgtcaagaactgaaa

SEQ ID NO: 393366 - DNA, 19 bp, Homo sapiens
  siRNA target sequence for C6orf97 (NM_025059.2,411-429).
cagctcacgctgcaatcaa

SEQ ID NO: 393367 - DNA, 19 bp, Homo sapiens
  siRNA target sequence for C6orf97 (NM_025059.2,448-466).
gaagaaagttgtagagtta

SEQ ID NO: 393368 - DNA, 19 bp, Homo sapiens
  siRNA target sequence for C6orf97 (NM_025059.2,655-673).
cgtgaaaggacaaattgtt

SEQ ID NO: 393369 - DNA, 19 bp, Homo sapiens
  siRNA target sequence for C6orf97 (NM_025059.2,663-681).
gacaaattgttattcttga

SEQ ID NO: 393370 - DNA, 19 bp, Homo sapiens
  siRNA target sequence for C6orf97 (NM_025059.2,845-863).
cttgaaagggaagttaaga

SEQ ID NO: 393371 - DNA, 19 bp, Homo sapiens
  siRNA target sequence for C6orf97 (NM_025059.2,980-998).
gcagtcacaacctcacaaa

SEQ ID NO: 393372 - DNA, 19 bp, Homo sapiens
  siRNA target sequence for C6orf97 (NM_025059.2,1034-1052).
ctccttaggggcagattga

SEQ ID NO: 393373 - DNA, 19 bp, Homo sapiens
  siRNA target sequence for C6orf97 (NM_025059.2,1065-1083).
ccactgaggacaccatttt

SEQ ID NO: 393374 - DNA, 19 bp, Homo sapiens
  siRNA target sequence for C6orf97 (NM_025059.2,1293-1311).
gtgttttgcgagacaactt

SEQ ID NO: 393375 - DNA, 19 bp, Homo sapiens
  siRNA target sequence for C6orf97 (NM_025059.2,1300-1318).
gcgagacaacttgaatttt

SEQ ID NO: 393376 - DNA, 19 bp, Homo sapiens
  siRNA target sequence for C6orf97 (NM_025059.2,1345-1363).
ggatcagctttctcagaaa

SEQ ID NO: 393377 - DNA, 19 bp, Homo sapiens
  siRNA target sequence for C6orf97 (NM_025059.2,1405-1423).
gcggctggacgtggtttta

SEQ ID NO: 393378 - DNA, 19 bp, Homo sapiens
  siRNA target sequence for C6orf97 (NM_025059.2,1479-1497).
ccattgcccacaatttgca

SEQ ID NO: 393379 - DNA, 19 bp, Homo sapiens
  siRNA target sequence for C6orf97 (NM_025059.2,1489-1507).
caatttgcagagaaagcta

SEQ ID NO: 393380 - DNA, 19 bp, Homo sapiens
  siRNA target sequence for C6orf97 (NM_025059.2,1529-1547).
gagagcaaagaattacaca

SEQ ID NO: 393381 - DNA, 19 bp, Homo sapiens
  siRNA target sequence for C6orf97 (NM_025059.2,1551-1569).
gcctcctccggcagaaaat

SEQ ID NO: 393382 - DNA, 19 bp, Homo sapiens
  siRNA target sequence for C6orf97 (NM_025059.2,1728-1746).
ccgacaccaatgaactgaa

SEQ ID NO: 393383 - DNA, 19 bp, Homo sapiens
  siRNA target sequence for C6orf97 (NM_025059.2,1895-1913).
gaaagggccagaaacatga

SEQ ID NO: 393384 - DNA, 19 bp, Homo sapiens
  siRNA target sequence for C6orf97 (NM_025059.2,1899-1917).
gggccagaaacatgataga

SEQ ID NO: 393385 - DNA, 19 bp, Homo sapiens
  siRNA target sequence for C6orf97 (NM_025059.2,2042-2060).
gctcttcctgattatgaaa

SEQ ID NO: 393386 - DNA, 19 bp, Homo sapiens
  siRNA target sequence for C6orf97 (NM_025059.2,2062-2080).
catcaagtgtcttgaaaga

SEQ ID NO: 393387 - DNA, 19 bp, Homo sapiens
  siRNA target sequence for C6orf97 (NM_025059.2,2093-2111).
catcagcatcactttgtta

SEQ ID NO: 393388 - DNA, 19 bp, Homo sapiens
  siRNA target sequence for C6orf97 (NM_025059.2,2152-2170).
gcacccacaaggccattta

SEQ ID NO: 393389 - DNA, 19 bp, Homo sapiens
  siRNA target sequence for FLJ23420 (NM_025061.3,389-407).
gcagcaatacagctttatt

SEQ ID NO: 393390 - DNA, 19 bp, Homo sapiens
  siRNA target sequence for FLJ23420 (NM_025061.3,457-475).
cttacctcgtggtcattca

SEQ ID NO: 393391 - DNA, 19 bp, Homo sapiens
  siRNA target sequence for FLJ23420 (NM_025061.3,529-547).
gctccaagattgaacactt

SEQ ID NO: 393392 - DNA, 19 bp, Homo sapiens
  siRNA target sequence for FLJ23420 (NM_025061.3,873-891).
cagacggtgctgaaagtgt

SEQ ID NO: 393393 - DNA, 19 bp, Homo sapiens
  siRNA target sequence for FLJ23420 (NM_025061.3,877-895).
cggtgctgaaagtgtgtaa

SEQ ID NO: 393394 - DNA, 19 bp, Homo sapiens
  siRNA target sequence for FLJ23420 (NM_025061.3,1267-1285).
gcgaaagccgtctaaagca

SEQ ID NO: 393395 - DNA, 19 bp, Homo sapiens
  siRNA target sequence for FLJ23420 (NM_025061.3,1276-1294).
gtctaaagcagctcaatct

SEQ ID NO: 393396 - DNA, 19 bp, Homo sapiens
  siRNA target sequence for FLJ23420 (NM_025061.3,1434-1452).
gaggccatctgcgatatca

SEQ ID NO: 393397 - DNA, 19 bp, Homo sapiens
  siRNA target sequence for FLJ23420 (NM_025061.3,1915-1933).
gtgcgctgcaggaacttga

SEQ ID NO: 393398 - DNA, 19 bp, Homo sapiens
  siRNA target sequence for FLJ23420 (NM_025061.3,1954-1972).
gctccatcgaggaaatcct

SEQ ID NO: 393399 - DNA, 19 bp, Homo sapiens
  siRNA target sequence for FLJ23420 (NM_025061.3,2244-2262).
cccgaagagctcttcttct

SEQ ID NO: 393400 - DNA, 19 bp, Homo sapiens
  siRNA target sequence for FLJ23420 (NM_025061.3,2461-2479).
cagaagtgcgggacaagat

SEQ ID NO: 393401 - DNA, 19 bp, Homo sapiens
  siRNA target sequence for FLJ23550 (NM_025063.1,160-178).
ggcaccacatggcacataa

SEQ ID NO: 393402 - DNA, 19 bp, Homo sapiens
  siRNA target sequence for FLJ23550 (NM_025063.1,188-206).
cctattggatgcatactca

SEQ ID NO: 393403 - DNA, 19 bp, Homo sapiens
  siRNA target sequence for FLJ23550 (NM_025063.1,198-216).
gcatactcaggcctgttaa

SEQ ID NO: 393404 - DNA, 19 bp, Homo sapiens
  siRNA target sequence for FLJ23550 (NM_025063.1,207-225).
ggcctgttaagtaatgaat

SEQ ID NO: 393405 - DNA, 19 bp, Homo sapiens
  siRNA target sequence for FLJ23550 (NM_025063.1,304-322).
cctttggaatgctagttgt

SEQ ID NO: 393406 - DNA, 19 bp, Homo sapiens
  siRNA target sequence for FLJ23550 (NM_025063.1,326-344).
gccaagtcttgacaaagta

SEQ ID NO: 393407 - DNA, 19 bp, Homo sapiens
  siRNA target sequence for FLJ23550 (NM_025063.1,355-373).
ggagcagttatgagtacat

SEQ ID NO: 393408 - DNA, 19 bp, Homo sapiens
  siRNA target sequence for FLJ23550 (NM_025063.1,356-374).
gagcagttatgagtacatt

SEQ ID NO: 393409 - DNA, 19 bp, Homo sapiens
  siRNA target sequence for FLJ23550 (NM_025063.1,430-448).
cgagcttggtgtctaaaga

SEQ ID NO: 393410 - DNA, 19 bp, Homo sapiens
  siRNA target sequence for FLJ23550 (NM_025063.1,442-460).
ctaaagacctctacaaact

SEQ ID NO: 393411 - DNA, 19 bp, Homo sapiens
  siRNA target sequence for FLJ23550 (NM_025063.1,699-717).
gcacggtgtcagaacgata

SEQ ID NO: 393412 - DNA, 19 bp, Homo sapiens
  siRNA target sequence for FLJ23550 (NM_025063.1,700-718).
cacggtgtcagaacgatat

SEQ ID NO: 393413 - DNA, 19 bp, Homo sapiens
  siRNA target sequence for FLJ23550 (NM_025063.1,704-722).
gtgtcagaacgatattgga

SEQ ID NO: 393414 - DNA, 19 bp, Homo sapiens
  siRNA target sequence for FLJ23550 (NM_025063.1,710-728).
gaacgatattggaacaaat

SEQ ID NO: 393415 - DNA, 19 bp, Homo sapiens
  siRNA target sequence for FLJ23550 (NM_025063.1,731-749).
gcctacaaacggtaaaagt

SEQ ID NO: 393416 - DNA, 19 bp, Homo sapiens
  siRNA target sequence for FLJ23550 (NM_025063.1,765-783).
ccttcttctgatgtagaat

SEQ ID NO: 393417 - DNA, 19 bp, Homo sapiens
  siRNA target sequence for FLJ23550 (NM_025063.1,790-808).
ccaaggagtttcaacaaga

SEQ ID NO: 393418 - DNA, 19 bp, Homo sapiens
  siRNA target sequence for FLJ23550 (NM_025063.1,827-845).
gagagtagggcaaacctta

SEQ ID NO: 393419 - DNA, 19 bp, Homo sapiens
  siRNA target sequence for FLJ23550 (NM_025063.1,853-871).
ccttgctgactgactttgt

SEQ ID NO: 393420 - DNA, 19 bp, Homo sapiens
  siRNA target sequence for FLJ23550 (NM_025063.1,924-942).
gcagcatccatactgatat

SEQ ID NO: 393421 - DNA, 19 bp, Homo sapiens
  siRNA target sequence for FLJ23550 (NM_025063.1,931-949).
ccatactgatatttactct

SEQ ID NO: 393422 - DNA, 19 bp, Homo sapiens
  siRNA target sequence for FLJ23550 (NM_025063.1,1011-1029).
ctgtgtgataacaattgta

SEQ ID NO: 393423 - DNA, 19 bp, Homo sapiens
  siRNA target sequence for FLJ23550 (NM_025063.1,1038-1056).
gttatgttgcaggttatca

SEQ ID NO: 393424 - DNA, 19 bp, Homo sapiens
  siRNA target sequence for FLJ23550 (NM_025063.1,1050-1068).
gttatcactttgttgacat

SEQ ID NO: 393425 - DNA, 19 bp, Homo sapiens
  siRNA target sequence for FLJ23550 (NM_025063.1,1079-1097).
caagaaggtcatctttcaa

SEQ ID NO: 393426 - DNA, 19 bp, Homo sapiens
  siRNA target sequence for FLJ23550 (NM_025063.1,1082-1100).
gaaggtcatctttcaactt

SEQ ID NO: 393427 - DNA, 19 bp, Homo sapiens
  siRNA target sequence for FLJ23550 (NM_025063.1,1120-1138).
cagacgacactctgataca

SEQ ID NO: 393428 - DNA, 19 bp, Homo sapiens
  siRNA target sequence for FLJ23550 (NM_025063.1,1142-1160).
gtggaaggcggcatgttct

SEQ ID NO: 393429 - DNA, 19 bp, Homo sapiens
  siRNA target sequence for FLJ23550 (NM_025063.1,1179-1197).
cacgtgctgaagacaatct

SEQ ID NO: 393430 - DNA, 19 bp, Homo sapiens
  siRNA target sequence for FLJ23550 (NM_025063.1,1182-1200).
gtgctgaagacaatcttat

SEQ ID NO: 393431 - DNA, 19 bp, Homo sapiens
  siRNA target sequence for FLJ23550 (NM_025063.1,1263-1281).
cttgatattaccaacttga

SEQ ID NO: 393432 - DNA, 19 bp, Homo sapiens
  siRNA target sequence for FLJ23550 (NM_025063.1,1362-1380).
cagctcttgacgactctta

SEQ ID NO: 393433 - DNA, 19 bp, Homo sapiens
  siRNA target sequence for FLJ23550 (NM_025063.1,1454-1472).
gagagttctgctgaattgt

SEQ ID NO: 393434 - DNA, 19 bp, Homo sapiens
  siRNA target sequence for FLJ23550 (NM_025063.1,1477-1495).
gactgcaacaggtggatat

SEQ ID NO: 393435 - DNA, 19 bp, Homo sapiens
  siRNA target sequence for FLJ23550 (NM_025063.1,1517-1535).
ctgggaccagttatctgaa

SEQ ID NO: 393436 - DNA, 19 bp, Homo sapiens
  siRNA target sequence for FLJ23550 (NM_025063.1,1531-1549).
ctgaagatctgtgttacta

SEQ ID NO: 393437 - DNA, 19 bp, Homo sapiens
  siRNA target sequence for FLJ23550 (NM_025063.1,1555-1573).
gagtctgctttattgctaa

SEQ ID NO: 393438 - DNA, 19 bp, Homo sapiens
  siRNA target sequence for RPF1 (NM_025065.5,66-84).
ccgctgccgaagaacttca

SEQ ID NO: 393439 - DNA, 19 bp, Homo sapiens
  siRNA target sequence for RPF1 (NM_025065.5,184-202).
caaacagcggcgacactta

SEQ ID NO: 393440 - DNA, 19 bp, Homo sapiens
  siRNA target sequence for RPF1 (NM_025065.5,188-206).
cagcggcgacacttaatgt

SEQ ID NO: 393441 - DNA, 19 bp, Homo sapiens
  siRNA target sequence for RPF1 (NM_025065.5,191-209).
cggcgacacttaatgttca

SEQ ID NO: 393442 - DNA, 19 bp, Homo sapiens
  siRNA target sequence for RPF1 (NM_025065.5,325-343).
caaccagcgagtgtatgat

SEQ ID NO: 393443 - DNA, 19 bp, Homo sapiens
  siRNA target sequence for RPF1 (NM_025065.5,329-347).
cagcgagtgtatgatgaaa

SEQ ID NO: 393444 - DNA, 19 bp, Homo sapiens
  siRNA target sequence for RPF1 (NM_025065.5,348-366).
ccacagtagaccctaatga

SEQ ID NO: 393445 - DNA, 19 bp, Homo sapiens
  siRNA target sequence for RPF1 (NM_025065.5,395-413).
gatgaatttgcttcttact

SEQ ID NO: 393446 - DNA, 19 bp, Homo sapiens
  siRNA target sequence for RPF1 (NM_025065.5,431-449).
cccaagattctcatcacaa

SEQ ID NO: 393447 - DNA, 19 bp, Homo sapiens
  siRNA target sequence for RPF1 (NM_025065.5,436-454).
gattctcatcacaacatca

SEQ ID NO: 393448 - DNA, 19 bp, Homo sapiens
  siRNA target sequence for RPF1 (NM_025065.5,440-458).
ctcatcacaacatcagata

SEQ ID NO: 393449 - DNA, 19 bp, Homo sapiens
  siRNA target sequence for RPF1 (NM_025065.5,534-552).
gaggactggctctgaaaaa

SEQ ID NO: 393450 - DNA, 19 bp, Homo sapiens
  siRNA target sequence for RPF1 (NM_025065.5,568-586).
catcgcaagagatttcaca

SEQ ID NO: 393451 - DNA, 19 bp, Homo sapiens
  siRNA target sequence for RPF1 (NM_025065.5,585-603).
cagacctgattgttattaa

SEQ ID NO: 393452 - DNA, 19 bp, Homo sapiens
  siRNA target sequence for RPF1 (NM_025065.5,678-696).
gcagtgttcgtcttcgtaa

SEQ ID NO: 393453 - DNA, 19 bp, Homo sapiens
  siRNA target sequence for RPF1 (NM_025065.5,679-697).
cagtgttcgtcttcgtaaa

SEQ ID NO: 393454 - DNA, 19 bp, Homo sapiens
  siRNA target sequence for RPF1 (NM_025065.5,681-699).
gtgttcgtcttcgtaaaga

SEQ ID NO: 393455 - DNA, 19 bp, Homo sapiens
  siRNA target sequence for RPF1 (NM_025065.5,718-736).
ggaccccacagaacacata

SEQ ID NO: 393456 - DNA, 19 bp, Homo sapiens
  siRNA target sequence for RPF1 (NM_025065.5,726-744).
cagaacacatacctgaaat

SEQ ID NO: 393457 - DNA, 19 bp, Homo sapiens
  siRNA target sequence for RPF1 (NM_025065.5,765-783).
cacggctgggtcattcaat

SEQ ID NO: 393458 - DNA, 19 bp, Homo sapiens
  siRNA target sequence for RPF1 (NM_025065.5,851-869).
cacaatcaacgggattaca

SEQ ID NO: 393459 - DNA, 19 bp, Homo sapiens
  siRNA target sequence for RPF1 (NM_025065.5,853-871).
caatcaacgggattacata

SEQ ID NO: 393460 - DNA, 19 bp, Homo sapiens
  siRNA target sequence for RPF1 (NM_025065.5,860-878).
cgggattacatattcttca

SEQ ID NO: 393461 - DNA, 19 bp, Homo sapiens
  siRNA target sequence for RPF1 (NM_025065.5,879-897).
gatttcacagatacatatt

SEQ ID NO: 393462 - DNA, 19 bp, Homo sapiens
  siRNA target sequence for RPF1 (NM_025065.5,926-944).
gaacttggaccacgtttta

SEQ ID NO: 393463 - DNA, 19 bp, Homo sapiens
  siRNA target sequence for RPF1 (NM_025065.5,935-953).
ccacgttttaccttaaaat

SEQ ID NO: 393464 - DNA, 19 bp, Homo sapiens
  siRNA target sequence for RPF1 (NM_025065.5,972-990).
gaacctttgattctaaata

SEQ ID NO: 393465 - DNA, 19 bp, Homo sapiens
  siRNA target sequence for RPF1 (NM_025065.5,1019-1037).
cgggaaatggatacaagta

SEQ ID NO: 393466 - DNA, 19 bp, Homo sapiens
  siRNA target sequence for FLJ14299 (NM_025069.1,1324-1342).
gccgcgacccctattgctt

SEQ ID NO: 393467 - DNA, 19 bp, Homo sapiens
  siRNA target sequence for FLJ14299 (NM_025069.1,1658-1676).
gccgggagccgagaaactt

SEQ ID NO: 393468 - DNA, 19 bp, Homo sapiens
  siRNA target sequence for FLJ14299 (NM_025069.1,1660-1678).
cgggagccgagaaacttct

SEQ ID NO: 393469 - DNA, 19 bp, Homo sapiens
  siRNA target sequence for FLJ14299 (NM_025069.1,1892-1910).
cacagccggaccctactat

SEQ ID NO: 393470 - DNA, 19 bp, Homo sapiens
  siRNA target sequence for PTGES2 (NM_025072.4,945-963).
gagaaagctcgcaacaact

SEQ ID NO: 393471 - DNA, 19 bp, Homo sapiens
  siRNA target sequence for PTGES2 (NM_025072.4,951-969).
gctcgcaacaactaaatga

SEQ ID NO: 393472 - DNA, 19 bp, Homo sapiens
  siRNA target sequence for PTGES2 (NM_025072.4,1086-1104).
ccgagttcggcaataagta

SEQ ID NO: 393473 - DNA, 19 bp, Homo sapiens
  siRNA target sequence for PTGES2 (NM_025072.4,1088-1106).
gagttcggcaataagtact

SEQ ID NO: 393474 - DNA, 19 bp, Homo sapiens
  siRNA target sequence for PTGES2 (NM_025072.4,1126-1144).
ggaggcccagcaagtgtat

SEQ ID NO: 393475 - DNA, 19 bp, Homo sapiens
  siRNA target sequence for PTGES2 (NM_025072.4,1211-1229).
ctgatctcccccaatgtgt

SEQ ID NO: 393476 - DNA, 19 bp, Homo sapiens
  siRNA target sequence for PTGES2 (NM_025072.4,1247-1265).
gctctggcgtcctttgact

SEQ ID NO: 393477 - DNA, 19 bp, Homo sapiens
  siRNA target sequence for PTGES2 (NM_025072.4,1248-1266).
ctctggcgtcctttgacta

SEQ ID NO: 393478 - DNA, 19 bp, Homo sapiens
  siRNA target sequence for PTGES2 (NM_025072.4,1252-1270).
ggcgtcctttgactacatt

SEQ ID NO: 393479 - DNA, 19 bp, Homo sapiens
  siRNA target sequence for PTGES2 (NM_025072.4,1301-1319).
ggtgccgtggccaagtaca

SEQ ID NO: 393480 - DNA, 19 bp, Homo sapiens
  siRNA target sequence for FLJ21168 (NM_025073.1,75-93).
gctgcaccatcgagaagat

SEQ ID NO: 393481 - DNA, 19 bp, Homo sapiens
  siRNA target sequence for FLJ21168 (NM_025073.1,217-235).
gcttccggaccagtatcaa

SEQ ID NO: 393482 - DNA, 19 bp, Homo sapiens
  siRNA target sequence for FLJ21168 (NM_025073.1,293-311).
caagagaacacacagatta

SEQ ID NO: 393483 - DNA, 19 bp, Homo sapiens
  siRNA target sequence for FLJ21168 (NM_025073.1,333-351).
gagagctatggatttcctt

SEQ ID NO: 393484 - DNA, 19 bp, Homo sapiens
  siRNA target sequence for FLJ21168 (NM_025073.1,387-405).
gcaaatatcggaaacagat

SEQ ID NO: 393485 - DNA, 19 bp, Homo sapiens
  siRNA target sequence for FLJ21168 (NM_025073.1,395-413).
cggaaacagatgttacagt

SEQ ID NO: 393486 - DNA, 19 bp, Homo sapiens
  siRNA target sequence for FLJ21168 (NM_025073.1,403-421).
gatgttacagttaatggtt

SEQ ID NO: 393487 - DNA, 19 bp, Homo sapiens
  siRNA target sequence for FLJ21168 (NM_025073.1,470-488).
cactctgcagaaattgaga

SEQ ID NO: 393488 - DNA, 19 bp, Homo sapiens
  siRNA target sequence for FLJ21168 (NM_025073.1,581-599).
gcccaattagagcttgaaa

SEQ ID NO: 393489 - DNA, 19 bp, Homo sapiens
  siRNA target sequence for FLJ21168 (NM_025073.1,582-600).
cccaattagagcttgaaaa

SEQ ID NO: 393490 - DNA, 19 bp, Homo sapiens
  siRNA target sequence for FLJ21168 (NM_025073.1,583-601).
ccaattagagcttgaaaat

SEQ ID NO: 393491 - DNA, 19 bp, Homo sapiens
  siRNA target sequence for FLJ21168 (NM_025073.1,605-623).
gaacttcgagaattattgt

SEQ ID NO: 393492 - DNA, 19 bp, Homo sapiens
  siRNA target sequence for NIF3L1BP1 (NM_025075.1,53-71).
gtgactgacgacgaagtta

SEQ ID NO: 393493 - DNA, 19 bp, Homo sapiens
  siRNA target sequence for NIF3L1BP1 (NM_025075.1,55-73).
gactgacgacgaagttata

SEQ ID NO: 393494 - DNA, 19 bp, Homo sapiens
  siRNA target sequence for NIF3L1BP1 (NM_025075.1,75-93).
ggaagcgtctcctcattga

SEQ ID NO: 393495 - DNA, 19 bp, Homo sapiens
  siRNA target sequence for NIF3L1BP1 (NM_025075.1,130-148).
gctagtgaagagtttcatt

SEQ ID NO: 393496 - DNA, 19 bp, Homo sapiens
  siRNA target sequence for NIF3L1BP1 (NM_025075.1,207-225).
gcacgctgtctcaatgtga

SEQ ID NO: 393497 - DNA, 19 bp, Homo sapiens
  siRNA target sequence for NIF3L1BP1 (NM_025075.1,251-269).
gtatatgatatgaatctca

SEQ ID NO: 393498 - DNA, 19 bp, Homo sapiens
  siRNA target sequence for NIF3L1BP1 (NM_025075.1,346-364).
gtgcaaaaagcaaattctt

SEQ ID NO: 393499 - DNA, 19 bp, Homo sapiens
  siRNA target sequence for NIF3L1BP1 (NM_025075.1,355-373).
gcaaattcttcaagcaaaa

SEQ ID NO: 393500 - DNA, 19 bp, Homo sapiens
  siRNA target sequence for NIF3L1BP1 (NM_025075.1,432-450).
cagacaggcatgagacatt

SEQ ID NO: 393501 - DNA, 19 bp, Homo sapiens
  siRNA target sequence for NIF3L1BP1 (NM_025075.1,482-500).
gagcatctttcacacatta

SEQ ID NO: 393502 - DNA, 19 bp, Homo sapiens
  siRNA target sequence for NIF3L1BP1 (NM_025075.1,529-547).
gagacggaaacagtttcat

SEQ ID NO: 393503 - DNA, 19 bp, Homo sapiens
  siRNA target sequence for NIF3L1BP1 (NM_025075.1,531-549).
gacggaaacagtttcatgt

SEQ ID NO: 393504 - DNA, 19 bp, Homo sapiens
  siRNA target sequence for NIF3L1BP1 (NM_025075.1,558-576).
gtaccatccatgaacttca

SEQ ID NO: 393505 - DNA, 19 bp, Homo sapiens
  siRNA target sequence for FLJ22378 (NM_025078.3,372-390).
ggcagagcgccatcatgat

SEQ ID NO: 393506 - DNA, 19 bp, Homo sapiens
  siRNA target sequence for FLJ23231 (NM_025079.1,281-299).
ccggaagctgggctattca

SEQ ID NO: 393507 - DNA, 19 bp, Homo sapiens
  siRNA target sequence for FLJ23231 (NM_025079.1,282-300).
cggaagctgggctattcat

SEQ ID NO: 393508 - DNA, 19 bp, Homo sapiens
  siRNA target sequence for FLJ23231 (NM_025079.1,1060-1078).
ggatcaagtgccgattctt

SEQ ID NO: 393509 - DNA, 19 bp, Homo sapiens
  siRNA target sequence for FLJ23231 (NM_025079.1,1524-1542).
ggctacagtccctatggat

SEQ ID NO: 393510 - DNA, 19 bp, Homo sapiens
  siRNA target sequence for FLJ22596 (NM_025086.1,855-873).
gcaccccatgagatgcaaa

SEQ ID NO: 393511 - DNA, 19 bp, Homo sapiens
  siRNA target sequence for FLJ22596 (NM_025086.1,1121-1139).
gcaggagtagacacaatga

SEQ ID NO: 393512 - DNA, 19 bp, Homo sapiens
  siRNA target sequence for FLJ22596 (NM_025086.1,1188-1206).
ggtgccccaaggaggaatt

SEQ ID NO: 393513 - DNA, 19 bp, Homo sapiens
  siRNA target sequence for FLJ21511 (NM_025087.1,252-270).
gacctgggaccgatgatct

SEQ ID NO: 393514 - DNA, 19 bp, Homo sapiens
  siRNA target sequence for FLJ21511 (NM_025087.1,254-272).
cctgggaccgatgatctat

SEQ ID NO: 393515 - DNA, 19 bp, Homo sapiens
  siRNA target sequence for FLJ21511 (NM_025087.1,255-273).
ctgggaccgatgatctatt

SEQ ID NO: 393516 - DNA, 19 bp, Homo sapiens
  siRNA target sequence for FLJ21511 (NM_025087.1,258-276).
ggaccgatgatctattact

SEQ ID NO: 393517 - DNA, 19 bp, Homo sapiens
  siRNA target sequence for FLJ21511 (NM_025087.1,259-277).
gaccgatgatctattactt

SEQ ID NO: 393518 - DNA, 19 bp, Homo sapiens
  siRNA target sequence for FLJ21511 (NM_025087.1,299-317).
cactgggcttgaaggtttt

SEQ ID NO: 393519 - DNA, 19 bp, Homo sapiens
  siRNA target sequence for FLJ21511 (NM_025087.1,303-321).
gggcttgaaggttttagta

SEQ ID NO: 393520 - DNA, 19 bp, Homo sapiens
  siRNA target sequence for FLJ21511 (NM_025087.1,358-376).
ctttctggaaattggttaa

SEQ ID NO: 393521 - DNA, 19 bp, Homo sapiens
  siRNA target sequence for FLJ21511 (NM_025087.1,364-382).
ggaaattggttaacaagaa

SEQ ID NO: 393522 - DNA, 19 bp, Homo sapiens
  siRNA target sequence for FLJ21511 (NM_025087.1,395-413).
cctgctgaggataatcact

SEQ ID NO: 393523 - DNA, 19 bp, Homo sapiens
  siRNA target sequence for FLJ21511 (NM_025087.1,479-497).
ggtgtcttcctcactgata

SEQ ID NO: 393524 - DNA, 19 bp, Homo sapiens
  siRNA target sequence for FLJ21511 (NM_025087.1,517-535).
ggtcaggaagtcatttgca

SEQ ID NO: 393525 - DNA, 19 bp, Homo sapiens
  siRNA target sequence for FLJ21511 (NM_025087.1,518-536).
gtcaggaagtcatttgcaa

SEQ ID NO: 393526 - DNA, 19 bp, Homo sapiens
  siRNA target sequence for FLJ21511 (NM_025087.1,533-551).
gcaaaggtacctcagaatt

SEQ ID NO: 393527 - DNA, 19 bp, Homo sapiens
  siRNA target sequence for FLJ21511 (NM_025087.1,534-552).
caaaggtacctcagaattt

SEQ ID NO: 393528 - DNA, 19 bp, Homo sapiens
  siRNA target sequence for FLJ21511 (NM_025087.1,568-586).
gacagattgttcttgttgt

SEQ ID NO: 393529 - DNA, 19 bp, Homo sapiens
  siRNA target sequence for FLJ21511 (NM_025087.1,572-590).
gattgttcttgttgttcta

SEQ ID NO: 393530 - DNA, 19 bp, Homo sapiens
  siRNA target sequence for FLJ21511 (NM_025087.1,588-606).
ctacgcatatggtatactt

SEQ ID NO: 393531 - DNA, 19 bp, Homo sapiens
  siRNA target sequence for FLJ21511 (NM_025087.1,593-611).
catatggtatacttcacta

SEQ ID NO: 393532 - DNA, 19 bp, Homo sapiens
  siRNA target sequence for FLJ21511 (NM_025087.1,954-972).
cgtggtactggtttgatct

SEQ ID NO: 393533 - DNA, 19 bp, Homo sapiens
  siRNA target sequence for FLJ21511 (NM_025087.1,1127-1145).
catgaccattgccatgata

SEQ ID NO: 393534 - DNA, 19 bp, Homo sapiens
  siRNA target sequence for FLJ21511 (NM_025087.1,1173-1191).
gcctggtgcacagctttta

SEQ ID NO: 393535 - DNA, 19 bp, Homo sapiens
  siRNA target sequence for FLJ21511 (NM_025087.1,1174-1192).
cctggtgcacagcttttaa

SEQ ID NO: 393536 - DNA, 19 bp, Homo sapiens
  siRNA target sequence for FLJ21511 (NM_025087.1,1206-1224).
ggtgtctacgctagagaaa

SEQ ID NO: 393537 - DNA, 19 bp, Homo sapiens
  siRNA target sequence for FLJ21511 (NM_025087.1,1211-1229).
ctacgctagagaaagatca

SEQ ID NO: 393538 - DNA, 19 bp, Homo sapiens
  siRNA target sequence for FLJ21511 (NM_025087.1,1214-1232).
cgctagagaaagatcagat

SEQ ID NO: 393539 - DNA, 19 bp, Homo sapiens
  siRNA target sequence for FLJ21511 (NM_025087.1,1481-1499).
gcctttcaggtttggatat

SEQ ID NO: 393540 - DNA, 19 bp, Homo sapiens
  siRNA target sequence for FLJ21511 (NM_025087.1,1483-1501).
ctttcaggtttggatatga

SEQ ID NO: 393541 - DNA, 19 bp, Homo sapiens
  siRNA target sequence for FLJ21511 (NM_025087.1,1487-1505).
caggtttggatatgacaat

SEQ ID NO: 393542 - DNA, 19 bp, Homo sapiens
  siRNA target sequence for FLJ21511 (NM_025087.1,1558-1576).
cagatttcataacaatttt

SEQ ID NO: 393543 - DNA, 19 bp, Homo sapiens
  siRNA target sequence for FLJ21511 (NM_025087.1,1595-1613).
gccctatatggggaacaat

SEQ ID NO: 393544 - DNA, 19 bp, Homo sapiens
  siRNA target sequence for FLJ21511 (NM_025087.1,1597-1615).
cctatatggggaacaatga

SEQ ID NO: 393545 - DNA, 19 bp, Homo sapiens
  siRNA target sequence for FLJ21511 (NM_025087.1,1633-1651).
gggaaaagttgggtttcta

SEQ ID NO: 393546 - DNA, 19 bp, Homo sapiens
  siRNA target sequence for FLJ21511 (NM_025087.1,1634-1652).
ggaaaagttgggtttctat

SEQ ID NO: 393547 - DNA, 19 bp, Homo sapiens
  siRNA target sequence for FLJ21511 (NM_025087.1,1635-1653).
gaaaagttgggtttctata

SEQ ID NO: 393548 - DNA, 19 bp, Homo sapiens
  siRNA target sequence for FLJ21511 (NM_025087.1,1643-1661).
gggtttctatacagacttt

SEQ ID NO: 393549 - DNA, 19 bp, Homo sapiens
  siRNA target sequence for FLJ21511 (NM_025087.1,1775-1793).
cacattgaccgttaacatt

SEQ ID NO: 393550 - DNA, 19 bp, Homo sapiens
  siRNA target sequence for FLJ21511 (NM_025087.1,1862-1880).
gcaggctattgctgtttca

SEQ ID NO: 393551 - DNA, 19 bp, Homo sapiens
  siRNA target sequence for FLJ21511 (NM_025087.1,1889-1907).
gaaaagtagctctaatcaa

SEQ ID NO: 393552 - DNA, 19 bp, Homo sapiens
  siRNA target sequence for FLJ21511 (NM_025087.1,1894-1912).
gtagctctaatcaagtgat

SEQ ID NO: 393553 - DNA, 19 bp, Homo sapiens
  siRNA target sequence for FLJ21511 (NM_025087.1,1897-1915).
gctctaatcaagtgatatt

SEQ ID NO: 393554 - DNA, 19 bp, Homo sapiens
  siRNA target sequence for FLJ21511 (NM_025087.1,1971-1989).
catggcaatgtgaaggata

SEQ ID NO: 393555 - DNA, 19 bp, Homo sapiens
  siRNA target sequence for FLJ21511 (NM_025087.1,1975-1993).
gcaatgtgaaggatatcga

SEQ ID NO: 393556 - DNA, 19 bp, Homo sapiens
  siRNA target sequence for FLJ21511 (NM_025087.1,2014-2032).
ggtgtgaatacattatgta

SEQ ID NO: 393557 - DNA, 19 bp, Homo sapiens
  siRNA target sequence for FLJ21511 (NM_025087.1,2042-2060).
gatcaggttgggttatgca

SEQ ID NO: 393558 - DNA, 19 bp, Homo sapiens
  siRNA target sequence for FLJ21511 (NM_025087.1,2097-2115).
cagatggcaaaatttagga

SEQ ID NO: 393559 - DNA, 19 bp, Homo sapiens
  siRNA target sequence for FLJ21511 (NM_025087.1,2118-2136).
cctgatgaccccactaatt

SEQ ID NO: 393560 - DNA, 19 bp, Homo sapiens
  siRNA target sequence for FLJ21511 (NM_025087.1,2119-2137).
ctgatgaccccactaatta

SEQ ID NO: 393561 - DNA, 19 bp, Homo sapiens
  siRNA target sequence for FLJ21511 (NM_025087.1,2216-2234).
caaagaaggacacaattat

SEQ ID NO: 393562 - DNA, 19 bp, Homo sapiens
  siRNA target sequence for FLJ21511 (NM_025087.1,2220-2238).
gaaggacacaattatgaaa

SEQ ID NO: 393563 - DNA, 19 bp, Homo sapiens
  siRNA target sequence for FLJ13330 (NM_025091.2,67-85).
gaggaaacacactggaaat

SEQ ID NO: 393564 - DNA, 19 bp, Homo sapiens
  siRNA target sequence for FLJ13330 (NM_025091.2,70-88).
gaaacacactggaaatcgt

SEQ ID NO: 393565 - DNA, 19 bp, Homo sapiens
  siRNA target sequence for FLJ13330 (NM_025091.2,410-428).
gaaaaagtcacctggttta

SEQ ID NO: 393566 - DNA, 19 bp, Homo sapiens
  siRNA target sequence for FLJ13330 (NM_025091.2,418-436).
cacctggtttaaagacaaa

SEQ ID NO: 393567 - DNA, 19 bp, Homo sapiens
  siRNA target sequence for FLJ13330 (NM_025091.2,496-514).
ccacccgcatcctaaatca

SEQ ID NO: 393568 - DNA, 19 bp, Homo sapiens
  siRNA target sequence for FLJ22635 (NM_025092.1,389-407).
ggagccgtgaggaatgcta

SEQ ID NO: 393569 - DNA, 19 bp, Homo sapiens
  siRNA target sequence for FLJ22635 (NM_025092.1,730-748).
gctgtggccgagttttggt

SEQ ID NO: 393570 - DNA, 19 bp, Homo sapiens
  siRNA target sequence for FLJ22635 (NM_025092.1,1009-1027).
gaggactttttcagatgtt

SEQ ID NO: 393571 - DNA, 19 bp, Homo sapiens
  siRNA target sequence for FLJ23558 (NM_025095.1,514-532).
cttgctcatgtgaaacgaa

SEQ ID NO: 393572 - DNA, 19 bp, Homo sapiens
  siRNA target sequence for FLJ23558 (NM_025095.1,581-599).
ctttgcaatctggtactta

SEQ ID NO: 393573 - DNA, 19 bp, Homo sapiens
  siRNA target sequence for FLJ23558 (NM_025095.1,592-610).
ggtacttacagggttctaa

SEQ ID NO: 393574 - DNA, 19 bp, Homo sapiens
  siRNA target sequence for FLJ23558 (NM_025095.1,603-621).
ggttctaagtactccatta

SEQ ID NO: 393575 - DNA, 19 bp, Homo sapiens
  siRNA target sequence for FLJ23558 (NM_025095.1,604-622).
gttctaagtactccattaa

SEQ ID NO: 393576 - DNA, 19 bp, Homo sapiens
  siRNA target sequence for FLJ23558 (NM_025095.1,704-722).
cctgtaatttggatgacta

SEQ ID NO: 393577 - DNA, 19 bp, Homo sapiens
  siRNA target sequence for FLJ23558 (NM_025095.1,860-878).
ccggtactacatttgatga

SEQ ID NO: 393578 - DNA, 19 bp, Homo sapiens
  siRNA target sequence for FLJ23558 (NM_025095.1,861-879).
cggtactacatttgatgaa

SEQ ID NO: 393579 - DNA, 19 bp, Homo sapiens
  siRNA target sequence for FLJ23558 (NM_025095.1,862-880).
ggtactacatttgatgaat

SEQ ID NO: 393580 - DNA, 19 bp, Homo sapiens
  siRNA target sequence for FLJ23558 (NM_025095.1,905-923).
gtaccaggtttgaaaacaa

SEQ ID NO: 393581 - DNA, 19 bp, Homo sapiens
  siRNA target sequence for FLJ23558 (NM_025095.1,931-949).
gtgaataccaatgacttta

SEQ ID NO: 393582 - DNA, 19 bp, Homo sapiens
  siRNA target sequence for FLJ21106 (NM_025097.1,693-711).
cttccttagcggtatccaa

SEQ ID NO: 393583 - DNA, 19 bp, Homo sapiens
  siRNA target sequence for FLJ21106 (NM_025097.1,717-735).
ctaagcccatgccattgat

SEQ ID NO: 393584 - DNA, 19 bp, Homo sapiens
  siRNA target sequence for FLJ21106 (NM_025097.1,722-740).
cccatgccattgattccat

SEQ ID NO: 393585 - DNA, 19 bp, Homo sapiens
  siRNA target sequence for FLJ21106 (NM_025097.1,758-776).
gcatctggggtcttcacta

SEQ ID NO: 393586 - DNA, 19 bp, Homo sapiens
  siRNA target sequence for FLJ21106 (NM_025097.1,774-792).
ctacgggtgtgttgagtaa

SEQ ID NO: 393587 - DNA, 19 bp, Homo sapiens
  siRNA target sequence for FLJ21106 (NM_025097.1,930-948).
gtgcagacaagctaactaa

SEQ ID NO: 393588 - DNA, 19 bp, Homo sapiens
  siRNA target sequence for FLJ21106 (NM_025097.1,935-953).
gacaagctaactaacctta

SEQ ID NO: 393589 - DNA, 19 bp, Homo sapiens
  siRNA target sequence for FLJ21106 (NM_025097.1,937-955).
caagctaactaaccttaat

SEQ ID NO: 393590 - DNA, 19 bp, Homo sapiens
  siRNA target sequence for FLJ21106 (NM_025097.1,1013-1031).
gctgactgccataattcta

SEQ ID NO: 393591 - DNA, 19 bp, Homo sapiens
  siRNA target sequence for FLJ21106 (NM_025097.1,1021-1039).
ccataattctagcaaaaca

SEQ ID NO: 393592 - DNA, 19 bp, Homo sapiens
  siRNA target sequence for FLJ21106 (NM_025097.1,1061-1079).
ggactcttattgcaagata

SEQ ID NO: 393593 - DNA, 19 bp, Homo sapiens
  siRNA target sequence for FLJ21106 (NM_025097.1,1087-1105).
gatgaagcgcttcaatcaa

SEQ ID NO: 393594 - DNA, 19 bp, Homo sapiens
  siRNA target sequence for FLJ21106 (NM_025097.1,1117-1135).
caacaaaagtggttataca

SEQ ID NO: 393595 - DNA, 19 bp, Homo sapiens
  siRNA target sequence for FLJ21106 (NM_025097.1,1137-1155).
gtcgcaaccctcagtcata

SEQ ID NO: 393596 - DNA, 19 bp, Homo sapiens
  siRNA target sequence for FLJ21106 (NM_025097.1,1150-1168).
gtcataccacctacttagt

SEQ ID NO: 393597 - DNA, 19 bp, Homo sapiens
  siRNA target sequence for FLJ21106 (NM_025097.1,1152-1170).
cataccacctacttagtaa

SEQ ID NO: 393598 - DNA, 19 bp, Homo sapiens
  siRNA target sequence for FLJ21106 (NM_025097.1,1160-1178).
ctacttagtaaagaacaaa

SEQ ID NO: 393599 - DNA, 19 bp, Homo sapiens
  siRNA target sequence for FLJ21106 (NM_025097.1,1190-1208).
cttcggaaagagtctttaa

SEQ ID NO: 393600 - DNA, 19 bp, Homo sapiens
  siRNA target sequence for FLJ21106 (NM_025097.1,1193-1211).
cggaaagagtctttaatat

SEQ ID NO: 393601 - DNA, 19 bp, Homo sapiens
  siRNA target sequence for FLJ21106 (NM_025097.1,1220-1238).
ggagtcatggatgaatgta

SEQ ID NO: 393602 - DNA, 19 bp, Homo sapiens
  siRNA target sequence for FLJ21106 (NM_025097.1,1228-1246).
ggatgaatgtactcatgta

SEQ ID NO: 393603 - DNA, 19 bp, Homo sapiens
  siRNA target sequence for FLJ21106 (NM_025097.1,1265-1283).
gttgatccaagcctcatta

SEQ ID NO: 393604 - DNA, 19 bp, Homo sapiens
  siRNA target sequence for FLJ21106 (NM_025097.1,1326-1344).
gagttcgaagtttacaaga

SEQ ID NO: 393605 - DNA, 19 bp, Homo sapiens
  siRNA target sequence for FLJ21106 (NM_025097.1,1356-1374).
gttgtgaaatccgatactt

SEQ ID NO: 393606 - DNA, 19 bp, Homo sapiens
  siRNA target sequence for FLJ21106 (NM_025097.1,1359-1377).
gtgaaatccgatacttaga

SEQ ID NO: 393607 - DNA, 19 bp, Homo sapiens
  siRNA target sequence for FLJ21106 (NM_025097.1,1381-1399).
gggtcatattagtgcttat

SEQ ID NO: 393608 - DNA, 19 bp, Homo sapiens
  siRNA target sequence for FLJ22170 (NM_025099.1,420-438).
gccctcatgaagcgtaatt

SEQ ID NO: 393609 - DNA, 19 bp, Homo sapiens
  siRNA target sequence for FLJ22170 (NM_025099.1,421-439).
ccctcatgaagcgtaattt

SEQ ID NO: 393610 - DNA, 19 bp, Homo sapiens
  siRNA target sequence for FLJ22170 (NM_025099.1,422-440).
cctcatgaagcgtaatttt

SEQ ID NO: 393611 - DNA, 19 bp, Homo sapiens
  siRNA target sequence for FLJ22170 (NM_025099.1,423-441).
ctcatgaagcgtaattttt

SEQ ID NO: 393612 - DNA, 19 bp, Homo sapiens
  siRNA target sequence for FLJ22170 (NM_025099.1,480-498).
gccctcagtttctatgtgt

SEQ ID NO: 393613 - DNA, 19 bp, Homo sapiens
  siRNA target sequence for FLJ22170 (NM_025099.1,582-600).
cagaaggttcacctcattt

SEQ ID NO: 393614 - DNA, 19 bp, Homo sapiens
  siRNA target sequence for FLJ22170 (NM_025099.1,613-631).
cagtccgctggtttgagtt

SEQ ID NO: 393615 - DNA, 19 bp, Homo sapiens
  siRNA target sequence for FLJ22170 (NM_025099.1,673-691).
ccgctacaccaatgttgtt

SEQ ID NO: 393616 - DNA, 19 bp, Homo sapiens
  siRNA target sequence for FLJ22170 (NM_025099.1,674-692).
cgctacaccaatgttgttt

SEQ ID NO: 393617 - DNA, 19 bp, Homo sapiens
  siRNA target sequence for FLJ22170 (NM_025099.1,676-694).
ctacaccaatgttgtttga

SEQ ID NO: 393618 - DNA, 19 bp, Homo sapiens
  siRNA target sequence for FLJ22170 (NM_025099.1,699-717).
gatggttcatcctgcatat

SEQ ID NO: 393619 - DNA, 19 bp, Homo sapiens
  siRNA target sequence for FLJ22170 (NM_025099.1,860-878).
gctcagtgacaatttcaca

SEQ ID NO: 393620 - DNA, 19 bp, Homo sapiens
  siRNA target sequence for FLJ22170 (NM_025099.1,890-908).
gtctttctccgctgagatt

SEQ ID NO: 393621 - DNA, 19 bp, Homo sapiens
  siRNA target sequence for FLJ22170 (NM_025099.1,892-910).
ctttctccgctgagatttt

SEQ ID NO: 393622 - DNA, 19 bp, Homo sapiens
  siRNA target sequence for FLJ22170 (NM_025099.1,896-914).
ctccgctgagattttgtca

SEQ ID NO: 393623 - DNA, 19 bp, Homo sapiens
  siRNA target sequence for FLJ22170 (NM_025099.1,938-956).
ggcgtctctctggatgaaa

SEQ ID NO: 393624 - DNA, 19 bp, Homo sapiens
  siRNA target sequence for FLJ22170 (NM_025099.1,940-958).
cgtctctctggatgaaact

SEQ ID NO: 393625 - DNA, 19 bp, Homo sapiens
  siRNA target sequence for FLJ22170 (NM_025099.1,982-1000).
ggtgtgtgaagctaacagt

SEQ ID NO: 393626 - DNA, 19 bp, Homo sapiens
  siRNA target sequence for FLJ22170 (NM_025099.1,1029-1047).
ccccctcacctggatgtat

SEQ ID NO: 393627 - DNA, 19 bp, Homo sapiens
  siRNA target sequence for FLJ22170 (NM_025099.1,1031-1049).
ccctcacctggatgtatat

SEQ ID NO: 393628 - DNA, 19 bp, Homo sapiens
  siRNA target sequence for FLJ22170 (NM_025099.1,1032-1050).
cctcacctggatgtatata

SEQ ID NO: 393629 - DNA, 19 bp, Homo sapiens
  siRNA target sequence for FLJ22170 (NM_025099.1,1229-1247).
catctacctggctgaactt

SEQ ID NO: 393630 - DNA, 19 bp, Homo sapiens
  siRNA target sequence for FLJ22170 (NM_025099.1,1279-1297).
ctgcctcttgccatatcgt

SEQ ID NO: 393631 - DNA, 19 bp, Homo sapiens
  siRNA target sequence for FLJ22170 (NM_025099.1,1388-1406).
ccctacgcagacagctata

SEQ ID NO: 393632 - DNA, 19 bp, Homo sapiens
  siRNA target sequence for FLJ22170 (NM_025099.1,1389-1407).
cctacgcagacagctataa

SEQ ID NO: 393633 - DNA, 19 bp, Homo sapiens
  siRNA target sequence for FLJ22170 (NM_025099.1,1625-1643).
cctctggacactttgtact

SEQ ID NO: 393634 - DNA, 19 bp, Homo sapiens
  siRNA target sequence for FLJ22170 (NM_025099.1,1659-1677).
cgtcctattgtgctttctt

SEQ ID NO: 393635 - DNA, 19 bp, Homo sapiens
  siRNA target sequence for FLJ22170 (NM_025099.1,1699-1717).
cgaagatcgtcccattaga

SEQ ID NO: 393636 - DNA, 19 bp, Homo sapiens
  siRNA target sequence for CCDC2 (NM_025103.1,765-783).
caacagatgacattatcaa

SEQ ID NO: 393637 - DNA, 19 bp, Homo sapiens
  siRNA target sequence for CCDC2 (NM_025103.1,857-875).
gatacacttcaacaacaat

SEQ ID NO: 393638 - DNA, 19 bp, Homo sapiens
  siRNA target sequence for CCDC2 (NM_025103.1,861-879).
cacttcaacaacaattgga

SEQ ID NO: 393639 - DNA, 19 bp, Homo sapiens
  siRNA target sequence for CCDC2 (NM_025103.1,921-939).
ctcactcccaggtgaaaca

SEQ ID NO: 393640 - DNA, 19 bp, Homo sapiens
  siRNA target sequence for CCDC2 (NM_025103.1,976-994).
ggagtcccatcgagatcaa

SEQ ID NO: 393641 - DNA, 19 bp, Homo sapiens
  siRNA target sequence for CCDC2 (NM_025103.1,977-995).
gagtcccatcgagatcaaa

SEQ ID NO: 393642 - DNA, 19 bp, Homo sapiens
  siRNA target sequence for CCDC2 (NM_025103.1,981-999).
cccatcgagatcaaatgat

SEQ ID NO: 393643 - DNA, 19 bp, Homo sapiens
  siRNA target sequence for CCDC2 (NM_025103.1,982-1000).
ccatcgagatcaaatgatt

SEQ ID NO: 393644 - DNA, 19 bp, Homo sapiens
  siRNA target sequence for CCDC2 (NM_025103.1,1015-1033).
cataggatctccaatggaa

SEQ ID NO: 393645 - DNA, 19 bp, Homo sapiens
  siRNA target sequence for CCDC2 (NM_025103.1,1038-1056).
gagagaaattacttaagca

SEQ ID NO: 393646 - DNA, 19 bp, Homo sapiens
  siRNA target sequence for CCDC2 (NM_025103.1,1219-1237).
ggaacatatggacactttt

SEQ ID NO: 393647 - DNA, 19 bp, Homo sapiens
  siRNA target sequence for CCDC2 (NM_025103.1,1288-1306).
gatagaagccaacattgtt

SEQ ID NO: 393648 - DNA, 19 bp, Homo sapiens
  siRNA target sequence for CCDC2 (NM_025103.1,1316-1334).
gagcactgcagtcgaaata

SEQ ID NO: 393649 - DNA, 19 bp, Homo sapiens
  siRNA target sequence for CCDC2 (NM_025103.1,1318-1336).
gcactgcagtcgaaatata

SEQ ID NO: 393650 - DNA, 19 bp, Homo sapiens
  siRNA target sequence for CCDC2 (NM_025103.1,1319-1337).
cactgcagtcgaaatataa

SEQ ID NO: 393651 - DNA, 19 bp, Homo sapiens
  siRNA target sequence for CCDC2 (NM_025103.1,1324-1342).
cagtcgaaatataaatcgt

SEQ ID NO: 393652 - DNA, 19 bp, Homo sapiens
  siRNA target sequence for CCDC2 (NM_025103.1,1326-1344).
gtcgaaatataaatcgtat

SEQ ID NO: 393653 - DNA, 19 bp, Homo sapiens
  siRNA target sequence for CCDC2 (NM_025103.1,1329-1347).
gaaatataaatcgtataga

SEQ ID NO: 393654 - DNA, 19 bp, Homo sapiens
  siRNA target sequence for CCDC2 (NM_025103.1,1356-1374).
cctctatcaccaatcaaga

SEQ ID NO: 393655 - DNA, 19 bp, Homo sapiens
  siRNA target sequence for CCDC2 (NM_025103.1,1365-1383).
ccaatcaagagctaaagat

SEQ ID NO: 393656 - DNA, 19 bp, Homo sapiens
  siRNA target sequence for CCDC2 (NM_025103.1,1387-1405).
gcaggatgacctcaatttt

SEQ ID NO: 393657 - DNA, 19 bp, Homo sapiens
  siRNA target sequence for CCDC2 (NM_025103.1,1388-1406).
caggatgacctcaatttta

SEQ ID NO: 393658 - DNA, 19 bp, Homo sapiens
  siRNA target sequence for CCDC2 (NM_025103.1,1628-1646).
catcaggagagaatgatat

SEQ ID NO: 393659 - DNA, 19 bp, Homo sapiens
  siRNA target sequence for CCDC2 (NM_025103.1,1631-1649).
caggagagaatgatattat

SEQ ID NO: 393660 - DNA, 19 bp, Homo sapiens
  siRNA target sequence for CCDC2 (NM_025103.1,1633-1651).
ggagagaatgatattatca

SEQ ID NO: 393661 - DNA, 19 bp, Homo sapiens
  siRNA target sequence for CCDC2 (NM_025103.1,1697-1715).
gagtatgaggcactaaaaa

SEQ ID NO: 393662 - DNA, 19 bp, Homo sapiens
  siRNA target sequence for CCDC2 (NM_025103.1,1833-1851).
gtgattaccagccaattaa

SEQ ID NO: 393663 - DNA, 19 bp, Homo sapiens
  siRNA target sequence for CCDC2 (NM_025103.1,1835-1853).
gattaccagccaattaaga

SEQ ID NO: 393664 - DNA, 19 bp, Homo sapiens
  siRNA target sequence for MYCT1 (NM_025107.1,21-39).
ggggttgtgtaaaaattat

SEQ ID NO: 393665 - DNA, 19 bp, Homo sapiens
  siRNA target sequence for MYCT1 (NM_025107.1,22-40).
gggttgtgtaaaaattatt

SEQ ID NO: 393666 - DNA, 19 bp, Homo sapiens
  siRNA target sequence for MYCT1 (NM_025107.1,23-41).
ggttgtgtaaaaattattt

SEQ ID NO: 393667 - DNA, 19 bp, Homo sapiens
  siRNA target sequence for MYCT1 (NM_025107.1,55-73).
ctacaaagagatagaatca

SEQ ID NO: 393668 - DNA, 19 bp, Homo sapiens
  siRNA target sequence for MYCT1 (NM_025107.1,139-157).
gatattatggctaataaca

SEQ ID NO: 393669 - DNA, 19 bp, Homo sapiens
  siRNA target sequence for MYCT1 (NM_025107.1,448-466).
ctggaacaagcaaattcct

SEQ ID NO: 393670 - DNA, 19 bp, Homo sapiens
  siRNA target sequence for MYCT1 (NM_025107.1,454-472).
caagcaaattcctttccaa

SEQ ID NO: 393671 - DNA, 19 bp, Homo sapiens
  siRNA target sequence for MYCT1 (NM_025107.1,458-476).
caaattcctttccaagaaa

SEQ ID NO: 393672 - DNA, 19 bp, Homo sapiens
  siRNA target sequence for MYCT1 (NM_025107.1,486-504).
cagagcttctactttccat

SEQ ID NO: 393673 - DNA, 19 bp, Homo sapiens
  siRNA target sequence for MYCT1 (NM_025107.1,561-579).
cccttcttccaatatctct

SEQ ID NO: 393674 - DNA, 19 bp, Homo sapiens
  siRNA target sequence for MYCT1 (NM_025107.1,616-634).
gactactggtccagtaaca

SEQ ID NO: 393675 - DNA, 19 bp, Homo sapiens
  siRNA target sequence for MYCT1 (NM_025107.1,637-655).
cttcgagtgggcctttcaa

SEQ ID NO: 393676 - DNA, 19 bp, Homo sapiens
  siRNA target sequence for FLJ13909 (NM_025108.1,1371-1389).
gagcacgtgtccttaccat

SEQ ID NO: 393677 - DNA, 19 bp, Homo sapiens
  siRNA target sequence for C13orf18 (NM_025113.1,297-315).
gcgatcactctggcattat

SEQ ID NO: 393678 - DNA, 19 bp, Homo sapiens
  siRNA target sequence for C13orf18 (NM_025113.1,351-369).
ctccttgccaattagacat

SEQ ID NO: 393679 - DNA, 19 bp, Homo sapiens
  siRNA target sequence for C13orf18 (NM_025113.1,426-444).
cgcaggacttgcaatctca

SEQ ID NO: 393680 - DNA, 19 bp, Homo sapiens
  siRNA target sequence for C13orf18 (NM_025113.1,587-605).
ccccatggctcgagtgaaa

SEQ ID NO: 393681 - DNA, 19 bp, Homo sapiens
  siRNA target sequence for C13orf18 (NM_025113.1,588-606).
cccatggctcgagtgaaaa

SEQ ID NO: 393682 - DNA, 19 bp, Homo sapiens
  siRNA target sequence for C13orf18 (NM_025113.1,590-608).
catggctcgagtgaaaaga

SEQ ID NO: 393683 - DNA, 19 bp, Homo sapiens
  siRNA target sequence for C13orf18 (NM_025113.1,593-611).
ggctcgagtgaaaagagta

SEQ ID NO: 393684 - DNA, 19 bp, Homo sapiens
  siRNA target sequence for C13orf18 (NM_025113.1,627-645).
cctcaacagaggtacacat

SEQ ID NO: 393685 - DNA, 19 bp, Homo sapiens
  siRNA target sequence for C13orf18 (NM_025113.1,719-737).
gagactgacagtgcttttt

SEQ ID NO: 393686 - DNA, 19 bp, Homo sapiens
  siRNA target sequence for C13orf18 (NM_025113.1,813-831).
ccttctcaccagaggtatt

SEQ ID NO: 393687 - DNA, 19 bp, Homo sapiens
  siRNA target sequence for C13orf18 (NM_025113.1,814-832).
cttctcaccagaggtattt

SEQ ID NO: 393688 - DNA, 19 bp, Homo sapiens
  siRNA target sequence for C13orf18 (NM_025113.1,980-998).
gatcagcctgactctgaaa

SEQ ID NO: 393689 - DNA, 19 bp, Homo sapiens
  siRNA target sequence for C13orf18 (NM_025113.1,1025-1043).
gagtctgggtcttctactt

SEQ ID NO: 393690 - DNA, 19 bp, Homo sapiens
  siRNA target sequence for C13orf18 (NM_025113.1,1101-1119).
cacgtacttaccatgatgt

SEQ ID NO: 393691 - DNA, 19 bp, Homo sapiens
  siRNA target sequence for C13orf18 (NM_025113.1,1104-1122).
gtacttaccatgatgtgaa

SEQ ID NO: 393692 - DNA, 19 bp, Homo sapiens
  siRNA target sequence for C13orf18 (NM_025113.1,1131-1149).
gcaaatgcgatgttgatga

SEQ ID NO: 393693 - DNA, 19 bp, Homo sapiens
  siRNA target sequence for C13orf18 (NM_025113.1,1137-1155).
gcgatgttgatgaatttgt

SEQ ID NO: 393694 - DNA, 19 bp, Homo sapiens
  siRNA target sequence for C13orf18 (NM_025113.1,1138-1156).
cgatgttgatgaatttgtt

SEQ ID NO: 393695 - DNA, 19 bp, Homo sapiens
  siRNA target sequence for C13orf18 (NM_025113.1,1215-1233).
cctctaagagtgtcactta

SEQ ID NO: 393696 - DNA, 19 bp, Homo sapiens
  siRNA target sequence for C13orf18 (NM_025113.1,1216-1234).
ctctaagagtgtcacttat

SEQ ID NO: 393697 - DNA, 19 bp, Homo sapiens
  siRNA target sequence for C13orf18 (NM_025113.1,1218-1236).
ctaagagtgtcacttatga

SEQ ID NO: 393698 - DNA, 19 bp, Homo sapiens
  siRNA target sequence for C13orf18 (NM_025113.1,1243-1261).
cttcaattctgcagaacta

SEQ ID NO: 393699 - DNA, 19 bp, Homo sapiens
  siRNA target sequence for C13orf18 (NM_025113.1,1246-1264).
caattctgcagaactatta

SEQ ID NO: 393700 - DNA, 19 bp, Homo sapiens
  siRNA target sequence for C13orf18 (NM_025113.1,1347-1365).
ctggctcgatagtcgtaaa

SEQ ID NO: 393701 - DNA, 19 bp, Homo sapiens
  siRNA target sequence for C13orf18 (NM_025113.1,1350-1368).
gctcgatagtcgtaaatga

SEQ ID NO: 393702 - DNA, 19 bp, Homo sapiens
  siRNA target sequence for C13orf18 (NM_025113.1,1351-1369).
ctcgatagtcgtaaatgaa

SEQ ID NO: 393703 - DNA, 19 bp, Homo sapiens
  siRNA target sequence for C13orf18 (NM_025113.1,1353-1371).
cgatagtcgtaaatgaaga

SEQ ID NO: 393704 - DNA, 19 bp, Homo sapiens
  siRNA target sequence for C13orf18 (NM_025113.1,1370-1388).
gagtgtgtccgaaaagact

SEQ ID NO: 393705 - DNA, 19 bp, Homo sapiens
  siRNA target sequence for C13orf18 (NM_025113.1,1372-1390).
gtgtgtccgaaaagacttt

SEQ ID NO: 393706 - DNA, 19 bp, Homo sapiens
  siRNA target sequence for C13orf18 (NM_025113.1,1376-1394).
gtccgaaaagactttgaat

SEQ ID NO: 393707 - DNA, 19 bp, Homo sapiens
  siRNA target sequence for C13orf18 (NM_025113.1,1385-1403).
gactttgaatccagtatga

SEQ ID NO: 393708 - DNA, 19 bp, Homo sapiens
  siRNA target sequence for C13orf18 (NM_025113.1,1387-1405).
ctttgaatccagtatgaat

SEQ ID NO: 393709 - DNA, 19 bp, Homo sapiens
  siRNA target sequence for C13orf18 (NM_025113.1,1414-1432).
ggaaattaaatttaagtct

SEQ ID NO: 393710 - DNA, 19 bp, Homo sapiens
  siRNA target sequence for C13orf18 (NM_025113.1,1455-1473).
gggctcctcctagatttca

SEQ ID NO: 393711 - DNA, 19 bp, Homo sapiens
  siRNA target sequence for C13orf18 (NM_025113.1,1516-1534).
ggtggcagcccagaatttt

SEQ ID NO: 393712 - DNA, 19 bp, Homo sapiens
  siRNA target sequence for C13orf18 (NM_025113.1,1554-1572).
ctccagtagagcctaagtt

SEQ ID NO: 393713 - DNA, 19 bp, Homo sapiens
  siRNA target sequence for C13orf18 (NM_025113.1,1557-1575).
cagtagagcctaagtttgt

SEQ ID NO: 393714 - DNA, 19 bp, Homo sapiens
  siRNA target sequence for C13orf18 (NM_025113.1,1559-1577).
gtagagcctaagtttgtga

SEQ ID NO: 393715 - DNA, 19 bp, Homo sapiens
  siRNA target sequence for C13orf18 (NM_025113.1,1585-1603).
ccggtactgcgaataccta

SEQ ID NO: 393716 - DNA, 19 bp, Homo sapiens
  siRNA target sequence for C13orf18 (NM_025113.1,1594-1612).
cgaatacctagggaagtat

SEQ ID NO: 393717 - DNA, 19 bp, Homo sapiens
  siRNA target sequence for C13orf18 (NM_025113.1,1595-1613).
gaatacctagggaagtatt

SEQ ID NO: 393718 - DNA, 19 bp, Homo sapiens
  siRNA target sequence for C13orf18 (NM_025113.1,1617-1635).
gtgactgctgccactcata

SEQ ID NO: 393719 - DNA, 19 bp, Homo sapiens
  siRNA target sequence for C13orf18 (NM_025113.1,1653-1671).
ctgcccgaatcctgatgat

SEQ ID NO: 393720 - DNA, 19 bp, Homo sapiens
  siRNA target sequence for C13orf18 (NM_025113.1,1655-1673).
gcccgaatcctgatgatgt

SEQ ID NO: 393721 - DNA, 19 bp, Homo sapiens
  siRNA target sequence for C13orf18 (NM_025113.1,1712-1730).
cagctgctcgacagcatat

SEQ ID NO: 393722 - DNA, 19 bp, Homo sapiens
  siRNA target sequence for C13orf18 (NM_025113.1,1843-1861).
gttgaagacctgtaggttt

SEQ ID NO: 393723 - DNA, 19 bp, Homo sapiens
  siRNA target sequence for C13orf18 (NM_025113.1,1897-1915).
gaattttgccagaatacga

SEQ ID NO: 393724 - DNA, 19 bp, Homo sapiens
  siRNA target sequence for C13orf18 (NM_025113.1,1933-1951).
cagacagcaacatgtagaa

SEQ ID NO: 393725 - DNA, 19 bp, Homo sapiens
  siRNA target sequence for C13orf18 (NM_025113.1,2022-2040).
gatcacagcgaggagaaaa

SEQ ID NO: 393726 - DNA, 19 bp, Homo sapiens
  siRNA target sequence for C13orf18 (NM_025113.1,2056-2074).
gcctctgcagcaacatgat

SEQ ID NO: 393727 - DNA, 19 bp, Homo sapiens
  siRNA target sequence for C13orf18 (NM_025113.1,2076-2094).
cccctgagtactgtgaaaa

SEQ ID NO: 393728 - DNA, 19 bp, Homo sapiens
  siRNA target sequence for C13orf18 (NM_025113.1,2081-2099).
gagtactgtgaaaaagact

SEQ ID NO: 393729 - DNA, 19 bp, Homo sapiens
  siRNA target sequence for C13orf18 (NM_025113.1,2121-2139).
caccgatttgtgtctatta

SEQ ID NO: 393730 - DNA, 19 bp, Homo sapiens
  siRNA target sequence for C13orf18 (NM_025113.1,2123-2141).
ccgatttgtgtctattatt

SEQ ID NO: 393731 - DNA, 19 bp, Homo sapiens
  siRNA target sequence for FLJ13615 (NM_025114.1,414-432).
ctggcagataatttattga

SEQ ID NO: 393732 - DNA, 19 bp, Homo sapiens
  siRNA target sequence for FLJ13615 (NM_025114.1,416-434).
ggcagataatttattgatt

SEQ ID NO: 393733 - DNA, 19 bp, Homo sapiens
  siRNA target sequence for FLJ13615 (NM_025114.1,486-504).
gtgatacaccttttcagaa

SEQ ID NO: 393734 - DNA, 19 bp, Homo sapiens
  siRNA target sequence for FLJ13615 (NM_025114.1,664-682).
gacgagatactcggttttt

SEQ ID NO: 393735 - DNA, 19 bp, Homo sapiens
  siRNA target sequence for FLJ13615 (NM_025114.1,669-687).
gatactcggtttttacgta

SEQ ID NO: 393736 - DNA, 19 bp, Homo sapiens
  siRNA target sequence for FLJ13615 (NM_025114.1,673-691).
ctcggtttttacgtaatga

SEQ ID NO: 393737 - DNA, 19 bp, Homo sapiens
  siRNA target sequence for FLJ13615 (NM_025114.1,675-693).
cggtttttacgtaatgaaa

SEQ ID NO: 393738 - DNA, 19 bp, Homo sapiens
  siRNA target sequence for FLJ13615 (NM_025114.1,837-855).
gagaacaaacgtctaaaga

SEQ ID NO: 393739 - DNA, 19 bp, Homo sapiens
  siRNA target sequence for FLJ13615 (NM_025114.1,874-892).
gtcaggatattattgacta

SEQ ID NO: 393740 - DNA, 19 bp, Homo sapiens
  siRNA target sequence for FLJ13615 (NM_025114.1,956-974).
ccgatcacagttgtctaaa

SEQ ID NO: 393741 - DNA, 19 bp, Homo sapiens
  siRNA target sequence for FLJ13615 (NM_025114.1,957-975).
cgatcacagttgtctaaaa

SEQ ID NO: 393742 - DNA, 19 bp, Homo sapiens
  siRNA target sequence for FLJ13615 (NM_025114.1,965-983).
gttgtctaaaaaaaactat

SEQ ID NO: 393743 - DNA, 19 bp, Homo sapiens
  siRNA target sequence for FLJ13615 (NM_025114.1,980-998).
ctatgagcttatccaatat

SEQ ID NO: 393744 - DNA, 19 bp, Homo sapiens
  siRNA target sequence for FLJ13615 (NM_025114.1,986-1004).
gcttatccaatatcttgat

SEQ ID NO: 393745 - DNA, 19 bp, Homo sapiens
  siRNA target sequence for FLJ13615 (NM_025114.1,992-1010).
ccaatatcttgatgaaatt

SEQ ID NO: 393746 - DNA, 19 bp, Homo sapiens
  siRNA target sequence for FLJ13615 (NM_025114.1,1044-1062).
gttcagaatcaagaaatga

SEQ ID NO: 393747 - DNA, 19 bp, Homo sapiens
  siRNA target sequence for FLJ13615 (NM_025114.1,1136-1154).
gcatcagacagataatgta

SEQ ID NO: 393748 - DNA, 19 bp, Homo sapiens
  siRNA target sequence for FLJ13615 (NM_025114.1,1142-1160).
gacagataatgtaatagat

SEQ ID NO: 393749 - DNA, 19 bp, Homo sapiens
  siRNA target sequence for FLJ13615 (NM_025114.1,1178-1196).
cgatcattatcaacttcaa

SEQ ID NO: 393750 - DNA, 19 bp, Homo sapiens
  siRNA target sequence for FLJ13615 (NM_025114.1,1328-1346).
gcaaatgttacataaccta

SEQ ID NO: 393751 - DNA, 19 bp, Homo sapiens
  siRNA target sequence for FLJ13615 (NM_025114.1,1329-1347).
caaatgttacataacctaa

SEQ ID NO: 393752 - DNA, 19 bp, Homo sapiens
  siRNA target sequence for FLJ13615 (NM_025114.1,1370-1388).
gcttgatgctgataaaagt

SEQ ID NO: 393753 - DNA, 19 bp, Homo sapiens
  siRNA target sequence for FLJ13615 (NM_025114.1,1377-1395).
gctgataaaagtaatgtta

SEQ ID NO: 393754 - DNA, 19 bp, Homo sapiens
  siRNA target sequence for FLJ13615 (NM_025114.1,1399-1417).
ctctacagcagggtataca

SEQ ID NO: 393755 - DNA, 19 bp, Homo sapiens
  siRNA target sequence for FLJ13615 (NM_025114.1,1416-1434).
caggaacgagacagtcaaa

SEQ ID NO: 393756 - DNA, 19 bp, Homo sapiens
  siRNA target sequence for FLJ13615 (NM_025114.1,1419-1437).
gaacgagacagtcaaatta

SEQ ID NO: 393757 - DNA, 19 bp, Homo sapiens
  siRNA target sequence for FLJ13615 (NM_025114.1,1422-1440).
cgagacagtcaaattaaga

SEQ ID NO: 393758 - DNA, 19 bp, Homo sapiens
  siRNA target sequence for FLJ13615 (NM_025114.1,1439-1457).
gatgctcaccgaacaagta

SEQ ID NO: 393759 - DNA, 19 bp, Homo sapiens
  siRNA target sequence for FLJ13615 (NM_025114.1,1442-1460).
gctcaccgaacaagtagaa

SEQ ID NO: 393760 - DNA, 19 bp, Homo sapiens
  siRNA target sequence for FLJ13615 (NM_025114.1,1448-1466).
cgaacaagtagaacaatat

SEQ ID NO: 393761 - DNA, 19 bp, Homo sapiens
  siRNA target sequence for FLJ13615 (NM_025114.1,1489-1507).
cttgtattattgaagattt

SEQ ID NO: 393762 - DNA, 19 bp, Homo sapiens
  siRNA target sequence for FLJ13615 (NM_025114.1,1534-1552).
gtgcttcaaccctttctca

SEQ ID NO: 393763 - DNA, 19 bp, Homo sapiens
  siRNA target sequence for FLJ13615 (NM_025114.1,1572-1590).
cagtcaacgttagacattt

SEQ ID NO: 393764 - DNA, 19 bp, Homo sapiens
  siRNA target sequence for FLJ13615 (NM_025114.1,1574-1592).
gtcaacgttagacatttta

SEQ ID NO: 393765 - DNA, 19 bp, Homo sapiens
  siRNA target sequence for FLJ13615 (NM_025114.1,1698-1716).
gaatcgggagtatatggtt

SEQ ID NO: 393766 - DNA, 19 bp, Homo sapiens
  siRNA target sequence for FLJ13615 (NM_025114.1,1702-1720).
cgggagtatatggtttaga

SEQ ID NO: 393767 - DNA, 19 bp, Homo sapiens
  siRNA target sequence for FLJ13615 (NM_025114.1,1770-1788).
gatcgagagattgaaatat

SEQ ID NO: 393768 - DNA, 19 bp, Homo sapiens
  siRNA target sequence for FLJ13615 (NM_025114.1,1773-1791).
cgagagattgaaatattaa

SEQ ID NO: 393769 - DNA, 19 bp, Homo sapiens
  siRNA target sequence for FLJ13615 (NM_025114.1,1866-1884).
ggccttgaaccaaagacaa

SEQ ID NO: 393770 - DNA, 19 bp, Homo sapiens
  siRNA target sequence for FLJ13615 (NM_025114.1,1880-1898).
gacaatgattgatttaact

SEQ ID NO: 393771 - DNA, 19 bp, Homo sapiens
  siRNA target sequence for FLJ13615 (NM_025114.1,1882-1900).
caatgattgatttaactga

SEQ ID NO: 393772 - DNA, 19 bp, Homo sapiens
  siRNA target sequence for FLJ13615 (NM_025114.1,1989-2007).
cgacttgatctgaaaaaaa

SEQ ID NO: 393773 - DNA, 19 bp, Homo sapiens
  siRNA target sequence for FLJ13615 (NM_025114.1,2047-2065).
gcaacttcaggattaacca

SEQ ID NO: 393774 - DNA, 19 bp, Homo sapiens
  siRNA target sequence for FLJ23263 (NM_025115.1,454-472).
catcgcaggaagactctaa

SEQ ID NO: 393775 - DNA, 19 bp, Homo sapiens
  siRNA target sequence for FLJ23263 (NM_025115.1,765-783).
gcccaagttgggttactgt

SEQ ID NO: 393776 - DNA, 19 bp, Homo sapiens
  siRNA target sequence for FLJ23263 (NM_025115.1,860-878).
cttggcaggacccgtttat

SEQ ID NO: 393777 - DNA, 19 bp, Homo sapiens
  siRNA target sequence for FLJ23263 (NM_025115.1,863-881).
ggcaggacccgtttatatt

SEQ ID NO: 393778 - DNA, 19 bp, Homo sapiens
  siRNA target sequence for FLJ23263 (NM_025115.1,864-882).
gcaggacccgtttatattt

SEQ ID NO: 393779 - DNA, 19 bp, Homo sapiens
  siRNA target sequence for FLJ23263 (NM_025115.1,956-974).
ctcactgcttcaagttact

SEQ ID NO: 393780 - DNA, 19 bp, Homo sapiens
  siRNA target sequence for FLJ23263 (NM_025115.1,958-976).
cactgcttcaagttactga

SEQ ID NO: 393781 - DNA, 19 bp, Homo sapiens
  siRNA target sequence for FLJ23263 (NM_025115.1,1027-1045).
ggagactttcggtgatact

SEQ ID NO: 393782 - DNA, 19 bp, Homo sapiens
  siRNA target sequence for FLJ23263 (NM_025115.1,1028-1046).
gagactttcggtgatacta

SEQ ID NO: 393783 - DNA, 19 bp, Homo sapiens
  siRNA target sequence for FLJ23263 (NM_025115.1,1091-1109).
ccctgccatcaaacatgtt

SEQ ID NO: 393784 - DNA, 19 bp, Homo sapiens
  siRNA target sequence for FLJ23263 (NM_025115.1,1173-1191).
cccgcatcattggtcattt

SEQ ID NO: 393785 - DNA, 19 bp, Homo sapiens
  siRNA target sequence for FLJ23263 (NM_025115.1,1184-1202).
ggtcatttcagatgactat

SEQ ID NO: 393786 - DNA, 19 bp, Homo sapiens
  siRNA target sequence for FLJ23263 (NM_025115.1,1266-1284).
gctgatttgctccagtata

SEQ ID NO: 393787 - DNA, 19 bp, Homo sapiens
  siRNA target sequence for FLJ23263 (NM_025115.1,1269-1287).
gatttgctccagtataaca

SEQ ID NO: 393788 - DNA, 19 bp, Homo sapiens
  siRNA target sequence for FLJ23263 (NM_025115.1,1426-1444).
gacccaccacccattgtga

SEQ ID NO: 393789 - DNA, 19 bp, Homo sapiens
  siRNA target sequence for FLJ23263 (NM_025115.1,1479-1497).
ccagagcaccgccttcttt

SEQ ID NO: 393790 - DNA, 19 bp, Homo sapiens
  siRNA target sequence for FLJ23263 (NM_025115.1,1480-1498).
cagagcaccgccttctttt

SEQ ID NO: 393791 - DNA, 19 bp, Homo sapiens
  siRNA target sequence for FLJ23263 (NM_025115.1,1540-1558).
ggttggggatcctaactgt

SEQ ID NO: 393792 - DNA, 19 bp, Homo sapiens
  siRNA target sequence for FLJ23263 (NM_025115.1,1582-1600).
gagtcatcattggttatct

SEQ ID NO: 393793 - DNA, 19 bp, Homo sapiens
  siRNA target sequence for FLJ23263 (NM_025115.1,1626-1644).
gaagctagactgaagatat

SEQ ID NO: 393794 - DNA, 19 bp, Homo sapiens
  siRNA target sequence for FLJ23263 (NM_025115.1,1630-1648).
ctagactgaagatattgga

SEQ ID NO: 393795 - DNA, 19 bp, Homo sapiens
  siRNA target sequence for FLJ23263 (NM_025115.1,1640-1658).
gatattggaaaccctaaaa

SEQ ID NO: 393796 - DNA, 19 bp, Homo sapiens
  siRNA target sequence for FLJ23263 (NM_025115.1,1659-1677).
cttctcatgcaacatactt

SEQ ID NO: 393797 - DNA, 19 bp, Homo sapiens
  siRNA target sequence for FLJ23263 (NM_025115.1,1693-1711).
gcagacttgtggtcttact

SEQ ID NO: 393798 - DNA, 19 bp, Homo sapiens
  siRNA target sequence for FLJ23263 (NM_025115.1,1696-1714).
gacttgtggtcttactgaa

SEQ ID NO: 393799 - DNA, 19 bp, Homo sapiens
  siRNA target sequence for FLJ23263 (NM_025115.1,1721-1739).
cttgaaactgatttgtgat

SEQ ID NO: 393800 - DNA, 19 bp, Homo sapiens
  siRNA target sequence for FLJ23263 (NM_025115.1,1743-1761).
gcaagggatccaaacctta

SEQ ID NO: 393801 - DNA, 19 bp, Homo sapiens
  siRNA target sequence for FLJ23263 (NM_025115.1,1883-1901).
cagaaaagtggtgaactat

SEQ ID NO: 393802 - DNA, 19 bp, Homo sapiens
  siRNA target sequence for FLJ23263 (NM_025115.1,1890-1908).
gtggtgaactatatcagaa

SEQ ID NO: 393803 - DNA, 19 bp, Homo sapiens
  siRNA target sequence for FLJ23263 (NM_025115.1,1892-1910).
ggtgaactatatcagaaaa

SEQ ID NO: 393804 - DNA, 19 bp, Homo sapiens
  siRNA target sequence for FLJ23263 (NM_025115.1,1929-1947).
ggcgcaccctacaatggaa

SEQ ID NO: 393805 - DNA, 19 bp, Homo sapiens
  siRNA target sequence for FLJ13310 (NM_025118.1,666-684).
gtaatcaccaagaaggtaa

SEQ ID NO: 393806 - DNA, 19 bp, Homo sapiens
  siRNA target sequence for FLJ13310 (NM_025118.1,703-721).
ccaatagctgggcagttta

SEQ ID NO: 393807 - DNA, 19 bp, Homo sapiens
  siRNA target sequence for FLJ13310 (NM_025118.1,704-722).
caatagctgggcagtttat

SEQ ID NO: 393808 - DNA, 19 bp, Homo sapiens
  siRNA target sequence for FLJ13310 (NM_025118.1,799-817).
gtcaagcctatgtgtatgt

SEQ ID NO: 393809 - DNA, 19 bp, Homo sapiens
  siRNA target sequence for FLJ13310 (NM_025118.1,812-830).
gtatgtattgggtttgcat

SEQ ID NO: 393810 - DNA, 19 bp, Homo sapiens
  siRNA target sequence for FLJ13310 (NM_025118.1,822-840).
ggtttgcatgcccaaagtt

SEQ ID NO: 393811 - DNA, 19 bp, Homo sapiens
  siRNA target sequence for FLJ13310 (NM_025118.1,823-841).
gtttgcatgcccaaagttt

SEQ ID NO: 393812 - DNA, 19 bp, Homo sapiens
  siRNA target sequence for FLJ13310 (NM_025118.1,828-846).
catgcccaaagtttatata

SEQ ID NO: 393813 - DNA, 19 bp, Homo sapiens
  siRNA target sequence for FLJ13310 (NM_025118.1,831-849).
gcccaaagtttatatatca

SEQ ID NO: 393814 - DNA, 19 bp, Homo sapiens
  siRNA target sequence for FLJ13310 (NM_025118.1,941-959).
gctttggtcgaagaataga

SEQ ID NO: 393815 - DNA, 19 bp, Homo sapiens
  siRNA target sequence for FLJ13310 (NM_025118.1,1008-1026).
gtgcaaacctccacttgtt

SEQ ID NO: 393816 - DNA, 19 bp, Homo sapiens
  siRNA target sequence for FLJ13310 (NM_025118.1,1122-1140).
gcttggcttggctcaacat

SEQ ID NO: 393817 - DNA, 19 bp, Homo sapiens
  siRNA target sequence for FLJ21749 (NM_025124.1,433-451).
ggacccaacaccctttgat

SEQ ID NO: 393818 - DNA, 19 bp, Homo sapiens
  siRNA target sequence for FLJ21749 (NM_025124.1,604-622).
gagtctatcacgtgatctt

SEQ ID NO: 393819 - DNA, 19 bp, Homo sapiens
  siRNA target sequence for FLJ21749 (NM_025124.1,606-624).
gtctatcacgtgatcttca

SEQ ID NO: 393820 - DNA, 19 bp, Homo sapiens
  siRNA target sequence for FLJ13263 (NM_025125.2,257-275).
ccttgtatgccatagtatt

SEQ ID NO: 393821 - DNA, 19 bp, Homo sapiens
  siRNA target sequence for FLJ13263 (NM_025125.2,349-367).
gcgtctctcaccatcttga

SEQ ID NO: 393822 - DNA, 19 bp, Homo sapiens
  siRNA target sequence for FLJ13263 (NM_025125.2,350-368).
cgtctctcaccatcttgat

SEQ ID NO: 393823 - DNA, 19 bp, Homo sapiens
  siRNA target sequence for FLJ13263 (NM_025125.2,351-369).
gtctctcaccatcttgatt

SEQ ID NO: 393824 - DNA, 19 bp, Homo sapiens
  siRNA target sequence for FLJ13263 (NM_025125.2,359-377).
ccatcttgattgcttacaa

SEQ ID NO: 393825 - DNA, 19 bp, Homo sapiens
  siRNA target sequence for FLJ13263 (NM_025125.2,375-393).
caaacggaagcgccaaaaa

SEQ ID NO: 393826 - DNA, 19 bp, Homo sapiens
  siRNA target sequence for FLJ22688 (NM_025129.3,484-502).
gacttgagggccagttatt

SEQ ID NO: 393827 - DNA, 19 bp, Homo sapiens
  siRNA target sequence for FLJ22688 (NM_025129.3,1088-1106).
gcctcctccgaaacttcta

SEQ ID NO: 393828 - DNA, 19 bp, Homo sapiens
  siRNA target sequence for PWDMP (NM_025132.2,189-207).
ggcttggcgcaccaataca

SEQ ID NO: 393829 - DNA, 19 bp, Homo sapiens
  siRNA target sequence for PWDMP (NM_025132.2,191-209).
cttggcgcaccaatacagt

SEQ ID NO: 393830 - DNA, 19 bp, Homo sapiens
  siRNA target sequence for PWDMP (NM_025132.2,243-261).
cagtaacaggagctgatta

SEQ ID NO: 393831 - DNA, 19 bp, Homo sapiens
  siRNA target sequence for PWDMP (NM_025132.2,245-263).
gtaacaggagctgattata

SEQ ID NO: 393832 - DNA, 19 bp, Homo sapiens
  siRNA target sequence for PWDMP (NM_025132.2,249-267).
caggagctgattatattgt

SEQ ID NO: 393833 - DNA, 19 bp, Homo sapiens
  siRNA target sequence for PWDMP (NM_025132.2,278-296).
gatcgccatggtcaaaaaa

SEQ ID NO: 393834 - DNA, 19 bp, Homo sapiens
  siRNA target sequence for PWDMP (NM_025132.2,281-299).
cgccatggtcaaaaaagaa

SEQ ID NO: 393835 - DNA, 19 bp, Homo sapiens
  siRNA target sequence for PWDMP (NM_025132.2,418-436).
gaccagccagttagacaat

SEQ ID NO: 393836 - DNA, 19 bp, Homo sapiens
  siRNA target sequence for PWDMP (NM_025132.2,445-463).
ggatcaaatgtctttcctt

SEQ ID NO: 393837 - DNA, 19 bp, Homo sapiens
  siRNA target sequence for PWDMP (NM_025132.2,554-572).
gtccttggaaaacatacta

SEQ ID NO: 393838 - DNA, 19 bp, Homo sapiens
  siRNA target sequence for PWDMP (NM_025132.2,566-584).
catactaagagaatcactt

SEQ ID NO: 393839 - DNA, 19 bp, Homo sapiens
  siRNA target sequence for PWDMP (NM_025132.2,653-671).
caggaaggtgacacgataa

SEQ ID NO: 393840 - DNA, 19 bp, Homo sapiens
  siRNA target sequence for PWDMP (NM_025132.2,655-673).
ggaaggtgacacgataaga

SEQ ID NO: 393841 - DNA, 19 bp, Homo sapiens
  siRNA target sequence for PWDMP (NM_025132.2,738-756).
cctctgctgctgaaagcat

SEQ ID NO: 393842 - DNA, 19 bp, Homo sapiens
  siRNA target sequence for PWDMP (NM_025132.2,766-784).
ggtgcttggcaagaaaact

SEQ ID NO: 393843 - DNA, 19 bp, Homo sapiens
  siRNA target sequence for PWDMP (NM_025132.2,767-785).
gtgcttggcaagaaaactt

SEQ ID NO: 393844 - DNA, 19 bp, Homo sapiens
  siRNA target sequence for PWDMP (NM_025132.2,848-866).
ggcaacattgtctgctata

SEQ ID NO: 393845 - DNA, 19 bp, Homo sapiens
  siRNA target sequence for PWDMP (NM_025132.2,849-867).
gcaacattgtctgctataa

SEQ ID NO: 393846 - DNA, 19 bp, Homo sapiens
  siRNA target sequence for PWDMP (NM_025132.2,850-868).
caacattgtctgctataat

SEQ ID NO: 393847 - DNA, 19 bp, Homo sapiens
  siRNA target sequence for PWDMP (NM_025132.2,881-899).
ggccgcatcatgattggtt

SEQ ID NO: 393848 - DNA, 19 bp, Homo sapiens
  siRNA target sequence for PWDMP (NM_025132.2,882-900).
gccgcatcatgattggttt

SEQ ID NO: 393849 - DNA, 19 bp, Homo sapiens
  siRNA target sequence for PWDMP (NM_025132.2,883-901).
ccgcatcatgattggtttt

SEQ ID NO: 393850 - DNA, 19 bp, Homo sapiens
  siRNA target sequence for PWDMP (NM_025132.2,884-902).
cgcatcatgattggttttt

SEQ ID NO: 393851 - DNA, 19 bp, Homo sapiens
  siRNA target sequence for PWDMP (NM_025132.2,941-959).
gagcttggtcaagagatat

SEQ ID NO: 393852 - DNA, 19 bp, Homo sapiens
  siRNA target sequence for PWDMP (NM_025132.2,965-983).
gctcgtaaccataaagata

SEQ ID NO: 393853 - DNA, 19 bp, Homo sapiens
  siRNA target sequence for PWDMP (NM_025132.2,966-984).
ctcgtaaccataaagataa

SEQ ID NO: 393854 - DNA, 19 bp, Homo sapiens
  siRNA target sequence for PWDMP (NM_025132.2,1025-1043).
gctacatgtggagataact

SEQ ID NO: 393855 - DNA, 19 bp, Homo sapiens
  siRNA target sequence for PWDMP (NM_025132.2,1054-1072).
ccaagacttggttgactta

SEQ ID NO: 393856 - DNA, 19 bp, Homo sapiens
  siRNA target sequence for PWDMP (NM_025132.2,1126-1144).
cttgtcctggactgatgat

SEQ ID NO: 393857 - DNA, 19 bp, Homo sapiens
  siRNA target sequence for PWDMP (NM_025132.2,1195-1213).
gaccaagcttcccatactt

SEQ ID NO: 393858 - DNA, 19 bp, Homo sapiens
  siRNA target sequence for PWDMP (NM_025132.2,1267-1285).
cgtagccaaccctgttgaa

SEQ ID NO: 393859 - DNA, 19 bp, Homo sapiens
  siRNA target sequence for PWDMP (NM_025132.2,1289-1307).
gagctaccaatcacagttt

SEQ ID NO: 393860 - DNA, 19 bp, Homo sapiens
  siRNA target sequence for PWDMP (NM_025132.2,1291-1309).
gctaccaatcacagtttct

SEQ ID NO: 393861 - DNA, 19 bp, Homo sapiens
  siRNA target sequence for PWDMP (NM_025132.2,1333-1351).
ggcagtaggtctttatcat

SEQ ID NO: 393862 - DNA, 19 bp, Homo sapiens
  siRNA target sequence for PWDMP (NM_025132.2,1435-1453).
gggaacagtagccagtatt

SEQ ID NO: 393863 - DNA, 19 bp, Homo sapiens
  siRNA target sequence for PWDMP (NM_025132.2,1447-1465).
cagtatttgccttcattct

SEQ ID NO: 393864 - DNA, 19 bp, Homo sapiens
  siRNA target sequence for PWDMP (NM_025132.2,1449-1467).
gtatttgccttcattctga

SEQ ID NO: 393865 - DNA, 19 bp, Homo sapiens
  siRNA target sequence for PWDMP (NM_025132.2,1562-1580).
ccagcagtggatgataagt

SEQ ID NO: 393866 - DNA, 19 bp, Homo sapiens
  siRNA target sequence for PWDMP (NM_025132.2,1574-1592).
gataagtgccgtatcttat

SEQ ID NO: 393867 - DNA, 19 bp, Homo sapiens
  siRNA target sequence for PWDMP (NM_025132.2,1588-1606).
cttatgccatgccttaact

SEQ ID NO: 393868 - DNA, 19 bp, Homo sapiens
  siRNA target sequence for PWDMP (NM_025132.2,1595-1613).
catgccttaactagtgatt

SEQ ID NO: 393869 - DNA, 19 bp, Homo sapiens
  siRNA target sequence for PWDMP (NM_025132.2,1615-1633).
cctcatctatggtacagat

SEQ ID NO: 393870 - DNA, 19 bp, Homo sapiens
  siRNA target sequence for PWDMP (NM_025132.2,1616-1634).
ctcatctatggtacagata

SEQ ID NO: 393871 - DNA, 19 bp, Homo sapiens
  siRNA target sequence for PWDMP (NM_025132.2,1661-1679).
gaagactggcaattcgtta

SEQ ID NO: 393872 - DNA, 19 bp, Homo sapiens
  siRNA target sequence for PWDMP (NM_025132.2,1668-1686).
ggcaattcgttaatgatta

SEQ ID NO: 393873 - DNA, 19 bp, Homo sapiens
  siRNA target sequence for PWDMP (NM_025132.2,1669-1687).
gcaattcgttaatgattat

SEQ ID NO: 393874 - DNA, 19 bp, Homo sapiens
  siRNA target sequence for PWDMP (NM_025132.2,1723-1741).
cccaaatgggaccagatta

SEQ ID NO: 393875 - DNA, 19 bp, Homo sapiens
  siRNA target sequence for PWDMP (NM_025132.2,1735-1753).
cagattagttttcattgat

SEQ ID NO: 393876 - DNA, 19 bp, Homo sapiens
  siRNA target sequence for PWDMP (NM_025132.2,1843-1861).
ggaaaactggccaatggat

SEQ ID NO: 393877 - DNA, 19 bp, Homo sapiens
  siRNA target sequence for PWDMP (NM_025132.2,1909-1927).
ctttcacaaggacactata

SEQ ID NO: 393878 - DNA, 19 bp, Homo sapiens
  siRNA target sequence for PWDMP (NM_025132.2,1948-1966).
ggctggtagcaccaaagtt

SEQ ID NO: 393879 - DNA, 19 bp, Homo sapiens
  siRNA target sequence for PWDMP (NM_025132.2,2033-2051).
gtaaacaacatctacctta

SEQ ID NO: 393880 - DNA, 19 bp, Homo sapiens
  siRNA target sequence for PWDMP (NM_025132.2,2128-2146).
gctaaagaggttttctgat

SEQ ID NO: 393881 - DNA, 19 bp, Homo sapiens
  siRNA target sequence for PWDMP (NM_025132.2,2158-2176).
gtgcaggattctgaatgat

SEQ ID NO: 393882 - DNA, 19 bp, Homo sapiens
  siRNA target sequence for PWDMP (NM_025132.2,2197-2215).
ggccagagcttgtctacat

SEQ ID NO: 393883 - DNA, 19 bp, Homo sapiens
  siRNA target sequence for PWDMP (NM_025132.2,2230-2248).
gtttgcaatccgtgtttat

SEQ ID NO: 393884 - DNA, 19 bp, Homo sapiens
  siRNA target sequence for PWDMP (NM_025132.2,2243-2261).
gtttatcggagaattggaa

SEQ ID NO: 393885 - DNA, 19 bp, Homo sapiens
  siRNA target sequence for PWDMP (NM_025132.2,2324-2342).
ggacaccttgccatgttta

SEQ ID NO: 393886 - DNA, 19 bp, Homo sapiens
  siRNA target sequence for PWDMP (NM_025132.2,2333-2351).
gccatgtttaccaacgatt

SEQ ID NO: 393887 - DNA, 19 bp, Homo sapiens
  siRNA target sequence for PWDMP (NM_025132.2,2334-2352).
ccatgtttaccaacgatta

SEQ ID NO: 393888 - DNA, 19 bp, Homo sapiens
  siRNA target sequence for PWDMP (NM_025132.2,2335-2353).
catgtttaccaacgattat

SEQ ID NO: 393889 - DNA, 19 bp, Homo sapiens
  siRNA target sequence for PWDMP (NM_025132.2,2430-2448).
gggacagtgctctacaact

SEQ ID NO: 393890 - DNA, 19 bp, Homo sapiens
  siRNA target sequence for PWDMP (NM_025132.2,2515-2533).
cgcgggtgattatgtaaat

SEQ ID NO: 393891 - DNA, 19 bp, Homo sapiens
  siRNA target sequence for PWDMP (NM_025132.2,2534-2552).
gctttggctcattatgaga

SEQ ID NO: 393892 - DNA, 19 bp, Homo sapiens
  siRNA target sequence for PWDMP (NM_025132.2,2535-2553).
ctttggctcattatgagaa

SEQ ID NO: 393893 - DNA, 19 bp, Homo sapiens
  siRNA target sequence for PWDMP (NM_025132.2,2541-2559).
ctcattatgagaaaggaat

SEQ ID NO: 393894 - DNA, 19 bp, Homo sapiens
  siRNA target sequence for PWDMP (NM_025132.2,2606-2624).
gcccagatgtccataagaa

SEQ ID NO: 393895 - DNA, 19 bp, Homo sapiens
  siRNA target sequence for PWDMP (NM_025132.2,2670-2688).
gcagggtccttaaaagaga

SEQ ID NO: 393896 - DNA, 19 bp, Homo sapiens
  siRNA target sequence for PWDMP (NM_025132.2,2685-2703).
gagactgtggagccatatt

SEQ ID NO: 393897 - DNA, 19 bp, Homo sapiens
  siRNA target sequence for PWDMP (NM_025132.2,2696-2714).
gccatattggagaatatga

SEQ ID NO: 393898 - DNA, 19 bp, Homo sapiens
  siRNA target sequence for PWDMP (NM_025132.2,2697-2715).
ccatattggagaatatgaa

SEQ ID NO: 393899 - DNA, 19 bp, Homo sapiens
  siRNA target sequence for PWDMP (NM_025132.2,2734-2752).
ccaactgtatgaaaaaggt

SEQ ID NO: 393900 - DNA, 19 bp, Homo sapiens
  siRNA target sequence for PWDMP (NM_025132.2,2777-2795).
gtttacatccgctctaaga

SEQ ID NO: 393901 - DNA, 19 bp, Homo sapiens
  siRNA target sequence for PWDMP (NM_025132.2,2832-2850).
cttctcctaagatccattt

SEQ ID NO: 393902 - DNA, 19 bp, Homo sapiens
  siRNA target sequence for PWDMP (NM_025132.2,2835-2853).
ctcctaagatccatttgca

SEQ ID NO: 393903 - DNA, 19 bp, Homo sapiens
  siRNA target sequence for PWDMP (NM_025132.2,2900-2918).
gtagcttatgaaaatgcaa

SEQ ID NO: 393904 - DNA, 19 bp, Homo sapiens
  siRNA target sequence for PWDMP (NM_025132.2,2931-2949).
gtgtaatccgcatctatct

SEQ ID NO: 393905 - DNA, 19 bp, Homo sapiens
  siRNA target sequence for PWDMP (NM_025132.2,2976-2994).
ctgtcaatattgttagaga

SEQ ID NO: 393906 - DNA, 19 bp, Homo sapiens
  siRNA target sequence for PWDMP (NM_025132.2,3079-3097).
catgtccaaatgcaacaat

SEQ ID NO: 393907 - DNA, 19 bp, Homo sapiens
  siRNA target sequence for PWDMP (NM_025132.2,3108-3126).
cactggctcagcaacacaa

SEQ ID NO: 393908 - DNA, 19 bp, Homo sapiens
  siRNA target sequence for PWDMP (NM_025132.2,3112-3130).
ggctcagcaacacaacaaa

SEQ ID NO: 393909 - DNA, 19 bp, Homo sapiens
  siRNA target sequence for PWDMP (NM_025132.2,3139-3157).
ctatgcagatattattggt

SEQ ID NO: 393910 - DNA, 19 bp, Homo sapiens
  siRNA target sequence for PWDMP (NM_025132.2,3168-3186).
ctactaatgaagactatca

SEQ ID NO: 393911 - DNA, 19 bp, Homo sapiens
  siRNA target sequence for PWDMP (NM_025132.2,3190-3208).
cattgccttatactttgaa

SEQ ID NO: 393912 - DNA, 19 bp, Homo sapiens
  siRNA target sequence for PWDMP (NM_025132.2,3247-3265).
gctgtgtggccaatattca

SEQ ID NO: 393913 - DNA, 19 bp, Homo sapiens
  siRNA target sequence for PWDMP (NM_025132.2,3291-3309).
gcccaagctcggaagataa

SEQ ID NO: 393914 - DNA, 19 bp, Homo sapiens
  siRNA target sequence for PWDMP (NM_025132.2,3292-3310).
cccaagctcggaagataat

SEQ ID NO: 393915 - DNA, 19 bp, Homo sapiens
  siRNA target sequence for PWDMP (NM_025132.2,3294-3312).
caagctcggaagataatgt

SEQ ID NO: 393916 - DNA, 19 bp, Homo sapiens
  siRNA target sequence for PWDMP (NM_025132.2,3400-3418).
cgatggcatgcctaaggat

SEQ ID NO: 393917 - DNA, 19 bp, Homo sapiens
  siRNA target sequence for PWDMP (NM_025132.2,3530-3548).
cacgatgttctcttcagta

SEQ ID NO: 393918 - DNA, 19 bp, Homo sapiens
  siRNA target sequence for PWDMP (NM_025132.2,3616-3634).
gcacagctatatactagta

SEQ ID NO: 393919 - DNA, 19 bp, Homo sapiens
  siRNA target sequence for PWDMP (NM_025132.2,3622-3640).
ctatatactagtaaagatt

SEQ ID NO: 393920 - DNA, 19 bp, Homo sapiens
  siRNA target sequence for PWDMP (NM_025132.2,3733-3751).
cctgacgtcaactgtgatt

SEQ ID NO: 393921 - DNA, 19 bp, Homo sapiens
  siRNA target sequence for PWDMP (NM_025132.2,3789-3807).
gcttcgcagctatgttgat

SEQ ID NO: 393922 - DNA, 19 bp, Homo sapiens
  siRNA target sequence for PWDMP (NM_025132.2,3812-3830).
cctgaataccgcagcaaaa

SEQ ID NO: 393923 - DNA, 19 bp, Homo sapiens
  siRNA target sequence for PWDMP (NM_025132.2,3865-3883).
ggtcaggagacccgatata

SEQ ID NO: 393924 - DNA, 19 bp, Homo sapiens
  siRNA target sequence for PWDMP (NM_025132.2,3866-3884).
gtcaggagacccgatatat

SEQ ID NO: 393925 - DNA, 19 bp, Homo sapiens
  siRNA target sequence for PWDMP (NM_025132.2,3868-3886).
caggagacccgatatatct

SEQ ID NO: 393926 - DNA, 19 bp, Homo sapiens
  siRNA target sequence for PWDMP (NM_025132.2,3870-3888).
ggagacccgatatatctga

SEQ ID NO: 393927 - DNA, 19 bp, Homo sapiens
  siRNA target sequence for PWDMP (NM_025132.2,3876-3894).
ccgatatatctgagataga

SEQ ID NO: 393928 - DNA, 19 bp, Homo sapiens
  siRNA target sequence for PWDMP (NM_025132.2,3877-3895).
cgatatatctgagatagaa

SEQ ID NO: 393929 - DNA, 19 bp, Homo sapiens
  siRNA target sequence for PWDMP (NM_025132.2,3950-3968).
ctctgtcctggatgtaaaa

SEQ ID NO: 393930 - DNA, 19 bp, Homo sapiens
  siRNA target sequence for PWDMP (NM_025132.2,3970-3988).
cagtatcccatattgcatt

SEQ ID NO: 393931 - DNA, 19 bp, Homo sapiens
  siRNA target sequence for PWDMP (NM_025132.2,4021-4039).
gacggtgtgtccacattgt

SEQ ID NO: 393932 - DNA, 19 bp, Homo sapiens
  siRNA target sequence for PWDMP (NM_025132.2,4023-4041).
cggtgtgtccacattgtga

SEQ ID NO: 393933 - DNA, 19 bp, Homo sapiens
  siRNA target sequence for PWDMP (NM_025132.2,4040-4058).
gacttccctgctctatact

SEQ ID NO: 393934 - DNA, 19 bp, Homo sapiens
  siRNA target sequence for PWDMP (NM_025132.2,4049-4067).
gctctatactcagaattga

SEQ ID NO: 393935 - DNA, 19 bp, Homo sapiens
  siRNA target sequence for PWDMP (NM_025132.2,4050-4068).
ctctatactcagaattgaa

SEQ ID NO: 393936 - DNA, 19 bp, Homo sapiens
  siRNA target sequence for PWDMP (NM_025132.2,4097-4115).
cctatgtgttcagaaagat

SEQ ID NO: 393937 - DNA, 19 bp, Homo sapiens
  siRNA target sequence for FLJ12584 (NM_025139.2,975-993).
ccttggcacccgtgaaatt

SEQ ID NO: 393938 - DNA, 19 bp, Homo sapiens
  siRNA target sequence for FLJ12584 (NM_025139.2,1054-1072).
ggggagtgaccgcttgaaa

SEQ ID NO: 393939 - DNA, 19 bp, Homo sapiens
  siRNA target sequence for FLJ12584 (NM_025139.2,1064-1082).
cgcttgaaagccttcttgt

SEQ ID NO: 393940 - DNA, 19 bp, Homo sapiens
  siRNA target sequence for FLJ12584 (NM_025139.2,1139-1157).
gttctgcaagcctacatca

SEQ ID NO: 393941 - DNA, 19 bp, Homo sapiens
  siRNA target sequence for FLJ12584 (NM_025139.2,1243-1261).
catggccaggctcatcaat

SEQ ID NO: 393942 - DNA, 19 bp, Homo sapiens
  siRNA target sequence for FLJ12584 (NM_025139.2,1247-1265).
gccaggctcatcaatgctt

SEQ ID NO: 393943 - DNA, 19 bp, Homo sapiens
  siRNA target sequence for FLJ12584 (NM_025139.2,1452-1470).
ggctggttgatgttctgaa

SEQ ID NO: 393944 - DNA, 19 bp, Homo sapiens
  siRNA target sequence for FLJ12584 (NM_025139.2,1572-1590).
caggcctcgtgctcaaagt

SEQ ID NO: 393945 - DNA, 19 bp, Homo sapiens
  siRNA target sequence for FLJ12584 (NM_025139.2,1624-1642).
gatacagccgtatgtgaat

SEQ ID NO: 393946 - DNA, 19 bp, Homo sapiens
  siRNA target sequence for FLJ12584 (NM_025139.2,1768-1786).
catcatcaagcagctaaat

SEQ ID NO: 393947 - DNA, 19 bp, Homo sapiens
  siRNA target sequence for FLJ12584 (NM_025139.2,1980-1998).
ggaaggggctggctaatgt

SEQ ID NO: 393948 - DNA, 19 bp, Homo sapiens
  siRNA target sequence for FLJ22471 (NM_025140.1,478-496).
cagaaaaacgcgatgatca

SEQ ID NO: 393949 - DNA, 19 bp, Homo sapiens
  siRNA target sequence for FLJ22471 (NM_025140.1,783-801).
ccccttgcacccggaattt

SEQ ID NO: 393950 - DNA, 19 bp, Homo sapiens
  siRNA target sequence for FLJ22471 (NM_025140.1,785-803).
ccttgcacccggaatttga

SEQ ID NO: 393951 - DNA, 19 bp, Homo sapiens
  siRNA target sequence for FLJ22471 (NM_025140.1,786-804).
cttgcacccggaatttgaa

SEQ ID NO: 393952 - DNA, 19 bp, Homo sapiens
  siRNA target sequence for FLJ22471 (NM_025140.1,905-923).
ccgaggtccacctcatcaa

SEQ ID NO: 393953 - DNA, 19 bp, Homo sapiens
  siRNA target sequence for FLJ22471 (NM_025140.1,906-924).
cgaggtccacctcatcaaa

SEQ ID NO: 393954 - DNA, 19 bp, Homo sapiens
  siRNA target sequence for FLJ22471 (NM_025140.1,910-928).
gtccacctcatcaaagaga

SEQ ID NO: 393955 - DNA, 19 bp, Homo sapiens
  siRNA target sequence for BLP2 (NM_025141.2,106-124).
gcggtgaaagtactgaaat

SEQ ID NO: 393956 - DNA, 19 bp, Homo sapiens
  siRNA target sequence for BLP2 (NM_025141.2,120-138).
gaaatcccaccttatgtga

SEQ ID NO: 393957 - DNA, 19 bp, Homo sapiens
  siRNA target sequence for BLP2 (NM_025141.2,126-144).
ccaccttatgtgatgaagt

SEQ ID NO: 393958 - DNA, 19 bp, Homo sapiens
  siRNA target sequence for BLP2 (NM_025141.2,170-188).
gcttcctgcagactgtata

SEQ ID NO: 393959 - DNA, 19 bp, Homo sapiens
  siRNA target sequence for BLP2 (NM_025141.2,174-192).
cctgcagactgtatagact

SEQ ID NO: 393960 - DNA, 19 bp, Homo sapiens
  siRNA target sequence for BLP2 (NM_025141.2,184-202).
gtatagactgcacaacaaa

SEQ ID NO: 393961 - DNA, 19 bp, Homo sapiens
  siRNA target sequence for BLP2 (NM_025141.2,189-207).
gactgcacaacaaatttct

SEQ ID NO: 393962 - DNA, 19 bp, Homo sapiens
  siRNA target sequence for BLP2 (NM_025141.2,220-238).
ggaagcctgtcacttttga

SEQ ID NO: 393963 - DNA, 19 bp, Homo sapiens
  siRNA target sequence for BLP2 (NM_025141.2,256-274).
ctgttacctgtgttgatca

SEQ ID NO: 393964 - DNA, 19 bp, Homo sapiens
  siRNA target sequence for BLP2 (NM_025141.2,262-280).
cctgtgttgatcaagactt

SEQ ID NO: 393965 - DNA, 19 bp, Homo sapiens
  siRNA target sequence for BLP2 (NM_025141.2,265-283).
gtgttgatcaagacttcaa

SEQ ID NO: 393966 - DNA, 19 bp, Homo sapiens
  siRNA target sequence for BLP2 (NM_025141.2,439-457).
gcttgggtaaccgtacttt

SEQ ID NO: 393967 - DNA, 19 bp, Homo sapiens
  siRNA target sequence for BLP2 (NM_025141.2,440-458).
cttgggtaaccgtactttt

SEQ ID NO: 393968 - DNA, 19 bp, Homo sapiens
  siRNA target sequence for BLP2 (NM_025141.2,454-472).
cttttcccaaaatgctata

SEQ ID NO: 393969 - DNA, 19 bp, Homo sapiens
  siRNA target sequence for BLP2 (NM_025141.2,459-477).
cccaaaatgctatattgca

SEQ ID NO: 393970 - DNA, 19 bp, Homo sapiens
  siRNA target sequence for BLP2 (NM_025141.2,505-523).
cggctctggctctaagcat

SEQ ID NO: 393971 - DNA, 19 bp, Homo sapiens
  siRNA target sequence for BLP2 (NM_025141.2,610-628).
gaatatggacgctgataga

SEQ ID NO: 393972 - DNA, 19 bp, Homo sapiens
  siRNA target sequence for BLP2 (NM_025141.2,638-656).
cattggagttggctatgtt

SEQ ID NO: 393973 - DNA, 19 bp, Homo sapiens
  siRNA target sequence for FLJ22944 (NM_025145.3,381-399).
cctctcatctacgtataca

SEQ ID NO: 393974 - DNA, 19 bp, Homo sapiens
  siRNA target sequence for FLJ22944 (NM_025145.3,447-465).
ctggactacactttacttt

SEQ ID NO: 393975 - DNA, 19 bp, Homo sapiens
  siRNA target sequence for FLJ22944 (NM_025145.3,450-468).
gactacactttactttcat

SEQ ID NO: 393976 - DNA, 19 bp, Homo sapiens
  siRNA target sequence for FLJ22944 (NM_025145.3,505-523).
ctctcccagaatttgaact

SEQ ID NO: 393977 - DNA, 19 bp, Homo sapiens
  siRNA target sequence for FLJ22944 (NM_025145.3,538-556).
gggaatcgagtatcatttt

SEQ ID NO: 393978 - DNA, 19 bp, Homo sapiens
  siRNA target sequence for FLJ22944 (NM_025145.3,540-558).
gaatcgagtatcattttgt

SEQ ID NO: 393979 - DNA, 19 bp, Homo sapiens
  siRNA target sequence for FLJ22944 (NM_025145.3,544-562).
cgagtatcattttgtgtaa

SEQ ID NO: 393980 - DNA, 19 bp, Homo sapiens
  siRNA target sequence for FLJ22944 (NM_025145.3,577-595).
gaatggatgtgaaccaaat

SEQ ID NO: 393981 - DNA, 19 bp, Homo sapiens
  siRNA target sequence for FLJ22944 (NM_025145.3,581-599).
ggatgtgaaccaaatgtct

SEQ ID NO: 393982 - DNA, 19 bp, Homo sapiens
  siRNA target sequence for FLJ22944 (NM_025145.3,617-635).
gcgccagctgtgcttatca

SEQ ID NO: 393983 - DNA, 19 bp, Homo sapiens
  siRNA target sequence for FLJ22944 (NM_025145.3,618-636).
cgccagctgtgcttatcaa

SEQ ID NO: 393984 - DNA, 19 bp, Homo sapiens
  siRNA target sequence for FLJ22944 (NM_025145.3,620-638).
ccagctgtgcttatcaagt

SEQ ID NO: 393985 - DNA, 19 bp, Homo sapiens
  siRNA target sequence for FLJ22944 (NM_025145.3,629-647).
cttatcaagtccaagtaca

SEQ ID NO: 393986 - DNA, 19 bp, Homo sapiens
  siRNA target sequence for FLJ22944 (NM_025145.3,650-668).
gagcgtgtggaccattgaa

SEQ ID NO: 393987 - DNA, 19 bp, Homo sapiens
  siRNA target sequence for FLJ22944 (NM_025145.3,653-671).
cgtgtggaccattgaaaga

SEQ ID NO: 393988 - DNA, 19 bp, Homo sapiens
  siRNA target sequence for FLJ22944 (NM_025145.3,658-676).
ggaccattgaaagaagtaa

SEQ ID NO: 393989 - DNA, 19 bp, Homo sapiens
  siRNA target sequence for FLJ22944 (NM_025145.3,677-695).
ccaggagcattgtttcaga

SEQ ID NO: 393990 - DNA, 19 bp, Homo sapiens
  siRNA target sequence for FLJ22944 (NM_025145.3,694-712).
gagcaaggtcggtgaaatt

SEQ ID NO: 393991 - DNA, 19 bp, Homo sapiens
  siRNA target sequence for FLJ22944 (NM_025145.3,761-779).
ccagtcgttgccgaaagat

SEQ ID NO: 393992 - DNA, 19 bp, Homo sapiens
  siRNA target sequence for FLJ22944 (NM_025145.3,766-784).
cgttgccgaaagatctcat

SEQ ID NO: 393993 - DNA, 19 bp, Homo sapiens
  siRNA target sequence for FLJ22944 (NM_025145.3,851-869).
gccgaaagatgatctatat

SEQ ID NO: 393994 - DNA, 19 bp, Homo sapiens
  siRNA target sequence for FLJ22944 (NM_025145.3,854-872).
gaaagatgatctatatcct

SEQ ID NO: 393995 - DNA, 19 bp, Homo sapiens
  siRNA target sequence for FLJ22944 (NM_025145.3,875-893).
gcttcacccgactatgcat

SEQ ID NO: 393996 - DNA, 19 bp, Homo sapiens
  siRNA target sequence for FLJ22944 (NM_025145.3,876-894).
cttcacccgactatgcatt

SEQ ID NO: 393997 - DNA, 19 bp, Homo sapiens
  siRNA target sequence for FLJ22944 (NM_025145.3,903-921).
ccaacaagtgacttgtaca

SEQ ID NO: 393998 - DNA, 19 bp, Homo sapiens
  siRNA target sequence for FLJ22944 (NM_025145.3,904-922).
caacaagtgacttgtacat

SEQ ID NO: 393999 - DNA, 19 bp, Homo sapiens
  siRNA target sequence for FLJ22944 (NM_025145.3,926-944).
ctgtgaagagggtcatctt

SEQ ID NO: 394000 - DNA, 19 bp, Homo sapiens
  siRNA target sequence for FLJ22944 (NM_025145.3,933-951).
gagggtcatcttttaatga

SEQ ID NO: 394001 - DNA, 19 bp, Homo sapiens
  siRNA target sequence for FLJ22944 (NM_025145.3,935-953).
gggtcatcttttaatgatt

SEQ ID NO: 394002 - DNA, 19 bp, Homo sapiens
  siRNA target sequence for FLJ22944 (NM_025145.3,965-983).
cttgcaagtgactgtactt

SEQ ID NO: 394003 - DNA, 19 bp, Homo sapiens
  siRNA target sequence for FLJ22944 (NM_025145.3,974-992).
gactgtacttaataagata

SEQ ID NO: 394004 - DNA, 19 bp, Homo sapiens
  siRNA target sequence for FLJ22944 (NM_025145.3,1036-1054).
cagtaaccttggtatatca

SEQ ID NO: 394005 - DNA, 19 bp, Homo sapiens
  siRNA target sequence for FLJ22944 (NM_025145.3,1038-1056).
gtaaccttggtatatcaga

SEQ ID NO: 394006 - DNA, 19 bp, Homo sapiens
  siRNA target sequence for FLJ22944 (NM_025145.3,1064-1082).
cgtgctggcttctggaatt

SEQ ID NO: 394007 - DNA, 19 bp, Homo sapiens
  siRNA target sequence for FLJ22944 (NM_025145.3,1120-1138).
gttacatgatcgaggattt

SEQ ID NO: 394008 - DNA, 19 bp, Homo sapiens
  siRNA target sequence for FLJ22944 (NM_025145.3,1155-1173).
cctgtagaacatatgacat

SEQ ID NO: 394009 - DNA, 19 bp, Homo sapiens
  siRNA target sequence for FLJ22944 (NM_025145.3,1158-1176).
gtagaacatatgacatttt

SEQ ID NO: 394010 - DNA, 19 bp, Homo sapiens
  siRNA target sequence for FLJ22944 (NM_025145.3,1240-1258).
gtaaggagccaaccttaaa

SEQ ID NO: 394011 - DNA, 19 bp, Homo sapiens
  siRNA target sequence for FLJ22944 (NM_025145.3,1314-1332).
ggaacccaatacttcatga

SEQ ID NO: 394012 - DNA, 19 bp, Homo sapiens
  siRNA target sequence for FLJ22944 (NM_025145.3,1320-1338).
caatacttcatgacactta

SEQ ID NO: 394013 - DNA, 19 bp, Homo sapiens
  siRNA target sequence for FLJ22944 (NM_025145.3,1371-1389).
gaggattgtgcttgtgtaa

SEQ ID NO: 394014 - DNA, 19 bp, Homo sapiens
  siRNA target sequence for FLJ22944 (NM_025145.3,1380-1398).
gcttgtgtaagcaagattt

SEQ ID NO: 394015 - DNA, 19 bp, Homo sapiens
  siRNA target sequence for FLJ22944 (NM_025145.3,1470-1488).
ggctcggtctacttcatca

SEQ ID NO: 394016 - DNA, 19 bp, Homo sapiens
  siRNA target sequence for FLJ22944 (NM_025145.3,1481-1499).
cttcatcagcgtatatgat

SEQ ID NO: 394017 - DNA, 19 bp, Homo sapiens
  siRNA target sequence for FLJ22944 (NM_025145.3,1487-1505).
cagcgtatatgataaggaa

SEQ ID NO: 394018 - DNA, 19 bp, Homo sapiens
  siRNA target sequence for FLJ22944 (NM_025145.3,1550-1568).
gcagcacgtcgtttatgat

SEQ ID NO: 394019 - DNA, 19 bp, Homo sapiens
  siRNA target sequence for FLJ22944 (NM_025145.3,1571-1589).
gcaaggaatatttctgtta

SEQ ID NO: 394020 - DNA, 19 bp, Homo sapiens
  siRNA target sequence for FLJ22944 (NM_025145.3,1628-1646).
caactcctcaagctcattt

SEQ ID NO: 394021 - DNA, 19 bp, Homo sapiens
  siRNA target sequence for FLJ22944 (NM_025145.3,1634-1652).
ctcaagctcatttcagatt

SEQ ID NO: 394022 - DNA, 19 bp, Homo sapiens
  siRNA target sequence for FLJ22944 (NM_025145.3,1762-1780).
gaagcaggttggagatgtt

SEQ ID NO: 394023 - DNA, 19 bp, Homo sapiens
  siRNA target sequence for FLJ22944 (NM_025145.3,1811-1829).
cacaacctttgctgatgaa

SEQ ID NO: 394024 - DNA, 19 bp, Homo sapiens
  siRNA target sequence for FLJ22944 (NM_025145.3,1857-1875).
cataagtacctgtatgagt

SEQ ID NO: 394025 - DNA, 19 bp, Homo sapiens
  siRNA target sequence for FLJ22944 (NM_025145.3,1899-1917).
gtcttgggctttcaaagta

SEQ ID NO: 394026 - DNA, 19 bp, Homo sapiens
  siRNA target sequence for FLJ22944 (NM_025145.3,1936-1954).
gtagtcaagtgccatacat

SEQ ID NO: 394027 - DNA, 19 bp, Homo sapiens
  siRNA target sequence for FLJ22944 (NM_025145.3,1980-1998).
gaacataccggtatctaca

SEQ ID NO: 394028 - DNA, 19 bp, Homo sapiens
  siRNA target sequence for FLJ22944 (NM_025145.3,1997-2015).
cattcttaaaccatacaaa

SEQ ID NO: 394029 - DNA, 19 bp, Homo sapiens
  siRNA target sequence for FLJ22944 (NM_025145.3,2064-2082).
catggattgtggctcataa

SEQ ID NO: 394030 - DNA, 19 bp, Homo sapiens
  siRNA target sequence for FLJ22944 (NM_025145.3,2067-2085).
ggattgtggctcataacaa

SEQ ID NO: 394031 - DNA, 19 bp, Homo sapiens
  siRNA target sequence for FLJ22944 (NM_025145.3,2068-2086).
gattgtggctcataacaat

SEQ ID NO: 394032 - DNA, 19 bp, Homo sapiens
  siRNA target sequence for FLJ22944 (NM_025145.3,2074-2092).
ggctcataacaatagctaa

SEQ ID NO: 394033 - DNA, 19 bp, Homo sapiens
  siRNA target sequence for FLJ22944 (NM_025145.3,2075-2093).
gctcataacaatagctaaa

SEQ ID NO: 394034 - DNA, 19 bp, Homo sapiens
  siRNA target sequence for FLJ22944 (NM_025145.3,2078-2096).
cataacaatagctaaatgt

SEQ ID NO: 394035 - DNA, 19 bp, Homo sapiens
  siRNA target sequence for FLJ22944 (NM_025145.3,2105-2123).
gtgtatccgagacgtttat

SEQ ID NO: 394036 - DNA, 19 bp, Homo sapiens
  siRNA target sequence for FLJ22944 (NM_025145.3,2115-2133).
gacgtttatactttggaaa

SEQ ID NO: 394037 - DNA, 19 bp, Homo sapiens
  siRNA target sequence for FLJ22944 (NM_025145.3,2139-2157).
gcttggtgtcggagtcatt

SEQ ID NO: 394038 - DNA, 19 bp, Homo sapiens
  siRNA target sequence for FLJ22944 (NM_025145.3,2163-2181).
cagggtcatgggattcagt

SEQ ID NO: 394039 - DNA, 19 bp, Homo sapiens
  siRNA target sequence for FLJ22944 (NM_025145.3,2172-2190).
gggattcagtcaatgagaa

SEQ ID NO: 394040 - DNA, 19 bp, Homo sapiens
  siRNA target sequence for FLJ22944 (NM_025145.3,2173-2191).
ggattcagtcaatgagaat

SEQ ID NO: 394041 - DNA, 19 bp, Homo sapiens
  siRNA target sequence for FLJ22944 (NM_025145.3,2174-2192).
gattcagtcaatgagaatt

SEQ ID NO: 394042 - DNA, 19 bp, Homo sapiens
  siRNA target sequence for FLJ22944 (NM_025145.3,2272-2290).
gacacctagccagtgaaat

SEQ ID NO: 394043 - DNA, 19 bp, Homo sapiens
  siRNA target sequence for FLJ22944 (NM_025145.3,2295-2313).
gactattaccagaaactat

SEQ ID NO: 394044 - DNA, 19 bp, Homo sapiens
  siRNA target sequence for FLJ22944 (NM_025145.3,2343-2361).
gagaatcattatttaagca

SEQ ID NO: 394045 - DNA, 19 bp, Homo sapiens
  siRNA target sequence for FLJ22944 (NM_025145.3,2367-2385).
ccaaaagtttccgtagatt

SEQ ID NO: 394046 - DNA, 19 bp, Homo sapiens
  siRNA target sequence for FLJ22944 (NM_025145.3,2392-2410).
ccgattctgaacacacaaa

SEQ ID NO: 394047 - DNA, 19 bp, Homo sapiens
  siRNA target sequence for FLJ22944 (NM_025145.3,2419-2437).
caagcactgacttatcaca

SEQ ID NO: 394048 - DNA, 19 bp, Homo sapiens
  siRNA target sequence for FLJ22944 (NM_025145.3,2423-2441).
cactgacttatcacaagat

SEQ ID NO: 394049 - DNA, 19 bp, Homo sapiens
  siRNA target sequence for FLJ22944 (NM_025145.3,2425-2443).
ctgacttatcacaagatga

SEQ ID NO: 394050 - DNA, 19 bp, Homo sapiens
  siRNA target sequence for FLJ22944 (NM_025145.3,2455-2473).
ccgatgttaagaaggaaat

SEQ ID NO: 394051 - DNA, 19 bp, Homo sapiens
  siRNA target sequence for FLJ22944 (NM_025145.3,2456-2474).
cgatgttaagaaggaaatt

SEQ ID NO: 394052 - DNA, 19 bp, Homo sapiens
  siRNA target sequence for FLJ22944 (NM_025145.3,2460-2478).
gttaagaaggaaattcctt

SEQ ID NO: 394053 - DNA, 19 bp, Homo sapiens
  siRNA target sequence for FLJ22944 (NM_025145.3,2475-2493).
ccttggatacaacaaaaaa

SEQ ID NO: 394054 - DNA, 19 bp, Homo sapiens
  siRNA target sequence for FLJ22944 (NM_025145.3,2514-2532).
gaggttaatctgttttcca

SEQ ID NO: 394055 - DNA, 19 bp, Homo sapiens
  siRNA target sequence for FLJ22944 (NM_025145.3,2566-2584).
cactttccaaaactattct

SEQ ID NO: 394056 - DNA, 19 bp, Homo sapiens
  siRNA target sequence for FLJ22944 (NM_025145.3,2715-2733).
gatgtagagatgcataact

SEQ ID NO: 394057 - DNA, 19 bp, Homo sapiens
  siRNA target sequence for FLJ22944 (NM_025145.3,2750-2768).
ggctgaacttatcaaagaa

SEQ ID NO: 394058 - DNA, 19 bp, Homo sapiens
  siRNA target sequence for FLJ22944 (NM_025145.3,2797-2815).
gtcgagctcttaagtgttt

SEQ ID NO: 394059 - DNA, 19 bp, Homo sapiens
  siRNA target sequence for FLJ22944 (NM_025145.3,2823-2841).
ccctgtgtggttgaaaact

SEQ ID NO: 394060 - DNA, 19 bp, Homo sapiens
  siRNA target sequence for FLJ22944 (NM_025145.3,2824-2842).
cctgtgtggttgaaaactt

SEQ ID NO: 394061 - DNA, 19 bp, Homo sapiens
  siRNA target sequence for FLJ22944 (NM_025145.3,2916-2934).
gagtgtcttaaagtactat

SEQ ID NO: 394062 - DNA, 19 bp, Homo sapiens
  siRNA target sequence for RCP (NM_025151.2,395-413).
gcagtggtataagttgaaa

SEQ ID NO: 394063 - DNA, 19 bp, Homo sapiens
  siRNA target sequence for RCP (NM_025151.2,400-418).
ggtataagttgaaatccaa

SEQ ID NO: 394064 - DNA, 19 bp, Homo sapiens
  siRNA target sequence for RCP (NM_025151.2,453-471).
gaggttgacatccagttta

SEQ ID NO: 394065 - DNA, 19 bp, Homo sapiens
  siRNA target sequence for RCP (NM_025151.2,456-474).
gttgacatccagtttatga

SEQ ID NO: 394066 - DNA, 19 bp, Homo sapiens
  siRNA target sequence for RCP (NM_025151.2,482-500).
catgactgccagcatgttt

SEQ ID NO: 394067 - DNA, 19 bp, Homo sapiens
  siRNA target sequence for RCP (NM_025151.2,493-511).
gcatgtttgacctttctat

SEQ ID NO: 394068 - DNA, 19 bp, Homo sapiens
  siRNA target sequence for RCP (NM_025151.2,516-534).
gacaagtctcggaatccat

SEQ ID NO: 394069 - DNA, 19 bp, Homo sapiens
  siRNA target sequence for RCP (NM_025151.2,518-536).
caagtctcggaatccattt

SEQ ID NO: 394070 - DNA, 19 bp, Homo sapiens
  siRNA target sequence for RCP (NM_025151.2,551-569).
caagatcaaggggaagaat

SEQ ID NO: 394071 - DNA, 19 bp, Homo sapiens
  siRNA target sequence for RCP (NM_025151.2,622-640).
cggtcgacagtgatgatga

SEQ ID NO: 394072 - DNA, 19 bp, Homo sapiens
  siRNA target sequence for RCP (NM_025151.2,682-700).
ccttactttccaagtcaaa

SEQ ID NO: 394073 - DNA, 19 bp, Homo sapiens
  siRNA target sequence for RCP (NM_025151.2,767-785).
gcttcgtcccggagacttt

SEQ ID NO: 394074 - DNA, 19 bp, Homo sapiens
  siRNA target sequence for RCP (NM_025151.2,826-844).
cctcggcctcggatgtcat

SEQ ID NO: 394075 - DNA, 19 bp, Homo sapiens
  siRNA target sequence for RCP (NM_025151.2,840-858).
gtcatgtctcacaagagaa

SEQ ID NO: 394076 - DNA, 19 bp, Homo sapiens
  siRNA target sequence for RCP (NM_025151.2,859-877).
cagcgagtacggatcttaa

SEQ ID NO: 394077 - DNA, 19 bp, Homo sapiens
  siRNA target sequence for RCP (NM_025151.2,862-880).
cgagtacggatcttaagca

SEQ ID NO: 394078 - DNA, 19 bp, Homo sapiens
  siRNA target sequence for RCP (NM_025151.2,863-881).
gagtacggatcttaagcaa

SEQ ID NO: 394079 - DNA, 19 bp, Homo sapiens
  siRNA target sequence for RCP (NM_025151.2,868-886).
cggatcttaagcaactgaa

SEQ ID NO: 394080 - DNA, 19 bp, Homo sapiens
  siRNA target sequence for RCP (NM_025151.2,933-951).
ggtggccttcggtctaaga

SEQ ID NO: 394081 - DNA, 19 bp, Homo sapiens
  siRNA target sequence for RCP (NM_025151.2,937-955).
gccttcggtctaagaatga

SEQ ID NO: 394082 - DNA, 19 bp, Homo sapiens
  siRNA target sequence for RCP (NM_025151.2,938-956).
ccttcggtctaagaatgat

SEQ ID NO: 394083 - DNA, 19 bp, Homo sapiens
  siRNA target sequence for RCP (NM_025151.2,960-978).
ctttcccgctctaatgtct

SEQ ID NO: 394084 - DNA, 19 bp, Homo sapiens
  siRNA target sequence for RCP (NM_025151.2,968-986).
ctctaatgtctgcatcaat

SEQ ID NO: 394085 - DNA, 19 bp, Homo sapiens
  siRNA target sequence for RCP (NM_025151.2,1188-1206).
gactccttgaagtctatga

SEQ ID NO: 394086 - DNA, 19 bp, Homo sapiens
  siRNA target sequence for RCP (NM_025151.2,1525-1543).
gctccctgaacctctttga

SEQ ID NO: 394087 - DNA, 19 bp, Homo sapiens
  siRNA target sequence for RCP (NM_025151.2,1590-1608).
gaaccgagacctccaattt

SEQ ID NO: 394088 - DNA, 19 bp, Homo sapiens
  siRNA target sequence for RCP (NM_025151.2,1717-1735).
ccatcatcagtgagaactt

SEQ ID NO: 394089 - DNA, 19 bp, Homo sapiens
  siRNA target sequence for RCP (NM_025151.2,1724-1742).
cagtgagaacttgaacaat

SEQ ID NO: 394090 - DNA, 19 bp, Homo sapiens
  siRNA target sequence for RCP (NM_025151.2,1769-1787).
ctcggaccctgcatttgca

SEQ ID NO: 394091 - DNA, 19 bp, Homo sapiens
  siRNA target sequence for RCP (NM_025151.2,1771-1789).
cggaccctgcatttgcata

SEQ ID NO: 394092 - DNA, 19 bp, Homo sapiens
  siRNA target sequence for RCP (NM_025151.2,1772-1790).
ggaccctgcatttgcatat

SEQ ID NO: 394093 - DNA, 19 bp, Homo sapiens
  siRNA target sequence for RCP (NM_025151.2,1801-1819).
cccacgatgagctgattca

SEQ ID NO: 394094 - DNA, 19 bp, Homo sapiens
  siRNA target sequence for RCP (NM_025151.2,1870-1888).
gcgagctggaagactacat

SEQ ID NO: 394095 - DNA, 19 bp, Homo sapiens
  siRNA target sequence for RCP (NM_025151.2,1871-1889).
cgagctggaagactacatt

SEQ ID NO: 394096 - DNA, 19 bp, Homo sapiens
  siRNA target sequence for RCP (NM_025151.2,1942-1960).
cgactcaggttggcaaaaa

SEQ ID NO: 394097 - DNA, 19 bp, Homo sapiens
  siRNA target sequence for FLJ21477 (NM_025153.1,89-107).
cgagtagtggtctctaact

SEQ ID NO: 394098 - DNA, 19 bp, Homo sapiens
  siRNA target sequence for FLJ21477 (NM_025153.1,136-154).
gaaccccaacagacatcat

SEQ ID NO: 394099 - DNA, 19 bp, Homo sapiens
  siRNA target sequence for FLJ21477 (NM_025153.1,149-167).
catcatcgtgggaatcaaa

SEQ ID NO: 394100 - DNA, 19 bp, Homo sapiens
  siRNA target sequence for FLJ21477 (NM_025153.1,155-173).
cgtgggaatcaaatcaaga

SEQ ID NO: 394101 - DNA, 19 bp, Homo sapiens
  siRNA target sequence for FLJ21477 (NM_025153.1,253-271).
gggcattgcggttctgaat

SEQ ID NO: 394102 - DNA, 19 bp, Homo sapiens
  siRNA target sequence for FLJ21477 (NM_025153.1,254-272).
ggcattgcggttctgaatt

SEQ ID NO: 394103 - DNA, 19 bp, Homo sapiens
  siRNA target sequence for FLJ21477 (NM_025153.1,365-383).
gacctccggaggtacaaat

SEQ ID NO: 394104 - DNA, 19 bp, Homo sapiens
  siRNA target sequence for FLJ21477 (NM_025153.1,373-391).
gaggtacaaatcggataaa

SEQ ID NO: 394105 - DNA, 19 bp, Homo sapiens
  siRNA target sequence for FLJ21477 (NM_025153.1,375-393).
ggtacaaatcggataaagt

SEQ ID NO: 394106 - DNA, 19 bp, Homo sapiens
  siRNA target sequence for FLJ21477 (NM_025153.1,502-520).
gattgtcccagcagacata

SEQ ID NO: 394107 - DNA, 19 bp, Homo sapiens
  siRNA target sequence for FLJ21477 (NM_025153.1,647-665).
ccagagcttttccacaata

SEQ ID NO: 394108 - DNA, 19 bp, Homo sapiens
  siRNA target sequence for FLJ21477 (NM_025153.1,650-668).
gagcttttccacaatacca

SEQ ID NO: 394109 - DNA, 19 bp, Homo sapiens
  siRNA target sequence for FLJ21477 (NM_025153.1,931-949).
cctcatgtgccttattgga

SEQ ID NO: 394110 - DNA, 19 bp, Homo sapiens
  siRNA target sequence for FLJ21477 (NM_025153.1,1038-1056).
cccttgggggcttctacat

SEQ ID NO: 394111 - DNA, 19 bp, Homo sapiens
  siRNA target sequence for FLJ21477 (NM_025153.1,1090-1108).
gatccccatctctttgtat

SEQ ID NO: 394112 - DNA, 19 bp, Homo sapiens
  siRNA target sequence for FLJ21477 (NM_025153.1,1094-1112).
cccatctctttgtatgtct

SEQ ID NO: 394113 - DNA, 19 bp, Homo sapiens
  siRNA target sequence for FLJ21477 (NM_025153.1,1130-1148).
ctcgggcaagtgttcttct

SEQ ID NO: 394114 - DNA, 19 bp, Homo sapiens
  siRNA target sequence for FLJ21477 (NM_025153.1,1175-1193).
gaagagaccgatttatcca

SEQ ID NO: 394115 - DNA, 19 bp, Homo sapiens
  siRNA target sequence for FLJ21477 (NM_025153.1,1316-1334).
gagtattctcaccaagaaa

SEQ ID NO: 394116 - DNA, 19 bp, Homo sapiens
  siRNA target sequence for FLJ21477 (NM_025153.1,1495-1513).
gatcagggctgttccaatt

SEQ ID NO: 394117 - DNA, 19 bp, Homo sapiens
  siRNA target sequence for FLJ21477 (NM_025153.1,1502-1520).
gctgttccaattacttgta

SEQ ID NO: 394118 - DNA, 19 bp, Homo sapiens
  siRNA target sequence for FLJ11848 (NM_025155.1,113-131).
catcccccagggaaaccat

SEQ ID NO: 394119 - DNA, 19 bp, Homo sapiens
  siRNA target sequence for FLJ11848 (NM_025155.1,145-163).
cctgacttgtcaaggaatt

SEQ ID NO: 394120 - DNA, 19 bp, Homo sapiens
  siRNA target sequence for FLJ11848 (NM_025155.1,254-272).
gaaaatgcatcttctaagt

SEQ ID NO: 394121 - DNA, 19 bp, Homo sapiens
  siRNA target sequence for FLJ11848 (NM_025155.1,278-296).
gcaccatatactacttttt

SEQ ID NO: 394122 - DNA, 19 bp, Homo sapiens
  siRNA target sequence for FLJ11848 (NM_025155.1,281-299).
ccatatactactttttcca

SEQ ID NO: 394123 - DNA, 19 bp, Homo sapiens
  siRNA target sequence for FLJ11848 (NM_025155.1,300-318).
gaattcatacaaagagtat

SEQ ID NO: 394124 - DNA, 19 bp, Homo sapiens
  siRNA target sequence for FLJ11848 (NM_025155.1,350-368).
cttggtgtgtcttctagta

SEQ ID NO: 394125 - DNA, 19 bp, Homo sapiens
  siRNA target sequence for FLJ11848 (NM_025155.1,369-387).
ctgacgggaccatgaaaat

SEQ ID NO: 394126 - DNA, 19 bp, Homo sapiens
  siRNA target sequence for FLJ11848 (NM_025155.1,371-389).
gacgggaccatgaaaatct

SEQ ID NO: 394127 - DNA, 19 bp, Homo sapiens
  siRNA target sequence for FLJ11848 (NM_025155.1,405-423).
gagaactcaggagagtatt

SEQ ID NO: 394128 - DNA, 19 bp, Homo sapiens
  siRNA target sequence for FLJ11848 (NM_025155.1,497-515).
gatgcccagctgaagatat

SEQ ID NO: 394129 - DNA, 19 bp, Homo sapiens
  siRNA target sequence for FLJ11848 (NM_025155.1,677-695).
gcagattgtggttcttcta

SEQ ID NO: 394130 - DNA, 19 bp, Homo sapiens
  siRNA target sequence for FLJ11848 (NM_025155.1,869-887).
ggctcagacgctttcaact

SEQ ID NO: 394131 - DNA, 19 bp, Homo sapiens
  siRNA target sequence for FLJ11848 (NM_025155.1,878-896).
gctttcaactgctgtactt

SEQ ID NO: 394132 - DNA, 19 bp, Homo sapiens
  siRNA target sequence for FLJ11848 (NM_025155.1,879-897).
ctttcaactgctgtacttt

SEQ ID NO: 394133 - DNA, 19 bp, Homo sapiens
  siRNA target sequence for FLJ11848 (NM_025155.1,966-984).
caagggctccggtacaagt

SEQ ID NO: 394134 - DNA, 19 bp, Homo sapiens
  siRNA target sequence for FLJ11848 (NM_025155.1,1079-1097).
caagacttagactatgtca

SEQ ID NO: 394135 - DNA, 19 bp, Homo sapiens
  siRNA target sequence for FLJ11848 (NM_025155.1,1148-1166).
gagaagcagatctacacat

SEQ ID NO: 394136 - DNA, 19 bp, Homo sapiens
  siRNA target sequence for FLJ11848 (NM_025155.1,1168-1186).
ctgtcgagacggtcttgta

SEQ ID NO: 394137 - DNA, 19 bp, Homo sapiens
  siRNA target sequence for WDR26 (NM_025160.3,80-98).
ggacagcttcccgatctaa

SEQ ID NO: 394138 - DNA, 19 bp, Homo sapiens
  siRNA target sequence for WDR26 (NM_025160.3,83-101).
cagcttcccgatctaaact

SEQ ID NO: 394139 - DNA, 19 bp, Homo sapiens
  siRNA target sequence for WDR26 (NM_025160.3,85-103).
gcttcccgatctaaactat

SEQ ID NO: 394140 - DNA, 19 bp, Homo sapiens
  siRNA target sequence for WDR26 (NM_025160.3,86-104).
cttcccgatctaaactatt

SEQ ID NO: 394141 - DNA, 19 bp, Homo sapiens
  siRNA target sequence for WDR26 (NM_025160.3,89-107).
cccgatctaaactattgga

SEQ ID NO: 394142 - DNA, 19 bp, Homo sapiens
  siRNA target sequence for WDR26 (NM_025160.3,90-108).
ccgatctaaactattggat

SEQ ID NO: 394143 - DNA, 19 bp, Homo sapiens
  siRNA target sequence for WDR26 (NM_025160.3,91-109).
cgatctaaactattggata

SEQ ID NO: 394144 - DNA, 19 bp, Homo sapiens
  siRNA target sequence for WDR26 (NM_025160.3,92-110).
gatctaaactattggataa

SEQ ID NO: 394145 - DNA, 19 bp, Homo sapiens
  siRNA target sequence for WDR26 (NM_025160.3,95-113).
ctaaactattggataaact

SEQ ID NO: 394146 - DNA, 19 bp, Homo sapiens
  siRNA target sequence for WDR26 (NM_025160.3,145-163).
cccccacggcgtttacaga

SEQ ID NO: 394147 - DNA, 19 bp, Homo sapiens
  siRNA target sequence for WDR26 (NM_025160.3,173-191).
ggcaggcggtggaactaca

SEQ ID NO: 394148 - DNA, 19 bp, Homo sapiens
  siRNA target sequence for WDR26 (NM_025160.3,175-193).
caggcggtggaactacaaa

SEQ ID NO: 394149 - DNA, 19 bp, Homo sapiens
  siRNA target sequence for WDR26 (NM_025160.3,194-212).
gggatcggtgcctatatca

SEQ ID NO: 394150 - DNA, 19 bp, Homo sapiens
  siRNA target sequence for WDR26 (NM_025160.3,196-214).
gatcggtgcctatatcaca

SEQ ID NO: 394151 - DNA, 19 bp, Homo sapiens
  siRNA target sequence for WDR26 (NM_025160.3,199-217).
cggtgcctatatcacaata

SEQ ID NO: 394152 - DNA, 19 bp, Homo sapiens
  siRNA target sequence for WDR26 (NM_025160.3,203-221).
gcctatatcacaataccaa

SEQ ID NO: 394153 - DNA, 19 bp, Homo sapiens
  siRNA target sequence for WDR26 (NM_025160.3,204-222).
cctatatcacaataccaaa

SEQ ID NO: 394154 - DNA, 19 bp, Homo sapiens
  siRNA target sequence for WDR26 (NM_025160.3,211-229).
cacaataccaaacttgata

SEQ ID NO: 394155 - DNA, 19 bp, Homo sapiens
  siRNA target sequence for WDR26 (NM_025160.3,252-270).
gcttatagaccatgtttgt

SEQ ID NO: 394156 - DNA, 19 bp, Homo sapiens
  siRNA target sequence for WDR26 (NM_025160.3,276-294).
gaggcagttcccatgttat

SEQ ID NO: 394157 - DNA, 19 bp, Homo sapiens
  siRNA target sequence for WDR26 (NM_025160.3,290-308).
gttatacgcagcagatact

SEQ ID NO: 394158 - DNA, 19 bp, Homo sapiens
  siRNA target sequence for WDR26 (NM_025160.3,311-329).
cggagcattgtaatgaagt

SEQ ID NO: 394159 - DNA, 19 bp, Homo sapiens
  siRNA target sequence for WDR26 (NM_025160.3,325-343).
gaagtgtggttctgtaaat

SEQ ID NO: 394160 - DNA, 19 bp, Homo sapiens
  siRNA target sequence for WDR26 (NM_025160.3,330-348).
gtggttctgtaaattctct

SEQ ID NO: 394161 - DNA, 19 bp, Homo sapiens
  siRNA target sequence for WDR26 (NM_025160.3,345-363).
ctctaatgatggcactaaa

SEQ ID NO: 394162 - DNA, 19 bp, Homo sapiens
  siRNA target sequence for WDR26 (NM_025160.3,382-400).
gatacaacagttatcatat

SEQ ID NO: 394163 - DNA, 19 bp, Homo sapiens
  siRNA target sequence for WDR26 (NM_025160.3,443-461).
cattagaaggacatgctta

SEQ ID NO: 394164 - DNA, 19 bp, Homo sapiens
  siRNA target sequence for WDR26 (NM_025160.3,482-500).
ggagtccagatgacaacta

SEQ ID NO: 394165 - DNA, 19 bp, Homo sapiens
  siRNA target sequence for WDR26 (NM_025160.3,485-503).
gtccagatgacaactatct

SEQ ID NO: 394166 - DNA, 19 bp, Homo sapiens
  siRNA target sequence for WDR26 (NM_025160.3,625-643).
gatgggaagcgctttgtga

SEQ ID NO: 394167 - DNA, 19 bp, Homo sapiens
  siRNA target sequence for WDR26 (NM_025160.3,655-673).
cgtgggcagttctatcagt

SEQ ID NO: 394168 - DNA, 19 bp, Homo sapiens
  siRNA target sequence for WDR26 (NM_025160.3,663-681).
gttctatcagtgtgactta

SEQ ID NO: 394169 - DNA, 19 bp, Homo sapiens
  siRNA target sequence for WDR26 (NM_025160.3,731-749).
ggtgcttgagtgatggaaa

SEQ ID NO: 394170 - DNA, 19 bp, Homo sapiens
  siRNA target sequence for WDR26 (NM_025160.3,778-796).
cgaattcggggctataact

SEQ ID NO: 394171 - DNA, 19 bp, Homo sapiens
  siRNA target sequence for WDR26 (NM_025160.3,779-797).
gaattcggggctataactt

SEQ ID NO: 394172 - DNA, 19 bp, Homo sapiens
  siRNA target sequence for WDR26 (NM_025160.3,804-822).
ccttacagataggaacata

SEQ ID NO: 394173 - DNA, 19 bp, Homo sapiens
  siRNA target sequence for WDR26 (NM_025160.3,819-837).
catagtacaagaagatcat

SEQ ID NO: 394174 - DNA, 19 bp, Homo sapiens
  siRNA target sequence for WDR26 (NM_025160.3,832-850).
gatcatcctattatgtctt

SEQ ID NO: 394175 - DNA, 19 bp, Homo sapiens
  siRNA target sequence for WDR26 (NM_025160.3,835-853).
catcctattatgtctttta

SEQ ID NO: 394176 - DNA, 19 bp, Homo sapiens
  siRNA target sequence for WDR26 (NM_025160.3,839-857).
ctattatgtcttttactat

SEQ ID NO: 394177 - DNA, 19 bp, Homo sapiens
  siRNA target sequence for WDR26 (NM_025160.3,868-886).
ggccgattagctttgttaa

SEQ ID NO: 394178 - DNA, 19 bp, Homo sapiens
  siRNA target sequence for WDR26 (NM_025160.3,869-887).
gccgattagctttgttaaa

SEQ ID NO: 394179 - DNA, 19 bp, Homo sapiens
  siRNA target sequence for WDR26 (NM_025160.3,870-888).
ccgattagctttgttaaat

SEQ ID NO: 394180 - DNA, 19 bp, Homo sapiens
  siRNA target sequence for WDR26 (NM_025160.3,892-910).
gcaactcagggagttcatt

SEQ ID NO: 394181 - DNA, 19 bp, Homo sapiens
  siRNA target sequence for WDR26 (NM_025160.3,916-934).
gacttgcaagacagagttt

SEQ ID NO: 394182 - DNA, 19 bp, Homo sapiens
  siRNA target sequence for WDR26 (NM_025160.3,925-943).
gacagagttttagtaagaa

SEQ ID NO: 394183 - DNA, 19 bp, Homo sapiens
  siRNA target sequence for WDR26 (NM_025160.3,945-963).
gtatcaaggtgttacacaa

SEQ ID NO: 394184 - DNA, 19 bp, Homo sapiens
  siRNA target sequence for WDR26 (NM_025160.3,955-973).
gttacacaagggttttata

SEQ ID NO: 394185 - DNA, 19 bp, Homo sapiens
  siRNA target sequence for WDR26 (NM_025160.3,966-984).
gttttatacaattcattca

SEQ ID NO: 394186 - DNA, 19 bp, Homo sapiens
  siRNA target sequence for WDR26 (NM_025160.3,1025-1043).
gtgaagatcacaaggttta

SEQ ID NO: 394187 - DNA, 19 bp, Homo sapiens
  siRNA target sequence for WDR26 (NM_025160.3,1087-1105).
gggcacacacgtacagtaa

SEQ ID NO: 394188 - DNA, 19 bp, Homo sapiens
  siRNA target sequence for WDR26 (NM_025160.3,1088-1106).
ggcacacacgtacagtaaa

SEQ ID NO: 394189 - DNA, 19 bp, Homo sapiens
  siRNA target sequence for WDR26 (NM_025160.3,1092-1110).
cacacgtacagtaaactgt

SEQ ID NO: 394190 - DNA, 19 bp, Homo sapiens
  siRNA target sequence for WDR26 (NM_025160.3,1113-1131).
gagctggaacccacagatt

SEQ ID NO: 394191 - DNA, 19 bp, Homo sapiens
  siRNA target sequence for WDR26 (NM_025160.3,1178-1196).
ggggaccagcaccttttat

SEQ ID NO: 394192 - DNA, 19 bp, Homo sapiens
  siRNA target sequence for WDR26 (NM_025160.3,1181-1199).
gaccagcaccttttataga

SEQ ID NO: 394193 - DNA, 19 bp, Homo sapiens
  siRNA target sequence for WDR26 (NM_025160.3,1219-1237).
gaatgcagtagcatggata

SEQ ID NO: 394194 - DNA, 19 bp, Homo sapiens
  siRNA target sequence for FLJ22175 (NM_025161.2,2453-2471).
gtggctccttgctgagaat

SEQ ID NO: 394195 - DNA, 19 bp, Homo sapiens
  siRNA target sequence for FLJ13386 (NM_025180.2,509-527).
ctcatgaaacagattgaca

SEQ ID NO: 394196 - DNA, 19 bp, Homo sapiens
  siRNA target sequence for FLJ13386 (NM_025180.2,535-553).
ggctcataaaaaatctgaa

SEQ ID NO: 394197 - DNA, 19 bp, Homo sapiens
  siRNA target sequence for FLJ13386 (NM_025180.2,596-614).
cgtgaacaggaacttaaga

SEQ ID NO: 394198 - DNA, 19 bp, Homo sapiens
  siRNA target sequence for FLJ13386 (NM_025180.2,626-644).
cagttggatgtgacacata

SEQ ID NO: 394199 - DNA, 19 bp, Homo sapiens
  siRNA target sequence for FLJ13386 (NM_025180.2,661-679).
gcatcagcaggtagaagaa

SEQ ID NO: 394200 - DNA, 19 bp, Homo sapiens
  siRNA target sequence for FLJ13386 (NM_025180.2,695-713).
caagagatgaccatggaat

SEQ ID NO: 394201 - DNA, 19 bp, Homo sapiens
  siRNA target sequence for FLJ13386 (NM_025180.2,698-716).
gagatgaccatggaatata

SEQ ID NO: 394202 - DNA, 19 bp, Homo sapiens
  siRNA target sequence for FLJ13386 (NM_025180.2,740-758).
gaagaattatgcatactga

SEQ ID NO: 394203 - DNA, 19 bp, Homo sapiens
  siRNA target sequence for FLJ13386 (NM_025180.2,755-773).
ctgaagagaagctatgaaa

SEQ ID NO: 394204 - DNA, 19 bp, Homo sapiens
  siRNA target sequence for FLJ13386 (NM_025180.2,825-843).
gggaagatcggtctgaaat

SEQ ID NO: 394205 - DNA, 19 bp, Homo sapiens
  siRNA target sequence for FLJ13386 (NM_025180.2,826-844).
ggaagatcggtctgaaatt

SEQ ID NO: 394206 - DNA, 19 bp, Homo sapiens
  siRNA target sequence for FLJ13386 (NM_025180.2,830-848).
gatcggtctgaaattgaga

SEQ ID NO: 394207 - DNA, 19 bp, Homo sapiens
  siRNA target sequence for FLJ13386 (NM_025180.2,895-913).
ggagaagcaacgcttgatt

SEQ ID NO: 394208 - DNA, 19 bp, Homo sapiens
  siRNA target sequence for FLJ13386 (NM_025180.2,896-914).
gagaagcaacgcttgattt

SEQ ID NO: 394209 - DNA, 19 bp, Homo sapiens
  siRNA target sequence for FLJ13386 (NM_025180.2,898-916).
gaagcaacgcttgatttat

SEQ ID NO: 394210 - DNA, 19 bp, Homo sapiens
  siRNA target sequence for FLJ13386 (NM_025180.2,954-972).
ctctggctgaacaatcaga

SEQ ID NO: 394211 - DNA, 19 bp, Homo sapiens
  siRNA target sequence for FLJ13386 (NM_025180.2,958-976).
ggctgaacaatcagagata

SEQ ID NO: 394212 - DNA, 19 bp, Homo sapiens
  siRNA target sequence for FLJ13386 (NM_025180.2,960-978).
ctgaacaatcagagataat

SEQ ID NO: 394213 - DNA, 19 bp, Homo sapiens
  siRNA target sequence for FLJ13386 (NM_025180.2,989-1007).
cttgtcaatcggaaacaga

SEQ ID NO: 394214 - DNA, 19 bp, Homo sapiens
  siRNA target sequence for FLJ13386 (NM_025180.2,992-1010).
gtcaatcggaaacagaaat

SEQ ID NO: 394215 - DNA, 19 bp, Homo sapiens
  siRNA target sequence for FLJ13386 (NM_025180.2,1013-1031).
gagtctgtggaactttcta

SEQ ID NO: 394216 - DNA, 19 bp, Homo sapiens
  siRNA target sequence for FLJ13386 (NM_025180.2,1029-1047).
ctagccaatcagaaattca

SEQ ID NO: 394217 - DNA, 19 bp, Homo sapiens
  siRNA target sequence for FLJ13386 (NM_025180.2,1072-1090).
ggctaatgacactatctgt

SEQ ID NO: 394218 - DNA, 19 bp, Homo sapiens
  siRNA target sequence for FLJ13386 (NM_025180.2,1138-1156).
ggttggaaccagtatgact

SEQ ID NO: 394219 - DNA, 19 bp, Homo sapiens
  siRNA target sequence for FLJ13386 (NM_025180.2,1194-1212).
gggaatctgaaaaactatt

SEQ ID NO: 394220 - DNA, 19 bp, Homo sapiens
  siRNA target sequence for FLJ13386 (NM_025180.2,1250-1268).
gctcttcagtctcaagaaa

SEQ ID NO: 394221 - DNA, 19 bp, Homo sapiens
  siRNA target sequence for FLJ13386 (NM_025180.2,1258-1276).
gtctcaagaaaatctcata

SEQ ID NO: 394222 - DNA, 19 bp, Homo sapiens
  siRNA target sequence for FLJ13386 (NM_025180.2,1273-1291).
catacatgaggccagaata

SEQ ID NO: 394223 - DNA, 19 bp, Homo sapiens
  siRNA target sequence for FLJ13386 (NM_025180.2,1330-1348).
cactcaacatgctgtagaa

SEQ ID NO: 394224 - DNA, 19 bp, Homo sapiens
  siRNA target sequence for FLJ13386 (NM_025180.2,1356-1374).
ggccacgggaagaatctct

SEQ ID NO: 394225 - DNA, 19 bp, Homo sapiens
  siRNA target sequence for FLJ13386 (NM_025180.2,1400-1418).
gggcagggggacttagaca

SEQ ID NO: 394226 - DNA, 19 bp, Homo sapiens
  siRNA target sequence for FLJ13386 (NM_025180.2,1435-1453).
gaattttacccatactagt

SEQ ID NO: 394227 - DNA, 19 bp, Homo sapiens
  siRNA target sequence for FLJ13386 (NM_025180.2,1571-1589).
gaagcacataacaatgaat

SEQ ID NO: 394228 - DNA, 19 bp, Homo sapiens
  siRNA target sequence for FLJ13386 (NM_025180.2,1575-1593).
cacataacaatgaatacaa

SEQ ID NO: 394229 - DNA, 19 bp, Homo sapiens
  siRNA target sequence for FLJ13386 (NM_025180.2,1647-1665).
gttctgcactagaaggaat

SEQ ID NO: 394230 - DNA, 19 bp, Homo sapiens
  siRNA target sequence for FLJ13386 (NM_025180.2,1672-1690).
ggaaatctcccatctaact

SEQ ID NO: 394231 - DNA, 19 bp, Homo sapiens
  siRNA target sequence for FLJ13386 (NM_025180.2,1700-1718).
catcagcgagatatcacta

SEQ ID NO: 394232 - DNA, 19 bp, Homo sapiens
  siRNA target sequence for FLJ13386 (NM_025180.2,1705-1723).
gcgagatatcactattgct

SEQ ID NO: 394233 - DNA, 19 bp, Homo sapiens
  siRNA target sequence for FLJ13386 (NM_025180.2,1889-1907).
catgaggcaaaagagattt

SEQ ID NO: 394234 - DNA, 19 bp, Homo sapiens
  siRNA target sequence for FLJ13386 (NM_025180.2,1916-1934).
gacctccaggagaattata

SEQ ID NO: 394235 - DNA, 19 bp, Homo sapiens
  siRNA target sequence for FLJ13386 (NM_025180.2,2117-2135).
cacagacatgatggaataa

SEQ ID NO: 394236 - DNA, 19 bp, Homo sapiens
  siRNA target sequence for FLJ13386 (NM_025180.2,2139-2157).
ctgagcactacaaaacaga

SEQ ID NO: 394237 - DNA, 19 bp, Homo sapiens
  siRNA target sequence for FLJ13386 (NM_025180.2,2174-2192).
ggacaagcgtcggatagta

SEQ ID NO: 394238 - DNA, 19 bp, Homo sapiens
  siRNA target sequence for FLJ13386 (NM_025180.2,2175-2193).
gacaagcgtcggatagtat

SEQ ID NO: 394239 - DNA, 19 bp, Homo sapiens
  siRNA target sequence for FLJ13386 (NM_025180.2,2248-2266).
ctccaccaggtctttgact

SEQ ID NO: 394240 - DNA, 19 bp, Homo sapiens
  siRNA target sequence for FLJ13386 (NM_025180.2,2296-2314).
gccttcagcgctagataca

SEQ ID NO: 394241 - DNA, 19 bp, Homo sapiens
  siRNA target sequence for FLJ13386 (NM_025180.2,2297-2315).
ccttcagcgctagatacaa

SEQ ID NO: 394242 - DNA, 19 bp, Homo sapiens
  siRNA target sequence for FLJ13386 (NM_025180.2,2301-2319).
cagcgctagatacaaatga

SEQ ID NO: 394243 - DNA, 19 bp, Homo sapiens
  siRNA target sequence for FLJ13386 (NM_025180.2,2337-2355).
ctatgtctgagagtatgaa

SEQ ID NO: 394244 - DNA, 19 bp, Homo sapiens
  siRNA target sequence for FLJ13386 (NM_025180.2,2360-2378).
caagaagagtttatatctt

SEQ ID NO: 394245 - DNA, 19 bp, Homo sapiens
  siRNA target sequence for FLJ13386 (NM_025180.2,2464-2482).
gcgcttggatgcccatatt

SEQ ID NO: 394246 - DNA, 19 bp, Homo sapiens
  siRNA target sequence for FLJ13386 (NM_025180.2,2466-2484).
gcttggatgcccatattga

SEQ ID NO: 394247 - DNA, 19 bp, Homo sapiens
  siRNA target sequence for FLJ13386 (NM_025180.2,2470-2488).
ggatgcccatattgaagaa

SEQ ID NO: 394248 - DNA, 19 bp, Homo sapiens
  siRNA target sequence for FLJ13386 (NM_025180.2,2475-2493).
cccatattgaagaactaaa

SEQ ID NO: 394249 - DNA, 19 bp, Homo sapiens
  siRNA target sequence for SLC35F5 (NM_025181.2,578-596).
gtcatgaaccgaatgaatt

SEQ ID NO: 394250 - DNA, 19 bp, Homo sapiens
  siRNA target sequence for SLC35F5 (NM_025181.2,701-719).
gtttttacccagtacaaca

SEQ ID NO: 394251 - DNA, 19 bp, Homo sapiens
  siRNA target sequence for SLC35F5 (NM_025181.2,708-726).
cccagtacaacaaaccatt

SEQ ID NO: 394252 - DNA, 19 bp, Homo sapiens
  siRNA target sequence for SLC35F5 (NM_025181.2,727-745).
cttcagcacctttgcaaaa

SEQ ID NO: 394253 - DNA, 19 bp, Homo sapiens
  siRNA target sequence for SLC35F5 (NM_025181.2,796-814).
gagacaacagtgtacaaga

SEQ ID NO: 394254 - DNA, 19 bp, Homo sapiens
  siRNA target sequence for SLC35F5 (NM_025181.2,885-903).
caactatgaatagttcttt

SEQ ID NO: 394255 - DNA, 19 bp, Homo sapiens
  siRNA target sequence for SLC35F5 (NM_025181.2,934-952).
ccatgatcttccaagtgaa

SEQ ID NO: 394256 - DNA, 19 bp, Homo sapiens
  siRNA target sequence for SLC35F5 (NM_025181.2,963-981).
gcacaaacattgatactga

SEQ ID NO: 394257 - DNA, 19 bp, Homo sapiens
  siRNA target sequence for SLC35F5 (NM_025181.2,999-1017).
ctcgtgtgaggttcagtaa

SEQ ID NO: 394258 - DNA, 19 bp, Homo sapiens
  siRNA target sequence for SLC35F5 (NM_025181.2,1002-1020).
gtgtgaggttcagtaatat

SEQ ID NO: 394259 - DNA, 19 bp, Homo sapiens
  siRNA target sequence for SLC35F5 (NM_025181.2,1042-1060).
gtcaagtcatgcattggaa

SEQ ID NO: 394260 - DNA, 19 bp, Homo sapiens
  siRNA target sequence for SLC35F5 (NM_025181.2,1052-1070).
gcattggaagcaaagttgt

SEQ ID NO: 394261 - DNA, 19 bp, Homo sapiens
  siRNA target sequence for SLC35F5 (NM_025181.2,1069-1087).
gtctcgcatgtcatatcct

SEQ ID NO: 394262 - DNA, 19 bp, Homo sapiens
  siRNA target sequence for SLC35F5 (NM_025181.2,1075-1093).
catgtcatatcctgtgaaa

SEQ ID NO: 394263 - DNA, 19 bp, Homo sapiens
  siRNA target sequence for SLC35F5 (NM_025181.2,1078-1096).
gtcatatcctgtgaaagaa

SEQ ID NO: 394264 - DNA, 19 bp, Homo sapiens
  siRNA target sequence for SLC35F5 (NM_025181.2,1080-1098).
catatcctgtgaaagaaca

SEQ ID NO: 394265 - DNA, 19 bp, Homo sapiens
  siRNA target sequence for SLC35F5 (NM_025181.2,1139-1157).
caagtagcgaaaattagct

SEQ ID NO: 394266 - DNA, 19 bp, Homo sapiens
  siRNA target sequence for SLC35F5 (NM_025181.2,1183-1201).
ggcaaatttgtcatatcaa

SEQ ID NO: 394267 - DNA, 19 bp, Homo sapiens
  siRNA target sequence for SLC35F5 (NM_025181.2,1212-1230).
cagacacacaagttgctat

SEQ ID NO: 394268 - DNA, 19 bp, Homo sapiens
  siRNA target sequence for SLC35F5 (NM_025181.2,1216-1234).
cacacaagttgctatagtt

SEQ ID NO: 394269 - DNA, 19 bp, Homo sapiens
  siRNA target sequence for SLC35F5 (NM_025181.2,1220-1238).
caagttgctatagttaata

SEQ ID NO: 394270 - DNA, 19 bp, Homo sapiens
  siRNA target sequence for SLC35F5 (NM_025181.2,1254-1272).
ccggactttttaccttaat

SEQ ID NO: 394271 - DNA, 19 bp, Homo sapiens
  siRNA target sequence for SLC35F5 (NM_025181.2,1257-1275).
gactttttaccttaatcct

SEQ ID NO: 394272 - DNA, 19 bp, Homo sapiens
  siRNA target sequence for SLC35F5 (NM_025181.2,1278-1296).
ctgcagtatttccaagtaa

SEQ ID NO: 394273 - DNA, 19 bp, Homo sapiens
  siRNA target sequence for SLC35F5 (NM_025181.2,1308-1326).
gatttaccctttctaaact

SEQ ID NO: 394274 - DNA, 19 bp, Homo sapiens
  siRNA target sequence for SLC35F5 (NM_025181.2,1315-1333).
cctttctaaactattagct

SEQ ID NO: 394275 - DNA, 19 bp, Homo sapiens
  siRNA target sequence for SLC35F5 (NM_025181.2,1344-1362).
gcattggaggcgttgtact

SEQ ID NO: 394276 - DNA, 19 bp, Homo sapiens
  siRNA target sequence for SLC35F5 (NM_025181.2,1350-1368).
gaggcgttgtactggtaaa

SEQ ID NO: 394277 - DNA, 19 bp, Homo sapiens
  siRNA target sequence for SLC35F5 (NM_025181.2,1353-1371).
gcgttgtactggtaaacct

SEQ ID NO: 394278 - DNA, 19 bp, Homo sapiens
  siRNA target sequence for SLC35F5 (NM_025181.2,1445-1463).
gctgtctatattgttatga

SEQ ID NO: 394279 - DNA, 19 bp, Homo sapiens
  siRNA target sequence for SLC35F5 (NM_025181.2,1591-1609).
cgagtttcccaataaagta

SEQ ID NO: 394280 - DNA, 19 bp, Homo sapiens
  siRNA target sequence for SLC35F5 (NM_025181.2,1598-1616).
cccaataaagtagtattaa

SEQ ID NO: 394281 - DNA, 19 bp, Homo sapiens
  siRNA target sequence for SLC35F5 (NM_025181.2,1607-1625).
gtagtattaatgtgcatta

SEQ ID NO: 394282 - DNA, 19 bp, Homo sapiens
  siRNA target sequence for SLC35F5 (NM_025181.2,1669-1687).
gttgtggggctgctttctt

SEQ ID NO: 394283 - DNA, 19 bp, Homo sapiens
  siRNA target sequence for SLC35F5 (NM_025181.2,1725-1743).
caatacctctgtccataat

SEQ ID NO: 394284 - DNA, 19 bp, Homo sapiens
  siRNA target sequence for SLC35F5 (NM_025181.2,1768-1786).
gcagttttcttggttattt

SEQ ID NO: 394285 - DNA, 19 bp, Homo sapiens
  siRNA target sequence for SLC35F5 (NM_025181.2,1796-1814).
gctatccctgtattttttt

SEQ ID NO: 394286 - DNA, 19 bp, Homo sapiens
  siRNA target sequence for SLC35F5 (NM_025181.2,1834-1852).
cctatgccattataataat

SEQ ID NO: 394287 - DNA, 19 bp, Homo sapiens
  siRNA target sequence for SLC35F5 (NM_025181.2,1940-1958).
cagtgtgagagtctcattt

SEQ ID NO: 394288 - DNA, 19 bp, Homo sapiens
  siRNA target sequence for SLC35F5 (NM_025181.2,1942-1960).
gtgtgagagtctcatttct

SEQ ID NO: 394289 - DNA, 19 bp, Homo sapiens
  siRNA target sequence for FLJ11560 (NM_025182.2,861-879).
cacacacttgacactgatt

SEQ ID NO: 394290 - DNA, 19 bp, Homo sapiens
  siRNA target sequence for FLJ11560 (NM_025182.2,1125-1143).
cctactgctgccaacagtt

SEQ ID NO: 394291 - DNA, 19 bp, Homo sapiens
  siRNA target sequence for FLJ11560 (NM_025182.2,1186-1204).
ggcccaaagagcctgtttt

SEQ ID NO: 394292 - DNA, 19 bp, Homo sapiens
  siRNA target sequence for FLJ11560 (NM_025182.2,1434-1452).
ggagctagtgggtcatact

SEQ ID NO: 394293 - DNA, 19 bp, Homo sapiens
  siRNA target sequence for FLJ11560 (NM_025182.2,1588-1606).
ccgtccaagtgaccttatt

SEQ ID NO: 394294 - DNA, 19 bp, Homo sapiens
  siRNA target sequence for FLJ11560 (NM_025182.2,1589-1607).
cgtccaagtgaccttattt

SEQ ID NO: 394295 - DNA, 19 bp, Homo sapiens
  siRNA target sequence for FLJ11560 (NM_025182.2,1813-1831).
gagatatccgcctgctttt

SEQ ID NO: 394296 - DNA, 19 bp, Homo sapiens
  siRNA target sequence for FLJ11560 (NM_025182.2,1815-1833).
gatatccgcctgctttttt

SEQ ID NO: 394297 - DNA, 19 bp, Homo sapiens
  siRNA target sequence for FLJ11560 (NM_025182.2,1886-1904).
gaccgaggcccctcataat

SEQ ID NO: 394298 - DNA, 19 bp, Homo sapiens
  siRNA target sequence for FLJ11560 (NM_025182.2,1889-1907).
cgaggcccctcataatcca

SEQ ID NO: 394299 - DNA, 19 bp, Homo sapiens
  siRNA target sequence for ITPKC (NM_025194.2,423-441).
gctggagacgacttgtctt

SEQ ID NO: 394300 - DNA, 19 bp, Homo sapiens
  siRNA target sequence for ITPKC (NM_025194.2,424-442).
ctggagacgacttgtcttt

SEQ ID NO: 394301 - DNA, 19 bp, Homo sapiens
  siRNA target sequence for ITPKC (NM_025194.2,485-503).
ggtccgacctccagtttca

SEQ ID NO: 394302 - DNA, 19 bp, Homo sapiens
  siRNA target sequence for ITPKC (NM_025194.2,694-712).
ggctcctggaaagaattgt

SEQ ID NO: 394303 - DNA, 19 bp, Homo sapiens
  siRNA target sequence for ITPKC (NM_025194.2,699-717).
ctggaaagaattgtatact

SEQ ID NO: 394304 - DNA, 19 bp, Homo sapiens
  siRNA target sequence for ITPKC (NM_025194.2,728-746).
ggacacaacaggatattga

SEQ ID NO: 394305 - DNA, 19 bp, Homo sapiens
  siRNA target sequence for ITPKC (NM_025194.2,755-773).
ggacagagccatatactga

SEQ ID NO: 394306 - DNA, 19 bp, Homo sapiens
  siRNA target sequence for ITPKC (NM_025194.2,756-774).
gacagagccatatactgat

SEQ ID NO: 394307 - DNA, 19 bp, Homo sapiens
  siRNA target sequence for ITPKC (NM_025194.2,827-845).
gtggtttccaaatacaaca

SEQ ID NO: 394308 - DNA, 19 bp, Homo sapiens
  siRNA target sequence for ITPKC (NM_025194.2,1240-1258).
gtctccttccgaaaacact

SEQ ID NO: 394309 - DNA, 19 bp, Homo sapiens
  siRNA target sequence for ITPKC (NM_025194.2,1306-1324).
gaggatggtcggattctga

SEQ ID NO: 394310 - DNA, 19 bp, Homo sapiens
  siRNA target sequence for ITPKC (NM_025194.2,1313-1331).
gtcggattctgaaacgttt

SEQ ID NO: 394311 - DNA, 19 bp, Homo sapiens
  siRNA target sequence for ITPKC (NM_025194.2,1317-1335).
gattctgaaacgtttctgt

SEQ ID NO: 394312 - DNA, 19 bp, Homo sapiens
  siRNA target sequence for ITPKC (NM_025194.2,1547-1565).
gtccccggaaggacatgta

SEQ ID NO: 394313 - DNA, 19 bp, Homo sapiens
  siRNA target sequence for ITPKC (NM_025194.2,1550-1568).
cccggaaggacatgtatga

SEQ ID NO: 394314 - DNA, 19 bp, Homo sapiens
  siRNA target sequence for ITPKC (NM_025194.2,1711-1729).
gcagatgggacctgtaaca

SEQ ID NO: 394315 - DNA, 19 bp, Homo sapiens
  siRNA target sequence for ITPKC (NM_025194.2,1818-1836).
cgtggcatgcctagaagaa

SEQ ID NO: 394316 - DNA, 19 bp, Homo sapiens
  siRNA target sequence for LOC80298 (NM_025198.2,401-419).
cgatcacctccaaaataca

SEQ ID NO: 394317 - DNA, 19 bp, Homo sapiens
  siRNA target sequence for LOC80298 (NM_025198.2,431-449).
gcatgcttcacctatacaa

SEQ ID NO: 394318 - DNA, 19 bp, Homo sapiens
  siRNA target sequence for LOC80298 (NM_025198.2,436-454).
cttcacctatacaactgat

SEQ ID NO: 394319 - DNA, 19 bp, Homo sapiens
  siRNA target sequence for LOC80298 (NM_025198.2,519-537).
ggaaaattcgtagattaaa

SEQ ID NO: 394320 - DNA, 19 bp, Homo sapiens
  siRNA target sequence for LOC80298 (NM_025198.2,520-538).
gaaaattcgtagattaaaa

SEQ ID NO: 394321 - DNA, 19 bp, Homo sapiens
  siRNA target sequence for LOC80298 (NM_025198.2,613-631).
gactgctgtagccagtatt

SEQ ID NO: 394322 - DNA, 19 bp, Homo sapiens
  siRNA target sequence for LOC80298 (NM_025198.2,660-678).
gtagtccaaccgctgttaa

SEQ ID NO: 394323 - DNA, 19 bp, Homo sapiens
  siRNA target sequence for LOC80298 (NM_025198.2,672-690).
ctgttaacacccagagaaa

SEQ ID NO: 394324 - DNA, 19 bp, Homo sapiens
  siRNA target sequence for LOC80298 (NM_025198.2,696-714).
ggcagttggtctgcaaaaa

SEQ ID NO: 394325 - DNA, 19 bp, Homo sapiens
  siRNA target sequence for LOC80298 (NM_025198.2,709-727).
caaaaatgaggaagagtta

SEQ ID NO: 394326 - DNA, 19 bp, Homo sapiens
  siRNA target sequence for LOC80298 (NM_025198.2,716-734).
gaggaagagttaatcaagt

SEQ ID NO: 394327 - DNA, 19 bp, Homo sapiens
  siRNA target sequence for LOC80298 (NM_025198.2,752-770).
gaatctttctttactatta

SEQ ID NO: 394328 - DNA, 19 bp, Homo sapiens
  siRNA target sequence for LOC80298 (NM_025198.2,790-808).
gctgaatgttcagttcttt

SEQ ID NO: 394329 - DNA, 19 bp, Homo sapiens
  siRNA target sequence for LOC80298 (NM_025198.2,809-827).
caagagttgggactaaaaa

SEQ ID NO: 394330 - DNA, 19 bp, Homo sapiens
  siRNA target sequence for LOC80298 (NM_025198.2,830-848).
gtggtcattagcagacttt

SEQ ID NO: 394331 - DNA, 19 bp, Homo sapiens
  siRNA target sequence for LOC80298 (NM_025198.2,833-851).
gtcattagcagacttttga

SEQ ID NO: 394332 - DNA, 19 bp, Homo sapiens
  siRNA target sequence for LOC80298 (NM_025198.2,835-853).
cattagcagacttttgaca

SEQ ID NO: 394333 - DNA, 19 bp, Homo sapiens
  siRNA target sequence for LOC80298 (NM_025198.2,850-868).
gacagctgcacctaatgtt

SEQ ID NO: 394334 - DNA, 19 bp, Homo sapiens
  siRNA target sequence for LOC80298 (NM_025198.2,852-870).
cagctgcacctaatgtttt

SEQ ID NO: 394335 - DNA, 19 bp, Homo sapiens
  siRNA target sequence for LOC80298 (NM_025198.2,857-875).
gcacctaatgtttttcata

SEQ ID NO: 394336 - DNA, 19 bp, Homo sapiens
  siRNA target sequence for LOC80298 (NM_025198.2,1010-1028).
cccacagctataaaggaaa

SEQ ID NO: 394337 - DNA, 19 bp, Homo sapiens
  siRNA target sequence for LOC80298 (NM_025198.2,1052-1070).
ggtttcaccagctttgaaa

SEQ ID NO: 394338 - DNA, 19 bp, Homo sapiens
  siRNA target sequence for LOC80298 (NM_025198.2,1109-1127).
caactttgcccaagaagta

SEQ ID NO: 394339 - DNA, 19 bp, Homo sapiens
  siRNA target sequence for LOC80298 (NM_025198.2,1116-1134).
gcccaagaagtatacagaa

SEQ ID NO: 394340 - DNA, 19 bp, Homo sapiens
  siRNA target sequence for LOC80298 (NM_025198.2,1294-1312).
gacgccaatggttcttgaa

SEQ ID NO: 394341 - DNA, 19 bp, Homo sapiens
  siRNA target sequence for LOC80298 (NM_025198.2,1317-1335).
caccacagatagtacagta

SEQ ID NO: 394342 - DNA, 19 bp, Homo sapiens
  siRNA target sequence for LOC80298 (NM_025198.2,1328-1346).
gtacagtacaggataagga

SEQ ID NO: 394343 - DNA, 19 bp, Homo sapiens
  siRNA target sequence for LOC80298 (NM_025198.2,1379-1397).
ggacatctagcaaatctaa

SEQ ID NO: 394344 - DNA, 19 bp, Homo sapiens
  siRNA target sequence for LOC80298 (NM_025198.2,1380-1398).
gacatctagcaaatctaaa

SEQ ID NO: 394345 - DNA, 19 bp, Homo sapiens
  siRNA target sequence for LOC80298 (NM_025198.2,1431-1449).
gcaaaattcaggccaaaaa

SEQ ID NO: 394346 - DNA, 19 bp, Homo sapiens
  siRNA target sequence for LOC80298 (NM_025198.2,1468-1486).
ccctgtggcaccattaaat

SEQ ID NO: 394347 - DNA, 19 bp, Homo sapiens
  siRNA target sequence for LOC80298 (NM_025198.2,1470-1488).
ctgtggcaccattaaatgt

SEQ ID NO: 394348 - DNA, 19 bp, Homo sapiens
  siRNA target sequence for LOC80298 (NM_025198.2,1474-1492).
ggcaccattaaatgttgaa

SEQ ID NO: 394349 - DNA, 19 bp, Homo sapiens
  siRNA target sequence for pp9099 (NM_025201.3,322-340).
gaaaacaccgctttatcct

SEQ ID NO: 394350 - DNA, 19 bp, Homo sapiens
  siRNA target sequence for pp9099 (NM_025201.3,596-614).
gcgcctggatcttgatgtt

SEQ ID NO: 394351 - DNA, 19 bp, Homo sapiens
  siRNA target sequence for pp9099 (NM_025201.3,620-638).
cagtgggccaccagtgttt

SEQ ID NO: 394352 - DNA, 19 bp, Homo sapiens
  siRNA target sequence for pp9099 (NM_025201.3,635-653).
gtttgcccccagcaatcat

SEQ ID NO: 394353 - DNA, 19 bp, Homo sapiens
  siRNA target sequence for pp9099 (NM_025201.3,874-892).
gcgtcctgcctgacaaact

SEQ ID NO: 394354 - DNA, 19 bp, Homo sapiens
  siRNA target sequence for pp9099 (NM_025201.3,1019-1037).
cccacccaagatcttatca

SEQ ID NO: 394355 - DNA, 19 bp, Homo sapiens
  siRNA target sequence for pp9099 (NM_025201.3,1021-1039).
cacccaagatcttatcaga

SEQ ID NO: 394356 - DNA, 19 bp, Homo sapiens
  siRNA target sequence for pp9099 (NM_025201.3,1295-1313).
gcccagggaacggctatat

SEQ ID NO: 394357 - DNA, 19 bp, Homo sapiens
  siRNA target sequence for pp9099 (NM_025201.3,1392-1410).
cctgttagtgccgaaacat

SEQ ID NO: 394358 - DNA, 19 bp, Homo sapiens
  siRNA target sequence for pp9099 (NM_025201.3,1393-1411).
ctgttagtgccgaaacatt

SEQ ID NO: 394359 - DNA, 19 bp, Homo sapiens
  siRNA target sequence for FLJ21945 (NM_025203.1,139-157).
ctggaccgatgggaatcaa

SEQ ID NO: 394360 - DNA, 19 bp, Homo sapiens
  siRNA target sequence for FLJ21945 (NM_025203.1,144-162).
ccgatgggaatcaagttgt

SEQ ID NO: 394361 - DNA, 19 bp, Homo sapiens
  siRNA target sequence for FLJ21945 (NM_025203.1,155-173).
caagttgtcctaactgatt

SEQ ID NO: 394362 - DNA, 19 bp, Homo sapiens
  siRNA target sequence for FLJ21945 (NM_025203.1,184-202).
cagtggagaggtcaagttt

SEQ ID NO: 394363 - DNA, 19 bp, Homo sapiens
  siRNA target sequence for FLJ21945 (NM_025203.1,337-355).
ccctatggagtcaagcaaa

SEQ ID NO: 394364 - DNA, 19 bp, Homo sapiens
  siRNA target sequence for FLJ21945 (NM_025203.1,338-356).
cctatggagtcaagcaaat

SEQ ID NO: 394365 - DNA, 19 bp, Homo sapiens
  siRNA target sequence for FLJ21945 (NM_025203.1,468-486).
ccattttccctaatgttca

SEQ ID NO: 394366 - DNA, 19 bp, Homo sapiens
  siRNA target sequence for FLJ21945 (NM_025203.1,700-718).
ctcacaggttgctatagct

SEQ ID NO: 394367 - DNA, 19 bp, Homo sapiens
  siRNA target sequence for FLJ21945 (NM_025203.1,720-738).
ctgagcttccattggataa

SEQ ID NO: 394368 - DNA, 19 bp, Homo sapiens
  siRNA target sequence for FLJ21945 (NM_025203.1,739-757).
gatctgtggcttaaatgca

SEQ ID NO: 394369 - DNA, 19 bp, Homo sapiens
  siRNA target sequence for FLJ21945 (NM_025203.1,791-809).
gacatgactccgtatgctt

SEQ ID NO: 394370 - DNA, 19 bp, Homo sapiens
  siRNA target sequence for FLJ21945 (NM_025203.1,796-814).
gactccgtatgctttacca

SEQ ID NO: 394371 - DNA, 19 bp, Homo sapiens
  siRNA target sequence for FLJ21945 (NM_025203.1,801-819).
cgtatgctttaccagttat

SEQ ID NO: 394372 - DNA, 19 bp, Homo sapiens
  siRNA target sequence for FLJ21945 (NM_025203.1,824-842).
gaagtacgctctatggata

SEQ ID NO: 394373 - DNA, 19 bp, Homo sapiens
  siRNA target sequence for FLJ21945 (NM_025203.1,845-863).
gaggcaactgattctgaaa

SEQ ID NO: 394374 - DNA, 19 bp, Homo sapiens
  siRNA target sequence for FLJ21945 (NM_025203.1,847-865).
ggcaactgattctgaaaca

SEQ ID NO: 394375 - DNA, 19 bp, Homo sapiens
  siRNA target sequence for FLJ21945 (NM_025203.1,879-897).
cagtttcttcttcctattt

SEQ ID NO: 394376 - DNA, 19 bp, Homo sapiens
  siRNA target sequence for FLJ21945 (NM_025203.1,908-926).
gatctaactcacatacatt

SEQ ID NO: 394377 - DNA, 19 bp, Homo sapiens
  siRNA target sequence for FLJ21945 (NM_025203.1,935-953).
cataagtctgagggtaatt

SEQ ID NO: 394378 - DNA, 19 bp, Homo sapiens
  siRNA target sequence for FLJ21945 (NM_025203.1,942-960).
ctgagggtaattctcttat

SEQ ID NO: 394379 - DNA, 19 bp, Homo sapiens
  siRNA target sequence for FLJ21945 (NM_025203.1,948-966).
gtaattctcttatttgtct

SEQ ID NO: 394380 - DNA, 19 bp, Homo sapiens
  siRNA target sequence for FLJ21945 (NM_025203.1,1048-1066).
gacgagaaaagtcactatt

SEQ ID NO: 394381 - DNA, 19 bp, Homo sapiens
  siRNA target sequence for FLJ21945 (NM_025203.1,1082-1100).
cctgatctgatagcattta

SEQ ID NO: 394382 - DNA, 19 bp, Homo sapiens
  siRNA target sequence for FLJ21945 (NM_025203.1,1083-1101).
ctgatctgatagcatttaa

SEQ ID NO: 394383 - DNA, 19 bp, Homo sapiens
  siRNA target sequence for FLJ21945 (NM_025203.1,1124-1142).
gtggcttccaacacttgta

SEQ ID NO: 394384 - DNA, 19 bp, Homo sapiens
  siRNA target sequence for FLJ21945 (NM_025203.1,1186-1204).
catccagcaaattcgatta

SEQ ID NO: 394385 - DNA, 19 bp, Homo sapiens
  siRNA target sequence for FLJ21945 (NM_025203.1,1199-1217).
cgattagagaacactgaaa

SEQ ID NO: 394386 - DNA, 19 bp, Homo sapiens
  siRNA target sequence for FLJ21945 (NM_025203.1,1240-1258).
gacagaccaactattacta

SEQ ID NO: 394387 - DNA, 19 bp, Homo sapiens
  siRNA target sequence for FLJ21945 (NM_025203.1,1242-1260).
cagaccaactattactaat

SEQ ID NO: 394388 - DNA, 19 bp, Homo sapiens
  siRNA target sequence for FLJ21945 (NM_025203.1,1244-1262).
gaccaactattactaattt

SEQ ID NO: 394389 - DNA, 19 bp, Homo sapiens
  siRNA target sequence for FLJ21945 (NM_025203.1,1316-1334).
gatcagtatgccattagct

SEQ ID NO: 394390 - DNA, 19 bp, Homo sapiens
  siRNA target sequence for FLJ21945 (NM_025203.1,1321-1339).
gtatgccattagcttgatt

SEQ ID NO: 394391 - DNA, 19 bp, Homo sapiens
  siRNA target sequence for FLJ21945 (NM_025203.1,1327-1345).
cattagcttgattgttaga

SEQ ID NO: 394392 - DNA, 19 bp, Homo sapiens
  siRNA target sequence for FLJ21945 (NM_025203.1,1407-1425).
ctttcagtgctccgttaaa

SEQ ID NO: 394393 - DNA, 19 bp, Homo sapiens
  siRNA target sequence for FLJ21945 (NM_025203.1,1487-1505).
gggctgttgctgacagtta

SEQ ID NO: 394394 - DNA, 19 bp, Homo sapiens
  siRNA target sequence for FLJ21945 (NM_025203.1,1527-1545).
ggcctggaagaacacttat

SEQ ID NO: 394395 - DNA, 19 bp, Homo sapiens
  siRNA target sequence for FLJ21945 (NM_025203.1,1556-1574).
cagagtcctctgtctagta

SEQ ID NO: 394396 - DNA, 19 bp, Homo sapiens
  siRNA target sequence for FLJ21945 (NM_025203.1,1766-1784).
gaaatgcaacggtgtcttt

SEQ ID NO: 394397 - DNA, 19 bp, Homo sapiens
  siRNA target sequence for FLJ21945 (NM_025203.1,1771-1789).
gcaacggtgtctttctgaa

SEQ ID NO: 394398 - DNA, 19 bp, Homo sapiens
  siRNA target sequence for FLJ21945 (NM_025203.1,1777-1795).
gtgtctttctgaacttaca

SEQ ID NO: 394399 - DNA, 19 bp, Homo sapiens
  siRNA target sequence for FLJ21945 (NM_025203.1,1816-1834).
gaaatcctcttcagtgtat

SEQ ID NO: 394400 - DNA, 19 bp, Homo sapiens
  siRNA target sequence for FLJ21945 (NM_025203.1,1842-1860).
ctcaagatcttccttatgt

SEQ ID NO: 394401 - DNA, 19 bp, Homo sapiens
  siRNA target sequence for FLJ21945 (NM_025203.1,1873-1891).
ccagaaaccttattatcta

SEQ ID NO: 394402 - DNA, 19 bp, Homo sapiens
  siRNA target sequence for FLJ21945 (NM_025203.1,1889-1907).
ctaggtcctgttgttgaaa

SEQ ID NO: 394403 - DNA, 19 bp, Homo sapiens
  siRNA target sequence for FLJ21945 (NM_025203.1,2030-2048).
ggctttatcccgttaacct

SEQ ID NO: 394404 - DNA, 19 bp, Homo sapiens
  siRNA target sequence for FLJ21945 (NM_025203.1,2031-2049).
gctttatcccgttaacctt

SEQ ID NO: 394405 - DNA, 19 bp, Homo sapiens
  siRNA target sequence for FLJ21945 (NM_025203.1,2062-2080).
ggaaataatcataagagat

SEQ ID NO: 394406 - DNA, 19 bp, Homo sapiens
  siRNA target sequence for FLJ21945 (NM_025203.1,2168-2186).
gctgcccccagtttagata

SEQ ID NO: 394407 - DNA, 19 bp, Homo sapiens
  siRNA target sequence for FLJ21945 (NM_025203.1,2183-2201).
gataccactggctgttgta

SEQ ID NO: 394408 - DNA, 19 bp, Homo sapiens
  siRNA target sequence for FLJ21945 (NM_025203.1,2193-2211).
gctgttgtaaccatgtaga

SEQ ID NO: 394409 - DNA, 19 bp, Homo sapiens
  siRNA target sequence for PP2447 (NM_025204.2,365-383).
gcaagagggacgttgtgaa

SEQ ID NO: 394410 - DNA, 19 bp, Homo sapiens
  siRNA target sequence for PP2447 (NM_025204.2,877-895).
gagcgcgacgtctacctaa

SEQ ID NO: 394411 - DNA, 19 bp, Homo sapiens
  siRNA target sequence for PP2447 (NM_025204.2,881-899).
gcgacgtctacctaaccta

SEQ ID NO: 394412 - DNA, 19 bp, Homo sapiens
  siRNA target sequence for EG1 (NM_025205.1,21-39).
ccactagggggtatgtttt

SEQ ID NO: 394413 - DNA, 19 bp, Homo sapiens
  siRNA target sequence for EG1 (NM_025205.1,189-207).
gtgagtcaggactatgtca

SEQ ID NO: 394414 - DNA, 19 bp, Homo sapiens
  siRNA target sequence for EG1 (NM_025205.1,191-209).
gagtcaggactatgtcaat

SEQ ID NO: 394415 - DNA, 19 bp, Homo sapiens
  siRNA target sequence for EG1 (NM_025205.1,210-228).
ggcaccgatcaggaagaaa

SEQ ID NO: 394416 - DNA, 19 bp, Homo sapiens
  siRNA target sequence for EG1 (NM_025205.1,211-229).
gcaccgatcaggaagaaat

SEQ ID NO: 394417 - DNA, 19 bp, Homo sapiens
  siRNA target sequence for EG1 (NM_025205.1,215-233).
cgatcaggaagaaattcga

SEQ ID NO: 394418 - DNA, 19 bp, Homo sapiens
  siRNA target sequence for EG1 (NM_025205.1,216-234).
gatcaggaagaaattcgaa

SEQ ID NO: 394419 - DNA, 19 bp, Homo sapiens
  siRNA target sequence for EG1 (NM_025205.1,235-253).
ccggtgttgatcagtgtat

SEQ ID NO: 394420 - DNA, 19 bp, Homo sapiens
  siRNA target sequence for EG1 (NM_025205.1,273-291).
gcaagacagacagaatgtt

SEQ ID NO: 394421 - DNA, 19 bp, Homo sapiens
  siRNA target sequence for EG1 (NM_025205.1,274-292).
caagacagacagaatgttt

SEQ ID NO: 394422 - DNA, 19 bp, Homo sapiens
  siRNA target sequence for EG1 (NM_025205.1,277-295).
gacagacagaatgtttttt

SEQ ID NO: 394423 - DNA, 19 bp, Homo sapiens
  siRNA target sequence for EG1 (NM_025205.1,356-374).
gtcagaactaaggaatgaa

SEQ ID NO: 394424 - DNA, 19 bp, Homo sapiens
  siRNA target sequence for SE57-1 (NM_025214.1,245-263).
gtctacgtccgctcacatt

SEQ ID NO: 394425 - DNA, 19 bp, Homo sapiens
  siRNA target sequence for SE57-1 (NM_025214.1,247-265).
ctacgtccgctcacattat

SEQ ID NO: 394426 - DNA, 19 bp, Homo sapiens
  siRNA target sequence for SE57-1 (NM_025214.1,250-268).
cgtccgctcacattattga

SEQ ID NO: 394427 - DNA, 19 bp, Homo sapiens
  siRNA target sequence for SE57-1 (NM_025214.1,251-269).
gtccgctcacattattgaa

SEQ ID NO: 394428 - DNA, 19 bp, Homo sapiens
  siRNA target sequence for SE57-1 (NM_025214.1,253-271).
ccgctcacattattgaaga

SEQ ID NO: 394429 - DNA, 19 bp, Homo sapiens
  siRNA target sequence for SE57-1 (NM_025214.1,254-272).
cgctcacattattgaagaa

SEQ ID NO: 394430 - DNA, 19 bp, Homo sapiens
  siRNA target sequence for SE57-1 (NM_025214.1,275-293).
cgagtatgtgaaaaagatt

SEQ ID NO: 394431 - DNA, 19 bp, Homo sapiens
  siRNA target sequence for SE57-1 (NM_025214.1,284-302).
gaaaaagattcgaactact

SEQ ID NO: 394432 - DNA, 19 bp, Homo sapiens
  siRNA target sequence for SE57-1 (NM_025214.1,294-312).
cgaactactctgcaaaaga

SEQ ID NO: 394433 - DNA, 19 bp, Homo sapiens
  siRNA target sequence for SE57-1 (NM_025214.1,343-361).
gacatgacagtacaaatca

SEQ ID NO: 394434 - DNA, 19 bp, Homo sapiens
  siRNA target sequence for SE57-1 (NM_025214.1,350-368).
cagtacaaatcacaaacta

SEQ ID NO: 394435 - DNA, 19 bp, Homo sapiens
  siRNA target sequence for SE57-1 (NM_025214.1,352-370).
gtacaaatcacaaactaga

SEQ ID NO: 394436 - DNA, 19 bp, Homo sapiens
  siRNA target sequence for SE57-1 (NM_025214.1,390-408).
cttcaacagggctctgatt

SEQ ID NO: 394437 - DNA, 19 bp, Homo sapiens
  siRNA target sequence for SE57-1 (NM_025214.1,474-492).
cagctcttagaaatgaaca

SEQ ID NO: 394438 - DNA, 19 bp, Homo sapiens
  siRNA target sequence for SE57-1 (NM_025214.1,476-494).
gctcttagaaatgaacaaa

SEQ ID NO: 394439 - DNA, 19 bp, Homo sapiens
  siRNA target sequence for SE57-1 (NM_025214.1,563-581).
ggcccagagattatttgaa

SEQ ID NO: 394440 - DNA, 19 bp, Homo sapiens
  siRNA target sequence for SE57-1 (NM_025214.1,564-582).
gcccagagattatttgaaa

SEQ ID NO: 394441 - DNA, 19 bp, Homo sapiens
  siRNA target sequence for SE57-1 (NM_025214.1,1064-1082).
ccaggtagcactttcatct

SEQ ID NO: 394442 - DNA, 19 bp, Homo sapiens
  siRNA target sequence for SE57-1 (NM_025214.1,1089-1107).
cctaggacaaaggtatcta

SEQ ID NO: 394443 - DNA, 19 bp, Homo sapiens
  siRNA target sequence for SE57-1 (NM_025214.1,1090-1108).
ctaggacaaaggtatctaa

SEQ ID NO: 394444 - DNA, 19 bp, Homo sapiens
  siRNA target sequence for SE57-1 (NM_025214.1,1137-1155).
gaaggtgtttccccttatt

SEQ ID NO: 394445 - DNA, 19 bp, Homo sapiens
  siRNA target sequence for SE57-1 (NM_025214.1,1140-1158).
ggtgtttccccttatttaa

SEQ ID NO: 394446 - DNA, 19 bp, Homo sapiens
  siRNA target sequence for SE57-1 (NM_025214.1,1141-1159).
gtgtttccccttatttaat

SEQ ID NO: 394447 - DNA, 19 bp, Homo sapiens
  siRNA target sequence for PRO2730 (NM_025222.2,1354-1372).
cctgcccaccacaaattgt

SEQ ID NO: 394448 - DNA, 19 bp, Homo sapiens
  siRNA target sequence for PRO2730 (NM_025222.2,1357-1375).
gcccaccacaaattgtgta

SEQ ID NO: 394449 - DNA, 19 bp, Homo sapiens
  siRNA target sequence for PRO2730 (NM_025222.2,1363-1381).
cacaaattgtgtacatagt

SEQ ID NO: 394450 - DNA, 19 bp, Homo sapiens
  siRNA target sequence for PRO2730 (NM_025222.2,1426-1444).
ggttctaggcctgtgttat

SEQ ID NO: 394451 - DNA, 19 bp, Homo sapiens
  siRNA target sequence for PRO2730 (NM_025222.2,1427-1445).
gttctaggcctgtgttata

SEQ ID NO: 394452 - DNA, 19 bp, Homo sapiens
  siRNA target sequence for PRO2730 (NM_025222.2,1433-1451).
ggcctgtgttatatgtcat

SEQ ID NO: 394453 - DNA, 19 bp, Homo sapiens
  siRNA target sequence for PRO2730 (NM_025222.2,1434-1452).
gcctgtgttatatgtcata

SEQ ID NO: 394454 - DNA, 19 bp, Homo sapiens
  siRNA target sequence for PRO2730 (NM_025222.2,1505-1523).
gtgtatgcaccttcattta

SEQ ID NO: 394455 - DNA, 19 bp, Homo sapiens
  siRNA target sequence for PRO2730 (NM_025222.2,1511-1529).
gcaccttcatttaaataca

SEQ ID NO: 394456 - DNA, 19 bp, Homo sapiens
  siRNA target sequence for PRO2730 (NM_025222.2,1570-1588).
catatatctctcatctgta

SEQ ID NO: 394457 - DNA, 19 bp, Homo sapiens
  siRNA target sequence for PRO2730 (NM_025222.2,1641-1659).
ctgcatccctgctaatagt

SEQ ID NO: 394458 - DNA, 19 bp, Homo sapiens
  siRNA target sequence for PRO2730 (NM_025222.2,1643-1661).
gcatccctgctaatagtgt

SEQ ID NO: 394459 - DNA, 19 bp, Homo sapiens
  siRNA target sequence for PRO2730 (NM_025222.2,1644-1662).
catccctgctaatagtgtt

SEQ ID NO: 394460 - DNA, 19 bp, Homo sapiens
  siRNA target sequence for PRO2730 (NM_025222.2,1658-1676).
gtgtttgccacaagtatta

SEQ ID NO: 394461 - DNA, 19 bp, Homo sapiens
  siRNA target sequence for PRO2730 (NM_025222.2,1660-1678).
gtttgccacaagtattagt

SEQ ID NO: 394462 - DNA, 19 bp, Homo sapiens
  siRNA target sequence for PRO2730 (NM_025222.2,1713-1731).
ctgaagcaaagctgatagt

SEQ ID NO: 394463 - DNA, 19 bp, Homo sapiens
  siRNA target sequence for T3JAM (NM_025228.1,358-376).
gtgagcgcaggcaagagat

SEQ ID NO: 394464 - DNA, 19 bp, Homo sapiens
  siRNA target sequence for T3JAM (NM_025228.1,390-408).
cgctgccgtcccaatgtga

SEQ ID NO: 394465 - DNA, 19 bp, Homo sapiens
  siRNA target sequence for T3JAM (NM_025228.1,737-755).
ggcagaaggaccaacaatt

SEQ ID NO: 394466 - DNA, 19 bp, Homo sapiens
  siRNA target sequence for T3JAM (NM_025228.1,738-756).
gcagaaggaccaacaatta

SEQ ID NO: 394467 - DNA, 19 bp, Homo sapiens
  siRNA target sequence for T3JAM (NM_025228.1,765-783).
gccagtcagcaaaccaatt

SEQ ID NO: 394468 - DNA, 19 bp, Homo sapiens
  siRNA target sequence for T3JAM (NM_025228.1,766-784).
ccagtcagcaaaccaatta

SEQ ID NO: 394469 - DNA, 19 bp, Homo sapiens
  siRNA target sequence for T3JAM (NM_025228.1,925-943).
cttggaagggacagcttaa

SEQ ID NO: 394470 - DNA, 19 bp, Homo sapiens
  siRNA target sequence for T3JAM (NM_025228.1,962-980).
gaaactgagatccttagaa

SEQ ID NO: 394471 - DNA, 19 bp, Homo sapiens
  siRNA target sequence for T3JAM (NM_025228.1,973-991).
ccttagaaaaccagctata

SEQ ID NO: 394472 - DNA, 19 bp, Homo sapiens
  siRNA target sequence for T3JAM (NM_025228.1,1288-1306).
cagatagcagggacttaca

SEQ ID NO: 394473 - DNA, 19 bp, Homo sapiens
  siRNA target sequence for T3JAM (NM_025228.1,1294-1312).
gcagggacttacagatgaa

SEQ ID NO: 394474 - DNA, 19 bp, Homo sapiens
  siRNA target sequence for T3JAM (NM_025228.1,1316-1334).
ggccctgcgatttttggaa

SEQ ID NO: 394475 - DNA, 19 bp, Homo sapiens
  siRNA target sequence for T3JAM (NM_025228.1,1317-1335).
gccctgcgatttttggaaa

SEQ ID NO: 394476 - DNA, 19 bp, Homo sapiens
  siRNA target sequence for T3JAM (NM_025228.1,1319-1337).
cctgcgatttttggaaaat

SEQ ID NO: 394477 - DNA, 19 bp, Homo sapiens
  siRNA target sequence for T3JAM (NM_025228.1,1346-1364).
gcaactgcaggccaagatt

SEQ ID NO: 394478 - DNA, 19 bp, Homo sapiens
  siRNA target sequence for T3JAM (NM_025228.1,1386-1404).
gacctgtgcagcttggata

SEQ ID NO: 394479 - DNA, 19 bp, Homo sapiens
  siRNA target sequence for T3JAM (NM_025228.1,1409-1427).
ggacctacaagatcaacta

SEQ ID NO: 394480 - DNA, 19 bp, Homo sapiens
  siRNA target sequence for T3JAM (NM_025228.1,1410-1428).
gacctacaagatcaactaa

SEQ ID NO: 394481 - DNA, 19 bp, Homo sapiens
  siRNA target sequence for T3JAM (NM_025228.1,1472-1490).
gcagttgcagggtttgctt

SEQ ID NO: 394482 - DNA, 19 bp, Homo sapiens
  siRNA target sequence for T3JAM (NM_025228.1,1478-1496).
gcagggtttgcttcaaaat

SEQ ID NO: 394483 - DNA, 19 bp, Homo sapiens
  siRNA target sequence for T3JAM (NM_025228.1,1481-1499).
gggtttgcttcaaaatcaa

SEQ ID NO: 394484 - DNA, 19 bp, Homo sapiens
  siRNA target sequence for FLJ22246 (NM_025232.2,498-516).
gatgctgtgtccagcttat

SEQ ID NO: 394485 - DNA, 19 bp, Homo sapiens
  siRNA target sequence for FLJ22246 (NM_025232.2,501-519).
gctgtgtccagcttatgct

SEQ ID NO: 394486 - DNA, 19 bp, Homo sapiens
  siRNA target sequence for FLJ22246 (NM_025232.2,502-520).
ctgtgtccagcttatgctt

SEQ ID NO: 394487 - DNA, 19 bp, Homo sapiens
  siRNA target sequence for FLJ22246 (NM_025232.2,509-527).
cagcttatgcttcctataa

SEQ ID NO: 394488 - DNA, 19 bp, Homo sapiens
  siRNA target sequence for FLJ22246 (NM_025232.2,559-577).
gtgcggtggatgatgtact

SEQ ID NO: 394489 - DNA, 19 bp, Homo sapiens
  siRNA target sequence for FLJ22246 (NM_025232.2,607-625).
gagatcgttacagacattt

SEQ ID NO: 394490 - DNA, 19 bp, Homo sapiens
  siRNA target sequence for FLJ22246 (NM_025232.2,609-627).
gatcgttacagacattttt

SEQ ID NO: 394491 - DNA, 19 bp, Homo sapiens
  siRNA target sequence for FLJ22246 (NM_025232.2,708-726).
cctgctttaccgcaagttt

SEQ ID NO: 394492 - DNA, 19 bp, Homo sapiens
  siRNA target sequence for REC14 (NM_025234.1,81-99).
ccaaccagtacggtattct

SEQ ID NO: 394493 - DNA, 19 bp, Homo sapiens
  siRNA target sequence for REC14 (NM_025234.1,88-106).
gtacggtattctcttcaaa

SEQ ID NO: 394494 - DNA, 19 bp, Homo sapiens
  siRNA target sequence for REC14 (NM_025234.1,91-109).
cggtattctcttcaaacaa

SEQ ID NO: 394495 - DNA, 19 bp, Homo sapiens
  siRNA target sequence for REC14 (NM_025234.1,119-137).
catgatgatgccatttggt

SEQ ID NO: 394496 - DNA, 19 bp, Homo sapiens
  siRNA target sequence for REC14 (NM_025234.1,341-359).
cgtctttgggacttggaaa

SEQ ID NO: 394497 - DNA, 19 bp, Homo sapiens
  siRNA target sequence for REC14 (NM_025234.1,455-473).
gtcgggaaagtgaacattt

SEQ ID NO: 394498 - DNA, 19 bp, Homo sapiens
  siRNA target sequence for REC14 (NM_025234.1,509-527).
gacacgagaggaaaattca

SEQ ID NO: 394499 - DNA, 19 bp, Homo sapiens
  siRNA target sequence for REC14 (NM_025234.1,511-529).
cacgagaggaaaattcatt

SEQ ID NO: 394500 - DNA, 19 bp, Homo sapiens
  siRNA target sequence for REC14 (NM_025234.1,519-537).
gaaaattcattcttagtat

SEQ ID NO: 394501 - DNA, 19 bp, Homo sapiens
  siRNA target sequence for REC14 (NM_025234.1,575-593).
gccatagatggaatcatca

SEQ ID NO: 394502 - DNA, 19 bp, Homo sapiens
  siRNA target sequence for REC14 (NM_025234.1,688-706).
ccttgtcactgcttcagat

SEQ ID NO: 394503 - DNA, 19 bp, Homo sapiens
  siRNA target sequence for REC14 (NM_025234.1,711-729).
gctacatcaagatctatga

SEQ ID NO: 394504 - DNA, 19 bp, Homo sapiens
  siRNA target sequence for REC14 (NM_025234.1,781-799).
gctgaacgttgcattctgt

SEQ ID NO: 394505 - DNA, 19 bp, Homo sapiens
  siRNA target sequence for REC14 (NM_025234.1,801-819).
ctgatgacactcactttgt

SEQ ID NO: 394506 - DNA, 19 bp, Homo sapiens
  siRNA target sequence for REC14 (NM_025234.1,823-841).
cagttcgtctgacaaaagt

SEQ ID NO: 394507 - DNA, 19 bp, Homo sapiens
  siRNA target sequence for REC14 (NM_025234.1,825-843).
gttcgtctgacaaaagtgt

SEQ ID NO: 394508 - DNA, 19 bp, Homo sapiens
  siRNA target sequence for REC14 (NM_025234.1,902-920).
caggtctggggagtaaaat

SEQ ID NO: 394509 - DNA, 19 bp, Homo sapiens
  siRNA target sequence for REC14 (NM_025234.1,905-923).
gtctggggagtaaaataca

SEQ ID NO: 394510 - DNA, 19 bp, Homo sapiens
  siRNA target sequence for REC14 (NM_025234.1,907-925).
ctggggagtaaaatacaat

SEQ ID NO: 394511 - DNA, 19 bp, Homo sapiens
  siRNA target sequence for REC14 (NM_025234.1,961-979).
ccaggaaattcacatctat

SEQ ID NO: 394512 - DNA, 19 bp, Homo sapiens
  siRNA target sequence for REC14 (NM_025234.1,973-991).
catctatgattgtccaatt

SEQ ID NO: 394513 - DNA, 19 bp, Homo sapiens
  siRNA target sequence for UBXD1 (NM_025241.1,152-170).
ccggtcagaagctcaaaga

SEQ ID NO: 394514 - DNA, 19 bp, Homo sapiens
  siRNA target sequence for UBXD1 (NM_025241.1,448-466).
gtgcctggcgtgtacttca

SEQ ID NO: 394515 - DNA, 19 bp, Homo sapiens
  siRNA target sequence for UBXD1 (NM_025241.1,563-581).
cctccatcatgaagatcta

SEQ ID NO: 394516 - DNA, 19 bp, Homo sapiens
  siRNA target sequence for UBXD1 (NM_025241.1,576-594).
gatctacacgttcaacaaa

SEQ ID NO: 394517 - DNA, 19 bp, Homo sapiens
  siRNA target sequence for UBXD1 (NM_025241.1,1087-1105).
ctgcgcaagtacaactaca

SEQ ID NO: 394518 - DNA, 19 bp, Homo sapiens
  siRNA target sequence for MGC5601 (NM_025247.2,307-325).
cctacagagcggtgatttt

SEQ ID NO: 394519 - DNA, 19 bp, Homo sapiens
  siRNA target sequence for MGC5601 (NM_025247.2,395-413).
cccttctggaactatatta

SEQ ID NO: 394520 - DNA, 19 bp, Homo sapiens
  siRNA target sequence for MGC5601 (NM_025247.2,482-500).
gggttttttacgagaattt

SEQ ID NO: 394521 - DNA, 19 bp, Homo sapiens
  siRNA target sequence for MGC5601 (NM_025247.2,492-510).
cgagaatttgggagacttt

SEQ ID NO: 394522 - DNA, 19 bp, Homo sapiens
  siRNA target sequence for MGC5601 (NM_025247.2,533-551).
cgtgcctgtggactcattt

SEQ ID NO: 394523 - DNA, 19 bp, Homo sapiens
  siRNA target sequence for MGC5601 (NM_025247.2,534-552).
gtgcctgtggactcatttt

SEQ ID NO: 394524 - DNA, 19 bp, Homo sapiens
  siRNA target sequence for MGC5601 (NM_025247.2,690-708).
cccctggaccggaaacagt

SEQ ID NO: 394525 - DNA, 19 bp, Homo sapiens
  siRNA target sequence for MGC5601 (NM_025247.2,691-709).
ccctggaccggaaacagtt

SEQ ID NO: 394526 - DNA, 19 bp, Homo sapiens
  siRNA target sequence for MGC5601 (NM_025247.2,692-710).
cctggaccggaaacagttt

SEQ ID NO: 394527 - DNA, 19 bp, Homo sapiens
  siRNA target sequence for MGC5601 (NM_025247.2,750-768).
ccagaccctaggatctaca

SEQ ID NO: 394528 - DNA, 19 bp, Homo sapiens
  siRNA target sequence for MGC5601 (NM_025247.2,751-769).
cagaccctaggatctacaa

SEQ ID NO: 394529 - DNA, 19 bp, Homo sapiens
  siRNA target sequence for MGC5601 (NM_025247.2,799-817).
cctctgagtccatctttct

SEQ ID NO: 394530 - DNA, 19 bp, Homo sapiens
  siRNA target sequence for MGC5601 (NM_025247.2,822-840).
gaccttggaacaaatctaa

SEQ ID NO: 394531 - DNA, 19 bp, Homo sapiens
  siRNA target sequence for MGC5601 (NM_025247.2,849-867).
gccagacttggtattcaca

SEQ ID NO: 394532 - DNA, 19 bp, Homo sapiens
  siRNA target sequence for MGC5601 (NM_025247.2,890-908).
gactgcagtaaaggaatta

SEQ ID NO: 394533 - DNA, 19 bp, Homo sapiens
  siRNA target sequence for MGC5601 (NM_025247.2,971-989).
gatggaaattccgaaagat

SEQ ID NO: 394534 - DNA, 19 bp, Homo sapiens
  siRNA target sequence for MGC5601 (NM_025247.2,996-1014).
cagaagtacctcaaagact

SEQ ID NO: 394535 - DNA, 19 bp, Homo sapiens
  siRNA target sequence for MGC5601 (NM_025247.2,1033-1051).
caggcccattggaactact

SEQ ID NO: 394536 - DNA, 19 bp, Homo sapiens
  siRNA target sequence for MGC5601 (NM_025247.2,1039-1057).
cattggaactacttcagtt

SEQ ID NO: 394537 - DNA, 19 bp, Homo sapiens
  siRNA target sequence for MGC5601 (NM_025247.2,1062-1080).
cacgggcagtcaaatccaa

SEQ ID NO: 394538 - DNA, 19 bp, Homo sapiens
  siRNA target sequence for MGC5601 (NM_025247.2,1068-1086).
cagtcaaatccaacttact

SEQ ID NO: 394539 - DNA, 19 bp, Homo sapiens
  siRNA target sequence for MGC5601 (NM_025247.2,1088-1106).
catcaggctggctaatcgt

SEQ ID NO: 394540 - DNA, 19 bp, Homo sapiens
  siRNA target sequence for MGC5601 (NM_025247.2,1094-1112).
gctggctaatcgtgatcta

SEQ ID NO: 394541 - DNA, 19 bp, Homo sapiens
  siRNA target sequence for MGC5601 (NM_025247.2,1097-1115).
ggctaatcgtgatctagtt

SEQ ID NO: 394542 - DNA, 19 bp, Homo sapiens
  siRNA target sequence for MGC5601 (NM_025247.2,1099-1117).
ctaatcgtgatctagttct

SEQ ID NO: 394543 - DNA, 19 bp, Homo sapiens
  siRNA target sequence for MGC5601 (NM_025247.2,1210-1228).
ctgtccctaacgttcttga

SEQ ID NO: 394544 - DNA, 19 bp, Homo sapiens
  siRNA target sequence for MGC5601 (NM_025247.2,1283-1301).
cccaggtctcatctacaaa

SEQ ID NO: 394545 - DNA, 19 bp, Homo sapiens
  siRNA target sequence for MGC5601 (NM_025247.2,1330-1348).
gccacagacgagccatata

SEQ ID NO: 394546 - DNA, 19 bp, Homo sapiens
  siRNA target sequence for MGC5601 (NM_025247.2,1332-1350).
cacagacgagccatataca

SEQ ID NO: 394547 - DNA, 19 bp, Homo sapiens
  siRNA target sequence for MGC5601 (NM_025247.2,1334-1352).
cagacgagccatatacact

SEQ ID NO: 394548 - DNA, 19 bp, Homo sapiens
  siRNA target sequence for MGC5601 (NM_025247.2,1420-1438).
ggaagcaaggggactatat

SEQ ID NO: 394549 - DNA, 19 bp, Homo sapiens
  siRNA target sequence for MGC5601 (NM_025247.2,1421-1439).
gaagcaaggggactatatt

SEQ ID NO: 394550 - DNA, 19 bp, Homo sapiens
  siRNA target sequence for MGC5601 (NM_025247.2,1424-1442).
gcaaggggactatattcca

SEQ ID NO: 394551 - DNA, 19 bp, Homo sapiens
  siRNA target sequence for MGC5601 (NM_025247.2,1583-1601).
cgacaacctggtgtttcat

SEQ ID NO: 394552 - DNA, 19 bp, Homo sapiens
  siRNA target sequence for MGC5601 (NM_025247.2,1681-1699).
gctgcctggctcattacct

SEQ ID NO: 394553 - DNA, 19 bp, Homo sapiens
  siRNA target sequence for MGC5601 (NM_025247.2,1713-1731).
cccgtgctgagaggtatta

SEQ ID NO: 394554 - DNA, 19 bp, Homo sapiens
  siRNA target sequence for MGC5601 (NM_025247.2,1714-1732).
ccgtgctgagaggtattaa

SEQ ID NO: 394555 - DNA, 19 bp, Homo sapiens
  siRNA target sequence for MGC5601 (NM_025247.2,1715-1733).
cgtgctgagaggtattaat

SEQ ID NO: 394556 - DNA, 19 bp, Homo sapiens
  siRNA target sequence for MGC5601 (NM_025247.2,1853-1871).
ccgtgtggctgcaatccta

SEQ ID NO: 394557 - DNA, 19 bp, Homo sapiens
  siRNA target sequence for MGC5601 (NM_025247.2,1964-1982).
gtgggatttcgcagtcaaa

SEQ ID NO: 394558 - DNA, 19 bp, Homo sapiens
  siRNA target sequence for MGC5601 (NM_025247.2,1983-2001).
gaagggttccgggttttca

SEQ ID NO: 394559 - DNA, 19 bp, Homo sapiens
  siRNA target sequence for MGC5601 (NM_025247.2,1987-2005).
ggttccgggttttcaaaga

SEQ ID NO: 394560 - DNA, 19 bp, Homo sapiens
  siRNA target sequence for MGC5601 (NM_025247.2,2012-2030).
cttcacaaatccgttaaca

SEQ ID NO: 394561 - DNA, 19 bp, Homo sapiens
  siRNA target sequence for MGC5601 (NM_025247.2,2320-2338).
gactttggaaccttttcct

SEQ ID NO: 394562 - DNA, 19 bp, Homo sapiens
  siRNA target sequence for MGC5601 (NM_025247.2,2377-2395).
gactgaccaatgtggaata

SEQ ID NO: 394563 - DNA, 19 bp, Homo sapiens
  siRNA target sequence for MGC5601 (NM_025247.2,2381-2399).
gaccaatgtggaatatgca

SEQ ID NO: 394564 - DNA, 19 bp, Homo sapiens
  siRNA target sequence for MGC5601 (NM_025247.2,2547-2565).
gcccgctcctgttttgcta

SEQ ID NO: 394565 - DNA, 19 bp, Homo sapiens
  siRNA target sequence for MGC5601 (NM_025247.2,2628-2646).
gacagcttctatgtcataa

SEQ ID NO: 394566 - DNA, 19 bp, Homo sapiens
  siRNA target sequence for MGC5601 (NM_025247.2,2640-2658).
gtcataaacggtcacaaat

SEQ ID NO: 394567 - DNA, 19 bp, Homo sapiens
  siRNA target sequence for MGC5601 (NM_025247.2,2768-2786).
ggataccccagggataaaa

SEQ ID NO: 394568 - DNA, 19 bp, Homo sapiens
  siRNA target sequence for MGC5601 (NM_025247.2,2769-2787).
gataccccagggataaaaa

SEQ ID NO: 394569 - DNA, 19 bp, Homo sapiens
  siRNA target sequence for C6orf29 (NM_025257.1,36-54).
ctacgggaagccagtcaaa

SEQ ID NO: 394570 - DNA, 19 bp, Homo sapiens
  siRNA target sequence for C6orf29 (NM_025257.1,41-59).
ggaagccagtcaaatacga

SEQ ID NO: 394571 - DNA, 19 bp, Homo sapiens
  siRNA target sequence for C6orf29 (NM_025257.1,70-88).
cgaggccccatcaagaaca

SEQ ID NO: 394572 - DNA, 19 bp, Homo sapiens
  siRNA target sequence for C6orf29 (NM_025257.1,156-174).
gattgtggcctggttgtat

SEQ ID NO: 394573 - DNA, 19 bp, Homo sapiens
  siRNA target sequence for C6orf29 (NM_025257.1,193-211).
ctctaccccaggaactcta

SEQ ID NO: 394574 - DNA, 19 bp, Homo sapiens
  siRNA target sequence for C6orf29 (NM_025257.1,251-269).
cgtatctcctgtacttcaa

SEQ ID NO: 394575 - DNA, 19 bp, Homo sapiens
  siRNA target sequence for C6orf29 (NM_025257.1,256-274).
ctcctgtacttcaacatct

SEQ ID NO: 394576 - DNA, 19 bp, Homo sapiens
  siRNA target sequence for C6orf29 (NM_025257.1,374-392).
ggactgtgggaaaaaacga

SEQ ID NO: 394577 - DNA, 19 bp, Homo sapiens
  siRNA target sequence for C6orf29 (NM_025257.1,404-422).
ctgttggggaagtcttcta

SEQ ID NO: 394578 - DNA, 19 bp, Homo sapiens
  siRNA target sequence for C6orf29 (NM_025257.1,406-424).
gttggggaagtcttctata

SEQ ID NO: 394579 - DNA, 19 bp, Homo sapiens
  siRNA target sequence for C6orf29 (NM_025257.1,409-427).
ggggaagtcttctatacaa

SEQ ID NO: 394580 - DNA, 19 bp, Homo sapiens
  siRNA target sequence for C6orf29 (NM_025257.1,410-428).
gggaagtcttctatacaaa

SEQ ID NO: 394581 - DNA, 19 bp, Homo sapiens
  siRNA target sequence for C6orf29 (NM_025257.1,448-466).
ccaggggtaccctggaata

SEQ ID NO: 394582 - DNA, 19 bp, Homo sapiens
  siRNA target sequence for C6orf29 (NM_025257.1,449-467).
caggggtaccctggaatat

SEQ ID NO: 394583 - DNA, 19 bp, Homo sapiens
  siRNA target sequence for C6orf29 (NM_025257.1,451-469).
ggggtaccctggaatatga

SEQ ID NO: 394584 - DNA, 19 bp, Homo sapiens
  siRNA target sequence for C6orf29 (NM_025257.1,609-627).
ggggatcagcggtcttatt

SEQ ID NO: 394585 - DNA, 19 bp, Homo sapiens
  siRNA target sequence for C6orf29 (NM_025257.1,611-629).
ggatcagcggtcttattga

SEQ ID NO: 394586 - DNA, 19 bp, Homo sapiens
  siRNA target sequence for C6orf29 (NM_025257.1,640-658).
gcccgagacatcagtgtta

SEQ ID NO: 394587 - DNA, 19 bp, Homo sapiens
  siRNA target sequence for C6orf29 (NM_025257.1,641-659).
cccgagacatcagtgttaa

SEQ ID NO: 394588 - DNA, 19 bp, Homo sapiens
  siRNA target sequence for C6orf29 (NM_025257.1,643-661).
cgagacatcagtgttaaga

SEQ ID NO: 394589 - DNA, 19 bp, Homo sapiens
  siRNA target sequence for C6orf29 (NM_025257.1,644-662).
gagacatcagtgttaagat

SEQ ID NO: 394590 - DNA, 19 bp, Homo sapiens
  siRNA target sequence for C6orf29 (NM_025257.1,646-664).
gacatcagtgttaagatct

SEQ ID NO: 394591 - DNA, 19 bp, Homo sapiens
  siRNA target sequence for C6orf29 (NM_025257.1,653-671).
gtgttaagatctttgaaga

SEQ ID NO: 394592 - DNA, 19 bp, Homo sapiens
  siRNA target sequence for C6orf29 (NM_025257.1,1151-1169).
cagccactcttggatatgt

SEQ ID NO: 394593 - DNA, 19 bp, Homo sapiens
  siRNA target sequence for C6orf29 (NM_025257.1,1311-1329).
ccaacgttctgtcttcaat

SEQ ID NO: 394594 - DNA, 19 bp, Homo sapiens
  siRNA target sequence for C6orf29 (NM_025257.1,1603-1621).
gtagcccgctgcatcatgt

SEQ ID NO: 394595 - DNA, 19 bp, Homo sapiens
  siRNA target sequence for C6orf29 (NM_025257.1,1648-1666).
ctggaaaaatttatcaagt

SEQ ID NO: 394596 - DNA, 19 bp, Homo sapiens
  siRNA target sequence for C6orf29 (NM_025257.1,1675-1693).
cgcaatgcatacatcatga

SEQ ID NO: 394597 - DNA, 19 bp, Homo sapiens
  siRNA target sequence for C6orf29 (NM_025257.1,1695-1713).
cgccatctacgggaagaat

SEQ ID NO: 394598 - DNA, 19 bp, Homo sapiens
  siRNA target sequence for C6orf29 (NM_025257.1,1696-1714).
gccatctacgggaagaatt

SEQ ID NO: 394599 - DNA, 19 bp, Homo sapiens
  siRNA target sequence for C6orf29 (NM_025257.1,1701-1719).
ctacgggaagaatttctgt

SEQ ID NO: 394600 - DNA, 19 bp, Homo sapiens
  siRNA target sequence for C6orf29 (NM_025257.1,1743-1761).
gctactcatgcgaaacatt

SEQ ID NO: 394601 - DNA, 19 bp, Homo sapiens
  siRNA target sequence for C6orf29 (NM_025257.1,1747-1765).
ctcatgcgaaacattgtca

SEQ ID NO: 394602 - DNA, 19 bp, Homo sapiens
  siRNA target sequence for C6orf29 (NM_025257.1,1771-1789).
gtcgtcctggacaaagtca

SEQ ID NO: 394603 - DNA, 19 bp, Homo sapiens
  siRNA target sequence for C6orf29 (NM_025257.1,1837-1855).
ggggtcctgtccttctttt

SEQ ID NO: 394604 - DNA, 19 bp, Homo sapiens
  siRNA target sequence for C6orf29 (NM_025257.1,1876-1894).
gggctgggtaaagacttta

SEQ ID NO: 394605 - DNA, 19 bp, Homo sapiens
  siRNA target sequence for C6orf29 (NM_025257.1,1877-1895).
ggctgggtaaagactttaa

SEQ ID NO: 394606 - DNA, 19 bp, Homo sapiens
  siRNA target sequence for C6orf29 (NM_025257.1,1879-1897).
ctgggtaaagactttaaga

SEQ ID NO: 394607 - DNA, 19 bp, Homo sapiens
  siRNA target sequence for C6orf29 (NM_025257.1,1898-1916).
gcccccacctcaactatta

SEQ ID NO: 394608 - DNA, 19 bp, Homo sapiens
  siRNA target sequence for C6orf27 (NM_025258.1,258-276).
cctctttgccgcctacttt

SEQ ID NO: 394609 - DNA, 19 bp, Homo sapiens
  siRNA target sequence for C6orf27 (NM_025258.1,511-529).
caggatttctacagtcata

SEQ ID NO: 394610 - DNA, 19 bp, Homo sapiens
  siRNA target sequence for C6orf27 (NM_025258.1,1087-1105).
gggttcggccctgtcttta

SEQ ID NO: 394611 - DNA, 19 bp, Homo sapiens
  siRNA target sequence for C6orf27 (NM_025258.1,1089-1107).
gttcggccctgtctttaca

SEQ ID NO: 394612 - DNA, 19 bp, Homo sapiens
  siRNA target sequence for C6orf27 (NM_025258.1,1125-1143).
cttctggcaacagcttaat

SEQ ID NO: 394613 - DNA, 19 bp, Homo sapiens
  siRNA target sequence for C6orf27 (NM_025258.1,1130-1148).
ggcaacagcttaatgagat

SEQ ID NO: 394614 - DNA, 19 bp, Homo sapiens
  siRNA target sequence for C6orf27 (NM_025258.1,1361-1379).
gagctcggcgtgagatctt

SEQ ID NO: 394615 - DNA, 19 bp, Homo sapiens
  siRNA target sequence for C6orf27 (NM_025258.1,1363-1381).
gctcggcgtgagatcttgt

SEQ ID NO: 394616 - DNA, 19 bp, Homo sapiens
  siRNA target sequence for C6orf27 (NM_025258.1,1389-1407).
gcgttttgagccatacaaa

SEQ ID NO: 394617 - DNA, 19 bp, Homo sapiens
  siRNA target sequence for C6orf27 (NM_025258.1,2189-2207).
gtggcccctcgggtttctt

SEQ ID NO: 394618 - DNA, 19 bp, Homo sapiens
  siRNA target sequence for C6orf27 (NM_025258.1,2324-2342).
gggctcacctggaactgaa

SEQ ID NO: 394619 - DNA, 19 bp, Homo sapiens
  siRNA target sequence for C6orf25 (NM_025260.2,80-98).
ctggggaccgggtgaatct

SEQ ID NO: 394620 - DNA, 19 bp, Homo sapiens
  siRNA target sequence for C6orf25 (NM_025260.2,301-319).
ggagactcgggcacttttt

SEQ ID NO: 394621 - DNA, 19 bp, Homo sapiens
  siRNA target sequence for C6orf25 (NM_025260.2,370-388).
ggggacaggacctattgca

SEQ ID NO: 394622 - DNA, 19 bp, Homo sapiens
  siRNA target sequence for C6orf25 (NM_025260.2,371-389).
gggacaggacctattgcaa

SEQ ID NO: 394623 - DNA, 19 bp, Homo sapiens
  siRNA target sequence for LY6G6C (NM_025261.1,194-212).
gcctgacaacacatgcata

SEQ ID NO: 394624 - DNA, 19 bp, Homo sapiens
  siRNA target sequence for LY6G6C (NM_025261.1,198-216).
gacaacacatgcatacctt

SEQ ID NO: 394625 - DNA, 19 bp, Homo sapiens
  siRNA target sequence for LY6G6C (NM_025261.1,208-226).
gcataccttggtaagatgt

SEQ ID NO: 394626 - DNA, 19 bp, Homo sapiens
  siRNA target sequence for LY6G6C (NM_025261.1,296-314).
gtaagctgggtctgacata

SEQ ID NO: 394627 - DNA, 19 bp, Homo sapiens
  siRNA target sequence for MGC4659 (NM_025268.2,383-401).
ctgtggttcctttacatct

SEQ ID NO: 394628 - DNA, 19 bp, Homo sapiens
  siRNA target sequence for MGC4659 (NM_025268.2,891-909).
ccatcttcgtcggcaaaaa

SEQ ID NO: 394629 - DNA, 19 bp, Homo sapiens
  siRNA target sequence for C6orf148 (NM_030568.2,688-706).
gagccaggactcctatcat

SEQ ID NO: 394630 - DNA, 19 bp, Homo sapiens
  siRNA target sequence for C6orf148 (NM_030568.2,690-708).
gccaggactcctatcatca

SEQ ID NO: 394631 - DNA, 19 bp, Homo sapiens
  siRNA target sequence for C6orf148 (NM_030568.2,777-795).
gcccgaaaactttcattct

SEQ ID NO: 394632 - DNA, 19 bp, Homo sapiens
  siRNA target sequence for C6orf148 (NM_030568.2,968-986).
ctgctgctcatgttccatt

SEQ ID NO: 394633 - DNA, 19 bp, Homo sapiens
  siRNA target sequence for ITIH5 (NM_030569.2,334-352).
cttcactatgcttattgga

SEQ ID NO: 394634 - DNA, 19 bp, Homo sapiens
  siRNA target sequence for ITIH5 (NM_030569.2,358-376).
ggtgtatcagggcgaaatt

SEQ ID NO: 394635 - DNA, 19 bp, Homo sapiens
  siRNA target sequence for ITIH5 (NM_030569.2,359-377).
gtgtatcagggcgaaatta

SEQ ID NO: 394636 - DNA, 19 bp, Homo sapiens
  siRNA target sequence for ITIH5 (NM_030569.2,361-379).
gtatcagggcgaaattaca

SEQ ID NO: 394637 - DNA, 19 bp, Homo sapiens
  siRNA target sequence for ITIH5 (NM_030569.2,394-412).
gagtggtgatagggtaaaa

SEQ ID NO: 394638 - DNA, 19 bp, Homo sapiens
  siRNA target sequence for ITIH5 (NM_030569.2,396-414).
gtggtgatagggtaaaaga

SEQ ID NO: 394639 - DNA, 19 bp, Homo sapiens
  siRNA target sequence for ITIH5 (NM_030569.2,398-416).
ggtgatagggtaaaagaga

SEQ ID NO: 394640 - DNA, 19 bp, Homo sapiens
  siRNA target sequence for ITIH5 (NM_030569.2,399-417).
gtgatagggtaaaagagaa

SEQ ID NO: 394641 - DNA, 19 bp, Homo sapiens
  siRNA target sequence for ITIH5 (NM_030569.2,501-519).
ccgcctttttcctgagtta

SEQ ID NO: 394642 - DNA, 19 bp, Homo sapiens
  siRNA target sequence for ITIH5 (NM_030569.2,502-520).
cgcctttttcctgagttat

SEQ ID NO: 394643 - DNA, 19 bp, Homo sapiens
  siRNA target sequence for ITIH5 (NM_030569.2,710-728).
cccccatctactgtcatta

SEQ ID NO: 394644 - DNA, 19 bp, Homo sapiens
  siRNA target sequence for ITIH5 (NM_030569.2,714-732).
catctactgtcattaacca

SEQ ID NO: 394645 - DNA, 19 bp, Homo sapiens
  siRNA target sequence for ITIH5 (NM_030569.2,717-735).
ctactgtcattaaccaaaa

SEQ ID NO: 394646 - DNA, 19 bp, Homo sapiens
  siRNA target sequence for ITIH5 (NM_030569.2,722-740).
gtcattaaccaaaatgaaa

SEQ ID NO: 394647 - DNA, 19 bp, Homo sapiens
  siRNA target sequence for ITIH5 (NM_030569.2,801-819).
gaattttgggagactttat

SEQ ID NO: 394648 - DNA, 19 bp, Homo sapiens
  siRNA target sequence for ITIH5 (NM_030569.2,808-826).
gggagactttatcattaga

SEQ ID NO: 394649 - DNA, 19 bp, Homo sapiens
  siRNA target sequence for ITIH5 (NM_030569.2,810-828).
gagactttatcattagata

SEQ ID NO: 394650 - DNA, 19 bp, Homo sapiens
  siRNA target sequence for ITIH5 (NM_030569.2,825-843).
gatatgacgtcaatagaga

SEQ ID NO: 394651 - DNA, 19 bp, Homo sapiens
  siRNA target sequence for ITIH5 (NM_030569.2,854-872).
ggggacatccaggttctaa

SEQ ID NO: 394652 - DNA, 19 bp, Homo sapiens
  siRNA target sequence for ITIH5 (NM_030569.2,856-874).
ggacatccaggttctaaat

SEQ ID NO: 394653 - DNA, 19 bp, Homo sapiens
  siRNA target sequence for ITIH5 (NM_030569.2,886-904).
gcactactttgctcctaaa

SEQ ID NO: 394654 - DNA, 19 bp, Homo sapiens
  siRNA target sequence for ITIH5 (NM_030569.2,912-930).
ctcctttacccaagaatgt

SEQ ID NO: 394655 - DNA, 19 bp, Homo sapiens
  siRNA target sequence for ITIH5 (NM_030569.2,988-1006).
ggatgccctcttcacaatt

SEQ ID NO: 394656 - DNA, 19 bp, Homo sapiens
  siRNA target sequence for ITIH5 (NM_030569.2,1022-1040).
ccccaggaccgtttcagta

SEQ ID NO: 394657 - DNA, 19 bp, Homo sapiens
  siRNA target sequence for ITIH5 (NM_030569.2,1031-1049).
cgtttcagtatcattggat

SEQ ID NO: 394658 - DNA, 19 bp, Homo sapiens
  siRNA target sequence for ITIH5 (NM_030569.2,1121-1139).
gtgtacattcaccatatgt

SEQ ID NO: 394659 - DNA, 19 bp, Homo sapiens
  siRNA target sequence for ITIH5 (NM_030569.2,1460-1478).
gggttctacgatgaaatca

SEQ ID NO: 394660 - DNA, 19 bp, Homo sapiens
  siRNA target sequence for ITIH5 (NM_030569.2,1494-1512).
ctgacatccgcatcgatta

SEQ ID NO: 394661 - DNA, 19 bp, Homo sapiens
  siRNA target sequence for ITIH5 (NM_030569.2,1567-1585).
cggctcggagatcatcatt

SEQ ID NO: 394662 - DNA, 19 bp, Homo sapiens
  siRNA target sequence for ITIH5 (NM_030569.2,2038-2056).
gccataccagccaagaatt

SEQ ID NO: 394663 - DNA, 19 bp, Homo sapiens
  siRNA target sequence for ITIH5 (NM_030569.2,2088-2106).
cccactttgttgtggattt

SEQ ID NO: 394664 - DNA, 19 bp, Homo sapiens
  siRNA target sequence for ITIH5 (NM_030569.2,2319-2337).
caccgagcagagtcatctt

SEQ ID NO: 394665 - DNA, 19 bp, Homo sapiens
  siRNA target sequence for ITIH5 (NM_030569.2,2447-2465).
ggctccatagcctttgtca

SEQ ID NO: 394666 - DNA, 19 bp, Homo sapiens
  siRNA target sequence for ITIH5 (NM_030569.2,2505-2523).
gacaccacctgggtttcta

SEQ ID NO: 394667 - DNA, 19 bp, Homo sapiens
  siRNA target sequence for ITIH5 (NM_030569.2,2509-2527).
ccacctgggtttctacatt

SEQ ID NO: 394668 - DNA, 19 bp, Homo sapiens
  siRNA target sequence for ITIH5 (NM_030569.2,2667-2685).
ctgaggccgtcctaacagt

SEQ ID NO: 394669 - DNA, 19 bp, Homo sapiens
  siRNA target sequence for ITIH5 (NM_030569.2,2671-2689).
ggccgtcctaacagtgaaa

SEQ ID NO: 394670 - DNA, 19 bp, Homo sapiens
  siRNA target sequence for ITIH5 (NM_030569.2,2735-2753).
ggggaagagcagatagact

SEQ ID NO: 394671 - DNA, 19 bp, Homo sapiens
  siRNA target sequence for ITIH5 (NM_030569.2,2755-2773).
ctggtttgccaggaacaat

SEQ ID NO: 394672 - DNA, 19 bp, Homo sapiens
  siRNA target sequence for ITIH5 (NM_030569.2,2793-2811).
gggagtacaaggattacct

SEQ ID NO: 394673 - DNA, 19 bp, Homo sapiens
  siRNA target sequence for UPK3B (NM_030570.2,483-501).
gccctacacaccacagata

SEQ ID NO: 394674 - DNA, 19 bp, Homo sapiens
  siRNA target sequence for UPK3B (NM_030570.2,484-502).
ccctacacaccacagataa

SEQ ID NO: 394675 - DNA, 19 bp, Homo sapiens
  siRNA target sequence for NDFIP1 (NM_030571.2,355-373).
gcagagagcgcagcatatt

SEQ ID NO: 394676 - DNA, 19 bp, Homo sapiens
  siRNA target sequence for NDFIP1 (NM_030571.2,356-374).
cagagagcgcagcatattt

SEQ ID NO: 394677 - DNA, 19 bp, Homo sapiens
  siRNA target sequence for NDFIP1 (NM_030571.2,362-380).
gcgcagcatattttgacta

SEQ ID NO: 394678 - DNA, 19 bp, Homo sapiens
  siRNA target sequence for NDFIP1 (NM_030571.2,401-419).
caaagcccccatcttacaa

SEQ ID NO: 394679 - DNA, 19 bp, Homo sapiens
  siRNA target sequence for NDFIP1 (NM_030571.2,513-531).
gggtcgggatgattttgat

SEQ ID NO: 394680 - DNA, 19 bp, Homo sapiens
  siRNA target sequence for NDFIP1 (NM_030571.2,670-688).
ggatttggtctctctctaa

SEQ ID NO: 394681 - DNA, 19 bp, Homo sapiens
  siRNA target sequence for NDFIP1 (NM_030571.2,671-689).
gatttggtctctctctaat

SEQ ID NO: 394682 - DNA, 19 bp, Homo sapiens
  siRNA target sequence for NDFIP1 (NM_030571.2,706-724).
gtcaggttttccacctatt

SEQ ID NO: 394683 - DNA, 19 bp, Homo sapiens
  siRNA target sequence for NDFIP1 (NM_030571.2,786-804).
cctgtttctcagaggattt

SEQ ID NO: 394684 - DNA, 19 bp, Homo sapiens
  siRNA target sequence for NDFIP1 (NM_030571.2,787-805).
ctgtttctcagaggattta

SEQ ID NO: 394685 - DNA, 19 bp, Homo sapiens
  siRNA target sequence for NDFIP1 (NM_030571.2,800-818).
gatttatcaattatgcaaa

SEQ ID NO: 394686 - DNA, 19 bp, Homo sapiens
  siRNA target sequence for MGC10946 (NM_030572.1,296-314).
cagggtcgccgcttcatct

SEQ ID NO: 394687 - DNA, 19 bp, Homo sapiens
  siRNA target sequence for MGC10946 (NM_030572.1,370-388).
cccaaatccccaactacta

SEQ ID NO: 394688 - DNA, 19 bp, Homo sapiens
  siRNA target sequence for MGC10946 (NM_030572.1,371-389).
ccaaatccccaactactaa

SEQ ID NO: 394689 - DNA, 19 bp, Homo sapiens
  siRNA target sequence for MGC10993 (NM_030577.1,137-155).
ggcggaccgcagcatttgt

SEQ ID NO: 394690 - DNA, 19 bp, Homo sapiens
  siRNA target sequence for MGC10993 (NM_030577.1,434-452).
gcatccctgccagtttctt

SEQ ID NO: 394691 - DNA, 19 bp, Homo sapiens
  siRNA target sequence for MGC10993 (NM_030577.1,454-472).
ggagacctagtgatcaaca

SEQ ID NO: 394692 - DNA, 19 bp, Homo sapiens
  siRNA target sequence for MGC10993 (NM_030577.1,457-475).
gacctagtgatcaacacta

SEQ ID NO: 394693 - DNA, 19 bp, Homo sapiens
  siRNA target sequence for MGC10993 (NM_030577.1,477-495).
ccatcccgtggtcatacat

SEQ ID NO: 394694 - DNA, 19 bp, Homo sapiens
  siRNA target sequence for MGC10993 (NM_030577.1,557-575).
cccgtgaagcccagaagtt

SEQ ID NO: 394695 - DNA, 19 bp, Homo sapiens
  siRNA target sequence for MGC10993 (NM_030577.1,700-718).
catgcaggccccatgaatt

SEQ ID NO: 394696 - DNA, 19 bp, Homo sapiens
  siRNA target sequence for MGC10993 (NM_030577.1,851-869).
gtggtggagtggagttcta

SEQ ID NO: 394697 - DNA, 19 bp, Homo sapiens
  siRNA target sequence for MGC10993 (NM_030577.1,962-980).
gacacttgttccgaatcaa

SEQ ID NO: 394698 - DNA, 19 bp, Homo sapiens
  siRNA target sequence for MGC10993 (NM_030577.1,966-984).
cttgttccgaatcaaacat

SEQ ID NO: 394699 - DNA, 19 bp, Homo sapiens
  siRNA target sequence for MGC4093 (NM_030578.2,450-468).
cttgcaggctatggatttt

SEQ ID NO: 394700 - DNA, 19 bp, Homo sapiens
  siRNA target sequence for MGC4093 (NM_030578.2,529-547).
gcagttggcgagaacagtt

SEQ ID NO: 394701 - DNA, 19 bp, Homo sapiens
  siRNA target sequence for CMIP (NM_030629.1,173-191).
ctcctacagcgcaattgaa

SEQ ID NO: 394702 - DNA, 19 bp, Homo sapiens
  siRNA target sequence for CMIP (NM_030629.1,175-193).
cctacagcgcaattgaaga

SEQ ID NO: 394703 - DNA, 19 bp, Homo sapiens
  siRNA target sequence for CMIP (NM_030629.1,220-238).
ccccgaagtactgtttaca

SEQ ID NO: 394704 - DNA, 19 bp, Homo sapiens
  siRNA target sequence for CMIP (NM_030629.1,250-268).
ctgggggaactgtcttact

SEQ ID NO: 394705 - DNA, 19 bp, Homo sapiens
  siRNA target sequence for CMIP (NM_030629.1,291-309).
cgagaccagtggttccatt

SEQ ID NO: 394706 - DNA, 19 bp, Homo sapiens
  siRNA target sequence for CMIP (NM_030629.1,361-379).
caagccgctgggaagttgt

SEQ ID NO: 394707 - DNA, 19 bp, Homo sapiens
  siRNA target sequence for CMIP (NM_030629.1,502-520).
cccaggagcatgaaaacat

SEQ ID NO: 394708 - DNA, 19 bp, Homo sapiens
  siRNA target sequence for CMIP (NM_030629.1,561-579).
ccaccagatctctgtgaat

SEQ ID NO: 394709 - DNA, 19 bp, Homo sapiens
  siRNA target sequence for CMIP (NM_030629.1,564-582).
ccagatctctgtgaattct

SEQ ID NO: 394710 - DNA, 19 bp, Homo sapiens
  siRNA target sequence for CMIP (NM_030629.1,648-666).
cagcgaatcctcaagcata

SEQ ID NO: 394711 - DNA, 19 bp, Homo sapiens
  siRNA target sequence for CMIP (NM_030629.1,689-707).
gcgactgaggctgtttact

SEQ ID NO: 394712 - DNA, 19 bp, Homo sapiens
  siRNA target sequence for CMIP (NM_030629.1,856-874).
cctgctatgaagagttcat

SEQ ID NO: 394713 - DNA, 19 bp, Homo sapiens
  siRNA target sequence for CMIP (NM_030629.1,935-953).
cgaccggaagcccacttta

SEQ ID NO: 394714 - DNA, 19 bp, Homo sapiens
  siRNA target sequence for CMIP (NM_030629.1,1229-1247).
gctgctgtcagactatgat

SEQ ID NO: 394715 - DNA, 19 bp, Homo sapiens
  siRNA target sequence for CMIP (NM_030629.1,1303-1321).
ctctcgcacatgagaagtt

SEQ ID NO: 394716 - DNA, 19 bp, Homo sapiens
  siRNA target sequence for CMIP (NM_030629.1,1879-1897).
gcgccgagcacctcatcaa

SEQ ID NO: 394717 - DNA, 19 bp, Homo sapiens
  siRNA target sequence for CMIP (NM_030629.1,2092-2110).
ctgacacctacgaagatct

SEQ ID NO: 394718 - DNA, 19 bp, Homo sapiens
  siRNA target sequence for C17orf28 (NM_030630.1,187-205).
cctcggtgcaggatgtgtt

SEQ ID NO: 394719 - DNA, 19 bp, Homo sapiens
  siRNA target sequence for C17orf28 (NM_030630.1,188-206).
ctcggtgcaggatgtgttt

SEQ ID NO: 394720 - DNA, 19 bp, Homo sapiens
  siRNA target sequence for C17orf28 (NM_030630.1,372-390).
cgcgtgctgccctacatct

SEQ ID NO: 394721 - DNA, 19 bp, Homo sapiens
  siRNA target sequence for C17orf28 (NM_030630.1,374-392).
cgtgctgccctacatcttt

SEQ ID NO: 394722 - DNA, 19 bp, Homo sapiens
  siRNA target sequence for C17orf28 (NM_030630.1,402-420).
gactggaggggcttcttct

SEQ ID NO: 394723 - DNA, 19 bp, Homo sapiens
  siRNA target sequence for C17orf28 (NM_030630.1,652-670).
ctaactacatccacgatat

SEQ ID NO: 394724 - DNA, 19 bp, Homo sapiens
  siRNA target sequence for C17orf28 (NM_030630.1,918-936).
gcccaggtgctcattgtca

SEQ ID NO: 394725 - DNA, 19 bp, Homo sapiens
  siRNA target sequence for C17orf28 (NM_030630.1,1027-1045).
ctgagaacctgtttgtgaa

SEQ ID NO: 394726 - DNA, 19 bp, Homo sapiens
  siRNA target sequence for C17orf28 (NM_030630.1,1240-1258).
gcagcgacgtcctagacat

SEQ ID NO: 394727 - DNA, 19 bp, Homo sapiens
  siRNA target sequence for C17orf28 (NM_030630.1,1370-1388).
cggggtgcggctgaacaaa

SEQ ID NO: 394728 - DNA, 19 bp, Homo sapiens
  siRNA target sequence for C17orf28 (NM_030630.1,1380-1398).
ctgaacaaaccctactcaa

SEQ ID NO: 394729 - DNA, 19 bp, Homo sapiens
  siRNA target sequence for C17orf28 (NM_030630.1,1920-1938).
gctactccaggcattgaca

SEQ ID NO: 394730 - DNA, 19 bp, Homo sapiens
  siRNA target sequence for C17orf28 (NM_030630.1,2345-2363).
catgtggggcgtcatctat

SEQ ID NO: 394731 - DNA, 19 bp, Homo sapiens
  siRNA target sequence for KIAA1712 (NM_030633.1,308-326).
ggcaacaggtgacttaaaa

SEQ ID NO: 394732 - DNA, 19 bp, Homo sapiens
  siRNA target sequence for KIAA1712 (NM_030633.1,331-349).
gcttacggaacctagaaca

SEQ ID NO: 394733 - DNA, 19 bp, Homo sapiens
  siRNA target sequence for KIAA1712 (NM_030633.1,348-366).
caggtgctccgcttgctaa

SEQ ID NO: 394734 - DNA, 19 bp, Homo sapiens
  siRNA target sequence for KIAA1712 (NM_030633.1,351-369).
gtgctccgcttgctaaatt

SEQ ID NO: 394735 - DNA, 19 bp, Homo sapiens
  siRNA target sequence for KIAA1712 (NM_030633.1,353-371).
gctccgcttgctaaattat

SEQ ID NO: 394736 - DNA, 19 bp, Homo sapiens
  siRNA target sequence for KIAA1712 (NM_030633.1,356-374).
ccgcttgctaaattatcct

SEQ ID NO: 394737 - DNA, 19 bp, Homo sapiens
  siRNA target sequence for KIAA1712 (NM_030633.1,383-401).
ggactgtgtaggtttgata

SEQ ID NO: 394738 - DNA, 19 bp, Homo sapiens
  siRNA target sequence for KIAA1712 (NM_030633.1,384-402).
gactgtgtaggtttgataa

SEQ ID NO: 394739 - DNA, 19 bp, Homo sapiens
  siRNA target sequence for KIAA1712 (NM_030633.1,449-467).
ctcatactcaccttatgta

SEQ ID NO: 394740 - DNA, 19 bp, Homo sapiens
  siRNA target sequence for KIAA1712 (NM_030633.1,459-477).
ccttatgtaacagaactta

SEQ ID NO: 394741 - DNA, 19 bp, Homo sapiens
  siRNA target sequence for KIAA1712 (NM_030633.1,546-564).
cttcgtgatcaatttaatt

SEQ ID NO: 394742 - DNA, 19 bp, Homo sapiens
  siRNA target sequence for KIAA1712 (NM_030633.1,549-567).
cgtgatcaatttaattata

SEQ ID NO: 394743 - DNA, 19 bp, Homo sapiens
  siRNA target sequence for KIAA1712 (NM_030633.1,735-753).
cctcctttgggcaatgaga

SEQ ID NO: 394744 - DNA, 19 bp, Homo sapiens
  siRNA target sequence for KIAA1712 (NM_030633.1,743-761).
gggcaatgagaaaatatct

SEQ ID NO: 394745 - DNA, 19 bp, Homo sapiens
  siRNA target sequence for KIAA1712 (NM_030633.1,765-783).
gaggctgttggcgttgata

SEQ ID NO: 394746 - DNA, 19 bp, Homo sapiens
  siRNA target sequence for KIAA1712 (NM_030633.1,768-786).
gctgttggcgttgatatca

SEQ ID NO: 394747 - DNA, 19 bp, Homo sapiens
  siRNA target sequence for KIAA1712 (NM_030633.1,780-798).
gatatcagtggcaggttta

SEQ ID NO: 394748 - DNA, 19 bp, Homo sapiens
  siRNA target sequence for KIAA1712 (NM_030633.1,824-842).
ggtgattcgtcacttgtat

SEQ ID NO: 394749 - DNA, 19 bp, Homo sapiens
  siRNA target sequence for KIAA1712 (NM_030633.1,825-843).
gtgattcgtcacttgtata

SEQ ID NO: 394750 - DNA, 19 bp, Homo sapiens
  siRNA target sequence for KIAA1712 (NM_030633.1,827-845).
gattcgtcacttgtataat

SEQ ID NO: 394751 - DNA, 19 bp, Homo sapiens
  siRNA target sequence for KIAA1712 (NM_030633.1,874-892).
cattaagtccaataacaga

SEQ ID NO: 394752 - DNA, 19 bp, Homo sapiens
  siRNA target sequence for KIAA1712 (NM_030633.1,972-990).
gctgagcaacaggatgtaa

SEQ ID NO: 394753 - DNA, 19 bp, Homo sapiens
  siRNA target sequence for KIAA1712 (NM_030633.1,977-995).
gcaacaggatgtaaatgtt

SEQ ID NO: 394754 - DNA, 19 bp, Homo sapiens
  siRNA target sequence for KIAA1712 (NM_030633.1,1004-1022).
gattactgcactacaaact

SEQ ID NO: 394755 - DNA, 19 bp, Homo sapiens
  siRNA target sequence for KIAA1712 (NM_030633.1,1147-1165).
gtcgtgtcactcttcttga

SEQ ID NO: 394756 - DNA, 19 bp, Homo sapiens
  siRNA target sequence for KIAA1712 (NM_030633.1,1149-1167).
cgtgtcactcttcttgaaa

SEQ ID NO: 394757 - DNA, 19 bp, Homo sapiens
  siRNA target sequence for KIAA1712 (NM_030633.1,1305-1323).
ctgtcctctggctatagta

SEQ ID NO: 394758 - DNA, 19 bp, Homo sapiens
  siRNA target sequence for KIAA1712 (NM_030633.1,1307-1325).
gtcctctggctatagtaca

SEQ ID NO: 394759 - DNA, 19 bp, Homo sapiens
  siRNA target sequence for KIAA1712 (NM_030633.1,1316-1334).
ctatagtacagcatcatca

SEQ ID NO: 394760 - DNA, 19 bp, Homo sapiens
  siRNA target sequence for KIAA1712 (NM_030633.1,1345-1363).
ccagagcctctactgttaa

SEQ ID NO: 394761 - DNA, 19 bp, Homo sapiens
  siRNA target sequence for KIAA1712 (NM_030633.1,1346-1364).
cagagcctctactgttaat

SEQ ID NO: 394762 - DNA, 19 bp, Homo sapiens
  siRNA target sequence for KIAA1712 (NM_030633.1,1348-1366).
gagcctctactgttaatta

SEQ ID NO: 394763 - DNA, 19 bp, Homo sapiens
  siRNA target sequence for KIAA1712 (NM_030633.1,1352-1370).
ctctactgttaattactgt

SEQ ID NO: 394764 - DNA, 19 bp, Homo sapiens
  siRNA target sequence for KIAA1701 (NM_030639.1,535-553).
gggactaagaataagacaa

SEQ ID NO: 394765 - DNA, 19 bp, Homo sapiens
  siRNA target sequence for KIAA1701 (NM_030639.1,579-597).
ggctgctatacaagctaaa

SEQ ID NO: 394766 - DNA, 19 bp, Homo sapiens
  siRNA target sequence for KIAA1701 (NM_030639.1,613-631).
gaggctactggtgttgtta

SEQ ID NO: 394767 - DNA, 19 bp, Homo sapiens
  siRNA target sequence for KIAA1701 (NM_030639.1,664-682).
gccaagacagggtctaaga

SEQ ID NO: 394768 - DNA, 19 bp, Homo sapiens
  siRNA target sequence for KIAA1701 (NM_030639.1,666-684).
caagacagggtctaagaca

SEQ ID NO: 394769 - DNA, 19 bp, Homo sapiens
  siRNA target sequence for KIAA1701 (NM_030639.1,816-834).
caccagctccacatgtaaa

SEQ ID NO: 394770 - DNA, 19 bp, Homo sapiens
  siRNA target sequence for KIAA1701 (NM_030639.1,819-837).
cagctccacatgtaaaaat

SEQ ID NO: 394771 - DNA, 19 bp, Homo sapiens
  siRNA target sequence for KIAA1701 (NM_030639.1,869-887).
gggaagaggccactatcaa

SEQ ID NO: 394772 - DNA, 19 bp, Homo sapiens
  siRNA target sequence for KIAA1701 (NM_030639.1,870-888).
ggaagaggccactatcaat

SEQ ID NO: 394773 - DNA, 19 bp, Homo sapiens
  siRNA target sequence for KIAA1701 (NM_030639.1,871-889).
gaagaggccactatcaatt

SEQ ID NO: 394774 - DNA, 19 bp, Homo sapiens
  siRNA target sequence for KIAA1701 (NM_030639.1,874-892).
gaggccactatcaattcct

SEQ ID NO: 394775 - DNA, 19 bp, Homo sapiens
  siRNA target sequence for KIAA1701 (NM_030639.1,907-925).
gaagaggctggtaatagtt

SEQ ID NO: 394776 - DNA, 19 bp, Homo sapiens
  siRNA target sequence for KIAA1701 (NM_030639.1,910-928).
gaggctggtaatagtttca

SEQ ID NO: 394777 - DNA, 19 bp, Homo sapiens
  siRNA target sequence for KIAA1701 (NM_030639.1,930-948).
cactaagaatgataaacct

SEQ ID NO: 394778 - DNA, 19 bp, Homo sapiens
  siRNA target sequence for KIAA1701 (NM_030639.1,1045-1063).
gttattgggaactggtttt

SEQ ID NO: 394779 - DNA, 19 bp, Homo sapiens
  siRNA target sequence for KIAA1701 (NM_030639.1,1070-1088).
gagatgatactagttttga

SEQ ID NO: 394780 - DNA, 19 bp, Homo sapiens
  siRNA target sequence for KIAA1701 (NM_030639.1,1082-1100).
gttttgaccctaatcctaa

SEQ ID NO: 394781 - DNA, 19 bp, Homo sapiens
  siRNA target sequence for KIAA1701 (NM_030639.1,1165-1183).
gactggtctgaggtaacta

SEQ ID NO: 394782 - DNA, 19 bp, Homo sapiens
  siRNA target sequence for KIAA1701 (NM_030639.1,1208-1226).
ctccagctgtgttaggatt

SEQ ID NO: 394783 - DNA, 19 bp, Homo sapiens
  siRNA target sequence for KIAA1701 (NM_030639.1,1248-1266).
ggcaagccctccttcatat

SEQ ID NO: 394784 - DNA, 19 bp, Homo sapiens
  siRNA target sequence for KIAA1701 (NM_030639.1,1249-1267).
gcaagccctccttcatata

SEQ ID NO: 394785 - DNA, 19 bp, Homo sapiens
  siRNA target sequence for KIAA1701 (NM_030639.1,1250-1268).
caagccctccttcatatat

SEQ ID NO: 394786 - DNA, 19 bp, Homo sapiens
  siRNA target sequence for KIAA1701 (NM_030639.1,1253-1271).
gccctccttcatatattgt

SEQ ID NO: 394787 - DNA, 19 bp, Homo sapiens
  siRNA target sequence for KIAA1701 (NM_030639.1,1254-1272).
ccctccttcatatattgtt

SEQ ID NO: 394788 - DNA, 19 bp, Homo sapiens
  siRNA target sequence for KIAA1701 (NM_030639.1,1273-1291).
ctggcctccgctgaagaaa

SEQ ID NO: 394789 - DNA, 19 bp, Homo sapiens
  siRNA target sequence for KIAA1701 (NM_030639.1,1275-1293).
ggcctccgctgaagaaaat

SEQ ID NO: 394790 - DNA, 19 bp, Homo sapiens
  siRNA target sequence for KIAA1701 (NM_030639.1,1389-1407).
ctgcatccagaccatagat

SEQ ID NO: 394791 - DNA, 19 bp, Homo sapiens
  siRNA target sequence for KIAA1701 (NM_030639.1,1396-1414).
cagaccatagatgagatta

SEQ ID NO: 394792 - DNA, 19 bp, Homo sapiens
  siRNA target sequence for KIAA1701 (NM_030639.1,1408-1426).
gagattagacgtcaaatca

SEQ ID NO: 394793 - DNA, 19 bp, Homo sapiens
  siRNA target sequence for KIAA1701 (NM_030639.1,1433-1451).
gggaggtaaatgggattaa

SEQ ID NO: 394794 - DNA, 19 bp, Homo sapiens
  siRNA target sequence for KIAA1701 (NM_030639.1,1469-1487).
gcaaaatggaatgctatat

SEQ ID NO: 394795 - DNA, 19 bp, Homo sapiens
  siRNA target sequence for KIAA1701 (NM_030639.1,1513-1531).
gttagcttacttaagtcaa

SEQ ID NO: 394796 - DNA, 19 bp, Homo sapiens
  siRNA target sequence for KIAA1701 (NM_030639.1,1518-1536).
cttacttaagtcaactact

SEQ ID NO: 394797 - DNA, 19 bp, Homo sapiens
  siRNA target sequence for KIAA1701 (NM_030639.1,1529-1547).
caactactgatcctcttat

SEQ ID NO: 394798 - DNA, 19 bp, Homo sapiens
  siRNA target sequence for KIAA1701 (NM_030639.1,1532-1550).
ctactgatcctcttattca

SEQ ID NO: 394799 - DNA, 19 bp, Homo sapiens
  siRNA target sequence for KIAA1701 (NM_030639.1,1535-1553).
ctgatcctcttattcataa

SEQ ID NO: 394800 - DNA, 19 bp, Homo sapiens
  siRNA target sequence for KIAA1701 (NM_030639.1,1568-1586).
caatgggtgtccataatgt

SEQ ID NO: 394801 - DNA, 19 bp, Homo sapiens
  siRNA target sequence for KIAA1701 (NM_030639.1,1591-1609).
ccatttgcccaagagttta

SEQ ID NO: 394802 - DNA, 19 bp, Homo sapiens
  siRNA target sequence for KIAA1701 (NM_030639.1,1599-1617).
ccaagagtttattaacgaa

SEQ ID NO: 394803 - DNA, 19 bp, Homo sapiens
  siRNA target sequence for KIAA1701 (NM_030639.1,1622-1640).
gtgtagtgacacttattga

SEQ ID NO: 394804 - DNA, 19 bp, Homo sapiens
  siRNA target sequence for KIAA1701 (NM_030639.1,1657-1675).
ccttcccctgaaatgagaa

SEQ ID NO: 394805 - DNA, 19 bp, Homo sapiens
  siRNA target sequence for KIAA1701 (NM_030639.1,1680-1698).
gactgtaattactctgaat

SEQ ID NO: 394806 - DNA, 19 bp, Homo sapiens
  siRNA target sequence for KIAA1701 (NM_030639.1,1724-1742).
gcaaaattgaattacatgt

SEQ ID NO: 394807 - DNA, 19 bp, Homo sapiens
  siRNA target sequence for KIAA1701 (NM_030639.1,1738-1756).
catgttaagcatatgtgta

SEQ ID NO: 394808 - DNA, 19 bp, Homo sapiens
  siRNA target sequence for KIAA1701 (NM_030639.1,1788-1806).
gggacagcaatctggatta

SEQ ID NO: 394809 - DNA, 19 bp, Homo sapiens
  siRNA target sequence for KIAA1701 (NM_030639.1,1789-1807).
ggacagcaatctggattaa

SEQ ID NO: 394810 - DNA, 19 bp, Homo sapiens
  siRNA target sequence for KIAA1701 (NM_030639.1,1792-1810).
cagcaatctggattaaaga

SEQ ID NO: 394811 - DNA, 19 bp, Homo sapiens
  siRNA target sequence for KIAA1701 (NM_030639.1,1887-1905).
gtcctcaggaaattgcaaa

SEQ ID NO: 394812 - DNA, 19 bp, Homo sapiens
  siRNA target sequence for KIAA1701 (NM_030639.1,1961-1979).
ccagagacatgatcaatat

SEQ ID NO: 394813 - DNA, 19 bp, Homo sapiens
  siRNA target sequence for KIAA1701 (NM_030639.1,1993-2011).
gcattaaaactcatcttta

SEQ ID NO: 394814 - DNA, 19 bp, Homo sapiens
  siRNA target sequence for KIAA1701 (NM_030639.1,2081-2099).
gaaaaggctcaattgtagt

SEQ ID NO: 394815 - DNA, 19 bp, Homo sapiens
  siRNA target sequence for KIAA1701 (NM_030639.1,2087-2105).
gctcaattgtagttgttga

SEQ ID NO: 394816 - DNA, 19 bp, Homo sapiens
  siRNA target sequence for KIAA1701 (NM_030639.1,2088-2106).
ctcaattgtagttgttgat

SEQ ID NO: 394817 - DNA, 19 bp, Homo sapiens
  siRNA target sequence for KIAA1701 (NM_030639.1,2101-2119).
gttgatcacttgagttata

SEQ ID NO: 394818 - DNA, 19 bp, Homo sapiens
  siRNA target sequence for KIAA1701 (NM_030639.1,2104-2122).
gatcacttgagttataata

SEQ ID NO: 394819 - DNA, 19 bp, Homo sapiens
  siRNA target sequence for KIAA1720 (NM_030645.1,603-621).
gctgcggcctgaagttgta

SEQ ID NO: 394820 - DNA, 19 bp, Homo sapiens
  siRNA target sequence for KIAA1720 (NM_030645.1,832-850).
gagtcggcgaggaaactga

SEQ ID NO: 394821 - DNA, 19 bp, Homo sapiens
  siRNA target sequence for KIAA1720 (NM_030645.1,834-852).
gtcggcgaggaaactgaat

SEQ ID NO: 394822 - DNA, 19 bp, Homo sapiens
  siRNA target sequence for KIAA1720 (NM_030645.1,839-857).
cgaggaaactgaatacaca

SEQ ID NO: 394823 - DNA, 19 bp, Homo sapiens
  siRNA target sequence for KIAA1720 (NM_030645.1,1022-1040).
gcgtcatggctgacaagaa

SEQ ID NO: 394824 - DNA, 19 bp, Homo sapiens
  siRNA target sequence for KIAA1720 (NM_030645.1,1079-1097).
ctacctgcaaggtgaatga

SEQ ID NO: 394825 - DNA, 19 bp, Homo sapiens
  siRNA target sequence for KIAA1715 (NM_030650.1,220-238).
gacaaaaccttcaactgta

SEQ ID NO: 394826 - DNA, 19 bp, Homo sapiens
  siRNA target sequence for KIAA1715 (NM_030650.1,228-246).
cttcaactgtagaagttct

SEQ ID NO: 394827 - DNA, 19 bp, Homo sapiens
  siRNA target sequence for KIAA1715 (NM_030650.1,347-365).
gttctctatctgtttacat

SEQ ID NO: 394828 - DNA, 19 bp, Homo sapiens
  siRNA target sequence for KIAA1715 (NM_030650.1,352-370).
ctatctgtttacatgctta

SEQ ID NO: 394829 - DNA, 19 bp, Homo sapiens
  siRNA target sequence for KIAA1715 (NM_030650.1,358-376).
gtttacatgcttaattgta

SEQ ID NO: 394830 - DNA, 19 bp, Homo sapiens
  siRNA target sequence for KIAA1715 (NM_030650.1,451-469).
catctggagcataagaaca

SEQ ID NO: 394831 - DNA, 19 bp, Homo sapiens
  siRNA target sequence for KIAA1715 (NM_030650.1,454-472).
ctggagcataagaacagta

SEQ ID NO: 394832 - DNA, 19 bp, Homo sapiens
  siRNA target sequence for KIAA1715 (NM_030650.1,460-478).
cataagaacagtaattatt

SEQ ID NO: 394833 - DNA, 19 bp, Homo sapiens
  siRNA target sequence for KIAA1715 (NM_030650.1,512-530).
gaagcattggatgatttaa

SEQ ID NO: 394834 - DNA, 19 bp, Homo sapiens
  siRNA target sequence for KIAA1715 (NM_030650.1,576-594).
cttacaagacggctaaatt

SEQ ID NO: 394835 - DNA, 19 bp, Homo sapiens
  siRNA target sequence for KIAA1715 (NM_030650.1,580-598).
caagacggctaaattaatt

SEQ ID NO: 394836 - DNA, 19 bp, Homo sapiens
  siRNA target sequence for KIAA1715 (NM_030650.1,585-603).
cggctaaattaattcttga

SEQ ID NO: 394837 - DNA, 19 bp, Homo sapiens
  siRNA target sequence for KIAA1715 (NM_030650.1,586-604).
ggctaaattaattcttgaa

SEQ ID NO: 394838 - DNA, 19 bp, Homo sapiens
  siRNA target sequence for KIAA1715 (NM_030650.1,606-624).
ggtttgatccggactcaaa

SEQ ID NO: 394839 - DNA, 19 bp, Homo sapiens
  siRNA target sequence for KIAA1715 (NM_030650.1,614-632).
ccggactcaaagaaagcaa

SEQ ID NO: 394840 - DNA, 19 bp, Homo sapiens
  siRNA target sequence for KIAA1715 (NM_030650.1,697-715).
gcgaactgcagctcaaaga

SEQ ID NO: 394841 - DNA, 19 bp, Homo sapiens
  siRNA target sequence for KIAA1715 (NM_030650.1,827-845).
gttactccagccctatcat

SEQ ID NO: 394842 - DNA, 19 bp, Homo sapiens
  siRNA target sequence for KIAA1715 (NM_030650.1,947-965).
gaacgaggtgctttggata

SEQ ID NO: 394843 - DNA, 19 bp, Homo sapiens
  siRNA target sequence for KIAA1715 (NM_030650.1,950-968).
cgaggtgctttggatagaa

SEQ ID NO: 394844 - DNA, 19 bp, Homo sapiens
  siRNA target sequence for KIAA1715 (NM_030650.1,951-969).
gaggtgctttggatagaat

SEQ ID NO: 394845 - DNA, 19 bp, Homo sapiens
  siRNA target sequence for KIAA1715 (NM_030650.1,961-979).
ggatagaattgttgaatat

SEQ ID NO: 394846 - DNA, 19 bp, Homo sapiens
  siRNA target sequence for KIAA1715 (NM_030650.1,1082-1100).
cgatgtgcctactgttttt

SEQ ID NO: 394847 - DNA, 19 bp, Homo sapiens
  siRNA target sequence for KIAA1715 (NM_030650.1,1102-1120).
cttgaaccctgcaagaaaa

SEQ ID NO: 394848 - DNA, 19 bp, Homo sapiens
  siRNA target sequence for KIAA1715 (NM_030650.1,1136-1154).
ccaagacttcctgagttta

SEQ ID NO: 394849 - DNA, 19 bp, Homo sapiens
  siRNA target sequence for KIAA1715 (NM_030650.1,1140-1158).
gacttcctgagtttagttt

SEQ ID NO: 394850 - DNA, 19 bp, Homo sapiens
  siRNA target sequence for KIAA1715 (NM_030650.1,1172-1190).
gtggtggaaggttcaagtt

SEQ ID NO: 394851 - DNA, 19 bp, Homo sapiens
  siRNA target sequence for KIAA1715 (NM_030650.1,1174-1192).
ggtggaaggttcaagttca

SEQ ID NO: 394852 - DNA, 19 bp, Homo sapiens
  siRNA target sequence for KIAA1715 (NM_030650.1,1224-1242).
catcagacaaccagtttaa

SEQ ID NO: 394853 - DNA, 19 bp, Homo sapiens
  siRNA target sequence for KIAA1715 (NM_030650.1,1261-1279).
cgatgttcttgatgataat

SEQ ID NO: 394854 - DNA, 19 bp, Homo sapiens
  siRNA target sequence for KIAA1715 (NM_030650.1,1288-1306).
gacagatgacaaaatacca

SEQ ID NO: 394855 - DNA, 19 bp, Homo sapiens
  siRNA target sequence for KIAA1715 (NM_030650.1,1318-1336).
gacaaaccaagtgattgaa

SEQ ID NO: 394856 - DNA, 19 bp, Homo sapiens
  siRNA target sequence for EGFL8 (NM_030652.1,205-223).
cgcatctgcagcacttaca

SEQ ID NO: 394857 - DNA, 19 bp, Homo sapiens
  siRNA target sequence for EGFL8 (NM_030652.1,460-478).
ctctgctcgcaccattgtt

SEQ ID NO: 394858 - DNA, 19 bp, Homo sapiens
  siRNA target sequence for EGFL8 (NM_030652.1,464-482).
gctcgcaccattgttttaa

SEQ ID NO: 394859 - DNA, 19 bp, Homo sapiens
  siRNA target sequence for EGFL8 (NM_030652.1,465-483).
ctcgcaccattgttttaat

SEQ ID NO: 394860 - DNA, 19 bp, Homo sapiens
  siRNA target sequence for EGFL8 (NM_030652.1,600-618).
cgttcgggaggcggaaaaa

SEQ ID NO: 394861 - DNA, 19 bp, Homo sapiens
  siRNA target sequence for EGFL8 (NM_030652.1,776-794).
gtgaccggatcgaatctct

SEQ ID NO: 394862 - DNA, 19 bp, Homo sapiens
  siRNA target sequence for EGFL8 (NM_030652.1,858-876).
gggcctcggcgtcaatcat

SEQ ID NO: 394863 - DNA, 19 bp, Homo sapiens
  siRNA target sequence for TCF7L2 (NM_030756.1,345-363).
gcgccaacgacgaactgat

SEQ ID NO: 394864 - DNA, 19 bp, Homo sapiens
  siRNA target sequence for TCF7L2 (NM_030756.1,346-364).
cgccaacgacgaactgatt

SEQ ID NO: 394865 - DNA, 19 bp, Homo sapiens
  siRNA target sequence for TCF7L2 (NM_030756.1,347-365).
gccaacgacgaactgattt

SEQ ID NO: 394866 - DNA, 19 bp, Homo sapiens
  siRNA target sequence for TCF7L2 (NM_030756.1,512-530).
ccgcctcgctccgaaagtt

SEQ ID NO: 394867 - DNA, 19 bp, Homo sapiens
  siRNA target sequence for TCF7L2 (NM_030756.1,513-531).
cgcctcgctccgaaagttt

SEQ ID NO: 394868 - DNA, 19 bp, Homo sapiens
  siRNA target sequence for TCF7L2 (NM_030756.1,523-541).
cgaaagtttccgagacaaa

SEQ ID NO: 394869 - DNA, 19 bp, Homo sapiens
  siRNA target sequence for TCF7L2 (NM_030756.1,575-593).
caagatggagggctcttta

SEQ ID NO: 394870 - DNA, 19 bp, Homo sapiens
  siRNA target sequence for TCF7L2 (NM_030756.1,609-627).
ccggctaccccttcatcat

SEQ ID NO: 394871 - DNA, 19 bp, Homo sapiens
  siRNA target sequence for TCF7L2 (NM_030756.1,769-787).
cccatcaccggcacacatt

SEQ ID NO: 394872 - DNA, 19 bp, Homo sapiens
  siRNA target sequence for TCF7L2 (NM_030756.1,771-789).
catcaccggcacacattgt

SEQ ID NO: 394873 - DNA, 19 bp, Homo sapiens
  siRNA target sequence for TCF7L2 (NM_030756.1,777-795).
cggcacacattgtctctaa

SEQ ID NO: 394874 - DNA, 19 bp, Homo sapiens
  siRNA target sequence for TCF7L2 (NM_030756.1,779-797).
gcacacattgtctctaaca

SEQ ID NO: 394875 - DNA, 19 bp, Homo sapiens
  siRNA target sequence for TCF7L2 (NM_030756.1,780-798).
cacacattgtctctaacaa

SEQ ID NO: 394876 - DNA, 19 bp, Homo sapiens
  siRNA target sequence for TCF7L2 (NM_030756.1,904-922).
cgacgtagaccccaaaaca

SEQ ID NO: 394877 - DNA, 19 bp, Homo sapiens
  siRNA target sequence for TCF7L2 (NM_030756.1,938-956).
ccgcaccctccagatatat

SEQ ID NO: 394878 - DNA, 19 bp, Homo sapiens
  siRNA target sequence for TCF7L2 (NM_030756.1,948-966).
cagatatatccccgtatta

SEQ ID NO: 394879 - DNA, 19 bp, Homo sapiens
  siRNA target sequence for TCF7L2 (NM_030756.1,978-996).
ctggcaccgtaggacaaat

SEQ ID NO: 394880 - DNA, 19 bp, Homo sapiens
  siRNA target sequence for TCF7L2 (NM_030756.1,1000-1018).
ccatccgctaggatggtta

SEQ ID NO: 394881 - DNA, 19 bp, Homo sapiens
  siRNA target sequence for TCF7L2 (NM_030756.1,1113-1131).
ggttccctccccatatggt

SEQ ID NO: 394882 - DNA, 19 bp, Homo sapiens
  siRNA target sequence for TCF7L2 (NM_030756.1,1166-1184).
ccgcatccggccatagtca

SEQ ID NO: 394883 - DNA, 19 bp, Homo sapiens
  siRNA target sequence for TCF7L2 (NM_030756.1,1220-1238).
gtcggctcactccatagtt

SEQ ID NO: 394884 - DNA, 19 bp, Homo sapiens
  siRNA target sequence for TCF7L2 (NM_030756.1,1222-1240).
cggctcactccatagttca

SEQ ID NO: 394885 - DNA, 19 bp, Homo sapiens
  siRNA target sequence for TCF7L2 (NM_030756.1,1456-1474).
gcgacagcttcatatgcaa

SEQ ID NO: 394886 - DNA, 19 bp, Homo sapiens
  siRNA target sequence for TCF7L2 (NM_030756.1,1540-1558).
gccgggagagaccaatgaa

SEQ ID NO: 394887 - DNA, 19 bp, Homo sapiens
  siRNA target sequence for TCF7L2 (NM_030756.1,1590-1608).
cacttcctccgattacaga

SEQ ID NO: 394888 - DNA, 19 bp, Homo sapiens
  siRNA target sequence for TCF7L2 (NM_030756.1,1636-1654).
gcgctttggccttgatcaa

SEQ ID NO: 394889 - DNA, 19 bp, Homo sapiens
  siRNA target sequence for TCF7L2 (NM_030756.1,1693-1711).
gtgcgttcgctacatacaa

SEQ ID NO: 394890 - DNA, 19 bp, Homo sapiens
  siRNA target sequence for TCF7L2 (NM_030756.1,1745-1763).
gatggaagcttactagatt

SEQ ID NO: 394891 - DNA, 19 bp, Homo sapiens
  siRNA target sequence for TCF7L2 (NM_030756.1,2006-2024).
gcacagccgtcgacttctt

SEQ ID NO: 394892 - DNA, 19 bp, Homo sapiens
  siRNA target sequence for AKNA (NM_030767.2,928-946).
cgggcaacccccatggaat

SEQ ID NO: 394893 - DNA, 19 bp, Homo sapiens
  siRNA target sequence for AKNA (NM_030767.2,929-947).
gggcaacccccatggaatt

SEQ ID NO: 394894 - DNA, 19 bp, Homo sapiens
  siRNA target sequence for AKNA (NM_030767.2,979-997).
ccgcagcatgccacagata

SEQ ID NO: 394895 - DNA, 19 bp, Homo sapiens
  siRNA target sequence for AKNA (NM_030767.2,981-999).
gcagcatgccacagataga

SEQ ID NO: 394896 - DNA, 19 bp, Homo sapiens
  siRNA target sequence for AKNA (NM_030767.2,982-1000).
cagcatgccacagatagat

SEQ ID NO: 394897 - DNA, 19 bp, Homo sapiens
  siRNA target sequence for AKNA (NM_030767.2,1009-1027).
gaaacgaccagattcttct

SEQ ID NO: 394898 - DNA, 19 bp, Homo sapiens
  siRNA target sequence for AKNA (NM_030767.2,1178-1196).
ctggccgctcctcttctaa

SEQ ID NO: 394899 - DNA, 19 bp, Homo sapiens
  siRNA target sequence for AKNA (NM_030767.2,1445-1463).
gggtaccccaagaatttca

SEQ ID NO: 394900 - DNA, 19 bp, Homo sapiens
  siRNA target sequence for AKNA (NM_030767.2,1890-1908).
ggtggagtcctttgaaaga

SEQ ID NO: 394901 - DNA, 19 bp, Homo sapiens
  siRNA target sequence for AKNA (NM_030767.2,2321-2339).
cctgcccattgcacgtaaa

SEQ ID NO: 394902 - DNA, 19 bp, Homo sapiens
  siRNA target sequence for AKNA (NM_030767.2,2540-2558).
gtgactccctggaagttga

SEQ ID NO: 394903 - DNA, 19 bp, Homo sapiens
  siRNA target sequence for AKNA (NM_030767.2,2622-2640).
gcaggctgagaaaagtcat

SEQ ID NO: 394904 - DNA, 19 bp, Homo sapiens
  siRNA target sequence for AKNA (NM_030767.2,2659-2677).
gccacggagaagatggtat

SEQ ID NO: 394905 - DNA, 19 bp, Homo sapiens
  siRNA target sequence for AKNA (NM_030767.2,2800-2818).
gcagcatcccaccaaagta

SEQ ID NO: 394906 - DNA, 19 bp, Homo sapiens
  siRNA target sequence for AKNA (NM_030767.2,3006-3024).
cagcacagcaggaacatta

SEQ ID NO: 394907 - DNA, 19 bp, Homo sapiens
  siRNA target sequence for AKNA (NM_030767.2,3243-3261).
ggggcacaaacggatttct

SEQ ID NO: 394908 - DNA, 19 bp, Homo sapiens
  siRNA target sequence for AKNA (NM_030767.2,3245-3263).
ggcacaaacggatttctga

SEQ ID NO: 394909 - DNA, 19 bp, Homo sapiens
  siRNA target sequence for AKNA (NM_030767.2,3269-3287).
cccttcccaacaagacaat

SEQ ID NO: 394910 - DNA, 19 bp, Homo sapiens
  siRNA target sequence for AKNA (NM_030767.2,3537-3555).
cacctggggctcccattat

SEQ ID NO: 394911 - DNA, 19 bp, Homo sapiens
  siRNA target sequence for AKNA (NM_030767.2,3550-3568).
cattatggcagtaaatcca

SEQ ID NO: 394912 - DNA, 19 bp, Homo sapiens
  siRNA target sequence for AKNA (NM_030767.2,3819-3837).
cacaggccacgaataccat

SEQ ID NO: 394913 - DNA, 19 bp, Homo sapiens
  siRNA target sequence for AKNA (NM_030767.2,4174-4192).
ccagcctttgcctacatct

SEQ ID NO: 394914 - DNA, 19 bp, Homo sapiens
  siRNA target sequence for NPL (NM_030769.1,92-110).
cacgccaatgactgagaat

SEQ ID NO: 394915 - DNA, 19 bp, Homo sapiens
  siRNA target sequence for NPL (NM_030769.1,136-154).
gtcagtatgtggattatct

SEQ ID NO: 394916 - DNA, 19 bp, Homo sapiens
  siRNA target sequence for NPL (NM_030769.1,334-352).
cccaacatgcagcagaaat

SEQ ID NO: 394917 - DNA, 19 bp, Homo sapiens
  siRNA target sequence for NPL (NM_030769.1,335-353).
ccaacatgcagcagaaata

SEQ ID NO: 394918 - DNA, 19 bp, Homo sapiens
  siRNA target sequence for NPL (NM_030769.1,403-421).
ccaaagatatcctgattaa

SEQ ID NO: 394919 - DNA, 19 bp, Homo sapiens
  siRNA target sequence for NPL (NM_030769.1,404-422).
caaagatatcctgattaat

SEQ ID NO: 394920 - DNA, 19 bp, Homo sapiens
  siRNA target sequence for NPL (NM_030769.1,453-471).
gccctgccattttattact

SEQ ID NO: 394921 - DNA, 19 bp, Homo sapiens
  siRNA target sequence for NPL (NM_030769.1,454-472).
ccctgccattttattacta

SEQ ID NO: 394922 - DNA, 19 bp, Homo sapiens
  siRNA target sequence for NPL (NM_030769.1,455-473).
cctgccattttattactat

SEQ ID NO: 394923 - DNA, 19 bp, Homo sapiens
  siRNA target sequence for NPL (NM_030769.1,483-501).
gccttgacaggggtaaaga

SEQ ID NO: 394924 - DNA, 19 bp, Homo sapiens
  siRNA target sequence for NPL (NM_030769.1,485-503).
cttgacaggggtaaagatt

SEQ ID NO: 394925 - DNA, 19 bp, Homo sapiens
  siRNA target sequence for NPL (NM_030769.1,555-573).
gggctgaaattcagtgata

SEQ ID NO: 394926 - DNA, 19 bp, Homo sapiens
  siRNA target sequence for NPL (NM_030769.1,587-605).
cttcgggcaatgtgttgat

SEQ ID NO: 394927 - DNA, 19 bp, Homo sapiens
  siRNA target sequence for NPL (NM_030769.1,608-626).
gaatcgccagcaacagttt

SEQ ID NO: 394928 - DNA, 19 bp, Homo sapiens
  siRNA target sequence for NPL (NM_030769.1,612-630).
cgccagcaacagtttgctt

SEQ ID NO: 394929 - DNA, 19 bp, Homo sapiens
  siRNA target sequence for NPL (NM_030769.1,640-658).
gggtggatgagcaactgtt

SEQ ID NO: 394930 - DNA, 19 bp, Homo sapiens
  siRNA target sequence for NPL (NM_030769.1,687-705).
gcagtgggcagtacctata

SEQ ID NO: 394931 - DNA, 19 bp, Homo sapiens
  siRNA target sequence for NPL (NM_030769.1,690-708).
gtgggcagtacctataact

SEQ ID NO: 394932 - DNA, 19 bp, Homo sapiens
  siRNA target sequence for NPL (NM_030769.1,761-779).
ctctttagccctgaactat

SEQ ID NO: 394933 - DNA, 19 bp, Homo sapiens
  siRNA target sequence for NPL (NM_030769.1,768-786).
gccctgaactatcagtttt

SEQ ID NO: 394934 - DNA, 19 bp, Homo sapiens
  siRNA target sequence for NPL (NM_030769.1,908-926).
ctccagggagtttactgat

SEQ ID NO: 394935 - DNA, 19 bp, Homo sapiens
  siRNA target sequence for NPL (NM_030769.1,922-940).
ctgatagtgctgaagctaa

SEQ ID NO: 394936 - DNA, 19 bp, Homo sapiens
  siRNA target sequence for GJA10 (NM_030772.2,334-352).
catcctgttcatatttcga

SEQ ID NO: 394937 - DNA, 19 bp, Homo sapiens
  siRNA target sequence for GJA10 (NM_030772.2,364-382).
gggtgtagcagctgaagat

SEQ ID NO: 394938 - DNA, 19 bp, Homo sapiens
  siRNA target sequence for GJA10 (NM_030772.2,544-562).
gtaccgactgagagttctt

SEQ ID NO: 394939 - DNA, 19 bp, Homo sapiens
  siRNA target sequence for GJA10 (NM_030772.2,718-736).
cacttatgtgatacacatt

SEQ ID NO: 394940 - DNA, 19 bp, Homo sapiens
  siRNA target sequence for GJA10 (NM_030772.2,797-815).
cacttagagccgctattta

SEQ ID NO: 394941 - DNA, 19 bp, Homo sapiens
  siRNA target sequence for GJA10 (NM_030772.2,824-842).
ggccacccgtgtccaaata

SEQ ID NO: 394942 - DNA, 19 bp, Homo sapiens
  siRNA target sequence for GJA10 (NM_030772.2,831-849).
cgtgtccaaatataatcga

SEQ ID NO: 394943 - DNA, 19 bp, Homo sapiens
  siRNA target sequence for GJA10 (NM_030772.2,887-905).
ctattatttatgcaatcta

SEQ ID NO: 394944 - DNA, 19 bp, Homo sapiens
  siRNA target sequence for GJA10 (NM_030772.2,898-916).
gcaatctatagccactatt

SEQ ID NO: 394945 - DNA, 19 bp, Homo sapiens
  siRNA target sequence for GJA10 (NM_030772.2,899-917).
caatctatagccactattt

SEQ ID NO: 394946 - DNA, 19 bp, Homo sapiens
  siRNA target sequence for GJA10 (NM_030772.2,983-1001).
ggaaaatacaagttgaaga

SEQ ID NO: 394947 - DNA, 19 bp, Homo sapiens
  siRNA target sequence for GJA10 (NM_030772.2,1003-1021).
ggaacataatgaattccat

SEQ ID NO: 394948 - DNA, 19 bp, Homo sapiens
  siRNA target sequence for GJA10 (NM_030772.2,1089-1107).
cttctgcccctgattataa

SEQ ID NO: 394949 - DNA, 19 bp, Homo sapiens
  siRNA target sequence for GJA10 (NM_030772.2,1092-1110).
ctgcccctgattataatct

SEQ ID NO: 394950 - DNA, 19 bp, Homo sapiens
  siRNA target sequence for GJA10 (NM_030772.2,1098-1116).
ctgattataatctgttagt

SEQ ID NO: 394951 - DNA, 19 bp, Homo sapiens
  siRNA target sequence for GJA10 (NM_030772.2,1136-1154).
gcagtgtaccctagtttaa

SEQ ID NO: 394952 - DNA, 19 bp, Homo sapiens
  siRNA target sequence for GJA10 (NM_030772.2,1141-1159).
gtaccctagtttaaattca

SEQ ID NO: 394953 - DNA, 19 bp, Homo sapiens
  siRNA target sequence for GJA10 (NM_030772.2,1174-1192).
gccaaatcctgacaatcat

SEQ ID NO: 394954 - DNA, 19 bp, Homo sapiens
  siRNA target sequence for GJA10 (NM_030772.2,1255-1273).
cacacttagtactagttgt

SEQ ID NO: 394955 - DNA, 19 bp, Homo sapiens
  siRNA target sequence for GJA10 (NM_030772.2,1263-1281).
gtactagttgtagtcattt

SEQ ID NO: 394956 - DNA, 19 bp, Homo sapiens
  siRNA target sequence for GJA10 (NM_030772.2,1266-1284).
ctagttgtagtcattttca

SEQ ID NO: 394957 - DNA, 19 bp, Homo sapiens
  siRNA target sequence for GJA10 (NM_030772.2,1328-1346).
ggaaaagaacttaatggta

SEQ ID NO: 394958 - DNA, 19 bp, Homo sapiens
  siRNA target sequence for GJA10 (NM_030772.2,1337-1355).
cttaatggtaaccagttaa

SEQ ID NO: 394959 - DNA, 19 bp, Homo sapiens
  siRNA target sequence for GJA10 (NM_030772.2,1343-1361).
ggtaaccagttaatggaaa

SEQ ID NO: 394960 - DNA, 19 bp, Homo sapiens
  siRNA target sequence for GJA10 (NM_030772.2,1404-1422).
ctagaggtcaccgttctat

SEQ ID NO: 394961 - DNA, 19 bp, Homo sapiens
  siRNA target sequence for GJA10 (NM_030772.2,1419-1437).
ctattccaggtgttgctat

SEQ ID NO: 394962 - DNA, 19 bp, Homo sapiens
  siRNA target sequence for GJA10 (NM_030772.2,1488-1506).
cagctaactgcgattggaa

SEQ ID NO: 394963 - DNA, 19 bp, Homo sapiens
  siRNA target sequence for CRR9 (NM_030782.2,257-275).
catcgacctggtcttgaat

SEQ ID NO: 394964 - DNA, 19 bp, Homo sapiens
  siRNA target sequence for CRR9 (NM_030782.2,355-373).
cgctgtatgcctacatctt

SEQ ID NO: 394965 - DNA, 19 bp, Homo sapiens
  siRNA target sequence for CRR9 (NM_030782.2,477-495).
ctcaccggggagtctgata

SEQ ID NO: 394966 - DNA, 19 bp, Homo sapiens
  siRNA target sequence for CRR9 (NM_030782.2,479-497).
caccggggagtctgataca

SEQ ID NO: 394967 - DNA, 19 bp, Homo sapiens
  siRNA target sequence for CRR9 (NM_030782.2,481-499).
ccggggagtctgatacaca

SEQ ID NO: 394968 - DNA, 19 bp, Homo sapiens
  siRNA target sequence for CRR9 (NM_030782.2,578-596).
cgtgatggcggacaacttt

SEQ ID NO: 394969 - DNA, 19 bp, Homo sapiens
  siRNA target sequence for CRR9 (NM_030782.2,586-604).
cggacaactttgtctttga

SEQ ID NO: 394970 - DNA, 19 bp, Homo sapiens
  siRNA target sequence for CRR9 (NM_030782.2,624-642).
gatgtgcatcggtacatga

SEQ ID NO: 394971 - DNA, 19 bp, Homo sapiens
  siRNA target sequence for CRR9 (NM_030782.2,627-645).
gtgcatcggtacatgaaga

SEQ ID NO: 394972 - DNA, 19 bp, Homo sapiens
  siRNA target sequence for CRR9 (NM_030782.2,658-676).
ggaaaaccgtgcattacct

SEQ ID NO: 394973 - DNA, 19 bp, Homo sapiens
  siRNA target sequence for CRR9 (NM_030782.2,833-851).
gcagcagttcgggttttca

SEQ ID NO: 394974 - DNA, 19 bp, Homo sapiens
  siRNA target sequence for CRR9 (NM_030782.2,839-857).
gttcgggttttcagagaaa

SEQ ID NO: 394975 - DNA, 19 bp, Homo sapiens
  siRNA target sequence for CRR9 (NM_030782.2,842-860).
cgggttttcagagaaagat

SEQ ID NO: 394976 - DNA, 19 bp, Homo sapiens
  siRNA target sequence for CRR9 (NM_030782.2,885-903).
gtagataccaacttatact

SEQ ID NO: 394977 - DNA, 19 bp, Homo sapiens
  siRNA target sequence for CRR9 (NM_030782.2,1174-1192).
gcctgatgcccgaatttca

SEQ ID NO: 394978 - DNA, 19 bp, Homo sapiens
  siRNA target sequence for CRR9 (NM_030782.2,1176-1194).
ctgatgcccgaatttcagt

SEQ ID NO: 394979 - DNA, 19 bp, Homo sapiens
  siRNA target sequence for CRR9 (NM_030782.2,1178-1196).
gatgcccgaatttcagttt

SEQ ID NO: 394980 - DNA, 19 bp, Homo sapiens
  siRNA target sequence for CRR9 (NM_030782.2,1198-1216).
gcacttacagcgaatctga

SEQ ID NO: 394981 - DNA, 19 bp, Homo sapiens
  siRNA target sequence for CRR9 (NM_030782.2,1225-1243).
ccgaggagtacgatactca

SEQ ID NO: 394982 - DNA, 19 bp, Homo sapiens
  siRNA target sequence for CRR9 (NM_030782.2,1236-1254).
gatactcaggccatgaagt

SEQ ID NO: 394983 - DNA, 19 bp, Homo sapiens
  siRNA target sequence for CRR9 (NM_030782.2,1246-1264).
ccatgaagtacttgtcata

SEQ ID NO: 394984 - DNA, 19 bp, Homo sapiens
  siRNA target sequence for CRR9 (NM_030782.2,1284-1302).
gtcgggggtgctgtctatt

SEQ ID NO: 394985 - DNA, 19 bp, Homo sapiens
  siRNA target sequence for CRR9 (NM_030782.2,1296-1314).
gtctattcactcctgaata

SEQ ID NO: 394986 - DNA, 19 bp, Homo sapiens
  siRNA target sequence for CRR9 (NM_030782.2,1303-1321).
cactcctgaatatcaaata

SEQ ID NO: 394987 - DNA, 19 bp, Homo sapiens
  siRNA target sequence for CRR9 (NM_030782.2,1305-1323).
ctcctgaatatcaaatata

SEQ ID NO: 394988 - DNA, 19 bp, Homo sapiens
  siRNA target sequence for CRR9 (NM_030782.2,1330-1348).
ggtactcctggttaatcaa

SEQ ID NO: 394989 - DNA, 19 bp, Homo sapiens
  siRNA target sequence for CRR9 (NM_030782.2,1407-1425).
gtgaactacaagttgaagt

SEQ ID NO: 394990 - DNA, 19 bp, Homo sapiens
  siRNA target sequence for CRR9 (NM_030782.2,1571-1589).
ccagcggtggctttatcct

SEQ ID NO: 394991 - DNA, 19 bp, Homo sapiens
  siRNA target sequence for CRR9 (NM_030782.2,1579-1597).
ggctttatcctgtggataa

SEQ ID NO: 394992 - DNA, 19 bp, Homo sapiens
  siRNA target sequence for CRR9 (NM_030782.2,1580-1598).
gctttatcctgtggataaa

SEQ ID NO: 394993 - DNA, 19 bp, Homo sapiens
  siRNA target sequence for SYNCOILIN (NM_030786.1,323-341).
ggcagctccgcctgcaaaa

SEQ ID NO: 394994 - DNA, 19 bp, Homo sapiens
  siRNA target sequence for SYNCOILIN (NM_030786.1,363-381).
cgcacttgtgaggcaaaaa

SEQ ID NO: 394995 - DNA, 19 bp, Homo sapiens
  siRNA target sequence for SYNCOILIN (NM_030786.1,430-448).
gaacgccagaggcagttaa

SEQ ID NO: 394996 - DNA, 19 bp, Homo sapiens
  siRNA target sequence for SYNCOILIN (NM_030786.1,434-452).
gccagaggcagttaagaaa

SEQ ID NO: 394997 - DNA, 19 bp, Homo sapiens
  siRNA target sequence for SGPP1 (NM_030791.2,302-320).
gggagcgaccgcaatcagt

SEQ ID NO: 394998 - DNA, 19 bp, Homo sapiens
  siRNA target sequence for SGPP1 (NM_030791.2,510-528).
gcaacgaactcttctacat

SEQ ID NO: 394999 - DNA, 19 bp, Homo sapiens
  siRNA target sequence for SGPP1 (NM_030791.2,771-789).
gctggcagtaccctcttat

SEQ ID NO: 395000 - DNA, 19 bp, Homo sapiens
  siRNA target sequence for SGPP1 (NM_030791.2,772-790).
ctggcagtaccctcttata

SEQ ID NO: 395001 - DNA, 19 bp, Homo sapiens
  siRNA target sequence for SGPP1 (NM_030791.2,831-849).
gcctaagtagaatttacat

SEQ ID NO: 395002 - DNA, 19 bp, Homo sapiens
  siRNA target sequence for SGPP1 (NM_030791.2,856-874).
gcactctattctggatatt

SEQ ID NO: 395003 - DNA, 19 bp, Homo sapiens
  siRNA target sequence for SGPP1 (NM_030791.2,857-875).
cactctattctggatatta

SEQ ID NO: 395004 - DNA, 19 bp, Homo sapiens
  siRNA target sequence for SGPP1 (NM_030791.2,878-896).
gctggattcctatatacca

SEQ ID NO: 395005 - DNA, 19 bp, Homo sapiens
  siRNA target sequence for SGPP1 (NM_030791.2,881-899).
ggattcctatataccattt

SEQ ID NO: 395006 - DNA, 19 bp, Homo sapiens
  siRNA target sequence for SGPP1 (NM_030791.2,949-967).
ccaaactcacaaatatgct

SEQ ID NO: 395007 - DNA, 19 bp, Homo sapiens
  siRNA target sequence for SGPP1 (NM_030791.2,976-994).
catcatcgggcttcattta

SEQ ID NO: 395008 - DNA, 19 bp, Homo sapiens
  siRNA target sequence for SGPP1 (NM_030791.2,979-997).
catcgggcttcatttagct

SEQ ID NO: 395009 - DNA, 19 bp, Homo sapiens
  siRNA target sequence for SGPP1 (NM_030791.2,1082-1100).
gcatgtggatctcatgtta

SEQ ID NO: 395010 - DNA, 19 bp, Homo sapiens
  siRNA target sequence for SGPP1 (NM_030791.2,1086-1104).
gtggatctcatgttactta

SEQ ID NO: 395011 - DNA, 19 bp, Homo sapiens
  siRNA target sequence for SGPP1 (NM_030791.2,1092-1110).
ctcatgttacttataacat

SEQ ID NO: 395012 - DNA, 19 bp, Homo sapiens
  siRNA target sequence for SGPP1 (NM_030791.2,1108-1126).
catgggtctagtattagat

SEQ ID NO: 395013 - DNA, 19 bp, Homo sapiens
  siRNA target sequence for SGPP1 (NM_030791.2,1124-1142).
gatccttctctagatacat

SEQ ID NO: 395014 - DNA, 19 bp, Homo sapiens
  siRNA target sequence for SGPP1 (NM_030791.2,1201-1219).
cctcatagggatggtattt

SEQ ID NO: 395015 - DNA, 19 bp, Homo sapiens
  siRNA target sequence for SGPP1 (NM_030791.2,1214-1232).
gtatttgtactaataatca

SEQ ID NO: 395016 - DNA, 19 bp, Homo sapiens
  siRNA target sequence for SGPP1 (NM_030791.2,1279-1297).
caatataccgtgtgatgat

SEQ ID NO: 395017 - DNA, 19 bp, Homo sapiens
  siRNA target sequence for SGPP1 (NM_030791.2,1286-1304).
ccgtgtgatgatattcgaa

SEQ ID NO: 395018 - DNA, 19 bp, Homo sapiens
  siRNA target sequence for SGPP1 (NM_030791.2,1287-1305).
cgtgtgatgatattcgaaa

SEQ ID NO: 395019 - DNA, 19 bp, Homo sapiens
  siRNA target sequence for SGPP1 (NM_030791.2,1315-1333).
gcacatggaagttgaactt

SEQ ID NO: 395020 - DNA, 19 bp, Homo sapiens
  siRNA target sequence for SGPP1 (NM_030791.2,1321-1339).
ggaagttgaacttccttat

SEQ ID NO: 395021 - DNA, 19 bp, Homo sapiens
  siRNA target sequence for SGPP1 (NM_030791.2,1331-1349).
cttccttatcggtatatta

SEQ ID NO: 395022 - DNA, 19 bp, Homo sapiens
  siRNA target sequence for SGPP1 (NM_030791.2,1334-1352).
ccttatcggtatattacct

SEQ ID NO: 395023 - DNA, 19 bp, Homo sapiens
  siRNA target sequence for SGPP1 (NM_030791.2,1340-1358).
cggtatattacctatggaa

SEQ ID NO: 395024 - DNA, 19 bp, Homo sapiens
  siRNA target sequence for SGPP1 (NM_030791.2,1341-1359).
ggtatattacctatggaat

SEQ ID NO: 395025 - DNA, 19 bp, Homo sapiens
  siRNA target sequence for SGPP1 (NM_030791.2,1350-1368).
cctatggaatggttggttt

SEQ ID NO: 395026 - DNA, 19 bp, Homo sapiens
  siRNA target sequence for SP329 (NM_030793.2,856-874).
ccgaaacttggaacactta

SEQ ID NO: 395027 - DNA, 19 bp, Homo sapiens
  siRNA target sequence for SP329 (NM_030793.2,858-876).
gaaacttggaacacttaga

SEQ ID NO: 395028 - DNA, 19 bp, Homo sapiens
  siRNA target sequence for SP329 (NM_030793.2,1217-1235).
gaaaatcctggtatcatca

SEQ ID NO: 395029 - DNA, 19 bp, Homo sapiens
  siRNA target sequence for SP329 (NM_030793.2,1245-1263).
ggatgaaagcagtcaatga

SEQ ID NO: 395030 - DNA, 19 bp, Homo sapiens
  siRNA target sequence for SP329 (NM_030793.2,1313-1331).
cacaacccatacaattgga

SEQ ID NO: 395031 - DNA, 19 bp, Homo sapiens
  siRNA target sequence for SP329 (NM_030793.2,1409-1427).
ggccagtttattgaattat

SEQ ID NO: 395032 - DNA, 19 bp, Homo sapiens
  siRNA target sequence for SP329 (NM_030793.2,1432-1450).
cagcctagagtttatttca

SEQ ID NO: 395033 - DNA, 19 bp, Homo sapiens
  siRNA target sequence for SP329 (NM_030793.2,1510-1528).
cacaggaattggtgtttca

SEQ ID NO: 395034 - DNA, 19 bp, Homo sapiens
  siRNA target sequence for SP329 (NM_030793.2,1527-1545).
catcagctcttgttagcaa

SEQ ID NO: 395035 - DNA, 19 bp, Homo sapiens
  siRNA target sequence for SP329 (NM_030793.2,1552-1570).
ctccaacaatgacgataat

SEQ ID NO: 395036 - DNA, 19 bp, Homo sapiens
  siRNA target sequence for SP329 (NM_030793.2,1683-1701).
cagctgacgcattaaatga

SEQ ID NO: 395037 - DNA, 19 bp, Homo sapiens
  siRNA target sequence for SP329 (NM_030793.2,1735-1753).
ggtggccgagagtggaaat

SEQ ID NO: 395038 - DNA, 19 bp, Homo sapiens
  siRNA target sequence for SP329 (NM_030793.2,1736-1754).
gtggccgagagtggaaata

SEQ ID NO: 395039 - DNA, 19 bp, Homo sapiens
  siRNA target sequence for SP329 (NM_030793.2,1738-1756).
ggccgagagtggaaataat

SEQ ID NO: 395040 - DNA, 19 bp, Homo sapiens
  siRNA target sequence for SP329 (NM_030793.2,1763-1781).
gctcacagccaggcaatta

SEQ ID NO: 395041 - DNA, 19 bp, Homo sapiens
  siRNA target sequence for SP329 (NM_030793.2,1768-1786).
cagccaggcaattattcct

SEQ ID NO: 395042 - DNA, 19 bp, Homo sapiens
  siRNA target sequence for SP329 (NM_030793.2,1826-1844).
cagcgtgtagtaaaaccaa

SEQ ID NO: 395043 - DNA, 19 bp, Homo sapiens
  siRNA target sequence for SP329 (NM_030793.2,1835-1853).
gtaaaaccaacctcaatta

SEQ ID NO: 395044 - DNA, 19 bp, Homo sapiens
  siRNA target sequence for SP329 (NM_030793.2,1901-1919).
caagaagtctggattccta

SEQ ID NO: 395045 - DNA, 19 bp, Homo sapiens
  siRNA target sequence for SP329 (NM_030793.2,1924-1942).
cggtactcggcgttactct

SEQ ID NO: 395046 - DNA, 19 bp, Homo sapiens
  siRNA target sequence for SP329 (NM_030793.2,1987-2005).
gtcagaagtagccaaaaca

SEQ ID NO: 395047 - DNA, 19 bp, Homo sapiens
  siRNA target sequence for SP329 (NM_030793.2,2008-2026).
gccacgtcacgccatgaaa

SEQ ID NO: 395048 - DNA, 19 bp, Homo sapiens
  siRNA target sequence for SP329 (NM_030793.2,2033-2051).
cggacagcagataaatcca

SEQ ID NO: 395049 - DNA, 19 bp, Homo sapiens
  siRNA target sequence for SP329 (NM_030793.2,2039-2057).
gcagataaatccactagta

SEQ ID NO: 395050 - DNA, 19 bp, Homo sapiens
  siRNA target sequence for SP329 (NM_030793.2,2042-2060).
gataaatccactagtacaa

SEQ ID NO: 395051 - DNA, 19 bp, Homo sapiens
  siRNA target sequence for SP329 (NM_030793.2,2087-2105).
gtgcaggttcttgtattaa

SEQ ID NO: 395052 - DNA, 19 bp, Homo sapiens
  siRNA target sequence for SP329 (NM_030793.2,2089-2107).
gcaggttcttgtattaaaa

SEQ ID NO: 395053 - DNA, 19 bp, Homo sapiens
  siRNA target sequence for SP329 (NM_030793.2,2117-2135).
cttgttggagtcactatga

SEQ ID NO: 395054 - DNA, 19 bp, Homo sapiens
  siRNA target sequence for SP329 (NM_030793.2,2123-2141).
ggagtcactatgaccaatt

SEQ ID NO: 395055 - DNA, 19 bp, Homo sapiens
  siRNA target sequence for SP329 (NM_030793.2,2134-2152).
gaccaattgtggaatcaca

SEQ ID NO: 395056 - DNA, 19 bp, Homo sapiens
  siRNA target sequence for SP329 (NM_030793.2,2142-2160).
gtggaatcacagatctagt

SEQ ID NO: 395057 - DNA, 19 bp, Homo sapiens
  siRNA target sequence for SP329 (NM_030793.2,2149-2167).
cacagatctagtgctaaaa

SEQ ID NO: 395058 - DNA, 19 bp, Homo sapiens
  siRNA target sequence for SP329 (NM_030793.2,2153-2171).
gatctagtgctaaaagact

SEQ ID NO: 395059 - DNA, 19 bp, Homo sapiens
  siRNA target sequence for SP329 (NM_030793.2,2199-2217).
ccaggtgcagggtactaaa

SEQ ID NO: 395060 - DNA, 19 bp, Homo sapiens
  siRNA target sequence for SP329 (NM_030793.2,2200-2218).
caggtgcagggtactaaaa

SEQ ID NO: 395061 - DNA, 19 bp, Homo sapiens
  siRNA target sequence for SP329 (NM_030793.2,2202-2220).
ggtgcagggtactaaaaca

SEQ ID NO: 395062 - DNA, 19 bp, Homo sapiens
  siRNA target sequence for SP329 (NM_030793.2,2203-2221).
gtgcagggtactaaaacat

SEQ ID NO: 395063 - DNA, 19 bp, Homo sapiens
  siRNA target sequence for SP329 (NM_030793.2,2205-2223).
gcagggtactaaaacattt

SEQ ID NO: 395064 - DNA, 19 bp, Homo sapiens
  siRNA target sequence for SP329 (NM_030793.2,2231-2249).
gaaaatgcaccaattgtaa

SEQ ID NO: 395065 - DNA, 19 bp, Homo sapiens
  siRNA target sequence for SP329 (NM_030793.2,2241-2259).
caattgtaaaccgatttga

SEQ ID NO: 395066 - DNA, 19 bp, Homo sapiens
  siRNA target sequence for SP329 (NM_030793.2,2294-2312).
gtactagaccagatactaa

SEQ ID NO: 395067 - DNA, 19 bp, Homo sapiens
  siRNA target sequence for SP329 (NM_030793.2,2323-2341).
cgagagaaaccgcatcata

SEQ ID NO: 395068 - DNA, 19 bp, Homo sapiens
  siRNA target sequence for SP329 (NM_030793.2,2324-2342).
gagagaaaccgcatcatat

SEQ ID NO: 395069 - DNA, 19 bp, Homo sapiens
  siRNA target sequence for SP329 (NM_030793.2,2328-2346).
gaaaccgcatcatatacct

SEQ ID NO: 395070 - DNA, 19 bp, Homo sapiens
  siRNA target sequence for SP329 (NM_030793.2,2359-2377).
gcaggtggacactctaact

SEQ ID NO: 395071 - DNA, 19 bp, Homo sapiens
  siRNA target sequence for SP329 (NM_030793.2,2399-2417).
ggtccctacccctatcaca

SEQ ID NO: 395072 - DNA, 19 bp, Homo sapiens
  siRNA target sequence for SP329 (NM_030793.2,2400-2418).
gtccctacccctatcacat

SEQ ID NO: 395073 - DNA, 19 bp, Homo sapiens
  siRNA target sequence for SP329 (NM_030793.2,2407-2425).
cccctatcacatctgtatt

SEQ ID NO: 395074 - DNA, 19 bp, Homo sapiens
  siRNA target sequence for SP329 (NM_030793.2,2408-2426).
ccctatcacatctgtatta

SEQ ID NO: 395075 - DNA, 19 bp, Homo sapiens
  siRNA target sequence for SP329 (NM_030793.2,2445-2463).
ctcccaatgtccggaataa

SEQ ID NO: 395076 - DNA, 19 bp, Homo sapiens
  siRNA target sequence for SP329 (NM_030793.2,2448-2466).
ccaatgtccggaataaggt

SEQ ID NO: 395077 - DNA, 19 bp, Homo sapiens
  siRNA target sequence for SP329 (NM_030793.2,2476-2494).
cagctggatggacactata

SEQ ID NO: 395078 - DNA, 19 bp, Homo sapiens
  siRNA target sequence for SP329 (NM_030793.2,2488-2506).
cactatagcaaacatcaat

SEQ ID NO: 395079 - DNA, 19 bp, Homo sapiens
  siRNA target sequence for SP329 (NM_030793.2,2541-2559).
ccactcgaagtgaagaaga

SEQ ID NO: 395080 - DNA, 19 bp, Homo sapiens
  siRNA target sequence for SP329 (NM_030793.2,2546-2564).
cgaagtgaagaagacttaa

SEQ ID NO: 395081 - DNA, 19 bp, Homo sapiens
  siRNA target sequence for SP329 (NM_030793.2,2584-2602).
ctgggggagagaaatctat

SEQ ID NO: 395082 - DNA, 19 bp, Homo sapiens
  siRNA target sequence for SP329 (NM_030793.2,2587-2605).
ggggagagaaatctatact

SEQ ID NO: 395083 - DNA, 19 bp, Homo sapiens
  siRNA target sequence for SP329 (NM_030793.2,2588-2606).
gggagagaaatctatactt

SEQ ID NO: 395084 - DNA, 19 bp, Homo sapiens
  siRNA target sequence for SP329 (NM_030793.2,2589-2607).
ggagagaaatctatacttt

SEQ ID NO: 395085 - DNA, 19 bp, Homo sapiens
  siRNA target sequence for SP329 (NM_030793.2,2590-2608).
gagagaaatctatacttta

SEQ ID NO: 395086 - DNA, 19 bp, Homo sapiens
  siRNA target sequence for SP329 (NM_030793.2,2621-2639).
gatggagctccatattcca

SEQ ID NO: 395087 - DNA, 19 bp, Homo sapiens
  siRNA target sequence for SP329 (NM_030793.2,2653-2671).
cccttggctgaggtcatta

SEQ ID NO: 395088 - DNA, 19 bp, Homo sapiens
  siRNA target sequence for SP329 (NM_030793.2,2695-2713).
cgctcgatacgactttgaa

SEQ ID NO: 395089 - DNA, 19 bp, Homo sapiens
  siRNA target sequence for SP329 (NM_030793.2,2697-2715).
ctcgatacgactttgaaga

SEQ ID NO: 395090 - DNA, 19 bp, Homo sapiens
  siRNA target sequence for SP329 (NM_030793.2,2815-2833).
gatgaagaagggtgtattt

SEQ ID NO: 395091 - DNA, 19 bp, Homo sapiens
  siRNA target sequence for SP329 (NM_030793.2,2834-2852).
cagcgagtagtggcaattt

SEQ ID NO: 395092 - DNA, 19 bp, Homo sapiens
  siRNA target sequence for SP329 (NM_030793.2,2837-2855).
cgagtagtggcaattttta

SEQ ID NO: 395093 - DNA, 19 bp, Homo sapiens
  siRNA target sequence for SP329 (NM_030793.2,2872-2890).
caatggagagccagttgaa

SEQ ID NO: 395094 - DNA, 19 bp, Homo sapiens
  siRNA target sequence for DKFZP564K0822 (NM_030796.2,202-220).
gcattgctggtatttcgaa

SEQ ID NO: 395095 - DNA, 19 bp, Homo sapiens
  siRNA target sequence for DKFZP564K0822 (NM_030796.2,211-229).
gtatttcgaaggactctat

SEQ ID NO: 395096 - DNA, 19 bp, Homo sapiens
  siRNA target sequence for DKFZP564K0822 (NM_030796.2,222-240).
gactctatccaacctatta

SEQ ID NO: 395097 - DNA, 19 bp, Homo sapiens
  siRNA target sequence for DKFZP564K0822 (NM_030796.2,224-242).
ctctatccaacctattata

SEQ ID NO: 395098 - DNA, 19 bp, Homo sapiens
  siRNA target sequence for DKFZP564K0822 (NM_030796.2,354-372).
gcggagccggcttcttcat

SEQ ID NO: 395099 - DNA, 19 bp, Homo sapiens
  siRNA target sequence for DKFZP564K0822 (NM_030796.2,621-639).
cgtacgaacaggtagtgaa

SEQ ID NO: 395100 - DNA, 19 bp, Homo sapiens
  siRNA target sequence for DKFZP566A1524 (NM_030797.1,239-257).
ccttaccagggaaattgaa

SEQ ID NO: 395101 - DNA, 19 bp, Homo sapiens
  siRNA target sequence for DKFZP566A1524 (NM_030797.1,240-258).
cttaccagggaaattgaaa

SEQ ID NO: 395102 - DNA, 19 bp, Homo sapiens
  siRNA target sequence for DKFZP566A1524 (NM_030797.1,401-419).
gatccgagatgcaattcaa

SEQ ID NO: 395103 - DNA, 19 bp, Homo sapiens
  siRNA target sequence for DKFZP566A1524 (NM_030797.1,460-478).
cggtgtgccctcttgttgt

SEQ ID NO: 395104 - DNA, 19 bp, Homo sapiens
  siRNA target sequence for DKFZP566A1524 (NM_030797.1,506-524).
cattagactagaaaaagct

SEQ ID NO: 395105 - DNA, 19 bp, Homo sapiens
  siRNA target sequence for DKFZP566A1524 (NM_030797.1,525-543).
cttcagagtttattggaat

SEQ ID NO: 395106 - DNA, 19 bp, Homo sapiens
  siRNA target sequence for DKFZP566A1524 (NM_030797.1,659-677).
gaacccggctattcagaat

SEQ ID NO: 395107 - DNA, 19 bp, Homo sapiens
  siRNA target sequence for DKFZP566A1524 (NM_030797.1,663-681).
ccggctattcagaatgact

SEQ ID NO: 395108 - DNA, 19 bp, Homo sapiens
  siRNA target sequence for DKFZP566A1524 (NM_030797.1,664-682).
cggctattcagaatgactt

SEQ ID NO: 395109 - DNA, 19 bp, Homo sapiens
  siRNA target sequence for DKFZP566A1524 (NM_030797.1,706-724).
gtcgcaaccgcatcaacaa

SEQ ID NO: 395110 - DNA, 19 bp, Homo sapiens
  siRNA target sequence for DKFZP566A1524 (NM_030797.1,728-746).
gcacctagacattgagaat

SEQ ID NO: 395111 - DNA, 19 bp, Homo sapiens
  siRNA target sequence for DKFZP566A1524 (NM_030797.1,806-824).
gctgaaaacccttagcaat

SEQ ID NO: 395112 - DNA, 19 bp, Homo sapiens
  siRNA target sequence for DKFZP566A1524 (NM_030797.1,929-947).
ggagtacagaagtaggttt

SEQ ID NO: 395113 - DNA, 19 bp, Homo sapiens
  siRNA target sequence for DKFZP566A1524 (NM_030797.1,930-948).
gagtacagaagtaggttta

SEQ ID NO: 395114 - DNA, 19 bp, Homo sapiens
  siRNA target sequence for DKFZP566A1524 (NM_030797.1,1026-1044).
ggagctttctgcaagacat

SEQ ID NO: 395115 - DNA, 19 bp, Homo sapiens
  siRNA target sequence for DKFZP566A1524 (NM_030797.1,1062-1080).
ggctgcataaaagttttga

SEQ ID NO: 395116 - DNA, 19 bp, Homo sapiens
  siRNA target sequence for DKFZP566A1524 (NM_030797.1,1099-1117).
gtgtggaggggctgctaaa

SEQ ID NO: 395117 - DNA, 19 bp, Homo sapiens
  siRNA target sequence for DKFZP566A1524 (NM_030797.1,1120-1138).
ccctcaggttcactacaaa

SEQ ID NO: 395118 - DNA, 19 bp, Homo sapiens
  siRNA target sequence for DKFZP566A1524 (NM_030797.1,1139-1157).
gcacttgaacgatgaatca

SEQ ID NO: 395119 - DNA, 19 bp, Homo sapiens
  siRNA target sequence for DKFZP566A1524 (NM_030797.1,1140-1158).
cacttgaacgatgaatcaa

SEQ ID NO: 395120 - DNA, 19 bp, Homo sapiens
  siRNA target sequence for DKFZP566A1524 (NM_030797.1,1142-1160).
cttgaacgatgaatcaact

SEQ ID NO: 395121 - DNA, 19 bp, Homo sapiens
  siRNA target sequence for SMAP-5 (NM_030799.5,102-120).
gatttctaccagacaagtt

SEQ ID NO: 395122 - DNA, 19 bp, Homo sapiens
  siRNA target sequence for SMAP-5 (NM_030799.5,166-184).
gtggaggaccctatagcaa

SEQ ID NO: 395123 - DNA, 19 bp, Homo sapiens
  siRNA target sequence for SMAP-5 (NM_030799.5,171-189).
ggaccctatagcaaacagt

SEQ ID NO: 395124 - DNA, 19 bp, Homo sapiens
  siRNA target sequence for SMAP-5 (NM_030799.5,172-190).
gaccctatagcaaacagta

SEQ ID NO: 395125 - DNA, 19 bp, Homo sapiens
  siRNA target sequence for SMAP-5 (NM_030799.5,188-206).
gtatgctggctatgactat

SEQ ID NO: 395126 - DNA, 19 bp, Homo sapiens
  siRNA target sequence for SMAP-5 (NM_030799.5,208-226).
cgcagcaaggcagatttgt

SEQ ID NO: 395127 - DNA, 19 bp, Homo sapiens
  siRNA target sequence for SMAP-5 (NM_030799.5,256-274).
catacaccgggcagattta

SEQ ID NO: 395128 - DNA, 19 bp, Homo sapiens
  siRNA target sequence for SMAP-5 (NM_030799.5,276-294).
cagccaactcaggcatata

SEQ ID NO: 395129 - DNA, 19 bp, Homo sapiens
  siRNA target sequence for SMAP-5 (NM_030799.5,335-353).
ggatgagccacctttatta

SEQ ID NO: 395130 - DNA, 19 bp, Homo sapiens
  siRNA target sequence for SMAP-5 (NM_030799.5,385-403).
ggcaaaaaacactaacagt

SEQ ID NO: 395131 - DNA, 19 bp, Homo sapiens
  siRNA target sequence for SMAP-5 (NM_030799.5,386-404).
gcaaaaaacactaacagta

SEQ ID NO: 395132 - DNA, 19 bp, Homo sapiens
  siRNA target sequence for SMAP-5 (NM_030799.5,387-405).
caaaaaacactaacagtat

SEQ ID NO: 395133 - DNA, 19 bp, Homo sapiens
  siRNA target sequence for SMAP-5 (NM_030799.5,455-473).
ggcaggtccaatggttttt

SEQ ID NO: 395134 - DNA, 19 bp, Homo sapiens
  siRNA target sequence for SMAP-5 (NM_030799.5,533-551).
cgggatcagtgcaattgga

SEQ ID NO: 395135 - DNA, 19 bp, Homo sapiens
  siRNA target sequence for SMAP-5 (NM_030799.5,534-552).
gggatcagtgcaattggat

SEQ ID NO: 395136 - DNA, 19 bp, Homo sapiens
  siRNA target sequence for SMAP-5 (NM_030799.5,539-557).
cagtgcaattggatgtcta

SEQ ID NO: 395137 - DNA, 19 bp, Homo sapiens
  siRNA target sequence for SMAP-5 (NM_030799.5,584-602).
gagtatgacaggtgtttca

SEQ ID NO: 395138 - DNA, 19 bp, Homo sapiens
  siRNA target sequence for SMAP-5 (NM_030799.5,586-604).
gtatgacaggtgtttcatt

SEQ ID NO: 395139 - DNA, 19 bp, Homo sapiens
  siRNA target sequence for SMAP-5 (NM_030799.5,614-632).
ggcaagtgtccttggatat

SEQ ID NO: 395140 - DNA, 19 bp, Homo sapiens
  siRNA target sequence for SMAP-5 (NM_030799.5,639-657).
ctgcccatgatcctacttt

SEQ ID NO: 395141 - DNA, 19 bp, Homo sapiens
  siRNA target sequence for SMAP-5 (NM_030799.5,782-800).
gcaacttttagtagcatat

SEQ ID NO: 395142 - DNA, 19 bp, Homo sapiens
  siRNA target sequence for SMAP-5 (NM_030799.5,786-804).
cttttagtagcatatcctt

SEQ ID NO: 395143 - DNA, 19 bp, Homo sapiens
  siRNA target sequence for DKFZP564O1664 (NM_030800.1,341-359).
cgacagtggtggtaatgga

SEQ ID NO: 395144 - DNA, 19 bp, Homo sapiens
  siRNA target sequence for DKFZP564O1664 (NM_030800.1,375-393).
gacccgacctgtgtctatt

SEQ ID NO: 395145 - DNA, 19 bp, Homo sapiens
  siRNA target sequence for DKFZP564O1664 (NM_030800.1,377-395).
cccgacctgtgtctattga

SEQ ID NO: 395146 - DNA, 19 bp, Homo sapiens
  siRNA target sequence for DKFZP564O1664 (NM_030800.1,424-442).
ctagcagcccatggtttaa

SEQ ID NO: 395147 - DNA, 19 bp, Homo sapiens
  siRNA target sequence for DKFZP564O1664 (NM_030800.1,427-445).
gcagcccatggtttaacga

SEQ ID NO: 395148 - DNA, 19 bp, Homo sapiens
  siRNA target sequence for DKFZP564O1664 (NM_030800.1,437-455).
gtttaacgatgctgtttga

SEQ ID NO: 395149 - DNA, 19 bp, Homo sapiens
  siRNA target sequence for DKFZP564O1664 (NM_030800.1,454-472).
gagcacatggccacaaatt

SEQ ID NO: 395150 - DNA, 19 bp, Homo sapiens
  siRNA target sequence for DKFZP564O1664 (NM_030800.1,490-508).
gcacttgtggttttttcat

SEQ ID NO: 395151 - DNA, 19 bp, Homo sapiens
  siRNA target sequence for DKFZP564O1664 (NM_030800.1,506-524).
catcactttgggagttgat

SEQ ID NO: 395152 - DNA, 19 bp, Homo sapiens
  siRNA target sequence for DKFZP564O1664 (NM_030800.1,528-546).
ccccttcacgagagattat

SEQ ID NO: 395153 - DNA, 19 bp, Homo sapiens
  siRNA target sequence for DKFZP564O1664 (NM_030800.1,529-547).
cccttcacgagagattata

SEQ ID NO: 395154 - DNA, 19 bp, Homo sapiens
  siRNA target sequence for DKFZP564O1664 (NM_030800.1,530-548).
ccttcacgagagattataa

SEQ ID NO: 395155 - DNA, 19 bp, Homo sapiens
  siRNA target sequence for DKFZP564O1664 (NM_030800.1,577-595).
gatgattatgacaaaacct

SEQ ID NO: 395156 - DNA, 19 bp, Homo sapiens
  siRNA target sequence for DKFZP564O1664 (NM_030800.1,608-626).
cattagttggtgtttgcaa

SEQ ID NO: 395157 - DNA, 19 bp, Homo sapiens
  siRNA target sequence for DKFZP564O1664 (NM_030800.1,722-740).
ccctagccactcaaaatca

SEQ ID NO: 395158 - DNA, 19 bp, Homo sapiens
  siRNA target sequence for DKFZP564O1664 (NM_030800.1,723-741).
cctagccactcaaaatcaa

SEQ ID NO: 395159 - DNA, 19 bp, Homo sapiens
  siRNA target sequence for DKFZP564O1664 (NM_030800.1,756-774).
caggtttccactacctttt

SEQ ID NO: 395160 - DNA, 19 bp, Homo sapiens
  siRNA target sequence for DKFZP564O1664 (NM_030800.1,776-794).
ctttcccatctaagttata

SEQ ID NO: 395161 - DNA, 19 bp, Homo sapiens
  siRNA target sequence for DKFZP564O1664 (NM_030800.1,781-799).
ccatctaagttatatatca

SEQ ID NO: 395162 - DNA, 19 bp, Homo sapiens
  siRNA target sequence for DKFZP564O1664 (NM_030800.1,856-874).
cgtctcatagatttaaaca

SEQ ID NO: 395163 - DNA, 19 bp, Homo sapiens
  siRNA target sequence for DKFZP564O1664 (NM_030800.1,909-927).
cctgtgcttgaagaatgta

SEQ ID NO: 395164 - DNA, 19 bp, Homo sapiens
  siRNA target sequence for DKFZP564O1664 (NM_030800.1,957-975).
ggcatatacgcctttccat

SEQ ID NO: 395165 - DNA, 19 bp, Homo sapiens
  siRNA target sequence for DKFZP564O1664 (NM_030800.1,1022-1040).
ccaggccagaaccttttgt

SEQ ID NO: 395166 - DNA, 19 bp, Homo sapiens
  siRNA target sequence for DKFZP564O1664 (NM_030800.1,1023-1041).
caggccagaaccttttgtt

SEQ ID NO: 395167 - DNA, 19 bp, Homo sapiens
  siRNA target sequence for DKFZP564O1664 (NM_030800.1,1025-1043).
ggccagaaccttttgttgt

SEQ ID NO: 395168 - DNA, 19 bp, Homo sapiens
  siRNA target sequence for DKFZP564O1664 (NM_030800.1,1060-1078).
cctatccctaaagtcatta

SEQ ID NO: 395169 - DNA, 19 bp, Homo sapiens
  siRNA target sequence for DKFZP564O1664 (NM_030800.1,1061-1079).
ctatccctaaagtcattaa

SEQ ID NO: 395170 - DNA, 19 bp, Homo sapiens
  siRNA target sequence for DKFZP564O1664 (NM_030800.1,1145-1163).
gacatctggtcttacctat

SEQ ID NO: 395171 - DNA, 19 bp, Homo sapiens
  siRNA target sequence for DKFZP564O1664 (NM_030800.1,1196-1214).
ctggcatcactgatgacaa

SEQ ID NO: 395172 - DNA, 19 bp, Homo sapiens
  siRNA target sequence for DKFZP564O1664 (NM_030800.1,1272-1290).
gctccatggtagcctaaaa

SEQ ID NO: 395173 - DNA, 19 bp, Homo sapiens
  siRNA target sequence for DKFZP564O1664 (NM_030800.1,1298-1316).
gaatggtagcgattgttca

SEQ ID NO: 395174 - DNA, 19 bp, Homo sapiens
  siRNA target sequence for DKFZP564O1664 (NM_030800.1,1302-1320).
ggtagcgattgttcaatta

SEQ ID NO: 395175 - DNA, 19 bp, Homo sapiens
  siRNA target sequence for DKFZP564O1664 (NM_030800.1,1434-1452).
ggcacagttgggtcctatt

SEQ ID NO: 395176 - DNA, 19 bp, Homo sapiens
  siRNA target sequence for DKFZP564O1664 (NM_030800.1,1435-1453).
gcacagttgggtcctattt

SEQ ID NO: 395177 - DNA, 19 bp, Homo sapiens
  siRNA target sequence for DKFZP564O1664 (NM_030800.1,1440-1458).
gttgggtcctatttcagat

SEQ ID NO: 395178 - DNA, 19 bp, Homo sapiens
  siRNA target sequence for DKFZP564O1664 (NM_030800.1,1479-1497).
cgaggatgacaataagagt

SEQ ID NO: 395179 - DNA, 19 bp, Homo sapiens
  siRNA target sequence for DKFZP564O1664 (NM_030800.1,1566-1584).
cggcctgcagacagatgta

SEQ ID NO: 395180 - DNA, 19 bp, Homo sapiens
  siRNA target sequence for DKFZP564O1664 (NM_030800.1,1575-1593).
gacagatgtacagaagatt

SEQ ID NO: 395181 - DNA, 19 bp, Homo sapiens
  siRNA target sequence for DKFZP564O1664 (NM_030800.1,1579-1597).
gatgtacagaagattttaa

SEQ ID NO: 395182 - DNA, 19 bp, Homo sapiens
  siRNA target sequence for DKFZP564O1664 (NM_030800.1,1625-1643).
cacagacattctataagga

SEQ ID NO: 395183 - DNA, 19 bp, Homo sapiens
  siRNA target sequence for DKFZP564O1664 (NM_030800.1,1663-1681).
gccgctctagcctttggtt

SEQ ID NO: 395184 - DNA, 19 bp, Homo sapiens
  siRNA target sequence for DKFZP564O1664 (NM_030800.1,1664-1682).
ccgctctagcctttggttt

SEQ ID NO: 395185 - DNA, 19 bp, Homo sapiens
  siRNA target sequence for DKFZP564O1664 (NM_030800.1,1826-1844).
ccgcttatgaccagaacat

SEQ ID NO: 395186 - DNA, 19 bp, Homo sapiens
  siRNA target sequence for MAGED4 (NM_030801.2,194-212).
gcgtgcaatcggaaagcta

SEQ ID NO: 395187 - DNA, 19 bp, Homo sapiens
  siRNA target sequence for MAGED4 (NM_030801.2,204-222).
ggaaagctacagtgttgaa

SEQ ID NO: 395188 - DNA, 19 bp, Homo sapiens
  siRNA target sequence for MAGED4 (NM_030801.2,209-227).
gctacagtgttgaagacat

SEQ ID NO: 395189 - DNA, 19 bp, Homo sapiens
  siRNA target sequence for MAGED4 (NM_030801.2,367-385).
ggccttcgcatcttatcga

SEQ ID NO: 395190 - DNA, 19 bp, Homo sapiens
  siRNA target sequence for MAGED4 (NM_030801.2,368-386).
gccttcgcatcttatcgaa

SEQ ID NO: 395191 - DNA, 19 bp, Homo sapiens
  siRNA target sequence for MAGED4 (NM_030801.2,369-387).
ccttcgcatcttatcgaat

SEQ ID NO: 395192 - DNA, 19 bp, Homo sapiens
  siRNA target sequence for MAGED4 (NM_030801.2,444-462).
gctggatccggaaacactt

SEQ ID NO: 395193 - DNA, 19 bp, Homo sapiens
  siRNA target sequence for MAGED4 (NM_030801.2,678-696).
gcagacctcccagatgtta

SEQ ID NO: 395194 - DNA, 19 bp, Homo sapiens
  siRNA target sequence for MAGED4 (NM_030801.2,868-886).
cagaatgatgtcttcgatt

SEQ ID NO: 395195 - DNA, 19 bp, Homo sapiens
  siRNA target sequence for MAGED4 (NM_030801.2,1550-1568).
cgtacaccctggaaaagaa

SEQ ID NO: 395196 - DNA, 19 bp, Homo sapiens
  siRNA target sequence for MAGED4 (NM_030801.2,1645-1663).
cgcctccttggaaaaacca

SEQ ID NO: 395197 - DNA, 19 bp, Homo sapiens
  siRNA target sequence for MAGED4 (NM_030801.2,1880-1898).
cacctgagtatgaattcct

SEQ ID NO: 395198 - DNA, 19 bp, Homo sapiens
  siRNA target sequence for MAGED4 (NM_030801.2,1946-1964).
gattcatcgcccagaatca

SEQ ID NO: 395199 - DNA, 19 bp, Homo sapiens
  siRNA target sequence for MAGED4 (NM_030801.2,2115-2133).
gagctgggatgacatacaa

SEQ ID NO: 395200 - DNA, 19 bp, Homo sapiens
  siRNA target sequence for MAGED4 (NM_030801.2,2208-2226).
cagataccatcagtacatt

SEQ ID NO: 395201 - DNA, 19 bp, Homo sapiens
  siRNA target sequence for MAGED4 (NM_030801.2,2218-2236).
cagtacattctgaatagca

SEQ ID NO: 395202 - DNA, 19 bp, Homo sapiens
  siRNA target sequence for MAGED4 (NM_030801.2,2334-2352).
caccatccggaccagaaat

SEQ ID NO: 395203 - DNA, 19 bp, Homo sapiens
  siRNA target sequence for LOC81558 (NM_030802.2,294-312).
ggtggccccagaaaagtca

SEQ ID NO: 395204 - DNA, 19 bp, Homo sapiens
  siRNA target sequence for LOC81558 (NM_030802.2,334-352).
caggtccggcgtacattct

SEQ ID NO: 395205 - DNA, 19 bp, Homo sapiens
  siRNA target sequence for LOC81558 (NM_030802.2,1064-1082).
ctcgacctaatcatagcta

SEQ ID NO: 395206 - DNA, 19 bp, Homo sapiens
  siRNA target sequence for LOC81558 (NM_030802.2,1069-1087).
cctaatcatagctacatct

SEQ ID NO: 395207 - DNA, 19 bp, Homo sapiens
  siRNA target sequence for LOC81558 (NM_030802.2,1070-1088).
ctaatcatagctacatctt

SEQ ID NO: 395208 - DNA, 19 bp, Homo sapiens
  siRNA target sequence for LOC81558 (NM_030802.2,1116-1134).
gaaagtgcgtgtgtttgaa

SEQ ID NO: 395209 - DNA, 19 bp, Homo sapiens
  siRNA target sequence for LOC81558 (NM_030802.2,1389-1407).
gcgcaccccaccatcagaa

SEQ ID NO: 395210 - DNA, 19 bp, Homo sapiens
  siRNA target sequence for APG16L (NM_030803.5,989-1007).
ggaggccttctggattcta

SEQ ID NO: 395211 - DNA, 19 bp, Homo sapiens
  siRNA target sequence for APG16L (NM_030803.5,990-1008).
gaggccttctggattctat

SEQ ID NO: 395212 - DNA, 19 bp, Homo sapiens
  siRNA target sequence for APG16L (NM_030803.5,995-1013).
cttctggattctatcacta

SEQ ID NO: 395213 - DNA, 19 bp, Homo sapiens
  siRNA target sequence for APG16L (NM_030803.5,998-1016).
ctggattctatcactaata

SEQ ID NO: 395214 - DNA, 19 bp, Homo sapiens
  siRNA target sequence for C1orf21 (NM_030806.2,489-507).
gcatgttgccactgttcaa

SEQ ID NO: 395215 - DNA, 19 bp, Homo sapiens
  siRNA target sequence for C1orf21 (NM_030806.2,540-558).
ccagaacggagatgtgttt

SEQ ID NO: 395216 - DNA, 19 bp, Homo sapiens
  siRNA target sequence for C1orf21 (NM_030806.2,581-599).
cagtggaagaggtcaaata

SEQ ID NO: 395217 - DNA, 19 bp, Homo sapiens
  siRNA target sequence for C1orf21 (NM_030806.2,586-604).
gaagaggtcaaatacatga

SEQ ID NO: 395218 - DNA, 19 bp, Homo sapiens
  siRNA target sequence for C1orf21 (NM_030806.2,668-686).
ccagctcaaatgtaagact

SEQ ID NO: 395219 - DNA, 19 bp, Homo sapiens
  siRNA target sequence for C1orf21 (NM_030806.2,669-687).
cagctcaaatgtaagactt

SEQ ID NO: 395220 - DNA, 19 bp, Homo sapiens
  siRNA target sequence for C1orf21 (NM_030806.2,671-689).
gctcaaatgtaagacttaa

SEQ ID NO: 395221 - DNA, 19 bp, Homo sapiens
  siRNA target sequence for C1orf21 (NM_030806.2,702-720).
ggttccgggattagttcat

SEQ ID NO: 395222 - DNA, 19 bp, Homo sapiens
  siRNA target sequence for C1orf21 (NM_030806.2,790-808).
gaaaagggtcgggattact

SEQ ID NO: 395223 - DNA, 19 bp, Homo sapiens
  siRNA target sequence for C1orf21 (NM_030806.2,809-827).
gttcggaagaagaggatat

SEQ ID NO: 395224 - DNA, 19 bp, Homo sapiens
  siRNA target sequence for NDEL1 (NM_030808.2,200-218).
ggatggtgaagatatacca

SEQ ID NO: 395225 - DNA, 19 bp, Homo sapiens
  siRNA target sequence for NDEL1 (NM_030808.2,295-313).
ctcgggatgagctagttga

SEQ ID NO: 395226 - DNA, 19 bp, Homo sapiens
  siRNA target sequence for NDEL1 (NM_030808.2,297-315).
cgggatgagctagttgaat

SEQ ID NO: 395227 - DNA, 19 bp, Homo sapiens
  siRNA target sequence for NDEL1 (NM_030808.2,298-316).
gggatgagctagttgaatt

SEQ ID NO: 395228 - DNA, 19 bp, Homo sapiens
  siRNA target sequence for NDEL1 (NM_030808.2,347-365).
gttggaggcacaattagta

SEQ ID NO: 395229 - DNA, 19 bp, Homo sapiens
  siRNA target sequence for NDEL1 (NM_030808.2,363-381).
gtacaggctgaacaaagaa

SEQ ID NO: 395230 - DNA, 19 bp, Homo sapiens
  siRNA target sequence for NDEL1 (NM_030808.2,385-403).
gagacttgcaggctgataa

SEQ ID NO: 395231 - DNA, 19 bp, Homo sapiens
  siRNA target sequence for NDEL1 (NM_030808.2,389-407).
cttgcaggctgataaccaa

SEQ ID NO: 395232 - DNA, 19 bp, Homo sapiens
  siRNA target sequence for NDEL1 (NM_030808.2,399-417).
gataaccaaagactgaaat

SEQ ID NO: 395233 - DNA, 19 bp, Homo sapiens
  siRNA target sequence for NDEL1 (NM_030808.2,440-458).
gaagctagagcatcaatat

SEQ ID NO: 395234 - DNA, 19 bp, Homo sapiens
  siRNA target sequence for NDEL1 (NM_030808.2,443-461).
gctagagcatcaatatgca

SEQ ID NO: 395235 - DNA, 19 bp, Homo sapiens
  siRNA target sequence for NDEL1 (NM_030808.2,453-471).
caatatgcacagagctata

SEQ ID NO: 395236 - DNA, 19 bp, Homo sapiens
  siRNA target sequence for NDEL1 (NM_030808.2,473-491).
gcaggtctcagtgttagaa

SEQ ID NO: 395237 - DNA, 19 bp, Homo sapiens
  siRNA target sequence for NDEL1 (NM_030808.2,577-595).
gagccaaaagggcaacaat

SEQ ID NO: 395238 - DNA, 19 bp, Homo sapiens
  siRNA target sequence for NDEL1 (NM_030808.2,580-598).
ccaaaagggcaacaatagt

SEQ ID NO: 395239 - DNA, 19 bp, Homo sapiens
  siRNA target sequence for NDEL1 (NM_030808.2,581-599).
caaaagggcaacaatagtt

SEQ ID NO: 395240 - DNA, 19 bp, Homo sapiens
  siRNA target sequence for NDEL1 (NM_030808.2,586-604).
gggcaacaatagtttcact

SEQ ID NO: 395241 - DNA, 19 bp, Homo sapiens
  siRNA target sequence for NDEL1 (NM_030808.2,623-641).
gctaaaccaggccattgaa

SEQ ID NO: 395242 - DNA, 19 bp, Homo sapiens
  siRNA target sequence for NDEL1 (NM_030808.2,629-647).
ccaggccattgaacgaaat

SEQ ID NO: 395243 - DNA, 19 bp, Homo sapiens
  siRNA target sequence for NDEL1 (NM_030808.2,632-650).
ggccattgaacgaaatgca

SEQ ID NO: 395244 - DNA, 19 bp, Homo sapiens
  siRNA target sequence for NDEL1 (NM_030808.2,633-651).
gccattgaacgaaatgcat

SEQ ID NO: 395245 - DNA, 19 bp, Homo sapiens
  siRNA target sequence for NDEL1 (NM_030808.2,634-652).
ccattgaacgaaatgcatt

SEQ ID NO: 395246 - DNA, 19 bp, Homo sapiens
  siRNA target sequence for NDEL1 (NM_030808.2,721-739).
gagatttaaggcaagaact

SEQ ID NO: 395247 - DNA, 19 bp, Homo sapiens
  siRNA target sequence for NDEL1 (NM_030808.2,940-958).
ctaggatatcagcactaaa

SEQ ID NO: 395248 - DNA, 19 bp, Homo sapiens
  siRNA target sequence for NDEL1 (NM_030808.2,968-986).
ggatctcttacggaaagta

SEQ ID NO: 395249 - DNA, 19 bp, Homo sapiens
  siRNA target sequence for NDEL1 (NM_030808.2,1031-1049).
ggaccaagcatcacgaaaa

SEQ ID NO: 395250 - DNA, 19 bp, Homo sapiens
  siRNA target sequence for NDEL1 (NM_030808.2,1032-1050).
gaccaagcatcacgaaaat

SEQ ID NO: 395251 - DNA, 19 bp, Homo sapiens
  siRNA target sequence for NDEL1 (NM_030808.2,1038-1056).
gcatcacgaaaatcctata

SEQ ID NO: 395252 - DNA, 19 bp, Homo sapiens
  siRNA target sequence for NDEL1 (NM_030808.2,1039-1057).
catcacgaaaatcctatat

SEQ ID NO: 395253 - DNA, 19 bp, Homo sapiens
  siRNA target sequence for NDEL1 (NM_030808.2,1114-1132).
cagggcatacatctttctt

SEQ ID NO: 395254 - DNA, 19 bp, Homo sapiens
  siRNA target sequence for C12orf22 (NM_030809.1,321-339).
gtctcaagaggaagtttga

SEQ ID NO: 395255 - DNA, 19 bp, Homo sapiens
  siRNA target sequence for C12orf22 (NM_030809.1,347-365).
gatgtgggctcatcagttt

SEQ ID NO: 395256 - DNA, 19 bp, Homo sapiens
  siRNA target sequence for C12orf22 (NM_030809.1,382-400).
gatctccagcagtgatagt

SEQ ID NO: 395257 - DNA, 19 bp, Homo sapiens
  siRNA target sequence for C12orf22 (NM_030809.1,503-521).
gaccaggtgactgtatact

SEQ ID NO: 395258 - DNA, 19 bp, Homo sapiens
  siRNA target sequence for C12orf22 (NM_030809.1,506-524).
caggtgactgtatactact

SEQ ID NO: 395259 - DNA, 19 bp, Homo sapiens
  siRNA target sequence for C12orf22 (NM_030809.1,508-526).
ggtgactgtatactacttt

SEQ ID NO: 395260 - DNA, 19 bp, Homo sapiens
  siRNA target sequence for C12orf22 (NM_030809.1,598-616).
ctctgtacggagctataca

SEQ ID NO: 395261 - DNA, 19 bp, Homo sapiens
  siRNA target sequence for C12orf22 (NM_030809.1,600-618).
ctgtacggagctatacact

SEQ ID NO: 395262 - DNA, 19 bp, Homo sapiens
  siRNA target sequence for C12orf22 (NM_030809.1,610-628).
ctatacactctgtgagttt

SEQ ID NO: 395263 - DNA, 19 bp, Homo sapiens
  siRNA target sequence for C12orf22 (NM_030809.1,643-661).
ggtgaaccatcgagagatt

SEQ ID NO: 395264 - DNA, 19 bp, Homo sapiens
  siRNA target sequence for C12orf22 (NM_030809.1,797-815).
gtggaggtggatgattact

SEQ ID NO: 395265 - DNA, 19 bp, Homo sapiens
  siRNA target sequence for C12orf22 (NM_030809.1,867-885).
ctggggtccaccgtattga

SEQ ID NO: 395266 - DNA, 19 bp, Homo sapiens
  siRNA target sequence for C12orf22 (NM_030809.1,917-935).
cgcctgtcacgggaagaat

SEQ ID NO: 395267 - DNA, 19 bp, Homo sapiens
  siRNA target sequence for C12orf22 (NM_030809.1,919-937).
cctgtcacgggaagaatgt

SEQ ID NO: 395268 - DNA, 19 bp, Homo sapiens
  siRNA target sequence for C12orf22 (NM_030809.1,1062-1080).
caggacgcattgaatttaa

SEQ ID NO: 395269 - DNA, 19 bp, Homo sapiens
  siRNA target sequence for C12orf22 (NM_030809.1,1089-1107).
gggtccggactcattacct

SEQ ID NO: 395270 - DNA, 19 bp, Homo sapiens
  siRNA target sequence for C12orf22 (NM_030809.1,1421-1439).
cttacagcccccattctca

SEQ ID NO: 395271 - DNA, 19 bp, Homo sapiens
  siRNA target sequence for C12orf22 (NM_030809.1,1545-1563).
ccctggtctattatcaagt

SEQ ID NO: 395272 - DNA, 19 bp, Homo sapiens
  siRNA target sequence for C12orf22 (NM_030809.1,1701-1719).
ctgccctctgtaaatcaga

SEQ ID NO: 395273 - DNA, 19 bp, Homo sapiens
  siRNA target sequence for C12orf22 (NM_030809.1,1734-1752).
ccaccctagaagctctatt

SEQ ID NO: 395274 - DNA, 19 bp, Homo sapiens
  siRNA target sequence for C12orf22 (NM_030809.1,1748-1766).
ctattgcccgaagattgta

SEQ ID NO: 395275 - DNA, 19 bp, Homo sapiens
  siRNA target sequence for C12orf22 (NM_030809.1,1824-1842).
ccttccgcacggacaatga

SEQ ID NO: 395276 - DNA, 19 bp, Homo sapiens
  siRNA target sequence for C12orf22 (NM_030809.1,1825-1843).
cttccgcacggacaatgaa

SEQ ID NO: 395277 - DNA, 19 bp, Homo sapiens
  siRNA target sequence for C9orf45 (NM_030814.3,488-506).
ctgcgcacccccatttctt

SEQ ID NO: 395278 - DNA, 19 bp, Homo sapiens
  siRNA target sequence for C9orf45 (NM_030814.3,491-509).
cgcacccccatttcttaga

SEQ ID NO: 395279 - DNA, 19 bp, Homo sapiens
  siRNA target sequence for C9orf45 (NM_030814.3,588-606).
gagatgctttgctactact

SEQ ID NO: 395280 - DNA, 19 bp, Homo sapiens
  siRNA target sequence for C9orf45 (NM_030814.3,590-608).
gatgctttgctactactta

SEQ ID NO: 395281 - DNA, 19 bp, Homo sapiens
  siRNA target sequence for C9orf45 (NM_030814.3,622-640).
ggaggagggctcattttta

SEQ ID NO: 395282 - DNA, 19 bp, Homo sapiens
  siRNA target sequence for C9orf45 (NM_030814.3,629-647).
ggctcatttttagaaatgt

SEQ ID NO: 395283 - DNA, 19 bp, Homo sapiens
  siRNA target sequence for C9orf45 (NM_030814.3,646-664).
gttactggggagccaaatt

SEQ ID NO: 395284 - DNA, 19 bp, Homo sapiens
  siRNA target sequence for C9orf45 (NM_030814.3,771-789).
gcataccagggcttatgga

SEQ ID NO: 395285 - DNA, 19 bp, Homo sapiens
  siRNA target sequence for C9orf45 (NM_030814.3,779-797).
gggcttatggaggcaaaat

SEQ ID NO: 395286 - DNA, 19 bp, Homo sapiens
  siRNA target sequence for C9orf45 (NM_030814.3,812-830).
gtgggaactccctactgtt

SEQ ID NO: 395287 - DNA, 19 bp, Homo sapiens
  siRNA target sequence for C9orf45 (NM_030814.3,839-857).
cttgggcagacaccatata

SEQ ID NO: 395288 - DNA, 19 bp, Homo sapiens
  siRNA target sequence for C20orf126 (NM_030815.2,215-233).
cctggacactaaaaggaat

SEQ ID NO: 395289 - DNA, 19 bp, Homo sapiens
  siRNA target sequence for C20orf126 (NM_030815.2,294-312).
gtttgcttcgggaacatgt

SEQ ID NO: 395290 - DNA, 19 bp, Homo sapiens
  siRNA target sequence for C20orf126 (NM_030815.2,298-316).
gcttcgggaacatgtttat

SEQ ID NO: 395291 - DNA, 19 bp, Homo sapiens
  siRNA target sequence for C20orf126 (NM_030815.2,393-411).
cggaagcaacttaaagtga

SEQ ID NO: 395292 - DNA, 19 bp, Homo sapiens
  siRNA target sequence for C20orf126 (NM_030815.2,394-412).
ggaagcaacttaaagtgaa

SEQ ID NO: 395293 - DNA, 19 bp, Homo sapiens
  siRNA target sequence for C20orf126 (NM_030815.2,410-428).
gaaggtcaaccgccttttt

SEQ ID NO: 395294 - DNA, 19 bp, Homo sapiens
  siRNA target sequence for C20orf126 (NM_030815.2,444-462).
ccggagctgaagggtttta

SEQ ID NO: 395295 - DNA, 19 bp, Homo sapiens
  siRNA target sequence for C20orf126 (NM_030815.2,445-463).
cggagctgaagggttttaa

SEQ ID NO: 395296 - DNA, 19 bp, Homo sapiens
  siRNA target sequence for C20orf126 (NM_030815.2,447-465).
gagctgaagggttttaact

SEQ ID NO: 395297 - DNA, 19 bp, Homo sapiens
  siRNA target sequence for C20orf126 (NM_030815.2,479-497).
ccaggatgagcttaaagct

SEQ ID NO: 395298 - DNA, 19 bp, Homo sapiens
  siRNA target sequence for DKFZP566D1346 (NM_030816.1,424-442).
gccctcggcggtaccttta

SEQ ID NO: 395299 - DNA, 19 bp, Homo sapiens
  siRNA target sequence for DKFZP566D1346 (NM_030816.1,427-445).
ctcggcggtacctttacca

SEQ ID NO: 395300 - DNA, 19 bp, Homo sapiens
  siRNA target sequence for DKFZP566D1346 (NM_030816.1,466-484).
ggcaaagcttgtcataaga

SEQ ID NO: 395301 - DNA, 19 bp, Homo sapiens
  siRNA target sequence for DKFZP566D1346 (NM_030816.1,467-485).
gcaaagcttgtcataagat

SEQ ID NO: 395302 - DNA, 19 bp, Homo sapiens
  siRNA target sequence for DKFZP566D1346 (NM_030816.1,472-490).
gcttgtcataagatcttca

SEQ ID NO: 395303 - DNA, 19 bp, Homo sapiens
  siRNA target sequence for DKFZP566D1346 (NM_030816.1,476-494).
gtcataagatcttcagtaa

SEQ ID NO: 395304 - DNA, 19 bp, Homo sapiens
  siRNA target sequence for DKFZP566D1346 (NM_030816.1,559-577).
ctgccgctgcacaattcct

SEQ ID NO: 395305 - DNA, 19 bp, Homo sapiens
  siRNA target sequence for DKFZP566D1346 (NM_030816.1,718-736).
ctcatccgcacgcacaata

SEQ ID NO: 395306 - DNA, 19 bp, Homo sapiens
  siRNA target sequence for DKFZP566D1346 (NM_030816.1,732-750).
caatatcgggcagaaagat

SEQ ID NO: 395307 - DNA, 19 bp, Homo sapiens
  siRNA target sequence for DKFZP566D1346 (NM_030816.1,778-796).
gctgtgatgttaggaaata

SEQ ID NO: 395308 - DNA, 19 bp, Homo sapiens
  siRNA target sequence for DKFZP566D1346 (NM_030816.1,779-797).
ctgtgatgttaggaaataa

SEQ ID NO: 395309 - DNA, 19 bp, Homo sapiens
  siRNA target sequence for DKFZP566D1346 (NM_030816.1,828-846).
gcaatccagggaaagtgtt

SEQ ID NO: 395310 - DNA, 19 bp, Homo sapiens
  siRNA target sequence for DKFZP566D1346 (NM_030816.1,850-868).
gaaaaacgacctcgattat

SEQ ID NO: 395311 - DNA, 19 bp, Homo sapiens
  siRNA target sequence for DKFZP566D1346 (NM_030816.1,879-897).
gaaagagctaggtgacttt

SEQ ID NO: 395312 - DNA, 19 bp, Homo sapiens
  siRNA target sequence for DKFZP566D1346 (NM_030816.1,885-903).
gctaggtgacttttatcta

SEQ ID NO: 395313 - DNA, 19 bp, Homo sapiens
  siRNA target sequence for DKFZP566D1346 (NM_030816.1,890-908).
gtgacttttatctagaact

SEQ ID NO: 395314 - DNA, 19 bp, Homo sapiens
  siRNA target sequence for DKFZP566D1346 (NM_030816.1,954-972).
gccttccgatgcatgtaaa

SEQ ID NO: 395315 - DNA, 19 bp, Homo sapiens
  siRNA target sequence for DKFZP566D1346 (NM_030816.1,955-973).
ccttccgatgcatgtaaaa

SEQ ID NO: 395316 - DNA, 19 bp, Homo sapiens
  siRNA target sequence for DKFZP566D1346 (NM_030816.1,959-977).
ccgatgcatgtaaaatata

SEQ ID NO: 395317 - DNA, 19 bp, Homo sapiens
  siRNA target sequence for DKFZP566D1346 (NM_030816.1,999-1017).
gcttgacacaactctcata

SEQ ID NO: 395318 - DNA, 19 bp, Homo sapiens
  siRNA target sequence for DKFZP566D1346 (NM_030816.1,1046-1064).
gggatctaagcttcatttt

SEQ ID NO: 395319 - DNA, 19 bp, Homo sapiens
  siRNA target sequence for DKFZP566D1346 (NM_030816.1,1091-1109).
cttttgtagtattagacaa

SEQ ID NO: 395320 - DNA, 19 bp, Homo sapiens
  siRNA target sequence for DKFZP566D1346 (NM_030816.1,1168-1186).
gaggtggatattttaatga

SEQ ID NO: 395321 - DNA, 19 bp, Homo sapiens
  siRNA target sequence for DKFZP566D1346 (NM_030816.1,1185-1203).
gagcagtgatatttactct

SEQ ID NO: 395322 - DNA, 19 bp, Homo sapiens
  siRNA target sequence for DKFZP566D1346 (NM_030816.1,1253-1271).
ggctttttcgggaagataa

SEQ ID NO: 395323 - DNA, 19 bp, Homo sapiens
  siRNA target sequence for DKFZP566D1346 (NM_030816.1,1308-1326).
cctggtgaatggacttgtt

SEQ ID NO: 395324 - DNA, 19 bp, Homo sapiens
  siRNA target sequence for DKFZP566D1346 (NM_030816.1,1389-1407).
catggagagtttgagtaaa

SEQ ID NO: 395325 - DNA, 19 bp, Homo sapiens
  siRNA target sequence for DKFZP566D1346 (NM_030816.1,1416-1434).
cataatggaacagaatttt

SEQ ID NO: 395326 - DNA, 19 bp, Homo sapiens
  siRNA target sequence for DKFZP566D1346 (NM_030816.1,1468-1486).
cctcagaacactattacat

SEQ ID NO: 395327 - DNA, 19 bp, Homo sapiens
  siRNA target sequence for DKFZP566D1346 (NM_030816.1,1478-1496).
ctattacatgggaagaata

SEQ ID NO: 395328 - DNA, 19 bp, Homo sapiens
  siRNA target sequence for DKFZP566D1346 (NM_030816.1,1522-1540).
cctcatctgggtagagaat

SEQ ID NO: 395329 - DNA, 19 bp, Homo sapiens
  siRNA target sequence for DKFZP566D1346 (NM_030816.1,1523-1541).
ctcatctgggtagagaatt

SEQ ID NO: 395330 - DNA, 19 bp, Homo sapiens
  siRNA target sequence for DKFZP566D1346 (NM_030816.1,1600-1618).
cccttagggatagagttat

SEQ ID NO: 395331 - DNA, 19 bp, Homo sapiens
  siRNA target sequence for DKFZP566D1346 (NM_030816.1,1601-1619).
ccttagggatagagttatt

SEQ ID NO: 395332 - DNA, 19 bp, Homo sapiens
  siRNA target sequence for DKFZP566D1346 (NM_030816.1,1602-1620).
cttagggatagagttatta

SEQ ID NO: 395333 - DNA, 19 bp, Homo sapiens
  siRNA target sequence for DKFZP566D1346 (NM_030816.1,1607-1625).
ggatagagttattattgaa

SEQ ID NO: 395334 - DNA, 19 bp, Homo sapiens
  siRNA target sequence for DKFZP566D1346 (NM_030816.1,1612-1630).
gagttattattgaatgttt

SEQ ID NO: 395335 - DNA, 19 bp, Homo sapiens
  siRNA target sequence for DKFZP566D1346 (NM_030816.1,1645-1663).
cccttcaagcactttaaca

SEQ ID NO: 395336 - DNA, 19 bp, Homo sapiens
  siRNA target sequence for DKFZP566D1346 (NM_030816.1,1656-1674).
ctttaacaagcttagagaa

SEQ ID NO: 395337 - DNA, 19 bp, Homo sapiens
  siRNA target sequence for DKFZP566D1346 (NM_030816.1,1662-1680).
caagcttagagaatttgtt

SEQ ID NO: 395338 - DNA, 19 bp, Homo sapiens
  siRNA target sequence for DKFZP566D1346 (NM_030816.1,1670-1688).
gagaatttgttcagatgaa

SEQ ID NO: 395339 - DNA, 19 bp, Homo sapiens
  siRNA target sequence for DKFZP566D1346 (NM_030816.1,1694-1712).
ctccaggctttcctgtaaa

SEQ ID NO: 395340 - DNA, 19 bp, Homo sapiens
  siRNA target sequence for DKFZP566D1346 (NM_030816.1,1723-1741).
cctgtgtttcccacaatca

SEQ ID NO: 395341 - DNA, 19 bp, Homo sapiens
  siRNA target sequence for DKFZP566D1346 (NM_030816.1,1740-1758).
cacagccactgtgactttt

SEQ ID NO: 395342 - DNA, 19 bp, Homo sapiens
  siRNA target sequence for DKFZP566D1346 (NM_030816.1,1762-1780).
gagtttcgatacgatgaat

SEQ ID NO: 395343 - DNA, 19 bp, Homo sapiens
  siRNA target sequence for DKFZP566D1346 (NM_030816.1,1799-1817).
ctatacctgatgactacaa

SEQ ID NO: 395344 - DNA, 19 bp, Homo sapiens
  siRNA target sequence for DKFZP434F0318 (NM_030817.1,325-343).
ccgatctctcgctgatctt

SEQ ID NO: 395345 - DNA, 19 bp, Homo sapiens
  siRNA target sequence for DKFZP434F0318 (NM_030817.1,327-345).
gatctctcgctgatcttct

SEQ ID NO: 395346 - DNA, 19 bp, Homo sapiens
  siRNA target sequence for DKFZP434F0318 (NM_030817.1,414-432).
ctgagctgcctcgagtttt

SEQ ID NO: 395347 - DNA, 19 bp, Homo sapiens
  siRNA target sequence for DKFZP434F0318 (NM_030817.1,487-505).
cctccatcgccctgtacaa

SEQ ID NO: 395348 - DNA, 19 bp, Homo sapiens
  siRNA target sequence for DKFZP434F0318 (NM_030817.1,488-506).
ctccatcgccctgtacaat

SEQ ID NO: 395349 - DNA, 19 bp, Homo sapiens
  siRNA target sequence for DKFZP434F0318 (NM_030817.1,491-509).
catcgccctgtacaattct

SEQ ID NO: 395350 - DNA, 19 bp, Homo sapiens
  siRNA target sequence for DKFZP434F0318 (NM_030817.1,590-608).
cgtgctgaaggccaagatt

SEQ ID NO: 395351 - DNA, 19 bp, Homo sapiens
  siRNA target sequence for DKFZP434F0318 (NM_030817.1,706-724).
gtggccacgacctcaagat

SEQ ID NO: 395352 - DNA, 19 bp, Homo sapiens
  siRNA target sequence for LRRC3 (NM_030891.1,412-430).
caaactcagcgccaagata

SEQ ID NO: 395353 - DNA, 19 bp, Homo sapiens
  siRNA target sequence for LRRC3 (NM_030891.1,667-685).
cgcctacgtcgtgtactat

SEQ ID NO: 395354 - DNA, 19 bp, Homo sapiens
  siRNA target sequence for LRRC3 (NM_030891.1,669-687).
cctacgtcgtgtactatgt

SEQ ID NO: 395355 - DNA, 19 bp, Homo sapiens
  siRNA target sequence for CD1E (NM_030893.1,184-202).
ggcaccatccgctttctga

SEQ ID NO: 395356 - DNA, 19 bp, Homo sapiens
  siRNA target sequence for CD1E (NM_030893.1,185-203).
gcaccatccgctttctgaa

SEQ ID NO: 395357 - DNA, 19 bp, Homo sapiens
  siRNA target sequence for CD1E (NM_030893.1,307-325).
ggtcaatttcagcttgaat

SEQ ID NO: 395358 - DNA, 19 bp, Homo sapiens
  siRNA target sequence for CD1E (NM_030893.1,328-346).
cccttcgagatccagatat

SEQ ID NO: 395359 - DNA, 19 bp, Homo sapiens
  siRNA target sequence for CD1E (NM_030893.1,329-347).
ccttcgagatccagatatt

SEQ ID NO: 395360 - DNA, 19 bp, Homo sapiens
  siRNA target sequence for CD1E (NM_030893.1,330-348).
cttcgagatccagatatta

SEQ ID NO: 395361 - DNA, 19 bp, Homo sapiens
  siRNA target sequence for CD1E (NM_030893.1,333-351).
cgagatccagatattagct

SEQ ID NO: 395362 - DNA, 19 bp, Homo sapiens
  siRNA target sequence for CD1E (NM_030893.1,359-377).
gaatgaatgccccacaaat

SEQ ID NO: 395363 - DNA, 19 bp, Homo sapiens
  siRNA target sequence for CD1E (NM_030893.1,484-502).
ctcaatcgctacctagata

SEQ ID NO: 395364 - DNA, 19 bp, Homo sapiens
  siRNA target sequence for CD1E (NM_030893.1,486-504).
caatcgctacctagatatt

SEQ ID NO: 395365 - DNA, 19 bp, Homo sapiens
  siRNA target sequence for CD1E (NM_030893.1,492-510).
ctacctagatattaaggaa

SEQ ID NO: 395366 - DNA, 19 bp, Homo sapiens
  siRNA target sequence for CD1E (NM_030893.1,495-513).
cctagatattaaggaaata

SEQ ID NO: 395367 - DNA, 19 bp, Homo sapiens
  siRNA target sequence for CD1E (NM_030893.1,580-598).
gaactgaaacggaaagtga

SEQ ID NO: 395368 - DNA, 19 bp, Homo sapiens
  siRNA target sequence for CD1E (NM_030893.1,853-871).
catgatctaatcatccatt

SEQ ID NO: 395369 - DNA, 19 bp, Homo sapiens
  siRNA target sequence for CD1E (NM_030893.1,864-882).
catccattggggtggatat

SEQ ID NO: 395370 - DNA, 19 bp, Homo sapiens
  siRNA target sequence for CD1E (NM_030893.1,875-893).
gtggatattccatctttct

SEQ ID NO: 395371 - DNA, 19 bp, Homo sapiens
  siRNA target sequence for CD1E (NM_030893.1,877-895).
ggatattccatctttctca

SEQ ID NO: 395372 - DNA, 19 bp, Homo sapiens
  siRNA target sequence for CD1E (NM_030893.1,892-910).
ctcatcctgatctgtttga

SEQ ID NO: 395373 - DNA, 19 bp, Homo sapiens
  siRNA target sequence for CD1E (NM_030893.1,894-912).
catcctgatctgtttgact

SEQ ID NO: 395374 - DNA, 19 bp, Homo sapiens
  siRNA target sequence for CD1E (NM_030893.1,943-961).
gttgactcacggttaaaaa

SEQ ID NO: 395375 - DNA, 19 bp, Homo sapiens
  siRNA target sequence for FLJ14129 (NM_030895.1,640-658).
ccggtcacttctgagaaaa

SEQ ID NO: 395376 - DNA, 19 bp, Homo sapiens
  siRNA target sequence for C9orf74 (NM_030914.1,61-79).
gtgcggagctcctgtttga

SEQ ID NO: 395377 - DNA, 19 bp, Homo sapiens
  siRNA target sequence for C9orf74 (NM_030914.1,72-90).
ctgtttgacggtattaaga

SEQ ID NO: 395378 - DNA, 19 bp, Homo sapiens
  siRNA target sequence for C9orf74 (NM_030914.1,74-92).
gtttgacggtattaagaaa

SEQ ID NO: 395379 - DNA, 19 bp, Homo sapiens
  siRNA target sequence for C9orf74 (NM_030914.1,174-192).
gagcggccagagttgttca

SEQ ID NO: 395380 - DNA, 19 bp, Homo sapiens
  siRNA target sequence for LBH (NM_030915.1,249-267).
ctgagatcggccaagatga

SEQ ID NO: 395381 - DNA, 19 bp, Homo sapiens
  siRNA target sequence for LBH (NM_030915.1,319-337).
gcaaggatggcctttccta

SEQ ID NO: 395382 - DNA, 19 bp, Homo sapiens
  siRNA target sequence for LBH (NM_030915.1,347-365).
cccagacccgtcagatttt

SEQ ID NO: 395383 - DNA, 19 bp, Homo sapiens
  siRNA target sequence for LNIR (NM_030916.1,363-381).
cctcagacgtggtaactgt

SEQ ID NO: 395384 - DNA, 19 bp, Homo sapiens
  siRNA target sequence for LNIR (NM_030916.1,495-513).
cgctactgcactccaaata

SEQ ID NO: 395385 - DNA, 19 bp, Homo sapiens
  siRNA target sequence for LNIR (NM_030916.1,507-525).
ccaaatacgggcttcatgt

SEQ ID NO: 395386 - DNA, 19 bp, Homo sapiens
  siRNA target sequence for LNIR (NM_030916.1,1002-1020).
ctgtgaggggccttgaaga

SEQ ID NO: 395387 - DNA, 19 bp, Homo sapiens
  siRNA target sequence for LNIR (NM_030916.1,1008-1026).
ggggccttgaagaccaaaa

SEQ ID NO: 395388 - DNA, 19 bp, Homo sapiens
  siRNA target sequence for LNIR (NM_030916.1,1009-1027).
gggccttgaagaccaaaat

SEQ ID NO: 395389 - DNA, 19 bp, Homo sapiens
  siRNA target sequence for LNIR (NM_030916.1,1011-1029).
gccttgaagaccaaaatct

SEQ ID NO: 395390 - DNA, 19 bp, Homo sapiens
  siRNA target sequence for LNIR (NM_030916.1,1013-1031).
cttgaagaccaaaatctgt

SEQ ID NO: 395391 - DNA, 19 bp, Homo sapiens
  siRNA target sequence for LNIR (NM_030916.1,1137-1155).
gagtggatggggacacttt

SEQ ID NO: 395392 - DNA, 19 bp, Homo sapiens
  siRNA target sequence for LNIR (NM_030916.1,1363-1381).
gctcatgtcccgataccat

SEQ ID NO: 395393 - DNA, 19 bp, Homo sapiens
  siRNA target sequence for LNIR (NM_030916.1,1516-1534).
cgagggccaccctgatagt

SEQ ID NO: 395394 - DNA, 19 bp, Homo sapiens
  siRNA target sequence for FIP1L1 (NM_030917.2,349-367).
ctgaaaatggtgtaccaaa

SEQ ID NO: 395395 - DNA, 19 bp, Homo sapiens
  siRNA target sequence for FIP1L1 (NM_030917.2,377-395).
gactgagaccgaagatgat

SEQ ID NO: 395396 - DNA, 19 bp, Homo sapiens
  siRNA target sequence for FIP1L1 (NM_030917.2,435-453).
gtcactataggagacatta

SEQ ID NO: 395397 - DNA, 19 bp, Homo sapiens
  siRNA target sequence for FIP1L1 (NM_030917.2,468-486).
cagtatgggagttatggta

SEQ ID NO: 395398 - DNA, 19 bp, Homo sapiens
  siRNA target sequence for FIP1L1 (NM_030917.2,487-505).
cagcacctgtaaatcttaa

SEQ ID NO: 395399 - DNA, 19 bp, Homo sapiens
  siRNA target sequence for FIP1L1 (NM_030917.2,489-507).
gcacctgtaaatcttaaca

SEQ ID NO: 395400 - DNA, 19 bp, Homo sapiens
  siRNA target sequence for FIP1L1 (NM_030917.2,490-508).
cacctgtaaatcttaacat

SEQ ID NO: 395401 - DNA, 19 bp, Homo sapiens
  siRNA target sequence for FIP1L1 (NM_030917.2,512-530).
gacagggggaagagtttat

SEQ ID NO: 395402 - DNA, 19 bp, Homo sapiens
  siRNA target sequence for FIP1L1 (NM_030917.2,594-612).
ccactcttagaggtagatt

SEQ ID NO: 395403 - DNA, 19 bp, Homo sapiens
  siRNA target sequence for FIP1L1 (NM_030917.2,595-613).
cactcttagaggtagattt

SEQ ID NO: 395404 - DNA, 19 bp, Homo sapiens
  siRNA target sequence for FIP1L1 (NM_030917.2,599-617).
cttagaggtagatttggat

SEQ ID NO: 395405 - DNA, 19 bp, Homo sapiens
  siRNA target sequence for FIP1L1 (NM_030917.2,725-743).
gatacgaatgggacttgaa

SEQ ID NO: 395406 - DNA, 19 bp, Homo sapiens
  siRNA target sequence for FIP1L1 (NM_030917.2,730-748).
gaatgggacttgaagttat

SEQ ID NO: 395407 - DNA, 19 bp, Homo sapiens
  siRNA target sequence for FIP1L1 (NM_030917.2,734-752).
gggacttgaagttatacca

SEQ ID NO: 395408 - DNA, 19 bp, Homo sapiens
  siRNA target sequence for FIP1L1 (NM_030917.2,750-768).
ccagtaacctctactacaa

SEQ ID NO: 395409 - DNA, 19 bp, Homo sapiens
  siRNA target sequence for FIP1L1 (NM_030917.2,778-796).
cggccgaagactgtactat

SEQ ID NO: 395410 - DNA, 19 bp, Homo sapiens
  siRNA target sequence for FIP1L1 (NM_030917.2,782-800).
cgaagactgtactatggaa

SEQ ID NO: 395411 - DNA, 19 bp, Homo sapiens
  siRNA target sequence for FIP1L1 (NM_030917.2,788-806).
ctgtactatggaagttaca

SEQ ID NO: 395412 - DNA, 19 bp, Homo sapiens
  siRNA target sequence for FIP1L1 (NM_030917.2,821-839).
ccaagatggcagattcaat

SEQ ID NO: 395413 - DNA, 19 bp, Homo sapiens
  siRNA target sequence for FIP1L1 (NM_030917.2,848-866).
ggtacagcagggaagaact

SEQ ID NO: 395414 - DNA, 19 bp, Homo sapiens
  siRNA target sequence for FIP1L1 (NM_030917.2,886-904).
ctgcccttccatctacaaa

SEQ ID NO: 395415 - DNA, 19 bp, Homo sapiens
  siRNA target sequence for FIP1L1 (NM_030917.2,921-939).
cctccttctttgttcaaga

SEQ ID NO: 395416 - DNA, 19 bp, Homo sapiens
  siRNA target sequence for FIP1L1 (NM_030917.2,945-963).
cttccaccgagcagaaaca

SEQ ID NO: 395417 - DNA, 19 bp, Homo sapiens
  siRNA target sequence for FIP1L1 (NM_030917.2,995-1013).
ctccagaaaagccaattca

SEQ ID NO: 395418 - DNA, 19 bp, Homo sapiens
  siRNA target sequence for FIP1L1 (NM_030917.2,1021-1039).
ggaagtggcaggatcgata

SEQ ID NO: 395419 - DNA, 19 bp, Homo sapiens
  siRNA target sequence for FIP1L1 (NM_030917.2,1022-1040).
gaagtggcaggatcgatat

SEQ ID NO: 395420 - DNA, 19 bp, Homo sapiens
  siRNA target sequence for FIP1L1 (NM_030917.2,1046-1064).
ggccgaatcacctgatcta

SEQ ID NO: 395421 - DNA, 19 bp, Homo sapiens
  siRNA target sequence for FIP1L1 (NM_030917.2,1047-1065).
gccgaatcacctgatctaa

SEQ ID NO: 395422 - DNA, 19 bp, Homo sapiens
  siRNA target sequence for FIP1L1 (NM_030917.2,1069-1087).
gattacctggggcaattga

SEQ ID NO: 395423 - DNA, 19 bp, Homo sapiens
  siRNA target sequence for FIP1L1 (NM_030917.2,1075-1093).
ctggggcaattgatgttat

SEQ ID NO: 395424 - DNA, 19 bp, Homo sapiens
  siRNA target sequence for FIP1L1 (NM_030917.2,1089-1107).
gttatcggtcagactataa

SEQ ID NO: 395425 - DNA, 19 bp, Homo sapiens
  siRNA target sequence for FIP1L1 (NM_030917.2,1095-1113).
ggtcagactataactatca

SEQ ID NO: 395426 - DNA, 19 bp, Homo sapiens
  siRNA target sequence for FIP1L1 (NM_030917.2,1126-1144).
gcaggcgacgggcaaatga

SEQ ID NO: 395427 - DNA, 19 bp, Homo sapiens
  siRNA target sequence for FIP1L1 (NM_030917.2,1129-1147).
ggcgacgggcaaatgagaa

SEQ ID NO: 395428 - DNA, 19 bp, Homo sapiens
  siRNA target sequence for FIP1L1 (NM_030917.2,1158-1176).
caggtcctttctgaaagat

SEQ ID NO: 395429 - DNA, 19 bp, Homo sapiens
  siRNA target sequence for FIP1L1 (NM_030917.2,1180-1198).
ctactgaagtagacaacaa

SEQ ID NO: 395430 - DNA, 19 bp, Homo sapiens
  siRNA target sequence for FIP1L1 (NM_030917.2,1188-1206).
gtagacaacaattttagca

SEQ ID NO: 395431 - DNA, 19 bp, Homo sapiens
  siRNA target sequence for FIP1L1 (NM_030917.2,1204-1222).
gcaaaccacctccgttttt

SEQ ID NO: 395432 - DNA, 19 bp, Homo sapiens
  siRNA target sequence for FIP1L1 (NM_030917.2,1344-1362).
cctccatctcttataccaa

SEQ ID NO: 395433 - DNA, 19 bp, Homo sapiens
  siRNA target sequence for FIP1L1 (NM_030917.2,1353-1371).
cttataccaacaatagaaa

SEQ ID NO: 395434 - DNA, 19 bp, Homo sapiens
  siRNA target sequence for FIP1L1 (NM_030917.2,1377-1395).
cattcctctggttatgata

SEQ ID NO: 395435 - DNA, 19 bp, Homo sapiens
  siRNA target sequence for FIP1L1 (NM_030917.2,1620-1638).
cctacaccaagtgttttca

SEQ ID NO: 395436 - DNA, 19 bp, Homo sapiens
  siRNA target sequence for FIP1L1 (NM_030917.2,1769-1787).
gtcttctcgaagtaatagt

SEQ ID NO: 395437 - DNA, 19 bp, Homo sapiens
  siRNA target sequence for FIP1L1 (NM_030917.2,1789-1807).
gacgtcgccatgaaagtga

SEQ ID NO: 395438 - DNA, 19 bp, Homo sapiens
  siRNA target sequence for C20orf129 (NM_030919.1,54-72).
cctgtttgattcaaaggtt

SEQ ID NO: 395439 - DNA, 19 bp, Homo sapiens
  siRNA target sequence for C20orf129 (NM_030919.1,85-103).
ggactgcacgccggttttt

SEQ ID NO: 395440 - DNA, 19 bp, Homo sapiens
  siRNA target sequence for C20orf129 (NM_030919.1,665-683).
gacctgcaagaaatatgca

SEQ ID NO: 395441 - DNA, 19 bp, Homo sapiens
  siRNA target sequence for C20orf129 (NM_030919.1,748-766).
gtgcatggatctgaaagtt

SEQ ID NO: 395442 - DNA, 19 bp, Homo sapiens
  siRNA target sequence for C20orf129 (NM_030919.1,750-768).
gcatggatctgaaagttca

SEQ ID NO: 395443 - DNA, 19 bp, Homo sapiens
  siRNA target sequence for C20orf129 (NM_030919.1,751-769).
catggatctgaaagttcat

SEQ ID NO: 395444 - DNA, 19 bp, Homo sapiens
  siRNA target sequence for C20orf129 (NM_030919.1,790-808).
gacagttcggactatcaca

SEQ ID NO: 395445 - DNA, 19 bp, Homo sapiens
  siRNA target sequence for C20orf129 (NM_030919.1,797-815).
cggactatcacaggaaata

SEQ ID NO: 395446 - DNA, 19 bp, Homo sapiens
  siRNA target sequence for C20orf129 (NM_030919.1,805-823).
cacaggaaatatctactat

SEQ ID NO: 395447 - DNA, 19 bp, Homo sapiens
  siRNA target sequence for C20orf129 (NM_030919.1,824-842).
gcaaggtcaggaactaaga

SEQ ID NO: 395448 - DNA, 19 bp, Homo sapiens
  siRNA target sequence for C20orf129 (NM_030919.1,825-843).
caaggtcaggaactaagat

SEQ ID NO: 395449 - DNA, 19 bp, Homo sapiens
  siRNA target sequence for C20orf129 (NM_030919.1,829-847).
gtcaggaactaagattatt

SEQ ID NO: 395450 - DNA, 19 bp, Homo sapiens
  siRNA target sequence for C20orf129 (NM_030919.1,848-866).
gggaaggttcacgaaaagt

SEQ ID NO: 395451 - DNA, 19 bp, Homo sapiens
  siRNA target sequence for C20orf129 (NM_030919.1,849-867).
ggaaggttcacgaaaagtt

SEQ ID NO: 395452 - DNA, 19 bp, Homo sapiens
  siRNA target sequence for C20orf129 (NM_030919.1,859-877).
cgaaaagttcacgttgatt

SEQ ID NO: 395453 - DNA, 19 bp, Homo sapiens
  siRNA target sequence for C20orf129 (NM_030919.1,893-911).
gcaacaggctcctacagtt

SEQ ID NO: 395454 - DNA, 19 bp, Homo sapiens
  siRNA target sequence for NIPA2 (NM_030922.2,289-307).
gagccaggggcgtggaaaa

SEQ ID NO: 395455 - DNA, 19 bp, Homo sapiens
  siRNA target sequence for NIPA2 (NM_030922.2,296-314).
gggcgtggaaaatatgact

SEQ ID NO: 395456 - DNA, 19 bp, Homo sapiens
  siRNA target sequence for NIPA2 (NM_030922.2,335-353).
gctatgagctccagcattt

SEQ ID NO: 395457 - DNA, 19 bp, Homo sapiens
  siRNA target sequence for NIPA2 (NM_030922.2,340-358).
gagctccagcattttcatt

SEQ ID NO: 395458 - DNA, 19 bp, Homo sapiens
  siRNA target sequence for NIPA2 (NM_030922.2,431-449).
ggtggccatgcatatctta

SEQ ID NO: 395459 - DNA, 19 bp, Homo sapiens
  siRNA target sequence for NIPA2 (NM_030922.2,432-450).
gtggccatgcatatcttaa

SEQ ID NO: 395460 - DNA, 19 bp, Homo sapiens
  siRNA target sequence for NIPA2 (NM_030922.2,435-453).
gccatgcatatcttaagga

SEQ ID NO: 395461 - DNA, 19 bp, Homo sapiens
  siRNA target sequence for NIPA2 (NM_030922.2,436-454).
ccatgcatatcttaaggaa

SEQ ID NO: 395462 - DNA, 19 bp, Homo sapiens
  siRNA target sequence for NIPA2 (NM_030922.2,441-459).
catatcttaaggaatggtt

SEQ ID NO: 395463 - DNA, 19 bp, Homo sapiens
  siRNA target sequence for NIPA2 (NM_030922.2,465-483).
gggctggactgctgtcaat

SEQ ID NO: 395464 - DNA, 19 bp, Homo sapiens
  siRNA target sequence for NIPA2 (NM_030922.2,554-572).
gctctcagcgtgctagtaa

SEQ ID NO: 395465 - DNA, 19 bp, Homo sapiens
  siRNA target sequence for NIPA2 (NM_030922.2,565-583).
gctagtaagtgccattctt

SEQ ID NO: 395466 - DNA, 19 bp, Homo sapiens
  siRNA target sequence for NIPA2 (NM_030922.2,566-584).
ctagtaagtgccattcttt

SEQ ID NO: 395467 - DNA, 19 bp, Homo sapiens
  siRNA target sequence for NIPA2 (NM_030922.2,630-648).
ggtgtttgctaagtattct

SEQ ID NO: 395468 - DNA, 19 bp, Homo sapiens
  siRNA target sequence for NIPA2 (NM_030922.2,763-781).
cattgtggccttgatatta

SEQ ID NO: 395469 - DNA, 19 bp, Homo sapiens
  siRNA target sequence for NIPA2 (NM_030922.2,800-818).
cgccatggacagacaaaca

SEQ ID NO: 395470 - DNA, 19 bp, Homo sapiens
  siRNA target sequence for NIPA2 (NM_030922.2,807-825).
gacagacaaacattcttgt

SEQ ID NO: 395471 - DNA, 19 bp, Homo sapiens
  siRNA target sequence for NIPA2 (NM_030922.2,928-946).
gcatcccctggcttggatt

SEQ ID NO: 395472 - DNA, 19 bp, Homo sapiens
  siRNA target sequence for NIPA2 (NM_030922.2,967-985).
ctgtgtgagcacacagatt

SEQ ID NO: 395473 - DNA, 19 bp, Homo sapiens
  siRNA target sequence for NIPA2 (NM_030922.2,969-987).
gtgtgagcacacagattaa

SEQ ID NO: 395474 - DNA, 19 bp, Homo sapiens
  siRNA target sequence for NIPA2 (NM_030922.2,971-989).
gtgagcacacagattaatt

SEQ ID NO: 395475 - DNA, 19 bp, Homo sapiens
  siRNA target sequence for NIPA2 (NM_030922.2,999-1017).
gggccctggatatattcaa

SEQ ID NO: 395476 - DNA, 19 bp, Homo sapiens
  siRNA target sequence for NIPA2 (NM_030922.2,1001-1019).
gccctggatatattcaaca

SEQ ID NO: 395477 - DNA, 19 bp, Homo sapiens
  siRNA target sequence for NIPA2 (NM_030922.2,1023-1041).
ccattgtgactccaatata

SEQ ID NO: 395478 - DNA, 19 bp, Homo sapiens
  siRNA target sequence for NIPA2 (NM_030922.2,1024-1042).
cattgtgactccaatatat

SEQ ID NO: 395479 - DNA, 19 bp, Homo sapiens
  siRNA target sequence for NIPA2 (NM_030922.2,1030-1048).
gactccaatatattatgta

SEQ ID NO: 395480 - DNA, 19 bp, Homo sapiens
  siRNA target sequence for NIPA2 (NM_030922.2,1051-1069).
ctttacaacatcagtttta

SEQ ID NO: 395481 - DNA, 19 bp, Homo sapiens
  siRNA target sequence for NIPA2 (NM_030922.2,1137-1155).
gtggcttctttacaatcat

SEQ ID NO: 395482 - DNA, 19 bp, Homo sapiens
  siRNA target sequence for NIPA2 (NM_030922.2,1149-1167).
caatcattgtggggatatt

SEQ ID NO: 395483 - DNA, 19 bp, Homo sapiens
  siRNA target sequence for NIPA2 (NM_030922.2,1211-1229).
ctgcctgtgtcttttcgaa

SEQ ID NO: 395484 - DNA, 19 bp, Homo sapiens
  siRNA target sequence for NIPA2 (NM_030922.2,1213-1231).
gcctgtgtcttttcgaaaa

SEQ ID NO: 395485 - DNA, 19 bp, Homo sapiens
  siRNA target sequence for NIPA2 (NM_030922.2,1227-1245).
gaaaagacgagaaagcaat

SEQ ID NO: 395486 - DNA, 19 bp, Homo sapiens
  siRNA target sequence for NIPA2 (NM_030922.2,1241-1259).
gcaatgaatggcaatctct

SEQ ID NO: 395487 - DNA, 19 bp, Homo sapiens
  siRNA target sequence for NIPA2 (NM_030922.2,1246-1264).
gaatggcaatctctctaat

SEQ ID NO: 395488 - DNA, 19 bp, Homo sapiens
  siRNA target sequence for NIPA2 (NM_030922.2,1250-1268).
ggcaatctctctaatatgt

SEQ ID NO: 395489 - DNA, 19 bp, Homo sapiens
  siRNA target sequence for NIPA2 (NM_030922.2,1258-1276).
ctctaatatgtatgaagtt

SEQ ID NO: 395490 - DNA, 19 bp, Homo sapiens
  siRNA target sequence for NIPA2 (NM_030922.2,1267-1285).
gtatgaagttcttaataat

SEQ ID NO: 395491 - DNA, 19 bp, Homo sapiens
  siRNA target sequence for NIPA2 (NM_030922.2,1302-1320).
cctgtggaatcgaacaaca

SEQ ID NO: 395492 - DNA, 19 bp, Homo sapiens
  siRNA target sequence for DKFZP566N034 (NM_030923.2,258-276).
ggaggaccgaggcttacta

SEQ ID NO: 395493 - DNA, 19 bp, Homo sapiens
  siRNA target sequence for DKFZP566N034 (NM_030923.2,261-279).
ggaccgaggcttactagaa

SEQ ID NO: 395494 - DNA, 19 bp, Homo sapiens
  siRNA target sequence for DKFZP566N034 (NM_030923.2,262-280).
gaccgaggcttactagaaa

SEQ ID NO: 395495 - DNA, 19 bp, Homo sapiens
  siRNA target sequence for DKFZP566N034 (NM_030923.2,299-317).
ctcacgaagcccagaacta

SEQ ID NO: 395496 - DNA, 19 bp, Homo sapiens
  siRNA target sequence for DKFZP566N034 (NM_030923.2,301-319).
cacgaagcccagaactaca

SEQ ID NO: 395497 - DNA, 19 bp, Homo sapiens
  siRNA target sequence for DKFZP566N034 (NM_030923.2,372-390).
cgcggtggctgcctttact

SEQ ID NO: 395498 - DNA, 19 bp, Homo sapiens
  siRNA target sequence for DKFZP566N034 (NM_030923.2,532-550).
gtcatcttgggggtgatat

SEQ ID NO: 395499 - DNA, 19 bp, Homo sapiens
  siRNA target sequence for DKFZP566N034 (NM_030923.2,552-570).
ccttctgtcatccatatgt

SEQ ID NO: 395500 - DNA, 19 bp, Homo sapiens
  siRNA target sequence for DKFZP566N034 (NM_030923.2,711-729).
cagtagagcactcataaca

SEQ ID NO: 395501 - DNA, 19 bp, Homo sapiens
  siRNA target sequence for DKFZP566N034 (NM_030923.2,827-845).
gcagcataggcgttctgat

SEQ ID NO: 395502 - DNA, 19 bp, Homo sapiens
  siRNA target sequence for DKFZP566N034 (NM_030923.2,841-859).
ctgatcggcctcaccatat

SEQ ID NO: 395503 - DNA, 19 bp, Homo sapiens
  siRNA target sequence for DKFZP566N034 (NM_030923.2,843-861).
gatcggcctcaccatattt

SEQ ID NO: 395504 - DNA, 19 bp, Homo sapiens
  siRNA target sequence for DKFZP566N034 (NM_030923.2,911-929).
cacgtcactacgagatgtt

SEQ ID NO: 395505 - DNA, 19 bp, Homo sapiens
  siRNA target sequence for DKFZP566N034 (NM_030923.2,914-932).
gtcactacgagatgtttga

SEQ ID NO: 395506 - DNA, 19 bp, Homo sapiens
  siRNA target sequence for FLJ12577 (NM_030925.1,143-161).
gtggtacaaacgagaaaga

SEQ ID NO: 395507 - DNA, 19 bp, Homo sapiens
  siRNA target sequence for FLJ12577 (NM_030925.1,180-198).
ggctcagctagcacaagaa

SEQ ID NO: 395508 - DNA, 19 bp, Homo sapiens
  siRNA target sequence for FLJ12577 (NM_030925.1,235-253).
gacctgcagctgatagact

SEQ ID NO: 395509 - DNA, 19 bp, Homo sapiens
  siRNA target sequence for FLJ12577 (NM_030925.1,237-255).
cctgcagctgatagacttt

SEQ ID NO: 395510 - DNA, 19 bp, Homo sapiens
  siRNA target sequence for FLJ12577 (NM_030925.1,275-293).
cccagatatttaacaacat

SEQ ID NO: 395511 - DNA, 19 bp, Homo sapiens
  siRNA target sequence for FLJ12577 (NM_030925.1,320-338).
gtcctactgtggagtatat

SEQ ID NO: 395512 - DNA, 19 bp, Homo sapiens
  siRNA target sequence for FLJ12577 (NM_030925.1,322-340).
cctactgtggagtatatta

SEQ ID NO: 395513 - DNA, 19 bp, Homo sapiens
  siRNA target sequence for FLJ12577 (NM_030925.1,341-359).
gtgctcatcctcatatcct

SEQ ID NO: 395514 - DNA, 19 bp, Homo sapiens
  siRNA target sequence for FLJ12577 (NM_030925.1,366-384).
gctcctcaaaggatatgaa

SEQ ID NO: 395515 - DNA, 19 bp, Homo sapiens
  siRNA target sequence for FLJ12577 (NM_030925.1,398-416).
ccttacgttgtgggattat

SEQ ID NO: 395516 - DNA, 19 bp, Homo sapiens
  siRNA target sequence for FLJ12577 (NM_030925.1,411-429).
gattatgctgagagaatgt

SEQ ID NO: 395517 - DNA, 19 bp, Homo sapiens
  siRNA target sequence for FLJ12577 (NM_030925.1,462-480).
cttttctaatcaattcaga

SEQ ID NO: 395518 - DNA, 19 bp, Homo sapiens
  siRNA target sequence for FLJ12577 (NM_030925.1,495-513).
cgtggagttgtcaacattt

SEQ ID NO: 395519 - DNA, 19 bp, Homo sapiens
  siRNA target sequence for FLJ12577 (NM_030925.1,498-516).
ggagttgtcaacatttgat

SEQ ID NO: 395520 - DNA, 19 bp, Homo sapiens
  siRNA target sequence for FLJ12577 (NM_030925.1,499-517).
gagttgtcaacatttgata

SEQ ID NO: 395521 - DNA, 19 bp, Homo sapiens
  siRNA target sequence for FLJ12577 (NM_030925.1,526-544).
gatgcctttgctactttca

SEQ ID NO: 395522 - DNA, 19 bp, Homo sapiens
  siRNA target sequence for FLJ12577 (NM_030925.1,570-588).
gttggtagcagacttctta

SEQ ID NO: 395523 - DNA, 19 bp, Homo sapiens
  siRNA target sequence for FLJ12577 (NM_030925.1,592-610).
caaaattacgacactattt

SEQ ID NO: 395524 - DNA, 19 bp, Homo sapiens
  siRNA target sequence for FLJ12577 (NM_030925.1,690-708).
cctggaccgtcacaacttt

SEQ ID NO: 395525 - DNA, 19 bp, Homo sapiens
  siRNA target sequence for FLJ12577 (NM_030925.1,709-727).
gccatcatgacaaagtata

SEQ ID NO: 395526 - DNA, 19 bp, Homo sapiens
  siRNA target sequence for FLJ12577 (NM_030925.1,710-728).
ccatcatgacaaagtatat

SEQ ID NO: 395527 - DNA, 19 bp, Homo sapiens
  siRNA target sequence for FLJ12577 (NM_030925.1,759-777).
gaacctccttcgggataaa

SEQ ID NO: 395528 - DNA, 19 bp, Homo sapiens
  siRNA target sequence for FLJ12577 (NM_030925.1,964-982).
cagatccgagacttgaaga

SEQ ID NO: 395529 - DNA, 19 bp, Homo sapiens
  siRNA target sequence for CDT1 (NM_030928.2,604-622).
ctcgtgctgccctacaagt

SEQ ID NO: 395530 - DNA, 19 bp, Homo sapiens
  siRNA target sequence for CDT1 (NM_030928.2,755-773).
gcaatgttggccagatcaa

SEQ ID NO: 395531 - DNA, 19 bp, Homo sapiens
  siRNA target sequence for CDT1 (NM_030928.2,931-949).
cagcgacggcagatcttca

SEQ ID NO: 395532 - DNA, 19 bp, Homo sapiens
  siRNA target sequence for CDT1 (NM_030928.2,1435-1453).
ctgcggagcgtctttgtgt

SEQ ID NO: 395533 - DNA, 19 bp, Homo sapiens
  siRNA target sequence for CDT1 (NM_030928.2,1504-1522).
ggcagctgttgtactatca

SEQ ID NO: 395534 - DNA, 19 bp, Homo sapiens
  siRNA target sequence for CDT1 (NM_030928.2,1505-1523).
gcagctgttgtactatcat

SEQ ID NO: 395535 - DNA, 19 bp, Homo sapiens
  siRNA target sequence for UNC93B1 (NM_030930.1,319-337).
cctaccgcgaggtgaagta

SEQ ID NO: 395536 - DNA, 19 bp, Homo sapiens
  siRNA target sequence for UNC93B1 (NM_030930.1,355-373).
ccgacatcgacagcaaaat

SEQ ID NO: 395537 - DNA, 19 bp, Homo sapiens
  siRNA target sequence for UNC93B1 (NM_030930.1,420-438).
cctgtgctcatcaggtttt

SEQ ID NO: 395538 - DNA, 19 bp, Homo sapiens
  siRNA target sequence for UNC93B1 (NM_030930.1,472-490).
gcatctacgccctctttgt

SEQ ID NO: 395539 - DNA, 19 bp, Homo sapiens
  siRNA target sequence for UNC93B1 (NM_030930.1,570-588).
gcttccatgggcaactaca

SEQ ID NO: 395540 - DNA, 19 bp, Homo sapiens
  siRNA target sequence for UNC93B1 (NM_030930.1,571-589).
cttccatgggcaactacat

SEQ ID NO: 395541 - DNA, 19 bp, Homo sapiens
  siRNA target sequence for UNC93B1 (NM_030930.1,601-619).
cgcagaagtaccatgagta

SEQ ID NO: 395542 - DNA, 19 bp, Homo sapiens
  siRNA target sequence for UNC93B1 (NM_030930.1,791-809).
gaaccacacgctgtacaat

SEQ ID NO: 395543 - DNA, 19 bp, Homo sapiens
  siRNA target sequence for UNC93B1 (NM_030930.1,1063-1081).
gccacctcgtgcctttctt

SEQ ID NO: 395544 - DNA, 19 bp, Homo sapiens
  siRNA target sequence for C1orf14 (NM_030933.1,702-720).
gatgaagttatgggtaaat

SEQ ID NO: 395545 - DNA, 19 bp, Homo sapiens
  siRNA target sequence for C1orf14 (NM_030933.1,772-790).
ctaatcccagtgtattctt

SEQ ID NO: 395546 - DNA, 19 bp, Homo sapiens
  siRNA target sequence for C1orf14 (NM_030933.1,833-851).
ggttgaggtaacttgtgaa

SEQ ID NO: 395547 - DNA, 19 bp, Homo sapiens
  siRNA target sequence for C1orf14 (NM_030933.1,894-912).
gttgctgagcccttttctt

SEQ ID NO: 395548 - DNA, 19 bp, Homo sapiens
  siRNA target sequence for C1orf14 (NM_030933.1,910-928).
cttccaacattgcaaatat

SEQ ID NO: 395549 - DNA, 19 bp, Homo sapiens
  siRNA target sequence for C1orf14 (NM_030933.1,1002-1020).
gagggacaagatactgata

SEQ ID NO: 395550 - DNA, 19 bp, Homo sapiens
  siRNA target sequence for C1orf14 (NM_030933.1,1054-1072).
ggtttttttatgactttct

SEQ ID NO: 395551 - DNA, 19 bp, Homo sapiens
  siRNA target sequence for C1orf14 (NM_030933.1,1106-1124).
gaattatactgcacttatt

SEQ ID NO: 395552 - DNA, 19 bp, Homo sapiens
  siRNA target sequence for C1orf14 (NM_030933.1,1174-1192).
gtcctatcgcacaacgttt

SEQ ID NO: 395553 - DNA, 19 bp, Homo sapiens
  siRNA target sequence for C1orf14 (NM_030933.1,1176-1194).
cctatcgcacaacgtttta

SEQ ID NO: 395554 - DNA, 19 bp, Homo sapiens
  siRNA target sequence for C1orf14 (NM_030933.1,1177-1195).
ctatcgcacaacgttttaa

SEQ ID NO: 395555 - DNA, 19 bp, Homo sapiens
  siRNA target sequence for C1orf14 (NM_030933.1,1224-1242).
cgtgtcgagctcattgagt

SEQ ID NO: 395556 - DNA, 19 bp, Homo sapiens
  siRNA target sequence for C1orf14 (NM_030933.1,1225-1243).
gtgtcgagctcattgagta

SEQ ID NO: 395557 - DNA, 19 bp, Homo sapiens
  siRNA target sequence for C1orf14 (NM_030933.1,1424-1442).
gactataacacatattgta

SEQ ID NO: 395558 - DNA, 19 bp, Homo sapiens
  siRNA target sequence for C1orf14 (NM_030933.1,1434-1452).
catattgtagcaaaaatga

SEQ ID NO: 395559 - DNA, 19 bp, Homo sapiens
  siRNA target sequence for C1orf14 (NM_030933.1,1440-1458).
gtagcaaaaatgatgacta

SEQ ID NO: 395560 - DNA, 19 bp, Homo sapiens
  siRNA target sequence for C1orf14 (NM_030933.1,1451-1469).
gatgactactgaaatgata

SEQ ID NO: 395561 - DNA, 19 bp, Homo sapiens
  siRNA target sequence for C1orf14 (NM_030933.1,1635-1653).
gaggaaattatgattactt

SEQ ID NO: 395562 - DNA, 19 bp, Homo sapiens
  siRNA target sequence for C1orf14 (NM_030933.1,1679-1697).
ggtgtccaaagctgacaat

SEQ ID NO: 395563 - DNA, 19 bp, Homo sapiens
  siRNA target sequence for C1orf14 (NM_030933.1,1700-1718).
gaaactaatgcatctatct

SEQ ID NO: 395564 - DNA, 19 bp, Homo sapiens
  siRNA target sequence for C1orf14 (NM_030933.1,1704-1722).
ctaatgcatctatctttga

SEQ ID NO: 395565 - DNA, 19 bp, Homo sapiens
  siRNA target sequence for C1orf14 (NM_030933.1,1709-1727).
gcatctatctttgatacaa

SEQ ID NO: 395566 - DNA, 19 bp, Homo sapiens
  siRNA target sequence for C1orf14 (NM_030933.1,1827-1845).
ggggctgctttgacaatta

SEQ ID NO: 395567 - DNA, 19 bp, Homo sapiens
  siRNA target sequence for C1orf14 (NM_030933.1,1944-1962).
ctcagaaccagtaacagtt

SEQ ID NO: 395568 - DNA, 19 bp, Homo sapiens
  siRNA target sequence for C1orf14 (NM_030933.1,1948-1966).
gaaccagtaacagttcaaa

SEQ ID NO: 395569 - DNA, 19 bp, Homo sapiens
  siRNA target sequence for C1orf14 (NM_030933.1,1969-1987).
gcaccttaggtggagttaa

SEQ ID NO: 395570 - DNA, 19 bp, Homo sapiens
  siRNA target sequence for C1orf14 (NM_030933.1,1970-1988).
caccttaggtggagttaat

SEQ ID NO: 395571 - DNA, 19 bp, Homo sapiens
  siRNA target sequence for C1orf14 (NM_030933.1,1972-1990).
ccttaggtggagttaatat

SEQ ID NO: 395572 - DNA, 19 bp, Homo sapiens
  siRNA target sequence for C1orf14 (NM_030933.1,2018-2036).
gatgactaataatcatatt

SEQ ID NO: 395573 - DNA, 19 bp, Homo sapiens
  siRNA target sequence for C1orf14 (NM_030933.1,2119-2137).
gggcttcttcaggagataa

SEQ ID NO: 395574 - DNA, 19 bp, Homo sapiens
  siRNA target sequence for C1orf14 (NM_030933.1,2120-2138).
ggcttcttcaggagataaa

SEQ ID NO: 395575 - DNA, 19 bp, Homo sapiens
  siRNA target sequence for C1orf14 (NM_030933.1,2153-2171).
gctcttcaaagtaatgcaa

SEQ ID NO: 395576 - DNA, 19 bp, Homo sapiens
  siRNA target sequence for C1orf14 (NM_030933.1,2213-2231).
cgtcaagggggatatcaga

SEQ ID NO: 395577 - DNA, 19 bp, Homo sapiens
  siRNA target sequence for C1orf14 (NM_030933.1,2214-2232).
gtcaagggggatatcagaa

SEQ ID NO: 395578 - DNA, 19 bp, Homo sapiens
  siRNA target sequence for C1orf14 (NM_030933.1,2216-2234).
caagggggatatcagaata

SEQ ID NO: 395579 - DNA, 19 bp, Homo sapiens
  siRNA target sequence for C1orf14 (NM_030933.1,2220-2238).
ggggatatcagaatagtca

SEQ ID NO: 395580 - DNA, 19 bp, Homo sapiens
  siRNA target sequence for RNF32 (NM_030936.2,197-215).
gggtcactcatctaagaaa

SEQ ID NO: 395581 - DNA, 19 bp, Homo sapiens
  siRNA target sequence for RNF32 (NM_030936.2,201-219).
cactcatctaagaaagata

SEQ ID NO: 395582 - DNA, 19 bp, Homo sapiens
  siRNA target sequence for RNF32 (NM_030936.2,230-248).
caatgcagttgctttacaa

SEQ ID NO: 395583 - DNA, 19 bp, Homo sapiens
  siRNA target sequence for RNF32 (NM_030936.2,240-258).
gctttacaagatcacattt

SEQ ID NO: 395584 - DNA, 19 bp, Homo sapiens
  siRNA target sequence for RNF32 (NM_030936.2,282-300).
ctttcagttgcagatcatt

SEQ ID NO: 395585 - DNA, 19 bp, Homo sapiens
  siRNA target sequence for RNF32 (NM_030936.2,286-304).
cagttgcagatcattctaa

SEQ ID NO: 395586 - DNA, 19 bp, Homo sapiens
  siRNA target sequence for RNF32 (NM_030936.2,385-403).
cacagtgccccaaactaga

SEQ ID NO: 395587 - DNA, 19 bp, Homo sapiens
  siRNA target sequence for RNF32 (NM_030936.2,555-573).
caaccatgccccatctgta

SEQ ID NO: 395588 - DNA, 19 bp, Homo sapiens
  siRNA target sequence for RNF32 (NM_030936.2,564-582).
cccatctgtaaagaagaat

SEQ ID NO: 395589 - DNA, 19 bp, Homo sapiens
  siRNA target sequence for RNF32 (NM_030936.2,623-641).
gttccacaaagcatgtctt

SEQ ID NO: 395590 - DNA, 19 bp, Homo sapiens
  siRNA target sequence for RNF32 (NM_030936.2,698-716).
gtatcaaacccgagtgata

SEQ ID NO: 395591 - DNA, 19 bp, Homo sapiens
  siRNA target sequence for RNF32 (NM_030936.2,773-791).
gagaggatgtgttgttaga

SEQ ID NO: 395592 - DNA, 19 bp, Homo sapiens
  siRNA target sequence for RNF32 (NM_030936.2,825-843).
cccacagatgccaagttaa

SEQ ID NO: 395593 - DNA, 19 bp, Homo sapiens
  siRNA target sequence for RNF32 (NM_030936.2,896-914).
ctcatacaacaccaacatt

SEQ ID NO: 395594 - DNA, 19 bp, Homo sapiens
  siRNA target sequence for RNF32 (NM_030936.2,941-959).
gtgcttggccataaatcga

SEQ ID NO: 395595 - DNA, 19 bp, Homo sapiens
  siRNA target sequence for RNF32 (NM_030936.2,950-968).
cataaatcgaagtgttctt

SEQ ID NO: 395596 - DNA, 19 bp, Homo sapiens
  siRNA target sequence for VMP1 (NM_030938.2,145-163).
gacgtgtagcaatgaacaa

SEQ ID NO: 395597 - DNA, 19 bp, Homo sapiens
  siRNA target sequence for VMP1 (NM_030938.2,161-179).
caaggaacatcataatgga

SEQ ID NO: 395598 - DNA, 19 bp, Homo sapiens
  siRNA target sequence for VMP1 (NM_030938.2,264-282).
ctcattaccttgcagtatt

SEQ ID NO: 395599 - DNA, 19 bp, Homo sapiens
  siRNA target sequence for VMP1 (NM_030938.2,312-330).
gaatggacctcaaaattat

SEQ ID NO: 395600 - DNA, 19 bp, Homo sapiens
  siRNA target sequence for VMP1 (NM_030938.2,375-393).
gtgcttatagctacgtatt

SEQ ID NO: 395601 - DNA, 19 bp, Homo sapiens
  siRNA target sequence for VMP1 (NM_030938.2,377-395).
gcttatagctacgtattat

SEQ ID NO: 395602 - DNA, 19 bp, Homo sapiens
  siRNA target sequence for VMP1 (NM_030938.2,403-421).
gagtgcatcaacagtatgt

SEQ ID NO: 395603 - DNA, 19 bp, Homo sapiens
  siRNA target sequence for VMP1 (NM_030938.2,458-476).
ctggataggcttaggaatt

SEQ ID NO: 395604 - DNA, 19 bp, Homo sapiens
  siRNA target sequence for VMP1 (NM_030938.2,531-549).
ccacatatagcctcagtta

SEQ ID NO: 395605 - DNA, 19 bp, Homo sapiens
  siRNA target sequence for VMP1 (NM_030938.2,594-612).
ccctatcctgatcagatta

SEQ ID NO: 395606 - DNA, 19 bp, Homo sapiens
  siRNA target sequence for VMP1 (NM_030938.2,595-613).
cctatcctgatcagattat

SEQ ID NO: 395607 - DNA, 19 bp, Homo sapiens
  siRNA target sequence for VMP1 (NM_030938.2,596-614).
ctatcctgatcagattatt

SEQ ID NO: 395608 - DNA, 19 bp, Homo sapiens
  siRNA target sequence for VMP1 (NM_030938.2,629-647).
gggcactgaaggaaccatt

SEQ ID NO: 395609 - DNA, 19 bp, Homo sapiens
  siRNA target sequence for VMP1 (NM_030938.2,630-648).
ggcactgaaggaaccattt

SEQ ID NO: 395610 - DNA, 19 bp, Homo sapiens
  siRNA target sequence for VMP1 (NM_030938.2,713-731).
cggagagctgcctccatat

SEQ ID NO: 395611 - DNA, 19 bp, Homo sapiens
  siRNA target sequence for VMP1 (NM_030938.2,717-735).
gagctgcctccatatttca

SEQ ID NO: 395612 - DNA, 19 bp, Homo sapiens
  siRNA target sequence for VMP1 (NM_030938.2,842-860).
ggccaaactggcagttcaa

SEQ ID NO: 395613 - DNA, 19 bp, Homo sapiens
  siRNA target sequence for VMP1 (NM_030938.2,843-861).
gccaaactggcagttcaaa

SEQ ID NO: 395614 - DNA, 19 bp, Homo sapiens
  siRNA target sequence for VMP1 (NM_030938.2,844-862).
ccaaactggcagttcaaaa

SEQ ID NO: 395615 - DNA, 19 bp, Homo sapiens
  siRNA target sequence for VMP1 (NM_030938.2,897-915).
gcctgtgcttcaattccaa

SEQ ID NO: 395616 - DNA, 19 bp, Homo sapiens
  siRNA target sequence for VMP1 (NM_030938.2,898-916).
cctgtgcttcaattccaaa

SEQ ID NO: 395617 - DNA, 19 bp, Homo sapiens
  siRNA target sequence for VMP1 (NM_030938.2,899-917).
ctgtgcttcaattccaaat

SEQ ID NO: 395618 - DNA, 19 bp, Homo sapiens
  siRNA target sequence for VMP1 (NM_030938.2,927-945).
gatctggctggaataacgt

SEQ ID NO: 395619 - DNA, 19 bp, Homo sapiens
  siRNA target sequence for VMP1 (NM_030938.2,951-969).
cactttctggtaccttttt

SEQ ID NO: 395620 - DNA, 19 bp, Homo sapiens
  siRNA target sequence for VMP1 (NM_030938.2,977-995).
ctttggtgcaaccctaatt

SEQ ID NO: 395621 - DNA, 19 bp, Homo sapiens
  siRNA target sequence for VMP1 (NM_030938.2,981-999).
ggtgcaaccctaattggaa

SEQ ID NO: 395622 - DNA, 19 bp, Homo sapiens
  siRNA target sequence for VMP1 (NM_030938.2,982-1000).
gtgcaaccctaattggaaa

SEQ ID NO: 395623 - DNA, 19 bp, Homo sapiens
  siRNA target sequence for VMP1 (NM_030938.2,1201-1219).
ggttgtcctggatgtttga

SEQ ID NO: 395624 - DNA, 19 bp, Homo sapiens
  siRNA target sequence for VMP1 (NM_030938.2,1202-1220).
gttgtcctggatgtttgaa

SEQ ID NO: 395625 - DNA, 19 bp, Homo sapiens
  siRNA target sequence for VMP1 (NM_030938.2,1230-1248).
gttgtcatggtgtgttact

SEQ ID NO: 395626 - DNA, 19 bp, Homo sapiens
  siRNA target sequence for VMP1 (NM_030938.2,1233-1251).
gtcatggtgtgttacttca

SEQ ID NO: 395627 - DNA, 19 bp, Homo sapiens
  siRNA target sequence for VMP1 (NM_030938.2,1268-1286).
ctccatggcacaaagttat

SEQ ID NO: 395628 - DNA, 19 bp, Homo sapiens
  siRNA target sequence for VMP1 (NM_030938.2,1278-1296).
caaagttatgccaaacgaa

SEQ ID NO: 395629 - DNA, 19 bp, Homo sapiens
  siRNA target sequence for C6orf62 (NM_030939.2,547-565).
cccaaactcccggaagaaa

SEQ ID NO: 395630 - DNA, 19 bp, Homo sapiens
  siRNA target sequence for C6orf62 (NM_030939.2,581-599).
ctacgtgctcagcttagaa

SEQ ID NO: 395631 - DNA, 19 bp, Homo sapiens
  siRNA target sequence for C6orf62 (NM_030939.2,625-643).
gtttgacttcaagatgtat

SEQ ID NO: 395632 - DNA, 19 bp, Homo sapiens
  siRNA target sequence for C6orf62 (NM_030939.2,701-719).
gttataccagtcatgacaa

SEQ ID NO: 395633 - DNA, 19 bp, Homo sapiens
  siRNA target sequence for C6orf62 (NM_030939.2,780-798).
ccctagagcttttacagaa

SEQ ID NO: 395634 - DNA, 19 bp, Homo sapiens
  siRNA target sequence for C6orf62 (NM_030939.2,811-829).
gctccatgctcctcgatat

SEQ ID NO: 395635 - DNA, 19 bp, Homo sapiens
  siRNA target sequence for C6orf62 (NM_030939.2,815-833).
catgctcctcgatatcagt

SEQ ID NO: 395636 - DNA, 19 bp, Homo sapiens
  siRNA target sequence for C6orf62 (NM_030939.2,819-837).
ctcctcgatatcagtctat

SEQ ID NO: 395637 - DNA, 19 bp, Homo sapiens
  siRNA target sequence for C6orf62 (NM_030939.2,821-839).
cctcgatatcagtctatga

SEQ ID NO: 395638 - DNA, 19 bp, Homo sapiens
  siRNA target sequence for C6orf62 (NM_030939.2,824-842).
cgatatcagtctatgagaa

SEQ ID NO: 395639 - DNA, 19 bp, Homo sapiens
  siRNA target sequence for C6orf62 (NM_030939.2,885-903).
ggcctcggaatgatattga

SEQ ID NO: 395640 - DNA, 19 bp, Homo sapiens
  siRNA target sequence for C6orf62 (NM_030939.2,886-904).
gcctcggaatgatattgaa

SEQ ID NO: 395641 - DNA, 19 bp, Homo sapiens
  siRNA target sequence for C6orf62 (NM_030939.2,887-905).
cctcggaatgatattgaaa

SEQ ID NO: 395642 - DNA, 19 bp, Homo sapiens
  siRNA target sequence for C6orf62 (NM_030939.2,888-906).
ctcggaatgatattgaaaa

SEQ ID NO: 395643 - DNA, 19 bp, Homo sapiens
  siRNA target sequence for C6orf62 (NM_030939.2,958-976).
gcctgttcaggccaaattt

SEQ ID NO: 395644 - DNA, 19 bp, Homo sapiens
  siRNA target sequence for C6orf62 (NM_030939.2,1030-1048).
ggacaagactggaatcgtt

SEQ ID NO: 395645 - DNA, 19 bp, Homo sapiens
  siRNA target sequence for C6orf62 (NM_030939.2,1038-1056).
ctggaatcgttgtcaacaa

SEQ ID NO: 395646 - DNA, 19 bp, Homo sapiens
  siRNA target sequence for C6orf62 (NM_030939.2,1059-1077).
ctaaccagtcagtgtttct

SEQ ID NO: 395647 - DNA, 19 bp, Homo sapiens
  siRNA target sequence for C6orf62 (NM_030939.2,1118-1136).
gctacaatcttcaagttat

SEQ ID NO: 395648 - DNA, 19 bp, Homo sapiens
  siRNA target sequence for C6orf62 (NM_030939.2,1198-1216).
ggatcacctccgtccttat

SEQ ID NO: 395649 - DNA, 19 bp, Homo sapiens
  siRNA target sequence for C6orf62 (NM_030939.2,1199-1217).
gatcacctccgtccttata

SEQ ID NO: 395650 - DNA, 19 bp, Homo sapiens
  siRNA target sequence for C15orf5 (NM_030944.1,358-376).
gggagctacttaaaatttt

SEQ ID NO: 395651 - DNA, 19 bp, Homo sapiens
  siRNA target sequence for C15orf5 (NM_030944.1,450-468).
gacctagaggcaaagacat

SEQ ID NO: 395652 - DNA, 19 bp, Homo sapiens
  siRNA target sequence for C15orf5 (NM_030944.1,452-470).
cctagaggcaaagacatta

SEQ ID NO: 395653 - DNA, 19 bp, Homo sapiens
  siRNA target sequence for C15orf5 (NM_030944.1,529-547).
gatgggcaaaaccaaaaat

SEQ ID NO: 395654 - DNA, 19 bp, Homo sapiens
  siRNA target sequence for C15orf5 (NM_030944.1,581-599).
gatagattggatgtatttt

SEQ ID NO: 395655 - DNA, 19 bp, Homo sapiens
  siRNA target sequence for C15orf5 (NM_030944.1,604-622).
cacctctctccatacaaat

SEQ ID NO: 395656 - DNA, 19 bp, Homo sapiens
  siRNA target sequence for C1QTNF3 (NM_030945.1,144-162).
ctgtgtcaagatgaataca

SEQ ID NO: 395657 - DNA, 19 bp, Homo sapiens
  siRNA target sequence for C1QTNF3 (NM_030945.1,423-441).
ccagaacttcagattgcat

SEQ ID NO: 395658 - DNA, 19 bp, Homo sapiens
  siRNA target sequence for C1QTNF3 (NM_030945.1,424-442).
cagaacttcagattgcatt

SEQ ID NO: 395659 - DNA, 19 bp, Homo sapiens
  siRNA target sequence for C1QTNF3 (NM_030945.1,558-576).
gtatcaggtgtgtatttct

SEQ ID NO: 395660 - DNA, 19 bp, Homo sapiens
  siRNA target sequence for C1QTNF3 (NM_030945.1,606-624).
gttgaggaagtgtatgtgt

SEQ ID NO: 395661 - DNA, 19 bp, Homo sapiens
  siRNA target sequence for C1QTNF3 (NM_030945.1,612-630).
gaagtgtatgtgtacctta

SEQ ID NO: 395662 - DNA, 19 bp, Homo sapiens
  siRNA target sequence for C1QTNF3 (NM_030945.1,653-671).
cagcatgtacagctatgaa

SEQ ID NO: 395663 - DNA, 19 bp, Homo sapiens
  siRNA target sequence for C1QTNF3 (NM_030945.1,655-673).
gcatgtacagctatgaaat

SEQ ID NO: 395664 - DNA, 19 bp, Homo sapiens
  siRNA target sequence for C1QTNF3 (NM_030945.1,674-692).
gaagggcaaatcagataca

SEQ ID NO: 395665 - DNA, 19 bp, Homo sapiens
  siRNA target sequence for PPP1R14C (NM_030949.1,151-169).
gcacgggttttcttccaaa

SEQ ID NO: 395666 - DNA, 19 bp, Homo sapiens
  siRNA target sequence for PPP1R14C (NM_030949.1,314-332).
cagtgaaatacgatcgtaa

SEQ ID NO: 395667 - DNA, 19 bp, Homo sapiens
  siRNA target sequence for PPP1R14C (NM_030949.1,432-450).
cattgatgatcttcttgat

SEQ ID NO: 395668 - DNA, 19 bp, Homo sapiens
  siRNA target sequence for PPP1R14C (NM_030949.1,511-529).
ccaacagaggaatttatca

SEQ ID NO: 395669 - DNA, 19 bp, Homo sapiens
  siRNA target sequence for PPP1R14C (NM_030949.1,534-552).
gctgctttctcggataaga

SEQ ID NO: 395670 - DNA, 19 bp, Homo sapiens
  siRNA target sequence for PPP1R14C (NM_030949.1,574-592).
ccgcagaagaagagtgtat

SEQ ID NO: 395671 - DNA, 19 bp, Homo sapiens
  siRNA target sequence for DKFZP564A022 (NM_030954.2,225-243).
gagtaagcgaccaagtact

SEQ ID NO: 395672 - DNA, 19 bp, Homo sapiens
  siRNA target sequence for DKFZP564A022 (NM_030954.2,283-301).
ggtatatgcacttttcaga

SEQ ID NO: 395673 - DNA, 19 bp, Homo sapiens
  siRNA target sequence for DKFZP564A022 (NM_030954.2,390-408).
ccactcgacagcagttcta

SEQ ID NO: 395674 - DNA, 19 bp, Homo sapiens
  siRNA target sequence for DKFZP564A022 (NM_030954.2,485-503).
ggtgcctgcattattgctt

SEQ ID NO: 395675 - DNA, 19 bp, Homo sapiens
  siRNA target sequence for DKFZP564A022 (NM_030954.2,486-504).
gtgcctgcattattgctta

SEQ ID NO: 395676 - DNA, 19 bp, Homo sapiens
  siRNA target sequence for DKFZP564A022 (NM_030954.2,500-518).
gcttactggcgatatggtt

SEQ ID NO: 395677 - DNA, 19 bp, Homo sapiens
  siRNA target sequence for DKFZP564A022 (NM_030954.2,564-582).
ccttactcctaacagtatt

SEQ ID NO: 395678 - DNA, 19 bp, Homo sapiens
  siRNA target sequence for DKFZP564A022 (NM_030954.2,600-618).
ctcaggatgttctgagatt

SEQ ID NO: 395679 - DNA, 19 bp, Homo sapiens
  siRNA target sequence for DKFZP564A022 (NM_030954.2,613-631).
gagattgcatcaggatatt

SEQ ID NO: 395680 - DNA, 19 bp, Homo sapiens
  siRNA target sequence for DKFZP564A022 (NM_030954.2,615-633).
gattgcatcaggatattaa

SEQ ID NO: 395681 - DNA, 19 bp, Homo sapiens
  siRNA target sequence for DKFZP564A022 (NM_030954.2,654-672).
cagggcaacccagatctat

SEQ ID NO: 395682 - DNA, 19 bp, Homo sapiens
  siRNA target sequence for DKFZP564A022 (NM_030954.2,656-674).
gggcaacccagatctatta

SEQ ID NO: 395683 - DNA, 19 bp, Homo sapiens
  siRNA target sequence for DKFZP564A022 (NM_030954.2,689-707).
gatctacccactttactga

SEQ ID NO: 395684 - DNA, 19 bp, Homo sapiens
  siRNA target sequence for DKFZP564A022 (NM_030954.2,699-717).
ctttactgaggcatgcatt

SEQ ID NO: 395685 - DNA, 19 bp, Homo sapiens
  siRNA target sequence for DKFZP564A022 (NM_030954.2,760-778).
catcaggataatactttgt

SEQ ID NO: 395686 - DNA, 19 bp, Homo sapiens
  siRNA target sequence for DKFZP564A022 (NM_030954.2,763-781).
caggataatactttgttta

SEQ ID NO: 395687 - DNA, 19 bp, Homo sapiens
  siRNA target sequence for DKFZP564A022 (NM_030954.2,777-795).
gtttaatgggagctttttt

SEQ ID NO: 395688 - DNA, 19 bp, Homo sapiens
  siRNA target sequence for DKFZP564A022 (NM_030954.2,840-858).
gaattctaggctttctaga

SEQ ID NO: 395689 - DNA, 19 bp, Homo sapiens
  siRNA target sequence for DKFZP564A022 (NM_030954.2,884-902).
cttatctacatctctatta

SEQ ID NO: 395690 - DNA, 19 bp, Homo sapiens
  siRNA target sequence for DKFZP564A022 (NM_030954.2,889-907).
ctacatctctattatgtat

SEQ ID NO: 395691 - DNA, 19 bp, Homo sapiens
  siRNA target sequence for SPACA1 (NM_030960.2,284-302).
gcgagaccgcggagaacta

SEQ ID NO: 395692 - DNA, 19 bp, Homo sapiens
  siRNA target sequence for SPACA1 (NM_030960.2,310-328).
cctgaaaccgaggatgttt

SEQ ID NO: 395693 - DNA, 19 bp, Homo sapiens
  siRNA target sequence for SPACA1 (NM_030960.2,340-358).
gtcgtcaaagaagtagaat

SEQ ID NO: 395694 - DNA, 19 bp, Homo sapiens
  siRNA target sequence for SPACA1 (NM_030960.2,372-390).
cgttacatgtggtattggt

SEQ ID NO: 395695 - DNA, 19 bp, Homo sapiens
  siRNA target sequence for SPACA1 (NM_030960.2,380-398).
gtggtattggtgttagaga

SEQ ID NO: 395696 - DNA, 19 bp, Homo sapiens
  siRNA target sequence for SPACA1 (NM_030960.2,388-406).
ggtgttagagaagttatat

SEQ ID NO: 395697 - DNA, 19 bp, Homo sapiens
  siRNA target sequence for SPACA1 (NM_030960.2,389-407).
gtgttagagaagttatatt

SEQ ID NO: 395698 - DNA, 19 bp, Homo sapiens
  siRNA target sequence for SPACA1 (NM_030960.2,391-409).
gttagagaagttatattaa

SEQ ID NO: 395699 - DNA, 19 bp, Homo sapiens
  siRNA target sequence for SPACA1 (NM_030960.2,440-458).
gtgttgtacgggtagaaga

SEQ ID NO: 395700 - DNA, 19 bp, Homo sapiens
  siRNA target sequence for SPACA1 (NM_030960.2,442-460).
gttgtacgggtagaagaat

SEQ ID NO: 395701 - DNA, 19 bp, Homo sapiens
  siRNA target sequence for SPACA1 (NM_030960.2,483-501).
ctggggtaaaccaatttca

SEQ ID NO: 395702 - DNA, 19 bp, Homo sapiens
  siRNA target sequence for SPACA1 (NM_030960.2,502-520).
gaaagtcttgaaagtgtta

SEQ ID NO: 395703 - DNA, 19 bp, Homo sapiens
  siRNA target sequence for SPACA1 (NM_030960.2,506-524).
gtcttgaaagtgttagatt

SEQ ID NO: 395704 - DNA, 19 bp, Homo sapiens
  siRNA target sequence for SPACA1 (NM_030960.2,515-533).
gtgttagattggcatgtat

SEQ ID NO: 395705 - DNA, 19 bp, Homo sapiens
  siRNA target sequence for SPACA1 (NM_030960.2,537-555).
cacatctcccttaaatcgt

SEQ ID NO: 395706 - DNA, 19 bp, Homo sapiens
  siRNA target sequence for SPACA1 (NM_030960.2,544-562).
cccttaaatcgtttcaaat

SEQ ID NO: 395707 - DNA, 19 bp, Homo sapiens
  siRNA target sequence for SPACA1 (NM_030960.2,545-563).
ccttaaatcgtttcaaata

SEQ ID NO: 395708 - DNA, 19 bp, Homo sapiens
  siRNA target sequence for SPACA1 (NM_030960.2,546-564).
cttaaatcgtttcaaatat

SEQ ID NO: 395709 - DNA, 19 bp, Homo sapiens
  siRNA target sequence for SPACA1 (NM_030960.2,577-595).
ctaagacaagaccaacaat

SEQ ID NO: 395710 - DNA, 19 bp, Homo sapiens
  siRNA target sequence for SPACA1 (NM_030960.2,581-599).
gacaagaccaacaatccat

SEQ ID NO: 395711 - DNA, 19 bp, Homo sapiens
  siRNA target sequence for SPACA1 (NM_030960.2,588-606).
ccaacaatccattatactt

SEQ ID NO: 395712 - DNA, 19 bp, Homo sapiens
  siRNA target sequence for SPACA1 (NM_030960.2,596-614).
ccattatacttgtaaatga

SEQ ID NO: 395713 - DNA, 19 bp, Homo sapiens
  siRNA target sequence for SPACA1 (NM_030960.2,691-709).
gtagcaactattaaattca

SEQ ID NO: 395714 - DNA, 19 bp, Homo sapiens
  siRNA target sequence for SPACA1 (NM_030960.2,712-730).
gtctatacgagcagtgaat

SEQ ID NO: 395715 - DNA, 19 bp, Homo sapiens
  siRNA target sequence for SPACA1 (NM_030960.2,794-812).
gagtcattatctgtgtatt

SEQ ID NO: 395716 - DNA, 19 bp, Homo sapiens
  siRNA target sequence for SPACA1 (NM_030960.2,796-814).
gtcattatctgtgtattta

SEQ ID NO: 395717 - DNA, 19 bp, Homo sapiens
  siRNA target sequence for SPACA1 (NM_030960.2,828-846).
gatcttcataatcataaat

SEQ ID NO: 395718 - DNA, 19 bp, Homo sapiens
  siRNA target sequence for SPACA1 (NM_030960.2,918-936).
gagatacaaagattcaact

SEQ ID NO: 395719 - DNA, 19 bp, Homo sapiens
  siRNA target sequence for CMT4B2 (NM_030962.1,713-731).
ccagcaattgggaattcaa

SEQ ID NO: 395720 - DNA, 19 bp, Homo sapiens
  siRNA target sequence for CMT4B2 (NM_030962.1,751-769).
gtgcagtcctcacagaaaa

SEQ ID NO: 395721 - DNA, 19 bp, Homo sapiens
  siRNA target sequence for CMT4B2 (NM_030962.1,753-771).
gcagtcctcacagaaaata

SEQ ID NO: 395722 - DNA, 19 bp, Homo sapiens
  siRNA target sequence for CMT4B2 (NM_030962.1,822-840).
gccctggaatctttaatgt

SEQ ID NO: 395723 - DNA, 19 bp, Homo sapiens
  siRNA target sequence for CMT4B2 (NM_030962.1,823-841).
ccctggaatctttaatgtt

SEQ ID NO: 395724 - DNA, 19 bp, Homo sapiens
  siRNA target sequence for CMT4B2 (NM_030962.1,839-857).
gtttcctcttaaatatagt

SEQ ID NO: 395725 - DNA, 19 bp, Homo sapiens
  siRNA target sequence for CMT4B2 (NM_030962.1,904-922).
gttccccaacgcctttcat

SEQ ID NO: 395726 - DNA, 19 bp, Homo sapiens
  siRNA target sequence for CMT4B2 (NM_030962.1,907-925).
ccccaacgcctttcattat

SEQ ID NO: 395727 - DNA, 19 bp, Homo sapiens
  siRNA target sequence for CMT4B2 (NM_030962.1,949-967).
ctgatgtccatgaactttt

SEQ ID NO: 395728 - DNA, 19 bp, Homo sapiens
  siRNA target sequence for CMT4B2 (NM_030962.1,956-974).
ccatgaacttttagatgta

SEQ ID NO: 395729 - DNA, 19 bp, Homo sapiens
  siRNA target sequence for CMT4B2 (NM_030962.1,957-975).
catgaacttttagatgtaa

SEQ ID NO: 395730 - DNA, 19 bp, Homo sapiens
  siRNA target sequence for CMT4B2 (NM_030962.1,989-1007).
ggatggaggcactattaaa

SEQ ID NO: 395731 - DNA, 19 bp, Homo sapiens
  siRNA target sequence for CMT4B2 (NM_030962.1,990-1008).
gatggaggcactattaaaa

SEQ ID NO: 395732 - DNA, 19 bp, Homo sapiens
  siRNA target sequence for CMT4B2 (NM_030962.1,1034-1052).
cctcccagaaccacttcta

SEQ ID NO: 395733 - DNA, 19 bp, Homo sapiens
  siRNA target sequence for CMT4B2 (NM_030962.1,1060-1078).
ctcaatcagctctttcttt

SEQ ID NO: 395734 - DNA, 19 bp, Homo sapiens
  siRNA target sequence for CMT4B2 (NM_030962.1,1062-1080).
caatcagctctttctttga

SEQ ID NO: 395735 - DNA, 19 bp, Homo sapiens
  siRNA target sequence for CMT4B2 (NM_030962.1,1166-1184).
ggtgcgagccgttttcctt

SEQ ID NO: 395736 - DNA, 19 bp, Homo sapiens
  siRNA target sequence for CMT4B2 (NM_030962.1,1167-1185).
gtgcgagccgttttcctta

SEQ ID NO: 395737 - DNA, 19 bp, Homo sapiens
  siRNA target sequence for CMT4B2 (NM_030962.1,1170-1188).
cgagccgttttccttagat

SEQ ID NO: 395738 - DNA, 19 bp, Homo sapiens
  siRNA target sequence for CMT4B2 (NM_030962.1,1174-1192).
ccgttttccttagattatt

SEQ ID NO: 395739 - DNA, 19 bp, Homo sapiens
  siRNA target sequence for CMT4B2 (NM_030962.1,1220-1238).
ctgcctgcaacttataaga

SEQ ID NO: 395740 - DNA, 19 bp, Homo sapiens
  siRNA target sequence for CMT4B2 (NM_030962.1,1222-1240).
gcctgcaacttataagaat

SEQ ID NO: 395741 - DNA, 19 bp, Homo sapiens
  siRNA target sequence for CMT4B2 (NM_030962.1,1223-1241).
cctgcaacttataagaatt

SEQ ID NO: 395742 - DNA, 19 bp, Homo sapiens
  siRNA target sequence for CMT4B2 (NM_030962.1,1226-1244).
gcaacttataagaattcat

SEQ ID NO: 395743 - DNA, 19 bp, Homo sapiens
  siRNA target sequence for CMT4B2 (NM_030962.1,1245-1263).
gcagagccagtaatacatt

SEQ ID NO: 395744 - DNA, 19 bp, Homo sapiens
  siRNA target sequence for CMT4B2 (NM_030962.1,1246-1264).
cagagccagtaatacattt

SEQ ID NO: 395745 - DNA, 19 bp, Homo sapiens
  siRNA target sequence for CMT4B2 (NM_030962.1,1293-1311).
ggtttggtcgagaatgatt

SEQ ID NO: 395746 - DNA, 19 bp, Homo sapiens
  siRNA target sequence for CMT4B2 (NM_030962.1,1294-1312).
gtttggtcgagaatgattt

SEQ ID NO: 395747 - DNA, 19 bp, Homo sapiens
  siRNA target sequence for CMT4B2 (NM_030962.1,1337-1355).
ggcatttgcaggttttgtt

SEQ ID NO: 395748 - DNA, 19 bp, Homo sapiens
  siRNA target sequence for CMT4B2 (NM_030962.1,1359-1377).
gaaagaggtcctccttata

SEQ ID NO: 395749 - DNA, 19 bp, Homo sapiens
  siRNA target sequence for CMT4B2 (NM_030962.1,1365-1383).
ggtcctccttatagatctt

SEQ ID NO: 395750 - DNA, 19 bp, Homo sapiens
  siRNA target sequence for CMT4B2 (NM_030962.1,1476-1494).
cttgctgagcaactattca

SEQ ID NO: 395751 - DNA, 19 bp, Homo sapiens
  siRNA target sequence for CMT4B2 (NM_030962.1,1479-1497).
gctgagcaactattcaaaa

SEQ ID NO: 395752 - DNA, 19 bp, Homo sapiens
  siRNA target sequence for CMT4B2 (NM_030962.1,1556-1574).
ccatttgcgagttcatatt

SEQ ID NO: 395753 - DNA, 19 bp, Homo sapiens
  siRNA target sequence for CMT4B2 (NM_030962.1,1693-1711).
gtccacctgttgtttcgat

SEQ ID NO: 395754 - DNA, 19 bp, Homo sapiens
  siRNA target sequence for CMT4B2 (NM_030962.1,1695-1713).
ccacctgttgtttcgataa

SEQ ID NO: 395755 - DNA, 19 bp, Homo sapiens
  siRNA target sequence for CMT4B2 (NM_030962.1,1696-1714).
cacctgttgtttcgataat

SEQ ID NO: 395756 - DNA, 19 bp, Homo sapiens
  siRNA target sequence for CMT4B2 (NM_030962.1,1699-1717).
ctgttgtttcgataatgga

SEQ ID NO: 395757 - DNA, 19 bp, Homo sapiens
  siRNA target sequence for CMT4B2 (NM_030962.1,1722-1740).
gtgacgacagttttcaaca

SEQ ID NO: 395758 - DNA, 19 bp, Homo sapiens
  siRNA target sequence for CMT4B2 (NM_030962.1,1736-1754).
caacagtgcacaaagacta

SEQ ID NO: 395759 - DNA, 19 bp, Homo sapiens
  siRNA target sequence for CMT4B2 (NM_030962.1,1739-1757).
cagtgcacaaagactagaa

SEQ ID NO: 395760 - DNA, 19 bp, Homo sapiens
  siRNA target sequence for CMT4B2 (NM_030962.1,1758-1776).
gttgtcagaaactgtatct

SEQ ID NO: 395761 - DNA, 19 bp, Homo sapiens
  siRNA target sequence for CMT4B2 (NM_030962.1,1771-1789).
gtatctcattcatatttga

SEQ ID NO: 395762 - DNA, 19 bp, Homo sapiens
  siRNA target sequence for CMT4B2 (NM_030962.1,1860-1878).
cagtgtctcactgatgaat

SEQ ID NO: 395763 - DNA, 19 bp, Homo sapiens
  siRNA target sequence for CMT4B2 (NM_030962.1,1895-1913).
gcaaaaccgggcaatatta

SEQ ID NO: 395764 - DNA, 19 bp, Homo sapiens
  siRNA target sequence for CMT4B2 (NM_030962.1,1906-1924).
caatattagaccatcaaca

SEQ ID NO: 395765 - DNA, 19 bp, Homo sapiens
  siRNA target sequence for CMT4B2 (NM_030962.1,1943-1961).
gatgatgaattgtactcta

SEQ ID NO: 395766 - DNA, 19 bp, Homo sapiens
  siRNA target sequence for CMT4B2 (NM_030962.1,1959-1977).
ctacaggattgttcaagtt

SEQ ID NO: 395767 - DNA, 19 bp, Homo sapiens
  siRNA target sequence for CMT4B2 (NM_030962.1,1964-1982).
ggattgttcaagtttagaa

SEQ ID NO: 395768 - DNA, 19 bp, Homo sapiens
  siRNA target sequence for CMT4B2 (NM_030962.1,1975-1993).
gtttagaagaatacaacat

SEQ ID NO: 395769 - DNA, 19 bp, Homo sapiens
  siRNA target sequence for CMT4B2 (NM_030962.1,1988-2006).
caacattgccgcagcatta

SEQ ID NO: 395770 - DNA, 19 bp, Homo sapiens
  siRNA target sequence for CMT4B2 (NM_030962.1,2046-2064).
ggagtcagccagtttgctt

SEQ ID NO: 395771 - DNA, 19 bp, Homo sapiens
  siRNA target sequence for CMT4B2 (NM_030962.1,2081-2099).
ccaccccatttggacaaat

SEQ ID NO: 395772 - DNA, 19 bp, Homo sapiens
  siRNA target sequence for CMT4B2 (NM_030962.1,2111-2129).
ggagacaaccttttacaat

SEQ ID NO: 395773 - DNA, 19 bp, Homo sapiens
  siRNA target sequence for CMT4B2 (NM_030962.1,2277-2295).
cctaccctgagcaagtcaa

SEQ ID NO: 395774 - DNA, 19 bp, Homo sapiens
  siRNA target sequence for CMT4B2 (NM_030962.1,2321-2339).
ggaaagcactgtctttagt

SEQ ID NO: 395775 - DNA, 19 bp, Homo sapiens
  siRNA target sequence for CMT4B2 (NM_030962.1,2379-2397).
gttccactcgacacaagta

SEQ ID NO: 395776 - DNA, 19 bp, Homo sapiens
  siRNA target sequence for CMT4B2 (NM_030962.1,2382-2400).
ccactcgacacaagtaaaa

SEQ ID NO: 395777 - DNA, 19 bp, Homo sapiens
  siRNA target sequence for CMT4B2 (NM_030962.1,2383-2401).
cactcgacacaagtaaaaa

SEQ ID NO: 395778 - DNA, 19 bp, Homo sapiens
  siRNA target sequence for CMT4B2 (NM_030962.1,2385-2403).
ctcgacacaagtaaaaaca

SEQ ID NO: 395779 - DNA, 19 bp, Homo sapiens
  siRNA target sequence for CMT4B2 (NM_030962.1,2442-2460).
ggaagcaacagcattgtca

SEQ ID NO: 395780 - DNA, 19 bp, Homo sapiens
  siRNA target sequence for CMT4B2 (NM_030962.1,2452-2470).
gcattgtcacaaacagtat

SEQ ID NO: 395781 - DNA, 19 bp, Homo sapiens
  siRNA target sequence for CMT4B2 (NM_030962.1,2453-2471).
cattgtcacaaacagtatt

SEQ ID NO: 395782 - DNA, 19 bp, Homo sapiens
  siRNA target sequence for CMT4B2 (NM_030962.1,2553-2571).
cggttcattacccgattta

SEQ ID NO: 395783 - DNA, 19 bp, Homo sapiens
  siRNA target sequence for CMT4B2 (NM_030962.1,2554-2572).
ggttcattacccgatttat

SEQ ID NO: 395784 - DNA, 19 bp, Homo sapiens
  siRNA target sequence for CMT4B2 (NM_030962.1,2555-2573).
gttcattacccgatttatt

SEQ ID NO: 395785 - DNA, 19 bp, Homo sapiens
  siRNA target sequence for CMT4B2 (NM_030962.1,2565-2583).
cgatttattgacaaagttt

SEQ ID NO: 395786 - DNA, 19 bp, Homo sapiens
  siRNA target sequence for CMT4B2 (NM_030962.1,2630-2648).
catgataccaggaattgta

SEQ ID NO: 395787 - DNA, 19 bp, Homo sapiens
  siRNA target sequence for CMT4B2 (NM_030962.1,2646-2664).
gtagctatgcacattgaga

SEQ ID NO: 395788 - DNA, 19 bp, Homo sapiens
  siRNA target sequence for CMT4B2 (NM_030962.1,2663-2681).
gaccctagaagcagtacat

SEQ ID NO: 395789 - DNA, 19 bp, Homo sapiens
  siRNA target sequence for CMT4B2 (NM_030962.1,2692-2710).
gaagacttccgcctattca

SEQ ID NO: 395790 - DNA, 19 bp, Homo sapiens
  siRNA target sequence for CMT4B2 (NM_030962.1,2695-2713).
gacttccgcctattcagaa

SEQ ID NO: 395791 - DNA, 19 bp, Homo sapiens
  siRNA target sequence for CMT4B2 (NM_030962.1,2711-2729).
gaagcccaagattcttaga

SEQ ID NO: 395792 - DNA, 19 bp, Homo sapiens
  siRNA target sequence for CMT4B2 (NM_030962.1,2866-2884).
ccacatacagaattctctt

SEQ ID NO: 395793 - DNA, 19 bp, Homo sapiens
  siRNA target sequence for CMT4B2 (NM_030962.1,2890-2908).
gaacaccccatgatcagtt

SEQ ID NO: 395794 - DNA, 19 bp, Homo sapiens
  siRNA target sequence for CMT4B2 (NM_030962.1,2893-2911).
caccccatgatcagttagt

SEQ ID NO: 395795 - DNA, 19 bp, Homo sapiens
  siRNA target sequence for CMT4B2 (NM_030962.1,3031-3049).
cttttcagttgattaaggt

SEQ ID NO: 395796 - DNA, 19 bp, Homo sapiens
  siRNA target sequence for CMT4B2 (NM_030962.1,3041-3059).
gattaaggtagcatttgat

SEQ ID NO: 395797 - DNA, 19 bp, Homo sapiens
  siRNA target sequence for CMT4B2 (NM_030962.1,3075-3093).
gaagtagtagagatcttta

SEQ ID NO: 395798 - DNA, 19 bp, Homo sapiens
  siRNA target sequence for CMT4B2 (NM_030962.1,3078-3096).
gtagtagagatctttaaga

SEQ ID NO: 395799 - DNA, 19 bp, Homo sapiens
  siRNA target sequence for CMT4B2 (NM_030962.1,3104-3122).
gatgaagttccgttatcct

SEQ ID NO: 395800 - DNA, 19 bp, Homo sapiens
  siRNA target sequence for CMT4B2 (NM_030962.1,3114-3132).
cgttatcctcagtccattt

SEQ ID NO: 395801 - DNA, 19 bp, Homo sapiens
  siRNA target sequence for CMT4B2 (NM_030962.1,3159-3177).
caaactaccccacaaataa

SEQ ID NO: 395802 - DNA, 19 bp, Homo sapiens
  siRNA target sequence for CMT4B2 (NM_030962.1,3163-3181).
ctaccccacaaataatttt

SEQ ID NO: 395803 - DNA, 19 bp, Homo sapiens
  siRNA target sequence for CMT4B2 (NM_030962.1,3213-3231).
cgtaccttctcaaaaacaa

SEQ ID NO: 395804 - DNA, 19 bp, Homo sapiens
  siRNA target sequence for CMT4B2 (NM_030962.1,3402-3420).
gcctccgagaagtctacaa

SEQ ID NO: 395805 - DNA, 19 bp, Homo sapiens
  siRNA target sequence for CMT4B2 (NM_030962.1,3403-3421).
cctccgagaagtctacaat

SEQ ID NO: 395806 - DNA, 19 bp, Homo sapiens
  siRNA target sequence for CMT4B2 (NM_030962.1,3442-3460).
cttgtttcagagactatca

SEQ ID NO: 395807 - DNA, 19 bp, Homo sapiens
  siRNA target sequence for CMT4B2 (NM_030962.1,3453-3471).
gactatcagcgtttaggtt

SEQ ID NO: 395808 - DNA, 19 bp, Homo sapiens
  siRNA target sequence for CMT4B2 (NM_030962.1,3455-3473).
ctatcagcgtttaggttta

SEQ ID NO: 395809 - DNA, 19 bp, Homo sapiens
  siRNA target sequence for CMT4B2 (NM_030962.1,3459-3477).
cagcgtttaggtttaggaa

SEQ ID NO: 395810 - DNA, 19 bp, Homo sapiens
  siRNA target sequence for CMT4B2 (NM_030962.1,3498-3516).
cgttcaagacccgagtatt

SEQ ID NO: 395811 - DNA, 19 bp, Homo sapiens
  siRNA target sequence for CMT4B2 (NM_030962.1,3499-3517).
gttcaagacccgagtattt

SEQ ID NO: 395812 - DNA, 19 bp, Homo sapiens
  siRNA target sequence for CMT4B2 (NM_030962.1,3505-3523).
gacccgagtattttagaat

SEQ ID NO: 395813 - DNA, 19 bp, Homo sapiens
  siRNA target sequence for CMT4B2 (NM_030962.1,3509-3527).
cgagtattttagaattact

SEQ ID NO: 395814 - DNA, 19 bp, Homo sapiens
  siRNA target sequence for CMT4B2 (NM_030962.1,3530-3548).
ctccaacaggatgtattca

SEQ ID NO: 395815 - DNA, 19 bp, Homo sapiens
  siRNA target sequence for CMT4B2 (NM_030962.1,3532-3550).
ccaacaggatgtattcact

SEQ ID NO: 395816 - DNA, 19 bp, Homo sapiens
  siRNA target sequence for CMT4B2 (NM_030962.1,3557-3575).
gagctatcctggcctttta

SEQ ID NO: 395817 - DNA, 19 bp, Homo sapiens
  siRNA target sequence for CMT4B2 (NM_030962.1,3559-3577).
gctatcctggccttttagt

SEQ ID NO: 395818 - DNA, 19 bp, Homo sapiens
  siRNA target sequence for CMT4B2 (NM_030962.1,3599-3617).
cagtagtttaccaagagta

SEQ ID NO: 395819 - DNA, 19 bp, Homo sapiens
  siRNA target sequence for CMT4B2 (NM_030962.1,3635-3653).
caatcgcctgcctgttgta

SEQ ID NO: 395820 - DNA, 19 bp, Homo sapiens
  siRNA target sequence for CMT4B2 (NM_030962.1,3639-3657).
cgcctgcctgttgtatgtt

SEQ ID NO: 395821 - DNA, 19 bp, Homo sapiens
  siRNA target sequence for CMT4B2 (NM_030962.1,3714-3732).
ggagtcgttggtcttttca

SEQ ID NO: 395822 - DNA, 19 bp, Homo sapiens
  siRNA target sequence for CMT4B2 (NM_030962.1,3715-3733).
gagtcgttggtcttttcaa

SEQ ID NO: 395823 - DNA, 19 bp, Homo sapiens
  siRNA target sequence for CMT4B2 (NM_030962.1,3717-3735).
gtcgttggtcttttcaaat

SEQ ID NO: 395824 - DNA, 19 bp, Homo sapiens
  siRNA target sequence for CMT4B2 (NM_030962.1,3806-3824).
cttgcaagccttactgaat

SEQ ID NO: 395825 - DNA, 19 bp, Homo sapiens
  siRNA target sequence for CMT4B2 (NM_030962.1,3815-3833).
cttactgaatgctgtttct

SEQ ID NO: 395826 - DNA, 19 bp, Homo sapiens
  siRNA target sequence for CMT4B2 (NM_030962.1,3940-3958).
ctccaacatccttcattga

SEQ ID NO: 395827 - DNA, 19 bp, Homo sapiens
  siRNA target sequence for CMT4B2 (NM_030962.1,3943-3961).
caacatccttcattgatgt

SEQ ID NO: 395828 - DNA, 19 bp, Homo sapiens
  siRNA target sequence for CMT4B2 (NM_030962.1,3987-4005).
cactcggcctccttcagta

SEQ ID NO: 395829 - DNA, 19 bp, Homo sapiens
  siRNA target sequence for CMT4B2 (NM_030962.1,4009-4027).
gcagctacctacaaaacca

SEQ ID NO: 395830 - DNA, 19 bp, Homo sapiens
  siRNA target sequence for CMT4B2 (NM_030962.1,4062-4080).
ggtgaaaagtcgcaactaa

SEQ ID NO: 395831 - DNA, 19 bp, Homo sapiens
  siRNA target sequence for CMT4B2 (NM_030962.1,4091-4109).
ggtagaatttgctttaaat

SEQ ID NO: 395832 - DNA, 19 bp, Homo sapiens
  siRNA target sequence for CMT4B2 (NM_030962.1,4146-4164).
caagtgaaagccagtttta

SEQ ID NO: 395833 - DNA, 19 bp, Homo sapiens
  siRNA target sequence for CMT4B2 (NM_030962.1,4277-4295).
gctggctgtggttgtatca

SEQ ID NO: 395834 - DNA, 19 bp, Homo sapiens
  siRNA target sequence for CMT4B2 (NM_030962.1,4315-4333).
cctcagttttggtctgttt

SEQ ID NO: 395835 - DNA, 19 bp, Homo sapiens
  siRNA target sequence for CMT4B2 (NM_030962.1,4364-4382).
gacatccctggttcagtta

SEQ ID NO: 395836 - DNA, 19 bp, Homo sapiens
  siRNA target sequence for CMT4B2 (NM_030962.1,4509-4527).
gctccagtcttcttacagt

SEQ ID NO: 395837 - DNA, 19 bp, Homo sapiens
  siRNA target sequence for CMT4B2 (NM_030962.1,4513-4531).
cagtcttcttacagttctt

SEQ ID NO: 395838 - DNA, 19 bp, Homo sapiens
  siRNA target sequence for CMT4B2 (NM_030962.1,4548-4566).
gttcacaaccagtatccaa

SEQ ID NO: 395839 - DNA, 19 bp, Homo sapiens
  siRNA target sequence for CMT4B2 (NM_030962.1,4556-4574).
ccagtatccaactgagttt

SEQ ID NO: 395840 - DNA, 19 bp, Homo sapiens
  siRNA target sequence for CMT4B2 (NM_030962.1,4559-4577).
gtatccaactgagtttgaa

SEQ ID NO: 395841 - DNA, 19 bp, Homo sapiens
  siRNA target sequence for CMT4B2 (NM_030962.1,4563-4581).
ccaactgagtttgaattca

SEQ ID NO: 395842 - DNA, 19 bp, Homo sapiens
  siRNA target sequence for CMT4B2 (NM_030962.1,4575-4593).
gaattcaatctctattact

SEQ ID NO: 395843 - DNA, 19 bp, Homo sapiens
  siRNA target sequence for CMT4B2 (NM_030962.1,4619-4637).
gtctaatcgctttaaaaca

SEQ ID NO: 395844 - DNA, 19 bp, Homo sapiens
  siRNA target sequence for CMT4B2 (NM_030962.1,4636-4654).
catttctcctggattcaga

SEQ ID NO: 395845 - DNA, 19 bp, Homo sapiens
  siRNA target sequence for CMT4B2 (NM_030962.1,4651-4669).
cagactatgaaagattaga

SEQ ID NO: 395846 - DNA, 19 bp, Homo sapiens
  siRNA target sequence for CMT4B2 (NM_030962.1,4663-4681).
gattagagcacggaacttt

SEQ ID NO: 395847 - DNA, 19 bp, Homo sapiens
  siRNA target sequence for CMT4B2 (NM_030962.1,4674-4692).
ggaactttatttgatgata

SEQ ID NO: 395848 - DNA, 19 bp, Homo sapiens
  siRNA target sequence for CMT4B2 (NM_030962.1,4802-4820).
ggctctaaagcccaatgta

SEQ ID NO: 395849 - DNA, 19 bp, Homo sapiens
  siRNA target sequence for CMT4B2 (NM_030962.1,4803-4821).
gctctaaagcccaatgtaa

SEQ ID NO: 395850 - DNA, 19 bp, Homo sapiens
  siRNA target sequence for CMT4B2 (NM_030962.1,4824-4842).
gtctctagcctcaagaagt

SEQ ID NO: 395851 - DNA, 19 bp, Homo sapiens
  siRNA target sequence for CMT4B2 (NM_030962.1,4838-4856).
gaagtgggattactacata

SEQ ID NO: 395852 - DNA, 19 bp, Homo sapiens
  siRNA target sequence for CMT4B2 (NM_030962.1,4843-4861).
gggattactacatagaaga

SEQ ID NO: 395853 - DNA, 19 bp, Homo sapiens
  siRNA target sequence for CMT4B2 (NM_030962.1,4978-4996).
ggccatgctatgatgatgt

SEQ ID NO: 395854 - DNA, 19 bp, Homo sapiens
  siRNA target sequence for CMT4B2 (NM_030962.1,5016-5034).
gctctcaccagccttttca

SEQ ID NO: 395855 - DNA, 19 bp, Homo sapiens
  siRNA target sequence for CMT4B2 (NM_030962.1,5023-5041).
ccagccttttcagtgaaat

SEQ ID NO: 395856 - DNA, 19 bp, Homo sapiens
  siRNA target sequence for CMT4B2 (NM_030962.1,5102-5120).
ggtaaccgtggaccttaaa

SEQ ID NO: 395857 - DNA, 19 bp, Homo sapiens
  siRNA target sequence for CMT4B2 (NM_030962.1,5107-5125).
ccgtggaccttaaagaaga

SEQ ID NO: 395858 - DNA, 19 bp, Homo sapiens
  siRNA target sequence for CMT4B2 (NM_030962.1,5156-5174).
gtcgagatccccaggaatt

SEQ ID NO: 395859 - DNA, 19 bp, Homo sapiens
  siRNA target sequence for CMT4B2 (NM_030962.1,5158-5176).
cgagatccccaggaattgt

SEQ ID NO: 395860 - DNA, 19 bp, Homo sapiens
  siRNA target sequence for CMT4B2 (NM_030962.1,5238-5256).
ggggaggaacagaattcca

SEQ ID NO: 395861 - DNA, 19 bp, Homo sapiens
  siRNA target sequence for CMT4B2 (NM_030962.1,5297-5315).
gctctatagccagtataca

SEQ ID NO: 395862 - DNA, 19 bp, Homo sapiens
  siRNA target sequence for CMT4B2 (NM_030962.1,5298-5316).
ctctatagccagtatacat

SEQ ID NO: 395863 - DNA, 19 bp, Homo sapiens
  siRNA target sequence for CMT4B2 (NM_030962.1,5336-5354).
gtcctttgagggaacactt

SEQ ID NO: 395864 - DNA, 19 bp, Homo sapiens
  siRNA target sequence for CMT4B2 (NM_030962.1,5338-5356).
cctttgagggaacacttta

SEQ ID NO: 395865 - DNA, 19 bp, Homo sapiens
  siRNA target sequence for CMT4B2 (NM_030962.1,5458-5476).
gtaaaggccacattgatct

SEQ ID NO: 395866 - DNA, 19 bp, Homo sapiens
  siRNA target sequence for CMT4B2 (NM_030962.1,5533-5551).
caagtgacaaggctttctt

SEQ ID NO: 395867 - DNA, 19 bp, Homo sapiens
  siRNA target sequence for CMT4B2 (NM_030962.1,5561-5579).
gaccagcaaacgtgtgtat

SEQ ID NO: 395868 - DNA, 19 bp, Homo sapiens
  siRNA target sequence for CMT4B2 (NM_030962.1,5563-5581).
ccagcaaacgtgtgtataa

SEQ ID NO: 395869 - DNA, 19 bp, Homo sapiens
  siRNA target sequence for CMT4B2 (NM_030962.1,5566-5584).
gcaaacgtgtgtataactt

SEQ ID NO: 395870 - DNA, 19 bp, Homo sapiens
  siRNA target sequence for CMT4B2 (NM_030962.1,5622-5640).
gacaagatccagagttgta

SEQ ID NO: 395871 - DNA, 19 bp, Homo sapiens
  siRNA target sequence for RNF146 (NM_030963.2,402-420).
ggctggctgtggtgaaatt

SEQ ID NO: 395872 - DNA, 19 bp, Homo sapiens
  siRNA target sequence for RNF146 (NM_030963.2,407-425).
gctgtggtgaaattgatca

SEQ ID NO: 395873 - DNA, 19 bp, Homo sapiens
  siRNA target sequence for RNF146 (NM_030963.2,457-475).
gcgaacgagtcctgttcta

SEQ ID NO: 395874 - DNA, 19 bp, Homo sapiens
  siRNA target sequence for RNF146 (NM_030963.2,458-476).
cgaacgagtcctgttctaa

SEQ ID NO: 395875 - DNA, 19 bp, Homo sapiens
  siRNA target sequence for RNF146 (NM_030963.2,459-477).
gaacgagtcctgttctaat

SEQ ID NO: 395876 - DNA, 19 bp, Homo sapiens
  siRNA target sequence for RNF146 (NM_030963.2,555-573).
gcacgttttctgctatcta

SEQ ID NO: 395877 - DNA, 19 bp, Homo sapiens
  siRNA target sequence for RNF146 (NM_030963.2,556-574).
cacgttttctgctatctat

SEQ ID NO: 395878 - DNA, 19 bp, Homo sapiens
  siRNA target sequence for RNF146 (NM_030963.2,700-718).
ggtgaatatgcatggtatt

SEQ ID NO: 395879 - DNA, 19 bp, Homo sapiens
  siRNA target sequence for RNF146 (NM_030963.2,701-719).
gtgaatatgcatggtatta

SEQ ID NO: 395880 - DNA, 19 bp, Homo sapiens
  siRNA target sequence for RNF146 (NM_030963.2,747-765).
cgatgagcgcactagtaga

SEQ ID NO: 395881 - DNA, 19 bp, Homo sapiens
  siRNA target sequence for RNF146 (NM_030963.2,778-796).
gctttttccaaaggtaaaa

SEQ ID NO: 395882 - DNA, 19 bp, Homo sapiens
  siRNA target sequence for RNF146 (NM_030963.2,828-846).
gtatgtcgctgatcttgaa

SEQ ID NO: 395883 - DNA, 19 bp, Homo sapiens
  siRNA target sequence for RNF146 (NM_030963.2,877-895).
ggacgtcgcaggaagatta

SEQ ID NO: 395884 - DNA, 19 bp, Homo sapiens
  siRNA target sequence for RNF146 (NM_030963.2,878-896).
gacgtcgcaggaagattaa

SEQ ID NO: 395885 - DNA, 19 bp, Homo sapiens
  siRNA target sequence for RNF146 (NM_030963.2,891-909).
gattaagcgagatataata

SEQ ID NO: 395886 - DNA, 19 bp, Homo sapiens
  siRNA target sequence for RNF146 (NM_030963.2,897-915).
gcgagatataatagatata

SEQ ID NO: 395887 - DNA, 19 bp, Homo sapiens
  siRNA target sequence for RNF146 (NM_030963.2,941-959).
ggctagactgtgatgctaa

SEQ ID NO: 395888 - DNA, 19 bp, Homo sapiens
  siRNA target sequence for RNF146 (NM_030963.2,991-1009).
gacggagcggacagtgtat

SEQ ID NO: 395889 - DNA, 19 bp, Homo sapiens
  siRNA target sequence for RNF146 (NM_030963.2,993-1011).
cggagcggacagtgtatca

SEQ ID NO: 395890 - DNA, 19 bp, Homo sapiens
  siRNA target sequence for RNF146 (NM_030963.2,1056-1074).
gcccctaacatcagtagat

SEQ ID NO: 395891 - DNA, 19 bp, Homo sapiens
  siRNA target sequence for RNF146 (NM_030963.2,1287-1305).
ggatgtatctgcagttgtt

SEQ ID NO: 395892 - DNA, 19 bp, Homo sapiens
  siRNA target sequence for RNF146 (NM_030963.2,1324-1342).
caacagagacttttggttt

SEQ ID NO: 395893 - DNA, 19 bp, Homo sapiens
  siRNA target sequence for RNF146 (NM_030963.2,1447-1465).
gatggacagtgcacagtaa

SEQ ID NO: 395894 - DNA, 19 bp, Homo sapiens
  siRNA target sequence for C1QTNF1 (NM_030968.2,489-507).
ccgagagggctgaagaaca

SEQ ID NO: 395895 - DNA, 19 bp, Homo sapiens
  siRNA target sequence for C1QTNF1 (NM_030968.2,602-620).
gccgtgccccagatcaaca

SEQ ID NO: 395896 - DNA, 19 bp, Homo sapiens
  siRNA target sequence for C1QTNF1 (NM_030968.2,603-621).
ccgtgccccagatcaacat

SEQ ID NO: 395897 - DNA, 19 bp, Homo sapiens
  siRNA target sequence for C1QTNF1 (NM_030968.2,608-626).
ccccagatcaacatcacta

SEQ ID NO: 395898 - DNA, 19 bp, Homo sapiens
  siRNA target sequence for C1QTNF1 (NM_030968.2,611-629).
cagatcaacatcactatct

SEQ ID NO: 395899 - DNA, 19 bp, Homo sapiens
  siRNA target sequence for C1QTNF1 (NM_030968.2,616-634).
caacatcactatcttgaaa

SEQ ID NO: 395900 - DNA, 19 bp, Homo sapiens
  siRNA target sequence for MGC5384 (NM_030972.2,1534-1552).
ctttcacgtggcattcaca

SEQ ID NO: 395901 - DNA, 19 bp, Homo sapiens
  siRNA target sequence for MGC5384 (NM_030972.2,1551-1569).
cagctggctcgacatagaa

SEQ ID NO: 395902 - DNA, 19 bp, Homo sapiens
  siRNA target sequence for MGC5384 (NM_030972.2,1553-1571).
gctggctcgacatagaaga

SEQ ID NO: 395903 - DNA, 19 bp, Homo sapiens
  siRNA target sequence for MGC5384 (NM_030972.2,1554-1572).
ctggctcgacatagaagaa

SEQ ID NO: 395904 - DNA, 19 bp, Homo sapiens
  siRNA target sequence for MGC5384 (NM_030972.2,1556-1574).
ggctcgacatagaagaatt

SEQ ID NO: 395905 - DNA, 19 bp, Homo sapiens
  siRNA target sequence for MGC5384 (NM_030972.2,2130-2148).
cgcaggtcatcccttcatt

SEQ ID NO: 395906 - DNA, 19 bp, Homo sapiens
  siRNA target sequence for MGC5384 (NM_030972.2,2214-2232).
cactgctcatcccttatat

SEQ ID NO: 395907 - DNA, 19 bp, Homo sapiens
  siRNA target sequence for TCBAP0758 (NM_030973.1,88-106).
cgacgtggtgtttgtgatt

SEQ ID NO: 395908 - DNA, 19 bp, Homo sapiens
  siRNA target sequence for TCBAP0758 (NM_030973.1,169-187).
catcgagtattttaatggt

SEQ ID NO: 395909 - DNA, 19 bp, Homo sapiens
  siRNA target sequence for TCBAP0758 (NM_030973.1,272-290).
cccgagtcctacgtacaat

SEQ ID NO: 395910 - DNA, 19 bp, Homo sapiens
  siRNA target sequence for TCBAP0758 (NM_030973.1,274-292).
cgagtcctacgtacaatgt

SEQ ID NO: 395911 - DNA, 19 bp, Homo sapiens
  siRNA target sequence for TCBAP0758 (NM_030973.1,327-345).
cctggctcgatggcattaa

SEQ ID NO: 395912 - DNA, 19 bp, Homo sapiens
  siRNA target sequence for TCBAP0758 (NM_030973.1,332-350).
ctcgatggcattaagttca

SEQ ID NO: 395913 - DNA, 19 bp, Homo sapiens
  siRNA target sequence for TCBAP0758 (NM_030973.1,528-546).
gatgcacaactgagaatct

SEQ ID NO: 395914 - DNA, 19 bp, Homo sapiens
  siRNA target sequence for TCBAP0758 (NM_030973.1,1219-1237).
gtcagtctccaataagctt

SEQ ID NO: 395915 - DNA, 19 bp, Homo sapiens
  siRNA target sequence for TCBAP0758 (NM_030973.1,1326-1344).
gccaggtctacgtgaatca

SEQ ID NO: 395916 - DNA, 19 bp, Homo sapiens
  siRNA target sequence for ARPC5L (NM_030978.1,134-152).
cgaatttgacgagaacaaa

SEQ ID NO: 395917 - DNA, 19 bp, Homo sapiens
  siRNA target sequence for ARPC5L (NM_030978.1,242-260).
catgcttcgggcattccat

SEQ ID NO: 395918 - DNA, 19 bp, Homo sapiens
  siRNA target sequence for ARPC5L (NM_030978.1,281-299).
cgtcaacaccaagaatcaa

SEQ ID NO: 395919 - DNA, 19 bp, Homo sapiens
  siRNA target sequence for ARPC5L (NM_030978.1,336-354).
gtgctcacaaacttcaaga

SEQ ID NO: 395920 - DNA, 19 bp, Homo sapiens
  siRNA target sequence for ARPC5L (NM_030978.1,397-415).
gcgttgacttgttaatgaa

SEQ ID NO: 395921 - DNA, 19 bp, Homo sapiens
  siRNA target sequence for ARPC5L (NM_030978.1,499-517).
gaggactaggctccattat

SEQ ID NO: 395922 - DNA, 19 bp, Homo sapiens
  siRNA target sequence for ARPC5L (NM_030978.1,501-519).
ggactaggctccattataa

SEQ ID NO: 395923 - DNA, 19 bp, Homo sapiens
  siRNA target sequence for FLJ12525 (NM_031206.2,228-246).
ggaccaggtgacggtttat

SEQ ID NO: 395924 - DNA, 19 bp, Homo sapiens
  siRNA target sequence for FLJ12525 (NM_031206.2,432-450).
ggtcaggtttgtgaatctt

SEQ ID NO: 395925 - DNA, 19 bp, Homo sapiens
  siRNA target sequence for FLJ12525 (NM_031206.2,433-451).
gtcaggtttgtgaatctta

SEQ ID NO: 395926 - DNA, 19 bp, Homo sapiens
  siRNA target sequence for FLJ12525 (NM_031206.2,494-512).
gtctggctcaagaggtaaa

SEQ ID NO: 395927 - DNA, 19 bp, Homo sapiens
  siRNA target sequence for FLJ12525 (NM_031206.2,496-514).
ctggctcaagaggtaaata

SEQ ID NO: 395928 - DNA, 19 bp, Homo sapiens
  siRNA target sequence for FLJ12525 (NM_031206.2,498-516).
ggctcaagaggtaaatatt

SEQ ID NO: 395929 - DNA, 19 bp, Homo sapiens
  siRNA target sequence for FLJ12525 (NM_031206.2,582-600).
ccgcagaggctgctacttt

SEQ ID NO: 395930 - DNA, 19 bp, Homo sapiens
  siRNA target sequence for FLJ12525 (NM_031206.2,584-602).
gcagaggctgctactttgt

SEQ ID NO: 395931 - DNA, 19 bp, Homo sapiens
  siRNA target sequence for FLJ12525 (NM_031206.2,613-631).
ctccagaagacctattggt

SEQ ID NO: 395932 - DNA, 19 bp, Homo sapiens
  siRNA target sequence for FLJ12525 (NM_031206.2,822-840).
cgaagaggtggattctcat

SEQ ID NO: 395933 - DNA, 19 bp, Homo sapiens
  siRNA target sequence for FLJ12525 (NM_031206.2,828-846).
ggtggattctcattgcaaa

SEQ ID NO: 395934 - DNA, 19 bp, Homo sapiens
  siRNA target sequence for FLJ12525 (NM_031206.2,883-901).
cgagaactgctggtatcat

SEQ ID NO: 395935 - DNA, 19 bp, Homo sapiens
  siRNA target sequence for FLJ12525 (NM_031206.2,884-902).
gagaactgctggtatcata

SEQ ID NO: 395936 - DNA, 19 bp, Homo sapiens
  siRNA target sequence for FLJ12525 (NM_031206.2,922-940).
gtgctggagaaatttaggt

SEQ ID NO: 395937 - DNA, 19 bp, Homo sapiens
  siRNA target sequence for FLJ12525 (NM_031206.2,924-942).
gctggagaaatttaggtat

SEQ ID NO: 395938 - DNA, 19 bp, Homo sapiens
  siRNA target sequence for FLJ12525 (NM_031206.2,952-970).
gccattaaggcgtggaata

SEQ ID NO: 395939 - DNA, 19 bp, Homo sapiens
  siRNA target sequence for FLJ12525 (NM_031206.2,953-971).
ccattaaggcgtggaataa

SEQ ID NO: 395940 - DNA, 19 bp, Homo sapiens
  siRNA target sequence for FLJ12525 (NM_031206.2,972-990).
cccgtccccacgtgtagaa

SEQ ID NO: 395941 - DNA, 19 bp, Homo sapiens
  siRNA target sequence for FLJ12525 (NM_031206.2,973-991).
ccgtccccacgtgtagaat

SEQ ID NO: 395942 - DNA, 19 bp, Homo sapiens
  siRNA target sequence for FLJ12525 (NM_031206.2,975-993).
gtccccacgtgtagaatgt

SEQ ID NO: 395943 - DNA, 19 bp, Homo sapiens
  siRNA target sequence for FLJ12525 (NM_031206.2,1157-1175).
caaagtcacacaaaaacgt

SEQ ID NO: 395944 - DNA, 19 bp, Homo sapiens
  siRNA target sequence for FLJ12525 (NM_031206.2,1378-1396).
cggaatgctcgccgatttt

SEQ ID NO: 395945 - DNA, 19 bp, Homo sapiens
  siRNA target sequence for FLJ12525 (NM_031206.2,1423-1441).
ggctggaggctgttcaact

SEQ ID NO: 395946 - DNA, 19 bp, Homo sapiens
  siRNA target sequence for FLJ12525 (NM_031206.2,1513-1531).
ctccttcggatcatcttca

SEQ ID NO: 395947 - DNA, 19 bp, Homo sapiens
  siRNA target sequence for FLJ12525 (NM_031206.2,1515-1533).
ccttcggatcatcttcaaa

SEQ ID NO: 395948 - DNA, 19 bp, Homo sapiens
  siRNA target sequence for FLJ12525 (NM_031206.2,1576-1594).
ctgcgcatctgttccattt

SEQ ID NO: 395949 - DNA, 19 bp, Homo sapiens
  siRNA target sequence for FLJ12525 (NM_031206.2,1578-1596).
gcgcatctgttccatttat

SEQ ID NO: 395950 - DNA, 19 bp, Homo sapiens
  siRNA target sequence for FLJ12525 (NM_031206.2,1647-1665).
cattgggaagtctccatat

SEQ ID NO: 395951 - DNA, 19 bp, Homo sapiens
  siRNA target sequence for FLJ12525 (NM_031206.2,1653-1671).
gaagtctccatatacacta

SEQ ID NO: 395952 - DNA, 19 bp, Homo sapiens
  siRNA target sequence for FLJ12525 (NM_031206.2,1669-1687).
ctagacagcctgtattgga

SEQ ID NO: 395953 - DNA, 19 bp, Homo sapiens
  siRNA target sequence for FLJ12525 (NM_031206.2,1709-1727).
gcttcgggtctgaagcaaa

SEQ ID NO: 395954 - DNA, 19 bp, Homo sapiens
  siRNA target sequence for FLJ12525 (NM_031206.2,1746-1764).
gcagggcagtgttaatgat

SEQ ID NO: 395955 - DNA, 19 bp, Homo sapiens
  siRNA target sequence for FLJ12525 (NM_031206.2,1927-1945).
cccactgccgagaatgcta

SEQ ID NO: 395956 - DNA, 19 bp, Homo sapiens
  siRNA target sequence for FLJ12525 (NM_031206.2,2007-2025).
cgtgcgatgggacacattt

SEQ ID NO: 395957 - DNA, 19 bp, Homo sapiens
  siRNA target sequence for FLJ12525 (NM_031206.2,2079-2097).
gaattatgacaccatgtat

SEQ ID NO: 395958 - DNA, 19 bp, Homo sapiens
  siRNA target sequence for FLJ12525 (NM_031206.2,2125-2143).
cggctggaaccctcaacat

SEQ ID NO: 395959 - DNA, 19 bp, Homo sapiens
  siRNA target sequence for HT036 (NM_031207.2,409-427).
cccagggagctgatcgaat

SEQ ID NO: 395960 - DNA, 19 bp, Homo sapiens
  siRNA target sequence for HT036 (NM_031207.2,410-428).
ccagggagctgatcgaata

SEQ ID NO: 395961 - DNA, 19 bp, Homo sapiens
  siRNA target sequence for HT036 (NM_031207.2,413-431).
gggagctgatcgaatagca

SEQ ID NO: 395962 - DNA, 19 bp, Homo sapiens
  siRNA target sequence for HT036 (NM_031207.2,572-590).
gcaggcggcagccatctta

SEQ ID NO: 395963 - DNA, 19 bp, Homo sapiens
  siRNA target sequence for HT036 (NM_031207.2,576-594).
gcggcagccatcttacaga

SEQ ID NO: 395964 - DNA, 19 bp, Homo sapiens
  siRNA target sequence for HT036 (NM_031207.2,604-622).
gacccaacctccaattaca

SEQ ID NO: 395965 - DNA, 19 bp, Homo sapiens
  siRNA target sequence for HT036 (NM_031207.2,607-625).
ccaacctccaattacaaat

SEQ ID NO: 395966 - DNA, 19 bp, Homo sapiens
  siRNA target sequence for HT036 (NM_031207.2,655-673).
ggaacctgacaggaaacat

SEQ ID NO: 395967 - DNA, 19 bp, Homo sapiens
  siRNA target sequence for HT036 (NM_031207.2,755-773).
gaatttcccctatctgttt

SEQ ID NO: 395968 - DNA, 19 bp, Homo sapiens
  siRNA target sequence for AF311304 (NM_031214.1,48-66).
gtcatgccttctaaaaaga

SEQ ID NO: 395969 - DNA, 19 bp, Homo sapiens
  siRNA target sequence for AF311304 (NM_031214.1,77-95).
ggggagtgggcaaaatgtt

SEQ ID NO: 395970 - DNA, 19 bp, Homo sapiens
  siRNA target sequence for AF311304 (NM_031214.1,79-97).
ggagtgggcaaaatgttga

SEQ ID NO: 395971 - DNA, 19 bp, Homo sapiens
  siRNA target sequence for AF311304 (NM_031214.1,80-98).
gagtgggcaaaatgttgat

SEQ ID NO: 395972 - DNA, 19 bp, Homo sapiens
  siRNA target sequence for AF311304 (NM_031214.1,119-137).
caaagcatatcaattgaaa

SEQ ID NO: 395973 - DNA, 19 bp, Homo sapiens
  siRNA target sequence for SEC13L (NM_031216.2,201-219).
gcgatcagagcgttaaggt

SEQ ID NO: 395974 - DNA, 19 bp, Homo sapiens
  siRNA target sequence for SEC13L (NM_031216.2,211-229).
cgttaaggtctgggataaa

SEQ ID NO: 395975 - DNA, 19 bp, Homo sapiens
  siRNA target sequence for SEC13L (NM_031216.2,220-238).
ctgggataaaagtgaaagt

SEQ ID NO: 395976 - DNA, 19 bp, Homo sapiens
  siRNA target sequence for SEC13L (NM_031216.2,268-286).
gacacatagtggatctgta

SEQ ID NO: 395977 - DNA, 19 bp, Homo sapiens
  siRNA target sequence for SEC13L (NM_031216.2,297-315).
catgggcccatcctgaatt

SEQ ID NO: 395978 - DNA, 19 bp, Homo sapiens
  siRNA target sequence for SEC13L (NM_031216.2,431-449).
ctggtggatagcagaacat

SEQ ID NO: 395979 - DNA, 19 bp, Homo sapiens
  siRNA target sequence for SEC13L (NM_031216.2,474-492).
ccaagcacatgggtcttat

SEQ ID NO: 395980 - DNA, 19 bp, Homo sapiens
  siRNA target sequence for SEC13L (NM_031216.2,501-519).
cctgttccgcagatggtat

SEQ ID NO: 395981 - DNA, 19 bp, Homo sapiens
  siRNA target sequence for SEC13L (NM_031216.2,502-520).
ctgttccgcagatggtata

SEQ ID NO: 395982 - DNA, 19 bp, Homo sapiens
  siRNA target sequence for SEC13L (NM_031216.2,504-522).
gttccgcagatggtatagt

SEQ ID NO: 395983 - DNA, 19 bp, Homo sapiens
  siRNA target sequence for SEC13L (NM_031216.2,508-526).
cgcagatggtatagtaaga

SEQ ID NO: 395984 - DNA, 19 bp, Homo sapiens
  siRNA target sequence for SEC13L (NM_031216.2,512-530).
gatggtatagtaagaatct

SEQ ID NO: 395985 - DNA, 19 bp, Homo sapiens
  siRNA target sequence for SEC13L (NM_031216.2,516-534).
gtatagtaagaatctatga

SEQ ID NO: 395986 - DNA, 19 bp, Homo sapiens
  siRNA target sequence for SEC13L (NM_031216.2,529-547).
ctatgaggcaccagatgtt

SEQ ID NO: 395987 - DNA, 19 bp, Homo sapiens
  siRNA target sequence for SEC13L (NM_031216.2,535-553).
ggcaccagatgttatgaat

SEQ ID NO: 395988 - DNA, 19 bp, Homo sapiens
  siRNA target sequence for SEC13L (NM_031216.2,537-555).
caccagatgttatgaatct

SEQ ID NO: 395989 - DNA, 19 bp, Homo sapiens
  siRNA target sequence for SEC13L (NM_031216.2,572-590).
cagcatgagatctcatgta

SEQ ID NO: 395990 - DNA, 19 bp, Homo sapiens
  siRNA target sequence for SEC13L (NM_031216.2,649-667).
gatcgccgtaggaagtgat

SEQ ID NO: 395991 - DNA, 19 bp, Homo sapiens
  siRNA target sequence for SEC13L (NM_031216.2,684-702).
caatggccaaggttcagat

SEQ ID NO: 395992 - DNA, 19 bp, Homo sapiens
  siRNA target sequence for SEC13L (NM_031216.2,690-708).
ccaaggttcagatttttga

SEQ ID NO: 395993 - DNA, 19 bp, Homo sapiens
  siRNA target sequence for SEC13L (NM_031216.2,767-785).
cctgttcatgatattgcat

SEQ ID NO: 395994 - DNA, 19 bp, Homo sapiens
  siRNA target sequence for SEC13L (NM_031216.2,822-840).
caatagcgaccaaagatgt

SEQ ID NO: 395995 - DNA, 19 bp, Homo sapiens
  siRNA target sequence for SEC13L (NM_031216.2,888-906).
gtgggccaacaaagtttga

SEQ ID NO: 395996 - DNA, 19 bp, Homo sapiens
  siRNA target sequence for SEC13L (NM_031216.2,890-908).
gggccaacaaagtttgaaa

SEQ ID NO: 395997 - DNA, 19 bp, Homo sapiens
  siRNA target sequence for SEC13L (NM_031216.2,891-909).
ggccaacaaagtttgaaat

SEQ ID NO: 395998 - DNA, 19 bp, Homo sapiens
  siRNA target sequence for SEC13L (NM_031216.2,897-915).
caaagtttgaaatccatat

SEQ ID NO: 395999 - DNA, 19 bp, Homo sapiens
  siRNA target sequence for SEC13L (NM_031216.2,920-938).
gctcagttcgataatcata

SEQ ID NO: 396000 - DNA, 19 bp, Homo sapiens
  siRNA target sequence for SEC13L (NM_031216.2,921-939).
ctcagttcgataatcataa

SEQ ID NO: 396001 - DNA, 19 bp, Homo sapiens
  siRNA target sequence for SEC13L (NM_031216.2,923-941).
cagttcgataatcataatt

SEQ ID NO: 396002 - DNA, 19 bp, Homo sapiens
  siRNA target sequence for SEC13L (NM_031216.2,925-943).
gttcgataatcataattct

SEQ ID NO: 396003 - DNA, 19 bp, Homo sapiens
  siRNA target sequence for SEC13L (NM_031216.2,949-967).
ctggcgagtgagttggaat

SEQ ID NO: 396004 - DNA, 19 bp, Homo sapiens
  siRNA target sequence for SEC13L (NM_031216.2,951-969).
ggcgagtgagttggaatat

SEQ ID NO: 396005 - DNA, 19 bp, Homo sapiens
  siRNA target sequence for SEC13L (NM_031216.2,952-970).
gcgagtgagttggaatata

SEQ ID NO: 396006 - DNA, 19 bp, Homo sapiens
  siRNA target sequence for SEC13L (NM_031216.2,953-971).
cgagtgagttggaatataa

SEQ ID NO: 396007 - DNA, 19 bp, Homo sapiens
  siRNA target sequence for SEC13L (NM_031216.2,1001-1019).
gatgggtgtgtaagattgt

SEQ ID NO: 396008 - DNA, 19 bp, Homo sapiens
  siRNA target sequence for SEC13L (NM_031216.2,1020-1038).
ggaaagctaattatatgga

SEQ ID NO: 396009 - DNA, 19 bp, Homo sapiens
  siRNA target sequence for SEC13L (NM_031216.2,1099-1117).
gcagggaacctcaaatcct

SEQ ID NO: 396010 - DNA, 19 bp, Homo sapiens
  siRNA target sequence for TEX15 (NM_031271.2,23-41).
gtgttaatggtgacctttt

SEQ ID NO: 396011 - DNA, 19 bp, Homo sapiens
  siRNA target sequence for TEX15 (NM_031271.2,34-52).
gaccttttgttaaattgga

SEQ ID NO: 396012 - DNA, 19 bp, Homo sapiens
  siRNA target sequence for TEX15 (NM_031271.2,50-68).
ggacaagtcttaaaaatat

SEQ ID NO: 396013 - DNA, 19 bp, Homo sapiens
  siRNA target sequence for TEX15 (NM_031271.2,191-209).
gtagtactgcaggcttaaa

SEQ ID NO: 396014 - DNA, 19 bp, Homo sapiens
  siRNA target sequence for TEX15 (NM_031271.2,200-218).
caggcttaaatgaggtttt

SEQ ID NO: 396015 - DNA, 19 bp, Homo sapiens
  siRNA target sequence for TEX15 (NM_031271.2,211-229).
gaggttttgcaatttgaga

SEQ ID NO: 396016 - DNA, 19 bp, Homo sapiens
  siRNA target sequence for TEX15 (NM_031271.2,231-249).
gagttcagataatgttaat

SEQ ID NO: 396017 - DNA, 19 bp, Homo sapiens
  siRNA target sequence for TEX15 (NM_031271.2,333-351).
ggataccccttgctttaaa

SEQ ID NO: 396018 - DNA, 19 bp, Homo sapiens
  siRNA target sequence for TEX15 (NM_031271.2,358-376).
gttaatgattcacaatctt

SEQ ID NO: 396019 - DNA, 19 bp, Homo sapiens
  siRNA target sequence for TEX15 (NM_031271.2,395-413).
ctgaggactatgactgtat

SEQ ID NO: 396020 - DNA, 19 bp, Homo sapiens
  siRNA target sequence for TEX15 (NM_031271.2,408-426).
ctgtatacctcccaataaa

SEQ ID NO: 396021 - DNA, 19 bp, Homo sapiens
  siRNA target sequence for TEX15 (NM_031271.2,410-428).
gtatacctcccaataaagt

SEQ ID NO: 396022 - DNA, 19 bp, Homo sapiens
  siRNA target sequence for TEX15 (NM_031271.2,416-434).
ctcccaataaagttaccat

SEQ ID NO: 396023 - DNA, 19 bp, Homo sapiens
  siRNA target sequence for TEX15 (NM_031271.2,446-464).
gtaaggaccaaggtaattt

SEQ ID NO: 396024 - DNA, 19 bp, Homo sapiens
  siRNA target sequence for TEX15 (NM_031271.2,549-567).
ggagtccggtaatgcttat

SEQ ID NO: 396025 - DNA, 19 bp, Homo sapiens
  siRNA target sequence for TEX15 (NM_031271.2,552-570).
gtccggtaatgcttataca

SEQ ID NO: 396026 - DNA, 19 bp, Homo sapiens
  siRNA target sequence for TEX15 (NM_031271.2,554-572).
ccggtaatgcttatacaaa

SEQ ID NO: 396027 - DNA, 19 bp, Homo sapiens
  siRNA target sequence for TEX15 (NM_031271.2,555-573).
cggtaatgcttatacaaaa

SEQ ID NO: 396028 - DNA, 19 bp, Homo sapiens
  siRNA target sequence for TEX15 (NM_031271.2,803-821).
caaaaatcagtccaataga

SEQ ID NO: 396029 - DNA, 19 bp, Homo sapiens
  siRNA target sequence for TEX15 (NM_031271.2,932-950).
ctacatctaccataaagga

SEQ ID NO: 396030 - DNA, 19 bp, Homo sapiens
  siRNA target sequence for TEX15 (NM_031271.2,954-972).
ggatgaactagatcatcta

SEQ ID NO: 396031 - DNA, 19 bp, Homo sapiens
  siRNA target sequence for TEX15 (NM_031271.2,964-982).
gatcatctagcattggaat

SEQ ID NO: 396032 - DNA, 19 bp, Homo sapiens
  siRNA target sequence for TEX15 (NM_031271.2,1041-1059).
gtatgagggtaacattcat

SEQ ID NO: 396033 - DNA, 19 bp, Homo sapiens
  siRNA target sequence for TEX15 (NM_031271.2,1045-1063).
gagggtaacattcatacaa

SEQ ID NO: 396034 - DNA, 19 bp, Homo sapiens
  siRNA target sequence for TEX15 (NM_031271.2,1069-1087).
gccattgctcaaaagctaa

SEQ ID NO: 396035 - DNA, 19 bp, Homo sapiens
  siRNA target sequence for TEX15 (NM_031271.2,1138-1156).
gaagctttcccgaaaccaa

SEQ ID NO: 396036 - DNA, 19 bp, Homo sapiens
  siRNA target sequence for TEX15 (NM_031271.2,1165-1183).
ccccaggccaaagaaatgt

SEQ ID NO: 396037 - DNA, 19 bp, Homo sapiens
  siRNA target sequence for TEX15 (NM_031271.2,1166-1184).
cccaggccaaagaaatgtt

SEQ ID NO: 396038 - DNA, 19 bp, Homo sapiens
  siRNA target sequence for TEX15 (NM_031271.2,1182-1200).
gttcattgatacagttatt

SEQ ID NO: 396039 - DNA, 19 bp, Homo sapiens
  siRNA target sequence for TEX15 (NM_031271.2,1195-1213).
gttatttcatcttataaca

SEQ ID NO: 396040 - DNA, 19 bp, Homo sapiens
  siRNA target sequence for TEX15 (NM_031271.2,1220-1238).
cagctcatgacagttcaaa

SEQ ID NO: 396041 - DNA, 19 bp, Homo sapiens
  siRNA target sequence for TEX15 (NM_031271.2,1242-1260).
cagcataactagagaacat

SEQ ID NO: 396042 - DNA, 19 bp, Homo sapiens
  siRNA target sequence for TEX15 (NM_031271.2,1244-1262).
gcataactagagaacatat

SEQ ID NO: 396043 - DNA, 19 bp, Homo sapiens
  siRNA target sequence for TEX15 (NM_031271.2,1245-1263).
cataactagagaacatata

SEQ ID NO: 396044 - DNA, 19 bp, Homo sapiens
  siRNA target sequence for TEX15 (NM_031271.2,1292-1310).
cagtgtcattagagaacat

SEQ ID NO: 396045 - DNA, 19 bp, Homo sapiens
  siRNA target sequence for TEX15 (NM_031271.2,1379-1397).
cacagttaagcaatgatat

SEQ ID NO: 396046 - DNA, 19 bp, Homo sapiens
  siRNA target sequence for TEX15 (NM_031271.2,1458-1476).
gaatagtgcttcatgtgta

SEQ ID NO: 396047 - DNA, 19 bp, Homo sapiens
  siRNA target sequence for TEX15 (NM_031271.2,1466-1484).
cttcatgtgtagaaaacaa

SEQ ID NO: 396048 - DNA, 19 bp, Homo sapiens
  siRNA target sequence for TEX15 (NM_031271.2,1472-1490).
gtgtagaaaacaacataga

SEQ ID NO: 396049 - DNA, 19 bp, Homo sapiens
  siRNA target sequence for TEX15 (NM_031271.2,1474-1492).
gtagaaaacaacatagaga

SEQ ID NO: 396050 - DNA, 19 bp, Homo sapiens
  siRNA target sequence for TEX15 (NM_031271.2,1522-1540).
catacaaacgaaaatttca

SEQ ID NO: 396051 - DNA, 19 bp, Homo sapiens
  siRNA target sequence for TEX15 (NM_031271.2,1573-1591).
cacaatatagaaattttga

SEQ ID NO: 396052 - DNA, 19 bp, Homo sapiens
  siRNA target sequence for TEX15 (NM_031271.2,1597-1615).
gaagaattttctactaaat

SEQ ID NO: 396053 - DNA, 19 bp, Homo sapiens
  siRNA target sequence for TEX15 (NM_031271.2,1607-1625).
ctactaaatttaacttgat

SEQ ID NO: 396054 - DNA, 19 bp, Homo sapiens
  siRNA target sequence for TEX15 (NM_031271.2,1685-1703).
ccattagtgccgtgaaaca

SEQ ID NO: 396055 - DNA, 19 bp, Homo sapiens
  siRNA target sequence for TEX15 (NM_031271.2,1686-1704).
cattagtgccgtgaaacaa

SEQ ID NO: 396056 - DNA, 19 bp, Homo sapiens
  siRNA target sequence for TEX15 (NM_031271.2,1691-1709).
gtgccgtgaaacaaaaaga

SEQ ID NO: 396057 - DNA, 19 bp, Homo sapiens
  siRNA target sequence for TEX15 (NM_031271.2,1724-1742).
gaagaagtgtagagcattt

SEQ ID NO: 396058 - DNA, 19 bp, Homo sapiens
  siRNA target sequence for TEX15 (NM_031271.2,1749-1767).
cacgacatttcccaaaact

SEQ ID NO: 396059 - DNA, 19 bp, Homo sapiens
  siRNA target sequence for TEX15 (NM_031271.2,1782-1800).
gtgtgtagcctcaaatgct

SEQ ID NO: 396060 - DNA, 19 bp, Homo sapiens
  siRNA target sequence for TEX15 (NM_031271.2,1798-1816).
gctgcaatacagatagcta

SEQ ID NO: 396061 - DNA, 19 bp, Homo sapiens
  siRNA target sequence for TEX15 (NM_031271.2,1819-1837).
gctactatgcctgcattaa

SEQ ID NO: 396062 - DNA, 19 bp, Homo sapiens
  siRNA target sequence for TEX15 (NM_031271.2,1827-1845).
gcctgcattaagcctaaat

SEQ ID NO: 396063 - DNA, 19 bp, Homo sapiens
  siRNA target sequence for TEX15 (NM_031271.2,1829-1847).
ctgcattaagcctaaataa

SEQ ID NO: 396064 - DNA, 19 bp, Homo sapiens
  siRNA target sequence for TEX15 (NM_031271.2,1895-1913).
gtccagattttggtttgtt

SEQ ID NO: 396065 - DNA, 19 bp, Homo sapiens
  siRNA target sequence for TEX15 (NM_031271.2,1898-1916).
cagattttggtttgttagt

SEQ ID NO: 396066 - DNA, 19 bp, Homo sapiens
  siRNA target sequence for TEX15 (NM_031271.2,1906-1924).
ggtttgttagtaaaacata

SEQ ID NO: 396067 - DNA, 19 bp, Homo sapiens
  siRNA target sequence for TEX15 (NM_031271.2,2012-2030).
gcattgaattggaaagtga

SEQ ID NO: 396068 - DNA, 19 bp, Homo sapiens
  siRNA target sequence for TEX15 (NM_031271.2,2080-2098).
gatacacatagccatgaaa

SEQ ID NO: 396069 - DNA, 19 bp, Homo sapiens
  siRNA target sequence for TEX15 (NM_031271.2,2113-2131).
gaatttgtgacctcatata

SEQ ID NO: 396070 - DNA, 19 bp, Homo sapiens
  siRNA target sequence for TEX15 (NM_031271.2,2137-2155).
ctgaagtctcgtatcagtt

SEQ ID NO: 396071 - DNA, 19 bp, Homo sapiens
  siRNA target sequence for TEX15 (NM_031271.2,2162-2180).
gtctgttagcacttgataa

SEQ ID NO: 396072 - DNA, 19 bp, Homo sapiens
  siRNA target sequence for TEX15 (NM_031271.2,2264-2282).
cctctacacaaaacaatga

SEQ ID NO: 396073 - DNA, 19 bp, Homo sapiens
  siRNA target sequence for TEX15 (NM_031271.2,2366-2384).
ctgactcccttgcattgaa

SEQ ID NO: 396074 - DNA, 19 bp, Homo sapiens
  siRNA target sequence for TEX15 (NM_031271.2,2413-2431).
gccacaaaaccggaaataa

SEQ ID NO: 396075 - DNA, 19 bp, Homo sapiens
  siRNA target sequence for TEX15 (NM_031271.2,2446-2464).
gaaattctaggatttgaca

SEQ ID NO: 396076 - DNA, 19 bp, Homo sapiens
  siRNA target sequence for TEX15 (NM_031271.2,2494-2512).
gattatccatgtgaagata

SEQ ID NO: 396077 - DNA, 19 bp, Homo sapiens
  siRNA target sequence for TEX15 (NM_031271.2,2577-2595).
cttgagtcgtaatacagat

SEQ ID NO: 396078 - DNA, 19 bp, Homo sapiens
  siRNA target sequence for TEX15 (NM_031271.2,2582-2600).
gtcgtaatacagatgtgaa

SEQ ID NO: 396079 - DNA, 19 bp, Homo sapiens
  siRNA target sequence for TEX15 (NM_031271.2,2596-2614).
gtgaatcatacgtctgaaa

SEQ ID NO: 396080 - DNA, 19 bp, Homo sapiens
  siRNA target sequence for TEX15 (NM_031271.2,2624-2642).
gtgaatctttgtttactga

SEQ ID NO: 396081 - DNA, 19 bp, Homo sapiens
  siRNA target sequence for TEX15 (NM_031271.2,2634-2652).
gtttactgaaccttctaat

SEQ ID NO: 396082 - DNA, 19 bp, Homo sapiens
  siRNA target sequence for TEX15 (NM_031271.2,2644-2662).
ccttctaatgtcacaacaa

SEQ ID NO: 396083 - DNA, 19 bp, Homo sapiens
  siRNA target sequence for TEX15 (NM_031271.2,2645-2663).
cttctaatgtcacaacaat

SEQ ID NO: 396084 - DNA, 19 bp, Homo sapiens
  siRNA target sequence for TEX15 (NM_031271.2,2734-2752).
gtagaatcaagaattagca

SEQ ID NO: 396085 - DNA, 19 bp, Homo sapiens
  siRNA target sequence for TEX15 (NM_031271.2,2784-2802).
gaacataccacataaagat

SEQ ID NO: 396086 - DNA, 19 bp, Homo sapiens
  siRNA target sequence for TEX15 (NM_031271.2,2787-2805).
cataccacataaagattta

SEQ ID NO: 396087 - DNA, 19 bp, Homo sapiens
  siRNA target sequence for TEX15 (NM_031271.2,2800-2818).
gatttaagacgacataaaa

SEQ ID NO: 396088 - DNA, 19 bp, Homo sapiens
  siRNA target sequence for TEX15 (NM_031271.2,2880-2898).
ccaaggacgaattaaaaca

SEQ ID NO: 396089 - DNA, 19 bp, Homo sapiens
  siRNA target sequence for TEX15 (NM_031271.2,2881-2899).
caaggacgaattaaaacat

SEQ ID NO: 396090 - DNA, 19 bp, Homo sapiens
  siRNA target sequence for TEX15 (NM_031271.2,2947-2965).
gatgaagcatctttatgta

SEQ ID NO: 396091 - DNA, 19 bp, Homo sapiens
  siRNA target sequence for TEX15 (NM_031271.2,2975-2993).
gtctttccagaaaactaga

SEQ ID NO: 396092 - DNA, 19 bp, Homo sapiens
  siRNA target sequence for TEX15 (NM_031271.2,3041-3059).
ctttgcagcttataactaa

SEQ ID NO: 396093 - DNA, 19 bp, Homo sapiens
  siRNA target sequence for TEX15 (NM_031271.2,3045-3063).
gcagcttataactaaagta

SEQ ID NO: 396094 - DNA, 19 bp, Homo sapiens
  siRNA target sequence for TEX15 (NM_031271.2,3128-3146).
gttgtgaccttcaaggtta

SEQ ID NO: 396095 - DNA, 19 bp, Homo sapiens
  siRNA target sequence for TEX15 (NM_031271.2,3227-3245).
gagctccaaaagctgatat

SEQ ID NO: 396096 - DNA, 19 bp, Homo sapiens
  siRNA target sequence for TEX15 (NM_031271.2,3229-3247).
gctccaaaagctgatattt

SEQ ID NO: 396097 - DNA, 19 bp, Homo sapiens
  siRNA target sequence for TEX15 (NM_031271.2,3273-3291).
gcacaagtcttataaaaca

SEQ ID NO: 396098 - DNA, 19 bp, Homo sapiens
  siRNA target sequence for TEX15 (NM_031271.2,3274-3292).
cacaagtcttataaaacaa

SEQ ID NO: 396099 - DNA, 19 bp, Homo sapiens
  siRNA target sequence for TEX15 (NM_031271.2,3328-3346).
gctagcagtgtctcaaaaa

SEQ ID NO: 396100 - DNA, 19 bp, Homo sapiens
  siRNA target sequence for TEX15 (NM_031271.2,3359-3377).
ccagtcacatgggagaatt

SEQ ID NO: 396101 - DNA, 19 bp, Homo sapiens
  siRNA target sequence for TEX15 (NM_031271.2,3360-3378).
cagtcacatgggagaattt

SEQ ID NO: 396102 - DNA, 19 bp, Homo sapiens
  siRNA target sequence for TEX15 (NM_031271.2,3431-3449).
gtacaagtcagtcagttta

SEQ ID NO: 396103 - DNA, 19 bp, Homo sapiens
  siRNA target sequence for TEX15 (NM_031271.2,3434-3452).
caagtcagtcagtttatta

SEQ ID NO: 396104 - DNA, 19 bp, Homo sapiens
  siRNA target sequence for TEX15 (NM_031271.2,3437-3455).
gtcagtcagtttattataa

SEQ ID NO: 396105 - DNA, 19 bp, Homo sapiens
  siRNA target sequence for TEX15 (NM_031271.2,3461-3479).
gtgtaagcaatccaagttt

SEQ ID NO: 396106 - DNA, 19 bp, Homo sapiens
  siRNA target sequence for TEX15 (NM_031271.2,3467-3485).
gcaatccaagtttatcaga

SEQ ID NO: 396107 - DNA, 19 bp, Homo sapiens
  siRNA target sequence for TEX15 (NM_031271.2,3468-3486).
caatccaagtttatcagaa

SEQ ID NO: 396108 - DNA, 19 bp, Homo sapiens
  siRNA target sequence for TEX15 (NM_031271.2,3473-3491).
caagtttatcagaagaaca

SEQ ID NO: 396109 - DNA, 19 bp, Homo sapiens
  siRNA target sequence for TEX15 (NM_031271.2,3505-3523).
ggaaaaactgcatatctgt

SEQ ID NO: 396110 - DNA, 19 bp, Homo sapiens
  siRNA target sequence for TEX15 (NM_031271.2,3535-3553).
cactcagatgagaaactaa

SEQ ID NO: 396111 - DNA, 19 bp, Homo sapiens
  siRNA target sequence for TEX15 (NM_031271.2,3668-3686).
gtgacgctaatgaagtaat

SEQ ID NO: 396112 - DNA, 19 bp, Homo sapiens
  siRNA target sequence for TEX15 (NM_031271.2,3670-3688).
gacgctaatgaagtaataa

SEQ ID NO: 396113 - DNA, 19 bp, Homo sapiens
  siRNA target sequence for TEX15 (NM_031271.2,3740-3758).
gtacaggcaacgattgtga

SEQ ID NO: 396114 - DNA, 19 bp, Homo sapiens
  siRNA target sequence for TEX15 (NM_031271.2,3764-3782).
cttgcataggtcacacaaa

SEQ ID NO: 396115 - DNA, 19 bp, Homo sapiens
  siRNA target sequence for TEX15 (NM_031271.2,3784-3802).
gcgaaaactgacgtactta

SEQ ID NO: 396116 - DNA, 19 bp, Homo sapiens
  siRNA target sequence for TEX15 (NM_031271.2,3785-3803).
cgaaaactgacgtacttat

SEQ ID NO: 396117 - DNA, 19 bp, Homo sapiens
  siRNA target sequence for TEX15 (NM_031271.2,3791-3809).
ctgacgtacttatatcagt

SEQ ID NO: 396118 - DNA, 19 bp, Homo sapiens
  siRNA target sequence for TEX15 (NM_031271.2,3795-3813).
cgtacttatatcagtctta

SEQ ID NO: 396119 - DNA, 19 bp, Homo sapiens
  siRNA target sequence for TEX15 (NM_031271.2,3799-3817).
cttatatcagtcttagatt

SEQ ID NO: 396120 - DNA, 19 bp, Homo sapiens
  siRNA target sequence for TEX15 (NM_031271.2,3846-3864).
ctaccaacaaggtaacctt

SEQ ID NO: 396121 - DNA, 19 bp, Homo sapiens
  siRNA target sequence for TEX15 (NM_031271.2,3849-3867).
ccaacaaggtaaccttatt

SEQ ID NO: 396122 - DNA, 19 bp, Homo sapiens
  siRNA target sequence for TEX15 (NM_031271.2,3958-3976).
ggcccattaaacctaactt

SEQ ID NO: 396123 - DNA, 19 bp, Homo sapiens
  siRNA target sequence for TEX15 (NM_031271.2,3961-3979).
ccattaaacctaactttga

SEQ ID NO: 396124 - DNA, 19 bp, Homo sapiens
  siRNA target sequence for TEX15 (NM_031271.2,4030-4048).
gatagtgagggagaatctt

SEQ ID NO: 396125 - DNA, 19 bp, Homo sapiens
  siRNA target sequence for TEX15 (NM_031271.2,4049-4067).
caaaatcttacttggataa

SEQ ID NO: 396126 - DNA, 19 bp, Homo sapiens
  siRNA target sequence for TEX15 (NM_031271.2,4059-4077).
cttggataagcagagaatt

SEQ ID NO: 396127 - DNA, 19 bp, Homo sapiens
  siRNA target sequence for TEX15 (NM_031271.2,4062-4080).
ggataagcagagaattctt

SEQ ID NO: 396128 - DNA, 19 bp, Homo sapiens
  siRNA target sequence for TEX15 (NM_031271.2,4063-4081).
gataagcagagaattctta

SEQ ID NO: 396129 - DNA, 19 bp, Homo sapiens
  siRNA target sequence for TEX15 (NM_031271.2,4175-4193).
gtaattgcctccatacaga

SEQ ID NO: 396130 - DNA, 19 bp, Homo sapiens
  siRNA target sequence for TEX15 (NM_031271.2,4376-4394).
gaataacgtggaaagttaa

SEQ ID NO: 396131 - DNA, 19 bp, Homo sapiens
  siRNA target sequence for TEX15 (NM_031271.2,4434-4452).
catgactgaaggatcaact

SEQ ID NO: 396132 - DNA, 19 bp, Homo sapiens
  siRNA target sequence for TEX15 (NM_031271.2,4445-4463).
gatcaactgttaatactga

SEQ ID NO: 396133 - DNA, 19 bp, Homo sapiens
  siRNA target sequence for TEX15 (NM_031271.2,4451-4469).
ctgttaatactgagtacaa

SEQ ID NO: 396134 - DNA, 19 bp, Homo sapiens
  siRNA target sequence for TEX15 (NM_031271.2,4495-4513).
gaatcctgcttaaatgaga

SEQ ID NO: 396135 - DNA, 19 bp, Homo sapiens
  siRNA target sequence for TEX15 (NM_031271.2,4594-4612).
gtttctaatccgcttaaca

SEQ ID NO: 396136 - DNA, 19 bp, Homo sapiens
  siRNA target sequence for TEX15 (NM_031271.2,4627-4645).
ggggaaattaaagttagta

SEQ ID NO: 396137 - DNA, 19 bp, Homo sapiens
  siRNA target sequence for TEX15 (NM_031271.2,4628-4646).
gggaaattaaagttagtaa

SEQ ID NO: 396138 - DNA, 19 bp, Homo sapiens
  siRNA target sequence for TEX15 (NM_031271.2,4652-4670).
cgcagtctgacttgacatt

SEQ ID NO: 396139 - DNA, 19 bp, Homo sapiens
  siRNA target sequence for TEX15 (NM_031271.2,4653-4671).
gcagtctgacttgacatta

SEQ ID NO: 396140 - DNA, 19 bp, Homo sapiens
  siRNA target sequence for TEX15 (NM_031271.2,4656-4674).
gtctgacttgacattacat

SEQ ID NO: 396141 - DNA, 19 bp, Homo sapiens
  siRNA target sequence for TEX15 (NM_031271.2,4703-4721).
gaattctaggagttaatca

SEQ ID NO: 396142 - DNA, 19 bp, Homo sapiens
  siRNA target sequence for TEX15 (NM_031271.2,4740-4758).
ccactctgaaacctgtaaa

SEQ ID NO: 396143 - DNA, 19 bp, Homo sapiens
  siRNA target sequence for TEX15 (NM_031271.2,4783-4801).
gcgtcatacgtgagtgatt

SEQ ID NO: 396144 - DNA, 19 bp, Homo sapiens
  siRNA target sequence for TEX15 (NM_031271.2,4784-4802).
cgtcatacgtgagtgattt

SEQ ID NO: 396145 - DNA, 19 bp, Homo sapiens
  siRNA target sequence for TEX15 (NM_031271.2,4785-4803).
gtcatacgtgagtgatttt

SEQ ID NO: 396146 - DNA, 19 bp, Homo sapiens
  siRNA target sequence for TEX15 (NM_031271.2,4787-4805).
catacgtgagtgattttaa

SEQ ID NO: 396147 - DNA, 19 bp, Homo sapiens
  siRNA target sequence for TEX15 (NM_031271.2,4813-4831).
cattgctcagctaatcata

SEQ ID NO: 396148 - DNA, 19 bp, Homo sapiens
  siRNA target sequence for TEX15 (NM_031271.2,4828-4846).
catacggcccttatagcta

SEQ ID NO: 396149 - DNA, 19 bp, Homo sapiens
  siRNA target sequence for TEX15 (NM_031271.2,4832-4850).
cggcccttatagctaatct

SEQ ID NO: 396150 - DNA, 19 bp, Homo sapiens
  siRNA target sequence for TEX15 (NM_031271.2,4834-4852).
gcccttatagctaatctat

SEQ ID NO: 396151 - DNA, 19 bp, Homo sapiens
  siRNA target sequence for TEX15 (NM_031271.2,4844-4862).
ctaatctatctcaaatttt

SEQ ID NO: 396152 - DNA, 19 bp, Homo sapiens
  siRNA target sequence for TEX15 (NM_031271.2,4870-4888).
gcagatgaagcatcatctt

SEQ ID NO: 396153 - DNA, 19 bp, Homo sapiens
  siRNA target sequence for TEX15 (NM_031271.2,4893-4911).
gattctacaggaagaaact

SEQ ID NO: 396154 - DNA, 19 bp, Homo sapiens
  siRNA target sequence for TEX15 (NM_031271.2,4910-4928).
ctaaggtttgtctaaatat

SEQ ID NO: 396155 - DNA, 19 bp, Homo sapiens
  siRNA target sequence for TEX15 (NM_031271.2,4962-4980).
gcaagaatgttcagttgaa

SEQ ID NO: 396156 - DNA, 19 bp, Homo sapiens
  siRNA target sequence for TEX15 (NM_031271.2,4975-4993).
gttgaacaaatcctgattt

SEQ ID NO: 396157 - DNA, 19 bp, Homo sapiens
  siRNA target sequence for TEX15 (NM_031271.2,4978-4996).
gaacaaatcctgatttcaa

SEQ ID NO: 396158 - DNA, 19 bp, Homo sapiens
  siRNA target sequence for TEX15 (NM_031271.2,5115-5133).
caaaaaaaggcacttagaa

SEQ ID NO: 396159 - DNA, 19 bp, Homo sapiens
  siRNA target sequence for TEX15 (NM_031271.2,5148-5166).
gcgaagcttgctttggtat

SEQ ID NO: 396160 - DNA, 19 bp, Homo sapiens
  siRNA target sequence for TEX15 (NM_031271.2,5154-5172).
cttgctttggtatgatgaa

SEQ ID NO: 396161 - DNA, 19 bp, Homo sapiens
  siRNA target sequence for TEX15 (NM_031271.2,5157-5175).
gctttggtatgatgaaaca

SEQ ID NO: 396162 - DNA, 19 bp, Homo sapiens
  siRNA target sequence for TEX15 (NM_031271.2,5195-5213).
gaaaaccacgtggatttca

SEQ ID NO: 396163 - DNA, 19 bp, Homo sapiens
  siRNA target sequence for TEX15 (NM_031271.2,5207-5225).
gatttcaacagcagtctaa

SEQ ID NO: 396164 - DNA, 19 bp, Homo sapiens
  siRNA target sequence for TEX15 (NM_031271.2,5212-5230).
caacagcagtctaatttct

SEQ ID NO: 396165 - DNA, 19 bp, Homo sapiens
  siRNA target sequence for TEX15 (NM_031271.2,5263-5281).
gcattctgtgagttacaga

SEQ ID NO: 396166 - DNA, 19 bp, Homo sapiens
  siRNA target sequence for TEX15 (NM_031271.2,5278-5296).
cagacttaccatgatcaat

SEQ ID NO: 396167 - DNA, 19 bp, Homo sapiens
  siRNA target sequence for TEX15 (NM_031271.2,5280-5298).
gacttaccatgatcaatta

SEQ ID NO: 396168 - DNA, 19 bp, Homo sapiens
  siRNA target sequence for TEX15 (NM_031271.2,5287-5305).
catgatcaattagttgaat

SEQ ID NO: 396169 - DNA, 19 bp, Homo sapiens
  siRNA target sequence for TEX15 (NM_031271.2,5324-5342).
gggaaaagaattcatacta

SEQ ID NO: 396170 - DNA, 19 bp, Homo sapiens
  siRNA target sequence for TEX15 (NM_031271.2,5363-5381).
gacaggttaatgaatgtga

SEQ ID NO: 396171 - DNA, 19 bp, Homo sapiens
  siRNA target sequence for TEX15 (NM_031271.2,5495-5513).
ctttaaagttgatcaatgt

SEQ ID NO: 396172 - DNA, 19 bp, Homo sapiens
  siRNA target sequence for TEX15 (NM_031271.2,5525-5543).
ctcctaaagttcattcgta

SEQ ID NO: 396173 - DNA, 19 bp, Homo sapiens
  siRNA target sequence for TEX15 (NM_031271.2,5554-5572).
caggaccatctgtggatta

SEQ ID NO: 396174 - DNA, 19 bp, Homo sapiens
  siRNA target sequence for TEX15 (NM_031271.2,5557-5575).
gaccatctgtggattatca

SEQ ID NO: 396175 - DNA, 19 bp, Homo sapiens
  siRNA target sequence for TEX15 (NM_031271.2,5583-5601).
gatctcctcaaaggttaat

SEQ ID NO: 396176 - DNA, 19 bp, Homo sapiens
  siRNA target sequence for TEX15 (NM_031271.2,5616-5634).
cgaggcagtacgtgttaaa

SEQ ID NO: 396177 - DNA, 19 bp, Homo sapiens
  siRNA target sequence for TEX15 (NM_031271.2,5619-5637).
ggcagtacgtgttaaaata

SEQ ID NO: 396178 - DNA, 19 bp, Homo sapiens
  siRNA target sequence for TEX15 (NM_031271.2,5620-5638).
gcagtacgtgttaaaatat

SEQ ID NO: 396179 - DNA, 19 bp, Homo sapiens
  siRNA target sequence for TEX15 (NM_031271.2,5671-5689).
gctgcaaaaaatcttgttt

SEQ ID NO: 396180 - DNA, 19 bp, Homo sapiens
  siRNA target sequence for TEX15 (NM_031271.2,5675-5693).
caaaaaatcttgtttggaa

SEQ ID NO: 396181 - DNA, 19 bp, Homo sapiens
  siRNA target sequence for TEX15 (NM_031271.2,5714-5732).
gcaaaaaatactcacaaaa

SEQ ID NO: 396182 - DNA, 19 bp, Homo sapiens
  siRNA target sequence for TEX15 (NM_031271.2,5747-5765).
ggctactcagagtgaataa

SEQ ID NO: 396183 - DNA, 19 bp, Homo sapiens
  siRNA target sequence for TEX15 (NM_031271.2,5748-5766).
gctactcagagtgaataaa

SEQ ID NO: 396184 - DNA, 19 bp, Homo sapiens
  siRNA target sequence for TEX15 (NM_031271.2,5749-5767).
ctactcagagtgaataaat

SEQ ID NO: 396185 - DNA, 19 bp, Homo sapiens
  siRNA target sequence for TEX15 (NM_031271.2,5777-5795).
ctaagttgcagaagatata

SEQ ID NO: 396186 - DNA, 19 bp, Homo sapiens
  siRNA target sequence for TEX15 (NM_031271.2,5781-5799).
gttgcagaagatatatgat

SEQ ID NO: 396187 - DNA, 19 bp, Homo sapiens
  siRNA target sequence for TEX15 (NM_031271.2,5843-5861).
ggcttgaggaggatactat

SEQ ID NO: 396188 - DNA, 19 bp, Homo sapiens
  siRNA target sequence for TEX15 (NM_031271.2,5844-5862).
gcttgaggaggatactata

SEQ ID NO: 396189 - DNA, 19 bp, Homo sapiens
  siRNA target sequence for TEX15 (NM_031271.2,5845-5863).
cttgaggaggatactataa

SEQ ID NO: 396190 - DNA, 19 bp, Homo sapiens
  siRNA target sequence for TEX15 (NM_031271.2,5850-5868).
ggaggatactataattgct

SEQ ID NO: 396191 - DNA, 19 bp, Homo sapiens
  siRNA target sequence for TEX15 (NM_031271.2,5851-5869).
gaggatactataattgctt

SEQ ID NO: 396192 - DNA, 19 bp, Homo sapiens
  siRNA target sequence for TEX15 (NM_031271.2,5879-5897).
cagatcatccaataaacga

SEQ ID NO: 396193 - DNA, 19 bp, Homo sapiens
  siRNA target sequence for TEX15 (NM_031271.2,5888-5906).
caataaacgaagcaacaat

SEQ ID NO: 396194 - DNA, 19 bp, Homo sapiens
  siRNA target sequence for TEX15 (NM_031271.2,5895-5913).
cgaagcaacaattagcata

SEQ ID NO: 396195 - DNA, 19 bp, Homo sapiens
  siRNA target sequence for TEX15 (NM_031271.2,5899-5917).
gcaacaattagcatagaaa

SEQ ID NO: 396196 - DNA, 19 bp, Homo sapiens
  siRNA target sequence for TEX15 (NM_031271.2,5900-5918).
caacaattagcatagaaaa

SEQ ID NO: 396197 - DNA, 19 bp, Homo sapiens
  siRNA target sequence for TEX15 (NM_031271.2,5941-5959).
cttgcacacccagatattt

SEQ ID NO: 396198 - DNA, 19 bp, Homo sapiens
  siRNA target sequence for TEX15 (NM_031271.2,5960-5978).
gttgtattagtgagatatt

SEQ ID NO: 396199 - DNA, 19 bp, Homo sapiens
  siRNA target sequence for TEX15 (NM_031271.2,6013-6031).
caggatctcaccttgagat

SEQ ID NO: 396200 - DNA, 19 bp, Homo sapiens
  siRNA target sequence for TEX15 (NM_031271.2,6029-6047).
gatgtacagatcacttaga

SEQ ID NO: 396201 - DNA, 19 bp, Homo sapiens
  siRNA target sequence for TEX15 (NM_031271.2,6208-6226).
gaaacaattcactttctta

SEQ ID NO: 396202 - DNA, 19 bp, Homo sapiens
  siRNA target sequence for TEX15 (NM_031271.2,6231-6249).
ctcaatagcaaagaaacta

SEQ ID NO: 396203 - DNA, 19 bp, Homo sapiens
  siRNA target sequence for TEX15 (NM_031271.2,6258-6276).
gaggtttcgaggtatgctt

SEQ ID NO: 396204 - DNA, 19 bp, Homo sapiens
  siRNA target sequence for TEX15 (NM_031271.2,6391-6409).
gctgtttccgaacttaaga

SEQ ID NO: 396205 - DNA, 19 bp, Homo sapiens
  siRNA target sequence for TEX15 (NM_031271.2,6392-6410).
ctgtttccgaacttaagaa

SEQ ID NO: 396206 - DNA, 19 bp, Homo sapiens
  siRNA target sequence for TEX15 (NM_031271.2,6560-6578).
catatatagcatccataaa

SEQ ID NO: 396207 - DNA, 19 bp, Homo sapiens
  siRNA target sequence for TEX15 (NM_031271.2,6587-6605).
gcactgtgacagagttaga

SEQ ID NO: 396208 - DNA, 19 bp, Homo sapiens
  siRNA target sequence for TEX15 (NM_031271.2,6596-6614).
cagagttagaatacaacta

SEQ ID NO: 396209 - DNA, 19 bp, Homo sapiens
  siRNA target sequence for TEX15 (NM_031271.2,6648-6666).
gtctgcccctaggaaagat

SEQ ID NO: 396210 - DNA, 19 bp, Homo sapiens
  siRNA target sequence for TEX15 (NM_031271.2,6670-6688).
ggaaaaatggcccacatta

SEQ ID NO: 396211 - DNA, 19 bp, Homo sapiens
  siRNA target sequence for TEX15 (NM_031271.2,6679-6697).
gcccacattaggaaagtca

SEQ ID NO: 396212 - DNA, 19 bp, Homo sapiens
  siRNA target sequence for TEX15 (NM_031271.2,6696-6714).
catgaaaacgattgaacat

SEQ ID NO: 396213 - DNA, 19 bp, Homo sapiens
  siRNA target sequence for TEX15 (NM_031271.2,6704-6722).
cgattgaacatatgaagat

SEQ ID NO: 396214 - DNA, 19 bp, Homo sapiens
  siRNA target sequence for TEX15 (NM_031271.2,6720-6738).
gatgatatgtactaaaaat

SEQ ID NO: 396215 - DNA, 19 bp, Homo sapiens
  siRNA target sequence for TEX15 (NM_031271.2,6739-6757).
gctgaactaaccatttcct

SEQ ID NO: 396216 - DNA, 19 bp, Homo sapiens
  siRNA target sequence for TEX15 (NM_031271.2,6841-6859).
cctggggaaaataacaata

SEQ ID NO: 396217 - DNA, 19 bp, Homo sapiens
  siRNA target sequence for TEX15 (NM_031271.2,6876-6894).
gatgttgcccccagtatca

SEQ ID NO: 396218 - DNA, 19 bp, Homo sapiens
  siRNA target sequence for TEX15 (NM_031271.2,6886-6904).
ccagtatcagagtgcataa

SEQ ID NO: 396219 - DNA, 19 bp, Homo sapiens
  siRNA target sequence for TEX15 (NM_031271.2,6887-6905).
cagtatcagagtgcataaa

SEQ ID NO: 396220 - DNA, 19 bp, Homo sapiens
  siRNA target sequence for TEX15 (NM_031271.2,6912-6930).
catctcaaattcctctaaa

SEQ ID NO: 396221 - DNA, 19 bp, Homo sapiens
  siRNA target sequence for TEX15 (NM_031271.2,6935-6953).
gaccgagcactgtagacaa

SEQ ID NO: 396222 - DNA, 19 bp, Homo sapiens
  siRNA target sequence for TEX15 (NM_031271.2,6937-6955).
ccgagcactgtagacaaat

SEQ ID NO: 396223 - DNA, 19 bp, Homo sapiens
  siRNA target sequence for TEX15 (NM_031271.2,6969-6987).
ggaacaacagcaagatact

SEQ ID NO: 396224 - DNA, 19 bp, Homo sapiens
  siRNA target sequence for TEX15 (NM_031271.2,6976-6994).
cagcaagatactactgttt

SEQ ID NO: 396225 - DNA, 19 bp, Homo sapiens
  siRNA target sequence for TEX15 (NM_031271.2,6998-7016).
gttgtaaaaagctaaaggt

SEQ ID NO: 396226 - DNA, 19 bp, Homo sapiens
  siRNA target sequence for TEX15 (NM_031271.2,7020-7038).
catgaaagatgtcacaaaa

SEQ ID NO: 396227 - DNA, 19 bp, Homo sapiens
  siRNA target sequence for TEX15 (NM_031271.2,7216-7234).
gacacttgcgcatcaaagt

SEQ ID NO: 396228 - DNA, 19 bp, Homo sapiens
  siRNA target sequence for TEX15 (NM_031271.2,7229-7247).
caaagtcggaaagcaaaat

SEQ ID NO: 396229 - DNA, 19 bp, Homo sapiens
  siRNA target sequence for TEX15 (NM_031271.2,7235-7253).
cggaaagcaaaatagactt

SEQ ID NO: 396230 - DNA, 19 bp, Homo sapiens
  siRNA target sequence for TEX15 (NM_031271.2,7241-7259).
gcaaaatagacttaactgt

SEQ ID NO: 396231 - DNA, 19 bp, Homo sapiens
  siRNA target sequence for TEX15 (NM_031271.2,7372-7390).
gcaatttgtgaccaaaaaa

SEQ ID NO: 396232 - DNA, 19 bp, Homo sapiens
  siRNA target sequence for TEX15 (NM_031271.2,7456-7474).
gatcccacccaaaaatcct

SEQ ID NO: 396233 - DNA, 19 bp, Homo sapiens
  siRNA target sequence for TEX15 (NM_031271.2,7567-7585).
catcctgatctagaaatga

SEQ ID NO: 396234 - DNA, 19 bp, Homo sapiens
  siRNA target sequence for TEX15 (NM_031271.2,7594-7612).
gtctttgaacttcaagata

SEQ ID NO: 396235 - DNA, 19 bp, Homo sapiens
  siRNA target sequence for TEX15 (NM_031271.2,7690-7708).
cctactctgcagataaaca

SEQ ID NO: 396236 - DNA, 19 bp, Homo sapiens
  siRNA target sequence for TEX15 (NM_031271.2,7766-7784).
ccaatactgtgcatacttt

SEQ ID NO: 396237 - DNA, 19 bp, Homo sapiens
  siRNA target sequence for TEX15 (NM_031271.2,7786-7804).
ggagcatctgggcatataa

SEQ ID NO: 396238 - DNA, 19 bp, Homo sapiens
  siRNA target sequence for TEX15 (NM_031271.2,7798-7816).
catataacccttaatgtga

SEQ ID NO: 396239 - DNA, 19 bp, Homo sapiens
  siRNA target sequence for TEX15 (NM_031271.2,7826-7844).
cagagtactctctttctga

SEQ ID NO: 396240 - DNA, 19 bp, Homo sapiens
  siRNA target sequence for TEX15 (NM_031271.2,7889-7907).
ccacatattggaatgaact

SEQ ID NO: 396241 - DNA, 19 bp, Homo sapiens
  siRNA target sequence for TEX15 (NM_031271.2,7890-7908).
cacatattggaatgaactt

SEQ ID NO: 396242 - DNA, 19 bp, Homo sapiens
  siRNA target sequence for TEX15 (NM_031271.2,7916-7934).
ctgcatgtaacccaacata

SEQ ID NO: 396243 - DNA, 19 bp, Homo sapiens
  siRNA target sequence for TEX15 (NM_031271.2,7918-7936).
gcatgtaacccaacatata

SEQ ID NO: 396244 - DNA, 19 bp, Homo sapiens
  siRNA target sequence for TEX15 (NM_031271.2,7926-7944).
cccaacatataattcttct

SEQ ID NO: 396245 - DNA, 19 bp, Homo sapiens
  siRNA target sequence for TEX15 (NM_031271.2,8028-8046).
gacataccaagggataaca

SEQ ID NO: 396246 - DNA, 19 bp, Homo sapiens
  siRNA target sequence for TEX15 (NM_031271.2,8039-8057).
ggataacatcatatgaagt

SEQ ID NO: 396247 - DNA, 19 bp, Homo sapiens
  siRNA target sequence for TEX15 (NM_031271.2,8106-8124).
gggcacacattctaatctt

SEQ ID NO: 396248 - DNA, 19 bp, Homo sapiens
  siRNA target sequence for TEX15 (NM_031271.2,8127-8145).
gtactctcaatattttact

SEQ ID NO: 396249 - DNA, 19 bp, Homo sapiens
  siRNA target sequence for TEX15 (NM_031271.2,8187-8205).
gaatgggtattttcaatct

SEQ ID NO: 396250 - DNA, 19 bp, Homo sapiens
  siRNA target sequence for TEX15 (NM_031271.2,8228-8246).
ggcagccaattttttcaca

SEQ ID NO: 396251 - DNA, 19 bp, Homo sapiens
  siRNA target sequence for TEX15 (NM_031271.2,8230-8248).
cagccaattttttcacaat

SEQ ID NO: 396252 - DNA, 19 bp, Homo sapiens
  siRNA target sequence for TEX15 (NM_031271.2,8264-8282).
cattaccacaagctacata

SEQ ID NO: 396253 - DNA, 19 bp, Homo sapiens
  siRNA target sequence for TEX15 (NM_031271.2,8336-8354).
catggcaccaagaatcctt

SEQ ID NO: 396254 - DNA, 19 bp, Homo sapiens
  siRNA target sequence for TEX15 (NM_031271.2,8340-8358).
gcaccaagaatcctttcat

SEQ ID NO: 396255 - DNA, 19 bp, Homo sapiens
  siRNA target sequence for TEX13B (NM_031273.1,190-208).
gagttctacttcgagaata

SEQ ID NO: 396256 - DNA, 19 bp, Homo sapiens
  siRNA target sequence for TEX13B (NM_031273.1,192-210).
gttctacttcgagaatata

SEQ ID NO: 396257 - DNA, 19 bp, Homo sapiens
  siRNA target sequence for TEX13B (NM_031273.1,198-216).
cttcgagaatatatcctta

SEQ ID NO: 396258 - DNA, 19 bp, Homo sapiens
  siRNA target sequence for TEX13B (NM_031273.1,419-437).
caaacctgacggaactcaa

SEQ ID NO: 396259 - DNA, 19 bp, Homo sapiens
  siRNA target sequence for TEX13B (NM_031273.1,762-780).
gcccctcggagctattgta

SEQ ID NO: 396260 - DNA, 19 bp, Homo sapiens
  siRNA target sequence for TEX13B (NM_031273.1,773-791).
ctattgtagcaggcaaatt

SEQ ID NO: 396261 - DNA, 19 bp, Homo sapiens
  siRNA target sequence for TEX13B (NM_031273.1,818-836).
gatctcaggtcagtacaaa

SEQ ID NO: 396262 - DNA, 19 bp, Homo sapiens
  siRNA target sequence for TEX13B (NM_031273.1,898-916).
gctccctacctcattcaca

SEQ ID NO: 396263 - DNA, 19 bp, Homo sapiens
  siRNA target sequence for TEX13B (NM_031273.1,899-917).
ctccctacctcattcacat

SEQ ID NO: 396264 - DNA, 19 bp, Homo sapiens
  siRNA target sequence for TEX13A (NM_031274.2,920-938).
gtcgaaacagccacatctt

SEQ ID NO: 396265 - DNA, 19 bp, Homo sapiens
  siRNA target sequence for TEX13A (NM_031274.2,922-940).
cgaaacagccacatcttat

SEQ ID NO: 396266 - DNA, 19 bp, Homo sapiens
  siRNA target sequence for TEX13A (NM_031274.2,923-941).
gaaacagccacatcttatt

SEQ ID NO: 396267 - DNA, 19 bp, Homo sapiens
  siRNA target sequence for TEX12 (NM_031275.2,160-178).
ctgaaatttccggactatt

SEQ ID NO: 396268 - DNA, 19 bp, Homo sapiens
  siRNA target sequence for TEX12 (NM_031275.2,162-180).
gaaatttccggactatttt

SEQ ID NO: 396269 - DNA, 19 bp, Homo sapiens
  siRNA target sequence for TEX12 (NM_031275.2,169-187).
ccggactattttataaaga

SEQ ID NO: 396270 - DNA, 19 bp, Homo sapiens
  siRNA target sequence for TEX12 (NM_031275.2,170-188).
cggactattttataaagat

SEQ ID NO: 396271 - DNA, 19 bp, Homo sapiens
  siRNA target sequence for TEX12 (NM_031275.2,225-243).
gaaattaatctaatgttgt

SEQ ID NO: 396272 - DNA, 19 bp, Homo sapiens
  siRNA target sequence for TEX12 (NM_031275.2,274-292).
cagcagtagatgcatctta

SEQ ID NO: 396273 - DNA, 19 bp, Homo sapiens
  siRNA target sequence for TEX12 (NM_031275.2,276-294).
gcagtagatgcatcttaca

SEQ ID NO: 396274 - DNA, 19 bp, Homo sapiens
  siRNA target sequence for TEX12 (NM_031275.2,286-304).
catcttacattgatgagat

SEQ ID NO: 396275 - DNA, 19 bp, Homo sapiens
  siRNA target sequence for TEX12 (NM_031275.2,365-383).
cctgcgacagaggtttaca

SEQ ID NO: 396276 - DNA, 19 bp, Homo sapiens
  siRNA target sequence for TEX11 (NM_031276.1,42-60).
ctggttacaaatgataatt

SEQ ID NO: 396277 - DNA, 19 bp, Homo sapiens
  siRNA target sequence for TEX11 (NM_031276.1,44-62).
ggttacaaatgataattca

SEQ ID NO: 396278 - DNA, 19 bp, Homo sapiens
  siRNA target sequence for TEX11 (NM_031276.1,68-86).
cataccagaggcaattgat

SEQ ID NO: 396279 - DNA, 19 bp, Homo sapiens
  siRNA target sequence for TEX11 (NM_031276.1,73-91).
cagaggcaattgatagact

SEQ ID NO: 396280 - DNA, 19 bp, Homo sapiens
  siRNA target sequence for TEX11 (NM_031276.1,90-108).
ctcttcagcgacatagcaa

SEQ ID NO: 396281 - DNA, 19 bp, Homo sapiens
  siRNA target sequence for TEX11 (NM_031276.1,92-110).
cttcagcgacatagcaaat

SEQ ID NO: 396282 - DNA, 19 bp, Homo sapiens
  siRNA target sequence for TEX11 (NM_031276.1,97-115).
gcgacatagcaaatatcaa

SEQ ID NO: 396283 - DNA, 19 bp, Homo sapiens
  siRNA target sequence for TEX11 (NM_031276.1,195-213).
ggaggaggttggcttgtaa

SEQ ID NO: 396284 - DNA, 19 bp, Homo sapiens
  siRNA target sequence for TEX11 (NM_031276.1,196-214).
gaggaggttggcttgtaaa

SEQ ID NO: 396285 - DNA, 19 bp, Homo sapiens
  siRNA target sequence for TEX11 (NM_031276.1,247-265).
cttgcaagttgctgagtat

SEQ ID NO: 396286 - DNA, 19 bp, Homo sapiens
  siRNA target sequence for TEX11 (NM_031276.1,283-301).
cctcagaacaaagtattca

SEQ ID NO: 396287 - DNA, 19 bp, Homo sapiens
  siRNA target sequence for TEX11 (NM_031276.1,295-313).
gtattcaacgactgattat

SEQ ID NO: 396288 - DNA, 19 bp, Homo sapiens
  siRNA target sequence for TEX11 (NM_031276.1,300-318).
caacgactgattatgatga

SEQ ID NO: 396289 - DNA, 19 bp, Homo sapiens
  siRNA target sequence for TEX11 (NM_031276.1,303-321).
cgactgattatgatgaata

SEQ ID NO: 396290 - DNA, 19 bp, Homo sapiens
  siRNA target sequence for TEX11 (NM_031276.1,314-332).
gatgaatatgagaatagga

SEQ ID NO: 396291 - DNA, 19 bp, Homo sapiens
  siRNA target sequence for TEX11 (NM_031276.1,360-378).
ctaatcgctgatgaatgtt

SEQ ID NO: 396292 - DNA, 19 bp, Homo sapiens
  siRNA target sequence for TEX11 (NM_031276.1,365-383).
cgctgatgaatgttttcaa

SEQ ID NO: 396293 - DNA, 19 bp, Homo sapiens
  siRNA target sequence for TEX11 (NM_031276.1,392-410).
ggccagtctggagcaatta

SEQ ID NO: 396294 - DNA, 19 bp, Homo sapiens
  siRNA target sequence for TEX11 (NM_031276.1,393-411).
gccagtctggagcaattat

SEQ ID NO: 396295 - DNA, 19 bp, Homo sapiens
  siRNA target sequence for TEX11 (NM_031276.1,397-415).
gtctggagcaattatacgt

SEQ ID NO: 396296 - DNA, 19 bp, Homo sapiens
  siRNA target sequence for TEX11 (NM_031276.1,402-420).
gagcaattatacgtcaaat

SEQ ID NO: 396297 - DNA, 19 bp, Homo sapiens
  siRNA target sequence for TEX11 (NM_031276.1,404-422).
gcaattatacgtcaaatta

SEQ ID NO: 396298 - DNA, 19 bp, Homo sapiens
  siRNA target sequence for TEX11 (NM_031276.1,405-423).
caattatacgtcaaattaa

SEQ ID NO: 396299 - DNA, 19 bp, Homo sapiens
  siRNA target sequence for TEX11 (NM_031276.1,455-473).
catggagaagattactgtt

SEQ ID NO: 396300 - DNA, 19 bp, Homo sapiens
  siRNA target sequence for TEX11 (NM_031276.1,483-501).
cacttcagagtgctttctt

SEQ ID NO: 396301 - DNA, 19 bp, Homo sapiens
  siRNA target sequence for TEX11 (NM_031276.1,488-506).
cagagtgctttcttaccaa

SEQ ID NO: 396302 - DNA, 19 bp, Homo sapiens
  siRNA target sequence for TEX11 (NM_031276.1,522-540).
gctcaaggggattttcaaa

SEQ ID NO: 396303 - DNA, 19 bp, Homo sapiens
  siRNA target sequence for TEX11 (NM_031276.1,551-569).
gtgtgtactgcaatgtaaa

SEQ ID NO: 396304 - DNA, 19 bp, Homo sapiens
  siRNA target sequence for TEX11 (NM_031276.1,677-695).
gcttagccaaagctatgat

SEQ ID NO: 396305 - DNA, 19 bp, Homo sapiens
  siRNA target sequence for TEX11 (NM_031276.1,678-696).
cttagccaaagctatgata

SEQ ID NO: 396306 - DNA, 19 bp, Homo sapiens
  siRNA target sequence for TEX11 (NM_031276.1,750-768).
cggctattagccacgaatt

SEQ ID NO: 396307 - DNA, 19 bp, Homo sapiens
  siRNA target sequence for TEX11 (NM_031276.1,751-769).
ggctattagccacgaatta

SEQ ID NO: 396308 - DNA, 19 bp, Homo sapiens
  siRNA target sequence for TEX11 (NM_031276.1,752-770).
gctattagccacgaattat

SEQ ID NO: 396309 - DNA, 19 bp, Homo sapiens
  siRNA target sequence for TEX11 (NM_031276.1,753-771).
ctattagccacgaattatt

SEQ ID NO: 396310 - DNA, 19 bp, Homo sapiens
  siRNA target sequence for TEX11 (NM_031276.1,759-777).
gccacgaattatttggatt

SEQ ID NO: 396311 - DNA, 19 bp, Homo sapiens
  siRNA target sequence for TEX11 (NM_031276.1,779-797).
ggatgacaccaaatattat

SEQ ID NO: 396312 - DNA, 19 bp, Homo sapiens
  siRNA target sequence for TEX11 (NM_031276.1,783-801).
gacaccaaatattatgata

SEQ ID NO: 396313 - DNA, 19 bp, Homo sapiens
  siRNA target sequence for TEX11 (NM_031276.1,814-832).
ctgtaaacctagcaaacaa

SEQ ID NO: 396314 - DNA, 19 bp, Homo sapiens
  siRNA target sequence for TEX11 (NM_031276.1,850-868).
ctgggcttttcttaaaaat

SEQ ID NO: 396315 - DNA, 19 bp, Homo sapiens
  siRNA target sequence for TEX11 (NM_031276.1,881-899).
gaaaggcgaaacatctaat

SEQ ID NO: 396316 - DNA, 19 bp, Homo sapiens
  siRNA target sequence for TEX11 (NM_031276.1,920-938).
catggaaatactacatctt

SEQ ID NO: 396317 - DNA, 19 bp, Homo sapiens
  siRNA target sequence for TEX11 (NM_031276.1,956-974).
ctgtctgaacattgctaaa

SEQ ID NO: 396318 - DNA, 19 bp, Homo sapiens
  siRNA target sequence for TEX11 (NM_031276.1,958-976).
gtctgaacattgctaaact

SEQ ID NO: 396319 - DNA, 19 bp, Homo sapiens
  siRNA target sequence for TEX11 (NM_031276.1,975-993).
ctgctgatggatcatgaaa

SEQ ID NO: 396320 - DNA, 19 bp, Homo sapiens
  siRNA target sequence for TEX11 (NM_031276.1,1016-1034).
cctgacgattattcatgaa

SEQ ID NO: 396321 - DNA, 19 bp, Homo sapiens
  siRNA target sequence for TEX11 (NM_031276.1,1184-1202).
gaactggttacacaacatt

SEQ ID NO: 396322 - DNA, 19 bp, Homo sapiens
  siRNA target sequence for TEX11 (NM_031276.1,1210-1228).
gacaagctgccagtagttt

SEQ ID NO: 396323 - DNA, 19 bp, Homo sapiens
  siRNA target sequence for TEX11 (NM_031276.1,1246-1264).
ctgatgccctacaatggta

SEQ ID NO: 396324 - DNA, 19 bp, Homo sapiens
  siRNA target sequence for TEX11 (NM_031276.1,1251-1269).
gccctacaatggtactatt

SEQ ID NO: 396325 - DNA, 19 bp, Homo sapiens
  siRNA target sequence for TEX11 (NM_031276.1,1252-1270).
ccctacaatggtactatta

SEQ ID NO: 396326 - DNA, 19 bp, Homo sapiens
  siRNA target sequence for TEX11 (NM_031276.1,1253-1271).
cctacaatggtactattat

SEQ ID NO: 396327 - DNA, 19 bp, Homo sapiens
  siRNA target sequence for TEX11 (NM_031276.1,1349-1367).
gaatttgcaacaacttgat

SEQ ID NO: 396328 - DNA, 19 bp, Homo sapiens
  siRNA target sequence for TEX11 (NM_031276.1,1401-1419).
catgaccctaggaacgttt

SEQ ID NO: 396329 - DNA, 19 bp, Homo sapiens
  siRNA target sequence for TEX11 (NM_031276.1,1404-1422).
gaccctaggaacgttttca

SEQ ID NO: 396330 - DNA, 19 bp, Homo sapiens
  siRNA target sequence for TEX11 (NM_031276.1,1406-1424).
ccctaggaacgttttcact

SEQ ID NO: 396331 - DNA, 19 bp, Homo sapiens
  siRNA target sequence for TEX11 (NM_031276.1,1411-1429).
ggaacgttttcactcaatt

SEQ ID NO: 396332 - DNA, 19 bp, Homo sapiens
  siRNA target sequence for TEX11 (NM_031276.1,1412-1430).
gaacgttttcactcaattt

SEQ ID NO: 396333 - DNA, 19 bp, Homo sapiens
  siRNA target sequence for TEX11 (NM_031276.1,1415-1433).
cgttttcactcaattttat

SEQ ID NO: 396334 - DNA, 19 bp, Homo sapiens
  siRNA target sequence for TEX11 (NM_031276.1,1557-1575).
cctaccatgcttctaagtt

SEQ ID NO: 396335 - DNA, 19 bp, Homo sapiens
  siRNA target sequence for TEX11 (NM_031276.1,1582-1600).
cccagtttgctctagagaa

SEQ ID NO: 396336 - DNA, 19 bp, Homo sapiens
  siRNA target sequence for TEX11 (NM_031276.1,1658-1676).
ccaggaacaagttcttaca

SEQ ID NO: 396337 - DNA, 19 bp, Homo sapiens
  siRNA target sequence for TEX11 (NM_031276.1,1671-1689).
cttacagctgtaaagtgtt

SEQ ID NO: 396338 - DNA, 19 bp, Homo sapiens
  siRNA target sequence for TEX11 (NM_031276.1,1726-1744).
cggaatctgaagataagaa

SEQ ID NO: 396339 - DNA, 19 bp, Homo sapiens
  siRNA target sequence for TEX11 (NM_031276.1,1761-1779).
cttttgacttgcctgaata

SEQ ID NO: 396340 - DNA, 19 bp, Homo sapiens
  siRNA target sequence for TEX11 (NM_031276.1,1773-1791).
ctgaatagagcctttgtga

SEQ ID NO: 396341 - DNA, 19 bp, Homo sapiens
  siRNA target sequence for TEX11 (NM_031276.1,1810-1828).
gtgaagaagccttaagttt

SEQ ID NO: 396342 - DNA, 19 bp, Homo sapiens
  siRNA target sequence for TEX11 (NM_031276.1,1829-1847).
ggagtcaagagctaatgaa

SEQ ID NO: 396343 - DNA, 19 bp, Homo sapiens
  siRNA target sequence for TEX11 (NM_031276.1,1880-1898).
ggctgtgcaatgtgacaaa

SEQ ID NO: 396344 - DNA, 19 bp, Homo sapiens
  siRNA target sequence for TEX11 (NM_031276.1,1954-1972).
gtccttctgatcaagtaat

SEQ ID NO: 396345 - DNA, 19 bp, Homo sapiens
  siRNA target sequence for TEX11 (NM_031276.1,1974-1992).
ctgattgcacggaaaacat

SEQ ID NO: 396346 - DNA, 19 bp, Homo sapiens
  siRNA target sequence for TEX11 (NM_031276.1,1983-2001).
cggaaaacatgtttactta

SEQ ID NO: 396347 - DNA, 19 bp, Homo sapiens
  siRNA target sequence for TEX11 (NM_031276.1,1984-2002).
ggaaaacatgtttacttat

SEQ ID NO: 396348 - DNA, 19 bp, Homo sapiens
  siRNA target sequence for TEX11 (NM_031276.1,2003-2021).
ggcagttgcagttgatcta

SEQ ID NO: 396349 - DNA, 19 bp, Homo sapiens
  siRNA target sequence for TEX11 (NM_031276.1,2005-2023).
cagttgcagttgatctaga

SEQ ID NO: 396350 - DNA, 19 bp, Homo sapiens
  siRNA target sequence for TEX11 (NM_031276.1,2084-2102).
ggagatccagacatgcaat

SEQ ID NO: 396351 - DNA, 19 bp, Homo sapiens
  siRNA target sequence for TEX11 (NM_031276.1,2168-2186).
gctgtacgagtttgaagtt

SEQ ID NO: 396352 - DNA, 19 bp, Homo sapiens
  siRNA target sequence for TEX11 (NM_031276.1,2181-2199).
gaagttagagccaaattga

SEQ ID NO: 396353 - DNA, 19 bp, Homo sapiens
  siRNA target sequence for TEX11 (NM_031276.1,2191-2209).
ccaaattgaatgatccatt

SEQ ID NO: 396354 - DNA, 19 bp, Homo sapiens
  siRNA target sequence for TEX11 (NM_031276.1,2192-2210).
caaattgaatgatccatta

SEQ ID NO: 396355 - DNA, 19 bp, Homo sapiens
  siRNA target sequence for TEX11 (NM_031276.1,2328-2346).
gccttgaaaaaggctttat

SEQ ID NO: 396356 - DNA, 19 bp, Homo sapiens
  siRNA target sequence for TEX11 (NM_031276.1,2367-2385).
ccaattgatatatcacaat

SEQ ID NO: 396357 - DNA, 19 bp, Homo sapiens
  siRNA target sequence for TEX11 (NM_031276.1,2389-2407).
gcaaatgtatgcacaactt

SEQ ID NO: 396358 - DNA, 19 bp, Homo sapiens
  siRNA target sequence for TEX11 (NM_031276.1,2395-2413).
gtatgcacaacttggttaa

SEQ ID NO: 396359 - DNA, 19 bp, Homo sapiens
  siRNA target sequence for TEX11 (NM_031276.1,2484-2502).
gatgctctgagccacatta

SEQ ID NO: 396360 - DNA, 19 bp, Homo sapiens
  siRNA target sequence for TEX11 (NM_031276.1,2495-2513).
ccacattagccgcactaaa

SEQ ID NO: 396361 - DNA, 19 bp, Homo sapiens
  siRNA target sequence for TEX11 (NM_031276.1,2555-2573).
ctggaataccggagtactt

SEQ ID NO: 396362 - DNA, 19 bp, Homo sapiens
  siRNA target sequence for TEX11 (NM_031276.1,2557-2575).
ggaataccggagtacttat

SEQ ID NO: 396363 - DNA, 19 bp, Homo sapiens
  siRNA target sequence for TEX11 (NM_031276.1,2565-2583).
ggagtacttatgtttagca

SEQ ID NO: 396364 - DNA, 19 bp, Homo sapiens
  siRNA target sequence for TEX11 (NM_031276.1,2623-2641).
ccttgcgtttccttaacca

SEQ ID NO: 396365 - DNA, 19 bp, Homo sapiens
  siRNA target sequence for TEX11 (NM_031276.1,2643-2661).
cttacctccttcaaggaaa

SEQ ID NO: 396366 - DNA, 19 bp, Homo sapiens
  siRNA target sequence for TEX11 (NM_031276.1,2647-2665).
cctccttcaaggaaagcta

SEQ ID NO: 396367 - DNA, 19 bp, Homo sapiens
  siRNA target sequence for TEX11 (NM_031276.1,2673-2691).
cagatgaatatgctgtata

SEQ ID NO: 396368 - DNA, 19 bp, Homo sapiens
  siRNA target sequence for TEX11 (NM_031276.1,2675-2693).
gatgaatatgctgtatagt

SEQ ID NO: 396369 - DNA, 19 bp, Homo sapiens
  siRNA target sequence for TEX11 (NM_031276.1,2692-2710).
gtcagcttgtggaagcatt

SEQ ID NO: 396370 - DNA, 19 bp, Homo sapiens
  siRNA target sequence for TEX11 (NM_031276.1,2700-2718).
gtggaagcattgagtaaca

SEQ ID NO: 396371 - DNA, 19 bp, Homo sapiens
  siRNA target sequence for TEX11 (NM_031276.1,2703-2721).
gaagcattgagtaacaaca

SEQ ID NO: 396372 - DNA, 19 bp, Homo sapiens
  siRNA target sequence for TEX11 (NM_031276.1,2723-2741).
gggcccagtttttcatgaa

SEQ ID NO: 396373 - DNA, 19 bp, Homo sapiens
  siRNA target sequence for TEX11 (NM_031276.1,2725-2743).
gcccagtttttcatgaaca

SEQ ID NO: 396374 - DNA, 19 bp, Homo sapiens
  siRNA target sequence for RNF17 (NM_031277.1,76-94).
cctggggtgccgctgaaat

SEQ ID NO: 396375 - DNA, 19 bp, Homo sapiens
  siRNA target sequence for RNF17 (NM_031277.1,79-97).
ggggtgccgctgaaatcca

SEQ ID NO: 396376 - DNA, 19 bp, Homo sapiens
  siRNA target sequence for RNF17 (NM_031277.1,130-148).
catccggtcaccattgtga

SEQ ID NO: 396377 - DNA, 19 bp, Homo sapiens
  siRNA target sequence for RNF17 (NM_031277.1,134-152).
cggtcaccattgtgaactt

SEQ ID NO: 396378 - DNA, 19 bp, Homo sapiens
  siRNA target sequence for RNF17 (NM_031277.1,140-158).
ccattgtgaacttcaatgt

SEQ ID NO: 396379 - DNA, 19 bp, Homo sapiens
  siRNA target sequence for RNF17 (NM_031277.1,157-175).
gtggacatgctttttgtga

SEQ ID NO: 396380 - DNA, 19 bp, Homo sapiens
  siRNA target sequence for RNF17 (NM_031277.1,263-281).
ctacccaatggctggatat

SEQ ID NO: 396381 - DNA, 19 bp, Homo sapiens
  siRNA target sequence for RNF17 (NM_031277.1,266-284).
cccaatggctggatatatt

SEQ ID NO: 396382 - DNA, 19 bp, Homo sapiens
  siRNA target sequence for RNF17 (NM_031277.1,287-305).
ggaagactccataatggaa

SEQ ID NO: 396383 - DNA, 19 bp, Homo sapiens
  siRNA target sequence for RNF17 (NM_031277.1,309-327).
ctgcagcctaagacgataa

SEQ ID NO: 396384 - DNA, 19 bp, Homo sapiens
  siRNA target sequence for RNF17 (NM_031277.1,314-332).
gcctaagacgataaagaat

SEQ ID NO: 396385 - DNA, 19 bp, Homo sapiens
  siRNA target sequence for RNF17 (NM_031277.1,315-333).
cctaagacgataaagaatt

SEQ ID NO: 396386 - DNA, 19 bp, Homo sapiens
  siRNA target sequence for RNF17 (NM_031277.1,424-442).
ctgtaatgttggacactaa

SEQ ID NO: 396387 - DNA, 19 bp, Homo sapiens
  siRNA target sequence for RNF17 (NM_031277.1,482-500).
ccatagtttcgaacagtta

SEQ ID NO: 396388 - DNA, 19 bp, Homo sapiens
  siRNA target sequence for RNF17 (NM_031277.1,487-505).
gtttcgaacagttaagcat

SEQ ID NO: 396389 - DNA, 19 bp, Homo sapiens
  siRNA target sequence for RNF17 (NM_031277.1,527-545).
catgcagaagcaaacgata

SEQ ID NO: 396390 - DNA, 19 bp, Homo sapiens
  siRNA target sequence for RNF17 (NM_031277.1,654-672).
gatgattatctatcaaatt

SEQ ID NO: 396391 - DNA, 19 bp, Homo sapiens
  siRNA target sequence for RNF17 (NM_031277.1,728-746).
gaacatagcaagagcatta

SEQ ID NO: 396392 - DNA, 19 bp, Homo sapiens
  siRNA target sequence for RNF17 (NM_031277.1,735-753).
gcaagagcattacaattat

SEQ ID NO: 396393 - DNA, 19 bp, Homo sapiens
  siRNA target sequence for RNF17 (NM_031277.1,747-765).
caattatcgccttctctaa

SEQ ID NO: 396394 - DNA, 19 bp, Homo sapiens
  siRNA target sequence for RNF17 (NM_031277.1,756-774).
ccttctctaagaacatact

SEQ ID NO: 396395 - DNA, 19 bp, Homo sapiens
  siRNA target sequence for RNF17 (NM_031277.1,775-793).
gtgacctgaatcagattat

SEQ ID NO: 396396 - DNA, 19 bp, Homo sapiens
  siRNA target sequence for RNF17 (NM_031277.1,794-812).
ccggactttgcagttaact

SEQ ID NO: 396397 - DNA, 19 bp, Homo sapiens
  siRNA target sequence for RNF17 (NM_031277.1,795-813).
cggactttgcagttaactt

SEQ ID NO: 396398 - DNA, 19 bp, Homo sapiens
  siRNA target sequence for RNF17 (NM_031277.1,797-815).
gactttgcagttaacttca

SEQ ID NO: 396399 - DNA, 19 bp, Homo sapiens
  siRNA target sequence for RNF17 (NM_031277.1,803-821).
gcagttaacttcagatagt

SEQ ID NO: 396400 - DNA, 19 bp, Homo sapiens
  siRNA target sequence for RNF17 (NM_031277.1,806-824).
gttaacttcagatagtgaa

SEQ ID NO: 396401 - DNA, 19 bp, Homo sapiens
  siRNA target sequence for RNF17 (NM_031277.1,834-852).
gttagttctccacaactaa

SEQ ID NO: 396402 - DNA, 19 bp, Homo sapiens
  siRNA target sequence for RNF17 (NM_031277.1,838-856).
gttctccacaactaaggaa

SEQ ID NO: 396403 - DNA, 19 bp, Homo sapiens
  siRNA target sequence for RNF17 (NM_031277.1,861-879).
cccaggttgagtgtgaatt

SEQ ID NO: 396404 - DNA, 19 bp, Homo sapiens
  siRNA target sequence for RNF17 (NM_031277.1,921-939).
gaatttagggactcaacaa

SEQ ID NO: 396405 - DNA, 19 bp, Homo sapiens
  siRNA target sequence for RNF17 (NM_031277.1,928-946).
gggactcaacaaaatgtta

SEQ ID NO: 396406 - DNA, 19 bp, Homo sapiens
  siRNA target sequence for RNF17 (NM_031277.1,1001-1019).
ggaactttcttgttacgat

SEQ ID NO: 396407 - DNA, 19 bp, Homo sapiens
  siRNA target sequence for RNF17 (NM_031277.1,1005-1023).
ctttcttgttacgatacat

SEQ ID NO: 396408 - DNA, 19 bp, Homo sapiens
  siRNA target sequence for RNF17 (NM_031277.1,1021-1039).
catacccaccgctagaaaa

SEQ ID NO: 396409 - DNA, 19 bp, Homo sapiens
  siRNA target sequence for RNF17 (NM_031277.1,1025-1043).
cccaccgctagaaaagaaa

SEQ ID NO: 396410 - DNA, 19 bp, Homo sapiens
  siRNA target sequence for RNF17 (NM_031277.1,1026-1044).
ccaccgctagaaaagaaaa

SEQ ID NO: 396411 - DNA, 19 bp, Homo sapiens
  siRNA target sequence for RNF17 (NM_031277.1,1096-1114).
ctgagacaaatgatgtaca

SEQ ID NO: 396412 - DNA, 19 bp, Homo sapiens
  siRNA target sequence for RNF17 (NM_031277.1,1100-1118).
gacaaatgatgtacattta

SEQ ID NO: 396413 - DNA, 19 bp, Homo sapiens
  siRNA target sequence for RNF17 (NM_031277.1,1201-1219).
gccctgatgtgataattga

SEQ ID NO: 396414 - DNA, 19 bp, Homo sapiens
  siRNA target sequence for RNF17 (NM_031277.1,1202-1220).
ccctgatgtgataattgaa

SEQ ID NO: 396415 - DNA, 19 bp, Homo sapiens
  siRNA target sequence for RNF17 (NM_031277.1,1204-1222).
ctgatgtgataattgaaga

SEQ ID NO: 396416 - DNA, 19 bp, Homo sapiens
  siRNA target sequence for RNF17 (NM_031277.1,1246-1264).
gttctgcagagctagtttt

SEQ ID NO: 396417 - DNA, 19 bp, Homo sapiens
  siRNA target sequence for RNF17 (NM_031277.1,1281-1299).
gatccttgccatttctaca

SEQ ID NO: 396418 - DNA, 19 bp, Homo sapiens
  siRNA target sequence for RNF17 (NM_031277.1,1295-1313).
ctacattcggaagtattca

SEQ ID NO: 396419 - DNA, 19 bp, Homo sapiens
  siRNA target sequence for RNF17 (NM_031277.1,1397-1415).
ggaactaggtgcaagaata

SEQ ID NO: 396420 - DNA, 19 bp, Homo sapiens
  siRNA target sequence for RNF17 (NM_031277.1,1398-1416).
gaactaggtgcaagaatat

SEQ ID NO: 396421 - DNA, 19 bp, Homo sapiens
  siRNA target sequence for RNF17 (NM_031277.1,1445-1463).
gtgtcgaggaactatcaca

SEQ ID NO: 396422 - DNA, 19 bp, Homo sapiens
  siRNA target sequence for RNF17 (NM_031277.1,1449-1467).
cgaggaactatcacagaat

SEQ ID NO: 396423 - DNA, 19 bp, Homo sapiens
  siRNA target sequence for RNF17 (NM_031277.1,1452-1470).
ggaactatcacagaattaa

SEQ ID NO: 396424 - DNA, 19 bp, Homo sapiens
  siRNA target sequence for RNF17 (NM_031277.1,1481-1499).
gggtagaaataccagaaaa

SEQ ID NO: 396425 - DNA, 19 bp, Homo sapiens
  siRNA target sequence for RNF17 (NM_031277.1,1583-1601).
gattgtcactggagttgtt

SEQ ID NO: 396426 - DNA, 19 bp, Homo sapiens
  siRNA target sequence for RNF17 (NM_031277.1,1623-1641).
cactctgctaagcaacata

SEQ ID NO: 396427 - DNA, 19 bp, Homo sapiens
  siRNA target sequence for RNF17 (NM_031277.1,1653-1671).
gatttatgtctggttctaa

SEQ ID NO: 396428 - DNA, 19 bp, Homo sapiens
  siRNA target sequence for RNF17 (NM_031277.1,1664-1682).
ggttctaaggaaatctgaa

SEQ ID NO: 396429 - DNA, 19 bp, Homo sapiens
  siRNA target sequence for RNF17 (NM_031277.1,1673-1691).
gaaatctgaaccatatact

SEQ ID NO: 396430 - DNA, 19 bp, Homo sapiens
  siRNA target sequence for RNF17 (NM_031277.1,1690-1708).
ctgaagggctgctaaaaga

SEQ ID NO: 396431 - DNA, 19 bp, Homo sapiens
  siRNA target sequence for RNF17 (NM_031277.1,1723-1741).
cacaaccatgctcattgaa

SEQ ID NO: 396432 - DNA, 19 bp, Homo sapiens
  siRNA target sequence for RNF17 (NM_031277.1,1733-1751).
ctcattgaaagacattgtt

SEQ ID NO: 396433 - DNA, 19 bp, Homo sapiens
  siRNA target sequence for RNF17 (NM_031277.1,1745-1763).
cattgttccacagaattca

SEQ ID NO: 396434 - DNA, 19 bp, Homo sapiens
  siRNA target sequence for RNF17 (NM_031277.1,1793-1811).
ggaatttttgaaaatggta

SEQ ID NO: 396435 - DNA, 19 bp, Homo sapiens
  siRNA target sequence for RNF17 (NM_031277.1,1817-1835).
caaggctgtttcaatgaaa

SEQ ID NO: 396436 - DNA, 19 bp, Homo sapiens
  siRNA target sequence for RNF17 (NM_031277.1,1905-1923).
gatatgcctgtgtctctta

SEQ ID NO: 396437 - DNA, 19 bp, Homo sapiens
  siRNA target sequence for RNF17 (NM_031277.1,1920-1938).
cttagagatgcgctagttt

SEQ ID NO: 396438 - DNA, 19 bp, Homo sapiens
  siRNA target sequence for RNF17 (NM_031277.1,1924-1942).
gagatgcgctagtttttat

SEQ ID NO: 396439 - DNA, 19 bp, Homo sapiens
  siRNA target sequence for IRTA2 (NM_031281.1,439-457).
gccctgtgcacttggattt

SEQ ID NO: 396440 - DNA, 19 bp, Homo sapiens
  siRNA target sequence for IRTA2 (NM_031281.1,532-550).
caaaggcggaagtaacact

SEQ ID NO: 396441 - DNA, 19 bp, Homo sapiens
  siRNA target sequence for IRTA2 (NM_031281.1,536-554).
ggcggaagtaacactgaat

SEQ ID NO: 396442 - DNA, 19 bp, Homo sapiens
  siRNA target sequence for IRTA2 (NM_031281.1,547-565).
cactgaataatactattta

SEQ ID NO: 396443 - DNA, 19 bp, Homo sapiens
  siRNA target sequence for IRTA2 (NM_031281.1,581-599).
cctggcattccttaataaa

SEQ ID NO: 396444 - DNA, 19 bp, Homo sapiens
  siRNA target sequence for IRTA2 (NM_031281.1,632-650).
caaggacaatggtgcatat

SEQ ID NO: 396445 - DNA, 19 bp, Homo sapiens
  siRNA target sequence for IRTA2 (NM_031281.1,652-670).
gctgtactggatataagga

SEQ ID NO: 396446 - DNA, 19 bp, Homo sapiens
  siRNA target sequence for IRTA2 (NM_031281.1,653-671).
ctgtactggatataaggaa

SEQ ID NO: 396447 - DNA, 19 bp, Homo sapiens
  siRNA target sequence for IRTA2 (NM_031281.1,660-678).
ggatataaggaaagttgtt

SEQ ID NO: 396448 - DNA, 19 bp, Homo sapiens
  siRNA target sequence for IRTA2 (NM_031281.1,874-892).
ggagtctctccccgaattt

SEQ ID NO: 396449 - DNA, 19 bp, Homo sapiens
  siRNA target sequence for IRTA2 (NM_031281.1,877-895).
gtctctccccgaatttcca

SEQ ID NO: 396450 - DNA, 19 bp, Homo sapiens
  siRNA target sequence for IRTA2 (NM_031281.1,884-902).
cccgaatttccagattact

SEQ ID NO: 396451 - DNA, 19 bp, Homo sapiens
  siRNA target sequence for IRTA2 (NM_031281.1,903-921).
gccatgtggagtaaagatt

SEQ ID NO: 396452 - DNA, 19 bp, Homo sapiens
  siRNA target sequence for IRTA2 (NM_031281.1,1095-1113).
gattctctgcgcactttgt

SEQ ID NO: 396453 - DNA, 19 bp, Homo sapiens
  siRNA target sequence for IRTA2 (NM_031281.1,1104-1122).
cgcactttgtacaggtttt

SEQ ID NO: 396454 - DNA, 19 bp, Homo sapiens
  siRNA target sequence for IRTA2 (NM_031281.1,1187-1205).
ctcactgactacagagaat

SEQ ID NO: 396455 - DNA, 19 bp, Homo sapiens
  siRNA target sequence for IRTA2 (NM_031281.1,1384-1402).
ccatcctgtaccagtttca

SEQ ID NO: 396456 - DNA, 19 bp, Homo sapiens
  siRNA target sequence for IRTA2 (NM_031281.1,1653-1671).
ggttccccacaaatcctat

SEQ ID NO: 396457 - DNA, 19 bp, Homo sapiens
  siRNA target sequence for IRTA2 (NM_031281.1,1818-1836).
gtggtgagcctttttgtca

SEQ ID NO: 396458 - DNA, 19 bp, Homo sapiens
  siRNA target sequence for IRTA2 (NM_031281.1,2525-2543).
ggatgtcaccctaggaaat

SEQ ID NO: 396459 - DNA, 19 bp, Homo sapiens
  siRNA target sequence for IRTA2 (NM_031281.1,2526-2544).
gatgtcaccctaggaaata

SEQ ID NO: 396460 - DNA, 19 bp, Homo sapiens
  siRNA target sequence for IRTA2 (NM_031281.1,2557-2575).
ctggaggagcgtccttaaa

SEQ ID NO: 396461 - DNA, 19 bp, Homo sapiens
  siRNA target sequence for IRTA2 (NM_031281.1,2673-2691).
gggctgaccgcgaacagaa

SEQ ID NO: 396462 - DNA, 19 bp, Homo sapiens
  siRNA target sequence for IRTA2 (NM_031281.1,2768-2786).
ctgctggctctcgagaaaa

SEQ ID NO: 396463 - DNA, 19 bp, Homo sapiens
  siRNA target sequence for IRTA2 (NM_031281.1,2841-2859).
caagagcccacctatcaca

SEQ ID NO: 396464 - DNA, 19 bp, Homo sapiens
  siRNA target sequence for IRTA2 (NM_031281.1,2846-2864).
gcccacctatcacaatgta

SEQ ID NO: 396465 - DNA, 19 bp, Homo sapiens
  siRNA target sequence for IRTA2 (NM_031281.1,2880-2898).
ctgcaaccagtgtacacta

SEQ ID NO: 396466 - DNA, 19 bp, Homo sapiens
  siRNA target sequence for IRTA2 (NM_031281.1,2882-2900).
gcaaccagtgtacactaat

SEQ ID NO: 396467 - DNA, 19 bp, Homo sapiens
  siRNA target sequence for IRTA2 (NM_031281.1,2886-2904).
ccagtgtacactaatgcaa

SEQ ID NO: 396468 - DNA, 19 bp, Homo sapiens
  siRNA target sequence for IRTA2 (NM_031281.1,2887-2905).
cagtgtacactaatgcaaa

SEQ ID NO: 396469 - DNA, 19 bp, Homo sapiens
  siRNA target sequence for IRTA2 (NM_031281.1,3003-3021).
ggttcccctatcatctact

SEQ ID NO: 396470 - DNA, 19 bp, Homo sapiens
  siRNA target sequence for IRTA1 (NM_031282.1,258-276).
ctctgacttgcaatggatt

SEQ ID NO: 396471 - DNA, 19 bp, Homo sapiens
  siRNA target sequence for IRTA1 (NM_031282.1,264-282).
cttgcaatggatttcagtt

SEQ ID NO: 396472 - DNA, 19 bp, Homo sapiens
  siRNA target sequence for IRTA1 (NM_031282.1,598-616).
cccacaagcaagttcaaat

SEQ ID NO: 396473 - DNA, 19 bp, Homo sapiens
  siRNA target sequence for IRTA1 (NM_031282.1,599-617).
ccacaagcaagttcaaata

SEQ ID NO: 396474 - DNA, 19 bp, Homo sapiens
  siRNA target sequence for IRTA1 (NM_031282.1,602-620).
caagcaagttcaaataaca

SEQ ID NO: 396475 - DNA, 19 bp, Homo sapiens
  siRNA target sequence for IRTA1 (NM_031282.1,710-728).
catccagagctgaaagcta

SEQ ID NO: 396476 - DNA, 19 bp, Homo sapiens
  siRNA target sequence for IRTA1 (NM_031282.1,739-757).
gcctacagaggggaattct

SEQ ID NO: 396477 - DNA, 19 bp, Homo sapiens
  siRNA target sequence for IRTA1 (NM_031282.1,741-759).
ctacagaggggaattctgt

SEQ ID NO: 396478 - DNA, 19 bp, Homo sapiens
  siRNA target sequence for IRTA1 (NM_031282.1,744-762).
cagaggggaattctgtaaa

SEQ ID NO: 396479 - DNA, 19 bp, Homo sapiens
  siRNA target sequence for IRTA1 (NM_031282.1,882-900).
caaccgtctggagagaaaa

SEQ ID NO: 396480 - DNA, 19 bp, Homo sapiens
  siRNA target sequence for IRTA1 (NM_031282.1,915-933).
ggtgtggtgctgaaacagt

SEQ ID NO: 396481 - DNA, 19 bp, Homo sapiens
  siRNA target sequence for IRTA1 (NM_031282.1,1191-1209).
gccatgcagggggatacta

SEQ ID NO: 396482 - DNA, 19 bp, Homo sapiens
  siRNA target sequence for IRTA1 (NM_031282.1,1471-1489).
ggagcttcagtcgttgtat

SEQ ID NO: 396483 - DNA, 19 bp, Homo sapiens
  siRNA target sequence for IRTA1 (NM_031282.1,1474-1492).
gcttcagtcgttgtatgtt

SEQ ID NO: 396484 - DNA, 19 bp, Homo sapiens
  siRNA target sequence for IRTA1 (NM_031282.1,1480-1498).
gtcgttgtatgttgatgta

SEQ ID NO: 396485 - DNA, 19 bp, Homo sapiens
  siRNA target sequence for IRTA1 (NM_031282.1,1482-1500).
cgttgtatgttgatgtaca

SEQ ID NO: 396486 - DNA, 19 bp, Homo sapiens
  siRNA target sequence for IRTA1 (NM_031282.1,1504-1522).
caaaaagggagatttggta

SEQ ID NO: 396487 - DNA, 19 bp, Homo sapiens
  siRNA target sequence for IRTA1 (NM_031282.1,1556-1574).
gaagaggaagctaatacct

SEQ ID NO: 396488 - DNA, 19 bp, Homo sapiens
  siRNA target sequence for IRTA1 (NM_031282.1,1610-1628).
gtctactctgaggtaaaga

SEQ ID NO: 396489 - DNA, 19 bp, Homo sapiens
  siRNA target sequence for PP1057 (NM_031285.1,502-520).
gggggaggcccacatttga

SEQ ID NO: 396490 - DNA, 19 bp, Homo sapiens
  siRNA target sequence for PP1057 (NM_031285.1,675-693).
gcctcgtgcgttttttgct

SEQ ID NO: 396491 - DNA, 19 bp, Homo sapiens
  siRNA target sequence for PP1057 (NM_031285.1,711-729).
gttggtttatgcctatcaa

SEQ ID NO: 396492 - DNA, 19 bp, Homo sapiens
  siRNA target sequence for PP1057 (NM_031285.1,785-803).
gtgcaacctccctgaaaat

SEQ ID NO: 396493 - DNA, 19 bp, Homo sapiens
  siRNA target sequence for PP1057 (NM_031285.1,877-895).
ccacctcatccgtctgttt

SEQ ID NO: 396494 - DNA, 19 bp, Homo sapiens
  siRNA target sequence for PP1057 (NM_031285.1,918-936).
ccacgctgccttctttact

SEQ ID NO: 396495 - DNA, 19 bp, Homo sapiens
  siRNA target sequence for PP1057 (NM_031285.1,943-961).
gcgcttggccgttttgtta

SEQ ID NO: 396496 - DNA, 19 bp, Homo sapiens
  siRNA target sequence for PP1057 (NM_031285.1,944-962).
cgcttggccgttttgttat

SEQ ID NO: 396497 - DNA, 19 bp, Homo sapiens
  siRNA target sequence for PP1057 (NM_031285.1,945-963).
gcttggccgttttgttatt

SEQ ID NO: 396498 - DNA, 19 bp, Homo sapiens
  siRNA target sequence for PP1057 (NM_031285.1,946-964).
cttggccgttttgttattt

SEQ ID NO: 396499 - DNA, 19 bp, Homo sapiens
  siRNA target sequence for HMGA1L4 (NM_031288.1,196-214).
gcctcagctcaaactcaaa

SEQ ID NO: 396500 - DNA, 19 bp, Homo sapiens
  siRNA target sequence for HMGA1L4 (NM_031288.1,297-315).
cccttatggttgtggataa

SEQ ID NO: 396501 - DNA, 19 bp, Homo sapiens
  siRNA target sequence for HMGA1L4 (NM_031288.1,298-316).
ccttatggttgtggataat

SEQ ID NO: 396502 - DNA, 19 bp, Homo sapiens
  siRNA target sequence for HMGA1L4 (NM_031288.1,364-382).
gctggatgaagacagtaat

SEQ ID NO: 396503 - DNA, 19 bp, Homo sapiens
  siRNA target sequence for GSG1 (NM_031289.1,363-381).
cccaggaggtggtacaata

SEQ ID NO: 396504 - DNA, 19 bp, Homo sapiens
  siRNA target sequence for GSG1 (NM_031289.1,471-489).
gggagaggtgccgaagttt

SEQ ID NO: 396505 - DNA, 19 bp, Homo sapiens
  siRNA target sequence for GSG1 (NM_031289.1,473-491).
gagaggtgccgaagtttca

SEQ ID NO: 396506 - DNA, 19 bp, Homo sapiens
  siRNA target sequence for GSG1 (NM_031289.1,475-493).
gaggtgccgaagtttcatt

SEQ ID NO: 396507 - DNA, 19 bp, Homo sapiens
  siRNA target sequence for GSG1 (NM_031289.1,477-495).
ggtgccgaagtttcattga

SEQ ID NO: 396508 - DNA, 19 bp, Homo sapiens
  siRNA target sequence for GSG1 (NM_031289.1,478-496).
gtgccgaagtttcattgaa

SEQ ID NO: 396509 - DNA, 19 bp, Homo sapiens
  siRNA target sequence for GSG1 (NM_031289.1,480-498).
gccgaagtttcattgaact

SEQ ID NO: 396510 - DNA, 19 bp, Homo sapiens
  siRNA target sequence for GSG1 (NM_031289.1,481-499).
ccgaagtttcattgaactt

SEQ ID NO: 396511 - DNA, 19 bp, Homo sapiens
  siRNA target sequence for GSG1 (NM_031289.1,482-500).
cgaagtttcattgaactta

SEQ ID NO: 396512 - DNA, 19 bp, Homo sapiens
  siRNA target sequence for GSG1 (NM_031289.1,565-583).
ccccactctccgatttgga

SEQ ID NO: 396513 - DNA, 19 bp, Homo sapiens
  siRNA target sequence for GSG1 (NM_031289.1,631-649).
gctttgtggcaaaaatcct

SEQ ID NO: 396514 - DNA, 19 bp, Homo sapiens
  siRNA target sequence for GSG1 (NM_031289.1,638-656).
ggcaaaaatcctatggtta

SEQ ID NO: 396515 - DNA, 19 bp, Homo sapiens
  siRNA target sequence for GSG1 (NM_031289.1,639-657).
gcaaaaatcctatggttat

SEQ ID NO: 396516 - DNA, 19 bp, Homo sapiens
  siRNA target sequence for GSG1 (NM_031289.1,674-692).
cacctacatcggacttcaa

SEQ ID NO: 396517 - DNA, 19 bp, Homo sapiens
  siRNA target sequence for GSG1 (NM_031289.1,744-762).
gcctgtgggctcaaactga

SEQ ID NO: 396518 - DNA, 19 bp, Homo sapiens
  siRNA target sequence for GSG1 (NM_031289.1,872-890).
gagaccacatgtttggaat

SEQ ID NO: 396519 - DNA, 19 bp, Homo sapiens
  siRNA target sequence for DKFZP434K1172 (NM_031290.1,280-298).
ccattccggctgataagga

SEQ ID NO: 396520 - DNA, 19 bp, Homo sapiens
  siRNA target sequence for DKFZP434K1172 (NM_031290.1,281-299).
cattccggctgataaggaa

SEQ ID NO: 396521 - DNA, 19 bp, Homo sapiens
  siRNA target sequence for DKFZP434K1172 (NM_031290.1,286-304).
cggctgataaggaagatgt

SEQ ID NO: 396522 - DNA, 19 bp, Homo sapiens
  siRNA target sequence for DKFZP434K1172 (NM_031290.1,357-375).
ggcatcctctcccagtatt

SEQ ID NO: 396523 - DNA, 19 bp, Homo sapiens
  siRNA target sequence for DKFZP434K1172 (NM_031290.1,369-387).
cagtattcgccagaagaaa

SEQ ID NO: 396524 - DNA, 19 bp, Homo sapiens
  siRNA target sequence for DKFZP434K1172 (NM_031290.1,371-389).
gtattcgccagaagaaact

SEQ ID NO: 396525 - DNA, 19 bp, Homo sapiens
  siRNA target sequence for DKFZP434K1172 (NM_031290.1,416-434).
cttttcgcgaagagatgaa

SEQ ID NO: 396526 - DNA, 19 bp, Homo sapiens
  siRNA target sequence for DKFZP434K1172 (NM_031290.1,421-439).
cgcgaagagatgaaaattt

SEQ ID NO: 396527 - DNA, 19 bp, Homo sapiens
  siRNA target sequence for DKFZP434K1172 (NM_031290.1,423-441).
cgaagagatgaaaattttt

SEQ ID NO: 396528 - DNA, 19 bp, Homo sapiens
  siRNA target sequence for DKFZP434K1172 (NM_031290.1,485-503).
gaggcaagatccatgcttt

SEQ ID NO: 396529 - DNA, 19 bp, Homo sapiens
  siRNA target sequence for DKFZP434K1172 (NM_031290.1,508-526).
ggccagatcctgggttttt

SEQ ID NO: 396530 - DNA, 19 bp, Homo sapiens
  siRNA target sequence for DKFZP434K1172 (NM_031290.1,647-665).
ctttctggaaggaggataa

SEQ ID NO: 396531 - DNA, 19 bp, Homo sapiens
  siRNA target sequence for DKFZP434K1172 (NM_031290.1,793-811).
gccctgtgggaagataaaa

SEQ ID NO: 396532 - DNA, 19 bp, Homo sapiens
  siRNA target sequence for PMFBP1 (NM_031293.1,342-360).
ggaatttgggtccagtaaa

SEQ ID NO: 396533 - DNA, 19 bp, Homo sapiens
  siRNA target sequence for PMFBP1 (NM_031293.1,444-462).
gcagacttcttactattct

SEQ ID NO: 396534 - DNA, 19 bp, Homo sapiens
  siRNA target sequence for PMFBP1 (NM_031293.1,699-717).
gagcaacatcgagttacta

SEQ ID NO: 396535 - DNA, 19 bp, Homo sapiens
  siRNA target sequence for PMFBP1 (NM_031293.1,701-719).
gcaacatcgagttactaga

SEQ ID NO: 396536 - DNA, 19 bp, Homo sapiens
  siRNA target sequence for PMFBP1 (NM_031293.1,702-720).
caacatcgagttactagaa

SEQ ID NO: 396537 - DNA, 19 bp, Homo sapiens
  siRNA target sequence for PMFBP1 (NM_031293.1,783-801).
gggtgatcattcaaaggta

SEQ ID NO: 396538 - DNA, 19 bp, Homo sapiens
  siRNA target sequence for PMFBP1 (NM_031293.1,948-966).
gcgtgaaaaggctttgata

SEQ ID NO: 396539 - DNA, 19 bp, Homo sapiens
  siRNA target sequence for PMFBP1 (NM_031293.1,949-967).
cgtgaaaaggctttgataa

SEQ ID NO: 396540 - DNA, 19 bp, Homo sapiens
  siRNA target sequence for PMFBP1 (NM_031293.1,1335-1353).
gttcctccaagagaaagat

SEQ ID NO: 396541 - DNA, 19 bp, Homo sapiens
  siRNA target sequence for PMFBP1 (NM_031293.1,1753-1771).
gaacaaacctccaacagaa

SEQ ID NO: 396542 - DNA, 19 bp, Homo sapiens
  siRNA target sequence for PMFBP1 (NM_031293.1,1779-1797).
ggaggagctgtcattagaa

SEQ ID NO: 396543 - DNA, 19 bp, Homo sapiens
  siRNA target sequence for PMFBP1 (NM_031293.1,1864-1882).
gctgagcaggatatgaaaa

SEQ ID NO: 396544 - DNA, 19 bp, Homo sapiens
  siRNA target sequence for PMFBP1 (NM_031293.1,1931-1949).
ccatcaaatgcaagttaga

SEQ ID NO: 396545 - DNA, 19 bp, Homo sapiens
  siRNA target sequence for PMFBP1 (NM_031293.1,1932-1950).
catcaaatgcaagttagaa

SEQ ID NO: 396546 - DNA, 19 bp, Homo sapiens
  siRNA target sequence for PMFBP1 (NM_031293.1,1940-1958).
gcaagttagaagaagatct

SEQ ID NO: 396547 - DNA, 19 bp, Homo sapiens
  siRNA target sequence for PMFBP1 (NM_031293.1,2047-2065).
gctttgcggcaggaattta

SEQ ID NO: 396548 - DNA, 19 bp, Homo sapiens
  siRNA target sequence for PMFBP1 (NM_031293.1,2048-2066).
ctttgcggcaggaatttaa

SEQ ID NO: 396549 - DNA, 19 bp, Homo sapiens
  siRNA target sequence for PMFBP1 (NM_031293.1,2134-2152).
gagctacagtgttgttcta

SEQ ID NO: 396550 - DNA, 19 bp, Homo sapiens
  siRNA target sequence for PMFBP1 (NM_031293.1,2160-2178).
ggaatcctctctcaacaaa

SEQ ID NO: 396551 - DNA, 19 bp, Homo sapiens
  siRNA target sequence for PMFBP1 (NM_031293.1,2161-2179).
gaatcctctctcaacaaat

SEQ ID NO: 396552 - DNA, 19 bp, Homo sapiens
  siRNA target sequence for PMFBP1 (NM_031293.1,2227-2245).
cttcagaaggagtccttaa

SEQ ID NO: 396553 - DNA, 19 bp, Homo sapiens
  siRNA target sequence for PMFBP1 (NM_031293.1,2375-2393).
ccctcgagaagctcaatca

SEQ ID NO: 396554 - DNA, 19 bp, Homo sapiens
  siRNA target sequence for PMFBP1 (NM_031293.1,2395-2413).
gtgacctcagagacaaaga

SEQ ID NO: 396555 - DNA, 19 bp, Homo sapiens
  siRNA target sequence for PMFBP1 (NM_031293.1,2499-2517).
gctcaatacggaattaaga

SEQ ID NO: 396556 - DNA, 19 bp, Homo sapiens
  siRNA target sequence for PMFBP1 (NM_031293.1,2766-2784).
gctctaccgagggaatgat

SEQ ID NO: 396557 - DNA, 19 bp, Homo sapiens
  siRNA target sequence for PMFBP1 (NM_031293.1,2772-2790).
ccgagggaatgatcagatt

SEQ ID NO: 396558 - DNA, 19 bp, Homo sapiens
  siRNA target sequence for PMFBP1 (NM_031293.1,2773-2791).
cgagggaatgatcagatta

SEQ ID NO: 396559 - DNA, 19 bp, Homo sapiens
  siRNA target sequence for PMFBP1 (NM_031293.1,2774-2792).
gagggaatgatcagattat

SEQ ID NO: 396560 - DNA, 19 bp, Homo sapiens
  siRNA target sequence for PMFBP1 (NM_031293.1,2826-2844).
ggtcgccaatgagaaacta

SEQ ID NO: 396561 - DNA, 19 bp, Homo sapiens
  siRNA target sequence for PMFBP1 (NM_031293.1,2899-2917).
gaccacctccacagtgtaa

SEQ ID NO: 396562 - DNA, 19 bp, Homo sapiens
  siRNA target sequence for DKFZP586M1120 (NM_031294.2,429-447).
cagctggacaataacatca

SEQ ID NO: 396563 - DNA, 19 bp, Homo sapiens
  siRNA target sequence for DKFZP586M1120 (NM_031294.2,431-449).
gctggacaataacatcatt

SEQ ID NO: 396564 - DNA, 19 bp, Homo sapiens
  siRNA target sequence for DKFZP586M1120 (NM_031294.2,633-651).
ggcaacaaccggattgaca

SEQ ID NO: 396565 - DNA, 19 bp, Homo sapiens
  siRNA target sequence for DKFZP586M1120 (NM_031294.2,634-652).
gcaacaaccggattgacaa

SEQ ID NO: 396566 - DNA, 19 bp, Homo sapiens
  siRNA target sequence for DKFZP586M1120 (NM_031294.2,642-660).
cggattgacaacatgatga

SEQ ID NO: 396567 - DNA, 19 bp, Homo sapiens
  siRNA target sequence for DKFZP586M1120 (NM_031294.2,735-753).
gattacaagatgttcatct

SEQ ID NO: 396568 - DNA, 19 bp, Homo sapiens
  siRNA target sequence for DKFZP586M1120 (NM_031294.2,1059-1077).
gtcatcatctgcgtgaata

SEQ ID NO: 396569 - DNA, 19 bp, Homo sapiens
  siRNA target sequence for DKFZP586M1120 (NM_031294.2,1061-1079).
catcatctgcgtgaatatt

SEQ ID NO: 396570 - DNA, 19 bp, Homo sapiens
  siRNA target sequence for DKFZP586M1120 (NM_031294.2,1172-1190).
gcagggcaaacgcaagatt

SEQ ID NO: 396571 - DNA, 19 bp, Homo sapiens
  siRNA target sequence for DKFZP586M1120 (NM_031294.2,1183-1201).
gcaagattgccaaattcga

SEQ ID NO: 396572 - DNA, 19 bp, Homo sapiens
  siRNA target sequence for DKFZP586M1120 (NM_031294.2,1205-1223).
gaagcacttgtcgagttta

SEQ ID NO: 396573 - DNA, 19 bp, Homo sapiens
  siRNA target sequence for DKFZP586M1120 (NM_031294.2,1208-1226).
gcacttgtcgagtttaagt

SEQ ID NO: 396574 - DNA, 19 bp, Homo sapiens
  siRNA target sequence for DKFZP586M1120 (NM_031294.2,1245-1263).
gaactgcccaacattgaga

SEQ ID NO: 396575 - DNA, 19 bp, Homo sapiens
  siRNA target sequence for DKFZP586M1120 (NM_031294.2,1260-1278).
gagaagatgatcctagaat

SEQ ID NO: 396576 - DNA, 19 bp, Homo sapiens
  siRNA target sequence for DKFZP586M1120 (NM_031294.2,1340-1358).
gcagctggaggagactata

SEQ ID NO: 396577 - DNA, 19 bp, Homo sapiens
  siRNA target sequence for DKFZP586M1120 (NM_031294.2,1349-1367).
ggagactataaacatgttt

SEQ ID NO: 396578 - DNA, 19 bp, Homo sapiens
  siRNA target sequence for DKFZP586M1120 (NM_031294.2,1388-1406).
ggtaggactgtttatcgaa

SEQ ID NO: 396579 - DNA, 19 bp, Homo sapiens
  siRNA target sequence for DKFZP586M1120 (NM_031294.2,1389-1407).
gtaggactgtttatcgaaa

SEQ ID NO: 396580 - DNA, 19 bp, Homo sapiens
  siRNA target sequence for DKFZP586M1120 (NM_031294.2,1432-1450).
gccgggacctggagaatca

SEQ ID NO: 396581 - DNA, 19 bp, Homo sapiens
  siRNA target sequence for DKFZP586M1120 (NM_031294.2,1543-1561).
cgctttttgtcgataaaga

SEQ ID NO: 396582 - DNA, 19 bp, Homo sapiens
  siRNA target sequence for DKFZP586M1120 (NM_031294.2,1553-1571).
cgataaagatacgattgtt

SEQ ID NO: 396583 - DNA, 19 bp, Homo sapiens
  siRNA target sequence for DKFZP586M1120 (NM_031294.2,1554-1572).
gataaagatacgattgtta

SEQ ID NO: 396584 - DNA, 19 bp, Homo sapiens
  siRNA target sequence for DKFZP586M1120 (NM_031294.2,1610-1628).
gattgacaatcgagaagat

SEQ ID NO: 396585 - DNA, 19 bp, Homo sapiens
  siRNA target sequence for DKFZP586M1120 (NM_031294.2,1632-1650).
ctggtgaccagaatcaact

SEQ ID NO: 396586 - DNA, 19 bp, Homo sapiens
  siRNA target sequence for DKFZP586M1120 (NM_031294.2,1635-1653).
gtgaccagaatcaactctt

SEQ ID NO: 396587 - DNA, 19 bp, Homo sapiens
  siRNA target sequence for DKFZP586M1120 (NM_031294.2,1649-1667).
ctcttggtgtacacgttta

SEQ ID NO: 396588 - DNA, 19 bp, Homo sapiens
  siRNA target sequence for DKFZP586M1120 (NM_031294.2,1709-1727).
gcgcgtgaaggagatcaat

SEQ ID NO: 396589 - DNA, 19 bp, Homo sapiens
  siRNA target sequence for DKFZP761H1710 (NM_031297.2,229-247).
ctgtgggcactcctacaat

SEQ ID NO: 396590 - DNA, 19 bp, Homo sapiens
  siRNA target sequence for DKFZP761H1710 (NM_031297.2,233-251).
gggcactcctacaatgtca

SEQ ID NO: 396591 - DNA, 19 bp, Homo sapiens
  siRNA target sequence for MXD3 (NM_031300.2,224-242).
gcggtcagtgcacaatgaa

SEQ ID NO: 396592 - DNA, 19 bp, Homo sapiens
  siRNA target sequence for MXD3 (NM_031300.2,226-244).
ggtcagtgcacaatgaact

SEQ ID NO: 396593 - DNA, 19 bp, Homo sapiens
  siRNA target sequence for PSFL (NM_031301.1,38-56).
cttcggctgcgccttcatt

SEQ ID NO: 396594 - DNA, 19 bp, Homo sapiens
  siRNA target sequence for PSFL (NM_031301.1,67-85).
ctgcgctcgccctttatgt

SEQ ID NO: 396595 - DNA, 19 bp, Homo sapiens
  siRNA target sequence for PSFL (NM_031301.1,69-87).
gcgctcgccctttatgtct

SEQ ID NO: 396596 - DNA, 19 bp, Homo sapiens
  siRNA target sequence for PSFL (NM_031301.1,70-88).
cgctcgccctttatgtctt

SEQ ID NO: 396597 - DNA, 19 bp, Homo sapiens
  siRNA target sequence for PSFL (NM_031301.1,100-118).
ccgagccgttgcgtatcat

SEQ ID NO: 396598 - DNA, 19 bp, Homo sapiens
  siRNA target sequence for PSFL (NM_031301.1,102-120).
gagccgttgcgtatcatct

SEQ ID NO: 396599 - DNA, 19 bp, Homo sapiens
  siRNA target sequence for PSFL (NM_031301.1,145-163).
ggttggtgtctctactgat

SEQ ID NO: 396600 - DNA, 19 bp, Homo sapiens
  siRNA target sequence for PSFL (NM_031301.1,146-164).
gttggtgtctctactgatt

SEQ ID NO: 396601 - DNA, 19 bp, Homo sapiens
  siRNA target sequence for PSFL (NM_031301.1,150-168).
gtgtctctactgatttcgt

SEQ ID NO: 396602 - DNA, 19 bp, Homo sapiens
  siRNA target sequence for PSFL (NM_031301.1,159-177).
ctgatttcgtcccttgttt

SEQ ID NO: 396603 - DNA, 19 bp, Homo sapiens
  siRNA target sequence for PSFL (NM_031301.1,194-212).
cattattgacaacaaagat

SEQ ID NO: 396604 - DNA, 19 bp, Homo sapiens
  siRNA target sequence for PSFL (NM_031301.1,224-242).
gaaatatctgctgatcttt

SEQ ID NO: 396605 - DNA, 19 bp, Homo sapiens
  siRNA target sequence for PSFL (NM_031301.1,246-264).
gcgtttgtctctgtctata

SEQ ID NO: 396606 - DNA, 19 bp, Homo sapiens
  siRNA target sequence for PSFL (NM_031301.1,275-293).
gttccgatttgcatattat

SEQ ID NO: 396607 - DNA, 19 bp, Homo sapiens
  siRNA target sequence for PSFL (NM_031301.1,278-296).
ccgatttgcatattataaa

SEQ ID NO: 396608 - DNA, 19 bp, Homo sapiens
  siRNA target sequence for PSFL (NM_031301.1,315-333).
gaaggtttgaagagtataa

SEQ ID NO: 396609 - DNA, 19 bp, Homo sapiens
  siRNA target sequence for PSFL (NM_031301.1,359-377).
gcgactgctggcctatgtt

SEQ ID NO: 396610 - DNA, 19 bp, Homo sapiens
  siRNA target sequence for PSFL (NM_031301.1,360-378).
cgactgctggcctatgttt

SEQ ID NO: 396611 - DNA, 19 bp, Homo sapiens
  siRNA target sequence for PSFL (NM_031301.1,394-412).
gaatcatgagtggagtatt

SEQ ID NO: 396612 - DNA, 19 bp, Homo sapiens
  siRNA target sequence for PSFL (NM_031301.1,405-423).
ggagtattttcctttgtga

SEQ ID NO: 396613 - DNA, 19 bp, Homo sapiens
  siRNA target sequence for PSFL (NM_031301.1,458-476).
gggcattcatggagattct

SEQ ID NO: 396614 - DNA, 19 bp, Homo sapiens
  siRNA target sequence for PSFL (NM_031301.1,577-595).
ggggcatcctccttatcgt

SEQ ID NO: 396615 - DNA, 19 bp, Homo sapiens
  siRNA target sequence for PSFL (NM_031301.1,623-641).
ccagaccttcataagttct

SEQ ID NO: 396616 - DNA, 19 bp, Homo sapiens
  siRNA target sequence for PSFL (NM_031301.1,624-642).
cagaccttcataagttctt

SEQ ID NO: 396617 - DNA, 19 bp, Homo sapiens
  siRNA target sequence for PSFL (NM_031301.1,661-679).
cgtcagcatttataatcct

SEQ ID NO: 396618 - DNA, 19 bp, Homo sapiens
  siRNA target sequence for PSFL (NM_031301.1,752-770).
ccaagacaagaactttctt

SEQ ID NO: 396619 - DNA, 19 bp, Homo sapiens
  siRNA target sequence for DKFZP564B1162 (NM_031305.1,663-681).
gcctgaagaccggaattct

SEQ ID NO: 396620 - DNA, 19 bp, Homo sapiens
  siRNA target sequence for DKFZP564B1162 (NM_031305.1,724-742).
cctaaaactacatacagaa

SEQ ID NO: 396621 - DNA, 19 bp, Homo sapiens
  siRNA target sequence for DKFZP564B1162 (NM_031305.1,773-791).
gcatttttggacagaaact

SEQ ID NO: 396622 - DNA, 19 bp, Homo sapiens
  siRNA target sequence for DKFZP564B1162 (NM_031305.1,792-810).
ggaggatactgttcgttat

SEQ ID NO: 396623 - DNA, 19 bp, Homo sapiens
  siRNA target sequence for DKFZP564B1162 (NM_031305.1,802-820).
gttcgttatgagaagagat

SEQ ID NO: 396624 - DNA, 19 bp, Homo sapiens
  siRNA target sequence for DKFZP564B1162 (NM_031305.1,913-931).
ggccaggctaatcttgtta

SEQ ID NO: 396625 - DNA, 19 bp, Homo sapiens
  siRNA target sequence for DKFZP564B1162 (NM_031305.1,959-977).
gggagaagccatcatttga

SEQ ID NO: 396626 - DNA, 19 bp, Homo sapiens
  siRNA target sequence for DKFZP564B1162 (NM_031305.1,996-1014).
cacggtggcatcacttctt

SEQ ID NO: 396627 - DNA, 19 bp, Homo sapiens
  siRNA target sequence for DKFZP564B1162 (NM_031305.1,1036-1054).
ccagaaccagttattcctt

SEQ ID NO: 396628 - DNA, 19 bp, Homo sapiens
  siRNA target sequence for DKFZP564B1162 (NM_031305.1,1037-1055).
cagaaccagttattcctta

SEQ ID NO: 396629 - DNA, 19 bp, Homo sapiens
  siRNA target sequence for DKFZP564B1162 (NM_031305.1,1052-1070).
cttatgcgaagtatgaaga

SEQ ID NO: 396630 - DNA, 19 bp, Homo sapiens
  siRNA target sequence for DKFZP564B1162 (NM_031305.1,1057-1075).
gcgaagtatgaagattttt

SEQ ID NO: 396631 - DNA, 19 bp, Homo sapiens
  siRNA target sequence for DKFZP564B1162 (NM_031305.1,1114-1132).
ggtgttaaggaattagcaa

SEQ ID NO: 396632 - DNA, 19 bp, Homo sapiens
  siRNA target sequence for DKFZP564B1162 (NM_031305.1,1115-1133).
gtgttaaggaattagcaaa

SEQ ID NO: 396633 - DNA, 19 bp, Homo sapiens
  siRNA target sequence for DKFZP564B1162 (NM_031305.1,1168-1186).
ctcctcaagtatatttgca

SEQ ID NO: 396634 - DNA, 19 bp, Homo sapiens
  siRNA target sequence for DKFZP564B1162 (NM_031305.1,1208-1226).
cctactcgggagttaacaa

SEQ ID NO: 396635 - DNA, 19 bp, Homo sapiens
  siRNA target sequence for DKFZP564B1162 (NM_031305.1,1209-1227).
ctactcgggagttaacaaa

SEQ ID NO: 396636 - DNA, 19 bp, Homo sapiens
  siRNA target sequence for DKFZP564B1162 (NM_031305.1,1215-1233).
gggagttaacaaaatgagt

SEQ ID NO: 396637 - DNA, 19 bp, Homo sapiens
  siRNA target sequence for DKFZP564B1162 (NM_031305.1,1250-1268).
cggtctttggtcctaatat

SEQ ID NO: 396638 - DNA, 19 bp, Homo sapiens
  siRNA target sequence for DKFZP564B1162 (NM_031305.1,1282-1300).
gtggaagatcctttgacta

SEQ ID NO: 396639 - DNA, 19 bp, Homo sapiens
  siRNA target sequence for DKFZP564B1162 (NM_031305.1,1285-1303).
gaagatcctttgactatca

SEQ ID NO: 396640 - DNA, 19 bp, Homo sapiens
  siRNA target sequence for DKFZP564B1162 (NM_031305.1,1318-1336).
gtggtccagcagttgatgt

SEQ ID NO: 396641 - DNA, 19 bp, Homo sapiens
  siRNA target sequence for DKFZP564B1162 (NM_031305.1,1530-1548).
gagaagcagcatgaacaat

SEQ ID NO: 396642 - DNA, 19 bp, Homo sapiens
  siRNA target sequence for DKFZP564B1162 (NM_031305.1,1598-1616).
gtgttcacaagctagatgt

SEQ ID NO: 396643 - DNA, 19 bp, Homo sapiens
  siRNA target sequence for DKFZP564B1162 (NM_031305.1,1631-1649).
ctctcatggtcaaaaagaa

SEQ ID NO: 396644 - DNA, 19 bp, Homo sapiens
  siRNA target sequence for DKFZP564B1162 (NM_031305.1,1667-1685).
gtagtgggatagttaccaa

SEQ ID NO: 396645 - DNA, 19 bp, Homo sapiens
  siRNA target sequence for DKFZP564B1162 (NM_031305.1,1776-1794).
gaaggtatctggtaccaaa

SEQ ID NO: 396646 - DNA, 19 bp, Homo sapiens
  siRNA target sequence for DKFZP564B1162 (NM_031305.1,1799-1817).
gcacgcacagtgtacagaa

SEQ ID NO: 396647 - DNA, 19 bp, Homo sapiens
  siRNA target sequence for DKFZP564B1162 (NM_031305.1,1800-1818).
cacgcacagtgtacagaat

SEQ ID NO: 396648 - DNA, 19 bp, Homo sapiens
  siRNA target sequence for DKFZP564B1162 (NM_031305.1,1823-1841).
cggtgcgcatgggcatttt

SEQ ID NO: 396649 - DNA, 19 bp, Homo sapiens
  siRNA target sequence for DKFZP564B1162 (NM_031305.1,1828-1846).
cgcatgggcattttgaaca

SEQ ID NO: 396650 - DNA, 19 bp, Homo sapiens
  siRNA target sequence for DKFZP564B1162 (NM_031305.1,1865-1883).
ccacaaatgttcgaaacat

SEQ ID NO: 396651 - DNA, 19 bp, Homo sapiens
  siRNA target sequence for DKFZP564B1162 (NM_031305.1,2000-2018).
ccatgatgaaccttgatga

SEQ ID NO: 396652 - DNA, 19 bp, Homo sapiens
  siRNA target sequence for DKFZP564B1162 (NM_031305.1,2017-2035).
gacaagcagagcattgaca

SEQ ID NO: 396653 - DNA, 19 bp, Homo sapiens
  siRNA target sequence for DKFZP564B1162 (NM_031305.1,2306-2324).
gtgcactgcacagtttagt

SEQ ID NO: 396654 - DNA, 19 bp, Homo sapiens
  siRNA target sequence for DKFZP564B1162 (NM_031305.1,2384-2402).
gcttagaacagcgaaactt

SEQ ID NO: 396655 - DNA, 19 bp, Homo sapiens
  siRNA target sequence for DKFZP564B1162 (NM_031305.1,2389-2407).
gaacagcgaaacttgactt

SEQ ID NO: 396656 - DNA, 19 bp, Homo sapiens
  siRNA target sequence for DKFZP564B1162 (NM_031305.1,2597-2615).
ccgagagaggaaacacaat

SEQ ID NO: 396657 - DNA, 19 bp, Homo sapiens
  siRNA target sequence for DKFZP564B1162 (NM_031305.1,2598-2616).
cgagagaggaaacacaata

SEQ ID NO: 396658 - DNA, 19 bp, Homo sapiens
  siRNA target sequence for FKSG32 (NM_031307.2,117-135).
gactgagaagctcctaaaa

SEQ ID NO: 396659 - DNA, 19 bp, Homo sapiens
  siRNA target sequence for FKSG32 (NM_031307.2,154-172).
caagaggtgcaaagactta

SEQ ID NO: 396660 - DNA, 19 bp, Homo sapiens
  siRNA target sequence for FKSG32 (NM_031307.2,239-257).
ctaagcgtgcatttgattt

SEQ ID NO: 396661 - DNA, 19 bp, Homo sapiens
  siRNA target sequence for FKSG32 (NM_031307.2,275-293).
gacacgtagccctaagaat

SEQ ID NO: 396662 - DNA, 19 bp, Homo sapiens
  siRNA target sequence for FKSG32 (NM_031307.2,284-302).
ccctaagaatagcctatat

SEQ ID NO: 396663 - DNA, 19 bp, Homo sapiens
  siRNA target sequence for FKSG32 (NM_031307.2,380-398).
ccaagactcgactagtaga

SEQ ID NO: 396664 - DNA, 19 bp, Homo sapiens
  siRNA target sequence for FKSG32 (NM_031307.2,381-399).
caagactcgactagtagaa

SEQ ID NO: 396665 - DNA, 19 bp, Homo sapiens
  siRNA target sequence for FKSG32 (NM_031307.2,404-422).
gacagacatccaactatca

SEQ ID NO: 396666 - DNA, 19 bp, Homo sapiens
  siRNA target sequence for FKSG32 (NM_031307.2,507-525).
ggattccgaggactttaat

SEQ ID NO: 396667 - DNA, 19 bp, Homo sapiens
  siRNA target sequence for FKSG32 (NM_031307.2,512-530).
ccgaggactttaatgtaaa

SEQ ID NO: 396668 - DNA, 19 bp, Homo sapiens
  siRNA target sequence for FKSG32 (NM_031307.2,513-531).
cgaggactttaatgtaaaa

SEQ ID NO: 396669 - DNA, 19 bp, Homo sapiens
  siRNA target sequence for FKSG32 (NM_031307.2,550-568).
gctgaagagatccgttata

SEQ ID NO: 396670 - DNA, 19 bp, Homo sapiens
  siRNA target sequence for FKSG32 (NM_031307.2,562-580).
cgttatacccacattctca

SEQ ID NO: 396671 - DNA, 19 bp, Homo sapiens
  siRNA target sequence for FKSG32 (NM_031307.2,563-581).
gttatacccacattctcaa

SEQ ID NO: 396672 - DNA, 19 bp, Homo sapiens
  siRNA target sequence for FKSG32 (NM_031307.2,592-610).
cctccagacatccgtatat

SEQ ID NO: 396673 - DNA, 19 bp, Homo sapiens
  siRNA target sequence for FKSG32 (NM_031307.2,593-611).
ctccagacatccgtatatt

SEQ ID NO: 396674 - DNA, 19 bp, Homo sapiens
  siRNA target sequence for FKSG32 (NM_031307.2,663-681).
gcggacttaccgctatttt

SEQ ID NO: 396675 - DNA, 19 bp, Homo sapiens
  siRNA target sequence for FKSG32 (NM_031307.2,664-682).
cggacttaccgctattttt

SEQ ID NO: 396676 - DNA, 19 bp, Homo sapiens
  siRNA target sequence for FKSG32 (NM_031307.2,665-683).
ggacttaccgctatttttt

SEQ ID NO: 396677 - DNA, 19 bp, Homo sapiens
  siRNA target sequence for FKSG32 (NM_031307.2,684-702).
ccctcgtgctgatttagat

SEQ ID NO: 396678 - DNA, 19 bp, Homo sapiens
  siRNA target sequence for FKSG32 (NM_031307.2,685-703).
cctcgtgctgatttagata

SEQ ID NO: 396679 - DNA, 19 bp, Homo sapiens
  siRNA target sequence for FKSG32 (NM_031307.2,691-709).
gctgatttagatattgtaa

SEQ ID NO: 396680 - DNA, 19 bp, Homo sapiens
  siRNA target sequence for FKSG32 (NM_031307.2,700-718).
gatattgtaaccatggatt

SEQ ID NO: 396681 - DNA, 19 bp, Homo sapiens
  siRNA target sequence for FKSG32 (NM_031307.2,736-754).
gttggcacccatgatttca

SEQ ID NO: 396682 - DNA, 19 bp, Homo sapiens
  siRNA target sequence for FKSG32 (NM_031307.2,748-766).
gatttcaggaacttgtgta

SEQ ID NO: 396683 - DNA, 19 bp, Homo sapiens
  siRNA target sequence for FKSG32 (NM_031307.2,775-793).
gtagccaacggtgtgatta

SEQ ID NO: 396684 - DNA, 19 bp, Homo sapiens
  siRNA target sequence for FKSG32 (NM_031307.2,779-797).
ccaacggtgtgattaattt

SEQ ID NO: 396685 - DNA, 19 bp, Homo sapiens
  siRNA target sequence for FKSG32 (NM_031307.2,780-798).
caacggtgtgattaatttt

SEQ ID NO: 396686 - DNA, 19 bp, Homo sapiens
  siRNA target sequence for FKSG32 (NM_031307.2,903-921).
ggcattcctttatcatcaa

SEQ ID NO: 396687 - DNA, 19 bp, Homo sapiens
  siRNA target sequence for FKSG32 (NM_031307.2,905-923).
cattcctttatcatcaagt

SEQ ID NO: 396688 - DNA, 19 bp, Homo sapiens
  siRNA target sequence for FKSG32 (NM_031307.2,966-984).
ggagaagccagagattatt

SEQ ID NO: 396689 - DNA, 19 bp, Homo sapiens
  siRNA target sequence for FKSG32 (NM_031307.2,1012-1030).
ccccaaaagcctcaatata

SEQ ID NO: 396690 - DNA, 19 bp, Homo sapiens
  siRNA target sequence for FKSG32 (NM_031307.2,1014-1032).
ccaaaagcctcaatatagt

SEQ ID NO: 396691 - DNA, 19 bp, Homo sapiens
  siRNA target sequence for FKSG32 (NM_031307.2,1015-1033).
caaaagcctcaatatagta

SEQ ID NO: 396692 - DNA, 19 bp, Homo sapiens
  siRNA target sequence for FKSG32 (NM_031307.2,1048-1066).
cctctagtcttatatgact

SEQ ID NO: 396693 - DNA, 19 bp, Homo sapiens
  siRNA target sequence for FKSG32 (NM_031307.2,1054-1072).
gtcttatatgactgtaagt

SEQ ID NO: 396694 - DNA, 19 bp, Homo sapiens
  siRNA target sequence for FKSG32 (NM_031307.2,1104-1122).
ggctcaggagttcaatatt

SEQ ID NO: 396695 - DNA, 19 bp, Homo sapiens
  siRNA target sequence for FKSG32 (NM_031307.2,1144-1162).
gctaatcatgctgtcaaaa

SEQ ID NO: 396696 - DNA, 19 bp, Homo sapiens
  siRNA target sequence for FKSG32 (NM_031307.2,1163-1181).
ctcacatgttgtatagtat

SEQ ID NO: 396697 - DNA, 19 bp, Homo sapiens
  siRNA target sequence for FKSG32 (NM_031307.2,1223-1241).
gaccaaagatggatggaat

SEQ ID NO: 396698 - DNA, 19 bp, Homo sapiens
  siRNA target sequence for FKSG32 (NM_031307.2,1326-1344).
cctcatggaccgtcctaaa

SEQ ID NO: 396699 - DNA, 19 bp, Homo sapiens
  siRNA target sequence for FKSG32 (NM_031307.2,1327-1345).
ctcatggaccgtcctaaat

SEQ ID NO: 396700 - DNA, 19 bp, Homo sapiens
  siRNA target sequence for FKSG32 (NM_031307.2,1361-1379).
cccggatccagcattttgt

SEQ ID NO: 396701 - DNA, 19 bp, Homo sapiens
  siRNA target sequence for FKSG32 (NM_031307.2,1362-1380).
ccggatccagcattttgta

SEQ ID NO: 396702 - DNA, 19 bp, Homo sapiens
  siRNA target sequence for FKSG32 (NM_031307.2,1391-1409).
gaattgagcacccacattt

SEQ ID NO: 396703 - DNA, 19 bp, Homo sapiens
  siRNA target sequence for FKSG32 (NM_031307.2,1398-1416).
gcacccacatttattccat

SEQ ID NO: 396704 - DNA, 19 bp, Homo sapiens
  siRNA target sequence for FKSG32 (NM_031307.2,1433-1451).
ccaaaagggactgtaatga

SEQ ID NO: 396705 - DNA, 19 bp, Homo sapiens
  siRNA target sequence for FKSG32 (NM_031307.2,1498-1516).
gtctgtgttgacacagaaa

SEQ ID NO: 396706 - DNA, 19 bp, Homo sapiens
  siRNA target sequence for PLVAP (NM_031310.1,103-121).
ctcggggctgctggtatta

SEQ ID NO: 396707 - DNA, 19 bp, Homo sapiens
  siRNA target sequence for PLVAP (NM_031310.1,246-264).
cgagccgagggcctataca

SEQ ID NO: 396708 - DNA, 19 bp, Homo sapiens
  siRNA target sequence for PLVAP (NM_031310.1,285-303).
gcctcccagtccaacttga

SEQ ID NO: 396709 - DNA, 19 bp, Homo sapiens
  siRNA target sequence for PLVAP (NM_031310.1,411-429).
ggtgaccgggtcatctaca

SEQ ID NO: 396710 - DNA, 19 bp, Homo sapiens
  siRNA target sequence for PLVAP (NM_031310.1,419-437).
ggtcatctacacgaacaat

SEQ ID NO: 396711 - DNA, 19 bp, Homo sapiens
  siRNA target sequence for PLVAP (NM_031310.1,639-657).
ctggttgaatgcgtgaaaa

SEQ ID NO: 396712 - DNA, 19 bp, Homo sapiens
  siRNA target sequence for PCDHA1 (NM_031410.1,2390-2408).
gtaatgtaagtccaacttt

SEQ ID NO: 396713 - DNA, 19 bp, Homo sapiens
  siRNA target sequence for MLZE (NM_031415.1,970-988).
ctattgagtgccaccaaat

SEQ ID NO: 396714 - DNA, 19 bp, Homo sapiens
  siRNA target sequence for MLZE (NM_031415.1,975-993).
gagtgccaccaaattacgt

SEQ ID NO: 396715 - DNA, 19 bp, Homo sapiens
  siRNA target sequence for MLZE (NM_031415.1,981-999).
caccaaattacgtcagttt

SEQ ID NO: 396716 - DNA, 19 bp, Homo sapiens
  siRNA target sequence for MLZE (NM_031415.1,983-1001).
ccaaattacgtcagtttgt

SEQ ID NO: 396717 - DNA, 19 bp, Homo sapiens
  siRNA target sequence for MLZE (NM_031415.1,984-1002).
caaattacgtcagtttgtt

SEQ ID NO: 396718 - DNA, 19 bp, Homo sapiens
  siRNA target sequence for MLZE (NM_031415.1,1017-1035).
gaaggattctcgttcatca

SEQ ID NO: 396719 - DNA, 19 bp, Homo sapiens
  siRNA target sequence for MLZE (NM_031415.1,1020-1038).
ggattctcgttcatcattt

SEQ ID NO: 396720 - DNA, 19 bp, Homo sapiens
  siRNA target sequence for MLZE (NM_031415.1,1021-1039).
gattctcgttcatcatttt

SEQ ID NO: 396721 - DNA, 19 bp, Homo sapiens
  siRNA target sequence for MLZE (NM_031415.1,1034-1052).
cattttgggaacaatctga

SEQ ID NO: 396722 - DNA, 19 bp, Homo sapiens
  siRNA target sequence for MLZE (NM_031415.1,1040-1058).
gggaacaatctgactatgt

SEQ ID NO: 396723 - DNA, 19 bp, Homo sapiens
  siRNA target sequence for MLZE (NM_031415.1,1041-1059).
ggaacaatctgactatgtt

SEQ ID NO: 396724 - DNA, 19 bp, Homo sapiens
  siRNA target sequence for MLZE (NM_031415.1,1178-1196).
gtgtgaatgttggtataga

SEQ ID NO: 396725 - DNA, 19 bp, Homo sapiens
  siRNA target sequence for MLZE (NM_031415.1,1232-1250).
gatgctccctcgagtttca

SEQ ID NO: 396726 - DNA, 19 bp, Homo sapiens
  siRNA target sequence for MLZE (NM_031415.1,1235-1253).
gctccctcgagtttcaaat

SEQ ID NO: 396727 - DNA, 19 bp, Homo sapiens
  siRNA target sequence for MLZE (NM_031415.1,1236-1254).
ctccctcgagtttcaaatt

SEQ ID NO: 396728 - DNA, 19 bp, Homo sapiens
  siRNA target sequence for MLZE (NM_031415.1,1240-1258).
ctcgagtttcaaattgtta

SEQ ID NO: 396729 - DNA, 19 bp, Homo sapiens
  siRNA target sequence for MLZE (NM_031415.1,1372-1390).
gctgttgaactgatcaaca

SEQ ID NO: 396730 - DNA, 19 bp, Homo sapiens
  siRNA target sequence for MLZE (NM_031415.1,1373-1391).
ctgttgaactgatcaacaa

SEQ ID NO: 396731 - DNA, 19 bp, Homo sapiens
  siRNA target sequence for MLZE (NM_031415.1,1375-1393).
gttgaactgatcaacaata

SEQ ID NO: 396732 - DNA, 19 bp, Homo sapiens
  siRNA target sequence for MLZE (NM_031415.1,1404-1422).
cgatagcagtagtgtgaat

SEQ ID NO: 396733 - DNA, 19 bp, Homo sapiens
  siRNA target sequence for MLZE (NM_031415.1,1405-1423).
gatagcagtagtgtgaata

SEQ ID NO: 396734 - DNA, 19 bp, Homo sapiens
  siRNA target sequence for MLZE (NM_031415.1,1409-1427).
gcagtagtgtgaatatttt

SEQ ID NO: 396735 - DNA, 19 bp, Homo sapiens
  siRNA target sequence for MLZE (NM_031415.1,1500-1518).
ggcgctgactcttcagaaa

SEQ ID NO: 396736 - DNA, 19 bp, Homo sapiens
  siRNA target sequence for MLZE (NM_031415.1,1524-1542).
ggtgatggcttataagaga

SEQ ID NO: 396737 - DNA, 19 bp, Homo sapiens
  siRNA target sequence for MLZE (NM_031415.1,1525-1543).
gtgatggcttataagagaa

SEQ ID NO: 396738 - DNA, 19 bp, Homo sapiens
  siRNA target sequence for MLZE (NM_031415.1,1606-1624).
caagatgagtacgaaattt

SEQ ID NO: 396739 - DNA, 19 bp, Homo sapiens
  siRNA target sequence for MLZE (NM_031415.1,1617-1635).
cgaaatttccgaaatggta

SEQ ID NO: 396740 - DNA, 19 bp, Homo sapiens
  siRNA target sequence for MLZE (NM_031415.1,1659-1677).
ggggttgctaccatcattt

SEQ ID NO: 396741 - DNA, 19 bp, Homo sapiens
  siRNA target sequence for MLZE (NM_031415.1,1662-1680).
gttgctaccatcatttcat

SEQ ID NO: 396742 - DNA, 19 bp, Homo sapiens
  siRNA target sequence for MLZE (NM_031415.1,1698-1716).
cttcaatgcctcatccaat

SEQ ID NO: 396743 - DNA, 19 bp, Homo sapiens
  siRNA target sequence for MLZE (NM_031415.1,1701-1719).
caatgcctcatccaatgat

SEQ ID NO: 396744 - DNA, 19 bp, Homo sapiens
  siRNA target sequence for MLZE (NM_031415.1,1705-1723).
gcctcatccaatgatatga

SEQ ID NO: 396745 - DNA, 19 bp, Homo sapiens
  siRNA target sequence for MLZE (NM_031415.1,1763-1781).
gcgggcatttgccaaaata

SEQ ID NO: 396746 - DNA, 19 bp, Homo sapiens
  siRNA target sequence for MLZE (NM_031415.1,1766-1784).
ggcatttgccaaaatacga

SEQ ID NO: 396747 - DNA, 19 bp, Homo sapiens
  siRNA target sequence for MLZE (NM_031415.1,1773-1791).
gccaaaatacgaacaagtt

SEQ ID NO: 396748 - DNA, 19 bp, Homo sapiens
  siRNA target sequence for MLZE (NM_031415.1,1775-1793).
caaaatacgaacaagttca

SEQ ID NO: 396749 - DNA, 19 bp, Homo sapiens
  siRNA target sequence for MLZE (NM_031415.1,1818-1836).
ggaacccttctggcaaaat

SEQ ID NO: 396750 - DNA, 19 bp, Homo sapiens
  siRNA target sequence for MLZE (NM_031415.1,1906-1924).
gatgtcatgttctacagta

SEQ ID NO: 396751 - DNA, 19 bp, Homo sapiens
  siRNA target sequence for MLZE (NM_031415.1,2009-2027).
ctggtggtgccatcctaaa

SEQ ID NO: 396752 - DNA, 19 bp, Homo sapiens
  siRNA target sequence for MLZE (NM_031415.1,2066-2084).
caaaggaccccattcttta

SEQ ID NO: 396753 - DNA, 19 bp, Homo sapiens
  siRNA target sequence for MLZE (NM_031415.1,2111-2129).
gtgacttccaacacgattt

SEQ ID NO: 396754 - DNA, 19 bp, Homo sapiens
  siRNA target sequence for MLZE (NM_031415.1,2191-2209).
ctggagccaaacttcagat

SEQ ID NO: 396755 - DNA, 19 bp, Homo sapiens
  siRNA target sequence for MLZE (NM_031415.1,2342-2360).
gggatgtagaagcaaagat

SEQ ID NO: 396756 - DNA, 19 bp, Homo sapiens
  siRNA target sequence for TMEM16C (NM_031418.1,891-909).
gcaaaaaggtatgaatata

SEQ ID NO: 396757 - DNA, 19 bp, Homo sapiens
  siRNA target sequence for TMEM16C (NM_031418.1,911-929).
gcaagagtgagataacaaa

SEQ ID NO: 396758 - DNA, 19 bp, Homo sapiens
  siRNA target sequence for TMEM16C (NM_031418.1,975-993).
ccagagctacgcttactca

SEQ ID NO: 396759 - DNA, 19 bp, Homo sapiens
  siRNA target sequence for TMEM16C (NM_031418.1,976-994).
cagagctacgcttactcaa

SEQ ID NO: 396760 - DNA, 19 bp, Homo sapiens
  siRNA target sequence for TMEM16C (NM_031418.1,1024-1042).
cagtcaaccgagagtgaat

SEQ ID NO: 396761 - DNA, 19 bp, Homo sapiens
  siRNA target sequence for TMEM16C (NM_031418.1,1028-1046).
caaccgagagtgaatctca

SEQ ID NO: 396762 - DNA, 19 bp, Homo sapiens
  siRNA target sequence for TMEM16C (NM_031418.1,1048-1066).
gctcccacatctataacct

SEQ ID NO: 396763 - DNA, 19 bp, Homo sapiens
  siRNA target sequence for TMEM16C (NM_031418.1,1051-1069).
cccacatctataaccttaa

SEQ ID NO: 396764 - DNA, 19 bp, Homo sapiens
  siRNA target sequence for TMEM16C (NM_031418.1,1085-1103).
cagagcaagttaatactga

SEQ ID NO: 396765 - DNA, 19 bp, Homo sapiens
  siRNA target sequence for TMEM16C (NM_031418.1,1093-1111).
gttaatactgaggagaata

SEQ ID NO: 396766 - DNA, 19 bp, Homo sapiens
  siRNA target sequence for TMEM16C (NM_031418.1,1117-1135).
gactctgtgctgagatgtt

SEQ ID NO: 396767 - DNA, 19 bp, Homo sapiens
  siRNA target sequence for TMEM16C (NM_031418.1,1119-1137).
ctctgtgctgagatgttca

SEQ ID NO: 396768 - DNA, 19 bp, Homo sapiens
  siRNA target sequence for TMEM16C (NM_031418.1,1141-1159).
gctgacctcagcgattttt

SEQ ID NO: 396769 - DNA, 19 bp, Homo sapiens
  siRNA target sequence for TMEM16C (NM_031418.1,1166-1184).
ccctaggaaaagataagga

SEQ ID NO: 396770 - DNA, 19 bp, Homo sapiens
  siRNA target sequence for TMEM16C (NM_031418.1,1199-1217).
cagaacacgctacttatga

SEQ ID NO: 396771 - DNA, 19 bp, Homo sapiens
  siRNA target sequence for TMEM16C (NM_031418.1,1216-1234).
gaccgatctcgtctcatta

SEQ ID NO: 396772 - DNA, 19 bp, Homo sapiens
  siRNA target sequence for TMEM16C (NM_031418.1,1218-1236).
ccgatctcgtctcattaat

SEQ ID NO: 396773 - DNA, 19 bp, Homo sapiens
  siRNA target sequence for TMEM16C (NM_031418.1,1220-1238).
gatctcgtctcattaatga

SEQ ID NO: 396774 - DNA, 19 bp, Homo sapiens
  siRNA target sequence for TMEM16C (NM_031418.1,1223-1241).
ctcgtctcattaatgactt

SEQ ID NO: 396775 - DNA, 19 bp, Homo sapiens
  siRNA target sequence for TMEM16C (NM_031418.1,1226-1244).
gtctcattaatgactttgt

SEQ ID NO: 396776 - DNA, 19 bp, Homo sapiens
  siRNA target sequence for TMEM16C (NM_031418.1,1437-1455).
gaaggagccagctattgca

SEQ ID NO: 396777 - DNA, 19 bp, Homo sapiens
  siRNA target sequence for TMEM16C (NM_031418.1,1453-1471).
gcaagccccgatatcatgt

SEQ ID NO: 396778 - DNA, 19 bp, Homo sapiens
  siRNA target sequence for TMEM16C (NM_031418.1,1458-1476).
ccccgatatcatgtttatt

SEQ ID NO: 396779 - DNA, 19 bp, Homo sapiens
  siRNA target sequence for TMEM16C (NM_031418.1,1459-1477).
cccgatatcatgtttatta

SEQ ID NO: 396780 - DNA, 19 bp, Homo sapiens
  siRNA target sequence for TMEM16C (NM_031418.1,1460-1478).
ccgatatcatgtttattaa

SEQ ID NO: 396781 - DNA, 19 bp, Homo sapiens
  siRNA target sequence for TMEM16C (NM_031418.1,1494-1512).
ggacacgctgtgcaagtat

SEQ ID NO: 396782 - DNA, 19 bp, Homo sapiens
  siRNA target sequence for TMEM16C (NM_031418.1,1513-1531).
gcagagaggctgaatatca

SEQ ID NO: 396783 - DNA, 19 bp, Homo sapiens
  siRNA target sequence for TMEM16C (NM_031418.1,1564-1582).
gacgggaggagcaaatcaa

SEQ ID NO: 396784 - DNA, 19 bp, Homo sapiens
  siRNA target sequence for TMEM16C (NM_031418.1,1584-1602).
gggcaggatgcaaacttat

SEQ ID NO: 396785 - DNA, 19 bp, Homo sapiens
  siRNA target sequence for TMEM16C (NM_031418.1,1672-1690).
gaggagtcagactgctata

SEQ ID NO: 396786 - DNA, 19 bp, Homo sapiens
  siRNA target sequence for TMEM16C (NM_031418.1,1674-1692).
ggagtcagactgctatact

SEQ ID NO: 396787 - DNA, 19 bp, Homo sapiens
  siRNA target sequence for TMEM16C (NM_031418.1,1709-1727).
cacggattcaccacttcat

SEQ ID NO: 396788 - DNA, 19 bp, Homo sapiens
  siRNA target sequence for TMEM16C (NM_031418.1,1712-1730).
ggattcaccacttcataat

SEQ ID NO: 396789 - DNA, 19 bp, Homo sapiens
  siRNA target sequence for TMEM16C (NM_031418.1,1717-1735).
caccacttcataataaata

SEQ ID NO: 396790 - DNA, 19 bp, Homo sapiens
  siRNA target sequence for TMEM16C (NM_031418.1,1719-1737).
ccacttcataataaataat

SEQ ID NO: 396791 - DNA, 19 bp, Homo sapiens
  siRNA target sequence for TMEM16C (NM_031418.1,1760-1778).
ctactcgaagcagaatagt

SEQ ID NO: 396792 - DNA, 19 bp, Homo sapiens
  siRNA target sequence for TMEM16C (NM_031418.1,1763-1781).
ctcgaagcagaatagtcta

SEQ ID NO: 396793 - DNA, 19 bp, Homo sapiens
  siRNA target sequence for TMEM16C (NM_031418.1,1792-1810).
gaacgcaccaaatatgaaa

SEQ ID NO: 396794 - DNA, 19 bp, Homo sapiens
  siRNA target sequence for TMEM16C (NM_031418.1,1827-1845).
gggtatccgtaaacttata

SEQ ID NO: 396795 - DNA, 19 bp, Homo sapiens
  siRNA target sequence for TMEM16C (NM_031418.1,1829-1847).
gtatccgtaaacttataaa

SEQ ID NO: 396796 - DNA, 19 bp, Homo sapiens
  siRNA target sequence for TMEM16C (NM_031418.1,1833-1851).
ccgtaaacttataaacaat

SEQ ID NO: 396797 - DNA, 19 bp, Homo sapiens
  siRNA target sequence for TMEM16C (NM_031418.1,1879-1897).
catgagggagcctacaaaa

SEQ ID NO: 396798 - DNA, 19 bp, Homo sapiens
  siRNA target sequence for TMEM16C (NM_031418.1,1882-1900).
gagggagcctacaaaagta

SEQ ID NO: 396799 - DNA, 19 bp, Homo sapiens
  siRNA target sequence for TMEM16C (NM_031418.1,1918-1936).
catggacctcagaataaca

SEQ ID NO: 396800 - DNA, 19 bp, Homo sapiens
  siRNA target sequence for TMEM16C (NM_031418.1,1929-1947).
gaataacagacatctatta

SEQ ID NO: 396801 - DNA, 19 bp, Homo sapiens
  siRNA target sequence for TMEM16C (NM_031418.1,1963-1981).
cgctggggaatgtggtata

SEQ ID NO: 396802 - DNA, 19 bp, Homo sapiens
  siRNA target sequence for TMEM16C (NM_031418.1,1967-1985).
ggggaatgtggtataagca

SEQ ID NO: 396803 - DNA, 19 bp, Homo sapiens
  siRNA target sequence for TMEM16C (NM_031418.1,1968-1986).
gggaatgtggtataagcat

SEQ ID NO: 396804 - DNA, 19 bp, Homo sapiens
  siRNA target sequence for TMEM16C (NM_031418.1,2051-2069).
gatggtatactggaatgtt

SEQ ID NO: 396805 - DNA, 19 bp, Homo sapiens
  siRNA target sequence for TMEM16C (NM_031418.1,2054-2072).
ggtatactggaatgttgat

SEQ ID NO: 396806 - DNA, 19 bp, Homo sapiens
  siRNA target sequence for TMEM16C (NM_031418.1,2097-2115).
cgttttcttctatggatta

SEQ ID NO: 396807 - DNA, 19 bp, Homo sapiens
  siRNA target sequence for TMEM16C (NM_031418.1,2103-2121).
cttctatggattatttaca

SEQ ID NO: 396808 - DNA, 19 bp, Homo sapiens
  siRNA target sequence for TMEM16C (NM_031418.1,2132-2150).
gtcaagtaagccaagaaat

SEQ ID NO: 396809 - DNA, 19 bp, Homo sapiens
  siRNA target sequence for TMEM16C (NM_031418.1,2153-2171).
gtaaagccactgaagtctt

SEQ ID NO: 396810 - DNA, 19 bp, Homo sapiens
  siRNA target sequence for TMEM16C (NM_031418.1,2177-2195).
gccctctctgtgacaagaa

SEQ ID NO: 396811 - DNA, 19 bp, Homo sapiens
  siRNA target sequence for TMEM16C (NM_031418.1,2179-2197).
cctctctgtgacaagaact

SEQ ID NO: 396812 - DNA, 19 bp, Homo sapiens
  siRNA target sequence for TMEM16C (NM_031418.1,2214-2232).
caacgacagctgtatctat

SEQ ID NO: 396813 - DNA, 19 bp, Homo sapiens
  siRNA target sequence for TMEM16C (NM_031418.1,2229-2247).
ctatgccaaggtgacatat

SEQ ID NO: 396814 - DNA, 19 bp, Homo sapiens
  siRNA target sequence for TMEM16C (NM_031418.1,2239-2257).
gtgacatatttgttcgata

SEQ ID NO: 396815 - DNA, 19 bp, Homo sapiens
  siRNA target sequence for TMEM16C (NM_031418.1,2263-2281).
gggacagtcttctttgcta

SEQ ID NO: 396816 - DNA, 19 bp, Homo sapiens
  siRNA target sequence for TMEM16C (NM_031418.1,2264-2282).
ggacagtcttctttgctat

SEQ ID NO: 396817 - DNA, 19 bp, Homo sapiens
  siRNA target sequence for TMEM16C (NM_031418.1,2387-2405).
cacttcgtccccagtttga

SEQ ID NO: 396818 - DNA, 19 bp, Homo sapiens
  siRNA target sequence for TMEM16C (NM_031418.1,2478-2496).
caaagtcactcgtcttctt

SEQ ID NO: 396819 - DNA, 19 bp, Homo sapiens
  siRNA target sequence for TMEM16C (NM_031418.1,2482-2500).
gtcactcgtcttcttgttt

SEQ ID NO: 396820 - DNA, 19 bp, Homo sapiens
  siRNA target sequence for TMEM16C (NM_031418.1,2484-2502).
cactcgtcttcttgtttct

SEQ ID NO: 396821 - DNA, 19 bp, Homo sapiens
  siRNA target sequence for TMEM16C (NM_031418.1,2486-2504).
ctcgtcttcttgtttctgt

SEQ ID NO: 396822 - DNA, 19 bp, Homo sapiens
  siRNA target sequence for TMEM16C (NM_031418.1,2581-2599).
gaacagtttgcatcattca

SEQ ID NO: 396823 - DNA, 19 bp, Homo sapiens
  siRNA target sequence for TMEM16C (NM_031418.1,2584-2602).
cagtttgcatcattcaagt

SEQ ID NO: 396824 - DNA, 19 bp, Homo sapiens
  siRNA target sequence for TMEM16C (NM_031418.1,2590-2608).
gcatcattcaagtggaatt

SEQ ID NO: 396825 - DNA, 19 bp, Homo sapiens
  siRNA target sequence for TMEM16C (NM_031418.1,2622-2640).
ctggcagtttgcaacatct

SEQ ID NO: 396826 - DNA, 19 bp, Homo sapiens
  siRNA target sequence for TMEM16C (NM_031418.1,2648-2666).
ctgtctgtatcaatttcat

SEQ ID NO: 396827 - DNA, 19 bp, Homo sapiens
  siRNA target sequence for TMEM16C (NM_031418.1,2679-2697).
gctgaatcttgcttatgaa

SEQ ID NO: 396828 - DNA, 19 bp, Homo sapiens
  siRNA target sequence for TMEM16C (NM_031418.1,2709-2727).
cctcctcaccaatttagaa

SEQ ID NO: 396829 - DNA, 19 bp, Homo sapiens
  siRNA target sequence for TMEM16C (NM_031418.1,2710-2728).
ctcctcaccaatttagaat

SEQ ID NO: 396830 - DNA, 19 bp, Homo sapiens
  siRNA target sequence for TMEM16C (NM_031418.1,2712-2730).
cctcaccaatttagaatat

SEQ ID NO: 396831 - DNA, 19 bp, Homo sapiens
  siRNA target sequence for TMEM16C (NM_031418.1,2715-2733).
caccaatttagaatatcct

SEQ ID NO: 396832 - DNA, 19 bp, Homo sapiens
  siRNA target sequence for TMEM16C (NM_031418.1,2842-2860).
gtaggccacccaggaaaat

SEQ ID NO: 396833 - DNA, 19 bp, Homo sapiens
  siRNA target sequence for TMEM16C (NM_031418.1,2846-2864).
gccacccaggaaaatacaa

SEQ ID NO: 396834 - DNA, 19 bp, Homo sapiens
  siRNA target sequence for TMEM16C (NM_031418.1,2847-2865).
ccacccaggaaaatacaat

SEQ ID NO: 396835 - DNA, 19 bp, Homo sapiens
  siRNA target sequence for TMEM16C (NM_031418.1,2883-2901).
gagactggaggaatgtcat

SEQ ID NO: 396836 - DNA, 19 bp, Homo sapiens
  siRNA target sequence for TMEM16C (NM_031418.1,2903-2921).
ctagtggctgtttgataga

SEQ ID NO: 396837 - DNA, 19 bp, Homo sapiens
  siRNA target sequence for TMEM16C (NM_031418.1,3006-3024).
ctggtggtcacgacataaa

SEQ ID NO: 396838 - DNA, 19 bp, Homo sapiens
  siRNA target sequence for TMEM16C (NM_031418.1,3008-3026).
ggtggtcacgacataaaat

SEQ ID NO: 396839 - DNA, 19 bp, Homo sapiens
  siRNA target sequence for TMEM16C (NM_031418.1,3011-3029).
ggtcacgacataaaatcaa

SEQ ID NO: 396840 - DNA, 19 bp, Homo sapiens
  siRNA target sequence for TMEM16C (NM_031418.1,3027-3045).
caagcggggaatacatgat

SEQ ID NO: 396841 - DNA, 19 bp, Homo sapiens
  siRNA target sequence for TMEM16C (NM_031418.1,3101-3119).
gactgatggatgagtactt

SEQ ID NO: 396842 - DNA, 19 bp, Homo sapiens
  siRNA target sequence for TMEM16C (NM_031418.1,3215-3233).
ggctggatgcatacaaatt

SEQ ID NO: 396843 - DNA, 19 bp, Homo sapiens
  siRNA target sequence for TMEM16C (NM_031418.1,3216-3234).
gctggatgcatacaaattt

SEQ ID NO: 396844 - DNA, 19 bp, Homo sapiens
  siRNA target sequence for TMEM16C (NM_031418.1,3265-3283).
cgagcaactgacataggta

SEQ ID NO: 396845 - DNA, 19 bp, Homo sapiens
  siRNA target sequence for TMEM16C (NM_031418.1,3298-3316).
ctcgaaggaatcggtatat

SEQ ID NO: 396846 - DNA, 19 bp, Homo sapiens
  siRNA target sequence for TMEM16C (NM_031418.1,3324-3342).
gatcaccaatgcatttgta

SEQ ID NO: 396847 - DNA, 19 bp, Homo sapiens
  siRNA target sequence for TMEM16C (NM_031418.1,3366-3384).
cccacgttttgtttatgaa

SEQ ID NO: 396848 - DNA, 19 bp, Homo sapiens
  siRNA target sequence for TMEM16C (NM_031418.1,3370-3388).
cgttttgtttatgaataca

SEQ ID NO: 396849 - DNA, 19 bp, Homo sapiens
  siRNA target sequence for TMEM16C (NM_031418.1,3431-3449).
gcttgaagggatatgtcaa

SEQ ID NO: 396850 - DNA, 19 bp, Homo sapiens
  siRNA target sequence for TMEM16C (NM_031418.1,3435-3453).
gaagggatatgtcaacaat

SEQ ID NO: 396851 - DNA, 19 bp, Homo sapiens
  siRNA target sequence for TMEM16C (NM_031418.1,3480-3498).
gcttggtatgggaaaatct

SEQ ID NO: 396852 - DNA, 19 bp, Homo sapiens
  siRNA target sequence for TMEM16C (NM_031418.1,3490-3508).
ggaaaatctggttattgca

SEQ ID NO: 396853 - DNA, 19 bp, Homo sapiens
  siRNA target sequence for TMEM16C (NM_031418.1,3548-3566).
cctatgagtttactttaca

SEQ ID NO: 396854 - DNA, 19 bp, Homo sapiens
  siRNA target sequence for TMEM16C (NM_031418.1,3586-3604).
gctagattggccttcatta

SEQ ID NO: 396855 - DNA, 19 bp, Homo sapiens
  siRNA target sequence for TMEM16C (NM_031418.1,3587-3605).
ctagattggccttcattat

SEQ ID NO: 396856 - DNA, 19 bp, Homo sapiens
  siRNA target sequence for TMEM16C (NM_031418.1,3663-3681).
cgtaccaaagggtctacat

SEQ ID NO: 396857 - DNA, 19 bp, Homo sapiens
  siRNA target sequence for TMEM16C (NM_031418.1,3692-3710).
gacgagagaagtacttagt

SEQ ID NO: 396858 - DNA, 19 bp, Homo sapiens
  siRNA target sequence for MAIL (NM_031419.1,382-400).
caaggtgttcgggtaaaga

SEQ ID NO: 396859 - DNA, 19 bp, Homo sapiens
  siRNA target sequence for MAIL (NM_031419.1,385-403).
ggtgttcgggtaaagaact

SEQ ID NO: 396860 - DNA, 19 bp, Homo sapiens
  siRNA target sequence for MAIL (NM_031419.1,420-438).
gttgcacatccgaagtcat

SEQ ID NO: 396861 - DNA, 19 bp, Homo sapiens
  siRNA target sequence for MAIL (NM_031419.1,423-441).
gcacatccgaagtcataaa

SEQ ID NO: 396862 - DNA, 19 bp, Homo sapiens
  siRNA target sequence for MAIL (NM_031419.1,477-495).
gacacaaggtgtgaacata

SEQ ID NO: 396863 - DNA, 19 bp, Homo sapiens
  siRNA target sequence for MAIL (NM_031419.1,648-666).
ggaagatgttcatctcaat

SEQ ID NO: 396864 - DNA, 19 bp, Homo sapiens
  siRNA target sequence for MAIL (NM_031419.1,868-886).
gtcaggggctcccaacaaa

SEQ ID NO: 396865 - DNA, 19 bp, Homo sapiens
  siRNA target sequence for MAIL (NM_031419.1,873-891).
gggctcccaacaaatgata

SEQ ID NO: 396866 - DNA, 19 bp, Homo sapiens
  siRNA target sequence for MAIL (NM_031419.1,898-916).
gcttccctgtaccagtatt

SEQ ID NO: 396867 - DNA, 19 bp, Homo sapiens
  siRNA target sequence for MAIL (NM_031419.1,920-938).
cacagaaccagcatgtaga

SEQ ID NO: 396868 - DNA, 19 bp, Homo sapiens
  siRNA target sequence for MAIL (NM_031419.1,1026-1044).
ctttgatggtccagaatca

SEQ ID NO: 396869 - DNA, 19 bp, Homo sapiens
  siRNA target sequence for MAIL (NM_031419.1,1033-1051).
ggtccagaatcacagtttt

SEQ ID NO: 396870 - DNA, 19 bp, Homo sapiens
  siRNA target sequence for MAIL (NM_031419.1,1082-1100).
gtgatcaaagggaatctga

SEQ ID NO: 396871 - DNA, 19 bp, Homo sapiens
  siRNA target sequence for MAIL (NM_031419.1,1251-1269).
ctcaaacatgggaaatcca

SEQ ID NO: 396872 - DNA, 19 bp, Homo sapiens
  siRNA target sequence for MAIL (NM_031419.1,1280-1298).
cacagttagggaaatcact

SEQ ID NO: 396873 - DNA, 19 bp, Homo sapiens
  siRNA target sequence for MAIL (NM_031419.1,1282-1300).
cagttagggaaatcacttt

SEQ ID NO: 396874 - DNA, 19 bp, Homo sapiens
  siRNA target sequence for MAIL (NM_031419.1,1348-1366).
caagaccagtttctttcaa

SEQ ID NO: 396875 - DNA, 19 bp, Homo sapiens
  siRNA target sequence for MAIL (NM_031419.1,1378-1396).
ggtgacacgttccttcata

SEQ ID NO: 396876 - DNA, 19 bp, Homo sapiens
  siRNA target sequence for MAIL (NM_031419.1,1379-1397).
gtgacacgttccttcatat

SEQ ID NO: 396877 - DNA, 19 bp, Homo sapiens
  siRNA target sequence for MAIL (NM_031419.1,1412-1430).
ggagaagggcactttccta

SEQ ID NO: 396878 - DNA, 19 bp, Homo sapiens
  siRNA target sequence for MAIL (NM_031419.1,1413-1431).
gagaagggcactttcctat

SEQ ID NO: 396879 - DNA, 19 bp, Homo sapiens
  siRNA target sequence for MAIL (NM_031419.1,1432-1450).
gttcttgcaagaaagatga

SEQ ID NO: 396880 - DNA, 19 bp, Homo sapiens
  siRNA target sequence for MAIL (NM_031419.1,1456-1474).
cttcacatgctggatatta

SEQ ID NO: 396881 - DNA, 19 bp, Homo sapiens
  siRNA target sequence for MAIL (NM_031419.1,1652-1670).
gagcagtgggaagtaatca

SEQ ID NO: 396882 - DNA, 19 bp, Homo sapiens
  siRNA target sequence for MAIL (NM_031419.1,1654-1672).
gcagtgggaagtaatcagt

SEQ ID NO: 396883 - DNA, 19 bp, Homo sapiens
  siRNA target sequence for MAIL (NM_031419.1,1655-1673).
cagtgggaagtaatcagtt

SEQ ID NO: 396884 - DNA, 19 bp, Homo sapiens
  siRNA target sequence for MAIL (NM_031419.1,1678-1696).
gatcttgaggcaactaact

SEQ ID NO: 396885 - DNA, 19 bp, Homo sapiens
  siRNA target sequence for MAIL (NM_031419.1,1713-1731).
ccttcactgtgcagtcata

SEQ ID NO: 396886 - DNA, 19 bp, Homo sapiens
  siRNA target sequence for MAIL (NM_031419.1,1815-1833).
gagtctggttgataccatt

SEQ ID NO: 396887 - DNA, 19 bp, Homo sapiens
  siRNA target sequence for MAIL (NM_031419.1,1817-1835).
gtctggttgataccattaa

SEQ ID NO: 396888 - DNA, 19 bp, Homo sapiens
  siRNA target sequence for MAIL (NM_031419.1,1829-1847).
ccattaagtgcctaattca

SEQ ID NO: 396889 - DNA, 19 bp, Homo sapiens
  siRNA target sequence for MAIL (NM_031419.1,2026-2044).
cagtatcggttgacacaat

SEQ ID NO: 396890 - DNA, 19 bp, Homo sapiens
  siRNA target sequence for MAIL (NM_031419.1,2028-2046).
gtatcggttgacacaatta

SEQ ID NO: 396891 - DNA, 19 bp, Homo sapiens
  siRNA target sequence for DKFZP434H0115 (NM_031421.1,137-155).
ctacctgtgcggggaattt

SEQ ID NO: 396892 - DNA, 19 bp, Homo sapiens
  siRNA target sequence for DKFZP434H0115 (NM_031421.1,141-159).
ctgtgcggggaattttcta

SEQ ID NO: 396893 - DNA, 19 bp, Homo sapiens
  siRNA target sequence for DKFZP434H0115 (NM_031421.1,143-161).
gtgcggggaattttctaaa

SEQ ID NO: 396894 - DNA, 19 bp, Homo sapiens
  siRNA target sequence for DKFZP434H0115 (NM_031421.1,172-190).
gcttcagcaacgctcttta

SEQ ID NO: 396895 - DNA, 19 bp, Homo sapiens
  siRNA target sequence for DKFZP434H0115 (NM_031421.1,176-194).
cagcaacgctctttacctt

SEQ ID NO: 396896 - DNA, 19 bp, Homo sapiens
  siRNA target sequence for DKFZP434H0115 (NM_031421.1,216-234).
ctggttgctcgctcaaagt

SEQ ID NO: 396897 - DNA, 19 bp, Homo sapiens
  siRNA target sequence for DKFZP434H0115 (NM_031421.1,362-380).
gtttgccttggtattctat

SEQ ID NO: 396898 - DNA, 19 bp, Homo sapiens
  siRNA target sequence for DKFZP434H0115 (NM_031421.1,462-480).
ggaagtccttcttccatta

SEQ ID NO: 396899 - DNA, 19 bp, Homo sapiens
  siRNA target sequence for DKFZP434H0115 (NM_031421.1,495-513).
ggggacctctccttcttaa

SEQ ID NO: 396900 - DNA, 19 bp, Homo sapiens
  siRNA target sequence for DKFZP434H0115 (NM_031421.1,515-533).
caagcaggctgagaatata

SEQ ID NO: 396901 - DNA, 19 bp, Homo sapiens
  siRNA target sequence for DKFZP434H0115 (NM_031421.1,650-668).
ctacgtggacaaagagtat

SEQ ID NO: 396902 - DNA, 19 bp, Homo sapiens
  siRNA target sequence for DKFZP434H0115 (NM_031421.1,871-889).
cacagacagcccattacat

SEQ ID NO: 396903 - DNA, 19 bp, Homo sapiens
  siRNA target sequence for DKFZP434H0115 (NM_031421.1,1023-1041).
gttggaaacttgtatagct

SEQ ID NO: 396904 - DNA, 19 bp, Homo sapiens
  siRNA target sequence for DKFZP434H0115 (NM_031421.1,1160-1178).
caacattggcagagttttt

SEQ ID NO: 396905 - DNA, 19 bp, Homo sapiens
  siRNA target sequence for DKFZP434H0115 (NM_031421.1,1305-1323).
gcctggcaggcccagaatt

SEQ ID NO: 396906 - DNA, 19 bp, Homo sapiens
  siRNA target sequence for DKFZP434H0115 (NM_031421.1,1427-1445).
cgagtcagccgtgaacaat

SEQ ID NO: 396907 - DNA, 19 bp, Homo sapiens
  siRNA target sequence for DKFZP434H0115 (NM_031421.1,1432-1450).
cagccgtgaacaattttga

SEQ ID NO: 396908 - DNA, 19 bp, Homo sapiens
  siRNA target sequence for DKFZP434H0115 (NM_031421.1,1434-1452).
gccgtgaacaattttgaga

SEQ ID NO: 396909 - DNA, 19 bp, Homo sapiens
  siRNA target sequence for DKFZP434H0115 (NM_031421.1,1435-1453).
ccgtgaacaattttgagaa

SEQ ID NO: 396910 - DNA, 19 bp, Homo sapiens
  siRNA target sequence for DKFZP434H0115 (NM_031421.1,1465-1483).
gagcaaagcttgtgcataa

SEQ ID NO: 396911 - DNA, 19 bp, Homo sapiens
  siRNA target sequence for DKFZP434H0115 (NM_031421.1,1467-1485).
gcaaagcttgtgcataaca

SEQ ID NO: 396912 - DNA, 19 bp, Homo sapiens
  siRNA target sequence for DKFZP434H0115 (NM_031421.1,1468-1486).
caaagcttgtgcataacaa

SEQ ID NO: 396913 - DNA, 19 bp, Homo sapiens
  siRNA target sequence for DKFZP434H0115 (NM_031421.1,1524-1542).
gccaacaagggtatcatca

SEQ ID NO: 396914 - DNA, 19 bp, Homo sapiens
  siRNA target sequence for DKFZP434H0115 (NM_031421.1,1592-1610).
gggagaagcttcactgtat

SEQ ID NO: 396915 - DNA, 19 bp, Homo sapiens
  siRNA target sequence for DKFZP434H0115 (NM_031421.1,1594-1612).
gagaagcttcactgtatga

SEQ ID NO: 396916 - DNA, 19 bp, Homo sapiens
  siRNA target sequence for DKFZP434H0115 (NM_031421.1,1603-1621).
cactgtatgaagatagaat

SEQ ID NO: 396917 - DNA, 19 bp, Homo sapiens
  siRNA target sequence for DKFZP434H0115 (NM_031421.1,1827-1845).
ggagaattaggcacaagat

SEQ ID NO: 396918 - DNA, 19 bp, Homo sapiens
  siRNA target sequence for DKFZP434H0115 (NM_031421.1,1855-1873).
caggcaggaagctactaga

SEQ ID NO: 396919 - DNA, 19 bp, Homo sapiens
  siRNA target sequence for DKFZP434H0115 (NM_031421.1,1906-1924).
ggaggccttcgggagaatt

SEQ ID NO: 396920 - DNA, 19 bp, Homo sapiens
  siRNA target sequence for DKFZP434H0115 (NM_031421.1,1907-1925).
gaggccttcgggagaatta

SEQ ID NO: 396921 - DNA, 19 bp, Homo sapiens
  siRNA target sequence for C20orf55 (NM_031424.3,730-748).
cttgagcgagcgcttttct

SEQ ID NO: 396922 - DNA, 19 bp, Homo sapiens
  siRNA target sequence for C20orf55 (NM_031424.3,759-777).
ctgatctcgagcgcttttt

SEQ ID NO: 396923 - DNA, 19 bp, Homo sapiens
  siRNA target sequence for C20orf55 (NM_031424.3,761-779).
gatctcgagcgctttttta

SEQ ID NO: 396924 - DNA, 19 bp, Homo sapiens
  siRNA target sequence for C20orf55 (NM_031424.3,764-782).
ctcgagcgcttttttaact

SEQ ID NO: 396925 - DNA, 19 bp, Homo sapiens
  siRNA target sequence for C20orf55 (NM_031424.3,767-785).
gagcgcttttttaacttct

SEQ ID NO: 396926 - DNA, 19 bp, Homo sapiens
  siRNA target sequence for C20orf55 (NM_031424.3,837-855).
gggccagctcggatatcgt

SEQ ID NO: 396927 - DNA, 19 bp, Homo sapiens
  siRNA target sequence for C20orf55 (NM_031424.3,988-1006).
cgtgatcaagtggttgtat

SEQ ID NO: 396928 - DNA, 19 bp, Homo sapiens
  siRNA target sequence for MGC10812 (NM_031425.1,205-223).
ccgggtggacgctgaacat

SEQ ID NO: 396929 - DNA, 19 bp, Homo sapiens
  siRNA target sequence for MGC10812 (NM_031425.1,206-224).
cgggtggacgctgaacata

SEQ ID NO: 396930 - DNA, 19 bp, Homo sapiens
  siRNA target sequence for C9orf58 (NM_031426.1,378-396).
gaggggtcagtgacactat

SEQ ID NO: 396931 - DNA, 19 bp, Homo sapiens
  siRNA target sequence for C9orf58 (NM_031426.1,380-398).
ggggtcagtgacactatat

SEQ ID NO: 396932 - DNA, 19 bp, Homo sapiens
  siRNA target sequence for C9orf58 (NM_031426.1,383-401).
gtcagtgacactatatcct

SEQ ID NO: 396933 - DNA, 19 bp, Homo sapiens
  siRNA target sequence for C9orf58 (NM_031426.1,404-422).
cgagactttgtgaacatga

SEQ ID NO: 396934 - DNA, 19 bp, Homo sapiens
  siRNA target sequence for C9orf58 (NM_031426.1,435-453).
ggtcggctgtcctcaagtt

SEQ ID NO: 396935 - DNA, 19 bp, Homo sapiens
  siRNA target sequence for C9orf58 (NM_031426.1,436-454).
gtcggctgtcctcaagtta

SEQ ID NO: 396936 - DNA, 19 bp, Homo sapiens
  siRNA target sequence for C9orf58 (NM_031426.1,438-456).
cggctgtcctcaagttagt

SEQ ID NO: 396937 - DNA, 19 bp, Homo sapiens
  siRNA target sequence for C9orf58 (NM_031426.1,448-466).
caagttagtcatgatgttt

SEQ ID NO: 396938 - DNA, 19 bp, Homo sapiens
  siRNA target sequence for C9orf58 (NM_031426.1,451-469).
gttagtcatgatgtttgaa

SEQ ID NO: 396939 - DNA, 19 bp, Homo sapiens
  siRNA target sequence for C14orf168 (NM_031427.1,183-201).
gctaattgcgagaagcttt

SEQ ID NO: 396940 - DNA, 19 bp, Homo sapiens
  siRNA target sequence for C14orf168 (NM_031427.1,254-272).
cttgaggatattatcttta

SEQ ID NO: 396941 - DNA, 19 bp, Homo sapiens
  siRNA target sequence for C14orf168 (NM_031427.1,308-326).
ggcagtaggggacacatta

SEQ ID NO: 396942 - DNA, 19 bp, Homo sapiens
  siRNA target sequence for C14orf168 (NM_031427.1,310-328).
cagtaggggacacattaga

SEQ ID NO: 396943 - DNA, 19 bp, Homo sapiens
  siRNA target sequence for C14orf168 (NM_031427.1,333-351).
ctgtggatctcctacaatt

SEQ ID NO: 396944 - DNA, 19 bp, Homo sapiens
  siRNA target sequence for C14orf168 (NM_031427.1,335-353).
gtggatctcctacaatttt

SEQ ID NO: 396945 - DNA, 19 bp, Homo sapiens
  siRNA target sequence for C14orf168 (NM_031427.1,407-425).
gtctaataacctggtaaaa

SEQ ID NO: 396946 - DNA, 19 bp, Homo sapiens
  siRNA target sequence for RTBDN (NM_031429.1,361-379).
cgcttctcggctacagaat

SEQ ID NO: 396947 - DNA, 19 bp, Homo sapiens
  siRNA target sequence for RTBDN (NM_031429.1,576-594).
cctggcaggaccttgttgt

SEQ ID NO: 396948 - DNA, 19 bp, Homo sapiens
  siRNA target sequence for RTBDN (NM_031429.1,662-680).
gccctgaatgcgaatcctt

SEQ ID NO: 396949 - DNA, 19 bp, Homo sapiens
  siRNA target sequence for RTBDN (NM_031429.1,783-801).
cgccaactgcgaagatgat

SEQ ID NO: 396950 - DNA, 19 bp, Homo sapiens
  siRNA target sequence for RTBDN (NM_031429.1,784-802).
gccaactgcgaagatgata

SEQ ID NO: 396951 - DNA, 19 bp, Homo sapiens
  siRNA target sequence for RTBDN (NM_031429.1,821-839).
ggctcccactctcagaaaa

SEQ ID NO: 396952 - DNA, 19 bp, Homo sapiens
  siRNA target sequence for RTBDN (NM_031429.1,822-840).
gctcccactctcagaaaaa

SEQ ID NO: 396953 - DNA, 19 bp, Homo sapiens
  siRNA target sequence for RTBDN (NM_031429.1,947-965).
cccgtcactgcttcaacat

SEQ ID NO: 396954 - DNA, 19 bp, Homo sapiens
  siRNA target sequence for C7orf21 (NM_031434.2,296-314).
gaggtgaccgtccttttct

SEQ ID NO: 396955 - DNA, 19 bp, Homo sapiens
  siRNA target sequence for AKR1CL2 (NM_031436.2,190-208).
cttcgactgtgcttacttt

SEQ ID NO: 396956 - DNA, 19 bp, Homo sapiens
  siRNA target sequence for AKR1CL2 (NM_031436.2,201-219).
cttacttttaccacaatga

SEQ ID NO: 396957 - DNA, 19 bp, Homo sapiens
  siRNA target sequence for AKR1CL2 (NM_031436.2,236-254).
gggatccgttgcaagatca

SEQ ID NO: 396958 - DNA, 19 bp, Homo sapiens
  siRNA target sequence for AKR1CL2 (NM_031436.2,237-255).
ggatccgttgcaagatcaa

SEQ ID NO: 396959 - DNA, 19 bp, Homo sapiens
  siRNA target sequence for AKR1CL2 (NM_031436.2,253-271).
caaggaaggcgctgtaaga

SEQ ID NO: 396960 - DNA, 19 bp, Homo sapiens
  siRNA target sequence for AKR1CL2 (NM_031436.2,303-321).
ggtgcacctgccataagaa

SEQ ID NO: 396961 - DNA, 19 bp, Homo sapiens
  siRNA target sequence for AKR1CL2 (NM_031436.2,359-377).
gccttgaagctgaactatt

SEQ ID NO: 396962 - DNA, 19 bp, Homo sapiens
  siRNA target sequence for AKR1CL2 (NM_031436.2,360-378).
ccttgaagctgaactattt

SEQ ID NO: 396963 - DNA, 19 bp, Homo sapiens
  siRNA target sequence for AKR1CL2 (NM_031436.2,776-794).
ggggttgacctgatagaca

SEQ ID NO: 396964 - DNA, 19 bp, Homo sapiens
  siRNA target sequence for AKR1CL2 (NM_031436.2,948-966).
cacagcacgatatggataa

SEQ ID NO: 396965 - DNA, 19 bp, Homo sapiens
  siRNA target sequence for NUDT12 (NM_031438.2,117-135).
gaagcaagaaatagttact

SEQ ID NO: 396966 - DNA, 19 bp, Homo sapiens
  siRNA target sequence for NUDT12 (NM_031438.2,230-248).
gctggactgctttaatgta

SEQ ID NO: 396967 - DNA, 19 bp, Homo sapiens
  siRNA target sequence for NUDT12 (NM_031438.2,231-249).
ctggactgctttaatgtat

SEQ ID NO: 396968 - DNA, 19 bp, Homo sapiens
  siRNA target sequence for NUDT12 (NM_031438.2,299-317).
ggtgtgacagatcaattgt

SEQ ID NO: 396969 - DNA, 19 bp, Homo sapiens
  siRNA target sequence for NUDT12 (NM_031438.2,302-320).
gtgacagatcaattgtcaa

SEQ ID NO: 396970 - DNA, 19 bp, Homo sapiens
  siRNA target sequence for NUDT12 (NM_031438.2,338-356).
cactggacattgctgtatt

SEQ ID NO: 396971 - DNA, 19 bp, Homo sapiens
  siRNA target sequence for NUDT12 (NM_031438.2,360-378).
gggttataagcatatagct

SEQ ID NO: 396972 - DNA, 19 bp, Homo sapiens
  siRNA target sequence for NUDT12 (NM_031438.2,411-429).
gccttggttcctaacgaat

SEQ ID NO: 396973 - DNA, 19 bp, Homo sapiens
  siRNA target sequence for NUDT12 (NM_031438.2,416-434).
ggttcctaacgaatgaagt

SEQ ID NO: 396974 - DNA, 19 bp, Homo sapiens
  siRNA target sequence for NUDT12 (NM_031438.2,469-487).
ctggaccggaaaagtgaaa

SEQ ID NO: 396975 - DNA, 19 bp, Homo sapiens
  siRNA target sequence for NUDT12 (NM_031438.2,500-518).
ctgactggctgctagctaa

SEQ ID NO: 396976 - DNA, 19 bp, Homo sapiens
  siRNA target sequence for NUDT12 (NM_031438.2,504-522).
ctggctgctagctaaagaa

SEQ ID NO: 396977 - DNA, 19 bp, Homo sapiens
  siRNA target sequence for NUDT12 (NM_031438.2,526-544).
catccagccacagttttta

SEQ ID NO: 396978 - DNA, 19 bp, Homo sapiens
  siRNA target sequence for NUDT12 (NM_031438.2,556-574).
gatttaaatcccttggtta

SEQ ID NO: 396979 - DNA, 19 bp, Homo sapiens
  siRNA target sequence for NUDT12 (NM_031438.2,575-593).
ctctaggtggcaataaaga

SEQ ID NO: 396980 - DNA, 19 bp, Homo sapiens
  siRNA target sequence for NUDT12 (NM_031438.2,617-635).
ggctttgtcagctgaacta

SEQ ID NO: 396981 - DNA, 19 bp, Homo sapiens
  siRNA target sequence for NUDT12 (NM_031438.2,627-645).
gctgaactacacagatata

SEQ ID NO: 396982 - DNA, 19 bp, Homo sapiens
  siRNA target sequence for NUDT12 (NM_031438.2,628-646).
ctgaactacacagatataa

SEQ ID NO: 396983 - DNA, 19 bp, Homo sapiens
  siRNA target sequence for NUDT12 (NM_031438.2,667-685).
gagaagatcaccttgattt

SEQ ID NO: 396984 - DNA, 19 bp, Homo sapiens
  siRNA target sequence for NUDT12 (NM_031438.2,669-687).
gaagatcaccttgattttt

SEQ ID NO: 396985 - DNA, 19 bp, Homo sapiens
  siRNA target sequence for NUDT12 (NM_031438.2,771-789).
ctggtttgctctaggtata

SEQ ID NO: 396986 - DNA, 19 bp, Homo sapiens
  siRNA target sequence for NUDT12 (NM_031438.2,773-791).
ggtttgctctaggtataga

SEQ ID NO: 396987 - DNA, 19 bp, Homo sapiens
  siRNA target sequence for NUDT12 (NM_031438.2,774-792).
gtttgctctaggtatagat

SEQ ID NO: 396988 - DNA, 19 bp, Homo sapiens
  siRNA target sequence for NUDT12 (NM_031438.2,779-797).
ctctaggtatagatcctat

SEQ ID NO: 396989 - DNA, 19 bp, Homo sapiens
  siRNA target sequence for NUDT12 (NM_031438.2,856-874).
ccagcccttctgcaattga

SEQ ID NO: 396990 - DNA, 19 bp, Homo sapiens
  siRNA target sequence for NUDT12 (NM_031438.2,857-875).
cagcccttctgcaattgaa

SEQ ID NO: 396991 - DNA, 19 bp, Homo sapiens
  siRNA target sequence for NUDT12 (NM_031438.2,861-879).
ccttctgcaattgaaagaa

SEQ ID NO: 396992 - DNA, 19 bp, Homo sapiens
  siRNA target sequence for NUDT12 (NM_031438.2,920-938).
cctggcacagtcgatacaa

SEQ ID NO: 396993 - DNA, 19 bp, Homo sapiens
  siRNA target sequence for NUDT12 (NM_031438.2,923-941).
ggcacagtcgatacaagtt

SEQ ID NO: 396994 - DNA, 19 bp, Homo sapiens
  siRNA target sequence for NUDT12 (NM_031438.2,924-942).
gcacagtcgatacaagttt

SEQ ID NO: 396995 - DNA, 19 bp, Homo sapiens
  siRNA target sequence for NUDT12 (NM_031438.2,925-943).
cacagtcgatacaagtttt

SEQ ID NO: 396996 - DNA, 19 bp, Homo sapiens
  siRNA target sequence for NUDT12 (NM_031438.2,945-963).
cccaacctgtggaaatgca

SEQ ID NO: 396997 - DNA, 19 bp, Homo sapiens
  siRNA target sequence for NUDT12 (NM_031438.2,976-994).
gaaggtggctataagagat

SEQ ID NO: 396998 - DNA, 19 bp, Homo sapiens
  siRNA target sequence for NUDT12 (NM_031438.2,979-997).
ggtggctataagagattat

SEQ ID NO: 396999 - DNA, 19 bp, Homo sapiens
  siRNA target sequence for NUDT12 (NM_031438.2,1019-1037).
gtctcaatggcgtccataa

SEQ ID NO: 397000 - DNA, 19 bp, Homo sapiens
  siRNA target sequence for NUDT12 (NM_031438.2,1021-1039).
ctcaatggcgtccataata

SEQ ID NO: 397001 - DNA, 19 bp, Homo sapiens
  siRNA target sequence for NUDT12 (NM_031438.2,1129-1147).
cccccaggcatgtttactt

SEQ ID NO: 397002 - DNA, 19 bp, Homo sapiens
  siRNA target sequence for NUDT12 (NM_031438.2,1148-1166).
gccttgctggatttattga

SEQ ID NO: 397003 - DNA, 19 bp, Homo sapiens
  siRNA target sequence for NUDT12 (NM_031438.2,1278-1296).
cttaatgattggttgctta

SEQ ID NO: 397004 - DNA, 19 bp, Homo sapiens
  siRNA target sequence for NUDT12 (NM_031438.2,1345-1363).
gatgcccgctggttcacta

SEQ ID NO: 397005 - DNA, 19 bp, Homo sapiens
  siRNA target sequence for NUDT12 (NM_031438.2,1350-1368).
ccgctggttcactagagaa

SEQ ID NO: 397006 - DNA, 19 bp, Homo sapiens
  siRNA target sequence for NUDT12 (NM_031438.2,1425-1443).
ccgagctattgcacatcaa

SEQ ID NO: 397007 - DNA, 19 bp, Homo sapiens
  siRNA target sequence for NUDT12 (NM_031438.2,1426-1444).
cgagctattgcacatcaat

SEQ ID NO: 397008 - DNA, 19 bp, Homo sapiens
  siRNA target sequence for NUDT12 (NM_031438.2,1430-1448).
ctattgcacatcaattaat

SEQ ID NO: 397009 - DNA, 19 bp, Homo sapiens
  siRNA target sequence for NUDT12 (NM_031438.2,1436-1454).
cacatcaattaatcaaaca

SEQ ID NO: 397010 - DNA, 19 bp, Homo sapiens
  siRNA target sequence for NUDT12 (NM_031438.2,1449-1467).
caaacactggattagaata

SEQ ID NO: 397011 - DNA, 19 bp, Homo sapiens
  siRNA target sequence for NUDT12 (NM_031438.2,1455-1473).
ctggattagaataaatcct

SEQ ID NO: 397012 - DNA, 19 bp, Homo sapiens
  siRNA target sequence for TM4SF10 (NM_031442.2,547-565).
cctggtgggtttgatttct

SEQ ID NO: 397013 - DNA, 19 bp, Homo sapiens
  siRNA target sequence for TM4SF10 (NM_031442.2,576-594).
gatctcgaaggcgtttcta

SEQ ID NO: 397014 - DNA, 19 bp, Homo sapiens
  siRNA target sequence for TM4SF10 (NM_031442.2,599-617).
cctgttgcggtcatgcttt

SEQ ID NO: 397015 - DNA, 19 bp, Homo sapiens
  siRNA target sequence for TM4SF10 (NM_031442.2,600-618).
ctgttgcggtcatgctttt

SEQ ID NO: 397016 - DNA, 19 bp, Homo sapiens
  siRNA target sequence for TM4SF10 (NM_031442.2,650-668).
gtcctttacccaatcaagt

SEQ ID NO: 397017 - DNA, 19 bp, Homo sapiens
  siRNA target sequence for TM4SF10 (NM_031442.2,653-671).
ctttacccaatcaagttca

SEQ ID NO: 397018 - DNA, 19 bp, Homo sapiens
  siRNA target sequence for TM4SF10 (NM_031442.2,674-692).
gaaactgtgagcttgaaaa

SEQ ID NO: 397019 - DNA, 19 bp, Homo sapiens
  siRNA target sequence for TM4SF10 (NM_031442.2,724-742).
ggcctggggtgcaactata

SEQ ID NO: 397020 - DNA, 19 bp, Homo sapiens
  siRNA target sequence for TM4SF10 (NM_031442.2,725-743).
gcctggggtgcaactatat

SEQ ID NO: 397021 - DNA, 19 bp, Homo sapiens
  siRNA target sequence for TM4SF10 (NM_031442.2,727-745).
ctggggtgcaactatattt

SEQ ID NO: 397022 - DNA, 19 bp, Homo sapiens
  siRNA target sequence for TM4SF10 (NM_031442.2,732-750).
gtgcaactatattttcgtt

SEQ ID NO: 397023 - DNA, 19 bp, Homo sapiens
  siRNA target sequence for TM4SF10 (NM_031442.2,752-770).
gggggtgccatcctttatt

SEQ ID NO: 397024 - DNA, 19 bp, Homo sapiens
  siRNA target sequence for TM4SF10 (NM_031442.2,771-789).
gcctgaaccctaagaacta

SEQ ID NO: 397025 - DNA, 19 bp, Homo sapiens
  siRNA target sequence for TM4SF10 (NM_031442.2,780-798).
ctaagaactatgaagacta

SEQ ID NO: 397026 - DNA, 19 bp, Homo sapiens
  siRNA target sequence for C7orf22 (NM_031443.2,115-133).
ggaattgtctcgccattta

SEQ ID NO: 397027 - DNA, 19 bp, Homo sapiens
  siRNA target sequence for C7orf22 (NM_031443.2,125-143).
cgccatttaaacgagtatt

SEQ ID NO: 397028 - DNA, 19 bp, Homo sapiens
  siRNA target sequence for C7orf22 (NM_031443.2,128-146).
catttaaacgagtattcct

SEQ ID NO: 397029 - DNA, 19 bp, Homo sapiens
  siRNA target sequence for C7orf22 (NM_031443.2,256-274).
ctgagcgactatattgaga

SEQ ID NO: 397030 - DNA, 19 bp, Homo sapiens
  siRNA target sequence for C7orf22 (NM_031443.2,276-294).
ggaggtaaagtatttaggt

SEQ ID NO: 397031 - DNA, 19 bp, Homo sapiens
  siRNA target sequence for C7orf22 (NM_031443.2,325-343).
ccctccagtaggactgaaa

SEQ ID NO: 397032 - DNA, 19 bp, Homo sapiens
  siRNA target sequence for C7orf22 (NM_031443.2,479-497).
gggtgcccatccatgacat

SEQ ID NO: 397033 - DNA, 19 bp, Homo sapiens
  siRNA target sequence for C7orf22 (NM_031443.2,768-786).
ggacagagcgatatttgat

SEQ ID NO: 397034 - DNA, 19 bp, Homo sapiens
  siRNA target sequence for C7orf22 (NM_031443.2,820-838).
cacagcgatgactcttcta

SEQ ID NO: 397035 - DNA, 19 bp, Homo sapiens
  siRNA target sequence for C7orf22 (NM_031443.2,822-840).
cagcgatgactcttctaca

SEQ ID NO: 397036 - DNA, 19 bp, Homo sapiens
  siRNA target sequence for C7orf22 (NM_031443.2,824-842).
gcgatgactcttctacaaa

SEQ ID NO: 397037 - DNA, 19 bp, Homo sapiens
  siRNA target sequence for C7orf22 (NM_031443.2,825-843).
cgatgactcttctacaaaa

SEQ ID NO: 397038 - DNA, 19 bp, Homo sapiens
  siRNA target sequence for C7orf22 (NM_031443.2,1166-1184).
gccagcacttcgagaactt

SEQ ID NO: 397039 - DNA, 19 bp, Homo sapiens
  siRNA target sequence for MGC4268 (NM_031445.1,488-506).
gtcaggaagcggtctagaa

SEQ ID NO: 397040 - DNA, 19 bp, Homo sapiens
  siRNA target sequence for MGC4268 (NM_031445.1,493-511).
gaagcggtctagaagtgta

SEQ ID NO: 397041 - DNA, 19 bp, Homo sapiens
  siRNA target sequence for MGC4268 (NM_031445.1,514-532).
gtcacggtcgcctcatgaa

SEQ ID NO: 397042 - DNA, 19 bp, Homo sapiens
  siRNA target sequence for MGC4268 (NM_031445.1,519-537).
ggtcgcctcatgaaagtgt

SEQ ID NO: 397043 - DNA, 19 bp, Homo sapiens
  siRNA target sequence for PNAS-131 (NM_031446.2,306-324).
gactccaaaagtgtattgt

SEQ ID NO: 397044 - DNA, 19 bp, Homo sapiens
  siRNA target sequence for PNAS-131 (NM_031446.2,343-361).
gcaacagaacagtgaaaca

SEQ ID NO: 397045 - DNA, 19 bp, Homo sapiens
  siRNA target sequence for PNAS-131 (NM_031446.2,347-365).
cagaacagtgaaacatcat

SEQ ID NO: 397046 - DNA, 19 bp, Homo sapiens
  siRNA target sequence for PNAS-131 (NM_031446.2,356-374).
gaaacatcatggtaaaagt

SEQ ID NO: 397047 - DNA, 19 bp, Homo sapiens
  siRNA target sequence for PNAS-131 (NM_031446.2,409-427).
ccactcctgcaagtaaact

SEQ ID NO: 397048 - DNA, 19 bp, Homo sapiens
  siRNA target sequence for PNAS-131 (NM_031446.2,451-469).
ggactgcaaacccaaatca

SEQ ID NO: 397049 - DNA, 19 bp, Homo sapiens
  siRNA target sequence for PNAS-131 (NM_031446.2,452-470).
gactgcaaacccaaatcat

SEQ ID NO: 397050 - DNA, 19 bp, Homo sapiens
  siRNA target sequence for PNAS-131 (NM_031446.2,497-515).
cccagcatcggttttcaga

SEQ ID NO: 397051 - DNA, 19 bp, Homo sapiens
  siRNA target sequence for PNAS-131 (NM_031446.2,575-593).
gaaacacttctctcaacta

SEQ ID NO: 397052 - DNA, 19 bp, Homo sapiens
  siRNA target sequence for PNAS-131 (NM_031446.2,599-617).
gttacttagtcagaatgaa

SEQ ID NO: 397053 - DNA, 19 bp, Homo sapiens
  siRNA target sequence for DKFZP762D096 (NM_031448.2,135-153).
ccggttcctcagatcctaa

SEQ ID NO: 397054 - DNA, 19 bp, Homo sapiens
  siRNA target sequence for DKFZP762D096 (NM_031448.2,136-154).
cggttcctcagatcctaat

SEQ ID NO: 397055 - DNA, 19 bp, Homo sapiens
  siRNA target sequence for DKFZP762D096 (NM_031448.2,325-343).
ccgagatccagtatgatga

SEQ ID NO: 397056 - DNA, 19 bp, Homo sapiens
  siRNA target sequence for P5326 (NM_031450.2,254-272).
ggacccctggctagtgttt

SEQ ID NO: 397057 - DNA, 19 bp, Homo sapiens
  siRNA target sequence for P5326 (NM_031450.2,657-675).
cgccaggtcatctgtgttt

SEQ ID NO: 397058 - DNA, 19 bp, Homo sapiens
  siRNA target sequence for P5326 (NM_031450.2,757-775).
cctacaagcctgatgtcta

SEQ ID NO: 397059 - DNA, 19 bp, Homo sapiens
  siRNA target sequence for C10orf45 (NM_031453.2,251-269).
caagactcaccaaaagact

SEQ ID NO: 397060 - DNA, 19 bp, Homo sapiens
  siRNA target sequence for C10orf45 (NM_031453.2,281-299).
ctagaagcatgcatccatt

SEQ ID NO: 397061 - DNA, 19 bp, Homo sapiens
  siRNA target sequence for C10orf45 (NM_031453.2,319-337).
gcctgttttgggaatacga

SEQ ID NO: 397062 - DNA, 19 bp, Homo sapiens
  siRNA target sequence for C10orf45 (NM_031453.2,360-378).
gtccggcgtggctgatact

SEQ ID NO: 397063 - DNA, 19 bp, Homo sapiens
  siRNA target sequence for C10orf45 (NM_031453.2,363-381).
cggcgtggctgatactcat

SEQ ID NO: 397064 - DNA, 19 bp, Homo sapiens
  siRNA target sequence for C10orf45 (NM_031453.2,495-513).
cagtgcgaatcggaattca

SEQ ID NO: 397065 - DNA, 19 bp, Homo sapiens
  siRNA target sequence for C10orf45 (NM_031453.2,617-635).
ccagaccatcaattattga

SEQ ID NO: 397066 - DNA, 19 bp, Homo sapiens
  siRNA target sequence for C10orf45 (NM_031453.2,676-694).
ctcgagctggagcagaaaa

SEQ ID NO: 397067 - DNA, 19 bp, Homo sapiens
  siRNA target sequence for C10orf45 (NM_031453.2,707-725).
gcccacctgaggatattga

SEQ ID NO: 397068 - DNA, 19 bp, Homo sapiens
  siRNA target sequence for C10orf45 (NM_031453.2,713-731).
ctgaggatattgaccataa

SEQ ID NO: 397069 - DNA, 19 bp, Homo sapiens
  siRNA target sequence for C10orf45 (NM_031453.2,727-745).
cataaggactcatatctca

SEQ ID NO: 397070 - DNA, 19 bp, Homo sapiens
  siRNA target sequence for C10orf45 (NM_031453.2,735-753).
ctcatatctcattacaaga

SEQ ID NO: 397071 - DNA, 19 bp, Homo sapiens
  siRNA target sequence for C10orf45 (NM_031453.2,762-780).
ggccgagccagactacata

SEQ ID NO: 397072 - DNA, 19 bp, Homo sapiens
  siRNA target sequence for C10orf45 (NM_031453.2,764-782).
ccgagccagactacataga

SEQ ID NO: 397073 - DNA, 19 bp, Homo sapiens
  siRNA target sequence for C10orf45 (NM_031453.2,765-783).
cgagccagactacatagaa

SEQ ID NO: 397074 - DNA, 19 bp, Homo sapiens
  siRNA target sequence for C10orf45 (NM_031453.2,768-786).
gccagactacatagaagat

SEQ ID NO: 397075 - DNA, 19 bp, Homo sapiens
  siRNA target sequence for C10orf45 (NM_031453.2,787-805).
gacaatcctgaactcatta

SEQ ID NO: 397076 - DNA, 19 bp, Homo sapiens
  siRNA target sequence for C10orf45 (NM_031453.2,836-854).
cctcccggaaccatcaaga

SEQ ID NO: 397077 - DNA, 19 bp, Homo sapiens
  siRNA target sequence for C10orf45 (NM_031453.2,837-855).
ctcccggaaccatcaagat

SEQ ID NO: 397078 - DNA, 19 bp, Homo sapiens
  siRNA target sequence for C10orf45 (NM_031453.2,839-857).
cccggaaccatcaagatct

SEQ ID NO: 397079 - DNA, 19 bp, Homo sapiens
  siRNA target sequence for C10orf45 (NM_031453.2,840-858).
ccggaaccatcaagatctt

SEQ ID NO: 397080 - DNA, 19 bp, Homo sapiens
  siRNA target sequence for DKFZP761F241 (NM_031455.2,477-495).
gtccaggactactcctatt

SEQ ID NO: 397081 - DNA, 19 bp, Homo sapiens
  siRNA target sequence for DKFZP761F241 (NM_031455.2,480-498).
caggactactcctatttct

SEQ ID NO: 397082 - DNA, 19 bp, Homo sapiens
  siRNA target sequence for DKFZP761F241 (NM_031455.2,530-548).
cttgcctcacggagtcaat

SEQ ID NO: 397083 - DNA, 19 bp, Homo sapiens
  siRNA target sequence for CD99L2 (NM_031462.1,298-316).
cagagctccggcaaaacct

SEQ ID NO: 397084 - DNA, 19 bp, Homo sapiens
  siRNA target sequence for CD99L2 (NM_031462.1,370-388).
caggaaaccgggtatagga

SEQ ID NO: 397085 - DNA, 19 bp, Homo sapiens
  siRNA target sequence for CD99L2 (NM_031462.1,489-507).
ccctggatgatcgaaatga

SEQ ID NO: 397086 - DNA, 19 bp, Homo sapiens
  siRNA target sequence for CD99L2 (NM_031462.1,520-538).
ccgcaggaaaccaattgct

SEQ ID NO: 397087 - DNA, 19 bp, Homo sapiens
  siRNA target sequence for MGC13204 (NM_031465.1,375-393).
cactcaagtcgaaaaccta

SEQ ID NO: 397088 - DNA, 19 bp, Homo sapiens
  siRNA target sequence for MGC13204 (NM_031465.1,436-454).
cttccagttcagagacatt

SEQ ID NO: 397089 - DNA, 19 bp, Homo sapiens
  siRNA target sequence for MGC13204 (NM_031465.1,471-489).
cgagagtgccccagtgaat

SEQ ID NO: 397090 - DNA, 19 bp, Homo sapiens
  siRNA target sequence for MGC13204 (NM_031465.1,565-583).
cacttcagagcttacctta

SEQ ID NO: 397091 - DNA, 19 bp, Homo sapiens
  siRNA target sequence for MGC13204 (NM_031465.1,570-588).
cagagcttaccttatgtgt

SEQ ID NO: 397092 - DNA, 19 bp, Homo sapiens
  siRNA target sequence for MGC13204 (NM_031465.1,574-592).
gcttaccttatgtgttcat

SEQ ID NO: 397093 - DNA, 19 bp, Homo sapiens
  siRNA target sequence for MGC13204 (NM_031465.1,575-593).
cttaccttatgtgttcatt

SEQ ID NO: 397094 - DNA, 19 bp, Homo sapiens
  siRNA target sequence for MGC13204 (NM_031465.1,687-705).
cacactggcactcctaata

SEQ ID NO: 397095 - DNA, 19 bp, Homo sapiens
  siRNA target sequence for MGC13204 (NM_031465.1,718-736).
gacctgttctggttaaaga

SEQ ID NO: 397096 - DNA, 19 bp, Homo sapiens
  siRNA target sequence for MGC13204 (NM_031465.1,737-755).
cacccccgaggacaagtat

SEQ ID NO: 397097 - DNA, 19 bp, Homo sapiens
  siRNA target sequence for MGC13204 (NM_031465.1,741-759).
cccgaggacaagtatggaa

SEQ ID NO: 397098 - DNA, 19 bp, Homo sapiens
  siRNA target sequence for MGC13204 (NM_031465.1,742-760).
ccgaggacaagtatggaat

SEQ ID NO: 397099 - DNA, 19 bp, Homo sapiens
  siRNA target sequence for MGC13204 (NM_031465.1,743-761).
cgaggacaagtatggaata

SEQ ID NO: 397100 - DNA, 19 bp, Homo sapiens
  siRNA target sequence for MGC13204 (NM_031465.1,744-762).
gaggacaagtatggaataa

SEQ ID NO: 397101 - DNA, 19 bp, Homo sapiens
  siRNA target sequence for T1 (NM_031466.3,296-314).
gactgggacttcaaaatga

SEQ ID NO: 397102 - DNA, 19 bp, Homo sapiens
  siRNA target sequence for T1 (NM_031466.3,629-647).
ggctccacactgtatgact

SEQ ID NO: 397103 - DNA, 19 bp, Homo sapiens
  siRNA target sequence for T1 (NM_031466.3,644-662).
gactcccggctctttgtct

SEQ ID NO: 397104 - DNA, 19 bp, Homo sapiens
  siRNA target sequence for T1 (NM_031466.3,815-833).
gacaagtctggggataaga

SEQ ID NO: 397105 - DNA, 19 bp, Homo sapiens
  siRNA target sequence for T1 (NM_031466.3,846-864).
gtgtcccgtttgagaaaaa

SEQ ID NO: 397106 - DNA, 19 bp, Homo sapiens
  siRNA target sequence for T1 (NM_031466.3,1007-1025).
ctgcgttctgtgaatgact

SEQ ID NO: 397107 - DNA, 19 bp, Homo sapiens
  siRNA target sequence for T1 (NM_031466.3,1295-1313).
gaggcgatttcctattaca

SEQ ID NO: 397108 - DNA, 19 bp, Homo sapiens
  siRNA target sequence for T1 (NM_031466.3,1305-1323).
cctattacagcaagtataa

SEQ ID NO: 397109 - DNA, 19 bp, Homo sapiens
  siRNA target sequence for T1 (NM_031466.3,1362-1380).
ctgtacgtgtccttgcaat

SEQ ID NO: 397110 - DNA, 19 bp, Homo sapiens
  siRNA target sequence for T1 (NM_031466.3,1514-1532).
cgcaagtctgcgttcttca

SEQ ID NO: 397111 - DNA, 19 bp, Homo sapiens
  siRNA target sequence for T1 (NM_031466.3,1584-1602).
ggagggcctgctacaaact

SEQ ID NO: 397112 - DNA, 19 bp, Homo sapiens
  siRNA target sequence for T1 (NM_031466.3,1633-1651).
gtcgctggatcccaaagat

SEQ ID NO: 397113 - DNA, 19 bp, Homo sapiens
  siRNA target sequence for T1 (NM_031466.3,1821-1839).
cccaaagcctagagaacta

SEQ ID NO: 397114 - DNA, 19 bp, Homo sapiens
  siRNA target sequence for T1 (NM_031466.3,1928-1946).
gtcaggcatgtgaaactat

SEQ ID NO: 397115 - DNA, 19 bp, Homo sapiens
  siRNA target sequence for T1 (NM_031466.3,1932-1950).
ggcatgtgaaactattgaa

SEQ ID NO: 397116 - DNA, 19 bp, Homo sapiens
  siRNA target sequence for T1 (NM_031466.3,1966-1984).
ccggccacacaaaatgaaa

SEQ ID NO: 397117 - DNA, 19 bp, Homo sapiens
  siRNA target sequence for T1 (NM_031466.3,1999-2017).
gaacgtgtcaaccaaaagt

SEQ ID NO: 397118 - DNA, 19 bp, Homo sapiens
  siRNA target sequence for T1 (NM_031466.3,2062-2080).
gcggaacaagaaaatagat

SEQ ID NO: 397119 - DNA, 19 bp, Homo sapiens
  siRNA target sequence for T1 (NM_031466.3,2063-2081).
cggaacaagaaaatagatt

SEQ ID NO: 397120 - DNA, 19 bp, Homo sapiens
  siRNA target sequence for T1 (NM_031466.3,2111-2129).
gttcagctgatggtatata

SEQ ID NO: 397121 - DNA, 19 bp, Homo sapiens
  siRNA target sequence for T1 (NM_031466.3,2131-2149).
cccaatgccgtttgaactt

SEQ ID NO: 397122 - DNA, 19 bp, Homo sapiens
  siRNA target sequence for T1 (NM_031466.3,2144-2162).
gaacttcgagttgaaaaca

SEQ ID NO: 397123 - DNA, 19 bp, Homo sapiens
  siRNA target sequence for T1 (NM_031466.3,2263-2281).
gcagacgactggaacgatt

SEQ ID NO: 397124 - DNA, 19 bp, Homo sapiens
  siRNA target sequence for T1 (NM_031466.3,2264-2282).
cagacgactggaacgatta

SEQ ID NO: 397125 - DNA, 19 bp, Homo sapiens
  siRNA target sequence for T1 (NM_031466.3,2268-2286).
cgactggaacgattactgt

SEQ ID NO: 397126 - DNA, 19 bp, Homo sapiens
  siRNA target sequence for T1 (NM_031466.3,2336-2354).
gataacctgccgggaataa

SEQ ID NO: 397127 - DNA, 19 bp, Homo sapiens
  siRNA target sequence for T1 (NM_031466.3,2365-2383).
ctccacagtggaagtcatt

SEQ ID NO: 397128 - DNA, 19 bp, Homo sapiens
  siRNA target sequence for T1 (NM_031466.3,2496-2514).
gagaaagtcagcaactaat

SEQ ID NO: 397129 - DNA, 19 bp, Homo sapiens
  siRNA target sequence for T1 (NM_031466.3,2498-2516).
gaaagtcagcaactaatca

SEQ ID NO: 397130 - DNA, 19 bp, Homo sapiens
  siRNA target sequence for T1 (NM_031466.3,2502-2520).
gtcagcaactaatcattaa

SEQ ID NO: 397131 - DNA, 19 bp, Homo sapiens
  siRNA target sequence for T1 (NM_031466.3,2557-2575).
ggaggtcacctcgaaagtt

SEQ ID NO: 397132 - DNA, 19 bp, Homo sapiens
  siRNA target sequence for T1 (NM_031466.3,2663-2681).
gtggccacgttcacaatca

SEQ ID NO: 397133 - DNA, 19 bp, Homo sapiens
  siRNA target sequence for T1 (NM_031466.3,2666-2684).
gccacgttcacaatcaaca

SEQ ID NO: 397134 - DNA, 19 bp, Homo sapiens
  siRNA target sequence for T1 (NM_031466.3,2670-2688).
cgttcacaatcaacatcaa

SEQ ID NO: 397135 - DNA, 19 bp, Homo sapiens
  siRNA target sequence for T1 (NM_031466.3,2671-2689).
gttcacaatcaacatcaaa

SEQ ID NO: 397136 - DNA, 19 bp, Homo sapiens
  siRNA target sequence for T1 (NM_031466.3,2824-2842).
cccacccgagagcaacaaa

SEQ ID NO: 397137 - DNA, 19 bp, Homo sapiens
  siRNA target sequence for T1 (NM_031466.3,2876-2894).
gctgtcctgaatttcaaat

SEQ ID NO: 397138 - DNA, 19 bp, Homo sapiens
  siRNA target sequence for T1 (NM_031466.3,2910-2928).
gccacactgaaggatatta

SEQ ID NO: 397139 - DNA, 19 bp, Homo sapiens
  siRNA target sequence for T1 (NM_031466.3,2921-2939).
ggatattacaggaatctct

SEQ ID NO: 397140 - DNA, 19 bp, Homo sapiens
  siRNA target sequence for T1 (NM_031466.3,2957-2975).
gaagtcgagccgtctgtat

SEQ ID NO: 397141 - DNA, 19 bp, Homo sapiens
  siRNA target sequence for T1 (NM_031466.3,2960-2978).
gtcgagccgtctgtatttt

SEQ ID NO: 397142 - DNA, 19 bp, Homo sapiens
  siRNA target sequence for T1 (NM_031466.3,2963-2981).
gagccgtctgtatttttca

SEQ ID NO: 397143 - DNA, 19 bp, Homo sapiens
  siRNA target sequence for T1 (NM_031466.3,3114-3132).
gccagcgaatggctattca

SEQ ID NO: 397144 - DNA, 19 bp, Homo sapiens
  siRNA target sequence for T1 (NM_031466.3,3115-3133).
ccagcgaatggctattcaa

SEQ ID NO: 397145 - DNA, 19 bp, Homo sapiens
  siRNA target sequence for T1 (NM_031466.3,3176-3194).
gagaaggggcaatttgcaa

SEQ ID NO: 397146 - DNA, 19 bp, Homo sapiens
  siRNA target sequence for SLC4A9 (NM_031467.1,68-86).
ccagtgctcctagaaatat

SEQ ID NO: 397147 - DNA, 19 bp, Homo sapiens
  siRNA target sequence for SLC4A9 (NM_031467.1,251-269).
caggcaggtgggtactgtt

SEQ ID NO: 397148 - DNA, 19 bp, Homo sapiens
  siRNA target sequence for SLC4A9 (NM_031467.1,525-543).
ctgctggggctctactcat

SEQ ID NO: 397149 - DNA, 19 bp, Homo sapiens
  siRNA target sequence for SLC4A9 (NM_031467.1,533-551).
gctctactcatccaagaaa

SEQ ID NO: 397150 - DNA, 19 bp, Homo sapiens
  siRNA target sequence for SLC4A9 (NM_031467.1,548-566).
gaaaggcttctgacaatga

SEQ ID NO: 397151 - DNA, 19 bp, Homo sapiens
  siRNA target sequence for SLC4A9 (NM_031467.1,734-752).
ccctcccaagcaggttttt

SEQ ID NO: 397152 - DNA, 19 bp, Homo sapiens
  siRNA target sequence for SLC4A9 (NM_031467.1,1157-1175).
gcttctcggccgtactcta

SEQ ID NO: 397153 - DNA, 19 bp, Homo sapiens
  siRNA target sequence for SLC4A9 (NM_031467.1,1161-1179).
ctcggccgtactctacatt

SEQ ID NO: 397154 - DNA, 19 bp, Homo sapiens
  siRNA target sequence for SLC4A9 (NM_031467.1,1163-1181).
cggccgtactctacattta

SEQ ID NO: 397155 - DNA, 19 bp, Homo sapiens
  siRNA target sequence for SLC4A9 (NM_031467.1,1166-1184).
ccgtactctacatttacct

SEQ ID NO: 397156 - DNA, 19 bp, Homo sapiens
  siRNA target sequence for SLC4A9 (NM_031467.1,1357-1375).
gagcgcctgctcttctctt

SEQ ID NO: 397157 - DNA, 19 bp, Homo sapiens
  siRNA target sequence for SLC4A9 (NM_031467.1,1566-1584).
gaacttgacccatacctat

SEQ ID NO: 397158 - DNA, 19 bp, Homo sapiens
  siRNA target sequence for SLC4A9 (NM_031467.1,1646-1664).
gaaatgagtctcaatggat

SEQ ID NO: 397159 - DNA, 19 bp, Homo sapiens
  siRNA target sequence for SLC4A9 (NM_031467.1,1651-1669).
gagtctcaatggataagga

SEQ ID NO: 397160 - DNA, 19 bp, Homo sapiens
  siRNA target sequence for SLC4A9 (NM_031467.1,1683-1701).
cagagacgacattgactta

SEQ ID NO: 397161 - DNA, 19 bp, Homo sapiens
  siRNA target sequence for SLC4A9 (NM_031467.1,1766-1784).
gccctggctgtcatacagt

SEQ ID NO: 397162 - DNA, 19 bp, Homo sapiens
  siRNA target sequence for SLC4A9 (NM_031467.1,2464-2482).
gcgctcagcagcattcagt

SEQ ID NO: 397163 - DNA, 19 bp, Homo sapiens
  siRNA target sequence for SLC4A9 (NM_031467.1,2465-2483).
cgctcagcagcattcagtt

SEQ ID NO: 397164 - DNA, 19 bp, Homo sapiens
  siRNA target sequence for SLC4A9 (NM_031467.1,2602-2620).
gggctgctttggataatca

SEQ ID NO: 397165 - DNA, 19 bp, Homo sapiens
  siRNA target sequence for SLC4A9 (NM_031467.1,2603-2621).
ggctgctttggataatcaa

SEQ ID NO: 397166 - DNA, 19 bp, Homo sapiens
  siRNA target sequence for SLC4A9 (NM_031467.1,2608-2626).
ctttggataatcaagtcta

SEQ ID NO: 397167 - DNA, 19 bp, Homo sapiens
  siRNA target sequence for ESPN (NM_031475.1,457-475).
gtgcaggacaaagacaatt

SEQ ID NO: 397168 - DNA, 19 bp, Homo sapiens
  siRNA target sequence for MGC10500 (NM_031477.3,828-846).
cgccatggtgcggatttca

SEQ ID NO: 397169 - DNA, 19 bp, Homo sapiens
  siRNA target sequence for MGC10500 (NM_031477.3,829-847).
gccatggtgcggatttcaa

SEQ ID NO: 397170 - DNA, 19 bp, Homo sapiens
  siRNA target sequence for MGC10500 (NM_031477.3,830-848).
ccatggtgcggatttcaaa

SEQ ID NO: 397171 - DNA, 19 bp, Homo sapiens
  siRNA target sequence for MGC10500 (NM_031477.3,864-882).
ggcctacttggatgattgt

SEQ ID NO: 397172 - DNA, 19 bp, Homo sapiens
  siRNA target sequence for MGC10500 (NM_031477.3,877-895).
gattgtcaccggaggtata

SEQ ID NO: 397173 - DNA, 19 bp, Homo sapiens
  siRNA target sequence for MGC10500 (NM_031477.3,1153-1171).
gaactcaaccacatgatca

SEQ ID NO: 397174 - DNA, 19 bp, Homo sapiens
  siRNA target sequence for DKFZP434I2117 (NM_031478.3,239-257).
ctcctgcaagcacatcatt

SEQ ID NO: 397175 - DNA, 19 bp, Homo sapiens
  siRNA target sequence for DKFZP434I2117 (NM_031478.3,278-296).
ctctgcctacacgcaattt

SEQ ID NO: 397176 - DNA, 19 bp, Homo sapiens
  siRNA target sequence for APG10L (NM_031482.3,304-322).
cgttattgtgcagaattca

SEQ ID NO: 397177 - DNA, 19 bp, Homo sapiens
  siRNA target sequence for APG10L (NM_031482.3,305-323).
gttattgtgcagaattcat

SEQ ID NO: 397178 - DNA, 19 bp, Homo sapiens
  siRNA target sequence for APG10L (NM_031482.3,334-352).
caacagataggtgatagtt

SEQ ID NO: 397179 - DNA, 19 bp, Homo sapiens
  siRNA target sequence for APG10L (NM_031482.3,423-441).
gtctgtgatgtcacatcta

SEQ ID NO: 397180 - DNA, 19 bp, Homo sapiens
  siRNA target sequence for APG10L (NM_031482.3,490-508).
gagctacccttggatgatt

SEQ ID NO: 397181 - DNA, 19 bp, Homo sapiens
  siRNA target sequence for APG10L (NM_031482.3,527-545).
cagcagcgtccgaagtgat

SEQ ID NO: 397182 - DNA, 19 bp, Homo sapiens
  siRNA target sequence for APG10L (NM_031482.3,529-547).
gcagcgtccgaagtgatta

SEQ ID NO: 397183 - DNA, 19 bp, Homo sapiens
  siRNA target sequence for APG10L (NM_031482.3,530-548).
cagcgtccgaagtgattaa

SEQ ID NO: 397184 - DNA, 19 bp, Homo sapiens
  siRNA target sequence for APG10L (NM_031482.3,532-550).
gcgtccgaagtgattaaat

SEQ ID NO: 397185 - DNA, 19 bp, Homo sapiens
  siRNA target sequence for APG10L (NM_031482.3,533-551).
cgtccgaagtgattaaata

SEQ ID NO: 397186 - DNA, 19 bp, Homo sapiens
  siRNA target sequence for APG10L (NM_031482.3,534-552).
gtccgaagtgattaaatat

SEQ ID NO: 397187 - DNA, 19 bp, Homo sapiens
  siRNA target sequence for APG10L (NM_031482.3,536-554).
ccgaagtgattaaatatga

SEQ ID NO: 397188 - DNA, 19 bp, Homo sapiens
  siRNA target sequence for APG10L (NM_031482.3,583-601).
caagtgcctgtactttact

SEQ ID NO: 397189 - DNA, 19 bp, Homo sapiens
  siRNA target sequence for APG10L (NM_031482.3,655-673).
ggagttcatgagtgctata

SEQ ID NO: 397190 - DNA, 19 bp, Homo sapiens
  siRNA target sequence for APG10L (NM_031482.3,656-674).
gagttcatgagtgctataa

SEQ ID NO: 397191 - DNA, 19 bp, Homo sapiens
  siRNA target sequence for APG10L (NM_031482.3,691-709).
ggaccatgggacactatta

SEQ ID NO: 397192 - DNA, 19 bp, Homo sapiens
  siRNA target sequence for APG10L (NM_031482.3,710-728).
cgcaacaggaacatccaat

SEQ ID NO: 397193 - DNA, 19 bp, Homo sapiens
  siRNA target sequence for APG10L (NM_031482.3,711-729).
gcaacaggaacatccaata

SEQ ID NO: 397194 - DNA, 19 bp, Homo sapiens
  siRNA target sequence for APG10L (NM_031482.3,757-775).
ccctgcaagacgaatgaat

SEQ ID NO: 397195 - DNA, 19 bp, Homo sapiens
  siRNA target sequence for APG10L (NM_031482.3,758-776).
cctgcaagacgaatgaatt

SEQ ID NO: 397196 - DNA, 19 bp, Homo sapiens
  siRNA target sequence for APG10L (NM_031482.3,761-779).
gcaagacgaatgaattcat

SEQ ID NO: 397197 - DNA, 19 bp, Homo sapiens
  siRNA target sequence for APG10L (NM_031482.3,780-798).
gactcctgtattaaagaat

SEQ ID NO: 397198 - DNA, 19 bp, Homo sapiens
  siRNA target sequence for APG10L (NM_031482.3,820-838).
gtcaactatatcacatcat

SEQ ID NO: 397199 - DNA, 19 bp, Homo sapiens
  siRNA target sequence for APG10L (NM_031482.3,846-864).
cattgtagggccagttgtt

SEQ ID NO: 397200 - DNA, 19 bp, Homo sapiens
  siRNA target sequence for APG10L (NM_031482.3,870-888).
gaatctacctctgagttat

SEQ ID NO: 397201 - DNA, 19 bp, Homo sapiens
  siRNA target sequence for APG10L (NM_031482.3,899-917).
cgtctcaggatgaacgaaa

SEQ ID NO: 397202 - DNA, 19 bp, Homo sapiens
  siRNA target sequence for APG10L (NM_031482.3,900-918).
gtctcaggatgaacgaaat

SEQ ID NO: 397203 - DNA, 19 bp, Homo sapiens
  siRNA target sequence for GRWD1 (NM_031485.2,259-277).
gagtccggcgacacaagtt

SEQ ID NO: 397204 - DNA, 19 bp, Homo sapiens
  siRNA target sequence for GRWD1 (NM_031485.2,443-461).
cagagcttcctcttacact

SEQ ID NO: 397205 - DNA, 19 bp, Homo sapiens
  siRNA target sequence for GRWD1 (NM_031485.2,445-463).
gagcttcctcttacacttt

SEQ ID NO: 397206 - DNA, 19 bp, Homo sapiens
  siRNA target sequence for GRWD1 (NM_031485.2,1207-1225).
gaccttcggcagttcaagt

SEQ ID NO: 397207 - DNA, 19 bp, Homo sapiens
  siRNA target sequence for PCDHA2 (NM_031495.1,2486-2504).
gtaggaaaggtgagtcttt

SEQ ID NO: 397208 - DNA, 19 bp, Homo sapiens
  siRNA target sequence for PCDHA2 (NM_031495.1,2554-2572).
gatttctactagttattta

SEQ ID NO: 397209 - DNA, 19 bp, Homo sapiens
  siRNA target sequence for PCDHA4 (NM_031500.1,2471-2489).
ggaatcctttgcaaaggtt

SEQ ID NO: 397210 - DNA, 19 bp, Homo sapiens
  siRNA target sequence for PCDHA4 (NM_031500.1,2472-2490).
gaatcctttgcaaaggtta

SEQ ID NO: 397211 - DNA, 19 bp, Homo sapiens
  siRNA target sequence for PCDHA4 (NM_031500.1,2476-2494).
cctttgcaaaggttagtgt

SEQ ID NO: 397212 - DNA, 19 bp, Homo sapiens
  siRNA target sequence for PCDHA7 (NM_031852.1,2350-2368).
gacaatgtgagtcataaat

SEQ ID NO: 397213 - DNA, 19 bp, Homo sapiens
  siRNA target sequence for PCDHA8 (NM_031856.1,2395-2413).
gtaagtccatttaaattta

SEQ ID NO: 397214 - DNA, 19 bp, Homo sapiens
  siRNA target sequence for PCDHA10 (NM_031859.1,2381-2399).
ctaggaaggtgggttatta

SEQ ID NO: 397215 - DNA, 19 bp, Homo sapiens
  siRNA target sequence for PCDHA10 (NM_031859.1,2384-2402).
ggaaggtgggttattacgt

SEQ ID NO: 397216 - DNA, 19 bp, Homo sapiens
  siRNA target sequence for PCDHA10 (NM_031859.1,2385-2403).
gaaggtgggttattacgtt

SEQ ID NO: 397217 - DNA, 19 bp, Homo sapiens
  siRNA target sequence for PCDHA10 (NM_031859.1,2389-2407).
gtgggttattacgttttca

SEQ ID NO: 397218 - DNA, 19 bp, Homo sapiens
  siRNA target sequence for PCDHA10 (NM_031859.1,2439-2457).
ctcttaccgcattttctca

SEQ ID NO: 397219 - DNA, 19 bp, Homo sapiens
  siRNA target sequence for PCDHA10 (NM_031859.1,2513-2531).
ctagtgatacctttgtaat

SEQ ID NO: 397220 - DNA, 19 bp, Homo sapiens
  siRNA target sequence for PCDHA12 (NM_031864.1,2483-2501).
cctcccagtgaagtaagtt

SEQ ID NO: 397221 - DNA, 19 bp, Homo sapiens
  siRNA target sequence for PCDHA12 (NM_031864.1,2484-2502).
ctcccagtgaagtaagtta

SEQ ID NO: 397222 - DNA, 19 bp, Homo sapiens
  siRNA target sequence for PCDHA12 (NM_031864.1,2486-2504).
cccagtgaagtaagttatt

SEQ ID NO: 397223 - DNA, 19 bp, Homo sapiens
  siRNA target sequence for PCDHA13 (NM_031865.1,2385-2403).
cttgaaagaggtaagctta

SEQ ID NO: 397224 - DNA, 19 bp, Homo sapiens
  siRNA target sequence for PCDHA13 (NM_031865.1,2388-2406).
gaaagaggtaagcttatat

SEQ ID NO: 397225 - DNA, 19 bp, Homo sapiens
  siRNA target sequence for PCDHAC1 (NM_031882.2,2600-2618).
caatgccatggtaagcaaa

SEQ ID NO: 397226 - DNA, 19 bp, Homo sapiens
  siRNA target sequence for PCDHAC2 (NM_031883.2,2574-2592).
gtggtcagggggtcttcta

SEQ ID NO: 397227 - DNA, 19 bp, Homo sapiens
  siRNA target sequence for PCDHAC2 (NM_031883.2,2593-2611).
caaactcatgcatttgtta

SEQ ID NO: 397228 - DNA, 19 bp, Homo sapiens
  siRNA target sequence for PCDHAC2 (NM_031883.2,2608-2626).
gttacacatcccccaatat

SEQ ID NO: 397229 - DNA, 19 bp, Homo sapiens
  siRNA target sequence for CECR6 (NM_031890.1,1817-1835).
gtgctcatggctatgtcaa

SEQ ID NO: 397230 - DNA, 19 bp, Homo sapiens
  siRNA target sequence for GORASP1 (NM_031899.2,193-211).
gcctggagccctactttga

SEQ ID NO: 397231 - DNA, 19 bp, Homo sapiens
  siRNA target sequence for GORASP1 (NM_031899.2,229-247).
ggcactcgaggctgaacaa

SEQ ID NO: 397232 - DNA, 19 bp, Homo sapiens
  siRNA target sequence for GORASP1 (NM_031899.2,260-278).
cctgaaggcactactgaaa

SEQ ID NO: 397233 - DNA, 19 bp, Homo sapiens
  siRNA target sequence for GORASP1 (NM_031899.2,530-548).
ggagtccgaggacttcttt

SEQ ID NO: 397234 - DNA, 19 bp, Homo sapiens
  siRNA target sequence for GORASP1 (NM_031899.2,531-549).
gagtccgaggacttcttta

SEQ ID NO: 397235 - DNA, 19 bp, Homo sapiens
  siRNA target sequence for GORASP1 (NM_031899.2,617-635).
ccgggaggtgactgtaact

SEQ ID NO: 397236 - DNA, 19 bp, Homo sapiens
  siRNA target sequence for GORASP1 (NM_031899.2,677-695).
cattggctatgggtatcta

SEQ ID NO: 397237 - DNA, 19 bp, Homo sapiens
  siRNA target sequence for GORASP1 (NM_031899.2,841-859).
ccaggcagagtgactacat

SEQ ID NO: 397238 - DNA, 19 bp, Homo sapiens
  siRNA target sequence for GORASP1 (NM_031899.2,945-963).
gatggacttccccatttca

SEQ ID NO: 397239 - DNA, 19 bp, Homo sapiens
  siRNA target sequence for GORASP1 (NM_031899.2,988-1006).
ctccagtgcagcgagttat

SEQ ID NO: 397240 - DNA, 19 bp, Homo sapiens
  siRNA target sequence for GORASP1 (NM_031899.2,991-1009).
cagtgcagcgagttatgga

SEQ ID NO: 397241 - DNA, 19 bp, Homo sapiens
  siRNA target sequence for GORASP1 (NM_031899.2,1020-1038).
ctggacgtgtcgggaattt

SEQ ID NO: 397242 - DNA, 19 bp, Homo sapiens
  siRNA target sequence for GORASP1 (NM_031899.2,1022-1040).
ggacgtgtcgggaatttct

SEQ ID NO: 397243 - DNA, 19 bp, Homo sapiens
  siRNA target sequence for GORASP1 (NM_031899.2,1180-1198).
ggtctgggtcagagtttga

SEQ ID NO: 397244 - DNA, 19 bp, Homo sapiens
  siRNA target sequence for SVH (NM_031905.2,625-643).
cctcgcagcctgaagactt

SEQ ID NO: 397245 - DNA, 19 bp, Homo sapiens
  siRNA target sequence for SVH (NM_031905.2,632-650).
gcctgaagacttaactgat

SEQ ID NO: 397246 - DNA, 19 bp, Homo sapiens
  siRNA target sequence for C1QTNF2 (NM_031908.3,272-290).
cagggccctcaggaatgat

SEQ ID NO: 397247 - DNA, 19 bp, Homo sapiens
  siRNA target sequence for C1QTNF2 (NM_031908.3,609-627).
gcggctgcccatcaagttt

SEQ ID NO: 397248 - DNA, 19 bp, Homo sapiens
  siRNA target sequence for C1QTNF2 (NM_031908.3,611-629).
ggctgcccatcaagtttga

SEQ ID NO: 397249 - DNA, 19 bp, Homo sapiens
  siRNA target sequence for C1QTNF2 (NM_031908.3,688-706).
ggcgtgcctgggatctact

SEQ ID NO: 397250 - DNA, 19 bp, Homo sapiens
  siRNA target sequence for C1QTNF2 (NM_031908.3,689-707).
gcgtgcctgggatctacta

SEQ ID NO: 397251 - DNA, 19 bp, Homo sapiens
  siRNA target sequence for C1QTNF2 (NM_031908.3,925-943).
ctctttacgggcttcctaa

SEQ ID NO: 397252 - DNA, 19 bp, Homo sapiens
  siRNA target sequence for C1QTNF4 (NM_031909.1,1117-1135).
gcaaccacggcaagtacat

SEQ ID NO: 397253 - DNA, 19 bp, Homo sapiens
  siRNA target sequence for C1QTNF6 (NM_031910.3,330-348).
gagatcagaccctacatta

SEQ ID NO: 397254 - DNA, 19 bp, Homo sapiens
  siRNA target sequence for C1QTNF6 (NM_031910.3,332-350).
gatcagaccctacattaat

SEQ ID NO: 397255 - DNA, 19 bp, Homo sapiens
  siRNA target sequence for C1QTNF6 (NM_031910.3,356-374).
catcctgaagggtgacaaa

SEQ ID NO: 397256 - DNA, 19 bp, Homo sapiens
  siRNA target sequence for C1QTNF6 (NM_031910.3,633-651).
cccctgcgtggcatctact

SEQ ID NO: 397257 - DNA, 19 bp, Homo sapiens
  siRNA target sequence for C1QTNF6 (NM_031910.3,634-652).
ccctgcgtggcatctactt

SEQ ID NO: 397258 - DNA, 19 bp, Homo sapiens
  siRNA target sequence for C1QTNF6 (NM_031910.3,687-705).
gagacgtacgtgcacatta

SEQ ID NO: 397259 - DNA, 19 bp, Homo sapiens
  siRNA target sequence for C1QTNF6 (NM_031910.3,691-709).
cgtacgtgcacattatgca

SEQ ID NO: 397260 - DNA, 19 bp, Homo sapiens
  siRNA target sequence for C1QTNF6 (NM_031910.3,692-710).
gtacgtgcacattatgcat

SEQ ID NO: 397261 - DNA, 19 bp, Homo sapiens
  siRNA target sequence for C1QTNF7 (NM_031911.3,231-249).
gtttgtcttgctctatgtt

SEQ ID NO: 397262 - DNA, 19 bp, Homo sapiens
  siRNA target sequence for C1QTNF7 (NM_031911.3,235-253).
gtcttgctctatgttacaa

SEQ ID NO: 397263 - DNA, 19 bp, Homo sapiens
  siRNA target sequence for C1QTNF7 (NM_031911.3,666-684).
caaatccgccttttctgtt

SEQ ID NO: 397264 - DNA, 19 bp, Homo sapiens
  siRNA target sequence for C1QTNF7 (NM_031911.3,795-813).
cccagggatctattacttt

SEQ ID NO: 397265 - DNA, 19 bp, Homo sapiens
  siRNA target sequence for C1QTNF7 (NM_031911.3,799-817).
gggatctattacttttctt

SEQ ID NO: 397266 - DNA, 19 bp, Homo sapiens
  siRNA target sequence for C1QTNF7 (NM_031911.3,801-819).
gatctattacttttcttat

SEQ ID NO: 397267 - DNA, 19 bp, Homo sapiens
  siRNA target sequence for C1QTNF7 (NM_031911.3,810-828).
cttttcttatgatatcaca

SEQ ID NO: 397268 - DNA, 19 bp, Homo sapiens
  siRNA target sequence for C1QTNF7 (NM_031911.3,820-838).
gatatcacattggctaata

SEQ ID NO: 397269 - DNA, 19 bp, Homo sapiens
  siRNA target sequence for C1QTNF7 (NM_031911.3,848-866).
caatcggactggtacacaa

SEQ ID NO: 397270 - DNA, 19 bp, Homo sapiens
  siRNA target sequence for C1QTNF7 (NM_031911.3,868-886).
gggcaataccggataaaga

SEQ ID NO: 397271 - DNA, 19 bp, Homo sapiens
  siRNA target sequence for C1QTNF7 (NM_031911.3,894-912).
cgccaacacaggaaaccat

SEQ ID NO: 397272 - DNA, 19 bp, Homo sapiens
  siRNA target sequence for C1QTNF7 (NM_031911.3,923-941).
cggggtccacagtcatcta

SEQ ID NO: 397273 - DNA, 19 bp, Homo sapiens
  siRNA target sequence for C1QTNF7 (NM_031911.3,924-942).
ggggtccacagtcatctat

SEQ ID NO: 397274 - DNA, 19 bp, Homo sapiens
  siRNA target sequence for C1QTNF7 (NM_031911.3,961-979).
gtctggctggagattttct

SEQ ID NO: 397275 - DNA, 19 bp, Homo sapiens
  siRNA target sequence for C1QTNF7 (NM_031911.3,1012-1030).
ggttgggcagacagcttat

SEQ ID NO: 397276 - DNA, 19 bp, Homo sapiens
  siRNA target sequence for C1QTNF7 (NM_031911.3,1034-1052).
ccgggtttctcttatacgt

SEQ ID NO: 397277 - DNA, 19 bp, Homo sapiens
  siRNA target sequence for C1QTNF7 (NM_031911.3,1035-1053).
cgggtttctcttatacgtt

SEQ ID NO: 397278 - DNA, 19 bp, Homo sapiens
  siRNA target sequence for C1QTNF7 (NM_031911.3,1050-1068).
cgttgacacagattaccta

SEQ ID NO: 397279 - DNA, 19 bp, Homo sapiens
  siRNA target sequence for C1QTNF7 (NM_031911.3,1058-1076).
cagattacctagattccat

SEQ ID NO: 397280 - DNA, 19 bp, Homo sapiens
  siRNA target sequence for C1QTNF7 (NM_031911.3,1060-1078).
gattacctagattccatat

SEQ ID NO: 397281 - DNA, 19 bp, Homo sapiens
  siRNA target sequence for C1QTNF7 (NM_031911.3,1065-1083).
cctagattccatatcagaa

SEQ ID NO: 397282 - DNA, 19 bp, Homo sapiens
  siRNA target sequence for ASP (NM_031916.2,324-342).
cggacatcctgaagcaatt

SEQ ID NO: 397283 - DNA, 19 bp, Homo sapiens
  siRNA target sequence for ASP (NM_031916.2,455-473).
cccacggcaacccagaaaa

SEQ ID NO: 397284 - DNA, 19 bp, Homo sapiens
  siRNA target sequence for ASP (NM_031916.2,532-550).
gcggtatgtggaattaaca

SEQ ID NO: 397285 - DNA, 19 bp, Homo sapiens
  siRNA target sequence for ASP (NM_031916.2,579-597).
gcctgccgaaggaaaaatt

SEQ ID NO: 397286 - DNA, 19 bp, Homo sapiens
  siRNA target sequence for ASP (NM_031916.2,746-764).
gctcgcatccccttcaaga

SEQ ID NO: 397287 - DNA, 19 bp, Homo sapiens
  siRNA target sequence for ASP (NM_031916.2,781-799).
ccgctacttggccagatta

SEQ ID NO: 397288 - DNA, 19 bp, Homo sapiens
  siRNA target sequence for ASP (NM_031916.2,783-801).
gctacttggccagattaga

SEQ ID NO: 397289 - DNA, 19 bp, Homo sapiens
  siRNA target sequence for ASP (NM_031916.2,816-834).
ccttggagacggaatccta

SEQ ID NO: 397290 - DNA, 19 bp, Homo sapiens
  siRNA target sequence for ASP (NM_031916.2,831-849).
cctaccttgcctctctaaa

SEQ ID NO: 397291 - DNA, 19 bp, Homo sapiens
  siRNA target sequence for ASP (NM_031916.2,835-853).
ccttgcctctctaaaggaa

SEQ ID NO: 397292 - DNA, 19 bp, Homo sapiens
  siRNA target sequence for ASP (NM_031916.2,865-883).
caggaagaacggcatgata

SEQ ID NO: 397293 - DNA, 19 bp, Homo sapiens
  siRNA target sequence for ASP (NM_031916.2,874-892).
cggcatgataggtctttca

SEQ ID NO: 397294 - DNA, 19 bp, Homo sapiens
  siRNA target sequence for ASP (NM_031916.2,876-894).
gcatgataggtctttcaga

SEQ ID NO: 397295 - DNA, 19 bp, Homo sapiens
  siRNA target sequence for ASP (NM_031916.2,913-931).
gaaacttttagaaagcatt

SEQ ID NO: 397296 - DNA, 19 bp, Homo sapiens
  siRNA target sequence for ANGPTL6 (NM_031917.2,1030-1048).
cgtcacgtagtgtcagtat

SEQ ID NO: 397297 - DNA, 19 bp, Homo sapiens
  siRNA target sequence for ANGPTL6 (NM_031917.2,1124-1142).
ctacctggcagcactataa

SEQ ID NO: 397298 - DNA, 19 bp, Homo sapiens
  siRNA target sequence for ANGPTL6 (NM_031917.2,1181-1199).
gccttgaacccgtgtatca

SEQ ID NO: 397299 - DNA, 19 bp, Homo sapiens
  siRNA target sequence for ANGPTL6 (NM_031917.2,1259-1277).
gagcacgtgcccactatga

SEQ ID NO: 397300 - DNA, 19 bp, Homo sapiens
  siRNA target sequence for ANGPTL6 (NM_031917.2,1352-1370).
ctctttcctggcacaatga

SEQ ID NO: 397301 - DNA, 19 bp, Homo sapiens
  siRNA target sequence for ANGPTL6 (NM_031917.2,1395-1413).
ggaccgagactcctattct

SEQ ID NO: 397302 - DNA, 19 bp, Homo sapiens
  siRNA target sequence for ANGPTL6 (NM_031917.2,1404-1422).
ctcctattctggtaactgt

SEQ ID NO: 397303 - DNA, 19 bp, Homo sapiens
  siRNA target sequence for ARG99 (NM_031920.2,78-96).
gcagcaatagaaatttcct

SEQ ID NO: 397304 - DNA, 19 bp, Homo sapiens
  siRNA target sequence for ARG99 (NM_031920.2,87-105).
gaaatttcctgcttaccat

SEQ ID NO: 397305 - DNA, 19 bp, Homo sapiens
  siRNA target sequence for ARG99 (NM_031920.2,97-115).
gcttaccatgagaccattt

SEQ ID NO: 397306 - DNA, 19 bp, Homo sapiens
  siRNA target sequence for ARG99 (NM_031920.2,98-116).
cttaccatgagaccatttt

SEQ ID NO: 397307 - DNA, 19 bp, Homo sapiens
  siRNA target sequence for ARG99 (NM_031920.2,125-143).
gccattttggtcctaagtt

SEQ ID NO: 397308 - DNA, 19 bp, Homo sapiens
  siRNA target sequence for ARG99 (NM_031920.2,185-203).
ggatctatgcccctctttt

SEQ ID NO: 397309 - DNA, 19 bp, Homo sapiens
  siRNA target sequence for ARG99 (NM_031920.2,225-243).
cattttcgccttacattct

SEQ ID NO: 397310 - DNA, 19 bp, Homo sapiens
  siRNA target sequence for ARG99 (NM_031920.2,305-323).
gtgaccctgtgctatgact

SEQ ID NO: 397311 - DNA, 19 bp, Homo sapiens
  siRNA target sequence for ARG99 (NM_031920.2,322-340).
ctggcaggtcggcagtatt

SEQ ID NO: 397312 - DNA, 19 bp, Homo sapiens
  siRNA target sequence for ARG99 (NM_031920.2,325-343).
gcaggtcggcagtattcct

SEQ ID NO: 397313 - DNA, 19 bp, Homo sapiens
  siRNA target sequence for ARG99 (NM_031920.2,341-359).
cctctggtagagaccatat

SEQ ID NO: 397314 - DNA, 19 bp, Homo sapiens
  siRNA target sequence for ARG99 (NM_031920.2,393-411).
cggttgtgatggccttatt

SEQ ID NO: 397315 - DNA, 19 bp, Homo sapiens
  siRNA target sequence for ARG99 (NM_031920.2,395-413).
gttgtgatggccttattga

SEQ ID NO: 397316 - DNA, 19 bp, Homo sapiens
  siRNA target sequence for ARG99 (NM_031920.2,458-476).
gttttagtcggcttgttgt

SEQ ID NO: 397317 - DNA, 19 bp, Homo sapiens
  siRNA target sequence for ARG99 (NM_031920.2,478-496).
cctggtgttcccgttcatt

SEQ ID NO: 397318 - DNA, 19 bp, Homo sapiens
  siRNA target sequence for ARG99 (NM_031920.2,536-554).
gcggagagagtcctttaca

SEQ ID NO: 397319 - DNA, 19 bp, Homo sapiens
  siRNA target sequence for ARG99 (NM_031920.2,537-555).
cggagagagtcctttacat

SEQ ID NO: 397320 - DNA, 19 bp, Homo sapiens
  siRNA target sequence for ARG99 (NM_031920.2,627-645).
gggccaccaccctgattgt

SEQ ID NO: 397321 - DNA, 19 bp, Homo sapiens
  siRNA target sequence for ARG99 (NM_031920.2,759-777).
ccaaggttcactacaacta

SEQ ID NO: 397322 - DNA, 19 bp, Homo sapiens
  siRNA target sequence for ARG99 (NM_031920.2,815-833).
gcgatctaccactacagaa

SEQ ID NO: 397323 - DNA, 19 bp, Homo sapiens
  siRNA target sequence for ARG99 (NM_031920.2,831-849).
gaacagctctcaagttgta

SEQ ID NO: 397324 - DNA, 19 bp, Homo sapiens
  siRNA target sequence for ARG99 (NM_031920.2,902-920).
gcagaggcaaagatgtact

SEQ ID NO: 397325 - DNA, 19 bp, Homo sapiens
  siRNA target sequence for ARG99 (NM_031920.2,903-921).
cagaggcaaagatgtacta

SEQ ID NO: 397326 - DNA, 19 bp, Homo sapiens
  siRNA target sequence for ARG99 (NM_031920.2,1017-1035).
ccttactgaaggattccat

SEQ ID NO: 397327 - DNA, 19 bp, Homo sapiens
  siRNA target sequence for ARG99 (NM_031920.2,1024-1042).
gaaggattccatcaaatat

SEQ ID NO: 397328 - DNA, 19 bp, Homo sapiens
  siRNA target sequence for ARG99 (NM_031920.2,1068-1086).
caagcttagcttcgttatt

SEQ ID NO: 397329 - DNA, 19 bp, Homo sapiens
  siRNA target sequence for ARG99 (NM_031920.2,1089-1107).
ctgagcaggagcggtttaa

SEQ ID NO: 397330 - DNA, 19 bp, Homo sapiens
  siRNA target sequence for ARG99 (NM_031920.2,1093-1111).
gcaggagcggtttaaagaa

SEQ ID NO: 397331 - DNA, 19 bp, Homo sapiens
  siRNA target sequence for ARG99 (NM_031920.2,1158-1176).
cagatttacacaacaacta

SEQ ID NO: 397332 - DNA, 19 bp, Homo sapiens
  siRNA target sequence for ARG99 (NM_031920.2,1171-1189).
caactatggggttttctta

SEQ ID NO: 397333 - DNA, 19 bp, Homo sapiens
  siRNA target sequence for ARG99 (NM_031920.2,1229-1247).
cagcaggccatcaaactta

SEQ ID NO: 397334 - DNA, 19 bp, Homo sapiens
  siRNA target sequence for ARG99 (NM_031920.2,1348-1366).
ggcacacaaagctgagata

SEQ ID NO: 397335 - DNA, 19 bp, Homo sapiens
  siRNA target sequence for ARG99 (NM_031920.2,1349-1367).
gcacacaaagctgagatat

SEQ ID NO: 397336 - DNA, 19 bp, Homo sapiens
  siRNA target sequence for ARG99 (NM_031920.2,1373-1391).
cctttgggagcactgtatt

SEQ ID NO: 397337 - DNA, 19 bp, Homo sapiens
  siRNA target sequence for ARG99 (NM_031920.2,1379-1397).
ggagcactgtattacaaca

SEQ ID NO: 397338 - DNA, 19 bp, Homo sapiens
  siRNA target sequence for ARG99 (NM_031920.2,1393-1411).
caacactggccgatacgaa

SEQ ID NO: 397339 - DNA, 19 bp, Homo sapiens
  siRNA target sequence for ARG99 (NM_031920.2,1494-1512).
ccgtgatgggtcagacaaa

SEQ ID NO: 397340 - DNA, 19 bp, Homo sapiens
  siRNA target sequence for ARG99 (NM_031920.2,1554-1572).
ccggatgccttgaatgcta

SEQ ID NO: 397341 - DNA, 19 bp, Homo sapiens
  siRNA target sequence for ARG99 (NM_031920.2,1555-1573).
cggatgccttgaatgctat

SEQ ID NO: 397342 - DNA, 19 bp, Homo sapiens
  siRNA target sequence for ARG99 (NM_031920.2,1576-1594).
cctcttgtcagccatctat

SEQ ID NO: 397343 - DNA, 19 bp, Homo sapiens
  siRNA target sequence for ARG99 (NM_031920.2,1577-1595).
ctcttgtcagccatctata

SEQ ID NO: 397344 - DNA, 19 bp, Homo sapiens
  siRNA target sequence for ARG99 (NM_031920.2,1609-1627).
ccacgacaaggcacttgat

SEQ ID NO: 397345 - DNA, 19 bp, Homo sapiens
  siRNA target sequence for ARG99 (NM_031920.2,1620-1638).
cacttgatgctatagacaa

SEQ ID NO: 397346 - DNA, 19 bp, Homo sapiens
  siRNA target sequence for ARG99 (NM_031920.2,1656-1674).
caaaggacccaaaagtcat

SEQ ID NO: 397347 - DNA, 19 bp, Homo sapiens
  siRNA target sequence for ARG99 (NM_031920.2,1749-1767).
gagtggctgtgcaactaaa

SEQ ID NO: 397348 - DNA, 19 bp, Homo sapiens
  siRNA target sequence for ARG99 (NM_031920.2,1829-1847).
gtgtctgcaagagcttatt

SEQ ID NO: 397349 - DNA, 19 bp, Homo sapiens
  siRNA target sequence for ARG99 (NM_031920.2,1835-1853).
gcaagagcttattatgaga

SEQ ID NO: 397350 - DNA, 19 bp, Homo sapiens
  siRNA target sequence for ARG99 (NM_031920.2,1909-1927).
ggatcgcctagaaaaacga

SEQ ID NO: 397351 - DNA, 19 bp, Homo sapiens
  siRNA target sequence for ARG99 (NM_031920.2,1910-1928).
gatcgcctagaaaaacgat

SEQ ID NO: 397352 - DNA, 19 bp, Homo sapiens
  siRNA target sequence for ARG99 (NM_031920.2,1937-1955).
gttcgagaaaaggatcaaa

SEQ ID NO: 397353 - DNA, 19 bp, Homo sapiens
  siRNA target sequence for RSHL2 (NM_031924.3,421-439).
gagcgagcccagtatagct

SEQ ID NO: 397354 - DNA, 19 bp, Homo sapiens
  siRNA target sequence for RSHL2 (NM_031924.3,497-515).
ctcgcgtcgcggaatcctt

SEQ ID NO: 397355 - DNA, 19 bp, Homo sapiens
  siRNA target sequence for RSHL2 (NM_031924.3,513-531).
cttgcccttggcactactt

SEQ ID NO: 397356 - DNA, 19 bp, Homo sapiens
  siRNA target sequence for RSHL2 (NM_031924.3,517-535).
cccttggcactacttacat

SEQ ID NO: 397357 - DNA, 19 bp, Homo sapiens
  siRNA target sequence for RSHL2 (NM_031924.3,519-537).
cttggcactacttacatct

SEQ ID NO: 397358 - DNA, 19 bp, Homo sapiens
  siRNA target sequence for RSHL2 (NM_031924.3,721-739).
cctgacgcagccagatgaa

SEQ ID NO: 397359 - DNA, 19 bp, Homo sapiens
  siRNA target sequence for RSHL2 (NM_031924.3,744-762).
ctatgcattatggaaacat

SEQ ID NO: 397360 - DNA, 19 bp, Homo sapiens
  siRNA target sequence for RSHL2 (NM_031924.3,755-773).
ggaaacataatgtatgaca

SEQ ID NO: 397361 - DNA, 19 bp, Homo sapiens
  siRNA target sequence for RSHL2 (NM_031924.3,766-784).
gtatgacagaagggtaatt

SEQ ID NO: 397362 - DNA, 19 bp, Homo sapiens
  siRNA target sequence for RSHL2 (NM_031924.3,778-796).
ggtaattcgaggtaacact

SEQ ID NO: 397363 - DNA, 19 bp, Homo sapiens
  siRNA target sequence for RSHL2 (NM_031924.3,779-797).
gtaattcgaggtaacactt

SEQ ID NO: 397364 - DNA, 19 bp, Homo sapiens
  siRNA target sequence for RSHL2 (NM_031924.3,820-838).
gctcggacggcctgattct

SEQ ID NO: 397365 - DNA, 19 bp, Homo sapiens
  siRNA target sequence for RSHL2 (NM_031924.3,873-891).
gggctcttgccagaaaaca

SEQ ID NO: 397366 - DNA, 19 bp, Homo sapiens
  siRNA target sequence for RSHL2 (NM_031924.3,947-965).
gtcgatgtgcaaacagaat

SEQ ID NO: 397367 - DNA, 19 bp, Homo sapiens
  siRNA target sequence for RSHL2 (NM_031924.3,984-1002).
ctgatcgcataatagaagt

SEQ ID NO: 397368 - DNA, 19 bp, Homo sapiens
  siRNA target sequence for RSHL2 (NM_031924.3,989-1007).
cgcataatagaagttgata

SEQ ID NO: 397369 - DNA, 19 bp, Homo sapiens
  siRNA target sequence for RSHL2 (NM_031924.3,1065-1083).
ccaaaactggcaaagatgt

SEQ ID NO: 397370 - DNA, 19 bp, Homo sapiens
  siRNA target sequence for RSHL2 (NM_031924.3,1084-1102).
ggccacccaaatactagaa

SEQ ID NO: 397371 - DNA, 19 bp, Homo sapiens
  siRNA target sequence for RSHL2 (NM_031924.3,1137-1155).
cagtgttagaagttttggt

SEQ ID NO: 397372 - DNA, 19 bp, Homo sapiens
  siRNA target sequence for RSHL2 (NM_031924.3,1219-1237).
ggccagtcagcgtgagtat

SEQ ID NO: 397373 - DNA, 19 bp, Homo sapiens
  siRNA target sequence for RSHL2 (NM_031924.3,1221-1239).
ccagtcagcgtgagtatga

SEQ ID NO: 397374 - DNA, 19 bp, Homo sapiens
  siRNA target sequence for RSHL2 (NM_031924.3,1228-1246).
gcgtgagtatgaagaacta

SEQ ID NO: 397375 - DNA, 19 bp, Homo sapiens
  siRNA target sequence for RSHL2 (NM_031924.3,1351-1369).
gcacaacgagacatcacaa

SEQ ID NO: 397376 - DNA, 19 bp, Homo sapiens
  siRNA target sequence for RSHL2 (NM_031924.3,1352-1370).
cacaacgagacatcacaaa

SEQ ID NO: 397377 - DNA, 19 bp, Homo sapiens
  siRNA target sequence for RSHL2 (NM_031924.3,1354-1372).
caacgagacatcacaaaaa

SEQ ID NO: 397378 - DNA, 19 bp, Homo sapiens
  siRNA target sequence for RSHL2 (NM_031924.3,1473-1491).
gagatattgagataggatt

SEQ ID NO: 397379 - DNA, 19 bp, Homo sapiens
  siRNA target sequence for RSHL2 (NM_031924.3,1514-1532).
gttgaaaaaaccatggaat

SEQ ID NO: 397380 - DNA, 19 bp, Homo sapiens
  siRNA target sequence for RSHL2 (NM_031924.3,1545-1563).
gaagaacagtgcttgacat

SEQ ID NO: 397381 - DNA, 19 bp, Homo sapiens
  siRNA target sequence for RSHL2 (NM_031924.3,1548-1566).
gaacagtgcttgacatgtt

SEQ ID NO: 397382 - DNA, 19 bp, Homo sapiens
  siRNA target sequence for RSHL2 (NM_031924.3,1551-1569).
cagtgcttgacatgttgat

SEQ ID NO: 397383 - DNA, 19 bp, Homo sapiens
  siRNA target sequence for RSHL2 (NM_031924.3,1677-1695).
cactggaggcctctgaatt

SEQ ID NO: 397384 - DNA, 19 bp, Homo sapiens
  siRNA target sequence for RSHL2 (NM_031924.3,1717-1735).
gacacgggagctgctttta

SEQ ID NO: 397385 - DNA, 19 bp, Homo sapiens
  siRNA target sequence for TMPIT (NM_031925.1,248-266).
ggccctcgccctgaagaaa

SEQ ID NO: 397386 - DNA, 19 bp, Homo sapiens
  siRNA target sequence for TMPIT (NM_031925.1,249-267).
gccctcgccctgaagaaat

SEQ ID NO: 397387 - DNA, 19 bp, Homo sapiens
  siRNA target sequence for TMPIT (NM_031925.1,428-446).
gagcaagcaggctaagttt

SEQ ID NO: 397388 - DNA, 19 bp, Homo sapiens
  siRNA target sequence for TMPIT (NM_031925.1,640-658).
ggtgggtgttccatcacta

SEQ ID NO: 397389 - DNA, 19 bp, Homo sapiens
  siRNA target sequence for TMPIT (NM_031925.1,702-720).
ggtctcatgtaccagaaat

SEQ ID NO: 397390 - DNA, 19 bp, Homo sapiens
  siRNA target sequence for TMPIT (NM_031925.1,765-783).
cagtttctccagtactact

SEQ ID NO: 397391 - DNA, 19 bp, Homo sapiens
  siRNA target sequence for TMPIT (NM_031925.1,912-930).
cacttctggcagcttttta

SEQ ID NO: 397392 - DNA, 19 bp, Homo sapiens
  siRNA target sequence for TMPIT (NM_031925.1,1045-1063).
gggttgtgcaccacaagtt

SEQ ID NO: 397393 - DNA, 19 bp, Homo sapiens
  siRNA target sequence for TMPIT (NM_031925.1,1046-1064).
ggttgtgcaccacaagttt

SEQ ID NO: 397394 - DNA, 19 bp, Homo sapiens
  siRNA target sequence for TTY7 (NM_031926.1,734-752).
ggtttctcctccacttaca

SEQ ID NO: 397395 - DNA, 19 bp, Homo sapiens
  siRNA target sequence for TBC1D10 (NM_031937.1,634-652).
gctgtcttgctcatgcata

SEQ ID NO: 397396 - DNA, 19 bp, Homo sapiens
  siRNA target sequence for TBC1D10 (NM_031937.1,635-653).
ctgtcttgctcatgcatat

SEQ ID NO: 397397 - DNA, 19 bp, Homo sapiens
  siRNA target sequence for TBC1D10 (NM_031937.1,710-728).
gctactacagcgagaaact

SEQ ID NO: 397398 - DNA, 19 bp, Homo sapiens
  siRNA target sequence for TBC1D10 (NM_031937.1,745-763).
gacggggagatccttttct

SEQ ID NO: 397399 - DNA, 19 bp, Homo sapiens
  siRNA target sequence for TBC1D10 (NM_031937.1,820-838).
gacccgctcctctatatga

SEQ ID NO: 397400 - DNA, 19 bp, Homo sapiens
  siRNA target sequence for TBC1D10 (NM_031937.1,822-840).
cccgctcctctatatgaca

SEQ ID NO: 397401 - DNA, 19 bp, Homo sapiens
  siRNA target sequence for TBC1D10 (NM_031937.1,826-844).
ctcctctatatgacagaat

SEQ ID NO: 397402 - DNA, 19 bp, Homo sapiens
  siRNA target sequence for B29 (NM_031939.2,354-372).
gcgggagcctctgaagaat

SEQ ID NO: 397403 - DNA, 19 bp, Homo sapiens
  siRNA target sequence for B29 (NM_031939.2,358-376).
gagcctctgaagaatgtgt

SEQ ID NO: 397404 - DNA, 19 bp, Homo sapiens
  siRNA target sequence for B29 (NM_031939.2,400-418).
cgggaccccagtgctaaaa

SEQ ID NO: 397405 - DNA, 19 bp, Homo sapiens
  siRNA target sequence for B29 (NM_031939.2,420-438).
gcgtcacatggcaatgaga

SEQ ID NO: 397406 - DNA, 19 bp, Homo sapiens
  siRNA target sequence for B29 (NM_031939.2,421-439).
cgtcacatggcaatgagaa

SEQ ID NO: 397407 - DNA, 19 bp, Homo sapiens
  siRNA target sequence for B29 (NM_031939.2,544-562).
gtcatccatgagagtatga

SEQ ID NO: 397408 - DNA, 19 bp, Homo sapiens
  siRNA target sequence for B29 (NM_031939.2,608-626).
gttccttcttcatagatat

SEQ ID NO: 397409 - DNA, 19 bp, Homo sapiens
  siRNA target sequence for B29 (NM_031939.2,636-654).
gaccaggactttattagat

SEQ ID NO: 397410 - DNA, 19 bp, Homo sapiens
  siRNA target sequence for B29 (NM_031939.2,674-692).
gatactcggcctttgtttt

SEQ ID NO: 397411 - DNA, 19 bp, Homo sapiens
  siRNA target sequence for B29 (NM_031939.2,770-788).
ccctcctgatccatttaca

SEQ ID NO: 397412 - DNA, 19 bp, Homo sapiens
  siRNA target sequence for B29 (NM_031939.2,805-823).
gttgccaaggcttgcaaaa

SEQ ID NO: 397413 - DNA, 19 bp, Homo sapiens
  siRNA target sequence for B29 (NM_031939.2,813-831).
ggcttgcaaaacaacattt

SEQ ID NO: 397414 - DNA, 19 bp, Homo sapiens
  siRNA target sequence for B29 (NM_031939.2,839-857).
gttctccatatctgaaact

SEQ ID NO: 397415 - DNA, 19 bp, Homo sapiens
  siRNA target sequence for B29 (NM_031939.2,946-964).
cagttcttctacgcaaata

SEQ ID NO: 397416 - DNA, 19 bp, Homo sapiens
  siRNA target sequence for BLP1 (NM_031940.2,56-74).
ggtggttgcccggttagtt

SEQ ID NO: 397417 - DNA, 19 bp, Homo sapiens
  siRNA target sequence for BLP1 (NM_031940.2,57-75).
gtggttgcccggttagtta

SEQ ID NO: 397418 - DNA, 19 bp, Homo sapiens
  siRNA target sequence for BLP1 (NM_031940.2,59-77).
ggttgcccggttagttact

SEQ ID NO: 397419 - DNA, 19 bp, Homo sapiens
  siRNA target sequence for BLP1 (NM_031940.2,60-78).
gttgcccggttagttactt

SEQ ID NO: 397420 - DNA, 19 bp, Homo sapiens
  siRNA target sequence for BLP1 (NM_031940.2,63-81).
gcccggttagttacttact

SEQ ID NO: 397421 - DNA, 19 bp, Homo sapiens
  siRNA target sequence for BLP1 (NM_031940.2,64-82).
cccggttagttacttactt

SEQ ID NO: 397422 - DNA, 19 bp, Homo sapiens
  siRNA target sequence for BLP1 (NM_031940.2,66-84).
cggttagttacttacttct

SEQ ID NO: 397423 - DNA, 19 bp, Homo sapiens
  siRNA target sequence for BLP1 (NM_031940.2,271-289).
cctaatcacgccatttttt

SEQ ID NO: 397424 - DNA, 19 bp, Homo sapiens
  siRNA target sequence for BLP1 (NM_031940.2,272-290).
ctaatcacgccatttttta

SEQ ID NO: 397425 - DNA, 19 bp, Homo sapiens
  siRNA target sequence for MCC2 (NM_031941.2,310-328).
gaagcaggactgacaagaa

SEQ ID NO: 397426 - DNA, 19 bp, Homo sapiens
  siRNA target sequence for MCC2 (NM_031941.2,973-991).
gtcctgagatgcacatcat

SEQ ID NO: 397427 - DNA, 19 bp, Homo sapiens
  siRNA target sequence for MCC2 (NM_031941.2,1031-1049).
gctcaaatgctttaatcgt

SEQ ID NO: 397428 - DNA, 19 bp, Homo sapiens
  siRNA target sequence for MCC2 (NM_031941.2,1413-1431).
gagcgccgttctctaatga

SEQ ID NO: 397429 - DNA, 19 bp, Homo sapiens
  siRNA target sequence for MCC2 (NM_031941.2,1416-1434).
cgccgttctctaatgaaga

SEQ ID NO: 397430 - DNA, 19 bp, Homo sapiens
  siRNA target sequence for MCC2 (NM_031941.2,2007-2025).
ctgaacagggatttatgca

SEQ ID NO: 397431 - DNA, 19 bp, Homo sapiens
  siRNA target sequence for CDCA7 (NM_031942.3,158-176).
gcgtgccgcagaaagatct

SEQ ID NO: 397432 - DNA, 19 bp, Homo sapiens
  siRNA target sequence for CDCA7 (NM_031942.3,284-302).
caaacacgaaacctaaatt

SEQ ID NO: 397433 - DNA, 19 bp, Homo sapiens
  siRNA target sequence for CDCA7 (NM_031942.3,295-313).
cctaaattcaggtcagata

SEQ ID NO: 397434 - DNA, 19 bp, Homo sapiens
  siRNA target sequence for CDCA7 (NM_031942.3,362-380).
ctttctgcggcttttcaga

SEQ ID NO: 397435 - DNA, 19 bp, Homo sapiens
  siRNA target sequence for CDCA7 (NM_031942.3,366-384).
ctgcggcttttcagaaagt

SEQ ID NO: 397436 - DNA, 19 bp, Homo sapiens
  siRNA target sequence for CDCA7 (NM_031942.3,383-401).
gtgaggtgcaagatgtatt

SEQ ID NO: 397437 - DNA, 19 bp, Homo sapiens
  siRNA target sequence for CDCA7 (NM_031942.3,428-446).
caaggccagatgtcactaa

SEQ ID NO: 397438 - DNA, 19 bp, Homo sapiens
  siRNA target sequence for CDCA7 (NM_031942.3,432-450).
gccagatgtcactaacgaa

SEQ ID NO: 397439 - DNA, 19 bp, Homo sapiens
  siRNA target sequence for CDCA7 (NM_031942.3,447-465).
cgaactggccggtattttt

SEQ ID NO: 397440 - DNA, 19 bp, Homo sapiens
  siRNA target sequence for CDCA7 (NM_031942.3,469-487).
gccgactctgacgatgaat

SEQ ID NO: 397441 - DNA, 19 bp, Homo sapiens
  siRNA target sequence for CDCA7 (NM_031942.3,474-492).
ctctgacgatgaatcattt

SEQ ID NO: 397442 - DNA, 19 bp, Homo sapiens
  siRNA target sequence for CDCA7 (NM_031942.3,687-705).
caactccgattcagaagat

SEQ ID NO: 397443 - DNA, 19 bp, Homo sapiens
  siRNA target sequence for CDCA7 (NM_031942.3,735-753).
ggctttaaatataaagcaa

SEQ ID NO: 397444 - DNA, 19 bp, Homo sapiens
  siRNA target sequence for CDCA7 (NM_031942.3,804-822).
ctcgttccgtggaagacat

SEQ ID NO: 397445 - DNA, 19 bp, Homo sapiens
  siRNA target sequence for CDCA7 (NM_031942.3,832-850).
ggctccgactcacaatcaa

SEQ ID NO: 397446 - DNA, 19 bp, Homo sapiens
  siRNA target sequence for CDCA7 (NM_031942.3,854-872).
gaccgcgaaggcgtacatt

SEQ ID NO: 397447 - DNA, 19 bp, Homo sapiens
  siRNA target sequence for CDCA7 (NM_031942.3,982-1000).
gaagaggataagtacatgt

SEQ ID NO: 397448 - DNA, 19 bp, Homo sapiens
  siRNA target sequence for CDCA7 (NM_031942.3,1028-1046).
gctacatgaatgaagatga

SEQ ID NO: 397449 - DNA, 19 bp, Homo sapiens
  siRNA target sequence for CDCA7 (NM_031942.3,1077-1095).
cgtgacccttccgcatata

SEQ ID NO: 397450 - DNA, 19 bp, Homo sapiens
  siRNA target sequence for CDCA7 (NM_031942.3,1078-1096).
gtgacccttccgcatataa

SEQ ID NO: 397451 - DNA, 19 bp, Homo sapiens
  siRNA target sequence for CDCA7 (NM_031942.3,1134-1152).
gaacgtctgcagcaattct

SEQ ID NO: 397452 - DNA, 19 bp, Homo sapiens
  siRNA target sequence for CDCA7 (NM_031942.3,1179-1197).
gggctctacttgtcatcaa

SEQ ID NO: 397453 - DNA, 19 bp, Homo sapiens
  siRNA target sequence for CDCA7 (NM_031942.3,1180-1198).
ggctctacttgtcatcaat

SEQ ID NO: 397454 - DNA, 19 bp, Homo sapiens
  siRNA target sequence for CDCA7 (NM_031942.3,1195-1213).
caatgccgtcagaagacta

SEQ ID NO: 397455 - DNA, 19 bp, Homo sapiens
  siRNA target sequence for CDCA7 (NM_031942.3,1199-1217).
gccgtcagaagactattga

SEQ ID NO: 397456 - DNA, 19 bp, Homo sapiens
  siRNA target sequence for CDCA7 (NM_031942.3,1200-1218).
ccgtcagaagactattgat

SEQ ID NO: 397457 - DNA, 19 bp, Homo sapiens
  siRNA target sequence for CDCA7 (NM_031942.3,1209-1227).
gactattgataccaaaaca

SEQ ID NO: 397458 - DNA, 19 bp, Homo sapiens
  siRNA target sequence for CDCA7 (NM_031942.3,1281-1299).
ccttcgaaaccgttatggt

SEQ ID NO: 397459 - DNA, 19 bp, Homo sapiens
  siRNA target sequence for CDCA7 (NM_031942.3,1403-1421).
ctggggtccttgtgtattt

SEQ ID NO: 397460 - DNA, 19 bp, Homo sapiens
  siRNA target sequence for CDCA7 (NM_031942.3,1447-1465).
gtgcatgcctacttgaaaa

SEQ ID NO: 397461 - DNA, 19 bp, Homo sapiens
  siRNA target sequence for OCSP (NM_031945.2,92-110).
gagaggagccccttactgt

SEQ ID NO: 397462 - DNA, 19 bp, Homo sapiens
  siRNA target sequence for OCSP (NM_031945.2,294-312).
ggagcagctgcgtcaagta

SEQ ID NO: 397463 - DNA, 19 bp, Homo sapiens
  siRNA target sequence for OCSP (NM_031945.2,295-313).
gagcagctgcgtcaagtat

SEQ ID NO: 397464 - DNA, 19 bp, Homo sapiens
  siRNA target sequence for OCSP (NM_031945.2,297-315).
gcagctgcgtcaagtatct

SEQ ID NO: 397465 - DNA, 19 bp, Homo sapiens
  siRNA target sequence for OCSP (NM_031945.2,303-321).
gcgtcaagtatctgatctt

SEQ ID NO: 397466 - DNA, 19 bp, Homo sapiens
  siRNA target sequence for KSP37 (NM_031950.2,329-347).
gctgctgaccccaaacctt

SEQ ID NO: 397467 - DNA, 19 bp, Homo sapiens
  siRNA target sequence for KSP37 (NM_031950.2,438-456).
gaccccaggcccatatgca

SEQ ID NO: 397468 - DNA, 19 bp, Homo sapiens
  siRNA target sequence for KSP37 (NM_031950.2,682-700).
ctgggaacattgttggaaa

SEQ ID NO: 397469 - DNA, 19 bp, Homo sapiens
  siRNA target sequence for KSP37 (NM_031950.2,711-729).
ccctgtgcgcctttctcat

SEQ ID NO: 397470 - DNA, 19 bp, Homo sapiens
  siRNA target sequence for SPATA9 (NM_031952.1,169-187).
gaggggatccagaaagcaa

SEQ ID NO: 397471 - DNA, 19 bp, Homo sapiens
  siRNA target sequence for SPATA9 (NM_031952.1,227-245).
ccatcctaagattatcaca

SEQ ID NO: 397472 - DNA, 19 bp, Homo sapiens
  siRNA target sequence for SPATA9 (NM_031952.1,236-254).
gattatcacagtctaatca

SEQ ID NO: 397473 - DNA, 19 bp, Homo sapiens
  siRNA target sequence for SPATA9 (NM_031952.1,291-309).
gatggctattgctttagct

SEQ ID NO: 397474 - DNA, 19 bp, Homo sapiens
  siRNA target sequence for SPATA9 (NM_031952.1,296-314).
ctattgctttagctaagat

SEQ ID NO: 397475 - DNA, 19 bp, Homo sapiens
  siRNA target sequence for SPATA9 (NM_031952.1,312-330).
gattaatcgagcaacatta

SEQ ID NO: 397476 - DNA, 19 bp, Homo sapiens
  siRNA target sequence for SPATA9 (NM_031952.1,334-352).
cgtggattaaacagcatat

SEQ ID NO: 397477 - DNA, 19 bp, Homo sapiens
  siRNA target sequence for SPATA9 (NM_031952.1,433-451).
cgtctgctgagggaagtta

SEQ ID NO: 397478 - DNA, 19 bp, Homo sapiens
  siRNA target sequence for SPATA9 (NM_031952.1,456-474).
gccgaggcaacccctatat

SEQ ID NO: 397479 - DNA, 19 bp, Homo sapiens
  siRNA target sequence for SPATA9 (NM_031952.1,457-475).
ccgaggcaacccctatata

SEQ ID NO: 397480 - DNA, 19 bp, Homo sapiens
  siRNA target sequence for SPATA9 (NM_031952.1,458-476).
cgaggcaacccctatataa

SEQ ID NO: 397481 - DNA, 19 bp, Homo sapiens
  siRNA target sequence for SPATA9 (NM_031952.1,461-479).
ggcaacccctatataacat

SEQ ID NO: 397482 - DNA, 19 bp, Homo sapiens
  siRNA target sequence for SPATA9 (NM_031952.1,462-480).
gcaacccctatataacatt

SEQ ID NO: 397483 - DNA, 19 bp, Homo sapiens
  siRNA target sequence for SPATA9 (NM_031952.1,484-502).
gtcagaaagggttctttgt

SEQ ID NO: 397484 - DNA, 19 bp, Homo sapiens
  siRNA target sequence for SPATA9 (NM_031952.1,530-548).
ctgctttaactagcataat

SEQ ID NO: 397485 - DNA, 19 bp, Homo sapiens
  siRNA target sequence for SPATA9 (NM_031952.1,532-550).
gctttaactagcataatat

SEQ ID NO: 397486 - DNA, 19 bp, Homo sapiens
  siRNA target sequence for SPATA9 (NM_031952.1,533-551).
ctttaactagcataatata

SEQ ID NO: 397487 - DNA, 19 bp, Homo sapiens
  siRNA target sequence for SPATA9 (NM_031952.1,579-597).
ggcagtctgtgttaatgct

SEQ ID NO: 397488 - DNA, 19 bp, Homo sapiens
  siRNA target sequence for SPATA9 (NM_031952.1,634-652).
gaatccataaggcaaaaca

SEQ ID NO: 397489 - DNA, 19 bp, Homo sapiens
  siRNA target sequence for SPATA9 (NM_031952.1,696-714).
gctttcggagcctatgttt

SEQ ID NO: 397490 - DNA, 19 bp, Homo sapiens
  siRNA target sequence for SPATA9 (NM_031952.1,753-771).
gccggagaagccagacatt

SEQ ID NO: 397491 - DNA, 19 bp, Homo sapiens
  siRNA target sequence for SPATA9 (NM_031952.1,806-824).
gtaataacatccaagtttt

SEQ ID NO: 397492 - DNA, 19 bp, Homo sapiens
  siRNA target sequence for NYD-SP12 (NM_031955.2,158-176).
gagaatgcagtgaatagga

SEQ ID NO: 397493 - DNA, 19 bp, Homo sapiens
  siRNA target sequence for NYD-SP12 (NM_031955.2,165-183).
cagtgaataggatctatca

SEQ ID NO: 397494 - DNA, 19 bp, Homo sapiens
  siRNA target sequence for NYD-SP12 (NM_031955.2,169-187).
gaataggatctatcatgat

SEQ ID NO: 397495 - DNA, 19 bp, Homo sapiens
  siRNA target sequence for NYD-SP12 (NM_031955.2,505-523).
gaagttggtctacattgat

SEQ ID NO: 397496 - DNA, 19 bp, Homo sapiens
  siRNA target sequence for NYD-SP12 (NM_031955.2,529-547).
gggtgttcgctatgagttt

SEQ ID NO: 397497 - DNA, 19 bp, Homo sapiens
  siRNA target sequence for NYD-SP12 (NM_031955.2,605-623).
gaccctttgagtgtacata

SEQ ID NO: 397498 - DNA, 19 bp, Homo sapiens
  siRNA target sequence for NYD-SP12 (NM_031955.2,674-692).
gatgccagctcttgctata

SEQ ID NO: 397499 - DNA, 19 bp, Homo sapiens
  siRNA target sequence for NYD-SP12 (NM_031955.2,678-696).
ccagctcttgctatagaca

SEQ ID NO: 397500 - DNA, 19 bp, Homo sapiens
  siRNA target sequence for NYD-SP12 (NM_031955.2,679-697).
cagctcttgctatagacaa

SEQ ID NO: 397501 - DNA, 19 bp, Homo sapiens
  siRNA target sequence for NYD-SP12 (NM_031955.2,759-777).
cagttctgggagaaccatt

SEQ ID NO: 397502 - DNA, 19 bp, Homo sapiens
  siRNA target sequence for NYD-SP12 (NM_031955.2,806-824).
gtggcaagtttcattgaga

SEQ ID NO: 397503 - DNA, 19 bp, Homo sapiens
  siRNA target sequence for NYD-SP12 (NM_031955.2,850-868).
gatgaggaaaccagatctt

SEQ ID NO: 397504 - DNA, 19 bp, Homo sapiens
  siRNA target sequence for NYD-SP12 (NM_031955.2,881-899).
gcacacaggagcattgttt

SEQ ID NO: 397505 - DNA, 19 bp, Homo sapiens
  siRNA target sequence for NYD-SP12 (NM_031955.2,910-928).
ctatttccggaatcatctt

SEQ ID NO: 397506 - DNA, 19 bp, Homo sapiens
  siRNA target sequence for NYD-SP12 (NM_031955.2,951-969).
gtctggagaggtattcaga

SEQ ID NO: 397507 - DNA, 19 bp, Homo sapiens
  siRNA target sequence for NYD-SP12 (NM_031955.2,1033-1051).
cataagcaagctcatcaaa

SEQ ID NO: 397508 - DNA, 19 bp, Homo sapiens
  siRNA target sequence for NYD-SP12 (NM_031955.2,1081-1099).
catcaccagagctgaatct

SEQ ID NO: 397509 - DNA, 19 bp, Homo sapiens
  siRNA target sequence for NYD-SP12 (NM_031955.2,1094-1112).
gaatctttctcggttatgt

SEQ ID NO: 397510 - DNA, 19 bp, Homo sapiens
  siRNA target sequence for NYD-SP12 (NM_031955.2,1116-1134).
caccatttgcgacaaaaat

SEQ ID NO: 397511 - DNA, 19 bp, Homo sapiens
  siRNA target sequence for NYD-SP12 (NM_031955.2,1118-1136).
ccatttgcgacaaaaataa

SEQ ID NO: 397512 - DNA, 19 bp, Homo sapiens
  siRNA target sequence for NYD-SP12 (NM_031955.2,1184-1202).
cctgcatatgcagagtata

SEQ ID NO: 397513 - DNA, 19 bp, Homo sapiens
  siRNA target sequence for NYD-SP12 (NM_031955.2,1262-1280).
cctccccaacaatatctct

SEQ ID NO: 397514 - DNA, 19 bp, Homo sapiens
  siRNA target sequence for NYD-SP12 (NM_031955.2,1339-1357).
gaagctgccgatattcaca

SEQ ID NO: 397515 - DNA, 19 bp, Homo sapiens
  siRNA target sequence for NYD-SP12 (NM_031955.2,1347-1365).
cgatattcacagagcataa

SEQ ID NO: 397516 - DNA, 19 bp, Homo sapiens
  siRNA target sequence for NYD-SP12 (NM_031955.2,1375-1393).
cggtctgaccagagaagat

SEQ ID NO: 397517 - DNA, 19 bp, Homo sapiens
  siRNA target sequence for NYD-SP12 (NM_031955.2,1376-1394).
ggtctgaccagagaagata

SEQ ID NO: 397518 - DNA, 19 bp, Homo sapiens
  siRNA target sequence for NYD-SP12 (NM_031955.2,1413-1431).
caatggggaagcgaatctt

SEQ ID NO: 397519 - DNA, 19 bp, Homo sapiens
  siRNA target sequence for NYD-SP12 (NM_031955.2,1547-1565).
gagcagtcccaggtgatta

SEQ ID NO: 397520 - DNA, 19 bp, Homo sapiens
  siRNA target sequence for NYD-SP12 (NM_031955.2,1549-1567).
gcagtcccaggtgattaat

SEQ ID NO: 397521 - DNA, 19 bp, Homo sapiens
  siRNA target sequence for NYD-SP12 (NM_031955.2,1552-1570).
gtcccaggtgattaatcaa

SEQ ID NO: 397522 - DNA, 19 bp, Homo sapiens
  siRNA target sequence for NYD-SP12 (NM_031955.2,1628-1646).
gaattgctgcagtcactaa

SEQ ID NO: 397523 - DNA, 19 bp, Homo sapiens
  siRNA target sequence for NYD-SP12 (NM_031955.2,1691-1709).
gaacgtgtgtggaatatga

SEQ ID NO: 397524 - DNA, 19 bp, Homo sapiens
  siRNA target sequence for NYD-SP12 (NM_031955.2,1810-1828).
gaagcgacttcaaactgtt

SEQ ID NO: 397525 - DNA, 19 bp, Homo sapiens
  siRNA target sequence for NYD-SP14 (NM_031956.1,395-413).
catgctgcgagatggttat

SEQ ID NO: 397526 - DNA, 19 bp, Homo sapiens
  siRNA target sequence for NYD-SP14 (NM_031956.1,398-416).
gctgcgagatggttatcat

SEQ ID NO: 397527 - DNA, 19 bp, Homo sapiens
  siRNA target sequence for NYD-SP14 (NM_031956.1,399-417).
ctgcgagatggttatcata

SEQ ID NO: 397528 - DNA, 19 bp, Homo sapiens
  siRNA target sequence for NYD-SP14 (NM_031956.1,402-420).
cgagatggttatcataagt

SEQ ID NO: 397529 - DNA, 19 bp, Homo sapiens
  siRNA target sequence for NYD-SP14 (NM_031956.1,618-636).
ctggcctgttacttcaata

SEQ ID NO: 397530 - DNA, 19 bp, Homo sapiens
  siRNA target sequence for NYD-SP14 (NM_031956.1,691-709).
ctcagctgatcaaaattga

SEQ ID NO: 397531 - DNA, 19 bp, Homo sapiens
  siRNA target sequence for NYD-SP14 (NM_031956.1,693-711).
cagctgatcaaaattgact

SEQ ID NO: 397532 - DNA, 19 bp, Homo sapiens
  siRNA target sequence for NYD-SP14 (NM_031956.1,726-744).
gccgaggcacacatgcata

SEQ ID NO: 397533 - DNA, 19 bp, Homo sapiens
  siRNA target sequence for NYD-SP14 (NM_031956.1,727-745).
ccgaggcacacatgcatat

SEQ ID NO: 397534 - DNA, 19 bp, Homo sapiens
  siRNA target sequence for NYD-SP14 (NM_031956.1,879-897).
ctcctgaggacttacagat

SEQ ID NO: 397535 - DNA, 19 bp, Homo sapiens
  siRNA target sequence for NYD-SP14 (NM_031956.1,1019-1037).
cttgggcttagcacactta

SEQ ID NO: 397536 - DNA, 19 bp, Homo sapiens
  siRNA target sequence for NYD-SP14 (NM_031956.1,1046-1064).
ggaatatgaaacagcatta

SEQ ID NO: 397537 - DNA, 19 bp, Homo sapiens
  siRNA target sequence for NYD-SP14 (NM_031956.1,1068-1086).
gtccttgacacttactgta

SEQ ID NO: 397538 - DNA, 19 bp, Homo sapiens
  siRNA target sequence for NYD-SP14 (NM_031956.1,1369-1387).
caaaagttcactatggaat

SEQ ID NO: 397539 - DNA, 19 bp, Homo sapiens
  siRNA target sequence for NYD-SP14 (NM_031956.1,1409-1427).
gcttacagtgaacaactat

SEQ ID NO: 397540 - DNA, 19 bp, Homo sapiens
  siRNA target sequence for NYD-SP14 (NM_031956.1,1410-1428).
cttacagtgaacaactata

SEQ ID NO: 397541 - DNA, 19 bp, Homo sapiens
  siRNA target sequence for NYD-SP14 (NM_031956.1,1503-1521).
ccagttactgaagagttta

SEQ ID NO: 397542 - DNA, 19 bp, Homo sapiens
  siRNA target sequence for KRTAP3-1 (NM_031958.1,90-108).
ccaccttctgctcatttga

SEQ ID NO: 397543 - DNA, 19 bp, Homo sapiens
  siRNA target sequence for KRTAP3-1 (NM_031958.1,91-109).
caccttctgctcatttgat

SEQ ID NO: 397544 - DNA, 19 bp, Homo sapiens
  siRNA target sequence for KRTAP3-1 (NM_031958.1,93-111).
ccttctgctcatttgataa

SEQ ID NO: 397545 - DNA, 19 bp, Homo sapiens
  siRNA target sequence for KRTAP3-1 (NM_031958.1,94-112).
cttctgctcatttgataaa

SEQ ID NO: 397546 - DNA, 19 bp, Homo sapiens
  siRNA target sequence for KRTAP3-1 (NM_031958.1,204-222).
gctgcaagcctgataccta

SEQ ID NO: 397547 - DNA, 19 bp, Homo sapiens
  siRNA target sequence for KRTAP3-1 (NM_031958.1,205-223).
ctgcaagcctgatacctat

SEQ ID NO: 397548 - DNA, 19 bp, Homo sapiens
  siRNA target sequence for KRTAP17-1 (NM_031964.1,330-348).
ctgccagcccacacctata

SEQ ID NO: 397549 - DNA, 19 bp, Homo sapiens
  siRNA target sequence for KRTAP17-1 (NM_031964.1,341-359).
cacctatatgcgacacaaa

SEQ ID NO: 397550 - DNA, 19 bp, Homo sapiens
  siRNA target sequence for KRTAP17-1 (NM_031964.1,343-361).
cctatatgcgacacaaaat

SEQ ID NO: 397551 - DNA, 19 bp, Homo sapiens
  siRNA target sequence for RNF17 (NM_031994.1,1246-1264).
catgcggcacagatgatct

SEQ ID NO: 397552 - DNA, 19 bp, Homo sapiens
  siRNA target sequence for RNF17 (NM_031994.1,1269-1287).
gagacacctagatatccaa

SEQ ID NO: 397553 - DNA, 19 bp, Homo sapiens
  siRNA target sequence for PCDHGA2 (NM_032009.1,2599-2617).
cgttttctcaggtaatcta

SEQ ID NO: 397554 - DNA, 19 bp, Homo sapiens
  siRNA target sequence for PCDHGA2 (NM_032009.1,2600-2618).
gttttctcaggtaatctat

SEQ ID NO: 397555 - DNA, 19 bp, Homo sapiens
  siRNA target sequence for PCDHGA2 (NM_032009.1,2605-2623).
ctcaggtaatctatctttt

SEQ ID NO: 397556 - DNA, 19 bp, Homo sapiens
  siRNA target sequence for PCDHGA2 (NM_032009.1,2610-2628).
gtaatctatcttttcacaa

SEQ ID NO: 397557 - DNA, 19 bp, Homo sapiens
  siRNA target sequence for PCDHGA2 (NM_032009.1,2629-2647).
catacgtactagctagttt

SEQ ID NO: 397558 - DNA, 19 bp, Homo sapiens
  siRNA target sequence for PCDHGA3 (NM_032011.1,2415-2433).
cctacttcaggtgagttta

SEQ ID NO: 397559 - DNA, 19 bp, Homo sapiens
  siRNA target sequence for PCDHGA3 (NM_032011.1,2464-2482).
gagaatgtggttattataa

SEQ ID NO: 397560 - DNA, 19 bp, Homo sapiens
  siRNA target sequence for FUCA2 (NM_032020.3,317-335).
gtggtattggcaaaaggaa

SEQ ID NO: 397561 - DNA, 19 bp, Homo sapiens
  siRNA target sequence for FUCA2 (NM_032020.3,319-337).
ggtattggcaaaaggaaaa

SEQ ID NO: 397562 - DNA, 19 bp, Homo sapiens
  siRNA target sequence for FUCA2 (NM_032020.3,342-360).
ccgaagtatgtggaattta

SEQ ID NO: 397563 - DNA, 19 bp, Homo sapiens
  siRNA target sequence for FUCA2 (NM_032020.3,343-361).
cgaagtatgtggaatttat

SEQ ID NO: 397564 - DNA, 19 bp, Homo sapiens
  siRNA target sequence for FUCA2 (NM_032020.3,374-392).
ccctcctagtttcaaatat

SEQ ID NO: 397565 - DNA, 19 bp, Homo sapiens
  siRNA target sequence for FUCA2 (NM_032020.3,379-397).
ctagtttcaaatatgaaga

SEQ ID NO: 397566 - DNA, 19 bp, Homo sapiens
  siRNA target sequence for FUCA2 (NM_032020.3,405-423).
ccactatttacagcaaaat

SEQ ID NO: 397567 - DNA, 19 bp, Homo sapiens
  siRNA target sequence for FUCA2 (NM_032020.3,511-529).
ccttgtgggggtcagaata

SEQ ID NO: 397568 - DNA, 19 bp, Homo sapiens
  siRNA target sequence for FUCA2 (NM_032020.3,512-530).
cttgtgggggtcagaatat

SEQ ID NO: 397569 - DNA, 19 bp, Homo sapiens
  siRNA target sequence for FUCA2 (NM_032020.3,585-603).
cttgaggtagccattagga

SEQ ID NO: 397570 - DNA, 19 bp, Homo sapiens
  siRNA target sequence for FUCA2 (NM_032020.3,591-609).
gtagccattaggaacagaa

SEQ ID NO: 397571 - DNA, 19 bp, Homo sapiens
  siRNA target sequence for FUCA2 (NM_032020.3,617-635).
gcgttttggactgtactat

SEQ ID NO: 397572 - DNA, 19 bp, Homo sapiens
  siRNA target sequence for FUCA2 (NM_032020.3,629-647).
gtactattccctttttgaa

SEQ ID NO: 397573 - DNA, 19 bp, Homo sapiens
  siRNA target sequence for FUCA2 (NM_032020.3,638-656).
cctttttgaatggtttcat

SEQ ID NO: 397574 - DNA, 19 bp, Homo sapiens
  siRNA target sequence for FUCA2 (NM_032020.3,689-707).
ccataagcggcaatttcca

SEQ ID NO: 397575 - DNA, 19 bp, Homo sapiens
  siRNA target sequence for FUCA2 (NM_032020.3,696-714).
cggcaatttccagtttcta

SEQ ID NO: 397576 - DNA, 19 bp, Homo sapiens
  siRNA target sequence for FUCA2 (NM_032020.3,718-736).
cattgccagagctctatga

SEQ ID NO: 397577 - DNA, 19 bp, Homo sapiens
  siRNA target sequence for FUCA2 (NM_032020.3,726-744).
gagctctatgagttagtga

SEQ ID NO: 397578 - DNA, 19 bp, Homo sapiens
  siRNA target sequence for FUCA2 (NM_032020.3,784-802).
gaggagcaccggatcaata

SEQ ID NO: 397579 - DNA, 19 bp, Homo sapiens
  siRNA target sequence for FUCA2 (NM_032020.3,786-804).
ggagcaccggatcaatact

SEQ ID NO: 397580 - DNA, 19 bp, Homo sapiens
  siRNA target sequence for FUCA2 (NM_032020.3,816-834).
ggcttcttggcctggttat

SEQ ID NO: 397581 - DNA, 19 bp, Homo sapiens
  siRNA target sequence for FUCA2 (NM_032020.3,817-835).
gcttcttggcctggttata

SEQ ID NO: 397582 - DNA, 19 bp, Homo sapiens
  siRNA target sequence for FUCA2 (NM_032020.3,818-836).
cttcttggcctggttatat

SEQ ID NO: 397583 - DNA, 19 bp, Homo sapiens
  siRNA target sequence for FUCA2 (NM_032020.3,821-839).
cttggcctggttatataat

SEQ ID NO: 397584 - DNA, 19 bp, Homo sapiens
  siRNA target sequence for FUCA2 (NM_032020.3,882-900).
ggagctggtagcatctgta

SEQ ID NO: 397585 - DNA, 19 bp, Homo sapiens
  siRNA target sequence for FUCA2 (NM_032020.3,883-901).
gagctggtagcatctgtaa

SEQ ID NO: 397586 - DNA, 19 bp, Homo sapiens
  siRNA target sequence for FUCA2 (NM_032020.3,903-921).
catggtggcttctatacct

SEQ ID NO: 397587 - DNA, 19 bp, Homo sapiens
  siRNA target sequence for FUCA2 (NM_032020.3,919-937).
cctgcagtgatcgttataa

SEQ ID NO: 397588 - DNA, 19 bp, Homo sapiens
  siRNA target sequence for FUCA2 (NM_032020.3,964-982).
gggaaaactgcatgacaat

SEQ ID NO: 397589 - DNA, 19 bp, Homo sapiens
  siRNA target sequence for FUCA2 (NM_032020.3,973-991).
gcatgacaatagacaaact

SEQ ID NO: 397590 - DNA, 19 bp, Homo sapiens
  siRNA target sequence for FUCA2 (NM_032020.3,1017-1035).
ggaatctctgactatctta

SEQ ID NO: 397591 - DNA, 19 bp, Homo sapiens
  siRNA target sequence for FUCA2 (NM_032020.3,1022-1040).
ctctgactatcttacaatt

SEQ ID NO: 397592 - DNA, 19 bp, Homo sapiens
  siRNA target sequence for FUCA2 (NM_032020.3,1078-1096).
gtggaggaaatcttttgat

SEQ ID NO: 397593 - DNA, 19 bp, Homo sapiens
  siRNA target sequence for FUCA2 (NM_032020.3,1081-1099).
gaggaaatcttttgatgaa

SEQ ID NO: 397594 - DNA, 19 bp, Homo sapiens
  siRNA target sequence for FUCA2 (NM_032020.3,1162-1180).
ggtcctggctaaaagtcaa

SEQ ID NO: 397595 - DNA, 19 bp, Homo sapiens
  siRNA target sequence for FUCA2 (NM_032020.3,1176-1194).
gtcaatggagaagctattt

SEQ ID NO: 397596 - DNA, 19 bp, Homo sapiens
  siRNA target sequence for FUCA2 (NM_032020.3,1178-1196).
caatggagaagctatttat

SEQ ID NO: 397597 - DNA, 19 bp, Homo sapiens
  siRNA target sequence for FUCA2 (NM_032020.3,1236-1254).
ccagatgtgtggtacacat

SEQ ID NO: 397598 - DNA, 19 bp, Homo sapiens
  siRNA target sequence for FUCA2 (NM_032020.3,1260-1278).
cctaaagaaaaattagtct

SEQ ID NO: 397599 - DNA, 19 bp, Homo sapiens
  siRNA target sequence for FUCA2 (NM_032020.3,1275-1293).
gtctatgccatttttctta

SEQ ID NO: 397600 - DNA, 19 bp, Homo sapiens
  siRNA target sequence for FUCA2 (NM_032020.3,1348-1366).
caacagaggtgaaactact

SEQ ID NO: 397601 - DNA, 19 bp, Homo sapiens
  siRNA target sequence for FUCA2 (NM_032020.3,1468-1486).
gggctctagccctgactaa

SEQ ID NO: 397602 - DNA, 19 bp, Homo sapiens
  siRNA target sequence for FUCA2 (NM_032020.3,1469-1487).
ggctctagccctgactaat

SEQ ID NO: 397603 - DNA, 19 bp, Homo sapiens
  siRNA target sequence for FUCA2 (NM_032020.3,1471-1489).
ctctagccctgactaatgt

SEQ ID NO: 397604 - DNA, 19 bp, Homo sapiens
  siRNA target sequence for FUCA2 (NM_032020.3,1473-1491).
ctagccctgactaatgtga

SEQ ID NO: 397605 - DNA, 19 bp, Homo sapiens
  siRNA target sequence for AD031 (NM_032021.2,246-264).
gcgtaggacccggaaatca

SEQ ID NO: 397606 - DNA, 19 bp, Homo sapiens
  siRNA target sequence for AD031 (NM_032021.2,248-266).
gtaggacccggaaatcaca

SEQ ID NO: 397607 - DNA, 19 bp, Homo sapiens
  siRNA target sequence for AD031 (NM_032021.2,270-288).
cctggtcaggtcacgaaaa

SEQ ID NO: 397608 - DNA, 19 bp, Homo sapiens
  siRNA target sequence for AD031 (NM_032021.2,271-289).
ctggtcaggtcacgaaaaa

SEQ ID NO: 397609 - DNA, 19 bp, Homo sapiens
  siRNA target sequence for AD031 (NM_032021.2,273-291).
ggtcaggtcacgaaaaaga

SEQ ID NO: 397610 - DNA, 19 bp, Homo sapiens
  siRNA target sequence for AD031 (NM_032021.2,290-308).
gaacacaggcttgactatt

SEQ ID NO: 397611 - DNA, 19 bp, Homo sapiens
  siRNA target sequence for AD031 (NM_032021.2,346-364).
cttagggtacacattgcta

SEQ ID NO: 397612 - DNA, 19 bp, Homo sapiens
  siRNA target sequence for AD031 (NM_032021.2,464-482).
ctgttgattcgcagatgta

SEQ ID NO: 397613 - DNA, 19 bp, Homo sapiens
  siRNA target sequence for AD031 (NM_032021.2,466-484).
gttgattcgcagatgtaat

SEQ ID NO: 397614 - DNA, 19 bp, Homo sapiens
  siRNA target sequence for AD031 (NM_032021.2,548-566).
gttatccccctgcttcaaa

SEQ ID NO: 397615 - DNA, 19 bp, Homo sapiens
  siRNA target sequence for AD031 (NM_032021.2,573-591).
cagttccacttggtaataa

SEQ ID NO: 397616 - DNA, 19 bp, Homo sapiens
  siRNA target sequence for CDA017 (NM_032024.2,511-529).
gaagactacaagagataca

SEQ ID NO: 397617 - DNA, 19 bp, Homo sapiens
  siRNA target sequence for CDA017 (NM_032024.2,519-537).
caagagatacagatgcttt

SEQ ID NO: 397618 - DNA, 19 bp, Homo sapiens
  siRNA target sequence for CDA017 (NM_032024.2,613-631).
gtcagaggagtcttcatga

SEQ ID NO: 397619 - DNA, 19 bp, Homo sapiens
  siRNA target sequence for CDA017 (NM_032024.2,639-657).
gaagcccaaggcttctagt

SEQ ID NO: 397620 - DNA, 19 bp, Homo sapiens
  siRNA target sequence for CDA017 (NM_032024.2,742-760).
gggaagtgtcgctacgttt

SEQ ID NO: 397621 - DNA, 19 bp, Homo sapiens
  siRNA target sequence for CDA017 (NM_032024.2,743-761).
ggaagtgtcgctacgttta

SEQ ID NO: 397622 - DNA, 19 bp, Homo sapiens
  siRNA target sequence for CDA017 (NM_032024.2,747-765).
gtgtcgctacgtttactat

SEQ ID NO: 397623 - DNA, 19 bp, Homo sapiens
  siRNA target sequence for CDA017 (NM_032024.2,757-775).
gtttactatgggaaaaact

SEQ ID NO: 397624 - DNA, 19 bp, Homo sapiens
  siRNA target sequence for CDA11 (NM_032026.1,30-48).
gtcgcttcaagtttatcga

SEQ ID NO: 397625 - DNA, 19 bp, Homo sapiens
  siRNA target sequence for CDA11 (NM_032026.1,32-50).
cgcttcaagtttatcgata

SEQ ID NO: 397626 - DNA, 19 bp, Homo sapiens
  siRNA target sequence for CDA11 (NM_032026.1,141-159).
ctgtcgagattggtgttaa

SEQ ID NO: 397627 - DNA, 19 bp, Homo sapiens
  siRNA target sequence for CDA11 (NM_032026.1,143-161).
gtcgagattggtgttaaaa

SEQ ID NO: 397628 - DNA, 19 bp, Homo sapiens
  siRNA target sequence for CDA11 (NM_032026.1,208-226).
gcatttggcacaaacaaat

SEQ ID NO: 397629 - DNA, 19 bp, Homo sapiens
  siRNA target sequence for CDA11 (NM_032026.1,238-256).
cagtacagttggatgtcat

SEQ ID NO: 397630 - DNA, 19 bp, Homo sapiens
  siRNA target sequence for CDA11 (NM_032026.1,248-266).
ggatgtcatcctacaagat

SEQ ID NO: 397631 - DNA, 19 bp, Homo sapiens
  siRNA target sequence for CDA11 (NM_032026.1,356-374).
ggagaatgcggacttgatt

SEQ ID NO: 397632 - DNA, 19 bp, Homo sapiens
  siRNA target sequence for CDA11 (NM_032026.1,357-375).
gagaatgcggacttgattt

SEQ ID NO: 397633 - DNA, 19 bp, Homo sapiens
  siRNA target sequence for CDA11 (NM_032026.1,388-406).
gttttgtcccaaagatact

SEQ ID NO: 397634 - DNA, 19 bp, Homo sapiens
  siRNA target sequence for CDA11 (NM_032026.1,396-414).
ccaaagatactcaactcaa

SEQ ID NO: 397635 - DNA, 19 bp, Homo sapiens
  siRNA target sequence for CDA11 (NM_032026.1,401-419).
gatactcaactcaaatatt

SEQ ID NO: 397636 - DNA, 19 bp, Homo sapiens
  siRNA target sequence for CDA11 (NM_032026.1,405-423).
ctcaactcaaatattttga

SEQ ID NO: 397637 - DNA, 19 bp, Homo sapiens
  siRNA target sequence for CDA11 (NM_032026.1,439-457).
gtcagaacaaacaaaatta

SEQ ID NO: 397638 - DNA, 19 bp, Homo sapiens
  siRNA target sequence for CDA11 (NM_032026.1,477-495).
gaaactcacatgctgaatt

SEQ ID NO: 397639 - DNA, 19 bp, Homo sapiens
  siRNA target sequence for CDA11 (NM_032026.1,483-501).
cacatgctgaatttttgga

SEQ ID NO: 397640 - DNA, 19 bp, Homo sapiens
  siRNA target sequence for BBP (NM_032027.2,427-445).
ggcgaggagtcgcttaagt

SEQ ID NO: 397641 - DNA, 19 bp, Homo sapiens
  siRNA target sequence for BBP (NM_032027.2,453-471).
cctcaaagtgggacaatat

SEQ ID NO: 397642 - DNA, 19 bp, Homo sapiens
  siRNA target sequence for BBP (NM_032027.2,454-472).
ctcaaagtgggacaatata

SEQ ID NO: 397643 - DNA, 19 bp, Homo sapiens
  siRNA target sequence for BBP (NM_032027.2,508-526).
gaaccagttaactgtacaa

SEQ ID NO: 397644 - DNA, 19 bp, Homo sapiens
  siRNA target sequence for BBP (NM_032027.2,511-529).
ccagttaactgtacaaact

SEQ ID NO: 397645 - DNA, 19 bp, Homo sapiens
  siRNA target sequence for BBP (NM_032027.2,514-532).
gttaactgtacaaactaca

SEQ ID NO: 397646 - DNA, 19 bp, Homo sapiens
  siRNA target sequence for BBP (NM_032027.2,556-574).
gcacccaacataacttgta

SEQ ID NO: 397647 - DNA, 19 bp, Homo sapiens
  siRNA target sequence for BBP (NM_032027.2,561-579).
caacataacttgtaaggat

SEQ ID NO: 397648 - DNA, 19 bp, Homo sapiens
  siRNA target sequence for BBP (NM_032027.2,607-625).
gggaacgaagttggttttt

SEQ ID NO: 397649 - DNA, 19 bp, Homo sapiens
  siRNA target sequence for BBP (NM_032027.2,632-650).
ccatatcttgccgaaatgt

SEQ ID NO: 397650 - DNA, 19 bp, Homo sapiens
  siRNA target sequence for BBP (NM_032027.2,633-651).
catatcttgccgaaatgta

SEQ ID NO: 397651 - DNA, 19 bp, Homo sapiens
  siRNA target sequence for BBP (NM_032027.2,673-691).
gcagtcgcattgtctcttt

SEQ ID NO: 397652 - DNA, 19 bp, Homo sapiens
  siRNA target sequence for BBP (NM_032027.2,678-696).
cgcattgtctctttttctt

SEQ ID NO: 397653 - DNA, 19 bp, Homo sapiens
  siRNA target sequence for BBP (NM_032027.2,701-719).
ggttgggagcagatcgatt

SEQ ID NO: 397654 - DNA, 19 bp, Homo sapiens
  siRNA target sequence for BBP (NM_032027.2,702-720).
gttgggagcagatcgattt

SEQ ID NO: 397655 - DNA, 19 bp, Homo sapiens
  siRNA target sequence for BBP (NM_032027.2,707-725).
gagcagatcgattttacct

SEQ ID NO: 397656 - DNA, 19 bp, Homo sapiens
  siRNA target sequence for BBP (NM_032027.2,781-799).
gggagcctaattgatttca

SEQ ID NO: 397657 - DNA, 19 bp, Homo sapiens
  siRNA target sequence for BBP (NM_032027.2,782-800).
ggagcctaattgatttcat

SEQ ID NO: 397658 - DNA, 19 bp, Homo sapiens
  siRNA target sequence for BBP (NM_032027.2,783-801).
gagcctaattgatttcatt

SEQ ID NO: 397659 - DNA, 19 bp, Homo sapiens
  siRNA target sequence for BBP (NM_032027.2,785-803).
gcctaattgatttcattct

SEQ ID NO: 397660 - DNA, 19 bp, Homo sapiens
  siRNA target sequence for BBP (NM_032027.2,816-834).
gattgttggaccttcagat

SEQ ID NO: 397661 - DNA, 19 bp, Homo sapiens
  siRNA target sequence for BBP (NM_032027.2,858-876).
ctatggaaccagacttaca

SEQ ID NO: 397662 - DNA, 19 bp, Homo sapiens
  siRNA target sequence for BBP (NM_032027.2,875-893).
caagactgagtattactaa

SEQ ID NO: 397663 - DNA, 19 bp, Homo sapiens
  siRNA target sequence for BBP (NM_032027.2,878-896).
gactgagtattactaatga

SEQ ID NO: 397664 - DNA, 19 bp, Homo sapiens
  siRNA target sequence for FKSG42 (NM_032032.1,375-393).
gatgttcctgtgtgacata

SEQ ID NO: 397665 - DNA, 19 bp, Homo sapiens
  siRNA target sequence for FKSG42 (NM_032032.1,1673-1691).
ggagtcagttctcaatagt

SEQ ID NO: 397666 - DNA, 19 bp, Homo sapiens
  siRNA target sequence for FKSG42 (NM_032032.1,1739-1757).
ccttttcaacaccagatat

SEQ ID NO: 397667 - DNA, 19 bp, Homo sapiens
  siRNA target sequence for FKSG42 (NM_032032.1,1907-1925).
gaaggcaaggcaacctttt

SEQ ID NO: 397668 - DNA, 19 bp, Homo sapiens
  siRNA target sequence for C14orf141 (NM_032035.1,699-717).
cttgccactccgccttata

SEQ ID NO: 397669 - DNA, 19 bp, Homo sapiens
  siRNA target sequence for C14orf141 (NM_032035.1,718-736).
cctcaccatcggagaactt

SEQ ID NO: 397670 - DNA, 19 bp, Homo sapiens
  siRNA target sequence for C14orf141 (NM_032035.1,719-737).
ctcaccatcggagaactta

SEQ ID NO: 397671 - DNA, 19 bp, Homo sapiens
  siRNA target sequence for C14orf141 (NM_032035.1,739-757).
catcccccaaatatatcct

SEQ ID NO: 397672 - DNA, 19 bp, Homo sapiens
  siRNA target sequence for C14orf141 (NM_032035.1,822-840).
ctgccaaccttgagatatt

SEQ ID NO: 397673 - DNA, 19 bp, Homo sapiens
  siRNA target sequence for C14orf141 (NM_032035.1,824-842).
gccaaccttgagatattgt

SEQ ID NO: 397674 - DNA, 19 bp, Homo sapiens
  siRNA target sequence for C14orf141 (NM_032035.1,825-843).
ccaaccttgagatattgta

SEQ ID NO: 397675 - DNA, 19 bp, Homo sapiens
  siRNA target sequence for C14orf141 (NM_032035.1,830-848).
cttgagatattgtatgcat

SEQ ID NO: 397676 - DNA, 19 bp, Homo sapiens
  siRNA target sequence for C14orf141 (NM_032035.1,948-966).
cattttacagctgtatact

SEQ ID NO: 397677 - DNA, 19 bp, Homo sapiens
  siRNA target sequence for C14orf141 (NM_032035.1,1014-1032).
gacagacgtttccattgtt

SEQ ID NO: 397678 - DNA, 19 bp, Homo sapiens
  siRNA target sequence for DKFZP564K0322 (NM_032040.1,791-809).
ggggaggacgtcgactatt

SEQ ID NO: 397679 - DNA, 19 bp, Homo sapiens
  siRNA target sequence for DKFZP564K0322 (NM_032040.1,792-810).
gggaggacgtcgactattt

SEQ ID NO: 397680 - DNA, 19 bp, Homo sapiens
  siRNA target sequence for DKFZP564K0322 (NM_032040.1,1472-1490).
gagagcgcaggggtatcat

SEQ ID NO: 397681 - DNA, 19 bp, Homo sapiens
  siRNA target sequence for DKFZP564K0322 (NM_032040.1,1525-1543).
gggaaacgcgggagatgtt

SEQ ID NO: 397682 - DNA, 19 bp, Homo sapiens
  siRNA target sequence for DKFZP564K0322 (NM_032040.1,2001-2019).
gggaagaggccgtacatga

SEQ ID NO: 397683 - DNA, 19 bp, Homo sapiens
  siRNA target sequence for DKFZP564K0322 (NM_032040.1,2040-2058).
ctgtccagggtgcagataa

SEQ ID NO: 397684 - DNA, 19 bp, Homo sapiens
  siRNA target sequence for DKFZP564K0322 (NM_032040.1,2228-2246).
ggacgcttttcgtggtttt

SEQ ID NO: 397685 - DNA, 19 bp, Homo sapiens
  siRNA target sequence for DKFZP564K0322 (NM_032040.1,2231-2249).
cgcttttcgtggttttgca

SEQ ID NO: 397686 - DNA, 19 bp, Homo sapiens
  siRNA target sequence for DKFZP564K0322 (NM_032040.1,2232-2250).
gcttttcgtggttttgcaa

SEQ ID NO: 397687 - DNA, 19 bp, Homo sapiens
  siRNA target sequence for DKFZP564D172 (NM_032042.3,50-68).
ggataaacatggcacaaat

SEQ ID NO: 397688 - DNA, 19 bp, Homo sapiens
  siRNA target sequence for DKFZP564D172 (NM_032042.3,72-90).
gcagggaggtccagatgaa

SEQ ID NO: 397689 - DNA, 19 bp, Homo sapiens
  siRNA target sequence for DKFZP564D172 (NM_032042.3,99-117).
gactaccgcactgaaagat

SEQ ID NO: 397690 - DNA, 19 bp, Homo sapiens
  siRNA target sequence for DKFZP564D172 (NM_032042.3,101-119).
ctaccgcactgaaagattt

SEQ ID NO: 397691 - DNA, 19 bp, Homo sapiens
  siRNA target sequence for DKFZP564D172 (NM_032042.3,104-122).
ccgcactgaaagatttatt

SEQ ID NO: 397692 - DNA, 19 bp, Homo sapiens
  siRNA target sequence for DKFZP564D172 (NM_032042.3,105-123).
cgcactgaaagatttatta

SEQ ID NO: 397693 - DNA, 19 bp, Homo sapiens
  siRNA target sequence for DKFZP564D172 (NM_032042.3,157-175).
gatgaaccgcctcttgatt

SEQ ID NO: 397694 - DNA, 19 bp, Homo sapiens
  siRNA target sequence for DKFZP564D172 (NM_032042.3,179-197).
ctgataccctggaaggatt

SEQ ID NO: 397695 - DNA, 19 bp, Homo sapiens
  siRNA target sequence for DKFZP564D172 (NM_032042.3,220-238).
ggacagttaagacacataa

SEQ ID NO: 397696 - DNA, 19 bp, Homo sapiens
  siRNA target sequence for DKFZP564D172 (NM_032042.3,307-325).
gctctaggagagatcatca

SEQ ID NO: 397697 - DNA, 19 bp, Homo sapiens
  siRNA target sequence for DKFZP564D172 (NM_032042.3,321-339).
catcacgaagtatgtatat

SEQ ID NO: 397698 - DNA, 19 bp, Homo sapiens
  siRNA target sequence for DKFZP564D172 (NM_032042.3,399-417).
gagtgaaccaaagagtttt

SEQ ID NO: 397699 - DNA, 19 bp, Homo sapiens
  siRNA target sequence for DKFZP564D172 (NM_032042.3,426-444).
gagtgaggatgctttgaca

SEQ ID NO: 397700 - DNA, 19 bp, Homo sapiens
  siRNA target sequence for DKFZP564D172 (NM_032042.3,428-446).
gtgaggatgctttgacaaa

SEQ ID NO: 397701 - DNA, 19 bp, Homo sapiens
  siRNA target sequence for DKFZP564D172 (NM_032042.3,448-466).
ccacagaaactgatggttt

SEQ ID NO: 397702 - DNA, 19 bp, Homo sapiens
  siRNA target sequence for DKFZP564D172 (NM_032042.3,449-467).
cacagaaactgatggtttt

SEQ ID NO: 397703 - DNA, 19 bp, Homo sapiens
  siRNA target sequence for DKFZP564D172 (NM_032042.3,499-517).
cagtgggctagaagactta

SEQ ID NO: 397704 - DNA, 19 bp, Homo sapiens
  siRNA target sequence for DKFZP564D172 (NM_032042.3,501-519).
gtgggctagaagacttatt

SEQ ID NO: 397705 - DNA, 19 bp, Homo sapiens
  siRNA target sequence for DKFZP564D172 (NM_032042.3,503-521).
gggctagaagacttattat

SEQ ID NO: 397706 - DNA, 19 bp, Homo sapiens
  siRNA target sequence for DKFZP564D172 (NM_032042.3,504-522).
ggctagaagacttattata

SEQ ID NO: 397707 - DNA, 19 bp, Homo sapiens
  siRNA target sequence for DKFZP564D172 (NM_032042.3,505-523).
gctagaagacttattataa

SEQ ID NO: 397708 - DNA, 19 bp, Homo sapiens
  siRNA target sequence for DKFZP564D172 (NM_032042.3,542-560).
gcacacagataccgtttat

SEQ ID NO: 397709 - DNA, 19 bp, Homo sapiens
  siRNA target sequence for DKFZP564D172 (NM_032042.3,543-561).
cacacagataccgtttatt

SEQ ID NO: 397710 - DNA, 19 bp, Homo sapiens
  siRNA target sequence for DKFZP564D172 (NM_032042.3,566-584).
gagctgtggctgaaggata

SEQ ID NO: 397711 - DNA, 19 bp, Homo sapiens
  siRNA target sequence for DKFZP564D172 (NM_032042.3,645-663).
cgtacagtcatcatctgat

SEQ ID NO: 397712 - DNA, 19 bp, Homo sapiens
  siRNA target sequence for DKFZP564D172 (NM_032042.3,649-667).
cagtcatcatctgatagtt

SEQ ID NO: 397713 - DNA, 19 bp, Homo sapiens
  siRNA target sequence for DKFZP564D172 (NM_032042.3,723-741).
gaagcgacgtgatttctat

SEQ ID NO: 397714 - DNA, 19 bp, Homo sapiens
  siRNA target sequence for DKFZP564D172 (NM_032042.3,727-745).
cgacgtgatttctatgaga

SEQ ID NO: 397715 - DNA, 19 bp, Homo sapiens
  siRNA target sequence for DKFZP564D172 (NM_032042.3,728-746).
gacgtgatttctatgagaa

SEQ ID NO: 397716 - DNA, 19 bp, Homo sapiens
  siRNA target sequence for DKFZP564D172 (NM_032042.3,786-804).
gtatatcagagaaaatggt

SEQ ID NO: 397717 - DNA, 19 bp, Homo sapiens
  siRNA target sequence for DKFZP564D172 (NM_032042.3,860-878).
ctgagaatgtgtttttcgt

SEQ ID NO: 397718 - DNA, 19 bp, Homo sapiens
  siRNA target sequence for DKFZP564D172 (NM_032042.3,922-940).
caacgagaagccgatgtaa

SEQ ID NO: 397719 - DNA, 19 bp, Homo sapiens
  siRNA target sequence for DKFZP564D172 (NM_032042.3,925-943).
cgagaagccgatgtaaaaa

SEQ ID NO: 397720 - DNA, 19 bp, Homo sapiens
  siRNA target sequence for DKFZP564D172 (NM_032042.3,932-950).
ccgatgtaaaaaataaggt

SEQ ID NO: 397721 - DNA, 19 bp, Homo sapiens
  siRNA target sequence for DKFZP564D172 (NM_032042.3,933-951).
cgatgtaaaaaataaggta

SEQ ID NO: 397722 - DNA, 19 bp, Homo sapiens
  siRNA target sequence for DKFZP564D172 (NM_032042.3,966-984).
gacagactctgttcacaat

SEQ ID NO: 397723 - DNA, 19 bp, Homo sapiens
  siRNA target sequence for DKFZP564D172 (NM_032042.3,968-986).
cagactctgttcacaatgt

SEQ ID NO: 397724 - DNA, 19 bp, Homo sapiens
  siRNA target sequence for DKFZP564D172 (NM_032042.3,994-1012).
caagaagctggcaaaacga

SEQ ID NO: 397725 - DNA, 19 bp, Homo sapiens
  siRNA target sequence for DKFZP564D172 (NM_032042.3,1026-1044).
gagagagaactgttgtaat

SEQ ID NO: 397726 - DNA, 19 bp, Homo sapiens
  siRNA target sequence for DKFZP564D172 (NM_032042.3,1050-1068).
ctctagctcagaaccatta

SEQ ID NO: 397727 - DNA, 19 bp, Homo sapiens
  siRNA target sequence for DKFZP564D172 (NM_032042.3,1052-1070).
ctagctcagaaccattaga

SEQ ID NO: 397728 - DNA, 19 bp, Homo sapiens
  siRNA target sequence for DKFZP564D172 (NM_032042.3,1123-1141).
gaccgtcacgagctaactt

SEQ ID NO: 397729 - DNA, 19 bp, Homo sapiens
  siRNA target sequence for DKFZP564D172 (NM_032042.3,1146-1164).
gaagagctttccgtctatt

SEQ ID NO: 397730 - DNA, 19 bp, Homo sapiens
  siRNA target sequence for DKFZP564D172 (NM_032042.3,1151-1169).
gctttccgtctattttcaa

SEQ ID NO: 397731 - DNA, 19 bp, Homo sapiens
  siRNA target sequence for PCDHGA4 (NM_032053.1,2419-2437).
caggtgagtcaatcttata

SEQ ID NO: 397732 - DNA, 19 bp, Homo sapiens
  siRNA target sequence for PCDHGA4 (NM_032053.1,2421-2439).
ggtgagtcaatcttataat

SEQ ID NO: 397733 - DNA, 19 bp, Homo sapiens
  siRNA target sequence for PCDHGA4 (NM_032053.1,2422-2440).
gtgagtcaatcttataata

SEQ ID NO: 397734 - DNA, 19 bp, Homo sapiens
  siRNA target sequence for PCDHGA4 (NM_032053.1,2424-2442).
gagtcaatcttataataga

SEQ ID NO: 397735 - DNA, 19 bp, Homo sapiens
  siRNA target sequence for PCDHGA6 (NM_032086.1,2414-2432).
ggcaacttcaggtgagttt

SEQ ID NO: 397736 - DNA, 19 bp, Homo sapiens
  siRNA target sequence for PCDHGA9 (NM_032089.1,2418-2436).
ggttccggtgagttcattt

SEQ ID NO: 397737 - DNA, 19 bp, Homo sapiens
  siRNA target sequence for PCDHGA9 (NM_032089.1,2419-2437).
gttccggtgagttcatttt

SEQ ID NO: 397738 - DNA, 19 bp, Homo sapiens
  siRNA target sequence for PCDHGA9 (NM_032089.1,2422-2440).
ccggtgagttcattttttt

SEQ ID NO: 397739 - DNA, 19 bp, Homo sapiens
  siRNA target sequence for PCDHGA9 (NM_032089.1,2423-2441).
cggtgagttcatttttttt

SEQ ID NO: 397740 - DNA, 19 bp, Homo sapiens
  siRNA target sequence for PCDHGA10 (NM_032090.1,2426-2444).
cattggttccagtgagttt

SEQ ID NO: 397741 - DNA, 19 bp, Homo sapiens
  siRNA target sequence for PCDHGA10 (NM_032090.1,2430-2448).
ggttccagtgagttttatt

SEQ ID NO: 397742 - DNA, 19 bp, Homo sapiens
  siRNA target sequence for PCDHGA10 (NM_032090.1,2519-2537).
gtgtaaatgctaaaacact

SEQ ID NO: 397743 - DNA, 19 bp, Homo sapiens
  siRNA target sequence for PCDHGA10 (NM_032090.1,2527-2545).
gctaaaacactgatgagta

SEQ ID NO: 397744 - DNA, 19 bp, Homo sapiens
  siRNA target sequence for PCDHGA11 (NM_032091.1,2681-2699).
caagtaatcaggtgagatt

SEQ ID NO: 397745 - DNA, 19 bp, Homo sapiens
  siRNA target sequence for PCDHGA11 (NM_032091.1,2724-2742).
gtgtcttggcacaagtctt

SEQ ID NO: 397746 - DNA, 19 bp, Homo sapiens
  siRNA target sequence for PCDHGA11 (NM_032091.1,2726-2744).
gtcttggcacaagtctttt

SEQ ID NO: 397747 - DNA, 19 bp, Homo sapiens
  siRNA target sequence for PCDHGA11 (NM_032091.1,2731-2749).
ggcacaagtcttttaagga

SEQ ID NO: 397748 - DNA, 19 bp, Homo sapiens
  siRNA target sequence for PCDHGB1 (NM_032095.1,2409-2427).
cgtgagtttctgcaaatct

SEQ ID NO: 397749 - DNA, 19 bp, Homo sapiens
  siRNA target sequence for PCDHGB6 (NM_032100.1,2408-2426).
ctctgacttcggtgagttt

SEQ ID NO: 397750 - DNA, 19 bp, Homo sapiens
  siRNA target sequence for PCDHGB6 (NM_032100.1,2412-2430).
gacttcggtgagtttctct

SEQ ID NO: 397751 - DNA, 19 bp, Homo sapiens
  siRNA target sequence for PCDHGB6 (NM_032100.1,2436-2454).
gtgtgtgatttatctaata

SEQ ID NO: 397752 - DNA, 19 bp, Homo sapiens
  siRNA target sequence for PCDHGB6 (NM_032100.1,2438-2456).
gtgtgatttatctaatagt

SEQ ID NO: 397753 - DNA, 19 bp, Homo sapiens
  siRNA target sequence for PCDHGB6 (NM_032100.1,2440-2458).
gtgatttatctaatagtct

SEQ ID NO: 397754 - DNA, 19 bp, Homo sapiens
  siRNA target sequence for OTP (NM_032109.2,175-193).
cgccaggctaggtatgaaa

SEQ ID NO: 397755 - DNA, 19 bp, Homo sapiens
  siRNA target sequence for OTP (NM_032109.2,177-195).
ccaggctaggtatgaaaga

SEQ ID NO: 397756 - DNA, 19 bp, Homo sapiens
  siRNA target sequence for OTP (NM_032109.2,178-196).
caggctaggtatgaaagat

SEQ ID NO: 397757 - DNA, 19 bp, Homo sapiens
  siRNA target sequence for OTP (NM_032109.2,218-236).
cgggaggcggtgaagtgta

SEQ ID NO: 397758 - DNA, 19 bp, Homo sapiens
  siRNA target sequence for GAJ (NM_032117.2,130-148).
ctcgcatgatggaaatatt

SEQ ID NO: 397759 - DNA, 19 bp, Homo sapiens
  siRNA target sequence for GAJ (NM_032117.2,220-238).
ctatgtcagtaaaagaagt

SEQ ID NO: 397760 - DNA, 19 bp, Homo sapiens
  siRNA target sequence for GAJ (NM_032117.2,239-257).
ccttcaaagcttagttgat

SEQ ID NO: 397761 - DNA, 19 bp, Homo sapiens
  siRNA target sequence for GAJ (NM_032117.2,247-265).
gcttagttgatgatggtat

SEQ ID NO: 397762 - DNA, 19 bp, Homo sapiens
  siRNA target sequence for GAJ (NM_032117.2,276-294).
gagaggatcggaacttcta

SEQ ID NO: 397763 - DNA, 19 bp, Homo sapiens
  siRNA target sequence for GAJ (NM_032117.2,278-296).
gaggatcggaacttctaat

SEQ ID NO: 397764 - DNA, 19 bp, Homo sapiens
  siRNA target sequence for GAJ (NM_032117.2,280-298).
ggatcggaacttctaatta

SEQ ID NO: 397765 - DNA, 19 bp, Homo sapiens
  siRNA target sequence for GAJ (NM_032117.2,281-299).
gatcggaacttctaattat

SEQ ID NO: 397766 - DNA, 19 bp, Homo sapiens
  siRNA target sequence for GAJ (NM_032117.2,284-302).
cggaacttctaattattat

SEQ ID NO: 397767 - DNA, 19 bp, Homo sapiens
  siRNA target sequence for GAJ (NM_032117.2,285-303).
ggaacttctaattattatt

SEQ ID NO: 397768 - DNA, 19 bp, Homo sapiens
  siRNA target sequence for GAJ (NM_032117.2,327-345).
catgcaaggaaacataagt

SEQ ID NO: 397769 - DNA, 19 bp, Homo sapiens
  siRNA target sequence for GAJ (NM_032117.2,365-383).
gttgtctgagggaagtcaa

SEQ ID NO: 397770 - DNA, 19 bp, Homo sapiens
  siRNA target sequence for GAJ (NM_032117.2,386-404).
gcatgcaagcctacagaaa

SEQ ID NO: 397771 - DNA, 19 bp, Homo sapiens
  siRNA target sequence for GAJ (NM_032117.2,391-409).
caagcctacagaaaagcat

SEQ ID NO: 397772 - DNA, 19 bp, Homo sapiens
  siRNA target sequence for GAJ (NM_032117.2,406-424).
gcattgagaaagctaaaat

SEQ ID NO: 397773 - DNA, 19 bp, Homo sapiens
  siRNA target sequence for GAJ (NM_032117.2,407-425).
cattgagaaagctaaaatt

SEQ ID NO: 397774 - DNA, 19 bp, Homo sapiens
  siRNA target sequence for GAJ (NM_032117.2,446-464).
gcgaaccaggctagcaaaa

SEQ ID NO: 397775 - DNA, 19 bp, Homo sapiens
  siRNA target sequence for GAJ (NM_032117.2,585-603).
gctaacagatggactgata

SEQ ID NO: 397776 - DNA, 19 bp, Homo sapiens
  siRNA target sequence for GAJ (NM_032117.2,586-604).
ctaacagatggactgataa

SEQ ID NO: 397777 - DNA, 19 bp, Homo sapiens
  siRNA target sequence for GAJ (NM_032117.2,590-608).
cagatggactgataacata

SEQ ID NO: 397778 - DNA, 19 bp, Homo sapiens
  siRNA target sequence for GAJ (NM_032117.2,687-705).
gactttgactacatagact

SEQ ID NO: 397779 - DNA, 19 bp, Homo sapiens
  siRNA target sequence for FLJ12953 (NM_032118.2,142-160).
gctcgcaacctcacgtatt

SEQ ID NO: 397780 - DNA, 19 bp, Homo sapiens
  siRNA target sequence for FLJ12953 (NM_032118.2,143-161).
ctcgcaacctcacgtattt

SEQ ID NO: 397781 - DNA, 19 bp, Homo sapiens
  siRNA target sequence for FLJ12953 (NM_032118.2,257-275).
gagtgagtcccccacttat

SEQ ID NO: 397782 - DNA, 19 bp, Homo sapiens
  siRNA target sequence for FLJ12953 (NM_032118.2,259-277).
gtgagtcccccacttatca

SEQ ID NO: 397783 - DNA, 19 bp, Homo sapiens
  siRNA target sequence for FLJ12953 (NM_032118.2,324-342).
cacctcacatcgaggaata

SEQ ID NO: 397784 - DNA, 19 bp, Homo sapiens
  siRNA target sequence for FLJ12953 (NM_032118.2,326-344).
cctcacatcgaggaataca

SEQ ID NO: 397785 - DNA, 19 bp, Homo sapiens
  siRNA target sequence for FLJ12953 (NM_032118.2,329-347).
cacatcgaggaatacagat

SEQ ID NO: 397786 - DNA, 19 bp, Homo sapiens
  siRNA target sequence for FLJ12953 (NM_032118.2,442-460).
gccagtggccacttcatct

SEQ ID NO: 397787 - DNA, 19 bp, Homo sapiens
  siRNA target sequence for FLJ12953 (NM_032118.2,552-570).
gatgccaatcacagacatt

SEQ ID NO: 397788 - DNA, 19 bp, Homo sapiens
  siRNA target sequence for FLJ12953 (NM_032118.2,647-665).
ggcggtcagggccagaatt

SEQ ID NO: 397789 - DNA, 19 bp, Homo sapiens
  siRNA target sequence for FLJ12953 (NM_032118.2,649-667).
cggtcagggccagaattca

SEQ ID NO: 397790 - DNA, 19 bp, Homo sapiens
  siRNA target sequence for FLJ12953 (NM_032118.2,653-671).
cagggccagaattcacatt

SEQ ID NO: 397791 - DNA, 19 bp, Homo sapiens
  siRNA target sequence for FLJ12953 (NM_032118.2,655-673).
gggccagaattcacattat

SEQ ID NO: 397792 - DNA, 19 bp, Homo sapiens
  siRNA target sequence for FLJ12953 (NM_032118.2,656-674).
ggccagaattcacattatt

SEQ ID NO: 397793 - DNA, 19 bp, Homo sapiens
  siRNA target sequence for FLJ12953 (NM_032118.2,675-693).
gacccgcattccaggattt

SEQ ID NO: 397794 - DNA, 19 bp, Homo sapiens
  siRNA target sequence for FLJ12953 (NM_032118.2,678-696).
ccgcattccaggatttgga

SEQ ID NO: 397795 - DNA, 19 bp, Homo sapiens
  siRNA target sequence for FLJ12953 (NM_032118.2,753-771).
cggacaagtgcatctatat

SEQ ID NO: 397796 - DNA, 19 bp, Homo sapiens
  siRNA target sequence for FLJ12953 (NM_032118.2,755-773).
gacaagtgcatctatatga

SEQ ID NO: 397797 - DNA, 19 bp, Homo sapiens
  siRNA target sequence for FLJ12953 (NM_032118.2,877-895).
gacacctttgtgcatatct

SEQ ID NO: 397798 - DNA, 19 bp, Homo sapiens
  siRNA target sequence for FLJ12953 (NM_032118.2,975-993).
gtgtggtgctcgattttgt

SEQ ID NO: 397799 - DNA, 19 bp, Homo sapiens
  siRNA target sequence for FLJ12953 (NM_032118.2,977-995).
gtggtgctcgattttgtga

SEQ ID NO: 397800 - DNA, 19 bp, Homo sapiens
  siRNA target sequence for FLJ12953 (NM_032118.2,979-997).
ggtgctcgattttgtgatt

SEQ ID NO: 397801 - DNA, 19 bp, Homo sapiens
  siRNA target sequence for FLJ12953 (NM_032118.2,1036-1054).
gcggagatccggagattca

SEQ ID NO: 397802 - DNA, 19 bp, Homo sapiens
  siRNA target sequence for DKFZP564O0523 (NM_032120.1,85-103).
gcgacacacgggccaaata

SEQ ID NO: 397803 - DNA, 19 bp, Homo sapiens
  siRNA target sequence for DKFZP564O0523 (NM_032120.1,86-104).
cgacacacgggccaaatat

SEQ ID NO: 397804 - DNA, 19 bp, Homo sapiens
  siRNA target sequence for DKFZP564O0523 (NM_032120.1,89-107).
cacacgggccaaatatcga

SEQ ID NO: 397805 - DNA, 19 bp, Homo sapiens
  siRNA target sequence for DKFZP564O0523 (NM_032120.1,123-141).
cgtgctgtgaaggtatata

SEQ ID NO: 397806 - DNA, 19 bp, Homo sapiens
  siRNA target sequence for DKFZP564O0523 (NM_032120.1,131-149).
gaaggtatatacaatcaat

SEQ ID NO: 397807 - DNA, 19 bp, Homo sapiens
  siRNA target sequence for DKFZP564O0523 (NM_032120.1,152-170).
ggaatctcagtacttatta

SEQ ID NO: 397808 - DNA, 19 bp, Homo sapiens
  siRNA target sequence for DKFZP564O0523 (NM_032120.1,184-202).
ctgctgtgggagtcatgaa

SEQ ID NO: 397809 - DNA, 19 bp, Homo sapiens
  siRNA target sequence for DKFZP564O0523 (NM_032120.1,210-228).
gttgagcgattcgctttat

SEQ ID NO: 397810 - DNA, 19 bp, Homo sapiens
  siRNA target sequence for DKFZP564O0523 (NM_032120.1,215-233).
gcgattcgctttatatggt

SEQ ID NO: 397811 - DNA, 19 bp, Homo sapiens
  siRNA target sequence for DKFZP564O0523 (NM_032120.1,221-239).
cgctttatatggtgcaatt

SEQ ID NO: 397812 - DNA, 19 bp, Homo sapiens
  siRNA target sequence for DKFZP564O0523 (NM_032120.1,223-241).
ctttatatggtgcaattga

SEQ ID NO: 397813 - DNA, 19 bp, Homo sapiens
  siRNA target sequence for DKFZP564O0523 (NM_032120.1,245-263).
gtacaatgctctagatgaa

SEQ ID NO: 397814 - DNA, 19 bp, Homo sapiens
  siRNA target sequence for DKFZP564O0523 (NM_032120.1,285-303).
gaagtttatcttattaaat

SEQ ID NO: 397815 - DNA, 19 bp, Homo sapiens
  siRNA target sequence for DKFZP564O0523 (NM_032120.1,434-452).
gcggaaggcatatgtagta

SEQ ID NO: 397816 - DNA, 19 bp, Homo sapiens
  siRNA target sequence for DKFZP564O0523 (NM_032120.1,435-453).
cggaaggcatatgtagtaa

SEQ ID NO: 397817 - DNA, 19 bp, Homo sapiens
  siRNA target sequence for DKFZP564O0523 (NM_032120.1,436-454).
ggaaggcatatgtagtaaa

SEQ ID NO: 397818 - DNA, 19 bp, Homo sapiens
  siRNA target sequence for DKFZP564O0523 (NM_032120.1,474-492).
cattacgtgacaaagaaga

SEQ ID NO: 397819 - DNA, 19 bp, Homo sapiens
  siRNA target sequence for DKFZP564O0523 (NM_032120.1,546-564).
gagatgtctggattttgta

SEQ ID NO: 397820 - DNA, 19 bp, Homo sapiens
  siRNA target sequence for DKFZP564O0523 (NM_032120.1,600-618).
ccttatcttccgtattcct

SEQ ID NO: 397821 - DNA, 19 bp, Homo sapiens
  siRNA target sequence for DKFZP564O0523 (NM_032120.1,617-635).
ctgtgaattgcctttatgt

SEQ ID NO: 397822 - DNA, 19 bp, Homo sapiens
  siRNA target sequence for DKFZP564O0523 (NM_032120.1,619-637).
gtgaattgcctttatgtta

SEQ ID NO: 397823 - DNA, 19 bp, Homo sapiens
  siRNA target sequence for DKFZP564O0523 (NM_032120.1,724-742).
caatggggcattataacca

SEQ ID NO: 397824 - DNA, 19 bp, Homo sapiens
  siRNA target sequence for DKFZP564O0523 (NM_032120.1,730-748).
ggcattataaccacaatga

SEQ ID NO: 397825 - DNA, 19 bp, Homo sapiens
  siRNA target sequence for DKFZP564O0523 (NM_032120.1,801-819).
ggtgcacaaaaggctatta

SEQ ID NO: 397826 - DNA, 19 bp, Homo sapiens
  siRNA target sequence for DKFZP564O0523 (NM_032120.1,804-822).
gcacaaaaggctattacgt

SEQ ID NO: 397827 - DNA, 19 bp, Homo sapiens
  siRNA target sequence for DKFZP564O0523 (NM_032120.1,886-904).
gagaagatgatcgtaaact

SEQ ID NO: 397828 - DNA, 19 bp, Homo sapiens
  siRNA target sequence for DKFZP564O0523 (NM_032120.1,922-940).
caaacccaactggtaatga

SEQ ID NO: 397829 - DNA, 19 bp, Homo sapiens
  siRNA target sequence for DKFZP564O0523 (NM_032120.1,926-944).
cccaactggtaatgagatt

SEQ ID NO: 397830 - DNA, 19 bp, Homo sapiens
  siRNA target sequence for DKFZP564O0523 (NM_032120.1,989-1007).
cgatgactcattgaataca

SEQ ID NO: 397831 - DNA, 19 bp, Homo sapiens
  siRNA target sequence for DKFZP564O0523 (NM_032120.1,990-1008).
gatgactcattgaatacaa

SEQ ID NO: 397832 - DNA, 19 bp, Homo sapiens
  siRNA target sequence for DKFZP564O0523 (NM_032120.1,1001-1019).
gaatacaacggcgaattta

SEQ ID NO: 397833 - DNA, 19 bp, Homo sapiens
  siRNA target sequence for DKFZP564O0523 (NM_032120.1,1072-1090).
caagccagaagatgtacat

SEQ ID NO: 397834 - DNA, 19 bp, Homo sapiens
  siRNA target sequence for DKFZp564K142 (NM_032121.3,28-46).
gcgcgttggcggttttggt

SEQ ID NO: 397835 - DNA, 19 bp, Homo sapiens
  siRNA target sequence for DKFZp564K142 (NM_032121.3,67-85).
gtggcgctgctcatcgttt

SEQ ID NO: 397836 - DNA, 19 bp, Homo sapiens
  siRNA target sequence for DKFZp564K142 (NM_032121.3,142-160).
gttagtcagctgatggaat

SEQ ID NO: 397837 - DNA, 19 bp, Homo sapiens
  siRNA target sequence for DKFZp564K142 (NM_032121.3,201-219).
gttccgtcgccttgtgaaa

SEQ ID NO: 397838 - DNA, 19 bp, Homo sapiens
  siRNA target sequence for DKFZp564K142 (NM_032121.3,216-234).
gaaagccccaccgagaaat

SEQ ID NO: 397839 - DNA, 19 bp, Homo sapiens
  siRNA target sequence for DKFZp564K142 (NM_032121.3,230-248).
gaaattactccgttatcgt

SEQ ID NO: 397840 - DNA, 19 bp, Homo sapiens
  siRNA target sequence for DKFZp564K142 (NM_032121.3,275-293).
gacagtgtgtcgtttgcaa

SEQ ID NO: 397841 - DNA, 19 bp, Homo sapiens
  siRNA target sequence for DKFZp564K142 (NM_032121.3,391-409).
ggctctgatgtatttcaga

SEQ ID NO: 397842 - DNA, 19 bp, Homo sapiens
  siRNA target sequence for DKFZp564K142 (NM_032121.3,392-410).
gctctgatgtatttcagat

SEQ ID NO: 397843 - DNA, 19 bp, Homo sapiens
  siRNA target sequence for DKFZp564K142 (NM_032121.3,397-415).
gatgtatttcagatgctaa

SEQ ID NO: 397844 - DNA, 19 bp, Homo sapiens
  siRNA target sequence for DKFZp564K142 (NM_032121.3,425-443).
cagctccaactttcatcaa

SEQ ID NO: 397845 - DNA, 19 bp, Homo sapiens
  siRNA target sequence for DKFZp564K142 (NM_032121.3,464-482).
ccaaacggggtgatacata

SEQ ID NO: 397846 - DNA, 19 bp, Homo sapiens
  siRNA target sequence for DKFZp564K142 (NM_032121.3,465-483).
caaacggggtgatacatat

SEQ ID NO: 397847 - DNA, 19 bp, Homo sapiens
  siRNA target sequence for DKFZp564K142 (NM_032121.3,469-487).
cggggtgatacatatgagt

SEQ ID NO: 397848 - DNA, 19 bp, Homo sapiens
  siRNA target sequence for DKFZp564K142 (NM_032121.3,470-488).
ggggtgatacatatgagtt

SEQ ID NO: 397849 - DNA, 19 bp, Homo sapiens
  siRNA target sequence for DKFZp564K142 (NM_032121.3,471-489).
gggtgatacatatgagtta

SEQ ID NO: 397850 - DNA, 19 bp, Homo sapiens
  siRNA target sequence for DKFZp564K142 (NM_032121.3,473-491).
gtgatacatatgagttaca

SEQ ID NO: 397851 - DNA, 19 bp, Homo sapiens
  siRNA target sequence for DKFZp564K142 (NM_032121.3,533-551).
ccgacagaactgatgtcaa

SEQ ID NO: 397852 - DNA, 19 bp, Homo sapiens
  siRNA target sequence for DKFZp564K142 (NM_032121.3,535-553).
gacagaactgatgtcaata

SEQ ID NO: 397853 - DNA, 19 bp, Homo sapiens
  siRNA target sequence for DKFZp564K142 (NM_032121.3,547-565).
gtcaatattagagtgatta

SEQ ID NO: 397854 - DNA, 19 bp, Homo sapiens
  siRNA target sequence for DKFZp564K142 (NM_032121.3,559-577).
gtgattagacccccaaatt

SEQ ID NO: 397855 - DNA, 19 bp, Homo sapiens
  siRNA target sequence for DKFZp564K142 (NM_032121.3,561-579).
gattagacccccaaattat

SEQ ID NO: 397856 - DNA, 19 bp, Homo sapiens
  siRNA target sequence for DKFZp564K142 (NM_032121.3,603-621).
gcttttggctgttattggt

SEQ ID NO: 397857 - DNA, 19 bp, Homo sapiens
  siRNA target sequence for DKFZp564K142 (NM_032121.3,630-648).
gtatcttcgaagaagtaat

SEQ ID NO: 397858 - DNA, 19 bp, Homo sapiens
  siRNA target sequence for DKFZp564K142 (NM_032121.3,637-655).
cgaagaagtaatatggaat

SEQ ID NO: 397859 - DNA, 19 bp, Homo sapiens
  siRNA target sequence for DKFZp564K142 (NM_032121.3,641-659).
gaagtaatatggaatttct

SEQ ID NO: 397860 - DNA, 19 bp, Homo sapiens
  siRNA target sequence for DKFZp564K142 (NM_032121.3,707-725).
ctatgacatctggtcaaat

SEQ ID NO: 397861 - DNA, 19 bp, Homo sapiens
  siRNA target sequence for DKFZp564K142 (NM_032121.3,721-739).
caaatgtggaaccatataa

SEQ ID NO: 397862 - DNA, 19 bp, Homo sapiens
  siRNA target sequence for DKFZp564K142 (NM_032121.3,768-786).
ccacacgggacatgtgaat

SEQ ID NO: 397863 - DNA, 19 bp, Homo sapiens
  siRNA target sequence for DKFZp564K142 (NM_032121.3,769-787).
cacacgggacatgtgaatt

SEQ ID NO: 397864 - DNA, 19 bp, Homo sapiens
  siRNA target sequence for DKFZp564K142 (NM_032121.3,773-791).
cgggacatgtgaattatat

SEQ ID NO: 397865 - DNA, 19 bp, Homo sapiens
  siRNA target sequence for DKFZp564K142 (NM_032121.3,800-818).
gcagtcaagcccagtttgt

SEQ ID NO: 397866 - DNA, 19 bp, Homo sapiens
  siRNA target sequence for DKFZp564K142 (NM_032121.3,827-845).
cacacattgttcttctgtt

SEQ ID NO: 397867 - DNA, 19 bp, Homo sapiens
  siRNA target sequence for DKFZp564K142 (NM_032121.3,889-907).
gctacctctgacatggata

SEQ ID NO: 397868 - DNA, 19 bp, Homo sapiens
  siRNA target sequence for DKFZp564K142 (NM_032121.3,890-908).
ctacctctgacatggatat

SEQ ID NO: 397869 - DNA, 19 bp, Homo sapiens
  siRNA target sequence for DKFZp564K142 (NM_032121.3,894-912).
ctctgacatggatattgga

SEQ ID NO: 397870 - DNA, 19 bp, Homo sapiens
  siRNA target sequence for DKFZp564K142 (NM_032121.3,933-951).
ggctggtattggacttgtt

SEQ ID NO: 397871 - DNA, 19 bp, Homo sapiens
  siRNA target sequence for DKFZp564K142 (NM_032121.3,943-961).
ggacttgttgtattattct

SEQ ID NO: 397872 - DNA, 19 bp, Homo sapiens
  siRNA target sequence for DKFZp564K142 (NM_032121.3,944-962).
gacttgttgtattattctt

SEQ ID NO: 397873 - DNA, 19 bp, Homo sapiens
  siRNA target sequence for DKFZp564K142 (NM_032121.3,946-964).
cttgttgtattattcttca

SEQ ID NO: 397874 - DNA, 19 bp, Homo sapiens
  siRNA target sequence for DKFZp564K142 (NM_032121.3,972-990).
gctctctatttttagatct

SEQ ID NO: 397875 - DNA, 19 bp, Homo sapiens
  siRNA target sequence for DKFZp564K142 (NM_032121.3,973-991).
ctctctatttttagatcta

SEQ ID NO: 397876 - DNA, 19 bp, Homo sapiens
  siRNA target sequence for DTNBP1 (NM_032122.3,221-239).
cctccgggctgaagacttt

SEQ ID NO: 397877 - DNA, 19 bp, Homo sapiens
  siRNA target sequence for DTNBP1 (NM_032122.3,289-307).
ccatttttgccaaagtact

SEQ ID NO: 397878 - DNA, 19 bp, Homo sapiens
  siRNA target sequence for DTNBP1 (NM_032122.3,303-321).
gtactctgctggattagaa

SEQ ID NO: 397879 - DNA, 19 bp, Homo sapiens
  siRNA target sequence for DTNBP1 (NM_032122.3,310-328).
gctggattagaattactta

SEQ ID NO: 397880 - DNA, 19 bp, Homo sapiens
  siRNA target sequence for DTNBP1 (NM_032122.3,488-506).
ctttaatcgcagacttaga

SEQ ID NO: 397881 - DNA, 19 bp, Homo sapiens
  siRNA target sequence for DTNBP1 (NM_032122.3,747-765).
gaaggagcggcagaagttt

SEQ ID NO: 397882 - DNA, 19 bp, Homo sapiens
  siRNA target sequence for DTNBP1 (NM_032122.3,841-859).
cccataggcagcatgtcat

SEQ ID NO: 397883 - DNA, 19 bp, Homo sapiens
  siRNA target sequence for DTNBP1 (NM_032122.3,995-1013).
gtacctgtcagaatgagat

SEQ ID NO: 397884 - DNA, 19 bp, Homo sapiens
  siRNA target sequence for DTNBP1 (NM_032122.3,1024-1042).
gttccaaatccctcagaat

SEQ ID NO: 397885 - DNA, 19 bp, Homo sapiens
  siRNA target sequence for DTNBP1 (NM_032122.3,1112-1130).
gggagtcccccgttgttca

SEQ ID NO: 397886 - DNA, 19 bp, Homo sapiens
  siRNA target sequence for KIRREL2 (NM_032123.4,260-278).
gcccgtcgccccatttcct

SEQ ID NO: 397887 - DNA, 19 bp, Homo sapiens
  siRNA target sequence for KIRREL2 (NM_032123.4,344-362).
cctactgggggctagttca

SEQ ID NO: 397888 - DNA, 19 bp, Homo sapiens
  siRNA target sequence for KIRREL2 (NM_032123.4,487-505).
gatgaagcatcatatgaat

SEQ ID NO: 397889 - DNA, 19 bp, Homo sapiens
  siRNA target sequence for KIRREL2 (NM_032123.4,656-674).
gccctacccctgaattgct

SEQ ID NO: 397890 - DNA, 19 bp, Homo sapiens
  siRNA target sequence for KIRREL2 (NM_032123.4,790-808).
gatggagccacctttgtct

SEQ ID NO: 397891 - DNA, 19 bp, Homo sapiens
  siRNA target sequence for KIRREL2 (NM_032123.4,1630-1648).
gactttagcaggagcttta

SEQ ID NO: 397892 - DNA, 19 bp, Homo sapiens
  siRNA target sequence for KIRREL2 (NM_032123.4,1754-1772).
ccacaactctccttatggt

SEQ ID NO: 397893 - DNA, 19 bp, Homo sapiens
  siRNA target sequence for KIRREL2 (NM_032123.4,1820-1838).
cctctttctccgagcaaaa

SEQ ID NO: 397894 - DNA, 19 bp, Homo sapiens
  siRNA target sequence for KIRREL2 (NM_032123.4,1823-1841).
ctttctccgagcaaaagaa

SEQ ID NO: 397895 - DNA, 19 bp, Homo sapiens
  siRNA target sequence for KIRREL2 (NM_032123.4,1993-2011).
ccaaccaacggttactaca

SEQ ID NO: 397896 - DNA, 19 bp, Homo sapiens
  siRNA target sequence for KIRREL2 (NM_032123.4,1994-2012).
caaccaacggttactacaa

SEQ ID NO: 397897 - DNA, 19 bp, Homo sapiens
  siRNA target sequence for KIRREL2 (NM_032123.4,2044-2062).
gactcacgtgtgacatctt

SEQ ID NO: 397898 - DNA, 19 bp, Homo sapiens
  siRNA target sequence for DKFZP564J047 (NM_032126.1,171-189).
gcagtttgcctggaattga

SEQ ID NO: 397899 - DNA, 19 bp, Homo sapiens
  siRNA target sequence for DKFZP564J047 (NM_032126.1,172-190).
cagtttgcctggaattgaa

SEQ ID NO: 397900 - DNA, 19 bp, Homo sapiens
  siRNA target sequence for DKFZP564J047 (NM_032126.1,193-211).
cagagccgaccaaaacatt

SEQ ID NO: 397901 - DNA, 19 bp, Homo sapiens
  siRNA target sequence for DKFZP564J047 (NM_032126.1,197-215).
gccgaccaaaacatttgat

SEQ ID NO: 397902 - DNA, 19 bp, Homo sapiens
  siRNA target sequence for DKFZP564J047 (NM_032126.1,198-216).
ccgaccaaaacatttgatt

SEQ ID NO: 397903 - DNA, 19 bp, Homo sapiens
  siRNA target sequence for DKFZP564J047 (NM_032126.1,231-249).
caagaagggcggtttacca

SEQ ID NO: 397904 - DNA, 19 bp, Homo sapiens
  siRNA target sequence for DKFZP564J047 (NM_032126.1,256-274).
gagtgacacaggacctaaa

SEQ ID NO: 397905 - DNA, 19 bp, Homo sapiens
  siRNA target sequence for DKFZP564J047 (NM_032126.1,258-276).
gtgacacaggacctaaaga

SEQ ID NO: 397906 - DNA, 19 bp, Homo sapiens
  siRNA target sequence for DKFZP564J047 (NM_032126.1,260-278).
gacacaggacctaaagaat

SEQ ID NO: 397907 - DNA, 19 bp, Homo sapiens
  siRNA target sequence for DKFZP564J047 (NM_032126.1,339-357).
gatctaatggacaaggatt

SEQ ID NO: 397908 - DNA, 19 bp, Homo sapiens
  siRNA target sequence for DKFZP564J047 (NM_032126.1,350-368).
caaggattttgataaactt

SEQ ID NO: 397909 - DNA, 19 bp, Homo sapiens
  siRNA target sequence for DKFZP564J047 (NM_032126.1,571-589).
caccctgtgctcttcacaa

SEQ ID NO: 397910 - DNA, 19 bp, Homo sapiens
  siRNA target sequence for DKFZP564J047 (NM_032126.1,593-611).
gacgatggcaccacaaaaa

SEQ ID NO: 397911 - DNA, 19 bp, Homo sapiens
  siRNA target sequence for DKFZP564J047 (NM_032126.1,625-643).
cactggatccccttcatca

SEQ ID NO: 397912 - DNA, 19 bp, Homo sapiens
  siRNA target sequence for DKFZP564J047 (NM_032126.1,648-666).
gggacctgctgcgagaaat

SEQ ID NO: 397913 - DNA, 19 bp, Homo sapiens
  siRNA target sequence for DKFZP564J047 (NM_032126.1,650-668).
gacctgctgcgagaaatgt

SEQ ID NO: 397914 - DNA, 19 bp, Homo sapiens
  siRNA target sequence for DKFZP564J047 (NM_032126.1,652-670).
cctgctgcgagaaatgttt

SEQ ID NO: 397915 - DNA, 19 bp, Homo sapiens
  siRNA target sequence for DKFZP564J047 (NM_032126.1,676-694).
gtgctctaaagaacaacta

SEQ ID NO: 397916 - DNA, 19 bp, Homo sapiens
  siRNA target sequence for DKFZP564J047 (NM_032126.1,678-696).
gctctaaagaacaactaca

SEQ ID NO: 397917 - DNA, 19 bp, Homo sapiens
  siRNA target sequence for DKFZP564J047 (NM_032126.1,692-710).
ctacaatcgggggaacatt

SEQ ID NO: 397918 - DNA, 19 bp, Homo sapiens
  siRNA target sequence for DKFZP564J047 (NM_032126.1,717-735).
gaggcctcaggcctttaca

SEQ ID NO: 397919 - DNA, 19 bp, Homo sapiens
  siRNA target sequence for DKFZP564J047 (NM_032126.1,719-737).
ggcctcaggcctttacaaa

SEQ ID NO: 397920 - DNA, 19 bp, Homo sapiens
  siRNA target sequence for DKFZP566M1046 (NM_032127.1,335-353).
ccctgggcaccgtatacct

SEQ ID NO: 397921 - DNA, 19 bp, Homo sapiens
  siRNA target sequence for DKFZP566M1046 (NM_032127.1,496-514).
ctgtgcgcaaccacactta

SEQ ID NO: 397922 - DNA, 19 bp, Homo sapiens
  siRNA target sequence for DKFZP566M1046 (NM_032127.1,609-627).
ctgacccgtgtgttgacat

SEQ ID NO: 397923 - DNA, 19 bp, Homo sapiens
  siRNA target sequence for DKFZP566M1046 (NM_032127.1,675-693).
gctgagcaactgaaactat

SEQ ID NO: 397924 - DNA, 19 bp, Homo sapiens
  siRNA target sequence for DKFZP566M1046 (NM_032127.1,676-694).
ctgagcaactgaaactatt

SEQ ID NO: 397925 - DNA, 19 bp, Homo sapiens
  siRNA target sequence for DKFZP566M1046 (NM_032127.1,865-883).
cttcattgctcgagttctt

SEQ ID NO: 397926 - DNA, 19 bp, Homo sapiens
  siRNA target sequence for DKFZP566M1046 (NM_032127.1,1047-1065).
gcggatcactcttacttct

SEQ ID NO: 397927 - DNA, 19 bp, Homo sapiens
  siRNA target sequence for DKFZP566M1046 (NM_032127.1,1102-1120).
catcactgcctcgaaagat

SEQ ID NO: 397928 - DNA, 19 bp, Homo sapiens
  siRNA target sequence for DKFZP566M1046 (NM_032127.1,1105-1123).
cactgcctcgaaagattga

SEQ ID NO: 397929 - DNA, 19 bp, Homo sapiens
  siRNA target sequence for DKFZP566M1046 (NM_032127.1,1177-1195).
cagcccttgcactcttcat

SEQ ID NO: 397930 - DNA, 19 bp, Homo sapiens
  siRNA target sequence for DKFZP566M1046 (NM_032127.1,1179-1197).
gcccttgcactcttcatga

SEQ ID NO: 397931 - DNA, 19 bp, Homo sapiens
  siRNA target sequence for DKFZP566M1046 (NM_032127.1,1182-1200).
cttgcactcttcatgagtt

SEQ ID NO: 397932 - DNA, 19 bp, Homo sapiens
  siRNA target sequence for DKFZP566M1046 (NM_032127.1,1248-1266).
cagaagcagttggttgatt

SEQ ID NO: 397933 - DNA, 19 bp, Homo sapiens
  siRNA target sequence for DKFZP566M1046 (NM_032127.1,1359-1377).
cttttcctacggagtatct

SEQ ID NO: 397934 - DNA, 19 bp, Homo sapiens
  siRNA target sequence for DKFZP566M1046 (NM_032127.1,1451-1469).
caccctcgttgctcgtatt

SEQ ID NO: 397935 - DNA, 19 bp, Homo sapiens
  siRNA target sequence for DKFZP566M1046 (NM_032127.1,1556-1574).
ggttctcaggtatcttgtt

SEQ ID NO: 397936 - DNA, 19 bp, Homo sapiens
  siRNA target sequence for DKFZP566M1046 (NM_032127.1,1969-1987).
gagagctggaagacaatta

SEQ ID NO: 397937 - DNA, 19 bp, Homo sapiens
  siRNA target sequence for DKFZP566M1046 (NM_032127.1,2908-2926).
catccttgggggagttact

SEQ ID NO: 397938 - DNA, 19 bp, Homo sapiens
  siRNA target sequence for DKFZP566M1046 (NM_032127.1,3086-3104).
ggctcttcgagtcaagaat

SEQ ID NO: 397939 - DNA, 19 bp, Homo sapiens
  siRNA target sequence for DKFZP566M1046 (NM_032127.1,3172-3190).
ccgtcacctcgcctttctt

SEQ ID NO: 397940 - DNA, 19 bp, Homo sapiens
  siRNA target sequence for DKFZP566M114 (NM_032128.1,214-232).
ggttcatggtcggaatagt

SEQ ID NO: 397941 - DNA, 19 bp, Homo sapiens
  siRNA target sequence for DKFZP566M114 (NM_032128.1,236-254).
ggcgatcgctggagctaaa

SEQ ID NO: 397942 - DNA, 19 bp, Homo sapiens
  siRNA target sequence for DKFZP566M114 (NM_032128.1,238-256).
cgatcgctggagctaaact

SEQ ID NO: 397943 - DNA, 19 bp, Homo sapiens
  siRNA target sequence for DKFZP566M114 (NM_032128.1,290-308).
gaagccagaaataactgta

SEQ ID NO: 397944 - DNA, 19 bp, Homo sapiens
  siRNA target sequence for DKFZP566M114 (NM_032128.1,321-339).
gttgcaacaatattcttta

SEQ ID NO: 397945 - DNA, 19 bp, Homo sapiens
  siRNA target sequence for DKFZP566M114 (NM_032128.1,335-353).
ctttaacagtggactatca

SEQ ID NO: 397946 - DNA, 19 bp, Homo sapiens
  siRNA target sequence for DKFZP566M114 (NM_032128.1,346-364).
gactatcattgaaaacaga

SEQ ID NO: 397947 - DNA, 19 bp, Homo sapiens
  siRNA target sequence for DKFZP566M114 (NM_032128.1,376-394).
gtgctttggtgcatctaaa

SEQ ID NO: 397948 - DNA, 19 bp, Homo sapiens
  siRNA target sequence for DKFZP566M114 (NM_032128.1,536-554).
gtcttctgcagtgatttta

SEQ ID NO: 397949 - DNA, 19 bp, Homo sapiens
  siRNA target sequence for DKFZP566M114 (NM_032128.1,541-559).
ctgcagtgattttaaccaa

SEQ ID NO: 397950 - DNA, 19 bp, Homo sapiens
  siRNA target sequence for DKFZP566M114 (NM_032128.1,617-635).
ggtaagtaaacatagttta

SEQ ID NO: 397951 - DNA, 19 bp, Homo sapiens
  siRNA target sequence for DKFZP566M114 (NM_032128.1,640-658).
gtctattacaacttttgct

SEQ ID NO: 397952 - DNA, 19 bp, Homo sapiens
  siRNA target sequence for DKFZP434H2010 (NM_032129.1,424-442).
gctcggaaggactcacatt

SEQ ID NO: 397953 - DNA, 19 bp, Homo sapiens
  siRNA target sequence for DKFZP434H2010 (NM_032129.1,1368-1386).
gaccacacttcggaaacat

SEQ ID NO: 397954 - DNA, 19 bp, Homo sapiens
  siRNA target sequence for DKFZP434H2010 (NM_032129.1,1782-1800).
ctctgggacgagactttgt

SEQ ID NO: 397955 - DNA, 19 bp, Homo sapiens
  siRNA target sequence for DKFZP434J0113 (NM_032130.1,177-195).
ctcgggctcaagaggatat

SEQ ID NO: 397956 - DNA, 19 bp, Homo sapiens
  siRNA target sequence for DKFZP434J0113 (NM_032130.1,312-330).
gcaagaagagattcatctt

SEQ ID NO: 397957 - DNA, 19 bp, Homo sapiens
  siRNA target sequence for DKFZP434J0113 (NM_032130.1,421-439).
cactctgacctatgagatt

SEQ ID NO: 397958 - DNA, 19 bp, Homo sapiens
  siRNA target sequence for DKFZP434J0113 (NM_032130.1,488-506).
gaagtgacggagaaagtgt

SEQ ID NO: 397959 - DNA, 19 bp, Homo sapiens
  siRNA target sequence for DKFZP434J0113 (NM_032130.1,556-574).
cctttgctccactctcatt

SEQ ID NO: 397960 - DNA, 19 bp, Homo sapiens
  siRNA target sequence for DKFZP434J0113 (NM_032130.1,752-770).
ctggactctaccatgttca

SEQ ID NO: 397961 - DNA, 19 bp, Homo sapiens
  siRNA target sequence for DKFZP434J0113 (NM_032130.1,1129-1147).
gaccctcccaaggaaagaa

SEQ ID NO: 397962 - DNA, 19 bp, Homo sapiens
  siRNA target sequence for DKFZP434J0113 (NM_032130.1,1929-1947).
gttcagtggagtttaccta

SEQ ID NO: 397963 - DNA, 19 bp, Homo sapiens
  siRNA target sequence for DKFZP434J0113 (NM_032130.1,2044-2062).
gcagatatcccctgcaaat

SEQ ID NO: 397964 - DNA, 19 bp, Homo sapiens
  siRNA target sequence for DKFZP434J0113 (NM_032130.1,2045-2063).
cagatatcccctgcaaata

SEQ ID NO: 397965 - DNA, 19 bp, Homo sapiens
  siRNA target sequence for DKFZP434J0113 (NM_032130.1,2222-2240).
ctgtgccataagtacatct

SEQ ID NO: 397966 - DNA, 19 bp, Homo sapiens
  siRNA target sequence for DKFZP434J0113 (NM_032130.1,2226-2244).
gccataagtacatcttcta

SEQ ID NO: 397967 - DNA, 19 bp, Homo sapiens
  siRNA target sequence for DKFZP434J0113 (NM_032130.1,2228-2246).
cataagtacatcttctata

SEQ ID NO: 397968 - DNA, 19 bp, Homo sapiens
  siRNA target sequence for DKFZP434J0113 (NM_032130.1,2273-2291).
gcgatcaaccatgtacaaa

SEQ ID NO: 397969 - DNA, 19 bp, Homo sapiens
  siRNA target sequence for DKFZP434J0113 (NM_032130.1,2676-2694).
cctccagttacgcaataga

SEQ ID NO: 397970 - DNA, 19 bp, Homo sapiens
  siRNA target sequence for DKFZP434J0113 (NM_032130.1,2677-2695).
ctccagttacgcaatagaa

SEQ ID NO: 397971 - DNA, 19 bp, Homo sapiens
  siRNA target sequence for DKFZP434J0113 (NM_032130.1,2680-2698).
cagttacgcaatagaaaaa

SEQ ID NO: 397972 - DNA, 19 bp, Homo sapiens
  siRNA target sequence for DKFZP434J0113 (NM_032130.1,2731-2749).
gaggggacacccagatatt

SEQ ID NO: 397973 - DNA, 19 bp, Homo sapiens
  siRNA target sequence for ARMC2 (NM_032131.3,337-355).
ggacctgcatcctcaagaa

SEQ ID NO: 397974 - DNA, 19 bp, Homo sapiens
  siRNA target sequence for ARMC2 (NM_032131.3,490-508).
gaggaggattcctgctttt

SEQ ID NO: 397975 - DNA, 19 bp, Homo sapiens
  siRNA target sequence for ARMC2 (NM_032131.3,526-544).
gtggaccctgcgaagatta

SEQ ID NO: 397976 - DNA, 19 bp, Homo sapiens
  siRNA target sequence for ARMC2 (NM_032131.3,528-546).
ggaccctgcgaagattaga

SEQ ID NO: 397977 - DNA, 19 bp, Homo sapiens
  siRNA target sequence for ARMC2 (NM_032131.3,535-553).
gcgaagattagaagagtaa

SEQ ID NO: 397978 - DNA, 19 bp, Homo sapiens
  siRNA target sequence for ARMC2 (NM_032131.3,559-577).
gccagggctcgcttattca

SEQ ID NO: 397979 - DNA, 19 bp, Homo sapiens
  siRNA target sequence for ARMC2 (NM_032131.3,670-688).
ggggactctatggtgaaaa

SEQ ID NO: 397980 - DNA, 19 bp, Homo sapiens
  siRNA target sequence for ARMC2 (NM_032131.3,671-689).
gggactctatggtgaaaat

SEQ ID NO: 397981 - DNA, 19 bp, Homo sapiens
  siRNA target sequence for ARMC2 (NM_032131.3,672-690).
ggactctatggtgaaaata

SEQ ID NO: 397982 - DNA, 19 bp, Homo sapiens
  siRNA target sequence for ARMC2 (NM_032131.3,741-759).
cccacttcagctaactgat

SEQ ID NO: 397983 - DNA, 19 bp, Homo sapiens
  siRNA target sequence for ARMC2 (NM_032131.3,760-778).
gatggaggcttcagtgaaa

SEQ ID NO: 397984 - DNA, 19 bp, Homo sapiens
  siRNA target sequence for ARMC2 (NM_032131.3,763-781).
ggaggcttcagtgaaataa

SEQ ID NO: 397985 - DNA, 19 bp, Homo sapiens
  siRNA target sequence for ARMC2 (NM_032131.3,802-820).
ggaacaacatctttaccat

SEQ ID NO: 397986 - DNA, 19 bp, Homo sapiens
  siRNA target sequence for ARMC2 (NM_032131.3,812-830).
ctttaccatctcatctcaa

SEQ ID NO: 397987 - DNA, 19 bp, Homo sapiens
  siRNA target sequence for ARMC2 (NM_032131.3,909-927).
caaagcagtcccaaaagct

SEQ ID NO: 397988 - DNA, 19 bp, Homo sapiens
  siRNA target sequence for ARMC2 (NM_032131.3,958-976).
gtagacgaagtcttttgga

SEQ ID NO: 397989 - DNA, 19 bp, Homo sapiens
  siRNA target sequence for ARMC2 (NM_032131.3,963-981).
cgaagtcttttggaataca

SEQ ID NO: 397990 - DNA, 19 bp, Homo sapiens
  siRNA target sequence for ARMC2 (NM_032131.3,992-1010).
cgattttgcgtgaattaga

SEQ ID NO: 397991 - DNA, 19 bp, Homo sapiens
  siRNA target sequence for ARMC2 (NM_032131.3,1040-1058).
ctgcttgcacacaacttca

SEQ ID NO: 397992 - DNA, 19 bp, Homo sapiens
  siRNA target sequence for ARMC2 (NM_032131.3,1122-1140).
gaccctgtgtaaactagtt

SEQ ID NO: 397993 - DNA, 19 bp, Homo sapiens
  siRNA target sequence for ARMC2 (NM_032131.3,1124-1142).
ccctgtgtaaactagttga

SEQ ID NO: 397994 - DNA, 19 bp, Homo sapiens
  siRNA target sequence for ARMC2 (NM_032131.3,1125-1143).
cctgtgtaaactagttgat

SEQ ID NO: 397995 - DNA, 19 bp, Homo sapiens
  siRNA target sequence for ARMC2 (NM_032131.3,1128-1146).
gtgtaaactagttgatgtt

SEQ ID NO: 397996 - DNA, 19 bp, Homo sapiens
  siRNA target sequence for ARMC2 (NM_032131.3,1189-1207).
gcacttaaagtgagtagaa

SEQ ID NO: 397997 - DNA, 19 bp, Homo sapiens
  siRNA target sequence for ARMC2 (NM_032131.3,1216-1234).
cttaatgtctgcaaactta

SEQ ID NO: 397998 - DNA, 19 bp, Homo sapiens
  siRNA target sequence for ARMC2 (NM_032131.3,1319-1337).
gtgaagacctgcaaactaa

SEQ ID NO: 397999 - DNA, 19 bp, Homo sapiens
  siRNA target sequence for ARMC2 (NM_032131.3,1321-1339).
gaagacctgcaaactaaca

SEQ ID NO: 398000 - DNA, 19 bp, Homo sapiens
  siRNA target sequence for ARMC2 (NM_032131.3,1342-1360).
gaagcttttttatactgta

SEQ ID NO: 398001 - DNA, 19 bp, Homo sapiens
  siRNA target sequence for ARMC2 (NM_032131.3,1358-1376).
gtatggggtctataaagtt

SEQ ID NO: 398002 - DNA, 19 bp, Homo sapiens
  siRNA target sequence for ARMC2 (NM_032131.3,1480-1498).
ggtacatttttgcctaatt

SEQ ID NO: 398003 - DNA, 19 bp, Homo sapiens
  siRNA target sequence for ARMC2 (NM_032131.3,1518-1536).
ggtgactgctacattgaga

SEQ ID NO: 398004 - DNA, 19 bp, Homo sapiens
  siRNA target sequence for ARMC2 (NM_032131.3,1539-1557).
cttggttgattcatcatta

SEQ ID NO: 398005 - DNA, 19 bp, Homo sapiens
  siRNA target sequence for ARMC2 (NM_032131.3,1542-1560).
ggttgattcatcattagta

SEQ ID NO: 398006 - DNA, 19 bp, Homo sapiens
  siRNA target sequence for ARMC2 (NM_032131.3,1596-1614).
gctctgcacggcaatggaa

SEQ ID NO: 398007 - DNA, 19 bp, Homo sapiens
  siRNA target sequence for ARMC2 (NM_032131.3,1601-1619).
gcacggcaatggaacagta

SEQ ID NO: 398008 - DNA, 19 bp, Homo sapiens
  siRNA target sequence for ARMC2 (NM_032131.3,1604-1622).
cggcaatggaacagtacaa

SEQ ID NO: 398009 - DNA, 19 bp, Homo sapiens
  siRNA target sequence for ARMC2 (NM_032131.3,1629-1647).
caaggacgtctgtaccaat

SEQ ID NO: 398010 - DNA, 19 bp, Homo sapiens
  siRNA target sequence for ARMC2 (NM_032131.3,1632-1650).
ggacgtctgtaccaatatt

SEQ ID NO: 398011 - DNA, 19 bp, Homo sapiens
  siRNA target sequence for ARMC2 (NM_032131.3,1702-1720).
gccagctattccagatgtt

SEQ ID NO: 398012 - DNA, 19 bp, Homo sapiens
  siRNA target sequence for ARMC2 (NM_032131.3,1712-1730).
ccagatgttatgccttatt

SEQ ID NO: 398013 - DNA, 19 bp, Homo sapiens
  siRNA target sequence for ARMC2 (NM_032131.3,1771-1789).
gtcgtccgtgttgttttta

SEQ ID NO: 398014 - DNA, 19 bp, Homo sapiens
  siRNA target sequence for ARMC2 (NM_032131.3,1796-1814).
gcaacctgacggcaaaaaa

SEQ ID NO: 398015 - DNA, 19 bp, Homo sapiens
  siRNA target sequence for ARMC2 (NM_032131.3,1797-1815).
caacctgacggcaaaaaat

SEQ ID NO: 398016 - DNA, 19 bp, Homo sapiens
  siRNA target sequence for ARMC2 (NM_032131.3,1818-1836).
ccaggctcgtgaacaattt

SEQ ID NO: 398017 - DNA, 19 bp, Homo sapiens
  siRNA target sequence for ARMC2 (NM_032131.3,1822-1840).
gctcgtgaacaattttcca

SEQ ID NO: 398018 - DNA, 19 bp, Homo sapiens
  siRNA target sequence for ARMC2 (NM_032131.3,1823-1841).
ctcgtgaacaattttccaa

SEQ ID NO: 398019 - DNA, 19 bp, Homo sapiens
  siRNA target sequence for ARMC2 (NM_032131.3,1862-1880).
ctctgctgtcattattcca

SEQ ID NO: 398020 - DNA, 19 bp, Homo sapiens
  siRNA target sequence for ARMC2 (NM_032131.3,1967-1985).
cagaggacgtgctcatcaa

SEQ ID NO: 398021 - DNA, 19 bp, Homo sapiens
  siRNA target sequence for ARMC2 (NM_032131.3,2088-2106).
caagtcacttgatgattgt

SEQ ID NO: 398022 - DNA, 19 bp, Homo sapiens
  siRNA target sequence for ARMC2 (NM_032131.3,2129-2147).
cagcgacaatcaacaattt

SEQ ID NO: 398023 - DNA, 19 bp, Homo sapiens
  siRNA target sequence for ARMC2 (NM_032131.3,2131-2149).
gcgacaatcaacaatttat

SEQ ID NO: 398024 - DNA, 19 bp, Homo sapiens
  siRNA target sequence for ARMC2 (NM_032131.3,2135-2153).
caatcaacaatttatctta

SEQ ID NO: 398025 - DNA, 19 bp, Homo sapiens
  siRNA target sequence for ARMC2 (NM_032131.3,2260-2278).
cgtgttttcggaaatctct

SEQ ID NO: 398026 - DNA, 19 bp, Homo sapiens
  siRNA target sequence for ARMC2 (NM_032131.3,2350-2368).
gctcagcatcaggatatct

SEQ ID NO: 398027 - DNA, 19 bp, Homo sapiens
  siRNA target sequence for ARMC2 (NM_032131.3,2356-2374).
catcaggatatctgctttt

SEQ ID NO: 398028 - DNA, 19 bp, Homo sapiens
  siRNA target sequence for ARMC2 (NM_032131.3,2394-2412).
caatctcactgtggataaa

SEQ ID NO: 398029 - DNA, 19 bp, Homo sapiens
  siRNA target sequence for ARMC2 (NM_032131.3,2413-2431).
gacaagcgtgtcatcttga

SEQ ID NO: 398030 - DNA, 19 bp, Homo sapiens
  siRNA target sequence for ARMC2 (NM_032131.3,2441-2459).
gtggcattaaaaagttagt

SEQ ID NO: 398031 - DNA, 19 bp, Homo sapiens
  siRNA target sequence for ARMC2 (NM_032131.3,2454-2472).
gttagtggactgtttaaga

SEQ ID NO: 398032 - DNA, 19 bp, Homo sapiens
  siRNA target sequence for ARMC2 (NM_032131.3,2502-2520).
ctgcttggtttgtaaaact

SEQ ID NO: 398033 - DNA, 19 bp, Homo sapiens
  siRNA target sequence for ARMC2 (NM_032131.3,2546-2564).
ctaatgcttcgtcatgttt

SEQ ID NO: 398034 - DNA, 19 bp, Homo sapiens
  siRNA target sequence for ARMC2 (NM_032131.3,2579-2597).
ccaacacactcttactctt

SEQ ID NO: 398035 - DNA, 19 bp, Homo sapiens
  siRNA target sequence for ARMC2 (NM_032131.3,2598-2616).
gctctcatcatttttagat

SEQ ID NO: 398036 - DNA, 19 bp, Homo sapiens
  siRNA target sequence for ARMC2 (NM_032131.3,2639-2657).
gttttgatccagacctaaa

SEQ ID NO: 398037 - DNA, 19 bp, Homo sapiens
  siRNA target sequence for ARMC2 (NM_032131.3,2644-2662).
gatccagacctaaaaaact

SEQ ID NO: 398038 - DNA, 19 bp, Homo sapiens
  siRNA target sequence for ARMC2 (NM_032131.3,2698-2716).
gtggcacagcagcttctaa

SEQ ID NO: 398039 - DNA, 19 bp, Homo sapiens
  siRNA target sequence for ARMC2 (NM_032131.3,2710-2728).
cttctaaaccgaattcaga

SEQ ID NO: 398040 - DNA, 19 bp, Homo sapiens
  siRNA target sequence for DKFZP434A1315 (NM_032132.2,135-153).
ccatgagtgcactggtatt

SEQ ID NO: 398041 - DNA, 19 bp, Homo sapiens
  siRNA target sequence for DKFZP434A1315 (NM_032132.2,148-166).
ggtatttcccaataagata

SEQ ID NO: 398042 - DNA, 19 bp, Homo sapiens
  siRNA target sequence for DKFZP434A1315 (NM_032132.2,157-175).
caataagatatcaactgaa

SEQ ID NO: 398043 - DNA, 19 bp, Homo sapiens
  siRNA target sequence for DKFZP434A1315 (NM_032132.2,168-186).
caactgaacaccagtcttt

SEQ ID NO: 398044 - DNA, 19 bp, Homo sapiens
  siRNA target sequence for DKFZP434A1315 (NM_032132.2,199-217).
gaggcttctagcagtttca

SEQ ID NO: 398045 - DNA, 19 bp, Homo sapiens
  siRNA target sequence for DKFZP434A1315 (NM_032132.2,201-219).
ggcttctagcagtttcagt

SEQ ID NO: 398046 - DNA, 19 bp, Homo sapiens
  siRNA target sequence for DKFZP434A1315 (NM_032132.2,202-220).
gcttctagcagtttcagta

SEQ ID NO: 398047 - DNA, 19 bp, Homo sapiens
  siRNA target sequence for DKFZP434A1315 (NM_032132.2,212-230).
gtttcagtatcctgtatca

SEQ ID NO: 398048 - DNA, 19 bp, Homo sapiens
  siRNA target sequence for DKFZP434A1315 (NM_032132.2,218-236).
gtatcctgtatcacgtatt

SEQ ID NO: 398049 - DNA, 19 bp, Homo sapiens
  siRNA target sequence for DKFZP434A1315 (NM_032132.2,250-268).
cccagaatgcgcttatgga

SEQ ID NO: 398050 - DNA, 19 bp, Homo sapiens
  siRNA target sequence for DKFZP434A1315 (NM_032132.2,258-276).
gcgcttatggaacaagata

SEQ ID NO: 398051 - DNA, 19 bp, Homo sapiens
  siRNA target sequence for DKFZP434A1315 (NM_032132.2,259-277).
cgcttatggaacaagatat

SEQ ID NO: 398052 - DNA, 19 bp, Homo sapiens
  siRNA target sequence for DKFZP434A1315 (NM_032132.2,267-285).
gaacaagatatctagatga

SEQ ID NO: 398053 - DNA, 19 bp, Homo sapiens
  siRNA target sequence for DKFZP434A1315 (NM_032132.2,287-305).
ctttgtgtcaaaatactga

SEQ ID NO: 398054 - DNA, 19 bp, Homo sapiens
  siRNA target sequence for DKFZP434A1315 (NM_032132.2,322-340).
cccaggatctacacagtta

SEQ ID NO: 398055 - DNA, 19 bp, Homo sapiens
  siRNA target sequence for DKFZP434A1315 (NM_032132.2,326-344).
ggatctacacagttagtga

SEQ ID NO: 398056 - DNA, 19 bp, Homo sapiens
  siRNA target sequence for DKFZP434A1315 (NM_032132.2,327-345).
gatctacacagttagtgaa

SEQ ID NO: 398057 - DNA, 19 bp, Homo sapiens
  siRNA target sequence for DKFZP434A1315 (NM_032132.2,333-351).
cacagttagtgaaatggat

SEQ ID NO: 398058 - DNA, 19 bp, Homo sapiens
  siRNA target sequence for DKFZP434A1315 (NM_032132.2,357-375).
gatgttatgatgctttaca

SEQ ID NO: 398059 - DNA, 19 bp, Homo sapiens
  siRNA target sequence for DKFZP434A1315 (NM_032132.2,360-378).
gttatgatgctttacagaa

SEQ ID NO: 398060 - DNA, 19 bp, Homo sapiens
  siRNA target sequence for DKFZP434A1315 (NM_032132.2,395-413).
gttgttctagctgtataca

SEQ ID NO: 398061 - DNA, 19 bp, Homo sapiens
  siRNA target sequence for DKFZP434A1315 (NM_032132.2,463-481).
caaatacaccaataatgga

SEQ ID NO: 398062 - DNA, 19 bp, Homo sapiens
  siRNA target sequence for DKFZP434A1315 (NM_032132.2,485-503).
ctcatggacttcataagta

SEQ ID NO: 398063 - DNA, 19 bp, Homo sapiens
  siRNA target sequence for DKFZP434A1315 (NM_032132.2,487-505).
catggacttcataagtaaa

SEQ ID NO: 398064 - DNA, 19 bp, Homo sapiens
  siRNA target sequence for DKFZP434A1315 (NM_032132.2,560-578).
ctcctcattcgcaagattt

SEQ ID NO: 398065 - DNA, 19 bp, Homo sapiens
  siRNA target sequence for DKFZP434A1315 (NM_032132.2,562-580).
cctcattcgcaagatttat

SEQ ID NO: 398066 - DNA, 19 bp, Homo sapiens
  siRNA target sequence for DKFZP434A1315 (NM_032132.2,563-581).
ctcattcgcaagatttata

SEQ ID NO: 398067 - DNA, 19 bp, Homo sapiens
  siRNA target sequence for DKFZP434A1315 (NM_032132.2,569-587).
cgcaagatttatatcctaa

SEQ ID NO: 398068 - DNA, 19 bp, Homo sapiens
  siRNA target sequence for DKFZP434A1315 (NM_032132.2,570-588).
gcaagatttatatcctaat

SEQ ID NO: 398069 - DNA, 19 bp, Homo sapiens
  siRNA target sequence for DKFZP434A1315 (NM_032132.2,598-616).
ggggcctttacctaatgat

SEQ ID NO: 398070 - DNA, 19 bp, Homo sapiens
  siRNA target sequence for DKFZP434A1315 (NM_032132.2,627-645).
ccatgaaacttttttacta

SEQ ID NO: 398071 - DNA, 19 bp, Homo sapiens
  siRNA target sequence for DKFZP434A1315 (NM_032132.2,716-734).
gaaggggaacctatgtatt

SEQ ID NO: 398072 - DNA, 19 bp, Homo sapiens
  siRNA target sequence for DKFZP434A1315 (NM_032132.2,719-737).
ggggaacctatgtatttaa

SEQ ID NO: 398073 - DNA, 19 bp, Homo sapiens
  siRNA target sequence for DKFZP434A1315 (NM_032132.2,720-738).
gggaacctatgtatttaaa

SEQ ID NO: 398074 - DNA, 19 bp, Homo sapiens
  siRNA target sequence for DKFZP434A1315 (NM_032132.2,721-739).
ggaacctatgtatttaaat

SEQ ID NO: 398075 - DNA, 19 bp, Homo sapiens
  siRNA target sequence for DKFZP434A1315 (NM_032132.2,749-767).
gtctcaacaccttttcaca

SEQ ID NO: 398076 - DNA, 19 bp, Homo sapiens
  siRNA target sequence for DKFZP434A1315 (NM_032132.2,786-804).
ccactgagagagaacgaat

SEQ ID NO: 398077 - DNA, 19 bp, Homo sapiens
  siRNA target sequence for DKFZP434A1315 (NM_032132.2,890-908).
gaacaggagcattatacaa

SEQ ID NO: 398078 - DNA, 19 bp, Homo sapiens
  siRNA target sequence for DKFZP434A1315 (NM_032132.2,895-913).
ggagcattatacaagtgat

SEQ ID NO: 398079 - DNA, 19 bp, Homo sapiens
  siRNA target sequence for DKFZP434A1315 (NM_032132.2,898-916).
gcattatacaagtgatgat

SEQ ID NO: 398080 - DNA, 19 bp, Homo sapiens
  siRNA target sequence for DKFZP434A1315 (NM_032132.2,899-917).
cattatacaagtgatgatt

SEQ ID NO: 398081 - DNA, 19 bp, Homo sapiens
  siRNA target sequence for DKFZP434A1315 (NM_032132.2,1052-1070).
caggttgagcagttagtca

SEQ ID NO: 398082 - DNA, 19 bp, Homo sapiens
  siRNA target sequence for DKFZP434A1315 (NM_032132.2,1054-1072).
ggttgagcagttagtcaat

SEQ ID NO: 398083 - DNA, 19 bp, Homo sapiens
  siRNA target sequence for DKFZP434A1315 (NM_032132.2,1055-1073).
gttgagcagttagtcaata

SEQ ID NO: 398084 - DNA, 19 bp, Homo sapiens
  siRNA target sequence for DKFZP434A1315 (NM_032132.2,1093-1111).
gtctgaaagcaaaacaaga

SEQ ID NO: 398085 - DNA, 19 bp, Homo sapiens
  siRNA target sequence for DKFZP434A1315 (NM_032132.2,1145-1163).
ggaaatcaaccagtaaaat

SEQ ID NO: 398086 - DNA, 19 bp, Homo sapiens
  siRNA target sequence for DKFZP434A1315 (NM_032132.2,1264-1282).
gtttagtgaaccaaaggaa

SEQ ID NO: 398087 - DNA, 19 bp, Homo sapiens
  siRNA target sequence for DKFZp434N1415 (NM_032133.2,79-97).
ggcaccatgaagtctctaa

SEQ ID NO: 398088 - DNA, 19 bp, Homo sapiens
  siRNA target sequence for DKFZp434N1415 (NM_032133.2,103-121).
gattcccgcctcagaataa

SEQ ID NO: 398089 - DNA, 19 bp, Homo sapiens
  siRNA target sequence for DKFZp434N1415 (NM_032133.2,141-159).
ggcctcagagaatgtcaaa

SEQ ID NO: 398090 - DNA, 19 bp, Homo sapiens
  siRNA target sequence for DKFZp434N1415 (NM_032133.2,253-271).
cttgccttggccattaaga

SEQ ID NO: 398091 - DNA, 19 bp, Homo sapiens
  siRNA target sequence for DKFZp434N1415 (NM_032133.2,279-297).
cttgaaggagcaacacatt

SEQ ID NO: 398092 - DNA, 19 bp, Homo sapiens
  siRNA target sequence for DKFZp434N1415 (NM_032133.2,294-312).
cattcctcgccttactgaa

SEQ ID NO: 398093 - DNA, 19 bp, Homo sapiens
  siRNA target sequence for DKFZp434N1415 (NM_032133.2,299-317).
ctcgccttactgaaaagga

SEQ ID NO: 398094 - DNA, 19 bp, Homo sapiens
  siRNA target sequence for DKFZp434N1415 (NM_032133.2,325-343).
cgtgtcatcacccagaaat

SEQ ID NO: 398095 - DNA, 19 bp, Homo sapiens
  siRNA target sequence for DKFZp434N1415 (NM_032133.2,501-519).
ggggagtctccaggatttt

SEQ ID NO: 398096 - DNA, 19 bp, Homo sapiens
  siRNA target sequence for DKFZp434N1415 (NM_032133.2,553-571).
ctggctgagcggataccta

SEQ ID NO: 398097 - DNA, 19 bp, Homo sapiens
  siRNA target sequence for DKFZp434N1415 (NM_032133.2,987-1005).
ccgggtggagacaggatta

SEQ ID NO: 398098 - DNA, 19 bp, Homo sapiens
  siRNA target sequence for DKFZp434N1415 (NM_032133.2,1010-1028).
cccagagggacgcttcata

SEQ ID NO: 398099 - DNA, 19 bp, Homo sapiens
  siRNA target sequence for DKFZp434N1415 (NM_032133.2,1173-1191).
ggaagactacacagtgttt

SEQ ID NO: 398100 - DNA, 19 bp, Homo sapiens
  siRNA target sequence for DKFZp434N1415 (NM_032133.2,1214-1232).
ctgaagacacagcatactt

SEQ ID NO: 398101 - DNA, 19 bp, Homo sapiens
  siRNA target sequence for DKFZp434N1415 (NM_032133.2,1311-1329).
ctggatcagaggcagtaat

SEQ ID NO: 398102 - DNA, 19 bp, Homo sapiens
  siRNA target sequence for DKFZp434N1415 (NM_032133.2,1426-1444).
ggcaccgtggccatttggt

SEQ ID NO: 398103 - DNA, 19 bp, Homo sapiens
  siRNA target sequence for DKFZp434N1415 (NM_032133.2,1427-1445).
gcaccgtggccatttggta

SEQ ID NO: 398104 - DNA, 19 bp, Homo sapiens
  siRNA target sequence for DKFZp434N1415 (NM_032133.2,1428-1446).
caccgtggccatttggtat

SEQ ID NO: 398105 - DNA, 19 bp, Homo sapiens
  siRNA target sequence for DKFZp434N1415 (NM_032133.2,1464-1482).
ccagccggacactttccaa

SEQ ID NO: 398106 - DNA, 19 bp, Homo sapiens
  siRNA target sequence for DKFZp434N1415 (NM_032133.2,1499-1517).
ggatgcagcgattttactt

SEQ ID NO: 398107 - DNA, 19 bp, Homo sapiens
  siRNA target sequence for DKFZp434N1415 (NM_032133.2,1500-1518).
gatgcagcgattttacttt

SEQ ID NO: 398108 - DNA, 19 bp, Homo sapiens
  siRNA target sequence for DKFZp434N1415 (NM_032133.2,1504-1522).
cagcgattttactttgaca

SEQ ID NO: 398109 - DNA, 19 bp, Homo sapiens
  siRNA target sequence for DKFZp434N1415 (NM_032133.2,1521-1539).
caaccgggaaggtgtgatt

SEQ ID NO: 398110 - DNA, 19 bp, Homo sapiens
  siRNA target sequence for DKFZp434N1415 (NM_032133.2,1603-1621).
gaattttgggagtttcgaa

SEQ ID NO: 398111 - DNA, 19 bp, Homo sapiens
  siRNA target sequence for DKFZp434N1415 (NM_032133.2,1618-1636).
cgaacccatcctactctat

SEQ ID NO: 398112 - DNA, 19 bp, Homo sapiens
  siRNA target sequence for DKFZp434N1415 (NM_032133.2,1619-1637).
gaacccatcctactctatt

SEQ ID NO: 398113 - DNA, 19 bp, Homo sapiens
  siRNA target sequence for DKFZp434N1415 (NM_032133.2,1813-1831).
cctgtggatgcctatctca

SEQ ID NO: 398114 - DNA, 19 bp, Homo sapiens
  siRNA target sequence for DKFZp434N1415 (NM_032133.2,1842-1860).
cttgttccggcacagaaat

SEQ ID NO: 398115 - DNA, 19 bp, Homo sapiens
  siRNA target sequence for DKFZp434N1415 (NM_032133.2,1845-1863).
gttccggcacagaaatcct

SEQ ID NO: 398116 - DNA, 19 bp, Homo sapiens
  siRNA target sequence for DKFZp434N1415 (NM_032133.2,1856-1874).
gaaatcctccgctgcatta

SEQ ID NO: 398117 - DNA, 19 bp, Homo sapiens
  siRNA target sequence for DKFZp434N1415 (NM_032133.2,1906-1924).
ctgtggcgccagtacatga

SEQ ID NO: 398118 - DNA, 19 bp, Homo sapiens
  siRNA target sequence for DKFZp434N1415 (NM_032133.2,2014-2032).
ctgttaccacgctttagga

SEQ ID NO: 398119 - DNA, 19 bp, Homo sapiens
  siRNA target sequence for DKFZp434N1415 (NM_032133.2,2034-2052).
ccccatctccgaaactcaa

SEQ ID NO: 398120 - DNA, 19 bp, Homo sapiens
  siRNA target sequence for DKFZp434N1415 (NM_032133.2,2294-2312).
cgttgatgaggctcaacaa

SEQ ID NO: 398121 - DNA, 19 bp, Homo sapiens
  siRNA target sequence for DKFZp434N1415 (NM_032133.2,2295-2313).
gttgatgaggctcaacaaa

SEQ ID NO: 398122 - DNA, 19 bp, Homo sapiens
  siRNA target sequence for DKFZp434N1415 (NM_032133.2,2359-2377).
ctcctgcaccagatgtgtt

SEQ ID NO: 398123 - DNA, 19 bp, Homo sapiens
  siRNA target sequence for DKFZp434N1415 (NM_032133.2,2452-2470).
gagaaggagaccatctatt

SEQ ID NO: 398124 - DNA, 19 bp, Homo sapiens
  siRNA target sequence for DKFZp434N1415 (NM_032133.2,2504-2522).
ctcctatcatggaagtgaa

SEQ ID NO: 398125 - DNA, 19 bp, Homo sapiens
  siRNA target sequence for DKFZp434N1415 (NM_032133.2,2664-2682).
ggcaaaggatgacaagaaa

SEQ ID NO: 398126 - DNA, 19 bp, Homo sapiens
  siRNA target sequence for DKFZp434N1415 (NM_032133.2,2860-2878).
gagctcagccccataaaga

SEQ ID NO: 398127 - DNA, 19 bp, Homo sapiens
  siRNA target sequence for DKFZP434P0316 (NM_032134.1,230-248).
gggttgatgaactagagaa

SEQ ID NO: 398128 - DNA, 19 bp, Homo sapiens
  siRNA target sequence for DKFZP434P0316 (NM_032134.1,288-306).
ccggaagctgagtttggtt

SEQ ID NO: 398129 - DNA, 19 bp, Homo sapiens
  siRNA target sequence for DKFZP434P0316 (NM_032134.1,385-403).
gcgggctcagaaacactta

SEQ ID NO: 398130 - DNA, 19 bp, Homo sapiens
  siRNA target sequence for DKFZP434P0316 (NM_032134.1,386-404).
cgggctcagaaacacttat

SEQ ID NO: 398131 - DNA, 19 bp, Homo sapiens
  siRNA target sequence for DKFZP434P0316 (NM_032134.1,394-412).
gaaacacttatgggatttt

SEQ ID NO: 398132 - DNA, 19 bp, Homo sapiens
  siRNA target sequence for DKFZP434P0316 (NM_032134.1,420-438).
cggagggttcacttcctta

SEQ ID NO: 398133 - DNA, 19 bp, Homo sapiens
  siRNA target sequence for DKFZP434P0316 (NM_032134.1,424-442).
gggttcacttccttaacat

SEQ ID NO: 398134 - DNA, 19 bp, Homo sapiens
  siRNA target sequence for DKFZP434P0316 (NM_032134.1,426-444).
gttcacttccttaacatca

SEQ ID NO: 398135 - DNA, 19 bp, Homo sapiens
  siRNA target sequence for DKFZP434P0316 (NM_032134.1,473-491).
ccaagcaaccaagtattga

SEQ ID NO: 398136 - DNA, 19 bp, Homo sapiens
  siRNA target sequence for DKFZP434P0316 (NM_032134.1,658-676).
cgactccatcagtcttcta

SEQ ID NO: 398137 - DNA, 19 bp, Homo sapiens
  siRNA target sequence for DKFZP434P0316 (NM_032134.1,661-679).
ctccatcagtcttctacat

SEQ ID NO: 398138 - DNA, 19 bp, Homo sapiens
  siRNA target sequence for DKFZP434P0316 (NM_032134.1,729-747).
ctcgacacaaccaagaaga

SEQ ID NO: 398139 - DNA, 19 bp, Homo sapiens
  siRNA target sequence for DKFZP434P0316 (NM_032134.1,731-749).
cgacacaaccaagaagaaa

SEQ ID NO: 398140 - DNA, 19 bp, Homo sapiens
  siRNA target sequence for DKFZP434P0316 (NM_032134.1,820-838).
cagagtcaggtccatctaa

SEQ ID NO: 398141 - DNA, 19 bp, Homo sapiens
  siRNA target sequence for DKFZP434P0316 (NM_032134.1,870-888).
catgaatcagcctggatta

SEQ ID NO: 398142 - DNA, 19 bp, Homo sapiens
  siRNA target sequence for DKFZP434P0316 (NM_032134.1,963-981).
ggatgatcgggaattgata

SEQ ID NO: 398143 - DNA, 19 bp, Homo sapiens
  siRNA target sequence for DKFZP434P0316 (NM_032134.1,967-985).
gatcgggaattgataccat

SEQ ID NO: 398144 - DNA, 19 bp, Homo sapiens
  siRNA target sequence for DKFZP434P0316 (NM_032134.1,971-989).
gggaattgataccatttgt

SEQ ID NO: 398145 - DNA, 19 bp, Homo sapiens
  siRNA target sequence for DKFZP434P0316 (NM_032134.1,1098-1116).
gcatggtatgacatttcct

SEQ ID NO: 398146 - DNA, 19 bp, Homo sapiens
  siRNA target sequence for DKFZP434P0316 (NM_032134.1,1156-1174).
cagcgtggatgtgtaatat

SEQ ID NO: 398147 - DNA, 19 bp, Homo sapiens
  siRNA target sequence for DKFZP434P0316 (NM_032134.1,1158-1176).
gcgtggatgtgtaatatca

SEQ ID NO: 398148 - DNA, 19 bp, Homo sapiens
  siRNA target sequence for DKFZP434P0316 (NM_032134.1,1182-1200).
gggtcagcaaggactagta

SEQ ID NO: 398149 - DNA, 19 bp, Homo sapiens
  siRNA target sequence for DKFZP434P0316 (NM_032134.1,1233-1251).
gcctgtcgtcgatcaacat

SEQ ID NO: 398150 - DNA, 19 bp, Homo sapiens
  siRNA target sequence for DKFZP434P0316 (NM_032134.1,1294-1312).
cctggtttgatgccaatta

SEQ ID NO: 398151 - DNA, 19 bp, Homo sapiens
  siRNA target sequence for DKFZP434P0316 (NM_032134.1,1392-1410).
gatccagtctggcagattt

SEQ ID NO: 398152 - DNA, 19 bp, Homo sapiens
  siRNA target sequence for DKFZP434P0316 (NM_032134.1,1662-1680).
ggtacagcctggtgtagat

SEQ ID NO: 398153 - DNA, 19 bp, Homo sapiens
  siRNA target sequence for DKFZP434P0316 (NM_032134.1,1692-1710).
ggtccaacctggcagattt

SEQ ID NO: 398154 - DNA, 19 bp, Homo sapiens
  siRNA target sequence for DKFZP434P0316 (NM_032134.1,2415-2433).
ggtgcagcctggaataggt

SEQ ID NO: 398155 - DNA, 19 bp, Homo sapiens
  siRNA target sequence for DKFZP434P0316 (NM_032134.1,2597-2615).
gacaacctggtgcatatca

SEQ ID NO: 398156 - DNA, 19 bp, Homo sapiens
  siRNA target sequence for DKFZP434P0316 (NM_032134.1,2668-2686).
gcagattctacaggtttta

SEQ ID NO: 398157 - DNA, 19 bp, Homo sapiens
  siRNA target sequence for DKFZP434P0316 (NM_032134.1,2669-2687).
cagattctacaggttttat

SEQ ID NO: 398158 - DNA, 19 bp, Homo sapiens
  siRNA target sequence for DKFZP434P0316 (NM_032134.1,2671-2689).
gattctacaggttttatat

SEQ ID NO: 398159 - DNA, 19 bp, Homo sapiens
  siRNA target sequence for DKFZP434P0316 (NM_032134.1,2675-2693).
ctacaggttttatatcagt

SEQ ID NO: 398160 - DNA, 19 bp, Homo sapiens
  siRNA target sequence for DKFZP434P0316 (NM_032134.1,2690-2708).
cagtacgtccatatcaaca

SEQ ID NO: 398161 - DNA, 19 bp, Homo sapiens
  siRNA target sequence for DKFZP434P0316 (NM_032134.1,2805-2823).
ggtaccaccagaaacttat

SEQ ID NO: 398162 - DNA, 19 bp, Homo sapiens
  siRNA target sequence for DKFZP434P0316 (NM_032134.1,2819-2837).
cttatcagcaaggtttgat

SEQ ID NO: 398163 - DNA, 19 bp, Homo sapiens
  siRNA target sequence for DKFZP434P0316 (NM_032134.1,2933-2951).
gtgagcatgaccaggtata

SEQ ID NO: 398164 - DNA, 19 bp, Homo sapiens
  siRNA target sequence for DKFZP434P0316 (NM_032134.1,2963-2981).
ctcagcatggccatgcttt

SEQ ID NO: 398165 - DNA, 19 bp, Homo sapiens
  siRNA target sequence for DKFZP434P0316 (NM_032134.1,2992-3010).
gacagtcatgattcaatgt

SEQ ID NO: 398166 - DNA, 19 bp, Homo sapiens
  siRNA target sequence for DKFZP434P0316 (NM_032134.1,3022-3040).
cgtggcccagggtatctaa

SEQ ID NO: 398167 - DNA, 19 bp, Homo sapiens
  siRNA target sequence for DKFZP434P0316 (NM_032134.1,3064-3082).
ggtttggatccaaatagaa

SEQ ID NO: 398168 - DNA, 19 bp, Homo sapiens
  siRNA target sequence for DKFZP434P0316 (NM_032134.1,3089-3107).
cctcggaccgacatggaat

SEQ ID NO: 398169 - DNA, 19 bp, Homo sapiens
  siRNA target sequence for DKFZP434P0316 (NM_032134.1,3090-3108).
ctcggaccgacatggaatt

SEQ ID NO: 398170 - DNA, 19 bp, Homo sapiens
  siRNA target sequence for DKFZP434P0316 (NM_032134.1,3093-3111).
ggaccgacatggaattcct

SEQ ID NO: 398171 - DNA, 19 bp, Homo sapiens
  siRNA target sequence for DKFZP434P0316 (NM_032134.1,3159-3177).
ctccgtcgaccgagtctta

SEQ ID NO: 398172 - DNA, 19 bp, Homo sapiens
  siRNA target sequence for DKFZP434P0316 (NM_032134.1,3162-3180).
cgtcgaccgagtcttatca

SEQ ID NO: 398173 - DNA, 19 bp, Homo sapiens
  siRNA target sequence for DKFZP434P0316 (NM_032134.1,3210-3228).
gagtgagcgacgcaattca

SEQ ID NO: 398174 - DNA, 19 bp, Homo sapiens
  siRNA target sequence for DKFZP434P0316 (NM_032134.1,3212-3230).
gtgagcgacgcaattcact

SEQ ID NO: 398175 - DNA, 19 bp, Homo sapiens
  siRNA target sequence for DKFZP434P0316 (NM_032134.1,3229-3247).
ctgcgtagaatgagttcta

SEQ ID NO: 398176 - DNA, 19 bp, Homo sapiens
  siRNA target sequence for DKFZP434P0316 (NM_032134.1,3231-3249).
gcgtagaatgagttctagt

SEQ ID NO: 398177 - DNA, 19 bp, Homo sapiens
  siRNA target sequence for DKFZP434P0316 (NM_032134.1,3232-3250).
cgtagaatgagttctagtt

SEQ ID NO: 398178 - DNA, 19 bp, Homo sapiens
  siRNA target sequence for DKFZP434P0316 (NM_032134.1,3233-3251).
gtagaatgagttctagttt

SEQ ID NO: 398179 - DNA, 19 bp, Homo sapiens
  siRNA target sequence for DKFZP434P0316 (NM_032134.1,3255-3273).
cacggcagtggagacattt

SEQ ID NO: 398180 - DNA, 19 bp, Homo sapiens
  siRNA target sequence for DKFZP434P0316 (NM_032134.1,3307-3325).
gggctaaaggagagtatga

SEQ ID NO: 398181 - DNA, 19 bp, Homo sapiens
  siRNA target sequence for DKFZP434P0316 (NM_032134.1,3584-3602).
ccgtggctgacatagaaaa

SEQ ID NO: 398182 - DNA, 19 bp, Homo sapiens
  siRNA target sequence for DKFZP434P0316 (NM_032134.1,3642-3660).
ggctgccatggaaaattct

SEQ ID NO: 398183 - DNA, 19 bp, Homo sapiens
  siRNA target sequence for DKFZP434P0316 (NM_032134.1,3699-3717).
caagctcaggatgatcatt

SEQ ID NO: 398184 - DNA, 19 bp, Homo sapiens
  siRNA target sequence for DKFZP434P0316 (NM_032134.1,3703-3721).
ctcaggatgatcattgaga

SEQ ID NO: 398185 - DNA, 19 bp, Homo sapiens
  siRNA target sequence for DKFZP434P0316 (NM_032134.1,4039-4057).
gaccatcggcagaaacaga

SEQ ID NO: 398186 - DNA, 19 bp, Homo sapiens
  siRNA target sequence for DKFZP434P0316 (NM_032134.1,4082-4100).
gtctggagaagctcgaaaa

SEQ ID NO: 398187 - DNA, 19 bp, Homo sapiens
  siRNA target sequence for DKFZP434P0316 (NM_032134.1,4176-4194).
gagccgtgtccagtttgat

SEQ ID NO: 398188 - DNA, 19 bp, Homo sapiens
  siRNA target sequence for DKFZP434P0316 (NM_032134.1,4345-4363).
ctggaggatcggtggaaat

SEQ ID NO: 398189 - DNA, 19 bp, Homo sapiens
  siRNA target sequence for DKFZP434P0316 (NM_032134.1,4553-4571).
cctacacggtgtttgaact

SEQ ID NO: 398190 - DNA, 19 bp, Homo sapiens
  siRNA target sequence for DKFZP434P0316 (NM_032134.1,4813-4831).
gctgattacacctactcaa

SEQ ID NO: 398191 - DNA, 19 bp, Homo sapiens
  siRNA target sequence for DKFZP434P0316 (NM_032134.1,5152-5170).
ggcaacacctcagaaagat

SEQ ID NO: 398192 - DNA, 19 bp, Homo sapiens
  siRNA target sequence for DKFZP434F1017 (NM_032135.2,283-301).
ccagcaaactgatgtaata

SEQ ID NO: 398193 - DNA, 19 bp, Homo sapiens
  siRNA target sequence for DKFZP434F1017 (NM_032135.2,316-334).
catggccataccaaaatca

SEQ ID NO: 398194 - DNA, 19 bp, Homo sapiens
  siRNA target sequence for DKFZP434F1017 (NM_032135.2,342-360).
ccaaagctacccatcgtat

SEQ ID NO: 398195 - DNA, 19 bp, Homo sapiens
  siRNA target sequence for DKFZP434F1017 (NM_032135.2,343-361).
caaagctacccatcgtatt

SEQ ID NO: 398196 - DNA, 19 bp, Homo sapiens
  siRNA target sequence for DKFZP434F1017 (NM_032135.2,347-365).
gctacccatcgtattggta

SEQ ID NO: 398197 - DNA, 19 bp, Homo sapiens
  siRNA target sequence for DKFZP434F1017 (NM_032135.2,348-366).
ctacccatcgtattggtaa

SEQ ID NO: 398198 - DNA, 19 bp, Homo sapiens
  siRNA target sequence for DKFZP434F1017 (NM_032135.2,352-370).
ccatcgtattggtaatact

SEQ ID NO: 398199 - DNA, 19 bp, Homo sapiens
  siRNA target sequence for DKFZP434F1017 (NM_032135.2,353-371).
catcgtattggtaatactt

SEQ ID NO: 398200 - DNA, 19 bp, Homo sapiens
  siRNA target sequence for DKFZP434F1017 (NM_032135.2,407-425).
gagtctattagagtatctt

SEQ ID NO: 398201 - DNA, 19 bp, Homo sapiens
  siRNA target sequence for DKFZP434F1017 (NM_032135.2,409-427).
gtctattagagtatcttct

SEQ ID NO: 398202 - DNA, 19 bp, Homo sapiens
  siRNA target sequence for DKFZP434F1017 (NM_032135.2,457-475).
gcatggacaggaaatgact

SEQ ID NO: 398203 - DNA, 19 bp, Homo sapiens
  siRNA target sequence for DKFZP434F1017 (NM_032135.2,542-560).
gtggtacctgaagaaaagt

SEQ ID NO: 398204 - DNA, 19 bp, Homo sapiens
  siRNA target sequence for DKFZP434F1017 (NM_032135.2,628-646).
cataccttcagttcaacta

SEQ ID NO: 398205 - DNA, 19 bp, Homo sapiens
  siRNA target sequence for DKFZP434F1017 (NM_032135.2,680-698).
ggatactggaccatgatga

SEQ ID NO: 398206 - DNA, 19 bp, Homo sapiens
  siRNA target sequence for DKFZP434F1017 (NM_032135.2,681-699).
gatactggaccatgatgaa

SEQ ID NO: 398207 - DNA, 19 bp, Homo sapiens
  siRNA target sequence for DKFZP434F1017 (NM_032135.2,697-715).
gaacatcccccctgtagaa

SEQ ID NO: 398208 - DNA, 19 bp, Homo sapiens
  siRNA target sequence for DKFZP434F1017 (NM_032135.2,727-745).
ggaacaacagacatacttt

SEQ ID NO: 398209 - DNA, 19 bp, Homo sapiens
  siRNA target sequence for DKFZP434F1017 (NM_032135.2,734-752).
cagacatactttagtgaat

SEQ ID NO: 398210 - DNA, 19 bp, Homo sapiens
  siRNA target sequence for DKFZP434F1017 (NM_032135.2,772-790).
caggccagatagttcttct

SEQ ID NO: 398211 - DNA, 19 bp, Homo sapiens
  siRNA target sequence for DKFZP434F1017 (NM_032135.2,779-797).
gatagttcttctacaaagt

SEQ ID NO: 398212 - DNA, 19 bp, Homo sapiens
  siRNA target sequence for DKFZP434F1017 (NM_032135.2,806-824).
gatgccctgaaacataaat

SEQ ID NO: 398213 - DNA, 19 bp, Homo sapiens
  siRNA target sequence for DKFZP434F1017 (NM_032135.2,809-827).
gccctgaaacataaatcgt

SEQ ID NO: 398214 - DNA, 19 bp, Homo sapiens
  siRNA target sequence for DKFZP434F1017 (NM_032135.2,826-844).
gtcgggaaagatttttgct

SEQ ID NO: 398215 - DNA, 19 bp, Homo sapiens
  siRNA target sequence for DKFZP434F1017 (NM_032135.2,887-905).
gaaattgggcagaaaaata

SEQ ID NO: 398216 - DNA, 19 bp, Homo sapiens
  siRNA target sequence for DKFZP434F1017 (NM_032135.2,1055-1073).
gaaaaattcccagctaaaa

SEQ ID NO: 398217 - DNA, 19 bp, Homo sapiens
  siRNA target sequence for DKFZP434F1017 (NM_032135.2,1193-1211).
gttgcggagaattctgtta

SEQ ID NO: 398218 - DNA, 19 bp, Homo sapiens
  siRNA target sequence for DKFZP434F1017 (NM_032135.2,1422-1440).
ggtctccctcagcacaaaa

SEQ ID NO: 398219 - DNA, 19 bp, Homo sapiens
  siRNA target sequence for DKFZP434F1017 (NM_032135.2,1956-1974).
cagctaagggagtttctat

SEQ ID NO: 398220 - DNA, 19 bp, Homo sapiens
  siRNA target sequence for DKFZP434F1017 (NM_032135.2,1959-1977).
ctaagggagtttctataga

SEQ ID NO: 398221 - DNA, 19 bp, Homo sapiens
  siRNA target sequence for DKFZP434F1017 (NM_032135.2,2401-2419).
ggcctccgttgacaaacat

SEQ ID NO: 398222 - DNA, 19 bp, Homo sapiens
  siRNA target sequence for DKFZP434F1017 (NM_032135.2,2402-2420).
gcctccgttgacaaacatt

SEQ ID NO: 398223 - DNA, 19 bp, Homo sapiens
  siRNA target sequence for DKFZP434F1017 (NM_032135.2,2443-2461).
gactgaggagtttcctata

SEQ ID NO: 398224 - DNA, 19 bp, Homo sapiens
  siRNA target sequence for DKFZP434F1017 (NM_032135.2,2486-2504).
cctccaccatctgaacaaa

SEQ ID NO: 398225 - DNA, 19 bp, Homo sapiens
  siRNA target sequence for DKFZP434F1017 (NM_032135.2,2567-2585).
ggaattccagcagtaaaat

SEQ ID NO: 398226 - DNA, 19 bp, Homo sapiens
  siRNA target sequence for DKFZP434F1017 (NM_032135.2,2626-2644).
ggtttcaaaaatcaattct

SEQ ID NO: 398227 - DNA, 19 bp, Homo sapiens
  siRNA target sequence for DKFZP434F1017 (NM_032135.2,2678-2696).
caggctcccactcttgaaa

SEQ ID NO: 398228 - DNA, 19 bp, Homo sapiens
  siRNA target sequence for DKFZP434F1017 (NM_032135.2,2682-2700).
ctcccactcttgaaataga

SEQ ID NO: 398229 - DNA, 19 bp, Homo sapiens
  siRNA target sequence for DKFZP434F1017 (NM_032135.2,2684-2702).
cccactcttgaaatagaaa

SEQ ID NO: 398230 - DNA, 19 bp, Homo sapiens
  siRNA target sequence for DKFZP434L1717 (NM_032136.3,263-281).
cttccacacgatgaagtat

SEQ ID NO: 398231 - DNA, 19 bp, Homo sapiens
  siRNA target sequence for DKFZP434L1717 (NM_032136.3,266-284).
ccacacgatgaagtataaa

SEQ ID NO: 398232 - DNA, 19 bp, Homo sapiens
  siRNA target sequence for DKFZP434L1717 (NM_032136.3,372-390).
gtgggtgacatcagtgaat

SEQ ID NO: 398233 - DNA, 19 bp, Homo sapiens
  siRNA target sequence for DKFZP434L1717 (NM_032136.3,374-392).
gggtgacatcagtgaatct

SEQ ID NO: 398234 - DNA, 19 bp, Homo sapiens
  siRNA target sequence for DKFZP434L1717 (NM_032136.3,445-463).
cccgattgccgtttgttga

SEQ ID NO: 398235 - DNA, 19 bp, Homo sapiens
  siRNA target sequence for DKFZP434L1717 (NM_032136.3,705-723).
gacatctaccagaattgct

SEQ ID NO: 398236 - DNA, 19 bp, Homo sapiens
  siRNA target sequence for DKFZP434L1717 (NM_032136.3,736-754).
gatggaatacttacttagt

SEQ ID NO: 398237 - DNA, 19 bp, Homo sapiens
  siRNA target sequence for DKFZP434L1717 (NM_032136.3,815-833).
caagcctactgctatagtt

SEQ ID NO: 398238 - DNA, 19 bp, Homo sapiens
  siRNA target sequence for DKFZP434L1717 (NM_032136.3,845-863).
caaaggtcggggtattcca

SEQ ID NO: 398239 - DNA, 19 bp, Homo sapiens
  siRNA target sequence for DKFZP434L1717 (NM_032136.3,849-867).
ggtcggggtattccaaata

SEQ ID NO: 398240 - DNA, 19 bp, Homo sapiens
  siRNA target sequence for DKFZP434L1717 (NM_032136.3,850-868).
gtcggggtattccaaatat

SEQ ID NO: 398241 - DNA, 19 bp, Homo sapiens
  siRNA target sequence for DKFZP434L1717 (NM_032136.3,953-971).
gaccaatgagaatctcata

SEQ ID NO: 398242 - DNA, 19 bp, Homo sapiens
  siRNA target sequence for DKFZP434L1717 (NM_032136.3,1098-1116).
ctgggccgtgcaaatgaaa

SEQ ID NO: 398243 - DNA, 19 bp, Homo sapiens
  siRNA target sequence for DKFZP434L1717 (NM_032136.3,1100-1118).
gggccgtgcaaatgaaaga

SEQ ID NO: 398244 - DNA, 19 bp, Homo sapiens
  siRNA target sequence for DKFZP434L1717 (NM_032136.3,1103-1121).
ccgtgcaaatgaaagagtt

SEQ ID NO: 398245 - DNA, 19 bp, Homo sapiens
  siRNA target sequence for DKFZP434L1717 (NM_032136.3,1104-1122).
cgtgcaaatgaaagagtta

SEQ ID NO: 398246 - DNA, 19 bp, Homo sapiens
  siRNA target sequence for DKFZP434L1717 (NM_032136.3,1108-1126).
caaatgaaagagttattgt

SEQ ID NO: 398247 - DNA, 19 bp, Homo sapiens
  siRNA target sequence for DKFZP434L1717 (NM_032136.3,1142-1160).
gatgaactccaccttttct

SEQ ID NO: 398248 - DNA, 19 bp, Homo sapiens
  siRNA target sequence for DKFZP434L1717 (NM_032136.3,1148-1166).
ctccaccttttctgagata

SEQ ID NO: 398249 - DNA, 19 bp, Homo sapiens
  siRNA target sequence for DKFZP434L1717 (NM_032136.3,1187-1205).
gcgtttcatagagtgtatt

SEQ ID NO: 398250 - DNA, 19 bp, Homo sapiens
  siRNA target sequence for DKFZP434L1717 (NM_032136.3,1188-1206).
cgtttcatagagtgtatta

SEQ ID NO: 398251 - DNA, 19 bp, Homo sapiens
  siRNA target sequence for DKFZP434L1717 (NM_032136.3,1193-1211).
catagagtgtattattgct

SEQ ID NO: 398252 - DNA, 19 bp, Homo sapiens
  siRNA target sequence for DKFZP434L1717 (NM_032136.3,1427-1445).
ccgaagcattcccaattgt

SEQ ID NO: 398253 - DNA, 19 bp, Homo sapiens
  siRNA target sequence for DKFZP434L1717 (NM_032136.3,1428-1446).
cgaagcattcccaattgta

SEQ ID NO: 398254 - DNA, 19 bp, Homo sapiens
  siRNA target sequence for DKFZP434L1717 (NM_032136.3,1472-1490).
ctcgacagagcatgctatt

SEQ ID NO: 398255 - DNA, 19 bp, Homo sapiens
  siRNA target sequence for DKFZP434L1717 (NM_032136.3,1474-1492).
cgacagagcatgctattta

SEQ ID NO: 398256 - DNA, 19 bp, Homo sapiens
  siRNA target sequence for DKFZP434L1717 (NM_032136.3,1475-1493).
gacagagcatgctatttat

SEQ ID NO: 398257 - DNA, 19 bp, Homo sapiens
  siRNA target sequence for DKFZP434L1717 (NM_032136.3,1598-1616).
ggtccgccacggtgtcaat

SEQ ID NO: 398258 - DNA, 19 bp, Homo sapiens
  siRNA target sequence for DKFZP434L1717 (NM_032136.3,1601-1619).
ccgccacggtgtcaatgat

SEQ ID NO: 398259 - DNA, 19 bp, Homo sapiens
  siRNA target sequence for DKFZP434L1717 (NM_032136.3,1602-1620).
cgccacggtgtcaatgata

SEQ ID NO: 398260 - DNA, 19 bp, Homo sapiens
  siRNA target sequence for DKFZP434L1717 (NM_032136.3,1603-1621).
gccacggtgtcaatgataa

SEQ ID NO: 398261 - DNA, 19 bp, Homo sapiens
  siRNA target sequence for DKFZP434L1717 (NM_032136.3,1846-1864).
ccagggagcctgatatcct

SEQ ID NO: 398262 - DNA, 19 bp, Homo sapiens
  siRNA target sequence for DKFZP434L1717 (NM_032136.3,1853-1871).
gcctgatatccttgttcat

SEQ ID NO: 398263 - DNA, 19 bp, Homo sapiens
  siRNA target sequence for DKFZP434L1717 (NM_032136.3,1892-1910).
gcctcaacgtgggaaaact

SEQ ID NO: 398264 - DNA, 19 bp, Homo sapiens
  siRNA target sequence for DKFZP434L1717 (NM_032136.3,1893-1911).
cctcaacgtgggaaaacta

SEQ ID NO: 398265 - DNA, 19 bp, Homo sapiens
  siRNA target sequence for DKFZP434L1717 (NM_032136.3,1899-1917).
cgtgggaaaactagtgaat

SEQ ID NO: 398266 - DNA, 19 bp, Homo sapiens
  siRNA target sequence for DKFZP434L1717 (NM_032136.3,1937-1955).
cagtaccagacacattata

SEQ ID NO: 398267 - DNA, 19 bp, Homo sapiens
  siRNA target sequence for DKFZP434L1717 (NM_032136.3,1956-1974).
gcagccgtaacacttactt

SEQ ID NO: 398268 - DNA, 19 bp, Homo sapiens
  siRNA target sequence for DKFZP434L1717 (NM_032136.3,1957-1975).
cagccgtaacacttacttt

SEQ ID NO: 398269 - DNA, 19 bp, Homo sapiens
  siRNA target sequence for DKFZP434L1717 (NM_032136.3,1959-1977).
gccgtaacacttactttaa

SEQ ID NO: 398270 - DNA, 19 bp, Homo sapiens
  siRNA target sequence for DKFZP434L1717 (NM_032136.3,1960-1978).
ccgtaacacttactttaat

SEQ ID NO: 398271 - DNA, 19 bp, Homo sapiens
  siRNA target sequence for DKFZP434L0718 (NM_032139.1,152-170).
gacctcctgaaaaatcctt

SEQ ID NO: 398272 - DNA, 19 bp, Homo sapiens
  siRNA target sequence for DKFZP434L0718 (NM_032139.1,268-286).
cagcatccagtctacttgt

SEQ ID NO: 398273 - DNA, 19 bp, Homo sapiens
  siRNA target sequence for DKFZP434L0718 (NM_032139.1,342-360).
gaaaggatgtctttattca

SEQ ID NO: 398274 - DNA, 19 bp, Homo sapiens
  siRNA target sequence for DKFZP434L0718 (NM_032139.1,453-471).
gtttcagcatcctgtgtat

SEQ ID NO: 398275 - DNA, 19 bp, Homo sapiens
  siRNA target sequence for DKFZP434L0718 (NM_032139.1,575-593).
cactccgagcgatttgaca

SEQ ID NO: 398276 - DNA, 19 bp, Homo sapiens
  siRNA target sequence for DKFZP434L0718 (NM_032139.1,595-613).
gaacatcgcctctttccat

SEQ ID NO: 398277 - DNA, 19 bp, Homo sapiens
  siRNA target sequence for DKFZP434L0718 (NM_032139.1,603-621).
cctctttccatcgaacatt

SEQ ID NO: 398278 - DNA, 19 bp, Homo sapiens
  siRNA target sequence for DKFZP434L0718 (NM_032139.1,642-660).
gcctccgtcaccacataga

SEQ ID NO: 398279 - DNA, 19 bp, Homo sapiens
  siRNA target sequence for DKFZP434L0718 (NM_032139.1,644-662).
ctccgtcaccacatagact

SEQ ID NO: 398280 - DNA, 19 bp, Homo sapiens
  siRNA target sequence for DKFZP434L0718 (NM_032139.1,772-790).
gatatacgtccatcatgaa

SEQ ID NO: 398281 - DNA, 19 bp, Homo sapiens
  siRNA target sequence for DKFZP434L0718 (NM_032139.1,834-852).
gtgaggatgcggcctttaa

SEQ ID NO: 398282 - DNA, 19 bp, Homo sapiens
  siRNA target sequence for DKFZP434L0718 (NM_032139.1,836-854).
gaggatgcggcctttaaca

SEQ ID NO: 398283 - DNA, 19 bp, Homo sapiens
  siRNA target sequence for DKFZP434L0718 (NM_032139.1,922-940).
catacctcgtgccaaaaga

SEQ ID NO: 398284 - DNA, 19 bp, Homo sapiens
  siRNA target sequence for DKFZP434L0718 (NM_032139.1,947-965).
gctcagctgaacaaatgca

SEQ ID NO: 398285 - DNA, 19 bp, Homo sapiens
  siRNA target sequence for DKFZP434L0718 (NM_032139.1,1059-1077).
ctgatgatctgctatcagt

SEQ ID NO: 398286 - DNA, 19 bp, Homo sapiens
  siRNA target sequence for DKFZP434L0718 (NM_032139.1,1070-1088).
ctatcagtcctgttatact

SEQ ID NO: 398287 - DNA, 19 bp, Homo sapiens
  siRNA target sequence for DKFZP434L0718 (NM_032139.1,1101-1119).
cggagatccctaattggat

SEQ ID NO: 398288 - DNA, 19 bp, Homo sapiens
  siRNA target sequence for DKFZP434L0718 (NM_032139.1,1323-1341).
ccaccgactgcctgtttaa

SEQ ID NO: 398289 - DNA, 19 bp, Homo sapiens
  siRNA target sequence for DKFZP434L0718 (NM_032139.1,1326-1344).
ccgactgcctgtttaagca

SEQ ID NO: 398290 - DNA, 19 bp, Homo sapiens
  siRNA target sequence for DKFZP434L0718 (NM_032139.1,1353-1371).
caggtaaccagaaagaagt

SEQ ID NO: 398291 - DNA, 19 bp, Homo sapiens
  siRNA target sequence for DKFZP434L0718 (NM_032139.1,1386-1404).
gccaagaggaccatgataa

SEQ ID NO: 398292 - DNA, 19 bp, Homo sapiens
  siRNA target sequence for DKFZP434L0718 (NM_032139.1,1698-1716).
cggaagtgcaggacaacaa

SEQ ID NO: 398293 - DNA, 19 bp, Homo sapiens
  siRNA target sequence for DKFZP434L0718 (NM_032139.1,1764-1782).
gtgtgaaggctctggttta

SEQ ID NO: 398294 - DNA, 19 bp, Homo sapiens
  siRNA target sequence for DKFZP434L0718 (NM_032139.1,1766-1784).
gtgaaggctctggtttact

SEQ ID NO: 398295 - DNA, 19 bp, Homo sapiens
  siRNA target sequence for DKFZP434L0718 (NM_032139.1,1795-1813).
gtcgtgcagacttgacatt

SEQ ID NO: 398296 - DNA, 19 bp, Homo sapiens
  siRNA target sequence for DKFZP434L0718 (NM_032139.1,1805-1823).
cttgacattggcaatgaga

SEQ ID NO: 398297 - DNA, 19 bp, Homo sapiens
  siRNA target sequence for DKFZP434L0718 (NM_032139.1,1827-1845).
gagacacccctctacacat

SEQ ID NO: 398298 - DNA, 19 bp, Homo sapiens
  siRNA target sequence for DKFZP434L0718 (NM_032139.1,1933-1951).
gcccctcaagtgtgcatta

SEQ ID NO: 398299 - DNA, 19 bp, Homo sapiens
  siRNA target sequence for DKFZP434L0718 (NM_032139.1,1934-1952).
cccctcaagtgtgcattaa

SEQ ID NO: 398300 - DNA, 19 bp, Homo sapiens
  siRNA target sequence for DKFZP434L0718 (NM_032139.1,1937-1955).
ctcaagtgtgcattaaact

SEQ ID NO: 398301 - DNA, 19 bp, Homo sapiens
  siRNA target sequence for DKFZP434L0718 (NM_032139.1,1944-1962).
gtgcattaaactcaaagat

SEQ ID NO: 398302 - DNA, 19 bp, Homo sapiens
  siRNA target sequence for DKFZP434L0718 (NM_032139.1,2165-2183).
gctgatggagatctagaaa

SEQ ID NO: 398303 - DNA, 19 bp, Homo sapiens
  siRNA target sequence for DKFZP434L0718 (NM_032139.1,2186-2204).
gtgcgttacctgttggaat

SEQ ID NO: 398304 - DNA, 19 bp, Homo sapiens
  siRNA target sequence for DKFZP434L0718 (NM_032139.1,2515-2533).
gtgtctgttagattcgaat

SEQ ID NO: 398305 - DNA, 19 bp, Homo sapiens
  siRNA target sequence for DKFZP434L0718 (NM_032139.1,2519-2537).
ctgttagattcgaatgcaa

SEQ ID NO: 398306 - DNA, 19 bp, Homo sapiens
  siRNA target sequence for DKFZP434L0718 (NM_032139.1,2521-2539).
gttagattcgaatgcaaaa

SEQ ID NO: 398307 - DNA, 19 bp, Homo sapiens
  siRNA target sequence for DKFZP434L0718 (NM_032139.1,2529-2547).
cgaatgcaaaacccaataa

SEQ ID NO: 398308 - DNA, 19 bp, Homo sapiens
  siRNA target sequence for DKFZP434L0718 (NM_032139.1,2562-2580).
gaaacacgcccctcattta

SEQ ID NO: 398309 - DNA, 19 bp, Homo sapiens
  siRNA target sequence for DKFZP434L0718 (NM_032139.1,2634-2652).
cctccattaacgcttctaa

SEQ ID NO: 398310 - DNA, 19 bp, Homo sapiens
  siRNA target sequence for DKFZP434L0718 (NM_032139.1,2674-2692).
gcacgaggctgtgattgaa

SEQ ID NO: 398311 - DNA, 19 bp, Homo sapiens
  siRNA target sequence for DKFZP434L0718 (NM_032139.1,2675-2693).
cacgaggctgtgattgaaa

SEQ ID NO: 398312 - DNA, 19 bp, Homo sapiens
  siRNA target sequence for DKFZP434L0718 (NM_032139.1,2736-2754).
cagttcaggtgctgaacaa

SEQ ID NO: 398313 - DNA, 19 bp, Homo sapiens
  siRNA target sequence for DKFZP434L0718 (NM_032139.1,2826-2844).
gctgtgttgcttcattaga

SEQ ID NO: 398314 - DNA, 19 bp, Homo sapiens
  siRNA target sequence for DKFZP434L0718 (NM_032139.1,2827-2845).
ctgtgttgcttcattagat

SEQ ID NO: 398315 - DNA, 19 bp, Homo sapiens
  siRNA target sequence for DKFZP434L0718 (NM_032139.1,2829-2847).
gtgttgcttcattagatga

SEQ ID NO: 398316 - DNA, 19 bp, Homo sapiens
  siRNA target sequence for DKFZP434L0718 (NM_032139.1,2859-2877).
ctgaccgcaaggagtatgt

SEQ ID NO: 398317 - DNA, 19 bp, Homo sapiens
  siRNA target sequence for DKFZP434L0718 (NM_032139.1,2901-2919).
ggaactcaaaactgtatga

SEQ ID NO: 398318 - DNA, 19 bp, Homo sapiens
  siRNA target sequence for DKFZP434L0718 (NM_032139.1,2960-2978).
cactcagctggtcagttta

SEQ ID NO: 398319 - DNA, 19 bp, Homo sapiens
  siRNA target sequence for DKFZP434L0718 (NM_032139.1,3011-3029).
gatagaagtgtccctaatt

SEQ ID NO: 398320 - DNA, 19 bp, Homo sapiens
  siRNA target sequence for DKFZP434L0718 (NM_032139.1,3068-3086).
gtcacactgagacagaata

SEQ ID NO: 398321 - DNA, 19 bp, Homo sapiens
  siRNA target sequence for DKFZP434A1319 (NM_032140.1,333-351).
cgctctgtcctgacaacta

SEQ ID NO: 398322 - DNA, 19 bp, Homo sapiens
  siRNA target sequence for DKFZP434A1319 (NM_032140.1,809-827).
ccaccaccccatgtatcta

SEQ ID NO: 398323 - DNA, 19 bp, Homo sapiens
  siRNA target sequence for DKFZP434A1319 (NM_032140.1,880-898).
ggacttcattcgtcacaat

SEQ ID NO: 398324 - DNA, 19 bp, Homo sapiens
  siRNA target sequence for DKFZP434A1319 (NM_032140.1,1270-1288).
ggaggccatcaagatcttt

SEQ ID NO: 398325 - DNA, 19 bp, Homo sapiens
  siRNA target sequence for DKFZP434A1319 (NM_032140.1,1273-1291).
ggccatcaagatcttttct

SEQ ID NO: 398326 - DNA, 19 bp, Homo sapiens
  siRNA target sequence for DKFZP434K1421 (NM_032141.1,43-61).
caggcagtatgggcttatt

SEQ ID NO: 398327 - DNA, 19 bp, Homo sapiens
  siRNA target sequence for DKFZP434K1421 (NM_032141.1,88-106).
ccctgttttgcaaaaacca

SEQ ID NO: 398328 - DNA, 19 bp, Homo sapiens
  siRNA target sequence for DKFZP434K1421 (NM_032141.1,89-107).
cctgttttgcaaaaaccat

SEQ ID NO: 398329 - DNA, 19 bp, Homo sapiens
  siRNA target sequence for DKFZP434K1421 (NM_032141.1,112-130).
gtttgggaatgattctgat

SEQ ID NO: 398330 - DNA, 19 bp, Homo sapiens
  siRNA target sequence for DKFZP434K1421 (NM_032141.1,324-342).
gaaagcccaagtatattca

SEQ ID NO: 398331 - DNA, 19 bp, Homo sapiens
  siRNA target sequence for DKFZP434K1421 (NM_032141.1,606-624).
gtgaagaggaagtacctaa

SEQ ID NO: 398332 - DNA, 19 bp, Homo sapiens
  siRNA target sequence for DKFZP434K1421 (NM_032141.1,673-691).
gggcttctccaatgaagta

SEQ ID NO: 398333 - DNA, 19 bp, Homo sapiens
  siRNA target sequence for DKFZP434K1421 (NM_032141.1,674-692).
ggcttctccaatgaagtaa

SEQ ID NO: 398334 - DNA, 19 bp, Homo sapiens
  siRNA target sequence for DKFZP434K1421 (NM_032141.1,676-694).
cttctccaatgaagtaagt

SEQ ID NO: 398335 - DNA, 19 bp, Homo sapiens
  siRNA target sequence for DKFZP434K1421 (NM_032141.1,787-805).
gagcagtgcggatgatgaa

SEQ ID NO: 398336 - DNA, 19 bp, Homo sapiens
  siRNA target sequence for DKFZP434K1421 (NM_032141.1,892-910).
ctctcggtcacctagtgaa

SEQ ID NO: 398337 - DNA, 19 bp, Homo sapiens
  siRNA target sequence for DKFZP434K1421 (NM_032141.1,896-914).
cggtcacctagtgaagaaa

SEQ ID NO: 398338 - DNA, 19 bp, Homo sapiens
  siRNA target sequence for DKFZP434K1421 (NM_032141.1,954-972).
cgtcgagaggacatgagaa

SEQ ID NO: 398339 - DNA, 19 bp, Homo sapiens
  siRNA target sequence for DKFZP434K1421 (NM_032141.1,955-973).
gtcgagaggacatgagaaa

SEQ ID NO: 398340 - DNA, 19 bp, Homo sapiens
  siRNA target sequence for DKFZP434K1421 (NM_032141.1,1005-1023).
gagaccaagagaaccatta

SEQ ID NO: 398341 - DNA, 19 bp, Homo sapiens
  siRNA target sequence for DKFZP434K1421 (NM_032141.1,1009-1027).
ccaagagaaccattacact

SEQ ID NO: 398342 - DNA, 19 bp, Homo sapiens
  siRNA target sequence for DKFZP434K1421 (NM_032141.1,1030-1048).
ccgtgattaccggaaagaa

SEQ ID NO: 398343 - DNA, 19 bp, Homo sapiens
  siRNA target sequence for DKFZP434K1421 (NM_032141.1,1031-1049).
cgtgattaccggaaagaaa

SEQ ID NO: 398344 - DNA, 19 bp, Homo sapiens
  siRNA target sequence for DKFZP434K1421 (NM_032141.1,1066-1084).
cagagaggccagtcataga

SEQ ID NO: 398345 - DNA, 19 bp, Homo sapiens
  siRNA target sequence for DKFZP434K1421 (NM_032141.1,1101-1119).
ggcatgaacaggaagataa

SEQ ID NO: 398346 - DNA, 19 bp, Homo sapiens
  siRNA target sequence for DKFZP434K1421 (NM_032141.1,1407-1425).
ctagggcaaaggataaatt

SEQ ID NO: 398347 - DNA, 19 bp, Homo sapiens
  siRNA target sequence for DKFZP434K1421 (NM_032141.1,1489-1507).
gaaaccctctaattctgaa

SEQ ID NO: 398348 - DNA, 19 bp, Homo sapiens
  siRNA target sequence for DKFZP434K1421 (NM_032141.1,1495-1513).
ctctaattctgaatcatca

SEQ ID NO: 398349 - DNA, 19 bp, Homo sapiens
  siRNA target sequence for DKFZP434K1421 (NM_032141.1,1509-1527).
catcactgggagcaaaaca

SEQ ID NO: 398350 - DNA, 19 bp, Homo sapiens
  siRNA target sequence for DKFZP434K1421 (NM_032141.1,1594-1612).
gtttgcaaagcggaacaat

SEQ ID NO: 398351 - DNA, 19 bp, Homo sapiens
  siRNA target sequence for DKFZP434K1421 (NM_032141.1,1603-1621).
gcggaacaatgaagaaact

SEQ ID NO: 398352 - DNA, 19 bp, Homo sapiens
  siRNA target sequence for DKFZP434K1421 (NM_032141.1,1673-1691).
gcaaagacctatattgaga

SEQ ID NO: 398353 - DNA, 19 bp, Homo sapiens
  siRNA target sequence for DKFZP434K1421 (NM_032141.1,1678-1696).
gacctatattgagaaagaa

SEQ ID NO: 398354 - DNA, 19 bp, Homo sapiens
  siRNA target sequence for DKFZP434G072 (NM_032149.1,364-382).
gcaaaggcagccatattat

SEQ ID NO: 398355 - DNA, 19 bp, Homo sapiens
  siRNA target sequence for DKFZP434G072 (NM_032149.1,373-391).
gccatattatggctagaaa

SEQ ID NO: 398356 - DNA, 19 bp, Homo sapiens
  siRNA target sequence for DKFZP434G072 (NM_032149.1,440-458).
ccacatcaaaggcttgaat

SEQ ID NO: 398357 - DNA, 19 bp, Homo sapiens
  siRNA target sequence for DKFZP434G072 (NM_032149.1,441-459).
cacatcaaaggcttgaata

SEQ ID NO: 398358 - DNA, 19 bp, Homo sapiens
  siRNA target sequence for DKFZP434G072 (NM_032149.1,520-538).
gccagtctaactacttaga

SEQ ID NO: 398359 - DNA, 19 bp, Homo sapiens
  siRNA target sequence for DKFZP434G072 (NM_032149.1,522-540).
cagtctaactacttagaga

SEQ ID NO: 398360 - DNA, 19 bp, Homo sapiens
  siRNA target sequence for DKFZP434G072 (NM_032149.1,539-557).
gaagaacaggataccattt

SEQ ID NO: 398361 - DNA, 19 bp, Homo sapiens
  siRNA target sequence for DKFZP434G072 (NM_032149.1,643-661).
ctccacggcctcattctga

SEQ ID NO: 398362 - DNA, 19 bp, Homo sapiens
  siRNA target sequence for DKFZP434G072 (NM_032149.1,702-720).
gagaatcccttagtaatta

SEQ ID NO: 398363 - DNA, 19 bp, Homo sapiens
  siRNA target sequence for DKFZP434G072 (NM_032149.1,704-722).
gaatcccttagtaattaaa

SEQ ID NO: 398364 - DNA, 19 bp, Homo sapiens
  siRNA target sequence for DKFZP434G072 (NM_032149.1,819-837).
gtgaaagcaaacaccattt

SEQ ID NO: 398365 - DNA, 19 bp, Homo sapiens
  siRNA target sequence for DKFZP434G072 (NM_032149.1,848-866).
ctatctggatcaggaaata

SEQ ID NO: 398366 - DNA, 19 bp, Homo sapiens
  siRNA target sequence for DKFZP434G072 (NM_032149.1,875-893).
ggcaaagctctgtagcatt

SEQ ID NO: 398367 - DNA, 19 bp, Homo sapiens
  siRNA target sequence for DKFZP434G072 (NM_032149.1,876-894).
gcaaagctctgtagcattt

SEQ ID NO: 398368 - DNA, 19 bp, Homo sapiens
  siRNA target sequence for DKFZP434G072 (NM_032149.1,877-895).
caaagctctgtagcatttt

SEQ ID NO: 398369 - DNA, 19 bp, Homo sapiens
  siRNA target sequence for DKFZP434G072 (NM_032149.1,881-899).
gctctgtagcattttgcat

SEQ ID NO: 398370 - DNA, 19 bp, Homo sapiens
  siRNA target sequence for DKFZP434G072 (NM_032149.1,886-904).
gtagcattttgcatactga

SEQ ID NO: 398371 - DNA, 19 bp, Homo sapiens
  siRNA target sequence for DKFZP434G072 (NM_032149.1,963-981).
gtctcagctttgattcatt

SEQ ID NO: 398372 - DNA, 19 bp, Homo sapiens
  siRNA target sequence for DKFZP434G072 (NM_032149.1,967-985).
cagctttgattcattctga

SEQ ID NO: 398373 - DNA, 19 bp, Homo sapiens
  siRNA target sequence for DKFZP434G072 (NM_032149.1,982-1000).
ctgagcttgccgagataaa

SEQ ID NO: 398374 - DNA, 19 bp, Homo sapiens
  siRNA target sequence for DKFZP434G072 (NM_032149.1,990-1008).
gccgagataaacctgttaa

SEQ ID NO: 398375 - DNA, 19 bp, Homo sapiens
  siRNA target sequence for DKFZP434G072 (NM_032149.1,992-1010).
cgagataaacctgttaact

SEQ ID NO: 398376 - DNA, 19 bp, Homo sapiens
  siRNA target sequence for DKFZP434G072 (NM_032149.1,1053-1071).
gggaagccacccacagtta

SEQ ID NO: 398377 - DNA, 19 bp, Homo sapiens
  siRNA target sequence for DKFZP434G072 (NM_032149.1,1055-1073).
gaagccacccacagttaaa

SEQ ID NO: 398378 - DNA, 19 bp, Homo sapiens
  siRNA target sequence for DKFZP434G072 (NM_032149.1,1212-1230).
cacaagcctccactactta

SEQ ID NO: 398379 - DNA, 19 bp, Homo sapiens
  siRNA target sequence for DKFZP434G072 (NM_032149.1,1214-1232).
caagcctccactacttata

SEQ ID NO: 398380 - DNA, 19 bp, Homo sapiens
  siRNA target sequence for DKFZP434G072 (NM_032149.1,1217-1235).
gcctccactacttataaga

SEQ ID NO: 398381 - DNA, 19 bp, Homo sapiens
  siRNA target sequence for DKFZP434G072 (NM_032149.1,1331-1349).
gtcagcaaggagtatacaa

SEQ ID NO: 398382 - DNA, 19 bp, Homo sapiens
  siRNA target sequence for DCOHM (NM_032151.2,90-108).
gggctagcggccatgtcat

SEQ ID NO: 398383 - DNA, 19 bp, Homo sapiens
  siRNA target sequence for DCOHM (NM_032151.2,137-155).
gaggaaccaagctatactt

SEQ ID NO: 398384 - DNA, 19 bp, Homo sapiens
  siRNA target sequence for DCOHM (NM_032151.2,139-157).
ggaaccaagctatacttga

SEQ ID NO: 398385 - DNA, 19 bp, Homo sapiens
  siRNA target sequence for DCOHM (NM_032151.2,172-190).
gatggtcggaattaagtga

SEQ ID NO: 398386 - DNA, 19 bp, Homo sapiens
  siRNA target sequence for DCOHM (NM_032151.2,198-216).
gccatctacaaagaattct

SEQ ID NO: 398387 - DNA, 19 bp, Homo sapiens
  siRNA target sequence for DCOHM (NM_032151.2,215-233).
ctccttccacaattttaat

SEQ ID NO: 398388 - DNA, 19 bp, Homo sapiens
  siRNA target sequence for DCOHM (NM_032151.2,217-235).
ccttccacaattttaatca

SEQ ID NO: 398389 - DNA, 19 bp, Homo sapiens
  siRNA target sequence for DCOHM (NM_032151.2,264-282).
ctacaagcagagaagatga

SEQ ID NO: 398390 - DNA, 19 bp, Homo sapiens
  siRNA target sequence for DCOHM (NM_032151.2,290-308).
cccagaatggttcaatgta

SEQ ID NO: 398391 - DNA, 19 bp, Homo sapiens
  siRNA target sequence for DCOHM (NM_032151.2,291-309).
ccagaatggttcaatgtat

SEQ ID NO: 398392 - DNA, 19 bp, Homo sapiens
  siRNA target sequence for DCOHM (NM_032151.2,294-312).
gaatggttcaatgtataca

SEQ ID NO: 398393 - DNA, 19 bp, Homo sapiens
  siRNA target sequence for DCOHM (NM_032151.2,369-387).
gtgaagctggccaagttta

SEQ ID NO: 398394 - DNA, 19 bp, Homo sapiens
  siRNA target sequence for PRAM-1 (NM_032152.3,59-77).
ggacttccggagcatcaaa

SEQ ID NO: 398395 - DNA, 19 bp, Homo sapiens
  siRNA target sequence for PRAM-1 (NM_032152.3,107-125).
cagcgacctgcccaaaaaa

SEQ ID NO: 398396 - DNA, 19 bp, Homo sapiens
  siRNA target sequence for PRAM-1 (NM_032152.3,110-128).
cgacctgcccaaaaaacct

SEQ ID NO: 398397 - DNA, 19 bp, Homo sapiens
  siRNA target sequence for PRAM-1 (NM_032152.3,129-147).
ccgaagcctgagtttggta

SEQ ID NO: 398398 - DNA, 19 bp, Homo sapiens
  siRNA target sequence for PRAM-1 (NM_032152.3,144-162).
ggtaaactgaagaagttct

SEQ ID NO: 398399 - DNA, 19 bp, Homo sapiens
  siRNA target sequence for PRAM-1 (NM_032152.3,633-651).
ccgcagcctgagttgagta

SEQ ID NO: 398400 - DNA, 19 bp, Homo sapiens
  siRNA target sequence for PRAM-1 (NM_032152.3,638-656).
gcctgagttgagtaccttt

SEQ ID NO: 398401 - DNA, 19 bp, Homo sapiens
  siRNA target sequence for PRAM-1 (NM_032152.3,845-863).
gcctccgctgagtgacttt

SEQ ID NO: 398402 - DNA, 19 bp, Homo sapiens
  siRNA target sequence for PRAM-1 (NM_032152.3,1516-1534).
cggtcccagatgagatcta

SEQ ID NO: 398403 - DNA, 19 bp, Homo sapiens
  siRNA target sequence for PRAM-1 (NM_032152.3,1779-1797).
gttcacacgaagatgatga

SEQ ID NO: 398404 - DNA, 19 bp, Homo sapiens
  siRNA target sequence for PRAM-1 (NM_032152.3,1799-1817).
cgaccccaacgctaagaca

SEQ ID NO: 398405 - DNA, 19 bp, Homo sapiens
  siRNA target sequence for FLJ12363 (NM_032167.1,67-85).
gcggatcacagaacaatga

SEQ ID NO: 398406 - DNA, 19 bp, Homo sapiens
  siRNA target sequence for FLJ12363 (NM_032167.1,69-87).
ggatcacagaacaatgaca

SEQ ID NO: 398407 - DNA, 19 bp, Homo sapiens
  siRNA target sequence for FLJ12363 (NM_032167.1,193-211).
gtctgtgtgcccagtttga

SEQ ID NO: 398408 - DNA, 19 bp, Homo sapiens
  siRNA target sequence for FLJ12363 (NM_032167.1,282-300).
gcgggctttgccagcaaaa

SEQ ID NO: 398409 - DNA, 19 bp, Homo sapiens
  siRNA target sequence for FLJ12592 (NM_032169.3,402-420).
ccctggaggcctacctaaa

SEQ ID NO: 398410 - DNA, 19 bp, Homo sapiens
  siRNA target sequence for FLJ12592 (NM_032169.3,482-500).
gcaggaaagtccaatccaa

SEQ ID NO: 398411 - DNA, 19 bp, Homo sapiens
  siRNA target sequence for FLJ12592 (NM_032169.3,511-529).
ccagaagggctttcaaaca

SEQ ID NO: 398412 - DNA, 19 bp, Homo sapiens
  siRNA target sequence for FLJ12592 (NM_032169.3,514-532).
gaagggctttcaaacatat

SEQ ID NO: 398413 - DNA, 19 bp, Homo sapiens
  siRNA target sequence for FLJ12592 (NM_032169.3,552-570).
caggttcacttcttcctaa

SEQ ID NO: 398414 - DNA, 19 bp, Homo sapiens
  siRNA target sequence for FLJ12592 (NM_032169.3,599-617).
gtccagaaagccttgtttt

SEQ ID NO: 398415 - DNA, 19 bp, Homo sapiens
  siRNA target sequence for FLJ12592 (NM_032169.3,632-650).
gttcccaagcctatactgt

SEQ ID NO: 398416 - DNA, 19 bp, Homo sapiens
  siRNA target sequence for FLJ12592 (NM_032169.3,649-667).
gtactgcagtgatacttct

SEQ ID NO: 398417 - DNA, 19 bp, Homo sapiens
  siRNA target sequence for FLJ12592 (NM_032169.3,655-673).
cagtgatacttctgtcatt

SEQ ID NO: 398418 - DNA, 19 bp, Homo sapiens
  siRNA target sequence for FLJ12592 (NM_032169.3,659-677).
gatacttctgtcattggaa

SEQ ID NO: 398419 - DNA, 19 bp, Homo sapiens
  siRNA target sequence for FLJ12592 (NM_032169.3,675-693).
gaacagaattttacgtaat

SEQ ID NO: 398420 - DNA, 19 bp, Homo sapiens
  siRNA target sequence for FLJ12592 (NM_032169.3,678-696).
cagaattttacgtaatgga

SEQ ID NO: 398421 - DNA, 19 bp, Homo sapiens
  siRNA target sequence for FLJ12592 (NM_032169.3,708-726).
gtcgaatcttccgtgattt

SEQ ID NO: 398422 - DNA, 19 bp, Homo sapiens
  siRNA target sequence for FLJ12592 (NM_032169.3,710-728).
cgaatcttccgtgatttaa

SEQ ID NO: 398423 - DNA, 19 bp, Homo sapiens
  siRNA target sequence for FLJ12592 (NM_032169.3,715-733).
cttccgtgatttaacaatt

SEQ ID NO: 398424 - DNA, 19 bp, Homo sapiens
  siRNA target sequence for FLJ12592 (NM_032169.3,718-736).
ccgtgatttaacaattcct

SEQ ID NO: 398425 - DNA, 19 bp, Homo sapiens
  siRNA target sequence for FLJ12592 (NM_032169.3,750-768).
cagaacgttcagccatata

SEQ ID NO: 398426 - DNA, 19 bp, Homo sapiens
  siRNA target sequence for FLJ12592 (NM_032169.3,770-788).
gtggccacggtagaaacat

SEQ ID NO: 398427 - DNA, 19 bp, Homo sapiens
  siRNA target sequence for FLJ12592 (NM_032169.3,845-863).
ggtgctgggtactgcaaaa

SEQ ID NO: 398428 - DNA, 19 bp, Homo sapiens
  siRNA target sequence for FLJ12592 (NM_032169.3,849-867).
ctgggtactgcaaaagaca

SEQ ID NO: 398429 - DNA, 19 bp, Homo sapiens
  siRNA target sequence for FLJ12592 (NM_032169.3,955-973).
cttgcccgataatgacaat

SEQ ID NO: 398430 - DNA, 19 bp, Homo sapiens
  siRNA target sequence for FLJ12592 (NM_032169.3,958-976).
gcccgataatgacaatgaa

SEQ ID NO: 398431 - DNA, 19 bp, Homo sapiens
  siRNA target sequence for FLJ12592 (NM_032169.3,960-978).
ccgataatgacaatgaaga

SEQ ID NO: 398432 - DNA, 19 bp, Homo sapiens
  siRNA target sequence for FLJ12592 (NM_032169.3,970-988).
caatgaagagaatttgatt

SEQ ID NO: 398433 - DNA, 19 bp, Homo sapiens
  siRNA target sequence for FLJ12592 (NM_032169.3,993-1011).
gagatttcagactagataa

SEQ ID NO: 398434 - DNA, 19 bp, Homo sapiens
  siRNA target sequence for FLJ12592 (NM_032169.3,995-1013).
gatttcagactagataaca

SEQ ID NO: 398435 - DNA, 19 bp, Homo sapiens
  siRNA target sequence for FLJ12592 (NM_032169.3,1002-1020).
gactagataacatagtttt

SEQ ID NO: 398436 - DNA, 19 bp, Homo sapiens
  siRNA target sequence for FLJ12592 (NM_032169.3,1125-1143).
caaggacagttccaatgat

SEQ ID NO: 398437 - DNA, 19 bp, Homo sapiens
  siRNA target sequence for FLJ12592 (NM_032169.3,1163-1181).
gaaaactcagggataccat

SEQ ID NO: 398438 - DNA, 19 bp, Homo sapiens
  siRNA target sequence for FLJ12592 (NM_032169.3,1187-1205).
gaagaactgatttcaatat

SEQ ID NO: 398439 - DNA, 19 bp, Homo sapiens
  siRNA target sequence for FLJ12592 (NM_032169.3,1210-1228).
ccgctgcaggggaattaat

SEQ ID NO: 398440 - DNA, 19 bp, Homo sapiens
  siRNA target sequence for FLJ12592 (NM_032169.3,1211-1229).
cgctgcaggggaattaatt

SEQ ID NO: 398441 - DNA, 19 bp, Homo sapiens
  siRNA target sequence for FLJ12592 (NM_032169.3,1215-1233).
gcaggggaattaattctat

SEQ ID NO: 398442 - DNA, 19 bp, Homo sapiens
  siRNA target sequence for FLJ12592 (NM_032169.3,1284-1302).
gaatagcacagggagtata

SEQ ID NO: 398443 - DNA, 19 bp, Homo sapiens
  siRNA target sequence for FLJ12592 (NM_032169.3,1294-1312).
gggagtatatagcagatat

SEQ ID NO: 398444 - DNA, 19 bp, Homo sapiens
  siRNA target sequence for FLJ12592 (NM_032169.3,1296-1314).
gagtatatagcagatatct

SEQ ID NO: 398445 - DNA, 19 bp, Homo sapiens
  siRNA target sequence for FLJ12592 (NM_032169.3,1385-1403).
ctacaactctccaaacgaa

SEQ ID NO: 398446 - DNA, 19 bp, Homo sapiens
  siRNA target sequence for FLJ12592 (NM_032169.3,1391-1409).
ctctccaaacgaactttca

SEQ ID NO: 398447 - DNA, 19 bp, Homo sapiens
  siRNA target sequence for FLJ12592 (NM_032169.3,1393-1411).
ctccaaacgaactttcagt

SEQ ID NO: 398448 - DNA, 19 bp, Homo sapiens
  siRNA target sequence for FLJ12592 (NM_032169.3,1413-1431).
ctgtactaccacagattga

SEQ ID NO: 398449 - DNA, 19 bp, Homo sapiens
  siRNA target sequence for FLJ12592 (NM_032169.3,1434-1452).
ctactggacagttgtttgt

SEQ ID NO: 398450 - DNA, 19 bp, Homo sapiens
  siRNA target sequence for FLJ12592 (NM_032169.3,1466-1484).
ggtcaggaagttcttatta

SEQ ID NO: 398451 - DNA, 19 bp, Homo sapiens
  siRNA target sequence for FLJ12592 (NM_032169.3,1531-1549).
ggtaactgagttctatgtt

SEQ ID NO: 398452 - DNA, 19 bp, Homo sapiens
  siRNA target sequence for FLJ12592 (NM_032169.3,1536-1554).
ctgagttctatgttcaaaa

SEQ ID NO: 398453 - DNA, 19 bp, Homo sapiens
  siRNA target sequence for FLJ12592 (NM_032169.3,1567-1585).
ggacaagtggggaaaacct

SEQ ID NO: 398454 - DNA, 19 bp, Homo sapiens
  siRNA target sequence for FLJ12592 (NM_032169.3,1568-1586).
gacaagtggggaaaacctt

SEQ ID NO: 398455 - DNA, 19 bp, Homo sapiens
  siRNA target sequence for FLJ12592 (NM_032169.3,1584-1602).
ctttagtgattgataaact

SEQ ID NO: 398456 - DNA, 19 bp, Homo sapiens
  siRNA target sequence for FLJ12592 (NM_032169.3,1814-1832).
cttcttcaagggaacatta

SEQ ID NO: 398457 - DNA, 19 bp, Homo sapiens
  siRNA target sequence for FLJ12592 (NM_032169.3,1872-1890).
gtgatgccacgaatattga

SEQ ID NO: 398458 - DNA, 19 bp, Homo sapiens
  siRNA target sequence for FLJ12592 (NM_032169.3,1874-1892).
gatgccacgaatattgaat

SEQ ID NO: 398459 - DNA, 19 bp, Homo sapiens
  siRNA target sequence for FLJ12592 (NM_032169.3,1896-1914).
gcatccaacgagatgaaga

SEQ ID NO: 398460 - DNA, 19 bp, Homo sapiens
  siRNA target sequence for FLJ12592 (NM_032169.3,1990-2008).
gggaagaactcaaaatact

SEQ ID NO: 398461 - DNA, 19 bp, Homo sapiens
  siRNA target sequence for FLJ12592 (NM_032169.3,2010-2028).
ctctctccagacacaaaca

SEQ ID NO: 398462 - DNA, 19 bp, Homo sapiens
  siRNA target sequence for FLJ12592 (NM_032169.3,2029-2047).
gcacagcatgattcttgtt

SEQ ID NO: 398463 - DNA, 19 bp, Homo sapiens
  siRNA target sequence for FLJ12592 (NM_032169.3,2056-2074).
cacacctggagtaaaaata

SEQ ID NO: 398464 - DNA, 19 bp, Homo sapiens
  siRNA target sequence for FLJ12592 (NM_032169.3,2090-2108).
gtttttggctacacagata

SEQ ID NO: 398465 - DNA, 19 bp, Homo sapiens
  siRNA target sequence for FLJ12592 (NM_032169.3,2120-2138).
ggacattttgagatccatt

SEQ ID NO: 398466 - DNA, 19 bp, Homo sapiens
  siRNA target sequence for FLJ12592 (NM_032169.3,2151-2169).
gagttcctgccacaaatct

SEQ ID NO: 398467 - DNA, 19 bp, Homo sapiens
  siRNA target sequence for FLJ12592 (NM_032169.3,2153-2171).
gttcctgccacaaatctaa

SEQ ID NO: 398468 - DNA, 19 bp, Homo sapiens
  siRNA target sequence for FLJ12592 (NM_032169.3,2178-2196).
gtgaaggtaggggatttga

SEQ ID NO: 398469 - DNA, 19 bp, Homo sapiens
  siRNA target sequence for FLJ12592 (NM_032169.3,2180-2198).
gaaggtaggggatttgaaa

SEQ ID NO: 398470 - DNA, 19 bp, Homo sapiens
  siRNA target sequence for FLJ12592 (NM_032169.3,2238-2256).
gtatgagaacagtaggttt

SEQ ID NO: 398471 - DNA, 19 bp, Homo sapiens
  siRNA target sequence for FLJ12592 (NM_032169.3,2264-2282).
cgcgctttgcagatcatgt

SEQ ID NO: 398472 - DNA, 19 bp, Homo sapiens
  siRNA target sequence for FLJ12592 (NM_032169.3,2287-2305).
gcgggcaacacaaaggata

SEQ ID NO: 398473 - DNA, 19 bp, Homo sapiens
  siRNA target sequence for FLJ12592 (NM_032169.3,2375-2393).
gagaagatccgcttgttga

SEQ ID NO: 398474 - DNA, 19 bp, Homo sapiens
  siRNA target sequence for FLJ12592 (NM_032169.3,2383-2401).
ccgcttgttgactctgaaa

SEQ ID NO: 398475 - DNA, 19 bp, Homo sapiens
  siRNA target sequence for FLJ12592 (NM_032169.3,2432-2450).
gctggcgctaagaaagaga

SEQ ID NO: 398476 - DNA, 19 bp, Homo sapiens
  siRNA target sequence for FLJ12592 (NM_032169.3,2433-2451).
ctggcgctaagaaagagat

SEQ ID NO: 398477 - DNA, 19 bp, Homo sapiens
  siRNA target sequence for FLJ12592 (NM_032169.3,2474-2492).
ccacgggctgtcagcaaaa

SEQ ID NO: 398478 - DNA, 19 bp, Homo sapiens
  siRNA target sequence for FLJ12592 (NM_032169.3,2475-2493).
cacgggctgtcagcaaaat

SEQ ID NO: 398479 - DNA, 19 bp, Homo sapiens
  siRNA target sequence for FLJ12592 (NM_032169.3,2545-2563).
ccctctggctaacatgtat

SEQ ID NO: 398480 - DNA, 19 bp, Homo sapiens
  siRNA target sequence for FLJ12592 (NM_032169.3,2551-2569).
ggctaacatgtatgctata

SEQ ID NO: 398481 - DNA, 19 bp, Homo sapiens
  siRNA target sequence for FLJ12592 (NM_032169.3,2572-2590).
ccgagttttgcgtttagca

SEQ ID NO: 398482 - DNA, 19 bp, Homo sapiens
  siRNA target sequence for FLJ12592 (NM_032169.3,2595-2613).
gacctgacgaagttcatct

SEQ ID NO: 398483 - DNA, 19 bp, Homo sapiens
  siRNA target sequence for FLJ12592 (NM_032169.3,2638-2656).
gcgggaccaagccaaaaga

SEQ ID NO: 398484 - DNA, 19 bp, Homo sapiens
  siRNA target sequence for FLJ12592 (NM_032169.3,2640-2658).
gggaccaagccaaaagact

SEQ ID NO: 398485 - DNA, 19 bp, Homo sapiens
  siRNA target sequence for FLJ12787 (NM_032175.1,28-46).
ggaggacaattgctagtat

SEQ ID NO: 398486 - DNA, 19 bp, Homo sapiens
  siRNA target sequence for FLJ12787 (NM_032175.1,61-79).
cacaaaaccgtgacatgtt

SEQ ID NO: 398487 - DNA, 19 bp, Homo sapiens
  siRNA target sequence for FLJ12787 (NM_032175.1,146-164).
gcacaacttcctacaaagt

SEQ ID NO: 398488 - DNA, 19 bp, Homo sapiens
  siRNA target sequence for FLJ12787 (NM_032175.1,163-181).
gtagtccacagttttgatt

SEQ ID NO: 398489 - DNA, 19 bp, Homo sapiens
  siRNA target sequence for FLJ12787 (NM_032175.1,178-196).
gattatgcagcttcaattt

SEQ ID NO: 398490 - DNA, 19 bp, Homo sapiens
  siRNA target sequence for FLJ12787 (NM_032175.1,239-257).
gaatgaccaatggaatact

SEQ ID NO: 398491 - DNA, 19 bp, Homo sapiens
  siRNA target sequence for FLJ12787 (NM_032175.1,251-269).
gaatactgagtgttaaaca

SEQ ID NO: 398492 - DNA, 19 bp, Homo sapiens
  siRNA target sequence for FLJ12787 (NM_032175.1,315-333).
gcctgcatatcgaaccttt

SEQ ID NO: 398493 - DNA, 19 bp, Homo sapiens
  siRNA target sequence for FLJ12787 (NM_032175.1,317-335).
ctgcatatcgaacctttat

SEQ ID NO: 398494 - DNA, 19 bp, Homo sapiens
  siRNA target sequence for FLJ12787 (NM_032175.1,319-337).
gcatatcgaacctttatta

SEQ ID NO: 398495 - DNA, 19 bp, Homo sapiens
  siRNA target sequence for FLJ12787 (NM_032175.1,320-338).
catatcgaacctttattaa

SEQ ID NO: 398496 - DNA, 19 bp, Homo sapiens
  siRNA target sequence for FLJ12787 (NM_032175.1,325-343).
cgaacctttattaaaggaa

SEQ ID NO: 398497 - DNA, 19 bp, Homo sapiens
  siRNA target sequence for FLJ12787 (NM_032175.1,388-406).
gcaaagaagcacctagaat

SEQ ID NO: 398498 - DNA, 19 bp, Homo sapiens
  siRNA target sequence for FLJ12787 (NM_032175.1,393-411).
gaagcacctagaattgtat

SEQ ID NO: 398499 - DNA, 19 bp, Homo sapiens
  siRNA target sequence for FLJ12787 (NM_032175.1,397-415).
cacctagaattgtatgaca

SEQ ID NO: 398500 - DNA, 19 bp, Homo sapiens
  siRNA target sequence for FLJ12787 (NM_032175.1,440-458).
ctaaggcactcgatagagt

SEQ ID NO: 398501 - DNA, 19 bp, Homo sapiens
  siRNA target sequence for FLJ12787 (NM_032175.1,444-462).
ggcactcgatagagttctt

SEQ ID NO: 398502 - DNA, 19 bp, Homo sapiens
  siRNA target sequence for FLJ12787 (NM_032175.1,466-484).
cccacttgtacaataaaga

SEQ ID NO: 398503 - DNA, 19 bp, Homo sapiens
  siRNA target sequence for FLJ12787 (NM_032175.1,497-515).
cggtgtccatcataaagga

SEQ ID NO: 398504 - DNA, 19 bp, Homo sapiens
  siRNA target sequence for FLJ12787 (NM_032175.1,504-522).
catcataaaggagttaaat

SEQ ID NO: 398505 - DNA, 19 bp, Homo sapiens
  siRNA target sequence for FLJ12787 (NM_032175.1,507-525).
cataaaggagttaaatcga

SEQ ID NO: 398506 - DNA, 19 bp, Homo sapiens
  siRNA target sequence for FLJ12787 (NM_032175.1,688-706).
cctgtagttgataaaaagt

SEQ ID NO: 398507 - DNA, 19 bp, Homo sapiens
  siRNA target sequence for FLJ12787 (NM_032175.1,752-770).
gagaattgttagaaacctt

SEQ ID NO: 398508 - DNA, 19 bp, Homo sapiens
  siRNA target sequence for FLJ12787 (NM_032175.1,841-859).
gatggatttccagagaata

SEQ ID NO: 398509 - DNA, 19 bp, Homo sapiens
  siRNA target sequence for PHAX (NM_032177.1,57-75).
ggaggtcggcgatatggaa

SEQ ID NO: 398510 - DNA, 19 bp, Homo sapiens
  siRNA target sequence for PHAX (NM_032177.1,131-149).
cgctgcaattgccaaaagt

SEQ ID NO: 398511 - DNA, 19 bp, Homo sapiens
  siRNA target sequence for PHAX (NM_032177.1,200-218).
gtgcaccagtatcacatta

SEQ ID NO: 398512 - DNA, 19 bp, Homo sapiens
  siRNA target sequence for PHAX (NM_032177.1,214-232).
cattatcgagctgttgaaa

SEQ ID NO: 398513 - DNA, 19 bp, Homo sapiens
  siRNA target sequence for PHAX (NM_032177.1,292-310).
cgcaaacgacagaaatgtt

SEQ ID NO: 398514 - DNA, 19 bp, Homo sapiens
  siRNA target sequence for PHAX (NM_032177.1,376-394).
ggaggaaagaagattaaca

SEQ ID NO: 398515 - DNA, 19 bp, Homo sapiens
  siRNA target sequence for PHAX (NM_032177.1,380-398).
gaaagaagattaacaacat

SEQ ID NO: 398516 - DNA, 19 bp, Homo sapiens
  siRNA target sequence for PHAX (NM_032177.1,440-458).
ccactgaacttggtatctt

SEQ ID NO: 398517 - DNA, 19 bp, Homo sapiens
  siRNA target sequence for PHAX (NM_032177.1,490-508).
caatccgagacctacaatt

SEQ ID NO: 398518 - DNA, 19 bp, Homo sapiens
  siRNA target sequence for PHAX (NM_032177.1,494-512).
ccgagacctacaattattt

SEQ ID NO: 398519 - DNA, 19 bp, Homo sapiens
  siRNA target sequence for PHAX (NM_032177.1,644-662).
ggaaacgacctgtcaaaga

SEQ ID NO: 398520 - DNA, 19 bp, Homo sapiens
  siRNA target sequence for PHAX (NM_032177.1,677-695).
gaccagaaatgaactataa

SEQ ID NO: 398521 - DNA, 19 bp, Homo sapiens
  siRNA target sequence for PHAX (NM_032177.1,706-724).
gagatcacagcggaagatt

SEQ ID NO: 398522 - DNA, 19 bp, Homo sapiens
  siRNA target sequence for PHAX (NM_032177.1,711-729).
cacagcggaagattctcaa

SEQ ID NO: 398523 - DNA, 19 bp, Homo sapiens
  siRNA target sequence for PHAX (NM_032177.1,732-750).
gaaagtggctgatgaaatt

SEQ ID NO: 398524 - DNA, 19 bp, Homo sapiens
  siRNA target sequence for PHAX (NM_032177.1,798-816).
gaggattattggtaacaaa

SEQ ID NO: 398525 - DNA, 19 bp, Homo sapiens
  siRNA target sequence for PHAX (NM_032177.1,837-855).
ggaaaccgctgaagttgaa

SEQ ID NO: 398526 - DNA, 19 bp, Homo sapiens
  siRNA target sequence for PHAX (NM_032177.1,1047-1065).
gatgaaacaagctattaaa

SEQ ID NO: 398527 - DNA, 19 bp, Homo sapiens
  siRNA target sequence for PHAX (NM_032177.1,1090-1108).
gatacatcacgagaaactt

SEQ ID NO: 398528 - DNA, 19 bp, Homo sapiens
  siRNA target sequence for PHAX (NM_032177.1,1211-1229).
ctcatgatttggacatctt

SEQ ID NO: 398529 - DNA, 19 bp, Homo sapiens
  siRNA target sequence for FLJ13291 (NM_032178.1,84-102).
ctcttgtgctcgcttgtaa

SEQ ID NO: 398530 - DNA, 19 bp, Homo sapiens
  siRNA target sequence for FLJ13291 (NM_032178.1,420-438).
cgggctttcagttgttaga

SEQ ID NO: 398531 - DNA, 19 bp, Homo sapiens
  siRNA target sequence for FLJ13291 (NM_032178.1,508-526).
gatcctctgcaattctgta

SEQ ID NO: 398532 - DNA, 19 bp, Homo sapiens
  siRNA target sequence for FLJ13291 (NM_032178.1,516-534).
gcaattctgtagagttgat

SEQ ID NO: 398533 - DNA, 19 bp, Homo sapiens
  siRNA target sequence for FLJ13291 (NM_032178.1,608-626).
gtgtatgacatttactact

SEQ ID NO: 398534 - DNA, 19 bp, Homo sapiens
  siRNA target sequence for FLJ13291 (NM_032178.1,694-712).
gctggtgaatgatgatcaa

SEQ ID NO: 398535 - DNA, 19 bp, Homo sapiens
  siRNA target sequence for FLJ13291 (NM_032178.1,697-715).
ggtgaatgatgatcaagaa

SEQ ID NO: 398536 - DNA, 19 bp, Homo sapiens
  siRNA target sequence for FLJ20542 (NM_032179.1,477-495).
caccagacggtccagatta

SEQ ID NO: 398537 - DNA, 19 bp, Homo sapiens
  siRNA target sequence for FLJ20542 (NM_032179.1,479-497).
ccagacggtccagattaaa

SEQ ID NO: 398538 - DNA, 19 bp, Homo sapiens
  siRNA target sequence for FLJ20542 (NM_032179.1,879-897).
cgtgcagaggaacatgttt

SEQ ID NO: 398539 - DNA, 19 bp, Homo sapiens
  siRNA target sequence for FLJ13391 (NM_032181.1,498-516).
cctagcggcctattccttt

SEQ ID NO: 398540 - DNA, 19 bp, Homo sapiens
  siRNA target sequence for FLJ13391 (NM_032181.1,502-520).
gcggcctattcctttgtct

SEQ ID NO: 398541 - DNA, 19 bp, Homo sapiens
  siRNA target sequence for FLJ13391 (NM_032181.1,534-552).
gcgagcagctctgtacttt

SEQ ID NO: 398542 - DNA, 19 bp, Homo sapiens
  siRNA target sequence for FLJ13391 (NM_032181.1,586-604).
ctggctgctctggtgataa

SEQ ID NO: 398543 - DNA, 19 bp, Homo sapiens
  siRNA target sequence for FLJ13391 (NM_032181.1,590-608).
ctgctctggtgataaggat

SEQ ID NO: 398544 - DNA, 19 bp, Homo sapiens
  siRNA target sequence for FLJ13391 (NM_032181.1,876-894).
gagcctgaatcgctactat

SEQ ID NO: 398545 - DNA, 19 bp, Homo sapiens
  siRNA target sequence for KIAA0157 (NM_032182.2,375-393).
ccgacctcgtctttcttct

SEQ ID NO: 398546 - DNA, 19 bp, Homo sapiens
  siRNA target sequence for KIAA0157 (NM_032182.2,426-444).
ctcacgctttagaatatgt

SEQ ID NO: 398547 - DNA, 19 bp, Homo sapiens
  siRNA target sequence for KIAA0157 (NM_032182.2,456-474).
caaatagaaggtataatca

SEQ ID NO: 398548 - DNA, 19 bp, Homo sapiens
  siRNA target sequence for KIAA0157 (NM_032182.2,556-574).
gagttatgccaaagtgatt

SEQ ID NO: 398549 - DNA, 19 bp, Homo sapiens
  siRNA target sequence for KIAA0157 (NM_032182.2,558-576).
gttatgccaaagtgattaa

SEQ ID NO: 398550 - DNA, 19 bp, Homo sapiens
  siRNA target sequence for KIAA0157 (NM_032182.2,565-583).
caaagtgattaaagaacat

SEQ ID NO: 398551 - DNA, 19 bp, Homo sapiens
  siRNA target sequence for KIAA0157 (NM_032182.2,601-619).
caaggatggagtgatgaaa

SEQ ID NO: 398552 - DNA, 19 bp, Homo sapiens
  siRNA target sequence for KIAA0157 (NM_032182.2,627-645).
gggcgatttatcaggttta

SEQ ID NO: 398553 - DNA, 19 bp, Homo sapiens
  siRNA target sequence for KIAA0157 (NM_032182.2,628-646).
ggcgatttatcaggtttat

SEQ ID NO: 398554 - DNA, 19 bp, Homo sapiens
  siRNA target sequence for KIAA0157 (NM_032182.2,629-647).
gcgatttatcaggtttata

SEQ ID NO: 398555 - DNA, 19 bp, Homo sapiens
  siRNA target sequence for KIAA0157 (NM_032182.2,674-692).
gtgtgtgcagatgttgaaa

SEQ ID NO: 398556 - DNA, 19 bp, Homo sapiens
  siRNA target sequence for KIAA0157 (NM_032182.2,694-712).
gagtgagcgagttgttgaa

SEQ ID NO: 398557 - DNA, 19 bp, Homo sapiens
  siRNA target sequence for KIAA0157 (NM_032182.2,698-716).
gagcgagttgttgaatctt

SEQ ID NO: 398558 - DNA, 19 bp, Homo sapiens
  siRNA target sequence for KIAA0157 (NM_032182.2,700-718).
gcgagttgttgaatcttgt

SEQ ID NO: 398559 - DNA, 19 bp, Homo sapiens
  siRNA target sequence for KIAA0157 (NM_032182.2,721-739).
ggcagaagtgaacaaatta

SEQ ID NO: 398560 - DNA, 19 bp, Homo sapiens
  siRNA target sequence for KIAA0157 (NM_032182.2,791-809).
cagcaggcagtgttaagca

SEQ ID NO: 398561 - DNA, 19 bp, Homo sapiens
  siRNA target sequence for KIAA0157 (NM_032182.2,924-942).
ccccttactctgattttca

SEQ ID NO: 398562 - DNA, 19 bp, Homo sapiens
  siRNA target sequence for KIAA0157 (NM_032182.2,943-961).
cccaaacaatcaagaaagt

SEQ ID NO: 398563 - DNA, 19 bp, Homo sapiens
  siRNA target sequence for KIAA0157 (NM_032182.2,1013-1031).
gctgtgggctcttccaatt

SEQ ID NO: 398564 - DNA, 19 bp, Homo sapiens
  siRNA target sequence for KIAA0157 (NM_032182.2,1014-1032).
ctgtgggctcttccaatta

SEQ ID NO: 398565 - DNA, 19 bp, Homo sapiens
  siRNA target sequence for KIAA0157 (NM_032182.2,1018-1036).
gggctcttccaattatgct

SEQ ID NO: 398566 - DNA, 19 bp, Homo sapiens
  siRNA target sequence for KIAA0157 (NM_032182.2,1019-1037).
ggctcttccaattatgctt

SEQ ID NO: 398567 - DNA, 19 bp, Homo sapiens
  siRNA target sequence for KIAA0157 (NM_032182.2,1041-1059).
ccagtgccggactgaagta

SEQ ID NO: 398568 - DNA, 19 bp, Homo sapiens
  siRNA target sequence for KIAA0157 (NM_032182.2,1042-1060).
cagtgccggactgaagtat

SEQ ID NO: 398569 - DNA, 19 bp, Homo sapiens
  siRNA target sequence for KIAA0157 (NM_032182.2,1124-1142).
gacgacagtgattatgaaa

SEQ ID NO: 398570 - DNA, 19 bp, Homo sapiens
  siRNA target sequence for KIAA0157 (NM_032182.2,1131-1149).
gtgattatgaaaatttgat

SEQ ID NO: 398571 - DNA, 19 bp, Homo sapiens
  siRNA target sequence for KIAA0157 (NM_032182.2,1154-1172).
cctacagagccttctaata

SEQ ID NO: 398572 - DNA, 19 bp, Homo sapiens
  siRNA target sequence for KIAA0157 (NM_032182.2,1158-1176).
cagagccttctaatagtga

SEQ ID NO: 398573 - DNA, 19 bp, Homo sapiens
  siRNA target sequence for KIAA0157 (NM_032182.2,1160-1178).
gagccttctaatagtgaat

SEQ ID NO: 398574 - DNA, 19 bp, Homo sapiens
  siRNA target sequence for KIAA0157 (NM_032182.2,1163-1181).
ccttctaatagtgaatact

SEQ ID NO: 398575 - DNA, 19 bp, Homo sapiens
  siRNA target sequence for KIAA1221 (NM_032186.2,152-170).
cgatattactggtgctaaa

SEQ ID NO: 398576 - DNA, 19 bp, Homo sapiens
  siRNA target sequence for KIAA1221 (NM_032186.2,318-336).
ggaggccagtctagtctat

SEQ ID NO: 398577 - DNA, 19 bp, Homo sapiens
  siRNA target sequence for KIAA1221 (NM_032186.2,319-337).
gaggccagtctagtctatt

SEQ ID NO: 398578 - DNA, 19 bp, Homo sapiens
  siRNA target sequence for KIAA1221 (NM_032186.2,321-339).
ggccagtctagtctattta

SEQ ID NO: 398579 - DNA, 19 bp, Homo sapiens
  siRNA target sequence for KIAA1221 (NM_032186.2,323-341).
ccagtctagtctatttata

SEQ ID NO: 398580 - DNA, 19 bp, Homo sapiens
  siRNA target sequence for KIAA1221 (NM_032186.2,354-372).
cctactgtttctagtgaaa

SEQ ID NO: 398581 - DNA, 19 bp, Homo sapiens
  siRNA target sequence for KIAA1221 (NM_032186.2,364-382).
ctagtgaaaactttatctt

SEQ ID NO: 398582 - DNA, 19 bp, Homo sapiens
  siRNA target sequence for KIAA1221 (NM_032186.2,417-435).
cactcctccttaactaaga

SEQ ID NO: 398583 - DNA, 19 bp, Homo sapiens
  siRNA target sequence for KIAA1221 (NM_032186.2,425-443).
cttaactaagacttccaat

SEQ ID NO: 398584 - DNA, 19 bp, Homo sapiens
  siRNA target sequence for KIAA1221 (NM_032186.2,430-448).
ctaagacttccaatatgaa

SEQ ID NO: 398585 - DNA, 19 bp, Homo sapiens
  siRNA target sequence for KIAA1221 (NM_032186.2,453-471).
ggcagtgtttcattaacca

SEQ ID NO: 398586 - DNA, 19 bp, Homo sapiens
  siRNA target sequence for KIAA1221 (NM_032186.2,558-576).
gcaagtcaacaccaagttt

SEQ ID NO: 398587 - DNA, 19 bp, Homo sapiens
  siRNA target sequence for KIAA1221 (NM_032186.2,559-577).
caagtcaacaccaagtttt

SEQ ID NO: 398588 - DNA, 19 bp, Homo sapiens
  siRNA target sequence for KIAA1221 (NM_032186.2,612-630).
cccacccattccaataaaa

SEQ ID NO: 398589 - DNA, 19 bp, Homo sapiens
  siRNA target sequence for KIAA1221 (NM_032186.2,614-632).
cacccattccaataaaaaa

SEQ ID NO: 398590 - DNA, 19 bp, Homo sapiens
  siRNA target sequence for KIAA1221 (NM_032186.2,616-634).
cccattccaataaaaaact

SEQ ID NO: 398591 - DNA, 19 bp, Homo sapiens
  siRNA target sequence for KIAA1221 (NM_032186.2,651-669).
gttggttgtgacattcaga

SEQ ID NO: 398592 - DNA, 19 bp, Homo sapiens
  siRNA target sequence for KIAA1221 (NM_032186.2,675-693).
gtagggagtaatataaagt

SEQ ID NO: 398593 - DNA, 19 bp, Homo sapiens
  siRNA target sequence for KIAA1221 (NM_032186.2,759-777).
gattgtgtcaatacagtaa

SEQ ID NO: 398594 - DNA, 19 bp, Homo sapiens
  siRNA target sequence for KIAA1221 (NM_032186.2,788-806).
ctcaggtacagatggattt

SEQ ID NO: 398595 - DNA, 19 bp, Homo sapiens
  siRNA target sequence for KIAA1221 (NM_032186.2,792-810).
ggtacagatggatttaggt

SEQ ID NO: 398596 - DNA, 19 bp, Homo sapiens
  siRNA target sequence for KIAA1221 (NM_032186.2,798-816).
gatggatttaggtcagaaa

SEQ ID NO: 398597 - DNA, 19 bp, Homo sapiens
  siRNA target sequence for KIAA1221 (NM_032186.2,808-826).
ggtcagaaaatgatacaaa

SEQ ID NO: 398598 - DNA, 19 bp, Homo sapiens
  siRNA target sequence for KIAA1221 (NM_032186.2,829-847).
gggatccccaaaaagagtt

SEQ ID NO: 398599 - DNA, 19 bp, Homo sapiens
  siRNA target sequence for KIAA1221 (NM_032186.2,848-866).
cattcaatttcttatgact

SEQ ID NO: 398600 - DNA, 19 bp, Homo sapiens
  siRNA target sequence for KIAA1221 (NM_032186.2,888-906).
gctccacctcattctaaaa

SEQ ID NO: 398601 - DNA, 19 bp, Homo sapiens
  siRNA target sequence for KIAA1221 (NM_032186.2,958-976).
gttataccgaggattgctt

SEQ ID NO: 398602 - DNA, 19 bp, Homo sapiens
  siRNA target sequence for KIAA1221 (NM_032186.2,964-982).
ccgaggattgctttagtga

SEQ ID NO: 398603 - DNA, 19 bp, Homo sapiens
  siRNA target sequence for KIAA1221 (NM_032186.2,965-983).
cgaggattgctttagtgat

SEQ ID NO: 398604 - DNA, 19 bp, Homo sapiens
  siRNA target sequence for KIAA1221 (NM_032186.2,966-984).
gaggattgctttagtgatt

SEQ ID NO: 398605 - DNA, 19 bp, Homo sapiens
  siRNA target sequence for KIAA1221 (NM_032186.2,968-986).
ggattgctttagtgattct

SEQ ID NO: 398606 - DNA, 19 bp, Homo sapiens
  siRNA target sequence for KIAA1221 (NM_032186.2,993-1011).
gtacccaataaatcaaaaa

SEQ ID NO: 398607 - DNA, 19 bp, Homo sapiens
  siRNA target sequence for KIAA1221 (NM_032186.2,1013-1031).
gcaagaagtagactttcta

SEQ ID NO: 398608 - DNA, 19 bp, Homo sapiens
  siRNA target sequence for KIAA1221 (NM_032186.2,1053-1071).
gcagtagactcacagaaat

SEQ ID NO: 398609 - DNA, 19 bp, Homo sapiens
  siRNA target sequence for KIAA1221 (NM_032186.2,1061-1079).
ctcacagaaatatgcatta

SEQ ID NO: 398610 - DNA, 19 bp, Homo sapiens
  siRNA target sequence for KIAA1221 (NM_032186.2,1124-1142).
ggatgccttccaacatcta

SEQ ID NO: 398611 - DNA, 19 bp, Homo sapiens
  siRNA target sequence for KIAA1221 (NM_032186.2,1125-1143).
gatgccttccaacatctaa

SEQ ID NO: 398612 - DNA, 19 bp, Homo sapiens
  siRNA target sequence for KIAA1221 (NM_032186.2,1128-1146).
gccttccaacatctaattt

SEQ ID NO: 398613 - DNA, 19 bp, Homo sapiens
  siRNA target sequence for KIAA1221 (NM_032186.2,1130-1148).
cttccaacatctaatttat

SEQ ID NO: 398614 - DNA, 19 bp, Homo sapiens
  siRNA target sequence for KIAA1221 (NM_032186.2,1170-1188).
gagagttcacctgttcata

SEQ ID NO: 398615 - DNA, 19 bp, Homo sapiens
  siRNA target sequence for KIAA1221 (NM_032186.2,1240-1258).
ctgagtcacctgctacttt

SEQ ID NO: 398616 - DNA, 19 bp, Homo sapiens
  siRNA target sequence for KIAA1221 (NM_032186.2,1242-1260).
gagtcacctgctactttca

SEQ ID NO: 398617 - DNA, 19 bp, Homo sapiens
  siRNA target sequence for KIAA1221 (NM_032186.2,1244-1262).
gtcacctgctactttcagt

SEQ ID NO: 398618 - DNA, 19 bp, Homo sapiens
  siRNA target sequence for KIAA1221 (NM_032186.2,1261-1279).
gtaccgaagagccatcatt

SEQ ID NO: 398619 - DNA, 19 bp, Homo sapiens
  siRNA target sequence for KIAA1221 (NM_032186.2,1264-1282).
ccgaagagccatcattcta

SEQ ID NO: 398620 - DNA, 19 bp, Homo sapiens
  siRNA target sequence for KIAA1221 (NM_032186.2,1276-1294).
cattctacccctgtacaaa

SEQ ID NO: 398621 - DNA, 19 bp, Homo sapiens
  siRNA target sequence for KIAA1221 (NM_032186.2,1288-1306).
gtacaaagtgcaatgtgaa

SEQ ID NO: 398622 - DNA, 19 bp, Homo sapiens
  siRNA target sequence for KIAA1221 (NM_032186.2,1326-1344).
ctccacaggcatatgatgt

SEQ ID NO: 398623 - DNA, 19 bp, Homo sapiens
  siRNA target sequence for KIAA1221 (NM_032186.2,3222-3240).
gttagaggccacttgaaaa

SEQ ID NO: 398624 - DNA, 19 bp, Homo sapiens
  siRNA target sequence for KIAA1221 (NM_032186.2,3341-3359).
gaacagtcgtcgtattatt

SEQ ID NO: 398625 - DNA, 19 bp, Homo sapiens
  siRNA target sequence for KIAA1221 (NM_032186.2,3437-3455).
ccgtaatggcctaaagact

SEQ ID NO: 398626 - DNA, 19 bp, Homo sapiens
  siRNA target sequence for KIAA1221 (NM_032186.2,3490-3508).
ggctgaatttcttaaatga

SEQ ID NO: 398627 - DNA, 19 bp, Homo sapiens
  siRNA target sequence for KIAA1221 (NM_032186.2,3531-3549).
ctgcccagtgggaaaaaga

SEQ ID NO: 398628 - DNA, 19 bp, Homo sapiens
  siRNA target sequence for KIAA1221 (NM_032186.2,3533-3551).
gcccagtgggaaaaagaat

SEQ ID NO: 398629 - DNA, 19 bp, Homo sapiens
  siRNA target sequence for KIAA1221 (NM_032186.2,3665-3683).
gaaatgcgttcttccatta

SEQ ID NO: 398630 - DNA, 19 bp, Homo sapiens
  siRNA target sequence for KIAA1221 (NM_032186.2,3687-3705).
gaggatagtccgttgatgt

SEQ ID NO: 398631 - DNA, 19 bp, Homo sapiens
  siRNA target sequence for KIAA1221 (NM_032186.2,3689-3707).
ggatagtccgttgatgtat

SEQ ID NO: 398632 - DNA, 19 bp, Homo sapiens
  siRNA target sequence for KIAA1221 (NM_032186.2,3813-3831).
ggtgctgacgaggtttaca

SEQ ID NO: 398633 - DNA, 19 bp, Homo sapiens
  siRNA target sequence for KIAA1221 (NM_032186.2,3814-3832).
gtgctgacgaggtttacat

SEQ ID NO: 398634 - DNA, 19 bp, Homo sapiens
  siRNA target sequence for KIAA1221 (NM_032186.2,3844-3862).
ggttttgtggcctagtctt

SEQ ID NO: 398635 - DNA, 19 bp, Homo sapiens
  siRNA target sequence for KIAA1221 (NM_032186.2,3845-3863).
gttttgtggcctagtcttt

SEQ ID NO: 398636 - DNA, 19 bp, Homo sapiens
  siRNA target sequence for KIAA1221 (NM_032186.2,3890-3908).
ctggattaagcacttacaa

SEQ ID NO: 398637 - DNA, 19 bp, Homo sapiens
  siRNA target sequence for KIAA1221 (NM_032186.2,3899-3917).
gcacttacaacgacatatt

SEQ ID NO: 398638 - DNA, 19 bp, Homo sapiens
  siRNA target sequence for KIAA1221 (NM_032186.2,3902-3920).
cttacaacgacatattgta

SEQ ID NO: 398639 - DNA, 19 bp, Homo sapiens
  siRNA target sequence for KIAA1221 (NM_032186.2,3956-3974).
ggaagtcacgtcactactt

SEQ ID NO: 398640 - DNA, 19 bp, Homo sapiens
  siRNA target sequence for KIAA1221 (NM_032186.2,3957-3975).
gaagtcacgtcactactta

SEQ ID NO: 398641 - DNA, 19 bp, Homo sapiens
  siRNA target sequence for KIAA1221 (NM_032186.2,3984-4002).
gcctccattacagaaactt

SEQ ID NO: 398642 - DNA, 19 bp, Homo sapiens
  siRNA target sequence for AYP1 (NM_032193.2,610-628).
gtgcgtggggccttaactt

SEQ ID NO: 398643 - DNA, 19 bp, Homo sapiens
  siRNA target sequence for ASC1p100 (NM_032204.3,202-220).
gcagaccggtattttgtgt

SEQ ID NO: 398644 - DNA, 19 bp, Homo sapiens
  siRNA target sequence for ASC1p100 (NM_032204.3,208-226).
cggtattttgtgttataca

SEQ ID NO: 398645 - DNA, 19 bp, Homo sapiens
  siRNA target sequence for ASC1p100 (NM_032204.3,316-334).
gccttgcctcacgataaat

SEQ ID NO: 398646 - DNA, 19 bp, Homo sapiens
  siRNA target sequence for ASC1p100 (NM_032204.3,317-335).
ccttgcctcacgataaatt

SEQ ID NO: 398647 - DNA, 19 bp, Homo sapiens
  siRNA target sequence for ASC1p100 (NM_032204.3,336-354).
ctggtgccaggtgatcttt

SEQ ID NO: 398648 - DNA, 19 bp, Homo sapiens
  siRNA target sequence for ASC1p100 (NM_032204.3,428-446).
cagcccctgaggttgttga

SEQ ID NO: 398649 - DNA, 19 bp, Homo sapiens
  siRNA target sequence for ASC1p100 (NM_032204.3,456-474).
gcgcctccatcgaagtgtt

SEQ ID NO: 398650 - DNA, 19 bp, Homo sapiens
  siRNA target sequence for ASC1p100 (NM_032204.3,457-475).
cgcctccatcgaagtgttt

SEQ ID NO: 398651 - DNA, 19 bp, Homo sapiens
  siRNA target sequence for ASC1p100 (NM_032204.3,533-551).
cttctgcgtttggagaaat

SEQ ID NO: 398652 - DNA, 19 bp, Homo sapiens
  siRNA target sequence for ASC1p100 (NM_032204.3,544-562).
ggagaaatcctctacaata

SEQ ID NO: 398653 - DNA, 19 bp, Homo sapiens
  siRNA target sequence for ASC1p100 (NM_032204.3,545-563).
gagaaatcctctacaataa

SEQ ID NO: 398654 - DNA, 19 bp, Homo sapiens
  siRNA target sequence for ASC1p100 (NM_032204.3,813-831).
catgcctctcctggaatta

SEQ ID NO: 398655 - DNA, 19 bp, Homo sapiens
  siRNA target sequence for ASC1p100 (NM_032204.3,915-933).
ccagaagcacgacttttgt

SEQ ID NO: 398656 - DNA, 19 bp, Homo sapiens
  siRNA target sequence for ASC1p100 (NM_032204.3,921-939).
gcacgacttttgttacaga

SEQ ID NO: 398657 - DNA, 19 bp, Homo sapiens
  siRNA target sequence for ASC1p100 (NM_032204.3,959-977).
cagcaattcccgaaatgga

SEQ ID NO: 398658 - DNA, 19 bp, Homo sapiens
  siRNA target sequence for ASC1p100 (NM_032204.3,969-987).
cgaaatggagtctgcaatt

SEQ ID NO: 398659 - DNA, 19 bp, Homo sapiens
  siRNA target sequence for ASC1p100 (NM_032204.3,1190-1208).
ggttcctccgggactatga

SEQ ID NO: 398660 - DNA, 19 bp, Homo sapiens
  siRNA target sequence for ASC1p100 (NM_032204.3,1191-1209).
gttcctccgggactatgat

SEQ ID NO: 398661 - DNA, 19 bp, Homo sapiens
  siRNA target sequence for ASC1p100 (NM_032204.3,1660-1678).
cgcaacctagacagagaaa

SEQ ID NO: 398662 - DNA, 19 bp, Homo sapiens
  siRNA target sequence for ASC1p100 (NM_032204.3,1661-1679).
gcaacctagacagagaaat

SEQ ID NO: 398663 - DNA, 19 bp, Homo sapiens
  siRNA target sequence for ASC1p100 (NM_032204.3,1725-1743).
ccagaatgacgagtttgat

SEQ ID NO: 398664 - DNA, 19 bp, Homo sapiens
  siRNA target sequence for ASC1p100 (NM_032204.3,2120-2138).
ctcccaagcccgaccattt

SEQ ID NO: 398665 - DNA, 19 bp, Homo sapiens
  siRNA target sequence for ASC1p100 (NM_032204.3,2123-2141).
ccaagcccgaccattttgt

SEQ ID NO: 398666 - DNA, 19 bp, Homo sapiens
  siRNA target sequence for ASC1p100 (NM_032204.3,2124-2142).
caagcccgaccattttgtt

SEQ ID NO: 398667 - DNA, 19 bp, Homo sapiens
  siRNA target sequence for FLJ21742 (NM_032207.1,78-96).
ccgtcccatgcgtgatgtt

SEQ ID NO: 398668 - DNA, 19 bp, Homo sapiens
  siRNA target sequence for FLJ21742 (NM_032207.1,79-97).
cgtcccatgcgtgatgttt

SEQ ID NO: 398669 - DNA, 19 bp, Homo sapiens
  siRNA target sequence for FLJ21742 (NM_032207.1,80-98).
gtcccatgcgtgatgtttt

SEQ ID NO: 398670 - DNA, 19 bp, Homo sapiens
  siRNA target sequence for FLJ21742 (NM_032207.1,156-174).
ccagatcagtagaaatctt

SEQ ID NO: 398671 - DNA, 19 bp, Homo sapiens
  siRNA target sequence for FLJ21742 (NM_032207.1,157-175).
cagatcagtagaaatctta

SEQ ID NO: 398672 - DNA, 19 bp, Homo sapiens
  siRNA target sequence for FLJ21742 (NM_032207.1,221-239).
ctctagatgagaaacactt

SEQ ID NO: 398673 - DNA, 19 bp, Homo sapiens
  siRNA target sequence for FLJ21742 (NM_032207.1,276-294).
caggcttgcctcatgtaga

SEQ ID NO: 398674 - DNA, 19 bp, Homo sapiens
  siRNA target sequence for FLJ21742 (NM_032207.1,323-341).
ccaatgccgcactcatgaa

SEQ ID NO: 398675 - DNA, 19 bp, Homo sapiens
  siRNA target sequence for FLJ21742 (NM_032207.1,352-370).
ctggaaacccggatcatga

SEQ ID NO: 398676 - DNA, 19 bp, Homo sapiens
  siRNA target sequence for FLJ21742 (NM_032207.1,354-372).
ggaaacccggatcatgaat

SEQ ID NO: 398677 - DNA, 19 bp, Homo sapiens
  siRNA target sequence for FLJ21742 (NM_032207.1,555-573).
cgcgaaggtcagtaggttt

SEQ ID NO: 398678 - DNA, 19 bp, Homo sapiens
  siRNA target sequence for FLJ21742 (NM_032207.1,562-580).
gtcagtaggtttctaaaga

SEQ ID NO: 398679 - DNA, 19 bp, Homo sapiens
  siRNA target sequence for FLJ21742 (NM_032207.1,586-604).
caagcacctgttgaaaaca

SEQ ID NO: 398680 - DNA, 19 bp, Homo sapiens
  siRNA target sequence for FLJ21742 (NM_032207.1,1117-1135).
gacagcctcgacgagttta

SEQ ID NO: 398681 - DNA, 19 bp, Homo sapiens
  siRNA target sequence for FLJ21742 (NM_032207.1,1119-1137).
cagcctcgacgagtttaga

SEQ ID NO: 398682 - DNA, 19 bp, Homo sapiens
  siRNA target sequence for FLJ21742 (NM_032207.1,1121-1139).
gcctcgacgagtttagaat

SEQ ID NO: 398683 - DNA, 19 bp, Homo sapiens
  siRNA target sequence for FLJ21742 (NM_032207.1,1122-1140).
cctcgacgagtttagaata

SEQ ID NO: 398684 - DNA, 19 bp, Homo sapiens
  siRNA target sequence for FLJ21742 (NM_032207.1,1123-1141).
ctcgacgagtttagaataa

SEQ ID NO: 398685 - DNA, 19 bp, Homo sapiens
  siRNA target sequence for FLJ21742 (NM_032207.1,1125-1143).
cgacgagtttagaataaat

SEQ ID NO: 398686 - DNA, 19 bp, Homo sapiens
  siRNA target sequence for FLJ21742 (NM_032207.1,1440-1458).
cacagtcagctcagcttat

SEQ ID NO: 398687 - DNA, 19 bp, Homo sapiens
  siRNA target sequence for FLJ21742 (NM_032207.1,1451-1469).
cagcttattcggaggattt

SEQ ID NO: 398688 - DNA, 19 bp, Homo sapiens
  siRNA target sequence for FLJ21742 (NM_032207.1,1454-1472).
cttattcggaggattttga

SEQ ID NO: 398689 - DNA, 19 bp, Homo sapiens
  siRNA target sequence for FLJ21742 (NM_032207.1,1537-1555).
ctggacgctttgtctgaat

SEQ ID NO: 398690 - DNA, 19 bp, Homo sapiens
  siRNA target sequence for FLJ21742 (NM_032207.1,1572-1590).
gacagaccttccacaaaca

SEQ ID NO: 398691 - DNA, 19 bp, Homo sapiens
  siRNA target sequence for FLJ21742 (NM_032207.1,1591-1609).
gccgagtctaggaaaaagt

SEQ ID NO: 398692 - DNA, 19 bp, Homo sapiens
  siRNA target sequence for FLJ21742 (NM_032207.1,1746-1764).
gacacccatcgccaatcat

SEQ ID NO: 398693 - DNA, 19 bp, Homo sapiens
  siRNA target sequence for FLJ21742 (NM_032207.1,1748-1766).
cacccatcgccaatcatgt

SEQ ID NO: 398694 - DNA, 19 bp, Homo sapiens
  siRNA target sequence for FLJ21742 (NM_032207.1,1750-1768).
cccatcgccaatcatgtta

SEQ ID NO: 398695 - DNA, 19 bp, Homo sapiens
  siRNA target sequence for FLJ21742 (NM_032207.1,1751-1769).
ccatcgccaatcatgttat

SEQ ID NO: 398696 - DNA, 19 bp, Homo sapiens
  siRNA target sequence for FLJ21742 (NM_032207.1,1755-1773).
cgccaatcatgttatcagt

SEQ ID NO: 398697 - DNA, 19 bp, Homo sapiens
  siRNA target sequence for FLJ21742 (NM_032207.1,1850-1868).
gcctgacgcagcagttcat

SEQ ID NO: 398698 - DNA, 19 bp, Homo sapiens
  siRNA target sequence for FLJ21742 (NM_032207.1,1945-1963).
gaagccaaagagtacatta

SEQ ID NO: 398699 - DNA, 19 bp, Homo sapiens
  siRNA target sequence for FLJ21742 (NM_032207.1,1948-1966).
gccaaagagtacattaggt

SEQ ID NO: 398700 - DNA, 19 bp, Homo sapiens
  siRNA target sequence for FLJ21777 (NM_032209.1,805-823).
cctccgcattccgacatta

SEQ ID NO: 398701 - DNA, 19 bp, Homo sapiens
  siRNA target sequence for FLJ21777 (NM_032209.1,808-826).
ccgcattccgacattacat

SEQ ID NO: 398702 - DNA, 19 bp, Homo sapiens
  siRNA target sequence for FLJ21777 (NM_032209.1,1063-1081).
cgccctgcaccctacgtaa

SEQ ID NO: 398703 - DNA, 19 bp, Homo sapiens
  siRNA target sequence for FLJ21777 (NM_032209.1,1064-1082).
gccctgcaccctacgtaaa

SEQ ID NO: 398704 - DNA, 19 bp, Homo sapiens
  siRNA target sequence for FLJ22269 (NM_032219.2,602-620).
cccctgtgctggtcaagaa

SEQ ID NO: 398705 - DNA, 19 bp, Homo sapiens
  siRNA target sequence for FLJ22269 (NM_032219.2,623-641).
gtgaggacattccgttaat

SEQ ID NO: 398706 - DNA, 19 bp, Homo sapiens
  siRNA target sequence for FLJ22269 (NM_032219.2,636-654).
gttaatgctcggtgtctat

SEQ ID NO: 398707 - DNA, 19 bp, Homo sapiens
  siRNA target sequence for FLJ22269 (NM_032219.2,1208-1226).
ggcaggccgagggaatact

SEQ ID NO: 398708 - DNA, 19 bp, Homo sapiens
  siRNA target sequence for FLJ22269 (NM_032219.2,1210-1228).
caggccgagggaatactca

SEQ ID NO: 398709 - DNA, 19 bp, Homo sapiens
  siRNA target sequence for FLJ22269 (NM_032219.2,1214-1232).
ccgagggaatactcatcat

SEQ ID NO: 398710 - DNA, 19 bp, Homo sapiens
  siRNA target sequence for FLJ22269 (NM_032219.2,1666-1684).
gtccaagcgtccaggttta

SEQ ID NO: 398711 - DNA, 19 bp, Homo sapiens
  siRNA target sequence for FLJ22374 (NM_032222.1,176-194).
cgctctgacctcagcataa

SEQ ID NO: 398712 - DNA, 19 bp, Homo sapiens
  siRNA target sequence for FLJ22374 (NM_032222.1,180-198).
ctgacctcagcataaacaa

SEQ ID NO: 398713 - DNA, 19 bp, Homo sapiens
  siRNA target sequence for FLJ22374 (NM_032222.1,284-302).
gaactcatcaccagatact

SEQ ID NO: 398714 - DNA, 19 bp, Homo sapiens
  siRNA target sequence for FLJ22374 (NM_032222.1,297-315).
gatactttctggatcactt

SEQ ID NO: 398715 - DNA, 19 bp, Homo sapiens
  siRNA target sequence for FLJ22374 (NM_032222.1,318-336).
gaaatacggctaacaattt

SEQ ID NO: 398716 - DNA, 19 bp, Homo sapiens
  siRNA target sequence for FLJ22374 (NM_032222.1,496-514).
caatcttgatggagatgta

SEQ ID NO: 398717 - DNA, 19 bp, Homo sapiens
  siRNA target sequence for FLJ22374 (NM_032222.1,507-525).
gagatgtacttggtaattt

SEQ ID NO: 398718 - DNA, 19 bp, Homo sapiens
  siRNA target sequence for FLJ22374 (NM_032222.1,518-536).
ggtaattttgtatcatcta

SEQ ID NO: 398719 - DNA, 19 bp, Homo sapiens
  siRNA target sequence for FLJ22374 (NM_032222.1,519-537).
gtaattttgtatcatctaa

SEQ ID NO: 398720 - DNA, 19 bp, Homo sapiens
  siRNA target sequence for FLJ22374 (NM_032222.1,568-586).
gacggtcccgggtgaaact

SEQ ID NO: 398721 - DNA, 19 bp, Homo sapiens
  siRNA target sequence for FLJ22374 (NM_032222.1,728-746).
ccacaggattcttttcaca

SEQ ID NO: 398722 - DNA, 19 bp, Homo sapiens
  siRNA target sequence for FLJ22374 (NM_032222.1,1057-1075).
ctacttgcctggtggtaat

SEQ ID NO: 398723 - DNA, 19 bp, Homo sapiens
  siRNA target sequence for FLJ22374 (NM_032222.1,1130-1148).
cccgcacctgtcaggaaaa

SEQ ID NO: 398724 - DNA, 19 bp, Homo sapiens
  siRNA target sequence for FLJ22374 (NM_032222.1,1132-1150).
cgcacctgtcaggaaaaat

SEQ ID NO: 398725 - DNA, 19 bp, Homo sapiens
  siRNA target sequence for FLJ22374 (NM_032222.1,1336-1354).
cagcttttgctgtttcaat

SEQ ID NO: 398726 - DNA, 19 bp, Homo sapiens
  siRNA target sequence for FLJ22374 (NM_032222.1,1562-1580).
gccctcgcagacattgtgt

SEQ ID NO: 398727 - DNA, 19 bp, Homo sapiens
  siRNA target sequence for FLJ22374 (NM_032222.1,1657-1675).
caaagcagatggagtctta

SEQ ID NO: 398728 - DNA, 19 bp, Homo sapiens
  siRNA target sequence for FLJ22374 (NM_032222.1,1667-1685).
ggagtcttagaaacactta

SEQ ID NO: 398729 - DNA, 19 bp, Homo sapiens
  siRNA target sequence for FLJ22374 (NM_032222.1,1680-1698).
cacttacgcttcacagttt

SEQ ID NO: 398730 - DNA, 19 bp, Homo sapiens
  siRNA target sequence for FLJ22374 (NM_032222.1,1682-1700).
cttacgcttcacagtttga

SEQ ID NO: 398731 - DNA, 19 bp, Homo sapiens
  siRNA target sequence for FLJ22374 (NM_032222.1,1816-1834).
catccgccaggactttgat

SEQ ID NO: 398732 - DNA, 19 bp, Homo sapiens
  siRNA target sequence for FLJ22374 (NM_032222.1,1856-1874).
ggagcacatggctactgta

SEQ ID NO: 398733 - DNA, 19 bp, Homo sapiens
  siRNA target sequence for FLJ22679 (NM_032227.1,674-692).
ccaccaagaccgtcatcta

SEQ ID NO: 398734 - DNA, 19 bp, Homo sapiens
  siRNA target sequence for FLJ22679 (NM_032227.1,723-741).
gatgcatctcccctttgaa

SEQ ID NO: 398735 - DNA, 19 bp, Homo sapiens
  siRNA target sequence for FLJ22679 (NM_032227.1,739-757).
gaattggagatttactaca

SEQ ID NO: 398736 - DNA, 19 bp, Homo sapiens
  siRNA target sequence for FLJ22679 (NM_032227.1,910-928).
gtcaccgaagtgaatttga

SEQ ID NO: 398737 - DNA, 19 bp, Homo sapiens
  siRNA target sequence for FLJ22679 (NM_032227.1,1053-1071).
ggctgggcccttgtgtaaa

SEQ ID NO: 398738 - DNA, 19 bp, Homo sapiens
  siRNA target sequence for FLJ22679 (NM_032227.1,1054-1072).
gctgggcccttgtgtaaat

SEQ ID NO: 398739 - DNA, 19 bp, Homo sapiens
  siRNA target sequence for FLJ22679 (NM_032227.1,1089-1107).
ccggcttccagccaagaaa

SEQ ID NO: 398740 - DNA, 19 bp, Homo sapiens
  siRNA target sequence for FLJ22679 (NM_032227.1,1090-1108).
cggcttccagccaagaaaa

SEQ ID NO: 398741 - DNA, 19 bp, Homo sapiens
  siRNA target sequence for FLJ22679 (NM_032227.1,1096-1114).
ccagccaagaaaatagact

SEQ ID NO: 398742 - DNA, 19 bp, Homo sapiens
  siRNA target sequence for FLJ22728 (NM_032228.3,148-166).
gtttcaatcccagaatact

SEQ ID NO: 398743 - DNA, 19 bp, Homo sapiens
  siRNA target sequence for FLJ22728 (NM_032228.3,245-263).
gtcctaaggtgaattcagt

SEQ ID NO: 398744 - DNA, 19 bp, Homo sapiens
  siRNA target sequence for FLJ22728 (NM_032228.3,247-265).
cctaaggtgaattcagtat

SEQ ID NO: 398745 - DNA, 19 bp, Homo sapiens
  siRNA target sequence for FLJ22728 (NM_032228.3,248-266).
ctaaggtgaattcagtata

SEQ ID NO: 398746 - DNA, 19 bp, Homo sapiens
  siRNA target sequence for FLJ22728 (NM_032228.3,252-270).
ggtgaattcagtatatgtt

SEQ ID NO: 398747 - DNA, 19 bp, Homo sapiens
  siRNA target sequence for FLJ22728 (NM_032228.3,319-337).
gtccttagtggcaagcttt

SEQ ID NO: 398748 - DNA, 19 bp, Homo sapiens
  siRNA target sequence for FLJ22728 (NM_032228.3,329-347).
gcaagctttttgacagatt

SEQ ID NO: 398749 - DNA, 19 bp, Homo sapiens
  siRNA target sequence for FLJ22728 (NM_032228.3,395-413).
gcgaactcacccaacctaa

SEQ ID NO: 398750 - DNA, 19 bp, Homo sapiens
  siRNA target sequence for FLJ22728 (NM_032228.3,396-414).
cgaactcacccaacctaaa

SEQ ID NO: 398751 - DNA, 19 bp, Homo sapiens
  siRNA target sequence for FLJ22728 (NM_032228.3,439-457).
gaggtgatcatagattcta

SEQ ID NO: 398752 - DNA, 19 bp, Homo sapiens
  siRNA target sequence for FLJ22728 (NM_032228.3,447-465).
catagattctaccaatatt

SEQ ID NO: 398753 - DNA, 19 bp, Homo sapiens
  siRNA target sequence for FLJ22728 (NM_032228.3,455-473).
ctaccaatattatattcca

SEQ ID NO: 398754 - DNA, 19 bp, Homo sapiens
  siRNA target sequence for FLJ22728 (NM_032228.3,472-490).
cactgtgcagctacagtaa

SEQ ID NO: 398755 - DNA, 19 bp, Homo sapiens
  siRNA target sequence for FLJ22728 (NM_032228.3,479-497).
cagctacagtaaggtttaa

SEQ ID NO: 398756 - DNA, 19 bp, Homo sapiens
  siRNA target sequence for FLJ22728 (NM_032228.3,482-500).
ctacagtaaggtttaatga

SEQ ID NO: 398757 - DNA, 19 bp, Homo sapiens
  siRNA target sequence for FLJ22728 (NM_032228.3,487-505).
gtaaggtttaatgaaaatt

SEQ ID NO: 398758 - DNA, 19 bp, Homo sapiens
  siRNA target sequence for FLJ22728 (NM_032228.3,536-554).
caacgcgacagcttattct

SEQ ID NO: 398759 - DNA, 19 bp, Homo sapiens
  siRNA target sequence for FLJ22728 (NM_032228.3,591-609).
gcatgtatcaacagcatat

SEQ ID NO: 398760 - DNA, 19 bp, Homo sapiens
  siRNA target sequence for FLJ22728 (NM_032228.3,615-633).
ctgtaatcgcaagcatatt

SEQ ID NO: 398761 - DNA, 19 bp, Homo sapiens
  siRNA target sequence for FLJ22728 (NM_032228.3,669-687).
gaagctgattgattcttta

SEQ ID NO: 398762 - DNA, 19 bp, Homo sapiens
  siRNA target sequence for FLJ22728 (NM_032228.3,703-721).
ggcctagtaaatgatatca

SEQ ID NO: 398763 - DNA, 19 bp, Homo sapiens
  siRNA target sequence for FLJ22728 (NM_032228.3,715-733).
gatatcacgccaaaattga

SEQ ID NO: 398764 - DNA, 19 bp, Homo sapiens
  siRNA target sequence for FLJ22728 (NM_032228.3,737-755).
gagacagacctaatacata

SEQ ID NO: 398765 - DNA, 19 bp, Homo sapiens
  siRNA target sequence for FLJ22728 (NM_032228.3,739-757).
gacagacctaatacataca

SEQ ID NO: 398766 - DNA, 19 bp, Homo sapiens
  siRNA target sequence for FLJ22728 (NM_032228.3,770-788).
cattggcagaatatgttgt

SEQ ID NO: 398767 - DNA, 19 bp, Homo sapiens
  siRNA target sequence for FLJ22728 (NM_032228.3,776-794).
cagaatatgttgtacaaca

SEQ ID NO: 398768 - DNA, 19 bp, Homo sapiens
  siRNA target sequence for FLJ22728 (NM_032228.3,793-811).
caagaaggagcaaaactaa

SEQ ID NO: 398769 - DNA, 19 bp, Homo sapiens
  siRNA target sequence for FLJ22728 (NM_032228.3,865-883).
ccaggatggattgataact

SEQ ID NO: 398770 - DNA, 19 bp, Homo sapiens
  siRNA target sequence for FLJ22728 (NM_032228.3,869-887).
gatggattgataactttaa

SEQ ID NO: 398771 - DNA, 19 bp, Homo sapiens
  siRNA target sequence for FLJ22728 (NM_032228.3,873-891).
gattgataactttaatgga

SEQ ID NO: 398772 - DNA, 19 bp, Homo sapiens
  siRNA target sequence for FLJ22728 (NM_032228.3,1000-1018).
cttgcggcagcctggtatt

SEQ ID NO: 398773 - DNA, 19 bp, Homo sapiens
  siRNA target sequence for FLJ22728 (NM_032228.3,1010-1028).
cctggtattccggagttaa

SEQ ID NO: 398774 - DNA, 19 bp, Homo sapiens
  siRNA target sequence for FLJ22728 (NM_032228.3,1011-1029).
ctggtattccggagttaat

SEQ ID NO: 398775 - DNA, 19 bp, Homo sapiens
  siRNA target sequence for FLJ22728 (NM_032228.3,1014-1032).
gtattccggagttaataga

SEQ ID NO: 398776 - DNA, 19 bp, Homo sapiens
  siRNA target sequence for FLJ22728 (NM_032228.3,1024-1042).
gttaatagaccaagaaaca

SEQ ID NO: 398777 - DNA, 19 bp, Homo sapiens
  siRNA target sequence for FLJ22728 (NM_032228.3,1037-1055).
gaaacatcatggtgtataa

SEQ ID NO: 398778 - DNA, 19 bp, Homo sapiens
  siRNA target sequence for FLJ22728 (NM_032228.3,1041-1059).
catcatggtgtataattgt

SEQ ID NO: 398779 - DNA, 19 bp, Homo sapiens
  siRNA target sequence for FLJ22728 (NM_032228.3,1047-1065).
ggtgtataattgtacaaca

SEQ ID NO: 398780 - DNA, 19 bp, Homo sapiens
  siRNA target sequence for FLJ22728 (NM_032228.3,1093-1111).
gaagttgagtaccatgtaa

SEQ ID NO: 398781 - DNA, 19 bp, Homo sapiens
  siRNA target sequence for FLJ22728 (NM_032228.3,1108-1126).
gtaatttccactttcaaga

SEQ ID NO: 398782 - DNA, 19 bp, Homo sapiens
  siRNA target sequence for FLJ22728 (NM_032228.3,1146-1164).
cttcagacggcccaatgta

SEQ ID NO: 398783 - DNA, 19 bp, Homo sapiens
  siRNA target sequence for FLJ22728 (NM_032228.3,1149-1167).
cagacggcccaatgtaaat

SEQ ID NO: 398784 - DNA, 19 bp, Homo sapiens
  siRNA target sequence for FLJ22728 (NM_032228.3,1151-1169).
gacggcccaatgtaaatct

SEQ ID NO: 398785 - DNA, 19 bp, Homo sapiens
  siRNA target sequence for FLJ22728 (NM_032228.3,1168-1186).
ctaacctccaatcatcttt

SEQ ID NO: 398786 - DNA, 19 bp, Homo sapiens
  siRNA target sequence for FLJ22728 (NM_032228.3,1172-1190).
cctccaatcatcttttata

SEQ ID NO: 398787 - DNA, 19 bp, Homo sapiens
  siRNA target sequence for FLJ22728 (NM_032228.3,1173-1191).
ctccaatcatcttttatat

SEQ ID NO: 398788 - DNA, 19 bp, Homo sapiens
  siRNA target sequence for FLJ22728 (NM_032228.3,1180-1198).
catcttttatatcattact

SEQ ID NO: 398789 - DNA, 19 bp, Homo sapiens
  siRNA target sequence for FLJ22728 (NM_032228.3,1289-1307).
ctcgtcttcacaaagctat

SEQ ID NO: 398790 - DNA, 19 bp, Homo sapiens
  siRNA target sequence for FLJ22728 (NM_032228.3,1341-1359).
ggtttggaatactgagaat

SEQ ID NO: 398791 - DNA, 19 bp, Homo sapiens
  siRNA target sequence for FLJ22728 (NM_032228.3,1352-1370).
ctgagaatgtcaatatgtt

SEQ ID NO: 398792 - DNA, 19 bp, Homo sapiens
  siRNA target sequence for FLJ22728 (NM_032228.3,1393-1411).
gataaaaagaccttcaata

SEQ ID NO: 398793 - DNA, 19 bp, Homo sapiens
  siRNA target sequence for FLJ22728 (NM_032228.3,1401-1419).
gaccttcaatattgatgta

SEQ ID NO: 398794 - DNA, 19 bp, Homo sapiens
  siRNA target sequence for FLJ22728 (NM_032228.3,1414-1432).
gatgtacggcagttacatt

SEQ ID NO: 398795 - DNA, 19 bp, Homo sapiens
  siRNA target sequence for FLJ22728 (NM_032228.3,1457-1475).
gcttgggaactaagaagta

SEQ ID NO: 398796 - DNA, 19 bp, Homo sapiens
  siRNA target sequence for FLJ22728 (NM_032228.3,1462-1480).
ggaactaagaagtacgtat

SEQ ID NO: 398797 - DNA, 19 bp, Homo sapiens
  siRNA target sequence for FLJ22728 (NM_032228.3,1463-1481).
gaactaagaagtacgtatt

SEQ ID NO: 398798 - DNA, 19 bp, Homo sapiens
  siRNA target sequence for FLJ22728 (NM_032228.3,1466-1484).
ctaagaagtacgtattgaa

SEQ ID NO: 398799 - DNA, 19 bp, Homo sapiens
  siRNA target sequence for FLJ22728 (NM_032228.3,1527-1545).
caagttgcggaatatacgt

SEQ ID NO: 398800 - DNA, 19 bp, Homo sapiens
  siRNA target sequence for FLJ22728 (NM_032228.3,1533-1551).
gcggaatatacgttatggt

SEQ ID NO: 398801 - DNA, 19 bp, Homo sapiens
  siRNA target sequence for FLJ22728 (NM_032228.3,1534-1552).
cggaatatacgttatggtt

SEQ ID NO: 398802 - DNA, 19 bp, Homo sapiens
  siRNA target sequence for FLJ22728 (NM_032228.3,1535-1553).
ggaatatacgttatggttt

SEQ ID NO: 398803 - DNA, 19 bp, Homo sapiens
  siRNA target sequence for FLJ22728 (NM_032228.3,1536-1554).
gaatatacgttatggtttt

SEQ ID NO: 398804 - DNA, 19 bp, Homo sapiens
  siRNA target sequence for FLJ22728 (NM_032228.3,1543-1561).
cgttatggttttaatacta

SEQ ID NO: 398805 - DNA, 19 bp, Homo sapiens
  siRNA target sequence for FLJ22728 (NM_032228.3,1573-1591).
ctcatctggcgcattttta

SEQ ID NO: 398806 - DNA, 19 bp, Homo sapiens
  siRNA target sequence for FLJ22728 (NM_032228.3,1575-1593).
catctggcgcatttttatt

SEQ ID NO: 398807 - DNA, 19 bp, Homo sapiens
  siRNA target sequence for FLJ22728 (NM_032228.3,1578-1596).
ctggcgcatttttattgca

SEQ ID NO: 398808 - DNA, 19 bp, Homo sapiens
  siRNA target sequence for FLJ22728 (NM_032228.3,1613-1631).
gaaatatctggtactttgt

SEQ ID NO: 398809 - DNA, 19 bp, Homo sapiens
  siRNA target sequence for FLJ22728 (NM_032228.3,1633-1651).
gttagtctgtgttacaagt

SEQ ID NO: 398810 - DNA, 19 bp, Homo sapiens
  siRNA target sequence for FLJ22728 (NM_032228.3,1666-1684).
cgagcatccagcactatga

SEQ ID NO: 398811 - DNA, 19 bp, Homo sapiens
  siRNA target sequence for FLJ22728 (NM_032228.3,1669-1687).
gcatccagcactatgagat

SEQ ID NO: 398812 - DNA, 19 bp, Homo sapiens
  siRNA target sequence for FLJ22728 (NM_032228.3,1670-1688).
catccagcactatgagata

SEQ ID NO: 398813 - DNA, 19 bp, Homo sapiens
  siRNA target sequence for SLITRK6 (NM_032229.2,468-486).
gtggattcatctcttttat

SEQ ID NO: 398814 - DNA, 19 bp, Homo sapiens
  siRNA target sequence for SLITRK6 (NM_032229.2,495-513).
ccttgcctgtatatcttta

SEQ ID NO: 398815 - DNA, 19 bp, Homo sapiens
  siRNA target sequence for SLITRK6 (NM_032229.2,548-566).
cttgtgattctctttgcaa

SEQ ID NO: 398816 - DNA, 19 bp, Homo sapiens
  siRNA target sequence for SLITRK6 (NM_032229.2,583-601).
ggcacaatgctaataaatt

SEQ ID NO: 398817 - DNA, 19 bp, Homo sapiens
  siRNA target sequence for SLITRK6 (NM_032229.2,587-605).
caatgctaataaattgtga

SEQ ID NO: 398818 - DNA, 19 bp, Homo sapiens
  siRNA target sequence for SLITRK6 (NM_032229.2,614-632).
gtatcaagatggtatctga

SEQ ID NO: 398819 - DNA, 19 bp, Homo sapiens
  siRNA target sequence for SLITRK6 (NM_032229.2,687-705).
gacgatgcttcacacaaat

SEQ ID NO: 398820 - DNA, 19 bp, Homo sapiens
  siRNA target sequence for SLITRK6 (NM_032229.2,717-735).
gcttaccaatgctatttca

SEQ ID NO: 398821 - DNA, 19 bp, Homo sapiens
  siRNA target sequence for SLITRK6 (NM_032229.2,796-814).
ctcctgaaacaacttcata

SEQ ID NO: 398822 - DNA, 19 bp, Homo sapiens
  siRNA target sequence for SLITRK6 (NM_032229.2,799-817).
ctgaaacaacttcatatca

SEQ ID NO: 398823 - DNA, 19 bp, Homo sapiens
  siRNA target sequence for SLITRK6 (NM_032229.2,805-823).
caacttcatatcaatcaca

SEQ ID NO: 398824 - DNA, 19 bp, Homo sapiens
  siRNA target sequence for SLITRK6 (NM_032229.2,879-897).
cctgcaagcagataacaat

SEQ ID NO: 398825 - DNA, 19 bp, Homo sapiens
  siRNA target sequence for SLITRK6 (NM_032229.2,913-931).
gaaccaagtgcctttagca

SEQ ID NO: 398826 - DNA, 19 bp, Homo sapiens
  siRNA target sequence for SLITRK6 (NM_032229.2,936-954).
caacagactcaaagtgtta

SEQ ID NO: 398827 - DNA, 19 bp, Homo sapiens
  siRNA target sequence for SLITRK6 (NM_032229.2,1010-1028).
ctttaacccatctagatct

SEQ ID NO: 398828 - DNA, 19 bp, Homo sapiens
  siRNA target sequence for SLITRK6 (NM_032229.2,1030-1048).
cgtggaaatcaattacaaa

SEQ ID NO: 398829 - DNA, 19 bp, Homo sapiens
  siRNA target sequence for SLITRK6 (NM_032229.2,1049-1067).
cattgccttatgttggttt

SEQ ID NO: 398830 - DNA, 19 bp, Homo sapiens
  siRNA target sequence for SLITRK6 (NM_032229.2,1077-1095).
cattggccgaatattggat

SEQ ID NO: 398831 - DNA, 19 bp, Homo sapiens
  siRNA target sequence for SLITRK6 (NM_032229.2,1082-1100).
gccgaatattggatcttca

SEQ ID NO: 398832 - DNA, 19 bp, Homo sapiens
  siRNA target sequence for SLITRK6 (NM_032229.2,1085-1103).
gaatattggatcttcagtt

SEQ ID NO: 398833 - DNA, 19 bp, Homo sapiens
  siRNA target sequence for SLITRK6 (NM_032229.2,1099-1117).
cagttggaggacaacaaat

SEQ ID NO: 398834 - DNA, 19 bp, Homo sapiens
  siRNA target sequence for SLITRK6 (NM_032229.2,1113-1131).
caaatgggcctgcaattgt

SEQ ID NO: 398835 - DNA, 19 bp, Homo sapiens
  siRNA target sequence for SLITRK6 (NM_032229.2,1124-1142).
gcaattgtgacttattgca

SEQ ID NO: 398836 - DNA, 19 bp, Homo sapiens
  siRNA target sequence for SLITRK6 (NM_032229.2,1164-1182).
catgcctccacagtctata

SEQ ID NO: 398837 - DNA, 19 bp, Homo sapiens
  siRNA target sequence for SLITRK6 (NM_032229.2,1167-1185).
gcctccacagtctataatt

SEQ ID NO: 398838 - DNA, 19 bp, Homo sapiens
  siRNA target sequence for SLITRK6 (NM_032229.2,1197-1215).
ctgcaacagccctccattt

SEQ ID NO: 398839 - DNA, 19 bp, Homo sapiens
  siRNA target sequence for SLITRK6 (NM_032229.2,1238-1256).
gactaaagaaggaatctat

SEQ ID NO: 398840 - DNA, 19 bp, Homo sapiens
  siRNA target sequence for SLITRK6 (NM_032229.2,1309-1327).
catctggcagcaacatctt

SEQ ID NO: 398841 - DNA, 19 bp, Homo sapiens
  siRNA target sequence for SLITRK6 (NM_032229.2,1315-1333).
gcagcaacatcttcaataa

SEQ ID NO: 398842 - DNA, 19 bp, Homo sapiens
  siRNA target sequence for SLITRK6 (NM_032229.2,1336-1354).
gatagtcgcatgtcaacta

SEQ ID NO: 398843 - DNA, 19 bp, Homo sapiens
  siRNA target sequence for SLITRK6 (NM_032229.2,1356-1374).
gaccacgtccattctaaaa

SEQ ID NO: 398844 - DNA, 19 bp, Homo sapiens
  siRNA target sequence for SLITRK6 (NM_032229.2,1388-1406).
caccaggtttgatacctta

SEQ ID NO: 398845 - DNA, 19 bp, Homo sapiens
  siRNA target sequence for SLITRK6 (NM_032229.2,1475-1493).
ccccatcaggacttctaat

SEQ ID NO: 398846 - DNA, 19 bp, Homo sapiens
  siRNA target sequence for SLITRK6 (NM_032229.2,1476-1494).
cccatcaggacttctaata

SEQ ID NO: 398847 - DNA, 19 bp, Homo sapiens
  siRNA target sequence for SLITRK6 (NM_032229.2,1478-1496).
catcaggacttctaataca

SEQ ID NO: 398848 - DNA, 19 bp, Homo sapiens
  siRNA target sequence for SLITRK6 (NM_032229.2,1484-1502).
gacttctaatacattgtca

SEQ ID NO: 398849 - DNA, 19 bp, Homo sapiens
  siRNA target sequence for SLITRK6 (NM_032229.2,1499-1517).
gtcaggagcgcaacattga

SEQ ID NO: 398850 - DNA, 19 bp, Homo sapiens
  siRNA target sequence for SLITRK6 (NM_032229.2,1501-1519).
caggagcgcaacattgaaa

SEQ ID NO: 398851 - DNA, 19 bp, Homo sapiens
  siRNA target sequence for SLITRK6 (NM_032229.2,1506-1524).
gcgcaacattgaaagctta

SEQ ID NO: 398852 - DNA, 19 bp, Homo sapiens
  siRNA target sequence for SLITRK6 (NM_032229.2,1507-1525).
cgcaacattgaaagcttat

SEQ ID NO: 398853 - DNA, 19 bp, Homo sapiens
  siRNA target sequence for SLITRK6 (NM_032229.2,1512-1530).
cattgaaagcttatcagat

SEQ ID NO: 398854 - DNA, 19 bp, Homo sapiens
  siRNA target sequence for SLITRK6 (NM_032229.2,1533-1551).
gagacctcctccgcaaaat

SEQ ID NO: 398855 - DNA, 19 bp, Homo sapiens
  siRNA target sequence for SLITRK6 (NM_032229.2,1541-1559).
ctccgcaaaatcctagaaa

SEQ ID NO: 398856 - DNA, 19 bp, Homo sapiens
  siRNA target sequence for SLITRK6 (NM_032229.2,1570-1588).
gcgggaaatattattcaca

SEQ ID NO: 398857 - DNA, 19 bp, Homo sapiens
  siRNA target sequence for FLJ22789 (NM_032230.1,127-145).
gcacataccgtggatttct

SEQ ID NO: 398858 - DNA, 19 bp, Homo sapiens
  siRNA target sequence for FLJ22789 (NM_032230.1,128-146).
cacataccgtggatttcta

SEQ ID NO: 398859 - DNA, 19 bp, Homo sapiens
  siRNA target sequence for FLJ22789 (NM_032230.1,270-288).
gtgggaagcaggtatgact

SEQ ID NO: 398860 - DNA, 19 bp, Homo sapiens
  siRNA target sequence for FLJ22789 (NM_032230.1,274-292).
gaagcaggtatgactgatt

SEQ ID NO: 398861 - DNA, 19 bp, Homo sapiens
  siRNA target sequence for FLJ22789 (NM_032230.1,346-364).
gctctggctgcgaaatact

SEQ ID NO: 398862 - DNA, 19 bp, Homo sapiens
  siRNA target sequence for FLJ22789 (NM_032230.1,349-367).
ctggctgcgaaatactatt

SEQ ID NO: 398863 - DNA, 19 bp, Homo sapiens
  siRNA target sequence for FLJ22789 (NM_032230.1,351-369).
ggctgcgaaatactattct

SEQ ID NO: 398864 - DNA, 19 bp, Homo sapiens
  siRNA target sequence for FLJ22789 (NM_032230.1,353-371).
ctgcgaaatactattctgt

SEQ ID NO: 398865 - DNA, 19 bp, Homo sapiens
  siRNA target sequence for FLJ22789 (NM_032230.1,416-434).
cccttcgaggaaatcaaaa

SEQ ID NO: 398866 - DNA, 19 bp, Homo sapiens
  siRNA target sequence for FLJ22789 (NM_032230.1,529-547).
gctgactactatggaataa

SEQ ID NO: 398867 - DNA, 19 bp, Homo sapiens
  siRNA target sequence for FLJ22789 (NM_032230.1,578-596).
gctacctaagctctttttt

SEQ ID NO: 398868 - DNA, 19 bp, Homo sapiens
  siRNA target sequence for FLJ22789 (NM_032230.1,603-621).
gaagtatggcttaaaagtt

SEQ ID NO: 398869 - DNA, 19 bp, Homo sapiens
  siRNA target sequence for FLJ22789 (NM_032230.1,611-629).
gcttaaaagtttatggaat

SEQ ID NO: 398870 - DNA, 19 bp, Homo sapiens
  siRNA target sequence for FLJ22789 (NM_032230.1,631-649).
gattcttcaaataccaata

SEQ ID NO: 398871 - DNA, 19 bp, Homo sapiens
  siRNA target sequence for FLJ22789 (NM_032230.1,635-653).
cttcaaataccaatactca

SEQ ID NO: 398872 - DNA, 19 bp, Homo sapiens
  siRNA target sequence for FLJ22789 (NM_032230.1,701-719).
gtcatgctcagtcaagatt

SEQ ID NO: 398873 - DNA, 19 bp, Homo sapiens
  siRNA target sequence for FLJ22789 (NM_032230.1,711-729).
gtcaagattagatgtcaat

SEQ ID NO: 398874 - DNA, 19 bp, Homo sapiens
  siRNA target sequence for FLJ22789 (NM_032230.1,724-742).
gtcaatggactagcattaa

SEQ ID NO: 398875 - DNA, 19 bp, Homo sapiens
  siRNA target sequence for FLJ22789 (NM_032230.1,726-744).
caatggactagcattaaaa

SEQ ID NO: 398876 - DNA, 19 bp, Homo sapiens
  siRNA target sequence for FLJ22789 (NM_032230.1,813-831).
cagtcctacaaatcaagaa

SEQ ID NO: 398877 - DNA, 19 bp, Homo sapiens
  siRNA target sequence for FLJ22789 (NM_032230.1,868-886).
ggctctgtaatttctaata

SEQ ID NO: 398878 - DNA, 19 bp, Homo sapiens
  siRNA target sequence for FLJ22789 (NM_032230.1,969-987).
ccttttgcctattaatgct

SEQ ID NO: 398879 - DNA, 19 bp, Homo sapiens
  siRNA target sequence for FLJ22789 (NM_032230.1,985-1003).
gctgtagagcctacttctt

SEQ ID NO: 398880 - DNA, 19 bp, Homo sapiens
  siRNA target sequence for FLJ22789 (NM_032230.1,1068-1086).
gtcaagtgaatcaaatata

SEQ ID NO: 398881 - DNA, 19 bp, Homo sapiens
  siRNA target sequence for FLJ22789 (NM_032230.1,1121-1139).
cagaactccatgacattat

SEQ ID NO: 398882 - DNA, 19 bp, Homo sapiens
  siRNA target sequence for FLJ22789 (NM_032230.1,1123-1141).
gaactccatgacattatta

SEQ ID NO: 398883 - DNA, 19 bp, Homo sapiens
  siRNA target sequence for FLJ22789 (NM_032230.1,1195-1213).
ccaaatactttgcgaatat

SEQ ID NO: 398884 - DNA, 19 bp, Homo sapiens
  siRNA target sequence for FLJ22789 (NM_032230.1,1259-1277).
gctaccacctcttatctga

SEQ ID NO: 398885 - DNA, 19 bp, Homo sapiens
  siRNA target sequence for FLJ22789 (NM_032230.1,1264-1282).
cacctcttatctgaagaat

SEQ ID NO: 398886 - DNA, 19 bp, Homo sapiens
  siRNA target sequence for FLJ22789 (NM_032230.1,1300-1318).
gaacgtactcaggaaaagt

SEQ ID NO: 398887 - DNA, 19 bp, Homo sapiens
  siRNA target sequence for FLJ22789 (NM_032230.1,1328-1346).
caatgtgccactatttaaa

SEQ ID NO: 398888 - DNA, 19 bp, Homo sapiens
  siRNA target sequence for FLJ22789 (NM_032230.1,1366-1384).
ggtcgtaatgccagaatgt

SEQ ID NO: 398889 - DNA, 19 bp, Homo sapiens
  siRNA target sequence for FLJ22789 (NM_032230.1,1376-1394).
ccagaatgtcagcatgttt

SEQ ID NO: 398890 - DNA, 19 bp, Homo sapiens
  siRNA target sequence for FLJ22789 (NM_032230.1,1430-1448).
ctactgaatcactcttcta

SEQ ID NO: 398891 - DNA, 19 bp, Homo sapiens
  siRNA target sequence for FLJ22789 (NM_032230.1,1464-1482).
ggatattattaaagattgt

SEQ ID NO: 398892 - DNA, 19 bp, Homo sapiens
  siRNA target sequence for FLJ22789 (NM_032230.1,1499-1517).
gtgatcggcatgttggtaa

SEQ ID NO: 398893 - DNA, 19 bp, Homo sapiens
  siRNA target sequence for FLJ22789 (NM_032230.1,1501-1519).
gatcggcatgttggtaaaa

SEQ ID NO: 398894 - DNA, 19 bp, Homo sapiens
  siRNA target sequence for FLJ22789 (NM_032230.1,1504-1522).
cggcatgttggtaaaattt

SEQ ID NO: 398895 - DNA, 19 bp, Homo sapiens
  siRNA target sequence for FLJ22789 (NM_032230.1,1552-1570).
gtcagacggtctctaaaga

SEQ ID NO: 398896 - DNA, 19 bp, Homo sapiens
  siRNA target sequence for FLJ22789 (NM_032230.1,1562-1580).
ctctaaagaagcttggatt

SEQ ID NO: 398897 - DNA, 19 bp, Homo sapiens
  siRNA target sequence for FLJ22789 (NM_032230.1,1590-1608).
caagctgccagaaaaaatt

SEQ ID NO: 398898 - DNA, 19 bp, Homo sapiens
  siRNA target sequence for FLJ22789 (NM_032230.1,1593-1611).
gctgccagaaaaaattata

SEQ ID NO: 398899 - DNA, 19 bp, Homo sapiens
  siRNA target sequence for FLJ22789 (NM_032230.1,1614-1632).
gaactactacgagaagtat

SEQ ID NO: 398900 - DNA, 19 bp, Homo sapiens
  siRNA target sequence for FLJ22789 (NM_032230.1,1629-1647).
gtataagcctcgaatgaat

SEQ ID NO: 398901 - DNA, 19 bp, Homo sapiens
  siRNA target sequence for FLJ22789 (NM_032230.1,1681-1699).
ctggctccctgtatagaga

SEQ ID NO: 398902 - DNA, 19 bp, Homo sapiens
  siRNA target sequence for FLJ22789 (NM_032230.1,1685-1703).
ctccctgtatagagacttt

SEQ ID NO: 398903 - DNA, 19 bp, Homo sapiens
  siRNA target sequence for FLJ22789 (NM_032230.1,1718-1736).
gactttgttacctgaaaga

SEQ ID NO: 398904 - DNA, 19 bp, Homo sapiens
  siRNA target sequence for FLJ22789 (NM_032230.1,1773-1791).
gtttgatcccgtgaaatct

SEQ ID NO: 398905 - DNA, 19 bp, Homo sapiens
  siRNA target sequence for FLJ22789 (NM_032230.1,1783-1801).
gtgaaatctcccagatgtt

SEQ ID NO: 398906 - DNA, 19 bp, Homo sapiens
  siRNA target sequence for FLJ22789 (NM_032230.1,1785-1803).
gaaatctcccagatgttat

SEQ ID NO: 398907 - DNA, 19 bp, Homo sapiens
  siRNA target sequence for FLJ22875 (NM_032231.3,232-250).
ccggatcatggaagagaaa

SEQ ID NO: 398908 - DNA, 19 bp, Homo sapiens
  siRNA target sequence for FLJ22875 (NM_032231.3,279-297).
ctatccgggacccagaaaa

SEQ ID NO: 398909 - DNA, 19 bp, Homo sapiens
  siRNA target sequence for FLJ22875 (NM_032231.3,298-316).
gcccaatactttagaagaa

SEQ ID NO: 398910 - DNA, 19 bp, Homo sapiens
  siRNA target sequence for FLJ22875 (NM_032231.3,320-338).
gaagtggtctcggaaagtt

SEQ ID NO: 398911 - DNA, 19 bp, Homo sapiens
  siRNA target sequence for FLJ22875 (NM_032231.3,341-359).
gtggaagttcaggagataa

SEQ ID NO: 398912 - DNA, 19 bp, Homo sapiens
  siRNA target sequence for FLJ22875 (NM_032231.3,343-361).
ggaagttcaggagataaat

SEQ ID NO: 398913 - DNA, 19 bp, Homo sapiens
  siRNA target sequence for FLJ22875 (NM_032231.3,365-383).
gaagaatatctggttatta

SEQ ID NO: 398914 - DNA, 19 bp, Homo sapiens
  siRNA target sequence for FLJ22875 (NM_032231.3,368-386).
gaatatctggttattatca

SEQ ID NO: 398915 - DNA, 19 bp, Homo sapiens
  siRNA target sequence for FLJ22875 (NM_032231.3,385-403).
caggttcacgccaacagta

SEQ ID NO: 398916 - DNA, 19 bp, Homo sapiens
  siRNA target sequence for FLJ22875 (NM_032231.3,411-429).
gctctttggcgactcttat

SEQ ID NO: 398917 - DNA, 19 bp, Homo sapiens
  siRNA target sequence for FLJ22875 (NM_032231.3,412-430).
ctctttggcgactcttatt

SEQ ID NO: 398918 - DNA, 19 bp, Homo sapiens
  siRNA target sequence for FLJ22875 (NM_032231.3,436-454).
gtgcttaagagtaaaactt

SEQ ID NO: 398919 - DNA, 19 bp, Homo sapiens
  siRNA target sequence for FLJ22875 (NM_032231.3,455-473).
cagcgatgtttaccattta

SEQ ID NO: 398920 - DNA, 19 bp, Homo sapiens
  siRNA target sequence for FLJ22875 (NM_032231.3,457-475).
gcgatgtttaccatttaaa

SEQ ID NO: 398921 - DNA, 19 bp, Homo sapiens
  siRNA target sequence for FLJ22875 (NM_032231.3,476-494).
cataagttggaaatctaca

SEQ ID NO: 398922 - DNA, 19 bp, Homo sapiens
  siRNA target sequence for FLJ22875 (NM_032231.3,524-542).
gacatcaataagcagataa

SEQ ID NO: 398923 - DNA, 19 bp, Homo sapiens
  siRNA target sequence for FLJ22875 (NM_032231.3,579-597).
ccaacttacgggaaattgt

SEQ ID NO: 398924 - DNA, 19 bp, Homo sapiens
  siRNA target sequence for FLJ23027 (NM_032233.2,179-197).
gaagagtcgagtaaaaact

SEQ ID NO: 398925 - DNA, 19 bp, Homo sapiens
  siRNA target sequence for FLJ23027 (NM_032233.2,226-244).
ctgtgtcaccaaaggaaat

SEQ ID NO: 398926 - DNA, 19 bp, Homo sapiens
  siRNA target sequence for FLJ23027 (NM_032233.2,442-460).
cttctgtcgagggttttga

SEQ ID NO: 398927 - DNA, 19 bp, Homo sapiens
  siRNA target sequence for FLJ23027 (NM_032233.2,445-463).
ctgtcgagggttttgaaat

SEQ ID NO: 398928 - DNA, 19 bp, Homo sapiens
  siRNA target sequence for FLJ23027 (NM_032233.2,535-553).
gggttccacgaaaattgct

SEQ ID NO: 398929 - DNA, 19 bp, Homo sapiens
  siRNA target sequence for FLJ23027 (NM_032233.2,536-554).
ggttccacgaaaattgcta

SEQ ID NO: 398930 - DNA, 19 bp, Homo sapiens
  siRNA target sequence for FLJ23027 (NM_032233.2,537-555).
gttccacgaaaattgctaa

SEQ ID NO: 398931 - DNA, 19 bp, Homo sapiens
  siRNA target sequence for FLJ23027 (NM_032233.2,540-558).
ccacgaaaattgctaatga

SEQ ID NO: 398932 - DNA, 19 bp, Homo sapiens
  siRNA target sequence for FLJ23027 (NM_032233.2,551-569).
gctaatgactgttgaatct

SEQ ID NO: 398933 - DNA, 19 bp, Homo sapiens
  siRNA target sequence for FLJ23027 (NM_032233.2,557-575).
gactgttgaatctgctaaa

SEQ ID NO: 398934 - DNA, 19 bp, Homo sapiens
  siRNA target sequence for FLJ23027 (NM_032233.2,632-650).
catcgcactggcctttcat

SEQ ID NO: 398935 - DNA, 19 bp, Homo sapiens
  siRNA target sequence for FLJ23027 (NM_032233.2,680-698).
cttctggcagccctatatt

SEQ ID NO: 398936 - DNA, 19 bp, Homo sapiens
  siRNA target sequence for FLJ23027 (NM_032233.2,683-701).
ctggcagccctatattcaa

SEQ ID NO: 398937 - DNA, 19 bp, Homo sapiens
  siRNA target sequence for FLJ23027 (NM_032233.2,703-721).
ccctccccagtgaatatga

SEQ ID NO: 398938 - DNA, 19 bp, Homo sapiens
  siRNA target sequence for FLJ23027 (NM_032233.2,705-723).
ctccccagtgaatatgaca

SEQ ID NO: 398939 - DNA, 19 bp, Homo sapiens
  siRNA target sequence for FLJ23027 (NM_032233.2,764-782).
gtccacacaagctatacat

SEQ ID NO: 398940 - DNA, 19 bp, Homo sapiens
  siRNA target sequence for FLJ23027 (NM_032233.2,766-784).
ccacacaagctatacatga

SEQ ID NO: 398941 - DNA, 19 bp, Homo sapiens
  siRNA target sequence for FLJ23027 (NM_032233.2,813-831).
cgacagtacgcctacttct

SEQ ID NO: 398942 - DNA, 19 bp, Homo sapiens
  siRNA target sequence for FLJ23027 (NM_032233.2,814-832).
gacagtacgcctacttcta

SEQ ID NO: 398943 - DNA, 19 bp, Homo sapiens
  siRNA target sequence for FLJ23027 (NM_032233.2,816-834).
cagtacgcctacttctata

SEQ ID NO: 398944 - DNA, 19 bp, Homo sapiens
  siRNA target sequence for FLJ23027 (NM_032233.2,848-866).
ccatcctcatgccaacaaa

SEQ ID NO: 398945 - DNA, 19 bp, Homo sapiens
  siRNA target sequence for FLJ23027 (NM_032233.2,905-923).
gtgggcagtctcttctgtt

SEQ ID NO: 398946 - DNA, 19 bp, Homo sapiens
  siRNA target sequence for FLJ23027 (NM_032233.2,1080-1098).
cgggctggagagcagattt

SEQ ID NO: 398947 - DNA, 19 bp, Homo sapiens
  siRNA target sequence for FLJ23027 (NM_032233.2,1081-1099).
gggctggagagcagattta

SEQ ID NO: 398948 - DNA, 19 bp, Homo sapiens
  siRNA target sequence for FLJ23027 (NM_032233.2,1117-1135).
gatccaacgcagagtttgt

SEQ ID NO: 398949 - DNA, 19 bp, Homo sapiens
  siRNA target sequence for FLJ23027 (NM_032233.2,1120-1138).
ccaacgcagagtttgtgat

SEQ ID NO: 398950 - DNA, 19 bp, Homo sapiens
  siRNA target sequence for FLJ23027 (NM_032233.2,1166-1184).
ctcacacgacagagtgaaa

SEQ ID NO: 398951 - DNA, 19 bp, Homo sapiens
  siRNA target sequence for FLJ23027 (NM_032233.2,1323-1341).
ctccgagtattctgtatga

SEQ ID NO: 398952 - DNA, 19 bp, Homo sapiens
  siRNA target sequence for FLJ23027 (NM_032233.2,1325-1343).
ccgagtattctgtatgact

SEQ ID NO: 398953 - DNA, 19 bp, Homo sapiens
  siRNA target sequence for FLJ23027 (NM_032233.2,1374-1392).
gacagcgctattgatagaa

SEQ ID NO: 398954 - DNA, 19 bp, Homo sapiens
  siRNA target sequence for FLJ23027 (NM_032233.2,1378-1396).
gcgctattgatagaatctt

SEQ ID NO: 398955 - DNA, 19 bp, Homo sapiens
  siRNA target sequence for FLJ23027 (NM_032233.2,1403-1421).
ggggaactcggaatttcct

SEQ ID NO: 398956 - DNA, 19 bp, Homo sapiens
  siRNA target sequence for FLJ23027 (NM_032233.2,1439-1457).
ggtcaaactttggacattt

SEQ ID NO: 398957 - DNA, 19 bp, Homo sapiens
  siRNA target sequence for FLJ23027 (NM_032233.2,1498-1516).
caactattgaggaagataa

SEQ ID NO: 398958 - DNA, 19 bp, Homo sapiens
  siRNA target sequence for FLJ23027 (NM_032233.2,1572-1590).
cgcttaggtgagaaagaga

SEQ ID NO: 398959 - DNA, 19 bp, Homo sapiens
  siRNA target sequence for FLJ23027 (NM_032233.2,1617-1635).
gctgtcaaccgggaatact

SEQ ID NO: 398960 - DNA, 19 bp, Homo sapiens
  siRNA target sequence for FLJ23027 (NM_032233.2,1618-1636).
ctgtcaaccgggaatacta

SEQ ID NO: 398961 - DNA, 19 bp, Homo sapiens
  siRNA target sequence for FLJ23027 (NM_032233.2,1658-1676).
ggctccgcttcccaaatat

SEQ ID NO: 398962 - DNA, 19 bp, Homo sapiens
  siRNA target sequence for FLJ23027 (NM_032233.2,1660-1678).
ctccgcttcccaaatatga

SEQ ID NO: 398963 - DNA, 19 bp, Homo sapiens
  siRNA target sequence for FLJ23027 (NM_032233.2,1725-1743).
ctccccctggtcttgagaa

SEQ ID NO: 398964 - DNA, 19 bp, Homo sapiens
  siRNA target sequence for FLJ23027 (NM_032233.2,1824-1842).
cttgtaaacggtgaaaact

SEQ ID NO: 398965 - DNA, 19 bp, Homo sapiens
  siRNA target sequence for FLJ23027 (NM_032233.2,1827-1845).
gtaaacggtgaaaactcta

SEQ ID NO: 398966 - DNA, 19 bp, Homo sapiens
  siRNA target sequence for FLJ23027 (NM_032233.2,1856-1874).
gaccaggtccgaaaatgaa

SEQ ID NO: 398967 - DNA, 19 bp, Homo sapiens
  siRNA target sequence for FLJ23027 (NM_032233.2,1865-1883).
cgaaaatgaaagtctcaat

SEQ ID NO: 398968 - DNA, 19 bp, Homo sapiens
  siRNA target sequence for FLJ23027 (NM_032233.2,1902-1920).
gttgaagacgccaaaggat

SEQ ID NO: 398969 - DNA, 19 bp, Homo sapiens
  siRNA target sequence for FLJ23059 (NM_032234.2,116-134).
gtcccttaattctcaagaa

SEQ ID NO: 398970 - DNA, 19 bp, Homo sapiens
  siRNA target sequence for FLJ23059 (NM_032234.2,151-169).
ctgactctctactgcattt

SEQ ID NO: 398971 - DNA, 19 bp, Homo sapiens
  siRNA target sequence for FLJ23059 (NM_032234.2,270-288).
cccattcagacaaaaataa

SEQ ID NO: 398972 - DNA, 19 bp, Homo sapiens
  siRNA target sequence for FLJ23059 (NM_032234.2,296-314).
ctctccaccaggtaaccaa

SEQ ID NO: 398973 - DNA, 19 bp, Homo sapiens
  siRNA target sequence for FLJ23059 (NM_032234.2,419-437).
gctgcgctcaaataagaga

SEQ ID NO: 398974 - DNA, 19 bp, Homo sapiens
  siRNA target sequence for FLJ23059 (NM_032234.2,484-502).
gcgttcaatctcaggatat

SEQ ID NO: 398975 - DNA, 19 bp, Homo sapiens
  siRNA target sequence for FLJ23059 (NM_032234.2,486-504).
gttcaatctcaggatatct

SEQ ID NO: 398976 - DNA, 19 bp, Homo sapiens
  siRNA target sequence for FLJ23059 (NM_032234.2,587-605).
cctgcaagttgataactct

SEQ ID NO: 398977 - DNA, 19 bp, Homo sapiens
  siRNA target sequence for FLJ23059 (NM_032234.2,594-612).
gttgataactctttgataa

SEQ ID NO: 398978 - DNA, 19 bp, Homo sapiens
  siRNA target sequence for FLJ23059 (NM_032234.2,661-679).
caggacactctgtggaaaa

SEQ ID NO: 398979 - DNA, 19 bp, Homo sapiens
  siRNA target sequence for FLJ23059 (NM_032234.2,686-704).
ctgtaaagtgagttacaca

SEQ ID NO: 398980 - DNA, 19 bp, Homo sapiens
  siRNA target sequence for FLJ23059 (NM_032234.2,745-763).
gccttccaggagataagat

SEQ ID NO: 398981 - DNA, 19 bp, Homo sapiens
  siRNA target sequence for FLJ23059 (NM_032234.2,777-795).
gtagcaggcttgttaaata

SEQ ID NO: 398982 - DNA, 19 bp, Homo sapiens
  siRNA target sequence for FLJ23059 (NM_032234.2,823-841).
cctccagtagcatcaaact

SEQ ID NO: 398983 - DNA, 19 bp, Homo sapiens
  siRNA target sequence for FLJ23059 (NM_032234.2,869-887).
gcaggatgtatccaaagaa

SEQ ID NO: 398984 - DNA, 19 bp, Homo sapiens
  siRNA target sequence for FLJ23059 (NM_032234.2,902-920).
gtataacatctctgatcat

SEQ ID NO: 398985 - DNA, 19 bp, Homo sapiens
  siRNA target sequence for FLJ23059 (NM_032234.2,913-931).
ctgatcatgctatacaaga

SEQ ID NO: 398986 - DNA, 19 bp, Homo sapiens
  siRNA target sequence for FLJ23059 (NM_032234.2,930-948).
gaactaaaccagactgtaa

SEQ ID NO: 398987 - DNA, 19 bp, Homo sapiens
  siRNA target sequence for FLJ23059 (NM_032234.2,974-992).
ggaccagtctcctactgtt

SEQ ID NO: 398988 - DNA, 19 bp, Homo sapiens
  siRNA target sequence for FLJ23059 (NM_032234.2,1074-1092).
caaaacagaccagatgaat

SEQ ID NO: 398989 - DNA, 19 bp, Homo sapiens
  siRNA target sequence for FLJ23059 (NM_032234.2,1115-1133).
caaggagatgctaagtagt

SEQ ID NO: 398990 - DNA, 19 bp, Homo sapiens
  siRNA target sequence for FLJ23059 (NM_032234.2,1159-1177).
ctcacggggaggtaaacca

SEQ ID NO: 398991 - DNA, 19 bp, Homo sapiens
  siRNA target sequence for FLJ23059 (NM_032234.2,1167-1185).
gaggtaaaccacaaccaaa

SEQ ID NO: 398992 - DNA, 19 bp, Homo sapiens
  siRNA target sequence for FLJ23059 (NM_032234.2,1197-1215).
gtcagctcaggcagtaata

SEQ ID NO: 398993 - DNA, 19 bp, Homo sapiens
  siRNA target sequence for FLJ23059 (NM_032234.2,1202-1220).
ctcaggcagtaataactca

SEQ ID NO: 398994 - DNA, 19 bp, Homo sapiens
  siRNA target sequence for FLJ23059 (NM_032234.2,1230-1248).
ggtagtccaaagaaatgca

SEQ ID NO: 398995 - DNA, 19 bp, Homo sapiens
  siRNA target sequence for FLJ23059 (NM_032234.2,1231-1249).
gtagtccaaagaaatgcaa

SEQ ID NO: 398996 - DNA, 19 bp, Homo sapiens
  siRNA target sequence for FLJ23059 (NM_032234.2,1257-1275).
ggagcctttgtcaagatgt

SEQ ID NO: 398997 - DNA, 19 bp, Homo sapiens
  siRNA target sequence for FLJ23059 (NM_032234.2,1314-1332).
gtctacacggactgtagta

SEQ ID NO: 398998 - DNA, 19 bp, Homo sapiens
  siRNA target sequence for FLJ23059 (NM_032234.2,1316-1334).
ctacacggactgtagtaat

SEQ ID NO: 398999 - DNA, 19 bp, Homo sapiens
  siRNA target sequence for FLJ23059 (NM_032234.2,1321-1339).
cggactgtagtaataagct

SEQ ID NO: 399000 - DNA, 19 bp, Homo sapiens
  siRNA target sequence for FLJ23059 (NM_032234.2,1322-1340).
ggactgtagtaataagctt

SEQ ID NO: 399001 - DNA, 19 bp, Homo sapiens
  siRNA target sequence for FLJ23059 (NM_032234.2,1355-1373).
ggacgtgaaggcatctaat

SEQ ID NO: 399002 - DNA, 19 bp, Homo sapiens
  siRNA target sequence for FLJ23059 (NM_032234.2,1358-1376).
cgtgaaggcatctaatcta

SEQ ID NO: 399003 - DNA, 19 bp, Homo sapiens
  siRNA target sequence for FLJ23059 (NM_032234.2,1387-1405).
gtgcaaggcaagagaaact

SEQ ID NO: 399004 - DNA, 19 bp, Homo sapiens
  siRNA target sequence for FLJ23059 (NM_032234.2,1471-1489).
caactggtcaggattcaga

SEQ ID NO: 399005 - DNA, 19 bp, Homo sapiens
  siRNA target sequence for FLJ10378 (NM_032239.2,1146-1164).
gatgtaacagtgggttatt

SEQ ID NO: 399006 - DNA, 19 bp, Homo sapiens
  siRNA target sequence for FLJ10378 (NM_032239.2,1166-1184).
ggtccaatttacttactta

SEQ ID NO: 399007 - DNA, 19 bp, Homo sapiens
  siRNA target sequence for DKFZp564A176 (NM_032242.1,490-508).
ctttagcagtatctgttta

SEQ ID NO: 399008 - DNA, 19 bp, Homo sapiens
  siRNA target sequence for DKFZp434I1916 (NM_032245.1,405-423).
gaaactgatccttcatgtt

SEQ ID NO: 399009 - DNA, 19 bp, Homo sapiens
  siRNA target sequence for DKFZp434I1916 (NM_032245.1,409-427).
ctgatccttcatgtttcaa

SEQ ID NO: 399010 - DNA, 19 bp, Homo sapiens
  siRNA target sequence for DKFZp434F1719 (NM_032248.1,368-386).
gatgtctaggtggtagaaa

SEQ ID NO: 399011 - DNA, 19 bp, Homo sapiens
  siRNA target sequence for DKFZp434F1719 (NM_032248.1,685-703).
gcagtgagcctttgtttgt

SEQ ID NO: 399012 - DNA, 19 bp, Homo sapiens
  siRNA target sequence for DKFZp434F1719 (NM_032248.1,688-706).
gtgagcctttgtttgttct

SEQ ID NO: 399013 - DNA, 19 bp, Homo sapiens
  siRNA target sequence for FLJ37970 (NM_032251.3,233-251).
ccgggtgctgggcatcatt

SEQ ID NO: 399014 - DNA, 19 bp, Homo sapiens
  siRNA target sequence for FLJ37970 (NM_032251.3,340-358).
gccgactgagggacttcta

SEQ ID NO: 399015 - DNA, 19 bp, Homo sapiens
  siRNA target sequence for FLJ37970 (NM_032251.3,457-475).
gcgttcttcggctactgtt

SEQ ID NO: 399016 - DNA, 19 bp, Homo sapiens
  siRNA target sequence for FLJ37970 (NM_032251.3,493-511).
gtgagcaccgggaactctt

SEQ ID NO: 399017 - DNA, 19 bp, Homo sapiens
  siRNA target sequence for FLJ37970 (NM_032251.3,911-929).
gggtttggaggccgaaata

SEQ ID NO: 399018 - DNA, 19 bp, Homo sapiens
  siRNA target sequence for FLJ37970 (NM_032251.3,912-930).
ggtttggaggccgaaataa

SEQ ID NO: 399019 - DNA, 19 bp, Homo sapiens
  siRNA target sequence for FLJ37970 (NM_032251.3,1870-1888).
gtccagggaccaaaattca

SEQ ID NO: 399020 - DNA, 19 bp, Homo sapiens
  siRNA target sequence for FLJ37970 (NM_032251.3,2969-2987).
ccagaatgtgcggcttatt

SEQ ID NO: 399021 - DNA, 19 bp, Homo sapiens
  siRNA target sequence for DKFZp434K2435 (NM_032256.1,101-119).
cctggtctcgcatgattgt

SEQ ID NO: 399022 - DNA, 19 bp, Homo sapiens
  siRNA target sequence for DKFZp434K2435 (NM_032256.1,121-139).
gcttacttggtgatcttct

SEQ ID NO: 399023 - DNA, 19 bp, Homo sapiens
  siRNA target sequence for DKFZp434K2435 (NM_032256.1,122-140).
cttacttggtgatcttctt

SEQ ID NO: 399024 - DNA, 19 bp, Homo sapiens
  siRNA target sequence for DKFZp434K2435 (NM_032256.1,132-150).
gatcttctttaacttctta

SEQ ID NO: 399025 - DNA, 19 bp, Homo sapiens
  siRNA target sequence for DKFZp434K2435 (NM_032256.1,205-223).
gttggaaactgtttttcat

SEQ ID NO: 399026 - DNA, 19 bp, Homo sapiens
  siRNA target sequence for DKFZp434K2435 (NM_032256.1,290-308).
ccattctcacaggactaat

SEQ ID NO: 399027 - DNA, 19 bp, Homo sapiens
  siRNA target sequence for DKFZp434K2435 (NM_032256.1,291-309).
cattctcacaggactaata

SEQ ID NO: 399028 - DNA, 19 bp, Homo sapiens
  siRNA target sequence for DKFZp434K2435 (NM_032256.1,302-320).
gactaatagctggcaaatt

SEQ ID NO: 399029 - DNA, 19 bp, Homo sapiens
  siRNA target sequence for DKFZp434K2435 (NM_032256.1,324-342).
gttccatcagcgtttgttt

SEQ ID NO: 399030 - DNA, 19 bp, Homo sapiens
  siRNA target sequence for DKFZp434K2435 (NM_032256.1,344-362).
gtcagttgctccgattaaa

SEQ ID NO: 399031 - DNA, 19 bp, Homo sapiens
  siRNA target sequence for DKFZp434K2435 (NM_032256.1,379-397).
catgggtcgtggatgacaa

SEQ ID NO: 399032 - DNA, 19 bp, Homo sapiens
  siRNA target sequence for DKFZp434K2435 (NM_032256.1,382-400).
gggtcgtggatgacaatgt

SEQ ID NO: 399033 - DNA, 19 bp, Homo sapiens
  siRNA target sequence for DKFZp434K2435 (NM_032256.1,383-401).
ggtcgtggatgacaatgtt

SEQ ID NO: 399034 - DNA, 19 bp, Homo sapiens
  siRNA target sequence for DKFZp434K2435 (NM_032256.1,447-465).
cacgattcttctaatggat

SEQ ID NO: 399035 - DNA, 19 bp, Homo sapiens
  siRNA target sequence for DKFZp434K2435 (NM_032256.1,466-484).
gggaacatgggagcatata

SEQ ID NO: 399036 - DNA, 19 bp, Homo sapiens
  siRNA target sequence for DKFZp434K2435 (NM_032256.1,474-492).
gggagcatatatcattaca

SEQ ID NO: 399037 - DNA, 19 bp, Homo sapiens
  siRNA target sequence for DKFZp434K2435 (NM_032256.1,503-521).
gcatccgaaatgaaagttt

SEQ ID NO: 399038 - DNA, 19 bp, Homo sapiens
  siRNA target sequence for DKFZp434K2435 (NM_032256.1,508-526).
cgaaatgaaagtttcatga

SEQ ID NO: 399039 - DNA, 19 bp, Homo sapiens
  siRNA target sequence for DKFZp434K2435 (NM_032256.1,509-527).
gaaatgaaagtttcatgaa

SEQ ID NO: 399040 - DNA, 19 bp, Homo sapiens
  siRNA target sequence for DKFZp434K2435 (NM_032256.1,568-586).
gcttggatggtcactgata

SEQ ID NO: 399041 - DNA, 19 bp, Homo sapiens
  siRNA target sequence for DKFZp434K2435 (NM_032256.1,569-587).
cttggatggtcactgatat

SEQ ID NO: 399042 - DNA, 19 bp, Homo sapiens
  siRNA target sequence for DKFZp434K2435 (NM_032256.1,693-711).
gacgtctgtggttgtactt

SEQ ID NO: 399043 - DNA, 19 bp, Homo sapiens
  siRNA target sequence for DKFZp434K2435 (NM_032256.1,695-713).
cgtctgtggttgtacttgt

SEQ ID NO: 399044 - DNA, 19 bp, Homo sapiens
  siRNA target sequence for DKFZp434K2435 (NM_032256.1,703-721).
gttgtacttgtgattacaa

SEQ ID NO: 399045 - DNA, 19 bp, Homo sapiens
  siRNA target sequence for DKFZp434K2435 (NM_032256.1,860-878).
gagatgttgatgtaaatct

SEQ ID NO: 399046 - DNA, 19 bp, Homo sapiens
  siRNA target sequence for DKFZp434K2435 (NM_032256.1,933-951).
cttcaaggaggaatatcgt

SEQ ID NO: 399047 - DNA, 19 bp, Homo sapiens
  siRNA target sequence for DKFZp434K2435 (NM_032256.1,936-954).
caaggaggaatatcgtatt

SEQ ID NO: 399048 - DNA, 19 bp, Homo sapiens
  siRNA target sequence for DKFZp434K2435 (NM_032256.1,940-958).
gaggaatatcgtattcaca

SEQ ID NO: 399049 - DNA, 19 bp, Homo sapiens
  siRNA target sequence for DKFZp434K2435 (NM_032256.1,942-960).
ggaatatcgtattcacata

SEQ ID NO: 399050 - DNA, 19 bp, Homo sapiens
  siRNA target sequence for DKFZp434K2435 (NM_032256.1,943-961).
gaatatcgtattcacataa

SEQ ID NO: 399051 - DNA, 19 bp, Homo sapiens
  siRNA target sequence for DKFZp434K2435 (NM_032256.1,955-973).
cacataacaggcaaatggt

SEQ ID NO: 399052 - DNA, 19 bp, Homo sapiens
  siRNA target sequence for DKFZp434K2435 (NM_032256.1,957-975).
cataacaggcaaatggttt

SEQ ID NO: 399053 - DNA, 19 bp, Homo sapiens
  siRNA target sequence for DKFZp434K2435 (NM_032256.1,993-1011).
cctcgtcttgattttggat

SEQ ID NO: 399054 - DNA, 19 bp, Homo sapiens
  siRNA target sequence for DKFZp434K2435 (NM_032256.1,1144-1162).
gaatggaggtccaatcaca

SEQ ID NO: 399055 - DNA, 19 bp, Homo sapiens
  siRNA target sequence for DKFZp434K2435 (NM_032256.1,1148-1166).
ggaggtccaatcacactaa

SEQ ID NO: 399056 - DNA, 19 bp, Homo sapiens
  siRNA target sequence for DKFZp434K2435 (NM_032256.1,1161-1179).
cactaaccctcggactaat

SEQ ID NO: 399057 - DNA, 19 bp, Homo sapiens
  siRNA target sequence for DKFZp434K2435 (NM_032256.1,1163-1181).
ctaaccctcggactaataa

SEQ ID NO: 399058 - DNA, 19 bp, Homo sapiens
  siRNA target sequence for DKFZp434K2435 (NM_032256.1,1167-1185).
ccctcggactaataaaaca

SEQ ID NO: 399059 - DNA, 19 bp, Homo sapiens
  siRNA target sequence for DKFZp434K2435 (NM_032256.1,1168-1186).
cctcggactaataaaacat

SEQ ID NO: 399060 - DNA, 19 bp, Homo sapiens
  siRNA target sequence for DKFZp434K2435 (NM_032256.1,1169-1187).
ctcggactaataaaacata

SEQ ID NO: 399061 - DNA, 19 bp, Homo sapiens
  siRNA target sequence for DKFZp434K2435 (NM_032256.1,1172-1190).
ggactaataaaacatatgt

SEQ ID NO: 399062 - DNA, 19 bp, Homo sapiens
  siRNA target sequence for DKFZp434K2435 (NM_032256.1,1221-1239).
cataggagccagtcttgat

SEQ ID NO: 399063 - DNA, 19 bp, Homo sapiens
  siRNA target sequence for DKFZp434K2435 (NM_032256.1,1273-1291).
gcctttgtgtggtttggat

SEQ ID NO: 399064 - DNA, 19 bp, Homo sapiens
  siRNA target sequence for DKFZp434K2435 (NM_032256.1,1301-1319).
ggttctttggacgattttt

SEQ ID NO: 399065 - DNA, 19 bp, Homo sapiens
  siRNA target sequence for DKFZp434K2435 (NM_032256.1,1329-1347).
gccacgcatggagaatcaa

SEQ ID NO: 399066 - DNA, 19 bp, Homo sapiens
  siRNA target sequence for DKFZp434K2435 (NM_032256.1,1379-1397).
ctccatcagaacatagcaa

SEQ ID NO: 399067 - DNA, 19 bp, Homo sapiens
  siRNA target sequence for DKFZp434K2435 (NM_032256.1,1405-1423).
ggaatcactcgagaaaaca

SEQ ID NO: 399068 - DNA, 19 bp, Homo sapiens
  siRNA target sequence for DKFZp434K2435 (NM_032256.1,1475-1493).
ggtctgacttcaatgagat

SEQ ID NO: 399069 - DNA, 19 bp, Homo sapiens
  siRNA target sequence for DKFZp434K2435 (NM_032256.1,1489-1507).
gagatcgtctacaagtctt

SEQ ID NO: 399070 - DNA, 19 bp, Homo sapiens
  siRNA target sequence for DKFZp434K2435 (NM_032256.1,1510-1528).
cacctaacctcggaaaact

SEQ ID NO: 399071 - DNA, 19 bp, Homo sapiens
  siRNA target sequence for DKFZp434K2435 (NM_032256.1,1513-1531).
ctaacctcggaaaacttga

SEQ ID NO: 399072 - DNA, 19 bp, Homo sapiens
  siRNA target sequence for DKFZp434K2435 (NM_032256.1,1537-1555).
cagttgaacgaatctacta

SEQ ID NO: 399073 - DNA, 19 bp, Homo sapiens
  siRNA target sequence for DKFZp434K2435 (NM_032256.1,1539-1557).
gttgaacgaatctactagt

SEQ ID NO: 399074 - DNA, 19 bp, Homo sapiens
  siRNA target sequence for DKFZp434K2435 (NM_032256.1,1573-1591).
caagacccaacgacttcta

SEQ ID NO: 399075 - DNA, 19 bp, Homo sapiens
  siRNA target sequence for DKFZp434K2435 (NM_032256.1,1576-1594).
gacccaacgacttctaaaa

SEQ ID NO: 399076 - DNA, 19 bp, Homo sapiens
  siRNA target sequence for DKFZp434K2435 (NM_032256.1,1579-1597).
ccaacgacttctaaaagta

SEQ ID NO: 399077 - DNA, 19 bp, Homo sapiens
  siRNA target sequence for ZMYND12 (NM_032257.3,347-365).
gcctgcacagtcacttatt

SEQ ID NO: 399078 - DNA, 19 bp, Homo sapiens
  siRNA target sequence for ZMYND12 (NM_032257.3,448-466).
catgcccttctacaattca

SEQ ID NO: 399079 - DNA, 19 bp, Homo sapiens
  siRNA target sequence for ZMYND12 (NM_032257.3,503-521).
cagcggcagaagtatttga

SEQ ID NO: 399080 - DNA, 19 bp, Homo sapiens
  siRNA target sequence for ZMYND12 (NM_032257.3,697-715).
cgttcaggctgaagaatat

SEQ ID NO: 399081 - DNA, 19 bp, Homo sapiens
  siRNA target sequence for ZMYND12 (NM_032257.3,705-723).
ctgaagaatatctattcca

SEQ ID NO: 399082 - DNA, 19 bp, Homo sapiens
  siRNA target sequence for ZMYND12 (NM_032257.3,730-748).
gtggacagtcctcaaatca

SEQ ID NO: 399083 - DNA, 19 bp, Homo sapiens
  siRNA target sequence for ZMYND12 (NM_032257.3,759-777).
gtaatgccacccactcttt

SEQ ID NO: 399084 - DNA, 19 bp, Homo sapiens
  siRNA target sequence for ZMYND12 (NM_032257.3,793-811).
gggacttctctatatagct

SEQ ID NO: 399085 - DNA, 19 bp, Homo sapiens
  siRNA target sequence for ZMYND12 (NM_032257.3,795-813).
gacttctctatatagctaa

SEQ ID NO: 399086 - DNA, 19 bp, Homo sapiens
  siRNA target sequence for ZMYND12 (NM_032257.3,839-857).
catctggccaatgatattt

SEQ ID NO: 399087 - DNA, 19 bp, Homo sapiens
  siRNA target sequence for ZMYND12 (NM_032257.3,863-881).
gccagttgtgcatttggaa

SEQ ID NO: 399088 - DNA, 19 bp, Homo sapiens
  siRNA target sequence for ZMYND12 (NM_032257.3,910-928).
cttccacctggctaatata

SEQ ID NO: 399089 - DNA, 19 bp, Homo sapiens
  siRNA target sequence for ZMYND12 (NM_032257.3,981-999).
ctgagatctggcatgcata

SEQ ID NO: 399090 - DNA, 19 bp, Homo sapiens
  siRNA target sequence for ZMYND12 (NM_032257.3,1048-1066).
ggatttactgggcaaacta

SEQ ID NO: 399091 - DNA, 19 bp, Homo sapiens
  siRNA target sequence for ZMYND12 (NM_032257.3,1057-1075).
gggcaaactatttgagaat

SEQ ID NO: 399092 - DNA, 19 bp, Homo sapiens
  siRNA target sequence for ZMYND12 (NM_032257.3,1059-1077).
gcaaactatttgagaatga

SEQ ID NO: 399093 - DNA, 19 bp, Homo sapiens
  siRNA target sequence for ZMYND12 (NM_032257.3,1115-1133).
cgcatcctgacttcaatct

SEQ ID NO: 399094 - DNA, 19 bp, Homo sapiens
  siRNA target sequence for ZMYND12 (NM_032257.3,1123-1141).
gacttcaatcttgaacatt

SEQ ID NO: 399095 - DNA, 19 bp, Homo sapiens
  siRNA target sequence for ZMYND12 (NM_032257.3,1132-1150).
cttgaacattcgagaatct

SEQ ID NO: 399096 - DNA, 19 bp, Homo sapiens
  siRNA target sequence for ZMYND12 (NM_032257.3,1167-1185).
cccaaaaaaccatctttgt

SEQ ID NO: 399097 - DNA, 19 bp, Homo sapiens
  siRNA target sequence for ZMYND12 (NM_032257.3,1258-1276).
cctcagtctagccaaagaa

SEQ ID NO: 399098 - DNA, 19 bp, Homo sapiens
  siRNA target sequence for ZMYND12 (NM_032257.3,1261-1279).
cagtctagccaaagaacaa

SEQ ID NO: 399099 - DNA, 19 bp, Homo sapiens
  siRNA target sequence for ZMYND12 (NM_032257.3,1263-1281).
gtctagccaaagaacaaca

SEQ ID NO: 399100 - DNA, 19 bp, Homo sapiens
  siRNA target sequence for ZMYND12 (NM_032257.3,1306-1324).
cattcaagagttattaagt

SEQ ID NO: 399101 - DNA, 19 bp, Homo sapiens
  siRNA target sequence for ZMYND12 (NM_032257.3,1313-1331).
gagttattaagtctcattt

SEQ ID NO: 399102 - DNA, 19 bp, Homo sapiens
  siRNA target sequence for ZMYND12 (NM_032257.3,1315-1333).
gttattaagtctcatttca

SEQ ID NO: 399103 - DNA, 19 bp, Homo sapiens
  siRNA target sequence for C21orf56 (NM_032261.3,366-384).
ggagctactacctcaatga

SEQ ID NO: 399104 - DNA, 19 bp, Homo sapiens
  siRNA target sequence for C21orf56 (NM_032261.3,369-387).
gctactacctcaatgagat

SEQ ID NO: 399105 - DNA, 19 bp, Homo sapiens
  siRNA target sequence for DKFZp434N035 (NM_032262.1,290-308).
gcagctagcttcgattgtt

SEQ ID NO: 399106 - DNA, 19 bp, Homo sapiens
  siRNA target sequence for DKFZp434N035 (NM_032262.1,394-412).
gcaatgaaagagcttatct

SEQ ID NO: 399107 - DNA, 19 bp, Homo sapiens
  siRNA target sequence for DKFZp434N035 (NM_032262.1,511-529).
ctctaggcataccacataa

SEQ ID NO: 399108 - DNA, 19 bp, Homo sapiens
  siRNA target sequence for DKFZp434N035 (NM_032262.1,513-531).
ctaggcataccacataata

SEQ ID NO: 399109 - DNA, 19 bp, Homo sapiens
  siRNA target sequence for DKFZp434B227 (NM_032263.2,492-510).
cacctagtaccgtagaaga

SEQ ID NO: 399110 - DNA, 19 bp, Homo sapiens
  siRNA target sequence for DKFZp434B227 (NM_032263.2,495-513).
ctagtaccgtagaagaaga

SEQ ID NO: 399111 - DNA, 19 bp, Homo sapiens
  siRNA target sequence for DKFZp434B227 (NM_032263.2,621-639).
ccacagaccagctctctat

SEQ ID NO: 399112 - DNA, 19 bp, Homo sapiens
  siRNA target sequence for DKFZp434B227 (NM_032263.2,622-640).
cacagaccagctctctatt

SEQ ID NO: 399113 - DNA, 19 bp, Homo sapiens
  siRNA target sequence for DKFZp434B227 (NM_032263.2,624-642).
cagaccagctctctattct

SEQ ID NO: 399114 - DNA, 19 bp, Homo sapiens
  siRNA target sequence for DKFZp434B227 (NM_032263.2,687-705).
gcgtgaaaagcagagaaat

SEQ ID NO: 399115 - DNA, 19 bp, Homo sapiens
  siRNA target sequence for DKFZp434B227 (NM_032263.2,791-809).
cccaacttgccagaaatca

SEQ ID NO: 399116 - DNA, 19 bp, Homo sapiens
  siRNA target sequence for DKFZp434B227 (NM_032263.2,826-844).
cgctgtggagtttaacaaa

SEQ ID NO: 399117 - DNA, 19 bp, Homo sapiens
  siRNA target sequence for DKFZp434B227 (NM_032263.2,968-986).
caagattcggccacttaca

SEQ ID NO: 399118 - DNA, 19 bp, Homo sapiens
  siRNA target sequence for DKFZp434B227 (NM_032263.2,971-989).
gattcggccacttacaaca

SEQ ID NO: 399119 - DNA, 19 bp, Homo sapiens
  siRNA target sequence for DKFZp434B227 (NM_032263.2,998-1016).
caagctttgagcaaagaga

SEQ ID NO: 399120 - DNA, 19 bp, Homo sapiens
  siRNA target sequence for DKFZp434B227 (NM_032263.2,1094-1112).
cagctaattaatgtcaaaa

SEQ ID NO: 399121 - DNA, 19 bp, Homo sapiens
  siRNA target sequence for DKFZp434B227 (NM_032263.2,1133-1151).
cagagtcagaatgagtata

SEQ ID NO: 399122 - DNA, 19 bp, Homo sapiens
  siRNA target sequence for DKFZp434B227 (NM_032263.2,1201-1219).
ggagaatcgctacatgaaa

SEQ ID NO: 399123 - DNA, 19 bp, Homo sapiens
  siRNA target sequence for DKFZp434B227 (NM_032263.2,1208-1226).
cgctacatgaaaaccaata

SEQ ID NO: 399124 - DNA, 19 bp, Homo sapiens
  siRNA target sequence for DKFZp434B227 (NM_032263.2,1244-1262).
cagacccagaaaaagtgta

SEQ ID NO: 399125 - DNA, 19 bp, Homo sapiens
  siRNA target sequence for DKFZp434B227 (NM_032263.2,1327-1345).
ccggactcatacagagatt

SEQ ID NO: 399126 - DNA, 19 bp, Homo sapiens
  siRNA target sequence for DKFZp434B227 (NM_032263.2,1329-1347).
ggactcatacagagattga

SEQ ID NO: 399127 - DNA, 19 bp, Homo sapiens
  siRNA target sequence for DKFZp434B227 (NM_032263.2,1332-1350).
ctcatacagagattgaaat

SEQ ID NO: 399128 - DNA, 19 bp, Homo sapiens
  siRNA target sequence for DKFZp434B227 (NM_032263.2,1396-1414).
ctggatggagaaatacgat

SEQ ID NO: 399129 - DNA, 19 bp, Homo sapiens
  siRNA target sequence for DKFZp434B227 (NM_032263.2,1525-1543).
catcattgaagatcgtata

SEQ ID NO: 399130 - DNA, 19 bp, Homo sapiens
  siRNA target sequence for DKFZp434B227 (NM_032263.2,1577-1595).
gatctcttggaattaaaga

SEQ ID NO: 399131 - DNA, 19 bp, Homo sapiens
  siRNA target sequence for DKFZp434B227 (NM_032263.2,1585-1603).
ggaattaaagagcgttata

SEQ ID NO: 399132 - DNA, 19 bp, Homo sapiens
  siRNA target sequence for DKFZp434B227 (NM_032263.2,1586-1604).
gaattaaagagcgttataa

SEQ ID NO: 399133 - DNA, 19 bp, Homo sapiens
  siRNA target sequence for DKFZp434B227 (NM_032263.2,1617-1635).
ggtggcgaggcactatgat

SEQ ID NO: 399134 - DNA, 19 bp, Homo sapiens
  siRNA target sequence for DKFZp434B227 (NM_032263.2,1618-1636).
gtggcgaggcactatgata

SEQ ID NO: 399135 - DNA, 19 bp, Homo sapiens
  siRNA target sequence for DKFZp434B227 (NM_032263.2,1629-1647).
ctatgatacggagagaaat

SEQ ID NO: 399136 - DNA, 19 bp, Homo sapiens
  siRNA target sequence for DKFZp434B227 (NM_032263.2,1660-1678).
gatgcctaaagacaaagtt

SEQ ID NO: 399137 - DNA, 19 bp, Homo sapiens
  siRNA target sequence for DKFZp434B227 (NM_032263.2,1664-1682).
cctaaagacaaagttgata

SEQ ID NO: 399138 - DNA, 19 bp, Homo sapiens
  siRNA target sequence for DKFZp434B227 (NM_032263.2,1676-1694).
gttgatagcaaggattcaa

SEQ ID NO: 399139 - DNA, 19 bp, Homo sapiens
  siRNA target sequence for AE2 (NM_032264.1,493-511).
cctggccaaccggcaaaat

SEQ ID NO: 399140 - DNA, 19 bp, Homo sapiens
  siRNA target sequence for AE2 (NM_032264.1,1074-1092).
cctctcatgatgaatggtt

SEQ ID NO: 399141 - DNA, 19 bp, Homo sapiens
  siRNA target sequence for AE2 (NM_032264.1,1309-1327).
cggcttggctcttgacata

SEQ ID NO: 399142 - DNA, 19 bp, Homo sapiens
  siRNA target sequence for ZMYND15 (NM_032265.1,53-71).
ctggataccgggatgagtt

SEQ ID NO: 399143 - DNA, 19 bp, Homo sapiens
  siRNA target sequence for ZMYND15 (NM_032265.1,61-79).
cgggatgagttccttgatt

SEQ ID NO: 399144 - DNA, 19 bp, Homo sapiens
  siRNA target sequence for ZMYND15 (NM_032265.1,62-80).
gggatgagttccttgattt

SEQ ID NO: 399145 - DNA, 19 bp, Homo sapiens
  siRNA target sequence for ZMYND15 (NM_032265.1,96-114).
cggctggttccgaaagttt

SEQ ID NO: 399146 - DNA, 19 bp, Homo sapiens
  siRNA target sequence for ZMYND15 (NM_032265.1,98-116).
gctggttccgaaagtttgt

SEQ ID NO: 399147 - DNA, 19 bp, Homo sapiens
  siRNA target sequence for ZMYND15 (NM_032265.1,217-235).
catgtcctgcccaaccata

SEQ ID NO: 399148 - DNA, 19 bp, Homo sapiens
  siRNA target sequence for ZMYND15 (NM_032265.1,645-663).
gcacgtttcctgtctctta

SEQ ID NO: 399149 - DNA, 19 bp, Homo sapiens
  siRNA target sequence for ZMYND15 (NM_032265.1,686-704).
ccatcttgggcattgatct

SEQ ID NO: 399150 - DNA, 19 bp, Homo sapiens
  siRNA target sequence for ZMYND15 (NM_032265.1,1077-1095).
gcagcggtgcccagatgat

SEQ ID NO: 399151 - DNA, 19 bp, Homo sapiens
  siRNA target sequence for ZMYND15 (NM_032265.1,1096-1114).
gtgagtcaccgattttggt

SEQ ID NO: 399152 - DNA, 19 bp, Homo sapiens
  siRNA target sequence for ZMYND15 (NM_032265.1,1180-1198).
gcagaggtgaccagtgaaa

SEQ ID NO: 399153 - DNA, 19 bp, Homo sapiens
  siRNA target sequence for ZMYND15 (NM_032265.1,1193-1211).
gtgaaaccttcaacaaaga

SEQ ID NO: 399154 - DNA, 19 bp, Homo sapiens
  siRNA target sequence for ZMYND15 (NM_032265.1,1234-1252).
ctcactcgtggctattgga

SEQ ID NO: 399155 - DNA, 19 bp, Homo sapiens
  siRNA target sequence for ZMYND15 (NM_032265.1,1420-1438).
cctgagctcaacatccaaa

SEQ ID NO: 399156 - DNA, 19 bp, Homo sapiens
  siRNA target sequence for ZMYND15 (NM_032265.1,1536-1554).
cctggagctgcagtttgta

SEQ ID NO: 399157 - DNA, 19 bp, Homo sapiens
  siRNA target sequence for ZMYND15 (NM_032265.1,1629-1647).
gcctggttccggcatatca

SEQ ID NO: 399158 - DNA, 19 bp, Homo sapiens
  siRNA target sequence for ZMYND15 (NM_032265.1,1740-1758).
caagcctgacctggttatt

SEQ ID NO: 399159 - DNA, 19 bp, Homo sapiens
  siRNA target sequence for ZMYND15 (NM_032265.1,1744-1762).
cctgacctggttattggat

SEQ ID NO: 399160 - DNA, 19 bp, Homo sapiens
  siRNA target sequence for ZMYND15 (NM_032265.1,1825-1843).
cgagtgccagccttcttca

SEQ ID NO: 399161 - DNA, 19 bp, Homo sapiens
  siRNA target sequence for DKFZp434G118 (NM_032266.1,106-124).
ctccctcaagccaaattat

SEQ ID NO: 399162 - DNA, 19 bp, Homo sapiens
  siRNA target sequence for DKFZp434G118 (NM_032266.1,110-128).
ctcaagccaaattatcttt

SEQ ID NO: 399163 - DNA, 19 bp, Homo sapiens
  siRNA target sequence for DKFZp434G118 (NM_032266.1,243-261).
cttcaggtctagtcctaaa

SEQ ID NO: 399164 - DNA, 19 bp, Homo sapiens
  siRNA target sequence for DKFZp434G118 (NM_032266.1,246-264).
caggtctagtcctaaaata

SEQ ID NO: 399165 - DNA, 19 bp, Homo sapiens
  siRNA target sequence for DKFZp434G118 (NM_032266.1,286-304).
ccgatgttcaggacttaat

SEQ ID NO: 399166 - DNA, 19 bp, Homo sapiens
  siRNA target sequence for DKFZp434G118 (NM_032266.1,287-305).
cgatgttcaggacttaatt

SEQ ID NO: 399167 - DNA, 19 bp, Homo sapiens
  siRNA target sequence for DKFZp434G118 (NM_032266.1,296-314).
ggacttaattgccatcata

SEQ ID NO: 399168 - DNA, 19 bp, Homo sapiens
  siRNA target sequence for DKFZp434G118 (NM_032266.1,299-317).
cttaattgccatcataaat

SEQ ID NO: 399169 - DNA, 19 bp, Homo sapiens
  siRNA target sequence for DKFZp434G118 (NM_032266.1,435-453).
gatcccaaatctcaaagta

SEQ ID NO: 399170 - DNA, 19 bp, Homo sapiens
  siRNA target sequence for DKFZp434G118 (NM_032266.1,447-465).
caaagtatcgtgaaagaga

SEQ ID NO: 399171 - DNA, 19 bp, Homo sapiens
  siRNA target sequence for DKFZp434G118 (NM_032266.1,487-505).
ccctatatcaccatcacaa

SEQ ID NO: 399172 - DNA, 19 bp, Homo sapiens
  siRNA target sequence for DKFZp434G118 (NM_032266.1,538-556).
gagtcctacttccacaata

SEQ ID NO: 399173 - DNA, 19 bp, Homo sapiens
  siRNA target sequence for DKFZp434G118 (NM_032266.1,540-558).
gtcctacttccacaataga

SEQ ID NO: 399174 - DNA, 19 bp, Homo sapiens
  siRNA target sequence for DKFZp434G118 (NM_032266.1,546-564).
cttccacaatagatttgca

SEQ ID NO: 399175 - DNA, 19 bp, Homo sapiens
  siRNA target sequence for DKFZp434G118 (NM_032266.1,585-603).
ctgctcctgtacaagtcta

SEQ ID NO: 399176 - DNA, 19 bp, Homo sapiens
  siRNA target sequence for DKFZp434G118 (NM_032266.1,588-606).
ctcctgtacaagtctacat

SEQ ID NO: 399177 - DNA, 19 bp, Homo sapiens
  siRNA target sequence for DKFZp434G118 (NM_032266.1,659-677).
gcacctgggcactatgaat

SEQ ID NO: 399178 - DNA, 19 bp, Homo sapiens
  siRNA target sequence for DKFZp434G118 (NM_032266.1,660-678).
cacctgggcactatgaatt

SEQ ID NO: 399179 - DNA, 19 bp, Homo sapiens
  siRNA target sequence for DKFZp434G118 (NM_032266.1,662-680).
cctgggcactatgaattca

SEQ ID NO: 399180 - DNA, 19 bp, Homo sapiens
  siRNA target sequence for DKFZp434G118 (NM_032266.1,728-746).
gaaaaacgggctaaagtga

SEQ ID NO: 399181 - DNA, 19 bp, Homo sapiens
  siRNA target sequence for DKFZp434G118 (NM_032266.1,736-754).
ggctaaagtgagaaccaaa

SEQ ID NO: 399182 - DNA, 19 bp, Homo sapiens
  siRNA target sequence for DKFZp434G118 (NM_032266.1,737-755).
gctaaagtgagaaccaaaa

SEQ ID NO: 399183 - DNA, 19 bp, Homo sapiens
  siRNA target sequence for DKFZp434G118 (NM_032266.1,757-775).
gacctctgattcaaaatat

SEQ ID NO: 399184 - DNA, 19 bp, Homo sapiens
  siRNA target sequence for DKFZp434G118 (NM_032266.1,760-778).
ctctgattcaaaatatcca

SEQ ID NO: 399185 - DNA, 19 bp, Homo sapiens
  siRNA target sequence for DKFZp434G118 (NM_032266.1,790-808).
caccaagcgacttagaaaa

SEQ ID NO: 399186 - DNA, 19 bp, Homo sapiens
  siRNA target sequence for DKFZp434G118 (NM_032266.1,809-827).
cacagaaagttctacacaa

SEQ ID NO: 399187 - DNA, 19 bp, Homo sapiens
  siRNA target sequence for DKFZp434G118 (NM_032266.1,847-865).
gagtccttctagggaatta

SEQ ID NO: 399188 - DNA, 19 bp, Homo sapiens
  siRNA target sequence for DKFZp434G118 (NM_032266.1,860-878).
gaattagcagcccatttaa

SEQ ID NO: 399189 - DNA, 19 bp, Homo sapiens
  siRNA target sequence for DKFZp434G118 (NM_032266.1,893-911).
ggagcaactcagacaagta

SEQ ID NO: 399190 - DNA, 19 bp, Homo sapiens
  siRNA target sequence for DKFZp434G118 (NM_032266.1,942-960).
cttcccaacccaagttcat

SEQ ID NO: 399191 - DNA, 19 bp, Homo sapiens
  siRNA target sequence for DKFZp434G118 (NM_032266.1,979-997).
cctaaagcgggcattccaa

SEQ ID NO: 399192 - DNA, 19 bp, Homo sapiens
  siRNA target sequence for DKFZp434G118 (NM_032266.1,980-998).
ctaaagcgggcattccaaa

SEQ ID NO: 399193 - DNA, 19 bp, Homo sapiens
  siRNA target sequence for DKFZp434G118 (NM_032266.1,1001-1019).
gcacacagagttatagctt

SEQ ID NO: 399194 - DNA, 19 bp, Homo sapiens
  siRNA target sequence for DKFZp434G118 (NM_032266.1,1006-1024).
cagagttatagcttctgtt

SEQ ID NO: 399195 - DNA, 19 bp, Homo sapiens
  siRNA target sequence for DKFZp434G118 (NM_032266.1,1116-1134).
caagcagtatcaaaagaga

SEQ ID NO: 399196 - DNA, 19 bp, Homo sapiens
  siRNA target sequence for DKFZp434G118 (NM_032266.1,1232-1250).
ccaagaagagcttactctt

SEQ ID NO: 399197 - DNA, 19 bp, Homo sapiens
  siRNA target sequence for DKFZp434G118 (NM_032266.1,1271-1289).
ctgcccaagcccacagatt

SEQ ID NO: 399198 - DNA, 19 bp, Homo sapiens
  siRNA target sequence for DKFZp434G118 (NM_032266.1,1331-1349).
cctctgagaactgttcaaa

SEQ ID NO: 399199 - DNA, 19 bp, Homo sapiens
  siRNA target sequence for DKFZp434G118 (NM_032266.1,1343-1361).
gttcaaaaggacagtagta

SEQ ID NO: 399200 - DNA, 19 bp, Homo sapiens
  siRNA target sequence for DKFZp434G118 (NM_032266.1,1365-1383).
gatcaaagaaaaacttcta

SEQ ID NO: 399201 - DNA, 19 bp, Homo sapiens
  siRNA target sequence for DKFZp434G118 (NM_032266.1,1444-1462).
ggcccgaggaagaatccta

SEQ ID NO: 399202 - DNA, 19 bp, Homo sapiens
  siRNA target sequence for DKFZp434G118 (NM_032266.1,1485-1503).
cctggcaccgacatcttaa

SEQ ID NO: 399203 - DNA, 19 bp, Homo sapiens
  siRNA target sequence for DKFZp434G118 (NM_032266.1,1488-1506).
ggcaccgacatcttaaaga

SEQ ID NO: 399204 - DNA, 19 bp, Homo sapiens
  siRNA target sequence for DKFZp434G118 (NM_032266.1,1490-1508).
caccgacatcttaaagaca

SEQ ID NO: 399205 - DNA, 19 bp, Homo sapiens
  siRNA target sequence for DKFZp434G118 (NM_032266.1,1492-1510).
ccgacatcttaaagacaaa

SEQ ID NO: 399206 - DNA, 19 bp, Homo sapiens
  siRNA target sequence for DKFZp434G118 (NM_032266.1,1494-1512).
gacatcttaaagacaaact

SEQ ID NO: 399207 - DNA, 19 bp, Homo sapiens
  siRNA target sequence for DKFZp434G118 (NM_032266.1,1572-1590).
ctgagagaacccgtcataa

SEQ ID NO: 399208 - DNA, 19 bp, Homo sapiens
  siRNA target sequence for DKFZp434G118 (NM_032266.1,1683-1701).
gcagtccctctaggaaaaa

SEQ ID NO: 399209 - DNA, 19 bp, Homo sapiens
  siRNA target sequence for DKFZp434G118 (NM_032266.1,1731-1749).
gcagtccgtctcagagaaa

SEQ ID NO: 399210 - DNA, 19 bp, Homo sapiens
  siRNA target sequence for DKFZp434G118 (NM_032266.1,1732-1750).
cagtccgtctcagagaaat

SEQ ID NO: 399211 - DNA, 19 bp, Homo sapiens
  siRNA target sequence for DKFZp434G118 (NM_032266.1,1734-1752).
gtccgtctcagagaaatca

SEQ ID NO: 399212 - DNA, 19 bp, Homo sapiens
  siRNA target sequence for DKFZp434G118 (NM_032266.1,2416-2434).
gaggagccatcgtaggatt

SEQ ID NO: 399213 - DNA, 19 bp, Homo sapiens
  siRNA target sequence for DKFZp434G118 (NM_032266.1,2419-2437).
gagccatcgtaggatttct

SEQ ID NO: 399214 - DNA, 19 bp, Homo sapiens
  siRNA target sequence for DKFZp434G118 (NM_032266.1,2421-2439).
gccatcgtaggatttctga

SEQ ID NO: 399215 - DNA, 19 bp, Homo sapiens
  siRNA target sequence for DKFZp434G118 (NM_032266.1,2709-2727).
gacgcagtccccttaagga

SEQ ID NO: 399216 - DNA, 19 bp, Homo sapiens
  siRNA target sequence for DKFZp434G118 (NM_032266.1,2726-2744).
gagggactcaagtacagtt

SEQ ID NO: 399217 - DNA, 19 bp, Homo sapiens
  siRNA target sequence for DKFZp434G118 (NM_032266.1,2764-2782).
ccatagtttgtctagagat

SEQ ID NO: 399218 - DNA, 19 bp, Homo sapiens
  siRNA target sequence for DKFZp434G118 (NM_032266.1,2765-2783).
catagtttgtctagagatt

SEQ ID NO: 399219 - DNA, 19 bp, Homo sapiens
  siRNA target sequence for DKFZp434G118 (NM_032266.1,2773-2791).
gtctagagatttcaagaat

SEQ ID NO: 399220 - DNA, 19 bp, Homo sapiens
  siRNA target sequence for DKFZp434G118 (NM_032266.1,2801-2819).
ctcctcgggaccacacata

SEQ ID NO: 399221 - DNA, 19 bp, Homo sapiens
  siRNA target sequence for DKFZp434G118 (NM_032266.1,2803-2821).
cctcgggaccacacataaa

SEQ ID NO: 399222 - DNA, 19 bp, Homo sapiens
  siRNA target sequence for DKFZp434G118 (NM_032266.1,2806-2824).
cgggaccacacataaaaat

SEQ ID NO: 399223 - DNA, 19 bp, Homo sapiens
  siRNA target sequence for ZNRF1 (NM_032268.3,1068-1086).
gctcgcatagtggtttcaa

SEQ ID NO: 399224 - DNA, 19 bp, Homo sapiens
  siRNA target sequence for ZNRF1 (NM_032268.3,1260-1278).
gcctgtgcatctatcacaa

SEQ ID NO: 399225 - DNA, 19 bp, Homo sapiens
  siRNA target sequence for ZNRF1 (NM_032268.3,1274-1292).
cacaaaagctgcatagact

SEQ ID NO: 399226 - DNA, 19 bp, Homo sapiens
  siRNA target sequence for ZNRF1 (NM_032268.3,1285-1303).
catagactcgtggtttgaa

SEQ ID NO: 399227 - DNA, 19 bp, Homo sapiens
  siRNA target sequence for DKFZp434I099 (NM_032269.3,291-309).
ccaaggacactattgacat

SEQ ID NO: 399228 - DNA, 19 bp, Homo sapiens
  siRNA target sequence for DKFZp434I099 (NM_032269.3,365-383).
caggtggcagacaacttct

SEQ ID NO: 399229 - DNA, 19 bp, Homo sapiens
  siRNA target sequence for DKFZp434I099 (NM_032269.3,603-621).
cgaccactgtgctcaagta

SEQ ID NO: 399230 - DNA, 19 bp, Homo sapiens
  siRNA target sequence for DKFZp434I099 (NM_032269.3,799-817).
ggtgctgcctaagaagtat

SEQ ID NO: 399231 - DNA, 19 bp, Homo sapiens
  siRNA target sequence for DKFZp434I099 (NM_032269.3,800-818).
gtgctgcctaagaagtata

SEQ ID NO: 399232 - DNA, 19 bp, Homo sapiens
  siRNA target sequence for DKFZp434I099 (NM_032269.3,803-821).
ctgcctaagaagtatacca

SEQ ID NO: 399233 - DNA, 19 bp, Homo sapiens
  siRNA target sequence for DKFZp434I099 (NM_032269.3,1044-1062).
cattcacaggacatagcta

SEQ ID NO: 399234 - DNA, 19 bp, Homo sapiens
  siRNA target sequence for DKFZp434I099 (NM_032269.3,1149-1167).
gctgcaaggacttgatctt

SEQ ID NO: 399235 - DNA, 19 bp, Homo sapiens
  siRNA target sequence for DKFZp434I099 (NM_032269.3,1202-1220).
ctcctggggactgataagt

SEQ ID NO: 399236 - DNA, 19 bp, Homo sapiens
  siRNA target sequence for DKFZp434I099 (NM_032269.3,1204-1222).
cctggggactgataagtct

SEQ ID NO: 399237 - DNA, 19 bp, Homo sapiens
  siRNA target sequence for DKFZp434I099 (NM_032269.3,1246-1264).
cgacagtgggataaacgat

SEQ ID NO: 399238 - DNA, 19 bp, Homo sapiens
  siRNA target sequence for DKFZp434I099 (NM_032269.3,1345-1363).
gatctccccggaagcattt

SEQ ID NO: 399239 - DNA, 19 bp, Homo sapiens
  siRNA target sequence for DKFZp434I099 (NM_032269.3,1429-1447).
cccgtacctcaatagcaat

SEQ ID NO: 399240 - DNA, 19 bp, Homo sapiens
  siRNA target sequence for DKFZp434I099 (NM_032269.3,1478-1496).
gacttgcagtgtaccaata

SEQ ID NO: 399241 - DNA, 19 bp, Homo sapiens
  siRNA target sequence for DKFZp434I099 (NM_032269.3,1537-1555).
gctggagctgaaacacata

SEQ ID NO: 399242 - DNA, 19 bp, Homo sapiens
  siRNA target sequence for DKFZp434I099 (NM_032269.3,1648-1666).
ggaccgtgtcattgagttt

SEQ ID NO: 399243 - DNA, 19 bp, Homo sapiens
  siRNA target sequence for DKFZp434I099 (NM_032269.3,1649-1667).
gaccgtgtcattgagtttt

SEQ ID NO: 399244 - DNA, 19 bp, Homo sapiens
  siRNA target sequence for DKFZp434I099 (NM_032269.3,1651-1669).
ccgtgtcattgagttttat

SEQ ID NO: 399245 - DNA, 19 bp, Homo sapiens
  siRNA target sequence for DKFZp434I099 (NM_032269.3,1717-1735).
gacaatgacagagtactat

SEQ ID NO: 399246 - DNA, 19 bp, Homo sapiens
  siRNA target sequence for DKFZp434I099 (NM_032269.3,2004-2022).
gcaaaggcaacaagatcat

SEQ ID NO: 399247 - DNA, 19 bp, Homo sapiens
  siRNA target sequence for DKFZp434I099 (NM_032269.3,2679-2697).
gggagctccagaaaatatt

SEQ ID NO: 399248 - DNA, 19 bp, Homo sapiens
  siRNA target sequence for AD158 (NM_032270.2,238-256).
ggcgtgtttggatgtactt

SEQ ID NO: 399249 - DNA, 19 bp, Homo sapiens
  siRNA target sequence for AD158 (NM_032270.2,239-257).
gcgtgtttggatgtacttt

SEQ ID NO: 399250 - DNA, 19 bp, Homo sapiens
  siRNA target sequence for AD158 (NM_032270.2,240-258).
cgtgtttggatgtacttta

SEQ ID NO: 399251 - DNA, 19 bp, Homo sapiens
  siRNA target sequence for AD158 (NM_032270.2,315-333).
ccactcttccctttcgaat

SEQ ID NO: 399252 - DNA, 19 bp, Homo sapiens
  siRNA target sequence for AD158 (NM_032270.2,603-621).
cattctggggaagtgtttt

SEQ ID NO: 399253 - DNA, 19 bp, Homo sapiens
  siRNA target sequence for AD158 (NM_032270.2,633-651).
gaccacacgggctttatct

SEQ ID NO: 399254 - DNA, 19 bp, Homo sapiens
  siRNA target sequence for AD158 (NM_032270.2,636-654).
cacacgggctttatctgaa

SEQ ID NO: 399255 - DNA, 19 bp, Homo sapiens
  siRNA target sequence for AD158 (NM_032270.2,765-783).
gtccattcctgagaagttt

SEQ ID NO: 399256 - DNA, 19 bp, Homo sapiens
  siRNA target sequence for AD158 (NM_032270.2,767-785).
ccattcctgagaagtttgt

SEQ ID NO: 399257 - DNA, 19 bp, Homo sapiens
  siRNA target sequence for AD158 (NM_032270.2,775-793).
gagaagtttgtagttgata

SEQ ID NO: 399258 - DNA, 19 bp, Homo sapiens
  siRNA target sequence for AD158 (NM_032270.2,835-853).
gctaaggccttatttgaga

SEQ ID NO: 399259 - DNA, 19 bp, Homo sapiens
  siRNA target sequence for AD158 (NM_032270.2,910-928).
gttcgccagactgtactta

SEQ ID NO: 399260 - DNA, 19 bp, Homo sapiens
  siRNA target sequence for AD158 (NM_032270.2,914-932).
gccagactgtacttaaagt

SEQ ID NO: 399261 - DNA, 19 bp, Homo sapiens
  siRNA target sequence for AD158 (NM_032270.2,1063-1081).
cacttgttctcaaaactgt

SEQ ID NO: 399262 - DNA, 19 bp, Homo sapiens
  siRNA target sequence for AD158 (NM_032270.2,1093-1111).
ctgtgctttgttagtatct

SEQ ID NO: 399263 - DNA, 19 bp, Homo sapiens
  siRNA target sequence for AD158 (NM_032270.2,1114-1132).
ggattgacgtgcctttata

SEQ ID NO: 399264 - DNA, 19 bp, Homo sapiens
  siRNA target sequence for AD158 (NM_032270.2,1119-1137).
gacgtgcctttatacctta

SEQ ID NO: 399265 - DNA, 19 bp, Homo sapiens
  siRNA target sequence for AD158 (NM_032270.2,1121-1139).
cgtgcctttataccttata

SEQ ID NO: 399266 - DNA, 19 bp, Homo sapiens
  siRNA target sequence for AD158 (NM_032270.2,1133-1151).
ccttatactggctgttcta

SEQ ID NO: 399267 - DNA, 19 bp, Homo sapiens
  siRNA target sequence for AD158 (NM_032270.2,1152-1170).
ccgttctctacgggaatat

SEQ ID NO: 399268 - DNA, 19 bp, Homo sapiens
  siRNA target sequence for AD158 (NM_032270.2,1185-1203).
ccgtcaggagactggaatt

SEQ ID NO: 399269 - DNA, 19 bp, Homo sapiens
  siRNA target sequence for AD158 (NM_032270.2,1235-1253).
cttttatgcttcatatgat

SEQ ID NO: 399270 - DNA, 19 bp, Homo sapiens
  siRNA target sequence for AD158 (NM_032270.2,1267-1285).
cctctctattccaagagat

SEQ ID NO: 399271 - DNA, 19 bp, Homo sapiens
  siRNA target sequence for AD158 (NM_032270.2,1329-1347).
gctgaacttaaataacgaa

SEQ ID NO: 399272 - DNA, 19 bp, Homo sapiens
  siRNA target sequence for AD158 (NM_032270.2,1344-1362).
cgaatggactcctgataaa

SEQ ID NO: 399273 - DNA, 19 bp, Homo sapiens
  siRNA target sequence for AD158 (NM_032270.2,1380-1398).
gacaaatgcccataatcga

SEQ ID NO: 399274 - DNA, 19 bp, Homo sapiens
  siRNA target sequence for AD158 (NM_032270.2,1388-1406).
cccataatcgactggaatt

SEQ ID NO: 399275 - DNA, 19 bp, Homo sapiens
  siRNA target sequence for AD158 (NM_032270.2,1447-1465).
gaaatcacagagttgcaat

SEQ ID NO: 399276 - DNA, 19 bp, Homo sapiens
  siRNA target sequence for AD158 (NM_032270.2,1454-1472).
cagagttgcaatctctaaa

SEQ ID NO: 399277 - DNA, 19 bp, Homo sapiens
  siRNA target sequence for AD158 (NM_032270.2,1477-1495).
gaaatcattaagaacgtaa

SEQ ID NO: 399278 - DNA, 19 bp, Homo sapiens
  siRNA target sequence for AD158 (NM_032270.2,1482-1500).
cattaagaacgtaatgata

SEQ ID NO: 399279 - DNA, 19 bp, Homo sapiens
  siRNA target sequence for AD158 (NM_032270.2,1605-1623).
ggtcttgagcgtcaagttt

SEQ ID NO: 399280 - DNA, 19 bp, Homo sapiens
  siRNA target sequence for AD158 (NM_032270.2,1683-1701).
cctagttggctctctaagt

SEQ ID NO: 399281 - DNA, 19 bp, Homo sapiens
  siRNA target sequence for AD158 (NM_032270.2,1690-1708).
ggctctctaagtcatgata

SEQ ID NO: 399282 - DNA, 19 bp, Homo sapiens
  siRNA target sequence for AD158 (NM_032270.2,1692-1710).
ctctctaagtcatgatatt

SEQ ID NO: 399283 - DNA, 19 bp, Homo sapiens
  siRNA target sequence for AD158 (NM_032270.2,1753-1771).
cttaaaattctctctatca

SEQ ID NO: 399284 - DNA, 19 bp, Homo sapiens
  siRNA target sequence for AD158 (NM_032270.2,1860-1878).
ggtgatgctcaacaactta

SEQ ID NO: 399285 - DNA, 19 bp, Homo sapiens
  siRNA target sequence for AD158 (NM_032270.2,1861-1879).
gtgatgctcaacaacttaa

SEQ ID NO: 399286 - DNA, 19 bp, Homo sapiens
  siRNA target sequence for AD158 (NM_032270.2,2109-2127).
ggaacgcctgtcctttagt

SEQ ID NO: 399287 - DNA, 19 bp, Homo sapiens
  siRNA target sequence for AD158 (NM_032270.2,2120-2138).
cctttagtcacaataaaat

SEQ ID NO: 399288 - DNA, 19 bp, Homo sapiens
  siRNA target sequence for AD158 (NM_032270.2,2179-2197).
cgatacttggacttatcgt

SEQ ID NO: 399289 - DNA, 19 bp, Homo sapiens
  siRNA target sequence for AD158 (NM_032270.2,2184-2202).
cttggacttatcgtacaat

SEQ ID NO: 399290 - DNA, 19 bp, Homo sapiens
  siRNA target sequence for AD158 (NM_032270.2,2188-2206).
gacttatcgtacaatgaca

SEQ ID NO: 399291 - DNA, 19 bp, Homo sapiens
  siRNA target sequence for AD158 (NM_032270.2,2195-2213).
cgtacaatgacattcgatt

SEQ ID NO: 399292 - DNA, 19 bp, Homo sapiens
  siRNA target sequence for AD158 (NM_032270.2,2196-2214).
gtacaatgacattcgattt

SEQ ID NO: 399293 - DNA, 19 bp, Homo sapiens
  siRNA target sequence for AD158 (NM_032270.2,2210-2228).
gatttatcccccctgaaat

SEQ ID NO: 399294 - DNA, 19 bp, Homo sapiens
  siRNA target sequence for AD158 (NM_032270.2,2233-2251).
gttctacaaagtttacagt

SEQ ID NO: 399295 - DNA, 19 bp, Homo sapiens
  siRNA target sequence for AD158 (NM_032270.2,2287-2305).
ccagatgaactctacttct

SEQ ID NO: 399296 - DNA, 19 bp, Homo sapiens
  siRNA target sequence for AD158 (NM_032270.2,2357-2375).
caccgaaaattggaaattt

SEQ ID NO: 399297 - DNA, 19 bp, Homo sapiens
  siRNA target sequence for AD158 (NM_032270.2,2391-2409).
cttagatgtaaaaggtaat

SEQ ID NO: 399298 - DNA, 19 bp, Homo sapiens
  siRNA target sequence for AD158 (NM_032270.2,2506-2524).
gacgtccgggagcaaatga

SEQ ID NO: 399299 - DNA, 19 bp, Homo sapiens
  siRNA target sequence for AD158 (NM_032270.2,2509-2527).
gtccgggagcaaatgaaaa

SEQ ID NO: 399300 - DNA, 19 bp, Homo sapiens
  siRNA target sequence for AD158 (NM_032270.2,2511-2529).
ccgggagcaaatgaaaaca

SEQ ID NO: 399301 - DNA, 19 bp, Homo sapiens
  siRNA target sequence for MAF1 (NM_032272.2,515-533).
gacgacaaacacatgttca

SEQ ID NO: 399302 - DNA, 19 bp, Homo sapiens
  siRNA target sequence for MAF1 (NM_032272.2,706-724).
gtccttcaggcctgactat

SEQ ID NO: 399303 - DNA, 19 bp, Homo sapiens
  siRNA target sequence for MAF1 (NM_032272.2,735-753).
cagcccgcagccatgagtt

SEQ ID NO: 399304 - DNA, 19 bp, Homo sapiens
  siRNA target sequence for MAF1 (NM_032272.2,888-906).
gtgacatctacagctataa

SEQ ID NO: 399305 - DNA, 19 bp, Homo sapiens
  siRNA target sequence for MAF1 (NM_032272.2,951-969).
ggtccttcaactacttctt

SEQ ID NO: 399306 - DNA, 19 bp, Homo sapiens
  siRNA target sequence for MAF1 (NM_032272.2,985-1003).
caagcgaatcgtcttcttt

SEQ ID NO: 399307 - DNA, 19 bp, Homo sapiens
  siRNA target sequence for MAF1 (NM_032272.2,989-1007).
cgaatcgtcttctttagct

SEQ ID NO: 399308 - DNA, 19 bp, Homo sapiens
  siRNA target sequence for DKFZp586C1924 (NM_032273.2,200-218).
gatcggtttatgttggatt

SEQ ID NO: 399309 - DNA, 19 bp, Homo sapiens
  siRNA target sequence for DKFZp586C1924 (NM_032273.2,203-221).
cggtttatgttggattaaa

SEQ ID NO: 399310 - DNA, 19 bp, Homo sapiens
  siRNA target sequence for DKFZp586C1924 (NM_032273.2,238-256).
ctcatagcaaacagtcttt

SEQ ID NO: 399311 - DNA, 19 bp, Homo sapiens
  siRNA target sequence for DKFZp586C1924 (NM_032273.2,253-271).
ctttttcgacgcatcttga

SEQ ID NO: 399312 - DNA, 19 bp, Homo sapiens
  siRNA target sequence for DKFZp586C1924 (NM_032273.2,259-277).
cgacgcatcttgaatgtga

SEQ ID NO: 399313 - DNA, 19 bp, Homo sapiens
  siRNA target sequence for DKFZp586C1924 (NM_032273.2,304-322).
ccaatggcagggatacctt

SEQ ID NO: 399314 - DNA, 19 bp, Homo sapiens
  siRNA target sequence for DKFZp586C1924 (NM_032273.2,305-323).
caatggcagggataccttt

SEQ ID NO: 399315 - DNA, 19 bp, Homo sapiens
  siRNA target sequence for DKFZp586C1924 (NM_032273.2,325-343).
cttacaacagacttaactt

SEQ ID NO: 399316 - DNA, 19 bp, Homo sapiens
  siRNA target sequence for DKFZp586C1924 (NM_032273.2,369-387).
gaatacaggtgatttggat

SEQ ID NO: 399317 - DNA, 19 bp, Homo sapiens
  siRNA target sequence for DKFZp586C1924 (NM_032273.2,415-433).
ggactgactggtcttgtta

SEQ ID NO: 399318 - DNA, 19 bp, Homo sapiens
  siRNA target sequence for DKFZp586C1924 (NM_032273.2,416-434).
gactgactggtcttgttat

SEQ ID NO: 399319 - DNA, 19 bp, Homo sapiens
  siRNA target sequence for DKFZp586C1924 (NM_032273.2,420-438).
gactggtcttgttattggt

SEQ ID NO: 399320 - DNA, 19 bp, Homo sapiens
  siRNA target sequence for DKFZp586C1924 (NM_032273.2,437-455).
gtggtctataccctgtttt

SEQ ID NO: 399321 - DNA, 19 bp, Homo sapiens
  siRNA target sequence for DKFZp586C1924 (NM_032273.2,459-477).
ggctatacctgtaaatggt

SEQ ID NO: 399322 - DNA, 19 bp, Homo sapiens
  siRNA target sequence for DKFZp586C1924 (NM_032273.2,481-499).
ctagcagccaggtatcaat

SEQ ID NO: 399323 - DNA, 19 bp, Homo sapiens
  siRNA target sequence for DKFZp586C1924 (NM_032273.2,588-606).
gctccagactatgttttca

SEQ ID NO: 399324 - DNA, 19 bp, Homo sapiens
  siRNA target sequence for DKFZp547E052 (NM_032276.2,181-199).
ccatgttgggatcaacaat

SEQ ID NO: 399325 - DNA, 19 bp, Homo sapiens
  siRNA target sequence for DKFZp547E052 (NM_032276.2,381-399).
ccatgctctggaaaggaat

SEQ ID NO: 399326 - DNA, 19 bp, Homo sapiens
  siRNA target sequence for DKFZp547E052 (NM_032276.2,445-463).
caccgcattttctgtactt

SEQ ID NO: 399327 - DNA, 19 bp, Homo sapiens
  siRNA target sequence for DKFZp547E052 (NM_032276.2,473-491).
gtatacctgctcttgcaat

SEQ ID NO: 399328 - DNA, 19 bp, Homo sapiens
  siRNA target sequence for DKFZp547E052 (NM_032276.2,629-647).
gtaccgaacagatttgctt

SEQ ID NO: 399329 - DNA, 19 bp, Homo sapiens
  siRNA target sequence for DKFZp547E052 (NM_032276.2,645-663).
cttgttgggtcgaacttgt

SEQ ID NO: 399330 - DNA, 19 bp, Homo sapiens
  siRNA target sequence for DKFZp547E052 (NM_032276.2,655-673).
cgaacttgtggctattcat

SEQ ID NO: 399331 - DNA, 19 bp, Homo sapiens
  siRNA target sequence for DKFZp547E052 (NM_032276.2,714-732).
ggattcttgttggactaat

SEQ ID NO: 399332 - DNA, 19 bp, Homo sapiens
  siRNA target sequence for DKFZp547E052 (NM_032276.2,719-737).
cttgttggactaatgtaca

SEQ ID NO: 399333 - DNA, 19 bp, Homo sapiens
  siRNA target sequence for DKFZp547E052 (NM_032276.2,803-821).
ccaggacggcaatactact

SEQ ID NO: 399334 - DNA, 19 bp, Homo sapiens
  siRNA target sequence for DKFZp547E052 (NM_032276.2,804-822).
caggacggcaatactactt

SEQ ID NO: 399335 - DNA, 19 bp, Homo sapiens
  siRNA target sequence for DKFZp547E052 (NM_032276.2,806-824).
ggacggcaatactacttta

SEQ ID NO: 399336 - DNA, 19 bp, Homo sapiens
  siRNA target sequence for DKFZp547E052 (NM_032276.2,807-825).
gacggcaatactactttaa

SEQ ID NO: 399337 - DNA, 19 bp, Homo sapiens
  siRNA target sequence for DKFZp547E052 (NM_032276.2,809-827).
cggcaatactactttaata

SEQ ID NO: 399338 - DNA, 19 bp, Homo sapiens
  siRNA target sequence for DKFZp547E052 (NM_032276.2,837-855).
gctctggatatcaggatta

SEQ ID NO: 399339 - DNA, 19 bp, Homo sapiens
  siRNA target sequence for DKFZp547E052 (NM_032276.2,868-886).
caggccagatcactatgaa

SEQ ID NO: 399340 - DNA, 19 bp, Homo sapiens
  siRNA target sequence for DKFZp547E052 (NM_032276.2,871-889).
gccagatcactatgaagaa

SEQ ID NO: 399341 - DNA, 19 bp, Homo sapiens
  siRNA target sequence for DKFZp547E052 (NM_032276.2,890-908).
gcacccaggaactatgaca

SEQ ID NO: 399342 - DNA, 19 bp, Homo sapiens
  siRNA target sequence for DKFZp547E052 (NM_032276.2,964-982).
cctctgggaccgaggaaat

SEQ ID NO: 399343 - DNA, 19 bp, Homo sapiens
  siRNA target sequence for DKFZp547E052 (NM_032276.2,999-1017).
caccctacgggtttcatct

SEQ ID NO: 399344 - DNA, 19 bp, Homo sapiens
  siRNA target sequence for DKFZp547E052 (NM_032276.2,1038-1056).
gacagcggcttcacagatt

SEQ ID NO: 399345 - DNA, 19 bp, Homo sapiens
  siRNA target sequence for DKFZp547E052 (NM_032276.2,1042-1060).
gcggcttcacagattcgat

SEQ ID NO: 399346 - DNA, 19 bp, Homo sapiens
  siRNA target sequence for DKFZp547E052 (NM_032276.2,1043-1061).
cggcttcacagattcgata

SEQ ID NO: 399347 - DNA, 19 bp, Homo sapiens
  siRNA target sequence for FLJ14936 (NM_032284.2,675-693).
ctcccgaaaggtctaagaa

SEQ ID NO: 399348 - DNA, 19 bp, Homo sapiens
  siRNA target sequence for FLJ14936 (NM_032284.2,677-695).
cccgaaaggtctaagaaga

SEQ ID NO: 399349 - DNA, 19 bp, Homo sapiens
  siRNA target sequence for MGC5309 (NM_032286.1,95-113).
ctcccagctcacaataggt

SEQ ID NO: 399350 - DNA, 19 bp, Homo sapiens
  siRNA target sequence for MGC5309 (NM_032286.1,174-192).
ccctttcgttcgtgttctt

SEQ ID NO: 399351 - DNA, 19 bp, Homo sapiens
  siRNA target sequence for MGC5309 (NM_032286.1,175-193).
cctttcgttcgtgttcttt

SEQ ID NO: 399352 - DNA, 19 bp, Homo sapiens
  siRNA target sequence for MGC5309 (NM_032286.1,324-342).
gagaatgctggtcaagatt

SEQ ID NO: 399353 - DNA, 19 bp, Homo sapiens
  siRNA target sequence for MGC5309 (NM_032286.1,330-348).
gctggtcaagatttacctt

SEQ ID NO: 399354 - DNA, 19 bp, Homo sapiens
  siRNA target sequence for MGC5309 (NM_032286.1,331-349).
ctggtcaagatttaccttt

SEQ ID NO: 399355 - DNA, 19 bp, Homo sapiens
  siRNA target sequence for DKFZp761O17121 (NM_032287.1,237-255).
gggccaccattccatgaat

SEQ ID NO: 399356 - DNA, 19 bp, Homo sapiens
  siRNA target sequence for DKFZp761O17121 (NM_032287.1,252-270).
gaatgggaggtgtacagat

SEQ ID NO: 399357 - DNA, 19 bp, Homo sapiens
  siRNA target sequence for DKFZp761O17121 (NM_032287.1,260-278).
ggtgtacagatcactttct

SEQ ID NO: 399358 - DNA, 19 bp, Homo sapiens
  siRNA target sequence for DKFZp761O17121 (NM_032287.1,308-326).
cagctatattggtaagact

SEQ ID NO: 399359 - DNA, 19 bp, Homo sapiens
  siRNA target sequence for DKFZp761O17121 (NM_032287.1,652-670).
gtttggcatggtgatttgt

SEQ ID NO: 399360 - DNA, 19 bp, Homo sapiens
  siRNA target sequence for DKFZp761B1514 (NM_032288.3,250-268).
ggagccacggcgacttctt

SEQ ID NO: 399361 - DNA, 19 bp, Homo sapiens
  siRNA target sequence for DKFZp761B1514 (NM_032288.3,301-319).
ctcgacaaaatagatatgt

SEQ ID NO: 399362 - DNA, 19 bp, Homo sapiens
  siRNA target sequence for DKFZp761B1514 (NM_032288.3,363-381).
gcagaattttccaagacta

SEQ ID NO: 399363 - DNA, 19 bp, Homo sapiens
  siRNA target sequence for DKFZp761B1514 (NM_032288.3,438-456).
gggaatccaacagaattct

SEQ ID NO: 399364 - DNA, 19 bp, Homo sapiens
  siRNA target sequence for DKFZp761B1514 (NM_032288.3,509-527).
gacgtcctaatggagttat

SEQ ID NO: 399365 - DNA, 19 bp, Homo sapiens
  siRNA target sequence for DKFZp761B1514 (NM_032288.3,511-529).
cgtcctaatggagttatca

SEQ ID NO: 399366 - DNA, 19 bp, Homo sapiens
  siRNA target sequence for DKFZp761B1514 (NM_032288.3,532-550).
ggccttgcagctaggaaaa

SEQ ID NO: 399367 - DNA, 19 bp, Homo sapiens
  siRNA target sequence for DKFZp761B1514 (NM_032288.3,535-553).
cttgcagctaggaaaacga

SEQ ID NO: 399368 - DNA, 19 bp, Homo sapiens
  siRNA target sequence for DKFZp761B1514 (NM_032288.3,552-570).
gactggaattcgaaaagga

SEQ ID NO: 399369 - DNA, 19 bp, Homo sapiens
  siRNA target sequence for DKFZp761B1514 (NM_032288.3,582-600).
gaatcgtccacctctaagt

SEQ ID NO: 399370 - DNA, 19 bp, Homo sapiens
  siRNA target sequence for DKFZp761B1514 (NM_032288.3,590-608).
cacctctaagtgacaagaa

SEQ ID NO: 399371 - DNA, 19 bp, Homo sapiens
  siRNA target sequence for DKFZp761B1514 (NM_032288.3,592-610).
cctctaagtgacaagaata

SEQ ID NO: 399372 - DNA, 19 bp, Homo sapiens
  siRNA target sequence for DKFZp761B1514 (NM_032288.3,603-621).
caagaatatagaacaatat

SEQ ID NO: 399373 - DNA, 19 bp, Homo sapiens
  siRNA target sequence for DKFZp761B1514 (NM_032288.3,643-661).
gcaaaccttctgagacaaa

SEQ ID NO: 399374 - DNA, 19 bp, Homo sapiens
  siRNA target sequence for DKFZp761B1514 (NM_032288.3,705-723).
ccagctaagcagaaaaaat

SEQ ID NO: 399375 - DNA, 19 bp, Homo sapiens
  siRNA target sequence for DKFZp761B1514 (NM_032288.3,819-837).
gcaggcccagttgaataca

SEQ ID NO: 399376 - DNA, 19 bp, Homo sapiens
  siRNA target sequence for DKFZp761B1514 (NM_032288.3,882-900).
gcggacttccaccacaaat

SEQ ID NO: 399377 - DNA, 19 bp, Homo sapiens
  siRNA target sequence for DKFZp761B1514 (NM_032288.3,901-919).
ggagggattttgactgtat

SEQ ID NO: 399378 - DNA, 19 bp, Homo sapiens
  siRNA target sequence for DKFZp761B1514 (NM_032288.3,904-922).
gggattttgactgtatcta

SEQ ID NO: 399379 - DNA, 19 bp, Homo sapiens
  siRNA target sequence for DKFZp761B1514 (NM_032288.3,905-923).
ggattttgactgtatctat

SEQ ID NO: 399380 - DNA, 19 bp, Homo sapiens
  siRNA target sequence for DKFZp761B1514 (NM_032288.3,906-924).
gattttgactgtatctatt

SEQ ID NO: 399381 - DNA, 19 bp, Homo sapiens
  siRNA target sequence for DKFZp761B1514 (NM_032288.3,912-930).
gactgtatctattgacaat

SEQ ID NO: 399382 - DNA, 19 bp, Homo sapiens
  siRNA target sequence for DKFZp761B1514 (NM_032288.3,977-995).
gtactgctgtaccttcatt

SEQ ID NO: 399383 - DNA, 19 bp, Homo sapiens
  siRNA target sequence for DKFZp761B1514 (NM_032288.3,1011-1029).
gcaaagtgacgtcaagaaa

SEQ ID NO: 399384 - DNA, 19 bp, Homo sapiens
  siRNA target sequence for DKFZp761B1514 (NM_032288.3,1020-1038).
cgtcaagaaagttcctaaa

SEQ ID NO: 399385 - DNA, 19 bp, Homo sapiens
  siRNA target sequence for DKFZp761B1514 (NM_032288.3,1045-1063).
cccctgcagtttgacataa

SEQ ID NO: 399386 - DNA, 19 bp, Homo sapiens
  siRNA target sequence for DKFZp761B1514 (NM_032288.3,1129-1147).
gccactctcacatacaaca

SEQ ID NO: 399387 - DNA, 19 bp, Homo sapiens
  siRNA target sequence for DKFZp761B1514 (NM_032288.3,1130-1148).
ccactctcacatacaacaa

SEQ ID NO: 399388 - DNA, 19 bp, Homo sapiens
  siRNA target sequence for DKFZp761B1514 (NM_032288.3,1150-1168).
gggggaagccgctttgtca

SEQ ID NO: 399389 - DNA, 19 bp, Homo sapiens
  siRNA target sequence for DKFZp761B0514 (NM_032289.1,211-229).
ggaggacaagctcttatct

SEQ ID NO: 399390 - DNA, 19 bp, Homo sapiens
  siRNA target sequence for DKFZp761B0514 (NM_032289.1,618-636).
gcgccacgtttgagaagat

SEQ ID NO: 399391 - DNA, 19 bp, Homo sapiens
  siRNA target sequence for DKFZp761B0514 (NM_032289.1,619-637).
cgccacgtttgagaagatt

SEQ ID NO: 399392 - DNA, 19 bp, Homo sapiens
  siRNA target sequence for DKFZp761B0514 (NM_032289.1,621-639).
ccacgtttgagaagattct

SEQ ID NO: 399393 - DNA, 19 bp, Homo sapiens
  siRNA target sequence for DKFZp761B0514 (NM_032289.1,936-954).
ccaatggattccatgaaga

SEQ ID NO: 399394 - DNA, 19 bp, Homo sapiens
  siRNA target sequence for DKFZp761B0514 (NM_032289.1,1462-1480).
cctgcacggccacaacatt

SEQ ID NO: 399395 - DNA, 19 bp, Homo sapiens
  siRNA target sequence for DKFZp761B0514 (NM_032289.1,1528-1546).
gaatgatggccaagacttt

SEQ ID NO: 399396 - DNA, 19 bp, Homo sapiens
  siRNA target sequence for DKFZp761B0514 (NM_032289.1,1594-1612).
gctggaatgggccattgat

SEQ ID NO: 399397 - DNA, 19 bp, Homo sapiens
  siRNA target sequence for DKFZp761B0514 (NM_032289.1,1812-1830).
ggcgtggctggaagaaatt

SEQ ID NO: 399398 - DNA, 19 bp, Homo sapiens
  siRNA target sequence for DKFZp761B0514 (NM_032289.1,2186-2204).
cggtctcatgagaataagt

SEQ ID NO: 399399 - DNA, 19 bp, Homo sapiens
  siRNA target sequence for DKFZp761B0514 (NM_032289.1,2187-2205).
ggtctcatgagaataagtt

SEQ ID NO: 399400 - DNA, 19 bp, Homo sapiens
  siRNA target sequence for DKFZp761B0514 (NM_032289.1,2249-2267).
gtcgagaggggcatcaagt

SEQ ID NO: 399401 - DNA, 19 bp, Homo sapiens
  siRNA target sequence for DKFZp761B0514 (NM_032289.1,2322-2340).
gccgttatgagacctatat

SEQ ID NO: 399402 - DNA, 19 bp, Homo sapiens
  siRNA target sequence for DKFZp761B0514 (NM_032289.1,2325-2343).
gttatgagacctatatcca

SEQ ID NO: 399403 - DNA, 19 bp, Homo sapiens
  siRNA target sequence for DKFZp761B0514 (NM_032289.1,2347-2365).
cctggctatgaaaatcaaa

SEQ ID NO: 399404 - DNA, 19 bp, Homo sapiens
  siRNA target sequence for DKFZp761B0514 (NM_032289.1,2432-2450).
ctccggaagacacattcaa

SEQ ID NO: 399405 - DNA, 19 bp, Homo sapiens
  siRNA target sequence for DKFZp761B0514 (NM_032289.1,2501-2519).
gccactgggcctgatactt

SEQ ID NO: 399406 - DNA, 19 bp, Homo sapiens
  siRNA target sequence for DKFZp761C121 (NM_032290.1,49-67).
ctgatgacttaggaagtta

SEQ ID NO: 399407 - DNA, 19 bp, Homo sapiens
  siRNA target sequence for DKFZp761C121 (NM_032290.1,73-91).
ctctttcgtgtgatgactt

SEQ ID NO: 399408 - DNA, 19 bp, Homo sapiens
  siRNA target sequence for DKFZp761C121 (NM_032290.1,75-93).
ctttcgtgtgatgactttt

SEQ ID NO: 399409 - DNA, 19 bp, Homo sapiens
  siRNA target sequence for DKFZp761C121 (NM_032290.1,233-251).
ggtatattcctatttacca

SEQ ID NO: 399410 - DNA, 19 bp, Homo sapiens
  siRNA target sequence for DKFZp761C121 (NM_032290.1,310-328).
gacagcggccttgttttga

SEQ ID NO: 399411 - DNA, 19 bp, Homo sapiens
  siRNA target sequence for DKFZp761C121 (NM_032290.1,312-330).
cagcggccttgttttgact

SEQ ID NO: 399412 - DNA, 19 bp, Homo sapiens
  siRNA target sequence for DKFZp761C121 (NM_032290.1,377-395).
cgaagggctgccagagtta

SEQ ID NO: 399413 - DNA, 19 bp, Homo sapiens
  siRNA target sequence for DKFZp761C121 (NM_032290.1,411-429).
gctaaatgttcctcatcat

SEQ ID NO: 399414 - DNA, 19 bp, Homo sapiens
  siRNA target sequence for DKFZp761C121 (NM_032290.1,412-430).
ctaaatgttcctcatcatt

SEQ ID NO: 399415 - DNA, 19 bp, Homo sapiens
  siRNA target sequence for DKFZp761C121 (NM_032290.1,479-497).
gaattgcccctctgtagtt

SEQ ID NO: 399416 - DNA, 19 bp, Homo sapiens
  siRNA target sequence for DKFZp761C121 (NM_032290.1,515-533).
caagactaatctaaaagga

SEQ ID NO: 399417 - DNA, 19 bp, Homo sapiens
  siRNA target sequence for DKFZp761C121 (NM_032290.1,543-561).
ctgcatagagcttgcataa

SEQ ID NO: 399418 - DNA, 19 bp, Homo sapiens
  siRNA target sequence for DKFZp761C121 (NM_032290.1,550-568).
gagcttgcataaataacca

SEQ ID NO: 399419 - DNA, 19 bp, Homo sapiens
  siRNA target sequence for DKFZp761C121 (NM_032290.1,599-617).
gccaggaatagacatcaat

SEQ ID NO: 399420 - DNA, 19 bp, Homo sapiens
  siRNA target sequence for DKFZp761C121 (NM_032290.1,601-619).
caggaatagacatcaatgt

SEQ ID NO: 399421 - DNA, 19 bp, Homo sapiens
  siRNA target sequence for DKFZp761C121 (NM_032290.1,604-622).
gaatagacatcaatgttaa

SEQ ID NO: 399422 - DNA, 19 bp, Homo sapiens
  siRNA target sequence for DKFZp761C121 (NM_032290.1,609-627).
gacatcaatgttaaagaca

SEQ ID NO: 399423 - DNA, 19 bp, Homo sapiens
  siRNA target sequence for DKFZp761C121 (NM_032290.1,611-629).
catcaatgttaaagacaat

SEQ ID NO: 399424 - DNA, 19 bp, Homo sapiens
  siRNA target sequence for DKFZp761C121 (NM_032290.1,647-665).
gcatgaagcctgtaactat

SEQ ID NO: 399425 - DNA, 19 bp, Homo sapiens
  siRNA target sequence for DKFZp761C121 (NM_032290.1,700-718).
gttgtccagaggtagatct

SEQ ID NO: 399426 - DNA, 19 bp, Homo sapiens
  siRNA target sequence for DKFZp761C121 (NM_032290.1,734-752).
cggggtgactcctttgcat

SEQ ID NO: 399427 - DNA, 19 bp, Homo sapiens
  siRNA target sequence for DKFZp761C121 (NM_032290.1,841-859).
gagaattgcccttggatta

SEQ ID NO: 399428 - DNA, 19 bp, Homo sapiens
  siRNA target sequence for DKFZp761C121 (NM_032290.1,861-879).
gtggtttcacctcaaatca

SEQ ID NO: 399429 - DNA, 19 bp, Homo sapiens
  siRNA target sequence for DKFZp761C121 (NM_032290.1,954-972).
cattaccagcaacttgaat

SEQ ID NO: 399430 - DNA, 19 bp, Homo sapiens
  siRNA target sequence for DKFZp761C121 (NM_032290.1,975-993).
ggctcctttttacttagta

SEQ ID NO: 399431 - DNA, 19 bp, Homo sapiens
  siRNA target sequence for DKFZp761C121 (NM_032290.1,987-1005).
cttagtaggatgttgctaa

SEQ ID NO: 399432 - DNA, 19 bp, Homo sapiens
  siRNA target sequence for DKFZp761C121 (NM_032290.1,1052-1070).
caaagggttaactcatcta

SEQ ID NO: 399433 - DNA, 19 bp, Homo sapiens
  siRNA target sequence for DKFZp761C121 (NM_032290.1,1057-1075).
ggttaactcatctaaatga

SEQ ID NO: 399434 - DNA, 19 bp, Homo sapiens
  siRNA target sequence for DKFZp761C121 (NM_032290.1,1077-1095).
ctgcttatggcttgtaaaa

SEQ ID NO: 399435 - DNA, 19 bp, Homo sapiens
  siRNA target sequence for DKFZp761C121 (NM_032290.1,1079-1097).
gcttatggcttgtaaaagt

SEQ ID NO: 399436 - DNA, 19 bp, Homo sapiens
  siRNA target sequence for DKFZp761C121 (NM_032290.1,1087-1105).
cttgtaaaagtcataaaga

SEQ ID NO: 399437 - DNA, 19 bp, Homo sapiens
  siRNA target sequence for DKFZp761C121 (NM_032290.1,1130-1148).
gttactggatctttatgct

SEQ ID NO: 399438 - DNA, 19 bp, Homo sapiens
  siRNA target sequence for DKFZp761C121 (NM_032290.1,1136-1154).
ggatctttatgctggaaat

SEQ ID NO: 399439 - DNA, 19 bp, Homo sapiens
  siRNA target sequence for DKFZp761C121 (NM_032290.1,1191-1209).
gaactgcctgagaatttga

SEQ ID NO: 399440 - DNA, 19 bp, Homo sapiens
  siRNA target sequence for DKFZp761C121 (NM_032290.1,1266-1284).
cggtcagtcatggagtttt

SEQ ID NO: 399441 - DNA, 19 bp, Homo sapiens
  siRNA target sequence for DKFZp761D221 (NM_032291.1,189-207).
cacgaaccaccctacaata

SEQ ID NO: 399442 - DNA, 19 bp, Homo sapiens
  siRNA target sequence for DKFZp761D221 (NM_032291.1,192-210).
gaaccaccctacaatagca

SEQ ID NO: 399443 - DNA, 19 bp, Homo sapiens
  siRNA target sequence for DKFZp761D221 (NM_032291.1,223-241).
cgcgtgaaggaggaaaaaa

SEQ ID NO: 399444 - DNA, 19 bp, Homo sapiens
  siRNA target sequence for DKFZp761D221 (NM_032291.1,261-279).
ggggcaccaaatggatttt

SEQ ID NO: 399445 - DNA, 19 bp, Homo sapiens
  siRNA target sequence for DKFZp761D221 (NM_032291.1,262-280).
gggcaccaaatggatttta

SEQ ID NO: 399446 - DNA, 19 bp, Homo sapiens
  siRNA target sequence for DKFZp761D221 (NM_032291.1,263-281).
ggcaccaaatggattttat

SEQ ID NO: 399447 - DNA, 19 bp, Homo sapiens
  siRNA target sequence for DKFZp761D221 (NM_032291.1,354-372).
cccggctctaccaaaggaa

SEQ ID NO: 399448 - DNA, 19 bp, Homo sapiens
  siRNA target sequence for DKFZp761D221 (NM_032291.1,355-373).
ccggctctaccaaaggaaa

SEQ ID NO: 399449 - DNA, 19 bp, Homo sapiens
  siRNA target sequence for DKFZp761D221 (NM_032291.1,445-463).
cattgcaatctaaagacat

SEQ ID NO: 399450 - DNA, 19 bp, Homo sapiens
  siRNA target sequence for DKFZp761D221 (NM_032291.1,474-492).
gctgcaactgtagatgaat

SEQ ID NO: 399451 - DNA, 19 bp, Homo sapiens
  siRNA target sequence for DKFZp761D221 (NM_032291.1,475-493).
ctgcaactgtagatgaatt

SEQ ID NO: 399452 - DNA, 19 bp, Homo sapiens
  siRNA target sequence for DKFZp761D221 (NM_032291.1,477-495).
gcaactgtagatgaattga

SEQ ID NO: 399453 - DNA, 19 bp, Homo sapiens
  siRNA target sequence for DKFZp761D221 (NM_032291.1,478-496).
caactgtagatgaattgaa

SEQ ID NO: 399454 - DNA, 19 bp, Homo sapiens
  siRNA target sequence for DKFZp761D221 (NM_032291.1,559-577).
cgggtgcaattaaaaggaa

SEQ ID NO: 399455 - DNA, 19 bp, Homo sapiens
  siRNA target sequence for DKFZp761D221 (NM_032291.1,616-634).
caccaactccagaacttat

SEQ ID NO: 399456 - DNA, 19 bp, Homo sapiens
  siRNA target sequence for DKFZp761D221 (NM_032291.1,677-695).
ctttggcccaccactagaa

SEQ ID NO: 399457 - DNA, 19 bp, Homo sapiens
  siRNA target sequence for DKFZp761D221 (NM_032291.1,711-729).
cagaagacagaagttcttt

SEQ ID NO: 399458 - DNA, 19 bp, Homo sapiens
  siRNA target sequence for DKFZp761D221 (NM_032291.1,716-734).
gacagaagttcttttagat

SEQ ID NO: 399459 - DNA, 19 bp, Homo sapiens
  siRNA target sequence for DKFZp761D221 (NM_032291.1,748-766).
ggggttcaggccaaccaat

SEQ ID NO: 399460 - DNA, 19 bp, Homo sapiens
  siRNA target sequence for DKFZp761D221 (NM_032291.1,749-767).
gggttcaggccaaccaatt

SEQ ID NO: 399461 - DNA, 19 bp, Homo sapiens
  siRNA target sequence for DKFZp761D221 (NM_032291.1,750-768).
ggttcaggccaaccaatta

SEQ ID NO: 399462 - DNA, 19 bp, Homo sapiens
  siRNA target sequence for DKFZp761D221 (NM_032291.1,751-769).
gttcaggccaaccaattaa

SEQ ID NO: 399463 - DNA, 19 bp, Homo sapiens
  siRNA target sequence for DKFZp761D221 (NM_032291.1,775-793).
gcatggagtcgccaaagtt

SEQ ID NO: 399464 - DNA, 19 bp, Homo sapiens
  siRNA target sequence for DKFZp761D221 (NM_032291.1,776-794).
catggagtcgccaaagtta

SEQ ID NO: 399465 - DNA, 19 bp, Homo sapiens
  siRNA target sequence for DKFZp761D221 (NM_032291.1,865-883).
caggatcccccttaacaat

SEQ ID NO: 399466 - DNA, 19 bp, Homo sapiens
  siRNA target sequence for DKFZp761D221 (NM_032291.1,907-925).
ccacagaggtcaaaattga

SEQ ID NO: 399467 - DNA, 19 bp, Homo sapiens
  siRNA target sequence for DKFZp761D221 (NM_032291.1,980-998).
caagtctgttgctgttaat

SEQ ID NO: 399468 - DNA, 19 bp, Homo sapiens
  siRNA target sequence for DKFZp761D221 (NM_032291.1,1172-1190).
gcctcctcgcaatgtacta

SEQ ID NO: 399469 - DNA, 19 bp, Homo sapiens
  siRNA target sequence for DKFZp761D221 (NM_032291.1,1173-1191).
cctcctcgcaatgtactat

SEQ ID NO: 399470 - DNA, 19 bp, Homo sapiens
  siRNA target sequence for DKFZp761D221 (NM_032291.1,1185-1203).
gtactatcgccgctcaatt

SEQ ID NO: 399471 - DNA, 19 bp, Homo sapiens
  siRNA target sequence for DKFZp761D221 (NM_032291.1,1192-1210).
cgccgctcaatttagaaga

SEQ ID NO: 399472 - DNA, 19 bp, Homo sapiens
  siRNA target sequence for DKFZp761D221 (NM_032291.1,1193-1211).
gccgctcaatttagaagaa

SEQ ID NO: 399473 - DNA, 19 bp, Homo sapiens
  siRNA target sequence for DKFZp761D221 (NM_032291.1,1226-1244).
cgctgagcagaccttcatt

SEQ ID NO: 399474 - DNA, 19 bp, Homo sapiens
  siRNA target sequence for DKFZp761D221 (NM_032291.1,1634-1652).
cactcccacagttgagaat

SEQ ID NO: 399475 - DNA, 19 bp, Homo sapiens
  siRNA target sequence for DKFZp761D221 (NM_032291.1,1636-1654).
ctcccacagttgagaatga

SEQ ID NO: 399476 - DNA, 19 bp, Homo sapiens
  siRNA target sequence for DKFZp761D221 (NM_032291.1,1658-1676).
gccttccctcgtttggttt

SEQ ID NO: 399477 - DNA, 19 bp, Homo sapiens
  siRNA target sequence for DKFZp761D221 (NM_032291.1,1806-1824).
gcagacccaagcaaatgta

SEQ ID NO: 399478 - DNA, 19 bp, Homo sapiens
  siRNA target sequence for DKFZp761D221 (NM_032291.1,1807-1825).
cagacccaagcaaatgtat

SEQ ID NO: 399479 - DNA, 19 bp, Homo sapiens
  siRNA target sequence for DKFZp761D221 (NM_032291.1,1811-1829).
cccaagcaaatgtatcgtt

SEQ ID NO: 399480 - DNA, 19 bp, Homo sapiens
  siRNA target sequence for DKFZp761D221 (NM_032291.1,1812-1830).
ccaagcaaatgtatcgtta

SEQ ID NO: 399481 - DNA, 19 bp, Homo sapiens
  siRNA target sequence for DKFZp761D221 (NM_032291.1,1813-1831).
caagcaaatgtatcgttaa

SEQ ID NO: 399482 - DNA, 19 bp, Homo sapiens
  siRNA target sequence for DKFZp761D221 (NM_032291.1,1816-1834).
gcaaatgtatcgttaagat

SEQ ID NO: 399483 - DNA, 19 bp, Homo sapiens
  siRNA target sequence for DKFZp761D221 (NM_032291.1,1817-1835).
caaatgtatcgttaagatt

SEQ ID NO: 399484 - DNA, 19 bp, Homo sapiens
  siRNA target sequence for DKFZp761D221 (NM_032291.1,1908-1926).
ctgacttttcgggtgataa

SEQ ID NO: 399485 - DNA, 19 bp, Homo sapiens
  siRNA target sequence for DKFZp761D221 (NM_032291.1,1910-1928).
gacttttcgggtgataaat

SEQ ID NO: 399486 - DNA, 19 bp, Homo sapiens
  siRNA target sequence for DKFZp761D221 (NM_032291.1,1912-1930).
cttttcgggtgataaattt

SEQ ID NO: 399487 - DNA, 19 bp, Homo sapiens
  siRNA target sequence for DKFZp761D221 (NM_032291.1,1965-1983).
cttctctgctgtgataata

SEQ ID NO: 399488 - DNA, 19 bp, Homo sapiens
  siRNA target sequence for DKFZp761D221 (NM_032291.1,1970-1988).
ctgctgtgataatacacaa

SEQ ID NO: 399489 - DNA, 19 bp, Homo sapiens
  siRNA target sequence for DKFZp761D221 (NM_032291.1,1972-1990).
gctgtgataatacacaaaa

SEQ ID NO: 399490 - DNA, 19 bp, Homo sapiens
  siRNA target sequence for DKFZp761D221 (NM_032291.1,1973-1991).
ctgtgataatacacaaaat

SEQ ID NO: 399491 - DNA, 19 bp, Homo sapiens
  siRNA target sequence for DKFZp761D221 (NM_032291.1,1975-1993).
gtgataatacacaaaatga

SEQ ID NO: 399492 - DNA, 19 bp, Homo sapiens
  siRNA target sequence for DKFZp761D221 (NM_032291.1,1992-2010).
gatgccaataccaaggaat

SEQ ID NO: 399493 - DNA, 19 bp, Homo sapiens
  siRNA target sequence for DKFZp761D221 (NM_032291.1,1995-2013).
gccaataccaaggaattct

SEQ ID NO: 399494 - DNA, 19 bp, Homo sapiens
  siRNA target sequence for DKFZp761D221 (NM_032291.1,2072-2090).
ggctacatattataacgtt

SEQ ID NO: 399495 - DNA, 19 bp, Homo sapiens
  siRNA target sequence for DKFZp761D221 (NM_032291.1,2087-2105).
cgttgacatgctcaaatat

SEQ ID NO: 399496 - DNA, 19 bp, Homo sapiens
  siRNA target sequence for DKFZp761D221 (NM_032291.1,2177-2195).
cactgacctgcgcatagat

SEQ ID NO: 399497 - DNA, 19 bp, Homo sapiens
  siRNA target sequence for DKFZp761D221 (NM_032291.1,2179-2197).
ctgacctgcgcatagatta

SEQ ID NO: 399498 - DNA, 19 bp, Homo sapiens
  siRNA target sequence for DKFZp761D221 (NM_032291.1,2181-2199).
gacctgcgcatagattaca

SEQ ID NO: 399499 - DNA, 19 bp, Homo sapiens
  siRNA target sequence for DKFZp761D221 (NM_032291.1,2184-2202).
ctgcgcatagattacaaat

SEQ ID NO: 399500 - DNA, 19 bp, Homo sapiens
  siRNA target sequence for DKFZp761D221 (NM_032291.1,2186-2204).
gcgcatagattacaaatat

SEQ ID NO: 399501 - DNA, 19 bp, Homo sapiens
  siRNA target sequence for DKFZp761D221 (NM_032291.1,2187-2205).
cgcatagattacaaatata

SEQ ID NO: 399502 - DNA, 19 bp, Homo sapiens
  siRNA target sequence for DKFZp761D221 (NM_032291.1,2327-2345).
gagaatattgtggaagatt

SEQ ID NO: 399503 - DNA, 19 bp, Homo sapiens
  siRNA target sequence for DKFZp761D221 (NM_032291.1,2373-2391).
ggaggggtgggttctttgt

SEQ ID NO: 399504 - DNA, 19 bp, Homo sapiens
  siRNA target sequence for DKFZp761D221 (NM_032291.1,2374-2392).
gaggggtgggttctttgtt

SEQ ID NO: 399505 - DNA, 19 bp, Homo sapiens
  siRNA target sequence for DKFZp761D221 (NM_032291.1,2393-2411).
ggcaagatttcagttatct

SEQ ID NO: 399506 - DNA, 19 bp, Homo sapiens
  siRNA target sequence for DKFZp761D221 (NM_032291.1,2493-2511).
gttggagcagggtatcgat

SEQ ID NO: 399507 - DNA, 19 bp, Homo sapiens
  siRNA target sequence for DKFZp761D221 (NM_032291.1,2500-2518).
cagggtatcgattttcact

SEQ ID NO: 399508 - DNA, 19 bp, Homo sapiens
  siRNA target sequence for DKFZp761D221 (NM_032291.1,2508-2526).
cgattttcactcatcaaga

SEQ ID NO: 399509 - DNA, 19 bp, Homo sapiens
  siRNA target sequence for DKFZp761D221 (NM_032291.1,2515-2533).
cactcatcaagaaaaggtt

SEQ ID NO: 399510 - DNA, 19 bp, Homo sapiens
  siRNA target sequence for DKFZp761A132 (NM_032296.1,281-299).
ctccgaggcgtggatagtt

SEQ ID NO: 399511 - DNA, 19 bp, Homo sapiens
  siRNA target sequence for MGC2714 (NM_032299.2,320-338).
gaagacggaggcctcaaaa

SEQ ID NO: 399512 - DNA, 19 bp, Homo sapiens
  siRNA target sequence for MGC2714 (NM_032299.2,367-385).
ccaaccccctgctagacta

SEQ ID NO: 399513 - DNA, 19 bp, Homo sapiens
  siRNA target sequence for MGC2714 (NM_032299.2,368-386).
caaccccctgctagactaa

SEQ ID NO: 399514 - DNA, 19 bp, Homo sapiens
  siRNA target sequence for MGC2714 (NM_032299.2,371-389).
ccccctgctagactaataa

SEQ ID NO: 399515 - DNA, 19 bp, Homo sapiens
  siRNA target sequence for MGC2714 (NM_032299.2,373-391).
ccctgctagactaataagt

SEQ ID NO: 399516 - DNA, 19 bp, Homo sapiens
  siRNA target sequence for MGC2714 (NM_032299.2,424-442).
ggcttggttttatgaatat

SEQ ID NO: 399517 - DNA, 19 bp, Homo sapiens
  siRNA target sequence for MGC2714 (NM_032299.2,444-462).
caggtcctgatgaagttgt

SEQ ID NO: 399518 - DNA, 19 bp, Homo sapiens
  siRNA target sequence for MGC2714 (NM_032299.2,500-518).
ggtgttgaacctgaaaata

SEQ ID NO: 399519 - DNA, 19 bp, Homo sapiens
  siRNA target sequence for MGC2714 (NM_032299.2,501-519).
gtgttgaacctgaaaatat

SEQ ID NO: 399520 - DNA, 19 bp, Homo sapiens
  siRNA target sequence for MGC2714 (NM_032299.2,573-591).
ccaaggaagaatggttaaa

SEQ ID NO: 399521 - DNA, 19 bp, Homo sapiens
  siRNA target sequence for MGC2714 (NM_032299.2,652-670).
gcgctcacagttgaatgat

SEQ ID NO: 399522 - DNA, 19 bp, Homo sapiens
  siRNA target sequence for MGC2714 (NM_032299.2,653-671).
cgctcacagttgaatgata

SEQ ID NO: 399523 - DNA, 19 bp, Homo sapiens
  siRNA target sequence for MGC2714 (NM_032299.2,675-693).
cgtcatttaagaatatcta

SEQ ID NO: 399524 - DNA, 19 bp, Homo sapiens
  siRNA target sequence for MGC2714 (NM_032299.2,725-743).
gatcagagaagccttgata

SEQ ID NO: 399525 - DNA, 19 bp, Homo sapiens
  siRNA target sequence for MGC2714 (NM_032299.2,746-764).
gatactgctaaatctatgt

SEQ ID NO: 399526 - DNA, 19 bp, Homo sapiens
  siRNA target sequence for MGC2714 (NM_032299.2,781-799).
gaggacatggccactgttt

SEQ ID NO: 399527 - DNA, 19 bp, Homo sapiens
  siRNA target sequence for MGC2714 (NM_032299.2,789-807).
ggccactgttttcagtatt

SEQ ID NO: 399528 - DNA, 19 bp, Homo sapiens
  siRNA target sequence for MGC2714 (NM_032299.2,828-846).
caaagtatcgtgttatgaa

SEQ ID NO: 399529 - DNA, 19 bp, Homo sapiens
  siRNA target sequence for MGC2714 (NM_032299.2,832-850).
gtatcgtgttatgaacaaa

SEQ ID NO: 399530 - DNA, 19 bp, Homo sapiens
  siRNA target sequence for MGC2714 (NM_032299.2,847-865).
caaagatcaatggtacaat

SEQ ID NO: 399531 - DNA, 19 bp, Homo sapiens
  siRNA target sequence for MGC2714 (NM_032299.2,887-905).
gtccatgctgatcttagta

SEQ ID NO: 399532 - DNA, 19 bp, Homo sapiens
  siRNA target sequence for MGC2714 (NM_032299.2,890-908).
catgctgatcttagtaact

SEQ ID NO: 399533 - DNA, 19 bp, Homo sapiens
  siRNA target sequence for MGC10854 (NM_032300.2,250-268).
gccagcagcgcctgaatca

SEQ ID NO: 399534 - DNA, 19 bp, Homo sapiens
  siRNA target sequence for MGC10854 (NM_032300.2,321-339).
cagaacagccgttacttca

SEQ ID NO: 399535 - DNA, 19 bp, Homo sapiens
  siRNA target sequence for MGC10854 (NM_032300.2,369-387).
gcagaatggagctctaaaa

SEQ ID NO: 399536 - DNA, 19 bp, Homo sapiens
  siRNA target sequence for MGC10854 (NM_032300.2,372-390).
gaatggagctctaaaacct

SEQ ID NO: 399537 - DNA, 19 bp, Homo sapiens
  siRNA target sequence for MGC10854 (NM_032300.2,412-430).
cctatcagcgggagaagat

SEQ ID NO: 399538 - DNA, 19 bp, Homo sapiens
  siRNA target sequence for MGC10854 (NM_032300.2,572-590).
gcacgggaagctgaaatca

SEQ ID NO: 399539 - DNA, 19 bp, Homo sapiens
  siRNA target sequence for MGC10854 (NM_032300.2,690-708).
cagaagcatgtcgtaaact

SEQ ID NO: 399540 - DNA, 19 bp, Homo sapiens
  siRNA target sequence for MGC10854 (NM_032300.2,692-710).
gaagcatgtcgtaaactct

SEQ ID NO: 399541 - DNA, 19 bp, Homo sapiens
  siRNA target sequence for MGC10854 (NM_032300.2,767-785).
caaacggtatgaaaatgaa

SEQ ID NO: 399542 - DNA, 19 bp, Homo sapiens
  siRNA target sequence for MGC10854 (NM_032300.2,772-790).
ggtatgaaaatgaatatga

SEQ ID NO: 399543 - DNA, 19 bp, Homo sapiens
  siRNA target sequence for MGC10854 (NM_032300.2,802-820).
gggaggcgctagaaaggat

SEQ ID NO: 399544 - DNA, 19 bp, Homo sapiens
  siRNA target sequence for MGC10854 (NM_032300.2,806-824).
ggcgctagaaaggatgaaa

SEQ ID NO: 399545 - DNA, 19 bp, Homo sapiens
  siRNA target sequence for MGC10854 (NM_032300.2,908-926).
ggtggaggcgaccaaacta

SEQ ID NO: 399546 - DNA, 19 bp, Homo sapiens
  siRNA target sequence for MGC10854 (NM_032300.2,909-927).
gtggaggcgaccaaactaa

SEQ ID NO: 399547 - DNA, 19 bp, Homo sapiens
  siRNA target sequence for MGC10854 (NM_032300.2,912-930).
gaggcgaccaaactaaaga

SEQ ID NO: 399548 - DNA, 19 bp, Homo sapiens
  siRNA target sequence for MGC10854 (NM_032300.2,1030-1048).
gtttcttgagacatcagta

SEQ ID NO: 399549 - DNA, 19 bp, Homo sapiens
  siRNA target sequence for MGC10854 (NM_032300.2,1430-1448).
ggagcaacttattcgaaat

SEQ ID NO: 399550 - DNA, 19 bp, Homo sapiens
  siRNA target sequence for MGC10854 (NM_032300.2,1433-1451).
gcaacttattcgaaatctt

SEQ ID NO: 399551 - DNA, 19 bp, Homo sapiens
  siRNA target sequence for MGC10854 (NM_032300.2,1680-1698).
ccttacggacatccaaaaa

SEQ ID NO: 399552 - DNA, 19 bp, Homo sapiens
  siRNA target sequence for MGC10854 (NM_032300.2,1681-1699).
cttacggacatccaaaaat

SEQ ID NO: 399553 - DNA, 19 bp, Homo sapiens
  siRNA target sequence for MGC10854 (NM_032300.2,1685-1703).
cggacatccaaaaattgct

SEQ ID NO: 399554 - DNA, 19 bp, Homo sapiens
  siRNA target sequence for MGC10854 (NM_032300.2,1686-1704).
ggacatccaaaaattgctt

SEQ ID NO: 399555 - DNA, 19 bp, Homo sapiens
  siRNA target sequence for MGC10870 (NM_032301.1,1174-1192).
gcttatccggtcctttgat

SEQ ID NO: 399556 - DNA, 19 bp, Homo sapiens
  siRNA target sequence for MGC10870 (NM_032301.1,1289-1307).
gacccaccaaggaccattt

SEQ ID NO: 399557 - DNA, 19 bp, Homo sapiens
  siRNA target sequence for MGC10870 (NM_032301.1,1308-1326).
gcacccgaaggcatgacaa

SEQ ID NO: 399558 - DNA, 19 bp, Homo sapiens
  siRNA target sequence for MGC10870 (NM_032301.1,1309-1327).
cacccgaaggcatgacaat

SEQ ID NO: 399559 - DNA, 19 bp, Homo sapiens
  siRNA target sequence for MGC10870 (NM_032301.1,1319-1337).
catgacaatgggctcaata

SEQ ID NO: 399560 - DNA, 19 bp, Homo sapiens
  siRNA target sequence for MGC10911 (NM_032302.1,240-258).
gacacgccgttggtgatat

SEQ ID NO: 399561 - DNA, 19 bp, Homo sapiens
  siRNA target sequence for MGC10911 (NM_032302.1,410-428).
gcctgtgctcaccacaaaa

SEQ ID NO: 399562 - DNA, 19 bp, Homo sapiens
  siRNA target sequence for MGC10911 (NM_032302.1,453-471).
ctcatccatgtctttgcaa

SEQ ID NO: 399563 - DNA, 19 bp, Homo sapiens
  siRNA target sequence for MGC10940 (NM_032303.2,115-133).
gctggcaggatgtacagtt

SEQ ID NO: 399564 - DNA, 19 bp, Homo sapiens
  siRNA target sequence for MGC10940 (NM_032303.2,118-136).
ggcaggatgtacagttttt

SEQ ID NO: 399565 - DNA, 19 bp, Homo sapiens
  siRNA target sequence for MGC10940 (NM_032303.2,152-170).
cgtggcattggcaaagcta

SEQ ID NO: 399566 - DNA, 19 bp, Homo sapiens
  siRNA target sequence for MGC10940 (NM_032303.2,157-175).
cattggcaaagctattgca

SEQ ID NO: 399567 - DNA, 19 bp, Homo sapiens
  siRNA target sequence for MGC10940 (NM_032303.2,162-180).
gcaaagctattgcattgaa

SEQ ID NO: 399568 - DNA, 19 bp, Homo sapiens
  siRNA target sequence for MGC10940 (NM_032303.2,222-240).
ccgcccagccacatccaaa

SEQ ID NO: 399569 - DNA, 19 bp, Homo sapiens
  siRNA target sequence for MGC10940 (NM_032303.2,223-241).
cgcccagccacatccaaaa

SEQ ID NO: 399570 - DNA, 19 bp, Homo sapiens
  siRNA target sequence for MGC10940 (NM_032303.2,229-247).
gccacatccaaaacttcta

SEQ ID NO: 399571 - DNA, 19 bp, Homo sapiens
  siRNA target sequence for MGC10940 (NM_032303.2,242-260).
cttctaggcacaatctata

SEQ ID NO: 399572 - DNA, 19 bp, Homo sapiens
  siRNA target sequence for MGC10940 (NM_032303.2,298-316).
cttgccatgtattgttgat

SEQ ID NO: 399573 - DNA, 19 bp, Homo sapiens
  siRNA target sequence for MGC10940 (NM_032303.2,398-416).
gccagtgccattagtttga

SEQ ID NO: 399574 - DNA, 19 bp, Homo sapiens
  siRNA target sequence for MGC10940 (NM_032303.2,404-422).
gccattagtttgaccaata

SEQ ID NO: 399575 - DNA, 19 bp, Homo sapiens
  siRNA target sequence for MGC10940 (NM_032303.2,477-495).
gcacctaccttgcatctaa

SEQ ID NO: 399576 - DNA, 19 bp, Homo sapiens
  siRNA target sequence for MGC10940 (NM_032303.2,478-496).
cacctaccttgcatctaaa

SEQ ID NO: 399577 - DNA, 19 bp, Homo sapiens
  siRNA target sequence for MGC10940 (NM_032303.2,492-510).
ctaaagcatgtattcctta

SEQ ID NO: 399578 - DNA, 19 bp, Homo sapiens
  siRNA target sequence for MGC10940 (NM_032303.2,497-515).
gcatgtattccttatttga

SEQ ID NO: 399579 - DNA, 19 bp, Homo sapiens
  siRNA target sequence for MGC10940 (NM_032303.2,530-548).
gctcatatcctcaatatca

SEQ ID NO: 399580 - DNA, 19 bp, Homo sapiens
  siRNA target sequence for MGC10940 (NM_032303.2,549-567).
gtccaccactgaacctaaa

SEQ ID NO: 399581 - DNA, 19 bp, Homo sapiens
  siRNA target sequence for MGC10940 (NM_032303.2,591-609).
gtgcttataccattgctaa

SEQ ID NO: 399582 - DNA, 19 bp, Homo sapiens
  siRNA target sequence for MGC10940 (NM_032303.2,594-612).
cttataccattgctaagta

SEQ ID NO: 399583 - DNA, 19 bp, Homo sapiens
  siRNA target sequence for MGC10940 (NM_032303.2,605-623).
gctaagtatggtatgtcta

SEQ ID NO: 399584 - DNA, 19 bp, Homo sapiens
  siRNA target sequence for MGC10940 (NM_032303.2,606-624).
ctaagtatggtatgtctat

SEQ ID NO: 399585 - DNA, 19 bp, Homo sapiens
  siRNA target sequence for MGC10940 (NM_032303.2,683-701).
cctaaaacagccatacaca

SEQ ID NO: 399586 - DNA, 19 bp, Homo sapiens
  siRNA target sequence for MGC10940 (NM_032303.2,721-739).
gggaggacctggtatcgaa

SEQ ID NO: 399587 - DNA, 19 bp, Homo sapiens
  siRNA target sequence for MGC10940 (NM_032303.2,722-740).
ggaggacctggtatcgaaa

SEQ ID NO: 399588 - DNA, 19 bp, Homo sapiens
  siRNA target sequence for MGC10940 (NM_032303.2,742-760).
ccagtgtagaaaagttgat

SEQ ID NO: 399589 - DNA, 19 bp, Homo sapiens
  siRNA target sequence for MGC10940 (NM_032303.2,898-916).
gcaaccagatttcttctta

SEQ ID NO: 399590 - DNA, 19 bp, Homo sapiens
  siRNA target sequence for MGC10940 (NM_032303.2,960-978).
gtgctgttccagaattcaa

SEQ ID NO: 399591 - DNA, 19 bp, Homo sapiens
  siRNA target sequence for MGC10940 (NM_032303.2,1077-1095).
ccactcaagcaatctatct

SEQ ID NO: 399592 - DNA, 19 bp, Homo sapiens
  siRNA target sequence for MGC10940 (NM_032303.2,1119-1137).
gtggcacgtggtttcttga

SEQ ID NO: 399593 - DNA, 19 bp, Homo sapiens
  siRNA target sequence for MGC10940 (NM_032303.2,1187-1205).
gcagatgtggtgatgagta

SEQ ID NO: 399594 - DNA, 19 bp, Homo sapiens
  siRNA target sequence for MGC10940 (NM_032303.2,1193-1211).
gtggtgatgagtatgacta

SEQ ID NO: 399595 - DNA, 19 bp, Homo sapiens
  siRNA target sequence for MGC10940 (NM_032303.2,1198-1216).
gatgagtatgactactgat

SEQ ID NO: 399596 - DNA, 19 bp, Homo sapiens
  siRNA target sequence for MGC10940 (NM_032303.2,1203-1221).
gtatgactactgatgactt

SEQ ID NO: 399597 - DNA, 19 bp, Homo sapiens
  siRNA target sequence for MGC10940 (NM_032303.2,1260-1278).
cattcatgtcagggaaatt

SEQ ID NO: 399598 - DNA, 19 bp, Homo sapiens
  siRNA target sequence for MGC10940 (NM_032303.2,1290-1308).
gtaacatggccctagcaat

SEQ ID NO: 399599 - DNA, 19 bp, Homo sapiens
  siRNA target sequence for MGC10940 (NM_032303.2,1294-1312).
catggccctagcaatcaaa

SEQ ID NO: 399600 - DNA, 19 bp, Homo sapiens
  siRNA target sequence for MGC10940 (NM_032303.2,1299-1317).
ccctagcaatcaaattgga

SEQ ID NO: 399601 - DNA, 19 bp, Homo sapiens
  siRNA target sequence for HAGHL (NM_032304.1,259-277).
ccgtgctcgaggacaacta

SEQ ID NO: 399602 - DNA, 19 bp, Homo sapiens
  siRNA target sequence for HAGHL (NM_032304.1,264-282).
ctcgaggacaactacatgt

SEQ ID NO: 399603 - DNA, 19 bp, Homo sapiens
  siRNA target sequence for HAGHL (NM_032304.1,679-697).
gcagcgcccagcagatgta

SEQ ID NO: 399604 - DNA, 19 bp, Homo sapiens
  siRNA target sequence for MGC3200 (NM_032305.1,322-340).
ggcagctcccctacttcat

SEQ ID NO: 399605 - DNA, 19 bp, Homo sapiens
  siRNA target sequence for MGC3200 (NM_032305.1,368-386).
ggagcgttattcagacaaa

SEQ ID NO: 399606 - DNA, 19 bp, Homo sapiens
  siRNA target sequence for MGC3200 (NM_032305.1,369-387).
gagcgttattcagacaaat

SEQ ID NO: 399607 - DNA, 19 bp, Homo sapiens
  siRNA target sequence for MGC3200 (NM_032305.1,371-389).
gcgttattcagacaaatat

SEQ ID NO: 399608 - DNA, 19 bp, Homo sapiens
  siRNA target sequence for MGC3200 (NM_032305.1,395-413).
gtcaggtccgattgacaat

SEQ ID NO: 399609 - DNA, 19 bp, Homo sapiens
  siRNA target sequence for MGC3200 (NM_032305.1,482-500).
gaaggaacggattacaatt

SEQ ID NO: 399610 - DNA, 19 bp, Homo sapiens
  siRNA target sequence for MGC3200 (NM_032305.1,675-693).
gaggaaactgattacatca

SEQ ID NO: 399611 - DNA, 19 bp, Homo sapiens
  siRNA target sequence for MGC3200 (NM_032305.1,682-700).
ctgattacatcatgtcata

SEQ ID NO: 399612 - DNA, 19 bp, Homo sapiens
  siRNA target sequence for SPATA11 (NM_032306.2,891-909).
ggggctcagcccgttatga

SEQ ID NO: 399613 - DNA, 19 bp, Homo sapiens
  siRNA target sequence for SPATA11 (NM_032306.2,893-911).
ggctcagcccgttatgact

SEQ ID NO: 399614 - DNA, 19 bp, Homo sapiens
  siRNA target sequence for SPATA11 (NM_032306.2,894-912).
gctcagcccgttatgactt

SEQ ID NO: 399615 - DNA, 19 bp, Homo sapiens
  siRNA target sequence for SPATA11 (NM_032306.2,931-949).
ggatgaagagtccttcttt

SEQ ID NO: 399616 - DNA, 19 bp, Homo sapiens
  siRNA target sequence for C9orf64 (NM_032307.2,289-307).
catcggattctcaatgaaa

SEQ ID NO: 399617 - DNA, 19 bp, Homo sapiens
  siRNA target sequence for C9orf64 (NM_032307.2,300-318).
caatgaaaccgggaaaatt

SEQ ID NO: 399618 - DNA, 19 bp, Homo sapiens
  siRNA target sequence for C9orf64 (NM_032307.2,354-372).
cgtccgagaaagtgagaat

SEQ ID NO: 399619 - DNA, 19 bp, Homo sapiens
  siRNA target sequence for C9orf64 (NM_032307.2,369-387).
gaatagtgcgcagaagtta

SEQ ID NO: 399620 - DNA, 19 bp, Homo sapiens
  siRNA target sequence for C9orf64 (NM_032307.2,374-392).
gtgcgcagaagttaatgca

SEQ ID NO: 399621 - DNA, 19 bp, Homo sapiens
  siRNA target sequence for C9orf64 (NM_032307.2,390-408).
gcacctggtggttgaaagt

SEQ ID NO: 399622 - DNA, 19 bp, Homo sapiens
  siRNA target sequence for C9orf64 (NM_032307.2,462-480).
caaacgagcccaaatcctt

SEQ ID NO: 399623 - DNA, 19 bp, Homo sapiens
  siRNA target sequence for C9orf64 (NM_032307.2,485-503).
cagatacgtggagtgtatt

SEQ ID NO: 399624 - DNA, 19 bp, Homo sapiens
  siRNA target sequence for C9orf64 (NM_032307.2,537-555).
ctccagtatcaccatgttt

SEQ ID NO: 399625 - DNA, 19 bp, Homo sapiens
  siRNA target sequence for C9orf64 (NM_032307.2,552-570).
gtttgctgattatagatta

SEQ ID NO: 399626 - DNA, 19 bp, Homo sapiens
  siRNA target sequence for C9orf64 (NM_032307.2,705-723).
gctgatccgggattgtctt

SEQ ID NO: 399627 - DNA, 19 bp, Homo sapiens
  siRNA target sequence for C9orf64 (NM_032307.2,744-762).
gggtgaaaaacctaatgga

SEQ ID NO: 399628 - DNA, 19 bp, Homo sapiens
  siRNA target sequence for C9orf64 (NM_032307.2,828-846).
gaaaggaattccgtttcat

SEQ ID NO: 399629 - DNA, 19 bp, Homo sapiens
  siRNA target sequence for C9orf64 (NM_032307.2,838-856).
ccgtttcatcgcatacgtt

SEQ ID NO: 399630 - DNA, 19 bp, Homo sapiens
  siRNA target sequence for C9orf64 (NM_032307.2,844-862).
catcgcatacgttgcatat

SEQ ID NO: 399631 - DNA, 19 bp, Homo sapiens
  siRNA target sequence for C9orf64 (NM_032307.2,847-865).
cgcatacgttgcatatatt

SEQ ID NO: 399632 - DNA, 19 bp, Homo sapiens
  siRNA target sequence for C9orf64 (NM_032307.2,848-866).
gcatacgttgcatatatta

SEQ ID NO: 399633 - DNA, 19 bp, Homo sapiens
  siRNA target sequence for C9orf64 (NM_032307.2,849-867).
catacgttgcatatattat

SEQ ID NO: 399634 - DNA, 19 bp, Homo sapiens
  siRNA target sequence for MGC4189 (NM_032308.1,120-138).
gccgggacaggctcctaaa

SEQ ID NO: 399635 - DNA, 19 bp, Homo sapiens
  siRNA target sequence for MGC4189 (NM_032308.1,122-140).
cgggacaggctcctaaaca

SEQ ID NO: 399636 - DNA, 19 bp, Homo sapiens
  siRNA target sequence for MGC4189 (NM_032308.1,177-195).
ctcagaacagctttctagt

SEQ ID NO: 399637 - DNA, 19 bp, Homo sapiens
  siRNA target sequence for MGC4189 (NM_032308.1,181-199).
gaacagctttctagttcaa

SEQ ID NO: 399638 - DNA, 19 bp, Homo sapiens
  siRNA target sequence for MGC4189 (NM_032308.1,357-375).
gcttgcagtttgatgaaaa

SEQ ID NO: 399639 - DNA, 19 bp, Homo sapiens
  siRNA target sequence for MGC4189 (NM_032308.1,423-441).
gtcctgtatgtacaaatct

SEQ ID NO: 399640 - DNA, 19 bp, Homo sapiens
  siRNA target sequence for MGC4189 (NM_032308.1,426-444).
ctgtatgtacaaatcttct

SEQ ID NO: 399641 - DNA, 19 bp, Homo sapiens
  siRNA target sequence for C2orf9 (NM_032309.2,283-301).
cgggactgtcactacctta

SEQ ID NO: 399642 - DNA, 19 bp, Homo sapiens
  siRNA target sequence for C2orf9 (NM_032309.2,284-302).
gggactgtcactaccttaa

SEQ ID NO: 399643 - DNA, 19 bp, Homo sapiens
  siRNA target sequence for C2orf9 (NM_032309.2,419-437).
gcaactgtgcagagcatat

SEQ ID NO: 399644 - DNA, 19 bp, Homo sapiens
  siRNA target sequence for MGC11115 (NM_032310.2,353-371).
gggactgccaggagttcta

SEQ ID NO: 399645 - DNA, 19 bp, Homo sapiens
  siRNA target sequence for MGC11115 (NM_032310.2,422-440).
gccacgctctgcgtaagtt

SEQ ID NO: 399646 - DNA, 19 bp, Homo sapiens
  siRNA target sequence for MGC11115 (NM_032310.2,696-714).
cacagcatggggcatctta

SEQ ID NO: 399647 - DNA, 19 bp, Homo sapiens
  siRNA target sequence for MGC11115 (NM_032310.2,698-716).
cagcatggggcatcttata

SEQ ID NO: 399648 - DNA, 19 bp, Homo sapiens
  siRNA target sequence for MGC11115 (NM_032310.2,701-719).
catggggcatcttatacgt

SEQ ID NO: 399649 - DNA, 19 bp, Homo sapiens
  siRNA target sequence for MGC11115 (NM_032310.2,752-770).
cacggggatcccttcatgt

SEQ ID NO: 399650 - DNA, 19 bp, Homo sapiens
  siRNA target sequence for MGC11061 (NM_032312.2,259-277).
cagcagacgcggaagatct

SEQ ID NO: 399651 - DNA, 19 bp, Homo sapiens
  siRNA target sequence for MGC11061 (NM_032312.2,315-333).
cttggtggagattttatca

SEQ ID NO: 399652 - DNA, 19 bp, Homo sapiens
  siRNA target sequence for MGC11061 (NM_032312.2,319-337).
gtggagattttatcaaaga

SEQ ID NO: 399653 - DNA, 19 bp, Homo sapiens
  siRNA target sequence for MGC11061 (NM_032312.2,437-455).
ggacattgatctaaaggat

SEQ ID NO: 399654 - DNA, 19 bp, Homo sapiens
  siRNA target sequence for MGC11061 (NM_032312.2,438-456).
gacattgatctaaaggata

SEQ ID NO: 399655 - DNA, 19 bp, Homo sapiens
  siRNA target sequence for MGC11061 (NM_032312.2,444-462).
gatctaaaggatatttact

SEQ ID NO: 399656 - DNA, 19 bp, Homo sapiens
  siRNA target sequence for MGC11061 (NM_032312.2,572-590).
catgatatcattatatgga

SEQ ID NO: 399657 - DNA, 19 bp, Homo sapiens
  siRNA target sequence for MGC11061 (NM_032312.2,598-616).
gggtggtctcatggattat

SEQ ID NO: 399658 - DNA, 19 bp, Homo sapiens
  siRNA target sequence for MGC11061 (NM_032312.2,599-617).
ggtggtctcatggattata

SEQ ID NO: 399659 - DNA, 19 bp, Homo sapiens
  siRNA target sequence for MGC11061 (NM_032312.2,600-618).
gtggtctcatggattataa

SEQ ID NO: 399660 - DNA, 19 bp, Homo sapiens
  siRNA target sequence for MGC11061 (NM_032312.2,603-621).
gtctcatggattataacca

SEQ ID NO: 399661 - DNA, 19 bp, Homo sapiens
  siRNA target sequence for MGC11061 (NM_032312.2,610-628).
ggattataaccatttggat

SEQ ID NO: 399662 - DNA, 19 bp, Homo sapiens
  siRNA target sequence for MGC11061 (NM_032312.2,611-629).
gattataaccatttggata

SEQ ID NO: 399663 - DNA, 19 bp, Homo sapiens
  siRNA target sequence for MGC11061 (NM_032312.2,626-644).
gatatttggttcactaaca

SEQ ID NO: 399664 - DNA, 19 bp, Homo sapiens
  siRNA target sequence for MGC11061 (NM_032312.2,633-651).
ggttcactaacaattttct

SEQ ID NO: 399665 - DNA, 19 bp, Homo sapiens
  siRNA target sequence for MGC11061 (NM_032312.2,650-668).
cttactggccagagttctt

SEQ ID NO: 399666 - DNA, 19 bp, Homo sapiens
  siRNA target sequence for MGC11061 (NM_032312.2,688-706).
gccaagtccttggagttat

SEQ ID NO: 399667 - DNA, 19 bp, Homo sapiens
  siRNA target sequence for MGC11061 (NM_032312.2,693-711).
gtccttggagttataggat

SEQ ID NO: 399668 - DNA, 19 bp, Homo sapiens
  siRNA target sequence for MGC11061 (NM_032312.2,768-786).
gaagtggtgtctacactta

SEQ ID NO: 399669 - DNA, 19 bp, Homo sapiens
  siRNA target sequence for MGC3232 (NM_032313.2,219-237).
gggacgcgagcttccttat

SEQ ID NO: 399670 - DNA, 19 bp, Homo sapiens
  siRNA target sequence for MGC3232 (NM_032313.2,221-239).
gacgcgagcttccttatga

SEQ ID NO: 399671 - DNA, 19 bp, Homo sapiens
  siRNA target sequence for MGC3232 (NM_032313.2,408-426).
gcggcgacagcaaaaccta

SEQ ID NO: 399672 - DNA, 19 bp, Homo sapiens
  siRNA target sequence for MGC3232 (NM_032313.2,1042-1060).
ggagtggaagagttgatct

SEQ ID NO: 399673 - DNA, 19 bp, Homo sapiens
  siRNA target sequence for MGC3232 (NM_032313.2,1086-1104).
ccgtggggacgtctactta

SEQ ID NO: 399674 - DNA, 19 bp, Homo sapiens
  siRNA target sequence for MGC3232 (NM_032313.2,1088-1106).
gtggggacgtctacttagt

SEQ ID NO: 399675 - DNA, 19 bp, Homo sapiens
  siRNA target sequence for MGC3232 (NM_032313.2,1147-1165).
ctcctggagtccgattact

SEQ ID NO: 399676 - DNA, 19 bp, Homo sapiens
  siRNA target sequence for MGC3232 (NM_032313.2,1214-1232).
ggccaggtactacattaaa

SEQ ID NO: 399677 - DNA, 19 bp, Homo sapiens
  siRNA target sequence for MGC3232 (NM_032313.2,1217-1235).
caggtactacattaaacct

SEQ ID NO: 399678 - DNA, 19 bp, Homo sapiens
  siRNA target sequence for MGC3232 (NM_032313.2,1223-1241).
ctacattaaaccttctgaa

SEQ ID NO: 399679 - DNA, 19 bp, Homo sapiens
  siRNA target sequence for MGC3232 (NM_032313.2,1254-1272).
caacccaactccttacaga

SEQ ID NO: 399680 - DNA, 19 bp, Homo sapiens
  siRNA target sequence for MGC3232 (NM_032313.2,1397-1415).
ggacattcttgtattcaga

SEQ ID NO: 399681 - DNA, 19 bp, Homo sapiens
  siRNA target sequence for MGC3232 (NM_032313.2,1443-1461).
gtttgatgctgattcactt

SEQ ID NO: 399682 - DNA, 19 bp, Homo sapiens
  siRNA target sequence for MGC3232 (NM_032313.2,1509-1527).
caaacaagtagaattgact

SEQ ID NO: 399683 - DNA, 19 bp, Homo sapiens
  siRNA target sequence for MGC3232 (NM_032313.2,1524-1542).
gactgcacaagatgtgaaa

SEQ ID NO: 399684 - DNA, 19 bp, Homo sapiens
  siRNA target sequence for MGC3232 (NM_032313.2,1665-1683).
gcttaaaccaggaatggtt

SEQ ID NO: 399685 - DNA, 19 bp, Homo sapiens
  siRNA target sequence for MGC3232 (NM_032313.2,1696-1714).
gctataggccgcatagatt

SEQ ID NO: 399686 - DNA, 19 bp, Homo sapiens
  siRNA target sequence for MGC3232 (NM_032313.2,1697-1715).
ctataggccgcatagattt

SEQ ID NO: 399687 - DNA, 19 bp, Homo sapiens
  siRNA target sequence for MGC3232 (NM_032313.2,1793-1811).
gggcagacgctctgtatca

SEQ ID NO: 399688 - DNA, 19 bp, Homo sapiens
  siRNA target sequence for MGC3232 (NM_032313.2,1829-1847).
cgttactccagattccaat

SEQ ID NO: 399689 - DNA, 19 bp, Homo sapiens
  siRNA target sequence for MGC3232 (NM_032313.2,1933-1951).
gtggccgacatcaagtttt

SEQ ID NO: 399690 - DNA, 19 bp, Homo sapiens
  siRNA target sequence for MGC3232 (NM_032313.2,1965-1983).
ggtttcagtaacacctaat

SEQ ID NO: 399691 - DNA, 19 bp, Homo sapiens
  siRNA target sequence for MGC3232 (NM_032313.2,1966-1984).
gtttcagtaacacctaatt

SEQ ID NO: 399692 - DNA, 19 bp, Homo sapiens
  siRNA target sequence for MGC3232 (NM_032313.2,1998-2016).
gcatctccgaggctataca

SEQ ID NO: 399693 - DNA, 19 bp, Homo sapiens
  siRNA target sequence for MGC3232 (NM_032313.2,2045-2063).
cccctctcttgccatatat

SEQ ID NO: 399694 - DNA, 19 bp, Homo sapiens
  siRNA target sequence for MGC3232 (NM_032313.2,2046-2064).
ccctctcttgccatatatt

SEQ ID NO: 399695 - DNA, 19 bp, Homo sapiens
  siRNA target sequence for MGC3232 (NM_032313.2,2056-2074).
ccatatattgttaacatca

SEQ ID NO: 399696 - DNA, 19 bp, Homo sapiens
  siRNA target sequence for MGC3232 (NM_032313.2,2120-2138).
ctccttcccttatgtacaa

SEQ ID NO: 399697 - DNA, 19 bp, Homo sapiens
  siRNA target sequence for NICN1 (NM_032316.2,185-203).
caggaaatcacgtttaaga

SEQ ID NO: 399698 - DNA, 19 bp, Homo sapiens
  siRNA target sequence for NICN1 (NM_032316.2,322-340).
gggagcccaggagtatgta

SEQ ID NO: 399699 - DNA, 19 bp, Homo sapiens
  siRNA target sequence for NICN1 (NM_032316.2,323-341).
ggagcccaggagtatgtat

SEQ ID NO: 399700 - DNA, 19 bp, Homo sapiens
  siRNA target sequence for NICN1 (NM_032316.2,342-360).
cgctgttcaagcatcagat

SEQ ID NO: 399701 - DNA, 19 bp, Homo sapiens
  siRNA target sequence for NICN1 (NM_032316.2,384-402).
cggagctacgcctgattct

SEQ ID NO: 399702 - DNA, 19 bp, Homo sapiens
  siRNA target sequence for NICN1 (NM_032316.2,657-675).
gctgttatgacctgaactt

SEQ ID NO: 399703 - DNA, 19 bp, Homo sapiens
  siRNA target sequence for MGC13057 (NM_032321.1,368-386).
cccatttcctaccatatat

SEQ ID NO: 399704 - DNA, 19 bp, Homo sapiens
  siRNA target sequence for MGC13057 (NM_032321.1,449-467).
gatggcttctccagttaat

SEQ ID NO: 399705 - DNA, 19 bp, Homo sapiens
  siRNA target sequence for MGC13057 (NM_032321.1,457-475).
ctccagttaatgtcaaaga

SEQ ID NO: 399706 - DNA, 19 bp, Homo sapiens
  siRNA target sequence for MGC13057 (NM_032321.1,486-504).
gaacctccagggaccaata

SEQ ID NO: 399707 - DNA, 19 bp, Homo sapiens
  siRNA target sequence for MGC13057 (NM_032321.1,531-549).
ctgtctcaggatatcttgt

SEQ ID NO: 399708 - DNA, 19 bp, Homo sapiens
  siRNA target sequence for MGC13057 (NM_032321.1,560-578).
gcagcaatgggcatgcaat

SEQ ID NO: 399709 - DNA, 19 bp, Homo sapiens
  siRNA target sequence for MGC13057 (NM_032321.1,561-579).
cagcaatgggcatgcaata

SEQ ID NO: 399710 - DNA, 19 bp, Homo sapiens
  siRNA target sequence for MGC13057 (NM_032321.1,564-582).
caatgggcatgcaataaca

SEQ ID NO: 399711 - DNA, 19 bp, Homo sapiens
  siRNA target sequence for MGC13057 (NM_032321.1,568-586).
gggcatgcaataacatcaa

SEQ ID NO: 399712 - DNA, 19 bp, Homo sapiens
  siRNA target sequence for MGC13057 (NM_032321.1,570-588).
gcatgcaataacatcaagt

SEQ ID NO: 399713 - DNA, 19 bp, Homo sapiens
  siRNA target sequence for MGC13057 (NM_032321.1,571-589).
catgcaataacatcaagta

SEQ ID NO: 399714 - DNA, 19 bp, Homo sapiens
  siRNA target sequence for MGC13057 (NM_032321.1,581-599).
catcaagtaccatgacatt

SEQ ID NO: 399715 - DNA, 19 bp, Homo sapiens
  siRNA target sequence for RNF135 (NM_032322.3,601-619).
gaggcccctatcagaatct

SEQ ID NO: 399716 - DNA, 19 bp, Homo sapiens
  siRNA target sequence for RNF135 (NM_032322.3,914-932).
catccaacctttaacttga

SEQ ID NO: 399717 - DNA, 19 bp, Homo sapiens
  siRNA target sequence for RNF135 (NM_032322.3,1081-1099).
ggaagtggacactaggaat

SEQ ID NO: 399718 - DNA, 19 bp, Homo sapiens
  siRNA target sequence for RNF135 (NM_032322.3,1082-1100).
gaagtggacactaggaatt

SEQ ID NO: 399719 - DNA, 19 bp, Homo sapiens
  siRNA target sequence for RNF135 (NM_032322.3,1085-1103).
gtggacactaggaattgca

SEQ ID NO: 399720 - DNA, 19 bp, Homo sapiens
  siRNA target sequence for RNF135 (NM_032322.3,1162-1180).
gactatggactcttgttgt

SEQ ID NO: 399721 - DNA, 19 bp, Homo sapiens
  siRNA target sequence for RNF135 (NM_032322.3,1288-1306).
gggaaagcttgccttctat

SEQ ID NO: 399722 - DNA, 19 bp, Homo sapiens
  siRNA target sequence for RNF135 (NM_032322.3,1322-1340).
gagaagcttctgtatgagt

SEQ ID NO: 399723 - DNA, 19 bp, Homo sapiens
  siRNA target sequence for RNF135 (NM_032322.3,1378-1396).
ctggctgtatggcttacat

SEQ ID NO: 399724 - DNA, 19 bp, Homo sapiens
  siRNA target sequence for RNF135 (NM_032322.3,1400-1418).
ggaaattacctgataataa

SEQ ID NO: 399725 - DNA, 19 bp, Homo sapiens
  siRNA target sequence for MGC13102 (NM_032323.1,354-372).
ggtctagacagcacagtaa

SEQ ID NO: 399726 - DNA, 19 bp, Homo sapiens
  siRNA target sequence for MGC13102 (NM_032323.1,541-559).
gtgccttcgtgcctattga

SEQ ID NO: 399727 - DNA, 19 bp, Homo sapiens
  siRNA target sequence for MGC13102 (NM_032323.1,583-601).
cccaagaagaccttatcgt

SEQ ID NO: 399728 - DNA, 19 bp, Homo sapiens
  siRNA target sequence for MGC13102 (NM_032323.1,770-788).
cgtgggagccgcactcatt

SEQ ID NO: 399729 - DNA, 19 bp, Homo sapiens
  siRNA target sequence for MGC13102 (NM_032323.1,774-792).
ggagccgcactcattctct

SEQ ID NO: 399730 - DNA, 19 bp, Homo sapiens
  siRNA target sequence for MGC13102 (NM_032323.1,775-793).
gagccgcactcattctctt

SEQ ID NO: 399731 - DNA, 19 bp, Homo sapiens
  siRNA target sequence for MGC13102 (NM_032323.1,820-838).
ccttcctgccgtttgatgt

SEQ ID NO: 399732 - DNA, 19 bp, Homo sapiens
  siRNA target sequence for MGC13102 (NM_032323.1,933-951).
gggctgagcctgttatgct

SEQ ID NO: 399733 - DNA, 19 bp, Homo sapiens
  siRNA target sequence for MGC13102 (NM_032323.1,935-953).
gctgagcctgttatgcttt

SEQ ID NO: 399734 - DNA, 19 bp, Homo sapiens
  siRNA target sequence for MGC13102 (NM_032323.1,938-956).
gagcctgttatgcttttct

SEQ ID NO: 399735 - DNA, 19 bp, Homo sapiens
  siRNA target sequence for MGC13102 (NM_032323.1,1017-1035).
cagtcggtccagctcttta

SEQ ID NO: 399736 - DNA, 19 bp, Homo sapiens
  siRNA target sequence for MGC13102 (NM_032323.1,1019-1037).
gtcggtccagctctttatt

SEQ ID NO: 399737 - DNA, 19 bp, Homo sapiens
  siRNA target sequence for MGC13102 (NM_032323.1,1021-1039).
cggtccagctctttattct

SEQ ID NO: 399738 - DNA, 19 bp, Homo sapiens
  siRNA target sequence for MGC13102 (NM_032323.1,1123-1141).
ccgtctcccggctgatcta

SEQ ID NO: 399739 - DNA, 19 bp, Homo sapiens
  siRNA target sequence for MGC13102 (NM_032323.1,1225-1243).
ggaacctctactacatgtt

SEQ ID NO: 399740 - DNA, 19 bp, Homo sapiens
  siRNA target sequence for MGC4618 (NM_032326.2,290-308).
gcagttcgacagaagtgta

SEQ ID NO: 399741 - DNA, 19 bp, Homo sapiens
  siRNA target sequence for MGC4618 (NM_032326.2,467-485).
gccttacacgttttcgtta

SEQ ID NO: 399742 - DNA, 19 bp, Homo sapiens
  siRNA target sequence for MGC4618 (NM_032326.2,468-486).
ccttacacgttttcgttaa

SEQ ID NO: 399743 - DNA, 19 bp, Homo sapiens
  siRNA target sequence for MGC4618 (NM_032326.2,469-487).
cttacacgttttcgttaat

SEQ ID NO: 399744 - DNA, 19 bp, Homo sapiens
  siRNA target sequence for MGC4618 (NM_032326.2,551-569).
ggtcgtgcaggcactgatt

SEQ ID NO: 399745 - DNA, 19 bp, Homo sapiens
  siRNA target sequence for MGC4618 (NM_032326.2,1339-1357).
gggagcatgtgctcatgtt

SEQ ID NO: 399746 - DNA, 19 bp, Homo sapiens
  siRNA target sequence for ZDHHC16 (NM_032327.2,354-372).
cagtgacaccgctgttgat

SEQ ID NO: 399747 - DNA, 19 bp, Homo sapiens
  siRNA target sequence for ZDHHC16 (NM_032327.2,453-471).
gctgacaggctccattgta

SEQ ID NO: 399748 - DNA, 19 bp, Homo sapiens
  siRNA target sequence for ZDHHC16 (NM_032327.2,620-638).
cccagggcaggaatgatat

SEQ ID NO: 399749 - DNA, 19 bp, Homo sapiens
  siRNA target sequence for ZDHHC16 (NM_032327.2,640-658).
gccaccgtctccatctgta

SEQ ID NO: 399750 - DNA, 19 bp, Homo sapiens
  siRNA target sequence for ZDHHC16 (NM_032327.2,644-662).
ccgtctccatctgtaagaa

SEQ ID NO: 399751 - DNA, 19 bp, Homo sapiens
  siRNA target sequence for ZDHHC16 (NM_032327.2,741-759).
cccctggctaaacaattgt

SEQ ID NO: 399752 - DNA, 19 bp, Homo sapiens
  siRNA target sequence for ZDHHC16 (NM_032327.2,743-761).
cctggctaaacaattgtgt

SEQ ID NO: 399753 - DNA, 19 bp, Homo sapiens
  siRNA target sequence for ZDHHC16 (NM_032327.2,775-793).
catcggtacttcttctctt

SEQ ID NO: 399754 - DNA, 19 bp, Homo sapiens
  siRNA target sequence for ZDHHC16 (NM_032327.2,888-906).
gctcgacaagaacaaacta

SEQ ID NO: 399755 - DNA, 19 bp, Homo sapiens
  siRNA target sequence for ZDHHC16 (NM_032327.2,911-929).
cggttgccaaccagactta

SEQ ID NO: 399756 - DNA, 19 bp, Homo sapiens
  siRNA target sequence for ZDHHC16 (NM_032327.2,912-930).
ggttgccaaccagacttat

SEQ ID NO: 399757 - DNA, 19 bp, Homo sapiens
  siRNA target sequence for ZDHHC16 (NM_032327.2,974-992).
ctcacaagagtcttgtcta

SEQ ID NO: 399758 - DNA, 19 bp, Homo sapiens
  siRNA target sequence for ZDHHC16 (NM_032327.2,1026-1044).
cctgggtgccctaactgta

SEQ ID NO: 399759 - DNA, 19 bp, Homo sapiens
  siRNA target sequence for ZDHHC16 (NM_032327.2,1027-1045).
ctgggtgccctaactgtat

SEQ ID NO: 399760 - DNA, 19 bp, Homo sapiens
  siRNA target sequence for ZDHHC16 (NM_032327.2,1069-1087).
ggtgagactagcatcgaaa

SEQ ID NO: 399761 - DNA, 19 bp, Homo sapiens
  siRNA target sequence for ZDHHC16 (NM_032327.2,1079-1097).
gcatcgaaaggcacatcaa

SEQ ID NO: 399762 - DNA, 19 bp, Homo sapiens
  siRNA target sequence for ZDHHC16 (NM_032327.2,1120-1138).
caggccaagggcagagtat

SEQ ID NO: 399763 - DNA, 19 bp, Homo sapiens
  siRNA target sequence for ZDHHC16 (NM_032327.2,1122-1140).
ggccaagggcagagtattt

SEQ ID NO: 399764 - DNA, 19 bp, Homo sapiens
  siRNA target sequence for ZDHHC16 (NM_032327.2,1128-1146).
gggcagagtatttaggaat

SEQ ID NO: 399765 - DNA, 19 bp, Homo sapiens
  siRNA target sequence for MGC4238 (NM_032332.2,103-121).
gtgcgagccgtacgattta

SEQ ID NO: 399766 - DNA, 19 bp, Homo sapiens
  siRNA target sequence for MGC4238 (NM_032332.2,105-123).
gcgagccgtacgatttaat

SEQ ID NO: 399767 - DNA, 19 bp, Homo sapiens
  siRNA target sequence for MGC4238 (NM_032332.2,107-125).
gagccgtacgatttaatgt

SEQ ID NO: 399768 - DNA, 19 bp, Homo sapiens
  siRNA target sequence for MGC4238 (NM_032332.2,317-335).
ggcaggtcgtgcgcaaatt

SEQ ID NO: 399769 - DNA, 19 bp, Homo sapiens
  siRNA target sequence for MGC4238 (NM_032332.2,357-375).
gaacacggtgcagtttaat

SEQ ID NO: 399770 - DNA, 19 bp, Homo sapiens
  siRNA target sequence for MGC4238 (NM_032332.2,360-378).
cacggtgcagtttaatgaa

SEQ ID NO: 399771 - DNA, 19 bp, Homo sapiens
  siRNA target sequence for MGC4238 (NM_032332.2,362-380).
cggtgcagtttaatgaaga

SEQ ID NO: 399772 - DNA, 19 bp, Homo sapiens
  siRNA target sequence for MGC4238 (NM_032332.2,393-411).
cctgtccggctctattgat

SEQ ID NO: 399773 - DNA, 19 bp, Homo sapiens
  siRNA target sequence for MGC4238 (NM_032332.2,548-566).
gacgctatgacctaaggat

SEQ ID NO: 399774 - DNA, 19 bp, Homo sapiens
  siRNA target sequence for MGC4238 (NM_032332.2,713-731).
gccataagaaccaggaata

SEQ ID NO: 399775 - DNA, 19 bp, Homo sapiens
  siRNA target sequence for MGC4248 (NM_032333.2,461-479).
ctgaagtgaaggatttcca

SEQ ID NO: 399776 - DNA, 19 bp, Homo sapiens
  siRNA target sequence for MGC4248 (NM_032333.2,571-589).
ctgggagtgtggtacaact

SEQ ID NO: 399777 - DNA, 19 bp, Homo sapiens
  siRNA target sequence for MGC4248 (NM_032333.2,718-736).
gacaaagtaaacctacttt

SEQ ID NO: 399778 - DNA, 19 bp, Homo sapiens
  siRNA target sequence for MGC14595 (NM_032334.1,142-160).
gcttcttccgcaacaactt

SEQ ID NO: 399779 - DNA, 19 bp, Homo sapiens
  siRNA target sequence for MGC14595 (NM_032334.1,273-291).
cagctgtgcaccacaagat

SEQ ID NO: 399780 - DNA, 19 bp, Homo sapiens
  siRNA target sequence for MGC14595 (NM_032334.1,275-293).
gctgtgcaccacaagatgt

SEQ ID NO: 399781 - DNA, 19 bp, Homo sapiens
  siRNA target sequence for MGC14595 (NM_032334.1,501-519).
ggagttcctctcatgttta

SEQ ID NO: 399782 - DNA, 19 bp, Homo sapiens
  siRNA target sequence for MGC14595 (NM_032334.1,645-663).
cagggtttagtgaaaaaca

SEQ ID NO: 399783 - DNA, 19 bp, Homo sapiens
  siRNA target sequence for MGC14595 (NM_032334.1,647-665).
gggtttagtgaaaaacact

SEQ ID NO: 399784 - DNA, 19 bp, Homo sapiens
  siRNA target sequence for MGC14595 (NM_032334.1,705-723).
cccaatcctcttagttgtt

SEQ ID NO: 399785 - DNA, 19 bp, Homo sapiens
  siRNA target sequence for MGC14595 (NM_032334.1,706-724).
ccaatcctcttagttgttt

SEQ ID NO: 399786 - DNA, 19 bp, Homo sapiens
  siRNA target sequence for MGC14595 (NM_032334.1,790-808).
gaattcggaacagatctaa

SEQ ID NO: 399787 - DNA, 19 bp, Homo sapiens
  siRNA target sequence for MGC14595 (NM_032334.1,802-820).
gatctaacccaaaagtact

SEQ ID NO: 399788 - DNA, 19 bp, Homo sapiens
  siRNA target sequence for MGC14799 (NM_032336.1,256-274).
cctgcagagctcattgaaa

SEQ ID NO: 399789 - DNA, 19 bp, Homo sapiens
  siRNA target sequence for MGC14799 (NM_032336.1,279-297).
ggagcaggcctggatgaat

SEQ ID NO: 399790 - DNA, 19 bp, Homo sapiens
  siRNA target sequence for MGC14799 (NM_032336.1,283-301).
caggcctggatgaatgaaa

SEQ ID NO: 399791 - DNA, 19 bp, Homo sapiens
  siRNA target sequence for MGC14799 (NM_032336.1,330-348).
gcctgagattgtagaatgt

SEQ ID NO: 399792 - DNA, 19 bp, Homo sapiens
  siRNA target sequence for MGC14799 (NM_032336.1,473-491).
gtcgcctcatgaagataga

SEQ ID NO: 399793 - DNA, 19 bp, Homo sapiens
  siRNA target sequence for MGC14799 (NM_032336.1,476-494).
gcctcatgaagatagagaa

SEQ ID NO: 399794 - DNA, 19 bp, Homo sapiens
  siRNA target sequence for MGC14799 (NM_032336.1,551-569).
gcctctcgccggaagagtt

SEQ ID NO: 399795 - DNA, 19 bp, Homo sapiens
  siRNA target sequence for MGC14799 (NM_032336.1,572-590).
cctttgccagagagttcat

SEQ ID NO: 399796 - DNA, 19 bp, Homo sapiens
  siRNA target sequence for MGC14799 (NM_032336.1,630-648).
gcacatgccccctaactta

SEQ ID NO: 399797 - DNA, 19 bp, Homo sapiens
  siRNA target sequence for MGC14799 (NM_032336.1,678-696).
caaaccagatctagattct

SEQ ID NO: 399798 - DNA, 19 bp, Homo sapiens
  siRNA target sequence for MGC14799 (NM_032336.1,691-709).
gattcttacgtgtttctga

SEQ ID NO: 399799 - DNA, 19 bp, Homo sapiens
  siRNA target sequence for MGC14799 (NM_032336.1,798-816).
gcacttgatccgatacaaa

SEQ ID NO: 399800 - DNA, 19 bp, Homo sapiens
  siRNA target sequence for MGC14799 (NM_032336.1,799-817).
cacttgatccgatacaaaa

SEQ ID NO: 399801 - DNA, 19 bp, Homo sapiens
  siRNA target sequence for MGC14799 (NM_032336.1,839-857).
ctggagctgtccagctaat

SEQ ID NO: 399802 - DNA, 19 bp, Homo sapiens
  siRNA target sequence for MGC14817 (NM_032338.2,128-146).
ggaggccagcaggcttaaa

SEQ ID NO: 399803 - DNA, 19 bp, Homo sapiens
  siRNA target sequence for MGC14817 (NM_032338.2,131-149).
ggccagcaggcttaaaagt

SEQ ID NO: 399804 - DNA, 19 bp, Homo sapiens
  siRNA target sequence for MGC14817 (NM_032338.2,159-177).
ctagacggtgatgttttaa

SEQ ID NO: 399805 - DNA, 19 bp, Homo sapiens
  siRNA target sequence for MGC14817 (NM_032338.2,162-180).
gacggtgatgttttaatga

SEQ ID NO: 399806 - DNA, 19 bp, Homo sapiens
  siRNA target sequence for MGC14817 (NM_032338.2,209-227).
ggtacccaaacccaaacat

SEQ ID NO: 399807 - DNA, 19 bp, Homo sapiens
  siRNA target sequence for MGC14817 (NM_032338.2,242-260).
gcaatgtgaggtaaaagat

SEQ ID NO: 399808 - DNA, 19 bp, Homo sapiens
  siRNA target sequence for MGC14817 (NM_032338.2,324-342).
catggacagtacccaatat

SEQ ID NO: 399809 - DNA, 19 bp, Homo sapiens
  siRNA target sequence for MGC14817 (NM_032338.2,328-346).
gacagtacccaatatggat

SEQ ID NO: 399810 - DNA, 19 bp, Homo sapiens
  siRNA target sequence for MGC14832 (NM_032339.2,533-551).
gggggctttccctatgaga

SEQ ID NO: 399811 - DNA, 19 bp, Homo sapiens
  siRNA target sequence for MGC14832 (NM_032339.2,537-555).
gctttccctatgagaaaga

SEQ ID NO: 399812 - DNA, 19 bp, Homo sapiens
  siRNA target sequence for MGC14832 (NM_032339.2,568-586).
catccgaagagccagtaat

SEQ ID NO: 399813 - DNA, 19 bp, Homo sapiens
  siRNA target sequence for MGC14832 (NM_032339.2,571-589).
ccgaagagccagtaatgga

SEQ ID NO: 399814 - DNA, 19 bp, Homo sapiens
  siRNA target sequence for C6orf125 (NM_032340.1,52-70).
gccggtaccggcgttttct

SEQ ID NO: 399815 - DNA, 19 bp, Homo sapiens
  siRNA target sequence for C6orf125 (NM_032340.1,53-71).
ccggtaccggcgttttctt

SEQ ID NO: 399816 - DNA, 19 bp, Homo sapiens
  siRNA target sequence for C6orf125 (NM_032340.1,54-72).
cggtaccggcgttttctta

SEQ ID NO: 399817 - DNA, 19 bp, Homo sapiens
  siRNA target sequence for C6orf125 (NM_032340.1,55-73).
ggtaccggcgttttcttaa

SEQ ID NO: 399818 - DNA, 19 bp, Homo sapiens
  siRNA target sequence for C6orf125 (NM_032340.1,155-173).
ctttcgggagggagagaat

SEQ ID NO: 399819 - DNA, 19 bp, Homo sapiens
  siRNA target sequence for C6orf125 (NM_032340.1,222-240).
gcgcgactccattcaaact

SEQ ID NO: 399820 - DNA, 19 bp, Homo sapiens
  siRNA target sequence for C6orf125 (NM_032340.1,223-241).
cgcgactccattcaaacta

SEQ ID NO: 399821 - DNA, 19 bp, Homo sapiens
  siRNA target sequence for C6orf125 (NM_032340.1,225-243).
cgactccattcaaactact

SEQ ID NO: 399822 - DNA, 19 bp, Homo sapiens
  siRNA target sequence for C6orf125 (NM_032340.1,226-244).
gactccattcaaactacta

SEQ ID NO: 399823 - DNA, 19 bp, Homo sapiens
  siRNA target sequence for C6orf125 (NM_032340.1,286-304).
gcctgtcgttggaagagta

SEQ ID NO: 399824 - DNA, 19 bp, Homo sapiens
  siRNA target sequence for MGC12992 (NM_032342.1,445-463).
ggcctgtcaccgacttcta

SEQ ID NO: 399825 - DNA, 19 bp, Homo sapiens
  siRNA target sequence for MGC12992 (NM_032342.1,455-473).
cgacttctacactcttact

SEQ ID NO: 399826 - DNA, 19 bp, Homo sapiens
  siRNA target sequence for MGC12992 (NM_032342.1,458-476).
cttctacactcttacttct

SEQ ID NO: 399827 - DNA, 19 bp, Homo sapiens
  siRNA target sequence for MGC12992 (NM_032342.1,542-560).
gaggctgccctccactatt

SEQ ID NO: 399828 - DNA, 19 bp, Homo sapiens
  siRNA target sequence for MGC12992 (NM_032342.1,544-562).
ggctgccctccactatttt

SEQ ID NO: 399829 - DNA, 19 bp, Homo sapiens
  siRNA target sequence for MGC12992 (NM_032342.1,546-564).
ctgccctccactattttga

SEQ ID NO: 399830 - DNA, 19 bp, Homo sapiens
  siRNA target sequence for MGC12992 (NM_032342.1,765-783).
gtagtgtgagccattttga

SEQ ID NO: 399831 - DNA, 19 bp, Homo sapiens
  siRNA target sequence for MGC12992 (NM_032342.1,787-805).
caagttgctctccaagtat

SEQ ID NO: 399832 - DNA, 19 bp, Homo sapiens
  siRNA target sequence for MGC12992 (NM_032342.1,861-879).
cgaccaactcgtttgagaa

SEQ ID NO: 399833 - DNA, 19 bp, Homo sapiens
  siRNA target sequence for MGC12992 (NM_032342.1,883-901).
gaagcaggactatgtctat

SEQ ID NO: 399834 - DNA, 19 bp, Homo sapiens
  siRNA target sequence for MGC12992 (NM_032342.1,1071-1089).
ggctccagcactacatcaa

SEQ ID NO: 399835 - DNA, 19 bp, Homo sapiens
  siRNA target sequence for MGC12992 (NM_032342.1,1142-1160).
cccttactaacctggatat

SEQ ID NO: 399836 - DNA, 19 bp, Homo sapiens
  siRNA target sequence for MGC12992 (NM_032342.1,1241-1259).
ctggtgggtcggcactatt

SEQ ID NO: 399837 - DNA, 19 bp, Homo sapiens
  siRNA target sequence for MGC12992 (NM_032342.1,1441-1459).
gggagagagggcctatgta

SEQ ID NO: 399838 - DNA, 19 bp, Homo sapiens
  siRNA target sequence for MGC12992 (NM_032342.1,1466-1484).
ccgaacctcgtgaaacaca

SEQ ID NO: 399839 - DNA, 19 bp, Homo sapiens
  siRNA target sequence for MGC12992 (NM_032342.1,1467-1485).
cgaacctcgtgaaacacat

SEQ ID NO: 399840 - DNA, 19 bp, Homo sapiens
  siRNA target sequence for MGC12992 (NM_032342.1,1498-1516).
cagtctccggtacaacttt

SEQ ID NO: 399841 - DNA, 19 bp, Homo sapiens
  siRNA target sequence for MGC12992 (NM_032342.1,1500-1518).
gtctccggtacaactttca

SEQ ID NO: 399842 - DNA, 19 bp, Homo sapiens
  siRNA target sequence for MGC13016 (NM_032343.1,190-208).
ctacctttggccttcaaga

SEQ ID NO: 399843 - DNA, 19 bp, Homo sapiens
  siRNA target sequence for MGC13016 (NM_032343.1,295-313).
gtgtcaagaggtatgaaca

SEQ ID NO: 399844 - DNA, 19 bp, Homo sapiens
  siRNA target sequence for MGC13016 (NM_032343.1,322-340).
ctgctatccaggataagct

SEQ ID NO: 399845 - DNA, 19 bp, Homo sapiens
  siRNA target sequence for MGC13016 (NM_032343.1,486-504).
cgccgtgacaccttctaca

SEQ ID NO: 399846 - DNA, 19 bp, Homo sapiens
  siRNA target sequence for MGC13016 (NM_032343.1,537-555).
gctgagatgtataaactgt

SEQ ID NO: 399847 - DNA, 19 bp, Homo sapiens
  siRNA target sequence for MGC13045 (NM_032344.1,687-705).
ggtggtacatgaactcttt

SEQ ID NO: 399848 - DNA, 19 bp, Homo sapiens
  siRNA target sequence for MGC13045 (NM_032344.1,688-706).
gtggtacatgaactctttt

SEQ ID NO: 399849 - DNA, 19 bp, Homo sapiens
  siRNA target sequence for MGC13045 (NM_032344.1,809-827).
gagccagtgccgagttcta

SEQ ID NO: 399850 - DNA, 19 bp, Homo sapiens
  siRNA target sequence for MGC13045 (NM_032344.1,895-913).
gagtctacaggaatcttct

SEQ ID NO: 399851 - DNA, 19 bp, Homo sapiens
  siRNA target sequence for MGC13045 (NM_032344.1,899-917).
ctacaggaatcttctttgt

SEQ ID NO: 399852 - DNA, 19 bp, Homo sapiens
  siRNA target sequence for PYM (NM_032345.1,181-199).
cggagacaggcaagtatat

SEQ ID NO: 399853 - DNA, 19 bp, Homo sapiens
  siRNA target sequence for PYM (NM_032345.1,236-254).
gcagcggagggtgaaagaa

SEQ ID NO: 399854 - DNA, 19 bp, Homo sapiens
  siRNA target sequence for PYM (NM_032345.1,269-287).
ggaggaggtcccagtatat

SEQ ID NO: 399855 - DNA, 19 bp, Homo sapiens
  siRNA target sequence for PYM (NM_032345.1,272-290).
ggaggtcccagtatatgaa

SEQ ID NO: 399856 - DNA, 19 bp, Homo sapiens
  siRNA target sequence for PYM (NM_032345.1,273-291).
gaggtcccagtatatgaaa

SEQ ID NO: 399857 - DNA, 19 bp, Homo sapiens
  siRNA target sequence for PYM (NM_032345.1,481-499).
gcaggactcttgataaggt

SEQ ID NO: 399858 - DNA, 19 bp, Homo sapiens
  siRNA target sequence for PYM (NM_032345.1,718-736).
ggaggagggcgctagaaga

SEQ ID NO: 399859 - DNA, 19 bp, Homo sapiens
  siRNA target sequence for PYM (NM_032345.1,727-745).
cgctagaagaggagttaga

SEQ ID NO: 399860 - DNA, 19 bp, Homo sapiens
  siRNA target sequence for MGC3047 (NM_032348.2,45-63).
cccgaatcctgctttggaa

SEQ ID NO: 399861 - DNA, 19 bp, Homo sapiens
  siRNA target sequence for MGC3047 (NM_032348.2,290-308).
cgcctgctggacttgtact

SEQ ID NO: 399862 - DNA, 19 bp, Homo sapiens
  siRNA target sequence for MGC3047 (NM_032348.2,1153-1171).
ccagaagtcgggaaagtca

SEQ ID NO: 399863 - DNA, 19 bp, Homo sapiens
  siRNA target sequence for MGC3047 (NM_032348.2,1238-1256).
gaggacatccagctagatt

SEQ ID NO: 399864 - DNA, 19 bp, Homo sapiens
  siRNA target sequence for MGC3047 (NM_032348.2,1241-1259).
gacatccagctagattaca

SEQ ID NO: 399865 - DNA, 19 bp, Homo sapiens
  siRNA target sequence for MGC3047 (NM_032348.2,1243-1261).
catccagctagattacaaa

SEQ ID NO: 399866 - DNA, 19 bp, Homo sapiens
  siRNA target sequence for MGC3047 (NM_032348.2,1315-1333).
gtacatcgacctagacaaa

SEQ ID NO: 399867 - DNA, 19 bp, Homo sapiens
  siRNA target sequence for MGC3047 (NM_032348.2,1340-1358).
cggaaggagaactgcaaat

SEQ ID NO: 399868 - DNA, 19 bp, Homo sapiens
  siRNA target sequence for SDOS (NM_032349.2,539-557).
ccctcaaggtgctcaacat

SEQ ID NO: 399869 - DNA, 19 bp, Homo sapiens
  siRNA target sequence for SDOS (NM_032349.2,541-559).
ctcaaggtgctcaacatga

SEQ ID NO: 399870 - DNA, 19 bp, Homo sapiens
  siRNA target sequence for MGC11257 (NM_032350.3,1220-1238).
gcagatgggcccaaaagca

SEQ ID NO: 399871 - DNA, 19 bp, Homo sapiens
  siRNA target sequence for MRPL45 (NM_032351.3,454-472).
caaaggagggactgataga

SEQ ID NO: 399872 - DNA, 19 bp, Homo sapiens
  siRNA target sequence for MRPL45 (NM_032351.3,599-617).
cctttgtctaaataactca

SEQ ID NO: 399873 - DNA, 19 bp, Homo sapiens
  siRNA target sequence for MRPL45 (NM_032351.3,627-645).
cgacttcataccttggtaa

SEQ ID NO: 399874 - DNA, 19 bp, Homo sapiens
  siRNA target sequence for MRPL45 (NM_032351.3,722-740).
gccctctcatgttgttcaa

SEQ ID NO: 399875 - DNA, 19 bp, Homo sapiens
  siRNA target sequence for MRPL45 (NM_032351.3,724-742).
cctctcatgttgttcaagt

SEQ ID NO: 399876 - DNA, 19 bp, Homo sapiens
  siRNA target sequence for MRPL45 (NM_032351.3,725-743).
ctctcatgttgttcaagtt

SEQ ID NO: 399877 - DNA, 19 bp, Homo sapiens
  siRNA target sequence for MRPL45 (NM_032351.3,741-759).
gttcgctgttcaagtatga

SEQ ID NO: 399878 - DNA, 19 bp, Homo sapiens
  siRNA target sequence for MRPL45 (NM_032351.3,744-762).
cgctgttcaagtatgatga

SEQ ID NO: 399879 - DNA, 19 bp, Homo sapiens
  siRNA target sequence for MRPL45 (NM_032351.3,745-763).
gctgttcaagtatgatgaa

SEQ ID NO: 399880 - DNA, 19 bp, Homo sapiens
  siRNA target sequence for MRPL45 (NM_032351.3,831-849).
cggtttggccggttgatgt

SEQ ID NO: 399881 - DNA, 19 bp, Homo sapiens
  siRNA target sequence for MRPL45 (NM_032351.3,832-850).
ggtttggccggttgatgta

SEQ ID NO: 399882 - DNA, 19 bp, Homo sapiens
  siRNA target sequence for MRPL45 (NM_032351.3,833-851).
gtttggccggttgatgtat

SEQ ID NO: 399883 - DNA, 19 bp, Homo sapiens
  siRNA target sequence for MRPL45 (NM_032351.3,881-899).
ggagtatgttgtattcgaa

SEQ ID NO: 399884 - DNA, 19 bp, Homo sapiens
  siRNA target sequence for MRPL45 (NM_032351.3,882-900).
gagtatgttgtattcgaaa

SEQ ID NO: 399885 - DNA, 19 bp, Homo sapiens
  siRNA target sequence for MRPL45 (NM_032351.3,921-939).
ggaagctggagaatgcata

SEQ ID NO: 399886 - DNA, 19 bp, Homo sapiens
  siRNA target sequence for MRPL45 (NM_032351.3,925-943).
gctggagaatgcataccaa

SEQ ID NO: 399887 - DNA, 19 bp, Homo sapiens
  siRNA target sequence for BRMS1L (NM_032352.2,116-134).
cattcccgaggggataaga

SEQ ID NO: 399888 - DNA, 19 bp, Homo sapiens
  siRNA target sequence for BRMS1L (NM_032352.2,141-159).
ccaaccatcacgatgagat

SEQ ID NO: 399889 - DNA, 19 bp, Homo sapiens
  siRNA target sequence for BRMS1L (NM_032352.2,292-310).
ggatgaaatgtccaatctt

SEQ ID NO: 399890 - DNA, 19 bp, Homo sapiens
  siRNA target sequence for BRMS1L (NM_032352.2,319-337).
gtttaccgatctcaaagat

SEQ ID NO: 399891 - DNA, 19 bp, Homo sapiens
  siRNA target sequence for BRMS1L (NM_032352.2,326-344).
gatctcaaagatcaacttt

SEQ ID NO: 399892 - DNA, 19 bp, Homo sapiens
  siRNA target sequence for BRMS1L (NM_032352.2,331-349).
caaagatcaactttataaa

SEQ ID NO: 399893 - DNA, 19 bp, Homo sapiens
  siRNA target sequence for BRMS1L (NM_032352.2,393-411).
ctggaaaagcaccagaata

SEQ ID NO: 399894 - DNA, 19 bp, Homo sapiens
  siRNA target sequence for BRMS1L (NM_032352.2,395-413).
ggaaaagcaccagaatact

SEQ ID NO: 399895 - DNA, 19 bp, Homo sapiens
  siRNA target sequence for BRMS1L (NM_032352.2,396-414).
gaaaagcaccagaatactt

SEQ ID NO: 399896 - DNA, 19 bp, Homo sapiens
  siRNA target sequence for BRMS1L (NM_032352.2,415-433).
ggaaccgctggcaacttta

SEQ ID NO: 399897 - DNA, 19 bp, Homo sapiens
  siRNA target sequence for BRMS1L (NM_032352.2,445-463).
gcaaattcgtacaaaggta

SEQ ID NO: 399898 - DNA, 19 bp, Homo sapiens
  siRNA target sequence for BRMS1L (NM_032352.2,528-546).
cttctcgccagcattgtga

SEQ ID NO: 399899 - DNA, 19 bp, Homo sapiens
  siRNA target sequence for BRMS1L (NM_032352.2,556-574).
gctgttgctatatgataca

SEQ ID NO: 399900 - DNA, 19 bp, Homo sapiens
  siRNA target sequence for BRMS1L (NM_032352.2,616-634).
ggataggcacagcattgat

SEQ ID NO: 399901 - DNA, 19 bp, Homo sapiens
  siRNA target sequence for BRMS1L (NM_032352.2,719-737).
gttgtttcaggtccatata

SEQ ID NO: 399902 - DNA, 19 bp, Homo sapiens
  siRNA target sequence for BRMS1L (NM_032352.2,728-746).
ggtccatatatagtttata

SEQ ID NO: 399903 - DNA, 19 bp, Homo sapiens
  siRNA target sequence for BRMS1L (NM_032352.2,748-766).
gctacaagatcttgatatt

SEQ ID NO: 399904 - DNA, 19 bp, Homo sapiens
  siRNA target sequence for BRMS1L (NM_032352.2,767-785).
cttgaagactggacaacaa

SEQ ID NO: 399905 - DNA, 19 bp, Homo sapiens
  siRNA target sequence for BRMS1L (NM_032352.2,773-791).
gactggacaacaattagga

SEQ ID NO: 399906 - DNA, 19 bp, Homo sapiens
  siRNA target sequence for BRMS1L (NM_032352.2,809-827).
gggccacacagagtgaaaa

SEQ ID NO: 399907 - DNA, 19 bp, Homo sapiens
  siRNA target sequence for BRMS1L (NM_032352.2,859-877).
gcacagtgctagatctgaa

SEQ ID NO: 399908 - DNA, 19 bp, Homo sapiens
  siRNA target sequence for BRMS1L (NM_032352.2,875-893).
gaagagggaagactatatt

SEQ ID NO: 399909 - DNA, 19 bp, Homo sapiens
  siRNA target sequence for BRMS1L (NM_032352.2,907-925).
gtatatacgtggacaaaca

SEQ ID NO: 399910 - DNA, 19 bp, Homo sapiens
  siRNA target sequence for BRMS1L (NM_032352.2,951-969).
gtcctacaagtgctgtaat

SEQ ID NO: 399911 - DNA, 19 bp, Homo sapiens
  siRNA target sequence for BRMS1L (NM_032352.2,975-993).
caattaaccatgatgaagt

SEQ ID NO: 399912 - DNA, 19 bp, Homo sapiens
  siRNA target sequence for BRMS1L (NM_032352.2,1014-1032).
gaagcaaatctaagcttta

SEQ ID NO: 399913 - DNA, 19 bp, Homo sapiens
  siRNA target sequence for BRMS1L (NM_032352.2,1017-1035).
gcaaatctaagctttacat

SEQ ID NO: 399914 - DNA, 19 bp, Homo sapiens
  siRNA target sequence for BRMS1L (NM_032352.2,1023-1041).
ctaagctttacatttcaca

SEQ ID NO: 399915 - DNA, 19 bp, Homo sapiens
  siRNA target sequence for MGC10540 (NM_032353.2,79-97).
cccacccttctttacgtta

SEQ ID NO: 399916 - DNA, 19 bp, Homo sapiens
  siRNA target sequence for MGC10540 (NM_032353.2,229-247).
caagctacagcgaaagctt

SEQ ID NO: 399917 - DNA, 19 bp, Homo sapiens
  siRNA target sequence for MGC10540 (NM_032353.2,253-271).
ggagtcgatccagattgta

SEQ ID NO: 399918 - DNA, 19 bp, Homo sapiens
  siRNA target sequence for MGC10540 (NM_032353.2,254-272).
gagtcgatccagattgtat

SEQ ID NO: 399919 - DNA, 19 bp, Homo sapiens
  siRNA target sequence for MGC10540 (NM_032353.2,258-276).
cgatccagattgtattaga

SEQ ID NO: 399920 - DNA, 19 bp, Homo sapiens
  siRNA target sequence for MGC10540 (NM_032353.2,299-317).
ctcgagtggttggataaga

SEQ ID NO: 399921 - DNA, 19 bp, Homo sapiens
  siRNA target sequence for MGC10540 (NM_032353.2,409-427).
cgtctttaccctgtatgaa

SEQ ID NO: 399922 - DNA, 19 bp, Homo sapiens
  siRNA target sequence for MGC10540 (NM_032353.2,417-435).
ccctgtatgaactgactaa

SEQ ID NO: 399923 - DNA, 19 bp, Homo sapiens
  siRNA target sequence for MGC10540 (NM_032353.2,418-436).
cctgtatgaactgactaat

SEQ ID NO: 399924 - DNA, 19 bp, Homo sapiens
  siRNA target sequence for MGC10540 (NM_032353.2,549-567).
gccgaggcgtcaagttctt

SEQ ID NO: 399925 - DNA, 19 bp, Homo sapiens
  siRNA target sequence for MGC10540 (NM_032353.2,551-569).
cgaggcgtcaagttcttct

SEQ ID NO: 399926 - DNA, 19 bp, Homo sapiens
  siRNA target sequence for MGC10744 (NM_032354.2,171-189).
gtggtcgtcatcaccttat

SEQ ID NO: 399927 - DNA, 19 bp, Homo sapiens
  siRNA target sequence for MGC10744 (NM_032354.2,447-465).
gagtgcactacgtattggt

SEQ ID NO: 399928 - DNA, 19 bp, Homo sapiens
  siRNA target sequence for MGC10744 (NM_032354.2,452-470).
cactacgtattggtacatt

SEQ ID NO: 399929 - DNA, 19 bp, Homo sapiens
  siRNA target sequence for MGC10744 (NM_032354.2,454-472).
ctacgtattggtacatttt

SEQ ID NO: 399930 - DNA, 19 bp, Homo sapiens
  siRNA target sequence for MGC10744 (NM_032354.2,502-520).
ctgaaatggctttattcgt

SEQ ID NO: 399931 - DNA, 19 bp, Homo sapiens
  siRNA target sequence for MGC12981 (NM_032357.2,301-319).
ggaaacgaacggtgttgaa

SEQ ID NO: 399932 - DNA, 19 bp, Homo sapiens
  siRNA target sequence for MGC12981 (NM_032357.2,588-606).
cccctgaactggtttggaa

SEQ ID NO: 399933 - DNA, 19 bp, Homo sapiens
  siRNA target sequence for MGC12981 (NM_032357.2,589-607).
ccctgaactggtttggaat

SEQ ID NO: 399934 - DNA, 19 bp, Homo sapiens
  siRNA target sequence for MGC12981 (NM_032357.2,723-741).
ggactccaagagaaactca

SEQ ID NO: 399935 - DNA, 19 bp, Homo sapiens
  siRNA target sequence for MGC13183 (NM_032358.2,161-179).
ggggaatggcagattcact

SEQ ID NO: 399936 - DNA, 19 bp, Homo sapiens
  siRNA target sequence for MGC13183 (NM_032358.2,233-251).
ctaaggagctcctggaata

SEQ ID NO: 399937 - DNA, 19 bp, Homo sapiens
  siRNA target sequence for MGC13183 (NM_032358.2,237-255).
ggagctcctggaatattat

SEQ ID NO: 399938 - DNA, 19 bp, Homo sapiens
  siRNA target sequence for MGC13183 (NM_032358.2,240-258).
gctcctggaatattatcaa

SEQ ID NO: 399939 - DNA, 19 bp, Homo sapiens
  siRNA target sequence for MGC13183 (NM_032358.2,329-347).
gtgaaggacagcataaact

SEQ ID NO: 399940 - DNA, 19 bp, Homo sapiens
  siRNA target sequence for MGC13183 (NM_032358.2,339-357).
gcataaacttgaatgtgat

SEQ ID NO: 399941 - DNA, 19 bp, Homo sapiens
  siRNA target sequence for MGC13183 (NM_032358.2,426-444).
ccaggaacgggaacatgtt

SEQ ID NO: 399942 - DNA, 19 bp, Homo sapiens
  siRNA target sequence for MGC13183 (NM_032358.2,519-537).
ggctcttgtgggaacagat

SEQ ID NO: 399943 - DNA, 19 bp, Homo sapiens
  siRNA target sequence for MGC13183 (NM_032358.2,565-583).
gagcctcctcacaaagtca

SEQ ID NO: 399944 - DNA, 19 bp, Homo sapiens
  siRNA target sequence for MGC13183 (NM_032358.2,705-723).
gcattaccaaagagacata

SEQ ID NO: 399945 - DNA, 19 bp, Homo sapiens
  siRNA target sequence for MGC13183 (NM_032358.2,766-784).
ggagagcagaccaaacttt

SEQ ID NO: 399946 - DNA, 19 bp, Homo sapiens
  siRNA target sequence for MGC13183 (NM_032358.2,873-891).
caaagagctaaccaaaaat

SEQ ID NO: 399947 - DNA, 19 bp, Homo sapiens
  siRNA target sequence for MGC13183 (NM_032358.2,904-922).
caagaactgctctatgaga

SEQ ID NO: 399948 - DNA, 19 bp, Homo sapiens
  siRNA target sequence for MGC13183 (NM_032358.2,1002-1020).
gtcaaagattaagcaatat

SEQ ID NO: 399949 - DNA, 19 bp, Homo sapiens
  siRNA target sequence for MGC13183 (NM_032358.2,1084-1102).
caccatgctcaaagtgaat

SEQ ID NO: 399950 - DNA, 19 bp, Homo sapiens
  siRNA target sequence for MGC13183 (NM_032358.2,1087-1105).
catgctcaaagtgaatata

SEQ ID NO: 399951 - DNA, 19 bp, Homo sapiens
  siRNA target sequence for MGC13183 (NM_032358.2,1110-1128).
gtccctaaaagataagtta

SEQ ID NO: 399952 - DNA, 19 bp, Homo sapiens
  siRNA target sequence for MGC13183 (NM_032358.2,1112-1130).
ccctaaaagataagttagt

SEQ ID NO: 399953 - DNA, 19 bp, Homo sapiens
  siRNA target sequence for MGC13183 (NM_032358.2,1113-1131).
cctaaaagataagttagta

SEQ ID NO: 399954 - DNA, 19 bp, Homo sapiens
  siRNA target sequence for MGC13183 (NM_032358.2,1167-1185).
gtgcatttccttagaagaa

SEQ ID NO: 399955 - DNA, 19 bp, Homo sapiens
  siRNA target sequence for MGC13183 (NM_032358.2,1254-1272).
ggggaagcgtttacagata

SEQ ID NO: 399956 - DNA, 19 bp, Homo sapiens
  siRNA target sequence for MGC13183 (NM_032358.2,1261-1279).
cgtttacagataatgacaa

SEQ ID NO: 399957 - DNA, 19 bp, Homo sapiens
  siRNA target sequence for MGC13183 (NM_032358.2,1262-1280).
gtttacagataatgacaaa

SEQ ID NO: 399958 - DNA, 19 bp, Homo sapiens
  siRNA target sequence for MGC13183 (NM_032358.2,1304-1322).
gacgtatcctggaagtaga

SEQ ID NO: 399959 - DNA, 19 bp, Homo sapiens
  siRNA target sequence for MGC13183 (NM_032358.2,1324-1342).
ggctttaagacagatatta

SEQ ID NO: 399960 - DNA, 19 bp, Homo sapiens
  siRNA target sequence for MGC13183 (NM_032358.2,1325-1343).
gctttaagacagatattaa

SEQ ID NO: 399961 - DNA, 19 bp, Homo sapiens
  siRNA target sequence for MGC13183 (NM_032358.2,1366-1384).
gacttggagcaaatgttgt

SEQ ID NO: 399962 - DNA, 19 bp, Homo sapiens
  siRNA target sequence for MGC13183 (NM_032358.2,1383-1401).
gtataaggcaacagttaat

SEQ ID NO: 399963 - DNA, 19 bp, Homo sapiens
  siRNA target sequence for MGC13183 (NM_032358.2,1437-1455).
ggtccgtgacagcaataga

SEQ ID NO: 399964 - DNA, 19 bp, Homo sapiens
  siRNA target sequence for MGC13183 (NM_032358.2,1454-1472).
gacgggcacataagataca

SEQ ID NO: 399965 - DNA, 19 bp, Homo sapiens
  siRNA target sequence for MGC13183 (NM_032358.2,1477-1495).
gaactgaagaatcttaagt

SEQ ID NO: 399966 - DNA, 19 bp, Homo sapiens
  siRNA target sequence for MGC13183 (NM_032358.2,1507-1525).
ggtctggagaatgaactta

SEQ ID NO: 399967 - DNA, 19 bp, Homo sapiens
  siRNA target sequence for MGC4308 (NM_032359.2,562-580).
gtcctaagtgggtaaaact

SEQ ID NO: 399968 - DNA, 19 bp, Homo sapiens
  siRNA target sequence for MGC4308 (NM_032359.2,564-582).
cctaagtgggtaaaactta

SEQ ID NO: 399969 - DNA, 19 bp, Homo sapiens
  siRNA target sequence for MGC4308 (NM_032359.2,679-697).
gaggagacggcaaagttat

SEQ ID NO: 399970 - DNA, 19 bp, Homo sapiens
  siRNA target sequence for MGC4308 (NM_032359.2,682-700).
gagacggcaaagttataaa

SEQ ID NO: 399971 - DNA, 19 bp, Homo sapiens
  siRNA target sequence for MGC4308 (NM_032359.2,684-702).
gacggcaaagttataaaat

SEQ ID NO: 399972 - DNA, 19 bp, Homo sapiens
  siRNA target sequence for MGC4308 (NM_032359.2,686-704).
cggcaaagttataaaatta

SEQ ID NO: 399973 - DNA, 19 bp, Homo sapiens
  siRNA target sequence for MGC4308 (NM_032359.2,723-741).
gtccaggcgcaggtaaagt

SEQ ID NO: 399974 - DNA, 19 bp, Homo sapiens
  siRNA target sequence for MGC4308 (NM_032359.2,774-792).
ggaactccggggagaatta

SEQ ID NO: 399975 - DNA, 19 bp, Homo sapiens
  siRNA target sequence for MGC4308 (NM_032359.2,775-793).
gaactccggggagaattaa

SEQ ID NO: 399976 - DNA, 19 bp, Homo sapiens
  siRNA target sequence for MGC4308 (NM_032359.2,778-796).
ctccggggagaattaaaga

SEQ ID NO: 399977 - DNA, 19 bp, Homo sapiens
  siRNA target sequence for MGC4308 (NM_032359.2,781-799).
cggggagaattaaagaact

SEQ ID NO: 399978 - DNA, 19 bp, Homo sapiens
  siRNA target sequence for THOC3 (NM_032361.1,333-351).
gttggtcaaagaaaacaat

SEQ ID NO: 399979 - DNA, 19 bp, Homo sapiens
  siRNA target sequence for THOC3 (NM_032361.1,395-413).
caagtaatcctgacctatt

SEQ ID NO: 399980 - DNA, 19 bp, Homo sapiens
  siRNA target sequence for THOC3 (NM_032361.1,398-416).
gtaatcctgacctatttgt

SEQ ID NO: 399981 - DNA, 19 bp, Homo sapiens
  siRNA target sequence for THOC3 (NM_032361.1,451-469).
gatgtgaggactacaaaat

SEQ ID NO: 399982 - DNA, 19 bp, Homo sapiens
  siRNA target sequence for THOC3 (NM_032361.1,579-597).
caagacacaccgttccaaa

SEQ ID NO: 399983 - DNA, 19 bp, Homo sapiens
  siRNA target sequence for THOC3 (NM_032361.1,739-757).
ccttccaactgcatctgta

SEQ ID NO: 399984 - DNA, 19 bp, Homo sapiens
  siRNA target sequence for THOC3 (NM_032361.1,747-765).
ctgcatctgtatcaagttt

SEQ ID NO: 399985 - DNA, 19 bp, Homo sapiens
  siRNA target sequence for THOC3 (NM_032361.1,749-767).
gcatctgtatcaagtttga

SEQ ID NO: 399986 - DNA, 19 bp, Homo sapiens
  siRNA target sequence for THOC3 (NM_032361.1,768-786).
ccccatggggaagtacttt

SEQ ID NO: 399987 - DNA, 19 bp, Homo sapiens
  siRNA target sequence for THOC3 (NM_032361.1,821-839).
gggatgtggatgagttagt

SEQ ID NO: 399988 - DNA, 19 bp, Homo sapiens
  siRNA target sequence for THOC3 (NM_032361.1,823-841).
gatgtggatgagttagtgt

SEQ ID NO: 399989 - DNA, 19 bp, Homo sapiens
  siRNA target sequence for THOC3 (NM_032361.1,861-879).
gctggattggcctgtaaga

SEQ ID NO: 399990 - DNA, 19 bp, Homo sapiens
  siRNA target sequence for THOC3 (NM_032361.1,914-932).
cgtcagcatcggaagatca

SEQ ID NO: 399991 - DNA, 19 bp, Homo sapiens
  siRNA target sequence for THOC3 (NM_032361.1,915-933).
gtcagcatcggaagatcat

SEQ ID NO: 399992 - DNA, 19 bp, Homo sapiens
  siRNA target sequence for THOC3 (NM_032361.1,917-935).
cagcatcggaagatcattt

SEQ ID NO: 399993 - DNA, 19 bp, Homo sapiens
  siRNA target sequence for THOC3 (NM_032361.1,923-941).
cggaagatcattttattga

SEQ ID NO: 399994 - DNA, 19 bp, Homo sapiens
  siRNA target sequence for THOC3 (NM_032361.1,955-973).
gagacaggggacaaactat

SEQ ID NO: 399995 - DNA, 19 bp, Homo sapiens
  siRNA target sequence for HEIL1 (NM_032362.1,6-24).
gagaatagtgcattgtgaa

SEQ ID NO: 399996 - DNA, 19 bp, Homo sapiens
  siRNA target sequence for HEIL1 (NM_032362.1,31-49).
gtgagttgggacaacttgt

SEQ ID NO: 399997 - DNA, 19 bp, Homo sapiens
  siRNA target sequence for HEIL1 (NM_032362.1,42-60).
caacttgtacagagaatat

SEQ ID NO: 399998 - DNA, 19 bp, Homo sapiens
  siRNA target sequence for HEIL1 (NM_032362.1,48-66).
gtacagagaatataacaca

SEQ ID NO: 399999 - DNA, 19 bp, Homo sapiens
  siRNA target sequence for HEIL1 (NM_032362.1,83-101).
ggcctaaagatatcttagt

SEQ ID NO: 400000 - DNA, 19 bp, Homo sapiens
  siRNA target sequence for HEIL1 (NM_032362.1,166-184).
gtttcctcgttcttaaata

SEQ ID NO: 400001 - DNA, 19 bp, Homo sapiens
  siRNA target sequence for HEIL1 (NM_032362.1,369-387).
gctcaatcctgcaatgtgt

SEQ ID NO: 400002 - DNA, 19 bp, Homo sapiens
  siRNA target sequence for HEIL1 (NM_032362.1,394-412).
ggtgtggagctgtcattct

SEQ ID NO: 400003 - DNA, 19 bp, Homo sapiens
  siRNA target sequence for HEIL1 (NM_032362.1,403-421).
ctgtcattctggatgatgt

SEQ ID NO: 400004 - DNA, 19 bp, Homo sapiens
  siRNA target sequence for HEIL1 (NM_032362.1,474-492).
ctcctccacccatggaata

SEQ ID NO: 400005 - DNA, 19 bp, Homo sapiens
  siRNA target sequence for LZIC (NM_032368.3,214-232).
gatagactcatgcaacaat

SEQ ID NO: 400006 - DNA, 19 bp, Homo sapiens
  siRNA target sequence for LZIC (NM_032368.3,222-240).
catgcaacaattacaagat

SEQ ID NO: 400007 - DNA, 19 bp, Homo sapiens
  siRNA target sequence for LZIC (NM_032368.3,252-270).
cagagaggaacttgataca

SEQ ID NO: 400008 - DNA, 19 bp, Homo sapiens
  siRNA target sequence for LZIC (NM_032368.3,303-321).
ggagcaactaagtgaattt

SEQ ID NO: 400009 - DNA, 19 bp, Homo sapiens
  siRNA target sequence for LZIC (NM_032368.3,357-375).
gactttggtagatgaacta

SEQ ID NO: 400010 - DNA, 19 bp, Homo sapiens
  siRNA target sequence for LZIC (NM_032368.3,425-443).
ccccagaggtcatcagatt

SEQ ID NO: 400011 - DNA, 19 bp, Homo sapiens
  siRNA target sequence for LZIC (NM_032368.3,427-445).
ccagaggtcatcagattgt

SEQ ID NO: 400012 - DNA, 19 bp, Homo sapiens
  siRNA target sequence for LZIC (NM_032368.3,543-561).
gaaagtggagatactaaca

SEQ ID NO: 400013 - DNA, 19 bp, Homo sapiens
  siRNA target sequence for LZIC (NM_032368.3,617-635).
caaatgcaggtgctatact

SEQ ID NO: 400014 - DNA, 19 bp, Homo sapiens
  siRNA target sequence for LZIC (NM_032368.3,629-647).
ctatactcagccagtttga

SEQ ID NO: 400015 - DNA, 19 bp, Homo sapiens
  siRNA target sequence for MGC15716 (NM_032370.1,352-370).
ggcctgaccagcatagtct

SEQ ID NO: 400016 - DNA, 19 bp, Homo sapiens
  siRNA target sequence for MGC15716 (NM_032370.1,616-634).
cccaatcgctacttcaagt

SEQ ID NO: 400017 - DNA, 19 bp, Homo sapiens
  siRNA target sequence for MGC15716 (NM_032370.1,662-680).
cgcaccgctcgctcttcaa

SEQ ID NO: 400018 - DNA, 19 bp, Homo sapiens
  siRNA target sequence for MGC15416 (NM_032371.2,145-163).
ctcggcgagctcctgaaat

SEQ ID NO: 400019 - DNA, 19 bp, Homo sapiens
  siRNA target sequence for MGC16202 (NM_032373.2,258-276).
ggtgaaagattttaatcct

SEQ ID NO: 400020 - DNA, 19 bp, Homo sapiens
  siRNA target sequence for MGC16202 (NM_032373.2,265-283).
gattttaatccttacatta

SEQ ID NO: 400021 - DNA, 19 bp, Homo sapiens
  siRNA target sequence for MGC16202 (NM_032373.2,275-293).
cttacattacctgctatat

SEQ ID NO: 400022 - DNA, 19 bp, Homo sapiens
  siRNA target sequence for MGC16202 (NM_032373.2,296-314).
gtaaagggtatctgatcaa

SEQ ID NO: 400023 - DNA, 19 bp, Homo sapiens
  siRNA target sequence for MGC16202 (NM_032373.2,339-357).
ccatacattctgtaagact

SEQ ID NO: 400024 - DNA, 19 bp, Homo sapiens
  siRNA target sequence for MGC16202 (NM_032373.2,350-368).
gtaagacttgtattgttca

SEQ ID NO: 400025 - DNA, 19 bp, Homo sapiens
  siRNA target sequence for MGC16202 (NM_032373.2,398-416).
ggtgtggcaaccaagttca

SEQ ID NO: 400026 - DNA, 19 bp, Homo sapiens
  siRNA target sequence for MGC16202 (NM_032373.2,399-417).
gtgtggcaaccaagttcat

SEQ ID NO: 400027 - DNA, 19 bp, Homo sapiens
  siRNA target sequence for MGC16202 (NM_032373.2,412-430).
gttcatgagacaaatccat

SEQ ID NO: 400028 - DNA, 19 bp, Homo sapiens
  siRNA target sequence for MGC16202 (NM_032373.2,441-459).
gaggttggacaatacatta

SEQ ID NO: 400029 - DNA, 19 bp, Homo sapiens
  siRNA target sequence for MGC16202 (NM_032373.2,553-571).
ggacaagatgatacttcaa

SEQ ID NO: 400030 - DNA, 19 bp, Homo sapiens
  siRNA target sequence for MGC16202 (NM_032373.2,554-572).
gacaagatgatacttcaaa

SEQ ID NO: 400031 - DNA, 19 bp, Homo sapiens
  siRNA target sequence for MGC16202 (NM_032373.2,579-597).
caaaccgaaagtagatgaa

SEQ ID NO: 400032 - DNA, 19 bp, Homo sapiens
  siRNA target sequence for MGC16202 (NM_032373.2,657-675).
ctgtctagattgtttacga

SEQ ID NO: 400033 - DNA, 19 bp, Homo sapiens
  siRNA target sequence for MGC16202 (NM_032373.2,659-677).
gtctagattgtttacgaaa

SEQ ID NO: 400034 - DNA, 19 bp, Homo sapiens
  siRNA target sequence for MGC16202 (NM_032373.2,684-702).
gcaatcaggggacaatgta

SEQ ID NO: 400035 - DNA, 19 bp, Homo sapiens
  siRNA target sequence for MGC16202 (NM_032373.2,689-707).
caggggacaatgtagtaaa

SEQ ID NO: 400036 - DNA, 19 bp, Homo sapiens
  siRNA target sequence for MGC16202 (NM_032373.2,734-752).
gttctacacgtgtaactgt

SEQ ID NO: 400037 - DNA, 19 bp, Homo sapiens
  siRNA target sequence for MGC16202 (NM_032373.2,784-802).
ctaaaacttccaagttctt

SEQ ID NO: 400038 - DNA, 19 bp, Homo sapiens
  siRNA target sequence for MGC16202 (NM_032373.2,844-862).
gatcatactatggaattca

SEQ ID NO: 400039 - DNA, 19 bp, Homo sapiens
  siRNA target sequence for MGC16202 (NM_032373.2,851-869).
ctatggaattcatctacat

SEQ ID NO: 400040 - DNA, 19 bp, Homo sapiens
  siRNA target sequence for MGC16202 (NM_032373.2,880-898).
cgactaagaggcgaaaact

SEQ ID NO: 400041 - DNA, 19 bp, Homo sapiens
  siRNA target sequence for MGC16202 (NM_032373.2,881-899).
gactaagaggcgaaaactt

SEQ ID NO: 400042 - DNA, 19 bp, Homo sapiens
  siRNA target sequence for MGC16202 (NM_032373.2,935-953).
ctcaggatggccctttgta

SEQ ID NO: 400043 - DNA, 19 bp, Homo sapiens
  siRNA target sequence for MGC16202 (NM_032373.2,975-993).
gcagtatcgaccaagaatt

SEQ ID NO: 400044 - DNA, 19 bp, Homo sapiens
  siRNA target sequence for MGC16202 (NM_032373.2,978-996).
gtatcgaccaagaattgat

SEQ ID NO: 400045 - DNA, 19 bp, Homo sapiens
  siRNA target sequence for MGC2562 (NM_032374.2,123-141).
cccagcggggtctcaagat

SEQ ID NO: 400046 - DNA, 19 bp, Homo sapiens
  siRNA target sequence for MGC2562 (NM_032374.2,124-142).
ccagcggggtctcaagatt

SEQ ID NO: 400047 - DNA, 19 bp, Homo sapiens
  siRNA target sequence for MGC2562 (NM_032374.2,158-176).
gtcttgccatgattggata

SEQ ID NO: 400048 - DNA, 19 bp, Homo sapiens
  siRNA target sequence for MGC2562 (NM_032374.2,172-190).
ggataggacccccagataa

SEQ ID NO: 400049 - DNA, 19 bp, Homo sapiens
  siRNA target sequence for MGC2562 (NM_032374.2,173-191).
gataggacccccagataaa

SEQ ID NO: 400050 - DNA, 19 bp, Homo sapiens
  siRNA target sequence for MGC2562 (NM_032374.2,180-198).
cccccagataaatattcaa

SEQ ID NO: 400051 - DNA, 19 bp, Homo sapiens
  siRNA target sequence for MGC2562 (NM_032374.2,181-199).
ccccagataaatattcaaa

SEQ ID NO: 400052 - DNA, 19 bp, Homo sapiens
  siRNA target sequence for MGC2562 (NM_032374.2,204-222).
cgacctgttcacttttaca

SEQ ID NO: 400053 - DNA, 19 bp, Homo sapiens
  siRNA target sequence for MGC2562 (NM_032374.2,205-223).
gacctgttcacttttacat

SEQ ID NO: 400054 - DNA, 19 bp, Homo sapiens
  siRNA target sequence for MGC2562 (NM_032374.2,234-252).
gaatctccattggaacaaa

SEQ ID NO: 400055 - DNA, 19 bp, Homo sapiens
  siRNA target sequence for MGC2562 (NM_032374.2,426-444).
gcggacttctacaaggaat

SEQ ID NO: 400056 - DNA, 19 bp, Homo sapiens
  siRNA target sequence for MGC2562 (NM_032374.2,544-562).
ggatttggaacaagcttaa

SEQ ID NO: 400057 - DNA, 19 bp, Homo sapiens
  siRNA target sequence for MGC2562 (NM_032374.2,550-568).
ggaacaagcttaaacagaa

SEQ ID NO: 400058 - DNA, 19 bp, Homo sapiens
  siRNA target sequence for MGC2562 (NM_032374.2,554-572).
caagcttaaacagaaacaa

SEQ ID NO: 400059 - DNA, 19 bp, Homo sapiens
  siRNA target sequence for MGC2865 (NM_032375.2,1033-1051).
cagctgggcattagtgata

SEQ ID NO: 400060 - DNA, 19 bp, Homo sapiens
  siRNA target sequence for MGC2865 (NM_032375.2,1035-1053).
gctgggcattagtgataat

SEQ ID NO: 400061 - DNA, 19 bp, Homo sapiens
  siRNA target sequence for MGC2865 (NM_032375.2,1119-1137).
ccccgagagtacagatgat

SEQ ID NO: 400062 - DNA, 19 bp, Homo sapiens
  siRNA target sequence for MGC4251 (NM_032376.2,210-228).
ccgtgctgtgcgctagttt

SEQ ID NO: 400063 - DNA, 19 bp, Homo sapiens
  siRNA target sequence for MGC4251 (NM_032376.2,212-230).
gtgctgtgcgctagtttca

SEQ ID NO: 400064 - DNA, 19 bp, Homo sapiens
  siRNA target sequence for MGC4251 (NM_032376.2,336-354).
ggctgaaggtccgtatgta

SEQ ID NO: 400065 - DNA, 19 bp, Homo sapiens
  siRNA target sequence for MGC4251 (NM_032376.2,338-356).
ctgaaggtccgtatgtact

SEQ ID NO: 400066 - DNA, 19 bp, Homo sapiens
  siRNA target sequence for MGC4251 (NM_032376.2,518-536).
gaccggctggcgtatctga

SEQ ID NO: 400067 - DNA, 19 bp, Homo sapiens
  siRNA target sequence for MGC4251 (NM_032376.2,546-564).
caggaggggagctgatgat

SEQ ID NO: 400068 - DNA, 19 bp, Homo sapiens
  siRNA target sequence for MGC4549 (NM_032377.2,25-43).
gcgcagaaagtcaaaacga

SEQ ID NO: 400069 - DNA, 19 bp, Homo sapiens
  siRNA target sequence for MGC4549 (NM_032377.2,26-44).
cgcagaaagtcaaaacgaa

SEQ ID NO: 400070 - DNA, 19 bp, Homo sapiens
  siRNA target sequence for MGC4549 (NM_032377.2,190-208).
ccagacgcccataacgtat

SEQ ID NO: 400071 - DNA, 19 bp, Homo sapiens
  siRNA target sequence for SYTL2 (NM_032379.2,695-713).
caagtctgttccagcattt

SEQ ID NO: 400072 - DNA, 19 bp, Homo sapiens
  siRNA target sequence for SYTL2 (NM_032379.2,785-803).
gaagagcccgagctcttta

SEQ ID NO: 400073 - DNA, 19 bp, Homo sapiens
  siRNA target sequence for SYTL2 (NM_032379.2,790-808).
gcccgagctctttaaccaa

SEQ ID NO: 400074 - DNA, 19 bp, Homo sapiens
  siRNA target sequence for SYTL2 (NM_032379.2,794-812).
gagctctttaaccaatctt

SEQ ID NO: 400075 - DNA, 19 bp, Homo sapiens
  siRNA target sequence for SYTL2 (NM_032379.2,853-871).
gcagtgtgatgagtgttta

SEQ ID NO: 400076 - DNA, 19 bp, Homo sapiens
  siRNA target sequence for SYTL2 (NM_032379.2,854-872).
cagtgtgatgagtgtttat

SEQ ID NO: 400077 - DNA, 19 bp, Homo sapiens
  siRNA target sequence for SYTL2 (NM_032379.2,982-1000).
cagcagcggatgtaaaaaa

SEQ ID NO: 400078 - DNA, 19 bp, Homo sapiens
  siRNA target sequence for SYTL2 (NM_032379.2,1004-1022).
gcgttcagacccatatgta

SEQ ID NO: 400079 - DNA, 19 bp, Homo sapiens
  siRNA target sequence for SYTL2 (NM_032379.2,1005-1023).
cgttcagacccatatgtaa

SEQ ID NO: 400080 - DNA, 19 bp, Homo sapiens
  siRNA target sequence for SYTL2 (NM_032379.2,1096-1114).
ctgtgtataacgaaatact

SEQ ID NO: 400081 - DNA, 19 bp, Homo sapiens
  siRNA target sequence for SYTL2 (NM_032379.2,1106-1124).
cgaaatactgcggtataaa

SEQ ID NO: 400082 - DNA, 19 bp, Homo sapiens
  siRNA target sequence for SYTL2 (NM_032379.2,1107-1125).
gaaatactgcggtataaaa

SEQ ID NO: 400083 - DNA, 19 bp, Homo sapiens
  siRNA target sequence for SYTL2 (NM_032379.2,1183-1201).
catttaagcgcaatagttt

SEQ ID NO: 400084 - DNA, 19 bp, Homo sapiens
  siRNA target sequence for SYTL2 (NM_032379.2,1231-1249).
catgggactgggataacaa

SEQ ID NO: 400085 - DNA, 19 bp, Homo sapiens
  siRNA target sequence for SYTL2 (NM_032379.2,1234-1252).
gggactgggataacaaaca

SEQ ID NO: 400086 - DNA, 19 bp, Homo sapiens
  siRNA target sequence for SYTL2 (NM_032379.2,1236-1254).
gactgggataacaaacaga

SEQ ID NO: 400087 - DNA, 19 bp, Homo sapiens
  siRNA target sequence for SYTL2 (NM_032379.2,1238-1256).
ctgggataacaaacagaat

SEQ ID NO: 400088 - DNA, 19 bp, Homo sapiens
  siRNA target sequence for SYTL2 (NM_032379.2,1409-1427).
gaaggaatgccttgatcta

SEQ ID NO: 400089 - DNA, 19 bp, Homo sapiens
  siRNA target sequence for SYTL2 (NM_032379.2,1433-1451).
gctaaggggaagtcatcta

SEQ ID NO: 400090 - DNA, 19 bp, Homo sapiens
  siRNA target sequence for SYTL2 (NM_032379.2,1434-1452).
ctaaggggaagtcatctaa

SEQ ID NO: 400091 - DNA, 19 bp, Homo sapiens
  siRNA target sequence for SYTL2 (NM_032379.2,1547-1565).
ccacactatggtgtatgat

SEQ ID NO: 400092 - DNA, 19 bp, Homo sapiens
  siRNA target sequence for SYTL2 (NM_032379.2,1567-1585).
ggttcaggcctgaagatct

SEQ ID NO: 400093 - DNA, 19 bp, Homo sapiens
  siRNA target sequence for SYTL2 (NM_032379.2,1613-1631).
ctgggaccattacaaatta

SEQ ID NO: 400094 - DNA, 19 bp, Homo sapiens
  siRNA target sequence for SYTL2 (NM_032379.2,1653-1671).
cttcgtattggctttggaa

SEQ ID NO: 400095 - DNA, 19 bp, Homo sapiens
  siRNA target sequence for SYTL2 (NM_032379.2,1745-1763).
ggtaaactcccccaatact

SEQ ID NO: 400096 - DNA, 19 bp, Homo sapiens
  siRNA target sequence for SYTL2 (NM_032379.2,1754-1772).
ccccaatacttggattgaa

SEQ ID NO: 400097 - DNA, 19 bp, Homo sapiens
  siRNA target sequence for HPS3 (NM_032383.3,226-244).
ggcgtgacgcgcttttcgt

SEQ ID NO: 400098 - DNA, 19 bp, Homo sapiens
  siRNA target sequence for HPS3 (NM_032383.3,368-386).
ggtagcaattgaagagaaa

SEQ ID NO: 400099 - DNA, 19 bp, Homo sapiens
  siRNA target sequence for HPS3 (NM_032383.3,397-415).
catttctacgtgcttatgt

SEQ ID NO: 400100 - DNA, 19 bp, Homo sapiens
  siRNA target sequence for HPS3 (NM_032383.3,458-476).
ccgaatgattgggcataat

SEQ ID NO: 400101 - DNA, 19 bp, Homo sapiens
  siRNA target sequence for HPS3 (NM_032383.3,505-523).
gagaccagatgtacattat

SEQ ID NO: 400102 - DNA, 19 bp, Homo sapiens
  siRNA target sequence for HPS3 (NM_032383.3,592-610).
gctgcacaaataaattagt

SEQ ID NO: 400103 - DNA, 19 bp, Homo sapiens
  siRNA target sequence for HPS3 (NM_032383.3,609-627).
gtcttatttagtttgaagt

SEQ ID NO: 400104 - DNA, 19 bp, Homo sapiens
  siRNA target sequence for HPS3 (NM_032383.3,650-668).
ctcactattggactttgaa

SEQ ID NO: 400105 - DNA, 19 bp, Homo sapiens
  siRNA target sequence for HPS3 (NM_032383.3,659-677).
ggactttgaacgttcttta

SEQ ID NO: 400106 - DNA, 19 bp, Homo sapiens
  siRNA target sequence for HPS3 (NM_032383.3,660-678).
gactttgaacgttctttaa

SEQ ID NO: 400107 - DNA, 19 bp, Homo sapiens
  siRNA target sequence for HPS3 (NM_032383.3,662-680).
ctttgaacgttctttaatt

SEQ ID NO: 400108 - DNA, 19 bp, Homo sapiens
  siRNA target sequence for HPS3 (NM_032383.3,669-687).
cgttctttaattatacaca

SEQ ID NO: 400109 - DNA, 19 bp, Homo sapiens
  siRNA target sequence for HPS3 (NM_032383.3,673-691).
ctttaattatacacataga

SEQ ID NO: 400110 - DNA, 19 bp, Homo sapiens
  siRNA target sequence for HPS3 (NM_032383.3,736-754).
ctgtcatgtcagacttaga

SEQ ID NO: 400111 - DNA, 19 bp, Homo sapiens
  siRNA target sequence for HPS3 (NM_032383.3,771-789).
ctggagtcaggccctaaaa

SEQ ID NO: 400112 - DNA, 19 bp, Homo sapiens
  siRNA target sequence for HPS3 (NM_032383.3,776-794).
gtcaggccctaaaaatgga

SEQ ID NO: 400113 - DNA, 19 bp, Homo sapiens
  siRNA target sequence for HPS3 (NM_032383.3,875-893).
gcttgagtcagatgatttt

SEQ ID NO: 400114 - DNA, 19 bp, Homo sapiens
  siRNA target sequence for HPS3 (NM_032383.3,879-897).
gagtcagatgattttgtca

SEQ ID NO: 400115 - DNA, 19 bp, Homo sapiens
  siRNA target sequence for HPS3 (NM_032383.3,905-923).
gaagcccctggaacttctt

SEQ ID NO: 400116 - DNA, 19 bp, Homo sapiens
  siRNA target sequence for HPS3 (NM_032383.3,939-957).
cagtctggattatctgtta

SEQ ID NO: 400117 - DNA, 19 bp, Homo sapiens
  siRNA target sequence for HPS3 (NM_032383.3,962-980).
ggagtctacgggattagct

SEQ ID NO: 400118 - DNA, 19 bp, Homo sapiens
  siRNA target sequence for HPS3 (NM_032383.3,1013-1031).
cctgctctatagacgtttt

SEQ ID NO: 400119 - DNA, 19 bp, Homo sapiens
  siRNA target sequence for HPS3 (NM_032383.3,1016-1034).
gctctatagacgttttgct

SEQ ID NO: 400120 - DNA, 19 bp, Homo sapiens
  siRNA target sequence for HPS3 (NM_032383.3,1038-1056).
gatatttcgtcctatgtct

SEQ ID NO: 400121 - DNA, 19 bp, Homo sapiens
  siRNA target sequence for HPS3 (NM_032383.3,1104-1122).
cagaccggttctcttacat

SEQ ID NO: 400122 - DNA, 19 bp, Homo sapiens
  siRNA target sequence for HPS3 (NM_032383.3,1106-1124).
gaccggttctcttacatct

SEQ ID NO: 400123 - DNA, 19 bp, Homo sapiens
  siRNA target sequence for HPS3 (NM_032383.3,1152-1170).
gaattgctgagtctctttt

SEQ ID NO: 400124 - DNA, 19 bp, Homo sapiens
  siRNA target sequence for HPS3 (NM_032383.3,1185-1203).
cctcatgtgggctatctct

SEQ ID NO: 400125 - DNA, 19 bp, Homo sapiens
  siRNA target sequence for HPS3 (NM_032383.3,1186-1204).
ctcatgtgggctatctcta

SEQ ID NO: 400126 - DNA, 19 bp, Homo sapiens
  siRNA target sequence for HPS3 (NM_032383.3,1200-1218).
ctctacatggttgtcaaat

SEQ ID NO: 400127 - DNA, 19 bp, Homo sapiens
  siRNA target sequence for HPS3 (NM_032383.3,1205-1223).
catggttgtcaaatctgtt

SEQ ID NO: 400128 - DNA, 19 bp, Homo sapiens
  siRNA target sequence for HPS3 (NM_032383.3,1209-1227).
gttgtcaaatctgttgaat

SEQ ID NO: 400129 - DNA, 19 bp, Homo sapiens
  siRNA target sequence for HPS3 (NM_032383.3,1241-1259).
ccagtatcctgaaaagtct

SEQ ID NO: 400130 - DNA, 19 bp, Homo sapiens
  siRNA target sequence for HPS3 (NM_032383.3,1267-1285).
cagtactcacgccacaatt

SEQ ID NO: 400131 - DNA, 19 bp, Homo sapiens
  siRNA target sequence for HPS3 (NM_032383.3,1269-1287).
gtactcacgccacaatttt

SEQ ID NO: 400132 - DNA, 19 bp, Homo sapiens
  siRNA target sequence for HPS3 (NM_032383.3,1281-1299).
caatttttgcacgtcatta

SEQ ID NO: 400133 - DNA, 19 bp, Homo sapiens
  siRNA target sequence for HPS3 (NM_032383.3,1290-1308).
cacgtcattacaagtaaca

SEQ ID NO: 400134 - DNA, 19 bp, Homo sapiens
  siRNA target sequence for HPS3 (NM_032383.3,1406-1424).
ggatgtctgtgctttaaga

SEQ ID NO: 400135 - DNA, 19 bp, Homo sapiens
  siRNA target sequence for HPS3 (NM_032383.3,1407-1425).
gatgtctgtgctttaagaa

SEQ ID NO: 400136 - DNA, 19 bp, Homo sapiens
  siRNA target sequence for HPS3 (NM_032383.3,1470-1488).
cacatcatacttttgacta

SEQ ID NO: 400137 - DNA, 19 bp, Homo sapiens
  siRNA target sequence for HPS3 (NM_032383.3,1532-1550).
gaggcttctttcgagaaaa

SEQ ID NO: 400138 - DNA, 19 bp, Homo sapiens
  siRNA target sequence for HPS3 (NM_032383.3,1551-1569).
gataccagtgttaaaatca

SEQ ID NO: 400139 - DNA, 19 bp, Homo sapiens
  siRNA target sequence for HPS3 (NM_032383.3,1640-1658).
caaagagatggtagactat

SEQ ID NO: 400140 - DNA, 19 bp, Homo sapiens
  siRNA target sequence for HPS3 (NM_032383.3,1644-1662).
gagatggtagactatagca

SEQ ID NO: 400141 - DNA, 19 bp, Homo sapiens
  siRNA target sequence for HPS3 (NM_032383.3,1646-1664).
gatggtagactatagcaat

SEQ ID NO: 400142 - DNA, 19 bp, Homo sapiens
  siRNA target sequence for HPS3 (NM_032383.3,1650-1668).
gtagactatagcaatacct

SEQ ID NO: 400143 - DNA, 19 bp, Homo sapiens
  siRNA target sequence for HPS3 (NM_032383.3,1706-1724).
cagtgaggctcatctgtta

SEQ ID NO: 400144 - DNA, 19 bp, Homo sapiens
  siRNA target sequence for HPS3 (NM_032383.3,1708-1726).
gtgaggctcatctgttagt

SEQ ID NO: 400145 - DNA, 19 bp, Homo sapiens
  siRNA target sequence for HPS3 (NM_032383.3,1807-1825).
ggcaccttggggactgtta

SEQ ID NO: 400146 - DNA, 19 bp, Homo sapiens
  siRNA target sequence for HPS3 (NM_032383.3,1854-1872).
ctcaccttgccatactata

SEQ ID NO: 400147 - DNA, 19 bp, Homo sapiens
  siRNA target sequence for HPS3 (NM_032383.3,1923-1941).
gtagaggatggattacaga

SEQ ID NO: 400148 - DNA, 19 bp, Homo sapiens
  siRNA target sequence for HPS3 (NM_032383.3,1940-1958).
gaaatacgagagaggatta

SEQ ID NO: 400149 - DNA, 19 bp, Homo sapiens
  siRNA target sequence for HPS3 (NM_032383.3,1946-1964).
cgagagaggattaatcttt

SEQ ID NO: 400150 - DNA, 19 bp, Homo sapiens
  siRNA target sequence for HPS3 (NM_032383.3,1953-1971).
ggattaatcttttacatta

SEQ ID NO: 400151 - DNA, 19 bp, Homo sapiens
  siRNA target sequence for HPS3 (NM_032383.3,1961-1979).
cttttacattaatcattca

SEQ ID NO: 400152 - DNA, 19 bp, Homo sapiens
  siRNA target sequence for HPS3 (NM_032383.3,2080-2098).
gtagtccttctatgaagaa

SEQ ID NO: 400153 - DNA, 19 bp, Homo sapiens
  siRNA target sequence for HPS3 (NM_032383.3,2138-2156).
ggatacttctgggttttca

SEQ ID NO: 400154 - DNA, 19 bp, Homo sapiens
  siRNA target sequence for HPS3 (NM_032383.3,2139-2157).
gatacttctgggttttcat

SEQ ID NO: 400155 - DNA, 19 bp, Homo sapiens
  siRNA target sequence for HPS3 (NM_032383.3,2149-2167).
ggttttcatcgatcttagt

SEQ ID NO: 400156 - DNA, 19 bp, Homo sapiens
  siRNA target sequence for HPS3 (NM_032383.3,2252-2270).
gttggtatgtggcttcatt

SEQ ID NO: 400157 - DNA, 19 bp, Homo sapiens
  siRNA target sequence for HPS3 (NM_032383.3,2273-2291).
ggaacctcggctgttgatt

SEQ ID NO: 400158 - DNA, 19 bp, Homo sapiens
  siRNA target sequence for HPS3 (NM_032383.3,2320-2338).
ccgagcttgcacttcactt

SEQ ID NO: 400159 - DNA, 19 bp, Homo sapiens
  siRNA target sequence for HPS3 (NM_032383.3,2432-2450).
ggtgctttgtgctaaggat

SEQ ID NO: 400160 - DNA, 19 bp, Homo sapiens
  siRNA target sequence for HPS3 (NM_032383.3,2520-2538).
gtacttcaggaactctttt

SEQ ID NO: 400161 - DNA, 19 bp, Homo sapiens
  siRNA target sequence for HPS3 (NM_032383.3,2608-2626).
catcggaggatctgataaa

SEQ ID NO: 400162 - DNA, 19 bp, Homo sapiens
  siRNA target sequence for HPS3 (NM_032383.3,2632-2650).
gtagtcattatggcttaat

SEQ ID NO: 400163 - DNA, 19 bp, Homo sapiens
  siRNA target sequence for HPS3 (NM_032383.3,2635-2653).
gtcattatggcttaattta

SEQ ID NO: 400164 - DNA, 19 bp, Homo sapiens
  siRNA target sequence for HPS3 (NM_032383.3,2656-2674).
catgggttcacgtcgtaat

SEQ ID NO: 400165 - DNA, 19 bp, Homo sapiens
  siRNA target sequence for HPS3 (NM_032383.3,2660-2678).
ggttcacgtcgtaatatca

SEQ ID NO: 400166 - DNA, 19 bp, Homo sapiens
  siRNA target sequence for HPS3 (NM_032383.3,2661-2679).
gttcacgtcgtaatatcat

SEQ ID NO: 400167 - DNA, 19 bp, Homo sapiens
  siRNA target sequence for HPS3 (NM_032383.3,2666-2684).
cgtcgtaatatcatctgat

SEQ ID NO: 400168 - DNA, 19 bp, Homo sapiens
  siRNA target sequence for HPS3 (NM_032383.3,2667-2685).
gtcgtaatatcatctgatt

SEQ ID NO: 400169 - DNA, 19 bp, Homo sapiens
  siRNA target sequence for HPS3 (NM_032383.3,2669-2687).
cgtaatatcatctgattct

SEQ ID NO: 400170 - DNA, 19 bp, Homo sapiens
  siRNA target sequence for HPS3 (NM_032383.3,2682-2700).
gattctttagctgataaaa

SEQ ID NO: 400171 - DNA, 19 bp, Homo sapiens
  siRNA target sequence for HPS3 (NM_032383.3,2740-2758).
gtggtccttcatttgacat

SEQ ID NO: 400172 - DNA, 19 bp, Homo sapiens
  siRNA target sequence for HPS3 (NM_032383.3,2785-2803).
cactttcagaagacactat

SEQ ID NO: 400173 - DNA, 19 bp, Homo sapiens
  siRNA target sequence for HPS3 (NM_032383.3,2828-2846).
gtgtcgtacacgcttgaaa

SEQ ID NO: 400174 - DNA, 19 bp, Homo sapiens
  siRNA target sequence for HPS3 (NM_032383.3,2832-2850).
cgtacacgcttgaaagagt

SEQ ID NO: 400175 - DNA, 19 bp, Homo sapiens
  siRNA target sequence for HPS3 (NM_032383.3,2833-2851).
gtacacgcttgaaagagta

SEQ ID NO: 400176 - DNA, 19 bp, Homo sapiens
  siRNA target sequence for HPS3 (NM_032383.3,2836-2854).
cacgcttgaaagagtatga

SEQ ID NO: 400177 - DNA, 19 bp, Homo sapiens
  siRNA target sequence for HPS3 (NM_032383.3,2858-2876).
gtgcatagacatactgtta

SEQ ID NO: 400178 - DNA, 19 bp, Homo sapiens
  siRNA target sequence for HPS3 (NM_032383.3,2860-2878).
gcatagacatactgttaga

SEQ ID NO: 400179 - DNA, 19 bp, Homo sapiens
  siRNA target sequence for HPS3 (NM_032383.3,2893-2911).
cagtcattccatatgctaa

SEQ ID NO: 400180 - DNA, 19 bp, Homo sapiens
  siRNA target sequence for HPS3 (NM_032383.3,3074-3092).
gaatgttctcccagaagat

SEQ ID NO: 400181 - DNA, 19 bp, Homo sapiens
  siRNA target sequence for HPS3 (NM_032383.3,3090-3108).
gatggtactgcaacatttt

SEQ ID NO: 400182 - DNA, 19 bp, Homo sapiens
  siRNA target sequence for HPS3 (NM_032383.3,3125-3143).
ctattgcagtcgaaagaaa

SEQ ID NO: 400183 - DNA, 19 bp, Homo sapiens
  siRNA target sequence for HPS3 (NM_032383.3,3135-3153).
cgaaagaaaccattgactt

SEQ ID NO: 400184 - DNA, 19 bp, Homo sapiens
  siRNA target sequence for PCDHGC4 (NM_032406.1,2449-2467).
cctttgcaggctcaacaaa

SEQ ID NO: 400185 - DNA, 19 bp, Homo sapiens
  siRNA target sequence for PCDHGC4 (NM_032406.1,2450-2468).
ctttgcaggctcaacaaat

SEQ ID NO: 400186 - DNA, 19 bp, Homo sapiens
  siRNA target sequence for PCDHGC4 (NM_032406.1,2464-2482).
caaatgcttgagggttatt

SEQ ID NO: 400187 - DNA, 19 bp, Homo sapiens
  siRNA target sequence for PCDHGC4 (NM_032406.1,2469-2487).
gcttgagggttattctgat

SEQ ID NO: 400188 - DNA, 19 bp, Homo sapiens
  siRNA target sequence for PCDHGC4 (NM_032406.1,2531-2549).
cagtaagtgcccatagtga

SEQ ID NO: 400189 - DNA, 19 bp, Homo sapiens
  siRNA target sequence for PCDHGC4 (NM_032406.1,2584-2602).
gacgctgtgctttgtaact

SEQ ID NO: 400190 - DNA, 19 bp, Homo sapiens
  siRNA target sequence for PCDHGC4 (NM_032406.1,2586-2604).
cgctgtgctttgtaactgt

SEQ ID NO: 400191 - DNA, 19 bp, Homo sapiens
  siRNA target sequence for PCDHGC4 (NM_032406.1,2587-2605).
gctgtgctttgtaactgtt

SEQ ID NO: 400192 - DNA, 19 bp, Homo sapiens
  siRNA target sequence for PCDHGC5 (NM_032407.1,2521-2539).
cctcataagggattgaact

SEQ ID NO: 400193 - DNA, 19 bp, Homo sapiens
  siRNA target sequence for PCDHGC5 (NM_032407.1,2585-2603).
cccgattctcgggatcatt

SEQ ID NO: 400194 - DNA, 19 bp, Homo sapiens
  siRNA target sequence for ECRG4 (NM_032411.1,213-231).
gctgatgcttcaaaaacga

SEQ ID NO: 400195 - DNA, 19 bp, Homo sapiens
  siRNA target sequence for ECRG4 (NM_032411.1,239-257).
ctgttccaactaagactaa

SEQ ID NO: 400196 - DNA, 19 bp, Homo sapiens
  siRNA target sequence for ECRG4 (NM_032411.1,261-279).
ggccgttgatgagaataaa

SEQ ID NO: 400197 - DNA, 19 bp, Homo sapiens
  siRNA target sequence for ECRG4 (NM_032411.1,380-398).
gctttgacgaagcgaaatt

SEQ ID NO: 400198 - DNA, 19 bp, Homo sapiens
  siRNA target sequence for ECRG4 (NM_032411.1,381-399).
ctttgacgaagcgaaattt

SEQ ID NO: 400199 - DNA, 19 bp, Homo sapiens
  siRNA target sequence for ECRG4 (NM_032411.1,387-405).
cgaagcgaaatttgaagat

SEQ ID NO: 400200 - DNA, 19 bp, Homo sapiens
  siRNA target sequence for ECRG4 (NM_032411.1,411-429).
cacctattggcttaacaga

SEQ ID NO: 400201 - DNA, 19 bp, Homo sapiens
  siRNA target sequence for ECRG4 (NM_032411.1,430-448).
gatcgaaatggacatgaat

SEQ ID NO: 400202 - DNA, 19 bp, Homo sapiens
  siRNA target sequence for ECRG4 (NM_032411.1,433-451).
cgaaatggacatgaatact

SEQ ID NO: 400203 - DNA, 19 bp, Homo sapiens
  siRNA target sequence for ECRG4 (NM_032411.1,445-463).
gaatactatggcgattact

SEQ ID NO: 400204 - DNA, 19 bp, Homo sapiens
  siRNA target sequence for ECRG4 (NM_032411.1,462-480).
ctaccaacgtcactatgat

SEQ ID NO: 400205 - DNA, 19 bp, Homo sapiens
  siRNA target sequence for ECRG4 (NM_032411.1,465-483).
ccaacgtcactatgatgaa

SEQ ID NO: 400206 - DNA, 19 bp, Homo sapiens
  siRNA target sequence for ECRG4 (NM_032411.1,533-551).
gcgtcaactacgatgacta

SEQ ID NO: 400207 - DNA, 19 bp, Homo sapiens
  siRNA target sequence for NMES1 (NM_032413.2,352-370).
gatccttgatcgaaaaaaa

SEQ ID NO: 400208 - DNA, 19 bp, Homo sapiens
  siRNA target sequence for SPANXD (NM_032417.2,145-163).
cctgctccgaaaaaactaa

SEQ ID NO: 400209 - DNA, 19 bp, Homo sapiens
  siRNA target sequence for SPANXD (NM_032417.2,146-164).
ctgctccgaaaaaactaaa

SEQ ID NO: 400210 - DNA, 19 bp, Homo sapiens
  siRNA target sequence for KIAA1827 (NM_032423.1,1994-2012).
ctcttcagtagcaattcaa

SEQ ID NO: 400211 - DNA, 19 bp, Homo sapiens
  siRNA target sequence for KIAA1827 (NM_032423.1,2339-2357).
gtgcgttccagcctcataa

SEQ ID NO: 400212 - DNA, 19 bp, Homo sapiens
  siRNA target sequence for KIAA1827 (NM_032423.1,2349-2367).
gcctcataacccatcagtt

SEQ ID NO: 400213 - DNA, 19 bp, Homo sapiens
  siRNA target sequence for KIAA1827 (NM_032423.1,2414-2432).
gtctttgggcgcaagtgtt

SEQ ID NO: 400214 - DNA, 19 bp, Homo sapiens
  siRNA target sequence for KIAA1827 (NM_032423.1,2509-2527).
gaaatcagaccttatacga

SEQ ID NO: 400215 - DNA, 19 bp, Homo sapiens
  siRNA target sequence for KIAA1827 (NM_032423.1,2578-2596).
cacagcgtttagagagttt

SEQ ID NO: 400216 - DNA, 19 bp, Homo sapiens
  siRNA target sequence for KIAA1827 (NM_032423.1,2770-2788).
cctggtatgccatcagaaa

SEQ ID NO: 400217 - DNA, 19 bp, Homo sapiens
  siRNA target sequence for KIAA1827 (NM_032423.1,2771-2789).
ctggtatgccatcagaaaa

SEQ ID NO: 400218 - DNA, 19 bp, Homo sapiens
  siRNA target sequence for KIAA1827 (NM_032423.1,2843-2861).
caagcatcataccttacaa

SEQ ID NO: 400219 - DNA, 19 bp, Homo sapiens
  siRNA target sequence for KIAA1827 (NM_032423.1,3025-3043).
caccaatcaccatagaatt

SEQ ID NO: 400220 - DNA, 19 bp, Homo sapiens
  siRNA target sequence for HRD1 (NM_032431.1,219-237).
gcatggcagtcctgtacat

SEQ ID NO: 400221 - DNA, 19 bp, Homo sapiens
  siRNA target sequence for HRD1 (NM_032431.1,274-292).
gatgggcaaggtgttcttt

SEQ ID NO: 400222 - DNA, 19 bp, Homo sapiens
  siRNA target sequence for HRD1 (NM_032431.1,372-390).
ccgtttttcgggatgactt

SEQ ID NO: 400223 - DNA, 19 bp, Homo sapiens
  siRNA target sequence for HRD1 (NM_032431.1,510-528).
gccgcattgtctctcttat

SEQ ID NO: 400224 - DNA, 19 bp, Homo sapiens
  siRNA target sequence for HRD1 (NM_032431.1,560-578).
gtcagccacgcctatcaca

SEQ ID NO: 400225 - DNA, 19 bp, Homo sapiens
  siRNA target sequence for HRD1 (NM_032431.1,650-668).
ctcaccatcttcatcaagt

SEQ ID NO: 400226 - DNA, 19 bp, Homo sapiens
  siRNA target sequence for HRD1 (NM_032431.1,654-672).
ccatcttcatcaagtatgt

SEQ ID NO: 400227 - DNA, 19 bp, Homo sapiens
  siRNA target sequence for HRD1 (NM_032431.1,893-911).
cgagccatccgcaacatga

SEQ ID NO: 400228 - DNA, 19 bp, Homo sapiens
  siRNA target sequence for HRD1 (NM_032431.1,956-974).
gacaatgtctgcatcatct

SEQ ID NO: 400229 - DNA, 19 bp, Homo sapiens
  siRNA target sequence for HRD1 (NM_032431.1,1723-1741).
ggagactgccactacagtt

SEQ ID NO: 400230 - DNA, 19 bp, Homo sapiens
  siRNA target sequence for HRD1 (NM_032431.1,1726-1744).
gactgccactacagttgtt

SEQ ID NO: 400231 - DNA, 19 bp, Homo sapiens
  siRNA target sequence for ZNF512 (NM_032434.2,122-140).
cgggacccacaacctttaa

SEQ ID NO: 400232 - DNA, 19 bp, Homo sapiens
  siRNA target sequence for ZNF512 (NM_032434.2,125-143).
gacccacaacctttaagca

SEQ ID NO: 400233 - DNA, 19 bp, Homo sapiens
  siRNA target sequence for ZNF512 (NM_032434.2,158-176).
ggatcgtgggagctaagaa

SEQ ID NO: 400234 - DNA, 19 bp, Homo sapiens
  siRNA target sequence for ZNF512 (NM_032434.2,159-177).
gatcgtgggagctaagaat

SEQ ID NO: 400235 - DNA, 19 bp, Homo sapiens
  siRNA target sequence for ZNF512 (NM_032434.2,182-200).
ggacccagtgctccataaa

SEQ ID NO: 400236 - DNA, 19 bp, Homo sapiens
  siRNA target sequence for ZNF512 (NM_032434.2,187-205).
cagtgctccataaaggata

SEQ ID NO: 400237 - DNA, 19 bp, Homo sapiens
  siRNA target sequence for ZNF512 (NM_032434.2,194-212).
ccataaaggataatagttt

SEQ ID NO: 400238 - DNA, 19 bp, Homo sapiens
  siRNA target sequence for ZNF512 (NM_032434.2,216-234).
gtacactatccctcatgat

SEQ ID NO: 400239 - DNA, 19 bp, Homo sapiens
  siRNA target sequence for ZNF512 (NM_032434.2,226-244).
cctcatgatgactccttaa

SEQ ID NO: 400240 - DNA, 19 bp, Homo sapiens
  siRNA target sequence for ZNF512 (NM_032434.2,281-299).
gtgattttccagcatcttt

SEQ ID NO: 400241 - DNA, 19 bp, Homo sapiens
  siRNA target sequence for ZNF512 (NM_032434.2,292-310).
gcatctttccgaaaatcta

SEQ ID NO: 400242 - DNA, 19 bp, Homo sapiens
  siRNA target sequence for ZNF512 (NM_032434.2,308-326).
ctacctactggatgaagat

SEQ ID NO: 400243 - DNA, 19 bp, Homo sapiens
  siRNA target sequence for ZNF512 (NM_032434.2,339-357).
gccagctgctacttctcat

SEQ ID NO: 400244 - DNA, 19 bp, Homo sapiens
  siRNA target sequence for ZNF512 (NM_032434.2,441-459).
gaagaagcataagctttat

SEQ ID NO: 400245 - DNA, 19 bp, Homo sapiens
  siRNA target sequence for ZNF512 (NM_032434.2,465-483).
gaagcaacggcctaaaact

SEQ ID NO: 400246 - DNA, 19 bp, Homo sapiens
  siRNA target sequence for ZNF512 (NM_032434.2,518-536).
ggaaggaaccaccagttta

SEQ ID NO: 400247 - DNA, 19 bp, Homo sapiens
  siRNA target sequence for ZNF512 (NM_032434.2,519-537).
gaaggaaccaccagtttat

SEQ ID NO: 400248 - DNA, 19 bp, Homo sapiens
  siRNA target sequence for ZNF512 (NM_032434.2,552-570).
ggaggagcaatggtactta

SEQ ID NO: 400249 - DNA, 19 bp, Homo sapiens
  siRNA target sequence for ZNF512 (NM_032434.2,555-573).
ggagcaatggtacttagaa

SEQ ID NO: 400250 - DNA, 19 bp, Homo sapiens
  siRNA target sequence for ZNF512 (NM_032434.2,629-647).
ccatagagggtttaaagaa

SEQ ID NO: 400251 - DNA, 19 bp, Homo sapiens
  siRNA target sequence for ZNF512 (NM_032434.2,630-648).
catagagggtttaaagaaa

SEQ ID NO: 400252 - DNA, 19 bp, Homo sapiens
  siRNA target sequence for ZNF512 (NM_032434.2,716-734).
cagggatgaagtatcatgt

SEQ ID NO: 400253 - DNA, 19 bp, Homo sapiens
  siRNA target sequence for ZNF512 (NM_032434.2,719-737).
ggatgaagtatcatgtcat

SEQ ID NO: 400254 - DNA, 19 bp, Homo sapiens
  siRNA target sequence for ZNF512 (NM_032434.2,801-819).
ggaaaggctccgaacagtt

SEQ ID NO: 400255 - DNA, 19 bp, Homo sapiens
  siRNA target sequence for ZNF512 (NM_032434.2,806-824).
ggctccgaacagttctaaa

SEQ ID NO: 400256 - DNA, 19 bp, Homo sapiens
  siRNA target sequence for ZNF512 (NM_032434.2,808-826).
ctccgaacagttctaaaga

SEQ ID NO: 400257 - DNA, 19 bp, Homo sapiens
  siRNA target sequence for ZNF512 (NM_032434.2,810-828).
ccgaacagttctaaagaga

SEQ ID NO: 400258 - DNA, 19 bp, Homo sapiens
  siRNA target sequence for ZNF512 (NM_032434.2,875-893).
ccagcatcatgggatatct

SEQ ID NO: 400259 - DNA, 19 bp, Homo sapiens
  siRNA target sequence for ZNF512 (NM_032434.2,878-896).
gcatcatgggatatctcta

SEQ ID NO: 400260 - DNA, 19 bp, Homo sapiens
  siRNA target sequence for ZNF512 (NM_032434.2,980-998).
cgaaggctggacttgcata

SEQ ID NO: 400261 - DNA, 19 bp, Homo sapiens
  siRNA target sequence for ZNF512 (NM_032434.2,981-999).
gaaggctggacttgcatat

SEQ ID NO: 400262 - DNA, 19 bp, Homo sapiens
  siRNA target sequence for ZNF512 (NM_032434.2,1012-1030).
gagcatgggcctatatcct

SEQ ID NO: 400263 - DNA, 19 bp, Homo sapiens
  siRNA target sequence for ZNF512 (NM_032434.2,1071-1089).
gaacctagagtcaaagagt

SEQ ID NO: 400264 - DNA, 19 bp, Homo sapiens
  siRNA target sequence for ZNF512 (NM_032434.2,1104-1122).
gagacgttctgccaagata

SEQ ID NO: 400265 - DNA, 19 bp, Homo sapiens
  siRNA target sequence for ZNF512 (NM_032434.2,1115-1133).
ccaagatagctgtatacca

SEQ ID NO: 400266 - DNA, 19 bp, Homo sapiens
  siRNA target sequence for ZNF512 (NM_032434.2,1204-1222).
cctgatgatcgaaagttaa

SEQ ID NO: 400267 - DNA, 19 bp, Homo sapiens
  siRNA target sequence for ZNF512 (NM_032434.2,1205-1223).
ctgatgatcgaaagttaaa

SEQ ID NO: 400268 - DNA, 19 bp, Homo sapiens
  siRNA target sequence for ZNF512 (NM_032434.2,1207-1225).
gatgatcgaaagttaaaat

SEQ ID NO: 400269 - DNA, 19 bp, Homo sapiens
  siRNA target sequence for ZNF512 (NM_032434.2,1210-1228).
gatcgaaagttaaaatata

SEQ ID NO: 400270 - DNA, 19 bp, Homo sapiens
  siRNA target sequence for ZNF512 (NM_032434.2,1247-1265).
ccttcagccaggaagtact

SEQ ID NO: 400271 - DNA, 19 bp, Homo sapiens
  siRNA target sequence for ZNF512 (NM_032434.2,1248-1266).
cttcagccaggaagtacta

SEQ ID NO: 400272 - DNA, 19 bp, Homo sapiens
  siRNA target sequence for ZNF512 (NM_032434.2,1253-1271).
gccaggaagtactacataa

SEQ ID NO: 400273 - DNA, 19 bp, Homo sapiens
  siRNA target sequence for ZNF512 (NM_032434.2,1330-1348).
gctgtctacagcagtgtat

SEQ ID NO: 400274 - DNA, 19 bp, Homo sapiens
  siRNA target sequence for ZNF512 (NM_032434.2,1360-1378).
gctcacctgggctcttgta

SEQ ID NO: 400275 - DNA, 19 bp, Homo sapiens
  siRNA target sequence for ZNF512 (NM_032434.2,1373-1391).
cttgtacattgggaaactt

SEQ ID NO: 400276 - DNA, 19 bp, Homo sapiens
  siRNA target sequence for ZNF512 (NM_032434.2,1448-1466).
gtgtcaagtatcacatcaa

SEQ ID NO: 400277 - DNA, 19 bp, Homo sapiens
  siRNA target sequence for ZNF512 (NM_032434.2,1480-1498).
gaggactggttcgttgtaa

SEQ ID NO: 400278 - DNA, 19 bp, Homo sapiens
  siRNA target sequence for ZNF512 (NM_032434.2,1491-1509).
cgttgtaaacccaacaaca

SEQ ID NO: 400279 - DNA, 19 bp, Homo sapiens
  siRNA target sequence for ZNF512 (NM_032434.2,1733-1751).
cagcacagttccagaaagt

SEQ ID NO: 400280 - DNA, 19 bp, Homo sapiens
  siRNA target sequence for ZNF512 (NM_032434.2,1736-1754).
cacagttccagaaagtaaa

SEQ ID NO: 400281 - DNA, 19 bp, Homo sapiens
  siRNA target sequence for ZNF512 (NM_032434.2,1750-1768).
gtaaagcccccaaagacta

SEQ ID NO: 400282 - DNA, 19 bp, Homo sapiens
  siRNA target sequence for ZNF512 (NM_032434.2,1755-1773).
gcccccaaagactaatcat

SEQ ID NO: 400283 - DNA, 19 bp, Homo sapiens
  siRNA target sequence for ZNF512 (NM_032434.2,1758-1776).
cccaaagactaatcataaa

SEQ ID NO: 400284 - DNA, 19 bp, Homo sapiens
  siRNA target sequence for KIAA1796 (NM_032439.1,366-384).
ccgggacgggaacaaatca

SEQ ID NO: 400285 - DNA, 19 bp, Homo sapiens
  siRNA target sequence for KIAA1796 (NM_032439.1,415-433).
cttcctgtaccacataaca

SEQ ID NO: 400286 - DNA, 19 bp, Homo sapiens
  siRNA target sequence for KIAA1796 (NM_032439.1,419-437).
ctgtaccacataacatcaa

SEQ ID NO: 400287 - DNA, 19 bp, Homo sapiens
  siRNA target sequence for KIAA1796 (NM_032439.1,421-439).
gtaccacataacatcaaaa

SEQ ID NO: 400288 - DNA, 19 bp, Homo sapiens
  siRNA target sequence for KIAA1796 (NM_032439.1,453-471).
gtgtgactcattcaagatt

SEQ ID NO: 400289 - DNA, 19 bp, Homo sapiens
  siRNA target sequence for KIAA1796 (NM_032439.1,498-516).
ggatcgcattacacactat

SEQ ID NO: 400290 - DNA, 19 bp, Homo sapiens
  siRNA target sequence for KIAA1796 (NM_032439.1,502-520).
cgcattacacactatttta

SEQ ID NO: 400291 - DNA, 19 bp, Homo sapiens
  siRNA target sequence for KIAA1796 (NM_032439.1,540-558).
gaacaagaactccaataaa

SEQ ID NO: 400292 - DNA, 19 bp, Homo sapiens
  siRNA target sequence for KIAA1796 (NM_032439.1,697-715).
gattatgttgtgtctgaat

SEQ ID NO: 400293 - DNA, 19 bp, Homo sapiens
  siRNA target sequence for KIAA1796 (NM_032439.1,735-753).
ctgcaccgcagactattca

SEQ ID NO: 400294 - DNA, 19 bp, Homo sapiens
  siRNA target sequence for KIAA1796 (NM_032439.1,737-755).
gcaccgcagactattcaaa

SEQ ID NO: 400295 - DNA, 19 bp, Homo sapiens
  siRNA target sequence for KIAA1796 (NM_032439.1,738-756).
caccgcagactattcaaaa

SEQ ID NO: 400296 - DNA, 19 bp, Homo sapiens
  siRNA target sequence for KIAA1796 (NM_032439.1,740-758).
ccgcagactattcaaaagt

SEQ ID NO: 400297 - DNA, 19 bp, Homo sapiens
  siRNA target sequence for KIAA1796 (NM_032439.1,747-765).
ctattcaaaagttcatcta

SEQ ID NO: 400298 - DNA, 19 bp, Homo sapiens
  siRNA target sequence for KIAA1796 (NM_032439.1,796-814).
gcaggacgcatgcttaagt

SEQ ID NO: 400299 - DNA, 19 bp, Homo sapiens
  siRNA target sequence for KIAA1796 (NM_032439.1,799-817).
ggacgcatgcttaagtttt

SEQ ID NO: 400300 - DNA, 19 bp, Homo sapiens
  siRNA target sequence for KIAA1796 (NM_032439.1,915-933).
ccatggctctcctatcagt

SEQ ID NO: 400301 - DNA, 19 bp, Homo sapiens
  siRNA target sequence for KIAA1796 (NM_032439.1,993-1011).
ccaggattcaccttatgga

SEQ ID NO: 400302 - DNA, 19 bp, Homo sapiens
  siRNA target sequence for KIAA1796 (NM_032439.1,994-1012).
caggattcaccttatggaa

SEQ ID NO: 400303 - DNA, 19 bp, Homo sapiens
  siRNA target sequence for KIAA1796 (NM_032439.1,1042-1060).
ctttttaaccccaatacta

SEQ ID NO: 400304 - DNA, 19 bp, Homo sapiens
  siRNA target sequence for KIAA1796 (NM_032439.1,1052-1070).
ccaatactaacttatactt

SEQ ID NO: 400305 - DNA, 19 bp, Homo sapiens
  siRNA target sequence for KIAA1796 (NM_032439.1,1053-1071).
caatactaacttatacttt

SEQ ID NO: 400306 - DNA, 19 bp, Homo sapiens
  siRNA target sequence for KIAA1796 (NM_032439.1,1085-1103).
gtatgtacactgcttatca

SEQ ID NO: 400307 - DNA, 19 bp, Homo sapiens
  siRNA target sequence for KIAA1796 (NM_032439.1,1089-1107).
gtacactgcttatcattat

SEQ ID NO: 400308 - DNA, 19 bp, Homo sapiens
  siRNA target sequence for KIAA1796 (NM_032439.1,1161-1179).
gcgccttcctcaactaaat

SEQ ID NO: 400309 - DNA, 19 bp, Homo sapiens
  siRNA target sequence for KIAA1796 (NM_032439.1,1162-1180).
cgccttcctcaactaaatt

SEQ ID NO: 400310 - DNA, 19 bp, Homo sapiens
  siRNA target sequence for KIAA1796 (NM_032439.1,1164-1182).
ccttcctcaactaaattct

SEQ ID NO: 400311 - DNA, 19 bp, Homo sapiens
  siRNA target sequence for KIAA1796 (NM_032439.1,1200-1218).
gacctgtacagaagaagat

SEQ ID NO: 400312 - DNA, 19 bp, Homo sapiens
  siRNA target sequence for KIAA1796 (NM_032439.1,1294-1312).
ggcaccgtggcagaaatca

SEQ ID NO: 400313 - DNA, 19 bp, Homo sapiens
  siRNA target sequence for KIAA1796 (NM_032439.1,1316-1334).
gtcatcagctcatgagttt

SEQ ID NO: 400314 - DNA, 19 bp, Homo sapiens
  siRNA target sequence for KIAA1796 (NM_032439.1,1329-1347).
gagtttgtctactgcaaat

SEQ ID NO: 400315 - DNA, 19 bp, Homo sapiens
  siRNA target sequence for KIAA1796 (NM_032439.1,1368-1386).
caaaacctgtaatatcagt

SEQ ID NO: 400316 - DNA, 19 bp, Homo sapiens
  siRNA target sequence for MLR2 (NM_032440.1,552-570).
gcgaatgatccaacaattt

SEQ ID NO: 400317 - DNA, 19 bp, Homo sapiens
  siRNA target sequence for MLR2 (NM_032440.1,637-655).
caaagcctgccgaaagcat

SEQ ID NO: 400318 - DNA, 19 bp, Homo sapiens
  siRNA target sequence for MLR2 (NM_032440.1,734-752).
cacctctggaccttactgt

SEQ ID NO: 400319 - DNA, 19 bp, Homo sapiens
  siRNA target sequence for MLR2 (NM_032440.1,767-785).
cagaacctagcgaacaaga

SEQ ID NO: 400320 - DNA, 19 bp, Homo sapiens
  siRNA target sequence for MLR2 (NM_032440.1,1006-1024).
gctcgatccctgcagatta

SEQ ID NO: 400321 - DNA, 19 bp, Homo sapiens
  siRNA target sequence for MLR2 (NM_032440.1,1010-1028).
gatccctgcagattagtga

SEQ ID NO: 400322 - DNA, 19 bp, Homo sapiens
  siRNA target sequence for MLR2 (NM_032440.1,1033-1051).
ctactgagcagaaaccaat

SEQ ID NO: 400323 - DNA, 19 bp, Homo sapiens
  siRNA target sequence for MLR2 (NM_032440.1,1073-1091).
ggccatctggattacagaa

SEQ ID NO: 400324 - DNA, 19 bp, Homo sapiens
  siRNA target sequence for MLR2 (NM_032440.1,1074-1092).
gccatctggattacagaat

SEQ ID NO: 400325 - DNA, 19 bp, Homo sapiens
  siRNA target sequence for MLR2 (NM_032440.1,1076-1094).
catctggattacagaatca

SEQ ID NO: 400326 - DNA, 19 bp, Homo sapiens
  siRNA target sequence for MLR2 (NM_032440.1,1096-1114).
ggacaacacttaatattat

SEQ ID NO: 400327 - DNA, 19 bp, Homo sapiens
  siRNA target sequence for MLR2 (NM_032440.1,1127-1145).
cttgggcaaaaccacatta

SEQ ID NO: 400328 - DNA, 19 bp, Homo sapiens
  siRNA target sequence for MLR2 (NM_032440.1,1156-1174).
ctcagccgtatgaagttca

SEQ ID NO: 400329 - DNA, 19 bp, Homo sapiens
  siRNA target sequence for MLR2 (NM_032440.1,1318-1336).
gttcgaggaatggatcttt

SEQ ID NO: 400330 - DNA, 19 bp, Homo sapiens
  siRNA target sequence for MLR2 (NM_032440.1,1321-1339).
cgaggaatggatctttctt

SEQ ID NO: 400331 - DNA, 19 bp, Homo sapiens
  siRNA target sequence for MLR2 (NM_032440.1,1354-1372).
ggtgatcagtacagctata

SEQ ID NO: 400332 - DNA, 19 bp, Homo sapiens
  siRNA target sequence for MLR2 (NM_032440.1,1367-1385).
gctatagctctttggtaat

SEQ ID NO: 400333 - DNA, 19 bp, Homo sapiens
  siRNA target sequence for MLR2 (NM_032440.1,1397-1415).
cggagagcgcgcttagtaa

SEQ ID NO: 400334 - DNA, 19 bp, Homo sapiens
  siRNA target sequence for MLR2 (NM_032440.1,1398-1416).
ggagagcgcgcttagtaaa

SEQ ID NO: 400335 - DNA, 19 bp, Homo sapiens
  siRNA target sequence for MLR2 (NM_032440.1,1401-1419).
gagcgcgcttagtaaaaaa

SEQ ID NO: 400336 - DNA, 19 bp, Homo sapiens
  siRNA target sequence for MLR2 (NM_032440.1,1403-1421).
gcgcgcttagtaaaaaatt

SEQ ID NO: 400337 - DNA, 19 bp, Homo sapiens
  siRNA target sequence for MLR2 (NM_032440.1,1404-1422).
cgcgcttagtaaaaaatta

SEQ ID NO: 400338 - DNA, 19 bp, Homo sapiens
  siRNA target sequence for MLR2 (NM_032440.1,1405-1423).
gcgcttagtaaaaaattaa

SEQ ID NO: 400339 - DNA, 19 bp, Homo sapiens
  siRNA target sequence for MLR2 (NM_032440.1,1424-1442).
gggctattcttccaaaaca

SEQ ID NO: 400340 - DNA, 19 bp, Homo sapiens
  siRNA target sequence for MLR2 (NM_032440.1,1554-1572).
caagcagcctcggaagaaa

SEQ ID NO: 400341 - DNA, 19 bp, Homo sapiens
  siRNA target sequence for MLR2 (NM_032440.1,1569-1587).
gaaaagagggcgttacaga

SEQ ID NO: 400342 - DNA, 19 bp, Homo sapiens
  siRNA target sequence for MLR2 (NM_032440.1,1577-1595).
ggcgttacagacagtacaa

SEQ ID NO: 400343 - DNA, 19 bp, Homo sapiens
  siRNA target sequence for MLR2 (NM_032440.1,1579-1597).
cgttacagacagtacaaca

SEQ ID NO: 400344 - DNA, 19 bp, Homo sapiens
  siRNA target sequence for MLR2 (NM_032440.1,1615-1633).
gcaatctcagtggttatga

SEQ ID NO: 400345 - DNA, 19 bp, Homo sapiens
  siRNA target sequence for MLR2 (NM_032440.1,1683-1701).
cagtacactggagtacaaa

SEQ ID NO: 400346 - DNA, 19 bp, Homo sapiens
  siRNA target sequence for MLR2 (NM_032440.1,1761-1779).
gtcggaggggccagatgtt

SEQ ID NO: 400347 - DNA, 19 bp, Homo sapiens
  siRNA target sequence for MLR2 (NM_032440.1,1781-1799).
ctgtaaagattgaattaga

SEQ ID NO: 400348 - DNA, 19 bp, Homo sapiens
  siRNA target sequence for MLR2 (NM_032440.1,1806-1824).
gggagaggcagcacaaagt

SEQ ID NO: 400349 - DNA, 19 bp, Homo sapiens
  siRNA target sequence for JPHL1 (NM_032452.1,2119-2137).
gctcgaatggccaaactga

SEQ ID NO: 400350 - DNA, 19 bp, Homo sapiens
  siRNA target sequence for JPHL1 (NM_032452.1,2226-2244).
ggacagccctggggtatat

SEQ ID NO: 400351 - DNA, 19 bp, Homo sapiens
  siRNA target sequence for MRPL38 (NM_032478.2,731-749).
gcggacctaccgagagtat

SEQ ID NO: 400352 - DNA, 19 bp, Homo sapiens
  siRNA target sequence for MRPL38 (NM_032478.2,732-750).
cggacctaccgagagtatt

SEQ ID NO: 400353 - DNA, 19 bp, Homo sapiens
  siRNA target sequence for MRPL38 (NM_032478.2,733-751).
ggacctaccgagagtattt

SEQ ID NO: 400354 - DNA, 19 bp, Homo sapiens
  siRNA target sequence for MRPL38 (NM_032478.2,1341-1359).
caggaccagccgattgact

SEQ ID NO: 400355 - DNA, 19 bp, Homo sapiens
  siRNA target sequence for MRPL38 (NM_032478.2,1403-1421).
gcggaccttccgcactttt

SEQ ID NO: 400356 - DNA, 19 bp, Homo sapiens
  siRNA target sequence for MRPL38 (NM_032478.2,1405-1423).
ggaccttccgcacttttga

SEQ ID NO: 400357 - DNA, 19 bp, Homo sapiens
  siRNA target sequence for MRPL38 (NM_032478.2,1530-1548).
cgggagccggtgtttgagt

SEQ ID NO: 400358 - DNA, 19 bp, Homo sapiens
  siRNA target sequence for HTPAP (NM_032483.2,165-183).
ccaccaagccgatgtttgt

SEQ ID NO: 400359 - DNA, 19 bp, Homo sapiens
  siRNA target sequence for HTPAP (NM_032483.2,166-184).
caccaagccgatgtttgtt

SEQ ID NO: 400360 - DNA, 19 bp, Homo sapiens
  siRNA target sequence for HTPAP (NM_032483.2,168-186).
ccaagccgatgtttgttat

SEQ ID NO: 400361 - DNA, 19 bp, Homo sapiens
  siRNA target sequence for HTPAP (NM_032483.2,172-190).
gccgatgtttgttattgca

SEQ ID NO: 400362 - DNA, 19 bp, Homo sapiens
  siRNA target sequence for HTPAP (NM_032483.2,173-191).
ccgatgtttgttattgcat

SEQ ID NO: 400363 - DNA, 19 bp, Homo sapiens
  siRNA target sequence for HTPAP (NM_032483.2,174-192).
cgatgtttgttattgcatt

SEQ ID NO: 400364 - DNA, 19 bp, Homo sapiens
  siRNA target sequence for HTPAP (NM_032483.2,290-308).
gctctgaatggcgtcttta

SEQ ID NO: 400365 - DNA, 19 bp, Homo sapiens
  siRNA target sequence for HTPAP (NM_032483.2,300-318).
gcgtctttaccaacacaat

SEQ ID NO: 400366 - DNA, 19 bp, Homo sapiens
  siRNA target sequence for HTPAP (NM_032483.2,301-319).
cgtctttaccaacacaata

SEQ ID NO: 400367 - DNA, 19 bp, Homo sapiens
  siRNA target sequence for HTPAP (NM_032483.2,380-398).
gcccattctgacttgatgt

SEQ ID NO: 400368 - DNA, 19 bp, Homo sapiens
  siRNA target sequence for HTPAP (NM_032483.2,439-457).
cttccccagtggacattct

SEQ ID NO: 400369 - DNA, 19 bp, Homo sapiens
  siRNA target sequence for HTPAP (NM_032483.2,600-618).
cccgcacatgtgactacaa

SEQ ID NO: 400370 - DNA, 19 bp, Homo sapiens
  siRNA target sequence for MGC3248 (NM_032486.2,67-85).
ggcgagctgctctacaaca

SEQ ID NO: 400371 - DNA, 19 bp, Homo sapiens
  siRNA target sequence for MGC3248 (NM_032486.2,102-120).
gacggcatctgggaacaaa

SEQ ID NO: 400372 - DNA, 19 bp, Homo sapiens
  siRNA target sequence for MGC3248 (NM_032486.2,104-122).
cggcatctgggaacaaagt

SEQ ID NO: 400373 - DNA, 19 bp, Homo sapiens
  siRNA target sequence for MGC3248 (NM_032486.2,149-167).
gccagaacatcgttctcaa

SEQ ID NO: 400374 - DNA, 19 bp, Homo sapiens
  siRNA target sequence for MGC3248 (NM_032486.2,150-168).
ccagaacatcgttctcaat

SEQ ID NO: 400375 - DNA, 19 bp, Homo sapiens
  siRNA target sequence for MGC3248 (NM_032486.2,170-188).
gcaagaccattgtgatgaa

SEQ ID NO: 400376 - DNA, 19 bp, Homo sapiens
  siRNA target sequence for MGC3248 (NM_032486.2,224-242).
gagttggacgtcattgtgt

SEQ ID NO: 400377 - DNA, 19 bp, Homo sapiens
  siRNA target sequence for MGC3248 (NM_032486.2,232-250).
cgtcattgtgttgtgaaaa

SEQ ID NO: 400378 - DNA, 19 bp, Homo sapiens
  siRNA target sequence for MGC3248 (NM_032486.2,246-264).
gaaaagtcgtagtgtcata

SEQ ID NO: 400379 - DNA, 19 bp, Homo sapiens
  siRNA target sequence for MGC3248 (NM_032486.2,268-286).
ccaccattcaagaagttca

SEQ ID NO: 400380 - DNA, 19 bp, Homo sapiens
  siRNA target sequence for MGC3248 (NM_032486.2,303-321).
ctttcctttacatattgga

SEQ ID NO: 400381 - DNA, 19 bp, Homo sapiens
  siRNA target sequence for MGC3248 (NM_032486.2,328-346).
gtctttattgaggaagatt

SEQ ID NO: 400382 - DNA, 19 bp, Homo sapiens
  siRNA target sequence for MGC3248 (NM_032486.2,330-348).
ctttattgaggaagattgt

SEQ ID NO: 400383 - DNA, 19 bp, Homo sapiens
  siRNA target sequence for MGC3248 (NM_032486.2,410-428).
gccgatgtgtgttgaaaga

SEQ ID NO: 400384 - DNA, 19 bp, Homo sapiens
  siRNA target sequence for MGC3248 (NM_032486.2,431-449).
gctgcaaaattcttgacaa

SEQ ID NO: 400385 - DNA, 19 bp, Homo sapiens
  siRNA target sequence for MGC3248 (NM_032486.2,567-585).
gagctactaccagaagttt

SEQ ID NO: 400386 - DNA, 19 bp, Homo sapiens
  siRNA target sequence for C14orf142 (NM_032490.2,394-412).
gctgttgtatccttattgt

SEQ ID NO: 400387 - DNA, 19 bp, Homo sapiens
  siRNA target sequence for C14orf142 (NM_032490.2,411-429).
gtcacactaggacatttaa

SEQ ID NO: 400388 - DNA, 19 bp, Homo sapiens
  siRNA target sequence for C14orf142 (NM_032490.2,415-433).
cactaggacatttaaggaa

SEQ ID NO: 400389 - DNA, 19 bp, Homo sapiens
  siRNA target sequence for C14orf142 (NM_032490.2,436-454).
cttatgctctaatttggaa

SEQ ID NO: 400390 - DNA, 19 bp, Homo sapiens
  siRNA target sequence for C14orf142 (NM_032490.2,442-460).
ctctaatttggaaaaagca

SEQ ID NO: 400391 - DNA, 19 bp, Homo sapiens
  siRNA target sequence for C14orf142 (NM_032490.2,469-487).
gttctcctgggacaatttt

SEQ ID NO: 400392 - DNA, 19 bp, Homo sapiens
  siRNA target sequence for C14orf142 (NM_032490.2,512-530).
gtttctagcaaagatagta

SEQ ID NO: 400393 - DNA, 19 bp, Homo sapiens
  siRNA target sequence for C14orf142 (NM_032490.2,524-542).
gatagtaaaggcttagaaa

SEQ ID NO: 400394 - DNA, 19 bp, Homo sapiens
  siRNA target sequence for GL009 (NM_032492.2,317-335).
ggctcttgtcacatgatca

SEQ ID NO: 400395 - DNA, 19 bp, Homo sapiens
  siRNA target sequence for GL009 (NM_032492.2,337-355).
gtggccatgccctatcagt

SEQ ID NO: 400396 - DNA, 19 bp, Homo sapiens
  siRNA target sequence for GL009 (NM_032492.2,356-374).
gggaatacccgtatttgct

SEQ ID NO: 400397 - DNA, 19 bp, Homo sapiens
  siRNA target sequence for GL009 (NM_032492.2,364-382).
ccgtatttgctgagcattt

SEQ ID NO: 400398 - DNA, 19 bp, Homo sapiens
  siRNA target sequence for GL009 (NM_032492.2,412-430).
ccccgcaacaacattagct

SEQ ID NO: 400399 - DNA, 19 bp, Homo sapiens
  siRNA target sequence for GL009 (NM_032492.2,452-470).
gcatgggactcttttccat

SEQ ID NO: 400400 - DNA, 19 bp, Homo sapiens
  siRNA target sequence for GL009 (NM_032492.2,468-486).
catcgctccactcatttat

SEQ ID NO: 400401 - DNA, 19 bp, Homo sapiens
  siRNA target sequence for GL009 (NM_032492.2,563-581).
ctgccgtttccatcatgta

SEQ ID NO: 400402 - DNA, 19 bp, Homo sapiens
  siRNA target sequence for GL009 (NM_032492.2,613-631).
gcctggcagttgtactaca

SEQ ID NO: 400403 - DNA, 19 bp, Homo sapiens
  siRNA target sequence for ARHGAP9 (NM_032496.1,492-510).
ccctctatgcctttactta

SEQ ID NO: 400404 - DNA, 19 bp, Homo sapiens
  siRNA target sequence for ARHGAP9 (NM_032496.1,555-573).
ggttcctactgcttcgaaa

SEQ ID NO: 400405 - DNA, 19 bp, Homo sapiens
  siRNA target sequence for ARHGAP9 (NM_032496.1,638-656).
gtcccagcagcctatatga

SEQ ID NO: 400406 - DNA, 19 bp, Homo sapiens
  siRNA target sequence for ARHGAP9 (NM_032496.1,806-824).
ccacttccccgcaaaatgt

SEQ ID NO: 400407 - DNA, 19 bp, Homo sapiens
  siRNA target sequence for ARHGAP9 (NM_032496.1,831-849).
gcgtcagcactgacaatct

SEQ ID NO: 400408 - DNA, 19 bp, Homo sapiens
  siRNA target sequence for ARHGAP9 (NM_032496.1,833-851).
gtcagcactgacaatctga

SEQ ID NO: 400409 - DNA, 19 bp, Homo sapiens
  siRNA target sequence for ARHGAP9 (NM_032496.1,965-983).
gagccccctgtgtactgta

SEQ ID NO: 400410 - DNA, 19 bp, Homo sapiens
  siRNA target sequence for ARHGAP9 (NM_032496.1,1086-1104).
ctggacgctgcttctacat

SEQ ID NO: 400411 - DNA, 19 bp, Homo sapiens
  siRNA target sequence for ARHGAP9 (NM_032496.1,1088-1106).
ggacgctgcttctacataa

SEQ ID NO: 400412 - DNA, 19 bp, Homo sapiens
  siRNA target sequence for ARHGAP9 (NM_032496.1,1089-1107).
gacgctgcttctacataaa

SEQ ID NO: 400413 - DNA, 19 bp, Homo sapiens
  siRNA target sequence for ARHGAP9 (NM_032496.1,1091-1109).
cgctgcttctacataaatt

SEQ ID NO: 400414 - DNA, 19 bp, Homo sapiens
  siRNA target sequence for ARHGAP9 (NM_032496.1,1189-1207).
gaccctgaagaggaacaat

SEQ ID NO: 400415 - DNA, 19 bp, Homo sapiens
  siRNA target sequence for ARHGAP9 (NM_032496.1,1192-1210).
cctgaagaggaacaatgat

SEQ ID NO: 400416 - DNA, 19 bp, Homo sapiens
  siRNA target sequence for ARHGAP9 (NM_032496.1,1223-1241).
caggcaaagggcttcagat

SEQ ID NO: 400417 - DNA, 19 bp, Homo sapiens
  siRNA target sequence for ARHGAP9 (NM_032496.1,1390-1408).
gctcaacatgaccaagatt

SEQ ID NO: 400418 - DNA, 19 bp, Homo sapiens
  siRNA target sequence for ARHGAP9 (NM_032496.1,1445-1463).
ccgtcttgggtggtgttaa

SEQ ID NO: 400419 - DNA, 19 bp, Homo sapiens
  siRNA target sequence for ARHGAP9 (NM_032496.1,1467-1485).
gtaacagcctggtgttcta

SEQ ID NO: 400420 - DNA, 19 bp, Homo sapiens
  siRNA target sequence for ARHGAP9 (NM_032496.1,1936-1954).
ccgcgtgcgcaacaaacta

SEQ ID NO: 400421 - DNA, 19 bp, Homo sapiens
  siRNA target sequence for ARHGAP9 (NM_032496.1,1937-1955).
cgcgtgcgcaacaaactaa

SEQ ID NO: 400422 - DNA, 19 bp, Homo sapiens
  siRNA target sequence for ARHGAP9 (NM_032496.1,1938-1956).
gcgtgcgcaacaaactaaa

SEQ ID NO: 400423 - DNA, 19 bp, Homo sapiens
  siRNA target sequence for ARHGAP9 (NM_032496.1,1969-1987).
gaagagaccgcccttacaa

SEQ ID NO: 400424 - DNA, 19 bp, Homo sapiens
  siRNA target sequence for ARHGAP9 (NM_032496.1,2028-2046).
gctgccagttggaatcact

SEQ ID NO: 400425 - DNA, 19 bp, Homo sapiens
  siRNA target sequence for ARHGAP9 (NM_032496.1,2208-2226).
ccgatgggaggtatgtgtt

SEQ ID NO: 400426 - DNA, 19 bp, Homo sapiens
  siRNA target sequence for ARHGAP9 (NM_032496.1,2243-2261).
caagaaggtcggttagatt

SEQ ID NO: 400427 - DNA, 19 bp, Homo sapiens
  siRNA target sequence for ARHGAP9 (NM_032496.1,2301-2319).
gagccctgaagctttttct

SEQ ID NO: 400428 - DNA, 19 bp, Homo sapiens
  siRNA target sequence for ARHGAP9 (NM_032496.1,2401-2419).
gtgcctctctcagatacaa

SEQ ID NO: 400429 - DNA, 19 bp, Homo sapiens
  siRNA target sequence for ARHGAP9 (NM_032496.1,2464-2482).
gtacctcctggagcattta

SEQ ID NO: 400430 - DNA, 19 bp, Homo sapiens
  siRNA target sequence for HH114 (NM_032499.3,323-341).
caccctccaagtctattat

SEQ ID NO: 400431 - DNA, 19 bp, Homo sapiens
  siRNA target sequence for HH114 (NM_032499.3,325-343).
ccctccaagtctattataa

SEQ ID NO: 400432 - DNA, 19 bp, Homo sapiens
  siRNA target sequence for HH114 (NM_032499.3,326-344).
cctccaagtctattataaa

SEQ ID NO: 400433 - DNA, 19 bp, Homo sapiens
  siRNA target sequence for HH114 (NM_032499.3,327-345).
ctccaagtctattataaat

SEQ ID NO: 400434 - DNA, 19 bp, Homo sapiens
  siRNA target sequence for HH114 (NM_032499.3,369-387).
gattccagatggagttcta

SEQ ID NO: 400435 - DNA, 19 bp, Homo sapiens
  siRNA target sequence for HH114 (NM_032499.3,374-392).
cagatggagttctagcaaa

SEQ ID NO: 400436 - DNA, 19 bp, Homo sapiens
  siRNA target sequence for HH114 (NM_032499.3,388-406).
gcaaatcaggtctatcagt

SEQ ID NO: 400437 - DNA, 19 bp, Homo sapiens
  siRNA target sequence for HH114 (NM_032499.3,397-415).
gtctatcagtgcattgtga

SEQ ID NO: 400438 - DNA, 19 bp, Homo sapiens
  siRNA target sequence for HH114 (NM_032499.3,538-556).
cgtgcaaagggttatgaca

SEQ ID NO: 400439 - DNA, 19 bp, Homo sapiens
  siRNA target sequence for HH114 (NM_032499.3,603-621).
cataattcactggattgaa

SEQ ID NO: 400440 - DNA, 19 bp, Homo sapiens
  siRNA target sequence for HH114 (NM_032499.3,681-699).
gagctactggaatagattt

SEQ ID NO: 400441 - DNA, 19 bp, Homo sapiens
  siRNA target sequence for HH114 (NM_032499.3,703-721).
ccaggcttagtcatctatt

SEQ ID NO: 400442 - DNA, 19 bp, Homo sapiens
  siRNA target sequence for HH114 (NM_032499.3,706-724).
ggcttagtcatctattggt

SEQ ID NO: 400443 - DNA, 19 bp, Homo sapiens
  siRNA target sequence for HH114 (NM_032499.3,707-725).
gcttagtcatctattggta

SEQ ID NO: 400444 - DNA, 19 bp, Homo sapiens
  siRNA target sequence for HH114 (NM_032499.3,712-730).
gtcatctattggtatggat

SEQ ID NO: 400445 - DNA, 19 bp, Homo sapiens
  siRNA target sequence for HH114 (NM_032499.3,780-798).
ctgtttccccacgaacatt

SEQ ID NO: 400446 - DNA, 19 bp, Homo sapiens
  siRNA target sequence for FAM11A (NM_032508.1,346-364).
cgagtaaattcctcatcta

SEQ ID NO: 400447 - DNA, 19 bp, Homo sapiens
  siRNA target sequence for FAM11A (NM_032508.1,403-421).
gtttggatggcatcataca

SEQ ID NO: 400448 - DNA, 19 bp, Homo sapiens
  siRNA target sequence for FAM11A (NM_032508.1,434-452).
ggctgtctttgctccaata

SEQ ID NO: 400449 - DNA, 19 bp, Homo sapiens
  siRNA target sequence for FAM11A (NM_032508.1,435-453).
gctgtctttgctccaatat

SEQ ID NO: 400450 - DNA, 19 bp, Homo sapiens
  siRNA target sequence for FAM11A (NM_032508.1,506-524).
ggcacgaaatcctcaatat

SEQ ID NO: 400451 - DNA, 19 bp, Homo sapiens
  siRNA target sequence for FAM11A (NM_032508.1,537-555).
gaaacgtgtgtggagttta

SEQ ID NO: 400452 - DNA, 19 bp, Homo sapiens
  siRNA target sequence for FAM11A (NM_032508.1,577-595).
gcatccacttgctcttgtt

SEQ ID NO: 400453 - DNA, 19 bp, Homo sapiens
  siRNA target sequence for FAM11A (NM_032508.1,587-605).
gctcttgttgatgtttgaa

SEQ ID NO: 400454 - DNA, 19 bp, Homo sapiens
  siRNA target sequence for FAM11A (NM_032508.1,590-608).
cttgttgatgtttgaagtt

SEQ ID NO: 400455 - DNA, 19 bp, Homo sapiens
  siRNA target sequence for FAM11A (NM_032508.1,659-677).
catgccgctgttctttgtt

SEQ ID NO: 400456 - DNA, 19 bp, Homo sapiens
  siRNA target sequence for FAM11A (NM_032508.1,753-771).
gtcaacattctccagttta

SEQ ID NO: 400457 - DNA, 19 bp, Homo sapiens
  siRNA target sequence for FAM11A (NM_032508.1,781-799).
ccttaagactggacaagat

SEQ ID NO: 400458 - DNA, 19 bp, Homo sapiens
  siRNA target sequence for FAM11A (NM_032508.1,828-846).
gtcccgctgtggattctca

SEQ ID NO: 400459 - DNA, 19 bp, Homo sapiens
  siRNA target sequence for FAM11A (NM_032508.1,896-914).
gttcttgcgctctatggat

SEQ ID NO: 400460 - DNA, 19 bp, Homo sapiens
  siRNA target sequence for FAM11A (NM_032508.1,927-945).
cagcgcaggacacacataa

SEQ ID NO: 400461 - DNA, 19 bp, Homo sapiens
  siRNA target sequence for FAM11A (NM_032508.1,930-948).
cgcaggacacacataacca

SEQ ID NO: 400462 - DNA, 19 bp, Homo sapiens
  siRNA target sequence for FAM11A (NM_032508.1,931-949).
gcaggacacacataaccat

SEQ ID NO: 400463 - DNA, 19 bp, Homo sapiens
  siRNA target sequence for FAM11A (NM_032508.1,971-989).
cgtcgtgccccttcttaca

SEQ ID NO: 400464 - DNA, 19 bp, Homo sapiens
  siRNA target sequence for FAM11A (NM_032508.1,972-990).
gtcgtgccccttcttacat

SEQ ID NO: 400465 - DNA, 19 bp, Homo sapiens
  siRNA target sequence for FAM11A (NM_032508.1,974-992).
cgtgccccttcttacattt

SEQ ID NO: 400466 - DNA, 19 bp, Homo sapiens
  siRNA target sequence for FAM11A (NM_032508.1,1034-1052).
ctcctgcatcccgatcttt

SEQ ID NO: 400467 - DNA, 19 bp, Homo sapiens
  siRNA target sequence for FAM11A (NM_032508.1,1059-1077).
ctttggctctcgttgatca

SEQ ID NO: 400468 - DNA, 19 bp, Homo sapiens
  siRNA target sequence for FAM11A (NM_032508.1,1079-1097).
gctgatggcaaccacattt

SEQ ID NO: 400469 - DNA, 19 bp, Homo sapiens
  siRNA target sequence for FAM11A (NM_032508.1,1128-1146).
ggtatccgcaaagatttct

SEQ ID NO: 400470 - DNA, 19 bp, Homo sapiens
  siRNA target sequence for FAM11A (NM_032508.1,1245-1263).
gttccggagccccctaaaa

SEQ ID NO: 400471 - DNA, 19 bp, Homo sapiens
  siRNA target sequence for FAM11A (NM_032508.1,1267-1285).
cacccatgtttcgaaagaa

SEQ ID NO: 400472 - DNA, 19 bp, Homo sapiens
  siRNA target sequence for FAM11A (NM_032508.1,1325-1343).
gctcccacctcccaaatta

SEQ ID NO: 400473 - DNA, 19 bp, Homo sapiens
  siRNA target sequence for PARD6G (NM_032510.2,189-207).
ctcagaccttgcgattcta

SEQ ID NO: 400474 - DNA, 19 bp, Homo sapiens
  siRNA target sequence for PARD6G (NM_032510.2,213-231).
gcagcgcagtggaagtcaa

SEQ ID NO: 400475 - DNA, 19 bp, Homo sapiens
  siRNA target sequence for PARD6G (NM_032510.2,406-424).
ctgcaaggcggtttctagt

SEQ ID NO: 400476 - DNA, 19 bp, Homo sapiens
  siRNA target sequence for PARD6G (NM_032510.2,412-430).
ggcggtttctagtgcaaat

SEQ ID NO: 400477 - DNA, 19 bp, Homo sapiens
  siRNA target sequence for C6orf168 (NM_032511.1,382-400).
ggagcccttctccttttat

SEQ ID NO: 400478 - DNA, 19 bp, Homo sapiens
  siRNA target sequence for C6orf168 (NM_032511.1,393-411).
ccttttatggggacatcat

SEQ ID NO: 400479 - DNA, 19 bp, Homo sapiens
  siRNA target sequence for C6orf168 (NM_032511.1,414-432).
ctttccctttgcaggatta

SEQ ID NO: 400480 - DNA, 19 bp, Homo sapiens
  siRNA target sequence for C6orf168 (NM_032511.1,530-548).
cacgaactcctggtcatta

SEQ ID NO: 400481 - DNA, 19 bp, Homo sapiens
  siRNA target sequence for C6orf168 (NM_032511.1,533-551).
gaactcctggtcattagga

SEQ ID NO: 400482 - DNA, 19 bp, Homo sapiens
  siRNA target sequence for C6orf168 (NM_032511.1,595-613).
gtttgcaagacctaacaat

SEQ ID NO: 400483 - DNA, 19 bp, Homo sapiens
  siRNA target sequence for C6orf168 (NM_032511.1,669-687).
ctgacttaccgtatcagaa

SEQ ID NO: 400484 - DNA, 19 bp, Homo sapiens
  siRNA target sequence for C6orf168 (NM_032511.1,673-691).
cttaccgtatcagaactat

SEQ ID NO: 400485 - DNA, 19 bp, Homo sapiens
  siRNA target sequence for C6orf168 (NM_032511.1,679-697).
gtatcagaactattttggt

SEQ ID NO: 400486 - DNA, 19 bp, Homo sapiens
  siRNA target sequence for C6orf168 (NM_032511.1,752-770).
gtttctggcacagaattca

SEQ ID NO: 400487 - DNA, 19 bp, Homo sapiens
  siRNA target sequence for C6orf168 (NM_032511.1,756-774).
ctggcacagaattcataat

SEQ ID NO: 400488 - DNA, 19 bp, Homo sapiens
  siRNA target sequence for C6orf168 (NM_032511.1,759-777).
gcacagaattcataattga

SEQ ID NO: 400489 - DNA, 19 bp, Homo sapiens
  siRNA target sequence for C6orf168 (NM_032511.1,794-812).
cttggagtgaatttaaaca

SEQ ID NO: 400490 - DNA, 19 bp, Homo sapiens
  siRNA target sequence for C6orf168 (NM_032511.1,897-915).
gccagtgggtggacaatct

SEQ ID NO: 400491 - DNA, 19 bp, Homo sapiens
  siRNA target sequence for C6orf168 (NM_032511.1,901-919).
gtgggtggacaatctcaat

SEQ ID NO: 400492 - DNA, 19 bp, Homo sapiens
  siRNA target sequence for C6orf168 (NM_032511.1,928-946).
gaagatgctctctcttagt

SEQ ID NO: 400493 - DNA, 19 bp, Homo sapiens
  siRNA target sequence for C6orf168 (NM_032511.1,980-998).
gttgtgtgccacataacga

SEQ ID NO: 400494 - DNA, 19 bp, Homo sapiens
  siRNA target sequence for C6orf168 (NM_032511.1,987-1005).
gccacataacgaaaggaat

SEQ ID NO: 400495 - DNA, 19 bp, Homo sapiens
  siRNA target sequence for C6orf168 (NM_032511.1,1047-1065).
ccgaggaagagatttacat

SEQ ID NO: 400496 - DNA, 19 bp, Homo sapiens
  siRNA target sequence for C6orf168 (NM_032511.1,1075-1093).
gaaggacatgcggtcttta

SEQ ID NO: 400497 - DNA, 19 bp, Homo sapiens
  siRNA target sequence for C6orf168 (NM_032511.1,1078-1096).
ggacatgcggtctttagca

SEQ ID NO: 400498 - DNA, 19 bp, Homo sapiens
  siRNA target sequence for C6orf168 (NM_032511.1,1106-1124).
ggtgataagaagtacatca

SEQ ID NO: 400499 - DNA, 19 bp, Homo sapiens
  siRNA target sequence for C6orf168 (NM_032511.1,1107-1125).
gtgataagaagtacatcat

SEQ ID NO: 400500 - DNA, 19 bp, Homo sapiens
  siRNA target sequence for C6orf168 (NM_032511.1,1203-1221).
gacccgaacggctgatcaa

SEQ ID NO: 400501 - DNA, 19 bp, Homo sapiens
  siRNA target sequence for C6orf168 (NM_032511.1,1289-1307).
cacgatgatgacaatacca

SEQ ID NO: 400502 - DNA, 19 bp, Homo sapiens
  siRNA target sequence for C6orf168 (NM_032511.1,1298-1316).
gacaataccatctatgagt

SEQ ID NO: 400503 - DNA, 19 bp, Homo sapiens
  siRNA target sequence for C6orf168 (NM_032511.1,1348-1366).
caccccgctgctggatttt

SEQ ID NO: 400504 - DNA, 19 bp, Homo sapiens
  siRNA target sequence for C6orf168 (NM_032511.1,1352-1370).
ccgctgctggattttagct

SEQ ID NO: 400505 - DNA, 19 bp, Homo sapiens
  siRNA target sequence for C6orf168 (NM_032511.1,1354-1372).
gctgctggattttagcttt

SEQ ID NO: 400506 - DNA, 19 bp, Homo sapiens
  siRNA target sequence for C6orf168 (NM_032511.1,1355-1373).
ctgctggattttagctttt

SEQ ID NO: 400507 - DNA, 19 bp, Homo sapiens
  siRNA target sequence for C6orf168 (NM_032511.1,1360-1378).
ggattttagcttttactca

SEQ ID NO: 400508 - DNA, 19 bp, Homo sapiens
  siRNA target sequence for C6orf168 (NM_032511.1,1448-1466).
ggacactcactctttgatt

SEQ ID NO: 400509 - DNA, 19 bp, Homo sapiens
  siRNA target sequence for C6orf168 (NM_032511.1,1474-1492).
ggacatggatgactataca

SEQ ID NO: 400510 - DNA, 19 bp, Homo sapiens
  siRNA target sequence for MAP1LC3A (NM_032514.2,159-177).
cctcagaccggcctttcaa

SEQ ID NO: 400511 - DNA, 19 bp, Homo sapiens
  siRNA target sequence for MAP1LC3A (NM_032514.2,432-450).
cgcccatcgcggacatcta

SEQ ID NO: 400512 - DNA, 19 bp, Homo sapiens
  siRNA target sequence for MAP1LC3A (NM_032514.2,467-485).
gaggacggcttcctctata

SEQ ID NO: 400513 - DNA, 19 bp, Homo sapiens
  siRNA target sequence for COL25A1 (NM_032518.2,822-840).
ggctcagaaatcctatgaa

SEQ ID NO: 400514 - DNA, 19 bp, Homo sapiens
  siRNA target sequence for COL25A1 (NM_032518.2,824-842).
ctcagaaatcctatgaaca

SEQ ID NO: 400515 - DNA, 19 bp, Homo sapiens
  siRNA target sequence for COL25A1 (NM_032518.2,1022-1040).
ggatggtgtttcctaaaat

SEQ ID NO: 400516 - DNA, 19 bp, Homo sapiens
  siRNA target sequence for COL25A1 (NM_032518.2,1060-1078).
gctgatcagcagctcatta

SEQ ID NO: 400517 - DNA, 19 bp, Homo sapiens
  siRNA target sequence for COL25A1 (NM_032518.2,1532-1550).
ctggacttccggggataaa

SEQ ID NO: 400518 - DNA, 19 bp, Homo sapiens
  siRNA target sequence for COL25A1 (NM_032518.2,1674-1692).
cggaccaaaggggaaacaa

SEQ ID NO: 400519 - DNA, 19 bp, Homo sapiens
  siRNA target sequence for COL25A1 (NM_032518.2,1683-1701).
ggggaaacaaggtgaatca

SEQ ID NO: 400520 - DNA, 19 bp, Homo sapiens
  siRNA target sequence for COL25A1 (NM_032518.2,1772-1790).
ggggtccacctggtcaaaa

SEQ ID NO: 400521 - DNA, 19 bp, Homo sapiens
  siRNA target sequence for COL25A1 (NM_032518.2,1834-1852).
ctccacgaagccttacaga

SEQ ID NO: 400522 - DNA, 19 bp, Homo sapiens
  siRNA target sequence for COL25A1 (NM_032518.2,1840-1858).
gaagccttacagaggatta

SEQ ID NO: 400523 - DNA, 19 bp, Homo sapiens
  siRNA target sequence for COL25A1 (NM_032518.2,1843-1861).
gccttacagaggattacca

SEQ ID NO: 400524 - DNA, 19 bp, Homo sapiens
  siRNA target sequence for COL25A1 (NM_032518.2,1851-1869).
gaggattaccaccttaact

SEQ ID NO: 400525 - DNA, 19 bp, Homo sapiens
  siRNA target sequence for COL25A1 (NM_032518.2,1853-1871).
ggattaccaccttaactgt

SEQ ID NO: 400526 - DNA, 19 bp, Homo sapiens
  siRNA target sequence for COL25A1 (NM_032518.2,2095-2113).
ccacagggtccttctatca

SEQ ID NO: 400527 - DNA, 19 bp, Homo sapiens
  siRNA target sequence for COL25A1 (NM_032518.2,2394-2412).
gcatgtaccttgtttgatt

SEQ ID NO: 400528 - DNA, 19 bp, Homo sapiens
  siRNA target sequence for C6orf200 (NM_032519.2,899-917).
ccaggactgtggtgttcta

SEQ ID NO: 400529 - DNA, 19 bp, Homo sapiens
  siRNA target sequence for C6orf200 (NM_032519.2,900-918).
caggactgtggtgttctat

SEQ ID NO: 400530 - DNA, 19 bp, Homo sapiens
  siRNA target sequence for C6orf200 (NM_032519.2,902-920).
ggactgtggtgttctatgt

SEQ ID NO: 400531 - DNA, 19 bp, Homo sapiens
  siRNA target sequence for C6orf200 (NM_032519.2,919-937).
gtgccgtgtatggtcatat

SEQ ID NO: 400532 - DNA, 19 bp, Homo sapiens
  siRNA target sequence for C6orf200 (NM_032519.2,921-939).
gccgtgtatggtcatatta

SEQ ID NO: 400533 - DNA, 19 bp, Homo sapiens
  siRNA target sequence for C6orf200 (NM_032519.2,924-942).
gtgtatggtcatattagta

SEQ ID NO: 400534 - DNA, 19 bp, Homo sapiens
  siRNA target sequence for C6orf200 (NM_032519.2,933-951).
catattagtagctatttgt

SEQ ID NO: 400535 - DNA, 19 bp, Homo sapiens
  siRNA target sequence for C6orf200 (NM_032519.2,944-962).
ctatttgttgcaagatact

SEQ ID NO: 400536 - DNA, 19 bp, Homo sapiens
  siRNA target sequence for C6orf200 (NM_032519.2,986-1004).
ggttcctggctactgttta

SEQ ID NO: 400537 - DNA, 19 bp, Homo sapiens
  siRNA target sequence for C6orf200 (NM_032519.2,987-1005).
gttcctggctactgtttat

SEQ ID NO: 400538 - DNA, 19 bp, Homo sapiens
  siRNA target sequence for C6orf200 (NM_032519.2,990-1008).
cctggctactgtttatgct

SEQ ID NO: 400539 - DNA, 19 bp, Homo sapiens
  siRNA target sequence for C6orf200 (NM_032519.2,1022-1040).
gtctatcatgggcagtatt

SEQ ID NO: 400540 - DNA, 19 bp, Homo sapiens
  siRNA target sequence for C6orf200 (NM_032519.2,1054-1072).
gttttcactatctggttta

SEQ ID NO: 400541 - DNA, 19 bp, Homo sapiens
  siRNA target sequence for C6orf200 (NM_032519.2,1096-1114).
ggattgaagtgcagaattt

SEQ ID NO: 400542 - DNA, 19 bp, Homo sapiens
  siRNA target sequence for C6orf200 (NM_032519.2,1106-1124).
gcagaatttggcatatcga

SEQ ID NO: 400543 - DNA, 19 bp, Homo sapiens
  siRNA target sequence for C6orf200 (NM_032519.2,1107-1125).
cagaatttggcatatcgat

SEQ ID NO: 400544 - DNA, 19 bp, Homo sapiens
  siRNA target sequence for C6orf200 (NM_032519.2,1116-1134).
gcatatcgatgcatgcaat

SEQ ID NO: 400545 - DNA, 19 bp, Homo sapiens
  siRNA target sequence for CAB56184 (NM_032520.2,240-258).
gtggagtccacgtacaagt

SEQ ID NO: 400546 - DNA, 19 bp, Homo sapiens
  siRNA target sequence for CAB56184 (NM_032520.2,242-260).
ggagtccacgtacaagtat

SEQ ID NO: 400547 - DNA, 19 bp, Homo sapiens
  siRNA target sequence for CAB56184 (NM_032520.2,432-450).
gagctggcgtgtggaaaaa

SEQ ID NO: 400548 - DNA, 19 bp, Homo sapiens
  siRNA target sequence for CAB56184 (NM_032520.2,657-675).
gaggatgctggctacttaa

SEQ ID NO: 400549 - DNA, 19 bp, Homo sapiens
  siRNA target sequence for CAB56184 (NM_032520.2,915-933).
ggactgcgtgggagtttgt

SEQ ID NO: 400550 - DNA, 19 bp, Homo sapiens
  siRNA target sequence for KIRREL3 (NM_032531.1,111-129).
caagtttcggagaatgaat

SEQ ID NO: 400551 - DNA, 19 bp, Homo sapiens
  siRNA target sequence for KIRREL3 (NM_032531.1,114-132).
gtttcggagaatgaatgaa

SEQ ID NO: 400552 - DNA, 19 bp, Homo sapiens
  siRNA target sequence for KIRREL3 (NM_032531.1,130-148).
gaaggccaagtctattcct

SEQ ID NO: 400553 - DNA, 19 bp, Homo sapiens
  siRNA target sequence for KIRREL3 (NM_032531.1,206-224).
gcgccatccccgaatacga

SEQ ID NO: 400554 - DNA, 19 bp, Homo sapiens
  siRNA target sequence for KIRREL3 (NM_032531.1,207-225).
cgccatccccgaatacgat

SEQ ID NO: 400555 - DNA, 19 bp, Homo sapiens
  siRNA target sequence for KIRREL3 (NM_032531.1,268-286).
ggcagggacctctcaagtt

SEQ ID NO: 400556 - DNA, 19 bp, Homo sapiens
  siRNA target sequence for KIRREL3 (NM_032531.1,269-287).
gcagggacctctcaagtta

SEQ ID NO: 400557 - DNA, 19 bp, Homo sapiens
  siRNA target sequence for KIRREL3 (NM_032531.1,678-696).
gtgtcgtgccaccaacaaa

SEQ ID NO: 400558 - DNA, 19 bp, Homo sapiens
  siRNA target sequence for KIRREL3 (NM_032531.1,719-737).
cgtcggtcaccattgacat

SEQ ID NO: 400559 - DNA, 19 bp, Homo sapiens
  siRNA target sequence for KIRREL3 (NM_032531.1,980-998).
gcacggttgacgtctactt

SEQ ID NO: 400560 - DNA, 19 bp, Homo sapiens
  siRNA target sequence for KIRREL3 (NM_032531.1,981-999).
cacggttgacgtctacttt

SEQ ID NO: 400561 - DNA, 19 bp, Homo sapiens
  siRNA target sequence for KIRREL3 (NM_032531.1,1013-1031).
ccacagaaccccaatcctt

SEQ ID NO: 400562 - DNA, 19 bp, Homo sapiens
  siRNA target sequence for KIRREL3 (NM_032531.1,1517-1535).
gctccgacactgagatcat

SEQ ID NO: 400563 - DNA, 19 bp, Homo sapiens
  siRNA target sequence for KIRREL3 (NM_032531.1,1546-1564).
gagcaaggttcggaaatga

SEQ ID NO: 400564 - DNA, 19 bp, Homo sapiens
  siRNA target sequence for KIRREL3 (NM_032531.1,1682-1700).
cccgttcccagagaaatct

SEQ ID NO: 400565 - DNA, 19 bp, Homo sapiens
  siRNA target sequence for KIRREL3 (NM_032531.1,1706-1724).
gtgttgtgtcagccaaaaa

SEQ ID NO: 400566 - DNA, 19 bp, Homo sapiens
  siRNA target sequence for KIRREL3 (NM_032531.1,1711-1729).
gtgtcagccaaaaatgata

SEQ ID NO: 400567 - DNA, 19 bp, Homo sapiens
  siRNA target sequence for KIRREL3 (NM_032531.1,1916-1934).
gcgtcaacaccttcaaaga

SEQ ID NO: 400568 - DNA, 19 bp, Homo sapiens
  siRNA target sequence for SLITRK2 (NM_032539.2,1656-1674).
cgcaaaactgccaaagaca

SEQ ID NO: 400569 - DNA, 19 bp, Homo sapiens
  siRNA target sequence for SLITRK2 (NM_032539.2,1686-1704).
cgctgtctgtgcgaagaaa

SEQ ID NO: 400570 - DNA, 19 bp, Homo sapiens
  siRNA target sequence for SLITRK2 (NM_032539.2,1771-1789).
cccagtatcgaatctatca

SEQ ID NO: 400571 - DNA, 19 bp, Homo sapiens
  siRNA target sequence for SLITRK2 (NM_032539.2,1827-1845).
ccaaacgaatttgtcaatt

SEQ ID NO: 400572 - DNA, 19 bp, Homo sapiens
  siRNA target sequence for SLITRK2 (NM_032539.2,2010-2028).
caggccgactacaattaca

SEQ ID NO: 400573 - DNA, 19 bp, Homo sapiens
  siRNA target sequence for SLITRK2 (NM_032539.2,2047-2065).
gggcattcagcaaacttaa

SEQ ID NO: 400574 - DNA, 19 bp, Homo sapiens
  siRNA target sequence for SLITRK2 (NM_032539.2,2156-2174).
cagggggaataggctaaaa

SEQ ID NO: 400575 - DNA, 19 bp, Homo sapiens
  siRNA target sequence for SLITRK2 (NM_032539.2,2160-2178).
gggaataggctaaaagtaa

SEQ ID NO: 400576 - DNA, 19 bp, Homo sapiens
  siRNA target sequence for SLITRK2 (NM_032539.2,2161-2179).
ggaataggctaaaagtaat

SEQ ID NO: 400577 - DNA, 19 bp, Homo sapiens
  siRNA target sequence for SLITRK2 (NM_032539.2,2187-2205).
gctggcgtccttgaacata

SEQ ID NO: 400578 - DNA, 19 bp, Homo sapiens
  siRNA target sequence for SLITRK2 (NM_032539.2,2188-2206).
ctggcgtccttgaacatat

SEQ ID NO: 400579 - DNA, 19 bp, Homo sapiens
  siRNA target sequence for SLITRK2 (NM_032539.2,2192-2210).
cgtccttgaacatattgga

SEQ ID NO: 400580 - DNA, 19 bp, Homo sapiens
  siRNA target sequence for SLITRK2 (NM_032539.2,2277-2295).
gcctggctagacaccataa

SEQ ID NO: 400581 - DNA, 19 bp, Homo sapiens
  siRNA target sequence for SLITRK2 (NM_032539.2,2279-2297).
ctggctagacaccataact

SEQ ID NO: 400582 - DNA, 19 bp, Homo sapiens
  siRNA target sequence for SLITRK2 (NM_032539.2,2320-2338).
gtgagactccctttaggtt

SEQ ID NO: 400583 - DNA, 19 bp, Homo sapiens
  siRNA target sequence for SLITRK2 (NM_032539.2,2443-2461).
ggctgtcacctacaatgaa

SEQ ID NO: 400584 - DNA, 19 bp, Homo sapiens
  siRNA target sequence for SLITRK2 (NM_032539.2,2504-2522).
gcccaaaatgagaaatcgt

SEQ ID NO: 400585 - DNA, 19 bp, Homo sapiens
  siRNA target sequence for SLITRK2 (NM_032539.2,2633-2651).
ctctcagagctcagacaat

SEQ ID NO: 400586 - DNA, 19 bp, Homo sapiens
  siRNA target sequence for SLITRK2 (NM_032539.2,2644-2662).
cagacaatggtctgaatgt

SEQ ID NO: 400587 - DNA, 19 bp, Homo sapiens
  siRNA target sequence for SLITRK2 (NM_032539.2,2713-2731).
cgaccagtccaaagaaact

SEQ ID NO: 400588 - DNA, 19 bp, Homo sapiens
  siRNA target sequence for SLITRK2 (NM_032539.2,2732-2750).
ctacctaacagggaactat

SEQ ID NO: 400589 - DNA, 19 bp, Homo sapiens
  siRNA target sequence for SLITRK2 (NM_032539.2,2735-2753).
cctaacagggaactatctt

SEQ ID NO: 400590 - DNA, 19 bp, Homo sapiens
  siRNA target sequence for SLITRK2 (NM_032539.2,2743-2761).
ggaactatcttcaaactgt

SEQ ID NO: 400591 - DNA, 19 bp, Homo sapiens
  siRNA target sequence for SLITRK2 (NM_032539.2,2751-2769).
cttcaaactgtctataaga

SEQ ID NO: 400592 - DNA, 19 bp, Homo sapiens
  siRNA target sequence for SLITRK2 (NM_032539.2,2835-2853).
caggaaggtgcctttacaa

SEQ ID NO: 400593 - DNA, 19 bp, Homo sapiens
  siRNA target sequence for SLITRK2 (NM_032539.2,2860-2878).
ccagtttacgcagacttta

SEQ ID NO: 400594 - DNA, 19 bp, Homo sapiens
  siRNA target sequence for SLITRK2 (NM_032539.2,2861-2879).
cagtttacgcagactttat

SEQ ID NO: 400595 - DNA, 19 bp, Homo sapiens
  siRNA target sequence for SLITRK2 (NM_032539.2,2901-2919).
gtgctgtacccttctatgt

SEQ ID NO: 400596 - DNA, 19 bp, Homo sapiens
  siRNA target sequence for SLITRK2 (NM_032539.2,2903-2921).
gctgtacccttctatgttt

SEQ ID NO: 400597 - DNA, 19 bp, Homo sapiens
  siRNA target sequence for SLITRK2 (NM_032539.2,2906-2924).
gtacccttctatgtttgat

SEQ ID NO: 400598 - DNA, 19 bp, Homo sapiens
  siRNA target sequence for SLITRK2 (NM_032539.2,2926-2944).
gactgcagagcttgcaata

SEQ ID NO: 400599 - DNA, 19 bp, Homo sapiens
  siRNA target sequence for SLITRK2 (NM_032539.2,2933-2951).
gagcttgcaatatctctat

SEQ ID NO: 400600 - DNA, 19 bp, Homo sapiens
  siRNA target sequence for SLITRK2 (NM_032539.2,2957-2975).
gtataatgtcattaaggaa

SEQ ID NO: 400601 - DNA, 19 bp, Homo sapiens
  siRNA target sequence for SLITRK2 (NM_032539.2,2989-3007).
cctttgatgctttgattaa

SEQ ID NO: 400602 - DNA, 19 bp, Homo sapiens
  siRNA target sequence for SLITRK2 (NM_032539.2,3042-3060).
cggtccttacctgataata

SEQ ID NO: 400603 - DNA, 19 bp, Homo sapiens
  siRNA target sequence for SLITRK2 (NM_032539.2,3043-3061).
ggtccttacctgataatat

SEQ ID NO: 400604 - DNA, 19 bp, Homo sapiens
  siRNA target sequence for SLITRK2 (NM_032539.2,3044-3062).
gtccttacctgataatata

SEQ ID NO: 400605 - DNA, 19 bp, Homo sapiens
  siRNA target sequence for SLITRK2 (NM_032539.2,3148-3166).
cggctttcatccagataga

SEQ ID NO: 400606 - DNA, 19 bp, Homo sapiens
  siRNA target sequence for SLITRK2 (NM_032539.2,3151-3169).
ctttcatccagatagatct

SEQ ID NO: 400607 - DNA, 19 bp, Homo sapiens
  siRNA target sequence for SLITRK2 (NM_032539.2,3281-3299).
gcatgcaggggagatacta

SEQ ID NO: 400608 - DNA, 19 bp, Homo sapiens
  siRNA target sequence for SLITRK2 (NM_032539.2,3282-3300).
catgcaggggagatactaa

SEQ ID NO: 400609 - DNA, 19 bp, Homo sapiens
  siRNA target sequence for SLITRK2 (NM_032539.2,3325-3343).
gtccagacagcccaaactt

SEQ ID NO: 400610 - DNA, 19 bp, Homo sapiens
  siRNA target sequence for SLITRK2 (NM_032539.2,3327-3345).
ccagacagcccaaacttgt

SEQ ID NO: 400611 - DNA, 19 bp, Homo sapiens
  siRNA target sequence for SLITRK2 (NM_032539.2,3348-3366).
gatggaaccgtcttgtcaa

SEQ ID NO: 400612 - DNA, 19 bp, Homo sapiens
  siRNA target sequence for SLITRK2 (NM_032539.2,3351-3369).
ggaaccgtcttgtcaatga

SEQ ID NO: 400613 - DNA, 19 bp, Homo sapiens
  siRNA target sequence for SLITRK2 (NM_032539.2,3352-3370).
gaaccgtcttgtcaatgaa

SEQ ID NO: 400614 - DNA, 19 bp, Homo sapiens
  siRNA target sequence for SLITRK2 (NM_032539.2,3362-3380).
gtcaatgaatcacaataca

SEQ ID NO: 400615 - DNA, 19 bp, Homo sapiens
  siRNA target sequence for SLITRK2 (NM_032539.2,3385-3403).
cacctcggtcgcttagtgt

SEQ ID NO: 400616 - DNA, 19 bp, Homo sapiens
  siRNA target sequence for SLITRK2 (NM_032539.2,3438-3456).
gttccactgtctgtcttaa

SEQ ID NO: 400617 - DNA, 19 bp, Homo sapiens
  siRNA target sequence for SLITRK2 (NM_032539.2,3452-3470).
cttaattctgggattgctt

SEQ ID NO: 400618 - DNA, 19 bp, Homo sapiens
  siRNA target sequence for SLITRK2 (NM_032539.2,3463-3481).
gattgcttgttgttttcat

SEQ ID NO: 400619 - DNA, 19 bp, Homo sapiens
  siRNA target sequence for SLITRK2 (NM_032539.2,3502-3520).
ctggtttattcgtctttgt

SEQ ID NO: 400620 - DNA, 19 bp, Homo sapiens
  siRNA target sequence for SLITRK2 (NM_032539.2,3504-3522).
ggtttattcgtctttgtct

SEQ ID NO: 400621 - DNA, 19 bp, Homo sapiens
  siRNA target sequence for SLITRK2 (NM_032539.2,3543-3561).
ccgagcgttcccaggaata

SEQ ID NO: 400622 - DNA, 19 bp, Homo sapiens
  siRNA target sequence for SLITRK2 (NM_032539.2,3547-3565).
gcgttcccaggaataccaa

SEQ ID NO: 400623 - DNA, 19 bp, Homo sapiens
  siRNA target sequence for SLITRK2 (NM_032539.2,3553-3571).
ccaggaataccaacaactt

SEQ ID NO: 400624 - DNA, 19 bp, Homo sapiens
  siRNA target sequence for SLITRK2 (NM_032539.2,3554-3572).
caggaataccaacaactta

SEQ ID NO: 400625 - DNA, 19 bp, Homo sapiens
  siRNA target sequence for SLITRK2 (NM_032539.2,3556-3574).
ggaataccaacaacttaga

SEQ ID NO: 400626 - DNA, 19 bp, Homo sapiens
  siRNA target sequence for SLITRK2 (NM_032539.2,3573-3591).
gacgtaagctcctttcaat

SEQ ID NO: 400627 - DNA, 19 bp, Homo sapiens
  siRNA target sequence for SLITRK2 (NM_032539.2,3575-3593).
cgtaagctcctttcaatta

SEQ ID NO: 400628 - DNA, 19 bp, Homo sapiens
  siRNA target sequence for SLITRK2 (NM_032539.2,3580-3598).
gctcctttcaattacagta

SEQ ID NO: 400629 - DNA, 19 bp, Homo sapiens
  siRNA target sequence for SLITRK2 (NM_032539.2,3594-3612).
cagtatgggtcttacaaca

SEQ ID NO: 400630 - DNA, 19 bp, Homo sapiens
  siRNA target sequence for SLITRK2 (NM_032539.2,3611-3629).
cactgagactcacgataaa

SEQ ID NO: 400631 - DNA, 19 bp, Homo sapiens
  siRNA target sequence for SLITRK2 (NM_032539.2,3637-3655).
gccatgtctacaactatat

SEQ ID NO: 400632 - DNA, 19 bp, Homo sapiens
  siRNA target sequence for SLITRK2 (NM_032539.2,3709-3727).
gagacccagtagcctatta

SEQ ID NO: 400633 - DNA, 19 bp, Homo sapiens
  siRNA target sequence for SLITRK2 (NM_032539.2,3808-3826).
ccactgagctgctagaaaa

SEQ ID NO: 400634 - DNA, 19 bp, Homo sapiens
  siRNA target sequence for SLITRK2 (NM_032539.2,3811-3829).
ctgagctgctagaaaagca

SEQ ID NO: 400635 - DNA, 19 bp, Homo sapiens
  siRNA target sequence for SLITRK2 (NM_032539.2,3897-3915).
gcaggcctagtccactata

SEQ ID NO: 400636 - DNA, 19 bp, Homo sapiens
  siRNA target sequence for SLITRK2 (NM_032539.2,3898-3916).
caggcctagtccactataa

SEQ ID NO: 400637 - DNA, 19 bp, Homo sapiens
  siRNA target sequence for SLITRK2 (NM_032539.2,3900-3918).
ggcctagtccactataact

SEQ ID NO: 400638 - DNA, 19 bp, Homo sapiens
  siRNA target sequence for SLITRK2 (NM_032539.2,3901-3919).
gcctagtccactataactt

SEQ ID NO: 400639 - DNA, 19 bp, Homo sapiens
  siRNA target sequence for SLITRK2 (NM_032539.2,3903-3921).
ctagtccactataactttt

SEQ ID NO: 400640 - DNA, 19 bp, Homo sapiens
  siRNA target sequence for SLITRK2 (NM_032539.2,3941-3959).
gtttgccccttcctatgaa

SEQ ID NO: 400641 - DNA, 19 bp, Homo sapiens
  siRNA target sequence for SLITRK2 (NM_032539.2,3986-4004).
caataaaaccgttttatat

SEQ ID NO: 400642 - DNA, 19 bp, Homo sapiens
  siRNA target sequence for SCOC (NM_032547.1,238-256).
caaggcccaaaagtttgtt

SEQ ID NO: 400643 - DNA, 19 bp, Homo sapiens
  siRNA target sequence for SCOC (NM_032547.1,254-272).
gttacccaagatgatgaat

SEQ ID NO: 400644 - DNA, 19 bp, Homo sapiens
  siRNA target sequence for SCOC (NM_032547.1,328-346).
gacttattaatcaagtgtt

SEQ ID NO: 400645 - DNA, 19 bp, Homo sapiens
  siRNA target sequence for SCOC (NM_032547.1,461-479).
gtcagcttctagtgttttt

SEQ ID NO: 400646 - DNA, 19 bp, Homo sapiens
  siRNA target sequence for FLJ14564 (NM_032550.1,416-434).
gagctcctccggctttaca

SEQ ID NO: 400647 - DNA, 19 bp, Homo sapiens
  siRNA target sequence for FLJ14564 (NM_032550.1,422-440).
ctccggctttacaccaaaa

SEQ ID NO: 400648 - DNA, 19 bp, Homo sapiens
  siRNA target sequence for FLJ14564 (NM_032550.1,425-443).
cggctttacaccaaaagca

SEQ ID NO: 400649 - DNA, 19 bp, Homo sapiens
  siRNA target sequence for FLJ14564 (NM_032550.1,601-619).
cccgccacccaagatgatt

SEQ ID NO: 400650 - DNA, 19 bp, Homo sapiens
  siRNA target sequence for FLJ14564 (NM_032550.1,655-673).
gtctccagagggctactat

SEQ ID NO: 400651 - DNA, 19 bp, Homo sapiens
  siRNA target sequence for FLJ14564 (NM_032550.1,1029-1047).
cgatgaatgccgatgtgat

SEQ ID NO: 400652 - DNA, 19 bp, Homo sapiens
  siRNA target sequence for FLJ14564 (NM_032550.1,1030-1048).
gatgaatgccgatgtgatt

SEQ ID NO: 400653 - DNA, 19 bp, Homo sapiens
  siRNA target sequence for FLJ14564 (NM_032550.1,1155-1173).
cggatgcccagcgctttaa

SEQ ID NO: 400654 - DNA, 19 bp, Homo sapiens
  siRNA target sequence for FLJ14564 (NM_032550.1,1157-1175).
gatgcccagcgctttaact

SEQ ID NO: 400655 - DNA, 19 bp, Homo sapiens
  siRNA target sequence for FLJ14564 (NM_032550.1,1174-1192).
ctgccagaaaccagatata

SEQ ID NO: 400656 - DNA, 19 bp, Homo sapiens
  siRNA target sequence for FLJ14564 (NM_032550.1,1185-1203).
cagatatagctgagaagta

SEQ ID NO: 400657 - DNA, 19 bp, Homo sapiens
  siRNA target sequence for FLJ14564 (NM_032550.1,1204-1222).
cctgtcggcttcagagtat

SEQ ID NO: 400658 - DNA, 19 bp, Homo sapiens
  siRNA target sequence for FLJ14564 (NM_032550.1,1687-1705).
cgatagggtctcctgtatt

SEQ ID NO: 400659 - DNA, 19 bp, Homo sapiens
  siRNA target sequence for FLJ14564 (NM_032550.1,1706-1724).
gtgagtgcggccaaaaact

SEQ ID NO: 400660 - DNA, 19 bp, Homo sapiens
  siRNA target sequence for FLJ14564 (NM_032550.1,1708-1726).
gagtgcggccaaaaactct

SEQ ID NO: 400661 - DNA, 19 bp, Homo sapiens
  siRNA target sequence for FLJ14564 (NM_032550.1,2045-2063).
ccagatgagccctgcataa

SEQ ID NO: 400662 - DNA, 19 bp, Homo sapiens
  siRNA target sequence for FLJ14564 (NM_032550.1,2046-2064).
cagatgagccctgcataaa

SEQ ID NO: 400663 - DNA, 19 bp, Homo sapiens
  siRNA target sequence for FLJ14564 (NM_032550.1,2048-2066).
gatgagccctgcataaagt

SEQ ID NO: 400664 - DNA, 19 bp, Homo sapiens
  siRNA target sequence for FLJ14564 (NM_032550.1,2127-2145).
gaatcaccaccgtcaaaat

SEQ ID NO: 400665 - DNA, 19 bp, Homo sapiens
  siRNA target sequence for FLJ14564 (NM_032550.1,2260-2278).
gatcaagcttggcaagaat

SEQ ID NO: 400666 - DNA, 19 bp, Homo sapiens
  siRNA target sequence for DAB2IP (NM_032552.1,470-488).
gctcaagacggacaatgtt

SEQ ID NO: 400667 - DNA, 19 bp, Homo sapiens
  siRNA target sequence for DAB2IP (NM_032552.1,471-489).
ctcaagacggacaatgttt

SEQ ID NO: 400668 - DNA, 19 bp, Homo sapiens
  siRNA target sequence for DAB2IP (NM_032552.1,1429-1447).
gcagcaaggaggaatacat

SEQ ID NO: 400669 - DNA, 19 bp, Homo sapiens
  siRNA target sequence for DAB2IP (NM_032552.1,1616-1634).
gctggagcagagcatagta

SEQ ID NO: 400670 - DNA, 19 bp, Homo sapiens
  siRNA target sequence for DAB2IP (NM_032552.1,1622-1640).
gcagagcatagtatccaaa

SEQ ID NO: 400671 - DNA, 19 bp, Homo sapiens
  siRNA target sequence for DAB2IP (NM_032552.1,1782-1800).
gtgattgagaacgatcttt

SEQ ID NO: 400672 - DNA, 19 bp, Homo sapiens
  siRNA target sequence for DAB2IP (NM_032552.1,1793-1811).
cgatctttccggtctgata

SEQ ID NO: 400673 - DNA, 19 bp, Homo sapiens
  siRNA target sequence for DAB2IP (NM_032552.1,1797-1815).
ctttccggtctgatagatt

SEQ ID NO: 400674 - DNA, 19 bp, Homo sapiens
  siRNA target sequence for DAB2IP (NM_032552.1,1840-1858).
ccgaaaacaaggacttgtt

SEQ ID NO: 400675 - DNA, 19 bp, Homo sapiens
  siRNA target sequence for DAB2IP (NM_032552.1,1841-1859).
cgaaaacaaggacttgttt

SEQ ID NO: 400676 - DNA, 19 bp, Homo sapiens
  siRNA target sequence for DAB2IP (NM_032552.1,1896-1914).
gcccgcagctcgagttact

SEQ ID NO: 400677 - DNA, 19 bp, Homo sapiens
  siRNA target sequence for DAB2IP (NM_032552.1,1921-1939).
ccaacgagcctgatcttca

SEQ ID NO: 400678 - DNA, 19 bp, Homo sapiens
  siRNA target sequence for DAB2IP (NM_032552.1,2403-2421).
cagatgtcactgactgaaa

SEQ ID NO: 400679 - DNA, 19 bp, Homo sapiens
  siRNA target sequence for DAB2IP (NM_032552.1,2749-2767).
ccatgaacgcgcagttgtt

SEQ ID NO: 400680 - DNA, 19 bp, Homo sapiens
  siRNA target sequence for DAB2IP (NM_032552.1,2753-2771).
gaacgcgcagttgttagaa

SEQ ID NO: 400681 - DNA, 19 bp, Homo sapiens
  siRNA target sequence for DAB2IP (NM_032552.1,3099-3117).
gactccaaacagaagatca

SEQ ID NO: 400682 - DNA, 19 bp, Homo sapiens
  siRNA target sequence for GPR81 (NM_032554.2,447-465).
gccttttcggacagactat

SEQ ID NO: 400683 - DNA, 19 bp, Homo sapiens
  siRNA target sequence for GPR81 (NM_032554.2,448-466).
ccttttcggacagactatt

SEQ ID NO: 400684 - DNA, 19 bp, Homo sapiens
  siRNA target sequence for GPR81 (NM_032554.2,568-586).
gtggctgcggacaggtatt

SEQ ID NO: 400685 - DNA, 19 bp, Homo sapiens
  siRNA target sequence for GPR81 (NM_032554.2,571-589).
gctgcggacaggtatttca

SEQ ID NO: 400686 - DNA, 19 bp, Homo sapiens
  siRNA target sequence for GPR81 (NM_032554.2,572-590).
ctgcggacaggtatttcaa

SEQ ID NO: 400687 - DNA, 19 bp, Homo sapiens
  siRNA target sequence for GPR81 (NM_032554.2,575-593).
cggacaggtatttcaaagt

SEQ ID NO: 400688 - DNA, 19 bp, Homo sapiens
  siRNA target sequence for GPR81 (NM_032554.2,604-622).
caccacgcggtgaacacta

SEQ ID NO: 400689 - DNA, 19 bp, Homo sapiens
  siRNA target sequence for GPR81 (NM_032554.2,607-625).
cacgcggtgaacactatct

SEQ ID NO: 400690 - DNA, 19 bp, Homo sapiens
  siRNA target sequence for GPR81 (NM_032554.2,676-694).
ctgggaacagtgtatcttt

SEQ ID NO: 400691 - DNA, 19 bp, Homo sapiens
  siRNA target sequence for GPR81 (NM_032554.2,734-752).
cctgtgagagcttcatcat

SEQ ID NO: 400692 - DNA, 19 bp, Homo sapiens
  siRNA target sequence for GPR81 (NM_032554.2,761-779).
ccaatggctggcatgacat

SEQ ID NO: 400693 - DNA, 19 bp, Homo sapiens
  siRNA target sequence for GPR81 (NM_032554.2,767-785).
gctggcatgacatcatgtt

SEQ ID NO: 400694 - DNA, 19 bp, Homo sapiens
  siRNA target sequence for GPR81 (NM_032554.2,804-822).
gcccctcggcatcatctta

SEQ ID NO: 400695 - DNA, 19 bp, Homo sapiens
  siRNA target sequence for GPR81 (NM_032554.2,916-934).
gtggcaattgtgttcatca

SEQ ID NO: 400696 - DNA, 19 bp, Homo sapiens
  siRNA target sequence for GPR81 (NM_032554.2,951-969).
cgtgtctgctagactctat

SEQ ID NO: 400697 - DNA, 19 bp, Homo sapiens
  siRNA target sequence for GPR81 (NM_032554.2,952-970).
gtgtctgctagactctatt

SEQ ID NO: 400698 - DNA, 19 bp, Homo sapiens
  siRNA target sequence for GPR81 (NM_032554.2,1062-1080).
ggatcccctggtgtattat

SEQ ID NO: 400699 - DNA, 19 bp, Homo sapiens
  siRNA target sequence for GPR81 (NM_032554.2,1063-1081).
gatcccctggtgtattatt

SEQ ID NO: 400700 - DNA, 19 bp, Homo sapiens
  siRNA target sequence for GPR81 (NM_032554.2,1091-1109).
cctcctttcccaaattcta

SEQ ID NO: 400701 - DNA, 19 bp, Homo sapiens
  siRNA target sequence for GPR81 (NM_032554.2,1144-1162).
cagccaggacactcaaaaa

SEQ ID NO: 400702 - DNA, 19 bp, Homo sapiens
  siRNA target sequence for GPR81 (NM_032554.2,1148-1166).
caggacactcaaaaacaca

SEQ ID NO: 400703 - DNA, 19 bp, Homo sapiens
  siRNA target sequence for GPR81 (NM_032554.2,1171-1189).
ccggaagagatgccaattt

SEQ ID NO: 400704 - DNA, 19 bp, Homo sapiens
  siRNA target sequence for GPR81 (NM_032554.2,1174-1192).
gaagagatgccaatttcga

SEQ ID NO: 400705 - DNA, 19 bp, Homo sapiens
  siRNA target sequence for GPR81 (NM_032554.2,1256-1274).
gggatccccacattgttga

SEQ ID NO: 400706 - DNA, 19 bp, Homo sapiens
  siRNA target sequence for KIAA2010 (NM_032560.3,2446-2464).
gcccttcgttttaaaagaa

SEQ ID NO: 400707 - DNA, 19 bp, Homo sapiens
  siRNA target sequence for KIAA2010 (NM_032560.3,2487-2505).
gttttacaaccgctacata

SEQ ID NO: 400708 - DNA, 19 bp, Homo sapiens
  siRNA target sequence for KIAA2010 (NM_032560.3,2493-2511).
caaccgctacataatgaaa

SEQ ID NO: 400709 - DNA, 19 bp, Homo sapiens
  siRNA target sequence for KIAA2010 (NM_032560.3,2496-2514).
ccgctacataatgaaaagt

SEQ ID NO: 400710 - DNA, 19 bp, Homo sapiens
  siRNA target sequence for KIAA2010 (NM_032560.3,2497-2515).
cgctacataatgaaaagtt

SEQ ID NO: 400711 - DNA, 19 bp, Homo sapiens
  siRNA target sequence for KIAA2010 (NM_032560.3,2498-2516).
gctacataatgaaaagttt

SEQ ID NO: 400712 - DNA, 19 bp, Homo sapiens
  siRNA target sequence for KIAA2010 (NM_032560.3,2550-2568).
caatggatcccgctacaat

SEQ ID NO: 400713 - DNA, 19 bp, Homo sapiens
  siRNA target sequence for KIAA2010 (NM_032560.3,2554-2572).
ggatcccgctacaatctga

SEQ ID NO: 400714 - DNA, 19 bp, Homo sapiens
  siRNA target sequence for KIAA2010 (NM_032560.3,2555-2573).
gatcccgctacaatctgat

SEQ ID NO: 400715 - DNA, 19 bp, Homo sapiens
  siRNA target sequence for KIAA2010 (NM_032560.3,2558-2576).
cccgctacaatctgatgaa

SEQ ID NO: 400716 - DNA, 19 bp, Homo sapiens
  siRNA target sequence for KIAA2010 (NM_032560.3,2579-2597).
ctgccataatagagatgtt

SEQ ID NO: 400717 - DNA, 19 bp, Homo sapiens
  siRNA target sequence for KIAA2010 (NM_032560.3,2657-2675).
ggaaagcactggaagatgt

SEQ ID NO: 400718 - DNA, 19 bp, Homo sapiens
  siRNA target sequence for KIAA2010 (NM_032560.3,2658-2676).
gaaagcactggaagatgta

SEQ ID NO: 400719 - DNA, 19 bp, Homo sapiens
  siRNA target sequence for KIAA2010 (NM_032560.3,2662-2680).
gcactggaagatgtagatt

SEQ ID NO: 400720 - DNA, 19 bp, Homo sapiens
  siRNA target sequence for KIAA2010 (NM_032560.3,2667-2685).
ggaagatgtagattatgta

SEQ ID NO: 400721 - DNA, 19 bp, Homo sapiens
  siRNA target sequence for KIAA2010 (NM_032560.3,2733-2751).
gcaagataatcccaaactt

SEQ ID NO: 400722 - DNA, 19 bp, Homo sapiens
  siRNA target sequence for KIAA2010 (NM_032560.3,2798-2816).
ccagaacactagaagatga

SEQ ID NO: 400723 - DNA, 19 bp, Homo sapiens
  siRNA target sequence for KIAA2010 (NM_032560.3,2872-2890).
gtgtctccatctgacaaaa

SEQ ID NO: 400724 - DNA, 19 bp, Homo sapiens
  siRNA target sequence for KIAA2010 (NM_032560.3,3029-3047).
ccagtggaacgaagactaa

SEQ ID NO: 400725 - DNA, 19 bp, Homo sapiens
  siRNA target sequence for KIAA2010 (NM_032560.3,3049-3067).
ctcaccagccagtcatcta

SEQ ID NO: 400726 - DNA, 19 bp, Homo sapiens
  siRNA target sequence for KIAA2010 (NM_032560.3,3051-3069).
caccagccagtcatctaca

SEQ ID NO: 400727 - DNA, 19 bp, Homo sapiens
  siRNA target sequence for KIAA2010 (NM_032560.3,3057-3075).
ccagtcatctacaacaaat

SEQ ID NO: 400728 - DNA, 19 bp, Homo sapiens
  siRNA target sequence for KIAA2010 (NM_032560.3,3122-3140).
ctcctggatccgtacctaa

SEQ ID NO: 400729 - DNA, 19 bp, Homo sapiens
  siRNA target sequence for KIAA2010 (NM_032560.3,3124-3142).
cctggatccgtacctaaaa

SEQ ID NO: 400730 - DNA, 19 bp, Homo sapiens
  siRNA target sequence for KIAA2010 (NM_032560.3,3125-3143).
ctggatccgtacctaaaaa

SEQ ID NO: 400731 - DNA, 19 bp, Homo sapiens
  siRNA target sequence for KIAA2010 (NM_032560.3,3127-3145).
ggatccgtacctaaaaata

SEQ ID NO: 400732 - DNA, 19 bp, Homo sapiens
  siRNA target sequence for KIAA2010 (NM_032560.3,3132-3150).
cgtacctaaaaatacatct

SEQ ID NO: 400733 - DNA, 19 bp, Homo sapiens
  siRNA target sequence for KIAA2010 (NM_032560.3,3153-3171).
gacggcagctattactaca

SEQ ID NO: 400734 - DNA, 19 bp, Homo sapiens
  siRNA target sequence for KIAA2010 (NM_032560.3,3155-3173).
cggcagctattactacaaa

SEQ ID NO: 400735 - DNA, 19 bp, Homo sapiens
  siRNA target sequence for KIAA2010 (NM_032560.3,3181-3199).
ctcgtgggtctggtagatt

SEQ ID NO: 400736 - DNA, 19 bp, Homo sapiens
  siRNA target sequence for KIAA2010 (NM_032560.3,3183-3201).
cgtgggtctggtagattat

SEQ ID NO: 400737 - DNA, 19 bp, Homo sapiens
  siRNA target sequence for KIAA2010 (NM_032560.3,3186-3204).
gggtctggtagattatcct

SEQ ID NO: 400738 - DNA, 19 bp, Homo sapiens
  siRNA target sequence for KIAA2010 (NM_032560.3,3244-3262).
gatacgttaccattgtcaa

SEQ ID NO: 400739 - DNA, 19 bp, Homo sapiens
  siRNA target sequence for NYD-TSP1 (NM_032567.2,790-808).
gagaacaccgcacaagttt

SEQ ID NO: 400740 - DNA, 19 bp, Homo sapiens
  siRNA target sequence for NYD-TSP1 (NM_032567.2,792-810).
gaacaccgcacaagttttt

SEQ ID NO: 400741 - DNA, 19 bp, Homo sapiens
  siRNA target sequence for NYD-TSP1 (NM_032567.2,795-813).
caccgcacaagtttttgca

SEQ ID NO: 400742 - DNA, 19 bp, Homo sapiens
  siRNA target sequence for NYD-TSP1 (NM_032567.2,822-840).
ggtaaatcgtttagaagaa

SEQ ID NO: 400743 - DNA, 19 bp, Homo sapiens
  siRNA target sequence for NYD-TSP1 (NM_032567.2,849-867).
ccttaacgaaactcaacaa

SEQ ID NO: 400744 - DNA, 19 bp, Homo sapiens
  siRNA target sequence for NYD-TSP1 (NM_032567.2,850-868).
cttaacgaaactcaacaaa

SEQ ID NO: 400745 - DNA, 19 bp, Homo sapiens
  siRNA target sequence for NYD-TSP1 (NM_032567.2,927-945).
caacatggagcagttacta

SEQ ID NO: 400746 - DNA, 19 bp, Homo sapiens
  siRNA target sequence for NYD-TSP1 (NM_032567.2,958-976).
cactggagtaaacaacata

SEQ ID NO: 400747 - DNA, 19 bp, Homo sapiens
  siRNA target sequence for NYD-TSP1 (NM_032567.2,962-980).
ggagtaaacaacatactga

SEQ ID NO: 400748 - DNA, 19 bp, Homo sapiens
  siRNA target sequence for NYD-TSP1 (NM_032567.2,986-1004).
gtaaactgataaaatccta

SEQ ID NO: 400749 - DNA, 19 bp, Homo sapiens
  siRNA target sequence for NYD-TSP1 (NM_032567.2,993-1011).
gataaaatcctatcagaaa

SEQ ID NO: 400750 - DNA, 19 bp, Homo sapiens
  siRNA target sequence for NYD-TSP1 (NM_032567.2,1120-1138).
ctgagccatgacacctatt

SEQ ID NO: 400751 - DNA, 19 bp, Homo sapiens
  siRNA target sequence for NYD-TSP1 (NM_032567.2,1122-1140).
gagccatgacacctattca

SEQ ID NO: 400752 - DNA, 19 bp, Homo sapiens
  siRNA target sequence for NYD-TSP1 (NM_032567.2,1133-1151).
cctattcattgcagttgat

SEQ ID NO: 400753 - DNA, 19 bp, Homo sapiens
  siRNA target sequence for NYD-TSP1 (NM_032567.2,1146-1164).
gttgatggcagctttgcta

SEQ ID NO: 400754 - DNA, 19 bp, Homo sapiens
  siRNA target sequence for NYD-TSP1 (NM_032567.2,1152-1170).
ggcagctttgctagagaat

SEQ ID NO: 400755 - DNA, 19 bp, Homo sapiens
  siRNA target sequence for NYD-TSP1 (NM_032567.2,1154-1172).
cagctttgctagagaatga

SEQ ID NO: 400756 - DNA, 19 bp, Homo sapiens
  siRNA target sequence for NYD-TSP1 (NM_032567.2,1336-1354).
gcaatgaagggtacatttt

SEQ ID NO: 400757 - DNA, 19 bp, Homo sapiens
  siRNA target sequence for NYD-TSP1 (NM_032567.2,1409-1427).
gcaatacccagttcaatat

SEQ ID NO: 400758 - DNA, 19 bp, Homo sapiens
  siRNA target sequence for NYD-TSP1 (NM_032567.2,1410-1428).
caatacccagttcaatatt

SEQ ID NO: 400759 - DNA, 19 bp, Homo sapiens
  siRNA target sequence for NAG73 (NM_032570.1,555-573).
gtgtcgtaactggaattaa

SEQ ID NO: 400760 - DNA, 19 bp, Homo sapiens
  siRNA target sequence for NAG73 (NM_032570.1,557-575).
gtcgtaactggaattaagt

SEQ ID NO: 400761 - DNA, 19 bp, Homo sapiens
  siRNA target sequence for NAG73 (NM_032570.1,614-632).
ctggagttgagggaatgtt

SEQ ID NO: 400762 - DNA, 19 bp, Homo sapiens
  siRNA target sequence for NAG73 (NM_032570.1,637-655).
gatcccacctggtatcagt

SEQ ID NO: 400763 - DNA, 19 bp, Homo sapiens
  siRNA target sequence for NAG73 (NM_032570.1,685-703).
ccatgtgaggcatttgctt

SEQ ID NO: 400764 - DNA, 19 bp, Homo sapiens
  siRNA target sequence for NAG73 (NM_032570.1,785-803).
gattgggcacctcacttaa

SEQ ID NO: 400765 - DNA, 19 bp, Homo sapiens
  siRNA target sequence for NAG73 (NM_032570.1,794-812).
cctcacttaacgtctaact

SEQ ID NO: 400766 - DNA, 19 bp, Homo sapiens
  siRNA target sequence for TSP-NY (NM_032573.2,179-197).
gaacatcgggtcagaagtt

SEQ ID NO: 400767 - DNA, 19 bp, Homo sapiens
  siRNA target sequence for TSP-NY (NM_032573.2,185-203).
cgggtcagaagttgagatt

SEQ ID NO: 400768 - DNA, 19 bp, Homo sapiens
  siRNA target sequence for TSP-NY (NM_032573.2,264-282).
gataaagagctcaatgaca

SEQ ID NO: 400769 - DNA, 19 bp, Homo sapiens
  siRNA target sequence for TSP-NY (NM_032573.2,321-339).
gaggatcggcagaaagtgt

SEQ ID NO: 400770 - DNA, 19 bp, Homo sapiens
  siRNA target sequence for TSP-NY (NM_032573.2,362-380).
caaattagaaggtgaacta

SEQ ID NO: 400771 - DNA, 19 bp, Homo sapiens
  siRNA target sequence for TSP-NY (NM_032573.2,378-396).
ctacataaaagaactgaaa

SEQ ID NO: 400772 - DNA, 19 bp, Homo sapiens
  siRNA target sequence for TSP-NY (NM_032573.2,406-424).
cactcacgaagaaggtaaa

SEQ ID NO: 400773 - DNA, 19 bp, Homo sapiens
  siRNA target sequence for TSP-NY (NM_032573.2,498-516).
caaaaggcaacgcattctt

SEQ ID NO: 400774 - DNA, 19 bp, Homo sapiens
  siRNA target sequence for TSP-NY (NM_032573.2,503-521).
ggcaacgcattcttctctt

SEQ ID NO: 400775 - DNA, 19 bp, Homo sapiens
  siRNA target sequence for TSP-NY (NM_032573.2,533-551).
ccttgaggctagaaacgaa

SEQ ID NO: 400776 - DNA, 19 bp, Homo sapiens
  siRNA target sequence for TSP-NY (NM_032573.2,534-552).
cttgaggctagaaacgaaa

SEQ ID NO: 400777 - DNA, 19 bp, Homo sapiens
  siRNA target sequence for TSP-NY (NM_032573.2,615-633).
gctcttacgacaatgataa

SEQ ID NO: 400778 - DNA, 19 bp, Homo sapiens
  siRNA target sequence for TSP-NY (NM_032573.2,616-634).
ctcttacgacaatgataaa

SEQ ID NO: 400779 - DNA, 19 bp, Homo sapiens
  siRNA target sequence for TSP-NY (NM_032573.2,622-640).
cgacaatgataaagctaaa

SEQ ID NO: 400780 - DNA, 19 bp, Homo sapiens
  siRNA target sequence for TSP-NY (NM_032573.2,675-693).
gcagattgttcgggtaaat

SEQ ID NO: 400781 - DNA, 19 bp, Homo sapiens
  siRNA target sequence for TSP-NY (NM_032573.2,676-694).
cagattgttcgggtaaatt

SEQ ID NO: 400782 - DNA, 19 bp, Homo sapiens
  siRNA target sequence for TSP-NY (NM_032573.2,732-750).
gcggagacttgtattgtga

SEQ ID NO: 400783 - DNA, 19 bp, Homo sapiens
  siRNA target sequence for TSP-NY (NM_032573.2,734-752).
ggagacttgtattgtgaaa

SEQ ID NO: 400784 - DNA, 19 bp, Homo sapiens
  siRNA target sequence for TSP-NY (NM_032573.2,784-802).
cacttaagattgaagtcaa

SEQ ID NO: 400785 - DNA, 19 bp, Homo sapiens
  siRNA target sequence for TSP-NY (NM_032573.2,848-866).
gcaacgagaagagatcatt

SEQ ID NO: 400786 - DNA, 19 bp, Homo sapiens
  siRNA target sequence for TSP-NY (NM_032573.2,869-887).
cctcaagcaagagaaaagt

SEQ ID NO: 400787 - DNA, 19 bp, Homo sapiens
  siRNA target sequence for TSP-NY (NM_032573.2,886-904).
gttgcctgcacgatgaatt

SEQ ID NO: 400788 - DNA, 19 bp, Homo sapiens
  siRNA target sequence for TSP-NY (NM_032573.2,894-912).
cacgatgaattgcttttta

SEQ ID NO: 400789 - DNA, 19 bp, Homo sapiens
  siRNA target sequence for TSP-NY (NM_032573.2,896-914).
cgatgaattgctttttact

SEQ ID NO: 400790 - DNA, 19 bp, Homo sapiens
  siRNA target sequence for TSP-NY (NM_032573.2,945-963).
cttaatattgcgaagtcaa

SEQ ID NO: 400791 - DNA, 19 bp, Homo sapiens
  siRNA target sequence for TSP-NY (NM_032573.2,965-983).
gcaagaacgcacaaattca

SEQ ID NO: 400792 - DNA, 19 bp, Homo sapiens
  siRNA target sequence for TSP-NY (NM_032573.2,992-1010).
caatctgagacagatttat

SEQ ID NO: 400793 - DNA, 19 bp, Homo sapiens
  siRNA target sequence for TSP-NY (NM_032573.2,1074-1092).
cagatgtatgactcaaaga

SEQ ID NO: 400794 - DNA, 19 bp, Homo sapiens
  siRNA target sequence for TSP-NY (NM_032573.2,1123-1141).
gagacatgtgtttatcaga

SEQ ID NO: 400795 - DNA, 19 bp, Homo sapiens
  siRNA target sequence for TSP-NY (NM_032573.2,1255-1273).
gctcttgcgatgaatgcaa

SEQ ID NO: 400796 - DNA, 19 bp, Homo sapiens
  siRNA target sequence for TSP-NY (NM_032573.2,1333-1351).
ccatattcaccaaagactt

SEQ ID NO: 400797 - DNA, 19 bp, Homo sapiens
  siRNA target sequence for TSP-NY (NM_032573.2,1334-1352).
catattcaccaaagactta

SEQ ID NO: 400798 - DNA, 19 bp, Homo sapiens
  siRNA target sequence for TSP-NY (NM_032573.2,1401-1419).
gaacccgaaaacaaaatta

SEQ ID NO: 400799 - DNA, 19 bp, Homo sapiens
  siRNA target sequence for TSP-NY (NM_032573.2,1427-1445).
caagatccacacaaaatca

SEQ ID NO: 400800 - DNA, 19 bp, Homo sapiens
  siRNA target sequence for TSP-NY (NM_032573.2,1553-1571).
gaccaactgtccaagttca

SEQ ID NO: 400801 - DNA, 19 bp, Homo sapiens
  siRNA target sequence for TSP-NY (NM_032573.2,1613-1631).
ggaaaggtccgaaatctca

SEQ ID NO: 400802 - DNA, 19 bp, Homo sapiens
  siRNA target sequence for TSP-NY (NM_032573.2,1687-1705).
gctgccacccgagtaactt

SEQ ID NO: 400803 - DNA, 19 bp, Homo sapiens
  siRNA target sequence for TSP-NY (NM_032573.2,1690-1708).
gccacccgagtaacttcat

SEQ ID NO: 400804 - DNA, 19 bp, Homo sapiens
  siRNA target sequence for TSP-NY (NM_032573.2,1691-1709).
ccacccgagtaacttcata

SEQ ID NO: 400805 - DNA, 19 bp, Homo sapiens
  siRNA target sequence for TSP-NY (NM_032573.2,1692-1710).
cacccgagtaacttcataa

SEQ ID NO: 400806 - DNA, 19 bp, Homo sapiens
  siRNA target sequence for TSP-NY (NM_032573.2,1694-1712).
cccgagtaacttcataatt

SEQ ID NO: 400807 - DNA, 19 bp, Homo sapiens
  siRNA target sequence for TSP-NY (NM_032573.2,1734-1752).
gacgtggagtggatgagta

SEQ ID NO: 400808 - DNA, 19 bp, Homo sapiens
  siRNA target sequence for TSP-NY (NM_032573.2,1797-1815).
gggtgcacctgttcagaaa

SEQ ID NO: 400809 - DNA, 19 bp, Homo sapiens
  siRNA target sequence for TSP-NY (NM_032573.2,1817-1835).
catctgtggcacacaacat

SEQ ID NO: 400810 - DNA, 19 bp, Homo sapiens
  siRNA target sequence for TSP-NY (NM_032573.2,1854-1872).
ctaattgccatccaagatt

SEQ ID NO: 400811 - DNA, 19 bp, Homo sapiens
  siRNA target sequence for TSP-NY (NM_032573.2,1916-1934).
gacggagtcctcttccaat

SEQ ID NO: 400812 - DNA, 19 bp, Homo sapiens
  siRNA target sequence for TSP-NY (NM_032573.2,1919-1937).
ggagtcctcttccaataaa

SEQ ID NO: 400813 - DNA, 19 bp, Homo sapiens
  siRNA target sequence for TSP-NY (NM_032573.2,1945-1963).
cacctacgagtttgttaat

SEQ ID NO: 400814 - DNA, 19 bp, Homo sapiens
  siRNA target sequence for TSP-NY (NM_032573.2,1947-1965).
cctacgagtttgttaatct

SEQ ID NO: 400815 - DNA, 19 bp, Homo sapiens
  siRNA target sequence for TSP-NY (NM_032573.2,1948-1966).
ctacgagtttgttaatcta

SEQ ID NO: 400816 - DNA, 19 bp, Homo sapiens
  siRNA target sequence for TSP-NY (NM_032573.2,1951-1969).
cgagtttgttaatctacaa

SEQ ID NO: 400817 - DNA, 19 bp, Homo sapiens
  siRNA target sequence for TSP-NY (NM_032573.2,1952-1970).
gagtttgttaatctacaaa

SEQ ID NO: 400818 - DNA, 19 bp, Homo sapiens
  siRNA target sequence for TSP-NY (NM_032573.2,2172-2190).
gcagacaccaatactgaat

SEQ ID NO: 400819 - DNA, 19 bp, Homo sapiens
  siRNA target sequence for GLIS2 (NM_032575.1,566-584).
gtcgctgggccaagtgtaa

SEQ ID NO: 400820 - DNA, 19 bp, Homo sapiens
  siRNA target sequence for GLIS2 (NM_032575.1,613-631).
gtggaccatgtcaacgatt

SEQ ID NO: 400821 - DNA, 19 bp, Homo sapiens
  siRNA target sequence for GLIS2 (NM_032575.1,618-636).
ccatgtcaacgattaccat

SEQ ID NO: 400822 - DNA, 19 bp, Homo sapiens
  siRNA target sequence for GLIS2 (NM_032575.1,689-707).
gccatggccgaggtttcaa

SEQ ID NO: 400823 - DNA, 19 bp, Homo sapiens
  siRNA target sequence for GLIS2 (NM_032575.1,887-905).
ccagtgaccgctttaagca

SEQ ID NO: 400824 - DNA, 19 bp, Homo sapiens
  siRNA target sequence for GLIS2 (NM_032575.1,983-1001).
cactgcgcaagcacatcaa

SEQ ID NO: 400825 - DNA, 19 bp, Homo sapiens
  siRNA target sequence for CYorf15B (NM_032576.1,541-559).
ggctgaagagaaaactatt

SEQ ID NO: 400826 - DNA, 19 bp, Homo sapiens
  siRNA target sequence for CYorf15B (NM_032576.1,610-628).
gctgtacaaggctcttcaa

SEQ ID NO: 400827 - DNA, 19 bp, Homo sapiens
  siRNA target sequence for CYorf15B (NM_032576.1,673-691).
gcaggtctctgtgaaagta

SEQ ID NO: 400828 - DNA, 19 bp, Homo sapiens
  siRNA target sequence for CYorf15B (NM_032576.1,818-836).
gaagtaaaatgctactcaa

SEQ ID NO: 400829 - DNA, 19 bp, Homo sapiens
  siRNA target sequence for LOC84664 (NM_032577.1,597-615).
cacacggtgcactctacaa

SEQ ID NO: 400830 - DNA, 19 bp, Homo sapiens
  siRNA target sequence for FLJ14437 (NM_032578.1,490-508).
gcaagacgacagcatagaa

SEQ ID NO: 400831 - DNA, 19 bp, Homo sapiens
  siRNA target sequence for FLJ14437 (NM_032578.1,520-538).
catatctcagcttctaaga

SEQ ID NO: 400832 - DNA, 19 bp, Homo sapiens
  siRNA target sequence for FLJ14437 (NM_032578.1,530-548).
cttctaagagagagctatt

SEQ ID NO: 400833 - DNA, 19 bp, Homo sapiens
  siRNA target sequence for FLJ14437 (NM_032578.1,558-576).
ccagacatcggggaaacaa

SEQ ID NO: 400834 - DNA, 19 bp, Homo sapiens
  siRNA target sequence for FLJ14437 (NM_032578.1,559-577).
cagacatcggggaaacaat

SEQ ID NO: 400835 - DNA, 19 bp, Homo sapiens
  siRNA target sequence for FLJ14437 (NM_032578.1,561-579).
gacatcggggaaacaatga

SEQ ID NO: 400836 - DNA, 19 bp, Homo sapiens
  siRNA target sequence for FLJ14437 (NM_032578.1,722-740).
gcaagactggccatcaatt

SEQ ID NO: 400837 - DNA, 19 bp, Homo sapiens
  siRNA target sequence for FLJ14437 (NM_032578.1,723-741).
caagactggccatcaatta

SEQ ID NO: 400838 - DNA, 19 bp, Homo sapiens
  siRNA target sequence for FLJ14437 (NM_032578.1,726-744).
gactggccatcaattacga

SEQ ID NO: 400839 - DNA, 19 bp, Homo sapiens
  siRNA target sequence for FLJ14437 (NM_032578.1,789-807).
ctcctgatcagatgaaaca

SEQ ID NO: 400840 - DNA, 19 bp, Homo sapiens
  siRNA target sequence for FLJ14437 (NM_032578.1,806-824).
cactcacctaatttaagtt

SEQ ID NO: 400841 - DNA, 19 bp, Homo sapiens
  siRNA target sequence for FLJ14437 (NM_032578.1,808-826).
ctcacctaatttaagtttt

SEQ ID NO: 400842 - DNA, 19 bp, Homo sapiens
  siRNA target sequence for FLJ14437 (NM_032578.1,810-828).
cacctaatttaagttttga

SEQ ID NO: 400843 - DNA, 19 bp, Homo sapiens
  siRNA target sequence for FLJ14437 (NM_032578.1,858-876).
gtcccaccagctctaaaga

SEQ ID NO: 400844 - DNA, 19 bp, Homo sapiens
  siRNA target sequence for FLJ14437 (NM_032578.1,860-878).
cccaccagctctaaagaaa

SEQ ID NO: 400845 - DNA, 19 bp, Homo sapiens
  siRNA target sequence for FLJ14437 (NM_032578.1,890-908).
gcaaaaaggccacagtatt

SEQ ID NO: 400846 - DNA, 19 bp, Homo sapiens
  siRNA target sequence for FLJ14437 (NM_032578.1,899-917).
ccacagtattgttctgaaa

SEQ ID NO: 400847 - DNA, 19 bp, Homo sapiens
  siRNA target sequence for FLJ14437 (NM_032578.1,965-983).
gagctatcctcccttttca

SEQ ID NO: 400848 - DNA, 19 bp, Homo sapiens
  siRNA target sequence for FLJ14437 (NM_032578.1,991-1009).
cagctccaaaaggattaga

SEQ ID NO: 400849 - DNA, 19 bp, Homo sapiens
  siRNA target sequence for FLJ14437 (NM_032578.1,1011-1029).
ctcgtgcctgcaaaaacca

SEQ ID NO: 400850 - DNA, 19 bp, Homo sapiens
  siRNA target sequence for FLJ14437 (NM_032578.1,1097-1115).
gaaagacgagaaagatctt

SEQ ID NO: 400851 - DNA, 19 bp, Homo sapiens
  siRNA target sequence for FLJ14437 (NM_032578.1,1146-1164).
gggataatgaagtgaatca

SEQ ID NO: 400852 - DNA, 19 bp, Homo sapiens
  siRNA target sequence for FLJ14437 (NM_032578.1,1251-1269).
ccccttcatctctgtacta

SEQ ID NO: 400853 - DNA, 19 bp, Homo sapiens
  siRNA target sequence for FLJ14437 (NM_032578.1,1254-1272).
cttcatctctgtactatga

SEQ ID NO: 400854 - DNA, 19 bp, Homo sapiens
  siRNA target sequence for FLJ14437 (NM_032578.1,1257-1275).
catctctgtactatgaaga

SEQ ID NO: 400855 - DNA, 19 bp, Homo sapiens
  siRNA target sequence for FLJ14437 (NM_032578.1,1292-1310).
ccccggttcactcaaaagt

SEQ ID NO: 400856 - DNA, 19 bp, Homo sapiens
  siRNA target sequence for FLJ14437 (NM_032578.1,1293-1311).
cccggttcactcaaaagtt

SEQ ID NO: 400857 - DNA, 19 bp, Homo sapiens
  siRNA target sequence for FLJ14437 (NM_032578.1,1294-1312).
ccggttcactcaaaagtta

SEQ ID NO: 400858 - DNA, 19 bp, Homo sapiens
  siRNA target sequence for FLJ14437 (NM_032578.1,1357-1375).
catagtggtaggaattcca

SEQ ID NO: 400859 - DNA, 19 bp, Homo sapiens
  siRNA target sequence for FLJ14437 (NM_032578.1,1506-1524).
cctgctttgcttctaacat

SEQ ID NO: 400860 - DNA, 19 bp, Homo sapiens
  siRNA target sequence for FLJ14437 (NM_032578.1,1539-1557).
cgacttctgctgagattta

SEQ ID NO: 400861 - DNA, 19 bp, Homo sapiens
  siRNA target sequence for FLJ14437 (NM_032578.1,1542-1560).
cttctgctgagatttatat

SEQ ID NO: 400862 - DNA, 19 bp, Homo sapiens
  siRNA target sequence for FLJ14437 (NM_032578.1,1584-1602).
cagaaggcgaccctaacaa

SEQ ID NO: 400863 - DNA, 19 bp, Homo sapiens
  siRNA target sequence for FLJ14437 (NM_032578.1,1736-1754).
cagagccccaccaattact

SEQ ID NO: 400864 - DNA, 19 bp, Homo sapiens
  siRNA target sequence for FLJ14437 (NM_032578.1,1765-1783).
ggatggaaaacctatcatt

SEQ ID NO: 400865 - DNA, 19 bp, Homo sapiens
  siRNA target sequence for FLJ14437 (NM_032578.1,1780-1798).
cattgcagctcctgtgttt

SEQ ID NO: 400866 - DNA, 19 bp, Homo sapiens
  siRNA target sequence for FLJ14437 (NM_032578.1,1784-1802).
gcagctcctgtgtttacaa

SEQ ID NO: 400867 - DNA, 19 bp, Homo sapiens
  siRNA target sequence for FLJ14437 (NM_032578.1,1804-1822).
gatgctacaaaatttgtca

SEQ ID NO: 400868 - DNA, 19 bp, Homo sapiens
  siRNA target sequence for FLJ14437 (NM_032578.1,1831-1849).
gggtcagctggttgtcttt

SEQ ID NO: 400869 - DNA, 19 bp, Homo sapiens
  siRNA target sequence for FLJ14437 (NM_032578.1,1833-1851).
gtcagctggttgtctttga

SEQ ID NO: 400870 - DNA, 19 bp, Homo sapiens
  siRNA target sequence for FLJ14437 (NM_032578.1,1877-1895).
cctaaggttgagtggtata

SEQ ID NO: 400871 - DNA, 19 bp, Homo sapiens
  siRNA target sequence for FLJ14437 (NM_032578.1,1882-1900).
ggttgagtggtatagagaa

SEQ ID NO: 400872 - DNA, 19 bp, Homo sapiens
  siRNA target sequence for FLJ14437 (NM_032578.1,1916-1934).
gattctccagattttagga

SEQ ID NO: 400873 - DNA, 19 bp, Homo sapiens
  siRNA target sequence for FLJ14437 (NM_032578.1,1920-1938).
ctccagattttaggatttt

SEQ ID NO: 400874 - DNA, 19 bp, Homo sapiens
  siRNA target sequence for FLJ14437 (NM_032578.1,1925-1943).
gattttaggattttacaga

SEQ ID NO: 400875 - DNA, 19 bp, Homo sapiens
  siRNA target sequence for FLJ14437 (NM_032578.1,1997-2015).
gaggtgtttgcagaagatt

SEQ ID NO: 400876 - DNA, 19 bp, Homo sapiens
  siRNA target sequence for FLJ14437 (NM_032578.1,2050-2068).
cggcacagtgtcaagcatt

SEQ ID NO: 400877 - DNA, 19 bp, Homo sapiens
  siRNA target sequence for FLJ14437 (NM_032578.1,2117-2135).
cttcactcagccaactcta

SEQ ID NO: 400878 - DNA, 19 bp, Homo sapiens
  siRNA target sequence for FLJ14437 (NM_032578.1,2137-2155).
caccaacctggcagctatt

SEQ ID NO: 400879 - DNA, 19 bp, Homo sapiens
  siRNA target sequence for FLJ14437 (NM_032578.1,2412-2430).
cttcttcccccgtgaaaga

SEQ ID NO: 400880 - DNA, 19 bp, Homo sapiens
  siRNA target sequence for FLJ14437 (NM_032578.1,2446-2464).
ggccaaacccaaacttgat

SEQ ID NO: 400881 - DNA, 19 bp, Homo sapiens
  siRNA target sequence for FLJ14437 (NM_032578.1,2447-2465).
gccaaacccaaacttgatt

SEQ ID NO: 400882 - DNA, 19 bp, Homo sapiens
  siRNA target sequence for FLJ14437 (NM_032578.1,2482-2500).
gcttcataaccaagtctta

SEQ ID NO: 400883 - DNA, 19 bp, Homo sapiens
  siRNA target sequence for FLJ14437 (NM_032578.1,2709-2727).
gctctccggtgttcacttt

SEQ ID NO: 400884 - DNA, 19 bp, Homo sapiens
  siRNA target sequence for FLJ14437 (NM_032578.1,2733-2751).
gcactcctcaaactattca

SEQ ID NO: 400885 - DNA, 19 bp, Homo sapiens
  siRNA target sequence for FLJ14437 (NM_032578.1,2808-2826).
ctccaggagggctttccat

SEQ ID NO: 400886 - DNA, 19 bp, Homo sapiens
  siRNA target sequence for FLJ14437 (NM_032578.1,2813-2831).
ggagggctttccatccaaa

SEQ ID NO: 400887 - DNA, 19 bp, Homo sapiens
  siRNA target sequence for FLJ14437 (NM_032578.1,2817-2835).
ggctttccatccaaaatga

SEQ ID NO: 400888 - DNA, 19 bp, Homo sapiens
  siRNA target sequence for FLJ14437 (NM_032578.1,2942-2960).
cctaccagccggattcaga

SEQ ID NO: 400889 - DNA, 19 bp, Homo sapiens
  siRNA target sequence for FLJ14437 (NM_032578.1,2943-2961).
ctaccagccggattcagaa

SEQ ID NO: 400890 - DNA, 19 bp, Homo sapiens
  siRNA target sequence for FLJ14437 (NM_032578.1,3058-3076).
ccagggattagcgaagaaa

SEQ ID NO: 400891 - DNA, 19 bp, Homo sapiens
  siRNA target sequence for FLJ14437 (NM_032578.1,3085-3103).
gtctcctcaaccagtgaat

SEQ ID NO: 400892 - DNA, 19 bp, Homo sapiens
  siRNA target sequence for FLJ14437 (NM_032578.1,3247-3265).
ggaacgtactcctgttgat

SEQ ID NO: 400893 - DNA, 19 bp, Homo sapiens
  siRNA target sequence for FLJ14437 (NM_032578.1,3251-3269).
cgtactcctgttgatgaat

SEQ ID NO: 400894 - DNA, 19 bp, Homo sapiens
  siRNA target sequence for FLJ14437 (NM_032578.1,3298-3316).
ccccacgggcaagtgtatt

SEQ ID NO: 400895 - DNA, 19 bp, Homo sapiens
  siRNA target sequence for FLJ14437 (NM_032578.1,3301-3319).
cacgggcaagtgtattgct

SEQ ID NO: 400896 - DNA, 19 bp, Homo sapiens
  siRNA target sequence for FLJ14437 (NM_032578.1,3312-3330).
gtattgctcccatctttga

SEQ ID NO: 400897 - DNA, 19 bp, Homo sapiens
  siRNA target sequence for FLJ14437 (NM_032578.1,3397-3415).
gatacctgttccaaaggtt

SEQ ID NO: 400898 - DNA, 19 bp, Homo sapiens
  siRNA target sequence for FLJ14437 (NM_032578.1,3401-3419).
cctgttccaaaggtttact

SEQ ID NO: 400899 - DNA, 19 bp, Homo sapiens
  siRNA target sequence for FLJ14437 (NM_032578.1,3581-3599).
ggccacttgatggtacaaa

SEQ ID NO: 400900 - DNA, 19 bp, Homo sapiens
  siRNA target sequence for FLJ14437 (NM_032578.1,3583-3601).
ccacttgatggtacaaagt

SEQ ID NO: 400901 - DNA, 19 bp, Homo sapiens
  siRNA target sequence for FLJ14437 (NM_032578.1,3584-3602).
cacttgatggtacaaagtt

SEQ ID NO: 400902 - DNA, 19 bp, Homo sapiens
  siRNA target sequence for FLJ14437 (NM_032578.1,3654-3672).
cccgagtgcaagaaagaga

SEQ ID NO: 400903 - DNA, 19 bp, Homo sapiens
  siRNA target sequence for FLJ14437 (NM_032578.1,3693-3711).
gctttttccgaccacattt

SEQ ID NO: 400904 - DNA, 19 bp, Homo sapiens
  siRNA target sequence for FLJ14437 (NM_032578.1,3766-3784).
ctgtaaggtgagtggttta

SEQ ID NO: 400905 - DNA, 19 bp, Homo sapiens
  siRNA target sequence for FLJ14437 (NM_032578.1,3831-3849).
cagatgcctcccacaagat

SEQ ID NO: 400906 - DNA, 19 bp, Homo sapiens
  siRNA target sequence for FLJ14437 (NM_032578.1,3902-3920).
cgcgacgcagggacctata

SEQ ID NO: 400907 - DNA, 19 bp, Homo sapiens
  siRNA target sequence for FLJ14437 (NM_032578.1,3903-3921).
gcgacgcagggacctataa

SEQ ID NO: 400908 - DNA, 19 bp, Homo sapiens
  siRNA target sequence for FLJ14437 (NM_032578.1,3905-3923).
gacgcagggacctataagt

SEQ ID NO: 400909 - DNA, 19 bp, Homo sapiens
  siRNA target sequence for FLJ14437 (NM_032578.1,3922-3940).
gtgcatcgctaccaacaaa

SEQ ID NO: 400910 - DNA, 19 bp, Homo sapiens
  siRNA target sequence for FLJ14437 (NM_032578.1,3937-3955).
caaaaccgggcagaattct

SEQ ID NO: 400911 - DNA, 19 bp, Homo sapiens
  siRNA target sequence for FLJ14437 (NM_032578.1,3943-3961).
cgggcagaattcttttagt

SEQ ID NO: 400912 - DNA, 19 bp, Homo sapiens
  siRNA target sequence for FLJ14437 (NM_032578.1,3945-3963).
ggcagaattcttttagtct

SEQ ID NO: 400913 - DNA, 19 bp, Homo sapiens
  siRNA target sequence for FLJ14437 (NM_032578.1,4082-4100).
cccccacctgtgttctact

SEQ ID NO: 400914 - DNA, 19 bp, Homo sapiens
  siRNA target sequence for FLJ14437 (NM_032578.1,4219-4237).
cacgttgtcagccaagaat

SEQ ID NO: 400915 - DNA, 19 bp, Homo sapiens
  siRNA target sequence for FLJ14437 (NM_032578.1,4260-4278).
ctgccaggctggatatata

SEQ ID NO: 400916 - DNA, 19 bp, Homo sapiens
  siRNA target sequence for FLJ14437 (NM_032578.1,4281-4299).
ctcagtggcaccatcagat

SEQ ID NO: 400917 - DNA, 19 bp, Homo sapiens
  siRNA target sequence for FLJ14437 (NM_032578.1,4339-4357).
cggatctctcaccagtaaa

SEQ ID NO: 400918 - DNA, 19 bp, Homo sapiens
  siRNA target sequence for FLJ14437 (NM_032578.1,4351-4369).
cagtaaaggacttgacata

SEQ ID NO: 400919 - DNA, 19 bp, Homo sapiens
  siRNA target sequence for FLJ14437 (NM_032578.1,4353-4371).
gtaaaggacttgacatatt

SEQ ID NO: 400920 - DNA, 19 bp, Homo sapiens
  siRNA target sequence for FLJ14437 (NM_032578.1,4391-4409).
gaaagcacgatggtgtatt

SEQ ID NO: 400921 - DNA, 19 bp, Homo sapiens
  siRNA target sequence for FLJ14437 (NM_032578.1,4430-4448).
gtggagagtgatgaacttt

SEQ ID NO: 400922 - DNA, 19 bp, Homo sapiens
  siRNA target sequence for FBXL10 (NM_032590.1,115-133).
ccccccacgaaaaagacat

SEQ ID NO: 400923 - DNA, 19 bp, Homo sapiens
  siRNA target sequence for FBXL10 (NM_032590.1,382-400).
cagggttcccctgatattt

SEQ ID NO: 400924 - DNA, 19 bp, Homo sapiens
  siRNA target sequence for FBXL10 (NM_032590.1,385-403).
ggttcccctgatatttcga

SEQ ID NO: 400925 - DNA, 19 bp, Homo sapiens
  siRNA target sequence for FBXL10 (NM_032590.1,390-408).
ccctgatatttcgagaaaa

SEQ ID NO: 400926 - DNA, 19 bp, Homo sapiens
  siRNA target sequence for FBXL10 (NM_032590.1,430-448).
gcctgaccctgatttcaca

SEQ ID NO: 400927 - DNA, 19 bp, Homo sapiens
  siRNA target sequence for FBXL10 (NM_032590.1,447-465).
cagtccgagacgtcaaact

SEQ ID NO: 400928 - DNA, 19 bp, Homo sapiens
  siRNA target sequence for FBXL10 (NM_032590.1,537-555).
cccagtttgtgcgttacta

SEQ ID NO: 400929 - DNA, 19 bp, Homo sapiens
  siRNA target sequence for FBXL10 (NM_032590.1,767-785).
ctgatgagcgtgaaaggtt

SEQ ID NO: 400930 - DNA, 19 bp, Homo sapiens
  siRNA target sequence for FBXL10 (NM_032590.1,813-831).
gaggcacttccgtttggta

SEQ ID NO: 400931 - DNA, 19 bp, Homo sapiens
  siRNA target sequence for FBXL10 (NM_032590.1,869-887).
cctccaacgctgcacaatt

SEQ ID NO: 400932 - DNA, 19 bp, Homo sapiens
  siRNA target sequence for FBXL10 (NM_032590.1,870-888).
ctccaacgctgcacaattt

SEQ ID NO: 400933 - DNA, 19 bp, Homo sapiens
  siRNA target sequence for FBXL10 (NM_032590.1,918-936).
gcaaacagagtgacatctt

SEQ ID NO: 400934 - DNA, 19 bp, Homo sapiens
  siRNA target sequence for FBXL10 (NM_032590.1,919-937).
caaacagagtgacatcttt

SEQ ID NO: 400935 - DNA, 19 bp, Homo sapiens
  siRNA target sequence for FBXL10 (NM_032590.1,950-968).
gtggaacgatgccaaagaa

SEQ ID NO: 400936 - DNA, 19 bp, Homo sapiens
  siRNA target sequence for FBXL10 (NM_032590.1,1119-1137).
cgcgggtgcagcccaaatt

SEQ ID NO: 400937 - DNA, 19 bp, Homo sapiens
  siRNA target sequence for FBXL10 (NM_032590.1,1138-1156).
ccgttaccccttctactat

SEQ ID NO: 400938 - DNA, 19 bp, Homo sapiens
  siRNA target sequence for FBXL10 (NM_032590.1,1167-1185).
ggtatgtcctggagagata

SEQ ID NO: 400939 - DNA, 19 bp, Homo sapiens
  siRNA target sequence for FBXL10 (NM_032590.1,1229-1247).
cagagggagtcgatgctta

SEQ ID NO: 400940 - DNA, 19 bp, Homo sapiens
  siRNA target sequence for FBXL10 (NM_032590.1,1231-1249).
gagggagtcgatgcttatt

SEQ ID NO: 400941 - DNA, 19 bp, Homo sapiens
  siRNA target sequence for FBXL10 (NM_032590.1,1233-1251).
gggagtcgatgcttattga

SEQ ID NO: 400942 - DNA, 19 bp, Homo sapiens
  siRNA target sequence for FBXL10 (NM_032590.1,1234-1252).
ggagtcgatgcttattgat

SEQ ID NO: 400943 - DNA, 19 bp, Homo sapiens
  siRNA target sequence for FBXL10 (NM_032590.1,1472-1490).
ctgcgattcctcaaaagga

SEQ ID NO: 400944 - DNA, 19 bp, Homo sapiens
  siRNA target sequence for FBXL10 (NM_032590.1,1527-1545).
ccacattggccgtagacta

SEQ ID NO: 400945 - DNA, 19 bp, Homo sapiens
  siRNA target sequence for FBXL10 (NM_032590.1,1594-1612).
gacccatctcactgagttt

SEQ ID NO: 400946 - DNA, 19 bp, Homo sapiens
  siRNA target sequence for FBXL10 (NM_032590.1,1596-1614).
cccatctcactgagtttga

SEQ ID NO: 400947 - DNA, 19 bp, Homo sapiens
  siRNA target sequence for FBXL10 (NM_032590.1,1597-1615).
ccatctcactgagtttgaa

SEQ ID NO: 400948 - DNA, 19 bp, Homo sapiens
  siRNA target sequence for FBXL10 (NM_032590.1,2139-2157).
gctccatctgcaatgaaat

SEQ ID NO: 400949 - DNA, 19 bp, Homo sapiens
  siRNA target sequence for FBXL10 (NM_032590.1,2162-2180).
caccctggatgccttaaga

SEQ ID NO: 400950 - DNA, 19 bp, Homo sapiens
  siRNA target sequence for FBXL10 (NM_032590.1,2164-2182).
ccctggatgccttaagatt

SEQ ID NO: 400951 - DNA, 19 bp, Homo sapiens
  siRNA target sequence for FBXL10 (NM_032590.1,2165-2183).
cctggatgccttaagatta

SEQ ID NO: 400952 - DNA, 19 bp, Homo sapiens
  siRNA target sequence for FBXL10 (NM_032590.1,2166-2184).
ctggatgccttaagattaa

SEQ ID NO: 400953 - DNA, 19 bp, Homo sapiens
  siRNA target sequence for FBXL10 (NM_032590.1,2169-2187).
gatgccttaagattaagga

SEQ ID NO: 400954 - DNA, 19 bp, Homo sapiens
  siRNA target sequence for FBXL10 (NM_032590.1,2226-2244).
gggagtgtccgaagtgtaa

SEQ ID NO: 400955 - DNA, 19 bp, Homo sapiens
  siRNA target sequence for FBXL10 (NM_032590.1,2610-2628).
ggagatccagtctcactta

SEQ ID NO: 400956 - DNA, 19 bp, Homo sapiens
  siRNA target sequence for FBXL10 (NM_032590.1,2641-2659).
gctcaaacctggcaaagaa

SEQ ID NO: 400957 - DNA, 19 bp, Homo sapiens
  siRNA target sequence for FBXL10 (NM_032590.1,2660-2678).
gataagcttttcaggaaaa

SEQ ID NO: 400958 - DNA, 19 bp, Homo sapiens
  siRNA target sequence for FBXL10 (NM_032590.1,3400-3418).
ccactgcaagtctatcaca

SEQ ID NO: 400959 - DNA, 19 bp, Homo sapiens
  siRNA target sequence for FBXL10 (NM_032590.1,3622-3640).
ggtggagggactaaaggat

SEQ ID NO: 400960 - DNA, 19 bp, Homo sapiens
  siRNA target sequence for FBXL10 (NM_032590.1,3802-3820).
gctccacctcagttactgt

SEQ ID NO: 400961 - DNA, 19 bp, Homo sapiens
  siRNA target sequence for FBXL10 (NM_032590.1,3803-3821).
ctccacctcagttactgta

SEQ ID NO: 400962 - DNA, 19 bp, Homo sapiens
  siRNA target sequence for FBXL10 (NM_032590.1,3827-3845).
gtcaccgaccagtctatca

SEQ ID NO: 400963 - DNA, 19 bp, Homo sapiens
  siRNA target sequence for FBXL10 (NM_032590.1,3926-3944).
cagtgcctgtccttcttca

SEQ ID NO: 400964 - DNA, 19 bp, Homo sapiens
  siRNA target sequence for FBXL10 (NM_032590.1,4042-4060).
ccagtttgggcaagtagaa

SEQ ID NO: 400965 - DNA, 19 bp, Homo sapiens
  siRNA target sequence for HINT2 (NM_032593.1,419-437).
gataccgacttgtgatcaa

SEQ ID NO: 400966 - DNA, 19 bp, Homo sapiens
  siRNA target sequence for HINT2 (NM_032593.1,450-468).
gggtgcacaatctgtgtat

SEQ ID NO: 400967 - DNA, 19 bp, Homo sapiens
  siRNA target sequence for HINT2 (NM_032593.1,452-470).
gtgcacaatctgtgtatca

SEQ ID NO: 400968 - DNA, 19 bp, Homo sapiens
  siRNA target sequence for HINT2 (NM_032593.1,465-483).
gtatcatctgcacattcat

SEQ ID NO: 400969 - DNA, 19 bp, Homo sapiens
  siRNA target sequence for INSM2 (NM_032594.2,226-244).
cctggtgaagcgaactaaa

SEQ ID NO: 400970 - DNA, 19 bp, Homo sapiens
  siRNA target sequence for INSM2 (NM_032594.2,606-624).
ccgtctccgccgagtcttt

SEQ ID NO: 400971 - DNA, 19 bp, Homo sapiens
  siRNA target sequence for INSM2 (NM_032594.2,984-1002).
cgccactgggggagttcat

SEQ ID NO: 400972 - DNA, 19 bp, Homo sapiens
  siRNA target sequence for INSM2 (NM_032594.2,1469-1487).
ggcaggggatccgagattt

SEQ ID NO: 400973 - DNA, 19 bp, Homo sapiens
  siRNA target sequence for INSM2 (NM_032594.2,1470-1488).
gcaggggatccgagatttt

SEQ ID NO: 400974 - DNA, 19 bp, Homo sapiens
  siRNA target sequence for INSM2 (NM_032594.2,1473-1491).
ggggatccgagattttcgt

SEQ ID NO: 400975 - DNA, 19 bp, Homo sapiens
  siRNA target sequence for INSM2 (NM_032594.2,1827-1845).
ggctgacccggcacatcaa

SEQ ID NO: 400976 - DNA, 19 bp, Homo sapiens
  siRNA target sequence for INSM2 (NM_032594.2,1828-1846).
gctgacccggcacatcaat

SEQ ID NO: 400977 - DNA, 19 bp, Homo sapiens
  siRNA target sequence for INSM2 (NM_032594.2,1829-1847).
ctgacccggcacatcaata

SEQ ID NO: 400978 - DNA, 19 bp, Homo sapiens
  siRNA target sequence for C9orf24 (NM_032596.3,239-257).
gaccaggacccctatcagt

SEQ ID NO: 400979 - DNA, 19 bp, Homo sapiens
  siRNA target sequence for C9orf24 (NM_032596.3,324-342).
gcctgggaagccaacaagt

SEQ ID NO: 400980 - DNA, 19 bp, Homo sapiens
  siRNA target sequence for C9orf24 (NM_032596.3,352-370).
cgggtctgactcataccat

SEQ ID NO: 400981 - DNA, 19 bp, Homo sapiens
  siRNA target sequence for C9orf24 (NM_032596.3,418-436).
ctgtacaggactacactta

SEQ ID NO: 400982 - DNA, 19 bp, Homo sapiens
  siRNA target sequence for C9orf24 (NM_032596.3,420-438).
gtacaggactacacttata

SEQ ID NO: 400983 - DNA, 19 bp, Homo sapiens
  siRNA target sequence for C9orf24 (NM_032596.3,569-587).
cagctgctgcaacaagtat

SEQ ID NO: 400984 - DNA, 19 bp, Homo sapiens
  siRNA target sequence for C9orf24 (NM_032596.3,685-703).
cctacgagcgcgaagtgat

SEQ ID NO: 400985 - DNA, 19 bp, Homo sapiens
  siRNA target sequence for C9orf24 (NM_032596.3,694-712).
gcgaagtgatggtgaacat

SEQ ID NO: 400986 - DNA, 19 bp, Homo sapiens
  siRNA target sequence for C9orf24 (NM_032596.3,795-813).
cccttccatggttacgaaa

SEQ ID NO: 400987 - DNA, 19 bp, Homo sapiens
  siRNA target sequence for C9orf24 (NM_032596.3,906-924).
cgggagcaaccgactatgt

SEQ ID NO: 400988 - DNA, 19 bp, Homo sapiens
  siRNA target sequence for C9orf24 (NM_032596.3,908-926).
ggagcaaccgactatgtgt

SEQ ID NO: 400989 - DNA, 19 bp, Homo sapiens
  siRNA target sequence for C9orf24 (NM_032596.3,909-927).
gagcaaccgactatgtgta

SEQ ID NO: 400990 - DNA, 19 bp, Homo sapiens
  siRNA target sequence for C9orf24 (NM_032596.3,954-972).
gcagtgtgctgttacaact

SEQ ID NO: 400991 - DNA, 19 bp, Homo sapiens
  siRNA target sequence for NYD-SP21 (NM_032597.2,104-122).
gcaactcacgtcatcacta

SEQ ID NO: 400992 - DNA, 19 bp, Homo sapiens
  siRNA target sequence for NYD-SP21 (NM_032597.2,105-123).
caactcacgtcatcactat

SEQ ID NO: 400993 - DNA, 19 bp, Homo sapiens
  siRNA target sequence for NYD-SP21 (NM_032597.2,112-130).
cgtcatcactataaaacca

SEQ ID NO: 400994 - DNA, 19 bp, Homo sapiens
  siRNA target sequence for NYD-SP21 (NM_032597.2,113-131).
gtcatcactataaaaccaa

SEQ ID NO: 400995 - DNA, 19 bp, Homo sapiens
  siRNA target sequence for NYD-SP21 (NM_032597.2,280-298).
cggtttctcccaaagactt

SEQ ID NO: 400996 - DNA, 19 bp, Homo sapiens
  siRNA target sequence for NYD-SP21 (NM_032597.2,308-326).
gtcctcacaggatatccat

SEQ ID NO: 400997 - DNA, 19 bp, Homo sapiens
  siRNA target sequence for NYD-SP21 (NM_032597.2,368-386).
gtaaccgataagaaatcaa

SEQ ID NO: 400998 - DNA, 19 bp, Homo sapiens
  siRNA target sequence for NYD-SP21 (NM_032597.2,372-390).
ccgataagaaatcaaaact

SEQ ID NO: 400999 - DNA, 19 bp, Homo sapiens
  siRNA target sequence for NYD-SP21 (NM_032597.2,402-420).
gtgtcacgggcatgaatgt

SEQ ID NO: 401000 - DNA, 19 bp, Homo sapiens
  siRNA target sequence for NYD-SP21 (NM_032597.2,404-422).
gtcacgggcatgaatgtta

SEQ ID NO: 401001 - DNA, 19 bp, Homo sapiens
  siRNA target sequence for NYD-SP21 (NM_032597.2,427-445).
ctccttggttgcgataact

SEQ ID NO: 401002 - DNA, 19 bp, Homo sapiens
  siRNA target sequence for NYD-SP21 (NM_032597.2,437-455).
gcgataactgggattactt

SEQ ID NO: 401003 - DNA, 19 bp, Homo sapiens
  siRNA target sequence for NYD-SP21 (NM_032597.2,496-514).
gatgccatcctttgaagaa

SEQ ID NO: 401004 - DNA, 19 bp, Homo sapiens
  siRNA target sequence for NYD-SP21 (NM_032597.2,556-574).
cttgccttcggatgttact

SEQ ID NO: 401005 - DNA, 19 bp, Homo sapiens
  siRNA target sequence for NYD-SP21 (NM_032597.2,559-577).
gccttcggatgttactcaa

SEQ ID NO: 401006 - DNA, 19 bp, Homo sapiens
  siRNA target sequence for NYD-SP21 (NM_032597.2,565-583).
ggatgttactcaaaatagt

SEQ ID NO: 401007 - DNA, 19 bp, Homo sapiens
  siRNA target sequence for NYD-SP21 (NM_032597.2,643-661).
cagtgatgattcaacaaca

SEQ ID NO: 401008 - DNA, 19 bp, Homo sapiens
  siRNA target sequence for NYD-SP21 (NM_032597.2,684-702).
gaggctatgctttcttcaa

SEQ ID NO: 401009 - DNA, 19 bp, Homo sapiens
  siRNA target sequence for NYD-SP21 (NM_032597.2,693-711).
ctttcttcaagttaacact

SEQ ID NO: 401010 - DNA, 19 bp, Homo sapiens
  siRNA target sequence for NYD-SP21 (NM_032597.2,872-890).
cagctagactctacattta

SEQ ID NO: 401011 - DNA, 19 bp, Homo sapiens
  siRNA target sequence for NYD-SP21 (NM_032597.2,968-986).
gctgcgtcactccaagttt

SEQ ID NO: 401012 - DNA, 19 bp, Homo sapiens
  siRNA target sequence for NYD-SP21 (NM_032597.2,973-991).
gtcactccaagtttttcca

SEQ ID NO: 401013 - DNA, 19 bp, Homo sapiens
  siRNA target sequence for NYD-SP21 (NM_032597.2,990-1008).
catcccattctgcactaaa

SEQ ID NO: 401014 - DNA, 19 bp, Homo sapiens
  siRNA target sequence for NYD-SP21 (NM_032597.2,1062-1080).
gcctgtcagaacaaaccat

SEQ ID NO: 401015 - DNA, 19 bp, Homo sapiens
  siRNA target sequence for NYD-SP21 (NM_032597.2,1081-1099).
gccatctaagtctacatca

SEQ ID NO: 401016 - DNA, 19 bp, Homo sapiens
  siRNA target sequence for NYD-SP21 (NM_032597.2,1082-1100).
ccatctaagtctacatcat

SEQ ID NO: 401017 - DNA, 19 bp, Homo sapiens
  siRNA target sequence for NYD-SP21 (NM_032597.2,1092-1110).
ctacatcatcccatgtcaa

SEQ ID NO: 401018 - DNA, 19 bp, Homo sapiens
  siRNA target sequence for NYD-SP21 (NM_032597.2,1103-1121).
catgtcaaacagtcttcta

SEQ ID NO: 401019 - DNA, 19 bp, Homo sapiens
  siRNA target sequence for NYD-SP21 (NM_032597.2,1119-1137).
ctaatctgacagctaatga

SEQ ID NO: 401020 - DNA, 19 bp, Homo sapiens
  siRNA target sequence for NYD-SP21 (NM_032597.2,1141-1159).
gccccctcaaggcatacta

SEQ ID NO: 401021 - DNA, 19 bp, Homo sapiens
  siRNA target sequence for NYD-SP21 (NM_032597.2,1162-1180).
ccaagacacatcatctcaa

SEQ ID NO: 401022 - DNA, 19 bp, Homo sapiens
  siRNA target sequence for NYD-SP21 (NM_032597.2,1170-1188).
catcatctcaagatatgct

SEQ ID NO: 401023 - DNA, 19 bp, Homo sapiens
  siRNA target sequence for NYD-SP21 (NM_032597.2,1176-1194).
ctcaagatatgctgtttca

SEQ ID NO: 401024 - DNA, 19 bp, Homo sapiens
  siRNA target sequence for NYD-SP21 (NM_032597.2,1211-1229).
gatatgcaatccctagata

SEQ ID NO: 401025 - DNA, 19 bp, Homo sapiens
  siRNA target sequence for NYD-SP21 (NM_032597.2,1216-1234).
gcaatccctagatatgcta

SEQ ID NO: 401026 - DNA, 19 bp, Homo sapiens
  siRNA target sequence for NYD-SP21 (NM_032597.2,1217-1235).
caatccctagatatgctat

SEQ ID NO: 401027 - DNA, 19 bp, Homo sapiens
  siRNA target sequence for NYD-SP21 (NM_032597.2,1262-1280).
ccacctcaagacatacctt

SEQ ID NO: 401028 - DNA, 19 bp, Homo sapiens
  siRNA target sequence for NYD-SP21 (NM_032597.2,1271-1289).
gacataccttcccaagata

SEQ ID NO: 401029 - DNA, 19 bp, Homo sapiens
  siRNA target sequence for NYD-SP21 (NM_032597.2,1332-1350).
cctcaacatcccatattgt

SEQ ID NO: 401030 - DNA, 19 bp, Homo sapiens
  siRNA target sequence for NYD-SP21 (NM_032597.2,1441-1459).
gtcatatcaagatattaga

SEQ ID NO: 401031 - DNA, 19 bp, Homo sapiens
  siRNA target sequence for NYD-SP21 (NM_032597.2,1496-1514).
gaggaggaactccatagaa

SEQ ID NO: 401032 - DNA, 19 bp, Homo sapiens
  siRNA target sequence for NYD-SP21 (NM_032597.2,1527-1545).
gacggcattccttaaacca

SEQ ID NO: 401033 - DNA, 19 bp, Homo sapiens
  siRNA target sequence for NYD-SP21 (NM_032597.2,1547-1565).
caaaccaaagccttgcaat

SEQ ID NO: 401034 - DNA, 19 bp, Homo sapiens
  siRNA target sequence for NYD-SP21 (NM_032597.2,1551-1569).
ccaaagccttgcaatactt

SEQ ID NO: 401035 - DNA, 19 bp, Homo sapiens
  siRNA target sequence for NYD-SP21 (NM_032597.2,1556-1574).
gccttgcaatacttaagga

SEQ ID NO: 401036 - DNA, 19 bp, Homo sapiens
  siRNA target sequence for NYD-SP21 (NM_032597.2,1562-1580).
caatacttaaggagacatt

SEQ ID NO: 401037 - DNA, 19 bp, Homo sapiens
  siRNA target sequence for NYD-SP21 (NM_032597.2,1710-1728).
ggcactccgtagataagca

SEQ ID NO: 401038 - DNA, 19 bp, Homo sapiens
  siRNA target sequence for NYD-SP21 (NM_032597.2,1711-1729).
gcactccgtagataagcaa

SEQ ID NO: 401039 - DNA, 19 bp, Homo sapiens
  siRNA target sequence for NYD-SP21 (NM_032597.2,1721-1739).
gataagcaagctcaactta

SEQ ID NO: 401040 - DNA, 19 bp, Homo sapiens
  siRNA target sequence for NYD-SP21 (NM_032597.2,1726-1744).
gcaagctcaacttaatcaa

SEQ ID NO: 401041 - DNA, 19 bp, Homo sapiens
  siRNA target sequence for NYD-SP21 (NM_032597.2,1727-1745).
caagctcaacttaatcaaa

SEQ ID NO: 401042 - DNA, 19 bp, Homo sapiens
  siRNA target sequence for NYD-SP21 (NM_032597.2,1730-1748).
gctcaacttaatcaaacta

SEQ ID NO: 401043 - DNA, 19 bp, Homo sapiens
  siRNA target sequence for NYD-SP21 (NM_032597.2,1784-1802).
caagccaaaggggaacaat

SEQ ID NO: 401044 - DNA, 19 bp, Homo sapiens
  siRNA target sequence for NYD-SP21 (NM_032597.2,1879-1897).
ccaggatcagcaaactgaa

SEQ ID NO: 401045 - DNA, 19 bp, Homo sapiens
  siRNA target sequence for NYD-SP21 (NM_032597.2,1925-1943).
ccgaaaggacaattccaaa

SEQ ID NO: 401046 - DNA, 19 bp, Homo sapiens
  siRNA target sequence for NYD-SP21 (NM_032597.2,2072-2090).
cccaggactgtcaatcttt

SEQ ID NO: 401047 - DNA, 19 bp, Homo sapiens
  siRNA target sequence for NYD-SP21 (NM_032597.2,2073-2091).
ccaggactgtcaatctttt

SEQ ID NO: 401048 - DNA, 19 bp, Homo sapiens
  siRNA target sequence for NYD-SP20 (NM_032598.2,289-307).
gcctgttccgttgttcaat

SEQ ID NO: 401049 - DNA, 19 bp, Homo sapiens
  siRNA target sequence for NYD-SP20 (NM_032598.2,293-311).
gttccgttgttcaatcaga

SEQ ID NO: 401050 - DNA, 19 bp, Homo sapiens
  siRNA target sequence for NYD-SP20 (NM_032598.2,369-387).
gtaccccttctgacaatta

SEQ ID NO: 401051 - DNA, 19 bp, Homo sapiens
  siRNA target sequence for NYD-SP20 (NM_032598.2,372-390).
ccccttctgacaattatga

SEQ ID NO: 401052 - DNA, 19 bp, Homo sapiens
  siRNA target sequence for NYD-SP20 (NM_032598.2,437-455).
gagttggctcctgtaatga

SEQ ID NO: 401053 - DNA, 19 bp, Homo sapiens
  siRNA target sequence for NYD-SP20 (NM_032598.2,497-515).
cctctgagaagtcaagatt

SEQ ID NO: 401054 - DNA, 19 bp, Homo sapiens
  siRNA target sequence for NYD-SP20 (NM_032598.2,575-593).
gatggtaacaaaaatacca

SEQ ID NO: 401055 - DNA, 19 bp, Homo sapiens
  siRNA target sequence for NYD-SP20 (NM_032598.2,617-635).
gattttaagcctcaatgta

SEQ ID NO: 401056 - DNA, 19 bp, Homo sapiens
  siRNA target sequence for NYD-SP20 (NM_032598.2,633-651).
gtaaacgaacaaacttagt

SEQ ID NO: 401057 - DNA, 19 bp, Homo sapiens
  siRNA target sequence for NYD-SP20 (NM_032598.2,682-700).
gagttcgggagctcaacaa

SEQ ID NO: 401058 - DNA, 19 bp, Homo sapiens
  siRNA target sequence for NYD-SP20 (NM_032598.2,687-705).
cgggagctcaacaacaaaa

SEQ ID NO: 401059 - DNA, 19 bp, Homo sapiens
  siRNA target sequence for NYD-SP20 (NM_032598.2,733-751).
cttatctcgcaacaaagaa

SEQ ID NO: 401060 - DNA, 19 bp, Homo sapiens
  siRNA target sequence for NYD-SP20 (NM_032598.2,754-772).
cgagctactcagacaaaca

SEQ ID NO: 401061 - DNA, 19 bp, Homo sapiens
  siRNA target sequence for NYD-SP20 (NM_032598.2,798-816).
caatgagagggctagacaa

SEQ ID NO: 401062 - DNA, 19 bp, Homo sapiens
  siRNA target sequence for NYD-SP20 (NM_032598.2,822-840).
gtgcactacagacacttaa

SEQ ID NO: 401063 - DNA, 19 bp, Homo sapiens
  siRNA target sequence for NYD-SP20 (NM_032598.2,834-852).
cacttaagcccaattttca

SEQ ID NO: 401064 - DNA, 19 bp, Homo sapiens
  siRNA target sequence for NYD-SP20 (NM_032598.2,969-987).
ctgcagttattgaaagcat

SEQ ID NO: 401065 - DNA, 19 bp, Homo sapiens
  siRNA target sequence for NYD-SP20 (NM_032598.2,988-1006).
gaagtattggcgtgaacat

SEQ ID NO: 401066 - DNA, 19 bp, Homo sapiens
  siRNA target sequence for NYD-SP20 (NM_032598.2,1058-1076).
gttacacctggcccatatt

SEQ ID NO: 401067 - DNA, 19 bp, Homo sapiens
  siRNA target sequence for NYD-SP20 (NM_032598.2,1064-1082).
cctggcccatattattcga

SEQ ID NO: 401068 - DNA, 19 bp, Homo sapiens
  siRNA target sequence for NYD-SP20 (NM_032598.2,1065-1083).
ctggcccatattattcgaa

SEQ ID NO: 401069 - DNA, 19 bp, Homo sapiens
  siRNA target sequence for NYD-SP20 (NM_032598.2,1070-1088).
ccatattattcgaagactt

SEQ ID NO: 401070 - DNA, 19 bp, Homo sapiens
  siRNA target sequence for NYD-SP20 (NM_032598.2,1071-1089).
catattattcgaagacttt

SEQ ID NO: 401071 - DNA, 19 bp, Homo sapiens
  siRNA target sequence for NYD-SP20 (NM_032598.2,1145-1163).
gaacttccgagactgatta

SEQ ID NO: 401072 - DNA, 19 bp, Homo sapiens
  siRNA target sequence for NYD-SP20 (NM_032598.2,1159-1177).
gattagaggccgagttcat

SEQ ID NO: 401073 - DNA, 19 bp, Homo sapiens
  siRNA target sequence for NYD-SP20 (NM_032598.2,1168-1186).
ccgagttcatagatgtgtt

SEQ ID NO: 401074 - DNA, 19 bp, Homo sapiens
  siRNA target sequence for NYD-SP20 (NM_032598.2,1237-1255).
ggcgtctgtttctgaacaa

SEQ ID NO: 401075 - DNA, 19 bp, Homo sapiens
  siRNA target sequence for NYD-SP20 (NM_032598.2,1260-1278).
ctttccaggcatttgtcaa

SEQ ID NO: 401076 - DNA, 19 bp, Homo sapiens
  siRNA target sequence for NYD-SP20 (NM_032598.2,1286-1304).
gatgttgagatgcagtatt

SEQ ID NO: 401077 - DNA, 19 bp, Homo sapiens
  siRNA target sequence for NYD-SP20 (NM_032598.2,1298-1316).
cagtattatattaatgtga

SEQ ID NO: 401078 - DNA, 19 bp, Homo sapiens
  siRNA target sequence for NYD-SP18 (NM_032599.1,59-77).
gtcatcatttccacataga

SEQ ID NO: 401079 - DNA, 19 bp, Homo sapiens
  siRNA target sequence for NYD-SP18 (NM_032599.1,228-246).
ctctgccgggtggttcatt

SEQ ID NO: 401080 - DNA, 19 bp, Homo sapiens
  siRNA target sequence for NYD-SP18 (NM_032599.1,230-248).
ctgccgggtggttcattct

SEQ ID NO: 401081 - DNA, 19 bp, Homo sapiens
  siRNA target sequence for NYD-SP18 (NM_032599.1,405-423).
ctcatggccagtgtcaaat

SEQ ID NO: 401082 - DNA, 19 bp, Homo sapiens
  siRNA target sequence for NYD-SP18 (NM_032599.1,460-478).
ccatagcccccaacatctt

SEQ ID NO: 401083 - DNA, 19 bp, Homo sapiens
  siRNA target sequence for NYD-SP18 (NM_032599.1,622-640).
ggatccgactggttcaaat

SEQ ID NO: 401084 - DNA, 19 bp, Homo sapiens
  siRNA target sequence for NYD-SP18 (NM_032599.1,623-641).
gatccgactggttcaaatt

SEQ ID NO: 401085 - DNA, 19 bp, Homo sapiens
  siRNA target sequence for NYD-SP18 (NM_032599.1,665-683).
caccaaagaccctaggatt

SEQ ID NO: 401086 - DNA, 19 bp, Homo sapiens
  siRNA target sequence for NYD-SP18 (NM_032599.1,668-686).
caaagaccctaggattctt

SEQ ID NO: 401087 - DNA, 19 bp, Homo sapiens
  siRNA target sequence for NYD-SP18 (NM_032599.1,721-739).
gcccctcaggagattcgaa

SEQ ID NO: 401088 - DNA, 19 bp, Homo sapiens
  siRNA target sequence for NYD-SP18 (NM_032599.1,725-743).
ctcaggagattcgaagtta

SEQ ID NO: 401089 - DNA, 19 bp, Homo sapiens
  siRNA target sequence for NYD-SP18 (NM_032599.1,727-745).
caggagattcgaagttagt

SEQ ID NO: 401090 - DNA, 19 bp, Homo sapiens
  siRNA target sequence for NYD-SP18 (NM_032599.1,730-748).
gagattcgaagttagtaca

SEQ ID NO: 401091 - DNA, 19 bp, Homo sapiens
  siRNA target sequence for NYD-SP18 (NM_032599.1,736-754).
cgaagttagtacagaagaa

SEQ ID NO: 401092 - DNA, 19 bp, Homo sapiens
  siRNA target sequence for NYD-SP18 (NM_032599.1,737-755).
gaagttagtacagaagaaa

SEQ ID NO: 401093 - DNA, 19 bp, Homo sapiens
  siRNA target sequence for NYD-SP18 (NM_032599.1,772-790).
ccagcgagagtctcattca

SEQ ID NO: 401094 - DNA, 19 bp, Homo sapiens
  siRNA target sequence for NYD-SP18 (NM_032599.1,1061-1079).
ggccccacccataggaaat

SEQ ID NO: 401095 - DNA, 19 bp, Homo sapiens
  siRNA target sequence for NYD-SP18 (NM_032599.1,1065-1083).
ccacccataggaaattcta

SEQ ID NO: 401096 - DNA, 19 bp, Homo sapiens
  siRNA target sequence for NYD-SP17 (NM_032600.2,316-334).
ggtcagacagtctcttaaa

SEQ ID NO: 401097 - DNA, 19 bp, Homo sapiens
  siRNA target sequence for NYD-SP17 (NM_032600.2,317-335).
gtcagacagtctcttaaaa

SEQ ID NO: 401098 - DNA, 19 bp, Homo sapiens
  siRNA target sequence for NYD-SP17 (NM_032600.2,338-356).
gtttaccacaaatgtaaga

SEQ ID NO: 401099 - DNA, 19 bp, Homo sapiens
  siRNA target sequence for NYD-SP17 (NM_032600.2,355-373).
gattcggcaccaagattca

SEQ ID NO: 401100 - DNA, 19 bp, Homo sapiens
  siRNA target sequence for NYD-SP17 (NM_032600.2,364-382).
ccaagattcaactggatat

SEQ ID NO: 401101 - DNA, 19 bp, Homo sapiens
  siRNA target sequence for NYD-SP17 (NM_032600.2,419-437).
gatagttatgacggaaaaa

SEQ ID NO: 401102 - DNA, 19 bp, Homo sapiens
  siRNA target sequence for NYD-SP17 (NM_032600.2,447-465).
cagtagtgctccaagatgt

SEQ ID NO: 401103 - DNA, 19 bp, Homo sapiens
  siRNA target sequence for NYD-SP17 (NM_032600.2,606-624).
gcacaacgactaaagatat

SEQ ID NO: 401104 - DNA, 19 bp, Homo sapiens
  siRNA target sequence for NYD-SP17 (NM_032600.2,615-633).
ctaaagatatcctctctat

SEQ ID NO: 401105 - DNA, 19 bp, Homo sapiens
  siRNA target sequence for NYD-SP17 (NM_032600.2,641-659).
gacatcaaggcattaaaga

SEQ ID NO: 401106 - DNA, 19 bp, Homo sapiens
  siRNA target sequence for NYD-SP17 (NM_032600.2,691-709).
ctgctccacgatacattgt

SEQ ID NO: 401107 - DNA, 19 bp, Homo sapiens
  siRNA target sequence for NYD-SP17 (NM_032600.2,694-712).
ctccacgatacattgtcta

SEQ ID NO: 401108 - DNA, 19 bp, Homo sapiens
  siRNA target sequence for NYD-SP17 (NM_032600.2,699-717).
cgatacattgtctagagat

SEQ ID NO: 401109 - DNA, 19 bp, Homo sapiens
  siRNA target sequence for NYD-SP17 (NM_032600.2,776-794).
gcaactctgaagaacactt

SEQ ID NO: 401110 - DNA, 19 bp, Homo sapiens
  siRNA target sequence for NYD-SP17 (NM_032600.2,835-853).
gaaagtgcccagttatcca

SEQ ID NO: 401111 - DNA, 19 bp, Homo sapiens
  siRNA target sequence for NYD-SP17 (NM_032600.2,861-879).
ctgaccatcttgagaaaaa

SEQ ID NO: 401112 - DNA, 19 bp, Homo sapiens
  siRNA target sequence for NYD-SP17 (NM_032600.2,910-928).
gaaacgtaaccatcaaaat

SEQ ID NO: 401113 - DNA, 19 bp, Homo sapiens
  siRNA target sequence for NYD-SP17 (NM_032600.2,914-932).
cgtaaccatcaaaatgcat

SEQ ID NO: 401114 - DNA, 19 bp, Homo sapiens
  siRNA target sequence for NYD-SP17 (NM_032600.2,950-968).
gcaaagccaaatatttaca

SEQ ID NO: 401115 - DNA, 19 bp, Homo sapiens
  siRNA target sequence for NYD-SP17 (NM_032600.2,951-969).
caaagccaaatatttacat

SEQ ID NO: 401116 - DNA, 19 bp, Homo sapiens
  siRNA target sequence for NYD-SP17 (NM_032600.2,990-1008).
ggatcaagctaacttttgt

SEQ ID NO: 401117 - DNA, 19 bp, Homo sapiens
  siRNA target sequence for NYD-SP17 (NM_032600.2,994-1012).
caagctaacttttgttcat

SEQ ID NO: 401118 - DNA, 19 bp, Homo sapiens
  siRNA target sequence for NYD-SP17 (NM_032600.2,1033-1051).
cctcagtgctaccaagtta

SEQ ID NO: 401119 - DNA, 19 bp, Homo sapiens
  siRNA target sequence for NYD-SP17 (NM_032600.2,1041-1059).
ctaccaagttagaagaatt

SEQ ID NO: 401120 - DNA, 19 bp, Homo sapiens
  siRNA target sequence for NYD-SP17 (NM_032600.2,1120-1138).
gagatactgtccattcact

SEQ ID NO: 401121 - DNA, 19 bp, Homo sapiens
  siRNA target sequence for NYD-SP17 (NM_032600.2,1131-1149).
cattcactgggcccatttt

SEQ ID NO: 401122 - DNA, 19 bp, Homo sapiens
  siRNA target sequence for NYD-SP17 (NM_032600.2,1192-1210).
cggctttatttgttcctta

SEQ ID NO: 401123 - DNA, 19 bp, Homo sapiens
  siRNA target sequence for DJ79P11.1 (NM_032621.1,113-131).
gaggaacgagcgttaaaca

SEQ ID NO: 401124 - DNA, 19 bp, Homo sapiens
  siRNA target sequence for DJ79P11.1 (NM_032621.1,115-133).
ggaacgagcgttaaacaat

SEQ ID NO: 401125 - DNA, 19 bp, Homo sapiens
  siRNA target sequence for DJ79P11.1 (NM_032621.1,119-137).
cgagcgttaaacaatctca

SEQ ID NO: 401126 - DNA, 19 bp, Homo sapiens
  siRNA target sequence for DJ79P11.1 (NM_032621.1,120-138).
gagcgttaaacaatctcat

SEQ ID NO: 401127 - DNA, 19 bp, Homo sapiens
  siRNA target sequence for DJ79P11.1 (NM_032621.1,211-229).
ggccctacctttgaatgtt

SEQ ID NO: 401128 - DNA, 19 bp, Homo sapiens
  siRNA target sequence for DJ79P11.1 (NM_032621.1,218-236).
cctttgaatgttagtgaat

SEQ ID NO: 401129 - DNA, 19 bp, Homo sapiens
  siRNA target sequence for DJ79P11.1 (NM_032621.1,219-237).
ctttgaatgttagtgaata

SEQ ID NO: 401130 - DNA, 19 bp, Homo sapiens
  siRNA target sequence for OSAP (NM_032623.2,160-178).
ccggatgtcatctaacaga

SEQ ID NO: 401131 - DNA, 19 bp, Homo sapiens
  siRNA target sequence for OSAP (NM_032623.2,161-179).
cggatgtcatctaacagat

SEQ ID NO: 401132 - DNA, 19 bp, Homo sapiens
  siRNA target sequence for OSAP (NM_032623.2,162-180).
ggatgtcatctaacagatt

SEQ ID NO: 401133 - DNA, 19 bp, Homo sapiens
  siRNA target sequence for OSAP (NM_032623.2,185-203).
ggatcatctggatcaaata

SEQ ID NO: 401134 - DNA, 19 bp, Homo sapiens
  siRNA target sequence for OSAP (NM_032623.2,186-204).
gatcatctggatcaaatat

SEQ ID NO: 401135 - DNA, 19 bp, Homo sapiens
  siRNA target sequence for OSAP (NM_032623.2,233-251).
gtcagtgctggtggatatt

SEQ ID NO: 401136 - DNA, 19 bp, Homo sapiens
  siRNA target sequence for OSAP (NM_032623.2,235-253).
cagtgctggtggatattat

SEQ ID NO: 401137 - DNA, 19 bp, Homo sapiens
  siRNA target sequence for OSAP (NM_032623.2,282-300).
ccaaacacacagaacataa

SEQ ID NO: 401138 - DNA, 19 bp, Homo sapiens
  siRNA target sequence for OSAP (NM_032623.2,453-471).
cagttgtggtcataaaaga

SEQ ID NO: 401139 - DNA, 19 bp, Homo sapiens
  siRNA target sequence for OSAP (NM_032623.2,574-592).
ggaagtaaaccctgaaaca

SEQ ID NO: 401140 - DNA, 19 bp, Homo sapiens
  siRNA target sequence for OSAP (NM_032623.2,595-613).
cccagaggttacaaatgct

SEQ ID NO: 401141 - DNA, 19 bp, Homo sapiens
  siRNA target sequence for OSAP (NM_032623.2,629-647).
gtcaccatcgataatgata

SEQ ID NO: 401142 - DNA, 19 bp, Homo sapiens
  siRNA target sequence for OSAP (NM_032623.2,633-651).
ccatcgataatgataaaga

SEQ ID NO: 401143 - DNA, 19 bp, Homo sapiens
  siRNA target sequence for OSAP (NM_032623.2,661-679).
gaacgaaacctctgatgaa

SEQ ID NO: 401144 - DNA, 19 bp, Homo sapiens
  siRNA target sequence for OSAP (NM_032623.2,794-812).
ctccagccggtagacattt

SEQ ID NO: 401145 - DNA, 19 bp, Homo sapiens
  siRNA target sequence for OSAP (NM_032623.2,824-842).
gccatagggtgtctgataa

SEQ ID NO: 401146 - DNA, 19 bp, Homo sapiens
  siRNA target sequence for OSAP (NM_032623.2,826-844).
catagggtgtctgataagt

SEQ ID NO: 401147 - DNA, 19 bp, Homo sapiens
  siRNA target sequence for C7orf13 (NM_032625.1,799-817).
gttgtggcctggatactct

SEQ ID NO: 401148 - DNA, 19 bp, Homo sapiens
  siRNA target sequence for C7orf13 (NM_032625.1,823-841).
gctgcttcccttctcttaa

SEQ ID NO: 401149 - DNA, 19 bp, Homo sapiens
  siRNA target sequence for MGC2641 (NM_032631.2,267-285).
gttcccctacgacaaatgt

SEQ ID NO: 401150 - DNA, 19 bp, Homo sapiens
  siRNA target sequence for MGC2641 (NM_032631.2,270-288).
cccctacgacaaatgtaaa

SEQ ID NO: 401151 - DNA, 19 bp, Homo sapiens
  siRNA target sequence for MGC2641 (NM_032631.2,272-290).
cctacgacaaatgtaaaga

SEQ ID NO: 401152 - DNA, 19 bp, Homo sapiens
  siRNA target sequence for MGC2641 (NM_032631.2,1665-1683).
gaagattcgccgttacaaa

SEQ ID NO: 401153 - DNA, 19 bp, Homo sapiens
  siRNA target sequence for MGC2641 (NM_032631.2,1685-1703).
cgaacaaggacgtaatgga

SEQ ID NO: 401154 - DNA, 19 bp, Homo sapiens
  siRNA target sequence for MGC2641 (NM_032631.2,1739-1757).
gggtcctcggcccaaagat

SEQ ID NO: 401155 - DNA, 19 bp, Homo sapiens
  siRNA target sequence for MGC5457 (NM_032633.1,224-242).
ctaaagtgaggcatgttca

SEQ ID NO: 401156 - DNA, 19 bp, Homo sapiens
  siRNA target sequence for DDA3 (NM_032636.4,262-280).
ccgaagtgacccaaatgca

SEQ ID NO: 401157 - DNA, 19 bp, Homo sapiens
  siRNA target sequence for DDA3 (NM_032636.4,553-571).
gcctcgactccggagtaat

SEQ ID NO: 401158 - DNA, 19 bp, Homo sapiens
  siRNA target sequence for DDA3 (NM_032636.4,557-575).
cgactccggagtaatgata

SEQ ID NO: 401159 - DNA, 19 bp, Homo sapiens
  siRNA target sequence for DDA3 (NM_032636.4,637-655).
ggagtcacccacttgcaat

SEQ ID NO: 401160 - DNA, 19 bp, Homo sapiens
  siRNA target sequence for FAPP2 (NM_032639.2,155-173).
ctctgtgggggaatattgt

SEQ ID NO: 401161 - DNA, 19 bp, Homo sapiens
  siRNA target sequence for FAPP2 (NM_032639.2,1381-1399).
gacagccctaagaaatcca

SEQ ID NO: 401162 - DNA, 19 bp, Homo sapiens
  siRNA target sequence for MGC2452 (NM_032644.1,2484-2502).
caacagtgtggcctttcaa

SEQ ID NO: 401163 - DNA, 19 bp, Homo sapiens
  siRNA target sequence for MGC2452 (NM_032644.1,2533-2551).
cagctcaccacctatggat

SEQ ID NO: 401164 - DNA, 19 bp, Homo sapiens
  siRNA target sequence for TTYH2 (NM_032646.4,315-333).
ctgcggtgggcgttggttt

SEQ ID NO: 401165 - DNA, 19 bp, Homo sapiens
  siRNA target sequence for TTYH2 (NM_032646.4,318-336).
cggtgggcgttggtttcta

SEQ ID NO: 401166 - DNA, 19 bp, Homo sapiens
  siRNA target sequence for TTYH2 (NM_032646.4,319-337).
ggtgggcgttggtttctat

SEQ ID NO: 401167 - DNA, 19 bp, Homo sapiens
  siRNA target sequence for TTYH2 (NM_032646.4,362-380).
gcgtaccagctgatgtact

SEQ ID NO: 401168 - DNA, 19 bp, Homo sapiens
  siRNA target sequence for TTYH2 (NM_032646.4,431-449).
ggaactacccagaagatga

SEQ ID NO: 401169 - DNA, 19 bp, Homo sapiens
  siRNA target sequence for TTYH2 (NM_032646.4,624-642).
ctggctacgtggagtacta

SEQ ID NO: 401170 - DNA, 19 bp, Homo sapiens
  siRNA target sequence for TTYH2 (NM_032646.4,626-644).
ggctacgtggagtactaca

SEQ ID NO: 401171 - DNA, 19 bp, Homo sapiens
  siRNA target sequence for TTYH2 (NM_032646.4,893-911).
cgctactacctgtattgca

SEQ ID NO: 401172 - DNA, 19 bp, Homo sapiens
  siRNA target sequence for TTYH2 (NM_032646.4,1112-1130).
cgagggctgcacaaggatt

SEQ ID NO: 401173 - DNA, 19 bp, Homo sapiens
  siRNA target sequence for TTYH2 (NM_032646.4,1116-1134).
ggctgcacaaggattatct

SEQ ID NO: 401174 - DNA, 19 bp, Homo sapiens
  siRNA target sequence for TTYH2 (NM_032646.4,1273-1291).
cagagactacgatgacatt

SEQ ID NO: 401175 - DNA, 19 bp, Homo sapiens
  siRNA target sequence for TTYH2 (NM_032646.4,1437-1455).
cccctgtctccgagtacat

SEQ ID NO: 401176 - DNA, 19 bp, Homo sapiens
  siRNA target sequence for TTYH2 (NM_032646.4,1439-1457).
cctgtctccgagtacatga

SEQ ID NO: 401177 - DNA, 19 bp, Homo sapiens
  siRNA target sequence for TTYH2 (NM_032646.4,1587-1605).
ggcactacgggaatcagtt

SEQ ID NO: 401178 - DNA, 19 bp, Homo sapiens
  siRNA target sequence for TTYH2 (NM_032646.4,1588-1606).
gcactacgggaatcagttt

SEQ ID NO: 401179 - DNA, 19 bp, Homo sapiens
  siRNA target sequence for BSCL2 (NM_032667.4,493-511).
gctccttctactattccta

SEQ ID NO: 401180 - DNA, 19 bp, Homo sapiens
  siRNA target sequence for BSCL2 (NM_032667.4,535-553).
gccctgtgcatttctacta

SEQ ID NO: 401181 - DNA, 19 bp, Homo sapiens
  siRNA target sequence for BSCL2 (NM_032667.4,604-622).
ccaatgtctcgctgactaa

SEQ ID NO: 401182 - DNA, 19 bp, Homo sapiens
  siRNA target sequence for BSCL2 (NM_032667.4,631-649).
gtgatcgggtgctgatgta

SEQ ID NO: 401183 - DNA, 19 bp, Homo sapiens
  siRNA target sequence for BSCL2 (NM_032667.4,656-674).
gccgtatcgtgttacctta

SEQ ID NO: 401184 - DNA, 19 bp, Homo sapiens
  siRNA target sequence for BSCL2 (NM_032667.4,694-712).
cccctgtgaatcaagattt

SEQ ID NO: 401185 - DNA, 19 bp, Homo sapiens
  siRNA target sequence for BSCL2 (NM_032667.4,756-774).
cgaatcatctccacttctt

SEQ ID NO: 401186 - DNA, 19 bp, Homo sapiens
  siRNA target sequence for BSCL2 (NM_032667.4,778-796).
gttcggtgatgctgcatta

SEQ ID NO: 401187 - DNA, 19 bp, Homo sapiens
  siRNA target sequence for BSCL2 (NM_032667.4,822-840).
gacacactggtcttctcta

SEQ ID NO: 401188 - DNA, 19 bp, Homo sapiens
  siRNA target sequence for BSCL2 (NM_032667.4,887-905).
ggaactctacgcagactat

SEQ ID NO: 401189 - DNA, 19 bp, Homo sapiens
  siRNA target sequence for BSCL2 (NM_032667.4,888-906).
gaactctacgcagactata

SEQ ID NO: 401190 - DNA, 19 bp, Homo sapiens
  siRNA target sequence for BSCL2 (NM_032667.4,926-944).
gaccactggagcgatcatt

SEQ ID NO: 401191 - DNA, 19 bp, Homo sapiens
  siRNA target sequence for BSCL2 (NM_032667.4,931-949).
ctggagcgatcattgagat

SEQ ID NO: 401192 - DNA, 19 bp, Homo sapiens
  siRNA target sequence for BSCL2 (NM_032667.4,1009-1027).
ggctcagatacctgctata

SEQ ID NO: 401193 - DNA, 19 bp, Homo sapiens
  siRNA target sequence for BSCL2 (NM_032667.4,1037-1055).
gatgacctgcgccttcata

SEQ ID NO: 401194 - DNA, 19 bp, Homo sapiens
  siRNA target sequence for BSCL2 (NM_032667.4,1056-1074).
ggtgttgccagcaacttca

SEQ ID NO: 401195 - DNA, 19 bp, Homo sapiens
  siRNA target sequence for BSCL2 (NM_032667.4,1144-1162).
gcttctctttgcaggttaa

SEQ ID NO: 401196 - DNA, 19 bp, Homo sapiens
  siRNA target sequence for BSCL2 (NM_032667.4,1163-1181).
catccgaaaaagagacaat

SEQ ID NO: 401197 - DNA, 19 bp, Homo sapiens
  siRNA target sequence for BSCL2 (NM_032667.4,1244-1262).
gtcaactccgcaatcagat

SEQ ID NO: 401198 - DNA, 19 bp, Homo sapiens
  siRNA target sequence for BSCL2 (NM_032667.4,1252-1270).
cgcaatcagatgttacaga

SEQ ID NO: 401199 - DNA, 19 bp, Homo sapiens
  siRNA target sequence for NSPC1 (NM_032673.1,46-64).
ctccagtcagtgtacaaga

SEQ ID NO: 401200 - DNA, 19 bp, Homo sapiens
  siRNA target sequence for NSPC1 (NM_032673.1,111-129).
cttgaatgaacacattgtt

SEQ ID NO: 401201 - DNA, 19 bp, Homo sapiens
  siRNA target sequence for NSPC1 (NM_032673.1,188-206).
ctttctgcaagagttgtat

SEQ ID NO: 401202 - DNA, 19 bp, Homo sapiens
  siRNA target sequence for NSPC1 (NM_032673.1,208-226).
gtgaagtacctccaaacta

SEQ ID NO: 401203 - DNA, 19 bp, Homo sapiens
  siRNA target sequence for NSPC1 (NM_032673.1,238-256).
cccatgtgcaacattaaga

SEQ ID NO: 401204 - DNA, 19 bp, Homo sapiens
  siRNA target sequence for NSPC1 (NM_032673.1,239-257).
ccatgtgcaacattaagat

SEQ ID NO: 401205 - DNA, 19 bp, Homo sapiens
  siRNA target sequence for NSPC1 (NM_032673.1,449-467).
gcagctttgaccactctaa

SEQ ID NO: 401206 - DNA, 19 bp, Homo sapiens
  siRNA target sequence for NSPC1 (NM_032673.1,462-480).
ctctaaagcccactactat

SEQ ID NO: 401207 - DNA, 19 bp, Homo sapiens
  siRNA target sequence for NSPC1 (NM_032673.1,471-489).
ccactactatcgctatgat

SEQ ID NO: 401208 - DNA, 19 bp, Homo sapiens
  siRNA target sequence for NSPC1 (NM_032673.1,561-579).
gtatgtccgatgttctgtt

SEQ ID NO: 401209 - DNA, 19 bp, Homo sapiens
  siRNA target sequence for NSPC1 (NM_032673.1,614-632).
gtcaccgcttgatgctaaa

SEQ ID NO: 401210 - DNA, 19 bp, Homo sapiens
  siRNA target sequence for NSPC1 (NM_032673.1,728-746).
cccctttgcttttacaata

SEQ ID NO: 401211 - DNA, 19 bp, Homo sapiens
  siRNA target sequence for MGC10955 (NM_032676.2,231-249).
gagccagctgctgaaaaca

SEQ ID NO: 401212 - DNA, 19 bp, Homo sapiens
  siRNA target sequence for MGC10955 (NM_032676.2,267-285).
gtggctggagcccaaatca

SEQ ID NO: 401213 - DNA, 19 bp, Homo sapiens
  siRNA target sequence for MGC12972 (NM_032683.1,112-130).
gcgctgctcgtcactaaca

SEQ ID NO: 401214 - DNA, 19 bp, Homo sapiens
  siRNA target sequence for MGC12972 (NM_032683.1,222-240).
gcgctccgcgagcatgttt

SEQ ID NO: 401215 - DNA, 19 bp, Homo sapiens
  siRNA target sequence for MGC12972 (NM_032683.1,268-286).
ctgcactactggtacttgt

SEQ ID NO: 401216 - DNA, 19 bp, Homo sapiens
  siRNA target sequence for MGC12972 (NM_032683.1,382-400).
ggcgtctgggaattctaca

SEQ ID NO: 401217 - DNA, 19 bp, Homo sapiens
  siRNA target sequence for MGC12972 (NM_032683.1,383-401).
gcgtctgggaattctacaa

SEQ ID NO: 401218 - DNA, 19 bp, Homo sapiens
  siRNA target sequence for MGC12972 (NM_032683.1,425-443).
ctgcgcagttcgtgaactt

SEQ ID NO: 401219 - DNA, 19 bp, Homo sapiens
  siRNA target sequence for MGC13010 (NM_032687.2,529-547).
ccccttctggccttcgatt

SEQ ID NO: 401220 - DNA, 19 bp, Homo sapiens
  siRNA target sequence for MGC13010 (NM_032687.2,530-548).
cccttctggccttcgattt

SEQ ID NO: 401221 - DNA, 19 bp, Homo sapiens
  siRNA target sequence for MGC13010 (NM_032687.2,703-721).
gtcttcacggccaacactt

SEQ ID NO: 401222 - DNA, 19 bp, Homo sapiens
  siRNA target sequence for MGC13010 (NM_032687.2,705-723).
cttcacggccaacacttat

SEQ ID NO: 401223 - DNA, 19 bp, Homo sapiens
  siRNA target sequence for MGC13198 (NM_032690.1,479-497).
gttcaggcccagcgttttt

SEQ ID NO: 401224 - DNA, 19 bp, Homo sapiens
  siRNA target sequence for MGC13198 (NM_032690.1,723-741).
cggcagccctctcacattt

SEQ ID NO: 401225 - DNA, 19 bp, Homo sapiens
  siRNA target sequence for MGC13198 (NM_032690.1,726-744).
cagccctctcacattttga

SEQ ID NO: 401226 - DNA, 19 bp, Homo sapiens
  siRNA target sequence for MGC11082 (NM_032691.1,759-777).
gaatgccatccacacaaaa

SEQ ID NO: 401227 - DNA, 19 bp, Homo sapiens
  siRNA target sequence for MGC11082 (NM_032691.1,780-798).
gctcctgttgacatctcat

SEQ ID NO: 401228 - DNA, 19 bp, Homo sapiens
  siRNA target sequence for MGC11082 (NM_032691.1,845-863).
gctcagaaacacctattgt

SEQ ID NO: 401229 - DNA, 19 bp, Homo sapiens
  siRNA target sequence for MGC11082 (NM_032691.1,846-864).
ctcagaaacacctattgtt

SEQ ID NO: 401230 - DNA, 19 bp, Homo sapiens
  siRNA target sequence for MGC11082 (NM_032691.1,854-872).
cacctattgttcaaaatct

SEQ ID NO: 401231 - DNA, 19 bp, Homo sapiens
  siRNA target sequence for MGC11082 (NM_032691.1,897-915).
ctccctatggctttgcaaa

SEQ ID NO: 401232 - DNA, 19 bp, Homo sapiens
  siRNA target sequence for MGC12935 (NM_032694.1,172-190).
gtgacgcgggtcttcttgt

SEQ ID NO: 401233 - DNA, 19 bp, Homo sapiens
  siRNA target sequence for MGC2705 (NM_032701.2,287-305).
ggtttccgcacccataaga

SEQ ID NO: 401234 - DNA, 19 bp, Homo sapiens
  siRNA target sequence for MGC2705 (NM_032701.2,577-595).
gtccactcgtgcttggaaa

SEQ ID NO: 401235 - DNA, 19 bp, Homo sapiens
  siRNA target sequence for MGC2705 (NM_032701.2,760-778).
caaacccaactgcaagttt

SEQ ID NO: 401236 - DNA, 19 bp, Homo sapiens
  siRNA target sequence for MGC14801 (NM_032705.2,143-161).
gtccactcacagaaatcct

SEQ ID NO: 401237 - DNA, 19 bp, Homo sapiens
  siRNA target sequence for MGC14801 (NM_032705.2,175-193).
ctggcaaatatgaaggtaa

SEQ ID NO: 401238 - DNA, 19 bp, Homo sapiens
  siRNA target sequence for MGC14801 (NM_032705.2,178-196).
gcaaatatgaaggtaaaca

SEQ ID NO: 401239 - DNA, 19 bp, Homo sapiens
  siRNA target sequence for MGC14801 (NM_032705.2,186-204).
gaaggtaaacacaaacgaa

SEQ ID NO: 401240 - DNA, 19 bp, Homo sapiens
  siRNA target sequence for MGC14801 (NM_032705.2,233-251).
gcaccgatcccgacataga

SEQ ID NO: 401241 - DNA, 19 bp, Homo sapiens
  siRNA target sequence for MGC14801 (NM_032705.2,234-252).
caccgatcccgacatagat

SEQ ID NO: 401242 - DNA, 19 bp, Homo sapiens
  siRNA target sequence for MGC14801 (NM_032705.2,236-254).
ccgatcccgacatagatca

SEQ ID NO: 401243 - DNA, 19 bp, Homo sapiens
  siRNA target sequence for MGC14801 (NM_032705.2,268-286).
cttcagatgatcctatgtt

SEQ ID NO: 401244 - DNA, 19 bp, Homo sapiens
  siRNA target sequence for MGC14801 (NM_032705.2,316-334).
gccagacagattcaagtat

SEQ ID NO: 401245 - DNA, 19 bp, Homo sapiens
  siRNA target sequence for MGC12966 (NM_032706.1,378-396).
ccgcctgcaggttcatatt

SEQ ID NO: 401246 - DNA, 19 bp, Homo sapiens
  siRNA target sequence for MGC12966 (NM_032706.1,388-406).
gttcatattgagatccatt

SEQ ID NO: 401247 - DNA, 19 bp, Homo sapiens
  siRNA target sequence for MGC13053 (NM_032710.1,473-491).
gaacaagattccgttgtta

SEQ ID NO: 401248 - DNA, 19 bp, Homo sapiens
  siRNA target sequence for MGC13251 (NM_032714.1,570-588).
gctgccctgtgcatctact

SEQ ID NO: 401249 - DNA, 19 bp, Homo sapiens
  siRNA target sequence for MGC13251 (NM_032714.1,715-733).
ccctgcttagcgtgatcaa

SEQ ID NO: 401250 - DNA, 19 bp, Homo sapiens
  siRNA target sequence for MGC13251 (NM_032714.1,774-792).
cagctgcggaacgagttta

SEQ ID NO: 401251 - DNA, 19 bp, Homo sapiens
  siRNA target sequence for TA-NFKBH (NM_032721.2,54-72).
caagccttctggcatgaaa

SEQ ID NO: 401252 - DNA, 19 bp, Homo sapiens
  siRNA target sequence for TA-NFKBH (NM_032721.2,208-226).
gggtgcagggacaatttct

SEQ ID NO: 401253 - DNA, 19 bp, Homo sapiens
  siRNA target sequence for TA-NFKBH (NM_032721.2,396-414).
gcttctgctgccgaaaatt

SEQ ID NO: 401254 - DNA, 19 bp, Homo sapiens
  siRNA target sequence for TA-NFKBH (NM_032721.2,698-716).
gtaccggcgtcttgacatt

SEQ ID NO: 401255 - DNA, 19 bp, Homo sapiens
  siRNA target sequence for TA-NFKBH (NM_032721.2,955-973).
ccatcctggcccttaacgt

SEQ ID NO: 401256 - DNA, 19 bp, Homo sapiens
  siRNA target sequence for TA-NFKBH (NM_032721.2,956-974).
catcctggcccttaacgtt

SEQ ID NO: 401257 - DNA, 19 bp, Homo sapiens
  siRNA target sequence for TA-NFKBH (NM_032721.2,1024-1042).
gagacaggctggattgtgt

SEQ ID NO: 401258 - DNA, 19 bp, Homo sapiens
  siRNA target sequence for TA-NFKBH (NM_032721.2,1179-1197).
cggacctttgtcaacatga

SEQ ID NO: 401259 - DNA, 19 bp, Homo sapiens
  siRNA target sequence for TA-NFKBH (NM_032721.2,1180-1198).
ggacctttgtcaacatgaa

SEQ ID NO: 401260 - DNA, 19 bp, Homo sapiens
  siRNA target sequence for MGC13125 (NM_032725.2,116-134).
gtcgcaagcgtcgcaaaaa

SEQ ID NO: 401261 - DNA, 19 bp, Homo sapiens
  siRNA target sequence for MGC13125 (NM_032725.2,301-319).
cagatggaggcctttcgtt

SEQ ID NO: 401262 - DNA, 19 bp, Homo sapiens
  siRNA target sequence for MGC13125 (NM_032725.2,355-373).
gaagacctaccctcaaaca

SEQ ID NO: 401263 - DNA, 19 bp, Homo sapiens
  siRNA target sequence for MGC13125 (NM_032725.2,366-384).
ctcaaacagacattttcgt

SEQ ID NO: 401264 - DNA, 19 bp, Homo sapiens
  siRNA target sequence for MGC13125 (NM_032725.2,385-403).
cacgataccccggattcat

SEQ ID NO: 401265 - DNA, 19 bp, Homo sapiens
  siRNA target sequence for MGC13125 (NM_032725.2,387-405).
cgataccccggattcatct

SEQ ID NO: 401266 - DNA, 19 bp, Homo sapiens
  siRNA target sequence for MGC13125 (NM_032725.2,632-650).
caaggaggcctcagcataa

SEQ ID NO: 401267 - DNA, 19 bp, Homo sapiens
  siRNA target sequence for MGC13125 (NM_032725.2,672-690).
gagagtccgtcatgattca

SEQ ID NO: 401268 - DNA, 19 bp, Homo sapiens
  siRNA target sequence for MGC13125 (NM_032725.2,718-736).
cgtcatggttcctcagata

SEQ ID NO: 401269 - DNA, 19 bp, Homo sapiens
  siRNA target sequence for MGC13125 (NM_032725.2,719-737).
gtcatggttcctcagatat

SEQ ID NO: 401270 - DNA, 19 bp, Homo sapiens
  siRNA target sequence for MGC13125 (NM_032725.2,743-761).
cccccagaagggtccataa

SEQ ID NO: 401271 - DNA, 19 bp, Homo sapiens
  siRNA target sequence for MGC13125 (NM_032725.2,746-764).
ccagaagggtccataacaa

SEQ ID NO: 401272 - DNA, 19 bp, Homo sapiens
  siRNA target sequence for MGC13125 (NM_032725.2,827-845).
gtcatgactcccctgattt

SEQ ID NO: 401273 - DNA, 19 bp, Homo sapiens
  siRNA target sequence for MGC13125 (NM_032725.2,841-859).
gatttggctcctaatgtca

SEQ ID NO: 401274 - DNA, 19 bp, Homo sapiens
  siRNA target sequence for MGC13125 (NM_032725.2,940-958).
ggagcctcccatttgtcat

SEQ ID NO: 401275 - DNA, 19 bp, Homo sapiens
  siRNA target sequence for MGC13125 (NM_032725.2,941-959).
gagcctcccatttgtcatt

SEQ ID NO: 401276 - DNA, 19 bp, Homo sapiens
  siRNA target sequence for MGC13125 (NM_032725.2,1065-1083).
ctgccagaaagcaactgat

SEQ ID NO: 401277 - DNA, 19 bp, Homo sapiens
  siRNA target sequence for MGC13125 (NM_032725.2,1068-1086).
ccagaaagcaactgattca

SEQ ID NO: 401278 - DNA, 19 bp, Homo sapiens
  siRNA target sequence for MGC13125 (NM_032725.2,1146-1164).
gtcacctccacggaataga

SEQ ID NO: 401279 - DNA, 19 bp, Homo sapiens
  siRNA target sequence for MGC13125 (NM_032725.2,1209-1227).
gagacagaggaccaaatct

SEQ ID NO: 401280 - DNA, 19 bp, Homo sapiens
  siRNA target sequence for MGC13125 (NM_032725.2,1215-1233).
gaggaccaaatcttctgat

SEQ ID NO: 401281 - DNA, 19 bp, Homo sapiens
  siRNA target sequence for MGC13125 (NM_032725.2,1278-1296).
ggctgcacacatgtattct

SEQ ID NO: 401282 - DNA, 19 bp, Homo sapiens
  siRNA target sequence for MGC13125 (NM_032725.2,1307-1325).
ctgggttggtgttaactga

SEQ ID NO: 401283 - DNA, 19 bp, Homo sapiens
  siRNA target sequence for MGC13125 (NM_032725.2,1407-1425).
cgtatttcgagataagtct

SEQ ID NO: 401284 - DNA, 19 bp, Homo sapiens
  siRNA target sequence for MGC13125 (NM_032725.2,1424-1442).
ctggtcgtaagaggaattt

SEQ ID NO: 401285 - DNA, 19 bp, Homo sapiens
  siRNA target sequence for MGC13125 (NM_032725.2,1426-1444).
ggtcgtaagaggaatttga

SEQ ID NO: 401286 - DNA, 19 bp, Homo sapiens
  siRNA target sequence for MGC13125 (NM_032725.2,1617-1635).
ggataggatgctaagagaa

SEQ ID NO: 401287 - DNA, 19 bp, Homo sapiens
  siRNA target sequence for MGC13125 (NM_032725.2,1651-1669).
gaccctatggccaacttca

SEQ ID NO: 401288 - DNA, 19 bp, Homo sapiens
  siRNA target sequence for MGC13125 (NM_032725.2,1739-1757).
ctcccaacagatttaatat

SEQ ID NO: 401289 - DNA, 19 bp, Homo sapiens
  siRNA target sequence for MGC13125 (NM_032725.2,1741-1759).
cccaacagatttaatatct

SEQ ID NO: 401290 - DNA, 19 bp, Homo sapiens
  siRNA target sequence for MGC13125 (NM_032725.2,1783-1801).
gtggacagatccaatggat

SEQ ID NO: 401291 - DNA, 19 bp, Homo sapiens
  siRNA target sequence for MGC13125 (NM_032725.2,1785-1803).
ggacagatccaatggattt

SEQ ID NO: 401292 - DNA, 19 bp, Homo sapiens
  siRNA target sequence for C9orf67 (NM_032728.2,516-534).
gctggccatcgatatctgt

SEQ ID NO: 401293 - DNA, 19 bp, Homo sapiens
  siRNA target sequence for C9orf67 (NM_032728.2,517-535).
ctggccatcgatatctgta

SEQ ID NO: 401294 - DNA, 19 bp, Homo sapiens
  siRNA target sequence for C9orf67 (NM_032728.2,520-538).
gccatcgatatctgtatgt

SEQ ID NO: 401295 - DNA, 19 bp, Homo sapiens
  siRNA target sequence for C9orf67 (NM_032728.2,683-701).
gccaggaggtgctcatgaa

SEQ ID NO: 401296 - DNA, 19 bp, Homo sapiens
  siRNA target sequence for C9orf67 (NM_032728.2,684-702).
ccaggaggtgctcatgaat

SEQ ID NO: 401297 - DNA, 19 bp, Homo sapiens
  siRNA target sequence for C9orf67 (NM_032728.2,938-956).
gcctgtcccgcgtgatgat

SEQ ID NO: 401298 - DNA, 19 bp, Homo sapiens
  siRNA target sequence for IL17RC (NM_032732.2,338-356).
cctctgggacagtgacata

SEQ ID NO: 401299 - DNA, 19 bp, Homo sapiens
  siRNA target sequence for IL17RC (NM_032732.2,729-747).
gtacgaatctggtcctata

SEQ ID NO: 401300 - DNA, 19 bp, Homo sapiens
  siRNA target sequence for IL17RC (NM_032732.2,833-851).
cgtgcatctggttctgaat

SEQ ID NO: 401301 - DNA, 19 bp, Homo sapiens
  siRNA target sequence for IL17RC (NM_032732.2,916-934).
cccggtggcacaaaaacct

SEQ ID NO: 401302 - DNA, 19 bp, Homo sapiens
  siRNA target sequence for IL17RC (NM_032732.2,940-958).
gaccgcagatcattacctt

SEQ ID NO: 401303 - DNA, 19 bp, Homo sapiens
  siRNA target sequence for IL17RC (NM_032732.2,1415-1433).
cagtggctgtacttcacta

SEQ ID NO: 401304 - DNA, 19 bp, Homo sapiens
  siRNA target sequence for IL17RC (NM_032732.2,1459-1477).
ctcgccttggagagtactt

SEQ ID NO: 401305 - DNA, 19 bp, Homo sapiens
  siRNA target sequence for IL17RC (NM_032732.2,1463-1481).
ccttggagagtacttacta

SEQ ID NO: 401306 - DNA, 19 bp, Homo sapiens
  siRNA target sequence for C6orf105 (NM_032744.1,108-126).
cttgttctgagctggtata

SEQ ID NO: 401307 - DNA, 19 bp, Homo sapiens
  siRNA target sequence for C6orf105 (NM_032744.1,111-129).
gttctgagctggtatactt

SEQ ID NO: 401308 - DNA, 19 bp, Homo sapiens
  siRNA target sequence for C6orf105 (NM_032744.1,121-139).
ggtatactttcctcaatta

SEQ ID NO: 401309 - DNA, 19 bp, Homo sapiens
  siRNA target sequence for C6orf105 (NM_032744.1,165-183).
gaggtgaaacccaaaatct

SEQ ID NO: 401310 - DNA, 19 bp, Homo sapiens
  siRNA target sequence for C6orf105 (NM_032744.1,288-306).
gggggaaaagacattaagt

SEQ ID NO: 401311 - DNA, 19 bp, Homo sapiens
  siRNA target sequence for C6orf105 (NM_032744.1,352-370).
ctgtatccacgtttgtatt

SEQ ID NO: 401312 - DNA, 19 bp, Homo sapiens
  siRNA target sequence for C6orf105 (NM_032744.1,395-413).
ctacaatcgagatctcatt

SEQ ID NO: 401313 - DNA, 19 bp, Homo sapiens
  siRNA target sequence for C6orf105 (NM_032744.1,416-434).
ccccaaggtcctagatact

SEQ ID NO: 401314 - DNA, 19 bp, Homo sapiens
  siRNA target sequence for C6orf105 (NM_032744.1,513-531).
cactcctatccatcaaaga

SEQ ID NO: 401315 - DNA, 19 bp, Homo sapiens
  siRNA target sequence for C6orf105 (NM_032744.1,667-685).
ctctcagctacgtcttcat

SEQ ID NO: 401316 - DNA, 19 bp, Homo sapiens
  siRNA target sequence for MGC14697 (NM_032747.1,266-284).
ggcaggtccagaaagtgat

SEQ ID NO: 401317 - DNA, 19 bp, Homo sapiens
  siRNA target sequence for MGC14697 (NM_032747.1,333-351).
ctcacaggtagaatgaact

SEQ ID NO: 401318 - DNA, 19 bp, Homo sapiens
  siRNA target sequence for MGC14697 (NM_032747.1,373-391).
gcattgcattgattgtctt

SEQ ID NO: 401319 - DNA, 19 bp, Homo sapiens
  siRNA target sequence for MGC15634 (NM_032755.1,332-350).
catgtctcaaaacattagt

SEQ ID NO: 401320 - DNA, 19 bp, Homo sapiens
  siRNA target sequence for MGC15634 (NM_032755.1,364-382).
ctatgaggtttatcttctt

SEQ ID NO: 401321 - DNA, 19 bp, Homo sapiens
  siRNA target sequence for MGC15668 (NM_032756.1,390-408).
gcggcgacgcggtcttttt

SEQ ID NO: 401322 - DNA, 19 bp, Homo sapiens
  siRNA target sequence for MGC15668 (NM_032756.1,393-411).
gcgacgcggtctttttggt

SEQ ID NO: 401323 - DNA, 19 bp, Homo sapiens
  siRNA target sequence for MGC15668 (NM_032756.1,838-856).
gctgggcctcgaaatgaca

SEQ ID NO: 401324 - DNA, 19 bp, Homo sapiens
  siRNA target sequence for MGC15668 (NM_032756.1,913-931).
cattgtccccactcttgtt

SEQ ID NO: 401325 - DNA, 19 bp, Homo sapiens
  siRNA target sequence for MGC15668 (NM_032756.1,1013-1031).
cagcacgtggggctgtata

SEQ ID NO: 401326 - DNA, 19 bp, Homo sapiens
  siRNA target sequence for MGC15668 (NM_032756.1,1023-1041).
ggctgtatacgcctaacat

SEQ ID NO: 401327 - DNA, 19 bp, Homo sapiens
  siRNA target sequence for MGC15668 (NM_032756.1,1024-1042).
gctgtatacgcctaacatt

SEQ ID NO: 401328 - DNA, 19 bp, Homo sapiens
  siRNA target sequence for MGC15668 (NM_032756.1,1089-1107).
ctccccctggggcatacta

SEQ ID NO: 401329 - DNA, 19 bp, Homo sapiens
  siRNA target sequence for MGC15668 (NM_032756.1,1180-1198).
cctgctagatggtgataaa

SEQ ID NO: 401330 - DNA, 19 bp, Homo sapiens
  siRNA target sequence for MGC15668 (NM_032756.1,1222-1240).
caccaagtccctttttact

SEQ ID NO: 401331 - DNA, 19 bp, Homo sapiens
  siRNA target sequence for MGC15705 (NM_032757.1,272-290).
ctagaaatgtggttagaca

SEQ ID NO: 401332 - DNA, 19 bp, Homo sapiens
  siRNA target sequence for MGC15705 (NM_032757.1,328-346).
cagcaggatgcctgcttaa

SEQ ID NO: 401333 - DNA, 19 bp, Homo sapiens
  siRNA target sequence for MGC15705 (NM_032757.1,338-356).
cctgcttaatcctcgtaaa

SEQ ID NO: 401334 - DNA, 19 bp, Homo sapiens
  siRNA target sequence for MGC15705 (NM_032757.1,339-357).
ctgcttaatcctcgtaaaa

SEQ ID NO: 401335 - DNA, 19 bp, Homo sapiens
  siRNA target sequence for MGC15705 (NM_032757.1,342-360).
cttaatcctcgtaaaagga

SEQ ID NO: 401336 - DNA, 19 bp, Homo sapiens
  siRNA target sequence for MGC15705 (NM_032757.1,371-389).
caaacgagatggaggtaaa

SEQ ID NO: 401337 - DNA, 19 bp, Homo sapiens
  siRNA target sequence for MGC16075 (NM_032761.2,470-488).
ggcaccatgtggacctata

SEQ ID NO: 401338 - DNA, 19 bp, Homo sapiens
  siRNA target sequence for MGC16121 (NM_032762.2,445-463).
gttgcctcccggaatccaa

SEQ ID NO: 401339 - DNA, 19 bp, Homo sapiens
  siRNA target sequence for MGC16121 (NM_032762.2,482-500).
ctcccgagatgcatcgaaa

SEQ ID NO: 401340 - DNA, 19 bp, Homo sapiens
  siRNA target sequence for MGC16121 (NM_032762.2,484-502).
cccgagatgcatcgaaatt

SEQ ID NO: 401341 - DNA, 19 bp, Homo sapiens
  siRNA target sequence for MGC16121 (NM_032762.2,486-504).
cgagatgcatcgaaattga

SEQ ID NO: 401342 - DNA, 19 bp, Homo sapiens
  siRNA target sequence for MGC16142 (NM_032763.1,468-486).
ctcatccccaccaacataa

SEQ ID NO: 401343 - DNA, 19 bp, Homo sapiens
  siRNA target sequence for MGC16142 (NM_032763.1,473-491).
ccccaccaacataattcat

SEQ ID NO: 401344 - DNA, 19 bp, Homo sapiens
  siRNA target sequence for MGC16142 (NM_032763.1,475-493).
ccaccaacataattcatca

SEQ ID NO: 401345 - DNA, 19 bp, Homo sapiens
  siRNA target sequence for MGC16142 (NM_032763.1,478-496).
ccaacataattcatcatga

SEQ ID NO: 401346 - DNA, 19 bp, Homo sapiens
  siRNA target sequence for MGC16142 (NM_032763.1,519-537).
gtggtgtcaagcagcaaaa

SEQ ID NO: 401347 - DNA, 19 bp, Homo sapiens
  siRNA target sequence for MGC16291 (NM_032770.2,406-424).
ctttggagcggcctcatat

SEQ ID NO: 401348 - DNA, 19 bp, Homo sapiens
  siRNA target sequence for ZNF503 (NM_032772.3,347-365).
cagcgcgctctctggaaat

SEQ ID NO: 401349 - DNA, 19 bp, Homo sapiens
  siRNA target sequence for ZNF503 (NM_032772.3,351-369).
gcgctctctggaaatagct

SEQ ID NO: 401350 - DNA, 19 bp, Homo sapiens
  siRNA target sequence for ZNF503 (NM_032772.3,454-472).
ccaaccgcctgccaatcaa

SEQ ID NO: 401351 - DNA, 19 bp, Homo sapiens
  siRNA target sequence for ZNF503 (NM_032772.3,466-484).
caatcaaggtgctgaagat

SEQ ID NO: 401352 - DNA, 19 bp, Homo sapiens
  siRNA target sequence for ZNF503 (NM_032772.3,590-608).
gctgttggcgcaaacatgt

SEQ ID NO: 401353 - DNA, 19 bp, Homo sapiens
  siRNA target sequence for ZNF503 (NM_032772.3,591-609).
ctgttggcgcaaacatgtt

SEQ ID NO: 401354 - DNA, 19 bp, Homo sapiens
  siRNA target sequence for ZNF503 (NM_032772.3,1114-1132).
ggattaatgtggatgtgaa

SEQ ID NO: 401355 - DNA, 19 bp, Homo sapiens
  siRNA target sequence for ZNF503 (NM_032772.3,1592-1610).
cgcttcttgcgcacatgat

SEQ ID NO: 401356 - DNA, 19 bp, Homo sapiens
  siRNA target sequence for ZNF503 (NM_032772.3,2112-2130).
gccaccggaccgtactact

SEQ ID NO: 401357 - DNA, 19 bp, Homo sapiens
  siRNA target sequence for MGC4126 (NM_032773.2,274-292).
cgcgaaatcgcctttcaga

SEQ ID NO: 401358 - DNA, 19 bp, Homo sapiens
  siRNA target sequence for MGC4126 (NM_032773.2,275-293).
gcgaaatcgcctttcagaa

SEQ ID NO: 401359 - DNA, 19 bp, Homo sapiens
  siRNA target sequence for MGC4126 (NM_032773.2,276-294).
cgaaatcgcctttcagaaa

SEQ ID NO: 401360 - DNA, 19 bp, Homo sapiens
  siRNA target sequence for MGC4126 (NM_032773.2,303-321).
gaagcatgtcactttgttt

SEQ ID NO: 401361 - DNA, 19 bp, Homo sapiens
  siRNA target sequence for MGC4126 (NM_032773.2,341-359).
gtaccaaaattgtattcgt

SEQ ID NO: 401362 - DNA, 19 bp, Homo sapiens
  siRNA target sequence for MGC4126 (NM_032773.2,344-362).
ccaaaattgtattcgttat

SEQ ID NO: 401363 - DNA, 19 bp, Homo sapiens
  siRNA target sequence for MGC4126 (NM_032773.2,387-405).
caagctctaacattcttaa

SEQ ID NO: 401364 - DNA, 19 bp, Homo sapiens
  siRNA target sequence for MGC4126 (NM_032773.2,414-432).
cggaaccaactgtcaacat

SEQ ID NO: 401365 - DNA, 19 bp, Homo sapiens
  siRNA target sequence for MGC4126 (NM_032773.2,427-445).
caacattgccggtacactt

SEQ ID NO: 401366 - DNA, 19 bp, Homo sapiens
  siRNA target sequence for MGC4126 (NM_032773.2,434-452).
gccggtacacttgtgtaat

SEQ ID NO: 401367 - DNA, 19 bp, Homo sapiens
  siRNA target sequence for MGC4126 (NM_032773.2,435-453).
ccggtacacttgtgtaatt

SEQ ID NO: 401368 - DNA, 19 bp, Homo sapiens
  siRNA target sequence for MGC4126 (NM_032773.2,436-454).
cggtacacttgtgtaattt

SEQ ID NO: 401369 - DNA, 19 bp, Homo sapiens
  siRNA target sequence for MGC4126 (NM_032773.2,465-483).
gtcttaattgctagtaata

SEQ ID NO: 401370 - DNA, 19 bp, Homo sapiens
  siRNA target sequence for MGC4126 (NM_032773.2,513-531).
ggacaccttagacatttga

SEQ ID NO: 401371 - DNA, 19 bp, Homo sapiens
  siRNA target sequence for MGC4126 (NM_032773.2,514-532).
gacaccttagacatttgat

SEQ ID NO: 401372 - DNA, 19 bp, Homo sapiens
  siRNA target sequence for MGC4126 (NM_032773.2,550-568).
gcaatgaaattcaaactat

SEQ ID NO: 401373 - DNA, 19 bp, Homo sapiens
  siRNA target sequence for MGC4126 (NM_032773.2,660-678).
cctttgatacggttagact

SEQ ID NO: 401374 - DNA, 19 bp, Homo sapiens
  siRNA target sequence for MGC4126 (NM_032773.2,661-679).
ctttgatacggttagactt

SEQ ID NO: 401375 - DNA, 19 bp, Homo sapiens
  siRNA target sequence for MGC4126 (NM_032773.2,671-689).
gttagacttctcatgcaat

SEQ ID NO: 401376 - DNA, 19 bp, Homo sapiens
  siRNA target sequence for MGC4126 (NM_032773.2,677-695).
cttctcatgcaataaaatt

SEQ ID NO: 401377 - DNA, 19 bp, Homo sapiens
  siRNA target sequence for MGC4126 (NM_032773.2,735-753).
cagacgatcaccctagata

SEQ ID NO: 401378 - DNA, 19 bp, Homo sapiens
  siRNA target sequence for MGC4126 (NM_032773.2,739-757).
cgatcaccctagataacaa

SEQ ID NO: 401379 - DNA, 19 bp, Homo sapiens
  siRNA target sequence for MGC4126 (NM_032773.2,750-768).
gataacaatccactacaat

SEQ ID NO: 401380 - DNA, 19 bp, Homo sapiens
  siRNA target sequence for MGC4126 (NM_032773.2,771-789).
cctcctgcacagatatgta

SEQ ID NO: 401381 - DNA, 19 bp, Homo sapiens
  siRNA target sequence for MGC4126 (NM_032773.2,772-790).
ctcctgcacagatatgtat

SEQ ID NO: 401382 - DNA, 19 bp, Homo sapiens
  siRNA target sequence for MGC4126 (NM_032773.2,849-867).
gatctgccggattatgata

SEQ ID NO: 401383 - DNA, 19 bp, Homo sapiens
  siRNA target sequence for MGC4126 (NM_032773.2,908-926).
ctcaagtcgcccttatgga

SEQ ID NO: 401384 - DNA, 19 bp, Homo sapiens
  siRNA target sequence for MGC4126 (NM_032773.2,929-947).
ccttgattcaggcttcaat

SEQ ID NO: 401385 - DNA, 19 bp, Homo sapiens
  siRNA target sequence for MGC4126 (NM_032773.2,930-948).
cttgattcaggcttcaata

SEQ ID NO: 401386 - DNA, 19 bp, Homo sapiens
  siRNA target sequence for MGC4126 (NM_032773.2,1100-1118).
cggcggagtggaacatgat

SEQ ID NO: 401387 - DNA, 19 bp, Homo sapiens
  siRNA target sequence for MGC4126 (NM_032773.2,1102-1120).
gcggagtggaacatgatct

SEQ ID NO: 401388 - DNA, 19 bp, Homo sapiens
  siRNA target sequence for MGC4126 (NM_032773.2,1121-1139).
ggatcagattgactacata

SEQ ID NO: 401389 - DNA, 19 bp, Homo sapiens
  siRNA target sequence for MGC4126 (NM_032773.2,1204-1222).
gccttagttcacagtttat

SEQ ID NO: 401390 - DNA, 19 bp, Homo sapiens
  siRNA target sequence for MGC4126 (NM_032773.2,1213-1231).
cacagtttatggcgtatat

SEQ ID NO: 401391 - DNA, 19 bp, Homo sapiens
  siRNA target sequence for MGC4126 (NM_032773.2,1217-1235).
gtttatggcgtatattgaa

SEQ ID NO: 401392 - DNA, 19 bp, Homo sapiens
  siRNA target sequence for MGC4126 (NM_032773.2,1415-1433).
gagaagggagcagttagta

SEQ ID NO: 401393 - DNA, 19 bp, Homo sapiens
  siRNA target sequence for MGC4126 (NM_032773.2,1417-1435).
gaagggagcagttagtaga

SEQ ID NO: 401394 - DNA, 19 bp, Homo sapiens
  siRNA target sequence for MGC4126 (NM_032773.2,1546-1564).
cacaaagtccacaaaaaca

SEQ ID NO: 401395 - DNA, 19 bp, Homo sapiens
  siRNA target sequence for MGC4126 (NM_032773.2,1652-1670).
gctgtcagggttgaatcaa

SEQ ID NO: 401396 - DNA, 19 bp, Homo sapiens
  siRNA target sequence for MGC4126 (NM_032773.2,1683-1701).
gctaccctgcctcattctt

SEQ ID NO: 401397 - DNA, 19 bp, Homo sapiens
  siRNA target sequence for MGC4126 (NM_032773.2,1702-1720).
ctgccttcacgcctcttaa

SEQ ID NO: 401398 - DNA, 19 bp, Homo sapiens
  siRNA target sequence for MGC4126 (NM_032773.2,1706-1724).
cttcacgcctcttaagagt

SEQ ID NO: 401399 - DNA, 19 bp, Homo sapiens
  siRNA target sequence for MGC4126 (NM_032773.2,1721-1739).
gagtgatgacagacctaat

SEQ ID NO: 401400 - DNA, 19 bp, Homo sapiens
  siRNA target sequence for MGC4126 (NM_032773.2,1734-1752).
cctaatgctctattaagtt

SEQ ID NO: 401401 - DNA, 19 bp, Homo sapiens
  siRNA target sequence for MGC4126 (NM_032773.2,1759-1777).
caacagaaacagttcatca

SEQ ID NO: 401402 - DNA, 19 bp, Homo sapiens
  siRNA target sequence for MGC4126 (NM_032773.2,1908-1926).
gcacctaccactgattcta

SEQ ID NO: 401403 - DNA, 19 bp, Homo sapiens
  siRNA target sequence for MGC4126 (NM_032773.2,1918-1936).
ctgattctacagattccat

SEQ ID NO: 401404 - DNA, 19 bp, Homo sapiens
  siRNA target sequence for MGC4126 (NM_032773.2,1983-2001).
gaccaactgcgtaaacata

SEQ ID NO: 401405 - DNA, 19 bp, Homo sapiens
  siRNA target sequence for MGC4126 (NM_032773.2,1985-2003).
ccaactgcgtaaacatatt

SEQ ID NO: 401406 - DNA, 19 bp, Homo sapiens
  siRNA target sequence for MGC4126 (NM_032773.2,1989-2007).
ctgcgtaaacatattgagt

SEQ ID NO: 401407 - DNA, 19 bp, Homo sapiens
  siRNA target sequence for MGC4126 (NM_032773.2,2004-2022).
gagtaccggttgaaagtgt

SEQ ID NO: 401408 - DNA, 19 bp, Homo sapiens
  siRNA target sequence for MGC4126 (NM_032773.2,2101-2119).
ctgtcccaagcattcatgt

SEQ ID NO: 401409 - DNA, 19 bp, Homo sapiens
  siRNA target sequence for MGC4126 (NM_032773.2,2121-2139).
ccctcaccagctgtagtaa

SEQ ID NO: 401410 - DNA, 19 bp, Homo sapiens
  siRNA target sequence for MINA53 (NM_032778.3,263-281).
ctccctgtaagcagatgaa

SEQ ID NO: 401411 - DNA, 19 bp, Homo sapiens
  siRNA target sequence for MINA53 (NM_032778.3,267-285).
ctgtaagcagatgaagtta

SEQ ID NO: 401412 - DNA, 19 bp, Homo sapiens
  siRNA target sequence for MINA53 (NM_032778.3,269-287).
gtaagcagatgaagttaga

SEQ ID NO: 401413 - DNA, 19 bp, Homo sapiens
  siRNA target sequence for MINA53 (NM_032778.3,323-341).
gtcccagtagtctctttga

SEQ ID NO: 401414 - DNA, 19 bp, Homo sapiens
  siRNA target sequence for MINA53 (NM_032778.3,325-343).
cccagtagtctctttgaaa

SEQ ID NO: 401415 - DNA, 19 bp, Homo sapiens
  siRNA target sequence for MINA53 (NM_032778.3,424-442).
cctgcactggccacatact

SEQ ID NO: 401416 - DNA, 19 bp, Homo sapiens
  siRNA target sequence for MINA53 (NM_032778.3,425-443).
ctgcactggccacatacta

SEQ ID NO: 401417 - DNA, 19 bp, Homo sapiens
  siRNA target sequence for MINA53 (NM_032778.3,449-467).
ccctgttcaagctaacaga

SEQ ID NO: 401418 - DNA, 19 bp, Homo sapiens
  siRNA target sequence for MINA53 (NM_032778.3,450-468).
cctgttcaagctaacagat

SEQ ID NO: 401419 - DNA, 19 bp, Homo sapiens
  siRNA target sequence for MINA53 (NM_032778.3,492-510).
gatgtactatggaagagat

SEQ ID NO: 401420 - DNA, 19 bp, Homo sapiens
  siRNA target sequence for MINA53 (NM_032778.3,502-520).
ggaagagatgtgaatgtct

SEQ ID NO: 401421 - DNA, 19 bp, Homo sapiens
  siRNA target sequence for MINA53 (NM_032778.3,608-626).
gggcaacgattcagtttca

SEQ ID NO: 401422 - DNA, 19 bp, Homo sapiens
  siRNA target sequence for MINA53 (NM_032778.3,667-685).
gagaagctggaatgttact

SEQ ID NO: 401423 - DNA, 19 bp, Homo sapiens
  siRNA target sequence for MINA53 (NM_032778.3,700-718).
ggctcgaatgtgtacataa

SEQ ID NO: 401424 - DNA, 19 bp, Homo sapiens
  siRNA target sequence for MINA53 (NM_032778.3,702-720).
ctcgaatgtgtacataact

SEQ ID NO: 401425 - DNA, 19 bp, Homo sapiens
  siRNA target sequence for MINA53 (NM_032778.3,754-772).
gatgatgtcgaggttttca

SEQ ID NO: 401426 - DNA, 19 bp, Homo sapiens
  siRNA target sequence for MINA53 (NM_032778.3,866-884).
gcaggccggtgcatgagtt

SEQ ID NO: 401427 - DNA, 19 bp, Homo sapiens
  siRNA target sequence for MINA53 (NM_032778.3,867-885).
caggccggtgcatgagttt

SEQ ID NO: 401428 - DNA, 19 bp, Homo sapiens
  siRNA target sequence for MINA53 (NM_032778.3,869-887).
ggccggtgcatgagtttat

SEQ ID NO: 401429 - DNA, 19 bp, Homo sapiens
  siRNA target sequence for MINA53 (NM_032778.3,872-890).
cggtgcatgagtttatgct

SEQ ID NO: 401430 - DNA, 19 bp, Homo sapiens
  siRNA target sequence for MINA53 (NM_032778.3,889-907).
ctgaagccgggtgatttgt

SEQ ID NO: 401431 - DNA, 19 bp, Homo sapiens
  siRNA target sequence for MINA53 (NM_032778.3,895-913).
ccgggtgatttgttgtact

SEQ ID NO: 401432 - DNA, 19 bp, Homo sapiens
  siRNA target sequence for MINA53 (NM_032778.3,918-936).
cagaggaaccattcatcaa

SEQ ID NO: 401433 - DNA, 19 bp, Homo sapiens
  siRNA target sequence for MINA53 (NM_032778.3,984-1002).
cacctaccagaacaattca

SEQ ID NO: 401434 - DNA, 19 bp, Homo sapiens
  siRNA target sequence for MINA53 (NM_032778.3,1025-1043).
ccatctcggggcttgtatt

SEQ ID NO: 401435 - DNA, 19 bp, Homo sapiens
  siRNA target sequence for MINA53 (NM_032778.3,1029-1047).
ctcggggcttgtatttgat

SEQ ID NO: 401436 - DNA, 19 bp, Homo sapiens
  siRNA target sequence for MINA53 (NM_032778.3,1117-1135).
gttgctacaagacgattaa

SEQ ID NO: 401437 - DNA, 19 bp, Homo sapiens
  siRNA target sequence for MINA53 (NM_032778.3,1297-1315).
gtagtgagactgcagttta

SEQ ID NO: 401438 - DNA, 19 bp, Homo sapiens
  siRNA target sequence for MINA53 (NM_032778.3,1339-1357).
ctgccggatcaagatcaat

SEQ ID NO: 401439 - DNA, 19 bp, Homo sapiens
  siRNA target sequence for MINA53 (NM_032778.3,1341-1359).
gccggatcaagatcaatct

SEQ ID NO: 401440 - DNA, 19 bp, Homo sapiens
  siRNA target sequence for MINA53 (NM_032778.3,1343-1361).
cggatcaagatcaatctga

SEQ ID NO: 401441 - DNA, 19 bp, Homo sapiens
  siRNA target sequence for MINA53 (NM_032778.3,1389-1407).
ctatcattccttaaagaat

SEQ ID NO: 401442 - DNA, 19 bp, Homo sapiens
  siRNA target sequence for MINA53 (NM_032778.3,1409-1427).
gtagagagacacacatgat

SEQ ID NO: 401443 - DNA, 19 bp, Homo sapiens
  siRNA target sequence for MINA53 (NM_032778.3,1462-1480).
cgcttccctttgtcacatt

SEQ ID NO: 401444 - DNA, 19 bp, Homo sapiens
  siRNA target sequence for MINA53 (NM_032778.3,1503-1521).
gaatagtccagctatttct

SEQ ID NO: 401445 - DNA, 19 bp, Homo sapiens
  siRNA target sequence for MINA53 (NM_032778.3,1522-1540).
gtcaaggacctgaaactta

SEQ ID NO: 401446 - DNA, 19 bp, Homo sapiens
  siRNA target sequence for FLJ14397 (NM_032779.2,185-203).
gcctgcctccactcgttat

SEQ ID NO: 401447 - DNA, 19 bp, Homo sapiens
  siRNA target sequence for FLJ14397 (NM_032779.2,509-527).
cggctgtgcgactcatgaa

SEQ ID NO: 401448 - DNA, 19 bp, Homo sapiens
  siRNA target sequence for FLJ14397 (NM_032779.2,511-529).
gctgtgcgactcatgaaga

SEQ ID NO: 401449 - DNA, 19 bp, Homo sapiens
  siRNA target sequence for FLJ14397 (NM_032779.2,1328-1346).
gcactgctgaacttttgca

SEQ ID NO: 401450 - DNA, 19 bp, Homo sapiens
  siRNA target sequence for FLJ14397 (NM_032779.2,1457-1475).
gcagagctcagcagtactt

SEQ ID NO: 401451 - DNA, 19 bp, Homo sapiens
  siRNA target sequence for FLJ14397 (NM_032779.2,1540-1558).
gaggcagaagctttgtata

SEQ ID NO: 401452 - DNA, 19 bp, Homo sapiens
  siRNA target sequence for FLJ14397 (NM_032779.2,1658-1676).
cactaagtgtcttttctca

SEQ ID NO: 401453 - DNA, 19 bp, Homo sapiens
  siRNA target sequence for FLJ14397 (NM_032779.2,1775-1793).
gtgagtatgctggtttagt

SEQ ID NO: 401454 - DNA, 19 bp, Homo sapiens
  siRNA target sequence for FLJ14397 (NM_032779.2,2146-2164).
gaggtccagaccacgaaat

SEQ ID NO: 401455 - DNA, 19 bp, Homo sapiens
  siRNA target sequence for FLJ14397 (NM_032779.2,2167-2185).
cccagcagctgcctcaata

SEQ ID NO: 401456 - DNA, 19 bp, Homo sapiens
  siRNA target sequence for FLJ14399 (NM_032780.2,130-148).
gggagttggagccacaaat

SEQ ID NO: 401457 - DNA, 19 bp, Homo sapiens
  siRNA target sequence for FLJ14399 (NM_032780.2,131-149).
ggagttggagccacaaata

SEQ ID NO: 401458 - DNA, 19 bp, Homo sapiens
  siRNA target sequence for FLJ14399 (NM_032780.2,134-152).
gttggagccacaaatagat

SEQ ID NO: 401459 - DNA, 19 bp, Homo sapiens
  siRNA target sequence for FLJ14399 (NM_032780.2,172-190).
gggcacttcgggagaatga

SEQ ID NO: 401460 - DNA, 19 bp, Homo sapiens
  siRNA target sequence for FLJ14399 (NM_032780.2,410-428).
cgcctctgtcatccttaat

SEQ ID NO: 401461 - DNA, 19 bp, Homo sapiens
  siRNA target sequence for FLJ14399 (NM_032780.2,752-770).
gccactgctgggcattgtt

SEQ ID NO: 401462 - DNA, 19 bp, Homo sapiens
  siRNA target sequence for FLJ14399 (NM_032780.2,866-884).
ccggcacccatctctgata

SEQ ID NO: 401463 - DNA, 19 bp, Homo sapiens
  siRNA target sequence for FLJ14399 (NM_032780.2,867-885).
cggcacccatctctgatat

SEQ ID NO: 401464 - DNA, 19 bp, Homo sapiens
  siRNA target sequence for FLJ14399 (NM_032780.2,869-887).
gcacccatctctgatatca

SEQ ID NO: 401465 - DNA, 19 bp, Homo sapiens
  siRNA target sequence for FLJ14399 (NM_032780.2,889-907).
gtgactccaacaacctaaa

SEQ ID NO: 401466 - DNA, 19 bp, Homo sapiens
  siRNA target sequence for FLJ14399 (NM_032780.2,1009-1027).
ggcagatggctcagaacaa

SEQ ID NO: 401467 - DNA, 19 bp, Homo sapiens
  siRNA target sequence for FLJ14399 (NM_032780.2,1096-1114).
cagtgctgggctatatcta

SEQ ID NO: 401468 - DNA, 19 bp, Homo sapiens
  siRNA target sequence for FLJ14431 (NM_032783.2,205-223).
gagctgtggcccagttaat

SEQ ID NO: 401469 - DNA, 19 bp, Homo sapiens
  siRNA target sequence for FLJ14431 (NM_032783.2,291-309).
gacctcggcggagatcatt

SEQ ID NO: 401470 - DNA, 19 bp, Homo sapiens
  siRNA target sequence for FLJ14431 (NM_032783.2,300-318).
ggagatcatttggcattta

SEQ ID NO: 401471 - DNA, 19 bp, Homo sapiens
  siRNA target sequence for FLJ14431 (NM_032783.2,303-321).
gatcatttggcatttagct

SEQ ID NO: 401472 - DNA, 19 bp, Homo sapiens
  siRNA target sequence for FLJ14431 (NM_032783.2,311-329).
ggcatttagctgtgatgtt

SEQ ID NO: 401473 - DNA, 19 bp, Homo sapiens
  siRNA target sequence for FLJ14431 (NM_032783.2,398-416).
ggtaaatgcagctggtatt

SEQ ID NO: 401474 - DNA, 19 bp, Homo sapiens
  siRNA target sequence for FLJ14431 (NM_032783.2,422-440).
ggatggtcttttagtaaga

SEQ ID NO: 401475 - DNA, 19 bp, Homo sapiens
  siRNA target sequence for FLJ14431 (NM_032783.2,458-476).
ggtatctcagcttcatact

SEQ ID NO: 401476 - DNA, 19 bp, Homo sapiens
  siRNA target sequence for FLJ14431 (NM_032783.2,491-509).
catgctgacctgtaaagct

SEQ ID NO: 401477 - DNA, 19 bp, Homo sapiens
  siRNA target sequence for FLJ14431 (NM_032783.2,512-530).
catgaggactatgattcaa

SEQ ID NO: 401478 - DNA, 19 bp, Homo sapiens
  siRNA target sequence for FLJ14431 (NM_032783.2,534-552).
cagggagggtctattgtta

SEQ ID NO: 401479 - DNA, 19 bp, Homo sapiens
  siRNA target sequence for FLJ14431 (NM_032783.2,596-614).
cgtttacagtgccagtaaa

SEQ ID NO: 401480 - DNA, 19 bp, Homo sapiens
  siRNA target sequence for FLJ14431 (NM_032783.2,634-652).
cacgtgctcttgctaaaga

SEQ ID NO: 401481 - DNA, 19 bp, Homo sapiens
  siRNA target sequence for FLJ14431 (NM_032783.2,665-683).
gaaaattagagtgaatgta

SEQ ID NO: 401482 - DNA, 19 bp, Homo sapiens
  siRNA target sequence for FLJ14431 (NM_032783.2,706-724).
cagatatgacgaaagactt

SEQ ID NO: 401483 - DNA, 19 bp, Homo sapiens
  siRNA target sequence for FLJ14431 (NM_032783.2,760-778).
ggaggtttggagaaactat

SEQ ID NO: 401484 - DNA, 19 bp, Homo sapiens
  siRNA target sequence for FLJ14431 (NM_032783.2,789-807).
catgcggttgtgtttcttt

SEQ ID NO: 401485 - DNA, 19 bp, Homo sapiens
  siRNA target sequence for FLJ14431 (NM_032783.2,793-811).
cggttgtgtttcttttaga

SEQ ID NO: 401486 - DNA, 19 bp, Homo sapiens
  siRNA target sequence for FLJ14431 (NM_032783.2,794-812).
ggttgtgtttcttttagaa

SEQ ID NO: 401487 - DNA, 19 bp, Homo sapiens
  siRNA target sequence for THSD2 (NM_032784.2,285-303).
gcacttgcgactgatttct

SEQ ID NO: 401488 - DNA, 19 bp, Homo sapiens
  siRNA target sequence for THSD2 (NM_032784.2,286-304).
cacttgcgactgatttctt

SEQ ID NO: 401489 - DNA, 19 bp, Homo sapiens
  siRNA target sequence for THSD2 (NM_032784.2,362-380).
gaaggcgccagcgaagaat

SEQ ID NO: 401490 - DNA, 19 bp, Homo sapiens
  siRNA target sequence for THSD2 (NM_032784.2,366-384).
gcgccagcgaagaatgcat

SEQ ID NO: 401491 - DNA, 19 bp, Homo sapiens
  siRNA target sequence for THSD2 (NM_032784.2,381-399).
gcatcctaacgttagtcaa

SEQ ID NO: 401492 - DNA, 19 bp, Homo sapiens
  siRNA target sequence for THSD2 (NM_032784.2,418-436).
gcaacatgctcagattaca

SEQ ID NO: 401493 - DNA, 19 bp, Homo sapiens
  siRNA target sequence for THSD2 (NM_032784.2,502-520).
ggagtatgtctctcttcat

SEQ ID NO: 401494 - DNA, 19 bp, Homo sapiens
  siRNA target sequence for THSD2 (NM_032784.2,539-557).
gaactcgatatccagatat

SEQ ID NO: 401495 - DNA, 19 bp, Homo sapiens
  siRNA target sequence for THSD2 (NM_032784.2,542-560).
ctcgatatccagatataaa

SEQ ID NO: 401496 - DNA, 19 bp, Homo sapiens
  siRNA target sequence for THSD2 (NM_032784.2,587-605).
gtgatacctgtttcaacaa

SEQ ID NO: 401497 - DNA, 19 bp, Homo sapiens
  siRNA target sequence for THSD2 (NM_032784.2,682-700).
gaagccaacaaccatacta

SEQ ID NO: 401498 - DNA, 19 bp, Homo sapiens
  siRNA target sequence for THSD2 (NM_032784.2,698-716).
ctatggagtgtgtcagtat

SEQ ID NO: 401499 - DNA, 19 bp, Homo sapiens
  siRNA target sequence for THSD2 (NM_032784.2,721-739).
cactgtgaggtcagtgaat

SEQ ID NO: 401500 - DNA, 19 bp, Homo sapiens
  siRNA target sequence for THSD2 (NM_032784.2,803-821).
cacgggtccgagaaataat

SEQ ID NO: 401501 - DNA, 19 bp, Homo sapiens
  siRNA target sequence for THSD2 (NM_032784.2,806-824).
gggtccgagaaataataca

SEQ ID NO: 401502 - DNA, 19 bp, Homo sapiens
  siRNA target sequence for FLJ14442 (NM_032785.1,158-176).
gataaccagccctgacaat

SEQ ID NO: 401503 - DNA, 19 bp, Homo sapiens
  siRNA target sequence for FLJ14442 (NM_032785.1,195-213).
cagaaggtggtattcatca

SEQ ID NO: 401504 - DNA, 19 bp, Homo sapiens
  siRNA target sequence for FLJ14442 (NM_032785.1,256-274).
gccaagggatcattgactt

SEQ ID NO: 401505 - DNA, 19 bp, Homo sapiens
  siRNA target sequence for FLJ14442 (NM_032785.1,310-328).
gggaatacctggtcttcaa

SEQ ID NO: 401506 - DNA, 19 bp, Homo sapiens
  siRNA target sequence for FLJ14442 (NM_032785.1,312-330).
gaatacctggtcttcaaga

SEQ ID NO: 401507 - DNA, 19 bp, Homo sapiens
  siRNA target sequence for FLJ14442 (NM_032785.1,355-373).
gagtctacctgggcaatta

SEQ ID NO: 401508 - DNA, 19 bp, Homo sapiens
  siRNA target sequence for FLJ14442 (NM_032785.1,476-494).
gtacaacgacccaaaaaca

SEQ ID NO: 401509 - DNA, 19 bp, Homo sapiens
  siRNA target sequence for FLJ14442 (NM_032785.1,548-566).
catgtatggcaacatcttt

SEQ ID NO: 401510 - DNA, 19 bp, Homo sapiens
  siRNA target sequence for FLJ14442 (NM_032785.1,707-725).
cctggaccacacttcctat

SEQ ID NO: 401511 - DNA, 19 bp, Homo sapiens
  siRNA target sequence for FLJ14442 (NM_032785.1,708-726).
ctggaccacacttcctatt

SEQ ID NO: 401512 - DNA, 19 bp, Homo sapiens
  siRNA target sequence for FLJ14442 (NM_032785.1,711-729).
gaccacacttcctattgct

SEQ ID NO: 401513 - DNA, 19 bp, Homo sapiens
  siRNA target sequence for FLJ14464 (NM_032789.1,147-165).
gctcactctctactttgaa

SEQ ID NO: 401514 - DNA, 19 bp, Homo sapiens
  siRNA target sequence for FLJ14464 (NM_032789.1,935-953).
gtgcagggactgtgacaat

SEQ ID NO: 401515 - DNA, 19 bp, Homo sapiens
  siRNA target sequence for FLJ14464 (NM_032789.1,1012-1030).
cagggtagagggattatga

SEQ ID NO: 401516 - DNA, 19 bp, Homo sapiens
  siRNA target sequence for FLJ14464 (NM_032789.1,1014-1032).
gggtagagggattatgaca

SEQ ID NO: 401517 - DNA, 19 bp, Homo sapiens
  siRNA target sequence for FLJ14464 (NM_032789.1,1485-1503).
cgctctcttgccacttgaa

SEQ ID NO: 401518 - DNA, 19 bp, Homo sapiens
  siRNA target sequence for FLJ14464 (NM_032789.1,1498-1516).
cttgaaggaccggatatga

SEQ ID NO: 401519 - DNA, 19 bp, Homo sapiens
  siRNA target sequence for FLJ14466 (NM_032790.2,576-594).
ctgtttgcgctcatgatca

SEQ ID NO: 401520 - DNA, 19 bp, Homo sapiens
  siRNA target sequence for FLJ14466 (NM_032790.2,906-924).
cccttcggcctgatcttta

SEQ ID NO: 401521 - DNA, 19 bp, Homo sapiens
  siRNA target sequence for SYAP1 (NM_032796.2,255-273).
caaagacttcggcaactat

SEQ ID NO: 401522 - DNA, 19 bp, Homo sapiens
  siRNA target sequence for SYAP1 (NM_032796.2,265-283).
ggcaactatttatttaact

SEQ ID NO: 401523 - DNA, 19 bp, Homo sapiens
  siRNA target sequence for SYAP1 (NM_032796.2,287-305).
catctgctgccacaaaaaa

SEQ ID NO: 401524 - DNA, 19 bp, Homo sapiens
  siRNA target sequence for SYAP1 (NM_032796.2,350-368).
ccgtagaagaaggaaaaat

SEQ ID NO: 401525 - DNA, 19 bp, Homo sapiens
  siRNA target sequence for SYAP1 (NM_032796.2,375-393).
catcattgacaagacaatt

SEQ ID NO: 401526 - DNA, 19 bp, Homo sapiens
  siRNA target sequence for SYAP1 (NM_032796.2,378-396).
cattgacaagacaattata

SEQ ID NO: 401527 - DNA, 19 bp, Homo sapiens
  siRNA target sequence for SYAP1 (NM_032796.2,556-574).
ccggctggcgtgcaattta

SEQ ID NO: 401528 - DNA, 19 bp, Homo sapiens
  siRNA target sequence for SYAP1 (NM_032796.2,557-575).
cggctggcgtgcaatttaa

SEQ ID NO: 401529 - DNA, 19 bp, Homo sapiens
  siRNA target sequence for SYAP1 (NM_032796.2,558-576).
ggctggcgtgcaatttaat

SEQ ID NO: 401530 - DNA, 19 bp, Homo sapiens
  siRNA target sequence for SYAP1 (NM_032796.2,559-577).
gctggcgtgcaatttaatt

SEQ ID NO: 401531 - DNA, 19 bp, Homo sapiens
  siRNA target sequence for SYAP1 (NM_032796.2,560-578).
ctggcgtgcaatttaattt

SEQ ID NO: 401532 - DNA, 19 bp, Homo sapiens
  siRNA target sequence for SYAP1 (NM_032796.2,563-581).
gcgtgcaatttaatttcga

SEQ ID NO: 401533 - DNA, 19 bp, Homo sapiens
  siRNA target sequence for SYAP1 (NM_032796.2,647-665).
gatttgccctcgttcctaa

SEQ ID NO: 401534 - DNA, 19 bp, Homo sapiens
  siRNA target sequence for SYAP1 (NM_032796.2,653-671).
ccctcgttcctaaacttgt

SEQ ID NO: 401535 - DNA, 19 bp, Homo sapiens
  siRNA target sequence for SYAP1 (NM_032796.2,682-700).
gtgttctggaggaactact

SEQ ID NO: 401536 - DNA, 19 bp, Homo sapiens
  siRNA target sequence for SYAP1 (NM_032796.2,707-725).
gcgtctccctgattaagca

SEQ ID NO: 401537 - DNA, 19 bp, Homo sapiens
  siRNA target sequence for SYAP1 (NM_032796.2,836-854).
cgccacccgttgtaatcaa

SEQ ID NO: 401538 - DNA, 19 bp, Homo sapiens
  siRNA target sequence for SYAP1 (NM_032796.2,837-855).
gccacccgttgtaatcaaa

SEQ ID NO: 401539 - DNA, 19 bp, Homo sapiens
  siRNA target sequence for SYAP1 (NM_032796.2,842-860).
ccgttgtaatcaaatctca

SEQ ID NO: 401540 - DNA, 19 bp, Homo sapiens
  siRNA target sequence for SYAP1 (NM_032796.2,930-948).
cttcgatgcctgtaaccta

SEQ ID NO: 401541 - DNA, 19 bp, Homo sapiens
  siRNA target sequence for SYAP1 (NM_032796.2,933-951).
cgatgcctgtaacctaaat

SEQ ID NO: 401542 - DNA, 19 bp, Homo sapiens
  siRNA target sequence for SYAP1 (NM_032796.2,945-963).
cctaaatcaggaagatcta

SEQ ID NO: 401543 - DNA, 19 bp, Homo sapiens
  siRNA target sequence for SYAP1 (NM_032796.2,979-997).
caactagtgcttgacaaaa

SEQ ID NO: 401544 - DNA, 19 bp, Homo sapiens
  siRNA target sequence for FLJ14525 (NM_032800.1,95-113).
gagcgaaagcgcttcactt

SEQ ID NO: 401545 - DNA, 19 bp, Homo sapiens
  siRNA target sequence for FLJ14525 (NM_032800.1,98-116).
cgaaagcgcttcacttact

SEQ ID NO: 401546 - DNA, 19 bp, Homo sapiens
  siRNA target sequence for FLJ14525 (NM_032800.1,343-361).
cggggacgaggatctaact

SEQ ID NO: 401547 - DNA, 19 bp, Homo sapiens
  siRNA target sequence for FLJ14525 (NM_032800.1,344-362).
ggggacgaggatctaactt

SEQ ID NO: 401548 - DNA, 19 bp, Homo sapiens
  siRNA target sequence for FLJ14525 (NM_032800.1,420-438).
gtatctccgccctatccat

SEQ ID NO: 401549 - DNA, 19 bp, Homo sapiens
  siRNA target sequence for FLJ14525 (NM_032800.1,581-599).
gcgtcattctggaagatca

SEQ ID NO: 401550 - DNA, 19 bp, Homo sapiens
  siRNA target sequence for FLJ14525 (NM_032800.1,582-600).
cgtcattctggaagatcaa

SEQ ID NO: 401551 - DNA, 19 bp, Homo sapiens
  siRNA target sequence for FLJ14525 (NM_032800.1,922-940).
gttctcggaacccaagttt

SEQ ID NO: 401552 - DNA, 19 bp, Homo sapiens
  siRNA target sequence for FLJ14525 (NM_032800.1,941-959).
gcacaggtcagctcaagta

SEQ ID NO: 401553 - DNA, 19 bp, Homo sapiens
  siRNA target sequence for FLJ14525 (NM_032800.1,954-972).
caagtaatgtcgtcttgaa

SEQ ID NO: 401554 - DNA, 19 bp, Homo sapiens
  siRNA target sequence for FLJ14525 (NM_032800.1,967-985).
cttgaagacgggatttgat

SEQ ID NO: 401555 - DNA, 19 bp, Homo sapiens
  siRNA target sequence for JAM3 (NM_032801.3,239-257).
gcctgataggggctgtaaa

SEQ ID NO: 401556 - DNA, 19 bp, Homo sapiens
  siRNA target sequence for JAM3 (NM_032801.3,240-258).
cctgataggggctgtaaat

SEQ ID NO: 401557 - DNA, 19 bp, Homo sapiens
  siRNA target sequence for JAM3 (NM_032801.3,247-265).
ggggctgtaaatctcaaat

SEQ ID NO: 401558 - DNA, 19 bp, Homo sapiens
  siRNA target sequence for JAM3 (NM_032801.3,250-268).
gctgtaaatctcaaatcca

SEQ ID NO: 401559 - DNA, 19 bp, Homo sapiens
  siRNA target sequence for JAM3 (NM_032801.3,278-296).
ccccagtggtacaggaatt

SEQ ID NO: 401560 - DNA, 19 bp, Homo sapiens
  siRNA target sequence for JAM3 (NM_032801.3,376-394).
gaacaaaccacatatgtgt

SEQ ID NO: 401561 - DNA, 19 bp, Homo sapiens
  siRNA target sequence for JAM3 (NM_032801.3,423-441).
ggcgggtcgtgcagaaata

SEQ ID NO: 401562 - DNA, 19 bp, Homo sapiens
  siRNA target sequence for JAM3 (NM_032801.3,425-443).
cgggtcgtgcagaaatact

SEQ ID NO: 401563 - DNA, 19 bp, Homo sapiens
  siRNA target sequence for JAM3 (NM_032801.3,480-498).
gagagactcagccctttat

SEQ ID NO: 401564 - DNA, 19 bp, Homo sapiens
  siRNA target sequence for JAM3 (NM_032801.3,517-535).
cgaaatgaccgcaaggaaa

SEQ ID NO: 401565 - DNA, 19 bp, Homo sapiens
  siRNA target sequence for JAM3 (NM_032801.3,518-536).
gaaatgaccgcaaggaaat

SEQ ID NO: 401566 - DNA, 19 bp, Homo sapiens
  siRNA target sequence for JAM3 (NM_032801.3,541-559).
gagattgtgatcgagttaa

SEQ ID NO: 401567 - DNA, 19 bp, Homo sapiens
  siRNA target sequence for JAM3 (NM_032801.3,543-561).
gattgtgatcgagttaact

SEQ ID NO: 401568 - DNA, 19 bp, Homo sapiens
  siRNA target sequence for JAM3 (NM_032801.3,672-690).
cagctggtatcgcaatgat

SEQ ID NO: 401569 - DNA, 19 bp, Homo sapiens
  siRNA target sequence for JAM3 (NM_032801.3,675-693).
ctggtatcgcaatgatgta

SEQ ID NO: 401570 - DNA, 19 bp, Homo sapiens
  siRNA target sequence for JAM3 (NM_032801.3,711-729).
cagagccaatcccagattt

SEQ ID NO: 401571 - DNA, 19 bp, Homo sapiens
  siRNA target sequence for JAM3 (NM_032801.3,877-895).
ctgaacattggcggaatta

SEQ ID NO: 401572 - DNA, 19 bp, Homo sapiens
  siRNA target sequence for JAM3 (NM_032801.3,879-897).
gaacattggcggaattatt

SEQ ID NO: 401573 - DNA, 19 bp, Homo sapiens
  siRNA target sequence for JAM3 (NM_032801.3,962-980).
gacgtggctacttcatcaa

SEQ ID NO: 401574 - DNA, 19 bp, Homo sapiens
  siRNA target sequence for JAM3 (NM_032801.3,964-982).
cgtggctacttcatcaaca

SEQ ID NO: 401575 - DNA, 19 bp, Homo sapiens
  siRNA target sequence for JAM3 (NM_032801.3,1065-1083).
cagacacaagtcatcgttt

SEQ ID NO: 401576 - DNA, 19 bp, Homo sapiens
  siRNA target sequence for JAM3 (NM_032801.3,1069-1087).
cacaagtcatcgtttgtga

SEQ ID NO: 401577 - DNA, 19 bp, Homo sapiens
  siRNA target sequence for FLJ14566 (NM_032806.4,572-590).
cgcatctgccgcttcaagt

SEQ ID NO: 401578 - DNA, 19 bp, Homo sapiens
  siRNA target sequence for FLJ14566 (NM_032806.4,716-734).
cacaacactcagtacttca

SEQ ID NO: 401579 - DNA, 19 bp, Homo sapiens
  siRNA target sequence for FLJ14566 (NM_032806.4,832-850).
cctcatgcacgtctttcat

SEQ ID NO: 401580 - DNA, 19 bp, Homo sapiens
  siRNA target sequence for FLJ14566 (NM_032806.4,945-963).
cacacttcgacctctacaa

SEQ ID NO: 401581 - DNA, 19 bp, Homo sapiens
  siRNA target sequence for FLJ14566 (NM_032806.4,1139-1157).
cagtttgcacggttcatga

SEQ ID NO: 401582 - DNA, 19 bp, Homo sapiens
  siRNA target sequence for FLJ14566 (NM_032806.4,1145-1163).
gcacggttcatgacagaaa

SEQ ID NO: 401583 - DNA, 19 bp, Homo sapiens
  siRNA target sequence for FLJ14566 (NM_032806.4,1146-1164).
cacggttcatgacagaaaa

SEQ ID NO: 401584 - DNA, 19 bp, Homo sapiens
  siRNA target sequence for FLJ14566 (NM_032806.4,1192-1210).
cctaggcgaggagtacatt

SEQ ID NO: 401585 - DNA, 19 bp, Homo sapiens
  siRNA target sequence for FLJ14566 (NM_032806.4,1435-1453).
cttcccatatgctgtcaat

SEQ ID NO: 401586 - DNA, 19 bp, Homo sapiens
  siRNA target sequence for FLJ14566 (NM_032806.4,1460-1478).
cactacactccctataaga

SEQ ID NO: 401587 - DNA, 19 bp, Homo sapiens
  siRNA target sequence for FLJ14566 (NM_032806.4,1498-1516).
catggacctccagtatgta

SEQ ID NO: 401588 - DNA, 19 bp, Homo sapiens
  siRNA target sequence for FLJ14566 (NM_032806.4,1771-1789).
gacagtcggcctatatcca

SEQ ID NO: 401589 - DNA, 19 bp, Homo sapiens
  siRNA target sequence for FLJ14566 (NM_032806.4,1862-1880).
cagatcccatggaacctta

SEQ ID NO: 401590 - DNA, 19 bp, Homo sapiens
  siRNA target sequence for FLJ14566 (NM_032806.4,2024-2042).
cgctgcatcttcaacaaga

SEQ ID NO: 401591 - DNA, 19 bp, Homo sapiens
  siRNA target sequence for FLJ14594 (NM_032808.2,718-736).
ccggcacctcaacatcaat

SEQ ID NO: 401592 - DNA, 19 bp, Homo sapiens
  siRNA target sequence for FLJ14594 (NM_032808.2,743-761).
cgggactactccttcaaga

SEQ ID NO: 401593 - DNA, 19 bp, Homo sapiens
  siRNA target sequence for FLJ14594 (NM_032808.2,897-915).
ccgtccgccacctagtcta

SEQ ID NO: 401594 - DNA, 19 bp, Homo sapiens
  siRNA target sequence for FLJ14594 (NM_032808.2,1203-1221).
gctggcggctcaacttcaa

SEQ ID NO: 401595 - DNA, 19 bp, Homo sapiens
  siRNA target sequence for FLJ14594 (NM_032808.2,1239-1257).
gcgccacgcccgagtttgt

SEQ ID NO: 401596 - DNA, 19 bp, Homo sapiens
  siRNA target sequence for FLJ14594 (NM_032808.2,1292-1310).
ctactgcccaactacttca

SEQ ID NO: 401597 - DNA, 19 bp, Homo sapiens
  siRNA target sequence for FLJ14594 (NM_032808.2,1368-1386).
gccacacggtgcagtttgt

SEQ ID NO: 401598 - DNA, 19 bp, Homo sapiens
  siRNA target sequence for C9orf54 (NM_032809.2,546-564).
gagtggcatctcttccatt

SEQ ID NO: 401599 - DNA, 19 bp, Homo sapiens
  siRNA target sequence for C9orf54 (NM_032809.2,1070-1088).
ccgccaccgagctctttga

SEQ ID NO: 401600 - DNA, 19 bp, Homo sapiens
  siRNA target sequence for C9orf54 (NM_032809.2,1091-1109).
ccctgcagactggagatta

SEQ ID NO: 401601 - DNA, 19 bp, Homo sapiens
  siRNA target sequence for C9orf54 (NM_032809.2,1645-1663).
gtgcctgatggcttcatct

SEQ ID NO: 401602 - DNA, 19 bp, Homo sapiens
  siRNA target sequence for FLJ14624 (NM_032813.1,273-291).
ctggtgagggccgtaaact

SEQ ID NO: 401603 - DNA, 19 bp, Homo sapiens
  siRNA target sequence for FLJ14624 (NM_032813.1,276-294).
gtgagggccgtaaactaca

SEQ ID NO: 401604 - DNA, 19 bp, Homo sapiens
  siRNA target sequence for FLJ14624 (NM_032813.1,278-296).
gagggccgtaaactacaat

SEQ ID NO: 401605 - DNA, 19 bp, Homo sapiens
  siRNA target sequence for FLJ14624 (NM_032813.1,280-298).
gggccgtaaactacaatta

SEQ ID NO: 401606 - DNA, 19 bp, Homo sapiens
  siRNA target sequence for FLJ14624 (NM_032813.1,290-308).
ctacaattactactattca

SEQ ID NO: 401607 - DNA, 19 bp, Homo sapiens
  siRNA target sequence for FLJ14624 (NM_032813.1,389-407).
cagcgactggagggtaatt

SEQ ID NO: 401608 - DNA, 19 bp, Homo sapiens
  siRNA target sequence for FLJ14624 (NM_032813.1,392-410).
cgactggagggtaattgca

SEQ ID NO: 401609 - DNA, 19 bp, Homo sapiens
  siRNA target sequence for FLJ14624 (NM_032813.1,465-483).
gaagacggccacaagagaa

SEQ ID NO: 401610 - DNA, 19 bp, Homo sapiens
  siRNA target sequence for FLJ14624 (NM_032813.1,606-624).
gtgctgctgacttttggat

SEQ ID NO: 401611 - DNA, 19 bp, Homo sapiens
  siRNA target sequence for FLJ14624 (NM_032813.1,626-644).
cggagccctgagcaaacat

SEQ ID NO: 401612 - DNA, 19 bp, Homo sapiens
  siRNA target sequence for FLJ14624 (NM_032813.1,627-645).
ggagccctgagcaaacata

SEQ ID NO: 401613 - DNA, 19 bp, Homo sapiens
  siRNA target sequence for FLJ14624 (NM_032813.1,675-693).
gtgctgggaatcttattca

SEQ ID NO: 401614 - DNA, 19 bp, Homo sapiens
  siRNA target sequence for FLJ14624 (NM_032813.1,678-696).
ctgggaatcttattcatca

SEQ ID NO: 401615 - DNA, 19 bp, Homo sapiens
  siRNA target sequence for FLJ14624 (NM_032813.1,681-699).
ggaatcttattcatcaaca

SEQ ID NO: 401616 - DNA, 19 bp, Homo sapiens
  siRNA target sequence for FLJ14624 (NM_032813.1,768-786).
gtgtgtcccctcaatgcta

SEQ ID NO: 401617 - DNA, 19 bp, Homo sapiens
  siRNA target sequence for FLJ14624 (NM_032813.1,784-802).
ctaaggttcactacaacat

SEQ ID NO: 401618 - DNA, 19 bp, Homo sapiens
  siRNA target sequence for FLJ14624 (NM_032813.1,805-823).
gcaaaaacctggctgataa

SEQ ID NO: 401619 - DNA, 19 bp, Homo sapiens
  siRNA target sequence for FLJ14624 (NM_032813.1,851-869).
ctaccgggaagctgtaaga

SEQ ID NO: 401620 - DNA, 19 bp, Homo sapiens
  siRNA target sequence for FLJ14624 (NM_032813.1,854-872).
ccgggaagctgtaagatta

SEQ ID NO: 401621 - DNA, 19 bp, Homo sapiens
  siRNA target sequence for FLJ14624 (NM_032813.1,988-1006).
ccgctgcgtggatgaatct

SEQ ID NO: 401622 - DNA, 19 bp, Homo sapiens
  siRNA target sequence for FLJ14624 (NM_032813.1,989-1007).
cgctgcgtggatgaatcta

SEQ ID NO: 401623 - DNA, 19 bp, Homo sapiens
  siRNA target sequence for FLJ14624 (NM_032813.1,1005-1023).
ctaggcatagtgcagaata

SEQ ID NO: 401624 - DNA, 19 bp, Homo sapiens
  siRNA target sequence for FLJ14624 (NM_032813.1,1054-1072).
gttaccggacagcaattaa

SEQ ID NO: 401625 - DNA, 19 bp, Homo sapiens
  siRNA target sequence for FLJ14624 (NM_032813.1,1081-1099).
ggaaatacccagactgtta

SEQ ID NO: 401626 - DNA, 19 bp, Homo sapiens
  siRNA target sequence for FLJ14624 (NM_032813.1,1114-1132).
gtctgtatgcagatctcaa

SEQ ID NO: 401627 - DNA, 19 bp, Homo sapiens
  siRNA target sequence for FLJ14624 (NM_032813.1,1136-1154).
ccacgtggatgccttgaat

SEQ ID NO: 401628 - DNA, 19 bp, Homo sapiens
  siRNA target sequence for FLJ14624 (NM_032813.1,1196-1214).
ggcctggaacaacatgatt

SEQ ID NO: 401629 - DNA, 19 bp, Homo sapiens
  siRNA target sequence for FLJ14624 (NM_032813.1,1198-1216).
cctggaacaacatgattat

SEQ ID NO: 401630 - DNA, 19 bp, Homo sapiens
  siRNA target sequence for FLJ14624 (NM_032813.1,1201-1219).
ggaacaacatgattatact

SEQ ID NO: 401631 - DNA, 19 bp, Homo sapiens
  siRNA target sequence for FLJ14624 (NM_032813.1,1220-1238).
cctcgacaatacaggtaat

SEQ ID NO: 401632 - DNA, 19 bp, Homo sapiens
  siRNA target sequence for FLJ14624 (NM_032813.1,1221-1239).
ctcgacaatacaggtaatt

SEQ ID NO: 401633 - DNA, 19 bp, Homo sapiens
  siRNA target sequence for FLJ14624 (NM_032813.1,1223-1241).
cgacaatacaggtaattta

SEQ ID NO: 401634 - DNA, 19 bp, Homo sapiens
  siRNA target sequence for FLJ14624 (NM_032813.1,1264-1282).
gagaggcactggaattaat

SEQ ID NO: 401635 - DNA, 19 bp, Homo sapiens
  siRNA target sequence for FLJ14624 (NM_032813.1,1269-1287).
gcactggaattaataccta

SEQ ID NO: 401636 - DNA, 19 bp, Homo sapiens
  siRNA target sequence for FLJ14624 (NM_032813.1,1270-1288).
cactggaattaatacctaa

SEQ ID NO: 401637 - DNA, 19 bp, Homo sapiens
  siRNA target sequence for FLJ14624 (NM_032813.1,1370-1388).
ggcaattaaagcaaatcca

SEQ ID NO: 401638 - DNA, 19 bp, Homo sapiens
  siRNA target sequence for FLJ14624 (NM_032813.1,1393-1411).
ctgcaagttaccatggtaa

SEQ ID NO: 401639 - DNA, 19 bp, Homo sapiens
  siRNA target sequence for FLJ14624 (NM_032813.1,1395-1413).
gcaagttaccatggtaatt

SEQ ID NO: 401640 - DNA, 19 bp, Homo sapiens
  siRNA target sequence for FLJ14624 (NM_032813.1,1432-1450).
gttggggacatctagactt

SEQ ID NO: 401641 - DNA, 19 bp, Homo sapiens
  siRNA target sequence for FLJ14624 (NM_032813.1,1448-1466).
cttggccaagaaacactat

SEQ ID NO: 401642 - DNA, 19 bp, Homo sapiens
  siRNA target sequence for FLJ14624 (NM_032813.1,1526-1544).
gagaagaaagctagaacta

SEQ ID NO: 401643 - DNA, 19 bp, Homo sapiens
  siRNA target sequence for FLJ14624 (NM_032813.1,1531-1549).
gaaagctagaactaatgca

SEQ ID NO: 401644 - DNA, 19 bp, Homo sapiens
  siRNA target sequence for FLJ14639 (NM_032815.2,269-287).
gtcgcgtcccgggataaca

SEQ ID NO: 401645 - DNA, 19 bp, Homo sapiens
  siRNA target sequence for FLJ14639 (NM_032815.2,398-416).
gtgtactcggggaaggtta

SEQ ID NO: 401646 - DNA, 19 bp, Homo sapiens
  siRNA target sequence for FLJ14639 (NM_032815.2,400-418).
gtactcggggaaggttaaa

SEQ ID NO: 401647 - DNA, 19 bp, Homo sapiens
  siRNA target sequence for FLJ14639 (NM_032815.2,429-447).
gccttatcccagatgatct

SEQ ID NO: 401648 - DNA, 19 bp, Homo sapiens
  siRNA target sequence for FLJ14639 (NM_032815.2,430-448).
ccttatcccagatgatcta

SEQ ID NO: 401649 - DNA, 19 bp, Homo sapiens
  siRNA target sequence for FLJ14639 (NM_032815.2,446-464).
ctatccctcctgaaactct

SEQ ID NO: 401650 - DNA, 19 bp, Homo sapiens
  siRNA target sequence for FLJ14639 (NM_032815.2,539-557).
ggctctccctggaagacaa

SEQ ID NO: 401651 - DNA, 19 bp, Homo sapiens
  siRNA target sequence for FLJ14639 (NM_032815.2,924-942).
ccccaagcaggatcctttt

SEQ ID NO: 401652 - DNA, 19 bp, Homo sapiens
  siRNA target sequence for FLJ14639 (NM_032815.2,997-1015).
cggagtggctgacatcatt

SEQ ID NO: 401653 - DNA, 19 bp, Homo sapiens
  siRNA target sequence for FLJ14639 (NM_032815.2,1122-1140).
ctcgagattcccctctaaa

SEQ ID NO: 401654 - DNA, 19 bp, Homo sapiens
  siRNA target sequence for FLJ14639 (NM_032815.2,1124-1142).
cgagattcccctctaaaga

SEQ ID NO: 401655 - DNA, 19 bp, Homo sapiens
  siRNA target sequence for FLJ14640 (NM_032816.2,111-129).
ggccgcaggagtcatttca

SEQ ID NO: 401656 - DNA, 19 bp, Homo sapiens
  siRNA target sequence for FLJ14640 (NM_032816.2,113-131).
ccgcaggagtcatttcaaa

SEQ ID NO: 401657 - DNA, 19 bp, Homo sapiens
  siRNA target sequence for FLJ14640 (NM_032816.2,252-270).
gccattctggcgacaacat

SEQ ID NO: 401658 - DNA, 19 bp, Homo sapiens
  siRNA target sequence for FLJ14640 (NM_032816.2,274-292).
ctgggcggacggttgctat

SEQ ID NO: 401659 - DNA, 19 bp, Homo sapiens
  siRNA target sequence for FLJ14640 (NM_032816.2,278-296).
gcggacggttgctattcct

SEQ ID NO: 401660 - DNA, 19 bp, Homo sapiens
  siRNA target sequence for FLJ14640 (NM_032816.2,460-478).
gggacgaagaggacattga

SEQ ID NO: 401661 - DNA, 19 bp, Homo sapiens
  siRNA target sequence for FLJ14640 (NM_032816.2,560-578).
cgctgtgccacacagaaat

SEQ ID NO: 401662 - DNA, 19 bp, Homo sapiens
  siRNA target sequence for FLJ14640 (NM_032816.2,574-592).
gaaatcaggtgccattgtt

SEQ ID NO: 401663 - DNA, 19 bp, Homo sapiens
  siRNA target sequence for FLJ14640 (NM_032816.2,693-711).
caccctgttctgaatttaa

SEQ ID NO: 401664 - DNA, 19 bp, Homo sapiens
  siRNA target sequence for FLJ14640 (NM_032816.2,774-792).
cgtcaaagatatacagaaa

SEQ ID NO: 401665 - DNA, 19 bp, Homo sapiens
  siRNA target sequence for FLJ14640 (NM_032816.2,836-854).
cctaaacaatatgaatcaa

SEQ ID NO: 401666 - DNA, 19 bp, Homo sapiens
  siRNA target sequence for FLJ14640 (NM_032816.2,856-874).
gccttacccttgaactaaa

SEQ ID NO: 401667 - DNA, 19 bp, Homo sapiens
  siRNA target sequence for FLJ14640 (NM_032816.2,858-876).
cttacccttgaactaaaca

SEQ ID NO: 401668 - DNA, 19 bp, Homo sapiens
  siRNA target sequence for FLJ14640 (NM_032816.2,862-880).
cccttgaactaaacacaat

SEQ ID NO: 401669 - DNA, 19 bp, Homo sapiens
  siRNA target sequence for FLJ14640 (NM_032816.2,978-996).
gctgcacctgaattacttt

SEQ ID NO: 401670 - DNA, 19 bp, Homo sapiens
  siRNA target sequence for FLJ14640 (NM_032816.2,1049-1067).
gactgtccatcgtttgaat

SEQ ID NO: 401671 - DNA, 19 bp, Homo sapiens
  siRNA target sequence for FLJ14640 (NM_032816.2,1051-1069).
ctgtccatcgtttgaatgt

SEQ ID NO: 401672 - DNA, 19 bp, Homo sapiens
  siRNA target sequence for FLJ14640 (NM_032816.2,1071-1089).
gaactcagtcgatatcaga

SEQ ID NO: 401673 - DNA, 19 bp, Homo sapiens
  siRNA target sequence for FLJ14640 (NM_032816.2,1076-1094).
cagtcgatatcagacaaaa

SEQ ID NO: 401674 - DNA, 19 bp, Homo sapiens
  siRNA target sequence for FLJ14640 (NM_032816.2,1078-1096).
gtcgatatcagacaaaatt

SEQ ID NO: 401675 - DNA, 19 bp, Homo sapiens
  siRNA target sequence for FLJ14640 (NM_032816.2,1119-1137).
gtaacgtttccgattgtga

SEQ ID NO: 401676 - DNA, 19 bp, Homo sapiens
  siRNA target sequence for FLJ14640 (NM_032816.2,1123-1141).
cgtttccgattgtgaaaat

SEQ ID NO: 401677 - DNA, 19 bp, Homo sapiens
  siRNA target sequence for FLJ14641 (NM_032817.1,765-783).
cctgtctgctgtgctattt

SEQ ID NO: 401678 - DNA, 19 bp, Homo sapiens
  siRNA target sequence for FLJ14641 (NM_032817.1,768-786).
gtctgctgtgctatttatt

SEQ ID NO: 401679 - DNA, 19 bp, Homo sapiens
  siRNA target sequence for FLJ14641 (NM_032817.1,940-958).
gccttcctattatgtaaat

SEQ ID NO: 401680 - DNA, 19 bp, Homo sapiens
  siRNA target sequence for FLJ14642 (NM_032818.1,150-168).
ctggtggccacgtactttt

SEQ ID NO: 401681 - DNA, 19 bp, Homo sapiens
  siRNA target sequence for FLJ14642 (NM_032818.1,326-344).
gctctataaccaatttgct

SEQ ID NO: 401682 - DNA, 19 bp, Homo sapiens
  siRNA target sequence for FLJ14668 (NM_032822.1,322-340).
caaagccaaagattcaata

SEQ ID NO: 401683 - DNA, 19 bp, Homo sapiens
  siRNA target sequence for FLJ14668 (NM_032822.1,445-463).
gaaggaggctctcttatca

SEQ ID NO: 401684 - DNA, 19 bp, Homo sapiens
  siRNA target sequence for FLJ14668 (NM_032822.1,448-466).
ggaggctctcttatcaatt

SEQ ID NO: 401685 - DNA, 19 bp, Homo sapiens
  siRNA target sequence for FLJ14668 (NM_032822.1,452-470).
gctctcttatcaattggaa

SEQ ID NO: 401686 - DNA, 19 bp, Homo sapiens
  siRNA target sequence for FLJ14668 (NM_032822.1,453-471).
ctctcttatcaattggaaa

SEQ ID NO: 401687 - DNA, 19 bp, Homo sapiens
  siRNA target sequence for FLJ14681 (NM_032824.1,558-576).
ctctacagatatcaagtta

SEQ ID NO: 401688 - DNA, 19 bp, Homo sapiens
  siRNA target sequence for FLJ14681 (NM_032824.1,570-588).
caagttatctgttaagtca

SEQ ID NO: 401689 - DNA, 19 bp, Homo sapiens
  siRNA target sequence for FLJ14681 (NM_032824.1,647-665).
gtcacaatgagcattctaa

SEQ ID NO: 401690 - DNA, 19 bp, Homo sapiens
  siRNA target sequence for FLJ14681 (NM_032824.1,675-693).
gctgttccaaaaacataaa

SEQ ID NO: 401691 - DNA, 19 bp, Homo sapiens
  siRNA target sequence for FLJ14681 (NM_032824.1,733-751).
gacaactgttggacaacaa

SEQ ID NO: 401692 - DNA, 19 bp, Homo sapiens
  siRNA target sequence for FLJ14681 (NM_032824.1,787-805).
gtgtttccctctttgaata

SEQ ID NO: 401693 - DNA, 19 bp, Homo sapiens
  siRNA target sequence for FLJ14681 (NM_032824.1,811-829).
gaactaataaatatcagaa

SEQ ID NO: 401694 - DNA, 19 bp, Homo sapiens
  siRNA target sequence for FLJ14681 (NM_032824.1,836-854).
caaaccaggaaagatcaat

SEQ ID NO: 401695 - DNA, 19 bp, Homo sapiens
  siRNA target sequence for FLJ14681 (NM_032824.1,840-858).
ccaggaaagatcaatggat

SEQ ID NO: 401696 - DNA, 19 bp, Homo sapiens
  siRNA target sequence for FLJ14681 (NM_032824.1,964-982).
gggcctcatggatatatct

SEQ ID NO: 401697 - DNA, 19 bp, Homo sapiens
  siRNA target sequence for FLJ14681 (NM_032824.1,966-984).
gcctcatggatatatctct

SEQ ID NO: 401698 - DNA, 19 bp, Homo sapiens
  siRNA target sequence for FLJ14681 (NM_032824.1,989-1007).
cagattggcccctaatgat

SEQ ID NO: 401699 - DNA, 19 bp, Homo sapiens
  siRNA target sequence for FLJ14681 (NM_032824.1,998-1016).
ccctaatgattttttacat

SEQ ID NO: 401700 - DNA, 19 bp, Homo sapiens
  siRNA target sequence for FLJ14681 (NM_032824.1,1059-1077).
gacgtggtctgcctgttat

SEQ ID NO: 401701 - DNA, 19 bp, Homo sapiens
  siRNA target sequence for FLJ14681 (NM_032824.1,1064-1082).
ggtctgcctgttattggaa

SEQ ID NO: 401702 - DNA, 19 bp, Homo sapiens
  siRNA target sequence for FLJ14681 (NM_032824.1,1065-1083).
gtctgcctgttattggaaa

SEQ ID NO: 401703 - DNA, 19 bp, Homo sapiens
  siRNA target sequence for FLJ14681 (NM_032824.1,1071-1089).
ctgttattggaaagatata

SEQ ID NO: 401704 - DNA, 19 bp, Homo sapiens
  siRNA target sequence for FLJ14681 (NM_032824.1,1104-1122).
ctggattgcagctgttatt

SEQ ID NO: 401705 - DNA, 19 bp, Homo sapiens
  siRNA target sequence for FLJ14681 (NM_032824.1,1144-1162).
gcagttttttatagtgaat

SEQ ID NO: 401706 - DNA, 19 bp, Homo sapiens
  siRNA target sequence for FLJ14681 (NM_032824.1,1190-1208).
caacccaaggcttattgat

SEQ ID NO: 401707 - DNA, 19 bp, Homo sapiens
  siRNA target sequence for FLJ14681 (NM_032824.1,1206-1224).
gatatttgcggagttgatt

SEQ ID NO: 401708 - DNA, 19 bp, Homo sapiens
  siRNA target sequence for FLJ14681 (NM_032824.1,1250-1268).
gccttctcgtgatcattgt

SEQ ID NO: 401709 - DNA, 19 bp, Homo sapiens
  siRNA target sequence for FLJ14681 (NM_032824.1,1252-1270).
cttctcgtgatcattgtga

SEQ ID NO: 401710 - DNA, 19 bp, Homo sapiens
  siRNA target sequence for FLJ14681 (NM_032824.1,1284-1302).
cattgtgaagcctcgttta

SEQ ID NO: 401711 - DNA, 19 bp, Homo sapiens
  siRNA target sequence for FLJ14681 (NM_032824.1,1288-1306).
gtgaagcctcgtttaggaa

SEQ ID NO: 401712 - DNA, 19 bp, Homo sapiens
  siRNA target sequence for FLJ14681 (NM_032824.1,1335-1353).
gcttctatacttaatcttt

SEQ ID NO: 401713 - DNA, 19 bp, Homo sapiens
  siRNA target sequence for FLJ14681 (NM_032824.1,1376-1394).
gagtcattgggggttctaa

SEQ ID NO: 401714 - DNA, 19 bp, Homo sapiens
  siRNA target sequence for FLJ14681 (NM_032824.1,1386-1404).
gggttctaaccatttagct

SEQ ID NO: 401715 - DNA, 19 bp, Homo sapiens
  siRNA target sequence for FLJ14681 (NM_032824.1,1469-1487).
gtttggcacaaactatgaa

SEQ ID NO: 401716 - DNA, 19 bp, Homo sapiens
  siRNA target sequence for FLJ14681 (NM_032824.1,1587-1605).
gtggacaactaagacattt

SEQ ID NO: 401717 - DNA, 19 bp, Homo sapiens
  siRNA target sequence for FLJ14681 (NM_032824.1,1590-1608).
gacaactaagacatttaga

SEQ ID NO: 401718 - DNA, 19 bp, Homo sapiens
  siRNA target sequence for FLJ14681 (NM_032824.1,1592-1610).
caactaagacatttagaat

SEQ ID NO: 401719 - DNA, 19 bp, Homo sapiens
  siRNA target sequence for FLJ14681 (NM_032824.1,1640-1658).
gctgggttgacgatgcatt

SEQ ID NO: 401720 - DNA, 19 bp, Homo sapiens
  siRNA target sequence for FLJ14681 (NM_032824.1,1641-1659).
ctgggttgacgatgcattt

SEQ ID NO: 401721 - DNA, 19 bp, Homo sapiens
  siRNA target sequence for FLJ14681 (NM_032824.1,1645-1663).
gttgacgatgcattttgga

SEQ ID NO: 401722 - DNA, 19 bp, Homo sapiens
  siRNA target sequence for FLJ14681 (NM_032824.1,1655-1673).
cattttggagcttcctttt

SEQ ID NO: 401723 - DNA, 19 bp, Homo sapiens
  siRNA target sequence for FLJ14681 (NM_032824.1,1668-1686).
ccttttttcgcttatcctt

SEQ ID NO: 401724 - DNA, 19 bp, Homo sapiens
  siRNA target sequence for FLJ14681 (NM_032824.1,1740-1758).
catgcccttaatagatgat

SEQ ID NO: 401725 - DNA, 19 bp, Homo sapiens
  siRNA target sequence for FLJ14681 (NM_032824.1,1743-1761).
gcccttaatagatgattct

SEQ ID NO: 401726 - DNA, 19 bp, Homo sapiens
  siRNA target sequence for FLJ14681 (NM_032824.1,1745-1763).
ccttaatagatgattctga

SEQ ID NO: 401727 - DNA, 19 bp, Homo sapiens
  siRNA target sequence for FLJ14681 (NM_032824.1,1981-1999).
gaaatggctgaaaaaatgt

SEQ ID NO: 401728 - DNA, 19 bp, Homo sapiens
  siRNA target sequence for HATH6 (NM_032827.3,403-421).
cgcgaacggctataaaact

SEQ ID NO: 401729 - DNA, 19 bp, Homo sapiens
  siRNA target sequence for HATH6 (NM_032827.3,404-422).
gcgaacggctataaaactt

SEQ ID NO: 401730 - DNA, 19 bp, Homo sapiens
  siRNA target sequence for HATH6 (NM_032827.3,405-423).
cgaacggctataaaacttt

SEQ ID NO: 401731 - DNA, 19 bp, Homo sapiens
  siRNA target sequence for HATH6 (NM_032827.3,867-885).
cctactcgtcaatttcaca

SEQ ID NO: 401732 - DNA, 19 bp, Homo sapiens
  siRNA target sequence for HATH6 (NM_032827.3,873-891).
cgtcaatttcacacgtaat

SEQ ID NO: 401733 - DNA, 19 bp, Homo sapiens
  siRNA target sequence for HATH6 (NM_032827.3,874-892).
gtcaatttcacacgtaatt

SEQ ID NO: 401734 - DNA, 19 bp, Homo sapiens
  siRNA target sequence for HATH6 (NM_032827.3,876-894).
caatttcacacgtaattta

SEQ ID NO: 401735 - DNA, 19 bp, Homo sapiens
  siRNA target sequence for HATH6 (NM_032827.3,882-900).
cacacgtaatttacaataa

SEQ ID NO: 401736 - DNA, 19 bp, Homo sapiens
  siRNA target sequence for HATH6 (NM_032827.3,913-931).
ctccgcgtcgcctaggaaa

SEQ ID NO: 401737 - DNA, 19 bp, Homo sapiens
  siRNA target sequence for HATH6 (NM_032827.3,1061-1079).
caggtgccgtgctactcat

SEQ ID NO: 401738 - DNA, 19 bp, Homo sapiens
  siRNA target sequence for HATH6 (NM_032827.3,1063-1081).
ggtgccgtgctactcatat

SEQ ID NO: 401739 - DNA, 19 bp, Homo sapiens
  siRNA target sequence for HATH6 (NM_032827.3,1109-1127).
ctgaggatcgcctgtaact

SEQ ID NO: 401740 - DNA, 19 bp, Homo sapiens
  siRNA target sequence for HATH6 (NM_032827.3,1113-1131).
ggatcgcctgtaactacat

SEQ ID NO: 401741 - DNA, 19 bp, Homo sapiens
  siRNA target sequence for FLJ14721 (NM_032829.1,257-275).
gtggccagcgccatgcatt

SEQ ID NO: 401742 - DNA, 19 bp, Homo sapiens
  siRNA target sequence for FLJ14721 (NM_032829.1,335-353).
ccgctgtccatcaagatct

SEQ ID NO: 401743 - DNA, 19 bp, Homo sapiens
  siRNA target sequence for FLJ14721 (NM_032829.1,336-354).
cgctgtccatcaagatctt

SEQ ID NO: 401744 - DNA, 19 bp, Homo sapiens
  siRNA target sequence for FLJ14721 (NM_032829.1,1183-1201).
caccgtaggccagtacttt

SEQ ID NO: 401745 - DNA, 19 bp, Homo sapiens
  siRNA target sequence for FLJ14721 (NM_032829.1,1385-1403).
cagtcactggagtatctca

SEQ ID NO: 401746 - DNA, 19 bp, Homo sapiens
  siRNA target sequence for FLJ14721 (NM_032829.1,1442-1460).
ctgggcaagggctatgaga

SEQ ID NO: 401747 - DNA, 19 bp, Homo sapiens
  siRNA target sequence for FLJ14721 (NM_032829.1,1505-1523).
cgcctacccgtctacagat

SEQ ID NO: 401748 - DNA, 19 bp, Homo sapiens
  siRNA target sequence for CIRH1A (NM_032830.1,67-85).
catcgagtacgtttcttta

SEQ ID NO: 401749 - DNA, 19 bp, Homo sapiens
  siRNA target sequence for CIRH1A (NM_032830.1,71-89).
gagtacgtttctttaatta

SEQ ID NO: 401750 - DNA, 19 bp, Homo sapiens
  siRNA target sequence for CIRH1A (NM_032830.1,106-124).
cgctgtgtggcttacaata

SEQ ID NO: 401751 - DNA, 19 bp, Homo sapiens
  siRNA target sequence for CIRH1A (NM_032830.1,120-138).
caataaccagtcaaacaga

SEQ ID NO: 401752 - DNA, 19 bp, Homo sapiens
  siRNA target sequence for CIRH1A (NM_032830.1,157-175).
gatggcactgtggaaattt

SEQ ID NO: 401753 - DNA, 19 bp, Homo sapiens
  siRNA target sequence for CIRH1A (NM_032830.1,192-210).
ctactttcaggagaaattt

SEQ ID NO: 401754 - DNA, 19 bp, Homo sapiens
  siRNA target sequence for CIRH1A (NM_032830.1,227-245).
ctcgggctacagaagcttt

SEQ ID NO: 401755 - DNA, 19 bp, Homo sapiens
  siRNA target sequence for CIRH1A (NM_032830.1,256-274).
gaaggacagcgactcttta

SEQ ID NO: 401756 - DNA, 19 bp, Homo sapiens
  siRNA target sequence for CIRH1A (NM_032830.1,280-298).
gggctcaatggcgagatta

SEQ ID NO: 401757 - DNA, 19 bp, Homo sapiens
  siRNA target sequence for CIRH1A (NM_032830.1,281-299).
ggctcaatggcgagattat

SEQ ID NO: 401758 - DNA, 19 bp, Homo sapiens
  siRNA target sequence for CIRH1A (NM_032830.1,290-308).
gcgagattatggagtatga

SEQ ID NO: 401759 - DNA, 19 bp, Homo sapiens
  siRNA target sequence for CIRH1A (NM_032830.1,291-309).
cgagattatggagtatgat

SEQ ID NO: 401760 - DNA, 19 bp, Homo sapiens
  siRNA target sequence for CIRH1A (NM_032830.1,307-325).
gatttacaggcgttaaaca

SEQ ID NO: 401761 - DNA, 19 bp, Homo sapiens
  siRNA target sequence for CIRH1A (NM_032830.1,324-342).
catcaagtatgctatggat

SEQ ID NO: 401762 - DNA, 19 bp, Homo sapiens
  siRNA target sequence for CIRH1A (NM_032830.1,529-547).
gcagctggttccatagact

SEQ ID NO: 401763 - DNA, 19 bp, Homo sapiens
  siRNA target sequence for CIRH1A (NM_032830.1,530-548).
cagctggttccatagacta

SEQ ID NO: 401764 - DNA, 19 bp, Homo sapiens
  siRNA target sequence for CIRH1A (NM_032830.1,533-551).
ctggttccatagactacat

SEQ ID NO: 401765 - DNA, 19 bp, Homo sapiens
  siRNA target sequence for CIRH1A (NM_032830.1,535-553).
ggttccatagactacatta

SEQ ID NO: 401766 - DNA, 19 bp, Homo sapiens
  siRNA target sequence for CIRH1A (NM_032830.1,539-557).
ccatagactacattagtgt

SEQ ID NO: 401767 - DNA, 19 bp, Homo sapiens
  siRNA target sequence for CIRH1A (NM_032830.1,572-590).
caggcagcgctgttcataa

SEQ ID NO: 401768 - DNA, 19 bp, Homo sapiens
  siRNA target sequence for CIRH1A (NM_032830.1,574-592).
ggcagcgctgttcataaga

SEQ ID NO: 401769 - DNA, 19 bp, Homo sapiens
  siRNA target sequence for CIRH1A (NM_032830.1,575-593).
gcagcgctgttcataagat

SEQ ID NO: 401770 - DNA, 19 bp, Homo sapiens
  siRNA target sequence for CIRH1A (NM_032830.1,579-597).
cgctgttcataagatgatt

SEQ ID NO: 401771 - DNA, 19 bp, Homo sapiens
  siRNA target sequence for CIRH1A (NM_032830.1,660-678).
gtccgatggcactatcata

SEQ ID NO: 401772 - DNA, 19 bp, Homo sapiens
  siRNA target sequence for CIRH1A (NM_032830.1,663-681).
cgatggcactatcataagt

SEQ ID NO: 401773 - DNA, 19 bp, Homo sapiens
  siRNA target sequence for CIRH1A (NM_032830.1,741-759).
ccatctcatcgctaatgct

SEQ ID NO: 401774 - DNA, 19 bp, Homo sapiens
  siRNA target sequence for CIRH1A (NM_032830.1,936-954).
cccaacagcgctgatatct

SEQ ID NO: 401775 - DNA, 19 bp, Homo sapiens
  siRNA target sequence for CIRH1A (NM_032830.1,962-980).
ctgacacccacttagtctt

SEQ ID NO: 401776 - DNA, 19 bp, Homo sapiens
  siRNA target sequence for CIRH1A (NM_032830.1,1018-1036).
gatgccgctctccgaaaaa

SEQ ID NO: 401777 - DNA, 19 bp, Homo sapiens
  siRNA target sequence for CIRH1A (NM_032830.1,1021-1039).
gccgctctccgaaaaatca

SEQ ID NO: 401778 - DNA, 19 bp, Homo sapiens
  siRNA target sequence for CIRH1A (NM_032830.1,1095-1113).
ccagtttgctcatcactta

SEQ ID NO: 401779 - DNA, 19 bp, Homo sapiens
  siRNA target sequence for CIRH1A (NM_032830.1,1189-1207).
catttactgcacctaaaga

SEQ ID NO: 401780 - DNA, 19 bp, Homo sapiens
  siRNA target sequence for CIRH1A (NM_032830.1,1216-1234).
cctgagaacattatctgta

SEQ ID NO: 401781 - DNA, 19 bp, Homo sapiens
  siRNA target sequence for CIRH1A (NM_032830.1,1245-1263).
cccatgtggaagttggata

SEQ ID NO: 401782 - DNA, 19 bp, Homo sapiens
  siRNA target sequence for CIRH1A (NM_032830.1,1260-1278).
gatagcctattctacagtt

SEQ ID NO: 401783 - DNA, 19 bp, Homo sapiens
  siRNA target sequence for CIRH1A (NM_032830.1,1293-1311).
ctatcggctgaattatgaa

SEQ ID NO: 401784 - DNA, 19 bp, Homo sapiens
  siRNA target sequence for CIRH1A (NM_032830.1,1315-1333).
gacaacataagcctcaaaa

SEQ ID NO: 401785 - DNA, 19 bp, Homo sapiens
  siRNA target sequence for CIRH1A (NM_032830.1,1325-1343).
gcctcaaaagggtttccaa

SEQ ID NO: 401786 - DNA, 19 bp, Homo sapiens
  siRNA target sequence for CIRH1A (NM_032830.1,1401-1419).
gctctttgtagcatcaaat

SEQ ID NO: 401787 - DNA, 19 bp, Homo sapiens
  siRNA target sequence for CIRH1A (NM_032830.1,1424-1442).
gagctctgcatattgttca

SEQ ID NO: 401788 - DNA, 19 bp, Homo sapiens
  siRNA target sequence for CIRH1A (NM_032830.1,1498-1516).
gtggaggccatgtgtcttt

SEQ ID NO: 401789 - DNA, 19 bp, Homo sapiens
  siRNA target sequence for CIRH1A (NM_032830.1,1570-1588).
gtccatgtctacaacgtaa

SEQ ID NO: 401790 - DNA, 19 bp, Homo sapiens
  siRNA target sequence for CIRH1A (NM_032830.1,1584-1602).
cgtaaaacagctaaagctt

SEQ ID NO: 401791 - DNA, 19 bp, Homo sapiens
  siRNA target sequence for CIRH1A (NM_032830.1,1607-1625).
gcacggtgcctgcttacaa

SEQ ID NO: 401792 - DNA, 19 bp, Homo sapiens
  siRNA target sequence for CIRH1A (NM_032830.1,1608-1626).
cacggtgcctgcttacaat

SEQ ID NO: 401793 - DNA, 19 bp, Homo sapiens
  siRNA target sequence for CIRH1A (NM_032830.1,1610-1628).
cggtgcctgcttacaattt

SEQ ID NO: 401794 - DNA, 19 bp, Homo sapiens
  siRNA target sequence for CIRH1A (NM_032830.1,1645-1663).
gctattgcccccaatacca

SEQ ID NO: 401795 - DNA, 19 bp, Homo sapiens
  siRNA target sequence for CIRH1A (NM_032830.1,1646-1664).
ctattgcccccaataccaa

SEQ ID NO: 401796 - DNA, 19 bp, Homo sapiens
  siRNA target sequence for CIRH1A (NM_032830.1,1687-1705).
gaccagcaggtatttgagt

SEQ ID NO: 401797 - DNA, 19 bp, Homo sapiens
  siRNA target sequence for CIRH1A (NM_032830.1,1875-1893).
gtcattgccccttccaaat

SEQ ID NO: 401798 - DNA, 19 bp, Homo sapiens
  siRNA target sequence for CIRH1A (NM_032830.1,1901-1919).
ccttactctacaatccatt

SEQ ID NO: 401799 - DNA, 19 bp, Homo sapiens
  siRNA target sequence for CIRH1A (NM_032830.1,1922-1940).
ctcccacgaatgaatcaga

SEQ ID NO: 401800 - DNA, 19 bp, Homo sapiens
  siRNA target sequence for CIRH1A (NM_032830.1,1928-1946).
cgaatgaatcagatgtcat

SEQ ID NO: 401801 - DNA, 19 bp, Homo sapiens
  siRNA target sequence for CIRH1A (NM_032830.1,1953-1971).
gcgcacagctcatgctttt

SEQ ID NO: 401802 - DNA, 19 bp, Homo sapiens
  siRNA target sequence for CIRH1A (NM_032830.1,1954-1972).
cgcacagctcatgctttta

SEQ ID NO: 401803 - DNA, 19 bp, Homo sapiens
  siRNA target sequence for CIRH1A (NM_032830.1,2074-2092).
ccaccacccattaaaaaga

SEQ ID NO: 401804 - DNA, 19 bp, Homo sapiens
  siRNA target sequence for CIRH1A (NM_032830.1,2077-2095).
ccacccattaaaaagaaga

SEQ ID NO: 401805 - DNA, 19 bp, Homo sapiens
  siRNA target sequence for C7orf19 (NM_032831.1,157-175).
ggccataagggcatggatt

SEQ ID NO: 401806 - DNA, 19 bp, Homo sapiens
  siRNA target sequence for C7orf19 (NM_032831.1,158-176).
gccataagggcatggatta

SEQ ID NO: 401807 - DNA, 19 bp, Homo sapiens
  siRNA target sequence for LRP11 (NM_032832.3,1040-1058).
gccatcgtccagtatgagt

SEQ ID NO: 401808 - DNA, 19 bp, Homo sapiens
  siRNA target sequence for LRP11 (NM_032832.3,1254-1272).
gctcacgctaccacttctt

SEQ ID NO: 401809 - DNA, 19 bp, Homo sapiens
  siRNA target sequence for LRP11 (NM_032832.3,1449-1467).
gtgactccttggtggaaaa

SEQ ID NO: 401810 - DNA, 19 bp, Homo sapiens
  siRNA target sequence for LRP11 (NM_032832.3,1492-1510).
caagccacctgcattatca

SEQ ID NO: 401811 - DNA, 19 bp, Homo sapiens
  siRNA target sequence for LRP11 (NM_032832.3,1542-1560).
ggggaccagagagtcaaat

SEQ ID NO: 401812 - DNA, 19 bp, Homo sapiens
  siRNA target sequence for LRP11 (NM_032832.3,1544-1562).
ggaccagagagtcaaatca

SEQ ID NO: 401813 - DNA, 19 bp, Homo sapiens
  siRNA target sequence for LRP11 (NM_032832.3,1568-1586).
gtgatgccagatagtagtt

SEQ ID NO: 401814 - DNA, 19 bp, Homo sapiens
  siRNA target sequence for LRP11 (NM_032832.3,1742-1760).
ctacgactggtgaaacaga

SEQ ID NO: 401815 - DNA, 19 bp, Homo sapiens
  siRNA target sequence for LRP11 (NM_032832.3,1793-1811).
gaatcggactacctcataa

SEQ ID NO: 401816 - DNA, 19 bp, Homo sapiens
  siRNA target sequence for PPP1R15B (NM_032833.1,494-512).
caagcaggctcttctaagt

SEQ ID NO: 401817 - DNA, 19 bp, Homo sapiens
  siRNA target sequence for PPP1R15B (NM_032833.1,573-591).
ccgagactcgggtcagtta

SEQ ID NO: 401818 - DNA, 19 bp, Homo sapiens
  siRNA target sequence for PPP1R15B (NM_032833.1,575-593).
gagactcgggtcagttact

SEQ ID NO: 401819 - DNA, 19 bp, Homo sapiens
  siRNA target sequence for PPP1R15B (NM_032833.1,637-655).
gcttcagaaggtgctaatt

SEQ ID NO: 401820 - DNA, 19 bp, Homo sapiens
  siRNA target sequence for PPP1R15B (NM_032833.1,638-656).
cttcagaaggtgctaattt

SEQ ID NO: 401821 - DNA, 19 bp, Homo sapiens
  siRNA target sequence for PPP1R15B (NM_032833.1,683-701).
ccgaccagatggctagatt

SEQ ID NO: 401822 - DNA, 19 bp, Homo sapiens
  siRNA target sequence for PPP1R15B (NM_032833.1,684-702).
cgaccagatggctagattt

SEQ ID NO: 401823 - DNA, 19 bp, Homo sapiens
  siRNA target sequence for PPP1R15B (NM_032833.1,757-775).
ccccacagcgcagaaatct

SEQ ID NO: 401824 - DNA, 19 bp, Homo sapiens
  siRNA target sequence for PPP1R15B (NM_032833.1,764-782).
gcgcagaaatctttgagtt

SEQ ID NO: 401825 - DNA, 19 bp, Homo sapiens
  siRNA target sequence for PPP1R15B (NM_032833.1,842-860).
gggatccactggcaatact

SEQ ID NO: 401826 - DNA, 19 bp, Homo sapiens
  siRNA target sequence for PPP1R15B (NM_032833.1,864-882).
ccccagacctaaaattgga

SEQ ID NO: 401827 - DNA, 19 bp, Homo sapiens
  siRNA target sequence for PPP1R15B (NM_032833.1,977-995).
caatcccgtctgtactcta

SEQ ID NO: 401828 - DNA, 19 bp, Homo sapiens
  siRNA target sequence for PPP1R15B (NM_032833.1,1014-1032).
cgccctctgggcctctaaa

SEQ ID NO: 401829 - DNA, 19 bp, Homo sapiens
  siRNA target sequence for PPP1R15B (NM_032833.1,1056-1074).
gtgtggtatcctatttgct

SEQ ID NO: 401830 - DNA, 19 bp, Homo sapiens
  siRNA target sequence for PPP1R15B (NM_032833.1,1106-1124).
ctagaagtcagctatcaga

SEQ ID NO: 401831 - DNA, 19 bp, Homo sapiens
  siRNA target sequence for PPP1R15B (NM_032833.1,1515-1533).
cagaggttccacttgcttt

SEQ ID NO: 401832 - DNA, 19 bp, Homo sapiens
  siRNA target sequence for PPP1R15B (NM_032833.1,1558-1576).
ctgtccatctagtgagata

SEQ ID NO: 401833 - DNA, 19 bp, Homo sapiens
  siRNA target sequence for PPP1R15B (NM_032833.1,1562-1580).
ccatctagtgagataccta

SEQ ID NO: 401834 - DNA, 19 bp, Homo sapiens
  siRNA target sequence for PPP1R15B (NM_032833.1,1563-1581).
catctagtgagatacctat

SEQ ID NO: 401835 - DNA, 19 bp, Homo sapiens
  siRNA target sequence for PPP1R15B (NM_032833.1,1596-1614).
gagagggccgaataagtgt

SEQ ID NO: 401836 - DNA, 19 bp, Homo sapiens
  siRNA target sequence for PPP1R15B (NM_032833.1,1600-1618).
gggccgaataagtgtagtt

SEQ ID NO: 401837 - DNA, 19 bp, Homo sapiens
  siRNA target sequence for PPP1R15B (NM_032833.1,1602-1620).
gccgaataagtgtagttga

SEQ ID NO: 401838 - DNA, 19 bp, Homo sapiens
  siRNA target sequence for PPP1R15B (NM_032833.1,1603-1621).
ccgaataagtgtagttgat

SEQ ID NO: 401839 - DNA, 19 bp, Homo sapiens
  siRNA target sequence for PPP1R15B (NM_032833.1,1604-1622).
cgaataagtgtagttgatt

SEQ ID NO: 401840 - DNA, 19 bp, Homo sapiens
  siRNA target sequence for PPP1R15B (NM_032833.1,1655-1673).
gccagaccagcttgtagta

SEQ ID NO: 401841 - DNA, 19 bp, Homo sapiens
  siRNA target sequence for PPP1R15B (NM_032833.1,1659-1677).
gaccagcttgtagtaacaa

SEQ ID NO: 401842 - DNA, 19 bp, Homo sapiens
  siRNA target sequence for PPP1R15B (NM_032833.1,1662-1680).
cagcttgtagtaacaaact

SEQ ID NO: 401843 - DNA, 19 bp, Homo sapiens
  siRNA target sequence for PPP1R15B (NM_032833.1,1665-1683).
cttgtagtaacaaactgat

SEQ ID NO: 401844 - DNA, 19 bp, Homo sapiens
  siRNA target sequence for PPP1R15B (NM_032833.1,1675-1693).
caaactgatagattatatt

SEQ ID NO: 401845 - DNA, 19 bp, Homo sapiens
  siRNA target sequence for PPP1R15B (NM_032833.1,1769-1787).
gatggttttgatagtgata

SEQ ID NO: 401846 - DNA, 19 bp, Homo sapiens
  siRNA target sequence for PPP1R15B (NM_032833.1,1849-1867).
ctgcagtgtagatccttat

SEQ ID NO: 401847 - DNA, 19 bp, Homo sapiens
  siRNA target sequence for PPP1R15B (NM_032833.1,1851-1869).
gcagtgtagatccttataa

SEQ ID NO: 401848 - DNA, 19 bp, Homo sapiens
  siRNA target sequence for PPP1R15B (NM_032833.1,1929-1947).
ctgattcagagaaggattt

SEQ ID NO: 401849 - DNA, 19 bp, Homo sapiens
  siRNA target sequence for PPP1R15B (NM_032833.1,1931-1949).
gattcagagaaggatttgt

SEQ ID NO: 401850 - DNA, 19 bp, Homo sapiens
  siRNA target sequence for PPP1R15B (NM_032833.1,1948-1966).
gtctggcaagtctgatcta

SEQ ID NO: 401851 - DNA, 19 bp, Homo sapiens
  siRNA target sequence for PPP1R15B (NM_032833.1,1953-1971).
gcaagtctgatctagagaa

SEQ ID NO: 401852 - DNA, 19 bp, Homo sapiens
  siRNA target sequence for PPP1R15B (NM_032833.1,1954-1972).
caagtctgatctagagaat

SEQ ID NO: 401853 - DNA, 19 bp, Homo sapiens
  siRNA target sequence for PPP1R15B (NM_032833.1,1997-2015).
gagacccctgagcatagtt

SEQ ID NO: 401854 - DNA, 19 bp, Homo sapiens
  siRNA target sequence for PPP1R15B (NM_032833.1,1999-2017).
gacccctgagcatagttct

SEQ ID NO: 401855 - DNA, 19 bp, Homo sapiens
  siRNA target sequence for PPP1R15B (NM_032833.1,2054-2072).
gcagagagtctcaaactgt

SEQ ID NO: 401856 - DNA, 19 bp, Homo sapiens
  siRNA target sequence for PPP1R15B (NM_032833.1,2071-2089).
gtggaactcattctgtaat

SEQ ID NO: 401857 - DNA, 19 bp, Homo sapiens
  siRNA target sequence for PPP1R15B (NM_032833.1,2074-2092).
gaactcattctgtaattct

SEQ ID NO: 401858 - DNA, 19 bp, Homo sapiens
  siRNA target sequence for PPP1R15B (NM_032833.1,2096-2114).
gacccctacaaccctttaa

SEQ ID NO: 401859 - DNA, 19 bp, Homo sapiens
  siRNA target sequence for PPP1R15B (NM_032833.1,2100-2118).
cctacaaccctttaaattt

SEQ ID NO: 401860 - DNA, 19 bp, Homo sapiens
  siRNA target sequence for PPP1R15B (NM_032833.1,2101-2119).
ctacaaccctttaaatttt

SEQ ID NO: 401861 - DNA, 19 bp, Homo sapiens
  siRNA target sequence for PPP1R15B (NM_032833.1,2156-2174).
ggctgtcgtgactcaaaga

SEQ ID NO: 401862 - DNA, 19 bp, Homo sapiens
  siRNA target sequence for PPP1R15B (NM_032833.1,2273-2291).
gtacagcgtgacgttcttt

SEQ ID NO: 401863 - DNA, 19 bp, Homo sapiens
  siRNA target sequence for PPP1R15B (NM_032833.1,2342-2360).
gaagttactgagtattata

SEQ ID NO: 401864 - DNA, 19 bp, Homo sapiens
  siRNA target sequence for PPP1R15B (NM_032833.1,2415-2433).
gcaggttccagaaacgaat

SEQ ID NO: 401865 - DNA, 19 bp, Homo sapiens
  siRNA target sequence for PPP1R15B (NM_032833.1,2416-2434).
caggttccagaaacgaatt

SEQ ID NO: 401866 - DNA, 19 bp, Homo sapiens
  siRNA target sequence for PPP1R15B (NM_032833.1,2418-2436).
ggttccagaaacgaattca

SEQ ID NO: 401867 - DNA, 19 bp, Homo sapiens
  siRNA target sequence for PPP1R15B (NM_032833.1,2422-2440).
ccagaaacgaattcaagaa

SEQ ID NO: 401868 - DNA, 19 bp, Homo sapiens
  siRNA target sequence for PPP1R15B (NM_032833.1,2447-2465).
gatgctattggatattgct

SEQ ID NO: 401869 - DNA, 19 bp, Homo sapiens
  siRNA target sequence for PPP1R15B (NM_032833.1,2525-2543).
cttaatgttctcaagcaat

SEQ ID NO: 401870 - DNA, 19 bp, Homo sapiens
  siRNA target sequence for ALG10 (NM_032834.1,211-229).
cagacttccacctattaaa

SEQ ID NO: 401871 - DNA, 19 bp, Homo sapiens
  siRNA target sequence for ALG10 (NM_032834.1,272-290).
gcttattccatgtccttta

SEQ ID NO: 401872 - DNA, 19 bp, Homo sapiens
  siRNA target sequence for ALG10 (NM_032834.1,295-313).
cttgagtatgcttttgctt

SEQ ID NO: 401873 - DNA, 19 bp, Homo sapiens
  siRNA target sequence for ALG10 (NM_032834.1,422-440).
cctcaactattctactttt

SEQ ID NO: 401874 - DNA, 19 bp, Homo sapiens
  siRNA target sequence for ALG10 (NM_032834.1,517-535).
gaaacgtagaattctgttt

SEQ ID NO: 401875 - DNA, 19 bp, Homo sapiens
  siRNA target sequence for ALG10 (NM_032834.1,579-597).
cttatgctcataaatactt

SEQ ID NO: 401876 - DNA, 19 bp, Homo sapiens
  siRNA target sequence for ALG10 (NM_032834.1,599-617).
ctagcagacaatagacatt

SEQ ID NO: 401877 - DNA, 19 bp, Homo sapiens
  siRNA target sequence for ALG10 (NM_032834.1,673-691).
gttagttccagcctatata

SEQ ID NO: 401878 - DNA, 19 bp, Homo sapiens
  siRNA target sequence for ALG10 (NM_032834.1,762-780).
gcttgttcactgttatagt

SEQ ID NO: 401879 - DNA, 19 bp, Homo sapiens
  siRNA target sequence for ALG10 (NM_032834.1,787-805).
gaaactgctggaatttcgt

SEQ ID NO: 401880 - DNA, 19 bp, Homo sapiens
  siRNA target sequence for ALG10 (NM_032834.1,797-815).
gaatttcgttacttcattt

SEQ ID NO: 401881 - DNA, 19 bp, Homo sapiens
  siRNA target sequence for ALG10 (NM_032834.1,803-821).
cgttacttcattttacctt

SEQ ID NO: 401882 - DNA, 19 bp, Homo sapiens
  siRNA target sequence for ALG10 (NM_032834.1,824-842).
gtcatttataggcttaaca

SEQ ID NO: 401883 - DNA, 19 bp, Homo sapiens
  siRNA target sequence for ALG10 (NM_032834.1,858-876).
catccagactcatttgtga

SEQ ID NO: 401884 - DNA, 19 bp, Homo sapiens
  siRNA target sequence for ALG10 (NM_032834.1,953-971).
caggacattcaaaggttta

SEQ ID NO: 401885 - DNA, 19 bp, Homo sapiens
  siRNA target sequence for FLJ14775 (NM_032837.1,206-224).
ggaatggcaacgaagaaga

SEQ ID NO: 401886 - DNA, 19 bp, Homo sapiens
  siRNA target sequence for DIRC2 (NM_032839.1,440-458).
ccctgcttcgcgttcatgt

SEQ ID NO: 401887 - DNA, 19 bp, Homo sapiens
  siRNA target sequence for DIRC2 (NM_032839.1,472-490).
gagaggtctccggataact

SEQ ID NO: 401888 - DNA, 19 bp, Homo sapiens
  siRNA target sequence for DIRC2 (NM_032839.1,528-546).
gtctaagatgcatacctat

SEQ ID NO: 401889 - DNA, 19 bp, Homo sapiens
  siRNA target sequence for DIRC2 (NM_032839.1,534-552).
gatgcatacctatatcaga

SEQ ID NO: 401890 - DNA, 19 bp, Homo sapiens
  siRNA target sequence for DIRC2 (NM_032839.1,538-556).
catacctatatcagactta

SEQ ID NO: 401891 - DNA, 19 bp, Homo sapiens
  siRNA target sequence for DIRC2 (NM_032839.1,578-596).
catggaggacagatgttaa

SEQ ID NO: 401892 - DNA, 19 bp, Homo sapiens
  siRNA target sequence for DIRC2 (NM_032839.1,584-602).
ggacagatgttaaatggat

SEQ ID NO: 401893 - DNA, 19 bp, Homo sapiens
  siRNA target sequence for DIRC2 (NM_032839.1,638-656).
ctctctacgacgtggtttt

SEQ ID NO: 401894 - DNA, 19 bp, Homo sapiens
  siRNA target sequence for DIRC2 (NM_032839.1,640-658).
ctctacgacgtggttttct

SEQ ID NO: 401895 - DNA, 19 bp, Homo sapiens
  siRNA target sequence for DIRC2 (NM_032839.1,787-805).
gagcagcagggcgcatatt

SEQ ID NO: 401896 - DNA, 19 bp, Homo sapiens
  siRNA target sequence for DIRC2 (NM_032839.1,789-807).
gcagcagggcgcatattaa

SEQ ID NO: 401897 - DNA, 19 bp, Homo sapiens
  siRNA target sequence for DIRC2 (NM_032839.1,790-808).
cagcagggcgcatattaaa

SEQ ID NO: 401898 - DNA, 19 bp, Homo sapiens
  siRNA target sequence for DIRC2 (NM_032839.1,792-810).
gcagggcgcatattaaaga

SEQ ID NO: 401899 - DNA, 19 bp, Homo sapiens
  siRNA target sequence for DIRC2 (NM_032839.1,793-811).
cagggcgcatattaaagat

SEQ ID NO: 401900 - DNA, 19 bp, Homo sapiens
  siRNA target sequence for DIRC2 (NM_032839.1,812-830).
cgcatagaggctgtgttat

SEQ ID NO: 401901 - DNA, 19 bp, Homo sapiens
  siRNA target sequence for DIRC2 (NM_032839.1,813-831).
gcatagaggctgtgttata

SEQ ID NO: 401902 - DNA, 19 bp, Homo sapiens
  siRNA target sequence for DIRC2 (NM_032839.1,814-832).
catagaggctgtgttatat

SEQ ID NO: 401903 - DNA, 19 bp, Homo sapiens
  siRNA target sequence for DIRC2 (NM_032839.1,842-860).
ggagttgtctgcttaatat

SEQ ID NO: 401904 - DNA, 19 bp, Homo sapiens
  siRNA target sequence for DIRC2 (NM_032839.1,843-861).
gagttgtctgcttaatatt

SEQ ID NO: 401905 - DNA, 19 bp, Homo sapiens
  siRNA target sequence for DIRC2 (NM_032839.1,941-959).
cggagaagcgtttgtagat

SEQ ID NO: 401906 - DNA, 19 bp, Homo sapiens
  siRNA target sequence for DIRC2 (NM_032839.1,942-960).
ggagaagcgtttgtagatt

SEQ ID NO: 401907 - DNA, 19 bp, Homo sapiens
  siRNA target sequence for DIRC2 (NM_032839.1,943-961).
gagaagcgtttgtagatta

SEQ ID NO: 401908 - DNA, 19 bp, Homo sapiens
  siRNA target sequence for DIRC2 (NM_032839.1,945-963).
gaagcgtttgtagattatt

SEQ ID NO: 401909 - DNA, 19 bp, Homo sapiens
  siRNA target sequence for DIRC2 (NM_032839.1,974-992).
cgatttttgatgattgctt

SEQ ID NO: 401910 - DNA, 19 bp, Homo sapiens
  siRNA target sequence for DIRC2 (NM_032839.1,1002-1020).
ccataccacttggtgtatt

SEQ ID NO: 401911 - DNA, 19 bp, Homo sapiens
  siRNA target sequence for DIRC2 (NM_032839.1,1003-1021).
cataccacttggtgtattt

SEQ ID NO: 401912 - DNA, 19 bp, Homo sapiens
  siRNA target sequence for DIRC2 (NM_032839.1,1035-1053).
gagttctggacttaatttt

SEQ ID NO: 401913 - DNA, 19 bp, Homo sapiens
  siRNA target sequence for DIRC2 (NM_032839.1,1117-1135).
ctgtgttgttggaatagct

SEQ ID NO: 401914 - DNA, 19 bp, Homo sapiens
  siRNA target sequence for DIRC2 (NM_032839.1,1119-1137).
gtgttgttggaatagctat

SEQ ID NO: 401915 - DNA, 19 bp, Homo sapiens
  siRNA target sequence for DIRC2 (NM_032839.1,1159-1177).
caggggtatgctgaaacta

SEQ ID NO: 401916 - DNA, 19 bp, Homo sapiens
  siRNA target sequence for DIRC2 (NM_032839.1,1162-1180).
gggtatgctgaaactaatt

SEQ ID NO: 401917 - DNA, 19 bp, Homo sapiens
  siRNA target sequence for DIRC2 (NM_032839.1,1164-1182).
gtatgctgaaactaattct

SEQ ID NO: 401918 - DNA, 19 bp, Homo sapiens
  siRNA target sequence for DIRC2 (NM_032839.1,1295-1313).
ctcctgggagtgttcttga

SEQ ID NO: 401919 - DNA, 19 bp, Homo sapiens
  siRNA target sequence for DIRC2 (NM_032839.1,1298-1316).
ctgggagtgttcttgaata

SEQ ID NO: 401920 - DNA, 19 bp, Homo sapiens
  siRNA target sequence for DIRC2 (NM_032839.1,1301-1319).
ggagtgttcttgaatagca

SEQ ID NO: 401921 - DNA, 19 bp, Homo sapiens
  siRNA target sequence for DIRC2 (NM_032839.1,1317-1335).
gcagcgtgcctatattttt

SEQ ID NO: 401922 - DNA, 19 bp, Homo sapiens
  siRNA target sequence for DIRC2 (NM_032839.1,1318-1336).
cagcgtgcctatatttttt

SEQ ID NO: 401923 - DNA, 19 bp, Homo sapiens
  siRNA target sequence for DIRC2 (NM_032839.1,1320-1338).
gcgtgcctatattttttga

SEQ ID NO: 401924 - DNA, 19 bp, Homo sapiens
  siRNA target sequence for FLJ14803 (NM_032842.1,126-144).
ctggggactcctaaatgta

SEQ ID NO: 401925 - DNA, 19 bp, Homo sapiens
  siRNA target sequence for FLJ14803 (NM_032842.1,150-168).
ggctggaatgatatatact

SEQ ID NO: 401926 - DNA, 19 bp, Homo sapiens
  siRNA target sequence for FLJ14803 (NM_032842.1,152-170).
ctggaatgatatatactga

SEQ ID NO: 401927 - DNA, 19 bp, Homo sapiens
  siRNA target sequence for FLJ14803 (NM_032842.1,159-177).
gatatatactgaaatgact

SEQ ID NO: 401928 - DNA, 19 bp, Homo sapiens
  siRNA target sequence for FLJ14803 (NM_032842.1,174-192).
gactggaaaattgattagt

SEQ ID NO: 401929 - DNA, 19 bp, Homo sapiens
  siRNA target sequence for FLJ14803 (NM_032842.1,178-196).
ggaaaattgattagttcat

SEQ ID NO: 401930 - DNA, 19 bp, Homo sapiens
  siRNA target sequence for FLJ14803 (NM_032842.1,179-197).
gaaaattgattagttcata

SEQ ID NO: 401931 - DNA, 19 bp, Homo sapiens
  siRNA target sequence for FLJ14803 (NM_032842.1,186-204).
gattagttcatactacaat

SEQ ID NO: 401932 - DNA, 19 bp, Homo sapiens
  siRNA target sequence for FLJ14803 (NM_032842.1,194-212).
catactacaatgtgacata

SEQ ID NO: 401933 - DNA, 19 bp, Homo sapiens
  siRNA target sequence for FLJ14803 (NM_032842.1,215-233).
ggcccctctggtatattga

SEQ ID NO: 401934 - DNA, 19 bp, Homo sapiens
  siRNA target sequence for FLJ14803 (NM_032842.1,255-273).
cagccttaatgccttattt

SEQ ID NO: 401935 - DNA, 19 bp, Homo sapiens
  siRNA target sequence for FLJ14803 (NM_032842.1,259-277).
cttaatgccttatttgatt

SEQ ID NO: 401936 - DNA, 19 bp, Homo sapiens
  siRNA target sequence for FLJ14803 (NM_032842.1,282-300).
gagatatttcaaatatact

SEQ ID NO: 401937 - DNA, 19 bp, Homo sapiens
  siRNA target sequence for FLJ14803 (NM_032842.1,307-325).
ccaacaagtctggttgtta

SEQ ID NO: 401938 - DNA, 19 bp, Homo sapiens
  siRNA target sequence for FLJ14803 (NM_032842.1,328-346).
cctggacagcaaacacttt

SEQ ID NO: 401939 - DNA, 19 bp, Homo sapiens
  siRNA target sequence for FLJ14803 (NM_032842.1,374-392).
ctacgcctccacatgatct

SEQ ID NO: 401940 - DNA, 19 bp, Homo sapiens
  siRNA target sequence for FLJ14803 (NM_032842.1,582-600).
ctcgcccgtcagtggttat

SEQ ID NO: 401941 - DNA, 19 bp, Homo sapiens
  siRNA target sequence for FLJ14803 (NM_032842.1,584-602).
cgcccgtcagtggttataa

SEQ ID NO: 401942 - DNA, 19 bp, Homo sapiens
  siRNA target sequence for FLJ14803 (NM_032842.1,585-603).
gcccgtcagtggttataat

SEQ ID NO: 401943 - DNA, 19 bp, Homo sapiens
  siRNA target sequence for FLJ14803 (NM_032842.1,586-604).
cccgtcagtggttataata

SEQ ID NO: 401944 - DNA, 19 bp, Homo sapiens
  siRNA target sequence for FLJ14803 (NM_032842.1,664-682).
gagagcagtggattgagat

SEQ ID NO: 401945 - DNA, 19 bp, Homo sapiens
  siRNA target sequence for FLJ14803 (NM_032842.1,695-713).
cttcacctaccgtctacaa

SEQ ID NO: 401946 - DNA, 19 bp, Homo sapiens
  siRNA target sequence for FLJ14803 (NM_032842.1,711-729).
caactcacctactgacaaa

SEQ ID NO: 401947 - DNA, 19 bp, Homo sapiens
  siRNA target sequence for FLJ14803 (NM_032842.1,744-762).
cgacctacgaactttggat

SEQ ID NO: 401948 - DNA, 19 bp, Homo sapiens
  siRNA target sequence for FLJ14803 (NM_032842.1,745-763).
gacctacgaactttggata

SEQ ID NO: 401949 - DNA, 19 bp, Homo sapiens
  siRNA target sequence for FLJ14803 (NM_032842.1,748-766).
ctacgaactttggatactt

SEQ ID NO: 401950 - DNA, 19 bp, Homo sapiens
  siRNA target sequence for FLJ14803 (NM_032842.1,805-823).
ctggggagcccagattcta

SEQ ID NO: 401951 - DNA, 19 bp, Homo sapiens
  siRNA target sequence for FLJ14803 (NM_032842.1,851-869).
ggaactatagtcgttctat

SEQ ID NO: 401952 - DNA, 19 bp, Homo sapiens
  siRNA target sequence for FLJ14803 (NM_032842.1,870-888).
gggggattatgcacaaact

SEQ ID NO: 401953 - DNA, 19 bp, Homo sapiens
  siRNA target sequence for FLJ14803 (NM_032842.1,873-891).
ggattatgcacaaacttta

SEQ ID NO: 401954 - DNA, 19 bp, Homo sapiens
  siRNA target sequence for FLJ14803 (NM_032842.1,927-945).
ggccccatgtgctaacaaa

SEQ ID NO: 401955 - DNA, 19 bp, Homo sapiens
  siRNA target sequence for FLJ14803 (NM_032842.1,929-947).
ccccatgtgctaacaaaga

SEQ ID NO: 401956 - DNA, 19 bp, Homo sapiens
  siRNA target sequence for FLJ14803 (NM_032842.1,989-1007).
gggcaagagtggctatgaa

SEQ ID NO: 401957 - DNA, 19 bp, Homo sapiens
  siRNA target sequence for FLJ14803 (NM_032842.1,1018-1036).
cttgatcatatggattcat

SEQ ID NO: 401958 - DNA, 19 bp, Homo sapiens
  siRNA target sequence for FLJ14803 (NM_032842.1,1030-1048).
gattcatggacagctaaat

SEQ ID NO: 401959 - DNA, 19 bp, Homo sapiens
  siRNA target sequence for FLJ14803 (NM_032842.1,1058-1076).
ggatcaatgagacaatatt

SEQ ID NO: 401960 - DNA, 19 bp, Homo sapiens
  siRNA target sequence for FLJ14803 (NM_032842.1,1080-1098).
gccacttgttcaagagatt

SEQ ID NO: 401961 - DNA, 19 bp, Homo sapiens
  siRNA target sequence for FLJ14803 (NM_032842.1,1084-1102).
cttgttcaagagattgagt

SEQ ID NO: 401962 - DNA, 19 bp, Homo sapiens
  siRNA target sequence for FLJ14803 (NM_032842.1,1150-1168).
ggagaggctagtattacta

SEQ ID NO: 401963 - DNA, 19 bp, Homo sapiens
  siRNA target sequence for FLJ14803 (NM_032842.1,1188-1206).
ggttaaagcgcctctcatt

SEQ ID NO: 401964 - DNA, 19 bp, Homo sapiens
  siRNA target sequence for FLJ14803 (NM_032842.1,1218-1236).
cacaatcgttcagtatcta

SEQ ID NO: 401965 - DNA, 19 bp, Homo sapiens
  siRNA target sequence for FLJ14803 (NM_032842.1,1220-1238).
caatcgttcagtatctaga

SEQ ID NO: 401966 - DNA, 19 bp, Homo sapiens
  siRNA target sequence for FLJ14803 (NM_032842.1,1244-1262).
ctccaaatcaggaatactt

SEQ ID NO: 401967 - DNA, 19 bp, Homo sapiens
  siRNA target sequence for FLJ14803 (NM_032842.1,1271-1289).
ggatcaaagaactatctca

SEQ ID NO: 401968 - DNA, 19 bp, Homo sapiens
  siRNA target sequence for FLJ14803 (NM_032842.1,1364-1382).
ccaccgattctgctatcat

SEQ ID NO: 401969 - DNA, 19 bp, Homo sapiens
  siRNA target sequence for FLJ14803 (NM_032842.1,1367-1385).
ccgattctgctatcatcat

SEQ ID NO: 401970 - DNA, 19 bp, Homo sapiens
  siRNA target sequence for FLJ14803 (NM_032842.1,1401-1419).
ctaccttgattccagatta

SEQ ID NO: 401971 - DNA, 19 bp, Homo sapiens
  siRNA target sequence for FLJ14803 (NM_032842.1,1434-1452).
gtatcccgacggaaaaact

SEQ ID NO: 401972 - DNA, 19 bp, Homo sapiens
  siRNA target sequence for FLJ14803 (NM_032842.1,1438-1456).
cccgacggaaaaactttta

SEQ ID NO: 401973 - DNA, 19 bp, Homo sapiens
  siRNA target sequence for FLJ14803 (NM_032842.1,1544-1562).
cccattatgagctcatcta

SEQ ID NO: 401974 - DNA, 19 bp, Homo sapiens
  siRNA target sequence for FLJ14803 (NM_032842.1,1655-1673).
gaatgcttgggagagttaa

SEQ ID NO: 401975 - DNA, 19 bp, Homo sapiens
  siRNA target sequence for FLJ14803 (NM_032842.1,1679-1697).
gtctatctggtgtgaatat

SEQ ID NO: 401976 - DNA, 19 bp, Homo sapiens
  siRNA target sequence for FIBCD1 (NM_032843.3,1338-1356).
gctcaccgtggctgactat

SEQ ID NO: 401977 - DNA, 19 bp, Homo sapiens
  siRNA target sequence for FIBCD1 (NM_032843.3,1339-1357).
ctcaccgtggctgactatt

SEQ ID NO: 401978 - DNA, 19 bp, Homo sapiens
  siRNA target sequence for FIBCD1 (NM_032843.3,1573-1591).
cagtactcactcaagttct

SEQ ID NO: 401979 - DNA, 19 bp, Homo sapiens
  siRNA target sequence for FLJ14816 (NM_032845.1,87-105).
cgattccggtctttcctta

SEQ ID NO: 401980 - DNA, 19 bp, Homo sapiens
  siRNA target sequence for FLJ14816 (NM_032845.1,133-151).
cccatgggtctcttgatga

SEQ ID NO: 401981 - DNA, 19 bp, Homo sapiens
  siRNA target sequence for FLJ14816 (NM_032845.1,254-272).
ggtgactggaagaaaacca

SEQ ID NO: 401982 - DNA, 19 bp, Homo sapiens
  siRNA target sequence for FLJ14816 (NM_032845.1,326-344).
gaaatggcagagtacgatt

SEQ ID NO: 401983 - DNA, 19 bp, Homo sapiens
  siRNA target sequence for FLJ14816 (NM_032845.1,414-432).
cgagttggctgtcagtttt

SEQ ID NO: 401984 - DNA, 19 bp, Homo sapiens
  siRNA target sequence for FLJ14816 (NM_032845.1,435-453).
ggattcccagaatatttaa

SEQ ID NO: 401985 - DNA, 19 bp, Homo sapiens
  siRNA target sequence for FLJ14816 (NM_032845.1,486-504).
ctgttccctcccacatcta

SEQ ID NO: 401986 - DNA, 19 bp, Homo sapiens
  siRNA target sequence for FLJ14825 (NM_032847.1,188-206).
gtgctgactctcaagaaat

SEQ ID NO: 401987 - DNA, 19 bp, Homo sapiens
  siRNA target sequence for FLJ14825 (NM_032847.1,222-240).
cctacagacgacaagagta

SEQ ID NO: 401988 - DNA, 19 bp, Homo sapiens
  siRNA target sequence for FLJ14825 (NM_032847.1,223-241).
ctacagacgacaagagtat

SEQ ID NO: 401989 - DNA, 19 bp, Homo sapiens
  siRNA target sequence for FLJ14825 (NM_032847.1,228-246).
gacgacaagagtatcagaa

SEQ ID NO: 401990 - DNA, 19 bp, Homo sapiens
  siRNA target sequence for FLJ14825 (NM_032847.1,248-266).
gcactgcaggagtattcca

SEQ ID NO: 401991 - DNA, 19 bp, Homo sapiens
  siRNA target sequence for FLJ14825 (NM_032847.1,430-448).
ctacctccagcttgctatt

SEQ ID NO: 401992 - DNA, 19 bp, Homo sapiens
  siRNA target sequence for FLJ14825 (NM_032847.1,434-452).
ctccagcttgctatttgtt

SEQ ID NO: 401993 - DNA, 19 bp, Homo sapiens
  siRNA target sequence for FLJ14825 (NM_032847.1,437-455).
cagcttgctatttgttcaa

SEQ ID NO: 401994 - DNA, 19 bp, Homo sapiens
  siRNA target sequence for FLJ14825 (NM_032847.1,439-457).
gcttgctatttgttcaagt

SEQ ID NO: 401995 - DNA, 19 bp, Homo sapiens
  siRNA target sequence for FLJ14825 (NM_032847.1,440-458).
cttgctatttgttcaagtt

SEQ ID NO: 401996 - DNA, 19 bp, Homo sapiens
  siRNA target sequence for FLJ14825 (NM_032847.1,623-641).
gacaaaactatcaaatcct

SEQ ID NO: 401997 - DNA, 19 bp, Homo sapiens
  siRNA target sequence for FLJ14825 (NM_032847.1,716-734).
gaagcgaatagcagtaata

SEQ ID NO: 401998 - DNA, 19 bp, Homo sapiens
  siRNA target sequence for FLJ14825 (NM_032847.1,752-770).
gctctgacaaatatccaaa

SEQ ID NO: 401999 - DNA, 19 bp, Homo sapiens
  siRNA target sequence for FLJ14825 (NM_032847.1,806-824).
gagactcagctgaaagcat

SEQ ID NO: 402000 - DNA, 19 bp, Homo sapiens
  siRNA target sequence for FLJ14825 (NM_032847.1,872-890).
cagcaaacatcgtttgctt

SEQ ID NO: 402001 - DNA, 19 bp, Homo sapiens
  siRNA target sequence for FLJ14827 (NM_032848.1,549-567).
caaggccaggacgtcatat

SEQ ID NO: 402002 - DNA, 19 bp, Homo sapiens
  siRNA target sequence for FLJ14827 (NM_032848.1,780-798).
ccacaccccgtcttactgt

SEQ ID NO: 402003 - DNA, 19 bp, Homo sapiens
  siRNA target sequence for FLJ14827 (NM_032848.1,810-828).
gtttggctcccgatctgaa

SEQ ID NO: 402004 - DNA, 19 bp, Homo sapiens
  siRNA target sequence for FLJ14827 (NM_032848.1,998-1016).
cggcagactcccagaagtt

SEQ ID NO: 402005 - DNA, 19 bp, Homo sapiens
  siRNA target sequence for FLJ14827 (NM_032848.1,999-1017).
ggcagactcccagaagtta

SEQ ID NO: 402006 - DNA, 19 bp, Homo sapiens
  siRNA target sequence for FLJ14827 (NM_032848.1,1000-1018).
gcagactcccagaagttat

SEQ ID NO: 402007 - DNA, 19 bp, Homo sapiens
  siRNA target sequence for FLJ14827 (NM_032848.1,1003-1021).
gactcccagaagttatcta

SEQ ID NO: 402008 - DNA, 19 bp, Homo sapiens
  siRNA target sequence for FLJ14834 (NM_032849.2,614-632).
ctgaccaactactgtgatt

SEQ ID NO: 402009 - DNA, 19 bp, Homo sapiens
  siRNA target sequence for FLJ14834 (NM_032849.2,616-634).
gaccaactactgtgattat

SEQ ID NO: 402010 - DNA, 19 bp, Homo sapiens
  siRNA target sequence for FLJ14834 (NM_032849.2,618-636).
ccaactactgtgattataa

SEQ ID NO: 402011 - DNA, 19 bp, Homo sapiens
  siRNA target sequence for FLJ14834 (NM_032849.2,651-669).
ctatattgagcaaaccaat

SEQ ID NO: 402012 - DNA, 19 bp, Homo sapiens
  siRNA target sequence for FLJ14834 (NM_032849.2,717-735).
ggacgtacgcgtttcttgt

SEQ ID NO: 402013 - DNA, 19 bp, Homo sapiens
  siRNA target sequence for FLJ14834 (NM_032849.2,718-736).
gacgtacgcgtttcttgta

SEQ ID NO: 402014 - DNA, 19 bp, Homo sapiens
  siRNA target sequence for FLJ14834 (NM_032849.2,720-738).
cgtacgcgtttcttgtaaa

SEQ ID NO: 402015 - DNA, 19 bp, Homo sapiens
  siRNA target sequence for FLJ14834 (NM_032849.2,739-757).
cacgaggcaccccaagata

SEQ ID NO: 402016 - DNA, 19 bp, Homo sapiens
  siRNA target sequence for FLJ14834 (NM_032849.2,787-805).
ggtcatctcctcagtgatt

SEQ ID NO: 402017 - DNA, 19 bp, Homo sapiens
  siRNA target sequence for FLJ14834 (NM_032849.2,798-816).
cagtgattggagaaagtta

SEQ ID NO: 402018 - DNA, 19 bp, Homo sapiens
  siRNA target sequence for FLJ14834 (NM_032849.2,813-831).
gttaccggcttcagtttga

SEQ ID NO: 402019 - DNA, 19 bp, Homo sapiens
  siRNA target sequence for FLJ14834 (NM_032849.2,913-931).
caaagctgatgcattattt

SEQ ID NO: 402020 - DNA, 19 bp, Homo sapiens
  siRNA target sequence for FLJ14834 (NM_032849.2,953-971).
ctcagtaattccgttgtaa

SEQ ID NO: 402021 - DNA, 19 bp, Homo sapiens
  siRNA target sequence for FLJ14834 (NM_032849.2,991-1009).
gaatttgtcaagtacaagt

SEQ ID NO: 402022 - DNA, 19 bp, Homo sapiens
  siRNA target sequence for FLJ14834 (NM_032849.2,1018-1036).
gaaggagacgattaagtta

SEQ ID NO: 402023 - DNA, 19 bp, Homo sapiens
  siRNA target sequence for FLJ14834 (NM_032849.2,1066-1084).
ccgaaggagcagtttctct

SEQ ID NO: 402024 - DNA, 19 bp, Homo sapiens
  siRNA target sequence for FLJ14834 (NM_032849.2,1077-1095).
gtttctctgaccgaaagtt

SEQ ID NO: 402025 - DNA, 19 bp, Homo sapiens
  siRNA target sequence for FLJ14834 (NM_032849.2,1085-1103).
gaccgaaagttcagtgtaa

SEQ ID NO: 402026 - DNA, 19 bp, Homo sapiens
  siRNA target sequence for FLJ14834 (NM_032849.2,1088-1106).
cgaaagttcagtgtaactt

SEQ ID NO: 402027 - DNA, 19 bp, Homo sapiens
  siRNA target sequence for FLJ14834 (NM_032849.2,1104-1122).
cttccagaggttcaataga

SEQ ID NO: 402028 - DNA, 19 bp, Homo sapiens
  siRNA target sequence for FLJ14834 (NM_032849.2,1107-1125).
ccagaggttcaatagatga

SEQ ID NO: 402029 - DNA, 19 bp, Homo sapiens
  siRNA target sequence for FLJ14834 (NM_032849.2,1127-1145).
gtttttaactgcaatctgt

SEQ ID NO: 402030 - DNA, 19 bp, Homo sapiens
  siRNA target sequence for FLJ14834 (NM_032849.2,1172-1190).
cttttggcagaattaccat

SEQ ID NO: 402031 - DNA, 19 bp, Homo sapiens
  siRNA target sequence for FLJ14834 (NM_032849.2,1214-1232).
gagacacccaaccaattta

SEQ ID NO: 402032 - DNA, 19 bp, Homo sapiens
  siRNA target sequence for AUTL1 (NM_032852.2,265-283).
gcttggaacaacatgaaat

SEQ ID NO: 402033 - DNA, 19 bp, Homo sapiens
  siRNA target sequence for AUTL1 (NM_032852.2,329-347).
ctgtattattgcttggaaa

SEQ ID NO: 402034 - DNA, 19 bp, Homo sapiens
  siRNA target sequence for AUTL1 (NM_032852.2,391-409).
gcagagtcgggatgtacaa

SEQ ID NO: 402035 - DNA, 19 bp, Homo sapiens
  siRNA target sequence for AUTL1 (NM_032852.2,392-410).
cagagtcgggatgtacaat

SEQ ID NO: 402036 - DNA, 19 bp, Homo sapiens
  siRNA target sequence for AUTL1 (NM_032852.2,407-425).
caatagaggatcacgtaat

SEQ ID NO: 402037 - DNA, 19 bp, Homo sapiens
  siRNA target sequence for AUTL1 (NM_032852.2,485-503).
gggaagaattccctcaaat

SEQ ID NO: 402038 - DNA, 19 bp, Homo sapiens
  siRNA target sequence for AUTL1 (NM_032852.2,505-523).
gaaggctcagctttgacaa

SEQ ID NO: 402039 - DNA, 19 bp, Homo sapiens
  siRNA target sequence for AUTL1 (NM_032852.2,570-588).
ggctcaaggactcatacta

SEQ ID NO: 402040 - DNA, 19 bp, Homo sapiens
  siRNA target sequence for AUTL1 (NM_032852.2,572-590).
ctcaaggactcatactaca

SEQ ID NO: 402041 - DNA, 19 bp, Homo sapiens
  siRNA target sequence for AUTL1 (NM_032852.2,612-630).
ctggcctgatgctttgaat

SEQ ID NO: 402042 - DNA, 19 bp, Homo sapiens
  siRNA target sequence for AUTL1 (NM_032852.2,614-632).
ggcctgatgctttgaatat

SEQ ID NO: 402043 - DNA, 19 bp, Homo sapiens
  siRNA target sequence for AUTL1 (NM_032852.2,657-675).
gacttcccacactgtcaaa

SEQ ID NO: 402044 - DNA, 19 bp, Homo sapiens
  siRNA target sequence for AUTL1 (NM_032852.2,659-677).
cttcccacactgtcaaaaa

SEQ ID NO: 402045 - DNA, 19 bp, Homo sapiens
  siRNA target sequence for AUTL1 (NM_032852.2,663-681).
ccacactgtcaaaaaattt

SEQ ID NO: 402046 - DNA, 19 bp, Homo sapiens
  siRNA target sequence for AUTL1 (NM_032852.2,666-684).
cactgtcaaaaaatttact

SEQ ID NO: 402047 - DNA, 19 bp, Homo sapiens
  siRNA target sequence for AUTL1 (NM_032852.2,759-777).
gaaatattctgatgatcat

SEQ ID NO: 402048 - DNA, 19 bp, Homo sapiens
  siRNA target sequence for AUTL1 (NM_032852.2,783-801).
gcgaaatgaagtttatcat

SEQ ID NO: 402049 - DNA, 19 bp, Homo sapiens
  siRNA target sequence for AUTL1 (NM_032852.2,848-866).
gcttacatcaactaataga

SEQ ID NO: 402050 - DNA, 19 bp, Homo sapiens
  siRNA target sequence for AUTL1 (NM_032852.2,849-867).
cttacatcaactaatagaa

SEQ ID NO: 402051 - DNA, 19 bp, Homo sapiens
  siRNA target sequence for AUTL1 (NM_032852.2,856-874).
caactaatagaatatggaa

SEQ ID NO: 402052 - DNA, 19 bp, Homo sapiens
  siRNA target sequence for AUTL1 (NM_032852.2,964-982).
gatttacaaggaataacta

SEQ ID NO: 402053 - DNA, 19 bp, Homo sapiens
  siRNA target sequence for AUTL1 (NM_032852.2,1006-1024).
gtttacaattctgatgtaa

SEQ ID NO: 402054 - DNA, 19 bp, Homo sapiens
  siRNA target sequence for AUTL1 (NM_032852.2,1033-1051).
cagagtgcttccatgactt

SEQ ID NO: 402055 - DNA, 19 bp, Homo sapiens
  siRNA target sequence for AUTL1 (NM_032852.2,1044-1062).
catgacttctgataatgca

SEQ ID NO: 402056 - DNA, 19 bp, Homo sapiens
  siRNA target sequence for AUTL1 (NM_032852.2,1112-1130).
gaaccaacaccgactactt

SEQ ID NO: 402057 - DNA, 19 bp, Homo sapiens
  siRNA target sequence for AUTL1 (NM_032852.2,1115-1133).
ccaacaccgactacttaga

SEQ ID NO: 402058 - DNA, 19 bp, Homo sapiens
  siRNA target sequence for AUTL1 (NM_032852.2,1116-1134).
caacaccgactacttagaa

SEQ ID NO: 402059 - DNA, 19 bp, Homo sapiens
  siRNA target sequence for AUTL1 (NM_032852.2,1119-1137).
caccgactacttagaattt

SEQ ID NO: 402060 - DNA, 19 bp, Homo sapiens
  siRNA target sequence for AUTL1 (NM_032852.2,1121-1139).
ccgactacttagaatttgt

SEQ ID NO: 402061 - DNA, 19 bp, Homo sapiens
  siRNA target sequence for AUTL1 (NM_032852.2,1123-1141).
gactacttagaatttgtga

SEQ ID NO: 402062 - DNA, 19 bp, Homo sapiens
  siRNA target sequence for AUTL1 (NM_032852.2,1159-1177).
gaatattgtgtgggtatta

SEQ ID NO: 402063 - DNA, 19 bp, Homo sapiens
  siRNA target sequence for AUTL1 (NM_032852.2,1189-1207).
cctaaacagtcatattact

SEQ ID NO: 402064 - DNA, 19 bp, Homo sapiens
  siRNA target sequence for AUTL1 (NM_032852.2,1246-1264).
cctcattactgccaatctt

SEQ ID NO: 402065 - DNA, 19 bp, Homo sapiens
  siRNA target sequence for AUTL1 (NM_032852.2,1254-1272).
ctgccaatcttttgtagat

SEQ ID NO: 402066 - DNA, 19 bp, Homo sapiens
  siRNA target sequence for AUTL1 (NM_032852.2,1256-1274).
gccaatcttttgtagatgt

SEQ ID NO: 402067 - DNA, 19 bp, Homo sapiens
  siRNA target sequence for AUTL1 (NM_032852.2,1320-1338).
caaaaagatgtcttttcga

SEQ ID NO: 402068 - DNA, 19 bp, Homo sapiens
  siRNA target sequence for AUTL1 (NM_032852.2,1329-1347).
gtcttttcgaaaaatggat

SEQ ID NO: 402069 - DNA, 19 bp, Homo sapiens
  siRNA target sequence for AUTL1 (NM_032852.2,1344-1362).
ggatcccagctgtacaata

SEQ ID NO: 402070 - DNA, 19 bp, Homo sapiens
  siRNA target sequence for AUTL1 (NM_032852.2,1389-1407).
cttcaaacgagcttctgaa

SEQ ID NO: 402071 - DNA, 19 bp, Homo sapiens
  siRNA target sequence for AUTL1 (NM_032852.2,1392-1410).
caaacgagcttctgaagaa

SEQ ID NO: 402072 - DNA, 19 bp, Homo sapiens
  siRNA target sequence for AUTL1 (NM_032852.2,1396-1414).
cgagcttctgaagaaatca

SEQ ID NO: 402073 - DNA, 19 bp, Homo sapiens
  siRNA target sequence for AUTL1 (NM_032852.2,1474-1492).
cattccagagactatgatt

SEQ ID NO: 402074 - DNA, 19 bp, Homo sapiens
  siRNA target sequence for AUTL1 (NM_032852.2,1483-1501).
gactatgattttacatcta

SEQ ID NO: 402075 - DNA, 19 bp, Homo sapiens
  siRNA target sequence for AUTL1 (NM_032852.2,1502-1520).
ctacaaccaatgaagaaga

SEQ ID NO: 402076 - DNA, 19 bp, Homo sapiens
  siRNA target sequence for AUTL1 (NM_032852.2,1556-1574).
gatttagcacggaagagtt

SEQ ID NO: 402077 - DNA, 19 bp, Homo sapiens
  siRNA target sequence for FLJ14871 (NM_032854.1,416-434).
gtgctcgggcagaacaact

SEQ ID NO: 402078 - DNA, 19 bp, Homo sapiens
  siRNA target sequence for FLJ14871 (NM_032854.1,477-495).
gggtcctattgccctttta

SEQ ID NO: 402079 - DNA, 19 bp, Homo sapiens
  siRNA target sequence for FLJ14871 (NM_032854.1,481-499).
cctattgcccttttacgat

SEQ ID NO: 402080 - DNA, 19 bp, Homo sapiens
  siRNA target sequence for FLJ14871 (NM_032854.1,824-842).
gccgaacccgtgctcattt

SEQ ID NO: 402081 - DNA, 19 bp, Homo sapiens
  siRNA target sequence for FLJ14888 (NM_032856.1,43-61).
cgcttgtaccaggatttct

SEQ ID NO: 402082 - DNA, 19 bp, Homo sapiens
  siRNA target sequence for FLJ14888 (NM_032856.1,86-104).
ctcgagtccttgaatggat

SEQ ID NO: 402083 - DNA, 19 bp, Homo sapiens
  siRNA target sequence for FLJ14888 (NM_032856.1,206-224).
gcttattcccagaaagaga

SEQ ID NO: 402084 - DNA, 19 bp, Homo sapiens
  siRNA target sequence for FLJ14888 (NM_032856.1,213-231).
cccagaaagagatttcaaa

SEQ ID NO: 402085 - DNA, 19 bp, Homo sapiens
  siRNA target sequence for FLJ14888 (NM_032856.1,232-250).
gtgcgccatggaggatttt

SEQ ID NO: 402086 - DNA, 19 bp, Homo sapiens
  siRNA target sequence for FLJ14888 (NM_032856.1,311-329).
gccttccaggttgttatct

SEQ ID NO: 402087 - DNA, 19 bp, Homo sapiens
  siRNA target sequence for FLJ14888 (NM_032856.1,349-367).
gaggacagtgatgtcatta

SEQ ID NO: 402088 - DNA, 19 bp, Homo sapiens
  siRNA target sequence for FLJ14888 (NM_032856.1,476-494).
gtctgcaggtcgttgatct

SEQ ID NO: 402089 - DNA, 19 bp, Homo sapiens
  siRNA target sequence for FLJ14888 (NM_032856.1,741-759).
ctcagatgggcgtctttgt

SEQ ID NO: 402090 - DNA, 19 bp, Homo sapiens
  siRNA target sequence for FLJ14888 (NM_032856.1,743-761).
cagatgggcgtctttgtct

SEQ ID NO: 402091 - DNA, 19 bp, Homo sapiens
  siRNA target sequence for FLJ14888 (NM_032856.1,876-894).
cttggccatctcaggtttt

SEQ ID NO: 402092 - DNA, 19 bp, Homo sapiens
  siRNA target sequence for FLJ14888 (NM_032856.1,910-928).
gtctatgatgccacatctt

SEQ ID NO: 402093 - DNA, 19 bp, Homo sapiens
  siRNA target sequence for FLJ14888 (NM_032856.1,953-971).
gaacacggagccaagtaga

SEQ ID NO: 402094 - DNA, 19 bp, Homo sapiens
  siRNA target sequence for FLJ14888 (NM_032856.1,996-1014).
catcttcctagatggaaat

SEQ ID NO: 402095 - DNA, 19 bp, Homo sapiens
  siRNA target sequence for FLJ14904 (NM_032858.1,88-106).
ccagccggaatgcttacta

SEQ ID NO: 402096 - DNA, 19 bp, Homo sapiens
  siRNA target sequence for FLJ14904 (NM_032858.1,89-107).
cagccggaatgcttactat

SEQ ID NO: 402097 - DNA, 19 bp, Homo sapiens
  siRNA target sequence for FLJ14904 (NM_032858.1,91-109).
gccggaatgcttactattt

SEQ ID NO: 402098 - DNA, 19 bp, Homo sapiens
  siRNA target sequence for FLJ14904 (NM_032858.1,93-111).
cggaatgcttactatttct

SEQ ID NO: 402099 - DNA, 19 bp, Homo sapiens
  siRNA target sequence for FLJ14904 (NM_032858.1,325-343).
caggcatgcttgtaccaaa

SEQ ID NO: 402100 - DNA, 19 bp, Homo sapiens
  siRNA target sequence for FLJ14904 (NM_032858.1,351-369).
gtttcacctccagatatgt

SEQ ID NO: 402101 - DNA, 19 bp, Homo sapiens
  siRNA target sequence for FLJ14904 (NM_032858.1,467-485).
gcgcttcctcccttgtgaa

SEQ ID NO: 402102 - DNA, 19 bp, Homo sapiens
  siRNA target sequence for FLJ14904 (NM_032858.1,481-499).
gtgaaattggctgtgttaa

SEQ ID NO: 402103 - DNA, 19 bp, Homo sapiens
  siRNA target sequence for FLJ14904 (NM_032858.1,533-551).
ccacagttttataaatcct

SEQ ID NO: 402104 - DNA, 19 bp, Homo sapiens
  siRNA target sequence for FLJ14904 (NM_032858.1,562-580).
cacgaggatttcgatttca

SEQ ID NO: 402105 - DNA, 19 bp, Homo sapiens
  siRNA target sequence for FLJ14904 (NM_032858.1,587-605).
ggctgcaagtgattctagt

SEQ ID NO: 402106 - DNA, 19 bp, Homo sapiens
  siRNA target sequence for FLJ14904 (NM_032858.1,601-619).
ctagtcacaagattcctat

SEQ ID NO: 402107 - DNA, 19 bp, Homo sapiens
  siRNA target sequence for FLJ14904 (NM_032858.1,644-662).
ccaagcaactgtgttacaa

SEQ ID NO: 402108 - DNA, 19 bp, Homo sapiens
  siRNA target sequence for FLJ14904 (NM_032858.1,652-670).
ctgtgttacaaaaccttta

SEQ ID NO: 402109 - DNA, 19 bp, Homo sapiens
  siRNA target sequence for FLJ14904 (NM_032858.1,656-674).
gttacaaaacctttataga

SEQ ID NO: 402110 - DNA, 19 bp, Homo sapiens
  siRNA target sequence for FLJ14904 (NM_032858.1,694-712).
ggaactggccacctatcta

SEQ ID NO: 402111 - DNA, 19 bp, Homo sapiens
  siRNA target sequence for FLJ14904 (NM_032858.1,710-728).
ctactgcaagtctgatgat

SEQ ID NO: 402112 - DNA, 19 bp, Homo sapiens
  siRNA target sequence for FLJ14904 (NM_032858.1,779-797).
caggcaagatctacaactt

SEQ ID NO: 402113 - DNA, 19 bp, Homo sapiens
  siRNA target sequence for FLJ14904 (NM_032858.1,802-820).
ctgtagaggaccttgtagt

SEQ ID NO: 402114 - DNA, 19 bp, Homo sapiens
  siRNA target sequence for FLJ14904 (NM_032858.1,819-837).
gtggggatctaccaacaaa

SEQ ID NO: 402115 - DNA, 19 bp, Homo sapiens
  siRNA target sequence for FLJ14904 (NM_032858.1,851-869).
gccctctaagacttggatt

SEQ ID NO: 402116 - DNA, 19 bp, Homo sapiens
  siRNA target sequence for FLJ14904 (NM_032858.1,887-905).
ggccatgtgggattattct

SEQ ID NO: 402117 - DNA, 19 bp, Homo sapiens
  siRNA target sequence for FLJ14904 (NM_032858.1,888-906).
gccatgtgggattattcta

SEQ ID NO: 402118 - DNA, 19 bp, Homo sapiens
  siRNA target sequence for FLJ14904 (NM_032858.1,978-996).
gcgtactgcatcagtaatt

SEQ ID NO: 402119 - DNA, 19 bp, Homo sapiens
  siRNA target sequence for FLJ14904 (NM_032858.1,1022-1040).
gctcacagaggctcatgta

SEQ ID NO: 402120 - DNA, 19 bp, Homo sapiens
  siRNA target sequence for FLJ14904 (NM_032858.1,1031-1049).
ggctcatgtaccactacaa

SEQ ID NO: 402121 - DNA, 19 bp, Homo sapiens
  siRNA target sequence for FLJ14904 (NM_032858.1,1033-1051).
ctcatgtaccactacaaga

SEQ ID NO: 402122 - DNA, 19 bp, Homo sapiens
  siRNA target sequence for FLJ14904 (NM_032858.1,1035-1053).
catgtaccactacaagatt

SEQ ID NO: 402123 - DNA, 19 bp, Homo sapiens
  siRNA target sequence for FLJ14904 (NM_032858.1,1069-1087).
gtgtgacacccaaaatggt

SEQ ID NO: 402124 - DNA, 19 bp, Homo sapiens
  siRNA target sequence for FLJ14904 (NM_032858.1,1101-1119).
gggcgttaccagaagctaa

SEQ ID NO: 402125 - DNA, 19 bp, Homo sapiens
  siRNA target sequence for FLJ14904 (NM_032858.1,1196-1214).
cccatctagggcaaaaatt

SEQ ID NO: 402126 - DNA, 19 bp, Homo sapiens
  siRNA target sequence for FLJ14904 (NM_032858.1,1232-1250).
cgttcggggaagaggaatt

SEQ ID NO: 402127 - DNA, 19 bp, Homo sapiens
  siRNA target sequence for FLJ14904 (NM_032858.1,1233-1251).
gttcggggaagaggaatta

SEQ ID NO: 402128 - DNA, 19 bp, Homo sapiens
  siRNA target sequence for FLJ14904 (NM_032858.1,1246-1264).
gaattacccgcttactaga

SEQ ID NO: 402129 - DNA, 19 bp, Homo sapiens
  siRNA target sequence for FLJ14904 (NM_032858.1,1260-1278).
ctagagagcatttccaatt

SEQ ID NO: 402130 - DNA, 19 bp, Homo sapiens
  siRNA target sequence for FLJ14904 (NM_032858.1,1282-1300).
ccagcaatatccacaaatt

SEQ ID NO: 402131 - DNA, 19 bp, Homo sapiens
  siRNA target sequence for FLJ14904 (NM_032858.1,1327-1345).
cttacatgtcccaaaaaga

SEQ ID NO: 402132 - DNA, 19 bp, Homo sapiens
  siRNA target sequence for FLJ14904 (NM_032858.1,1347-1365).
ggatacaaatctttctctt

SEQ ID NO: 402133 - DNA, 19 bp, Homo sapiens
  siRNA target sequence for C6orf93 (NM_032860.3,118-136).
ggaagaaaaagccctttat

SEQ ID NO: 402134 - DNA, 19 bp, Homo sapiens
  siRNA target sequence for C6orf93 (NM_032860.3,119-137).
gaagaaaaagccctttata

SEQ ID NO: 402135 - DNA, 19 bp, Homo sapiens
  siRNA target sequence for C6orf93 (NM_032860.3,176-194).
gagccaacgagatccttta

SEQ ID NO: 402136 - DNA, 19 bp, Homo sapiens
  siRNA target sequence for C6orf93 (NM_032860.3,210-228).
gcaccccagagggttctat

SEQ ID NO: 402137 - DNA, 19 bp, Homo sapiens
  siRNA target sequence for C6orf93 (NM_032860.3,222-240).
gttctattgcccacacaaa

SEQ ID NO: 402138 - DNA, 19 bp, Homo sapiens
  siRNA target sequence for C6orf93 (NM_032860.3,334-352).
ctgggccttcagagcttat

SEQ ID NO: 402139 - DNA, 19 bp, Homo sapiens
  siRNA target sequence for C6orf93 (NM_032860.3,345-363).
gagcttattccctcaagta

SEQ ID NO: 402140 - DNA, 19 bp, Homo sapiens
  siRNA target sequence for C6orf93 (NM_032860.3,502-520).
caggacctcgactggattt

SEQ ID NO: 402141 - DNA, 19 bp, Homo sapiens
  siRNA target sequence for C6orf93 (NM_032860.3,530-548).
cattgttgcagctcttgat

SEQ ID NO: 402142 - DNA, 19 bp, Homo sapiens
  siRNA target sequence for C6orf93 (NM_032860.3,695-713).
gaagggagatagcaatgat

SEQ ID NO: 402143 - DNA, 19 bp, Homo sapiens
  siRNA target sequence for C6orf93 (NM_032860.3,722-740).
ctctgcaggcctattgtca

SEQ ID NO: 402144 - DNA, 19 bp, Homo sapiens
  siRNA target sequence for C6orf93 (NM_032860.3,755-773).
gtctgtgcccggaaaaact

SEQ ID NO: 402145 - DNA, 19 bp, Homo sapiens
  siRNA target sequence for C6orf93 (NM_032860.3,778-796).
gagctatagcagatcactt

SEQ ID NO: 402146 - DNA, 19 bp, Homo sapiens
  siRNA target sequence for C6orf93 (NM_032860.3,823-841).
gcttcacggagtattcgat

SEQ ID NO: 402147 - DNA, 19 bp, Homo sapiens
  siRNA target sequence for C6orf93 (NM_032860.3,899-917).
gaagttttatgagcaatat

SEQ ID NO: 402148 - DNA, 19 bp, Homo sapiens
  siRNA target sequence for C6orf93 (NM_032860.3,902-920).
gttttatgagcaatatgat

SEQ ID NO: 402149 - DNA, 19 bp, Homo sapiens
  siRNA target sequence for C6orf93 (NM_032860.3,996-1014).
gttttgaatgactactata

SEQ ID NO: 402150 - DNA, 19 bp, Homo sapiens
  siRNA target sequence for C6orf93 (NM_032860.3,1078-1096).
caatgaatgagcttgatga

SEQ ID NO: 402151 - DNA, 19 bp, Homo sapiens
  siRNA target sequence for C6orf93 (NM_032860.3,1145-1163).
gaagtgggattgtgaatct

SEQ ID NO: 402152 - DNA, 19 bp, Homo sapiens
  siRNA target sequence for C6orf93 (NM_032860.3,1148-1166).
gtgggattgtgaatctatt

SEQ ID NO: 402153 - DNA, 19 bp, Homo sapiens
  siRNA target sequence for C6orf93 (NM_032860.3,1158-1176).
gaatctatttgtagtacat

SEQ ID NO: 402154 - DNA, 19 bp, Homo sapiens
  siRNA target sequence for C6orf93 (NM_032860.3,1194-1212).
catccacagcttatcaagt

SEQ ID NO: 402155 - DNA, 19 bp, Homo sapiens
  siRNA target sequence for C6orf93 (NM_032860.3,1198-1216).
cacagcttatcaagtatca

SEQ ID NO: 402156 - DNA, 19 bp, Homo sapiens
  siRNA target sequence for C6orf93 (NM_032860.3,1223-1241).
gcccaaacaaattcgaata

SEQ ID NO: 402157 - DNA, 19 bp, Homo sapiens
  siRNA target sequence for C6orf93 (NM_032860.3,1224-1242).
cccaaacaaattcgaatat

SEQ ID NO: 402158 - DNA, 19 bp, Homo sapiens
  siRNA target sequence for C6orf93 (NM_032860.3,1226-1244).
caaacaaattcgaatatct

SEQ ID NO: 402159 - DNA, 19 bp, Homo sapiens
  siRNA target sequence for C6orf93 (NM_032860.3,1230-1248).
caaattcgaatatcttcta

SEQ ID NO: 402160 - DNA, 19 bp, Homo sapiens
  siRNA target sequence for C6orf93 (NM_032860.3,1255-1273).
gaatacctctcaatgtctt

SEQ ID NO: 402161 - DNA, 19 bp, Homo sapiens
  siRNA target sequence for C6orf93 (NM_032860.3,1260-1278).
cctctcaatgtcttaccaa

SEQ ID NO: 402162 - DNA, 19 bp, Homo sapiens
  siRNA target sequence for C6orf93 (NM_032860.3,1284-1302).
ggactcacagcaaagcaaa

SEQ ID NO: 402163 - DNA, 19 bp, Homo sapiens
  siRNA target sequence for C6orf93 (NM_032860.3,1305-1323).
gaaagaatacagatgatta

SEQ ID NO: 402164 - DNA, 19 bp, Homo sapiens
  siRNA target sequence for C6orf93 (NM_032860.3,1327-1345).
gcagtgatcttcctaaagt

SEQ ID NO: 402165 - DNA, 19 bp, Homo sapiens
  siRNA target sequence for C6orf93 (NM_032860.3,1332-1350).
gatcttcctaaagtatcaa

SEQ ID NO: 402166 - DNA, 19 bp, Homo sapiens
  siRNA target sequence for C6orf93 (NM_032860.3,1348-1366).
caactcagccacgttctaa

SEQ ID NO: 402167 - DNA, 19 bp, Homo sapiens
  siRNA target sequence for C6orf93 (NM_032860.3,1351-1369).
ctcagccacgttctaaaaa

SEQ ID NO: 402168 - DNA, 19 bp, Homo sapiens
  siRNA target sequence for C6orf93 (NM_032860.3,1515-1533).
gttgagggtctaaagctat

SEQ ID NO: 402169 - DNA, 19 bp, Homo sapiens
  siRNA target sequence for FLJ14936 (NM_032864.2,262-280).
cgaacgcgaatctatgagt

SEQ ID NO: 402170 - DNA, 19 bp, Homo sapiens
  siRNA target sequence for FLJ14936 (NM_032864.2,317-335).
ctgaacttgtagtcgataa

SEQ ID NO: 402171 - DNA, 19 bp, Homo sapiens
  siRNA target sequence for FLJ14936 (NM_032864.2,366-384).
ctatggtggcaacataaaa

SEQ ID NO: 402172 - DNA, 19 bp, Homo sapiens
  siRNA target sequence for FLJ14936 (NM_032864.2,370-388).
ggtggcaacataaaaccaa

SEQ ID NO: 402173 - DNA, 19 bp, Homo sapiens
  siRNA target sequence for FLJ14936 (NM_032864.2,427-445).
caacccgagaaggatatca

SEQ ID NO: 402174 - DNA, 19 bp, Homo sapiens
  siRNA target sequence for FLJ14936 (NM_032864.2,431-449).
ccgagaaggatatcattgt

SEQ ID NO: 402175 - DNA, 19 bp, Homo sapiens
  siRNA target sequence for FLJ14936 (NM_032864.2,432-450).
cgagaaggatatcattgta

SEQ ID NO: 402176 - DNA, 19 bp, Homo sapiens
  siRNA target sequence for FLJ14936 (NM_032864.2,485-503).
gcatgctgggggcacttta

SEQ ID NO: 402177 - DNA, 19 bp, Homo sapiens
  siRNA target sequence for FLJ14936 (NM_032864.2,510-528).
gctgacaggcactgcaatt

SEQ ID NO: 402178 - DNA, 19 bp, Homo sapiens
  siRNA target sequence for FLJ14936 (NM_032864.2,588-606).
ccgaaatggggagtttgaa

SEQ ID NO: 402179 - DNA, 19 bp, Homo sapiens
  siRNA target sequence for FLJ14936 (NM_032864.2,589-607).
cgaaatggggagtttgaat

SEQ ID NO: 402180 - DNA, 19 bp, Homo sapiens
  siRNA target sequence for FLJ14936 (NM_032864.2,651-669).
gagagtctgtgatatcatt

SEQ ID NO: 402181 - DNA, 19 bp, Homo sapiens
  siRNA target sequence for FLJ14957 (NM_032866.2,85-103).
gtatttcggtgaatatcaa

SEQ ID NO: 402182 - DNA, 19 bp, Homo sapiens
  siRNA target sequence for FLJ14957 (NM_032866.2,189-207).
gctcctacggtgtcagtat

SEQ ID NO: 402183 - DNA, 19 bp, Homo sapiens
  siRNA target sequence for FLJ14957 (NM_032866.2,190-208).
ctcctacggtgtcagtatt

SEQ ID NO: 402184 - DNA, 19 bp, Homo sapiens
  siRNA target sequence for FLJ14957 (NM_032866.2,265-283).
cctagcaggcacatcgttt

SEQ ID NO: 402185 - DNA, 19 bp, Homo sapiens
  siRNA target sequence for FLJ14957 (NM_032866.2,266-284).
ctagcaggcacatcgtttt

SEQ ID NO: 402186 - DNA, 19 bp, Homo sapiens
  siRNA target sequence for FLJ14957 (NM_032866.2,272-290).
ggcacatcgttttctgaaa

SEQ ID NO: 402187 - DNA, 19 bp, Homo sapiens
  siRNA target sequence for FLJ14957 (NM_032866.2,274-292).
cacatcgttttctgaaaat

SEQ ID NO: 402188 - DNA, 19 bp, Homo sapiens
  siRNA target sequence for FLJ14957 (NM_032866.2,401-419).
gcccagcctagcccaataa

SEQ ID NO: 402189 - DNA, 19 bp, Homo sapiens
  siRNA target sequence for FLJ14957 (NM_032866.2,403-421).
ccagcctagcccaataaga

SEQ ID NO: 402190 - DNA, 19 bp, Homo sapiens
  siRNA target sequence for FLJ14957 (NM_032866.2,404-422).
cagcctagcccaataagaa

SEQ ID NO: 402191 - DNA, 19 bp, Homo sapiens
  siRNA target sequence for FLJ14957 (NM_032866.2,516-534).
ggcatccagagcttttgca

SEQ ID NO: 402192 - DNA, 19 bp, Homo sapiens
  siRNA target sequence for FLJ14957 (NM_032866.2,517-535).
gcatccagagcttttgcaa

SEQ ID NO: 402193 - DNA, 19 bp, Homo sapiens
  siRNA target sequence for FLJ14957 (NM_032866.2,591-609).
gtaattggctaaaaacgtt

SEQ ID NO: 402194 - DNA, 19 bp, Homo sapiens
  siRNA target sequence for FLJ14957 (NM_032866.2,710-728).
ggtgtgacagctattcgtt

SEQ ID NO: 402195 - DNA, 19 bp, Homo sapiens
  siRNA target sequence for FLJ14957 (NM_032866.2,711-729).
gtgtgacagctattcgttt

SEQ ID NO: 402196 - DNA, 19 bp, Homo sapiens
  siRNA target sequence for FLJ14957 (NM_032866.2,732-750).
gcagctccgtggtcataga

SEQ ID NO: 402197 - DNA, 19 bp, Homo sapiens
  siRNA target sequence for FLJ14957 (NM_032866.2,768-786).
cctcagtgtgtgtaaacgt

SEQ ID NO: 402198 - DNA, 19 bp, Homo sapiens
  siRNA target sequence for FLJ14957 (NM_032866.2,984-1002).
ccacgtcagccaactcttt

SEQ ID NO: 402199 - DNA, 19 bp, Homo sapiens
  siRNA target sequence for FLJ14957 (NM_032866.2,987-1005).
cgtcagccaactctttgta

SEQ ID NO: 402200 - DNA, 19 bp, Homo sapiens
  siRNA target sequence for FLJ14957 (NM_032866.2,1048-1066).
caacgtcaatcgtcatgaa

SEQ ID NO: 402201 - DNA, 19 bp, Homo sapiens
  siRNA target sequence for FLJ14957 (NM_032866.2,1095-1113).
gaactggacgggatattga

SEQ ID NO: 402202 - DNA, 19 bp, Homo sapiens
  siRNA target sequence for FLJ14957 (NM_032866.2,1127-1145).
cctggtgtggatcagttaa

SEQ ID NO: 402203 - DNA, 19 bp, Homo sapiens
  siRNA target sequence for FLJ14957 (NM_032866.2,1131-1149).
gtgtggatcagttaattga

SEQ ID NO: 402204 - DNA, 19 bp, Homo sapiens
  siRNA target sequence for FLJ14957 (NM_032866.2,1133-1151).
gtggatcagttaattgaaa

SEQ ID NO: 402205 - DNA, 19 bp, Homo sapiens
  siRNA target sequence for FLJ14957 (NM_032866.2,1189-1207).
gtctgggaagcgaaacaga

SEQ ID NO: 402206 - DNA, 19 bp, Homo sapiens
  siRNA target sequence for FLJ14957 (NM_032866.2,1241-1259).
gtggatagcgcctttcctt

SEQ ID NO: 402207 - DNA, 19 bp, Homo sapiens
  siRNA target sequence for FLJ14957 (NM_032866.2,1243-1261).
ggatagcgcctttcctttt

SEQ ID NO: 402208 - DNA, 19 bp, Homo sapiens
  siRNA target sequence for FLJ14957 (NM_032866.2,1278-1296).
cggagtacctgattgaatt

SEQ ID NO: 402209 - DNA, 19 bp, Homo sapiens
  siRNA target sequence for FLJ14957 (NM_032866.2,1280-1298).
gagtacctgattgaattca

SEQ ID NO: 402210 - DNA, 19 bp, Homo sapiens
  siRNA target sequence for FLJ14957 (NM_032866.2,1282-1300).
gtacctgattgaattcagt

SEQ ID NO: 402211 - DNA, 19 bp, Homo sapiens
  siRNA target sequence for FLJ14957 (NM_032866.2,1456-1474).
gcctccccagccgaacata

SEQ ID NO: 402212 - DNA, 19 bp, Homo sapiens
  siRNA target sequence for FLJ14957 (NM_032866.2,1458-1476).
ctccccagccgaacataga

SEQ ID NO: 402213 - DNA, 19 bp, Homo sapiens
  siRNA target sequence for FLJ14957 (NM_032866.2,1533-1551).
cccttggtgcacagagtaa

SEQ ID NO: 402214 - DNA, 19 bp, Homo sapiens
  siRNA target sequence for FLJ14957 (NM_032866.2,1534-1552).
ccttggtgcacagagtaaa

SEQ ID NO: 402215 - DNA, 19 bp, Homo sapiens
  siRNA target sequence for FLJ14957 (NM_032866.2,1535-1553).
cttggtgcacagagtaaaa

SEQ ID NO: 402216 - DNA, 19 bp, Homo sapiens
  siRNA target sequence for FLJ14957 (NM_032866.2,1575-1593).
ccaccgctacgctgatgtt

SEQ ID NO: 402217 - DNA, 19 bp, Homo sapiens
  siRNA target sequence for FLJ14957 (NM_032866.2,1576-1594).
caccgctacgctgatgtta

SEQ ID NO: 402218 - DNA, 19 bp, Homo sapiens
  siRNA target sequence for FLJ14957 (NM_032866.2,1578-1596).
ccgctacgctgatgttaca

SEQ ID NO: 402219 - DNA, 19 bp, Homo sapiens
  siRNA target sequence for FLJ14957 (NM_032866.2,1580-1598).
gctacgctgatgttacaga

SEQ ID NO: 402220 - DNA, 19 bp, Homo sapiens
  siRNA target sequence for FLJ14957 (NM_032866.2,1581-1599).
ctacgctgatgttacagaa

SEQ ID NO: 402221 - DNA, 19 bp, Homo sapiens
  siRNA target sequence for FLJ14957 (NM_032866.2,1659-1677).
cttcggcctcaaatactca

SEQ ID NO: 402222 - DNA, 19 bp, Homo sapiens
  siRNA target sequence for FLJ14957 (NM_032866.2,1679-1697).
gccacaccggatctcttaa

SEQ ID NO: 402223 - DNA, 19 bp, Homo sapiens
  siRNA target sequence for FLJ14957 (NM_032866.2,1680-1698).
ccacaccggatctcttaaa

SEQ ID NO: 402224 - DNA, 19 bp, Homo sapiens
  siRNA target sequence for FLJ14957 (NM_032866.2,1711-1729).
gctcactcagcaaaccaat

SEQ ID NO: 402225 - DNA, 19 bp, Homo sapiens
  siRNA target sequence for FLJ14957 (NM_032866.2,1737-1755).
cagctaagcagattctcta

SEQ ID NO: 402226 - DNA, 19 bp, Homo sapiens
  siRNA target sequence for FLJ14957 (NM_032866.2,1740-1758).
ctaagcagattctctacaa

SEQ ID NO: 402227 - DNA, 19 bp, Homo sapiens
  siRNA target sequence for FLJ14957 (NM_032866.2,1808-1826).
gtcaacttggtctttgaga

SEQ ID NO: 402228 - DNA, 19 bp, Homo sapiens
  siRNA target sequence for FLJ14957 (NM_032866.2,1896-1914).
ctgaagtcaaagatctatt

SEQ ID NO: 402229 - DNA, 19 bp, Homo sapiens
  siRNA target sequence for FLJ14957 (NM_032866.2,1910-1928).
ctattggaacagaaaagca

SEQ ID NO: 402230 - DNA, 19 bp, Homo sapiens
  siRNA target sequence for FLJ14957 (NM_032866.2,1978-1996).
caagaatcaacagaacatt

SEQ ID NO: 402231 - DNA, 19 bp, Homo sapiens
  siRNA target sequence for FLJ14957 (NM_032866.2,2011-2029).
gaggatgagagcaaaccta

SEQ ID NO: 402232 - DNA, 19 bp, Homo sapiens
  siRNA target sequence for FLJ14957 (NM_032866.2,2081-2099).
cagcaacgactggaagaaa

SEQ ID NO: 402233 - DNA, 19 bp, Homo sapiens
  siRNA target sequence for FLJ14957 (NM_032866.2,2495-2513).
gcgagcaggagcaacactt

SEQ ID NO: 402234 - DNA, 19 bp, Homo sapiens
  siRNA target sequence for FLJ14957 (NM_032866.2,2680-2698).
gtacgagggagaaatacga

SEQ ID NO: 402235 - DNA, 19 bp, Homo sapiens
  siRNA target sequence for FLJ14957 (NM_032866.2,2686-2704).
gggagaaatacgacagtta

SEQ ID NO: 402236 - DNA, 19 bp, Homo sapiens
  siRNA target sequence for FLJ14957 (NM_032866.2,2688-2706).
gagaaatacgacagttaga

SEQ ID NO: 402237 - DNA, 19 bp, Homo sapiens
  siRNA target sequence for FLJ14957 (NM_032866.2,2907-2925).
ggcacctgggcaaaaccat

SEQ ID NO: 402238 - DNA, 19 bp, Homo sapiens
  siRNA target sequence for FLJ14957 (NM_032866.2,2916-2934).
gcaaaaccattgagaaact

SEQ ID NO: 402239 - DNA, 19 bp, Homo sapiens
  siRNA target sequence for FLJ14957 (NM_032866.2,2992-3010).
gaaccagctggatgagtat

SEQ ID NO: 402240 - DNA, 19 bp, Homo sapiens
  siRNA target sequence for FLJ14957 (NM_032866.2,3027-3045).
gggagctcgcagaaatgca

SEQ ID NO: 402241 - DNA, 19 bp, Homo sapiens
  siRNA target sequence for FLJ14957 (NM_032866.2,3085-3103).
ccgactgacagccatgaaa

SEQ ID NO: 402242 - DNA, 19 bp, Homo sapiens
  siRNA target sequence for FLJ14957 (NM_032866.2,3160-3178).
ggatgaagcactcacaaaa

SEQ ID NO: 402243 - DNA, 19 bp, Homo sapiens
  siRNA target sequence for FLJ14957 (NM_032866.2,3318-3336).
gaaacaactcagatttgct

SEQ ID NO: 402244 - DNA, 19 bp, Homo sapiens
  siRNA target sequence for FLJ14957 (NM_032866.2,3402-3420).
gagctgcgagacaagactt

SEQ ID NO: 402245 - DNA, 19 bp, Homo sapiens
  siRNA target sequence for FLJ14957 (NM_032866.2,3418-3436).
cttggagtgcgacaagatt

SEQ ID NO: 402246 - DNA, 19 bp, Homo sapiens
  siRNA target sequence for FLJ14957 (NM_032866.2,3574-3592).
gagggatcgggccaatctt

SEQ ID NO: 402247 - DNA, 19 bp, Homo sapiens
  siRNA target sequence for FLJ14957 (NM_032866.2,3576-3594).
gggatcgggccaatcttca

SEQ ID NO: 402248 - DNA, 19 bp, Homo sapiens
  siRNA target sequence for FLJ14957 (NM_032866.2,3608-3626).
cggctggagcggaaagtga

SEQ ID NO: 402249 - DNA, 19 bp, Homo sapiens
  siRNA target sequence for FLJ14957 (NM_032866.2,3742-3760).
cgacagactggaaagttct

SEQ ID NO: 402250 - DNA, 19 bp, Homo sapiens
  siRNA target sequence for FLJ14957 (NM_032866.2,3743-3761).
gacagactggaaagttcta

SEQ ID NO: 402251 - DNA, 19 bp, Homo sapiens
  siRNA target sequence for FLJ14957 (NM_032866.2,3853-3871).
gaagaagctgccgagtaaa

SEQ ID NO: 402252 - DNA, 19 bp, Homo sapiens
  siRNA target sequence for FLJ14957 (NM_032866.2,3933-3951).
cgcctgtgagctacacatt

SEQ ID NO: 402253 - DNA, 19 bp, Homo sapiens
  siRNA target sequence for FLJ14966 (NM_032867.1,233-251).
gcgaatttcccagaaaagt

SEQ ID NO: 402254 - DNA, 19 bp, Homo sapiens
  siRNA target sequence for FLJ14966 (NM_032867.1,265-283).
gaggaggccgtgtgctaaa

SEQ ID NO: 402255 - DNA, 19 bp, Homo sapiens
  siRNA target sequence for FLJ14966 (NM_032867.1,545-563).
cagccttcggaaaaccaat

SEQ ID NO: 402256 - DNA, 19 bp, Homo sapiens
  siRNA target sequence for FLJ14966 (NM_032867.1,549-567).
cttcggaaaaccaattcca

SEQ ID NO: 402257 - DNA, 19 bp, Homo sapiens
  siRNA target sequence for FLJ14966 (NM_032867.1,731-749).
cgagaaagtgagtttgcaa

SEQ ID NO: 402258 - DNA, 19 bp, Homo sapiens
  siRNA target sequence for FLJ14966 (NM_032867.1,766-784).
cttctaagcctccaaagaa

SEQ ID NO: 402259 - DNA, 19 bp, Homo sapiens
  siRNA target sequence for FLJ14966 (NM_032867.1,1161-1179).
gagaagaagacacttagaa

SEQ ID NO: 402260 - DNA, 19 bp, Homo sapiens
  siRNA target sequence for FLJ14966 (NM_032867.1,1200-1218).
gcaatgaagcagttggtta

SEQ ID NO: 402261 - DNA, 19 bp, Homo sapiens
  siRNA target sequence for FLJ14966 (NM_032867.1,1373-1391).
gcttttgcaggaatggttt

SEQ ID NO: 402262 - DNA, 19 bp, Homo sapiens
  siRNA target sequence for FLJ14966 (NM_032867.1,1374-1392).
cttttgcaggaatggttta

SEQ ID NO: 402263 - DNA, 19 bp, Homo sapiens
  siRNA target sequence for FLJ14966 (NM_032867.1,1428-1446).
gagtcggagctcctaatca

SEQ ID NO: 402264 - DNA, 19 bp, Homo sapiens
  siRNA target sequence for FLJ14966 (NM_032867.1,1448-1466).
ggcccaggaactggaatta

SEQ ID NO: 402265 - DNA, 19 bp, Homo sapiens
  siRNA target sequence for FLJ14966 (NM_032867.1,1570-1588).
ccgagctgatgcaagtgat

SEQ ID NO: 402266 - DNA, 19 bp, Homo sapiens
  siRNA target sequence for FLJ14966 (NM_032867.1,1601-1619).
caaactcgtcgattcctta

SEQ ID NO: 402267 - DNA, 19 bp, Homo sapiens
  siRNA target sequence for FLJ14966 (NM_032867.1,1623-1641).
gaacaacgcatcagagaaa

SEQ ID NO: 402268 - DNA, 19 bp, Homo sapiens
  siRNA target sequence for FLJ14966 (NM_032867.1,1646-1664).
cgaggaccagcactttgaa

SEQ ID NO: 402269 - DNA, 19 bp, Homo sapiens
  siRNA target sequence for FLJ14966 (NM_032867.1,1656-1674).
cactttgaaagcttcgtat

SEQ ID NO: 402270 - DNA, 19 bp, Homo sapiens
  siRNA target sequence for FLJ14981 (NM_032868.2,459-477).
ggcctctgtcaagtacaaa

SEQ ID NO: 402271 - DNA, 19 bp, Homo sapiens
  siRNA target sequence for FLJ14981 (NM_032868.2,789-807).
ggtggaagtaacatccttt

SEQ ID NO: 402272 - DNA, 19 bp, Homo sapiens
  siRNA target sequence for FLJ14981 (NM_032868.2,803-821).
cctttgcagccatcaacaa

SEQ ID NO: 402273 - DNA, 19 bp, Homo sapiens
  siRNA target sequence for FLJ14981 (NM_032868.2,1182-1200).
gctctgctccccttactat

SEQ ID NO: 402274 - DNA, 19 bp, Homo sapiens
  siRNA target sequence for FLJ14981 (NM_032868.2,1334-1352).
cctacctcgacaagcttaa

SEQ ID NO: 402275 - DNA, 19 bp, Homo sapiens
  siRNA target sequence for FLJ14981 (NM_032868.2,1339-1357).
ctcgacaagcttaagatct

SEQ ID NO: 402276 - DNA, 19 bp, Homo sapiens
  siRNA target sequence for CML66 (NM_032869.2,80-98).
gaggtggcggctaattgct

SEQ ID NO: 402277 - DNA, 19 bp, Homo sapiens
  siRNA target sequence for CML66 (NM_032869.2,129-147).
cccgcttcgagggttacaa

SEQ ID NO: 402278 - DNA, 19 bp, Homo sapiens
  siRNA target sequence for CML66 (NM_032869.2,212-230).
cttcgagatgatcaatata

SEQ ID NO: 402279 - DNA, 19 bp, Homo sapiens
  siRNA target sequence for CML66 (NM_032869.2,239-257).
cacatgcatgcttttggaa

SEQ ID NO: 402280 - DNA, 19 bp, Homo sapiens
  siRNA target sequence for CML66 (NM_032869.2,244-262).
gcatgcttttggaatgtat

SEQ ID NO: 402281 - DNA, 19 bp, Homo sapiens
  siRNA target sequence for CML66 (NM_032869.2,274-292).
ctgtgattcatggtatcaa

SEQ ID NO: 402282 - DNA, 19 bp, Homo sapiens
  siRNA target sequence for CML66 (NM_032869.2,276-294).
gtgattcatggtatcaaga

SEQ ID NO: 402283 - DNA, 19 bp, Homo sapiens
  siRNA target sequence for CML66 (NM_032869.2,290-308).
caagacagtgtctactata

SEQ ID NO: 402284 - DNA, 19 bp, Homo sapiens
  siRNA target sequence for CML66 (NM_032869.2,295-313).
cagtgtctactatattgat

SEQ ID NO: 402285 - DNA, 19 bp, Homo sapiens
  siRNA target sequence for CML66 (NM_032869.2,383-401).
cgacttcctacagatttga

SEQ ID NO: 402286 - DNA, 19 bp, Homo sapiens
  siRNA target sequence for CML66 (NM_032869.2,531-549).
gggagattatgtttaatga

SEQ ID NO: 402287 - DNA, 19 bp, Homo sapiens
  siRNA target sequence for CML66 (NM_032869.2,559-577).
ggatccttttattataatt

SEQ ID NO: 402288 - DNA, 19 bp, Homo sapiens
  siRNA target sequence for CML66 (NM_032869.2,602-620).
gaagaacattctatagcta

SEQ ID NO: 402289 - DNA, 19 bp, Homo sapiens
  siRNA target sequence for CML66 (NM_032869.2,612-630).
ctatagctaccctacttct

SEQ ID NO: 402290 - DNA, 19 bp, Homo sapiens
  siRNA target sequence for CML66 (NM_032869.2,618-636).
ctaccctacttcttcgaat

SEQ ID NO: 402291 - DNA, 19 bp, Homo sapiens
  siRNA target sequence for CML66 (NM_032869.2,621-639).
ccctacttcttcgaataga

SEQ ID NO: 402292 - DNA, 19 bp, Homo sapiens
  siRNA target sequence for CML66 (NM_032869.2,658-676).
gaaaggaagtggtttctat

SEQ ID NO: 402293 - DNA, 19 bp, Homo sapiens
  siRNA target sequence for CML66 (NM_032869.2,681-699).
ctctggagtgggtcactat

SEQ ID NO: 402294 - DNA, 19 bp, Homo sapiens
  siRNA target sequence for CML66 (NM_032869.2,683-701).
ctggagtgggtcactatca

SEQ ID NO: 402295 - DNA, 19 bp, Homo sapiens
  siRNA target sequence for CML66 (NM_032869.2,685-703).
ggagtgggtcactatcagt

SEQ ID NO: 402296 - DNA, 19 bp, Homo sapiens
  siRNA target sequence for CML66 (NM_032869.2,686-704).
gagtgggtcactatcagta

SEQ ID NO: 402297 - DNA, 19 bp, Homo sapiens
  siRNA target sequence for CML66 (NM_032869.2,694-712).
cactatcagtaagaaaaat

SEQ ID NO: 402298 - DNA, 19 bp, Homo sapiens
  siRNA target sequence for CML66 (NM_032869.2,783-801).
ctattgagcctgatggaaa

SEQ ID NO: 402299 - DNA, 19 bp, Homo sapiens
  siRNA target sequence for CML66 (NM_032869.2,798-816).
gaaatggtctaatgattgt

SEQ ID NO: 402300 - DNA, 19 bp, Homo sapiens
  siRNA target sequence for CML66 (NM_032869.2,804-822).
gtctaatgattgtatccta

SEQ ID NO: 402301 - DNA, 19 bp, Homo sapiens
  siRNA target sequence for CML66 (NM_032869.2,999-1017).
ctgatcacatcaacattgt

SEQ ID NO: 402302 - DNA, 19 bp, Homo sapiens
  siRNA target sequence for CML66 (NM_032869.2,1021-1039).
gaaggatcaccagttttta

SEQ ID NO: 402303 - DNA, 19 bp, Homo sapiens
  siRNA target sequence for CML66 (NM_032869.2,1051-1069).
ctattcatctattgatcat

SEQ ID NO: 402304 - DNA, 19 bp, Homo sapiens
  siRNA target sequence for CML66 (NM_032869.2,1070-1088).
gaaagcagtacatggataa

SEQ ID NO: 402305 - DNA, 19 bp, Homo sapiens
  siRNA target sequence for CML66 (NM_032869.2,1077-1095).
gtacatggataattaaaga

SEQ ID NO: 402306 - DNA, 19 bp, Homo sapiens
  siRNA target sequence for CML66 (NM_032869.2,1166-1184).
gataaacaaggggaactta

SEQ ID NO: 402307 - DNA, 19 bp, Homo sapiens
  siRNA target sequence for CML66 (NM_032869.2,1206-1224).
ctgcaatagctgaacgttt

SEQ ID NO: 402308 - DNA, 19 bp, Homo sapiens
  siRNA target sequence for CML66 (NM_032869.2,1209-1227).
caatagctgaacgtttgat

SEQ ID NO: 402309 - DNA, 19 bp, Homo sapiens
  siRNA target sequence for CML66 (NM_032869.2,1214-1232).
gctgaacgtttgatgcatt

SEQ ID NO: 402310 - DNA, 19 bp, Homo sapiens
  siRNA target sequence for CML66 (NM_032869.2,1217-1235).
gaacgtttgatgcatttga

SEQ ID NO: 402311 - DNA, 19 bp, Homo sapiens
  siRNA target sequence for CML66 (NM_032869.2,1281-1299).
gcaatgctcaagagttaga

SEQ ID NO: 402312 - DNA, 19 bp, Homo sapiens
  siRNA target sequence for CML66 (NM_032869.2,1327-1345).
ctccagtttatgcagattt

SEQ ID NO: 402313 - DNA, 19 bp, Homo sapiens
  siRNA target sequence for CML66 (NM_032869.2,1386-1404).
gaagcaaccagtacctttt

SEQ ID NO: 402314 - DNA, 19 bp, Homo sapiens
  siRNA target sequence for CML66 (NM_032869.2,1396-1414).
gtaccttttctctgtcata

SEQ ID NO: 402315 - DNA, 19 bp, Homo sapiens
  siRNA target sequence for CML66 (NM_032869.2,1407-1425).
ctgtcatagtggatcctaa

SEQ ID NO: 402316 - DNA, 19 bp, Homo sapiens
  siRNA target sequence for CML66 (NM_032869.2,1443-1461).
gtttgcgccatgatgttga

SEQ ID NO: 402317 - DNA, 19 bp, Homo sapiens
  siRNA target sequence for CML66 (NM_032869.2,1510-1528).
gcacatcgcaactttcaat

SEQ ID NO: 402318 - DNA, 19 bp, Homo sapiens
  siRNA target sequence for CML66 (NM_032869.2,1593-1611).
cgtatgcagccctttgtga

SEQ ID NO: 402319 - DNA, 19 bp, Homo sapiens
  siRNA target sequence for CML66 (NM_032869.2,1616-1634).
cttcgtcgagtattcatct

SEQ ID NO: 402320 - DNA, 19 bp, Homo sapiens
  siRNA target sequence for CML66 (NM_032869.2,1649-1667).
cccatgtccactgtacttt

SEQ ID NO: 402321 - DNA, 19 bp, Homo sapiens
  siRNA target sequence for CML66 (NM_032869.2,1650-1668).
ccatgtccactgtacttta

SEQ ID NO: 402322 - DNA, 19 bp, Homo sapiens
  siRNA target sequence for CML66 (NM_032869.2,1712-1730).
caagtagcaagcctagaaa

SEQ ID NO: 402323 - DNA, 19 bp, Homo sapiens
  siRNA target sequence for CML66 (NM_032869.2,1732-1750).
caatgatcctattttagga

SEQ ID NO: 402324 - DNA, 19 bp, Homo sapiens
  siRNA target sequence for CML66 (NM_032869.2,1758-1776).
caacaaatgagagattatt

SEQ ID NO: 402325 - DNA, 19 bp, Homo sapiens
  siRNA target sequence for C6orf111 (NM_032870.1,182-200).
gcaaagcatggtagaacaa

SEQ ID NO: 402326 - DNA, 19 bp, Homo sapiens
  siRNA target sequence for C6orf111 (NM_032870.1,242-260).
ggaatctggtccaaacaat

SEQ ID NO: 402327 - DNA, 19 bp, Homo sapiens
  siRNA target sequence for C6orf111 (NM_032870.1,279-297).
gattcaaacttcaacagaa

SEQ ID NO: 402328 - DNA, 19 bp, Homo sapiens
  siRNA target sequence for C6orf111 (NM_032870.1,437-455).
ccctgacaacaggcatata

SEQ ID NO: 402329 - DNA, 19 bp, Homo sapiens
  siRNA target sequence for C6orf111 (NM_032870.1,439-457).
ctgacaacaggcatatatt

SEQ ID NO: 402330 - DNA, 19 bp, Homo sapiens
  siRNA target sequence for C6orf111 (NM_032870.1,480-498).
ggtggaccacccgataatt

SEQ ID NO: 402331 - DNA, 19 bp, Homo sapiens
  siRNA target sequence for C6orf111 (NM_032870.1,481-499).
gtggaccacccgataattt

SEQ ID NO: 402332 - DNA, 19 bp, Homo sapiens
  siRNA target sequence for C6orf111 (NM_032870.1,510-528).
ccagtgaaccagtttgact

SEQ ID NO: 402333 - DNA, 19 bp, Homo sapiens
  siRNA target sequence for C6orf111 (NM_032870.1,511-529).
cagtgaaccagtttgacta

SEQ ID NO: 402334 - DNA, 19 bp, Homo sapiens
  siRNA target sequence for C6orf111 (NM_032870.1,533-551).
gcatggggctgcttttggt

SEQ ID NO: 402335 - DNA, 19 bp, Homo sapiens
  siRNA target sequence for C6orf111 (NM_032870.1,553-571).
caccgcaaggtggatttca

SEQ ID NO: 402336 - DNA, 19 bp, Homo sapiens
  siRNA target sequence for C6orf111 (NM_032870.1,564-582).
ggatttcatcctccttatt

SEQ ID NO: 402337 - DNA, 19 bp, Homo sapiens
  siRNA target sequence for C6orf111 (NM_032870.1,609-627).
gcacctccccagaatcgaa

SEQ ID NO: 402338 - DNA, 19 bp, Homo sapiens
  siRNA target sequence for C6orf111 (NM_032870.1,737-755).
gattcgcgaaggtcttgaa

SEQ ID NO: 402339 - DNA, 19 bp, Homo sapiens
  siRNA target sequence for C6orf111 (NM_032870.1,800-818).
ggaacaacaacgttcacaa

SEQ ID NO: 402340 - DNA, 19 bp, Homo sapiens
  siRNA target sequence for C6orf111 (NM_032870.1,863-881).
ggatggccctcgtttacct

SEQ ID NO: 402341 - DNA, 19 bp, Homo sapiens
  siRNA target sequence for C6orf111 (NM_032870.1,1041-1059).
ctgacaaaaatgcttctaa

SEQ ID NO: 402342 - DNA, 19 bp, Homo sapiens
  siRNA target sequence for C6orf111 (NM_032870.1,1043-1061).
gacaaaaatgcttctaaca

SEQ ID NO: 402343 - DNA, 19 bp, Homo sapiens
  siRNA target sequence for C6orf111 (NM_032870.1,1045-1063).
caaaaatgcttctaacaga

SEQ ID NO: 402344 - DNA, 19 bp, Homo sapiens
  siRNA target sequence for C6orf111 (NM_032870.1,1187-1205).
cggtggactgggtggttat

SEQ ID NO: 402345 - DNA, 19 bp, Homo sapiens
  siRNA target sequence for C6orf111 (NM_032870.1,1280-1298).
gcatcgaatccggcaaaaa

SEQ ID NO: 402346 - DNA, 19 bp, Homo sapiens
  siRNA target sequence for C6orf111 (NM_032870.1,1418-1436).
gcaaaatagtttatcacta

SEQ ID NO: 402347 - DNA, 19 bp, Homo sapiens
  siRNA target sequence for C6orf111 (NM_032870.1,1453-1471).
cagacggtgatgtggttaa

SEQ ID NO: 402348 - DNA, 19 bp, Homo sapiens
  siRNA target sequence for C6orf111 (NM_032870.1,1457-1475).
cggtgatgtggttaatgaa

SEQ ID NO: 402349 - DNA, 19 bp, Homo sapiens
  siRNA target sequence for C6orf111 (NM_032870.1,1553-1571).
gagtaggtcgggaagttct

SEQ ID NO: 402350 - DNA, 19 bp, Homo sapiens
  siRNA target sequence for C6orf111 (NM_032870.1,1559-1577).
gtcgggaagttctagtagt

SEQ ID NO: 402351 - DNA, 19 bp, Homo sapiens
  siRNA target sequence for C6orf111 (NM_032870.1,1653-1671).
ggtagtagtcgtacttctt

SEQ ID NO: 402352 - DNA, 19 bp, Homo sapiens
  siRNA target sequence for C6orf111 (NM_032870.1,1674-1692).
cggtcttcttctcctaaaa

SEQ ID NO: 402353 - DNA, 19 bp, Homo sapiens
  siRNA target sequence for C6orf111 (NM_032870.1,1714-1732).
gtagatctccaacaatcaa

SEQ ID NO: 402354 - DNA, 19 bp, Homo sapiens
  siRNA target sequence for C6orf111 (NM_032870.1,1756-1774).
gctattctcgcagaattaa

SEQ ID NO: 402355 - DNA, 19 bp, Homo sapiens
  siRNA target sequence for C6orf111 (NM_032870.1,1762-1780).
ctcgcagaattaaaataga

SEQ ID NO: 402356 - DNA, 19 bp, Homo sapiens
  siRNA target sequence for C6orf111 (NM_032870.1,1764-1782).
cgcagaattaaaatagaga

SEQ ID NO: 402357 - DNA, 19 bp, Homo sapiens
  siRNA target sequence for C6orf111 (NM_032870.1,1790-1808).
ggctagggtaaagattaga

SEQ ID NO: 402358 - DNA, 19 bp, Homo sapiens
  siRNA target sequence for C6orf111 (NM_032870.1,1792-1810).
ctagggtaaagattagaga

SEQ ID NO: 402359 - DNA, 19 bp, Homo sapiens
  siRNA target sequence for C6orf111 (NM_032870.1,1797-1815).
gtaaagattagagatagaa

SEQ ID NO: 402360 - DNA, 19 bp, Homo sapiens
  siRNA target sequence for C6orf111 (NM_032870.1,1872-1890).
cgagagagacgtagaagta

SEQ ID NO: 402361 - DNA, 19 bp, Homo sapiens
  siRNA target sequence for C6orf111 (NM_032870.1,1877-1895).
gagacgtagaagtagaagt

SEQ ID NO: 402362 - DNA, 19 bp, Homo sapiens
  siRNA target sequence for C6orf111 (NM_032870.1,1939-1957).
gtcgagataggcgtaaaat

SEQ ID NO: 402363 - DNA, 19 bp, Homo sapiens
  siRNA target sequence for C6orf111 (NM_032870.1,1942-1960).
gagataggcgtaaaattga

SEQ ID NO: 402364 - DNA, 19 bp, Homo sapiens
  siRNA target sequence for C6orf111 (NM_032870.1,1948-1966).
ggcgtaaaattgatgatca

SEQ ID NO: 402365 - DNA, 19 bp, Homo sapiens
  siRNA target sequence for C6orf111 (NM_032870.1,1949-1967).
gcgtaaaattgatgatcaa

SEQ ID NO: 402366 - DNA, 19 bp, Homo sapiens
  siRNA target sequence for C6orf111 (NM_032870.1,1962-1980).
gatcaacgtggaaatctta

SEQ ID NO: 402367 - DNA, 19 bp, Homo sapiens
  siRNA target sequence for C6orf111 (NM_032870.1,1977-1995).
cttagtgggaacagtcata

SEQ ID NO: 402368 - DNA, 19 bp, Homo sapiens
  siRNA target sequence for C6orf111 (NM_032870.1,1983-2001).
gggaacagtcataagcata

SEQ ID NO: 402369 - DNA, 19 bp, Homo sapiens
  siRNA target sequence for C6orf111 (NM_032870.1,1984-2002).
ggaacagtcataagcataa

SEQ ID NO: 402370 - DNA, 19 bp, Homo sapiens
  siRNA target sequence for C6orf111 (NM_032870.1,1988-2006).
cagtcataagcataaaggt

SEQ ID NO: 402371 - DNA, 19 bp, Homo sapiens
  siRNA target sequence for C6orf111 (NM_032870.1,2033-2051).
ggagaggagtcgaagtata

SEQ ID NO: 402372 - DNA, 19 bp, Homo sapiens
  siRNA target sequence for C6orf111 (NM_032870.1,2036-2054).
gaggagtcgaagtatagat

SEQ ID NO: 402373 - DNA, 19 bp, Homo sapiens
  siRNA target sequence for C6orf111 (NM_032870.1,2038-2056).
ggagtcgaagtatagataa

SEQ ID NO: 402374 - DNA, 19 bp, Homo sapiens
  siRNA target sequence for C6orf111 (NM_032870.1,2039-2057).
gagtcgaagtatagataaa

SEQ ID NO: 402375 - DNA, 19 bp, Homo sapiens
  siRNA target sequence for C6orf111 (NM_032870.1,2041-2059).
gtcgaagtatagataaaga

SEQ ID NO: 402376 - DNA, 19 bp, Homo sapiens
  siRNA target sequence for C6orf111 (NM_032870.1,2083-2101).
gggaacgtgaacaggataa

SEQ ID NO: 402377 - DNA, 19 bp, Homo sapiens
  siRNA target sequence for C6orf111 (NM_032870.1,2084-2102).
ggaacgtgaacaggataaa

SEQ ID NO: 402378 - DNA, 19 bp, Homo sapiens
  siRNA target sequence for C6orf111 (NM_032870.1,2088-2106).
cgtgaacaggataaaagaa

SEQ ID NO: 402379 - DNA, 19 bp, Homo sapiens
  siRNA target sequence for C6orf111 (NM_032870.1,2146-2164).
gtagtcaggatgatagatt

SEQ ID NO: 402380 - DNA, 19 bp, Homo sapiens
  siRNA target sequence for C6orf111 (NM_032870.1,2175-2193).
cgagaaagtgaaagaacat

SEQ ID NO: 402381 - DNA, 19 bp, Homo sapiens
  siRNA target sequence for C6orf111 (NM_032870.1,2200-2218).
ggagtggttctatatctgt

SEQ ID NO: 402382 - DNA, 19 bp, Homo sapiens
  siRNA target sequence for C6orf111 (NM_032870.1,2205-2223).
ggttctatatctgttaaaa

SEQ ID NO: 402383 - DNA, 19 bp, Homo sapiens
  siRNA target sequence for C6orf111 (NM_032870.1,2235-2253).
gattctagacaggatagta

SEQ ID NO: 402384 - DNA, 19 bp, Homo sapiens
  siRNA target sequence for C6orf111 (NM_032870.1,2239-2257).
ctagacaggatagtaagaa

SEQ ID NO: 402385 - DNA, 19 bp, Homo sapiens
  siRNA target sequence for C6orf111 (NM_032870.1,2247-2265).
gatagtaagaaaagtacta

SEQ ID NO: 402386 - DNA, 19 bp, Homo sapiens
  siRNA target sequence for C6orf111 (NM_032870.1,2348-2366).
ggctaagaagcctaaacat

SEQ ID NO: 402387 - DNA, 19 bp, Homo sapiens
  siRNA target sequence for C6orf111 (NM_032870.1,2418-2436).
cgcaaacacaagtctaagt

SEQ ID NO: 402388 - DNA, 19 bp, Homo sapiens
  siRNA target sequence for MGC15438 (NM_032874.2,1258-1276).
cacgtctgggacatcacta

SEQ ID NO: 402389 - DNA, 19 bp, Homo sapiens
  siRNA target sequence for MGC15677 (NM_032878.2,24-42).
ggggatgttgaatttggaa

SEQ ID NO: 402390 - DNA, 19 bp, Homo sapiens
  siRNA target sequence for MGC15677 (NM_032878.2,74-92).
gcaaggagttggtgttgat

SEQ ID NO: 402391 - DNA, 19 bp, Homo sapiens
  siRNA target sequence for MGC15677 (NM_032878.2,142-160).
caggcaccacctgtaatct

SEQ ID NO: 402392 - DNA, 19 bp, Homo sapiens
  siRNA target sequence for MGC15677 (NM_032878.2,149-167).
cacctgtaatctactatgt

SEQ ID NO: 402393 - DNA, 19 bp, Homo sapiens
  siRNA target sequence for MGC15677 (NM_032878.2,204-222).
gcttcgacaggtttttaat

SEQ ID NO: 402394 - DNA, 19 bp, Homo sapiens
  siRNA target sequence for MGC15730 (NM_032880.2,454-472).
gctacctgacagtcaacat

SEQ ID NO: 402395 - DNA, 19 bp, Homo sapiens
  siRNA target sequence for MGC15730 (NM_032880.2,496-514).
ctggagacgccgtgacttt

SEQ ID NO: 402396 - DNA, 19 bp, Homo sapiens
  siRNA target sequence for MGC15730 (NM_032880.2,498-516).
ggagacgccgtgactttga

SEQ ID NO: 402397 - DNA, 19 bp, Homo sapiens
  siRNA target sequence for MGC15730 (NM_032880.2,499-517).
gagacgccgtgactttgaa

SEQ ID NO: 402398 - DNA, 19 bp, Homo sapiens
  siRNA target sequence for MGC15730 (NM_032880.2,501-519).
gacgccgtgactttgaagt

SEQ ID NO: 402399 - DNA, 19 bp, Homo sapiens
  siRNA target sequence for MGC15730 (NM_032880.2,504-522).
gccgtgactttgaagtgta

SEQ ID NO: 402400 - DNA, 19 bp, Homo sapiens
  siRNA target sequence for MGC15730 (NM_032880.2,505-523).
ccgtgactttgaagtgtaa

SEQ ID NO: 402401 - DNA, 19 bp, Homo sapiens
  siRNA target sequence for MGC15730 (NM_032880.2,507-525).
gtgactttgaagtgtaact

SEQ ID NO: 402402 - DNA, 19 bp, Homo sapiens
  siRNA target sequence for MGC15730 (NM_032880.2,511-529).
ctttgaagtgtaacttcaa

SEQ ID NO: 402403 - DNA, 19 bp, Homo sapiens
  siRNA target sequence for MGC15730 (NM_032880.2,576-594).
ggtggcaccatcaagcaaa

SEQ ID NO: 402404 - DNA, 19 bp, Homo sapiens
  siRNA target sequence for MGC15730 (NM_032880.2,698-716).
ggtccggatctcagacaat

SEQ ID NO: 402405 - DNA, 19 bp, Homo sapiens
  siRNA target sequence for MGC15730 (NM_032880.2,711-729).
gacaatggtccctatgagt

SEQ ID NO: 402406 - DNA, 19 bp, Homo sapiens
  siRNA target sequence for MGC15730 (NM_032880.2,811-829).
ctcccacctccattgaagt

SEQ ID NO: 402407 - DNA, 19 bp, Homo sapiens
  siRNA target sequence for MGC15730 (NM_032880.2,912-930).
ccagcacccatggtttatt

SEQ ID NO: 402408 - DNA, 19 bp, Homo sapiens
  siRNA target sequence for MGC15730 (NM_032880.2,913-931).
cagcacccatggtttattt

SEQ ID NO: 402409 - DNA, 19 bp, Homo sapiens
  siRNA target sequence for MGC15730 (NM_032880.2,915-933).
gcacccatggtttatttca

SEQ ID NO: 402410 - DNA, 19 bp, Homo sapiens
  siRNA target sequence for MGC15730 (NM_032880.2,1187-1205).
ggtcgtgagccgtgagttt

SEQ ID NO: 402411 - DNA, 19 bp, Homo sapiens
  siRNA target sequence for MGC15730 (NM_032880.2,1403-1421).
ccccaaaggacccaaaatt

SEQ ID NO: 402412 - DNA, 19 bp, Homo sapiens
  siRNA target sequence for MGC15730 (NM_032880.2,1661-1679).
ccggctcatcgtgtttgaa

SEQ ID NO: 402413 - DNA, 19 bp, Homo sapiens
  siRNA target sequence for MGC15730 (NM_032880.2,1696-1714).
gaggaacggaggactctaa

SEQ ID NO: 402414 - DNA, 19 bp, Homo sapiens
  siRNA target sequence for MGC15827 (NM_032882.2,418-436).
gtttcgagaggaggataat

SEQ ID NO: 402415 - DNA, 19 bp, Homo sapiens
  siRNA target sequence for MGC15827 (NM_032882.2,460-478).
cgaccgggaagtcaactat

SEQ ID NO: 402416 - DNA, 19 bp, Homo sapiens
  siRNA target sequence for MGC15827 (NM_032882.2,516-534).
cgtggaacgtggtctttgt

SEQ ID NO: 402417 - DNA, 19 bp, Homo sapiens
  siRNA target sequence for MGC15827 (NM_032882.2,543-561).
gctcaggcgaggagtttct

SEQ ID NO: 402418 - DNA, 19 bp, Homo sapiens
  siRNA target sequence for MGC15882 (NM_032884.1,351-369).
ctactgtcacagacattct

SEQ ID NO: 402419 - DNA, 19 bp, Homo sapiens
  siRNA target sequence for MGC15882 (NM_032884.1,780-798).
gtcaagggagcctctttct

SEQ ID NO: 402420 - DNA, 19 bp, Homo sapiens
  siRNA target sequence for MGC15882 (NM_032884.1,957-975).
ggcagccgagacttcgaaa

SEQ ID NO: 402421 - DNA, 19 bp, Homo sapiens
  siRNA target sequence for MGC15882 (NM_032884.1,961-979).
gccgagacttcgaaacaaa

SEQ ID NO: 402422 - DNA, 19 bp, Homo sapiens
  siRNA target sequence for MGC15882 (NM_032884.1,963-981).
cgagacttcgaaacaaagt

SEQ ID NO: 402423 - DNA, 19 bp, Homo sapiens
  siRNA target sequence for MGC15882 (NM_032884.1,1117-1135).
ctggctcaacctgaactat

SEQ ID NO: 402424 - DNA, 19 bp, Homo sapiens
  siRNA target sequence for MGC15882 (NM_032884.1,1145-1163).
ccagtgttcacgaatcact

SEQ ID NO: 402425 - DNA, 19 bp, Homo sapiens
  siRNA target sequence for MGC15882 (NM_032884.1,1235-1253).
ccgcagctgggatgttact

SEQ ID NO: 402426 - DNA, 19 bp, Homo sapiens
  siRNA target sequence for MGC15882 (NM_032884.1,1486-1504).
gatgcacagcccctatttt

SEQ ID NO: 402427 - DNA, 19 bp, Homo sapiens
  siRNA target sequence for MGC15882 (NM_032884.1,1512-1530).
gtgggaatggcataaactt

SEQ ID NO: 402428 - DNA, 19 bp, Homo sapiens
  siRNA target sequence for AUTL4 (NM_032885.4,296-314).
cggacgaagtggacaagtt

SEQ ID NO: 402429 - DNA, 19 bp, Homo sapiens
  siRNA target sequence for AUTL4 (NM_032885.4,335-353).
cctggaacaacgtcaagta

SEQ ID NO: 402430 - DNA, 19 bp, Homo sapiens
  siRNA target sequence for AUTL4 (NM_032885.4,351-369).
gtacggttgggtggttaaa

SEQ ID NO: 402431 - DNA, 19 bp, Homo sapiens
  siRNA target sequence for AUTL4 (NM_032885.4,371-389).
gccggaccagctttagcaa

SEQ ID NO: 402432 - DNA, 19 bp, Homo sapiens
  siRNA target sequence for AUTL4 (NM_032885.4,429-447).
cgagggcgagggtgacata

SEQ ID NO: 402433 - DNA, 19 bp, Homo sapiens
  siRNA target sequence for AUTL4 (NM_032885.4,452-470).
gtttccagcgggactttgt

SEQ ID NO: 402434 - DNA, 19 bp, Homo sapiens
  siRNA target sequence for AUTL4 (NM_032885.4,473-491).
cccgcctgtggctcacata

SEQ ID NO: 402435 - DNA, 19 bp, Homo sapiens
  siRNA target sequence for AUTL4 (NM_032885.4,922-940).
cgcctggtggtgtacgttt

SEQ ID NO: 402436 - DNA, 19 bp, Homo sapiens
  siRNA target sequence for AUTL4 (NM_032885.4,1055-1073).
ctctcaaccccgtgtatgt

SEQ ID NO: 402437 - DNA, 19 bp, Homo sapiens
  siRNA target sequence for AUTL4 (NM_032885.4,1133-1151).
cgcgacactcactgtactt

SEQ ID NO: 402438 - DNA, 19 bp, Homo sapiens
  siRNA target sequence for AUTL4 (NM_032885.4,1135-1153).
cgacactcactgtacttca

SEQ ID NO: 402439 - DNA, 19 bp, Homo sapiens
  siRNA target sequence for AUTL4 (NM_032885.4,1136-1154).
gacactcactgtacttcat

SEQ ID NO: 402440 - DNA, 19 bp, Homo sapiens
  siRNA target sequence for AUTL4 (NM_032885.4,1387-1405).
gagcggtaccccatgttca

SEQ ID NO: 402441 - DNA, 19 bp, Homo sapiens
  siRNA target sequence for MGC15912 (NM_032886.1,416-434).
gggaggtgtacgtgttagt

SEQ ID NO: 402442 - DNA, 19 bp, Homo sapiens
  siRNA target sequence for MGC15912 (NM_032886.1,418-436).
gaggtgtacgtgttagtca

SEQ ID NO: 402443 - DNA, 19 bp, Homo sapiens
  siRNA target sequence for MGC15912 (NM_032886.1,441-459).
gaggtcaggtgggttatct

SEQ ID NO: 402444 - DNA, 19 bp, Homo sapiens
  siRNA target sequence for MGC15912 (NM_032886.1,444-462).
gtcaggtgggttatcttct

SEQ ID NO: 402445 - DNA, 19 bp, Homo sapiens
  siRNA target sequence for MGC15912 (NM_032886.1,529-547).
ctcttgccatcgtgcaaaa

SEQ ID NO: 402446 - DNA, 19 bp, Homo sapiens
  siRNA target sequence for MGC15912 (NM_032886.1,534-552).
gccatcgtgcaaaagcatt

SEQ ID NO: 402447 - DNA, 19 bp, Homo sapiens
  siRNA target sequence for MGC15912 (NM_032886.1,543-561).
caaaagcattcgatcttat

SEQ ID NO: 402448 - DNA, 19 bp, Homo sapiens
  siRNA target sequence for MGC14161 (NM_032892.1,1471-1489).
gggagccaccggaaataca

SEQ ID NO: 402449 - DNA, 19 bp, Homo sapiens
  siRNA target sequence for MGC14161 (NM_032892.1,1473-1491).
gagccaccggaaatacaca

SEQ ID NO: 402450 - DNA, 19 bp, Homo sapiens
  siRNA target sequence for MGC14161 (NM_032892.1,1512-1530).
cggagctgtccctccataa

SEQ ID NO: 402451 - DNA, 19 bp, Homo sapiens
  siRNA target sequence for MGC14161 (NM_032892.1,1684-1702).
gcagccggacagatagcaa

SEQ ID NO: 402452 - DNA, 19 bp, Homo sapiens
  siRNA target sequence for MGC14161 (NM_032892.1,1685-1703).
cagccggacagatagcaat

SEQ ID NO: 402453 - DNA, 19 bp, Homo sapiens
  siRNA target sequence for MGC14161 (NM_032892.1,1946-1964).
gaataagtttgttctaagt

SEQ ID NO: 402454 - DNA, 19 bp, Homo sapiens
  siRNA target sequence for MGC14161 (NM_032892.1,2013-2031).
ctcctcctgatcatcctta

SEQ ID NO: 402455 - DNA, 19 bp, Homo sapiens
  siRNA target sequence for MGC14161 (NM_032892.1,2032-2050).
ccgagtctgaccttgacat

SEQ ID NO: 402456 - DNA, 19 bp, Homo sapiens
  siRNA target sequence for MGC14161 (NM_032892.1,2088-2106).
gaacaattccactatcaat

SEQ ID NO: 402457 - DNA, 19 bp, Homo sapiens
  siRNA target sequence for MGC14161 (NM_032892.1,2091-2109).
caattccactatcaatact

SEQ ID NO: 402458 - DNA, 19 bp, Homo sapiens
  siRNA target sequence for MGC14161 (NM_032892.1,2124-2142).
cgatggtttgcctgcaaaa

SEQ ID NO: 402459 - DNA, 19 bp, Homo sapiens
  siRNA target sequence for MGC14126 (NM_032898.2,368-386).
gatgtgcactgccaagaaa

SEQ ID NO: 402460 - DNA, 19 bp, Homo sapiens
  siRNA target sequence for MGC14126 (NM_032898.2,412-430).
ctattatcttaatctatga

SEQ ID NO: 402461 - DNA, 19 bp, Homo sapiens
  siRNA target sequence for MGC14126 (NM_032898.2,460-478).
gcattatgccagttcgaaa

SEQ ID NO: 402462 - DNA, 19 bp, Homo sapiens
  siRNA target sequence for MGC14126 (NM_032898.2,467-485).
gccagttcgaaacttttca

SEQ ID NO: 402463 - DNA, 19 bp, Homo sapiens
  siRNA target sequence for MGC14126 (NM_032898.2,469-487).
cagttcgaaacttttcaaa

SEQ ID NO: 402464 - DNA, 19 bp, Homo sapiens
  siRNA target sequence for MGC14126 (NM_032898.2,471-489).
gttcgaaacttttcaaagt

SEQ ID NO: 402465 - DNA, 19 bp, Homo sapiens
  siRNA target sequence for MGC14126 (NM_032898.2,474-492).
cgaaacttttcaaagtttt

SEQ ID NO: 402466 - DNA, 19 bp, Homo sapiens
  siRNA target sequence for MGC14128 (NM_032899.3,388-406).
ccagccagggctgacttta

SEQ ID NO: 402467 - DNA, 19 bp, Homo sapiens
  siRNA target sequence for MGC14128 (NM_032899.3,444-462).
cttggatgggggttctgaa

SEQ ID NO: 402468 - DNA, 19 bp, Homo sapiens
  siRNA target sequence for MGC14128 (NM_032899.3,512-530).
cggtggaggcccagtacat

SEQ ID NO: 402469 - DNA, 19 bp, Homo sapiens
  siRNA target sequence for MGC14128 (NM_032899.3,696-714).
gccctacctgaaggaaaaa

SEQ ID NO: 402470 - DNA, 19 bp, Homo sapiens
  siRNA target sequence for MGC14128 (NM_032899.3,742-760).
gtcaagcacaacaacatca

SEQ ID NO: 402471 - DNA, 19 bp, Homo sapiens
  siRNA target sequence for MGC14128 (NM_032899.3,950-968).
ctgacagtcacctcaagaa

SEQ ID NO: 402472 - DNA, 19 bp, Homo sapiens
  siRNA target sequence for MGC14128 (NM_032899.3,952-970).
gacagtcacctcaagaaca

SEQ ID NO: 402473 - DNA, 19 bp, Homo sapiens
  siRNA target sequence for MGC14128 (NM_032899.3,954-972).
cagtcacctcaagaacatt

SEQ ID NO: 402474 - DNA, 19 bp, Homo sapiens
  siRNA target sequence for MGC14128 (NM_032899.3,1006-1024).
gccaagtcaggcaggaaat

SEQ ID NO: 402475 - DNA, 19 bp, Homo sapiens
  siRNA target sequence for MGC14128 (NM_032899.3,1053-1071).
catctcggactggagattt

SEQ ID NO: 402476 - DNA, 19 bp, Homo sapiens
  siRNA target sequence for ARHGAP19 (NM_032900.2,242-260).
gagcctctgctgacacata

SEQ ID NO: 402477 - DNA, 19 bp, Homo sapiens
  siRNA target sequence for ARHGAP19 (NM_032900.2,253-271).
gacacataaacacttcaat

SEQ ID NO: 402478 - DNA, 19 bp, Homo sapiens
  siRNA target sequence for ARHGAP19 (NM_032900.2,380-398).
ctccctcctcctaatcgta

SEQ ID NO: 402479 - DNA, 19 bp, Homo sapiens
  siRNA target sequence for ARHGAP19 (NM_032900.2,382-400).
ccctcctcctaatcgtaat

SEQ ID NO: 402480 - DNA, 19 bp, Homo sapiens
  siRNA target sequence for ARHGAP19 (NM_032900.2,383-401).
cctcctcctaatcgtaatt

SEQ ID NO: 402481 - DNA, 19 bp, Homo sapiens
  siRNA target sequence for ARHGAP19 (NM_032900.2,384-402).
ctcctcctaatcgtaattt

SEQ ID NO: 402482 - DNA, 19 bp, Homo sapiens
  siRNA target sequence for ARHGAP19 (NM_032900.2,387-405).
ctcctaatcgtaatttgct

SEQ ID NO: 402483 - DNA, 19 bp, Homo sapiens
  siRNA target sequence for ARHGAP19 (NM_032900.2,460-478).
gatgtcagcctataacctt

SEQ ID NO: 402484 - DNA, 19 bp, Homo sapiens
  siRNA target sequence for ARHGAP19 (NM_032900.2,533-551).
cttcaggagaatatcacaa

SEQ ID NO: 402485 - DNA, 19 bp, Homo sapiens
  siRNA target sequence for ARHGAP19 (NM_032900.2,685-703).
catagcttcatgtcatact

SEQ ID NO: 402486 - DNA, 19 bp, Homo sapiens
  siRNA target sequence for ARHGAP19 (NM_032900.2,709-727).
ctttcagctggcaaagtct

SEQ ID NO: 402487 - DNA, 19 bp, Homo sapiens
  siRNA target sequence for ARHGAP19 (NM_032900.2,805-823).
gtttcaacacgttcatgat

SEQ ID NO: 402488 - DNA, 19 bp, Homo sapiens
  siRNA target sequence for ARHGAP19 (NM_032900.2,940-958).
ctccttcagtgggcttatt

SEQ ID NO: 402489 - DNA, 19 bp, Homo sapiens
  siRNA target sequence for ARHGAP19 (NM_032900.2,942-960).
ccttcagtgggcttattaa

SEQ ID NO: 402490 - DNA, 19 bp, Homo sapiens
  siRNA target sequence for ARHGAP19 (NM_032900.2,1098-1116).
cgatgacaccaacaagatt

SEQ ID NO: 402491 - DNA, 19 bp, Homo sapiens
  siRNA target sequence for MGC14288 (NM_032901.2,224-242).
ggctataagaccttctcta

SEQ ID NO: 402492 - DNA, 19 bp, Homo sapiens
  siRNA target sequence for MGC14288 (NM_032901.2,287-305).
gtccgagtctaccactatt

SEQ ID NO: 402493 - DNA, 19 bp, Homo sapiens
  siRNA target sequence for MGC14288 (NM_032901.2,291-309).
gagtctaccactatttcca

SEQ ID NO: 402494 - DNA, 19 bp, Homo sapiens
  siRNA target sequence for MGC14156 (NM_032906.2,261-279).
ccaagaagccgctcagata

SEQ ID NO: 402495 - DNA, 19 bp, Homo sapiens
  siRNA target sequence for MGC14156 (NM_032906.2,265-283).
gaagccgctcagatatgaa

SEQ ID NO: 402496 - DNA, 19 bp, Homo sapiens
  siRNA target sequence for MGC14156 (NM_032906.2,285-303).
catcaacaaacgaattgat

SEQ ID NO: 402497 - DNA, 19 bp, Homo sapiens
  siRNA target sequence for MGC14156 (NM_032906.2,288-306).
caacaaacgaattgattaa

SEQ ID NO: 402498 - DNA, 19 bp, Homo sapiens
  siRNA target sequence for MGC14156 (NM_032906.2,313-331).
gttgggaatagcttatcca

SEQ ID NO: 402499 - DNA, 19 bp, Homo sapiens
  siRNA target sequence for MGC14156 (NM_032906.2,318-336).
gaatagcttatccaatcat

SEQ ID NO: 402500 - DNA, 19 bp, Homo sapiens
  siRNA target sequence for MGC14156 (NM_032906.2,338-356).
gatgggatccctaatatga

SEQ ID NO: 402501 - DNA, 19 bp, Homo sapiens
  siRNA target sequence for MGC14407 (NM_032908.1,433-451).
catgcacacgatgttatga

SEQ ID NO: 402502 - DNA, 19 bp, Homo sapiens
  siRNA target sequence for MGC14407 (NM_032908.1,436-454).
gcacacgatgttatgagaa

SEQ ID NO: 402503 - DNA, 19 bp, Homo sapiens
  siRNA target sequence for MGC14407 (NM_032908.1,439-457).
cacgatgttatgagaacaa

SEQ ID NO: 402504 - DNA, 19 bp, Homo sapiens
  siRNA target sequence for MGC14407 (NM_032908.1,442-460).
gatgttatgagaacaaaga

SEQ ID NO: 402505 - DNA, 19 bp, Homo sapiens
  siRNA target sequence for MGC14407 (NM_032908.1,473-491).
ccatcagactggtcaatca

SEQ ID NO: 402506 - DNA, 19 bp, Homo sapiens
  siRNA target sequence for MGC2848 (NM_032917.1,143-161).
ccgaacaaactctgaagat

SEQ ID NO: 402507 - DNA, 19 bp, Homo sapiens
  siRNA target sequence for C21orf124 (NM_032920.1,469-487).
cacaaggtgcgttcatttt

SEQ ID NO: 402508 - DNA, 19 bp, Homo sapiens
  siRNA target sequence for C21orf124 (NM_032920.1,538-556).
cccagtggcccctttgaga

SEQ ID NO: 402509 - DNA, 19 bp, Homo sapiens
  siRNA target sequence for MGC15737 (NM_032926.2,833-851).
cacgatatcccataccttt

SEQ ID NO: 402510 - DNA, 19 bp, Homo sapiens
  siRNA target sequence for MGC13159 (NM_032927.2,585-603).
gccgccatttgggtacaaa

SEQ ID NO: 402511 - DNA, 19 bp, Homo sapiens
  siRNA target sequence for MGC13159 (NM_032927.2,640-658).
cctcttccaagacttaata

SEQ ID NO: 402512 - DNA, 19 bp, Homo sapiens
  siRNA target sequence for MGC13159 (NM_032927.2,641-659).
ctcttccaagacttaatat

SEQ ID NO: 402513 - DNA, 19 bp, Homo sapiens
  siRNA target sequence for MGC13159 (NM_032927.2,672-690).
ctggattttggcatccatt

SEQ ID NO: 402514 - DNA, 19 bp, Homo sapiens
  siRNA target sequence for MGC13159 (NM_032927.2,687-705).
cattgttgtgacctattat

SEQ ID NO: 402515 - DNA, 19 bp, Homo sapiens
  siRNA target sequence for MGC13159 (NM_032927.2,699-717).
ctattatgttgacttcttt

SEQ ID NO: 402516 - DNA, 19 bp, Homo sapiens
  siRNA target sequence for MGC13159 (NM_032927.2,777-795).
gcttgtcagtttatcaatt

SEQ ID NO: 402517 - DNA, 19 bp, Homo sapiens
  siRNA target sequence for MGC13159 (NM_032927.2,811-829).
gtctacctggaatggtatt

SEQ ID NO: 402518 - DNA, 19 bp, Homo sapiens
  siRNA target sequence for MGC13159 (NM_032927.2,819-837).
ggaatggtattgtggaatt

SEQ ID NO: 402519 - DNA, 19 bp, Homo sapiens
  siRNA target sequence for MGC13159 (NM_032927.2,839-857).
gagaatatgatgtcaagta

SEQ ID NO: 402520 - DNA, 19 bp, Homo sapiens
  siRNA target sequence for MGC13159 (NM_032927.2,852-870).
caagtatccagccttgata

SEQ ID NO: 402521 - DNA, 19 bp, Homo sapiens
  siRNA target sequence for MGC13159 (NM_032927.2,862-880).
gccttgatacccattacca

SEQ ID NO: 402522 - DNA, 19 bp, Homo sapiens
  siRNA target sequence for MGC13159 (NM_032927.2,926-944).
ggcatgtgtggtcgttttt

SEQ ID NO: 402523 - DNA, 19 bp, Homo sapiens
  siRNA target sequence for MGC13159 (NM_032927.2,928-946).
catgtgtggtcgtttttca

SEQ ID NO: 402524 - DNA, 19 bp, Homo sapiens
  siRNA target sequence for MGC13159 (NM_032927.2,945-963).
cactccattgttgttgttt

SEQ ID NO: 402525 - DNA, 19 bp, Homo sapiens
  siRNA target sequence for MGC14141 (NM_032928.2,166-184).
gttcattcagaggaagttt

SEQ ID NO: 402526 - DNA, 19 bp, Homo sapiens
  siRNA target sequence for MGC13040 (NM_032930.1,404-422).
cctatcggaaggatgattt

SEQ ID NO: 402527 - DNA, 19 bp, Homo sapiens
  siRNA target sequence for MGC13040 (NM_032930.1,409-427).
cggaaggatgatttcgtta

SEQ ID NO: 402528 - DNA, 19 bp, Homo sapiens
  siRNA target sequence for MGC13040 (NM_032930.1,410-428).
ggaaggatgatttcgttat

SEQ ID NO: 402529 - DNA, 19 bp, Homo sapiens
  siRNA target sequence for MGC13040 (NM_032930.1,485-503).
ctggacaatggatcatatt

SEQ ID NO: 402530 - DNA, 19 bp, Homo sapiens
  siRNA target sequence for MGC13040 (NM_032930.1,495-513).
gatcatattaggaactgaa

SEQ ID NO: 402531 - DNA, 19 bp, Homo sapiens
  siRNA target sequence for MGC13040 (NM_032930.1,546-564).
cacacagctttcaatgtca

SEQ ID NO: 402532 - DNA, 19 bp, Homo sapiens
  siRNA target sequence for MGC13040 (NM_032930.1,563-581).
cattttttcatcggttata

SEQ ID NO: 402533 - DNA, 19 bp, Homo sapiens
  siRNA target sequence for MGC13040 (NM_032930.1,574-592).
cggttatatgatgaagata

SEQ ID NO: 402534 - DNA, 19 bp, Homo sapiens
  siRNA target sequence for MGC13040 (NM_032930.1,601-619).
gacagtggacatattgtta

SEQ ID NO: 402535 - DNA, 19 bp, Homo sapiens
  siRNA target sequence for MGC13040 (NM_032930.1,766-784).
ggtggagccctttgtcaat

SEQ ID NO: 402536 - DNA, 19 bp, Homo sapiens
  siRNA target sequence for MGC13040 (NM_032930.1,767-785).
gtggagccctttgtcaata

SEQ ID NO: 402537 - DNA, 19 bp, Homo sapiens
  siRNA target sequence for MGC13040 (NM_032930.1,781-799).
caatatgaggatgtgatta

SEQ ID NO: 402538 - DNA, 19 bp, Homo sapiens
  siRNA target sequence for MGC13040 (NM_032930.1,808-826).
ctggaaacaacaaagctta

SEQ ID NO: 402539 - DNA, 19 bp, Homo sapiens
  siRNA target sequence for MGC13040 (NM_032930.1,815-833).
caacaaagcttatctataa

SEQ ID NO: 402540 - DNA, 19 bp, Homo sapiens
  siRNA target sequence for MGC13040 (NM_032930.1,840-858).
ggtgagtgttcgaaagaat

SEQ ID NO: 402541 - DNA, 19 bp, Homo sapiens
  siRNA target sequence for MGC13040 (NM_032930.1,919-937).
gctggtatgtgctatcctt

SEQ ID NO: 402542 - DNA, 19 bp, Homo sapiens
  siRNA target sequence for MGC11386 (NM_032933.3,128-146).
ctggtcggcctcacctttt

SEQ ID NO: 402543 - DNA, 19 bp, Homo sapiens
  siRNA target sequence for MGC11386 (NM_032933.3,130-148).
ggtcggcctcaccttttgt

SEQ ID NO: 402544 - DNA, 19 bp, Homo sapiens
  siRNA target sequence for MGC11386 (NM_032933.3,185-203).
gtgctgtctgtcttgaaat

SEQ ID NO: 402545 - DNA, 19 bp, Homo sapiens
  siRNA target sequence for MGC11386 (NM_032933.3,207-225).
cctaccctacattattcca

SEQ ID NO: 402546 - DNA, 19 bp, Homo sapiens
  siRNA target sequence for MGC11386 (NM_032933.3,208-226).
ctaccctacattattccaa

SEQ ID NO: 402547 - DNA, 19 bp, Homo sapiens
  siRNA target sequence for MGC11386 (NM_032933.3,237-255).
cgctcattggtggactttt

SEQ ID NO: 402548 - DNA, 19 bp, Homo sapiens
  siRNA target sequence for MGC11386 (NM_032933.3,241-259).
cattggtggacttttgctt

SEQ ID NO: 402549 - DNA, 19 bp, Homo sapiens
  siRNA target sequence for MGC11386 (NM_032933.3,298-316).
cagttcaagatctcatgtt

SEQ ID NO: 402550 - DNA, 19 bp, Homo sapiens
  siRNA target sequence for MGC11386 (NM_032933.3,303-321).
caagatctcatgttcttgt

SEQ ID NO: 402551 - DNA, 19 bp, Homo sapiens
  siRNA target sequence for MGC11386 (NM_032933.3,412-430).
gcataatgtagctgaagtt

SEQ ID NO: 402552 - DNA, 19 bp, Homo sapiens
  siRNA target sequence for MGC11386 (NM_032933.3,419-437).
gtagctgaagttatcatct

SEQ ID NO: 402553 - DNA, 19 bp, Homo sapiens
  siRNA target sequence for MGC11386 (NM_032933.3,536-554).
gactcccaggggcttataa

SEQ ID NO: 402554 - DNA, 19 bp, Homo sapiens
  siRNA target sequence for MGC11386 (NM_032933.3,542-560).
caggggcttataaaattct

SEQ ID NO: 402555 - DNA, 19 bp, Homo sapiens
  siRNA target sequence for MGC11386 (NM_032933.3,545-563).
gggcttataaaattctaca

SEQ ID NO: 402556 - DNA, 19 bp, Homo sapiens
  siRNA target sequence for C7orf35 (NM_032936.2,240-258).
cttggctcagagagtacta

SEQ ID NO: 402557 - DNA, 19 bp, Homo sapiens
  siRNA target sequence for C7orf35 (NM_032936.2,275-293).
cactactcttcttgatcat

SEQ ID NO: 402558 - DNA, 19 bp, Homo sapiens
  siRNA target sequence for C7orf35 (NM_032936.2,326-344).
ggaactggttcctcatatt

SEQ ID NO: 402559 - DNA, 19 bp, Homo sapiens
  siRNA target sequence for C7orf35 (NM_032936.2,399-417).
ggctgggcggtgtaagtct

SEQ ID NO: 402560 - DNA, 19 bp, Homo sapiens
  siRNA target sequence for C7orf35 (NM_032936.2,431-449).
gacatggatcacacaatat

SEQ ID NO: 402561 - DNA, 19 bp, Homo sapiens
  siRNA target sequence for C7orf35 (NM_032936.2,436-454).
ggatcacacaatattaaaa

SEQ ID NO: 402562 - DNA, 19 bp, Homo sapiens
  siRNA target sequence for C7orf35 (NM_032936.2,437-455).
gatcacacaatattaaaaa

SEQ ID NO: 402563 - DNA, 19 bp, Homo sapiens
  siRNA target sequence for C7orf35 (NM_032936.2,464-482).
ggtacctcattgcaatgtt

SEQ ID NO: 402564 - DNA, 19 bp, Homo sapiens
  siRNA target sequence for C7orf35 (NM_032936.2,465-483).
gtacctcattgcaatgtta

SEQ ID NO: 402565 - DNA, 19 bp, Homo sapiens
  siRNA target sequence for C7orf35 (NM_032936.2,501-519).
cctcgcactctgtgctaaa

SEQ ID NO: 402566 - DNA, 19 bp, Homo sapiens
  siRNA target sequence for C7orf35 (NM_032936.2,512-530).
gtgctaaactggaacagtt

SEQ ID NO: 402567 - DNA, 19 bp, Homo sapiens
  siRNA target sequence for C7orf35 (NM_032936.2,548-566).
cctatgtcttcattccttt

SEQ ID NO: 402568 - DNA, 19 bp, Homo sapiens
  siRNA target sequence for C7orf35 (NM_032936.2,593-611).
cagaactcggatataatgt

SEQ ID NO: 402569 - DNA, 19 bp, Homo sapiens
  siRNA target sequence for C9orf37 (NM_032937.2,651-669).
ggcctggtcctgtgcattt

SEQ ID NO: 402570 - DNA, 19 bp, Homo sapiens
  siRNA target sequence for C9orf37 (NM_032937.2,839-857).
ggatgcccctttgagaaat

SEQ ID NO: 402571 - DNA, 19 bp, Homo sapiens
  siRNA target sequence for C9orf37 (NM_032937.2,1008-1026).
cgcgccagcgggtttctca

SEQ ID NO: 402572 - DNA, 19 bp, Homo sapiens
  siRNA target sequence for C9orf37 (NM_032937.2,1080-1098).
ggagccaaggcacaaattt

SEQ ID NO: 402573 - DNA, 19 bp, Homo sapiens
  siRNA target sequence for SYTL2 (NM_032943.1,770-788).
catggcgcagatatcatca

SEQ ID NO: 402574 - DNA, 19 bp, Homo sapiens
  siRNA target sequence for SYTL2 (NM_032943.1,958-976).
gagttccagtgtggtaaat

SEQ ID NO: 402575 - DNA, 19 bp, Homo sapiens
  siRNA target sequence for SYTL2 (NM_032943.1,980-998).
gcttccagtgtgattgata

SEQ ID NO: 402576 - DNA, 19 bp, Homo sapiens
  siRNA target sequence for SYTL2 (NM_032943.1,1042-1060).
gaggaagaatccgtttaat

SEQ ID NO: 402577 - DNA, 19 bp, Homo sapiens
  siRNA target sequence for SYTL2 (NM_032943.1,1180-1198).
gtcaactgtcgcagatact

SEQ ID NO: 402578 - DNA, 19 bp, Homo sapiens
  siRNA target sequence for SYTL2 (NM_032943.1,1185-1203).
ctgtcgcagatacttcaat

SEQ ID NO: 402579 - DNA, 19 bp, Homo sapiens
  siRNA target sequence for SYTL2 (NM_032943.1,1189-1207).
cgcagatacttcaatccaa

SEQ ID NO: 402580 - DNA, 19 bp, Homo sapiens
  siRNA target sequence for SYTL2 (NM_032943.1,1190-1208).
gcagatacttcaatccaaa

SEQ ID NO: 402581 - DNA, 19 bp, Homo sapiens
  siRNA target sequence for SYTL2 (NM_032943.1,1245-1263).
caaatgggtcccaaatcaa

SEQ ID NO: 402582 - DNA, 19 bp, Homo sapiens
  siRNA target sequence for SYTL2 (NM_032943.1,1280-1298).
gccaggaagatgatctaca

SEQ ID NO: 402583 - DNA, 19 bp, Homo sapiens
  siRNA target sequence for SYTL2 (NM_032943.1,1282-1300).
caggaagatgatctacaaa

SEQ ID NO: 402584 - DNA, 19 bp, Homo sapiens
  siRNA target sequence for SYTL2 (NM_032943.1,1291-1309).
gatctacaaatcaactgat

SEQ ID NO: 402585 - DNA, 19 bp, Homo sapiens
  siRNA target sequence for SYTL2 (NM_032943.1,1422-1440).
cagaaacccttcgttataa

SEQ ID NO: 402586 - DNA, 19 bp, Homo sapiens
  siRNA target sequence for SYTL2 (NM_032943.1,1454-1472).
cccaaaagcaaaattgtgt

SEQ ID NO: 402587 - DNA, 19 bp, Homo sapiens
  siRNA target sequence for SYTL2 (NM_032943.1,1503-1521).
ctgagaaggagcattcttt

SEQ ID NO: 402588 - DNA, 19 bp, Homo sapiens
  siRNA target sequence for SYTL2 (NM_032943.1,1507-1525).
gaaggagcattctttagaa

SEQ ID NO: 402589 - DNA, 19 bp, Homo sapiens
  siRNA target sequence for SYTL2 (NM_032943.1,1600-1618).
gagtcctgggctaatccat

SEQ ID NO: 402590 - DNA, 19 bp, Homo sapiens
  siRNA target sequence for SYTL2 (NM_032943.1,1622-1640).
cgggaagtaggagaattta

SEQ ID NO: 402591 - DNA, 19 bp, Homo sapiens
  siRNA target sequence for SYTL2 (NM_032943.1,1628-1646).
gtaggagaatttagtgttt

SEQ ID NO: 402592 - DNA, 19 bp, Homo sapiens
  siRNA target sequence for SYTL2 (NM_032943.1,1632-1650).
gagaatttagtgttttaga

SEQ ID NO: 402593 - DNA, 19 bp, Homo sapiens
  siRNA target sequence for SYTL2 (NM_032943.1,1649-1667).
gaatctgacagattgaaaa

SEQ ID NO: 402594 - DNA, 19 bp, Homo sapiens
  siRNA target sequence for SYTL2 (NM_032943.1,1709-1727).
gaccctaagccttctcaat

SEQ ID NO: 402595 - DNA, 19 bp, Homo sapiens
  siRNA target sequence for SYTL2 (NM_032943.1,1736-1754).
ccttcgctttttcatcaat

SEQ ID NO: 402596 - DNA, 19 bp, Homo sapiens
  siRNA target sequence for SYTL2 (NM_032943.1,1755-1773).
caacctcaagcccatatgt

SEQ ID NO: 402597 - DNA, 19 bp, Homo sapiens
  siRNA target sequence for SYTL2 (NM_032943.1,1759-1777).
ctcaagcccatatgtatca

SEQ ID NO: 402598 - DNA, 19 bp, Homo sapiens
  siRNA target sequence for SYTL2 (NM_032943.1,1876-1894).
gaattcaccaaccatcaat

SEQ ID NO: 402599 - DNA, 19 bp, Homo sapiens
  siRNA target sequence for SYTL2 (NM_032943.1,1947-1965).
gaagccctgctgatgaact

SEQ ID NO: 402600 - DNA, 19 bp, Homo sapiens
  siRNA target sequence for SYTL2 (NM_032943.1,1999-2017).
gccaggtggcagttctaga

SEQ ID NO: 402601 - DNA, 19 bp, Homo sapiens
  siRNA target sequence for SYTL2 (NM_032943.1,2073-2091).
ggagtgccgctaggaaaat

SEQ ID NO: 402602 - DNA, 19 bp, Homo sapiens
  siRNA target sequence for SYTL2 (NM_032943.1,2092-2110).
gccttccaaaagtctagaa

SEQ ID NO: 402603 - DNA, 19 bp, Homo sapiens
  siRNA target sequence for SYTL2 (NM_032943.1,2097-2115).
ccaaaagtctagaagacat

SEQ ID NO: 402604 - DNA, 19 bp, Homo sapiens
  siRNA target sequence for SYTL2 (NM_032943.1,2198-2216).
gatcagaagccagttacaa

SEQ ID NO: 402605 - DNA, 19 bp, Homo sapiens
  siRNA target sequence for SYTL2 (NM_032943.1,2203-2221).
gaagccagttacaaatgaa

SEQ ID NO: 402606 - DNA, 19 bp, Homo sapiens
  siRNA target sequence for SYTL2 (NM_032943.1,2245-2263).
gcctacacaacctgataat

SEQ ID NO: 402607 - DNA, 19 bp, Homo sapiens
  siRNA target sequence for 7h3 (NM_033025.3,299-317).
ccaggcgcctctccataaa

SEQ ID NO: 402608 - DNA, 19 bp, Homo sapiens
  siRNA target sequence for 7h3 (NM_033025.3,1107-1125).
gggactgtaccgtctttgt

SEQ ID NO: 402609 - DNA, 19 bp, Homo sapiens
  siRNA target sequence for 7h3 (NM_033025.3,1178-1196).
cagcggtctgcctatctga

SEQ ID NO: 402610 - DNA, 19 bp, Homo sapiens
  siRNA target sequence for 7h3 (NM_033025.3,1229-1247).
gcatcctcaaggattatct

SEQ ID NO: 402611 - DNA, 19 bp, Homo sapiens
  siRNA target sequence for 7h3 (NM_033025.3,1230-1248).
catcctcaaggattatctt

SEQ ID NO: 402612 - DNA, 19 bp, Homo sapiens
  siRNA target sequence for 7h3 (NM_033025.3,1274-1292).
cccagcccctgtataaggt

SEQ ID NO: 402613 - DNA, 19 bp, Homo sapiens
  siRNA target sequence for 7h3 (NM_033025.3,1640-1658).
cagatgtcgcgccttactt

SEQ ID NO: 402614 - DNA, 19 bp, Homo sapiens
  siRNA target sequence for 7h3 (NM_033025.3,1935-1953).
cccgcacctgaatctcaaa

SEQ ID NO: 402615 - DNA, 19 bp, Homo sapiens
  siRNA target sequence for 7h3 (NM_033025.3,1937-1955).
cgcacctgaatctcaaaga

SEQ ID NO: 402616 - DNA, 19 bp, Homo sapiens
  siRNA target sequence for 7h3 (NM_033025.3,1939-1957).
cacctgaatctcaaagact

SEQ ID NO: 402617 - DNA, 19 bp, Homo sapiens
  siRNA target sequence for 7h3 (NM_033025.3,1985-2003).
gagagctctccaagcaaat

SEQ ID NO: 402618 - DNA, 19 bp, Homo sapiens
  siRNA target sequence for BBS4 (NM_033028.2,50-68).
gtcgcgacgagaactcaat

SEQ ID NO: 402619 - DNA, 19 bp, Homo sapiens
  siRNA target sequence for BBS4 (NM_033028.2,52-70).
cgcgacgagaactcaattt

SEQ ID NO: 402620 - DNA, 19 bp, Homo sapiens
  siRNA target sequence for BBS4 (NM_033028.2,55-73).
gacgagaactcaatttcct

SEQ ID NO: 402621 - DNA, 19 bp, Homo sapiens
  siRNA target sequence for BBS4 (NM_033028.2,136-154).
gcagaactggttgattcat

SEQ ID NO: 402622 - DNA, 19 bp, Homo sapiens
  siRNA target sequence for BBS4 (NM_033028.2,139-157).
gaactggttgattcatctt

SEQ ID NO: 402623 - DNA, 19 bp, Homo sapiens
  siRNA target sequence for BBS4 (NM_033028.2,144-162).
ggttgattcatcttcatta

SEQ ID NO: 402624 - DNA, 19 bp, Homo sapiens
  siRNA target sequence for BBS4 (NM_033028.2,158-176).
cattatatccggaaagatt

SEQ ID NO: 402625 - DNA, 19 bp, Homo sapiens
  siRNA target sequence for BBS4 (NM_033028.2,240-258).
ctatctatgtccaagcatt

SEQ ID NO: 402626 - DNA, 19 bp, Homo sapiens
  siRNA target sequence for BBS4 (NM_033028.2,244-262).
ctatgtccaagcattgata

SEQ ID NO: 402627 - DNA, 19 bp, Homo sapiens
  siRNA target sequence for BBS4 (NM_033028.2,307-325).
gacatgtgcagttcttagt

SEQ ID NO: 402628 - DNA, 19 bp, Homo sapiens
  siRNA target sequence for BBS4 (NM_033028.2,327-345).
ctcagagtgctgataacct

SEQ ID NO: 402629 - DNA, 19 bp, Homo sapiens
  siRNA target sequence for BBS4 (NM_033028.2,349-367).
gcaggtggccagatcttta

SEQ ID NO: 402630 - DNA, 19 bp, Homo sapiens
  siRNA target sequence for BBS4 (NM_033028.2,350-368).
caggtggccagatctttat

SEQ ID NO: 402631 - DNA, 19 bp, Homo sapiens
  siRNA target sequence for BBS4 (NM_033028.2,389-407).
gctgccattgaagtatata

SEQ ID NO: 402632 - DNA, 19 bp, Homo sapiens
  siRNA target sequence for BBS4 (NM_033028.2,438-456).
gggagatcagccataacct

SEQ ID NO: 402633 - DNA, 19 bp, Homo sapiens
  siRNA target sequence for BBS4 (NM_033028.2,439-457).
ggagatcagccataaccta

SEQ ID NO: 402634 - DNA, 19 bp, Homo sapiens
  siRNA target sequence for BBS4 (NM_033028.2,459-477).
gagtttgctacatatacct

SEQ ID NO: 402635 - DNA, 19 bp, Homo sapiens
  siRNA target sequence for BBS4 (NM_033028.2,533-551).
cacgatctgacttatataa

SEQ ID NO: 402636 - DNA, 19 bp, Homo sapiens
  siRNA target sequence for BBS4 (NM_033028.2,620-638).
gagttctcaccagaaaata

SEQ ID NO: 402637 - DNA, 19 bp, Homo sapiens
  siRNA target sequence for BBS4 (NM_033028.2,639-657).
cagagcttcttacaacttt

SEQ ID NO: 402638 - DNA, 19 bp, Homo sapiens
  siRNA target sequence for BBS4 (NM_033028.2,775-793).
gacccacggggactttgat

SEQ ID NO: 402639 - DNA, 19 bp, Homo sapiens
  siRNA target sequence for BBS4 (NM_033028.2,778-796).
ccacggggactttgatgtt

SEQ ID NO: 402640 - DNA, 19 bp, Homo sapiens
  siRNA target sequence for BBS4 (NM_033028.2,840-858).
gtcctccactctggaataa

SEQ ID NO: 402641 - DNA, 19 bp, Homo sapiens
  siRNA target sequence for BBS4 (NM_033028.2,988-1006).
gcagtatgcatcagctttt

SEQ ID NO: 402642 - DNA, 19 bp, Homo sapiens
  siRNA target sequence for BBS4 (NM_033028.2,991-1009).
gtatgcatcagcttttcat

SEQ ID NO: 402643 - DNA, 19 bp, Homo sapiens
  siRNA target sequence for BBS4 (NM_033028.2,1080-1098).
ccaatctggaagatataga

SEQ ID NO: 402644 - DNA, 19 bp, Homo sapiens
  siRNA target sequence for BBS4 (NM_033028.2,1124-1142).
gcagtccacctggataagt

SEQ ID NO: 402645 - DNA, 19 bp, Homo sapiens
  siRNA target sequence for BBS4 (NM_033028.2,1127-1145).
gtccacctggataagtgta

SEQ ID NO: 402646 - DNA, 19 bp, Homo sapiens
  siRNA target sequence for BBS4 (NM_033028.2,1201-1219).
gaacgccctggcccaatat

SEQ ID NO: 402647 - DNA, 19 bp, Homo sapiens
  siRNA target sequence for BBS4 (NM_033028.2,1244-1262).
ctactcaaggacaatagct

SEQ ID NO: 402648 - DNA, 19 bp, Homo sapiens
  siRNA target sequence for BBS4 (NM_033028.2,1255-1273).
caatagctctctggaattt

SEQ ID NO: 402649 - DNA, 19 bp, Homo sapiens
  siRNA target sequence for BBS4 (NM_033028.2,1352-1370).
gttaaagatcccaaatcaa

SEQ ID NO: 402650 - DNA, 19 bp, Homo sapiens
  siRNA target sequence for BBS4 (NM_033028.2,1411-1429).
gcagcctctgggctctaat

SEQ ID NO: 402651 - DNA, 19 bp, Homo sapiens
  siRNA target sequence for BBS4 (NM_033028.2,1436-1454).
ctaggacaggcaatgtctt

SEQ ID NO: 402652 - DNA, 19 bp, Homo sapiens
  siRNA target sequence for BBS4 (NM_033028.2,1540-1558).
gcctgcggtggaatcaagt

SEQ ID NO: 402653 - DNA, 19 bp, Homo sapiens
  siRNA target sequence for BBS4 (NM_033028.2,1550-1568).
gaatcaagtccaactgaaa

SEQ ID NO: 402654 - DNA, 19 bp, Homo sapiens
  siRNA target sequence for TSLP (NM_033035.2,218-236).
ctatatgttctgtcagttt

SEQ ID NO: 402655 - DNA, 19 bp, Homo sapiens
  siRNA target sequence for TSLP (NM_033035.2,263-281).
cttgtagggctggtgttaa

SEQ ID NO: 402656 - DNA, 19 bp, Homo sapiens
  siRNA target sequence for TSLP (NM_033035.2,266-284).
gtagggctggtgttaactt

SEQ ID NO: 402657 - DNA, 19 bp, Homo sapiens
  siRNA target sequence for TSLP (NM_033035.2,289-307).
cttcactaactgtgacttt

SEQ ID NO: 402658 - DNA, 19 bp, Homo sapiens
  siRNA target sequence for TSLP (NM_033035.2,323-341).
gcctatctcagtactattt

SEQ ID NO: 402659 - DNA, 19 bp, Homo sapiens
  siRNA target sequence for TSLP (NM_033035.2,325-343).
ctatctcagtactatttct

SEQ ID NO: 402660 - DNA, 19 bp, Homo sapiens
  siRNA target sequence for TSLP (NM_033035.2,347-365).
gacctgattacatatatga

SEQ ID NO: 402661 - DNA, 19 bp, Homo sapiens
  siRNA target sequence for TSLP (NM_033035.2,349-367).
cctgattacatatatgagt

SEQ ID NO: 402662 - DNA, 19 bp, Homo sapiens
  siRNA target sequence for TSLP (NM_033035.2,372-390).
ccaaaagtaccgagttcaa

SEQ ID NO: 402663 - DNA, 19 bp, Homo sapiens
  siRNA target sequence for TSLP (NM_033035.2,416-434).
ccacattgccttactgaaa

SEQ ID NO: 402664 - DNA, 19 bp, Homo sapiens
  siRNA target sequence for TSLP (NM_033035.2,469-487).
cgcgtcgctcgccaaagaa

SEQ ID NO: 402665 - DNA, 19 bp, Homo sapiens
  siRNA target sequence for TSLP (NM_033035.2,470-488).
gcgtcgctcgccaaagaaa

SEQ ID NO: 402666 - DNA, 19 bp, Homo sapiens
  siRNA target sequence for TSLP (NM_033035.2,471-489).
cgtcgctcgccaaagaaat

SEQ ID NO: 402667 - DNA, 19 bp, Homo sapiens
  siRNA target sequence for TSLP (NM_033035.2,474-492).
cgctcgccaaagaaatgtt

SEQ ID NO: 402668 - DNA, 19 bp, Homo sapiens
  siRNA target sequence for TSLP (NM_033035.2,485-503).
gaaatgttcgccatgaaaa

SEQ ID NO: 402669 - DNA, 19 bp, Homo sapiens
  siRNA target sequence for TSLP (NM_033035.2,531-549).
caggctattcggaaactca

SEQ ID NO: 402670 - DNA, 19 bp, Homo sapiens
  siRNA target sequence for TSLP (NM_033035.2,535-553).
ctattcggaaactcagata

SEQ ID NO: 402671 - DNA, 19 bp, Homo sapiens
  siRNA target sequence for TSLP (NM_033035.2,542-560).
gaaactcagataaatgcta

SEQ ID NO: 402672 - DNA, 19 bp, Homo sapiens
  siRNA target sequence for TSLP (NM_033035.2,557-575).
gctactcaggcaatgaaga

SEQ ID NO: 402673 - DNA, 19 bp, Homo sapiens
  siRNA target sequence for TSLP (NM_033035.2,648-666).
gcttcaatcgacctttact

SEQ ID NO: 402674 - DNA, 19 bp, Homo sapiens
  siRNA target sequence for TSLP (NM_033035.2,652-670).
caatcgacctttactgaaa

SEQ ID NO: 402675 - DNA, 19 bp, Homo sapiens
  siRNA target sequence for CPXCR1 (NM_033048.3,296-314).
cctcctaatgactgtagta

SEQ ID NO: 402676 - DNA, 19 bp, Homo sapiens
  siRNA target sequence for CPXCR1 (NM_033048.3,330-348).
catctgctgatcccaatat

SEQ ID NO: 402677 - DNA, 19 bp, Homo sapiens
  siRNA target sequence for CPXCR1 (NM_033048.3,467-485).
caacgagaagaagatctaa

SEQ ID NO: 402678 - DNA, 19 bp, Homo sapiens
  siRNA target sequence for CPXCR1 (NM_033048.3,536-554).
cacaagcccttaaatgata

SEQ ID NO: 402679 - DNA, 19 bp, Homo sapiens
  siRNA target sequence for CPXCR1 (NM_033048.3,538-556).
caagcccttaaatgataga

SEQ ID NO: 402680 - DNA, 19 bp, Homo sapiens
  siRNA target sequence for CPXCR1 (NM_033048.3,541-559).
gcccttaaatgatagatca

SEQ ID NO: 402681 - DNA, 19 bp, Homo sapiens
  siRNA target sequence for CPXCR1 (NM_033048.3,542-560).
cccttaaatgatagatcaa

SEQ ID NO: 402682 - DNA, 19 bp, Homo sapiens
  siRNA target sequence for CPXCR1 (NM_033048.3,620-638).
cgttttcgactttcaactt

SEQ ID NO: 402683 - DNA, 19 bp, Homo sapiens
  siRNA target sequence for CPXCR1 (NM_033048.3,742-760).
gtgggtaaagcgaaaatat

SEQ ID NO: 402684 - DNA, 19 bp, Homo sapiens
  siRNA target sequence for CPXCR1 (NM_033048.3,745-763).
ggtaaagcgaaaatatata

SEQ ID NO: 402685 - DNA, 19 bp, Homo sapiens
  siRNA target sequence for CPXCR1 (NM_033048.3,765-783).
catgtctttaccatccaaa

SEQ ID NO: 402686 - DNA, 19 bp, Homo sapiens
  siRNA target sequence for CPXCR1 (NM_033048.3,799-817).
cgagagagccataacattt

SEQ ID NO: 402687 - DNA, 19 bp, Homo sapiens
  siRNA target sequence for CPXCR1 (NM_033048.3,800-818).
gagagagccataacattta

SEQ ID NO: 402688 - DNA, 19 bp, Homo sapiens
  siRNA target sequence for CPXCR1 (NM_033048.3,825-843).
cttcgagggtgcactacta

SEQ ID NO: 402689 - DNA, 19 bp, Homo sapiens
  siRNA target sequence for CPXCR1 (NM_033048.3,846-864).
gtcccctcactgagagaat

SEQ ID NO: 402690 - DNA, 19 bp, Homo sapiens
  siRNA target sequence for CPXCR1 (NM_033048.3,848-866).
cccctcactgagagaatga

SEQ ID NO: 402691 - DNA, 19 bp, Homo sapiens
  siRNA target sequence for CPXCR1 (NM_033048.3,851-869).
ctcactgagagaatgacat

SEQ ID NO: 402692 - DNA, 19 bp, Homo sapiens
  siRNA target sequence for CPXCR1 (NM_033048.3,909-927).
gtagattccgtgctattgt

SEQ ID NO: 402693 - DNA, 19 bp, Homo sapiens
  siRNA target sequence for CPXCR1 (NM_033048.3,950-968).
cagatacaaattgaaagta

SEQ ID NO: 402694 - DNA, 19 bp, Homo sapiens
  siRNA target sequence for CPXCR1 (NM_033048.3,983-1001).
ggttttgtggatatattga

SEQ ID NO: 402695 - DNA, 19 bp, Homo sapiens
  siRNA target sequence for CPXCR1 (NM_033048.3,1027-1045).
gatcacaaacaccaataat

SEQ ID NO: 402696 - DNA, 19 bp, Homo sapiens
  siRNA target sequence for CPXCR1 (NM_033048.3,1087-1105).
cacttactctgaattaaga

SEQ ID NO: 402697 - DNA, 19 bp, Homo sapiens
  siRNA target sequence for CPXCR1 (NM_033048.3,1089-1107).
cttactctgaattaagaca

SEQ ID NO: 402698 - DNA, 19 bp, Homo sapiens
  siRNA target sequence for MUC13 (NM_033049.1,30-48).
gaaagccatcattcatctt

SEQ ID NO: 402699 - DNA, 19 bp, Homo sapiens
  siRNA target sequence for MUC13 (NM_033049.1,106-124).
gctgtaacaaccacagaaa

SEQ ID NO: 402700 - DNA, 19 bp, Homo sapiens
  siRNA target sequence for MUC13 (NM_033049.1,129-147).
gactagtggtcctacagta

SEQ ID NO: 402701 - DNA, 19 bp, Homo sapiens
  siRNA target sequence for MUC13 (NM_033049.1,154-172).
gctgataccactgaaacta

SEQ ID NO: 402702 - DNA, 19 bp, Homo sapiens
  siRNA target sequence for MUC13 (NM_033049.1,155-173).
ctgataccactgaaactaa

SEQ ID NO: 402703 - DNA, 19 bp, Homo sapiens
  siRNA target sequence for MUC13 (NM_033049.1,157-175).
gataccactgaaactaatt

SEQ ID NO: 402704 - DNA, 19 bp, Homo sapiens
  siRNA target sequence for MUC13 (NM_033049.1,344-362).
gtgagtcaaccacaaatgt

SEQ ID NO: 402705 - DNA, 19 bp, Homo sapiens
  siRNA target sequence for MUC13 (NM_033049.1,373-391).
gctacctctgacataatca

SEQ ID NO: 402706 - DNA, 19 bp, Homo sapiens
  siRNA target sequence for MUC13 (NM_033049.1,401-419).
ctccaaatgatggattaat

SEQ ID NO: 402707 - DNA, 19 bp, Homo sapiens
  siRNA target sequence for MUC13 (NM_033049.1,403-421).
ccaaatgatggattaatca

SEQ ID NO: 402708 - DNA, 19 bp, Homo sapiens
  siRNA target sequence for MUC13 (NM_033049.1,462-480).
ccccaccacagaagacaat

SEQ ID NO: 402709 - DNA, 19 bp, Homo sapiens
  siRNA target sequence for MUC13 (NM_033049.1,464-482).
ccaccacagaagacaatca

SEQ ID NO: 402710 - DNA, 19 bp, Homo sapiens
  siRNA target sequence for MUC13 (NM_033049.1,465-483).
caccacagaagacaatcaa

SEQ ID NO: 402711 - DNA, 19 bp, Homo sapiens
  siRNA target sequence for MUC13 (NM_033049.1,496-514).
cccactggcaccgctttat

SEQ ID NO: 402712 - DNA, 19 bp, Homo sapiens
  siRNA target sequence for MUC13 (NM_033049.1,497-515).
ccactggcaccgctttatt

SEQ ID NO: 402713 - DNA, 19 bp, Homo sapiens
  siRNA target sequence for MUC13 (NM_033049.1,517-535).
gagaccagcaccctaaaca

SEQ ID NO: 402714 - DNA, 19 bp, Homo sapiens
  siRNA target sequence for MUC13 (NM_033049.1,569-587).
cctgtgcagataattcgtt

SEQ ID NO: 402715 - DNA, 19 bp, Homo sapiens
  siRNA target sequence for MUC13 (NM_033049.1,570-588).
ctgtgcagataattcgtta

SEQ ID NO: 402716 - DNA, 19 bp, Homo sapiens
  siRNA target sequence for MUC13 (NM_033049.1,575-593).
cagataattcgttatgtgt

SEQ ID NO: 402717 - DNA, 19 bp, Homo sapiens
  siRNA target sequence for MUC13 (NM_033049.1,592-610).
gttaagctgcataatacaa

SEQ ID NO: 402718 - DNA, 19 bp, Homo sapiens
  siRNA target sequence for MUC13 (NM_033049.1,623-641).
gtttagaagggtattacta

SEQ ID NO: 402719 - DNA, 19 bp, Homo sapiens
  siRNA target sequence for MUC13 (NM_033049.1,669-687).
ggtattccctgggaagatt

SEQ ID NO: 402720 - DNA, 19 bp, Homo sapiens
  siRNA target sequence for MUC13 (NM_033049.1,670-688).
gtattccctgggaagattt

SEQ ID NO: 402721 - DNA, 19 bp, Homo sapiens
  siRNA target sequence for MUC13 (NM_033049.1,736-754).
gcctatcaagacttgcata

SEQ ID NO: 402722 - DNA, 19 bp, Homo sapiens
  siRNA target sequence for MUC13 (NM_033049.1,835-853).
ctgtcaccaagatctgaaa

SEQ ID NO: 402723 - DNA, 19 bp, Homo sapiens
  siRNA target sequence for MUC13 (NM_033049.1,860-878).
ctgatgacaagtttgttaa

SEQ ID NO: 402724 - DNA, 19 bp, Homo sapiens
  siRNA target sequence for MUC13 (NM_033049.1,993-1011).
gacccttcggtgtgattat

SEQ ID NO: 402725 - DNA, 19 bp, Homo sapiens
  siRNA target sequence for MUC13 (NM_033049.1,995-1013).
cccttcggtgtgattatta

SEQ ID NO: 402726 - DNA, 19 bp, Homo sapiens
  siRNA target sequence for MUC13 (NM_033049.1,996-1014).
ccttcggtgtgattattat

SEQ ID NO: 402727 - DNA, 19 bp, Homo sapiens
  siRNA target sequence for MUC13 (NM_033049.1,1038-1056).
ctgcctcaatggtttagca

SEQ ID NO: 402728 - DNA, 19 bp, Homo sapiens
  siRNA target sequence for MUC13 (NM_033049.1,1049-1067).
gtttagcatgcgattgcaa

SEQ ID NO: 402729 - DNA, 19 bp, Homo sapiens
  siRNA target sequence for MUC13 (NM_033049.1,1055-1073).
catgcgattgcaaatctga

SEQ ID NO: 402730 - DNA, 19 bp, Homo sapiens
  siRNA target sequence for MUC13 (NM_033049.1,1147-1165).
cagcacaagcaatgcttaa

SEQ ID NO: 402731 - DNA, 19 bp, Homo sapiens
  siRNA target sequence for MUC13 (NM_033049.1,1149-1167).
gcacaagcaatgcttaata

SEQ ID NO: 402732 - DNA, 19 bp, Homo sapiens
  siRNA target sequence for MUC13 (NM_033049.1,1330-1348).
ctcagcatgataattgcat

SEQ ID NO: 402733 - DNA, 19 bp, Homo sapiens
  siRNA target sequence for MUC13 (NM_033049.1,1334-1352).
gcatgataattgcattgat

SEQ ID NO: 402734 - DNA, 19 bp, Homo sapiens
  siRNA target sequence for MUC13 (NM_033049.1,1350-1368).
gattgtcacagcaagatca

SEQ ID NO: 402735 - DNA, 19 bp, Homo sapiens
  siRNA target sequence for MUC13 (NM_033049.1,1354-1372).
gtcacagcaagatcaaata

SEQ ID NO: 402736 - DNA, 19 bp, Homo sapiens
  siRNA target sequence for MUC13 (NM_033049.1,1404-1422).
gattgacgaagactttcaa

SEQ ID NO: 402737 - DNA, 19 bp, Homo sapiens
  siRNA target sequence for MUC13 (NM_033049.1,1465-1483).
gaagggagcgtctttccta

SEQ ID NO: 402738 - DNA, 19 bp, Homo sapiens
  siRNA target sequence for DMRTC1 (NM_033053.1,259-277).
cccatccgtgtcaggaatt

SEQ ID NO: 402739 - DNA, 19 bp, Homo sapiens
  siRNA target sequence for DMRTC1 (NM_033053.1,573-591).
catctcgctgcctattgga

SEQ ID NO: 402740 - DNA, 19 bp, Homo sapiens
  siRNA target sequence for OR2B2 (NM_033057.1,20-38).
gtgtcccacaggagttcat

SEQ ID NO: 402741 - DNA, 19 bp, Homo sapiens
  siRNA target sequence for OR2B2 (NM_033057.1,101-119).
cctatatcttgacaatctt

SEQ ID NO: 402742 - DNA, 19 bp, Homo sapiens
  siRNA target sequence for OR2B2 (NM_033057.1,142-160).
gtgtcacatgtggatttca

SEQ ID NO: 402743 - DNA, 19 bp, Homo sapiens
  siRNA target sequence for OR2B2 (NM_033057.1,238-256).
caaatgctggtaaacatat

SEQ ID NO: 402744 - DNA, 19 bp, Homo sapiens
  siRNA target sequence for OR2B2 (NM_033057.1,318-336).
cttgggttccacagaatgt

SEQ ID NO: 402745 - DNA, 19 bp, Homo sapiens
  siRNA target sequence for OR2B2 (NM_033057.1,452-470).
gtggctttagcaattcagt

SEQ ID NO: 402746 - DNA, 19 bp, Homo sapiens
  siRNA target sequence for OR2B2 (NM_033057.1,454-472).
ggctttagcaattcagtat

SEQ ID NO: 402747 - DNA, 19 bp, Homo sapiens
  siRNA target sequence for OR2B2 (NM_033057.1,475-493).
cagtccacctggacactta

SEQ ID NO: 402748 - DNA, 19 bp, Homo sapiens
  siRNA target sequence for OR2B2 (NM_033057.1,586-604).
gaggctgaactattcttca

SEQ ID NO: 402749 - DNA, 19 bp, Homo sapiens
  siRNA target sequence for OR2B2 (NM_033057.1,589-607).
gctgaactattcttcatca

SEQ ID NO: 402750 - DNA, 19 bp, Homo sapiens
  siRNA target sequence for OR2B2 (NM_033057.1,664-682).
gtccaagcagtgttgagaa

SEQ ID NO: 402751 - DNA, 19 bp, Homo sapiens
  siRNA target sequence for OR2B2 (NM_033057.1,800-818).
ccaaagaccggggaaagat

SEQ ID NO: 402752 - DNA, 19 bp, Homo sapiens
  siRNA target sequence for OR2B2 (NM_033057.1,975-993).
cacagtgcttacttacctt

SEQ ID NO: 402753 - DNA, 19 bp, Homo sapiens
  siRNA target sequence for OR2B2 (NM_033057.1,979-997).
gtgcttacttaccttacta

SEQ ID NO: 402754 - DNA, 19 bp, Homo sapiens
  siRNA target sequence for OR2B2 (NM_033057.1,1002-1020).
ctccgcaagttgtcctatt

SEQ ID NO: 402755 - DNA, 19 bp, Homo sapiens
  siRNA target sequence for OR2B2 (NM_033057.1,1026-1044).
cattactatagaaaactat

SEQ ID NO: 402756 - DNA, 19 bp, Homo sapiens
  siRNA target sequence for ATCAY (NM_033064.1,389-407).
ccacgctccggatggaaaa

SEQ ID NO: 402757 - DNA, 19 bp, Homo sapiens
  siRNA target sequence for ATCAY (NM_033064.1,392-410).
cgctccggatggaaaacgt

SEQ ID NO: 402758 - DNA, 19 bp, Homo sapiens
  siRNA target sequence for ATCAY (NM_033064.1,514-532).
cccaacacgctaaatttca

SEQ ID NO: 402759 - DNA, 19 bp, Homo sapiens
  siRNA target sequence for ATCAY (NM_033064.1,515-533).
ccaacacgctaaatttcaa

SEQ ID NO: 402760 - DNA, 19 bp, Homo sapiens
  siRNA target sequence for ATCAY (NM_033064.1,562-580).
gtggccccagagatcaaca

SEQ ID NO: 402761 - DNA, 19 bp, Homo sapiens
  siRNA target sequence for ATCAY (NM_033064.1,766-784).
ggggacagcgcggatctat

SEQ ID NO: 402762 - DNA, 19 bp, Homo sapiens
  siRNA target sequence for ATCAY (NM_033064.1,767-785).
gggacagcgcggatctatt

SEQ ID NO: 402763 - DNA, 19 bp, Homo sapiens
  siRNA target sequence for ATCAY (NM_033064.1,768-786).
ggacagcgcggatctattt

SEQ ID NO: 402764 - DNA, 19 bp, Homo sapiens
  siRNA target sequence for ATCAY (NM_033064.1,1109-1127).
gaatcggctggctgaagaa

SEQ ID NO: 402765 - DNA, 19 bp, Homo sapiens
  siRNA target sequence for ATCAY (NM_033064.1,1185-1203).
ccacccctcgtggttcatt

SEQ ID NO: 402766 - DNA, 19 bp, Homo sapiens
  siRNA target sequence for ATCAY (NM_033064.1,1217-1235).
ccatctctcgccctttcat

SEQ ID NO: 402767 - DNA, 19 bp, Homo sapiens
  siRNA target sequence for ATCAY (NM_033064.1,1326-1344).
ctgcgtcctgcaatacgaa

SEQ ID NO: 402768 - DNA, 19 bp, Homo sapiens
  siRNA target sequence for C6orf114 (NM_033069.1,558-576).
ccggcaattgcccttcttt

SEQ ID NO: 402769 - DNA, 19 bp, Homo sapiens
  siRNA target sequence for C6orf114 (NM_033069.1,593-611).
gtcaagattacagatagat

SEQ ID NO: 402770 - DNA, 19 bp, Homo sapiens
  siRNA target sequence for C6orf114 (NM_033069.1,666-684).
caccaacaggattttccaa

SEQ ID NO: 402771 - DNA, 19 bp, Homo sapiens
  siRNA target sequence for C6orf114 (NM_033069.1,690-708).
gtatttatcggtttttcaa

SEQ ID NO: 402772 - DNA, 19 bp, Homo sapiens
  siRNA target sequence for C6orf114 (NM_033069.1,753-771).
caatgtgtaaggaaatatt

SEQ ID NO: 402773 - DNA, 19 bp, Homo sapiens
  siRNA target sequence for C6orf114 (NM_033069.1,757-775).
gtgtaaggaaatattctca

SEQ ID NO: 402774 - DNA, 19 bp, Homo sapiens
  siRNA target sequence for C6orf114 (NM_033069.1,774-792).
cagtcatggggagttagaa

SEQ ID NO: 402775 - DNA, 19 bp, Homo sapiens
  siRNA target sequence for C6orf114 (NM_033069.1,795-813).
ggtcaaaggcatataagat

SEQ ID NO: 402776 - DNA, 19 bp, Homo sapiens
  siRNA target sequence for C6orf114 (NM_033069.1,796-814).
gtcaaaggcatataagata

SEQ ID NO: 402777 - DNA, 19 bp, Homo sapiens
  siRNA target sequence for C6orf114 (NM_033069.1,850-868).
gaacctactcatcactttt

SEQ ID NO: 402778 - DNA, 19 bp, Homo sapiens
  siRNA target sequence for C6orf114 (NM_033069.1,853-871).
cctactcatcacttttgga

SEQ ID NO: 402779 - DNA, 19 bp, Homo sapiens
  siRNA target sequence for C6orf114 (NM_033069.1,888-906).
gcattctatggagtactta

SEQ ID NO: 402780 - DNA, 19 bp, Homo sapiens
  siRNA target sequence for SYNE1 (NM_033071.1,471-489).
cgggatatcgccaatgtga

SEQ ID NO: 402781 - DNA, 19 bp, Homo sapiens
  siRNA target sequence for SYNE1 (NM_033071.1,472-490).
gggatatcgccaatgtgat

SEQ ID NO: 402782 - DNA, 19 bp, Homo sapiens
  siRNA target sequence for SYNE1 (NM_033071.1,513-531).
gagatagtacaaaaacgaa

SEQ ID NO: 402783 - DNA, 19 bp, Homo sapiens
  siRNA target sequence for SYNE1 (NM_033071.1,519-537).
gtacaaaaacgaactttca

SEQ ID NO: 402784 - DNA, 19 bp, Homo sapiens
  siRNA target sequence for SYNE1 (NM_033071.1,522-540).
caaaaacgaactttcacaa

SEQ ID NO: 402785 - DNA, 19 bp, Homo sapiens
  siRNA target sequence for SYNE1 (NM_033071.1,581-599).
ggtggtggacgatcttttt

SEQ ID NO: 402786 - DNA, 19 bp, Homo sapiens
  siRNA target sequence for SYNE1 (NM_033071.1,584-602).
ggtggacgatctttttgaa

SEQ ID NO: 402787 - DNA, 19 bp, Homo sapiens
  siRNA target sequence for SYNE1 (NM_033071.1,680-698).
ccggatgaagcgaatccat

SEQ ID NO: 402788 - DNA, 19 bp, Homo sapiens
  siRNA target sequence for SYNE1 (NM_033071.1,757-775).
gaggatcaccgattaaatt

SEQ ID NO: 402789 - DNA, 19 bp, Homo sapiens
  siRNA target sequence for SYNE1 (NM_033071.1,760-778).
gatcaccgattaaattagt

SEQ ID NO: 402790 - DNA, 19 bp, Homo sapiens
  siRNA target sequence for SYNE1 (NM_033071.1,763-781).
caccgattaaattagtcaa

SEQ ID NO: 402791 - DNA, 19 bp, Homo sapiens
  siRNA target sequence for SYNE1 (NM_033071.1,782-800).
cattaactccaccgatata

SEQ ID NO: 402792 - DNA, 19 bp, Homo sapiens
  siRNA target sequence for SYNE1 (NM_033071.1,808-826).
gccgaccctcaatagttct

SEQ ID NO: 402793 - DNA, 19 bp, Homo sapiens
  siRNA target sequence for SYNE1 (NM_033071.1,809-827).
ccgaccctcaatagttctt

SEQ ID NO: 402794 - DNA, 19 bp, Homo sapiens
  siRNA target sequence for SYNE1 (NM_033071.1,814-832).
cctcaatagttcttggatt

SEQ ID NO: 402795 - DNA, 19 bp, Homo sapiens
  siRNA target sequence for SYNE1 (NM_033071.1,829-847).
gattgatgtggaccattat

SEQ ID NO: 402796 - DNA, 19 bp, Homo sapiens
  siRNA target sequence for SYNE1 (NM_033071.1,833-851).
gatgtggaccattattcta

SEQ ID NO: 402797 - DNA, 19 bp, Homo sapiens
  siRNA target sequence for SYNE1 (NM_033071.1,836-854).
gtggaccattattctatat

SEQ ID NO: 402798 - DNA, 19 bp, Homo sapiens
  siRNA target sequence for SYNE1 (NM_033071.1,838-856).
ggaccattattctatattt

SEQ ID NO: 402799 - DNA, 19 bp, Homo sapiens
  siRNA target sequence for SYNE1 (NM_033071.1,946-964).
ctcccagcccaccaagtaa

SEQ ID NO: 402800 - DNA, 19 bp, Homo sapiens
  siRNA target sequence for SYNE1 (NM_033071.1,980-998).
caagatccaaggaaatgct

SEQ ID NO: 402801 - DNA, 19 bp, Homo sapiens
  siRNA target sequence for SYNE1 (NM_033071.1,1036-1054).
gcaagcagactggaataga

SEQ ID NO: 402802 - DNA, 19 bp, Homo sapiens
  siRNA target sequence for SYNE1 (NM_033071.1,1085-1103).
cggggttgcctttcattca

SEQ ID NO: 402803 - DNA, 19 bp, Homo sapiens
  siRNA target sequence for SYNE1 (NM_033071.1,1088-1106).
ggttgcctttcattcagtt

SEQ ID NO: 402804 - DNA, 19 bp, Homo sapiens
  siRNA target sequence for SYNE1 (NM_033071.1,1089-1107).
gttgcctttcattcagtta

SEQ ID NO: 402805 - DNA, 19 bp, Homo sapiens
  siRNA target sequence for SYNE1 (NM_033071.1,1114-1132).
ccattcgaccggaattggt

SEQ ID NO: 402806 - DNA, 19 bp, Homo sapiens
  siRNA target sequence for SYNE1 (NM_033071.1,1187-1205).
cactatcgccgaaacagaa

SEQ ID NO: 402807 - DNA, 19 bp, Homo sapiens
  siRNA target sequence for SYNE1 (NM_033071.1,1238-1256).
cgttgatgtggataaacca

SEQ ID NO: 402808 - DNA, 19 bp, Homo sapiens
  siRNA target sequence for SYNE1 (NM_033071.1,1364-1382).
cccatcttttgcaaattct

SEQ ID NO: 402809 - DNA, 19 bp, Homo sapiens
  siRNA target sequence for SYNE1 (NM_033071.1,1440-1458).
gaacaatttgagagagatt

SEQ ID NO: 402810 - DNA, 19 bp, Homo sapiens
  siRNA target sequence for SYNE1 (NM_033071.1,1467-1485).
gcacagatggtggaatcaa

SEQ ID NO: 402811 - DNA, 19 bp, Homo sapiens
  siRNA target sequence for SYNE1 (NM_033071.1,1493-1511).
ggataaatatcagtcattt

SEQ ID NO: 402812 - DNA, 19 bp, Homo sapiens
  siRNA target sequence for SYNE1 (NM_033071.1,1575-1593).
cacagagacggtaaattgt

SEQ ID NO: 402813 - DNA, 19 bp, Homo sapiens
  siRNA target sequence for SYNE1 (NM_033071.1,1577-1595).
cagagacggtaaattgtca

SEQ ID NO: 402814 - DNA, 19 bp, Homo sapiens
  siRNA target sequence for SYNE1 (NM_033071.1,1596-1614).
cttgaccaagcattggtaa

SEQ ID NO: 402815 - DNA, 19 bp, Homo sapiens
  siRNA target sequence for SYNE1 (NM_033071.1,1605-1623).
gcattggtaaaacaatctt

SEQ ID NO: 402816 - DNA, 19 bp, Homo sapiens
  siRNA target sequence for SYNE1 (NM_033071.1,1643-1661).
gctctttgactggcatata

SEQ ID NO: 402817 - DNA, 19 bp, Homo sapiens
  siRNA target sequence for SYNE1 (NM_033071.1,1654-1672).
ggcatatacagcttgataa

SEQ ID NO: 402818 - DNA, 19 bp, Homo sapiens
  siRNA target sequence for SYNE1 (NM_033071.1,1656-1674).
catatacagcttgataaat

SEQ ID NO: 402819 - DNA, 19 bp, Homo sapiens
  siRNA target sequence for SYNE1 (NM_033071.1,1727-1745).
ggccctgagagaggaaata

SEQ ID NO: 402820 - DNA, 19 bp, Homo sapiens
  siRNA target sequence for SYNE1 (NM_033071.1,1778-1796).
cacgatacaacggaaactt

SEQ ID NO: 402821 - DNA, 19 bp, Homo sapiens
  siRNA target sequence for SYNE1 (NM_033071.1,1780-1798).
cgatacaacggaaacttga

SEQ ID NO: 402822 - DNA, 19 bp, Homo sapiens
  siRNA target sequence for SYNE1 (NM_033071.1,1788-1806).
cggaaacttgagcaacata

SEQ ID NO: 402823 - DNA, 19 bp, Homo sapiens
  siRNA target sequence for SYNE1 (NM_033071.1,1823-1841).
cacggatgcccacaaaaga

SEQ ID NO: 402824 - DNA, 19 bp, Homo sapiens
  siRNA target sequence for SYNE1 (NM_033071.1,1884-1902).
ccagtgccacctgatcaat

SEQ ID NO: 402825 - DNA, 19 bp, Homo sapiens
  siRNA target sequence for SYNE1 (NM_033071.1,1885-1903).
cagtgccacctgatcaatt

SEQ ID NO: 402826 - DNA, 19 bp, Homo sapiens
  siRNA target sequence for SYNE1 (NM_033071.1,1910-1928).
catggccgagaggtttcat

SEQ ID NO: 402827 - DNA, 19 bp, Homo sapiens
  siRNA target sequence for SYNE1 (NM_033071.1,1953-1971).
cacctaatgaaaatggaat

SEQ ID NO: 402828 - DNA, 19 bp, Homo sapiens
  siRNA target sequence for SYNE1 (NM_033071.1,2025-2043).
ctgaagtcttggatcatta

SEQ ID NO: 402829 - DNA, 19 bp, Homo sapiens
  siRNA target sequence for SYNE1 (NM_033071.1,2079-2097).
caaaactacgtgtctttta

SEQ ID NO: 402830 - DNA, 19 bp, Homo sapiens
  siRNA target sequence for SYNE1 (NM_033071.1,2087-2105).
cgtgtcttttatagaaaat

SEQ ID NO: 402831 - DNA, 19 bp, Homo sapiens
  siRNA target sequence for SYNE1 (NM_033071.1,2132-2150).
gacataccagatcttgaaa

SEQ ID NO: 402832 - DNA, 19 bp, Homo sapiens
  siRNA target sequence for SYNE1 (NM_033071.1,2155-2173).
cagctgagatgtatgtcaa

SEQ ID NO: 402833 - DNA, 19 bp, Homo sapiens
  siRNA target sequence for SYNE1 (NM_033071.1,2232-2250).
gctcagtggaggaatctct

SEQ ID NO: 402834 - DNA, 19 bp, Homo sapiens
  siRNA target sequence for SYNE1 (NM_033071.1,2240-2258).
gaggaatctctcagtagaa

SEQ ID NO: 402835 - DNA, 19 bp, Homo sapiens
  siRNA target sequence for SYNE1 (NM_033071.1,2283-2301).
gaagaagtgatctctaact

SEQ ID NO: 402836 - DNA, 19 bp, Homo sapiens
  siRNA target sequence for SYNE1 (NM_033071.1,2303-2321).
ggatcgctatggcaataca

SEQ ID NO: 402837 - DNA, 19 bp, Homo sapiens
  siRNA target sequence for SYNE1 (NM_033071.1,2353-2371).
ctgaaaaaatgctcaatca

SEQ ID NO: 402838 - DNA, 19 bp, Homo sapiens
  siRNA target sequence for SYNE1 (NM_033071.1,2448-2466).
ggcaattttctaattgaaa

SEQ ID NO: 402839 - DNA, 19 bp, Homo sapiens
  siRNA target sequence for SYNE1 (NM_033071.1,2488-2506).
gtgacctgaagcagcaatt

SEQ ID NO: 402840 - DNA, 19 bp, Homo sapiens
  siRNA target sequence for SYNE1 (NM_033071.1,2499-2517).
cagcaattactgttgctaa

SEQ ID NO: 402841 - DNA, 19 bp, Homo sapiens
  siRNA target sequence for SYNE1 (NM_033071.1,2523-2541).
cggtggagggagttgttta

SEQ ID NO: 402842 - DNA, 19 bp, Homo sapiens
  siRNA target sequence for SYNE1 (NM_033071.1,2528-2546).
gagggagttgtttatggaa

SEQ ID NO: 402843 - DNA, 19 bp, Homo sapiens
  siRNA target sequence for SYNE1 (NM_033071.1,2628-2646).
gcaacggaagcccataaga

SEQ ID NO: 402844 - DNA, 19 bp, Homo sapiens
  siRNA target sequence for SYNE1 (NM_033071.1,2629-2647).
caacggaagcccataagaa

SEQ ID NO: 402845 - DNA, 19 bp, Homo sapiens
  siRNA target sequence for SYNE1 (NM_033071.1,2735-2753).
ggatgcccaatacaagata

SEQ ID NO: 402846 - DNA, 19 bp, Homo sapiens
  siRNA target sequence for SYNE1 (NM_033071.1,2844-2862).
ctaaccaaggtcaaagaat

SEQ ID NO: 402847 - DNA, 19 bp, Homo sapiens
  siRNA target sequence for SYNE1 (NM_033071.1,2863-2881).
gttactccccactccttta

SEQ ID NO: 402848 - DNA, 19 bp, Homo sapiens
  siRNA target sequence for SYNE1 (NM_033071.1,2924-2942).
gcagatgacgtccttttat

SEQ ID NO: 402849 - DNA, 19 bp, Homo sapiens
  siRNA target sequence for SYNE1 (NM_033071.1,2943-2961).
gactcacttgggaaaatca

SEQ ID NO: 402850 - DNA, 19 bp, Homo sapiens
  siRNA target sequence for SYNE1 (NM_033071.1,2994-3012).
caatcgagtgcccttttta

SEQ ID NO: 402851 - DNA, 19 bp, Homo sapiens
  siRNA target sequence for SYNE1 (NM_033071.1,2998-3016).
cgagtgccctttttaaaca

SEQ ID NO: 402852 - DNA, 19 bp, Homo sapiens
  siRNA target sequence for SYNE1 (NM_033071.1,3061-3079).
ccttgacacttattgagaa

SEQ ID NO: 402853 - DNA, 19 bp, Homo sapiens
  siRNA target sequence for SYNE1 (NM_033071.1,3062-3080).
cttgacacttattgagaaa

SEQ ID NO: 402854 - DNA, 19 bp, Homo sapiens
  siRNA target sequence for SYNE1 (NM_033071.1,3081-3099).
ggcagtcaaagtgttcaaa

SEQ ID NO: 402855 - DNA, 19 bp, Homo sapiens
  siRNA target sequence for SYNE1 (NM_033071.1,3082-3100).
gcagtcaaagtgttcaaaa

SEQ ID NO: 402856 - DNA, 19 bp, Homo sapiens
  siRNA target sequence for SYNE1 (NM_033071.1,3115-3133).
gcaacgtgttaaagcattt

SEQ ID NO: 402857 - DNA, 19 bp, Homo sapiens
  siRNA target sequence for SYNE1 (NM_033071.1,3116-3134).
caacgtgttaaagcatttt

SEQ ID NO: 402858 - DNA, 19 bp, Homo sapiens
  siRNA target sequence for SYNE1 (NM_033071.1,3135-3153).
gatcagacgaggctacaaa

SEQ ID NO: 402859 - DNA, 19 bp, Homo sapiens
  siRNA target sequence for SYNE1 (NM_033071.1,3177-3195).
gcttttcagagtatggtaa

SEQ ID NO: 402860 - DNA, 19 bp, Homo sapiens
  siRNA target sequence for SYNE1 (NM_033071.1,3185-3203).
gagtatggtaaagaaaact

SEQ ID NO: 402861 - DNA, 19 bp, Homo sapiens
  siRNA target sequence for SYNE1 (NM_033071.1,3229-3247).
ccaacagtcgcttgatgaa

SEQ ID NO: 402862 - DNA, 19 bp, Homo sapiens
  siRNA target sequence for SYNE1 (NM_033071.1,3238-3256).
gcttgatgaagaagtttga

SEQ ID NO: 402863 - DNA, 19 bp, Homo sapiens
  siRNA target sequence for SYNE1 (NM_033071.1,3338-3356).
gcggagacacactgagttt

SEQ ID NO: 402864 - DNA, 19 bp, Homo sapiens
  siRNA target sequence for SYNE1 (NM_033071.1,3339-3357).
cggagacacactgagtttt

SEQ ID NO: 402865 - DNA, 19 bp, Homo sapiens
  siRNA target sequence for SYNE1 (NM_033071.1,3340-3358).
ggagacacactgagttttt

SEQ ID NO: 402866 - DNA, 19 bp, Homo sapiens
  siRNA target sequence for SYNE1 (NM_033071.1,3462-3480).
cgaaagctccacaaacaat

SEQ ID NO: 402867 - DNA, 19 bp, Homo sapiens
  siRNA target sequence for SYNE1 (NM_033071.1,3496-3514).
gagaagccccttatcattt

SEQ ID NO: 402868 - DNA, 19 bp, Homo sapiens
  siRNA target sequence for SYNE1 (NM_033071.1,3505-3523).
cttatcatttgcttcatct

SEQ ID NO: 402869 - DNA, 19 bp, Homo sapiens
  siRNA target sequence for SYNE1 (NM_033071.1,3636-3654).
gagcacagggttttcttca

SEQ ID NO: 402870 - DNA, 19 bp, Homo sapiens
  siRNA target sequence for SYNE1 (NM_033071.1,3701-3719).
cgaggaactctgtgtgaaa

SEQ ID NO: 402871 - DNA, 19 bp, Homo sapiens
  siRNA target sequence for SYNE1 (NM_033071.1,3758-3776).
ctgtcacgtgactctcaaa

SEQ ID NO: 402872 - DNA, 19 bp, Homo sapiens
  siRNA target sequence for SYNE1 (NM_033071.1,3840-3858).
gactacactagcagattct

SEQ ID NO: 402873 - DNA, 19 bp, Homo sapiens
  siRNA target sequence for SYNE1 (NM_033071.1,3861-3879).
gagttctcatcttggatat

SEQ ID NO: 402874 - DNA, 19 bp, Homo sapiens
  siRNA target sequence for SYNE1 (NM_033071.1,3863-3881).
gttctcatcttggatatct

SEQ ID NO: 402875 - DNA, 19 bp, Homo sapiens
  siRNA target sequence for SYNE1 (NM_033071.1,3866-3884).
ctcatcttggatatctaca

SEQ ID NO: 402876 - DNA, 19 bp, Homo sapiens
  siRNA target sequence for SYNE1 (NM_033071.1,3931-3949).
ccaaccacggagaggttaa

SEQ ID NO: 402877 - DNA, 19 bp, Homo sapiens
  siRNA target sequence for SYNE1 (NM_033071.1,3935-3953).
ccacggagaggttaaacgt

SEQ ID NO: 402878 - DNA, 19 bp, Homo sapiens
  siRNA target sequence for SYNE1 (NM_033071.1,3954-3972).
gccgttgaagagatcagaa

SEQ ID NO: 402879 - DNA, 19 bp, Homo sapiens
  siRNA target sequence for SYNE1 (NM_033071.1,4010-4028).
gaaatccaggctgaaagtt

SEQ ID NO: 402880 - DNA, 19 bp, Homo sapiens
  siRNA target sequence for SYNE1 (NM_033071.1,4071-4089).
gatgagctggcaaaattat

SEQ ID NO: 402881 - DNA, 19 bp, Homo sapiens
  siRNA target sequence for SYNE1 (NM_033071.1,4164-4182).
cagtacaaagaaatagtca

SEQ ID NO: 402882 - DNA, 19 bp, Homo sapiens
  siRNA target sequence for SYNE1 (NM_033071.1,4233-4251).
gctgagaagatcttggata

SEQ ID NO: 402883 - DNA, 19 bp, Homo sapiens
  siRNA target sequence for SYNE1 (NM_033071.1,4308-4326).
cggatctcagcaaagaaga

SEQ ID NO: 402884 - DNA, 19 bp, Homo sapiens
  siRNA target sequence for SYNE1 (NM_033071.1,4457-4475).
ccgcatccaggtcacatta

SEQ ID NO: 402885 - DNA, 19 bp, Homo sapiens
  siRNA target sequence for SYNE1 (NM_033071.1,4458-4476).
cgcatccaggtcacattaa

SEQ ID NO: 402886 - DNA, 19 bp, Homo sapiens
  siRNA target sequence for SYNE1 (NM_033071.1,4510-4528).
cagtagtaagatacctttt

SEQ ID NO: 402887 - DNA, 19 bp, Homo sapiens
  siRNA target sequence for SYNE1 (NM_033071.1,4515-4533).
gtaagatacctttttcaaa

SEQ ID NO: 402888 - DNA, 19 bp, Homo sapiens
  siRNA target sequence for SYNE1 (NM_033071.1,4551-4569).
cgcttcttgagttttagca

SEQ ID NO: 402889 - DNA, 19 bp, Homo sapiens
  siRNA target sequence for SYNE1 (NM_033071.1,4599-4617).
caaacaaaggagttttcta

SEQ ID NO: 402890 - DNA, 19 bp, Homo sapiens
  siRNA target sequence for SYNE1 (NM_033071.1,4615-4633).
ctaaacggacagaaagtat

SEQ ID NO: 402891 - DNA, 19 bp, Homo sapiens
  siRNA target sequence for SYNE1 (NM_033071.1,4641-4659).
caggctgagaaccttgtaa

SEQ ID NO: 402892 - DNA, 19 bp, Homo sapiens
  siRNA target sequence for SYNE1 (NM_033071.1,4754-4772).
cacgcttgaagaagatatt

SEQ ID NO: 402893 - DNA, 19 bp, Homo sapiens
  siRNA target sequence for SYNE1 (NM_033071.1,4835-4853).
cgtctggataactgagaaa

SEQ ID NO: 402894 - DNA, 19 bp, Homo sapiens
  siRNA target sequence for SYNE1 (NM_033071.1,4909-4927).
gccaaattaaggtcacaat

SEQ ID NO: 402895 - DNA, 19 bp, Homo sapiens
  siRNA target sequence for SYNE1 (NM_033071.1,5007-5025).
ggagaatctgctcgaatta

SEQ ID NO: 402896 - DNA, 19 bp, Homo sapiens
  siRNA target sequence for SYNE1 (NM_033071.1,5019-5037).
cgaattaaagccaagttga

SEQ ID NO: 402897 - DNA, 19 bp, Homo sapiens
  siRNA target sequence for SYNE1 (NM_033071.1,5153-5171).
gcaatctgtgtctgaattt

SEQ ID NO: 402898 - DNA, 19 bp, Homo sapiens
  siRNA target sequence for SYNE1 (NM_033071.1,5187-5205).
gttccaattaaaatatgtt

SEQ ID NO: 402899 - DNA, 19 bp, Homo sapiens
  siRNA target sequence for SYNE1 (NM_033071.1,5432-5450).
gaggctagagaaagaacta

SEQ ID NO: 402900 - DNA, 19 bp, Homo sapiens
  siRNA target sequence for SYNE1 (NM_033071.1,5435-5453).
gctagagaaagaactatca

SEQ ID NO: 402901 - DNA, 19 bp, Homo sapiens
  siRNA target sequence for SYNE1 (NM_033071.1,5515-5533).
ctgcagacagagtcaaagt

SEQ ID NO: 402902 - DNA, 19 bp, Homo sapiens
  siRNA target sequence for SYNE1 (NM_033071.1,5583-5601).
caggcctcattctatagca

SEQ ID NO: 402903 - DNA, 19 bp, Homo sapiens
  siRNA target sequence for SYNE1 (NM_033071.1,5588-5606).
ctcattctatagcaaactt

SEQ ID NO: 402904 - DNA, 19 bp, Homo sapiens
  siRNA target sequence for SYNE1 (NM_033071.1,5599-5617).
gcaaacttttgcaattgaa

SEQ ID NO: 402905 - DNA, 19 bp, Homo sapiens
  siRNA target sequence for SYNE1 (NM_033071.1,5690-5708).
gagatggagagatttacca

SEQ ID NO: 402906 - DNA, 19 bp, Homo sapiens
  siRNA target sequence for SYNE1 (NM_033071.1,5700-5718).
gatttaccacagatcatta

SEQ ID NO: 402907 - DNA, 19 bp, Homo sapiens
  siRNA target sequence for SYNE1 (NM_033071.1,5752-5770).
ctgaacaccagcaatttga

SEQ ID NO: 402908 - DNA, 19 bp, Homo sapiens
  siRNA target sequence for SYNE1 (NM_033071.1,5807-5825).
gtttctcagtgaattacaa

SEQ ID NO: 402909 - DNA, 19 bp, Homo sapiens
  siRNA target sequence for SYNE1 (NM_033071.1,5811-5829).
ctcagtgaattacaaacta

SEQ ID NO: 402910 - DNA, 19 bp, Homo sapiens
  siRNA target sequence for SYNE1 (NM_033071.1,5830-5848).
cctctgagattagcataat

SEQ ID NO: 402911 - DNA, 19 bp, Homo sapiens
  siRNA target sequence for SYNE1 (NM_033071.1,5833-5851).
ctgagattagcataatgga

SEQ ID NO: 402912 - DNA, 19 bp, Homo sapiens
  siRNA target sequence for SYNE1 (NM_033071.1,5842-5860).
gcataatggaccatcaagt

SEQ ID NO: 402913 - DNA, 19 bp, Homo sapiens
  siRNA target sequence for SYNE1 (NM_033071.1,5843-5861).
cataatggaccatcaagta

SEQ ID NO: 402914 - DNA, 19 bp, Homo sapiens
  siRNA target sequence for SYNE1 (NM_033071.1,5863-5881).
cccttactcggcataagga

SEQ ID NO: 402915 - DNA, 19 bp, Homo sapiens
  siRNA target sequence for SYNE1 (NM_033071.1,5902-5920).
gcaaaaagggcgaattgca

SEQ ID NO: 402916 - DNA, 19 bp, Homo sapiens
  siRNA target sequence for SYNE1 (NM_033071.1,6155-6173).
gaacgagtctgatttgata

SEQ ID NO: 402917 - DNA, 19 bp, Homo sapiens
  siRNA target sequence for SYNE1 (NM_033071.1,6158-6176).
cgagtctgatttgatagaa

SEQ ID NO: 402918 - DNA, 19 bp, Homo sapiens
  siRNA target sequence for SYNE1 (NM_033071.1,6159-6177).
gagtctgatttgatagaaa

SEQ ID NO: 402919 - DNA, 19 bp, Homo sapiens
  siRNA target sequence for SYNE1 (NM_033071.1,6183-6201).
ctcaatgatgctcttcaaa

SEQ ID NO: 402920 - DNA, 19 bp, Homo sapiens
  siRNA target sequence for SYNE1 (NM_033071.1,6189-6207).
gatgctcttcaaaatgcta

SEQ ID NO: 402921 - DNA, 19 bp, Homo sapiens
  siRNA target sequence for SYNE1 (NM_033071.1,6460-6478).
ctgacaaagagcgattgaa

SEQ ID NO: 402922 - DNA, 19 bp, Homo sapiens
  siRNA target sequence for SYNE1 (NM_033071.1,6508-6526).
ggttaagagtgtttaatca

SEQ ID NO: 402923 - DNA, 19 bp, Homo sapiens
  siRNA target sequence for SYNE1 (NM_033071.1,6525-6543).
cagctagaagatgaattga

SEQ ID NO: 402924 - DNA, 19 bp, Homo sapiens
  siRNA target sequence for SYNE1 (NM_033071.1,6549-6567).
cacgagcatgaactatgtt

SEQ ID NO: 402925 - DNA, 19 bp, Homo sapiens
  siRNA target sequence for SYNE1 (NM_033071.1,6587-6605).
gcaaattgcccagaaagat

SEQ ID NO: 402926 - DNA, 19 bp, Homo sapiens
  siRNA target sequence for SYNE1 (NM_033071.1,6595-6613).
cccagaaagatgtagcttt

SEQ ID NO: 402927 - DNA, 19 bp, Homo sapiens
  siRNA target sequence for SYNE1 (NM_033071.1,6599-6617).
gaaagatgtagcttttgca

SEQ ID NO: 402928 - DNA, 19 bp, Homo sapiens
  siRNA target sequence for SYNE1 (NM_033071.1,6610-6628).
cttttgcacctgaagttga

SEQ ID NO: 402929 - DNA, 19 bp, Homo sapiens
  siRNA target sequence for SYNE1 (NM_033071.1,6656-6674).
ctgggatgataccaaaaga

SEQ ID NO: 402930 - DNA, 19 bp, Homo sapiens
  siRNA target sequence for SYNE1 (NM_033071.1,6673-6691).
gactaattcatgaaaatca

SEQ ID NO: 402931 - DNA, 19 bp, Homo sapiens
  siRNA target sequence for SYNE1 (NM_033071.1,6694-6712).
gtcagtgctgtggacttat

SEQ ID NO: 402932 - DNA, 19 bp, Homo sapiens
  siRNA target sequence for SYNE1 (NM_033071.1,6703-6721).
gtggacttattgacttaat

SEQ ID NO: 402933 - DNA, 19 bp, Homo sapiens
  siRNA target sequence for SYNE1 (NM_033071.1,6780-6798).
gtgattgtaaccagaacta

SEQ ID NO: 402934 - DNA, 19 bp, Homo sapiens
  siRNA target sequence for SYNE1 (NM_033071.1,6786-6804).
gtaaccagaactaccataa

SEQ ID NO: 402935 - DNA, 19 bp, Homo sapiens
  siRNA target sequence for SYNE1 (NM_033071.1,6790-6808).
ccagaactaccataaaaga

SEQ ID NO: 402936 - DNA, 19 bp, Homo sapiens
  siRNA target sequence for SYNE1 (NM_033071.1,6807-6825).
gatcaggaggatcttaaat

SEQ ID NO: 402937 - DNA, 19 bp, Homo sapiens
  siRNA target sequence for SYNE1 (NM_033071.1,6828-6846).
gctttttccaagcatgaaa

SEQ ID NO: 402938 - DNA, 19 bp, Homo sapiens
  siRNA target sequence for SYNE1 (NM_033071.1,6840-6858).
catgaaactgccaagaaca

SEQ ID NO: 402939 - DNA, 19 bp, Homo sapiens
  siRNA target sequence for SYNE1 (NM_033071.1,6904-6922).
gaaaacacttgttatctga

SEQ ID NO: 402940 - DNA, 19 bp, Homo sapiens
  siRNA target sequence for SYNE1 (NM_033071.1,6992-7010).
gctggatgtatcagagaaa

SEQ ID NO: 402941 - DNA, 19 bp, Homo sapiens
  siRNA target sequence for SYNE1 (NM_033071.1,7046-7064).
gtccatttgggatgatgta

SEQ ID NO: 402942 - DNA, 19 bp, Homo sapiens
  siRNA target sequence for SYNE1 (NM_033071.1,7067-7085).
gtcaactagagatgagatt

SEQ ID NO: 402943 - DNA, 19 bp, Homo sapiens
  siRNA target sequence for SYNE1 (NM_033071.1,7069-7087).
caactagagatgagattga

SEQ ID NO: 402944 - DNA, 19 bp, Homo sapiens
  siRNA target sequence for SYNE1 (NM_033071.1,7220-7238).
gcattccaaagttaatgat

SEQ ID NO: 402945 - DNA, 19 bp, Homo sapiens
  siRNA target sequence for SYNE1 (NM_033071.1,7225-7243).
ccaaagttaatgatctgaa

SEQ ID NO: 402946 - DNA, 19 bp, Homo sapiens
  siRNA target sequence for SYNE1 (NM_033071.1,7269-7287).
ccgccagaccttcagttta

SEQ ID NO: 402947 - DNA, 19 bp, Homo sapiens
  siRNA target sequence for SYNE1 (NM_033071.1,7358-7376).
ggatttcacggctcaaagt

SEQ ID NO: 402948 - DNA, 19 bp, Homo sapiens
  siRNA target sequence for SYNE1 (NM_033071.1,7359-7377).
gatttcacggctcaaagta

SEQ ID NO: 402949 - DNA, 19 bp, Homo sapiens
  siRNA target sequence for SYNE1 (NM_033071.1,7364-7382).
cacggctcaaagtacacaa

SEQ ID NO: 402950 - DNA, 19 bp, Homo sapiens
  siRNA target sequence for SYNE1 (NM_033071.1,7420-7438).
caaaagtggaagaatcgtt

SEQ ID NO: 402951 - DNA, 19 bp, Homo sapiens
  siRNA target sequence for SYNE1 (NM_033071.1,7425-7443).
gtggaagaatcgttgatga

SEQ ID NO: 402952 - DNA, 19 bp, Homo sapiens
  siRNA target sequence for SYNE1 (NM_033071.1,7460-7478).
gacttgtgaagcattgaaa

SEQ ID NO: 402953 - DNA, 19 bp, Homo sapiens
  siRNA target sequence for SYNE1 (NM_033071.1,7589-7607).
cctgggccgtgcaatgact

SEQ ID NO: 402954 - DNA, 19 bp, Homo sapiens
  siRNA target sequence for SYNE1 (NM_033071.1,7600-7618).
caatgactggtctgataaa

SEQ ID NO: 402955 - DNA, 19 bp, Homo sapiens
  siRNA target sequence for SYNE1 (NM_033071.1,7604-7622).
gactggtctgataaagaaa

SEQ ID NO: 402956 - DNA, 19 bp, Homo sapiens
  siRNA target sequence for SYNE1 (NM_033071.1,7609-7627).
gtctgataaagaaacatga

SEQ ID NO: 402957 - DNA, 19 bp, Homo sapiens
  siRNA target sequence for SYNE1 (NM_033071.1,7697-7715).
gtctatgcaggaattccaa

SEQ ID NO: 402958 - DNA, 19 bp, Homo sapiens
  siRNA target sequence for SYNE1 (NM_033071.1,7763-7781).
caccggtgacagcaaagtt

SEQ ID NO: 402959 - DNA, 19 bp, Homo sapiens
  siRNA target sequence for SYNE1 (NM_033071.1,7765-7783).
ccggtgacagcaaagttct

SEQ ID NO: 402960 - DNA, 19 bp, Homo sapiens
  siRNA target sequence for SYNE1 (NM_033071.1,7766-7784).
cggtgacagcaaagttcta

SEQ ID NO: 402961 - DNA, 19 bp, Homo sapiens
  siRNA target sequence for SYNE1 (NM_033071.1,7768-7786).
gtgacagcaaagttctaga

SEQ ID NO: 402962 - DNA, 19 bp, Homo sapiens
  siRNA target sequence for SYNE1 (NM_033071.1,7789-7807).
caaagctccatgatcttca

SEQ ID NO: 402963 - DNA, 19 bp, Homo sapiens
  siRNA target sequence for SYNE1 (NM_033071.1,8068-8086).
ggttcaatacggaaaactt

SEQ ID NO: 402964 - DNA, 19 bp, Homo sapiens
  siRNA target sequence for SYNE1 (NM_033071.1,8166-8184).
gcaagagagtctcttgata

SEQ ID NO: 402965 - DNA, 19 bp, Homo sapiens
  siRNA target sequence for SYNE1 (NM_033071.1,8270-8288).
ccaccagaacctacttaga

SEQ ID NO: 402966 - DNA, 19 bp, Homo sapiens
  siRNA target sequence for SYNE1 (NM_033071.1,8283-8301).
cttagaatgaccaaagaga

SEQ ID NO: 402967 - DNA, 19 bp, Homo sapiens
  siRNA target sequence for SYNE1 (NM_033071.1,8439-8457).
gagaaacggctgtcacaaa

SEQ ID NO: 402968 - DNA, 19 bp, Homo sapiens
  siRNA target sequence for SYNE1 (NM_033071.1,8487-8505).
ggggaagttaagttgaata

SEQ ID NO: 402969 - DNA, 19 bp, Homo sapiens
  siRNA target sequence for SYNE1 (NM_033071.1,8561-8579).
ggtgattcagactcagtta

SEQ ID NO: 402970 - DNA, 19 bp, Homo sapiens
  siRNA target sequence for SYNE1 (NM_033071.1,8576-8594).
gttagagacccttaaagaa

SEQ ID NO: 402971 - DNA, 19 bp, Homo sapiens
  siRNA target sequence for SYNE1 (NM_033071.1,8628-8646).
gctcaaagcactttagagt

SEQ ID NO: 402972 - DNA, 19 bp, Homo sapiens
  siRNA target sequence for SYNE1 (NM_033071.1,8636-8654).
cactttagagtctgtgatt

SEQ ID NO: 402973 - DNA, 19 bp, Homo sapiens
  siRNA target sequence for SYNE1 (NM_033071.1,8705-8723).
ggaatcagtggatcaaaaa

SEQ ID NO: 402974 - DNA, 19 bp, Homo sapiens
  siRNA target sequence for SYNE1 (NM_033071.1,8852-8870).
ggagctctacgaaaagaca

SEQ ID NO: 402975 - DNA, 19 bp, Homo sapiens
  siRNA target sequence for SYNE1 (NM_033071.1,8903-8921).
ggagctgaaaacacagttt

SEQ ID NO: 402976 - DNA, 19 bp, Homo sapiens
  siRNA target sequence for SYNE1 (NM_033071.1,8909-8927).
gaaaacacagtttaatgat

SEQ ID NO: 402977 - DNA, 19 bp, Homo sapiens
  siRNA target sequence for SYNE1 (NM_033071.1,9003-9021).
gtccacgagttcacagatt

SEQ ID NO: 402978 - DNA, 19 bp, Homo sapiens
  siRNA target sequence for SYNE1 (NM_033071.1,9045-9063).
cttcaccggtggtcagata

SEQ ID NO: 402979 - DNA, 19 bp, Homo sapiens
  siRNA target sequence for SYNE1 (NM_033071.1,9048-9066).
caccggtggtcagatatgt

SEQ ID NO: 402980 - DNA, 19 bp, Homo sapiens
  siRNA target sequence for SYNE1 (NM_033071.1,9050-9068).
ccggtggtcagatatgtct

SEQ ID NO: 402981 - DNA, 19 bp, Homo sapiens
  siRNA target sequence for SYNE1 (NM_033071.1,9060-9078).
gatatgtctggagattcat

SEQ ID NO: 402982 - DNA, 19 bp, Homo sapiens
  siRNA target sequence for SYNE1 (NM_033071.1,9083-9101).
cacccagaaaaagttatca

SEQ ID NO: 402983 - DNA, 19 bp, Homo sapiens
  siRNA target sequence for SYNE1 (NM_033071.1,9164-9182).
gctggctcccgaagtgaaa

SEQ ID NO: 402984 - DNA, 19 bp, Homo sapiens
  siRNA target sequence for SYNE1 (NM_033071.1,9470-9488).
gatactggatgctttgcaa

SEQ ID NO: 402985 - DNA, 19 bp, Homo sapiens
  siRNA target sequence for SYNE1 (NM_033071.1,9527-9545).
gaatgaactttgtcgattt

SEQ ID NO: 402986 - DNA, 19 bp, Homo sapiens
  siRNA target sequence for SYNE1 (NM_033071.1,9531-9549).
gaactttgtcgattttcca

SEQ ID NO: 402987 - DNA, 19 bp, Homo sapiens
  siRNA target sequence for SYNE1 (NM_033071.1,9557-9575).
gagtacctacagtggaaaa

SEQ ID NO: 402988 - DNA, 19 bp, Homo sapiens
  siRNA target sequence for SYNE1 (NM_033071.1,9559-9577).
gtacctacagtggaaaagt

SEQ ID NO: 402989 - DNA, 19 bp, Homo sapiens
  siRNA target sequence for SYNE1 (NM_033071.1,9580-9598).
ctggcttgattaaagagta

SEQ ID NO: 402990 - DNA, 19 bp, Homo sapiens
  siRNA target sequence for SYNE1 (NM_033071.1,9582-9600).
ggcttgattaaagagtata

SEQ ID NO: 402991 - DNA, 19 bp, Homo sapiens
  siRNA target sequence for SYNE1 (NM_033071.1,9583-9601).
gcttgattaaagagtataa

SEQ ID NO: 402992 - DNA, 19 bp, Homo sapiens
  siRNA target sequence for SYNE1 (NM_033071.1,9587-9605).
gattaaagagtataattgt

SEQ ID NO: 402993 - DNA, 19 bp, Homo sapiens
  siRNA target sequence for SYNE1 (NM_033071.1,9699-9717).
gttaatgcaaaaatcacta

SEQ ID NO: 402994 - DNA, 19 bp, Homo sapiens
  siRNA target sequence for SYNE1 (NM_033071.1,9715-9733).
ctaccgccaagtgttttga

SEQ ID NO: 402995 - DNA, 19 bp, Homo sapiens
  siRNA target sequence for SYNE1 (NM_033071.1,9760-9778).
caactagtcttcagaaaat

SEQ ID NO: 402996 - DNA, 19 bp, Homo sapiens
  siRNA target sequence for SYNE1 (NM_033071.1,9807-9825).
ggacagcacaagctaaaca

SEQ ID NO: 402997 - DNA, 19 bp, Homo sapiens
  siRNA target sequence for SYNE1 (NM_033071.1,9810-9828).
cagcacaagctaaacatga

SEQ ID NO: 402998 - DNA, 19 bp, Homo sapiens
  siRNA target sequence for SYNE1 (NM_033071.1,10014-10032).
caggactggctgagtaaaa

SEQ ID NO: 402999 - DNA, 19 bp, Homo sapiens
  siRNA target sequence for SYNE1 (NM_033071.1,10016-10034).
ggactggctgagtaaaact

SEQ ID NO: 403000 - DNA, 19 bp, Homo sapiens
  siRNA target sequence for SYNE1 (NM_033071.1,10055-10073).
cagcaatcgcctctatgat

SEQ ID NO: 403001 - DNA, 19 bp, Homo sapiens
  siRNA target sequence for SYNE1 (NM_033071.1,10057-10075).
gcaatcgcctctatgatct

SEQ ID NO: 403002 - DNA, 19 bp, Homo sapiens
  siRNA target sequence for SYNE1 (NM_033071.1,10238-10256).
gtatctagcgctaagcaat

SEQ ID NO: 403003 - DNA, 19 bp, Homo sapiens
  siRNA target sequence for SYNE1 (NM_033071.1,10242-10260).
ctagcgctaagcaatttaa

SEQ ID NO: 403004 - DNA, 19 bp, Homo sapiens
  siRNA target sequence for SYNE1 (NM_033071.1,10246-10264).
cgctaagcaatttaacaaa

SEQ ID NO: 403005 - DNA, 19 bp, Homo sapiens
  siRNA target sequence for SYNE1 (NM_033071.1,10288-10306).
gaatcgttgcagaacacaa

SEQ ID NO: 403006 - DNA, 19 bp, Homo sapiens
  siRNA target sequence for SYNE1 (NM_033071.1,10313-10331).
ctctcttgggattaaagaa

SEQ ID NO: 403007 - DNA, 19 bp, Homo sapiens
  siRNA target sequence for SYNE1 (NM_033071.1,10359-10377).
cacatgctggattcatact

SEQ ID NO: 403008 - DNA, 19 bp, Homo sapiens
  siRNA target sequence for SYNE1 (NM_033071.1,10380-10398).
cacccgacatccgacaaaa

SEQ ID NO: 403009 - DNA, 19 bp, Homo sapiens
  siRNA target sequence for SYNE1 (NM_033071.1,10382-10400).
cccgacatccgacaaaagt

SEQ ID NO: 403010 - DNA, 19 bp, Homo sapiens
  siRNA target sequence for SYNE1 (NM_033071.1,10384-10402).
cgacatccgacaaaagtgt

SEQ ID NO: 403011 - DNA, 19 bp, Homo sapiens
  siRNA target sequence for SYNE1 (NM_033071.1,10421-10439).
caagctcgaggctctatta

SEQ ID NO: 403012 - DNA, 19 bp, Homo sapiens
  siRNA target sequence for SYNE1 (NM_033071.1,10424-10442).
gctcgaggctctattatca

SEQ ID NO: 403013 - DNA, 19 bp, Homo sapiens
  siRNA target sequence for SYNE1 (NM_033071.1,10430-10448).
ggctctattatcagtcaaa

SEQ ID NO: 403014 - DNA, 19 bp, Homo sapiens
  siRNA target sequence for SYNE1 (NM_033071.1,10432-10450).
ctctattatcagtcaaaca

SEQ ID NO: 403015 - DNA, 19 bp, Homo sapiens
  siRNA target sequence for SYNE1 (NM_033071.1,10582-10600).
ctgcagggattcgttgtaa

SEQ ID NO: 403016 - DNA, 19 bp, Homo sapiens
  siRNA target sequence for SYNE1 (NM_033071.1,10584-10602).
gcagggattcgttgtaaaa

SEQ ID NO: 403017 - DNA, 19 bp, Homo sapiens
  siRNA target sequence for SYNE1 (NM_033071.1,10624-10642).
ccaagtggacaagttatca

SEQ ID NO: 403018 - DNA, 19 bp, Homo sapiens
  siRNA target sequence for SYNE1 (NM_033071.1,10663-10681).
ccggttggatggatagtat

SEQ ID NO: 403019 - DNA, 19 bp, Homo sapiens
  siRNA target sequence for SYNE1 (NM_033071.1,10683-10701).
gaagccaacctgaatgaat

SEQ ID NO: 403020 - DNA, 19 bp, Homo sapiens
  siRNA target sequence for SYNE1 (NM_033071.1,10716-10734).
gcggagctgcgggataaaa

SEQ ID NO: 403021 - DNA, 19 bp, Homo sapiens
  siRNA target sequence for SYNE1 (NM_033071.1,10718-10736).
ggagctgcgggataaaaca

SEQ ID NO: 403022 - DNA, 19 bp, Homo sapiens
  siRNA target sequence for SYNE1 (NM_033071.1,10719-10737).
gagctgcgggataaaacaa

SEQ ID NO: 403023 - DNA, 19 bp, Homo sapiens
  siRNA target sequence for SYNE1 (NM_033071.1,10743-10761).
ctcggaaaagccaagttat

SEQ ID NO: 403024 - DNA, 19 bp, Homo sapiens
  siRNA target sequence for SYNE1 (NM_033071.1,10745-10763).
cggaaaagccaagttatta

SEQ ID NO: 403025 - DNA, 19 bp, Homo sapiens
  siRNA target sequence for SYNE1 (NM_033071.1,10796-10814).
ggagaccatcgaagtcaaa

SEQ ID NO: 403026 - DNA, 19 bp, Homo sapiens
  siRNA target sequence for SYNE1 (NM_033071.1,10819-10837).
ctggcatgacagaacacta

SEQ ID NO: 403027 - DNA, 19 bp, Homo sapiens
  siRNA target sequence for SYNE1 (NM_033071.1,10822-10840).
gcatgacagaacactatgt

SEQ ID NO: 403028 - DNA, 19 bp, Homo sapiens
  siRNA target sequence for SYNE1 (NM_033071.1,10905-10923).
gccgtaaccaagtctgaaa

SEQ ID NO: 403029 - DNA, 19 bp, Homo sapiens
  siRNA target sequence for SYNE1 (NM_033071.1,10933-10951).
gcctgcaccaagagtatca

SEQ ID NO: 403030 - DNA, 19 bp, Homo sapiens
  siRNA target sequence for SYNE1 (NM_033071.1,11000-11018).
gctcgaccagtattcagtt

SEQ ID NO: 403031 - DNA, 19 bp, Homo sapiens
  siRNA target sequence for SYNE1 (NM_033071.1,11003-11021).
cgaccagtattcagttctt

SEQ ID NO: 403032 - DNA, 19 bp, Homo sapiens
  siRNA target sequence for SYNE1 (NM_033071.1,11034-11052).
cacactcatgagacaacat

SEQ ID NO: 403033 - DNA, 19 bp, Homo sapiens
  siRNA target sequence for SYNE1 (NM_033071.1,11047-11065).
caacattgcgtgatcttca

SEQ ID NO: 403034 - DNA, 19 bp, Homo sapiens
  siRNA target sequence for SYNE1 (NM_033071.1,11222-11240).
gactcgaactcagttcaat

SEQ ID NO: 403035 - DNA, 19 bp, Homo sapiens
  siRNA target sequence for SYNE1 (NM_033071.1,11224-11242).
ctcgaactcagttcaataa

SEQ ID NO: 403036 - DNA, 19 bp, Homo sapiens
  siRNA target sequence for SYNE1 (NM_033071.1,11227-11245).
gaactcagttcaataacgt

SEQ ID NO: 403037 - DNA, 19 bp, Homo sapiens
  siRNA target sequence for SYNE1 (NM_033071.1,11237-11255).
caataacgtggtgaacaaa

SEQ ID NO: 403038 - DNA, 19 bp, Homo sapiens
  siRNA target sequence for SYNE1 (NM_033071.1,11260-11278).
ggctaatggagcaaaagtt

SEQ ID NO: 403039 - DNA, 19 bp, Homo sapiens
  siRNA target sequence for SYNE1 (NM_033071.1,11261-11279).
gctaatggagcaaaagttt

SEQ ID NO: 403040 - DNA, 19 bp, Homo sapiens
  siRNA target sequence for SYNE1 (NM_033071.1,11276-11294).
gtttcagcaagtagatgaa

SEQ ID NO: 403041 - DNA, 19 bp, Homo sapiens
  siRNA target sequence for SYNE1 (NM_033071.1,11286-11304).
gtagatgaatggctcaaaa

SEQ ID NO: 403042 - DNA, 19 bp, Homo sapiens
  siRNA target sequence for SYNE1 (NM_033071.1,11338-11356).
ctgcatacagagatgaagt

SEQ ID NO: 403043 - DNA, 19 bp, Homo sapiens
  siRNA target sequence for SYNE1 (NM_033071.1,11532-11550).
ctcagttcctattctgatt

SEQ ID NO: 403044 - DNA, 19 bp, Homo sapiens
  siRNA target sequence for SYNE1 (NM_033071.1,11552-11570).
gtatggctctactcataaa

SEQ ID NO: 403045 - DNA, 19 bp, Homo sapiens
  siRNA target sequence for SYNE1 (NM_033071.1,11556-11574).
ggctctactcataaaaact

SEQ ID NO: 403046 - DNA, 19 bp, Homo sapiens
  siRNA target sequence for SYNE1 (NM_033071.1,11557-11575).
gctctactcataaaaactt

SEQ ID NO: 403047 - DNA, 19 bp, Homo sapiens
  siRNA target sequence for SYNE1 (NM_033071.1,11560-11578).
ctactcataaaaacttcaa

SEQ ID NO: 403048 - DNA, 19 bp, Homo sapiens
  siRNA target sequence for SYNE1 (NM_033071.1,11579-11597).
gaatgtggctaccaagatt

SEQ ID NO: 403049 - DNA, 19 bp, Homo sapiens
  siRNA target sequence for SYNE1 (NM_033071.1,11590-11608).
ccaagattgacaaagtaga

SEQ ID NO: 403050 - DNA, 19 bp, Homo sapiens
  siRNA target sequence for SYNE1 (NM_033071.1,11598-11616).
gacaaagtagatacagtaa

SEQ ID NO: 403051 - DNA, 19 bp, Homo sapiens
  siRNA target sequence for SYNE1 (NM_033071.1,11704-11722).
gagagagggctgttaaata

SEQ ID NO: 403052 - DNA, 19 bp, Homo sapiens
  siRNA target sequence for SYNE1 (NM_033071.1,11795-11813).
cagcactgtccggaaagaa

SEQ ID NO: 403053 - DNA, 19 bp, Homo sapiens
  siRNA target sequence for SYNE1 (NM_033071.1,11797-11815).
gcactgtccggaaagaaca

SEQ ID NO: 403054 - DNA, 19 bp, Homo sapiens
  siRNA target sequence for SYNE1 (NM_033071.1,11878-11896).
cacagtggatagcagaata

SEQ ID NO: 403055 - DNA, 19 bp, Homo sapiens
  siRNA target sequence for SYNE1 (NM_033071.1,11953-11971).
ctcagttatctaaatacaa

SEQ ID NO: 403056 - DNA, 19 bp, Homo sapiens
  siRNA target sequence for SYNE1 (NM_033071.1,11995-12013).
cccatgaaccatcagtaaa

SEQ ID NO: 403057 - DNA, 19 bp, Homo sapiens
  siRNA target sequence for SYNE1 (NM_033071.1,12071-12089).
ggacaaaatagatcaactt

SEQ ID NO: 403058 - DNA, 19 bp, Homo sapiens
  siRNA target sequence for SYNE1 (NM_033071.1,12115-12133).
gcataggaaaggcaatgat

SEQ ID NO: 403059 - DNA, 19 bp, Homo sapiens
  siRNA target sequence for SYNE1 (NM_033071.1,12215-12233).
cctgcaagcgaaacttaaa

SEQ ID NO: 403060 - DNA, 19 bp, Homo sapiens
  siRNA target sequence for SYNE1 (NM_033071.1,12223-12241).
cgaaacttaaacaaaacgt

SEQ ID NO: 403061 - DNA, 19 bp, Homo sapiens
  siRNA target sequence for SYNE1 (NM_033071.1,12313-12331).
gtttggaacacgaacttca

SEQ ID NO: 403062 - DNA, 19 bp, Homo sapiens
  siRNA target sequence for SYNE1 (NM_033071.1,12385-12403).
cagtccagccggatttaga

SEQ ID NO: 403063 - DNA, 19 bp, Homo sapiens
  siRNA target sequence for SYNE1 (NM_033071.1,12411-12429).
cctcaaccacctcttagta

SEQ ID NO: 403064 - DNA, 19 bp, Homo sapiens
  siRNA target sequence for SYNE1 (NM_033071.1,12427-12445).
gtagggcagaagccattaa

SEQ ID NO: 403065 - DNA, 19 bp, Homo sapiens
  siRNA target sequence for SYNE1 (NM_033071.1,12439-12457).
ccattaagcaggtcaaaca

SEQ ID NO: 403066 - DNA, 19 bp, Homo sapiens
  siRNA target sequence for SYNE1 (NM_033071.1,12509-12527).
catgtgtgacctgtcaaat

SEQ ID NO: 403067 - DNA, 19 bp, Homo sapiens
  siRNA target sequence for SYNE1 (NM_033071.1,12533-12551).
ggtgaaaaccacagcaaaa

SEQ ID NO: 403068 - DNA, 19 bp, Homo sapiens
  siRNA target sequence for SYNE1 (NM_033071.1,12544-12562).
cagcaaaagacattcaaca

SEQ ID NO: 403069 - DNA, 19 bp, Homo sapiens
  siRNA target sequence for SYNE1 (NM_033071.1,12731-12749).
gaacatggtttcacaagtt

SEQ ID NO: 403070 - DNA, 19 bp, Homo sapiens
  siRNA target sequence for SYNE1 (NM_033071.1,12738-12756).
gtttcacaagttaaggatt

SEQ ID NO: 403071 - DNA, 19 bp, Homo sapiens
  siRNA target sequence for SYNE1 (NM_033071.1,12747-12765).
gttaaggattttgttaaga

SEQ ID NO: 403072 - DNA, 19 bp, Homo sapiens
  siRNA target sequence for SYNE1 (NM_033071.1,12783-12801).
gcatccgtgaacaccataa

SEQ ID NO: 403073 - DNA, 19 bp, Homo sapiens
  siRNA target sequence for SYNE1 (NM_033071.1,12784-12802).
catccgtgaacaccataat

SEQ ID NO: 403074 - DNA, 19 bp, Homo sapiens
  siRNA target sequence for SYNE1 (NM_033071.1,12787-12805).
ccgtgaacaccataataga

SEQ ID NO: 403075 - DNA, 19 bp, Homo sapiens
  siRNA target sequence for SYNE1 (NM_033071.1,12788-12806).
cgtgaacaccataatagaa

SEQ ID NO: 403076 - DNA, 19 bp, Homo sapiens
  siRNA target sequence for SYNE1 (NM_033071.1,12870-12888).
gatcagtggctcgatttgt

SEQ ID NO: 403077 - DNA, 19 bp, Homo sapiens
  siRNA target sequence for SYNE1 (NM_033071.1,12977-12995).
gttcctagaaaaatttact

SEQ ID NO: 403078 - DNA, 19 bp, Homo sapiens
  siRNA target sequence for SYNE1 (NM_033071.1,13080-13098).
caggagagaaagtatgcta

SEQ ID NO: 403079 - DNA, 19 bp, Homo sapiens
  siRNA target sequence for SYNE1 (NM_033071.1,13082-13100).
ggagagaaagtatgctatt

SEQ ID NO: 403080 - DNA, 19 bp, Homo sapiens
  siRNA target sequence for SYNE1 (NM_033071.1,13085-13103).
gagaaagtatgctattgaa

SEQ ID NO: 403081 - DNA, 19 bp, Homo sapiens
  siRNA target sequence for SYNE1 (NM_033071.1,13087-13105).
gaaagtatgctattgaaga

SEQ ID NO: 403082 - DNA, 19 bp, Homo sapiens
  siRNA target sequence for SYNE1 (NM_033071.1,13130-13148).
gatagagcatctgaattta

SEQ ID NO: 403083 - DNA, 19 bp, Homo sapiens
  siRNA target sequence for SYNE1 (NM_033071.1,13149-13167).
gatgacaaggagttagtca

SEQ ID NO: 403084 - DNA, 19 bp, Homo sapiens
  siRNA target sequence for SYNE1 (NM_033071.1,13209-13227).
gaggacctcattaaaagga

SEQ ID NO: 403085 - DNA, 19 bp, Homo sapiens
  siRNA target sequence for SYNE1 (NM_033071.1,13421-13439).
gctcctgaaatcgcttata

SEQ ID NO: 403086 - DNA, 19 bp, Homo sapiens
  siRNA target sequence for SYNE1 (NM_033071.1,13422-13440).
ctcctgaaatcgcttataa

SEQ ID NO: 403087 - DNA, 19 bp, Homo sapiens
  siRNA target sequence for SYNE1 (NM_033071.1,13512-13530).
gcacaaagccacgtgaatt

SEQ ID NO: 403088 - DNA, 19 bp, Homo sapiens
  siRNA target sequence for SYNE1 (NM_033071.1,13526-13544).
gaattgtctcagtgactta

SEQ ID NO: 403089 - DNA, 19 bp, Homo sapiens
  siRNA target sequence for SYNE1 (NM_033071.1,13545-13563).
gtgggccagcgaagaaagt

SEQ ID NO: 403090 - DNA, 19 bp, Homo sapiens
  siRNA target sequence for SYNE1 (NM_033071.1,13550-13568).
ccagcgaagaaagtactta

SEQ ID NO: 403091 - DNA, 19 bp, Homo sapiens
  siRNA target sequence for SYNE1 (NM_033071.1,13551-13569).
cagcgaagaaagtacttaa

SEQ ID NO: 403092 - DNA, 19 bp, Homo sapiens
  siRNA target sequence for SYNE1 (NM_033071.1,13582-13600).
ccgagaaaacccagtttct

SEQ ID NO: 403093 - DNA, 19 bp, Homo sapiens
  siRNA target sequence for SYNE1 (NM_033071.1,13638-13656).
catgagcgaaagataatgt

SEQ ID NO: 403094 - DNA, 19 bp, Homo sapiens
  siRNA target sequence for SYNE1 (NM_033071.1,13672-13690).
gtctgttaccagatgatgt

SEQ ID NO: 403095 - DNA, 19 bp, Homo sapiens
  siRNA target sequence for SYNE1 (NM_033071.1,13729-13747).
gcctcaagacttaccaaaa

SEQ ID NO: 403096 - DNA, 19 bp, Homo sapiens
  siRNA target sequence for SYNE1 (NM_033071.1,13767-13785).
gcccagggtcgcgaactaa

SEQ ID NO: 403097 - DNA, 19 bp, Homo sapiens
  siRNA target sequence for SYNE1 (NM_033071.1,13768-13786).
cccagggtcgcgaactaat

SEQ ID NO: 403098 - DNA, 19 bp, Homo sapiens
  siRNA target sequence for SYNE1 (NM_033071.1,13770-13788).
cagggtcgcgaactaatga

SEQ ID NO: 403099 - DNA, 19 bp, Homo sapiens
  siRNA target sequence for SYNE1 (NM_033071.1,13825-13843).
ggaagcttcaggaattgca

SEQ ID NO: 403100 - DNA, 19 bp, Homo sapiens
  siRNA target sequence for SYNE1 (NM_033071.1,13835-13853).
ggaattgcagagtgtctat

SEQ ID NO: 403101 - DNA, 19 bp, Homo sapiens
  siRNA target sequence for SYNE1 (NM_033071.1,13854-13872).
gacagtgttttacaaaagt

SEQ ID NO: 403102 - DNA, 19 bp, Homo sapiens
  siRNA target sequence for SYNE1 (NM_033071.1,13871-13889).
gtgcagtcaccggttacaa

SEQ ID NO: 403103 - DNA, 19 bp, Homo sapiens
  siRNA target sequence for SYNE1 (NM_033071.1,13876-13894).
gtcaccggttacaagaact

SEQ ID NO: 403104 - DNA, 19 bp, Homo sapiens
  siRNA target sequence for SYNE1 (NM_033071.1,13882-13900).
ggttacaagaactagagaa

SEQ ID NO: 403105 - DNA, 19 bp, Homo sapiens
  siRNA target sequence for SYNE1 (NM_033071.1,13945-13963).
cttgccactggctaaaaca

SEQ ID NO: 403106 - DNA, 19 bp, Homo sapiens
  siRNA target sequence for SYNE1 (NM_033071.1,13984-14002).
ctgaaatcaacctaatgaa

SEQ ID NO: 403107 - DNA, 19 bp, Homo sapiens
  siRNA target sequence for SYNE1 (NM_033071.1,14019-14037).
catacacaactggctaaat

SEQ ID NO: 403108 - DNA, 19 bp, Homo sapiens
  siRNA target sequence for SYNE1 (NM_033071.1,14055-14073).
caatctccagaatatgaaa

SEQ ID NO: 403109 - DNA, 19 bp, Homo sapiens
  siRNA target sequence for SYNE1 (NM_033071.1,14100-14118).
gggcagaccatattaccat

SEQ ID NO: 403110 - DNA, 19 bp, Homo sapiens
  siRNA target sequence for SYNE1 (NM_033071.1,14121-14139).
ctgaatgaagtcgatcatt

SEQ ID NO: 403111 - DNA, 19 bp, Homo sapiens
  siRNA target sequence for SYNE1 (NM_033071.1,14144-14162).
cctcagtgaaaagctaaat

SEQ ID NO: 403112 - DNA, 19 bp, Homo sapiens
  siRNA target sequence for SYNE1 (NM_033071.1,14163-14181).
gctttgcctcgacaattta

SEQ ID NO: 403113 - DNA, 19 bp, Homo sapiens
  siRNA target sequence for SYNE1 (NM_033071.1,14164-14182).
ctttgcctcgacaatttaa

SEQ ID NO: 403114 - DNA, 19 bp, Homo sapiens
  siRNA target sequence for SYNE1 (NM_033071.1,14168-14186).
gcctcgacaatttaatgta

SEQ ID NO: 403115 - DNA, 19 bp, Homo sapiens
  siRNA target sequence for SYNE1 (NM_033071.1,14169-14187).
cctcgacaatttaatgtaa

SEQ ID NO: 403116 - DNA, 19 bp, Homo sapiens
  siRNA target sequence for SYNE1 (NM_033071.1,14170-14188).
ctcgacaatttaatgtaat

SEQ ID NO: 403117 - DNA, 19 bp, Homo sapiens
  siRNA target sequence for SYNE1 (NM_033071.1,14190-14208).
gttgccttggctaaagaca

SEQ ID NO: 403118 - DNA, 19 bp, Homo sapiens
  siRNA target sequence for SYNE1 (NM_033071.1,14194-14212).
ccttggctaaagacaagtt

SEQ ID NO: 403119 - DNA, 19 bp, Homo sapiens
  siRNA target sequence for SYNE1 (NM_033071.1,14238-14256).
gctcggaaggaatatgctt

SEQ ID NO: 403120 - DNA, 19 bp, Homo sapiens
  siRNA target sequence for SYNE1 (NM_033071.1,14246-14264).
ggaatatgcttccttgatt

SEQ ID NO: 403121 - DNA, 19 bp, Homo sapiens
  siRNA target sequence for SYNE1 (NM_033071.1,14279-14297).
gtctctgagtgaacttgaa

SEQ ID NO: 403122 - DNA, 19 bp, Homo sapiens
  siRNA target sequence for SYNE1 (NM_033071.1,14292-14310).
cttgaagcccaattcttga

SEQ ID NO: 403123 - DNA, 19 bp, Homo sapiens
  siRNA target sequence for SYNE1 (NM_033071.1,14339-14357).
cgttgaggaggctctttct

SEQ ID NO: 403124 - DNA, 19 bp, Homo sapiens
  siRNA target sequence for SYNE1 (NM_033071.1,14415-14433).
gatgaactgaaccagaaaa

SEQ ID NO: 403125 - DNA, 19 bp, Homo sapiens
  siRNA target sequence for SYNE1 (NM_033071.1,14481-14499).
ctgcaccttgtcaccttat

SEQ ID NO: 403126 - DNA, 19 bp, Homo sapiens
  siRNA target sequence for SYNE1 (NM_033071.1,14487-14505).
cttgtcaccttatatcaca

SEQ ID NO: 403127 - DNA, 19 bp, Homo sapiens
  siRNA target sequence for SYNE1 (NM_033071.1,14504-14522).
caggctgaagcgacaaaca

SEQ ID NO: 403128 - DNA, 19 bp, Homo sapiens
  siRNA target sequence for SYNE1 (NM_033071.1,14506-14524).
ggctgaagcgacaaacaga

SEQ ID NO: 403129 - DNA, 19 bp, Homo sapiens
  siRNA target sequence for SYNE1 (NM_033071.1,14530-14548).
gggttagcttattagaaga

SEQ ID NO: 403130 - DNA, 19 bp, Homo sapiens
  siRNA target sequence for SYNE1 (NM_033071.1,14549-14567).
caccaccagtgcttaccaa

SEQ ID NO: 403131 - DNA, 19 bp, Homo sapiens
  siRNA target sequence for SYNE1 (NM_033071.1,14599-14617).
gacaactgaagtctgtaaa

SEQ ID NO: 403132 - DNA, 19 bp, Homo sapiens
  siRNA target sequence for SYNE1 (NM_033071.1,14660-14678).
ggagaagctcaaaatgtat

SEQ ID NO: 403133 - DNA, 19 bp, Homo sapiens
  siRNA target sequence for SYNE1 (NM_033071.1,14699-14717).
ccaggactcagggattgta

SEQ ID NO: 403134 - DNA, 19 bp, Homo sapiens
  siRNA target sequence for SYNE1 (NM_033071.1,14705-14723).
ctcagggattgtactgaaa

SEQ ID NO: 403135 - DNA, 19 bp, Homo sapiens
  siRNA target sequence for SYNE1 (NM_033071.1,14725-14743).
gagtaaccatacatcttga

SEQ ID NO: 403136 - DNA, 19 bp, Homo sapiens
  siRNA target sequence for SYNE1 (NM_033071.1,14803-14821).
cctggcaaggggagttaaa

SEQ ID NO: 403137 - DNA, 19 bp, Homo sapiens
  siRNA target sequence for SYNE1 (NM_033071.1,14806-14824).
ggcaaggggagttaaaact

SEQ ID NO: 403138 - DNA, 19 bp, Homo sapiens
  siRNA target sequence for SYNE1 (NM_033071.1,14808-14826).
caaggggagttaaaactgt

SEQ ID NO: 403139 - DNA, 19 bp, Homo sapiens
  siRNA target sequence for SYNE1 (NM_033071.1,14866-14884).
gccgaatggtgcagagtat

SEQ ID NO: 403140 - DNA, 19 bp, Homo sapiens
  siRNA target sequence for SYNE1 (NM_033071.1,15052-15070).
cgctgagtcacaaggaaaa

SEQ ID NO: 403141 - DNA, 19 bp, Homo sapiens
  siRNA target sequence for SYNE1 (NM_033071.1,15095-15113).
gctgatttctgcggattta

SEQ ID NO: 403142 - DNA, 19 bp, Homo sapiens
  siRNA target sequence for SYNE1 (NM_033071.1,15098-15116).
gatttctgcggatttagaa

SEQ ID NO: 403143 - DNA, 19 bp, Homo sapiens
  siRNA target sequence for SYNE1 (NM_033071.1,15179-15197).
ggctaccttgactgaaata

SEQ ID NO: 403144 - DNA, 19 bp, Homo sapiens
  siRNA target sequence for SYNE1 (NM_033071.1,15180-15198).
gctaccttgactgaaatat

SEQ ID NO: 403145 - DNA, 19 bp, Homo sapiens
  siRNA target sequence for SYNE1 (NM_033071.1,15215-15233).
gtattatcaggtatttcaa

SEQ ID NO: 403146 - DNA, 19 bp, Homo sapiens
  siRNA target sequence for SYNE1 (NM_033071.1,15304-15322).
gcgcagaggaaaatctcaa

SEQ ID NO: 403147 - DNA, 19 bp, Homo sapiens
  siRNA target sequence for SYNE1 (NM_033071.1,15348-15366).
gaggatcagttccatagta

SEQ ID NO: 403148 - DNA, 19 bp, Homo sapiens
  siRNA target sequence for SYNE1 (NM_033071.1,15523-15541).
cagctcaatggcacgatta

SEQ ID NO: 403149 - DNA, 19 bp, Homo sapiens
  siRNA target sequence for SYNE1 (NM_033071.1,15526-15544).
ctcaatggcacgattacca

SEQ ID NO: 403150 - DNA, 19 bp, Homo sapiens
  siRNA target sequence for SYNE1 (NM_033071.1,15534-15552).
cacgattaccagaaagcaa

SEQ ID NO: 403151 - DNA, 19 bp, Homo sapiens
  siRNA target sequence for SYNE1 (NM_033071.1,15560-15578).
ggttattgaattgatgaat

SEQ ID NO: 403152 - DNA, 19 bp, Homo sapiens
  siRNA target sequence for SYNE1 (NM_033071.1,15614-15632).
gaagacttcgtctagtcat

SEQ ID NO: 403153 - DNA, 19 bp, Homo sapiens
  siRNA target sequence for SYNE1 (NM_033071.1,15617-15635).
gacttcgtctagtcatgaa

SEQ ID NO: 403154 - DNA, 19 bp, Homo sapiens
  siRNA target sequence for SYNE1 (NM_033071.1,15628-15646).
gtcatgaagcggaagaaaa

SEQ ID NO: 403155 - DNA, 19 bp, Homo sapiens
  siRNA target sequence for SYNE1 (NM_033071.1,15633-15651).
gaagcggaagaaaaattgt

SEQ ID NO: 403156 - DNA, 19 bp, Homo sapiens
  siRNA target sequence for SYNE1 (NM_033071.1,15664-15682).
ctttagtgtcagtggttaa

SEQ ID NO: 403157 - DNA, 19 bp, Homo sapiens
  siRNA target sequence for SYNE1 (NM_033071.1,15669-15687).
gtgtcagtggttaactctt

SEQ ID NO: 403158 - DNA, 19 bp, Homo sapiens
  siRNA target sequence for SYNE1 (NM_033071.1,15868-15886).
gctttaacaacaaggttaa

SEQ ID NO: 403159 - DNA, 19 bp, Homo sapiens
  siRNA target sequence for SYNE1 (NM_033071.1,15882-15900).
gttaaaaaggccactgaaa

SEQ ID NO: 403160 - DNA, 19 bp, Homo sapiens
  siRNA target sequence for SYNE1 (NM_033071.1,15890-15908).
ggccactgaaatgattgat

SEQ ID NO: 403161 - DNA, 19 bp, Homo sapiens
  siRNA target sequence for SYNE1 (NM_033071.1,15892-15910).
ccactgaaatgattgatca

SEQ ID NO: 403162 - DNA, 19 bp, Homo sapiens
  siRNA target sequence for SYNE1 (NM_033071.1,15953-15971).
gaaagcagagctcttaact

SEQ ID NO: 403163 - DNA, 19 bp, Homo sapiens
  siRNA target sequence for SYNE1 (NM_033071.1,16096-16114).
ctccgctcatgcaggaaat

SEQ ID NO: 403164 - DNA, 19 bp, Homo sapiens
  siRNA target sequence for SYNE1 (NM_033071.1,16234-16252).
gttgggttcaggaaacgaa

SEQ ID NO: 403165 - DNA, 19 bp, Homo sapiens
  siRNA target sequence for SYNE1 (NM_033071.1,16238-16256).
ggttcaggaaacgaaagaa

SEQ ID NO: 403166 - DNA, 19 bp, Homo sapiens
  siRNA target sequence for SYNE1 (NM_033071.1,16239-16257).
gttcaggaaacgaaagaat

SEQ ID NO: 403167 - DNA, 19 bp, Homo sapiens
  siRNA target sequence for SYNE1 (NM_033071.1,16254-16272).
gaatatttagggaatccaa

SEQ ID NO: 403168 - DNA, 19 bp, Homo sapiens
  siRNA target sequence for SYNE1 (NM_033071.1,16313-16331).
cctaacagaagccacaaat

SEQ ID NO: 403169 - DNA, 19 bp, Homo sapiens
  siRNA target sequence for SYNE1 (NM_033071.1,16327-16345).
caaatcaccgacagaacat

SEQ ID NO: 403170 - DNA, 19 bp, Homo sapiens
  siRNA target sequence for SYNE1 (NM_033071.1,16334-16352).
ccgacagaacattgaaaaa

SEQ ID NO: 403171 - DNA, 19 bp, Homo sapiens
  siRNA target sequence for SYNE1 (NM_033071.1,16379-16397).
cttaggtctttataccata

SEQ ID NO: 403172 - DNA, 19 bp, Homo sapiens
  siRNA target sequence for SYNE1 (NM_033071.1,16426-16444).
ctgaagtggcgttagatct

SEQ ID NO: 403173 - DNA, 19 bp, Homo sapiens
  siRNA target sequence for SYNE1 (NM_033071.1,16428-16446).
gaagtggcgttagatctaa

SEQ ID NO: 403174 - DNA, 19 bp, Homo sapiens
  siRNA target sequence for SYNE1 (NM_033071.1,16431-16449).
gtggcgttagatctaaaga

SEQ ID NO: 403175 - DNA, 19 bp, Homo sapiens
  siRNA target sequence for SYNE1 (NM_033071.1,16453-16471).
gagatcagatccaagacaa

SEQ ID NO: 403176 - DNA, 19 bp, Homo sapiens
  siRNA target sequence for SYNE1 (NM_033071.1,16455-16473).
gatcagatccaagacaaaa

SEQ ID NO: 403177 - DNA, 19 bp, Homo sapiens
  siRNA target sequence for SYNE1 (NM_033071.1,16508-16526).
ggaactcagccggcaaatt

SEQ ID NO: 403178 - DNA, 19 bp, Homo sapiens
  siRNA target sequence for SYNE1 (NM_033071.1,16517-16535).
ccggcaaattcagaagtta

SEQ ID NO: 403179 - DNA, 19 bp, Homo sapiens
  siRNA target sequence for SYNE1 (NM_033071.1,16536-16554).
gctaaagacctcacaacta

SEQ ID NO: 403180 - DNA, 19 bp, Homo sapiens
  siRNA target sequence for SYNE1 (NM_033071.1,16566-16584).
ctgaaagcgaagacagata

SEQ ID NO: 403181 - DNA, 19 bp, Homo sapiens
  siRNA target sequence for SYNE1 (NM_033071.1,16577-16595).
gacagataatgtagttcaa

SEQ ID NO: 403182 - DNA, 19 bp, Homo sapiens
  siRNA target sequence for SYNE1 (NM_033071.1,16616-16634).
gctgggagaggaattagat

SEQ ID NO: 403183 - DNA, 19 bp, Homo sapiens
  siRNA target sequence for SYNE1 (NM_033071.1,16800-16818).
gcatcacatttagaagaat

SEQ ID NO: 403184 - DNA, 19 bp, Homo sapiens
  siRNA target sequence for SYNE1 (NM_033071.1,16905-16923).
cagcttcgggaacaatata

SEQ ID NO: 403185 - DNA, 19 bp, Homo sapiens
  siRNA target sequence for SYNE1 (NM_033071.1,16907-16925).
gcttcgggaacaatatatt

SEQ ID NO: 403186 - DNA, 19 bp, Homo sapiens
  siRNA target sequence for SYNE1 (NM_033071.1,16908-16926).
cttcgggaacaatatattt

SEQ ID NO: 403187 - DNA, 19 bp, Homo sapiens
  siRNA target sequence for SYNE1 (NM_033071.1,20862-20880).
gagctgtcgcgcattgata

SEQ ID NO: 403188 - DNA, 19 bp, Homo sapiens
  siRNA target sequence for SYNE1 (NM_033071.1,21420-21438).
gatctggaagatttgatta

SEQ ID NO: 403189 - DNA, 19 bp, Homo sapiens
  siRNA target sequence for SYNE1 (NM_033071.1,25181-25199).
gggagctgttggcttatca

SEQ ID NO: 403190 - DNA, 19 bp, Homo sapiens
  siRNA target sequence for SYNE1 (NM_033071.1,25188-25206).
gttggcttatcagatgtaa

SEQ ID NO: 403191 - DNA, 19 bp, Homo sapiens
  siRNA target sequence for SYNE1 (NM_033071.1,25192-25210).
gcttatcagatgtaatgat

SEQ ID NO: 403192 - DNA, 19 bp, Homo sapiens
  siRNA target sequence for SYNE1 (NM_033071.1,25222-25240).
ctgaggcctatgtaaaact

SEQ ID NO: 403193 - DNA, 19 bp, Homo sapiens
  siRNA target sequence for SYNE1 (NM_033071.1,25320-25338).
gatgatagccgttttcaga

SEQ ID NO: 403194 - DNA, 19 bp, Homo sapiens
  siRNA target sequence for EAF1 (NM_033083.5,450-468).
ctggaccgcgaggaacatt

SEQ ID NO: 403195 - DNA, 19 bp, Homo sapiens
  siRNA target sequence for EAF1 (NM_033083.5,509-527).
ctccttccacactattcgt

SEQ ID NO: 403196 - DNA, 19 bp, Homo sapiens
  siRNA target sequence for EAF1 (NM_033083.5,511-529).
ccttccacactattcgtta

SEQ ID NO: 403197 - DNA, 19 bp, Homo sapiens
  siRNA target sequence for EAF1 (NM_033083.5,512-530).
cttccacactattcgttat

SEQ ID NO: 403198 - DNA, 19 bp, Homo sapiens
  siRNA target sequence for EAF1 (NM_033083.5,515-533).
ccacactattcgttatgat

SEQ ID NO: 403199 - DNA, 19 bp, Homo sapiens
  siRNA target sequence for EAF1 (NM_033083.5,516-534).
cacactattcgttatgatt

SEQ ID NO: 403200 - DNA, 19 bp, Homo sapiens
  siRNA target sequence for EAF1 (NM_033083.5,518-536).
cactattcgttatgatttt

SEQ ID NO: 403201 - DNA, 19 bp, Homo sapiens
  siRNA target sequence for EAF1 (NM_033083.5,520-538).
ctattcgttatgattttaa

SEQ ID NO: 403202 - DNA, 19 bp, Homo sapiens
  siRNA target sequence for EAF1 (NM_033083.5,601-619).
caattacactgccacatat

SEQ ID NO: 403203 - DNA, 19 bp, Homo sapiens
  siRNA target sequence for EAF1 (NM_033083.5,663-681).
cggccttaccagaaagact

SEQ ID NO: 403204 - DNA, 19 bp, Homo sapiens
  siRNA target sequence for EAF1 (NM_033083.5,958-976).
gggctgaagttgacattat

SEQ ID NO: 403205 - DNA, 19 bp, Homo sapiens
  siRNA target sequence for EAF1 (NM_033083.5,959-977).
ggctgaagttgacattatt

SEQ ID NO: 403206 - DNA, 19 bp, Homo sapiens
  siRNA target sequence for EAF1 (NM_033083.5,1022-1040).
gagctcttcgggaagtgat

SEQ ID NO: 403207 - DNA, 19 bp, Homo sapiens
  siRNA target sequence for EAF1 (NM_033083.5,1101-1119).
caccagcagccctacaaca

SEQ ID NO: 403208 - DNA, 19 bp, Homo sapiens
  siRNA target sequence for EAF1 (NM_033083.5,1104-1122).
cagcagccctacaacagta

SEQ ID NO: 403209 - DNA, 19 bp, Homo sapiens
  siRNA target sequence for FATE (NM_033085.1,132-150).
ggcagaagaactgaatcat

SEQ ID NO: 403210 - DNA, 19 bp, Homo sapiens
  siRNA target sequence for FATE (NM_033085.1,272-290).
cagccaaacgagtttggaa

SEQ ID NO: 403211 - DNA, 19 bp, Homo sapiens
  siRNA target sequence for FATE (NM_033085.1,274-292).
gccaaacgagtttggaata

SEQ ID NO: 403212 - DNA, 19 bp, Homo sapiens
  siRNA target sequence for FATE (NM_033085.1,299-317).
ccacccgacccaagaaaat

SEQ ID NO: 403213 - DNA, 19 bp, Homo sapiens
  siRNA target sequence for FATE (NM_033085.1,384-402).
gtacgctggcaatttccaa

SEQ ID NO: 403214 - DNA, 19 bp, Homo sapiens
  siRNA target sequence for FATE (NM_033085.1,399-417).
ccaaggcatacgtttccat

SEQ ID NO: 403215 - DNA, 19 bp, Homo sapiens
  siRNA target sequence for FATE (NM_033085.1,404-422).
gcatacgtttccattatga

SEQ ID NO: 403216 - DNA, 19 bp, Homo sapiens
  siRNA target sequence for PCDH21 (NM_033100.1,98-116).
gcagcaccaacggaaacat

SEQ ID NO: 403217 - DNA, 19 bp, Homo sapiens
  siRNA target sequence for PCDH21 (NM_033100.1,146-164).
ctgtaggctctcacgtata

SEQ ID NO: 403218 - DNA, 19 bp, Homo sapiens
  siRNA target sequence for PCDH21 (NM_033100.1,148-166).
gtaggctctcacgtataca

SEQ ID NO: 403219 - DNA, 19 bp, Homo sapiens
  siRNA target sequence for PCDH21 (NM_033100.1,228-246).
cactagaagcgtcttttct

SEQ ID NO: 403220 - DNA, 19 bp, Homo sapiens
  siRNA target sequence for PCDH21 (NM_033100.1,313-331).
gaagccatcatcagcattt

SEQ ID NO: 403221 - DNA, 19 bp, Homo sapiens
  siRNA target sequence for PCDH21 (NM_033100.1,342-360).
gaatctggtggccgaaaaa

SEQ ID NO: 403222 - DNA, 19 bp, Homo sapiens
  siRNA target sequence for PCDH21 (NM_033100.1,405-423).
catccaggagccttatgtt

SEQ ID NO: 403223 - DNA, 19 bp, Homo sapiens
  siRNA target sequence for PCDH21 (NM_033100.1,449-467).
ctgggagcatcatctttaa

SEQ ID NO: 403224 - DNA, 19 bp, Homo sapiens
  siRNA target sequence for PCDH21 (NM_033100.1,605-623).
ggtcccggacccactacat

SEQ ID NO: 403225 - DNA, 19 bp, Homo sapiens
  siRNA target sequence for PCDH21 (NM_033100.1,689-707).
ccacggtcacggtcaatgt

SEQ ID NO: 403226 - DNA, 19 bp, Homo sapiens
  siRNA target sequence for PCDH21 (NM_033100.1,738-756).
cgtgggcacaccctactat

SEQ ID NO: 403227 - DNA, 19 bp, Homo sapiens
  siRNA target sequence for PCDH21 (NM_033100.1,782-800).
cgggctcggaggtactgaa

SEQ ID NO: 403228 - DNA, 19 bp, Homo sapiens
  siRNA target sequence for PCDH21 (NM_033100.1,825-843).
gggcaaacccaatcgaatt

SEQ ID NO: 403229 - DNA, 19 bp, Homo sapiens
  siRNA target sequence for PCDH21 (NM_033100.1,827-845).
gcaaacccaatcgaattct

SEQ ID NO: 403230 - DNA, 19 bp, Homo sapiens
  siRNA target sequence for PCDH21 (NM_033100.1,1044-1062).
ccacccgccaacattctat

SEQ ID NO: 403231 - DNA, 19 bp, Homo sapiens
  siRNA target sequence for PCDH21 (NM_033100.1,1246-1264).
gaagcccaagtcacaatca

SEQ ID NO: 403232 - DNA, 19 bp, Homo sapiens
  siRNA target sequence for PCDH21 (NM_033100.1,1505-1523).
gaccctggggcgaagtgaa

SEQ ID NO: 403233 - DNA, 19 bp, Homo sapiens
  siRNA target sequence for PCDH21 (NM_033100.1,1507-1525).
ccctggggcgaagtgaaat

SEQ ID NO: 403234 - DNA, 19 bp, Homo sapiens
  siRNA target sequence for PCDH21 (NM_033100.1,1508-1526).
cctggggcgaagtgaaata

SEQ ID NO: 403235 - DNA, 19 bp, Homo sapiens
  siRNA target sequence for PCDH21 (NM_033100.1,1509-1527).
ctggggcgaagtgaaatat

SEQ ID NO: 403236 - DNA, 19 bp, Homo sapiens
  siRNA target sequence for PCDH21 (NM_033100.1,1568-1586).
catccactgggcttatcta

SEQ ID NO: 403237 - DNA, 19 bp, Homo sapiens
  siRNA target sequence for PCDH21 (NM_033100.1,1618-1636).
gccactgccaggtacaact

SEQ ID NO: 403238 - DNA, 19 bp, Homo sapiens
  siRNA target sequence for PCDH21 (NM_033100.1,1625-1643).
ccaggtacaacttctatgt

SEQ ID NO: 403239 - DNA, 19 bp, Homo sapiens
  siRNA target sequence for PCDH21 (NM_033100.1,1628-1646).
ggtacaacttctatgtgaa

SEQ ID NO: 403240 - DNA, 19 bp, Homo sapiens
  siRNA target sequence for PCDH21 (NM_033100.1,1654-1672).
gacatggaaggcaagtaca

SEQ ID NO: 403241 - DNA, 19 bp, Homo sapiens
  siRNA target sequence for PCDH21 (NM_033100.1,1673-1691).
gcgtagctgaggtgtttat

SEQ ID NO: 403242 - DNA, 19 bp, Homo sapiens
  siRNA target sequence for PCDH21 (NM_033100.1,1730-1748).
gaaagagcgttcagaagaa

SEQ ID NO: 403243 - DNA, 19 bp, Homo sapiens
  siRNA target sequence for PCDH21 (NM_033100.1,2000-2018).
gcaccacagccttactcaa

SEQ ID NO: 403244 - DNA, 19 bp, Homo sapiens
  siRNA target sequence for PCDH21 (NM_033100.1,2004-2022).
cacagccttactcaagatt

SEQ ID NO: 403245 - DNA, 19 bp, Homo sapiens
  siRNA target sequence for PCDH21 (NM_033100.1,2008-2026).
gccttactcaagattgaca

SEQ ID NO: 403246 - DNA, 19 bp, Homo sapiens
  siRNA target sequence for PCDH21 (NM_033100.1,2009-2027).
ccttactcaagattgacat

SEQ ID NO: 403247 - DNA, 19 bp, Homo sapiens
  siRNA target sequence for PCDH21 (NM_033100.1,2174-2192).
ggcgcaacaagaagtctaa

SEQ ID NO: 403248 - DNA, 19 bp, Homo sapiens
  siRNA target sequence for PCDH21 (NM_033100.1,2245-2263).
cgcaccatccgcattgagt

SEQ ID NO: 403249 - DNA, 19 bp, Homo sapiens
  siRNA target sequence for Prostein (NM_033102.1,343-361).
ggtcaacctgctaaccttt

SEQ ID NO: 403250 - DNA, 19 bp, Homo sapiens
  siRNA target sequence for Prostein (NM_033102.1,425-443).
gtagaggagaagttcatga

SEQ ID NO: 403251 - DNA, 19 bp, Homo sapiens
  siRNA target sequence for Prostein (NM_033102.1,1330-1348).
cggcactcgagcagtctat

SEQ ID NO: 403252 - DNA, 19 bp, Homo sapiens
  siRNA target sequence for Prostein (NM_033102.1,1331-1349).
ggcactcgagcagtctatt

SEQ ID NO: 403253 - DNA, 19 bp, Homo sapiens
  siRNA target sequence for Prostein (NM_033102.1,1332-1350).
gcactcgagcagtctattt

SEQ ID NO: 403254 - DNA, 19 bp, Homo sapiens
  siRNA target sequence for Prostein (NM_033102.1,1839-1857).
ctgtcactgcctatatggt

SEQ ID NO: 403255 - DNA, 19 bp, Homo sapiens
  siRNA target sequence for Prostein (NM_033102.1,1874-1892).
ggtctggtcgccatttact

SEQ ID NO: 403256 - DNA, 19 bp, Homo sapiens
  siRNA target sequence for Prostein (NM_033102.1,1875-1893).
gtctggtcgccatttactt

SEQ ID NO: 403257 - DNA, 19 bp, Homo sapiens
  siRNA target sequence for Prostein (NM_033102.1,1896-1914).
ctacacaggtagtatttga

SEQ ID NO: 403258 - DNA, 19 bp, Homo sapiens
  siRNA target sequence for Prostein (NM_033102.1,1899-1917).
cacaggtagtatttgacaa

SEQ ID NO: 403259 - DNA, 19 bp, Homo sapiens
  siRNA target sequence for LOC85865 (NM_033107.1,81-99).
gttgcgtgttgttcagaaa

SEQ ID NO: 403260 - DNA, 19 bp, Homo sapiens
  siRNA target sequence for LOC85865 (NM_033107.1,84-102).
gcgtgttgttcagaaagta

SEQ ID NO: 403261 - DNA, 19 bp, Homo sapiens
  siRNA target sequence for LOC85865 (NM_033107.1,157-175).
gggttatcctcgtttaggt

SEQ ID NO: 403262 - DNA, 19 bp, Homo sapiens
  siRNA target sequence for LOC85865 (NM_033107.1,278-296).
gtaggagcaaacagcaaaa

SEQ ID NO: 403263 - DNA, 19 bp, Homo sapiens
  siRNA target sequence for LOC85865 (NM_033107.1,343-361).
gcctgtgggtatttcagta

SEQ ID NO: 403264 - DNA, 19 bp, Homo sapiens
  siRNA target sequence for LOC85865 (NM_033107.1,349-367).
gggtatttcagtaactgat

SEQ ID NO: 403265 - DNA, 19 bp, Homo sapiens
  siRNA target sequence for LOC85865 (NM_033107.1,428-446).
ggaggtcttggtggtaaat

SEQ ID NO: 403266 - DNA, 19 bp, Homo sapiens
  siRNA target sequence for LOC85865 (NM_033107.1,429-447).
gaggtcttggtggtaaatt

SEQ ID NO: 403267 - DNA, 19 bp, Homo sapiens
  siRNA target sequence for LOC85865 (NM_033107.1,432-450).
gtcttggtggtaaattact

SEQ ID NO: 403268 - DNA, 19 bp, Homo sapiens
  siRNA target sequence for LOC85865 (NM_033107.1,469-487).
gaaaggccagaaacgaata

SEQ ID NO: 403269 - DNA, 19 bp, Homo sapiens
  siRNA target sequence for LOC85865 (NM_033107.1,564-582).
gttgtgtttctcatgcaaa

SEQ ID NO: 403270 - DNA, 19 bp, Homo sapiens
  siRNA target sequence for LOC85865 (NM_033107.1,626-644).
cttggaaagataatgtaca

SEQ ID NO: 403271 - DNA, 19 bp, Homo sapiens
  siRNA target sequence for LOC85865 (NM_033107.1,658-676).
gatatcagtagctgatctt

SEQ ID NO: 403272 - DNA, 19 bp, Homo sapiens
  siRNA target sequence for LOC85865 (NM_033107.1,668-686).
gctgatcttccgggtttaa

SEQ ID NO: 403273 - DNA, 19 bp, Homo sapiens
  siRNA target sequence for LOC85865 (NM_033107.1,669-687).
ctgatcttccgggtttaat

SEQ ID NO: 403274 - DNA, 19 bp, Homo sapiens
  siRNA target sequence for LOC85865 (NM_033107.1,689-707).
gaaggagcacatatgaaca

SEQ ID NO: 403275 - DNA, 19 bp, Homo sapiens
  siRNA target sequence for LOC85865 (NM_033107.1,695-713).
gcacatatgaacaaaggaa

SEQ ID NO: 403276 - DNA, 19 bp, Homo sapiens
  siRNA target sequence for LOC85865 (NM_033107.1,744-762).
gaactagacaactactttt

SEQ ID NO: 403277 - DNA, 19 bp, Homo sapiens
  siRNA target sequence for LOC85865 (NM_033107.1,747-765).
ctagacaactactttttgt

SEQ ID NO: 403278 - DNA, 19 bp, Homo sapiens
  siRNA target sequence for LOC85865 (NM_033107.1,811-829).
gacagcttttgaaaccata

SEQ ID NO: 403279 - DNA, 19 bp, Homo sapiens
  siRNA target sequence for LOC85865 (NM_033107.1,816-834).
cttttgaaaccataatact

SEQ ID NO: 403280 - DNA, 19 bp, Homo sapiens
  siRNA target sequence for LOC85865 (NM_033107.1,825-843).
ccataatactgcttacaaa

SEQ ID NO: 403281 - DNA, 19 bp, Homo sapiens
  siRNA target sequence for LOC85865 (NM_033107.1,826-844).
cataatactgcttacaaaa

SEQ ID NO: 403282 - DNA, 19 bp, Homo sapiens
  siRNA target sequence for LOC85865 (NM_033107.1,836-854).
cttacaaaagagttggaat

SEQ ID NO: 403283 - DNA, 19 bp, Homo sapiens
  siRNA target sequence for LOC85865 (NM_033107.1,865-883).
ggaacttcagacaaaacct

SEQ ID NO: 403284 - DNA, 19 bp, Homo sapiens
  siRNA target sequence for LOC85865 (NM_033107.1,884-902).
gcactcttggcagttaata

SEQ ID NO: 403285 - DNA, 19 bp, Homo sapiens
  siRNA target sequence for LOC85865 (NM_033107.1,914-932).
ccagatgcccaagataagt

SEQ ID NO: 403286 - DNA, 19 bp, Homo sapiens
  siRNA target sequence for LOC85865 (NM_033107.1,915-933).
cagatgcccaagataagtt

SEQ ID NO: 403287 - DNA, 19 bp, Homo sapiens
  siRNA target sequence for LOC85865 (NM_033107.1,948-966).
gccagctccagaatcctaa

SEQ ID NO: 403288 - DNA, 19 bp, Homo sapiens
  siRNA target sequence for LOC85865 (NM_033107.1,1002-1020).
cagagaggactgtagagtt

SEQ ID NO: 403289 - DNA, 19 bp, Homo sapiens
  siRNA target sequence for LOC85865 (NM_033107.1,1013-1031).
gtagagttccaacatatca

SEQ ID NO: 403290 - DNA, 19 bp, Homo sapiens
  siRNA target sequence for LOC85865 (NM_033107.1,1053-1071).
gagaaggaatcgaagaatt

SEQ ID NO: 403291 - DNA, 19 bp, Homo sapiens
  siRNA target sequence for LOC85865 (NM_033107.1,1086-1104).
gaaagtcactggatgaaca

SEQ ID NO: 403292 - DNA, 19 bp, Homo sapiens
  siRNA target sequence for LOC85865 (NM_033107.1,1124-1142).
gcacttcataagaaacagt

SEQ ID NO: 403293 - DNA, 19 bp, Homo sapiens
  siRNA target sequence for LOC85865 (NM_033107.1,1176-1194).
ctactgagccaccatcaaa

SEQ ID NO: 403294 - DNA, 19 bp, Homo sapiens
  siRNA target sequence for LOC88523 (NM_033111.2,1076-1094).
cataggctcagcaaaacca

SEQ ID NO: 403295 - DNA, 19 bp, Homo sapiens
  siRNA target sequence for LOC88523 (NM_033111.2,1147-1165).
catggaggaaaactcatta

SEQ ID NO: 403296 - DNA, 19 bp, Homo sapiens
  siRNA target sequence for LOC88523 (NM_033111.2,1154-1172).
gaaaactcattagaattct

SEQ ID NO: 403297 - DNA, 19 bp, Homo sapiens
  siRNA target sequence for LOC88523 (NM_033111.2,1340-1358).
gacagtttccaaaacgtta

SEQ ID NO: 403298 - DNA, 19 bp, Homo sapiens
  siRNA target sequence for LOC88523 (NM_033111.2,1348-1366).
ccaaaacgttatgtctata

SEQ ID NO: 403299 - DNA, 19 bp, Homo sapiens
  siRNA target sequence for LOC88523 (NM_033111.2,1354-1372).
cgttatgtctatagttgaa

SEQ ID NO: 403300 - DNA, 19 bp, Homo sapiens
  siRNA target sequence for LOC88523 (NM_033111.2,1355-1373).
gttatgtctatagttgaat

SEQ ID NO: 403301 - DNA, 19 bp, Homo sapiens
  siRNA target sequence for LOC88523 (NM_033111.2,1362-1380).
ctatagttgaattagacaa

SEQ ID NO: 403302 - DNA, 19 bp, Homo sapiens
  siRNA target sequence for LOC88523 (NM_033111.2,1386-1404).
caaagaattacctctctaa

SEQ ID NO: 403303 - DNA, 19 bp, Homo sapiens
  siRNA target sequence for LOC88523 (NM_033111.2,1453-1471).
ctccgttacttgtccaata

SEQ ID NO: 403304 - DNA, 19 bp, Homo sapiens
  siRNA target sequence for LOC88523 (NM_033111.2,1455-1473).
ccgttacttgtccaatact

SEQ ID NO: 403305 - DNA, 19 bp, Homo sapiens
  siRNA target sequence for LOC88523 (NM_033111.2,1464-1482).
gtccaatactgactcaaaa

SEQ ID NO: 403306 - DNA, 19 bp, Homo sapiens
  siRNA target sequence for LOC88523 (NM_033111.2,1545-1563).
ggcataccatagcattaga

SEQ ID NO: 403307 - DNA, 19 bp, Homo sapiens
  siRNA target sequence for LOC88523 (NM_033111.2,1547-1565).
cataccatagcattagaca

SEQ ID NO: 403308 - DNA, 19 bp, Homo sapiens
  siRNA target sequence for LOC88523 (NM_033111.2,1574-1592).
ctttctgcggaaacttcat

SEQ ID NO: 403309 - DNA, 19 bp, Homo sapiens
  siRNA target sequence for LOC88523 (NM_033111.2,1580-1598).
gcggaaacttcatgcttat

SEQ ID NO: 403310 - DNA, 19 bp, Homo sapiens
  siRNA target sequence for LOC88523 (NM_033111.2,1581-1599).
cggaaacttcatgcttatt

SEQ ID NO: 403311 - DNA, 19 bp, Homo sapiens
  siRNA target sequence for LOC88523 (NM_033111.2,1654-1672).
ccatcaacatggaatcaga

SEQ ID NO: 403312 - DNA, 19 bp, Homo sapiens
  siRNA target sequence for LOC88523 (NM_033111.2,1655-1673).
catcaacatggaatcagaa

SEQ ID NO: 403313 - DNA, 19 bp, Homo sapiens
  siRNA target sequence for LOC88523 (NM_033111.2,1696-1714).
ggaacaagtgtatacaact

SEQ ID NO: 403314 - DNA, 19 bp, Homo sapiens
  siRNA target sequence for LOC88523 (NM_033111.2,1697-1715).
gaacaagtgtatacaacta

SEQ ID NO: 403315 - DNA, 19 bp, Homo sapiens
  siRNA target sequence for LOC88523 (NM_033111.2,1806-1824).
ctgcaggacctcataagtt

SEQ ID NO: 403316 - DNA, 19 bp, Homo sapiens
  siRNA target sequence for LOC88523 (NM_033111.2,1808-1826).
gcaggacctcataagttta

SEQ ID NO: 403317 - DNA, 19 bp, Homo sapiens
  siRNA target sequence for LOC88523 (NM_033111.2,1809-1827).
caggacctcataagtttat

SEQ ID NO: 403318 - DNA, 19 bp, Homo sapiens
  siRNA target sequence for LOC88523 (NM_033111.2,1811-1829).
ggacctcataagtttatat

SEQ ID NO: 403319 - DNA, 19 bp, Homo sapiens
  siRNA target sequence for LOC88523 (NM_033111.2,1879-1897).
cagcagggggcaatggatt

SEQ ID NO: 403320 - DNA, 19 bp, Homo sapiens
  siRNA target sequence for LOC88523 (NM_033111.2,1882-1900).
cagggggcaatggattcaa

SEQ ID NO: 403321 - DNA, 19 bp, Homo sapiens
  siRNA target sequence for LOC88523 (NM_033111.2,1954-1972).
gacagacaaactactgata

SEQ ID NO: 403322 - DNA, 19 bp, Homo sapiens
  siRNA target sequence for LOC88523 (NM_033111.2,1989-2007).
cacctccacctgaaactat

SEQ ID NO: 403323 - DNA, 19 bp, Homo sapiens
  siRNA target sequence for LOC88523 (NM_033111.2,1994-2012).
ccacctgaaactatggatt

SEQ ID NO: 403324 - DNA, 19 bp, Homo sapiens
  siRNA target sequence for LOC88523 (NM_033111.2,2004-2022).
ctatggattcattcataga

SEQ ID NO: 403325 - DNA, 19 bp, Homo sapiens
  siRNA target sequence for LOC88523 (NM_033111.2,2044-2062).
cttacctcaaccggatata

SEQ ID NO: 403326 - DNA, 19 bp, Homo sapiens
  siRNA target sequence for LOC88523 (NM_033111.2,2048-2066).
cctcaaccggatataccaa

SEQ ID NO: 403327 - DNA, 19 bp, Homo sapiens
  siRNA target sequence for LOC88523 (NM_033111.2,2049-2067).
ctcaaccggatataccaaa

SEQ ID NO: 403328 - DNA, 19 bp, Homo sapiens
  siRNA target sequence for LOC88523 (NM_033111.2,2126-2144).
gtaccaaattttgacttat

SEQ ID NO: 403329 - DNA, 19 bp, Homo sapiens
  siRNA target sequence for LOC88523 (NM_033111.2,2152-2170).
gagtcgtatcggtgtaaaa

SEQ ID NO: 403330 - DNA, 19 bp, Homo sapiens
  siRNA target sequence for LOC88523 (NM_033111.2,2154-2172).
gtcgtatcggtgtaaaaga

SEQ ID NO: 403331 - DNA, 19 bp, Homo sapiens
  siRNA target sequence for LOC88523 (NM_033111.2,2156-2174).
cgtatcggtgtaaaagaaa

SEQ ID NO: 403332 - DNA, 19 bp, Homo sapiens
  siRNA target sequence for LOC88523 (NM_033111.2,2203-2221).
ccatggactaaaaattact

SEQ ID NO: 403333 - DNA, 19 bp, Homo sapiens
  siRNA target sequence for LOC88523 (NM_033111.2,2289-2307).
cctttgatcatcatccatt

SEQ ID NO: 403334 - DNA, 19 bp, Homo sapiens
  siRNA target sequence for LOC88523 (NM_033111.2,2310-2328).
ggttttaccttgatattat

SEQ ID NO: 403335 - DNA, 19 bp, Homo sapiens
  siRNA target sequence for LOC88523 (NM_033111.2,2329-2347).
caaagctacccctttaaat

SEQ ID NO: 403336 - DNA, 19 bp, Homo sapiens
  siRNA target sequence for LOC88523 (NM_033111.2,2354-2372).
ggacagcgttattctcatt

SEQ ID NO: 403337 - DNA, 19 bp, Homo sapiens
  siRNA target sequence for LOC88523 (NM_033111.2,2402-2420).
gcatctttatacaaaaatt

SEQ ID NO: 403338 - DNA, 19 bp, Homo sapiens
  siRNA target sequence for LOC88523 (NM_033111.2,2466-2484).
catcttttacaaacaagaa

SEQ ID NO: 403339 - DNA, 19 bp, Homo sapiens
  siRNA target sequence for LOC88523 (NM_033111.2,2505-2523).
ctcagacaagagtaggtaa

SEQ ID NO: 403340 - DNA, 19 bp, Homo sapiens
  siRNA target sequence for LOC88523 (NM_033111.2,2509-2527).
gacaagagtaggtaataaa

SEQ ID NO: 403341 - DNA, 19 bp, Homo sapiens
  siRNA target sequence for LOC88523 (NM_033111.2,2678-2696).
gaggacagccaagacttaa

SEQ ID NO: 403342 - DNA, 19 bp, Homo sapiens
  siRNA target sequence for LOC88523 (NM_033111.2,2681-2699).
gacagccaagacttaacaa

SEQ ID NO: 403343 - DNA, 19 bp, Homo sapiens
  siRNA target sequence for LOC88523 (NM_033111.2,2712-2730).
gttcccttgagctaccatt

SEQ ID NO: 403344 - DNA, 19 bp, Homo sapiens
  siRNA target sequence for LOC88523 (NM_033111.2,2716-2734).
ccttgagctaccattatca

SEQ ID NO: 403345 - DNA, 19 bp, Homo sapiens
  siRNA target sequence for LOC88523 (NM_033111.2,2774-2792).
ccaggcgttccaatggaat

SEQ ID NO: 403346 - DNA, 19 bp, Homo sapiens
  siRNA target sequence for LOC88523 (NM_033111.2,2778-2796).
gcgttccaatggaatcctt

SEQ ID NO: 403347 - DNA, 19 bp, Homo sapiens
  siRNA target sequence for LOC88523 (NM_033111.2,2794-2812).
cttgttgcctgatgactat

SEQ ID NO: 403348 - DNA, 19 bp, Homo sapiens
  siRNA target sequence for LOC88523 (NM_033111.2,2822-2840).
cttgactggaagacactaa

SEQ ID NO: 403349 - DNA, 19 bp, Homo sapiens
  siRNA target sequence for LOC88523 (NM_033111.2,2835-2853).
cactaaagatgatctactt

SEQ ID NO: 403350 - DNA, 19 bp, Homo sapiens
  siRNA target sequence for C6orf153 (NM_033112.1,138-156).
ctattgaggggcacatcta

SEQ ID NO: 403351 - DNA, 19 bp, Homo sapiens
  siRNA target sequence for C6orf153 (NM_033112.1,147-165).
ggcacatctaacatgtcat

SEQ ID NO: 403352 - DNA, 19 bp, Homo sapiens
  siRNA target sequence for C6orf153 (NM_033112.1,151-169).
catctaacatgtcatttga

SEQ ID NO: 403353 - DNA, 19 bp, Homo sapiens
  siRNA target sequence for C6orf153 (NM_033112.1,197-215).
ggggactaagacgtacaaa

SEQ ID NO: 403354 - DNA, 19 bp, Homo sapiens
  siRNA target sequence for C6orf153 (NM_033112.1,199-217).
ggactaagacgtacaaaca

SEQ ID NO: 403355 - DNA, 19 bp, Homo sapiens
  siRNA target sequence for C6orf153 (NM_033112.1,200-218).
gactaagacgtacaaacaa

SEQ ID NO: 403356 - DNA, 19 bp, Homo sapiens
  siRNA target sequence for C6orf153 (NM_033112.1,202-220).
ctaagacgtacaaacaatt

SEQ ID NO: 403357 - DNA, 19 bp, Homo sapiens
  siRNA target sequence for C6orf153 (NM_033112.1,253-271).
ctagaccacctatccaaaa

SEQ ID NO: 403358 - DNA, 19 bp, Homo sapiens
  siRNA target sequence for C6orf153 (NM_033112.1,313-331).
ccaagatccgagtaccatt

SEQ ID NO: 403359 - DNA, 19 bp, Homo sapiens
  siRNA target sequence for C6orf153 (NM_033112.1,314-332).
caagatccgagtaccattt

SEQ ID NO: 403360 - DNA, 19 bp, Homo sapiens
  siRNA target sequence for C6orf153 (NM_033112.1,317-335).
gatccgagtaccattttta

SEQ ID NO: 403361 - DNA, 19 bp, Homo sapiens
  siRNA target sequence for C6orf153 (NM_033112.1,320-338).
ccgagtaccatttttacgt

SEQ ID NO: 403362 - DNA, 19 bp, Homo sapiens
  siRNA target sequence for C6orf153 (NM_033112.1,339-357).
caggttgttcccattagta

SEQ ID NO: 403363 - DNA, 19 bp, Homo sapiens
  siRNA target sequence for C6orf153 (NM_033112.1,392-410).
gtcaggggaatataatcct

SEQ ID NO: 403364 - DNA, 19 bp, Homo sapiens
  siRNA target sequence for C6orf153 (NM_033112.1,444-462).
gacatccgagcgaaagaga

SEQ ID NO: 403365 - DNA, 19 bp, Homo sapiens
  siRNA target sequence for C6orf153 (NM_033112.1,537-555).
cgaatggagcagcaagaaa

SEQ ID NO: 403366 - DNA, 19 bp, Homo sapiens
  siRNA target sequence for C6orf153 (NM_033112.1,701-719).
gctgaaacgcagcaagaaa

SEQ ID NO: 403367 - DNA, 19 bp, Homo sapiens
  siRNA target sequence for C6orf153 (NM_033112.1,712-730).
gcaagaaattggagaactt

SEQ ID NO: 403368 - DNA, 19 bp, Homo sapiens
  siRNA target sequence for C6orf153 (NM_033112.1,777-795).
ctccctttgagcaaagagt

SEQ ID NO: 403369 - DNA, 19 bp, Homo sapiens
  siRNA target sequence for NKD2 (NM_033120.2,316-334).
ggcagcgcctcaacattga

SEQ ID NO: 403370 - DNA, 19 bp, Homo sapiens
  siRNA target sequence for NKD2 (NM_033120.2,382-400).
ggacgttcacgctctatga

SEQ ID NO: 403371 - DNA, 19 bp, Homo sapiens
  siRNA target sequence for NKD2 (NM_033120.2,385-403).
cgttcacgctctatgactt

SEQ ID NO: 403372 - DNA, 19 bp, Homo sapiens
  siRNA target sequence for NKD2 (NM_033120.2,386-404).
gttcacgctctatgacttt

SEQ ID NO: 403373 - DNA, 19 bp, Homo sapiens
  siRNA target sequence for NKD2 (NM_033120.2,863-881).
ccaggagccagatacacat

SEQ ID NO: 403374 - DNA, 19 bp, Homo sapiens
  siRNA target sequence for ANKRD13 (NM_033121.1,375-393).
cacgaggtcgaacattatt

SEQ ID NO: 403375 - DNA, 19 bp, Homo sapiens
  siRNA target sequence for ANKRD13 (NM_033121.1,378-396).
gaggtcgaacattattgca

SEQ ID NO: 403376 - DNA, 19 bp, Homo sapiens
  siRNA target sequence for ANKRD13 (NM_033121.1,421-439).
ggaatctgctcgagtctta

SEQ ID NO: 403377 - DNA, 19 bp, Homo sapiens
  siRNA target sequence for ANKRD13 (NM_033121.1,432-450).
gagtcttactccgacataa

SEQ ID NO: 403378 - DNA, 19 bp, Homo sapiens
  siRNA target sequence for ANKRD13 (NM_033121.1,436-454).
cttactccgacataaagca

SEQ ID NO: 403379 - DNA, 19 bp, Homo sapiens
  siRNA target sequence for ANKRD13 (NM_033121.1,475-493).
ccagggatggacagtttta

SEQ ID NO: 403380 - DNA, 19 bp, Homo sapiens
  siRNA target sequence for ANKRD13 (NM_033121.1,478-496).
gggatggacagttttacat

SEQ ID NO: 403381 - DNA, 19 bp, Homo sapiens
  siRNA target sequence for ANKRD13 (NM_033121.1,548-566).
cgagactaccacaacacat

SEQ ID NO: 403382 - DNA, 19 bp, Homo sapiens
  siRNA target sequence for ANKRD13 (NM_033121.1,610-628).
cgaggctccggatttctat

SEQ ID NO: 403383 - DNA, 19 bp, Homo sapiens
  siRNA target sequence for ANKRD13 (NM_033121.1,717-735).
ccaaactgcgcgtcgatat

SEQ ID NO: 403384 - DNA, 19 bp, Homo sapiens
  siRNA target sequence for ANKRD13 (NM_033121.1,722-740).
ctgcgcgtcgatatcacat

SEQ ID NO: 403385 - DNA, 19 bp, Homo sapiens
  siRNA target sequence for ANKRD13 (NM_033121.1,773-791).
gggaggcgtagttttatat

SEQ ID NO: 403386 - DNA, 19 bp, Homo sapiens
  siRNA target sequence for ANKRD13 (NM_033121.1,774-792).
ggaggcgtagttttatatt

SEQ ID NO: 403387 - DNA, 19 bp, Homo sapiens
  siRNA target sequence for ANKRD13 (NM_033121.1,775-793).
gaggcgtagttttatattt

SEQ ID NO: 403388 - DNA, 19 bp, Homo sapiens
  siRNA target sequence for ANKRD13 (NM_033121.1,803-821).
gacaactgggcggagttaa

SEQ ID NO: 403389 - DNA, 19 bp, Homo sapiens
  siRNA target sequence for ANKRD13 (NM_033121.1,813-831).
cggagttaatggaagtcaa

SEQ ID NO: 403390 - DNA, 19 bp, Homo sapiens
  siRNA target sequence for ANKRD13 (NM_033121.1,937-955).
gctcacaagccctgtcatt

SEQ ID NO: 403391 - DNA, 19 bp, Homo sapiens
  siRNA target sequence for ANKRD13 (NM_033121.1,938-956).
ctcacaagccctgtcatta

SEQ ID NO: 403392 - DNA, 19 bp, Homo sapiens
  siRNA target sequence for ANKRD13 (NM_033121.1,958-976).
caccagcctcgatactaaa

SEQ ID NO: 403393 - DNA, 19 bp, Homo sapiens
  siRNA target sequence for ANKRD13 (NM_033121.1,967-985).
cgatactaaaaatattgct

SEQ ID NO: 403394 - DNA, 19 bp, Homo sapiens
  siRNA target sequence for ANKRD13 (NM_033121.1,1046-1064).
ggttacgaagcaaaggttt

SEQ ID NO: 403395 - DNA, 19 bp, Homo sapiens
  siRNA target sequence for ANKRD13 (NM_033121.1,1047-1065).
gttacgaagcaaaggttta

SEQ ID NO: 403396 - DNA, 19 bp, Homo sapiens
  siRNA target sequence for ANKRD13 (NM_033121.1,1051-1069).
cgaagcaaaggtttacaca

SEQ ID NO: 403397 - DNA, 19 bp, Homo sapiens
  siRNA target sequence for ANKRD13 (NM_033121.1,1055-1073).
gcaaaggtttacacagtaa

SEQ ID NO: 403398 - DNA, 19 bp, Homo sapiens
  siRNA target sequence for ANKRD13 (NM_033121.1,1093-1111).
caaaatacgcacagaacat

SEQ ID NO: 403399 - DNA, 19 bp, Homo sapiens
  siRNA target sequence for ANKRD13 (NM_033121.1,1245-1263).
ccatcacgcctgatgagta

SEQ ID NO: 403400 - DNA, 19 bp, Homo sapiens
  siRNA target sequence for ANKRD13 (NM_033121.1,1251-1269).
cgcctgatgagtacttcaa

SEQ ID NO: 403401 - DNA, 19 bp, Homo sapiens
  siRNA target sequence for ANKRD13 (NM_033121.1,1307-1325).
ccgaaagagctgacgatta

SEQ ID NO: 403402 - DNA, 19 bp, Homo sapiens
  siRNA target sequence for ANKRD13 (NM_033121.1,1320-1338).
cgattagaacacagaagtt

SEQ ID NO: 403403 - DNA, 19 bp, Homo sapiens
  siRNA target sequence for ANKRD13 (NM_033121.1,1321-1339).
gattagaacacagaagttt

SEQ ID NO: 403404 - DNA, 19 bp, Homo sapiens
  siRNA target sequence for ANKRD13 (NM_033121.1,1416-1434).
ctcgaacgagtgctcattt

SEQ ID NO: 403405 - DNA, 19 bp, Homo sapiens
  siRNA target sequence for ANKRD13 (NM_033121.1,1440-1458).
gactgagagatttcatcaa

SEQ ID NO: 403406 - DNA, 19 bp, Homo sapiens
  siRNA target sequence for ANKRD13 (NM_033121.1,1446-1464).
gagatttcatcaaattgga

SEQ ID NO: 403407 - DNA, 19 bp, Homo sapiens
  siRNA target sequence for ANKRD13 (NM_033121.1,1448-1466).
gatttcatcaaattggaat

SEQ ID NO: 403408 - DNA, 19 bp, Homo sapiens
  siRNA target sequence for ANKRD13 (NM_033121.1,1462-1480).
ggaattcccacctggattt

SEQ ID NO: 403409 - DNA, 19 bp, Homo sapiens
  siRNA target sequence for ANKRD13 (NM_033121.1,1504-1522).
gtttcatgtcttaaatgca

SEQ ID NO: 403410 - DNA, 19 bp, Homo sapiens
  siRNA target sequence for ANKRD13 (NM_033121.1,1521-1539).
cacggattacatttggaaa

SEQ ID NO: 403411 - DNA, 19 bp, Homo sapiens
  siRNA target sequence for ANKRD13 (NM_033121.1,1555-1573).
cactgccgaagaatctgta

SEQ ID NO: 403412 - DNA, 19 bp, Homo sapiens
  siRNA target sequence for ANKRD13 (NM_033121.1,1560-1578).
ccgaagaatctgtatctca

SEQ ID NO: 403413 - DNA, 19 bp, Homo sapiens
  siRNA target sequence for ANKRD13 (NM_033121.1,1561-1579).
cgaagaatctgtatctcaa

SEQ ID NO: 403414 - DNA, 19 bp, Homo sapiens
  siRNA target sequence for ANKRD13 (NM_033121.1,1605-1623).
cagcttcccacatcacaaa

SEQ ID NO: 403415 - DNA, 19 bp, Homo sapiens
  siRNA target sequence for ANKRD13 (NM_033121.1,1649-1667).
gaaattcccgaatcttact

SEQ ID NO: 403416 - DNA, 19 bp, Homo sapiens
  siRNA target sequence for ANKRD13 (NM_033121.1,1656-1674).
ccgaatcttactatgttca

SEQ ID NO: 403417 - DNA, 19 bp, Homo sapiens
  siRNA target sequence for ANKRD13 (NM_033121.1,1657-1675).
cgaatcttactatgttcaa

SEQ ID NO: 403418 - DNA, 19 bp, Homo sapiens
  siRNA target sequence for ANKRD13 (NM_033121.1,1693-1711).
gcatttgcaagatgaagat

SEQ ID NO: 403419 - DNA, 19 bp, Homo sapiens
  siRNA target sequence for ANKRD13 (NM_033121.1,1703-1721).
gatgaagattacgagataa

SEQ ID NO: 403420 - DNA, 19 bp, Homo sapiens
  siRNA target sequence for ANKRD13 (NM_033121.1,1759-1777).
caggagccaggaactttca

SEQ ID NO: 403421 - DNA, 19 bp, Homo sapiens
  siRNA target sequence for ANKRD13 (NM_033121.1,1794-1812).
gagggatcagccagacaaa

SEQ ID NO: 403422 - DNA, 19 bp, Homo sapiens
  siRNA target sequence for ANKRD13 (NM_033121.1,1815-1833).
cctatgacgcccagtatga

SEQ ID NO: 403423 - DNA, 19 bp, Homo sapiens
  siRNA target sequence for ANKRD13 (NM_033121.1,1894-1912).
cgagacaagccgttttgat

SEQ ID NO: 403424 - DNA, 19 bp, Homo sapiens
  siRNA target sequence for ANKRD13 (NM_033121.1,1895-1913).
gagacaagccgttttgata

SEQ ID NO: 403425 - DNA, 19 bp, Homo sapiens
  siRNA target sequence for ANKRD13 (NM_033121.1,1897-1915).
gacaagccgttttgataat

SEQ ID NO: 403426 - DNA, 19 bp, Homo sapiens
  siRNA target sequence for ANKRD13 (NM_033121.1,1899-1917).
caagccgttttgataatga

SEQ ID NO: 403427 - DNA, 19 bp, Homo sapiens
  siRNA target sequence for ANKRD13 (NM_033121.1,1902-1920).
gccgttttgataatgactt

SEQ ID NO: 403428 - DNA, 19 bp, Homo sapiens
  siRNA target sequence for NYD-SP26 (NM_033122.2,145-163).
gctattcccaaatcagaaa

SEQ ID NO: 403429 - DNA, 19 bp, Homo sapiens
  siRNA target sequence for NYD-SP26 (NM_033122.2,184-202).
gaccacgtcacttcagtaa

SEQ ID NO: 403430 - DNA, 19 bp, Homo sapiens
  siRNA target sequence for NYD-SP26 (NM_033122.2,186-204).
ccacgtcacttcagtaaat

SEQ ID NO: 403431 - DNA, 19 bp, Homo sapiens
  siRNA target sequence for NYD-SP26 (NM_033122.2,213-231).
gctagaaagcgatttttca

SEQ ID NO: 403432 - DNA, 19 bp, Homo sapiens
  siRNA target sequence for NYD-SP26 (NM_033122.2,217-235).
gaaagcgatttttcaacaa

SEQ ID NO: 403433 - DNA, 19 bp, Homo sapiens
  siRNA target sequence for NYD-SP26 (NM_033122.2,286-304).
gatatggggaccgacttta

SEQ ID NO: 403434 - DNA, 19 bp, Homo sapiens
  siRNA target sequence for NYD-SP26 (NM_033122.2,294-312).
gaccgactttattaagtca

SEQ ID NO: 403435 - DNA, 19 bp, Homo sapiens
  siRNA target sequence for NYD-SP26 (NM_033122.2,311-329).
caacaactcacctacagaa

SEQ ID NO: 403436 - DNA, 19 bp, Homo sapiens
  siRNA target sequence for NYD-SP26 (NM_033122.2,341-359).
ctctgactggcactacaaa

SEQ ID NO: 403437 - DNA, 19 bp, Homo sapiens
  siRNA target sequence for NYD-SP26 (NM_033122.2,343-361).
ctgactggcactacaaact

SEQ ID NO: 403438 - DNA, 19 bp, Homo sapiens
  siRNA target sequence for NYD-SP26 (NM_033122.2,349-367).
ggcactacaaactccataa

SEQ ID NO: 403439 - DNA, 19 bp, Homo sapiens
  siRNA target sequence for NYD-SP26 (NM_033122.2,362-380).
ccataacaagagactctat

SEQ ID NO: 403440 - DNA, 19 bp, Homo sapiens
  siRNA target sequence for NYD-SP26 (NM_033122.2,363-381).
cataacaagagactctatt

SEQ ID NO: 403441 - DNA, 19 bp, Homo sapiens
  siRNA target sequence for NYD-SP26 (NM_033122.2,373-391).
gactctattaccgaacatt

SEQ ID NO: 403442 - DNA, 19 bp, Homo sapiens
  siRNA target sequence for NYD-SP26 (NM_033122.2,377-395).
ctattaccgaacatttcat

SEQ ID NO: 403443 - DNA, 19 bp, Homo sapiens
  siRNA target sequence for NYD-SP26 (NM_033122.2,481-499).
ctcttagctaccattgaca

SEQ ID NO: 403444 - DNA, 19 bp, Homo sapiens
  siRNA target sequence for NYD-SP26 (NM_033122.2,577-595).
cctgcctttccacgtaaaa

SEQ ID NO: 403445 - DNA, 19 bp, Homo sapiens
  siRNA target sequence for NYD-SP26 (NM_033122.2,582-600).
ctttccacgtaaaaaggat

SEQ ID NO: 403446 - DNA, 19 bp, Homo sapiens
  siRNA target sequence for NYD-SP26 (NM_033122.2,601-619).
gaagctgatatgagcaatt

SEQ ID NO: 403447 - DNA, 19 bp, Homo sapiens
  siRNA target sequence for NYD-SP26 (NM_033122.2,604-622).
gctgatatgagcaattata

SEQ ID NO: 403448 - DNA, 19 bp, Homo sapiens
  siRNA target sequence for NYD-SP26 (NM_033122.2,658-676).
gctgtccaggtcactgatt

SEQ ID NO: 403449 - DNA, 19 bp, Homo sapiens
  siRNA target sequence for NYD-SP26 (NM_033122.2,723-741).
cactactattccagacata

SEQ ID NO: 403450 - DNA, 19 bp, Homo sapiens
  siRNA target sequence for NYD-SP26 (NM_033122.2,767-785).
ccgaaattgacctaagtgt

SEQ ID NO: 403451 - DNA, 19 bp, Homo sapiens
  siRNA target sequence for NYD-SP26 (NM_033122.2,858-876).
cactacctctgctgaaaaa

SEQ ID NO: 403452 - DNA, 19 bp, Homo sapiens
  siRNA target sequence for NYD-SP26 (NM_033122.2,860-878).
ctacctctgctgaaaaaga

SEQ ID NO: 403453 - DNA, 19 bp, Homo sapiens
  siRNA target sequence for NYD-SP26 (NM_033122.2,995-1013).
ctgttgaatccagatatga

SEQ ID NO: 403454 - DNA, 19 bp, Homo sapiens
  siRNA target sequence for NYD-SP26 (NM_033122.2,997-1015).
gttgaatccagatatgact

SEQ ID NO: 403455 - DNA, 19 bp, Homo sapiens
  siRNA target sequence for NYD-SP26 (NM_033122.2,1017-1035).
cgttgtccctgcatcaata

SEQ ID NO: 403456 - DNA, 19 bp, Homo sapiens
  siRNA target sequence for NYD-SP26 (NM_033122.2,1021-1039).
gtccctgcatcaatagcta

SEQ ID NO: 403457 - DNA, 19 bp, Homo sapiens
  siRNA target sequence for NYD-SP26 (NM_033122.2,1044-1062).
cctagtggaagaatcatct

SEQ ID NO: 403458 - DNA, 19 bp, Homo sapiens
  siRNA target sequence for NYD-SP26 (NM_033122.2,1094-1112).
cagagactgtacctaagat

SEQ ID NO: 403459 - DNA, 19 bp, Homo sapiens
  siRNA target sequence for NYD-SP26 (NM_033122.2,1130-1148).
gaactacctctgtattaga

SEQ ID NO: 403460 - DNA, 19 bp, Homo sapiens
  siRNA target sequence for NYD-SP26 (NM_033122.2,1181-1199).
ctgaaacggatatctttga

SEQ ID NO: 403461 - DNA, 19 bp, Homo sapiens
  siRNA target sequence for NYD-SP26 (NM_033122.2,1213-1231).
gaacccgatgagttcatga

SEQ ID NO: 403462 - DNA, 19 bp, Homo sapiens
  siRNA target sequence for NYD-SP26 (NM_033122.2,1216-1234).
cccgatgagttcatgattt

SEQ ID NO: 403463 - DNA, 19 bp, Homo sapiens
  siRNA target sequence for NYD-SP28 (NM_033124.2,221-239).
cgcccctgtccgatgagaa

SEQ ID NO: 403464 - DNA, 19 bp, Homo sapiens
  siRNA target sequence for NYD-SP28 (NM_033124.2,358-376).
ctgaaccttaataagatta

SEQ ID NO: 403465 - DNA, 19 bp, Homo sapiens
  siRNA target sequence for NYD-SP28 (NM_033124.2,363-381).
ccttaataagattaacaca

SEQ ID NO: 403466 - DNA, 19 bp, Homo sapiens
  siRNA target sequence for NYD-SP28 (NM_033124.2,392-410).
ctgtccttcgggaagtcaa

SEQ ID NO: 403467 - DNA, 19 bp, Homo sapiens
  siRNA target sequence for NYD-SP28 (NM_033124.2,438-456).
gatcctcagccaaacattt

SEQ ID NO: 403468 - DNA, 19 bp, Homo sapiens
  siRNA target sequence for NYD-SP28 (NM_033124.2,441-459).
cctcagccaaacatttgaa

SEQ ID NO: 403469 - DNA, 19 bp, Homo sapiens
  siRNA target sequence for NYD-SP28 (NM_033124.2,473-491).
gtaaggacaatgtcatcaa

SEQ ID NO: 403470 - DNA, 19 bp, Homo sapiens
  siRNA target sequence for NYD-SP28 (NM_033124.2,484-502).
gtcatcaagtctttagcta

SEQ ID NO: 403471 - DNA, 19 bp, Homo sapiens
  siRNA target sequence for NYD-SP28 (NM_033124.2,668-686).
caattattgaccaacatga

SEQ ID NO: 403472 - DNA, 19 bp, Homo sapiens
  siRNA target sequence for NYD-SP28 (NM_033124.2,697-715).
cactatctgcaagatatct

SEQ ID NO: 403473 - DNA, 19 bp, Homo sapiens
  siRNA target sequence for NYD-SP28 (NM_033124.2,720-738).
ggccatggagcagaactat

SEQ ID NO: 403474 - DNA, 19 bp, Homo sapiens
  siRNA target sequence for NYD-SP28 (NM_033124.2,721-739).
gccatggagcagaactata

SEQ ID NO: 403475 - DNA, 19 bp, Homo sapiens
  siRNA target sequence for NYD-SP28 (NM_033124.2,723-741).
catggagcagaactatata

SEQ ID NO: 403476 - DNA, 19 bp, Homo sapiens
  siRNA target sequence for NYD-SP28 (NM_033124.2,726-744).
ggagcagaactatatagat

SEQ ID NO: 403477 - DNA, 19 bp, Homo sapiens
  siRNA target sequence for NYD-SP28 (NM_033124.2,727-745).
gagcagaactatatagatt

SEQ ID NO: 403478 - DNA, 19 bp, Homo sapiens
  siRNA target sequence for NYD-SP28 (NM_033124.2,729-747).
gcagaactatatagattct

SEQ ID NO: 403479 - DNA, 19 bp, Homo sapiens
  siRNA target sequence for NYD-SP28 (NM_033124.2,874-892).
gatgtactcaagaattaca

SEQ ID NO: 403480 - DNA, 19 bp, Homo sapiens
  siRNA target sequence for NYD-SP28 (NM_033124.2,953-971).
gctccaaagagattgaagt

SEQ ID NO: 403481 - DNA, 19 bp, Homo sapiens
  siRNA target sequence for NYD-SP28 (NM_033124.2,994-1012).
ctacaggatgccataacta

SEQ ID NO: 403482 - DNA, 19 bp, Homo sapiens
  siRNA target sequence for NYD-SP28 (NM_033124.2,1063-1081).
cggtatatccgtaatgaca

SEQ ID NO: 403483 - DNA, 19 bp, Homo sapiens
  siRNA target sequence for NYD-SP28 (NM_033124.2,1064-1082).
ggtatatccgtaatgacaa

SEQ ID NO: 403484 - DNA, 19 bp, Homo sapiens
  siRNA target sequence for NYD-SP28 (NM_033124.2,1189-1207).
ctcaaggccctgagaaaga

SEQ ID NO: 403485 - DNA, 19 bp, Homo sapiens
  siRNA target sequence for NYD-SP28 (NM_033124.2,1210-1228).
gttgataagggtgaaaaga

SEQ ID NO: 403486 - DNA, 19 bp, Homo sapiens
  siRNA target sequence for NYD-SP28 (NM_033124.2,1231-1249).
cttaaacttgctgaaatat

SEQ ID NO: 403487 - DNA, 19 bp, Homo sapiens
  siRNA target sequence for NYD-SP28 (NM_033124.2,1240-1258).
gctgaaatatgtaggaaat

SEQ ID NO: 403488 - DNA, 19 bp, Homo sapiens
  siRNA target sequence for NYD-SP28 (NM_033124.2,1326-1344).
gattcagaagaataatcta

SEQ ID NO: 403489 - DNA, 19 bp, Homo sapiens
  siRNA target sequence for NYD-SP28 (NM_033124.2,1456-1474).
cgagcccagctgctagata

SEQ ID NO: 403490 - DNA, 19 bp, Homo sapiens
  siRNA target sequence for NYD-SP28 (NM_033124.2,1459-1477).
gcccagctgctagatatca

SEQ ID NO: 403491 - DNA, 19 bp, Homo sapiens
  siRNA target sequence for NYD-SP28 (NM_033124.2,1460-1478).
cccagctgctagatatcaa

SEQ ID NO: 403492 - DNA, 19 bp, Homo sapiens
  siRNA target sequence for NYD-SP28 (NM_033124.2,1556-1574).
cactctttatagtcaacta

SEQ ID NO: 403493 - DNA, 19 bp, Homo sapiens
  siRNA target sequence for NYD-SP28 (NM_033124.2,1591-1609).
cagcccttgtccatacgta

SEQ ID NO: 403494 - DNA, 19 bp, Homo sapiens
  siRNA target sequence for NYD-SP28 (NM_033124.2,1593-1611).
gcccttgtccatacgtata

SEQ ID NO: 403495 - DNA, 19 bp, Homo sapiens
  siRNA target sequence for RGPR (NM_033127.1,138-156).
cacagcaccctcaaaggat

SEQ ID NO: 403496 - DNA, 19 bp, Homo sapiens
  siRNA target sequence for RGPR (NM_033127.1,292-310).
cagcagccccattatgcat

SEQ ID NO: 403497 - DNA, 19 bp, Homo sapiens
  siRNA target sequence for RGPR (NM_033127.1,335-353).
ctgtgtctggagttgacta

SEQ ID NO: 403498 - DNA, 19 bp, Homo sapiens
  siRNA target sequence for RGPR (NM_033127.1,361-379).
ggtggttatcgcaatcagt

SEQ ID NO: 403499 - DNA, 19 bp, Homo sapiens
  siRNA target sequence for RGPR (NM_033127.1,362-380).
gtggttatcgcaatcagtt

SEQ ID NO: 403500 - DNA, 19 bp, Homo sapiens
  siRNA target sequence for RGPR (NM_033127.1,365-383).
gttatcgcaatcagttgta

SEQ ID NO: 403501 - DNA, 19 bp, Homo sapiens
  siRNA target sequence for RGPR (NM_033127.1,370-388).
cgcaatcagttgtattcaa

SEQ ID NO: 403502 - DNA, 19 bp, Homo sapiens
  siRNA target sequence for RGPR (NM_033127.1,381-399).
gtattcaaggccaggttat

SEQ ID NO: 403503 - DNA, 19 bp, Homo sapiens
  siRNA target sequence for RGPR (NM_033127.1,386-404).
caaggccaggttatgagaa

SEQ ID NO: 403504 - DNA, 19 bp, Homo sapiens
  siRNA target sequence for RGPR (NM_033127.1,391-409).
ccaggttatgagaattcat

SEQ ID NO: 403505 - DNA, 19 bp, Homo sapiens
  siRNA target sequence for RGPR (NM_033127.1,509-527).
ggcaacggagtccttatat

SEQ ID NO: 403506 - DNA, 19 bp, Homo sapiens
  siRNA target sequence for RGPR (NM_033127.1,511-529).
caacggagtccttatatct

SEQ ID NO: 403507 - DNA, 19 bp, Homo sapiens
  siRNA target sequence for RGPR (NM_033127.1,538-556).
gattaccgagagcaaaagt

SEQ ID NO: 403508 - DNA, 19 bp, Homo sapiens
  siRNA target sequence for RGPR (NM_033127.1,555-573).
gtaccttgatgaacatcat

SEQ ID NO: 403509 - DNA, 19 bp, Homo sapiens
  siRNA target sequence for RGPR (NM_033127.1,582-600).
ccagcacagtccatttgga

SEQ ID NO: 403510 - DNA, 19 bp, Homo sapiens
  siRNA target sequence for RGPR (NM_033127.1,583-601).
cagcacagtccatttggaa

SEQ ID NO: 403511 - DNA, 19 bp, Homo sapiens
  siRNA target sequence for RGPR (NM_033127.1,615-633).
ccacttccaatctaacagt

SEQ ID NO: 403512 - DNA, 19 bp, Homo sapiens
  siRNA target sequence for RGPR (NM_033127.1,616-634).
cacttccaatctaacagta

SEQ ID NO: 403513 - DNA, 19 bp, Homo sapiens
  siRNA target sequence for RGPR (NM_033127.1,632-650).
gtaggaacccttgtaaaga

SEQ ID NO: 403514 - DNA, 19 bp, Homo sapiens
  siRNA target sequence for RGPR (NM_033127.1,895-913).
cccaaagcacccatgaagt

SEQ ID NO: 403515 - DNA, 19 bp, Homo sapiens
  siRNA target sequence for RGPR (NM_033127.1,901-919).
gcacccatgaagttctaca

SEQ ID NO: 403516 - DNA, 19 bp, Homo sapiens
  siRNA target sequence for RGPR (NM_033127.1,912-930).
gttctacatccctcatgtt

SEQ ID NO: 403517 - DNA, 19 bp, Homo sapiens
  siRNA target sequence for RGPR (NM_033127.1,1080-1098).
cttgattagggaagatgta

SEQ ID NO: 403518 - DNA, 19 bp, Homo sapiens
  siRNA target sequence for RGPR (NM_033127.1,1245-1263).
cgctgagctgctaatgcaa

SEQ ID NO: 403519 - DNA, 19 bp, Homo sapiens
  siRNA target sequence for RGPR (NM_033127.1,1406-1424).
cgcagatcgtggagaaatt

SEQ ID NO: 403520 - DNA, 19 bp, Homo sapiens
  siRNA target sequence for RGPR (NM_033127.1,1408-1426).
cagatcgtggagaaattca

SEQ ID NO: 403521 - DNA, 19 bp, Homo sapiens
  siRNA target sequence for RGPR (NM_033127.1,1425-1443).
cactaggctgctctactat

SEQ ID NO: 403522 - DNA, 19 bp, Homo sapiens
  siRNA target sequence for RGPR (NM_033127.1,1562-1580).
gcacgctggcgctcaatga

SEQ ID NO: 403523 - DNA, 19 bp, Homo sapiens
  siRNA target sequence for RGPR (NM_033127.1,1668-1686).
gcctcacttggctgtgatt

SEQ ID NO: 403524 - DNA, 19 bp, Homo sapiens
  siRNA target sequence for RGPR (NM_033127.1,1716-1734).
gtatcagcgtgcgattgtt

SEQ ID NO: 403525 - DNA, 19 bp, Homo sapiens
  siRNA target sequence for RGPR (NM_033127.1,1859-1877).
gccacagtcaagagttttt

SEQ ID NO: 403526 - DNA, 19 bp, Homo sapiens
  siRNA target sequence for RGPR (NM_033127.1,1861-1879).
cacagtcaagagtttttga

SEQ ID NO: 403527 - DNA, 19 bp, Homo sapiens
  siRNA target sequence for RGPR (NM_033127.1,1961-1979).
cttctttccaggtgtataa

SEQ ID NO: 403528 - DNA, 19 bp, Homo sapiens
  siRNA target sequence for RGPR (NM_033127.1,1964-1982).
ctttccaggtgtataagct

SEQ ID NO: 403529 - DNA, 19 bp, Homo sapiens
  siRNA target sequence for RGPR (NM_033127.1,1991-2009).
cttcccgtctggcagatta

SEQ ID NO: 403530 - DNA, 19 bp, Homo sapiens
  siRNA target sequence for RGPR (NM_033127.1,2078-2096).
gcagtcaccctgtgctatt

SEQ ID NO: 403531 - DNA, 19 bp, Homo sapiens
  siRNA target sequence for RGPR (NM_033127.1,2079-2097).
cagtcaccctgtgctatta

SEQ ID NO: 403532 - DNA, 19 bp, Homo sapiens
  siRNA target sequence for RGPR (NM_033127.1,2248-2266).
catcctactcgctcagata

SEQ ID NO: 403533 - DNA, 19 bp, Homo sapiens
  siRNA target sequence for RGPR (NM_033127.1,2251-2269).
cctactcgctcagatattt

SEQ ID NO: 403534 - DNA, 19 bp, Homo sapiens
  siRNA target sequence for RGPR (NM_033127.1,2635-2653).
ggccaagaggtcatttcca

SEQ ID NO: 403535 - DNA, 19 bp, Homo sapiens
  siRNA target sequence for RGPR (NM_033127.1,2636-2654).
gccaagaggtcatttccaa

SEQ ID NO: 403536 - DNA, 19 bp, Homo sapiens
  siRNA target sequence for RGPR (NM_033127.1,2637-2655).
ccaagaggtcatttccaaa

SEQ ID NO: 403537 - DNA, 19 bp, Homo sapiens
  siRNA target sequence for RGPR (NM_033127.1,2674-2692).
gctagaccacgaagtattt

SEQ ID NO: 403538 - DNA, 19 bp, Homo sapiens
  siRNA target sequence for RGPR (NM_033127.1,2797-2815).
gggaaggagcatacaaaga

SEQ ID NO: 403539 - DNA, 19 bp, Homo sapiens
  siRNA target sequence for RGPR (NM_033127.1,3095-3113).
gaccagagagtgtttcctt

SEQ ID NO: 403540 - DNA, 19 bp, Homo sapiens
  siRNA target sequence for RGPR (NM_033127.1,3126-3144).
caaccctggtgttcttctt

SEQ ID NO: 403541 - DNA, 19 bp, Homo sapiens
  siRNA target sequence for DKFZP572C163 (NM_033160.2,480-498).
ctctgtggtggcagtgaat

SEQ ID NO: 403542 - DNA, 19 bp, Homo sapiens
  siRNA target sequence for OR51B2 (NM_033180.1,144-162).
gcatgaccacagtcttcat

SEQ ID NO: 403543 - DNA, 19 bp, Homo sapiens
  siRNA target sequence for OR51B2 (NM_033180.1,219-237).
gaccacgatgcctactgta

SEQ ID NO: 403544 - DNA, 19 bp, Homo sapiens
  siRNA target sequence for OR51B2 (NM_033180.1,221-239).
ccacgatgcctactgtaat

SEQ ID NO: 403545 - DNA, 19 bp, Homo sapiens
  siRNA target sequence for OR51B2 (NM_033180.1,253-271).
gtgaatcacagggagatta

SEQ ID NO: 403546 - DNA, 19 bp, Homo sapiens
  siRNA target sequence for OR51B2 (NM_033180.1,288-306).
cctacaggcttactttatt

SEQ ID NO: 403547 - DNA, 19 bp, Homo sapiens
  siRNA target sequence for OR51B2 (NM_033180.1,372-390).
ccgcaatcctttgagatat

SEQ ID NO: 403548 - DNA, 19 bp, Homo sapiens
  siRNA target sequence for OR51B2 (NM_033180.1,402-420).
caccaatactagagtcata

SEQ ID NO: 403549 - DNA, 19 bp, Homo sapiens
  siRNA target sequence for OR51B2 (NM_033180.1,427-445).
ggagtgggagtgtttctaa

SEQ ID NO: 403550 - DNA, 19 bp, Homo sapiens
  siRNA target sequence for OR51B2 (NM_033180.1,438-456).
gtttctaaggggttttgta

SEQ ID NO: 403551 - DNA, 19 bp, Homo sapiens
  siRNA target sequence for OR51B2 (NM_033180.1,458-476).
ccatcctgcctgtaatttt

SEQ ID NO: 403552 - DNA, 19 bp, Homo sapiens
  siRNA target sequence for OR51B2 (NM_033180.1,478-496).
cgtcttttttcattttcat

SEQ ID NO: 403553 - DNA, 19 bp, Homo sapiens
  siRNA target sequence for OR51B2 (NM_033180.1,636-654).
cctcttctcctatattcta

SEQ ID NO: 403554 - DNA, 19 bp, Homo sapiens
  siRNA target sequence for OR51B2 (NM_033180.1,637-655).
ctcttctcctatattctaa

SEQ ID NO: 403555 - DNA, 19 bp, Homo sapiens
  siRNA target sequence for OR51B2 (NM_033180.1,697-715).
gccaaagccctcaatacct

SEQ ID NO: 403556 - DNA, 19 bp, Homo sapiens
  siRNA target sequence for OR51B2 (NM_033180.1,714-732).
ctgtatctcccacattagt

SEQ ID NO: 403557 - DNA, 19 bp, Homo sapiens
  siRNA target sequence for OR51B2 (NM_033180.1,734-752).
gtgttcttatcttctatgt

SEQ ID NO: 403558 - DNA, 19 bp, Homo sapiens
  siRNA target sequence for OR51B2 (NM_033180.1,736-754).
gttcttatcttctatgtta

SEQ ID NO: 403559 - DNA, 19 bp, Homo sapiens
  siRNA target sequence for OR51B2 (NM_033180.1,802-820).
gaggttgtccacattatca

SEQ ID NO: 403560 - DNA, 19 bp, Homo sapiens
  siRNA target sequence for OR51B2 (NM_033180.1,900-918).
cattatccgccttttatct

SEQ ID NO: 403561 - DNA, 19 bp, Homo sapiens
  siRNA target sequence for FBX30 (NM_033182.4,470-488).
gaccaggtcaagaaatact

SEQ ID NO: 403562 - DNA, 19 bp, Homo sapiens
  siRNA target sequence for FBX30 (NM_033182.4,476-494).
gtcaagaaatacttcgtta

SEQ ID NO: 403563 - DNA, 19 bp, Homo sapiens
  siRNA target sequence for FBX30 (NM_033182.4,481-499).
gaaatacttcgttacttca

SEQ ID NO: 403564 - DNA, 19 bp, Homo sapiens
  siRNA target sequence for FBX30 (NM_033182.4,732-750).
gggaggtctcccacacatt

SEQ ID NO: 403565 - DNA, 19 bp, Homo sapiens
  siRNA target sequence for FBX30 (NM_033182.4,797-815).
ggcgtggacactcattact

SEQ ID NO: 403566 - DNA, 19 bp, Homo sapiens
  siRNA target sequence for BC002942 (NM_033200.1,390-408).
gccaccctgtcatctactt

SEQ ID NO: 403567 - DNA, 19 bp, Homo sapiens
  siRNA target sequence for BC002942 (NM_033200.1,445-463).
gggccaggtgttcctttat

SEQ ID NO: 403568 - DNA, 19 bp, Homo sapiens
  siRNA target sequence for BC002942 (NM_033200.1,781-799).
ggtggccaccttcctaatt

SEQ ID NO: 403569 - DNA, 19 bp, Homo sapiens
  siRNA target sequence for BC002942 (NM_033200.1,875-893).
ctgcaggtcctgattatca

SEQ ID NO: 403570 - DNA, 19 bp, Homo sapiens
  siRNA target sequence for BC002942 (NM_033200.1,1527-1545).
ggacggagatcgagttcat

SEQ ID NO: 403571 - DNA, 19 bp, Homo sapiens
  siRNA target sequence for BC002942 (NM_033200.1,1530-1548).
cggagatcgagttcatgta

SEQ ID NO: 403572 - DNA, 19 bp, Homo sapiens
  siRNA target sequence for BC002942 (NM_033200.1,1646-1664).
cacagcccgtggttcacaa

SEQ ID NO: 403573 - DNA, 19 bp, Homo sapiens
  siRNA target sequence for BC008967 (NM_033201.1,477-495).
ggtcgccatcccagaaaaa

SEQ ID NO: 403574 - DNA, 19 bp, Homo sapiens
  siRNA target sequence for BC008967 (NM_033201.1,521-539).
gagaggatgagctaatcca

SEQ ID NO: 403575 - DNA, 19 bp, Homo sapiens
  siRNA target sequence for BC008967 (NM_033201.1,634-652).
gatttcctgagaatcaagt

SEQ ID NO: 403576 - DNA, 19 bp, Homo sapiens
  siRNA target sequence for BC008967 (NM_033201.1,659-677).
ctctagacaaagtaaccaa

SEQ ID NO: 403577 - DNA, 19 bp, Homo sapiens
  siRNA target sequence for BC008967 (NM_033201.1,751-769).
ctggcactgatcaaggatt

SEQ ID NO: 403578 - DNA, 19 bp, Homo sapiens
  siRNA target sequence for LOC90355 (NM_033211.2,272-290).
ggaagtcgatattaatgga

SEQ ID NO: 403579 - DNA, 19 bp, Homo sapiens
  siRNA target sequence for LOC90355 (NM_033211.2,432-450).
cacatggactctaactatt

SEQ ID NO: 403580 - DNA, 19 bp, Homo sapiens
  siRNA target sequence for LOC90355 (NM_033211.2,437-455).
ggactctaactatttggtt

SEQ ID NO: 403581 - DNA, 19 bp, Homo sapiens
  siRNA target sequence for LOC90355 (NM_033211.2,571-589).
cccgttcctctcgtttgta

SEQ ID NO: 403582 - DNA, 19 bp, Homo sapiens
  siRNA target sequence for LOC90355 (NM_033211.2,572-590).
ccgttcctctcgtttgtat

SEQ ID NO: 403583 - DNA, 19 bp, Homo sapiens
  siRNA target sequence for LOC90355 (NM_033211.2,573-591).
cgttcctctcgtttgtata

SEQ ID NO: 403584 - DNA, 19 bp, Homo sapiens
  siRNA target sequence for LOC90355 (NM_033211.2,574-592).
gttcctctcgtttgtataa

SEQ ID NO: 403585 - DNA, 19 bp, Homo sapiens
  siRNA target sequence for LOC90355 (NM_033211.2,620-638).
cgagattccagctgtcaat

SEQ ID NO: 403586 - DNA, 19 bp, Homo sapiens
  siRNA target sequence for LOC90355 (NM_033211.2,672-690).
gacaagtgcactaaatctt

SEQ ID NO: 403587 - DNA, 19 bp, Homo sapiens
  siRNA target sequence for LOC90355 (NM_033211.2,674-692).
caagtgcactaaatcttta

SEQ ID NO: 403588 - DNA, 19 bp, Homo sapiens
  siRNA target sequence for LOC90355 (NM_033211.2,677-695).
gtgcactaaatctttacct

SEQ ID NO: 403589 - DNA, 19 bp, Homo sapiens
  siRNA target sequence for LOC90355 (NM_033211.2,679-697).
gcactaaatctttacctta

SEQ ID NO: 403590 - DNA, 19 bp, Homo sapiens
  siRNA target sequence for LOC90355 (NM_033211.2,774-792).
gactacctcaatctagata

SEQ ID NO: 403591 - DNA, 19 bp, Homo sapiens
  siRNA target sequence for LOC90355 (NM_033211.2,776-794).
ctacctcaatctagataaa

SEQ ID NO: 403592 - DNA, 19 bp, Homo sapiens
  siRNA target sequence for LOC90355 (NM_033211.2,858-876).
ggggaccgtgtgtttgcta

SEQ ID NO: 403593 - DNA, 19 bp, Homo sapiens
  siRNA target sequence for LOC90355 (NM_033211.2,869-887).
gtttgctaggaataataca

SEQ ID NO: 403594 - DNA, 19 bp, Homo sapiens
  siRNA target sequence for MGC10992 (NM_033212.2,517-535).
gccaattggcgcgagaaat

SEQ ID NO: 403595 - DNA, 19 bp, Homo sapiens
  siRNA target sequence for MGC10992 (NM_033212.2,1035-1053).
ggcgttgagcaggaacatt

SEQ ID NO: 403596 - DNA, 19 bp, Homo sapiens
  siRNA target sequence for MGC10992 (NM_033212.2,1037-1055).
cgttgagcaggaacattga

SEQ ID NO: 403597 - DNA, 19 bp, Homo sapiens
  siRNA target sequence for MGC10992 (NM_033212.2,1322-1340).
gccttgagcgggagaacaa

SEQ ID NO: 403598 - DNA, 19 bp, Homo sapiens
  siRNA target sequence for MGC10992 (NM_033212.2,1441-1459).
gcgctcttcgagaagaaca

SEQ ID NO: 403599 - DNA, 19 bp, Homo sapiens
  siRNA target sequence for MGC10992 (NM_033212.2,1442-1460).
cgctcttcgagaagaacaa

SEQ ID NO: 403600 - DNA, 19 bp, Homo sapiens
  siRNA target sequence for PSIP2 (NM_033222.2,1371-1389).
ggatacatgctgagattaa

SEQ ID NO: 403601 - DNA, 19 bp, Homo sapiens
  siRNA target sequence for PSIP2 (NM_033222.2,1495-1513).
gatgattactacactgaaa

SEQ ID NO: 403602 - DNA, 19 bp, Homo sapiens
  siRNA target sequence for PSIP2 (NM_033222.2,1521-1539).
ggcgattcaaagttagtca

SEQ ID NO: 403603 - DNA, 19 bp, Homo sapiens
  siRNA target sequence for PSIP2 (NM_033222.2,1560-1578).
caatgttgtataacaagtt

SEQ ID NO: 403604 - DNA, 19 bp, Homo sapiens
  siRNA target sequence for PSIP2 (NM_033222.2,1638-1656).
ctcttgctgaacaaagaca

SEQ ID NO: 403605 - DNA, 19 bp, Homo sapiens
  siRNA target sequence for PSIP2 (NM_033222.2,1661-1679).
gaggaagcgaataaaacca

SEQ ID NO: 403606 - DNA, 19 bp, Homo sapiens
  siRNA target sequence for PSIP2 (NM_033222.2,1728-1746).
cagggtcaaagactctaaa

SEQ ID NO: 403607 - DNA, 19 bp, Homo sapiens
  siRNA target sequence for PSIP2 (NM_033222.2,1732-1750).
gtcaaagactctaaatgga

SEQ ID NO: 403608 - DNA, 19 bp, Homo sapiens
  siRNA target sequence for PSIP2 (NM_033222.2,1769-1787).
ggtaatcagccacaacata

SEQ ID NO: 403609 - DNA, 19 bp, Homo sapiens
  siRNA target sequence for PSIP2 (NM_033222.2,1770-1788).
gtaatcagccacaacataa

SEQ ID NO: 403610 - DNA, 19 bp, Homo sapiens
  siRNA target sequence for PSIP2 (NM_033222.2,1879-1897).
gaaggattctacactagat

SEQ ID NO: 403611 - DNA, 19 bp, Homo sapiens
  siRNA target sequence for PSIP2 (NM_033222.2,1883-1901).
gattctacactagataact

SEQ ID NO: 403612 - DNA, 19 bp, Homo sapiens
  siRNA target sequence for PURB (NM_033224.2,270-288).
cgctgggcgacttcataga

SEQ ID NO: 403613 - DNA, 19 bp, Homo sapiens
  siRNA target sequence for PURB (NM_033224.2,271-289).
gctgggcgacttcatagaa

SEQ ID NO: 403614 - DNA, 19 bp, Homo sapiens
  siRNA target sequence for PURB (NM_033224.2,365-383).
gcgctcaagagcgaattct

SEQ ID NO: 403615 - DNA, 19 bp, Homo sapiens
  siRNA target sequence for PURB (NM_033224.2,366-384).
cgctcaagagcgaattctt

SEQ ID NO: 403616 - DNA, 19 bp, Homo sapiens
  siRNA target sequence for PURB (NM_033224.2,784-802).
catcaccgtacccttcaaa

SEQ ID NO: 403617 - DNA, 19 bp, Homo sapiens
  siRNA target sequence for PURB (NM_033224.2,834-852).
ggtatgcggatgagatgaa

SEQ ID NO: 403618 - DNA, 19 bp, Homo sapiens
  siRNA target sequence for PURB (NM_033224.2,835-853).
gtatgcggatgagatgaaa

SEQ ID NO: 403619 - DNA, 19 bp, Homo sapiens
  siRNA target sequence for PURB (NM_033224.2,840-858).
cggatgagatgaaagaaat

SEQ ID NO: 403620 - DNA, 19 bp, Homo sapiens
  siRNA target sequence for PURB (NM_033224.2,867-885).
gacagagggataagcttta

SEQ ID NO: 403621 - DNA, 19 bp, Homo sapiens
  siRNA target sequence for EPSTI1 (NM_033255.1,266-284).
caccttgatagcaccaaat

SEQ ID NO: 403622 - DNA, 19 bp, Homo sapiens
  siRNA target sequence for EPSTI1 (NM_033255.1,268-286).
ccttgatagcaccaaatat

SEQ ID NO: 403623 - DNA, 19 bp, Homo sapiens
  siRNA target sequence for EPSTI1 (NM_033255.1,350-368).
ggagcagaacagagctaaa

SEQ ID NO: 403624 - DNA, 19 bp, Homo sapiens
  siRNA target sequence for EPSTI1 (NM_033255.1,435-453).
caactccagctgatgcaat

SEQ ID NO: 403625 - DNA, 19 bp, Homo sapiens
  siRNA target sequence for EPSTI1 (NM_033255.1,438-456).
ctccagctgatgcaatcta

SEQ ID NO: 403626 - DNA, 19 bp, Homo sapiens
  siRNA target sequence for EPSTI1 (NM_033255.1,440-458).
ccagctgatgcaatctaaa

SEQ ID NO: 403627 - DNA, 19 bp, Homo sapiens
  siRNA target sequence for EPSTI1 (NM_033255.1,441-459).
cagctgatgcaatctaaat

SEQ ID NO: 403628 - DNA, 19 bp, Homo sapiens
  siRNA target sequence for EPSTI1 (NM_033255.1,444-462).
ctgatgcaatctaaataca

SEQ ID NO: 403629 - DNA, 19 bp, Homo sapiens
  siRNA target sequence for EPSTI1 (NM_033255.1,454-472).
ctaaatacaagcaaaagct

SEQ ID NO: 403630 - DNA, 19 bp, Homo sapiens
  siRNA target sequence for EPSTI1 (NM_033255.1,516-534).
gctgaactccaaaaaatga

SEQ ID NO: 403631 - DNA, 19 bp, Homo sapiens
  siRNA target sequence for EPSTI1 (NM_033255.1,517-535).
ctgaactccaaaaaatgaa

SEQ ID NO: 403632 - DNA, 19 bp, Homo sapiens
  siRNA target sequence for EPSTI1 (NM_033255.1,672-690).
gacagaagtgcctgtcaaa

SEQ ID NO: 403633 - DNA, 19 bp, Homo sapiens
  siRNA target sequence for EPSTI1 (NM_033255.1,702-720).
ggcccacaatcctcaacat

SEQ ID NO: 403634 - DNA, 19 bp, Homo sapiens
  siRNA target sequence for EPSTI1 (NM_033255.1,733-751).
gggcttacagagattctct

SEQ ID NO: 403635 - DNA, 19 bp, Homo sapiens
  siRNA target sequence for EPSTI1 (NM_033255.1,734-752).
ggcttacagagattctcta

SEQ ID NO: 403636 - DNA, 19 bp, Homo sapiens
  siRNA target sequence for EPSTI1 (NM_033255.1,735-753).
gcttacagagattctctaa

SEQ ID NO: 403637 - DNA, 19 bp, Homo sapiens
  siRNA target sequence for EPSTI1 (NM_033255.1,782-800).
gatgaaggatgaacaacat

SEQ ID NO: 403638 - DNA, 19 bp, Homo sapiens
  siRNA target sequence for EPSTI1 (NM_033255.1,808-826).
gtgaattactggaactgaa

SEQ ID NO: 403639 - DNA, 19 bp, Homo sapiens
  siRNA target sequence for EPSTI1 (NM_033255.1,870-888).
gaacacaggagggtaaata

SEQ ID NO: 403640 - DNA, 19 bp, Homo sapiens
  siRNA target sequence for EPSTI1 (NM_033255.1,877-895).
ggagggtaaataatgcttt

SEQ ID NO: 403641 - DNA, 19 bp, Homo sapiens
  siRNA target sequence for EPSTI1 (NM_033255.1,902-920).
ccgactccaaggcaaaagt

SEQ ID NO: 403642 - DNA, 19 bp, Homo sapiens
  siRNA target sequence for EPSTI1 (NM_033255.1,946-964).
gaggctgttggaatatgaa

SEQ ID NO: 403643 - DNA, 19 bp, Homo sapiens
  siRNA target sequence for EPSTI1 (NM_033255.1,969-987).
ggtaacagctggggtatat

SEQ ID NO: 403644 - DNA, 19 bp, Homo sapiens
  siRNA target sequence for PPP1R14A (NM_033256.1,399-417).
cagacatgcccgatgagat

SEQ ID NO: 403645 - DNA, 19 bp, Homo sapiens
  siRNA target sequence for PPP1R14A (NM_033256.1,408-426).
ccgatgagatcaacattga

SEQ ID NO: 403646 - DNA, 19 bp, Homo sapiens
  siRNA target sequence for IRX2 (NM_033267.1,772-790).
ggagtgcaaggacaagtat

SEQ ID NO: 403647 - DNA, 19 bp, Homo sapiens
  siRNA target sequence for IRX2 (NM_033267.1,1226-1244).
ggtctcctgcggtacaact

SEQ ID NO: 403648 - DNA, 19 bp, Homo sapiens
  siRNA target sequence for IRX2 (NM_033267.1,1357-1375).
ctacgagcccaagaaagat

SEQ ID NO: 403649 - DNA, 19 bp, Homo sapiens
  siRNA target sequence for LACRT (NM_033277.1,145-163).
ggacctctaagcctaatga

SEQ ID NO: 403650 - DNA, 19 bp, Homo sapiens
  siRNA target sequence for LACRT (NM_033277.1,146-164).
gacctctaagcctaatgaa

SEQ ID NO: 403651 - DNA, 19 bp, Homo sapiens
  siRNA target sequence for LACRT (NM_033277.1,279-297).
ctaaaccccctgaaatcca

SEQ ID NO: 403652 - DNA, 19 bp, Homo sapiens
  siRNA target sequence for LACRT (NM_033277.1,305-323).
gaaaagtatcttactaaca

SEQ ID NO: 403653 - DNA, 19 bp, Homo sapiens
  siRNA target sequence for LACRT (NM_033277.1,364-382).
gcgtgccaggtggaaaaca

SEQ ID NO: 403654 - DNA, 19 bp, Homo sapiens
  siRNA target sequence for LACRT (NM_033277.1,370-388).
caggtggaaaacaattcat

SEQ ID NO: 403655 - DNA, 19 bp, Homo sapiens
  siRNA target sequence for TBL1Y (NM_033284.1,893-911).
cctgatagttgctgtgatt

SEQ ID NO: 403656 - DNA, 19 bp, Homo sapiens
  siRNA target sequence for TBL1Y (NM_033284.1,1090-1108).
gagcacatgaaatcaataa

SEQ ID NO: 403657 - DNA, 19 bp, Homo sapiens
  siRNA target sequence for TBL1Y (NM_033284.1,1333-1351).
ggcacgacgtcccaagtaa

SEQ ID NO: 403658 - DNA, 19 bp, Homo sapiens
  siRNA target sequence for TBL1Y (NM_033284.1,1334-1352).
gcacgacgtcccaagtaat

SEQ ID NO: 403659 - DNA, 19 bp, Homo sapiens
  siRNA target sequence for TBL1Y (NM_033284.1,1335-1353).
cacgacgtcccaagtaata

SEQ ID NO: 403660 - DNA, 19 bp, Homo sapiens
  siRNA target sequence for TBL1Y (NM_033284.1,1337-1355).
cgacgtcccaagtaataaa

SEQ ID NO: 403661 - DNA, 19 bp, Homo sapiens
  siRNA target sequence for TBL1Y (NM_033284.1,1340-1358).
cgtcccaagtaataaagat

SEQ ID NO: 403662 - DNA, 19 bp, Homo sapiens
  siRNA target sequence for TBL1Y (NM_033284.1,1478-1496).
ccccatcttcgctctgaaa

SEQ ID NO: 403663 - DNA, 19 bp, Homo sapiens
  siRNA target sequence for TBL1Y (NM_033284.1,1479-1497).
cccatcttcgctctgaaat

SEQ ID NO: 403664 - DNA, 19 bp, Homo sapiens
  siRNA target sequence for TBL1Y (NM_033284.1,1822-1840).
catgcgtccacgatcttca

SEQ ID NO: 403665 - DNA, 19 bp, Homo sapiens
  siRNA target sequence for TP53INP1 (NM_033285.2,406-424).
ccaaccaagaaccagaatt

SEQ ID NO: 403666 - DNA, 19 bp, Homo sapiens
  siRNA target sequence for TP53INP1 (NM_033285.2,453-471).
cttgttgacttcatagata

SEQ ID NO: 403667 - DNA, 19 bp, Homo sapiens
  siRNA target sequence for TP53INP1 (NM_033285.2,576-594).
gagtgcttggctgatacaa

SEQ ID NO: 403668 - DNA, 19 bp, Homo sapiens
  siRNA target sequence for TP53INP1 (NM_033285.2,581-599).
cttggctgatacaagtgat

SEQ ID NO: 403669 - DNA, 19 bp, Homo sapiens
  siRNA target sequence for TP53INP1 (NM_033285.2,675-693).
ggtggattaaccactatca

SEQ ID NO: 403670 - DNA, 19 bp, Homo sapiens
  siRNA target sequence for TP53INP1 (NM_033285.2,676-694).
gtggattaaccactatcaa

SEQ ID NO: 403671 - DNA, 19 bp, Homo sapiens
  siRNA target sequence for TP53INP1 (NM_033285.2,745-763).
ctgtctatgctgtgcataa

SEQ ID NO: 403672 - DNA, 19 bp, Homo sapiens
  siRNA target sequence for TP53INP1 (NM_033285.2,788-806).
cacccgtgggactgatgaa

SEQ ID NO: 403673 - DNA, 19 bp, Homo sapiens
  siRNA target sequence for TP53INP1 (NM_033285.2,790-808).
cccgtgggactgatgaatt

SEQ ID NO: 403674 - DNA, 19 bp, Homo sapiens
  siRNA target sequence for TP53INP1 (NM_033285.2,793-811).
gtgggactgatgaattaca

SEQ ID NO: 403675 - DNA, 19 bp, Homo sapiens
  siRNA target sequence for TP53INP1 (NM_033285.2,795-813).
gggactgatgaattacata

SEQ ID NO: 403676 - DNA, 19 bp, Homo sapiens
  siRNA target sequence for TP53INP1 (NM_033285.2,852-870).
gggcagcatattcattgtt

SEQ ID NO: 403677 - DNA, 19 bp, Homo sapiens
  siRNA target sequence for TP53INP1 (NM_033285.2,853-871).
ggcagcatattcattgtta

SEQ ID NO: 403678 - DNA, 19 bp, Homo sapiens
  siRNA target sequence for TP53INP1 (NM_033285.2,854-872).
gcagcatattcattgttat

SEQ ID NO: 403679 - DNA, 19 bp, Homo sapiens
  siRNA target sequence for TP53INP1 (NM_033285.2,879-897).
gctcttgctgctcatacaa

SEQ ID NO: 403680 - DNA, 19 bp, Homo sapiens
  siRNA target sequence for TP53INP1 (NM_033285.2,882-900).
cttgctgctcatacaactt

SEQ ID NO: 403681 - DNA, 19 bp, Homo sapiens
  siRNA target sequence for TP53INP1 (NM_033285.2,924-942).
cgcccttcccagtggataa

SEQ ID NO: 403682 - DNA, 19 bp, Homo sapiens
  siRNA target sequence for TP53INP1 (NM_033285.2,925-943).
gcccttcccagtggataaa

SEQ ID NO: 403683 - DNA, 19 bp, Homo sapiens
  siRNA target sequence for TP53INP1 (NM_033285.2,954-972).
gaaagacagcctcttaaca

SEQ ID NO: 403684 - DNA, 19 bp, Homo sapiens
  siRNA target sequence for TP53INP1 (NM_033285.2,979-997).
gccttcgtcgccaaaatct

SEQ ID NO: 403685 - DNA, 19 bp, Homo sapiens
  siRNA target sequence for TP53INP1 (NM_033285.2,980-998).
ccttcgtcgccaaaatctt

SEQ ID NO: 403686 - DNA, 19 bp, Homo sapiens
  siRNA target sequence for TP53INP1 (NM_033285.2,981-999).
cttcgtcgccaaaatctta

SEQ ID NO: 403687 - DNA, 19 bp, Homo sapiens
  siRNA target sequence for TP53INP1 (NM_033285.2,1009-1027).
gccaccctcggcaagtcaa

SEQ ID NO: 403688 - DNA, 19 bp, Homo sapiens
  siRNA target sequence for ZD52F10 (NM_033317.2,361-379).
gcagctggctctaaagtca

SEQ ID NO: 403689 - DNA, 19 bp, Homo sapiens
  siRNA target sequence for ZD52F10 (NM_033317.2,699-717).
cggataccccggaaactca

SEQ ID NO: 403690 - DNA, 19 bp, Homo sapiens
  siRNA target sequence for ZD52F10 (NM_033317.2,1224-1242).
gacgtctcctgggatgttt

SEQ ID NO: 403691 - DNA, 19 bp, Homo sapiens
  siRNA target sequence for ZD52F10 (NM_033317.2,1226-1244).
cgtctcctgggatgtttaa

SEQ ID NO: 403692 - DNA, 19 bp, Homo sapiens
  siRNA target sequence for ZD52F10 (NM_033317.2,1232-1250).
ctgggatgtttaactttga

SEQ ID NO: 403693 - DNA, 19 bp, Homo sapiens
  siRNA target sequence for ZD52F10 (NM_033317.2,1274-1292).
ccaagctgggtttcatcaa

SEQ ID NO: 403694 - DNA, 19 bp, Homo sapiens
  siRNA target sequence for ZD52F10 (NM_033317.2,1295-1313).
gggatgccataaacaagaa

SEQ ID NO: 403695 - DNA, 19 bp, Homo sapiens
  siRNA target sequence for ZD52F10 (NM_033317.2,1355-1373).
gccgactctgggaggattt

SEQ ID NO: 403696 - DNA, 19 bp, Homo sapiens
  siRNA target sequence for ZD52F10 (NM_033317.2,1498-1516).
gcctatggtgggaagtact

SEQ ID NO: 403697 - DNA, 19 bp, Homo sapiens
  siRNA target sequence for ZD52F10 (NM_033317.2,1584-1602).
gctgcagtgggtgaagttt

SEQ ID NO: 403698 - DNA, 19 bp, Homo sapiens
  siRNA target sequence for LOC91689 (NM_033318.3,87-105).
gcggctcgctggctagtat

SEQ ID NO: 403699 - DNA, 19 bp, Homo sapiens
  siRNA target sequence for LOC91689 (NM_033318.3,88-106).
cggctcgctggctagtatt

SEQ ID NO: 403700 - DNA, 19 bp, Homo sapiens
  siRNA target sequence for LOC91689 (NM_033318.3,140-158).
gcctagcttgaggaaagat

SEQ ID NO: 403701 - DNA, 19 bp, Homo sapiens
  siRNA target sequence for LOC91689 (NM_033318.3,312-330).
gtcgggacactcattagca

SEQ ID NO: 403702 - DNA, 19 bp, Homo sapiens
  siRNA target sequence for AAT1 (NM_033364.2,112-130).
gccgcaggtgtctcaaact

SEQ ID NO: 403703 - DNA, 19 bp, Homo sapiens
  siRNA target sequence for AAT1 (NM_033364.2,169-187).
ctccaatcgagcgtatgat

SEQ ID NO: 403704 - DNA, 19 bp, Homo sapiens
  siRNA target sequence for AAT1 (NM_033364.2,171-189).
ccaatcgagcgtatgattt

SEQ ID NO: 403705 - DNA, 19 bp, Homo sapiens
  siRNA target sequence for AAT1 (NM_033364.2,172-190).
caatcgagcgtatgatttt

SEQ ID NO: 403706 - DNA, 19 bp, Homo sapiens
  siRNA target sequence for AAT1 (NM_033364.2,176-194).
cgagcgtatgattttctgt

SEQ ID NO: 403707 - DNA, 19 bp, Homo sapiens
  siRNA target sequence for AAT1 (NM_033364.2,177-195).
gagcgtatgattttctgta

SEQ ID NO: 403708 - DNA, 19 bp, Homo sapiens
  siRNA target sequence for AAT1 (NM_033364.2,191-209).
ctgtacgatccattgttta

SEQ ID NO: 403709 - DNA, 19 bp, Homo sapiens
  siRNA target sequence for AAT1 (NM_033364.2,193-211).
gtacgatccattgtttatt

SEQ ID NO: 403710 - DNA, 19 bp, Homo sapiens
  siRNA target sequence for AAT1 (NM_033364.2,219-237).
gtgagaaagaccatacaca

SEQ ID NO: 403711 - DNA, 19 bp, Homo sapiens
  siRNA target sequence for AAT1 (NM_033364.2,227-245).
gaccatacacaggcaaata

SEQ ID NO: 403712 - DNA, 19 bp, Homo sapiens
  siRNA target sequence for AAT1 (NM_033364.2,304-322).
cagtaacctgatccattat

SEQ ID NO: 403713 - DNA, 19 bp, Homo sapiens
  siRNA target sequence for AAT1 (NM_033364.2,313-331).
gatccattatccaagatat

SEQ ID NO: 403714 - DNA, 19 bp, Homo sapiens
  siRNA target sequence for AAT1 (NM_033364.2,316-334).
ccattatccaagatattct

SEQ ID NO: 403715 - DNA, 19 bp, Homo sapiens
  siRNA target sequence for AAT1 (NM_033364.2,389-407).
ggacataaggagaaacaca

SEQ ID NO: 403716 - DNA, 19 bp, Homo sapiens
  siRNA target sequence for AAT1 (NM_033364.2,429-447).
ccacaactgacgcttcttt

SEQ ID NO: 403717 - DNA, 19 bp, Homo sapiens
  siRNA target sequence for AAT1 (NM_033364.2,497-515).
cgctataaatactttgaaa

SEQ ID NO: 403718 - DNA, 19 bp, Homo sapiens
  siRNA target sequence for AAT1 (NM_033364.2,571-589).
caaggcagaaccatacact

SEQ ID NO: 403719 - DNA, 19 bp, Homo sapiens
  siRNA target sequence for AAT1 (NM_033364.2,574-592).
ggcagaaccatacactttt

SEQ ID NO: 403720 - DNA, 19 bp, Homo sapiens
  siRNA target sequence for AAT1 (NM_033364.2,603-621).
ctactaagcacctatccat

SEQ ID NO: 403721 - DNA, 19 bp, Homo sapiens
  siRNA target sequence for AAT1 (NM_033364.2,640-658).
gggcactcagactgattat

SEQ ID NO: 403722 - DNA, 19 bp, Homo sapiens
  siRNA target sequence for AAT1 (NM_033364.2,846-864).
gtgacacctcccagtttga

SEQ ID NO: 403723 - DNA, 19 bp, Homo sapiens
  siRNA target sequence for AAT1 (NM_033364.2,943-961).
gattcgcctggaagttcta

SEQ ID NO: 403724 - DNA, 19 bp, Homo sapiens
  siRNA target sequence for AAT1 (NM_033364.2,979-997).
gcgtgaagagaatcagaat

SEQ ID NO: 403725 - DNA, 19 bp, Homo sapiens
  siRNA target sequence for AAT1 (NM_033364.2,1018-1036).
gaatgcccggtggtctaaa

SEQ ID NO: 403726 - DNA, 19 bp, Homo sapiens
  siRNA target sequence for AAT1 (NM_033364.2,1073-1091).
cagcgcacgcatgtatcaa

SEQ ID NO: 403727 - DNA, 19 bp, Homo sapiens
  siRNA target sequence for AAT1 (NM_033364.2,1075-1093).
gcgcacgcatgtatcaaca

SEQ ID NO: 403728 - DNA, 19 bp, Homo sapiens
  siRNA target sequence for AAT1 (NM_033364.2,1076-1094).
cgcacgcatgtatcaacaa

SEQ ID NO: 403729 - DNA, 19 bp, Homo sapiens
  siRNA target sequence for AAT1 (NM_033364.2,1077-1095).
gcacgcatgtatcaacaat

SEQ ID NO: 403730 - DNA, 19 bp, Homo sapiens
  siRNA target sequence for AAT1 (NM_033364.2,1159-1177).
ggattattctgattatgca

SEQ ID NO: 403731 - DNA, 19 bp, Homo sapiens
  siRNA target sequence for AAT1 (NM_033364.2,1160-1178).
gattattctgattatgcat

SEQ ID NO: 403732 - DNA, 19 bp, Homo sapiens
  siRNA target sequence for AAT1 (NM_033364.2,1235-1253).
gactttgtagtaaaaaact

SEQ ID NO: 403733 - DNA, 19 bp, Homo sapiens
  siRNA target sequence for AAT1 (NM_033364.2,1244-1262).
gtaaaaaactactatctca

SEQ ID NO: 403734 - DNA, 19 bp, Homo sapiens
  siRNA target sequence for AAT1 (NM_033364.2,1255-1273).
ctatctcaacacctatgaa

SEQ ID NO: 403735 - DNA, 19 bp, Homo sapiens
  siRNA target sequence for AAT1 (NM_033364.2,1329-1347).
gagctccaaaacctaaagt

SEQ ID NO: 403736 - DNA, 19 bp, Homo sapiens
  siRNA target sequence for AAT1 (NM_033364.2,1332-1350).
ctccaaaacctaaagtcat

SEQ ID NO: 403737 - DNA, 19 bp, Homo sapiens
  siRNA target sequence for AAT1 (NM_033364.2,1380-1398).
cagcaaggttggactatga

SEQ ID NO: 403738 - DNA, 19 bp, Homo sapiens
  siRNA target sequence for AAT1 (NM_033364.2,1412-1430).
cataaggcactgttggata

SEQ ID NO: 403739 - DNA, 19 bp, Homo sapiens
  siRNA target sequence for AAT1 (NM_033364.2,1463-1481).
cctcgcttccttcaaagaa

SEQ ID NO: 403740 - DNA, 19 bp, Homo sapiens
  siRNA target sequence for AAT1 (NM_033364.2,1464-1482).
ctcgcttccttcaaagaaa

SEQ ID NO: 403741 - DNA, 19 bp, Homo sapiens
  siRNA target sequence for AAT1 (NM_033364.2,1505-1523).
ccaactccaaccttggaaa

SEQ ID NO: 403742 - DNA, 19 bp, Homo sapiens
  siRNA target sequence for AAT1 (NM_033364.2,1506-1524).
caactccaaccttggaaat

SEQ ID NO: 403743 - DNA, 19 bp, Homo sapiens
  siRNA target sequence for AAT1 (NM_033364.2,1556-1574).
gctgtgatctaccttcaaa

SEQ ID NO: 403744 - DNA, 19 bp, Homo sapiens
  siRNA target sequence for AAT1 (NM_033364.2,1561-1579).
gatctaccttcaaaagtta

SEQ ID NO: 403745 - DNA, 19 bp, Homo sapiens
  siRNA target sequence for AAT1 (NM_033364.2,1592-1610).
gtcgttcagaacatgatgt

SEQ ID NO: 403746 - DNA, 19 bp, Homo sapiens
  siRNA target sequence for AAT1 (NM_033364.2,1654-1672).
cacctgccacgcactacaa

SEQ ID NO: 403747 - DNA, 19 bp, Homo sapiens
  siRNA target sequence for AAT1 (NM_033364.2,1656-1674).
cctgccacgcactacaaga

SEQ ID NO: 403748 - DNA, 19 bp, Homo sapiens
  siRNA target sequence for AAT1 (NM_033364.2,1659-1677).
gccacgcactacaagaaga

SEQ ID NO: 403749 - DNA, 19 bp, Homo sapiens
  siRNA target sequence for AAT1 (NM_033364.2,1660-1678).
ccacgcactacaagaagat

SEQ ID NO: 403750 - DNA, 19 bp, Homo sapiens
  siRNA target sequence for AAT1 (NM_033364.2,1794-1812).
gggcactagcagacatgtt

SEQ ID NO: 403751 - DNA, 19 bp, Homo sapiens
  siRNA target sequence for AAT1 (NM_033364.2,1795-1813).
ggcactagcagacatgttt

SEQ ID NO: 403752 - DNA, 19 bp, Homo sapiens
  siRNA target sequence for AAT1 (NM_033364.2,1799-1817).
ctagcagacatgtttgact

SEQ ID NO: 403753 - DNA, 19 bp, Homo sapiens
  siRNA target sequence for AAT1 (NM_033364.2,1952-1970).
gaggaggacgagatattta

SEQ ID NO: 403754 - DNA, 19 bp, Homo sapiens
  siRNA target sequence for AAT1 (NM_033364.2,1979-1997).
gttaaagttcaccatagta

SEQ ID NO: 403755 - DNA, 19 bp, Homo sapiens
  siRNA target sequence for AAT1 (NM_033364.2,1985-2003).
gttcaccatagtactataa

SEQ ID NO: 403756 - DNA, 19 bp, Homo sapiens
  siRNA target sequence for AAT1 (NM_033364.2,1988-2006).
caccatagtactataagct

SEQ ID NO: 403757 - DNA, 19 bp, Homo sapiens
  siRNA target sequence for AAT1 (NM_033364.2,2004-2022).
gctcctacctagaagacat

SEQ ID NO: 403758 - DNA, 19 bp, Homo sapiens
  siRNA target sequence for AAT1 (NM_033364.2,2005-2023).
ctcctacctagaagacata

SEQ ID NO: 403759 - DNA, 19 bp, Homo sapiens
  siRNA target sequence for AAT1 (NM_033364.2,2029-2047).
gaataccgaagcgaatact
